United States Patent Application Publication US 2014/0004565 A1 - sequence listing, part 10

SEQ ID NO: 115929 - RNA, 19 nt, Artificial Sequence
  Description of Artificial Sequence: Synthetic oligonucleotide
ccacgcuggaucaguggca

SEQ ID NO: 115930 - RNA, 19 nt, Artificial Sequence
  Description of Artificial Sequence: Synthetic oligonucleotide
uucgugccuccagccgauc

SEQ ID NO: 115931 - RNA, 19 nt, Artificial Sequence
  Description of Artificial Sequence: Synthetic oligonucleotide
gcuuugcgggaaaacaaau

SEQ ID NO: 115932 - RNA, 19 nt, Artificial Sequence
  Description of Artificial Sequence: Synthetic oligonucleotide
ccuuuuccgcuuugcggga

SEQ ID NO: 115933 - RNA, 19 nt, Artificial Sequence
  Description of Artificial Sequence: Synthetic oligonucleotide
gcuuuccggcacccacuac

SEQ ID NO: 115934 - RNA, 19 nt, Artificial Sequence
  Description of Artificial Sequence: Synthetic oligonucleotide
gccaguccagugaacggaa

SEQ ID NO: 115935 - RNA, 19 nt, Artificial Sequence
  Description of Artificial Sequence: Synthetic oligonucleotide
ggcugcgcgacuggcacaa

SEQ ID NO: 115936 - RNA, 19 nt, Artificial Sequence
  Description of Artificial Sequence: Synthetic oligonucleotide
cagucagcgcugcugucau

SEQ ID NO: 115937 - RNA, 19 nt, Artificial Sequence
  Description of Artificial Sequence: Synthetic oligonucleotide
ccccacgcccgaugaugcg

SEQ ID NO: 115938 - RNA, 19 nt, Artificial Sequence
  Description of Artificial Sequence: Synthetic oligonucleotide
ccgcggauuuuaagcagga

SEQ ID NO: 115939 - RNA, 19 nt, Artificial Sequence
  Description of Artificial Sequence: Synthetic oligonucleotide
ccuuuuguguccuccucau

SEQ ID NO: 115940 - RNA, 19 nt, Artificial Sequence
  Description of Artificial Sequence: Synthetic oligonucleotide
guucaagccccaggauuau

SEQ ID NO: 115941 - RNA, 19 nt, Artificial Sequence
  Description of Artificial Sequence: Synthetic oligonucleotide
cacacauggcugcgcgacu

SEQ ID NO: 115942 - RNA, 19 nt, Artificial Sequence
  Description of Artificial Sequence: Synthetic oligonucleotide
caaggaccuaggagccagu

SEQ ID NO: 115943 - RNA, 19 nt, Artificial Sequence
  Description of Artificial Sequence: Synthetic oligonucleotide
cgcaugucggccuccgaga

SEQ ID NO: 115944 - RNA, 19 nt, Artificial Sequence
  Description of Artificial Sequence: Synthetic oligonucleotide
guguugcaccuuccuuccu

SEQ ID NO: 115945 - RNA, 19 nt, Artificial Sequence
  Description of Artificial Sequence: Synthetic oligonucleotide
guaccgccgcugccacuga

SEQ ID NO: 115946 - RNA, 19 nt, Artificial Sequence
  Description of Artificial Sequence: Synthetic oligonucleotide
gucggccuccgagaagacu

SEQ ID NO: 115947 - RNA, 19 nt, Artificial Sequence
  Description of Artificial Sequence: Synthetic oligonucleotide
ccacgacccagacagccua

SEQ ID NO: 115948 - RNA, 19 nt, Artificial Sequence
  Description of Artificial Sequence: Synthetic oligonucleotide
ggggugcgcuggcccagcc

SEQ ID NO: 115949 - RNA, 19 nt, Artificial Sequence
  Description of Artificial Sequence: Synthetic oligonucleotide
gggucgcuccucuucccua

SEQ ID NO: 115950 - RNA, 19 nt, Artificial Sequence
  Description of Artificial Sequence: Synthetic oligonucleotide
gggccucacgauaggcauc

SEQ ID NO: 115951 - RNA, 19 nt, Artificial Sequence
  Description of Artificial Sequence: Synthetic oligonucleotide
ccaccgcuccgagauggug

SEQ ID NO: 115952 - RNA, 19 nt, Artificial Sequence
  Description of Artificial Sequence: Synthetic oligonucleotide
gccuccgauugacaucccu

SEQ ID NO: 115953 - RNA, 19 nt, Artificial Sequence
  Description of Artificial Sequence: Synthetic oligonucleotide
ggagacauuugcgcucuuu

SEQ ID NO: 115954 - RNA, 19 nt, Artificial Sequence
  Description of Artificial Sequence: Synthetic oligonucleotide
gcccugggagugaguagac

SEQ ID NO: 115955 - RNA, 19 nt, Artificial Sequence
  Description of Artificial Sequence: Synthetic oligonucleotide
ccucugaguccgggcacac

SEQ ID NO: 115956 - RNA, 19 nt, Artificial Sequence
  Description of Artificial Sequence: Synthetic oligonucleotide
cccaauccacaauugccuu

SEQ ID NO: 115957 - RNA, 19 nt, Artificial Sequence
  Description of Artificial Sequence: Synthetic oligonucleotide
cccacgcccgaugaugcga

SEQ ID NO: 115958 - RNA, 19 nt, Artificial Sequence
  Description of Artificial Sequence: Synthetic oligonucleotide
cugccgaaaggggcugugu

SEQ ID NO: 115959 - RNA, 19 nt, Artificial Sequence
  Description of Artificial Sequence: Synthetic oligonucleotide
cgagggaaagcaugauccu

SEQ ID NO: 115960 - RNA, 19 nt, Artificial Sequence
  Description of Artificial Sequence: Synthetic oligonucleotide
ccgggacaaggaggacugg

SEQ ID NO: 115961 - RNA, 19 nt, Artificial Sequence
  Description of Artificial Sequence: Synthetic oligonucleotide
gccucgccuucaccccgcc

SEQ ID NO: 115962 - RNA, 19 nt, Artificial Sequence
  Description of Artificial Sequence: Synthetic oligonucleotide
ggccuccgagaagacucca

SEQ ID NO: 115963 - RNA, 19 nt, Artificial Sequence
  Description of Artificial Sequence: Synthetic oligonucleotide
caguguggguggggacaca

SEQ ID NO: 115964 - RNA, 19 nt, Artificial Sequence
  Description of Artificial Sequence: Synthetic oligonucleotide
cgcccgaugaugcgaugca

SEQ ID NO: 115965 - RNA, 19 nt, Artificial Sequence
  Description of Artificial Sequence: Synthetic oligonucleotide
gcugcgcgacuggcacaag

SEQ ID NO: 115966 - RNA, 19 nt, Artificial Sequence
  Description of Artificial Sequence: Synthetic oligonucleotide
cgguugugcauguguucaa

SEQ ID NO: 115967 - RNA, 19 nt, Artificial Sequence
  Description of Artificial Sequence: Synthetic oligonucleotide
gccucacgauaggcaucgc

SEQ ID NO: 115968 - RNA, 19 nt, Artificial Sequence
  Description of Artificial Sequence: Synthetic oligonucleotide
cgacuucggaccacacgcu

SEQ ID NO: 115969 - RNA, 19 nt, Artificial Sequence
  Description of Artificial Sequence: Synthetic oligonucleotide
cagcugcguagaagcgcau

SEQ ID NO: 115970 - RNA, 19 nt, Artificial Sequence
  Description of Artificial Sequence: Synthetic oligonucleotide
ccacgcccgaugaugcgau

SEQ ID NO: 115971 - RNA, 19 nt, Artificial Sequence
  Description of Artificial Sequence: Synthetic oligonucleotide
ccccaccguucaugagauc

SEQ ID NO: 115972 - RNA, 19 nt, Artificial Sequence
  Description of Artificial Sequence: Synthetic oligonucleotide
gcugagggucgcuccucuu

SEQ ID NO: 115973 - RNA, 19 nt, Artificial Sequence
  Description of Artificial Sequence: Synthetic oligonucleotide
cggaccacacgcuccuccu

SEQ ID NO: 115974 - RNA, 19 nt, Artificial Sequence
  Description of Artificial Sequence: Synthetic oligonucleotide
ggcagggguguuagacaau

SEQ ID NO: 115975 - RNA, 19 nt, Artificial Sequence
  Description of Artificial Sequence: Synthetic oligonucleotide
ccucgccuucaccccgcca

SEQ ID NO: 115976 - RNA, 19 nt, Artificial Sequence
  Description of Artificial Sequence: Synthetic oligonucleotide
cgugcauaaugcaguccuu

SEQ ID NO: 115977 - RNA, 19 nt, Artificial Sequence
  Description of Artificial Sequence: Synthetic oligonucleotide
cgaugaugcgaugcacacu

SEQ ID NO: 115978 - RNA, 19 nt, Artificial Sequence
  Description of Artificial Sequence: Synthetic oligonucleotide
gccaccgcuccgagauggu

SEQ ID NO: 115979 - RNA, 19 nt, Artificial Sequence
  Description of Artificial Sequence: Synthetic oligonucleotide
cccgccacucaagucgguu

SEQ ID NO: 115980 - RNA, 19 nt, Artificial Sequence
  Description of Artificial Sequence: Synthetic oligonucleotide
ccgcuccgagauggugaga

SEQ ID NO: 115981 - RNA, 19 nt, Artificial Sequence
  Description of Artificial Sequence: Synthetic oligonucleotide
gcuugccaccgcggauuuu

SEQ ID NO: 115982 - RNA, 19 nt, Artificial Sequence
  Description of Artificial Sequence: Synthetic oligonucleotide
ccccgccacucaagucggu

SEQ ID NO: 115983 - RNA, 19 nt, Artificial Sequence
  Description of Artificial Sequence: Synthetic oligonucleotide
aaaaccucuucuuugacgg

SEQ ID NO: 115984 - RNA, 19 nt, Artificial Sequence
  Description of Artificial Sequence: Synthetic oligonucleotide
aauuaugaucaguuguucc

SEQ ID NO: 115985 - RNA, 19 nt, Artificial Sequence
  Description of Artificial Sequence: Synthetic oligonucleotide
gauaauagcagccaugccc

SEQ ID NO: 115986 - RNA, 19 nt, Artificial Sequence
  Description of Artificial Sequence: Synthetic oligonucleotide
agcacuuuaguacagguac

SEQ ID NO: 115987 - RNA, 19 nt, Artificial Sequence
  Description of Artificial Sequence: Synthetic oligonucleotide
agaaauuggugacauacgg

SEQ ID NO: 115988 - RNA, 19 nt, Artificial Sequence
  Description of Artificial Sequence: Synthetic oligonucleotide
aauagagcacuuuaguaca

SEQ ID NO: 115989 - RNA, 19 nt, Artificial Sequence
  Description of Artificial Sequence: Synthetic oligonucleotide
uuagcuucuacacuggaca

SEQ ID NO: 115990 - RNA, 19 nt, Artificial Sequence
  Description of Artificial Sequence: Synthetic oligonucleotide
aucgucaucauggaaaacc

SEQ ID NO: 115991 - RNA, 19 nt, Artificial Sequence
  Description of Artificial Sequence: Synthetic oligonucleotide
aacuuuccuaguuacagcu

SEQ ID NO: 115992 - RNA, 19 nt, Artificial Sequence
  Description of Artificial Sequence: Synthetic oligonucleotide
ucgaauuaugaucaguugu

SEQ ID NO: 115993 - RNA, 19 nt, Artificial Sequence
  Description of Artificial Sequence: Synthetic oligonucleotide
auaauagcagccaugcccc

SEQ ID NO: 115994 - RNA, 19 nt, Artificial Sequence
  Description of Artificial Sequence: Synthetic oligonucleotide
agaaaugggcagcagcacc

SEQ ID NO: 115995 - RNA, 19 nt, Artificial Sequence
  Description of Artificial Sequence: Synthetic oligonucleotide
agaugcauccacuuguggg

SEQ ID NO: 115996 - RNA, 19 nt, Artificial Sequence
  Description of Artificial Sequence: Synthetic oligonucleotide
gaaaaccucuucuuugacg

SEQ ID NO: 115997 - RNA, 19 nt, Artificial Sequence
  Description of Artificial Sequence: Synthetic oligonucleotide
agugcuaagauaugccagg

SEQ ID NO: 115998 - RNA, 19 nt, Artificial Sequence
  Description of Artificial Sequence: Synthetic oligonucleotide
ucacacgugacuuacaaaa

SEQ ID NO: 115999 - RNA, 19 nt, Artificial Sequence
  Description of Artificial Sequence: Synthetic oligonucleotide
aacgaguacaaaacaauuc

SEQ ID NO: 116000 - RNA, 19 nt, Artificial Sequence
  Description of Artificial Sequence: Synthetic oligonucleotide
uaguauacucauaacaaaa

SEQ ID NO: 116001 - RNA, 19 nt, Artificial Sequence
  Description of Artificial Sequence: Synthetic oligonucleotide
aaaguuaaugaguccccag

SEQ ID NO: 116002 - RNA, 19 nt, Artificial Sequence
  Description of Artificial Sequence: Synthetic oligonucleotide
auuaugaucaguuguuccu

SEQ ID NO: 116003 - RNA, 19 nt, Artificial Sequence
  Description of Artificial Sequence: Synthetic oligonucleotide
auaagauguuaccucagag

SEQ ID NO: 116004 - RNA, 19 nt, Artificial Sequence
  Description of Artificial Sequence: Synthetic oligonucleotide
augccaugaguuuugaguc

SEQ ID NO: 116005 - RNA, 19 nt, Artificial Sequence
  Description of Artificial Sequence: Synthetic oligonucleotide
acuuuuauuccguccaguc

SEQ ID NO: 116006 - RNA, 19 nt, Artificial Sequence
  Description of Artificial Sequence: Synthetic oligonucleotide
aaacccaaguuauugagua

SEQ ID NO: 116007 - RNA, 19 nt, Artificial Sequence
  Description of Artificial Sequence: Synthetic oligonucleotide
uuugaucucaugucuuuag

SEQ ID NO: 116008 - RNA, 19 nt, Artificial Sequence
  Description of Artificial Sequence: Synthetic oligonucleotide
guauauugaccaugaaggg

SEQ ID NO: 116009 - RNA, 19 nt, Artificial Sequence
  Description of Artificial Sequence: Synthetic oligonucleotide
agugguaccggugauuccc

SEQ ID NO: 116010 - RNA, 19 nt, Artificial Sequence
  Description of Artificial Sequence: Synthetic oligonucleotide
acgaaaagcccuugguacc

SEQ ID NO: 116011 - RNA, 19 nt, Artificial Sequence
  Description of Artificial Sequence: Synthetic oligonucleotide
aauugacccugccauucac

SEQ ID NO: 116012 - RNA, 19 nt, Artificial Sequence
  Description of Artificial Sequence: Synthetic oligonucleotide
agacugacccaucuguccc

SEQ ID NO: 116013 - RNA, 19 nt, Artificial Sequence
  Description of Artificial Sequence: Synthetic oligonucleotide
aaacucgggauccagugcu

SEQ ID NO: 116014 - RNA, 19 nt, Artificial Sequence
  Description of Artificial Sequence: Synthetic oligonucleotide
auuacacugaagucacacg

SEQ ID NO: 116015 - RNA, 19 nt, Artificial Sequence
  Description of Artificial Sequence: Synthetic oligonucleotide
ugggauuacacugaaguca

SEQ ID NO: 116016 - RNA, 19 nt, Artificial Sequence
  Description of Artificial Sequence: Synthetic oligonucleotide
uccacgauaucuuuagcug

SEQ ID NO: 116017 - RNA, 19 nt, Artificial Sequence
  Description of Artificial Sequence: Synthetic oligonucleotide
uggacuacaguaacaaagu

SEQ ID NO: 116018 - RNA, 19 nt, Artificial Sequence
  Description of Artificial Sequence: Synthetic oligonucleotide
uugacggugccaaacucgg

SEQ ID NO: 116019 - RNA, 19 nt, Artificial Sequence
  Description of Artificial Sequence: Synthetic oligonucleotide
aaccauugaggccaagaug

SEQ ID NO: 116020 - RNA, 19 nt, Artificial Sequence
  Description of Artificial Sequence: Synthetic oligonucleotide
uuaguauacucauaacaaa

SEQ ID NO: 116021 - RNA, 19 nt, Artificial Sequence
  Description of Artificial Sequence: Synthetic oligonucleotide
aaauggaaauaauacuguu

SEQ ID NO: 116022 - RNA, 19 nt, Artificial Sequence
  Description of Artificial Sequence: Synthetic oligonucleotide
uauugaguaaccucuggaa

SEQ ID NO: 116023 - RNA, 19 nt, Artificial Sequence
  Description of Artificial Sequence: Synthetic oligonucleotide
aacaaaguuuagccugguc

SEQ ID NO: 116024 - RNA, 19 nt, Artificial Sequence
  Description of Artificial Sequence: Synthetic oligonucleotide
ugagugaccggucagugaa

SEQ ID NO: 116025 - RNA, 19 nt, Artificial Sequence
  Description of Artificial Sequence: Synthetic oligonucleotide
cacgaaaagcccuugguac

SEQ ID NO: 116026 - RNA, 19 nt, Artificial Sequence
  Description of Artificial Sequence: Synthetic oligonucleotide
gauaugggcaacccuuucc

SEQ ID NO: 116027 - RNA, 19 nt, Artificial Sequence
  Description of Artificial Sequence: Synthetic oligonucleotide
caaguuauugaguaaccuc

SEQ ID NO: 116028 - RNA, 19 nt, Artificial Sequence
  Description of Artificial Sequence: Synthetic oligonucleotide
aauugacugccauuaguau

SEQ ID NO: 116029 - RNA, 19 nt, Artificial Sequence
  Description of Artificial Sequence: Synthetic oligonucleotide
acggacuuuuauuccgucc

SEQ ID NO: 116030 - RNA, 19 nt, Artificial Sequence
  Description of Artificial Sequence: Synthetic oligonucleotide
uucgaauuaugaucaguug

SEQ ID NO: 116031 - RNA, 19 nt, Artificial Sequence
  Description of Artificial Sequence: Synthetic oligonucleotide
aaaauggcugaaaauggga

SEQ ID NO: 116032 - RNA, 19 nt, Artificial Sequence
  Description of Artificial Sequence: Synthetic oligonucleotide
agagaagcacgaaaagccc

SEQ ID NO: 116033 - RNA, 19 nt, Artificial Sequence
  Description of Artificial Sequence: Synthetic oligonucleotide
aauaucaugguugguuggu

SEQ ID NO: 116034 - RNA, 19 nt, Artificial Sequence
  Description of Artificial Sequence: Synthetic oligonucleotide
uguugcaaugagaaaugac

SEQ ID NO: 116035 - RNA, 19 nt, Artificial Sequence
  Description of Artificial Sequence: Synthetic oligonucleotide
ugagggacuauagaaauau

SEQ ID NO: 116036 - RNA, 19 nt, Artificial Sequence
  Description of Artificial Sequence: Synthetic oligonucleotide
uggcccucgaccaucauac

SEQ ID NO: 116037 - RNA, 19 nt, Artificial Sequence
  Description of Artificial Sequence: Synthetic oligonucleotide
auuggugacauacggacuu

SEQ ID NO: 116038 - RNA, 19 nt, Artificial Sequence
  Description of Artificial Sequence: Synthetic oligonucleotide
gacucuucaccucgaauug

SEQ ID NO: 116039 - RNA, 19 nt, Artificial Sequence
  Description of Artificial Sequence: Synthetic oligonucleotide
cuuaacuauggauuuggca

SEQ ID NO: 116040 - RNA, 19 nt, Artificial Sequence
  Description of Artificial Sequence: Synthetic oligonucleotide
aagugguaccggugauucc

SEQ ID NO: 116041 - RNA, 19 nt, Artificial Sequence
  Description of Artificial Sequence: Synthetic oligonucleotide
acugcuuacggcuggagaa

SEQ ID NO: 116042 - RNA, 19 nt, Artificial Sequence
  Description of Artificial Sequence: Synthetic oligonucleotide
ucuuaacuauggauuuggc

SEQ ID NO: 116043 - RNA, 19 nt, Artificial Sequence
  Description of Artificial Sequence: Synthetic oligonucleotide
ugugacuccaugacaugca

SEQ ID NO: 116044 - RNA, 19 nt, Artificial Sequence
  Description of Artificial Sequence: Synthetic oligonucleotide
ucgaucaauagcugcuuug

SEQ ID NO: 116045 - RNA, 19 nt, Artificial Sequence
  Description of Artificial Sequence: Synthetic oligonucleotide
gguaccuuugccuugucug

SEQ ID NO: 116046 - RNA, 19 nt, Artificial Sequence
  Description of Artificial Sequence: Synthetic oligonucleotide
ugacauacggacuuuuauu

SEQ ID NO: 116047 - RNA, 19 nt, Artificial Sequence
  Description of Artificial Sequence: Synthetic oligonucleotide
cauacucugguguccgucc

SEQ ID NO: 116048 - RNA, 19 nt, Artificial Sequence
  Description of Artificial Sequence: Synthetic oligonucleotide
uccugcuagagccagguuu

SEQ ID NO: 116049 - RNA, 19 nt, Artificial Sequence
  Description of Artificial Sequence: Synthetic oligonucleotide
ucuugcuuauggcugacuu

SEQ ID NO: 116050 - RNA, 19 nt, Artificial Sequence
  Description of Artificial Sequence: Synthetic oligonucleotide
agcccuugguaccuuugcc

SEQ ID NO: 116051 - RNA, 19 nt, Artificial Sequence
  Description of Artificial Sequence: Synthetic oligonucleotide
uguacagcggugguuggag

SEQ ID NO: 116052 - RNA, 19 nt, Artificial Sequence
  Description of Artificial Sequence: Synthetic oligonucleotide
aaacgaguacaaaacaauu

SEQ ID NO: 116053 - RNA, 19 nt, Artificial Sequence
  Description of Artificial Sequence: Synthetic oligonucleotide
uucaccucgaauugacccu

SEQ ID NO: 116054 - RNA, 19 nt, Artificial Sequence
  Description of Artificial Sequence: Synthetic oligonucleotide
caggcuaaauguguaacag

SEQ ID NO: 116055 - RNA, 19 nt, Artificial Sequence
  Description of Artificial Sequence: Synthetic oligonucleotide
uucgguuugguguccucag

SEQ ID NO: 116056 - RNA, 19 nt, Artificial Sequence
  Description of Artificial Sequence: Synthetic oligonucleotide
gaauugacugccauuagua

SEQ ID NO: 116057 - RNA, 19 nt, Artificial Sequence
  Description of Artificial Sequence: Synthetic oligonucleotide
accggugauucccuucucg

SEQ ID NO: 116058 - RNA, 19 nt, Artificial Sequence
  Description of Artificial Sequence: Synthetic oligonucleotide
uguagcacucucuccacau

SEQ ID NO: 116059 - RNA, 19 nt, Artificial Sequence
  Description of Artificial Sequence: Synthetic oligonucleotide
ugaaaccacaagagguggu

SEQ ID NO: 116060 - RNA, 19 nt, Artificial Sequence
  Description of Artificial Sequence: Synthetic oligonucleotide
aguauacucauaacaaaau

SEQ ID NO: 116061 - RNA, 19 nt, Artificial Sequence
  Description of Artificial Sequence: Synthetic oligonucleotide
agcagcaccuuuccgcauc

SEQ ID NO: 116062 - RNA, 19 nt, Artificial Sequence
  Description of Artificial Sequence: Synthetic oligonucleotide
gaaauuggugacauacgga

SEQ ID NO: 116063 - RNA, 19 nt, Artificial Sequence
  Description of Artificial Sequence: Synthetic oligonucleotide
gaauuaugaucaguuguuc

SEQ ID NO: 116064 - RNA, 19 nt, Artificial Sequence
  Description of Artificial Sequence: Synthetic oligonucleotide
cuuuccuaguuacagcuga

SEQ ID NO: 116065 - RNA, 19 nt, Artificial Sequence
  Description of Artificial Sequence: Synthetic oligonucleotide
uuaugaucaguuguuccuc

SEQ ID NO: 116066 - RNA, 19 nt, Artificial Sequence
  Description of Artificial Sequence: Synthetic oligonucleotide
acccaggcuacaauuuucc

SEQ ID NO: 116067 - RNA, 19 nt, Artificial Sequence
  Description of Artificial Sequence: Synthetic oligonucleotide
cauaggauaugggcaaccc

SEQ ID NO: 116068 - RNA, 19 nt, Artificial Sequence
  Description of Artificial Sequence: Synthetic oligonucleotide
aaugggcuaaggacaagcu

SEQ ID NO: 116069 - RNA, 19 nt, Artificial Sequence
  Description of Artificial Sequence: Synthetic oligonucleotide
caugcagacgcuccaugag

SEQ ID NO: 116070 - RNA, 19 nt, Artificial Sequence
  Description of Artificial Sequence: Synthetic oligonucleotide
aggucuuaacuauggauuu

SEQ ID NO: 116071 - RNA, 19 nt, Artificial Sequence
  Description of Artificial Sequence: Synthetic oligonucleotide
gugggucccagauaauagc

SEQ ID NO: 116072 - RNA, 19 nt, Artificial Sequence
  Description of Artificial Sequence: Synthetic oligonucleotide
aggguagcgugcaugaaag

SEQ ID NO: 116073 - RNA, 19 nt, Artificial Sequence
  Description of Artificial Sequence: Synthetic oligonucleotide
aagggcgugagugaccggu

SEQ ID NO: 116074 - RNA, 19 nt, Artificial Sequence
  Description of Artificial Sequence: Synthetic oligonucleotide
ggcagcguugaauuagggg

SEQ ID NO: 116075 - RNA, 19 nt, Artificial Sequence
  Description of Artificial Sequence: Synthetic oligonucleotide
cuaagauaugccaggcaca

SEQ ID NO: 116076 - RNA, 19 nt, Artificial Sequence
  Description of Artificial Sequence: Synthetic oligonucleotide
uccugaacuuuccuaguua

SEQ ID NO: 116077 - RNA, 19 nt, Artificial Sequence
  Description of Artificial Sequence: Synthetic oligonucleotide
cagucucgggauaauggag

SEQ ID NO: 116078 - RNA, 19 nt, Artificial Sequence
  Description of Artificial Sequence: Synthetic oligonucleotide
agaccaguacaucgugcuc

SEQ ID NO: 116079 - RNA, 19 nt, Artificial Sequence
  Description of Artificial Sequence: Synthetic oligonucleotide
accucgaauugacccugcc

SEQ ID NO: 116080 - RNA, 19 nt, Artificial Sequence
  Description of Artificial Sequence: Synthetic oligonucleotide
gccauuaguauacucauaa

SEQ ID NO: 116081 - RNA, 19 nt, Artificial Sequence
  Description of Artificial Sequence: Synthetic oligonucleotide
aggucaacagacacaagug

SEQ ID NO: 116082 - RNA, 19 nt, Artificial Sequence
  Description of Artificial Sequence: Synthetic oligonucleotide
aggcuaaauguguaacaga

SEQ ID NO: 116083 - RNA, 19 nt, Artificial Sequence
  Description of Artificial Sequence: Synthetic oligonucleotide
gguugaugacucugcacgg

SEQ ID NO: 116084 - RNA, 19 nt, Artificial Sequence
  Description of Artificial Sequence: Synthetic oligonucleotide
gugcuuugaagugguaccg

SEQ ID NO: 116085 - RNA, 19 nt, Artificial Sequence
  Description of Artificial Sequence: Synthetic oligonucleotide
gguagcgugcaugaaaggc

SEQ ID NO: 116086 - RNA, 19 nt, Artificial Sequence
  Description of Artificial Sequence: Synthetic oligonucleotide
aacccaaguuauugaguaa

SEQ ID NO: 116087 - RNA, 19 nt, Artificial Sequence
  Description of Artificial Sequence: Synthetic oligonucleotide
ugagugaccugccccgaac

SEQ ID NO: 116088 - RNA, 19 nt, Artificial Sequence
  Description of Artificial Sequence: Synthetic oligonucleotide
gucucgggauaauggagag

SEQ ID NO: 116089 - RNA, 19 nt, Artificial Sequence
  Description of Artificial Sequence: Synthetic oligonucleotide
ugccaugaguuuugaguca

SEQ ID NO: 116090 - RNA, 19 nt, Artificial Sequence
  Description of Artificial Sequence: Synthetic oligonucleotide
agcccaaggucuuaacuau

SEQ ID NO: 116091 - RNA, 19 nt, Artificial Sequence
  Description of Artificial Sequence: Synthetic oligonucleotide
uugagggacuauagaaaua

SEQ ID NO: 116092 - RNA, 19 nt, Artificial Sequence
  Description of Artificial Sequence: Synthetic oligonucleotide
acuuggacaggaauugacu

SEQ ID NO: 116093 - RNA, 19 nt, Artificial Sequence
  Description of Artificial Sequence: Synthetic oligonucleotide
caugccccuacaagagagg

SEQ ID NO: 116094 - RNA, 19 nt, Artificial Sequence
  Description of Artificial Sequence: Synthetic oligonucleotide
uuccugaacuuuccuaguu

SEQ ID NO: 116095 - RNA, 19 nt, Artificial Sequence
  Description of Artificial Sequence: Synthetic oligonucleotide
ccuuccacgauaucuuuag

SEQ ID NO: 116096 - RNA, 19 nt, Artificial Sequence
  Description of Artificial Sequence: Synthetic oligonucleotide
ugggacucaacuggacucc

SEQ ID NO: 116097 - RNA, 19 nt, Artificial Sequence
  Description of Artificial Sequence: Synthetic oligonucleotide
guuaaggccuucgguuugg

SEQ ID NO: 116098 - RNA, 19 nt, Artificial Sequence
  Description of Artificial Sequence: Synthetic oligonucleotide
ugaguaaccucuggaaguu

SEQ ID NO: 116099 - RNA, 19 nt, Artificial Sequence
  Description of Artificial Sequence: Synthetic oligonucleotide
cuuugacggugccaaacuc

SEQ ID NO: 116100 - RNA, 19 nt, Artificial Sequence
  Description of Artificial Sequence: Synthetic oligonucleotide
gugggauuacacugaaguc

SEQ ID NO: 116101 - RNA, 19 nt, Artificial Sequence
  Description of Artificial Sequence: Synthetic oligonucleotide
caggucaacagacacaagu

SEQ ID NO: 116102 - RNA, 19 nt, Artificial Sequence
  Description of Artificial Sequence: Synthetic oligonucleotide
ggcuaaauguguaacagaa

SEQ ID NO: 116103 - RNA, 19 nt, Artificial Sequence
  Description of Artificial Sequence: Synthetic oligonucleotide
ugacggugccaaacucggg

SEQ ID NO: 116104 - RNA, 19 nt, Artificial Sequence
  Description of Artificial Sequence: Synthetic oligonucleotide
uggcugaaaaugggagacg

SEQ ID NO: 116105 - RNA, 19 nt, Artificial Sequence
  Description of Artificial Sequence: Synthetic oligonucleotide
gaauugacccugccauuca

SEQ ID NO: 116106 - RNA, 19 nt, Artificial Sequence
  Description of Artificial Sequence: Synthetic oligonucleotide
gaagucugaugcaugcgga

SEQ ID NO: 116107 - RNA, 19 nt, Artificial Sequence
  Description of Artificial Sequence: Synthetic oligonucleotide
agguacguuccugggcucc

SEQ ID NO: 116108 - RNA, 19 nt, Artificial Sequence
  Description of Artificial Sequence: Synthetic oligonucleotide
ccugaacuuuccuaguuac

SEQ ID NO: 116109 - RNA, 19 nt, Artificial Sequence
  Description of Artificial Sequence: Synthetic oligonucleotide
agucucgggauaauggaga

SEQ ID NO: 116110 - RNA, 19 nt, Artificial Sequence
  Description of Artificial Sequence: Synthetic oligonucleotide
gcucuaaaguuaaugaguc

SEQ ID NO: 116111 - RNA, 19 nt, Artificial Sequence
  Description of Artificial Sequence: Synthetic oligonucleotide
ugguaccuuugccuugucu

SEQ ID NO: 116112 - RNA, 19 nt, Artificial Sequence
  Description of Artificial Sequence: Synthetic oligonucleotide
ugccccuacaagagagggc

SEQ ID NO: 116113 - RNA, 19 nt, Artificial Sequence
  Description of Artificial Sequence: Synthetic oligonucleotide
uagcgugcaugaaaggcuu

SEQ ID NO: 116114 - RNA, 19 nt, Artificial Sequence
  Description of Artificial Sequence: Synthetic oligonucleotide
ugauccagacggcuucgaa

SEQ ID NO: 116115 - RNA, 19 nt, Artificial Sequence
  Description of Artificial Sequence: Synthetic oligonucleotide
augcccgguauucacuacu

SEQ ID NO: 116116 - RNA, 19 nt, Artificial Sequence
  Description of Artificial Sequence: Synthetic oligonucleotide
cuuccacgauaucuuuagc

SEQ ID NO: 116117 - RNA, 19 nt, Artificial Sequence
  Description of Artificial Sequence: Synthetic oligonucleotide
uccacccaggcuacaauuu

SEQ ID NO: 116118 - RNA, 19 nt, Artificial Sequence
  Description of Artificial Sequence: Synthetic oligonucleotide
auacucugauccagacggc

SEQ ID NO: 116119 - RNA, 19 nt, Artificial Sequence
  Description of Artificial Sequence: Synthetic oligonucleotide
agugaccugccccgaaccu

SEQ ID NO: 116120 - RNA, 19 nt, Artificial Sequence
  Description of Artificial Sequence: Synthetic oligonucleotide
cucgaauugacccugccau

SEQ ID NO: 116121 - RNA, 19 nt, Artificial Sequence
  Description of Artificial Sequence: Synthetic oligonucleotide
ucauacucugguguccguc

SEQ ID NO: 116122 - RNA, 19 nt, Artificial Sequence
  Description of Artificial Sequence: Synthetic oligonucleotide
gaguacaggggauguggga

SEQ ID NO: 116123 - RNA, 19 nt, Artificial Sequence
  Description of Artificial Sequence: Synthetic oligonucleotide
gggauuacacugaagucac

SEQ ID NO: 116124 - RNA, 19 nt, Artificial Sequence
  Description of Artificial Sequence: Synthetic oligonucleotide
gaagcacgaaaagcccuug

SEQ ID NO: 116125 - RNA, 19 nt, Artificial Sequence
  Description of Artificial Sequence: Synthetic oligonucleotide
cagacggcuucgaauuaug

SEQ ID NO: 116126 - RNA, 19 nt, Artificial Sequence
  Description of Artificial Sequence: Synthetic oligonucleotide
cacgauaucuuuagcugaa

SEQ ID NO: 116127 - RNA, 19 nt, Artificial Sequence
  Description of Artificial Sequence: Synthetic oligonucleotide
acgccccuggcucacuguc

SEQ ID NO: 116128 - RNA, 19 nt, Artificial Sequence
  Description of Artificial Sequence: Synthetic oligonucleotide
ccaugccccuacaagagag

SEQ ID NO: 116129 - RNA, 19 nt, Artificial Sequence
  Description of Artificial Sequence: Synthetic oligonucleotide
gacucaacuggacuccacu

SEQ ID NO: 116130 - RNA, 19 nt, Artificial Sequence
  Description of Artificial Sequence: Synthetic oligonucleotide
cacccaggcuacaauuuuc

SEQ ID NO: 116131 - RNA, 19 nt, Artificial Sequence
  Description of Artificial Sequence: Synthetic oligonucleotide
ggcucauccaucccuggug

SEQ ID NO: 116132 - RNA, 19 nt, Artificial Sequence
  Description of Artificial Sequence: Synthetic oligonucleotide
gauccagacggcuucgaau

SEQ ID NO: 116133 - RNA, 19 nt, Artificial Sequence
  Description of Artificial Sequence: Synthetic oligonucleotide
ggcaucgucaucauggaaa

SEQ ID NO: 116134 - RNA, 19 nt, Artificial Sequence
  Description of Artificial Sequence: Synthetic oligonucleotide
uacggacuuuuauuccguc

SEQ ID NO: 116135 - RNA, 19 nt, Artificial Sequence
  Description of Artificial Sequence: Synthetic oligonucleotide
gugcuaagauaugccaggc

SEQ ID NO: 116136 - RNA, 19 nt, Artificial Sequence
  Description of Artificial Sequence: Synthetic oligonucleotide
acgauaucuuuagcugaag

SEQ ID NO: 116137 - RNA, 19 nt, Artificial Sequence
  Description of Artificial Sequence: Synthetic oligonucleotide
gaugcccgguauucacuac

SEQ ID NO: 116138 - RNA, 19 nt, Artificial Sequence
  Description of Artificial Sequence: Synthetic oligonucleotide
gacggcuucgaauuaugau

SEQ ID NO: 116139 - RNA, 19 nt, Artificial Sequence
  Description of Artificial Sequence: Synthetic oligonucleotide
ucgaauugacccugccauu

SEQ ID NO: 116140 - RNA, 19 nt, Artificial Sequence
  Description of Artificial Sequence: Synthetic oligonucleotide
acuuuccuaguuacagcug

SEQ ID NO: 116141 - RNA, 19 nt, Artificial Sequence
  Description of Artificial Sequence: Synthetic oligonucleotide
uaauagcagccaugccccu

SEQ ID NO: 116142 - RNA, 19 nt, Artificial Sequence
  Description of Artificial Sequence: Synthetic oligonucleotide
cucgggauccagugcuuug

SEQ ID NO: 116143 - RNA, 19 nt, Artificial Sequence
  Description of Artificial Sequence: Synthetic oligonucleotide
uauuccguccagucaucuu

SEQ ID NO: 116144 - RNA, 19 nt, Artificial Sequence
  Description of Artificial Sequence: Synthetic oligonucleotide
gugacauacggacuuuuau

SEQ ID NO: 116145 - RNA, 19 nt, Artificial Sequence
  Description of Artificial Sequence: Synthetic oligonucleotide
gccuugaaaugagaggcag

SEQ ID NO: 116146 - RNA, 19 nt, Artificial Sequence
  Description of Artificial Sequence: Synthetic oligonucleotide
ccauuaguauacucauaac

SEQ ID NO: 116147 - RNA, 19 nt, Artificial Sequence
  Description of Artificial Sequence: Synthetic oligonucleotide
auacggacuuuuauuccgu

SEQ ID NO: 116148 - RNA, 19 nt, Artificial Sequence
  Description of Artificial Sequence: Synthetic oligonucleotide
agugaccggucagugaaau

SEQ ID NO: 116149 - RNA, 19 nt, Artificial Sequence
  Description of Artificial Sequence: Synthetic oligonucleotide
ugcccgguauucacuacuu

SEQ ID NO: 116150 - RNA, 19 nt, Artificial Sequence
  Description of Artificial Sequence: Synthetic oligonucleotide
guagcgugcaugaaaggcu

SEQ ID NO: 116151 - RNA, 19 nt, Artificial Sequence
  Description of Artificial Sequence: Synthetic oligonucleotide
agacuuggacaggaauuga

SEQ ID NO: 116152 - RNA, 19 nt, Artificial Sequence
  Description of Artificial Sequence: Synthetic oligonucleotide
ccuaguuacagcugaugga

SEQ ID NO: 116153 - RNA, 19 nt, Artificial Sequence
  Description of Artificial Sequence: Synthetic oligonucleotide
agaagcacgaaaagcccuu

SEQ ID NO: 116154 - RNA, 19 nt, Artificial Sequence
  Description of Artificial Sequence: Synthetic oligonucleotide
uccagacggcuucgaauua

SEQ ID NO: 116155 - RNA, 19 nt, Artificial Sequence
  Description of Artificial Sequence: Synthetic oligonucleotide
cugcuuacggcuggagaac

SEQ ID NO: 116156 - RNA, 19 nt, Artificial Sequence
  Description of Artificial Sequence: Synthetic oligonucleotide
guaccuuugccuugucugu

SEQ ID NO: 116157 - RNA, 19 nt, Artificial Sequence
  Description of Artificial Sequence: Synthetic oligonucleotide
ucucgggauaauggagagu

SEQ ID NO: 116158 - RNA, 19 nt, Artificial Sequence
  Description of Artificial Sequence: Synthetic oligonucleotide
caggguagcgugcaugaaa

SEQ ID NO: 116159 - RNA, 19 nt, Artificial Sequence
  Description of Artificial Sequence: Synthetic oligonucleotide
gugagugaccggucaguga

SEQ ID NO: 116160 - RNA, 19 nt, Artificial Sequence
  Description of Artificial Sequence: Synthetic oligonucleotide
gaagggcgugagugaccgg

SEQ ID NO: 116161 - RNA, 19 nt, Artificial Sequence
  Description of Artificial Sequence: Synthetic oligonucleotide
ccauugaguaguaaggccu

SEQ ID NO: 116162 - RNA, 19 nt, Artificial Sequence
  Description of Artificial Sequence: Synthetic oligonucleotide
gagggacuauagaaauauc

SEQ ID NO: 116163 - RNA, 19 nt, Artificial Sequence
  Description of Artificial Sequence: Synthetic oligonucleotide
guaccggugauucccuucu

SEQ ID NO: 116164 - RNA, 19 nt, Artificial Sequence
  Description of Artificial Sequence: Synthetic oligonucleotide
gacagaguacaggggaugu

SEQ ID NO: 116165 - RNA, 19 nt, Artificial Sequence
  Description of Artificial Sequence: Synthetic oligonucleotide
aagucacacgugacuuaca

SEQ ID NO: 116166 - RNA, 19 nt, Artificial Sequence
  Description of Artificial Sequence: Synthetic oligonucleotide
gagcacuuuaguacaggua

SEQ ID NO: 116167 - RNA, 19 nt, Artificial Sequence
  Description of Artificial Sequence: Synthetic oligonucleotide
gacuuuuauuccguccagu

SEQ ID NO: 116168 - RNA, 19 nt, Artificial Sequence
  Description of Artificial Sequence: Synthetic oligonucleotide
agcuucuacacuggacaau

SEQ ID NO: 116169 - RNA, 19 nt, Artificial Sequence
  Description of Artificial Sequence: Synthetic oligonucleotide
agucacgccccuggcucac

SEQ ID NO: 116170 - RNA, 19 nt, Artificial Sequence
  Description of Artificial Sequence: Synthetic oligonucleotide
agacggcuucgaauuauga

SEQ ID NO: 116171 - RNA, 19 nt, Artificial Sequence
  Description of Artificial Sequence: Synthetic oligonucleotide
ccacgauaucuuuagcuga

SEQ ID NO: 116172 - RNA, 19 nt, Artificial Sequence
  Description of Artificial Sequence: Synthetic oligonucleotide
cuacaagagagggcucauc

SEQ ID NO: 116173 - RNA, 19 nt, Artificial Sequence
  Description of Artificial Sequence: Synthetic oligonucleotide
augugguuuccagguacgu

SEQ ID NO: 116174 - RNA, 19 nt, Artificial Sequence
  Description of Artificial Sequence: Synthetic oligonucleotide
agguuuccuuccacgauau

SEQ ID NO: 116175 - RNA, 19 nt, Artificial Sequence
  Description of Artificial Sequence: Synthetic oligonucleotide
gcauaggauaugggcaacc

SEQ ID NO: 116176 - RNA, 19 nt, Artificial Sequence
  Description of Artificial Sequence: Synthetic oligonucleotide
gagucacgccccuggcuca

SEQ ID NO: 116177 - RNA, 19 nt, Artificial Sequence
  Description of Artificial Sequence: Synthetic oligonucleotide
ggcuucgaauuaugaucag

SEQ ID NO: 116178 - RNA, 19 nt, Artificial Sequence
  Description of Artificial Sequence: Synthetic oligonucleotide
ccaggcuaaauguguaaca

SEQ ID NO: 116179 - RNA, 19 nt, Artificial Sequence
  Description of Artificial Sequence: Synthetic oligonucleotide
ccaauagcuguucuuccca

SEQ ID NO: 116180 - RNA, 19 nt, Artificial Sequence
  Description of Artificial Sequence: Synthetic oligonucleotide
ggcgugagugaccggucag

SEQ ID NO: 116181 - RNA, 19 nt, Artificial Sequence
  Description of Artificial Sequence: Synthetic oligonucleotide
ggauaugggcaacccuuuc

SEQ ID NO: 116182 - RNA, 19 nt, Artificial Sequence
  Description of Artificial Sequence: Synthetic oligonucleotide
gccaugaguuuugagucac

SEQ ID NO: 116183 - RNA, 19 nt, Artificial Sequence
  Description of Artificial Sequence: Synthetic oligonucleotide
ccuuuccgcauccucucgc

SEQ ID NO: 116184 - RNA, 19 nt, Artificial Sequence
  Description of Artificial Sequence: Synthetic oligonucleotide
ccagucucgggauaaugga

SEQ ID NO: 116185 - RNA, 19 nt, Artificial Sequence
  Description of Artificial Sequence: Synthetic oligonucleotide
caucgugcucaguacucaa

SEQ ID NO: 116186 - RNA, 19 nt, Artificial Sequence
  Description of Artificial Sequence: Synthetic oligonucleotide
gcaaccauugaggccaaga

SEQ ID NO: 116187 - RNA, 19 nt, Artificial Sequence
  Description of Artificial Sequence: Synthetic oligonucleotide
ucugaugcaugcggaucuu

SEQ ID NO: 116188 - RNA, 19 nt, Artificial Sequence
  Description of Artificial Sequence: Synthetic oligonucleotide
gcagaccaguacaucgugc

SEQ ID NO: 116189 - RNA, 19 nt, Artificial Sequence
  Description of Artificial Sequence: Synthetic oligonucleotide
uaccggugauucccuucuc

SEQ ID NO: 116190 - RNA, 19 nt, Artificial Sequence
  Description of Artificial Sequence: Synthetic oligonucleotide
cggacuuuuauuccgucca

SEQ ID NO: 116191 - RNA, 19 nt, Artificial Sequence
  Description of Artificial Sequence: Synthetic oligonucleotide
ggagaccgcuuugagggac

SEQ ID NO: 116192 - RNA, 19 nt, Artificial Sequence
  Description of Artificial Sequence: Synthetic oligonucleotide
aucgugcucaguacucaaa

SEQ ID NO: 116193 - RNA, 19 nt, Artificial Sequence
  Description of Artificial Sequence: Synthetic oligonucleotide
ggaugcccgguauucacua

SEQ ID NO: 116194 - RNA, 19 nt, Artificial Sequence
  Description of Artificial Sequence: Synthetic oligonucleotide
cgaauugacccugccauuc

SEQ ID NO: 116195 - RNA, 19 nt, Artificial Sequence
  Description of Artificial Sequence: Synthetic oligonucleotide
gucaauaagucagcaucau

SEQ ID NO: 116196 - RNA, 19 nt, Artificial Sequence
  Description of Artificial Sequence: Synthetic oligonucleotide
cagguacguuccugggcuc

SEQ ID NO: 116197 - RNA, 19 nt, Artificial Sequence
  Description of Artificial Sequence: Synthetic oligonucleotide
gccccuacaagagagggcu

SEQ ID NO: 116198 - RNA, 19 nt, Artificial Sequence
  Description of Artificial Sequence: Synthetic oligonucleotide
aacucgggauccagugcuu

SEQ ID NO: 116199 - RNA, 19 nt, Artificial Sequence
  Description of Artificial Sequence: Synthetic oligonucleotide
gguacguuccugggcuccc

SEQ ID NO: 116200 - RNA, 19 nt, Artificial Sequence
  Description of Artificial Sequence: Synthetic oligonucleotide
aggauccauugaguaguaa

SEQ ID NO: 116201 - RNA, 19 nt, Artificial Sequence
  Description of Artificial Sequence: Synthetic oligonucleotide
guguacagcggugguugga

SEQ ID NO: 116202 - RNA, 19 nt, Artificial Sequence
  Description of Artificial Sequence: Synthetic oligonucleotide
ccagguacguuccugggcu

SEQ ID NO: 116203 - RNA, 19 nt, Artificial Sequence
  Description of Artificial Sequence: Synthetic oligonucleotide
  modified_base (7)..(7): a, c, u, g, unknown or other
agcagcnccuugggccaca

SEQ ID NO: 116204 - RNA, 19 nt, Artificial Sequence
  Description of Artificial Sequence: Synthetic oligonucleotide
  modified_base (2)..(2): a, c, u, g, unknown or other
cnccuugggccacagcagu

SEQ ID NO: 116205 - RNA, 19 nt, Artificial Sequence
  Description of Artificial Sequence: Synthetic oligonucleotide
ccucgaauugacccugcca

SEQ ID NO: 116206 - RNA, 19 nt, Artificial Sequence
  Description of Artificial Sequence: Synthetic oligonucleotide
ccaugaagggcgugaguga

SEQ ID NO: 116207 - RNA, 19 nt, Artificial Sequence
  Description of Artificial Sequence: Synthetic oligonucleotide
ccggugauucccuucucga

SEQ ID NO: 116208 - RNA, 19 nt, Artificial Sequence
  Description of Artificial Sequence: Synthetic oligonucleotide
gugaccggucagugaaaua

SEQ ID NO: 116209 - RNA, 19 nt, Artificial Sequence
  Description of Artificial Sequence: Synthetic oligonucleotide
cacuugugggucccagaua

SEQ ID NO: 116210 - RNA, 19 nt, Artificial Sequence
  Description of Artificial Sequence: Synthetic oligonucleotide
gagugaccggucagugaaa

SEQ ID NO: 116211 - RNA, 19 nt, Artificial Sequence
  Description of Artificial Sequence: Synthetic oligonucleotide
cugagugaccugccccgaa

SEQ ID NO: 116212 - RNA, 19 nt, Artificial Sequence
  Description of Artificial Sequence: Synthetic oligonucleotide
cucuggagucacgccccug

SEQ ID NO: 116213 - RNA, 19 nt, Artificial Sequence
  Description of Artificial Sequence: Synthetic oligonucleotide
cgugagugaccggucagug

SEQ ID NO: 116214 - RNA, 19 nt, Artificial Sequence
  Description of Artificial Sequence: Synthetic oligonucleotide
gagaccgcuuugagggacu

SEQ ID NO: 116215 - RNA, 19 nt, Artificial Sequence
  Description of Artificial Sequence: Synthetic oligonucleotide
ggacucaacuggacuccac

SEQ ID NO: 116216 - RNA, 19 nt, Artificial Sequence
  Description of Artificial Sequence: Synthetic oligonucleotide
cugauccagacggcuucga

SEQ ID NO: 116217 - RNA, 19 nt, Artificial Sequence
  Description of Artificial Sequence: Synthetic oligonucleotide
agaccgcuuugagggacua

SEQ ID NO: 116218 - RNA, 19 nt, Artificial Sequence
  Description of Artificial Sequence: Synthetic oligonucleotide
gacgcuccaugaggcuaga

SEQ ID NO: 116219 - RNA, 19 nt, Artificial Sequence
  Description of Artificial Sequence: Synthetic oligonucleotide
cgauaucuuuagcugaagu

SEQ ID NO: 116220 - RNA, 19 nt, Artificial Sequence
  Description of Artificial Sequence: Synthetic oligonucleotide
gaaaagcccuugguaccuu

SEQ ID NO: 116221 - RNA, 19 nt, Artificial Sequence
  Description of Artificial Sequence: Synthetic oligonucleotide
ggccaagaugcauccacuu

SEQ ID NO: 116222 - RNA, 19 nt, Artificial Sequence
  Description of Artificial Sequence: Synthetic oligonucleotide
agcgugcaugaaaggcuuu

SEQ ID NO: 116223 - RNA, 19 nt, Artificial Sequence
  Description of Artificial Sequence: Synthetic oligonucleotide
gggcucauccaucccuggu

SEQ ID NO: 116224 - RNA, 19 nt, Artificial Sequence
  Description of Artificial Sequence: Synthetic oligonucleotide
gcccucgaccaucauacuu

SEQ ID NO: 116225 - RNA, 19 nt, Artificial Sequence
  Description of Artificial Sequence: Synthetic oligonucleotide
cauccacuuguggguccca

SEQ ID NO: 116226 - RNA, 19 nt, Artificial Sequence
  Description of Artificial Sequence: Synthetic oligonucleotide
gccccgaaccuuccuuucu

SEQ ID NO: 116227 - RNA, 19 nt, Artificial Sequence
  Description of Artificial Sequence: Synthetic oligonucleotide
gaccgcuuugagggacuau

SEQ ID NO: 116228 - RNA, 19 nt, Artificial Sequence
  Description of Artificial Sequence: Synthetic oligonucleotide
gcgugagugaccggucagu

SEQ ID NO: 116229 - RNA, 19 nt, Artificial Sequence
  Description of Artificial Sequence: Synthetic oligonucleotide
cgaaaagcccuugguaccu

SEQ ID NO: 116230 - RNA, 19 nt, Artificial Sequence
  Description of Artificial Sequence: Synthetic oligonucleotide
ccagacggcuucgaauuau

SEQ ID NO: 116231 - RNA, 19 nt, Artificial Sequence
  Description of Artificial Sequence: Synthetic oligonucleotide
aaauacauaacaaagguuc

SEQ ID NO: 116232 - RNA, 19 nt, Artificial Sequence
  Description of Artificial Sequence: Synthetic oligonucleotide
uauuggaucauuuagaucu

SEQ ID NO: 116233 - RNA, 19 nt, Artificial Sequence
  Description of Artificial Sequence: Synthetic oligonucleotide
gaauauaugaauucgauca

SEQ ID NO: 116234 - RNA, 19 nt, Artificial Sequence
  Description of Artificial Sequence: Synthetic oligonucleotide
aaaauuuaguauuggguuc

SEQ ID NO: 116235 - RNA, 19 nt, Artificial Sequence
  Description of Artificial Sequence: Synthetic oligonucleotide
uuuugaguauuuuagaaca

SEQ ID NO: 116236 - RNA, 19 nt, Artificial Sequence
  Description of Artificial Sequence: Synthetic oligonucleotide
ucagauaccucuaaauggg

SEQ ID NO: 116237 - RNA, 19 nt, Artificial Sequence
  Description of Artificial Sequence: Synthetic oligonucleotide
caacauuugaccgagacgg

SEQ ID NO: 116238 - RNA, 19 nt, Artificial Sequence
  Description of Artificial Sequence: Synthetic oligonucleotide
uuaaucacgggcuuggcag

SEQ ID NO: 116239 - RNA, 19 nt, Artificial Sequence
  Description of Artificial Sequence: Synthetic oligonucleotide
gacaguaggcuuuaaaugc

SEQ ID NO: 116240 - RNA, 19 nt, Artificial Sequence
  Description of Artificial Sequence: Synthetic oligonucleotide
uauguauacgccacagucg

SEQ ID NO: 116241 - RNA, 19 nt, Artificial Sequence
  Description of Artificial Sequence: Synthetic oligonucleotide
uaugaauucgaucagcauc

SEQ ID NO: 116242 - RNA, 19 nt, Artificial Sequence
  Description of Artificial Sequence: Synthetic oligonucleotide
auguauacgccacagucgc

SEQ ID NO: 116243 - RNA, 19 nt, Artificial Sequence
  Description of Artificial Sequence: Synthetic oligonucleotide
ugaguauuuuagaacagag

SEQ ID NO: 116244 - RNA, 19 nt, Artificial Sequence
  Description of Artificial Sequence: Synthetic oligonucleotide
uguauugacagguuaguug

SEQ ID NO: 116245 - RNA, 19 nt, Artificial Sequence
  Description of Artificial Sequence: Synthetic oligonucleotide
aguacuacaaugccguuuc

SEQ ID NO: 116246 - RNA, 19 nt, Artificial Sequence
  Description of Artificial Sequence: Synthetic oligonucleotide
ugaggaauuauacaaguuc

SEQ ID NO: 116247 - RNA, 19 nt, Artificial Sequence
  Description of Artificial Sequence: Synthetic oligonucleotide
uuuugggcaauauucacgc

SEQ ID NO: 116248 - RNA, 19 nt, Artificial Sequence
  Description of Artificial Sequence: Synthetic oligonucleotide
aaagucgauaauaacauca

SEQ ID NO: 116249 - RNA, 19 nt, Artificial Sequence
  Description of Artificial Sequence: Synthetic oligonucleotide
aacaaagguucccuaaaag

SEQ ID NO: 116250 - RNA, 19 nt, Artificial Sequence
  Description of Artificial Sequence: Synthetic oligonucleotide
uauaugaauucgaucagca

SEQ ID NO: 116251 - RNA, 19 nt, Artificial Sequence
  Description of Artificial Sequence: Synthetic oligonucleotide
cugauaaguacuacaaugc

SEQ ID NO: 116252 - RNA, 19 nt, Artificial Sequence
  Description of Artificial Sequence: Synthetic oligonucleotide
uuaauacauacuccuuugg

SEQ ID NO: 116253 - RNA, 19 nt, Artificial Sequence
  Description of Artificial Sequence: Synthetic oligonucleotide
auuuucgugguaaugaggg

SEQ ID NO: 116254 - RNA, 19 nt, Artificial Sequence
  Description of Artificial Sequence: Synthetic oligonucleotide
cuaucaguaacuucguggc

SEQ ID NO: 116255 - RNA, 19 nt, Artificial Sequence
  Description of Artificial Sequence: Synthetic oligonucleotide
ucuaaguuguaucuuagau

SEQ ID NO: 116256 - RNA, 19 nt, Artificial Sequence
  Description of Artificial Sequence: Synthetic oligonucleotide
cuguauuuaacuccgauuc

SEQ ID NO: 116257 - RNA, 19 nt, Artificial Sequence
  Description of Artificial Sequence: Synthetic oligonucleotide
ucuaaaugggucaaacacu

SEQ ID NO: 116258 - RNA, 19 nt, Artificial Sequence
  Description of Artificial Sequence: Synthetic oligonucleotide
uguauacuuaguuuaaaau

SEQ ID NO: 116259 - RNA, 19 nt, Artificial Sequence
  Description of Artificial Sequence: Synthetic oligonucleotide
acauuguuaccauaaaacu

SEQ ID NO: 116260 - RNA, 19 nt, Artificial Sequence
  Description of Artificial Sequence: Synthetic oligonucleotide
augacaacuguauuuaacu

SEQ ID NO: 116261 - RNA, 19 nt, Artificial Sequence
  Description of Artificial Sequence: Synthetic oligonucleotide
uggaaauuacuuaugugac

SEQ ID NO: 116262 - RNA, 19 nt, Artificial Sequence
  Description of Artificial Sequence: Synthetic oligonucleotide
ugacaaaauuauuggauca

SEQ ID NO: 116263 - RNA, 19 nt, Artificial Sequence
  Description of Artificial Sequence: Synthetic oligonucleotide
cuuaguaaugguccagugg

SEQ ID NO: 116264 - RNA, 19 nt, Artificial Sequence
  Description of Artificial Sequence: Synthetic oligonucleotide
uauguaauuaugucuacua

SEQ ID NO: 116265 - RNA, 19 nt, Artificial Sequence
  Description of Artificial Sequence: Synthetic oligonucleotide
uuugaguauuuuagaacag

SEQ ID NO: 116266 - RNA, 19 nt, Artificial Sequence
  Description of Artificial Sequence: Synthetic oligonucleotide
acaaagguucccuaaaagu

SEQ ID NO: 116267 - RNA, 19 nt, Artificial Sequence
  Description of Artificial Sequence: Synthetic oligonucleotide
ugucuauaacccaugguga

SEQ ID NO: 116268 - RNA, 19 nt, Artificial Sequence
  Description of Artificial Sequence: Synthetic oligonucleotide
ugacuuaacauuacagggu

SEQ ID NO: 116269 - RNA, 19 nt, Artificial Sequence
  Description of Artificial Sequence: Synthetic oligonucleotide
ucuucuguuaguccuguca

SEQ ID NO: 116270 - RNA, 19 nt, Artificial Sequence
  Description of Artificial Sequence: Synthetic oligonucleotide
aaauuggccucauuaacau

SEQ ID NO: 116271 - RNA, 19 nt, Artificial Sequence
  Description of Artificial Sequence: Synthetic oligonucleotide
uuugacaacauuugaccga

SEQ ID NO: 116272 - RNA, 19 nt, Artificial Sequence
  Description of Artificial Sequence: Synthetic oligonucleotide
acuuauauauauucccaug

SEQ ID NO: 116273 - RNA, 19 nt, Artificial Sequence
  Description of Artificial Sequence: Synthetic oligonucleotide
aauuacuuaugugacauuu

SEQ ID NO: 116274 - RNA, 19 nt, Artificial Sequence
  Description of Artificial Sequence: Synthetic oligonucleotide
agacaguaggcuuuaaaug

SEQ ID NO: 116275 - RNA, 19 nt, Artificial Sequence
  Description of Artificial Sequence: Synthetic oligonucleotide
aaauuuaguauuggguucu

SEQ ID NO: 116276 - RNA, 19 nt, Artificial Sequence
  Description of Artificial Sequence: Synthetic oligonucleotide
guucagauaccucuaaaug

SEQ ID NO: 116277 - RNA, 19 nt, Artificial Sequence
  Description of Artificial Sequence: Synthetic oligonucleotide
acuuaguuuaaaaugucuc

SEQ ID NO: 116278 - RNA, 19 nt, Artificial Sequence
  Description of Artificial Sequence: Synthetic oligonucleotide
uguacugucuauaacccau

SEQ ID NO: 116279 - RNA, 19 nt, Artificial Sequence
  Description of Artificial Sequence: Synthetic oligonucleotide
auacauaacaaagguuccc

SEQ ID NO: 116280 - RNA, 19 nt, Artificial Sequence
  Description of Artificial Sequence: Synthetic oligonucleotide
ucuccgauaacaaggcuca

SEQ ID NO: 116281 - RNA, 19 nt, Artificial Sequence
  Description of Artificial Sequence: Synthetic oligonucleotide
auguaauuaugucuacuag

SEQ ID NO: 116282 - RNA, 19 nt, Artificial Sequence
  Description of Artificial Sequence: Synthetic oligonucleotide
acaacauuugaccgagacg

SEQ ID NO: 116283 - RNA, 19 nt, Artificial Sequence
  Description of Artificial Sequence: Synthetic oligonucleotide
ugcagaauuauguuucgga

SEQ ID NO: 116284 - RNA, 19 nt, Artificial Sequence
  Description of Artificial Sequence: Synthetic oligonucleotide
guauguauacgccacaguc

SEQ ID NO: 116285 - RNA, 19 nt, Artificial Sequence
  Description of Artificial Sequence: Synthetic oligonucleotide
ucuuagaauuuugacaaca

SEQ ID NO: 116286 - RNA, 19 nt, Artificial Sequence
  Description of Artificial Sequence: Synthetic oligonucleotide
uucuaaacuuguuaaccug

SEQ ID NO: 116287 - RNA, 19 nt, Artificial Sequence
  Description of Artificial Sequence: Synthetic oligonucleotide
uucuuguacaggcaacaag

SEQ ID NO: 116288 - RNA, 19 nt, Artificial Sequence
  Description of Artificial Sequence: Synthetic oligonucleotide
gaguauuuuagaacagagg

SEQ ID NO: 116289 - RNA, 19 nt, Artificial Sequence
  Description of Artificial Sequence: Synthetic oligonucleotide
ucgauaauaacaucauuua

SEQ ID NO: 116290 - RNA, 19 nt, Artificial Sequence
  Description of Artificial Sequence: Synthetic oligonucleotide
cuauaacccauggugaacg

SEQ ID NO: 116291 - RNA, 19 nt, Artificial Sequence
  Description of Artificial Sequence: Synthetic oligonucleotide
guaauuaugucuacuagca

SEQ ID NO: 116292 - RNA, 19 nt, Artificial Sequence
  Description of Artificial Sequence: Synthetic oligonucleotide
agaucugacacgcuugucu

SEQ ID NO: 116293 - RNA, 19 nt, Artificial Sequence
  Description of Artificial Sequence: Synthetic oligonucleotide
gacaacauuugaccgagac

SEQ ID NO: 116294 - RNA, 19 nt, Artificial Sequence
  Description of Artificial Sequence: Synthetic oligonucleotide
aaguucacuaaagaauaug

SEQ ID NO: 116295 - RNA, 19 nt, Artificial Sequence
  Description of Artificial Sequence: Synthetic oligonucleotide
gacgcagugacagucaagc

SEQ ID NO: 116296 - RNA, 19 nt, Artificial Sequence
  Description of Artificial Sequence: Synthetic oligonucleotide
uucuccgauaacaaggcuc

SEQ ID NO: 116297 - RNA, 19 nt, Artificial Sequence
  Description of Artificial Sequence: Synthetic oligonucleotide
auauauucccaugaaauaa

SEQ ID NO: 116298 - RNA, 19 nt, Artificial Sequence
  Description of Artificial Sequence: Synthetic oligonucleotide
uguauuuaacuccgauucu

SEQ ID NO: 116299 - RNA, 19 nt, Artificial Sequence
  Description of Artificial Sequence: Synthetic oligonucleotide
uagguagcucaaaauuuag

SEQ ID NO: 116300 - RNA, 19 nt, Artificial Sequence
  Description of Artificial Sequence: Synthetic oligonucleotide
auaucaacuggaaucuuuc

SEQ ID NO: 116301 - RNA, 19 nt, Artificial Sequence
  Description of Artificial Sequence: Synthetic oligonucleotide
acacgcuugucuuucguuc

SEQ ID NO: 116302 - RNA, 19 nt, Artificial Sequence
  Description of Artificial Sequence: Synthetic oligonucleotide
uuagaucugacacgcuugu

SEQ ID NO: 116303 - RNA, 19 nt, Artificial Sequence
  Description of Artificial Sequence: Synthetic oligonucleotide
acaguaggcuuuaaaugcc

SEQ ID NO: 116304 - RNA, 19 nt, Artificial Sequence
  Description of Artificial Sequence: Synthetic oligonucleotide
auaccaaugucaguaauga

SEQ ID NO: 116305 - RNA, 19 nt, Artificial Sequence
  Description of Artificial Sequence: Synthetic oligonucleotide
cuuuauaccaaugucagua

SEQ ID NO: 116306 - RNA, 19 nt, Artificial Sequence
  Description of Artificial Sequence: Synthetic oligonucleotide
augaauucgaucagcaucu

SEQ ID NO: 116307 - RNA, 19 nt, Artificial Sequence
  Description of Artificial Sequence: Synthetic oligonucleotide
auuuagaucugacacgcuu

SEQ ID NO: 116308 - RNA, 19 nt, Artificial Sequence
  Description of Artificial Sequence: Synthetic oligonucleotide
uuuauaccaaugucaguaa

SEQ ID NO: 116309 - RNA, 19 nt, Artificial Sequence
  Description of Artificial Sequence: Synthetic oligonucleotide
acuguccuauuucugaagu

SEQ ID NO: 116310 - RNA, 19 nt, Artificial Sequence
  Description of Artificial Sequence: Synthetic oligonucleotide
auaacaaagguucccuaaa

SEQ ID NO: 116311 - RNA, 19 nt, Artificial Sequence
  Description of Artificial Sequence: Synthetic oligonucleotide
auaggauuccgacucuucu

SEQ ID NO: 116312 - RNA, 19 nt, Artificial Sequence
  Description of Artificial Sequence: Synthetic oligonucleotide
aacuucguggcaugcagau

SEQ ID NO: 116313 - RNA, 19 nt, Artificial Sequence
  Description of Artificial Sequence: Synthetic oligonucleotide
guaguuuagucugauuuug

SEQ ID NO: 116314 - RNA, 19 nt, Artificial Sequence
  Description of Artificial Sequence: Synthetic oligonucleotide
uauggucuacaccuuggac

SEQ ID NO: 116315 - RNA, 19 nt, Artificial Sequence
  Description of Artificial Sequence: Synthetic oligonucleotide
aggaauuauacaaguucac

SEQ ID NO: 116316 - RNA, 19 nt, Artificial Sequence
  Description of Artificial Sequence: Synthetic oligonucleotide
accucuaaaugggucaaac

SEQ ID NO: 116317 - RNA, 19 nt, Artificial Sequence
  Description of Artificial Sequence: Synthetic oligonucleotide
auaacccauggugaacgcc

SEQ ID NO: 116318 - RNA, 19 nt, Artificial Sequence
  Description of Artificial Sequence: Synthetic oligonucleotide
acugccggcauacugcucu

SEQ ID NO: 116319 - RNA, 19 nt, Artificial Sequence
  Description of Artificial Sequence: Synthetic oligonucleotide
gaaauuacuuaugugacau

SEQ ID NO: 116320 - RNA, 19 nt, Artificial Sequence
  Description of Artificial Sequence: Synthetic oligonucleotide
uucuaaguuguaucuuaga

SEQ ID NO: 116321 - RNA, 19 nt, Artificial Sequence
  Description of Artificial Sequence: Synthetic oligonucleotide
cuuuucuugguaugacaac

SEQ ID NO: 116322 - RNA, 19 nt, Artificial Sequence
  Description of Artificial Sequence: Synthetic oligonucleotide
ucacuuauagcaugauuuu

SEQ ID NO: 116323 - RNA, 19 nt, Artificial Sequence
  Description of Artificial Sequence: Synthetic oligonucleotide
guuucuccgauaacaaggc

SEQ ID NO: 116324 - RNA, 19 nt, Artificial Sequence
  Description of Artificial Sequence: Synthetic oligonucleotide
uuggguuggaaccucucau

SEQ ID NO: 116325 - RNA, 19 nt, Artificial Sequence
  Description of Artificial Sequence: Synthetic oligonucleotide
uccuguauacuuaguuuaa

SEQ ID NO: 116326 - RNA, 19 nt, Artificial Sequence
  Description of Artificial Sequence: Synthetic oligonucleotide
ugauuuugcuuaaggcauc

SEQ ID NO: 116327 - RNA, 19 nt, Artificial Sequence
  Description of Artificial Sequence: Synthetic oligonucleotide
agauaccucuaaauggguc

SEQ ID NO: 116328 - RNA, 19 nt, Artificial Sequence
  Description of Artificial Sequence: Synthetic oligonucleotide
uaucaguaacuucguggca

SEQ ID NO: 116329 - RNA, 19 nt, Artificial Sequence
  Description of Artificial Sequence: Synthetic oligonucleotide
aguauguauacgccacagu

SEQ ID NO: 116330 - RNA, 19 nt, Artificial Sequence
  Description of Artificial Sequence: Synthetic oligonucleotide
cuguuaauccugugguuug

SEQ ID NO: 116331 - RNA, 19 nt, Artificial Sequence
  Description of Artificial Sequence: Synthetic oligonucleotide
ucuauaacccauggugaac

SEQ ID NO: 116332 - RNA, 19 nt, Artificial Sequence
  Description of Artificial Sequence: Synthetic oligonucleotide
uacuacaaugccguuucug

SEQ ID NO: 116333 - RNA, 19 nt, Artificial Sequence
  Description of Artificial Sequence: Synthetic oligonucleotide
uuuguuguauugacagguu

SEQ ID NO: 116334 - RNA, 19 nt, Artificial Sequence
  Description of Artificial Sequence: Synthetic oligonucleotide
uacuuaauacauacuccuu

SEQ ID NO: 116335 - RNA, 19 nt, Artificial Sequence
  Description of Artificial Sequence: Synthetic oligonucleotide
uucgugguaaugaggguua

SEQ ID NO: 116336 - RNA, 19 nt, Artificial Sequence
  Description of Artificial Sequence: Synthetic oligonucleotide
aagucgauaauaacaucau

SEQ ID NO: 116337 - RNA, 19 nt, Artificial Sequence
  Description of Artificial Sequence: Synthetic oligonucleotide
guguuucuccgauaacaag

SEQ ID NO: 116338 - RNA, 19 nt, Artificial Sequence
  Description of Artificial Sequence: Synthetic oligonucleotide
acugucuauaacccauggu

SEQ ID NO: 116339 - RNA, 19 nt, Artificial Sequence
  Description of Artificial Sequence: Synthetic oligonucleotide
aacauuugaccgagacggg

SEQ ID NO: 116340 - RNA, 19 nt, Artificial Sequence
  Description of Artificial Sequence: Synthetic oligonucleotide
aaguaggauacaagguugu

SEQ ID NO: 116341 - RNA, 19 nt, Artificial Sequence
  Description of Artificial Sequence: Synthetic oligonucleotide
uuucgugguaaugaggguu

SEQ ID NO: 116342 - RNA, 19 nt, Artificial Sequence
  Description of Artificial Sequence: Synthetic oligonucleotide
uaacuucguggcaugcaga

SEQ ID NO: 116343 - RNA, 19 nt, Artificial Sequence
  Description of Artificial Sequence: Synthetic oligonucleotide
accgagacgggccucugag

SEQ ID NO: 116344 - RNA, 19 nt, Artificial Sequence
  Description of Artificial Sequence: Synthetic oligonucleotide
guauacgccacagucgcug

SEQ ID NO: 116345 - RNA, 19 nt, Artificial Sequence
  Description of Artificial Sequence: Synthetic oligonucleotide
aucaguaacuucguggcau

SEQ ID NO: 116346 - RNA, 19 nt, Artificial Sequence
  Description of Artificial Sequence: Synthetic oligonucleotide
aguaggcuuuaaaugccac

SEQ ID NO: 116347 - RNA, 19 nt, Artificial Sequence
  Description of Artificial Sequence: Synthetic oligonucleotide
uuggugaacaacuguccau

SEQ ID NO: 116348 - RNA, 19 nt, Artificial Sequence
  Description of Artificial Sequence: Synthetic oligonucleotide
cauaaguaggauacaaggu

SEQ ID NO: 116349 - RNA, 19 nt, Artificial Sequence
  Description of Artificial Sequence: Synthetic oligonucleotide
gaggguuagguucauauuu

SEQ ID NO: 116350 - RNA, 19 nt, Artificial Sequence
  Description of Artificial Sequence: Synthetic oligonucleotide
uuucaagcaccaaguacuu

SEQ ID NO: 116351 - RNA, 19 nt, Artificial Sequence
  Description of Artificial Sequence: Synthetic oligonucleotide
guccuguauacuuaguuua

SEQ ID NO: 116352 - RNA, 19 nt, Artificial Sequence
  Description of Artificial Sequence: Synthetic oligonucleotide
uuuucgugguaaugagggu

SEQ ID NO: 116353 - RNA, 19 nt, Artificial Sequence
  Description of Artificial Sequence: Synthetic oligonucleotide
uggauacacuaucaauuuu

SEQ ID NO: 116354 - RNA, 19 nt, Artificial Sequence
  Description of Artificial Sequence: Synthetic oligonucleotide
uacauaggauuccgacucu

SEQ ID NO: 116355 - RNA, 19 nt, Artificial Sequence
  Description of Artificial Sequence: Synthetic oligonucleotide
auuugaccgagacgggccu

SEQ ID NO: 116356 - RNA, 19 nt, Artificial Sequence
  Description of Artificial Sequence: Synthetic oligonucleotide
aauuggccucauuaacaua

SEQ ID NO: 116357 - RNA, 19 nt, Artificial Sequence
  Description of Artificial Sequence: Synthetic oligonucleotide
gcaacaagucugcuauugg

SEQ ID NO: 116358 - RNA, 19 nt, Artificial Sequence
  Description of Artificial Sequence: Synthetic oligonucleotide
agcucuguacugucuauaa

SEQ ID NO: 116359 - RNA, 19 nt, Artificial Sequence
  Description of Artificial Sequence: Synthetic oligonucleotide
gucgauaauaacaucauuu

SEQ ID NO: 116360 - RNA, 19 nt, Artificial Sequence
  Description of Artificial Sequence: Synthetic oligonucleotide
auaauguacuguucuucua

SEQ ID NO: 116361 - RNA, 19 nt, Artificial Sequence
  Description of Artificial Sequence: Synthetic oligonucleotide
caguauguauacgccacag

SEQ ID NO: 116362 - RNA, 19 nt, Artificial Sequence
  Description of Artificial Sequence: Synthetic oligonucleotide
gagucggcaggcugugggg

SEQ ID NO: 116363 - RNA, 19 nt, Artificial Sequence
  Description of Artificial Sequence: Synthetic oligonucleotide
uccgauaacaaggcucacu

SEQ ID NO: 116364 - RNA, 19 nt, Artificial Sequence
  Description of Artificial Sequence: Synthetic oligonucleotide
cauaggauuccgacucuuc

SEQ ID NO: 116365 - RNA, 19 nt, Artificial Sequence
  Description of Artificial Sequence: Synthetic oligonucleotide
aggcucuacauaggauucc

SEQ ID NO: 116366 - RNA, 19 nt, Artificial Sequence
  Description of Artificial Sequence: Synthetic oligonucleotide
cauggugaacgccauguga

SEQ ID NO: 116367 - RNA, 19 nt, Artificial Sequence
  Description of Artificial Sequence: Synthetic oligonucleotide
gacugauccccguaguuua

SEQ ID NO: 116368 - RNA, 19 nt, Artificial Sequence
  Description of Artificial Sequence: Synthetic oligonucleotide
cuguccuauuucugaagug

SEQ ID NO: 116369 - RNA, 19 nt, Artificial Sequence
  Description of Artificial Sequence: Synthetic oligonucleotide
uguuaauccugugguuugu

SEQ ID NO: 116370 - RNA, 19 nt, Artificial Sequence
  Description of Artificial Sequence: Synthetic oligonucleotide
cucuuagaauuuugacaac

SEQ ID NO: 116371 - RNA, 19 nt, Artificial Sequence
  Description of Artificial Sequence: Synthetic oligonucleotide
gucuauaacccauggugaa

SEQ ID NO: 116372 - RNA, 19 nt, Artificial Sequence
  Description of Artificial Sequence: Synthetic oligonucleotide
ugauccccguaguuuaguc

SEQ ID NO: 116373 - RNA, 19 nt, Artificial Sequence
  Description of Artificial Sequence: Synthetic oligonucleotide
gcugcagaauuauguuucg

SEQ ID NO: 116374 - RNA, 19 nt, Artificial Sequence
  Description of Artificial Sequence: Synthetic oligonucleotide
cuaaguuguaucuuagauu

SEQ ID NO: 116375 - RNA, 19 nt, Artificial Sequence
  Description of Artificial Sequence: Synthetic oligonucleotide
aaguucauagguagcucaa

SEQ ID NO: 116376 - RNA, 19 nt, Artificial Sequence
  Description of Artificial Sequence: Synthetic oligonucleotide
cauuucacacuguaugugu

SEQ ID NO: 116377 - RNA, 19 nt, Artificial Sequence
  Description of Artificial Sequence: Synthetic oligonucleotide
uguauacgccacagucgcu

SEQ ID NO: 116378 - RNA, 19 nt, Artificial Sequence
  Description of Artificial Sequence: Synthetic oligonucleotide
ugacugauccccguaguuu

SEQ ID NO: 116379 - RNA, 19 nt, Artificial Sequence
  Description of Artificial Sequence: Synthetic oligonucleotide
ggcaacaagucugcuauug

SEQ ID NO: 116380 - RNA, 19 nt, Artificial Sequence
  Description of Artificial Sequence: Synthetic oligonucleotide
ucuuaaucacgggcuuggc

SEQ ID NO: 116381 - RNA, 19 nt, Artificial Sequence
  Description of Artificial Sequence: Synthetic oligonucleotide
uacaugucggguccauguu

SEQ ID NO: 116382 - RNA, 19 nt, Artificial Sequence
  Description of Artificial Sequence: Synthetic oligonucleotide
ggcucuacauaggauuccg

SEQ ID NO: 116383 - RNA, 19 nt, Artificial Sequence
  Description of Artificial Sequence: Synthetic oligonucleotide
acgccaugugauuucugga

SEQ ID NO: 116384 - RNA, 19 nt, Artificial Sequence
  Description of Artificial Sequence: Synthetic oligonucleotide
ugccgagucggcaggcugu

SEQ ID NO: 116385 - RNA, 19 nt, Artificial Sequence
  Description of Artificial Sequence: Synthetic oligonucleotide
accuuggacaugacuuaac

SEQ ID NO: 116386 - RNA, 19 nt, Artificial Sequence
  Description of Artificial Sequence: Synthetic oligonucleotide
acuuaacauuacaggguug

SEQ ID NO: 116387 - RNA, 19 nt, Artificial Sequence
  Description of Artificial Sequence: Synthetic oligonucleotide
gguaacagagaugccuccc

SEQ ID NO: 116388 - RNA, 19 nt, Artificial Sequence
  Description of Artificial Sequence: Synthetic oligonucleotide
agcuguuaauccugugguu

SEQ ID NO: 116389 - RNA, 19 nt, Artificial Sequence
  Description of Artificial Sequence: Synthetic oligonucleotide
uggaacuuuuggguuggaa

SEQ ID NO: 116390 - RNA, 19 nt, Artificial Sequence
  Description of Artificial Sequence: Synthetic oligonucleotide
acgggcuuggcagaagagu

SEQ ID NO: 116391 - RNA, 19 nt, Artificial Sequence
  Description of Artificial Sequence: Synthetic oligonucleotide
uuaugucuacuagcaucac

SEQ ID NO: 116392 - RNA, 19 nt, Artificial Sequence
  Description of Artificial Sequence: Synthetic oligonucleotide
gauccccguaguuuagucu

SEQ ID NO: 116393 - RNA, 19 nt, Artificial Sequence
  Description of Artificial Sequence: Synthetic oligonucleotide
uccccguaguuuagucuga

SEQ ID NO: 116394 - RNA, 19 nt, Artificial Sequence
  Description of Artificial Sequence: Synthetic oligonucleotide
ucccuuagcuggagguggu

SEQ ID NO: 116395 - RNA, 19 nt, Artificial Sequence
  Description of Artificial Sequence: Synthetic oligonucleotide
auaccucuaaaugggucaa

SEQ ID NO: 116396 - RNA, 19 nt, Artificial Sequence
  Description of Artificial Sequence: Synthetic oligonucleotide
agauagcugauaaguacua

SEQ ID NO: 116397 - RNA, 19 nt, Artificial Sequence
  Description of Artificial Sequence: Synthetic oligonucleotide
ggaauuauacaaguucacu

SEQ ID NO: 116398 - RNA, 19 nt, Artificial Sequence
  Description of Artificial Sequence: Synthetic oligonucleotide
guaggcuuuaaaugccacu

SEQ ID NO: 116399 - RNA, 19 nt, Artificial Sequence
  Description of Artificial Sequence: Synthetic oligonucleotide
ucgugguaaugaggguuag

SEQ ID NO: 116400 - RNA, 19 nt, Artificial Sequence
  Description of Artificial Sequence: Synthetic oligonucleotide
ccuaaggaugcuucugcug

SEQ ID NO: 116401 - RNA, 19 nt, Artificial Sequence
  Description of Artificial Sequence: Synthetic oligonucleotide
guauguaauuaugucuacu

SEQ ID NO: 116402 - RNA, 19 nt, Artificial Sequence
  Description of Artificial Sequence: Synthetic oligonucleotide
uuuuggacaugagguggau

SEQ ID NO: 116403 - RNA, 19 nt, Artificial Sequence
  Description of Artificial Sequence: Synthetic oligonucleotide
uggugaacgccaugugauu

SEQ ID NO: 116404 - RNA, 19 nt, Artificial Sequence
  Description of Artificial Sequence: Synthetic oligonucleotide
uugaccgagacgggccucu

SEQ ID NO: 116405 - RNA, 19 nt, Artificial Sequence
  Description of Artificial Sequence: Synthetic oligonucleotide
aggguuagguucauauuuu

SEQ ID NO: 116406 - RNA, 19 nt, Artificial Sequence
  Description of Artificial Sequence: Synthetic oligonucleotide
caguaacuucguggcaugc

SEQ ID NO: 116407 - RNA, 19 nt, Artificial Sequence
  Description of Artificial Sequence: Synthetic oligonucleotide
cuguuauuugauucuucgu

SEQ ID NO: 116408 - RNA, 19 nt, Artificial Sequence
  Description of Artificial Sequence: Synthetic oligonucleotide
ggguuggaaccucucauaa

SEQ ID NO: 116409 - RNA, 19 nt, Artificial Sequence
  Description of Artificial Sequence: Synthetic oligonucleotide
gccucuuagucacucugac

SEQ ID NO: 116410 - RNA, 19 nt, Artificial Sequence
  Description of Artificial Sequence: Synthetic oligonucleotide
uagaucugacacgcuuguc

SEQ ID NO: 116411 - RNA, 19 nt, Artificial Sequence
  Description of Artificial Sequence: Synthetic oligonucleotide
ggacaugacuuaacauuac

SEQ ID NO: 116412 - RNA, 19 nt, Artificial Sequence
  Description of Artificial Sequence: Synthetic oligonucleotide
aguugcaguuucaguacua

SEQ ID NO: 116413 - RNA, 19 nt, Artificial Sequence
  Description of Artificial Sequence: Synthetic oligonucleotide
caaguucacuaaagaauau

SEQ ID NO: 116414 - RNA, 19 nt, Artificial Sequence
  Description of Artificial Sequence: Synthetic oligonucleotide
uuugaccgagacgggccuc

SEQ ID NO: 116415 - RNA, 19 nt, Artificial Sequence
  Description of Artificial Sequence: Synthetic oligonucleotide
ucgcugcuaucauccgggu

SEQ ID NO: 116416 - RNA, 19 nt, Artificial Sequence
  Description of Artificial Sequence: Synthetic oligonucleotide
cugaggaauuauacaaguu

SEQ ID NO: 116417 - RNA, 19 nt, Artificial Sequence
  Description of Artificial Sequence: Synthetic oligonucleotide
uaccucuaaaugggucaaa

SEQ ID NO: 116418 - RNA, 19 nt, Artificial Sequence
  Description of Artificial Sequence: Synthetic oligonucleotide
gcacuucagcucuguacug

SEQ ID NO: 116419 - RNA, 19 nt, Artificial Sequence
  Description of Artificial Sequence: Synthetic oligonucleotide
cagauaccucuaaaugggu

SEQ ID NO: 116420 - RNA, 19 nt, Artificial Sequence
  Description of Artificial Sequence: Synthetic oligonucleotide
gaccgagacgggccucuga

SEQ ID NO: 116421 - RNA, 19 nt, Artificial Sequence
  Description of Artificial Sequence: Synthetic oligonucleotide
cuuagacagugcagguccu

SEQ ID NO: 116422 - RNA, 19 nt, Artificial Sequence
  Description of Artificial Sequence: Synthetic oligonucleotide
ggaaaccaguucaucaagu

SEQ ID NO: 116423 - RNA, 19 nt, Artificial Sequence
  Description of Artificial Sequence: Synthetic oligonucleotide
ccguaguuuagucugauuu

SEQ ID NO: 116424 - RNA, 19 nt, Artificial Sequence
  Description of Artificial Sequence: Synthetic oligonucleotide
ucguucuuucggguuugua

SEQ ID NO: 116425 - RNA, 19 nt, Artificial Sequence
  Description of Artificial Sequence: Synthetic oligonucleotide
cauuuagaucugacacgcu

SEQ ID NO: 116426 - RNA, 19 nt, Artificial Sequence
  Description of Artificial Sequence: Synthetic oligonucleotide
aggcaacaagucugcuauu

SEQ ID NO: 116427 - RNA, 19 nt, Artificial Sequence
  Description of Artificial Sequence: Synthetic oligonucleotide
cccauucuacuucuaaaua

SEQ ID NO: 116428 - RNA, 19 nt, Artificial Sequence
  Description of Artificial Sequence: Synthetic oligonucleotide
ugaccgagacgggccucug

SEQ ID NO: 116429 - RNA, 19 nt, Artificial Sequence
  Description of Artificial Sequence: Synthetic oligonucleotide
acuucguggcaugcagauu

SEQ ID NO: 116430 - RNA, 19 nt, Artificial Sequence
  Description of Artificial Sequence: Synthetic oligonucleotide
ggacgcagugacagucaag

SEQ ID NO: 116431 - RNA, 19 nt, Artificial Sequence
  Description of Artificial Sequence: Synthetic oligonucleotide
cuccgauaacaaggcucac

SEQ ID NO: 116432 - RNA, 19 nt, Artificial Sequence
  Description of Artificial Sequence: Synthetic oligonucleotide
ccgauaacaaggcucacuu

SEQ ID NO: 116433 - RNA, 19 nt, Artificial Sequence
  Description of Artificial Sequence: Synthetic oligonucleotide
cugacugauccccguaguu

SEQ ID NO: 116434 - RNA, 19 nt, Artificial Sequence
  Description of Artificial Sequence: Synthetic oligonucleotide
ccggcauacugcucugcuc

SEQ ID NO: 116435 - RNA, 19 nt, Artificial Sequence
  Description of Artificial Sequence: Synthetic oligonucleotide
ggugaacgccaugugauuu

SEQ ID NO: 116436 - RNA, 19 nt, Artificial Sequence
  Description of Artificial Sequence: Synthetic oligonucleotide
gcugacugauccccguagu

SEQ ID NO: 116437 - RNA, 19 nt, Artificial Sequence
  Description of Artificial Sequence: Synthetic oligonucleotide
cagcucuguacugucuaua

SEQ ID NO: 116438 - RNA, 19 nt, Artificial Sequence
  Description of Artificial Sequence: Synthetic oligonucleotide
gccucccuuagcuggaggu

SEQ ID NO: 116439 - RNA, 19 nt, Artificial Sequence
  Description of Artificial Sequence: Synthetic oligonucleotide
gcucuacauaggauuccga

SEQ ID NO: 116440 - RNA, 19 nt, Artificial Sequence
  Description of Artificial Sequence: Synthetic oligonucleotide
gccgagucggcaggcugug

SEQ ID NO: 116441 - RNA, 19 nt, Artificial Sequence
  Description of Artificial Sequence: Synthetic oligonucleotide
caaugccguuucugcugua

SEQ ID NO: 116442 - RNA, 19 nt, Artificial Sequence
  Description of Artificial Sequence: Synthetic oligonucleotide
ccgagucggcaggcugugg

SEQ ID NO: 116443 - RNA, 19 nt, Artificial Sequence
  Description of Artificial Sequence: Synthetic oligonucleotide
gggcuuggcagaagaguuu

SEQ ID NO: 116444 - RNA, 19 nt, Artificial Sequence
  Description of Artificial Sequence: Synthetic oligonucleotide
cgauaacaaggcucacuuu

SEQ ID NO: 116445 - RNA, 19 nt, Artificial Sequence
  Description of Artificial Sequence: Synthetic oligonucleotide
gacgggccucugagugagu

SEQ ID NO: 116446 - RNA, 19 nt, Artificial Sequence
  Description of Artificial Sequence: Synthetic oligonucleotide
cccguaguuuagucugauu

SEQ ID NO: 116447 - RNA, 19 nt, Artificial Sequence
  Description of Artificial Sequence: Synthetic oligonucleotide
ccccguaguuuagucugau

SEQ ID NO: 116448 - RNA, 19 nt, Artificial Sequence
  Description of Artificial Sequence: Synthetic oligonucleotide
uuaagauuugacaaguuug

SEQ ID NO: 116449 - RNA, 19 nt, Artificial Sequence
  Description of Artificial Sequence: Synthetic oligonucleotide
ugaauuaccucuuagguga

SEQ ID NO: 116450 - RNA, 19 nt, Artificial Sequence
  Description of Artificial Sequence: Synthetic oligonucleotide
aauagucacauccauaggu

SEQ ID NO: 116451 - RNA, 19 nt, Artificial Sequence
  Description of Artificial Sequence: Synthetic oligonucleotide
uauaaccacaccauuaugc

SEQ ID NO: 116452 - RNA, 19 nt, Artificial Sequence
  Description of Artificial Sequence: Synthetic oligonucleotide
uaaaagaguaucaaggcga

SEQ ID NO: 116453 - RNA, 19 nt, Artificial Sequence
  Description of Artificial Sequence: Synthetic oligonucleotide
agaguaucaaaagacagcc

SEQ ID NO: 116454 - RNA, 19 nt, Artificial Sequence
  Description of Artificial Sequence: Synthetic oligonucleotide
aaguguaacauccagugcu

SEQ ID NO: 116455 - RNA, 19 nt, Artificial Sequence
  Description of Artificial Sequence: Synthetic oligonucleotide
uaauggauagguaauacga

SEQ ID NO: 116456 - RNA, 19 nt, Artificial Sequence
  Description of Artificial Sequence: Synthetic oligonucleotide
ucuauaaugagcauggcua

SEQ ID NO: 116457 - RNA, 19 nt, Artificial Sequence
  Description of Artificial Sequence: Synthetic oligonucleotide
uucgacacaccauacaugg

SEQ ID NO: 116458 - RNA, 19 nt, Artificial Sequence
  Description of Artificial Sequence: Synthetic oligonucleotide
uauacgaguucccugaugc

SEQ ID NO: 116459 - RNA, 19 nt, Artificial Sequence
  Description of Artificial Sequence: Synthetic oligonucleotide
uguaaagucgcccagcugu

SEQ ID NO: 116460 - RNA, 19 nt, Artificial Sequence
  Description of Artificial Sequence: Synthetic oligonucleotide
aauucuaucaaggcuauug

SEQ ID NO: 116461 - RNA, 19 nt, Artificial Sequence
  Description of Artificial Sequence: Synthetic oligonucleotide
auaucacuuuaacagaaac

SEQ ID NO: 116462 - RNA, 19 nt, Artificial Sequence
  Description of Artificial Sequence: Synthetic oligonucleotide
cuaauaugauaauaagccg

SEQ ID NO: 116463 - RNA, 19 nt, Artificial Sequence
  Description of Artificial Sequence: Synthetic oligonucleotide
uggauagguaauacgaggg

SEQ ID NO: 116464 - RNA, 19 nt, Artificial Sequence
  Description of Artificial Sequence: Synthetic oligonucleotide
cuauuaaguaaacugguag

SEQ ID NO: 116465 - RNA, 19 nt, Artificial Sequence
  Description of Artificial Sequence: Synthetic oligonucleotide
aauacgagggaaguguaac

SEQ ID NO: 116466 - RNA, 19 nt, Artificial Sequence
  Description of Artificial Sequence: Synthetic oligonucleotide
uuacauaucccauaauuac

SEQ ID NO: 116467 - RNA, 19 nt, Artificial Sequence
  Description of Artificial Sequence: Synthetic oligonucleotide
ugacaguccacuaaaauaa

SEQ ID NO: 116468 - RNA, 19 nt, Artificial Sequence
  Description of Artificial Sequence: Synthetic oligonucleotide
uauuaaguuuagaauagcu

SEQ ID NO: 116469 - RNA, 19 nt, Artificial Sequence
  Description of Artificial Sequence: Synthetic oligonucleotide
uaaccuaccacuuuuaaua

SEQ ID NO: 116470 - RNA, 19 nt, Artificial Sequence
  Description of Artificial Sequence: Synthetic oligonucleotide
uguagaguaucaaaagaca

SEQ ID NO: 116471 - RNA, 19 nt, Artificial Sequence
  Description of Artificial Sequence: Synthetic oligonucleotide
ugucuaauaugauaauaag

SEQ ID NO: 116472 - RNA, 19 nt, Artificial Sequence
  Description of Artificial Sequence: Synthetic oligonucleotide
aaauuuggaaugcaaguau

SEQ ID NO: 116473 - RNA, 19 nt, Artificial Sequence
  Description of Artificial Sequence: Synthetic oligonucleotide
agaugguagaugcauuacc

SEQ ID NO: 116474 - RNA, 19 nt, Artificial Sequence
  Description of Artificial Sequence: Synthetic oligonucleotide
gaaauggaaacauacuuga

SEQ ID NO: 116475 - RNA, 19 nt, Artificial Sequence
  Description of Artificial Sequence: Synthetic oligonucleotide
auggauagguaauacgagg

SEQ ID NO: 116476 - RNA, 19 nt, Artificial Sequence
  Description of Artificial Sequence: Synthetic oligonucleotide
uagaguaucaaaagacagc

SEQ ID NO: 116477 - RNA, 19 nt, Artificial Sequence
  Description of Artificial Sequence: Synthetic oligonucleotide
aguccacuaaaauaaaugu

SEQ ID NO: 116478 - RNA, 19 nt, Artificial Sequence
  Description of Artificial Sequence: Synthetic oligonucleotide
aagaguaucaaggcgaagu

SEQ ID NO: 116479 - RNA, 19 nt, Artificial Sequence
  Description of Artificial Sequence: Synthetic oligonucleotide
cuaauggauagguaauacg

SEQ ID NO: 116480 - RNA, 19 nt, Artificial Sequence
  Description of Artificial Sequence: Synthetic oligonucleotide
acgacaagcaaaauaacac

SEQ ID NO: 116481 - RNA, 19 nt, Artificial Sequence
  Description of Artificial Sequence: Synthetic oligonucleotide
gacggaaucuucuauuaag

SEQ ID NO: 116482 - RNA, 19 nt, Artificial Sequence
  Description of Artificial Sequence: Synthetic oligonucleotide
uaugauaauaagccgggaa

SEQ ID NO: 116483 - RNA, 19 nt, Artificial Sequence
  Description of Artificial Sequence: Synthetic oligonucleotide
aauggcaaguuagugauga

SEQ ID NO: 116484 - RNA, 19 nt, Artificial Sequence
  Description of Artificial Sequence: Synthetic oligonucleotide
uauucucuaauguaugccu

SEQ ID NO: 116485 - RNA, 19 nt, Artificial Sequence
  Description of Artificial Sequence: Synthetic oligonucleotide
uugguagggaucacaauag

SEQ ID NO: 116486 - RNA, 19 nt, Artificial Sequence
  Description of Artificial Sequence: Synthetic oligonucleotide
uuauuggaagggaacaaga

SEQ ID NO: 116487 - RNA, 19 nt, Artificial Sequence
  Description of Artificial Sequence: Synthetic oligonucleotide
aguauuauuggaagggaac

SEQ ID NO: 116488 - RNA, 19 nt, Artificial Sequence
  Description of Artificial Sequence: Synthetic oligonucleotide
auauacuggucauuaaucu

SEQ ID NO: 116489 - RNA, 19 nt, Artificial Sequence
  Description of Artificial Sequence: Synthetic oligonucleotide
guuaccuacaugaacaaug

SEQ ID NO: 116490 - RNA, 19 nt, Artificial Sequence
  Description of Artificial Sequence: Synthetic oligonucleotide
aaugcacuaauggauaggu

SEQ ID NO: 116491 - RNA, 19 nt, Artificial Sequence
  Description of Artificial Sequence: Synthetic oligonucleotide
uagauagugguauacgagu

SEQ ID NO: 116492 - RNA, 19 nt, Artificial Sequence
  Description of Artificial Sequence: Synthetic oligonucleotide
cucaauuuaacuccuggac

SEQ ID NO: 116493 - RNA, 19 nt, Artificial Sequence
  Description of Artificial Sequence: Synthetic oligonucleotide
auaagccgggaacaaaacg

SEQ ID NO: 116494 - RNA, 19 nt, Artificial Sequence
  Description of Artificial Sequence: Synthetic oligonucleotide
uuagaauagcuagaaagga

SEQ ID NO: 116495 - RNA, 19 nt, Artificial Sequence
  Description of Artificial Sequence: Synthetic oligonucleotide
uccacgauacagaaaaggu

SEQ ID NO: 116496 - RNA, 19 nt, Artificial Sequence
  Description of Artificial Sequence: Synthetic oligonucleotide
aguaauaucuuuccuuggu

SEQ ID NO: 116497 - RNA, 19 nt, Artificial Sequence
  Description of Artificial Sequence: Synthetic oligonucleotide
uagaauagcuagaaaggac

SEQ ID NO: 116498 - RNA, 19 nt, Artificial Sequence
  Description of Artificial Sequence: Synthetic oligonucleotide
agaacagcuacaaaaguag

SEQ ID NO: 116499 - RNA, 19 nt, Artificial Sequence
  Description of Artificial Sequence: Synthetic oligonucleotide
aauggauagguaauacgag

SEQ ID NO: 116500 - RNA, 19 nt, Artificial Sequence
  Description of Artificial Sequence: Synthetic oligonucleotide
uaucuuacauaucccauaa

SEQ ID NO: 116501 - RNA, 19 nt, Artificial Sequence
  Description of Artificial Sequence: Synthetic oligonucleotide
aacaagaacugaauuaccu

SEQ ID NO: 116502 - RNA, 19 nt, Artificial Sequence
  Description of Artificial Sequence: Synthetic oligonucleotide
aauagcuagaaaggacuuc

SEQ ID NO: 116503 - RNA, 19 nt, Artificial Sequence
  Description of Artificial Sequence: Synthetic oligonucleotide
acuaauggauagguaauac

SEQ ID NO: 116504 - RNA, 19 nt, Artificial Sequence
  Description of Artificial Sequence: Synthetic oligonucleotide
uaaagcgacgacaagcaaa

SEQ ID NO: 116505 - RNA, 19 nt, Artificial Sequence
  Description of Artificial Sequence: Synthetic oligonucleotide
aaaauuuggaaugcaagua

SEQ ID NO: 116506 - RNA, 19 nt, Artificial Sequence
  Description of Artificial Sequence: Synthetic oligonucleotide
uuguuaucugcccuguggc

SEQ ID NO: 116507 - RNA, 19 nt, Artificial Sequence
  Description of Artificial Sequence: Synthetic oligonucleotide
augccuagaaaauaaggca

SEQ ID NO: 116508 - RNA, 19 nt, Artificial Sequence
  Description of Artificial Sequence: Synthetic oligonucleotide
uuccacgauacagaaaagg

SEQ ID NO: 116509 - RNA, 19 nt, Artificial Sequence
  Description of Artificial Sequence: Synthetic oligonucleotide
uuaccuacaugaacaaugu

SEQ ID NO: 116510 - RNA, 19 nt, Artificial Sequence
  Description of Artificial Sequence: Synthetic oligonucleotide
uuuguaaagucgcccagcu

SEQ ID NO: 116511 - RNA, 19 nt, Artificial Sequence
  Description of Artificial Sequence: Synthetic oligonucleotide
ugggaguuuccaaugaaga

SEQ ID NO: 116512 - RNA, 19 nt, Artificial Sequence
  Description of Artificial Sequence: Synthetic oligonucleotide
cuuacucccaguaucuuac

SEQ ID NO: 116513 - RNA, 19 nt, Artificial Sequence
  Description of Artificial Sequence: Synthetic oligonucleotide
ucucuuugugcuccaagag

SEQ ID NO: 116514 - RNA, 19 nt, Artificial Sequence
  Description of Artificial Sequence: Synthetic oligonucleotide
guagaguaucaaaagacag

SEQ ID NO: 116515 - RNA, 19 nt, Artificial Sequence
  Description of Artificial Sequence: Synthetic oligonucleotide
ggaaguguaacauccagug

SEQ ID NO: 116516 - RNA, 19 nt, Artificial Sequence
  Description of Artificial Sequence: Synthetic oligonucleotide
ugacgcaucccuuuggaug

SEQ ID NO: 116517 - RNA, 19 nt, Artificial Sequence
  Description of Artificial Sequence: Synthetic oligonucleotide
ucgcugucuaauaugauaa

SEQ ID NO: 116518 - RNA, 19 nt, Artificial Sequence
  Description of Artificial Sequence: Synthetic oligonucleotide
caguccacuaaaauaaaug

SEQ ID NO: 116519 - RNA, 19 nt, Artificial Sequence
  Description of Artificial Sequence: Synthetic oligonucleotide
ucuagguccauccaccguc

SEQ ID NO: 116520 - RNA, 19 nt, Artificial Sequence
  Description of Artificial Sequence: Synthetic oligonucleotide
aauaagccgggaacaaaac

SEQ ID NO: 116521 - RNA, 19 nt, Artificial Sequence
  Description of Artificial Sequence: Synthetic oligonucleotide
guagaccucaauuuaacuc

SEQ ID NO: 116522 - RNA, 19 nt, Artificial Sequence
  Description of Artificial Sequence: Synthetic oligonucleotide
ugguagaugcauuaccucu

SEQ ID NO: 116523 - RNA, 19 nt, Artificial Sequence
  Description of Artificial Sequence: Synthetic oligonucleotide
aagaugguagaugcauuac

SEQ ID NO: 116524 - RNA, 19 nt, Artificial Sequence
  Description of Artificial Sequence: Synthetic oligonucleotide
gagcacuaauuccacagag

SEQ ID NO: 116525 - RNA, 19 nt, Artificial Sequence
  Description of Artificial Sequence: Synthetic oligonucleotide
accgaaaacaaguuuugca

SEQ ID NO: 116526 - RNA, 19 nt, Artificial Sequence
  Description of Artificial Sequence: Synthetic oligonucleotide
gacgcaucccuuuggaugc

SEQ ID NO: 116527 - RNA, 19 nt, Artificial Sequence
  Description of Artificial Sequence: Synthetic oligonucleotide
uuucaagcaccgaaaacaa

SEQ ID NO: 116528 - RNA, 19 nt, Artificial Sequence
  Description of Artificial Sequence: Synthetic oligonucleotide
ucccugaacugcaauauac

SEQ ID NO: 116529 - RNA, 19 nt, Artificial Sequence
  Description of Artificial Sequence: Synthetic oligonucleotide
gaauagucacauccauagg

SEQ ID NO: 116530 - RNA, 19 nt, Artificial Sequence
  Description of Artificial Sequence: Synthetic oligonucleotide
ugccaaaugcacuaaugga

SEQ ID NO: 116531 - RNA, 19 nt, Artificial Sequence
  Description of Artificial Sequence: Synthetic oligonucleotide
gaacugaauuaccucuuag

SEQ ID NO: 116532 - RNA, 19 nt, Artificial Sequence
  Description of Artificial Sequence: Synthetic oligonucleotide
aaguuuagaauagcuagaa

SEQ ID NO: 116533 - RNA, 19 nt, Artificial Sequence
  Description of Artificial Sequence: Synthetic oligonucleotide
guuacccugagaaagacuc

SEQ ID NO: 116534 - RNA, 19 nt, Artificial Sequence
  Description of Artificial Sequence: Synthetic oligonucleotide
aguaacucuuaauuucaca

SEQ ID NO: 116535 - RNA, 19 nt, Artificial Sequence
  Description of Artificial Sequence: Synthetic oligonucleotide
gcaaguauuauuggaaggg

SEQ ID NO: 116536 - RNA, 19 nt, Artificial Sequence
  Description of Artificial Sequence: Synthetic oligonucleotide
aucaaggcuauuguuaucu

SEQ ID NO: 116537 - RNA, 19 nt, Artificial Sequence
  Description of Artificial Sequence: Synthetic oligonucleotide
agcaagauauuuuccacaa

SEQ ID NO: 116538 - RNA, 19 nt, Artificial Sequence
  Description of Artificial Sequence: Synthetic oligonucleotide
aauguaugccuagaaaaua

SEQ ID NO: 116539 - RNA, 19 nt, Artificial Sequence
  Description of Artificial Sequence: Synthetic oligonucleotide
augguagaugcauuaccuc

SEQ ID NO: 116540 - RNA, 19 nt, Artificial Sequence
  Description of Artificial Sequence: Synthetic oligonucleotide
aggcaauuggauucuuggg

SEQ ID NO: 116541 - RNA, 19 nt, Artificial Sequence
  Description of Artificial Sequence: Synthetic oligonucleotide
accaguauuuucagagucc

SEQ ID NO: 116542 - RNA, 19 nt, Artificial Sequence
  Description of Artificial Sequence: Synthetic oligonucleotide
aaagcgacgacaagcaaaa

SEQ ID NO: 116543 - RNA, 19 nt, Artificial Sequence
  Description of Artificial Sequence: Synthetic oligonucleotide
accuuucaguuacugacag

SEQ ID NO: 116544 - RNA, 19 nt, Artificial Sequence
  Description of Artificial Sequence: Synthetic oligonucleotide
cuuacauaucccauaauua

SEQ ID NO: 116545 - RNA, 19 nt, Artificial Sequence
  Description of Artificial Sequence: Synthetic oligonucleotide
uuuuguaaagucgcccagc

SEQ ID NO: 116546 - RNA, 19 nt, Artificial Sequence
  Description of Artificial Sequence: Synthetic oligonucleotide
ugugcgucccuucucaguc

SEQ ID NO: 116547 - RNA, 19 nt, Artificial Sequence
  Description of Artificial Sequence: Synthetic oligonucleotide
augucuagguccauccacc

SEQ ID NO: 116548 - RNA, 19 nt, Artificial Sequence
  Description of Artificial Sequence: Synthetic oligonucleotide
uucuauuaaccuaccacuu

SEQ ID NO: 116549 - RNA, 19 nt, Artificial Sequence
  Description of Artificial Sequence: Synthetic oligonucleotide
gacgacaagcaaaauaaca

SEQ ID NO: 116550 - RNA, 19 nt, Artificial Sequence
  Description of Artificial Sequence: Synthetic oligonucleotide
ugucuagguccauccaccg

SEQ ID NO: 116551 - RNA, 19 nt, Artificial Sequence
  Description of Artificial Sequence: Synthetic oligonucleotide
cacuccaccgcuucgacac

SEQ ID NO: 116552 - RNA, 19 nt, Artificial Sequence
  Description of Artificial Sequence: Synthetic oligonucleotide
aguagaccucaauuuaacu

SEQ ID NO: 116553 - RNA, 19 nt, Artificial Sequence
  Description of Artificial Sequence: Synthetic oligonucleotide
ccgaaaacaaguuuugcag

SEQ ID NO: 116554 - RNA, 19 nt, Artificial Sequence
  Description of Artificial Sequence: Synthetic oligonucleotide
accuaugaaucacacacau

SEQ ID NO: 116555 - RNA, 19 nt, Artificial Sequence
  Description of Artificial Sequence: Synthetic oligonucleotide
uagcuggaaauacuacuca

SEQ ID NO: 116556 - RNA, 19 nt, Artificial Sequence
  Description of Artificial Sequence: Synthetic oligonucleotide
gcaaguuagugaugaaugg

SEQ ID NO: 116557 - RNA, 19 nt, Artificial Sequence
  Description of Artificial Sequence: Synthetic oligonucleotide
accuaaaauugccaacaug

SEQ ID NO: 116558 - RNA, 19 nt, Artificial Sequence
  Description of Artificial Sequence: Synthetic oligonucleotide
gauagugguauacgaguuc

SEQ ID NO: 116559 - RNA, 19 nt, Artificial Sequence
  Description of Artificial Sequence: Synthetic oligonucleotide
aaccuaccacuuuuaauau

SEQ ID NO: 116560 - RNA, 19 nt, Artificial Sequence
  Description of Artificial Sequence: Synthetic oligonucleotide
caguuacuaagcaaaauaa

SEQ ID NO: 116561 - RNA, 19 nt, Artificial Sequence
  Description of Artificial Sequence: Synthetic oligonucleotide
aaguuagugaugaauggua

SEQ ID NO: 116562 - RNA, 19 nt, Artificial Sequence
  Description of Artificial Sequence: Synthetic oligonucleotide
ugcuuagccacaucgcuuc

SEQ ID NO: 116563 - RNA, 19 nt, Artificial Sequence
  Description of Artificial Sequence: Synthetic oligonucleotide
uauuauuggaagggaacaa

SEQ ID NO: 116564 - RNA, 19 nt, Artificial Sequence
  Description of Artificial Sequence: Synthetic oligonucleotide
aauagucaggcuguagcaa

SEQ ID NO: 116565 - RNA, 19 nt, Artificial Sequence
  Description of Artificial Sequence: Synthetic oligonucleotide
acugacaguccacuaaaau

SEQ ID NO: 116566 - RNA, 19 nt, Artificial Sequence
  Description of Artificial Sequence: Synthetic oligonucleotide
ucuacccagucuuuuguaa

SEQ ID NO: 116567 - RNA, 19 nt, Artificial Sequence
  Description of Artificial Sequence: Synthetic oligonucleotide
uauuaaccuaccacuuuua

SEQ ID NO: 116568 - RNA, 19 nt, Artificial Sequence
  Description of Artificial Sequence: Synthetic oligonucleotide
acgagggaaguguaacauc

SEQ ID NO: 116569 - RNA, 19 nt, Artificial Sequence
  Description of Artificial Sequence: Synthetic oligonucleotide
cagagucccuuacuaaugc

SEQ ID NO: 116570 - RNA, 19 nt, Artificial Sequence
  Description of Artificial Sequence: Synthetic oligonucleotide
acugggguugcaguuguac

SEQ ID NO: 116571 - RNA, 19 nt, Artificial Sequence
  Description of Artificial Sequence: Synthetic oligonucleotide
aaacucuuauuguuaccua

SEQ ID NO: 116572 - RNA, 19 nt, Artificial Sequence
  Description of Artificial Sequence: Synthetic oligonucleotide
aauuggauucuugggaguu

SEQ ID NO: 116573 - RNA, 19 nt, Artificial Sequence
  Description of Artificial Sequence: Synthetic oligonucleotide
accuacaugaacaauguuu

SEQ ID NO: 116574 - RNA, 19 nt, Artificial Sequence
  Description of Artificial Sequence: Synthetic oligonucleotide
acuaacugcucugaaauua

SEQ ID NO: 116575 - RNA, 19 nt, Artificial Sequence
  Description of Artificial Sequence: Synthetic oligonucleotide
cauccauaggucucaauca

SEQ ID NO: 116576 - RNA, 19 nt, Artificial Sequence
  Description of Artificial Sequence: Synthetic oligonucleotide
uacucuacccagucuuuug

SEQ ID NO: 116577 - RNA, 19 nt, Artificial Sequence
  Description of Artificial Sequence: Synthetic oligonucleotide
aaaagaguaucaaggcgaa

SEQ ID NO: 116578 - RNA, 19 nt, Artificial Sequence
  Description of Artificial Sequence: Synthetic oligonucleotide
uaauacgagggaaguguaa

SEQ ID NO: 116579 - RNA, 19 nt, Artificial Sequence
  Description of Artificial Sequence: Synthetic oligonucleotide
auagucaggcuguagcaau

SEQ ID NO: 116580 - RNA, 19 nt, Artificial Sequence
  Description of Artificial Sequence: Synthetic oligonucleotide
agguauacaauaacaacaa

SEQ ID NO: 116581 - RNA, 19 nt, Artificial Sequence
  Description of Artificial Sequence: Synthetic oligonucleotide
ggcaaguuagugaugaaug

SEQ ID NO: 116582 - RNA, 19 nt, Artificial Sequence
  Description of Artificial Sequence: Synthetic oligonucleotide
uggaauagucacauccaua

SEQ ID NO: 116583 - RNA, 19 nt, Artificial Sequence
  Description of Artificial Sequence: Synthetic oligonucleotide
acauagaaauagucaggcu

SEQ ID NO: 116584 - RNA, 19 nt, Artificial Sequence
  Description of Artificial Sequence: Synthetic oligonucleotide
accguccgaaguucaaagg

SEQ ID NO: 116585 - RNA, 19 nt, Artificial Sequence
  Description of Artificial Sequence: Synthetic oligonucleotide
agcgacgacaagcaaaaua

SEQ ID NO: 116586 - RNA, 19 nt, Artificial Sequence
  Description of Artificial Sequence: Synthetic oligonucleotide
cuucgacacaccauacaug

SEQ ID NO: 116587 - RNA, 19 nt, Artificial Sequence
  Description of Artificial Sequence: Synthetic oligonucleotide
auuaccucuuaggugauau

SEQ ID NO: 116588 - RNA, 19 nt, Artificial Sequence
  Description of Artificial Sequence: Synthetic oligonucleotide
agcacgacaaaggcaauug

SEQ ID NO: 116589 - RNA, 19 nt, Artificial Sequence
  Description of Artificial Sequence: Synthetic oligonucleotide
accaguagaccucaauuua

SEQ ID NO: 116590 - RNA, 19 nt, Artificial Sequence
  Description of Artificial Sequence: Synthetic oligonucleotide
auacgagggaaguguaaca

SEQ ID NO: 116591 - RNA, 19 nt, Artificial Sequence
  Description of Artificial Sequence: Synthetic oligonucleotide
aacuaacugcucugaaauu

SEQ ID NO: 116592 - RNA, 19 nt, Artificial Sequence
  Description of Artificial Sequence: Synthetic oligonucleotide
auggucuauauucucuaau

SEQ ID NO: 116593 - RNA, 19 nt, Artificial Sequence
  Description of Artificial Sequence: Synthetic oligonucleotide
agagcacuaauuccacaga

SEQ ID NO: 116594 - RNA, 19 nt, Artificial Sequence
  Description of Artificial Sequence: Synthetic oligonucleotide
ggcaauuggauucuuggga

SEQ ID NO: 116595 - RNA, 19 nt, Artificial Sequence
  Description of Artificial Sequence: Synthetic oligonucleotide
guuacccaguucauggaag

SEQ ID NO: 116596 - RNA, 19 nt, Artificial Sequence
  Description of Artificial Sequence: Synthetic oligonucleotide
aaagaguaucaaggcgaag

SEQ ID NO: 116597 - RNA, 19 nt, Artificial Sequence
  Description of Artificial Sequence: Synthetic oligonucleotide
acucuacccagucuuuugu

SEQ ID NO: 116598 - RNA, 19 nt, Artificial Sequence
  Description of Artificial Sequence: Synthetic oligonucleotide
uuguaaagucgcccagcug

SEQ ID NO: 116599 - RNA, 19 nt, Artificial Sequence
  Description of Artificial Sequence: Synthetic oligonucleotide
agaguaucaaggcgaagua

SEQ ID NO: 116600 - RNA, 19 nt, Artificial Sequence
  Description of Artificial Sequence: Synthetic oligonucleotide
ggcuaaagcgacgacaagc

SEQ ID NO: 116601 - RNA, 19 nt, Artificial Sequence
  Description of Artificial Sequence: Synthetic oligonucleotide
gcuauuguuaucugcccug

SEQ ID NO: 116602 - RNA, 19 nt, Artificial Sequence
  Description of Artificial Sequence: Synthetic oligonucleotide
augacggaaucuucuauua

SEQ ID NO: 116603 - RNA, 19 nt, Artificial Sequence
  Description of Artificial Sequence: Synthetic oligonucleotide
guaucuuacauaucccaua

SEQ ID NO: 116604 - RNA, 19 nt, Artificial Sequence
  Description of Artificial Sequence: Synthetic oligonucleotide
ucaugcuuacucccaguau

SEQ ID NO: 116605 - RNA, 19 nt, Artificial Sequence
  Description of Artificial Sequence: Synthetic oligonucleotide
ugcagucauaugagcaggu

SEQ ID NO: 116606 - RNA, 19 nt, Artificial Sequence
  Description of Artificial Sequence: Synthetic oligonucleotide
accgcuucgacacaccaua

SEQ ID NO: 116607 - RNA, 19 nt, Artificial Sequence
  Description of Artificial Sequence: Synthetic oligonucleotide
caccguccgaaguucaaag

SEQ ID NO: 116608 - RNA, 19 nt, Artificial Sequence
  Description of Artificial Sequence: Synthetic oligonucleotide
uugaauucucgcugucuaa

SEQ ID NO: 116609 - RNA, 19 nt, Artificial Sequence
  Description of Artificial Sequence: Synthetic oligonucleotide
aauuaagauuugacaaguu

SEQ ID NO: 116610 - RNA, 19 nt, Artificial Sequence
  Description of Artificial Sequence: Synthetic oligonucleotide
agcaccgaaaacaaguuuu

SEQ ID NO: 116611 - RNA, 19 nt, Artificial Sequence
  Description of Artificial Sequence: Synthetic oligonucleotide
auguaugccuagaaaauaa

SEQ ID NO: 116612 - RNA, 19 nt, Artificial Sequence
  Description of Artificial Sequence: Synthetic oligonucleotide
uacgagggaaguguaacau

SEQ ID NO: 116613 - RNA, 19 nt, Artificial Sequence
  Description of Artificial Sequence: Synthetic oligonucleotide
cgagggaaguguaacaucc

SEQ ID NO: 116614 - RNA, 19 nt, Artificial Sequence
  Description of Artificial Sequence: Synthetic oligonucleotide
uaaagucgcccagcugugg

SEQ ID NO: 116615 - RNA, 19 nt, Artificial Sequence
  Description of Artificial Sequence: Synthetic oligonucleotide
caauuuaacuccuggacau

SEQ ID NO: 116616 - RNA, 19 nt, Artificial Sequence
  Description of Artificial Sequence: Synthetic oligonucleotide
uaaucuuuucaagcaccga

SEQ ID NO: 116617 - RNA, 19 nt, Artificial Sequence
  Description of Artificial Sequence: Synthetic oligonucleotide
caguaacucuuaauuucac

SEQ ID NO: 116618 - RNA, 19 nt, Artificial Sequence
  Description of Artificial Sequence: Synthetic oligonucleotide
acgacaaaggcaauuggau

SEQ ID NO: 116619 - RNA, 19 nt, Artificial Sequence
  Description of Artificial Sequence: Synthetic oligonucleotide
gauaguccuggggucaaac

SEQ ID NO: 116620 - RNA, 19 nt, Artificial Sequence
  Description of Artificial Sequence: Synthetic oligonucleotide
aguuagugaugaaugguaa

SEQ ID NO: 116621 - RNA, 19 nt, Artificial Sequence
  Description of Artificial Sequence: Synthetic oligonucleotide
uacucccaguaucuuacau

SEQ ID NO: 116622 - RNA, 19 nt, Artificial Sequence
  Description of Artificial Sequence: Synthetic oligonucleotide
guauacgaguucccugaug

SEQ ID NO: 116623 - RNA, 19 nt, Artificial Sequence
  Description of Artificial Sequence: Synthetic oligonucleotide
aaaagacagcccacuugug

SEQ ID NO: 116624 - RNA, 19 nt, Artificial Sequence
  Description of Artificial Sequence: Synthetic oligonucleotide
agagucccuuacuaaugca

SEQ ID NO: 116625 - RNA, 19 nt, Artificial Sequence
  Description of Artificial Sequence: Synthetic oligonucleotide
agcauggcuaaagcgacga

SEQ ID NO: 116626 - RNA, 19 nt, Artificial Sequence
  Description of Artificial Sequence: Synthetic oligonucleotide
ucgacacaccauacauggc

SEQ ID NO: 116627 - RNA, 19 nt, Artificial Sequence
  Description of Artificial Sequence: Synthetic oligonucleotide
guagaugcauuaccucuuc

SEQ ID NO: 116628 - RNA, 19 nt, Artificial Sequence
  Description of Artificial Sequence: Synthetic oligonucleotide
uaucaaggcuauuguuauc

SEQ ID NO: 116629 - RNA, 19 nt, Artificial Sequence
  Description of Artificial Sequence: Synthetic oligonucleotide
cuuccacgauacagaaaag

SEQ ID NO: 116630 - RNA, 19 nt, Artificial Sequence
  Description of Artificial Sequence: Synthetic oligonucleotide
gguaauacgagggaagugu

SEQ ID NO: 116631 - RNA, 19 nt, Artificial Sequence
  Description of Artificial Sequence: Synthetic oligonucleotide
uggcuaaagcgacgacaag

SEQ ID NO: 116632 - RNA, 19 nt, Artificial Sequence
  Description of Artificial Sequence: Synthetic oligonucleotide
gaauucucgcugucuaaua

SEQ ID NO: 116633 - RNA, 19 nt, Artificial Sequence
  Description of Artificial Sequence: Synthetic oligonucleotide
gccgggaacaaaacgaacc

SEQ ID NO: 116634 - RNA, 19 nt, Artificial Sequence
  Description of Artificial Sequence: Synthetic oligonucleotide
gcgacgacaagcaaaauaa

SEQ ID NO: 116635 - RNA, 19 nt, Artificial Sequence
  Description of Artificial Sequence: Synthetic oligonucleotide
uuaugacccuuuguauacu

SEQ ID NO: 116636 - RNA, 19 nt, Artificial Sequence
  Description of Artificial Sequence: Synthetic oligonucleotide
gagcauaccaguagaccuc

SEQ ID NO: 116637 - RNA, 19 nt, Artificial Sequence
  Description of Artificial Sequence: Synthetic oligonucleotide
gaucaguuacuaagcaaaa

SEQ ID NO: 116638 - RNA, 19 nt, Artificial Sequence
  Description of Artificial Sequence: Synthetic oligonucleotide
ggcgaaguaugucuccacc

SEQ ID NO: 116639 - RNA, 19 nt, Artificial Sequence
  Description of Artificial Sequence: Synthetic oligonucleotide
ccaguauuuucagaguccc

SEQ ID NO: 116640 - RNA, 19 nt, Artificial Sequence
  Description of Artificial Sequence: Synthetic oligonucleotide
uuacucccaguaucuuaca

SEQ ID NO: 116641 - RNA, 19 nt, Artificial Sequence
  Description of Artificial Sequence: Synthetic oligonucleotide
gggucaaaccuaugaauca

SEQ ID NO: 116642 - RNA, 19 nt, Artificial Sequence
  Description of Artificial Sequence: Synthetic oligonucleotide
uuaccucuuaggugauauc

SEQ ID NO: 116643 - RNA, 19 nt, Artificial Sequence
  Description of Artificial Sequence: Synthetic oligonucleotide
gugccuacuuuacuccaac

SEQ ID NO: 116644 - RNA, 19 nt, Artificial Sequence
  Description of Artificial Sequence: Synthetic oligonucleotide
guaaagucgcccagcugug

SEQ ID NO: 116645 - RNA, 19 nt, Artificial Sequence
  Description of Artificial Sequence: Synthetic oligonucleotide
cuauuaaccuaccacuuuu

SEQ ID NO: 116646 - RNA, 19 nt, Artificial Sequence
  Description of Artificial Sequence: Synthetic oligonucleotide
ugugcuccaagaguuuauu

SEQ ID NO: 116647 - RNA, 19 nt, Artificial Sequence
  Description of Artificial Sequence: Synthetic oligonucleotide
aagcacgacaaaggcaauu

SEQ ID NO: 116648 - RNA, 19 nt, Artificial Sequence
  Description of Artificial Sequence: Synthetic oligonucleotide
guaagaagccauaucacuu

SEQ ID NO: 116649 - RNA, 19 nt, Artificial Sequence
  Description of Artificial Sequence: Synthetic oligonucleotide
aucuuacauaucccauaau

SEQ ID NO: 116650 - RNA, 19 nt, Artificial Sequence
  Description of Artificial Sequence: Synthetic oligonucleotide
aucgcuuccugugggcaag

SEQ ID NO: 116651 - RNA, 19 nt, Artificial Sequence
  Description of Artificial Sequence: Synthetic oligonucleotide
ucucgcugucuaauaugau

SEQ ID NO: 116652 - RNA, 19 nt, Artificial Sequence
  Description of Artificial Sequence: Synthetic oligonucleotide
uaccuacaugaacaauguu

SEQ ID NO: 116653 - RNA, 19 nt, Artificial Sequence
  Description of Artificial Sequence: Synthetic oligonucleotide
uccaccgcuucgacacacc

SEQ ID NO: 116654 - RNA, 19 nt, Artificial Sequence
  Description of Artificial Sequence: Synthetic oligonucleotide
gccagguaucacaaaauac

SEQ ID NO: 116655 - RNA, 19 nt, Artificial Sequence
  Description of Artificial Sequence: Synthetic oligonucleotide
agaccucaauuuaacuccu

SEQ ID NO: 116656 - RNA, 19 nt, Artificial Sequence
  Description of Artificial Sequence: Synthetic oligonucleotide
augacgcaucccuuuggau

SEQ ID NO: 116657 - RNA, 19 nt, Artificial Sequence
  Description of Artificial Sequence: Synthetic oligonucleotide
guaggcucuaaacucuuau

SEQ ID NO: 116658 - RNA, 19 nt, Artificial Sequence
  Description of Artificial Sequence: Synthetic oligonucleotide
gugaaggguguagucacuc

SEQ ID NO: 116659 - RNA, 19 nt, Artificial Sequence
  Description of Artificial Sequence: Synthetic oligonucleotide
ggaauuguagcuggaaaua

SEQ ID NO: 116660 - RNA, 19 nt, Artificial Sequence
  Description of Artificial Sequence: Synthetic oligonucleotide
caaguuagugaugaauggu

SEQ ID NO: 116661 - RNA, 19 nt, Artificial Sequence
  Description of Artificial Sequence: Synthetic oligonucleotide
aauuaccucuuaggugaua

SEQ ID NO: 116662 - RNA, 19 nt, Artificial Sequence
  Description of Artificial Sequence: Synthetic oligonucleotide
ggcucuaaacucuuauugu

SEQ ID NO: 116663 - RNA, 19 nt, Artificial Sequence
  Description of Artificial Sequence: Synthetic oligonucleotide
caacagagguucuucccaa

SEQ ID NO: 116664 - RNA, 19 nt, Artificial Sequence
  Description of Artificial Sequence: Synthetic oligonucleotide
agcauagccaacagagguu

SEQ ID NO: 116665 - RNA, 19 nt, Artificial Sequence
  Description of Artificial Sequence: Synthetic oligonucleotide
agcuuucaguuuggaaugu

SEQ ID NO: 116666 - RNA, 19 nt, Artificial Sequence
  Description of Artificial Sequence: Synthetic oligonucleotide
guaauacgagggaagugua

SEQ ID NO: 116667 - RNA, 19 nt, Artificial Sequence
  Description of Artificial Sequence: Synthetic oligonucleotide
gagggaaguguaacaucca

SEQ ID NO: 116668 - RNA, 19 nt, Artificial Sequence
  Description of Artificial Sequence: Synthetic oligonucleotide
gcaccgaaaacaaguuuug

SEQ ID NO: 116669 - RNA, 19 nt, Artificial Sequence
  Description of Artificial Sequence: Synthetic oligonucleotide
guuguacucuacccagucu

SEQ ID NO: 116670 - RNA, 19 nt, Artificial Sequence
  Description of Artificial Sequence: Synthetic oligonucleotide
gguaaaggucauagccaag

SEQ ID NO: 116671 - RNA, 19 nt, Artificial Sequence
  Description of Artificial Sequence: Synthetic oligonucleotide
aaagcacgacaaaggcaau

SEQ ID NO: 116672 - RNA, 19 nt, Artificial Sequence
  Description of Artificial Sequence: Synthetic oligonucleotide
cauccaccguccgaaguuc

SEQ ID NO: 116673 - RNA, 19 nt, Artificial Sequence
  Description of Artificial Sequence: Synthetic oligonucleotide
caugaacucucaguaauau

SEQ ID NO: 116674 - RNA, 19 nt, Artificial Sequence
  Description of Artificial Sequence: Synthetic oligonucleotide
cacuaauggauagguaaua

SEQ ID NO: 116675 - RNA, 19 nt, Artificial Sequence
  Description of Artificial Sequence: Synthetic oligonucleotide
agugccuacuuuacuccaa

SEQ ID NO: 116676 - RNA, 19 nt, Artificial Sequence
  Description of Artificial Sequence: Synthetic oligonucleotide
ccacaucgcuuccuguggg

SEQ ID NO: 116677 - RNA, 19 nt, Artificial Sequence
  Description of Artificial Sequence: Synthetic oligonucleotide
ccguccgaaguucaaagga

SEQ ID NO: 116678 - RNA, 19 nt, Artificial Sequence
  Description of Artificial Sequence: Synthetic oligonucleotide
cucuacccagucuuuugua

SEQ ID NO: 116679 - RNA, 19 nt, Artificial Sequence
  Description of Artificial Sequence: Synthetic oligonucleotide
caccauucuaaaagaguau

SEQ ID NO: 116680 - RNA, 19 nt, Artificial Sequence
  Description of Artificial Sequence: Synthetic oligonucleotide
gaacucucaguaauaucuu

SEQ ID NO: 116681 - RNA, 19 nt, Artificial Sequence
  Description of Artificial Sequence: Synthetic oligonucleotide
cuauuguuaucugcccugu

SEQ ID NO: 116682 - RNA, 19 nt, Artificial Sequence
  Description of Artificial Sequence: Synthetic oligonucleotide
ccggcaaauucuuccacga

SEQ ID NO: 116683 - RNA, 19 nt, Artificial Sequence
  Description of Artificial Sequence: Synthetic oligonucleotide
aagcgacgacaagcaaaau

SEQ ID NO: 116684 - RNA, 19 nt, Artificial Sequence
  Description of Artificial Sequence: Synthetic oligonucleotide
augcacuaauggauaggua

SEQ ID NO: 116685 - RNA, 19 nt, Artificial Sequence
  Description of Artificial Sequence: Synthetic oligonucleotide
gcagucauaugagcagguc

SEQ ID NO: 116686 - RNA, 19 nt, Artificial Sequence
  Description of Artificial Sequence: Synthetic oligonucleotide
gucuagguccauccaccgu

SEQ ID NO: 116687 - RNA, 19 nt, Artificial Sequence
  Description of Artificial Sequence: Synthetic oligonucleotide
auccaccguccgaaguuca

SEQ ID NO: 116688 - RNA, 19 nt, Artificial Sequence
  Description of Artificial Sequence: Synthetic oligonucleotide
ccacgauacagaaaagguu

SEQ ID NO: 116689 - RNA, 19 nt, Artificial Sequence
  Description of Artificial Sequence: Synthetic oligonucleotide
ucgcuuccugugggcaagu

SEQ ID NO: 116690 - RNA, 19 nt, Artificial Sequence
  Description of Artificial Sequence: Synthetic oligonucleotide
ccgcuucgacacaccauac

SEQ ID NO: 116691 - RNA, 19 nt, Artificial Sequence
  Description of Artificial Sequence: Synthetic oligonucleotide
cagugguaagaagccauau

SEQ ID NO: 116692 - RNA, 19 nt, Artificial Sequence
  Description of Artificial Sequence: Synthetic oligonucleotide
gugcuuagccacaucgcuu

SEQ ID NO: 116693 - RNA, 19 nt, Artificial Sequence
  Description of Artificial Sequence: Synthetic oligonucleotide
gguauacgaguucccugau

SEQ ID NO: 116694 - RNA, 19 nt, Artificial Sequence
  Description of Artificial Sequence: Synthetic oligonucleotide
ggcuguagcaaugcugcau

SEQ ID NO: 116695 - RNA, 19 nt, Artificial Sequence
  Description of Artificial Sequence: Synthetic oligonucleotide
ccaccgcuucgacacacca

SEQ ID NO: 116696 - RNA, 19 nt, Artificial Sequence
  Description of Artificial Sequence: Synthetic oligonucleotide
caccgcuucgacacaccau

SEQ ID NO: 116697 - RNA, 19 nt, Artificial Sequence
  Description of Artificial Sequence: Synthetic oligonucleotide
gggugugccccacuauaau

SEQ ID NO: 116698 - RNA, 19 nt, Artificial Sequence
  Description of Artificial Sequence: Synthetic oligonucleotide
ccauccaccguccgaaguu

SEQ ID NO: 116699 - RNA, 19 nt, Artificial Sequence
  Description of Artificial Sequence: Synthetic oligonucleotide
cuucacccaugggguugaa

SEQ ID NO: 116700 - RNA, 19 nt, Artificial Sequence
  Description of Artificial Sequence: Synthetic oligonucleotide
ucuuuauggaccuauaggg

SEQ ID NO: 116701 - RNA, 19 nt, Artificial Sequence
  Description of Artificial Sequence: Synthetic oligonucleotide
uuuacuuucacucuacagc

SEQ ID NO: 116702 - RNA, 19 nt, Artificial Sequence
  Description of Artificial Sequence: Synthetic oligonucleotide
uuuauuaccauauauuaga

SEQ ID NO: 116703 - RNA, 19 nt, Artificial Sequence
  Description of Artificial Sequence: Synthetic oligonucleotide
gaaucuugcaucuuaaagc

SEQ ID NO: 116704 - RNA, 19 nt, Artificial Sequence
  Description of Artificial Sequence: Synthetic oligonucleotide
aaacuaaacaaccuucaag

SEQ ID NO: 116705 - RNA, 19 nt, Artificial Sequence
  Description of Artificial Sequence: Synthetic oligonucleotide
aaugguauucucuugacaa

SEQ ID NO: 116706 - RNA, 19 nt, Artificial Sequence
  Description of Artificial Sequence: Synthetic oligonucleotide
ucuauauaaaguuuaauua

SEQ ID NO: 116707 - RNA, 19 nt, Artificial Sequence
  Description of Artificial Sequence: Synthetic oligonucleotide
aauaggauuagacuucuca

SEQ ID NO: 116708 - RNA, 19 nt, Artificial Sequence
  Description of Artificial Sequence: Synthetic oligonucleotide
aaucaugcaacgcugagga

SEQ ID NO: 116709 - RNA, 19 nt, Artificial Sequence
  Description of Artificial Sequence: Synthetic oligonucleotide
uucuuuauggaccuauagg

SEQ ID NO: 116710 - RNA, 19 nt, Artificial Sequence
  Description of Artificial Sequence: Synthetic oligonucleotide
agggguaacauauuaauag

SEQ ID NO: 116711 - RNA, 19 nt, Artificial Sequence
  Description of Artificial Sequence: Synthetic oligonucleotide
augguauuaaauugaacac

SEQ ID NO: 116712 - RNA, 19 nt, Artificial Sequence
  Description of Artificial Sequence: Synthetic oligonucleotide
uucugaaaagcaaauaugu

SEQ ID NO: 116713 - RNA, 19 nt, Artificial Sequence
  Description of Artificial Sequence: Synthetic oligonucleotide
ugauacauugguuagcuug

SEQ ID NO: 116714 - RNA, 19 nt, Artificial Sequence
  Description of Artificial Sequence: Synthetic oligonucleotide
aaguguuaaguguaaauca

SEQ ID NO: 116715 - RNA, 19 nt, Artificial Sequence
  Description of Artificial Sequence: Synthetic oligonucleotide
aguaaggugauuugguaac

SEQ ID NO: 116716 - RNA, 19 nt, Artificial Sequence
  Description of Artificial Sequence: Synthetic oligonucleotide
uuucagaaccauuucaugc

SEQ ID NO: 116717 - RNA, 19 nt, Artificial Sequence
  Description of Artificial Sequence: Synthetic oligonucleotide
auaugcaguacccaaacag

SEQ ID NO: 116718 - RNA, 19 nt, Artificial Sequence
  Description of Artificial Sequence: Synthetic oligonucleotide
uugaauugaaucaugcaac

SEQ ID NO: 116719 - RNA, 19 nt, Artificial Sequence
  Description of Artificial Sequence: Synthetic oligonucleotide
uuacuuucacucuacagcc

SEQ ID NO: 116720 - RNA, 19 nt, Artificial Sequence
  Description of Artificial Sequence: Synthetic oligonucleotide
uucuauggaguguuuaugg

SEQ ID NO: 116721 - RNA, 19 nt, Artificial Sequence
  Description of Artificial Sequence: Synthetic oligonucleotide
auugcacuauuccaggagc

SEQ ID NO: 116722 - RNA, 19 nt, Artificial Sequence
  Description of Artificial Sequence: Synthetic oligonucleotide
uuacuuuacacauaccaca

SEQ ID NO: 116723 - RNA, 19 nt, Artificial Sequence
  Description of Artificial Sequence: Synthetic oligonucleotide
auugaauugaaucaugcaa

SEQ ID NO: 116724 - RNA, 19 nt, Artificial Sequence
  Description of Artificial Sequence: Synthetic oligonucleotide
aacauugcacuauuccagg

SEQ ID NO: 116725 - RNA, 19 nt, Artificial Sequence
  Description of Artificial Sequence: Synthetic oligonucleotide
agaaucuugcaucuuaaag

SEQ ID NO: 116726 - RNA, 19 nt, Artificial Sequence
  Description of Artificial Sequence: Synthetic oligonucleotide
  modified_base (2)..(2): a, c, u, g, unknown or other
anaccugaauuuuaacuug

SEQ ID NO: 116727 - RNA, 19 nt, Artificial Sequence
  Description of Artificial Sequence: Synthetic oligonucleotide
uguggauucauucgagagg

SEQ ID NO: 116728 - RNA, 19 nt, Artificial Sequence
  Description of Artificial Sequence: Synthetic oligonucleotide
ugaacagauaucucagacg

SEQ ID NO: 116729 - RNA, 19 nt, Artificial Sequence
  Description of Artificial Sequence: Synthetic oligonucleotide
aaagauagggguaacauau

SEQ ID NO: 116730 - RNA, 19 nt, Artificial Sequence
  Description of Artificial Sequence: Synthetic oligonucleotide
uguuugaggguauacuggg

SEQ ID NO: 116731 - RNA, 19 nt, Artificial Sequence
  Description of Artificial Sequence: Synthetic oligonucleotide
  modified_base (4)..(4): a, c, u, g, unknown or other
acanaccugaauuuuaacu

SEQ ID NO: 116732 - RNA, 19 nt, Artificial Sequence
  Description of Artificial Sequence: Synthetic oligonucleotide
uauaguuaggcaugaaaca

SEQ ID NO: 116733 - RNA, 19 nt, Artificial Sequence
  Description of Artificial Sequence: Synthetic oligonucleotide
ugugcugaguugaugacag

SEQ ID NO: 116734 - RNA, 19 nt, Artificial Sequence
  Description of Artificial Sequence: Synthetic oligonucleotide
aaaugaaaagcagacguca

SEQ ID NO: 116735 - RNA, 19 nt, Artificial Sequence
  Description of Artificial Sequence: Synthetic oligonucleotide
auaguuaggcaugaaacac

SEQ ID NO: 116736 - RNA, 19 nt, Artificial Sequence
  Description of Artificial Sequence: Synthetic oligonucleotide
auaggcuaauauaagagac

SEQ ID NO: 116737 - RNA, 19 nt, Artificial Sequence
  Description of Artificial Sequence: Synthetic oligonucleotide
auugcauuggaauaggaaa

SEQ ID NO: 116738 - RNA, 19 nt, Artificial Sequence
  Description of Artificial Sequence: Synthetic oligonucleotide
ugugcuaauaaaauaggau

SEQ ID NO: 116739 - RNA, 19 nt, Artificial Sequence
  Description of Artificial Sequence: Synthetic oligonucleotide
uucucaaggaaccaaacau

SEQ ID NO: 116740 - RNA, 19 nt, Artificial Sequence
  Description of Artificial Sequence: Synthetic oligonucleotide
aaauggaagcacacuaccc

SEQ ID NO: 116741 - RNA, 19 nt, Artificial Sequence
  Description of Artificial Sequence: Synthetic oligonucleotide
gaaaacuaacggaagaggc

SEQ ID NO: 116742 - RNA, 19 nt, Artificial Sequence
  Description of Artificial Sequence: Synthetic oligonucleotide
ugauaaccauuuaaaacug

SEQ ID NO: 116743 - RNA, 19 nt, Artificial Sequence
  Description of Artificial Sequence: Synthetic oligonucleotide
cauaaugaggacuuuaaca

SEQ ID NO: 116744 - RNA, 19 nt, Artificial Sequence
  Description of Artificial Sequence: Synthetic oligonucleotide
uaacggaagaggcuuacag

SEQ ID NO: 116745 - RNA, 19 nt, Artificial Sequence
  Description of Artificial Sequence: Synthetic oligonucleotide
aaaagauguagucauuauu

SEQ ID NO: 116746 - RNA, 19 nt, Artificial Sequence
  Description of Artificial Sequence: Synthetic oligonucleotide
uuagagauaggacugugau

SEQ ID NO: 116747 - RNA, 19 nt, Artificial Sequence
  Description of Artificial Sequence: Synthetic oligonucleotide
ucuauggaguguuuauggg

SEQ ID NO: 116748 - RNA, 19 nt, Artificial Sequence
  Description of Artificial Sequence: Synthetic oligonucleotide
cagcauuagaaaacuaacg

SEQ ID NO: 116749 - RNA, 19 nt, Artificial Sequence
  Description of Artificial Sequence: Synthetic oligonucleotide
ugugauugucugaaccacg

SEQ ID NO: 116750 - RNA, 19 nt, Artificial Sequence
  Description of Artificial Sequence: Synthetic oligonucleotide
ucgaaauucauacuccauc

SEQ ID NO: 116751 - RNA, 19 nt, Artificial Sequence
  Description of Artificial Sequence: Synthetic oligonucleotide
uugguaacgguguuuaugu

SEQ ID NO: 116752 - RNA, 19 nt, Artificial Sequence
  Description of Artificial Sequence: Synthetic oligonucleotide
auauaagagacuacauuac

SEQ ID NO: 116753 - RNA, 19 nt, Artificial Sequence
  Description of Artificial Sequence: Synthetic oligonucleotide
accucuauuaaauuucaca

SEQ ID NO: 116754 - RNA, 19 nt, Artificial Sequence
  Description of Artificial Sequence: Synthetic oligonucleotide
agaaaacuaacggaagagg

SEQ ID NO: 116755 - RNA, 19 nt, Artificial Sequence
  Description of Artificial Sequence: Synthetic oligonucleotide
gauaggcuaauauaagaga

SEQ ID NO: 116756 - RNA, 19 nt, Artificial Sequence
  Description of Artificial Sequence: Synthetic oligonucleotide
uguaacuuguccauugaau

SEQ ID NO: 116757 - RNA, 19 nt, Artificial Sequence
  Description of Artificial Sequence: Synthetic oligonucleotide
agagagcuuauaguuaggc

SEQ ID NO: 116758 - RNA, 19 nt, Artificial Sequence
  Description of Artificial Sequence: Synthetic oligonucleotide
aggaccacuagcaacauuc

SEQ ID NO: 116759 - RNA, 19 nt, Artificial Sequence
  Description of Artificial Sequence: Synthetic oligonucleotide
uuuggcaaaagauguaguc

SEQ ID NO: 116760 - RNA, 19 nt, Artificial Sequence
  Description of Artificial Sequence: Synthetic oligonucleotide
acgaggauagcacuuucac

SEQ ID NO: 116761 - RNA, 19 nt, Artificial Sequence
  Description of Artificial Sequence: Synthetic oligonucleotide
cucaaggaaccaaacauug

SEQ ID NO: 116762 - RNA, 19 nt, Artificial Sequence
  Description of Artificial Sequence: Synthetic oligonucleotide
guuacuugaacucggugug

SEQ ID NO: 116763 - RNA, 19 nt, Artificial Sequence
  Description of Artificial Sequence: Synthetic oligonucleotide
aacugaugauacguggugg

SEQ ID NO: 116764 - RNA, 19 nt, Artificial Sequence
  Description of Artificial Sequence: Synthetic oligonucleotide
uggagcaacgagaacauuc

SEQ ID NO: 116765 - RNA, 19 nt, Artificial Sequence
  Description of Artificial Sequence: Synthetic oligonucleotide
agauaggcuaauauaagag

SEQ ID NO: 116766 - RNA, 19 nt, Artificial Sequence
  Description of Artificial Sequence: Synthetic oligonucleotide
auuacccgaguucuuucgc

SEQ ID NO: 116767 - RNA, 19 nt, Artificial Sequence
  Description of Artificial Sequence: Synthetic oligonucleotide
uucacucuacagccuaugg

SEQ ID NO: 116768 - RNA, 19 nt, Artificial Sequence
  Description of Artificial Sequence: Synthetic oligonucleotide
uuaaagauagggguaacau

SEQ ID NO: 116769 - RNA, 19 nt, Artificial Sequence
  Description of Artificial Sequence: Synthetic oligonucleotide
uuugguaacgguguuuaug

SEQ ID NO: 116770 - RNA, 19 nt, Artificial Sequence
  Description of Artificial Sequence: Synthetic oligonucleotide
ucgaucacgucacuugaag

SEQ ID NO: 116771 - RNA, 19 nt, Artificial Sequence
  Description of Artificial Sequence: Synthetic oligonucleotide
uauaggguauccuuucuaa

SEQ ID NO: 116772 - RNA, 19 nt, Artificial Sequence
  Description of Artificial Sequence: Synthetic oligonucleotide
uuagucacauggcauggga

SEQ ID NO: 116773 - RNA, 19 nt, Artificial Sequence
  Description of Artificial Sequence: Synthetic oligonucleotide
acaugggucacaucgcaag

SEQ ID NO: 116774 - RNA, 19 nt, Artificial Sequence
  Description of Artificial Sequence: Synthetic oligonucleotide
uucacaacuugucauuaaa

SEQ ID NO: 116775 - RNA, 19 nt, Artificial Sequence
  Description of Artificial Sequence: Synthetic oligonucleotide
uaggcuaauauaagagacu

SEQ ID NO: 116776 - RNA, 19 nt, Artificial Sequence
  Description of Artificial Sequence: Synthetic oligonucleotide
auaggauuagacuucucaa

SEQ ID NO: 116777 - RNA, 19 nt, Artificial Sequence
  Description of Artificial Sequence: Synthetic oligonucleotide
uagccagcaaauuugugcu

SEQ ID NO: 116778 - RNA, 19 nt, Artificial Sequence
  Description of Artificial Sequence: Synthetic oligonucleotide
uaggguauccuuucuaaaa

SEQ ID NO: 116779 - RNA, 19 nt, Artificial Sequence
  Description of Artificial Sequence: Synthetic oligonucleotide
aggucuguagaguaucuug

SEQ ID NO: 116780 - RNA, 19 nt, Artificial Sequence
  Description of Artificial Sequence: Synthetic oligonucleotide
cuguggauucauucgagag

SEQ ID NO: 116781 - RNA, 19 nt, Artificial Sequence
  Description of Artificial Sequence: Synthetic oligonucleotide
aauuguuaccauaauggua

SEQ ID NO: 116782 - RNA, 19 nt, Artificial Sequence
  Description of Artificial Sequence: Synthetic oligonucleotide
aaaggcgcccauguuauug

SEQ ID NO: 116783 - RNA, 19 nt, Artificial Sequence
  Description of Artificial Sequence: Synthetic oligonucleotide
gauuagacuucucaaggaa

SEQ ID NO: 116784 - RNA, 19 nt, Artificial Sequence
  Description of Artificial Sequence: Synthetic oligonucleotide
cugauaguaaguucuauaa

SEQ ID NO: 116785 - RNA, 19 nt, Artificial Sequence
  Description of Artificial Sequence: Synthetic oligonucleotide
aaggccacuauguaccaaa

SEQ ID NO: 116786 - RNA, 19 nt, Artificial Sequence
  Description of Artificial Sequence: Synthetic oligonucleotide
aaacuaacggaagaggcuu

SEQ ID NO: 116787 - RNA, 19 nt, Artificial Sequence
  Description of Artificial Sequence: Synthetic oligonucleotide
aguauugcauuggaauagg

SEQ ID NO: 116788 - RNA, 19 nt, Artificial Sequence
  Description of Artificial Sequence: Synthetic oligonucleotide
uaccuaaaguauugguugc

SEQ ID NO: 116789 - RNA, 19 nt, Artificial Sequence
  Description of Artificial Sequence: Synthetic oligonucleotide
uuguauccugucacugugg

SEQ ID NO: 116790 - RNA, 19 nt, Artificial Sequence
  Description of Artificial Sequence: Synthetic oligonucleotide
auuauauagcgggagccag

SEQ ID NO: 116791 - RNA, 19 nt, Artificial Sequence
  Description of Artificial Sequence: Synthetic oligonucleotide
ugacauacuucuacuggga

SEQ ID NO: 116792 - RNA, 19 nt, Artificial Sequence
  Description of Artificial Sequence: Synthetic oligonucleotide
cacucgaaauucauacucc

SEQ ID NO: 116793 - RNA, 19 nt, Artificial Sequence
  Description of Artificial Sequence: Synthetic oligonucleotide
ugaugauacguggugguug

SEQ ID NO: 116794 - RNA, 19 nt, Artificial Sequence
  Description of Artificial Sequence: Synthetic oligonucleotide
cuuccuaggaccacuagca

SEQ ID NO: 116795 - RNA, 19 nt, Artificial Sequence
  Description of Artificial Sequence: Synthetic oligonucleotide
gacugguuacuugaacucg

SEQ ID NO: 116796 - RNA, 19 nt, Artificial Sequence
  Description of Artificial Sequence: Synthetic oligonucleotide
acacugugaauaaaugagg

SEQ ID NO: 116797 - RNA, 19 nt, Artificial Sequence
  Description of Artificial Sequence: Synthetic oligonucleotide
auucauucgagagggcaac

SEQ ID NO: 116798 - RNA, 19 nt, Artificial Sequence
  Description of Artificial Sequence: Synthetic oligonucleotide
auugucugaaccacggcuc

SEQ ID NO: 116799 - RNA, 19 nt, Artificial Sequence
  Description of Artificial Sequence: Synthetic oligonucleotide
uuauggaccuauaggguau

SEQ ID NO: 116800 - RNA, 19 nt, Artificial Sequence
  Description of Artificial Sequence: Synthetic oligonucleotide
ucccacuucaaugaaguac

SEQ ID NO: 116801 - RNA, 19 nt, Artificial Sequence
  Description of Artificial Sequence: Synthetic oligonucleotide
auaucucagacgaggauag

SEQ ID NO: 116802 - RNA, 19 nt, Artificial Sequence
  Description of Artificial Sequence: Synthetic oligonucleotide
  modified_base (7)..(7): a, c, u, g, unknown or other
uggacanaccugaauuuua

SEQ ID NO: 116803 - RNA, 19 nt, Artificial Sequence
  Description of Artificial Sequence: Synthetic oligonucleotide
cauugcacuauuccaggag

SEQ ID NO: 116804 - RNA, 19 nt, Artificial Sequence
  Description of Artificial Sequence: Synthetic oligonucleotide
ucacgucacuugaaggucc

SEQ ID NO: 116805 - RNA, 19 nt, Artificial Sequence
  Description of Artificial Sequence: Synthetic oligonucleotide
uuauauagcgggagccaga

SEQ ID NO: 116806 - RNA, 19 nt, Artificial Sequence
  Description of Artificial Sequence: Synthetic oligonucleotide
uugcacuauuccaggagcc

SEQ ID NO: 116807 - RNA, 19 nt, Artificial Sequence
  Description of Artificial Sequence: Synthetic oligonucleotide
acugauaguaaguucuaua

SEQ ID NO: 116808 - RNA, 19 nt, Artificial Sequence
  Description of Artificial Sequence: Synthetic oligonucleotide
gauacauugguuagcuuga

SEQ ID NO: 116809 - RNA, 19 nt, Artificial Sequence
  Description of Artificial Sequence: Synthetic oligonucleotide
agccagaccucacugaacu

SEQ ID NO: 116810 - RNA, 19 nt, Artificial Sequence
  Description of Artificial Sequence: Synthetic oligonucleotide
auugguugcuaccacucga

SEQ ID NO: 116811 - RNA, 19 nt, Artificial Sequence
  Description of Artificial Sequence: Synthetic oligonucleotide
gcuaauauaagagacuaca

SEQ ID NO: 116812 - RNA, 19 nt, Artificial Sequence
  Description of Artificial Sequence: Synthetic oligonucleotide
gaauugaaucaugcaacgc

SEQ ID NO: 116813 - RNA, 19 nt, Artificial Sequence
  Description of Artificial Sequence: Synthetic oligonucleotide
auaggacugugauugucug

SEQ ID NO: 116814 - RNA, 19 nt, Artificial Sequence
  Description of Artificial Sequence: Synthetic oligonucleotide
uauauagcgggagccagac

SEQ ID NO: 116815 - RNA, 19 nt, Artificial Sequence
  Description of Artificial Sequence: Synthetic oligonucleotide
uuuauuacccgaguucuuu

SEQ ID NO: 116816 - RNA, 19 nt, Artificial Sequence
  Description of Artificial Sequence: Synthetic oligonucleotide
  modified_base (5)..(5): a, c, u, g, unknown or other
gacanaccugaauuuuaac

SEQ ID NO: 116817 - RNA, 19 nt, Artificial Sequence
  Description of Artificial Sequence: Synthetic oligonucleotide
guguuuauggguugagaac

SEQ ID NO: 116818 - RNA, 19 nt, Artificial Sequence
  Description of Artificial Sequence: Synthetic oligonucleotide
guuauugucagcucucugu

SEQ ID NO: 116819 - RNA, 19 nt, Artificial Sequence
  Description of Artificial Sequence: Synthetic oligonucleotide
acgucauuagugcaugaga

SEQ ID NO: 116820 - RNA, 19 nt, Artificial Sequence
  Description of Artificial Sequence: Synthetic oligonucleotide
gaucacgucacuugaaggu

SEQ ID NO: 116821 - RNA, 19 nt, Artificial Sequence
  Description of Artificial Sequence: Synthetic oligonucleotide
gauaucucagacgaggaua

SEQ ID NO: 116822 - RNA, 19 nt, Artificial Sequence
  Description of Artificial Sequence: Synthetic oligonucleotide
ccacuauguaccaaaauug

SEQ ID NO: 116823 - RNA, 19 nt, Artificial Sequence
  Description of Artificial Sequence: Synthetic oligonucleotide
cacugugaauaaaugagga

SEQ ID NO: 116824 - RNA, 19 nt, Artificial Sequence
  Description of Artificial Sequence: Synthetic oligonucleotide
auacguggugguuggcugg

SEQ ID NO: 116825 - RNA, 19 nt, Artificial Sequence
  Description of Artificial Sequence: Synthetic oligonucleotide
acugugaauaaaugaggaa

SEQ ID NO: 116826 - RNA, 19 nt, Artificial Sequence
  Description of Artificial Sequence: Synthetic oligonucleotide
uccuacaucugagggagcc

SEQ ID NO: 116827 - RNA, 19 nt, Artificial Sequence
  Description of Artificial Sequence: Synthetic oligonucleotide
agauagggguaacauauua

SEQ ID NO: 116828 - RNA, 19 nt, Artificial Sequence
  Description of Artificial Sequence: Synthetic oligonucleotide
uagggguaacauauuaaua

SEQ ID NO: 116829 - RNA, 19 nt, Artificial Sequence
  Description of Artificial Sequence: Synthetic oligonucleotide
uagugcaugagaguugagu

SEQ ID NO: 116830 - RNA, 19 nt, Artificial Sequence
  Description of Artificial Sequence: Synthetic oligonucleotide
ucgcaagaggaaaacccca

SEQ ID NO: 116831 - RNA, 19 nt, Artificial Sequence
  Description of Artificial Sequence: Synthetic oligonucleotide
ccaguaccgaaucugauag

SEQ ID NO: 116832 - RNA, 19 nt, Artificial Sequence
  Description of Artificial Sequence: Synthetic oligonucleotide
aucacgucacuugaagguc

SEQ ID NO: 116833 - RNA, 19 nt, Artificial Sequence
  Description of Artificial Sequence: Synthetic oligonucleotide
acugguuacuugaacucgg

SEQ ID NO: 116834 - RNA, 19 nt, Artificial Sequence
  Description of Artificial Sequence: Synthetic oligonucleotide
ugguuacuugaacucggug

SEQ ID NO: 116835 - RNA, 19 nt, Artificial Sequence
  Description of Artificial Sequence: Synthetic oligonucleotide
ugcauaugauuucuugauu

SEQ ID NO: 116836 - RNA, 19 nt, Artificial Sequence
  Description of Artificial Sequence: Synthetic oligonucleotide
uuauuacccgaguucuuuc

SEQ ID NO: 116837 - RNA, 19 nt, Artificial Sequence
  Description of Artificial Sequence: Synthetic oligonucleotide
ugggagacaucccuggaua

SEQ ID NO: 116838 - RNA, 19 nt, Artificial Sequence
  Description of Artificial Sequence: Synthetic oligonucleotide
agauaggacugugauuguc

SEQ ID NO: 116839 - RNA, 19 nt, Artificial Sequence
  Description of Artificial Sequence: Synthetic oligonucleotide
aaggcgcccauguuauugu

SEQ ID NO: 116840 - RNA, 19 nt, Artificial Sequence
  Description of Artificial Sequence: Synthetic oligonucleotide
guaaggugauuugguaacg

SEQ ID NO: 116841 - RNA, 19 nt, Artificial Sequence
  Description of Artificial Sequence: Synthetic oligonucleotide
acccgaguucuuucgcacc

SEQ ID NO: 116842 - RNA, 19 nt, Artificial Sequence
  Description of Artificial Sequence: Synthetic oligonucleotide
aguguuaaguguaaaucaa

SEQ ID NO: 116843 - RNA, 19 nt, Artificial Sequence
  Description of Artificial Sequence: Synthetic oligonucleotide
acuaacggaagaggcuuac

SEQ ID NO: 116844 - RNA, 19 nt, Artificial Sequence
  Description of Artificial Sequence: Synthetic oligonucleotide
uuacccgaguucuuucgca

SEQ ID NO: 116845 - RNA, 19 nt, Artificial Sequence
  Description of Artificial Sequence: Synthetic oligonucleotide
gguaacgguguuuauguca

SEQ ID NO: 116846 - RNA, 19 nt, Artificial Sequence
  Description of Artificial Sequence: Synthetic oligonucleotide
cugucucuaauuagccagc

SEQ ID NO: 116847 - RNA, 19 nt, Artificial Sequence
  Description of Artificial Sequence: Synthetic oligonucleotide
uauucuuuauggaccuaua

SEQ ID NO: 116848 - RNA, 19 nt, Artificial Sequence
  Description of Artificial Sequence: Synthetic oligonucleotide
ucacaucgcaagaggaaaa

SEQ ID NO: 116849 - RNA, 19 nt, Artificial Sequence
  Description of Artificial Sequence: Synthetic oligonucleotide
uugguugcuaccacucgaa

SEQ ID NO: 116850 - RNA, 19 nt, Artificial Sequence
  Description of Artificial Sequence: Synthetic oligonucleotide
ucuuucgcacccacacuca

SEQ ID NO: 116851 - RNA, 19 nt, Artificial Sequence
  Description of Artificial Sequence: Synthetic oligonucleotide
gauuugguaacgguguuua

SEQ ID NO: 116852 - RNA, 19 nt, Artificial Sequence
  Description of Artificial Sequence: Synthetic oligonucleotide
acuguggauucauucgaga

SEQ ID NO: 116853 - RNA, 19 nt, Artificial Sequence
  Description of Artificial Sequence: Synthetic oligonucleotide
auuuagagauaggacugug

SEQ ID NO: 116854 - RNA, 19 nt, Artificial Sequence
  Description of Artificial Sequence: Synthetic oligonucleotide
ugaucccaugugauuauau

SEQ ID NO: 116855 - RNA, 19 nt, Artificial Sequence
  Description of Artificial Sequence: Synthetic oligonucleotide
ggauaguguauuuagagau

SEQ ID NO: 116856 - RNA, 19 nt, Artificial Sequence
  Description of Artificial Sequence: Synthetic oligonucleotide
acacaaaacuggagcaacg

SEQ ID NO: 116857 - RNA, 19 nt, Artificial Sequence
  Description of Artificial Sequence: Synthetic oligonucleotide
auaccacauacaaucaaca

SEQ ID NO: 116858 - RNA, 19 nt, Artificial Sequence
  Description of Artificial Sequence: Synthetic oligonucleotide
auacuggguucuccuguac

SEQ ID NO: 116859 - RNA, 19 nt, Artificial Sequence
  Description of Artificial Sequence: Synthetic oligonucleotide
aucucagacgaggauagca

SEQ ID NO: 116860 - RNA, 19 nt, Artificial Sequence
  Description of Artificial Sequence: Synthetic oligonucleotide
aggguauacuggguucucc

SEQ ID NO: 116861 - RNA, 19 nt, Artificial Sequence
  Description of Artificial Sequence: Synthetic oligonucleotide
cacaucucacaaaauccuc

SEQ ID NO: 116862 - RNA, 19 nt, Artificial Sequence
  Description of Artificial Sequence: Synthetic oligonucleotide
cacucuacagccuauggua

SEQ ID NO: 116863 - RNA, 19 nt, Artificial Sequence
  Description of Artificial Sequence: Synthetic oligonucleotide
  modified_base (3)..(3): a, c, u, g, unknown or other
canaccugaauuuuaacuu

SEQ ID NO: 116864 - RNA, 19 nt, Artificial Sequence
  Description of Artificial Sequence: Synthetic oligonucleotide
ucagacgaggauagcacuu

SEQ ID NO: 116865 - RNA, 19 nt, Artificial Sequence
  Description of Artificial Sequence: Synthetic oligonucleotide
aggcuaauauaagagacua

SEQ ID NO: 116866 - RNA, 19 nt, Artificial Sequence
  Description of Artificial Sequence: Synthetic oligonucleotide
gcuuacagauucugaaaag

SEQ ID NO: 116867 - RNA, 19 nt, Artificial Sequence
  Description of Artificial Sequence: Synthetic oligonucleotide
agauaucucagacgaggau

SEQ ID NO: 116868 - RNA, 19 nt, Artificial Sequence
  Description of Artificial Sequence: Synthetic oligonucleotide
uuuuauuacccgaguucuu

SEQ ID NO: 116869 - RNA, 19 nt, Artificial Sequence
  Description of Artificial Sequence: Synthetic oligonucleotide
ccuguuugaggguauacug

SEQ ID NO: 116870 - RNA, 19 nt, Artificial Sequence
  Description of Artificial Sequence: Synthetic oligonucleotide
uccuguuugaggguauacu

SEQ ID NO: 116871 - RNA, 19 nt, Artificial Sequence
  Description of Artificial Sequence: Synthetic oligonucleotide
ugcaguacccaaacagaua

SEQ ID NO: 116872 - RNA, 19 nt, Artificial Sequence
  Description of Artificial Sequence: Synthetic oligonucleotide
ccauguauggugauuuuac

SEQ ID NO: 116873 - RNA, 19 nt, Artificial Sequence
  Description of Artificial Sequence: Synthetic oligonucleotide
ugauacguggugguuggcu

SEQ ID NO: 116874 - RNA, 19 nt, Artificial Sequence
  Description of Artificial Sequence: Synthetic oligonucleotide
ugugcagcccaguaccgaa

SEQ ID NO: 116875 - RNA, 19 nt, Artificial Sequence
  Description of Artificial Sequence: Synthetic oligonucleotide
ugcaacgcugaggagacuc

SEQ ID NO: 116876 - RNA, 19 nt, Artificial Sequence
  Description of Artificial Sequence: Synthetic oligonucleotide
uuucgcacccacacucaga

SEQ ID NO: 116877 - RNA, 19 nt, Artificial Sequence
  Description of Artificial Sequence: Synthetic oligonucleotide
acugaacugaugauacgug

SEQ ID NO: 116878 - RNA, 19 nt, Artificial Sequence
  Description of Artificial Sequence: Synthetic oligonucleotide
cgucauuagugcaugagag

SEQ ID NO: 116879 - RNA, 19 nt, Artificial Sequence
  Description of Artificial Sequence: Synthetic oligonucleotide
uacuuucacucuacagccu

SEQ ID NO: 116880 - RNA, 19 nt, Artificial Sequence
  Description of Artificial Sequence: Synthetic oligonucleotide
  modified_base (11)..(11): a, c, u, g, unknown or other
agcauggacanaccugaau

SEQ ID NO: 116881 - RNA, 19 nt, Artificial Sequence
  Description of Artificial Sequence: Synthetic oligonucleotide
uuuauggguugagaacaac

SEQ ID NO: 116882 - RNA, 19 nt, Artificial Sequence
  Description of Artificial Sequence: Synthetic oligonucleotide
gguuacuugaacucggugu

SEQ ID NO: 116883 - RNA, 19 nt, Artificial Sequence
  Description of Artificial Sequence: Synthetic oligonucleotide
cuaauuagccagcaaauuu

SEQ ID NO: 116884 - RNA, 19 nt, Artificial Sequence
  Description of Artificial Sequence: Synthetic oligonucleotide
uuacuugaacucggugugc

SEQ ID NO: 116885 - RNA, 19 nt, Artificial Sequence
  Description of Artificial Sequence: Synthetic oligonucleotide
ugucucuaauuagccagca

SEQ ID NO: 116886 - RNA, 19 nt, Artificial Sequence
  Description of Artificial Sequence: Synthetic oligonucleotide
uacuguacugucacuuauu

SEQ ID NO: 116887 - RNA, 19 nt, Artificial Sequence
  Description of Artificial Sequence: Synthetic oligonucleotide
uacccgaguucuuucgcac

SEQ ID NO: 116888 - RNA, 19 nt, Artificial Sequence
  Description of Artificial Sequence: Synthetic oligonucleotide
agucuauccaccacauacu

SEQ ID NO: 116889 - RNA, 19 nt, Artificial Sequence
  Description of Artificial Sequence: Synthetic oligonucleotide
gggguaacauauuaauaga

SEQ ID NO: 116890 - RNA, 19 nt, Artificial Sequence
  Description of Artificial Sequence: Synthetic oligonucleotide
uccgugcacacugugaaua

SEQ ID NO: 116891 - RNA, 19 nt, Artificial Sequence
  Description of Artificial Sequence: Synthetic oligonucleotide
acagccuaugguauuaaau

SEQ ID NO: 116892 - RNA, 19 nt, Artificial Sequence
  Description of Artificial Sequence: Synthetic oligonucleotide
acuucuacugggaaagcau

SEQ ID NO: 116893 - RNA, 19 nt, Artificial Sequence
  Description of Artificial Sequence: Synthetic oligonucleotide
gauaguguauuuagagaua

SEQ ID NO: 116894 - RNA, 19 nt, Artificial Sequence
  Description of Artificial Sequence: Synthetic oligonucleotide
cuaauauaagagacuacau

SEQ ID NO: 116895 - RNA, 19 nt, Artificial Sequence
  Description of Artificial Sequence: Synthetic oligonucleotide
cuuuauggaccuauagggu

SEQ ID NO: 116896 - RNA, 19 nt, Artificial Sequence
  Description of Artificial Sequence: Synthetic oligonucleotide
ugugugcucgcaccucgac

SEQ ID NO: 116897 - RNA, 19 nt, Artificial Sequence
  Description of Artificial Sequence: Synthetic oligonucleotide
cacuauguaccaaaauugu

SEQ ID NO: 116898 - RNA, 19 nt, Artificial Sequence
  Description of Artificial Sequence: Synthetic oligonucleotide
cauuuggugcagcaccauc

SEQ ID NO: 116899 - RNA, 19 nt, Artificial Sequence
  Description of Artificial Sequence: Synthetic oligonucleotide
cagauaucucagacgagga

SEQ ID NO: 116900 - RNA, 19 nt, Artificial Sequence
  Description of Artificial Sequence: Synthetic oligonucleotide
cuauggaguguuuaugggu

SEQ ID NO: 116901 - RNA, 19 nt, Artificial Sequence
  Description of Artificial Sequence: Synthetic oligonucleotide
uggcagggguugaaaauau

SEQ ID NO: 116902 - RNA, 19 nt, Artificial Sequence
  Description of Artificial Sequence: Synthetic oligonucleotide
ugguuagcuugauaaccau

SEQ ID NO: 116903 - RNA, 19 nt, Artificial Sequence
  Description of Artificial Sequence: Synthetic oligonucleotide
uggguucuccuguaccuaa

SEQ ID NO: 116904 - RNA, 19 nt, Artificial Sequence
  Description of Artificial Sequence: Synthetic oligonucleotide
ucauucgagagggcaacaa

SEQ ID NO: 116905 - RNA, 19 nt, Artificial Sequence
  Description of Artificial Sequence: Synthetic oligonucleotide
  modified_base (8)..(8): a, c, u, g, unknown or other
auggacanaccugaauuuu

SEQ ID NO: 116906 - RNA, 19 nt, Artificial Sequence
  Description of Artificial Sequence: Synthetic oligonucleotide
gguguuuaugucaaaacgu

SEQ ID NO: 116907 - RNA, 19 nt, Artificial Sequence
  Description of Artificial Sequence: Synthetic oligonucleotide
ggcguuuucuggugaaggc

SEQ ID NO: 116908 - RNA, 19 nt, Artificial Sequence
  Description of Artificial Sequence: Synthetic oligonucleotide
ccuccuacaucugagggag

SEQ ID NO: 116909 - RNA, 19 nt, Artificial Sequence
  Description of Artificial Sequence: Synthetic oligonucleotide
uggauucauucgagagggc

SEQ ID NO: 116910 - RNA, 19 nt, Artificial Sequence
  Description of Artificial Sequence: Synthetic oligonucleotide
aucaugcaacgcugaggag

SEQ ID NO: 116911 - RNA, 19 nt, Artificial Sequence
  Description of Artificial Sequence: Synthetic oligonucleotide
ugauccuguuugaggguau

SEQ ID NO: 116912 - RNA, 19 nt, Artificial Sequence
  Description of Artificial Sequence: Synthetic oligonucleotide
augcaguacccaaacagau

SEQ ID NO: 116913 - RNA, 19 nt, Artificial Sequence
  Description of Artificial Sequence: Synthetic oligonucleotide
ugauuugguaacgguguuu

SEQ ID NO: 116914 - RNA, 19 nt, Artificial Sequence
  Description of Artificial Sequence: Synthetic oligonucleotide
cucuaauuagccagcaaau

SEQ ID NO: 116915 - RNA, 19 nt, Artificial Sequence
  Description of Artificial Sequence: Synthetic oligonucleotide
gucacaucgcaagaggaaa

SEQ ID NO: 116916 - RNA, 19 nt, Artificial Sequence
  Description of Artificial Sequence: Synthetic oligonucleotide
caguaccgaaucugauagc

SEQ ID NO: 116917 - RNA, 19 nt, Artificial Sequence
  Description of Artificial Sequence: Synthetic oligonucleotide
ggauucauucgagagggca

SEQ ID NO: 116918 - RNA, 19 nt, Artificial Sequence
  Description of Artificial Sequence: Synthetic oligonucleotide
cacaaaacuggagcaacga

SEQ ID NO: 116919 - RNA, 19 nt, Artificial Sequence
  Description of Artificial Sequence: Synthetic oligonucleotide
uucauucgagagggcaaca

SEQ ID NO: 116920 - RNA, 19 nt, Artificial Sequence
  Description of Artificial Sequence: Synthetic oligonucleotide
ucucuagaacaugcuucca

SEQ ID NO: 116921 - RNA, 19 nt, Artificial Sequence
  Description of Artificial Sequence: Synthetic oligonucleotide
ugguaacgguguuuauguc

SEQ ID NO: 116922 - RNA, 19 nt, Artificial Sequence
  Description of Artificial Sequence: Synthetic oligonucleotide
augugauuauauagcggga

SEQ ID NO: 116923 - RNA, 19 nt, Artificial Sequence
  Description of Artificial Sequence: Synthetic oligonucleotide
ugauggucccagucacuuc

SEQ ID NO: 116924 - RNA, 19 nt, Artificial Sequence
  Description of Artificial Sequence: Synthetic oligonucleotide
ggaaaaccccaaauguaac

SEQ ID NO: 116925 - RNA, 19 nt, Artificial Sequence
  Description of Artificial Sequence: Synthetic oligonucleotide
aagauagggguaacauauu

SEQ ID NO: 116926 - RNA, 19 nt, Artificial Sequence
  Description of Artificial Sequence: Synthetic oligonucleotide
cuauaggguauccuuucua

SEQ ID NO: 116927 - RNA, 19 nt, Artificial Sequence
  Description of Artificial Sequence: Synthetic oligonucleotide
accauguauggugauuuua

SEQ ID NO: 116928 - RNA, 19 nt, Artificial Sequence
  Description of Artificial Sequence: Synthetic oligonucleotide
uauggaccuauaggguauc

SEQ ID NO: 116929 - RNA, 19 nt, Artificial Sequence
  Description of Artificial Sequence: Synthetic oligonucleotide
caugggucacaucgcaaga

SEQ ID NO: 116930 - RNA, 19 nt, Artificial Sequence
  Description of Artificial Sequence: Synthetic oligonucleotide
uaucucagacgaggauagc

SEQ ID NO: 116931 - RNA, 19 nt, Artificial Sequence
  Description of Artificial Sequence: Synthetic oligonucleotide
ucuagccaguuuuggucuu

SEQ ID NO: 116932 - RNA, 19 nt, Artificial Sequence
  Description of Artificial Sequence: Synthetic oligonucleotide
gcguuuucuggugaaggcc

SEQ ID NO: 116933 - RNA, 19 nt, Artificial Sequence
  Description of Artificial Sequence: Synthetic oligonucleotide
augauacauugguuagcuu

SEQ ID NO: 116934 - RNA, 19 nt, Artificial Sequence
  Description of Artificial Sequence: Synthetic oligonucleotide
guguuuaugucaaaacguu

SEQ ID NO: 116935 - RNA, 19 nt, Artificial Sequence
  Description of Artificial Sequence: Synthetic oligonucleotide
  modified_base (9)..(9): a, c, u, g, unknown or other
cauggacanaccugaauuu

SEQ ID NO: 116936 - RNA, 19 nt, Artificial Sequence
  Description of Artificial Sequence: Synthetic oligonucleotide
aacuaacggaagaggcuua

SEQ ID NO: 116937 - RNA, 19 nt, Artificial Sequence
  Description of Artificial Sequence: Synthetic oligonucleotide
cuaccacucgaaauucaua

SEQ ID NO: 116938 - RNA, 19 nt, Artificial Sequence
  Description of Artificial Sequence: Synthetic oligonucleotide
guuuauggguugagaacaa

SEQ ID NO: 116939 - RNA, 19 nt, Artificial Sequence
  Description of Artificial Sequence: Synthetic oligonucleotide
gauagcacuuucaccccua

SEQ ID NO: 116940 - RNA, 19 nt, Artificial Sequence
  Description of Artificial Sequence: Synthetic oligonucleotide
gaggggcguuuucugguga

SEQ ID NO: 116941 - RNA, 19 nt, Artificial Sequence
  Description of Artificial Sequence: Synthetic oligonucleotide
cccgaguucuuucgcaccc

SEQ ID NO: 116942 - RNA, 19 nt, Artificial Sequence
  Description of Artificial Sequence: Synthetic oligonucleotide
ggcuaauauaagagacuac

SEQ ID NO: 116943 - RNA, 19 nt, Artificial Sequence
  Description of Artificial Sequence: Synthetic oligonucleotide
auacauugguuagcuugau

SEQ ID NO: 116944 - RNA, 19 nt, Artificial Sequence
  Description of Artificial Sequence: Synthetic oligonucleotide
ggaggggcguuuucuggug

SEQ ID NO: 116945 - RNA, 19 nt, Artificial Sequence
  Description of Artificial Sequence: Synthetic oligonucleotide
agcaccauguauggugauu

SEQ ID NO: 116946 - RNA, 19 nt, Artificial Sequence
  Description of Artificial Sequence: Synthetic oligonucleotide
cacgucacuugaaggucca

SEQ ID NO: 116947 - RNA, 19 nt, Artificial Sequence
  Description of Artificial Sequence: Synthetic oligonucleotide
acuuguccauugaauugaa

SEQ ID NO: 116948 - RNA, 19 nt, Artificial Sequence
  Description of Artificial Sequence: Synthetic oligonucleotide
gaggguauacuggguucuc

SEQ ID NO: 116949 - RNA, 19 nt, Artificial Sequence
  Description of Artificial Sequence: Synthetic oligonucleotide
cuccuacaucugagggagc

SEQ ID NO: 116950 - RNA, 19 nt, Artificial Sequence
  Description of Artificial Sequence: Synthetic oligonucleotide
cucgaucacgucacuugaa

SEQ ID NO: 116951 - RNA, 19 nt, Artificial Sequence
  Description of Artificial Sequence: Synthetic oligonucleotide
ugcucgcaccucgaccaca

SEQ ID NO: 116952 - RNA, 19 nt, Artificial Sequence
  Description of Artificial Sequence: Synthetic oligonucleotide
gcgucuugugcugaguuga

SEQ ID NO: 116953 - RNA, 19 nt, Artificial Sequence
  Description of Artificial Sequence: Synthetic oligonucleotide
ggcuuaguaacugucacuu

SEQ ID NO: 116954 - RNA, 19 nt, Artificial Sequence
  Description of Artificial Sequence: Synthetic oligonucleotide
cuaacggaagaggcuuaca

SEQ ID NO: 116955 - RNA, 19 nt, Artificial Sequence
  Description of Artificial Sequence: Synthetic oligonucleotide
ggucuguagaguaucuugu

SEQ ID NO: 116956 - RNA, 19 nt, Artificial Sequence
  Description of Artificial Sequence: Synthetic oligonucleotide
ggaccuauaggguauccuu

SEQ ID NO: 116957 - RNA, 19 nt, Artificial Sequence
  Description of Artificial Sequence: Synthetic oligonucleotide
ggguauacuggguucuccu

SEQ ID NO: 116958 - RNA, 19 nt, Artificial Sequence
  Description of Artificial Sequence: Synthetic oligonucleotide
gaccuauaggguauccuuu

SEQ ID NO: 116959 - RNA, 19 nt, Artificial Sequence
  Description of Artificial Sequence: Synthetic oligonucleotide
ggucacaucgcaagaggaa

SEQ ID NO: 116960 - RNA, 19 nt, Artificial Sequence
  Description of Artificial Sequence: Synthetic oligonucleotide
gcccauguuauugucagcu

SEQ ID NO: 116961 - RNA, 19 nt, Artificial Sequence
  Description of Artificial Sequence: Synthetic oligonucleotide
augaucccaugugauuaua

SEQ ID NO: 116962 - RNA, 19 nt, Artificial Sequence
  Description of Artificial Sequence: Synthetic oligonucleotide
gcaacgcugaggagacucc

SEQ ID NO: 116963 - RNA, 19 nt, Artificial Sequence
  Description of Artificial Sequence: Synthetic oligonucleotide
guuugaggguauacugggu

SEQ ID NO: 116964 - RNA, 19 nt, Artificial Sequence
  Description of Artificial Sequence: Synthetic oligonucleotide
guauuccugacugguuacu

SEQ ID NO: 116965 - RNA, 19 nt, Artificial Sequence
  Description of Artificial Sequence: Synthetic oligonucleotide
cuccuguaccuaaaguauu

SEQ ID NO: 116966 - RNA, 19 nt, Artificial Sequence
  Description of Artificial Sequence: Synthetic oligonucleotide
gugauuugguaacgguguu

SEQ ID NO: 116967 - RNA, 19 nt, Artificial Sequence
  Description of Artificial Sequence: Synthetic oligonucleotide
ccucgaucacgucacuuga

SEQ ID NO: 116968 - RNA, 19 nt, Artificial Sequence
  Description of Artificial Sequence: Synthetic oligonucleotide
ugucgggcagaagguucuc

SEQ ID NO: 116969 - RNA, 19 nt, Artificial Sequence
  Description of Artificial Sequence: Synthetic oligonucleotide
cagaccucacugaacugau

SEQ ID NO: 116970 - RNA, 19 nt, Artificial Sequence
  Description of Artificial Sequence: Synthetic oligonucleotide
ggauagcacuuucaccccu

SEQ ID NO: 116971 - RNA, 19 nt, Artificial Sequence
  Description of Artificial Sequence: Synthetic oligonucleotide
aggccacuauguaccaaaa

SEQ ID NO: 116972 - RNA, 19 nt, Artificial Sequence
  Description of Artificial Sequence: Synthetic oligonucleotide
gacagcaaugaggcuuagu

SEQ ID NO: 116973 - RNA, 19 nt, Artificial Sequence
  Description of Artificial Sequence: Synthetic oligonucleotide
ggucuggauaguguauuua

SEQ ID NO: 116974 - RNA, 19 nt, Artificial Sequence
  Description of Artificial Sequence: Synthetic oligonucleotide
ggggcguuuucuggugaag

SEQ ID NO: 116975 - RNA, 19 nt, Artificial Sequence
  Description of Artificial Sequence: Synthetic oligonucleotide
cuacagccuaugguauuaa

SEQ ID NO: 116976 - RNA, 19 nt, Artificial Sequence
  Description of Artificial Sequence: Synthetic oligonucleotide
gugucgggcagaagguucu

SEQ ID NO: 116977 - RNA, 19 nt, Artificial Sequence
  Description of Artificial Sequence: Synthetic oligonucleotide
guaccgaaucugauagcuu

SEQ ID NO: 116978 - RNA, 19 nt, Artificial Sequence
  Description of Artificial Sequence: Synthetic oligonucleotide
caaaggcgcccauguuauu

SEQ ID NO: 116979 - RNA, 19 nt, Artificial Sequence
  Description of Artificial Sequence: Synthetic oligonucleotide
ccgaguucuuucgcaccca

SEQ ID NO: 116980 - RNA, 19 nt, Artificial Sequence
  Description of Artificial Sequence: Synthetic oligonucleotide
gcucgcaccucgaccacau

SEQ ID NO: 116981 - RNA, 19 nt, Artificial Sequence
  Description of Artificial Sequence: Synthetic oligonucleotide
cuggagcaacgagaacauu

SEQ ID NO: 116982 - RNA, 19 nt, Artificial Sequence
  Description of Artificial Sequence: Synthetic oligonucleotide
augaauuacguucucacgc

SEQ ID NO: 116983 - RNA, 19 nt, Artificial Sequence
  Description of Artificial Sequence: Synthetic oligonucleotide
aagaaguaaucacauuucc

SEQ ID NO: 116984 - RNA, 19 nt, Artificial Sequence
  Description of Artificial Sequence: Synthetic oligonucleotide
uuaaagacgacacugugcc

SEQ ID NO: 116985 - RNA, 19 nt, Artificial Sequence
  Description of Artificial Sequence: Synthetic oligonucleotide
agugaaagagacuugcggc

SEQ ID NO: 116986 - RNA, 19 nt, Artificial Sequence
  Description of Artificial Sequence: Synthetic oligonucleotide
aagacgacucgucaguugc

SEQ ID NO: 116987 - RNA, 19 nt, Artificial Sequence
  Description of Artificial Sequence: Synthetic oligonucleotide
gaauuugucacccguaccg

SEQ ID NO: 116988 - RNA, 19 nt, Artificial Sequence
  Description of Artificial Sequence: Synthetic oligonucleotide
uaaauuguguucagcaggg

SEQ ID NO: 116989 - RNA, 19 nt, Artificial Sequence
  Description of Artificial Sequence: Synthetic oligonucleotide
auaugaauuacguucucac

SEQ ID NO: 116990 - RNA, 19 nt, Artificial Sequence
  Description of Artificial Sequence: Synthetic oligonucleotide
accagcucagcuuaaauac

SEQ ID NO: 116991 - RNA, 19 nt, Artificial Sequence
  Description of Artificial Sequence: Synthetic oligonucleotide
guuugagaaugucagaacg

SEQ ID NO: 116992 - RNA, 19 nt, Artificial Sequence
  Description of Artificial Sequence: Synthetic oligonucleotide
gaaggugccacaucaaagg

SEQ ID NO: 116993 - RNA, 19 nt, Artificial Sequence
  Description of Artificial Sequence: Synthetic oligonucleotide
uagaacgaaacacaccucc

SEQ ID NO: 116994 - RNA, 19 nt, Artificial Sequence
  Description of Artificial Sequence: Synthetic oligonucleotide
aaagauacuccgaagaagu

SEQ ID NO: 116995 - RNA, 19 nt, Artificial Sequence
  Description of Artificial Sequence: Synthetic oligonucleotide
aacggcaccacaguguagc

SEQ ID NO: 116996 - RNA, 19 nt, Artificial Sequence
  Description of Artificial Sequence: Synthetic oligonucleotide
aacacaccuccacugaggg

SEQ ID NO: 116997 - RNA, 19 nt, Artificial Sequence
  Description of Artificial Sequence: Synthetic oligonucleotide
uaugcuacaguccuucugu

SEQ ID NO: 116998 - RNA, 19 nt, Artificial Sequence
  Description of Artificial Sequence: Synthetic oligonucleotide
uuugagaaugucagaacgc

SEQ ID NO: 116999 - RNA, 19 nt, Artificial Sequence
  Description of Artificial Sequence: Synthetic oligonucleotide
uuagcguuggaauuuguca

SEQ ID NO: 117000 - RNA, 19 nt, Artificial Sequence
  Description of Artificial Sequence: Synthetic oligonucleotide
cuuuagagggcccaggacc

SEQ ID NO: 117001 - RNA, 19 nt, Artificial Sequence
  Description of Artificial Sequence: Synthetic oligonucleotide
ugaguaugugcuuuugucc

SEQ ID NO: 117002 - RNA, 19 nt, Artificial Sequence
  Description of Artificial Sequence: Synthetic oligonucleotide
uucuugcaaacgaaugugg

SEQ ID NO: 117003 - RNA, 19 nt, Artificial Sequence
  Description of Artificial Sequence: Synthetic oligonucleotide
aaugucagaacgccguugu

SEQ ID NO: 117004 - RNA, 19 nt, Artificial Sequence
  Description of Artificial Sequence: Synthetic oligonucleotide
agcacaacauaguucucgc

SEQ ID NO: 117005 - RNA, 19 nt, Artificial Sequence
  Description of Artificial Sequence: Synthetic oligonucleotide
uuugucacccguaccgugg

SEQ ID NO: 117006 - RNA, 19 nt, Artificial Sequence
  Description of Artificial Sequence: Synthetic oligonucleotide
auuacguucucacgccacc

SEQ ID NO: 117007 - RNA, 19 nt, Artificial Sequence
  Description of Artificial Sequence: Synthetic oligonucleotide
ugaauuacguucucacgcc

SEQ ID NO: 117008 - RNA, 19 nt, Artificial Sequence
  Description of Artificial Sequence: Synthetic oligonucleotide
guuagaacgaaacacaccu

SEQ ID NO: 117009 - RNA, 19 nt, Artificial Sequence
  Description of Artificial Sequence: Synthetic oligonucleotide
gucgcauugcaccacaggg

SEQ ID NO: 117010 - RNA, 19 nt, Artificial Sequence
  Description of Artificial Sequence: Synthetic oligonucleotide
agagacuugcggcaggacg

SEQ ID NO: 117011 - RNA, 19 nt, Artificial Sequence
  Description of Artificial Sequence: Synthetic oligonucleotide
uauuaggggaccagcugcg

SEQ ID NO: 117012 - RNA, 19 nt, Artificial Sequence
  Description of Artificial Sequence: Synthetic oligonucleotide
aaacgaauguggaagauau

SEQ ID NO: 117013 - RNA, 19 nt, Artificial Sequence
  Description of Artificial Sequence: Synthetic oligonucleotide
cuauuaggggaccagcugc

SEQ ID NO: 117014 - RNA, 19 nt, Artificial Sequence
  Description of Artificial Sequence: Synthetic oligonucleotide
agcguuggaauuugucacc

SEQ ID NO: 117015 - RNA, 19 nt, Artificial Sequence
  Description of Artificial Sequence: Synthetic oligonucleotide
agucguaagagaaggggcc

SEQ ID NO: 117016 - RNA, 19 nt, Artificial Sequence
  Description of Artificial Sequence: Synthetic oligonucleotide
ucuugcaaacgaaugugga

SEQ ID NO: 117017 - RNA, 19 nt, Artificial Sequence
  Description of Artificial Sequence: Synthetic oligonucleotide
ugcacaugguacaugcacc

SEQ ID NO: 117018 - RNA, 19 nt, Artificial Sequence
  Description of Artificial Sequence: Synthetic oligonucleotide
aaucacccgaugguggggc

SEQ ID NO: 117019 - RNA, 19 nt, Artificial Sequence
  Description of Artificial Sequence: Synthetic oligonucleotide
auuauagccagccacuauu

SEQ ID NO: 117020 - RNA, 19 nt, Artificial Sequence
  Description of Artificial Sequence: Synthetic oligonucleotide
aggacguagucauacuggg

SEQ ID NO: 117021 - RNA, 19 nt, Artificial Sequence
  Description of Artificial Sequence: Synthetic oligonucleotide
guugggugcaauuuugaug

SEQ ID NO: 117022 - RNA, 19 nt, Artificial Sequence
  Description of Artificial Sequence: Synthetic oligonucleotide
acgaauguggaagauauga

SEQ ID NO: 117023 - RNA, 19 nt, Artificial Sequence
  Description of Artificial Sequence: Synthetic oligonucleotide
acacaaaugagugggugac

SEQ ID NO: 117024 - RNA, 19 nt, Artificial Sequence
  Description of Artificial Sequence: Synthetic oligonucleotide
uggaucuucgcaucagugc

SEQ ID NO: 117025 - RNA, 19 nt, Artificial Sequence
  Description of Artificial Sequence: Synthetic oligonucleotide
aauuacguucucacgccac

SEQ ID NO: 117026 - RNA, 19 nt, Artificial Sequence
  Description of Artificial Sequence: Synthetic oligonucleotide
ugugaggagggcucaaagc

SEQ ID NO: 117027 - RNA, 19 nt, Artificial Sequence
  Description of Artificial Sequence: Synthetic oligonucleotide
agugggccaacacuguagg

SEQ ID NO: 117028 - RNA, 19 nt, Artificial Sequence
  Description of Artificial Sequence: Synthetic oligonucleotide
uguagaacggcaccacagu

SEQ ID NO: 117029 - RNA, 19 nt, Artificial Sequence
  Description of Artificial Sequence: Synthetic oligonucleotide
uuuuaucucgaagcucacg

SEQ ID NO: 117030 - RNA, 19 nt, Artificial Sequence
  Description of Artificial Sequence: Synthetic oligonucleotide
acuauuaggggaccagcug

SEQ ID NO: 117031 - RNA, 19 nt, Artificial Sequence
  Description of Artificial Sequence: Synthetic oligonucleotide
caugguacaugcacccugg

SEQ ID NO: 117032 - RNA, 19 nt, Artificial Sequence
  Description of Artificial Sequence: Synthetic oligonucleotide
acgaaacacaccuccacug

SEQ ID NO: 117033 - RNA, 19 nt, Artificial Sequence
  Description of Artificial Sequence: Synthetic oligonucleotide
auuuccacucaggucaaac

SEQ ID NO: 117034 - RNA, 19 nt, Artificial Sequence
  Description of Artificial Sequence: Synthetic oligonucleotide
uucaagacccucccaguga

SEQ ID NO: 117035 - RNA, 19 nt, Artificial Sequence
  Description of Artificial Sequence: Synthetic oligonucleotide
cuguagaacggcaccacag

SEQ ID NO: 117036 - RNA, 19 nt, Artificial Sequence
  Description of Artificial Sequence: Synthetic oligonucleotide
ucaagacccucccagugac

SEQ ID NO: 117037 - RNA, 19 nt, Artificial Sequence
  Description of Artificial Sequence: Synthetic oligonucleotide
uguaugucccuguuguuau

SEQ ID NO: 117038 - RNA, 19 nt, Artificial Sequence
  Description of Artificial Sequence: Synthetic oligonucleotide
guggaagauaugaauuacg

SEQ ID NO: 117039 - RNA, 19 nt, Artificial Sequence
  Description of Artificial Sequence: Synthetic oligonucleotide
caugaagacaaaugccgug

SEQ ID NO: 117040 - RNA, 19 nt, Artificial Sequence
  Description of Artificial Sequence: Synthetic oligonucleotide
caggagguuagaacgaaac

SEQ ID NO: 117041 - RNA, 19 nt, Artificial Sequence
  Description of Artificial Sequence: Synthetic oligonucleotide
agguuagaacgaaacacac

SEQ ID NO: 117042 - RNA, 19 nt, Artificial Sequence
  Description of Artificial Sequence: Synthetic oligonucleotide
agauaugaauuacguucuc

SEQ ID NO: 117043 - RNA, 19 nt, Artificial Sequence
  Description of Artificial Sequence: Synthetic oligonucleotide
ugcaaacgaauguggaaga

SEQ ID NO: 117044 - RNA, 19 nt, Artificial Sequence
  Description of Artificial Sequence: Synthetic oligonucleotide
auaugcuacaguccuucug

SEQ ID NO: 117045 - RNA, 19 nt, Artificial Sequence
  Description of Artificial Sequence: Synthetic oligonucleotide
acaugguacaugcacccug

SEQ ID NO: 117046 - RNA, 19 nt, Artificial Sequence
  Description of Artificial Sequence: Synthetic oligonucleotide
agauucucgcuucuguaca

SEQ ID NO: 117047 - RNA, 19 nt, Artificial Sequence
  Description of Artificial Sequence: Synthetic oligonucleotide
acaacauaguucucgccgu

SEQ ID NO: 117048 - RNA, 19 nt, Artificial Sequence
  Description of Artificial Sequence: Synthetic oligonucleotide
gaaaauagaggaagcuuca

SEQ ID NO: 117049 - RNA, 19 nt, Artificial Sequence
  Description of Artificial Sequence: Synthetic oligonucleotide
ggaucuucgcaucagugcc

SEQ ID NO: 117050 - RNA, 19 nt, Artificial Sequence
  Description of Artificial Sequence: Synthetic oligonucleotide
uuuggacgaggguguaacg

SEQ ID NO: 117051 - RNA, 19 nt, Artificial Sequence
  Description of Artificial Sequence: Synthetic oligonucleotide
ucgcauugcaccacagggc

SEQ ID NO: 117052 - RNA, 19 nt, Artificial Sequence
  Description of Artificial Sequence: Synthetic oligonucleotide
uacuccgaagaaguaauca

SEQ ID NO: 117053 - RNA, 19 nt, Artificial Sequence
  Description of Artificial Sequence: Synthetic oligonucleotide
acguucucacgccaccagc

SEQ ID NO: 117054 - RNA, 19 nt, Artificial Sequence
  Description of Artificial Sequence: Synthetic oligonucleotide
gauaugaauuacguucuca

SEQ ID NO: 117055 - RNA, 19 nt, Artificial Sequence
  Description of Artificial Sequence: Synthetic oligonucleotide
caaugucaggggcagggcg

SEQ ID NO: 117056 - RNA, 19 nt, Artificial Sequence
  Description of Artificial Sequence: Synthetic oligonucleotide
ugguugaucugccggaaaa

SEQ ID NO: 117057 - RNA, 19 nt, Artificial Sequence
  Description of Artificial Sequence: Synthetic oligonucleotide
gaaaacuaugauguucaca

SEQ ID NO: 117058 - RNA, 19 nt, Artificial Sequence
  Description of Artificial Sequence: Synthetic oligonucleotide
cuucccguggaucucaauc

SEQ ID NO: 117059 - RNA, 19 nt, Artificial Sequence
  Description of Artificial Sequence: Synthetic oligonucleotide
uucgcaucagugccugugc

SEQ ID NO: 117060 - RNA, 19 nt, Artificial Sequence
  Description of Artificial Sequence: Synthetic oligonucleotide
gaguccauucgucgcauug

SEQ ID NO: 117061 - RNA, 19 nt, Artificial Sequence
  Description of Artificial Sequence: Synthetic oligonucleotide
ucgauucucaggcugucau

SEQ ID NO: 117062 - RNA, 19 nt, Artificial Sequence
  Description of Artificial Sequence: Synthetic oligonucleotide
guagaacggcaccacagug

SEQ ID NO: 117063 - RNA, 19 nt, Artificial Sequence
  Description of Artificial Sequence: Synthetic oligonucleotide
ugcuacaguccuucugucc

SEQ ID NO: 117064 - RNA, 19 nt, Artificial Sequence
  Description of Artificial Sequence: Synthetic oligonucleotide
uggaaggugccacaucaaa

SEQ ID NO: 117065 - RNA, 19 nt, Artificial Sequence
  Description of Artificial Sequence: Synthetic oligonucleotide
gaagacgacucgucaguug

SEQ ID NO: 117066 - RNA, 19 nt, Artificial Sequence
  Description of Artificial Sequence: Synthetic oligonucleotide
uugaucugccggaaaacua

SEQ ID NO: 117067 - RNA, 19 nt, Artificial Sequence
  Description of Artificial Sequence: Synthetic oligonucleotide
cauaguucucgccgucucg

SEQ ID NO: 117068 - RNA, 19 nt, Artificial Sequence
  Description of Artificial Sequence: Synthetic oligonucleotide
auuugucacccguaccgug

SEQ ID NO: 117069 - RNA, 19 nt, Artificial Sequence
  Description of Artificial Sequence: Synthetic oligonucleotide
uggacucuucuugcaaacg

SEQ ID NO: 117070 - RNA, 19 nt, Artificial Sequence
  Description of Artificial Sequence: Synthetic oligonucleotide
uaguuccccuguagcaacg

SEQ ID NO: 117071 - RNA, 19 nt, Artificial Sequence
  Description of Artificial Sequence: Synthetic oligonucleotide
aaagagacuugcggcagga

SEQ ID NO: 117072 - RNA, 19 nt, Artificial Sequence
  Description of Artificial Sequence: Synthetic oligonucleotide
acgacucgucaguugcagc

SEQ ID NO: 117073 - RNA, 19 nt, Artificial Sequence
  Description of Artificial Sequence: Synthetic oligonucleotide
acccuuaucaucagugaag

SEQ ID NO: 117074 - RNA, 19 nt, Artificial Sequence
  Description of Artificial Sequence: Synthetic oligonucleotide
ugagggauaagaggacccc

SEQ ID NO: 117075 - RNA, 19 nt, Artificial Sequence
  Description of Artificial Sequence: Synthetic oligonucleotide
cuuuggacgaggguguaac

SEQ ID NO: 117076 - RNA, 19 nt, Artificial Sequence
  Description of Artificial Sequence: Synthetic oligonucleotide
guagcaacgaggucagcca

SEQ ID NO: 117077 - RNA, 19 nt, Artificial Sequence
  Description of Artificial Sequence: Synthetic oligonucleotide
gacuuuagagggcccagga

SEQ ID NO: 117078 - RNA, 19 nt, Artificial Sequence
  Description of Artificial Sequence: Synthetic oligonucleotide
ccauucgucgcauugcacc

SEQ ID NO: 117079 - RNA, 19 nt, Artificial Sequence
  Description of Artificial Sequence: Synthetic oligonucleotide
uuggaauuugucacccgua

SEQ ID NO: 117080 - RNA, 19 nt, Artificial Sequence
  Description of Artificial Sequence: Synthetic oligonucleotide
uucucgcuucuguacaacu

SEQ ID NO: 117081 - RNA, 19 nt, Artificial Sequence
  Description of Artificial Sequence: Synthetic oligonucleotide
augguacaugcacccuggc

SEQ ID NO: 117082 - RNA, 19 nt, Artificial Sequence
  Description of Artificial Sequence: Synthetic oligonucleotide
aguucucgccgucucggag

SEQ ID NO: 117083 - RNA, 19 nt, Artificial Sequence
  Description of Artificial Sequence: Synthetic oligonucleotide
gaauuacguucucacgcca

SEQ ID NO: 117084 - RNA, 19 nt, Artificial Sequence
  Description of Artificial Sequence: Synthetic oligonucleotide
gaaugucagaacgccguug

SEQ ID NO: 117085 - RNA, 19 nt, Artificial Sequence
  Description of Artificial Sequence: Synthetic oligonucleotide
agugggugacuuuauucau

SEQ ID NO: 117086 - RNA, 19 nt, Artificial Sequence
  Description of Artificial Sequence: Synthetic oligonucleotide
cagcaguccgcguaaccgg

SEQ ID NO: 117087 - RNA, 19 nt, Artificial Sequence
  Description of Artificial Sequence: Synthetic oligonucleotide
cagaacgccguuguccugg

SEQ ID NO: 117088 - RNA, 19 nt, Artificial Sequence
  Description of Artificial Sequence: Synthetic oligonucleotide
uucgucgcauugcaccaca

SEQ ID NO: 117089 - RNA, 19 nt, Artificial Sequence
  Description of Artificial Sequence: Synthetic oligonucleotide
acaaaugagugggugacuu

SEQ ID NO: 117090 - RNA, 19 nt, Artificial Sequence
  Description of Artificial Sequence: Synthetic oligonucleotide
aggggacgagccuuucuuc

SEQ ID NO: 117091 - RNA, 19 nt, Artificial Sequence
  Description of Artificial Sequence: Synthetic oligonucleotide
ucaggagguuagaacgaaa

SEQ ID NO: 117092 - RNA, 19 nt, Artificial Sequence
  Description of Artificial Sequence: Synthetic oligonucleotide
cugugaggagggcucaaag

SEQ ID NO: 117093 - RNA, 19 nt, Artificial Sequence
  Description of Artificial Sequence: Synthetic oligonucleotide
gacgacucgucaguugcag

SEQ ID NO: 117094 - RNA, 19 nt, Artificial Sequence
  Description of Artificial Sequence: Synthetic oligonucleotide
ggaauuugucacccguacc

SEQ ID NO: 117095 - RNA, 19 nt, Artificial Sequence
  Description of Artificial Sequence: Synthetic oligonucleotide
ggguugucaagauucucgc

SEQ ID NO: 117096 - RNA, 19 nt, Artificial Sequence
  Description of Artificial Sequence: Synthetic oligonucleotide
agacuuuagagggcccagg

SEQ ID NO: 117097 - RNA, 19 nt, Artificial Sequence
  Description of Artificial Sequence: Synthetic oligonucleotide
uaaagacgacacugugcca

SEQ ID NO: 117098 - RNA, 19 nt, Artificial Sequence
  Description of Artificial Sequence: Synthetic oligonucleotide
acuguggacuggaucuucg

SEQ ID NO: 117099 - RNA, 19 nt, Artificial Sequence
  Description of Artificial Sequence: Synthetic oligonucleotide
agguccauucaagacccuc

SEQ ID NO: 117100 - RNA, 19 nt, Artificial Sequence
  Description of Artificial Sequence: Synthetic oligonucleotide
uggaugguguaugucccug

SEQ ID NO: 117101 - RNA, 19 nt, Artificial Sequence
  Description of Artificial Sequence: Synthetic oligonucleotide
ugaugauaguuccccugua

SEQ ID NO: 117102 - RNA, 19 nt, Artificial Sequence
  Description of Artificial Sequence: Synthetic oligonucleotide
ugccguguuuacuggacuc

SEQ ID NO: 117103 - RNA, 19 nt, Artificial Sequence
  Description of Artificial Sequence: Synthetic oligonucleotide
guuagcguuggaauuuguc

SEQ ID NO: 117104 - RNA, 19 nt, Artificial Sequence
  Description of Artificial Sequence: Synthetic oligonucleotide
aguguacuccaggucacug

SEQ ID NO: 117105 - RNA, 19 nt, Artificial Sequence
  Description of Artificial Sequence: Synthetic oligonucleotide
uguuuacuggacucuucuu

SEQ ID NO: 117106 - RNA, 19 nt, Artificial Sequence
  Description of Artificial Sequence: Synthetic oligonucleotide
accgcgacacccugcuccg

SEQ ID NO: 117107 - RNA, 19 nt, Artificial Sequence
  Description of Artificial Sequence: Synthetic oligonucleotide
gguuagaacgaaacacacc

SEQ ID NO: 117108 - RNA, 19 nt, Artificial Sequence
  Description of Artificial Sequence: Synthetic oligonucleotide
aacgaauguggaagauaug

SEQ ID NO: 117109 - RNA, 19 nt, Artificial Sequence
  Description of Artificial Sequence: Synthetic oligonucleotide
cauucgucgcauugcacca

SEQ ID NO: 117110 - RNA, 19 nt, Artificial Sequence
  Description of Artificial Sequence: Synthetic oligonucleotide
agcucacgccagccaaggc

SEQ ID NO: 117111 - RNA, 19 nt, Artificial Sequence
  Description of Artificial Sequence: Synthetic oligonucleotide
uccauucgucgcauugcac

SEQ ID NO: 117112 - RNA, 19 nt, Artificial Sequence
  Description of Artificial Sequence: Synthetic oligonucleotide
uucuuucgcccguucuucu

SEQ ID NO: 117113 - RNA, 19 nt, Artificial Sequence
  Description of Artificial Sequence: Synthetic oligonucleotide
ugcguuagcguuggaauuu

SEQ ID NO: 117114 - RNA, 19 nt, Artificial Sequence
  Description of Artificial Sequence: Synthetic oligonucleotide
gaucugccggaaaacuaug

SEQ ID NO: 117115 - RNA, 19 nt, Artificial Sequence
  Description of Artificial Sequence: Synthetic oligonucleotide
agcugcgggguguugggug

SEQ ID NO: 117116 - RNA, 19 nt, Artificial Sequence
  Description of Artificial Sequence: Synthetic oligonucleotide
aacacgggcucgauucuca

SEQ ID NO: 117117 - RNA, 19 nt, Artificial Sequence
  Description of Artificial Sequence: Synthetic oligonucleotide
gaggguguaacggugauuu

SEQ ID NO: 117118 - RNA, 19 nt, Artificial Sequence
  Description of Artificial Sequence: Synthetic oligonucleotide
gacucgucaguugcagcag

SEQ ID NO: 117119 - RNA, 19 nt, Artificial Sequence
  Description of Artificial Sequence: Synthetic oligonucleotide
gcaggacguagucauacug

SEQ ID NO: 117120 - RNA, 19 nt, Artificial Sequence
  Description of Artificial Sequence: Synthetic oligonucleotide
gucguaagagaaggggccc

SEQ ID NO: 117121 - RNA, 19 nt, Artificial Sequence
  Description of Artificial Sequence: Synthetic oligonucleotide
cuugcggcaggacguaguc

SEQ ID NO: 117122 - RNA, 19 nt, Artificial Sequence
  Description of Artificial Sequence: Synthetic oligonucleotide
ucccugaagacgacucguc

SEQ ID NO: 117123 - RNA, 19 nt, Artificial Sequence
  Description of Artificial Sequence: Synthetic oligonucleotide
agaacgaaacacaccucca

SEQ ID NO: 117124 - RNA, 19 nt, Artificial Sequence
  Description of Artificial Sequence: Synthetic oligonucleotide
auacuccgaagaaguaauc

SEQ ID NO: 117125 - RNA, 19 nt, Artificial Sequence
  Description of Artificial Sequence: Synthetic oligonucleotide
agaacgccguuguccuggg

SEQ ID NO: 117126 - RNA, 19 nt, Artificial Sequence
  Description of Artificial Sequence: Synthetic oligonucleotide
auucgucgcauugcaccac

SEQ ID NO: 117127 - RNA, 19 nt, Artificial Sequence
  Description of Artificial Sequence: Synthetic oligonucleotide
aguccgcguaaccggaacu

SEQ ID NO: 117128 - RNA, 19 nt, Artificial Sequence
  Description of Artificial Sequence: Synthetic oligonucleotide
agugagugaguaugugcuu

SEQ ID NO: 117129 - RNA, 19 nt, Artificial Sequence
  Description of Artificial Sequence: Synthetic oligonucleotide
aagacgacacugugccaua

SEQ ID NO: 117130 - RNA, 19 nt, Artificial Sequence
  Description of Artificial Sequence: Synthetic oligonucleotide
guguuuacuggacucuucu

SEQ ID NO: 117131 - RNA, 19 nt, Artificial Sequence
  Description of Artificial Sequence: Synthetic oligonucleotide
gacucccugaagacgacuc

SEQ ID NO: 117132 - RNA, 19 nt, Artificial Sequence
  Description of Artificial Sequence: Synthetic oligonucleotide
guaccgugguacuugccuc

SEQ ID NO: 117133 - RNA, 19 nt, Artificial Sequence
  Description of Artificial Sequence: Synthetic oligonucleotide
aagucucccacaguuccuu

SEQ ID NO: 117134 - RNA, 19 nt, Artificial Sequence
  Description of Artificial Sequence: Synthetic oligonucleotide
augccguguuuacuggacu

SEQ ID NO: 117135 - RNA, 19 nt, Artificial Sequence
  Description of Artificial Sequence: Synthetic oligonucleotide
ucgucgcauugcaccacag

SEQ ID NO: 117136 - RNA, 19 nt, Artificial Sequence
  Description of Artificial Sequence: Synthetic oligonucleotide
guccauucgucgcauugca

SEQ ID NO: 117137 - RNA, 19 nt, Artificial Sequence
  Description of Artificial Sequence: Synthetic oligonucleotide
gaacccggacacuggggac

SEQ ID NO: 117138 - RNA, 19 nt, Artificial Sequence
  Description of Artificial Sequence: Synthetic oligonucleotide
aagauacuccgaagaagua

SEQ ID NO: 117139 - RNA, 19 nt, Artificial Sequence
  Description of Artificial Sequence: Synthetic oligonucleotide
ucguaagagaaggggcccu

SEQ ID NO: 117140 - RNA, 19 nt, Artificial Sequence
  Description of Artificial Sequence: Synthetic oligonucleotide
ucacccguaccgugguacu

SEQ ID NO: 117141 - RNA, 19 nt, Artificial Sequence
  Description of Artificial Sequence: Synthetic oligonucleotide
cucgccgucucggagcagc

SEQ ID NO: 117142 - RNA, 19 nt, Artificial Sequence
  Description of Artificial Sequence: Synthetic oligonucleotide
caaucacccgauggugggg

SEQ ID NO: 117143 - RNA, 19 nt, Artificial Sequence
  Description of Artificial Sequence: Synthetic oligonucleotide
ggaacaagccugccuuccc

SEQ ID NO: 117144 - RNA, 19 nt, Artificial Sequence
  Description of Artificial Sequence: Synthetic oligonucleotide
ugaagacgacucgucaguu

SEQ ID NO: 117145 - RNA, 19 nt, Artificial Sequence
  Description of Artificial Sequence: Synthetic oligonucleotide
uaguucucgccgucucgga

SEQ ID NO: 117146 - RNA, 19 nt, Artificial Sequence
  Description of Artificial Sequence: Synthetic oligonucleotide
ucccaaccucaaucacccg

SEQ ID NO: 117147 - RNA, 19 nt, Artificial Sequence
  Description of Artificial Sequence: Synthetic oligonucleotide
gucacccguaccgugguac

SEQ ID NO: 117148 - RNA, 19 nt, Artificial Sequence
  Description of Artificial Sequence: Synthetic oligonucleotide
acgaggucagccagcugcg

SEQ ID NO: 117149 - RNA, 19 nt, Artificial Sequence
  Description of Artificial Sequence: Synthetic oligonucleotide
ggccgagcgacacugucug

SEQ ID NO: 117150 - RNA, 19 nt, Artificial Sequence
  Description of Artificial Sequence: Synthetic oligonucleotide
agacgacacugugccauag

SEQ ID NO: 117151 - RNA, 19 nt, Artificial Sequence
  Description of Artificial Sequence: Synthetic oligonucleotide
gcuugugguagcccacugc

SEQ ID NO: 117152 - RNA, 19 nt, Artificial Sequence
  Description of Artificial Sequence: Synthetic oligonucleotide
caaacgaauguggaagaua

SEQ ID NO: 117153 - RNA, 19 nt, Artificial Sequence
  Description of Artificial Sequence: Synthetic oligonucleotide
cacuauuaggggaccagcu

SEQ ID NO: 117154 - RNA, 19 nt, Artificial Sequence
  Description of Artificial Sequence: Synthetic oligonucleotide
gacgaggguguaacgguga

SEQ ID NO: 117155 - RNA, 19 nt, Artificial Sequence
  Description of Artificial Sequence: Synthetic oligonucleotide
cacuguaggcacccuuauc

SEQ ID NO: 117156 - RNA, 19 nt, Artificial Sequence
  Description of Artificial Sequence: Synthetic oligonucleotide
aucugccggaaaacuauga

SEQ ID NO: 117157 - RNA, 19 nt, Artificial Sequence
  Description of Artificial Sequence: Synthetic oligonucleotide
gugggccaacacuguaggc

SEQ ID NO: 117158 - RNA, 19 nt, Artificial Sequence
  Description of Artificial Sequence: Synthetic oligonucleotide
cuuccaccgcgacacccug

SEQ ID NO: 117159 - RNA, 19 nt, Artificial Sequence
  Description of Artificial Sequence: Synthetic oligonucleotide
caguccgcguaaccggaac

SEQ ID NO: 117160 - RNA, 19 nt, Artificial Sequence
  Description of Artificial Sequence: Synthetic oligonucleotide
ucgucaguugcagcagcaa

SEQ ID NO: 117161 - RNA, 19 nt, Artificial Sequence
  Description of Artificial Sequence: Synthetic oligonucleotide
acgaggguguaacggugau

SEQ ID NO: 117162 - RNA, 19 nt, Artificial Sequence
  Description of Artificial Sequence: Synthetic oligonucleotide
ugggguugucaagauucuc

SEQ ID NO: 117163 - RNA, 19 nt, Artificial Sequence
  Description of Artificial Sequence: Synthetic oligonucleotide
uccgcguaaccggaacuuc

SEQ ID NO: 117164 - RNA, 19 nt, Artificial Sequence
  Description of Artificial Sequence: Synthetic oligonucleotide
gaacacgggcucgauucuc

SEQ ID NO: 117165 - RNA, 19 nt, Artificial Sequence
  Description of Artificial Sequence: Synthetic oligonucleotide
cugacucccugaagacgac

SEQ ID NO: 117166 - RNA, 19 nt, Artificial Sequence
  Description of Artificial Sequence: Synthetic oligonucleotide
accagcugcguuagcguug

SEQ ID NO: 117167 - RNA, 19 nt, Artificial Sequence
  Description of Artificial Sequence: Synthetic oligonucleotide
auuaggggaccagcugcgu

SEQ ID NO: 117168 - RNA, 19 nt, Artificial Sequence
  Description of Artificial Sequence: Synthetic oligonucleotide
gacuugcggcaggacguag

SEQ ID NO: 117169 - RNA, 19 nt, Artificial Sequence
  Description of Artificial Sequence: Synthetic oligonucleotide
cccugguugugccaucugc

SEQ ID NO: 117170 - RNA, 19 nt, Artificial Sequence
  Description of Artificial Sequence: Synthetic oligonucleotide
gaacggcaccacaguguag

SEQ ID NO: 117171 - RNA, 19 nt, Artificial Sequence
  Description of Artificial Sequence: Synthetic oligonucleotide
gaaccuugugcaaugucuu

SEQ ID NO: 117172 - RNA, 19 nt, Artificial Sequence
  Description of Artificial Sequence: Synthetic oligonucleotide
ccgcguaaccggaacuucc

SEQ ID NO: 117173 - RNA, 19 nt, Artificial Sequence
  Description of Artificial Sequence: Synthetic oligonucleotide
gccacuauuaggggaccag

SEQ ID NO: 117174 - RNA, 19 nt, Artificial Sequence
  Description of Artificial Sequence: Synthetic oligonucleotide
gcgauguaggaaccuugug

SEQ ID NO: 117175 - RNA, 19 nt, Artificial Sequence
  Description of Artificial Sequence: Synthetic oligonucleotide
aggcacccuuaucaucagu

SEQ ID NO: 117176 - RNA, 19 nt, Artificial Sequence
  Description of Artificial Sequence: Synthetic oligonucleotide
ccacuauuaggggaccagc

SEQ ID NO: 117177 - RNA, 19 nt, Artificial Sequence
  Description of Artificial Sequence: Synthetic oligonucleotide
accgagcccaguaggagaa

SEQ ID NO: 117178 - RNA, 19 nt, Artificial Sequence
  Description of Artificial Sequence: Synthetic oligonucleotide
ggccuucuaggaacaagcc

SEQ ID NO: 117179 - RNA, 19 nt, Artificial Sequence
  Description of Artificial Sequence: Synthetic oligonucleotide
uucagcgcccagguuggau

SEQ ID NO: 117180 - RNA, 19 nt, Artificial Sequence
  Description of Artificial Sequence: Synthetic oligonucleotide
agcaguccgcguaaccgga

SEQ ID NO: 117181 - RNA, 19 nt, Artificial Sequence
  Description of Artificial Sequence: Synthetic oligonucleotide
gcugcguuagcguuggaau

SEQ ID NO: 117182 - RNA, 19 nt, Artificial Sequence
  Description of Artificial Sequence: Synthetic oligonucleotide
ccgguucuccauuuaaaga

SEQ ID NO: 117183 - RNA, 19 nt, Artificial Sequence
  Description of Artificial Sequence: Synthetic oligonucleotide
cauccacgugcagauccac

SEQ ID NO: 117184 - RNA, 19 nt, Artificial Sequence
  Description of Artificial Sequence: Synthetic oligonucleotide
gcguaaccggaacuucccc

SEQ ID NO: 117185 - RNA, 19 nt, Artificial Sequence
  Description of Artificial Sequence: Synthetic oligonucleotide
gcgugcagaugucacugac

SEQ ID NO: 117186 - RNA, 19 nt, Artificial Sequence
  Description of Artificial Sequence: Synthetic oligonucleotide
cgacacugugccauagcag

SEQ ID NO: 117187 - RNA, 19 nt, Artificial Sequence
  Description of Artificial Sequence: Synthetic oligonucleotide
cccaaccucaaucacccga

SEQ ID NO: 117188 - RNA, 19 nt, Artificial Sequence
  Description of Artificial Sequence: Synthetic oligonucleotide
agccacuauuaggggacca

SEQ ID NO: 117189 - RNA, 19 nt, Artificial Sequence
  Description of Artificial Sequence: Synthetic oligonucleotide
cacugacaccauccacgug

SEQ ID NO: 117190 - RNA, 19 nt, Artificial Sequence
  Description of Artificial Sequence: Synthetic oligonucleotide
ugucacccguaccguggua

SEQ ID NO: 117191 - RNA, 19 nt, Artificial Sequence
  Description of Artificial Sequence: Synthetic oligonucleotide
cgcguaaccggaacuuccc

SEQ ID NO: 117192 - RNA, 19 nt, Artificial Sequence
  Description of Artificial Sequence: Synthetic oligonucleotide
uccucacgugcgucugguc

SEQ ID NO: 117193 - RNA, 19 nt, Artificial Sequence
  Description of Artificial Sequence: Synthetic oligonucleotide
agacgacucgucaguugca

SEQ ID NO: 117194 - RNA, 19 nt, Artificial Sequence
  Description of Artificial Sequence: Synthetic oligonucleotide
acguggaacacgggcucga

SEQ ID NO: 117195 - RNA, 19 nt, Artificial Sequence
  Description of Artificial Sequence: Synthetic oligonucleotide
gcagacuuuagagggccca

SEQ ID NO: 117196 - RNA, 19 nt, Artificial Sequence
  Description of Artificial Sequence: Synthetic oligonucleotide
cuggcagcaguccgcguaa

SEQ ID NO: 117197 - RNA, 19 nt, Artificial Sequence
  Description of Artificial Sequence: Synthetic oligonucleotide
cacccugcgugcagauguc

SEQ ID NO: 117198 - RNA, 19 nt, Artificial Sequence
  Description of Artificial Sequence: Synthetic oligonucleotide
cgacucgucaguugcagca

SEQ ID NO: 117199 - RNA, 19 nt, Artificial Sequence
  Description of Artificial Sequence: Synthetic oligonucleotide
cuuucucgugggacugaaa

SEQ ID NO: 117200 - RNA, 19 nt, Artificial Sequence
  Description of Artificial Sequence: Synthetic oligonucleotide
acccgaugguggggcaggg

SEQ ID NO: 117201 - RNA, 19 nt, Artificial Sequence
  Description of Artificial Sequence: Synthetic oligonucleotide
gcguuagcguuggaauuug

SEQ ID NO: 117202 - RNA, 19 nt, Artificial Sequence
  Description of Artificial Sequence: Synthetic oligonucleotide
cguguuuacuggacucuuc

SEQ ID NO: 117203 - RNA, 19 nt, Artificial Sequence
  Description of Artificial Sequence: Synthetic oligonucleotide
acccugcgugcagauguca

SEQ ID NO: 117204 - RNA, 19 nt, Artificial Sequence
  Description of Artificial Sequence: Synthetic oligonucleotide
ggacguagucauacuggga

SEQ ID NO: 117205 - RNA, 19 nt, Artificial Sequence
  Description of Artificial Sequence: Synthetic oligonucleotide
cugcguuagcguuggaauu

SEQ ID NO: 117206 - RNA, 19 nt, Artificial Sequence
  Description of Artificial Sequence: Synthetic oligonucleotide
cuggguggaucuggccuuc

SEQ ID NO: 117207 - RNA, 19 nt, Artificial Sequence
  Description of Artificial Sequence: Synthetic oligonucleotide
cccugaagacgacucguca

SEQ ID NO: 117208 - RNA, 19 nt, Artificial Sequence
  Description of Artificial Sequence: Synthetic oligonucleotide
cucccugaagacgacucgu

SEQ ID NO: 117209 - RNA, 19 nt, Artificial Sequence
  Description of Artificial Sequence: Synthetic oligonucleotide
ggaugguguaugucccugu

SEQ ID NO: 117210 - RNA, 19 nt, Artificial Sequence
  Description of Artificial Sequence: Synthetic oligonucleotide
gagaguccauucgucgcau

SEQ ID NO: 117211 - RNA, 19 nt, Artificial Sequence
  Description of Artificial Sequence: Synthetic oligonucleotide
gccgagcgacacugucugg

SEQ ID NO: 117212 - RNA, 19 nt, Artificial Sequence
  Description of Artificial Sequence: Synthetic oligonucleotide
ggcgauguaggaaccuugu

SEQ ID NO: 117213 - RNA, 19 nt, Artificial Sequence
  Description of Artificial Sequence: Synthetic oligonucleotide
aggggcccuguaacucguc

SEQ ID NO: 117214 - RNA, 19 nt, Artificial Sequence
  Description of Artificial Sequence: Synthetic oligonucleotide
ggaacacgggcucgauucu

SEQ ID NO: 117215 - RNA, 19 nt, Artificial Sequence
  Description of Artificial Sequence: Synthetic oligonucleotide
ccacccugcgugcagaugu

SEQ ID NO: 117216 - RNA, 19 nt, Artificial Sequence
  Description of Artificial Sequence: Synthetic oligonucleotide
gggacgagccuuucuuccu

SEQ ID NO: 117217 - RNA, 19 nt, Artificial Sequence
  Description of Artificial Sequence: Synthetic oligonucleotide
cacaaaugagugggugacu

SEQ ID NO: 117218 - RNA, 19 nt, Artificial Sequence
  Description of Artificial Sequence: Synthetic oligonucleotide
ccucacgugcgucuggucu

SEQ ID NO: 117219 - RNA, 19 nt, Artificial Sequence
  Description of Artificial Sequence: Synthetic oligonucleotide
cguaccgugguacuugccu

SEQ ID NO: 117220 - RNA, 19 nt, Artificial Sequence
  Description of Artificial Sequence: Synthetic oligonucleotide
cacaugguacaugcacccu

SEQ ID NO: 117221 - RNA, 19 nt, Artificial Sequence
  Description of Artificial Sequence: Synthetic oligonucleotide
ccguaccgugguacuugcc

SEQ ID NO: 117222 - RNA, 19 nt, Artificial Sequence
  Description of Artificial Sequence: Synthetic oligonucleotide
gcaaacgaauguggaagau

SEQ ID NO: 117223 - RNA, 19 nt, Artificial Sequence
  Description of Artificial Sequence: Synthetic oligonucleotide
ggcucgauucucaggcugu

SEQ ID NO: 117224 - RNA, 19 nt, Artificial Sequence
  Description of Artificial Sequence: Synthetic oligonucleotide
guccgcguaaccggaacuu

SEQ ID NO: 117225 - RNA, 19 nt, Artificial Sequence
  Description of Artificial Sequence: Synthetic oligonucleotide
cacugcggacagagccaga

SEQ ID NO: 117226 - RNA, 19 nt, Artificial Sequence
  Description of Artificial Sequence: Synthetic oligonucleotide
gccguguuuacuggacucu

SEQ ID NO: 117227 - RNA, 19 nt, Artificial Sequence
  Description of Artificial Sequence: Synthetic oligonucleotide
gaacgccguuguccugggu

SEQ ID NO: 117228 - RNA, 19 nt, Artificial Sequence
  Description of Artificial Sequence: Synthetic oligonucleotide
caguguacuccaggucacu

SEQ ID NO: 117229 - RNA, 19 nt, Artificial Sequence
  Description of Artificial Sequence: Synthetic oligonucleotide
gcuuccaccgcgacacccu

SEQ ID NO: 117230 - RNA, 19 nt, Artificial Sequence
  Description of Artificial Sequence: Synthetic oligonucleotide
gcaggggacgagccuuucu

SEQ ID NO: 117231 - RNA, 19 nt, Artificial Sequence
  Description of Artificial Sequence: Synthetic oligonucleotide
cagggcgauguaggaaccu

SEQ ID NO: 117232 - RNA, 19 nt, Artificial Sequence
  Description of Artificial Sequence: Synthetic oligonucleotide
gccggaaaacuaugauguu

SEQ ID NO: 117233 - RNA, 19 nt, Artificial Sequence
  Description of Artificial Sequence: Synthetic oligonucleotide
cgugcgucuggucuucugu

SEQ ID NO: 117234 - RNA, 19 nt, Artificial Sequence
  Description of Artificial Sequence: Synthetic oligonucleotide
gcaguccgcguaaccggaa

SEQ ID NO: 117235 - RNA, 19 nt, Artificial Sequence
  Description of Artificial Sequence: Synthetic oligonucleotide
cguuagcguuggaauuugu

SEQ ID NO: 117236 - RNA, 19 nt, Artificial Sequence
  Description of Artificial Sequence: Synthetic oligonucleotide
gcgacacccugcuccgguu

SEQ ID NO: 117237 - RNA, 19 nt, Artificial Sequence
  Description of Artificial Sequence: Synthetic oligonucleotide
cccgcucgauguggucauu

SEQ ID NO: 117238 - RNA, 19 nt, Artificial Sequence
  Description of Artificial Sequence: Synthetic oligonucleotide
uaagccuagaaucauaugg

SEQ ID NO: 117239 - RNA, 19 nt, Artificial Sequence
  Description of Artificial Sequence: Synthetic oligonucleotide
uguaaaacaauguuaagcc

SEQ ID NO: 117240 - RNA, 19 nt, Artificial Sequence
  Description of Artificial Sequence: Synthetic oligonucleotide
aaucauauggccuuaaagu

SEQ ID NO: 117241 - RNA, 19 nt, Artificial Sequence
  Description of Artificial Sequence: Synthetic oligonucleotide
gauuugauuaccuggaagg

SEQ ID NO: 117242 - RNA, 19 nt, Artificial Sequence
  Description of Artificial Sequence: Synthetic oligonucleotide
aaaagguucgugcuuuucc

SEQ ID NO: 117243 - RNA, 19 nt, Artificial Sequence
  Description of Artificial Sequence: Synthetic oligonucleotide
auuaaaccaggccugagcc

SEQ ID NO: 117244 - RNA, 19 nt, Artificial Sequence
  Description of Artificial Sequence: Synthetic oligonucleotide
uuuucaagaaaguacauac

SEQ ID NO: 117245 - RNA, 19 nt, Artificial Sequence
  Description of Artificial Sequence: Synthetic oligonucleotide
agcacauaaguuuugauuc

SEQ ID NO: 117246 - RNA, 19 nt, Artificial Sequence
  Description of Artificial Sequence: Synthetic oligonucleotide
ugagaauuaaaccaggccu

SEQ ID NO: 117247 - RNA, 19 nt, Artificial Sequence
  Description of Artificial Sequence: Synthetic oligonucleotide
gacuauguggacuuuaagg

SEQ ID NO: 117248 - RNA, 19 nt, Artificial Sequence
  Description of Artificial Sequence: Synthetic oligonucleotide
aauaagcugcacccgaggc

SEQ ID NO: 117249 - RNA, 19 nt, Artificial Sequence
  Description of Artificial Sequence: Synthetic oligonucleotide
aagaaaacuaagcacauaa

SEQ ID NO: 117250 - RNA, 19 nt, Artificial Sequence
  Description of Artificial Sequence: Synthetic oligonucleotide
aaagguucgugcuuuuccc

SEQ ID NO: 117251 - RNA, 19 nt, Artificial Sequence
  Description of Artificial Sequence: Synthetic oligonucleotide
uauccuaacaccuaaagau

SEQ ID NO: 117252 - RNA, 19 nt, Artificial Sequence
  Description of Artificial Sequence: Synthetic oligonucleotide
uauugugcaauuccaauag

SEQ ID NO: 117253 - RNA, 19 nt, Artificial Sequence
  Description of Artificial Sequence: Synthetic oligonucleotide
aauuaccugguacaaacag

SEQ ID NO: 117254 - RNA, 19 nt, Artificial Sequence
  Description of Artificial Sequence: Synthetic oligonucleotide
acuaccuaccucuagaauc

SEQ ID NO: 117255 - RNA, 19 nt, Artificial Sequence
  Description of Artificial Sequence: Synthetic oligonucleotide
acaccuaaagauuuccucc

SEQ ID NO: 117256 - RNA, 19 nt, Artificial Sequence
  Description of Artificial Sequence: Synthetic oligonucleotide
auguuuauugugcaauucc

SEQ ID NO: 117257 - RNA, 19 nt, Artificial Sequence
  Description of Artificial Sequence: Synthetic oligonucleotide
agguaguucauaugaaugc

SEQ ID NO: 117258 - RNA, 19 nt, Artificial Sequence
  Description of Artificial Sequence: Synthetic oligonucleotide
aacaccuaaagauuuccuc

SEQ ID NO: 117259 - RNA, 19 nt, Artificial Sequence
  Description of Artificial Sequence: Synthetic oligonucleotide
uucaauauaucuacaaccu

SEQ ID NO: 117260 - RNA, 19 nt, Artificial Sequence
  Description of Artificial Sequence: Synthetic oligonucleotide
uaguucaugauauaggcga

SEQ ID NO: 117261 - RNA, 19 nt, Artificial Sequence
  Description of Artificial Sequence: Synthetic oligonucleotide
auuaaauguaaacaguagu

SEQ ID NO: 117262 - RNA, 19 nt, Artificial Sequence
  Description of Artificial Sequence: Synthetic oligonucleotide
cuaauguggacacagaaac

SEQ ID NO: 117263 - RNA, 19 nt, Artificial Sequence
  Description of Artificial Sequence: Synthetic oligonucleotide
uccaauagaaacucugggg

SEQ ID NO: 117264 - RNA, 19 nt, Artificial Sequence
  Description of Artificial Sequence: Synthetic oligonucleotide
aacaccacagguuauagau

SEQ ID NO: 117265 - RNA, 19 nt, Artificial Sequence
  Description of Artificial Sequence: Synthetic oligonucleotide
uuaagggagaaaagguucg

SEQ ID NO: 117266 - RNA, 19 nt, Artificial Sequence
  Description of Artificial Sequence: Synthetic oligonucleotide
aaacuaagcacauaaguuu

SEQ ID NO: 117267 - RNA, 19 nt, Artificial Sequence
  Description of Artificial Sequence: Synthetic oligonucleotide
uuaaccuagacaaaaccac

SEQ ID NO: 117268 - RNA, 19 nt, Artificial Sequence
  Description of Artificial Sequence: Synthetic oligonucleotide
aauuagcugccacaguccg

SEQ ID NO: 117269 - RNA, 19 nt, Artificial Sequence
  Description of Artificial Sequence: Synthetic oligonucleotide
aacuuaacaguauccuaac

SEQ ID NO: 117270 - RNA, 19 nt, Artificial Sequence
  Description of Artificial Sequence: Synthetic oligonucleotide
ugaaauugcucuccaaaag

SEQ ID NO: 117271 - RNA, 19 nt, Artificial Sequence
  Description of Artificial Sequence: Synthetic oligonucleotide
ucaacgauuguuauggggu

SEQ ID NO: 117272 - RNA, 19 nt, Artificial Sequence
  Description of Artificial Sequence: Synthetic oligonucleotide
uuucacgagucuaaugugg

SEQ ID NO: 117273 - RNA, 19 nt, Artificial Sequence
  Description of Artificial Sequence: Synthetic oligonucleotide
ucaauagaauaaaucacca

SEQ ID NO: 117274 - RNA, 19 nt, Artificial Sequence
  Description of Artificial Sequence: Synthetic oligonucleotide
gaaauugcucuccaaaagc

SEQ ID NO: 117275 - RNA, 19 nt, Artificial Sequence
  Description of Artificial Sequence: Synthetic oligonucleotide
cuugcauaaucuuuggacc

SEQ ID NO: 117276 - RNA, 19 nt, Artificial Sequence
  Description of Artificial Sequence: Synthetic oligonucleotide
ugucaauagaauaaaucac

SEQ ID NO: 117277 - RNA, 19 nt, Artificial Sequence
  Description of Artificial Sequence: Synthetic oligonucleotide
aaagauuuccuccuguaau

SEQ ID NO: 117278 - RNA, 19 nt, Artificial Sequence
  Description of Artificial Sequence: Synthetic oligonucleotide
auuaacucauaguaucagg

SEQ ID NO: 117279 - RNA, 19 nt, Artificial Sequence
  Description of Artificial Sequence: Synthetic oligonucleotide
aaaacuugugaacuguuaa

SEQ ID NO: 117280 - RNA, 19 nt, Artificial Sequence
  Description of Artificial Sequence: Synthetic oligonucleotide
uaaaacaauguuaagccua

SEQ ID NO: 117281 - RNA, 19 nt, Artificial Sequence
  Description of Artificial Sequence: Synthetic oligonucleotide
acauacgaaauauucacug

SEQ ID NO: 117282 - RNA, 19 nt, Artificial Sequence
  Description of Artificial Sequence: Synthetic oligonucleotide
uuccaauagaaacucuggg

SEQ ID NO: 117283 - RNA, 19 nt, Artificial Sequence
  Description of Artificial Sequence: Synthetic oligonucleotide
uguagaacuccaaaccaag

SEQ ID NO: 117284 - RNA, 19 nt, Artificial Sequence
  Description of Artificial Sequence: Synthetic oligonucleotide
cuuacaggugacauggacg

SEQ ID NO: 117285 - RNA, 19 nt, Artificial Sequence
  Description of Artificial Sequence: Synthetic oligonucleotide
aaauaagcugcacccgagg

SEQ ID NO: 117286 - RNA, 19 nt, Artificial Sequence
  Description of Artificial Sequence: Synthetic oligonucleotide
uagguaguucauaugaaug

SEQ ID NO: 117287 - RNA, 19 nt, Artificial Sequence
  Description of Artificial Sequence: Synthetic oligonucleotide
aaaagcaacaaccuaucua

SEQ ID NO: 117288 - RNA, 19 nt, Artificial Sequence
  Description of Artificial Sequence: Synthetic oligonucleotide
agcgaaaucauuaucauca

SEQ ID NO: 117289 - RNA, 19 nt, Artificial Sequence
  Description of Artificial Sequence: Synthetic oligonucleotide
gcagacaaaacucugaacc

SEQ ID NO: 117290 - RNA, 19 nt, Artificial Sequence
  Description of Artificial Sequence: Synthetic oligonucleotide
uagcaaagccuccauaucc

SEQ ID NO: 117291 - RNA, 19 nt, Artificial Sequence
  Description of Artificial Sequence: Synthetic oligonucleotide
aggaucucuagauaauaac

SEQ ID NO: 117292 - RNA, 19 nt, Artificial Sequence
  Description of Artificial Sequence: Synthetic oligonucleotide
agugauucaauuuuguguu

SEQ ID NO: 117293 - RNA, 19 nt, Artificial Sequence
  Description of Artificial Sequence: Synthetic oligonucleotide
uguacuaccuaccucuaga

SEQ ID NO: 117294 - RNA, 19 nt, Artificial Sequence
  Description of Artificial Sequence: Synthetic oligonucleotide
gauauaggcgagcagacca

SEQ ID NO: 117295 - RNA, 19 nt, Artificial Sequence
  Description of Artificial Sequence: Synthetic oligonucleotide
acuaccuccacccagccug

SEQ ID NO: 117296 - RNA, 19 nt, Artificial Sequence
  Description of Artificial Sequence: Synthetic oligonucleotide
ucuagauaauaacucuccc

SEQ ID NO: 117297 - RNA, 19 nt, Artificial Sequence
  Description of Artificial Sequence: Synthetic oligonucleotide
uccaaaagcucucuaugag

SEQ ID NO: 117298 - RNA, 19 nt, Artificial Sequence
  Description of Artificial Sequence: Synthetic oligonucleotide
agcauacaccugcauaucc

SEQ ID NO: 117299 - RNA, 19 nt, Artificial Sequence
  Description of Artificial Sequence: Synthetic oligonucleotide
agauaauaacucucccagc

SEQ ID NO: 117300 - RNA, 19 nt, Artificial Sequence
  Description of Artificial Sequence: Synthetic oligonucleotide
uuucaagaaaguacauacc

SEQ ID NO: 117301 - RNA, 19 nt, Artificial Sequence
  Description of Artificial Sequence: Synthetic oligonucleotide
ucauauggccuuaaaguga

SEQ ID NO: 117302 - RNA, 19 nt, Artificial Sequence
  Description of Artificial Sequence: Synthetic oligonucleotide
uauaucuacaaccucugua

SEQ ID NO: 117303 - RNA, 19 nt, Artificial Sequence
  Description of Artificial Sequence: Synthetic oligonucleotide
aaaaucgccuucuugguuu

SEQ ID NO: 117304 - RNA, 19 nt, Artificial Sequence
  Description of Artificial Sequence: Synthetic oligonucleotide
ucauuaacucauaguauca

SEQ ID NO: 117305 - RNA, 19 nt, Artificial Sequence
  Description of Artificial Sequence: Synthetic oligonucleotide
uaauaacucucccagcugu

SEQ ID NO: 117306 - RNA, 19 nt, Artificial Sequence
  Description of Artificial Sequence: Synthetic oligonucleotide
aucaacgauuguuaugggg

SEQ ID NO: 117307 - RNA, 19 nt, Artificial Sequence
  Description of Artificial Sequence: Synthetic oligonucleotide
aacucauaguaucaggcaa

SEQ ID NO: 117308 - RNA, 19 nt, Artificial Sequence
  Description of Artificial Sequence: Synthetic oligonucleotide
aagcacauaaguuuugauu

SEQ ID NO: 117309 - RNA, 19 nt, Artificial Sequence
  Description of Artificial Sequence: Synthetic oligonucleotide
uugauuaccuggaaggaaa

SEQ ID NO: 117310 - RNA, 19 nt, Artificial Sequence
  Description of Artificial Sequence: Synthetic oligonucleotide
uguaugcauaccaauggcu

SEQ ID NO: 117311 - RNA, 19 nt, Artificial Sequence
  Description of Artificial Sequence: Synthetic oligonucleotide
auguaugggacuuuaagaa

SEQ ID NO: 117312 - RNA, 19 nt, Artificial Sequence
  Description of Artificial Sequence: Synthetic oligonucleotide
acaaaauuagcugccacag

SEQ ID NO: 117313 - RNA, 19 nt, Artificial Sequence
  Description of Artificial Sequence: Synthetic oligonucleotide
uucacugcaacucaugguu

SEQ ID NO: 117314 - RNA, 19 nt, Artificial Sequence
  Description of Artificial Sequence: Synthetic oligonucleotide
aagcauauguaugcauacc

SEQ ID NO: 117315 - RNA, 19 nt, Artificial Sequence
  Description of Artificial Sequence: Synthetic oligonucleotide
aauauaucuacaaccucug

SEQ ID NO: 117316 - RNA, 19 nt, Artificial Sequence
  Description of Artificial Sequence: Synthetic oligonucleotide
auaacccucaaauucuuca

SEQ ID NO: 117317 - RNA, 19 nt, Artificial Sequence
  Description of Artificial Sequence: Synthetic oligonucleotide
uucguauccaucauucccu

SEQ ID NO: 117318 - RNA, 19 nt, Artificial Sequence
  Description of Artificial Sequence: Synthetic oligonucleotide
ucucgcacgguucuuaucu

SEQ ID NO: 117319 - RNA, 19 nt, Artificial Sequence
  Description of Artificial Sequence: Synthetic oligonucleotide
uguuauggggucuuuauuu

SEQ ID NO: 117320 - RNA, 19 nt, Artificial Sequence
  Description of Artificial Sequence: Synthetic oligonucleotide
acgagucuaauguggacac

SEQ ID NO: 117321 - RNA, 19 nt, Artificial Sequence
  Description of Artificial Sequence: Synthetic oligonucleotide
ugaaaaccccaucuaauuc

SEQ ID NO: 117322 - RNA, 19 nt, Artificial Sequence
  Description of Artificial Sequence: Synthetic oligonucleotide
acaauguuaagccuagaau

SEQ ID NO: 117323 - RNA, 19 nt, Artificial Sequence
  Description of Artificial Sequence: Synthetic oligonucleotide
uuagguuuaucacuacaaa

SEQ ID NO: 117324 - RNA, 19 nt, Artificial Sequence
  Description of Artificial Sequence: Synthetic oligonucleotide
gauaagcaugccuucgcag

SEQ ID NO: 117325 - RNA, 19 nt, Artificial Sequence
  Description of Artificial Sequence: Synthetic oligonucleotide
cuuuggaccagagaacugg

SEQ ID NO: 117326 - RNA, 19 nt, Artificial Sequence
  Description of Artificial Sequence: Synthetic oligonucleotide
acaaccucuguagaacucc

SEQ ID NO: 117327 - RNA, 19 nt, Artificial Sequence
  Description of Artificial Sequence: Synthetic oligonucleotide
aagguucgugcuuuucccg

SEQ ID NO: 117328 - RNA, 19 nt, Artificial Sequence
  Description of Artificial Sequence: Synthetic oligonucleotide
accucuagaaucuuccaug

SEQ ID NO: 117329 - RNA, 19 nt, Artificial Sequence
  Description of Artificial Sequence: Synthetic oligonucleotide
uuauagaugugcucauucu

SEQ ID NO: 117330 - RNA, 19 nt, Artificial Sequence
  Description of Artificial Sequence: Synthetic oligonucleotide
uuauugugcaauuccaaua

SEQ ID NO: 117331 - RNA, 19 nt, Artificial Sequence
  Description of Artificial Sequence: Synthetic oligonucleotide
aaauugcucuccaaaagcu

SEQ ID NO: 117332 - RNA, 19 nt, Artificial Sequence
  Description of Artificial Sequence: Synthetic oligonucleotide
agagucuggcaauccauac

SEQ ID NO: 117333 - RNA, 19 nt, Artificial Sequence
  Description of Artificial Sequence: Synthetic oligonucleotide
uccagacuuagguuuauca

SEQ ID NO: 117334 - RNA, 19 nt, Artificial Sequence
  Description of Artificial Sequence: Synthetic oligonucleotide
ucauaugaaugcuuaaauu

SEQ ID NO: 117335 - RNA, 19 nt, Artificial Sequence
  Description of Artificial Sequence: Synthetic oligonucleotide
ucuuacaggugacauggac

SEQ ID NO: 117336 - RNA, 19 nt, Artificial Sequence
  Description of Artificial Sequence: Synthetic oligonucleotide
uaacucauaguaucaggca

SEQ ID NO: 117337 - RNA, 19 nt, Artificial Sequence
  Description of Artificial Sequence: Synthetic oligonucleotide
uugcauaaucuuuggacca

SEQ ID NO: 117338 - RNA, 19 nt, Artificial Sequence
  Description of Artificial Sequence: Synthetic oligonucleotide
caucauacggcucacuuuc

SEQ ID NO: 117339 - RNA, 19 nt, Artificial Sequence
  Description of Artificial Sequence: Synthetic oligonucleotide
uuacaaaauuagcugccac

SEQ ID NO: 117340 - RNA, 19 nt, Artificial Sequence
  Description of Artificial Sequence: Synthetic oligonucleotide
uaugggacuuuaagaaagc

SEQ ID NO: 117341 - RNA, 19 nt, Artificial Sequence
  Description of Artificial Sequence: Synthetic oligonucleotide
uuggguacguguuaccuga

SEQ ID NO: 117342 - RNA, 19 nt, Artificial Sequence
  Description of Artificial Sequence: Synthetic oligonucleotide
gacacugggacacagccca

SEQ ID NO: 117343 - RNA, 19 nt, Artificial Sequence
  Description of Artificial Sequence: Synthetic oligonucleotide
uuaucacucgcugaggaga

SEQ ID NO: 117344 - RNA, 19 nt, Artificial Sequence
  Description of Artificial Sequence: Synthetic oligonucleotide
ucuacaaccucuguagaac

SEQ ID NO: 117345 - RNA, 19 nt, Artificial Sequence
  Description of Artificial Sequence: Synthetic oligonucleotide
ucaagaaguucucuuccac

SEQ ID NO: 117346 - RNA, 19 nt, Artificial Sequence
  Description of Artificial Sequence: Synthetic oligonucleotide
auauccuuuggguacgugu

SEQ ID NO: 117347 - RNA, 19 nt, Artificial Sequence
  Description of Artificial Sequence: Synthetic oligonucleotide
acagguuauagaugugcuc

SEQ ID NO: 117348 - RNA, 19 nt, Artificial Sequence
  Description of Artificial Sequence: Synthetic oligonucleotide
aacuugugaacuguuaaaa

SEQ ID NO: 117349 - RNA, 19 nt, Artificial Sequence
  Description of Artificial Sequence: Synthetic oligonucleotide
uuuaccuucucuguugagu

SEQ ID NO: 117350 - RNA, 19 nt, Artificial Sequence
  Description of Artificial Sequence: Synthetic oligonucleotide
uuaccuggaaggaaauaac

SEQ ID NO: 117351 - RNA, 19 nt, Artificial Sequence
  Description of Artificial Sequence: Synthetic oligonucleotide
ugaagucgcaccaaggcuu

SEQ ID NO: 117352 - RNA, 19 nt, Artificial Sequence
  Description of Artificial Sequence: Synthetic oligonucleotide
aaaagcauauguaugcaua

SEQ ID NO: 117353 - RNA, 19 nt, Artificial Sequence
  Description of Artificial Sequence: Synthetic oligonucleotide
aaaauaagcugcacccgag

SEQ ID NO: 117354 - RNA, 19 nt, Artificial Sequence
  Description of Artificial Sequence: Synthetic oligonucleotide
gagauuccguaacagaauc

SEQ ID NO: 117355 - RNA, 19 nt, Artificial Sequence
  Description of Artificial Sequence: Synthetic oligonucleotide
auaauaacucucccagcug

SEQ ID NO: 117356 - RNA, 19 nt, Artificial Sequence
  Description of Artificial Sequence: Synthetic oligonucleotide
aguuaucacucgcugagga

SEQ ID NO: 117357 - RNA, 19 nt, Artificial Sequence
  Description of Artificial Sequence: Synthetic oligonucleotide
uggacgcagaucuuacagg

SEQ ID NO: 117358 - RNA, 19 nt, Artificial Sequence
  Description of Artificial Sequence: Synthetic oligonucleotide
uaccuggaaggaaauaacu

SEQ ID NO: 117359 - RNA, 19 nt, Artificial Sequence
  Description of Artificial Sequence: Synthetic oligonucleotide
auauguauccauauccuca

SEQ ID NO: 117360 - RNA, 19 nt, Artificial Sequence
  Description of Artificial Sequence: Synthetic oligonucleotide
uggcaauccauacuuggcu

SEQ ID NO: 117361 - RNA, 19 nt, Artificial Sequence
  Description of Artificial Sequence: Synthetic oligonucleotide
auagguaguucauaugaau

SEQ ID NO: 117362 - RNA, 19 nt, Artificial Sequence
  Description of Artificial Sequence: Synthetic oligonucleotide
uuugcgcgugccaacagca

SEQ ID NO: 117363 - RNA, 19 nt, Artificial Sequence
  Description of Artificial Sequence: Synthetic oligonucleotide
ucagggguagcaaagccuc

SEQ ID NO: 117364 - RNA, 19 nt, Artificial Sequence
  Description of Artificial Sequence: Synthetic oligonucleotide
aacucagcgaaaucauuau

SEQ ID NO: 117365 - RNA, 19 nt, Artificial Sequence
  Description of Artificial Sequence: Synthetic oligonucleotide
uguaugggacuuuaagaaa

SEQ ID NO: 117366 - RNA, 19 nt, Artificial Sequence
  Description of Artificial Sequence: Synthetic oligonucleotide
auuaccuggaaggaaauaa

SEQ ID NO: 117367 - RNA, 19 nt, Artificial Sequence
  Description of Artificial Sequence: Synthetic oligonucleotide
ucaaaaucgccuucuuggu

SEQ ID NO: 117368 - RNA, 19 nt, Artificial Sequence
  Description of Artificial Sequence: Synthetic oligonucleotide
ugaugauccacguuauaau

SEQ ID NO: 117369 - RNA, 19 nt, Artificial Sequence
  Description of Artificial Sequence: Synthetic oligonucleotide
ugccucuuaaggaaccuca

SEQ ID NO: 117370 - RNA, 19 nt, Artificial Sequence
  Description of Artificial Sequence: Synthetic oligonucleotide
auuguuauggggucuuuau

SEQ ID NO: 117371 - RNA, 19 nt, Artificial Sequence
  Description of Artificial Sequence: Synthetic oligonucleotide
uucaugauauaggcgagca

SEQ ID NO: 117372 - RNA, 19 nt, Artificial Sequence
  Description of Artificial Sequence: Synthetic oligonucleotide
gaacuccaaaccaagagga

SEQ ID NO: 117373 - RNA, 19 nt, Artificial Sequence
  Description of Artificial Sequence: Synthetic oligonucleotide
auuaugucauagguaguuc

SEQ ID NO: 117374 - RNA, 19 nt, Artificial Sequence
  Description of Artificial Sequence: Synthetic oligonucleotide
ugaacuuaacaguauccua

SEQ ID NO: 117375 - RNA, 19 nt, Artificial Sequence
  Description of Artificial Sequence: Synthetic oligonucleotide
caugauauaggcgagcaga

SEQ ID NO: 117376 - RNA, 19 nt, Artificial Sequence
  Description of Artificial Sequence: Synthetic oligonucleotide
acccacauacgaaauauuc

SEQ ID NO: 117377 - RNA, 19 nt, Artificial Sequence
  Description of Artificial Sequence: Synthetic oligonucleotide
cuucgcagcacacucggcc

SEQ ID NO: 117378 - RNA, 19 nt, Artificial Sequence
  Description of Artificial Sequence: Synthetic oligonucleotide
acgaaauauucacuguacu

SEQ ID NO: 117379 - RNA, 19 nt, Artificial Sequence
  Description of Artificial Sequence: Synthetic oligonucleotide
ucauacggcucacuuucag

SEQ ID NO: 117380 - RNA, 19 nt, Artificial Sequence
  Description of Artificial Sequence: Synthetic oligonucleotide
uacguguuaccugagccag

SEQ ID NO: 117381 - RNA, 19 nt, Artificial Sequence
  Description of Artificial Sequence: Synthetic oligonucleotide
acuuagguuuaucacuaca

SEQ ID NO: 117382 - RNA, 19 nt, Artificial Sequence
  Description of Artificial Sequence: Synthetic oligonucleotide
guggacgcagaucuuacag

SEQ ID NO: 117383 - RNA, 19 nt, Artificial Sequence
  Description of Artificial Sequence: Synthetic oligonucleotide
uaaagcacugaugauccac

SEQ ID NO: 117384 - RNA, 19 nt, Artificial Sequence
  Description of Artificial Sequence: Synthetic oligonucleotide
guaguucaugauauaggcg

SEQ ID NO: 117385 - RNA, 19 nt, Artificial Sequence
  Description of Artificial Sequence: Synthetic oligonucleotide
ucaugauauaggcgagcag

SEQ ID NO: 117386 - RNA, 19 nt, Artificial Sequence
  Description of Artificial Sequence: Synthetic oligonucleotide
acauaccucaugcauuucu

SEQ ID NO: 117387 - RNA, 19 nt, Artificial Sequence
  Description of Artificial Sequence: Synthetic oligonucleotide
ucggccagaacaccacagg

SEQ ID NO: 117388 - RNA, 19 nt, Artificial Sequence
  Description of Artificial Sequence: Synthetic oligonucleotide
cuuuguuagucccaucauc

SEQ ID NO: 117389 - RNA, 19 nt, Artificial Sequence
  Description of Artificial Sequence: Synthetic oligonucleotide
aaaugcuuaugcagauggg

SEQ ID NO: 117390 - RNA, 19 nt, Artificial Sequence
  Description of Artificial Sequence: Synthetic oligonucleotide
uccucgaaaucaucaaacu

SEQ ID NO: 117391 - RNA, 19 nt, Artificial Sequence
  Description of Artificial Sequence: Synthetic oligonucleotide
cauuaacucauaguaucag

SEQ ID NO: 117392 - RNA, 19 nt, Artificial Sequence
  Description of Artificial Sequence: Synthetic oligonucleotide
uaagucucugaaauccauc

SEQ ID NO: 117393 - RNA, 19 nt, Artificial Sequence
  Description of Artificial Sequence: Synthetic oligonucleotide
cuugguuuucauccugccc

SEQ ID NO: 117394 - RNA, 19 nt, Artificial Sequence
  Description of Artificial Sequence: Synthetic oligonucleotide
gguacguguuaccugagcc

SEQ ID NO: 117395 - RNA, 19 nt, Artificial Sequence
  Description of Artificial Sequence: Synthetic oligonucleotide
augccuucgcagcacacuc

SEQ ID NO: 117396 - RNA, 19 nt, Artificial Sequence
  Description of Artificial Sequence: Synthetic oligonucleotide
aggucgcucagucacagca

SEQ ID NO: 117397 - RNA, 19 nt, Artificial Sequence
  Description of Artificial Sequence: Synthetic oligonucleotide
cuguacuauguucuaaguc

SEQ ID NO: 117398 - RNA, 19 nt, Artificial Sequence
  Description of Artificial Sequence: Synthetic oligonucleotide
uuugauuaccuggaaggaa

SEQ ID NO: 117399 - RNA, 19 nt, Artificial Sequence
  Description of Artificial Sequence: Synthetic oligonucleotide
uuaagccuagaaucauaug

SEQ ID NO: 117400 - RNA, 19 nt, Artificial Sequence
  Description of Artificial Sequence: Synthetic oligonucleotide
guauccuaacaccuaaaga

SEQ ID NO: 117401 - RNA, 19 nt, Artificial Sequence
  Description of Artificial Sequence: Synthetic oligonucleotide
acaacucugucccauccca

SEQ ID NO: 117402 - RNA, 19 nt, Artificial Sequence
  Description of Artificial Sequence: Synthetic oligonucleotide
aacuaagcacauaaguuuu

SEQ ID NO: 117403 - RNA, 19 nt, Artificial Sequence
  Description of Artificial Sequence: Synthetic oligonucleotide
ucuucguauccaucauucc

SEQ ID NO: 117404 - RNA, 19 nt, Artificial Sequence
  Description of Artificial Sequence: Synthetic oligonucleotide
ucagcgaaaucauuaucau

SEQ ID NO: 117405 - RNA, 19 nt, Artificial Sequence
  Description of Artificial Sequence: Synthetic oligonucleotide
uccguaacagaaucuucca

SEQ ID NO: 117406 - RNA, 19 nt, Artificial Sequence
  Description of Artificial Sequence: Synthetic oligonucleotide
agaaaacuaagcacauaag

SEQ ID NO: 117407 - RNA, 19 nt, Artificial Sequence
  Description of Artificial Sequence: Synthetic oligonucleotide
guuaucacucgcugaggag

SEQ ID NO: 117408 - RNA, 19 nt, Artificial Sequence
  Description of Artificial Sequence: Synthetic oligonucleotide
ggcacauuaaauguaaaca

SEQ ID NO: 117409 - RNA, 19 nt, Artificial Sequence
  Description of Artificial Sequence: Synthetic oligonucleotide
ugggacuuuaagaaagcuu

SEQ ID NO: 117410 - RNA, 19 nt, Artificial Sequence
  Description of Artificial Sequence: Synthetic oligonucleotide
ccacauacgaaauauucac

SEQ ID NO: 117411 - RNA, 19 nt, Artificial Sequence
  Description of Artificial Sequence: Synthetic oligonucleotide
ugcagagaucuaaagccaa

SEQ ID NO: 117412 - RNA, 19 nt, Artificial Sequence
  Description of Artificial Sequence: Synthetic oligonucleotide
uuagcugccacaguccgaa

SEQ ID NO: 117413 - RNA, 19 nt, Artificial Sequence
  Description of Artificial Sequence: Synthetic oligonucleotide
auacggcucacuuucagua

SEQ ID NO: 117414 - RNA, 19 nt, Artificial Sequence
  Description of Artificial Sequence: Synthetic oligonucleotide
auuacaaaauuagcugcca

SEQ ID NO: 117415 - RNA, 19 nt, Artificial Sequence
  Description of Artificial Sequence: Synthetic oligonucleotide
accuagacaaaaccacaug

SEQ ID NO: 117416 - RNA, 19 nt, Artificial Sequence
  Description of Artificial Sequence: Synthetic oligonucleotide
gucaggcagcuuuaaaggc

SEQ ID NO: 117417 - RNA, 19 nt, Artificial Sequence
  Description of Artificial Sequence: Synthetic oligonucleotide
ugcauaaucuuuggaccag

SEQ ID NO: 117418 - RNA, 19 nt, Artificial Sequence
  Description of Artificial Sequence: Synthetic oligonucleotide
aguaucucccuccugggua

SEQ ID NO: 117419 - RNA, 19 nt, Artificial Sequence
  Description of Artificial Sequence: Synthetic oligonucleotide
agucagucuccaauugccc

SEQ ID NO: 117420 - RNA, 19 nt, Artificial Sequence
  Description of Artificial Sequence: Synthetic oligonucleotide
aaauuaccugguacaaaca

SEQ ID NO: 117421 - RNA, 19 nt, Artificial Sequence
  Description of Artificial Sequence: Synthetic oligonucleotide
ccuaucuagaaauuucaug

SEQ ID NO: 117422 - RNA, 19 nt, Artificial Sequence
  Description of Artificial Sequence: Synthetic oligonucleotide
uacuauguucuaagucucu

SEQ ID NO: 117423 - RNA, 19 nt, Artificial Sequence
  Description of Artificial Sequence: Synthetic oligonucleotide
aucaucauacggcucacuu

SEQ ID NO: 117424 - RNA, 19 nt, Artificial Sequence
  Description of Artificial Sequence: Synthetic oligonucleotide
acucauaguaucaggcaag

SEQ ID NO: 117425 - RNA, 19 nt, Artificial Sequence
  Description of Artificial Sequence: Synthetic oligonucleotide
auaaggacucucagucacc

SEQ ID NO: 117426 - RNA, 19 nt, Artificial Sequence
  Description of Artificial Sequence: Synthetic oligonucleotide
cagguuauagaugugcuca

SEQ ID NO: 117427 - RNA, 19 nt, Artificial Sequence
  Description of Artificial Sequence: Synthetic oligonucleotide
uaccucuagaaucuuccau

SEQ ID NO: 117428 - RNA, 19 nt, Artificial Sequence
  Description of Artificial Sequence: Synthetic oligonucleotide
acuauguucuaagucucug

SEQ ID NO: 117429 - RNA, 19 nt, Artificial Sequence
  Description of Artificial Sequence: Synthetic oligonucleotide
cacaacuaccucaaauuca

SEQ ID NO: 117430 - RNA, 19 nt, Artificial Sequence
  Description of Artificial Sequence: Synthetic oligonucleotide
acgguucuuaucugcuuuc

SEQ ID NO: 117431 - RNA, 19 nt, Artificial Sequence
  Description of Artificial Sequence: Synthetic oligonucleotide
cuauguggacuuuaaggga

SEQ ID NO: 117432 - RNA, 19 nt, Artificial Sequence
  Description of Artificial Sequence: Synthetic oligonucleotide
gucauagguaguucauaug

SEQ ID NO: 117433 - RNA, 19 nt, Artificial Sequence
  Description of Artificial Sequence: Synthetic oligonucleotide
uccacucucgcacgguucu

SEQ ID NO: 117434 - RNA, 19 nt, Artificial Sequence
  Description of Artificial Sequence: Synthetic oligonucleotide
auauaucuacaaccucugu

SEQ ID NO: 117435 - RNA, 19 nt, Artificial Sequence
  Description of Artificial Sequence: Synthetic oligonucleotide
auggccuuaaagugauuca

SEQ ID NO: 117436 - RNA, 19 nt, Artificial Sequence
  Description of Artificial Sequence: Synthetic oligonucleotide
uaacagaaucuuccaugac

SEQ ID NO: 117437 - RNA, 19 nt, Artificial Sequence
  Description of Artificial Sequence: Synthetic oligonucleotide
aguccgaauguaugggacu

SEQ ID NO: 117438 - RNA, 19 nt, Artificial Sequence
  Description of Artificial Sequence: Synthetic oligonucleotide
ugauauaggcgagcagacc

SEQ ID NO: 117439 - RNA, 19 nt, Artificial Sequence
  Description of Artificial Sequence: Synthetic oligonucleotide
acaguaguguccucuuagu

SEQ ID NO: 117440 - RNA, 19 nt, Artificial Sequence
  Description of Artificial Sequence: Synthetic oligonucleotide
agucgcaccaaggcuuugc

SEQ ID NO: 117441 - RNA, 19 nt, Artificial Sequence
  Description of Artificial Sequence: Synthetic oligonucleotide
uuaaaggcugacccuccuc

SEQ ID NO: 117442 - RNA, 19 nt, Artificial Sequence
  Description of Artificial Sequence: Synthetic oligonucleotide
cucacccugucauuaacuc

SEQ ID NO: 117443 - RNA, 19 nt, Artificial Sequence
  Description of Artificial Sequence: Synthetic oligonucleotide
cucuuaaggaaccucagcu

SEQ ID NO: 117444 - RNA, 19 nt, Artificial Sequence
  Description of Artificial Sequence: Synthetic oligonucleotide
accuggaaggaaauaacug

SEQ ID NO: 117445 - RNA, 19 nt, Artificial Sequence
  Description of Artificial Sequence: Synthetic oligonucleotide
ugauuaccuggaaggaaau

SEQ ID NO: 117446 - RNA, 19 nt, Artificial Sequence
  Description of Artificial Sequence: Synthetic oligonucleotide
uucgcagcacacucggcca

SEQ ID NO: 117447 - RNA, 19 nt, Artificial Sequence
  Description of Artificial Sequence: Synthetic oligonucleotide
acaguccgaauguauggga

SEQ ID NO: 117448 - RNA, 19 nt, Artificial Sequence
  Description of Artificial Sequence: Synthetic oligonucleotide
cacaguccgaauguauggg

SEQ ID NO: 117449 - RNA, 19 nt, Artificial Sequence
  Description of Artificial Sequence: Synthetic oligonucleotide
ucaucauacggcucacuuu

SEQ ID NO: 117450 - RNA, 19 nt, Artificial Sequence
  Description of Artificial Sequence: Synthetic oligonucleotide
auuaccugguacaaacagu

SEQ ID NO: 117451 - RNA, 19 nt, Artificial Sequence
  Description of Artificial Sequence: Synthetic oligonucleotide
caguccgaauguaugggac

SEQ ID NO: 117452 - RNA, 19 nt, Artificial Sequence
  Description of Artificial Sequence: Synthetic oligonucleotide
guaaaacaauguuaagccu

SEQ ID NO: 117453 - RNA, 19 nt, Artificial Sequence
  Description of Artificial Sequence: Synthetic oligonucleotide
cuuugcgcgugccaacagc

SEQ ID NO: 117454 - RNA, 19 nt, Artificial Sequence
  Description of Artificial Sequence: Synthetic oligonucleotide
uaucacucgcugaggagau

SEQ ID NO: 117455 - RNA, 19 nt, Artificial Sequence
  Description of Artificial Sequence: Synthetic oligonucleotide
agaauuaaaccaggccuga

SEQ ID NO: 117456 - RNA, 19 nt, Artificial Sequence
  Description of Artificial Sequence: Synthetic oligonucleotide
caguaguguccucuuagug

SEQ ID NO: 117457 - RNA, 19 nt, Artificial Sequence
  Description of Artificial Sequence: Synthetic oligonucleotide
uggggugacuuuacauggc

SEQ ID NO: 117458 - RNA, 19 nt, Artificial Sequence
  Description of Artificial Sequence: Synthetic oligonucleotide
gcccuuucaauauaucuac

SEQ ID NO: 117459 - RNA, 19 nt, Artificial Sequence
  Description of Artificial Sequence: Synthetic oligonucleotide
uggccuuaaagugauucaa

SEQ ID NO: 117460 - RNA, 19 nt, Artificial Sequence
  Description of Artificial Sequence: Synthetic oligonucleotide
aguucaugauauaggcgag

SEQ ID NO: 117461 - RNA, 19 nt, Artificial Sequence
  Description of Artificial Sequence: Synthetic oligonucleotide
ccaauugcccaguuuaaac

SEQ ID NO: 117462 - RNA, 19 nt, Artificial Sequence
  Description of Artificial Sequence: Synthetic oligonucleotide
accaaaagcacaacacaga

SEQ ID NO: 117463 - RNA, 19 nt, Artificial Sequence
  Description of Artificial Sequence: Synthetic oligonucleotide
aaacaguaguguccucuua

SEQ ID NO: 117464 - RNA, 19 nt, Artificial Sequence
  Description of Artificial Sequence: Synthetic oligonucleotide
aguacauaccucaugcauu

SEQ ID NO: 117465 - RNA, 19 nt, Artificial Sequence
  Description of Artificial Sequence: Synthetic oligonucleotide
aaggcuuugcgcgugccaa

SEQ ID NO: 117466 - RNA, 19 nt, Artificial Sequence
  Description of Artificial Sequence: Synthetic oligonucleotide
caucaacgauuguuauggg

SEQ ID NO: 117467 - RNA, 19 nt, Artificial Sequence
  Description of Artificial Sequence: Synthetic oligonucleotide
agccaaaugcuuaugcaga

SEQ ID NO: 117468 - RNA, 19 nt, Artificial Sequence
  Description of Artificial Sequence: Synthetic oligonucleotide
guacguguuaccugagcca

SEQ ID NO: 117469 - RNA, 19 nt, Artificial Sequence
  Description of Artificial Sequence: Synthetic oligonucleotide
cagucggcuguucuuauuc

SEQ ID NO: 117470 - RNA, 19 nt, Artificial Sequence
  Description of Artificial Sequence: Synthetic oligonucleotide
uguggacgcagaucuuaca

SEQ ID NO: 117471 - RNA, 19 nt, Artificial Sequence
  Description of Artificial Sequence: Synthetic oligonucleotide
uacuaccuaccucuagaau

SEQ ID NO: 117472 - RNA, 19 nt, Artificial Sequence
  Description of Artificial Sequence: Synthetic oligonucleotide
ucgcacgguucuuaucugc

SEQ ID NO: 117473 - RNA, 19 nt, Artificial Sequence
  Description of Artificial Sequence: Synthetic oligonucleotide
acuacaaaacucacucaga

SEQ ID NO: 117474 - RNA, 19 nt, Artificial Sequence
  Description of Artificial Sequence: Synthetic oligonucleotide
ggacaggucgcucagucac

SEQ ID NO: 117475 - RNA, 19 nt, Artificial Sequence
  Description of Artificial Sequence: Synthetic oligonucleotide
gccgcgaugacacugggac

SEQ ID NO: 117476 - RNA, 19 nt, Artificial Sequence
  Description of Artificial Sequence: Synthetic oligonucleotide
cugaugauccacguuauaa

SEQ ID NO: 117477 - RNA, 19 nt, Artificial Sequence
  Description of Artificial Sequence: Synthetic oligonucleotide
guagcaaagccuccauauc

SEQ ID NO: 117478 - RNA, 19 nt, Artificial Sequence
  Description of Artificial Sequence: Synthetic oligonucleotide
cuuagugucaggcagcuuu

SEQ ID NO: 117479 - RNA, 19 nt, Artificial Sequence
  Description of Artificial Sequence: Synthetic oligonucleotide
aacaguauccuaacaccua

SEQ ID NO: 117480 - RNA, 19 nt, Artificial Sequence
  Description of Artificial Sequence: Synthetic oligonucleotide
gacggagaccucuggggug

SEQ ID NO: 117481 - RNA, 19 nt, Artificial Sequence
  Description of Artificial Sequence: Synthetic oligonucleotide
cacgccgagacugugcagc

SEQ ID NO: 117482 - RNA, 19 nt, Artificial Sequence
  Description of Artificial Sequence: Synthetic oligonucleotide
ucacgagucuaauguggac

SEQ ID NO: 117483 - RNA, 19 nt, Artificial Sequence
  Description of Artificial Sequence: Synthetic oligonucleotide
acgccgagacugugcagcc

SEQ ID NO: 117484 - RNA, 19 nt, Artificial Sequence
  Description of Artificial Sequence: Synthetic oligonucleotide
cauaacccucaaauucuuc

SEQ ID NO: 117485 - RNA, 19 nt, Artificial Sequence
  Description of Artificial Sequence: Synthetic oligonucleotide
cagcgaaaucauuaucauc

SEQ ID NO: 117486 - RNA, 19 nt, Artificial Sequence
  Description of Artificial Sequence: Synthetic oligonucleotide
ucgugcuuuucccguuucc

SEQ ID NO: 117487 - RNA, 19 nt, Artificial Sequence
  Description of Artificial Sequence: Synthetic oligonucleotide
uguucaucagggguagcaa

SEQ ID NO: 117488 - RNA, 19 nt, Artificial Sequence
  Description of Artificial Sequence: Synthetic oligonucleotide
caaagagucuggcaaucca

SEQ ID NO: 117489 - RNA, 19 nt, Artificial Sequence
  Description of Artificial Sequence: Synthetic oligonucleotide
agacuuagguuuaucacua

SEQ ID NO: 117490 - RNA, 19 nt, Artificial Sequence
  Description of Artificial Sequence: Synthetic oligonucleotide
cauagguaguucauaugaa

SEQ ID NO: 117491 - RNA, 19 nt, Artificial Sequence
  Description of Artificial Sequence: Synthetic oligonucleotide
ugcgcgugccaacagcaaa

SEQ ID NO: 117492 - RNA, 19 nt, Artificial Sequence
  Description of Artificial Sequence: Synthetic oligonucleotide
guucaugauauaggcgagc

SEQ ID NO: 117493 - RNA, 19 nt, Artificial Sequence
  Description of Artificial Sequence: Synthetic oligonucleotide
guaagaaagugaaccaucu

SEQ ID NO: 117494 - RNA, 19 nt, Artificial Sequence
  Description of Artificial Sequence: Synthetic oligonucleotide
auauaggcgagcagaccag

SEQ ID NO: 117495 - RNA, 19 nt, Artificial Sequence
  Description of Artificial Sequence: Synthetic oligonucleotide
guacuauguucuaagucuc

SEQ ID NO: 117496 - RNA, 19 nt, Artificial Sequence
  Description of Artificial Sequence: Synthetic oligonucleotide
cauggacggagaccucugg

SEQ ID NO: 117497 - RNA, 19 nt, Artificial Sequence
  Description of Artificial Sequence: Synthetic oligonucleotide
gacuuagguuuaucacuac

SEQ ID NO: 117498 - RNA, 19 nt, Artificial Sequence
  Description of Artificial Sequence: Synthetic oligonucleotide
cuaccuaccucuagaaucu

SEQ ID NO: 117499 - RNA, 19 nt, Artificial Sequence
  Description of Artificial Sequence: Synthetic oligonucleotide
gcaauccauacuuggcucc

SEQ ID NO: 117500 - RNA, 19 nt, Artificial Sequence
  Description of Artificial Sequence: Synthetic oligonucleotide
aaaucgccuucuugguuuu

SEQ ID NO: 117501 - RNA, 19 nt, Artificial Sequence
  Description of Artificial Sequence: Synthetic oligonucleotide
guaaacaguaguguccucu

SEQ ID NO: 117502 - RNA, 19 nt, Artificial Sequence
  Description of Artificial Sequence: Synthetic oligonucleotide
gagacuguugagggccgcg

SEQ ID NO: 117503 - RNA, 19 nt, Artificial Sequence
  Description of Artificial Sequence: Synthetic oligonucleotide
gugaaccaucuucguaucc

SEQ ID NO: 117504 - RNA, 19 nt, Artificial Sequence
  Description of Artificial Sequence: Synthetic oligonucleotide
agucggcuguucuuauucu

SEQ ID NO: 117505 - RNA, 19 nt, Artificial Sequence
  Description of Artificial Sequence: Synthetic oligonucleotide
cuguggacgcagaucuuac

SEQ ID NO: 117506 - RNA, 19 nt, Artificial Sequence
  Description of Artificial Sequence: Synthetic oligonucleotide
caaggagaaacugcuccug

SEQ ID NO: 117507 - RNA, 19 nt, Artificial Sequence
  Description of Artificial Sequence: Synthetic oligonucleotide
auaccucaugcauuucuua

SEQ ID NO: 117508 - RNA, 19 nt, Artificial Sequence
  Description of Artificial Sequence: Synthetic oligonucleotide
gcaacaaccuaucuagaaa

SEQ ID NO: 117509 - RNA, 19 nt, Artificial Sequence
  Description of Artificial Sequence: Synthetic oligonucleotide
aucagggguagcaaagccu

SEQ ID NO: 117510 - RNA, 19 nt, Artificial Sequence
  Description of Artificial Sequence: Synthetic oligonucleotide
cauacgaaauauucacugu

SEQ ID NO: 117511 - RNA, 19 nt, Artificial Sequence
  Description of Artificial Sequence: Synthetic oligonucleotide
aucacucacgggccucauc

SEQ ID NO: 117512 - RNA, 19 nt, Artificial Sequence
  Description of Artificial Sequence: Synthetic oligonucleotide
uuggaccagagaacugguc

SEQ ID NO: 117513 - RNA, 19 nt, Artificial Sequence
  Description of Artificial Sequence: Synthetic oligonucleotide
cacgagucuaauguggaca

SEQ ID NO: 117514 - RNA, 19 nt, Artificial Sequence
  Description of Artificial Sequence: Synthetic oligonucleotide
ugccacaguccgaauguau

SEQ ID NO: 117515 - RNA, 19 nt, Artificial Sequence
  Description of Artificial Sequence: Synthetic oligonucleotide
guacuaccuaccucuagaa

SEQ ID NO: 117516 - RNA, 19 nt, Artificial Sequence
  Description of Artificial Sequence: Synthetic oligonucleotide
agguuauagaugugcucau

SEQ ID NO: 117517 - RNA, 19 nt, Artificial Sequence
  Description of Artificial Sequence: Synthetic oligonucleotide
uauaggcgagcagaccagu

SEQ ID NO: 117518 - RNA, 19 nt, Artificial Sequence
  Description of Artificial Sequence: Synthetic oligonucleotide
caggaucucuagauaauaa

SEQ ID NO: 117519 - RNA, 19 nt, Artificial Sequence
  Description of Artificial Sequence: Synthetic oligonucleotide
cauaccaauggcuacuuuu

SEQ ID NO: 117520 - RNA, 19 nt, Artificial Sequence
  Description of Artificial Sequence: Synthetic oligonucleotide
ggacuauguggacuuuaag

SEQ ID NO: 117521 - RNA, 19 nt, Artificial Sequence
  Description of Artificial Sequence: Synthetic oligonucleotide
aauaacucucccagcuguu

SEQ ID NO: 117522 - RNA, 19 nt, Artificial Sequence
  Description of Artificial Sequence: Synthetic oligonucleotide
uacggcucacuuucaguau

SEQ ID NO: 117523 - RNA, 19 nt, Artificial Sequence
  Description of Artificial Sequence: Synthetic oligonucleotide
uggguacguguuaccugag

SEQ ID NO: 117524 - RNA, 19 nt, Artificial Sequence
  Description of Artificial Sequence: Synthetic oligonucleotide
ggaucucuagauaauaacu

SEQ ID NO: 117525 - RNA, 19 nt, Artificial Sequence
  Description of Artificial Sequence: Synthetic oligonucleotide
guuaccugagccaggcaca

SEQ ID NO: 117526 - RNA, 19 nt, Artificial Sequence
  Description of Artificial Sequence: Synthetic oligonucleotide
auaggcgagcagaccaguc

SEQ ID NO: 117527 - RNA, 19 nt, Artificial Sequence
  Description of Artificial Sequence: Synthetic oligonucleotide
guacauaccucaugcauuu

SEQ ID NO: 117528 - RNA, 19 nt, Artificial Sequence
  Description of Artificial Sequence: Synthetic oligonucleotide
agauuccguaacagaaucu

SEQ ID NO: 117529 - RNA, 19 nt, Artificial Sequence
  Description of Artificial Sequence: Synthetic oligonucleotide
accuaccucuagaaucuuc

SEQ ID NO: 117530 - RNA, 19 nt, Artificial Sequence
  Description of Artificial Sequence: Synthetic oligonucleotide
auacaccugcauaucccag

SEQ ID NO: 117531 - RNA, 19 nt, Artificial Sequence
  Description of Artificial Sequence: Synthetic oligonucleotide
cacucacccugucauuaac

SEQ ID NO: 117532 - RNA, 19 nt, Artificial Sequence
  Description of Artificial Sequence: Synthetic oligonucleotide
gauuguuauggggucuuua

SEQ ID NO: 117533 - RNA, 19 nt, Artificial Sequence
  Description of Artificial Sequence: Synthetic oligonucleotide
ggauaagcaugccuucgca

SEQ ID NO: 117534 - RNA, 19 nt, Artificial Sequence
  Description of Artificial Sequence: Synthetic oligonucleotide
cugaggagauuccguaaca

SEQ ID NO: 117535 - RNA, 19 nt, Artificial Sequence
  Description of Artificial Sequence: Synthetic oligonucleotide
acucacccugucauuaacu

SEQ ID NO: 117536 - RNA, 19 nt, Artificial Sequence
  Description of Artificial Sequence: Synthetic oligonucleotide
cacauacgaaauauucacu

SEQ ID NO: 117537 - RNA, 19 nt, Artificial Sequence
  Description of Artificial Sequence: Synthetic oligonucleotide
aggugaaauugcucuccaa

SEQ ID NO: 117538 - RNA, 19 nt, Artificial Sequence
  Description of Artificial Sequence: Synthetic oligonucleotide
uuaccugagccaggcacau

SEQ ID NO: 117539 - RNA, 19 nt, Artificial Sequence
  Description of Artificial Sequence: Synthetic oligonucleotide
ccucuuagugucaggcagc

SEQ ID NO: 117540 - RNA, 19 nt, Artificial Sequence
  Description of Artificial Sequence: Synthetic oligonucleotide
caggucgcagagacuguug

SEQ ID NO: 117541 - RNA, 19 nt, Artificial Sequence
  Description of Artificial Sequence: Synthetic oligonucleotide
caacucaugguuacugccu

SEQ ID NO: 117542 - RNA, 19 nt, Artificial Sequence
  Description of Artificial Sequence: Synthetic oligonucleotide
cuacaaccucuguagaacu

SEQ ID NO: 117543 - RNA, 19 nt, Artificial Sequence
  Description of Artificial Sequence: Synthetic oligonucleotide
guuauggggucuuuauuuu

SEQ ID NO: 117544 - RNA, 19 nt, Artificial Sequence
  Description of Artificial Sequence: Synthetic oligonucleotide
cucgcacgguucuuaucug

SEQ ID NO: 117545 - RNA, 19 nt, Artificial Sequence
  Description of Artificial Sequence: Synthetic oligonucleotide
accuaucuagaaauuucau

SEQ ID NO: 117546 - RNA, 19 nt, Artificial Sequence
  Description of Artificial Sequence: Synthetic oligonucleotide
acugaugauccacguuaua

SEQ ID NO: 117547 - RNA, 19 nt, Artificial Sequence
  Description of Artificial Sequence: Synthetic oligonucleotide
cacagguuauagaugugcu

SEQ ID NO: 117548 - RNA, 19 nt, Artificial Sequence
  Description of Artificial Sequence: Synthetic oligonucleotide
caccuaaagauuuccuccu

SEQ ID NO: 117549 - RNA, 19 nt, Artificial Sequence
  Description of Artificial Sequence: Synthetic oligonucleotide
gcacuugaucacucacggg

SEQ ID NO: 117550 - RNA, 19 nt, Artificial Sequence
  Description of Artificial Sequence: Synthetic oligonucleotide
guaaagcacugaugaucca

SEQ ID NO: 117551 - RNA, 19 nt, Artificial Sequence
  Description of Artificial Sequence: Synthetic oligonucleotide
ucucaguaggaagcauuua

SEQ ID NO: 117552 - RNA, 19 nt, Artificial Sequence
  Description of Artificial Sequence: Synthetic oligonucleotide
uugccucuuaaggaaccuc

SEQ ID NO: 117553 - RNA, 19 nt, Artificial Sequence
  Description of Artificial Sequence: Synthetic oligonucleotide
gauuaccuggaaggaaaua

SEQ ID NO: 117554 - RNA, 19 nt, Artificial Sequence
  Description of Artificial Sequence: Synthetic oligonucleotide
cugggacacagcccaggac

SEQ ID NO: 117555 - RNA, 19 nt, Artificial Sequence
  Description of Artificial Sequence: Synthetic oligonucleotide
acucucgcacgguucuuau

SEQ ID NO: 117556 - RNA, 19 nt, Artificial Sequence
  Description of Artificial Sequence: Synthetic oligonucleotide
ucacgccgagacugugcag

SEQ ID NO: 117557 - RNA, 19 nt, Artificial Sequence
  Description of Artificial Sequence: Synthetic oligonucleotide
cugaagucgcaccaaggcu

SEQ ID NO: 117558 - RNA, 19 nt, Artificial Sequence
  Description of Artificial Sequence: Synthetic oligonucleotide
gauccacguuauaauuuaa

SEQ ID NO: 117559 - RNA, 19 nt, Artificial Sequence
  Description of Artificial Sequence: Synthetic oligonucleotide
cacgugugucagcuucaag

SEQ ID NO: 117560 - RNA, 19 nt, Artificial Sequence
  Description of Artificial Sequence: Synthetic oligonucleotide
uugcgcgugccaacagcaa

SEQ ID NO: 117561 - RNA, 19 nt, Artificial Sequence
  Description of Artificial Sequence: Synthetic oligonucleotide
cacgggccucaucauccgg

SEQ ID NO: 117562 - RNA, 19 nt, Artificial Sequence
  Description of Artificial Sequence: Synthetic oligonucleotide
cuuuggguacguguuaccu

SEQ ID NO: 117563 - RNA, 19 nt, Artificial Sequence
  Description of Artificial Sequence: Synthetic oligonucleotide
auuagcugccacaguccga

SEQ ID NO: 117564 - RNA, 19 nt, Artificial Sequence
  Description of Artificial Sequence: Synthetic oligonucleotide
ccccacuaaggugaaauug

SEQ ID NO: 117565 - RNA, 19 nt, Artificial Sequence
  Description of Artificial Sequence: Synthetic oligonucleotide
cauacggcucacuuucagu

SEQ ID NO: 117566 - RNA, 19 nt, Artificial Sequence
  Description of Artificial Sequence: Synthetic oligonucleotide
cauauccuuuggguacgug

SEQ ID NO: 117567 - RNA, 19 nt, Artificial Sequence
  Description of Artificial Sequence: Synthetic oligonucleotide
ggguacguguuaccugagc

SEQ ID NO: 117568 - RNA, 19 nt, Artificial Sequence
  Description of Artificial Sequence: Synthetic oligonucleotide
acgauuguuauggggucuu

SEQ ID NO: 117569 - RNA, 19 nt, Artificial Sequence
  Description of Artificial Sequence: Synthetic oligonucleotide
ccaaagagucuggcaaucc

SEQ ID NO: 117570 - RNA, 19 nt, Artificial Sequence
  Description of Artificial Sequence: Synthetic oligonucleotide
cugacaggauggccaaaga

SEQ ID NO: 117571 - RNA, 19 nt, Artificial Sequence
  Description of Artificial Sequence: Synthetic oligonucleotide
gggugaaauaaggacucuc

SEQ ID NO: 117572 - RNA, 19 nt, Artificial Sequence
  Description of Artificial Sequence: Synthetic oligonucleotide
caaaauuagcugccacagu

SEQ ID NO: 117573 - RNA, 19 nt, Artificial Sequence
  Description of Artificial Sequence: Synthetic oligonucleotide
cucucgcacgguucuuauc

SEQ ID NO: 117574 - RNA, 19 nt, Artificial Sequence
  Description of Artificial Sequence: Synthetic oligonucleotide
uacauaccucaugcauuuc

SEQ ID NO: 117575 - RNA, 19 nt, Artificial Sequence
  Description of Artificial Sequence: Synthetic oligonucleotide
cauaccucaugcauuucuu

SEQ ID NO: 117576 - RNA, 19 nt, Artificial Sequence
  Description of Artificial Sequence: Synthetic oligonucleotide
gcacccgaggcugcaaccg

SEQ ID NO: 117577 - RNA, 19 nt, Artificial Sequence
  Description of Artificial Sequence: Synthetic oligonucleotide
guaucucccuccuggguau

SEQ ID NO: 117578 - RNA, 19 nt, Artificial Sequence
  Description of Artificial Sequence: Synthetic oligonucleotide
gacaggucgcucagucaca

SEQ ID NO: 117579 - RNA, 19 nt, Artificial Sequence
  Description of Artificial Sequence: Synthetic oligonucleotide
gcacauaaguuuugauucu

SEQ ID NO: 117580 - RNA, 19 nt, Artificial Sequence
  Description of Artificial Sequence: Synthetic oligonucleotide
gccucuuaaggaaccucag

SEQ ID NO: 117581 - RNA, 19 nt, Artificial Sequence
  Description of Artificial Sequence: Synthetic oligonucleotide
ccuagaaucauauggccuu

SEQ ID NO: 117582 - RNA, 19 nt, Artificial Sequence
  Description of Artificial Sequence: Synthetic oligonucleotide
guaguucauaugaaugcuu

SEQ ID NO: 117583 - RNA, 19 nt, Artificial Sequence
  Description of Artificial Sequence: Synthetic oligonucleotide
gcaaggagaaacugcuccu

SEQ ID NO: 117584 - RNA, 19 nt, Artificial Sequence
  Description of Artificial Sequence: Synthetic oligonucleotide
cucgcugaggagauuccgu

SEQ ID NO: 117585 - RNA, 19 nt, Artificial Sequence
  Description of Artificial Sequence: Synthetic oligonucleotide
uccgaauguaugggacuuu

SEQ ID NO: 117586 - RNA, 19 nt, Artificial Sequence
  Description of Artificial Sequence: Synthetic oligonucleotide
gcuuugcgcgugccaacag

SEQ ID NO: 117587 - RNA, 19 nt, Artificial Sequence
  Description of Artificial Sequence: Synthetic oligonucleotide
agucuccaauugcccaguu

SEQ ID NO: 117588 - RNA, 19 nt, Artificial Sequence
  Description of Artificial Sequence: Synthetic oligonucleotide
cuccagacuuagguuuauc

SEQ ID NO: 117589 - RNA, 19 nt, Artificial Sequence
  Description of Artificial Sequence: Synthetic oligonucleotide
caaaaucgccuucuugguu

SEQ ID NO: 117590 - RNA, 19 nt, Artificial Sequence
  Description of Artificial Sequence: Synthetic oligonucleotide
caccaaggcuuugcgcgug

SEQ ID NO: 117591 - RNA, 19 nt, Artificial Sequence
  Description of Artificial Sequence: Synthetic oligonucleotide
ucuuagugucaggcagcuu

SEQ ID NO: 117592 - RNA, 19 nt, Artificial Sequence
  Description of Artificial Sequence: Synthetic oligonucleotide
ccagccugccugugucugg

SEQ ID NO: 117593 - RNA, 19 nt, Artificial Sequence
  Description of Artificial Sequence: Synthetic oligonucleotide
gcgcgugccaacagcaaac

SEQ ID NO: 117594 - RNA, 19 nt, Artificial Sequence
  Description of Artificial Sequence: Synthetic oligonucleotide
ggagauuccguaacagaau

SEQ ID NO: 117595 - RNA, 19 nt, Artificial Sequence
  Description of Artificial Sequence: Synthetic oligonucleotide
gccuagaaucauauggccu

SEQ ID NO: 117596 - RNA, 19 nt, Artificial Sequence
  Description of Artificial Sequence: Synthetic oligonucleotide
uaucucccuccuggguauc

SEQ ID NO: 117597 - RNA, 19 nt, Artificial Sequence
  Description of Artificial Sequence: Synthetic oligonucleotide
gccaaaugcuuaugcagau

SEQ ID NO: 117598 - RNA, 19 nt, Artificial Sequence
  Description of Artificial Sequence: Synthetic oligonucleotide
caggacuauguggacuuua

SEQ ID NO: 117599 - RNA, 19 nt, Artificial Sequence
  Description of Artificial Sequence: Synthetic oligonucleotide
gucggcuguucuuauucuu

SEQ ID NO: 117600 - RNA, 19 nt, Artificial Sequence
  Description of Artificial Sequence: Synthetic oligonucleotide
gcgugccaacagcaaacac

SEQ ID NO: 117601 - RNA, 19 nt, Artificial Sequence
  Description of Artificial Sequence: Synthetic oligonucleotide
cuugccucuuaaggaaccu

SEQ ID NO: 117602 - RNA, 19 nt, Artificial Sequence
  Description of Artificial Sequence: Synthetic oligonucleotide
guccgaauguaugggacuu

SEQ ID NO: 117603 - RNA, 19 nt, Artificial Sequence
  Description of Artificial Sequence: Synthetic oligonucleotide
ccacuaccuccacccagcc

SEQ ID NO: 117604 - RNA, 19 nt, Artificial Sequence
  Description of Artificial Sequence: Synthetic oligonucleotide
uaccuaccucuagaaucuu

SEQ ID NO: 117605 - RNA, 19 nt, Artificial Sequence
  Description of Artificial Sequence: Synthetic oligonucleotide
gcucucuaugagaauuaaa

SEQ ID NO: 117606 - RNA, 19 nt, Artificial Sequence
  Description of Artificial Sequence: Synthetic oligonucleotide
auccgggccaggacauuaa

SEQ ID NO: 117607 - RNA, 19 nt, Artificial Sequence
  Description of Artificial Sequence: Synthetic oligonucleotide
gcgaaaucauuaucaucau

SEQ ID NO: 117608 - RNA, 19 nt, Artificial Sequence
  Description of Artificial Sequence: Synthetic oligonucleotide
cacucucgcacgguucuua

SEQ ID NO: 117609 - RNA, 19 nt, Artificial Sequence
  Description of Artificial Sequence: Synthetic oligonucleotide
cuccguaacuucucccauu

SEQ ID NO: 117610 - RNA, 19 nt, Artificial Sequence
  Description of Artificial Sequence: Synthetic oligonucleotide
caccacccacauacgaaau

SEQ ID NO: 117611 - RNA, 19 nt, Artificial Sequence
  Description of Artificial Sequence: Synthetic oligonucleotide
ccaaggcuuugcgcgugcc

SEQ ID NO: 117612 - RNA, 19 nt, Artificial Sequence
  Description of Artificial Sequence: Synthetic oligonucleotide
gguuauagaugugcucauu

SEQ ID NO: 117613 - RNA, 19 nt, Artificial Sequence
  Description of Artificial Sequence: Synthetic oligonucleotide
ccguuuccuguggacgcag

SEQ ID NO: 117614 - RNA, 19 nt, Artificial Sequence
  Description of Artificial Sequence: Synthetic oligonucleotide
cucuguugagucggaacuu

SEQ ID NO: 117615 - RNA, 19 nt, Artificial Sequence
  Description of Artificial Sequence: Synthetic oligonucleotide
ccgaauguaugggacuuua

SEQ ID NO: 117616 - RNA, 19 nt, Artificial Sequence
  Description of Artificial Sequence: Synthetic oligonucleotide
ccguaacuucucccauuuc

SEQ ID NO: 117617 - RNA, 19 nt, Artificial Sequence
  Description of Artificial Sequence: Synthetic oligonucleotide
cgaauguaugggacuuuaa

SEQ ID NO: 117618 - RNA, 19 nt, Artificial Sequence
  Description of Artificial Sequence: Synthetic oligonucleotide
gguucgugcuuuucccguu

SEQ ID NO: 117619 - RNA, 19 nt, Artificial Sequence
  Description of Artificial Sequence: Synthetic oligonucleotide
ggccgcgaugacacuggga

SEQ ID NO: 117620 - RNA, 19 nt, Artificial Sequence
  Description of Artificial Sequence: Synthetic oligonucleotide
cgcacgguucuuaucugcu

SEQ ID NO: 117621 - RNA, 19 nt, Artificial Sequence
  Description of Artificial Sequence: Synthetic oligonucleotide
cguuuccuguggacgcaga

SEQ ID NO: 117622 - RNA, 19 nt, Artificial Sequence
  Description of Artificial Sequence: Synthetic oligonucleotide
gcauaccaauggcuacuuu

SEQ ID NO: 117623 - RNA, 19 nt, Artificial Sequence
  Description of Artificial Sequence: Synthetic oligonucleotide
cccguuuccuguggacgca

SEQ ID NO: 117624 - RNA, 19 nt, Artificial Sequence
  Description of Artificial Sequence: Synthetic oligonucleotide
cgcgugccaacagcaaaca

SEQ ID NO: 117625 - RNA, 19 nt, Artificial Sequence
  Description of Artificial Sequence: Synthetic oligonucleotide
cgagucuaauguggacaca

SEQ ID NO: 117626 - RNA, 19 nt, Artificial Sequence
  Description of Artificial Sequence: Synthetic oligonucleotide
gcuccagacuuagguuuau

SEQ ID NO: 117627 - RNA, 19 nt, Artificial Sequence
  Description of Artificial Sequence: Synthetic oligonucleotide
cgauuguuauggggucuuu

SEQ ID NO: 117628 - RNA, 19 nt, Artificial Sequence
  Description of Artificial Sequence: Synthetic oligonucleotide
ccacucucgcacgguucuu

SEQ ID NO: 117629 - RNA, 19 nt, Artificial Sequence
  Description of Artificial Sequence: Synthetic oligonucleotide
cgccgagacugugcagccu

SEQ ID NO: 117630 - RNA, 19 nt, Artificial Sequence
  Description of Artificial Sequence: Synthetic oligonucleotide
uauuuaagggcuuagugcg

SEQ ID NO: 117631 - RNA, 19 nt, Artificial Sequence
  Description of Artificial Sequence: Synthetic oligonucleotide
guuaacuaaacauacagag

SEQ ID NO: 117632 - RNA, 19 nt, Artificial Sequence
  Description of Artificial Sequence: Synthetic oligonucleotide
ucuucuagcauuuaaaaca

SEQ ID NO: 117633 - RNA, 19 nt, Artificial Sequence
  Description of Artificial Sequence: Synthetic oligonucleotide
aauaguugcuccuacuguc

SEQ ID NO: 117634 - RNA, 19 nt, Artificial Sequence
  Description of Artificial Sequence: Synthetic oligonucleotide
ugaagugccacuuuggcag

SEQ ID NO: 117635 - RNA, 19 nt, Artificial Sequence
  Description of Artificial Sequence: Synthetic oligonucleotide
uccaguaccaaucagugca

SEQ ID NO: 117636 - RNA, 19 nt, Artificial Sequence
  Description of Artificial Sequence: Synthetic oligonucleotide
uaucgguuaaacauuagug

SEQ ID NO: 117637 - RNA, 19 nt, Artificial Sequence
  Description of Artificial Sequence: Synthetic oligonucleotide
guacuuaugacgaugauag

SEQ ID NO: 117638 - RNA, 19 nt, Artificial Sequence
  Description of Artificial Sequence: Synthetic oligonucleotide
uagcuuaacaaucugggcc

SEQ ID NO: 117639 - RNA, 19 nt, Artificial Sequence
  Description of Artificial Sequence: Synthetic oligonucleotide
cuauuuaagggcuuagugc

SEQ ID NO: 117640 - RNA, 19 nt, Artificial Sequence
  Description of Artificial Sequence: Synthetic oligonucleotide
caaagcgucaaauacgccg

SEQ ID NO: 117641 - RNA, 19 nt, Artificial Sequence
  Description of Artificial Sequence: Synthetic oligonucleotide
aauacgccgagaaacgucc

SEQ ID NO: 117642 - RNA, 19 nt, Artificial Sequence
  Description of Artificial Sequence: Synthetic oligonucleotide
auuaggacgagauaagugu

SEQ ID NO: 117643 - RNA, 19 nt, Artificial Sequence
  Description of Artificial Sequence: Synthetic oligonucleotide
aaagauugcauucgccaag

SEQ ID NO: 117644 - RNA, 19 nt, Artificial Sequence
  Description of Artificial Sequence: Synthetic oligonucleotide
uacgcaguaucauacaaag

SEQ ID NO: 117645 - RNA, 19 nt, Artificial Sequence
  Description of Artificial Sequence: Synthetic oligonucleotide
ugauaaaucuguccguugc

SEQ ID NO: 117646 - RNA, 19 nt, Artificial Sequence
  Description of Artificial Sequence: Synthetic oligonucleotide
aauucaguacuuaugacga

SEQ ID NO: 117647 - RNA, 19 nt, Artificial Sequence
  Description of Artificial Sequence: Synthetic oligonucleotide
ucugugacccucacuaugg

SEQ ID NO: 117648 - RNA, 19 nt, Artificial Sequence
  Description of Artificial Sequence: Synthetic oligonucleotide
auuagcuuaacaaucuggg

SEQ ID NO: 117649 - RNA, 19 nt, Artificial Sequence
  Description of Artificial Sequence: Synthetic oligonucleotide
cacaccacuauuuaagggc

SEQ ID NO: 117650 - RNA, 19 nt, Artificial Sequence
  Description of Artificial Sequence: Synthetic oligonucleotide
uuacauuaggacgagauaa

SEQ ID NO: 117651 - RNA, 19 nt, Artificial Sequence
  Description of Artificial Sequence: Synthetic oligonucleotide
gauuagcuuaacaaucugg

SEQ ID NO: 117652 - RNA, 19 nt, Artificial Sequence
  Description of Artificial Sequence: Synthetic oligonucleotide
agaaacguccaguaaauga

SEQ ID NO: 117653 - RNA, 19 nt, Artificial Sequence
  Description of Artificial Sequence: Synthetic oligonucleotide
uugauuagcuuaacaaucu

SEQ ID NO: 117654 - RNA, 19 nt, Artificial Sequence
  Description of Artificial Sequence: Synthetic oligonucleotide
ugggcuaucgguuaaacau

SEQ ID NO: 117655 - RNA, 19 nt, Artificial Sequence
  Description of Artificial Sequence: Synthetic oligonucleotide
gacaccuaugcccacgugg

SEQ ID NO: 117656 - RNA, 19 nt, Artificial Sequence
  Description of Artificial Sequence: Synthetic oligonucleotide
aucgguuaaacauuagugu

SEQ ID NO: 117657 - RNA, 19 nt, Artificial Sequence
  Description of Artificial Sequence: Synthetic oligonucleotide
acgagauaaguguggaugg

SEQ ID NO: 117658 - RNA, 19 nt, Artificial Sequence
  Description of Artificial Sequence: Synthetic oligonucleotide
uccaucgaugaucaaacca

SEQ ID NO: 117659 - RNA, 19 nt, Artificial Sequence
  Description of Artificial Sequence: Synthetic oligonucleotide
gacgagauaaguguggaug

SEQ ID NO: 117660 - RNA, 19 nt, Artificial Sequence
  Description of Artificial Sequence: Synthetic oligonucleotide
uuugcaccgucaccaaucg

SEQ ID NO: 117661 - RNA, 19 nt, Artificial Sequence
  Description of Artificial Sequence: Synthetic oligonucleotide
ugcaccgucaccaaucgcu

SEQ ID NO: 117662 - RNA, 19 nt, Artificial Sequence
  Description of Artificial Sequence: Synthetic oligonucleotide
gucaaauacgccgagaaac

SEQ ID NO: 117663 - RNA, 19 nt, Artificial Sequence
  Description of Artificial Sequence: Synthetic oligonucleotide
acuuaugacgaugauagcu

SEQ ID NO: 117664 - RNA, 19 nt, Artificial Sequence
  Description of Artificial Sequence: Synthetic oligonucleotide
uagguaucauguuuguacc

SEQ ID NO: 117665 - RNA, 19 nt, Artificial Sequence
  Description of Artificial Sequence: Synthetic oligonucleotide
aauacauaguacauccgcu

SEQ ID NO: 117666 - RNA, 19 nt, Artificial Sequence
  Description of Artificial Sequence: Synthetic oligonucleotide
uuaggacgagauaagugug

SEQ ID NO: 117667 - RNA, 19 nt, Artificial Sequence
  Description of Artificial Sequence: Synthetic oligonucleotide
uaggacgagauaagugugg

SEQ ID NO: 117668 - RNA, 19 nt, Artificial Sequence
  Description of Artificial Sequence: Synthetic oligonucleotide
uuagcuuaacaaucugggc

SEQ ID NO: 117669 - RNA, 19 nt, Artificial Sequence
  Description of Artificial Sequence: Synthetic oligonucleotide
uuuaagugguaauguagac

SEQ ID NO: 117670 - RNA, 19 nt, Artificial Sequence
  Description of Artificial Sequence: Synthetic oligonucleotide
agugaaagcuuuaacagca

SEQ ID NO: 117671 - RNA, 19 nt, Artificial Sequence
  Description of Artificial Sequence: Synthetic oligonucleotide
uucgaacaugaaauaagca

SEQ ID NO: 117672 - RNA, 19 nt, Artificial Sequence
  Description of Artificial Sequence: Synthetic oligonucleotide
uagggugauaggaugcucc

SEQ ID NO: 117673 - RNA, 19 nt, Artificial Sequence
  Description of Artificial Sequence: Synthetic oligonucleotide
uaggaucauacugacauca

SEQ ID NO: 117674 - RNA, 19 nt, Artificial Sequence
  Description of Artificial Sequence: Synthetic oligonucleotide
aaauacgccgagaaacguc

SEQ ID NO: 117675 - RNA, 19 nt, Artificial Sequence
  Description of Artificial Sequence: Synthetic oligonucleotide
agguuauaggcucucaagu

SEQ ID NO: 117676 - RNA, 19 nt, Artificial Sequence
  Description of Artificial Sequence: Synthetic oligonucleotide
cauuaggacgagauaagug

SEQ ID NO: 117677 - RNA, 19 nt, Artificial Sequence
  Description of Artificial Sequence: Synthetic oligonucleotide
uugcgcucgacucuggacc

SEQ ID NO: 117678 - RNA, 19 nt, Artificial Sequence
  Description of Artificial Sequence: Synthetic oligonucleotide
uacaucuuagauucucucu

SEQ ID NO: 117679 - RNA, 19 nt, Artificial Sequence
  Description of Artificial Sequence: Synthetic oligonucleotide
ugauuagcuuaacaaucug

SEQ ID NO: 117680 - RNA, 19 nt, Artificial Sequence
  Description of Artificial Sequence: Synthetic oligonucleotide
gaacuuggguauugcauag

SEQ ID NO: 117681 - RNA, 19 nt, Artificial Sequence
  Description of Artificial Sequence: Synthetic oligonucleotide
cagauacgcaguaucauac

SEQ ID NO: 117682 - RNA, 19 nt, Artificial Sequence
  Description of Artificial Sequence: Synthetic oligonucleotide
uguagagggucagauacgc

SEQ ID NO: 117683 - RNA, 19 nt, Artificial Sequence
  Description of Artificial Sequence: Synthetic oligonucleotide
uuacaauuacacucauucu

SEQ ID NO: 117684 - RNA, 19 nt, Artificial Sequence
  Description of Artificial Sequence: Synthetic oligonucleotide
cacaagaccuucuugagga

SEQ ID NO: 117685 - RNA, 19 nt, Artificial Sequence
  Description of Artificial Sequence: Synthetic oligonucleotide
aaucgcuagggugauagga

SEQ ID NO: 117686 - RNA, 19 nt, Artificial Sequence
  Description of Artificial Sequence: Synthetic oligonucleotide
uccgcugauaaaucugucc

SEQ ID NO: 117687 - RNA, 19 nt, Artificial Sequence
  Description of Artificial Sequence: Synthetic oligonucleotide
guaaaugaacacccgccag

SEQ ID NO: 117688 - RNA, 19 nt, Artificial Sequence
  Description of Artificial Sequence: Synthetic oligonucleotide
ucgguuaaacauuaguguu

SEQ ID NO: 117689 - RNA, 19 nt, Artificial Sequence
  Description of Artificial Sequence: Synthetic oligonucleotide
gguuaaacauuaguguugg

SEQ ID NO: 117690 - RNA, 19 nt, Artificial Sequence
  Description of Artificial Sequence: Synthetic oligonucleotide
ugguguuuauguucacccg

SEQ ID NO: 117691 - RNA, 19 nt, Artificial Sequence
  Description of Artificial Sequence: Synthetic oligonucleotide
aagggcuuagugcggacug

SEQ ID NO: 117692 - RNA, 19 nt, Artificial Sequence
  Description of Artificial Sequence: Synthetic oligonucleotide
guaugugaaaccaagccuc

SEQ ID NO: 117693 - RNA, 19 nt, Artificial Sequence
  Description of Artificial Sequence: Synthetic oligonucleotide
gucaccaaucgcuagggug

SEQ ID NO: 117694 - RNA, 19 nt, Artificial Sequence
  Description of Artificial Sequence: Synthetic oligonucleotide
uuagcggagcuguacauuc

SEQ ID NO: 117695 - RNA, 19 nt, Artificial Sequence
  Description of Artificial Sequence: Synthetic oligonucleotide
guacaggagaaucgggagg

SEQ ID NO: 117696 - RNA, 19 nt, Artificial Sequence
  Description of Artificial Sequence: Synthetic oligonucleotide
uugaagugccacuuuggca

SEQ ID NO: 117697 - RNA, 19 nt, Artificial Sequence
  Description of Artificial Sequence: Synthetic oligonucleotide
aaagcgucaaauacgccga

SEQ ID NO: 117698 - RNA, 19 nt, Artificial Sequence
  Description of Artificial Sequence: Synthetic oligonucleotide
auugcgcucgacucuggac

SEQ ID NO: 117699 - RNA, 19 nt, Artificial Sequence
  Description of Artificial Sequence: Synthetic oligonucleotide
agcuuggcgacccuccuuc

SEQ ID NO: 117700 - RNA, 19 nt, Artificial Sequence
  Description of Artificial Sequence: Synthetic oligonucleotide
ugucgaaaguccugagaag

SEQ ID NO: 117701 - RNA, 19 nt, Artificial Sequence
  Description of Artificial Sequence: Synthetic oligonucleotide
ucagauacgcaguaucaua

SEQ ID NO: 117702 - RNA, 19 nt, Artificial Sequence
  Description of Artificial Sequence: Synthetic oligonucleotide
cucggggaaauauugaaga

SEQ ID NO: 117703 - RNA, 19 nt, Artificial Sequence
  Description of Artificial Sequence: Synthetic oligonucleotide
ucucagguaugugaaacca

SEQ ID NO: 117704 - RNA, 19 nt, Artificial Sequence
  Description of Artificial Sequence: Synthetic oligonucleotide
aauuagaaucacacuuuca

SEQ ID NO: 117705 - RNA, 19 nt, Artificial Sequence
  Description of Artificial Sequence: Synthetic oligonucleotide
uguuuauguucacccgccc

SEQ ID NO: 117706 - RNA, 19 nt, Artificial Sequence
  Description of Artificial Sequence: Synthetic oligonucleotide
augcauaucugucgaaagu

SEQ ID NO: 117707 - RNA, 19 nt, Artificial Sequence
  Description of Artificial Sequence: Synthetic oligonucleotide
accgucaccaaucgcuagg

SEQ ID NO: 117708 - RNA, 19 nt, Artificial Sequence
  Description of Artificial Sequence: Synthetic oligonucleotide
gauacgcaguaucauacaa

SEQ ID NO: 117709 - RNA, 19 nt, Artificial Sequence
  Description of Artificial Sequence: Synthetic oligonucleotide
uguucaccugucuucuagc

SEQ ID NO: 117710 - RNA, 19 nt, Artificial Sequence
  Description of Artificial Sequence: Synthetic oligonucleotide
cagcucgaacagaacaucg

SEQ ID NO: 117711 - RNA, 19 nt, Artificial Sequence
  Description of Artificial Sequence: Synthetic oligonucleotide
ugaaagcuuuaacagcaua

SEQ ID NO: 117712 - RNA, 19 nt, Artificial Sequence
  Description of Artificial Sequence: Synthetic oligonucleotide
auuacauuaggacgagaua

SEQ ID NO: 117713 - RNA, 19 nt, Artificial Sequence
  Description of Artificial Sequence: Synthetic oligonucleotide
uuuaagggcuuagugcgga

SEQ ID NO: 117714 - RNA, 19 nt, Artificial Sequence
  Description of Artificial Sequence: Synthetic oligonucleotide
aagauugcauucgccaagu

SEQ ID NO: 117715 - RNA, 19 nt, Artificial Sequence
  Description of Artificial Sequence: Synthetic oligonucleotide
auaggaugcuccuuugaaa

SEQ ID NO: 117716 - RNA, 19 nt, Artificial Sequence
  Description of Artificial Sequence: Synthetic oligonucleotide
cuuaugacgaugauagcua

SEQ ID NO: 117717 - RNA, 19 nt, Artificial Sequence
  Description of Artificial Sequence: Synthetic oligonucleotide
aguaccaaucagugcaggu

SEQ ID NO: 117718 - RNA, 19 nt, Artificial Sequence
  Description of Artificial Sequence: Synthetic oligonucleotide
uuaacaaucugggccuucu

SEQ ID NO: 117719 - RNA, 19 nt, Artificial Sequence
  Description of Artificial Sequence: Synthetic oligonucleotide
auaguacauccgcugauaa

SEQ ID NO: 117720 - RNA, 19 nt, Artificial Sequence
  Description of Artificial Sequence: Synthetic oligonucleotide
acggucguguuuucgaaca

SEQ ID NO: 117721 - RNA, 19 nt, Artificial Sequence
  Description of Artificial Sequence: Synthetic oligonucleotide
ucaugcauaucugucgaaa

SEQ ID NO: 117722 - RNA, 19 nt, Artificial Sequence
  Description of Artificial Sequence: Synthetic oligonucleotide
aguacuuaugacgaugaua

SEQ ID NO: 117723 - RNA, 19 nt, Artificial Sequence
  Description of Artificial Sequence: Synthetic oligonucleotide
acaccuaugcccacguggg

SEQ ID NO: 117724 - RNA, 19 nt, Artificial Sequence
  Description of Artificial Sequence: Synthetic oligonucleotide
ucccaaugacaccuaugcc

SEQ ID NO: 117725 - RNA, 19 nt, Artificial Sequence
  Description of Artificial Sequence: Synthetic oligonucleotide
ugcgcucgacucuggaccg

SEQ ID NO: 117726 - RNA, 19 nt, Artificial Sequence
  Description of Artificial Sequence: Synthetic oligonucleotide
cagguuacugggcuaucgg

SEQ ID NO: 117727 - RNA, 19 nt, Artificial Sequence
  Description of Artificial Sequence: Synthetic oligonucleotide
cagauauccugauauaaua

SEQ ID NO: 117728 - RNA, 19 nt, Artificial Sequence
  Description of Artificial Sequence: Synthetic oligonucleotide
agauacgcaguaucauaca

SEQ ID NO: 117729 - RNA, 19 nt, Artificial Sequence
  Description of Artificial Sequence: Synthetic oligonucleotide
ucgcuagggugauaggaug

SEQ ID NO: 117730 - RNA, 19 nt, Artificial Sequence
  Description of Artificial Sequence: Synthetic oligonucleotide
agugacaagcagugugaug

SEQ ID NO: 117731 - RNA, 19 nt, Artificial Sequence
  Description of Artificial Sequence: Synthetic oligonucleotide
uccuacugucggcuggucc

SEQ ID NO: 117732 - RNA, 19 nt, Artificial Sequence
  Description of Artificial Sequence: Synthetic oligonucleotide
ccgcugauaaaucuguccg

SEQ ID NO: 117733 - RNA, 19 nt, Artificial Sequence
  Description of Artificial Sequence: Synthetic oligonucleotide
aagcgucaaauacgccgag

SEQ ID NO: 117734 - RNA, 19 nt, Artificial Sequence
  Description of Artificial Sequence: Synthetic oligonucleotide
agauaaguguggaugggga

SEQ ID NO: 117735 - RNA, 19 nt, Artificial Sequence
  Description of Artificial Sequence: Synthetic oligonucleotide
acauuaggacgagauaagu

SEQ ID NO: 117736 - RNA, 19 nt, Artificial Sequence
  Description of Artificial Sequence: Synthetic oligonucleotide
ucggggaaauauugaagaa

SEQ ID NO: 117737 - RNA, 19 nt, Artificial Sequence
  Description of Artificial Sequence: Synthetic oligonucleotide
aaauuacauuaggacgaga

SEQ ID NO: 117738 - RNA, 19 nt, Artificial Sequence
  Description of Artificial Sequence: Synthetic oligonucleotide
uaucacucggggaaauauu

SEQ ID NO: 117739 - RNA, 19 nt, Artificial Sequence
  Description of Artificial Sequence: Synthetic oligonucleotide
ccguuuguaggcaacacac

SEQ ID NO: 117740 - RNA, 19 nt, Artificial Sequence
  Description of Artificial Sequence: Synthetic oligonucleotide
agaaucgggagggaaguga

SEQ ID NO: 117741 - RNA, 19 nt, Artificial Sequence
  Description of Artificial Sequence: Synthetic oligonucleotide
uacuuaugacgaugauagc

SEQ ID NO: 117742 - RNA, 19 nt, Artificial Sequence
  Description of Artificial Sequence: Synthetic oligonucleotide
guguuuauguucacccgcc

SEQ ID NO: 117743 - RNA, 19 nt, Artificial Sequence
  Description of Artificial Sequence: Synthetic oligonucleotide
ugauagcuacagguaacca

SEQ ID NO: 117744 - RNA, 19 nt, Artificial Sequence
  Description of Artificial Sequence: Synthetic oligonucleotide
auaucugucgaaaguccug

SEQ ID NO: 117745 - RNA, 19 nt, Artificial Sequence
  Description of Artificial Sequence: Synthetic oligonucleotide
acucggggaaauauugaag

SEQ ID NO: 117746 - RNA, 19 nt, Artificial Sequence
  Description of Artificial Sequence: Synthetic oligonucleotide
cuucccaaugacaccuaug

SEQ ID NO: 117747 - RNA, 19 nt, Artificial Sequence
  Description of Artificial Sequence: Synthetic oligonucleotide
cacagagucaaaacucaga

SEQ ID NO: 117748 - RNA, 19 nt, Artificial Sequence
  Description of Artificial Sequence: Synthetic oligonucleotide
aggagaaucgggagggaag

SEQ ID NO: 117749 - RNA, 19 nt, Artificial Sequence
  Description of Artificial Sequence: Synthetic oligonucleotide
ggcucgagccguuuguagg

SEQ ID NO: 117750 - RNA, 19 nt, Artificial Sequence
  Description of Artificial Sequence: Synthetic oligonucleotide
uaguacauccgcugauaaa

SEQ ID NO: 117751 - RNA, 19 nt, Artificial Sequence
  Description of Artificial Sequence: Synthetic oligonucleotide
uauguucacccgcccuccc

SEQ ID NO: 117752 - RNA, 19 nt, Artificial Sequence
  Description of Artificial Sequence: Synthetic oligonucleotide
ucgggagggaagugaagcu

SEQ ID NO: 117753 - RNA, 19 nt, Artificial Sequence
  Description of Artificial Sequence: Synthetic oligonucleotide
aggcuguacaggagaaucg

SEQ ID NO: 117754 - RNA, 19 nt, Artificial Sequence
  Description of Artificial Sequence: Synthetic oligonucleotide
gguaugugaaaccaagccu

SEQ ID NO: 117755 - RNA, 19 nt, Artificial Sequence
  Description of Artificial Sequence: Synthetic oligonucleotide
gagaaacguccaguaaaug

SEQ ID NO: 117756 - RNA, 19 nt, Artificial Sequence
  Description of Artificial Sequence: Synthetic oligonucleotide
gcuuagugcggacuggggc

SEQ ID NO: 117757 - RNA, 19 nt, Artificial Sequence
  Description of Artificial Sequence: Synthetic oligonucleotide
acaccacuauuuaagggcu

SEQ ID NO: 117758 - RNA, 19 nt, Artificial Sequence
  Description of Artificial Sequence: Synthetic oligonucleotide
agggugauaggaugcuccu

SEQ ID NO: 117759 - RNA, 19 nt, Artificial Sequence
  Description of Artificial Sequence: Synthetic oligonucleotide
cuaggaucauacugacauc

SEQ ID NO: 117760 - RNA, 19 nt, Artificial Sequence
  Description of Artificial Sequence: Synthetic oligonucleotide
uggcucgagccguuuguag

SEQ ID NO: 117761 - RNA, 19 nt, Artificial Sequence
  Description of Artificial Sequence: Synthetic oligonucleotide
guuacugggcuaucgguua

SEQ ID NO: 117762 - RNA, 19 nt, Artificial Sequence
  Description of Artificial Sequence: Synthetic oligonucleotide
aucugucgaaaguccugag

SEQ ID NO: 117763 - RNA, 19 nt, Artificial Sequence
  Description of Artificial Sequence: Synthetic oligonucleotide
augacauguuuaguguacu

SEQ ID NO: 117764 - RNA, 19 nt, Artificial Sequence
  Description of Artificial Sequence: Synthetic oligonucleotide
gugauaggaugcuccuuug

SEQ ID NO: 117765 - RNA, 19 nt, Artificial Sequence
  Description of Artificial Sequence: Synthetic oligonucleotide
cuccaucgaugaucaaacc

SEQ ID NO: 117766 - RNA, 19 nt, Artificial Sequence
  Description of Artificial Sequence: Synthetic oligonucleotide
agaacaucgugcaggcucu

SEQ ID NO: 117767 - RNA, 19 nt, Artificial Sequence
  Description of Artificial Sequence: Synthetic oligonucleotide
agcuuucuccuggagccgg

SEQ ID NO: 117768 - RNA, 19 nt, Artificial Sequence
  Description of Artificial Sequence: Synthetic oligonucleotide
uuacugggcuaucgguuaa

SEQ ID NO: 117769 - RNA, 19 nt, Artificial Sequence
  Description of Artificial Sequence: Synthetic oligonucleotide
guccaguaccaaucagugc

SEQ ID NO: 117770 - RNA, 19 nt, Artificial Sequence
  Description of Artificial Sequence: Synthetic oligonucleotide
ccaaucgcuagggugauag

SEQ ID NO: 117771 - RNA, 19 nt, Artificial Sequence
  Description of Artificial Sequence: Synthetic oligonucleotide
gugaacgggcaugagggug

SEQ ID NO: 117772 - RNA, 19 nt, Artificial Sequence
  Description of Artificial Sequence: Synthetic oligonucleotide
guaaccauucauguuaaau

SEQ ID NO: 117773 - RNA, 19 nt, Artificial Sequence
  Description of Artificial Sequence: Synthetic oligonucleotide
uuaagggcuuagugcggac

SEQ ID NO: 117774 - RNA, 19 nt, Artificial Sequence
  Description of Artificial Sequence: Synthetic oligonucleotide
ucacggucguguuuucgaa

SEQ ID NO: 117775 - RNA, 19 nt, Artificial Sequence
  Description of Artificial Sequence: Synthetic oligonucleotide
agccguuuguaggcaacac

SEQ ID NO: 117776 - RNA, 19 nt, Artificial Sequence
  Description of Artificial Sequence: Synthetic oligonucleotide
caaucgcuagggugauagg

SEQ ID NO: 117777 - RNA, 19 nt, Artificial Sequence
  Description of Artificial Sequence: Synthetic oligonucleotide
aggacgagauaagugugga

SEQ ID NO: 117778 - RNA, 19 nt, Artificial Sequence
  Description of Artificial Sequence: Synthetic oligonucleotide
uucccagguuauaggcucu

SEQ ID NO: 117779 - RNA, 19 nt, Artificial Sequence
  Description of Artificial Sequence: Synthetic oligonucleotide
ccuucuaucacucggggaa

SEQ ID NO: 117780 - RNA, 19 nt, Artificial Sequence
  Description of Artificial Sequence: Synthetic oligonucleotide
agauugcauucgccaagug

SEQ ID NO: 117781 - RNA, 19 nt, Artificial Sequence
  Description of Artificial Sequence: Synthetic oligonucleotide
cacucggggaaauauugaa

SEQ ID NO: 117782 - RNA, 19 nt, Artificial Sequence
  Description of Artificial Sequence: Synthetic oligonucleotide
cacggucguguuuucgaac

SEQ ID NO: 117783 - RNA, 19 nt, Artificial Sequence
  Description of Artificial Sequence: Synthetic oligonucleotide
guuuauguucacccgcccu

SEQ ID NO: 117784 - RNA, 19 nt, Artificial Sequence
  Description of Artificial Sequence: Synthetic oligonucleotide
auacgcaguaucauacaaa

SEQ ID NO: 117785 - RNA, 19 nt, Artificial Sequence
  Description of Artificial Sequence: Synthetic oligonucleotide
gaaucgggagggaagugaa

SEQ ID NO: 117786 - RNA, 19 nt, Artificial Sequence
  Description of Artificial Sequence: Synthetic oligonucleotide
cuguaguagauuuuacaau

SEQ ID NO: 117787 - RNA, 19 nt, Artificial Sequence
  Description of Artificial Sequence: Synthetic oligonucleotide
cugccagguccaauaguug

SEQ ID NO: 117788 - RNA, 19 nt, Artificial Sequence
  Description of Artificial Sequence: Synthetic oligonucleotide
guaguagauuuuacaauua

SEQ ID NO: 117789 - RNA, 19 nt, Artificial Sequence
  Description of Artificial Sequence: Synthetic oligonucleotide
acauuacauuguaaaugga

SEQ ID NO: 117790 - RNA, 19 nt, Artificial Sequence
  Description of Artificial Sequence: Synthetic oligonucleotide
gcucgagccguuuguaggc

SEQ ID NO: 117791 - RNA, 19 nt, Artificial Sequence
  Description of Artificial Sequence: Synthetic oligonucleotide
aucgcuagggugauaggau

SEQ ID NO: 117792 - RNA, 19 nt, Artificial Sequence
  Description of Artificial Sequence: Synthetic oligonucleotide
augcccgccuucugcagug

SEQ ID NO: 117793 - RNA, 19 nt, Artificial Sequence
  Description of Artificial Sequence: Synthetic oligonucleotide
gcagguuacugggcuaucg

SEQ ID NO: 117794 - RNA, 19 nt, Artificial Sequence
  Description of Artificial Sequence: Synthetic oligonucleotide
ucggcugguccccuaguuu

SEQ ID NO: 117795 - RNA, 19 nt, Artificial Sequence
  Description of Artificial Sequence: Synthetic oligonucleotide
aagugguaauguagacaca

SEQ ID NO: 117796 - RNA, 19 nt, Artificial Sequence
  Description of Artificial Sequence: Synthetic oligonucleotide
agcgcguucuuggcgaugu

SEQ ID NO: 117797 - RNA, 19 nt, Artificial Sequence
  Description of Artificial Sequence: Synthetic oligonucleotide
ucuaucacucggggaaaua

SEQ ID NO: 117798 - RNA, 19 nt, Artificial Sequence
  Description of Artificial Sequence: Synthetic oligonucleotide
cugggcuaucgguuaaaca

SEQ ID NO: 117799 - RNA, 19 nt, Artificial Sequence
  Description of Artificial Sequence: Synthetic oligonucleotide
accacuauuuaagggcuua

SEQ ID NO: 117800 - RNA, 19 nt, Artificial Sequence
  Description of Artificial Sequence: Synthetic oligonucleotide
ccucgaucgugucagcagc

SEQ ID NO: 117801 - RNA, 19 nt, Artificial Sequence
  Description of Artificial Sequence: Synthetic oligonucleotide
agcggagcuguacauucuu

SEQ ID NO: 117802 - RNA, 19 nt, Artificial Sequence
  Description of Artificial Sequence: Synthetic oligonucleotide
gccucuaggaucauacuga

SEQ ID NO: 117803 - RNA, 19 nt, Artificial Sequence
  Description of Artificial Sequence: Synthetic oligonucleotide
ugcggacuggggcuccaac

SEQ ID NO: 117804 - RNA, 19 nt, Artificial Sequence
  Description of Artificial Sequence: Synthetic oligonucleotide
uccccuaguuugagcacau

SEQ ID NO: 117805 - RNA, 19 nt, Artificial Sequence
  Description of Artificial Sequence: Synthetic oligonucleotide
caugcggcagcacagcacu

SEQ ID NO: 117806 - RNA, 19 nt, Artificial Sequence
  Description of Artificial Sequence: Synthetic oligonucleotide
gcgucaaauacgccgagaa

SEQ ID NO: 117807 - RNA, 19 nt, Artificial Sequence
  Description of Artificial Sequence: Synthetic oligonucleotide
caucgaugaucaaaccaua

SEQ ID NO: 117808 - RNA, 19 nt, Artificial Sequence
  Description of Artificial Sequence: Synthetic oligonucleotide
guacauccgcugauaaauc

SEQ ID NO: 117809 - RNA, 19 nt, Artificial Sequence
  Description of Artificial Sequence: Synthetic oligonucleotide
caccgucaccaaucgcuag

SEQ ID NO: 117810 - RNA, 19 nt, Artificial Sequence
  Description of Artificial Sequence: Synthetic oligonucleotide
ccucuaggaucauacugac

SEQ ID NO: 117811 - RNA, 19 nt, Artificial Sequence
  Description of Artificial Sequence: Synthetic oligonucleotide
cuccuaagcucuggcuggg

SEQ ID NO: 117812 - RNA, 19 nt, Artificial Sequence
  Description of Artificial Sequence: Synthetic oligonucleotide
cucuaggaucauacugaca

SEQ ID NO: 117813 - RNA, 19 nt, Artificial Sequence
  Description of Artificial Sequence: Synthetic oligonucleotide
agguaaccauucauguuaa

SEQ ID NO: 117814 - RNA, 19 nt, Artificial Sequence
  Description of Artificial Sequence: Synthetic oligonucleotide
cuacugucggcuggucccc

SEQ ID NO: 117815 - RNA, 19 nt, Artificial Sequence
  Description of Artificial Sequence: Synthetic oligonucleotide
cuagggugauaggaugcuc

SEQ ID NO: 117816 - RNA, 19 nt, Artificial Sequence
  Description of Artificial Sequence: Synthetic oligonucleotide
ugucggcugguccccuagu

SEQ ID NO: 117817 - RNA, 19 nt, Artificial Sequence
  Description of Artificial Sequence: Synthetic oligonucleotide
cuagaccaccagagacuug

SEQ ID NO: 117818 - RNA, 19 nt, Artificial Sequence
  Description of Artificial Sequence: Synthetic oligonucleotide
ggucguguuuucgaacaug

SEQ ID NO: 117819 - RNA, 19 nt, Artificial Sequence
  Description of Artificial Sequence: Synthetic oligonucleotide
acgccgagaaacguccagu

SEQ ID NO: 117820 - RNA, 19 nt, Artificial Sequence
  Description of Artificial Sequence: Synthetic oligonucleotide
ccgagaaacguccaguaaa

SEQ ID NO: 117821 - RNA, 19 nt, Artificial Sequence
  Description of Artificial Sequence: Synthetic oligonucleotide
agcgucaaauacgccgaga

SEQ ID NO: 117822 - RNA, 19 nt, Artificial Sequence
  Description of Artificial Sequence: Synthetic oligonucleotide
ccaagauggcacacucaag

SEQ ID NO: 117823 - RNA, 19 nt, Artificial Sequence
  Description of Artificial Sequence: Synthetic oligonucleotide
guccccuaguuugagcaca

SEQ ID NO: 117824 - RNA, 19 nt, Artificial Sequence
  Description of Artificial Sequence: Synthetic oligonucleotide
gggcuuagugcggacuggg

SEQ ID NO: 117825 - RNA, 19 nt, Artificial Sequence
  Description of Artificial Sequence: Synthetic oligonucleotide
ccugcacaagaccuucuug

SEQ ID NO: 117826 - RNA, 19 nt, Artificial Sequence
  Description of Artificial Sequence: Synthetic oligonucleotide
agcagguuacugggcuauc

SEQ ID NO: 117827 - RNA, 19 nt, Artificial Sequence
  Description of Artificial Sequence: Synthetic oligonucleotide
gcauugccaauaaauuaca

SEQ ID NO: 117828 - RNA, 19 nt, Artificial Sequence
  Description of Artificial Sequence: Synthetic oligonucleotide
gccguuuguaggcaacaca

SEQ ID NO: 117829 - RNA, 19 nt, Artificial Sequence
  Description of Artificial Sequence: Synthetic oligonucleotide
gcaccaagcagaaucaggu

SEQ ID NO: 117830 - RNA, 19 nt, Artificial Sequence
  Description of Artificial Sequence: Synthetic oligonucleotide
gcuacagguaaccauucau

SEQ ID NO: 117831 - RNA, 19 nt, Artificial Sequence
  Description of Artificial Sequence: Synthetic oligonucleotide
ggucacggucguguuuucg

SEQ ID NO: 117832 - RNA, 19 nt, Artificial Sequence
  Description of Artificial Sequence: Synthetic oligonucleotide
gaacacccgccagcggagc

SEQ ID NO: 117833 - RNA, 19 nt, Artificial Sequence
  Description of Artificial Sequence: Synthetic oligonucleotide
cuaucacucggggaaauau

SEQ ID NO: 117834 - RNA, 19 nt, Artificial Sequence
  Description of Artificial Sequence: Synthetic oligonucleotide
gcuaucgguuaaacauuag

SEQ ID NO: 117835 - RNA, 19 nt, Artificial Sequence
  Description of Artificial Sequence: Synthetic oligonucleotide
uacugggcuaucgguuaaa

SEQ ID NO: 117836 - RNA, 19 nt, Artificial Sequence
  Description of Artificial Sequence: Synthetic oligonucleotide
cauugcgcucgacucugga

SEQ ID NO: 117837 - RNA, 19 nt, Artificial Sequence
  Description of Artificial Sequence: Synthetic oligonucleotide
cggacuggggcuccaaccc

SEQ ID NO: 117838 - RNA, 19 nt, Artificial Sequence
  Description of Artificial Sequence: Synthetic oligonucleotide
caaauacgccgagaaacgu

SEQ ID NO: 117839 - RNA, 19 nt, Artificial Sequence
  Description of Artificial Sequence: Synthetic oligonucleotide
cagaccuugaugcccgccu

SEQ ID NO: 117840 - RNA, 19 nt, Artificial Sequence
  Description of Artificial Sequence: Synthetic oligonucleotide
cuucuaucacucggggaaa

SEQ ID NO: 117841 - RNA, 19 nt, Artificial Sequence
  Description of Artificial Sequence: Synthetic oligonucleotide
ccgucaccaaucgcuaggg

SEQ ID NO: 117842 - RNA, 19 nt, Artificial Sequence
  Description of Artificial Sequence: Synthetic oligonucleotide
ccaugcggcagcacagcac

SEQ ID NO: 117843 - RNA, 19 nt, Artificial Sequence
  Description of Artificial Sequence: Synthetic oligonucleotide
ggagaaucgggagggaagu

SEQ ID NO: 117844 - RNA, 19 nt, Artificial Sequence
  Description of Artificial Sequence: Synthetic oligonucleotide
ggcuaucgguuaaacauua

SEQ ID NO: 117845 - RNA, 19 nt, Artificial Sequence
  Description of Artificial Sequence: Synthetic oligonucleotide
gaguccucuccgucgccgu

SEQ ID NO: 117846 - RNA, 19 nt, Artificial Sequence
  Description of Artificial Sequence: Synthetic oligonucleotide
ccagguuauaggcucucaa

SEQ ID NO: 117847 - RNA, 19 nt, Artificial Sequence
  Description of Artificial Sequence: Synthetic oligonucleotide
gccgagaaacguccaguaa

SEQ ID NO: 117848 - RNA, 19 nt, Artificial Sequence
  Description of Artificial Sequence: Synthetic oligonucleotide
cucgagccguuuguaggca

SEQ ID NO: 117849 - RNA, 19 nt, Artificial Sequence
  Description of Artificial Sequence: Synthetic oligonucleotide
gcuuggcgacccuccuucc

SEQ ID NO: 117850 - RNA, 19 nt, Artificial Sequence
  Description of Artificial Sequence: Synthetic oligonucleotide
cuggucacggucguguuuu

SEQ ID NO: 117851 - RNA, 19 nt, Artificial Sequence
  Description of Artificial Sequence: Synthetic oligonucleotide
gguuacugggcuaucgguu

SEQ ID NO: 117852 - RNA, 19 nt, Artificial Sequence
  Description of Artificial Sequence: Synthetic oligonucleotide
gcaagggcgccaugcggca

SEQ ID NO: 117853 - RNA, 19 nt, Artificial Sequence
  Description of Artificial Sequence: Synthetic oligonucleotide
cccuuagcggagcuguaca

SEQ ID NO: 117854 - RNA, 19 nt, Artificial Sequence
  Description of Artificial Sequence: Synthetic oligonucleotide
cuuagcggagcuguacauu

SEQ ID NO: 117855 - RNA, 19 nt, Artificial Sequence
  Description of Artificial Sequence: Synthetic oligonucleotide
gcauugcgcucgacucugg

SEQ ID NO: 117856 - RNA, 19 nt, Artificial Sequence
  Description of Artificial Sequence: Synthetic oligonucleotide
cugugacccucacuauggu

SEQ ID NO: 117857 - RNA, 19 nt, Artificial Sequence
  Description of Artificial Sequence: Synthetic oligonucleotide
gcuagggugauaggaugcu

SEQ ID NO: 117858 - RNA, 19 nt, Artificial Sequence
  Description of Artificial Sequence: Synthetic oligonucleotide
caguacuuaugacgaugau

SEQ ID NO: 117859 - RNA, 19 nt, Artificial Sequence
  Description of Artificial Sequence: Synthetic oligonucleotide
cgagaaacguccaguaaau

SEQ ID NO: 117860 - RNA, 19 nt, Artificial Sequence
  Description of Artificial Sequence: Synthetic oligonucleotide
gcggagcuguacauucuuc

SEQ ID NO: 117861 - RNA, 19 nt, Artificial Sequence
  Description of Artificial Sequence: Synthetic oligonucleotide
gucggcugguccccuaguu

SEQ ID NO: 117862 - RNA, 19 nt, Artificial Sequence
  Description of Artificial Sequence: Synthetic oligonucleotide
ggacgagauaaguguggau

SEQ ID NO: 117863 - RNA, 19 nt, Artificial Sequence
  Description of Artificial Sequence: Synthetic oligonucleotide
ucgcuguuccuggcagcuu

SEQ ID NO: 117864 - RNA, 19 nt, Artificial Sequence
  Description of Artificial Sequence: Synthetic oligonucleotide
cuggcucgagccguuugua

SEQ ID NO: 117865 - RNA, 19 nt, Artificial Sequence
  Description of Artificial Sequence: Synthetic oligonucleotide
cgucaaauacgccgagaaa

SEQ ID NO: 117866 - RNA, 19 nt, Artificial Sequence
  Description of Artificial Sequence: Synthetic oligonucleotide
cagugacaagcagugugau

SEQ ID NO: 117867 - RNA, 19 nt, Artificial Sequence
  Description of Artificial Sequence: Synthetic oligonucleotide
cacaggguucgaagccccu

SEQ ID NO: 117868 - RNA, 19 nt, Artificial Sequence
  Description of Artificial Sequence: Synthetic oligonucleotide
caccacuauuuaagggcuu

SEQ ID NO: 117869 - RNA, 19 nt, Artificial Sequence
  Description of Artificial Sequence: Synthetic oligonucleotide
gcaccgucaccaaucgcua

SEQ ID NO: 117870 - RNA, 19 nt, Artificial Sequence
  Description of Artificial Sequence: Synthetic oligonucleotide
gcgcucgacucuggaccgg

SEQ ID NO: 117871 - RNA, 19 nt, Artificial Sequence
  Description of Artificial Sequence: Synthetic oligonucleotide
ccuuagcggagcuguacau

SEQ ID NO: 117872 - RNA, 19 nt, Artificial Sequence
  Description of Artificial Sequence: Synthetic oligonucleotide
gcggagcagcgcguucuug

SEQ ID NO: 117873 - RNA, 19 nt, Artificial Sequence
  Description of Artificial Sequence: Synthetic oligonucleotide
cgccgagaaacguccagua

SEQ ID NO: 117874 - RNA, 19 nt, Artificial Sequence
  Description of Artificial Sequence: Synthetic oligonucleotide
cagcuuggcgacccuccuu

SEQ ID NO: 117875 - RNA, 19 nt, Artificial Sequence
  Description of Artificial Sequence: Synthetic oligonucleotide
ccuucccaaugacaccuau

SEQ ID NO: 117876 - RNA, 19 nt, Artificial Sequence
  Description of Artificial Sequence: Synthetic oligonucleotide
gcgcguucuuggcgauguc

SEQ ID NO: 117877 - RNA, 19 nt, Artificial Sequence
  Description of Artificial Sequence: Synthetic oligonucleotide
ccucuccgucgccgugggc

SEQ ID NO: 117878 - RNA, 19 nt, Artificial Sequence
  Description of Artificial Sequence: Synthetic oligonucleotide
ggaccggaccugguccacu

SEQ ID NO: 117879 - RNA, 19 nt, Artificial Sequence
  Description of Artificial Sequence: Synthetic oligonucleotide
cgcguucuuggcgaugucu

SEQ ID NO: 117880 - RNA, 19 nt, Artificial Sequence
  Description of Artificial Sequence: Synthetic oligonucleotide
cgucaccaaucgcuagggu

SEQ ID NO: 117881 - RNA, 19 nt, Artificial Sequence
  Description of Artificial Sequence: Synthetic oligonucleotide
cggucguguuuucgaacau

SEQ ID NO: 117882 - RNA, 19 nt, Artificial Sequence
  Description of Artificial Sequence: Synthetic oligonucleotide
aacaacaucgaguagacgu

SEQ ID NO: 117883 - RNA, 19 nt, Artificial Sequence
  Description of Artificial Sequence: Synthetic oligonucleotide
uuuauugauggucauauga

SEQ ID NO: 117884 - RNA, 19 nt, Artificial Sequence
  Description of Artificial Sequence: Synthetic oligonucleotide
aucgaguagacguaaaacc

SEQ ID NO: 117885 - RNA, 19 nt, Artificial Sequence
  Description of Artificial Sequence: Synthetic oligonucleotide
ugaacggcaagacugaggg

SEQ ID NO: 117886 - RNA, 19 nt, Artificial Sequence
  Description of Artificial Sequence: Synthetic oligonucleotide
aagauuaagaggucucggc

SEQ ID NO: 117887 - RNA, 19 nt, Artificial Sequence
  Description of Artificial Sequence: Synthetic oligonucleotide
ugaguagcuaucuagauca

SEQ ID NO: 117888 - RNA, 19 nt, Artificial Sequence
  Description of Artificial Sequence: Synthetic oligonucleotide
uguaaaccagguaacaccg

SEQ ID NO: 117889 - RNA, 19 nt, Artificial Sequence
  Description of Artificial Sequence: Synthetic oligonucleotide
aaccuuaucauaauacugc

SEQ ID NO: 117890 - RNA, 19 nt, Artificial Sequence
  Description of Artificial Sequence: Synthetic oligonucleotide
uuauacuuaaucuaggcaa

SEQ ID NO: 117891 - RNA, 19 nt, Artificial Sequence
  Description of Artificial Sequence: Synthetic oligonucleotide
acgugauucaauuauuccc

SEQ ID NO: 117892 - RNA, 19 nt, Artificial Sequence
  Description of Artificial Sequence: Synthetic oligonucleotide
aaaguagccugacuuuucc

SEQ ID NO: 117893 - RNA, 19 nt, Artificial Sequence
  Description of Artificial Sequence: Synthetic oligonucleotide
gauaguacaauguugugac

SEQ ID NO: 117894 - RNA, 19 nt, Artificial Sequence
  Description of Artificial Sequence: Synthetic oligonucleotide
cauauauauuccuagguag

SEQ ID NO: 117895 - RNA, 19 nt, Artificial Sequence
  Description of Artificial Sequence: Synthetic oligonucleotide
ugugcuacuaccauagagc

SEQ ID NO: 117896 - RNA, 19 nt, Artificial Sequence
  Description of Artificial Sequence: Synthetic oligonucleotide
uugacaauagccuccaugc

SEQ ID NO: 117897 - RNA, 19 nt, Artificial Sequence
  Description of Artificial Sequence: Synthetic oligonucleotide
caacuuguuaauuacacag

SEQ ID NO: 117898 - RNA, 19 nt, Artificial Sequence
  Description of Artificial Sequence: Synthetic oligonucleotide
uagacguaaaaccuuauca

SEQ ID NO: 117899 - RNA, 19 nt, Artificial Sequence
  Description of Artificial Sequence: Synthetic oligonucleotide
acgaauaaggcguaaacag

SEQ ID NO: 117900 - RNA, 19 nt, Artificial Sequence
  Description of Artificial Sequence: Synthetic oligonucleotide
aguaguaaauucuauuuug

SEQ ID NO: 117901 - RNA, 19 nt, Artificial Sequence
  Description of Artificial Sequence: Synthetic oligonucleotide
aacaacuuguuaauuacac

SEQ ID NO: 117902 - RNA, 19 nt, Artificial Sequence
  Description of Artificial Sequence: Synthetic oligonucleotide
auaauaaaucccguguugc

SEQ ID NO: 117903 - RNA, 19 nt, Artificial Sequence
  Description of Artificial Sequence: Synthetic oligonucleotide
gacgguauaauaaaucccg

SEQ ID NO: 117904 - RNA, 19 nt, Artificial Sequence
  Description of Artificial Sequence: Synthetic oligonucleotide
uuuucgguaauuguggcgg

SEQ ID NO: 117905 - RNA, 19 nt, Artificial Sequence
  Description of Artificial Sequence: Synthetic oligonucleotide
guguucaacacaaugaacg

SEQ ID NO: 117906 - RNA, 19 nt, Artificial Sequence
  Description of Artificial Sequence: Synthetic oligonucleotide
aguaugcaaaaccacuagc

SEQ ID NO: 117907 - RNA, 19 nt, Artificial Sequence
  Description of Artificial Sequence: Synthetic oligonucleotide
cacguuuagccuuagagcc

SEQ ID NO: 117908 - RNA, 19 nt, Artificial Sequence
  Description of Artificial Sequence: Synthetic oligonucleotide
aaccagguaacaccguccc

SEQ ID NO: 117909 - RNA, 19 nt, Artificial Sequence
  Description of Artificial Sequence: Synthetic oligonucleotide
uauaacaagccaacaacca

SEQ ID NO: 117910 - RNA, 19 nt, Artificial Sequence
  Description of Artificial Sequence: Synthetic oligonucleotide
aaagaguugaccagcuccc

SEQ ID NO: 117911 - RNA, 19 nt, Artificial Sequence
  Description of Artificial Sequence: Synthetic oligonucleotide
uguacgaucaaguccagcu

SEQ ID NO: 117912 - RNA, 19 nt, Artificial Sequence
  Description of Artificial Sequence: Synthetic oligonucleotide
uguaacuugaugcacuuaa

SEQ ID NO: 117913 - RNA, 19 nt, Artificial Sequence
  Description of Artificial Sequence: Synthetic oligonucleotide
ucuuaaaguagccugacuu

SEQ ID NO: 117914 - RNA, 19 nt, Artificial Sequence
  Description of Artificial Sequence: Synthetic oligonucleotide
agggcgaucagacacugcc

SEQ ID NO: 117915 - RNA, 19 nt, Artificial Sequence
  Description of Artificial Sequence: Synthetic oligonucleotide
aucauaauuccucuuagga

SEQ ID NO: 117916 - RNA, 19 nt, Artificial Sequence
  Description of Artificial Sequence: Synthetic oligonucleotide
uauucggagaccaauucca

SEQ ID NO: 117917 - RNA, 19 nt, Artificial Sequence
  Description of Artificial Sequence: Synthetic oligonucleotide
aaaguacugauguccuuuc

SEQ ID NO: 117918 - RNA, 19 nt, Artificial Sequence
  Description of Artificial Sequence: Synthetic oligonucleotide
ugggauaguacaauguugu

SEQ ID NO: 117919 - RNA, 19 nt, Artificial Sequence
  Description of Artificial Sequence: Synthetic oligonucleotide
cauaauuccucuuaggaga

SEQ ID NO: 117920 - RNA, 19 nt, Artificial Sequence
  Description of Artificial Sequence: Synthetic oligonucleotide
uaauugugagucauaaggu

SEQ ID NO: 117921 - RNA, 19 nt, Artificial Sequence
  Description of Artificial Sequence: Synthetic oligonucleotide
uuauagaugauggacauua

SEQ ID NO: 117922 - RNA, 19 nt, Artificial Sequence
  Description of Artificial Sequence: Synthetic oligonucleotide
guuacaaaggcugaguagc

SEQ ID NO: 117923 - RNA, 19 nt, Artificial Sequence
  Description of Artificial Sequence: Synthetic oligonucleotide
uuauugauggucauaugaa

SEQ ID NO: 117924 - RNA, 19 nt, Artificial Sequence
  Description of Artificial Sequence: Synthetic oligonucleotide
ugcagauuagauuccagug

SEQ ID NO: 117925 - RNA, 19 nt, Artificial Sequence
  Description of Artificial Sequence: Synthetic oligonucleotide
aacucuacaagauccugca

SEQ ID NO: 117926 - RNA, 19 nt, Artificial Sequence
  Description of Artificial Sequence: Synthetic oligonucleotide
ucgcugauggaucaugccg

SEQ ID NO: 117927 - RNA, 19 nt, Artificial Sequence
  Description of Artificial Sequence: Synthetic oligonucleotide
cuauggaguagucuuaagc

SEQ ID NO: 117928 - RNA, 19 nt, Artificial Sequence
  Description of Artificial Sequence: Synthetic oligonucleotide
auagggaaacucuacaaga

SEQ ID NO: 117929 - RNA, 19 nt, Artificial Sequence
  Description of Artificial Sequence: Synthetic oligonucleotide
accaaucgguuacaaaggc

SEQ ID NO: 117930 - RNA, 19 nt, Artificial Sequence
  Description of Artificial Sequence: Synthetic oligonucleotide
ucggagaccaauuccacag

SEQ ID NO: 117931 - RNA, 19 nt, Artificial Sequence
  Description of Artificial Sequence: Synthetic oligonucleotide
ucgaguagacguaaaaccu

SEQ ID NO: 117932 - RNA, 19 nt, Artificial Sequence
  Description of Artificial Sequence: Synthetic oligonucleotide
ucacguuuagccuuagagc

SEQ ID NO: 117933 - RNA, 19 nt, Artificial Sequence
  Description of Artificial Sequence: Synthetic oligonucleotide
aaaccuuaucauaauacug

SEQ ID NO: 117934 - RNA, 19 nt, Artificial Sequence
  Description of Artificial Sequence: Synthetic oligonucleotide
uauuauggaaagugaagcu

SEQ ID NO: 117935 - RNA, 19 nt, Artificial Sequence
  Description of Artificial Sequence: Synthetic oligonucleotide
uguuaagggaagcuuaaaa

SEQ ID NO: 117936 - RNA, 19 nt, Artificial Sequence
  Description of Artificial Sequence: Synthetic oligonucleotide
auaguucagguacagacga

SEQ ID NO: 117937 - RNA, 19 nt, Artificial Sequence
  Description of Artificial Sequence: Synthetic oligonucleotide
gcuacuaccauagagcugg

SEQ ID NO: 117938 - RNA, 19 nt, Artificial Sequence
  Description of Artificial Sequence: Synthetic oligonucleotide
ugaucaauagaggaguaug

SEQ ID NO: 117939 - RNA, 19 nt, Artificial Sequence
  Description of Artificial Sequence: Synthetic oligonucleotide
gcgaauucgagcuaaagag

SEQ ID NO: 117940 - RNA, 19 nt, Artificial Sequence
  Description of Artificial Sequence: Synthetic oligonucleotide
uacaagauccugcaguaac

SEQ ID NO: 117941 - RNA, 19 nt, Artificial Sequence
  Description of Artificial Sequence: Synthetic oligonucleotide
aacggcaagacugagggca

SEQ ID NO: 117942 - RNA, 19 nt, Artificial Sequence
  Description of Artificial Sequence: Synthetic oligonucleotide
gagaaguucguaguaauug

SEQ ID NO: 117943 - RNA, 19 nt, Artificial Sequence
  Description of Artificial Sequence: Synthetic oligonucleotide
uaucagacuaacuguacga

SEQ ID NO: 117944 - RNA, 19 nt, Artificial Sequence
  Description of Artificial Sequence: Synthetic oligonucleotide
aauacauguuaguucugga

SEQ ID NO: 117945 - RNA, 19 nt, Artificial Sequence
  Description of Artificial Sequence: Synthetic oligonucleotide
ucuacauauucggagacca

SEQ ID NO: 117946 - RNA, 19 nt, Artificial Sequence
  Description of Artificial Sequence: Synthetic oligonucleotide
agaguucgaaccucucugc

SEQ ID NO: 117947 - RNA, 19 nt, Artificial Sequence
  Description of Artificial Sequence: Synthetic oligonucleotide
aguucguaguaauugugag

SEQ ID NO: 117948 - RNA, 19 nt, Artificial Sequence
  Description of Artificial Sequence: Synthetic oligonucleotide
uaauuguggcgguagaugu

SEQ ID NO: 117949 - RNA, 19 nt, Artificial Sequence
  Description of Artificial Sequence: Synthetic oligonucleotide
ugcaagucguaauuuaugu

SEQ ID NO: 117950 - RNA, 19 nt, Artificial Sequence
  Description of Artificial Sequence: Synthetic oligonucleotide
acucuggacgaauaaggcg

SEQ ID NO: 117951 - RNA, 19 nt, Artificial Sequence
  Description of Artificial Sequence: Synthetic oligonucleotide
uggaccaaaacaaucccac

SEQ ID NO: 117952 - RNA, 19 nt, Artificial Sequence
  Description of Artificial Sequence: Synthetic oligonucleotide
ugugucaacuggaacguca

SEQ ID NO: 117953 - RNA, 19 nt, Artificial Sequence
  Description of Artificial Sequence: Synthetic oligonucleotide
gaguaugggagccauacca

SEQ ID NO: 117954 - RNA, 19 nt, Artificial Sequence
  Description of Artificial Sequence: Synthetic oligonucleotide
ucaacuggaacgucaguug

SEQ ID NO: 117955 - RNA, 19 nt, Artificial Sequence
  Description of Artificial Sequence: Synthetic oligonucleotide
gagaguucgaaccucucug

SEQ ID NO: 117956 - RNA, 19 nt, Artificial Sequence
  Description of Artificial Sequence: Synthetic oligonucleotide
aaucgcugauggaucaugc

SEQ ID NO: 117957 - RNA, 19 nt, Artificial Sequence
  Description of Artificial Sequence: Synthetic oligonucleotide
aagaguaugcaaaaccacu

SEQ ID NO: 117958 - RNA, 19 nt, Artificial Sequence
  Description of Artificial Sequence: Synthetic oligonucleotide
aggcaguccaacaacaucg

SEQ ID NO: 117959 - RNA, 19 nt, Artificial Sequence
  Description of Artificial Sequence: Synthetic oligonucleotide
accgucccagcauaaaucg

SEQ ID NO: 117960 - RNA, 19 nt, Artificial Sequence
  Description of Artificial Sequence: Synthetic oligonucleotide
aguaagacaagagcagggg

SEQ ID NO: 117961 - RNA, 19 nt, Artificial Sequence
  Description of Artificial Sequence: Synthetic oligonucleotide
acaauauacccugcugugc

SEQ ID NO: 117962 - RNA, 19 nt, Artificial Sequence
  Description of Artificial Sequence: Synthetic oligonucleotide
uacagacgaagcaauucag

SEQ ID NO: 117963 - RNA, 19 nt, Artificial Sequence
  Description of Artificial Sequence: Synthetic oligonucleotide
uacucuggacgaauaaggc

SEQ ID NO: 117964 - RNA, 19 nt, Artificial Sequence
  Description of Artificial Sequence: Synthetic oligonucleotide
acuaccauagagcugggaa

SEQ ID NO: 117965 - RNA, 19 nt, Artificial Sequence
  Description of Artificial Sequence: Synthetic oligonucleotide
auagaggaguaugggagcc

SEQ ID NO: 117966 - RNA, 19 nt, Artificial Sequence
  Description of Artificial Sequence: Synthetic oligonucleotide
aggaguaugggagccauac

SEQ ID NO: 117967 - RNA, 19 nt, Artificial Sequence
  Description of Artificial Sequence: Synthetic oligonucleotide
agacguaaaaccuuaucau

SEQ ID NO: 117968 - RNA, 19 nt, Artificial Sequence
  Description of Artificial Sequence: Synthetic oligonucleotide
ucguguucaacacaaugaa

SEQ ID NO: 117969 - RNA, 19 nt, Artificial Sequence
  Description of Artificial Sequence: Synthetic oligonucleotide
uaugcaagucguaauuuau

SEQ ID NO: 117970 - RNA, 19 nt, Artificial Sequence
  Description of Artificial Sequence: Synthetic oligonucleotide
aggcguaaacaguuaauag

SEQ ID NO: 117971 - RNA, 19 nt, Artificial Sequence
  Description of Artificial Sequence: Synthetic oligonucleotide
ugacagaagacaauugauu

SEQ ID NO: 117972 - RNA, 19 nt, Artificial Sequence
  Description of Artificial Sequence: Synthetic oligonucleotide
aucgcugcaucacugaacu

SEQ ID NO: 117973 - RNA, 19 nt, Artificial Sequence
  Description of Artificial Sequence: Synthetic oligonucleotide
cuggaaucaggaaucuggg

SEQ ID NO: 117974 - RNA, 19 nt, Artificial Sequence
  Description of Artificial Sequence: Synthetic oligonucleotide
ugguccaauauguuaucag

SEQ ID NO: 117975 - RNA, 19 nt, Artificial Sequence
  Description of Artificial Sequence: Synthetic oligonucleotide
gaauucgagcuaaagagca

SEQ ID NO: 117976 - RNA, 19 nt, Artificial Sequence
  Description of Artificial Sequence: Synthetic oligonucleotide
acauguuaguucuggacca

SEQ ID NO: 117977 - RNA, 19 nt, Artificial Sequence
  Description of Artificial Sequence: Synthetic oligonucleotide
acaauagccuccaugcuuc

SEQ ID NO: 117978 - RNA, 19 nt, Artificial Sequence
  Description of Artificial Sequence: Synthetic oligonucleotide
uggaacgucaguugccaag

SEQ ID NO: 117979 - RNA, 19 nt, Artificial Sequence
  Description of Artificial Sequence: Synthetic oligonucleotide
uguuaacagcugcuguaag

SEQ ID NO: 117980 - RNA, 19 nt, Artificial Sequence
  Description of Artificial Sequence: Synthetic oligonucleotide
uagcacgugauucaauuau

SEQ ID NO: 117981 - RNA, 19 nt, Artificial Sequence
  Description of Artificial Sequence: Synthetic oligonucleotide
aaacaguuaauagcagcca

SEQ ID NO: 117982 - RNA, 19 nt, Artificial Sequence
  Description of Artificial Sequence: Synthetic oligonucleotide
uugaacuaagagagugacc

SEQ ID NO: 117983 - RNA, 19 nt, Artificial Sequence
  Description of Artificial Sequence: Synthetic oligonucleotide
aucuagaucacaagucccg

SEQ ID NO: 117984 - RNA, 19 nt, Artificial Sequence
  Description of Artificial Sequence: Synthetic oligonucleotide
uacaaguuauucuggacuu

SEQ ID NO: 117985 - RNA, 19 nt, Artificial Sequence
  Description of Artificial Sequence: Synthetic oligonucleotide
ucacauagggaaacucuac

SEQ ID NO: 117986 - RNA, 19 nt, Artificial Sequence
  Description of Artificial Sequence: Synthetic oligonucleotide
aauaugcaagucguaauuu

SEQ ID NO: 117987 - RNA, 19 nt, Artificial Sequence
  Description of Artificial Sequence: Synthetic oligonucleotide
cugugcuacuaccauagag

SEQ ID NO: 117988 - RNA, 19 nt, Artificial Sequence
  Description of Artificial Sequence: Synthetic oligonucleotide
aggcugaguagcuaucuag

SEQ ID NO: 117989 - RNA, 19 nt, Artificial Sequence
  Description of Artificial Sequence: Synthetic oligonucleotide
aaguucguaguaauuguga

SEQ ID NO: 117990 - RNA, 19 nt, Artificial Sequence
  Description of Artificial Sequence: Synthetic oligonucleotide
cugggauaguacaauguug

SEQ ID NO: 117991 - RNA, 19 nt, Artificial Sequence
  Description of Artificial Sequence: Synthetic oligonucleotide
uccccggagaguucgaacc

SEQ ID NO: 117992 - RNA, 19 nt, Artificial Sequence
  Description of Artificial Sequence: Synthetic oligonucleotide
caagacgcaugccauauuc

SEQ ID NO: 117993 - RNA, 19 nt, Artificial Sequence
  Description of Artificial Sequence: Synthetic oligonucleotide
cuuccugcaauggcaaucg

SEQ ID NO: 117994 - RNA, 19 nt, Artificial Sequence
  Description of Artificial Sequence: Synthetic oligonucleotide
aaggcguaaacaguuaaua

SEQ ID NO: 117995 - RNA, 19 nt, Artificial Sequence
  Description of Artificial Sequence: Synthetic oligonucleotide
ugccgugccaacgugaggc

SEQ ID NO: 117996 - RNA, 19 nt, Artificial Sequence
  Description of Artificial Sequence: Synthetic oligonucleotide
acuaacuguacgaucaagu

SEQ ID NO: 117997 - RNA, 19 nt, Artificial Sequence
  Description of Artificial Sequence: Synthetic oligonucleotide
gauuagauuccaguguguc

SEQ ID NO: 117998 - RNA, 19 nt, Artificial Sequence
  Description of Artificial Sequence: Synthetic oligonucleotide
agcaucaacuuucuuguaa

SEQ ID NO: 117999 - RNA, 19 nt, Artificial Sequence
  Description of Artificial Sequence: Synthetic oligonucleotide
ugcccacuuaaugagguag

SEQ ID NO: 118000 - RNA, 19 nt, Artificial Sequence
  Description of Artificial Sequence: Synthetic oligonucleotide
gaaguucguaguaauugug

SEQ ID NO: 118001 - RNA, 19 nt, Artificial Sequence
  Description of Artificial Sequence: Synthetic oligonucleotide
guacagacgaagcaauuca

SEQ ID NO: 118002 - RNA, 19 nt, Artificial Sequence
  Description of Artificial Sequence: Synthetic oligonucleotide
ugauuggcugcuagccagg

SEQ ID NO: 118003 - RNA, 19 nt, Artificial Sequence
  Description of Artificial Sequence: Synthetic oligonucleotide
uuagccuuagagccagacu

SEQ ID NO: 118004 - RNA, 19 nt, Artificial Sequence
  Description of Artificial Sequence: Synthetic oligonucleotide
cauacucuggacgaauaag

SEQ ID NO: 118005 - RNA, 19 nt, Artificial Sequence
  Description of Artificial Sequence: Synthetic oligonucleotide
guacugacaauguugcaga

SEQ ID NO: 118006 - RNA, 19 nt, Artificial Sequence
  Description of Artificial Sequence: Synthetic oligonucleotide
gacgaauaaggcguaaaca

SEQ ID NO: 118007 - RNA, 19 nt, Artificial Sequence
  Description of Artificial Sequence: Synthetic oligonucleotide
aauuugccgauugguuggg

SEQ ID NO: 118008 - RNA, 19 nt, Artificial Sequence
  Description of Artificial Sequence: Synthetic oligonucleotide
aucguguucaacacaauga

SEQ ID NO: 118009 - RNA, 19 nt, Artificial Sequence
  Description of Artificial Sequence: Synthetic oligonucleotide
uuggagcaugcauauauau

SEQ ID NO: 118010 - RNA, 19 nt, Artificial Sequence
  Description of Artificial Sequence: Synthetic oligonucleotide
ucuuaagcccuaagaggca

SEQ ID NO: 118011 - RNA, 19 nt, Artificial Sequence
  Description of Artificial Sequence: Synthetic oligonucleotide
ucagacuaacuguacgauc

SEQ ID NO: 118012 - RNA, 19 nt, Artificial Sequence
  Description of Artificial Sequence: Synthetic oligonucleotide
auaaggcguaaacaguuaa

SEQ ID NO: 118013 - RNA, 19 nt, Artificial Sequence
  Description of Artificial Sequence: Synthetic oligonucleotide
uagagaaguucguaguaau

SEQ ID NO: 118014 - RNA, 19 nt, Artificial Sequence
  Description of Artificial Sequence: Synthetic oligonucleotide
agcgaucuaagaauucuuc

SEQ ID NO: 118015 - RNA, 19 nt, Artificial Sequence
  Description of Artificial Sequence: Synthetic oligonucleotide
auugauggucauaugaaaa

SEQ ID NO: 118016 - RNA, 19 nt, Artificial Sequence
  Description of Artificial Sequence: Synthetic oligonucleotide
aagucguaauuuauguccu

SEQ ID NO: 118017 - RNA, 19 nt, Artificial Sequence
  Description of Artificial Sequence: Synthetic oligonucleotide
caguaaucgcugauguagc

SEQ ID NO: 118018 - RNA, 19 nt, Artificial Sequence
  Description of Artificial Sequence: Synthetic oligonucleotide
agcuaaagagcauucuuuu

SEQ ID NO: 118019 - RNA, 19 nt, Artificial Sequence
  Description of Artificial Sequence: Synthetic oligonucleotide
gguuacaaaggcugaguag

SEQ ID NO: 118020 - RNA, 19 nt, Artificial Sequence
  Description of Artificial Sequence: Synthetic oligonucleotide
aauggcaaucgcugaugga

SEQ ID NO: 118021 - RNA, 19 nt, Artificial Sequence
  Description of Artificial Sequence: Synthetic oligonucleotide
uuaaaguagccugacuuuu

SEQ ID NO: 118022 - RNA, 19 nt, Artificial Sequence
  Description of Artificial Sequence: Synthetic oligonucleotide
uaaggcguaaacaguuaau

SEQ ID NO: 118023 - RNA, 19 nt, Artificial Sequence
  Description of Artificial Sequence: Synthetic oligonucleotide
ccgacgguauaauaaaucc

SEQ ID NO: 118024 - RNA, 19 nt, Artificial Sequence
  Description of Artificial Sequence: Synthetic oligonucleotide
ucuggguuaaggcuucaua

SEQ ID NO: 118025 - RNA, 19 nt, Artificial Sequence
  Description of Artificial Sequence: Synthetic oligonucleotide
uaccauagagcugggaaac

SEQ ID NO: 118026 - RNA, 19 nt, Artificial Sequence
  Description of Artificial Sequence: Synthetic oligonucleotide
uuucuauggaguagucuua

SEQ ID NO: 118027 - RNA, 19 nt, Artificial Sequence
  Description of Artificial Sequence: Synthetic oligonucleotide
caucgaguagacguaaaac

SEQ ID NO: 118028 - RNA, 19 nt, Artificial Sequence
  Description of Artificial Sequence: Synthetic oligonucleotide
gagcuugaaagaguugacc

SEQ ID NO: 118029 - RNA, 19 nt, Artificial Sequence
  Description of Artificial Sequence: Synthetic oligonucleotide
caucuacauauucggagac

SEQ ID NO: 118030 - RNA, 19 nt, Artificial Sequence
  Description of Artificial Sequence: Synthetic oligonucleotide
aucgacaggauccaacauu

SEQ ID NO: 118031 - RNA, 19 nt, Artificial Sequence
  Description of Artificial Sequence: Synthetic oligonucleotide
acguaaaaccuuaucauaa

SEQ ID NO: 118032 - RNA, 19 nt, Artificial Sequence
  Description of Artificial Sequence: Synthetic oligonucleotide
auauuccuagguagaggcc

SEQ ID NO: 118033 - RNA, 19 nt, Artificial Sequence
  Description of Artificial Sequence: Synthetic oligonucleotide
guagcuaucuagaucacaa

SEQ ID NO: 118034 - RNA, 19 nt, Artificial Sequence
  Description of Artificial Sequence: Synthetic oligonucleotide
ucgguaauuguggcgguag

SEQ ID NO: 118035 - RNA, 19 nt, Artificial Sequence
  Description of Artificial Sequence: Synthetic oligonucleotide
uaacaguugccuugcuucu

SEQ ID NO: 118036 - RNA, 19 nt, Artificial Sequence
  Description of Artificial Sequence: Synthetic oligonucleotide
auggcaaucgcugauggau

SEQ ID NO: 118037 - RNA, 19 nt, Artificial Sequence
  Description of Artificial Sequence: Synthetic oligonucleotide
aguucgaaccucucugcca

SEQ ID NO: 118038 - RNA, 19 nt, Artificial Sequence
  Description of Artificial Sequence: Synthetic oligonucleotide
guuucuauggaguagucuu

SEQ ID NO: 118039 - RNA, 19 nt, Artificial Sequence
  Description of Artificial Sequence: Synthetic oligonucleotide
gaguucgaaccucucugcc

SEQ ID NO: 118040 - RNA, 19 nt, Artificial Sequence
  Description of Artificial Sequence: Synthetic oligonucleotide
guaguuuaugauccugaca

SEQ ID NO: 118041 - RNA, 19 nt, Artificial Sequence
  Description of Artificial Sequence: Synthetic oligonucleotide
guucaacacaaugaacggc

SEQ ID NO: 118042 - RNA, 19 nt, Artificial Sequence
  Description of Artificial Sequence: Synthetic oligonucleotide
uucggagaccaauuccaca

SEQ ID NO: 118043 - RNA, 19 nt, Artificial Sequence
  Description of Artificial Sequence: Synthetic oligonucleotide
guagacguaaaaccuuauc

SEQ ID NO: 118044 - RNA, 19 nt, Artificial Sequence
  Description of Artificial Sequence: Synthetic oligonucleotide
guccaauauguuaucagac

SEQ ID NO: 118045 - RNA, 19 nt, Artificial Sequence
  Description of Artificial Sequence: Synthetic oligonucleotide
guaagacaagagcagggga

SEQ ID NO: 118046 - RNA, 19 nt, Artificial Sequence
  Description of Artificial Sequence: Synthetic oligonucleotide
uugccgauugguuggggca

SEQ ID NO: 118047 - RNA, 19 nt, Artificial Sequence
  Description of Artificial Sequence: Synthetic oligonucleotide
uuugguccaauauguuauc

SEQ ID NO: 118048 - RNA, 19 nt, Artificial Sequence
  Description of Artificial Sequence: Synthetic oligonucleotide
uauuugguggccaguuaua

SEQ ID NO: 118049 - RNA, 19 nt, Artificial Sequence
  Description of Artificial Sequence: Synthetic oligonucleotide
agacgcaugccauauucaa

SEQ ID NO: 118050 - RNA, 19 nt, Artificial Sequence
  Description of Artificial Sequence: Synthetic oligonucleotide
uggcgguagaugugaaaag

SEQ ID NO: 118051 - RNA, 19 nt, Artificial Sequence
  Description of Artificial Sequence: Synthetic oligonucleotide
aagucccucaaagacuggu

SEQ ID NO: 118052 - RNA, 19 nt, Artificial Sequence
  Description of Artificial Sequence: Synthetic oligonucleotide
aggugaauaugcaagucgu

SEQ ID NO: 118053 - RNA, 19 nt, Artificial Sequence
  Description of Artificial Sequence: Synthetic oligonucleotide
caugccgugccaacgugag

SEQ ID NO: 118054 - RNA, 19 nt, Artificial Sequence
  Description of Artificial Sequence: Synthetic oligonucleotide
ugcacacaauauacccugc

SEQ ID NO: 118055 - RNA, 19 nt, Artificial Sequence
  Description of Artificial Sequence: Synthetic oligonucleotide
auagagaaguucguaguaa

SEQ ID NO: 118056 - RNA, 19 nt, Artificial Sequence
  Description of Artificial Sequence: Synthetic oligonucleotide
aguugaccagcucccaaga

SEQ ID NO: 118057 - RNA, 19 nt, Artificial Sequence
  Description of Artificial Sequence: Synthetic oligonucleotide
aauauacccugcugugcua

SEQ ID NO: 118058 - RNA, 19 nt, Artificial Sequence
  Description of Artificial Sequence: Synthetic oligonucleotide
cuaagaggcaccaaucggu

SEQ ID NO: 118059 - RNA, 19 nt, Artificial Sequence
  Description of Artificial Sequence: Synthetic oligonucleotide
gaaggugaauaugcaaguc

SEQ ID NO: 118060 - RNA, 19 nt, Artificial Sequence
  Description of Artificial Sequence: Synthetic oligonucleotide
agcuugagaauaauauaca

SEQ ID NO: 118061 - RNA, 19 nt, Artificial Sequence
  Description of Artificial Sequence: Synthetic oligonucleotide
guccuuauaagaccacauc

SEQ ID NO: 118062 - RNA, 19 nt, Artificial Sequence
  Description of Artificial Sequence: Synthetic oligonucleotide
uugguccaauauguuauca

SEQ ID NO: 118063 - RNA, 19 nt, Artificial Sequence
  Description of Artificial Sequence: Synthetic oligonucleotide
aaucgguuacaaaggcuga

SEQ ID NO: 118064 - RNA, 19 nt, Artificial Sequence
  Description of Artificial Sequence: Synthetic oligonucleotide
auaagaccacauccguagu

SEQ ID NO: 118065 - RNA, 19 nt, Artificial Sequence
  Description of Artificial Sequence: Synthetic oligonucleotide
agguauuauggaaagugaa

SEQ ID NO: 118066 - RNA, 19 nt, Artificial Sequence
  Description of Artificial Sequence: Synthetic oligonucleotide
ggauaguacaauguuguga

SEQ ID NO: 118067 - RNA, 19 nt, Artificial Sequence
  Description of Artificial Sequence: Synthetic oligonucleotide
auaguacaauguugugacu

SEQ ID NO: 118068 - RNA, 19 nt, Artificial Sequence
  Description of Artificial Sequence: Synthetic oligonucleotide
aacgagugcuggcaauuuu

SEQ ID NO: 118069 - RNA, 19 nt, Artificial Sequence
  Description of Artificial Sequence: Synthetic oligonucleotide
ucguaauuuauguccuguu

SEQ ID NO: 118070 - RNA, 19 nt, Artificial Sequence
  Description of Artificial Sequence: Synthetic oligonucleotide
ggcgaauucgagcuaaaga

SEQ ID NO: 118071 - RNA, 19 nt, Artificial Sequence
  Description of Artificial Sequence: Synthetic oligonucleotide
cuuauaagaccacauccgu

SEQ ID NO: 118072 - RNA, 19 nt, Artificial Sequence
  Description of Artificial Sequence: Synthetic oligonucleotide
gucauaagguccacagccc

SEQ ID NO: 118073 - RNA, 19 nt, Artificial Sequence
  Description of Artificial Sequence: Synthetic oligonucleotide
accacauccguaguuuaug

SEQ ID NO: 118074 - RNA, 19 nt, Artificial Sequence
  Description of Artificial Sequence: Synthetic oligonucleotide
ggacgaauaaggcguaaac

SEQ ID NO: 118075 - RNA, 19 nt, Artificial Sequence
  Description of Artificial Sequence: Synthetic oligonucleotide
guucgaaccucucugccaa

SEQ ID NO: 118076 - RNA, 19 nt, Artificial Sequence
  Description of Artificial Sequence: Synthetic oligonucleotide
aucgguuacaaaggcugag

SEQ ID NO: 118077 - RNA, 19 nt, Artificial Sequence
  Description of Artificial Sequence: Synthetic oligonucleotide
ugaggcgaauucgagcuaa

SEQ ID NO: 118078 - RNA, 19 nt, Artificial Sequence
  Description of Artificial Sequence: Synthetic oligonucleotide
acgucaguugccaagcacu

SEQ ID NO: 118079 - RNA, 19 nt, Artificial Sequence
  Description of Artificial Sequence: Synthetic oligonucleotide
gauugguuggggcaacugu

SEQ ID NO: 118080 - RNA, 19 nt, Artificial Sequence
  Description of Artificial Sequence: Synthetic oligonucleotide
augcaagucguaauuuaug

SEQ ID NO: 118081 - RNA, 19 nt, Artificial Sequence
  Description of Artificial Sequence: Synthetic oligonucleotide
aagacgcaugccauauuca

SEQ ID NO: 118082 - RNA, 19 nt, Artificial Sequence
  Description of Artificial Sequence: Synthetic oligonucleotide
caccgucccagcauaaauc

SEQ ID NO: 118083 - RNA, 19 nt, Artificial Sequence
  Description of Artificial Sequence: Synthetic oligonucleotide
aagcauagagaaguucgua

SEQ ID NO: 118084 - RNA, 19 nt, Artificial Sequence
  Description of Artificial Sequence: Synthetic oligonucleotide
cauaaaucgacaggaucca

SEQ ID NO: 118085 - RNA, 19 nt, Artificial Sequence
  Description of Artificial Sequence: Synthetic oligonucleotide
uucaguaaucgcugaugua

SEQ ID NO: 118086 - RNA, 19 nt, Artificial Sequence
  Description of Artificial Sequence: Synthetic oligonucleotide
ugagcggaucaagcgaucu

SEQ ID NO: 118087 - RNA, 19 nt, Artificial Sequence
  Description of Artificial Sequence: Synthetic oligonucleotide
gcuaucuagaucacaaguc

SEQ ID NO: 118088 - RNA, 19 nt, Artificial Sequence
  Description of Artificial Sequence: Synthetic oligonucleotide
gccaguuaggcaaaggaac

SEQ ID NO: 118089 - RNA, 19 nt, Artificial Sequence
  Description of Artificial Sequence: Synthetic oligonucleotide
aucagacuaacuguacgau

SEQ ID NO: 118090 - RNA, 19 nt, Artificial Sequence
  Description of Artificial Sequence: Synthetic oligonucleotide
agggaagcuuaaaagucug

SEQ ID NO: 118091 - RNA, 19 nt, Artificial Sequence
  Description of Artificial Sequence: Synthetic oligonucleotide
gugucaacuggaacgucag

SEQ ID NO: 118092 - RNA, 19 nt, Artificial Sequence
  Description of Artificial Sequence: Synthetic oligonucleotide
aauucgagcuaaagagcau

SEQ ID NO: 118093 - RNA, 19 nt, Artificial Sequence
  Description of Artificial Sequence: Synthetic oligonucleotide
aggauccaacauugacuuc

SEQ ID NO: 118094 - RNA, 19 nt, Artificial Sequence
  Description of Artificial Sequence: Synthetic oligonucleotide
uuccaguacugacaauguu

SEQ ID NO: 118095 - RNA, 19 nt, Artificial Sequence
  Description of Artificial Sequence: Synthetic oligonucleotide
uggaucaugccgugccaac

SEQ ID NO: 118096 - RNA, 19 nt, Artificial Sequence
  Description of Artificial Sequence: Synthetic oligonucleotide
ucgagcuaaagagcauucu

SEQ ID NO: 118097 - RNA, 19 nt, Artificial Sequence
  Description of Artificial Sequence: Synthetic oligonucleotide
ggcgguagaugugaaaagc

SEQ ID NO: 118098 - RNA, 19 nt, Artificial Sequence
  Description of Artificial Sequence: Synthetic oligonucleotide
cuucaguaaucgcugaugu

SEQ ID NO: 118099 - RNA, 19 nt, Artificial Sequence
  Description of Artificial Sequence: Synthetic oligonucleotide
auucgagcuaaagagcauu

SEQ ID NO: 118100 - RNA, 19 nt, Artificial Sequence
  Description of Artificial Sequence: Synthetic oligonucleotide
aucaugccgugccaacgug

SEQ ID NO: 118101 - RNA, 19 nt, Artificial Sequence
  Description of Artificial Sequence: Synthetic oligonucleotide
gccauauucaaacaucacu

SEQ ID NO: 118102 - RNA, 19 nt, Artificial Sequence
  Description of Artificial Sequence: Synthetic oligonucleotide
agcggaucaagcgaucuaa

SEQ ID NO: 118103 - RNA, 19 nt, Artificial Sequence
  Description of Artificial Sequence: Synthetic oligonucleotide
cgaauucgagcuaaagagc

SEQ ID NO: 118104 - RNA, 19 nt, Artificial Sequence
  Description of Artificial Sequence: Synthetic oligonucleotide
uuucgguaauuguggcggu

SEQ ID NO: 118105 - RNA, 19 nt, Artificial Sequence
  Description of Artificial Sequence: Synthetic oligonucleotide
ugagccggaggucuuuguu

SEQ ID NO: 118106 - RNA, 19 nt, Artificial Sequence
  Description of Artificial Sequence: Synthetic oligonucleotide
gaaucuggguuaaggcuuc

SEQ ID NO: 118107 - RNA, 19 nt, Artificial Sequence
  Description of Artificial Sequence: Synthetic oligonucleotide
uacugauguccuuucccua

SEQ ID NO: 118108 - RNA, 19 nt, Artificial Sequence
  Description of Artificial Sequence: Synthetic oligonucleotide
ucccgacgguauaauaaau

SEQ ID NO: 118109 - RNA, 19 nt, Artificial Sequence
  Description of Artificial Sequence: Synthetic oligonucleotide
agccagacucaaaauauau

SEQ ID NO: 118110 - RNA, 19 nt, Artificial Sequence
  Description of Artificial Sequence: Synthetic oligonucleotide
gaguagacguaaaaccuua

SEQ ID NO: 118111 - RNA, 19 nt, Artificial Sequence
  Description of Artificial Sequence: Synthetic oligonucleotide
uggacgaauaaggcguaaa

SEQ ID NO: 118112 - RNA, 19 nt, Artificial Sequence
  Description of Artificial Sequence: Synthetic oligonucleotide
ucggcagaucaggaaacga

SEQ ID NO: 118113 - RNA, 19 nt, Artificial Sequence
  Description of Artificial Sequence: Synthetic oligonucleotide
cuaagagagugaccaucuc

SEQ ID NO: 118114 - RNA, 19 nt, Artificial Sequence
  Description of Artificial Sequence: Synthetic oligonucleotide
cucggcagaucaggaaacg

SEQ ID NO: 118115 - RNA, 19 nt, Artificial Sequence
  Description of Artificial Sequence: Synthetic oligonucleotide
guucguaguaauugugagu

SEQ ID NO: 118116 - RNA, 19 nt, Artificial Sequence
  Description of Artificial Sequence: Synthetic oligonucleotide
ucgcugauguagccagcug

SEQ ID NO: 118117 - RNA, 19 nt, Artificial Sequence
  Description of Artificial Sequence: Synthetic oligonucleotide
caacgugaggcgaauucga

SEQ ID NO: 118118 - RNA, 19 nt, Artificial Sequence
  Description of Artificial Sequence: Synthetic oligonucleotide
guaacaccgucccagcaua

SEQ ID NO: 118119 - RNA, 19 nt, Artificial Sequence
  Description of Artificial Sequence: Synthetic oligonucleotide
aggaaacgagugcuggcaa

SEQ ID NO: 118120 - RNA, 19 nt, Artificial Sequence
  Description of Artificial Sequence: Synthetic oligonucleotide
acauauucggagaccaauu

SEQ ID NO: 118121 - RNA, 19 nt, Artificial Sequence
  Description of Artificial Sequence: Synthetic oligonucleotide
aagcgaucuaagaauucuu

SEQ ID NO: 118122 - RNA, 19 nt, Artificial Sequence
  Description of Artificial Sequence: Synthetic oligonucleotide
gaacggcaagacugagggc

SEQ ID NO: 118123 - RNA, 19 nt, Artificial Sequence
  Description of Artificial Sequence: Synthetic oligonucleotide
ucgaaccucucugccaaga

SEQ ID NO: 118124 - RNA, 19 nt, Artificial Sequence
  Description of Artificial Sequence: Synthetic oligonucleotide
cuuaaaguagccugacuuu

SEQ ID NO: 118125 - RNA, 19 nt, Artificial Sequence
  Description of Artificial Sequence: Synthetic oligonucleotide
ggaucaugccgugccaacg

SEQ ID NO: 118126 - RNA, 19 nt, Artificial Sequence
  Description of Artificial Sequence: Synthetic oligonucleotide
agguaacaccgucccagca

SEQ ID NO: 118127 - RNA, 19 nt, Artificial Sequence
  Description of Artificial Sequence: Synthetic oligonucleotide
aguaugggagccauaccau

SEQ ID NO: 118128 - RNA, 19 nt, Artificial Sequence
  Description of Artificial Sequence: Synthetic oligonucleotide
aaacgagugcuggcaauuu

SEQ ID NO: 118129 - RNA, 19 nt, Artificial Sequence
  Description of Artificial Sequence: Synthetic oligonucleotide
acgauccgaaggcccuugg

SEQ ID NO: 118130 - RNA, 19 nt, Artificial Sequence
  Description of Artificial Sequence: Synthetic oligonucleotide
uuguucacagggacauauu

SEQ ID NO: 118131 - RNA, 19 nt, Artificial Sequence
  Description of Artificial Sequence: Synthetic oligonucleotide
gcaagucguaauuuauguc

SEQ ID NO: 118132 - RNA, 19 nt, Artificial Sequence
  Description of Artificial Sequence: Synthetic oligonucleotide
agacugguguuaagggaag

SEQ ID NO: 118133 - RNA, 19 nt, Artificial Sequence
  Description of Artificial Sequence: Synthetic oligonucleotide
agugaugauacaaguuauu

SEQ ID NO: 118134 - RNA, 19 nt, Artificial Sequence
  Description of Artificial Sequence: Synthetic oligonucleotide
uucgaaccucucugccaag

SEQ ID NO: 118135 - RNA, 19 nt, Artificial Sequence
  Description of Artificial Sequence: Synthetic oligonucleotide
cgacgguauaauaaauccc

SEQ ID NO: 118136 - RNA, 19 nt, Artificial Sequence
  Description of Artificial Sequence: Synthetic oligonucleotide
aggcgaauucgagcuaaag

SEQ ID NO: 118137 - RNA, 19 nt, Artificial Sequence
  Description of Artificial Sequence: Synthetic oligonucleotide
agccaguuaggcaaaggaa

SEQ ID NO: 118138 - RNA, 19 nt, Artificial Sequence
  Description of Artificial Sequence: Synthetic oligonucleotide
gccaacaaccauuagguau

SEQ ID NO: 118139 - RNA, 19 nt, Artificial Sequence
  Description of Artificial Sequence: Synthetic oligonucleotide
acgguauaauaaaucccgu

SEQ ID NO: 118140 - RNA, 19 nt, Artificial Sequence
  Description of Artificial Sequence: Synthetic oligonucleotide
gccaguuauaacaagccaa

SEQ ID NO: 118141 - RNA, 19 nt, Artificial Sequence
  Description of Artificial Sequence: Synthetic oligonucleotide
auacacaccucugcacaca

SEQ ID NO: 118142 - RNA, 19 nt, Artificial Sequence
  Description of Artificial Sequence: Synthetic oligonucleotide
uaacaccgucccagcauaa

SEQ ID NO: 118143 - RNA, 19 nt, Artificial Sequence
  Description of Artificial Sequence: Synthetic oligonucleotide
caggaaacgagugcuggca

SEQ ID NO: 118144 - RNA, 19 nt, Artificial Sequence
  Description of Artificial Sequence: Synthetic oligonucleotide
ugugagucauaagguccac

SEQ ID NO: 118145 - RNA, 19 nt, Artificial Sequence
  Description of Artificial Sequence: Synthetic oligonucleotide
auccguaguuuaugauccu

SEQ ID NO: 118146 - RNA, 19 nt, Artificial Sequence
  Description of Artificial Sequence: Synthetic oligonucleotide
auuugccgauugguugggg

SEQ ID NO: 118147 - RNA, 19 nt, Artificial Sequence
  Description of Artificial Sequence: Synthetic oligonucleotide
agagaaguucguaguaauu

SEQ ID NO: 118148 - RNA, 19 nt, Artificial Sequence
  Description of Artificial Sequence: Synthetic oligonucleotide
agaccacauccguaguuua

SEQ ID NO: 118149 - RNA, 19 nt, Artificial Sequence
  Description of Artificial Sequence: Synthetic oligonucleotide
gaacgucaguugccaagca

SEQ ID NO: 118150 - RNA, 19 nt, Artificial Sequence
  Description of Artificial Sequence: Synthetic oligonucleotide
acaagucccgacgguauaa

SEQ ID NO: 118151 - RNA, 19 nt, Artificial Sequence
  Description of Artificial Sequence: Synthetic oligonucleotide
augccgugccaacgugagg

SEQ ID NO: 118152 - RNA, 19 nt, Artificial Sequence
  Description of Artificial Sequence: Synthetic oligonucleotide
cccgacgguauaauaaauc

SEQ ID NO: 118153 - RNA, 19 nt, Artificial Sequence
  Description of Artificial Sequence: Synthetic oligonucleotide
ggaguaugggagccauacc

SEQ ID NO: 118154 - RNA, 19 nt, Artificial Sequence
  Description of Artificial Sequence: Synthetic oligonucleotide
cuagcacgugauucaauua

SEQ ID NO: 118155 - RNA, 19 nt, Artificial Sequence
  Description of Artificial Sequence: Synthetic oligonucleotide
gacgcaugccauauucaaa

SEQ ID NO: 118156 - RNA, 19 nt, Artificial Sequence
  Description of Artificial Sequence: Synthetic oligonucleotide
aacaaccauuagguauuau

SEQ ID NO: 118157 - RNA, 19 nt, Artificial Sequence
  Description of Artificial Sequence: Synthetic oligonucleotide
guaacuugaugcacuuaaa

SEQ ID NO: 118158 - RNA, 19 nt, Artificial Sequence
  Description of Artificial Sequence: Synthetic oligonucleotide
cuguacgaucaaguccagc

SEQ ID NO: 118159 - RNA, 19 nt, Artificial Sequence
  Description of Artificial Sequence: Synthetic oligonucleotide
gcauagagaaguucguagu

SEQ ID NO: 118160 - RNA, 19 nt, Artificial Sequence
  Description of Artificial Sequence: Synthetic oligonucleotide
cacuggacuccuuaguagu

SEQ ID NO: 118161 - RNA, 19 nt, Artificial Sequence
  Description of Artificial Sequence: Synthetic oligonucleotide
gccaacgugaggcgaauuc

SEQ ID NO: 118162 - RNA, 19 nt, Artificial Sequence
  Description of Artificial Sequence: Synthetic oligonucleotide
gucguaauuuauguccugu

SEQ ID NO: 118163 - RNA, 19 nt, Artificial Sequence
  Description of Artificial Sequence: Synthetic oligonucleotide
cucguuuuggagcaugcau

SEQ ID NO: 118164 - RNA, 19 nt, Artificial Sequence
  Description of Artificial Sequence: Synthetic oligonucleotide
acugacuugcccacuuaau

SEQ ID NO: 118165 - RNA, 19 nt, Artificial Sequence
  Description of Artificial Sequence: Synthetic oligonucleotide
ugccgauugguuggggcaa

SEQ ID NO: 118166 - RNA, 19 nt, Artificial Sequence
  Description of Artificial Sequence: Synthetic oligonucleotide
caagcacggggccgguccc

SEQ ID NO: 118167 - RNA, 19 nt, Artificial Sequence
  Description of Artificial Sequence: Synthetic oligonucleotide
caguuaauagcagccaggu

SEQ ID NO: 118168 - RNA, 19 nt, Artificial Sequence
  Description of Artificial Sequence: Synthetic oligonucleotide
acgagugcuggcaauuuua

SEQ ID NO: 118169 - RNA, 19 nt, Artificial Sequence
  Description of Artificial Sequence: Synthetic oligonucleotide
agccuuagagccagacuca

SEQ ID NO: 118170 - RNA, 19 nt, Artificial Sequence
  Description of Artificial Sequence: Synthetic oligonucleotide
acguuuagccuuagagcca

SEQ ID NO: 118171 - RNA, 19 nt, Artificial Sequence
  Description of Artificial Sequence: Synthetic oligonucleotide
gaucacaagucccgacggu

SEQ ID NO: 118172 - RNA, 19 nt, Artificial Sequence
  Description of Artificial Sequence: Synthetic oligonucleotide
aguagacguaaaaccuuau

SEQ ID NO: 118173 - RNA, 19 nt, Artificial Sequence
  Description of Artificial Sequence: Synthetic oligonucleotide
ccucauuaugcagauucac

SEQ ID NO: 118174 - RNA, 19 nt, Artificial Sequence
  Description of Artificial Sequence: Synthetic oligonucleotide
cuacauauucggagaccaa

SEQ ID NO: 118175 - RNA, 19 nt, Artificial Sequence
  Description of Artificial Sequence: Synthetic oligonucleotide
ggcucaagggccauauaca

SEQ ID NO: 118176 - RNA, 19 nt, Artificial Sequence
  Description of Artificial Sequence: Synthetic oligonucleotide
gaguagcuaucuagaucac

SEQ ID NO: 118177 - RNA, 19 nt, Artificial Sequence
  Description of Artificial Sequence: Synthetic oligonucleotide
uucgguaauuguggcggua

SEQ ID NO: 118178 - RNA, 19 nt, Artificial Sequence
  Description of Artificial Sequence: Synthetic oligonucleotide
cacugacuugcccacuuaa

SEQ ID NO: 118179 - RNA, 19 nt, Artificial Sequence
  Description of Artificial Sequence: Synthetic oligonucleotide
gcgaucuaagaauucuucu

SEQ ID NO: 118180 - RNA, 19 nt, Artificial Sequence
  Description of Artificial Sequence: Synthetic oligonucleotide
gagccagacucaaaauaua

SEQ ID NO: 118181 - RNA, 19 nt, Artificial Sequence
  Description of Artificial Sequence: Synthetic oligonucleotide
gaaacgagugcuggcaauu

SEQ ID NO: 118182 - RNA, 19 nt, Artificial Sequence
  Description of Artificial Sequence: Synthetic oligonucleotide
cugagcggaucaagcgauc

SEQ ID NO: 118183 - RNA, 19 nt, Artificial Sequence
  Description of Artificial Sequence: Synthetic oligonucleotide
guccagcuugauuauuaua

SEQ ID NO: 118184 - RNA, 19 nt, Artificial Sequence
  Description of Artificial Sequence: Synthetic oligonucleotide
uucucacguuuagccuuag

SEQ ID NO: 118185 - RNA, 19 nt, Artificial Sequence
  Description of Artificial Sequence: Synthetic oligonucleotide
guccucguuuuggagcaug

SEQ ID NO: 118186 - RNA, 19 nt, Artificial Sequence
  Description of Artificial Sequence: Synthetic oligonucleotide
cugugcgaugcaguagguc

SEQ ID NO: 118187 - RNA, 19 nt, Artificial Sequence
  Description of Artificial Sequence: Synthetic oligonucleotide
gugagucauaagguccaca

SEQ ID NO: 118188 - RNA, 19 nt, Artificial Sequence
  Description of Artificial Sequence: Synthetic oligonucleotide
cauugacuuccaguacuga

SEQ ID NO: 118189 - RNA, 19 nt, Artificial Sequence
  Description of Artificial Sequence: Synthetic oligonucleotide
gagcggaucaagcgaucua

SEQ ID NO: 118190 - RNA, 19 nt, Artificial Sequence
  Description of Artificial Sequence: Synthetic oligonucleotide
caguacugacaauguugca

SEQ ID NO: 118191 - RNA, 19 nt, Artificial Sequence
  Description of Artificial Sequence: Synthetic oligonucleotide
caacaucgaguagacguaa

SEQ ID NO: 118192 - RNA, 19 nt, Artificial Sequence
  Description of Artificial Sequence: Synthetic oligonucleotide
gcuggcaauuuuauacaca

SEQ ID NO: 118193 - RNA, 19 nt, Artificial Sequence
  Description of Artificial Sequence: Synthetic oligonucleotide
cagguacagacgaagcaau

SEQ ID NO: 118194 - RNA, 19 nt, Artificial Sequence
  Description of Artificial Sequence: Synthetic oligonucleotide
gguaacaccgucccagcau

SEQ ID NO: 118195 - RNA, 19 nt, Artificial Sequence
  Description of Artificial Sequence: Synthetic oligonucleotide
cagggcgaucagacacugc

SEQ ID NO: 118196 - RNA, 19 nt, Artificial Sequence
  Description of Artificial Sequence: Synthetic oligonucleotide
ccucuuaggagaugcucca

SEQ ID NO: 118197 - RNA, 19 nt, Artificial Sequence
  Description of Artificial Sequence: Synthetic oligonucleotide
ccaacaaccauuagguauu

SEQ ID NO: 118198 - RNA, 19 nt, Artificial Sequence
  Description of Artificial Sequence: Synthetic oligonucleotide
gccgugccaacgugaggcg

SEQ ID NO: 118199 - RNA, 19 nt, Artificial Sequence
  Description of Artificial Sequence: Synthetic oligonucleotide
ccacauccguaguuuauga

SEQ ID NO: 118200 - RNA, 19 nt, Artificial Sequence
  Description of Artificial Sequence: Synthetic oligonucleotide
cauguuaguucuggaccaa

SEQ ID NO: 118201 - RNA, 19 nt, Artificial Sequence
  Description of Artificial Sequence: Synthetic oligonucleotide
acucgccaucauaauuccu

SEQ ID NO: 118202 - RNA, 19 nt, Artificial Sequence
  Description of Artificial Sequence: Synthetic oligonucleotide
cgugaggcgaauucgagcu

SEQ ID NO: 118203 - RNA, 19 nt, Artificial Sequence
  Description of Artificial Sequence: Synthetic oligonucleotide
ggucccgacucuccuguuc

SEQ ID NO: 118204 - RNA, 19 nt, Artificial Sequence
  Description of Artificial Sequence: Synthetic oligonucleotide
ucccgacucuccuguucuc

SEQ ID NO: 118205 - RNA, 19 nt, Artificial Sequence
  Description of Artificial Sequence: Synthetic oligonucleotide
ucgcugcaucacugaacuc

SEQ ID NO: 118206 - RNA, 19 nt, Artificial Sequence
  Description of Artificial Sequence: Synthetic oligonucleotide
guugaccagcucccaagau

SEQ ID NO: 118207 - RNA, 19 nt, Artificial Sequence
  Description of Artificial Sequence: Synthetic oligonucleotide
aggcccauggaaggugaau

SEQ ID NO: 118208 - RNA, 19 nt, Artificial Sequence
  Description of Artificial Sequence: Synthetic oligonucleotide
gggcacgauccgaaggccc

SEQ ID NO: 118209 - RNA, 19 nt, Artificial Sequence
  Description of Artificial Sequence: Synthetic oligonucleotide
gggcgaucagacacugccc

SEQ ID NO: 118210 - RNA, 19 nt, Artificial Sequence
  Description of Artificial Sequence: Synthetic oligonucleotide
cacauccguaguuuaugau

SEQ ID NO: 118211 - RNA, 19 nt, Artificial Sequence
  Description of Artificial Sequence: Synthetic oligonucleotide
ggugaauaugcaagucgua

SEQ ID NO: 118212 - RNA, 19 nt, Artificial Sequence
  Description of Artificial Sequence: Synthetic oligonucleotide
cugaucaauagaggaguau

SEQ ID NO: 118213 - RNA, 19 nt, Artificial Sequence
  Description of Artificial Sequence: Synthetic oligonucleotide
cacaagucccgacgguaua

SEQ ID NO: 118214 - RNA, 19 nt, Artificial Sequence
  Description of Artificial Sequence: Synthetic oligonucleotide
gguaauuguggcgguagau

SEQ ID NO: 118215 - RNA, 19 nt, Artificial Sequence
  Description of Artificial Sequence: Synthetic oligonucleotide
gagaccaauuccacagcuu

SEQ ID NO: 118216 - RNA, 19 nt, Artificial Sequence
  Description of Artificial Sequence: Synthetic oligonucleotide
guaaaccagguaacaccgu

SEQ ID NO: 118217 - RNA, 19 nt, Artificial Sequence
  Description of Artificial Sequence: Synthetic oligonucleotide
gaccacauccguaguuuau

SEQ ID NO: 118218 - RNA, 19 nt, Artificial Sequence
  Description of Artificial Sequence: Synthetic oligonucleotide
cccguguugccuugucaac

SEQ ID NO: 118219 - RNA, 19 nt, Artificial Sequence
  Description of Artificial Sequence: Synthetic oligonucleotide
cgaauaaggcguaaacagu

SEQ ID NO: 118220 - RNA, 19 nt, Artificial Sequence
  Description of Artificial Sequence: Synthetic oligonucleotide
cuggaacgucaguugccaa

SEQ ID NO: 118221 - RNA, 19 nt, Artificial Sequence
  Description of Artificial Sequence: Synthetic oligonucleotide
ggaaacgagugcuggcaau

SEQ ID NO: 118222 - RNA, 19 nt, Artificial Sequence
  Description of Artificial Sequence: Synthetic oligonucleotide
gaggcgaauucgagcuaaa

SEQ ID NO: 118223 - RNA, 19 nt, Artificial Sequence
  Description of Artificial Sequence: Synthetic oligonucleotide
gugaggcgaauucgagcua

SEQ ID NO: 118224 - RNA, 19 nt, Artificial Sequence
  Description of Artificial Sequence: Synthetic oligonucleotide
cuccaauccccggagaguu

SEQ ID NO: 118225 - RNA, 19 nt, Artificial Sequence
  Description of Artificial Sequence: Synthetic oligonucleotide
gcgaucagacacugcccca

SEQ ID NO: 118226 - RNA, 19 nt, Artificial Sequence
  Description of Artificial Sequence: Synthetic oligonucleotide
aggcaccaaucgguuacaa

SEQ ID NO: 118227 - RNA, 19 nt, Artificial Sequence
  Description of Artificial Sequence: Synthetic oligonucleotide
cagggacauauuccaacau

SEQ ID NO: 118228 - RNA, 19 nt, Artificial Sequence
  Description of Artificial Sequence: Synthetic oligonucleotide
caaaaccacuagccuuugu

SEQ ID NO: 118229 - RNA, 19 nt, Artificial Sequence
  Description of Artificial Sequence: Synthetic oligonucleotide
ugccaacgugaggcgaauu

SEQ ID NO: 118230 - RNA, 19 nt, Artificial Sequence
  Description of Artificial Sequence: Synthetic oligonucleotide
gcugaucaauagaggagua

SEQ ID NO: 118231 - RNA, 19 nt, Artificial Sequence
  Description of Artificial Sequence: Synthetic oligonucleotide
uguccucguuuuggagcau

SEQ ID NO: 118232 - RNA, 19 nt, Artificial Sequence
  Description of Artificial Sequence: Synthetic oligonucleotide
cagcuugaacuaagagagu

SEQ ID NO: 118233 - RNA, 19 nt, Artificial Sequence
  Description of Artificial Sequence: Synthetic oligonucleotide
agcacggggccggucccga

SEQ ID NO: 118234 - RNA, 19 nt, Artificial Sequence
  Description of Artificial Sequence: Synthetic oligonucleotide
ggcuucaguaaucgcugau

SEQ ID NO: 118235 - RNA, 19 nt, Artificial Sequence
  Description of Artificial Sequence: Synthetic oligonucleotide
gugcacucgccaucauaau

SEQ ID NO: 118236 - RNA, 19 nt, Artificial Sequence
  Description of Artificial Sequence: Synthetic oligonucleotide
ggcacgauccgaaggcccu

SEQ ID NO: 118237 - RNA, 19 nt, Artificial Sequence
  Description of Artificial Sequence: Synthetic oligonucleotide
cgauugguuggggcaacug

SEQ ID NO: 118238 - RNA, 19 nt, Artificial Sequence
  Description of Artificial Sequence: Synthetic oligonucleotide
cccggagaguucgaaccuc

SEQ ID NO: 118239 - RNA, 19 nt, Artificial Sequence
  Description of Artificial Sequence: Synthetic oligonucleotide
cgugccaacgugaggcgaa

SEQ ID NO: 118240 - RNA, 19 nt, Artificial Sequence
  Description of Artificial Sequence: Synthetic oligonucleotide
ccgucccagcauaaaucga

SEQ ID NO: 118241 - RNA, 19 nt, Artificial Sequence
  Description of Artificial Sequence: Synthetic oligonucleotide
gccgauugguuggggcaac

SEQ ID NO: 118242 - RNA, 19 nt, Artificial Sequence
  Description of Artificial Sequence: Synthetic oligonucleotide
cgaguagacguaaaaccuu

SEQ ID NO: 118243 - RNA, 19 nt, Artificial Sequence
  Description of Artificial Sequence: Synthetic oligonucleotide
ccggagaguucgaaccucu

SEQ ID NO: 118244 - RNA, 19 nt, Artificial Sequence
  Description of Artificial Sequence: Synthetic oligonucleotide
gcccuagcacgugauucaa

SEQ ID NO: 118245 - RNA, 19 nt, Artificial Sequence
  Description of Artificial Sequence: Synthetic oligonucleotide
cgguaauuguggcgguaga

SEQ ID NO: 118246 - RNA, 19 nt, Artificial Sequence
  Description of Artificial Sequence: Synthetic oligonucleotide
gccguuggagaagaagguu

SEQ ID NO: 118247 - RNA, 19 nt, Artificial Sequence
  Description of Artificial Sequence: Synthetic oligonucleotide
ggccuugaacacaggguuu

SEQ ID NO: 118248 - RNA, 19 nt, Artificial Sequence
  Description of Artificial Sequence: Synthetic oligonucleotide
cggcuucaguaaucgcuga

SEQ ID NO: 118249 - RNA, 19 nt, Artificial Sequence
  Description of Artificial Sequence: Synthetic oligonucleotide
gcaagacugagggcacgau

SEQ ID NO: 118250 - RNA, 19 nt, Artificial Sequence
  Description of Artificial Sequence: Synthetic oligonucleotide
ccccggagaguucgaaccu

SEQ ID NO: 118251 - RNA, 19 nt, Artificial Sequence
  Description of Artificial Sequence: Synthetic oligonucleotide
ccgugccaacgugaggcga

SEQ ID NO: 118252 - RNA, 19 nt, Artificial Sequence
  Description of Artificial Sequence: Synthetic oligonucleotide
cgauccgaaggcccuuggu

SEQ ID NO: 118253 - RNA, 19 nt, Artificial Sequence
  Description of Artificial Sequence: Synthetic oligonucleotide
ccaagacgcaugccauauu

SEQ ID NO: 118254 - RNA, 19 nt, Artificial Sequence
  Description of Artificial Sequence: Synthetic oligonucleotide
aauugaguuagacagagac

SEQ ID NO: 118255 - RNA, 19 nt, Artificial Sequence
  Description of Artificial Sequence: Synthetic oligonucleotide
ucaucaauauaaaauaggg

SEQ ID NO: 118256 - RNA, 19 nt, Artificial Sequence
  Description of Artificial Sequence: Synthetic oligonucleotide
aaugaagcuaacuugaaug

SEQ ID NO: 118257 - RNA, 19 nt, Artificial Sequence
  Description of Artificial Sequence: Synthetic oligonucleotide
aauauuaggcuccugagcu

SEQ ID NO: 118258 - RNA, 19 nt, Artificial Sequence
  Description of Artificial Sequence: Synthetic oligonucleotide
uuuaaagccgcucagauau

SEQ ID NO: 118259 - RNA, 19 nt, Artificial Sequence
  Description of Artificial Sequence: Synthetic oligonucleotide
auuagauagacccgaaggc

SEQ ID NO: 118260 - RNA, 19 nt, Artificial Sequence
  Description of Artificial Sequence: Synthetic oligonucleotide
aagaauauacauuuaacau

SEQ ID NO: 118261 - RNA, 19 nt, Artificial Sequence
  Description of Artificial Sequence: Synthetic oligonucleotide
auaucauauauauauaugu

SEQ ID NO: 118262 - RNA, 19 nt, Artificial Sequence
  Description of Artificial Sequence: Synthetic oligonucleotide
ucuaacuuaugcuauauga

SEQ ID NO: 118263 - RNA, 19 nt, Artificial Sequence
  Description of Artificial Sequence: Synthetic oligonucleotide
auuacaaucuagcaguauc

SEQ ID NO: 118264 - RNA, 19 nt, Artificial Sequence
  Description of Artificial Sequence: Synthetic oligonucleotide
aauauuguuguccaguaaa

SEQ ID NO: 118265 - RNA, 19 nt, Artificial Sequence
  Description of Artificial Sequence: Synthetic oligonucleotide
uaucugaucacauauacaa

SEQ ID NO: 118266 - RNA, 19 nt, Artificial Sequence
  Description of Artificial Sequence: Synthetic oligonucleotide
ugcuauaugaaauucagaa

SEQ ID NO: 118267 - RNA, 19 nt, Artificial Sequence
  Description of Artificial Sequence: Synthetic oligonucleotide
uauuauauagggaaugaaa

SEQ ID NO: 118268 - RNA, 19 nt, Artificial Sequence
  Description of Artificial Sequence: Synthetic oligonucleotide
aacgcagauuuacaaaccg

SEQ ID NO: 118269 - RNA, 19 nt, Artificial Sequence
  Description of Artificial Sequence: Synthetic oligonucleotide
cauuagauagacccgaagg

SEQ ID NO: 118270 - RNA, 19 nt, Artificial Sequence
  Description of Artificial Sequence: Synthetic oligonucleotide
agcacuuuuagaucagagc

SEQ ID NO: 118271 - RNA, 19 nt, Artificial Sequence
  Description of Artificial Sequence: Synthetic oligonucleotide
auaaugggacccuacuugc

SEQ ID NO: 118272 - RNA, 19 nt, Artificial Sequence
  Description of Artificial Sequence: Synthetic oligonucleotide
uugaguuagacagagacga

SEQ ID NO: 118273 - RNA, 19 nt, Artificial Sequence
  Description of Artificial Sequence: Synthetic oligonucleotide
uaaaauagggugaggaacu

SEQ ID NO: 118274 - RNA, 19 nt, Artificial Sequence
  Description of Artificial Sequence: Synthetic oligonucleotide
uuaguuuacacuacugaac

SEQ ID NO: 118275 - RNA, 19 nt, Artificial Sequence
  Description of Artificial Sequence: Synthetic oligonucleotide
ucauauauauauauguaua

SEQ ID NO: 118276 - RNA, 19 nt, Artificial Sequence
  Description of Artificial Sequence: Synthetic oligonucleotide
aaccaacggaucuucauuc

SEQ ID NO: 118277 - RNA, 19 nt, Artificial Sequence
  Description of Artificial Sequence: Synthetic oligonucleotide
ucauuaaccgugaaagccc

SEQ ID NO: 118278 - RNA, 19 nt, Artificial Sequence
  Description of Artificial Sequence: Synthetic oligonucleotide
uugucuaaugacuuguuca

SEQ ID NO: 118279 - RNA, 19 nt, Artificial Sequence
  Description of Artificial Sequence: Synthetic oligonucleotide
cugauguacauauaaaauc

SEQ ID NO: 118280 - RNA, 19 nt, Artificial Sequence
  Description of Artificial Sequence: Synthetic oligonucleotide
aacaaggcagaauaacuca

SEQ ID NO: 118281 - RNA, 19 nt, Artificial Sequence
  Description of Artificial Sequence: Synthetic oligonucleotide
ucuagcaguaucuggcugg

SEQ ID NO: 118282 - RNA, 19 nt, Artificial Sequence
  Description of Artificial Sequence: Synthetic oligonucleotide
ugaacgcagauuuacaaac

SEQ ID NO: 118283 - RNA, 19 nt, Artificial Sequence
  Description of Artificial Sequence: Synthetic oligonucleotide
aucauauauauauauguau

SEQ ID NO: 118284 - RNA, 19 nt, Artificial Sequence
  Description of Artificial Sequence: Synthetic oligonucleotide
ucgaaauucgaccuuaaau

SEQ ID NO: 118285 - RNA, 19 nt, Artificial Sequence
  Description of Artificial Sequence: Synthetic oligonucleotide
acuuguuagggauuucacg

SEQ ID NO: 118286 - RNA, 19 nt, Artificial Sequence
  Description of Artificial Sequence: Synthetic oligonucleotide
gauaucauauauauauaug

SEQ ID NO: 118287 - RNA, 19 nt, Artificial Sequence
  Description of Artificial Sequence: Synthetic oligonucleotide
ucuguuacagauaacucau

SEQ ID NO: 118288 - RNA, 19 nt, Artificial Sequence
  Description of Artificial Sequence: Synthetic oligonucleotide
aagcuaauacugauuaaac

SEQ ID NO: 118289 - RNA, 19 nt, Artificial Sequence
  Description of Artificial Sequence: Synthetic oligonucleotide
uugcuaucaguuaagacuc

SEQ ID NO: 118290 - RNA, 19 nt, Artificial Sequence
  Description of Artificial Sequence: Synthetic oligonucleotide
aaccagacgugucaaugac

SEQ ID NO: 118291 - RNA, 19 nt, Artificial Sequence
  Description of Artificial Sequence: Synthetic oligonucleotide
auagaaucauaucuggaca

SEQ ID NO: 118292 - RNA, 19 nt, Artificial Sequence
  Description of Artificial Sequence: Synthetic oligonucleotide
uuacaauagagcagccagg

SEQ ID NO: 118293 - RNA, 19 nt, Artificial Sequence
  Description of Artificial Sequence: Synthetic oligonucleotide
acuacugauguacauauaa

SEQ ID NO: 118294 - RNA, 19 nt, Artificial Sequence
  Description of Artificial Sequence: Synthetic oligonucleotide
aauacugauuaaacacagc

SEQ ID NO: 118295 - RNA, 19 nt, Artificial Sequence
  Description of Artificial Sequence: Synthetic oligonucleotide
gauuaguuuacacuacuga

SEQ ID NO: 118296 - RNA, 19 nt, Artificial Sequence
  Description of Artificial Sequence: Synthetic oligonucleotide
uccccuuugacaucaaaag

SEQ ID NO: 118297 - RNA, 19 nt, Artificial Sequence
  Description of Artificial Sequence: Synthetic oligonucleotide
uaacuuaugcuauaugaaa

SEQ ID NO: 118298 - RNA, 19 nt, Artificial Sequence
  Description of Artificial Sequence: Synthetic oligonucleotide
uaucauauauauauaugua

SEQ ID NO: 118299 - RNA, 19 nt, Artificial Sequence
  Description of Artificial Sequence: Synthetic oligonucleotide
aaggcagaauaacucagug

SEQ ID NO: 118300 - RNA, 19 nt, Artificial Sequence
  Description of Artificial Sequence: Synthetic oligonucleotide
ugauucaauguccaagacu

SEQ ID NO: 118301 - RNA, 19 nt, Artificial Sequence
  Description of Artificial Sequence: Synthetic oligonucleotide
ugguuugcaaaccugugug

SEQ ID NO: 118302 - RNA, 19 nt, Artificial Sequence
  Description of Artificial Sequence: Synthetic oligonucleotide
uuuuagaucagagccacga

SEQ ID NO: 118303 - RNA, 19 nt, Artificial Sequence
  Description of Artificial Sequence: Synthetic oligonucleotide
acaaucuagcaguaucugg

SEQ ID NO: 118304 - RNA, 19 nt, Artificial Sequence
  Description of Artificial Sequence: Synthetic oligonucleotide
cucauuaaccgugaaagcc

SEQ ID NO: 118305 - RNA, 19 nt, Artificial Sequence
  Description of Artificial Sequence: Synthetic oligonucleotide
aagugaacccuacucaagu

SEQ ID NO: 118306 - RNA, 19 nt, Artificial Sequence
  Description of Artificial Sequence: Synthetic oligonucleotide
aaccgugaaagcccuguac

SEQ ID NO: 118307 - RNA, 19 nt, Artificial Sequence
  Description of Artificial Sequence: Synthetic oligonucleotide
gcacuuuuagaucagagcc

SEQ ID NO: 118308 - RNA, 19 nt, Artificial Sequence
  Description of Artificial Sequence: Synthetic oligonucleotide
uauauagggaaugaaaguu

SEQ ID NO: 118309 - RNA, 19 nt, Artificial Sequence
  Description of Artificial Sequence: Synthetic oligonucleotide
uacaagguaaaaucucacc

SEQ ID NO: 118310 - RNA, 19 nt, Artificial Sequence
  Description of Artificial Sequence: Synthetic oligonucleotide
acuuuuagaucagagccac

SEQ ID NO: 118311 - RNA, 19 nt, Artificial Sequence
  Description of Artificial Sequence: Synthetic oligonucleotide
uauaaaauagggugaggaa

SEQ ID NO: 118312 - RNA, 19 nt, Artificial Sequence
  Description of Artificial Sequence: Synthetic oligonucleotide
uauagggaaugaaaguuaa

SEQ ID NO: 118313 - RNA, 19 nt, Artificial Sequence
  Description of Artificial Sequence: Synthetic oligonucleotide
cauuuacacacacugugcc

SEQ ID NO: 118314 - RNA, 19 nt, Artificial Sequence
  Description of Artificial Sequence: Synthetic oligonucleotide
ucaagguaggugcucacug

SEQ ID NO: 118315 - RNA, 19 nt, Artificial Sequence
  Description of Artificial Sequence: Synthetic oligonucleotide
augaauugccaaaagagug

SEQ ID NO: 118316 - RNA, 19 nt, Artificial Sequence
  Description of Artificial Sequence: Synthetic oligonucleotide
acuuacuuuauuauugcag

SEQ ID NO: 118317 - RNA, 19 nt, Artificial Sequence
  Description of Artificial Sequence: Synthetic oligonucleotide
ucaucguuuggcauguugu

SEQ ID NO: 118318 - RNA, 19 nt, Artificial Sequence
  Description of Artificial Sequence: Synthetic oligonucleotide
uagauagacccgaaggcug

SEQ ID NO: 118319 - RNA, 19 nt, Artificial Sequence
  Description of Artificial Sequence: Synthetic oligonucleotide
guauuggcaauugaguuag

SEQ ID NO: 118320 - RNA, 19 nt, Artificial Sequence
  Description of Artificial Sequence: Synthetic oligonucleotide
aggaacuuagucguacugc

SEQ ID NO: 118321 - RNA, 19 nt, Artificial Sequence
  Description of Artificial Sequence: Synthetic oligonucleotide
accgcgguugcccugaaac

SEQ ID NO: 118322 - RNA, 19 nt, Artificial Sequence
  Description of Artificial Sequence: Synthetic oligonucleotide
ugauaagcguugcuguugc

SEQ ID NO: 118323 - RNA, 19 nt, Artificial Sequence
  Description of Artificial Sequence: Synthetic oligonucleotide
uuuggcauguugucuaaug

SEQ ID NO: 118324 - RNA, 19 nt, Artificial Sequence
  Description of Artificial Sequence: Synthetic oligonucleotide
uuuacaaaccgcucuaguu

SEQ ID NO: 118325 - RNA, 19 nt, Artificial Sequence
  Description of Artificial Sequence: Synthetic oligonucleotide
uuaucugaucacauauaca

SEQ ID NO: 118326 - RNA, 19 nt, Artificial Sequence
  Description of Artificial Sequence: Synthetic oligonucleotide
ugcauugcauacaaaucca

SEQ ID NO: 118327 - RNA, 19 nt, Artificial Sequence
  Description of Artificial Sequence: Synthetic oligonucleotide
cauucguaccucuuaaaac

SEQ ID NO: 118328 - RNA, 19 nt, Artificial Sequence
  Description of Artificial Sequence: Synthetic oligonucleotide
gacgauuugguucagugaa

SEQ ID NO: 118329 - RNA, 19 nt, Artificial Sequence
  Description of Artificial Sequence: Synthetic oligonucleotide
ucuaguucaacugcaguga

SEQ ID NO: 118330 - RNA, 19 nt, Artificial Sequence
  Description of Artificial Sequence: Synthetic oligonucleotide
uggauauaagaucaacaau

SEQ ID NO: 118331 - RNA, 19 nt, Artificial Sequence
  Description of Artificial Sequence: Synthetic oligonucleotide
augaagcuaacuugaaugu

SEQ ID NO: 118332 - RNA, 19 nt, Artificial Sequence
  Description of Artificial Sequence: Synthetic oligonucleotide
caucaggucaaacauucag

SEQ ID NO: 118333 - RNA, 19 nt, Artificial Sequence
  Description of Artificial Sequence: Synthetic oligonucleotide
cauauauauauauguauaa

SEQ ID NO: 118334 - RNA, 19 nt, Artificial Sequence
  Description of Artificial Sequence: Synthetic oligonucleotide
augacgauuugguucagug

SEQ ID NO: 118335 - RNA, 19 nt, Artificial Sequence
  Description of Artificial Sequence: Synthetic oligonucleotide
uacaaaccgcucuaguuca

SEQ ID NO: 118336 - RNA, 19 nt, Artificial Sequence
  Description of Artificial Sequence: Synthetic oligonucleotide
uucggugacuucaagcacu

SEQ ID NO: 118337 - RNA, 19 nt, Artificial Sequence
  Description of Artificial Sequence: Synthetic oligonucleotide
auagaugcagugcauugca

SEQ ID NO: 118338 - RNA, 19 nt, Artificial Sequence
  Description of Artificial Sequence: Synthetic oligonucleotide
ugguauacuaggcuucaga

SEQ ID NO: 118339 - RNA, 19 nt, Artificial Sequence
  Description of Artificial Sequence: Synthetic oligonucleotide
aaguuagccagcaaccuca

SEQ ID NO: 118340 - RNA, 19 nt, Artificial Sequence
  Description of Artificial Sequence: Synthetic oligonucleotide
acauagaugcagugcauug

SEQ ID NO: 118341 - RNA, 19 nt, Artificial Sequence
  Description of Artificial Sequence: Synthetic oligonucleotide
aaccgcucuaguucaacug

SEQ ID NO: 118342 - RNA, 19 nt, Artificial Sequence
  Description of Artificial Sequence: Synthetic oligonucleotide
cauaaaccccuguuguugc

SEQ ID NO: 118343 - RNA, 19 nt, Artificial Sequence
  Description of Artificial Sequence: Synthetic oligonucleotide
gaauugccaaaagagugag

SEQ ID NO: 118344 - RNA, 19 nt, Artificial Sequence
  Description of Artificial Sequence: Synthetic oligonucleotide
agcuauggauaucauauau

SEQ ID NO: 118345 - RNA, 19 nt, Artificial Sequence
  Description of Artificial Sequence: Synthetic oligonucleotide
auugaguuagacagagacg

SEQ ID NO: 118346 - RNA, 19 nt, Artificial Sequence
  Description of Artificial Sequence: Synthetic oligonucleotide
aaugucuaacuuaugcuau

SEQ ID NO: 118347 - RNA, 19 nt, Artificial Sequence
  Description of Artificial Sequence: Synthetic oligonucleotide
aaaaccauaaugggacccu

SEQ ID NO: 118348 - RNA, 19 nt, Artificial Sequence
  Description of Artificial Sequence: Synthetic oligonucleotide
aaucuauucuuuggcagcu

SEQ ID NO: 118349 - RNA, 19 nt, Artificial Sequence
  Description of Artificial Sequence: Synthetic oligonucleotide
agugcauugcauacaaauc

SEQ ID NO: 118350 - RNA, 19 nt, Artificial Sequence
  Description of Artificial Sequence: Synthetic oligonucleotide
ggcaauaugaauuauuaua

SEQ ID NO: 118351 - RNA, 19 nt, Artificial Sequence
  Description of Artificial Sequence: Synthetic oligonucleotide
auugcagacuguccuuaac

SEQ ID NO: 118352 - RNA, 19 nt, Artificial Sequence
  Description of Artificial Sequence: Synthetic oligonucleotide
uagggugaggaacuuaguc

SEQ ID NO: 118353 - RNA, 19 nt, Artificial Sequence
  Description of Artificial Sequence: Synthetic oligonucleotide
guaucauagcagcucauac

SEQ ID NO: 118354 - RNA, 19 nt, Artificial Sequence
  Description of Artificial Sequence: Synthetic oligonucleotide
auauauauauauguauaaa

SEQ ID NO: 118355 - RNA, 19 nt, Artificial Sequence
  Description of Artificial Sequence: Synthetic oligonucleotide
uggcuuuuaaagccgcuca

SEQ ID NO: 118356 - RNA, 19 nt, Artificial Sequence
  Description of Artificial Sequence: Synthetic oligonucleotide
agugaacgcagauuuacaa

SEQ ID NO: 118357 - RNA, 19 nt, Artificial Sequence
  Description of Artificial Sequence: Synthetic oligonucleotide
ugcccuuaagguuugguaa

SEQ ID NO: 118358 - RNA, 19 nt, Artificial Sequence
  Description of Artificial Sequence: Synthetic oligonucleotide
aguauuggcaauugaguua

SEQ ID NO: 118359 - RNA, 19 nt, Artificial Sequence
  Description of Artificial Sequence: Synthetic oligonucleotide
aagugguauacuaggcuuc

SEQ ID NO: 118360 - RNA, 19 nt, Artificial Sequence
  Description of Artificial Sequence: Synthetic oligonucleotide
gauuaagcaaugucuaacu

SEQ ID NO: 118361 - RNA, 19 nt, Artificial Sequence
  Description of Artificial Sequence: Synthetic oligonucleotide
cucaagugguauacuaggc

SEQ ID NO: 118362 - RNA, 19 nt, Artificial Sequence
  Description of Artificial Sequence: Synthetic oligonucleotide
uuggcuauuugcccuuaag

SEQ ID NO: 118363 - RNA, 19 nt, Artificial Sequence
  Description of Artificial Sequence: Synthetic oligonucleotide
uacaauagagcagccaggu

SEQ ID NO: 118364 - RNA, 19 nt, Artificial Sequence
  Description of Artificial Sequence: Synthetic oligonucleotide
ucccgcacgaaccagccgc

SEQ ID NO: 118365 - RNA, 19 nt, Artificial Sequence
  Description of Artificial Sequence: Synthetic oligonucleotide
agguguuccauaguauugg

SEQ ID NO: 118366 - RNA, 19 nt, Artificial Sequence
  Description of Artificial Sequence: Synthetic oligonucleotide
uucgugauagggcuuucca

SEQ ID NO: 118367 - RNA, 19 nt, Artificial Sequence
  Description of Artificial Sequence: Synthetic oligonucleotide
aaagugaacccuacucaag

SEQ ID NO: 118368 - RNA, 19 nt, Artificial Sequence
  Description of Artificial Sequence: Synthetic oligonucleotide
ugaaacaguuaaacuggcu

SEQ ID NO: 118369 - RNA, 19 nt, Artificial Sequence
  Description of Artificial Sequence: Synthetic oligonucleotide
aaaccgcucuaguucaacu

SEQ ID NO: 118370 - RNA, 19 nt, Artificial Sequence
  Description of Artificial Sequence: Synthetic oligonucleotide
acauucguaccucuuaaaa

SEQ ID NO: 118371 - RNA, 19 nt, Artificial Sequence
  Description of Artificial Sequence: Synthetic oligonucleotide
uggagcucuuucgugauag

SEQ ID NO: 118372 - RNA, 19 nt, Artificial Sequence
  Description of Artificial Sequence: Synthetic oligonucleotide
cuuaugcuauaugaaauuc

SEQ ID NO: 118373 - RNA, 19 nt, Artificial Sequence
  Description of Artificial Sequence: Synthetic oligonucleotide
auuuacaaaccgcucuagu

SEQ ID NO: 118374 - RNA, 19 nt, Artificial Sequence
  Description of Artificial Sequence: Synthetic oligonucleotide
cuaacuuaugcuauaugaa

SEQ ID NO: 118375 - RNA, 19 nt, Artificial Sequence
  Description of Artificial Sequence: Synthetic oligonucleotide
ucgugauagggcuuuccag

SEQ ID NO: 118376 - RNA, 19 nt, Artificial Sequence
  Description of Artificial Sequence: Synthetic oligonucleotide
ugccaguggauucauacua

SEQ ID NO: 118377 - RNA, 19 nt, Artificial Sequence
  Description of Artificial Sequence: Synthetic oligonucleotide
cccugaaacaguuaaacug

SEQ ID NO: 118378 - RNA, 19 nt, Artificial Sequence
  Description of Artificial Sequence: Synthetic oligonucleotide
acgacuaauguugguuugc

SEQ ID NO: 118379 - RNA, 19 nt, Artificial Sequence
  Description of Artificial Sequence: Synthetic oligonucleotide
auauuaggcuccugagcuc

SEQ ID NO: 118380 - RNA, 19 nt, Artificial Sequence
  Description of Artificial Sequence: Synthetic oligonucleotide
ggaacuuagucguacugcc

SEQ ID NO: 118381 - RNA, 19 nt, Artificial Sequence
  Description of Artificial Sequence: Synthetic oligonucleotide
gacacucgcgcugacagag

SEQ ID NO: 118382 - RNA, 19 nt, Artificial Sequence
  Description of Artificial Sequence: Synthetic oligonucleotide
uguccaagacugcaugcca

SEQ ID NO: 118383 - RNA, 19 nt, Artificial Sequence
  Description of Artificial Sequence: Synthetic oligonucleotide
ggcuaaugaagcuaacuug

SEQ ID NO: 118384 - RNA, 19 nt, Artificial Sequence
  Description of Artificial Sequence: Synthetic oligonucleotide
ugagcuuugugcaccucca

SEQ ID NO: 118385 - RNA, 19 nt, Artificial Sequence
  Description of Artificial Sequence: Synthetic oligonucleotide
aauucuccgcggcgaacuc

SEQ ID NO: 118386 - RNA, 19 nt, Artificial Sequence
  Description of Artificial Sequence: Synthetic oligonucleotide
ugacuuguuagggauuuca

SEQ ID NO: 118387 - RNA, 19 nt, Artificial Sequence
  Description of Artificial Sequence: Synthetic oligonucleotide
caagugaacgcagauuuac

SEQ ID NO: 118388 - RNA, 19 nt, Artificial Sequence
  Description of Artificial Sequence: Synthetic oligonucleotide
acccuacuugcauaucugg

SEQ ID NO: 118389 - RNA, 19 nt, Artificial Sequence
  Description of Artificial Sequence: Synthetic oligonucleotide
gaagcuaacuugaauguaa

SEQ ID NO: 118390 - RNA, 19 nt, Artificial Sequence
  Description of Artificial Sequence: Synthetic oligonucleotide
ugacgauuugguucaguga

SEQ ID NO: 118391 - RNA, 19 nt, Artificial Sequence
  Description of Artificial Sequence: Synthetic oligonucleotide
gauuuacaaaccgcucuag

SEQ ID NO: 118392 - RNA, 19 nt, Artificial Sequence
  Description of Artificial Sequence: Synthetic oligonucleotide
ucauaccugugauggaaca

SEQ ID NO: 118393 - RNA, 19 nt, Artificial Sequence
  Description of Artificial Sequence: Synthetic oligonucleotide
uacccgacuacguucuuug

SEQ ID NO: 118394 - RNA, 19 nt, Artificial Sequence
  Description of Artificial Sequence: Synthetic oligonucleotide
uauuaggcuccugagcucu

SEQ ID NO: 118395 - RNA, 19 nt, Artificial Sequence
  Description of Artificial Sequence: Synthetic oligonucleotide
ugcccugaaacaguuaaac

SEQ ID NO: 118396 - RNA, 19 nt, Artificial Sequence
  Description of Artificial Sequence: Synthetic oligonucleotide
agugaacccuacucaagug

SEQ ID NO: 118397 - RNA, 19 nt, Artificial Sequence
  Description of Artificial Sequence: Synthetic oligonucleotide
agaaucauaucuggacauc

SEQ ID NO: 118398 - RNA, 19 nt, Artificial Sequence
  Description of Artificial Sequence: Synthetic oligonucleotide
acgaagacgagcaauggca

SEQ ID NO: 118399 - RNA, 19 nt, Artificial Sequence
  Description of Artificial Sequence: Synthetic oligonucleotide
uccaagacugcaugccaag

SEQ ID NO: 118400 - RNA, 19 nt, Artificial Sequence
  Description of Artificial Sequence: Synthetic oligonucleotide
uacaaucuagcaguaucug

SEQ ID NO: 118401 - RNA, 19 nt, Artificial Sequence
  Description of Artificial Sequence: Synthetic oligonucleotide
aaccauaaugggacccuac

SEQ ID NO: 118402 - RNA, 19 nt, Artificial Sequence
  Description of Artificial Sequence: Synthetic oligonucleotide
aaugucaacaaggcagaau

SEQ ID NO: 118403 - RNA, 19 nt, Artificial Sequence
  Description of Artificial Sequence: Synthetic oligonucleotide
auaaaccccuguuguugcg

SEQ ID NO: 118404 - RNA, 19 nt, Artificial Sequence
  Description of Artificial Sequence: Synthetic oligonucleotide
uuaaccgugaaagcccugu

SEQ ID NO: 118405 - RNA, 19 nt, Artificial Sequence
  Description of Artificial Sequence: Synthetic oligonucleotide
ucguaccucuuaaaacuug

SEQ ID NO: 118406 - RNA, 19 nt, Artificial Sequence
  Description of Artificial Sequence: Synthetic oligonucleotide
uuguuagggauuucacgac

SEQ ID NO: 118407 - RNA, 19 nt, Artificial Sequence
  Description of Artificial Sequence: Synthetic oligonucleotide
cugccuggauauaagauca

SEQ ID NO: 118408 - RNA, 19 nt, Artificial Sequence
  Description of Artificial Sequence: Synthetic oligonucleotide
aacauucguaccucuuaaa

SEQ ID NO: 118409 - RNA, 19 nt, Artificial Sequence
  Description of Artificial Sequence: Synthetic oligonucleotide
uaaaccccuguuguugcgg

SEQ ID NO: 118410 - RNA, 19 nt, Artificial Sequence
  Description of Artificial Sequence: Synthetic oligonucleotide
uccgcggcgaacucgacac

SEQ ID NO: 118411 - RNA, 19 nt, Artificial Sequence
  Description of Artificial Sequence: Synthetic oligonucleotide
agauuuacaaaccgcucua

SEQ ID NO: 118412 - RNA, 19 nt, Artificial Sequence
  Description of Artificial Sequence: Synthetic oligonucleotide
auuucacgacuaauguugg

SEQ ID NO: 118413 - RNA, 19 nt, Artificial Sequence
  Description of Artificial Sequence: Synthetic oligonucleotide
ugccaaaagagugagcuuu

SEQ ID NO: 118414 - RNA, 19 nt, Artificial Sequence
  Description of Artificial Sequence: Synthetic oligonucleotide
accauaaugggacccuacu

SEQ ID NO: 118415 - RNA, 19 nt, Artificial Sequence
  Description of Artificial Sequence: Synthetic oligonucleotide
accgguguaaccaugaauu

SEQ ID NO: 118416 - RNA, 19 nt, Artificial Sequence
  Description of Artificial Sequence: Synthetic oligonucleotide
aaagccgcucagauauaac

SEQ ID NO: 118417 - RNA, 19 nt, Artificial Sequence
  Description of Artificial Sequence: Synthetic oligonucleotide
acaacauucguaccucuua

SEQ ID NO: 118418 - RNA, 19 nt, Artificial Sequence
  Description of Artificial Sequence: Synthetic oligonucleotide
aagcguugcuguugccagg

SEQ ID NO: 118419 - RNA, 19 nt, Artificial Sequence
  Description of Artificial Sequence: Synthetic oligonucleotide
acacugugccaguggauuc

SEQ ID NO: 118420 - RNA, 19 nt, Artificial Sequence
  Description of Artificial Sequence: Synthetic oligonucleotide
aacucgacacgcagcuccc

SEQ ID NO: 118421 - RNA, 19 nt, Artificial Sequence
  Description of Artificial Sequence: Synthetic oligonucleotide
ugaggaacuuagucguacu

SEQ ID NO: 118422 - RNA, 19 nt, Artificial Sequence
  Description of Artificial Sequence: Synthetic oligonucleotide
auguuggggucacuauuuc

SEQ ID NO: 118423 - RNA, 19 nt, Artificial Sequence
  Description of Artificial Sequence: Synthetic oligonucleotide
aaaccccuguuguugcgga

SEQ ID NO: 118424 - RNA, 19 nt, Artificial Sequence
  Description of Artificial Sequence: Synthetic oligonucleotide
auaagcguugcuguugcca

SEQ ID NO: 118425 - RNA, 19 nt, Artificial Sequence
  Description of Artificial Sequence: Synthetic oligonucleotide
ggauucauacuacugaugu

SEQ ID NO: 118426 - RNA, 19 nt, Artificial Sequence
  Description of Artificial Sequence: Synthetic oligonucleotide
guuggggucacuauuucca

SEQ ID NO: 118427 - RNA, 19 nt, Artificial Sequence
  Description of Artificial Sequence: Synthetic oligonucleotide
agggauuaguuuacacuac

SEQ ID NO: 118428 - RNA, 19 nt, Artificial Sequence
  Description of Artificial Sequence: Synthetic oligonucleotide
uuugaguguucaguuuaug

SEQ ID NO: 118429 - RNA, 19 nt, Artificial Sequence
  Description of Artificial Sequence: Synthetic oligonucleotide
auguugucuaaugacuugu

SEQ ID NO: 118430 - RNA, 19 nt, Artificial Sequence
  Description of Artificial Sequence: Synthetic oligonucleotide
agcuaacuugaauguaaca

SEQ ID NO: 118431 - RNA, 19 nt, Artificial Sequence
  Description of Artificial Sequence: Synthetic oligonucleotide
gguauacuaggcuucagaa

SEQ ID NO: 118432 - RNA, 19 nt, Artificial Sequence
  Description of Artificial Sequence: Synthetic oligonucleotide
ggauaccugcucaacaagg

SEQ ID NO: 118433 - RNA, 19 nt, Artificial Sequence
  Description of Artificial Sequence: Synthetic oligonucleotide
cuuuuagaucagagccacg

SEQ ID NO: 118434 - RNA, 19 nt, Artificial Sequence
  Description of Artificial Sequence: Synthetic oligonucleotide
caugguugcuaucaguuaa

SEQ ID NO: 118435 - RNA, 19 nt, Artificial Sequence
  Description of Artificial Sequence: Synthetic oligonucleotide
uguaucauagcagcucaua

SEQ ID NO: 118436 - RNA, 19 nt, Artificial Sequence
  Description of Artificial Sequence: Synthetic oligonucleotide
ugaguuagacagagacgac

SEQ ID NO: 118437 - RNA, 19 nt, Artificial Sequence
  Description of Artificial Sequence: Synthetic oligonucleotide
cuauucuuuggcagcugac

SEQ ID NO: 118438 - RNA, 19 nt, Artificial Sequence
  Description of Artificial Sequence: Synthetic oligonucleotide
gucuaacuuaugcuauaug

SEQ ID NO: 118439 - RNA, 19 nt, Artificial Sequence
  Description of Artificial Sequence: Synthetic oligonucleotide
uggcuacuuacuuuauuau

SEQ ID NO: 118440 - RNA, 19 nt, Artificial Sequence
  Description of Artificial Sequence: Synthetic oligonucleotide
caucaauauaaaauagggu

SEQ ID NO: 118441 - RNA, 19 nt, Artificial Sequence
  Description of Artificial Sequence: Synthetic oligonucleotide
uucuccgcggcgaacucga

SEQ ID NO: 118442 - RNA, 19 nt, Artificial Sequence
  Description of Artificial Sequence: Synthetic oligonucleotide
augacuuguucaucacuga

SEQ ID NO: 118443 - RNA, 19 nt, Artificial Sequence
  Description of Artificial Sequence: Synthetic oligonucleotide
uugcccuuaagguuuggua

SEQ ID NO: 118444 - RNA, 19 nt, Artificial Sequence
  Description of Artificial Sequence: Synthetic oligonucleotide
cacuuuuagaucagagcca

SEQ ID NO: 118445 - RNA, 19 nt, Artificial Sequence
  Description of Artificial Sequence: Synthetic oligonucleotide
ugucuaacuuaugcuauau

SEQ ID NO: 118446 - RNA, 19 nt, Artificial Sequence
  Description of Artificial Sequence: Synthetic oligonucleotide
uaaagccgcucagauauaa

SEQ ID NO: 118447 - RNA, 19 nt, Artificial Sequence
  Description of Artificial Sequence: Synthetic oligonucleotide
cucagggaauucuccgcgg

SEQ ID NO: 118448 - RNA, 19 nt, Artificial Sequence
  Description of Artificial Sequence: Synthetic oligonucleotide
aagugaacgcagauuuaca

SEQ ID NO: 118449 - RNA, 19 nt, Artificial Sequence
  Description of Artificial Sequence: Synthetic oligonucleotide
ggauaucauauauauauau

SEQ ID NO: 118450 - RNA, 19 nt, Artificial Sequence
  Description of Artificial Sequence: Synthetic oligonucleotide
accaauacccgacuacguu

SEQ ID NO: 118451 - RNA, 19 nt, Artificial Sequence
  Description of Artificial Sequence: Synthetic oligonucleotide
auauagggaaugaaaguua

SEQ ID NO: 118452 - RNA, 19 nt, Artificial Sequence
  Description of Artificial Sequence: Synthetic oligonucleotide
agugcucaucguuuggcau

SEQ ID NO: 118453 - RNA, 19 nt, Artificial Sequence
  Description of Artificial Sequence: Synthetic oligonucleotide
ugaagcuaacuugaaugua

SEQ ID NO: 118454 - RNA, 19 nt, Artificial Sequence
  Description of Artificial Sequence: Synthetic oligonucleotide
uguugucuaaugacuuguu

SEQ ID NO: 118455 - RNA, 19 nt, Artificial Sequence
  Description of Artificial Sequence: Synthetic oligonucleotide
aaugacgauuugguucagu

SEQ ID NO: 118456 - RNA, 19 nt, Artificial Sequence
  Description of Artificial Sequence: Synthetic oligonucleotide
gacuuguuagggauuucac

SEQ ID NO: 118457 - RNA, 19 nt, Artificial Sequence
  Description of Artificial Sequence: Synthetic oligonucleotide
uauuacaaucuagcaguau

SEQ ID NO: 118458 - RNA, 19 nt, Artificial Sequence
  Description of Artificial Sequence: Synthetic oligonucleotide
cgaaauucgaccuuaaaua

SEQ ID NO: 118459 - RNA, 19 nt, Artificial Sequence
  Description of Artificial Sequence: Synthetic oligonucleotide
uaguucuauaaagcuaaua

SEQ ID NO: 118460 - RNA, 19 nt, Artificial Sequence
  Description of Artificial Sequence: Synthetic oligonucleotide
agugguauacuaggcuuca

SEQ ID NO: 118461 - RNA, 19 nt, Artificial Sequence
  Description of Artificial Sequence: Synthetic oligonucleotide
ccgcucagauauaacaagg

SEQ ID NO: 118462 - RNA, 19 nt, Artificial Sequence
  Description of Artificial Sequence: Synthetic oligonucleotide
gcauaaaccccuguuguug

SEQ ID NO: 118463 - RNA, 19 nt, Artificial Sequence
  Description of Artificial Sequence: Synthetic oligonucleotide
agaugcuaucagaagacau

SEQ ID NO: 118464 - RNA, 19 nt, Artificial Sequence
  Description of Artificial Sequence: Synthetic oligonucleotide
uuagucguacugccuggau

SEQ ID NO: 118465 - RNA, 19 nt, Artificial Sequence
  Description of Artificial Sequence: Synthetic oligonucleotide
cuacucaagugguauacua

SEQ ID NO: 118466 - RNA, 19 nt, Artificial Sequence
  Description of Artificial Sequence: Synthetic oligonucleotide
gcuaauuaaaccaacggau

SEQ ID NO: 118467 - RNA, 19 nt, Artificial Sequence
  Description of Artificial Sequence: Synthetic oligonucleotide
gacccuacuugcauaucug

SEQ ID NO: 118468 - RNA, 19 nt, Artificial Sequence
  Description of Artificial Sequence: Synthetic oligonucleotide
cacucgcgcugacagagag

SEQ ID NO: 118469 - RNA, 19 nt, Artificial Sequence
  Description of Artificial Sequence: Synthetic oligonucleotide
uuugcccuuaagguuuggu

SEQ ID NO: 118470 - RNA, 19 nt, Artificial Sequence
  Description of Artificial Sequence: Synthetic oligonucleotide
cuaaugaagcuaacuugaa

SEQ ID NO: 118471 - RNA, 19 nt, Artificial Sequence
  Description of Artificial Sequence: Synthetic oligonucleotide
ugguugcuaucaguuaaga

SEQ ID NO: 118472 - RNA, 19 nt, Artificial Sequence
  Description of Artificial Sequence: Synthetic oligonucleotide
ggcuauuugcccuuaaggu

SEQ ID NO: 118473 - RNA, 19 nt, Artificial Sequence
  Description of Artificial Sequence: Synthetic oligonucleotide
gccgcucagauauaacaag

SEQ ID NO: 118474 - RNA, 19 nt, Artificial Sequence
  Description of Artificial Sequence: Synthetic oligonucleotide
cagaugcggagcuggggcc

SEQ ID NO: 118475 - RNA, 19 nt, Artificial Sequence
  Description of Artificial Sequence: Synthetic oligonucleotide
ggauuaguuuacacuacug

SEQ ID NO: 118476 - RNA, 19 nt, Artificial Sequence
  Description of Artificial Sequence: Synthetic oligonucleotide
auaagaugguaaaaccauu

SEQ ID NO: 118477 - RNA, 19 nt, Artificial Sequence
  Description of Artificial Sequence: Synthetic oligonucleotide
gugaggaacuuagucguac

SEQ ID NO: 118478 - RNA, 19 nt, Artificial Sequence
  Description of Artificial Sequence: Synthetic oligonucleotide
cuagcaguaucuggcuggc

SEQ ID NO: 118479 - RNA, 19 nt, Artificial Sequence
  Description of Artificial Sequence: Synthetic oligonucleotide
agacugcaugccaagguug

SEQ ID NO: 118480 - RNA, 19 nt, Artificial Sequence
  Description of Artificial Sequence: Synthetic oligonucleotide
guaccacaggucgaaauuc

SEQ ID NO: 118481 - RNA, 19 nt, Artificial Sequence
  Description of Artificial Sequence: Synthetic oligonucleotide
augucuaacuuaugcuaua

SEQ ID NO: 118482 - RNA, 19 nt, Artificial Sequence
  Description of Artificial Sequence: Synthetic oligonucleotide
uguaccgcgguugcccuga

SEQ ID NO: 118483 - RNA, 19 nt, Artificial Sequence
  Description of Artificial Sequence: Synthetic oligonucleotide
ugacuuagccucagagguu

SEQ ID NO: 118484 - RNA, 19 nt, Artificial Sequence
  Description of Artificial Sequence: Synthetic oligonucleotide
ucguacugccuggauauaa

SEQ ID NO: 118485 - RNA, 19 nt, Artificial Sequence
  Description of Artificial Sequence: Synthetic oligonucleotide
cauacuacugauguacaua

SEQ ID NO: 118486 - RNA, 19 nt, Artificial Sequence
  Description of Artificial Sequence: Synthetic oligonucleotide
ccaauacccgacuacguuc

SEQ ID NO: 118487 - RNA, 19 nt, Artificial Sequence
  Description of Artificial Sequence: Synthetic oligonucleotide
gacuaauguugguuugcaa

SEQ ID NO: 118488 - RNA, 19 nt, Artificial Sequence
  Description of Artificial Sequence: Synthetic oligonucleotide
ucauuggcuauuugcccuu

SEQ ID NO: 118489 - RNA, 19 nt, Artificial Sequence
  Description of Artificial Sequence: Synthetic oligonucleotide
agacgagcaauggcaauga

SEQ ID NO: 118490 - RNA, 19 nt, Artificial Sequence
  Description of Artificial Sequence: Synthetic oligonucleotide
caacauucguaccucuuaa

SEQ ID NO: 118491 - RNA, 19 nt, Artificial Sequence
  Description of Artificial Sequence: Synthetic oligonucleotide
acagugaaacaggugcuau

SEQ ID NO: 118492 - RNA, 19 nt, Artificial Sequence
  Description of Artificial Sequence: Synthetic oligonucleotide
guuaagacucuugccaucu

SEQ ID NO: 118493 - RNA, 19 nt, Artificial Sequence
  Description of Artificial Sequence: Synthetic oligonucleotide
aaaccauaaugggacccua

SEQ ID NO: 118494 - RNA, 19 nt, Artificial Sequence
  Description of Artificial Sequence: Synthetic oligonucleotide
uacuacugauguacauaua

SEQ ID NO: 118495 - RNA, 19 nt, Artificial Sequence
  Description of Artificial Sequence: Synthetic oligonucleotide
augucagauauagucuaaa

SEQ ID NO: 118496 - RNA, 19 nt, Artificial Sequence
  Description of Artificial Sequence: Synthetic oligonucleotide
accacgucuguaccgcggu

SEQ ID NO: 118497 - RNA, 19 nt, Artificial Sequence
  Description of Artificial Sequence: Synthetic oligonucleotide
auguugguuugcaaaccug

SEQ ID NO: 118498 - RNA, 19 nt, Artificial Sequence
  Description of Artificial Sequence: Synthetic oligonucleotide
acgauuugguucagugaag

SEQ ID NO: 118499 - RNA, 19 nt, Artificial Sequence
  Description of Artificial Sequence: Synthetic oligonucleotide
ccgacuacguucuuugauc

SEQ ID NO: 118500 - RNA, 19 nt, Artificial Sequence
  Description of Artificial Sequence: Synthetic oligonucleotide
uaaccgugaaagcccugua

SEQ ID NO: 118501 - RNA, 19 nt, Artificial Sequence
  Description of Artificial Sequence: Synthetic oligonucleotide
caacaucagucaucagguc

SEQ ID NO: 118502 - RNA, 19 nt, Artificial Sequence
  Description of Artificial Sequence: Synthetic oligonucleotide
cucgcgcugacagagagaa

SEQ ID NO: 118503 - RNA, 19 nt, Artificial Sequence
  Description of Artificial Sequence: Synthetic oligonucleotide
gaauucuccgcggcgaacu

SEQ ID NO: 118504 - RNA, 19 nt, Artificial Sequence
  Description of Artificial Sequence: Synthetic oligonucleotide
caagugguauacuaggcuu

SEQ ID NO: 118505 - RNA, 19 nt, Artificial Sequence
  Description of Artificial Sequence: Synthetic oligonucleotide
ugcaaaccugugugucuac

SEQ ID NO: 118506 - RNA, 19 nt, Artificial Sequence
  Description of Artificial Sequence: Synthetic oligonucleotide
acaagguuauucacuggau

SEQ ID NO: 118507 - RNA, 19 nt, Artificial Sequence
  Description of Artificial Sequence: Synthetic oligonucleotide
gguugugugcccacaccgg

SEQ ID NO: 118508 - RNA, 19 nt, Artificial Sequence
  Description of Artificial Sequence: Synthetic oligonucleotide
cacaccgguguaaccauga

SEQ ID NO: 118509 - RNA, 19 nt, Artificial Sequence
  Description of Artificial Sequence: Synthetic oligonucleotide
auuugaguguucaguuuau

SEQ ID NO: 118510 - RNA, 19 nt, Artificial Sequence
  Description of Artificial Sequence: Synthetic oligonucleotide
gucggcuaguucaccuugg

SEQ ID NO: 118511 - RNA, 19 nt, Artificial Sequence
  Description of Artificial Sequence: Synthetic oligonucleotide
agcguugcuguugccagga

SEQ ID NO: 118512 - RNA, 19 nt, Artificial Sequence
  Description of Artificial Sequence: Synthetic oligonucleotide
ccauuagauagacccgaag

SEQ ID NO: 118513 - RNA, 19 nt, Artificial Sequence
  Description of Artificial Sequence: Synthetic oligonucleotide
cagcauaaaccccuguugu

SEQ ID NO: 118514 - RNA, 19 nt, Artificial Sequence
  Description of Artificial Sequence: Synthetic oligonucleotide
caauacccgacuacguucu

SEQ ID NO: 118515 - RNA, 19 nt, Artificial Sequence
  Description of Artificial Sequence: Synthetic oligonucleotide
cucgagacacaagugaugu

SEQ ID NO: 118516 - RNA, 19 nt, Artificial Sequence
  Description of Artificial Sequence: Synthetic oligonucleotide
cauuaaccgugaaagcccu

SEQ ID NO: 118517 - RNA, 19 nt, Artificial Sequence
  Description of Artificial Sequence: Synthetic oligonucleotide
ugccuggauauaagaucaa

SEQ ID NO: 118518 - RNA, 19 nt, Artificial Sequence
  Description of Artificial Sequence: Synthetic oligonucleotide
cuuaagguuugguaacaau

SEQ ID NO: 118519 - RNA, 19 nt, Artificial Sequence
  Description of Artificial Sequence: Synthetic oligonucleotide
aauacccgacuacguucuu

SEQ ID NO: 118520 - RNA, 19 nt, Artificial Sequence
  Description of Artificial Sequence: Synthetic oligonucleotide
gcccuuaagguuugguaac

SEQ ID NO: 118521 - RNA, 19 nt, Artificial Sequence
  Description of Artificial Sequence: Synthetic oligonucleotide
gggugaggaacuuagucgu

SEQ ID NO: 118522 - RNA, 19 nt, Artificial Sequence
  Description of Artificial Sequence: Synthetic oligonucleotide
auauuacaaucuagcagua

SEQ ID NO: 118523 - RNA, 19 nt, Artificial Sequence
  Description of Artificial Sequence: Synthetic oligonucleotide
gucgaaauucgaccuuaaa

SEQ ID NO: 118524 - RNA, 19 nt, Artificial Sequence
  Description of Artificial Sequence: Synthetic oligonucleotide
acaaauccacccagcuaug

SEQ ID NO: 118525 - RNA, 19 nt, Artificial Sequence
  Description of Artificial Sequence: Synthetic oligonucleotide
accccuguuguugcggaug

SEQ ID NO: 118526 - RNA, 19 nt, Artificial Sequence
  Description of Artificial Sequence: Synthetic oligonucleotide
cuccgcucagggaauucuc

SEQ ID NO: 118527 - RNA, 19 nt, Artificial Sequence
  Description of Artificial Sequence: Synthetic oligonucleotide
ucgagacacaagugaugua

SEQ ID NO: 118528 - RNA, 19 nt, Artificial Sequence
  Description of Artificial Sequence: Synthetic oligonucleotide
aaccccuguuguugcggau

SEQ ID NO: 118529 - RNA, 19 nt, Artificial Sequence
  Description of Artificial Sequence: Synthetic oligonucleotide
gcuauuugcccuuaagguu

SEQ ID NO: 118530 - RNA, 19 nt, Artificial Sequence
  Description of Artificial Sequence: Synthetic oligonucleotide
auagggaaugaaaguuaaa

SEQ ID NO: 118531 - RNA, 19 nt, Artificial Sequence
  Description of Artificial Sequence: Synthetic oligonucleotide
accagacgugucaaugaca

SEQ ID NO: 118532 - RNA, 19 nt, Artificial Sequence
  Description of Artificial Sequence: Synthetic oligonucleotide
gcaugugggcacuucuuca

SEQ ID NO: 118533 - RNA, 19 nt, Artificial Sequence
  Description of Artificial Sequence: Synthetic oligonucleotide
gacuuagccucagagguuu

SEQ ID NO: 118534 - RNA, 19 nt, Artificial Sequence
  Description of Artificial Sequence: Synthetic oligonucleotide
cguacugccuggauauaag

SEQ ID NO: 118535 - RNA, 19 nt, Artificial Sequence
  Description of Artificial Sequence: Synthetic oligonucleotide
gaagacgagcaauggcaau

SEQ ID NO: 118536 - RNA, 19 nt, Artificial Sequence
  Description of Artificial Sequence: Synthetic oligonucleotide
uggucggcuaguucaccuu

SEQ ID NO: 118537 - RNA, 19 nt, Artificial Sequence
  Description of Artificial Sequence: Synthetic oligonucleotide
accacaggucgaaauucga

SEQ ID NO: 118538 - RNA, 19 nt, Artificial Sequence
  Description of Artificial Sequence: Synthetic oligonucleotide
cagcaaccucagauaauca

SEQ ID NO: 118539 - RNA, 19 nt, Artificial Sequence
  Description of Artificial Sequence: Synthetic oligonucleotide
auaguucuauaaagcuaau

SEQ ID NO: 118540 - RNA, 19 nt, Artificial Sequence
  Description of Artificial Sequence: Synthetic oligonucleotide
cauaccugugauggaacaa

SEQ ID NO: 118541 - RNA, 19 nt, Artificial Sequence
  Description of Artificial Sequence: Synthetic oligonucleotide
cuuuccagugcucaucguu

SEQ ID NO: 118542 - RNA, 19 nt, Artificial Sequence
  Description of Artificial Sequence: Synthetic oligonucleotide
gcacuugcgcaugaggaac

SEQ ID NO: 118543 - RNA, 19 nt, Artificial Sequence
  Description of Artificial Sequence: Synthetic oligonucleotide
gucucacagagaccacguc

SEQ ID NO: 118544 - RNA, 19 nt, Artificial Sequence
  Description of Artificial Sequence: Synthetic oligonucleotide
auuaaccgugaaagcccug

SEQ ID NO: 118545 - RNA, 19 nt, Artificial Sequence
  Description of Artificial Sequence: Synthetic oligonucleotide
acaccgguguaaccaugaa

SEQ ID NO: 118546 - RNA, 19 nt, Artificial Sequence
  Description of Artificial Sequence: Synthetic oligonucleotide
ugucuacaguucugugcuu

SEQ ID NO: 118547 - RNA, 19 nt, Artificial Sequence
  Description of Artificial Sequence: Synthetic oligonucleotide
ccaagacugcaugccaagg

SEQ ID NO: 118548 - RNA, 19 nt, Artificial Sequence
  Description of Artificial Sequence: Synthetic oligonucleotide
acccuacucaagugguaua

SEQ ID NO: 118549 - RNA, 19 nt, Artificial Sequence
  Description of Artificial Sequence: Synthetic oligonucleotide
ccgguguaaccaugaauug

SEQ ID NO: 118550 - RNA, 19 nt, Artificial Sequence
  Description of Artificial Sequence: Synthetic oligonucleotide
gaacuuagucguacugccu

SEQ ID NO: 118551 - RNA, 19 nt, Artificial Sequence
  Description of Artificial Sequence: Synthetic oligonucleotide
caaugagguugugugccca

SEQ ID NO: 118552 - RNA, 19 nt, Artificial Sequence
  Description of Artificial Sequence: Synthetic oligonucleotide
acccgacuacguucuuuga

SEQ ID NO: 118553 - RNA, 19 nt, Artificial Sequence
  Description of Artificial Sequence: Synthetic oligonucleotide
auacccgacuacguucuuu

SEQ ID NO: 118554 - RNA, 19 nt, Artificial Sequence
  Description of Artificial Sequence: Synthetic oligonucleotide
guguaccacaggucgaaau

SEQ ID NO: 118555 - RNA, 19 nt, Artificial Sequence
  Description of Artificial Sequence: Synthetic oligonucleotide
caugugggcacuucuucau

SEQ ID NO: 118556 - RNA, 19 nt, Artificial Sequence
  Description of Artificial Sequence: Synthetic oligonucleotide
ggcgaacucgacacgcagc

SEQ ID NO: 118557 - RNA, 19 nt, Artificial Sequence
  Description of Artificial Sequence: Synthetic oligonucleotide
caaucucauuaaccgugaa

SEQ ID NO: 118558 - RNA, 19 nt, Artificial Sequence
  Description of Artificial Sequence: Synthetic oligonucleotide
gguuugcaaaccugugugu

SEQ ID NO: 118559 - RNA, 19 nt, Artificial Sequence
  Description of Artificial Sequence: Synthetic oligonucleotide
gaacccuacucaaguggua

SEQ ID NO: 118560 - RNA, 19 nt, Artificial Sequence
  Description of Artificial Sequence: Synthetic oligonucleotide
cuuucgugauagggcuuuc

SEQ ID NO: 118561 - RNA, 19 nt, Artificial Sequence
  Description of Artificial Sequence: Synthetic oligonucleotide
cuggucggcuaguucaccu

SEQ ID NO: 118562 - RNA, 19 nt, Artificial Sequence
  Description of Artificial Sequence: Synthetic oligonucleotide
gggcgagacgcggaggcag

SEQ ID NO: 118563 - RNA, 19 nt, Artificial Sequence
  Description of Artificial Sequence: Synthetic oligonucleotide
gcgcugacagagagaaucc

SEQ ID NO: 118564 - RNA, 19 nt, Artificial Sequence
  Description of Artificial Sequence: Synthetic oligonucleotide
cuccgcggcgaacucgaca

SEQ ID NO: 118565 - RNA, 19 nt, Artificial Sequence
  Description of Artificial Sequence: Synthetic oligonucleotide
ucuccgcggcgaacucgac

SEQ ID NO: 118566 - RNA, 19 nt, Artificial Sequence
  Description of Artificial Sequence: Synthetic oligonucleotide
gcccugaaacaguuaaacu

SEQ ID NO: 118567 - RNA, 19 nt, Artificial Sequence
  Description of Artificial Sequence: Synthetic oligonucleotide
caacugcagugauaagcgu

SEQ ID NO: 118568 - RNA, 19 nt, Artificial Sequence
  Description of Artificial Sequence: Synthetic oligonucleotide
gugacuuguuagggauuuc

SEQ ID NO: 118569 - RNA, 19 nt, Artificial Sequence
  Description of Artificial Sequence: Synthetic oligonucleotide
ggaauucuccgcggcgaac

SEQ ID NO: 118570 - RNA, 19 nt, Artificial Sequence
  Description of Artificial Sequence: Synthetic oligonucleotide
gcacucgcgccagugcgag

SEQ ID NO: 118571 - RNA, 19 nt, Artificial Sequence
  Description of Artificial Sequence: Synthetic oligonucleotide
cucgcgccagugcgagcag

SEQ ID NO: 118572 - RNA, 19 nt, Artificial Sequence
  Description of Artificial Sequence: Synthetic oligonucleotide
acaaaccgcucuaguucaa

SEQ ID NO: 118573 - RNA, 19 nt, Artificial Sequence
  Description of Artificial Sequence: Synthetic oligonucleotide
acucgcgcugacagagaga

SEQ ID NO: 118574 - RNA, 19 nt, Artificial Sequence
  Description of Artificial Sequence: Synthetic oligonucleotide
gagcuuugugcaccuccau

SEQ ID NO: 118575 - RNA, 19 nt, Artificial Sequence
  Description of Artificial Sequence: Synthetic oligonucleotide
caccgguguaaccaugaau

SEQ ID NO: 118576 - RNA, 19 nt, Artificial Sequence
  Description of Artificial Sequence: Synthetic oligonucleotide
cacucgcgccagugcgagc

SEQ ID NO: 118577 - RNA, 19 nt, Artificial Sequence
  Description of Artificial Sequence: Synthetic oligonucleotide
ucgcgcugacagagagaau

SEQ ID NO: 118578 - RNA, 19 nt, Artificial Sequence
  Description of Artificial Sequence: Synthetic oligonucleotide
cuguuacagauaacucauu

SEQ ID NO: 118579 - RNA, 19 nt, Artificial Sequence
  Description of Artificial Sequence: Synthetic oligonucleotide
ccacaccgguguaaccaug

SEQ ID NO: 118580 - RNA, 19 nt, Artificial Sequence
  Description of Artificial Sequence: Synthetic oligonucleotide
ggucgaaauucgaccuuaa

SEQ ID NO: 118581 - RNA, 19 nt, Artificial Sequence
  Description of Artificial Sequence: Synthetic oligonucleotide
cggcgaacucgacacgcag

SEQ ID NO: 118582 - RNA, 19 nt, Artificial Sequence
  Description of Artificial Sequence: Synthetic oligonucleotide
gcaagugaacgcagauuua

SEQ ID NO: 118583 - RNA, 19 nt, Artificial Sequence
  Description of Artificial Sequence: Synthetic oligonucleotide
ccuggucggcuaguucacc

SEQ ID NO: 118584 - RNA, 19 nt, Artificial Sequence
  Description of Artificial Sequence: Synthetic oligonucleotide
cagcaugugggcacuucuu

SEQ ID NO: 118585 - RNA, 19 nt, Artificial Sequence
  Description of Artificial Sequence: Synthetic oligonucleotide
cucuuucgugauagggcuu

SEQ ID NO: 118586 - RNA, 19 nt, Artificial Sequence
  Description of Artificial Sequence: Synthetic oligonucleotide
ccauaaugggacccuacuu

SEQ ID NO: 118587 - RNA, 19 nt, Artificial Sequence
  Description of Artificial Sequence: Synthetic oligonucleotide
gcugcuccgcgggcgagac

SEQ ID NO: 118588 - RNA, 19 nt, Artificial Sequence
  Description of Artificial Sequence: Synthetic oligonucleotide
cgcacuugcgcaugaggaa

SEQ ID NO: 118589 - RNA, 19 nt, Artificial Sequence
  Description of Artificial Sequence: Synthetic oligonucleotide
gggacccuacuugcauauc

SEQ ID NO: 118590 - RNA, 19 nt, Artificial Sequence
  Description of Artificial Sequence: Synthetic oligonucleotide
cccgacuacguucuuugau

SEQ ID NO: 118591 - RNA, 19 nt, Artificial Sequence
  Description of Artificial Sequence: Synthetic oligonucleotide
ccgcggcgaacucgacacg

SEQ ID NO: 118592 - RNA, 19 nt, Artificial Sequence
  Description of Artificial Sequence: Synthetic oligonucleotide
ccuacucaagugguauacu

SEQ ID NO: 118593 - RNA, 19 nt, Artificial Sequence
  Description of Artificial Sequence: Synthetic oligonucleotide
cccgcacgaaccagccgca

SEQ ID NO: 118594 - RNA, 19 nt, Artificial Sequence
  Description of Artificial Sequence: Synthetic oligonucleotide
cacauccuggucggcuagu

SEQ ID NO: 118595 - RNA, 19 nt, Artificial Sequence
  Description of Artificial Sequence: Synthetic oligonucleotide
guaccgcgguugcccugaa

SEQ ID NO: 118596 - RNA, 19 nt, Artificial Sequence
  Description of Artificial Sequence: Synthetic oligonucleotide
cgagacgcggaggcagaug

SEQ ID NO: 118597 - RNA, 19 nt, Artificial Sequence
  Description of Artificial Sequence: Synthetic oligonucleotide
gccuccgcucagggaauuc

SEQ ID NO: 118598 - RNA, 19 nt, Artificial Sequence
  Description of Artificial Sequence: Synthetic oligonucleotide
ccacgucuguaccgcgguu

SEQ ID NO: 118599 - RNA, 19 nt, Artificial Sequence
  Description of Artificial Sequence: Synthetic oligonucleotide
cgccuccgcucagggaauu

SEQ ID NO: 118600 - RNA, 19 nt, Artificial Sequence
  Description of Artificial Sequence: Synthetic oligonucleotide
aauaauggagcacaacugc

SEQ ID NO: 118601 - RNA, 19 nt, Artificial Sequence
  Description of Artificial Sequence: Synthetic oligonucleotide
aauauuaguauuaccaagc

SEQ ID NO: 118602 - RNA, 19 nt, Artificial Sequence
  Description of Artificial Sequence: Synthetic oligonucleotide
auuaguauuaccaagccac

SEQ ID NO: 118603 - RNA, 19 nt, Artificial Sequence
  Description of Artificial Sequence: Synthetic oligonucleotide
aagccuuacaaauugcucg

SEQ ID NO: 118604 - RNA, 19 nt, Artificial Sequence
  Description of Artificial Sequence: Synthetic oligonucleotide
ucucuaacacuuaaaaggg

SEQ ID NO: 118605 - RNA, 19 nt, Artificial Sequence
  Description of Artificial Sequence: Synthetic oligonucleotide
aauaauaccgugcgcagag

SEQ ID NO: 118606 - RNA, 19 nt, Artificial Sequence
  Description of Artificial Sequence: Synthetic oligonucleotide
cuaguuauucaacagaacc

SEQ ID NO: 118607 - RNA, 19 nt, Artificial Sequence
  Description of Artificial Sequence: Synthetic oligonucleotide
aguauguacagugagacac

SEQ ID NO: 118608 - RNA, 19 nt, Artificial Sequence
  Description of Artificial Sequence: Synthetic oligonucleotide
aaugacaauaauaccgugc

SEQ ID NO: 118609 - RNA, 19 nt, Artificial Sequence
  Description of Artificial Sequence: Synthetic oligonucleotide
aaagcuagauuuauaacac

SEQ ID NO: 118610 - RNA, 19 nt, Artificial Sequence
  Description of Artificial Sequence: Synthetic oligonucleotide
uacauagugaagaacucgg

SEQ ID NO: 118611 - RNA, 19 nt, Artificial Sequence
  Description of Artificial Sequence: Synthetic oligonucleotide
augacaauaauaccgugcg

SEQ ID NO: 118612 - RNA, 19 nt, Artificial Sequence
  Description of Artificial Sequence: Synthetic oligonucleotide
aaucuagucaauaauggag

SEQ ID NO: 118613 - RNA, 19 nt, Artificial Sequence
  Description of Artificial Sequence: Synthetic oligonucleotide
aaaggguaaaccccuagag

SEQ ID NO: 118614 - RNA, 19 nt, Artificial Sequence
  Description of Artificial Sequence: Synthetic oligonucleotide
gauaaaccggaccuuaggg

SEQ ID NO: 118615 - RNA, 19 nt, Artificial Sequence
  Description of Artificial Sequence: Synthetic oligonucleotide
uuuauuaugaugccuguaa

SEQ ID NO: 118616 - RNA, 19 nt, Artificial Sequence
  Description of Artificial Sequence: Synthetic oligonucleotide
uuaucucuaguugauagcg

SEQ ID NO: 118617 - RNA, 19 nt, Artificial Sequence
  Description of Artificial Sequence: Synthetic oligonucleotide
uggaacuuagaugugacgg

SEQ ID NO: 118618 - RNA, 19 nt, Artificial Sequence
  Description of Artificial Sequence: Synthetic oligonucleotide
uuuaugugucaauaugggg

SEQ ID NO: 118619 - RNA, 19 nt, Artificial Sequence
  Description of Artificial Sequence: Synthetic oligonucleotide
agaaucuuagcucuggaug

SEQ ID NO: 118620 - RNA, 19 nt, Artificial Sequence
  Description of Artificial Sequence: Synthetic oligonucleotide
uuuccuaucuaaacacugg

SEQ ID NO: 118621 - RNA, 19 nt, Artificial Sequence
  Description of Artificial Sequence: Synthetic oligonucleotide
aaaucuagucaauaaugga

SEQ ID NO: 118622 - RNA, 19 nt, Artificial Sequence
  Description of Artificial Sequence: Synthetic oligonucleotide
ugugacggaacuaauauua

SEQ ID NO: 118623 - RNA, 19 nt, Artificial Sequence
  Description of Artificial Sequence: Synthetic oligonucleotide
acaaauagcgccugugacg

SEQ ID NO: 118624 - RNA, 19 nt, Artificial Sequence
  Description of Artificial Sequence: Synthetic oligonucleotide
guaauaacugccuacauaa

SEQ ID NO: 118625 - RNA, 19 nt, Artificial Sequence
  Description of Artificial Sequence: Synthetic oligonucleotide
agaaagcuagauuuauaac

SEQ ID NO: 118626 - RNA, 19 nt, Artificial Sequence
  Description of Artificial Sequence: Synthetic oligonucleotide
aucuagucaauaauggagc

SEQ ID NO: 118627 - RNA, 19 nt, Artificial Sequence
  Description of Artificial Sequence: Synthetic oligonucleotide
auaaaccggaccuuagggg

SEQ ID NO: 118628 - RNA, 19 nt, Artificial Sequence
  Description of Artificial Sequence: Synthetic oligonucleotide
auacaauauaccugacuac

SEQ ID NO: 118629 - RNA, 19 nt, Artificial Sequence
  Description of Artificial Sequence: Synthetic oligonucleotide
uuaagaugguuaaauuaug

SEQ ID NO: 118630 - RNA, 19 nt, Artificial Sequence
  Description of Artificial Sequence: Synthetic oligonucleotide
uaugaccuaaaauggaaca

SEQ ID NO: 118631 - RNA, 19 nt, Artificial Sequence
  Description of Artificial Sequence: Synthetic oligonucleotide
gacaugaucagagcuaccg

SEQ ID NO: 118632 - RNA, 19 nt, Artificial Sequence
  Description of Artificial Sequence: Synthetic oligonucleotide
ugauaaaccggaccuuagg

SEQ ID NO: 118633 - RNA, 19 nt, Artificial Sequence
  Description of Artificial Sequence: Synthetic oligonucleotide
aguauuaccaagccaccuc

SEQ ID NO: 118634 - RNA, 19 nt, Artificial Sequence
  Description of Artificial Sequence: Synthetic oligonucleotide
uccuaugugcaucugaagu

SEQ ID NO: 118635 - RNA, 19 nt, Artificial Sequence
  Description of Artificial Sequence: Synthetic oligonucleotide
gaugcaacaggacaaugug

SEQ ID NO: 118636 - RNA, 19 nt, Artificial Sequence
  Description of Artificial Sequence: Synthetic oligonucleotide
auagcguccaccuucauau

SEQ ID NO: 118637 - RNA, 19 nt, Artificial Sequence
  Description of Artificial Sequence: Synthetic oligonucleotide
uuauuuaugcauugguccu

SEQ ID NO: 118638 - RNA, 19 nt, Artificial Sequence
  Description of Artificial Sequence: Synthetic oligonucleotide
uuguuauacugcuaaacac

SEQ ID NO: 118639 - RNA, 19 nt, Artificial Sequence
  Description of Artificial Sequence: Synthetic oligonucleotide
accacaacaaagcaccauc

SEQ ID NO: 118640 - RNA, 19 nt, Artificial Sequence
  Description of Artificial Sequence: Synthetic oligonucleotide
uccuaagaagucaaguaca

SEQ ID NO: 118641 - RNA, 19 nt, Artificial Sequence
  Description of Artificial Sequence: Synthetic oligonucleotide
uauuacuuacauagugaag

SEQ ID NO: 118642 - RNA, 19 nt, Artificial Sequence
  Description of Artificial Sequence: Synthetic oligonucleotide
auccuuauaccaccaaaac

SEQ ID NO: 118643 - RNA, 19 nt, Artificial Sequence
  Description of Artificial Sequence: Synthetic oligonucleotide
acuuacauagugaagaacu

SEQ ID NO: 118644 - RNA, 19 nt, Artificial Sequence
  Description of Artificial Sequence: Synthetic oligonucleotide
cuaucuaaacacugguucc

SEQ ID NO: 118645 - RNA, 19 nt, Artificial Sequence
  Description of Artificial Sequence: Synthetic oligonucleotide
gaaguauguacagugagac

SEQ ID NO: 118646 - RNA, 19 nt, Artificial Sequence
  Description of Artificial Sequence: Synthetic oligonucleotide
uauuaguauuaccaagcca

SEQ ID NO: 118647 - RNA, 19 nt, Artificial Sequence
  Description of Artificial Sequence: Synthetic oligonucleotide
uaugcagaauccuaaaaua

SEQ ID NO: 118648 - RNA, 19 nt, Artificial Sequence
  Description of Artificial Sequence: Synthetic oligonucleotide
uaaacagacaccuuccuuu

SEQ ID NO: 118649 - RNA, 19 nt, Artificial Sequence
  Description of Artificial Sequence: Synthetic oligonucleotide
agcuagauuuauaacacac

SEQ ID NO: 118650 - RNA, 19 nt, Artificial Sequence
  Description of Artificial Sequence: Synthetic oligonucleotide
uccuuauaccaccaaaacu

SEQ ID NO: 118651 - RNA, 19 nt, Artificial Sequence
  Description of Artificial Sequence: Synthetic oligonucleotide
uuuaucucuaguugauagc

SEQ ID NO: 118652 - RNA, 19 nt, Artificial Sequence
  Description of Artificial Sequence: Synthetic oligonucleotide
ugacggaacuaauauuagg

SEQ ID NO: 118653 - RNA, 19 nt, Artificial Sequence
  Description of Artificial Sequence: Synthetic oligonucleotide
aucauuaggcaagaaugcc

SEQ ID NO: 118654 - RNA, 19 nt, Artificial Sequence
  Description of Artificial Sequence: Synthetic oligonucleotide
guucaaacgcuuaagguag

SEQ ID NO: 118655 - RNA, 19 nt, Artificial Sequence
  Description of Artificial Sequence: Synthetic oligonucleotide
agugauucggacccgagca

SEQ ID NO: 118656 - RNA, 19 nt, Artificial Sequence
  Description of Artificial Sequence: Synthetic oligonucleotide
uacaauauaccugacuacu

SEQ ID NO: 118657 - RNA, 19 nt, Artificial Sequence
  Description of Artificial Sequence: Synthetic oligonucleotide
gaaucucuaacacuuaaaa

SEQ ID NO: 118658 - RNA, 19 nt, Artificial Sequence
  Description of Artificial Sequence: Synthetic oligonucleotide
uccuaguuauucaacagaa

SEQ ID NO: 118659 - RNA, 19 nt, Artificial Sequence
  Description of Artificial Sequence: Synthetic oligonucleotide
aaauccuuauaccaccaaa

SEQ ID NO: 118660 - RNA, 19 nt, Artificial Sequence
  Description of Artificial Sequence: Synthetic oligonucleotide
ugucuagcuuuuauuauga

SEQ ID NO: 118661 - RNA, 19 nt, Artificial Sequence
  Description of Artificial Sequence: Synthetic oligonucleotide
uuccuaucaaagcccauag

SEQ ID NO: 118662 - RNA, 19 nt, Artificial Sequence
  Description of Artificial Sequence: Synthetic oligonucleotide
aaagccuuacaaauugcuc

SEQ ID NO: 118663 - RNA, 19 nt, Artificial Sequence
  Description of Artificial Sequence: Synthetic oligonucleotide
caaauagcgccugugacgg

SEQ ID NO: 118664 - RNA, 19 nt, Artificial Sequence
  Description of Artificial Sequence: Synthetic oligonucleotide
uaagagucacuguuaacug

SEQ ID NO: 118665 - RNA, 19 nt, Artificial Sequence
  Description of Artificial Sequence: Synthetic oligonucleotide
gaagaacucggacaaaaca

SEQ ID NO: 118666 - RNA, 19 nt, Artificial Sequence
  Description of Artificial Sequence: Synthetic oligonucleotide
uguuaauccuaguuauuca

SEQ ID NO: 118667 - RNA, 19 nt, Artificial Sequence
  Description of Artificial Sequence: Synthetic oligonucleotide
gacuacuauuuucugcccg

SEQ ID NO: 118668 - RNA, 19 nt, Artificial Sequence
  Description of Artificial Sequence: Synthetic oligonucleotide
aagauugaucaguuuaaaa

SEQ ID NO: 118669 - RNA, 19 nt, Artificial Sequence
  Description of Artificial Sequence: Synthetic oligonucleotide
gaugugacggucaauaaga

SEQ ID NO: 118670 - RNA, 19 nt, Artificial Sequence
  Description of Artificial Sequence: Synthetic oligonucleotide
uccaaauauuaguauuacc

SEQ ID NO: 118671 - RNA, 19 nt, Artificial Sequence
  Description of Artificial Sequence: Synthetic oligonucleotide
uuaguauuaccaagccacc

SEQ ID NO: 118672 - RNA, 19 nt, Artificial Sequence
  Description of Artificial Sequence: Synthetic oligonucleotide
cuauguaauaacugccuac

SEQ ID NO: 118673 - RNA, 19 nt, Artificial Sequence
  Description of Artificial Sequence: Synthetic oligonucleotide
ucugaaguauguacaguga

SEQ ID NO: 118674 - RNA, 19 nt, Artificial Sequence
  Description of Artificial Sequence: Synthetic oligonucleotide
uggacuagaaacuggugcu

SEQ ID NO: 118675 - RNA, 19 nt, Artificial Sequence
  Description of Artificial Sequence: Synthetic oligonucleotide
uaggaugccauauuuuagu

SEQ ID NO: 118676 - RNA, 19 nt, Artificial Sequence
  Description of Artificial Sequence: Synthetic oligonucleotide
gacaccaucauuccccuac

SEQ ID NO: 118677 - RNA, 19 nt, Artificial Sequence
  Description of Artificial Sequence: Synthetic oligonucleotide
uaccugacuacuauuuucu

SEQ ID NO: 118678 - RNA, 19 nt, Artificial Sequence
  Description of Artificial Sequence: Synthetic oligonucleotide
uaucuccuauguaauaacu

SEQ ID NO: 118679 - RNA, 19 nt, Artificial Sequence
  Description of Artificial Sequence: Synthetic oligonucleotide
cuuacaaauugcucgaaga

SEQ ID NO: 118680 - RNA, 19 nt, Artificial Sequence
  Description of Artificial Sequence: Synthetic oligonucleotide
aggguaaaccccuagagua

SEQ ID NO: 118681 - RNA, 19 nt, Artificial Sequence
  Description of Artificial Sequence: Synthetic oligonucleotide
ugacggucaauaagaacag

SEQ ID NO: 118682 - RNA, 19 nt, Artificial Sequence
  Description of Artificial Sequence: Synthetic oligonucleotide
caagaucuacuuuaauuug

SEQ ID NO: 118683 - RNA, 19 nt, Artificial Sequence
  Description of Artificial Sequence: Synthetic oligonucleotide
ucuagucaauaauggagca

SEQ ID NO: 118684 - RNA, 19 nt, Artificial Sequence
  Description of Artificial Sequence: Synthetic oligonucleotide
cugaaguauguacagugag

SEQ ID NO: 118685 - RNA, 19 nt, Artificial Sequence
  Description of Artificial Sequence: Synthetic oligonucleotide
guaacagagcuugauaggc

SEQ ID NO: 118686 - RNA, 19 nt, Artificial Sequence
  Description of Artificial Sequence: Synthetic oligonucleotide
uauuaaaucugggaauacu

SEQ ID NO: 118687 - RNA, 19 nt, Artificial Sequence
  Description of Artificial Sequence: Synthetic oligonucleotide
gacggaacuaauauuagga

SEQ ID NO: 118688 - RNA, 19 nt, Artificial Sequence
  Description of Artificial Sequence: Synthetic oligonucleotide
acuaauauuaggaugccau

SEQ ID NO: 118689 - RNA, 19 nt, Artificial Sequence
  Description of Artificial Sequence: Synthetic oligonucleotide
guuggugcuccucaagagg

SEQ ID NO: 118690 - RNA, 19 nt, Artificial Sequence
  Description of Artificial Sequence: Synthetic oligonucleotide
ucggacaaaacauuucaaa

SEQ ID NO: 118691 - RNA, 19 nt, Artificial Sequence
  Description of Artificial Sequence: Synthetic oligonucleotide
uuugguguauucuggacua

SEQ ID NO: 118692 - RNA, 19 nt, Artificial Sequence
  Description of Artificial Sequence: Synthetic oligonucleotide
guauuaccaagccaccucc

SEQ ID NO: 118693 - RNA, 19 nt, Artificial Sequence
  Description of Artificial Sequence: Synthetic oligonucleotide
aaccuuauuaagaugguua

SEQ ID NO: 118694 - RNA, 19 nt, Artificial Sequence
  Description of Artificial Sequence: Synthetic oligonucleotide
cuaugaccuaaaauggaac

SEQ ID NO: 118695 - RNA, 19 nt, Artificial Sequence
  Description of Artificial Sequence: Synthetic oligonucleotide
uguacugauuugcuacuac

SEQ ID NO: 118696 - RNA, 19 nt, Artificial Sequence
  Description of Artificial Sequence: Synthetic oligonucleotide
auauuaggaugccauauuu

SEQ ID NO: 118697 - RNA, 19 nt, Artificial Sequence
  Description of Artificial Sequence: Synthetic oligonucleotide
aacucgcuagucuuguuau

SEQ ID NO: 118698 - RNA, 19 nt, Artificial Sequence
  Description of Artificial Sequence: Synthetic oligonucleotide
cuuacauagugaagaacuc

SEQ ID NO: 118699 - RNA, 19 nt, Artificial Sequence
  Description of Artificial Sequence: Synthetic oligonucleotide
acacuuaaaagggugguca

SEQ ID NO: 118700 - RNA, 19 nt, Artificial Sequence
  Description of Artificial Sequence: Synthetic oligonucleotide
aaacucgcuagucuuguua

SEQ ID NO: 118701 - RNA, 19 nt, Artificial Sequence
  Description of Artificial Sequence: Synthetic oligonucleotide
agugcuugcaaugacaaua

SEQ ID NO: 118702 - RNA, 19 nt, Artificial Sequence
  Description of Artificial Sequence: Synthetic oligonucleotide
uaccuuaccucagugacac

SEQ ID NO: 118703 - RNA, 19 nt, Artificial Sequence
  Description of Artificial Sequence: Synthetic oligonucleotide
cuugaaccuuauuaagaug

SEQ ID NO: 118704 - RNA, 19 nt, Artificial Sequence
  Description of Artificial Sequence: Synthetic oligonucleotide
accuuauuaagaugguuaa

SEQ ID NO: 118705 - RNA, 19 nt, Artificial Sequence
  Description of Artificial Sequence: Synthetic oligonucleotide
uaauaccgugcgcagaguc

SEQ ID NO: 118706 - RNA, 19 nt, Artificial Sequence
  Description of Artificial Sequence: Synthetic oligonucleotide
uccauguucaaacgcuuaa

SEQ ID NO: 118707 - RNA, 19 nt, Artificial Sequence
  Description of Artificial Sequence: Synthetic oligonucleotide
agugauuaauacagaauca

SEQ ID NO: 118708 - RNA, 19 nt, Artificial Sequence
  Description of Artificial Sequence: Synthetic oligonucleotide
gcuacuacugcaucuuggg

SEQ ID NO: 118709 - RNA, 19 nt, Artificial Sequence
  Description of Artificial Sequence: Synthetic oligonucleotide
ugacaauaauaccgugcgc

SEQ ID NO: 118710 - RNA, 19 nt, Artificial Sequence
  Description of Artificial Sequence: Synthetic oligonucleotide
gagacacucaguguuaauc

SEQ ID NO: 118711 - RNA, 19 nt, Artificial Sequence
  Description of Artificial Sequence: Synthetic oligonucleotide
uguuaacugugaaagccuu

SEQ ID NO: 118712 - RNA, 19 nt, Artificial Sequence
  Description of Artificial Sequence: Synthetic oligonucleotide
uguauacaauauaccugac

SEQ ID NO: 118713 - RNA, 19 nt, Artificial Sequence
  Description of Artificial Sequence: Synthetic oligonucleotide
aacuaauauuaggaugcca

SEQ ID NO: 118714 - RNA, 19 nt, Artificial Sequence
  Description of Artificial Sequence: Synthetic oligonucleotide
ccuaucuaaacacugguuc

SEQ ID NO: 118715 - RNA, 19 nt, Artificial Sequence
  Description of Artificial Sequence: Synthetic oligonucleotide
auggugccuagauaacauc

SEQ ID NO: 118716 - RNA, 19 nt, Artificial Sequence
  Description of Artificial Sequence: Synthetic oligonucleotide
uaucucuaguugauagcgu

SEQ ID NO: 118717 - RNA, 19 nt, Artificial Sequence
  Description of Artificial Sequence: Synthetic oligonucleotide
uucagcuacccauccuaag

SEQ ID NO: 118718 - RNA, 19 nt, Artificial Sequence
  Description of Artificial Sequence: Synthetic oligonucleotide
acggaacuaauauuaggau

SEQ ID NO: 118719 - RNA, 19 nt, Artificial Sequence
  Description of Artificial Sequence: Synthetic oligonucleotide
uccucaagaggcgagcgug

SEQ ID NO: 118720 - RNA, 19 nt, Artificial Sequence
  Description of Artificial Sequence: Synthetic oligonucleotide
uuaauguuauagucugauu

SEQ ID NO: 118721 - RNA, 19 nt, Artificial Sequence
  Description of Artificial Sequence: Synthetic oligonucleotide
aacacaccccuauuccuau

SEQ ID NO: 118722 - RNA, 19 nt, Artificial Sequence
  Description of Artificial Sequence: Synthetic oligonucleotide
aacuaaguaggguccuuuu

SEQ ID NO: 118723 - RNA, 19 nt, Artificial Sequence
  Description of Artificial Sequence: Synthetic oligonucleotide
agccuuacaaauugcucga

SEQ ID NO: 118724 - RNA, 19 nt, Artificial Sequence
  Description of Artificial Sequence: Synthetic oligonucleotide
cuugccucugaacuaaaca

SEQ ID NO: 118725 - RNA, 19 nt, Artificial Sequence
  Description of Artificial Sequence: Synthetic oligonucleotide
caucauuccccuaccuuac

SEQ ID NO: 118726 - RNA, 19 nt, Artificial Sequence
  Description of Artificial Sequence: Synthetic oligonucleotide
cuaaacacugguuccaucu

SEQ ID NO: 118727 - RNA, 19 nt, Artificial Sequence
  Description of Artificial Sequence: Synthetic oligonucleotide
auaacagauguuggugcuc

SEQ ID NO: 118728 - RNA, 19 nt, Artificial Sequence
  Description of Artificial Sequence: Synthetic oligonucleotide
ugcuauuucuccucuuaau

SEQ ID NO: 118729 - RNA, 19 nt, Artificial Sequence
  Description of Artificial Sequence: Synthetic oligonucleotide
caaacaaauagcgccugug

SEQ ID NO: 118730 - RNA, 19 nt, Artificial Sequence
  Description of Artificial Sequence: Synthetic oligonucleotide
aauagcgccugugacggaa

SEQ ID NO: 118731 - RNA, 19 nt, Artificial Sequence
  Description of Artificial Sequence: Synthetic oligonucleotide
gguuaaauuauguguuuga

SEQ ID NO: 118732 - RNA, 19 nt, Artificial Sequence
  Description of Artificial Sequence: Synthetic oligonucleotide
aucaauugcugaaagcuaa

SEQ ID NO: 118733 - RNA, 19 nt, Artificial Sequence
  Description of Artificial Sequence: Synthetic oligonucleotide
acggucaauaagaacagga

SEQ ID NO: 118734 - RNA, 19 nt, Artificial Sequence
  Description of Artificial Sequence: Synthetic oligonucleotide
cacuguuaacugugaaagc

SEQ ID NO: 118735 - RNA, 19 nt, Artificial Sequence
  Description of Artificial Sequence: Synthetic oligonucleotide
aauaccgugcgcagaguca

SEQ ID NO: 118736 - RNA, 19 nt, Artificial Sequence
  Description of Artificial Sequence: Synthetic oligonucleotide
uucaaacgcuuaagguagc

SEQ ID NO: 118737 - RNA, 19 nt, Artificial Sequence
  Description of Artificial Sequence: Synthetic oligonucleotide
aucuccuauguaauaacug

SEQ ID NO: 118738 - RNA, 19 nt, Artificial Sequence
  Description of Artificial Sequence: Synthetic oligonucleotide
cuacccauccuaagaaguc

SEQ ID NO: 118739 - RNA, 19 nt, Artificial Sequence
  Description of Artificial Sequence: Synthetic oligonucleotide
agcacguuucccaccaaac

SEQ ID NO: 118740 - RNA, 19 nt, Artificial Sequence
  Description of Artificial Sequence: Synthetic oligonucleotide
acacgaacgcugccacugc

SEQ ID NO: 118741 - RNA, 19 nt, Artificial Sequence
  Description of Artificial Sequence: Synthetic oligonucleotide
gaacuuagaugugacgguc

SEQ ID NO: 118742 - RNA, 19 nt, Artificial Sequence
  Description of Artificial Sequence: Synthetic oligonucleotide
uucguacccgccuccuccg

SEQ ID NO: 118743 - RNA, 19 nt, Artificial Sequence
  Description of Artificial Sequence: Synthetic oligonucleotide
uuucagcuacccauccuaa

SEQ ID NO: 118744 - RNA, 19 nt, Artificial Sequence
  Description of Artificial Sequence: Synthetic oligonucleotide
uacuuacauagugaagaac

SEQ ID NO: 118745 - RNA, 19 nt, Artificial Sequence
  Description of Artificial Sequence: Synthetic oligonucleotide
gacgaaccaagccaaaggu

SEQ ID NO: 118746 - RNA, 19 nt, Artificial Sequence
  Description of Artificial Sequence: Synthetic oligonucleotide
gagauaauauucccugaua

SEQ ID NO: 118747 - RNA, 19 nt, Artificial Sequence
  Description of Artificial Sequence: Synthetic oligonucleotide
ucccucagugauucggacc

SEQ ID NO: 118748 - RNA, 19 nt, Artificial Sequence
  Description of Artificial Sequence: Synthetic oligonucleotide
uaaacacugguuccaucua

SEQ ID NO: 118749 - RNA, 19 nt, Artificial Sequence
  Description of Artificial Sequence: Synthetic oligonucleotide
uaguauuaccaagccaccu

SEQ ID NO: 118750 - RNA, 19 nt, Artificial Sequence
  Description of Artificial Sequence: Synthetic oligonucleotide
aacuuagaugugacgguca

SEQ ID NO: 118751 - RNA, 19 nt, Artificial Sequence
  Description of Artificial Sequence: Synthetic oligonucleotide
aacgcuuaagguagcugug

SEQ ID NO: 118752 - RNA, 19 nt, Artificial Sequence
  Description of Artificial Sequence: Synthetic oligonucleotide
ugcuaaacacuaacaggua

SEQ ID NO: 118753 - RNA, 19 nt, Artificial Sequence
  Description of Artificial Sequence: Synthetic oligonucleotide
agcaugcaaguaaauucac

SEQ ID NO: 118754 - RNA, 19 nt, Artificial Sequence
  Description of Artificial Sequence: Synthetic oligonucleotide
cuagucaauaauggagcac

SEQ ID NO: 118755 - RNA, 19 nt, Artificial Sequence
  Description of Artificial Sequence: Synthetic oligonucleotide
augguuaaauuauguguuu

SEQ ID NO: 118756 - RNA, 19 nt, Artificial Sequence
  Description of Artificial Sequence: Synthetic oligonucleotide
ccuaccuuaccucagugac

SEQ ID NO: 118757 - RNA, 19 nt, Artificial Sequence
  Description of Artificial Sequence: Synthetic oligonucleotide
ccugacuacuauuuucugc

SEQ ID NO: 118758 - RNA, 19 nt, Artificial Sequence
  Description of Artificial Sequence: Synthetic oligonucleotide
auguuauagucugauucca

SEQ ID NO: 118759 - RNA, 19 nt, Artificial Sequence
  Description of Artificial Sequence: Synthetic oligonucleotide
acuaaguaggguccuuuua

SEQ ID NO: 118760 - RNA, 19 nt, Artificial Sequence
  Description of Artificial Sequence: Synthetic oligonucleotide
acuuagaugugacggucaa

SEQ ID NO: 118761 - RNA, 19 nt, Artificial Sequence
  Description of Artificial Sequence: Synthetic oligonucleotide
aaacuaaguaggguccuuu

SEQ ID NO: 118762 - RNA, 19 nt, Artificial Sequence
  Description of Artificial Sequence: Synthetic oligonucleotide
ugauucggacccgagcaca

SEQ ID NO: 118763 - RNA, 19 nt, Artificial Sequence
  Description of Artificial Sequence: Synthetic oligonucleotide
ugacaccuuguggugauga

SEQ ID NO: 118764 - RNA, 19 nt, Artificial Sequence
  Description of Artificial Sequence: Synthetic oligonucleotide
uuacuccuuggaacuagaa

SEQ ID NO: 118765 - RNA, 19 nt, Artificial Sequence
  Description of Artificial Sequence: Synthetic oligonucleotide
guugcuacacuggauuuca

SEQ ID NO: 118766 - RNA, 19 nt, Artificial Sequence
  Description of Artificial Sequence: Synthetic oligonucleotide
gacggucaauaagaacagg

SEQ ID NO: 118767 - RNA, 19 nt, Artificial Sequence
  Description of Artificial Sequence: Synthetic oligonucleotide
caggaaaugugugcauccg

SEQ ID NO: 118768 - RNA, 19 nt, Artificial Sequence
  Description of Artificial Sequence: Synthetic oligonucleotide
agcugauucguacccgccu

SEQ ID NO: 118769 - RNA, 19 nt, Artificial Sequence
  Description of Artificial Sequence: Synthetic oligonucleotide
uacaagcaugcaaguaaau

SEQ ID NO: 118770 - RNA, 19 nt, Artificial Sequence
  Description of Artificial Sequence: Synthetic oligonucleotide
gauagcguccaccuucaua

SEQ ID NO: 118771 - RNA, 19 nt, Artificial Sequence
  Description of Artificial Sequence: Synthetic oligonucleotide
cagugauucggacccgagc

SEQ ID NO: 118772 - RNA, 19 nt, Artificial Sequence
  Description of Artificial Sequence: Synthetic oligonucleotide
gugacggaacuaauauuag

SEQ ID NO: 118773 - RNA, 19 nt, Artificial Sequence
  Description of Artificial Sequence: Synthetic oligonucleotide
cuaauauuaggaugccaua

SEQ ID NO: 118774 - RNA, 19 nt, Artificial Sequence
  Description of Artificial Sequence: Synthetic oligonucleotide
auuccuaucaaagcccaua

SEQ ID NO: 118775 - RNA, 19 nt, Artificial Sequence
  Description of Artificial Sequence: Synthetic oligonucleotide
caaaggguaaaccccuaga

SEQ ID NO: 118776 - RNA, 19 nt, Artificial Sequence
  Description of Artificial Sequence: Synthetic oligonucleotide
ucgcuagucuuguuauacu

SEQ ID NO: 118777 - RNA, 19 nt, Artificial Sequence
  Description of Artificial Sequence: Synthetic oligonucleotide
aaaacuaaguaggguccuu

SEQ ID NO: 118778 - RNA, 19 nt, Artificial Sequence
  Description of Artificial Sequence: Synthetic oligonucleotide
gugauaaaccggaccuuag

SEQ ID NO: 118779 - RNA, 19 nt, Artificial Sequence
  Description of Artificial Sequence: Synthetic oligonucleotide
cugauucguacccgccucc

SEQ ID NO: 118780 - RNA, 19 nt, Artificial Sequence
  Description of Artificial Sequence: Synthetic oligonucleotide
cucgaagaaccuucacauc

SEQ ID NO: 118781 - RNA, 19 nt, Artificial Sequence
  Description of Artificial Sequence: Synthetic oligonucleotide
caccgcuacgaccaccgcc

SEQ ID NO: 118782 - RNA, 19 nt, Artificial Sequence
  Description of Artificial Sequence: Synthetic oligonucleotide
gucaauaauggagcacaac

SEQ ID NO: 118783 - RNA, 19 nt, Artificial Sequence
  Description of Artificial Sequence: Synthetic oligonucleotide
agaaucucuaacacuuaaa

SEQ ID NO: 118784 - RNA, 19 nt, Artificial Sequence
  Description of Artificial Sequence: Synthetic oligonucleotide
cuaaguaggguccuuuuau

SEQ ID NO: 118785 - RNA, 19 nt, Artificial Sequence
  Description of Artificial Sequence: Synthetic oligonucleotide
cggaacuaauauuaggaug

SEQ ID NO: 118786 - RNA, 19 nt, Artificial Sequence
  Description of Artificial Sequence: Synthetic oligonucleotide
agaacucggacaaaacauu

SEQ ID NO: 118787 - RNA, 19 nt, Artificial Sequence
  Description of Artificial Sequence: Synthetic oligonucleotide
uugauucgcugcaccgcga

SEQ ID NO: 118788 - RNA, 19 nt, Artificial Sequence
  Description of Artificial Sequence: Synthetic oligonucleotide
acgaaccaagccaaaggug

SEQ ID NO: 118789 - RNA, 19 nt, Artificial Sequence
  Description of Artificial Sequence: Synthetic oligonucleotide
gacacucaguguuaauccu

SEQ ID NO: 118790 - RNA, 19 nt, Artificial Sequence
  Description of Artificial Sequence: Synthetic oligonucleotide
caaacgcuuaagguagcug

SEQ ID NO: 118791 - RNA, 19 nt, Artificial Sequence
  Description of Artificial Sequence: Synthetic oligonucleotide
ggucauuucagcuacccau

SEQ ID NO: 118792 - RNA, 19 nt, Artificial Sequence
  Description of Artificial Sequence: Synthetic oligonucleotide
caaaccuaugaccuaaaau

SEQ ID NO: 118793 - RNA, 19 nt, Artificial Sequence
  Description of Artificial Sequence: Synthetic oligonucleotide
ggguccuuuuauuaaaucu

SEQ ID NO: 118794 - RNA, 19 nt, Artificial Sequence
  Description of Artificial Sequence: Synthetic oligonucleotide
ccuuacaaauugcucgaag

SEQ ID NO: 118795 - RNA, 19 nt, Artificial Sequence
  Description of Artificial Sequence: Synthetic oligonucleotide
gcaaaggguaaaccccuag

SEQ ID NO: 118796 - RNA, 19 nt, Artificial Sequence
  Description of Artificial Sequence: Synthetic oligonucleotide
caguguuaauccuaguuau

SEQ ID NO: 118797 - RNA, 19 nt, Artificial Sequence
  Description of Artificial Sequence: Synthetic oligonucleotide
uugguguauucuggacuag

SEQ ID NO: 118798 - RNA, 19 nt, Artificial Sequence
  Description of Artificial Sequence: Synthetic oligonucleotide
gguccuagcaguaaauaaa

SEQ ID NO: 118799 - RNA, 19 nt, Artificial Sequence
  Description of Artificial Sequence: Synthetic oligonucleotide
acaccccuauuccuaugug

SEQ ID NO: 118800 - RNA, 19 nt, Artificial Sequence
  Description of Artificial Sequence: Synthetic oligonucleotide
cuuacuccuuggaacuaga

SEQ ID NO: 118801 - RNA, 19 nt, Artificial Sequence
  Description of Artificial Sequence: Synthetic oligonucleotide
gugacacaaucaugacacc

SEQ ID NO: 118802 - RNA, 19 nt, Artificial Sequence
  Description of Artificial Sequence: Synthetic oligonucleotide
cucuaguugauagcgucca

SEQ ID NO: 118803 - RNA, 19 nt, Artificial Sequence
  Description of Artificial Sequence: Synthetic oligonucleotide
agucgagcugucugcuuga

SEQ ID NO: 118804 - RNA, 19 nt, Artificial Sequence
  Description of Artificial Sequence: Synthetic oligonucleotide
caauauaccugacuacuau

SEQ ID NO: 118805 - RNA, 19 nt, Artificial Sequence
  Description of Artificial Sequence: Synthetic oligonucleotide
cuaccuuaccucagugaca

SEQ ID NO: 118806 - RNA, 19 nt, Artificial Sequence
  Description of Artificial Sequence: Synthetic oligonucleotide
gauucggacccgagcacac

SEQ ID NO: 118807 - RNA, 19 nt, Artificial Sequence
  Description of Artificial Sequence: Synthetic oligonucleotide
cagcugauucguacccgcc

SEQ ID NO: 118808 - RNA, 19 nt, Artificial Sequence
  Description of Artificial Sequence: Synthetic oligonucleotide
aaauagcgccugugacgga

SEQ ID NO: 118809 - RNA, 19 nt, Artificial Sequence
  Description of Artificial Sequence: Synthetic oligonucleotide
gagcacaacugcccaugac

SEQ ID NO: 118810 - RNA, 19 nt, Artificial Sequence
  Description of Artificial Sequence: Synthetic oligonucleotide
ggggauuaaauggauaugu

SEQ ID NO: 118811 - RNA, 19 nt, Artificial Sequence
  Description of Artificial Sequence: Synthetic oligonucleotide
cgaaccaagccaaagguga

SEQ ID NO: 118812 - RNA, 19 nt, Artificial Sequence
  Description of Artificial Sequence: Synthetic oligonucleotide
gcccauugaucuuucagga

SEQ ID NO: 118813 - RNA, 19 nt, Artificial Sequence
  Description of Artificial Sequence: Synthetic oligonucleotide
auaccgugcgcagagucau

SEQ ID NO: 118814 - RNA, 19 nt, Artificial Sequence
  Description of Artificial Sequence: Synthetic oligonucleotide
ccuaugaccuaaaauggaa

SEQ ID NO: 118815 - RNA, 19 nt, Artificial Sequence
  Description of Artificial Sequence: Synthetic oligonucleotide
cucaagaggcgagcguggc

SEQ ID NO: 118816 - RNA, 19 nt, Artificial Sequence
  Description of Artificial Sequence: Synthetic oligonucleotide
ggacccgagcacacgaacg

SEQ ID NO: 118817 - RNA, 19 nt, Artificial Sequence
  Description of Artificial Sequence: Synthetic oligonucleotide
ugauucguacccgccuccu

SEQ ID NO: 118818 - RNA, 19 nt, Artificial Sequence
  Description of Artificial Sequence: Synthetic oligonucleotide
cucccucagugauucggac

SEQ ID NO: 118819 - RNA, 19 nt, Artificial Sequence
  Description of Artificial Sequence: Synthetic oligonucleotide
aguugauagcguccaccuu

SEQ ID NO: 118820 - RNA, 19 nt, Artificial Sequence
  Description of Artificial Sequence: Synthetic oligonucleotide
acgcuuaagguagcuguga

SEQ ID NO: 118821 - RNA, 19 nt, Artificial Sequence
  Description of Artificial Sequence: Synthetic oligonucleotide
auagcgccugugacggaac

SEQ ID NO: 118822 - RNA, 19 nt, Artificial Sequence
  Description of Artificial Sequence: Synthetic oligonucleotide
uagcgccugugacggaacu

SEQ ID NO: 118823 - RNA, 19 nt, Artificial Sequence
  Description of Artificial Sequence: Synthetic oligonucleotide
agaaauugucuagcuuuua

SEQ ID NO: 118824 - RNA, 19 nt, Artificial Sequence
  Description of Artificial Sequence: Synthetic oligonucleotide
guaaacagacaccuuccuu

SEQ ID NO: 118825 - RNA, 19 nt, Artificial Sequence
  Description of Artificial Sequence: Synthetic oligonucleotide
uagcguccaccuucauaug

SEQ ID NO: 118826 - RNA, 19 nt, Artificial Sequence
  Description of Artificial Sequence: Synthetic oligonucleotide
acacaccccuauuccuaug

SEQ ID NO: 118827 - RNA, 19 nt, Artificial Sequence
  Description of Artificial Sequence: Synthetic oligonucleotide
ggaacuuagaugugacggu

SEQ ID NO: 118828 - RNA, 19 nt, Artificial Sequence
  Description of Artificial Sequence: Synthetic oligonucleotide
ccuaagaagucaaguacaa

SEQ ID NO: 118829 - RNA, 19 nt, Artificial Sequence
  Description of Artificial Sequence: Synthetic oligonucleotide
accgcgauguuggccaugu

SEQ ID NO: 118830 - RNA, 19 nt, Artificial Sequence
  Description of Artificial Sequence: Synthetic oligonucleotide
ccaucaauugcugaaagcu

SEQ ID NO: 118831 - RNA, 19 nt, Artificial Sequence
  Description of Artificial Sequence: Synthetic oligonucleotide
uucugcccgaauucaucuu

SEQ ID NO: 118832 - RNA, 19 nt, Artificial Sequence
  Description of Artificial Sequence: Synthetic oligonucleotide
gcugauucguacccgccuc

SEQ ID NO: 118833 - RNA, 19 nt, Artificial Sequence
  Description of Artificial Sequence: Synthetic oligonucleotide
gcaguaacagagcuugaua

SEQ ID NO: 118834 - RNA, 19 nt, Artificial Sequence
  Description of Artificial Sequence: Synthetic oligonucleotide
cugcuauuucuccucuuaa

SEQ ID NO: 118835 - RNA, 19 nt, Artificial Sequence
  Description of Artificial Sequence: Synthetic oligonucleotide
ccuaugugcaucugaagua

SEQ ID NO: 118836 - RNA, 19 nt, Artificial Sequence
  Description of Artificial Sequence: Synthetic oligonucleotide
cgcuugauucgcugcaccg

SEQ ID NO: 118837 - RNA, 19 nt, Artificial Sequence
  Description of Artificial Sequence: Synthetic oligonucleotide
augugacggucaauaagaa

SEQ ID NO: 118838 - RNA, 19 nt, Artificial Sequence
  Description of Artificial Sequence: Synthetic oligonucleotide
gguggacgaaccaagccaa

SEQ ID NO: 118839 - RNA, 19 nt, Artificial Sequence
  Description of Artificial Sequence: Synthetic oligonucleotide
ugauagcguccaccuucau

SEQ ID NO: 118840 - RNA, 19 nt, Artificial Sequence
  Description of Artificial Sequence: Synthetic oligonucleotide
ccuagaguauuucauacuu

SEQ ID NO: 118841 - RNA, 19 nt, Artificial Sequence
  Description of Artificial Sequence: Synthetic oligonucleotide
gugcuccucaagaggcgag

SEQ ID NO: 118842 - RNA, 19 nt, Artificial Sequence
  Description of Artificial Sequence: Synthetic oligonucleotide
cacaccccuauuccuaugu

SEQ ID NO: 118843 - RNA, 19 nt, Artificial Sequence
  Description of Artificial Sequence: Synthetic oligonucleotide
ccugugacggaacuaauau

SEQ ID NO: 118844 - RNA, 19 nt, Artificial Sequence
  Description of Artificial Sequence: Synthetic oligonucleotide
gcuacccauccuaagaagu

SEQ ID NO: 118845 - RNA, 19 nt, Artificial Sequence
  Description of Artificial Sequence: Synthetic oligonucleotide
cucuacaucccaugauuuu

SEQ ID NO: 118846 - RNA, 19 nt, Artificial Sequence
  Description of Artificial Sequence: Synthetic oligonucleotide
guguugcuacacuggauuu

SEQ ID NO: 118847 - RNA, 19 nt, Artificial Sequence
  Description of Artificial Sequence: Synthetic oligonucleotide
cacuaacagguaauauuuu

SEQ ID NO: 118848 - RNA, 19 nt, Artificial Sequence
  Description of Artificial Sequence: Synthetic oligonucleotide
cuacgaccaccgccaccgc

SEQ ID NO: 118849 - RNA, 19 nt, Artificial Sequence
  Description of Artificial Sequence: Synthetic oligonucleotide
ccgcuugauucgcugcacc

SEQ ID NO: 118850 - RNA, 19 nt, Artificial Sequence
  Description of Artificial Sequence: Synthetic oligonucleotide
gcuugccucugaacuaaac

SEQ ID NO: 118851 - RNA, 19 nt, Artificial Sequence
  Description of Artificial Sequence: Synthetic oligonucleotide
ggacagcaacccuaagagu

SEQ ID NO: 118852 - RNA, 19 nt, Artificial Sequence
  Description of Artificial Sequence: Synthetic oligonucleotide
augccauauuuuagugaua

SEQ ID NO: 118853 - RNA, 19 nt, Artificial Sequence
  Description of Artificial Sequence: Synthetic oligonucleotide
gacacuuccucagcacguu

SEQ ID NO: 118854 - RNA, 19 nt, Artificial Sequence
  Description of Artificial Sequence: Synthetic oligonucleotide
ugcccgcagcugauucgua

SEQ ID NO: 118855 - RNA, 19 nt, Artificial Sequence
  Description of Artificial Sequence: Synthetic oligonucleotide
ccgugcgcagagucauugc

SEQ ID NO: 118856 - RNA, 19 nt, Artificial Sequence
  Description of Artificial Sequence: Synthetic oligonucleotide
agcgccugugacggaacua

SEQ ID NO: 118857 - RNA, 19 nt, Artificial Sequence
  Description of Artificial Sequence: Synthetic oligonucleotide
ggagaacaacauagcagcu

SEQ ID NO: 118858 - RNA, 19 nt, Artificial Sequence
  Description of Artificial Sequence: Synthetic oligonucleotide
gcaaacucgcuagucuugu

SEQ ID NO: 118859 - RNA, 19 nt, Artificial Sequence
  Description of Artificial Sequence: Synthetic oligonucleotide
gcgccugugacggaacuaa

SEQ ID NO: 118860 - RNA, 19 nt, Artificial Sequence
  Description of Artificial Sequence: Synthetic oligonucleotide
gguaaaccccuagaguauu

SEQ ID NO: 118861 - RNA, 19 nt, Artificial Sequence
  Description of Artificial Sequence: Synthetic oligonucleotide
cccuagaguauuucauacu

SEQ ID NO: 118862 - RNA, 19 nt, Artificial Sequence
  Description of Artificial Sequence: Synthetic oligonucleotide
gccugugacggaacuaaua

SEQ ID NO: 118863 - RNA, 19 nt, Artificial Sequence
  Description of Artificial Sequence: Synthetic oligonucleotide
ggguaaaccccuagaguau

SEQ ID NO: 118864 - RNA, 19 nt, Artificial Sequence
  Description of Artificial Sequence: Synthetic oligonucleotide
ccccucaguguagaaucac

SEQ ID NO: 118865 - RNA, 19 nt, Artificial Sequence
  Description of Artificial Sequence: Synthetic oligonucleotide
cggacccgagcacacgaac

SEQ ID NO: 118866 - RNA, 19 nt, Artificial Sequence
  Description of Artificial Sequence: Synthetic oligonucleotide
caccgcgauguuggccaug

SEQ ID NO: 118867 - RNA, 19 nt, Artificial Sequence
  Description of Artificial Sequence: Synthetic oligonucleotide
caaacucgcuagucuuguu

SEQ ID NO: 118868 - RNA, 19 nt, Artificial Sequence
  Description of Artificial Sequence: Synthetic oligonucleotide
ggagacacucaguguuaau

SEQ ID NO: 118869 - RNA, 19 nt, Artificial Sequence
  Description of Artificial Sequence: Synthetic oligonucleotide
gcgagcguggcugguggca

SEQ ID NO: 118870 - RNA, 19 nt, Artificial Sequence
  Description of Artificial Sequence: Synthetic oligonucleotide
cgagcguggcugguggcag

SEQ ID NO: 118871 - RNA, 19 nt, Artificial Sequence
  Description of Artificial Sequence: Synthetic oligonucleotide
ggcaaaggguaaaccccua

SEQ ID NO: 118872 - RNA, 19 nt, Artificial Sequence
  Description of Artificial Sequence: Synthetic oligonucleotide
cgcuacgaccaccgccacc

SEQ ID NO: 118873 - RNA, 19 nt, Artificial Sequence
  Description of Artificial Sequence: Synthetic oligonucleotide
cccauugaucuuucaggau

SEQ ID NO: 118874 - RNA, 19 nt, Artificial Sequence
  Description of Artificial Sequence: Synthetic oligonucleotide
ccaccgcuacgaccaccgc

SEQ ID NO: 118875 - RNA, 19 nt, Artificial Sequence
  Description of Artificial Sequence: Synthetic oligonucleotide
ccgcgauguuggccauguc

SEQ ID NO: 118876 - RNA, 19 nt, Artificial Sequence
  Description of Artificial Sequence: Synthetic oligonucleotide
gcaccgcgauguuggccau

SEQ ID NO: 118877 - RNA, 19 nt, Artificial Sequence
  Description of Artificial Sequence: Synthetic oligonucleotide
ccacccuugccgccgcguu

SEQ ID NO: 118878 - RNA, 19 nt, Artificial Sequence
  Description of Artificial Sequence: Synthetic oligonucleotide
cgccugugacggaacuaau

SEQ ID NO: 118879 - RNA, 19 nt, Artificial Sequence
  Description of Artificial Sequence: Synthetic oligonucleotide
auaaccaucgaagaguucc

SEQ ID NO: 118880 - RNA, 19 nt, Artificial Sequence
  Description of Artificial Sequence: Synthetic oligonucleotide
cuuauaaggaguccgaucc

SEQ ID NO: 118881 - RNA, 19 nt, Artificial Sequence
  Description of Artificial Sequence: Synthetic oligonucleotide
aaacgcaagaacaugcggc

SEQ ID NO: 118882 - RNA, 19 nt, Artificial Sequence
  Description of Artificial Sequence: Synthetic oligonucleotide
aucagaguggaauuucacc

SEQ ID NO: 118883 - RNA, 19 nt, Artificial Sequence
  Description of Artificial Sequence: Synthetic oligonucleotide
cauagugcaugauacaacc

SEQ ID NO: 118884 - RNA, 19 nt, Artificial Sequence
  Description of Artificial Sequence: Synthetic oligonucleotide
agguaaauacaauauagcu

SEQ ID NO: 118885 - RNA, 19 nt, Artificial Sequence
  Description of Artificial Sequence: Synthetic oligonucleotide
guacaauagagacauggcg

SEQ ID NO: 118886 - RNA, 19 nt, Artificial Sequence
  Description of Artificial Sequence: Synthetic oligonucleotide
ucgacacugacacucauag

SEQ ID NO: 118887 - RNA, 19 nt, Artificial Sequence
  Description of Artificial Sequence: Synthetic oligonucleotide
aaauugaggcuggagaagg

SEQ ID NO: 118888 - RNA, 19 nt, Artificial Sequence
  Description of Artificial Sequence: Synthetic oligonucleotide
aagaaggugacgcagguau

SEQ ID NO: 118889 - RNA, 19 nt, Artificial Sequence
  Description of Artificial Sequence: Synthetic oligonucleotide
aaauuguagggagaugcgg

SEQ ID NO: 118890 - RNA, 19 nt, Artificial Sequence
  Description of Artificial Sequence: Synthetic oligonucleotide
aaauguacguuacaaugaa

SEQ ID NO: 118891 - RNA, 19 nt, Artificial Sequence
  Description of Artificial Sequence: Synthetic oligonucleotide
ugaguagaaacgcaagaac

SEQ ID NO: 118892 - RNA, 19 nt, Artificial Sequence
  Description of Artificial Sequence: Synthetic oligonucleotide
gaacgugaggcccacgugg

SEQ ID NO: 118893 - RNA, 19 nt, Artificial Sequence
  Description of Artificial Sequence: Synthetic oligonucleotide
agauagcccacguacacuc

SEQ ID NO: 118894 - RNA, 19 nt, Artificial Sequence
  Description of Artificial Sequence: Synthetic oligonucleotide
augacgcucaaucucaaag

SEQ ID NO: 118895 - RNA, 19 nt, Artificial Sequence
  Description of Artificial Sequence: Synthetic oligonucleotide
uaaucgucuggguaauugg

SEQ ID NO: 118896 - RNA, 19 nt, Artificial Sequence
  Description of Artificial Sequence: Synthetic oligonucleotide
gaaacgcaagaacaugcgg

SEQ ID NO: 118897 - RNA, 19 nt, Artificial Sequence
  Description of Artificial Sequence: Synthetic oligonucleotide
ucucccguacaauagagac

SEQ ID NO: 118898 - RNA, 19 nt, Artificial Sequence
  Description of Artificial Sequence: Synthetic oligonucleotide
gaagccgucacgcaccucc

SEQ ID NO: 118899 - RNA, 19 nt, Artificial Sequence
  Description of Artificial Sequence: Synthetic oligonucleotide
gaguuuccgggccugagcg

SEQ ID NO: 118900 - RNA, 19 nt, Artificial Sequence
  Description of Artificial Sequence: Synthetic oligonucleotide
aacgcaagaacaugcggcu

SEQ ID NO: 118901 - RNA, 19 nt, Artificial Sequence
  Description of Artificial Sequence: Synthetic oligonucleotide
agggucgguagguaaauac

SEQ ID NO: 118902 - RNA, 19 nt, Artificial Sequence
  Description of Artificial Sequence: Synthetic oligonucleotide
agcacacucgggcugagac

SEQ ID NO: 118903 - RNA, 19 nt, Artificial Sequence
  Description of Artificial Sequence: Synthetic oligonucleotide
gguaaauacaauauagcug

SEQ ID NO: 118904 - RNA, 19 nt, Artificial Sequence
  Description of Artificial Sequence: Synthetic oligonucleotide
ucgucuggguaauugggcg

SEQ ID NO: 118905 - RNA, 19 nt, Artificial Sequence
  Description of Artificial Sequence: Synthetic oligonucleotide
ggcuauacacaauauagug

SEQ ID NO: 118906 - RNA, 19 nt, Artificial Sequence
  Description of Artificial Sequence: Synthetic oligonucleotide
uccuuugaccgauggacgg

SEQ ID NO: 118907 - RNA, 19 nt, Artificial Sequence
  Description of Artificial Sequence: Synthetic oligonucleotide
cacguggaaaccuucagac

SEQ ID NO: 118908 - RNA, 19 nt, Artificial Sequence
  Description of Artificial Sequence: Synthetic oligonucleotide
acaauagagacauggcggu

SEQ ID NO: 118909 - RNA, 19 nt, Artificial Sequence
  Description of Artificial Sequence: Synthetic oligonucleotide
cuggagauagcccacguac

SEQ ID NO: 118910 - RNA, 19 nt, Artificial Sequence
  Description of Artificial Sequence: Synthetic oligonucleotide
acggcaaagaagcccuugc

SEQ ID NO: 118911 - RNA, 19 nt, Artificial Sequence
  Description of Artificial Sequence: Synthetic oligonucleotide
gaaauguacguuacaauga

SEQ ID NO: 118912 - RNA, 19 nt, Artificial Sequence
  Description of Artificial Sequence: Synthetic oligonucleotide
aauuguagggagaugcggu

SEQ ID NO: 118913 - RNA, 19 nt, Artificial Sequence
  Description of Artificial Sequence: Synthetic oligonucleotide
aucgacgcuugucuggggc

SEQ ID NO: 118914 - RNA, 19 nt, Artificial Sequence
  Description of Artificial Sequence: Synthetic oligonucleotide
uaucgacccagucuaggag

SEQ ID NO: 118915 - RNA, 19 nt, Artificial Sequence
  Description of Artificial Sequence: Synthetic oligonucleotide
acaaucggucuccuccucc

SEQ ID NO: 118916 - RNA, 19 nt, Artificial Sequence
  Description of Artificial Sequence: Synthetic oligonucleotide
gaguagaaacgcaagaaca

SEQ ID NO: 118917 - RNA, 19 nt, Artificial Sequence
  Description of Artificial Sequence: Synthetic oligonucleotide
auguacguuacaaugaaga

SEQ ID NO: 118918 - RNA, 19 nt, Artificial Sequence
  Description of Artificial Sequence: Synthetic oligonucleotide
aguugucugaguagaaacg

SEQ ID NO: 118919 - RNA, 19 nt, Artificial Sequence
  Description of Artificial Sequence: Synthetic oligonucleotide
uaauggacccgucggagac

SEQ ID NO: 118920 - RNA, 19 nt, Artificial Sequence
  Description of Artificial Sequence: Synthetic oligonucleotide
ugucugaguagaaacgcaa

SEQ ID NO: 118921 - RNA, 19 nt, Artificial Sequence
  Description of Artificial Sequence: Synthetic oligonucleotide
cagacuugaacuccacgcg

SEQ ID NO: 118922 - RNA, 19 nt, Artificial Sequence
  Description of Artificial Sequence: Synthetic oligonucleotide
uguacguuacaaugaagau

SEQ ID NO: 118923 - RNA, 19 nt, Artificial Sequence
  Description of Artificial Sequence: Synthetic oligonucleotide
uuauaaggaguccgauccc

SEQ ID NO: 118924 - RNA, 19 nt, Artificial Sequence
  Description of Artificial Sequence: Synthetic oligonucleotide
guaguuguuaucaccaaac

SEQ ID NO: 118925 - RNA, 19 nt, Artificial Sequence
  Description of Artificial Sequence: Synthetic oligonucleotide
cuggcuuauaaggaguccg

SEQ ID NO: 118926 - RNA, 19 nt, Artificial Sequence
  Description of Artificial Sequence: Synthetic oligonucleotide
uaauugggcgacuggauau

SEQ ID NO: 118927 - RNA, 19 nt, Artificial Sequence
  Description of Artificial Sequence: Synthetic oligonucleotide
ccggcuauacacaauauag

SEQ ID NO: 118928 - RNA, 19 nt, Artificial Sequence
  Description of Artificial Sequence: Synthetic oligonucleotide
ugggcgacuggauauggcc

SEQ ID NO: 118929 - RNA, 19 nt, Artificial Sequence
  Description of Artificial Sequence: Synthetic oligonucleotide
aauguacguuacaaugaag

SEQ ID NO: 118930 - RNA, 19 nt, Artificial Sequence
  Description of Artificial Sequence: Synthetic oligonucleotide
aacuggcuuauaaggaguc

SEQ ID NO: 118931 - RNA, 19 nt, Artificial Sequence
  Description of Artificial Sequence: Synthetic oligonucleotide
gccacuucgacacugacac

SEQ ID NO: 118932 - RNA, 19 nt, Artificial Sequence
  Description of Artificial Sequence: Synthetic oligonucleotide
gucggagacaaacuugagc

SEQ ID NO: 118933 - RNA, 19 nt, Artificial Sequence
  Description of Artificial Sequence: Synthetic oligonucleotide
uuaauggacccgucggaga

SEQ ID NO: 118934 - RNA, 19 nt, Artificial Sequence
  Description of Artificial Sequence: Synthetic oligonucleotide
guaaggaacccaccacagg

SEQ ID NO: 118935 - RNA, 19 nt, Artificial Sequence
  Description of Artificial Sequence: Synthetic oligonucleotide
aagccacuucgacacugac

SEQ ID NO: 118936 - RNA, 19 nt, Artificial Sequence
  Description of Artificial Sequence: Synthetic oligonucleotide
guuaauggacccgucggag

SEQ ID NO: 118937 - RNA, 19 nt, Artificial Sequence
  Description of Artificial Sequence: Synthetic oligonucleotide
uggaacgugaggcccacgu

SEQ ID NO: 118938 - RNA, 19 nt, Artificial Sequence
  Description of Artificial Sequence: Synthetic oligonucleotide
auagucauaccagcauagg

SEQ ID NO: 118939 - RNA, 19 nt, Artificial Sequence
  Description of Artificial Sequence: Synthetic oligonucleotide
aucgucuggguaauugggc

SEQ ID NO: 118940 - RNA, 19 nt, Artificial Sequence
  Description of Artificial Sequence: Synthetic oligonucleotide
uggagaacguguuccgagc

SEQ ID NO: 118941 - RNA, 19 nt, Artificial Sequence
  Description of Artificial Sequence: Synthetic oligonucleotide
aucggugcgcuccaagaag

SEQ ID NO: 118942 - RNA, 19 nt, Artificial Sequence
  Description of Artificial Sequence: Synthetic oligonucleotide
uggagauagcccacguaca

SEQ ID NO: 118943 - RNA, 19 nt, Artificial Sequence
  Description of Artificial Sequence: Synthetic oligonucleotide
cacaucgacgcuugucugg

SEQ ID NO: 118944 - RNA, 19 nt, Artificial Sequence
  Description of Artificial Sequence: Synthetic oligonucleotide
accccgguucaccucauac

SEQ ID NO: 118945 - RNA, 19 nt, Artificial Sequence
  Description of Artificial Sequence: Synthetic oligonucleotide
uaaccaucgaagaguucca

SEQ ID NO: 118946 - RNA, 19 nt, Artificial Sequence
  Description of Artificial Sequence: Synthetic oligonucleotide
cuggagaacguguuccgag

SEQ ID NO: 118947 - RNA, 19 nt, Artificial Sequence
  Description of Artificial Sequence: Synthetic oligonucleotide
guagaaacgcaagaacaug

SEQ ID NO: 118948 - RNA, 19 nt, Artificial Sequence
  Description of Artificial Sequence: Synthetic oligonucleotide
gcucguguagcgcaggugg

SEQ ID NO: 118949 - RNA, 19 nt, Artificial Sequence
  Description of Artificial Sequence: Synthetic oligonucleotide
acuggcuuauaaggagucc

SEQ ID NO: 118950 - RNA, 19 nt, Artificial Sequence
  Description of Artificial Sequence: Synthetic oligonucleotide
gucacgcaccuccacauag

SEQ ID NO: 118951 - RNA, 19 nt, Artificial Sequence
  Description of Artificial Sequence: Synthetic oligonucleotide
aguaucgacccagucuagg

SEQ ID NO: 118952 - RNA, 19 nt, Artificial Sequence
  Description of Artificial Sequence: Synthetic oligonucleotide
ucaucggugcgcuccaaga

SEQ ID NO: 118953 - RNA, 19 nt, Artificial Sequence
  Description of Artificial Sequence: Synthetic oligonucleotide
agaguagccguuggggaac

SEQ ID NO: 118954 - RNA, 19 nt, Artificial Sequence
  Description of Artificial Sequence: Synthetic oligonucleotide
aaugggcucggggaguuug

SEQ ID NO: 118955 - RNA, 19 nt, Artificial Sequence
  Description of Artificial Sequence: Synthetic oligonucleotide
uggcuuauaaggaguccga

SEQ ID NO: 118956 - RNA, 19 nt, Artificial Sequence
  Description of Artificial Sequence: Synthetic oligonucleotide
aauugggcgacuggauaug

SEQ ID NO: 118957 - RNA, 19 nt, Artificial Sequence
  Description of Artificial Sequence: Synthetic oligonucleotide
agcauagugcaugauacaa

SEQ ID NO: 118958 - RNA, 19 nt, Artificial Sequence
  Description of Artificial Sequence: Synthetic oligonucleotide
acaucgacgcuugucuggg

SEQ ID NO: 118959 - RNA, 19 nt, Artificial Sequence
  Description of Artificial Sequence: Synthetic oligonucleotide
uacccgaugcccaggggug

SEQ ID NO: 118960 - RNA, 19 nt, Artificial Sequence
  Description of Artificial Sequence: Synthetic oligonucleotide
ccguacaauagagacaugg

SEQ ID NO: 118961 - RNA, 19 nt, Artificial Sequence
  Description of Artificial Sequence: Synthetic oligonucleotide
uuccugcuaccaugcaggg

SEQ ID NO: 118962 - RNA, 19 nt, Artificial Sequence
  Description of Artificial Sequence: Synthetic oligonucleotide
cacguacacuccuucuugc

SEQ ID NO: 118963 - RNA, 19 nt, Artificial Sequence
  Description of Artificial Sequence: Synthetic oligonucleotide
ucacaucgacgcuugucug

SEQ ID NO: 118964 - RNA, 19 nt, Artificial Sequence
  Description of Artificial Sequence: Synthetic oligonucleotide
gacagaaucuccggccgag

SEQ ID NO: 118965 - RNA, 19 nt, Artificial Sequence
  Description of Artificial Sequence: Synthetic oligonucleotide
gcagguaugcuucucccag

SEQ ID NO: 118966 - RNA, 19 nt, Artificial Sequence
  Description of Artificial Sequence: Synthetic oligonucleotide
ugcaugauacaaccuccau

SEQ ID NO: 118967 - RNA, 19 nt, Artificial Sequence
  Description of Artificial Sequence: Synthetic oligonucleotide
agaacaugcggcugccggu

SEQ ID NO: 118968 - RNA, 19 nt, Artificial Sequence
  Description of Artificial Sequence: Synthetic oligonucleotide
ugcuucggaauuccaccca

SEQ ID NO: 118969 - RNA, 19 nt, Artificial Sequence
  Description of Artificial Sequence: Synthetic oligonucleotide
gaacguguuccgagcauag

SEQ ID NO: 118970 - RNA, 19 nt, Artificial Sequence
  Description of Artificial Sequence: Synthetic oligonucleotide
agcauaggcggcuacggua

SEQ ID NO: 118971 - RNA, 19 nt, Artificial Sequence
  Description of Artificial Sequence: Synthetic oligonucleotide
auagcccacguacacuccu

SEQ ID NO: 118972 - RNA, 19 nt, Artificial Sequence
  Description of Artificial Sequence: Synthetic oligonucleotide
cguggaaaccuucagacac

SEQ ID NO: 118973 - RNA, 19 nt, Artificial Sequence
  Description of Artificial Sequence: Synthetic oligonucleotide
agucacuuccugcuaugga

SEQ ID NO: 118974 - RNA, 19 nt, Artificial Sequence
  Description of Artificial Sequence: Synthetic oligonucleotide
auuguagggagaugcggua

SEQ ID NO: 118975 - RNA, 19 nt, Artificial Sequence
  Description of Artificial Sequence: Synthetic oligonucleotide
caccguugcucacagcccc

SEQ ID NO: 118976 - RNA, 19 nt, Artificial Sequence
  Description of Artificial Sequence: Synthetic oligonucleotide
augucgcucgcccgccugc

SEQ ID NO: 118977 - RNA, 19 nt, Artificial Sequence
  Description of Artificial Sequence: Synthetic oligonucleotide
cugguccuuugaccgaugg

SEQ ID NO: 118978 - RNA, 19 nt, Artificial Sequence
  Description of Artificial Sequence: Synthetic oligonucleotide
guagucacuuccugcuaug

SEQ ID NO: 118979 - RNA, 19 nt, Artificial Sequence
  Description of Artificial Sequence: Synthetic oligonucleotide
cugagaugcgccauacaca

SEQ ID NO: 118980 - RNA, 19 nt, Artificial Sequence
  Description of Artificial Sequence: Synthetic oligonucleotide
ucuccggccgaguacacuu

SEQ ID NO: 118981 - RNA, 19 nt, Artificial Sequence
  Description of Artificial Sequence: Synthetic oligonucleotide
cacacucgggcugagacuc

SEQ ID NO: 118982 - RNA, 19 nt, Artificial Sequence
  Description of Artificial Sequence: Synthetic oligonucleotide
acgcgcauauuguuguacu

SEQ ID NO: 118983 - RNA, 19 nt, Artificial Sequence
  Description of Artificial Sequence: Synthetic oligonucleotide
uucgacacugacacucaua

SEQ ID NO: 118984 - RNA, 19 nt, Artificial Sequence
  Description of Artificial Sequence: Synthetic oligonucleotide
guaauugggcgacuggaua

SEQ ID NO: 118985 - RNA, 19 nt, Artificial Sequence
  Description of Artificial Sequence: Synthetic oligonucleotide
aaucgggcaaggaccggag

SEQ ID NO: 118986 - RNA, 19 nt, Artificial Sequence
  Description of Artificial Sequence: Synthetic oligonucleotide
cccuccgauaacaaagggg

SEQ ID NO: 118987 - RNA, 19 nt, Artificial Sequence
  Description of Artificial Sequence: Synthetic oligonucleotide
uaggcggcuacgguacagg

SEQ ID NO: 118988 - RNA, 19 nt, Artificial Sequence
  Description of Artificial Sequence: Synthetic oligonucleotide
gguaaggaacccaccacag

SEQ ID NO: 118989 - RNA, 19 nt, Artificial Sequence
  Description of Artificial Sequence: Synthetic oligonucleotide
ggagauagcccacguacac

SEQ ID NO: 118990 - RNA, 19 nt, Artificial Sequence
  Description of Artificial Sequence: Synthetic oligonucleotide
uugggcgacuggauauggc

SEQ ID NO: 118991 - RNA, 19 nt, Artificial Sequence
  Description of Artificial Sequence: Synthetic oligonucleotide
agcuacacuuguagcugcc

SEQ ID NO: 118992 - RNA, 19 nt, Artificial Sequence
  Description of Artificial Sequence: Synthetic oligonucleotide
acguggaaaccuucagaca

SEQ ID NO: 118993 - RNA, 19 nt, Artificial Sequence
  Description of Artificial Sequence: Synthetic oligonucleotide
cagccgugaguccacugcg

SEQ ID NO: 118994 - RNA, 19 nt, Artificial Sequence
  Description of Artificial Sequence: Synthetic oligonucleotide
agaugcgguacuggguggg

SEQ ID NO: 118995 - RNA, 19 nt, Artificial Sequence
  Description of Artificial Sequence: Synthetic oligonucleotide
gcaugauacaaccuccauc

SEQ ID NO: 118996 - RNA, 19 nt, Artificial Sequence
  Description of Artificial Sequence: Synthetic oligonucleotide
ugguccuuugaccgaugga

SEQ ID NO: 118997 - RNA, 19 nt, Artificial Sequence
  Description of Artificial Sequence: Synthetic oligonucleotide
cauagccacaaucggucuc

SEQ ID NO: 118998 - RNA, 19 nt, Artificial Sequence
  Description of Artificial Sequence: Synthetic oligonucleotide
uccggccgaguacacuucc

SEQ ID NO: 118999 - RNA, 19 nt, Artificial Sequence
  Description of Artificial Sequence: Synthetic oligonucleotide
cacgucugcccgcacuugg

SEQ ID NO: 119000 - RNA, 19 nt, Artificial Sequence
  Description of Artificial Sequence: Synthetic oligonucleotide
ucacggccaucgaacaccu

SEQ ID NO: 119001 - RNA, 19 nt, Artificial Sequence
  Description of Artificial Sequence: Synthetic oligonucleotide
accggcuauacacaauaua

SEQ ID NO: 119002 - RNA, 19 nt, Artificial Sequence
  Description of Artificial Sequence: Synthetic oligonucleotide
uuccgagcauagugcauga

SEQ ID NO: 119003 - RNA, 19 nt, Artificial Sequence
  Description of Artificial Sequence: Synthetic oligonucleotide
uuguagggagaugcgguac

SEQ ID NO: 119004 - RNA, 19 nt, Artificial Sequence
  Description of Artificial Sequence: Synthetic oligonucleotide
gcgcauauuguuguacugg

SEQ ID NO: 119005 - RNA, 19 nt, Artificial Sequence
  Description of Artificial Sequence: Synthetic oligonucleotide
uugaccgauggacggcuuc

SEQ ID NO: 119006 - RNA, 19 nt, Artificial Sequence
  Description of Artificial Sequence: Synthetic oligonucleotide
uucuccccgggcgugacug

SEQ ID NO: 119007 - RNA, 19 nt, Artificial Sequence
  Description of Artificial Sequence: Synthetic oligonucleotide
gguggucauaagcacacuc

SEQ ID NO: 119008 - RNA, 19 nt, Artificial Sequence
  Description of Artificial Sequence: Synthetic oligonucleotide
ccgauggacggcuucaccc

SEQ ID NO: 119009 - RNA, 19 nt, Artificial Sequence
  Description of Artificial Sequence: Synthetic oligonucleotide
gcaguaucgacccagucua

SEQ ID NO: 119010 - RNA, 19 nt, Artificial Sequence
  Description of Artificial Sequence: Synthetic oligonucleotide
cucacaucgacgcuugucu

SEQ ID NO: 119011 - RNA, 19 nt, Artificial Sequence
  Description of Artificial Sequence: Synthetic oligonucleotide
aaggugacgcagguaugcu

SEQ ID NO: 119012 - RNA, 19 nt, Artificial Sequence
  Description of Artificial Sequence: Synthetic oligonucleotide
gcuuauaaggaguccgauc

SEQ ID NO: 119013 - RNA, 19 nt, Artificial Sequence
  Description of Artificial Sequence: Synthetic oligonucleotide
cgcauauuguuguacuggg

SEQ ID NO: 119014 - RNA, 19 nt, Artificial Sequence
  Description of Artificial Sequence: Synthetic oligonucleotide
uagaguuuccgggccugag

SEQ ID NO: 119015 - RNA, 19 nt, Artificial Sequence
  Description of Artificial Sequence: Synthetic oligonucleotide
ggcucggggaguuugcccc

SEQ ID NO: 119016 - RNA, 19 nt, Artificial Sequence
  Description of Artificial Sequence: Synthetic oligonucleotide
aaggacgaagccacuucga

SEQ ID NO: 119017 - RNA, 19 nt, Artificial Sequence
  Description of Artificial Sequence: Synthetic oligonucleotide
aacgugaggcccacgugga

SEQ ID NO: 119018 - RNA, 19 nt, Artificial Sequence
  Description of Artificial Sequence: Synthetic oligonucleotide
gaugucgcucgcccgccug

SEQ ID NO: 119019 - RNA, 19 nt, Artificial Sequence
  Description of Artificial Sequence: Synthetic oligonucleotide
uccugcuaccaugcagggg

SEQ ID NO: 119020 - RNA, 19 nt, Artificial Sequence
  Description of Artificial Sequence: Synthetic oligonucleotide
gacagcgaagccagcuuug

SEQ ID NO: 119021 - RNA, 19 nt, Artificial Sequence
  Description of Artificial Sequence: Synthetic oligonucleotide
gccgaguacacuuccucag

SEQ ID NO: 119022 - RNA, 19 nt, Artificial Sequence
  Description of Artificial Sequence: Synthetic oligonucleotide
cucauacccggggucacag

SEQ ID NO: 119023 - RNA, 19 nt, Artificial Sequence
  Description of Artificial Sequence: Synthetic oligonucleotide
gauagcccacguacacucc

SEQ ID NO: 119024 - RNA, 19 nt, Artificial Sequence
  Description of Artificial Sequence: Synthetic oligonucleotide
aauggacccgucggagaca

SEQ ID NO: 119025 - RNA, 19 nt, Artificial Sequence
  Description of Artificial Sequence: Synthetic oligonucleotide
auagugcaugauacaaccu

SEQ ID NO: 119026 - RNA, 19 nt, Artificial Sequence
  Description of Artificial Sequence: Synthetic oligonucleotide
cucaucggugcgcuccaag

SEQ ID NO: 119027 - RNA, 19 nt, Artificial Sequence
  Description of Artificial Sequence: Synthetic oligonucleotide
cacuccuccaggguaguug

SEQ ID NO: 119028 - RNA, 19 nt, Artificial Sequence
  Description of Artificial Sequence: Synthetic oligonucleotide
ggcaucacggccaucgaac

SEQ ID NO: 119029 - RNA, 19 nt, Artificial Sequence
  Description of Artificial Sequence: Synthetic oligonucleotide
aaccaucgaagaguuccau

SEQ ID NO: 119030 - RNA, 19 nt, Artificial Sequence
  Description of Artificial Sequence: Synthetic oligonucleotide
agaacguguuccgagcaua

SEQ ID NO: 119031 - RNA, 19 nt, Artificial Sequence
  Description of Artificial Sequence: Synthetic oligonucleotide
uagcgcccaaugagguugc

SEQ ID NO: 119032 - RNA, 19 nt, Artificial Sequence
  Description of Artificial Sequence: Synthetic oligonucleotide
auaggcggcuacgguacag

SEQ ID NO: 119033 - RNA, 19 nt, Artificial Sequence
  Description of Artificial Sequence: Synthetic oligonucleotide
uaccccuggagaacguguu

SEQ ID NO: 119034 - RNA, 19 nt, Artificial Sequence
  Description of Artificial Sequence: Synthetic oligonucleotide
acccgucggagacaaacuu

SEQ ID NO: 119035 - RNA, 19 nt, Artificial Sequence
  Description of Artificial Sequence: Synthetic oligonucleotide
uccugcuauggaguguguc

SEQ ID NO: 119036 - RNA, 19 nt, Artificial Sequence
  Description of Artificial Sequence: Synthetic oligonucleotide
caguaucgacccagucuag

SEQ ID NO: 119037 - RNA, 19 nt, Artificial Sequence
  Description of Artificial Sequence: Synthetic oligonucleotide
agccgucacgcaccuccac

SEQ ID NO: 119038 - RNA, 19 nt, Artificial Sequence
  Description of Artificial Sequence: Synthetic oligonucleotide
guacguuacaaugaagauu

SEQ ID NO: 119039 - RNA, 19 nt, Artificial Sequence
  Description of Artificial Sequence: Synthetic oligonucleotide
cacgcgcauauuguuguac

SEQ ID NO: 119040 - RNA, 19 nt, Artificial Sequence
  Description of Artificial Sequence: Synthetic oligonucleotide
augcagggguagucacuuc

SEQ ID NO: 119041 - RNA, 19 nt, Artificial Sequence
  Description of Artificial Sequence: Synthetic oligonucleotide
auaccccuggagaacgugu

SEQ ID NO: 119042 - RNA, 19 nt, Artificial Sequence
  Description of Artificial Sequence: Synthetic oligonucleotide
ugcucguguagcgcaggug

SEQ ID NO: 119043 - RNA, 19 nt, Artificial Sequence
  Description of Artificial Sequence: Synthetic oligonucleotide
aguuuccgggccugagcga

SEQ ID NO: 119044 - RNA, 19 nt, Artificial Sequence
  Description of Artificial Sequence: Synthetic oligonucleotide
augggcucggggaguuugc

SEQ ID NO: 119045 - RNA, 19 nt, Artificial Sequence
  Description of Artificial Sequence: Synthetic oligonucleotide
ggacccgucggagacaaac

SEQ ID NO: 119046 - RNA, 19 nt, Artificial Sequence
  Description of Artificial Sequence: Synthetic oligonucleotide
ucaccuccgcagauggcuu

SEQ ID NO: 119047 - RNA, 19 nt, Artificial Sequence
  Description of Artificial Sequence: Synthetic oligonucleotide
ggugaaagcucugguuccc

SEQ ID NO: 119048 - RNA, 19 nt, Artificial Sequence
  Description of Artificial Sequence: Synthetic oligonucleotide
gguacagguccauggaugu

SEQ ID NO: 119049 - RNA, 19 nt, Artificial Sequence
  Description of Artificial Sequence: Synthetic oligonucleotide
gaccuccggcuucucggag

SEQ ID NO: 119050 - RNA, 19 nt, Artificial Sequence
  Description of Artificial Sequence: Synthetic oligonucleotide
aggugacgcagguaugcuu

SEQ ID NO: 119051 - RNA, 19 nt, Artificial Sequence
  Description of Artificial Sequence: Synthetic oligonucleotide
ggaacgugaggcccacgug

SEQ ID NO: 119052 - RNA, 19 nt, Artificial Sequence
  Description of Artificial Sequence: Synthetic oligonucleotide
aggcggcuacgguacaggu

SEQ ID NO: 119053 - RNA, 19 nt, Artificial Sequence
  Description of Artificial Sequence: Synthetic oligonucleotide
gggccgguaaucgucuggg

SEQ ID NO: 119054 - RNA, 19 nt, Artificial Sequence
  Description of Artificial Sequence: Synthetic oligonucleotide
ggcgugacugagaugcgcc

SEQ ID NO: 119055 - RNA, 19 nt, Artificial Sequence
  Description of Artificial Sequence: Synthetic oligonucleotide
ggggagucaaauaaaccaa

SEQ ID NO: 119056 - RNA, 19 nt, Artificial Sequence
  Description of Artificial Sequence: Synthetic oligonucleotide
ccacguacacuccuucuug

SEQ ID NO: 119057 - RNA, 19 nt, Artificial Sequence
  Description of Artificial Sequence: Synthetic oligonucleotide
cgcaagaacaugcggcugc

SEQ ID NO: 119058 - RNA, 19 nt, Artificial Sequence
  Description of Artificial Sequence: Synthetic oligonucleotide
uuugaccgauggacggcuu

SEQ ID NO: 119059 - RNA, 19 nt, Artificial Sequence
  Description of Artificial Sequence: Synthetic oligonucleotide
cuucggaauuccacccaga

SEQ ID NO: 119060 - RNA, 19 nt, Artificial Sequence
  Description of Artificial Sequence: Synthetic oligonucleotide
ggguaauugggcgacugga

SEQ ID NO: 119061 - RNA, 19 nt, Artificial Sequence
  Description of Artificial Sequence: Synthetic oligonucleotide
uuccgggccugagcgaugu

SEQ ID NO: 119062 - RNA, 19 nt, Artificial Sequence
  Description of Artificial Sequence: Synthetic oligonucleotide
cucgggcugagacucaaua

SEQ ID NO: 119063 - RNA, 19 nt, Artificial Sequence
  Description of Artificial Sequence: Synthetic oligonucleotide
ccagcauaggcggcuacgg

SEQ ID NO: 119064 - RNA, 19 nt, Artificial Sequence
  Description of Artificial Sequence: Synthetic oligonucleotide
caucggugcgcuccaagaa

SEQ ID NO: 119065 - RNA, 19 nt, Artificial Sequence
  Description of Artificial Sequence: Synthetic oligonucleotide
acgcaagaacaugcggcug

SEQ ID NO: 119066 - RNA, 19 nt, Artificial Sequence
  Description of Artificial Sequence: Synthetic oligonucleotide
ucuggguaauugggcgacu

SEQ ID NO: 119067 - RNA, 19 nt, Artificial Sequence
  Description of Artificial Sequence: Synthetic oligonucleotide
auggacccgucggagacaa

SEQ ID NO: 119068 - RNA, 19 nt, Artificial Sequence
  Description of Artificial Sequence: Synthetic oligonucleotide
gacgggcucaggcuucuua

SEQ ID NO: 119069 - RNA, 19 nt, Artificial Sequence
  Description of Artificial Sequence: Synthetic oligonucleotide
cagagccggcuagaugugc

SEQ ID NO: 119070 - RNA, 19 nt, Artificial Sequence
  Description of Artificial Sequence: Synthetic oligonucleotide
cccgucggagacaaacuug

SEQ ID NO: 119071 - RNA, 19 nt, Artificial Sequence
  Description of Artificial Sequence: Synthetic oligonucleotide
gauuagggccaccggcuau

SEQ ID NO: 119072 - RNA, 19 nt, Artificial Sequence
  Description of Artificial Sequence: Synthetic oligonucleotide
ccgguaaucgucuggguaa

SEQ ID NO: 119073 - RNA, 19 nt, Artificial Sequence
  Description of Artificial Sequence: Synthetic oligonucleotide
cucguguagcgcaggugga

SEQ ID NO: 119074 - RNA, 19 nt, Artificial Sequence
  Description of Artificial Sequence: Synthetic oligonucleotide
ccgucggagacaaacuuga

SEQ ID NO: 119075 - RNA, 19 nt, Artificial Sequence
  Description of Artificial Sequence: Synthetic oligonucleotide
gacgcuugucuggggccag

SEQ ID NO: 119076 - RNA, 19 nt, Artificial Sequence
  Description of Artificial Sequence: Synthetic oligonucleotide
gagucagccgugaguccac

SEQ ID NO: 119077 - RNA, 19 nt, Artificial Sequence
  Description of Artificial Sequence: Synthetic oligonucleotide
gcaucacggccaucgaaca

SEQ ID NO: 119078 - RNA, 19 nt, Artificial Sequence
  Description of Artificial Sequence: Synthetic oligonucleotide
ucccggucgggccgcgugu

SEQ ID NO: 119079 - RNA, 19 nt, Artificial Sequence
  Description of Artificial Sequence: Synthetic oligonucleotide
gagaacguguuccgagcau

SEQ ID NO: 119080 - RNA, 19 nt, Artificial Sequence
  Description of Artificial Sequence: Synthetic oligonucleotide
ggugcgcuccaagaaggug

SEQ ID NO: 119081 - RNA, 19 nt, Artificial Sequence
  Description of Artificial Sequence: Synthetic oligonucleotide
acguuacaaugaagauuag

SEQ ID NO: 119082 - RNA, 19 nt, Artificial Sequence
  Description of Artificial Sequence: Synthetic oligonucleotide
gccgggacuggugauggag

SEQ ID NO: 119083 - RNA, 19 nt, Artificial Sequence
  Description of Artificial Sequence: Synthetic oligonucleotide
gcuugguaaggaacccacc

SEQ ID NO: 119084 - RNA, 19 nt, Artificial Sequence
  Description of Artificial Sequence: Synthetic oligonucleotide
caccuccgcagauggcuuc

SEQ ID NO: 119085 - RNA, 19 nt, Artificial Sequence
  Description of Artificial Sequence: Synthetic oligonucleotide
ggugcucguguagcgcagg

SEQ ID NO: 119086 - RNA, 19 nt, Artificial Sequence
  Description of Artificial Sequence: Synthetic oligonucleotide
gcuacgguacagguccaug

SEQ ID NO: 119087 - RNA, 19 nt, Artificial Sequence
  Description of Artificial Sequence: Synthetic oligonucleotide
gcuuuguuaauggacccgu

SEQ ID NO: 119088 - RNA, 19 nt, Artificial Sequence
  Description of Artificial Sequence: Synthetic oligonucleotide
cuccggccgaguacacuuc

SEQ ID NO: 119089 - RNA, 19 nt, Artificial Sequence
  Description of Artificial Sequence: Synthetic oligonucleotide
cuuugaccgauggacggcu

SEQ ID NO: 119090 - RNA, 19 nt, Artificial Sequence
  Description of Artificial Sequence: Synthetic oligonucleotide
caucucguacuuccaggua

SEQ ID NO: 119091 - RNA, 19 nt, Artificial Sequence
  Description of Artificial Sequence: Synthetic oligonucleotide
gccgguaaucgucugggua

SEQ ID NO: 119092 - RNA, 19 nt, Artificial Sequence
  Description of Artificial Sequence: Synthetic oligonucleotide
aucuccggccgaguacacu

SEQ ID NO: 119093 - RNA, 19 nt, Artificial Sequence
  Description of Artificial Sequence: Synthetic oligonucleotide
gggcucggggaguuugccc

SEQ ID NO: 119094 - RNA, 19 nt, Artificial Sequence
  Description of Artificial Sequence: Synthetic oligonucleotide
ggguaguuguuaucaccaa

SEQ ID NO: 119095 - RNA, 19 nt, Artificial Sequence
  Description of Artificial Sequence: Synthetic oligonucleotide
cuccccgggcgugacugag

SEQ ID NO: 119096 - RNA, 19 nt, Artificial Sequence
  Description of Artificial Sequence: Synthetic oligonucleotide
agaagccgucacgcaccuc

SEQ ID NO: 119097 - RNA, 19 nt, Artificial Sequence
  Description of Artificial Sequence: Synthetic oligonucleotide
cuccgaggucugccucucc

SEQ ID NO: 119098 - RNA, 19 nt, Artificial Sequence
  Description of Artificial Sequence: Synthetic oligonucleotide
gggcgugacugagaugcgc

SEQ ID NO: 119099 - RNA, 19 nt, Artificial Sequence
  Description of Artificial Sequence: Synthetic oligonucleotide
cauggcggucccggucggg

SEQ ID NO: 119100 - RNA, 19 nt, Artificial Sequence
  Description of Artificial Sequence: Synthetic oligonucleotide
cgcgcauauuguuguacug

SEQ ID NO: 119101 - RNA, 19 nt, Artificial Sequence
  Description of Artificial Sequence: Synthetic oligonucleotide
gccgucacgcaccuccaca

SEQ ID NO: 119102 - RNA, 19 nt, Artificial Sequence
  Description of Artificial Sequence: Synthetic oligonucleotide
agucagccgugaguccacu

SEQ ID NO: 119103 - RNA, 19 nt, Artificial Sequence
  Description of Artificial Sequence: Synthetic oligonucleotide
cacucgcaguccacuccuc

SEQ ID NO: 119104 - RNA, 19 nt, Artificial Sequence
  Description of Artificial Sequence: Synthetic oligonucleotide
gacccgucggagacaaacu

SEQ ID NO: 119105 - RNA, 19 nt, Artificial Sequence
  Description of Artificial Sequence: Synthetic oligonucleotide
cauaggcggcuacgguaca

SEQ ID NO: 119106 - RNA, 19 nt, Artificial Sequence
  Description of Artificial Sequence: Synthetic oligonucleotide
ccaccggcuauacacaaua

SEQ ID NO: 119107 - RNA, 19 nt, Artificial Sequence
  Description of Artificial Sequence: Synthetic oligonucleotide
agccggcuagaugugcuuu

SEQ ID NO: 119108 - RNA, 19 nt, Artificial Sequence
  Description of Artificial Sequence: Synthetic oligonucleotide
cuugagccagagccggcua

SEQ ID NO: 119109 - RNA, 19 nt, Artificial Sequence
  Description of Artificial Sequence: Synthetic oligonucleotide
ccgagcauagugcaugaua

SEQ ID NO: 119110 - RNA, 19 nt, Artificial Sequence
  Description of Artificial Sequence: Synthetic oligonucleotide
ccacacucgcucaggucug

SEQ ID NO: 119111 - RNA, 19 nt, Artificial Sequence
  Description of Artificial Sequence: Synthetic oligonucleotide
ccagagccgcaguaucgac

SEQ ID NO: 119112 - RNA, 19 nt, Artificial Sequence
  Description of Artificial Sequence: Synthetic oligonucleotide
ccucacaucgacgcuuguc

SEQ ID NO: 119113 - RNA, 19 nt, Artificial Sequence
  Description of Artificial Sequence: Synthetic oligonucleotide
ucaccccgguucaccucau

SEQ ID NO: 119114 - RNA, 19 nt, Artificial Sequence
  Description of Artificial Sequence: Synthetic oligonucleotide
gguaauugggcgacuggau

SEQ ID NO: 119115 - RNA, 19 nt, Artificial Sequence
  Description of Artificial Sequence: Synthetic oligonucleotide
gcgugacugagaugcgcca

SEQ ID NO: 119116 - RNA, 19 nt, Artificial Sequence
  Description of Artificial Sequence: Synthetic oligonucleotide
caccuggauccgccagaug

SEQ ID NO: 119117 - RNA, 19 nt, Artificial Sequence
  Description of Artificial Sequence: Synthetic oligonucleotide
ccagagccggcuagaugug

SEQ ID NO: 119118 - RNA, 19 nt, Artificial Sequence
  Description of Artificial Sequence: Synthetic oligonucleotide
auacccggggucacagcua

SEQ ID NO: 119119 - RNA, 19 nt, Artificial Sequence
  Description of Artificial Sequence: Synthetic oligonucleotide
cgucggagacaaacuugag

SEQ ID NO: 119120 - RNA, 19 nt, Artificial Sequence
  Description of Artificial Sequence: Synthetic oligonucleotide
ggcggcuacgguacagguc

SEQ ID NO: 119121 - RNA, 19 nt, Artificial Sequence
  Description of Artificial Sequence: Synthetic oligonucleotide
gauccgccagaugcagacu

SEQ ID NO: 119122 - RNA, 19 nt, Artificial Sequence
  Description of Artificial Sequence: Synthetic oligonucleotide
ccagucuaggagcugugcu

SEQ ID NO: 119123 - RNA, 19 nt, Artificial Sequence
  Description of Artificial Sequence: Synthetic oligonucleotide
aggcccacguggaaaccuu

SEQ ID NO: 119124 - RNA, 19 nt, Artificial Sequence
  Description of Artificial Sequence: Synthetic oligonucleotide
cagcauaggcggcuacggu

SEQ ID NO: 119125 - RNA, 19 nt, Artificial Sequence
  Description of Artificial Sequence: Synthetic oligonucleotide
ccucggcgacccacguagg

SEQ ID NO: 119126 - RNA, 19 nt, Artificial Sequence
  Description of Artificial Sequence: Synthetic oligonucleotide
ccgcgugugcucgugccag

SEQ ID NO: 119127 - RNA, 19 nt, Artificial Sequence
  Description of Artificial Sequence: Synthetic oligonucleotide
gaguagccguuggggaacu

SEQ ID NO: 119128 - RNA, 19 nt, Artificial Sequence
  Description of Artificial Sequence: Synthetic oligonucleotide
gagccggcuagaugugcuu

SEQ ID NO: 119129 - RNA, 19 nt, Artificial Sequence
  Description of Artificial Sequence: Synthetic oligonucleotide
ggcgacccacguaggagca

SEQ ID NO: 119130 - RNA, 19 nt, Artificial Sequence
  Description of Artificial Sequence: Synthetic oligonucleotide
ggcuuauaaggaguccgau

SEQ ID NO: 119131 - RNA, 19 nt, Artificial Sequence
  Description of Artificial Sequence: Synthetic oligonucleotide
cggcuauacacaauauagu

SEQ ID NO: 119132 - RNA, 19 nt, Artificial Sequence
  Description of Artificial Sequence: Synthetic oligonucleotide
cgugugcucgugccagaag

SEQ ID NO: 119133 - RNA, 19 nt, Artificial Sequence
  Description of Artificial Sequence: Synthetic oligonucleotide
cacucgcucaggucuggau

SEQ ID NO: 119134 - RNA, 19 nt, Artificial Sequence
  Description of Artificial Sequence: Synthetic oligonucleotide
gcccacguggaaaccuuca

SEQ ID NO: 119135 - RNA, 19 nt, Artificial Sequence
  Description of Artificial Sequence: Synthetic oligonucleotide
cuccgcagauggcuucaua

SEQ ID NO: 119136 - RNA, 19 nt, Artificial Sequence
  Description of Artificial Sequence: Synthetic oligonucleotide
gagaugcgccauacacagu

SEQ ID NO: 119137 - RNA, 19 nt, Artificial Sequence
  Description of Artificial Sequence: Synthetic oligonucleotide
cggccgaguacacuuccuc

SEQ ID NO: 119138 - RNA, 19 nt, Artificial Sequence
  Description of Artificial Sequence: Synthetic oligonucleotide
agcgcccaaugagguugcu

SEQ ID NO: 119139 - RNA, 19 nt, Artificial Sequence
  Description of Artificial Sequence: Synthetic oligonucleotide
ccccuaccucccaaugaca

SEQ ID NO: 119140 - RNA, 19 nt, Artificial Sequence
  Description of Artificial Sequence: Synthetic oligonucleotide
cagggucgguagguaaaua

SEQ ID NO: 119141 - RNA, 19 nt, Artificial Sequence
  Description of Artificial Sequence: Synthetic oligonucleotide
ggcccacguggaaaccuuc

SEQ ID NO: 119142 - RNA, 19 nt, Artificial Sequence
  Description of Artificial Sequence: Synthetic oligonucleotide
gcccacguacacuccuucu

SEQ ID NO: 119143 - RNA, 19 nt, Artificial Sequence
  Description of Artificial Sequence: Synthetic oligonucleotide
ccccgguucaccucauacu

SEQ ID NO: 119144 - RNA, 19 nt, Artificial Sequence
  Description of Artificial Sequence: Synthetic oligonucleotide
cucggaggggcgccuuccu

SEQ ID NO: 119145 - RNA, 19 nt, Artificial Sequence
  Description of Artificial Sequence: Synthetic oligonucleotide
caccucggcgacccacgua

SEQ ID NO: 119146 - RNA, 19 nt, Artificial Sequence
  Description of Artificial Sequence: Synthetic oligonucleotide
ccaugcagggguagucacu

SEQ ID NO: 119147 - RNA, 19 nt, Artificial Sequence
  Description of Artificial Sequence: Synthetic oligonucleotide
gcagggucgguagguaaau

SEQ ID NO: 119148 - RNA, 19 nt, Artificial Sequence
  Description of Artificial Sequence: Synthetic oligonucleotide
gcgugugcucgugccagaa

SEQ ID NO: 119149 - RNA, 19 nt, Artificial Sequence
  Description of Artificial Sequence: Synthetic oligonucleotide
cccacguacacuccuucuu

SEQ ID NO: 119150 - RNA, 19 nt, Artificial Sequence
  Description of Artificial Sequence: Synthetic oligonucleotide
ggccgguaaucgucugggu

SEQ ID NO: 119151 - RNA, 19 nt, Artificial Sequence
  Description of Artificial Sequence: Synthetic oligonucleotide
cggcuagaugugcuuuuga

SEQ ID NO: 119152 - RNA, 19 nt, Artificial Sequence
  Description of Artificial Sequence: Synthetic oligonucleotide
gccggcuagaugugcuuuu

SEQ ID NO: 119153 - RNA, 19 nt, Artificial Sequence
  Description of Artificial Sequence: Synthetic oligonucleotide
ggaugucgcucgcccgccu

SEQ ID NO: 119154 - RNA, 19 nt, Artificial Sequence
  Description of Artificial Sequence: Synthetic oligonucleotide
ccuggaacuuggugcucgu

SEQ ID NO: 119155 - RNA, 19 nt, Artificial Sequence
  Description of Artificial Sequence: Synthetic oligonucleotide
gcggucccggucgggccgc

SEQ ID NO: 119156 - RNA, 19 nt, Artificial Sequence
  Description of Artificial Sequence: Synthetic oligonucleotide
ggcuacgguacagguccau

SEQ ID NO: 119157 - RNA, 19 nt, Artificial Sequence
  Description of Artificial Sequence: Synthetic oligonucleotide
ccacuucgacacugacacu

SEQ ID NO: 119158 - RNA, 19 nt, Artificial Sequence
  Description of Artificial Sequence: Synthetic oligonucleotide
cgugacugagaugcgccau

SEQ ID NO: 119159 - RNA, 19 nt, Artificial Sequence
  Description of Artificial Sequence: Synthetic oligonucleotide
caaugggcucggggaguuu

SEQ ID NO: 119160 - RNA, 19 nt, Artificial Sequence
  Description of Artificial Sequence: Synthetic oligonucleotide
ccaccucggcgacccacgu

SEQ ID NO: 119161 - RNA, 19 nt, Artificial Sequence
  Description of Artificial Sequence: Synthetic oligonucleotide
cgguaaucgucuggguaau

SEQ ID NO: 119162 - RNA, 19 nt, Artificial Sequence
  Description of Artificial Sequence: Synthetic oligonucleotide
ccucaucggugcgcuccaa

SEQ ID NO: 119163 - RNA, 19 nt, Artificial Sequence
  Description of Artificial Sequence: Synthetic oligonucleotide
ccuccgcagauggcuucau

SEQ ID NO: 119164 - RNA, 19 nt, Artificial Sequence
  Description of Artificial Sequence: Synthetic oligonucleotide
ccccucgguugggccucga

SEQ ID NO: 119165 - RNA, 19 nt, Artificial Sequence
  Description of Artificial Sequence: Synthetic oligonucleotide
aaugauuaugaucauggac

SEQ ID NO: 119166 - RNA, 19 nt, Artificial Sequence
  Description of Artificial Sequence: Synthetic oligonucleotide
aacuaaucuaagcaguacc

SEQ ID NO: 119167 - RNA, 19 nt, Artificial Sequence
  Description of Artificial Sequence: Synthetic oligonucleotide
acuaauagaaauaacauuc

SEQ ID NO: 119168 - RNA, 19 nt, Artificial Sequence
  Description of Artificial Sequence: Synthetic oligonucleotide
acuguagugauauaugccc

SEQ ID NO: 119169 - RNA, 19 nt, Artificial Sequence
  Description of Artificial Sequence: Synthetic oligonucleotide
aaugauaauagccauaaua

SEQ ID NO: 119170 - RNA, 19 nt, Artificial Sequence
  Description of Artificial Sequence: Synthetic oligonucleotide
aaaacgacuuuauaaaugu

SEQ ID NO: 119171 - RNA, 19 nt, Artificial Sequence
  Description of Artificial Sequence: Synthetic oligonucleotide
aaagaguaccaugauaacc

SEQ ID NO: 119172 - RNA, 19 nt, Artificial Sequence
  Description of Artificial Sequence: Synthetic oligonucleotide
aaacguaagauacuucuuc

SEQ ID NO: 119173 - RNA, 19 nt, Artificial Sequence
  Description of Artificial Sequence: Synthetic oligonucleotide
uggaugauaacugagagag

SEQ ID NO: 119174 - RNA, 19 nt, Artificial Sequence
  Description of Artificial Sequence: Synthetic oligonucleotide
auucauagaagcuugaaca

SEQ ID NO: 119175 - RNA, 19 nt, Artificial Sequence
  Description of Artificial Sequence: Synthetic oligonucleotide
uaucuugaagggcauaucg

SEQ ID NO: 119176 - RNA, 19 nt, Artificial Sequence
  Description of Artificial Sequence: Synthetic oligonucleotide
uaucuauuggagaaucucg

SEQ ID NO: 119177 - RNA, 19 nt, Artificial Sequence
  Description of Artificial Sequence: Synthetic oligonucleotide
agaugacgaauucauaucg

SEQ ID NO: 119178 - RNA, 19 nt, Artificial Sequence
  Description of Artificial Sequence: Synthetic oligonucleotide
ugauauaugccccuggcga

SEQ ID NO: 119179 - RNA, 19 nt, Artificial Sequence
  Description of Artificial Sequence: Synthetic oligonucleotide
uguucauaugcuaagaaua

SEQ ID NO: 119180 - RNA, 19 nt, Artificial Sequence
  Description of Artificial Sequence: Synthetic oligonucleotide
ucuauuuacuccccguggg

SEQ ID NO: 119181 - RNA, 19 nt, Artificial Sequence
  Description of Artificial Sequence: Synthetic oligonucleotide
aacgacuuuauaaauguuc

SEQ ID NO: 119182 - RNA, 19 nt, Artificial Sequence
  Description of Artificial Sequence: Synthetic oligonucleotide
acuguugagagacugauga

SEQ ID NO: 119183 - RNA, 19 nt, Artificial Sequence
  Description of Artificial Sequence: Synthetic oligonucleotide
uuggucaagauuaaguagu

SEQ ID NO: 119184 - RNA, 19 nt, Artificial Sequence
  Description of Artificial Sequence: Synthetic oligonucleotide
agaauaggugucuagggag

SEQ ID NO: 119185 - RNA, 19 nt, Artificial Sequence
  Description of Artificial Sequence: Synthetic oligonucleotide
ugucuuucaagcuaaauuu

SEQ ID NO: 119186 - RNA, 19 nt, Artificial Sequence
  Description of Artificial Sequence: Synthetic oligonucleotide
aucacuaagaugguugagc

SEQ ID NO: 119187 - RNA, 19 nt, Artificial Sequence
  Description of Artificial Sequence: Synthetic oligonucleotide
auuuaugauaaaugcaacu

SEQ ID NO: 119188 - RNA, 19 nt, Artificial Sequence
  Description of Artificial Sequence: Synthetic oligonucleotide
auuggucaagauuaaguag

SEQ ID NO: 119189 - RNA, 19 nt, Artificial Sequence
  Description of Artificial Sequence: Synthetic oligonucleotide
ugaaaagggagcugcauug

SEQ ID NO: 119190 - RNA, 19 nt, Artificial Sequence
  Description of Artificial Sequence: Synthetic oligonucleotide
agaaucucgucccaaauca

SEQ ID NO: 119191 - RNA, 19 nt, Artificial Sequence
  Description of Artificial Sequence: Synthetic oligonucleotide
uccacaaccuuaauuauaa

SEQ ID NO: 119192 - RNA, 19 nt, Artificial Sequence
  Description of Artificial Sequence: Synthetic oligonucleotide
acgaauucauaucggcucc

SEQ ID NO: 119193 - RNA, 19 nt, Artificial Sequence
  Description of Artificial Sequence: Synthetic oligonucleotide
aacguaagauacuucuucu

SEQ ID NO: 119194 - RNA, 19 nt, Artificial Sequence
  Description of Artificial Sequence: Synthetic oligonucleotide
aaagaucaugcacuuucag

SEQ ID NO: 119195 - RNA, 19 nt, Artificial Sequence
  Description of Artificial Sequence: Synthetic oligonucleotide
agaagcuugaacauaaaug

SEQ ID NO: 119196 - RNA, 19 nt, Artificial Sequence
  Description of Artificial Sequence: Synthetic oligonucleotide
agauuaaguaguuguuuuc

SEQ ID NO: 119197 - RNA, 19 nt, Artificial Sequence
  Description of Artificial Sequence: Synthetic oligonucleotide
uucauagagccuaauuaug

SEQ ID NO: 119198 - RNA, 19 nt, Artificial Sequence
  Description of Artificial Sequence: Synthetic oligonucleotide
aaauaguggcuaguucugc

SEQ ID NO: 119199 - RNA, 19 nt, Artificial Sequence
  Description of Artificial Sequence: Synthetic oligonucleotide
gacgucuugaagcaguuug

SEQ ID NO: 119200 - RNA, 19 nt, Artificial Sequence
  Description of Artificial Sequence: Synthetic oligonucleotide
ucuugaacccugacaauag

SEQ ID NO: 119201 - RNA, 19 nt, Artificial Sequence
  Description of Artificial Sequence: Synthetic oligonucleotide
uggcgaguuauucucagag

SEQ ID NO: 119202 - RNA, 19 nt, Artificial Sequence
  Description of Artificial Sequence: Synthetic oligonucleotide
aguacaauuaagauagugu

SEQ ID NO: 119203 - RNA, 19 nt, Artificial Sequence
  Description of Artificial Sequence: Synthetic oligonucleotide
acuaagaugguugagcaca

SEQ ID NO: 119204 - RNA, 19 nt, Artificial Sequence
  Description of Artificial Sequence: Synthetic oligonucleotide
aaaugugugcuagcugccc

SEQ ID NO: 119205 - RNA, 19 nt, Artificial Sequence
  Description of Artificial Sequence: Synthetic oligonucleotide
uuugucuguuaaauuacac

SEQ ID NO: 119206 - RNA, 19 nt, Artificial Sequence
  Description of Artificial Sequence: Synthetic oligonucleotide
gacgaauucauaucggcuc

SEQ ID NO: 119207 - RNA, 19 nt, Artificial Sequence
  Description of Artificial Sequence: Synthetic oligonucleotide
cucgauugcaccucguugc

SEQ ID NO: 119208 - RNA, 19 nt, Artificial Sequence
  Description of Artificial Sequence: Synthetic oligonucleotide
gauauaugccccuggcgag

SEQ ID NO: 119209 - RNA, 19 nt, Artificial Sequence
  Description of Artificial Sequence: Synthetic oligonucleotide
uuaacuaaucuaagcagua

SEQ ID NO: 119210 - RNA, 19 nt, Artificial Sequence
  Description of Artificial Sequence: Synthetic oligonucleotide
uggaguacugacauaucug

SEQ ID NO: 119211 - RNA, 19 nt, Artificial Sequence
  Description of Artificial Sequence: Synthetic oligonucleotide
ugcaccucguugcaaagag

SEQ ID NO: 119212 - RNA, 19 nt, Artificial Sequence
  Description of Artificial Sequence: Synthetic oligonucleotide
cauagagccuaauuaugcc

SEQ ID NO: 119213 - RNA, 19 nt, Artificial Sequence
  Description of Artificial Sequence: Synthetic oligonucleotide
uuuccucgaaaacuuggcc

SEQ ID NO: 119214 - RNA, 19 nt, Artificial Sequence
  Description of Artificial Sequence: Synthetic oligonucleotide
gacuuugguaugcagagga

SEQ ID NO: 119215 - RNA, 19 nt, Artificial Sequence
  Description of Artificial Sequence: Synthetic oligonucleotide
aauuaugccccagcuuaac

SEQ ID NO: 119216 - RNA, 19 nt, Artificial Sequence
  Description of Artificial Sequence: Synthetic oligonucleotide
aguagauauauugcuacug

SEQ ID NO: 119217 - RNA, 19 nt, Artificial Sequence
  Description of Artificial Sequence: Synthetic oligonucleotide
ucucgauugcaccucguug

SEQ ID NO: 119218 - RNA, 19 nt, Artificial Sequence
  Description of Artificial Sequence: Synthetic oligonucleotide
uaguguacuaauagaaaua

SEQ ID NO: 119219 - RNA, 19 nt, Artificial Sequence
  Description of Artificial Sequence: Synthetic oligonucleotide
acgaaaauacaguauuuaa

SEQ ID NO: 119220 - RNA, 19 nt, Artificial Sequence
  Description of Artificial Sequence: Synthetic oligonucleotide
gaugacgaauucauaucgg

SEQ ID NO: 119221 - RNA, 19 nt, Artificial Sequence
  Description of Artificial Sequence: Synthetic oligonucleotide
aaacuauacucagaucucu

SEQ ID NO: 119222 - RNA, 19 nt, Artificial Sequence
  Description of Artificial Sequence: Synthetic oligonucleotide
uucauagaagcuugaacau

SEQ ID NO: 119223 - RNA, 19 nt, Artificial Sequence
  Description of Artificial Sequence: Synthetic oligonucleotide
aguguacuaauagaaauaa

SEQ ID NO: 119224 - RNA, 19 nt, Artificial Sequence
  Description of Artificial Sequence: Synthetic oligonucleotide
uccacuugccacacgauaa

SEQ ID NO: 119225 - RNA, 19 nt, Artificial Sequence
  Description of Artificial Sequence: Synthetic oligonucleotide
agccuaauuaugccccagc

SEQ ID NO: 119226 - RNA, 19 nt, Artificial Sequence
  Description of Artificial Sequence: Synthetic oligonucleotide
agauucaaauaguggcuag

SEQ ID NO: 119227 - RNA, 19 nt, Artificial Sequence
  Description of Artificial Sequence: Synthetic oligonucleotide
ucggugaugagaucugaug

SEQ ID NO: 119228 - RNA, 19 nt, Artificial Sequence
  Description of Artificial Sequence: Synthetic oligonucleotide
agauaguguacuaauagaa

SEQ ID NO: 119229 - RNA, 19 nt, Artificial Sequence
  Description of Artificial Sequence: Synthetic oligonucleotide
cagcuuaacuaaucuaagc

SEQ ID NO: 119230 - RNA, 19 nt, Artificial Sequence
  Description of Artificial Sequence: Synthetic oligonucleotide
uguagugauauaugccccu

SEQ ID NO: 119231 - RNA, 19 nt, Artificial Sequence
  Description of Artificial Sequence: Synthetic oligonucleotide
agaguacagauuccacuuc

SEQ ID NO: 119232 - RNA, 19 nt, Artificial Sequence
  Description of Artificial Sequence: Synthetic oligonucleotide
auguucauaugcuaagaau

SEQ ID NO: 119233 - RNA, 19 nt, Artificial Sequence
  Description of Artificial Sequence: Synthetic oligonucleotide
cuugcaucguguacauacg

SEQ ID NO: 119234 - RNA, 19 nt, Artificial Sequence
  Description of Artificial Sequence: Synthetic oligonucleotide
agugaaugauuacagccaa

SEQ ID NO: 119235 - RNA, 19 nt, Artificial Sequence
  Description of Artificial Sequence: Synthetic oligonucleotide
cuguagugauauaugcccc

SEQ ID NO: 119236 - RNA, 19 nt, Artificial Sequence
  Description of Artificial Sequence: Synthetic oligonucleotide
caaacuauacucagaucuc

SEQ ID NO: 119237 - RNA, 19 nt, Artificial Sequence
  Description of Artificial Sequence: Synthetic oligonucleotide
cuauuuacuccccgugggg

SEQ ID NO: 119238 - RNA, 19 nt, Artificial Sequence
  Description of Artificial Sequence: Synthetic oligonucleotide
aaacuguugagagacugau

SEQ ID NO: 119239 - RNA, 19 nt, Artificial Sequence
  Description of Artificial Sequence: Synthetic oligonucleotide
auaucgauagcuccuggaa

SEQ ID NO: 119240 - RNA, 19 nt, Artificial Sequence
  Description of Artificial Sequence: Synthetic oligonucleotide
agcuuacauauuauuuccc

SEQ ID NO: 119241 - RNA, 19 nt, Artificial Sequence
  Description of Artificial Sequence: Synthetic oligonucleotide
uaucgauagcuccuggaau

SEQ ID NO: 119242 - RNA, 19 nt, Artificial Sequence
  Description of Artificial Sequence: Synthetic oligonucleotide
acuaaucuaagcaguaccu

SEQ ID NO: 119243 - RNA, 19 nt, Artificial Sequence
  Description of Artificial Sequence: Synthetic oligonucleotide
uauccaacguggcauuggu

SEQ ID NO: 119244 - RNA, 19 nt, Artificial Sequence
  Description of Artificial Sequence: Synthetic oligonucleotide
cuuaacuaaucuaagcagu

SEQ ID NO: 119245 - RNA, 19 nt, Artificial Sequence
  Description of Artificial Sequence: Synthetic oligonucleotide
cauuccacacggaagauaa

SEQ ID NO: 119246 - RNA, 19 nt, Artificial Sequence
  Description of Artificial Sequence: Synthetic oligonucleotide
cuaucuauuggagaaucuc

SEQ ID NO: 119247 - RNA, 19 nt, Artificial Sequence
  Description of Artificial Sequence: Synthetic oligonucleotide
ugacuguugugacucuggc

SEQ ID NO: 119248 - RNA, 19 nt, Artificial Sequence
  Description of Artificial Sequence: Synthetic oligonucleotide
uugcuacaaauguucaagu

SEQ ID NO: 119249 - RNA, 19 nt, Artificial Sequence
  Description of Artificial Sequence: Synthetic oligonucleotide
uuaugccccagcuuaacua

SEQ ID NO: 119250 - RNA, 19 nt, Artificial Sequence
  Description of Artificial Sequence: Synthetic oligonucleotide
gagaaucucgucccaaauc

SEQ ID NO: 119251 - RNA, 19 nt, Artificial Sequence
  Description of Artificial Sequence: Synthetic oligonucleotide
auaauguuauucauucaga

SEQ ID NO: 119252 - RNA, 19 nt, Artificial Sequence
  Description of Artificial Sequence: Synthetic oligonucleotide
ugguaaguggacucugcca

SEQ ID NO: 119253 - RNA, 19 nt, Artificial Sequence
  Description of Artificial Sequence: Synthetic oligonucleotide
aaacuaagaauuaccuaau

SEQ ID NO: 119254 - RNA, 19 nt, Artificial Sequence
  Description of Artificial Sequence: Synthetic oligonucleotide
auuaaugguuggcaccagu

SEQ ID NO: 119255 - RNA, 19 nt, Artificial Sequence
  Description of Artificial Sequence: Synthetic oligonucleotide
agagacugaugacuguugu

SEQ ID NO: 119256 - RNA, 19 nt, Artificial Sequence
  Description of Artificial Sequence: Synthetic oligonucleotide
uauuuacuccccgugggga

SEQ ID NO: 119257 - RNA, 19 nt, Artificial Sequence
  Description of Artificial Sequence: Synthetic oligonucleotide
aucgauagcuccuggaaua

SEQ ID NO: 119258 - RNA, 19 nt, Artificial Sequence
  Description of Artificial Sequence: Synthetic oligonucleotide
gugggugaguucuaaugag

SEQ ID NO: 119259 - RNA, 19 nt, Artificial Sequence
  Description of Artificial Sequence: Synthetic oligonucleotide
cauuggucaagauuaagua

SEQ ID NO: 119260 - RNA, 19 nt, Artificial Sequence
  Description of Artificial Sequence: Synthetic oligonucleotide
uaacuaaucuaagcaguac

SEQ ID NO: 119261 - RNA, 19 nt, Artificial Sequence
  Description of Artificial Sequence: Synthetic oligonucleotide
cucgucccaaaucauaauc

SEQ ID NO: 119262 - RNA, 19 nt, Artificial Sequence
  Description of Artificial Sequence: Synthetic oligonucleotide
auuaugccccagcuuaacu

SEQ ID NO: 119263 - RNA, 19 nt, Artificial Sequence
  Description of Artificial Sequence: Synthetic oligonucleotide
ucuggcggacgucuugaag

SEQ ID NO: 119264 - RNA, 19 nt, Artificial Sequence
  Description of Artificial Sequence: Synthetic oligonucleotide
ccuaauucgacacacagaa

SEQ ID NO: 119265 - RNA, 19 nt, Artificial Sequence
  Description of Artificial Sequence: Synthetic oligonucleotide
cagugaaugauuacagcca

SEQ ID NO: 119266 - RNA, 19 nt, Artificial Sequence
  Description of Artificial Sequence: Synthetic oligonucleotide
acugaugacuguugugacu

SEQ ID NO: 119267 - RNA, 19 nt, Artificial Sequence
  Description of Artificial Sequence: Synthetic oligonucleotide
ucauauggcaaggaucaaa

SEQ ID NO: 119268 - RNA, 19 nt, Artificial Sequence
  Description of Artificial Sequence: Synthetic oligonucleotide
cacagucaaacuauacuca

SEQ ID NO: 119269 - RNA, 19 nt, Artificial Sequence
  Description of Artificial Sequence: Synthetic oligonucleotide
gagaggaucggugaugaga

SEQ ID NO: 119270 - RNA, 19 nt, Artificial Sequence
  Description of Artificial Sequence: Synthetic oligonucleotide
uaauuaugccccagcuuaa

SEQ ID NO: 119271 - RNA, 19 nt, Artificial Sequence
  Description of Artificial Sequence: Synthetic oligonucleotide
gcaacuauuuggcaacgcc

SEQ ID NO: 119272 - RNA, 19 nt, Artificial Sequence
  Description of Artificial Sequence: Synthetic oligonucleotide
uagauucaaauaguggcua

SEQ ID NO: 119273 - RNA, 19 nt, Artificial Sequence
  Description of Artificial Sequence: Synthetic oligonucleotide
gugaugagaucugaugggc

SEQ ID NO: 119274 - RNA, 19 nt, Artificial Sequence
  Description of Artificial Sequence: Synthetic oligonucleotide
guuuccucgaaaacuuggc

SEQ ID NO: 119275 - RNA, 19 nt, Artificial Sequence
  Description of Artificial Sequence: Synthetic oligonucleotide
aguggcgugggugaguucu

SEQ ID NO: 119276 - RNA, 19 nt, Artificial Sequence
  Description of Artificial Sequence: Synthetic oligonucleotide
ucgaaaacuuggccuuggc

SEQ ID NO: 119277 - RNA, 19 nt, Artificial Sequence
  Description of Artificial Sequence: Synthetic oligonucleotide
uggagaggaucggugauga

SEQ ID NO: 119278 - RNA, 19 nt, Artificial Sequence
  Description of Artificial Sequence: Synthetic oligonucleotide
aaggaucaaaucagauuca

SEQ ID NO: 119279 - RNA, 19 nt, Artificial Sequence
  Description of Artificial Sequence: Synthetic oligonucleotide
aucgcugggagaguccuuc

SEQ ID NO: 119280 - RNA, 19 nt, Artificial Sequence
  Description of Artificial Sequence: Synthetic oligonucleotide
agaggaucggugaugagau

SEQ ID NO: 119281 - RNA, 19 nt, Artificial Sequence
  Description of Artificial Sequence: Synthetic oligonucleotide
ucgauugcaccucguugca

SEQ ID NO: 119282 - RNA, 19 nt, Artificial Sequence
  Description of Artificial Sequence: Synthetic oligonucleotide
ggacauaagguuuaugcua

SEQ ID NO: 119283 - RNA, 19 nt, Artificial Sequence
  Description of Artificial Sequence: Synthetic oligonucleotide
acccuuccgacguuccagg

SEQ ID NO: 119284 - RNA, 19 nt, Artificial Sequence
  Description of Artificial Sequence: Synthetic oligonucleotide
cagagaugauguacuggag

SEQ ID NO: 119285 - RNA, 19 nt, Artificial Sequence
  Description of Artificial Sequence: Synthetic oligonucleotide
aaauugcuccuaaggaaau

SEQ ID NO: 119286 - RNA, 19 nt, Artificial Sequence
  Description of Artificial Sequence: Synthetic oligonucleotide
aacauucauagaagcuuga

SEQ ID NO: 119287 - RNA, 19 nt, Artificial Sequence
  Description of Artificial Sequence: Synthetic oligonucleotide
gaggauugccuuuguccug

SEQ ID NO: 119288 - RNA, 19 nt, Artificial Sequence
  Description of Artificial Sequence: Synthetic oligonucleotide
gccauuaaugguuggcacc

SEQ ID NO: 119289 - RNA, 19 nt, Artificial Sequence
  Description of Artificial Sequence: Synthetic oligonucleotide
uggucaagauuaaguaguu

SEQ ID NO: 119290 - RNA, 19 nt, Artificial Sequence
  Description of Artificial Sequence: Synthetic oligonucleotide
guacauacgaaaauacagu

SEQ ID NO: 119291 - RNA, 19 nt, Artificial Sequence
  Description of Artificial Sequence: Synthetic oligonucleotide
auuuacuccccguggggau

SEQ ID NO: 119292 - RNA, 19 nt, Artificial Sequence
  Description of Artificial Sequence: Synthetic oligonucleotide
acauacgaaaauacaguau

SEQ ID NO: 119293 - RNA, 19 nt, Artificial Sequence
  Description of Artificial Sequence: Synthetic oligonucleotide
aaucucgucccaaaucaua

SEQ ID NO: 119294 - RNA, 19 nt, Artificial Sequence
  Description of Artificial Sequence: Synthetic oligonucleotide
guguaauguccccuuugug

SEQ ID NO: 119295 - RNA, 19 nt, Artificial Sequence
  Description of Artificial Sequence: Synthetic oligonucleotide
uguuugucaugggaguaaa

SEQ ID NO: 119296 - RNA, 19 nt, Artificial Sequence
  Description of Artificial Sequence: Synthetic oligonucleotide
ugcccaugaagcuuacaua

SEQ ID NO: 119297 - RNA, 19 nt, Artificial Sequence
  Description of Artificial Sequence: Synthetic oligonucleotide
ugccacacgauaagucaaa

SEQ ID NO: 119298 - RNA, 19 nt, Artificial Sequence
  Description of Artificial Sequence: Synthetic oligonucleotide
uuacuccccguggggaugg

SEQ ID NO: 119299 - RNA, 19 nt, Artificial Sequence
  Description of Artificial Sequence: Synthetic oligonucleotide
uuuacuccccguggggaug

SEQ ID NO: 119300 - RNA, 19 nt, Artificial Sequence
  Description of Artificial Sequence: Synthetic oligonucleotide
gacccuuccgacguuccag

SEQ ID NO: 119301 - RNA, 19 nt, Artificial Sequence
  Description of Artificial Sequence: Synthetic oligonucleotide
cacuaagaugguugagcac

SEQ ID NO: 119302 - RNA, 19 nt, Artificial Sequence
  Description of Artificial Sequence: Synthetic oligonucleotide
ucuauccaacguggcauug

SEQ ID NO: 119303 - RNA, 19 nt, Artificial Sequence
  Description of Artificial Sequence: Synthetic oligonucleotide
caaacuguugagagacuga

SEQ ID NO: 119304 - RNA, 19 nt, Artificial Sequence
  Description of Artificial Sequence: Synthetic oligonucleotide
uucucgauugcaccucguu

SEQ ID NO: 119305 - RNA, 19 nt, Artificial Sequence
  Description of Artificial Sequence: Synthetic oligonucleotide
agguggauugucauuuaug

SEQ ID NO: 119306 - RNA, 19 nt, Artificial Sequence
  Description of Artificial Sequence: Synthetic oligonucleotide
cucgaaaacuuggccuugg

SEQ ID NO: 119307 - RNA, 19 nt, Artificial Sequence
  Description of Artificial Sequence: Synthetic oligonucleotide
guagugauauaugccccug

SEQ ID NO: 119308 - RNA, 19 nt, Artificial Sequence
  Description of Artificial Sequence: Synthetic oligonucleotide
augauuaggaaaacauguu

SEQ ID NO: 119309 - RNA, 19 nt, Artificial Sequence
  Description of Artificial Sequence: Synthetic oligonucleotide
agagacaaugcuguugcua

SEQ ID NO: 119310 - RNA, 19 nt, Artificial Sequence
  Description of Artificial Sequence: Synthetic oligonucleotide
cguguacauacgaaaauac

SEQ ID NO: 119311 - RNA, 19 nt, Artificial Sequence
  Description of Artificial Sequence: Synthetic oligonucleotide
gguuggauugagaugguca

SEQ ID NO: 119312 - RNA, 19 nt, Artificial Sequence
  Description of Artificial Sequence: Synthetic oligonucleotide
augcaacuauuuggcaacg

SEQ ID NO: 119313 - RNA, 19 nt, Artificial Sequence
  Description of Artificial Sequence: Synthetic oligonucleotide
ucugcacuccucugugcac

SEQ ID NO: 119314 - RNA, 19 nt, Artificial Sequence
  Description of Artificial Sequence: Synthetic oligonucleotide
uuggcaccaguguaauguc

SEQ ID NO: 119315 - RNA, 19 nt, Artificial Sequence
  Description of Artificial Sequence: Synthetic oligonucleotide
ggccgcaaccccuuguggg

SEQ ID NO: 119316 - RNA, 19 nt, Artificial Sequence
  Description of Artificial Sequence: Synthetic oligonucleotide
aguuuccacuugccacacg

SEQ ID NO: 119317 - RNA, 19 nt, Artificial Sequence
  Description of Artificial Sequence: Synthetic oligonucleotide
ggaguacugacauaucugu

SEQ ID NO: 119318 - RNA, 19 nt, Artificial Sequence
  Description of Artificial Sequence: Synthetic oligonucleotide
aucucgucccaaaucauaa

SEQ ID NO: 119319 - RNA, 19 nt, Artificial Sequence
  Description of Artificial Sequence: Synthetic oligonucleotide
uccccuaauucgacacaca

SEQ ID NO: 119320 - RNA, 19 nt, Artificial Sequence
  Description of Artificial Sequence: Synthetic oligonucleotide
auacgaaaauacaguauuu

SEQ ID NO: 119321 - RNA, 19 nt, Artificial Sequence
  Description of Artificial Sequence: Synthetic oligonucleotide
agcagccuaucuauuggag

SEQ ID NO: 119322 - RNA, 19 nt, Artificial Sequence
  Description of Artificial Sequence: Synthetic oligonucleotide
ugucuugaacccugacaau

SEQ ID NO: 119323 - RNA, 19 nt, Artificial Sequence
  Description of Artificial Sequence: Synthetic oligonucleotide
acauucauagaagcuugaa

SEQ ID NO: 119324 - RNA, 19 nt, Artificial Sequence
  Description of Artificial Sequence: Synthetic oligonucleotide
ucucgucccaaaucauaau

SEQ ID NO: 119325 - RNA, 19 nt, Artificial Sequence
  Description of Artificial Sequence: Synthetic oligonucleotide
acacgauaagucaaacaaa

SEQ ID NO: 119326 - RNA, 19 nt, Artificial Sequence
  Description of Artificial Sequence: Synthetic oligonucleotide
ccacacggaagauaacagc

SEQ ID NO: 119327 - RNA, 19 nt, Artificial Sequence
  Description of Artificial Sequence: Synthetic oligonucleotide
uggcugauauugccccuga

SEQ ID NO: 119328 - RNA, 19 nt, Artificial Sequence
  Description of Artificial Sequence: Synthetic oligonucleotide
aaacgacuuuauaaauguu

SEQ ID NO: 119329 - RNA, 19 nt, Artificial Sequence
  Description of Artificial Sequence: Synthetic oligonucleotide
gaagggcauaucgauagcu

SEQ ID NO: 119330 - RNA, 19 nt, Artificial Sequence
  Description of Artificial Sequence: Synthetic oligonucleotide
ggagcgguccccuucgcug

SEQ ID NO: 119331 - RNA, 19 nt, Artificial Sequence
  Description of Artificial Sequence: Synthetic oligonucleotide
caucacuaagaugguugag

SEQ ID NO: 119332 - RNA, 19 nt, Artificial Sequence
  Description of Artificial Sequence: Synthetic oligonucleotide
gaauucauaucggcuccuc

SEQ ID NO: 119333 - RNA, 19 nt, Artificial Sequence
  Description of Artificial Sequence: Synthetic oligonucleotide
auauaugccccuggcgagu

SEQ ID NO: 119334 - RNA, 19 nt, Artificial Sequence
  Description of Artificial Sequence: Synthetic oligonucleotide
ugaugacuguugugacucu

SEQ ID NO: 119335 - RNA, 19 nt, Artificial Sequence
  Description of Artificial Sequence: Synthetic oligonucleotide
ccccuaauucgacacacag

SEQ ID NO: 119336 - RNA, 19 nt, Artificial Sequence
  Description of Artificial Sequence: Synthetic oligonucleotide
cuaaggaaaugauuaugau

SEQ ID NO: 119337 - RNA, 19 nt, Artificial Sequence
  Description of Artificial Sequence: Synthetic oligonucleotide
cauuucugauagcagagau

SEQ ID NO: 119338 - RNA, 19 nt, Artificial Sequence
  Description of Artificial Sequence: Synthetic oligonucleotide
uaugccccuggcgaguuau

SEQ ID NO: 119339 - RNA, 19 nt, Artificial Sequence
  Description of Artificial Sequence: Synthetic oligonucleotide
acugucuuucaagcuaaau

SEQ ID NO: 119340 - RNA, 19 nt, Artificial Sequence
  Description of Artificial Sequence: Synthetic oligonucleotide
ucgauagcuccuggaauau

SEQ ID NO: 119341 - RNA, 19 nt, Artificial Sequence
  Description of Artificial Sequence: Synthetic oligonucleotide
gauggaguacugacauauc

SEQ ID NO: 119342 - RNA, 19 nt, Artificial Sequence
  Description of Artificial Sequence: Synthetic oligonucleotide
uugcaccucguugcaaaga

SEQ ID NO: 119343 - RNA, 19 nt, Artificial Sequence
  Description of Artificial Sequence: Synthetic oligonucleotide
gcauaucgauagcuccugg

SEQ ID NO: 119344 - RNA, 19 nt, Artificial Sequence
  Description of Artificial Sequence: Synthetic oligonucleotide
ugugcuugucacggauucu

SEQ ID NO: 119345 - RNA, 19 nt, Artificial Sequence
  Description of Artificial Sequence: Synthetic oligonucleotide
uggagcgguccccuucgcu

SEQ ID NO: 119346 - RNA, 19 nt, Artificial Sequence
  Description of Artificial Sequence: Synthetic oligonucleotide
cguuggaaaacacugcuca

SEQ ID NO: 119347 - RNA, 19 nt, Artificial Sequence
  Description of Artificial Sequence: Synthetic oligonucleotide
acggaagauaacagcacaa

SEQ ID NO: 119348 - RNA, 19 nt, Artificial Sequence
  Description of Artificial Sequence: Synthetic oligonucleotide
gaagauggagaggaucggu

SEQ ID NO: 119349 - RNA, 19 nt, Artificial Sequence
  Description of Artificial Sequence: Synthetic oligonucleotide
gucuuucaagcuaaauuua

SEQ ID NO: 119350 - RNA, 19 nt, Artificial Sequence
  Description of Artificial Sequence: Synthetic oligonucleotide
uggaggggauagauuccaa

SEQ ID NO: 119351 - RNA, 19 nt, Artificial Sequence
  Description of Artificial Sequence: Synthetic oligonucleotide
cauuaaugguuggcaccag

SEQ ID NO: 119352 - RNA, 19 nt, Artificial Sequence
  Description of Artificial Sequence: Synthetic oligonucleotide
cacgugguuggauugagau

SEQ ID NO: 119353 - RNA, 19 nt, Artificial Sequence
  Description of Artificial Sequence: Synthetic oligonucleotide
gaucggugaugagaucuga

SEQ ID NO: 119354 - RNA, 19 nt, Artificial Sequence
  Description of Artificial Sequence: Synthetic oligonucleotide
gcagccuaucuauuggaga

SEQ ID NO: 119355 - RNA, 19 nt, Artificial Sequence
  Description of Artificial Sequence: Synthetic oligonucleotide
cagugugccauuaaugguu

SEQ ID NO: 119356 - RNA, 19 nt, Artificial Sequence
  Description of Artificial Sequence: Synthetic oligonucleotide
caggccgcaaccccuugug

SEQ ID NO: 119357 - RNA, 19 nt, Artificial Sequence
  Description of Artificial Sequence: Synthetic oligonucleotide
gcgaguuauucucagagau

SEQ ID NO: 119358 - RNA, 19 nt, Artificial Sequence
  Description of Artificial Sequence: Synthetic oligonucleotide
cuauacucagaucucuuuu

SEQ ID NO: 119359 - RNA, 19 nt, Artificial Sequence
  Description of Artificial Sequence: Synthetic oligonucleotide
ugcuaauuucagguuuauu

SEQ ID NO: 119360 - RNA, 19 nt, Artificial Sequence
  Description of Artificial Sequence: Synthetic oligonucleotide
uucauauggcaaggaucaa

SEQ ID NO: 119361 - RNA, 19 nt, Artificial Sequence
  Description of Artificial Sequence: Synthetic oligonucleotide
uuggagcgguccccuucgc

SEQ ID NO: 119362 - RNA, 19 nt, Artificial Sequence
  Description of Artificial Sequence: Synthetic oligonucleotide
ggcgaguuauucucagaga

SEQ ID NO: 119363 - RNA, 19 nt, Artificial Sequence
  Description of Artificial Sequence: Synthetic oligonucleotide
ggcguuggaaaacacugcu

SEQ ID NO: 119364 - RNA, 19 nt, Artificial Sequence
  Description of Artificial Sequence: Synthetic oligonucleotide
gcuugucacggauucugca

SEQ ID NO: 119365 - RNA, 19 nt, Artificial Sequence
  Description of Artificial Sequence: Synthetic oligonucleotide
gagguggauugucauuuau

SEQ ID NO: 119366 - RNA, 19 nt, Artificial Sequence
  Description of Artificial Sequence: Synthetic oligonucleotide
gccuaucuauuggagaauc

SEQ ID NO: 119367 - RNA, 19 nt, Artificial Sequence
  Description of Artificial Sequence: Synthetic oligonucleotide
uccgacguuccagggaguu

SEQ ID NO: 119368 - RNA, 19 nt, Artificial Sequence
  Description of Artificial Sequence: Synthetic oligonucleotide
aucggugaugagaucugau

SEQ ID NO: 119369 - RNA, 19 nt, Artificial Sequence
  Description of Artificial Sequence: Synthetic oligonucleotide
auucaguggaggggauaga

SEQ ID NO: 119370 - RNA, 19 nt, Artificial Sequence
  Description of Artificial Sequence: Synthetic oligonucleotide
uccccuagcucuggcggac

SEQ ID NO: 119371 - RNA, 19 nt, Artificial Sequence
  Description of Artificial Sequence: Synthetic oligonucleotide
agccuaucuauuggagaau

SEQ ID NO: 119372 - RNA, 19 nt, Artificial Sequence
  Description of Artificial Sequence: Synthetic oligonucleotide
uuccgacguuccagggagu

SEQ ID NO: 119373 - RNA, 19 nt, Artificial Sequence
  Description of Artificial Sequence: Synthetic oligonucleotide
cucagcaaucacagucaaa

SEQ ID NO: 119374 - RNA, 19 nt, Artificial Sequence
  Description of Artificial Sequence: Synthetic oligonucleotide
caaugggauccccuucaaa

SEQ ID NO: 119375 - RNA, 19 nt, Artificial Sequence
  Description of Artificial Sequence: Synthetic oligonucleotide
cacuggacccuuccgacgu

SEQ ID NO: 119376 - RNA, 19 nt, Artificial Sequence
  Description of Artificial Sequence: Synthetic oligonucleotide
caaccccuuguggguagcc

SEQ ID NO: 119377 - RNA, 19 nt, Artificial Sequence
  Description of Artificial Sequence: Synthetic oligonucleotide
cccuaauucgacacacaga

SEQ ID NO: 119378 - RNA, 19 nt, Artificial Sequence
  Description of Artificial Sequence: Synthetic oligonucleotide
ccacacgauaagucaaaca

SEQ ID NO: 119379 - RNA, 19 nt, Artificial Sequence
  Description of Artificial Sequence: Synthetic oligonucleotide
ggagaggaucggugaugag

SEQ ID NO: 119380 - RNA, 19 nt, Artificial Sequence
  Description of Artificial Sequence: Synthetic oligonucleotide
gccuaauuaugccccagcu

SEQ ID NO: 119381 - RNA, 19 nt, Artificial Sequence
  Description of Artificial Sequence: Synthetic oligonucleotide
ccccuggcgaguuauucuc

SEQ ID NO: 119382 - RNA, 19 nt, Artificial Sequence
  Description of Artificial Sequence: Synthetic oligonucleotide
cuggacccuuccgacguuc

SEQ ID NO: 119383 - RNA, 19 nt, Artificial Sequence
  Description of Artificial Sequence: Synthetic oligonucleotide
uccucaucgcugggagagu

SEQ ID NO: 119384 - RNA, 19 nt, Artificial Sequence
  Description of Artificial Sequence: Synthetic oligonucleotide
ggagaaucucgucccaaau

SEQ ID NO: 119385 - RNA, 19 nt, Artificial Sequence
  Description of Artificial Sequence: Synthetic oligonucleotide
gccacacgauaagucaaac

SEQ ID NO: 119386 - RNA, 19 nt, Artificial Sequence
  Description of Artificial Sequence: Synthetic oligonucleotide
gcauccagcacuggucaga

SEQ ID NO: 119387 - RNA, 19 nt, Artificial Sequence
  Description of Artificial Sequence: Synthetic oligonucleotide
acuggacccuuccgacguu

SEQ ID NO: 119388 - RNA, 19 nt, Artificial Sequence
  Description of Artificial Sequence: Synthetic oligonucleotide
cccuuccgacguuccaggg

SEQ ID NO: 119389 - RNA, 19 nt, Artificial Sequence
  Description of Artificial Sequence: Synthetic oligonucleotide
auaugccccuggcgaguua

SEQ ID NO: 119390 - RNA, 19 nt, Artificial Sequence
  Description of Artificial Sequence: Synthetic oligonucleotide
cucuauccaacguggcauu

SEQ ID NO: 119391 - RNA, 19 nt, Artificial Sequence
  Description of Artificial Sequence: Synthetic oligonucleotide
ggcaaggaucaaaucagau

SEQ ID NO: 119392 - RNA, 19 nt, Artificial Sequence
  Description of Artificial Sequence: Synthetic oligonucleotide
ggcagccauuuggaagaag

SEQ ID NO: 119393 - RNA, 19 nt, Artificial Sequence
  Description of Artificial Sequence: Synthetic oligonucleotide
ccggauucagcaggcuggc

SEQ ID NO: 119394 - RNA, 19 nt, Artificial Sequence
  Description of Artificial Sequence: Synthetic oligonucleotide
ccuaucuauuggagaaucu

SEQ ID NO: 119395 - RNA, 19 nt, Artificial Sequence
  Description of Artificial Sequence: Synthetic oligonucleotide
ggacccuuccgacguucca

SEQ ID NO: 119396 - RNA, 19 nt, Artificial Sequence
  Description of Artificial Sequence: Synthetic oligonucleotide
ggcggacgucuugaagcag

SEQ ID NO: 119397 - RNA, 19 nt, Artificial Sequence
  Description of Artificial Sequence: Synthetic oligonucleotide
acucuggcggcugcccauu

SEQ ID NO: 119398 - RNA, 19 nt, Artificial Sequence
  Description of Artificial Sequence: Synthetic oligonucleotide
ccaacguggcauuggucaa

SEQ ID NO: 119399 - RNA, 19 nt, Artificial Sequence
  Description of Artificial Sequence: Synthetic oligonucleotide
gcauuccacacggaagaua

SEQ ID NO: 119400 - RNA, 19 nt, Artificial Sequence
  Description of Artificial Sequence: Synthetic oligonucleotide
cuucucccgggaugaacau

SEQ ID NO: 119401 - RNA, 19 nt, Artificial Sequence
  Description of Artificial Sequence: Synthetic oligonucleotide
cucuggcggacgucuugaa

SEQ ID NO: 119402 - RNA, 19 nt, Artificial Sequence
  Description of Artificial Sequence: Synthetic oligonucleotide
gccgcaaccccuugugggu

SEQ ID NO: 119403 - RNA, 19 nt, Artificial Sequence
  Description of Artificial Sequence: Synthetic oligonucleotide
gucacggauucugcauagu

SEQ ID NO: 119404 - RNA, 19 nt, Artificial Sequence
  Description of Artificial Sequence: Synthetic oligonucleotide
ccccagcuuaacuaaucua

SEQ ID NO: 119405 - RNA, 19 nt, Artificial Sequence
  Description of Artificial Sequence: Synthetic oligonucleotide
gcggacgucuugaagcagu

SEQ ID NO: 119406 - RNA, 19 nt, Artificial Sequence
  Description of Artificial Sequence: Synthetic oligonucleotide
gcagaggaggauugccuuu

SEQ ID NO: 119407 - RNA, 19 nt, Artificial Sequence
  Description of Artificial Sequence: Synthetic oligonucleotide
ccgacguuccagggaguug

SEQ ID NO: 119408 - RNA, 19 nt, Artificial Sequence
  Description of Artificial Sequence: Synthetic oligonucleotide
ccuagcucuggcggacguc

SEQ ID NO: 119409 - RNA, 19 nt, Artificial Sequence
  Description of Artificial Sequence: Synthetic oligonucleotide
ccccuagcucuggcggacg

SEQ ID NO: 119410 - RNA, 19 nt, Artificial Sequence
  Description of Artificial Sequence: Synthetic oligonucleotide
ggcgugggugaguucuaau

SEQ ID NO: 119411 - RNA, 19 nt, Artificial Sequence
  Description of Artificial Sequence: Synthetic oligonucleotide
caggggacauaagguuuau

SEQ ID NO: 119412 - RNA, 19 nt, Artificial Sequence
  Description of Artificial Sequence: Synthetic oligonucleotide
cggaagauaacagcacaau

SEQ ID NO: 119413 - RNA, 19 nt, Artificial Sequence
  Description of Artificial Sequence: Synthetic oligonucleotide
caucgcugggagaguccuu

SEQ ID NO: 119414 - RNA, 19 nt, Artificial Sequence
  Description of Artificial Sequence: Synthetic oligonucleotide
cgagguggauugucauuua

SEQ ID NO: 119415 - RNA, 19 nt, Artificial Sequence
  Description of Artificial Sequence: Synthetic oligonucleotide
ccaguguaauguccccuuu

SEQ ID NO: 119416 - RNA, 19 nt, Artificial Sequence
  Description of Artificial Sequence: Synthetic oligonucleotide
cgauugcaccucguugcaa

SEQ ID NO: 119417 - RNA, 19 nt, Artificial Sequence
  Description of Artificial Sequence: Synthetic oligonucleotide
ccgcaaccccuugugggua

SEQ ID NO: 119418 - RNA, 19 nt, Artificial Sequence
  Description of Artificial Sequence: Synthetic oligonucleotide
cggacgucuugaagcaguu

SEQ ID NO: 119419 - RNA, 19 nt, Artificial Sequence
  Description of Artificial Sequence: Synthetic oligonucleotide
uguuguaucacaacuacag

SEQ ID NO: 119420 - RNA, 19 nt, Artificial Sequence
  Description of Artificial Sequence: Synthetic oligonucleotide
uauuggaccucacaaaucg

SEQ ID NO: 119421 - RNA, 19 nt, Artificial Sequence
  Description of Artificial Sequence: Synthetic oligonucleotide
aguaauauccaucuaauga

SEQ ID NO: 119422 - RNA, 19 nt, Artificial Sequence
  Description of Artificial Sequence: Synthetic oligonucleotide
ucucagagaaaucuguucg

SEQ ID NO: 119423 - RNA, 19 nt, Artificial Sequence
  Description of Artificial Sequence: Synthetic oligonucleotide
uacaauuuguuccucgugg

SEQ ID NO: 119424 - RNA, 19 nt, Artificial Sequence
  Description of Artificial Sequence: Synthetic oligonucleotide
aacucaauaucucuaucgg

SEQ ID NO: 119425 - RNA, 19 nt, Artificial Sequence
  Description of Artificial Sequence: Synthetic oligonucleotide
gauaucaaguuguaggucc

SEQ ID NO: 119426 - RNA, 19 nt, Artificial Sequence
  Description of Artificial Sequence: Synthetic oligonucleotide
uaacucaauaucucuaucg

SEQ ID NO: 119427 - RNA, 19 nt, Artificial Sequence
  Description of Artificial Sequence: Synthetic oligonucleotide
acugcuaauagauacuggg

SEQ ID NO: 119428 - RNA, 19 nt, Artificial Sequence
  Description of Artificial Sequence: Synthetic oligonucleotide
  modified_base (2)..(2): a, c, u, g, unknown or other
cnuaacgugaguuuucagg

SEQ ID NO: 119429 - RNA, 19 nt, Artificial Sequence
  Description of Artificial Sequence: Synthetic oligonucleotide
aaugaguuacucuuggccu

SEQ ID NO: 119430 - RNA, 19 nt, Artificial Sequence
  Description of Artificial Sequence: Synthetic oligonucleotide
ugcuaauagauacugggag

SEQ ID NO: 119431 - RNA, 19 nt, Artificial Sequence
  Description of Artificial Sequence: Synthetic oligonucleotide
uauagugugcugaugaugu

SEQ ID NO: 119432 - RNA, 19 nt, Artificial Sequence
  Description of Artificial Sequence: Synthetic oligonucleotide
uguacuuggaacaauuuuc

SEQ ID NO: 119433 - RNA, 19 nt, Artificial Sequence
  Description of Artificial Sequence: Synthetic oligonucleotide
cucaauaucucuaucgggc

SEQ ID NO: 119434 - RNA, 19 nt, Artificial Sequence
  Description of Artificial Sequence: Synthetic oligonucleotide
acuaagugcagccaguguc

SEQ ID NO: 119435 - RNA, 19 nt, Artificial Sequence
  Description of Artificial Sequence: Synthetic oligonucleotide
uggauuaggaucuauauuu

SEQ ID NO: 119436 - RNA, 19 nt, Artificial Sequence
  Description of Artificial Sequence: Synthetic oligonucleotide
uacaguauaauuguuugcc

SEQ ID NO: 119437 - RNA, 19 nt, Artificial Sequence
  Description of Artificial Sequence: Synthetic oligonucleotide
aauugcaccccauuuugag

SEQ ID NO: 119438 - RNA, 19 nt, Artificial Sequence
  Description of Artificial Sequence: Synthetic oligonucleotide
ucucuuaacauccccacug

SEQ ID NO: 119439 - RNA, 19 nt, Artificial Sequence
  Description of Artificial Sequence: Synthetic oligonucleotide
ucuaguuagaaaugggcug

SEQ ID NO: 119440 - RNA, 19 nt, Artificial Sequence
  Description of Artificial Sequence: Synthetic oligonucleotide
uuuuauacuugcuguuugg

SEQ ID NO: 119441 - RNA, 19 nt, Artificial Sequence
  Description of Artificial Sequence: Synthetic oligonucleotide
agagaaaucuguucggaag

SEQ ID NO: 119442 - RNA, 19 nt, Artificial Sequence
  Description of Artificial Sequence: Synthetic oligonucleotide
uuagaaaugggcuggauuu

SEQ ID NO: 119443 - RNA, 19 nt, Artificial Sequence
  Description of Artificial Sequence: Synthetic oligonucleotide
uguucggaagucuacacug

SEQ ID NO: 119444 - RNA, 19 nt, Artificial Sequence
  Description of Artificial Sequence: Synthetic oligonucleotide
ugagaaugggcaaauguac

SEQ ID NO: 119445 - RNA, 19 nt, Artificial Sequence
  Description of Artificial Sequence: Synthetic oligonucleotide
uuauacacgagccuauggu

SEQ ID NO: 119446 - RNA, 19 nt, Artificial Sequence
  Description of Artificial Sequence: Synthetic oligonucleotide
aaauuagagggcccagcgg

SEQ ID NO: 119447 - RNA, 19 nt, Artificial Sequence
  Description of Artificial Sequence: Synthetic oligonucleotide
uuuaaaguaaggugucggc

SEQ ID NO: 119448 - RNA, 19 nt, Artificial Sequence
  Description of Artificial Sequence: Synthetic oligonucleotide
cuugguaaaggcacagucg

SEQ ID NO: 119449 - RNA, 19 nt, Artificial Sequence
  Description of Artificial Sequence: Synthetic oligonucleotide
aguaucgagugcugaaagc

SEQ ID NO: 119450 - RNA, 19 nt, Artificial Sequence
  Description of Artificial Sequence: Synthetic oligonucleotide
uuuuaugguggaccgauac

SEQ ID NO: 119451 - RNA, 19 nt, Artificial Sequence
  Description of Artificial Sequence: Synthetic oligonucleotide
auuuaaaguaaggugucgg

SEQ ID NO: 119452 - RNA, 19 nt, Artificial Sequence
  Description of Artificial Sequence: Synthetic oligonucleotide
guaaugaucagcauauggc

SEQ ID NO: 119453 - RNA, 19 nt, Artificial Sequence
  Description of Artificial Sequence: Synthetic oligonucleotide
uucagauacagacucugca

SEQ ID NO: 119454 - RNA, 19 nt, Artificial Sequence
  Description of Artificial Sequence: Synthetic oligonucleotide
ugccauaugaacuccaccu

SEQ ID NO: 119455 - RNA, 19 nt, Artificial Sequence
  Description of Artificial Sequence: Synthetic oligonucleotide
uggcauuuauacacgagcc

SEQ ID NO: 119456 - RNA, 19 nt, Artificial Sequence
  Description of Artificial Sequence: Synthetic oligonucleotide
aaacagcuaguguaaagga

SEQ ID NO: 119457 - RNA, 19 nt, Artificial Sequence
  Description of Artificial Sequence: Synthetic oligonucleotide
aacauuauuggaccucaca

SEQ ID NO: 119458 - RNA, 19 nt, Artificial Sequence
  Description of Artificial Sequence: Synthetic oligonucleotide
  modified_base (12)..(12): a, c, u, g, unknown or other
uaucuucagacnuaacgug

SEQ ID NO: 119459 - RNA, 19 nt, Artificial Sequence
  Description of Artificial Sequence: Synthetic oligonucleotide
uuucccguaaagaugucug

SEQ ID NO: 119460 - RNA, 19 nt, Artificial Sequence
  Description of Artificial Sequence: Synthetic oligonucleotide
aguuacaguaagugauccc

SEQ ID NO: 119461 - RNA, 19 nt, Artificial Sequence
  Description of Artificial Sequence: Synthetic oligonucleotide
uaaaguaaggugucggccu

SEQ ID NO: 119462 - RNA, 19 nt, Artificial Sequence
  Description of Artificial Sequence: Synthetic oligonucleotide
uauacacgagccuauggug

SEQ ID NO: 119463 - RNA, 19 nt, Artificial Sequence
  Description of Artificial Sequence: Synthetic oligonucleotide
uuaaaguaaggugucggcc

SEQ ID NO: 119464 - RNA, 19 nt, Artificial Sequence
  Description of Artificial Sequence: Synthetic oligonucleotide
uccuaugacaggaaugcca

SEQ ID NO: 119465 - RNA, 19 nt, Artificial Sequence
  Description of Artificial Sequence: Synthetic oligonucleotide
uuuaaauuagcugggucac

SEQ ID NO: 119466 - RNA, 19 nt, Artificial Sequence
  Description of Artificial Sequence: Synthetic oligonucleotide
ugggcaaauguacaauuug

SEQ ID NO: 119467 - RNA, 19 nt, Artificial Sequence
  Description of Artificial Sequence: Synthetic oligonucleotide
aaaucgaggaacacaagga

SEQ ID NO: 119468 - RNA, 19 nt, Artificial Sequence
  Description of Artificial Sequence: Synthetic oligonucleotide
uuggagguaaagaauugcu

SEQ ID NO: 119469 - RNA, 19 nt, Artificial Sequence
  Description of Artificial Sequence: Synthetic oligonucleotide
uauaauuguuugcccagcu

SEQ ID NO: 119470 - RNA, 19 nt, Artificial Sequence
  Description of Artificial Sequence: Synthetic oligonucleotide
uaugaccagauaaaucagu

SEQ ID NO: 119471 - RNA, 19 nt, Artificial Sequence
  Description of Artificial Sequence: Synthetic oligonucleotide
uuauacuugcuguuuggcu

SEQ ID NO: 119472 - RNA, 19 nt, Artificial Sequence
  Description of Artificial Sequence: Synthetic oligonucleotide
ugucccguucaauauagug

SEQ ID NO: 119473 - RNA, 19 nt, Artificial Sequence
  Description of Artificial Sequence: Synthetic oligonucleotide
ucaaaggguaucugagucc

SEQ ID NO: 119474 - RNA, 19 nt, Artificial Sequence
  Description of Artificial Sequence: Synthetic oligonucleotide
auauccaucuaaugaguug

SEQ ID NO: 119475 - RNA, 19 nt, Artificial Sequence
  Description of Artificial Sequence: Synthetic oligonucleotide
aauauagugugcugaugau

SEQ ID NO: 119476 - RNA, 19 nt, Artificial Sequence
  Description of Artificial Sequence: Synthetic oligonucleotide
cccauuuugagauaauggg

SEQ ID NO: 119477 - RNA, 19 nt, Artificial Sequence
  Description of Artificial Sequence: Synthetic oligonucleotide
acgacugacagauguggcg

SEQ ID NO: 119478 - RNA, 19 nt, Artificial Sequence
  Description of Artificial Sequence: Synthetic oligonucleotide
gaucuauauuugcaagaag

SEQ ID NO: 119479 - RNA, 19 nt, Artificial Sequence
  Description of Artificial Sequence: Synthetic oligonucleotide
aacucuaguuagaaauggg

SEQ ID NO: 119480 - RNA, 19 nt, Artificial Sequence
  Description of Artificial Sequence: Synthetic oligonucleotide
ucaauaucucuaucgggcu

SEQ ID NO: 119481 - RNA, 19 nt, Artificial Sequence
  Description of Artificial Sequence: Synthetic oligonucleotide
ugugguuugacuccuugua

SEQ ID NO: 119482 - RNA, 19 nt, Artificial Sequence
  Description of Artificial Sequence: Synthetic oligonucleotide
ggaacguucuuacaguugc

SEQ ID NO: 119483 - RNA, 19 nt, Artificial Sequence
  Description of Artificial Sequence: Synthetic oligonucleotide
uuaugguggaccgauacuc

SEQ ID NO: 119484 - RNA, 19 nt, Artificial Sequence
  Description of Artificial Sequence: Synthetic oligonucleotide
aacgacugacagauguggc

SEQ ID NO: 119485 - RNA, 19 nt, Artificial Sequence
  Description of Artificial Sequence: Synthetic oligonucleotide
agacguuacuggcagaacu

SEQ ID NO: 119486 - RNA, 19 nt, Artificial Sequence
  Description of Artificial Sequence: Synthetic oligonucleotide
uucccgacuuucuucacag

SEQ ID NO: 119487 - RNA, 19 nt, Artificial Sequence
  Description of Artificial Sequence: Synthetic oligonucleotide
uuuaugguggaccgauacu

SEQ ID NO: 119488 - RNA, 19 nt, Artificial Sequence
  Description of Artificial Sequence: Synthetic oligonucleotide
aaaggucuccaguacugga

SEQ ID NO: 119489 - RNA, 19 nt, Artificial Sequence
  Description of Artificial Sequence: Synthetic oligonucleotide
cauacugcugcggaggagg

SEQ ID NO: 119490 - RNA, 19 nt, Artificial Sequence
  Description of Artificial Sequence: Synthetic oligonucleotide
auauacuggaacucuaguu

SEQ ID NO: 119491 - RNA, 19 nt, Artificial Sequence
  Description of Artificial Sequence: Synthetic oligonucleotide
aggaucuauauuugcaaga

SEQ ID NO: 119492 - RNA, 19 nt, Artificial Sequence
  Description of Artificial Sequence: Synthetic oligonucleotide
guuacaguaagugauccca

SEQ ID NO: 119493 - RNA, 19 nt, Artificial Sequence
  Description of Artificial Sequence: Synthetic oligonucleotide
gguaguacccugcuugugg

SEQ ID NO: 119494 - RNA, 19 nt, Artificial Sequence
  Description of Artificial Sequence: Synthetic oligonucleotide
uuagugccaacuuucccga

SEQ ID NO: 119495 - RNA, 19 nt, Artificial Sequence
  Description of Artificial Sequence: Synthetic oligonucleotide
uccuuaaucgguacuuuuc

SEQ ID NO: 119496 - RNA, 19 nt, Artificial Sequence
  Description of Artificial Sequence: Synthetic oligonucleotide
aauuguuugcccagcuaag

SEQ ID NO: 119497 - RNA, 19 nt, Artificial Sequence
  Description of Artificial Sequence: Synthetic oligonucleotide
ugguuugacuccuuguacu

SEQ ID NO: 119498 - RNA, 19 nt, Artificial Sequence
  Description of Artificial Sequence: Synthetic oligonucleotide
  modified_base (7)..(7): a, c, u, g, unknown or other
ucagacnuaacgugaguuu

SEQ ID NO: 119499 - RNA, 19 nt, Artificial Sequence
  Description of Artificial Sequence: Synthetic oligonucleotide
agugcuucguggaauuagc

SEQ ID NO: 119500 - RNA, 19 nt, Artificial Sequence
  Description of Artificial Sequence: Synthetic oligonucleotide
guacuuggaacaauuuucc

SEQ ID NO: 119501 - RNA, 19 nt, Artificial Sequence
  Description of Artificial Sequence: Synthetic oligonucleotide
ucacaaaucgaggaacaca

SEQ ID NO: 119502 - RNA, 19 nt, Artificial Sequence
  Description of Artificial Sequence: Synthetic oligonucleotide
accucacaaaucgaggaac

SEQ ID NO: 119503 - RNA, 19 nt, Artificial Sequence
  Description of Artificial Sequence: Synthetic oligonucleotide
uaauggguccaucacuaaa

SEQ ID NO: 119504 - RNA, 19 nt, Artificial Sequence
  Description of Artificial Sequence: Synthetic oligonucleotide
uguuguaugguaaccuguu

SEQ ID NO: 119505 - RNA, 19 nt, Artificial Sequence
  Description of Artificial Sequence: Synthetic oligonucleotide
uggaccgauacucccaagu

SEQ ID NO: 119506 - RNA, 19 nt, Artificial Sequence
  Description of Artificial Sequence: Synthetic oligonucleotide
gaaucugucccguucaaua

SEQ ID NO: 119507 - RNA, 19 nt, Artificial Sequence
  Description of Artificial Sequence: Synthetic oligonucleotide
acaugcuaguuuuauacuu

SEQ ID NO: 119508 - RNA, 19 nt, Artificial Sequence
  Description of Artificial Sequence: Synthetic oligonucleotide
aaaagaccacauguguugu

SEQ ID NO: 119509 - RNA, 19 nt, Artificial Sequence
  Description of Artificial Sequence: Synthetic oligonucleotide
ucuaucgggcuucguaucu

SEQ ID NO: 119510 - RNA, 19 nt, Artificial Sequence
  Description of Artificial Sequence: Synthetic oligonucleotide
ugucguaagucucggcaca

SEQ ID NO: 119511 - RNA, 19 nt, Artificial Sequence
  Description of Artificial Sequence: Synthetic oligonucleotide
augaguuacucuuggccug

SEQ ID NO: 119512 - RNA, 19 nt, Artificial Sequence
  Description of Artificial Sequence: Synthetic oligonucleotide
cuucguggaauuagcuggg

SEQ ID NO: 119513 - RNA, 19 nt, Artificial Sequence
  Description of Artificial Sequence: Synthetic oligonucleotide
acuagcaaacuuaaucucu

SEQ ID NO: 119514 - RNA, 19 nt, Artificial Sequence
  Description of Artificial Sequence: Synthetic oligonucleotide
caucuaaugaguuguaucu

SEQ ID NO: 119515 - RNA, 19 nt, Artificial Sequence
  Description of Artificial Sequence: Synthetic oligonucleotide
augugcaaaugaccuuggc

SEQ ID NO: 119516 - RNA, 19 nt, Artificial Sequence
  Description of Artificial Sequence: Synthetic oligonucleotide
gcacaugcuaguuuuauac

SEQ ID NO: 119517 - RNA, 19 nt, Artificial Sequence
  Description of Artificial Sequence: Synthetic oligonucleotide
ucucuaucgggcuucguau

SEQ ID NO: 119518 - RNA, 19 nt, Artificial Sequence
  Description of Artificial Sequence: Synthetic oligonucleotide
cagagcauuagcuucccuc

SEQ ID NO: 119519 - RNA, 19 nt, Artificial Sequence
  Description of Artificial Sequence: Synthetic oligonucleotide
aguugguaccguuggaggu

SEQ ID NO: 119520 - RNA, 19 nt, Artificial Sequence
  Description of Artificial Sequence: Synthetic oligonucleotide
auauagugugcugaugaug

SEQ ID NO: 119521 - RNA, 19 nt, Artificial Sequence
  Description of Artificial Sequence: Synthetic oligonucleotide
ucgaggggaaaauguacug

SEQ ID NO: 119522 - RNA, 19 nt, Artificial Sequence
  Description of Artificial Sequence: Synthetic oligonucleotide
ucgggcuucguaucuacug

SEQ ID NO: 119523 - RNA, 19 nt, Artificial Sequence
  Description of Artificial Sequence: Synthetic oligonucleotide
uuccaaaauuagagggccc

SEQ ID NO: 119524 - RNA, 19 nt, Artificial Sequence
  Description of Artificial Sequence: Synthetic oligonucleotide
gauaauggguccaucacua

SEQ ID NO: 119525 - RNA, 19 nt, Artificial Sequence
  Description of Artificial Sequence: Synthetic oligonucleotide
ugcuguuuacaccaacuuu

SEQ ID NO: 119526 - RNA, 19 nt, Artificial Sequence
  Description of Artificial Sequence: Synthetic oligonucleotide
uggccauuuuccauugcug

SEQ ID NO: 119527 - RNA, 19 nt, Artificial Sequence
  Description of Artificial Sequence: Synthetic oligonucleotide
agaauugcuucuaauaaua

SEQ ID NO: 119528 - RNA, 19 nt, Artificial Sequence
  Description of Artificial Sequence: Synthetic oligonucleotide
aauagaggagaagguggug

SEQ ID NO: 119529 - RNA, 19 nt, Artificial Sequence
  Description of Artificial Sequence: Synthetic oligonucleotide
uuggccauuagugccaacu

SEQ ID NO: 119530 - RNA, 19 nt, Artificial Sequence
  Description of Artificial Sequence: Synthetic oligonucleotide
ggaauaugugcaaaugacc

SEQ ID NO: 119531 - RNA, 19 nt, Artificial Sequence
  Description of Artificial Sequence: Synthetic oligonucleotide
uugucguaagucucggcac

SEQ ID NO: 119532 - RNA, 19 nt, Artificial Sequence
  Description of Artificial Sequence: Synthetic oligonucleotide
uaucuacugugucuucugu

SEQ ID NO: 119533 - RNA, 19 nt, Artificial Sequence
  Description of Artificial Sequence: Synthetic oligonucleotide
ugguccauacugcugcgga

SEQ ID NO: 119534 - RNA, 19 nt, Artificial Sequence
  Description of Artificial Sequence: Synthetic oligonucleotide
aaccgggauacuccuugag

SEQ ID NO: 119535 - RNA, 19 nt, Artificial Sequence
  Description of Artificial Sequence: Synthetic oligonucleotide
cuaaagcaagacguuacug

SEQ ID NO: 119536 - RNA, 19 nt, Artificial Sequence
  Description of Artificial Sequence: Synthetic oligonucleotide
uaucgagugcugaaagcuc

SEQ ID NO: 119537 - RNA, 19 nt, Artificial Sequence
  Description of Artificial Sequence: Synthetic oligonucleotide
ugcacucuucucuuaacau

SEQ ID NO: 119538 - RNA, 19 nt, Artificial Sequence
  Description of Artificial Sequence: Synthetic oligonucleotide
agggagaguaaugggaaag

SEQ ID NO: 119539 - RNA, 19 nt, Artificial Sequence
  Description of Artificial Sequence: Synthetic oligonucleotide
ccuaauucuugacagguug

SEQ ID NO: 119540 - RNA, 19 nt, Artificial Sequence
  Description of Artificial Sequence: Synthetic oligonucleotide
guaccguuggagguggugg

SEQ ID NO: 119541 - RNA, 19 nt, Artificial Sequence
  Description of Artificial Sequence: Synthetic oligonucleotide
guaucuacugugucuucug

SEQ ID NO: 119542 - RNA, 19 nt, Artificial Sequence
  Description of Artificial Sequence: Synthetic oligonucleotide
  modified_base (8)..(8): a, c, u, g, unknown or other
uucagacnuaacgugaguu

SEQ ID NO: 119543 - RNA, 19 nt, Artificial Sequence
  Description of Artificial Sequence: Synthetic oligonucleotide
ugcccagcuaagagaaugc

SEQ ID NO: 119544 - RNA, 19 nt, Artificial Sequence
  Description of Artificial Sequence: Synthetic oligonucleotide
ggaagucuacacugaauag

SEQ ID NO: 119545 - RNA, 19 nt, Artificial Sequence
  Description of Artificial Sequence: Synthetic oligonucleotide
guacaauuuguuccucgug

SEQ ID NO: 119546 - RNA, 19 nt, Artificial Sequence
  Description of Artificial Sequence: Synthetic oligonucleotide
  modified_base (4)..(4): a, c, u, g, unknown or other
gacnuaacgugaguuuuca

SEQ ID NO: 119547 - RNA, 19 nt, Artificial Sequence
  Description of Artificial Sequence: Synthetic oligonucleotide
uuacaguaagugaucccau

SEQ ID NO: 119548 - RNA, 19 nt, Artificial Sequence
  Description of Artificial Sequence: Synthetic oligonucleotide
ugcuaguuuuauacuugcu

SEQ ID NO: 119549 - RNA, 19 nt, Artificial Sequence
  Description of Artificial Sequence: Synthetic oligonucleotide
  modified_base (5)..(5): a, c, u, g, unknown or other
agacnuaacgugaguuuuc

SEQ ID NO: 119550 - RNA, 19 nt, Artificial Sequence
  Description of Artificial Sequence: Synthetic oligonucleotide
  modified_base (3)..(3): a, c, u, g, unknown or other
acnuaacgugaguuuucag

SEQ ID NO: 119551 - RNA, 19 nt, Artificial Sequence
  Description of Artificial Sequence: Synthetic oligonucleotide
caccaguugguaccguugg

SEQ ID NO: 119552 - RNA, 19 nt, Artificial Sequence
  Description of Artificial Sequence: Synthetic oligonucleotide
guaugguaaccuguucggg

SEQ ID NO: 119553 - RNA, 19 nt, Artificial Sequence
  Description of Artificial Sequence: Synthetic oligonucleotide
uucguaucuacugugucuu

SEQ ID NO: 119554 - RNA, 19 nt, Artificial Sequence
  Description of Artificial Sequence: Synthetic oligonucleotide
ugauaucaaguuguagguc

SEQ ID NO: 119555 - RNA, 19 nt, Artificial Sequence
  Description of Artificial Sequence: Synthetic oligonucleotide
cauguguuguaucacaacu

SEQ ID NO: 119556 - RNA, 19 nt, Artificial Sequence
  Description of Artificial Sequence: Synthetic oligonucleotide
acguucuuacaguugcacu

SEQ ID NO: 119557 - RNA, 19 nt, Artificial Sequence
  Description of Artificial Sequence: Synthetic oligonucleotide
uacuaagugcagccagugu

SEQ ID NO: 119558 - RNA, 19 nt, Artificial Sequence
  Description of Artificial Sequence: Synthetic oligonucleotide
cuaaagggaauaauugggu

SEQ ID NO: 119559 - RNA, 19 nt, Artificial Sequence
  Description of Artificial Sequence: Synthetic oligonucleotide
  modified_base (11)..(11): a, c, u, g, unknown or other
aucuucagacnuaacguga

SEQ ID NO: 119560 - RNA, 19 nt, Artificial Sequence
  Description of Artificial Sequence: Synthetic oligonucleotide
guauaauuguuugcccagc

SEQ ID NO: 119561 - RNA, 19 nt, Artificial Sequence
  Description of Artificial Sequence: Synthetic oligonucleotide
aucucuaucgggcuucgua

SEQ ID NO: 119562 - RNA, 19 nt, Artificial Sequence
  Description of Artificial Sequence: Synthetic oligonucleotide
agccuauggugccacaaga

SEQ ID NO: 119563 - RNA, 19 nt, Artificial Sequence
  Description of Artificial Sequence: Synthetic oligonucleotide
ucaguaucgagugcugaaa

SEQ ID NO: 119564 - RNA, 19 nt, Artificial Sequence
  Description of Artificial Sequence: Synthetic oligonucleotide
gugguuugacuccuuguac

SEQ ID NO: 119565 - RNA, 19 nt, Artificial Sequence
  Description of Artificial Sequence: Synthetic oligonucleotide
auaauuguuugcccagcua

SEQ ID NO: 119566 - RNA, 19 nt, Artificial Sequence
  Description of Artificial Sequence: Synthetic oligonucleotide
uauucagaagagggaacgu

SEQ ID NO: 119567 - RNA, 19 nt, Artificial Sequence
  Description of Artificial Sequence: Synthetic oligonucleotide
gagucacaccaguugguac

SEQ ID NO: 119568 - RNA, 19 nt, Artificial Sequence
  Description of Artificial Sequence: Synthetic oligonucleotide
ugaguuacucuuggccugc

SEQ ID NO: 119569 - RNA, 19 nt, Artificial Sequence
  Description of Artificial Sequence: Synthetic oligonucleotide
ggaauuagcugggaaacac

SEQ ID NO: 119570 - RNA, 19 nt, Artificial Sequence
  Description of Artificial Sequence: Synthetic oligonucleotide
uguucgggaggaucgggaa

SEQ ID NO: 119571 - RNA, 19 nt, Artificial Sequence
  Description of Artificial Sequence: Synthetic oligonucleotide
auaaucugauacacugaug

SEQ ID NO: 119572 - RNA, 19 nt, Artificial Sequence
  Description of Artificial Sequence: Synthetic oligonucleotide
ucguggaauuagcugggaa

SEQ ID NO: 119573 - RNA, 19 nt, Artificial Sequence
  Description of Artificial Sequence: Synthetic oligonucleotide
uuccuuaaucgguacuuuu

SEQ ID NO: 119574 - RNA, 19 nt, Artificial Sequence
  Description of Artificial Sequence: Synthetic oligonucleotide
uaucgggcuucguaucuac

SEQ ID NO: 119575 - RNA, 19 nt, Artificial Sequence
  Description of Artificial Sequence: Synthetic oligonucleotide
ccaucuaaugaguuguauc

SEQ ID NO: 119576 - RNA, 19 nt, Artificial Sequence
  Description of Artificial Sequence: Synthetic oligonucleotide
guggauguaacagugcugu

SEQ ID NO: 119577 - RNA, 19 nt, Artificial Sequence
  Description of Artificial Sequence: Synthetic oligonucleotide
gaucgggaaauugcacccc

SEQ ID NO: 119578 - RNA, 19 nt, Artificial Sequence
  Description of Artificial Sequence: Synthetic oligonucleotide
gccucauugccauaugaac

SEQ ID NO: 119579 - RNA, 19 nt, Artificial Sequence
  Description of Artificial Sequence: Synthetic oligonucleotide
guaucgagugcugaaagcu

SEQ ID NO: 119580 - RNA, 19 nt, Artificial Sequence
  Description of Artificial Sequence: Synthetic oligonucleotide
ccguggguuauaaagugag

SEQ ID NO: 119581 - RNA, 19 nt, Artificial Sequence
  Description of Artificial Sequence: Synthetic oligonucleotide
uccaucuaaugaguuguau

SEQ ID NO: 119582 - RNA, 19 nt, Artificial Sequence
  Description of Artificial Sequence: Synthetic oligonucleotide
aucuguucggaagucuaca

SEQ ID NO: 119583 - RNA, 19 nt, Artificial Sequence
  Description of Artificial Sequence: Synthetic oligonucleotide
ggauuaggaucuauauuug

SEQ ID NO: 119584 - RNA, 19 nt, Artificial Sequence
  Description of Artificial Sequence: Synthetic oligonucleotide
uuccuaugacaggaaugcc

SEQ ID NO: 119585 - RNA, 19 nt, Artificial Sequence
  Description of Artificial Sequence: Synthetic oligonucleotide
ggaaugcuuucuaugacca

SEQ ID NO: 119586 - RNA, 19 nt, Artificial Sequence
  Description of Artificial Sequence: Synthetic oligonucleotide
auaucaaguuguaggucca

SEQ ID NO: 119587 - RNA, 19 nt, Artificial Sequence
  Description of Artificial Sequence: Synthetic oligonucleotide
ggugauuguguagccacag

SEQ ID NO: 119588 - RNA, 19 nt, Artificial Sequence
  Description of Artificial Sequence: Synthetic oligonucleotide
agucucggcacaugcuagu

SEQ ID NO: 119589 - RNA, 19 nt, Artificial Sequence
  Description of Artificial Sequence: Synthetic oligonucleotide
cucuaucgggcuucguauc

SEQ ID NO: 119590 - RNA, 19 nt, Artificial Sequence
  Description of Artificial Sequence: Synthetic oligonucleotide
gggaggaucgggaaauugc

SEQ ID NO: 119591 - RNA, 19 nt, Artificial Sequence
  Description of Artificial Sequence: Synthetic oligonucleotide
agaauucauucugucucga

SEQ ID NO: 119592 - RNA, 19 nt, Artificial Sequence
  Description of Artificial Sequence: Synthetic oligonucleotide
ucccguaaagaugucugau

SEQ ID NO: 119593 - RNA, 19 nt, Artificial Sequence
  Description of Artificial Sequence: Synthetic oligonucleotide
ucugucucgaggggaaaau

SEQ ID NO: 119594 - RNA, 19 nt, Artificial Sequence
  Description of Artificial Sequence: Synthetic oligonucleotide
uggcuaaagcaagacguua

SEQ ID NO: 119595 - RNA, 19 nt, Artificial Sequence
  Description of Artificial Sequence: Synthetic oligonucleotide
ggaacauuauuggaccuca

SEQ ID NO: 119596 - RNA, 19 nt, Artificial Sequence
  Description of Artificial Sequence: Synthetic oligonucleotide
ggaucuauauuugcaagaa

SEQ ID NO: 119597 - RNA, 19 nt, Artificial Sequence
  Description of Artificial Sequence: Synthetic oligonucleotide
gguaaagaauugcuucuaa

SEQ ID NO: 119598 - RNA, 19 nt, Artificial Sequence
  Description of Artificial Sequence: Synthetic oligonucleotide
acgugaguuuucaggaaug

SEQ ID NO: 119599 - RNA, 19 nt, Artificial Sequence
  Description of Artificial Sequence: Synthetic oligonucleotide
ggcuaaagcaagacguuac

SEQ ID NO: 119600 - RNA, 19 nt, Artificial Sequence
  Description of Artificial Sequence: Synthetic oligonucleotide
auggguaugugcaguacaa

SEQ ID NO: 119601 - RNA, 19 nt, Artificial Sequence
  Description of Artificial Sequence: Synthetic oligonucleotide
ucucggcacaugcuaguuu

SEQ ID NO: 119602 - RNA, 19 nt, Artificial Sequence
  Description of Artificial Sequence: Synthetic oligonucleotide
gcuggcuaaagcaagacgu

SEQ ID NO: 119603 - RNA, 19 nt, Artificial Sequence
  Description of Artificial Sequence: Synthetic oligonucleotide
cagagaaaucuguucggaa

SEQ ID NO: 119604 - RNA, 19 nt, Artificial Sequence
  Description of Artificial Sequence: Synthetic oligonucleotide
acaaggcucccuugguaaa

SEQ ID NO: 119605 - RNA, 19 nt, Artificial Sequence
  Description of Artificial Sequence: Synthetic oligonucleotide
acguuacuggcagaacugu

SEQ ID NO: 119606 - RNA, 19 nt, Artificial Sequence
  Description of Artificial Sequence: Synthetic oligonucleotide
auguguuguaucacaacua

SEQ ID NO: 119607 - RNA, 19 nt, Artificial Sequence
  Description of Artificial Sequence: Synthetic oligonucleotide
gcuaauagauacugggagu

SEQ ID NO: 119608 - RNA, 19 nt, Artificial Sequence
  Description of Artificial Sequence: Synthetic oligonucleotide
cucgaggggaaaauguacu

SEQ ID NO: 119609 - RNA, 19 nt, Artificial Sequence
  Description of Artificial Sequence: Synthetic oligonucleotide
acaaugaaucugucccguu

SEQ ID NO: 119610 - RNA, 19 nt, Artificial Sequence
  Description of Artificial Sequence: Synthetic oligonucleotide
ucucugcguuucaaauaaa

SEQ ID NO: 119611 - RNA, 19 nt, Artificial Sequence
  Description of Artificial Sequence: Synthetic oligonucleotide
gaauuagcugggaaacacu

SEQ ID NO: 119612 - RNA, 19 nt, Artificial Sequence
  Description of Artificial Sequence: Synthetic oligonucleotide
ccuuaaucgguacuuuuca

SEQ ID NO: 119613 - RNA, 19 nt, Artificial Sequence
  Description of Artificial Sequence: Synthetic oligonucleotide
gaacauuauuggaccucac

SEQ ID NO: 119614 - RNA, 19 nt, Artificial Sequence
  Description of Artificial Sequence: Synthetic oligonucleotide
gaagagacaggugcuuucu

SEQ ID NO: 119615 - RNA, 19 nt, Artificial Sequence
  Description of Artificial Sequence: Synthetic oligonucleotide
gcucaaaaggucuccagua

SEQ ID NO: 119616 - RNA, 19 nt, Artificial Sequence
  Description of Artificial Sequence: Synthetic oligonucleotide
gguccauacugcugcggag

SEQ ID NO: 119617 - RNA, 19 nt, Artificial Sequence
  Description of Artificial Sequence: Synthetic oligonucleotide
acaagccacugaguaauau

SEQ ID NO: 119618 - RNA, 19 nt, Artificial Sequence
  Description of Artificial Sequence: Synthetic oligonucleotide
agggaauaauugggucuuc

SEQ ID NO: 119619 - RNA, 19 nt, Artificial Sequence
  Description of Artificial Sequence: Synthetic oligonucleotide
gagguagcugcugcauuac

SEQ ID NO: 119620 - RNA, 19 nt, Artificial Sequence
  Description of Artificial Sequence: Synthetic oligonucleotide
cugucucgaggggaaaaug

SEQ ID NO: 119621 - RNA, 19 nt, Artificial Sequence
  Description of Artificial Sequence: Synthetic oligonucleotide
gcauuuauacacgagccua

SEQ ID NO: 119622 - RNA, 19 nt, Artificial Sequence
  Description of Artificial Sequence: Synthetic oligonucleotide
ucgggaaauugcaccccau

SEQ ID NO: 119623 - RNA, 19 nt, Artificial Sequence
  Description of Artificial Sequence: Synthetic oligonucleotide
cauuuauacacgagccuau

SEQ ID NO: 119624 - RNA, 19 nt, Artificial Sequence
  Description of Artificial Sequence: Synthetic oligonucleotide
uaacuccccuuagaguaaa

SEQ ID NO: 119625 - RNA, 19 nt, Artificial Sequence
  Description of Artificial Sequence: Synthetic oligonucleotide
guguuguaucacaacuaca

SEQ ID NO: 119626 - RNA, 19 nt, Artificial Sequence
  Description of Artificial Sequence: Synthetic oligonucleotide
ggaggaucgggaaauugca

SEQ ID NO: 119627 - RNA, 19 nt, Artificial Sequence
  Description of Artificial Sequence: Synthetic oligonucleotide
ucguaagucucggcacaug

SEQ ID NO: 119628 - RNA, 19 nt, Artificial Sequence
  Description of Artificial Sequence: Synthetic oligonucleotide
auuggaccucacaaaucga

SEQ ID NO: 119629 - RNA, 19 nt, Artificial Sequence
  Description of Artificial Sequence: Synthetic oligonucleotide
gccaacgacugacagaugu

SEQ ID NO: 119630 - RNA, 19 nt, Artificial Sequence
  Description of Artificial Sequence: Synthetic oligonucleotide
cuguucgggaggaucggga

SEQ ID NO: 119631 - RNA, 19 nt, Artificial Sequence
  Description of Artificial Sequence: Synthetic oligonucleotide
ucguaucuacugugucuuc

SEQ ID NO: 119632 - RNA, 19 nt, Artificial Sequence
  Description of Artificial Sequence: Synthetic oligonucleotide
gggauacaaagaaacagcu

SEQ ID NO: 119633 - RNA, 19 nt, Artificial Sequence
  Description of Artificial Sequence: Synthetic oligonucleotide
accuguucgggaggaucgg

SEQ ID NO: 119634 - RNA, 19 nt, Artificial Sequence
  Description of Artificial Sequence: Synthetic oligonucleotide
auaacuccccuuagaguaa

SEQ ID NO: 119635 - RNA, 19 nt, Artificial Sequence
  Description of Artificial Sequence: Synthetic oligonucleotide
gcacagucguccuuggcuc

SEQ ID NO: 119636 - RNA, 19 nt, Artificial Sequence
  Description of Artificial Sequence: Synthetic oligonucleotide
cuguaaugaucagcauaug

SEQ ID NO: 119637 - RNA, 19 nt, Artificial Sequence
  Description of Artificial Sequence: Synthetic oligonucleotide
guucggaagucuacacuga

SEQ ID NO: 119638 - RNA, 19 nt, Artificial Sequence
  Description of Artificial Sequence: Synthetic oligonucleotide
ccaacgacugacagaugug

SEQ ID NO: 119639 - RNA, 19 nt, Artificial Sequence
  Description of Artificial Sequence: Synthetic oligonucleotide
ggguaugugcaguacaaau

SEQ ID NO: 119640 - RNA, 19 nt, Artificial Sequence
  Description of Artificial Sequence: Synthetic oligonucleotide
uccaugccguggguuauaa

SEQ ID NO: 119641 - RNA, 19 nt, Artificial Sequence
  Description of Artificial Sequence: Synthetic oligonucleotide
ucggcacaugcuaguuuua

SEQ ID NO: 119642 - RNA, 19 nt, Artificial Sequence
  Description of Artificial Sequence: Synthetic oligonucleotide
gguaugguacugugcccac

SEQ ID NO: 119643 - RNA, 19 nt, Artificial Sequence
  Description of Artificial Sequence: Synthetic oligonucleotide
uggauguaacagugcuguu

SEQ ID NO: 119644 - RNA, 19 nt, Artificial Sequence
  Description of Artificial Sequence: Synthetic oligonucleotide
cugcggaggaggcugguaa

SEQ ID NO: 119645 - RNA, 19 nt, Artificial Sequence
  Description of Artificial Sequence: Synthetic oligonucleotide
gguuauaaagugaggccua

SEQ ID NO: 119646 - RNA, 19 nt, Artificial Sequence
  Description of Artificial Sequence: Synthetic oligonucleotide
cucggcacaugcuaguuuu

SEQ ID NO: 119647 - RNA, 19 nt, Artificial Sequence
  Description of Artificial Sequence: Synthetic oligonucleotide
ggaggcacggagcucagcu

SEQ ID NO: 119648 - RNA, 19 nt, Artificial Sequence
  Description of Artificial Sequence: Synthetic oligonucleotide
gcuaaagcaagacguuacu

SEQ ID NO: 119649 - RNA, 19 nt, Artificial Sequence
  Description of Artificial Sequence: Synthetic oligonucleotide
ccucacaaaucgaggaaca

SEQ ID NO: 119650 - RNA, 19 nt, Artificial Sequence
  Description of Artificial Sequence: Synthetic oligonucleotide
ccaaaauuagagggcccag

SEQ ID NO: 119651 - RNA, 19 nt, Artificial Sequence
  Description of Artificial Sequence: Synthetic oligonucleotide
ugccaacgacugacagaug

SEQ ID NO: 119652 - RNA, 19 nt, Artificial Sequence
  Description of Artificial Sequence: Synthetic oligonucleotide
guggaccgauacucccaag

SEQ ID NO: 119653 - RNA, 19 nt, Artificial Sequence
  Description of Artificial Sequence: Synthetic oligonucleotide
cuggaacauuauuggaccu

SEQ ID NO: 119654 - RNA, 19 nt, Artificial Sequence
  Description of Artificial Sequence: Synthetic oligonucleotide
cuguucggaagucuacacu

SEQ ID NO: 119655 - RNA, 19 nt, Artificial Sequence
  Description of Artificial Sequence: Synthetic oligonucleotide
ggauacaaagaaacagcua

SEQ ID NO: 119656 - RNA, 19 nt, Artificial Sequence
  Description of Artificial Sequence: Synthetic oligonucleotide
cguggaauuagcugggaaa

SEQ ID NO: 119657 - RNA, 19 nt, Artificial Sequence
  Description of Artificial Sequence: Synthetic oligonucleotide
ggagaagaauucauucugu

SEQ ID NO: 119658 - RNA, 19 nt, Artificial Sequence
  Description of Artificial Sequence: Synthetic oligonucleotide
  modified_base (9)..(9): a, c, u, g, unknown or other
cuucagacnuaacgugagu

SEQ ID NO: 119659 - RNA, 19 nt, Artificial Sequence
  Description of Artificial Sequence: Synthetic oligonucleotide
agcuaguguaaaggaguua

SEQ ID NO: 119660 - RNA, 19 nt, Artificial Sequence
  Description of Artificial Sequence: Synthetic oligonucleotide
gguaccguuggagguggug

SEQ ID NO: 119661 - RNA, 19 nt, Artificial Sequence
  Description of Artificial Sequence: Synthetic oligonucleotide
gggaaauugcaccccauuu

SEQ ID NO: 119662 - RNA, 19 nt, Artificial Sequence
  Description of Artificial Sequence: Synthetic oligonucleotide
gccuauggugccacaagac

SEQ ID NO: 119663 - RNA, 19 nt, Artificial Sequence
  Description of Artificial Sequence: Synthetic oligonucleotide
  modified_base (6)..(6): a, c, u, g, unknown or other
cagacnuaacgugaguuuu

SEQ ID NO: 119664 - RNA, 19 nt, Artificial Sequence
  Description of Artificial Sequence: Synthetic oligonucleotide
ggccuaauucuugacaggu

SEQ ID NO: 119665 - RNA, 19 nt, Artificial Sequence
  Description of Artificial Sequence: Synthetic oligonucleotide
ggcacaugcuaguuuuaua

SEQ ID NO: 119666 - RNA, 19 nt, Artificial Sequence
  Description of Artificial Sequence: Synthetic oligonucleotide
cugaaucaauggcauuuau

SEQ ID NO: 119667 - RNA, 19 nt, Artificial Sequence
  Description of Artificial Sequence: Synthetic oligonucleotide
cuggcuaaagcaagacguu

SEQ ID NO: 119668 - RNA, 19 nt, Artificial Sequence
  Description of Artificial Sequence: Synthetic oligonucleotide
caauaucucuaucgggcuu

SEQ ID NO: 119669 - RNA, 19 nt, Artificial Sequence
  Description of Artificial Sequence: Synthetic oligonucleotide
ggagucacaccaguuggua

SEQ ID NO: 119670 - RNA, 19 nt, Artificial Sequence
  Description of Artificial Sequence: Synthetic oligonucleotide
ccuguucgggaggaucggg

SEQ ID NO: 119671 - RNA, 19 nt, Artificial Sequence
  Description of Artificial Sequence: Synthetic oligonucleotide
cagcuaguguaaaggaguu

SEQ ID NO: 119672 - RNA, 19 nt, Artificial Sequence
  Description of Artificial Sequence: Synthetic oligonucleotide
uuccaugccguggguuaua

SEQ ID NO: 119673 - RNA, 19 nt, Artificial Sequence
  Description of Artificial Sequence: Synthetic oligonucleotide
ggcuggggugucucauggc

SEQ ID NO: 119674 - RNA, 19 nt, Artificial Sequence
  Description of Artificial Sequence: Synthetic oligonucleotide
cccguaaagaugucugaua

SEQ ID NO: 119675 - RNA, 19 nt, Artificial Sequence
  Description of Artificial Sequence: Synthetic oligonucleotide
cugaaagcucuaacucaau

SEQ ID NO: 119676 - RNA, 19 nt, Artificial Sequence
  Description of Artificial Sequence: Synthetic oligonucleotide
guuccuuaaucgguacuuu

SEQ ID NO: 119677 - RNA, 19 nt, Artificial Sequence
  Description of Artificial Sequence: Synthetic oligonucleotide
uacccugcuuguggguauu

SEQ ID NO: 119678 - RNA, 19 nt, Artificial Sequence
  Description of Artificial Sequence: Synthetic oligonucleotide
cuaucgggcuucguaucua

SEQ ID NO: 119679 - RNA, 19 nt, Artificial Sequence
  Description of Artificial Sequence: Synthetic oligonucleotide
guaugguacugugcccacu

SEQ ID NO: 119680 - RNA, 19 nt, Artificial Sequence
  Description of Artificial Sequence: Synthetic oligonucleotide
cacaccaguugguaccguu

SEQ ID NO: 119681 - RNA, 19 nt, Artificial Sequence
  Description of Artificial Sequence: Synthetic oligonucleotide
gucguaagucucggcacau

SEQ ID NO: 119682 - RNA, 19 nt, Artificial Sequence
  Description of Artificial Sequence: Synthetic oligonucleotide
gaguuacucuuggccugcu

SEQ ID NO: 119683 - RNA, 19 nt, Artificial Sequence
  Description of Artificial Sequence: Synthetic oligonucleotide
cugucccguucaauauagu

SEQ ID NO: 119684 - RNA, 19 nt, Artificial Sequence
  Description of Artificial Sequence: Synthetic oligonucleotide
ccagcggagguagcugcug

SEQ ID NO: 119685 - RNA, 19 nt, Artificial Sequence
  Description of Artificial Sequence: Synthetic oligonucleotide
cgggaggaucgggaaauug

SEQ ID NO: 119686 - RNA, 19 nt, Artificial Sequence
  Description of Artificial Sequence: Synthetic oligonucleotide
cuuccaugccguggguuau

SEQ ID NO: 119687 - RNA, 19 nt, Artificial Sequence
  Description of Artificial Sequence: Synthetic oligonucleotide
guaaccuguucgggaggau

SEQ ID NO: 119688 - RNA, 19 nt, Artificial Sequence
  Description of Artificial Sequence: Synthetic oligonucleotide
cguaucuacugugucuucu

SEQ ID NO: 119689 - RNA, 19 nt, Artificial Sequence
  Description of Artificial Sequence: Synthetic oligonucleotide
cgaggggaaaauguacugu

SEQ ID NO: 119690 - RNA, 19 nt, Artificial Sequence
  Description of Artificial Sequence: Synthetic oligonucleotide
cgggcuucguaucuacugu

SEQ ID NO: 119691 - RNA, 19 nt, Artificial Sequence
  Description of Artificial Sequence: Synthetic oligonucleotide
gccuaauucuugacagguu

SEQ ID NO: 119692 - RNA, 19 nt, Artificial Sequence
  Description of Artificial Sequence: Synthetic oligonucleotide
ccacucaaauguggggugu

SEQ ID NO: 119693 - RNA, 19 nt, Artificial Sequence
  Description of Artificial Sequence: Synthetic oligonucleotide
cgggaaauugcaccccauu

SEQ ID NO: 119694 - RNA, 19 nt, Artificial Sequence
  Description of Artificial Sequence: Synthetic oligonucleotide
cagucguccuuggcucauu

SEQ ID NO: 119695 - RNA, 19 nt, Artificial Sequence
  Description of Artificial Sequence: Synthetic oligonucleotide
cggcacaugcuaguuuuau

SEQ ID NO: 119696 - RNA, 19 nt, Artificial Sequence
  Description of Artificial Sequence: Synthetic oligonucleotide
aacauaugaaaauagcucg

SEQ ID NO: 119697 - RNA, 19 nt, Artificial Sequence
  Description of Artificial Sequence: Synthetic oligonucleotide
aaugagaguggccaggucc

SEQ ID NO: 119698 - RNA, 19 nt, Artificial Sequence
  Description of Artificial Sequence: Synthetic oligonucleotide
aauuucuagaauucugcgc

SEQ ID NO: 119699 - RNA, 19 nt, Artificial Sequence
  Description of Artificial Sequence: Synthetic oligonucleotide
auuaguaguaucuuuuggc

SEQ ID NO: 119700 - RNA, 19 nt, Artificial Sequence
  Description of Artificial Sequence: Synthetic oligonucleotide
ugauuuauggguaauaugu

SEQ ID NO: 119701 - RNA, 19 nt, Artificial Sequence
  Description of Artificial Sequence: Synthetic oligonucleotide
uuauuguuugucaagagga

SEQ ID NO: 119702 - RNA, 19 nt, Artificial Sequence
  Description of Artificial Sequence: Synthetic oligonucleotide
uuuauggguaauauguggg

SEQ ID NO: 119703 - RNA, 19 nt, Artificial Sequence
  Description of Artificial Sequence: Synthetic oligonucleotide
aauagcucgagauacaaaa

SEQ ID NO: 119704 - RNA, 19 nt, Artificial Sequence
  Description of Artificial Sequence: Synthetic oligonucleotide
aaauggguacgacauuucc

SEQ ID NO: 119705 - RNA, 19 nt, Artificial Sequence
  Description of Artificial Sequence: Synthetic oligonucleotide
agaucggccacucugaacg

SEQ ID NO: 119706 - RNA, 19 nt, Artificial Sequence
  Description of Artificial Sequence: Synthetic oligonucleotide
auuuauggguaauaugugg

SEQ ID NO: 119707 - RNA, 19 nt, Artificial Sequence
  Description of Artificial Sequence: Synthetic oligonucleotide
uuucuuacuugccauuucg

SEQ ID NO: 119708 - RNA, 19 nt, Artificial Sequence
  Description of Artificial Sequence: Synthetic oligonucleotide
uugucuauuggugacaagg

SEQ ID NO: 119709 - RNA, 19 nt, Artificial Sequence
  Description of Artificial Sequence: Synthetic oligonucleotide
ucguuuugcgaacucaugg

SEQ ID NO: 119710 - RNA, 19 nt, Artificial Sequence
  Description of Artificial Sequence: Synthetic oligonucleotide
aguguaaacucauagauuu

SEQ ID NO: 119711 - RNA, 19 nt, Artificial Sequence
  Description of Artificial Sequence: Synthetic oligonucleotide
uuaguaguaucuuuuggcc

SEQ ID NO: 119712 - RNA, 19 nt, Artificial Sequence
  Description of Artificial Sequence: Synthetic oligonucleotide
uaauuucuagaauucugcg

SEQ ID NO: 119713 - RNA, 19 nt, Artificial Sequence
  Description of Artificial Sequence: Synthetic oligonucleotide
aaacuaauucuaucuuaac

SEQ ID NO: 119714 - RNA, 19 nt, Artificial Sequence
  Description of Artificial Sequence: Synthetic oligonucleotide
ugauuagucaaauacuuuc

SEQ ID NO: 119715 - RNA, 19 nt, Artificial Sequence
  Description of Artificial Sequence: Synthetic oligonucleotide
ucuggaaccgcaacgaagc

SEQ ID NO: 119716 - RNA, 19 nt, Artificial Sequence
  Description of Artificial Sequence: Synthetic oligonucleotide
cuuggaucuaccaaaggag

SEQ ID NO: 119717 - RNA, 19 nt, Artificial Sequence
  Description of Artificial Sequence: Synthetic oligonucleotide
ugagucgaguccaagaaca

SEQ ID NO: 119718 - RNA, 19 nt, Artificial Sequence
  Description of Artificial Sequence: Synthetic oligonucleotide
uccgauaaaugaauguaag

SEQ ID NO: 119719 - RNA, 19 nt, Artificial Sequence
  Description of Artificial Sequence: Synthetic oligonucleotide
aggaguauucuucuguagg

SEQ ID NO: 119720 - RNA, 19 nt, Artificial Sequence
  Description of Artificial Sequence: Synthetic oligonucleotide
acuguuaauuucuagaauu

SEQ ID NO: 119721 - RNA, 19 nt, Artificial Sequence
  Description of Artificial Sequence: Synthetic oligonucleotide
acuaguaugaagaaacaag

SEQ ID NO: 119722 - RNA, 19 nt, Artificial Sequence
  Description of Artificial Sequence: Synthetic oligonucleotide
aauauguggguuuacggua

SEQ ID NO: 119723 - RNA, 19 nt, Artificial Sequence
  Description of Artificial Sequence: Synthetic oligonucleotide
uguaggaggucuuuucagg

SEQ ID NO: 119724 - RNA, 19 nt, Artificial Sequence
  Description of Artificial Sequence: Synthetic oligonucleotide
uaauauguggguuuacggu

SEQ ID NO: 119725 - RNA, 19 nt, Artificial Sequence
  Description of Artificial Sequence: Synthetic oligonucleotide
aaacucauagauuuucuuu

SEQ ID NO: 119726 - RNA, 19 nt, Artificial Sequence
  Description of Artificial Sequence: Synthetic oligonucleotide
uacgacauuuccauccccg

SEQ ID NO: 119727 - RNA, 19 nt, Artificial Sequence
  Description of Artificial Sequence: Synthetic oligonucleotide
aaggacucuaaccgcuagc

SEQ ID NO: 119728 - RNA, 19 nt, Artificial Sequence
  Description of Artificial Sequence: Synthetic oligonucleotide
uucgcucuaaagaacuucc

SEQ ID NO: 119729 - RNA, 19 nt, Artificial Sequence
  Description of Artificial Sequence: Synthetic oligonucleotide
ugauugguuuggcugagag

SEQ ID NO: 119730 - RNA, 19 nt, Artificial Sequence
  Description of Artificial Sequence: Synthetic oligonucleotide
uuugcgaacucauggagac

SEQ ID NO: 119731 - RNA, 19 nt, Artificial Sequence
  Description of Artificial Sequence: Synthetic oligonucleotide
aguuuucgagccuuccagc

SEQ ID NO: 119732 - RNA, 19 nt, Artificial Sequence
  Description of Artificial Sequence: Synthetic oligonucleotide
gacacuguuaauuucuaga

SEQ ID NO: 119733 - RNA, 19 nt, Artificial Sequence
  Description of Artificial Sequence: Synthetic oligonucleotide
aauguaagccccuccuaug

SEQ ID NO: 119734 - RNA, 19 nt, Artificial Sequence
  Description of Artificial Sequence: Synthetic oligonucleotide
gagaagaucggccacucug

SEQ ID NO: 119735 - RNA, 19 nt, Artificial Sequence
  Description of Artificial Sequence: Synthetic oligonucleotide
ugcgauaaagcuugguggc

SEQ ID NO: 119736 - RNA, 19 nt, Artificial Sequence
  Description of Artificial Sequence: Synthetic oligonucleotide
uuuacgguacacaagucua

SEQ ID NO: 119737 - RNA, 19 nt, Artificial Sequence
  Description of Artificial Sequence: Synthetic oligonucleotide
caugcuuacgccuagccuc

SEQ ID NO: 119738 - RNA, 19 nt, Artificial Sequence
  Description of Artificial Sequence: Synthetic oligonucleotide
cagacuuuuggucagcgag

SEQ ID NO: 119739 - RNA, 19 nt, Artificial Sequence
  Description of Artificial Sequence: Synthetic oligonucleotide
gaagccaucguuuugcgaa

SEQ ID NO: 119740 - RNA, 19 nt, Artificial Sequence
  Description of Artificial Sequence: Synthetic oligonucleotide
uuuugcgaacucauggaga

SEQ ID NO: 119741 - RNA, 19 nt, Artificial Sequence
  Description of Artificial Sequence: Synthetic oligonucleotide
uguagggaucucuagcuca

SEQ ID NO: 119742 - RNA, 19 nt, Artificial Sequence
  Description of Artificial Sequence: Synthetic oligonucleotide
gagaccauguaaugucugg

SEQ ID NO: 119743 - RNA, 19 nt, Artificial Sequence
  Description of Artificial Sequence: Synthetic oligonucleotide
uguaaacucauagauuuuc

SEQ ID NO: 119744 - RNA, 19 nt, Artificial Sequence
  Description of Artificial Sequence: Synthetic oligonucleotide
ugugagucgaguccaagaa

SEQ ID NO: 119745 - RNA, 19 nt, Artificial Sequence
  Description of Artificial Sequence: Synthetic oligonucleotide
aagauuaguggaaagccgu

SEQ ID NO: 119746 - RNA, 19 nt, Artificial Sequence
  Description of Artificial Sequence: Synthetic oligonucleotide
uucuuaguaaguucagcac

SEQ ID NO: 119747 - RNA, 19 nt, Artificial Sequence
  Description of Artificial Sequence: Synthetic oligonucleotide
uucguuugcagguuggcac

SEQ ID NO: 119748 - RNA, 19 nt, Artificial Sequence
  Description of Artificial Sequence: Synthetic oligonucleotide
agagucgugcgauaaagcu

SEQ ID NO: 119749 - RNA, 19 nt, Artificial Sequence
  Description of Artificial Sequence: Synthetic oligonucleotide
aggacucuaaccgcuagcc

SEQ ID NO: 119750 - RNA, 19 nt, Artificial Sequence
  Description of Artificial Sequence: Synthetic oligonucleotide
cacuaaaauacacacccug

SEQ ID NO: 119751 - RNA, 19 nt, Artificial Sequence
  Description of Artificial Sequence: Synthetic oligonucleotide
aaaggacucuaaccgcuag

SEQ ID NO: 119752 - RNA, 19 nt, Artificial Sequence
  Description of Artificial Sequence: Synthetic oligonucleotide
auauccgauaaaugaaugu

SEQ ID NO: 119753 - RNA, 19 nt, Artificial Sequence
  Description of Artificial Sequence: Synthetic oligonucleotide
uuggaucuaccaaaggagu

SEQ ID NO: 119754 - RNA, 19 nt, Artificial Sequence
  Description of Artificial Sequence: Synthetic oligonucleotide
ugucuauuggugacaagga

SEQ ID NO: 119755 - RNA, 19 nt, Artificial Sequence
  Description of Artificial Sequence: Synthetic oligonucleotide
uucuaucuuaacuuugauc

SEQ ID NO: 119756 - RNA, 19 nt, Artificial Sequence
  Description of Artificial Sequence: Synthetic oligonucleotide
uaguaugaagaaacaaguc

SEQ ID NO: 119757 - RNA, 19 nt, Artificial Sequence
  Description of Artificial Sequence: Synthetic oligonucleotide
guaguuuggauucuugguc

SEQ ID NO: 119758 - RNA, 19 nt, Artificial Sequence
  Description of Artificial Sequence: Synthetic oligonucleotide
ugagagucgugcgauaaag

SEQ ID NO: 119759 - RNA, 19 nt, Artificial Sequence
  Description of Artificial Sequence: Synthetic oligonucleotide
ggaguauucuucuguaggg

SEQ ID NO: 119760 - RNA, 19 nt, Artificial Sequence
  Description of Artificial Sequence: Synthetic oligonucleotide
cagggaauauuuucauugg

SEQ ID NO: 119761 - RNA, 19 nt, Artificial Sequence
  Description of Artificial Sequence: Synthetic oligonucleotide
uuauggguaauaugugggu

SEQ ID NO: 119762 - RNA, 19 nt, Artificial Sequence
  Description of Artificial Sequence: Synthetic oligonucleotide
gaaggcguagccugcacgc

SEQ ID NO: 119763 - RNA, 19 nt, Artificial Sequence
  Description of Artificial Sequence: Synthetic oligonucleotide
cauugugcuacccugcuuc

SEQ ID NO: 119764 - RNA, 19 nt, Artificial Sequence
  Description of Artificial Sequence: Synthetic oligonucleotide
ucgccaaaggacucuaacc

SEQ ID NO: 119765 - RNA, 19 nt, Artificial Sequence
  Description of Artificial Sequence: Synthetic oligonucleotide
ucgauggcuacugacuccg

SEQ ID NO: 119766 - RNA, 19 nt, Artificial Sequence
  Description of Artificial Sequence: Synthetic oligonucleotide
ugcuuacauguacuaauga

SEQ ID NO: 119767 - RNA, 19 nt, Artificial Sequence
  Description of Artificial Sequence: Synthetic oligonucleotide
gaaagccguuaacacagag

SEQ ID NO: 119768 - RNA, 19 nt, Artificial Sequence
  Description of Artificial Sequence: Synthetic oligonucleotide
cuaaccgcuagccuuuggc

SEQ ID NO: 119769 - RNA, 19 nt, Artificial Sequence
  Description of Artificial Sequence: Synthetic oligonucleotide
cauuggcugauacugguac

SEQ ID NO: 119770 - RNA, 19 nt, Artificial Sequence
  Description of Artificial Sequence: Synthetic oligonucleotide
accauguaaugucuggaug

SEQ ID NO: 119771 - RNA, 19 nt, Artificial Sequence
  Description of Artificial Sequence: Synthetic oligonucleotide
accgcaacgaagcauugug

SEQ ID NO: 119772 - RNA, 19 nt, Artificial Sequence
  Description of Artificial Sequence: Synthetic oligonucleotide
uuacaccuccacaagugga

SEQ ID NO: 119773 - RNA, 19 nt, Artificial Sequence
  Description of Artificial Sequence: Synthetic oligonucleotide
cauaugaaaauagcucgag

SEQ ID NO: 119774 - RNA, 19 nt, Artificial Sequence
  Description of Artificial Sequence: Synthetic oligonucleotide
ugaaaaugugugcagccuu

SEQ ID NO: 119775 - RNA, 19 nt, Artificial Sequence
  Description of Artificial Sequence: Synthetic oligonucleotide
uccuaugcuuacauguacu

SEQ ID NO: 119776 - RNA, 19 nt, Artificial Sequence
  Description of Artificial Sequence: Synthetic oligonucleotide
uggguuuacgguacacaag

SEQ ID NO: 119777 - RNA, 19 nt, Artificial Sequence
  Description of Artificial Sequence: Synthetic oligonucleotide
aaagagaagaucggccacu

SEQ ID NO: 119778 - RNA, 19 nt, Artificial Sequence
  Description of Artificial Sequence: Synthetic oligonucleotide
ucuuacuugccauuucgau

SEQ ID NO: 119779 - RNA, 19 nt, Artificial Sequence
  Description of Artificial Sequence: Synthetic oligonucleotide
aauggguacgacauuucca

SEQ ID NO: 119780 - RNA, 19 nt, Artificial Sequence
  Description of Artificial Sequence: Synthetic oligonucleotide
agucgugcgauaaagcuug

SEQ ID NO: 119781 - RNA, 19 nt, Artificial Sequence
  Description of Artificial Sequence: Synthetic oligonucleotide
uuccaauuggaauaauguu

SEQ ID NO: 119782 - RNA, 19 nt, Artificial Sequence
  Description of Artificial Sequence: Synthetic oligonucleotide
ugucauucggcuugaugca

SEQ ID NO: 119783 - RNA, 19 nt, Artificial Sequence
  Description of Artificial Sequence: Synthetic oligonucleotide
acauuagacauguaacaua

SEQ ID NO: 119784 - RNA, 19 nt, Artificial Sequence
  Description of Artificial Sequence: Synthetic oligonucleotide
cugauggcauaccagacuc

SEQ ID NO: 119785 - RNA, 19 nt, Artificial Sequence
  Description of Artificial Sequence: Synthetic oligonucleotide
uucgccaaaggacucuaac

SEQ ID NO: 119786 - RNA, 19 nt, Artificial Sequence
  Description of Artificial Sequence: Synthetic oligonucleotide
gaaaauccgggauguacuc

SEQ ID NO: 119787 - RNA, 19 nt, Artificial Sequence
  Description of Artificial Sequence: Synthetic oligonucleotide
guaucuuuuggccucgauc

SEQ ID NO: 119788 - RNA, 19 nt, Artificial Sequence
  Description of Artificial Sequence: Synthetic oligonucleotide
uguugcgcguaucuccugc

SEQ ID NO: 119789 - RNA, 19 nt, Artificial Sequence
  Description of Artificial Sequence: Synthetic oligonucleotide
auucgcucuaaagaacuuc

SEQ ID NO: 119790 - RNA, 19 nt, Artificial Sequence
  Description of Artificial Sequence: Synthetic oligonucleotide
auauguggguuuacgguac

SEQ ID NO: 119791 - RNA, 19 nt, Artificial Sequence
  Description of Artificial Sequence: Synthetic oligonucleotide
uaagggacggcaacuucca

SEQ ID NO: 119792 - RNA, 19 nt, Artificial Sequence
  Description of Artificial Sequence: Synthetic oligonucleotide
ggauguaagacugaacuac

SEQ ID NO: 119793 - RNA, 19 nt, Artificial Sequence
  Description of Artificial Sequence: Synthetic oligonucleotide
ucacuuaagggacggcaac

SEQ ID NO: 119794 - RNA, 19 nt, Artificial Sequence
  Description of Artificial Sequence: Synthetic oligonucleotide
aaagccguuaacacagaga

SEQ ID NO: 119795 - RNA, 19 nt, Artificial Sequence
  Description of Artificial Sequence: Synthetic oligonucleotide
acuaaaauacacacccugu

SEQ ID NO: 119796 - RNA, 19 nt, Artificial Sequence
  Description of Artificial Sequence: Synthetic oligonucleotide
uacggcgagccccaaauaa

SEQ ID NO: 119797 - RNA, 19 nt, Artificial Sequence
  Description of Artificial Sequence: Synthetic oligonucleotide
uaacuacuccaauaauuaa

SEQ ID NO: 119798 - RNA, 19 nt, Artificial Sequence
  Description of Artificial Sequence: Synthetic oligonucleotide
uucccuucgagccuggguu

SEQ ID NO: 119799 - RNA, 19 nt, Artificial Sequence
  Description of Artificial Sequence: Synthetic oligonucleotide
agacacuguuaauuucuag

SEQ ID NO: 119800 - RNA, 19 nt, Artificial Sequence
  Description of Artificial Sequence: Synthetic oligonucleotide
aauuucgccaaaggacucu

SEQ ID NO: 119801 - RNA, 19 nt, Artificial Sequence
  Description of Artificial Sequence: Synthetic oligonucleotide
ucccgcaggaguuuucgag

SEQ ID NO: 119802 - RNA, 19 nt, Artificial Sequence
  Description of Artificial Sequence: Synthetic oligonucleotide
ucaauucccuucgagccug

SEQ ID NO: 119803 - RNA, 19 nt, Artificial Sequence
  Description of Artificial Sequence: Synthetic oligonucleotide
caccuugccagcguaaugc

SEQ ID NO: 119804 - RNA, 19 nt, Artificial Sequence
  Description of Artificial Sequence: Synthetic oligonucleotide
gaaacagacacuguuaauu

SEQ ID NO: 119805 - RNA, 19 nt, Artificial Sequence
  Description of Artificial Sequence: Synthetic oligonucleotide
uucccauuagcacgguuaa

SEQ ID NO: 119806 - RNA, 19 nt, Artificial Sequence
  Description of Artificial Sequence: Synthetic oligonucleotide
cauuagacauguaacauau

SEQ ID NO: 119807 - RNA, 19 nt, Artificial Sequence
  Description of Artificial Sequence: Synthetic oligonucleotide
gccguuaacacagagacca

SEQ ID NO: 119808 - RNA, 19 nt, Artificial Sequence
  Description of Artificial Sequence: Synthetic oligonucleotide
auaccagacucucauugaa

SEQ ID NO: 119809 - RNA, 19 nt, Artificial Sequence
  Description of Artificial Sequence: Synthetic oligonucleotide
gguuauuguuugucaagag

SEQ ID NO: 119810 - RNA, 19 nt, Artificial Sequence
  Description of Artificial Sequence: Synthetic oligonucleotide
ugaauguaagccccuccua

SEQ ID NO: 119811 - RNA, 19 nt, Artificial Sequence
  Description of Artificial Sequence: Synthetic oligonucleotide
aaggcguagccugcacgcc

SEQ ID NO: 119812 - RNA, 19 nt, Artificial Sequence
  Description of Artificial Sequence: Synthetic oligonucleotide
agcgaggagaagguuauug

SEQ ID NO: 119813 - RNA, 19 nt, Artificial Sequence
  Description of Artificial Sequence: Synthetic oligonucleotide
uguaccaaucaaucaccuc

SEQ ID NO: 119814 - RNA, 19 nt, Artificial Sequence
  Description of Artificial Sequence: Synthetic oligonucleotide
ucuaaccgcuagccuuugg

SEQ ID NO: 119815 - RNA, 19 nt, Artificial Sequence
  Description of Artificial Sequence: Synthetic oligonucleotide
agucgaguccaagaacagg

SEQ ID NO: 119816 - RNA, 19 nt, Artificial Sequence
  Description of Artificial Sequence: Synthetic oligonucleotide
uuucguuugcagguuggca

SEQ ID NO: 119817 - RNA, 19 nt, Artificial Sequence
  Description of Artificial Sequence: Synthetic oligonucleotide
uuugucuauuggugacaag

SEQ ID NO: 119818 - RNA, 19 nt, Artificial Sequence
  Description of Artificial Sequence: Synthetic oligonucleotide
uggacgucaggguuaacua

SEQ ID NO: 119819 - RNA, 19 nt, Artificial Sequence
  Description of Artificial Sequence: Synthetic oligonucleotide
gaggcgucacuuaagggac

SEQ ID NO: 119820 - RNA, 19 nt, Artificial Sequence
  Description of Artificial Sequence: Synthetic oligonucleotide
uggucagcgaggagaaggu

SEQ ID NO: 119821 - RNA, 19 nt, Artificial Sequence
  Description of Artificial Sequence: Synthetic oligonucleotide
cagagauuugaugagggca

SEQ ID NO: 119822 - RNA, 19 nt, Artificial Sequence
  Description of Artificial Sequence: Synthetic oligonucleotide
aagugaucauuaguaguau

SEQ ID NO: 119823 - RNA, 19 nt, Artificial Sequence
  Description of Artificial Sequence: Synthetic oligonucleotide
ccgauaaaugaauguaagc

SEQ ID NO: 119824 - RNA, 19 nt, Artificial Sequence
  Description of Artificial Sequence: Synthetic oligonucleotide
augcuuacgccuagccucc

SEQ ID NO: 119825 - RNA, 19 nt, Artificial Sequence
  Description of Artificial Sequence: Synthetic oligonucleotide
auacacacccuguaccaau

SEQ ID NO: 119826 - RNA, 19 nt, Artificial Sequence
  Description of Artificial Sequence: Synthetic oligonucleotide
acgccuagccuccuccuuc

SEQ ID NO: 119827 - RNA, 19 nt, Artificial Sequence
  Description of Artificial Sequence: Synthetic oligonucleotide
aagaacagguaaggucuug

SEQ ID NO: 119828 - RNA, 19 nt, Artificial Sequence
  Description of Artificial Sequence: Synthetic oligonucleotide
cagguaaggucuugauggc

SEQ ID NO: 119829 - RNA, 19 nt, Artificial Sequence
  Description of Artificial Sequence: Synthetic oligonucleotide
uuugcagguuggcacgcuc

SEQ ID NO: 119830 - RNA, 19 nt, Artificial Sequence
  Description of Artificial Sequence: Synthetic oligonucleotide
guggguuuacgguacacaa

SEQ ID NO: 119831 - RNA, 19 nt, Artificial Sequence
  Description of Artificial Sequence: Synthetic oligonucleotide
gcaacugcaugcuuacgcc

SEQ ID NO: 119832 - RNA, 19 nt, Artificial Sequence
  Description of Artificial Sequence: Synthetic oligonucleotide
uauguggguuuacgguaca

SEQ ID NO: 119833 - RNA, 19 nt, Artificial Sequence
  Description of Artificial Sequence: Synthetic oligonucleotide
aaacauacggcgagcccca

SEQ ID NO: 119834 - RNA, 19 nt, Artificial Sequence
  Description of Artificial Sequence: Synthetic oligonucleotide
uacacacccuguaccaauc

SEQ ID NO: 119835 - RNA, 19 nt, Artificial Sequence
  Description of Artificial Sequence: Synthetic oligonucleotide
gagagucgugcgauaaagc

SEQ ID NO: 119836 - RNA, 19 nt, Artificial Sequence
  Description of Artificial Sequence: Synthetic oligonucleotide
guaguaucuuuuggccucg

SEQ ID NO: 119837 - RNA, 19 nt, Artificial Sequence
  Description of Artificial Sequence: Synthetic oligonucleotide
agcauugugcuacccugcu

SEQ ID NO: 119838 - RNA, 19 nt, Artificial Sequence
  Description of Artificial Sequence: Synthetic oligonucleotide
cagcauucgcucuaaagaa

SEQ ID NO: 119839 - RNA, 19 nt, Artificial Sequence
  Description of Artificial Sequence: Synthetic oligonucleotide
cuagaauucugcgcaggac

SEQ ID NO: 119840 - RNA, 19 nt, Artificial Sequence
  Description of Artificial Sequence: Synthetic oligonucleotide
cgccaaaggacucuaaccg

SEQ ID NO: 119841 - RNA, 19 nt, Artificial Sequence
  Description of Artificial Sequence: Synthetic oligonucleotide
auaggccuggcggaaggcg

SEQ ID NO: 119842 - RNA, 19 nt, Artificial Sequence
  Description of Artificial Sequence: Synthetic oligonucleotide
aagggacggcaacuuccag

SEQ ID NO: 119843 - RNA, 19 nt, Artificial Sequence
  Description of Artificial Sequence: Synthetic oligonucleotide
gcaucuaggguccaucuca

SEQ ID NO: 119844 - RNA, 19 nt, Artificial Sequence
  Description of Artificial Sequence: Synthetic oligonucleotide
ucgcucuaaagaacuuccu

SEQ ID NO: 119845 - RNA, 19 nt, Artificial Sequence
  Description of Artificial Sequence: Synthetic oligonucleotide
aaauagcucgagauacaaa

SEQ ID NO: 119846 - RNA, 19 nt, Artificial Sequence
  Description of Artificial Sequence: Synthetic oligonucleotide
ccaauguauauacauuauc

SEQ ID NO: 119847 - RNA, 19 nt, Artificial Sequence
  Description of Artificial Sequence: Synthetic oligonucleotide
cccuguaccaaucaaucac

SEQ ID NO: 119848 - RNA, 19 nt, Artificial Sequence
  Description of Artificial Sequence: Synthetic oligonucleotide
gaacuaccaggguugagcu

SEQ ID NO: 119849 - RNA, 19 nt, Artificial Sequence
  Description of Artificial Sequence: Synthetic oligonucleotide
ucauuggcugauacuggua

SEQ ID NO: 119850 - RNA, 19 nt, Artificial Sequence
  Description of Artificial Sequence: Synthetic oligonucleotide
gugagucgaguccaagaac

SEQ ID NO: 119851 - RNA, 19 nt, Artificial Sequence
  Description of Artificial Sequence: Synthetic oligonucleotide
agaagaucggccacucuga

SEQ ID NO: 119852 - RNA, 19 nt, Artificial Sequence
  Description of Artificial Sequence: Synthetic oligonucleotide
ggaaggcguagccugcacg

SEQ ID NO: 119853 - RNA, 19 nt, Artificial Sequence
  Description of Artificial Sequence: Synthetic oligonucleotide
uaagccccuccuaugcuua

SEQ ID NO: 119854 - RNA, 19 nt, Artificial Sequence
  Description of Artificial Sequence: Synthetic oligonucleotide
acgguuaauuuuauucaca

SEQ ID NO: 119855 - RNA, 19 nt, Artificial Sequence
  Description of Artificial Sequence: Synthetic oligonucleotide
gacucuaaccgcuagccuu

SEQ ID NO: 119856 - RNA, 19 nt, Artificial Sequence
  Description of Artificial Sequence: Synthetic oligonucleotide
gaaauggguacgacauuuc

SEQ ID NO: 119857 - RNA, 19 nt, Artificial Sequence
  Description of Artificial Sequence: Synthetic oligonucleotide
agaccauguaaugucugga

SEQ ID NO: 119858 - RNA, 19 nt, Artificial Sequence
  Description of Artificial Sequence: Synthetic oligonucleotide
ucuguuuugccagcacaaa

SEQ ID NO: 119859 - RNA, 19 nt, Artificial Sequence
  Description of Artificial Sequence: Synthetic oligonucleotide
cuuucguuugcagguuggc

SEQ ID NO: 119860 - RNA, 19 nt, Artificial Sequence
  Description of Artificial Sequence: Synthetic oligonucleotide
gagucgaguccaagaacag

SEQ ID NO: 119861 - RNA, 19 nt, Artificial Sequence
  Description of Artificial Sequence: Synthetic oligonucleotide
aauucccuucgagccuggg

SEQ ID NO: 119862 - RNA, 19 nt, Artificial Sequence
  Description of Artificial Sequence: Synthetic oligonucleotide
accaaucaaucaccucucu

SEQ ID NO: 119863 - RNA, 19 nt, Artificial Sequence
  Description of Artificial Sequence: Synthetic oligonucleotide
acgaagcauugugcuaccc

SEQ ID NO: 119864 - RNA, 19 nt, Artificial Sequence
  Description of Artificial Sequence: Synthetic oligonucleotide
ggguuuacgguacacaagu

SEQ ID NO: 119865 - RNA, 19 nt, Artificial Sequence
  Description of Artificial Sequence: Synthetic oligonucleotide
acgguacacaagucuaaaa

SEQ ID NO: 119866 - RNA, 19 nt, Artificial Sequence
  Description of Artificial Sequence: Synthetic oligonucleotide
ugcuacccugcuucaguca

SEQ ID NO: 119867 - RNA, 19 nt, Artificial Sequence
  Description of Artificial Sequence: Synthetic oligonucleotide
auguggguuuacgguacac

SEQ ID NO: 119868 - RNA, 19 nt, Artificial Sequence
  Description of Artificial Sequence: Synthetic oligonucleotide
gcucuaaagaacuuccugu

SEQ ID NO: 119869 - RNA, 19 nt, Artificial Sequence
  Description of Artificial Sequence: Synthetic oligonucleotide
cuaaagaacuuccuguauu

SEQ ID NO: 119870 - RNA, 19 nt, Artificial Sequence
  Description of Artificial Sequence: Synthetic oligonucleotide
uaggaggucuuuucagguu

SEQ ID NO: 119871 - RNA, 19 nt, Artificial Sequence
  Description of Artificial Sequence: Synthetic oligonucleotide
gggacggcaacuuccagga

SEQ ID NO: 119872 - RNA, 19 nt, Artificial Sequence
  Description of Artificial Sequence: Synthetic oligonucleotide
aaaggcgccuuggauguuu

SEQ ID NO: 119873 - RNA, 19 nt, Artificial Sequence
  Description of Artificial Sequence: Synthetic oligonucleotide
aaccgcaacgaagcauugu

SEQ ID NO: 119874 - RNA, 19 nt, Artificial Sequence
  Description of Artificial Sequence: Synthetic oligonucleotide
uauucccggcguaccuuca

SEQ ID NO: 119875 - RNA, 19 nt, Artificial Sequence
  Description of Artificial Sequence: Synthetic oligonucleotide
acgccucacgcggacauuc

SEQ ID NO: 119876 - RNA, 19 nt, Artificial Sequence
  Description of Artificial Sequence: Synthetic oligonucleotide
gguaaggucuugauggcca

SEQ ID NO: 119877 - RNA, 19 nt, Artificial Sequence
  Description of Artificial Sequence: Synthetic oligonucleotide
uccuguauucccggcguac

SEQ ID NO: 119878 - RNA, 19 nt, Artificial Sequence
  Description of Artificial Sequence: Synthetic oligonucleotide
ccuuacagcgcuucugaug

SEQ ID NO: 119879 - RNA, 19 nt, Artificial Sequence
  Description of Artificial Sequence: Synthetic oligonucleotide
accgcuagccuuuggcaau

SEQ ID NO: 119880 - RNA, 19 nt, Artificial Sequence
  Description of Artificial Sequence: Synthetic oligonucleotide
cuguagggaucucuagcuc

SEQ ID NO: 119881 - RNA, 19 nt, Artificial Sequence
  Description of Artificial Sequence: Synthetic oligonucleotide
gcgagccccaaauaaaaca

SEQ ID NO: 119882 - RNA, 19 nt, Artificial Sequence
  Description of Artificial Sequence: Synthetic oligonucleotide
uuacgccuagccuccuccu

SEQ ID NO: 119883 - RNA, 19 nt, Artificial Sequence
  Description of Artificial Sequence: Synthetic oligonucleotide
aucguuuugcgaacucaug

SEQ ID NO: 119884 - RNA, 19 nt, Artificial Sequence
  Description of Artificial Sequence: Synthetic oligonucleotide
uugcgcguaucuccugcac

SEQ ID NO: 119885 - RNA, 19 nt, Artificial Sequence
  Description of Artificial Sequence: Synthetic oligonucleotide
cgugcgauaaagcuuggug

SEQ ID NO: 119886 - RNA, 19 nt, Artificial Sequence
  Description of Artificial Sequence: Synthetic oligonucleotide
uggaaccgcaacgaagcau

SEQ ID NO: 119887 - RNA, 19 nt, Artificial Sequence
  Description of Artificial Sequence: Synthetic oligonucleotide
cauguaaugucuggaugga

SEQ ID NO: 119888 - RNA, 19 nt, Artificial Sequence
  Description of Artificial Sequence: Synthetic oligonucleotide
accuugccagcguaaugcu

SEQ ID NO: 119889 - RNA, 19 nt, Artificial Sequence
  Description of Artificial Sequence: Synthetic oligonucleotide
uuucgccaaaggacucuaa

SEQ ID NO: 119890 - RNA, 19 nt, Artificial Sequence
  Description of Artificial Sequence: Synthetic oligonucleotide
gcucuuuaucugcugguac

SEQ ID NO: 119891 - RNA, 19 nt, Artificial Sequence
  Description of Artificial Sequence: Synthetic oligonucleotide
uucccggcguaccuucagu

SEQ ID NO: 119892 - RNA, 19 nt, Artificial Sequence
  Description of Artificial Sequence: Synthetic oligonucleotide
gccugcacgccucacgcgg

SEQ ID NO: 119893 - RNA, 19 nt, Artificial Sequence
  Description of Artificial Sequence: Synthetic oligonucleotide
acuuaagggacggcaacuu

SEQ ID NO: 119894 - RNA, 19 nt, Artificial Sequence
  Description of Artificial Sequence: Synthetic oligonucleotide
acgucaggguuaacuacuc

SEQ ID NO: 119895 - RNA, 19 nt, Artificial Sequence
  Description of Artificial Sequence: Synthetic oligonucleotide
guacagcaccuugccagcg

SEQ ID NO: 119896 - RNA, 19 nt, Artificial Sequence
  Description of Artificial Sequence: Synthetic oligonucleotide
aggcguagccugcacgccu

SEQ ID NO: 119897 - RNA, 19 nt, Artificial Sequence
  Description of Artificial Sequence: Synthetic oligonucleotide
ccaguaagcccaaaugaca

SEQ ID NO: 119898 - RNA, 19 nt, Artificial Sequence
  Description of Artificial Sequence: Synthetic oligonucleotide
aucuaggguccaucucaug

SEQ ID NO: 119899 - RNA, 19 nt, Artificial Sequence
  Description of Artificial Sequence: Synthetic oligonucleotide
gacuugaucugcccagacu

SEQ ID NO: 119900 - RNA, 19 nt, Artificial Sequence
  Description of Artificial Sequence: Synthetic oligonucleotide
ccucacgcggacauucucc

SEQ ID NO: 119901 - RNA, 19 nt, Artificial Sequence
  Description of Artificial Sequence: Synthetic oligonucleotide
ucccggcguaccuucaguc

SEQ ID NO: 119902 - RNA, 19 nt, Artificial Sequence
  Description of Artificial Sequence: Synthetic oligonucleotide
acacccuguaccaaucaau

SEQ ID NO: 119903 - RNA, 19 nt, Artificial Sequence
  Description of Artificial Sequence: Synthetic oligonucleotide
cuaugcuuacauguacuaa

SEQ ID NO: 119904 - RNA, 19 nt, Artificial Sequence
  Description of Artificial Sequence: Synthetic oligonucleotide
gucucgguacaggagguca

SEQ ID NO: 119905 - RNA, 19 nt, Artificial Sequence
  Description of Artificial Sequence: Synthetic oligonucleotide
uggguacgacauuuccauc

SEQ ID NO: 119906 - RNA, 19 nt, Artificial Sequence
  Description of Artificial Sequence: Synthetic oligonucleotide
ccagcguaaugcuggauuc

SEQ ID NO: 119907 - RNA, 19 nt, Artificial Sequence
  Description of Artificial Sequence: Synthetic oligonucleotide
ccggauguaagacugaacu

SEQ ID NO: 119908 - RNA, 19 nt, Artificial Sequence
  Description of Artificial Sequence: Synthetic oligonucleotide
ggcgucacuuaagggacgg

SEQ ID NO: 119909 - RNA, 19 nt, Artificial Sequence
  Description of Artificial Sequence: Synthetic oligonucleotide
caauucccuucgagccugg

SEQ ID NO: 119910 - RNA, 19 nt, Artificial Sequence
  Description of Artificial Sequence: Synthetic oligonucleotide
gaaccgcaacgaagcauug

SEQ ID NO: 119911 - RNA, 19 nt, Artificial Sequence
  Description of Artificial Sequence: Synthetic oligonucleotide
guaaggucuugauggccaa

SEQ ID NO: 119912 - RNA, 19 nt, Artificial Sequence
  Description of Artificial Sequence: Synthetic oligonucleotide
uacagcgcuucugaugcuu

SEQ ID NO: 119913 - RNA, 19 nt, Artificial Sequence
  Description of Artificial Sequence: Synthetic oligonucleotide
cucccaaauaagaaacaau

SEQ ID NO: 119914 - RNA, 19 nt, Artificial Sequence
  Description of Artificial Sequence: Synthetic oligonucleotide
guggacgucaggguuaacu

SEQ ID NO: 119915 - RNA, 19 nt, Artificial Sequence
  Description of Artificial Sequence: Synthetic oligonucleotide
uuacagcgcuucugaugcu

SEQ ID NO: 119916 - RNA, 19 nt, Artificial Sequence
  Description of Artificial Sequence: Synthetic oligonucleotide
cguuucaauucccuucgag

SEQ ID NO: 119917 - RNA, 19 nt, Artificial Sequence
  Description of Artificial Sequence: Synthetic oligonucleotide
uuccuguauucccggcgua

SEQ ID NO: 119918 - RNA, 19 nt, Artificial Sequence
  Description of Artificial Sequence: Synthetic oligonucleotide
gaaaaugugugcagccuuu

SEQ ID NO: 119919 - RNA, 19 nt, Artificial Sequence
  Description of Artificial Sequence: Synthetic oligonucleotide
guugcgcguaucuccugca

SEQ ID NO: 119920 - RNA, 19 nt, Artificial Sequence
  Description of Artificial Sequence: Synthetic oligonucleotide
cauacggcgagccccaaau

SEQ ID NO: 119921 - RNA, 19 nt, Artificial Sequence
  Description of Artificial Sequence: Synthetic oligonucleotide
cugauuagucaaauacuuu

SEQ ID NO: 119922 - RNA, 19 nt, Artificial Sequence
  Description of Artificial Sequence: Synthetic oligonucleotide
caucguuuugcgaacucau

SEQ ID NO: 119923 - RNA, 19 nt, Artificial Sequence
  Description of Artificial Sequence: Synthetic oligonucleotide
uacgccuagccuccuccuu

SEQ ID NO: 119924 - RNA, 19 nt, Artificial Sequence
  Description of Artificial Sequence: Synthetic oligonucleotide
cagcgauaaugaucuucuc

SEQ ID NO: 119925 - RNA, 19 nt, Artificial Sequence
  Description of Artificial Sequence: Synthetic oligonucleotide
cgcucuaaagaacuuccug

SEQ ID NO: 119926 - RNA, 19 nt, Artificial Sequence
  Description of Artificial Sequence: Synthetic oligonucleotide
ucgugcgauaaagcuuggu

SEQ ID NO: 119927 - RNA, 19 nt, Artificial Sequence
  Description of Artificial Sequence: Synthetic oligonucleotide
caaaggacucuaaccgcua

SEQ ID NO: 119928 - RNA, 19 nt, Artificial Sequence
  Description of Artificial Sequence: Synthetic oligonucleotide
uggcugauacugguacaaa

SEQ ID NO: 119929 - RNA, 19 nt, Artificial Sequence
  Description of Artificial Sequence: Synthetic oligonucleotide
ccgcaacgaagcauugugc

SEQ ID NO: 119930 - RNA, 19 nt, Artificial Sequence
  Description of Artificial Sequence: Synthetic oligonucleotide
cuuccuguauucccggcgu

SEQ ID NO: 119931 - RNA, 19 nt, Artificial Sequence
  Description of Artificial Sequence: Synthetic oligonucleotide
ggaaauggguacgacauuu

SEQ ID NO: 119932 - RNA, 19 nt, Artificial Sequence
  Description of Artificial Sequence: Synthetic oligonucleotide
gcgauaaagcuugguggcc

SEQ ID NO: 119933 - RNA, 19 nt, Artificial Sequence
  Description of Artificial Sequence: Synthetic oligonucleotide
aggcgucacuuaagggacg

SEQ ID NO: 119934 - RNA, 19 nt, Artificial Sequence
  Description of Artificial Sequence: Synthetic oligonucleotide
ggcccuuuccagugaggcc

SEQ ID NO: 119935 - RNA, 19 nt, Artificial Sequence
  Description of Artificial Sequence: Synthetic oligonucleotide
auacggcgagccccaaaua

SEQ ID NO: 119936 - RNA, 19 nt, Artificial Sequence
  Description of Artificial Sequence: Synthetic oligonucleotide
acggcgagccccaaauaaa

SEQ ID NO: 119937 - RNA, 19 nt, Artificial Sequence
  Description of Artificial Sequence: Synthetic oligonucleotide
cacacccuguaccaaucaa

SEQ ID NO: 119938 - RNA, 19 nt, Artificial Sequence
  Description of Artificial Sequence: Synthetic oligonucleotide
ccuguauucccggcguacc

SEQ ID NO: 119939 - RNA, 19 nt, Artificial Sequence
  Description of Artificial Sequence: Synthetic oligonucleotide
ucacaacuucagcgauaau

SEQ ID NO: 119940 - RNA, 19 nt, Artificial Sequence
  Description of Artificial Sequence: Synthetic oligonucleotide
ggcaucuaggguccaucuc

SEQ ID NO: 119941 - RNA, 19 nt, Artificial Sequence
  Description of Artificial Sequence: Synthetic oligonucleotide
agccaucguuuugcgaacu

SEQ ID NO: 119942 - RNA, 19 nt, Artificial Sequence
  Description of Artificial Sequence: Synthetic oligonucleotide
gagucgugcgauaaagcuu

SEQ ID NO: 119943 - RNA, 19 nt, Artificial Sequence
  Description of Artificial Sequence: Synthetic oligonucleotide
gcauucgcucuaaagaacu

SEQ ID NO: 119944 - RNA, 19 nt, Artificial Sequence
  Description of Artificial Sequence: Synthetic oligonucleotide
cccuccuaugcuuacaugu

SEQ ID NO: 119945 - RNA, 19 nt, Artificial Sequence
  Description of Artificial Sequence: Synthetic oligonucleotide
gacuccgggugaaagcacu

SEQ ID NO: 119946 - RNA, 19 nt, Artificial Sequence
  Description of Artificial Sequence: Synthetic oligonucleotide
gguugccuugaauaaacuu

SEQ ID NO: 119947 - RNA, 19 nt, Artificial Sequence
  Description of Artificial Sequence: Synthetic oligonucleotide
ccugaucugauggcauacc

SEQ ID NO: 119948 - RNA, 19 nt, Artificial Sequence
  Description of Artificial Sequence: Synthetic oligonucleotide
cuggaaccgcaacgaagca

SEQ ID NO: 119949 - RNA, 19 nt, Artificial Sequence
  Description of Artificial Sequence: Synthetic oligonucleotide
gcaacgaagcauugugcua

SEQ ID NO: 119950 - RNA, 19 nt, Artificial Sequence
  Description of Artificial Sequence: Synthetic oligonucleotide
gcaccuugccagcguaaug

SEQ ID NO: 119951 - RNA, 19 nt, Artificial Sequence
  Description of Artificial Sequence: Synthetic oligonucleotide
cugagagucgugcgauaaa

SEQ ID NO: 119952 - RNA, 19 nt, Artificial Sequence
  Description of Artificial Sequence: Synthetic oligonucleotide
gucgugcgauaaagcuugg

SEQ ID NO: 119953 - RNA, 19 nt, Artificial Sequence
  Description of Artificial Sequence: Synthetic oligonucleotide
ucccauuagcacgguuaau

SEQ ID NO: 119954 - RNA, 19 nt, Artificial Sequence
  Description of Artificial Sequence: Synthetic oligonucleotide
ccuugccagcguaaugcug

SEQ ID NO: 119955 - RNA, 19 nt, Artificial Sequence
  Description of Artificial Sequence: Synthetic oligonucleotide
ccuaugcuuacauguacua

SEQ ID NO: 119956 - RNA, 19 nt, Artificial Sequence
  Description of Artificial Sequence: Synthetic oligonucleotide
cauucggcuugaugcaccu

SEQ ID NO: 119957 - RNA, 19 nt, Artificial Sequence
  Description of Artificial Sequence: Synthetic oligonucleotide
gguuuacgguacacaaguc

SEQ ID NO: 119958 - RNA, 19 nt, Artificial Sequence
  Description of Artificial Sequence: Synthetic oligonucleotide
auucggcuugaugcaccug

SEQ ID NO: 119959 - RNA, 19 nt, Artificial Sequence
  Description of Artificial Sequence: Synthetic oligonucleotide
accgcuucuguugcgcgua

SEQ ID NO: 119960 - RNA, 19 nt, Artificial Sequence
  Description of Artificial Sequence: Synthetic oligonucleotide
ugcacgccucacgcggaca

SEQ ID NO: 119961 - RNA, 19 nt, Artificial Sequence
  Description of Artificial Sequence: Synthetic oligonucleotide
ggcgagccccaaauaaaac

SEQ ID NO: 119962 - RNA, 19 nt, Artificial Sequence
  Description of Artificial Sequence: Synthetic oligonucleotide
ugaacggcucuuggccuuu

SEQ ID NO: 119963 - RNA, 19 nt, Artificial Sequence
  Description of Artificial Sequence: Synthetic oligonucleotide
ggaaccgcaacgaagcauu

SEQ ID NO: 119964 - RNA, 19 nt, Artificial Sequence
  Description of Artificial Sequence: Synthetic oligonucleotide
ggcuacugacuccggguga

SEQ ID NO: 119965 - RNA, 19 nt, Artificial Sequence
  Description of Artificial Sequence: Synthetic oligonucleotide
cugcacgccucacgcggac

SEQ ID NO: 119966 - RNA, 19 nt, Artificial Sequence
  Description of Artificial Sequence: Synthetic oligonucleotide
cucuaaccgcuagccuuug

SEQ ID NO: 119967 - RNA, 19 nt, Artificial Sequence
  Description of Artificial Sequence: Synthetic oligonucleotide
gcugagagucgugcgauaa

SEQ ID NO: 119968 - RNA, 19 nt, Artificial Sequence
  Description of Artificial Sequence: Synthetic oligonucleotide
ggaaacagacacuguuaau

SEQ ID NO: 119969 - RNA, 19 nt, Artificial Sequence
  Description of Artificial Sequence: Synthetic oligonucleotide
cuguauucccggcguaccu

SEQ ID NO: 119970 - RNA, 19 nt, Artificial Sequence
  Description of Artificial Sequence: Synthetic oligonucleotide
aacauacggcgagccccaa

SEQ ID NO: 119971 - RNA, 19 nt, Artificial Sequence
  Description of Artificial Sequence: Synthetic oligonucleotide
cccggauguaagacugaac

SEQ ID NO: 119972 - RNA, 19 nt, Artificial Sequence
  Description of Artificial Sequence: Synthetic oligonucleotide
guagggaucucuagcucau

SEQ ID NO: 119973 - RNA, 19 nt, Artificial Sequence
  Description of Artificial Sequence: Synthetic oligonucleotide
ccagccccggauguaagac

SEQ ID NO: 119974 - RNA, 19 nt, Artificial Sequence
  Description of Artificial Sequence: Synthetic oligonucleotide
uucuuggguuucggaugaa

SEQ ID NO: 119975 - RNA, 19 nt, Artificial Sequence
  Description of Artificial Sequence: Synthetic oligonucleotide
guuggcacgcucccauuuu

SEQ ID NO: 119976 - RNA, 19 nt, Artificial Sequence
  Description of Artificial Sequence: Synthetic oligonucleotide
gccaucguuuugcgaacuc

SEQ ID NO: 119977 - RNA, 19 nt, Artificial Sequence
  Description of Artificial Sequence: Synthetic oligonucleotide
ggacggcaacuuccaggag

SEQ ID NO: 119978 - RNA, 19 nt, Artificial Sequence
  Description of Artificial Sequence: Synthetic oligonucleotide
cauucgcucuaaagaacuu

SEQ ID NO: 119979 - RNA, 19 nt, Artificial Sequence
  Description of Artificial Sequence: Synthetic oligonucleotide
ccuccuaugcuuacaugua

SEQ ID NO: 119980 - RNA, 19 nt, Artificial Sequence
  Description of Artificial Sequence: Synthetic oligonucleotide
ugcuuacgccuagccuccu

SEQ ID NO: 119981 - RNA, 19 nt, Artificial Sequence
  Description of Artificial Sequence: Synthetic oligonucleotide
gccucgaucucuaccaccu

SEQ ID NO: 119982 - RNA, 19 nt, Artificial Sequence
  Description of Artificial Sequence: Synthetic oligonucleotide
cgucacuuaagggacggca

SEQ ID NO: 119983 - RNA, 19 nt, Artificial Sequence
  Description of Artificial Sequence: Synthetic oligonucleotide
ggcguaccuucaguccaag

SEQ ID NO: 119984 - RNA, 19 nt, Artificial Sequence
  Description of Artificial Sequence: Synthetic oligonucleotide
gggcaucuaggguccaucu

SEQ ID NO: 119985 - RNA, 19 nt, Artificial Sequence
  Description of Artificial Sequence: Synthetic oligonucleotide
cgcaacgaagcauugugcu

SEQ ID NO: 119986 - RNA, 19 nt, Artificial Sequence
  Description of Artificial Sequence: Synthetic oligonucleotide
gccucacgcggacauucuc

SEQ ID NO: 119987 - RNA, 19 nt, Artificial Sequence
  Description of Artificial Sequence: Synthetic oligonucleotide
cagccccggauguaagacu

SEQ ID NO: 119988 - RNA, 19 nt, Artificial Sequence
  Description of Artificial Sequence: Synthetic oligonucleotide
cugaacggcucuuggccuu

SEQ ID NO: 119989 - RNA, 19 nt, Artificial Sequence
  Description of Artificial Sequence: Synthetic oligonucleotide
cggauguaagacugaacua

SEQ ID NO: 119990 - RNA, 19 nt, Artificial Sequence
  Description of Artificial Sequence: Synthetic oligonucleotide
aggcgccuuggauguuuua

SEQ ID NO: 119991 - RNA, 19 nt, Artificial Sequence
  Description of Artificial Sequence: Synthetic oligonucleotide
gcguuucaauucccuucga

SEQ ID NO: 119992 - RNA, 19 nt, Artificial Sequence
  Description of Artificial Sequence: Synthetic oligonucleotide
ccuucaguccaagccagua

SEQ ID NO: 119993 - RNA, 19 nt, Artificial Sequence
  Description of Artificial Sequence: Synthetic oligonucleotide
cuccgggugaaagcacugu

SEQ ID NO: 119994 - RNA, 19 nt, Artificial Sequence
  Description of Artificial Sequence: Synthetic oligonucleotide
cgaagcauugugcuacccu

SEQ ID NO: 119995 - RNA, 19 nt, Artificial Sequence
  Description of Artificial Sequence: Synthetic oligonucleotide
cggcgagccccaaauaaaa

SEQ ID NO: 119996 - RNA, 19 nt, Artificial Sequence
  Description of Artificial Sequence: Synthetic oligonucleotide
gcgucacuuaagggacggc

SEQ ID NO: 119997 - RNA, 19 nt, Artificial Sequence
  Description of Artificial Sequence: Synthetic oligonucleotide
ggcugagagucgugcgaua

SEQ ID NO: 119998 - RNA, 19 nt, Artificial Sequence
  Description of Artificial Sequence: Synthetic oligonucleotide
ccugcacgccucacgcgga

SEQ ID NO: 119999 - RNA, 19 nt, Artificial Sequence
  Description of Artificial Sequence: Synthetic oligonucleotide
gcggaaggcguagccugca

SEQ ID NO: 120000 - RNA, 19 nt, Artificial Sequence
  Description of Artificial Sequence: Synthetic oligonucleotide
gcacgccucacgcggacau

SEQ ID NO: 120001 - RNA, 19 nt, Artificial Sequence
  Description of Artificial Sequence: Synthetic oligonucleotide
cggaaggcguagccugcac

SEQ ID NO: 120002 - RNA, 19 nt, Artificial Sequence
  Description of Artificial Sequence: Synthetic oligonucleotide
gcauugugcuacccugcuu

SEQ ID NO: 120003 - RNA, 19 nt, Artificial Sequence
  Description of Artificial Sequence: Synthetic oligonucleotide
gaacggcucuuggccuuuu

SEQ ID NO: 120004 - RNA, 19 nt, Artificial Sequence
  Description of Artificial Sequence: Synthetic oligonucleotide
cagcgaggagaagguuauu

SEQ ID NO: 120005 - RNA, 19 nt, Artificial Sequence
  Description of Artificial Sequence: Synthetic oligonucleotide
cacgccucacgcggacauu

SEQ ID NO: 120006 - RNA, 19 nt, Artificial Sequence
  Description of Artificial Sequence: Synthetic oligonucleotide
auaucaaugacuaugaagc

SEQ ID NO: 120007 - RNA, 19 nt, Artificial Sequence
  Description of Artificial Sequence: Synthetic oligonucleotide
uaugauaacaaacagcaag

SEQ ID NO: 120008 - RNA, 19 nt, Artificial Sequence
  Description of Artificial Sequence: Synthetic oligonucleotide
auuagagugacuuuaaugu

SEQ ID NO: 120009 - RNA, 19 nt, Artificial Sequence
  Description of Artificial Sequence: Synthetic oligonucleotide
ucuuauauuaugcaacaug

SEQ ID NO: 120010 - RNA, 19 nt, Artificial Sequence
  Description of Artificial Sequence: Synthetic oligonucleotide
aaaagagccaauuaugcaa

SEQ ID NO: 120011 - RNA, 19 nt, Artificial Sequence
  Description of Artificial Sequence: Synthetic oligonucleotide
uuuauagcuguccaucagg

SEQ ID NO: 120012 - RNA, 19 nt, Artificial Sequence
  Description of Artificial Sequence: Synthetic oligonucleotide
uugagcauaacuaccgacg

SEQ ID NO: 120013 - RNA, 19 nt, Artificial Sequence
  Description of Artificial Sequence: Synthetic oligonucleotide
aagugaaacugucugaucu

SEQ ID NO: 120014 - RNA, 19 nt, Artificial Sequence
  Description of Artificial Sequence: Synthetic oligonucleotide
auauaaucuuauauuaugc

SEQ ID NO: 120015 - RNA, 19 nt, Artificial Sequence
  Description of Artificial Sequence: Synthetic oligonucleotide
uaggugaucucauauagag

SEQ ID NO: 120016 - RNA, 19 nt, Artificial Sequence
  Description of Artificial Sequence: Synthetic oligonucleotide
ugucauaauacagagaccu

SEQ ID NO: 120017 - RNA, 19 nt, Artificial Sequence
  Description of Artificial Sequence: Synthetic oligonucleotide
uauaaucuuauauuaugca

SEQ ID NO: 120018 - RNA, 19 nt, Artificial Sequence
  Description of Artificial Sequence: Synthetic oligonucleotide
aauucauacgcuggcaugg

SEQ ID NO: 120019 - RNA, 19 nt, Artificial Sequence
  Description of Artificial Sequence: Synthetic oligonucleotide
ugaaggaguauguaguucc

SEQ ID NO: 120020 - RNA, 19 nt, Artificial Sequence
  Description of Artificial Sequence: Synthetic oligonucleotide
agcauaacuaccgacgugc

SEQ ID NO: 120021 - RNA, 19 nt, Artificial Sequence
  Description of Artificial Sequence: Synthetic oligonucleotide
auaauccaagaccagucgc

SEQ ID NO: 120022 - RNA, 19 nt, Artificial Sequence
  Description of Artificial Sequence: Synthetic oligonucleotide
cacguuacauuucugagcg

SEQ ID NO: 120023 - RNA, 19 nt, Artificial Sequence
  Description of Artificial Sequence: Synthetic oligonucleotide
ugaguuauguguuggagga

SEQ ID NO: 120024 - RNA, 19 nt, Artificial Sequence
  Description of Artificial Sequence: Synthetic oligonucleotide
ggugaucucauauagagug

SEQ ID NO: 120025 - RNA, 19 nt, Artificial Sequence
  Description of Artificial Sequence: Synthetic oligonucleotide
agaacucacacacugcguc

SEQ ID NO: 120026 - RNA, 19 nt, Artificial Sequence
  Description of Artificial Sequence: Synthetic oligonucleotide
acguucuuaucacauauuc

SEQ ID NO: 120027 - RNA, 19 nt, Artificial Sequence
  Description of Artificial Sequence: Synthetic oligonucleotide
uuugguuggauaaaucuau

SEQ ID NO: 120028 - RNA, 19 nt, Artificial Sequence
  Description of Artificial Sequence: Synthetic oligonucleotide
ucugcuagaaagaacucac

SEQ ID NO: 120029 - RNA, 19 nt, Artificial Sequence
  Description of Artificial Sequence: Synthetic oligonucleotide
auugagcauaacuaccgac

SEQ ID NO: 120030 - RNA, 19 nt, Artificial Sequence
  Description of Artificial Sequence: Synthetic oligonucleotide
aaauucauacgcuggcaug

SEQ ID NO: 120031 - RNA, 19 nt, Artificial Sequence
  Description of Artificial Sequence: Synthetic oligonucleotide
aagaccagucgccagaagu

SEQ ID NO: 120032 - RNA, 19 nt, Artificial Sequence
  Description of Artificial Sequence: Synthetic oligonucleotide
aaugccagguagcauucuc

SEQ ID NO: 120033 - RNA, 19 nt, Artificial Sequence
  Description of Artificial Sequence: Synthetic oligonucleotide
uauagucggaguuuguugu

SEQ ID NO: 120034 - RNA, 19 nt, Artificial Sequence
  Description of Artificial Sequence: Synthetic oligonucleotide
ugaaccauacaaaucugcu

SEQ ID NO: 120035 - RNA, 19 nt, Artificial Sequence
  Description of Artificial Sequence: Synthetic oligonucleotide
cacauauucggccagcagc

SEQ ID NO: 120036 - RNA, 19 nt, Artificial Sequence
  Description of Artificial Sequence: Synthetic oligonucleotide
uugaaccauacaaaucugc

SEQ ID NO: 120037 - RNA, 19 nt, Artificial Sequence
  Description of Artificial Sequence: Synthetic oligonucleotide
cauacgcuggcauggaugg

SEQ ID NO: 120038 - RNA, 19 nt, Artificial Sequence
  Description of Artificial Sequence: Synthetic oligonucleotide
uggguccugauauagucgg

SEQ ID NO: 120039 - RNA, 19 nt, Artificial Sequence
  Description of Artificial Sequence: Synthetic oligonucleotide
gaggagaucugccacgcgg

SEQ ID NO: 120040 - RNA, 19 nt, Artificial Sequence
  Description of Artificial Sequence: Synthetic oligonucleotide
acucaguuguaacaaugac

SEQ ID NO: 120041 - RNA, 19 nt, Artificial Sequence
  Description of Artificial Sequence: Synthetic oligonucleotide
ucuguuaguccuugaaagc

SEQ ID NO: 120042 - RNA, 19 nt, Artificial Sequence
  Description of Artificial Sequence: Synthetic oligonucleotide
uccggcaauuuuaacagug

SEQ ID NO: 120043 - RNA, 19 nt, Artificial Sequence
  Description of Artificial Sequence: Synthetic oligonucleotide
auauagucggaguuuguug

SEQ ID NO: 120044 - RNA, 19 nt, Artificial Sequence
  Description of Artificial Sequence: Synthetic oligonucleotide
cuuauagaucucagugucg

SEQ ID NO: 120045 - RNA, 19 nt, Artificial Sequence
  Description of Artificial Sequence: Synthetic oligonucleotide
uaaauccgcagacacaaau

SEQ ID NO: 120046 - RNA, 19 nt, Artificial Sequence
  Description of Artificial Sequence: Synthetic oligonucleotide
auauuaucauaaugccagg

SEQ ID NO: 120047 - RNA, 19 nt, Artificial Sequence
  Description of Artificial Sequence: Synthetic oligonucleotide
ucuuugaaccauacaaauc

SEQ ID NO: 120048 - RNA, 19 nt, Artificial Sequence
  Description of Artificial Sequence: Synthetic oligonucleotide
cuuggauuucaccugccgg

SEQ ID NO: 120049 - RNA, 19 nt, Artificial Sequence
  Description of Artificial Sequence: Synthetic oligonucleotide
agugaaacugucugaucuc

SEQ ID NO: 120050 - RNA, 19 nt, Artificial Sequence
  Description of Artificial Sequence: Synthetic oligonucleotide
cugaagauccuacugauga

SEQ ID NO: 120051 - RNA, 19 nt, Artificial Sequence
  Description of Artificial Sequence: Synthetic oligonucleotide
aauuuugguuuccccguug

SEQ ID NO: 120052 - RNA, 19 nt, Artificial Sequence
  Description of Artificial Sequence: Synthetic oligonucleotide
gcagugauaauccaagacc

SEQ ID NO: 120053 - RNA, 19 nt, Artificial Sequence
  Description of Artificial Sequence: Synthetic oligonucleotide
ugagcauaacuaccgacgu

SEQ ID NO: 120054 - RNA, 19 nt, Artificial Sequence
  Description of Artificial Sequence: Synthetic oligonucleotide
auaacuaccgacgugcagu

SEQ ID NO: 120055 - RNA, 19 nt, Artificial Sequence
  Description of Artificial Sequence: Synthetic oligonucleotide
aucucauauagagugauga

SEQ ID NO: 120056 - RNA, 19 nt, Artificial Sequence
  Description of Artificial Sequence: Synthetic oligonucleotide
ucuauuagagugacuuuaa

SEQ ID NO: 120057 - RNA, 19 nt, Artificial Sequence
  Description of Artificial Sequence: Synthetic oligonucleotide
uugaccagauaucugcgcu

SEQ ID NO: 120058 - RNA, 19 nt, Artificial Sequence
  Description of Artificial Sequence: Synthetic oligonucleotide
auauguuuguguuggcucu

SEQ ID NO: 120059 - RNA, 19 nt, Artificial Sequence
  Description of Artificial Sequence: Synthetic oligonucleotide
auaauugugcucuucgguu

SEQ ID NO: 120060 - RNA, 19 nt, Artificial Sequence
  Description of Artificial Sequence: Synthetic oligonucleotide
uucaccgccauuguagucc

SEQ ID NO: 120061 - RNA, 19 nt, Artificial Sequence
  Description of Artificial Sequence: Synthetic oligonucleotide
ugcgucuuuguucauuaca

SEQ ID NO: 120062 - RNA, 19 nt, Artificial Sequence
  Description of Artificial Sequence: Synthetic oligonucleotide
agaguucaaguacuccagg

SEQ ID NO: 120063 - RNA, 19 nt, Artificial Sequence
  Description of Artificial Sequence: Synthetic oligonucleotide
accacguuacauuucugag

SEQ ID NO: 120064 - RNA, 19 nt, Artificial Sequence
  Description of Artificial Sequence: Synthetic oligonucleotide
caaugaacgcugaaggcug

SEQ ID NO: 120065 - RNA, 19 nt, Artificial Sequence
  Description of Artificial Sequence: Synthetic oligonucleotide
agagccaauuaugcaaagc

SEQ ID NO: 120066 - RNA, 19 nt, Artificial Sequence
  Description of Artificial Sequence: Synthetic oligonucleotide
uuagagugacuuuaauguc

SEQ ID NO: 120067 - RNA, 19 nt, Artificial Sequence
  Description of Artificial Sequence: Synthetic oligonucleotide
auauauuaucauaaugcca

SEQ ID NO: 120068 - RNA, 19 nt, Artificial Sequence
  Description of Artificial Sequence: Synthetic oligonucleotide
uauagagugaugacaccau

SEQ ID NO: 120069 - RNA, 19 nt, Artificial Sequence
  Description of Artificial Sequence: Synthetic oligonucleotide
ugugcucuucgguugacca

SEQ ID NO: 120070 - RNA, 19 nt, Artificial Sequence
  Description of Artificial Sequence: Synthetic oligonucleotide
gcugcguugacguaguugc

SEQ ID NO: 120071 - RNA, 19 nt, Artificial Sequence
  Description of Artificial Sequence: Synthetic oligonucleotide
ucucauauagagugaugac

SEQ ID NO: 120072 - RNA, 19 nt, Artificial Sequence
  Description of Artificial Sequence: Synthetic oligonucleotide
agaacgcgccgcuacggcc

SEQ ID NO: 120073 - RNA, 19 nt, Artificial Sequence
  Description of Artificial Sequence: Synthetic oligonucleotide
ugccggacaaauccaagca

SEQ ID NO: 120074 - RNA, 19 nt, Artificial Sequence
  Description of Artificial Sequence: Synthetic oligonucleotide
agcauacugacaauucuuc

SEQ ID NO: 120075 - RNA, 19 nt, Artificial Sequence
  Description of Artificial Sequence: Synthetic oligonucleotide
uuuucucgugguuccgggg

SEQ ID NO: 120076 - RNA, 19 nt, Artificial Sequence
  Description of Artificial Sequence: Synthetic oligonucleotide
uugacguaguugcugcucu

SEQ ID NO: 120077 - RNA, 19 nt, Artificial Sequence
  Description of Artificial Sequence: Synthetic oligonucleotide
gaugcccgcgaucacuccg

SEQ ID NO: 120078 - RNA, 19 nt, Artificial Sequence
  Description of Artificial Sequence: Synthetic oligonucleotide
uucgguugaccagauaucu

SEQ ID NO: 120079 - RNA, 19 nt, Artificial Sequence
  Description of Artificial Sequence: Synthetic oligonucleotide
ugucgucaggccaauauuu

SEQ ID NO: 120080 - RNA, 19 nt, Artificial Sequence
  Description of Artificial Sequence: Synthetic oligonucleotide
ugcauggguccugauauag

SEQ ID NO: 120081 - RNA, 19 nt, Artificial Sequence
  Description of Artificial Sequence: Synthetic oligonucleotide
ucacauauucggccagcag

SEQ ID NO: 120082 - RNA, 19 nt, Artificial Sequence
  Description of Artificial Sequence: Synthetic oligonucleotide
ucgucaggccaauauuugc

SEQ ID NO: 120083 - RNA, 19 nt, Artificial Sequence
  Description of Artificial Sequence: Synthetic oligonucleotide
agucggaguuuguugucac

SEQ ID NO: 120084 - RNA, 19 nt, Artificial Sequence
  Description of Artificial Sequence: Synthetic oligonucleotide
uguuaguccuugaaagcua

SEQ ID NO: 120085 - RNA, 19 nt, Artificial Sequence
  Description of Artificial Sequence: Synthetic oligonucleotide
gaugacaccauauguuugu

SEQ ID NO: 120086 - RNA, 19 nt, Artificial Sequence
  Description of Artificial Sequence: Synthetic oligonucleotide
aagaugcccgcgaucacuc

SEQ ID NO: 120087 - RNA, 19 nt, Artificial Sequence
  Description of Artificial Sequence: Synthetic oligonucleotide
guauguaguuccaggauac

SEQ ID NO: 120088 - RNA, 19 nt, Artificial Sequence
  Description of Artificial Sequence: Synthetic oligonucleotide
aucuauuagagugacuuua

SEQ ID NO: 120089 - RNA, 19 nt, Artificial Sequence
  Description of Artificial Sequence: Synthetic oligonucleotide
cacuccggcaauuuuaaca

SEQ ID NO: 120090 - RNA, 19 nt, Artificial Sequence
  Description of Artificial Sequence: Synthetic oligonucleotide
uaacuaccgacgugcagug

SEQ ID NO: 120091 - RNA, 19 nt, Artificial Sequence
  Description of Artificial Sequence: Synthetic oligonucleotide
acuaccgacgugcagugau

SEQ ID NO: 120092 - RNA, 19 nt, Artificial Sequence
  Description of Artificial Sequence: Synthetic oligonucleotide
aacgcugaaggcuguuuau

SEQ ID NO: 120093 - RNA, 19 nt, Artificial Sequence
  Description of Artificial Sequence: Synthetic oligonucleotide
ugauaucaaugacuaugaa

SEQ ID NO: 120094 - RNA, 19 nt, Artificial Sequence
  Description of Artificial Sequence: Synthetic oligonucleotide
gggucaaaggagcugacug

SEQ ID NO: 120095 - RNA, 19 nt, Artificial Sequence
  Description of Artificial Sequence: Synthetic oligonucleotide
aggcuguuuauagcugucc

SEQ ID NO: 120096 - RNA, 19 nt, Artificial Sequence
  Description of Artificial Sequence: Synthetic oligonucleotide
aacugcugaaccaugcgau

SEQ ID NO: 120097 - RNA, 19 nt, Artificial Sequence
  Description of Artificial Sequence: Synthetic oligonucleotide
ucgccagaagucuuugaca

SEQ ID NO: 120098 - RNA, 19 nt, Artificial Sequence
  Description of Artificial Sequence: Synthetic oligonucleotide
aguggcgugguaggggacc

SEQ ID NO: 120099 - RNA, 19 nt, Artificial Sequence
  Description of Artificial Sequence: Synthetic oligonucleotide
augccagguagcauucucc

SEQ ID NO: 120100 - RNA, 19 nt, Artificial Sequence
  Description of Artificial Sequence: Synthetic oligonucleotide
uccggaauucuucuuuaau

SEQ ID NO: 120101 - RNA, 19 nt, Artificial Sequence
  Description of Artificial Sequence: Synthetic oligonucleotide
uccacucgcagggugggcg

SEQ ID NO: 120102 - RNA, 19 nt, Artificial Sequence
  Description of Artificial Sequence: Synthetic oligonucleotide
ugucggagcaucucacaga

SEQ ID NO: 120103 - RNA, 19 nt, Artificial Sequence
  Description of Artificial Sequence: Synthetic oligonucleotide
ggaaggagcgcuuggacac

SEQ ID NO: 120104 - RNA, 19 nt, Artificial Sequence
  Description of Artificial Sequence: Synthetic oligonucleotide
acauauucggccagcagcu

SEQ ID NO: 120105 - RNA, 19 nt, Artificial Sequence
  Description of Artificial Sequence: Synthetic oligonucleotide
uacaguccuccacucgcag

SEQ ID NO: 120106 - RNA, 19 nt, Artificial Sequence
  Description of Artificial Sequence: Synthetic oligonucleotide
ugguuggauaaaucuauuu

SEQ ID NO: 120107 - RNA, 19 nt, Artificial Sequence
  Description of Artificial Sequence: Synthetic oligonucleotide
gauccggccagccagugaa

SEQ ID NO: 120108 - RNA, 19 nt, Artificial Sequence
  Description of Artificial Sequence: Synthetic oligonucleotide
aaggcacgucgguagccuc

SEQ ID NO: 120109 - RNA, 19 nt, Artificial Sequence
  Description of Artificial Sequence: Synthetic oligonucleotide
ugacccuucccacuuccac

SEQ ID NO: 120110 - RNA, 19 nt, Artificial Sequence
  Description of Artificial Sequence: Synthetic oligonucleotide
ucgguugaccagauaucug

SEQ ID NO: 120111 - RNA, 19 nt, Artificial Sequence
  Description of Artificial Sequence: Synthetic oligonucleotide
gacucuccuggaccgaagc

SEQ ID NO: 120112 - RNA, 19 nt, Artificial Sequence
  Description of Artificial Sequence: Synthetic oligonucleotide
aaggcuguuuauagcuguc

SEQ ID NO: 120113 - RNA, 19 nt, Artificial Sequence
  Description of Artificial Sequence: Synthetic oligonucleotide
ucugaucucccggauuuca

SEQ ID NO: 120114 - RNA, 19 nt, Artificial Sequence
  Description of Artificial Sequence: Synthetic oligonucleotide
cauaacuaccgacgugcag

SEQ ID NO: 120115 - RNA, 19 nt, Artificial Sequence
  Description of Artificial Sequence: Synthetic oligonucleotide
ggauacaggccaaagaaca

SEQ ID NO: 120116 - RNA, 19 nt, Artificial Sequence
  Description of Artificial Sequence: Synthetic oligonucleotide
ugcucuaacauggccggug

SEQ ID NO: 120117 - RNA, 19 nt, Artificial Sequence
  Description of Artificial Sequence: Synthetic oligonucleotide
ugaagauccuacugaugau

SEQ ID NO: 120118 - RNA, 19 nt, Artificial Sequence
  Description of Artificial Sequence: Synthetic oligonucleotide
cucgcaguguucucaugcc

SEQ ID NO: 120119 - RNA, 19 nt, Artificial Sequence
  Description of Artificial Sequence: Synthetic oligonucleotide
aaauccgcagacacaaauu

SEQ ID NO: 120120 - RNA, 19 nt, Artificial Sequence
  Description of Artificial Sequence: Synthetic oligonucleotide
guauugucagucugauuca

SEQ ID NO: 120121 - RNA, 19 nt, Artificial Sequence
  Description of Artificial Sequence: Synthetic oligonucleotide
gagcauaacuaccgacgug

SEQ ID NO: 120122 - RNA, 19 nt, Artificial Sequence
  Description of Artificial Sequence: Synthetic oligonucleotide
aaggagcgcuuggacacgg

SEQ ID NO: 120123 - RNA, 19 nt, Artificial Sequence
  Description of Artificial Sequence: Synthetic oligonucleotide
agucagccagaguucaagu

SEQ ID NO: 120124 - RNA, 19 nt, Artificial Sequence
  Description of Artificial Sequence: Synthetic oligonucleotide
acugcgucuuuguucauua

SEQ ID NO: 120125 - RNA, 19 nt, Artificial Sequence
  Description of Artificial Sequence: Synthetic oligonucleotide
aguggucauaugcaaugau

SEQ ID NO: 120126 - RNA, 19 nt, Artificial Sequence
  Description of Artificial Sequence: Synthetic oligonucleotide
uuuggaucugugacuccaa

SEQ ID NO: 120127 - RNA, 19 nt, Artificial Sequence
  Description of Artificial Sequence: Synthetic oligonucleotide
gaaggcuguuuauagcugu

SEQ ID NO: 120128 - RNA, 19 nt, Artificial Sequence
  Description of Artificial Sequence: Synthetic oligonucleotide
auagagugaugacaccaua

SEQ ID NO: 120129 - RNA, 19 nt, Artificial Sequence
  Description of Artificial Sequence: Synthetic oligonucleotide
uacacucaguuguaacaau

SEQ ID NO: 120130 - RNA, 19 nt, Artificial Sequence
  Description of Artificial Sequence: Synthetic oligonucleotide
ccacguuacauuucugagc

SEQ ID NO: 120131 - RNA, 19 nt, Artificial Sequence
  Description of Artificial Sequence: Synthetic oligonucleotide
uggaggagaucugccacgc

SEQ ID NO: 120132 - RNA, 19 nt, Artificial Sequence
  Description of Artificial Sequence: Synthetic oligonucleotide
augaugcucgcaguguucu

SEQ ID NO: 120133 - RNA, 19 nt, Artificial Sequence
  Description of Artificial Sequence: Synthetic oligonucleotide
uagucggaguuuguuguca

SEQ ID NO: 120134 - RNA, 19 nt, Artificial Sequence
  Description of Artificial Sequence: Synthetic oligonucleotide
uggugucggagcaucucac

SEQ ID NO: 120135 - RNA, 19 nt, Artificial Sequence
  Description of Artificial Sequence: Synthetic oligonucleotide
ugacucuccuggaccgaag

SEQ ID NO: 120136 - RNA, 19 nt, Artificial Sequence
  Description of Artificial Sequence: Synthetic oligonucleotide
acagaacgcgccgcuacgg

SEQ ID NO: 120137 - RNA, 19 nt, Artificial Sequence
  Description of Artificial Sequence: Synthetic oligonucleotide
uucaccugccggacaaauc

SEQ ID NO: 120138 - RNA, 19 nt, Artificial Sequence
  Description of Artificial Sequence: Synthetic oligonucleotide
cacagaacgcgccgcuacg

SEQ ID NO: 120139 - RNA, 19 nt, Artificial Sequence
  Description of Artificial Sequence: Synthetic oligonucleotide
uccacuuugguuggauaaa

SEQ ID NO: 120140 - RNA, 19 nt, Artificial Sequence
  Description of Artificial Sequence: Synthetic oligonucleotide
cauacugacaauucuucau

SEQ ID NO: 120141 - RNA, 19 nt, Artificial Sequence
  Description of Artificial Sequence: Synthetic oligonucleotide
aaaccccuuugcugugcug

SEQ ID NO: 120142 - RNA, 19 nt, Artificial Sequence
  Description of Artificial Sequence: Synthetic oligonucleotide
cagucagccagaguucaag

SEQ ID NO: 120143 - RNA, 19 nt, Artificial Sequence
  Description of Artificial Sequence: Synthetic oligonucleotide
acaucggccaucccaggaa

SEQ ID NO: 120144 - RNA, 19 nt, Artificial Sequence
  Description of Artificial Sequence: Synthetic oligonucleotide
gguugaccagauaucugcg

SEQ ID NO: 120145 - RNA, 19 nt, Artificial Sequence
  Description of Artificial Sequence: Synthetic oligonucleotide
uaucugcgcugcucuaaca

SEQ ID NO: 120146 - RNA, 19 nt, Artificial Sequence
  Description of Artificial Sequence: Synthetic oligonucleotide
uucauacgcuggcauggau

SEQ ID NO: 120147 - RNA, 19 nt, Artificial Sequence
  Description of Artificial Sequence: Synthetic oligonucleotide
uuacccuuugaguggucau

SEQ ID NO: 120148 - RNA, 19 nt, Artificial Sequence
  Description of Artificial Sequence: Synthetic oligonucleotide
aaugaacgcugaaggcugu

SEQ ID NO: 120149 - RNA, 19 nt, Artificial Sequence
  Description of Artificial Sequence: Synthetic oligonucleotide
gaacgcgccgcuacggccc

SEQ ID NO: 120150 - RNA, 19 nt, Artificial Sequence
  Description of Artificial Sequence: Synthetic oligonucleotide
ugaccauccugcggucugg

SEQ ID NO: 120151 - RNA, 19 nt, Artificial Sequence
  Description of Artificial Sequence: Synthetic oligonucleotide
ucgguagccucucgcuucu

SEQ ID NO: 120152 - RNA, 19 nt, Artificial Sequence
  Description of Artificial Sequence: Synthetic oligonucleotide
ugggcgucaccauguugag

SEQ ID NO: 120153 - RNA, 19 nt, Artificial Sequence
  Description of Artificial Sequence: Synthetic oligonucleotide
acguuacauuucugagcgg

SEQ ID NO: 120154 - RNA, 19 nt, Artificial Sequence
  Description of Artificial Sequence: Synthetic oligonucleotide
gucgguagccucucgcuuc

SEQ ID NO: 120155 - RNA, 19 nt, Artificial Sequence
  Description of Artificial Sequence: Synthetic oligonucleotide
gauaucugcgcugcucuaa

SEQ ID NO: 120156 - RNA, 19 nt, Artificial Sequence
  Description of Artificial Sequence: Synthetic oligonucleotide
cacgucgguagccucucgc

SEQ ID NO: 120157 - RNA, 19 nt, Artificial Sequence
  Description of Artificial Sequence: Synthetic oligonucleotide
gaaggaguauguaguucca

SEQ ID NO: 120158 - RNA, 19 nt, Artificial Sequence
  Description of Artificial Sequence: Synthetic oligonucleotide
gauauagucggaguuuguu

SEQ ID NO: 120159 - RNA, 19 nt, Artificial Sequence
  Description of Artificial Sequence: Synthetic oligonucleotide
caucagggcugcguugacg

SEQ ID NO: 120160 - RNA, 19 nt, Artificial Sequence
  Description of Artificial Sequence: Synthetic oligonucleotide
caucggccaucccaggaac

SEQ ID NO: 120161 - RNA, 19 nt, Artificial Sequence
  Description of Artificial Sequence: Synthetic oligonucleotide
augcagucagccagaguuc

SEQ ID NO: 120162 - RNA, 19 nt, Artificial Sequence
  Description of Artificial Sequence: Synthetic oligonucleotide
gacgugcagugauaaucca

SEQ ID NO: 120163 - RNA, 19 nt, Artificial Sequence
  Description of Artificial Sequence: Synthetic oligonucleotide
gccggacaaauccaagcag

SEQ ID NO: 120164 - RNA, 19 nt, Artificial Sequence
  Description of Artificial Sequence: Synthetic oligonucleotide
gguaaggcacgucgguagc

SEQ ID NO: 120165 - RNA, 19 nt, Artificial Sequence
  Description of Artificial Sequence: Synthetic oligonucleotide
guaaggcacgucgguagcc

SEQ ID NO: 120166 - RNA, 19 nt, Artificial Sequence
  Description of Artificial Sequence: Synthetic oligonucleotide
auaugauaacaaacagcaa

SEQ ID NO: 120167 - RNA, 19 nt, Artificial Sequence
  Description of Artificial Sequence: Synthetic oligonucleotide
cagaacgcgccgcuacggc

SEQ ID NO: 120168 - RNA, 19 nt, Artificial Sequence
  Description of Artificial Sequence: Synthetic oligonucleotide
gaacucacacacugcgucu

SEQ ID NO: 120169 - RNA, 19 nt, Artificial Sequence
  Description of Artificial Sequence: Synthetic oligonucleotide
guaggugaucucauauaga

SEQ ID NO: 120170 - RNA, 19 nt, Artificial Sequence
  Description of Artificial Sequence: Synthetic oligonucleotide
cuaacauggccgguggcga

SEQ ID NO: 120171 - RNA, 19 nt, Artificial Sequence
  Description of Artificial Sequence: Synthetic oligonucleotide
uggcgucauggaugaauac

SEQ ID NO: 120172 - RNA, 19 nt, Artificial Sequence
  Description of Artificial Sequence: Synthetic oligonucleotide
gauggcgucauggaugaau

SEQ ID NO: 120173 - RNA, 19 nt, Artificial Sequence
  Description of Artificial Sequence: Synthetic oligonucleotide
cuugaguuugucugugggu

SEQ ID NO: 120174 - RNA, 19 nt, Artificial Sequence
  Description of Artificial Sequence: Synthetic oligonucleotide
cuggugucggagcaucuca

SEQ ID NO: 120175 - RNA, 19 nt, Artificial Sequence
  Description of Artificial Sequence: Synthetic oligonucleotide
caccguauugucagucuga

SEQ ID NO: 120176 - RNA, 19 nt, Artificial Sequence
  Description of Artificial Sequence: Synthetic oligonucleotide
uaccgacgugcagugauaa

SEQ ID NO: 120177 - RNA, 19 nt, Artificial Sequence
  Description of Artificial Sequence: Synthetic oligonucleotide
aaucuauuucugggucaaa

SEQ ID NO: 120178 - RNA, 19 nt, Artificial Sequence
  Description of Artificial Sequence: Synthetic oligonucleotide
accguauugucagucugau

SEQ ID NO: 120179 - RNA, 19 nt, Artificial Sequence
  Description of Artificial Sequence: Synthetic oligonucleotide
cuucaccgccauuguaguc

SEQ ID NO: 120180 - RNA, 19 nt, Artificial Sequence
  Description of Artificial Sequence: Synthetic oligonucleotide
agucgccagaagucuuuga

SEQ ID NO: 120181 - RNA, 19 nt, Artificial Sequence
  Description of Artificial Sequence: Synthetic oligonucleotide
acccuuugaguggucauau

SEQ ID NO: 120182 - RNA, 19 nt, Artificial Sequence
  Description of Artificial Sequence: Synthetic oligonucleotide
ggcgucauggaugaauaca

SEQ ID NO: 120183 - RNA, 19 nt, Artificial Sequence
  Description of Artificial Sequence: Synthetic oligonucleotide
cuugacuuugugguaggaa

SEQ ID NO: 120184 - RNA, 19 nt, Artificial Sequence
  Description of Artificial Sequence: Synthetic oligonucleotide
cccguuggcucuacuagcc

SEQ ID NO: 120185 - RNA, 19 nt, Artificial Sequence
  Description of Artificial Sequence: Synthetic oligonucleotide
aggagaucugccacgcgga

SEQ ID NO: 120186 - RNA, 19 nt, Artificial Sequence
  Description of Artificial Sequence: Synthetic oligonucleotide
cugcugaaccaugcgauga

SEQ ID NO: 120187 - RNA, 19 nt, Artificial Sequence
  Description of Artificial Sequence: Synthetic oligonucleotide
acgucuugacuuuguggua

SEQ ID NO: 120188 - RNA, 19 nt, Artificial Sequence
  Description of Artificial Sequence: Synthetic oligonucleotide
augcccgcgaucacuccgg

SEQ ID NO: 120189 - RNA, 19 nt, Artificial Sequence
  Description of Artificial Sequence: Synthetic oligonucleotide
gaguccggaauucuucuuu

SEQ ID NO: 120190 - RNA, 19 nt, Artificial Sequence
  Description of Artificial Sequence: Synthetic oligonucleotide
ccgacgugcagugauaauc

SEQ ID NO: 120191 - RNA, 19 nt, Artificial Sequence
  Description of Artificial Sequence: Synthetic oligonucleotide
cugcgucuuuguucauuac

SEQ ID NO: 120192 - RNA, 19 nt, Artificial Sequence
  Description of Artificial Sequence: Synthetic oligonucleotide
cacgggugugucccuguac

SEQ ID NO: 120193 - RNA, 19 nt, Artificial Sequence
  Description of Artificial Sequence: Synthetic oligonucleotide
acgugcagugauaauccaa

SEQ ID NO: 120194 - RNA, 19 nt, Artificial Sequence
  Description of Artificial Sequence: Synthetic oligonucleotide
guugucaccuuuccagcau

SEQ ID NO: 120195 - RNA, 19 nt, Artificial Sequence
  Description of Artificial Sequence: Synthetic oligonucleotide
gcacagaacgcgccgcuac

SEQ ID NO: 120196 - RNA, 19 nt, Artificial Sequence
  Description of Artificial Sequence: Synthetic oligonucleotide
auccuacugaugaugucuu

SEQ ID NO: 120197 - RNA, 19 nt, Artificial Sequence
  Description of Artificial Sequence: Synthetic oligonucleotide
acuagccgcuugguaauaa

SEQ ID NO: 120198 - RNA, 19 nt, Artificial Sequence
  Description of Artificial Sequence: Synthetic oligonucleotide
gucaccguauugucagucu

SEQ ID NO: 120199 - RNA, 19 nt, Artificial Sequence
  Description of Artificial Sequence: Synthetic oligonucleotide
ggaggagaucugccacgcg

SEQ ID NO: 120200 - RNA, 19 nt, Artificial Sequence
  Description of Artificial Sequence: Synthetic oligonucleotide
aacuaccgacgugcaguga

SEQ ID NO: 120201 - RNA, 19 nt, Artificial Sequence
  Description of Artificial Sequence: Synthetic oligonucleotide
cgucuugacuuugugguag

SEQ ID NO: 120202 - RNA, 19 nt, Artificial Sequence
  Description of Artificial Sequence: Synthetic oligonucleotide
ugccacgcggauggccggg

SEQ ID NO: 120203 - RNA, 19 nt, Artificial Sequence
  Description of Artificial Sequence: Synthetic oligonucleotide
cuauuagagugacuuuaau

SEQ ID NO: 120204 - RNA, 19 nt, Artificial Sequence
  Description of Artificial Sequence: Synthetic oligonucleotide
cuaaauccgcagacacaaa

SEQ ID NO: 120205 - RNA, 19 nt, Artificial Sequence
  Description of Artificial Sequence: Synthetic oligonucleotide
gacguaguugcugcucucu

SEQ ID NO: 120206 - RNA, 19 nt, Artificial Sequence
  Description of Artificial Sequence: Synthetic oligonucleotide
ggugucggagcaucucaca

SEQ ID NO: 120207 - RNA, 19 nt, Artificial Sequence
  Description of Artificial Sequence: Synthetic oligonucleotide
ugcccgcgaucacuccggc

SEQ ID NO: 120208 - RNA, 19 nt, Artificial Sequence
  Description of Artificial Sequence: Synthetic oligonucleotide
cacggcgaacguucuuauc

SEQ ID NO: 120209 - RNA, 19 nt, Artificial Sequence
  Description of Artificial Sequence: Synthetic oligonucleotide
guccggaauucuucuuuaa

SEQ ID NO: 120210 - RNA, 19 nt, Artificial Sequence
  Description of Artificial Sequence: Synthetic oligonucleotide
ggcugcguugacguaguug

SEQ ID NO: 120211 - RNA, 19 nt, Artificial Sequence
  Description of Artificial Sequence: Synthetic oligonucleotide
gaccagucgccagaagucu

SEQ ID NO: 120212 - RNA, 19 nt, Artificial Sequence
  Description of Artificial Sequence: Synthetic oligonucleotide
cuacuagccgcuugguaau

SEQ ID NO: 120213 - RNA, 19 nt, Artificial Sequence
  Description of Artificial Sequence: Synthetic oligonucleotide
acgcugaaggcuguuuaua

SEQ ID NO: 120214 - RNA, 19 nt, Artificial Sequence
  Description of Artificial Sequence: Synthetic oligonucleotide
ggcgaacguucuuaucaca

SEQ ID NO: 120215 - RNA, 19 nt, Artificial Sequence
  Description of Artificial Sequence: Synthetic oligonucleotide
ucccuguacaucggccauc

SEQ ID NO: 120216 - RNA, 19 nt, Artificial Sequence
  Description of Artificial Sequence: Synthetic oligonucleotide
ccccguuggcucuacuagc

SEQ ID NO: 120217 - RNA, 19 nt, Artificial Sequence
  Description of Artificial Sequence: Synthetic oligonucleotide
accgacgugcagugauaau

SEQ ID NO: 120218 - RNA, 19 nt, Artificial Sequence
  Description of Artificial Sequence: Synthetic oligonucleotide
caccugccggacaaaucca

SEQ ID NO: 120219 - RNA, 19 nt, Artificial Sequence
  Description of Artificial Sequence: Synthetic oligonucleotide
caagaugcccgcgaucacu

SEQ ID NO: 120220 - RNA, 19 nt, Artificial Sequence
  Description of Artificial Sequence: Synthetic oligonucleotide
gaugaccauccugcggucu

SEQ ID NO: 120221 - RNA, 19 nt, Artificial Sequence
  Description of Artificial Sequence: Synthetic oligonucleotide
ugcggucuggaggcauugu

SEQ ID NO: 120222 - RNA, 19 nt, Artificial Sequence
  Description of Artificial Sequence: Synthetic oligonucleotide
cuccaucgauggugaugag

SEQ ID NO: 120223 - RNA, 19 nt, Artificial Sequence
  Description of Artificial Sequence: Synthetic oligonucleotide
ccguuggcucuacuagccg

SEQ ID NO: 120224 - RNA, 19 nt, Artificial Sequence
  Description of Artificial Sequence: Synthetic oligonucleotide
uacuagccgcuugguaaua

SEQ ID NO: 120225 - RNA, 19 nt, Artificial Sequence
  Description of Artificial Sequence: Synthetic oligonucleotide
aggcacgucgguagccucu

SEQ ID NO: 120226 - RNA, 19 nt, Artificial Sequence
  Description of Artificial Sequence: Synthetic oligonucleotide
cuaccgacgugcagugaua

SEQ ID NO: 120227 - RNA, 19 nt, Artificial Sequence
  Description of Artificial Sequence: Synthetic oligonucleotide
cccgcgaucacuccggcaa

SEQ ID NO: 120228 - RNA, 19 nt, Artificial Sequence
  Description of Artificial Sequence: Synthetic oligonucleotide
ccagaggacgucuugacuu

SEQ ID NO: 120229 - RNA, 19 nt, Artificial Sequence
  Description of Artificial Sequence: Synthetic oligonucleotide
agaccugauuugggaggca

SEQ ID NO: 120230 - RNA, 19 nt, Artificial Sequence
  Description of Artificial Sequence: Synthetic oligonucleotide
ggaaaagcuuuggaucugu

SEQ ID NO: 120231 - RNA, 19 nt, Artificial Sequence
  Description of Artificial Sequence: Synthetic oligonucleotide
cagucugguaaggcacguc

SEQ ID NO: 120232 - RNA, 19 nt, Artificial Sequence
  Description of Artificial Sequence: Synthetic oligonucleotide
uuggcucuacuagccgcuu

SEQ ID NO: 120233 - RNA, 19 nt, Artificial Sequence
  Description of Artificial Sequence: Synthetic oligonucleotide
gguaggggaccccgugauc

SEQ ID NO: 120234 - RNA, 19 nt, Artificial Sequence
  Description of Artificial Sequence: Synthetic oligonucleotide
gcgucauggaugaauacau

SEQ ID NO: 120235 - RNA, 19 nt, Artificial Sequence
  Description of Artificial Sequence: Synthetic oligonucleotide
gucugaucucccggauuuc

SEQ ID NO: 120236 - RNA, 19 nt, Artificial Sequence
  Description of Artificial Sequence: Synthetic oligonucleotide
acgcggauggccgggugaa

SEQ ID NO: 120237 - RNA, 19 nt, Artificial Sequence
  Description of Artificial Sequence: Synthetic oligonucleotide
uggccgggugaagcugccc

SEQ ID NO: 120238 - RNA, 19 nt, Artificial Sequence
  Description of Artificial Sequence: Synthetic oligonucleotide
cggcgaacguucuuaucac

SEQ ID NO: 120239 - RNA, 19 nt, Artificial Sequence
  Description of Artificial Sequence: Synthetic oligonucleotide
cagaggacgucuugacuuu

SEQ ID NO: 120240 - RNA, 19 nt, Artificial Sequence
  Description of Artificial Sequence: Synthetic oligonucleotide
gcgaacguucuuaucacau

SEQ ID NO: 120241 - RNA, 19 nt, Artificial Sequence
  Description of Artificial Sequence: Synthetic oligonucleotide
guuuccccguuggcucuac

SEQ ID NO: 120242 - RNA, 19 nt, Artificial Sequence
  Description of Artificial Sequence: Synthetic oligonucleotide
gcacgucgguagccucucg

SEQ ID NO: 120243 - RNA, 19 nt, Artificial Sequence
  Description of Artificial Sequence: Synthetic oligonucleotide
gcggucuggaggcauugua

SEQ ID NO: 120244 - RNA, 19 nt, Artificial Sequence
  Description of Artificial Sequence: Synthetic oligonucleotide
cacacacugcgucuuuguu

SEQ ID NO: 120245 - RNA, 19 nt, Artificial Sequence
  Description of Artificial Sequence: Synthetic oligonucleotide
gugcgaugcuacaguccuc

SEQ ID NO: 120246 - RNA, 19 nt, Artificial Sequence
  Description of Artificial Sequence: Synthetic oligonucleotide
ccggcaauuuuaacagugu

SEQ ID NO: 120247 - RNA, 19 nt, Artificial Sequence
  Description of Artificial Sequence: Synthetic oligonucleotide
gcaugauaucaaugacuau

SEQ ID NO: 120248 - RNA, 19 nt, Artificial Sequence
  Description of Artificial Sequence: Synthetic oligonucleotide
caguguggucuguuuguuu

SEQ ID NO: 120249 - RNA, 19 nt, Artificial Sequence
  Description of Artificial Sequence: Synthetic oligonucleotide
cacucgcagggugggcguc

SEQ ID NO: 120250 - RNA, 19 nt, Artificial Sequence
  Description of Artificial Sequence: Synthetic oligonucleotide
ggcacgucgguagccucuc

SEQ ID NO: 120251 - RNA, 19 nt, Artificial Sequence
  Description of Artificial Sequence: Synthetic oligonucleotide
ggagaucugccacgcggau

SEQ ID NO: 120252 - RNA, 19 nt, Artificial Sequence
  Description of Artificial Sequence: Synthetic oligonucleotide
gaccugcauuaggugggcu

SEQ ID NO: 120253 - RNA, 19 nt, Artificial Sequence
  Description of Artificial Sequence: Synthetic oligonucleotide
ggguccugauauagucgga

SEQ ID NO: 120254 - RNA, 19 nt, Artificial Sequence
  Description of Artificial Sequence: Synthetic oligonucleotide
caccgccauuguaguccuc

SEQ ID NO: 120255 - RNA, 19 nt, Artificial Sequence
  Description of Artificial Sequence: Synthetic oligonucleotide
ccuuacccuuugagugguc

SEQ ID NO: 120256 - RNA, 19 nt, Artificial Sequence
  Description of Artificial Sequence: Synthetic oligonucleotide
cgucauggaugaauacaua

SEQ ID NO: 120257 - RNA, 19 nt, Artificial Sequence
  Description of Artificial Sequence: Synthetic oligonucleotide
gggcgucaccauguugaga

SEQ ID NO: 120258 - RNA, 19 nt, Artificial Sequence
  Description of Artificial Sequence: Synthetic oligonucleotide
ggcgaggaggacagucucu

SEQ ID NO: 120259 - RNA, 19 nt, Artificial Sequence
  Description of Artificial Sequence: Synthetic oligonucleotide
gcgcuuggacacgggugug

SEQ ID NO: 120260 - RNA, 19 nt, Artificial Sequence
  Description of Artificial Sequence: Synthetic oligonucleotide
ccacuuugguuggauaaau

SEQ ID NO: 120261 - RNA, 19 nt, Artificial Sequence
  Description of Artificial Sequence: Synthetic oligonucleotide
ccccgugauccggccagcc

SEQ ID NO: 120262 - RNA, 19 nt, Artificial Sequence
  Description of Artificial Sequence: Synthetic oligonucleotide
gggcaggagugcgaugcua

SEQ ID NO: 120263 - RNA, 19 nt, Artificial Sequence
  Description of Artificial Sequence: Synthetic oligonucleotide
ccacgcggauggccgggug

SEQ ID NO: 120264 - RNA, 19 nt, Artificial Sequence
  Description of Artificial Sequence: Synthetic oligonucleotide
gguuuccccguuggcucua

SEQ ID NO: 120265 - RNA, 19 nt, Artificial Sequence
  Description of Artificial Sequence: Synthetic oligonucleotide
ccacucgcagggugggcgu

SEQ ID NO: 120266 - RNA, 19 nt, Artificial Sequence
  Description of Artificial Sequence: Synthetic oligonucleotide
ccguauugucagucugauu

SEQ ID NO: 120267 - RNA, 19 nt, Artificial Sequence
  Description of Artificial Sequence: Synthetic oligonucleotide
cgucgguagccucucgcuu

SEQ ID NO: 120268 - RNA, 19 nt, Artificial Sequence
  Description of Artificial Sequence: Synthetic oligonucleotide
ccgcgaucacuccggcaau

SEQ ID NO: 120269 - RNA, 19 nt, Artificial Sequence
  Description of Artificial Sequence: Synthetic oligonucleotide
gggcugcguugacguaguu

SEQ ID NO: 120270 - RNA, 19 nt, Artificial Sequence
  Description of Artificial Sequence: Synthetic oligonucleotide
cgcgaucacuccggcaauu

SEQ ID NO: 120271 - RNA, 19 nt, Artificial Sequence
  Description of Artificial Sequence: Synthetic oligonucleotide
acuauaaauacucucuuac

SEQ ID NO: 120272 - RNA, 19 nt, Artificial Sequence
  Description of Artificial Sequence: Synthetic oligonucleotide
aaguucucacuauaaauac

SEQ ID NO: 120273 - RNA, 19 nt, Artificial Sequence
  Description of Artificial Sequence: Synthetic oligonucleotide
uugaauacuucauaugggg

SEQ ID NO: 120274 - RNA, 19 nt, Artificial Sequence
  Description of Artificial Sequence: Synthetic oligonucleotide
uaucaaucaggcuaggagg

SEQ ID NO: 120275 - RNA, 19 nt, Artificial Sequence
  Description of Artificial Sequence: Synthetic oligonucleotide
ugagcauuaacucuuccag

SEQ ID NO: 120276 - RNA, 19 nt, Artificial Sequence
  Description of Artificial Sequence: Synthetic oligonucleotide
gauacaaagccauuuggcc

SEQ ID NO: 120277 - RNA, 19 nt, Artificial Sequence
  Description of Artificial Sequence: Synthetic oligonucleotide
ugaagcgacagguagaccc

SEQ ID NO: 120278 - RNA, 19 nt, Artificial Sequence
  Description of Artificial Sequence: Synthetic oligonucleotide
accaacauagcauaaagga

SEQ ID NO: 120279 - RNA, 19 nt, Artificial Sequence
  Description of Artificial Sequence: Synthetic oligonucleotide
cucguuagaauuauguacc

SEQ ID NO: 120280 - RNA, 19 nt, Artificial Sequence
  Description of Artificial Sequence: Synthetic oligonucleotide
uuagaugcuaaaaggcagg

SEQ ID NO: 120281 - RNA, 19 nt, Artificial Sequence
  Description of Artificial Sequence: Synthetic oligonucleotide
guugguacagguaaggugg

SEQ ID NO: 120282 - RNA, 19 nt, Artificial Sequence
  Description of Artificial Sequence: Synthetic oligonucleotide
uguuaagauagcuggagug

SEQ ID NO: 120283 - RNA, 19 nt, Artificial Sequence
  Description of Artificial Sequence: Synthetic oligonucleotide
uacaauguagugagguugg

SEQ ID NO: 120284 - RNA, 19 nt, Artificial Sequence
  Description of Artificial Sequence: Synthetic oligonucleotide
caagcaauggaccucauug

SEQ ID NO: 120285 - RNA, 19 nt, Artificial Sequence
  Description of Artificial Sequence: Synthetic oligonucleotide
ucuauguagauaauauuuc

SEQ ID NO: 120286 - RNA, 19 nt, Artificial Sequence
  Description of Artificial Sequence: Synthetic oligonucleotide
aucuguuagauauggauug

SEQ ID NO: 120287 - RNA, 19 nt, Artificial Sequence
  Description of Artificial Sequence: Synthetic oligonucleotide
agauagugcuaucuuuugc

SEQ ID NO: 120288 - RNA, 19 nt, Artificial Sequence
  Description of Artificial Sequence: Synthetic oligonucleotide
uuagcuaccaggugcaaug

SEQ ID NO: 120289 - RNA, 19 nt, Artificial Sequence
  Description of Artificial Sequence: Synthetic oligonucleotide
ucaagcuacucauuccugg

SEQ ID NO: 120290 - RNA, 19 nt, Artificial Sequence
  Description of Artificial Sequence: Synthetic oligonucleotide
agggauaucaaucaggcua

SEQ ID NO: 120291 - RNA, 19 nt, Artificial Sequence
  Description of Artificial Sequence: Synthetic oligonucleotide
uguuagauauggauugccc

SEQ ID NO: 120292 - RNA, 19 nt, Artificial Sequence
  Description of Artificial Sequence: Synthetic oligonucleotide
aaauguucaguaagggaac

SEQ ID NO: 120293 - RNA, 19 nt, Artificial Sequence
  Description of Artificial Sequence: Synthetic oligonucleotide
uggucagaacauaagacga

SEQ ID NO: 120294 - RNA, 19 nt, Artificial Sequence
  Description of Artificial Sequence: Synthetic oligonucleotide
cuauauuucauaggcaagc

SEQ ID NO: 120295 - RNA, 19 nt, Artificial Sequence
  Description of Artificial Sequence: Synthetic oligonucleotide
auauuucauaggcaagccg

SEQ ID NO: 120296 - RNA, 19 nt, Artificial Sequence
  Description of Artificial Sequence: Synthetic oligonucleotide
uagauuaggaauggaacag

SEQ ID NO: 120297 - RNA, 19 nt, Artificial Sequence
  Description of Artificial Sequence: Synthetic oligonucleotide
guacuuagcuaccaggugc

SEQ ID NO: 120298 - RNA, 19 nt, Artificial Sequence
  Description of Artificial Sequence: Synthetic oligonucleotide
aguagauucaaguccauua

SEQ ID NO: 120299 - RNA, 19 nt, Artificial Sequence
  Description of Artificial Sequence: Synthetic oligonucleotide
aaagcacuagcuuggugug

SEQ ID NO: 120300 - RNA, 19 nt, Artificial Sequence
  Description of Artificial Sequence: Synthetic oligonucleotide
uuccucguuagaauuaugu

SEQ ID NO: 120301 - RNA, 19 nt, Artificial Sequence
  Description of Artificial Sequence: Synthetic oligonucleotide
auuagaugcuaaaaggcag

SEQ ID NO: 120302 - RNA, 19 nt, Artificial Sequence
  Description of Artificial Sequence: Synthetic oligonucleotide
aaacugguaaccaugcaga

SEQ ID NO: 120303 - RNA, 19 nt, Artificial Sequence
  Description of Artificial Sequence: Synthetic oligonucleotide
ucuuacagaucaaccagac

SEQ ID NO: 120304 - RNA, 19 nt, Artificial Sequence
  Description of Artificial Sequence: Synthetic oligonucleotide
ucauaggcaagccguauac

SEQ ID NO: 120305 - RNA, 19 nt, Artificial Sequence
  Description of Artificial Sequence: Synthetic oligonucleotide
uguacuuagcuaccaggug

SEQ ID NO: 120306 - RNA, 19 nt, Artificial Sequence
  Description of Artificial Sequence: Synthetic oligonucleotide
agaucaaccagacuugcaa

SEQ ID NO: 120307 - RNA, 19 nt, Artificial Sequence
  Description of Artificial Sequence: Synthetic oligonucleotide
uucacaaguagagcuauug

SEQ ID NO: 120308 - RNA, 19 nt, Artificial Sequence
  Description of Artificial Sequence: Synthetic oligonucleotide
uuacaucacuguuaguugu

SEQ ID NO: 120309 - RNA, 19 nt, Artificial Sequence
  Description of Artificial Sequence: Synthetic oligonucleotide
cuuaguguacuuguggcag

SEQ ID NO: 120310 - RNA, 19 nt, Artificial Sequence
  Description of Artificial Sequence: Synthetic oligonucleotide
ucuuagagggaagacuucc

SEQ ID NO: 120311 - RNA, 19 nt, Artificial Sequence
  Description of Artificial Sequence: Synthetic oligonucleotide
ugcagugauaucaggggug

SEQ ID NO: 120312 - RNA, 19 nt, Artificial Sequence
  Description of Artificial Sequence: Synthetic oligonucleotide
ucagagguaagcgucaggu

SEQ ID NO: 120313 - RNA, 19 nt, Artificial Sequence
  Description of Artificial Sequence: Synthetic oligonucleotide
ugcuaaaaggcagguauag

SEQ ID NO: 120314 - RNA, 19 nt, Artificial Sequence
  Description of Artificial Sequence: Synthetic oligonucleotide
agucaagcuacucauuccu

SEQ ID NO: 120315 - RNA, 19 nt, Artificial Sequence
  Description of Artificial Sequence: Synthetic oligonucleotide
agaacaagcgacugcccuc

SEQ ID NO: 120316 - RNA, 19 nt, Artificial Sequence
  Description of Artificial Sequence: Synthetic oligonucleotide
ucaacuagaucgcuagauc

SEQ ID NO: 120317 - RNA, 19 nt, Artificial Sequence
  Description of Artificial Sequence: Synthetic oligonucleotide
ucacaaguagagcuauuga

SEQ ID NO: 120318 - RNA, 19 nt, Artificial Sequence
  Description of Artificial Sequence: Synthetic oligonucleotide
acuagaucgcuagaucuac

SEQ ID NO: 120319 - RNA, 19 nt, Artificial Sequence
  Description of Artificial Sequence: Synthetic oligonucleotide
acucucuuacagaucaacc

SEQ ID NO: 120320 - RNA, 19 nt, Artificial Sequence
  Description of Artificial Sequence: Synthetic oligonucleotide
acaacggaaugccaccccg

SEQ ID NO: 120321 - RNA, 19 nt, Artificial Sequence
  Description of Artificial Sequence: Synthetic oligonucleotide
uagaacaagcgacugcccu

SEQ ID NO: 120322 - RNA, 19 nt, Artificial Sequence
  Description of Artificial Sequence: Synthetic oligonucleotide
agugauaucaggggugguc

SEQ ID NO: 120323 - RNA, 19 nt, Artificial Sequence
  Description of Artificial Sequence: Synthetic oligonucleotide
gauagugcuaucuuuugcu

SEQ ID NO: 120324 - RNA, 19 nt, Artificial Sequence
  Description of Artificial Sequence: Synthetic oligonucleotide
uaauauacuggcugcuuaa

SEQ ID NO: 120325 - RNA, 19 nt, Artificial Sequence
  Description of Artificial Sequence: Synthetic oligonucleotide
agggcaauccuuaauguag

SEQ ID NO: 120326 - RNA, 19 nt, Artificial Sequence
  Description of Artificial Sequence: Synthetic oligonucleotide
aucaaucaggcuaggaggg

SEQ ID NO: 120327 - RNA, 19 nt, Artificial Sequence
  Description of Artificial Sequence: Synthetic oligonucleotide
cugagggcaauccuuaaug

SEQ ID NO: 120328 - RNA, 19 nt, Artificial Sequence
  Description of Artificial Sequence: Synthetic oligonucleotide
auagcuggagugcagggga

SEQ ID NO: 120329 - RNA, 19 nt, Artificial Sequence
  Description of Artificial Sequence: Synthetic oligonucleotide
uacuuagcuaccaggugca

SEQ ID NO: 120330 - RNA, 19 nt, Artificial Sequence
  Description of Artificial Sequence: Synthetic oligonucleotide
auuaggaauggaacaggac

SEQ ID NO: 120331 - RNA, 19 nt, Artificial Sequence
  Description of Artificial Sequence: Synthetic oligonucleotide
aaccagacuugcaaaacug

SEQ ID NO: 120332 - RNA, 19 nt, Artificial Sequence
  Description of Artificial Sequence: Synthetic oligonucleotide
auauagauuaggaauggaa

SEQ ID NO: 120333 - RNA, 19 nt, Artificial Sequence
  Description of Artificial Sequence: Synthetic oligonucleotide
uagugcuaucuuuugcuug

SEQ ID NO: 120334 - RNA, 19 nt, Artificial Sequence
  Description of Artificial Sequence: Synthetic oligonucleotide
auagcauaaaggauuacaa

SEQ ID NO: 120335 - RNA, 19 nt, Artificial Sequence
  Description of Artificial Sequence: Synthetic oligonucleotide
ucgcuagaucuacugacug

SEQ ID NO: 120336 - RNA, 19 nt, Artificial Sequence
  Description of Artificial Sequence: Synthetic oligonucleotide
ccucguuagaauuauguac

SEQ ID NO: 120337 - RNA, 19 nt, Artificial Sequence
  Description of Artificial Sequence: Synthetic oligonucleotide
uucuuagcugaauguacac

SEQ ID NO: 120338 - RNA, 19 nt, Artificial Sequence
  Description of Artificial Sequence: Synthetic oligonucleotide
ggauuaaacuuuuguuuag

SEQ ID NO: 120339 - RNA, 19 nt, Artificial Sequence
  Description of Artificial Sequence: Synthetic oligonucleotide
cacacaacggaaugccacc

SEQ ID NO: 120340 - RNA, 19 nt, Artificial Sequence
  Description of Artificial Sequence: Synthetic oligonucleotide
uuaucauguuguccacuga

SEQ ID NO: 120341 - RNA, 19 nt, Artificial Sequence
  Description of Artificial Sequence: Synthetic oligonucleotide
ucguuagaauuauguacca

SEQ ID NO: 120342 - RNA, 19 nt, Artificial Sequence
  Description of Artificial Sequence: Synthetic oligonucleotide
uugguacggugucaggccc

SEQ ID NO: 120343 - RNA, 19 nt, Artificial Sequence
  Description of Artificial Sequence: Synthetic oligonucleotide
ucuguuagauauggauugc

SEQ ID NO: 120344 - RNA, 19 nt, Artificial Sequence
  Description of Artificial Sequence: Synthetic oligonucleotide
ggauauagauuaggaaugg

SEQ ID NO: 120345 - RNA, 19 nt, Artificial Sequence
  Description of Artificial Sequence: Synthetic oligonucleotide
cccucaaguauauacaaac

SEQ ID NO: 120346 - RNA, 19 nt, Artificial Sequence
  Description of Artificial Sequence: Synthetic oligonucleotide
aacugguaaccaugcagaa

SEQ ID NO: 120347 - RNA, 19 nt, Artificial Sequence
  Description of Artificial Sequence: Synthetic oligonucleotide
cacaaguagagcuauugaa

SEQ ID NO: 120348 - RNA, 19 nt, Artificial Sequence
  Description of Artificial Sequence: Synthetic oligonucleotide
ucgugucgauggcagacag

SEQ ID NO: 120349 - RNA, 19 nt, Artificial Sequence
  Description of Artificial Sequence: Synthetic oligonucleotide
acugauaacuccccuuaaa

SEQ ID NO: 120350 - RNA, 19 nt, Artificial Sequence
  Description of Artificial Sequence: Synthetic oligonucleotide
agcuauugaauacuucaua

SEQ ID NO: 120351 - RNA, 19 nt, Artificial Sequence
  Description of Artificial Sequence: Synthetic oligonucleotide
uccucguuagaauuaugua

SEQ ID NO: 120352 - RNA, 19 nt, Artificial Sequence
  Description of Artificial Sequence: Synthetic oligonucleotide
uacucucuuacagaucaac

SEQ ID NO: 120353 - RNA, 19 nt, Artificial Sequence
  Description of Artificial Sequence: Synthetic oligonucleotide
uucauaggcaagccguaua

SEQ ID NO: 120354 - RNA, 19 nt, Artificial Sequence
  Description of Artificial Sequence: Synthetic oligonucleotide
cuggucagauacauccaag

SEQ ID NO: 120355 - RNA, 19 nt, Artificial Sequence
  Description of Artificial Sequence: Synthetic oligonucleotide
ggggacuguacuuagcuac

SEQ ID NO: 120356 - RNA, 19 nt, Artificial Sequence
  Description of Artificial Sequence: Synthetic oligonucleotide
cuguuagauauggauugcc

SEQ ID NO: 120357 - RNA, 19 nt, Artificial Sequence
  Description of Artificial Sequence: Synthetic oligonucleotide
uugcaaaacugggucuagg

SEQ ID NO: 120358 - RNA, 19 nt, Artificial Sequence
  Description of Artificial Sequence: Synthetic oligonucleotide
auaagacgaggacaugaaa

SEQ ID NO: 120359 - RNA, 19 nt, Artificial Sequence
  Description of Artificial Sequence: Synthetic oligonucleotide
gaucaaccagacuugcaaa

SEQ ID NO: 120360 - RNA, 19 nt, Artificial Sequence
  Description of Artificial Sequence: Synthetic oligonucleotide
acacauagcauuguuuaaa

SEQ ID NO: 120361 - RNA, 19 nt, Artificial Sequence
  Description of Artificial Sequence: Synthetic oligonucleotide
ugugaggccuccucaaaua

SEQ ID NO: 120362 - RNA, 19 nt, Artificial Sequence
  Description of Artificial Sequence: Synthetic oligonucleotide
cugauaacuccccuuaaaa

SEQ ID NO: 120363 - RNA, 19 nt, Artificial Sequence
  Description of Artificial Sequence: Synthetic oligonucleotide
gaucacaaauucagcaguc

SEQ ID NO: 120364 - RNA, 19 nt, Artificial Sequence
  Description of Artificial Sequence: Synthetic oligonucleotide
gacccucaaguauauacaa

SEQ ID NO: 120365 - RNA, 19 nt, Artificial Sequence
  Description of Artificial Sequence: Synthetic oligonucleotide
caagcgacugcccucugug

SEQ ID NO: 120366 - RNA, 19 nt, Artificial Sequence
  Description of Artificial Sequence: Synthetic oligonucleotide
uagugagguuggauuaaac

SEQ ID NO: 120367 - RNA, 19 nt, Artificial Sequence
  Description of Artificial Sequence: Synthetic oligonucleotide
guacuuguggcagauacaa

SEQ ID NO: 120368 - RNA, 19 nt, Artificial Sequence
  Description of Artificial Sequence: Synthetic oligonucleotide
gucugagaaauguucagua

SEQ ID NO: 120369 - RNA, 19 nt, Artificial Sequence
  Description of Artificial Sequence: Synthetic oligonucleotide
ucucaacuagaucgcuaga

SEQ ID NO: 120370 - RNA, 19 nt, Artificial Sequence
  Description of Artificial Sequence: Synthetic oligonucleotide
gaacauaagacgaggacau

SEQ ID NO: 120371 - RNA, 19 nt, Artificial Sequence
  Description of Artificial Sequence: Synthetic oligonucleotide
ucucucaacuagaucgcua

SEQ ID NO: 120372 - RNA, 19 nt, Artificial Sequence
  Description of Artificial Sequence: Synthetic oligonucleotide
gggauaucaaucaggcuag

SEQ ID NO: 120373 - RNA, 19 nt, Artificial Sequence
  Description of Artificial Sequence: Synthetic oligonucleotide
acgucccauuggcagaggg

SEQ ID NO: 120374 - RNA, 19 nt, Artificial Sequence
  Description of Artificial Sequence: Synthetic oligonucleotide
gauaucaaucaggcuagga

SEQ ID NO: 120375 - RNA, 19 nt, Artificial Sequence
  Description of Artificial Sequence: Synthetic oligonucleotide
ggccauucagcccuuuggg

SEQ ID NO: 120376 - RNA, 19 nt, Artificial Sequence
  Description of Artificial Sequence: Synthetic oligonucleotide
caacuagaucgcuagaucu

SEQ ID NO: 120377 - RNA, 19 nt, Artificial Sequence
  Description of Artificial Sequence: Synthetic oligonucleotide
auagugcuaucuuuugcuu

SEQ ID NO: 120378 - RNA, 19 nt, Artificial Sequence
  Description of Artificial Sequence: Synthetic oligonucleotide
cuugccuugguacgguguc

SEQ ID NO: 120379 - RNA, 19 nt, Artificial Sequence
  Description of Artificial Sequence: Synthetic oligonucleotide
agcgucaggucugagaaau

SEQ ID NO: 120380 - RNA, 19 nt, Artificial Sequence
  Description of Artificial Sequence: Synthetic oligonucleotide
gauauggauugcccucuca

SEQ ID NO: 120381 - RNA, 19 nt, Artificial Sequence
  Description of Artificial Sequence: Synthetic oligonucleotide
cauaagacgaggacaugaa

SEQ ID NO: 120382 - RNA, 19 nt, Artificial Sequence
  Description of Artificial Sequence: Synthetic oligonucleotide
aguucucacuauaaauacu

SEQ ID NO: 120383 - RNA, 19 nt, Artificial Sequence
  Description of Artificial Sequence: Synthetic oligonucleotide
cagguauagggcucaggug

SEQ ID NO: 120384 - RNA, 19 nt, Artificial Sequence
  Description of Artificial Sequence: Synthetic oligonucleotide
cuugugcggguacacguug

SEQ ID NO: 120385 - RNA, 19 nt, Artificial Sequence
  Description of Artificial Sequence: Synthetic oligonucleotide
aacuagaucgcuagaucua

SEQ ID NO: 120386 - RNA, 19 nt, Artificial Sequence
  Description of Artificial Sequence: Synthetic oligonucleotide
ugcacacggcgacaguagu

SEQ ID NO: 120387 - RNA, 19 nt, Artificial Sequence
  Description of Artificial Sequence: Synthetic oligonucleotide
acauagcauaaaggauuac

SEQ ID NO: 120388 - RNA, 19 nt, Artificial Sequence
  Description of Artificial Sequence: Synthetic oligonucleotide
ggugaagcauuccuguaca

SEQ ID NO: 120389 - RNA, 19 nt, Artificial Sequence
  Description of Artificial Sequence: Synthetic oligonucleotide
ggccggaaggcaucgaaag

SEQ ID NO: 120390 - RNA, 19 nt, Artificial Sequence
  Description of Artificial Sequence: Synthetic oligonucleotide
aggauucacaguucacuua

SEQ ID NO: 120391 - RNA, 19 nt, Artificial Sequence
  Description of Artificial Sequence: Synthetic oligonucleotide
guucuguggcucauuuuag

SEQ ID NO: 120392 - RNA, 19 nt, Artificial Sequence
  Description of Artificial Sequence: Synthetic oligonucleotide
gcuauugaauacuucauau

SEQ ID NO: 120393 - RNA, 19 nt, Artificial Sequence
  Description of Artificial Sequence: Synthetic oligonucleotide
gcuauauuucauaggcaag

SEQ ID NO: 120394 - RNA, 19 nt, Artificial Sequence
  Description of Artificial Sequence: Synthetic oligonucleotide
agcuuauuaauaagucuaa

SEQ ID NO: 120395 - RNA, 19 nt, Artificial Sequence
  Description of Artificial Sequence: Synthetic oligonucleotide
uugugcggguacacguuga

SEQ ID NO: 120396 - RNA, 19 nt, Artificial Sequence
  Description of Artificial Sequence: Synthetic oligonucleotide
uuaaguccacaggucugug

SEQ ID NO: 120397 - RNA, 19 nt, Artificial Sequence
  Description of Artificial Sequence: Synthetic oligonucleotide
cucagagguaagcgucagg

SEQ ID NO: 120398 - RNA, 19 nt, Artificial Sequence
  Description of Artificial Sequence: Synthetic oligonucleotide
cacaacggaaugccacccc

SEQ ID NO: 120399 - RNA, 19 nt, Artificial Sequence
  Description of Artificial Sequence: Synthetic oligonucleotide
auaucagggguggucagau

SEQ ID NO: 120400 - RNA, 19 nt, Artificial Sequence
  Description of Artificial Sequence: Synthetic oligonucleotide
ugcaagguucugagaggga

SEQ ID NO: 120401 - RNA, 19 nt, Artificial Sequence
  Description of Artificial Sequence: Synthetic oligonucleotide
cuugcaaaacugggucuag

SEQ ID NO: 120402 - RNA, 19 nt, Artificial Sequence
  Description of Artificial Sequence: Synthetic oligonucleotide
cuguacuuagcuaccaggu

SEQ ID NO: 120403 - RNA, 19 nt, Artificial Sequence
  Description of Artificial Sequence: Synthetic oligonucleotide
uacuuguggcagauacaaa

SEQ ID NO: 120404 - RNA, 19 nt, Artificial Sequence
  Description of Artificial Sequence: Synthetic oligonucleotide
auguucaguaagggaacug

SEQ ID NO: 120405 - RNA, 19 nt, Artificial Sequence
  Description of Artificial Sequence: Synthetic oligonucleotide
agcgauugucccuuuugua

SEQ ID NO: 120406 - RNA, 19 nt, Artificial Sequence
  Description of Artificial Sequence: Synthetic oligonucleotide
ggcugcuagaacaagcgac

SEQ ID NO: 120407 - RNA, 19 nt, Artificial Sequence
  Description of Artificial Sequence: Synthetic oligonucleotide
gauaucagggguggucaga

SEQ ID NO: 120408 - RNA, 19 nt, Artificial Sequence
  Description of Artificial Sequence: Synthetic oligonucleotide
aggcuaccaaguucagugu

SEQ ID NO: 120409 - RNA, 19 nt, Artificial Sequence
  Description of Artificial Sequence: Synthetic oligonucleotide
aaacugggucuaggaaucu

SEQ ID NO: 120410 - RNA, 19 nt, Artificial Sequence
  Description of Artificial Sequence: Synthetic oligonucleotide
acaagcgacugcccucugu

SEQ ID NO: 120411 - RNA, 19 nt, Artificial Sequence
  Description of Artificial Sequence: Synthetic oligonucleotide
uagcuaccaggugcaaugc

SEQ ID NO: 120412 - RNA, 19 nt, Artificial Sequence
  Description of Artificial Sequence: Synthetic oligonucleotide
gauugcccucucaaagcac

SEQ ID NO: 120413 - RNA, 19 nt, Artificial Sequence
  Description of Artificial Sequence: Synthetic oligonucleotide
acugguaaccaugcagaaa

SEQ ID NO: 120414 - RNA, 19 nt, Artificial Sequence
  Description of Artificial Sequence: Synthetic oligonucleotide
agccugcggguacaccacg

SEQ ID NO: 120415 - RNA, 19 nt, Artificial Sequence
  Description of Artificial Sequence: Synthetic oligonucleotide
cacugugaggagcuaagaa

SEQ ID NO: 120416 - RNA, 19 nt, Artificial Sequence
  Description of Artificial Sequence: Synthetic oligonucleotide
ggcaauccuuaauguagug

SEQ ID NO: 120417 - RNA, 19 nt, Artificial Sequence
  Description of Artificial Sequence: Synthetic oligonucleotide
aagcgucaggucugagaaa

SEQ ID NO: 120418 - RNA, 19 nt, Artificial Sequence
  Description of Artificial Sequence: Synthetic oligonucleotide
aacaagcgacugcccucug

SEQ ID NO: 120419 - RNA, 19 nt, Artificial Sequence
  Description of Artificial Sequence: Synthetic oligonucleotide
gcagguauagggcucaggu

SEQ ID NO: 120420 - RNA, 19 nt, Artificial Sequence
  Description of Artificial Sequence: Synthetic oligonucleotide
cccucuugggccaugugac

SEQ ID NO: 120421 - RNA, 19 nt, Artificial Sequence
  Description of Artificial Sequence: Synthetic oligonucleotide
gguacacguugauauggca

SEQ ID NO: 120422 - RNA, 19 nt, Artificial Sequence
  Description of Artificial Sequence: Synthetic oligonucleotide
gggguaaacaccauucucu

SEQ ID NO: 120423 - RNA, 19 nt, Artificial Sequence
  Description of Artificial Sequence: Synthetic oligonucleotide
cagaucaaccagacuugca

SEQ ID NO: 120424 - RNA, 19 nt, Artificial Sequence
  Description of Artificial Sequence: Synthetic oligonucleotide
gaacaagcgacugcccucu

SEQ ID NO: 120425 - RNA, 19 nt, Artificial Sequence
  Description of Artificial Sequence: Synthetic oligonucleotide
gcggcgcucgugucgaugg

SEQ ID NO: 120426 - RNA, 19 nt, Artificial Sequence
  Description of Artificial Sequence: Synthetic oligonucleotide
agggugaagcauuccugua

SEQ ID NO: 120427 - RNA, 19 nt, Artificial Sequence
  Description of Artificial Sequence: Synthetic oligonucleotide
ggcuaccaaguucaguguc

SEQ ID NO: 120428 - RNA, 19 nt, Artificial Sequence
  Description of Artificial Sequence: Synthetic oligonucleotide
ugcugcgggugcuccuugc

SEQ ID NO: 120429 - RNA, 19 nt, Artificial Sequence
  Description of Artificial Sequence: Synthetic oligonucleotide
ccugaagcgacagguagac

SEQ ID NO: 120430 - RNA, 19 nt, Artificial Sequence
  Description of Artificial Sequence: Synthetic oligonucleotide
aggggacuguacuuagcua

SEQ ID NO: 120431 - RNA, 19 nt, Artificial Sequence
  Description of Artificial Sequence: Synthetic oligonucleotide
cauuauccccaguuuccaa

SEQ ID NO: 120432 - RNA, 19 nt, Artificial Sequence
  Description of Artificial Sequence: Synthetic oligonucleotide
cuuaaguccacaggucugu

SEQ ID NO: 120433 - RNA, 19 nt, Artificial Sequence
  Description of Artificial Sequence: Synthetic oligonucleotide
caagguucugagagggaua

SEQ ID NO: 120434 - RNA, 19 nt, Artificial Sequence
  Description of Artificial Sequence: Synthetic oligonucleotide
cacuagcuugguguguguc

SEQ ID NO: 120435 - RNA, 19 nt, Artificial Sequence
  Description of Artificial Sequence: Synthetic oligonucleotide
cucaacuagaucgcuagau

SEQ ID NO: 120436 - RNA, 19 nt, Artificial Sequence
  Description of Artificial Sequence: Synthetic oligonucleotide
gccggaaggcaucgaaagc

SEQ ID NO: 120437 - RNA, 19 nt, Artificial Sequence
  Description of Artificial Sequence: Synthetic oligonucleotide
ggauaucaaucaggcuagg

SEQ ID NO: 120438 - RNA, 19 nt, Artificial Sequence
  Description of Artificial Sequence: Synthetic oligonucleotide
caacggaaugccaccccga

SEQ ID NO: 120439 - RNA, 19 nt, Artificial Sequence
  Description of Artificial Sequence: Synthetic oligonucleotide
ccgggcugcuagaacaagc

SEQ ID NO: 120440 - RNA, 19 nt, Artificial Sequence
  Description of Artificial Sequence: Synthetic oligonucleotide
ggacgucccauuggcagag

SEQ ID NO: 120441 - RNA, 19 nt, Artificial Sequence
  Description of Artificial Sequence: Synthetic oligonucleotide
cucgggccggaaggcaucg

SEQ ID NO: 120442 - RNA, 19 nt, Artificial Sequence
  Description of Artificial Sequence: Synthetic oligonucleotide
agguuggauuaaacuuuug

SEQ ID NO: 120443 - RNA, 19 nt, Artificial Sequence
  Description of Artificial Sequence: Synthetic oligonucleotide
cucacggguucuguuuguc

SEQ ID NO: 120444 - RNA, 19 nt, Artificial Sequence
  Description of Artificial Sequence: Synthetic oligonucleotide
agaggacgucccauuggca

SEQ ID NO: 120445 - RNA, 19 nt, Artificial Sequence
  Description of Artificial Sequence: Synthetic oligonucleotide
ccggaaggcaucgaaagca

SEQ ID NO: 120446 - RNA, 19 nt, Artificial Sequence
  Description of Artificial Sequence: Synthetic oligonucleotide
ccaacauagcauaaaggau

SEQ ID NO: 120447 - RNA, 19 nt, Artificial Sequence
  Description of Artificial Sequence: Synthetic oligonucleotide
gcggguacacguugauaug

SEQ ID NO: 120448 - RNA, 19 nt, Artificial Sequence
  Description of Artificial Sequence: Synthetic oligonucleotide
gcucgugucgauggcagac

SEQ ID NO: 120449 - RNA, 19 nt, Artificial Sequence
  Description of Artificial Sequence: Synthetic oligonucleotide
guacaccacggcuucugcu

SEQ ID NO: 120450 - RNA, 19 nt, Artificial Sequence
  Description of Artificial Sequence: Synthetic oligonucleotide
agguaagcgucaggucuga

SEQ ID NO: 120451 - RNA, 19 nt, Artificial Sequence
  Description of Artificial Sequence: Synthetic oligonucleotide
gacgucccauuggcagagg

SEQ ID NO: 120452 - RNA, 19 nt, Artificial Sequence
  Description of Artificial Sequence: Synthetic oligonucleotide
cuagaucgcuagaucuacu

SEQ ID NO: 120453 - RNA, 19 nt, Artificial Sequence
  Description of Artificial Sequence: Synthetic oligonucleotide
ggcagguauagggcucagg

SEQ ID NO: 120454 - RNA, 19 nt, Artificial Sequence
  Description of Artificial Sequence: Synthetic oligonucleotide
gccgaaggccagcuccggg

SEQ ID NO: 120455 - RNA, 19 nt, Artificial Sequence
  Description of Artificial Sequence: Synthetic oligonucleotide
guacccuccaggcggggcu

SEQ ID NO: 120456 - RNA, 19 nt, Artificial Sequence
  Description of Artificial Sequence: Synthetic oligonucleotide
gccgcaacaucccuuacau

SEQ ID NO: 120457 - RNA, 19 nt, Artificial Sequence
  Description of Artificial Sequence: Synthetic oligonucleotide
caugccuucugagcauuaa

SEQ ID NO: 120458 - RNA, 19 nt, Artificial Sequence
  Description of Artificial Sequence: Synthetic oligonucleotide
cucgugucgauggcagaca

SEQ ID NO: 120459 - RNA, 19 nt, Artificial Sequence
  Description of Artificial Sequence: Synthetic oligonucleotide
cacggguucuguuugucuu

SEQ ID NO: 120460 - RNA, 19 nt, Artificial Sequence
  Description of Artificial Sequence: Synthetic oligonucleotide
ggacuguacuuagcuacca

SEQ ID NO: 120461 - RNA, 19 nt, Artificial Sequence
  Description of Artificial Sequence: Synthetic oligonucleotide
auacucucuuacagaucaa

SEQ ID NO: 120462 - RNA, 19 nt, Artificial Sequence
  Description of Artificial Sequence: Synthetic oligonucleotide
caauguagugagguuggau

SEQ ID NO: 120463 - RNA, 19 nt, Artificial Sequence
  Description of Artificial Sequence: Synthetic oligonucleotide
cauaugggguaaacaccau

SEQ ID NO: 120464 - RNA, 19 nt, Artificial Sequence
  Description of Artificial Sequence: Synthetic oligonucleotide
ggaaaucauuauccccagu

SEQ ID NO: 120465 - RNA, 19 nt, Artificial Sequence
  Description of Artificial Sequence: Synthetic oligonucleotide
aggcagguauagggcucag

SEQ ID NO: 120466 - RNA, 19 nt, Artificial Sequence
  Description of Artificial Sequence: Synthetic oligonucleotide
cuacugacugcaagcgauu

SEQ ID NO: 120467 - RNA, 19 nt, Artificial Sequence
  Description of Artificial Sequence: Synthetic oligonucleotide
ggcuggucuuagagggaag

SEQ ID NO: 120468 - RNA, 19 nt, Artificial Sequence
  Description of Artificial Sequence: Synthetic oligonucleotide
cucagcgccucuccgcgcu

SEQ ID NO: 120469 - RNA, 19 nt, Artificial Sequence
  Description of Artificial Sequence: Synthetic oligonucleotide
gggcaauccuuaauguagu

SEQ ID NO: 120470 - RNA, 19 nt, Artificial Sequence
  Description of Artificial Sequence: Synthetic oligonucleotide
gcgugccugagggcaaucc

SEQ ID NO: 120471 - RNA, 19 nt, Artificial Sequence
  Description of Artificial Sequence: Synthetic oligonucleotide
cccgcucauccauuuucuc

SEQ ID NO: 120472 - RNA, 19 nt, Artificial Sequence
  Description of Artificial Sequence: Synthetic oligonucleotide
gcgggccucagagguaagc

SEQ ID NO: 120473 - RNA, 19 nt, Artificial Sequence
  Description of Artificial Sequence: Synthetic oligonucleotide
caccuuuuggggcgugccu

SEQ ID NO: 120474 - RNA, 19 nt, Artificial Sequence
  Description of Artificial Sequence: Synthetic oligonucleotide
gccacauggucagaacaua

SEQ ID NO: 120475 - RNA, 19 nt, Artificial Sequence
  Description of Artificial Sequence: Synthetic oligonucleotide
ucgggccggaaggcaucga

SEQ ID NO: 120476 - RNA, 19 nt, Artificial Sequence
  Description of Artificial Sequence: Synthetic oligonucleotide
ccgcaacaucccuuacauc

SEQ ID NO: 120477 - RNA, 19 nt, Artificial Sequence
  Description of Artificial Sequence: Synthetic oligonucleotide
gcgacagguagacccaguu

SEQ ID NO: 120478 - RNA, 19 nt, Artificial Sequence
  Description of Artificial Sequence: Synthetic oligonucleotide
cguuagaauuauguaccaa

SEQ ID NO: 120479 - RNA, 19 nt, Artificial Sequence
  Description of Artificial Sequence: Synthetic oligonucleotide
ggcggcgcucgugucgaug

SEQ ID NO: 120480 - RNA, 19 nt, Artificial Sequence
  Description of Artificial Sequence: Synthetic oligonucleotide
gggagagagccugcgggua

SEQ ID NO: 120481 - RNA, 19 nt, Artificial Sequence
  Description of Artificial Sequence: Synthetic oligonucleotide
gggccggaaggcaucgaaa

SEQ ID NO: 120482 - RNA, 19 nt, Artificial Sequence
  Description of Artificial Sequence: Synthetic oligonucleotide
guacggugucaggcccuca

SEQ ID NO: 120483 - RNA, 19 nt, Artificial Sequence
  Description of Artificial Sequence: Synthetic oligonucleotide
cgaggacaugaaacuccuc

SEQ ID NO: 120484 - RNA, 19 nt, Artificial Sequence
  Description of Artificial Sequence: Synthetic oligonucleotide
gcucacggguucuguuugu

SEQ ID NO: 120485 - RNA, 19 nt, Artificial Sequence
  Description of Artificial Sequence: Synthetic oligonucleotide
ccugagggcaauccuuaau

SEQ ID NO: 120486 - RNA, 19 nt, Artificial Sequence
  Description of Artificial Sequence: Synthetic oligonucleotide
gcucgggccggaaggcauc

SEQ ID NO: 120487 - RNA, 19 nt, Artificial Sequence
  Description of Artificial Sequence: Synthetic oligonucleotide
cagugauaucagggguggu

SEQ ID NO: 120488 - RNA, 19 nt, Artificial Sequence
  Description of Artificial Sequence: Synthetic oligonucleotide
ggcaagccguauacagagu

SEQ ID NO: 120489 - RNA, 19 nt, Artificial Sequence
  Description of Artificial Sequence: Synthetic oligonucleotide
gcuugugcggguacacguu

SEQ ID NO: 120490 - RNA, 19 nt, Artificial Sequence
  Description of Artificial Sequence: Synthetic oligonucleotide
aggcggcgcucgugucgau

SEQ ID NO: 120491 - RNA, 19 nt, Artificial Sequence
  Description of Artificial Sequence: Synthetic oligonucleotide
ggugcugcgggugcuccuu

SEQ ID NO: 120492 - RNA, 19 nt, Artificial Sequence
  Description of Artificial Sequence: Synthetic oligonucleotide
gcggggcucacggguucug

SEQ ID NO: 120493 - RNA, 19 nt, Artificial Sequence
  Description of Artificial Sequence: Synthetic oligonucleotide
cgggccggaaggcaucgaa

SEQ ID NO: 120494 - RNA, 19 nt, Artificial Sequence
  Description of Artificial Sequence: Synthetic oligonucleotide
cggcgcucgugucgauggc

SEQ ID NO: 120495 - RNA, 19 nt, Artificial Sequence
  Description of Artificial Sequence: Synthetic oligonucleotide
cgcucgugucgauggcaga

SEQ ID NO: 120496 - RNA, 19 nt, Artificial Sequence
  Description of Artificial Sequence: Synthetic oligonucleotide
cgacugcccucuguggaua

SEQ ID NO: 120497 - RNA, 19 nt, Artificial Sequence
  Description of Artificial Sequence: Synthetic oligonucleotide
ccgggcggcccuugccgaa

SEQ ID NO: 120498 - RNA, 19 nt, Artificial Sequence
  Description of Artificial Sequence: Synthetic oligonucleotide
gggcgugccugagggcaau

SEQ ID NO: 120499 - RNA, 19 nt, Artificial Sequence
  Description of Artificial Sequence: Synthetic oligonucleotide
uuuaugaacauccagaacc

SEQ ID NO: 120500 - RNA, 19 nt, Artificial Sequence
  Description of Artificial Sequence: Synthetic oligonucleotide
auuaguugaaaauagacag

SEQ ID NO: 120501 - RNA, 19 nt, Artificial Sequence
  Description of Artificial Sequence: Synthetic oligonucleotide
aagcaaacgagccucagcc

SEQ ID NO: 120502 - RNA, 19 nt, Artificial Sequence
  Description of Artificial Sequence: Synthetic oligonucleotide
aaaagggagguccaaaugg

SEQ ID NO: 120503 - RNA, 19 nt, Artificial Sequence
  Description of Artificial Sequence: Synthetic oligonucleotide
uuuaacuuggagaucaugc

SEQ ID NO: 120504 - RNA, 19 nt, Artificial Sequence
  Description of Artificial Sequence: Synthetic oligonucleotide
aacaaggagucacaguacc

SEQ ID NO: 120505 - RNA, 19 nt, Artificial Sequence
  Description of Artificial Sequence: Synthetic oligonucleotide
aaugcaagugaauagauuu

SEQ ID NO: 120506 - RNA, 19 nt, Artificial Sequence
  Description of Artificial Sequence: Synthetic oligonucleotide
uuauacacuguuaacguag

SEQ ID NO: 120507 - RNA, 19 nt, Artificial Sequence
  Description of Artificial Sequence: Synthetic oligonucleotide
aagugaauagauuucauau

SEQ ID NO: 120508 - RNA, 19 nt, Artificial Sequence
  Description of Artificial Sequence: Synthetic oligonucleotide
uccaaaucuauucacagca

SEQ ID NO: 120509 - RNA, 19 nt, Artificial Sequence
  Description of Artificial Sequence: Synthetic oligonucleotide
aaugugucaguccugagca

SEQ ID NO: 120510 - RNA, 19 nt, Artificial Sequence
  Description of Artificial Sequence: Synthetic oligonucleotide
aguaacuggguucugcugc

SEQ ID NO: 120511 - RNA, 19 nt, Artificial Sequence
  Description of Artificial Sequence: Synthetic oligonucleotide
uguacaacuccacuaauca

SEQ ID NO: 120512 - RNA, 19 nt, Artificial Sequence
  Description of Artificial Sequence: Synthetic oligonucleotide
uuucgggucauuuaaagca

SEQ ID NO: 120513 - RNA, 19 nt, Artificial Sequence
  Description of Artificial Sequence: Synthetic oligonucleotide
uuaugaacauccagaaccg

SEQ ID NO: 120514 - RNA, 19 nt, Artificial Sequence
  Description of Artificial Sequence: Synthetic oligonucleotide
uuauacugaagcaggauug

SEQ ID NO: 120515 - RNA, 19 nt, Artificial Sequence
  Description of Artificial Sequence: Synthetic oligonucleotide
uaaaccgcugauaacugcg

SEQ ID NO: 120516 - RNA, 19 nt, Artificial Sequence
  Description of Artificial Sequence: Synthetic oligonucleotide
uuguauaacuccaagccga

SEQ ID NO: 120517 - RNA, 19 nt, Artificial Sequence
  Description of Artificial Sequence: Synthetic oligonucleotide
agcuugguuggacugaugc

SEQ ID NO: 120518 - RNA, 19 nt, Artificial Sequence
  Description of Artificial Sequence: Synthetic oligonucleotide
augaacucgaguugugucc

SEQ ID NO: 120519 - RNA, 19 nt, Artificial Sequence
  Description of Artificial Sequence: Synthetic oligonucleotide
ucaaaacucuuuuagucgc

SEQ ID NO: 120520 - RNA, 19 nt, Artificial Sequence
  Description of Artificial Sequence: Synthetic oligonucleotide
aauaugugucucuagcagu

SEQ ID NO: 120521 - RNA, 19 nt, Artificial Sequence
  Description of Artificial Sequence: Synthetic oligonucleotide
ugcaagacugcugaaaggg

SEQ ID NO: 120522 - RNA, 19 nt, Artificial Sequence
  Description of Artificial Sequence: Synthetic oligonucleotide
ugguacauugauauuaacu

SEQ ID NO: 120523 - RNA, 19 nt, Artificial Sequence
  Description of Artificial Sequence: Synthetic oligonucleotide
gaaguuuggagguauacuc

SEQ ID NO: 120524 - RNA, 19 nt, Artificial Sequence
  Description of Artificial Sequence: Synthetic oligonucleotide
acaagauuauacaugcggc

SEQ ID NO: 120525 - RNA, 19 nt, Artificial Sequence
  Description of Artificial Sequence: Synthetic oligonucleotide
uauaacuccaagccgacaa

SEQ ID NO: 120526 - RNA, 19 nt, Artificial Sequence
  Description of Artificial Sequence: Synthetic oligonucleotide
ugucuauugagguaggcac

SEQ ID NO: 120527 - RNA, 19 nt, Artificial Sequence
  Description of Artificial Sequence: Synthetic oligonucleotide
auaaccaagauauaacuuu

SEQ ID NO: 120528 - RNA, 19 nt, Artificial Sequence
  Description of Artificial Sequence: Synthetic oligonucleotide
uucaccaucgacucguucc

SEQ ID NO: 120529 - RNA, 19 nt, Artificial Sequence
  Description of Artificial Sequence: Synthetic oligonucleotide
ucaaguaauucuucaaaac

SEQ ID NO: 120530 - RNA, 19 nt, Artificial Sequence
  Description of Artificial Sequence: Synthetic oligonucleotide
ugcacauacauuuucgggu

SEQ ID NO: 120531 - RNA, 19 nt, Artificial Sequence
  Description of Artificial Sequence: Synthetic oligonucleotide
aaucuauucacagcagcuc

SEQ ID NO: 120532 - RNA, 19 nt, Artificial Sequence
  Description of Artificial Sequence: Synthetic oligonucleotide
aacaaucucuccaugucac

SEQ ID NO: 120533 - RNA, 19 nt, Artificial Sequence
  Description of Artificial Sequence: Synthetic oligonucleotide
auugauauuaacucuuaau

SEQ ID NO: 120534 - RNA, 19 nt, Artificial Sequence
  Description of Artificial Sequence: Synthetic oligonucleotide
ugauuuaagugcaguagca

SEQ ID NO: 120535 - RNA, 19 nt, Artificial Sequence
  Description of Artificial Sequence: Synthetic oligonucleotide
agaccgaucugcuucaguc

SEQ ID NO: 120536 - RNA, 19 nt, Artificial Sequence
  Description of Artificial Sequence: Synthetic oligonucleotide
agcaauuagugacuaguuc

SEQ ID NO: 120537 - RNA, 19 nt, Artificial Sequence
  Description of Artificial Sequence: Synthetic oligonucleotide
auuuucgggucauuuaaag

SEQ ID NO: 120538 - RNA, 19 nt, Artificial Sequence
  Description of Artificial Sequence: Synthetic oligonucleotide
cucaauugccgcaaggccc

SEQ ID NO: 120539 - RNA, 19 nt, Artificial Sequence
  Description of Artificial Sequence: Synthetic oligonucleotide
gcaauuagugacuaguucc

SEQ ID NO: 120540 - RNA, 19 nt, Artificial Sequence
  Description of Artificial Sequence: Synthetic oligonucleotide
cucauugcaggcaaacccg

SEQ ID NO: 120541 - RNA, 19 nt, Artificial Sequence
  Description of Artificial Sequence: Synthetic oligonucleotide
aacccuuguaaagacacag

SEQ ID NO: 120542 - RNA, 19 nt, Artificial Sequence
  Description of Artificial Sequence: Synthetic oligonucleotide
ugcaaaugcgucaucuuca

SEQ ID NO: 120543 - RNA, 19 nt, Artificial Sequence
  Description of Artificial Sequence: Synthetic oligonucleotide
uucagacucgcucuugugc

SEQ ID NO: 120544 - RNA, 19 nt, Artificial Sequence
  Description of Artificial Sequence: Synthetic oligonucleotide
acauuuccgcgcuaguucg

SEQ ID NO: 120545 - RNA, 19 nt, Artificial Sequence
  Description of Artificial Sequence: Synthetic oligonucleotide
auugagauucaaaggauuc

SEQ ID NO: 120546 - RNA, 19 nt, Artificial Sequence
  Description of Artificial Sequence: Synthetic oligonucleotide
uuuucgggucauuuaaagc

SEQ ID NO: 120547 - RNA, 19 nt, Artificial Sequence
  Description of Artificial Sequence: Synthetic oligonucleotide
ucucaauugccgcaaggcc

SEQ ID NO: 120548 - RNA, 19 nt, Artificial Sequence
  Description of Artificial Sequence: Synthetic oligonucleotide
gacauuaugagggauguuc

SEQ ID NO: 120549 - RNA, 19 nt, Artificial Sequence
  Description of Artificial Sequence: Synthetic oligonucleotide
cauuaguugaaaauagaca

SEQ ID NO: 120550 - RNA, 19 nt, Artificial Sequence
  Description of Artificial Sequence: Synthetic oligonucleotide
aacucuuuuagucgcuugu

SEQ ID NO: 120551 - RNA, 19 nt, Artificial Sequence
  Description of Artificial Sequence: Synthetic oligonucleotide
cuccauuaguugaaaauag

SEQ ID NO: 120552 - RNA, 19 nt, Artificial Sequence
  Description of Artificial Sequence: Synthetic oligonucleotide
aaacauucguugaaguuug

SEQ ID NO: 120553 - RNA, 19 nt, Artificial Sequence
  Description of Artificial Sequence: Synthetic oligonucleotide
aaugcgucaucuucauuca

SEQ ID NO: 120554 - RNA, 19 nt, Artificial Sequence
  Description of Artificial Sequence: Synthetic oligonucleotide
uuuagucgcuuguauaacu

SEQ ID NO: 120555 - RNA, 19 nt, Artificial Sequence
  Description of Artificial Sequence: Synthetic oligonucleotide
caaucaguuuuaaaacagc

SEQ ID NO: 120556 - RNA, 19 nt, Artificial Sequence
  Description of Artificial Sequence: Synthetic oligonucleotide
guauacucaaaaccgcaag

SEQ ID NO: 120557 - RNA, 19 nt, Artificial Sequence
  Description of Artificial Sequence: Synthetic oligonucleotide
uguaaaccgcugauaacug

SEQ ID NO: 120558 - RNA, 19 nt, Artificial Sequence
  Description of Artificial Sequence: Synthetic oligonucleotide
uccauuaguugaaaauaga

SEQ ID NO: 120559 - RNA, 19 nt, Artificial Sequence
  Description of Artificial Sequence: Synthetic oligonucleotide
uuaacguagggcccuuugc

SEQ ID NO: 120560 - RNA, 19 nt, Artificial Sequence
  Description of Artificial Sequence: Synthetic oligonucleotide
agauacaagauuauacaug

SEQ ID NO: 120561 - RNA, 19 nt, Artificial Sequence
  Description of Artificial Sequence: Synthetic oligonucleotide
uccaagccgacaaacugag

SEQ ID NO: 120562 - RNA, 19 nt, Artificial Sequence
  Description of Artificial Sequence: Synthetic oligonucleotide
uacacguggguccauucag

SEQ ID NO: 120563 - RNA, 19 nt, Artificial Sequence
  Description of Artificial Sequence: Synthetic oligonucleotide
gacugaugcacacuaguac

SEQ ID NO: 120564 - RNA, 19 nt, Artificial Sequence
  Description of Artificial Sequence: Synthetic oligonucleotide
cauggaaagguucgguucc

SEQ ID NO: 120565 - RNA, 19 nt, Artificial Sequence
  Description of Artificial Sequence: Synthetic oligonucleotide
ucuuugcuuacaccaaugu

SEQ ID NO: 120566 - RNA, 19 nt, Artificial Sequence
  Description of Artificial Sequence: Synthetic oligonucleotide
agaucaugcuugcuuccgc

SEQ ID NO: 120567 - RNA, 19 nt, Artificial Sequence
  Description of Artificial Sequence: Synthetic oligonucleotide
uggcgacuggcguagaagg

SEQ ID NO: 120568 - RNA, 19 nt, Artificial Sequence
  Description of Artificial Sequence: Synthetic oligonucleotide
uaaccaagauauaacuuua

SEQ ID NO: 120569 - RNA, 19 nt, Artificial Sequence
  Description of Artificial Sequence: Synthetic oligonucleotide
uccuaggccauccugaauu

SEQ ID NO: 120570 - RNA, 19 nt, Artificial Sequence
  Description of Artificial Sequence: Synthetic oligonucleotide
gaaucgguagucuucccac

SEQ ID NO: 120571 - RNA, 19 nt, Artificial Sequence
  Description of Artificial Sequence: Synthetic oligonucleotide
aguagcaugcagccccagc

SEQ ID NO: 120572 - RNA, 19 nt, Artificial Sequence
  Description of Artificial Sequence: Synthetic oligonucleotide
gcaacuuguacagaaaucc

SEQ ID NO: 120573 - RNA, 19 nt, Artificial Sequence
  Description of Artificial Sequence: Synthetic oligonucleotide
uaggguaaauggcauuggc

SEQ ID NO: 120574 - RNA, 19 nt, Artificial Sequence
  Description of Artificial Sequence: Synthetic oligonucleotide
aucuggucaagaccgaucu

SEQ ID NO: 120575 - RNA, 19 nt, Artificial Sequence
  Description of Artificial Sequence: Synthetic oligonucleotide
uguaucuggacuucgccau

SEQ ID NO: 120576 - RNA, 19 nt, Artificial Sequence
  Description of Artificial Sequence: Synthetic oligonucleotide
gacuaguuccccuuuggac

SEQ ID NO: 120577 - RNA, 19 nt, Artificial Sequence
  Description of Artificial Sequence: Synthetic oligonucleotide
uaugaacucgaguuguguc

SEQ ID NO: 120578 - RNA, 19 nt, Artificial Sequence
  Description of Artificial Sequence: Synthetic oligonucleotide
ucuccauuaguugaaaaua

SEQ ID NO: 120579 - RNA, 19 nt, Artificial Sequence
  Description of Artificial Sequence: Synthetic oligonucleotide
ucagaugacagcuguuaac

SEQ ID NO: 120580 - RNA, 19 nt, Artificial Sequence
  Description of Artificial Sequence: Synthetic oligonucleotide
uuagucgcuuguauaacuc

SEQ ID NO: 120581 - RNA, 19 nt, Artificial Sequence
  Description of Artificial Sequence: Synthetic oligonucleotide
guuaggguaaauggcauug

SEQ ID NO: 120582 - RNA, 19 nt, Artificial Sequence
  Description of Artificial Sequence: Synthetic oligonucleotide
aaaccgcugauaacugcgc

SEQ ID NO: 120583 - RNA, 19 nt, Artificial Sequence
  Description of Artificial Sequence: Synthetic oligonucleotide
agugaauagauuucauaua

SEQ ID NO: 120584 - RNA, 19 nt, Artificial Sequence
  Description of Artificial Sequence: Synthetic oligonucleotide
cauguaucuggacuucgcc

SEQ ID NO: 120585 - RNA, 19 nt, Artificial Sequence
  Description of Artificial Sequence: Synthetic oligonucleotide
uagucugagaccagguggu

SEQ ID NO: 120586 - RNA, 19 nt, Artificial Sequence
  Description of Artificial Sequence: Synthetic oligonucleotide
gacugaaaugugucagucc

SEQ ID NO: 120587 - RNA, 19 nt, Artificial Sequence
  Description of Artificial Sequence: Synthetic oligonucleotide
cuggucaagaccgaucugc

SEQ ID NO: 120588 - RNA, 19 nt, Artificial Sequence
  Description of Artificial Sequence: Synthetic oligonucleotide
cuuaucuagugcagccacg

SEQ ID NO: 120589 - RNA, 19 nt, Artificial Sequence
  Description of Artificial Sequence: Synthetic oligonucleotide
uuaucuagugcagccacga

SEQ ID NO: 120590 - RNA, 19 nt, Artificial Sequence
  Description of Artificial Sequence: Synthetic oligonucleotide
ugcugaaagggccacgauc

SEQ ID NO: 120591 - RNA, 19 nt, Artificial Sequence
  Description of Artificial Sequence: Synthetic oligonucleotide
ugcacacuaguacaguaau

SEQ ID NO: 120592 - RNA, 19 nt, Artificial Sequence
  Description of Artificial Sequence: Synthetic oligonucleotide
uuggagguauacucaaaac

SEQ ID NO: 120593 - RNA, 19 nt, Artificial Sequence
  Description of Artificial Sequence: Synthetic oligonucleotide
agccgacaaacugagcucc

SEQ ID NO: 120594 - RNA, 19 nt, Artificial Sequence
  Description of Artificial Sequence: Synthetic oligonucleotide
uuucgaugagaauaucaau

SEQ ID NO: 120595 - RNA, 19 nt, Artificial Sequence
  Description of Artificial Sequence: Synthetic oligonucleotide
auacugaagcaggauugcc

SEQ ID NO: 120596 - RNA, 19 nt, Artificial Sequence
  Description of Artificial Sequence: Synthetic oligonucleotide
auuaugagggauguucuga

SEQ ID NO: 120597 - RNA, 19 nt, Artificial Sequence
  Description of Artificial Sequence: Synthetic oligonucleotide
uuaugagggauguucugaa

SEQ ID NO: 120598 - RNA, 19 nt, Artificial Sequence
  Description of Artificial Sequence: Synthetic oligonucleotide
aggacuugugccaaaaugu

SEQ ID NO: 120599 - RNA, 19 nt, Artificial Sequence
  Description of Artificial Sequence: Synthetic oligonucleotide
uguucugauggaccagucu

SEQ ID NO: 120600 - RNA, 19 nt, Artificial Sequence
  Description of Artificial Sequence: Synthetic oligonucleotide
uacuuucucugguauaaaa

SEQ ID NO: 120601 - RNA, 19 nt, Artificial Sequence
  Description of Artificial Sequence: Synthetic oligonucleotide
ucgcuuguauaacuccaag

SEQ ID NO: 120602 - RNA, 19 nt, Artificial Sequence
  Description of Artificial Sequence: Synthetic oligonucleotide
aguguagagcuccauguau

SEQ ID NO: 120603 - RNA, 19 nt, Artificial Sequence
  Description of Artificial Sequence: Synthetic oligonucleotide
agaaucgguagucuuccca

SEQ ID NO: 120604 - RNA, 19 nt, Artificial Sequence
  Description of Artificial Sequence: Synthetic oligonucleotide
uggagguaaaccugcacuc

SEQ ID NO: 120605 - RNA, 19 nt, Artificial Sequence
  Description of Artificial Sequence: Synthetic oligonucleotide
cugauaacugcgcuccagc

SEQ ID NO: 120606 - RNA, 19 nt, Artificial Sequence
  Description of Artificial Sequence: Synthetic oligonucleotide
aaucaguaguuugcggucu

SEQ ID NO: 120607 - RNA, 19 nt, Artificial Sequence
  Description of Artificial Sequence: Synthetic oligonucleotide
aaagggagguccaaauggu

SEQ ID NO: 120608 - RNA, 19 nt, Artificial Sequence
  Description of Artificial Sequence: Synthetic oligonucleotide
ucaccaucgacucguucca

SEQ ID NO: 120609 - RNA, 19 nt, Artificial Sequence
  Description of Artificial Sequence: Synthetic oligonucleotide
aacacacuauacaaauggu

SEQ ID NO: 120610 - RNA, 19 nt, Artificial Sequence
  Description of Artificial Sequence: Synthetic oligonucleotide
cuuugcuuacaccaauguc

SEQ ID NO: 120611 - RNA, 19 nt, Artificial Sequence
  Description of Artificial Sequence: Synthetic oligonucleotide
accaaugcaagugaauaga

SEQ ID NO: 120612 - RNA, 19 nt, Artificial Sequence
  Description of Artificial Sequence: Synthetic oligonucleotide
ugauaacugcgcuccagcu

SEQ ID NO: 120613 - RNA, 19 nt, Artificial Sequence
  Description of Artificial Sequence: Synthetic oligonucleotide
gagaucaugcuugcuuccg

SEQ ID NO: 120614 - RNA, 19 nt, Artificial Sequence
  Description of Artificial Sequence: Synthetic oligonucleotide
aaucgguagucuucccacu

SEQ ID NO: 120615 - RNA, 19 nt, Artificial Sequence
  Description of Artificial Sequence: Synthetic oligonucleotide
ugagcaguccggcuguagu

SEQ ID NO: 120616 - RNA, 19 nt, Artificial Sequence
  Description of Artificial Sequence: Synthetic oligonucleotide
  modified_base (19)..(19): a, c, u, g, unknown or other
aaacccgcaucuccggggn

SEQ ID NO: 120617 - RNA, 19 nt, Artificial Sequence
  Description of Artificial Sequence: Synthetic oligonucleotide
guaaaccgcugauaacugc

SEQ ID NO: 120618 - RNA, 19 nt, Artificial Sequence
  Description of Artificial Sequence: Synthetic oligonucleotide
uugguuggacugaugcaca

SEQ ID NO: 120619 - RNA, 19 nt, Artificial Sequence
  Description of Artificial Sequence: Synthetic oligonucleotide
accgcaagcuugcuuuaac

SEQ ID NO: 120620 - RNA, 19 nt, Artificial Sequence
  Description of Artificial Sequence: Synthetic oligonucleotide
cacauuuccgcgcuaguuc

SEQ ID NO: 120621 - RNA, 19 nt, Artificial Sequence
  Description of Artificial Sequence: Synthetic oligonucleotide
accgcugauaacugcgcuc

SEQ ID NO: 120622 - RNA, 19 nt, Artificial Sequence
  Description of Artificial Sequence: Synthetic oligonucleotide
aacguagggcccuuugcaa

SEQ ID NO: 120623 - RNA, 19 nt, Artificial Sequence
  Description of Artificial Sequence: Synthetic oligonucleotide
uugaaguuuggagguauac

SEQ ID NO: 120624 - RNA, 19 nt, Artificial Sequence
  Description of Artificial Sequence: Synthetic oligonucleotide
uuuuagucgcuuguauaac

SEQ ID NO: 120625 - RNA, 19 nt, Artificial Sequence
  Description of Artificial Sequence: Synthetic oligonucleotide
uguucgguuuucauuggua

SEQ ID NO: 120626 - RNA, 19 nt, Artificial Sequence
  Description of Artificial Sequence: Synthetic oligonucleotide
augacauuaugagggaugu

SEQ ID NO: 120627 - RNA, 19 nt, Artificial Sequence
  Description of Artificial Sequence: Synthetic oligonucleotide
caggcaaacccgcaucucc

SEQ ID NO: 120628 - RNA, 19 nt, Artificial Sequence
  Description of Artificial Sequence: Synthetic oligonucleotide
gcugaaagggccacgaucc

SEQ ID NO: 120629 - RNA, 19 nt, Artificial Sequence
  Description of Artificial Sequence: Synthetic oligonucleotide
caaacccgcaucuccgggg

SEQ ID NO: 120630 - RNA, 19 nt, Artificial Sequence
  Description of Artificial Sequence: Synthetic oligonucleotide
uuugcggucuuccucuaua

SEQ ID NO: 120631 - RNA, 19 nt, Artificial Sequence
  Description of Artificial Sequence: Synthetic oligonucleotide
guuguuuaugaagcgacca

SEQ ID NO: 120632 - RNA, 19 nt, Artificial Sequence
  Description of Artificial Sequence: Synthetic oligonucleotide
gaccgaucugcuucagucc

SEQ ID NO: 120633 - RNA, 19 nt, Artificial Sequence
  Description of Artificial Sequence: Synthetic oligonucleotide
uuagugacuaguuccccuu

SEQ ID NO: 120634 - RNA, 19 nt, Artificial Sequence
  Description of Artificial Sequence: Synthetic oligonucleotide
guuaacguagggcccuuug

SEQ ID NO: 120635 - RNA, 19 nt, Artificial Sequence
  Description of Artificial Sequence: Synthetic oligonucleotide
caagcaaacgagccucagc

SEQ ID NO: 120636 - RNA, 19 nt, Artificial Sequence
  Description of Artificial Sequence: Synthetic oligonucleotide
agugacuaguuccccuuug

SEQ ID NO: 120637 - RNA, 19 nt, Artificial Sequence
  Description of Artificial Sequence: Synthetic oligonucleotide
cacuguuaacguagggccc

SEQ ID NO: 120638 - RNA, 19 nt, Artificial Sequence
  Description of Artificial Sequence: Synthetic oligonucleotide
uuggacugaugcacacuag

SEQ ID NO: 120639 - RNA, 19 nt, Artificial Sequence
  Description of Artificial Sequence: Synthetic oligonucleotide
uucggccuucaucacauuc

SEQ ID NO: 120640 - RNA, 19 nt, Artificial Sequence
  Description of Artificial Sequence: Synthetic oligonucleotide
gguaaaccugcacucuccg

SEQ ID NO: 120641 - RNA, 19 nt, Artificial Sequence
  Description of Artificial Sequence: Synthetic oligonucleotide
auagcagauuacacguggg

SEQ ID NO: 120642 - RNA, 19 nt, Artificial Sequence
  Description of Artificial Sequence: Synthetic oligonucleotide
uggcguagaaggcuguaaa

SEQ ID NO: 120643 - RNA, 19 nt, Artificial Sequence
  Description of Artificial Sequence: Synthetic oligonucleotide
aucgguagucuucccacug

SEQ ID NO: 120644 - RNA, 19 nt, Artificial Sequence
  Description of Artificial Sequence: Synthetic oligonucleotide
gaucaugcuugcuuccgca

SEQ ID NO: 120645 - RNA, 19 nt, Artificial Sequence
  Description of Artificial Sequence: Synthetic oligonucleotide
aaccgcugauaacugcgcu

SEQ ID NO: 120646 - RNA, 19 nt, Artificial Sequence
  Description of Artificial Sequence: Synthetic oligonucleotide
agcauuuguuaccuguuua

SEQ ID NO: 120647 - RNA, 19 nt, Artificial Sequence
  Description of Artificial Sequence: Synthetic oligonucleotide
aggagucacaguaccgagc

SEQ ID NO: 120648 - RNA, 19 nt, Artificial Sequence
  Description of Artificial Sequence: Synthetic oligonucleotide
uccgcaucgucacucgcac

SEQ ID NO: 120649 - RNA, 19 nt, Artificial Sequence
  Description of Artificial Sequence: Synthetic oligonucleotide
uuugcaaaugcgucaucuu

SEQ ID NO: 120650 - RNA, 19 nt, Artificial Sequence
  Description of Artificial Sequence: Synthetic oligonucleotide
agcuaauucuccauuaguu

SEQ ID NO: 120651 - RNA, 19 nt, Artificial Sequence
  Description of Artificial Sequence: Synthetic oligonucleotide
ucaugcuugcuuccgcauc

SEQ ID NO: 120652 - RNA, 19 nt, Artificial Sequence
  Description of Artificial Sequence: Synthetic oligonucleotide
uggucaagaccgaucugcu

SEQ ID NO: 120653 - RNA, 19 nt, Artificial Sequence
  Description of Artificial Sequence: Synthetic oligonucleotide
acauuaugagggauguucu

SEQ ID NO: 120654 - RNA, 19 nt, Artificial Sequence
  Description of Artificial Sequence: Synthetic oligonucleotide
acgauccggaacugaggac

SEQ ID NO: 120655 - RNA, 19 nt, Artificial Sequence
  Description of Artificial Sequence: Synthetic oligonucleotide
cauucagaucuuugcuuac

SEQ ID NO: 120656 - RNA, 19 nt, Artificial Sequence
  Description of Artificial Sequence: Synthetic oligonucleotide
guuggacugaugcacacua

SEQ ID NO: 120657 - RNA, 19 nt, Artificial Sequence
  Description of Artificial Sequence: Synthetic oligonucleotide
aagguucgguuccccucgg

SEQ ID NO: 120658 - RNA, 19 nt, Artificial Sequence
  Description of Artificial Sequence: Synthetic oligonucleotide
acuguuaacguagggcccu

SEQ ID NO: 120659 - RNA, 19 nt, Artificial Sequence
  Description of Artificial Sequence: Synthetic oligonucleotide
ucggcgaacccaaugucua

SEQ ID NO: 120660 - RNA, 19 nt, Artificial Sequence
  Description of Artificial Sequence: Synthetic oligonucleotide
uagggcccuuugcaaaugc

SEQ ID NO: 120661 - RNA, 19 nt, Artificial Sequence
  Description of Artificial Sequence: Synthetic oligonucleotide
cacacuauacaaaugguuu

SEQ ID NO: 120662 - RNA, 19 nt, Artificial Sequence
  Description of Artificial Sequence: Synthetic oligonucleotide
gaaagggccacgauccgga

SEQ ID NO: 120663 - RNA, 19 nt, Artificial Sequence
  Description of Artificial Sequence: Synthetic oligonucleotide
cugcuaugaacucgaguug

SEQ ID NO: 120664 - RNA, 19 nt, Artificial Sequence
  Description of Artificial Sequence: Synthetic oligonucleotide
cuguaaaccgcugauaacu

SEQ ID NO: 120665 - RNA, 19 nt, Artificial Sequence
  Description of Artificial Sequence: Synthetic oligonucleotide
aaguaacuguagguguccu

SEQ ID NO: 120666 - RNA, 19 nt, Artificial Sequence
  Description of Artificial Sequence: Synthetic oligonucleotide
uccuguuggaugacauuau

SEQ ID NO: 120667 - RNA, 19 nt, Artificial Sequence
  Description of Artificial Sequence: Synthetic oligonucleotide
ugaauuuguuaggugcuuu

SEQ ID NO: 120668 - RNA, 19 nt, Artificial Sequence
  Description of Artificial Sequence: Synthetic oligonucleotide
ggagaaucgguagucuucc

SEQ ID NO: 120669 - RNA, 19 nt, Artificial Sequence
  Description of Artificial Sequence: Synthetic oligonucleotide
acccuuuuagaaggguuag

SEQ ID NO: 120670 - RNA, 19 nt, Artificial Sequence
  Description of Artificial Sequence: Synthetic oligonucleotide
cacgauccggaacugagga

SEQ ID NO: 120671 - RNA, 19 nt, Artificial Sequence
  Description of Artificial Sequence: Synthetic oligonucleotide
aguucgucuugugugcucu

SEQ ID NO: 120672 - RNA, 19 nt, Artificial Sequence
  Description of Artificial Sequence: Synthetic oligonucleotide
caguaguuugcggucuucc

SEQ ID NO: 120673 - RNA, 19 nt, Artificial Sequence
  Description of Artificial Sequence: Synthetic oligonucleotide
aggcaaacccgcaucuccg

SEQ ID NO: 120674 - RNA, 19 nt, Artificial Sequence
  Description of Artificial Sequence: Synthetic oligonucleotide
acacacuauacaaaugguu

SEQ ID NO: 120675 - RNA, 19 nt, Artificial Sequence
  Description of Artificial Sequence: Synthetic oligonucleotide
ggcuguaaaccgcugauaa

SEQ ID NO: 120676 - RNA, 19 nt, Artificial Sequence
  Description of Artificial Sequence: Synthetic oligonucleotide
uaaauggcauuggcgucug

SEQ ID NO: 120677 - RNA, 19 nt, Artificial Sequence
  Description of Artificial Sequence: Synthetic oligonucleotide
cugaaagggccacgauccg

SEQ ID NO: 120678 - RNA, 19 nt, Artificial Sequence
  Description of Artificial Sequence: Synthetic oligonucleotide
gggucacagacccuuuuag

SEQ ID NO: 120679 - RNA, 19 nt, Artificial Sequence
  Description of Artificial Sequence: Synthetic oligonucleotide
uccggaacugaggaccuga

SEQ ID NO: 120680 - RNA, 19 nt, Artificial Sequence
  Description of Artificial Sequence: Synthetic oligonucleotide
cuuugcuggagaaucggua

SEQ ID NO: 120681 - RNA, 19 nt, Artificial Sequence
  Description of Artificial Sequence: Synthetic oligonucleotide
caguaacuggguucugcug

SEQ ID NO: 120682 - RNA, 19 nt, Artificial Sequence
  Description of Artificial Sequence: Synthetic oligonucleotide
ugguuggacugaugcacac

SEQ ID NO: 120683 - RNA, 19 nt, Artificial Sequence
  Description of Artificial Sequence: Synthetic oligonucleotide
gguaaauggcauuggcguc

SEQ ID NO: 120684 - RNA, 19 nt, Artificial Sequence
  Description of Artificial Sequence: Synthetic oligonucleotide
  modified_base (17)..(17): a, c, u, g, unknown or other
acccgcaucuccggggngc

SEQ ID NO: 120685 - RNA, 19 nt, Artificial Sequence
  Description of Artificial Sequence: Synthetic oligonucleotide
accaucgacucguuccaga

SEQ ID NO: 120686 - RNA, 19 nt, Artificial Sequence
  Description of Artificial Sequence: Synthetic oligonucleotide
gagaaucgguagucuuccc

SEQ ID NO: 120687 - RNA, 19 nt, Artificial Sequence
  Description of Artificial Sequence: Synthetic oligonucleotide
uaucuagugcagccacgaa

SEQ ID NO: 120688 - RNA, 19 nt, Artificial Sequence
  Description of Artificial Sequence: Synthetic oligonucleotide
cuuuucggccuucaucaca

SEQ ID NO: 120689 - RNA, 19 nt, Artificial Sequence
  Description of Artificial Sequence: Synthetic oligonucleotide
gcacauacauuuucggguc

SEQ ID NO: 120690 - RNA, 19 nt, Artificial Sequence
  Description of Artificial Sequence: Synthetic oligonucleotide
ucacauuuccgcgcuaguu

SEQ ID NO: 120691 - RNA, 19 nt, Artificial Sequence
  Description of Artificial Sequence: Synthetic oligonucleotide
gaagauuugucaaguaauu

SEQ ID NO: 120692 - RNA, 19 nt, Artificial Sequence
  Description of Artificial Sequence: Synthetic oligonucleotide
agcgaccacaagccuuauc

SEQ ID NO: 120693 - RNA, 19 nt, Artificial Sequence
  Description of Artificial Sequence: Synthetic oligonucleotide
gaacucgaguuguguccag

SEQ ID NO: 120694 - RNA, 19 nt, Artificial Sequence
  Description of Artificial Sequence: Synthetic oligonucleotide
guuccccucgguccguaag

SEQ ID NO: 120695 - RNA, 19 nt, Artificial Sequence
  Description of Artificial Sequence: Synthetic oligonucleotide
cucucguggagguaaaccu

SEQ ID NO: 120696 - RNA, 19 nt, Artificial Sequence
  Description of Artificial Sequence: Synthetic oligonucleotide
acguagggcccuuugcaaa

SEQ ID NO: 120697 - RNA, 19 nt, Artificial Sequence
  Description of Artificial Sequence: Synthetic oligonucleotide
guaaauggcauuggcgucu

SEQ ID NO: 120698 - RNA, 19 nt, Artificial Sequence
  Description of Artificial Sequence: Synthetic oligonucleotide
gacccuuuuagaaggguua

SEQ ID NO: 120699 - RNA, 19 nt, Artificial Sequence
  Description of Artificial Sequence: Synthetic oligonucleotide
aucaugcuugcuuccgcau

SEQ ID NO: 120700 - RNA, 19 nt, Artificial Sequence
  Description of Artificial Sequence: Synthetic oligonucleotide
uccgcgcuaguucgucuug

SEQ ID NO: 120701 - RNA, 19 nt, Artificial Sequence
  Description of Artificial Sequence: Synthetic oligonucleotide
cauuuucgggucauuuaaa

SEQ ID NO: 120702 - RNA, 19 nt, Artificial Sequence
  Description of Artificial Sequence: Synthetic oligonucleotide
auucucacgauggccgccu

SEQ ID NO: 120703 - RNA, 19 nt, Artificial Sequence
  Description of Artificial Sequence: Synthetic oligonucleotide
ggcguagaaggcuguaaac

SEQ ID NO: 120704 - RNA, 19 nt, Artificial Sequence
  Description of Artificial Sequence: Synthetic oligonucleotide
agaucuuugcuuacaccaa

SEQ ID NO: 120705 - RNA, 19 nt, Artificial Sequence
  Description of Artificial Sequence: Synthetic oligonucleotide
ccugcucacauuuccgcgc

SEQ ID NO: 120706 - RNA, 19 nt, Artificial Sequence
  Description of Artificial Sequence: Synthetic oligonucleotide
guggcgacuggcguagaag

SEQ ID NO: 120707 - RNA, 19 nt, Artificial Sequence
  Description of Artificial Sequence: Synthetic oligonucleotide
guauugauuuaagugcagu

SEQ ID NO: 120708 - RNA, 19 nt, Artificial Sequence
  Description of Artificial Sequence: Synthetic oligonucleotide
gacccgagguuugaaccug

SEQ ID NO: 120709 - RNA, 19 nt, Artificial Sequence
  Description of Artificial Sequence: Synthetic oligonucleotide
aguuguguccagaacuauu

SEQ ID NO: 120710 - RNA, 19 nt, Artificial Sequence
  Description of Artificial Sequence: Synthetic oligonucleotide
gcgaacccaaugucuauug

SEQ ID NO: 120711 - RNA, 19 nt, Artificial Sequence
  Description of Artificial Sequence: Synthetic oligonucleotide
guguuauacugaagcagga

SEQ ID NO: 120712 - RNA, 19 nt, Artificial Sequence
  Description of Artificial Sequence: Synthetic oligonucleotide
ccauguaucuggacuucgc

SEQ ID NO: 120713 - RNA, 19 nt, Artificial Sequence
  Description of Artificial Sequence: Synthetic oligonucleotide
uaguucgucuugugugcuc

SEQ ID NO: 120714 - RNA, 19 nt, Artificial Sequence
  Description of Artificial Sequence: Synthetic oligonucleotide
cgcuaguucgucuugugug

SEQ ID NO: 120715 - RNA, 19 nt, Artificial Sequence
  Description of Artificial Sequence: Synthetic oligonucleotide
gcuguaaaccgcugauaac

SEQ ID NO: 120716 - RNA, 19 nt, Artificial Sequence
  Description of Artificial Sequence: Synthetic oligonucleotide
ggcauuggcgucuguuuac

SEQ ID NO: 120717 - RNA, 19 nt, Artificial Sequence
  Description of Artificial Sequence: Synthetic oligonucleotide
cuuccgcaucgucacucgc

SEQ ID NO: 120718 - RNA, 19 nt, Artificial Sequence
  Description of Artificial Sequence: Synthetic oligonucleotide
uuuucaccaucgacucguu

SEQ ID NO: 120719 - RNA, 19 nt, Artificial Sequence
  Description of Artificial Sequence: Synthetic oligonucleotide
gcggcccaaaucuucauuc

SEQ ID NO: 120720 - RNA, 19 nt, Artificial Sequence
  Description of Artificial Sequence: Synthetic oligonucleotide
ugguguacacuugcugaau

SEQ ID NO: 120721 - RNA, 19 nt, Artificial Sequence
  Description of Artificial Sequence: Synthetic oligonucleotide
cgauccggaacugaggacc

SEQ ID NO: 120722 - RNA, 19 nt, Artificial Sequence
  Description of Artificial Sequence: Synthetic oligonucleotide
gcuuccgcaucgucacucg

SEQ ID NO: 120723 - RNA, 19 nt, Artificial Sequence
  Description of Artificial Sequence: Synthetic oligonucleotide
acucuuuuagucgcuugua

SEQ ID NO: 120724 - RNA, 19 nt, Artificial Sequence
  Description of Artificial Sequence: Synthetic oligonucleotide
aaauggcauuggcgucugu

SEQ ID NO: 120725 - RNA, 19 nt, Artificial Sequence
  Description of Artificial Sequence: Synthetic oligonucleotide
uggcugcuaugaacucgag

SEQ ID NO: 120726 - RNA, 19 nt, Artificial Sequence
  Description of Artificial Sequence: Synthetic oligonucleotide
aguuccccuuuggacagcu

SEQ ID NO: 120727 - RNA, 19 nt, Artificial Sequence
  Description of Artificial Sequence: Synthetic oligonucleotide
acgugcaagacugcugaaa

SEQ ID NO: 120728 - RNA, 19 nt, Artificial Sequence
  Description of Artificial Sequence: Synthetic oligonucleotide
agcaacccuuguaaagaca

SEQ ID NO: 120729 - RNA, 19 nt, Artificial Sequence
  Description of Artificial Sequence: Synthetic oligonucleotide
gcugauaacugcgcuccag

SEQ ID NO: 120730 - RNA, 19 nt, Artificial Sequence
  Description of Artificial Sequence: Synthetic oligonucleotide
ugugggucacagacccuuu

SEQ ID NO: 120731 - RNA, 19 nt, Artificial Sequence
  Description of Artificial Sequence: Synthetic oligonucleotide
ccucaagcaaacgagccuc

SEQ ID NO: 120732 - RNA, 19 nt, Artificial Sequence
  Description of Artificial Sequence: Synthetic oligonucleotide
gguauacucaaaaccgcaa

SEQ ID NO: 120733 - RNA, 19 nt, Artificial Sequence
  Description of Artificial Sequence: Synthetic oligonucleotide
uuccgcgcuaguucgucuu

SEQ ID NO: 120734 - RNA, 19 nt, Artificial Sequence
  Description of Artificial Sequence: Synthetic oligonucleotide
gccacgauccggaacugag

SEQ ID NO: 120735 - RNA, 19 nt, Artificial Sequence
  Description of Artificial Sequence: Synthetic oligonucleotide
caacccuuguaaagacaca

SEQ ID NO: 120736 - RNA, 19 nt, Artificial Sequence
  Description of Artificial Sequence: Synthetic oligonucleotide
aaccgcaagcuugcuuuaa

SEQ ID NO: 120737 - RNA, 19 nt, Artificial Sequence
  Description of Artificial Sequence: Synthetic oligonucleotide
ccgcugauaacugcgcucc

SEQ ID NO: 120738 - RNA, 19 nt, Artificial Sequence
  Description of Artificial Sequence: Synthetic oligonucleotide
gcuugguuggacugaugca

SEQ ID NO: 120739 - RNA, 19 nt, Artificial Sequence
  Description of Artificial Sequence: Synthetic oligonucleotide
uccguaaguuaggguaaau

SEQ ID NO: 120740 - RNA, 19 nt, Artificial Sequence
  Description of Artificial Sequence: Synthetic oligonucleotide
uugcuuccgcaucgucacu

SEQ ID NO: 120741 - RNA, 19 nt, Artificial Sequence
  Description of Artificial Sequence: Synthetic oligonucleotide
gcaaggcaaacgugcaaga

SEQ ID NO: 120742 - RNA, 19 nt, Artificial Sequence
  Description of Artificial Sequence: Synthetic oligonucleotide
acccgagguuugaaccugg

SEQ ID NO: 120743 - RNA, 19 nt, Artificial Sequence
  Description of Artificial Sequence: Synthetic oligonucleotide
agccccaauuccacauaag

SEQ ID NO: 120744 - RNA, 19 nt, Artificial Sequence
  Description of Artificial Sequence: Synthetic oligonucleotide
gcccugauuaugaauaugu

SEQ ID NO: 120745 - RNA, 19 nt, Artificial Sequence
  Description of Artificial Sequence: Synthetic oligonucleotide
auucaguaacuggguucug

SEQ ID NO: 120746 - RNA, 19 nt, Artificial Sequence
  Description of Artificial Sequence: Synthetic oligonucleotide
accgagcaagcagcucagg

SEQ ID NO: 120747 - RNA, 19 nt, Artificial Sequence
  Description of Artificial Sequence: Synthetic oligonucleotide
ugacauuaugagggauguu

SEQ ID NO: 120748 - RNA, 19 nt, Artificial Sequence
  Description of Artificial Sequence: Synthetic oligonucleotide
gauccggaacugaggaccu

SEQ ID NO: 120749 - RNA, 19 nt, Artificial Sequence
  Description of Artificial Sequence: Synthetic oligonucleotide
ggcccugauuaugaauaug

SEQ ID NO: 120750 - RNA, 19 nt, Artificial Sequence
  Description of Artificial Sequence: Synthetic oligonucleotide
uguuaacguagggcccuuu

SEQ ID NO: 120751 - RNA, 19 nt, Artificial Sequence
  Description of Artificial Sequence: Synthetic oligonucleotide
gguccguaaguuaggguaa

SEQ ID NO: 120752 - RNA, 19 nt, Artificial Sequence
  Description of Artificial Sequence: Synthetic oligonucleotide
ugcucacauuuccgcgcua

SEQ ID NO: 120753 - RNA, 19 nt, Artificial Sequence
  Description of Artificial Sequence: Synthetic oligonucleotide
cgguccguaaguuagggua

SEQ ID NO: 120754 - RNA, 19 nt, Artificial Sequence
  Description of Artificial Sequence: Synthetic oligonucleotide
caccaucgacucguuccag

SEQ ID NO: 120755 - RNA, 19 nt, Artificial Sequence
  Description of Artificial Sequence: Synthetic oligonucleotide
cgccugaaucaguaguuug

SEQ ID NO: 120756 - RNA, 19 nt, Artificial Sequence
  Description of Artificial Sequence: Synthetic oligonucleotide
uucaguccguggggauucu

SEQ ID NO: 120757 - RNA, 19 nt, Artificial Sequence
  Description of Artificial Sequence: Synthetic oligonucleotide
gcaaacgagccucagccuu

SEQ ID NO: 120758 - RNA, 19 nt, Artificial Sequence
  Description of Artificial Sequence: Synthetic oligonucleotide
uuucggccuucaucacauu

SEQ ID NO: 120759 - RNA, 19 nt, Artificial Sequence
  Description of Artificial Sequence: Synthetic oligonucleotide
guccguaaguuaggguaaa

SEQ ID NO: 120760 - RNA, 19 nt, Artificial Sequence
  Description of Artificial Sequence: Synthetic oligonucleotide
augcuugcuuccgcaucgu

SEQ ID NO: 120761 - RNA, 19 nt, Artificial Sequence
  Description of Artificial Sequence: Synthetic oligonucleotide
ccgacaaacugagcucccc

SEQ ID NO: 120762 - RNA, 19 nt, Artificial Sequence
  Description of Artificial Sequence: Synthetic oligonucleotide
ggagguaaaccugcacucu

SEQ ID NO: 120763 - RNA, 19 nt, Artificial Sequence
  Description of Artificial Sequence: Synthetic oligonucleotide
ccaagccgacaaacugagc

SEQ ID NO: 120764 - RNA, 19 nt, Artificial Sequence
  Description of Artificial Sequence: Synthetic oligonucleotide
caaacgagccucagccuuu

SEQ ID NO: 120765 - RNA, 19 nt, Artificial Sequence
  Description of Artificial Sequence: Synthetic oligonucleotide
cgacucguuccagauauuc

SEQ ID NO: 120766 - RNA, 19 nt, Artificial Sequence
  Description of Artificial Sequence: Synthetic oligonucleotide
  modified_base (14)..(14): a, c, u, g, unknown or other
cgcaucuccggggngcccc

SEQ ID NO: 120767 - RNA, 19 nt, Artificial Sequence
  Description of Artificial Sequence: Synthetic oligonucleotide
ccaaugcaagugaauagau

SEQ ID NO: 120768 - RNA, 19 nt, Artificial Sequence
  Description of Artificial Sequence: Synthetic oligonucleotide
cucacauuuccgcgcuagu

SEQ ID NO: 120769 - RNA, 19 nt, Artificial Sequence
  Description of Artificial Sequence: Synthetic oligonucleotide
cugaauuuguuaggugcuu

SEQ ID NO: 120770 - RNA, 19 nt, Artificial Sequence
  Description of Artificial Sequence: Synthetic oligonucleotide
ggcgacggcgugcagugcu

SEQ ID NO: 120771 - RNA, 19 nt, Artificial Sequence
  Description of Artificial Sequence: Synthetic oligonucleotide
gauggccgccugaaucagu

SEQ ID NO: 120772 - RNA, 19 nt, Artificial Sequence
  Description of Artificial Sequence: Synthetic oligonucleotide
ucgguuccccucgguccgu

SEQ ID NO: 120773 - RNA, 19 nt, Artificial Sequence
  Description of Artificial Sequence: Synthetic oligonucleotide
gcgacuggcguagaaggcu

SEQ ID NO: 120774 - RNA, 19 nt, Artificial Sequence
  Description of Artificial Sequence: Synthetic oligonucleotide
gcuuugucugguguacacu

SEQ ID NO: 120775 - RNA, 19 nt, Artificial Sequence
  Description of Artificial Sequence: Synthetic oligonucleotide
gguuggacugaugcacacu

SEQ ID NO: 120776 - RNA, 19 nt, Artificial Sequence
  Description of Artificial Sequence: Synthetic oligonucleotide
cgaacccaaugucuauuga

SEQ ID NO: 120777 - RNA, 19 nt, Artificial Sequence
  Description of Artificial Sequence: Synthetic oligonucleotide
ccgcaaggcccugauuaug

SEQ ID NO: 120778 - RNA, 19 nt, Artificial Sequence
  Description of Artificial Sequence: Synthetic oligonucleotide
cgcgcuaguucgucuugug

SEQ ID NO: 120779 - RNA, 19 nt, Artificial Sequence
  Description of Artificial Sequence: Synthetic oligonucleotide
caaaugcgucaucuucauu

SEQ ID NO: 120780 - RNA, 19 nt, Artificial Sequence
  Description of Artificial Sequence: Synthetic oligonucleotide
ccgcaagcuugcuuuaacu

SEQ ID NO: 120781 - RNA, 19 nt, Artificial Sequence
  Description of Artificial Sequence: Synthetic oligonucleotide
ggucaagaccgaucugcuu

SEQ ID NO: 120782 - RNA, 19 nt, Artificial Sequence
  Description of Artificial Sequence: Synthetic oligonucleotide
ggauugccaucuggaaugu

SEQ ID NO: 120783 - RNA, 19 nt, Artificial Sequence
  Description of Artificial Sequence: Synthetic oligonucleotide
ccgagcuugguuggacuga

SEQ ID NO: 120784 - RNA, 19 nt, Artificial Sequence
  Description of Artificial Sequence: Synthetic oligonucleotide
gguuccccucgguccguaa

SEQ ID NO: 120785 - RNA, 19 nt, Artificial Sequence
  Description of Artificial Sequence: Synthetic oligonucleotide
ggcgaacccaaugucuauu

SEQ ID NO: 120786 - RNA, 19 nt, Artificial Sequence
  Description of Artificial Sequence: Synthetic oligonucleotide
gccgcaaggcccugauuau

SEQ ID NO: 120787 - RNA, 19 nt, Artificial Sequence
  Description of Artificial Sequence: Synthetic oligonucleotide
gccgccugaaucaguaguu

SEQ ID NO: 120788 - RNA, 19 nt, Artificial Sequence
  Description of Artificial Sequence: Synthetic oligonucleotide
cgaccacaagccuuaucua

SEQ ID NO: 120789 - RNA, 19 nt, Artificial Sequence
  Description of Artificial Sequence: Synthetic oligonucleotide
cuguuaacguagggcccuu

SEQ ID NO: 120790 - RNA, 19 nt, Artificial Sequence
  Description of Artificial Sequence: Synthetic oligonucleotide
ccgaucugcuucaguccgu

SEQ ID NO: 120791 - RNA, 19 nt, Artificial Sequence
  Description of Artificial Sequence: Synthetic oligonucleotide
cgaugaggaccugcucaca

SEQ ID NO: 120792 - RNA, 19 nt, Artificial Sequence
  Description of Artificial Sequence: Synthetic oligonucleotide
ccgcuguggcgacuggcgu

SEQ ID NO: 120793 - RNA, 19 nt, Artificial Sequence
  Description of Artificial Sequence: Synthetic oligonucleotide
ccgccugaaucaguaguuu

SEQ ID NO: 120794 - RNA, 19 nt, Artificial Sequence
  Description of Artificial Sequence: Synthetic oligonucleotide
ccgcaucgucacucgcacu

SEQ ID NO: 120795 - RNA, 19 nt, Artificial Sequence
  Description of Artificial Sequence: Synthetic oligonucleotide
ccccgacgcucgggcgacg

SEQ ID NO: 120796 - RNA, 19 nt, Artificial Sequence
  Description of Artificial Sequence: Synthetic oligonucleotide
ccgcgcuaguucgucuugu

SEQ ID NO: 120797 - RNA, 19 nt, Artificial Sequence
  Description of Artificial Sequence: Synthetic oligonucleotide
cggcgaacccaaugucuau

SEQ ID NO: 120798 - RNA, 19 nt, Artificial Sequence
  Description of Artificial Sequence: Synthetic oligonucleotide
cgguuccccucgguccgua

SEQ ID NO: 120799 - RNA, 19 nt, Artificial Sequence
  Description of Artificial Sequence: Synthetic oligonucleotide
aaaucgauuguucaccagc

SEQ ID NO: 120800 - RNA, 19 nt, Artificial Sequence
  Description of Artificial Sequence: Synthetic oligonucleotide
agauauuagauccaugccg

SEQ ID NO: 120801 - RNA, 19 nt, Artificial Sequence
  Description of Artificial Sequence: Synthetic oligonucleotide
ucauaguuaagcaggaagg

SEQ ID NO: 120802 - RNA, 19 nt, Artificial Sequence
  Description of Artificial Sequence: Synthetic oligonucleotide
aacaugaauaauucgaccu

SEQ ID NO: 120803 - RNA, 19 nt, Artificial Sequence
  Description of Artificial Sequence: Synthetic oligonucleotide
uaagcuagcaauaucuaag

SEQ ID NO: 120804 - RNA, 19 nt, Artificial Sequence
  Description of Artificial Sequence: Synthetic oligonucleotide
uaguuuacggcaaagaagu

SEQ ID NO: 120805 - RNA, 19 nt, Artificial Sequence
  Description of Artificial Sequence: Synthetic oligonucleotide
uaguauaugugaaaauagg

SEQ ID NO: 120806 - RNA, 19 nt, Artificial Sequence
  Description of Artificial Sequence: Synthetic oligonucleotide
auaauucgaccucagauuc

SEQ ID NO: 120807 - RNA, 19 nt, Artificial Sequence
  Description of Artificial Sequence: Synthetic oligonucleotide
acuugaaaucacuuggggc

SEQ ID NO: 120808 - RNA, 19 nt, Artificial Sequence
  Description of Artificial Sequence: Synthetic oligonucleotide
uucaguuagacguaagugc

SEQ ID NO: 120809 - RNA, 19 nt, Artificial Sequence
  Description of Artificial Sequence: Synthetic oligonucleotide
ucuuggagugauuuuaagg

SEQ ID NO: 120810 - RNA, 19 nt, Artificial Sequence
  Description of Artificial Sequence: Synthetic oligonucleotide
aauaauucgaccucagauu

SEQ ID NO: 120811 - RNA, 19 nt, Artificial Sequence
  Description of Artificial Sequence: Synthetic oligonucleotide
uagauuacuauccauuaac

SEQ ID NO: 120812 - RNA, 19 nt, Artificial Sequence
  Description of Artificial Sequence: Synthetic oligonucleotide
auuuuaagggcacacacca

SEQ ID NO: 120813 - RNA, 19 nt, Artificial Sequence
  Description of Artificial Sequence: Synthetic oligonucleotide
agugcuaucaaauccauaa

SEQ ID NO: 120814 - RNA, 19 nt, Artificial Sequence
  Description of Artificial Sequence: Synthetic oligonucleotide
cuaguauaugugaaaauag

SEQ ID NO: 120815 - RNA, 19 nt, Artificial Sequence
  Description of Artificial Sequence: Synthetic oligonucleotide
aaugcggacucuaucauac

SEQ ID NO: 120816 - RNA, 19 nt, Artificial Sequence
  Description of Artificial Sequence: Synthetic oligonucleotide
uguugauaggccuucaaca

SEQ ID NO: 120817 - RNA, 19 nt, Artificial Sequence
  Description of Artificial Sequence: Synthetic oligonucleotide
cauaacuagucagagaucc

SEQ ID NO: 120818 - RNA, 19 nt, Artificial Sequence
  Description of Artificial Sequence: Synthetic oligonucleotide
auagaagauccacagagug

SEQ ID NO: 120819 - RNA, 19 nt, Artificial Sequence
  Description of Artificial Sequence: Synthetic oligonucleotide
uuuaagaccucggugacag

SEQ ID NO: 120820 - RNA, 19 nt, Artificial Sequence
  Description of Artificial Sequence: Synthetic oligonucleotide
uuuacggcaaagaaguggu

SEQ ID NO: 120821 - RNA, 19 nt, Artificial Sequence
  Description of Artificial Sequence: Synthetic oligonucleotide
ucaucaauccagauauuag

SEQ ID NO: 120822 - RNA, 19 nt, Artificial Sequence
  Description of Artificial Sequence: Synthetic oligonucleotide
uauaaucccuccuucagca

SEQ ID NO: 120823 - RNA, 19 nt, Artificial Sequence
  Description of Artificial Sequence: Synthetic oligonucleotide
auacugagacgcuagguac

SEQ ID NO: 120824 - RNA, 19 nt, Artificial Sequence
  Description of Artificial Sequence: Synthetic oligonucleotide
caagugacgaagcauaagc

SEQ ID NO: 120825 - RNA, 19 nt, Artificial Sequence
  Description of Artificial Sequence: Synthetic oligonucleotide
ugugaaaauaggcuagugu

SEQ ID NO: 120826 - RNA, 19 nt, Artificial Sequence
  Description of Artificial Sequence: Synthetic oligonucleotide
ucagaguuauaucacuuug

SEQ ID NO: 120827 - RNA, 19 nt, Artificial Sequence
  Description of Artificial Sequence: Synthetic oligonucleotide
aaugcgugauccaagguuc

SEQ ID NO: 120828 - RNA, 19 nt, Artificial Sequence
  Description of Artificial Sequence: Synthetic oligonucleotide
cuugaaaucacuuggggca

SEQ ID NO: 120829 - RNA, 19 nt, Artificial Sequence
  Description of Artificial Sequence: Synthetic oligonucleotide
ucaguuagacguaagugcu

SEQ ID NO: 120830 - RNA, 19 nt, Artificial Sequence
  Description of Artificial Sequence: Synthetic oligonucleotide
aagauauccgaucucugca

SEQ ID NO: 120831 - RNA, 19 nt, Artificial Sequence
  Description of Artificial Sequence: Synthetic oligonucleotide
aaaugguggcccaaaauuc

SEQ ID NO: 120832 - RNA, 19 nt, Artificial Sequence
  Description of Artificial Sequence: Synthetic oligonucleotide
ucuaguaggauggaccagg

SEQ ID NO: 120833 - RNA, 19 nt, Artificial Sequence
  Description of Artificial Sequence: Synthetic oligonucleotide
ucagggauuaguuuacggc

SEQ ID NO: 120834 - RNA, 19 nt, Artificial Sequence
  Description of Artificial Sequence: Synthetic oligonucleotide
uucucuauugacuaacccu

SEQ ID NO: 120835 - RNA, 19 nt, Artificial Sequence
  Description of Artificial Sequence: Synthetic oligonucleotide
guaaguaucuuuaggaggc

SEQ ID NO: 120836 - RNA, 19 nt, Artificial Sequence
  Description of Artificial Sequence: Synthetic oligonucleotide
uccacugggaugaauaacu

SEQ ID NO: 120837 - RNA, 19 nt, Artificial Sequence
  Description of Artificial Sequence: Synthetic oligonucleotide
cagacccuaaguaauagcc

SEQ ID NO: 120838 - RNA, 19 nt, Artificial Sequence
  Description of Artificial Sequence: Synthetic oligonucleotide
uggaauugaaccaaaccaa

SEQ ID NO: 120839 - RNA, 19 nt, Artificial Sequence
  Description of Artificial Sequence: Synthetic oligonucleotide
acaugaauaauucgaccuc

SEQ ID NO: 120840 - RNA, 19 nt, Artificial Sequence
  Description of Artificial Sequence: Synthetic oligonucleotide
uuauaucacuuugagagca

SEQ ID NO: 120841 - RNA, 19 nt, Artificial Sequence
  Description of Artificial Sequence: Synthetic oligonucleotide
cacuaauuaaguccaagag

SEQ ID NO: 120842 - RNA, 19 nt, Artificial Sequence
  Description of Artificial Sequence: Synthetic oligonucleotide
uuaauaguaauuaguucau

SEQ ID NO: 120843 - RNA, 19 nt, Artificial Sequence
  Description of Artificial Sequence: Synthetic oligonucleotide
gaacgaucuaguaggaugg

SEQ ID NO: 120844 - RNA, 19 nt, Artificial Sequence
  Description of Artificial Sequence: Synthetic oligonucleotide
cuugaaagugaccuuuggg

SEQ ID NO: 120845 - RNA, 19 nt, Artificial Sequence
  Description of Artificial Sequence: Synthetic oligonucleotide
acccaaaucaguuuaauuu

SEQ ID NO: 120846 - RNA, 19 nt, Artificial Sequence
  Description of Artificial Sequence: Synthetic oligonucleotide
uuauacuagaugcuguuua

SEQ ID NO: 120847 - RNA, 19 nt, Artificial Sequence
  Description of Artificial Sequence: Synthetic oligonucleotide
ucuggcaauauauucgacu

SEQ ID NO: 120848 - RNA, 19 nt, Artificial Sequence
  Description of Artificial Sequence: Synthetic oligonucleotide
ucaugaggcuuauauaaca

SEQ ID NO: 120849 - RNA, 19 nt, Artificial Sequence
  Description of Artificial Sequence: Synthetic oligonucleotide
augcuacauaguuacuugc

SEQ ID NO: 120850 - RNA, 19 nt, Artificial Sequence
  Description of Artificial Sequence: Synthetic oligonucleotide
uauaacguuccguguaucc

SEQ ID NO: 120851 - RNA, 19 nt, Artificial Sequence
  Description of Artificial Sequence: Synthetic oligonucleotide
gacucuaucauacagcaua

SEQ ID NO: 120852 - RNA, 19 nt, Artificial Sequence
  Description of Artificial Sequence: Synthetic oligonucleotide
aauccacuaauuaagucca

SEQ ID NO: 120853 - RNA, 19 nt, Artificial Sequence
  Description of Artificial Sequence: Synthetic oligonucleotide
uuagacguaagugcuauca

SEQ ID NO: 120854 - RNA, 19 nt, Artificial Sequence
  Description of Artificial Sequence: Synthetic oligonucleotide
uguauccuguaucauagaa

SEQ ID NO: 120855 - RNA, 19 nt, Artificial Sequence
  Description of Artificial Sequence: Synthetic oligonucleotide
agcggaaugaaucugcccu

SEQ ID NO: 120856 - RNA, 19 nt, Artificial Sequence
  Description of Artificial Sequence: Synthetic oligonucleotide
ugaucaucgauuucuauuu

SEQ ID NO: 120857 - RNA, 19 nt, Artificial Sequence
  Description of Artificial Sequence: Synthetic oligonucleotide
uguaucauagaagauccac

SEQ ID NO: 120858 - RNA, 19 nt, Artificial Sequence
  Description of Artificial Sequence: Synthetic oligonucleotide
gagggguauagucaggaag

SEQ ID NO: 120859 - RNA, 19 nt, Artificial Sequence
  Description of Artificial Sequence: Synthetic oligonucleotide
uuaaaucgauuguucacca

SEQ ID NO: 120860 - RNA, 19 nt, Artificial Sequence
  Description of Artificial Sequence: Synthetic oligonucleotide
uugcuauacuuacuuauga

SEQ ID NO: 120861 - RNA, 19 nt, Artificial Sequence
  Description of Artificial Sequence: Synthetic oligonucleotide
aacuaucuguaggugaguc

SEQ ID NO: 120862 - RNA, 19 nt, Artificial Sequence
  Description of Artificial Sequence: Synthetic oligonucleotide
ucuauuugacccauuuuau

SEQ ID NO: 120863 - RNA, 19 nt, Artificial Sequence
  Description of Artificial Sequence: Synthetic oligonucleotide
guuuacggcaaagaagugg

SEQ ID NO: 120864 - RNA, 19 nt, Artificial Sequence
  Description of Artificial Sequence: Synthetic oligonucleotide
ugcuacauaguuacuugcc

SEQ ID NO: 120865 - RNA, 19 nt, Artificial Sequence
  Description of Artificial Sequence: Synthetic oligonucleotide
guaauugucaacaucuuga

SEQ ID NO: 120866 - RNA, 19 nt, Artificial Sequence
  Description of Artificial Sequence: Synthetic oligonucleotide
ugugccuguuuuaggauag

SEQ ID NO: 120867 - RNA, 19 nt, Artificial Sequence
  Description of Artificial Sequence: Synthetic oligonucleotide
ucgauuguucaccagcugu

SEQ ID NO: 120868 - RNA, 19 nt, Artificial Sequence
  Description of Artificial Sequence: Synthetic oligonucleotide
acagacccuaaguaauagc

SEQ ID NO: 120869 - RNA, 19 nt, Artificial Sequence
  Description of Artificial Sequence: Synthetic oligonucleotide
uauauuuaaaggcgccuuc

SEQ ID NO: 120870 - RNA, 19 nt, Artificial Sequence
  Description of Artificial Sequence: Synthetic oligonucleotide
agcaaugcgugauccaagg

SEQ ID NO: 120871 - RNA, 19 nt, Artificial Sequence
  Description of Artificial Sequence: Synthetic oligonucleotide
ugcuguuuaaauugguuaa

SEQ ID NO: 120872 - RNA, 19 nt, Artificial Sequence
  Description of Artificial Sequence: Synthetic oligonucleotide
gcuauacuuacuuaugaag

SEQ ID NO: 120873 - RNA, 19 nt, Artificial Sequence
  Description of Artificial Sequence: Synthetic oligonucleotide
aaaucauuaaugacuggga

SEQ ID NO: 120874 - RNA, 19 nt, Artificial Sequence
  Description of Artificial Sequence: Synthetic oligonucleotide
aggcggaaauacuugacuc

SEQ ID NO: 120875 - RNA, 19 nt, Artificial Sequence
  Description of Artificial Sequence: Synthetic oligonucleotide
aagcuuaauaguaauuagu

SEQ ID NO: 120876 - RNA, 19 nt, Artificial Sequence
  Description of Artificial Sequence: Synthetic oligonucleotide
uuuauauuuaaaggcgccu

SEQ ID NO: 120877 - RNA, 19 nt, Artificial Sequence
  Description of Artificial Sequence: Synthetic oligonucleotide
ugcggacucuaucauacag

SEQ ID NO: 120878 - RNA, 19 nt, Artificial Sequence
  Description of Artificial Sequence: Synthetic oligonucleotide
cuggcaauauauucgacuc

SEQ ID NO: 120879 - RNA, 19 nt, Artificial Sequence
  Description of Artificial Sequence: Synthetic oligonucleotide
uuggagugauuuuaagggc

SEQ ID NO: 120880 - RNA, 19 nt, Artificial Sequence
  Description of Artificial Sequence: Synthetic oligonucleotide
gaauaauucgaccucagau

SEQ ID NO: 120881 - RNA, 19 nt, Artificial Sequence
  Description of Artificial Sequence: Synthetic oligonucleotide
uacauggcggguaccaaag

SEQ ID NO: 120882 - RNA, 19 nt, Artificial Sequence
  Description of Artificial Sequence: Synthetic oligonucleotide
auauuagauccaugccggc

SEQ ID NO: 120883 - RNA, 19 nt, Artificial Sequence
  Description of Artificial Sequence: Synthetic oligonucleotide
gaaagauagccuccauaag

SEQ ID NO: 120884 - RNA, 19 nt, Artificial Sequence
  Description of Artificial Sequence: Synthetic oligonucleotide
uuuaggaggccacuaaguu

SEQ ID NO: 120885 - RNA, 19 nt, Artificial Sequence
  Description of Artificial Sequence: Synthetic oligonucleotide
uaagcgauuugguucugag

SEQ ID NO: 120886 - RNA, 19 nt, Artificial Sequence
  Description of Artificial Sequence: Synthetic oligonucleotide
uugaucaucgauuucuauu

SEQ ID NO: 120887 - RNA, 19 nt, Artificial Sequence
  Description of Artificial Sequence: Synthetic oligonucleotide
acaugguuaagguauuaga

SEQ ID NO: 120888 - RNA, 19 nt, Artificial Sequence
  Description of Artificial Sequence: Synthetic oligonucleotide
guuauaucacuuugagagc

SEQ ID NO: 120889 - RNA, 19 nt, Artificial Sequence
  Description of Artificial Sequence: Synthetic oligonucleotide
gauagcggaaugaaucugc

SEQ ID NO: 120890 - RNA, 19 nt, Artificial Sequence
  Description of Artificial Sequence: Synthetic oligonucleotide
caugcuacauaguuacuug

SEQ ID NO: 120891 - RNA, 19 nt, Artificial Sequence
  Description of Artificial Sequence: Synthetic oligonucleotide
auauauucgacuccuucaa

SEQ ID NO: 120892 - RNA, 19 nt, Artificial Sequence
  Description of Artificial Sequence: Synthetic oligonucleotide
ugaggguagaucuguaagu

SEQ ID NO: 120893 - RNA, 19 nt, Artificial Sequence
  Description of Artificial Sequence: Synthetic oligonucleotide
uauaucacuuugagagcag

SEQ ID NO: 120894 - RNA, 19 nt, Artificial Sequence
  Description of Artificial Sequence: Synthetic oligonucleotide
acguaagugcuaucaaauc

SEQ ID NO: 120895 - RNA, 19 nt, Artificial Sequence
  Description of Artificial Sequence: Synthetic oligonucleotide
aacuagucagagauccugg

SEQ ID NO: 120896 - RNA, 19 nt, Artificial Sequence
  Description of Artificial Sequence: Synthetic oligonucleotide
cuauaaucccuccuucagc

SEQ ID NO: 120897 - RNA, 19 nt, Artificial Sequence
  Description of Artificial Sequence: Synthetic oligonucleotide
agacuugugauuaaacuca

SEQ ID NO: 120898 - RNA, 19 nt, Artificial Sequence
  Description of Artificial Sequence: Synthetic oligonucleotide
augaagucauacugagacg

SEQ ID NO: 120899 - RNA, 19 nt, Artificial Sequence
  Description of Artificial Sequence: Synthetic oligonucleotide
uacuagaugcuguuuaaau

SEQ ID NO: 120900 - RNA, 19 nt, Artificial Sequence
  Description of Artificial Sequence: Synthetic oligonucleotide
agaacuaucuguaggugag

SEQ ID NO: 120901 - RNA, 19 nt, Artificial Sequence
  Description of Artificial Sequence: Synthetic oligonucleotide
guaacaugaauaauucgac

SEQ ID NO: 120902 - RNA, 19 nt, Artificial Sequence
  Description of Artificial Sequence: Synthetic oligonucleotide
uauacuagaugcuguuuaa

SEQ ID NO: 120903 - RNA, 19 nt, Artificial Sequence
  Description of Artificial Sequence: Synthetic oligonucleotide
cagauauuagauccaugcc

SEQ ID NO: 120904 - RNA, 19 nt, Artificial Sequence
  Description of Artificial Sequence: Synthetic oligonucleotide
auacuuacuuaugaagaag

SEQ ID NO: 120905 - RNA, 19 nt, Artificial Sequence
  Description of Artificial Sequence: Synthetic oligonucleotide
ugacuaacccuccucauuu

SEQ ID NO: 120906 - RNA, 19 nt, Artificial Sequence
  Description of Artificial Sequence: Synthetic oligonucleotide
uuaagguauuagauuacua

SEQ ID NO: 120907 - RNA, 19 nt, Artificial Sequence
  Description of Artificial Sequence: Synthetic oligonucleotide
uaacguuccguguauccug

SEQ ID NO: 120908 - RNA, 19 nt, Artificial Sequence
  Description of Artificial Sequence: Synthetic oligonucleotide
uagaucuguaagucauagg

SEQ ID NO: 120909 - RNA, 19 nt, Artificial Sequence
  Description of Artificial Sequence: Synthetic oligonucleotide
caucaauccagauauuaga

SEQ ID NO: 120910 - RNA, 19 nt, Artificial Sequence
  Description of Artificial Sequence: Synthetic oligonucleotide
aauccaaaaugguggccca

SEQ ID NO: 120911 - RNA, 19 nt, Artificial Sequence
  Description of Artificial Sequence: Synthetic oligonucleotide
gaugcaguucauaauguuc

SEQ ID NO: 120912 - RNA, 19 nt, Artificial Sequence
  Description of Artificial Sequence: Synthetic oligonucleotide
ucauccaagaacccgugua

SEQ ID NO: 120913 - RNA, 19 nt, Artificial Sequence
  Description of Artificial Sequence: Synthetic oligonucleotide
cugaggguagaucuguaag

SEQ ID NO: 120914 - RNA, 19 nt, Artificial Sequence
  Description of Artificial Sequence: Synthetic oligonucleotide
ggaguaagcgauuugguuc

SEQ ID NO: 120915 - RNA, 19 nt, Artificial Sequence
  Description of Artificial Sequence: Synthetic oligonucleotide
ccauauaugaagagcacag

SEQ ID NO: 120916 - RNA, 19 nt, Artificial Sequence
  Description of Artificial Sequence: Synthetic oligonucleotide
ugccugcuaauuuucaaac

SEQ ID NO: 120917 - RNA, 19 nt, Artificial Sequence
  Description of Artificial Sequence: Synthetic oligonucleotide
uccccuguugucuaucacc

SEQ ID NO: 120918 - RNA, 19 nt, Artificial Sequence
  Description of Artificial Sequence: Synthetic oligonucleotide
aaucgauuguucaccagcu

SEQ ID NO: 120919 - RNA, 19 nt, Artificial Sequence
  Description of Artificial Sequence: Synthetic oligonucleotide
aggauagcggaaugaaucu

SEQ ID NO: 120920 - RNA, 19 nt, Artificial Sequence
  Description of Artificial Sequence: Synthetic oligonucleotide
auacugcuaguauauguga

SEQ ID NO: 120921 - RNA, 19 nt, Artificial Sequence
  Description of Artificial Sequence: Synthetic oligonucleotide
ugugaauauguggugcuga

SEQ ID NO: 120922 - RNA, 19 nt, Artificial Sequence
  Description of Artificial Sequence: Synthetic oligonucleotide
aguccaagaggcuuauacu

SEQ ID NO: 120923 - RNA, 19 nt, Artificial Sequence
  Description of Artificial Sequence: Synthetic oligonucleotide
uaucuaaguuacauucaaa

SEQ ID NO: 120924 - RNA, 19 nt, Artificial Sequence
  Description of Artificial Sequence: Synthetic oligonucleotide
uggcaauauauucgacucc

SEQ ID NO: 120925 - RNA, 19 nt, Artificial Sequence
  Description of Artificial Sequence: Synthetic oligonucleotide
ggaaagauagccuccauaa

SEQ ID NO: 120926 - RNA, 19 nt, Artificial Sequence
  Description of Artificial Sequence: Synthetic oligonucleotide
uuccguguauccuguauca

SEQ ID NO: 120927 - RNA, 19 nt, Artificial Sequence
  Description of Artificial Sequence: Synthetic oligonucleotide
guacuuauacuagaugcug

SEQ ID NO: 120928 - RNA, 19 nt, Artificial Sequence
  Description of Artificial Sequence: Synthetic oligonucleotide
gucagggauuaguuuacgg

SEQ ID NO: 120929 - RNA, 19 nt, Artificial Sequence
  Description of Artificial Sequence: Synthetic oligonucleotide
aucuauaaucccuccuuca

SEQ ID NO: 120930 - RNA, 19 nt, Artificial Sequence
  Description of Artificial Sequence: Synthetic oligonucleotide
uuaaaggcgccuucaaauu

SEQ ID NO: 120931 - RNA, 19 nt, Artificial Sequence
  Description of Artificial Sequence: Synthetic oligonucleotide
aauucgaccucagauucau

SEQ ID NO: 120932 - RNA, 19 nt, Artificial Sequence
  Description of Artificial Sequence: Synthetic oligonucleotide
ggucaugaggcuuauauaa

SEQ ID NO: 120933 - RNA, 19 nt, Artificial Sequence
  Description of Artificial Sequence: Synthetic oligonucleotide
gacgcuagguacuggaguc

SEQ ID NO: 120934 - RNA, 19 nt, Artificial Sequence
  Description of Artificial Sequence: Synthetic oligonucleotide
guaggugagucugggaacg

SEQ ID NO: 120935 - RNA, 19 nt, Artificial Sequence
  Description of Artificial Sequence: Synthetic oligonucleotide
agugacgaagcauaagcua

SEQ ID NO: 120936 - RNA, 19 nt, Artificial Sequence
  Description of Artificial Sequence: Synthetic oligonucleotide
acccugaagauauccgauc

SEQ ID NO: 120937 - RNA, 19 nt, Artificial Sequence
  Description of Artificial Sequence: Synthetic oligonucleotide
cucuaugagucucugucug

SEQ ID NO: 120938 - RNA, 19 nt, Artificial Sequence
  Description of Artificial Sequence: Synthetic oligonucleotide
auagcggaaugaaucugcc

SEQ ID NO: 120939 - RNA, 19 nt, Artificial Sequence
  Description of Artificial Sequence: Synthetic oligonucleotide
aucguuuauauuugccaga

SEQ ID NO: 120940 - RNA, 19 nt, Artificial Sequence
  Description of Artificial Sequence: Synthetic oligonucleotide
uauccucgugguauuguug

SEQ ID NO: 120941 - RNA, 19 nt, Artificial Sequence
  Description of Artificial Sequence: Synthetic oligonucleotide
auaacuggucacauacagg

SEQ ID NO: 120942 - RNA, 19 nt, Artificial Sequence
  Description of Artificial Sequence: Synthetic oligonucleotide
aguacuuauacuagaugcu

SEQ ID NO: 120943 - RNA, 19 nt, Artificial Sequence
  Description of Artificial Sequence: Synthetic oligonucleotide
ucuuacauggcggguacca

SEQ ID NO: 120944 - RNA, 19 nt, Artificial Sequence
  Description of Artificial Sequence: Synthetic oligonucleotide
aaaaccuugccugcuaauu

SEQ ID NO: 120945 - RNA, 19 nt, Artificial Sequence
  Description of Artificial Sequence: Synthetic oligonucleotide
aaaauaggcuagugugaau

SEQ ID NO: 120946 - RNA, 19 nt, Artificial Sequence
  Description of Artificial Sequence: Synthetic oligonucleotide
uaugagucucugucugucc

SEQ ID NO: 120947 - RNA, 19 nt, Artificial Sequence
  Description of Artificial Sequence: Synthetic oligonucleotide
auaguuaagcaggaaggcu

SEQ ID NO: 120948 - RNA, 19 nt, Artificial Sequence
  Description of Artificial Sequence: Synthetic oligonucleotide
ugggaaggaaaguuaccca

SEQ ID NO: 120949 - RNA, 19 nt, Artificial Sequence
  Description of Artificial Sequence: Synthetic oligonucleotide
aaacaaauuuuggcacgag

SEQ ID NO: 120950 - RNA, 19 nt, Artificial Sequence
  Description of Artificial Sequence: Synthetic oligonucleotide
aagugacgaagcauaagcu

SEQ ID NO: 120951 - RNA, 19 nt, Artificial Sequence
  Description of Artificial Sequence: Synthetic oligonucleotide
acugagugugccuugguuu

SEQ ID NO: 120952 - RNA, 19 nt, Artificial Sequence
  Description of Artificial Sequence: Synthetic oligonucleotide
acuuauacuagaugcuguu

SEQ ID NO: 120953 - RNA, 19 nt, Artificial Sequence
  Description of Artificial Sequence: Synthetic oligonucleotide
uacugagacgcuagguacu

SEQ ID NO: 120954 - RNA, 19 nt, Artificial Sequence
  Description of Artificial Sequence: Synthetic oligonucleotide
aaaugcggacucuaucaua

SEQ ID NO: 120955 - RNA, 19 nt, Artificial Sequence
  Description of Artificial Sequence: Synthetic oligonucleotide
uucgccaggguuugcauaa

SEQ ID NO: 120956 - RNA, 19 nt, Artificial Sequence
  Description of Artificial Sequence: Synthetic oligonucleotide
aaucagaguuauaucacuu

SEQ ID NO: 120957 - RNA, 19 nt, Artificial Sequence
  Description of Artificial Sequence: Synthetic oligonucleotide
uguguacaugguuaaggua

SEQ ID NO: 120958 - RNA, 19 nt, Artificial Sequence
  Description of Artificial Sequence: Synthetic oligonucleotide
uggguggcccauauaacgu

SEQ ID NO: 120959 - RNA, 19 nt, Artificial Sequence
  Description of Artificial Sequence: Synthetic oligonucleotide
ggaucguuuauauuugcca

SEQ ID NO: 120960 - RNA, 19 nt, Artificial Sequence
  Description of Artificial Sequence: Synthetic oligonucleotide
acuaucuguaggugagucu

SEQ ID NO: 120961 - RNA, 19 nt, Artificial Sequence
  Description of Artificial Sequence: Synthetic oligonucleotide
ugccuuuaugugaaaggaa

SEQ ID NO: 120962 - RNA, 19 nt, Artificial Sequence
  Description of Artificial Sequence: Synthetic oligonucleotide
cuaguaggauggaccaggc

SEQ ID NO: 120963 - RNA, 19 nt, Artificial Sequence
  Description of Artificial Sequence: Synthetic oligonucleotide
uuacauggcggguaccaaa

SEQ ID NO: 120964 - RNA, 19 nt, Artificial Sequence
  Description of Artificial Sequence: Synthetic oligonucleotide
agacgcuagguacuggagu

SEQ ID NO: 120965 - RNA, 19 nt, Artificial Sequence
  Description of Artificial Sequence: Synthetic oligonucleotide
guacaaucaucaacucugg

SEQ ID NO: 120966 - RNA, 19 nt, Artificial Sequence
  Description of Artificial Sequence: Synthetic oligonucleotide
augccggccaagaacuucc

SEQ ID NO: 120967 - RNA, 19 nt, Artificial Sequence
  Description of Artificial Sequence: Synthetic oligonucleotide
ugguuugucagggauuagu

SEQ ID NO: 120968 - RNA, 19 nt, Artificial Sequence
  Description of Artificial Sequence: Synthetic oligonucleotide
aauccagauauuagaucca

SEQ ID NO: 120969 - RNA, 19 nt, Artificial Sequence
  Description of Artificial Sequence: Synthetic oligonucleotide
uacaaucaucaacucuggu

SEQ ID NO: 120970 - RNA, 19 nt, Artificial Sequence
  Description of Artificial Sequence: Synthetic oligonucleotide
caucuauaaucccuccuuc

SEQ ID NO: 120971 - RNA, 19 nt, Artificial Sequence
  Description of Artificial Sequence: Synthetic oligonucleotide
uagacguaagugcuaucaa

SEQ ID NO: 120972 - RNA, 19 nt, Artificial Sequence
  Description of Artificial Sequence: Synthetic oligonucleotide
aucaauccagauauuagau

SEQ ID NO: 120973 - RNA, 19 nt, Artificial Sequence
  Description of Artificial Sequence: Synthetic oligonucleotide
cuauucaguuagacguaag

SEQ ID NO: 120974 - RNA, 19 nt, Artificial Sequence
  Description of Artificial Sequence: Synthetic oligonucleotide
acuagucagagauccugga

SEQ ID NO: 120975 - RNA, 19 nt, Artificial Sequence
  Description of Artificial Sequence: Synthetic oligonucleotide
uugacuaacccuccucauu

SEQ ID NO: 120976 - RNA, 19 nt, Artificial Sequence
  Description of Artificial Sequence: Synthetic oligonucleotide
caaagaaguggucuggaaa

SEQ ID NO: 120977 - RNA, 19 nt, Artificial Sequence
  Description of Artificial Sequence: Synthetic oligonucleotide
guguaaauccaguaguacu

SEQ ID NO: 120978 - RNA, 19 nt, Artificial Sequence
  Description of Artificial Sequence: Synthetic oligonucleotide
cuggaucguuuauauuugc

SEQ ID NO: 120979 - RNA, 19 nt, Artificial Sequence
  Description of Artificial Sequence: Synthetic oligonucleotide
ugcuaguauaugugaaaau

SEQ ID NO: 120980 - RNA, 19 nt, Artificial Sequence
  Description of Artificial Sequence: Synthetic oligonucleotide
gaaaccccaguccaucaga

SEQ ID NO: 120981 - RNA, 19 nt, Artificial Sequence
  Description of Artificial Sequence: Synthetic oligonucleotide
gacccuaaguaauagcccu

SEQ ID NO: 120982 - RNA, 19 nt, Artificial Sequence
  Description of Artificial Sequence: Synthetic oligonucleotide
uaauugcuauuucuucuuu

SEQ ID NO: 120983 - RNA, 19 nt, Artificial Sequence
  Description of Artificial Sequence: Synthetic oligonucleotide
auaacguuccguguauccu

SEQ ID NO: 120984 - RNA, 19 nt, Artificial Sequence
  Description of Artificial Sequence: Synthetic oligonucleotide
gaguaagcgauuugguucu

SEQ ID NO: 120985 - RNA, 19 nt, Artificial Sequence
  Description of Artificial Sequence: Synthetic oligonucleotide
agucagccucaccacuucg

SEQ ID NO: 120986 - RNA, 19 nt, Artificial Sequence
  Description of Artificial Sequence: Synthetic oligonucleotide
acgaucuaguaggauggac

SEQ ID NO: 120987 - RNA, 19 nt, Artificial Sequence
  Description of Artificial Sequence: Synthetic oligonucleotide
gaaaguuacccaaaucagu

SEQ ID NO: 120988 - RNA, 19 nt, Artificial Sequence
  Description of Artificial Sequence: Synthetic oligonucleotide
uccuggaauugaaccaaac

SEQ ID NO: 120989 - RNA, 19 nt, Artificial Sequence
  Description of Artificial Sequence: Synthetic oligonucleotide
ugacugggaaagucauaag

SEQ ID NO: 120990 - RNA, 19 nt, Artificial Sequence
  Description of Artificial Sequence: Synthetic oligonucleotide
gagaucagaacuaucugua

SEQ ID NO: 120991 - RNA, 19 nt, Artificial Sequence
  Description of Artificial Sequence: Synthetic oligonucleotide
ugucagggauuaguuuacg

SEQ ID NO: 120992 - RNA, 19 nt, Artificial Sequence
  Description of Artificial Sequence: Synthetic oligonucleotide
cagaguuauaucacuuuga

SEQ ID NO: 120993 - RNA, 19 nt, Artificial Sequence
  Description of Artificial Sequence: Synthetic oligonucleotide
ugaauaacucaggggagau

SEQ ID NO: 120994 - RNA, 19 nt, Artificial Sequence
  Description of Artificial Sequence: Synthetic oligonucleotide
aguuagacguaagugcuau

SEQ ID NO: 120995 - RNA, 19 nt, Artificial Sequence
  Description of Artificial Sequence: Synthetic oligonucleotide
gcccauauaacguuccgug

SEQ ID NO: 120996 - RNA, 19 nt, Artificial Sequence
  Description of Artificial Sequence: Synthetic oligonucleotide
auauaacguuccguguauc

SEQ ID NO: 120997 - RNA, 19 nt, Artificial Sequence
  Description of Artificial Sequence: Synthetic oligonucleotide
ugaaaucacuuggggcagg

SEQ ID NO: 120998 - RNA, 19 nt, Artificial Sequence
  Description of Artificial Sequence: Synthetic oligonucleotide
guuccguguauccuguauc

SEQ ID NO: 120999 - RNA, 19 nt, Artificial Sequence
  Description of Artificial Sequence: Synthetic oligonucleotide
ggcggaaauacuugacucc

SEQ ID NO: 121000 - RNA, 19 nt, Artificial Sequence
  Description of Artificial Sequence: Synthetic oligonucleotide
cacuaaguuauccuugaaa

SEQ ID NO: 121001 - RNA, 19 nt, Artificial Sequence
  Description of Artificial Sequence: Synthetic oligonucleotide
accgcuggaucguuuauau

SEQ ID NO: 121002 - RNA, 19 nt, Artificial Sequence
  Description of Artificial Sequence: Synthetic oligonucleotide
guaccaaaguacaaucauc

SEQ ID NO: 121003 - RNA, 19 nt, Artificial Sequence
  Description of Artificial Sequence: Synthetic oligonucleotide
uagcggaaugaaucugccc

SEQ ID NO: 121004 - RNA, 19 nt, Artificial Sequence
  Description of Artificial Sequence: Synthetic oligonucleotide
augaauaauucgaccucag

SEQ ID NO: 121005 - RNA, 19 nt, Artificial Sequence
  Description of Artificial Sequence: Synthetic oligonucleotide
uaguaggauggaccaggca

SEQ ID NO: 121006 - RNA, 19 nt, Artificial Sequence
  Description of Artificial Sequence: Synthetic oligonucleotide
aguaaguuucuuggaguga

SEQ ID NO: 121007 - RNA, 19 nt, Artificial Sequence
  Description of Artificial Sequence: Synthetic oligonucleotide
ugacgaagcauaagcuauu

SEQ ID NO: 121008 - RNA, 19 nt, Artificial Sequence
  Description of Artificial Sequence: Synthetic oligonucleotide
acgaagcauaagcuauuca

SEQ ID NO: 121009 - RNA, 19 nt, Artificial Sequence
  Description of Artificial Sequence: Synthetic oligonucleotide
aacccugaagauauccgau

SEQ ID NO: 121010 - RNA, 19 nt, Artificial Sequence
  Description of Artificial Sequence: Synthetic oligonucleotide
gcuaguauaugugaaaaua

SEQ ID NO: 121011 - RNA, 19 nt, Artificial Sequence
  Description of Artificial Sequence: Synthetic oligonucleotide
auccccuguugucuaucac

SEQ ID NO: 121012 - RNA, 19 nt, Artificial Sequence
  Description of Artificial Sequence: Synthetic oligonucleotide
uuaagaccucggugacagg

SEQ ID NO: 121013 - RNA, 19 nt, Artificial Sequence
  Description of Artificial Sequence: Synthetic oligonucleotide
uuacccaaaucaguuuaau

SEQ ID NO: 121014 - RNA, 19 nt, Artificial Sequence
  Description of Artificial Sequence: Synthetic oligonucleotide
guuagacaguguacacccg

SEQ ID NO: 121015 - RNA, 19 nt, Artificial Sequence
  Description of Artificial Sequence: Synthetic oligonucleotide
gacgaagcauaagcuauuc

SEQ ID NO: 121016 - RNA, 19 nt, Artificial Sequence
  Description of Artificial Sequence: Synthetic oligonucleotide
gacguaagugcuaucaaau

SEQ ID NO: 121017 - RNA, 19 nt, Artificial Sequence
  Description of Artificial Sequence: Synthetic oligonucleotide
uaucuuuaggaggccacua

SEQ ID NO: 121018 - RNA, 19 nt, Artificial Sequence
  Description of Artificial Sequence: Synthetic oligonucleotide
cacauaaccgagggaggcc

SEQ ID NO: 121019 - RNA, 19 nt, Artificial Sequence
  Description of Artificial Sequence: Synthetic oligonucleotide
aucuuacauggcggguacc

SEQ ID NO: 121020 - RNA, 19 nt, Artificial Sequence
  Description of Artificial Sequence: Synthetic oligonucleotide
aaccagcacuugaaagcuc

SEQ ID NO: 121021 - RNA, 19 nt, Artificial Sequence
  Description of Artificial Sequence: Synthetic oligonucleotide
aacguuccguguauccugu

SEQ ID NO: 121022 - RNA, 19 nt, Artificial Sequence
  Description of Artificial Sequence: Synthetic oligonucleotide
ggagaucagaacuaucugu

SEQ ID NO: 121023 - RNA, 19 nt, Artificial Sequence
  Description of Artificial Sequence: Synthetic oligonucleotide
ucaguauccucgugguauu

SEQ ID NO: 121024 - RNA, 19 nt, Artificial Sequence
  Description of Artificial Sequence: Synthetic oligonucleotide
gauccccuguugucuauca

SEQ ID NO: 121025 - RNA, 19 nt, Artificial Sequence
  Description of Artificial Sequence: Synthetic oligonucleotide
aacgaucuaguaggaugga

SEQ ID NO: 121026 - RNA, 19 nt, Artificial Sequence
  Description of Artificial Sequence: Synthetic oligonucleotide
ggauacaccccaagugacg

SEQ ID NO: 121027 - RNA, 19 nt, Artificial Sequence
  Description of Artificial Sequence: Synthetic oligonucleotide
cauucaccacugguaauug

SEQ ID NO: 121028 - RNA, 19 nt, Artificial Sequence
  Description of Artificial Sequence: Synthetic oligonucleotide
gcuagugugaauauguggu

SEQ ID NO: 121029 - RNA, 19 nt, Artificial Sequence
  Description of Artificial Sequence: Synthetic oligonucleotide
guuaagguauuagauuacu

SEQ ID NO: 121030 - RNA, 19 nt, Artificial Sequence
  Description of Artificial Sequence: Synthetic oligonucleotide
ccguguaagaggaguaagc

SEQ ID NO: 121031 - RNA, 19 nt, Artificial Sequence
  Description of Artificial Sequence: Synthetic oligonucleotide
ggguuugcauaacugguca

SEQ ID NO: 121032 - RNA, 19 nt, Artificial Sequence
  Description of Artificial Sequence: Synthetic oligonucleotide
agucacaaugcuggcugag

SEQ ID NO: 121033 - RNA, 19 nt, Artificial Sequence
  Description of Artificial Sequence: Synthetic oligonucleotide
aguauccucgugguauugu

SEQ ID NO: 121034 - RNA, 19 nt, Artificial Sequence
  Description of Artificial Sequence: Synthetic oligonucleotide
auacuagaugcuguuuaaa

SEQ ID NO: 121035 - RNA, 19 nt, Artificial Sequence
  Description of Artificial Sequence: Synthetic oligonucleotide
guauuagauuacuauccau

SEQ ID NO: 121036 - RNA, 19 nt, Artificial Sequence
  Description of Artificial Sequence: Synthetic oligonucleotide
uuacggcaaagaagugguc

SEQ ID NO: 121037 - RNA, 19 nt, Artificial Sequence
  Description of Artificial Sequence: Synthetic oligonucleotide
aucuaguaggauggaccag

SEQ ID NO: 121038 - RNA, 19 nt, Artificial Sequence
  Description of Artificial Sequence: Synthetic oligonucleotide
gaauaacucaggggagauc

SEQ ID NO: 121039 - RNA, 19 nt, Artificial Sequence
  Description of Artificial Sequence: Synthetic oligonucleotide
uggugccuucaaaguauac

SEQ ID NO: 121040 - RNA, 19 nt, Artificial Sequence
  Description of Artificial Sequence: Synthetic oligonucleotide
cauguauucccuucauagu

SEQ ID NO: 121041 - RNA, 19 nt, Artificial Sequence
  Description of Artificial Sequence: Synthetic oligonucleotide
cugcuaguauaugugaaaa

SEQ ID NO: 121042 - RNA, 19 nt, Artificial Sequence
  Description of Artificial Sequence: Synthetic oligonucleotide
cucuggcaauauauucgac

SEQ ID NO: 121043 - RNA, 19 nt, Artificial Sequence
  Description of Artificial Sequence: Synthetic oligonucleotide
uugcauaacuggucacaua

SEQ ID NO: 121044 - RNA, 19 nt, Artificial Sequence
  Description of Artificial Sequence: Synthetic oligonucleotide
ccacuaauuaaguccaaga

SEQ ID NO: 121045 - RNA, 19 nt, Artificial Sequence
  Description of Artificial Sequence: Synthetic oligonucleotide
uccaccgcuggaucguuua

SEQ ID NO: 121046 - RNA, 19 nt, Artificial Sequence
  Description of Artificial Sequence: Synthetic oligonucleotide
aauacacagccagcagaua

SEQ ID NO: 121047 - RNA, 19 nt, Artificial Sequence
  Description of Artificial Sequence: Synthetic oligonucleotide
auaacuagucagagauccu

SEQ ID NO: 121048 - RNA, 19 nt, Artificial Sequence
  Description of Artificial Sequence: Synthetic oligonucleotide
uguaagucauagggcuuuc

SEQ ID NO: 121049 - RNA, 19 nt, Artificial Sequence
  Description of Artificial Sequence: Synthetic oligonucleotide
gugugaauauguggugcug

SEQ ID NO: 121050 - RNA, 19 nt, Artificial Sequence
  Description of Artificial Sequence: Synthetic oligonucleotide
agaaguggucuggaaacuu

SEQ ID NO: 121051 - RNA, 19 nt, Artificial Sequence
  Description of Artificial Sequence: Synthetic oligonucleotide
agggauuaguuuacggcaa

SEQ ID NO: 121052 - RNA, 19 nt, Artificial Sequence
  Description of Artificial Sequence: Synthetic oligonucleotide
aagaccucggugacaggau

SEQ ID NO: 121053 - RNA, 19 nt, Artificial Sequence
  Description of Artificial Sequence: Synthetic oligonucleotide
gugacgaagcauaagcuau

SEQ ID NO: 121054 - RNA, 19 nt, Artificial Sequence
  Description of Artificial Sequence: Synthetic oligonucleotide
acauggcggguaccaaagu

SEQ ID NO: 121055 - RNA, 19 nt, Artificial Sequence
  Description of Artificial Sequence: Synthetic oligonucleotide
aguuuacggcaaagaagug

SEQ ID NO: 121056 - RNA, 19 nt, Artificial Sequence
  Description of Artificial Sequence: Synthetic oligonucleotide
guuagacguaagugcuauc

SEQ ID NO: 121057 - RNA, 19 nt, Artificial Sequence
  Description of Artificial Sequence: Synthetic oligonucleotide
ugguggcccaaaauuccuu

SEQ ID NO: 121058 - RNA, 19 nt, Artificial Sequence
  Description of Artificial Sequence: Synthetic oligonucleotide
gaacccguguaagaggagu

SEQ ID NO: 121059 - RNA, 19 nt, Artificial Sequence
  Description of Artificial Sequence: Synthetic oligonucleotide
caggcauauuuucccucug

SEQ ID NO: 121060 - RNA, 19 nt, Artificial Sequence
  Description of Artificial Sequence: Synthetic oligonucleotide
uugguuugucagggauuag

SEQ ID NO: 121061 - RNA, 19 nt, Artificial Sequence
  Description of Artificial Sequence: Synthetic oligonucleotide
cauggcggguaccaaagua

SEQ ID NO: 121062 - RNA, 19 nt, Artificial Sequence
  Description of Artificial Sequence: Synthetic oligonucleotide
caaugcgugauccaagguu

SEQ ID NO: 121063 - RNA, 19 nt, Artificial Sequence
  Description of Artificial Sequence: Synthetic oligonucleotide
cauauaacguuccguguau

SEQ ID NO: 121064 - RNA, 19 nt, Artificial Sequence
  Description of Artificial Sequence: Synthetic oligonucleotide
uaguccaccgcuggaucgu

SEQ ID NO: 121065 - RNA, 19 nt, Artificial Sequence
  Description of Artificial Sequence: Synthetic oligonucleotide
guuacccaaaucaguuuaa

SEQ ID NO: 121066 - RNA, 19 nt, Artificial Sequence
  Description of Artificial Sequence: Synthetic oligonucleotide
ggauagcggaaugaaucug

SEQ ID NO: 121067 - RNA, 19 nt, Artificial Sequence
  Description of Artificial Sequence: Synthetic oligonucleotide
cagcacuugaaagcucaug

SEQ ID NO: 121068 - RNA, 19 nt, Artificial Sequence
  Description of Artificial Sequence: Synthetic oligonucleotide
uggucacauacaggugaug

SEQ ID NO: 121069 - RNA, 19 nt, Artificial Sequence
  Description of Artificial Sequence: Synthetic oligonucleotide
guacacccgaguucucaca

SEQ ID NO: 121070 - RNA, 19 nt, Artificial Sequence
  Description of Artificial Sequence: Synthetic oligonucleotide
caugccggccaagaacuuc

SEQ ID NO: 121071 - RNA, 19 nt, Artificial Sequence
  Description of Artificial Sequence: Synthetic oligonucleotide
acccuaaguaauagcccug

SEQ ID NO: 121072 - RNA, 19 nt, Artificial Sequence
  Description of Artificial Sequence: Synthetic oligonucleotide
auccgaucucugcauuaau

SEQ ID NO: 121073 - RNA, 19 nt, Artificial Sequence
  Description of Artificial Sequence: Synthetic oligonucleotide
guaggauggaccaggcaua

SEQ ID NO: 121074 - RNA, 19 nt, Artificial Sequence
  Description of Artificial Sequence: Synthetic oligonucleotide
augcggacucuaucauaca

SEQ ID NO: 121075 - RNA, 19 nt, Artificial Sequence
  Description of Artificial Sequence: Synthetic oligonucleotide
gcggacucuaucauacagc

SEQ ID NO: 121076 - RNA, 19 nt, Artificial Sequence
  Description of Artificial Sequence: Synthetic oligonucleotide
caguguacacccgaguucu

SEQ ID NO: 121077 - RNA, 19 nt, Artificial Sequence
  Description of Artificial Sequence: Synthetic oligonucleotide
gggaaagucauaagcuuaa

SEQ ID NO: 121078 - RNA, 19 nt, Artificial Sequence
  Description of Artificial Sequence: Synthetic oligonucleotide
cugagacgcuagguacugg

SEQ ID NO: 121079 - RNA, 19 nt, Artificial Sequence
  Description of Artificial Sequence: Synthetic oligonucleotide
cucauguauucccuucaua

SEQ ID NO: 121080 - RNA, 19 nt, Artificial Sequence
  Description of Artificial Sequence: Synthetic oligonucleotide
cagucagccucaccacuuc

SEQ ID NO: 121081 - RNA, 19 nt, Artificial Sequence
  Description of Artificial Sequence: Synthetic oligonucleotide
caggagaaugccgauuaaa

SEQ ID NO: 121082 - RNA, 19 nt, Artificial Sequence
  Description of Artificial Sequence: Synthetic oligonucleotide
ccuucauaguuaagcagga

SEQ ID NO: 121083 - RNA, 19 nt, Artificial Sequence
  Description of Artificial Sequence: Synthetic oligonucleotide
agcuauucaguuagacgua

SEQ ID NO: 121084 - RNA, 19 nt, Artificial Sequence
  Description of Artificial Sequence: Synthetic oligonucleotide
gcgugauccaagguucucc

SEQ ID NO: 121085 - RNA, 19 nt, Artificial Sequence
  Description of Artificial Sequence: Synthetic oligonucleotide
gcuuauacugcuaguauau

SEQ ID NO: 121086 - RNA, 19 nt, Artificial Sequence
  Description of Artificial Sequence: Synthetic oligonucleotide
caaccagcacuugaaagcu

SEQ ID NO: 121087 - RNA, 19 nt, Artificial Sequence
  Description of Artificial Sequence: Synthetic oligonucleotide
ccauauaacguuccgugua

SEQ ID NO: 121088 - RNA, 19 nt, Artificial Sequence
  Description of Artificial Sequence: Synthetic oligonucleotide
ggagugugaguagccucgg

SEQ ID NO: 121089 - RNA, 19 nt, Artificial Sequence
  Description of Artificial Sequence: Synthetic oligonucleotide
acacccgaguucucacaaa

SEQ ID NO: 121090 - RNA, 19 nt, Artificial Sequence
  Description of Artificial Sequence: Synthetic oligonucleotide
aguguacacccgaguucuc

SEQ ID NO: 121091 - RNA, 19 nt, Artificial Sequence
  Description of Artificial Sequence: Synthetic oligonucleotide
aguaagcgauuugguucug

SEQ ID NO: 121092 - RNA, 19 nt, Artificial Sequence
  Description of Artificial Sequence: Synthetic oligonucleotide
gccagaugucuguuguuuc

SEQ ID NO: 121093 - RNA, 19 nt, Artificial Sequence
  Description of Artificial Sequence: Synthetic oligonucleotide
guaucuuuaggaggccacu

SEQ ID NO: 121094 - RNA, 19 nt, Artificial Sequence
  Description of Artificial Sequence: Synthetic oligonucleotide
uacuugccuuuaugugaaa

SEQ ID NO: 121095 - RNA, 19 nt, Artificial Sequence
  Description of Artificial Sequence: Synthetic oligonucleotide
caguauccucgugguauug

SEQ ID NO: 121096 - RNA, 19 nt, Artificial Sequence
  Description of Artificial Sequence: Synthetic oligonucleotide
caaccacauaaccgaggga

SEQ ID NO: 121097 - RNA, 19 nt, Artificial Sequence
  Description of Artificial Sequence: Synthetic oligonucleotide
ggcacgagaaaaugucaua

SEQ ID NO: 121098 - RNA, 19 nt, Artificial Sequence
  Description of Artificial Sequence: Synthetic oligonucleotide
cuucauaguuaagcaggaa

SEQ ID NO: 121099 - RNA, 19 nt, Artificial Sequence
  Description of Artificial Sequence: Synthetic oligonucleotide
caguuagacguaagugcua

SEQ ID NO: 121100 - RNA, 19 nt, Artificial Sequence
  Description of Artificial Sequence: Synthetic oligonucleotide
gcuauucaguuagacguaa

SEQ ID NO: 121101 - RNA, 19 nt, Artificial Sequence
  Description of Artificial Sequence: Synthetic oligonucleotide
cuucgccaggguuugcaua

SEQ ID NO: 121102 - RNA, 19 nt, Artificial Sequence
  Description of Artificial Sequence: Synthetic oligonucleotide
gacuugugauuaaacucau

SEQ ID NO: 121103 - RNA, 19 nt, Artificial Sequence
  Description of Artificial Sequence: Synthetic oligonucleotide
guauccucgugguauuguu

SEQ ID NO: 121104 - RNA, 19 nt, Artificial Sequence
  Description of Artificial Sequence: Synthetic oligonucleotide
augcgugauccaagguucu

SEQ ID NO: 121105 - RNA, 19 nt, Artificial Sequence
  Description of Artificial Sequence: Synthetic oligonucleotide
cuuacauggcggguaccaa

SEQ ID NO: 121106 - RNA, 19 nt, Artificial Sequence
  Description of Artificial Sequence: Synthetic oligonucleotide
gaacuaucuguaggugagu

SEQ ID NO: 121107 - RNA, 19 nt, Artificial Sequence
  Description of Artificial Sequence: Synthetic oligonucleotide
ugcccaccucugauccgac

SEQ ID NO: 121108 - RNA, 19 nt, Artificial Sequence
  Description of Artificial Sequence: Synthetic oligonucleotide
gauggaccaggcauauuuu

SEQ ID NO: 121109 - RNA, 19 nt, Artificial Sequence
  Description of Artificial Sequence: Synthetic oligonucleotide
gacugcuaucauccucacu

SEQ ID NO: 121110 - RNA, 19 nt, Artificial Sequence
  Description of Artificial Sequence: Synthetic oligonucleotide
gcugcccaccucugauccg

SEQ ID NO: 121111 - RNA, 19 nt, Artificial Sequence
  Description of Artificial Sequence: Synthetic oligonucleotide
cacccgaguucucacaaau

SEQ ID NO: 121112 - RNA, 19 nt, Artificial Sequence
  Description of Artificial Sequence: Synthetic oligonucleotide
aggcgccuucaaauuuaag

SEQ ID NO: 121113 - RNA, 19 nt, Artificial Sequence
  Description of Artificial Sequence: Synthetic oligonucleotide
cguuuauauuugccagaug

SEQ ID NO: 121114 - RNA, 19 nt, Artificial Sequence
  Description of Artificial Sequence: Synthetic oligonucleotide
ccguguauccuguaucaua

SEQ ID NO: 121115 - RNA, 19 nt, Artificial Sequence
  Description of Artificial Sequence: Synthetic oligonucleotide
cacugagugugccuugguu

SEQ ID NO: 121116 - RNA, 19 nt, Artificial Sequence
  Description of Artificial Sequence: Synthetic oligonucleotide
cgauuguucaccagcugua

SEQ ID NO: 121117 - RNA, 19 nt, Artificial Sequence
  Description of Artificial Sequence: Synthetic oligonucleotide
acguuccguguauccugua

SEQ ID NO: 121118 - RNA, 19 nt, Artificial Sequence
  Description of Artificial Sequence: Synthetic oligonucleotide
gugaguagccucggucagu

SEQ ID NO: 121119 - RNA, 19 nt, Artificial Sequence
  Description of Artificial Sequence: Synthetic oligonucleotide
gcggguaccaaaguacaau

SEQ ID NO: 121120 - RNA, 19 nt, Artificial Sequence
  Description of Artificial Sequence: Synthetic oligonucleotide
aguccaccgcuggaucguu

SEQ ID NO: 121121 - RNA, 19 nt, Artificial Sequence
  Description of Artificial Sequence: Synthetic oligonucleotide
caccgcuggaucguuuaua

SEQ ID NO: 121122 - RNA, 19 nt, Artificial Sequence
  Description of Artificial Sequence: Synthetic oligonucleotide
ggcccauauaacguuccgu

SEQ ID NO: 121123 - RNA, 19 nt, Artificial Sequence
  Description of Artificial Sequence: Synthetic oligonucleotide
aggauggaccaggcauauu

SEQ ID NO: 121124 - RNA, 19 nt, Artificial Sequence
  Description of Artificial Sequence: Synthetic oligonucleotide
ccggccaagaacuucccau

SEQ ID NO: 121125 - RNA, 19 nt, Artificial Sequence
  Description of Artificial Sequence: Synthetic oligonucleotide
caggggagaucagaacuau

SEQ ID NO: 121126 - RNA, 19 nt, Artificial Sequence
  Description of Artificial Sequence: Synthetic oligonucleotide
cggaaugaaucugcccuuc

SEQ ID NO: 121127 - RNA, 19 nt, Artificial Sequence
  Description of Artificial Sequence: Synthetic oligonucleotide
cugugccucuccugagggu

SEQ ID NO: 121128 - RNA, 19 nt, Artificial Sequence
  Description of Artificial Sequence: Synthetic oligonucleotide
gcggaaugaaucugcccuu

SEQ ID NO: 121129 - RNA, 19 nt, Artificial Sequence
  Description of Artificial Sequence: Synthetic oligonucleotide
cgacugcuaucauccucac

SEQ ID NO: 121130 - RNA, 19 nt, Artificial Sequence
  Description of Artificial Sequence: Synthetic oligonucleotide
cccuaaguaauagcccugu

SEQ ID NO: 121131 - RNA, 19 nt, Artificial Sequence
  Description of Artificial Sequence: Synthetic oligonucleotide
ccaggagaaugccgauuaa

SEQ ID NO: 121132 - RNA, 19 nt, Artificial Sequence
  Description of Artificial Sequence: Synthetic oligonucleotide
ccuaaguaauagcccuguu

SEQ ID NO: 121133 - RNA, 19 nt, Artificial Sequence
  Description of Artificial Sequence: Synthetic oligonucleotide
ccacuucgccaggguuugc

SEQ ID NO: 121134 - RNA, 19 nt, Artificial Sequence
  Description of Artificial Sequence: Synthetic oligonucleotide
guccaccgcuggaucguuu

SEQ ID NO: 121135 - RNA, 19 nt, Artificial Sequence
  Description of Artificial Sequence: Synthetic oligonucleotide
ccaccgcuggaucguuuau

SEQ ID NO: 121136 - RNA, 19 nt, Artificial Sequence
  Description of Artificial Sequence: Synthetic oligonucleotide
ccgcuggaucguuuauauu

SEQ ID NO: 121137 - RNA, 19 nt, Artificial Sequence
  Description of Artificial Sequence: Synthetic oligonucleotide
uauagaucaagauacacgg

SEQ ID NO: 121138 - RNA, 19 nt, Artificial Sequence
  Description of Artificial Sequence: Synthetic oligonucleotide
aacuauaugggcuaacugg

SEQ ID NO: 121139 - RNA, 19 nt, Artificial Sequence
  Description of Artificial Sequence: Synthetic oligonucleotide
agugauugaauuuccagcc

SEQ ID NO: 121140 - RNA, 19 nt, Artificial Sequence
  Description of Artificial Sequence: Synthetic oligonucleotide
guaguuaucacguagauca

SEQ ID NO: 121141 - RNA, 19 nt, Artificial Sequence
  Description of Artificial Sequence: Synthetic oligonucleotide
uuauacucagcuuucaggg

SEQ ID NO: 121142 - RNA, 19 nt, Artificial Sequence
  Description of Artificial Sequence: Synthetic oligonucleotide
uuaauggauucccaaaugg

SEQ ID NO: 121143 - RNA, 19 nt, Artificial Sequence
  Description of Artificial Sequence: Synthetic oligonucleotide
uagaucaagauacacgggg

SEQ ID NO: 121144 - RNA, 19 nt, Artificial Sequence
  Description of Artificial Sequence: Synthetic oligonucleotide
uguuaauuuaggcauaaga

SEQ ID NO: 121145 - RNA, 19 nt, Artificial Sequence
  Description of Artificial Sequence: Synthetic oligonucleotide
uuuauacucagcuuucagg

SEQ ID NO: 121146 - RNA, 19 nt, Artificial Sequence
  Description of Artificial Sequence: Synthetic oligonucleotide
ugagacacaaauaugggga

SEQ ID NO: 121147 - RNA, 19 nt, Artificial Sequence
  Description of Artificial Sequence: Synthetic oligonucleotide
acuaagcccauauuguccc

SEQ ID NO: 121148 - RNA, 19 nt, Artificial Sequence
  Description of Artificial Sequence: Synthetic oligonucleotide
uguaacccaagcaaccucg

SEQ ID NO: 121149 - RNA, 19 nt, Artificial Sequence
  Description of Artificial Sequence: Synthetic oligonucleotide
ucgagcauauaacucaagg

SEQ ID NO: 121150 - RNA, 19 nt, Artificial Sequence
  Description of Artificial Sequence: Synthetic oligonucleotide
auggaguacgaccagggcc

SEQ ID NO: 121151 - RNA, 19 nt, Artificial Sequence
  Description of Artificial Sequence: Synthetic oligonucleotide
aacucaaggauuugcauga

SEQ ID NO: 121152 - RNA, 19 nt, Artificial Sequence
  Description of Artificial Sequence: Synthetic oligonucleotide
aacuacuucuccuugacaa

SEQ ID NO: 121153 - RNA, 19 nt, Artificial Sequence
  Description of Artificial Sequence: Synthetic oligonucleotide
ucacuaguaggucggaugg

SEQ ID NO: 121154 - RNA, 19 nt, Artificial Sequence
  Description of Artificial Sequence: Synthetic oligonucleotide
uggaguacgaccagggccg

SEQ ID NO: 121155 - RNA, 19 nt, Artificial Sequence
  Description of Artificial Sequence: Synthetic oligonucleotide
uauaacucaaggauuugca

SEQ ID NO: 121156 - RNA, 19 nt, Artificial Sequence
  Description of Artificial Sequence: Synthetic oligonucleotide
uuuugcauaugcaggauac

SEQ ID NO: 121157 - RNA, 19 nt, Artificial Sequence
  Description of Artificial Sequence: Synthetic oligonucleotide
aguucaugguauuuauuac

SEQ ID NO: 121158 - RNA, 19 nt, Artificial Sequence
  Description of Artificial Sequence: Synthetic oligonucleotide
auauagaucaagauacacg

SEQ ID NO: 121159 - RNA, 19 nt, Artificial Sequence
  Description of Artificial Sequence: Synthetic oligonucleotide
gacaguaagcauucuacag

SEQ ID NO: 121160 - RNA, 19 nt, Artificial Sequence
  Description of Artificial Sequence: Synthetic oligonucleotide
auauaacucaaggauuugc

SEQ ID NO: 121161 - RNA, 19 nt, Artificial Sequence
  Description of Artificial Sequence: Synthetic oligonucleotide
cacucuguuguaaaggacg

SEQ ID NO: 121162 - RNA, 19 nt, Artificial Sequence
  Description of Artificial Sequence: Synthetic oligonucleotide
uuuucagcaauugucaacu

SEQ ID NO: 121163 - RNA, 19 nt, Artificial Sequence
  Description of Artificial Sequence: Synthetic oligonucleotide
uaugcaggauacauuacug

SEQ ID NO: 121164 - RNA, 19 nt, Artificial Sequence
  Description of Artificial Sequence: Synthetic oligonucleotide
uacauuacuguuucacuag

SEQ ID NO: 121165 - RNA, 19 nt, Artificial Sequence
  Description of Artificial Sequence: Synthetic oligonucleotide
uaugguuggucgcauauga

SEQ ID NO: 121166 - RNA, 19 nt, Artificial Sequence
  Description of Artificial Sequence: Synthetic oligonucleotide
uuuaaguuuucgaacuacu

SEQ ID NO: 121167 - RNA, 19 nt, Artificial Sequence
  Description of Artificial Sequence: Synthetic oligonucleotide
uaacucaaggauuugcaug

SEQ ID NO: 121168 - RNA, 19 nt, Artificial Sequence
  Description of Artificial Sequence: Synthetic oligonucleotide
gauguugcucccuggauag

SEQ ID NO: 121169 - RNA, 19 nt, Artificial Sequence
  Description of Artificial Sequence: Synthetic oligonucleotide
aauaguccgagucgucagg

SEQ ID NO: 121170 - RNA, 19 nt, Artificial Sequence
  Description of Artificial Sequence: Synthetic oligonucleotide
agugacuuaguggaggcgc

SEQ ID NO: 121171 - RNA, 19 nt, Artificial Sequence
  Description of Artificial Sequence: Synthetic oligonucleotide
gagaguaguuaucacguag

SEQ ID NO: 121172 - RNA, 19 nt, Artificial Sequence
  Description of Artificial Sequence: Synthetic oligonucleotide
uggagaguaguuaucacgu

SEQ ID NO: 121173 - RNA, 19 nt, Artificial Sequence
  Description of Artificial Sequence: Synthetic oligonucleotide
ucgaagguagcaaaggcac

SEQ ID NO: 121174 - RNA, 19 nt, Artificial Sequence
  Description of Artificial Sequence: Synthetic oligonucleotide
aguaacuccgaccaaacaa

SEQ ID NO: 121175 - RNA, 19 nt, Artificial Sequence
  Description of Artificial Sequence: Synthetic oligonucleotide
cuggagaguaguuaucacg

SEQ ID NO: 121176 - RNA, 19 nt, Artificial Sequence
  Description of Artificial Sequence: Synthetic oligonucleotide
cagugauugaauuuccagc

SEQ ID NO: 121177 - RNA, 19 nt, Artificial Sequence
  Description of Artificial Sequence: Synthetic oligonucleotide
auacagaggcuuuuggcuc

SEQ ID NO: 121178 - RNA, 19 nt, Artificial Sequence
  Description of Artificial Sequence: Synthetic oligonucleotide
auagucuccuccugcaaac

SEQ ID NO: 121179 - RNA, 19 nt, Artificial Sequence
  Description of Artificial Sequence: Synthetic oligonucleotide
aaauggaguacgaccaggg

SEQ ID NO: 121180 - RNA, 19 nt, Artificial Sequence
  Description of Artificial Sequence: Synthetic oligonucleotide
uguaaucaagugcucauau

SEQ ID NO: 121181 - RNA, 19 nt, Artificial Sequence
  Description of Artificial Sequence: Synthetic oligonucleotide
gaucuuguaacccaagcaa

SEQ ID NO: 121182 - RNA, 19 nt, Artificial Sequence
  Description of Artificial Sequence: Synthetic oligonucleotide
ugagccgccacucuguugu

SEQ ID NO: 121183 - RNA, 19 nt, Artificial Sequence
  Description of Artificial Sequence: Synthetic oligonucleotide
uacacucgagcauauaacu

SEQ ID NO: 121184 - RNA, 19 nt, Artificial Sequence
  Description of Artificial Sequence: Synthetic oligonucleotide
aauaggaugggcaagucuu

SEQ ID NO: 121185 - RNA, 19 nt, Artificial Sequence
  Description of Artificial Sequence: Synthetic oligonucleotide
gaucaucacaccaauaguc

SEQ ID NO: 121186 - RNA, 19 nt, Artificial Sequence
  Description of Artificial Sequence: Synthetic oligonucleotide
acguagaucaacucggacu

SEQ ID NO: 121187 - RNA, 19 nt, Artificial Sequence
  Description of Artificial Sequence: Synthetic oligonucleotide
acacuaagcccauauuguc

SEQ ID NO: 121188 - RNA, 19 nt, Artificial Sequence
  Description of Artificial Sequence: Synthetic oligonucleotide
acuccgaccaaacaaggug

SEQ ID NO: 121189 - RNA, 19 nt, Artificial Sequence
  Description of Artificial Sequence: Synthetic oligonucleotide
ucuuaccagaucuuguaac

SEQ ID NO: 121190 - RNA, 19 nt, Artificial Sequence
  Description of Artificial Sequence: Synthetic oligonucleotide
cuagcauuaguucuucaug

SEQ ID NO: 121191 - RNA, 19 nt, Artificial Sequence
  Description of Artificial Sequence: Synthetic oligonucleotide
aguuguaugaugucacccu

SEQ ID NO: 121192 - RNA, 19 nt, Artificial Sequence
  Description of Artificial Sequence: Synthetic oligonucleotide
uaacuccgaccaaacaagg

SEQ ID NO: 121193 - RNA, 19 nt, Artificial Sequence
  Description of Artificial Sequence: Synthetic oligonucleotide
uggucgcauaugaagaacc

SEQ ID NO: 121194 - RNA, 19 nt, Artificial Sequence
  Description of Artificial Sequence: Synthetic oligonucleotide
ucgucaggccccaagagca

SEQ ID NO: 121195 - RNA, 19 nt, Artificial Sequence
  Description of Artificial Sequence: Synthetic oligonucleotide
guugacguacugcuuaaag

SEQ ID NO: 121196 - RNA, 19 nt, Artificial Sequence
  Description of Artificial Sequence: Synthetic oligonucleotide
gauugaauuuccagccugg

SEQ ID NO: 121197 - RNA, 19 nt, Artificial Sequence
  Description of Artificial Sequence: Synthetic oligonucleotide
uuuagacucagccucuuuu

SEQ ID NO: 121198 - RNA, 19 nt, Artificial Sequence
  Description of Artificial Sequence: Synthetic oligonucleotide
agaucaagauacacggggc

SEQ ID NO: 121199 - RNA, 19 nt, Artificial Sequence
  Description of Artificial Sequence: Synthetic oligonucleotide
uaugugacgcagauugcug

SEQ ID NO: 121200 - RNA, 19 nt, Artificial Sequence
  Description of Artificial Sequence: Synthetic oligonucleotide
ugaagguauuaucauuggu

SEQ ID NO: 121201 - RNA, 19 nt, Artificial Sequence
  Description of Artificial Sequence: Synthetic oligonucleotide
uucuacugugguuguauag

SEQ ID NO: 121202 - RNA, 19 nt, Artificial Sequence
  Description of Artificial Sequence: Synthetic oligonucleotide
gauucccaaauggaguacg

SEQ ID NO: 121203 - RNA, 19 nt, Artificial Sequence
  Description of Artificial Sequence: Synthetic oligonucleotide
aauuaguucaugguauuua

SEQ ID NO: 121204 - RNA, 19 nt, Artificial Sequence
  Description of Artificial Sequence: Synthetic oligonucleotide
augugacgcagauugcugg

SEQ ID NO: 121205 - RNA, 19 nt, Artificial Sequence
  Description of Artificial Sequence: Synthetic oligonucleotide
uacuaguccuuguugacgu

SEQ ID NO: 121206 - RNA, 19 nt, Artificial Sequence
  Description of Artificial Sequence: Synthetic oligonucleotide
uguauuggauacaaccaua

SEQ ID NO: 121207 - RNA, 19 nt, Artificial Sequence
  Description of Artificial Sequence: Synthetic oligonucleotide
aaaauaggaugggcaaguc

SEQ ID NO: 121208 - RNA, 19 nt, Artificial Sequence
  Description of Artificial Sequence: Synthetic oligonucleotide
ucuacugugguuguauagu

SEQ ID NO: 121209 - RNA, 19 nt, Artificial Sequence
  Description of Artificial Sequence: Synthetic oligonucleotide
auaggaagagcguguguag

SEQ ID NO: 121210 - RNA, 19 nt, Artificial Sequence
  Description of Artificial Sequence: Synthetic oligonucleotide
auacacucgagcauauaac

SEQ ID NO: 121211 - RNA, 19 nt, Artificial Sequence
  Description of Artificial Sequence: Synthetic oligonucleotide
uuaaacucccagcgcacca

SEQ ID NO: 121212 - RNA, 19 nt, Artificial Sequence
  Description of Artificial Sequence: Synthetic oligonucleotide
uuauuacccaggauguuua

SEQ ID NO: 121213 - RNA, 19 nt, Artificial Sequence
  Description of Artificial Sequence: Synthetic oligonucleotide
gauacacggggcuucuuug

SEQ ID NO: 121214 - RNA, 19 nt, Artificial Sequence
  Description of Artificial Sequence: Synthetic oligonucleotide
uuucucuaaagcagccuga

SEQ ID NO: 121215 - RNA, 19 nt, Artificial Sequence
  Description of Artificial Sequence: Synthetic oligonucleotide
gagcauauaacucaaggau

SEQ ID NO: 121216 - RNA, 19 nt, Artificial Sequence
  Description of Artificial Sequence: Synthetic oligonucleotide
cugaccagguacauauucc

SEQ ID NO: 121217 - RNA, 19 nt, Artificial Sequence
  Description of Artificial Sequence: Synthetic oligonucleotide
aguaguuaucacguagauc

SEQ ID NO: 121218 - RNA, 19 nt, Artificial Sequence
  Description of Artificial Sequence: Synthetic oligonucleotide
uagaucaacucggacucgg

SEQ ID NO: 121219 - RNA, 19 nt, Artificial Sequence
  Description of Artificial Sequence: Synthetic oligonucleotide
ugauguugcucccuggaua

SEQ ID NO: 121220 - RNA, 19 nt, Artificial Sequence
  Description of Artificial Sequence: Synthetic oligonucleotide
cuuacuaguccuuguugac

SEQ ID NO: 121221 - RNA, 19 nt, Artificial Sequence
  Description of Artificial Sequence: Synthetic oligonucleotide
ucggauggcaauuggcucu

SEQ ID NO: 121222 - RNA, 19 nt, Artificial Sequence
  Description of Artificial Sequence: Synthetic oligonucleotide
acuauaugggcuaacuggu

SEQ ID NO: 121223 - RNA, 19 nt, Artificial Sequence
  Description of Artificial Sequence: Synthetic oligonucleotide
auaugggcuaacugguuca

SEQ ID NO: 121224 - RNA, 19 nt, Artificial Sequence
  Description of Artificial Sequence: Synthetic oligonucleotide
gacggaggacuccucagag

SEQ ID NO: 121225 - RNA, 19 nt, Artificial Sequence
  Description of Artificial Sequence: Synthetic oligonucleotide
uggauagcacgcccacugg

SEQ ID NO: 121226 - RNA, 19 nt, Artificial Sequence
  Description of Artificial Sequence: Synthetic oligonucleotide
cuuauacucgauuccuguc

SEQ ID NO: 121227 - RNA, 19 nt, Artificial Sequence
  Description of Artificial Sequence: Synthetic oligonucleotide
agguacauauuccuuccca

SEQ ID NO: 121228 - RNA, 19 nt, Artificial Sequence
  Description of Artificial Sequence: Synthetic oligonucleotide
cuggauagcacgcccacug

SEQ ID NO: 121229 - RNA, 19 nt, Artificial Sequence
  Description of Artificial Sequence: Synthetic oligonucleotide
cauaugaguuuuaaggucu

SEQ ID NO: 121230 - RNA, 19 nt, Artificial Sequence
  Description of Artificial Sequence: Synthetic oligonucleotide
aacucggacucggauguuc

SEQ ID NO: 121231 - RNA, 19 nt, Artificial Sequence
  Description of Artificial Sequence: Synthetic oligonucleotide
ucaugguauuuauuaccca

SEQ ID NO: 121232 - RNA, 19 nt, Artificial Sequence
  Description of Artificial Sequence: Synthetic oligonucleotide
uuuaucauacagagaucua

SEQ ID NO: 121233 - RNA, 19 nt, Artificial Sequence
  Description of Artificial Sequence: Synthetic oligonucleotide
guauucaaucaucucugac

SEQ ID NO: 121234 - RNA, 19 nt, Artificial Sequence
  Description of Artificial Sequence: Synthetic oligonucleotide
uaggucggauggcaauugg

SEQ ID NO: 121235 - RNA, 19 nt, Artificial Sequence
  Description of Artificial Sequence: Synthetic oligonucleotide
auaugugacgcagauugcu

SEQ ID NO: 121236 - RNA, 19 nt, Artificial Sequence
  Description of Artificial Sequence: Synthetic oligonucleotide
acaagccacucugucaaac

SEQ ID NO: 121237 - RNA, 19 nt, Artificial Sequence
  Description of Artificial Sequence: Synthetic oligonucleotide
ggggcgguaacacuaagcc

SEQ ID NO: 121238 - RNA, 19 nt, Artificial Sequence
  Description of Artificial Sequence: Synthetic oligonucleotide
ucaguuacuuuagccuuag

SEQ ID NO: 121239 - RNA, 19 nt, Artificial Sequence
  Description of Artificial Sequence: Synthetic oligonucleotide
caacuauaugggcuaacug

SEQ ID NO: 121240 - RNA, 19 nt, Artificial Sequence
  Description of Artificial Sequence: Synthetic oligonucleotide
uuucgaacuacuucuccuu

SEQ ID NO: 121241 - RNA, 19 nt, Artificial Sequence
  Description of Artificial Sequence: Synthetic oligonucleotide
aggcugugggugcuuaaac

SEQ ID NO: 121242 - RNA, 19 nt, Artificial Sequence
  Description of Artificial Sequence: Synthetic oligonucleotide
ucggacucggauguucacg

SEQ ID NO: 121243 - RNA, 19 nt, Artificial Sequence
  Description of Artificial Sequence: Synthetic oligonucleotide
gauccccuagcauuaguuc

SEQ ID NO: 121244 - RNA, 19 nt, Artificial Sequence
  Description of Artificial Sequence: Synthetic oligonucleotide
auagaucaagauacacggg

SEQ ID NO: 121245 - RNA, 19 nt, Artificial Sequence
  Description of Artificial Sequence: Synthetic oligonucleotide
cuggaauaggaagagcgug

SEQ ID NO: 121246 - RNA, 19 nt, Artificial Sequence
  Description of Artificial Sequence: Synthetic oligonucleotide
uuucgaaccaccuccccuu

SEQ ID NO: 121247 - RNA, 19 nt, Artificial Sequence
  Description of Artificial Sequence: Synthetic oligonucleotide
acucacaucguaguauuca

SEQ ID NO: 121248 - RNA, 19 nt, Artificial Sequence
  Description of Artificial Sequence: Synthetic oligonucleotide
agggccggaggauauagca

SEQ ID NO: 121249 - RNA, 19 nt, Artificial Sequence
  Description of Artificial Sequence: Synthetic oligonucleotide
caguuguaugaugucaccc

SEQ ID NO: 121250 - RNA, 19 nt, Artificial Sequence
  Description of Artificial Sequence: Synthetic oligonucleotide
gaucuaucuuccccagcgc

SEQ ID NO: 121251 - RNA, 19 nt, Artificial Sequence
  Description of Artificial Sequence: Synthetic oligonucleotide
guaccauucggccagauuu

SEQ ID NO: 121252 - RNA, 19 nt, Artificial Sequence
  Description of Artificial Sequence: Synthetic oligonucleotide
ugggaguaccauucggcca

SEQ ID NO: 121253 - RNA, 19 nt, Artificial Sequence
  Description of Artificial Sequence: Synthetic oligonucleotide
acuaguaggucggauggca

SEQ ID NO: 121254 - RNA, 19 nt, Artificial Sequence
  Description of Artificial Sequence: Synthetic oligonucleotide
gaauuacuaccaccugaac

SEQ ID NO: 121255 - RNA, 19 nt, Artificial Sequence
  Description of Artificial Sequence: Synthetic oligonucleotide
ucacguagaucaacucgga

SEQ ID NO: 121256 - RNA, 19 nt, Artificial Sequence
  Description of Artificial Sequence: Synthetic oligonucleotide
acccaggauguuuacagaa

SEQ ID NO: 121257 - RNA, 19 nt, Artificial Sequence
  Description of Artificial Sequence: Synthetic oligonucleotide
uauuucccacuguuaauuu

SEQ ID NO: 121258 - RNA, 19 nt, Artificial Sequence
  Description of Artificial Sequence: Synthetic oligonucleotide
ggcgguaacacuaagccca

SEQ ID NO: 121259 - RNA, 19 nt, Artificial Sequence
  Description of Artificial Sequence: Synthetic oligonucleotide
aguacgaccagggccggag

SEQ ID NO: 121260 - RNA, 19 nt, Artificial Sequence
  Description of Artificial Sequence: Synthetic oligonucleotide
aggucggauggcaauuggc

SEQ ID NO: 121261 - RNA, 19 nt, Artificial Sequence
  Description of Artificial Sequence: Synthetic oligonucleotide
uaaguggugugauguugcu

SEQ ID NO: 121262 - RNA, 19 nt, Artificial Sequence
  Description of Artificial Sequence: Synthetic oligonucleotide
uccugucagggacuuguac

SEQ ID NO: 121263 - RNA, 19 nt, Artificial Sequence
  Description of Artificial Sequence: Synthetic oligonucleotide
aaaggaauacagaggcuuu

SEQ ID NO: 121264 - RNA, 19 nt, Artificial Sequence
  Description of Artificial Sequence: Synthetic oligonucleotide
uauuacccaggauguuuac

SEQ ID NO: 121265 - RNA, 19 nt, Artificial Sequence
  Description of Artificial Sequence: Synthetic oligonucleotide
agggaauuacuaccaccug

SEQ ID NO: 121266 - RNA, 19 nt, Artificial Sequence
  Description of Artificial Sequence: Synthetic oligonucleotide
ccauaugaguuuuaagguc

SEQ ID NO: 121267 - RNA, 19 nt, Artificial Sequence
  Description of Artificial Sequence: Synthetic oligonucleotide
gaucaagauacacggggcu

SEQ ID NO: 121268 - RNA, 19 nt, Artificial Sequence
  Description of Artificial Sequence: Synthetic oligonucleotide
uucauacacucgagcauau

SEQ ID NO: 121269 - RNA, 19 nt, Artificial Sequence
  Description of Artificial Sequence: Synthetic oligonucleotide
agauacacggggcuucuuu

SEQ ID NO: 121270 - RNA, 19 nt, Artificial Sequence
  Description of Artificial Sequence: Synthetic oligonucleotide
ucgauuccugucagggacu

SEQ ID NO: 121271 - RNA, 19 nt, Artificial Sequence
  Description of Artificial Sequence: Synthetic oligonucleotide
cagcucuucauaucacgug

SEQ ID NO: 121272 - RNA, 19 nt, Artificial Sequence
  Description of Artificial Sequence: Synthetic oligonucleotide
cauaucacguggccccacc

SEQ ID NO: 121273 - RNA, 19 nt, Artificial Sequence
  Description of Artificial Sequence: Synthetic oligonucleotide
acgcagauugcuggaauag

SEQ ID NO: 121274 - RNA, 19 nt, Artificial Sequence
  Description of Artificial Sequence: Synthetic oligonucleotide
cauauaacucaaggauuug

SEQ ID NO: 121275 - RNA, 19 nt, Artificial Sequence
  Description of Artificial Sequence: Synthetic oligonucleotide
cagggaauuacuaccaccu

SEQ ID NO: 121276 - RNA, 19 nt, Artificial Sequence
  Description of Artificial Sequence: Synthetic oligonucleotide
uacgaccagggccggagga

SEQ ID NO: 121277 - RNA, 19 nt, Artificial Sequence
  Description of Artificial Sequence: Synthetic oligonucleotide
agggauugccaagagcucu

SEQ ID NO: 121278 - RNA, 19 nt, Artificial Sequence
  Description of Artificial Sequence: Synthetic oligonucleotide
caucacaccaauaguccga

SEQ ID NO: 121279 - RNA, 19 nt, Artificial Sequence
  Description of Artificial Sequence: Synthetic oligonucleotide
guuaucacguagaucaacu

SEQ ID NO: 121280 - RNA, 19 nt, Artificial Sequence
  Description of Artificial Sequence: Synthetic oligonucleotide
ugaucccuggcaguugucu

SEQ ID NO: 121281 - RNA, 19 nt, Artificial Sequence
  Description of Artificial Sequence: Synthetic oligonucleotide
gauagcacgcccacuggca

SEQ ID NO: 121282 - RNA, 19 nt, Artificial Sequence
  Description of Artificial Sequence: Synthetic oligonucleotide
cuccacucgaugacagccc

SEQ ID NO: 121283 - RNA, 19 nt, Artificial Sequence
  Description of Artificial Sequence: Synthetic oligonucleotide
gagugcggaggaaaggcug

SEQ ID NO: 121284 - RNA, 19 nt, Artificial Sequence
  Description of Artificial Sequence: Synthetic oligonucleotide
ugacgcagauugcuggaau

SEQ ID NO: 121285 - RNA, 19 nt, Artificial Sequence
  Description of Artificial Sequence: Synthetic oligonucleotide
aggcuuauacucgauuccu

SEQ ID NO: 121286 - RNA, 19 nt, Artificial Sequence
  Description of Artificial Sequence: Synthetic oligonucleotide
uuggucgcauaugaagaac

SEQ ID NO: 121287 - RNA, 19 nt, Artificial Sequence
  Description of Artificial Sequence: Synthetic oligonucleotide
aacuccgaccaaacaaggu

SEQ ID NO: 121288 - RNA, 19 nt, Artificial Sequence
  Description of Artificial Sequence: Synthetic oligonucleotide
gaacucccgagugcggagg

SEQ ID NO: 121289 - RNA, 19 nt, Artificial Sequence
  Description of Artificial Sequence: Synthetic oligonucleotide
cucccauggacggagcgcc

SEQ ID NO: 121290 - RNA, 19 nt, Artificial Sequence
  Description of Artificial Sequence: Synthetic oligonucleotide
uucacgccaaguagccgcu

SEQ ID NO: 121291 - RNA, 19 nt, Artificial Sequence
  Description of Artificial Sequence: Synthetic oligonucleotide
uaguuaucacguagaucaa

SEQ ID NO: 121292 - RNA, 19 nt, Artificial Sequence
  Description of Artificial Sequence: Synthetic oligonucleotide
guuggucgcauaugaagaa

SEQ ID NO: 121293 - RNA, 19 nt, Artificial Sequence
  Description of Artificial Sequence: Synthetic oligonucleotide
auaugguuggucgcauaug

SEQ ID NO: 121294 - RNA, 19 nt, Artificial Sequence
  Description of Artificial Sequence: Synthetic oligonucleotide
cuucaugcuuacuaguccu

SEQ ID NO: 121295 - RNA, 19 nt, Artificial Sequence
  Description of Artificial Sequence: Synthetic oligonucleotide
cuaagcccauauugucccc

SEQ ID NO: 121296 - RNA, 19 nt, Artificial Sequence
  Description of Artificial Sequence: Synthetic oligonucleotide
uaccauucggccagauuuu

SEQ ID NO: 121297 - RNA, 19 nt, Artificial Sequence
  Description of Artificial Sequence: Synthetic oligonucleotide
auaucacguggccccaccu

SEQ ID NO: 121298 - RNA, 19 nt, Artificial Sequence
  Description of Artificial Sequence: Synthetic oligonucleotide
ccgcuuucgauacucauug

SEQ ID NO: 121299 - RNA, 19 nt, Artificial Sequence
  Description of Artificial Sequence: Synthetic oligonucleotide
cguagaucaacucggacuc

SEQ ID NO: 121300 - RNA, 19 nt, Artificial Sequence
  Description of Artificial Sequence: Synthetic oligonucleotide
cacguagaucaacucggac

SEQ ID NO: 121301 - RNA, 19 nt, Artificial Sequence
  Description of Artificial Sequence: Synthetic oligonucleotide
accauucggccagauuuuc

SEQ ID NO: 121302 - RNA, 19 nt, Artificial Sequence
  Description of Artificial Sequence: Synthetic oligonucleotide
cucgagcauauaacucaag

SEQ ID NO: 121303 - RNA, 19 nt, Artificial Sequence
  Description of Artificial Sequence: Synthetic oligonucleotide
uacacggggcgguaacacu

SEQ ID NO: 121304 - RNA, 19 nt, Artificial Sequence
  Description of Artificial Sequence: Synthetic oligonucleotide
uuccaauguauuggauaca

SEQ ID NO: 121305 - RNA, 19 nt, Artificial Sequence
  Description of Artificial Sequence: Synthetic oligonucleotide
cacggggcuucuuugcaac

SEQ ID NO: 121306 - RNA, 19 nt, Artificial Sequence
  Description of Artificial Sequence: Synthetic oligonucleotide
ggacaguaagcauucuaca

SEQ ID NO: 121307 - RNA, 19 nt, Artificial Sequence
  Description of Artificial Sequence: Synthetic oligonucleotide
gguuggucgcauaugaaga

SEQ ID NO: 121308 - RNA, 19 nt, Artificial Sequence
  Description of Artificial Sequence: Synthetic oligonucleotide
guagaucaacucggacucg

SEQ ID NO: 121309 - RNA, 19 nt, Artificial Sequence
  Description of Artificial Sequence: Synthetic oligonucleotide
aagagcguguguagucuca

SEQ ID NO: 121310 - RNA, 19 nt, Artificial Sequence
  Description of Artificial Sequence: Synthetic oligonucleotide
ggauccacuugauccuuag

SEQ ID NO: 121311 - RNA, 19 nt, Artificial Sequence
  Description of Artificial Sequence: Synthetic oligonucleotide
guccuuaauggauucccaa

SEQ ID NO: 121312 - RNA, 19 nt, Artificial Sequence
  Description of Artificial Sequence: Synthetic oligonucleotide
ggauagcacgcccacuggc

SEQ ID NO: 121313 - RNA, 19 nt, Artificial Sequence
  Description of Artificial Sequence: Synthetic oligonucleotide
ggaauuacuaccaccugaa

SEQ ID NO: 121314 - RNA, 19 nt, Artificial Sequence
  Description of Artificial Sequence: Synthetic oligonucleotide
gucuuaccagaucuuguaa

SEQ ID NO: 121315 - RNA, 19 nt, Artificial Sequence
  Description of Artificial Sequence: Synthetic oligonucleotide
ucauaugguuggucgcaua

SEQ ID NO: 121316 - RNA, 19 nt, Artificial Sequence
  Description of Artificial Sequence: Synthetic oligonucleotide
ugcuccacucgaugacagc

SEQ ID NO: 121317 - RNA, 19 nt, Artificial Sequence
  Description of Artificial Sequence: Synthetic oligonucleotide
uuucacuaguaggucggau

SEQ ID NO: 121318 - RNA, 19 nt, Artificial Sequence
  Description of Artificial Sequence: Synthetic oligonucleotide
ugcaacuauaugggcuaac

SEQ ID NO: 121319 - RNA, 19 nt, Artificial Sequence
  Description of Artificial Sequence: Synthetic oligonucleotide
gaguaguuaucacguagau

SEQ ID NO: 121320 - RNA, 19 nt, Artificial Sequence
  Description of Artificial Sequence: Synthetic oligonucleotide
cuacacggggcgguaacac

SEQ ID NO: 121321 - RNA, 19 nt, Artificial Sequence
  Description of Artificial Sequence: Synthetic oligonucleotide
agcgcaccacauugcacca

SEQ ID NO: 121322 - RNA, 19 nt, Artificial Sequence
  Description of Artificial Sequence: Synthetic oligonucleotide
ggucgcauaugaagaaccc

SEQ ID NO: 121323 - RNA, 19 nt, Artificial Sequence
  Description of Artificial Sequence: Synthetic oligonucleotide
accaauaguccgagucguc

SEQ ID NO: 121324 - RNA, 19 nt, Artificial Sequence
  Description of Artificial Sequence: Synthetic oligonucleotide
guacgaccagggccggagg

SEQ ID NO: 121325 - RNA, 19 nt, Artificial Sequence
  Description of Artificial Sequence: Synthetic oligonucleotide
guauuggauacaaccauau

SEQ ID NO: 121326 - RNA, 19 nt, Artificial Sequence
  Description of Artificial Sequence: Synthetic oligonucleotide
auauggggaaguagcaguu

SEQ ID NO: 121327 - RNA, 19 nt, Artificial Sequence
  Description of Artificial Sequence: Synthetic oligonucleotide
cuucuuaggccccugcccu

SEQ ID NO: 121328 - RNA, 19 nt, Artificial Sequence
  Description of Artificial Sequence: Synthetic oligonucleotide
cacucacaucguaguauuc

SEQ ID NO: 121329 - RNA, 19 nt, Artificial Sequence
  Description of Artificial Sequence: Synthetic oligonucleotide
gggcgguaacacuaagccc

SEQ ID NO: 121330 - RNA, 19 nt, Artificial Sequence
  Description of Artificial Sequence: Synthetic oligonucleotide
cuaguaggucggauggcaa

SEQ ID NO: 121331 - RNA, 19 nt, Artificial Sequence
  Description of Artificial Sequence: Synthetic oligonucleotide
cacuaguaggucggauggc

SEQ ID NO: 121332 - RNA, 19 nt, Artificial Sequence
  Description of Artificial Sequence: Synthetic oligonucleotide
cuuucgaaccaccuccccu

SEQ ID NO: 121333 - RNA, 19 nt, Artificial Sequence
  Description of Artificial Sequence: Synthetic oligonucleotide
gcuuauacucgauuccugu

SEQ ID NO: 121334 - RNA, 19 nt, Artificial Sequence
  Description of Artificial Sequence: Synthetic oligonucleotide
agccgcuuucgauacucau

SEQ ID NO: 121335 - RNA, 19 nt, Artificial Sequence
  Description of Artificial Sequence: Synthetic oligonucleotide
acagacacacauggcuccu

SEQ ID NO: 121336 - RNA, 19 nt, Artificial Sequence
  Description of Artificial Sequence: Synthetic oligonucleotide
uguugacguacugcuuaaa

SEQ ID NO: 121337 - RNA, 19 nt, Artificial Sequence
  Description of Artificial Sequence: Synthetic oligonucleotide
accagaucuuguaacccaa

SEQ ID NO: 121338 - RNA, 19 nt, Artificial Sequence
  Description of Artificial Sequence: Synthetic oligonucleotide
caguaacuccgaccaaaca

SEQ ID NO: 121339 - RNA, 19 nt, Artificial Sequence
  Description of Artificial Sequence: Synthetic oligonucleotide
gcaagccaagugaucuugg

SEQ ID NO: 121340 - RNA, 19 nt, Artificial Sequence
  Description of Artificial Sequence: Synthetic oligonucleotide
ccgagugcggaggaaaggc

SEQ ID NO: 121341 - RNA, 19 nt, Artificial Sequence
  Description of Artificial Sequence: Synthetic oligonucleotide
ggcuuauacucgauuccug

SEQ ID NO: 121342 - RNA, 19 nt, Artificial Sequence
  Description of Artificial Sequence: Synthetic oligonucleotide
ucauacacucgagcauaua

SEQ ID NO: 121343 - RNA, 19 nt, Artificial Sequence
  Description of Artificial Sequence: Synthetic oligonucleotide
cucggauguucacgccaag

SEQ ID NO: 121344 - RNA, 19 nt, Artificial Sequence
  Description of Artificial Sequence: Synthetic oligonucleotide
cuucuacugugguuguaua

SEQ ID NO: 121345 - RNA, 19 nt, Artificial Sequence
  Description of Artificial Sequence: Synthetic oligonucleotide
agcagccacucacaucgua

SEQ ID NO: 121346 - RNA, 19 nt, Artificial Sequence
  Description of Artificial Sequence: Synthetic oligonucleotide
gggcugaccagguacauau

SEQ ID NO: 121347 - RNA, 19 nt, Artificial Sequence
  Description of Artificial Sequence: Synthetic oligonucleotide
cagggauccccuagcauua

SEQ ID NO: 121348 - RNA, 19 nt, Artificial Sequence
  Description of Artificial Sequence: Synthetic oligonucleotide
acuaguccuuguugacgua

SEQ ID NO: 121349 - RNA, 19 nt, Artificial Sequence
  Description of Artificial Sequence: Synthetic oligonucleotide
ccacucuguuguaaaggac

SEQ ID NO: 121350 - RNA, 19 nt, Artificial Sequence
  Description of Artificial Sequence: Synthetic oligonucleotide
gcauauaacucaaggauuu

SEQ ID NO: 121351 - RNA, 19 nt, Artificial Sequence
  Description of Artificial Sequence: Synthetic oligonucleotide
agguuaagcuggaugucuu

SEQ ID NO: 121352 - RNA, 19 nt, Artificial Sequence
  Description of Artificial Sequence: Synthetic oligonucleotide
ucccauggacggagcgcca

SEQ ID NO: 121353 - RNA, 19 nt, Artificial Sequence
  Description of Artificial Sequence: Synthetic oligonucleotide
acacggggcgguaacacua

SEQ ID NO: 121354 - RNA, 19 nt, Artificial Sequence
  Description of Artificial Sequence: Synthetic oligonucleotide
cacguggccccaccucaag

SEQ ID NO: 121355 - RNA, 19 nt, Artificial Sequence
  Description of Artificial Sequence: Synthetic oligonucleotide
gacuuaguggaggcgcucu

SEQ ID NO: 121356 - RNA, 19 nt, Artificial Sequence
  Description of Artificial Sequence: Synthetic oligonucleotide
cacaggcuacacggggcgg

SEQ ID NO: 121357 - RNA, 19 nt, Artificial Sequence
  Description of Artificial Sequence: Synthetic oligonucleotide
ggacggagcgccagguucc

SEQ ID NO: 121358 - RNA, 19 nt, Artificial Sequence
  Description of Artificial Sequence: Synthetic oligonucleotide
gcuuaaacucccagcgcac

SEQ ID NO: 121359 - RNA, 19 nt, Artificial Sequence
  Description of Artificial Sequence: Synthetic oligonucleotide
agggauccccuagcauuag

SEQ ID NO: 121360 - RNA, 19 nt, Artificial Sequence
  Description of Artificial Sequence: Synthetic oligonucleotide
gucgcauaugaagaacccu

SEQ ID NO: 121361 - RNA, 19 nt, Artificial Sequence
  Description of Artificial Sequence: Synthetic oligonucleotide
gcaacuauaugggcuaacu

SEQ ID NO: 121362 - RNA, 19 nt, Artificial Sequence
  Description of Artificial Sequence: Synthetic oligonucleotide
ggauucccaaauggaguac

SEQ ID NO: 121363 - RNA, 19 nt, Artificial Sequence
  Description of Artificial Sequence: Synthetic oligonucleotide
ccaauaguccgagucguca

SEQ ID NO: 121364 - RNA, 19 nt, Artificial Sequence
  Description of Artificial Sequence: Synthetic oligonucleotide
aagauacacggggcuucuu

SEQ ID NO: 121365 - RNA, 19 nt, Artificial Sequence
  Description of Artificial Sequence: Synthetic oligonucleotide
uccgagucgucaggcccca

SEQ ID NO: 121366 - RNA, 19 nt, Artificial Sequence
  Description of Artificial Sequence: Synthetic oligonucleotide
ggagaguaguuaucacgua

SEQ ID NO: 121367 - RNA, 19 nt, Artificial Sequence
  Description of Artificial Sequence: Synthetic oligonucleotide
cuauaugggcuaacugguu

SEQ ID NO: 121368 - RNA, 19 nt, Artificial Sequence
  Description of Artificial Sequence: Synthetic oligonucleotide
gcguguguagucucagcaa

SEQ ID NO: 121369 - RNA, 19 nt, Artificial Sequence
  Description of Artificial Sequence: Synthetic oligonucleotide
caccaauaguccgagucgu

SEQ ID NO: 121370 - RNA, 19 nt, Artificial Sequence
  Description of Artificial Sequence: Synthetic oligonucleotide
ggaagagcguguguagucu

SEQ ID NO: 121371 - RNA, 19 nt, Artificial Sequence
  Description of Artificial Sequence: Synthetic oligonucleotide
gaggguucccagguuuaua

SEQ ID NO: 121372 - RNA, 19 nt, Artificial Sequence
  Description of Artificial Sequence: Synthetic oligonucleotide
gcucccauggacggagcgc

SEQ ID NO: 121373 - RNA, 19 nt, Artificial Sequence
  Description of Artificial Sequence: Synthetic oligonucleotide
ccuagcauuaguucuucau

SEQ ID NO: 121374 - RNA, 19 nt, Artificial Sequence
  Description of Artificial Sequence: Synthetic oligonucleotide
cacggggcgguaacacuaa

SEQ ID NO: 121375 - RNA, 19 nt, Artificial Sequence
  Description of Artificial Sequence: Synthetic oligonucleotide
ccgaccaaacaagguguag

SEQ ID NO: 121376 - RNA, 19 nt, Artificial Sequence
  Description of Artificial Sequence: Synthetic oligonucleotide
gugacuuaguggaggcgcu

SEQ ID NO: 121377 - RNA, 19 nt, Artificial Sequence
  Description of Artificial Sequence: Synthetic oligonucleotide
ggaguacgaccagggccgg

SEQ ID NO: 121378 - RNA, 19 nt, Artificial Sequence
  Description of Artificial Sequence: Synthetic oligonucleotide
acggagcgccagguuccac

SEQ ID NO: 121379 - RNA, 19 nt, Artificial Sequence
  Description of Artificial Sequence: Synthetic oligonucleotide
cgagucgucaggccccaag

SEQ ID NO: 121380 - RNA, 19 nt, Artificial Sequence
  Description of Artificial Sequence: Synthetic oligonucleotide
acgcccacuggcagauaug

SEQ ID NO: 121381 - RNA, 19 nt, Artificial Sequence
  Description of Artificial Sequence: Synthetic oligonucleotide
gacggagcgccagguucca

SEQ ID NO: 121382 - RNA, 19 nt, Artificial Sequence
  Description of Artificial Sequence: Synthetic oligonucleotide
cugugucguccaucaguaa

SEQ ID NO: 121383 - RNA, 19 nt, Artificial Sequence
  Description of Artificial Sequence: Synthetic oligonucleotide
cacgcccacuggcagauau

SEQ ID NO: 121384 - RNA, 19 nt, Artificial Sequence
  Description of Artificial Sequence: Synthetic oligonucleotide
ggacuuggcugugacuucu

SEQ ID NO: 121385 - RNA, 19 nt, Artificial Sequence
  Description of Artificial Sequence: Synthetic oligonucleotide
agccgccacucuguuguaa

SEQ ID NO: 121386 - RNA, 19 nt, Artificial Sequence
  Description of Artificial Sequence: Synthetic oligonucleotide
gcuacacggggcgguaaca

SEQ ID NO: 121387 - RNA, 19 nt, Artificial Sequence
  Description of Artificial Sequence: Synthetic oligonucleotide
gaguacgaccagggccgga

SEQ ID NO: 121388 - RNA, 19 nt, Artificial Sequence
  Description of Artificial Sequence: Synthetic oligonucleotide
ggauccccuagcauuaguu

SEQ ID NO: 121389 - RNA, 19 nt, Artificial Sequence
  Description of Artificial Sequence: Synthetic oligonucleotide
cuggccuaaguggugugau

SEQ ID NO: 121390 - RNA, 19 nt, Artificial Sequence
  Description of Artificial Sequence: Synthetic oligonucleotide
ucacgccaaguagccgcuu

SEQ ID NO: 121391 - RNA, 19 nt, Artificial Sequence
  Description of Artificial Sequence: Synthetic oligonucleotide
caacaccgaguuucuugau

SEQ ID NO: 121392 - RNA, 19 nt, Artificial Sequence
  Description of Artificial Sequence: Synthetic oligonucleotide
ccugaucccuggcaguugu

SEQ ID NO: 121393 - RNA, 19 nt, Artificial Sequence
  Description of Artificial Sequence: Synthetic oligonucleotide
accagggccggaggauaua

SEQ ID NO: 121394 - RNA, 19 nt, Artificial Sequence
  Description of Artificial Sequence: Synthetic oligonucleotide
ggcagauaugaaggcuucu

SEQ ID NO: 121395 - RNA, 19 nt, Artificial Sequence
  Description of Artificial Sequence: Synthetic oligonucleotide
gaccagggccggaggauau

SEQ ID NO: 121396 - RNA, 19 nt, Artificial Sequence
  Description of Artificial Sequence: Synthetic oligonucleotide
gcgcucugcgcugcugcag

SEQ ID NO: 121397 - RNA, 19 nt, Artificial Sequence
  Description of Artificial Sequence: Synthetic oligonucleotide
ccccuagcauuaguucuuc

SEQ ID NO: 121398 - RNA, 19 nt, Artificial Sequence
  Description of Artificial Sequence: Synthetic oligonucleotide
cacgccaaguagccgcuuu

SEQ ID NO: 121399 - RNA, 19 nt, Artificial Sequence
  Description of Artificial Sequence: Synthetic oligonucleotide
gggauccccuagcauuagu

SEQ ID NO: 121400 - RNA, 19 nt, Artificial Sequence
  Description of Artificial Sequence: Synthetic oligonucleotide
gagccgccacucuguugua

SEQ ID NO: 121401 - RNA, 19 nt, Artificial Sequence
  Description of Artificial Sequence: Synthetic oligonucleotide
caggcuacacggggcggua

SEQ ID NO: 121402 - RNA, 19 nt, Artificial Sequence
  Description of Artificial Sequence: Synthetic oligonucleotide
ggaggguucccagguuuau

SEQ ID NO: 121403 - RNA, 19 nt, Artificial Sequence
  Description of Artificial Sequence: Synthetic oligonucleotide
ggcuucuacugugguugua

SEQ ID NO: 121404 - RNA, 19 nt, Artificial Sequence
  Description of Artificial Sequence: Synthetic oligonucleotide
cgagugcggaggaaaggcu

SEQ ID NO: 121405 - RNA, 19 nt, Artificial Sequence
  Description of Artificial Sequence: Synthetic oligonucleotide
gcgguaacacuaagcccau

SEQ ID NO: 121406 - RNA, 19 nt, Artificial Sequence
  Description of Artificial Sequence: Synthetic oligonucleotide
ggaggcgcucugcgcugcu

SEQ ID NO: 121407 - RNA, 19 nt, Artificial Sequence
  Description of Artificial Sequence: Synthetic oligonucleotide
ccuggauagcacgcccacu

SEQ ID NO: 121408 - RNA, 19 nt, Artificial Sequence
  Description of Artificial Sequence: Synthetic oligonucleotide
ccugagccgccacucuguu

SEQ ID NO: 121409 - RNA, 19 nt, Artificial Sequence
  Description of Artificial Sequence: Synthetic oligonucleotide
cgauuccugucagggacuu

SEQ ID NO: 121410 - RNA, 19 nt, Artificial Sequence
  Description of Artificial Sequence: Synthetic oligonucleotide
cgguaacacuaagcccaua

SEQ ID NO: 121411 - RNA, 19 nt, Artificial Sequence
  Description of Artificial Sequence: Synthetic oligonucleotide
ccgagucgucaggccccaa

SEQ ID NO: 121412 - RNA, 19 nt, Artificial Sequence
  Description of Artificial Sequence: Synthetic oligonucleotide
aauagcaucccacugcugc

SEQ ID NO: 121413 - RNA, 19 nt, Artificial Sequence
  Description of Artificial Sequence: Synthetic oligonucleotide
uaugagaugaaagugaccg

SEQ ID NO: 121414 - RNA, 19 nt, Artificial Sequence
  Description of Artificial Sequence: Synthetic oligonucleotide
aauaccuuaguucugccag

SEQ ID NO: 121415 - RNA, 19 nt, Artificial Sequence
  Description of Artificial Sequence: Synthetic oligonucleotide
ucauuaaacaguugaaccg

SEQ ID NO: 121416 - RNA, 19 nt, Artificial Sequence
  Description of Artificial Sequence: Synthetic oligonucleotide
agauucuuuaaacaaggcc

SEQ ID NO: 121417 - RNA, 19 nt, Artificial Sequence
  Description of Artificial Sequence: Synthetic oligonucleotide
aaauugaccuccuaaaaca

SEQ ID NO: 121418 - RNA, 19 nt, Artificial Sequence
  Description of Artificial Sequence: Synthetic oligonucleotide
uuuggugcaauaaacaggu

SEQ ID NO: 121419 - RNA, 19 nt, Artificial Sequence
  Description of Artificial Sequence: Synthetic oligonucleotide
ucgaaacaugauaugaucg

SEQ ID NO: 121420 - RNA, 19 nt, Artificial Sequence
  Description of Artificial Sequence: Synthetic oligonucleotide
aacaguugaaccgacaguc

SEQ ID NO: 121421 - RNA, 19 nt, Artificial Sequence
  Description of Artificial Sequence: Synthetic oligonucleotide
uguaguaauacacaauccu

SEQ ID NO: 121422 - RNA, 19 nt, Artificial Sequence
  Description of Artificial Sequence: Synthetic oligonucleotide
uguaaauaagagcuuaugu

SEQ ID NO: 121423 - RNA, 19 nt, Artificial Sequence
  Description of Artificial Sequence: Synthetic oligonucleotide
gauaugaucgagauguugg

SEQ ID NO: 121424 - RNA, 19 nt, Artificial Sequence
  Description of Artificial Sequence: Synthetic oligonucleotide
uguaauguuaugauuacaa

SEQ ID NO: 121425 - RNA, 19 nt, Artificial Sequence
  Description of Artificial Sequence: Synthetic oligonucleotide
aauguggcuaucuuaucuc

SEQ ID NO: 121426 - RNA, 19 nt, Artificial Sequence
  Description of Artificial Sequence: Synthetic oligonucleotide
ugagguguggucaacaggc

SEQ ID NO: 121427 - RNA, 19 nt, Artificial Sequence
  Description of Artificial Sequence: Synthetic oligonucleotide
acagcuagcaaucccauuc

SEQ ID NO: 121428 - RNA, 19 nt, Artificial Sequence
  Description of Artificial Sequence: Synthetic oligonucleotide
auguuaugauuacaaauac

SEQ ID NO: 121429 - RNA, 19 nt, Artificial Sequence
  Description of Artificial Sequence: Synthetic oligonucleotide
ugguuauuuaggauggcgg

SEQ ID NO: 121430 - RNA, 19 nt, Artificial Sequence
  Description of Artificial Sequence: Synthetic oligonucleotide
aaagugaccgucugcauca

SEQ ID NO: 121431 - RNA, 19 nt, Artificial Sequence
  Description of Artificial Sequence: Synthetic oligonucleotide
aauagugcugugccaugcc

SEQ ID NO: 121432 - RNA, 19 nt, Artificial Sequence
  Description of Artificial Sequence: Synthetic oligonucleotide
cagaauuccgacaauacac

SEQ ID NO: 121433 - RNA, 19 nt, Artificial Sequence
  Description of Artificial Sequence: Synthetic oligonucleotide
aacaugauaugaucgagau

SEQ ID NO: 121434 - RNA, 19 nt, Artificial Sequence
  Description of Artificial Sequence: Synthetic oligonucleotide
agcgcuuagaaacagccuc

SEQ ID NO: 121435 - RNA, 19 nt, Artificial Sequence
  Description of Artificial Sequence: Synthetic oligonucleotide
ucuaugagaugaaagugac

SEQ ID NO: 121436 - RNA, 19 nt, Artificial Sequence
  Description of Artificial Sequence: Synthetic oligonucleotide
uaauguggcuaucuuaucu

SEQ ID NO: 121437 - RNA, 19 nt, Artificial Sequence
  Description of Artificial Sequence: Synthetic oligonucleotide
aaugaugcuugcaagcauc

SEQ ID NO: 121438 - RNA, 19 nt, Artificial Sequence
  Description of Artificial Sequence: Synthetic oligonucleotide
uguacgacaccaauauuca

SEQ ID NO: 121439 - RNA, 19 nt, Artificial Sequence
  Description of Artificial Sequence: Synthetic oligonucleotide
uacgacaccaauauucaga

SEQ ID NO: 121440 - RNA, 19 nt, Artificial Sequence
  Description of Artificial Sequence: Synthetic oligonucleotide
ucugcauauacucggacaa

SEQ ID NO: 121441 - RNA, 19 nt, Artificial Sequence
  Description of Artificial Sequence: Synthetic oligonucleotide
uccuaugccauuugcacag

SEQ ID NO: 121442 - RNA, 19 nt, Artificial Sequence
  Description of Artificial Sequence: Synthetic oligonucleotide
uggcucauacucuaguggg

SEQ ID NO: 121443 - RNA, 19 nt, Artificial Sequence
  Description of Artificial Sequence: Synthetic oligonucleotide
aauaagagcuuaugucuga

SEQ ID NO: 121444 - RNA, 19 nt, Artificial Sequence
  Description of Artificial Sequence: Synthetic oligonucleotide
aacugcuaauuaauguggc

SEQ ID NO: 121445 - RNA, 19 nt, Artificial Sequence
  Description of Artificial Sequence: Synthetic oligonucleotide
ucgacuuuaacugaucugu

SEQ ID NO: 121446 - RNA, 19 nt, Artificial Sequence
  Description of Artificial Sequence: Synthetic oligonucleotide
agauuuaccagcuucuaaa

SEQ ID NO: 121447 - RNA, 19 nt, Artificial Sequence
  Description of Artificial Sequence: Synthetic oligonucleotide
caugauaugaucgagaugu

SEQ ID NO: 121448 - RNA, 19 nt, Artificial Sequence
  Description of Artificial Sequence: Synthetic oligonucleotide
uuaaaaucagaggcgagca

SEQ ID NO: 121449 - RNA, 19 nt, Artificial Sequence
  Description of Artificial Sequence: Synthetic oligonucleotide
auaugaucgagauguuggg

SEQ ID NO: 121450 - RNA, 19 nt, Artificial Sequence
  Description of Artificial Sequence: Synthetic oligonucleotide
uacuuuguuacucacccuc

SEQ ID NO: 121451 - RNA, 19 nt, Artificial Sequence
  Description of Artificial Sequence: Synthetic oligonucleotide
ugaaauugaccuccuaaaa

SEQ ID NO: 121452 - RNA, 19 nt, Artificial Sequence
  Description of Artificial Sequence: Synthetic oligonucleotide
uaagauuuuggagggaaug

SEQ ID NO: 121453 - RNA, 19 nt, Artificial Sequence
  Description of Artificial Sequence: Synthetic oligonucleotide
uuuguuacucacccucugc

SEQ ID NO: 121454 - RNA, 19 nt, Artificial Sequence
  Description of Artificial Sequence: Synthetic oligonucleotide
uugaccuccuaaaacaguc

SEQ ID NO: 121455 - RNA, 19 nt, Artificial Sequence
  Description of Artificial Sequence: Synthetic oligonucleotide
aacaaaggcuaugaguucu

SEQ ID NO: 121456 - RNA, 19 nt, Artificial Sequence
  Description of Artificial Sequence: Synthetic oligonucleotide
aaugcugagcgcuuagaaa

SEQ ID NO: 121457 - RNA, 19 nt, Artificial Sequence
  Description of Artificial Sequence: Synthetic oligonucleotide
agcucgggcaagcuuauac

SEQ ID NO: 121458 - RNA, 19 nt, Artificial Sequence
  Description of Artificial Sequence: Synthetic oligonucleotide
cacaaugcgaagcauggag

SEQ ID NO: 121459 - RNA, 19 nt, Artificial Sequence
  Description of Artificial Sequence: Synthetic oligonucleotide
ugugaugcaaauguuugac

SEQ ID NO: 121460 - RNA, 19 nt, Artificial Sequence
  Description of Artificial Sequence: Synthetic oligonucleotide
uuguggaacuuccauuagc

SEQ ID NO: 121461 - RNA, 19 nt, Artificial Sequence
  Description of Artificial Sequence: Synthetic oligonucleotide
gcuacuuuguuacucaccc

SEQ ID NO: 121462 - RNA, 19 nt, Artificial Sequence
  Description of Artificial Sequence: Synthetic oligonucleotide
ucggacaaaagcucgggca

SEQ ID NO: 121463 - RNA, 19 nt, Artificial Sequence
  Description of Artificial Sequence: Synthetic oligonucleotide
acgucuucaagguaucuug

SEQ ID NO: 121464 - RNA, 19 nt, Artificial Sequence
  Description of Artificial Sequence: Synthetic oligonucleotide
agacuugugcagucaaagg

SEQ ID NO: 121465 - RNA, 19 nt, Artificial Sequence
  Description of Artificial Sequence: Synthetic oligonucleotide
acaaugcgaagcauggagc

SEQ ID NO: 121466 - RNA, 19 nt, Artificial Sequence
  Description of Artificial Sequence: Synthetic oligonucleotide
aguaaucacaaagccauug

SEQ ID NO: 121467 - RNA, 19 nt, Artificial Sequence
  Description of Artificial Sequence: Synthetic oligonucleotide
uuaugucugaacguggccu

SEQ ID NO: 121468 - RNA, 19 nt, Artificial Sequence
  Description of Artificial Sequence: Synthetic oligonucleotide
cauuucuauccccuguggg

SEQ ID NO: 121469 - RNA, 19 nt, Artificial Sequence
  Description of Artificial Sequence: Synthetic oligonucleotide
gaacgcgaccuccacaucc

SEQ ID NO: 121470 - RNA, 19 nt, Artificial Sequence
  Description of Artificial Sequence: Synthetic oligonucleotide
uuuaggauggcggggagga

SEQ ID NO: 121471 - RNA, 19 nt, Artificial Sequence
  Description of Artificial Sequence: Synthetic oligonucleotide
ucuuacuuuaaggucugcc

SEQ ID NO: 121472 - RNA, 19 nt, Artificial Sequence
  Description of Artificial Sequence: Synthetic oligonucleotide
gaugaaagugaccgucugc

SEQ ID NO: 121473 - RNA, 19 nt, Artificial Sequence
  Description of Artificial Sequence: Synthetic oligonucleotide
uuguaaauaagagcuuaug

SEQ ID NO: 121474 - RNA, 19 nt, Artificial Sequence
  Description of Artificial Sequence: Synthetic oligonucleotide
uggaacuuccauuagcaua

SEQ ID NO: 121475 - RNA, 19 nt, Artificial Sequence
  Description of Artificial Sequence: Synthetic oligonucleotide
aguggugcuaauaacucuc

SEQ ID NO: 121476 - RNA, 19 nt, Artificial Sequence
  Description of Artificial Sequence: Synthetic oligonucleotide
uuuauagacuugugcaguc

SEQ ID NO: 121477 - RNA, 19 nt, Artificial Sequence
  Description of Artificial Sequence: Synthetic oligonucleotide
ugggcauuuguccgaaacc

SEQ ID NO: 121478 - RNA, 19 nt, Artificial Sequence
  Description of Artificial Sequence: Synthetic oligonucleotide
uccaugucuaguuccggag

SEQ ID NO: 121479 - RNA, 19 nt, Artificial Sequence
  Description of Artificial Sequence: Synthetic oligonucleotide
uuuaaggucugcccaugga

SEQ ID NO: 121480 - RNA, 19 nt, Artificial Sequence
  Description of Artificial Sequence: Synthetic oligonucleotide
accaagucuaagauuuacc

SEQ ID NO: 121481 - RNA, 19 nt, Artificial Sequence
  Description of Artificial Sequence: Synthetic oligonucleotide
acaagagagguaaacagga

SEQ ID NO: 121482 - RNA, 19 nt, Artificial Sequence
  Description of Artificial Sequence: Synthetic oligonucleotide
uugggcauuuguccgaaac

SEQ ID NO: 121483 - RNA, 19 nt, Artificial Sequence
  Description of Artificial Sequence: Synthetic oligonucleotide
auuuguccgaaacccagca

SEQ ID NO: 121484 - RNA, 19 nt, Artificial Sequence
  Description of Artificial Sequence: Synthetic oligonucleotide
aaaagcucgggcaagcuua

SEQ ID NO: 121485 - RNA, 19 nt, Artificial Sequence
  Description of Artificial Sequence: Synthetic oligonucleotide
ugauugagccucccgucag

SEQ ID NO: 121486 - RNA, 19 nt, Artificial Sequence
  Description of Artificial Sequence: Synthetic oligonucleotide
caacaggccauaaucauga

SEQ ID NO: 121487 - RNA, 19 nt, Artificial Sequence
  Description of Artificial Sequence: Synthetic oligonucleotide
uaauuaauguggcuaucuu

SEQ ID NO: 121488 - RNA, 19 nt, Artificial Sequence
  Description of Artificial Sequence: Synthetic oligonucleotide
ggugcuuguaauauggcag

SEQ ID NO: 121489 - RNA, 19 nt, Artificial Sequence
  Description of Artificial Sequence: Synthetic oligonucleotide
aucuaugagaugaaaguga

SEQ ID NO: 121490 - RNA, 19 nt, Artificial Sequence
  Description of Artificial Sequence: Synthetic oligonucleotide
cauauacucggacaauguc

SEQ ID NO: 121491 - RNA, 19 nt, Artificial Sequence
  Description of Artificial Sequence: Synthetic oligonucleotide
uauuuaggauggcggggag

SEQ ID NO: 121492 - RNA, 19 nt, Artificial Sequence
  Description of Artificial Sequence: Synthetic oligonucleotide
uaugaucgagauguugggc

SEQ ID NO: 121493 - RNA, 19 nt, Artificial Sequence
  Description of Artificial Sequence: Synthetic oligonucleotide
cuuaugucugaacguggcc

SEQ ID NO: 121494 - RNA, 19 nt, Artificial Sequence
  Description of Artificial Sequence: Synthetic oligonucleotide
caguugaaccgacaguccc

SEQ ID NO: 121495 - RNA, 19 nt, Artificial Sequence
  Description of Artificial Sequence: Synthetic oligonucleotide
ucugccaguauugucaaua

SEQ ID NO: 121496 - RNA, 19 nt, Artificial Sequence
  Description of Artificial Sequence: Synthetic oligonucleotide
acugcuaauuaauguggcu

SEQ ID NO: 121497 - RNA, 19 nt, Artificial Sequence
  Description of Artificial Sequence: Synthetic oligonucleotide
cauugcaagaaguuaguaa

SEQ ID NO: 121498 - RNA, 19 nt, Artificial Sequence
  Description of Artificial Sequence: Synthetic oligonucleotide
uuaggaagaucaacauaaa

SEQ ID NO: 121499 - RNA, 19 nt, Artificial Sequence
  Description of Artificial Sequence: Synthetic oligonucleotide
gaauuccgacaauacacca

SEQ ID NO: 121500 - RNA, 19 nt, Artificial Sequence
  Description of Artificial Sequence: Synthetic oligonucleotide
ugcacuccauuuauagacu

SEQ ID NO: 121501 - RNA, 19 nt, Artificial Sequence
  Description of Artificial Sequence: Synthetic oligonucleotide
uucccaacacccugcauac

SEQ ID NO: 121502 - RNA, 19 nt, Artificial Sequence
  Description of Artificial Sequence: Synthetic oligonucleotide
auccaaacagccaccgcgc

SEQ ID NO: 121503 - RNA, 19 nt, Artificial Sequence
  Description of Artificial Sequence: Synthetic oligonucleotide
aggugauugagccucccgu

SEQ ID NO: 121504 - RNA, 19 nt, Artificial Sequence
  Description of Artificial Sequence: Synthetic oligonucleotide
acaguugaaccgacagucc

SEQ ID NO: 121505 - RNA, 19 nt, Artificial Sequence
  Description of Artificial Sequence: Synthetic oligonucleotide
auaugcagucuguacgaca

SEQ ID NO: 121506 - RNA, 19 nt, Artificial Sequence
  Description of Artificial Sequence: Synthetic oligonucleotide
ugaugacuuuucacaaagu

SEQ ID NO: 121507 - RNA, 19 nt, Artificial Sequence
  Description of Artificial Sequence: Synthetic oligonucleotide
cuaguuccggagcaggaac

SEQ ID NO: 121508 - RNA, 19 nt, Artificial Sequence
  Description of Artificial Sequence: Synthetic oligonucleotide
aggaacgcgaccuccacau

SEQ ID NO: 121509 - RNA, 19 nt, Artificial Sequence
  Description of Artificial Sequence: Synthetic oligonucleotide
ugcagucuguacgacacca

SEQ ID NO: 121510 - RNA, 19 nt, Artificial Sequence
  Description of Artificial Sequence: Synthetic oligonucleotide
aauacaccauguagugcag

SEQ ID NO: 121511 - RNA, 19 nt, Artificial Sequence
  Description of Artificial Sequence: Synthetic oligonucleotide
uuauagacuugugcaguca

SEQ ID NO: 121512 - RNA, 19 nt, Artificial Sequence
  Description of Artificial Sequence: Synthetic oligonucleotide
uggaaugcugagcgcuuag

SEQ ID NO: 121513 - RNA, 19 nt, Artificial Sequence
  Description of Artificial Sequence: Synthetic oligonucleotide
uggcuauuggugcuuguaa

SEQ ID NO: 121514 - RNA, 19 nt, Artificial Sequence
  Description of Artificial Sequence: Synthetic oligonucleotide
aauuccgacaauacaccau

SEQ ID NO: 121515 - RNA, 19 nt, Artificial Sequence
  Description of Artificial Sequence: Synthetic oligonucleotide
cucgcucagacccugaaga

SEQ ID NO: 121516 - RNA, 19 nt, Artificial Sequence
  Description of Artificial Sequence: Synthetic oligonucleotide
gucgacuuuaacugaucug

SEQ ID NO: 121517 - RNA, 19 nt, Artificial Sequence
  Description of Artificial Sequence: Synthetic oligonucleotide
uaaaaucagaggcgagcau

SEQ ID NO: 121518 - RNA, 19 nt, Artificial Sequence
  Description of Artificial Sequence: Synthetic oligonucleotide
gaaugcugagcgcuuagaa

SEQ ID NO: 121519 - RNA, 19 nt, Artificial Sequence
  Description of Artificial Sequence: Synthetic oligonucleotide
gaacaaaggcuaugaguuc

SEQ ID NO: 121520 - RNA, 19 nt, Artificial Sequence
  Description of Artificial Sequence: Synthetic oligonucleotide
uacuuuaaggucugcccau

SEQ ID NO: 121521 - RNA, 19 nt, Artificial Sequence
  Description of Artificial Sequence: Synthetic oligonucleotide
cagcuagcaaucccauucg

SEQ ID NO: 121522 - RNA, 19 nt, Artificial Sequence
  Description of Artificial Sequence: Synthetic oligonucleotide
uaccaagucuaagauuuac

SEQ ID NO: 121523 - RNA, 19 nt, Artificial Sequence
  Description of Artificial Sequence: Synthetic oligonucleotide
auuuaggauggcggggagg

SEQ ID NO: 121524 - RNA, 19 nt, Artificial Sequence
  Description of Artificial Sequence: Synthetic oligonucleotide
caaugcgaagcauggagca

SEQ ID NO: 121525 - RNA, 19 nt, Artificial Sequence
  Description of Artificial Sequence: Synthetic oligonucleotide
cuuguggaacuuccauuag

SEQ ID NO: 121526 - RNA, 19 nt, Artificial Sequence
  Description of Artificial Sequence: Synthetic oligonucleotide
auaacgucuucaagguauc

SEQ ID NO: 121527 - RNA, 19 nt, Artificial Sequence
  Description of Artificial Sequence: Synthetic oligonucleotide
auagcaucccacugcugca

SEQ ID NO: 121528 - RNA, 19 nt, Artificial Sequence
  Description of Artificial Sequence: Synthetic oligonucleotide
auacucuaguggguacagc

SEQ ID NO: 121529 - RNA, 19 nt, Artificial Sequence
  Description of Artificial Sequence: Synthetic oligonucleotide
auauucagacuuucuccaa

SEQ ID NO: 121530 - RNA, 19 nt, Artificial Sequence
  Description of Artificial Sequence: Synthetic oligonucleotide
aacgucuucaagguaucuu

SEQ ID NO: 121531 - RNA, 19 nt, Artificial Sequence
  Description of Artificial Sequence: Synthetic oligonucleotide
cauacucuaguggguacag

SEQ ID NO: 121532 - RNA, 19 nt, Artificial Sequence
  Description of Artificial Sequence: Synthetic oligonucleotide
ugcuaauaacucuccuguc

SEQ ID NO: 121533 - RNA, 19 nt, Artificial Sequence
  Description of Artificial Sequence: Synthetic oligonucleotide
agggucggacaaaagcucg

SEQ ID NO: 121534 - RNA, 19 nt, Artificial Sequence
  Description of Artificial Sequence: Synthetic oligonucleotide
cuaaauccauuagagugca

SEQ ID NO: 121535 - RNA, 19 nt, Artificial Sequence
  Description of Artificial Sequence: Synthetic oligonucleotide
gcuccuaugccauuugcac

SEQ ID NO: 121536 - RNA, 19 nt, Artificial Sequence
  Description of Artificial Sequence: Synthetic oligonucleotide
auaccuuaguucugccagu

SEQ ID NO: 121537 - RNA, 19 nt, Artificial Sequence
  Description of Artificial Sequence: Synthetic oligonucleotide
ucuaguuccggagcaggaa

SEQ ID NO: 121538 - RNA, 19 nt, Artificial Sequence
  Description of Artificial Sequence: Synthetic oligonucleotide
gucuguacgacaccaauau

SEQ ID NO: 121539 - RNA, 19 nt, Artificial Sequence
  Description of Artificial Sequence: Synthetic oligonucleotide
cugagcgcuuagaaacagc

SEQ ID NO: 121540 - RNA, 19 nt, Artificial Sequence
  Description of Artificial Sequence: Synthetic oligonucleotide
ggagcagcaucuuucguca

SEQ ID NO: 121541 - RNA, 19 nt, Artificial Sequence
  Description of Artificial Sequence: Synthetic oligonucleotide
ucgucagacuucauuucua

SEQ ID NO: 121542 - RNA, 19 nt, Artificial Sequence
  Description of Artificial Sequence: Synthetic oligonucleotide
ugcgaagcauggagcagcu

SEQ ID NO: 121543 - RNA, 19 nt, Artificial Sequence
  Description of Artificial Sequence: Synthetic oligonucleotide
gaacguggccugaaucaag

SEQ ID NO: 121544 - RNA, 19 nt, Artificial Sequence
  Description of Artificial Sequence: Synthetic oligonucleotide
ucuugugagucugcuucug

SEQ ID NO: 121545 - RNA, 19 nt, Artificial Sequence
  Description of Artificial Sequence: Synthetic oligonucleotide
gguuuauagaaagucucca

SEQ ID NO: 121546 - RNA, 19 nt, Artificial Sequence
  Description of Artificial Sequence: Synthetic oligonucleotide
aaacagccaccgcgcagug

SEQ ID NO: 121547 - RNA, 19 nt, Artificial Sequence
  Description of Artificial Sequence: Synthetic oligonucleotide
gucggacaaaagcucgggc

SEQ ID NO: 121548 - RNA, 19 nt, Artificial Sequence
  Description of Artificial Sequence: Synthetic oligonucleotide
ugucucuaccaaucaccac

SEQ ID NO: 121549 - RNA, 19 nt, Artificial Sequence
  Description of Artificial Sequence: Synthetic oligonucleotide
uugaaccgacagucccugg

SEQ ID NO: 121550 - RNA, 19 nt, Artificial Sequence
  Description of Artificial Sequence: Synthetic oligonucleotide
uuaccaagucuaagauuua

SEQ ID NO: 121551 - RNA, 19 nt, Artificial Sequence
  Description of Artificial Sequence: Synthetic oligonucleotide
cuaauuaauguggcuaucu

SEQ ID NO: 121552 - RNA, 19 nt, Artificial Sequence
  Description of Artificial Sequence: Synthetic oligonucleotide
uggcuaucuuaucuccauc

SEQ ID NO: 121553 - RNA, 19 nt, Artificial Sequence
  Description of Artificial Sequence: Synthetic oligonucleotide
accgucugcaucacuguag

SEQ ID NO: 121554 - RNA, 19 nt, Artificial Sequence
  Description of Artificial Sequence: Synthetic oligonucleotide
gcauaugcagucuguacga

SEQ ID NO: 121555 - RNA, 19 nt, Artificial Sequence
  Description of Artificial Sequence: Synthetic oligonucleotide
aguugaaccgacagucccu

SEQ ID NO: 121556 - RNA, 19 nt, Artificial Sequence
  Description of Artificial Sequence: Synthetic oligonucleotide
auugagccucccgucagug

SEQ ID NO: 121557 - RNA, 19 nt, Artificial Sequence
  Description of Artificial Sequence: Synthetic oligonucleotide
accgcacaggugauugagc

SEQ ID NO: 121558 - RNA, 19 nt, Artificial Sequence
  Description of Artificial Sequence: Synthetic oligonucleotide
gcuaauaacucuccugucu

SEQ ID NO: 121559 - RNA, 19 nt, Artificial Sequence
  Description of Artificial Sequence: Synthetic oligonucleotide
acuuuguuacucacccucu

SEQ ID NO: 121560 - RNA, 19 nt, Artificial Sequence
  Description of Artificial Sequence: Synthetic oligonucleotide
gagggucggacaaaagcuc

SEQ ID NO: 121561 - RNA, 19 nt, Artificial Sequence
  Description of Artificial Sequence: Synthetic oligonucleotide
auacagaucuaaauccauu

SEQ ID NO: 121562 - RNA, 19 nt, Artificial Sequence
  Description of Artificial Sequence: Synthetic oligonucleotide
caucuuucgucagacuuca

SEQ ID NO: 121563 - RNA, 19 nt, Artificial Sequence
  Description of Artificial Sequence: Synthetic oligonucleotide
agcuagcaaucccauucga

SEQ ID NO: 121564 - RNA, 19 nt, Artificial Sequence
  Description of Artificial Sequence: Synthetic oligonucleotide
aacgcgaccuccacaucca

SEQ ID NO: 121565 - RNA, 19 nt, Artificial Sequence
  Description of Artificial Sequence: Synthetic oligonucleotide
ggaacuuccauuagcauau

SEQ ID NO: 121566 - RNA, 19 nt, Artificial Sequence
  Description of Artificial Sequence: Synthetic oligonucleotide
acagucgacuuuaacugau

SEQ ID NO: 121567 - RNA, 19 nt, Artificial Sequence
  Description of Artificial Sequence: Synthetic oligonucleotide
cccaaugcugcaaaacauc

SEQ ID NO: 121568 - RNA, 19 nt, Artificial Sequence
  Description of Artificial Sequence: Synthetic oligonucleotide
gccggggcuacuuuguuac

SEQ ID NO: 121569 - RNA, 19 nt, Artificial Sequence
  Description of Artificial Sequence: Synthetic oligonucleotide
uguugggcauuuguccgaa

SEQ ID NO: 121570 - RNA, 19 nt, Artificial Sequence
  Description of Artificial Sequence: Synthetic oligonucleotide
cuaucuuaucuccaucuau

SEQ ID NO: 121571 - RNA, 19 nt, Artificial Sequence
  Description of Artificial Sequence: Synthetic oligonucleotide
cagguaccuucauaacguc

SEQ ID NO: 121572 - RNA, 19 nt, Artificial Sequence
  Description of Artificial Sequence: Synthetic oligonucleotide
ggucggacaaaagcucggg

SEQ ID NO: 121573 - RNA, 19 nt, Artificial Sequence
  Description of Artificial Sequence: Synthetic oligonucleotide
agguaccuucauaacgucu

SEQ ID NO: 121574 - RNA, 19 nt, Artificial Sequence
  Description of Artificial Sequence: Synthetic oligonucleotide
ggcuaucuuaucuccaucu

SEQ ID NO: 121575 - RNA, 19 nt, Artificial Sequence
  Description of Artificial Sequence: Synthetic oligonucleotide
aaagcucgggcaagcuuau

SEQ ID NO: 121576 - RNA, 19 nt, Artificial Sequence
  Description of Artificial Sequence: Synthetic oligonucleotide
aaguaaucacaaagccauu

SEQ ID NO: 121577 - RNA, 19 nt, Artificial Sequence
  Description of Artificial Sequence: Synthetic oligonucleotide
aaucagaggcgagcaucau

SEQ ID NO: 121578 - RNA, 19 nt, Artificial Sequence
  Description of Artificial Sequence: Synthetic oligonucleotide
caggugaggguggcuauug

SEQ ID NO: 121579 - RNA, 19 nt, Artificial Sequence
  Description of Artificial Sequence: Synthetic oligonucleotide
guuucucacuacugggccu

SEQ ID NO: 121580 - RNA, 19 nt, Artificial Sequence
  Description of Artificial Sequence: Synthetic oligonucleotide
aggcgagcaucauuaccaa

SEQ ID NO: 121581 - RNA, 19 nt, Artificial Sequence
  Description of Artificial Sequence: Synthetic oligonucleotide
cagaggcgagcaucauuac

SEQ ID NO: 121582 - RNA, 19 nt, Artificial Sequence
  Description of Artificial Sequence: Synthetic oligonucleotide
gcugcacuccauuuauaga

SEQ ID NO: 121583 - RNA, 19 nt, Artificial Sequence
  Description of Artificial Sequence: Synthetic oligonucleotide
cuagacagguggcgugcuc

SEQ ID NO: 121584 - RNA, 19 nt, Artificial Sequence
  Description of Artificial Sequence: Synthetic oligonucleotide
cauuaccaagucuaagauu

SEQ ID NO: 121585 - RNA, 19 nt, Artificial Sequence
  Description of Artificial Sequence: Synthetic oligonucleotide
gaccgucugcaucacugua

SEQ ID NO: 121586 - RNA, 19 nt, Artificial Sequence
  Description of Artificial Sequence: Synthetic oligonucleotide
gcgcuuagaaacagccucc

SEQ ID NO: 121587 - RNA, 19 nt, Artificial Sequence
  Description of Artificial Sequence: Synthetic oligonucleotide
cauccccaucaaaggagca

SEQ ID NO: 121588 - RNA, 19 nt, Artificial Sequence
  Description of Artificial Sequence: Synthetic oligonucleotide
gcgagcaucauuaccaagu

SEQ ID NO: 121589 - RNA, 19 nt, Artificial Sequence
  Description of Artificial Sequence: Synthetic oligonucleotide
gccaagcaucaggugaggg

SEQ ID NO: 121590 - RNA, 19 nt, Artificial Sequence
  Description of Artificial Sequence: Synthetic oligonucleotide
guuugacaccaguuuuggu

SEQ ID NO: 121591 - RNA, 19 nt, Artificial Sequence
  Description of Artificial Sequence: Synthetic oligonucleotide
ggcuagacagguggcgugc

SEQ ID NO: 121592 - RNA, 19 nt, Artificial Sequence
  Description of Artificial Sequence: Synthetic oligonucleotide
gggagccggggcuacuuug

SEQ ID NO: 121593 - RNA, 19 nt, Artificial Sequence
  Description of Artificial Sequence: Synthetic oligonucleotide
agccggggcuacuuuguua

SEQ ID NO: 121594 - RNA, 19 nt, Artificial Sequence
  Description of Artificial Sequence: Synthetic oligonucleotide
ccaaugguggaucuugucu

SEQ ID NO: 121595 - RNA, 19 nt, Artificial Sequence
  Description of Artificial Sequence: Synthetic oligonucleotide
gguugccuuuccguaccgg

SEQ ID NO: 121596 - RNA, 19 nt, Artificial Sequence
  Description of Artificial Sequence: Synthetic oligonucleotide
gcaccaaaccagcucgcuc

SEQ ID NO: 121597 - RNA, 19 nt, Artificial Sequence
  Description of Artificial Sequence: Synthetic oligonucleotide
ucucacuacugggccuggu

SEQ ID NO: 121598 - RNA, 19 nt, Artificial Sequence
  Description of Artificial Sequence: Synthetic oligonucleotide
caggaacgcgaccuccaca

SEQ ID NO: 121599 - RNA, 19 nt, Artificial Sequence
  Description of Artificial Sequence: Synthetic oligonucleotide
ggcauuuguccgaaaccca

SEQ ID NO: 121600 - RNA, 19 nt, Artificial Sequence
  Description of Artificial Sequence: Synthetic oligonucleotide
cucgggcaagcuuauacuu

SEQ ID NO: 121601 - RNA, 19 nt, Artificial Sequence
  Description of Artificial Sequence: Synthetic oligonucleotide
ggcuauuggugcuuguaau

SEQ ID NO: 121602 - RNA, 19 nt, Artificial Sequence
  Description of Artificial Sequence: Synthetic oligonucleotide
gcuagcaaucccauucgaa

SEQ ID NO: 121603 - RNA, 19 nt, Artificial Sequence
  Description of Artificial Sequence: Synthetic oligonucleotide
gcauggaaugcugagcgcu

SEQ ID NO: 121604 - RNA, 19 nt, Artificial Sequence
  Description of Artificial Sequence: Synthetic oligonucleotide
cagucuguacgacaccaau

SEQ ID NO: 121605 - RNA, 19 nt, Artificial Sequence
  Description of Artificial Sequence: Synthetic oligonucleotide
caugacuccaaugguggau

SEQ ID NO: 121606 - RNA, 19 nt, Artificial Sequence
  Description of Artificial Sequence: Synthetic oligonucleotide
gcucauacucuagugggua

SEQ ID NO: 121607 - RNA, 19 nt, Artificial Sequence
  Description of Artificial Sequence: Synthetic oligonucleotide
augauaugaucgagauguu

SEQ ID NO: 121608 - RNA, 19 nt, Artificial Sequence
  Description of Artificial Sequence: Synthetic oligonucleotide
ccuaaaacagucacaccau

SEQ ID NO: 121609 - RNA, 19 nt, Artificial Sequence
  Description of Artificial Sequence: Synthetic oligonucleotide
ccagagggucggacaaaag

SEQ ID NO: 121610 - RNA, 19 nt, Artificial Sequence
  Description of Artificial Sequence: Synthetic oligonucleotide
gcucgggcaagcuuauacu

SEQ ID NO: 121611 - RNA, 19 nt, Artificial Sequence
  Description of Artificial Sequence: Synthetic oligonucleotide
ccauuagagugcauuugua

SEQ ID NO: 121612 - RNA, 19 nt, Artificial Sequence
  Description of Artificial Sequence: Synthetic oligonucleotide
cauggaaugcugagcgcuu

SEQ ID NO: 121613 - RNA, 19 nt, Artificial Sequence
  Description of Artificial Sequence: Synthetic oligonucleotide
ccucccgucagugccauca

SEQ ID NO: 121614 - RNA, 19 nt, Artificial Sequence
  Description of Artificial Sequence: Synthetic oligonucleotide
uccagccgccugguugaac

SEQ ID NO: 121615 - RNA, 19 nt, Artificial Sequence
  Description of Artificial Sequence: Synthetic oligonucleotide
cagccaccgcgcagugcgc

SEQ ID NO: 121616 - RNA, 19 nt, Artificial Sequence
  Description of Artificial Sequence: Synthetic oligonucleotide
cgcgcagugcgcaccaaac

SEQ ID NO: 121617 - RNA, 19 nt, Artificial Sequence
  Description of Artificial Sequence: Synthetic oligonucleotide
acgcgaccuccacauccaa

SEQ ID NO: 121618 - RNA, 19 nt, Artificial Sequence
  Description of Artificial Sequence: Synthetic oligonucleotide
guugggcauuuguccgaaa

SEQ ID NO: 121619 - RNA, 19 nt, Artificial Sequence
  Description of Artificial Sequence: Synthetic oligonucleotide
gccuuuccguaccggcccc

SEQ ID NO: 121620 - RNA, 19 nt, Artificial Sequence
  Description of Artificial Sequence: Synthetic oligonucleotide
ggaacgcgaccuccacauc

SEQ ID NO: 121621 - RNA, 19 nt, Artificial Sequence
  Description of Artificial Sequence: Synthetic oligonucleotide
gaucgagauguugggcauu

SEQ ID NO: 121622 - RNA, 19 nt, Artificial Sequence
  Description of Artificial Sequence: Synthetic oligonucleotide
aagcucgggcaagcuuaua

SEQ ID NO: 121623 - RNA, 19 nt, Artificial Sequence
  Description of Artificial Sequence: Synthetic oligonucleotide
gccauugcaagaaguuagu

SEQ ID NO: 121624 - RNA, 19 nt, Artificial Sequence
  Description of Artificial Sequence: Synthetic oligonucleotide
ccgaaacccagcaguccca

SEQ ID NO: 121625 - RNA, 19 nt, Artificial Sequence
  Description of Artificial Sequence: Synthetic oligonucleotide
ccuuucucgucuucuaguu

SEQ ID NO: 121626 - RNA, 19 nt, Artificial Sequence
  Description of Artificial Sequence: Synthetic oligonucleotide
ccgacagucccugggagaa

SEQ ID NO: 121627 - RNA, 19 nt, Artificial Sequence
  Description of Artificial Sequence: Synthetic oligonucleotide
gcccaaugcugcaaaacau

SEQ ID NO: 121628 - RNA, 19 nt, Artificial Sequence
  Description of Artificial Sequence: Synthetic oligonucleotide
gacuccaaugguggaucuu

SEQ ID NO: 121629 - RNA, 19 nt, Artificial Sequence
  Description of Artificial Sequence: Synthetic oligonucleotide
cggggcuacuuuguuacuc

SEQ ID NO: 121630 - RNA, 19 nt, Artificial Sequence
  Description of Artificial Sequence: Synthetic oligonucleotide
cgggcaagcuuauacuucu

SEQ ID NO: 121631 - RNA, 19 nt, Artificial Sequence
  Description of Artificial Sequence: Synthetic oligonucleotide
ccauugcaagaaguuagua

SEQ ID NO: 121632 - RNA, 19 nt, Artificial Sequence
  Description of Artificial Sequence: Synthetic oligonucleotide
cugcauauacucggacaau

SEQ ID NO: 121633 - RNA, 19 nt, Artificial Sequence
  Description of Artificial Sequence: Synthetic oligonucleotide
gggcuuggcauggaaugcu

SEQ ID NO: 121634 - RNA, 19 nt, Artificial Sequence
  Description of Artificial Sequence: Synthetic oligonucleotide
aucuuucgucagacuucau

SEQ ID NO: 121635 - RNA, 19 nt, Artificial Sequence
  Description of Artificial Sequence: Synthetic oligonucleotide
ccccagaauuccgacaaua

SEQ ID NO: 121636 - RNA, 19 nt, Artificial Sequence
  Description of Artificial Sequence: Synthetic oligonucleotide
gguggcuauuggugcuugu

SEQ ID NO: 121637 - RNA, 19 nt, Artificial Sequence
  Description of Artificial Sequence: Synthetic oligonucleotide
ggagccggggcuacuuugu

SEQ ID NO: 121638 - RNA, 19 nt, Artificial Sequence
  Description of Artificial Sequence: Synthetic oligonucleotide
gcgcaccaaaccagcucgc

SEQ ID NO: 121639 - RNA, 19 nt, Artificial Sequence
  Description of Artificial Sequence: Synthetic oligonucleotide
gagccggggcuacuuuguu

SEQ ID NO: 121640 - RNA, 19 nt, Artificial Sequence
  Description of Artificial Sequence: Synthetic oligonucleotide
cugaaucagguagcccaau

SEQ ID NO: 121641 - RNA, 19 nt, Artificial Sequence
  Description of Artificial Sequence: Synthetic oligonucleotide
ggacagcuagcaaucccau

SEQ ID NO: 121642 - RNA, 19 nt, Artificial Sequence
  Description of Artificial Sequence: Synthetic oligonucleotide
gccggugcggaggccacuc

SEQ ID NO: 121643 - RNA, 19 nt, Artificial Sequence
  Description of Artificial Sequence: Synthetic oligonucleotide
gcuagacagguggcgugcu

SEQ ID NO: 121644 - RNA, 19 nt, Artificial Sequence
  Description of Artificial Sequence: Synthetic oligonucleotide
cucccgucagugccaucau

SEQ ID NO: 121645 - RNA, 19 nt, Artificial Sequence
  Description of Artificial Sequence: Synthetic oligonucleotide
gccuugugaugcaaauguu

SEQ ID NO: 121646 - RNA, 19 nt, Artificial Sequence
  Description of Artificial Sequence: Synthetic oligonucleotide
ccgcgcagugcgcaccaaa

SEQ ID NO: 121647 - RNA, 19 nt, Artificial Sequence
  Description of Artificial Sequence: Synthetic oligonucleotide
ccugguggagugagugcuu

SEQ ID NO: 121648 - RNA, 19 nt, Artificial Sequence
  Description of Artificial Sequence: Synthetic oligonucleotide
cagcaccgcacaggugauu

SEQ ID NO: 121649 - RNA, 19 nt, Artificial Sequence
  Description of Artificial Sequence: Synthetic oligonucleotide
ggauggcggggaggacacu

SEQ ID NO: 121650 - RNA, 19 nt, Artificial Sequence
  Description of Artificial Sequence: Synthetic oligonucleotide
aaauaacacaggucgagac

SEQ ID NO: 121651 - RNA, 19 nt, Artificial Sequence
  Description of Artificial Sequence: Synthetic oligonucleotide
cuauauguugaaaugaaag

SEQ ID NO: 121652 - RNA, 19 nt, Artificial Sequence
  Description of Artificial Sequence: Synthetic oligonucleotide
agagcaaacgcucugcagc

SEQ ID NO: 121653 - RNA, 19 nt, Artificial Sequence
  Description of Artificial Sequence: Synthetic oligonucleotide
uguugaaaugaaaggacgg

SEQ ID NO: 121654 - RNA, 19 nt, Artificial Sequence
  Description of Artificial Sequence: Synthetic oligonucleotide
aucucuaaaagugauggcc

SEQ ID NO: 121655 - RNA, 19 nt, Artificial Sequence
  Description of Artificial Sequence: Synthetic oligonucleotide
cacauaaggguucugaacg

SEQ ID NO: 121656 - RNA, 19 nt, Artificial Sequence
  Description of Artificial Sequence: Synthetic oligonucleotide
aacacuaugcagcaggcca

SEQ ID NO: 121657 - RNA, 19 nt, Artificial Sequence
  Description of Artificial Sequence: Synthetic oligonucleotide
aaucucuaaaagugauggc

SEQ ID NO: 121658 - RNA, 19 nt, Artificial Sequence
  Description of Artificial Sequence: Synthetic oligonucleotide
aaaacccucgacgauaagg

SEQ ID NO: 121659 - RNA, 19 nt, Artificial Sequence
  Description of Artificial Sequence: Synthetic oligonucleotide
aauugugcuauuugugaag

SEQ ID NO: 121660 - RNA, 19 nt, Artificial Sequence
  Description of Artificial Sequence: Synthetic oligonucleotide
uagugcuuaauacagcaag

SEQ ID NO: 121661 - RNA, 19 nt, Artificial Sequence
  Description of Artificial Sequence: Synthetic oligonucleotide
guggauauagcuaaaauug

SEQ ID NO: 121662 - RNA, 19 nt, Artificial Sequence
  Description of Artificial Sequence: Synthetic oligonucleotide
gaagagaucggacacgaag

SEQ ID NO: 121663 - RNA, 19 nt, Artificial Sequence
  Description of Artificial Sequence: Synthetic oligonucleotide
aaacccucgacgauaaggc

SEQ ID NO: 121664 - RNA, 19 nt, Artificial Sequence
  Description of Artificial Sequence: Synthetic oligonucleotide
uucacucuuccacaaaggg

SEQ ID NO: 121665 - RNA, 19 nt, Artificial Sequence
  Description of Artificial Sequence: Synthetic oligonucleotide
aguaaccgaagucuaacac

SEQ ID NO: 121666 - RNA, 19 nt, Artificial Sequence
  Description of Artificial Sequence: Synthetic oligonucleotide
aaugaauggagccgcgcgg

SEQ ID NO: 121667 - RNA, 19 nt, Artificial Sequence
  Description of Artificial Sequence: Synthetic oligonucleotide
ucgacgauaaggcuuaaug

SEQ ID NO: 121668 - RNA, 19 nt, Artificial Sequence
  Description of Artificial Sequence: Synthetic oligonucleotide
ugcucaauuauucuagugu

SEQ ID NO: 121669 - RNA, 19 nt, Artificial Sequence
  Description of Artificial Sequence: Synthetic oligonucleotide
agauacacgugacaauccc

SEQ ID NO: 121670 - RNA, 19 nt, Artificial Sequence
  Description of Artificial Sequence: Synthetic oligonucleotide
cauaugguuacauguagcc

SEQ ID NO: 121671 - RNA, 19 nt, Artificial Sequence
  Description of Artificial Sequence: Synthetic oligonucleotide
uagguuuccccucugggcg

SEQ ID NO: 121672 - RNA, 19 nt, Artificial Sequence
  Description of Artificial Sequence: Synthetic oligonucleotide
ucgucauugcaauaaaacc

SEQ ID NO: 121673 - RNA, 19 nt, Artificial Sequence
  Description of Artificial Sequence: Synthetic oligonucleotide
auagagagcagccacauaa

SEQ ID NO: 121674 - RNA, 19 nt, Artificial Sequence
  Description of Artificial Sequence: Synthetic oligonucleotide
auagguuuccccucugggc

SEQ ID NO: 121675 - RNA, 19 nt, Artificial Sequence
  Description of Artificial Sequence: Synthetic oligonucleotide
cuacuuaaugaauggagcc

SEQ ID NO: 121676 - RNA, 19 nt, Artificial Sequence
  Description of Artificial Sequence: Synthetic oligonucleotide
gaucugaucgguucaagcc

SEQ ID NO: 121677 - RNA, 19 nt, Artificial Sequence
  Description of Artificial Sequence: Synthetic oligonucleotide
ugaacacuuagccagccgc

SEQ ID NO: 121678 - RNA, 19 nt, Artificial Sequence
  Description of Artificial Sequence: Synthetic oligonucleotide
auaucuuacauaguuaacu

SEQ ID NO: 121679 - RNA, 19 nt, Artificial Sequence
  Description of Artificial Sequence: Synthetic oligonucleotide
uuacucuccgggacgaucg

SEQ ID NO: 121680 - RNA, 19 nt, Artificial Sequence
  Description of Artificial Sequence: Synthetic oligonucleotide
uaauagauccgguagaauu

SEQ ID NO: 121681 - RNA, 19 nt, Artificial Sequence
  Description of Artificial Sequence: Synthetic oligonucleotide
uaaaaucauagcuugcuau

SEQ ID NO: 121682 - RNA, 19 nt, Artificial Sequence
  Description of Artificial Sequence: Synthetic oligonucleotide
aacucaacgcuccuuuaag

SEQ ID NO: 121683 - RNA, 19 nt, Artificial Sequence
  Description of Artificial Sequence: Synthetic oligonucleotide
uacacguuuaguuucgaga

SEQ ID NO: 121684 - RNA, 19 nt, Artificial Sequence
  Description of Artificial Sequence: Synthetic oligonucleotide
uucgagauacacauuuuca

SEQ ID NO: 121685 - RNA, 19 nt, Artificial Sequence
  Description of Artificial Sequence: Synthetic oligonucleotide
gaaaggacggagucugugg

SEQ ID NO: 121686 - RNA, 19 nt, Artificial Sequence
  Description of Artificial Sequence: Synthetic oligonucleotide
aguggauauagcuaaaauu

SEQ ID NO: 121687 - RNA, 19 nt, Artificial Sequence
  Description of Artificial Sequence: Synthetic oligonucleotide
ucguuuauagucucgcuga

SEQ ID NO: 121688 - RNA, 19 nt, Artificial Sequence
  Description of Artificial Sequence: Synthetic oligonucleotide
ucaggagcgggucugcggg

SEQ ID NO: 121689 - RNA, 19 nt, Artificial Sequence
  Description of Artificial Sequence: Synthetic oligonucleotide
aaguuugcgagugggcagc

SEQ ID NO: 121690 - RNA, 19 nt, Artificial Sequence
  Description of Artificial Sequence: Synthetic oligonucleotide
aauggugcuugucucgaug

SEQ ID NO: 121691 - RNA, 19 nt, Artificial Sequence
  Description of Artificial Sequence: Synthetic oligonucleotide
aauaaaacccucgacgaua

SEQ ID NO: 121692 - RNA, 19 nt, Artificial Sequence
  Description of Artificial Sequence: Synthetic oligonucleotide
cacggcaucguuuauaguc

SEQ ID NO: 121693 - RNA, 19 nt, Artificial Sequence
  Description of Artificial Sequence: Synthetic oligonucleotide
ucgauaauguccacaggug

SEQ ID NO: 121694 - RNA, 19 nt, Artificial Sequence
  Description of Artificial Sequence: Synthetic oligonucleotide
aucguuuauagucucgcug

SEQ ID NO: 121695 - RNA, 19 nt, Artificial Sequence
  Description of Artificial Sequence: Synthetic oligonucleotide
uccgcaacuacuuaaugaa

SEQ ID NO: 121696 - RNA, 19 nt, Artificial Sequence
  Description of Artificial Sequence: Synthetic oligonucleotide
uggauauagcuaaaauugu

SEQ ID NO: 121697 - RNA, 19 nt, Artificial Sequence
  Description of Artificial Sequence: Synthetic oligonucleotide
cucggguuguuguugagcg

SEQ ID NO: 121698 - RNA, 19 nt, Artificial Sequence
  Description of Artificial Sequence: Synthetic oligonucleotide
cuugucucgaugaugagga

SEQ ID NO: 121699 - RNA, 19 nt, Artificial Sequence
  Description of Artificial Sequence: Synthetic oligonucleotide
cugucgauaauguccacag

SEQ ID NO: 121700 - RNA, 19 nt, Artificial Sequence
  Description of Artificial Sequence: Synthetic oligonucleotide
ucagauacacgugacaauc

SEQ ID NO: 121701 - RNA, 19 nt, Artificial Sequence
  Description of Artificial Sequence: Synthetic oligonucleotide
aaaggacggagucugugga

SEQ ID NO: 121702 - RNA, 19 nt, Artificial Sequence
  Description of Artificial Sequence: Synthetic oligonucleotide
uccuaaucucuaaaaguga

SEQ ID NO: 121703 - RNA, 19 nt, Artificial Sequence
  Description of Artificial Sequence: Synthetic oligonucleotide
uaaggcuuaauggugcuug

SEQ ID NO: 121704 - RNA, 19 nt, Artificial Sequence
  Description of Artificial Sequence: Synthetic oligonucleotide
ucggacacgaagaacacua

SEQ ID NO: 121705 - RNA, 19 nt, Artificial Sequence
  Description of Artificial Sequence: Synthetic oligonucleotide
acacguuuaguuucgagau

SEQ ID NO: 121706 - RNA, 19 nt, Artificial Sequence
  Description of Artificial Sequence: Synthetic oligonucleotide
cuuuaagcagcuaaaguaa

SEQ ID NO: 121707 - RNA, 19 nt, Artificial Sequence
  Description of Artificial Sequence: Synthetic oligonucleotide
ugugcuauuugugaaguuc

SEQ ID NO: 121708 - RNA, 19 nt, Artificial Sequence
  Description of Artificial Sequence: Synthetic oligonucleotide
caccauguuaugaugguug

SEQ ID NO: 121709 - RNA, 19 nt, Artificial Sequence
  Description of Artificial Sequence: Synthetic oligonucleotide
agaucggacacgaagaaca

SEQ ID NO: 121710 - RNA, 19 nt, Artificial Sequence
  Description of Artificial Sequence: Synthetic oligonucleotide
aagagaucggacacgaaga

SEQ ID NO: 121711 - RNA, 19 nt, Artificial Sequence
  Description of Artificial Sequence: Synthetic oligonucleotide
ugcuuaauacagcaagauc

SEQ ID NO: 121712 - RNA, 19 nt, Artificial Sequence
  Description of Artificial Sequence: Synthetic oligonucleotide
accgaagucuaacacacgu

SEQ ID NO: 121713 - RNA, 19 nt, Artificial Sequence
  Description of Artificial Sequence: Synthetic oligonucleotide
agcccacuugcuuauagag

SEQ ID NO: 121714 - RNA, 19 nt, Artificial Sequence
  Description of Artificial Sequence: Synthetic oligonucleotide
gacgauaaggcuuaauggu

SEQ ID NO: 121715 - RNA, 19 nt, Artificial Sequence
  Description of Artificial Sequence: Synthetic oligonucleotide
ugaacgguggaucgggacu

SEQ ID NO: 121716 - RNA, 19 nt, Artificial Sequence
  Description of Artificial Sequence: Synthetic oligonucleotide
gauaauguccacaggugac

SEQ ID NO: 121717 - RNA, 19 nt, Artificial Sequence
  Description of Artificial Sequence: Synthetic oligonucleotide
aacacuuagccagccgcac

SEQ ID NO: 121718 - RNA, 19 nt, Artificial Sequence
  Description of Artificial Sequence: Synthetic oligonucleotide
uaaauaacacaggucgaga

SEQ ID NO: 121719 - RNA, 19 nt, Artificial Sequence
  Description of Artificial Sequence: Synthetic oligonucleotide
cuuaaugaauggagccgcg

SEQ ID NO: 121720 - RNA, 19 nt, Artificial Sequence
  Description of Artificial Sequence: Synthetic oligonucleotide
cgucauugcaauaaaaccc

SEQ ID NO: 121721 - RNA, 19 nt, Artificial Sequence
  Description of Artificial Sequence: Synthetic oligonucleotide
agagagggucgucuuaguc

SEQ ID NO: 121722 - RNA, 19 nt, Artificial Sequence
  Description of Artificial Sequence: Synthetic oligonucleotide
aucugaucgguucaagccu

SEQ ID NO: 121723 - RNA, 19 nt, Artificial Sequence
  Description of Artificial Sequence: Synthetic oligonucleotide
guaaccgaagucuaacaca

SEQ ID NO: 121724 - RNA, 19 nt, Artificial Sequence
  Description of Artificial Sequence: Synthetic oligonucleotide
ugugcucacuacaccauga

SEQ ID NO: 121725 - RNA, 19 nt, Artificial Sequence
  Description of Artificial Sequence: Synthetic oligonucleotide
uauagucucgcugacuuuc

SEQ ID NO: 121726 - RNA, 19 nt, Artificial Sequence
  Description of Artificial Sequence: Synthetic oligonucleotide
ugucgauaauguccacagg

SEQ ID NO: 121727 - RNA, 19 nt, Artificial Sequence
  Description of Artificial Sequence: Synthetic oligonucleotide
uaguggauauagcuaaaau

SEQ ID NO: 121728 - RNA, 19 nt, Artificial Sequence
  Description of Artificial Sequence: Synthetic oligonucleotide
ugucucgaugaugaggaag

SEQ ID NO: 121729 - RNA, 19 nt, Artificial Sequence
  Description of Artificial Sequence: Synthetic oligonucleotide
agucucgcugacuuucagg

SEQ ID NO: 121730 - RNA, 19 nt, Artificial Sequence
  Description of Artificial Sequence: Synthetic oligonucleotide
ugguaaaacaauggcuacc

SEQ ID NO: 121731 - RNA, 19 nt, Artificial Sequence
  Description of Artificial Sequence: Synthetic oligonucleotide
agaacacuaugcagcaggc

SEQ ID NO: 121732 - RNA, 19 nt, Artificial Sequence
  Description of Artificial Sequence: Synthetic oligonucleotide
gguucugaacgguggaucg

SEQ ID NO: 121733 - RNA, 19 nt, Artificial Sequence
  Description of Artificial Sequence: Synthetic oligonucleotide
aauggcaguuccgcgucac

SEQ ID NO: 121734 - RNA, 19 nt, Artificial Sequence
  Description of Artificial Sequence: Synthetic oligonucleotide
ucauguuaugagcuuuuau

SEQ ID NO: 121735 - RNA, 19 nt, Artificial Sequence
  Description of Artificial Sequence: Synthetic oligonucleotide
uccgguagaauuccccugu

SEQ ID NO: 121736 - RNA, 19 nt, Artificial Sequence
  Description of Artificial Sequence: Synthetic oligonucleotide
uuugcgagugggcagcguc

SEQ ID NO: 121737 - RNA, 19 nt, Artificial Sequence
  Description of Artificial Sequence: Synthetic oligonucleotide
agguaauagauccgguaga

SEQ ID NO: 121738 - RNA, 19 nt, Artificial Sequence
  Description of Artificial Sequence: Synthetic oligonucleotide
acaauggcuaccacagaac

SEQ ID NO: 121739 - RNA, 19 nt, Artificial Sequence
  Description of Artificial Sequence: Synthetic oligonucleotide
aaauaauaucuuacauagu

SEQ ID NO: 121740 - RNA, 19 nt, Artificial Sequence
  Description of Artificial Sequence: Synthetic oligonucleotide
uuaaugaauggagccgcgc

SEQ ID NO: 121741 - RNA, 19 nt, Artificial Sequence
  Description of Artificial Sequence: Synthetic oligonucleotide
uuguuguugagcgcggggc

SEQ ID NO: 121742 - RNA, 19 nt, Artificial Sequence
  Description of Artificial Sequence: Synthetic oligonucleotide
ucagagcaaacgcucugca

SEQ ID NO: 121743 - RNA, 19 nt, Artificial Sequence
  Description of Artificial Sequence: Synthetic oligonucleotide
gucgauaauguccacaggu

SEQ ID NO: 121744 - RNA, 19 nt, Artificial Sequence
  Description of Artificial Sequence: Synthetic oligonucleotide
auacacguuuaguuucgag

SEQ ID NO: 121745 - RNA, 19 nt, Artificial Sequence
  Description of Artificial Sequence: Synthetic oligonucleotide
guuguuguugagcgcgggg

SEQ ID NO: 121746 - RNA, 19 nt, Artificial Sequence
  Description of Artificial Sequence: Synthetic oligonucleotide
uugcaguuauuucucuccu

SEQ ID NO: 121747 - RNA, 19 nt, Artificial Sequence
  Description of Artificial Sequence: Synthetic oligonucleotide
uaacacacgugcagugccc

SEQ ID NO: 121748 - RNA, 19 nt, Artificial Sequence
  Description of Artificial Sequence: Synthetic oligonucleotide
caaacugcucgcuagucca

SEQ ID NO: 121749 - RNA, 19 nt, Artificial Sequence
  Description of Artificial Sequence: Synthetic oligonucleotide
ugaaaggacggagucugug

SEQ ID NO: 121750 - RNA, 19 nt, Artificial Sequence
  Description of Artificial Sequence: Synthetic oligonucleotide
caaacgaccuauuuuggaa

SEQ ID NO: 121751 - RNA, 19 nt, Artificial Sequence
  Description of Artificial Sequence: Synthetic oligonucleotide
ucucgucauugcaauaaaa

SEQ ID NO: 121752 - RNA, 19 nt, Artificial Sequence
  Description of Artificial Sequence: Synthetic oligonucleotide
ugcucacuacaccaugaac

SEQ ID NO: 121753 - RNA, 19 nt, Artificial Sequence
  Description of Artificial Sequence: Synthetic oligonucleotide
cucuaaaagugauggccug

SEQ ID NO: 121754 - RNA, 19 nt, Artificial Sequence
  Description of Artificial Sequence: Synthetic oligonucleotide
cgagacacaguuuauauuc

SEQ ID NO: 121755 - RNA, 19 nt, Artificial Sequence
  Description of Artificial Sequence: Synthetic oligonucleotide
acgauaaggcuuaauggug

SEQ ID NO: 121756 - RNA, 19 nt, Artificial Sequence
  Description of Artificial Sequence: Synthetic oligonucleotide
cucaacgcuccuuuaagca

SEQ ID NO: 121757 - RNA, 19 nt, Artificial Sequence
  Description of Artificial Sequence: Synthetic oligonucleotide
ucucuaguugcaguuauuu

SEQ ID NO: 121758 - RNA, 19 nt, Artificial Sequence
  Description of Artificial Sequence: Synthetic oligonucleotide
gguaugggagagaugacag

SEQ ID NO: 121759 - RNA, 19 nt, Artificial Sequence
  Description of Artificial Sequence: Synthetic oligonucleotide
ugcaguuauuucucuccug

SEQ ID NO: 121760 - RNA, 19 nt, Artificial Sequence
  Description of Artificial Sequence: Synthetic oligonucleotide
agaucagccaaaggcugac

SEQ ID NO: 121761 - RNA, 19 nt, Artificial Sequence
  Description of Artificial Sequence: Synthetic oligonucleotide
uuagucauguuaugagcuu

SEQ ID NO: 121762 - RNA, 19 nt, Artificial Sequence
  Description of Artificial Sequence: Synthetic oligonucleotide
acugcucgcuaguccaagg

SEQ ID NO: 121763 - RNA, 19 nt, Artificial Sequence
  Description of Artificial Sequence: Synthetic oligonucleotide
agaccuacaccauguuaug

SEQ ID NO: 121764 - RNA, 19 nt, Artificial Sequence
  Description of Artificial Sequence: Synthetic oligonucleotide
accuauuuuggaaggccac

SEQ ID NO: 121765 - RNA, 19 nt, Artificial Sequence
  Description of Artificial Sequence: Synthetic oligonucleotide
ugcugaaguuugcgagugg

SEQ ID NO: 121766 - RNA, 19 nt, Artificial Sequence
  Description of Artificial Sequence: Synthetic oligonucleotide
acgaccuauuuuggaaggc

SEQ ID NO: 121767 - RNA, 19 nt, Artificial Sequence
  Description of Artificial Sequence: Synthetic oligonucleotide
ugcaaucccgguaggcaca

SEQ ID NO: 121768 - RNA, 19 nt, Artificial Sequence
  Description of Artificial Sequence: Synthetic oligonucleotide
cagugcccgugauugaucc

SEQ ID NO: 121769 - RNA, 19 nt, Artificial Sequence
  Description of Artificial Sequence: Synthetic oligonucleotide
gaaauccgggucacagacg

SEQ ID NO: 121770 - RNA, 19 nt, Artificial Sequence
  Description of Artificial Sequence: Synthetic oligonucleotide
ucugaucgguucaagccuu

SEQ ID NO: 121771 - RNA, 19 nt, Artificial Sequence
  Description of Artificial Sequence: Synthetic oligonucleotide
acuuguggauagaugagga

SEQ ID NO: 121772 - RNA, 19 nt, Artificial Sequence
  Description of Artificial Sequence: Synthetic oligonucleotide
gagagggucgucuuagucu

SEQ ID NO: 121773 - RNA, 19 nt, Artificial Sequence
  Description of Artificial Sequence: Synthetic oligonucleotide
auacacgugacaaucccgu

SEQ ID NO: 121774 - RNA, 19 nt, Artificial Sequence
  Description of Artificial Sequence: Synthetic oligonucleotide
uugcuuggaaggacacuug

SEQ ID NO: 121775 - RNA, 19 nt, Artificial Sequence
  Description of Artificial Sequence: Synthetic oligonucleotide
cgacgauaaggcuuaaugg

SEQ ID NO: 121776 - RNA, 19 nt, Artificial Sequence
  Description of Artificial Sequence: Synthetic oligonucleotide
ugaauggagccgcgcggag

SEQ ID NO: 121777 - RNA, 19 nt, Artificial Sequence
  Description of Artificial Sequence: Synthetic oligonucleotide
ggaucugaucgguucaagc

SEQ ID NO: 121778 - RNA, 19 nt, Artificial Sequence
  Description of Artificial Sequence: Synthetic oligonucleotide
ccuuuaagcagcuaaagua

SEQ ID NO: 121779 - RNA, 19 nt, Artificial Sequence
  Description of Artificial Sequence: Synthetic oligonucleotide
ugacuuucagggguacuug

SEQ ID NO: 121780 - RNA, 19 nt, Artificial Sequence
  Description of Artificial Sequence: Synthetic oligonucleotide
acaaucccguguagaaggc

SEQ ID NO: 121781 - RNA, 19 nt, Artificial Sequence
  Description of Artificial Sequence: Synthetic oligonucleotide
ugcuuauagagagcagcca

SEQ ID NO: 121782 - RNA, 19 nt, Artificial Sequence
  Description of Artificial Sequence: Synthetic oligonucleotide
agacacaguuuauauucau

SEQ ID NO: 121783 - RNA, 19 nt, Artificial Sequence
  Description of Artificial Sequence: Synthetic oligonucleotide
aguagacgggccucugucu

SEQ ID NO: 121784 - RNA, 19 nt, Artificial Sequence
  Description of Artificial Sequence: Synthetic oligonucleotide
cugcucgcuaguccaaggg

SEQ ID NO: 121785 - RNA, 19 nt, Artificial Sequence
  Description of Artificial Sequence: Synthetic oligonucleotide
aggucuaggcagaugagca

SEQ ID NO: 121786 - RNA, 19 nt, Artificial Sequence
  Description of Artificial Sequence: Synthetic oligonucleotide
cuuggagguucaguagacg

SEQ ID NO: 121787 - RNA, 19 nt, Artificial Sequence
  Description of Artificial Sequence: Synthetic oligonucleotide
agccucugcucaauuauuc

SEQ ID NO: 121788 - RNA, 19 nt, Artificial Sequence
  Description of Artificial Sequence: Synthetic oligonucleotide
cacaaagggucuccuaauc

SEQ ID NO: 121789 - RNA, 19 nt, Artificial Sequence
  Description of Artificial Sequence: Synthetic oligonucleotide
uagauccgguagaauuccc

SEQ ID NO: 121790 - RNA, 19 nt, Artificial Sequence
  Description of Artificial Sequence: Synthetic oligonucleotide
ucgagacacaguuuauauu

SEQ ID NO: 121791 - RNA, 19 nt, Artificial Sequence
  Description of Artificial Sequence: Synthetic oligonucleotide
cugcccaacuccaacucug

SEQ ID NO: 121792 - RNA, 19 nt, Artificial Sequence
  Description of Artificial Sequence: Synthetic oligonucleotide
auaaggguucugaacggug

SEQ ID NO: 121793 - RNA, 19 nt, Artificial Sequence
  Description of Artificial Sequence: Synthetic oligonucleotide
ggucgucuuagucuugaag

SEQ ID NO: 121794 - RNA, 19 nt, Artificial Sequence
  Description of Artificial Sequence: Synthetic oligonucleotide
cucaggagcgggucugcgg

SEQ ID NO: 121795 - RNA, 19 nt, Artificial Sequence
  Description of Artificial Sequence: Synthetic oligonucleotide
auccgguagaauuccccug

SEQ ID NO: 121796 - RNA, 19 nt, Artificial Sequence
  Description of Artificial Sequence: Synthetic oligonucleotide
acuccggcgcuguugucuc

SEQ ID NO: 121797 - RNA, 19 nt, Artificial Sequence
  Description of Artificial Sequence: Synthetic oligonucleotide
uaaaacccucgacgauaag

SEQ ID NO: 121798 - RNA, 19 nt, Artificial Sequence
  Description of Artificial Sequence: Synthetic oligonucleotide
auaguggauauagcuaaaa

SEQ ID NO: 121799 - RNA, 19 nt, Artificial Sequence
  Description of Artificial Sequence: Synthetic oligonucleotide
cuuggcucuuaagaucagc

SEQ ID NO: 121800 - RNA, 19 nt, Artificial Sequence
  Description of Artificial Sequence: Synthetic oligonucleotide
uccuccgcaacuacuuaau

SEQ ID NO: 121801 - RNA, 19 nt, Artificial Sequence
  Description of Artificial Sequence: Synthetic oligonucleotide
ucugaacgguggaucggga

SEQ ID NO: 121802 - RNA, 19 nt, Artificial Sequence
  Description of Artificial Sequence: Synthetic oligonucleotide
uucuuacucuccgggacga

SEQ ID NO: 121803 - RNA, 19 nt, Artificial Sequence
  Description of Artificial Sequence: Synthetic oligonucleotide
acaggcaaacgaccuauuu

SEQ ID NO: 121804 - RNA, 19 nt, Artificial Sequence
  Description of Artificial Sequence: Synthetic oligonucleotide
gaccuauuuuggaaggcca

SEQ ID NO: 121805 - RNA, 19 nt, Artificial Sequence
  Description of Artificial Sequence: Synthetic oligonucleotide
caugugguugacccauaug

SEQ ID NO: 121806 - RNA, 19 nt, Artificial Sequence
  Description of Artificial Sequence: Synthetic oligonucleotide
cugaacgguggaucgggac

SEQ ID NO: 121807 - RNA, 19 nt, Artificial Sequence
  Description of Artificial Sequence: Synthetic oligonucleotide
gccguucuuacucuccggg

SEQ ID NO: 121808 - RNA, 19 nt, Artificial Sequence
  Description of Artificial Sequence: Synthetic oligonucleotide
ggagguucaguagacgggc

SEQ ID NO: 121809 - RNA, 19 nt, Artificial Sequence
  Description of Artificial Sequence: Synthetic oligonucleotide
cagaccuacaccauguuau

SEQ ID NO: 121810 - RNA, 19 nt, Artificial Sequence
  Description of Artificial Sequence: Synthetic oligonucleotide
aauggcuaccacagaacua

SEQ ID NO: 121811 - RNA, 19 nt, Artificial Sequence
  Description of Artificial Sequence: Synthetic oligonucleotide
gcgugcugaaguuugcgag

SEQ ID NO: 121812 - RNA, 19 nt, Artificial Sequence
  Description of Artificial Sequence: Synthetic oligonucleotide
cgauaaggcuuaauggugc

SEQ ID NO: 121813 - RNA, 19 nt, Artificial Sequence
  Description of Artificial Sequence: Synthetic oligonucleotide
ugugcugcccgggacgcgc

SEQ ID NO: 121814 - RNA, 19 nt, Artificial Sequence
  Description of Artificial Sequence: Synthetic oligonucleotide
ggacacgaagaacacuaug

SEQ ID NO: 121815 - RNA, 19 nt, Artificial Sequence
  Description of Artificial Sequence: Synthetic oligonucleotide
caguagacgggccucuguc

SEQ ID NO: 121816 - RNA, 19 nt, Artificial Sequence
  Description of Artificial Sequence: Synthetic oligonucleotide
augcucucgucauugcaau

SEQ ID NO: 121817 - RNA, 19 nt, Artificial Sequence
  Description of Artificial Sequence: Synthetic oligonucleotide
uagucauguuaugagcuuu

SEQ ID NO: 121818 - RNA, 19 nt, Artificial Sequence
  Description of Artificial Sequence: Synthetic oligonucleotide
gagaucggacacgaagaac

SEQ ID NO: 121819 - RNA, 19 nt, Artificial Sequence
  Description of Artificial Sequence: Synthetic oligonucleotide
gcuuaauggugcuugucuc

SEQ ID NO: 121820 - RNA, 19 nt, Artificial Sequence
  Description of Artificial Sequence: Synthetic oligonucleotide
ccugcgauuucucagguca

SEQ ID NO: 121821 - RNA, 19 nt, Artificial Sequence
  Description of Artificial Sequence: Synthetic oligonucleotide
gaauggagccgcgcggagc

SEQ ID NO: 121822 - RNA, 19 nt, Artificial Sequence
  Description of Artificial Sequence: Synthetic oligonucleotide
acucuccgggacgaucgcc

SEQ ID NO: 121823 - RNA, 19 nt, Artificial Sequence
  Description of Artificial Sequence: Synthetic oligonucleotide
acggcaucguuuauagucu

SEQ ID NO: 121824 - RNA, 19 nt, Artificial Sequence
  Description of Artificial Sequence: Synthetic oligonucleotide
uggcaauaacaauccccac

SEQ ID NO: 121825 - RNA, 19 nt, Artificial Sequence
  Description of Artificial Sequence: Synthetic oligonucleotide
caggucgagacacaguuua

SEQ ID NO: 121826 - RNA, 19 nt, Artificial Sequence
  Description of Artificial Sequence: Synthetic oligonucleotide
gaacacuuagccagccgca

SEQ ID NO: 121827 - RNA, 19 nt, Artificial Sequence
  Description of Artificial Sequence: Synthetic oligonucleotide
ugcccgugauugauccugc

SEQ ID NO: 121828 - RNA, 19 nt, Artificial Sequence
  Description of Artificial Sequence: Synthetic oligonucleotide
caguaaccgaagucuaaca

SEQ ID NO: 121829 - RNA, 19 nt, Artificial Sequence
  Description of Artificial Sequence: Synthetic oligonucleotide
uuauagucucgcugacuuu

SEQ ID NO: 121830 - RNA, 19 nt, Artificial Sequence
  Description of Artificial Sequence: Synthetic oligonucleotide
ugcaggcgcggauagguuu

SEQ ID NO: 121831 - RNA, 19 nt, Artificial Sequence
  Description of Artificial Sequence: Synthetic oligonucleotide
augaauggagccgcgcgga

SEQ ID NO: 121832 - RNA, 19 nt, Artificial Sequence
  Description of Artificial Sequence: Synthetic oligonucleotide
ggcaauaacaauccccacu

SEQ ID NO: 121833 - RNA, 19 nt, Artificial Sequence
  Description of Artificial Sequence: Synthetic oligonucleotide
ccaaaucccgagcaggaac

SEQ ID NO: 121834 - RNA, 19 nt, Artificial Sequence
  Description of Artificial Sequence: Synthetic oligonucleotide
uucaagccuugugugcuac

SEQ ID NO: 121835 - RNA, 19 nt, Artificial Sequence
  Description of Artificial Sequence: Synthetic oligonucleotide
ucggguuguuguugagcgc

SEQ ID NO: 121836 - RNA, 19 nt, Artificial Sequence
  Description of Artificial Sequence: Synthetic oligonucleotide
cuuacucuccgggacgauc

SEQ ID NO: 121837 - RNA, 19 nt, Artificial Sequence
  Description of Artificial Sequence: Synthetic oligonucleotide
ccaaacugcucgcuagucc

SEQ ID NO: 121838 - RNA, 19 nt, Artificial Sequence
  Description of Artificial Sequence: Synthetic oligonucleotide
aggcuuaauggugcuuguc

SEQ ID NO: 121839 - RNA, 19 nt, Artificial Sequence
  Description of Artificial Sequence: Synthetic oligonucleotide
gucgagacacaguuuauau

SEQ ID NO: 121840 - RNA, 19 nt, Artificial Sequence
  Description of Artificial Sequence: Synthetic oligonucleotide
uguagcccuuugaaagauu

SEQ ID NO: 121841 - RNA, 19 nt, Artificial Sequence
  Description of Artificial Sequence: Synthetic oligonucleotide
cccgauggacacuuuggcg

SEQ ID NO: 121842 - RNA, 19 nt, Artificial Sequence
  Description of Artificial Sequence: Synthetic oligonucleotide
ggcaaacgaccuauuuugg

SEQ ID NO: 121843 - RNA, 19 nt, Artificial Sequence
  Description of Artificial Sequence: Synthetic oligonucleotide
ggucagauacacgugacaa

SEQ ID NO: 121844 - RNA, 19 nt, Artificial Sequence
  Description of Artificial Sequence: Synthetic oligonucleotide
gcaucguuuauagucucgc

SEQ ID NO: 121845 - RNA, 19 nt, Artificial Sequence
  Description of Artificial Sequence: Synthetic oligonucleotide
uacucuccgggacgaucgc

SEQ ID NO: 121846 - RNA, 19 nt, Artificial Sequence
  Description of Artificial Sequence: Synthetic oligonucleotide
ugaagcgggccugaaggua

SEQ ID NO: 121847 - RNA, 19 nt, Artificial Sequence
  Description of Artificial Sequence: Synthetic oligonucleotide
gguaauagauccgguagaa

SEQ ID NO: 121848 - RNA, 19 nt, Artificial Sequence
  Description of Artificial Sequence: Synthetic oligonucleotide
gcaaacgaccuauuuugga

SEQ ID NO: 121849 - RNA, 19 nt, Artificial Sequence
  Description of Artificial Sequence: Synthetic oligonucleotide
gggacgaucgccuugucgu

SEQ ID NO: 121850 - RNA, 19 nt, Artificial Sequence
  Description of Artificial Sequence: Synthetic oligonucleotide
ggcgacgagagugaagccc

SEQ ID NO: 121851 - RNA, 19 nt, Artificial Sequence
  Description of Artificial Sequence: Synthetic oligonucleotide
uccgcgucacaguguguug

SEQ ID NO: 121852 - RNA, 19 nt, Artificial Sequence
  Description of Artificial Sequence: Synthetic oligonucleotide
ucgcuaguccaaggggaag

SEQ ID NO: 121853 - RNA, 19 nt, Artificial Sequence
  Description of Artificial Sequence: Synthetic oligonucleotide
ccgauggacacuuuggcga

SEQ ID NO: 121854 - RNA, 19 nt, Artificial Sequence
  Description of Artificial Sequence: Synthetic oligonucleotide
acgaucgccuugucguacu

SEQ ID NO: 121855 - RNA, 19 nt, Artificial Sequence
  Description of Artificial Sequence: Synthetic oligonucleotide
uagacgggccucugucuac

SEQ ID NO: 121856 - RNA, 19 nt, Artificial Sequence
  Description of Artificial Sequence: Synthetic oligonucleotide
agcaaacgcucugcagccg

SEQ ID NO: 121857 - RNA, 19 nt, Artificial Sequence
  Description of Artificial Sequence: Synthetic oligonucleotide
cucgccaggugaagcgggc

SEQ ID NO: 121858 - RNA, 19 nt, Artificial Sequence
  Description of Artificial Sequence: Synthetic oligonucleotide
aucaacccugaggccauag

SEQ ID NO: 121859 - RNA, 19 nt, Artificial Sequence
  Description of Artificial Sequence: Synthetic oligonucleotide
gaaacuccgccgcguccug

SEQ ID NO: 121860 - RNA, 19 nt, Artificial Sequence
  Description of Artificial Sequence: Synthetic oligonucleotide
acgugacaaucccguguag

SEQ ID NO: 121861 - RNA, 19 nt, Artificial Sequence
  Description of Artificial Sequence: Synthetic oligonucleotide
gacgaucgccuugucguac

SEQ ID NO: 121862 - RNA, 19 nt, Artificial Sequence
  Description of Artificial Sequence: Synthetic oligonucleotide
auagugcuuaauacagcaa

SEQ ID NO: 121863 - RNA, 19 nt, Artificial Sequence
  Description of Artificial Sequence: Synthetic oligonucleotide
cauaguggauauagcuaaa

SEQ ID NO: 121864 - RNA, 19 nt, Artificial Sequence
  Description of Artificial Sequence: Synthetic oligonucleotide
gacgagagugaagcccagc

SEQ ID NO: 121865 - RNA, 19 nt, Artificial Sequence
  Description of Artificial Sequence: Synthetic oligonucleotide
acuccugcaaagacccucu

SEQ ID NO: 121866 - RNA, 19 nt, Artificial Sequence
  Description of Artificial Sequence: Synthetic oligonucleotide
uaauggugcuugucucgau

SEQ ID NO: 121867 - RNA, 19 nt, Artificial Sequence
  Description of Artificial Sequence: Synthetic oligonucleotide
aacuccgccgcguccugua

SEQ ID NO: 121868 - RNA, 19 nt, Artificial Sequence
  Description of Artificial Sequence: Synthetic oligonucleotide
ggcuuaauggugcuugucu

SEQ ID NO: 121869 - RNA, 19 nt, Artificial Sequence
  Description of Artificial Sequence: Synthetic oligonucleotide
uaguuucgagauacacauu

SEQ ID NO: 121870 - RNA, 19 nt, Artificial Sequence
  Description of Artificial Sequence: Synthetic oligonucleotide
cagagcacggcaucguuua

SEQ ID NO: 121871 - RNA, 19 nt, Artificial Sequence
  Description of Artificial Sequence: Synthetic oligonucleotide
aaucccgagcaggaacuuu

SEQ ID NO: 121872 - RNA, 19 nt, Artificial Sequence
  Description of Artificial Sequence: Synthetic oligonucleotide
agggucuccuaaucucuaa

SEQ ID NO: 121873 - RNA, 19 nt, Artificial Sequence
  Description of Artificial Sequence: Synthetic oligonucleotide
uugugcuauuugugaaguu

SEQ ID NO: 121874 - RNA, 19 nt, Artificial Sequence
  Description of Artificial Sequence: Synthetic oligonucleotide
acgcgcacggcuggcgugc

SEQ ID NO: 121875 - RNA, 19 nt, Artificial Sequence
  Description of Artificial Sequence: Synthetic oligonucleotide
gcaagagacugugugcuac

SEQ ID NO: 121876 - RNA, 19 nt, Artificial Sequence
  Description of Artificial Sequence: Synthetic oligonucleotide
ugaucgguucaagccuugu

SEQ ID NO: 121877 - RNA, 19 nt, Artificial Sequence
  Description of Artificial Sequence: Synthetic oligonucleotide
aucggacacgaagaacacu

SEQ ID NO: 121878 - RNA, 19 nt, Artificial Sequence
  Description of Artificial Sequence: Synthetic oligonucleotide
guagacgggccucugucua

SEQ ID NO: 121879 - RNA, 19 nt, Artificial Sequence
  Description of Artificial Sequence: Synthetic oligonucleotide
cugaucgguucaagccuug

SEQ ID NO: 121880 - RNA, 19 nt, Artificial Sequence
  Description of Artificial Sequence: Synthetic oligonucleotide
cccuacauucuacugucug

SEQ ID NO: 121881 - RNA, 19 nt, Artificial Sequence
  Description of Artificial Sequence: Synthetic oligonucleotide
ggacgcggcgacgagagug

SEQ ID NO: 121882 - RNA, 19 nt, Artificial Sequence
  Description of Artificial Sequence: Synthetic oligonucleotide
ucgcugacuuucaggggua

SEQ ID NO: 121883 - RNA, 19 nt, Artificial Sequence
  Description of Artificial Sequence: Synthetic oligonucleotide
aaaucccgagcaggaacuu

SEQ ID NO: 121884 - RNA, 19 nt, Artificial Sequence
  Description of Artificial Sequence: Synthetic oligonucleotide
cugcccgggacgcgcacgg

SEQ ID NO: 121885 - RNA, 19 nt, Artificial Sequence
  Description of Artificial Sequence: Synthetic oligonucleotide
auagucucgcugacuuuca

SEQ ID NO: 121886 - RNA, 19 nt, Artificial Sequence
  Description of Artificial Sequence: Synthetic oligonucleotide
ggcgcggauagguuucccc

SEQ ID NO: 121887 - RNA, 19 nt, Artificial Sequence
  Description of Artificial Sequence: Synthetic oligonucleotide
guccuccgcaacuacuuaa

SEQ ID NO: 121888 - RNA, 19 nt, Artificial Sequence
  Description of Artificial Sequence: Synthetic oligonucleotide
gcccgauggacacuuuggc

SEQ ID NO: 121889 - RNA, 19 nt, Artificial Sequence
  Description of Artificial Sequence: Synthetic oligonucleotide
cguucuuacucuccgggac

SEQ ID NO: 121890 - RNA, 19 nt, Artificial Sequence
  Description of Artificial Sequence: Synthetic oligonucleotide
aaacugcucgcuaguccaa

SEQ ID NO: 121891 - RNA, 19 nt, Artificial Sequence
  Description of Artificial Sequence: Synthetic oligonucleotide
cucgcuaguccaaggggaa

SEQ ID NO: 121892 - RNA, 19 nt, Artificial Sequence
  Description of Artificial Sequence: Synthetic oligonucleotide
ccgaagucuaacacacgug

SEQ ID NO: 121893 - RNA, 19 nt, Artificial Sequence
  Description of Artificial Sequence: Synthetic oligonucleotide
cggguuguuguugagcgcg

SEQ ID NO: 121894 - RNA, 19 nt, Artificial Sequence
  Description of Artificial Sequence: Synthetic oligonucleotide
agugcccgugauugauccu

SEQ ID NO: 121895 - RNA, 19 nt, Artificial Sequence
  Description of Artificial Sequence: Synthetic oligonucleotide
cagaacccaccaaaggacu

SEQ ID NO: 121896 - RNA, 19 nt, Artificial Sequence
  Description of Artificial Sequence: Synthetic oligonucleotide
gcuauauguugaaaugaaa

SEQ ID NO: 121897 - RNA, 19 nt, Artificial Sequence
  Description of Artificial Sequence: Synthetic oligonucleotide
ugcucucgucauugcaaua

SEQ ID NO: 121898 - RNA, 19 nt, Artificial Sequence
  Description of Artificial Sequence: Synthetic oligonucleotide
auaaggcuuaauggugcuu

SEQ ID NO: 121899 - RNA, 19 nt, Artificial Sequence
  Description of Artificial Sequence: Synthetic oligonucleotide
gucagauacacgugacaau

SEQ ID NO: 121900 - RNA, 19 nt, Artificial Sequence
  Description of Artificial Sequence: Synthetic oligonucleotide
auggcaguuccgcgucaca

SEQ ID NO: 121901 - RNA, 19 nt, Artificial Sequence
  Description of Artificial Sequence: Synthetic oligonucleotide
gugcuuaauacagcaagau

SEQ ID NO: 121902 - RNA, 19 nt, Artificial Sequence
  Description of Artificial Sequence: Synthetic oligonucleotide
aaacuccgccgcguccugu

SEQ ID NO: 121903 - RNA, 19 nt, Artificial Sequence
  Description of Artificial Sequence: Synthetic oligonucleotide
gacgcggcgacgagaguga

SEQ ID NO: 121904 - RNA, 19 nt, Artificial Sequence
  Description of Artificial Sequence: Synthetic oligonucleotide
caauaaaacccucgacgau

SEQ ID NO: 121905 - RNA, 19 nt, Artificial Sequence
  Description of Artificial Sequence: Synthetic oligonucleotide
ccgaguaguuccaacugca

SEQ ID NO: 121906 - RNA, 19 nt, Artificial Sequence
  Description of Artificial Sequence: Synthetic oligonucleotide
gaagcgggccugaagguau

SEQ ID NO: 121907 - RNA, 19 nt, Artificial Sequence
  Description of Artificial Sequence: Synthetic oligonucleotide
gcucucgucauugcaauaa

SEQ ID NO: 121908 - RNA, 19 nt, Artificial Sequence
  Description of Artificial Sequence: Synthetic oligonucleotide
caggcaaacgaccuauuuu

SEQ ID NO: 121909 - RNA, 19 nt, Artificial Sequence
  Description of Artificial Sequence: Synthetic oligonucleotide
cuuguggauagaugaggau

SEQ ID NO: 121910 - RNA, 19 nt, Artificial Sequence
  Description of Artificial Sequence: Synthetic oligonucleotide
ggucugcgggcucgggacg

SEQ ID NO: 121911 - RNA, 19 nt, Artificial Sequence
  Description of Artificial Sequence: Synthetic oligonucleotide
caccugcaaucccgguagg

SEQ ID NO: 121912 - RNA, 19 nt, Artificial Sequence
  Description of Artificial Sequence: Synthetic oligonucleotide
gguucaguagacgggccuc

SEQ ID NO: 121913 - RNA, 19 nt, Artificial Sequence
  Description of Artificial Sequence: Synthetic oligonucleotide
caucguuuauagucucgcu

SEQ ID NO: 121914 - RNA, 19 nt, Artificial Sequence
  Description of Artificial Sequence: Synthetic oligonucleotide
gacuccggcgcuguugucu

SEQ ID NO: 121915 - RNA, 19 nt, Artificial Sequence
  Description of Artificial Sequence: Synthetic oligonucleotide
aggcgcggauagguuuccc

SEQ ID NO: 121916 - RNA, 19 nt, Artificial Sequence
  Description of Artificial Sequence: Synthetic oligonucleotide
uguugagcgcggggcugcc

SEQ ID NO: 121917 - RNA, 19 nt, Artificial Sequence
  Description of Artificial Sequence: Synthetic oligonucleotide
agagcacggcaucguuuau

SEQ ID NO: 121918 - RNA, 19 nt, Artificial Sequence
  Description of Artificial Sequence: Synthetic oligonucleotide
cgaccuauuuuggaaggcc

SEQ ID NO: 121919 - RNA, 19 nt, Artificial Sequence
  Description of Artificial Sequence: Synthetic oligonucleotide
cgaguaguuccaacugcag

SEQ ID NO: 121920 - RNA, 19 nt, Artificial Sequence
  Description of Artificial Sequence: Synthetic oligonucleotide
cacguuuaguuucgagaua

SEQ ID NO: 121921 - RNA, 19 nt, Artificial Sequence
  Description of Artificial Sequence: Synthetic oligonucleotide
ccccucgccaggugaagcg

SEQ ID NO: 121922 - RNA, 19 nt, Artificial Sequence
  Description of Artificial Sequence: Synthetic oligonucleotide
uggcgugcgucugcgugcu

SEQ ID NO: 121923 - RNA, 19 nt, Artificial Sequence
  Description of Artificial Sequence: Synthetic oligonucleotide
cauaaggguucugaacggu

SEQ ID NO: 121924 - RNA, 19 nt, Artificial Sequence
  Description of Artificial Sequence: Synthetic oligonucleotide
gcgacgagagugaagccca

SEQ ID NO: 121925 - RNA, 19 nt, Artificial Sequence
  Description of Artificial Sequence: Synthetic oligonucleotide
guugagcgcggggcugccg

SEQ ID NO: 121926 - RNA, 19 nt, Artificial Sequence
  Description of Artificial Sequence: Synthetic oligonucleotide
cgguucaagccuugugugc

SEQ ID NO: 121927 - RNA, 19 nt, Artificial Sequence
  Description of Artificial Sequence: Synthetic oligonucleotide
agcgggccugaagguauag

SEQ ID NO: 121928 - RNA, 19 nt, Artificial Sequence
  Description of Artificial Sequence: Synthetic oligonucleotide
ugaggccgcaggcgcccga

SEQ ID NO: 121929 - RNA, 19 nt, Artificial Sequence
  Description of Artificial Sequence: Synthetic oligonucleotide
ggguuguuguugagcgcgg

SEQ ID NO: 121930 - RNA, 19 nt, Artificial Sequence
  Description of Artificial Sequence: Synthetic oligonucleotide
gucauguuaugagcuuuua

SEQ ID NO: 121931 - RNA, 19 nt, Artificial Sequence
  Description of Artificial Sequence: Synthetic oligonucleotide
acgugcagugcccgugauu

SEQ ID NO: 121932 - RNA, 19 nt, Artificial Sequence
  Description of Artificial Sequence: Synthetic oligonucleotide
ccagccgaguaguuccaac

SEQ ID NO: 121933 - RNA, 19 nt, Artificial Sequence
  Description of Artificial Sequence: Synthetic oligonucleotide
cguuuauagucucgcugac

SEQ ID NO: 121934 - RNA, 19 nt, Artificial Sequence
  Description of Artificial Sequence: Synthetic oligonucleotide
ucuuacucuccgggacgau

SEQ ID NO: 121935 - RNA, 19 nt, Artificial Sequence
  Description of Artificial Sequence: Synthetic oligonucleotide
gaacgguggaucgggacuu

SEQ ID NO: 121936 - RNA, 19 nt, Artificial Sequence
  Description of Artificial Sequence: Synthetic oligonucleotide
ggucgagacacaguuuaua

SEQ ID NO: 121937 - RNA, 19 nt, Artificial Sequence
  Description of Artificial Sequence: Synthetic oligonucleotide
ccuccgcaacuacuuaaug

SEQ ID NO: 121938 - RNA, 19 nt, Artificial Sequence
  Description of Artificial Sequence: Synthetic oligonucleotide
caggcgcggauagguuucc

SEQ ID NO: 121939 - RNA, 19 nt, Artificial Sequence
  Description of Artificial Sequence: Synthetic oligonucleotide
caauggcaguuccgcguca

SEQ ID NO: 121940 - RNA, 19 nt, Artificial Sequence
  Description of Artificial Sequence: Synthetic oligonucleotide
aggucgagacacaguuuau

SEQ ID NO: 121941 - RNA, 19 nt, Artificial Sequence
  Description of Artificial Sequence: Synthetic oligonucleotide
ccgcgcggagcccugaaac

SEQ ID NO: 121942 - RNA, 19 nt, Artificial Sequence
  Description of Artificial Sequence: Synthetic oligonucleotide
guucaguagacgggccucu

SEQ ID NO: 121943 - RNA, 19 nt, Artificial Sequence
  Description of Artificial Sequence: Synthetic oligonucleotide
cuccggcgcuguugucucc

SEQ ID NO: 121944 - RNA, 19 nt, Artificial Sequence
  Description of Artificial Sequence: Synthetic oligonucleotide
gcccacuugcuuauagaga

SEQ ID NO: 121945 - RNA, 19 nt, Artificial Sequence
  Description of Artificial Sequence: Synthetic oligonucleotide
cgcggagcccugaaacucc

SEQ ID NO: 121946 - RNA, 19 nt, Artificial Sequence
  Description of Artificial Sequence: Synthetic oligonucleotide
agcgggucugcgggcucgg

SEQ ID NO: 121947 - RNA, 19 nt, Artificial Sequence
  Description of Artificial Sequence: Synthetic oligonucleotide
gugcagugcccgugauuga

SEQ ID NO: 121948 - RNA, 19 nt, Artificial Sequence
  Description of Artificial Sequence: Synthetic oligonucleotide
acucgggacuccggcgcug

SEQ ID NO: 121949 - RNA, 19 nt, Artificial Sequence
  Description of Artificial Sequence: Synthetic oligonucleotide
gugcgucugcgugcugaag

SEQ ID NO: 121950 - RNA, 19 nt, Artificial Sequence
  Description of Artificial Sequence: Synthetic oligonucleotide
ccgugauugauccugcaau

SEQ ID NO: 121951 - RNA, 19 nt, Artificial Sequence
  Description of Artificial Sequence: Synthetic oligonucleotide
gcucaggaagugaggccgc

SEQ ID NO: 121952 - RNA, 19 nt, Artificial Sequence
  Description of Artificial Sequence: Synthetic oligonucleotide
gcaggcgcggauagguuuc

SEQ ID NO: 121953 - RNA, 19 nt, Artificial Sequence
  Description of Artificial Sequence: Synthetic oligonucleotide
gcaaucccgguaggcacac

SEQ ID NO: 121954 - RNA, 19 nt, Artificial Sequence
  Description of Artificial Sequence: Synthetic oligonucleotide
aagcgggccugaagguaua

SEQ ID NO: 121955 - RNA, 19 nt, Artificial Sequence
  Description of Artificial Sequence: Synthetic oligonucleotide
cacggcuggcgugcgucug

SEQ ID NO: 121956 - RNA, 19 nt, Artificial Sequence
  Description of Artificial Sequence: Synthetic oligonucleotide
cgcgucacaguguguugag

SEQ ID NO: 121957 - RNA, 19 nt, Artificial Sequence
  Description of Artificial Sequence: Synthetic oligonucleotide
ccguucuuacucuccggga

SEQ ID NO: 121958 - RNA, 19 nt, Artificial Sequence
  Description of Artificial Sequence: Synthetic oligonucleotide
aggcgcccgauggacacuu

SEQ ID NO: 121959 - RNA, 19 nt, Artificial Sequence
  Description of Artificial Sequence: Synthetic oligonucleotide
gcgcggauagguuuccccu

SEQ ID NO: 121960 - RNA, 19 nt, Artificial Sequence
  Description of Artificial Sequence: Synthetic oligonucleotide
aggccgcaggcgcccgaug

SEQ ID NO: 121961 - RNA, 19 nt, Artificial Sequence
  Description of Artificial Sequence: Synthetic oligonucleotide
gguuguuccugucgauaau

SEQ ID NO: 121962 - RNA, 19 nt, Artificial Sequence
  Description of Artificial Sequence: Synthetic oligonucleotide
cccgguaggcacacaacaa

SEQ ID NO: 121963 - RNA, 19 nt, Artificial Sequence
  Description of Artificial Sequence: Synthetic oligonucleotide
gcggauagguuuccccucu

SEQ ID NO: 121964 - RNA, 19 nt, Artificial Sequence
  Description of Artificial Sequence: Synthetic oligonucleotide
gguccuccgcaacuacuua

SEQ ID NO: 121965 - RNA, 19 nt, Artificial Sequence
  Description of Artificial Sequence: Synthetic oligonucleotide
gcgcggagcccugaaacuc

SEQ ID NO: 121966 - RNA, 19 nt, Artificial Sequence
  Description of Artificial Sequence: Synthetic oligonucleotide
ggacgaucgccuugucgua

SEQ ID NO: 121967 - RNA, 19 nt, Artificial Sequence
  Description of Artificial Sequence: Synthetic oligonucleotide
cgccguucuuacucuccgg

SEQ ID NO: 121968 - RNA, 19 nt, Artificial Sequence
  Description of Artificial Sequence: Synthetic oligonucleotide
cccgugauugauccugcaa

SEQ ID NO: 121969 - RNA, 19 nt, Artificial Sequence
  Description of Artificial Sequence: Synthetic oligonucleotide
cgcggauagguuuccccuc

SEQ ID NO: 121970 - RNA, 19 nt, Artificial Sequence
  Description of Artificial Sequence: Synthetic oligonucleotide
gcagugcccgugauugauc

SEQ ID NO: 121971 - RNA, 19 nt, Artificial Sequence
  Description of Artificial Sequence: Synthetic oligonucleotide
gcgugcgucugcgugcuga

SEQ ID NO: 121972 - RNA, 19 nt, Artificial Sequence
  Description of Artificial Sequence: Synthetic oligonucleotide
cagccucugcucaauuauu

SEQ ID NO: 121973 - RNA, 19 nt, Artificial Sequence
  Description of Artificial Sequence: Synthetic oligonucleotide
gccccucgccaggugaagc

SEQ ID NO: 121974 - RNA, 19 nt, Artificial Sequence
  Description of Artificial Sequence: Synthetic oligonucleotide
gaucaacccugaggccaua

SEQ ID NO: 121975 - RNA, 19 nt, Artificial Sequence
  Description of Artificial Sequence: Synthetic oligonucleotide
ccgggacgcgcacggcugg

SEQ ID NO: 121976 - RNA, 19 nt, Artificial Sequence
  Description of Artificial Sequence: Synthetic oligonucleotide
ggccacaagauaaggcuuu

SEQ ID NO: 121977 - RNA, 19 nt, Artificial Sequence
  Description of Artificial Sequence: Synthetic oligonucleotide
cggcaucguuuauagucuc

SEQ ID NO: 121978 - RNA, 19 nt, Artificial Sequence
  Description of Artificial Sequence: Synthetic oligonucleotide
ccaacugcaggcgcggaua

SEQ ID NO: 121979 - RNA, 19 nt, Artificial Sequence
  Description of Artificial Sequence: Synthetic oligonucleotide
ggcucgggacgcggcgacg

SEQ ID NO: 121980 - RNA, 19 nt, Artificial Sequence
  Description of Artificial Sequence: Synthetic oligonucleotide
gcccgugauugauccugca

SEQ ID NO: 121981 - RNA, 19 nt, Artificial Sequence
  Description of Artificial Sequence: Synthetic oligonucleotide
cgcuaguccaaggggaaga

SEQ ID NO: 121982 - RNA, 19 nt, Artificial Sequence
  Description of Artificial Sequence: Synthetic oligonucleotide
ggaucaacccugaggccau

SEQ ID NO: 121983 - RNA, 19 nt, Artificial Sequence
  Description of Artificial Sequence: Synthetic oligonucleotide
cacaggcaaacgaccuauu

SEQ ID NO: 121984 - RNA, 19 nt, Artificial Sequence
  Description of Artificial Sequence: Synthetic oligonucleotide
ccgcgucacaguguguuga

SEQ ID NO: 121985 - RNA, 19 nt, Artificial Sequence
  Description of Artificial Sequence: Synthetic oligonucleotide
guuugcgagugggcagcgu

SEQ ID NO: 121986 - RNA, 19 nt, Artificial Sequence
  Description of Artificial Sequence: Synthetic oligonucleotide
gucggcgucccgccacggu

SEQ ID NO: 121987 - RNA, 19 nt, Artificial Sequence
  Description of Artificial Sequence: Synthetic oligonucleotide
cgcggcgacgagagugaag

SEQ ID NO: 121988 - RNA, 19 nt, Artificial Sequence
  Description of Artificial Sequence: Synthetic oligonucleotide
acgcggcgacgagagugaa

SEQ ID NO: 121989 - RNA, 19 nt, Artificial Sequence
  Description of Artificial Sequence: Synthetic oligonucleotide
ggacgcgcacggcuggcgu

SEQ ID NO: 121990 - RNA, 19 nt, Artificial Sequence
  Description of Artificial Sequence: Synthetic oligonucleotide
ccgcaacuacuuaaugaau

SEQ ID NO: 121991 - RNA, 19 nt, Artificial Sequence
  Description of Artificial Sequence: Synthetic oligonucleotide
caaucccgguaggcacaca

SEQ ID NO: 121992 - RNA, 19 nt, Artificial Sequence
  Description of Artificial Sequence: Synthetic oligonucleotide
cugcaggcgcggauagguu

SEQ ID NO: 121993 - RNA, 19 nt, Artificial Sequence
  Description of Artificial Sequence: Synthetic oligonucleotide
cagcgucggcgucccgcca

SEQ ID NO: 121994 - RNA, 19 nt, Artificial Sequence
  Description of Artificial Sequence: Synthetic oligonucleotide
gaggccgcaggcgcccgau

SEQ ID NO: 121995 - RNA, 19 nt, Artificial Sequence
  Description of Artificial Sequence: Synthetic oligonucleotide
acgcuccuuuaagcagcua

SEQ ID NO: 121996 - RNA, 19 nt, Artificial Sequence
  Description of Artificial Sequence: Synthetic oligonucleotide
cgauggacacuuuggcgau

SEQ ID NO: 121997 - RNA, 19 nt, Artificial Sequence
  Description of Artificial Sequence: Synthetic oligonucleotide
ggcgugcgucugcgugcug

SEQ ID NO: 121998 - RNA, 19 nt, Artificial Sequence
  Description of Artificial Sequence: Synthetic oligonucleotide
gcgucacaguguguugagu

SEQ ID NO: 121999 - RNA, 19 nt, Artificial Sequence
  Description of Artificial Sequence: Synthetic oligonucleotide
gcacggcuggcgugcgucu

SEQ ID NO: 122000 - RNA, 19 nt, Artificial Sequence
  Description of Artificial Sequence: Synthetic oligonucleotide
cgugcgucugcgugcugaa

SEQ ID NO: 122001 - RNA, 19 nt, Artificial Sequence
  Description of Artificial Sequence: Synthetic oligonucleotide
ccauguuaugaugguuguu

SEQ ID NO: 122002 - RNA, 19 nt, Artificial Sequence
  Description of Artificial Sequence: Synthetic oligonucleotide
cgcgcggagcccugaaacu

SEQ ID NO: 122003 - RNA, 19 nt, Artificial Sequence
  Description of Artificial Sequence: Synthetic oligonucleotide
cggacacgaagaacacuau

SEQ ID NO: 122004 - RNA, 19 nt, Artificial Sequence
  Description of Artificial Sequence: Synthetic oligonucleotide
cgggacgcgcacggcuggc

SEQ ID NO: 122005 - RNA, 19 nt, Artificial Sequence
  Description of Artificial Sequence: Synthetic oligonucleotide
gggacgcggcgacgagagu

SEQ ID NO: 122006 - RNA, 19 nt, Artificial Sequence
  Description of Artificial Sequence: Synthetic oligonucleotide
ccgcguccuguagcucuca

SEQ ID NO: 122007 - RNA, 19 nt, Artificial Sequence
  Description of Artificial Sequence: Synthetic oligonucleotide
aaguaauuaacuuuguaga

SEQ ID NO: 122008 - RNA, 19 nt, Artificial Sequence
  Description of Artificial Sequence: Synthetic oligonucleotide
acaagaaugauguggauuc

SEQ ID NO: 122009 - RNA, 19 nt, Artificial Sequence
  Description of Artificial Sequence: Synthetic oligonucleotide
aagacacucaucucggacc

SEQ ID NO: 122010 - RNA, 19 nt, Artificial Sequence
  Description of Artificial Sequence: Synthetic oligonucleotide
aaauauguggcgcuccagg

SEQ ID NO: 122011 - RNA, 19 nt, Artificial Sequence
  Description of Artificial Sequence: Synthetic oligonucleotide
agaugaguuauucugggac

SEQ ID NO: 122012 - RNA, 19 nt, Artificial Sequence
  Description of Artificial Sequence: Synthetic oligonucleotide
uuauucugggacaaguagg

SEQ ID NO: 122013 - RNA, 19 nt, Artificial Sequence
  Description of Artificial Sequence: Synthetic oligonucleotide
aauacuaguccacacccag

SEQ ID NO: 122014 - RNA, 19 nt, Artificial Sequence
  Description of Artificial Sequence: Synthetic oligonucleotide
aagauccgcacugagaggc

SEQ ID NO: 122015 - RNA, 19 nt, Artificial Sequence
  Description of Artificial Sequence: Synthetic oligonucleotide
uuuauuagguuccacugca

SEQ ID NO: 122016 - RNA, 19 nt, Artificial Sequence
  Description of Artificial Sequence: Synthetic oligonucleotide
uuaaucuugcagcugaugu

SEQ ID NO: 122017 - RNA, 19 nt, Artificial Sequence
  Description of Artificial Sequence: Synthetic oligonucleotide
auuagcuugacucucuuug

SEQ ID NO: 122018 - RNA, 19 nt, Artificial Sequence
  Description of Artificial Sequence: Synthetic oligonucleotide
aacuaugaaagucucuaug

SEQ ID NO: 122019 - RNA, 19 nt, Artificial Sequence
  Description of Artificial Sequence: Synthetic oligonucleotide
uuuuguucgcuucaggcgc

SEQ ID NO: 122020 - RNA, 19 nt, Artificial Sequence
  Description of Artificial Sequence: Synthetic oligonucleotide
auauccacgucuuaccugg

SEQ ID NO: 122021 - RNA, 19 nt, Artificial Sequence
  Description of Artificial Sequence: Synthetic oligonucleotide
aaucacaacaauuucuuua

SEQ ID NO: 122022 - RNA, 19 nt, Artificial Sequence
  Description of Artificial Sequence: Synthetic oligonucleotide
aggaauacuaguccacacc

SEQ ID NO: 122023 - RNA, 19 nt, Artificial Sequence
  Description of Artificial Sequence: Synthetic oligonucleotide
uuugcuaaaccacccaggc

SEQ ID NO: 122024 - RNA, 19 nt, Artificial Sequence
  Description of Artificial Sequence: Synthetic oligonucleotide
agucucuaugaucagguac

SEQ ID NO: 122025 - RNA, 19 nt, Artificial Sequence
  Description of Artificial Sequence: Synthetic oligonucleotide
aauauuguccacaugucug

SEQ ID NO: 122026 - RNA, 19 nt, Artificial Sequence
  Description of Artificial Sequence: Synthetic oligonucleotide
gacuguaucggacaguacc

SEQ ID NO: 122027 - RNA, 19 nt, Artificial Sequence
  Description of Artificial Sequence: Synthetic oligonucleotide
uauuagguuccacugcagg

SEQ ID NO: 122028 - RNA, 19 nt, Artificial Sequence
  Description of Artificial Sequence: Synthetic oligonucleotide
aaggaauacuaguccacac

SEQ ID NO: 122029 - RNA, 19 nt, Artificial Sequence
  Description of Artificial Sequence: Synthetic oligonucleotide
auuaagucgcucucacucc

SEQ ID NO: 122030 - RNA, 19 nt, Artificial Sequence
  Description of Artificial Sequence: Synthetic oligonucleotide
agaauuaagucgcucucac

SEQ ID NO: 122031 - RNA, 19 nt, Artificial Sequence
  Description of Artificial Sequence: Synthetic oligonucleotide
aauuacugauaacugcuga

SEQ ID NO: 122032 - RNA, 19 nt, Artificial Sequence
  Description of Artificial Sequence: Synthetic oligonucleotide
auaaccacccugaacaccc

SEQ ID NO: 122033 - RNA, 19 nt, Artificial Sequence
  Description of Artificial Sequence: Synthetic oligonucleotide
aauaaccacccugaacacc

SEQ ID NO: 122034 - RNA, 19 nt, Artificial Sequence
  Description of Artificial Sequence: Synthetic oligonucleotide
auuagguuccacugcaggg

SEQ ID NO: 122035 - RNA, 19 nt, Artificial Sequence
  Description of Artificial Sequence: Synthetic oligonucleotide
augauguggauuccaaaac

SEQ ID NO: 122036 - RNA, 19 nt, Artificial Sequence
  Description of Artificial Sequence: Synthetic oligonucleotide
agguagaagacacucaucu

SEQ ID NO: 122037 - RNA, 19 nt, Artificial Sequence
  Description of Artificial Sequence: Synthetic oligonucleotide
aaagaguaauucaaaacca

SEQ ID NO: 122038 - RNA, 19 nt, Artificial Sequence
  Description of Artificial Sequence: Synthetic oligonucleotide
ugggcuucaggccuuauag

SEQ ID NO: 122039 - RNA, 19 nt, Artificial Sequence
  Description of Artificial Sequence: Synthetic oligonucleotide
ugcuaaaccacccaggcua

SEQ ID NO: 122040 - RNA, 19 nt, Artificial Sequence
  Description of Artificial Sequence: Synthetic oligonucleotide
ugacugccaagcaagagcc

SEQ ID NO: 122041 - RNA, 19 nt, Artificial Sequence
  Description of Artificial Sequence: Synthetic oligonucleotide
gaagcggucagcaacagug

SEQ ID NO: 122042 - RNA, 19 nt, Artificial Sequence
  Description of Artificial Sequence: Synthetic oligonucleotide
ugcaguaacaaacuuggau

SEQ ID NO: 122043 - RNA, 19 nt, Artificial Sequence
  Description of Artificial Sequence: Synthetic oligonucleotide
ugaacacccaagaagggcu

SEQ ID NO: 122044 - RNA, 19 nt, Artificial Sequence
  Description of Artificial Sequence: Synthetic oligonucleotide
acgauauccacgucuuacc

SEQ ID NO: 122045 - RNA, 19 nt, Artificial Sequence
  Description of Artificial Sequence: Synthetic oligonucleotide
uauucugggacaaguaggu

SEQ ID NO: 122046 - RNA, 19 nt, Artificial Sequence
  Description of Artificial Sequence: Synthetic oligonucleotide
uccuuauaaaauacaucag

SEQ ID NO: 122047 - RNA, 19 nt, Artificial Sequence
  Description of Artificial Sequence: Synthetic oligonucleotide
aguacaauugguaucagga

SEQ ID NO: 122048 - RNA, 19 nt, Artificial Sequence
  Description of Artificial Sequence: Synthetic oligonucleotide
ucuuuagcuaaagacaaga

SEQ ID NO: 122049 - RNA, 19 nt, Artificial Sequence
  Description of Artificial Sequence: Synthetic oligonucleotide
aauggugcuaguacaauug

SEQ ID NO: 122050 - RNA, 19 nt, Artificial Sequence
  Description of Artificial Sequence: Synthetic oligonucleotide
uauagugccugauggcagg

SEQ ID NO: 122051 - RNA, 19 nt, Artificial Sequence
  Description of Artificial Sequence: Synthetic oligonucleotide
ucggacaguacccuuucgg

SEQ ID NO: 122052 - RNA, 19 nt, Artificial Sequence
  Description of Artificial Sequence: Synthetic oligonucleotide
ucuuaccuggguaagggcu

SEQ ID NO: 122053 - RNA, 19 nt, Artificial Sequence
  Description of Artificial Sequence: Synthetic oligonucleotide
cuguguaccaaucugagga

SEQ ID NO: 122054 - RNA, 19 nt, Artificial Sequence
  Description of Artificial Sequence: Synthetic oligonucleotide
uguaccaaucugaggaggc

SEQ ID NO: 122055 - RNA, 19 nt, Artificial Sequence
  Description of Artificial Sequence: Synthetic oligonucleotide
aagaggcaucacgauaucc

SEQ ID NO: 122056 - RNA, 19 nt, Artificial Sequence
  Description of Artificial Sequence: Synthetic oligonucleotide
uggauuccaaaacaugaga

SEQ ID NO: 122057 - RNA, 19 nt, Artificial Sequence
  Description of Artificial Sequence: Synthetic oligonucleotide
gaagguuggaggcagaaaa

SEQ ID NO: 122058 - RNA, 19 nt, Artificial Sequence
  Description of Artificial Sequence: Synthetic oligonucleotide
uguagggagaccuugggua

SEQ ID NO: 122059 - RNA, 19 nt, Artificial Sequence
  Description of Artificial Sequence: Synthetic oligonucleotide
uaguacaauugguaucagg

SEQ ID NO: 122060 - RNA, 19 nt, Artificial Sequence
  Description of Artificial Sequence: Synthetic oligonucleotide
gauuagauaccugguaccc

SEQ ID NO: 122061 - RNA, 19 nt, Artificial Sequence
  Description of Artificial Sequence: Synthetic oligonucleotide
uagguauacccacaggcac

SEQ ID NO: 122062 - RNA, 19 nt, Artificial Sequence
  Description of Artificial Sequence: Synthetic oligonucleotide
acuguaucggacaguaccc

SEQ ID NO: 122063 - RNA, 19 nt, Artificial Sequence
  Description of Artificial Sequence: Synthetic oligonucleotide
auccgaaaugcugauuucc

SEQ ID NO: 122064 - RNA, 19 nt, Artificial Sequence
  Description of Artificial Sequence: Synthetic oligonucleotide
ugaccaucgggagagagcc

SEQ ID NO: 122065 - RNA, 19 nt, Artificial Sequence
  Description of Artificial Sequence: Synthetic oligonucleotide
caaaucagagccgaagcgg

SEQ ID NO: 122066 - RNA, 19 nt, Artificial Sequence
  Description of Artificial Sequence: Synthetic oligonucleotide
uuaagucgcucucacuccc

SEQ ID NO: 122067 - RNA, 19 nt, Artificial Sequence
  Description of Artificial Sequence: Synthetic oligonucleotide
accguccauacaaauaucc

SEQ ID NO: 122068 - RNA, 19 nt, Artificial Sequence
  Description of Artificial Sequence: Synthetic oligonucleotide
gaugccaaggggaaugucc

SEQ ID NO: 122069 - RNA, 19 nt, Artificial Sequence
  Description of Artificial Sequence: Synthetic oligonucleotide
agagaaaucacaacaauuu

SEQ ID NO: 122070 - RNA, 19 nt, Artificial Sequence
  Description of Artificial Sequence: Synthetic oligonucleotide
cuuauuccgacuguaucgg

SEQ ID NO: 122071 - RNA, 19 nt, Artificial Sequence
  Description of Artificial Sequence: Synthetic oligonucleotide
ucacauacggccucugaug

SEQ ID NO: 122072 - RNA, 19 nt, Artificial Sequence
  Description of Artificial Sequence: Synthetic oligonucleotide
auagcaaauauguggcgcu

SEQ ID NO: 122073 - RNA, 19 nt, Artificial Sequence
  Description of Artificial Sequence: Synthetic oligonucleotide
uucggguaucuucugagac

SEQ ID NO: 122074 - RNA, 19 nt, Artificial Sequence
  Description of Artificial Sequence: Synthetic oligonucleotide
aaagucucaggcacugagg

SEQ ID NO: 122075 - RNA, 19 nt, Artificial Sequence
  Description of Artificial Sequence: Synthetic oligonucleotide
gauauccacgucuuaccug

SEQ ID NO: 122076 - RNA, 19 nt, Artificial Sequence
  Description of Artificial Sequence: Synthetic oligonucleotide
gauccaaaaugaccaucgg

SEQ ID NO: 122077 - RNA, 19 nt, Artificial Sequence
  Description of Artificial Sequence: Synthetic oligonucleotide
aacucaggaaauagguguc

SEQ ID NO: 122078 - RNA, 19 nt, Artificial Sequence
  Description of Artificial Sequence: Synthetic oligonucleotide
aauaauggugcuaguacaa

SEQ ID NO: 122079 - RNA, 19 nt, Artificial Sequence
  Description of Artificial Sequence: Synthetic oligonucleotide
aaacuaugaaagucucuau

SEQ ID NO: 122080 - RNA, 19 nt, Artificial Sequence
  Description of Artificial Sequence: Synthetic oligonucleotide
ccuuauuccgacuguaucg

SEQ ID NO: 122081 - RNA, 19 nt, Artificial Sequence
  Description of Artificial Sequence: Synthetic oligonucleotide
agcgugauggcacugggcu

SEQ ID NO: 122082 - RNA, 19 nt, Artificial Sequence
  Description of Artificial Sequence: Synthetic oligonucleotide
uauuccgacuguaucggac

SEQ ID NO: 122083 - RNA, 19 nt, Artificial Sequence
  Description of Artificial Sequence: Synthetic oligonucleotide
auauuguccacaugucugu

SEQ ID NO: 122084 - RNA, 19 nt, Artificial Sequence
  Description of Artificial Sequence: Synthetic oligonucleotide
auggugcuaguacaauugg

SEQ ID NO: 122085 - RNA, 19 nt, Artificial Sequence
  Description of Artificial Sequence: Synthetic oligonucleotide
aauauccauccaaccuucc

SEQ ID NO: 122086 - RNA, 19 nt, Artificial Sequence
  Description of Artificial Sequence: Synthetic oligonucleotide
ccaauaaccacccugaaca

SEQ ID NO: 122087 - RNA, 19 nt, Artificial Sequence
  Description of Artificial Sequence: Synthetic oligonucleotide
cuuucggguaucuucugag

SEQ ID NO: 122088 - RNA, 19 nt, Artificial Sequence
  Description of Artificial Sequence: Synthetic oligonucleotide
caggaauuacugauaacug

SEQ ID NO: 122089 - RNA, 19 nt, Artificial Sequence
  Description of Artificial Sequence: Synthetic oligonucleotide
aacaagaaugauguggauu

SEQ ID NO: 122090 - RNA, 19 nt, Artificial Sequence
  Description of Artificial Sequence: Synthetic oligonucleotide
gaagacacucaucucggac

SEQ ID NO: 122091 - RNA, 19 nt, Artificial Sequence
  Description of Artificial Sequence: Synthetic oligonucleotide
uuauuagguuccacugcag

SEQ ID NO: 122092 - RNA, 19 nt, Artificial Sequence
  Description of Artificial Sequence: Synthetic oligonucleotide
ucagugaucugggauacca

SEQ ID NO: 122093 - RNA, 19 nt, Artificial Sequence
  Description of Artificial Sequence: Synthetic oligonucleotide
uccgugaauauccauccaa

SEQ ID NO: 122094 - RNA, 19 nt, Artificial Sequence
  Description of Artificial Sequence: Synthetic oligonucleotide
uguaccguccauacaaaua

SEQ ID NO: 122095 - RNA, 19 nt, Artificial Sequence
  Description of Artificial Sequence: Synthetic oligonucleotide
uucuccagggcaacaaacu

SEQ ID NO: 122096 - RNA, 19 nt, Artificial Sequence
  Description of Artificial Sequence: Synthetic oligonucleotide
ugauaacugcugauuucag

SEQ ID NO: 122097 - RNA, 19 nt, Artificial Sequence
  Description of Artificial Sequence: Synthetic oligonucleotide
uccgaaaugcugauuuccu

SEQ ID NO: 122098 - RNA, 19 nt, Artificial Sequence
  Description of Artificial Sequence: Synthetic oligonucleotide
gguugguucaugaaggugc

SEQ ID NO: 122099 - RNA, 19 nt, Artificial Sequence
  Description of Artificial Sequence: Synthetic oligonucleotide
cacacaugcucccaacagg

SEQ ID NO: 122100 - RNA, 19 nt, Artificial Sequence
  Description of Artificial Sequence: Synthetic oligonucleotide
ucaggcgcuuuuauuaggu

SEQ ID NO: 122101 - RNA, 19 nt, Artificial Sequence
  Description of Artificial Sequence: Synthetic oligonucleotide
ucucacggcuucuagcagc

SEQ ID NO: 122102 - RNA, 19 nt, Artificial Sequence
  Description of Artificial Sequence: Synthetic oligonucleotide
ugguaucaggagcacagcu

SEQ ID NO: 122103 - RNA, 19 nt, Artificial Sequence
  Description of Artificial Sequence: Synthetic oligonucleotide
uucaggcgcuuuuauuagg

SEQ ID NO: 122104 - RNA, 19 nt, Artificial Sequence
  Description of Artificial Sequence: Synthetic oligonucleotide
uccuuauuccgacuguauc

SEQ ID NO: 122105 - RNA, 19 nt, Artificial Sequence
  Description of Artificial Sequence: Synthetic oligonucleotide
cacguggguagguauaccc

SEQ ID NO: 122106 - RNA, 19 nt, Artificial Sequence
  Description of Artificial Sequence: Synthetic oligonucleotide
cauagccgagcucaggagc

SEQ ID NO: 122107 - RNA, 19 nt, Artificial Sequence
  Description of Artificial Sequence: Synthetic oligonucleotide
aagaguaauucaaaaccau

SEQ ID NO: 122108 - RNA, 19 nt, Artificial Sequence
  Description of Artificial Sequence: Synthetic oligonucleotide
gauuagaggugggacuagg

SEQ ID NO: 122109 - RNA, 19 nt, Artificial Sequence
  Description of Artificial Sequence: Synthetic oligonucleotide
ugcuaguacaauugguauc

SEQ ID NO: 122110 - RNA, 19 nt, Artificial Sequence
  Description of Artificial Sequence: Synthetic oligonucleotide
gaauuacugauaacugcug

SEQ ID NO: 122111 - RNA, 19 nt, Artificial Sequence
  Description of Artificial Sequence: Synthetic oligonucleotide
uggcaugacuucauuggug

SEQ ID NO: 122112 - RNA, 19 nt, Artificial Sequence
  Description of Artificial Sequence: Synthetic oligonucleotide
agugaugcauucuucugaa

SEQ ID NO: 122113 - RNA, 19 nt, Artificial Sequence
  Description of Artificial Sequence: Synthetic oligonucleotide
cacagcuaagucacugucc

SEQ ID NO: 122114 - RNA, 19 nt, Artificial Sequence
  Description of Artificial Sequence: Synthetic oligonucleotide
agcuaaagacaagaaaaca

SEQ ID NO: 122115 - RNA, 19 nt, Artificial Sequence
  Description of Artificial Sequence: Synthetic oligonucleotide
ccaaggaccaccuagccac

SEQ ID NO: 122116 - RNA, 19 nt, Artificial Sequence
  Description of Artificial Sequence: Synthetic oligonucleotide
cuuggguaaaggagcagug

SEQ ID NO: 122117 - RNA, 19 nt, Artificial Sequence
  Description of Artificial Sequence: Synthetic oligonucleotide
guuauagugccugauggca

SEQ ID NO: 122118 - RNA, 19 nt, Artificial Sequence
  Description of Artificial Sequence: Synthetic oligonucleotide
agguauacccacaggcacc

SEQ ID NO: 122119 - RNA, 19 nt, Artificial Sequence
  Description of Artificial Sequence: Synthetic oligonucleotide
guucucacggcuucuagca

SEQ ID NO: 122120 - RNA, 19 nt, Artificial Sequence
  Description of Artificial Sequence: Synthetic oligonucleotide
auuccgacuguaucggaca

SEQ ID NO: 122121 - RNA, 19 nt, Artificial Sequence
  Description of Artificial Sequence: Synthetic oligonucleotide
ggucgcacuacacugcagg

SEQ ID NO: 122122 - RNA, 19 nt, Artificial Sequence
  Description of Artificial Sequence: Synthetic oligonucleotide
acggcuucuagcagcaggc

SEQ ID NO: 122123 - RNA, 19 nt, Artificial Sequence
  Description of Artificial Sequence: Synthetic oligonucleotide
aaguagguggccaaacuau

SEQ ID NO: 122124 - RNA, 19 nt, Artificial Sequence
  Description of Artificial Sequence: Synthetic oligonucleotide
cauccuuacaagguagaag

SEQ ID NO: 122125 - RNA, 19 nt, Artificial Sequence
  Description of Artificial Sequence: Synthetic oligonucleotide
uuccuaggcugucucaacu

SEQ ID NO: 122126 - RNA, 19 nt, Artificial Sequence
  Description of Artificial Sequence: Synthetic oligonucleotide
aaacaagaaugauguggau

SEQ ID NO: 122127 - RNA, 19 nt, Artificial Sequence
  Description of Artificial Sequence: Synthetic oligonucleotide
cacaccugagcccaaauca

SEQ ID NO: 122128 - RNA, 19 nt, Artificial Sequence
  Description of Artificial Sequence: Synthetic oligonucleotide
cuuaccuggguaagggcug

SEQ ID NO: 122129 - RNA, 19 nt, Artificial Sequence
  Description of Artificial Sequence: Synthetic oligonucleotide
ucggguaucuucugagaca

SEQ ID NO: 122130 - RNA, 19 nt, Artificial Sequence
  Description of Artificial Sequence: Synthetic oligonucleotide
caggcuaccagcugccacc

SEQ ID NO: 122131 - RNA, 19 nt, Artificial Sequence
  Description of Artificial Sequence: Synthetic oligonucleotide
guuuugaaagucuccugca

SEQ ID NO: 122132 - RNA, 19 nt, Artificial Sequence
  Description of Artificial Sequence: Synthetic oligonucleotide
acaauguagggagaccuug

SEQ ID NO: 122133 - RNA, 19 nt, Artificial Sequence
  Description of Artificial Sequence: Synthetic oligonucleotide
uguguaagaaggccacaau

SEQ ID NO: 122134 - RNA, 19 nt, Artificial Sequence
  Description of Artificial Sequence: Synthetic oligonucleotide
agacacucaucucggacca

SEQ ID NO: 122135 - RNA, 19 nt, Artificial Sequence
  Description of Artificial Sequence: Synthetic oligonucleotide
cuaggcugucucaacugcc

SEQ ID NO: 122136 - RNA, 19 nt, Artificial Sequence
  Description of Artificial Sequence: Synthetic oligonucleotide
cuaugaucagguacuccac

SEQ ID NO: 122137 - RNA, 19 nt, Artificial Sequence
  Description of Artificial Sequence: Synthetic oligonucleotide
cuguguaccguccauacaa

SEQ ID NO: 122138 - RNA, 19 nt, Artificial Sequence
  Description of Artificial Sequence: Synthetic oligonucleotide
ugagacaagguccgugaau

SEQ ID NO: 122139 - RNA, 19 nt, Artificial Sequence
  Description of Artificial Sequence: Synthetic oligonucleotide
gugaauauccauccaaccu

SEQ ID NO: 122140 - RNA, 19 nt, Artificial Sequence
  Description of Artificial Sequence: Synthetic oligonucleotide
uuucggguaucuucugaga

SEQ ID NO: 122141 - RNA, 19 nt, Artificial Sequence
  Description of Artificial Sequence: Synthetic oligonucleotide
uuccgacuguaucggacag

SEQ ID NO: 122142 - RNA, 19 nt, Artificial Sequence
  Description of Artificial Sequence: Synthetic oligonucleotide
acauaauauuguccacaug

SEQ ID NO: 122143 - RNA, 19 nt, Artificial Sequence
  Description of Artificial Sequence: Synthetic oligonucleotide
gguccgugaauauccaucc

SEQ ID NO: 122144 - RNA, 19 nt, Artificial Sequence
  Description of Artificial Sequence: Synthetic oligonucleotide
ggaggugccccucacaccc

SEQ ID NO: 122145 - RNA, 19 nt, Artificial Sequence
  Description of Artificial Sequence: Synthetic oligonucleotide
uggugcuaguacaauuggu

SEQ ID NO: 122146 - RNA, 19 nt, Artificial Sequence
  Description of Artificial Sequence: Synthetic oligonucleotide
uccuaggcugucucaacug

SEQ ID NO: 122147 - RNA, 19 nt, Artificial Sequence
  Description of Artificial Sequence: Synthetic oligonucleotide
agaggcaucacgauaucca

SEQ ID NO: 122148 - RNA, 19 nt, Artificial Sequence
  Description of Artificial Sequence: Synthetic oligonucleotide
agguuugcuucagagaacu

SEQ ID NO: 122149 - RNA, 19 nt, Artificial Sequence
  Description of Artificial Sequence: Synthetic oligonucleotide
accaucgggagagagccgg

SEQ ID NO: 122150 - RNA, 19 nt, Artificial Sequence
  Description of Artificial Sequence: Synthetic oligonucleotide
caaacuaugaaagucucua

SEQ ID NO: 122151 - RNA, 19 nt, Artificial Sequence
  Description of Artificial Sequence: Synthetic oligonucleotide
cacgauauccacgucuuac

SEQ ID NO: 122152 - RNA, 19 nt, Artificial Sequence
  Description of Artificial Sequence: Synthetic oligonucleotide
agguccgugaauauccauc

SEQ ID NO: 122153 - RNA, 19 nt, Artificial Sequence
  Description of Artificial Sequence: Synthetic oligonucleotide
agugcugacaggcccacau

SEQ ID NO: 122154 - RNA, 19 nt, Artificial Sequence
  Description of Artificial Sequence: Synthetic oligonucleotide
uaaaccacccaggcuacca

SEQ ID NO: 122155 - RNA, 19 nt, Artificial Sequence
  Description of Artificial Sequence: Synthetic oligonucleotide
uccauacaaauauccgaaa

SEQ ID NO: 122156 - RNA, 19 nt, Artificial Sequence
  Description of Artificial Sequence: Synthetic oligonucleotide
auacuaguccacacccagc

SEQ ID NO: 122157 - RNA, 19 nt, Artificial Sequence
  Description of Artificial Sequence: Synthetic oligonucleotide
uuguguucuguguaccguc

SEQ ID NO: 122158 - RNA, 19 nt, Artificial Sequence
  Description of Artificial Sequence: Synthetic oligonucleotide
cacccugacuuaaucuugc

SEQ ID NO: 122159 - RNA, 19 nt, Artificial Sequence
  Description of Artificial Sequence: Synthetic oligonucleotide
uugcuaaaccacccaggcu

SEQ ID NO: 122160 - RNA, 19 nt, Artificial Sequence
  Description of Artificial Sequence: Synthetic oligonucleotide
auaccugguacccuucaaa

SEQ ID NO: 122161 - RNA, 19 nt, Artificial Sequence
  Description of Artificial Sequence: Synthetic oligonucleotide
ugcagaugccguucggcca

SEQ ID NO: 122162 - RNA, 19 nt, Artificial Sequence
  Description of Artificial Sequence: Synthetic oligonucleotide
uguucaaccccagcauagc

SEQ ID NO: 122163 - RNA, 19 nt, Artificial Sequence
  Description of Artificial Sequence: Synthetic oligonucleotide
uagguguccuuauuccgac

SEQ ID NO: 122164 - RNA, 19 nt, Artificial Sequence
  Description of Artificial Sequence: Synthetic oligonucleotide
ugucacauacggccucuga

SEQ ID NO: 122165 - RNA, 19 nt, Artificial Sequence
  Description of Artificial Sequence: Synthetic oligonucleotide
cauuucugguucucacggc

SEQ ID NO: 122166 - RNA, 19 nt, Artificial Sequence
  Description of Artificial Sequence: Synthetic oligonucleotide
gagacaagguccgugaaua

SEQ ID NO: 122167 - RNA, 19 nt, Artificial Sequence
  Description of Artificial Sequence: Synthetic oligonucleotide
ccaaaucagagccgaagcg

SEQ ID NO: 122168 - RNA, 19 nt, Artificial Sequence
  Description of Artificial Sequence: Synthetic oligonucleotide
uuuguucgcuucaggcgcu

SEQ ID NO: 122169 - RNA, 19 nt, Artificial Sequence
  Description of Artificial Sequence: Synthetic oligonucleotide
guaccguccauacaaauau

SEQ ID NO: 122170 - RNA, 19 nt, Artificial Sequence
  Description of Artificial Sequence: Synthetic oligonucleotide
uguguaccguccauacaaa

SEQ ID NO: 122171 - RNA, 19 nt, Artificial Sequence
  Description of Artificial Sequence: Synthetic oligonucleotide
uucugagacaagguccgug

SEQ ID NO: 122172 - RNA, 19 nt, Artificial Sequence
  Description of Artificial Sequence: Synthetic oligonucleotide
ucugcgguuggcacagccu

SEQ ID NO: 122173 - RNA, 19 nt, Artificial Sequence
  Description of Artificial Sequence: Synthetic oligonucleotide
caagauccgcacugagagg

SEQ ID NO: 122174 - RNA, 19 nt, Artificial Sequence
  Description of Artificial Sequence: Synthetic oligonucleotide
agcuuucggaucuuccaga

SEQ ID NO: 122175 - RNA, 19 nt, Artificial Sequence
  Description of Artificial Sequence: Synthetic oligonucleotide
cagcuuucggaucuuccag

SEQ ID NO: 122176 - RNA, 19 nt, Artificial Sequence
  Description of Artificial Sequence: Synthetic oligonucleotide
ugugcgagcuccucauuuc

SEQ ID NO: 122177 - RNA, 19 nt, Artificial Sequence
  Description of Artificial Sequence: Synthetic oligonucleotide
guguaccaaucugaggagg

SEQ ID NO: 122178 - RNA, 19 nt, Artificial Sequence
  Description of Artificial Sequence: Synthetic oligonucleotide
aggagagcggggugacagc

SEQ ID NO: 122179 - RNA, 19 nt, Artificial Sequence
  Description of Artificial Sequence: Synthetic oligonucleotide
ugaguuauucugggacaag

SEQ ID NO: 122180 - RNA, 19 nt, Artificial Sequence
  Description of Artificial Sequence: Synthetic oligonucleotide
uguucuguguaccguccau

SEQ ID NO: 122181 - RNA, 19 nt, Artificial Sequence
  Description of Artificial Sequence: Synthetic oligonucleotide
cuuaaucuugcagcugaug

SEQ ID NO: 122182 - RNA, 19 nt, Artificial Sequence
  Description of Artificial Sequence: Synthetic oligonucleotide
uuuggugcagaugccguuc

SEQ ID NO: 122183 - RNA, 19 nt, Artificial Sequence
  Description of Artificial Sequence: Synthetic oligonucleotide
ggcgcuuuuauuagguucc

SEQ ID NO: 122184 - RNA, 19 nt, Artificial Sequence
  Description of Artificial Sequence: Synthetic oligonucleotide
gaggguuguuuggaggugc

SEQ ID NO: 122185 - RNA, 19 nt, Artificial Sequence
  Description of Artificial Sequence: Synthetic oligonucleotide
aggccuuauagcaaauaug

SEQ ID NO: 122186 - RNA, 19 nt, Artificial Sequence
  Description of Artificial Sequence: Synthetic oligonucleotide
uuuccuaggcugucucaac

SEQ ID NO: 122187 - RNA, 19 nt, Artificial Sequence
  Description of Artificial Sequence: Synthetic oligonucleotide
augccguucggccacggga

SEQ ID NO: 122188 - RNA, 19 nt, Artificial Sequence
  Description of Artificial Sequence: Synthetic oligonucleotide
uuauuccgacuguaucgga

SEQ ID NO: 122189 - RNA, 19 nt, Artificial Sequence
  Description of Artificial Sequence: Synthetic oligonucleotide
accuagccacacaugcucc

SEQ ID NO: 122190 - RNA, 19 nt, Artificial Sequence
  Description of Artificial Sequence: Synthetic oligonucleotide
accugguacccuucaaagu

SEQ ID NO: 122191 - RNA, 19 nt, Artificial Sequence
  Description of Artificial Sequence: Synthetic oligonucleotide
auuagauaccugguacccu

SEQ ID NO: 122192 - RNA, 19 nt, Artificial Sequence
  Description of Artificial Sequence: Synthetic oligonucleotide
ccaaaaugaccaucgggag

SEQ ID NO: 122193 - RNA, 19 nt, Artificial Sequence
  Description of Artificial Sequence: Synthetic oligonucleotide
agaguaauucaaaaccaua

SEQ ID NO: 122194 - RNA, 19 nt, Artificial Sequence
  Description of Artificial Sequence: Synthetic oligonucleotide
uucacguggguagguauac

SEQ ID NO: 122195 - RNA, 19 nt, Artificial Sequence
  Description of Artificial Sequence: Synthetic oligonucleotide
ugcaguaccugcccagcau

SEQ ID NO: 122196 - RNA, 19 nt, Artificial Sequence
  Description of Artificial Sequence: Synthetic oligonucleotide
ugcgagcuccucauuucug

SEQ ID NO: 122197 - RNA, 19 nt, Artificial Sequence
  Description of Artificial Sequence: Synthetic oligonucleotide
aguagguggccaaacuaug

SEQ ID NO: 122198 - RNA, 19 nt, Artificial Sequence
  Description of Artificial Sequence: Synthetic oligonucleotide
aucagagccgaagcgggag

SEQ ID NO: 122199 - RNA, 19 nt, Artificial Sequence
  Description of Artificial Sequence: Synthetic oligonucleotide
gacaagguccgugaauauc

SEQ ID NO: 122200 - RNA, 19 nt, Artificial Sequence
  Description of Artificial Sequence: Synthetic oligonucleotide
aauauccgaaaugcugauu

SEQ ID NO: 122201 - RNA, 19 nt, Artificial Sequence
  Description of Artificial Sequence: Synthetic oligonucleotide
ccaagugaggcuugugggg

SEQ ID NO: 122202 - RNA, 19 nt, Artificial Sequence
  Description of Artificial Sequence: Synthetic oligonucleotide
agagagccggcaaauguug

SEQ ID NO: 122203 - RNA, 19 nt, Artificial Sequence
  Description of Artificial Sequence: Synthetic oligonucleotide
uaagucgcucucacuccca

SEQ ID NO: 122204 - RNA, 19 nt, Artificial Sequence
  Description of Artificial Sequence: Synthetic oligonucleotide
gagagccggcaaauguugg

SEQ ID NO: 122205 - RNA, 19 nt, Artificial Sequence
  Description of Artificial Sequence: Synthetic oligonucleotide
agauaccugguacccuuca

SEQ ID NO: 122206 - RNA, 19 nt, Artificial Sequence
  Description of Artificial Sequence: Synthetic oligonucleotide
aucggacaguacccuuucg

SEQ ID NO: 122207 - RNA, 19 nt, Artificial Sequence
  Description of Artificial Sequence: Synthetic oligonucleotide
ucucgcaguggccggugcc

SEQ ID NO: 122208 - RNA, 19 nt, Artificial Sequence
  Description of Artificial Sequence: Synthetic oligonucleotide
gguucucacggcuucuagc

SEQ ID NO: 122209 - RNA, 19 nt, Artificial Sequence
  Description of Artificial Sequence: Synthetic oligonucleotide
gaugccguucggccacggg

SEQ ID NO: 122210 - RNA, 19 nt, Artificial Sequence
  Description of Artificial Sequence: Synthetic oligonucleotide
caagaaugauguggauucc

SEQ ID NO: 122211 - RNA, 19 nt, Artificial Sequence
  Description of Artificial Sequence: Synthetic oligonucleotide
uguaucggacaguacccuu

SEQ ID NO: 122212 - RNA, 19 nt, Artificial Sequence
  Description of Artificial Sequence: Synthetic oligonucleotide
aagguccgugaauauccau

SEQ ID NO: 122213 - RNA, 19 nt, Artificial Sequence
  Description of Artificial Sequence: Synthetic oligonucleotide
gucuuaccuggguaagggc

SEQ ID NO: 122214 - RNA, 19 nt, Artificial Sequence
  Description of Artificial Sequence: Synthetic oligonucleotide
aucucgcaguggccggugc

SEQ ID NO: 122215 - RNA, 19 nt, Artificial Sequence
  Description of Artificial Sequence: Synthetic oligonucleotide
cccaaaucagagccgaagc

SEQ ID NO: 122216 - RNA, 19 nt, Artificial Sequence
  Description of Artificial Sequence: Synthetic oligonucleotide
ucaggaaauagguguccuu

SEQ ID NO: 122217 - RNA, 19 nt, Artificial Sequence
  Description of Artificial Sequence: Synthetic oligonucleotide
guaacaaacuuggauccaa

SEQ ID NO: 122218 - RNA, 19 nt, Artificial Sequence
  Description of Artificial Sequence: Synthetic oligonucleotide
ggccuuauagcaaauaugu

SEQ ID NO: 122219 - RNA, 19 nt, Artificial Sequence
  Description of Artificial Sequence: Synthetic oligonucleotide
auaauggugcuaguacaau

SEQ ID NO: 122220 - RNA, 19 nt, Artificial Sequence
  Description of Artificial Sequence: Synthetic oligonucleotide
uaccaaucugaggaggcuc

SEQ ID NO: 122221 - RNA, 19 nt, Artificial Sequence
  Description of Artificial Sequence: Synthetic oligonucleotide
ccguccauacaaauauccg

SEQ ID NO: 122222 - RNA, 19 nt, Artificial Sequence
  Description of Artificial Sequence: Synthetic oligonucleotide
agaaugauguggauuccaa

SEQ ID NO: 122223 - RNA, 19 nt, Artificial Sequence
  Description of Artificial Sequence: Synthetic oligonucleotide
cuguggcaugacaggaaag

SEQ ID NO: 122224 - RNA, 19 nt, Artificial Sequence
  Description of Artificial Sequence: Synthetic oligonucleotide
aagcgggagcacccauguc

SEQ ID NO: 122225 - RNA, 19 nt, Artificial Sequence
  Description of Artificial Sequence: Synthetic oligonucleotide
aagucgcucucacucccau

SEQ ID NO: 122226 - RNA, 19 nt, Artificial Sequence
  Description of Artificial Sequence: Synthetic oligonucleotide
uguccuuauuccgacugua

SEQ ID NO: 122227 - RNA, 19 nt, Artificial Sequence
  Description of Artificial Sequence: Synthetic oligonucleotide
cagacggagcagcucgugc

SEQ ID NO: 122228 - RNA, 19 nt, Artificial Sequence
  Description of Artificial Sequence: Synthetic oligonucleotide
auagccgagcucaggagca

SEQ ID NO: 122229 - RNA, 19 nt, Artificial Sequence
  Description of Artificial Sequence: Synthetic oligonucleotide
acgucuuaccuggguaagg

SEQ ID NO: 122230 - RNA, 19 nt, Artificial Sequence
  Description of Artificial Sequence: Synthetic oligonucleotide
uaccguccauacaaauauc

SEQ ID NO: 122231 - RNA, 19 nt, Artificial Sequence
  Description of Artificial Sequence: Synthetic oligonucleotide
gguauacccacaggcaccc

SEQ ID NO: 122232 - RNA, 19 nt, Artificial Sequence
  Description of Artificial Sequence: Synthetic oligonucleotide
guagggagaccuuggguaa

SEQ ID NO: 122233 - RNA, 19 nt, Artificial Sequence
  Description of Artificial Sequence: Synthetic oligonucleotide
auuuggugcagaugccguu

SEQ ID NO: 122234 - RNA, 19 nt, Artificial Sequence
  Description of Artificial Sequence: Synthetic oligonucleotide
ugggugcacucuguaagug

SEQ ID NO: 122235 - RNA, 19 nt, Artificial Sequence
  Description of Artificial Sequence: Synthetic oligonucleotide
gaguuauucugggacaagu

SEQ ID NO: 122236 - RNA, 19 nt, Artificial Sequence
  Description of Artificial Sequence: Synthetic oligonucleotide
agggucgcacuacacugca

SEQ ID NO: 122237 - RNA, 19 nt, Artificial Sequence
  Description of Artificial Sequence: Synthetic oligonucleotide
gcuagggucaaaggaauac

SEQ ID NO: 122238 - RNA, 19 nt, Artificial Sequence
  Description of Artificial Sequence: Synthetic oligonucleotide
gaauuaagucgcucucacu

SEQ ID NO: 122239 - RNA, 19 nt, Artificial Sequence
  Description of Artificial Sequence: Synthetic oligonucleotide
ccuuguguucuguguaccg

SEQ ID NO: 122240 - RNA, 19 nt, Artificial Sequence
  Description of Artificial Sequence: Synthetic oligonucleotide
gauaccugguacccuucaa

SEQ ID NO: 122241 - RNA, 19 nt, Artificial Sequence
  Description of Artificial Sequence: Synthetic oligonucleotide
aaucagagccgaagcggga

SEQ ID NO: 122242 - RNA, 19 nt, Artificial Sequence
  Description of Artificial Sequence: Synthetic oligonucleotide
acugcaggucagaccaagg

SEQ ID NO: 122243 - RNA, 19 nt, Artificial Sequence
  Description of Artificial Sequence: Synthetic oligonucleotide
aguuauucugggacaagua

SEQ ID NO: 122244 - RNA, 19 nt, Artificial Sequence
  Description of Artificial Sequence: Synthetic oligonucleotide
gucuauguccuuauaaaau

SEQ ID NO: 122245 - RNA, 19 nt, Artificial Sequence
  Description of Artificial Sequence: Synthetic oligonucleotide
ucggaccagugccaugcac

SEQ ID NO: 122246 - RNA, 19 nt, Artificial Sequence
  Description of Artificial Sequence: Synthetic oligonucleotide
acacccugacuuaaucuug

SEQ ID NO: 122247 - RNA, 19 nt, Artificial Sequence
  Description of Artificial Sequence: Synthetic oligonucleotide
augccaaggggaauguccu

SEQ ID NO: 122248 - RNA, 19 nt, Artificial Sequence
  Description of Artificial Sequence: Synthetic oligonucleotide
agccgaagcgggagcaccc

SEQ ID NO: 122249 - RNA, 19 nt, Artificial Sequence
  Description of Artificial Sequence: Synthetic oligonucleotide
guagguggccaaacuauga

SEQ ID NO: 122250 - RNA, 19 nt, Artificial Sequence
  Description of Artificial Sequence: Synthetic oligonucleotide
gaagcgggagcacccaugu

SEQ ID NO: 122251 - RNA, 19 nt, Artificial Sequence
  Description of Artificial Sequence: Synthetic oligonucleotide
gaaccuucuguagggcuca

SEQ ID NO: 122252 - RNA, 19 nt, Artificial Sequence
  Description of Artificial Sequence: Synthetic oligonucleotide
agccggcaaauguuggggu

SEQ ID NO: 122253 - RNA, 19 nt, Artificial Sequence
  Description of Artificial Sequence: Synthetic oligonucleotide
gcucaccccaagcugguag

SEQ ID NO: 122254 - RNA, 19 nt, Artificial Sequence
  Description of Artificial Sequence: Synthetic oligonucleotide
cuuccaugucugugcgagc

SEQ ID NO: 122255 - RNA, 19 nt, Artificial Sequence
  Description of Artificial Sequence: Synthetic oligonucleotide
ggcaucacgauauccacgu

SEQ ID NO: 122256 - RNA, 19 nt, Artificial Sequence
  Description of Artificial Sequence: Synthetic oligonucleotide
cauacugcucacugcugga

SEQ ID NO: 122257 - RNA, 19 nt, Artificial Sequence
  Description of Artificial Sequence: Synthetic oligonucleotide
ccgugaauauccauccaac

SEQ ID NO: 122258 - RNA, 19 nt, Artificial Sequence
  Description of Artificial Sequence: Synthetic oligonucleotide
ggaccagugccaugcacug

SEQ ID NO: 122259 - RNA, 19 nt, Artificial Sequence
  Description of Artificial Sequence: Synthetic oligonucleotide
cuaugaaagucucuaugau

SEQ ID NO: 122260 - RNA, 19 nt, Artificial Sequence
  Description of Artificial Sequence: Synthetic oligonucleotide
gaacugauggcggccccug

SEQ ID NO: 122261 - RNA, 19 nt, Artificial Sequence
  Description of Artificial Sequence: Synthetic oligonucleotide
agcacccaugucccaggag

SEQ ID NO: 122262 - RNA, 19 nt, Artificial Sequence
  Description of Artificial Sequence: Synthetic oligonucleotide
cuaguacaauugguaucag

SEQ ID NO: 122263 - RNA, 19 nt, Artificial Sequence
  Description of Artificial Sequence: Synthetic oligonucleotide
agugucacauacggccucu

SEQ ID NO: 122264 - RNA, 19 nt, Artificial Sequence
  Description of Artificial Sequence: Synthetic oligonucleotide
ugguagcauuagcuugacu

SEQ ID NO: 122265 - RNA, 19 nt, Artificial Sequence
  Description of Artificial Sequence: Synthetic oligonucleotide
uagcaaauauguggcgcuc

SEQ ID NO: 122266 - RNA, 19 nt, Artificial Sequence
  Description of Artificial Sequence: Synthetic oligonucleotide
cacgucuuaccuggguaag

SEQ ID NO: 122267 - RNA, 19 nt, Artificial Sequence
  Description of Artificial Sequence: Synthetic oligonucleotide
cccaacugcaccauauuca

SEQ ID NO: 122268 - RNA, 19 nt, Artificial Sequence
  Description of Artificial Sequence: Synthetic oligonucleotide
gguuguuuggaggugccca

SEQ ID NO: 122269 - RNA, 19 nt, Artificial Sequence
  Description of Artificial Sequence: Synthetic oligonucleotide
ucaggccuuauagcaaaua

SEQ ID NO: 122270 - RNA, 19 nt, Artificial Sequence
  Description of Artificial Sequence: Synthetic oligonucleotide
agagccgaagcgggagcac

SEQ ID NO: 122271 - RNA, 19 nt, Artificial Sequence
  Description of Artificial Sequence: Synthetic oligonucleotide
cggacaguacccuuucggg

SEQ ID NO: 122272 - RNA, 19 nt, Artificial Sequence
  Description of Artificial Sequence: Synthetic oligonucleotide
ucacguggguagguauacc

SEQ ID NO: 122273 - RNA, 19 nt, Artificial Sequence
  Description of Artificial Sequence: Synthetic oligonucleotide
ucgcacuacacugcagguc

SEQ ID NO: 122274 - RNA, 19 nt, Artificial Sequence
  Description of Artificial Sequence: Synthetic oligonucleotide
guggcaugacaggaaaguc

SEQ ID NO: 122275 - RNA, 19 nt, Artificial Sequence
  Description of Artificial Sequence: Synthetic oligonucleotide
ggcacugagguuugcuuca

SEQ ID NO: 122276 - RNA, 19 nt, Artificial Sequence
  Description of Artificial Sequence: Synthetic oligonucleotide
ucacgauauccacgucuua

SEQ ID NO: 122277 - RNA, 19 nt, Artificial Sequence
  Description of Artificial Sequence: Synthetic oligonucleotide
cccaauaaccacccugaac

SEQ ID NO: 122278 - RNA, 19 nt, Artificial Sequence
  Description of Artificial Sequence: Synthetic oligonucleotide
gcauagccgagcucaggag

SEQ ID NO: 122279 - RNA, 19 nt, Artificial Sequence
  Description of Artificial Sequence: Synthetic oligonucleotide
ggugcacucuguaaguguc

SEQ ID NO: 122280 - RNA, 19 nt, Artificial Sequence
  Description of Artificial Sequence: Synthetic oligonucleotide
ccugaugccaaggggaaug

SEQ ID NO: 122281 - RNA, 19 nt, Artificial Sequence
  Description of Artificial Sequence: Synthetic oligonucleotide
acgugguggcaaaagcucu

SEQ ID NO: 122282 - RNA, 19 nt, Artificial Sequence
  Description of Artificial Sequence: Synthetic oligonucleotide
guaucuucugagacaaggu

SEQ ID NO: 122283 - RNA, 19 nt, Artificial Sequence
  Description of Artificial Sequence: Synthetic oligonucleotide
gucacauacggccucugau

SEQ ID NO: 122284 - RNA, 19 nt, Artificial Sequence
  Description of Artificial Sequence: Synthetic oligonucleotide
guacgugguggcaaaagcu

SEQ ID NO: 122285 - RNA, 19 nt, Artificial Sequence
  Description of Artificial Sequence: Synthetic oligonucleotide
agaacugauggcggccccu

SEQ ID NO: 122286 - RNA, 19 nt, Artificial Sequence
  Description of Artificial Sequence: Synthetic oligonucleotide
uucggccacgggaggugcc

SEQ ID NO: 122287 - RNA, 19 nt, Artificial Sequence
  Description of Artificial Sequence: Synthetic oligonucleotide
gcccaaaucagagccgaag

SEQ ID NO: 122288 - RNA, 19 nt, Artificial Sequence
  Description of Artificial Sequence: Synthetic oligonucleotide
gagcgugauggcacugggc

SEQ ID NO: 122289 - RNA, 19 nt, Artificial Sequence
  Description of Artificial Sequence: Synthetic oligonucleotide
agcugacugagcucucauu

SEQ ID NO: 122290 - RNA, 19 nt, Artificial Sequence
  Description of Artificial Sequence: Synthetic oligonucleotide
ccgaaaugcugauuuccug

SEQ ID NO: 122291 - RNA, 19 nt, Artificial Sequence
  Description of Artificial Sequence: Synthetic oligonucleotide
ggagagagccggcaaaugu

SEQ ID NO: 122292 - RNA, 19 nt, Artificial Sequence
  Description of Artificial Sequence: Synthetic oligonucleotide
gggcaggaauuacugauaa

SEQ ID NO: 122293 - RNA, 19 nt, Artificial Sequence
  Description of Artificial Sequence: Synthetic oligonucleotide
agguguccuuauuccgacu

SEQ ID NO: 122294 - RNA, 19 nt, Artificial Sequence
  Description of Artificial Sequence: Synthetic oligonucleotide
gggcuucaggccuuauagc

SEQ ID NO: 122295 - RNA, 19 nt, Artificial Sequence
  Description of Artificial Sequence: Synthetic oligonucleotide
gagagcggggugacagcag

SEQ ID NO: 122296 - RNA, 19 nt, Artificial Sequence
  Description of Artificial Sequence: Synthetic oligonucleotide
agcucucauuaaggcaaag

SEQ ID NO: 122297 - RNA, 19 nt, Artificial Sequence
  Description of Artificial Sequence: Synthetic oligonucleotide
gggaccagauucccagggc

SEQ ID NO: 122298 - RNA, 19 nt, Artificial Sequence
  Description of Artificial Sequence: Synthetic oligonucleotide
uccgcacugagaggccuca

SEQ ID NO: 122299 - RNA, 19 nt, Artificial Sequence
  Description of Artificial Sequence: Synthetic oligonucleotide
cagcuaagucacuguccac

SEQ ID NO: 122300 - RNA, 19 nt, Artificial Sequence
  Description of Artificial Sequence: Synthetic oligonucleotide
aucucggaccagugccaug

SEQ ID NO: 122301 - RNA, 19 nt, Artificial Sequence
  Description of Artificial Sequence: Synthetic oligonucleotide
gccuuauagcaaauaugug

SEQ ID NO: 122302 - RNA, 19 nt, Artificial Sequence
  Description of Artificial Sequence: Synthetic oligonucleotide
ccuagccacacaugcuccc

SEQ ID NO: 122303 - RNA, 19 nt, Artificial Sequence
  Description of Artificial Sequence: Synthetic oligonucleotide
cgucuuaccuggguaaggg

SEQ ID NO: 122304 - RNA, 19 nt, Artificial Sequence
  Description of Artificial Sequence: Synthetic oligonucleotide
uccgacuguaucggacagu

SEQ ID NO: 122305 - RNA, 19 nt, Artificial Sequence
  Description of Artificial Sequence: Synthetic oligonucleotide
cuucagcccugaugccaag

SEQ ID NO: 122306 - RNA, 19 nt, Artificial Sequence
  Description of Artificial Sequence: Synthetic oligonucleotide
gaccaccuagccacacaug

SEQ ID NO: 122307 - RNA, 19 nt, Artificial Sequence
  Description of Artificial Sequence: Synthetic oligonucleotide
gaccaucgggagagagccg

SEQ ID NO: 122308 - RNA, 19 nt, Artificial Sequence
  Description of Artificial Sequence: Synthetic oligonucleotide
cacacccugacuuaaucuu

SEQ ID NO: 122309 - RNA, 19 nt, Artificial Sequence
  Description of Artificial Sequence: Synthetic oligonucleotide
aggaagcggucagcaacag

SEQ ID NO: 122310 - RNA, 19 nt, Artificial Sequence
  Description of Artificial Sequence: Synthetic oligonucleotide
uggaccaccuguggccacu

SEQ ID NO: 122311 - RNA, 19 nt, Artificial Sequence
  Description of Artificial Sequence: Synthetic oligonucleotide
ugccggguugguucaugaa

SEQ ID NO: 122312 - RNA, 19 nt, Artificial Sequence
  Description of Artificial Sequence: Synthetic oligonucleotide
gguuggaggcagaaaacaa

SEQ ID NO: 122313 - RNA, 19 nt, Artificial Sequence
  Description of Artificial Sequence: Synthetic oligonucleotide
caaaagcucuccagagugu

SEQ ID NO: 122314 - RNA, 19 nt, Artificial Sequence
  Description of Artificial Sequence: Synthetic oligonucleotide
gacacucaucucggaccag

SEQ ID NO: 122315 - RNA, 19 nt, Artificial Sequence
  Description of Artificial Sequence: Synthetic oligonucleotide
ggccaaacuaugaaagucu

SEQ ID NO: 122316 - RNA, 19 nt, Artificial Sequence
  Description of Artificial Sequence: Synthetic oligonucleotide
ggguacgugguggcaaaag

SEQ ID NO: 122317 - RNA, 19 nt, Artificial Sequence
  Description of Artificial Sequence: Synthetic oligonucleotide
gguaucaggagcacagcua

SEQ ID NO: 122318 - RNA, 19 nt, Artificial Sequence
  Description of Artificial Sequence: Synthetic oligonucleotide
ggauuagaggugggacuag

SEQ ID NO: 122319 - RNA, 19 nt, Artificial Sequence
  Description of Artificial Sequence: Synthetic oligonucleotide
guccgugaauauccaucca

SEQ ID NO: 122320 - RNA, 19 nt, Artificial Sequence
  Description of Artificial Sequence: Synthetic oligonucleotide
cucagugaucugggauacc

SEQ ID NO: 122321 - RNA, 19 nt, Artificial Sequence
  Description of Artificial Sequence: Synthetic oligonucleotide
aguaccugcccagcaugaa

SEQ ID NO: 122322 - RNA, 19 nt, Artificial Sequence
  Description of Artificial Sequence: Synthetic oligonucleotide
gagagagccggcaaauguu

SEQ ID NO: 122323 - RNA, 19 nt, Artificial Sequence
  Description of Artificial Sequence: Synthetic oligonucleotide
cugguugucuggaccaccu

SEQ ID NO: 122324 - RNA, 19 nt, Artificial Sequence
  Description of Artificial Sequence: Synthetic oligonucleotide
ccccugcccaauaaccacc

SEQ ID NO: 122325 - RNA, 19 nt, Artificial Sequence
  Description of Artificial Sequence: Synthetic oligonucleotide
cgcacuacacugcagguca

SEQ ID NO: 122326 - RNA, 19 nt, Artificial Sequence
  Description of Artificial Sequence: Synthetic oligonucleotide
caugaauaauggugcuagu

SEQ ID NO: 122327 - RNA, 19 nt, Artificial Sequence
  Description of Artificial Sequence: Synthetic oligonucleotide
ggacaguacccuuucgggu

SEQ ID NO: 122328 - RNA, 19 nt, Artificial Sequence
  Description of Artificial Sequence: Synthetic oligonucleotide
gcugcacugaaggaggaaa

SEQ ID NO: 122329 - RNA, 19 nt, Artificial Sequence
  Description of Artificial Sequence: Synthetic oligonucleotide
auccgcacugagaggccuc

SEQ ID NO: 122330 - RNA, 19 nt, Artificial Sequence
  Description of Artificial Sequence: Synthetic oligonucleotide
gugccggguugguucauga

SEQ ID NO: 122331 - RNA, 19 nt, Artificial Sequence
  Description of Artificial Sequence: Synthetic oligonucleotide
guucacguggguagguaua

SEQ ID NO: 122332 - RNA, 19 nt, Artificial Sequence
  Description of Artificial Sequence: Synthetic oligonucleotide
guucggccacgggaggugc

SEQ ID NO: 122333 - RNA, 19 nt, Artificial Sequence
  Description of Artificial Sequence: Synthetic oligonucleotide
ggagggauuagagguggga

SEQ ID NO: 122334 - RNA, 19 nt, Artificial Sequence
  Description of Artificial Sequence: Synthetic oligonucleotide
ugccaaggggaauguccuu

SEQ ID NO: 122335 - RNA, 19 nt, Artificial Sequence
  Description of Artificial Sequence: Synthetic oligonucleotide
gcuaaaccacccaggcuac

SEQ ID NO: 122336 - RNA, 19 nt, Artificial Sequence
  Description of Artificial Sequence: Synthetic oligonucleotide
guaccugcccagcaugaau

SEQ ID NO: 122337 - RNA, 19 nt, Artificial Sequence
  Description of Artificial Sequence: Synthetic oligonucleotide
gucgcacuacacugcaggu

SEQ ID NO: 122338 - RNA, 19 nt, Artificial Sequence
  Description of Artificial Sequence: Synthetic oligonucleotide
ggagagcggggugacagca

SEQ ID NO: 122339 - RNA, 19 nt, Artificial Sequence
  Description of Artificial Sequence: Synthetic oligonucleotide
ugguggcccacugcucaga

SEQ ID NO: 122340 - RNA, 19 nt, Artificial Sequence
  Description of Artificial Sequence: Synthetic oligonucleotide
agaugccguucggccacgg

SEQ ID NO: 122341 - RNA, 19 nt, Artificial Sequence
  Description of Artificial Sequence: Synthetic oligonucleotide
aggcuaccagcugccacca

SEQ ID NO: 122342 - RNA, 19 nt, Artificial Sequence
  Description of Artificial Sequence: Synthetic oligonucleotide
gugcgagcuccucauuucu

SEQ ID NO: 122343 - RNA, 19 nt, Artificial Sequence
  Description of Artificial Sequence: Synthetic oligonucleotide
guguaccguccauacaaau

SEQ ID NO: 122344 - RNA, 19 nt, Artificial Sequence
  Description of Artificial Sequence: Synthetic oligonucleotide
guguccuuauuccgacugu

SEQ ID NO: 122345 - RNA, 19 nt, Artificial Sequence
  Description of Artificial Sequence: Synthetic oligonucleotide
ugccaccauucuguggcau

SEQ ID NO: 122346 - RNA, 19 nt, Artificial Sequence
  Description of Artificial Sequence: Synthetic oligonucleotide
gcgaggccccaucucuggg

SEQ ID NO: 122347 - RNA, 19 nt, Artificial Sequence
  Description of Artificial Sequence: Synthetic oligonucleotide
gauccgcacugagaggccu

SEQ ID NO: 122348 - RNA, 19 nt, Artificial Sequence
  Description of Artificial Sequence: Synthetic oligonucleotide
gggugcuuguuuugaaagu

SEQ ID NO: 122349 - RNA, 19 nt, Artificial Sequence
  Description of Artificial Sequence: Synthetic oligonucleotide
cagggcgaggccccaucuc

SEQ ID NO: 122350 - RNA, 19 nt, Artificial Sequence
  Description of Artificial Sequence: Synthetic oligonucleotide
ggaccaccuagccacacau

SEQ ID NO: 122351 - RNA, 19 nt, Artificial Sequence
  Description of Artificial Sequence: Synthetic oligonucleotide
guaucggacaguacccuuu

SEQ ID NO: 122352 - RNA, 19 nt, Artificial Sequence
  Description of Artificial Sequence: Synthetic oligonucleotide
gguucacguggguagguau

SEQ ID NO: 122353 - RNA, 19 nt, Artificial Sequence
  Description of Artificial Sequence: Synthetic oligonucleotide
cacuacacugcaggucaga

SEQ ID NO: 122354 - RNA, 19 nt, Artificial Sequence
  Description of Artificial Sequence: Synthetic oligonucleotide
ggcaaagaggcaucacgau

SEQ ID NO: 122355 - RNA, 19 nt, Artificial Sequence
  Description of Artificial Sequence: Synthetic oligonucleotide
gggccugaagaggaccaug

SEQ ID NO: 122356 - RNA, 19 nt, Artificial Sequence
  Description of Artificial Sequence: Synthetic oligonucleotide
gggugcacucuguaagugu

SEQ ID NO: 122357 - RNA, 19 nt, Artificial Sequence
  Description of Artificial Sequence: Synthetic oligonucleotide
uguucgcuucaggcgcuuu

SEQ ID NO: 122358 - RNA, 19 nt, Artificial Sequence
  Description of Artificial Sequence: Synthetic oligonucleotide
cuguaucggacaguacccu

SEQ ID NO: 122359 - RNA, 19 nt, Artificial Sequence
  Description of Artificial Sequence: Synthetic oligonucleotide
cgaagcgggagcacccaug

SEQ ID NO: 122360 - RNA, 19 nt, Artificial Sequence
  Description of Artificial Sequence: Synthetic oligonucleotide
gugggacuagggccaccuc

SEQ ID NO: 122361 - RNA, 19 nt, Artificial Sequence
  Description of Artificial Sequence: Synthetic oligonucleotide
cacuggguucacgugggua

SEQ ID NO: 122362 - RNA, 19 nt, Artificial Sequence
  Description of Artificial Sequence: Synthetic oligonucleotide
ggcaacaaacuucccuuuu

SEQ ID NO: 122363 - RNA, 19 nt, Artificial Sequence
  Description of Artificial Sequence: Synthetic oligonucleotide
ggaaagucucaggcacuga

SEQ ID NO: 122364 - RNA, 19 nt, Artificial Sequence
  Description of Artificial Sequence: Synthetic oligonucleotide
caugucugugcgagcuccu

SEQ ID NO: 122365 - RNA, 19 nt, Artificial Sequence
  Description of Artificial Sequence: Synthetic oligonucleotide
uuguucgcuucaggcgcuu

SEQ ID NO: 122366 - RNA, 19 nt, Artificial Sequence
  Description of Artificial Sequence: Synthetic oligonucleotide
ccgacuguaucggacagua

SEQ ID NO: 122367 - RNA, 19 nt, Artificial Sequence
  Description of Artificial Sequence: Synthetic oligonucleotide
gcgguuggcacagccuuuc

SEQ ID NO: 122368 - RNA, 19 nt, Artificial Sequence
  Description of Artificial Sequence: Synthetic oligonucleotide
gcggccccugcccaauaac

SEQ ID NO: 122369 - RNA, 19 nt, Artificial Sequence
  Description of Artificial Sequence: Synthetic oligonucleotide
ccagagcccuagguccugg

SEQ ID NO: 122370 - RNA, 19 nt, Artificial Sequence
  Description of Artificial Sequence: Synthetic oligonucleotide
ggaagcggucagcaacagu

SEQ ID NO: 122371 - RNA, 19 nt, Artificial Sequence
  Description of Artificial Sequence: Synthetic oligonucleotide
cuggguuauagugccugau

SEQ ID NO: 122372 - RNA, 19 nt, Artificial Sequence
  Description of Artificial Sequence: Synthetic oligonucleotide
agcccaaaucagagccgaa

SEQ ID NO: 122373 - RNA, 19 nt, Artificial Sequence
  Description of Artificial Sequence: Synthetic oligonucleotide
caguacccuuucggguauc

SEQ ID NO: 122374 - RNA, 19 nt, Artificial Sequence
  Description of Artificial Sequence: Synthetic oligonucleotide
gcccaauaaccacccugaa

SEQ ID NO: 122375 - RNA, 19 nt, Artificial Sequence
  Description of Artificial Sequence: Synthetic oligonucleotide
aggccaaguuuggcagcaa

SEQ ID NO: 122376 - RNA, 19 nt, Artificial Sequence
  Description of Artificial Sequence: Synthetic oligonucleotide
cgauauccacgucuuaccu

SEQ ID NO: 122377 - RNA, 19 nt, Artificial Sequence
  Description of Artificial Sequence: Synthetic oligonucleotide
gcgcuuuuauuagguucca

SEQ ID NO: 122378 - RNA, 19 nt, Artificial Sequence
  Description of Artificial Sequence: Synthetic oligonucleotide
cgacuguaucggacaguac

SEQ ID NO: 122379 - RNA, 19 nt, Artificial Sequence
  Description of Artificial Sequence: Synthetic oligonucleotide
cugggauaccagggcagcu

SEQ ID NO: 122380 - RNA, 19 nt, Artificial Sequence
  Description of Artificial Sequence: Synthetic oligonucleotide
uggccggugccggguuggu

SEQ ID NO: 122381 - RNA, 19 nt, Artificial Sequence
  Description of Artificial Sequence: Synthetic oligonucleotide
gcgcuccaggcuucagaga

SEQ ID NO: 122382 - RNA, 19 nt, Artificial Sequence
  Description of Artificial Sequence: Synthetic oligonucleotide
ggguucacguggguaggua

SEQ ID NO: 122383 - RNA, 19 nt, Artificial Sequence
  Description of Artificial Sequence: Synthetic oligonucleotide
cguucggccacgggaggug

SEQ ID NO: 122384 - RNA, 19 nt, Artificial Sequence
  Description of Artificial Sequence: Synthetic oligonucleotide
gccgaagcgggagcaccca

SEQ ID NO: 122385 - RNA, 19 nt, Artificial Sequence
  Description of Artificial Sequence: Synthetic oligonucleotide
guacccuuucggguaucuu

SEQ ID NO: 122386 - RNA, 19 nt, Artificial Sequence
  Description of Artificial Sequence: Synthetic oligonucleotide
ccccuuucuggguuauagu

SEQ ID NO: 122387 - RNA, 19 nt, Artificial Sequence
  Description of Artificial Sequence: Synthetic oligonucleotide
gggguacgugguggcaaaa

SEQ ID NO: 122388 - RNA, 19 nt, Artificial Sequence
  Description of Artificial Sequence: Synthetic oligonucleotide
ccgcacugagaggccucag

SEQ ID NO: 122389 - RNA, 19 nt, Artificial Sequence
  Description of Artificial Sequence: Synthetic oligonucleotide
ggcucaccccaagcuggua

SEQ ID NO: 122390 - RNA, 19 nt, Artificial Sequence
  Description of Artificial Sequence: Synthetic oligonucleotide
cgcuucaggcgcuuuuauu

SEQ ID NO: 122391 - RNA, 19 nt, Artificial Sequence
  Description of Artificial Sequence: Synthetic oligonucleotide
ccguuucagaggguuguuu

SEQ ID NO: 122392 - RNA, 19 nt, Artificial Sequence
  Description of Artificial Sequence: Synthetic oligonucleotide
ccguucggccacgggaggu

SEQ ID NO: 122393 - RNA, 19 nt, Artificial Sequence
  Description of Artificial Sequence: Synthetic oligonucleotide
ccgaagcgggagcacccau

SEQ ID NO: 122394 - RNA, 19 nt, Artificial Sequence
  Description of Artificial Sequence: Synthetic oligonucleotide
cccguuucagaggguuguu

SEQ ID NO: 122395 - RNA, 19 nt, Artificial Sequence
  Description of Artificial Sequence: Synthetic oligonucleotide
aacacuaguaaucagauag

SEQ ID NO: 122396 - RNA, 19 nt, Artificial Sequence
  Description of Artificial Sequence: Synthetic oligonucleotide
aagauuacuacucagucuc

SEQ ID NO: 122397 - RNA, 19 nt, Artificial Sequence
  Description of Artificial Sequence: Synthetic oligonucleotide
aagacaauuaaucacccac

SEQ ID NO: 122398 - RNA, 19 nt, Artificial Sequence
  Description of Artificial Sequence: Synthetic oligonucleotide
aaaucuagcauuuccaguc

SEQ ID NO: 122399 - RNA, 19 nt, Artificial Sequence
  Description of Artificial Sequence: Synthetic oligonucleotide
uauauauauauauauaugu

SEQ ID NO: 122400 - RNA, 19 nt, Artificial Sequence
  Description of Artificial Sequence: Synthetic oligonucleotide
uauauauauauacacaugu

SEQ ID NO: 122401 - RNA, 19 nt, Artificial Sequence
  Description of Artificial Sequence: Synthetic oligonucleotide
acugauaucuaauaaugcc

SEQ ID NO: 122402 - RNA, 19 nt, Artificial Sequence
  Description of Artificial Sequence: Synthetic oligonucleotide
uauauguauauauauauac

SEQ ID NO: 122403 - RNA, 19 nt, Artificial Sequence
  Description of Artificial Sequence: Synthetic oligonucleotide
aacauauauauauauauau

SEQ ID NO: 122404 - RNA, 19 nt, Artificial Sequence
  Description of Artificial Sequence: Synthetic oligonucleotide
aacgauauggacuuccagg

SEQ ID NO: 122405 - RNA, 19 nt, Artificial Sequence
  Description of Artificial Sequence: Synthetic oligonucleotide
aaucgcuccaauuucauag

SEQ ID NO: 122406 - RNA, 19 nt, Artificial Sequence
  Description of Artificial Sequence: Synthetic oligonucleotide
uuaaguguuaauuacguga

SEQ ID NO: 122407 - RNA, 19 nt, Artificial Sequence
  Description of Artificial Sequence: Synthetic oligonucleotide
aaggcuuaaagucuagaac

SEQ ID NO: 122408 - RNA, 19 nt, Artificial Sequence
  Description of Artificial Sequence: Synthetic oligonucleotide
uauguauauauauauacac

SEQ ID NO: 122409 - RNA, 19 nt, Artificial Sequence
  Description of Artificial Sequence: Synthetic oligonucleotide
agaauuaauuagcagcacc

SEQ ID NO: 122410 - RNA, 19 nt, Artificial Sequence
  Description of Artificial Sequence: Synthetic oligonucleotide
uauauauguauauauauau

SEQ ID NO: 122411 - RNA, 19 nt, Artificial Sequence
  Description of Artificial Sequence: Synthetic oligonucleotide
uauauauauauguauauau

SEQ ID NO: 122412 - RNA, 19 nt, Artificial Sequence
  Description of Artificial Sequence: Synthetic oligonucleotide
guaacuaugguucaagugc

SEQ ID NO: 122413 - RNA, 19 nt, Artificial Sequence
  Description of Artificial Sequence: Synthetic oligonucleotide
aaccuuaaguguuaauuac

SEQ ID NO: 122414 - RNA, 19 nt, Artificial Sequence
  Description of Artificial Sequence: Synthetic oligonucleotide
cuuaaucgaaccuugauug

SEQ ID NO: 122415 - RNA, 19 nt, Artificial Sequence
  Description of Artificial Sequence: Synthetic oligonucleotide
uguauauccaccuuccugc

SEQ ID NO: 122416 - RNA, 19 nt, Artificial Sequence
  Description of Artificial Sequence: Synthetic oligonucleotide
uauauauauguauauauau

SEQ ID NO: 122417 - RNA, 19 nt, Artificial Sequence
  Description of Artificial Sequence: Synthetic oligonucleotide
uguauauauauauacacau

SEQ ID NO: 122418 - RNA, 19 nt, Artificial Sequence
  Description of Artificial Sequence: Synthetic oligonucleotide
aauaaugccgccuucaauu

SEQ ID NO: 122419 - RNA, 19 nt, Artificial Sequence
  Description of Artificial Sequence: Synthetic oligonucleotide
uauauauauauauauguau

SEQ ID NO: 122420 - RNA, 19 nt, Artificial Sequence
  Description of Artificial Sequence: Synthetic oligonucleotide
aaucaaguaacccugcccu

SEQ ID NO: 122421 - RNA, 19 nt, Artificial Sequence
  Description of Artificial Sequence: Synthetic oligonucleotide
acauguauauuucugauga

SEQ ID NO: 122422 - RNA, 19 nt, Artificial Sequence
  Description of Artificial Sequence: Synthetic oligonucleotide
uguguauaaaaugauuacg

SEQ ID NO: 122423 - RNA, 19 nt, Artificial Sequence
  Description of Artificial Sequence: Synthetic oligonucleotide
agaacaaucauacaaucgu

SEQ ID NO: 122424 - RNA, 19 nt, Artificial Sequence
  Description of Artificial Sequence: Synthetic oligonucleotide
uggauuuucaugaagaauu

SEQ ID NO: 122425 - RNA, 19 nt, Artificial Sequence
  Description of Artificial Sequence: Synthetic oligonucleotide
ugauaucuaauaaugccgc

SEQ ID NO: 122426 - RNA, 19 nt, Artificial Sequence
  Description of Artificial Sequence: Synthetic oligonucleotide
aaaucuaaagaacaaucau

SEQ ID NO: 122427 - RNA, 19 nt, Artificial Sequence
  Description of Artificial Sequence: Synthetic oligonucleotide
ucagucucuaugaacaaag

SEQ ID NO: 122428 - RNA, 19 nt, Artificial Sequence
  Description of Artificial Sequence: Synthetic oligonucleotide
uaacuaugguucaagugcg

SEQ ID NO: 122429 - RNA, 19 nt, Artificial Sequence
  Description of Artificial Sequence: Synthetic oligonucleotide
acauguaauaauugugaac

SEQ ID NO: 122430 - RNA, 19 nt, Artificial Sequence
  Description of Artificial Sequence: Synthetic oligonucleotide
uauauauauauauguauau

SEQ ID NO: 122431 - RNA, 19 nt, Artificial Sequence
  Description of Artificial Sequence: Synthetic oligonucleotide
aaagauuacuacucagucu

SEQ ID NO: 122432 - RNA, 19 nt, Artificial Sequence
  Description of Artificial Sequence: Synthetic oligonucleotide
acgucaagauaguuuaucc

SEQ ID NO: 122433 - RNA, 19 nt, Artificial Sequence
  Description of Artificial Sequence: Synthetic oligonucleotide
agugcgaauaucuaucaag

SEQ ID NO: 122434 - RNA, 19 nt, Artificial Sequence
  Description of Artificial Sequence: Synthetic oligonucleotide
uguucuuugguuucagucc

SEQ ID NO: 122435 - RNA, 19 nt, Artificial Sequence
  Description of Artificial Sequence: Synthetic oligonucleotide
ugauauguuugacacaacu

SEQ ID NO: 122436 - RNA, 19 nt, Artificial Sequence
  Description of Artificial Sequence: Synthetic oligonucleotide
auguaagcaacauauauau

SEQ ID NO: 122437 - RNA, 19 nt, Artificial Sequence
  Description of Artificial Sequence: Synthetic oligonucleotide
uucucuauuaccaccauau

SEQ ID NO: 122438 - RNA, 19 nt, Artificial Sequence
  Description of Artificial Sequence: Synthetic oligonucleotide
aggcuuaaagucuagaacu

SEQ ID NO: 122439 - RNA, 19 nt, Artificial Sequence
  Description of Artificial Sequence: Synthetic oligonucleotide
ucagauaaaguaaguggag

SEQ ID NO: 122440 - RNA, 19 nt, Artificial Sequence
  Description of Artificial Sequence: Synthetic oligonucleotide
gaauuaauuagcagcaccc

SEQ ID NO: 122441 - RNA, 19 nt, Artificial Sequence
  Description of Artificial Sequence: Synthetic oligonucleotide
acuauaugaaucguucccc

SEQ ID NO: 122442 - RNA, 19 nt, Artificial Sequence
  Description of Artificial Sequence: Synthetic oligonucleotide
ucuaucaagaaaauauaau

SEQ ID NO: 122443 - RNA, 19 nt, Artificial Sequence
  Description of Artificial Sequence: Synthetic oligonucleotide
auucccgagaauuaacuuc

SEQ ID NO: 122444 - RNA, 19 nt, Artificial Sequence
  Description of Artificial Sequence: Synthetic oligonucleotide
uucggauucauucaaccca

SEQ ID NO: 122445 - RNA, 19 nt, Artificial Sequence
  Description of Artificial Sequence: Synthetic oligonucleotide
uuugucguaugcuaccggg

SEQ ID NO: 122446 - RNA, 19 nt, Artificial Sequence
  Description of Artificial Sequence: Synthetic oligonucleotide
aaguaaccaauauacgugu

SEQ ID NO: 122447 - RNA, 19 nt, Artificial Sequence
  Description of Artificial Sequence: Synthetic oligonucleotide
agacuauaugaaucguucc

SEQ ID NO: 122448 - RNA, 19 nt, Artificial Sequence
  Description of Artificial Sequence: Synthetic oligonucleotide
auauggaaaauauuucugu

SEQ ID NO: 122449 - RNA, 19 nt, Artificial Sequence
  Description of Artificial Sequence: Synthetic oligonucleotide
ggucagauaaaguaagugg

SEQ ID NO: 122450 - RNA, 19 nt, Artificial Sequence
  Description of Artificial Sequence: Synthetic oligonucleotide
gacuauaugaaucguuccc

SEQ ID NO: 122451 - RNA, 19 nt, Artificial Sequence
  Description of Artificial Sequence: Synthetic oligonucleotide
uuaauuacgugauucuuaa

SEQ ID NO: 122452 - RNA, 19 nt, Artificial Sequence
  Description of Artificial Sequence: Synthetic oligonucleotide
aaagcaagauaucucugcu

SEQ ID NO: 122453 - RNA, 19 nt, Artificial Sequence
  Description of Artificial Sequence: Synthetic oligonucleotide
ggaaaguuguacuugaagc

SEQ ID NO: 122454 - RNA, 19 nt, Artificial Sequence
  Description of Artificial Sequence: Synthetic oligonucleotide
aaaggcuuaaagucuagaa

SEQ ID NO: 122455 - RNA, 19 nt, Artificial Sequence
  Description of Artificial Sequence: Synthetic oligonucleotide
agucaguaacuucagugac

SEQ ID NO: 122456 - RNA, 19 nt, Artificial Sequence
  Description of Artificial Sequence: Synthetic oligonucleotide
ugaguguucaacuuagaaa

SEQ ID NO: 122457 - RNA, 19 nt, Artificial Sequence
  Description of Artificial Sequence: Synthetic oligonucleotide
uuuacuugauggcugacau

SEQ ID NO: 122458 - RNA, 19 nt, Artificial Sequence
  Description of Artificial Sequence: Synthetic oligonucleotide
uacaacacaauguaagcaa

SEQ ID NO: 122459 - RNA, 19 nt, Artificial Sequence
  Description of Artificial Sequence: Synthetic oligonucleotide
agcaaauaagaggagcgcc

SEQ ID NO: 122460 - RNA, 19 nt, Artificial Sequence
  Description of Artificial Sequence: Synthetic oligonucleotide
uccgaaguuauucacucug

SEQ ID NO: 122461 - RNA, 19 nt, Artificial Sequence
  Description of Artificial Sequence: Synthetic oligonucleotide
uccauuuauaauucccgag

SEQ ID NO: 122462 - RNA, 19 nt, Artificial Sequence
  Description of Artificial Sequence: Synthetic oligonucleotide
cucuauuaccaccauauac

SEQ ID NO: 122463 - RNA, 19 nt, Artificial Sequence
  Description of Artificial Sequence: Synthetic oligonucleotide
aguaacuaugguucaagug

SEQ ID NO: 122464 - RNA, 19 nt, Artificial Sequence
  Description of Artificial Sequence: Synthetic oligonucleotide
aagcaacauauauauauau

SEQ ID NO: 122465 - RNA, 19 nt, Artificial Sequence
  Description of Artificial Sequence: Synthetic oligonucleotide
ucaagugcgaauaucuauc

SEQ ID NO: 122466 - RNA, 19 nt, Artificial Sequence
  Description of Artificial Sequence: Synthetic oligonucleotide
uuaaucgaaccuugauugg

SEQ ID NO: 122467 - RNA, 19 nt, Artificial Sequence
  Description of Artificial Sequence: Synthetic oligonucleotide
auauauauauauauauaug

SEQ ID NO: 122468 - RNA, 19 nt, Artificial Sequence
  Description of Artificial Sequence: Synthetic oligonucleotide
cauuuuguugcaguggugg

SEQ ID NO: 122469 - RNA, 19 nt, Artificial Sequence
  Description of Artificial Sequence: Synthetic oligonucleotide
aaauaagaggagcgccaac

SEQ ID NO: 122470 - RNA, 19 nt, Artificial Sequence
  Description of Artificial Sequence: Synthetic oligonucleotide
caguccuuaaucaaguaac

SEQ ID NO: 122471 - RNA, 19 nt, Artificial Sequence
  Description of Artificial Sequence: Synthetic oligonucleotide
acgaucuauaaucugcaag

SEQ ID NO: 122472 - RNA, 19 nt, Artificial Sequence
  Description of Artificial Sequence: Synthetic oligonucleotide
uugcuuaugauaccagaug

SEQ ID NO: 122473 - RNA, 19 nt, Artificial Sequence
  Description of Artificial Sequence: Synthetic oligonucleotide
cuaacucuccguaaacagg

SEQ ID NO: 122474 - RNA, 19 nt, Artificial Sequence
  Description of Artificial Sequence: Synthetic oligonucleotide
uccguaaacaggaaaaguu

SEQ ID NO: 122475 - RNA, 19 nt, Artificial Sequence
  Description of Artificial Sequence: Synthetic oligonucleotide
aaucauacaaucgugcauu

SEQ ID NO: 122476 - RNA, 19 nt, Artificial Sequence
  Description of Artificial Sequence: Synthetic oligonucleotide
uagucaguaacuucaguga

SEQ ID NO: 122477 - RNA, 19 nt, Artificial Sequence
  Description of Artificial Sequence: Synthetic oligonucleotide
auaagagugacauuuuauu

SEQ ID NO: 122478 - RNA, 19 nt, Artificial Sequence
  Description of Artificial Sequence: Synthetic oligonucleotide
gauauguuugacacaacug

SEQ ID NO: 122479 - RNA, 19 nt, Artificial Sequence
  Description of Artificial Sequence: Synthetic oligonucleotide
cuauuaccaccauauacag

SEQ ID NO: 122480 - RNA, 19 nt, Artificial Sequence
  Description of Artificial Sequence: Synthetic oligonucleotide
cauauauauauauauauau

SEQ ID NO: 122481 - RNA, 19 nt, Artificial Sequence
  Description of Artificial Sequence: Synthetic oligonucleotide
cugacauguaauaauugug

SEQ ID NO: 122482 - RNA, 19 nt, Artificial Sequence
  Description of Artificial Sequence: Synthetic oligonucleotide
caaagauuacuacucaguc

SEQ ID NO: 122483 - RNA, 19 nt, Artificial Sequence
  Description of Artificial Sequence: Synthetic oligonucleotide
ugcuggacuggucagauaa

SEQ ID NO: 122484 - RNA, 19 nt, Artificial Sequence
  Description of Artificial Sequence: Synthetic oligonucleotide
uucccgagaauuaacuucu

SEQ ID NO: 122485 - RNA, 19 nt, Artificial Sequence
  Description of Artificial Sequence: Synthetic oligonucleotide
guaaccaauauacgugucc

SEQ ID NO: 122486 - RNA, 19 nt, Artificial Sequence
  Description of Artificial Sequence: Synthetic oligonucleotide
aaaugauauguuugacaca

SEQ ID NO: 122487 - RNA, 19 nt, Artificial Sequence
  Description of Artificial Sequence: Synthetic oligonucleotide
uguaggcucaaauacuuaa

SEQ ID NO: 122488 - RNA, 19 nt, Artificial Sequence
  Description of Artificial Sequence: Synthetic oligonucleotide
uaugacagcuagugagucg

SEQ ID NO: 122489 - RNA, 19 nt, Artificial Sequence
  Description of Artificial Sequence: Synthetic oligonucleotide
gaugcagauagucuuauua

SEQ ID NO: 122490 - RNA, 19 nt, Artificial Sequence
  Description of Artificial Sequence: Synthetic oligonucleotide
uguagaaacauuugucgua

SEQ ID NO: 122491 - RNA, 19 nt, Artificial Sequence
  Description of Artificial Sequence: Synthetic oligonucleotide
aguaguauagucaguaacu

SEQ ID NO: 122492 - RNA, 19 nt, Artificial Sequence
  Description of Artificial Sequence: Synthetic oligonucleotide
aaucauaccuucagucaac

SEQ ID NO: 122493 - RNA, 19 nt, Artificial Sequence
  Description of Artificial Sequence: Synthetic oligonucleotide
acaaucauacaaucgugca

SEQ ID NO: 122494 - RNA, 19 nt, Artificial Sequence
  Description of Artificial Sequence: Synthetic oligonucleotide
caauauacguguccuuugg

SEQ ID NO: 122495 - RNA, 19 nt, Artificial Sequence
  Description of Artificial Sequence: Synthetic oligonucleotide
cagacuauaugaaucguuc

SEQ ID NO: 122496 - RNA, 19 nt, Artificial Sequence
  Description of Artificial Sequence: Synthetic oligonucleotide
aauuaauuagcagcaccca

SEQ ID NO: 122497 - RNA, 19 nt, Artificial Sequence
  Description of Artificial Sequence: Synthetic oligonucleotide
uauaugaaucguuccccag

SEQ ID NO: 122498 - RNA, 19 nt, Artificial Sequence
  Description of Artificial Sequence: Synthetic oligonucleotide
gauggaauucuccaauauc

SEQ ID NO: 122499 - RNA, 19 nt, Artificial Sequence
  Description of Artificial Sequence: Synthetic oligonucleotide
augucuaugacagcuagug

SEQ ID NO: 122500 - RNA, 19 nt, Artificial Sequence
  Description of Artificial Sequence: Synthetic oligonucleotide
ucacgauuucaccucuggg

SEQ ID NO: 122501 - RNA, 19 nt, Artificial Sequence
  Description of Artificial Sequence: Synthetic oligonucleotide
ucuaauaaugccgccuuca

SEQ ID NO: 122502 - RNA, 19 nt, Artificial Sequence
  Description of Artificial Sequence: Synthetic oligonucleotide
uguugcuuaugauaccaga

SEQ ID NO: 122503 - RNA, 19 nt, Artificial Sequence
  Description of Artificial Sequence: Synthetic oligonucleotide
uuuagagcgcaaagaauuc

SEQ ID NO: 122504 - RNA, 19 nt, Artificial Sequence
  Description of Artificial Sequence: Synthetic oligonucleotide
uaggcucaaauacuuaaaa

SEQ ID NO: 122505 - RNA, 19 nt, Artificial Sequence
  Description of Artificial Sequence: Synthetic oligonucleotide
auaagaggagcgccaacuc

SEQ ID NO: 122506 - RNA, 19 nt, Artificial Sequence
  Description of Artificial Sequence: Synthetic oligonucleotide
auauauauauauauguaua

SEQ ID NO: 122507 - RNA, 19 nt, Artificial Sequence
  Description of Artificial Sequence: Synthetic oligonucleotide
auauguauauauauauaca

SEQ ID NO: 122508 - RNA, 19 nt, Artificial Sequence
  Description of Artificial Sequence: Synthetic oligonucleotide
aacauggguggauuuauuu

SEQ ID NO: 122509 - RNA, 19 nt, Artificial Sequence
  Description of Artificial Sequence: Synthetic oligonucleotide
aguucaacacuaguaauca

SEQ ID NO: 122510 - RNA, 19 nt, Artificial Sequence
  Description of Artificial Sequence: Synthetic oligonucleotide
aaucuagcauuuccagucu

SEQ ID NO: 122511 - RNA, 19 nt, Artificial Sequence
  Description of Artificial Sequence: Synthetic oligonucleotide
agcauggucaaauaauuua

SEQ ID NO: 122512 - RNA, 19 nt, Artificial Sequence
  Description of Artificial Sequence: Synthetic oligonucleotide
aucacgauuucaccucugg

SEQ ID NO: 122513 - RNA, 19 nt, Artificial Sequence
  Description of Artificial Sequence: Synthetic oligonucleotide
uucaagugcgaauaucuau

SEQ ID NO: 122514 - RNA, 19 nt, Artificial Sequence
  Description of Artificial Sequence: Synthetic oligonucleotide
auauuuuagagcgcaaaga

SEQ ID NO: 122515 - RNA, 19 nt, Artificial Sequence
  Description of Artificial Sequence: Synthetic oligonucleotide
ggguaaguaaccaauauac

SEQ ID NO: 122516 - RNA, 19 nt, Artificial Sequence
  Description of Artificial Sequence: Synthetic oligonucleotide
ggaccuaguaauuuuauuc

SEQ ID NO: 122517 - RNA, 19 nt, Artificial Sequence
  Description of Artificial Sequence: Synthetic oligonucleotide
auaugaaucguuccccagu

SEQ ID NO: 122518 - RNA, 19 nt, Artificial Sequence
  Description of Artificial Sequence: Synthetic oligonucleotide
ucuuacgaucuauaaucug

SEQ ID NO: 122519 - RNA, 19 nt, Artificial Sequence
  Description of Artificial Sequence: Synthetic oligonucleotide
uucgcuguugcuuaugaua

SEQ ID NO: 122520 - RNA, 19 nt, Artificial Sequence
  Description of Artificial Sequence: Synthetic oligonucleotide
uuaucaugaacuguauauc

SEQ ID NO: 122521 - RNA, 19 nt, Artificial Sequence
  Description of Artificial Sequence: Synthetic oligonucleotide
agauguugucaaucagugg

SEQ ID NO: 122522 - RNA, 19 nt, Artificial Sequence
  Description of Artificial Sequence: Synthetic oligonucleotide
guauauauauauacacaug

SEQ ID NO: 122523 - RNA, 19 nt, Artificial Sequence
  Description of Artificial Sequence: Synthetic oligonucleotide
acagcuagugagucgaagu

SEQ ID NO: 122524 - RNA, 19 nt, Artificial Sequence
  Description of Artificial Sequence: Synthetic oligonucleotide
uaugaaucguuccccagua

SEQ ID NO: 122525 - RNA, 19 nt, Artificial Sequence
  Description of Artificial Sequence: Synthetic oligonucleotide
uccacuuccgaaguuauuc

SEQ ID NO: 122526 - RNA, 19 nt, Artificial Sequence
  Description of Artificial Sequence: Synthetic oligonucleotide
uuacugcacagacaguccu

SEQ ID NO: 122527 - RNA, 19 nt, Artificial Sequence
  Description of Artificial Sequence: Synthetic oligonucleotide
gauagucuuauuauccaca

SEQ ID NO: 122528 - RNA, 19 nt, Artificial Sequence
  Description of Artificial Sequence: Synthetic oligonucleotide
acaaggggaaaguuguacu

SEQ ID NO: 122529 - RNA, 19 nt, Artificial Sequence
  Description of Artificial Sequence: Synthetic oligonucleotide
caaauugcuaugaugcaga

SEQ ID NO: 122530 - RNA, 19 nt, Artificial Sequence
  Description of Artificial Sequence: Synthetic oligonucleotide
uaagaggagcgccaacucu

SEQ ID NO: 122531 - RNA, 19 nt, Artificial Sequence
  Description of Artificial Sequence: Synthetic oligonucleotide
cuguauauccaccuuccug

SEQ ID NO: 122532 - RNA, 19 nt, Artificial Sequence
  Description of Artificial Sequence: Synthetic oligonucleotide
auguauauauauauacaca

SEQ ID NO: 122533 - RNA, 19 nt, Artificial Sequence
  Description of Artificial Sequence: Synthetic oligonucleotide
auagucuuauuauccacau

SEQ ID NO: 122534 - RNA, 19 nt, Artificial Sequence
  Description of Artificial Sequence: Synthetic oligonucleotide
auauauauauauauaugua

SEQ ID NO: 122535 - RNA, 19 nt, Artificial Sequence
  Description of Artificial Sequence: Synthetic oligonucleotide
ucccuuaacauguuuggau

SEQ ID NO: 122536 - RNA, 19 nt, Artificial Sequence
  Description of Artificial Sequence: Synthetic oligonucleotide
acuaugaauauggaaaaua

SEQ ID NO: 122537 - RNA, 19 nt, Artificial Sequence
  Description of Artificial Sequence: Synthetic oligonucleotide
uaaucgaaccuugauugga

SEQ ID NO: 122538 - RNA, 19 nt, Artificial Sequence
  Description of Artificial Sequence: Synthetic oligonucleotide
aaaccuucgcuguugcuua

SEQ ID NO: 122539 - RNA, 19 nt, Artificial Sequence
  Description of Artificial Sequence: Synthetic oligonucleotide
ucagacuauaugaaucguu

SEQ ID NO: 122540 - RNA, 19 nt, Artificial Sequence
  Description of Artificial Sequence: Synthetic oligonucleotide
auuugucguaugcuaccgg

SEQ ID NO: 122541 - RNA, 19 nt, Artificial Sequence
  Description of Artificial Sequence: Synthetic oligonucleotide
cgaucuauaaucugcaagc

SEQ ID NO: 122542 - RNA, 19 nt, Artificial Sequence
  Description of Artificial Sequence: Synthetic oligonucleotide
auccauuuauaauucccga

SEQ ID NO: 122543 - RNA, 19 nt, Artificial Sequence
  Description of Artificial Sequence: Synthetic oligonucleotide
agaucaaaaucuguaggcu

SEQ ID NO: 122544 - RNA, 19 nt, Artificial Sequence
  Description of Artificial Sequence: Synthetic oligonucleotide
auauauauauauguauaua

SEQ ID NO: 122545 - RNA, 19 nt, Artificial Sequence
  Description of Artificial Sequence: Synthetic oligonucleotide
auauauauguauauauaua

SEQ ID NO: 122546 - RNA, 19 nt, Artificial Sequence
  Description of Artificial Sequence: Synthetic oligonucleotide
uaccgggaaaguauaggca

SEQ ID NO: 122547 - RNA, 19 nt, Artificial Sequence
  Description of Artificial Sequence: Synthetic oligonucleotide
agucacuaugaauauggaa

SEQ ID NO: 122548 - RNA, 19 nt, Artificial Sequence
  Description of Artificial Sequence: Synthetic oligonucleotide
ugucguaugcuaccgggaa

SEQ ID NO: 122549 - RNA, 19 nt, Artificial Sequence
  Description of Artificial Sequence: Synthetic oligonucleotide
uacauucgcucaauguccu

SEQ ID NO: 122550 - RNA, 19 nt, Artificial Sequence
  Description of Artificial Sequence: Synthetic oligonucleotide
cauacaaucgugcauuuua

SEQ ID NO: 122551 - RNA, 19 nt, Artificial Sequence
  Description of Artificial Sequence: Synthetic oligonucleotide
auauauauauguauauaua

SEQ ID NO: 122552 - RNA, 19 nt, Artificial Sequence
  Description of Artificial Sequence: Synthetic oligonucleotide
ugccaaguguggcauauaa

SEQ ID NO: 122553 - RNA, 19 nt, Artificial Sequence
  Description of Artificial Sequence: Synthetic oligonucleotide
uaauaaugccgccuucaau

SEQ ID NO: 122554 - RNA, 19 nt, Artificial Sequence
  Description of Artificial Sequence: Synthetic oligonucleotide
ccuuaaucaaguaacccug

SEQ ID NO: 122555 - RNA, 19 nt, Artificial Sequence
  Description of Artificial Sequence: Synthetic oligonucleotide
uuagagcgcaaagaauuca

SEQ ID NO: 122556 - RNA, 19 nt, Artificial Sequence
  Description of Artificial Sequence: Synthetic oligonucleotide
ucggauucauucaacccau

SEQ ID NO: 122557 - RNA, 19 nt, Artificial Sequence
  Description of Artificial Sequence: Synthetic oligonucleotide
cuacucagucucuaugaac

SEQ ID NO: 122558 - RNA, 19 nt, Artificial Sequence
  Description of Artificial Sequence: Synthetic oligonucleotide
cauuugucguaugcuaccg

SEQ ID NO: 122559 - RNA, 19 nt, Artificial Sequence
  Description of Artificial Sequence: Synthetic oligonucleotide
auuacuacucagucucuau

SEQ ID NO: 122560 - RNA, 19 nt, Artificial Sequence
  Description of Artificial Sequence: Synthetic oligonucleotide
acauauauauauauauaua

SEQ ID NO: 122561 - RNA, 19 nt, Artificial Sequence
  Description of Artificial Sequence: Synthetic oligonucleotide
agaagaauauccaauccua

SEQ ID NO: 122562 - RNA, 19 nt, Artificial Sequence
  Description of Artificial Sequence: Synthetic oligonucleotide
gcaacauauauauauauau

SEQ ID NO: 122563 - RNA, 19 nt, Artificial Sequence
  Description of Artificial Sequence: Synthetic oligonucleotide
acacuaguaaucagauagg

SEQ ID NO: 122564 - RNA, 19 nt, Artificial Sequence
  Description of Artificial Sequence: Synthetic oligonucleotide
aucuaucaagaaaauauaa

SEQ ID NO: 122565 - RNA, 19 nt, Artificial Sequence
  Description of Artificial Sequence: Synthetic oligonucleotide
acgauuucaccucuggguu

SEQ ID NO: 122566 - RNA, 19 nt, Artificial Sequence
  Description of Artificial Sequence: Synthetic oligonucleotide
augacagcuagugagucga

SEQ ID NO: 122567 - RNA, 19 nt, Artificial Sequence
  Description of Artificial Sequence: Synthetic oligonucleotide
uuguaacuacauucaaaau

SEQ ID NO: 122568 - RNA, 19 nt, Artificial Sequence
  Description of Artificial Sequence: Synthetic oligonucleotide
caacauauauauauauaua

SEQ ID NO: 122569 - RNA, 19 nt, Artificial Sequence
  Description of Artificial Sequence: Synthetic oligonucleotide
acauguguguguugugugu

SEQ ID NO: 122570 - RNA, 19 nt, Artificial Sequence
  Description of Artificial Sequence: Synthetic oligonucleotide
aaaucgcuccaauuucaua

SEQ ID NO: 122571 - RNA, 19 nt, Artificial Sequence
  Description of Artificial Sequence: Synthetic oligonucleotide
uuacuugauggcugacaug

SEQ ID NO: 122572 - RNA, 19 nt, Artificial Sequence
  Description of Artificial Sequence: Synthetic oligonucleotide
uugucguaugcuaccggga

SEQ ID NO: 122573 - RNA, 19 nt, Artificial Sequence
  Description of Artificial Sequence: Synthetic oligonucleotide
agucacaaggggaaaguug

SEQ ID NO: 122574 - RNA, 19 nt, Artificial Sequence
  Description of Artificial Sequence: Synthetic oligonucleotide
ggucaacaaaggcuuaaag

SEQ ID NO: 122575 - RNA, 19 nt, Artificial Sequence
  Description of Artificial Sequence: Synthetic oligonucleotide
agacuuuaacugaagauuu

SEQ ID NO: 122576 - RNA, 19 nt, Artificial Sequence
  Description of Artificial Sequence: Synthetic oligonucleotide
uacaaucgugcauuuuaaa

SEQ ID NO: 122577 - RNA, 19 nt, Artificial Sequence
  Description of Artificial Sequence: Synthetic oligonucleotide
acacaacugauaucuaaua

SEQ ID NO: 122578 - RNA, 19 nt, Artificial Sequence
  Description of Artificial Sequence: Synthetic oligonucleotide
auauauguauauauauaua

SEQ ID NO: 122579 - RNA, 19 nt, Artificial Sequence
  Description of Artificial Sequence: Synthetic oligonucleotide
auacguguccuuuggucca

SEQ ID NO: 122580 - RNA, 19 nt, Artificial Sequence
  Description of Artificial Sequence: Synthetic oligonucleotide
ugcuaccgggaaaguauag

SEQ ID NO: 122581 - RNA, 19 nt, Artificial Sequence
  Description of Artificial Sequence: Synthetic oligonucleotide
agacaauuaaucacccacu

SEQ ID NO: 122582 - RNA, 19 nt, Artificial Sequence
  Description of Artificial Sequence: Synthetic oligonucleotide
aagugcgaauaucuaucaa

SEQ ID NO: 122583 - RNA, 19 nt, Artificial Sequence
  Description of Artificial Sequence: Synthetic oligonucleotide
uuccagcuaucaaauugcu

SEQ ID NO: 122584 - RNA, 19 nt, Artificial Sequence
  Description of Artificial Sequence: Synthetic oligonucleotide
cacauguguguguugugug

SEQ ID NO: 122585 - RNA, 19 nt, Artificial Sequence
  Description of Artificial Sequence: Synthetic oligonucleotide
ugcgugacagaacgauaug

SEQ ID NO: 122586 - RNA, 19 nt, Artificial Sequence
  Description of Artificial Sequence: Synthetic oligonucleotide
aaucgaaccuugauuggaa

SEQ ID NO: 122587 - RNA, 19 nt, Artificial Sequence
  Description of Artificial Sequence: Synthetic oligonucleotide
aucaacccaagauccuucu

SEQ ID NO: 122588 - RNA, 19 nt, Artificial Sequence
  Description of Artificial Sequence: Synthetic oligonucleotide
auucgcucaauguccuuga

SEQ ID NO: 122589 - RNA, 19 nt, Artificial Sequence
  Description of Artificial Sequence: Synthetic oligonucleotide
aguaaccaauauacguguc

SEQ ID NO: 122590 - RNA, 19 nt, Artificial Sequence
  Description of Artificial Sequence: Synthetic oligonucleotide
ccguaaacaggaaaaguug

SEQ ID NO: 122591 - RNA, 19 nt, Artificial Sequence
  Description of Artificial Sequence: Synthetic oligonucleotide
ugaaucggugugccggaac

SEQ ID NO: 122592 - RNA, 19 nt, Artificial Sequence
  Description of Artificial Sequence: Synthetic oligonucleotide
cacaacugauaucuaauaa

SEQ ID NO: 122593 - RNA, 19 nt, Artificial Sequence
  Description of Artificial Sequence: Synthetic oligonucleotide
uuugccaaguguggcauau

SEQ ID NO: 122594 - RNA, 19 nt, Artificial Sequence
  Description of Artificial Sequence: Synthetic oligonucleotide
aguuauucacucugcgguu

SEQ ID NO: 122595 - RNA, 19 nt, Artificial Sequence
  Description of Artificial Sequence: Synthetic oligonucleotide
uguguguuguguguguaua

SEQ ID NO: 122596 - RNA, 19 nt, Artificial Sequence
  Description of Artificial Sequence: Synthetic oligonucleotide
uucagacuauaugaaucgu

SEQ ID NO: 122597 - RNA, 19 nt, Artificial Sequence
  Description of Artificial Sequence: Synthetic oligonucleotide
caagugcgaauaucuauca

SEQ ID NO: 122598 - RNA, 19 nt, Artificial Sequence
  Description of Artificial Sequence: Synthetic oligonucleotide
gacagcuagugagucgaag

SEQ ID NO: 122599 - RNA, 19 nt, Artificial Sequence
  Description of Artificial Sequence: Synthetic oligonucleotide
uagaaacauuugucguaug

SEQ ID NO: 122600 - RNA, 19 nt, Artificial Sequence
  Description of Artificial Sequence: Synthetic oligonucleotide
cagcaaauaagaggagcgc

SEQ ID NO: 122601 - RNA, 19 nt, Artificial Sequence
  Description of Artificial Sequence: Synthetic oligonucleotide
aagaggagcgccaacucuu

SEQ ID NO: 122602 - RNA, 19 nt, Artificial Sequence
  Description of Artificial Sequence: Synthetic oligonucleotide
agcagcacccaaccuuaag

SEQ ID NO: 122603 - RNA, 19 nt, Artificial Sequence
  Description of Artificial Sequence: Synthetic oligonucleotide
accccaaguuacugcacag

SEQ ID NO: 122604 - RNA, 19 nt, Artificial Sequence
  Description of Artificial Sequence: Synthetic oligonucleotide
cauguguguguugugugug

SEQ ID NO: 122605 - RNA, 19 nt, Artificial Sequence
  Description of Artificial Sequence: Synthetic oligonucleotide
agcaacauauauauauaua

SEQ ID NO: 122606 - RNA, 19 nt, Artificial Sequence
  Description of Artificial Sequence: Synthetic oligonucleotide
acuaguaaucagauaggaa

SEQ ID NO: 122607 - RNA, 19 nt, Artificial Sequence
  Description of Artificial Sequence: Synthetic oligonucleotide
uccgggcuuaaucgaaccu

SEQ ID NO: 122608 - RNA, 19 nt, Artificial Sequence
  Description of Artificial Sequence: Synthetic oligonucleotide
uccagcuaucaaauugcua

SEQ ID NO: 122609 - RNA, 19 nt, Artificial Sequence
  Description of Artificial Sequence: Synthetic oligonucleotide
uuccgaaguuauucacucu

SEQ ID NO: 122610 - RNA, 19 nt, Artificial Sequence
  Description of Artificial Sequence: Synthetic oligonucleotide
cauggcaggguuauugcaa

SEQ ID NO: 122611 - RNA, 19 nt, Artificial Sequence
  Description of Artificial Sequence: Synthetic oligonucleotide
acucuccguaaacaggaaa

SEQ ID NO: 122612 - RNA, 19 nt, Artificial Sequence
  Description of Artificial Sequence: Synthetic oligonucleotide
auauggacuuccagguuug

SEQ ID NO: 122613 - RNA, 19 nt, Artificial Sequence
  Description of Artificial Sequence: Synthetic oligonucleotide
gacaauuaaucacccacuu

SEQ ID NO: 122614 - RNA, 19 nt, Artificial Sequence
  Description of Artificial Sequence: Synthetic oligonucleotide
cuccgggcuuaaucgaacc

SEQ ID NO: 122615 - RNA, 19 nt, Artificial Sequence
  Description of Artificial Sequence: Synthetic oligonucleotide
auguguguguugugugugu

SEQ ID NO: 122616 - RNA, 19 nt, Artificial Sequence
  Description of Artificial Sequence: Synthetic oligonucleotide
aggaccuaguaauuuuauu

SEQ ID NO: 122617 - RNA, 19 nt, Artificial Sequence
  Description of Artificial Sequence: Synthetic oligonucleotide
uagucuuauuauccacaua

SEQ ID NO: 122618 - RNA, 19 nt, Artificial Sequence
  Description of Artificial Sequence: Synthetic oligonucleotide
gauaucucugcugucaauu

SEQ ID NO: 122619 - RNA, 19 nt, Artificial Sequence
  Description of Artificial Sequence: Synthetic oligonucleotide
ggagauauucugcccacca

SEQ ID NO: 122620 - RNA, 19 nt, Artificial Sequence
  Description of Artificial Sequence: Synthetic oligonucleotide
gagauauucugcccaccaa

SEQ ID NO: 122621 - RNA, 19 nt, Artificial Sequence
  Description of Artificial Sequence: Synthetic oligonucleotide
aucauaccuucagucaaca

SEQ ID NO: 122622 - RNA, 19 nt, Artificial Sequence
  Description of Artificial Sequence: Synthetic oligonucleotide
aucgaaccuugauuggaau

SEQ ID NO: 122623 - RNA, 19 nt, Artificial Sequence
  Description of Artificial Sequence: Synthetic oligonucleotide
agucucuaacucuccguaa

SEQ ID NO: 122624 - RNA, 19 nt, Artificial Sequence
  Description of Artificial Sequence: Synthetic oligonucleotide
gcuaccgggaaaguauagg

SEQ ID NO: 122625 - RNA, 19 nt, Artificial Sequence
  Description of Artificial Sequence: Synthetic oligonucleotide
auauccaauccuacagcca

SEQ ID NO: 122626 - RNA, 19 nt, Artificial Sequence
  Description of Artificial Sequence: Synthetic oligonucleotide
aagucacaaggggaaaguu

SEQ ID NO: 122627 - RNA, 19 nt, Artificial Sequence
  Description of Artificial Sequence: Synthetic oligonucleotide
acuaugguucaagugcgaa

SEQ ID NO: 122628 - RNA, 19 nt, Artificial Sequence
  Description of Artificial Sequence: Synthetic oligonucleotide
cuaauaaugccgccuucaa

SEQ ID NO: 122629 - RNA, 19 nt, Artificial Sequence
  Description of Artificial Sequence: Synthetic oligonucleotide
uaacccugcccuucuccca

SEQ ID NO: 122630 - RNA, 19 nt, Artificial Sequence
  Description of Artificial Sequence: Synthetic oligonucleotide
auacaaucgugcauuuuaa

SEQ ID NO: 122631 - RNA, 19 nt, Artificial Sequence
  Description of Artificial Sequence: Synthetic oligonucleotide
ccagcuaucaaauugcuau

SEQ ID NO: 122632 - RNA, 19 nt, Artificial Sequence
  Description of Artificial Sequence: Synthetic oligonucleotide
uggagauauucugcccacc

SEQ ID NO: 122633 - RNA, 19 nt, Artificial Sequence
  Description of Artificial Sequence: Synthetic oligonucleotide
agauaucucugcugucaau

SEQ ID NO: 122634 - RNA, 19 nt, Artificial Sequence
  Description of Artificial Sequence: Synthetic oligonucleotide
aucauacaaucgugcauuu

SEQ ID NO: 122635 - RNA, 19 nt, Artificial Sequence
  Description of Artificial Sequence: Synthetic oligonucleotide
ucaacccaagauccuucua

SEQ ID NO: 122636 - RNA, 19 nt, Artificial Sequence
  Description of Artificial Sequence: Synthetic oligonucleotide
ucauaccuucagucaacau

SEQ ID NO: 122637 - RNA, 19 nt, Artificial Sequence
  Description of Artificial Sequence: Synthetic oligonucleotide
gacacaacugauaucuaau

SEQ ID NO: 122638 - RNA, 19 nt, Artificial Sequence
  Description of Artificial Sequence: Synthetic oligonucleotide
ccaauauacguguccuuug

SEQ ID NO: 122639 - RNA, 19 nt, Artificial Sequence
  Description of Artificial Sequence: Synthetic oligonucleotide
aacuaugguucaagugcga

SEQ ID NO: 122640 - RNA, 19 nt, Artificial Sequence
  Description of Artificial Sequence: Synthetic oligonucleotide
uugacacaacugauaucua

SEQ ID NO: 122641 - RNA, 19 nt, Artificial Sequence
  Description of Artificial Sequence: Synthetic oligonucleotide
gauuacuacucagucucua

SEQ ID NO: 122642 - RNA, 19 nt, Artificial Sequence
  Description of Artificial Sequence: Synthetic oligonucleotide
guagaaacauuugucguau

SEQ ID NO: 122643 - RNA, 19 nt, Artificial Sequence
  Description of Artificial Sequence: Synthetic oligonucleotide
agaggagcgccaacucuuc

SEQ ID NO: 122644 - RNA, 19 nt, Artificial Sequence
  Description of Artificial Sequence: Synthetic oligonucleotide
gguuugcuuaucaugaacu

SEQ ID NO: 122645 - RNA, 19 nt, Artificial Sequence
  Description of Artificial Sequence: Synthetic oligonucleotide
uguguguguugugugugua

SEQ ID NO: 122646 - RNA, 19 nt, Artificial Sequence
  Description of Artificial Sequence: Synthetic oligonucleotide
gggcuuagcuuuuauucuc

SEQ ID NO: 122647 - RNA, 19 nt, Artificial Sequence
  Description of Artificial Sequence: Synthetic oligonucleotide
ccgaaguuauucacucugc

SEQ ID NO: 122648 - RNA, 19 nt, Artificial Sequence
  Description of Artificial Sequence: Synthetic oligonucleotide
guucaacuuagaaauguau

SEQ ID NO: 122649 - RNA, 19 nt, Artificial Sequence
  Description of Artificial Sequence: Synthetic oligonucleotide
cagauaggaagcuucggau

SEQ ID NO: 122650 - RNA, 19 nt, Artificial Sequence
  Description of Artificial Sequence: Synthetic oligonucleotide
caaauaagaggagcgccaa

SEQ ID NO: 122651 - RNA, 19 nt, Artificial Sequence
  Description of Artificial Sequence: Synthetic oligonucleotide
augaaucguuccccaguau

SEQ ID NO: 122652 - RNA, 19 nt, Artificial Sequence
  Description of Artificial Sequence: Synthetic oligonucleotide
guguguuguguguguauaa

SEQ ID NO: 122653 - RNA, 19 nt, Artificial Sequence
  Description of Artificial Sequence: Synthetic oligonucleotide
caugaguguucaacuuaga

SEQ ID NO: 122654 - RNA, 19 nt, Artificial Sequence
  Description of Artificial Sequence: Synthetic oligonucleotide
caaucauacaaucgugcau

SEQ ID NO: 122655 - RNA, 19 nt, Artificial Sequence
  Description of Artificial Sequence: Synthetic oligonucleotide
aaccuucgcuguugcuuau

SEQ ID NO: 122656 - RNA, 19 nt, Artificial Sequence
  Description of Artificial Sequence: Synthetic oligonucleotide
cagggaugucuaugacagc

SEQ ID NO: 122657 - RNA, 19 nt, Artificial Sequence
  Description of Artificial Sequence: Synthetic oligonucleotide
caauaucaccagugcaaaa

SEQ ID NO: 122658 - RNA, 19 nt, Artificial Sequence
  Description of Artificial Sequence: Synthetic oligonucleotide
gcuuaaucgaaccuugauu

SEQ ID NO: 122659 - RNA, 19 nt, Artificial Sequence
  Description of Artificial Sequence: Synthetic oligonucleotide
gcuuaaagucuagaacuga

SEQ ID NO: 122660 - RNA, 19 nt, Artificial Sequence
  Description of Artificial Sequence: Synthetic oligonucleotide
ugacagcuagugagucgaa

SEQ ID NO: 122661 - RNA, 19 nt, Artificial Sequence
  Description of Artificial Sequence: Synthetic oligonucleotide
cuuaaggaccuaguaauuu

SEQ ID NO: 122662 - RNA, 19 nt, Artificial Sequence
  Description of Artificial Sequence: Synthetic oligonucleotide
gcaaagauuacuacucagu

SEQ ID NO: 122663 - RNA, 19 nt, Artificial Sequence
  Description of Artificial Sequence: Synthetic oligonucleotide
aacucuccguaaacaggaa

SEQ ID NO: 122664 - RNA, 19 nt, Artificial Sequence
  Description of Artificial Sequence: Synthetic oligonucleotide
gugagucgaagugcgugac

SEQ ID NO: 122665 - RNA, 19 nt, Artificial Sequence
  Description of Artificial Sequence: Synthetic oligonucleotide
gucguaugcuaccgggaaa

SEQ ID NO: 122666 - RNA, 19 nt, Artificial Sequence
  Description of Artificial Sequence: Synthetic oligonucleotide
ggaaaaguuguaacagugu

SEQ ID NO: 122667 - RNA, 19 nt, Artificial Sequence
  Description of Artificial Sequence: Synthetic oligonucleotide
cuaugguucaagugcgaau

SEQ ID NO: 122668 - RNA, 19 nt, Artificial Sequence
  Description of Artificial Sequence: Synthetic oligonucleotide
uggcaggguuauugcaaau

SEQ ID NO: 122669 - RNA, 19 nt, Artificial Sequence
  Description of Artificial Sequence: Synthetic oligonucleotide
caaugguguucuuugguuu

SEQ ID NO: 122670 - RNA, 19 nt, Artificial Sequence
  Description of Artificial Sequence: Synthetic oligonucleotide
gcagcacccaaccuuaagu

SEQ ID NO: 122671 - RNA, 19 nt, Artificial Sequence
  Description of Artificial Sequence: Synthetic oligonucleotide
gcuuaucaugaacuguaua

SEQ ID NO: 122672 - RNA, 19 nt, Artificial Sequence
  Description of Artificial Sequence: Synthetic oligonucleotide
ccaaguuacugcacagaca

SEQ ID NO: 122673 - RNA, 19 nt, Artificial Sequence
  Description of Artificial Sequence: Synthetic oligonucleotide
ccauagguaaagcaagaua

SEQ ID NO: 122674 - RNA, 19 nt, Artificial Sequence
  Description of Artificial Sequence: Synthetic oligonucleotide
ccuugcauucuaacagguc

SEQ ID NO: 122675 - RNA, 19 nt, Artificial Sequence
  Description of Artificial Sequence: Synthetic oligonucleotide
gugcgugacagaacgauau

SEQ ID NO: 122676 - RNA, 19 nt, Artificial Sequence
  Description of Artificial Sequence: Synthetic oligonucleotide
caaucacgauuucaccucu

SEQ ID NO: 122677 - RNA, 19 nt, Artificial Sequence
  Description of Artificial Sequence: Synthetic oligonucleotide
uagcagcacccaaccuuaa

SEQ ID NO: 122678 - RNA, 19 nt, Artificial Sequence
  Description of Artificial Sequence: Synthetic oligonucleotide
cuguaggcucaaauacuua

SEQ ID NO: 122679 - RNA, 19 nt, Artificial Sequence
  Description of Artificial Sequence: Synthetic oligonucleotide
caaaucgcuccaauuucau

SEQ ID NO: 122680 - RNA, 19 nt, Artificial Sequence
  Description of Artificial Sequence: Synthetic oligonucleotide
gcgccaacucuuccaguag

SEQ ID NO: 122681 - RNA, 19 nt, Artificial Sequence
  Description of Artificial Sequence: Synthetic oligonucleotide
caggucaacaaaggcuuaa

SEQ ID NO: 122682 - RNA, 19 nt, Artificial Sequence
  Description of Artificial Sequence: Synthetic oligonucleotide
cgggcuuaaucgaaccuug

SEQ ID NO: 122683 - RNA, 19 nt, Artificial Sequence
  Description of Artificial Sequence: Synthetic oligonucleotide
aagcaaccaucaggaugga

SEQ ID NO: 122684 - RNA, 19 nt, Artificial Sequence
  Description of Artificial Sequence: Synthetic oligonucleotide
cguaaacaggaaaaguugu

SEQ ID NO: 122685 - RNA, 19 nt, Artificial Sequence
  Description of Artificial Sequence: Synthetic oligonucleotide
cucugcgguucacgucaag

SEQ ID NO: 122686 - RNA, 19 nt, Artificial Sequence
  Description of Artificial Sequence: Synthetic oligonucleotide
ggcuuaaucgaaccuugau

SEQ ID NO: 122687 - RNA, 19 nt, Artificial Sequence
  Description of Artificial Sequence: Synthetic oligonucleotide
cagcauggucaaauaauuu

SEQ ID NO: 122688 - RNA, 19 nt, Artificial Sequence
  Description of Artificial Sequence: Synthetic oligonucleotide
ccaaccuuaaguguuaauu

SEQ ID NO: 122689 - RNA, 19 nt, Artificial Sequence
  Description of Artificial Sequence: Synthetic oligonucleotide
ggcaggguuauugcaaaua

SEQ ID NO: 122690 - RNA, 19 nt, Artificial Sequence
  Description of Artificial Sequence: Synthetic oligonucleotide
guguguguuguguguguau

SEQ ID NO: 122691 - RNA, 19 nt, Artificial Sequence
  Description of Artificial Sequence: Synthetic oligonucleotide
caaaaccuucgcuguugcu

SEQ ID NO: 122692 - RNA, 19 nt, Artificial Sequence
  Description of Artificial Sequence: Synthetic oligonucleotide
cacuaugaauauggaaaau

SEQ ID NO: 122693 - RNA, 19 nt, Artificial Sequence
  Description of Artificial Sequence: Synthetic oligonucleotide
gccauaagaguggguuuca

SEQ ID NO: 122694 - RNA, 19 nt, Artificial Sequence
  Description of Artificial Sequence: Synthetic oligonucleotide
gggcuuaaucgaaccuuga

SEQ ID NO: 122695 - RNA, 19 nt, Artificial Sequence
  Description of Artificial Sequence: Synthetic oligonucleotide
gcuuccauggcaggguuau

SEQ ID NO: 122696 - RNA, 19 nt, Artificial Sequence
  Description of Artificial Sequence: Synthetic oligonucleotide
caucucccuggucccuuaa

SEQ ID NO: 122697 - RNA, 19 nt, Artificial Sequence
  Description of Artificial Sequence: Synthetic oligonucleotide
cccgagaauuaacuucuua

SEQ ID NO: 122698 - RNA, 19 nt, Artificial Sequence
  Description of Artificial Sequence: Synthetic oligonucleotide
acucugcgguucacgucaa

SEQ ID NO: 122699 - RNA, 19 nt, Artificial Sequence
  Description of Artificial Sequence: Synthetic oligonucleotide
ccccaaguuacugcacaga

SEQ ID NO: 122700 - RNA, 19 nt, Artificial Sequence
  Description of Artificial Sequence: Synthetic oligonucleotide
ccgggcuuaaucgaaccuu

SEQ ID NO: 122701 - RNA, 19 nt, Artificial Sequence
  Description of Artificial Sequence: Synthetic oligonucleotide
cgguucacgucaagauagu

SEQ ID NO: 122702 - RNA, 19 nt, Artificial Sequence
  Description of Artificial Sequence: Synthetic oligonucleotide
cguaugcuaccgggaaagu

SEQ ID NO: 122703 - RNA, 19 nt, Artificial Sequence
  Description of Artificial Sequence: Synthetic oligonucleotide
aauggaguauucuuugggc

SEQ ID NO: 122704 - RNA, 19 nt, Artificial Sequence
  Description of Artificial Sequence: Synthetic oligonucleotide
aauacaccugcauagcggc

SEQ ID NO: 122705 - RNA, 19 nt, Artificial Sequence
  Description of Artificial Sequence: Synthetic oligonucleotide
uuaugaaucaacuuauacc

SEQ ID NO: 122706 - RNA, 19 nt, Artificial Sequence
  Description of Artificial Sequence: Synthetic oligonucleotide
agaccaaucccucuaagcc

SEQ ID NO: 122707 - RNA, 19 nt, Artificial Sequence
  Description of Artificial Sequence: Synthetic oligonucleotide
aacuuauacccuguuaugc

SEQ ID NO: 122708 - RNA, 19 nt, Artificial Sequence
  Description of Artificial Sequence: Synthetic oligonucleotide
uugacaauaguuaugguaa

SEQ ID NO: 122709 - RNA, 19 nt, Artificial Sequence
  Description of Artificial Sequence: Synthetic oligonucleotide
uucuccuagugcuagaugg

SEQ ID NO: 122710 - RNA, 19 nt, Artificial Sequence
  Description of Artificial Sequence: Synthetic oligonucleotide
aaaauaaaauaaaauaaaa

SEQ ID NO: 122711 - RNA, 19 nt, Artificial Sequence
  Description of Artificial Sequence: Synthetic oligonucleotide
auugaagcaauaugugucg

SEQ ID NO: 122712 - RNA, 19 nt, Artificial Sequence
  Description of Artificial Sequence: Synthetic oligonucleotide
acaaagguugauuaaagcu

SEQ ID NO: 122713 - RNA, 19 nt, Artificial Sequence
  Description of Artificial Sequence: Synthetic oligonucleotide
uauuggucaaucaauaaau

SEQ ID NO: 122714 - RNA, 19 nt, Artificial Sequence
  Description of Artificial Sequence: Synthetic oligonucleotide
uuauuaugaaucaacuuau

SEQ ID NO: 122715 - RNA, 19 nt, Artificial Sequence
  Description of Artificial Sequence: Synthetic oligonucleotide
caauaugugucguaguggg

SEQ ID NO: 122716 - RNA, 19 nt, Artificial Sequence
  Description of Artificial Sequence: Synthetic oligonucleotide
auggaguauucuuugggcc

SEQ ID NO: 122717 - RNA, 19 nt, Artificial Sequence
  Description of Artificial Sequence: Synthetic oligonucleotide
auggaauacaccugcauag

SEQ ID NO: 122718 - RNA, 19 nt, Artificial Sequence
  Description of Artificial Sequence: Synthetic oligonucleotide
uguacuaugacuggcgucc

SEQ ID NO: 122719 - RNA, 19 nt, Artificial Sequence
  Description of Artificial Sequence: Synthetic oligonucleotide
gaugguuguggguugaugc

SEQ ID NO: 122720 - RNA, 19 nt, Artificial Sequence
  Description of Artificial Sequence: Synthetic oligonucleotide
uuacuacagauaaauagcu

SEQ ID NO: 122721 - RNA, 19 nt, Artificial Sequence
  Description of Artificial Sequence: Synthetic oligonucleotide
agcuaauucggucacagug

SEQ ID NO: 122722 - RNA, 19 nt, Artificial Sequence
  Description of Artificial Sequence: Synthetic oligonucleotide
uucauaaauuggaacagac

SEQ ID NO: 122723 - RNA, 19 nt, Artificial Sequence
  Description of Artificial Sequence: Synthetic oligonucleotide
ucauaaacuggucuggagu

SEQ ID NO: 122724 - RNA, 19 nt, Artificial Sequence
  Description of Artificial Sequence: Synthetic oligonucleotide
ugugaaauugggucgagga

SEQ ID NO: 122725 - RNA, 19 nt, Artificial Sequence
  Description of Artificial Sequence: Synthetic oligonucleotide
aguaguugcaucuuuggga

SEQ ID NO: 122726 - RNA, 19 nt, Artificial Sequence
  Description of Artificial Sequence: Synthetic oligonucleotide
acaaagauaaauagcuuac

SEQ ID NO: 122727 - RNA, 19 nt, Artificial Sequence
  Description of Artificial Sequence: Synthetic oligonucleotide
uccugauaugcuaugaaga

SEQ ID NO: 122728 - RNA, 19 nt, Artificial Sequence
  Description of Artificial Sequence: Synthetic oligonucleotide
cauugaagcaauauguguc

SEQ ID NO: 122729 - RNA, 19 nt, Artificial Sequence
  Description of Artificial Sequence: Synthetic oligonucleotide
uagguuagggaaaagguuc

SEQ ID NO: 122730 - RNA, 19 nt, Artificial Sequence
  Description of Artificial Sequence: Synthetic oligonucleotide
gaagacucaaaccuugcug

SEQ ID NO: 122731 - RNA, 19 nt, Artificial Sequence
  Description of Artificial Sequence: Synthetic oligonucleotide
auauacaucacgcuuuccu

SEQ ID NO: 122732 - RNA, 19 nt, Artificial Sequence
  Description of Artificial Sequence: Synthetic oligonucleotide
augacuggcguccguaucc

SEQ ID NO: 122733 - RNA, 19 nt, Artificial Sequence
  Description of Artificial Sequence: Synthetic oligonucleotide
uugggcgauauauacauca

SEQ ID NO: 122734 - RNA, 19 nt, Artificial Sequence
  Description of Artificial Sequence: Synthetic oligonucleotide
cauuggaugugaaauuggg

SEQ ID NO: 122735 - RNA, 19 nt, Artificial Sequence
  Description of Artificial Sequence: Synthetic oligonucleotide
aaagguucaauagggacca

SEQ ID NO: 122736 - RNA, 19 nt, Artificial Sequence
  Description of Artificial Sequence: Synthetic oligonucleotide
aauaguuaugguaacuggu

SEQ ID NO: 122737 - RNA, 19 nt, Artificial Sequence
  Description of Artificial Sequence: Synthetic oligonucleotide
acgauaacaaaagucauug

SEQ ID NO: 122738 - RNA, 19 nt, Artificial Sequence
  Description of Artificial Sequence: Synthetic oligonucleotide
auugcaucuguuaaggguc

SEQ ID NO: 122739 - RNA, 19 nt, Artificial Sequence
  Description of Artificial Sequence: Synthetic oligonucleotide
agauaaauagcuucacccu

SEQ ID NO: 122740 - RNA, 19 nt, Artificial Sequence
  Description of Artificial Sequence: Synthetic oligonucleotide
auagggaccaggaauuugc

SEQ ID NO: 122741 - RNA, 19 nt, Artificial Sequence
  Description of Artificial Sequence: Synthetic oligonucleotide
gaagcaauaugugucguag

SEQ ID NO: 122742 - RNA, 19 nt, Artificial Sequence
  Description of Artificial Sequence: Synthetic oligonucleotide
uccaguugaguguacagug

SEQ ID NO: 122743 - RNA, 19 nt, Artificial Sequence
  Description of Artificial Sequence: Synthetic oligonucleotide
ugcuaugaagacucaaacc

SEQ ID NO: 122744 - RNA, 19 nt, Artificial Sequence
  Description of Artificial Sequence: Synthetic oligonucleotide
uaguuaugguaacuggucc

SEQ ID NO: 122745 - RNA, 19 nt, Artificial Sequence
  Description of Artificial Sequence: Synthetic oligonucleotide
ugaaauugggucgaggaac

SEQ ID NO: 122746 - RNA, 19 nt, Artificial Sequence
  Description of Artificial Sequence: Synthetic oligonucleotide
aaacccuuuugauagcccu

SEQ ID NO: 122747 - RNA, 19 nt, Artificial Sequence
  Description of Artificial Sequence: Synthetic oligonucleotide
aucaacauuaaagucggag

SEQ ID NO: 122748 - RNA, 19 nt, Artificial Sequence
  Description of Artificial Sequence: Synthetic oligonucleotide
aggaacgauaacaaaaguc

SEQ ID NO: 122749 - RNA, 19 nt, Artificial Sequence
  Description of Artificial Sequence: Synthetic oligonucleotide
auagcccuagauuccaaac

SEQ ID NO: 122750 - RNA, 19 nt, Artificial Sequence
  Description of Artificial Sequence: Synthetic oligonucleotide
uccgcugucauaaacuggu

SEQ ID NO: 122751 - RNA, 19 nt, Artificial Sequence
  Description of Artificial Sequence: Synthetic oligonucleotide
uaaugugcccuuuaaggga

SEQ ID NO: 122752 - RNA, 19 nt, Artificial Sequence
  Description of Artificial Sequence: Synthetic oligonucleotide
uuaugcuucugacaaaaua

SEQ ID NO: 122753 - RNA, 19 nt, Artificial Sequence
  Description of Artificial Sequence: Synthetic oligonucleotide
gaccauucuaaagucaucc

SEQ ID NO: 122754 - RNA, 19 nt, Artificial Sequence
  Description of Artificial Sequence: Synthetic oligonucleotide
ugguaaggagccaucaaca

SEQ ID NO: 122755 - RNA, 19 nt, Artificial Sequence
  Description of Artificial Sequence: Synthetic oligonucleotide
uccaugugauguaaagaag

SEQ ID NO: 122756 - RNA, 19 nt, Artificial Sequence
  Description of Artificial Sequence: Synthetic oligonucleotide
agaaacccuuuugauagcc

SEQ ID NO: 122757 - RNA, 19 nt, Artificial Sequence
  Description of Artificial Sequence: Synthetic oligonucleotide
uuaaagucggagucugcag

SEQ ID NO: 122758 - RNA, 19 nt, Artificial Sequence
  Description of Artificial Sequence: Synthetic oligonucleotide
acaauaguuaugguaacug

SEQ ID NO: 122759 - RNA, 19 nt, Artificial Sequence
  Description of Artificial Sequence: Synthetic oligonucleotide
ugggacuuagguuagggaa

SEQ ID NO: 122760 - RNA, 19 nt, Artificial Sequence
  Description of Artificial Sequence: Synthetic oligonucleotide
uuagguuagggaaaagguu

SEQ ID NO: 122761 - RNA, 19 nt, Artificial Sequence
  Description of Artificial Sequence: Synthetic oligonucleotide
gccaucaacauuaaagucg

SEQ ID NO: 122762 - RNA, 19 nt, Artificial Sequence
  Description of Artificial Sequence: Synthetic oligonucleotide
cuucgaaggaauugggcag

SEQ ID NO: 122763 - RNA, 19 nt, Artificial Sequence
  Description of Artificial Sequence: Synthetic oligonucleotide
agcccuagauuccaaacag

SEQ ID NO: 122764 - RNA, 19 nt, Artificial Sequence
  Description of Artificial Sequence: Synthetic oligonucleotide
ucuacguucugcagauucc

SEQ ID NO: 122765 - RNA, 19 nt, Artificial Sequence
  Description of Artificial Sequence: Synthetic oligonucleotide
ugggguaagucccuggcug

SEQ ID NO: 122766 - RNA, 19 nt, Artificial Sequence
  Description of Artificial Sequence: Synthetic oligonucleotide
aaggaacgauaacaaaagu

SEQ ID NO: 122767 - RNA, 19 nt, Artificial Sequence
  Description of Artificial Sequence: Synthetic oligonucleotide
cacaaagguugauuaaagc

SEQ ID NO: 122768 - RNA, 19 nt, Artificial Sequence
  Description of Artificial Sequence: Synthetic oligonucleotide
aaugugcccuuuaagggag

SEQ ID NO: 122769 - RNA, 19 nt, Artificial Sequence
  Description of Artificial Sequence: Synthetic oligonucleotide
ggaacgauaacaaaaguca

SEQ ID NO: 122770 - RNA, 19 nt, Artificial Sequence
  Description of Artificial Sequence: Synthetic oligonucleotide
uauacaucacgcuuuccuc

SEQ ID NO: 122771 - RNA, 19 nt, Artificial Sequence
  Description of Artificial Sequence: Synthetic oligonucleotide
aaucuagucgccucuuaaa

SEQ ID NO: 122772 - RNA, 19 nt, Artificial Sequence
  Description of Artificial Sequence: Synthetic oligonucleotide
uaugugucguagugggagg

SEQ ID NO: 122773 - RNA, 19 nt, Artificial Sequence
  Description of Artificial Sequence: Synthetic oligonucleotide
agaaguuguguucacccca

SEQ ID NO: 122774 - RNA, 19 nt, Artificial Sequence
  Description of Artificial Sequence: Synthetic oligonucleotide
gaccaaucccucuaagccc

SEQ ID NO: 122775 - RNA, 19 nt, Artificial Sequence
  Description of Artificial Sequence: Synthetic oligonucleotide
uguuaugcuucugacaaaa

SEQ ID NO: 122776 - RNA, 19 nt, Artificial Sequence
  Description of Artificial Sequence: Synthetic oligonucleotide
ucacgguugacaauaguua

SEQ ID NO: 122777 - RNA, 19 nt, Artificial Sequence
  Description of Artificial Sequence: Synthetic oligonucleotide
aguuaugguaacugguccu

SEQ ID NO: 122778 - RNA, 19 nt, Artificial Sequence
  Description of Artificial Sequence: Synthetic oligonucleotide
ugugauuggcggcacagau

SEQ ID NO: 122779 - RNA, 19 nt, Artificial Sequence
  Description of Artificial Sequence: Synthetic oligonucleotide
aucuguuaagggucccagc

SEQ ID NO: 122780 - RNA, 19 nt, Artificial Sequence
  Description of Artificial Sequence: Synthetic oligonucleotide
ugaagacucaaaccuugcu

SEQ ID NO: 122781 - RNA, 19 nt, Artificial Sequence
  Description of Artificial Sequence: Synthetic oligonucleotide
caucccuugggaaugcaag

SEQ ID NO: 122782 - RNA, 19 nt, Artificial Sequence
  Description of Artificial Sequence: Synthetic oligonucleotide
uuggaugugaggacauaca

SEQ ID NO: 122783 - RNA, 19 nt, Artificial Sequence
  Description of Artificial Sequence: Synthetic oligonucleotide
ugcccuuuaagggagagaa

SEQ ID NO: 122784 - RNA, 19 nt, Artificial Sequence
  Description of Artificial Sequence: Synthetic oligonucleotide
auacaucacgcuuuccuca

SEQ ID NO: 122785 - RNA, 19 nt, Artificial Sequence
  Description of Artificial Sequence: Synthetic oligonucleotide
ugcgggauagaacccagga

SEQ ID NO: 122786 - RNA, 19 nt, Artificial Sequence
  Description of Artificial Sequence: Synthetic oligonucleotide
uggguaaugagagguguag

SEQ ID NO: 122787 - RNA, 19 nt, Artificial Sequence
  Description of Artificial Sequence: Synthetic oligonucleotide
aauugggucgaggaacuca

SEQ ID NO: 122788 - RNA, 19 nt, Artificial Sequence
  Description of Artificial Sequence: Synthetic oligonucleotide
uccuucgaaggaauugggc

SEQ ID NO: 122789 - RNA, 19 nt, Artificial Sequence
  Description of Artificial Sequence: Synthetic oligonucleotide
uaauucggucacagugugg

SEQ ID NO: 122790 - RNA, 19 nt, Artificial Sequence
  Description of Artificial Sequence: Synthetic oligonucleotide
ucuccaguugaguguacag

SEQ ID NO: 122791 - RNA, 19 nt, Artificial Sequence
  Description of Artificial Sequence: Synthetic oligonucleotide
uucgaaggaauugggcagg

SEQ ID NO: 122792 - RNA, 19 nt, Artificial Sequence
  Description of Artificial Sequence: Synthetic oligonucleotide
uccuagugcuagauggcag

SEQ ID NO: 122793 - RNA, 19 nt, Artificial Sequence
  Description of Artificial Sequence: Synthetic oligonucleotide
uguucaccccaccaucuug

SEQ ID NO: 122794 - RNA, 19 nt, Artificial Sequence
  Description of Artificial Sequence: Synthetic oligonucleotide
uauuaugaaucaacuuaua

SEQ ID NO: 122795 - RNA, 19 nt, Artificial Sequence
  Description of Artificial Sequence: Synthetic oligonucleotide
ggcgauauauacaucacgc

SEQ ID NO: 122796 - RNA, 19 nt, Artificial Sequence
  Description of Artificial Sequence: Synthetic oligonucleotide
cuaauucggucacagugug

SEQ ID NO: 122797 - RNA, 19 nt, Artificial Sequence
  Description of Artificial Sequence: Synthetic oligonucleotide
acauugcaucuguuaaggg

SEQ ID NO: 122798 - RNA, 19 nt, Artificial Sequence
  Description of Artificial Sequence: Synthetic oligonucleotide
gauuccggguuucauccgc

SEQ ID NO: 122799 - RNA, 19 nt, Artificial Sequence
  Description of Artificial Sequence: Synthetic oligonucleotide
uaacaauuggcugcacuug

SEQ ID NO: 122800 - RNA, 19 nt, Artificial Sequence
  Description of Artificial Sequence: Synthetic oligonucleotide
caaaagaccccagucuuag

SEQ ID NO: 122801 - RNA, 19 nt, Artificial Sequence
  Description of Artificial Sequence: Synthetic oligonucleotide
gucauaaacuggucuggag

SEQ ID NO: 122802 - RNA, 19 nt, Artificial Sequence
  Description of Artificial Sequence: Synthetic oligonucleotide
gagagaaacccuuuugaua

SEQ ID NO: 122803 - RNA, 19 nt, Artificial Sequence
  Description of Artificial Sequence: Synthetic oligonucleotide
uaacugguccuucgaagga

SEQ ID NO: 122804 - RNA, 19 nt, Artificial Sequence
  Description of Artificial Sequence: Synthetic oligonucleotide
aggcacuacaccccaaucu

SEQ ID NO: 122805 - RNA, 19 nt, Artificial Sequence
  Description of Artificial Sequence: Synthetic oligonucleotide
uaggccgaaagguuguacu

SEQ ID NO: 122806 - RNA, 19 nt, Artificial Sequence
  Description of Artificial Sequence: Synthetic oligonucleotide
uaggaaauucagccuggug

SEQ ID NO: 122807 - RNA, 19 nt, Artificial Sequence
  Description of Artificial Sequence: Synthetic oligonucleotide
augcccaagauugggcugc

SEQ ID NO: 122808 - RNA, 19 nt, Artificial Sequence
  Description of Artificial Sequence: Synthetic oligonucleotide
aguuguguucaccccacca

SEQ ID NO: 122809 - RNA, 19 nt, Artificial Sequence
  Description of Artificial Sequence: Synthetic oligonucleotide
cagguuauguucaaaucga

SEQ ID NO: 122810 - RNA, 19 nt, Artificial Sequence
  Description of Artificial Sequence: Synthetic oligonucleotide
ugacaauaguuaugguaac

SEQ ID NO: 122811 - RNA, 19 nt, Artificial Sequence
  Description of Artificial Sequence: Synthetic oligonucleotide
augaagacucaaaccuugc

SEQ ID NO: 122812 - RNA, 19 nt, Artificial Sequence
  Description of Artificial Sequence: Synthetic oligonucleotide
uacaccugcauagcggcag

SEQ ID NO: 122813 - RNA, 19 nt, Artificial Sequence
  Description of Artificial Sequence: Synthetic oligonucleotide
aaucugagguuuccucccu

SEQ ID NO: 122814 - RNA, 19 nt, Artificial Sequence
  Description of Artificial Sequence: Synthetic oligonucleotide
guaguaggccgaaagguug

SEQ ID NO: 122815 - RNA, 19 nt, Artificial Sequence
  Description of Artificial Sequence: Synthetic oligonucleotide
uugcaucuguuaagggucc

SEQ ID NO: 122816 - RNA, 19 nt, Artificial Sequence
  Description of Artificial Sequence: Synthetic oligonucleotide
aacgauaacaaaagucauu

SEQ ID NO: 122817 - RNA, 19 nt, Artificial Sequence
  Description of Artificial Sequence: Synthetic oligonucleotide
cugucauaaacuggucugg

SEQ ID NO: 122818 - RNA, 19 nt, Artificial Sequence
  Description of Artificial Sequence: Synthetic oligonucleotide
cuacguucugcagauuccg

SEQ ID NO: 122819 - RNA, 19 nt, Artificial Sequence
  Description of Artificial Sequence: Synthetic oligonucleotide
ugggucgaggaacucaguc

SEQ ID NO: 122820 - RNA, 19 nt, Artificial Sequence
  Description of Artificial Sequence: Synthetic oligonucleotide
uccauggugugcgggauag

SEQ ID NO: 122821 - RNA, 19 nt, Artificial Sequence
  Description of Artificial Sequence: Synthetic oligonucleotide
uguguucuguacucgcccu

SEQ ID NO: 122822 - RNA, 19 nt, Artificial Sequence
  Description of Artificial Sequence: Synthetic oligonucleotide
aguagggaucauccugguc

SEQ ID NO: 122823 - RNA, 19 nt, Artificial Sequence
  Description of Artificial Sequence: Synthetic oligonucleotide
agcuuuccuacacacaauu

SEQ ID NO: 122824 - RNA, 19 nt, Artificial Sequence
  Description of Artificial Sequence: Synthetic oligonucleotide
aucccucuaagcccugggg

SEQ ID NO: 122825 - RNA, 19 nt, Artificial Sequence
  Description of Artificial Sequence: Synthetic oligonucleotide
gaugaugagccaaucugga

SEQ ID NO: 122826 - RNA, 19 nt, Artificial Sequence
  Description of Artificial Sequence: Synthetic oligonucleotide
auugggucgaggaacucag

SEQ ID NO: 122827 - RNA, 19 nt, Artificial Sequence
  Description of Artificial Sequence: Synthetic oligonucleotide
agugugauuggcggcacag

SEQ ID NO: 122828 - RNA, 19 nt, Artificial Sequence
  Description of Artificial Sequence: Synthetic oligonucleotide
agguucaauagggaccagg

SEQ ID NO: 122829 - RNA, 19 nt, Artificial Sequence
  Description of Artificial Sequence: Synthetic oligonucleotide
ucuccacauggaauacacc

SEQ ID NO: 122830 - RNA, 19 nt, Artificial Sequence
  Description of Artificial Sequence: Synthetic oligonucleotide
ugggcgauauauacaucac

SEQ ID NO: 122831 - RNA, 19 nt, Artificial Sequence
  Description of Artificial Sequence: Synthetic oligonucleotide
uucggucacagugugggga

SEQ ID NO: 122832 - RNA, 19 nt, Artificial Sequence
  Description of Artificial Sequence: Synthetic oligonucleotide
uaguaggccgaaagguugu

SEQ ID NO: 122833 - RNA, 19 nt, Artificial Sequence
  Description of Artificial Sequence: Synthetic oligonucleotide
ugucauaaacuggucugga

SEQ ID NO: 122834 - RNA, 19 nt, Artificial Sequence
  Description of Artificial Sequence: Synthetic oligonucleotide
ugcgauuuuggugucuuuc

SEQ ID NO: 122835 - RNA, 19 nt, Artificial Sequence
  Description of Artificial Sequence: Synthetic oligonucleotide
gggcgauauauacaucacg

SEQ ID NO: 122836 - RNA, 19 nt, Artificial Sequence
  Description of Artificial Sequence: Synthetic oligonucleotide
cacgcuuuccucauuauua

SEQ ID NO: 122837 - RNA, 19 nt, Artificial Sequence
  Description of Artificial Sequence: Synthetic oligonucleotide
gcacaacaggucaauaugg

SEQ ID NO: 122838 - RNA, 19 nt, Artificial Sequence
  Description of Artificial Sequence: Synthetic oligonucleotide
aucaacuuauacccuguua

SEQ ID NO: 122839 - RNA, 19 nt, Artificial Sequence
  Description of Artificial Sequence: Synthetic oligonucleotide
aaauugggucgaggaacuc

SEQ ID NO: 122840 - RNA, 19 nt, Artificial Sequence
  Description of Artificial Sequence: Synthetic oligonucleotide
gcaauaugugucguagugg

SEQ ID NO: 122841 - RNA, 19 nt, Artificial Sequence
  Description of Artificial Sequence: Synthetic oligonucleotide
uggguauuuggagcuguag

SEQ ID NO: 122842 - RNA, 19 nt, Artificial Sequence
  Description of Artificial Sequence: Synthetic oligonucleotide
cuuggaugguuguggguug

SEQ ID NO: 122843 - RNA, 19 nt, Artificial Sequence
  Description of Artificial Sequence: Synthetic oligonucleotide
cauugcaucuguuaagggu

SEQ ID NO: 122844 - RNA, 19 nt, Artificial Sequence
  Description of Artificial Sequence: Synthetic oligonucleotide
uuguacuaugacuggcguc

SEQ ID NO: 122845 - RNA, 19 nt, Artificial Sequence
  Description of Artificial Sequence: Synthetic oligonucleotide
aucacgguugacaauaguu

SEQ ID NO: 122846 - RNA, 19 nt, Artificial Sequence
  Description of Artificial Sequence: Synthetic oligonucleotide
acguucucuugacucuggg

SEQ ID NO: 122847 - RNA, 19 nt, Artificial Sequence
  Description of Artificial Sequence: Synthetic oligonucleotide
uauauacaucacgcuuucc

SEQ ID NO: 122848 - RNA, 19 nt, Artificial Sequence
  Description of Artificial Sequence: Synthetic oligonucleotide
cccuagauuccaaacagug

SEQ ID NO: 122849 - RNA, 19 nt, Artificial Sequence
  Description of Artificial Sequence: Synthetic oligonucleotide
auaggcacuacaccccaau

SEQ ID NO: 122850 - RNA, 19 nt, Artificial Sequence
  Description of Artificial Sequence: Synthetic oligonucleotide
guaccaucacgguugacaa

SEQ ID NO: 122851 - RNA, 19 nt, Artificial Sequence
  Description of Artificial Sequence: Synthetic oligonucleotide
uggguguguucuguacucg

SEQ ID NO: 122852 - RNA, 19 nt, Artificial Sequence
  Description of Artificial Sequence: Synthetic oligonucleotide
aauaugugucguaguggga

SEQ ID NO: 122853 - RNA, 19 nt, Artificial Sequence
  Description of Artificial Sequence: Synthetic oligonucleotide
gauagcccuagauuccaaa

SEQ ID NO: 122854 - RNA, 19 nt, Artificial Sequence
  Description of Artificial Sequence: Synthetic oligonucleotide
ugcgugccaccaaaacuug

SEQ ID NO: 122855 - RNA, 19 nt, Artificial Sequence
  Description of Artificial Sequence: Synthetic oligonucleotide
augugaaauugggucgagg

SEQ ID NO: 122856 - RNA, 19 nt, Artificial Sequence
  Description of Artificial Sequence: Synthetic oligonucleotide
auucggucacagugugggg

SEQ ID NO: 122857 - RNA, 19 nt, Artificial Sequence
  Description of Artificial Sequence: Synthetic oligonucleotide
gugucuggguaaugagagg

SEQ ID NO: 122858 - RNA, 19 nt, Artificial Sequence
  Description of Artificial Sequence: Synthetic oligonucleotide
gguauaggcacuacacccc

SEQ ID NO: 122859 - RNA, 19 nt, Artificial Sequence
  Description of Artificial Sequence: Synthetic oligonucleotide
caucuguuaagggucccag

SEQ ID NO: 122860 - RNA, 19 nt, Artificial Sequence
  Description of Artificial Sequence: Synthetic oligonucleotide
augguaacugguccuucga

SEQ ID NO: 122861 - RNA, 19 nt, Artificial Sequence
  Description of Artificial Sequence: Synthetic oligonucleotide
cuuuuaggaaauucagccu

SEQ ID NO: 122862 - RNA, 19 nt, Artificial Sequence
  Description of Artificial Sequence: Synthetic oligonucleotide
ggucgaggaacucagucca

SEQ ID NO: 122863 - RNA, 19 nt, Artificial Sequence
  Description of Artificial Sequence: Synthetic oligonucleotide
aacugguccuucgaaggaa

SEQ ID NO: 122864 - RNA, 19 nt, Artificial Sequence
  Description of Artificial Sequence: Synthetic oligonucleotide
gggucgaggaacucagucc

SEQ ID NO: 122865 - RNA, 19 nt, Artificial Sequence
  Description of Artificial Sequence: Synthetic oligonucleotide
gaugugaaauugggucgag

SEQ ID NO: 122866 - RNA, 19 nt, Artificial Sequence
  Description of Artificial Sequence: Synthetic oligonucleotide
uuugcgauuuuggugucuu

SEQ ID NO: 122867 - RNA, 19 nt, Artificial Sequence
  Description of Artificial Sequence: Synthetic oligonucleotide
ccauuggaugugaaauugg

SEQ ID NO: 122868 - RNA, 19 nt, Artificial Sequence
  Description of Artificial Sequence: Synthetic oligonucleotide
acauacaccccagugugau

SEQ ID NO: 122869 - RNA, 19 nt, Artificial Sequence
  Description of Artificial Sequence: Synthetic oligonucleotide
accaaucccucuaagcccu

SEQ ID NO: 122870 - RNA, 19 nt, Artificial Sequence
  Description of Artificial Sequence: Synthetic oligonucleotide
gugaaauugggucgaggaa

SEQ ID NO: 122871 - RNA, 19 nt, Artificial Sequence
  Description of Artificial Sequence: Synthetic oligonucleotide
uaguugcaucuuugggaag

SEQ ID NO: 122872 - RNA, 19 nt, Artificial Sequence
  Description of Artificial Sequence: Synthetic oligonucleotide
uccggguuucauccgcugu

SEQ ID NO: 122873 - RNA, 19 nt, Artificial Sequence
  Description of Artificial Sequence: Synthetic oligonucleotide
uaggcacuacaccccaauc

SEQ ID NO: 122874 - RNA, 19 nt, Artificial Sequence
  Description of Artificial Sequence: Synthetic oligonucleotide
gccucaguccgugagaugc

SEQ ID NO: 122875 - RNA, 19 nt, Artificial Sequence
  Description of Artificial Sequence: Synthetic oligonucleotide
guguccagcuaauucgguc

SEQ ID NO: 122876 - RNA, 19 nt, Artificial Sequence
  Description of Artificial Sequence: Synthetic oligonucleotide
cgguugacaauaguuaugg

SEQ ID NO: 122877 - RNA, 19 nt, Artificial Sequence
  Description of Artificial Sequence: Synthetic oligonucleotide
ccuucgaaggaauugggca

SEQ ID NO: 122878 - RNA, 19 nt, Artificial Sequence
  Description of Artificial Sequence: Synthetic oligonucleotide
caggagacguucucuugac

SEQ ID NO: 122879 - RNA, 19 nt, Artificial Sequence
  Description of Artificial Sequence: Synthetic oligonucleotide
guccacgaaugaaucuugg

SEQ ID NO: 122880 - RNA, 19 nt, Artificial Sequence
  Description of Artificial Sequence: Synthetic oligonucleotide
gaaauugggucgaggaacu

SEQ ID NO: 122881 - RNA, 19 nt, Artificial Sequence
  Description of Artificial Sequence: Synthetic oligonucleotide
acgguugacaauaguuaug

SEQ ID NO: 122882 - RNA, 19 nt, Artificial Sequence
  Description of Artificial Sequence: Synthetic oligonucleotide
guccuucgaaggaauuggg

SEQ ID NO: 122883 - RNA, 19 nt, Artificial Sequence
  Description of Artificial Sequence: Synthetic oligonucleotide
gguugauuaaagcuuuccu

SEQ ID NO: 122884 - RNA, 19 nt, Artificial Sequence
  Description of Artificial Sequence: Synthetic oligonucleotide
gagacguucucuugacucu

SEQ ID NO: 122885 - RNA, 19 nt, Artificial Sequence
  Description of Artificial Sequence: Synthetic oligonucleotide
gucaaucaauaaauauaca

SEQ ID NO: 122886 - RNA, 19 nt, Artificial Sequence
  Description of Artificial Sequence: Synthetic oligonucleotide
gcuguuaccugggacuuag

SEQ ID NO: 122887 - RNA, 19 nt, Artificial Sequence
  Description of Artificial Sequence: Synthetic oligonucleotide
ugcauagcggcagguuaug

SEQ ID NO: 122888 - RNA, 19 nt, Artificial Sequence
  Description of Artificial Sequence: Synthetic oligonucleotide
gaggaccauucuaaaguca

SEQ ID NO: 122889 - RNA, 19 nt, Artificial Sequence
  Description of Artificial Sequence: Synthetic oligonucleotide
guuguacuaugacuggcgu

SEQ ID NO: 122890 - RNA, 19 nt, Artificial Sequence
  Description of Artificial Sequence: Synthetic oligonucleotide
uacuaugacuggcguccgu

SEQ ID NO: 122891 - RNA, 19 nt, Artificial Sequence
  Description of Artificial Sequence: Synthetic oligonucleotide
ugugucguagugggaggca

SEQ ID NO: 122892 - RNA, 19 nt, Artificial Sequence
  Description of Artificial Sequence: Synthetic oligonucleotide
auugggcgauauauacauc

SEQ ID NO: 122893 - RNA, 19 nt, Artificial Sequence
  Description of Artificial Sequence: Synthetic oligonucleotide
agucauccugauaugcuau

SEQ ID NO: 122894 - RNA, 19 nt, Artificial Sequence
  Description of Artificial Sequence: Synthetic oligonucleotide
guaaugagagguguagccu

SEQ ID NO: 122895 - RNA, 19 nt, Artificial Sequence
  Description of Artificial Sequence: Synthetic oligonucleotide
gcggguaccaucacgguug

SEQ ID NO: 122896 - RNA, 19 nt, Artificial Sequence
  Description of Artificial Sequence: Synthetic oligonucleotide
uguuugcgauuuugguguc

SEQ ID NO: 122897 - RNA, 19 nt, Artificial Sequence
  Description of Artificial Sequence: Synthetic oligonucleotide
aggagacguucucuugacu

SEQ ID NO: 122898 - RNA, 19 nt, Artificial Sequence
  Description of Artificial Sequence: Synthetic oligonucleotide
aguugaguguacaguggga

SEQ ID NO: 122899 - RNA, 19 nt, Artificial Sequence
  Description of Artificial Sequence: Synthetic oligonucleotide
ggauccgcugcugacauca

SEQ ID NO: 122900 - RNA, 19 nt, Artificial Sequence
  Description of Artificial Sequence: Synthetic oligonucleotide
aggccgaaagguuguacua

SEQ ID NO: 122901 - RNA, 19 nt, Artificial Sequence
  Description of Artificial Sequence: Synthetic oligonucleotide
gccgaaagguuguacuaug

SEQ ID NO: 122902 - RNA, 19 nt, Artificial Sequence
  Description of Artificial Sequence: Synthetic oligonucleotide
uuccggguuucauccgcug

SEQ ID NO: 122903 - RNA, 19 nt, Artificial Sequence
  Description of Artificial Sequence: Synthetic oligonucleotide
guacuaugacuggcguccg

SEQ ID NO: 122904 - RNA, 19 nt, Artificial Sequence
  Description of Artificial Sequence: Synthetic oligonucleotide
acuaugacuggcguccgua

SEQ ID NO: 122905 - RNA, 19 nt, Artificial Sequence
  Description of Artificial Sequence: Synthetic oligonucleotide
cauccugauaugcuaugaa

SEQ ID NO: 122906 - RNA, 19 nt, Artificial Sequence
  Description of Artificial Sequence: Synthetic oligonucleotide
agcggguaccaucacgguu

SEQ ID NO: 122907 - RNA, 19 nt, Artificial Sequence
  Description of Artificial Sequence: Synthetic oligonucleotide
auagcuuacuacagauaaa

SEQ ID NO: 122908 - RNA, 19 nt, Artificial Sequence
  Description of Artificial Sequence: Synthetic oligonucleotide
gaucucccaccccacugga

SEQ ID NO: 122909 - RNA, 19 nt, Artificial Sequence
  Description of Artificial Sequence: Synthetic oligonucleotide
gcaggagucacuaggguga

SEQ ID NO: 122910 - RNA, 19 nt, Artificial Sequence
  Description of Artificial Sequence: Synthetic oligonucleotide
ccagcuaauucggucacag

SEQ ID NO: 122911 - RNA, 19 nt, Artificial Sequence
  Description of Artificial Sequence: Synthetic oligonucleotide
cauggugugcgggauagaa

SEQ ID NO: 122912 - RNA, 19 nt, Artificial Sequence
  Description of Artificial Sequence: Synthetic oligonucleotide
cugggacuuagguuaggga

SEQ ID NO: 122913 - RNA, 19 nt, Artificial Sequence
  Description of Artificial Sequence: Synthetic oligonucleotide
aacagucgcuucaguuucu

SEQ ID NO: 122914 - RNA, 19 nt, Artificial Sequence
  Description of Artificial Sequence: Synthetic oligonucleotide
aucacgcuuuccucauuau

SEQ ID NO: 122915 - RNA, 19 nt, Artificial Sequence
  Description of Artificial Sequence: Synthetic oligonucleotide
ccccguugagcucacuugg

SEQ ID NO: 122916 - RNA, 19 nt, Artificial Sequence
  Description of Artificial Sequence: Synthetic oligonucleotide
uuacugguauaggcacuac

SEQ ID NO: 122917 - RNA, 19 nt, Artificial Sequence
  Description of Artificial Sequence: Synthetic oligonucleotide
cugcgugccaccaaaacuu

SEQ ID NO: 122918 - RNA, 19 nt, Artificial Sequence
  Description of Artificial Sequence: Synthetic oligonucleotide
caaucccucuaagcccugg

SEQ ID NO: 122919 - RNA, 19 nt, Artificial Sequence
  Description of Artificial Sequence: Synthetic oligonucleotide
ggcauuggaugugaggaca

SEQ ID NO: 122920 - RNA, 19 nt, Artificial Sequence
  Description of Artificial Sequence: Synthetic oligonucleotide
aacccuuuugauagcccua

SEQ ID NO: 122921 - RNA, 19 nt, Artificial Sequence
  Description of Artificial Sequence: Synthetic oligonucleotide
uugggucgaggaacucagu

SEQ ID NO: 122922 - RNA, 19 nt, Artificial Sequence
  Description of Artificial Sequence: Synthetic oligonucleotide
ggguaaugagagguguagc

SEQ ID NO: 122923 - RNA, 19 nt, Artificial Sequence
  Description of Artificial Sequence: Synthetic oligonucleotide
agguuauguucaaaucgau

SEQ ID NO: 122924 - RNA, 19 nt, Artificial Sequence
  Description of Artificial Sequence: Synthetic oligonucleotide
cacgguugacaauaguuau

SEQ ID NO: 122925 - RNA, 19 nt, Artificial Sequence
  Description of Artificial Sequence: Synthetic oligonucleotide
gacauacaccccaguguga

SEQ ID NO: 122926 - RNA, 19 nt, Artificial Sequence
  Description of Artificial Sequence: Synthetic oligonucleotide
cccuugggaaugcaagacc

SEQ ID NO: 122927 - RNA, 19 nt, Artificial Sequence
  Description of Artificial Sequence: Synthetic oligonucleotide
ggguauuuggagcuguagu

SEQ ID NO: 122928 - RNA, 19 nt, Artificial Sequence
  Description of Artificial Sequence: Synthetic oligonucleotide
gggauagaacccaggaauc

SEQ ID NO: 122929 - RNA, 19 nt, Artificial Sequence
  Description of Artificial Sequence: Synthetic oligonucleotide
uaccaucacgguugacaau

SEQ ID NO: 122930 - RNA, 19 nt, Artificial Sequence
  Description of Artificial Sequence: Synthetic oligonucleotide
cccuuuaagggagagaaaa

SEQ ID NO: 122931 - RNA, 19 nt, Artificial Sequence
  Description of Artificial Sequence: Synthetic oligonucleotide
guaggccgaaagguuguac

SEQ ID NO: 122932 - RNA, 19 nt, Artificial Sequence
  Description of Artificial Sequence: Synthetic oligonucleotide
gguccacgaaugaaucuug

SEQ ID NO: 122933 - RNA, 19 nt, Artificial Sequence
  Description of Artificial Sequence: Synthetic oligonucleotide
gucggagucugcagcaaca

SEQ ID NO: 122934 - RNA, 19 nt, Artificial Sequence
  Description of Artificial Sequence: Synthetic oligonucleotide
cuccuagugcuagauggca

SEQ ID NO: 122935 - RNA, 19 nt, Artificial Sequence
  Description of Artificial Sequence: Synthetic oligonucleotide
cucagcggcaagaggcaga

SEQ ID NO: 122936 - RNA, 19 nt, Artificial Sequence
  Description of Artificial Sequence: Synthetic oligonucleotide
ugccucaguccgugagaug

SEQ ID NO: 122937 - RNA, 19 nt, Artificial Sequence
  Description of Artificial Sequence: Synthetic oligonucleotide
gccuggugaaccugauuug

SEQ ID NO: 122938 - RNA, 19 nt, Artificial Sequence
  Description of Artificial Sequence: Synthetic oligonucleotide
uggcuguuaccugggacuu

SEQ ID NO: 122939 - RNA, 19 nt, Artificial Sequence
  Description of Artificial Sequence: Synthetic oligonucleotide
ccuagugcuagauggcaga

SEQ ID NO: 122940 - RNA, 19 nt, Artificial Sequence
  Description of Artificial Sequence: Synthetic oligonucleotide
gcuaauucggucacagugu

SEQ ID NO: 122941 - RNA, 19 nt, Artificial Sequence
  Description of Artificial Sequence: Synthetic oligonucleotide
gucgaggaacucaguccag

SEQ ID NO: 122942 - RNA, 19 nt, Artificial Sequence
  Description of Artificial Sequence: Synthetic oligonucleotide
gcgauauauacaucacgcu

SEQ ID NO: 122943 - RNA, 19 nt, Artificial Sequence
  Description of Artificial Sequence: Synthetic oligonucleotide
augggagucuucaguuggu

SEQ ID NO: 122944 - RNA, 19 nt, Artificial Sequence
  Description of Artificial Sequence: Synthetic oligonucleotide
gcugcgugccaccaaaacu

SEQ ID NO: 122945 - RNA, 19 nt, Artificial Sequence
  Description of Artificial Sequence: Synthetic oligonucleotide
acagcacaacaggucaaua

SEQ ID NO: 122946 - RNA, 19 nt, Artificial Sequence
  Description of Artificial Sequence: Synthetic oligonucleotide
ggugugcgggauagaaccc

SEQ ID NO: 122947 - RNA, 19 nt, Artificial Sequence
  Description of Artificial Sequence: Synthetic oligonucleotide
gaauccauaccugcauguu

SEQ ID NO: 122948 - RNA, 19 nt, Artificial Sequence
  Description of Artificial Sequence: Synthetic oligonucleotide
ggagcuggaagagucaaau

SEQ ID NO: 122949 - RNA, 19 nt, Artificial Sequence
  Description of Artificial Sequence: Synthetic oligonucleotide
ggacuuagguuagggaaaa

SEQ ID NO: 122950 - RNA, 19 nt, Artificial Sequence
  Description of Artificial Sequence: Synthetic oligonucleotide
ggauagaacccaggaaucu

SEQ ID NO: 122951 - RNA, 19 nt, Artificial Sequence
  Description of Artificial Sequence: Synthetic oligonucleotide
gcuuuccuacacacaauuc

SEQ ID NO: 122952 - RNA, 19 nt, Artificial Sequence
  Description of Artificial Sequence: Synthetic oligonucleotide
caucaacauuaaagucgga

SEQ ID NO: 122953 - RNA, 19 nt, Artificial Sequence
  Description of Artificial Sequence: Synthetic oligonucleotide
ggcacuacaccccaaucuu

SEQ ID NO: 122954 - RNA, 19 nt, Artificial Sequence
  Description of Artificial Sequence: Synthetic oligonucleotide
acaucacgcuuuccucauu

SEQ ID NO: 122955 - RNA, 19 nt, Artificial Sequence
  Description of Artificial Sequence: Synthetic oligonucleotide
cccguugagcucacuuggc

SEQ ID NO: 122956 - RNA, 19 nt, Artificial Sequence
  Description of Artificial Sequence: Synthetic oligonucleotide
ccgaaagguuguacuauga

SEQ ID NO: 122957 - RNA, 19 nt, Artificial Sequence
  Description of Artificial Sequence: Synthetic oligonucleotide
aagcugcgugccaccaaaa

SEQ ID NO: 122958 - RNA, 19 nt, Artificial Sequence
  Description of Artificial Sequence: Synthetic oligonucleotide
gugugauuggcggcacaga

SEQ ID NO: 122959 - RNA, 19 nt, Artificial Sequence
  Description of Artificial Sequence: Synthetic oligonucleotide
guagugggaggcauuggau

SEQ ID NO: 122960 - RNA, 19 nt, Artificial Sequence
  Description of Artificial Sequence: Synthetic oligonucleotide
gcgggauagaacccaggaa

SEQ ID NO: 122961 - RNA, 19 nt, Artificial Sequence
  Description of Artificial Sequence: Synthetic oligonucleotide
cuaugacuggcguccguau

SEQ ID NO: 122962 - RNA, 19 nt, Artificial Sequence
  Description of Artificial Sequence: Synthetic oligonucleotide
cacugggguccacgaauga

SEQ ID NO: 122963 - RNA, 19 nt, Artificial Sequence
  Description of Artificial Sequence: Synthetic oligonucleotide
gggaucacuaccuggccuu

SEQ ID NO: 122964 - RNA, 19 nt, Artificial Sequence
  Description of Artificial Sequence: Synthetic oligonucleotide
auggguauuuggagcugua

SEQ ID NO: 122965 - RNA, 19 nt, Artificial Sequence
  Description of Artificial Sequence: Synthetic oligonucleotide
cacuagggugagaguccca

SEQ ID NO: 122966 - RNA, 19 nt, Artificial Sequence
  Description of Artificial Sequence: Synthetic oligonucleotide
guuugcgauuuuggugucu

SEQ ID NO: 122967 - RNA, 19 nt, Artificial Sequence
  Description of Artificial Sequence: Synthetic oligonucleotide
ggguccacgaaugaaucuu

SEQ ID NO: 122968 - RNA, 19 nt, Artificial Sequence
  Description of Artificial Sequence: Synthetic oligonucleotide
cugccucaguccgugagau

SEQ ID NO: 122969 - RNA, 19 nt, Artificial Sequence
  Description of Artificial Sequence: Synthetic oligonucleotide
caauagggaccaggaauuu

SEQ ID NO: 122970 - RNA, 19 nt, Artificial Sequence
  Description of Artificial Sequence: Synthetic oligonucleotide
cuagggugagagucccauu

SEQ ID NO: 122971 - RNA, 19 nt, Artificial Sequence
  Description of Artificial Sequence: Synthetic oligonucleotide
ggccgaaagguuguacuau

SEQ ID NO: 122972 - RNA, 19 nt, Artificial Sequence
  Description of Artificial Sequence: Synthetic oligonucleotide
ccaaucccucuaagcccug

SEQ ID NO: 122973 - RNA, 19 nt, Artificial Sequence
  Description of Artificial Sequence: Synthetic oligonucleotide
ccguugagcucacuuggcu

SEQ ID NO: 122974 - RNA, 19 nt, Artificial Sequence
  Description of Artificial Sequence: Synthetic oligonucleotide
gcccuuuaagggagagaaa

SEQ ID NO: 122975 - RNA, 19 nt, Artificial Sequence
  Description of Artificial Sequence: Synthetic oligonucleotide
gcauagcggcagguuaugu

SEQ ID NO: 122976 - RNA, 19 nt, Artificial Sequence
  Description of Artificial Sequence: Synthetic oligonucleotide
ccacuugaguguccagcua

SEQ ID NO: 122977 - RNA, 19 nt, Artificial Sequence
  Description of Artificial Sequence: Synthetic oligonucleotide
cgaaggaauugggcagguc

SEQ ID NO: 122978 - RNA, 19 nt, Artificial Sequence
  Description of Artificial Sequence: Synthetic oligonucleotide
cacuuucaauugggcgaua

SEQ ID NO: 122979 - RNA, 19 nt, Artificial Sequence
  Description of Artificial Sequence: Synthetic oligonucleotide
ggcuguuaccugggacuua

SEQ ID NO: 122980 - RNA, 19 nt, Artificial Sequence
  Description of Artificial Sequence: Synthetic oligonucleotide
ggguaccaucacgguugac

SEQ ID NO: 122981 - RNA, 19 nt, Artificial Sequence
  Description of Artificial Sequence: Synthetic oligonucleotide
gcgugccaccaaaacuugu

SEQ ID NO: 122982 - RNA, 19 nt, Artificial Sequence
  Description of Artificial Sequence: Synthetic oligonucleotide
ccauggugugcgggauaga

SEQ ID NO: 122983 - RNA, 19 nt, Artificial Sequence
  Description of Artificial Sequence: Synthetic oligonucleotide
aagacaaucauuuagauag

SEQ ID NO: 122984 - RNA, 19 nt, Artificial Sequence
  Description of Artificial Sequence: Synthetic oligonucleotide
aauauauauauauauauau

SEQ ID NO: 122985 - RNA, 19 nt, Artificial Sequence
  Description of Artificial Sequence: Synthetic oligonucleotide
ugcuaaauuucauagaugg

SEQ ID NO: 122986 - RNA, 19 nt, Artificial Sequence
  Description of Artificial Sequence: Synthetic oligonucleotide
aauguaaucauugaauagg

SEQ ID NO: 122987 - RNA, 19 nt, Artificial Sequence
  Description of Artificial Sequence: Synthetic oligonucleotide
uauauauauauauauauau

SEQ ID NO: 122988 - RNA, 19 nt, Artificial Sequence
  Description of Artificial Sequence: Synthetic oligonucleotide
uuaauauauauauauauau

SEQ ID NO: 122989 - RNA, 19 nt, Artificial Sequence
  Description of Artificial Sequence: Synthetic oligonucleotide
aaaacguggguacuaaaac

SEQ ID NO: 122990 - RNA, 19 nt, Artificial Sequence
  Description of Artificial Sequence: Synthetic oligonucleotide
uucuuuacgacacaauggg

SEQ ID NO: 122991 - RNA, 19 nt, Artificial Sequence
  Description of Artificial Sequence: Synthetic oligonucleotide
aagagauugucuaagcucc

SEQ ID NO: 122992 - RNA, 19 nt, Artificial Sequence
  Description of Artificial Sequence: Synthetic oligonucleotide
uauauauauauauauauuu

SEQ ID NO: 122993 - RNA, 19 nt, Artificial Sequence
  Description of Artificial Sequence: Synthetic oligonucleotide
auggcuauaaguuucaaug

SEQ ID NO: 122994 - RNA, 19 nt, Artificial Sequence
  Description of Artificial Sequence: Synthetic oligonucleotide
ugugaugcuacguuaauag

SEQ ID NO: 122995 - RNA, 19 nt, Artificial Sequence
  Description of Artificial Sequence: Synthetic oligonucleotide
ucauguaauguaaucauug

SEQ ID NO: 122996 - RNA, 19 nt, Artificial Sequence
  Description of Artificial Sequence: Synthetic oligonucleotide
uacuuuaauauauauauau

SEQ ID NO: 122997 - RNA, 19 nt, Artificial Sequence
  Description of Artificial Sequence: Synthetic oligonucleotide
uucaaugugaguacaacug

SEQ ID NO: 122998 - RNA, 19 nt, Artificial Sequence
  Description of Artificial Sequence: Synthetic oligonucleotide
uuuaauauauauauauaua

SEQ ID NO: 122999 - RNA, 19 nt, Artificial Sequence
  Description of Artificial Sequence: Synthetic oligonucleotide
aagagaauuugucucugac

SEQ ID NO: 123000 - RNA, 19 nt, Artificial Sequence
  Description of Artificial Sequence: Synthetic oligonucleotide
ugaugcuuaacccacacac

SEQ ID NO: 123001 - RNA, 19 nt, Artificial Sequence
  Description of Artificial Sequence: Synthetic oligonucleotide
acuucguaguaccacaccc

SEQ ID NO: 123002 - RNA, 19 nt, Artificial Sequence
  Description of Artificial Sequence: Synthetic oligonucleotide
augcuuaacccacacacgc

SEQ ID NO: 123003 - RNA, 19 nt, Artificial Sequence
  Description of Artificial Sequence: Synthetic oligonucleotide
acaagguuauaacagcugg

SEQ ID NO: 123004 - RNA, 19 nt, Artificial Sequence
  Description of Artificial Sequence: Synthetic oligonucleotide
aagaguccguauuaccgcc

SEQ ID NO: 123005 - RNA, 19 nt, Artificial Sequence
  Description of Artificial Sequence: Synthetic oligonucleotide
acuuucacuagcuaccggg

SEQ ID NO: 123006 - RNA, 19 nt, Artificial Sequence
  Description of Artificial Sequence: Synthetic oligonucleotide
aaggcguaaucauuaaaag

SEQ ID NO: 123007 - RNA, 19 nt, Artificial Sequence
  Description of Artificial Sequence: Synthetic oligonucleotide
aacuugacgcuucagauaa

SEQ ID NO: 123008 - RNA, 19 nt, Artificial Sequence
  Description of Artificial Sequence: Synthetic oligonucleotide
acguuaauagauucaaguc

SEQ ID NO: 123009 - RNA, 19 nt, Artificial Sequence
  Description of Artificial Sequence: Synthetic oligonucleotide
uaauauauauauauauaua

SEQ ID NO: 123010 - RNA, 19 nt, Artificial Sequence
  Description of Artificial Sequence: Synthetic oligonucleotide
aguaccacaccccaguauc

SEQ ID NO: 123011 - RNA, 19 nt, Artificial Sequence
  Description of Artificial Sequence: Synthetic oligonucleotide
gaugguggguauuugaaug

SEQ ID NO: 123012 - RNA, 19 nt, Artificial Sequence
  Description of Artificial Sequence: Synthetic oligonucleotide
ugugaguacaacugguuag

SEQ ID NO: 123013 - RNA, 19 nt, Artificial Sequence
  Description of Artificial Sequence: Synthetic oligonucleotide
aagguuauaacagcugguc

SEQ ID NO: 123014 - RNA, 19 nt, Artificial Sequence
  Description of Artificial Sequence: Synthetic oligonucleotide
acagaaaaccuacuguguc

SEQ ID NO: 123015 - RNA, 19 nt, Artificial Sequence
  Description of Artificial Sequence: Synthetic oligonucleotide
ucagagauagucaauuuau

SEQ ID NO: 123016 - RNA, 19 nt, Artificial Sequence
  Description of Artificial Sequence: Synthetic oligonucleotide
aaacguggguacuaaaacu

SEQ ID NO: 123017 - RNA, 19 nt, Artificial Sequence
  Description of Artificial Sequence: Synthetic oligonucleotide
ucuuuagugggcaauggac

SEQ ID NO: 123018 - RNA, 19 nt, Artificial Sequence
  Description of Artificial Sequence: Synthetic oligonucleotide
agguuauaacagcuggucc

SEQ ID NO: 123019 - RNA, 19 nt, Artificial Sequence
  Description of Artificial Sequence: Synthetic oligonucleotide
gacacuauuucuuuacgac

SEQ ID NO: 123020 - RNA, 19 nt, Artificial Sequence
  Description of Artificial Sequence: Synthetic oligonucleotide
uuucucguagguuaguugu

SEQ ID NO: 123021 - RNA, 19 nt, Artificial Sequence
  Description of Artificial Sequence: Synthetic oligonucleotide
ucuaagagaauuugucucu

SEQ ID NO: 123022 - RNA, 19 nt, Artificial Sequence
  Description of Artificial Sequence: Synthetic oligonucleotide
uuacccauaguaguagugg

SEQ ID NO: 123023 - RNA, 19 nt, Artificial Sequence
  Description of Artificial Sequence: Synthetic oligonucleotide
ucgucuaguaacaagguua

SEQ ID NO: 123024 - RNA, 19 nt, Artificial Sequence
  Description of Artificial Sequence: Synthetic oligonucleotide
cagucggucacuaauacug

SEQ ID NO: 123025 - RNA, 19 nt, Artificial Sequence
  Description of Artificial Sequence: Synthetic oligonucleotide
aaaacucgauagaaacacc

SEQ ID NO: 123026 - RNA, 19 nt, Artificial Sequence
  Description of Artificial Sequence: Synthetic oligonucleotide
aggaauuacccauaguagu

SEQ ID NO: 123027 - RNA, 19 nt, Artificial Sequence
  Description of Artificial Sequence: Synthetic oligonucleotide
ucauagacgucccuagccc

SEQ ID NO: 123028 - RNA, 19 nt, Artificial Sequence
  Description of Artificial Sequence: Synthetic oligonucleotide
aagugcagcguacacucuc

SEQ ID NO: 123029 - RNA, 19 nt, Artificial Sequence
  Description of Artificial Sequence: Synthetic oligonucleotide
aguccggucucuccgaccc

SEQ ID NO: 123030 - RNA, 19 nt, Artificial Sequence
  Description of Artificial Sequence: Synthetic oligonucleotide
ggcaaguuggauuagauuc

SEQ ID NO: 123031 - RNA, 19 nt, Artificial Sequence
  Description of Artificial Sequence: Synthetic oligonucleotide
agucuaacagaaaaccuac

SEQ ID NO: 123032 - RNA, 19 nt, Artificial Sequence
  Description of Artificial Sequence: Synthetic oligonucleotide
aaaccuaugcuugcaggac

SEQ ID NO: 123033 - RNA, 19 nt, Artificial Sequence
  Description of Artificial Sequence: Synthetic oligonucleotide
gauacgguagaugaaaaga

SEQ ID NO: 123034 - RNA, 19 nt, Artificial Sequence
  Description of Artificial Sequence: Synthetic oligonucleotide
ggcguaaucauuaaaagug

SEQ ID NO: 123035 - RNA, 19 nt, Artificial Sequence
  Description of Artificial Sequence: Synthetic oligonucleotide
guaaaccuaugcuugcagg

SEQ ID NO: 123036 - RNA, 19 nt, Artificial Sequence
  Description of Artificial Sequence: Synthetic oligonucleotide
agaacacauaacucuaucu

SEQ ID NO: 123037 - RNA, 19 nt, Artificial Sequence
  Description of Artificial Sequence: Synthetic oligonucleotide
cuuuaauauauauauauau

SEQ ID NO: 123038 - RNA, 19 nt, Artificial Sequence
  Description of Artificial Sequence: Synthetic oligonucleotide
aaacucgauagaaacacca

SEQ ID NO: 123039 - RNA, 19 nt, Artificial Sequence
  Description of Artificial Sequence: Synthetic oligonucleotide
caggaauuacccauaguag

SEQ ID NO: 123040 - RNA, 19 nt, Artificial Sequence
  Description of Artificial Sequence: Synthetic oligonucleotide
ugaauagggagguuccuga

SEQ ID NO: 123041 - RNA, 19 nt, Artificial Sequence
  Description of Artificial Sequence: Synthetic oligonucleotide
auaugaagaauuccagggu

SEQ ID NO: 123042 - RNA, 19 nt, Artificial Sequence
  Description of Artificial Sequence: Synthetic oligonucleotide
caugacaccagaagugacc

SEQ ID NO: 123043 - RNA, 19 nt, Artificial Sequence
  Description of Artificial Sequence: Synthetic oligonucleotide
ucugauucuagacacuauu

SEQ ID NO: 123044 - RNA, 19 nt, Artificial Sequence
  Description of Artificial Sequence: Synthetic oligonucleotide
guuggauuagauucuaaga

SEQ ID NO: 123045 - RNA, 19 nt, Artificial Sequence
  Description of Artificial Sequence: Synthetic oligonucleotide
ucuaaggugaccagucggu

SEQ ID NO: 123046 - RNA, 19 nt, Artificial Sequence
  Description of Artificial Sequence: Synthetic oligonucleotide
uuaauagauucaagucuug

SEQ ID NO: 123047 - RNA, 19 nt, Artificial Sequence
  Description of Artificial Sequence: Synthetic oligonucleotide
uaacacaccgguuucucug

SEQ ID NO: 123048 - RNA, 19 nt, Artificial Sequence
  Description of Artificial Sequence: Synthetic oligonucleotide
uguguuccuauguuuggcc

SEQ ID NO: 123049 - RNA, 19 nt, Artificial Sequence
  Description of Artificial Sequence: Synthetic oligonucleotide
auugcuggaauugaguaga

SEQ ID NO: 123050 - RNA, 19 nt, Artificial Sequence
  Description of Artificial Sequence: Synthetic oligonucleotide
gauucuagacacuauuucu

SEQ ID NO: 123051 - RNA, 19 nt, Artificial Sequence
  Description of Artificial Sequence: Synthetic oligonucleotide
uguaccaaaucagcugccg

SEQ ID NO: 123052 - RNA, 19 nt, Artificial Sequence
  Description of Artificial Sequence: Synthetic oligonucleotide
cucauagacgucccuagcc

SEQ ID NO: 123053 - RNA, 19 nt, Artificial Sequence
  Description of Artificial Sequence: Synthetic oligonucleotide
caugaaacuagcugcagca

SEQ ID NO: 123054 - RNA, 19 nt, Artificial Sequence
  Description of Artificial Sequence: Synthetic oligonucleotide
cauuaucuacaagaguccg

SEQ ID NO: 123055 - RNA, 19 nt, Artificial Sequence
  Description of Artificial Sequence: Synthetic oligonucleotide
uucguaguaccacacccca

SEQ ID NO: 123056 - RNA, 19 nt, Artificial Sequence
  Description of Artificial Sequence: Synthetic oligonucleotide
augcuacguuaauagauuc

SEQ ID NO: 123057 - RNA, 19 nt, Artificial Sequence
  Description of Artificial Sequence: Synthetic oligonucleotide
ucauugaauagggagguuc

SEQ ID NO: 123058 - RNA, 19 nt, Artificial Sequence
  Description of Artificial Sequence: Synthetic oligonucleotide
aggcguaaucauuaaaagu

SEQ ID NO: 123059 - RNA, 19 nt, Artificial Sequence
  Description of Artificial Sequence: Synthetic oligonucleotide
ucucgaguagcccagccaa

SEQ ID NO: 123060 - RNA, 19 nt, Artificial Sequence
  Description of Artificial Sequence: Synthetic oligonucleotide
auauauauauauauauuuu

SEQ ID NO: 123061 - RNA, 19 nt, Artificial Sequence
  Description of Artificial Sequence: Synthetic oligonucleotide
uuuagugggcaauggacau

SEQ ID NO: 123062 - RNA, 19 nt, Artificial Sequence
  Description of Artificial Sequence: Synthetic oligonucleotide
uggcuauaaguuucaaugu

SEQ ID NO: 123063 - RNA, 19 nt, Artificial Sequence
  Description of Artificial Sequence: Synthetic oligonucleotide
ugcuacguuaauagauuca

SEQ ID NO: 123064 - RNA, 19 nt, Artificial Sequence
  Description of Artificial Sequence: Synthetic oligonucleotide
aaaauugaacucacacugu

SEQ ID NO: 123065 - RNA, 19 nt, Artificial Sequence
  Description of Artificial Sequence: Synthetic oligonucleotide
cauagacgucccuagcccg

SEQ ID NO: 123066 - RNA, 19 nt, Artificial Sequence
  Description of Artificial Sequence: Synthetic oligonucleotide
cuucguaguaccacacccc

SEQ ID NO: 123067 - RNA, 19 nt, Artificial Sequence
  Description of Artificial Sequence: Synthetic oligonucleotide
ugucuaagcuccacugggc

SEQ ID NO: 123068 - RNA, 19 nt, Artificial Sequence
  Description of Artificial Sequence: Synthetic oligonucleotide
guuacuucguaguaccaca

SEQ ID NO: 123069 - RNA, 19 nt, Artificial Sequence
  Description of Artificial Sequence: Synthetic oligonucleotide
ugacuuucacuagcuaccg

SEQ ID NO: 123070 - RNA, 19 nt, Artificial Sequence
  Description of Artificial Sequence: Synthetic oligonucleotide
aacaugugucaugaaauau

SEQ ID NO: 123071 - RNA, 19 nt, Artificial Sequence
  Description of Artificial Sequence: Synthetic oligonucleotide
aaaaccuacugugucuccu

SEQ ID NO: 123072 - RNA, 19 nt, Artificial Sequence
  Description of Artificial Sequence: Synthetic oligonucleotide
cuuucacuagcuaccgggc

SEQ ID NO: 123073 - RNA, 19 nt, Artificial Sequence
  Description of Artificial Sequence: Synthetic oligonucleotide
uccaugcuuaacacaccgg

SEQ ID NO: 123074 - RNA, 19 nt, Artificial Sequence
  Description of Artificial Sequence: Synthetic oligonucleotide
auauauauauauauauaua

SEQ ID NO: 123075 - RNA, 19 nt, Artificial Sequence
  Description of Artificial Sequence: Synthetic oligonucleotide
auauauauauauauauauu

SEQ ID NO: 123076 - RNA, 19 nt, Artificial Sequence
  Description of Artificial Sequence: Synthetic oligonucleotide
uaacucuaucuguauauau

SEQ ID NO: 123077 - RNA, 19 nt, Artificial Sequence
  Description of Artificial Sequence: Synthetic oligonucleotide
cauggcccuaauauuauuc

SEQ ID NO: 123078 - RNA, 19 nt, Artificial Sequence
  Description of Artificial Sequence: Synthetic oligonucleotide
acucacacuguugauauga

SEQ ID NO: 123079 - RNA, 19 nt, Artificial Sequence
  Description of Artificial Sequence: Synthetic oligonucleotide
aagucuugcagugcaauau

SEQ ID NO: 123080 - RNA, 19 nt, Artificial Sequence
  Description of Artificial Sequence: Synthetic oligonucleotide
aauggaucuuccaauggaa

SEQ ID NO: 123081 - RNA, 19 nt, Artificial Sequence
  Description of Artificial Sequence: Synthetic oligonucleotide
guaccaaaucagcugccgg

SEQ ID NO: 123082 - RNA, 19 nt, Artificial Sequence
  Description of Artificial Sequence: Synthetic oligonucleotide
uguuacuucguaguaccac

SEQ ID NO: 123083 - RNA, 19 nt, Artificial Sequence
  Description of Artificial Sequence: Synthetic oligonucleotide
uuacuucguaguaccacac

SEQ ID NO: 123084 - RNA, 19 nt, Artificial Sequence
  Description of Artificial Sequence: Synthetic oligonucleotide
augcuuaacacaccgguuu

SEQ ID NO: 123085 - RNA, 19 nt, Artificial Sequence
  Description of Artificial Sequence: Synthetic oligonucleotide
ugaccugugugaugcuacg

SEQ ID NO: 123086 - RNA, 19 nt, Artificial Sequence
  Description of Artificial Sequence: Synthetic oligonucleotide
uacaaucuguacaccuucu

SEQ ID NO: 123087 - RNA, 19 nt, Artificial Sequence
  Description of Artificial Sequence: Synthetic oligonucleotide
ucguagguuaguugucugc

SEQ ID NO: 123088 - RNA, 19 nt, Artificial Sequence
  Description of Artificial Sequence: Synthetic oligonucleotide
uacuucguaguaccacacc

SEQ ID NO: 123089 - RNA, 19 nt, Artificial Sequence
  Description of Artificial Sequence: Synthetic oligonucleotide
gguacuaaaacucgauaga

SEQ ID NO: 123090 - RNA, 19 nt, Artificial Sequence
  Description of Artificial Sequence: Synthetic oligonucleotide
agauugucuaagcuccacu

SEQ ID NO: 123091 - RNA, 19 nt, Artificial Sequence
  Description of Artificial Sequence: Synthetic oligonucleotide
ggcuauaaguuucaaugug

SEQ ID NO: 123092 - RNA, 19 nt, Artificial Sequence
  Description of Artificial Sequence: Synthetic oligonucleotide
gaacguuccggcugcuucc

SEQ ID NO: 123093 - RNA, 19 nt, Artificial Sequence
  Description of Artificial Sequence: Synthetic oligonucleotide
ugucaauuucuggagugca

SEQ ID NO: 123094 - RNA, 19 nt, Artificial Sequence
  Description of Artificial Sequence: Synthetic oligonucleotide
agguuaguugucugccuuc

SEQ ID NO: 123095 - RNA, 19 nt, Artificial Sequence
  Description of Artificial Sequence: Synthetic oligonucleotide
cacaggaguacucaucauc

SEQ ID NO: 123096 - RNA, 19 nt, Artificial Sequence
  Description of Artificial Sequence: Synthetic oligonucleotide
ucuagacacuauuucuuua

SEQ ID NO: 123097 - RNA, 19 nt, Artificial Sequence
  Description of Artificial Sequence: Synthetic oligonucleotide
ugcggauguguuccuaugu

SEQ ID NO: 123098 - RNA, 19 nt, Artificial Sequence
  Description of Artificial Sequence: Synthetic oligonucleotide
aaguaaaccuaugcuugca

SEQ ID NO: 123099 - RNA, 19 nt, Artificial Sequence
  Description of Artificial Sequence: Synthetic oligonucleotide
caaaacguggguacuaaaa

SEQ ID NO: 123100 - RNA, 19 nt, Artificial Sequence
  Description of Artificial Sequence: Synthetic oligonucleotide
aucuacaagaguccguauu

SEQ ID NO: 123101 - RNA, 19 nt, Artificial Sequence
  Description of Artificial Sequence: Synthetic oligonucleotide
uuguaccaaaucagcugcc

SEQ ID NO: 123102 - RNA, 19 nt, Artificial Sequence
  Description of Artificial Sequence: Synthetic oligonucleotide
acgucccuagcccguaggc

SEQ ID NO: 123103 - RNA, 19 nt, Artificial Sequence
  Description of Artificial Sequence: Synthetic oligonucleotide
acuuuaauauauauauaua

SEQ ID NO: 123104 - RNA, 19 nt, Artificial Sequence
  Description of Artificial Sequence: Synthetic oligonucleotide
gacuuucacuagcuaccgg

SEQ ID NO: 123105 - RNA, 19 nt, Artificial Sequence
  Description of Artificial Sequence: Synthetic oligonucleotide
aggggacaccgacagcggc

SEQ ID NO: 123106 - RNA, 19 nt, Artificial Sequence
  Description of Artificial Sequence: Synthetic oligonucleotide
aaugugaguacaacugguu

SEQ ID NO: 123107 - RNA, 19 nt, Artificial Sequence
  Description of Artificial Sequence: Synthetic oligonucleotide
ucggucacuaauacuggau

SEQ ID NO: 123108 - RNA, 19 nt, Artificial Sequence
  Description of Artificial Sequence: Synthetic oligonucleotide
uucgucuaguaacaagguu

SEQ ID NO: 123109 - RNA, 19 nt, Artificial Sequence
  Description of Artificial Sequence: Synthetic oligonucleotide
gaacucacacuguugauau

SEQ ID NO: 123110 - RNA, 19 nt, Artificial Sequence
  Description of Artificial Sequence: Synthetic oligonucleotide
ucccaauggaucuuccaau

SEQ ID NO: 123111 - RNA, 19 nt, Artificial Sequence
  Description of Artificial Sequence: Synthetic oligonucleotide
acuguagacuaagacacaa

SEQ ID NO: 123112 - RNA, 19 nt, Artificial Sequence
  Description of Artificial Sequence: Synthetic oligonucleotide
guacuaaaacucgauagaa

SEQ ID NO: 123113 - RNA, 19 nt, Artificial Sequence
  Description of Artificial Sequence: Synthetic oligonucleotide
caucuuuagugggcaaugg

SEQ ID NO: 123114 - RNA, 19 nt, Artificial Sequence
  Description of Artificial Sequence: Synthetic oligonucleotide
aaaccuacugugucuccuu

SEQ ID NO: 123115 - RNA, 19 nt, Artificial Sequence
  Description of Artificial Sequence: Synthetic oligonucleotide
uuaacccacacacgcuguc

SEQ ID NO: 123116 - RNA, 19 nt, Artificial Sequence
  Description of Artificial Sequence: Synthetic oligonucleotide
ucucguagguuaguugucu

SEQ ID NO: 123117 - RNA, 19 nt, Artificial Sequence
  Description of Artificial Sequence: Synthetic oligonucleotide
uccguauuaccgccagugu

SEQ ID NO: 123118 - RNA, 19 nt, Artificial Sequence
  Description of Artificial Sequence: Synthetic oligonucleotide
guuccuauguuuggccggg

SEQ ID NO: 123119 - RNA, 19 nt, Artificial Sequence
  Description of Artificial Sequence: Synthetic oligonucleotide
gcaaauuacugcauucacc

SEQ ID NO: 123120 - RNA, 19 nt, Artificial Sequence
  Description of Artificial Sequence: Synthetic oligonucleotide
ucguaguaccacaccccag

SEQ ID NO: 123121 - RNA, 19 nt, Artificial Sequence
  Description of Artificial Sequence: Synthetic oligonucleotide
aauggacauucgucuagua

SEQ ID NO: 123122 - RNA, 19 nt, Artificial Sequence
  Description of Artificial Sequence: Synthetic oligonucleotide
gggcuaaguaaaccuaugc

SEQ ID NO: 123123 - RNA, 19 nt, Artificial Sequence
  Description of Artificial Sequence: Synthetic oligonucleotide
ggauuagauucuaagagaa

SEQ ID NO: 123124 - RNA, 19 nt, Artificial Sequence
  Description of Artificial Sequence: Synthetic oligonucleotide
ggcauuguaccaaaucagc

SEQ ID NO: 123125 - RNA, 19 nt, Artificial Sequence
  Description of Artificial Sequence: Synthetic oligonucleotide
gagugcaucuuuagugggc

SEQ ID NO: 123126 - RNA, 19 nt, Artificial Sequence
  Description of Artificial Sequence: Synthetic oligonucleotide
gauucagagauagucaauu

SEQ ID NO: 123127 - RNA, 19 nt, Artificial Sequence
  Description of Artificial Sequence: Synthetic oligonucleotide
aguggcaccuguagucccc

SEQ ID NO: 123128 - RNA, 19 nt, Artificial Sequence
  Description of Artificial Sequence: Synthetic oligonucleotide
aacucgauagaaacaccau

SEQ ID NO: 123129 - RNA, 19 nt, Artificial Sequence
  Description of Artificial Sequence: Synthetic oligonucleotide
gacgucccuagcccguagg

SEQ ID NO: 123130 - RNA, 19 nt, Artificial Sequence
  Description of Artificial Sequence: Synthetic oligonucleotide
uucucguagguuaguuguc

SEQ ID NO: 123131 - RNA, 19 nt, Artificial Sequence
  Description of Artificial Sequence: Synthetic oligonucleotide
agucggucacuaauacugg

SEQ ID NO: 123132 - RNA, 19 nt, Artificial Sequence
  Description of Artificial Sequence: Synthetic oligonucleotide
uggcccuaauauuauucaa

SEQ ID NO: 123133 - RNA, 19 nt, Artificial Sequence
  Description of Artificial Sequence: Synthetic oligonucleotide
uuuuccgagugcuguuuuc

SEQ ID NO: 123134 - RNA, 19 nt, Artificial Sequence
  Description of Artificial Sequence: Synthetic oligonucleotide
ccgagugcuguuuucauac

SEQ ID NO: 123135 - RNA, 19 nt, Artificial Sequence
  Description of Artificial Sequence: Synthetic oligonucleotide
cacuguuacuucguaguac

SEQ ID NO: 123136 - RNA, 19 nt, Artificial Sequence
  Description of Artificial Sequence: Synthetic oligonucleotide
augaugcuuaacccacaca

SEQ ID NO: 123137 - RNA, 19 nt, Artificial Sequence
  Description of Artificial Sequence: Synthetic oligonucleotide
acaaucauuuagauaguuu

SEQ ID NO: 123138 - RNA, 19 nt, Artificial Sequence
  Description of Artificial Sequence: Synthetic oligonucleotide
uccugauacgguagaugaa

SEQ ID NO: 123139 - RNA, 19 nt, Artificial Sequence
  Description of Artificial Sequence: Synthetic oligonucleotide
uugcaguaaugaccugugu

SEQ ID NO: 123140 - RNA, 19 nt, Artificial Sequence
  Description of Artificial Sequence: Synthetic oligonucleotide
cucguagguuaguugucug

SEQ ID NO: 123141 - RNA, 19 nt, Artificial Sequence
  Description of Artificial Sequence: Synthetic oligonucleotide
gucccuagcccguaggcuc

SEQ ID NO: 123142 - RNA, 19 nt, Artificial Sequence
  Description of Artificial Sequence: Synthetic oligonucleotide
ucccuagcccguaggcucc

SEQ ID NO: 123143 - RNA, 19 nt, Artificial Sequence
  Description of Artificial Sequence: Synthetic oligonucleotide
caugaggugagaucuucaa

SEQ ID NO: 123144 - RNA, 19 nt, Artificial Sequence
  Description of Artificial Sequence: Synthetic oligonucleotide
cccaaugccguauccuucg

SEQ ID NO: 123145 - RNA, 19 nt, Artificial Sequence
  Description of Artificial Sequence: Synthetic oligonucleotide
auucgucuaguaacaaggu

SEQ ID NO: 123146 - RNA, 19 nt, Artificial Sequence
  Description of Artificial Sequence: Synthetic oligonucleotide
auaacucuaucuguauaua

SEQ ID NO: 123147 - RNA, 19 nt, Artificial Sequence
  Description of Artificial Sequence: Synthetic oligonucleotide
gagauugucuaagcuccac

SEQ ID NO: 123148 - RNA, 19 nt, Artificial Sequence
  Description of Artificial Sequence: Synthetic oligonucleotide
uauguuuggccggguggcc

SEQ ID NO: 123149 - RNA, 19 nt, Artificial Sequence
  Description of Artificial Sequence: Synthetic oligonucleotide
uaucuacaagaguccguau

SEQ ID NO: 123150 - RNA, 19 nt, Artificial Sequence
  Description of Artificial Sequence: Synthetic oligonucleotide
auuuuccgagugcuguuuu

SEQ ID NO: 123151 - RNA, 19 nt, Artificial Sequence
  Description of Artificial Sequence: Synthetic oligonucleotide
cacaccgguuucucugacc

SEQ ID NO: 123152 - RNA, 19 nt, Artificial Sequence
  Description of Artificial Sequence: Synthetic oligonucleotide
gaugcuacguuaauagauu

SEQ ID NO: 123153 - RNA, 19 nt, Artificial Sequence
  Description of Artificial Sequence: Synthetic oligonucleotide
ugcagcguacacucucaaa

SEQ ID NO: 123154 - RNA, 19 nt, Artificial Sequence
  Description of Artificial Sequence: Synthetic oligonucleotide
gacccuugucacuuggugu

SEQ ID NO: 123155 - RNA, 19 nt, Artificial Sequence
  Description of Artificial Sequence: Synthetic oligonucleotide
ucggcagauacaggaauua

SEQ ID NO: 123156 - RNA, 19 nt, Artificial Sequence
  Description of Artificial Sequence: Synthetic oligonucleotide
cucgagagucaccagcaga

SEQ ID NO: 123157 - RNA, 19 nt, Artificial Sequence
  Description of Artificial Sequence: Synthetic oligonucleotide
cugucaggaaggcguaauc

SEQ ID NO: 123158 - RNA, 19 nt, Artificial Sequence
  Description of Artificial Sequence: Synthetic oligonucleotide
caaugccguauccuucgug

SEQ ID NO: 123159 - RNA, 19 nt, Artificial Sequence
  Description of Artificial Sequence: Synthetic oligonucleotide
cugauacgguagaugaaaa

SEQ ID NO: 123160 - RNA, 19 nt, Artificial Sequence
  Description of Artificial Sequence: Synthetic oligonucleotide
cuaaggugaccagucgguc

SEQ ID NO: 123161 - RNA, 19 nt, Artificial Sequence
  Description of Artificial Sequence: Synthetic oligonucleotide
cucggaagggugaccccag

SEQ ID NO: 123162 - RNA, 19 nt, Artificial Sequence
  Description of Artificial Sequence: Synthetic oligonucleotide
cauccccaaugccguaucc

SEQ ID NO: 123163 - RNA, 19 nt, Artificial Sequence
  Description of Artificial Sequence: Synthetic oligonucleotide
acaccgacagcggcgcgac

SEQ ID NO: 123164 - RNA, 19 nt, Artificial Sequence
  Description of Artificial Sequence: Synthetic oligonucleotide
accgguuucucugaccaau

SEQ ID NO: 123165 - RNA, 19 nt, Artificial Sequence
  Description of Artificial Sequence: Synthetic oligonucleotide
ugccguauccuucgugguu

SEQ ID NO: 123166 - RNA, 19 nt, Artificial Sequence
  Description of Artificial Sequence: Synthetic oligonucleotide
gucggucacuaauacugga

SEQ ID NO: 123167 - RNA, 19 nt, Artificial Sequence
  Description of Artificial Sequence: Synthetic oligonucleotide
ggaauuacccauaguagua

SEQ ID NO: 123168 - RNA, 19 nt, Artificial Sequence
  Description of Artificial Sequence: Synthetic oligonucleotide
ucucuucaacaugugucau

SEQ ID NO: 123169 - RNA, 19 nt, Artificial Sequence
  Description of Artificial Sequence: Synthetic oligonucleotide
augccguauccuucguggu

SEQ ID NO: 123170 - RNA, 19 nt, Artificial Sequence
  Description of Artificial Sequence: Synthetic oligonucleotide
ccguauuaccgccagugug

SEQ ID NO: 123171 - RNA, 19 nt, Artificial Sequence
  Description of Artificial Sequence: Synthetic oligonucleotide
acaaucaaaugaacccaau

SEQ ID NO: 123172 - RNA, 19 nt, Artificial Sequence
  Description of Artificial Sequence: Synthetic oligonucleotide
gucucgaguagcccagcca

SEQ ID NO: 123173 - RNA, 19 nt, Artificial Sequence
  Description of Artificial Sequence: Synthetic oligonucleotide
caagguuauaacagcuggu

SEQ ID NO: 123174 - RNA, 19 nt, Artificial Sequence
  Description of Artificial Sequence: Synthetic oligonucleotide
acgucuccaaggggcuucc

SEQ ID NO: 123175 - RNA, 19 nt, Artificial Sequence
  Description of Artificial Sequence: Synthetic oligonucleotide
agugcagcguacacucuca

SEQ ID NO: 123176 - RNA, 19 nt, Artificial Sequence
  Description of Artificial Sequence: Synthetic oligonucleotide
agacaaucauuuagauagu

SEQ ID NO: 123177 - RNA, 19 nt, Artificial Sequence
  Description of Artificial Sequence: Synthetic oligonucleotide
uugcugucucgaguagccc

SEQ ID NO: 123178 - RNA, 19 nt, Artificial Sequence
  Description of Artificial Sequence: Synthetic oligonucleotide
cuguagacuaagacacaaa

SEQ ID NO: 123179 - RNA, 19 nt, Artificial Sequence
  Description of Artificial Sequence: Synthetic oligonucleotide
uuaccgccaguguguccag

SEQ ID NO: 123180 - RNA, 19 nt, Artificial Sequence
  Description of Artificial Sequence: Synthetic oligonucleotide
accuuguguuaaacaauca

SEQ ID NO: 123181 - RNA, 19 nt, Artificial Sequence
  Description of Artificial Sequence: Synthetic oligonucleotide
gccauuucauguaauguaa

SEQ ID NO: 123182 - RNA, 19 nt, Artificial Sequence
  Description of Artificial Sequence: Synthetic oligonucleotide
gauuagauucuaagagaau

SEQ ID NO: 123183 - RNA, 19 nt, Artificial Sequence
  Description of Artificial Sequence: Synthetic oligonucleotide
auagacgucccuagcccgu

SEQ ID NO: 123184 - RNA, 19 nt, Artificial Sequence
  Description of Artificial Sequence: Synthetic oligonucleotide
gacauucgucuaguaacaa

SEQ ID NO: 123185 - RNA, 19 nt, Artificial Sequence
  Description of Artificial Sequence: Synthetic oligonucleotide
caagucuugcagugcaaua

SEQ ID NO: 123186 - RNA, 19 nt, Artificial Sequence
  Description of Artificial Sequence: Synthetic oligonucleotide
guauuaccgccaguguguc

SEQ ID NO: 123187 - RNA, 19 nt, Artificial Sequence
  Description of Artificial Sequence: Synthetic oligonucleotide
cguagguuaguugucugcc

SEQ ID NO: 123188 - RNA, 19 nt, Artificial Sequence
  Description of Artificial Sequence: Synthetic oligonucleotide
agacgucccuagcccguag

SEQ ID NO: 123189 - RNA, 19 nt, Artificial Sequence
  Description of Artificial Sequence: Synthetic oligonucleotide
cagcacuaacccauccaca

SEQ ID NO: 123190 - RNA, 19 nt, Artificial Sequence
  Description of Artificial Sequence: Synthetic oligonucleotide
gggcaauggacauucgucu

SEQ ID NO: 123191 - RNA, 19 nt, Artificial Sequence
  Description of Artificial Sequence: Synthetic oligonucleotide
ggggacaccgacagcggcg

SEQ ID NO: 123192 - RNA, 19 nt, Artificial Sequence
  Description of Artificial Sequence: Synthetic oligonucleotide
gccguauccuucgugguug

SEQ ID NO: 123193 - RNA, 19 nt, Artificial Sequence
  Description of Artificial Sequence: Synthetic oligonucleotide
cgguagaugaaaagacuug

SEQ ID NO: 123194 - RNA, 19 nt, Artificial Sequence
  Description of Artificial Sequence: Synthetic oligonucleotide
agcauggcccuaauauuau

SEQ ID NO: 123195 - RNA, 19 nt, Artificial Sequence
  Description of Artificial Sequence: Synthetic oligonucleotide
cuccgacccaggcucuagc

SEQ ID NO: 123196 - RNA, 19 nt, Artificial Sequence
  Description of Artificial Sequence: Synthetic oligonucleotide
cuuggccucaaaaggaauu

SEQ ID NO: 123197 - RNA, 19 nt, Artificial Sequence
  Description of Artificial Sequence: Synthetic oligonucleotide
ucuccucggaagggugacc

SEQ ID NO: 123198 - RNA, 19 nt, Artificial Sequence
  Description of Artificial Sequence: Synthetic oligonucleotide
gaccagucggucacuaaua

SEQ ID NO: 123199 - RNA, 19 nt, Artificial Sequence
  Description of Artificial Sequence: Synthetic oligonucleotide
cacaaaacguggguacuaa

SEQ ID NO: 123200 - RNA, 19 nt, Artificial Sequence
  Description of Artificial Sequence: Synthetic oligonucleotide
ccugauacgguagaugaaa

SEQ ID NO: 123201 - RNA, 19 nt, Artificial Sequence
  Description of Artificial Sequence: Synthetic oligonucleotide
cuuaacccacacacgcugu

SEQ ID NO: 123202 - RNA, 19 nt, Artificial Sequence
  Description of Artificial Sequence: Synthetic oligonucleotide
cugggcuaaguaaaccuau

SEQ ID NO: 123203 - RNA, 19 nt, Artificial Sequence
  Description of Artificial Sequence: Synthetic oligonucleotide
gguuggcuccuagugucag

SEQ ID NO: 123204 - RNA, 19 nt, Artificial Sequence
  Description of Artificial Sequence: Synthetic oligonucleotide
ggucccaauggaucuucca

SEQ ID NO: 123205 - RNA, 19 nt, Artificial Sequence
  Description of Artificial Sequence: Synthetic oligonucleotide
uagggagguuccugaucau

SEQ ID NO: 123206 - RNA, 19 nt, Artificial Sequence
  Description of Artificial Sequence: Synthetic oligonucleotide
cagagauagucaauuuauu

SEQ ID NO: 123207 - RNA, 19 nt, Artificial Sequence
  Description of Artificial Sequence: Synthetic oligonucleotide
cuagcccguaggcucccuc

SEQ ID NO: 123208 - RNA, 19 nt, Artificial Sequence
  Description of Artificial Sequence: Synthetic oligonucleotide
caugcuuaacacaccgguu

SEQ ID NO: 123209 - RNA, 19 nt, Artificial Sequence
  Description of Artificial Sequence: Synthetic oligonucleotide
agggagguuccugaucauu

SEQ ID NO: 123210 - RNA, 19 nt, Artificial Sequence
  Description of Artificial Sequence: Synthetic oligonucleotide
acccacacacgcugucaau

SEQ ID NO: 123211 - RNA, 19 nt, Artificial Sequence
  Description of Artificial Sequence: Synthetic oligonucleotide
cagagcgaacagcaguucu

SEQ ID NO: 123212 - RNA, 19 nt, Artificial Sequence
  Description of Artificial Sequence: Synthetic oligonucleotide
cacuugcaguaaugaccug

SEQ ID NO: 123213 - RNA, 19 nt, Artificial Sequence
  Description of Artificial Sequence: Synthetic oligonucleotide
gggcuaugugcuccucgag

SEQ ID NO: 123214 - RNA, 19 nt, Artificial Sequence
  Description of Artificial Sequence: Synthetic oligonucleotide
agccaacuugacgcuucag

SEQ ID NO: 123215 - RNA, 19 nt, Artificial Sequence
  Description of Artificial Sequence: Synthetic oligonucleotide
caugcuacuucuccauuuu

SEQ ID NO: 123216 - RNA, 19 nt, Artificial Sequence
  Description of Artificial Sequence: Synthetic oligonucleotide
gcaaguuggauuagauucu

SEQ ID NO: 123217 - RNA, 19 nt, Artificial Sequence
  Description of Artificial Sequence: Synthetic oligonucleotide
ccaugcuuaacacaccggu

SEQ ID NO: 123218 - RNA, 19 nt, Artificial Sequence
  Description of Artificial Sequence: Synthetic oligonucleotide
auccuucgugguugagaaa

SEQ ID NO: 123219 - RNA, 19 nt, Artificial Sequence
  Description of Artificial Sequence: Synthetic oligonucleotide
uuuggccggguggccugag

SEQ ID NO: 123220 - RNA, 19 nt, Artificial Sequence
  Description of Artificial Sequence: Synthetic oligonucleotide
ccugcuaguuucucagcca

SEQ ID NO: 123221 - RNA, 19 nt, Artificial Sequence
  Description of Artificial Sequence: Synthetic oligonucleotide
uagacgucccuagcccgua

SEQ ID NO: 123222 - RNA, 19 nt, Artificial Sequence
  Description of Artificial Sequence: Synthetic oligonucleotide
gcaugacaccagaagugac

SEQ ID NO: 123223 - RNA, 19 nt, Artificial Sequence
  Description of Artificial Sequence: Synthetic oligonucleotide
cguauuaccgccagugugu

SEQ ID NO: 123224 - RNA, 19 nt, Artificial Sequence
  Description of Artificial Sequence: Synthetic oligonucleotide
caccggagggaggggacac

SEQ ID NO: 123225 - RNA, 19 nt, Artificial Sequence
  Description of Artificial Sequence: Synthetic oligonucleotide
ccugugugaugcuacguua

SEQ ID NO: 123226 - RNA, 19 nt, Artificial Sequence
  Description of Artificial Sequence: Synthetic oligonucleotide
gcuaaauuucauagauggu

SEQ ID NO: 123227 - RNA, 19 nt, Artificial Sequence
  Description of Artificial Sequence: Synthetic oligonucleotide
gccaugaggugagaucuuc

SEQ ID NO: 123228 - RNA, 19 nt, Artificial Sequence
  Description of Artificial Sequence: Synthetic oligonucleotide
ccgggccacgucuccaagg

SEQ ID NO: 123229 - RNA, 19 nt, Artificial Sequence
  Description of Artificial Sequence: Synthetic oligonucleotide
cguaaucauuaaaagugcu

SEQ ID NO: 123230 - RNA, 19 nt, Artificial Sequence
  Description of Artificial Sequence: Synthetic oligonucleotide
ccccaaugccguauccuuc

SEQ ID NO: 123231 - RNA, 19 nt, Artificial Sequence
  Description of Artificial Sequence: Synthetic oligonucleotide
gguuaguugucugccuucu

SEQ ID NO: 123232 - RNA, 19 nt, Artificial Sequence
  Description of Artificial Sequence: Synthetic oligonucleotide
gugcagcguacacucucaa

SEQ ID NO: 123233 - RNA, 19 nt, Artificial Sequence
  Description of Artificial Sequence: Synthetic oligonucleotide
gcaugcuacuucuccauuu

SEQ ID NO: 123234 - RNA, 19 nt, Artificial Sequence
  Description of Artificial Sequence: Synthetic oligonucleotide
gcccaaccaaagacaauca

SEQ ID NO: 123235 - RNA, 19 nt, Artificial Sequence
  Description of Artificial Sequence: Synthetic oligonucleotide
caaaggggaacacccucuu

SEQ ID NO: 123236 - RNA, 19 nt, Artificial Sequence
  Description of Artificial Sequence: Synthetic oligonucleotide
gccccaguccggucucucc

SEQ ID NO: 123237 - RNA, 19 nt, Artificial Sequence
  Description of Artificial Sequence: Synthetic oligonucleotide
ggacaccgacagcggcgcg

SEQ ID NO: 123238 - RNA, 19 nt, Artificial Sequence
  Description of Artificial Sequence: Synthetic oligonucleotide
gcacaaaacguggguacua

SEQ ID NO: 123239 - RNA, 19 nt, Artificial Sequence
  Description of Artificial Sequence: Synthetic oligonucleotide
ccauuucauguaauguaau

SEQ ID NO: 123240 - RNA, 19 nt, Artificial Sequence
  Description of Artificial Sequence: Synthetic oligonucleotide
cccaccggagggaggggac

SEQ ID NO: 123241 - RNA, 19 nt, Artificial Sequence
  Description of Artificial Sequence: Synthetic oligonucleotide
cucgaguagcccagccaau

SEQ ID NO: 123242 - RNA, 19 nt, Artificial Sequence
  Description of Artificial Sequence: Synthetic oligonucleotide
ccaauggaauaacucugau

SEQ ID NO: 123243 - RNA, 19 nt, Artificial Sequence
  Description of Artificial Sequence: Synthetic oligonucleotide
gguggguauuugaaugguu

SEQ ID NO: 123244 - RNA, 19 nt, Artificial Sequence
  Description of Artificial Sequence: Synthetic oligonucleotide
ggcaugcuacuucuccauu

SEQ ID NO: 123245 - RNA, 19 nt, Artificial Sequence
  Description of Artificial Sequence: Synthetic oligonucleotide
ccuucgugguugagaaacu

SEQ ID NO: 123246 - RNA, 19 nt, Artificial Sequence
  Description of Artificial Sequence: Synthetic oligonucleotide
cccugcccggagccggccg

SEQ ID NO: 123247 - RNA, 19 nt, Artificial Sequence
  Description of Artificial Sequence: Synthetic oligonucleotide
gcauggcccuaauauuauu

SEQ ID NO: 123248 - RNA, 19 nt, Artificial Sequence
  Description of Artificial Sequence: Synthetic oligonucleotide
ccguauccuucgugguuga

SEQ ID NO: 123249 - RNA, 19 nt, Artificial Sequence
  Description of Artificial Sequence: Synthetic oligonucleotide
ccauggcuauaaguuucaa

SEQ ID NO: 123250 - RNA, 19 nt, Artificial Sequence
  Description of Artificial Sequence: Synthetic oligonucleotide
cccuagcccguaggcuccc

SEQ ID NO: 123251 - RNA, 19 nt, Artificial Sequence
  Description of Artificial Sequence: Synthetic oligonucleotide
cccgagguuggcuccuagu

SEQ ID NO: 123252 - RNA, 19 nt, Artificial Sequence
  Description of Artificial Sequence: Synthetic oligonucleotide
ccaccggagggaggggaca

SEQ ID NO: 123253 - RNA, 19 nt, Artificial Sequence
  Description of Artificial Sequence: Synthetic oligonucleotide
ccaaugccguauccuucgu

SEQ ID NO: 123254 - RNA, 19 nt, Artificial Sequence
  Description of Artificial Sequence: Synthetic oligonucleotide
gggccucggaggagaacgu

SEQ ID NO: 123255 - RNA, 19 nt, Artificial Sequence
  Description of Artificial Sequence: Synthetic oligonucleotide
ggcuuacuucuggcauugu

SEQ ID NO: 123256 - RNA, 19 nt, Artificial Sequence
  Description of Artificial Sequence: Synthetic oligonucleotide
ggccaugaggugagaucuu

SEQ ID NO: 123257 - RNA, 19 nt, Artificial Sequence
  Description of Artificial Sequence: Synthetic oligonucleotide
ggccucggaggagaacguu

SEQ ID NO: 123258 - RNA, 19 nt, Artificial Sequence
  Description of Artificial Sequence: Synthetic oligonucleotide
cgucccuagcccguaggcu

SEQ ID NO: 123259 - RNA, 19 nt, Artificial Sequence
  Description of Artificial Sequence: Synthetic oligonucleotide
caccgacagcggcgcgacu

SEQ ID NO: 123260 - RNA, 19 nt, Artificial Sequence
  Description of Artificial Sequence: Synthetic oligonucleotide
aacugaucgacucagcucc

SEQ ID NO: 123261 - RNA, 19 nt, Artificial Sequence
  Description of Artificial Sequence: Synthetic oligonucleotide
aaacuaaugaccuuucuag

SEQ ID NO: 123262 - RNA, 19 nt, Artificial Sequence
  Description of Artificial Sequence: Synthetic oligonucleotide
aggaauacaaucccaaccc

SEQ ID NO: 123263 - RNA, 19 nt, Artificial Sequence
  Description of Artificial Sequence: Synthetic oligonucleotide
aacgauuaaaauaagcuuc

SEQ ID NO: 123264 - RNA, 19 nt, Artificial Sequence
  Description of Artificial Sequence: Synthetic oligonucleotide
agcucaagcaaacugaucg

SEQ ID NO: 123265 - RNA, 19 nt, Artificial Sequence
  Description of Artificial Sequence: Synthetic oligonucleotide
accgaaaucauucuccugc

SEQ ID NO: 123266 - RNA, 19 nt, Artificial Sequence
  Description of Artificial Sequence: Synthetic oligonucleotide
acaauuaccauucucaaga

SEQ ID NO: 123267 - RNA, 19 nt, Artificial Sequence
  Description of Artificial Sequence: Synthetic oligonucleotide
aaaguugucacaauauccg

SEQ ID NO: 123268 - RNA, 19 nt, Artificial Sequence
  Description of Artificial Sequence: Synthetic oligonucleotide
aauauggaaccuugguccc

SEQ ID NO: 123269 - RNA, 19 nt, Artificial Sequence
  Description of Artificial Sequence: Synthetic oligonucleotide
ugcgaaacgauuaaaauaa

SEQ ID NO: 123270 - RNA, 19 nt, Artificial Sequence
  Description of Artificial Sequence: Synthetic oligonucleotide
ugguuaaccagacugcugg

SEQ ID NO: 123271 - RNA, 19 nt, Artificial Sequence
  Description of Artificial Sequence: Synthetic oligonucleotide
uuuggugcccuacacacgg

SEQ ID NO: 123272 - RNA, 19 nt, Artificial Sequence
  Description of Artificial Sequence: Synthetic oligonucleotide
uuugcguaaagcaaagucu

SEQ ID NO: 123273 - RNA, 19 nt, Artificial Sequence
  Description of Artificial Sequence: Synthetic oligonucleotide
aaagagaucaguacuaaca

SEQ ID NO: 123274 - RNA, 19 nt, Artificial Sequence
  Description of Artificial Sequence: Synthetic oligonucleotide
aaacgauuaaaauaagcuu

SEQ ID NO: 123275 - RNA, 19 nt, Artificial Sequence
  Description of Artificial Sequence: Synthetic oligonucleotide
ugucaucuaagucuggcag

SEQ ID NO: 123276 - RNA, 19 nt, Artificial Sequence
  Description of Artificial Sequence: Synthetic oligonucleotide
gaaguugucgucuuuguac

SEQ ID NO: 123277 - RNA, 19 nt, Artificial Sequence
  Description of Artificial Sequence: Synthetic oligonucleotide
uaaauaucggagaagccgu

SEQ ID NO: 123278 - RNA, 19 nt, Artificial Sequence
  Description of Artificial Sequence: Synthetic oligonucleotide
aauuuguauguacuaguga

SEQ ID NO: 123279 - RNA, 19 nt, Artificial Sequence
  Description of Artificial Sequence: Synthetic oligonucleotide
ucgacaaucagcuuccucu

SEQ ID NO: 123280 - RNA, 19 nt, Artificial Sequence
  Description of Artificial Sequence: Synthetic oligonucleotide
uuaagcuagaacuuucaac

SEQ ID NO: 123281 - RNA, 19 nt, Artificial Sequence
  Description of Artificial Sequence: Synthetic oligonucleotide
aaauaguaauuacgaguuc

SEQ ID NO: 123282 - RNA, 19 nt, Artificial Sequence
  Description of Artificial Sequence: Synthetic oligonucleotide
augaucgcauuacucaagc

SEQ ID NO: 123283 - RNA, 19 nt, Artificial Sequence
  Description of Artificial Sequence: Synthetic oligonucleotide
uacgaguucacaaauuuaa

SEQ ID NO: 123284 - RNA, 19 nt, Artificial Sequence
  Description of Artificial Sequence: Synthetic oligonucleotide
ugaucggcagcccucacgg

SEQ ID NO: 123285 - RNA, 19 nt, Artificial Sequence
  Description of Artificial Sequence: Synthetic oligonucleotide
aaauggggacuucugacug

SEQ ID NO: 123286 - RNA, 19 nt, Artificial Sequence
  Description of Artificial Sequence: Synthetic oligonucleotide
aagacguauuucgauauuc

SEQ ID NO: 123287 - RNA, 19 nt, Artificial Sequence
  Description of Artificial Sequence: Synthetic oligonucleotide
uccgaauaaucacugagcu

SEQ ID NO: 123288 - RNA, 19 nt, Artificial Sequence
  Description of Artificial Sequence: Synthetic oligonucleotide
uaucaaugggcuccaaugc

SEQ ID NO: 123289 - RNA, 19 nt, Artificial Sequence
  Description of Artificial Sequence: Synthetic oligonucleotide
uuuguauguacuagugagc

SEQ ID NO: 123290 - RNA, 19 nt, Artificial Sequence
  Description of Artificial Sequence: Synthetic oligonucleotide
aagagaucaguacuaacau

SEQ ID NO: 123291 - RNA, 19 nt, Artificial Sequence
  Description of Artificial Sequence: Synthetic oligonucleotide
uucucguucagauggcugg

SEQ ID NO: 123292 - RNA, 19 nt, Artificial Sequence
  Description of Artificial Sequence: Synthetic oligonucleotide
aggauuacaguugcgaaac

SEQ ID NO: 123293 - RNA, 19 nt, Artificial Sequence
  Description of Artificial Sequence: Synthetic oligonucleotide
uguaaagagaucaguacua

SEQ ID NO: 123294 - RNA, 19 nt, Artificial Sequence
  Description of Artificial Sequence: Synthetic oligonucleotide
acuuaucaguuugucaucc

SEQ ID NO: 123295 - RNA, 19 nt, Artificial Sequence
  Description of Artificial Sequence: Synthetic oligonucleotide
aagcgggucagucacaaca

SEQ ID NO: 123296 - RNA, 19 nt, Artificial Sequence
  Description of Artificial Sequence: Synthetic oligonucleotide
uuucacgacacaacagucc

SEQ ID NO: 123297 - RNA, 19 nt, Artificial Sequence
  Description of Artificial Sequence: Synthetic oligonucleotide
aagaugguggacaaauuag

SEQ ID NO: 123298 - RNA, 19 nt, Artificial Sequence
  Description of Artificial Sequence: Synthetic oligonucleotide
ugacacguugucauccucg

SEQ ID NO: 123299 - RNA, 19 nt, Artificial Sequence
  Description of Artificial Sequence: Synthetic oligonucleotide
aacccaauaagcgacaaaa

SEQ ID NO: 123300 - RNA, 19 nt, Artificial Sequence
  Description of Artificial Sequence: Synthetic oligonucleotide
aauaaucacugagcugggc

SEQ ID NO: 123301 - RNA, 19 nt, Artificial Sequence
  Description of Artificial Sequence: Synthetic oligonucleotide
cauuaucucacggucaucc

SEQ ID NO: 123302 - RNA, 19 nt, Artificial Sequence
  Description of Artificial Sequence: Synthetic oligonucleotide
acugauacaggauuacagu

SEQ ID NO: 123303 - RNA, 19 nt, Artificial Sequence
  Description of Artificial Sequence: Synthetic oligonucleotide
aaucaagcauucaauuauc

SEQ ID NO: 123304 - RNA, 19 nt, Artificial Sequence
  Description of Artificial Sequence: Synthetic oligonucleotide
cauauuaucucaugcacca

SEQ ID NO: 123305 - RNA, 19 nt, Artificial Sequence
  Description of Artificial Sequence: Synthetic oligonucleotide
ucgcuuaacucccugaggu

SEQ ID NO: 123306 - RNA, 19 nt, Artificial Sequence
  Description of Artificial Sequence: Synthetic oligonucleotide
agcaauggaaaacuaacau

SEQ ID NO: 123307 - RNA, 19 nt, Artificial Sequence
  Description of Artificial Sequence: Synthetic oligonucleotide
uugcgaaacgauuaaaaua

SEQ ID NO: 123308 - RNA, 19 nt, Artificial Sequence
  Description of Artificial Sequence: Synthetic oligonucleotide
auuacgaguucacaaauuu

SEQ ID NO: 123309 - RNA, 19 nt, Artificial Sequence
  Description of Artificial Sequence: Synthetic oligonucleotide
aucgaugauaucacgcugc

SEQ ID NO: 123310 - RNA, 19 nt, Artificial Sequence
  Description of Artificial Sequence: Synthetic oligonucleotide
guuugcguaaagcaaaguc

SEQ ID NO: 123311 - RNA, 19 nt, Artificial Sequence
  Description of Artificial Sequence: Synthetic oligonucleotide
ucacggaaugauuucacga

SEQ ID NO: 123312 - RNA, 19 nt, Artificial Sequence
  Description of Artificial Sequence: Synthetic oligonucleotide
uaauuacgaguucacaaau

SEQ ID NO: 123313 - RNA, 19 nt, Artificial Sequence
  Description of Artificial Sequence: Synthetic oligonucleotide
uacaguugcgaaacgauua

SEQ ID NO: 123314 - RNA, 19 nt, Artificial Sequence
  Description of Artificial Sequence: Synthetic oligonucleotide
auaacauaucaucaacuau

SEQ ID NO: 123315 - RNA, 19 nt, Artificial Sequence
  Description of Artificial Sequence: Synthetic oligonucleotide
cagauaauauggaaccuug

SEQ ID NO: 123316 - RNA, 19 nt, Artificial Sequence
  Description of Artificial Sequence: Synthetic oligonucleotide
auccgaauaaucacugagc

SEQ ID NO: 123317 - RNA, 19 nt, Artificial Sequence
  Description of Artificial Sequence: Synthetic oligonucleotide
uccaauacaggagugugca

SEQ ID NO: 123318 - RNA, 19 nt, Artificial Sequence
  Description of Artificial Sequence: Synthetic oligonucleotide
caacacuuaagcuagaacu

SEQ ID NO: 123319 - RNA, 19 nt, Artificial Sequence
  Description of Artificial Sequence: Synthetic oligonucleotide
uauacauggaagucuuagu

SEQ ID NO: 123320 - RNA, 19 nt, Artificial Sequence
  Description of Artificial Sequence: Synthetic oligonucleotide
auaguaauuacgaguucac

SEQ ID NO: 123321 - RNA, 19 nt, Artificial Sequence
  Description of Artificial Sequence: Synthetic oligonucleotide
ugguuuacaggcacggugu

SEQ ID NO: 123322 - RNA, 19 nt, Artificial Sequence
  Description of Artificial Sequence: Synthetic oligonucleotide
auacauggaagucuuaguu

SEQ ID NO: 123323 - RNA, 19 nt, Artificial Sequence
  Description of Artificial Sequence: Synthetic oligonucleotide
gaucgcauuacucaagcaa

SEQ ID NO: 123324 - RNA, 19 nt, Artificial Sequence
  Description of Artificial Sequence: Synthetic oligonucleotide
aaguugucacaauauccga

SEQ ID NO: 123325 - RNA, 19 nt, Artificial Sequence
  Description of Artificial Sequence: Synthetic oligonucleotide
uagaacuaaugcuuccagc

SEQ ID NO: 123326 - RNA, 19 nt, Artificial Sequence
  Description of Artificial Sequence: Synthetic oligonucleotide
ugaagacguauuucgauau

SEQ ID NO: 123327 - RNA, 19 nt, Artificial Sequence
  Description of Artificial Sequence: Synthetic oligonucleotide
uuaaccagacugcugggaa

SEQ ID NO: 123328 - RNA, 19 nt, Artificial Sequence
  Description of Artificial Sequence: Synthetic oligonucleotide
aguuuuagcaagagcucgc

SEQ ID NO: 123329 - RNA, 19 nt, Artificial Sequence
  Description of Artificial Sequence: Synthetic oligonucleotide
ugcuaucuaucccugggca

SEQ ID NO: 123330 - RNA, 19 nt, Artificial Sequence
  Description of Artificial Sequence: Synthetic oligonucleotide
uuaaacccaauaagcgaca

SEQ ID NO: 123331 - RNA, 19 nt, Artificial Sequence
  Description of Artificial Sequence: Synthetic oligonucleotide
uuuuggugcccuacacacg

SEQ ID NO: 123332 - RNA, 19 nt, Artificial Sequence
  Description of Artificial Sequence: Synthetic oligonucleotide
uugcguaaagcaaagucua

SEQ ID NO: 123333 - RNA, 19 nt, Artificial Sequence
  Description of Artificial Sequence: Synthetic oligonucleotide
ccucagauaauauggaacc

SEQ ID NO: 123334 - RNA, 19 nt, Artificial Sequence
  Description of Artificial Sequence: Synthetic oligonucleotide
guaauuacgaguucacaaa

SEQ ID NO: 123335 - RNA, 19 nt, Artificial Sequence
  Description of Artificial Sequence: Synthetic oligonucleotide
auaucggagaagccguuag

SEQ ID NO: 123336 - RNA, 19 nt, Artificial Sequence
  Description of Artificial Sequence: Synthetic oligonucleotide
aaagugaucggcagcccuc

SEQ ID NO: 123337 - RNA, 19 nt, Artificial Sequence
  Description of Artificial Sequence: Synthetic oligonucleotide
uaaagagaucaguacuaac

SEQ ID NO: 123338 - RNA, 19 nt, Artificial Sequence
  Description of Artificial Sequence: Synthetic oligonucleotide
cacggaaugauuucacgac

SEQ ID NO: 123339 - RNA, 19 nt, Artificial Sequence
  Description of Artificial Sequence: Synthetic oligonucleotide
uccauaucgucgugugugg

SEQ ID NO: 123340 - RNA, 19 nt, Artificial Sequence
  Description of Artificial Sequence: Synthetic oligonucleotide
caguuuuagcaagagcucg

SEQ ID NO: 123341 - RNA, 19 nt, Artificial Sequence
  Description of Artificial Sequence: Synthetic oligonucleotide
uuccaauacaggagugugc

SEQ ID NO: 123342 - RNA, 19 nt, Artificial Sequence
  Description of Artificial Sequence: Synthetic oligonucleotide
agacuaacaaaauguguaa

SEQ ID NO: 123343 - RNA, 19 nt, Artificial Sequence
  Description of Artificial Sequence: Synthetic oligonucleotide
uauaucaaugggcuccaau

SEQ ID NO: 123344 - RNA, 19 nt, Artificial Sequence
  Description of Artificial Sequence: Synthetic oligonucleotide
caggauaccgccgucauug

SEQ ID NO: 123345 - RNA, 19 nt, Artificial Sequence
  Description of Artificial Sequence: Synthetic oligonucleotide
gacucuucuaugcuuguuc

SEQ ID NO: 123346 - RNA, 19 nt, Artificial Sequence
  Description of Artificial Sequence: Synthetic oligonucleotide
ucguuugggacaaguguug

SEQ ID NO: 123347 - RNA, 19 nt, Artificial Sequence
  Description of Artificial Sequence: Synthetic oligonucleotide
cucacggaaugauuucacg

SEQ ID NO: 123348 - RNA, 19 nt, Artificial Sequence
  Description of Artificial Sequence: Synthetic oligonucleotide
agaacaauauuaaacccaa

SEQ ID NO: 123349 - RNA, 19 nt, Artificial Sequence
  Description of Artificial Sequence: Synthetic oligonucleotide
acggucauccaucccaaag

SEQ ID NO: 123350 - RNA, 19 nt, Artificial Sequence
  Description of Artificial Sequence: Synthetic oligonucleotide
cauuguaaagagaucagua

SEQ ID NO: 123351 - RNA, 19 nt, Artificial Sequence
  Description of Artificial Sequence: Synthetic oligonucleotide
agacauuuucucuucccgu

SEQ ID NO: 123352 - RNA, 19 nt, Artificial Sequence
  Description of Artificial Sequence: Synthetic oligonucleotide
aacugcaagagcaauuuua

SEQ ID NO: 123353 - RNA, 19 nt, Artificial Sequence
  Description of Artificial Sequence: Synthetic oligonucleotide
guugucgucuuuguacugg

SEQ ID NO: 123354 - RNA, 19 nt, Artificial Sequence
  Description of Artificial Sequence: Synthetic oligonucleotide
acauaacauaucaucaacu

SEQ ID NO: 123355 - RNA, 19 nt, Artificial Sequence
  Description of Artificial Sequence: Synthetic oligonucleotide
ucguucagauggcuggugc

SEQ ID NO: 123356 - RNA, 19 nt, Artificial Sequence
  Description of Artificial Sequence: Synthetic oligonucleotide
caugaucgcauuacucaag

SEQ ID NO: 123357 - RNA, 19 nt, Artificial Sequence
  Description of Artificial Sequence: Synthetic oligonucleotide
uuacgaguucacaaauuua

SEQ ID NO: 123358 - RNA, 19 nt, Artificial Sequence
  Description of Artificial Sequence: Synthetic oligonucleotide
uggugcccuacacacgggg

SEQ ID NO: 123359 - RNA, 19 nt, Artificial Sequence
  Description of Artificial Sequence: Synthetic oligonucleotide
uuccgacaagugaagacgu

SEQ ID NO: 123360 - RNA, 19 nt, Artificial Sequence
  Description of Artificial Sequence: Synthetic oligonucleotide
uuacaguugcgaaacgauu

SEQ ID NO: 123361 - RNA, 19 nt, Artificial Sequence
  Description of Artificial Sequence: Synthetic oligonucleotide
acuguauggcucuuccugu

SEQ ID NO: 123362 - RNA, 19 nt, Artificial Sequence
  Description of Artificial Sequence: Synthetic oligonucleotide
ucaccgaaaucauucuccu

SEQ ID NO: 123363 - RNA, 19 nt, Artificial Sequence
  Description of Artificial Sequence: Synthetic oligonucleotide
ucagauaauauggaaccuu

SEQ ID NO: 123364 - RNA, 19 nt, Artificial Sequence
  Description of Artificial Sequence: Synthetic oligonucleotide
ggcucuaauggucuuacug

SEQ ID NO: 123365 - RNA, 19 nt, Artificial Sequence
  Description of Artificial Sequence: Synthetic oligonucleotide
gguacaaggggugucaggc

SEQ ID NO: 123366 - RNA, 19 nt, Artificial Sequence
  Description of Artificial Sequence: Synthetic oligonucleotide
gaacuaaugcuuccagcuc

SEQ ID NO: 123367 - RNA, 19 nt, Artificial Sequence
  Description of Artificial Sequence: Synthetic oligonucleotide
uguuucgacacagcucaag

SEQ ID NO: 123368 - RNA, 19 nt, Artificial Sequence
  Description of Artificial Sequence: Synthetic oligonucleotide
acggaaugauuucacgaca

SEQ ID NO: 123369 - RNA, 19 nt, Artificial Sequence
  Description of Artificial Sequence: Synthetic oligonucleotide
acaacaguccaagcggguc

SEQ ID NO: 123370 - RNA, 19 nt, Artificial Sequence
  Description of Artificial Sequence: Synthetic oligonucleotide
ucgcauuacucaagcaaac

SEQ ID NO: 123371 - RNA, 19 nt, Artificial Sequence
  Description of Artificial Sequence: Synthetic oligonucleotide
uguuaauaauaaagccuuu

SEQ ID NO: 123372 - RNA, 19 nt, Artificial Sequence
  Description of Artificial Sequence: Synthetic oligonucleotide
aaagucuaccugguguagu

SEQ ID NO: 123373 - RNA, 19 nt, Artificial Sequence
  Description of Artificial Sequence: Synthetic oligonucleotide
cuguuugcguaaagcaaag

SEQ ID NO: 123374 - RNA, 19 nt, Artificial Sequence
  Description of Artificial Sequence: Synthetic oligonucleotide
ucgaugauaucacgcugcu

SEQ ID NO: 123375 - RNA, 19 nt, Artificial Sequence
  Description of Artificial Sequence: Synthetic oligonucleotide
ugcguaaagcaaagucuac

SEQ ID NO: 123376 - RNA, 19 nt, Artificial Sequence
  Description of Artificial Sequence: Synthetic oligonucleotide
ggcaauuuguauguacuag

SEQ ID NO: 123377 - RNA, 19 nt, Artificial Sequence
  Description of Artificial Sequence: Synthetic oligonucleotide
auuacaguugcgaaacgau

SEQ ID NO: 123378 - RNA, 19 nt, Artificial Sequence
  Description of Artificial Sequence: Synthetic oligonucleotide
caucgaugauaucacgcug

SEQ ID NO: 123379 - RNA, 19 nt, Artificial Sequence
  Description of Artificial Sequence: Synthetic oligonucleotide
auugacacguugucauccu

SEQ ID NO: 123380 - RNA, 19 nt, Artificial Sequence
  Description of Artificial Sequence: Synthetic oligonucleotide
aauuacgaguucacaaauu

SEQ ID NO: 123381 - RNA, 19 nt, Artificial Sequence
  Description of Artificial Sequence: Synthetic oligonucleotide
uuacaggcacgguguauug

SEQ ID NO: 123382 - RNA, 19 nt, Artificial Sequence
  Description of Artificial Sequence: Synthetic oligonucleotide
acaguugcgaaacgauuaa

SEQ ID NO: 123383 - RNA, 19 nt, Artificial Sequence
  Description of Artificial Sequence: Synthetic oligonucleotide
aguugcgaaacgauuaaaa

SEQ ID NO: 123384 - RNA, 19 nt, Artificial Sequence
  Description of Artificial Sequence: Synthetic oligonucleotide
agcauuguaaagagaucag

SEQ ID NO: 123385 - RNA, 19 nt, Artificial Sequence
  Description of Artificial Sequence: Synthetic oligonucleotide
ggauauccaugguuuacag

SEQ ID NO: 123386 - RNA, 19 nt, Artificial Sequence
  Description of Artificial Sequence: Synthetic oligonucleotide
uaucggagaagccguuagu

SEQ ID NO: 123387 - RNA, 19 nt, Artificial Sequence
  Description of Artificial Sequence: Synthetic oligonucleotide
ucuuacuguccaauucuuu

SEQ ID NO: 123388 - RNA, 19 nt, Artificial Sequence
  Description of Artificial Sequence: Synthetic oligonucleotide
cuucucguucagauggcug

SEQ ID NO: 123389 - RNA, 19 nt, Artificial Sequence
  Description of Artificial Sequence: Synthetic oligonucleotide
cacgguguauugaaaauaa

SEQ ID NO: 123390 - RNA, 19 nt, Artificial Sequence
  Description of Artificial Sequence: Synthetic oligonucleotide
auuaucucacggucaucca

SEQ ID NO: 123391 - RNA, 19 nt, Artificial Sequence
  Description of Artificial Sequence: Synthetic oligonucleotide
aggauaccgccgucauugc

SEQ ID NO: 123392 - RNA, 19 nt, Artificial Sequence
  Description of Artificial Sequence: Synthetic oligonucleotide
caucgaugucaucuaaguc

SEQ ID NO: 123393 - RNA, 19 nt, Artificial Sequence
  Description of Artificial Sequence: Synthetic oligonucleotide
gugaucggcagcccucacg

SEQ ID NO: 123394 - RNA, 19 nt, Artificial Sequence
  Description of Artificial Sequence: Synthetic oligonucleotide
auaucgucgugugugggcu

SEQ ID NO: 123395 - RNA, 19 nt, Artificial Sequence
  Description of Artificial Sequence: Synthetic oligonucleotide
cuccgggucaauuugucca

SEQ ID NO: 123396 - RNA, 19 nt, Artificial Sequence
  Description of Artificial Sequence: Synthetic oligonucleotide
gccgucauugccuuccccg

SEQ ID NO: 123397 - RNA, 19 nt, Artificial Sequence
  Description of Artificial Sequence: Synthetic oligonucleotide
aucgcauuacucaagcaaa

SEQ ID NO: 123398 - RNA, 19 nt, Artificial Sequence
  Description of Artificial Sequence: Synthetic oligonucleotide
guauggcucuuccugugug

SEQ ID NO: 123399 - RNA, 19 nt, Artificial Sequence
  Description of Artificial Sequence: Synthetic oligonucleotide
auauggaaccuuggucccg

SEQ ID NO: 123400 - RNA, 19 nt, Artificial Sequence
  Description of Artificial Sequence: Synthetic oligonucleotide
guugcgaaacgauuaaaau

SEQ ID NO: 123401 - RNA, 19 nt, Artificial Sequence
  Description of Artificial Sequence: Synthetic oligonucleotide
gugaagacguauuucgaua

SEQ ID NO: 123402 - RNA, 19 nt, Artificial Sequence
  Description of Artificial Sequence: Synthetic oligonucleotide
uugucgucuuuguacuggu

SEQ ID NO: 123403 - RNA, 19 nt, Artificial Sequence
  Description of Artificial Sequence: Synthetic oligonucleotide
aauaucggagaagccguua

SEQ ID NO: 123404 - RNA, 19 nt, Artificial Sequence
  Description of Artificial Sequence: Synthetic oligonucleotide
uaucuaucccugggcacag

SEQ ID NO: 123405 - RNA, 19 nt, Artificial Sequence
  Description of Artificial Sequence: Synthetic oligonucleotide
agacguauuucgauauuca

SEQ ID NO: 123406 - RNA, 19 nt, Artificial Sequence
  Description of Artificial Sequence: Synthetic oligonucleotide
aguugucgucuuuguacug

SEQ ID NO: 123407 - RNA, 19 nt, Artificial Sequence
  Description of Artificial Sequence: Synthetic oligonucleotide
cacugagucggggcuaucg

SEQ ID NO: 123408 - RNA, 19 nt, Artificial Sequence
  Description of Artificial Sequence: Synthetic oligonucleotide
cuuuucgcuuaacucccug

SEQ ID NO: 123409 - RNA, 19 nt, Artificial Sequence
  Description of Artificial Sequence: Synthetic oligonucleotide
gcuagaacuuucaacauaa

SEQ ID NO: 123410 - RNA, 19 nt, Artificial Sequence
  Description of Artificial Sequence: Synthetic oligonucleotide
ucgggcucuaagagcaggu

SEQ ID NO: 123411 - RNA, 19 nt, Artificial Sequence
  Description of Artificial Sequence: Synthetic oligonucleotide
ucggagaagccguuaguuu

SEQ ID NO: 123412 - RNA, 19 nt, Artificial Sequence
  Description of Artificial Sequence: Synthetic oligonucleotide
cuaucgggcccacccauug

SEQ ID NO: 123413 - RNA, 19 nt, Artificial Sequence
  Description of Artificial Sequence: Synthetic oligonucleotide
aguugucacaauauccgaa

SEQ ID NO: 123414 - RNA, 19 nt, Artificial Sequence
  Description of Artificial Sequence: Synthetic oligonucleotide
uucuagaaucaagcauuca

SEQ ID NO: 123415 - RNA, 19 nt, Artificial Sequence
  Description of Artificial Sequence: Synthetic oligonucleotide
cuuaagcuagaacuuucaa

SEQ ID NO: 123416 - RNA, 19 nt, Artificial Sequence
  Description of Artificial Sequence: Synthetic oligonucleotide
acguauuucgauauucaua

SEQ ID NO: 123417 - RNA, 19 nt, Artificial Sequence
  Description of Artificial Sequence: Synthetic oligonucleotide
guugucacaauauccgaau

SEQ ID NO: 123418 - RNA, 19 nt, Artificial Sequence
  Description of Artificial Sequence: Synthetic oligonucleotide
cuaaguagguugaucuucu

SEQ ID NO: 123419 - RNA, 19 nt, Artificial Sequence
  Description of Artificial Sequence: Synthetic oligonucleotide
gguuaaccagacugcuggg

SEQ ID NO: 123420 - RNA, 19 nt, Artificial Sequence
  Description of Artificial Sequence: Synthetic oligonucleotide
cauggcggacucuucuaug

SEQ ID NO: 123421 - RNA, 19 nt, Artificial Sequence
  Description of Artificial Sequence: Synthetic oligonucleotide
auuaucucaugcaccaaua

SEQ ID NO: 123422 - RNA, 19 nt, Artificial Sequence
  Description of Artificial Sequence: Synthetic oligonucleotide
gauaccgccgucauugccu

SEQ ID NO: 123423 - RNA, 19 nt, Artificial Sequence
  Description of Artificial Sequence: Synthetic oligonucleotide
uugacacguugucauccuc

SEQ ID NO: 123424 - RNA, 19 nt, Artificial Sequence
  Description of Artificial Sequence: Synthetic oligonucleotide
auuacugguuauacaugga

SEQ ID NO: 123425 - RNA, 19 nt, Artificial Sequence
  Description of Artificial Sequence: Synthetic oligonucleotide
uguuugcguaaagcaaagu

SEQ ID NO: 123426 - RNA, 19 nt, Artificial Sequence
  Description of Artificial Sequence: Synthetic oligonucleotide
ccgucaagggacucaaacc

SEQ ID NO: 123427 - RNA, 19 nt, Artificial Sequence
  Description of Artificial Sequence: Synthetic oligonucleotide
ucugcucgaccugcugagg

SEQ ID NO: 123428 - RNA, 19 nt, Artificial Sequence
  Description of Artificial Sequence: Synthetic oligonucleotide
uugcugcugcugcugcugc

SEQ ID NO: 123429 - RNA, 19 nt, Artificial Sequence
  Description of Artificial Sequence: Synthetic oligonucleotide
uuccccgaaguugucgucu

SEQ ID NO: 123430 - RNA, 19 nt, Artificial Sequence
  Description of Artificial Sequence: Synthetic oligonucleotide
gacguauuucgauauucau

SEQ ID NO: 123431 - RNA, 19 nt, Artificial Sequence
  Description of Artificial Sequence: Synthetic oligonucleotide
acacuuaagcuagaacuuu

SEQ ID NO: 123432 - RNA, 19 nt, Artificial Sequence
  Description of Artificial Sequence: Synthetic oligonucleotide
ggauuacaguugcgaaacg

SEQ ID NO: 123433 - RNA, 19 nt, Artificial Sequence
  Description of Artificial Sequence: Synthetic oligonucleotide
aucggagaagccguuaguu

SEQ ID NO: 123434 - RNA, 19 nt, Artificial Sequence
  Description of Artificial Sequence: Synthetic oligonucleotide
cuaaugaccuuucuagaau

SEQ ID NO: 123435 - RNA, 19 nt, Artificial Sequence
  Description of Artificial Sequence: Synthetic oligonucleotide
gcaauuuguauguacuagu

SEQ ID NO: 123436 - RNA, 19 nt, Artificial Sequence
  Description of Artificial Sequence: Synthetic oligonucleotide
guugcugcugcugcugcug

SEQ ID NO: 123437 - RNA, 19 nt, Artificial Sequence
  Description of Artificial Sequence: Synthetic oligonucleotide
uuccucguuugggacaagu

SEQ ID NO: 123438 - RNA, 19 nt, Artificial Sequence
  Description of Artificial Sequence: Synthetic oligonucleotide
cucgggcucuaagagcagg

SEQ ID NO: 123439 - RNA, 19 nt, Artificial Sequence
  Description of Artificial Sequence: Synthetic oligonucleotide
gcucuaauggucuuacugu

SEQ ID NO: 123440 - RNA, 19 nt, Artificial Sequence
  Description of Artificial Sequence: Synthetic oligonucleotide
cccgucucagacaaagcag

SEQ ID NO: 123441 - RNA, 19 nt, Artificial Sequence
  Description of Artificial Sequence: Synthetic oligonucleotide
gcucacuagcaugucgucg

SEQ ID NO: 123442 - RNA, 19 nt, Artificial Sequence
  Description of Artificial Sequence: Synthetic oligonucleotide
caggauacugauguuccca

SEQ ID NO: 123443 - RNA, 19 nt, Artificial Sequence
  Description of Artificial Sequence: Synthetic oligonucleotide
ucggcagcccucacggaau

SEQ ID NO: 123444 - RNA, 19 nt, Artificial Sequence
  Description of Artificial Sequence: Synthetic oligonucleotide
cugggcgacaucgauguca

SEQ ID NO: 123445 - RNA, 19 nt, Artificial Sequence
  Description of Artificial Sequence: Synthetic oligonucleotide
caccgaaaucauucuccug

SEQ ID NO: 123446 - RNA, 19 nt, Artificial Sequence
  Description of Artificial Sequence: Synthetic oligonucleotide
uuguccgcuucccuccuuu

SEQ ID NO: 123447 - RNA, 19 nt, Artificial Sequence
  Description of Artificial Sequence: Synthetic oligonucleotide
uccgacaagugaagacgua

SEQ ID NO: 123448 - RNA, 19 nt, Artificial Sequence
  Description of Artificial Sequence: Synthetic oligonucleotide
ccaugguuuacaggcacgg

SEQ ID NO: 123449 - RNA, 19 nt, Artificial Sequence
  Description of Artificial Sequence: Synthetic oligonucleotide
agcucgcugaagaccgugg

SEQ ID NO: 123450 - RNA, 19 nt, Artificial Sequence
  Description of Artificial Sequence: Synthetic oligonucleotide
cccgucaagggacucaaac

SEQ ID NO: 123451 - RNA, 19 nt, Artificial Sequence
  Description of Artificial Sequence: Synthetic oligonucleotide
acgaguucacaaauuuaaa

SEQ ID NO: 123452 - RNA, 19 nt, Artificial Sequence
  Description of Artificial Sequence: Synthetic oligonucleotide
guacaaggggugucaggca

SEQ ID NO: 123453 - RNA, 19 nt, Artificial Sequence
  Description of Artificial Sequence: Synthetic oligonucleotide
gagugucaggcauuuuccu

SEQ ID NO: 123454 - RNA, 19 nt, Artificial Sequence
  Description of Artificial Sequence: Synthetic oligonucleotide
ggcgacaucgaugucaucu

SEQ ID NO: 123455 - RNA, 19 nt, Artificial Sequence
  Description of Artificial Sequence: Synthetic oligonucleotide
cucguuugggacaaguguu

SEQ ID NO: 123456 - RNA, 19 nt, Artificial Sequence
  Description of Artificial Sequence: Synthetic oligonucleotide
ggagugugcagcauuguaa

SEQ ID NO: 123457 - RNA, 19 nt, Artificial Sequence
  Description of Artificial Sequence: Synthetic oligonucleotide
aggggauauccaugguuua

SEQ ID NO: 123458 - RNA, 19 nt, Artificial Sequence
  Description of Artificial Sequence: Synthetic oligonucleotide
auauuaucucaugcaccaa

SEQ ID NO: 123459 - RNA, 19 nt, Artificial Sequence
  Description of Artificial Sequence: Synthetic oligonucleotide
ucauuaucucacggucauc

SEQ ID NO: 123460 - RNA, 19 nt, Artificial Sequence
  Description of Artificial Sequence: Synthetic oligonucleotide
ggauaccgccgucauugcc

SEQ ID NO: 123461 - RNA, 19 nt, Artificial Sequence
  Description of Artificial Sequence: Synthetic oligonucleotide
cugcugcugcugcugcucc

SEQ ID NO: 123462 - RNA, 19 nt, Artificial Sequence
  Description of Artificial Sequence: Synthetic oligonucleotide
gcucaagcaaacugaucga

SEQ ID NO: 123463 - RNA, 19 nt, Artificial Sequence
  Description of Artificial Sequence: Synthetic oligonucleotide
cugcucgaccugcugagga

SEQ ID NO: 123464 - RNA, 19 nt, Artificial Sequence
  Description of Artificial Sequence: Synthetic oligonucleotide
cuagcaugucgucguccuc

SEQ ID NO: 123465 - RNA, 19 nt, Artificial Sequence
  Description of Artificial Sequence: Synthetic oligonucleotide
uuauaucaaugggcuccaa

SEQ ID NO: 123466 - RNA, 19 nt, Artificial Sequence
  Description of Artificial Sequence: Synthetic oligonucleotide
ccucacggaaugauuucac

SEQ ID NO: 123467 - RNA, 19 nt, Artificial Sequence
  Description of Artificial Sequence: Synthetic oligonucleotide
gcgaaacgauuaaaauaag

SEQ ID NO: 123468 - RNA, 19 nt, Artificial Sequence
  Description of Artificial Sequence: Synthetic oligonucleotide
ccguggagcaucugcuggg

SEQ ID NO: 123469 - RNA, 19 nt, Artificial Sequence
  Description of Artificial Sequence: Synthetic oligonucleotide
ugcugcugcugcugcugcu

SEQ ID NO: 123470 - RNA, 19 nt, Artificial Sequence
  Description of Artificial Sequence: Synthetic oligonucleotide
uccacugagucggggcuau

SEQ ID NO: 123471 - RNA, 19 nt, Artificial Sequence
  Description of Artificial Sequence: Synthetic oligonucleotide
uuccgguacaagggguguc

SEQ ID NO: 123472 - RNA, 19 nt, Artificial Sequence
  Description of Artificial Sequence: Synthetic oligonucleotide
acgguguauugaaaauaaa

SEQ ID NO: 123473 - RNA, 19 nt, Artificial Sequence
  Description of Artificial Sequence: Synthetic oligonucleotide
gguuauacauggaagucuu

SEQ ID NO: 123474 - RNA, 19 nt, Artificial Sequence
  Description of Artificial Sequence: Synthetic oligonucleotide
uccccgaaguugucgucuu

SEQ ID NO: 123475 - RNA, 19 nt, Artificial Sequence
  Description of Artificial Sequence: Synthetic oligonucleotide
cucagauaauauggaaccu

SEQ ID NO: 123476 - RNA, 19 nt, Artificial Sequence
  Description of Artificial Sequence: Synthetic oligonucleotide
ucgagggaccucgggguuc

SEQ ID NO: 123477 - RNA, 19 nt, Artificial Sequence
  Description of Artificial Sequence: Synthetic oligonucleotide
ccagacuaacaaaaugugu

SEQ ID NO: 123478 - RNA, 19 nt, Artificial Sequence
  Description of Artificial Sequence: Synthetic oligonucleotide
ggggcaauuuguauguacu

SEQ ID NO: 123479 - RNA, 19 nt, Artificial Sequence
  Description of Artificial Sequence: Synthetic oligonucleotide
ccauaaaagugccaacacu

SEQ ID NO: 123480 - RNA, 19 nt, Artificial Sequence
  Description of Artificial Sequence: Synthetic oligonucleotide
gaucggcagcccucacgga

SEQ ID NO: 123481 - RNA, 19 nt, Artificial Sequence
  Description of Artificial Sequence: Synthetic oligonucleotide
auacaggagugugcagcau

SEQ ID NO: 123482 - RNA, 19 nt, Artificial Sequence
  Description of Artificial Sequence: Synthetic oligonucleotide
ucccgucaagggacucaaa

SEQ ID NO: 123483 - RNA, 19 nt, Artificial Sequence
  Description of Artificial Sequence: Synthetic oligonucleotide
gaaccuuggucccggcguu

SEQ ID NO: 123484 - RNA, 19 nt, Artificial Sequence
  Description of Artificial Sequence: Synthetic oligonucleotide
caccaucauuauuacuuau

SEQ ID NO: 123485 - RNA, 19 nt, Artificial Sequence
  Description of Artificial Sequence: Synthetic oligonucleotide
caguugcgaaacgauuaaa

SEQ ID NO: 123486 - RNA, 19 nt, Artificial Sequence
  Description of Artificial Sequence: Synthetic oligonucleotide
ucguuggcauuggcucaac

SEQ ID NO: 123487 - RNA, 19 nt, Artificial Sequence
  Description of Artificial Sequence: Synthetic oligonucleotide
cgcuuaacucccugaggug

SEQ ID NO: 123488 - RNA, 19 nt, Artificial Sequence
  Description of Artificial Sequence: Synthetic oligonucleotide
gcugcugcugcugcugcuc

SEQ ID NO: 123489 - RNA, 19 nt, Artificial Sequence
  Description of Artificial Sequence: Synthetic oligonucleotide
caaguguugucuggucagu

SEQ ID NO: 123490 - RNA, 19 nt, Artificial Sequence
  Description of Artificial Sequence: Synthetic oligonucleotide
gcugugccggcaaggagaa

SEQ ID NO: 123491 - RNA, 19 nt, Artificial Sequence
  Description of Artificial Sequence: Synthetic oligonucleotide
cuuccucguuugggacaag

SEQ ID NO: 123492 - RNA, 19 nt, Artificial Sequence
  Description of Artificial Sequence: Synthetic oligonucleotide
cucuucccgucaagggacu

SEQ ID NO: 123493 - RNA, 19 nt, Artificial Sequence
  Description of Artificial Sequence: Synthetic oligonucleotide
ccggcguugcaaugauguc

SEQ ID NO: 123494 - RNA, 19 nt, Artificial Sequence
  Description of Artificial Sequence: Synthetic oligonucleotide
ccgguacaaggggugucag

SEQ ID NO: 123495 - RNA, 19 nt, Artificial Sequence
  Description of Artificial Sequence: Synthetic oligonucleotide
ggcuaucgggcccacccau

SEQ ID NO: 123496 - RNA, 19 nt, Artificial Sequence
  Description of Artificial Sequence: Synthetic oligonucleotide
ccaagcgggucagucacaa

SEQ ID NO: 123497 - RNA, 19 nt, Artificial Sequence
  Description of Artificial Sequence: Synthetic oligonucleotide
cgaugauaucacgcugcug

SEQ ID NO: 123498 - RNA, 19 nt, Artificial Sequence
  Description of Artificial Sequence: Synthetic oligonucleotide
cggagaagccguuaguuuu

SEQ ID NO: 123499 - RNA, 19 nt, Artificial Sequence
  Description of Artificial Sequence: Synthetic oligonucleotide
ccgaaguugucgucuuugu

SEQ ID NO: 123500 - RNA, 19 nt, Artificial Sequence
  Description of Artificial Sequence: Synthetic oligonucleotide
ccgacaagugaagacguau

SEQ ID NO: 123501 - RNA, 19 nt, Artificial Sequence
  Description of Artificial Sequence: Synthetic oligonucleotide
cugugccggcaaggagaac

SEQ ID NO: 123502 - RNA, 19 nt, Artificial Sequence
  Description of Artificial Sequence: Synthetic oligonucleotide
cucgagggaccucgggguu

SEQ ID NO: 123503 - RNA, 19 nt, Artificial Sequence
  Description of Artificial Sequence: Synthetic oligonucleotide
cgacaagugaagacguauu

SEQ ID NO: 123504 - RNA, 19 nt, Artificial Sequence
  Description of Artificial Sequence: Synthetic oligonucleotide
gggcuccaaugcaaaggcu

SEQ ID NO: 123505 - RNA, 19 nt, Artificial Sequence
  Description of Artificial Sequence: Synthetic oligonucleotide
gcuaucgggcccacccauu

SEQ ID NO: 123506 - RNA, 19 nt, Artificial Sequence
  Description of Artificial Sequence: Synthetic oligonucleotide
ccacugagucggggcuauc

SEQ ID NO: 123507 - RNA, 19 nt, Artificial Sequence
  Description of Artificial Sequence: Synthetic oligonucleotide
ccccgaaguugucgucuuu

SEQ ID NO: 123508 - RNA, 19 nt, Artificial Sequence
  Description of Artificial Sequence: Synthetic oligonucleotide
cgggcucuaagagcagguu

SEQ ID NO: 123509 - RNA, 19 nt, Artificial Sequence
  Description of Artificial Sequence: Synthetic oligonucleotide
uuuagauuaacuuaacggg

SEQ ID NO: 123510 - RNA, 19 nt, Artificial Sequence
  Description of Artificial Sequence: Synthetic oligonucleotide
auaaaugauaagcagaaac

SEQ ID NO: 123511 - RNA, 19 nt, Artificial Sequence
  Description of Artificial Sequence: Synthetic oligonucleotide
guuuagauuaacuuaacgg

SEQ ID NO: 123512 - RNA, 19 nt, Artificial Sequence
  Description of Artificial Sequence: Synthetic oligonucleotide
aaagcuaacaaaugucuac

SEQ ID NO: 123513 - RNA, 19 nt, Artificial Sequence
  Description of Artificial Sequence: Synthetic oligonucleotide
aaucagauuccacauauuc

SEQ ID NO: 123514 - RNA, 19 nt, Artificial Sequence
  Description of Artificial Sequence: Synthetic oligonucleotide
aacaggguagauuacauag

SEQ ID NO: 123515 - RNA, 19 nt, Artificial Sequence
  Description of Artificial Sequence: Synthetic oligonucleotide
gaaagauugccuuacaugc

SEQ ID NO: 123516 - RNA, 19 nt, Artificial Sequence
  Description of Artificial Sequence: Synthetic oligonucleotide
uuagauuaacuuaacgggg

SEQ ID NO: 123517 - RNA, 19 nt, Artificial Sequence
  Description of Artificial Sequence: Synthetic oligonucleotide
aaagcuaaaauaucuccag

SEQ ID NO: 123518 - RNA, 19 nt, Artificial Sequence
  Description of Artificial Sequence: Synthetic oligonucleotide
caaauuauguucuaccacg

SEQ ID NO: 123519 - RNA, 19 nt, Artificial Sequence
  Description of Artificial Sequence: Synthetic oligonucleotide
aggaacuuuacgcacaggc

SEQ ID NO: 123520 - RNA, 19 nt, Artificial Sequence
  Description of Artificial Sequence: Synthetic oligonucleotide
aguggagugauuuuacagc

SEQ ID NO: 123521 - RNA, 19 nt, Artificial Sequence
  Description of Artificial Sequence: Synthetic oligonucleotide
uggacuacaacaaaacugc

SEQ ID NO: 123522 - RNA, 19 nt, Artificial Sequence
  Description of Artificial Sequence: Synthetic oligonucleotide
aauaucuccagcucaagcu

SEQ ID NO: 123523 - RNA, 19 nt, Artificial Sequence
  Description of Artificial Sequence: Synthetic oligonucleotide
uuucgaauagcaaccaccg

SEQ ID NO: 123524 - RNA, 19 nt, Artificial Sequence
  Description of Artificial Sequence: Synthetic oligonucleotide
ugauaguuagaauuggucc

SEQ ID NO: 123525 - RNA, 19 nt, Artificial Sequence
  Description of Artificial Sequence: Synthetic oligonucleotide
gaggauugcaguuaagagg

SEQ ID NO: 123526 - RNA, 19 nt, Artificial Sequence
  Description of Artificial Sequence: Synthetic oligonucleotide
gauaguuagaauugguccc

SEQ ID NO: 123527 - RNA, 19 nt, Artificial Sequence
  Description of Artificial Sequence: Synthetic oligonucleotide
aguuaagaggagcaaaagg

SEQ ID NO: 123528 - RNA, 19 nt, Artificial Sequence
  Description of Artificial Sequence: Synthetic oligonucleotide
aaaaccaaguggugcagac

SEQ ID NO: 123529 - RNA, 19 nt, Artificial Sequence
  Description of Artificial Sequence: Synthetic oligonucleotide
cuuaggguaauacugagac

SEQ ID NO: 123530 - RNA, 19 nt, Artificial Sequence
  Description of Artificial Sequence: Synthetic oligonucleotide
ugaugauugagggugaggg

SEQ ID NO: 123531 - RNA, 19 nt, Artificial Sequence
  Description of Artificial Sequence: Synthetic oligonucleotide
aaaucugguuauuuuagca

SEQ ID NO: 123532 - RNA, 19 nt, Artificial Sequence
  Description of Artificial Sequence: Synthetic oligonucleotide
ucgaguaaaggccaauggg

SEQ ID NO: 123533 - RNA, 19 nt, Artificial Sequence
  Description of Artificial Sequence: Synthetic oligonucleotide
aacaggugaaucugaaauc

SEQ ID NO: 123534 - RNA, 19 nt, Artificial Sequence
  Description of Artificial Sequence: Synthetic oligonucleotide
ucauuugggacuuggcugg

SEQ ID NO: 123535 - RNA, 19 nt, Artificial Sequence
  Description of Artificial Sequence: Synthetic oligonucleotide
uucuuaagagggaagcuag

SEQ ID NO: 123536 - RNA, 19 nt, Artificial Sequence
  Description of Artificial Sequence: Synthetic oligonucleotide
uagauuacauaguucagca

SEQ ID NO: 123537 - RNA, 19 nt, Artificial Sequence
  Description of Artificial Sequence: Synthetic oligonucleotide
uuuccagccauacguaagg

SEQ ID NO: 123538 - RNA, 19 nt, Artificial Sequence
  Description of Artificial Sequence: Synthetic oligonucleotide
cuuucgaauagcaaccacc

SEQ ID NO: 123539 - RNA, 19 nt, Artificial Sequence
  Description of Artificial Sequence: Synthetic oligonucleotide
auugcauauuccaucaggc

SEQ ID NO: 123540 - RNA, 19 nt, Artificial Sequence
  Description of Artificial Sequence: Synthetic oligonucleotide
gauuuugaauucuaucaug

SEQ ID NO: 123541 - RNA, 19 nt, Artificial Sequence
  Description of Artificial Sequence: Synthetic oligonucleotide
aaugacucaugaugggauc

SEQ ID NO: 123542 - RNA, 19 nt, Artificial Sequence
  Description of Artificial Sequence: Synthetic oligonucleotide
aucuuuagaaccaucuggc

SEQ ID NO: 123543 - RNA, 19 nt, Artificial Sequence
  Description of Artificial Sequence: Synthetic oligonucleotide
aguuaucugcucuaacugg

SEQ ID NO: 123544 - RNA, 19 nt, Artificial Sequence
  Description of Artificial Sequence: Synthetic oligonucleotide
acagagucgaguaaaggcc

SEQ ID NO: 123545 - RNA, 19 nt, Artificial Sequence
  Description of Artificial Sequence: Synthetic oligonucleotide
uaauacgggaagcacagcu

SEQ ID NO: 123546 - RNA, 19 nt, Artificial Sequence
  Description of Artificial Sequence: Synthetic oligonucleotide
uguuugaugacuccucugu

SEQ ID NO: 123547 - RNA, 19 nt, Artificial Sequence
  Description of Artificial Sequence: Synthetic oligonucleotide
agcccauuuucucaagucc

SEQ ID NO: 123548 - RNA, 19 nt, Artificial Sequence
  Description of Artificial Sequence: Synthetic oligonucleotide
uguacuucccuucagucaa

SEQ ID NO: 123549 - RNA, 19 nt, Artificial Sequence
  Description of Artificial Sequence: Synthetic oligonucleotide
uugccugauagcaaaacug

SEQ ID NO: 123550 - RNA, 19 nt, Artificial Sequence
  Description of Artificial Sequence: Synthetic oligonucleotide
ucgaauagcaaccaccgaa

SEQ ID NO: 123551 - RNA, 19 nt, Artificial Sequence
  Description of Artificial Sequence: Synthetic oligonucleotide
cacagagucgaguaaaggc

SEQ ID NO: 123552 - RNA, 19 nt, Artificial Sequence
  Description of Artificial Sequence: Synthetic oligonucleotide
uuauguucuaccacguaac

SEQ ID NO: 123553 - RNA, 19 nt, Artificial Sequence
  Description of Artificial Sequence: Synthetic oligonucleotide
ucuaccacguaacauuucu

SEQ ID NO: 123554 - RNA, 19 nt, Artificial Sequence
  Description of Artificial Sequence: Synthetic oligonucleotide
agggauaaaugauaagcag

SEQ ID NO: 123555 - RNA, 19 nt, Artificial Sequence
  Description of Artificial Sequence: Synthetic oligonucleotide
uagauuaacuuaacgggga

SEQ ID NO: 123556 - RNA, 19 nt, Artificial Sequence
  Description of Artificial Sequence: Synthetic oligonucleotide
agcuagugcuauuuuacac

SEQ ID NO: 123557 - RNA, 19 nt, Artificial Sequence
  Description of Artificial Sequence: Synthetic oligonucleotide
agcaccuaccuguuggugc

SEQ ID NO: 123558 - RNA, 19 nt, Artificial Sequence
  Description of Artificial Sequence: Synthetic oligonucleotide
uggaauucacagcucgacg

SEQ ID NO: 123559 - RNA, 19 nt, Artificial Sequence
  Description of Artificial Sequence: Synthetic oligonucleotide
ugguaauauaagcaacacc

SEQ ID NO: 123560 - RNA, 19 nt, Artificial Sequence
  Description of Artificial Sequence: Synthetic oligonucleotide
aauauaagucuuugcaauu

SEQ ID NO: 123561 - RNA, 19 nt, Artificial Sequence
  Description of Artificial Sequence: Synthetic oligonucleotide
auuauguucuaccacguaa

SEQ ID NO: 123562 - RNA, 19 nt, Artificial Sequence
  Description of Artificial Sequence: Synthetic oligonucleotide
uuaaucaccacagcucuag

SEQ ID NO: 123563 - RNA, 19 nt, Artificial Sequence
  Description of Artificial Sequence: Synthetic oligonucleotide
uuacgcacaggcuuggacc

SEQ ID NO: 123564 - RNA, 19 nt, Artificial Sequence
  Description of Artificial Sequence: Synthetic oligonucleotide
ugccugauagcaaaacugc

SEQ ID NO: 123565 - RNA, 19 nt, Artificial Sequence
  Description of Artificial Sequence: Synthetic oligonucleotide
uuaacucucuuuucagugc

SEQ ID NO: 123566 - RNA, 19 nt, Artificial Sequence
  Description of Artificial Sequence: Synthetic oligonucleotide
gaguggagugauuuuacag

SEQ ID NO: 123567 - RNA, 19 nt, Artificial Sequence
  Description of Artificial Sequence: Synthetic oligonucleotide
aguucagcagauuuuaaaa

SEQ ID NO: 123568 - RNA, 19 nt, Artificial Sequence
  Description of Artificial Sequence: Synthetic oligonucleotide
uacaacaggaaagauugcc

SEQ ID NO: 123569 - RNA, 19 nt, Artificial Sequence
  Description of Artificial Sequence: Synthetic oligonucleotide
uguucuaccacguaacauu

SEQ ID NO: 123570 - RNA, 19 nt, Artificial Sequence
  Description of Artificial Sequence: Synthetic oligonucleotide
gaaaucugguuauuuuagc

SEQ ID NO: 123571 - RNA, 19 nt, Artificial Sequence
  Description of Artificial Sequence: Synthetic oligonucleotide
agcaaauuauguucuacca

SEQ ID NO: 123572 - RNA, 19 nt, Artificial Sequence
  Description of Artificial Sequence: Synthetic oligonucleotide
auuugauaguuagaauugg

SEQ ID NO: 123573 - RNA, 19 nt, Artificial Sequence
  Description of Artificial Sequence: Synthetic oligonucleotide
uuugccugauagcaaaacu

SEQ ID NO: 123574 - RNA, 19 nt, Artificial Sequence
  Description of Artificial Sequence: Synthetic oligonucleotide
uuuucaugguagauuugcc

SEQ ID NO: 123575 - RNA, 19 nt, Artificial Sequence
  Description of Artificial Sequence: Synthetic oligonucleotide
gaauucuaucaugauaccc

SEQ ID NO: 123576 - RNA, 19 nt, Artificial Sequence
  Description of Artificial Sequence: Synthetic oligonucleotide
uuugaucgagaauacucug

SEQ ID NO: 123577 - RNA, 19 nt, Artificial Sequence
  Description of Artificial Sequence: Synthetic oligonucleotide
ugggagaauaucuuccagc

SEQ ID NO: 123578 - RNA, 19 nt, Artificial Sequence
  Description of Artificial Sequence: Synthetic oligonucleotide
guaggaugcuucuuuaggc

SEQ ID NO: 123579 - RNA, 19 nt, Artificial Sequence
  Description of Artificial Sequence: Synthetic oligonucleotide
uauaagucuuugcaauugu

SEQ ID NO: 123580 - RNA, 19 nt, Artificial Sequence
  Description of Artificial Sequence: Synthetic oligonucleotide
guugguguuuguuucuggg

SEQ ID NO: 123581 - RNA, 19 nt, Artificial Sequence
  Description of Artificial Sequence: Synthetic oligonucleotide
uucuggacuacaacaaaac

SEQ ID NO: 123582 - RNA, 19 nt, Artificial Sequence
  Description of Artificial Sequence: Synthetic oligonucleotide
cuggcaguauguaaggggc

SEQ ID NO: 123583 - RNA, 19 nt, Artificial Sequence
  Description of Artificial Sequence: Synthetic oligonucleotide
gaucucacagguuaugauc

SEQ ID NO: 123584 - RNA, 19 nt, Artificial Sequence
  Description of Artificial Sequence: Synthetic oligonucleotide
uuaagaaucuaggggacca

SEQ ID NO: 123585 - RNA, 19 nt, Artificial Sequence
  Description of Artificial Sequence: Synthetic oligonucleotide
augauugagggugaggguc

SEQ ID NO: 123586 - RNA, 19 nt, Artificial Sequence
  Description of Artificial Sequence: Synthetic oligonucleotide
uucacagcucgacguaucg

SEQ ID NO: 123587 - RNA, 19 nt, Artificial Sequence
  Description of Artificial Sequence: Synthetic oligonucleotide
aaaucccaaugacucauga

SEQ ID NO: 123588 - RNA, 19 nt, Artificial Sequence
  Description of Artificial Sequence: Synthetic oligonucleotide
uauuccuucccgaaaugcu

SEQ ID NO: 123589 - RNA, 19 nt, Artificial Sequence
  Description of Artificial Sequence: Synthetic oligonucleotide
uguaagcuucucuugggug

SEQ ID NO: 123590 - RNA, 19 nt, Artificial Sequence
  Description of Artificial Sequence: Synthetic oligonucleotide
aggauugcaguuaagagga

SEQ ID NO: 123591 - RNA, 19 nt, Artificial Sequence
  Description of Artificial Sequence: Synthetic oligonucleotide
guagauuacauaguucagc

SEQ ID NO: 123592 - RNA, 19 nt, Artificial Sequence
  Description of Artificial Sequence: Synthetic oligonucleotide
ucacacgggaagaaaauaa

SEQ ID NO: 123593 - RNA, 19 nt, Artificial Sequence
  Description of Artificial Sequence: Synthetic oligonucleotide
auuuugaauucuaucauga

SEQ ID NO: 123594 - RNA, 19 nt, Artificial Sequence
  Description of Artificial Sequence: Synthetic oligonucleotide
gguaguacagcuucguuug

SEQ ID NO: 123595 - RNA, 19 nt, Artificial Sequence
  Description of Artificial Sequence: Synthetic oligonucleotide
ugaucgagaauacucuguc

SEQ ID NO: 123596 - RNA, 19 nt, Artificial Sequence
  Description of Artificial Sequence: Synthetic oligonucleotide
uuuaggcucacagagucga

SEQ ID NO: 123597 - RNA, 19 nt, Artificial Sequence
  Description of Artificial Sequence: Synthetic oligonucleotide
uccacucuaagcuuagggu

SEQ ID NO: 123598 - RNA, 19 nt, Artificial Sequence
  Description of Artificial Sequence: Synthetic oligonucleotide
ugccuuacaugcaacacaa

SEQ ID NO: 123599 - RNA, 19 nt, Artificial Sequence
  Description of Artificial Sequence: Synthetic oligonucleotide
gucgaguaaaggccaaugg

SEQ ID NO: 123600 - RNA, 19 nt, Artificial Sequence
  Description of Artificial Sequence: Synthetic oligonucleotide
aaccccuucccagagaucu

SEQ ID NO: 123601 - RNA, 19 nt, Artificial Sequence
  Description of Artificial Sequence: Synthetic oligonucleotide
gaagcaugccuuaauggcc

SEQ ID NO: 123602 - RNA, 19 nt, Artificial Sequence
  Description of Artificial Sequence: Synthetic oligonucleotide
uauguucuaccacguaaca

SEQ ID NO: 123603 - RNA, 19 nt, Artificial Sequence
  Description of Artificial Sequence: Synthetic oligonucleotide
cauacguaaggcugugggg

SEQ ID NO: 123604 - RNA, 19 nt, Artificial Sequence
  Description of Artificial Sequence: Synthetic oligonucleotide
auauaagucuuugcaauug

SEQ ID NO: 123605 - RNA, 19 nt, Artificial Sequence
  Description of Artificial Sequence: Synthetic oligonucleotide
ucuaacuggccucucucca

SEQ ID NO: 123606 - RNA, 19 nt, Artificial Sequence
  Description of Artificial Sequence: Synthetic oligonucleotide
auuaacuuaacggggaaaa

SEQ ID NO: 123607 - RNA, 19 nt, Artificial Sequence
  Description of Artificial Sequence: Synthetic oligonucleotide
uugaucgagaauacucugu

SEQ ID NO: 123608 - RNA, 19 nt, Artificial Sequence
  Description of Artificial Sequence: Synthetic oligonucleotide
uaaagcuaacaaaugucua

SEQ ID NO: 123609 - RNA, 19 nt, Artificial Sequence
  Description of Artificial Sequence: Synthetic oligonucleotide
aggguuagguaguacagcu

SEQ ID NO: 123610 - RNA, 19 nt, Artificial Sequence
  Description of Artificial Sequence: Synthetic oligonucleotide
caaagcuaaaauaucucca

SEQ ID NO: 123611 - RNA, 19 nt, Artificial Sequence
  Description of Artificial Sequence: Synthetic oligonucleotide
ggguagauuacauaguuca

SEQ ID NO: 123612 - RNA, 19 nt, Artificial Sequence
  Description of Artificial Sequence: Synthetic oligonucleotide
cugggcugggguaauacgg

SEQ ID NO: 123613 - RNA, 19 nt, Artificial Sequence
  Description of Artificial Sequence: Synthetic oligonucleotide
cagagagaccaaaggagcg

SEQ ID NO: 123614 - RNA, 19 nt, Artificial Sequence
  Description of Artificial Sequence: Synthetic oligonucleotide
cuuaauggccucaguuagg

SEQ ID NO: 123615 - RNA, 19 nt, Artificial Sequence
  Description of Artificial Sequence: Synthetic oligonucleotide
ucaaguccguuuuccagcc

SEQ ID NO: 123616 - RNA, 19 nt, Artificial Sequence
  Description of Artificial Sequence: Synthetic oligonucleotide
ugcuauggaaaggggaggg

SEQ ID NO: 123617 - RNA, 19 nt, Artificial Sequence
  Description of Artificial Sequence: Synthetic oligonucleotide
uuagcaaauuauguucuac

SEQ ID NO: 123618 - RNA, 19 nt, Artificial Sequence
  Description of Artificial Sequence: Synthetic oligonucleotide
acaaaacugccagaugcac

SEQ ID NO: 123619 - RNA, 19 nt, Artificial Sequence
  Description of Artificial Sequence: Synthetic oligonucleotide
uuuacuugugguucuggau

SEQ ID NO: 123620 - RNA, 19 nt, Artificial Sequence
  Description of Artificial Sequence: Synthetic oligonucleotide
ucuaagcuuaggguaauac

SEQ ID NO: 123621 - RNA, 19 nt, Artificial Sequence
  Description of Artificial Sequence: Synthetic oligonucleotide
gaaggguacuuauggauga

SEQ ID NO: 123622 - RNA, 19 nt, Artificial Sequence
  Description of Artificial Sequence: Synthetic oligonucleotide
caauuggucagagagacca

SEQ ID NO: 123623 - RNA, 19 nt, Artificial Sequence
  Description of Artificial Sequence: Synthetic oligonucleotide
acaggugaaucugaaaucu

SEQ ID NO: 123624 - RNA, 19 nt, Artificial Sequence
  Description of Artificial Sequence: Synthetic oligonucleotide
cagacaagauugcauauuc

SEQ ID NO: 123625 - RNA, 19 nt, Artificial Sequence
  Description of Artificial Sequence: Synthetic oligonucleotide
cacagcucgacguaucggc

SEQ ID NO: 123626 - RNA, 19 nt, Artificial Sequence
  Description of Artificial Sequence: Synthetic oligonucleotide
uuugccuugaaagacuuuu

SEQ ID NO: 123627 - RNA, 19 nt, Artificial Sequence
  Description of Artificial Sequence: Synthetic oligonucleotide
auuugaucgagaauacucu

SEQ ID NO: 123628 - RNA, 19 nt, Artificial Sequence
  Description of Artificial Sequence: Synthetic oligonucleotide
guauguaaggggccagagg

SEQ ID NO: 123629 - RNA, 19 nt, Artificial Sequence
  Description of Artificial Sequence: Synthetic oligonucleotide
gauugcaguuaagaggagc

SEQ ID NO: 123630 - RNA, 19 nt, Artificial Sequence
  Description of Artificial Sequence: Synthetic oligonucleotide
ugcacacugaccuuauaaa

SEQ ID NO: 123631 - RNA, 19 nt, Artificial Sequence
  Description of Artificial Sequence: Synthetic oligonucleotide
uccuuuuaccuguuugaug

SEQ ID NO: 123632 - RNA, 19 nt, Artificial Sequence
  Description of Artificial Sequence: Synthetic oligonucleotide
auuugccugauagcaaaac

SEQ ID NO: 123633 - RNA, 19 nt, Artificial Sequence
  Description of Artificial Sequence: Synthetic oligonucleotide
agcgggugguguuucauuc

SEQ ID NO: 123634 - RNA, 19 nt, Artificial Sequence
  Description of Artificial Sequence: Synthetic oligonucleotide
agcaaaugcauuugauagu

SEQ ID NO: 123635 - RNA, 19 nt, Artificial Sequence
  Description of Artificial Sequence: Synthetic oligonucleotide
cuuuagacugaucuuucuc

SEQ ID NO: 123636 - RNA, 19 nt, Artificial Sequence
  Description of Artificial Sequence: Synthetic oligonucleotide
guuaucugcucuaacuggc

SEQ ID NO: 123637 - RNA, 19 nt, Artificial Sequence
  Description of Artificial Sequence: Synthetic oligonucleotide
aauacgggaagcacagcug

SEQ ID NO: 123638 - RNA, 19 nt, Artificial Sequence
  Description of Artificial Sequence: Synthetic oligonucleotide
aagcgugcuuggcaauugg

SEQ ID NO: 123639 - RNA, 19 nt, Artificial Sequence
  Description of Artificial Sequence: Synthetic oligonucleotide
cuacuguggagauggauuc

SEQ ID NO: 123640 - RNA, 19 nt, Artificial Sequence
  Description of Artificial Sequence: Synthetic oligonucleotide
ucccggguggaauucacag

SEQ ID NO: 123641 - RNA, 19 nt, Artificial Sequence
  Description of Artificial Sequence: Synthetic oligonucleotide
auacguaaggcugugggga

SEQ ID NO: 123642 - RNA, 19 nt, Artificial Sequence
  Description of Artificial Sequence: Synthetic oligonucleotide
agcggagaucuuaagaauc

SEQ ID NO: 123643 - RNA, 19 nt, Artificial Sequence
  Description of Artificial Sequence: Synthetic oligonucleotide
ucaguuaggauugcaucca

SEQ ID NO: 123644 - RNA, 19 nt, Artificial Sequence
  Description of Artificial Sequence: Synthetic oligonucleotide
uacgcacaggcuuggaccc

SEQ ID NO: 123645 - RNA, 19 nt, Artificial Sequence
  Description of Artificial Sequence: Synthetic oligonucleotide
aacuuuacgcacaggcuug

SEQ ID NO: 123646 - RNA, 19 nt, Artificial Sequence
  Description of Artificial Sequence: Synthetic oligonucleotide
ucugguuauuuuagcaaau

SEQ ID NO: 123647 - RNA, 19 nt, Artificial Sequence
  Description of Artificial Sequence: Synthetic oligonucleotide
uuuugaggagcucccacua

SEQ ID NO: 123648 - RNA, 19 nt, Artificial Sequence
  Description of Artificial Sequence: Synthetic oligonucleotide
agagagaccaaaggagcgg

SEQ ID NO: 123649 - RNA, 19 nt, Artificial Sequence
  Description of Artificial Sequence: Synthetic oligonucleotide
gcagaaacuauuucuuaag

SEQ ID NO: 123650 - RNA, 19 nt, Artificial Sequence
  Description of Artificial Sequence: Synthetic oligonucleotide
gguaauacgggaagcacag

SEQ ID NO: 123651 - RNA, 19 nt, Artificial Sequence
  Description of Artificial Sequence: Synthetic oligonucleotide
aaggggccagaggauauac

SEQ ID NO: 123652 - RNA, 19 nt, Artificial Sequence
  Description of Artificial Sequence: Synthetic oligonucleotide
ucuuuagacugaucuuucu

SEQ ID NO: 123653 - RNA, 19 nt, Artificial Sequence
  Description of Artificial Sequence: Synthetic oligonucleotide
aaguccguuuuccagccau

SEQ ID NO: 123654 - RNA, 19 nt, Artificial Sequence
  Description of Artificial Sequence: Synthetic oligonucleotide
cacguauuuccugaugagg

SEQ ID NO: 123655 - RNA, 19 nt, Artificial Sequence
  Description of Artificial Sequence: Synthetic oligonucleotide
ggcgcaaugccuuaucaag

SEQ ID NO: 123656 - RNA, 19 nt, Artificial Sequence
  Description of Artificial Sequence: Synthetic oligonucleotide
agaaggguacuuauggaug

SEQ ID NO: 123657 - RNA, 19 nt, Artificial Sequence
  Description of Artificial Sequence: Synthetic oligonucleotide
uggugcucacuacaaauau

SEQ ID NO: 123658 - RNA, 19 nt, Artificial Sequence
  Description of Artificial Sequence: Synthetic oligonucleotide
ucuugaugauugaggguga

SEQ ID NO: 123659 - RNA, 19 nt, Artificial Sequence
  Description of Artificial Sequence: Synthetic oligonucleotide
cuagacauuugaucgagaa

SEQ ID NO: 123660 - RNA, 19 nt, Artificial Sequence
  Description of Artificial Sequence: Synthetic oligonucleotide
cuuaagaaucuaggggacc

SEQ ID NO: 123661 - RNA, 19 nt, Artificial Sequence
  Description of Artificial Sequence: Synthetic oligonucleotide
agagaaggguacuuaugga

SEQ ID NO: 123662 - RNA, 19 nt, Artificial Sequence
  Description of Artificial Sequence: Synthetic oligonucleotide
uaucugcucuaacuggccu

SEQ ID NO: 123663 - RNA, 19 nt, Artificial Sequence
  Description of Artificial Sequence: Synthetic oligonucleotide
uuaggguaauacugagaca

SEQ ID NO: 123664 - RNA, 19 nt, Artificial Sequence
  Description of Artificial Sequence: Synthetic oligonucleotide
ucuuaagagggaagcuagu

SEQ ID NO: 123665 - RNA, 19 nt, Artificial Sequence
  Description of Artificial Sequence: Synthetic oligonucleotide
gguuagguaguacagcuuc

SEQ ID NO: 123666 - RNA, 19 nt, Artificial Sequence
  Description of Artificial Sequence: Synthetic oligonucleotide
gcuggaauguccccgaagc

SEQ ID NO: 123667 - RNA, 19 nt, Artificial Sequence
  Description of Artificial Sequence: Synthetic oligonucleotide
ucaugccccaaauauuaaa

SEQ ID NO: 123668 - RNA, 19 nt, Artificial Sequence
  Description of Artificial Sequence: Synthetic oligonucleotide
uuggugcucacuacaaaua

SEQ ID NO: 123669 - RNA, 19 nt, Artificial Sequence
  Description of Artificial Sequence: Synthetic oligonucleotide
uucccgaaaugcucacacg

SEQ ID NO: 123670 - RNA, 19 nt, Artificial Sequence
  Description of Artificial Sequence: Synthetic oligonucleotide
aggaaagauugccuuacau

SEQ ID NO: 123671 - RNA, 19 nt, Artificial Sequence
  Description of Artificial Sequence: Synthetic oligonucleotide
accacguaacauuucuaca

SEQ ID NO: 123672 - RNA, 19 nt, Artificial Sequence
  Description of Artificial Sequence: Synthetic oligonucleotide
auaguuagaauuggucccu

SEQ ID NO: 123673 - RNA, 19 nt, Artificial Sequence
  Description of Artificial Sequence: Synthetic oligonucleotide
gcaagcuugcuuuugggug

SEQ ID NO: 123674 - RNA, 19 nt, Artificial Sequence
  Description of Artificial Sequence: Synthetic oligonucleotide
aagaaucuaggggaccaca

SEQ ID NO: 123675 - RNA, 19 nt, Artificial Sequence
  Description of Artificial Sequence: Synthetic oligonucleotide
ucaacucaugccccaaaua

SEQ ID NO: 123676 - RNA, 19 nt, Artificial Sequence
  Description of Artificial Sequence: Synthetic oligonucleotide
caaugccuuaucaagugca

SEQ ID NO: 123677 - RNA, 19 nt, Artificial Sequence
  Description of Artificial Sequence: Synthetic oligonucleotide
ucgacguaucggcauguug

SEQ ID NO: 123678 - RNA, 19 nt, Artificial Sequence
  Description of Artificial Sequence: Synthetic oligonucleotide
acugaaccccuucccagag

SEQ ID NO: 123679 - RNA, 19 nt, Artificial Sequence
  Description of Artificial Sequence: Synthetic oligonucleotide
aaggagcggagaucuuaag

SEQ ID NO: 123680 - RNA, 19 nt, Artificial Sequence
  Description of Artificial Sequence: Synthetic oligonucleotide
cucuaacuggccucucucc

SEQ ID NO: 123681 - RNA, 19 nt, Artificial Sequence
  Description of Artificial Sequence: Synthetic oligonucleotide
guuagguaguacagcuucg

SEQ ID NO: 123682 - RNA, 19 nt, Artificial Sequence
  Description of Artificial Sequence: Synthetic oligonucleotide
gcaaauuauguucuaccac

SEQ ID NO: 123683 - RNA, 19 nt, Artificial Sequence
  Description of Artificial Sequence: Synthetic oligonucleotide
caagacauacuucuucaga

SEQ ID NO: 123684 - RNA, 19 nt, Artificial Sequence
  Description of Artificial Sequence: Synthetic oligonucleotide
cucuuucuuuggaaacagg

SEQ ID NO: 123685 - RNA, 19 nt, Artificial Sequence
  Description of Artificial Sequence: Synthetic oligonucleotide
uuagguaguacagcuucgu

SEQ ID NO: 123686 - RNA, 19 nt, Artificial Sequence
  Description of Artificial Sequence: Synthetic oligonucleotide
uggagugauuuuacagcca

SEQ ID NO: 123687 - RNA, 19 nt, Artificial Sequence
  Description of Artificial Sequence: Synthetic oligonucleotide
aggucuucgguucauucau

SEQ ID NO: 123688 - RNA, 19 nt, Artificial Sequence
  Description of Artificial Sequence: Synthetic oligonucleotide
agaggguuagguaguacag

SEQ ID NO: 123689 - RNA, 19 nt, Artificial Sequence
  Description of Artificial Sequence: Synthetic oligonucleotide
ugcaauuguuuagauuaac

SEQ ID NO: 123690 - RNA, 19 nt, Artificial Sequence
  Description of Artificial Sequence: Synthetic oligonucleotide
agaguggagugauuuuaca

SEQ ID NO: 123691 - RNA, 19 nt, Artificial Sequence
  Description of Artificial Sequence: Synthetic oligonucleotide
uaaucaccacagcucuagc

SEQ ID NO: 123692 - RNA, 19 nt, Artificial Sequence
  Description of Artificial Sequence: Synthetic oligonucleotide
ggaagcaaagcgugcuugg

SEQ ID NO: 123693 - RNA, 19 nt, Artificial Sequence
  Description of Artificial Sequence: Synthetic oligonucleotide
uucgaauagcaaccaccga

SEQ ID NO: 123694 - RNA, 19 nt, Artificial Sequence
  Description of Artificial Sequence: Synthetic oligonucleotide
guuaagggaacaaugcucu

SEQ ID NO: 123695 - RNA, 19 nt, Artificial Sequence
  Description of Artificial Sequence: Synthetic oligonucleotide
agaccaaaggagcggagau

SEQ ID NO: 123696 - RNA, 19 nt, Artificial Sequence
  Description of Artificial Sequence: Synthetic oligonucleotide
aaagcgugcuuggcaauug

SEQ ID NO: 123697 - RNA, 19 nt, Artificial Sequence
  Description of Artificial Sequence: Synthetic oligonucleotide
gaaucuaggggaccacaga

SEQ ID NO: 123698 - RNA, 19 nt, Artificial Sequence
  Description of Artificial Sequence: Synthetic oligonucleotide
uugcaauuguuuagauuaa

SEQ ID NO: 123699 - RNA, 19 nt, Artificial Sequence
  Description of Artificial Sequence: Synthetic oligonucleotide
aauucacagcucgacguau

SEQ ID NO: 123700 - RNA, 19 nt, Artificial Sequence
  Description of Artificial Sequence: Synthetic oligonucleotide
guagccuucauuugggacu

SEQ ID NO: 123701 - RNA, 19 nt, Artificial Sequence
  Description of Artificial Sequence: Synthetic oligonucleotide
agauuugcccuugcuggac

SEQ ID NO: 123702 - RNA, 19 nt, Artificial Sequence
  Description of Artificial Sequence: Synthetic oligonucleotide
agggucuggcuuucuuggc

SEQ ID NO: 123703 - RNA, 19 nt, Artificial Sequence
  Description of Artificial Sequence: Synthetic oligonucleotide
agaaucuaggggaccacag

SEQ ID NO: 123704 - RNA, 19 nt, Artificial Sequence
  Description of Artificial Sequence: Synthetic oligonucleotide
ucuuugcaauuguuuagau

SEQ ID NO: 123705 - RNA, 19 nt, Artificial Sequence
  Description of Artificial Sequence: Synthetic oligonucleotide
cuguaggaugcuucuuuag

SEQ ID NO: 123706 - RNA, 19 nt, Artificial Sequence
  Description of Artificial Sequence: Synthetic oligonucleotide
accuguuggugcucacuac

SEQ ID NO: 123707 - RNA, 19 nt, Artificial Sequence
  Description of Artificial Sequence: Synthetic oligonucleotide
agaaaucagauuccacaua

SEQ ID NO: 123708 - RNA, 19 nt, Artificial Sequence
  Description of Artificial Sequence: Synthetic oligonucleotide
gaacuuuacgcacaggcuu

SEQ ID NO: 123709 - RNA, 19 nt, Artificial Sequence
  Description of Artificial Sequence: Synthetic oligonucleotide
gcuagugcuauuuuacaca

SEQ ID NO: 123710 - RNA, 19 nt, Artificial Sequence
  Description of Artificial Sequence: Synthetic oligonucleotide
gcuaaaauaucuccagcuc

SEQ ID NO: 123711 - RNA, 19 nt, Artificial Sequence
  Description of Artificial Sequence: Synthetic oligonucleotide
uccagccauacguaaggcu

SEQ ID NO: 123712 - RNA, 19 nt, Artificial Sequence
  Description of Artificial Sequence: Synthetic oligonucleotide
aaugcucacacgggaagaa

SEQ ID NO: 123713 - RNA, 19 nt, Artificial Sequence
  Description of Artificial Sequence: Synthetic oligonucleotide
uggcucuuucuuuggaaac

SEQ ID NO: 123714 - RNA, 19 nt, Artificial Sequence
  Description of Artificial Sequence: Synthetic oligonucleotide
ccauacguaaggcuguggg

SEQ ID NO: 123715 - RNA, 19 nt, Artificial Sequence
  Description of Artificial Sequence: Synthetic oligonucleotide
uaccuguuggugcucacua

SEQ ID NO: 123716 - RNA, 19 nt, Artificial Sequence
  Description of Artificial Sequence: Synthetic oligonucleotide
uagcaaccaccgaagcacc

SEQ ID NO: 123717 - RNA, 19 nt, Artificial Sequence
  Description of Artificial Sequence: Synthetic oligonucleotide
gaggguuagguaguacagc

SEQ ID NO: 123718 - RNA, 19 nt, Artificial Sequence
  Description of Artificial Sequence: Synthetic oligonucleotide
gagaaggguacuuauggau

SEQ ID NO: 123719 - RNA, 19 nt, Artificial Sequence
  Description of Artificial Sequence: Synthetic oligonucleotide
auauaucuagacauuugau

SEQ ID NO: 123720 - RNA, 19 nt, Artificial Sequence
  Description of Artificial Sequence: Synthetic oligonucleotide
uuaaggagauagccccuuc

SEQ ID NO: 123721 - RNA, 19 nt, Artificial Sequence
  Description of Artificial Sequence: Synthetic oligonucleotide
agacacguauuuccugaug

SEQ ID NO: 123722 - RNA, 19 nt, Artificial Sequence
  Description of Artificial Sequence: Synthetic oligonucleotide
cuaacuggccucucuccac

SEQ ID NO: 123723 - RNA, 19 nt, Artificial Sequence
  Description of Artificial Sequence: Synthetic oligonucleotide
gaagcaaagcgugcuuggc

SEQ ID NO: 123724 - RNA, 19 nt, Artificial Sequence
  Description of Artificial Sequence: Synthetic oligonucleotide
ucguuugcuuuccccuucc

SEQ ID NO: 123725 - RNA, 19 nt, Artificial Sequence
  Description of Artificial Sequence: Synthetic oligonucleotide
ggagcggagaucuuaagaa

SEQ ID NO: 123726 - RNA, 19 nt, Artificial Sequence
  Description of Artificial Sequence: Synthetic oligonucleotide
cucgcaacaggugaaucug

SEQ ID NO: 123727 - RNA, 19 nt, Artificial Sequence
  Description of Artificial Sequence: Synthetic oligonucleotide
agucgaguaaaggccaaug

SEQ ID NO: 123728 - RNA, 19 nt, Artificial Sequence
  Description of Artificial Sequence: Synthetic oligonucleotide
aggguagauuacauaguuc

SEQ ID NO: 123729 - RNA, 19 nt, Artificial Sequence
  Description of Artificial Sequence: Synthetic oligonucleotide
acguaacauuucuacauua

SEQ ID NO: 123730 - RNA, 19 nt, Artificial Sequence
  Description of Artificial Sequence: Synthetic oligonucleotide
ucaagcccauuuucucaag

SEQ ID NO: 123731 - RNA, 19 nt, Artificial Sequence
  Description of Artificial Sequence: Synthetic oligonucleotide
ucacagcucgacguaucgg

SEQ ID NO: 123732 - RNA, 19 nt, Artificial Sequence
  Description of Artificial Sequence: Synthetic oligonucleotide
caacaggugaaucugaaau

SEQ ID NO: 123733 - RNA, 19 nt, Artificial Sequence
  Description of Artificial Sequence: Synthetic oligonucleotide
caguuaagaggagcaaaag

SEQ ID NO: 123734 - RNA, 19 nt, Artificial Sequence
  Description of Artificial Sequence: Synthetic oligonucleotide
uguaaggggccagaggaua

SEQ ID NO: 123735 - RNA, 19 nt, Artificial Sequence
  Description of Artificial Sequence: Synthetic oligonucleotide
aaugccuuaucaagugcau

SEQ ID NO: 123736 - RNA, 19 nt, Artificial Sequence
  Description of Artificial Sequence: Synthetic oligonucleotide
aggaacaggguagauuaca

SEQ ID NO: 123737 - RNA, 19 nt, Artificial Sequence
  Description of Artificial Sequence: Synthetic oligonucleotide
cucaugaugggaucucaca

SEQ ID NO: 123738 - RNA, 19 nt, Artificial Sequence
  Description of Artificial Sequence: Synthetic oligonucleotide
gagaguggagugauuuuac

SEQ ID NO: 123739 - RNA, 19 nt, Artificial Sequence
  Description of Artificial Sequence: Synthetic oligonucleotide
agcuggaauguccccgaag

SEQ ID NO: 123740 - RNA, 19 nt, Artificial Sequence
  Description of Artificial Sequence: Synthetic oligonucleotide
cgacguaucggcauguugc

SEQ ID NO: 123741 - RNA, 19 nt, Artificial Sequence
  Description of Artificial Sequence: Synthetic oligonucleotide
aucggcauguugcuauccu

SEQ ID NO: 123742 - RNA, 19 nt, Artificial Sequence
  Description of Artificial Sequence: Synthetic oligonucleotide
cuuggacccucucugcuuc

SEQ ID NO: 123743 - RNA, 19 nt, Artificial Sequence
  Description of Artificial Sequence: Synthetic oligonucleotide
cuaagcuuaggguaauacu

SEQ ID NO: 123744 - RNA, 19 nt, Artificial Sequence
  Description of Artificial Sequence: Synthetic oligonucleotide
aaccaccgaagcaccacuc

SEQ ID NO: 123745 - RNA, 19 nt, Artificial Sequence
  Description of Artificial Sequence: Synthetic oligonucleotide
ucccacuagacuucuugau

SEQ ID NO: 123746 - RNA, 19 nt, Artificial Sequence
  Description of Artificial Sequence: Synthetic oligonucleotide
cuguacuucccuucaguca

SEQ ID NO: 123747 - RNA, 19 nt, Artificial Sequence
  Description of Artificial Sequence: Synthetic oligonucleotide
gugguucuccaagacauac

SEQ ID NO: 123748 - RNA, 19 nt, Artificial Sequence
  Description of Artificial Sequence: Synthetic oligonucleotide
ucgcaacaggugaaucuga

SEQ ID NO: 123749 - RNA, 19 nt, Artificial Sequence
  Description of Artificial Sequence: Synthetic oligonucleotide
caggugaaucugaaaucug

SEQ ID NO: 123750 - RNA, 19 nt, Artificial Sequence
  Description of Artificial Sequence: Synthetic oligonucleotide
acuuuacgcacaggcuugg

SEQ ID NO: 123751 - RNA, 19 nt, Artificial Sequence
  Description of Artificial Sequence: Synthetic oligonucleotide
cagagucgaguaaaggcca

SEQ ID NO: 123752 - RNA, 19 nt, Artificial Sequence
  Description of Artificial Sequence: Synthetic oligonucleotide
guggaauucacagcucgac

SEQ ID NO: 123753 - RNA, 19 nt, Artificial Sequence
  Description of Artificial Sequence: Synthetic oligonucleotide
gaauucacagcucgacgua

SEQ ID NO: 123754 - RNA, 19 nt, Artificial Sequence
  Description of Artificial Sequence: Synthetic oligonucleotide
ucgagaauacucugucauu

SEQ ID NO: 123755 - RNA, 19 nt, Artificial Sequence
  Description of Artificial Sequence: Synthetic oligonucleotide
gucugauguccacucuaag

SEQ ID NO: 123756 - RNA, 19 nt, Artificial Sequence
  Description of Artificial Sequence: Synthetic oligonucleotide
gguagauuacauaguucag

SEQ ID NO: 123757 - RNA, 19 nt, Artificial Sequence
  Description of Artificial Sequence: Synthetic oligonucleotide
caugccuuaauggccucag

SEQ ID NO: 123758 - RNA, 19 nt, Artificial Sequence
  Description of Artificial Sequence: Synthetic oligonucleotide
gcccauuuucucaaguccg

SEQ ID NO: 123759 - RNA, 19 nt, Artificial Sequence
  Description of Artificial Sequence: Synthetic oligonucleotide
uuucccggguggaauucac

SEQ ID NO: 123760 - RNA, 19 nt, Artificial Sequence
  Description of Artificial Sequence: Synthetic oligonucleotide
ugauccaauucaagcccau

SEQ ID NO: 123761 - RNA, 19 nt, Artificial Sequence
  Description of Artificial Sequence: Synthetic oligonucleotide
agcucgacguaucggcaug

SEQ ID NO: 123762 - RNA, 19 nt, Artificial Sequence
  Description of Artificial Sequence: Synthetic oligonucleotide
aagccuaguugguguuugu

SEQ ID NO: 123763 - RNA, 19 nt, Artificial Sequence
  Description of Artificial Sequence: Synthetic oligonucleotide
uucuaccacguaacauuuc

SEQ ID NO: 123764 - RNA, 19 nt, Artificial Sequence
  Description of Artificial Sequence: Synthetic oligonucleotide
uagguaguacagcuucguu

SEQ ID NO: 123765 - RNA, 19 nt, Artificial Sequence
  Description of Artificial Sequence: Synthetic oligonucleotide
ggucuggcuuucuuggcag

SEQ ID NO: 123766 - RNA, 19 nt, Artificial Sequence
  Description of Artificial Sequence: Synthetic oligonucleotide
gaacaggguagauuacaua

SEQ ID NO: 123767 - RNA, 19 nt, Artificial Sequence
  Description of Artificial Sequence: Synthetic oligonucleotide
cacacgggaagaaaauaaa

SEQ ID NO: 123768 - RNA, 19 nt, Artificial Sequence
  Description of Artificial Sequence: Synthetic oligonucleotide
uaggcucacagagucgagu

SEQ ID NO: 123769 - RNA, 19 nt, Artificial Sequence
  Description of Artificial Sequence: Synthetic oligonucleotide
accaccgaagcaccacucu

SEQ ID NO: 123770 - RNA, 19 nt, Artificial Sequence
  Description of Artificial Sequence: Synthetic oligonucleotide
ucacuagcuguagcgggug

SEQ ID NO: 123771 - RNA, 19 nt, Artificial Sequence
  Description of Artificial Sequence: Synthetic oligonucleotide
uacguaaggcuguggggau

SEQ ID NO: 123772 - RNA, 19 nt, Artificial Sequence
  Description of Artificial Sequence: Synthetic oligonucleotide
uguccacucuaagcuuagg

SEQ ID NO: 123773 - RNA, 19 nt, Artificial Sequence
  Description of Artificial Sequence: Synthetic oligonucleotide
guaguacagcuucguuugc

SEQ ID NO: 123774 - RNA, 19 nt, Artificial Sequence
  Description of Artificial Sequence: Synthetic oligonucleotide
auguucuaccacguaacau

SEQ ID NO: 123775 - RNA, 19 nt, Artificial Sequence
  Description of Artificial Sequence: Synthetic oligonucleotide
uucuacuguggagauggau

SEQ ID NO: 123776 - RNA, 19 nt, Artificial Sequence
  Description of Artificial Sequence: Synthetic oligonucleotide
uaguuagaauuggucccug

SEQ ID NO: 123777 - RNA, 19 nt, Artificial Sequence
  Description of Artificial Sequence: Synthetic oligonucleotide
uuccagccauacguaaggc

SEQ ID NO: 123778 - RNA, 19 nt, Artificial Sequence
  Description of Artificial Sequence: Synthetic oligonucleotide
acaggguagauuacauagu

SEQ ID NO: 123779 - RNA, 19 nt, Artificial Sequence
  Description of Artificial Sequence: Synthetic oligonucleotide
gggagaauaucuuccagcu

SEQ ID NO: 123780 - RNA, 19 nt, Artificial Sequence
  Description of Artificial Sequence: Synthetic oligonucleotide
ccaaccguucuucucacac

SEQ ID NO: 123781 - RNA, 19 nt, Artificial Sequence
  Description of Artificial Sequence: Synthetic oligonucleotide
uucccggguggaauucaca

SEQ ID NO: 123782 - RNA, 19 nt, Artificial Sequence
  Description of Artificial Sequence: Synthetic oligonucleotide
ggguuaaucaccacagcuc

SEQ ID NO: 123783 - RNA, 19 nt, Artificial Sequence
  Description of Artificial Sequence: Synthetic oligonucleotide
ccucaguuaggauugcauc

SEQ ID NO: 123784 - RNA, 19 nt, Artificial Sequence
  Description of Artificial Sequence: Synthetic oligonucleotide
uguagcgggugguguuuca

SEQ ID NO: 123785 - RNA, 19 nt, Artificial Sequence
  Description of Artificial Sequence: Synthetic oligonucleotide
agauccagagaaggguacu

SEQ ID NO: 123786 - RNA, 19 nt, Artificial Sequence
  Description of Artificial Sequence: Synthetic oligonucleotide
aaucucaaacaaacaccuu

SEQ ID NO: 123787 - RNA, 19 nt, Artificial Sequence
  Description of Artificial Sequence: Synthetic oligonucleotide
caguaccuaaagcuaacaa

SEQ ID NO: 123788 - RNA, 19 nt, Artificial Sequence
  Description of Artificial Sequence: Synthetic oligonucleotide
cuagcuguagcggguggug

SEQ ID NO: 123789 - RNA, 19 nt, Artificial Sequence
  Description of Artificial Sequence: Synthetic oligonucleotide
uccuuaucuuuagaaccau

SEQ ID NO: 123790 - RNA, 19 nt, Artificial Sequence
  Description of Artificial Sequence: Synthetic oligonucleotide
aggcgcaaugccuuaucaa

SEQ ID NO: 123791 - RNA, 19 nt, Artificial Sequence
  Description of Artificial Sequence: Synthetic oligonucleotide
cccgaaaugcucacacggg

SEQ ID NO: 123792 - RNA, 19 nt, Artificial Sequence
  Description of Artificial Sequence: Synthetic oligonucleotide
gggaccucgcaacagguga

SEQ ID NO: 123793 - RNA, 19 nt, Artificial Sequence
  Description of Artificial Sequence: Synthetic oligonucleotide
cgaguaaaggccaauggga

SEQ ID NO: 123794 - RNA, 19 nt, Artificial Sequence
  Description of Artificial Sequence: Synthetic oligonucleotide
cacuagcuguagcgggugg

SEQ ID NO: 123795 - RNA, 19 nt, Artificial Sequence
  Description of Artificial Sequence: Synthetic oligonucleotide
cucccacuagacuucuuga

SEQ ID NO: 123796 - RNA, 19 nt, Artificial Sequence
  Description of Artificial Sequence: Synthetic oligonucleotide
uggguggaguuucccgggu

SEQ ID NO: 123797 - RNA, 19 nt, Artificial Sequence
  Description of Artificial Sequence: Synthetic oligonucleotide
ugcuuggcaauuggucaga

SEQ ID NO: 123798 - RNA, 19 nt, Artificial Sequence
  Description of Artificial Sequence: Synthetic oligonucleotide
auugagggugagggucugg

SEQ ID NO: 123799 - RNA, 19 nt, Artificial Sequence
  Description of Artificial Sequence: Synthetic oligonucleotide
gacucaugaugggaucuca

SEQ ID NO: 123800 - RNA, 19 nt, Artificial Sequence
  Description of Artificial Sequence: Synthetic oligonucleotide
accucgcaacaggugaauc

SEQ ID NO: 123801 - RNA, 19 nt, Artificial Sequence
  Description of Artificial Sequence: Synthetic oligonucleotide
gacguaucggcauguugcu

SEQ ID NO: 123802 - RNA, 19 nt, Artificial Sequence
  Description of Artificial Sequence: Synthetic oligonucleotide
aucuaggggaccacagaga

SEQ ID NO: 123803 - RNA, 19 nt, Artificial Sequence
  Description of Artificial Sequence: Synthetic oligonucleotide
gaccaaaggagcggagauc

SEQ ID NO: 123804 - RNA, 19 nt, Artificial Sequence
  Description of Artificial Sequence: Synthetic oligonucleotide
ggaugauguacuuucgaau

SEQ ID NO: 123805 - RNA, 19 nt, Artificial Sequence
  Description of Artificial Sequence: Synthetic oligonucleotide
ugucuacauugguuuguuu

SEQ ID NO: 123806 - RNA, 19 nt, Artificial Sequence
  Description of Artificial Sequence: Synthetic oligonucleotide
uccaaccguucuucucaca

SEQ ID NO: 123807 - RNA, 19 nt, Artificial Sequence
  Description of Artificial Sequence: Synthetic oligonucleotide
acguaaggcuguggggauc

SEQ ID NO: 123808 - RNA, 19 nt, Artificial Sequence
  Description of Artificial Sequence: Synthetic oligonucleotide
guccguuuuccagccauac

SEQ ID NO: 123809 - RNA, 19 nt, Artificial Sequence
  Description of Artificial Sequence: Synthetic oligonucleotide
guaucggcauguugcuauc

SEQ ID NO: 123810 - RNA, 19 nt, Artificial Sequence
  Description of Artificial Sequence: Synthetic oligonucleotide
gcuauggaaaggggagggg

SEQ ID NO: 123811 - RNA, 19 nt, Artificial Sequence
  Description of Artificial Sequence: Synthetic oligonucleotide
gagcggagaucuuaagaau

SEQ ID NO: 123812 - RNA, 19 nt, Artificial Sequence
  Description of Artificial Sequence: Synthetic oligonucleotide
auguccccgaagcaccuuu

SEQ ID NO: 123813 - RNA, 19 nt, Artificial Sequence
  Description of Artificial Sequence: Synthetic oligonucleotide
cuaguugguguuuguuucu

SEQ ID NO: 123814 - RNA, 19 nt, Artificial Sequence
  Description of Artificial Sequence: Synthetic oligonucleotide
gccuuaauggccucaguua

SEQ ID NO: 123815 - RNA, 19 nt, Artificial Sequence
  Description of Artificial Sequence: Synthetic oligonucleotide
gguacuuauggaugaugua

SEQ ID NO: 123816 - RNA, 19 nt, Artificial Sequence
  Description of Artificial Sequence: Synthetic oligonucleotide
cuuggguugcuccgccuca

SEQ ID NO: 123817 - RNA, 19 nt, Artificial Sequence
  Description of Artificial Sequence: Synthetic oligonucleotide
ggagauggauuccucugaa

SEQ ID NO: 123818 - RNA, 19 nt, Artificial Sequence
  Description of Artificial Sequence: Synthetic oligonucleotide
uggguugcuccgccucacu

SEQ ID NO: 123819 - RNA, 19 nt, Artificial Sequence
  Description of Artificial Sequence: Synthetic oligonucleotide
ggacuacaacaaaacugcc

SEQ ID NO: 123820 - RNA, 19 nt, Artificial Sequence
  Description of Artificial Sequence: Synthetic oligonucleotide
gccucacuagcuguagcgg

SEQ ID NO: 123821 - RNA, 19 nt, Artificial Sequence
  Description of Artificial Sequence: Synthetic oligonucleotide
uccaccaagcagggguuuc

SEQ ID NO: 123822 - RNA, 19 nt, Artificial Sequence
  Description of Artificial Sequence: Synthetic oligonucleotide
ccuuaucuuuagaaccauc

SEQ ID NO: 123823 - RNA, 19 nt, Artificial Sequence
  Description of Artificial Sequence: Synthetic oligonucleotide
caggcgcaaugccuuauca

SEQ ID NO: 123824 - RNA, 19 nt, Artificial Sequence
  Description of Artificial Sequence: Synthetic oligonucleotide
uagcgggugguguuucauu

SEQ ID NO: 123825 - RNA, 19 nt, Artificial Sequence
  Description of Artificial Sequence: Synthetic oligonucleotide
acagcucgacguaucggca

SEQ ID NO: 123826 - RNA, 19 nt, Artificial Sequence
  Description of Artificial Sequence: Synthetic oligonucleotide
ccacucuaagcuuagggua

SEQ ID NO: 123827 - RNA, 19 nt, Artificial Sequence
  Description of Artificial Sequence: Synthetic oligonucleotide
ggagaguggagugauuuua

SEQ ID NO: 123828 - RNA, 19 nt, Artificial Sequence
  Description of Artificial Sequence: Synthetic oligonucleotide
agccauacguaaggcugug

SEQ ID NO: 123829 - RNA, 19 nt, Artificial Sequence
  Description of Artificial Sequence: Synthetic oligonucleotide
ggaugcuucuuuaggcuca

SEQ ID NO: 123830 - RNA, 19 nt, Artificial Sequence
  Description of Artificial Sequence: Synthetic oligonucleotide
cucuucuacuguggagaug

SEQ ID NO: 123831 - RNA, 19 nt, Artificial Sequence
  Description of Artificial Sequence: Synthetic oligonucleotide
gucaacucaugccccaaau

SEQ ID NO: 123832 - RNA, 19 nt, Artificial Sequence
  Description of Artificial Sequence: Synthetic oligonucleotide
cucacuagcuguagcgggu

SEQ ID NO: 123833 - RNA, 19 nt, Artificial Sequence
  Description of Artificial Sequence: Synthetic oligonucleotide
cuaccacguaacauuucua

SEQ ID NO: 123834 - RNA, 19 nt, Artificial Sequence
  Description of Artificial Sequence: Synthetic oligonucleotide
ccuuacaugcaacacaaau

SEQ ID NO: 123835 - RNA, 19 nt, Artificial Sequence
  Description of Artificial Sequence: Synthetic oligonucleotide
agcgugcuuggcaauuggu

SEQ ID NO: 123836 - RNA, 19 nt, Artificial Sequence
  Description of Artificial Sequence: Synthetic oligonucleotide
cucacacgggaagaaaaua

SEQ ID NO: 123837 - RNA, 19 nt, Artificial Sequence
  Description of Artificial Sequence: Synthetic oligonucleotide
cagcucaagcuggagagaa

SEQ ID NO: 123838 - RNA, 19 nt, Artificial Sequence
  Description of Artificial Sequence: Synthetic oligonucleotide
accuaccuguuggugcuca

SEQ ID NO: 123839 - RNA, 19 nt, Artificial Sequence
  Description of Artificial Sequence: Synthetic oligonucleotide
guuugaugacuccucuguu

SEQ ID NO: 123840 - RNA, 19 nt, Artificial Sequence
  Description of Artificial Sequence: Synthetic oligonucleotide
ggaacuuuacgcacaggcu

SEQ ID NO: 123841 - RNA, 19 nt, Artificial Sequence
  Description of Artificial Sequence: Synthetic oligonucleotide
ccacguaacauuucuacau

SEQ ID NO: 123842 - RNA, 19 nt, Artificial Sequence
  Description of Artificial Sequence: Synthetic oligonucleotide
ccgaaaugcucacacggga

SEQ ID NO: 123843 - RNA, 19 nt, Artificial Sequence
  Description of Artificial Sequence: Synthetic oligonucleotide
acagagacuagggcuucuu

SEQ ID NO: 123844 - RNA, 19 nt, Artificial Sequence
  Description of Artificial Sequence: Synthetic oligonucleotide
agagucgaguaaaggccaa

SEQ ID NO: 123845 - RNA, 19 nt, Artificial Sequence
  Description of Artificial Sequence: Synthetic oligonucleotide
cccggguggaauucacagc

SEQ ID NO: 123846 - RNA, 19 nt, Artificial Sequence
  Description of Artificial Sequence: Synthetic oligonucleotide
guuucccggguggaauuca

SEQ ID NO: 123847 - RNA, 19 nt, Artificial Sequence
  Description of Artificial Sequence: Synthetic oligonucleotide
gcuguaggaugcuucuuua

SEQ ID NO: 123848 - RNA, 19 nt, Artificial Sequence
  Description of Artificial Sequence: Synthetic oligonucleotide
gcuuaggguaauacugaga

SEQ ID NO: 123849 - RNA, 19 nt, Artificial Sequence
  Description of Artificial Sequence: Synthetic oligonucleotide
agccuaguugguguuuguu

SEQ ID NO: 123850 - RNA, 19 nt, Artificial Sequence
  Description of Artificial Sequence: Synthetic oligonucleotide
cacagguuaugauccaauu

SEQ ID NO: 123851 - RNA, 19 nt, Artificial Sequence
  Description of Artificial Sequence: Synthetic oligonucleotide
cacguaacauuucuacauu

SEQ ID NO: 123852 - RNA, 19 nt, Artificial Sequence
  Description of Artificial Sequence: Synthetic oligonucleotide
cguaaggcuguggggaucc

SEQ ID NO: 123853 - RNA, 19 nt, Artificial Sequence
  Description of Artificial Sequence: Synthetic oligonucleotide
cagcaccuaccuguuggug

SEQ ID NO: 123854 - RNA, 19 nt, Artificial Sequence
  Description of Artificial Sequence: Synthetic oligonucleotide
guuaaucaccacagcucua

SEQ ID NO: 123855 - RNA, 19 nt, Artificial Sequence
  Description of Artificial Sequence: Synthetic oligonucleotide
caaccguucuucucacacu

SEQ ID NO: 123856 - RNA, 19 nt, Artificial Sequence
  Description of Artificial Sequence: Synthetic oligonucleotide
gaagcaccuuugccaguua

SEQ ID NO: 123857 - RNA, 19 nt, Artificial Sequence
  Description of Artificial Sequence: Synthetic oligonucleotide
gcuuggcaauuggucagag

SEQ ID NO: 123858 - RNA, 19 nt, Artificial Sequence
  Description of Artificial Sequence: Synthetic oligonucleotide
gcgugcuuggcaauugguc

SEQ ID NO: 123859 - RNA, 19 nt, Artificial Sequence
  Description of Artificial Sequence: Synthetic oligonucleotide
cagccauacguaaggcugu

SEQ ID NO: 123860 - RNA, 19 nt, Artificial Sequence
  Description of Artificial Sequence: Synthetic oligonucleotide
cuucuacuguggagaugga

SEQ ID NO: 123861 - RNA, 19 nt, Artificial Sequence
  Description of Artificial Sequence: Synthetic oligonucleotide
cuguagcgggugguguuuc

SEQ ID NO: 123862 - RNA, 19 nt, Artificial Sequence
  Description of Artificial Sequence: Synthetic oligonucleotide
ggagacacugcaaguggaa

SEQ ID NO: 123863 - RNA, 19 nt, Artificial Sequence
  Description of Artificial Sequence: Synthetic oligonucleotide
ccggguggaauucacagcu

SEQ ID NO: 123864 - RNA, 19 nt, Artificial Sequence
  Description of Artificial Sequence: Synthetic oligonucleotide
ggauugcaguuaagaggag

SEQ ID NO: 123865 - RNA, 19 nt, Artificial Sequence
  Description of Artificial Sequence: Synthetic oligonucleotide
ucuugacuuccagcaccua

SEQ ID NO: 123866 - RNA, 19 nt, Artificial Sequence
  Description of Artificial Sequence: Synthetic oligonucleotide
caaccaccgaagcaccacu

SEQ ID NO: 123867 - RNA, 19 nt, Artificial Sequence
  Description of Artificial Sequence: Synthetic oligonucleotide
aggggccagaggauauaca

SEQ ID NO: 123868 - RNA, 19 nt, Artificial Sequence
  Description of Artificial Sequence: Synthetic oligonucleotide
ggaacaggguagauuacau

SEQ ID NO: 123869 - RNA, 19 nt, Artificial Sequence
  Description of Artificial Sequence: Synthetic oligonucleotide
gcaccuaccuguuggugcu

SEQ ID NO: 123870 - RNA, 19 nt, Artificial Sequence
  Description of Artificial Sequence: Synthetic oligonucleotide
guaaggcuguggggauccc

SEQ ID NO: 123871 - RNA, 19 nt, Artificial Sequence
  Description of Artificial Sequence: Synthetic oligonucleotide
caaguggugcagacaacuu

SEQ ID NO: 123872 - RNA, 19 nt, Artificial Sequence
  Description of Artificial Sequence: Synthetic oligonucleotide
guaaggggccagaggauau

SEQ ID NO: 123873 - RNA, 19 nt, Artificial Sequence
  Description of Artificial Sequence: Synthetic oligonucleotide
agcucaagcuggagagaau

SEQ ID NO: 123874 - RNA, 19 nt, Artificial Sequence
  Description of Artificial Sequence: Synthetic oligonucleotide
caaguccguuuuccagcca

SEQ ID NO: 123875 - RNA, 19 nt, Artificial Sequence
  Description of Artificial Sequence: Synthetic oligonucleotide
acguaucggcauguugcua

SEQ ID NO: 123876 - RNA, 19 nt, Artificial Sequence
  Description of Artificial Sequence: Synthetic oligonucleotide
gccuaguugguguuuguuu

SEQ ID NO: 123877 - RNA, 19 nt, Artificial Sequence
  Description of Artificial Sequence: Synthetic oligonucleotide
ccucgcaacaggugaaucu

SEQ ID NO: 123878 - RNA, 19 nt, Artificial Sequence
  Description of Artificial Sequence: Synthetic oligonucleotide
ccaaguggugcagacaacu

SEQ ID NO: 123879 - RNA, 19 nt, Artificial Sequence
  Description of Artificial Sequence: Synthetic oligonucleotide
ggggaccucgcaacaggug

SEQ ID NO: 123880 - RNA, 19 nt, Artificial Sequence
  Description of Artificial Sequence: Synthetic oligonucleotide
aguccguuuuccagccaua

SEQ ID NO: 123881 - RNA, 19 nt, Artificial Sequence
  Description of Artificial Sequence: Synthetic oligonucleotide
ggcuuucuuggcagggguc

SEQ ID NO: 123882 - RNA, 19 nt, Artificial Sequence
  Description of Artificial Sequence: Synthetic oligonucleotide
cuaccuguuggugcucacu

SEQ ID NO: 123883 - RNA, 19 nt, Artificial Sequence
  Description of Artificial Sequence: Synthetic oligonucleotide
gagucgaguaaaggccaau

SEQ ID NO: 123884 - RNA, 19 nt, Artificial Sequence
  Description of Artificial Sequence: Synthetic oligonucleotide
uggucccugggugguucuc

SEQ ID NO: 123885 - RNA, 19 nt, Artificial Sequence
  Description of Artificial Sequence: Synthetic oligonucleotide
cguaucggcauguugcuau

SEQ ID NO: 123886 - RNA, 19 nt, Artificial Sequence
  Description of Artificial Sequence: Synthetic oligonucleotide
ccuaccuguuggugcucac

SEQ ID NO: 123887 - RNA, 19 nt, Artificial Sequence
  Description of Artificial Sequence: Synthetic oligonucleotide
gcgcaaugccuuaucaagu

SEQ ID NO: 123888 - RNA, 19 nt, Artificial Sequence
  Description of Artificial Sequence: Synthetic oligonucleotide
cagcucgacguaucggcau

SEQ ID NO: 123889 - RNA, 19 nt, Artificial Sequence
  Description of Artificial Sequence: Synthetic oligonucleotide
gcuuaaggagauagccccu

SEQ ID NO: 123890 - RNA, 19 nt, Artificial Sequence
  Description of Artificial Sequence: Synthetic oligonucleotide
guagcgggugguguuucau

SEQ ID NO: 123891 - RNA, 19 nt, Artificial Sequence
  Description of Artificial Sequence: Synthetic oligonucleotide
cgcaacaggugaaucugaa

SEQ ID NO: 123892 - RNA, 19 nt, Artificial Sequence
  Description of Artificial Sequence: Synthetic oligonucleotide
gcucacacgggaagaaaau

SEQ ID NO: 123893 - RNA, 19 nt, Artificial Sequence
  Description of Artificial Sequence: Synthetic oligonucleotide
caccuaccuguuggugcuc

SEQ ID NO: 123894 - RNA, 19 nt, Artificial Sequence
  Description of Artificial Sequence: Synthetic oligonucleotide
cgagaauacucugucauuu

SEQ ID NO: 123895 - RNA, 19 nt, Artificial Sequence
  Description of Artificial Sequence: Synthetic oligonucleotide
gcuuggacccucucugcuu

SEQ ID NO: 123896 - RNA, 19 nt, Artificial Sequence
  Description of Artificial Sequence: Synthetic oligonucleotide
gagcaggucuucgguucau

SEQ ID NO: 123897 - RNA, 19 nt, Artificial Sequence
  Description of Artificial Sequence: Synthetic oligonucleotide
ggacuuggcugggguuuuc

SEQ ID NO: 123898 - RNA, 19 nt, Artificial Sequence
  Description of Artificial Sequence: Synthetic oligonucleotide
ccuucccgaaaugcucaca

SEQ ID NO: 123899 - RNA, 19 nt, Artificial Sequence
  Description of Artificial Sequence: Synthetic oligonucleotide
ggguuagguaguacagcuu

SEQ ID NO: 123900 - RNA, 19 nt, Artificial Sequence
  Description of Artificial Sequence: Synthetic oligonucleotide
gccuuacaugcaacacaaa

SEQ ID NO: 123901 - RNA, 19 nt, Artificial Sequence
  Description of Artificial Sequence: Synthetic oligonucleotide
cuugggcaguggccucgcu

SEQ ID NO: 123902 - RNA, 19 nt, Artificial Sequence
  Description of Artificial Sequence: Synthetic oligonucleotide
gcucgacguaucggcaugu

SEQ ID NO: 123903 - RNA, 19 nt, Artificial Sequence
  Description of Artificial Sequence: Synthetic oligonucleotide
cgcacaggcuuggacccuc

SEQ ID NO: 123904 - RNA, 19 nt, Artificial Sequence
  Description of Artificial Sequence: Synthetic oligonucleotide
gcuguagcgggugguguuu

SEQ ID NO: 123905 - RNA, 19 nt, Artificial Sequence
  Description of Artificial Sequence: Synthetic oligonucleotide
ccaccgaagcaccacucuu

SEQ ID NO: 123906 - RNA, 19 nt, Artificial Sequence
  Description of Artificial Sequence: Synthetic oligonucleotide
cucgacguaucggcauguu

SEQ ID NO: 123907 - RNA, 19 nt, Artificial Sequence
  Description of Artificial Sequence: Synthetic oligonucleotide
ccaccaagcagggguuucu

SEQ ID NO: 123908 - RNA, 19 nt, Artificial Sequence
  Description of Artificial Sequence: Synthetic oligonucleotide
acauauaccacuuuugccc

SEQ ID NO: 123909 - RNA, 19 nt, Artificial Sequence
  Description of Artificial Sequence: Synthetic oligonucleotide
aaaagaaucaucccgguca

SEQ ID NO: 123910 - RNA, 19 nt, Artificial Sequence
  Description of Artificial Sequence: Synthetic oligonucleotide
aacauauaccacuuuugcc

SEQ ID NO: 123911 - RNA, 19 nt, Artificial Sequence
  Description of Artificial Sequence: Synthetic oligonucleotide
aauaaaagaaucaucccgg

SEQ ID NO: 123912 - RNA, 19 nt, Artificial Sequence
  Description of Artificial Sequence: Synthetic oligonucleotide
aaguguaacacucaauucu

SEQ ID NO: 123913 - RNA, 19 nt, Artificial Sequence
  Description of Artificial Sequence: Synthetic oligonucleotide
aaauagggaaaucagcugu

SEQ ID NO: 123914 - RNA, 19 nt, Artificial Sequence
  Description of Artificial Sequence: Synthetic oligonucleotide
uuauuuuaaagauggggcc

SEQ ID NO: 123915 - RNA, 19 nt, Artificial Sequence
  Description of Artificial Sequence: Synthetic oligonucleotide
ucaaauuaaggcauugucu

SEQ ID NO: 123916 - RNA, 19 nt, Artificial Sequence
  Description of Artificial Sequence: Synthetic oligonucleotide
uauuccaaaauuaugggau

SEQ ID NO: 123917 - RNA, 19 nt, Artificial Sequence
  Description of Artificial Sequence: Synthetic oligonucleotide
  modified_base (7)..(7): a, c, u, g, unknown or other
cuucaunucuucuuguggc

SEQ ID NO: 123918 - RNA, 19 nt, Artificial Sequence
  Description of Artificial Sequence: Synthetic oligonucleotide
uggucaauaguucaaauaa

SEQ ID NO: 123919 - RNA, 19 nt, Artificial Sequence
  Description of Artificial Sequence: Synthetic oligonucleotide
ggugguaaaacuuuggucc

SEQ ID NO: 123920 - RNA, 19 nt, Artificial Sequence
  Description of Artificial Sequence: Synthetic oligonucleotide
aaaauagggaaaucagcug

SEQ ID NO: 123921 - RNA, 19 nt, Artificial Sequence
  Description of Artificial Sequence: Synthetic oligonucleotide
aaaaucuacuugcucuggg

SEQ ID NO: 123922 - RNA, 19 nt, Artificial Sequence
  Description of Artificial Sequence: Synthetic oligonucleotide
aaaauuaugggauguggau

SEQ ID NO: 123923 - RNA, 19 nt, Artificial Sequence
  Description of Artificial Sequence: Synthetic oligonucleotide
aaugcaagggagguauucc

SEQ ID NO: 123924 - RNA, 19 nt, Artificial Sequence
  Description of Artificial Sequence: Synthetic oligonucleotide
uucagugacacacauacau

SEQ ID NO: 123925 - RNA, 19 nt, Artificial Sequence
  Description of Artificial Sequence: Synthetic oligonucleotide
uucaaauuaaggcauuguc

SEQ ID NO: 123926 - RNA, 19 nt, Artificial Sequence
  Description of Artificial Sequence: Synthetic oligonucleotide
uucacuagugcguuagggg

SEQ ID NO: 123927 - RNA, 19 nt, Artificial Sequence
  Description of Artificial Sequence: Synthetic oligonucleotide
uaaaugaguauaccaauaa

SEQ ID NO: 123928 - RNA, 19 nt, Artificial Sequence
  Description of Artificial Sequence: Synthetic oligonucleotide
aacacucaauucuuuagca

SEQ ID NO: 123929 - RNA, 19 nt, Artificial Sequence
  Description of Artificial Sequence: Synthetic oligonucleotide
uaacacucaauucuuuagc

SEQ ID NO: 123930 - RNA, 19 nt, Artificial Sequence
  Description of Artificial Sequence: Synthetic oligonucleotide
uuaacugauaggccaguag

SEQ ID NO: 123931 - RNA, 19 nt, Artificial Sequence
  Description of Artificial Sequence: Synthetic oligonucleotide
ugcaacuuccacuucaaca

SEQ ID NO: 123932 - RNA, 19 nt, Artificial Sequence
  Description of Artificial Sequence: Synthetic oligonucleotide
gguucuaccacccaaggag

SEQ ID NO: 123933 - RNA, 19 nt, Artificial Sequence
  Description of Artificial Sequence: Synthetic oligonucleotide
uaugggauguggauauagg

SEQ ID NO: 123934 - RNA, 19 nt, Artificial Sequence
  Description of Artificial Sequence: Synthetic oligonucleotide
cuugcuuaugcucauguac

SEQ ID NO: 123935 - RNA, 19 nt, Artificial Sequence
  Description of Artificial Sequence: Synthetic oligonucleotide
uguacuuaugagcugacuu

SEQ ID NO: 123936 - RNA, 19 nt, Artificial Sequence
  Description of Artificial Sequence: Synthetic oligonucleotide
aagaaauggucaauaguuc

SEQ ID NO: 123937 - RNA, 19 nt, Artificial Sequence
  Description of Artificial Sequence: Synthetic oligonucleotide
ggugggguagaccagaugg

SEQ ID NO: 123938 - RNA, 19 nt, Artificial Sequence
  Description of Artificial Sequence: Synthetic oligonucleotide
agguaucacaaccagaggu

SEQ ID NO: 123939 - RNA, 19 nt, Artificial Sequence
  Description of Artificial Sequence: Synthetic oligonucleotide
uuggcuauccacauagaga

SEQ ID NO: 123940 - RNA, 19 nt, Artificial Sequence
  Description of Artificial Sequence: Synthetic oligonucleotide
uguggauauagguaagugu

SEQ ID NO: 123941 - RNA, 19 nt, Artificial Sequence
  Description of Artificial Sequence: Synthetic oligonucleotide
aagcuauuccuucaaauua

SEQ ID NO: 123942 - RNA, 19 nt, Artificial Sequence
  Description of Artificial Sequence: Synthetic oligonucleotide
accacgauguucucgcgcc

SEQ ID NO: 123943 - RNA, 19 nt, Artificial Sequence
  Description of Artificial Sequence: Synthetic oligonucleotide
gacacacacacacacacac

SEQ ID NO: 123944 - RNA, 19 nt, Artificial Sequence
  Description of Artificial Sequence: Synthetic oligonucleotide
uaagugugcuugcuuaugc

SEQ ID NO: 123945 - RNA, 19 nt, Artificial Sequence
  Description of Artificial Sequence: Synthetic oligonucleotide
aaauuaacugauaggccag

SEQ ID NO: 123946 - RNA, 19 nt, Artificial Sequence
  Description of Artificial Sequence: Synthetic oligonucleotide
aaaucuacuugcucuggga

SEQ ID NO: 123947 - RNA, 19 nt, Artificial Sequence
  Description of Artificial Sequence: Synthetic oligonucleotide
gagacacacacacacacac

SEQ ID NO: 123948 - RNA, 19 nt, Artificial Sequence
  Description of Artificial Sequence: Synthetic oligonucleotide
guggauauagguaagugug

SEQ ID NO: 123949 - RNA, 19 nt, Artificial Sequence
  Description of Artificial Sequence: Synthetic oligonucleotide
auauagguaagugugcuug

SEQ ID NO: 123950 - RNA, 19 nt, Artificial Sequence
  Description of Artificial Sequence: Synthetic oligonucleotide
acacucaauucuuuagcac

SEQ ID NO: 123951 - RNA, 19 nt, Artificial Sequence
  Description of Artificial Sequence: Synthetic oligonucleotide
uggcauuuauucuucaaac

SEQ ID NO: 123952 - RNA, 19 nt, Artificial Sequence
  Description of Artificial Sequence: Synthetic oligonucleotide
uugcuuaugcucauguacu

SEQ ID NO: 123953 - RNA, 19 nt, Artificial Sequence
  Description of Artificial Sequence: Synthetic oligonucleotide
uggagacacacacacacac

SEQ ID NO: 123954 - RNA, 19 nt, Artificial Sequence
  Description of Artificial Sequence: Synthetic oligonucleotide
uaguguucccguaccaggg

SEQ ID NO: 123955 - RNA, 19 nt, Artificial Sequence
  Description of Artificial Sequence: Synthetic oligonucleotide
gacagucugaugaaugggg

SEQ ID NO: 123956 - RNA, 19 nt, Artificial Sequence
  Description of Artificial Sequence: Synthetic oligonucleotide
ucaccuacgaaguguaaca

SEQ ID NO: 123957 - RNA, 19 nt, Artificial Sequence
  Description of Artificial Sequence: Synthetic oligonucleotide
uuccuaagggauaugguuc

SEQ ID NO: 123958 - RNA, 19 nt, Artificial Sequence
  Description of Artificial Sequence: Synthetic oligonucleotide
ucuaaaaugcccuccugaa

SEQ ID NO: 123959 - RNA, 19 nt, Artificial Sequence
  Description of Artificial Sequence: Synthetic oligonucleotide
uguagcagaauaccuggcu

SEQ ID NO: 123960 - RNA, 19 nt, Artificial Sequence
  Description of Artificial Sequence: Synthetic oligonucleotide
aagggauaugguucuacca

SEQ ID NO: 123961 - RNA, 19 nt, Artificial Sequence
  Description of Artificial Sequence: Synthetic oligonucleotide
acucaauucuuuagcaccc

SEQ ID NO: 123962 - RNA, 19 nt, Artificial Sequence
  Description of Artificial Sequence: Synthetic oligonucleotide
aauagggaaaucagcuguc

SEQ ID NO: 123963 - RNA, 19 nt, Artificial Sequence
  Description of Artificial Sequence: Synthetic oligonucleotide
aucacaaccagagguggcc

SEQ ID NO: 123964 - RNA, 19 nt, Artificial Sequence
  Description of Artificial Sequence: Synthetic oligonucleotide
aaucuacuugcucugggaa

SEQ ID NO: 123965 - RNA, 19 nt, Artificial Sequence
  Description of Artificial Sequence: Synthetic oligonucleotide
gauucuugugagaaguggc

SEQ ID NO: 123966 - RNA, 19 nt, Artificial Sequence
  Description of Artificial Sequence: Synthetic oligonucleotide
uggauauagguaagugugc

SEQ ID NO: 123967 - RNA, 19 nt, Artificial Sequence
  Description of Artificial Sequence: Synthetic oligonucleotide
ucagcgagcgccuaagaac

SEQ ID NO: 123968 - RNA, 19 nt, Artificial Sequence
  Description of Artificial Sequence: Synthetic oligonucleotide
ucauguacuuaugagcuga

SEQ ID NO: 123969 - RNA, 19 nt, Artificial Sequence
  Description of Artificial Sequence: Synthetic oligonucleotide
uuuggauacagcccauccu

SEQ ID NO: 123970 - RNA, 19 nt, Artificial Sequence
  Description of Artificial Sequence: Synthetic oligonucleotide
uuguagcgcaggacgaugg

SEQ ID NO: 123971 - RNA, 19 nt, Artificial Sequence
  Description of Artificial Sequence: Synthetic oligonucleotide
uuaugggauguggauauag

SEQ ID NO: 123972 - RNA, 19 nt, Artificial Sequence
  Description of Artificial Sequence: Synthetic oligonucleotide
caggggaugauugacauug

SEQ ID NO: 123973 - RNA, 19 nt, Artificial Sequence
  Description of Artificial Sequence: Synthetic oligonucleotide
uguucucgcgcccggaucc

SEQ ID NO: 123974 - RNA, 19 nt, Artificial Sequence
  Description of Artificial Sequence: Synthetic oligonucleotide
cacacacacacacacacac

SEQ ID NO: 123975 - RNA, 19 nt, Artificial Sequence
  Description of Artificial Sequence: Synthetic oligonucleotide
gauggggccaaugcaaggg

SEQ ID NO: 123976 - RNA, 19 nt, Artificial Sequence
  Description of Artificial Sequence: Synthetic oligonucleotide
agacaauuuuaagagagga

SEQ ID NO: 123977 - RNA, 19 nt, Artificial Sequence
  Description of Artificial Sequence: Synthetic oligonucleotide
ggucuuguagcgcaggacg

SEQ ID NO: 123978 - RNA, 19 nt, Artificial Sequence
  Description of Artificial Sequence: Synthetic oligonucleotide
uuccauccggcucagaauc

SEQ ID NO: 123979 - RNA, 19 nt, Artificial Sequence
  Description of Artificial Sequence: Synthetic oligonucleotide
acuaggagacaccuggugu

SEQ ID NO: 123980 - RNA, 19 nt, Artificial Sequence
  Description of Artificial Sequence: Synthetic oligonucleotide
ucgggcuucuaauugguug

SEQ ID NO: 123981 - RNA, 19 nt, Artificial Sequence
  Description of Artificial Sequence: Synthetic oligonucleotide
ccuacuaggagacaccugg

SEQ ID NO: 123982 - RNA, 19 nt, Artificial Sequence
  Description of Artificial Sequence: Synthetic oligonucleotide
uaggccaguagcugaaaag

SEQ ID NO: 123983 - RNA, 19 nt, Artificial Sequence
  Description of Artificial Sequence: Synthetic oligonucleotide
uuuuccuaagggauauggu

SEQ ID NO: 123984 - RNA, 19 nt, Artificial Sequence
  Description of Artificial Sequence: Synthetic oligonucleotide
acugggguaaaaguuauca

SEQ ID NO: 123985 - RNA, 19 nt, Artificial Sequence
  Description of Artificial Sequence: Synthetic oligonucleotide
aguggcacguugcugucac

SEQ ID NO: 123986 - RNA, 19 nt, Artificial Sequence
  Description of Artificial Sequence: Synthetic oligonucleotide
cuuacuggcccacuucugc

SEQ ID NO: 123987 - RNA, 19 nt, Artificial Sequence
  Description of Artificial Sequence: Synthetic oligonucleotide
uaaaagaaucaucccgguc

SEQ ID NO: 123988 - RNA, 19 nt, Artificial Sequence
  Description of Artificial Sequence: Synthetic oligonucleotide
auaaaagaaucaucccggu

SEQ ID NO: 123989 - RNA, 19 nt, Artificial Sequence
  Description of Artificial Sequence: Synthetic oligonucleotide
uuccuaagaagaaggggcu

SEQ ID NO: 123990 - RNA, 19 nt, Artificial Sequence
  Description of Artificial Sequence: Synthetic oligonucleotide
agguaaaugucaccuacga

SEQ ID NO: 123991 - RNA, 19 nt, Artificial Sequence
  Description of Artificial Sequence: Synthetic oligonucleotide
ucauucaugcugacggaga

SEQ ID NO: 123992 - RNA, 19 nt, Artificial Sequence
  Description of Artificial Sequence: Synthetic oligonucleotide
uauagguaagugugcuugc

SEQ ID NO: 123993 - RNA, 19 nt, Artificial Sequence
  Description of Artificial Sequence: Synthetic oligonucleotide
augcucauguacuuaugag

SEQ ID NO: 123994 - RNA, 19 nt, Artificial Sequence
  Description of Artificial Sequence: Synthetic oligonucleotide
  modified_base (6)..(6): a, c, u, g, unknown or other
uucaunucuucuuguggca

SEQ ID NO: 123995 - RNA, 19 nt, Artificial Sequence
  Description of Artificial Sequence: Synthetic oligonucleotide
caaaauuaugggaugugga

SEQ ID NO: 123996 - RNA, 19 nt, Artificial Sequence
  Description of Artificial Sequence: Synthetic oligonucleotide
agccauugcucauauucuc

SEQ ID NO: 123997 - RNA, 19 nt, Artificial Sequence
  Description of Artificial Sequence: Synthetic oligonucleotide
uacuuaugagcugacuuug

SEQ ID NO: 123998 - RNA, 19 nt, Artificial Sequence
  Description of Artificial Sequence: Synthetic oligonucleotide
ugggauguggauauaggua

SEQ ID NO: 123999 - RNA, 19 nt, Artificial Sequence
  Description of Artificial Sequence: Synthetic oligonucleotide
uacuaggagacaccuggug

SEQ ID NO: 124000 - RNA, 19 nt, Artificial Sequence
  Description of Artificial Sequence: Synthetic oligonucleotide
gauccuggugacauaaaug

SEQ ID NO: 124001 - RNA, 19 nt, Artificial Sequence
  Description of Artificial Sequence: Synthetic oligonucleotide
cagcgagcgccuaagaacc

SEQ ID NO: 124002 - RNA, 19 nt, Artificial Sequence
  Description of Artificial Sequence: Synthetic oligonucleotide
aaugagguuuaaauuaauu

SEQ ID NO: 124003 - RNA, 19 nt, Artificial Sequence
  Description of Artificial Sequence: Synthetic oligonucleotide
ugauccuggugacauaaau

SEQ ID NO: 124004 - RNA, 19 nt, Artificial Sequence
  Description of Artificial Sequence: Synthetic oligonucleotide
cugacuuugaaaauaggua

SEQ ID NO: 124005 - RNA, 19 nt, Artificial Sequence
  Description of Artificial Sequence: Synthetic oligonucleotide
guaucacaaccagaggugg

SEQ ID NO: 124006 - RNA, 19 nt, Artificial Sequence
  Description of Artificial Sequence: Synthetic oligonucleotide
aagugugcuugcuuaugcu

SEQ ID NO: 124007 - RNA, 19 nt, Artificial Sequence
  Description of Artificial Sequence: Synthetic oligonucleotide
aaauggucaauaguucaaa

SEQ ID NO: 124008 - RNA, 19 nt, Artificial Sequence
  Description of Artificial Sequence: Synthetic oligonucleotide
uguagcgcaggacgauggg

SEQ ID NO: 124009 - RNA, 19 nt, Artificial Sequence
  Description of Artificial Sequence: Synthetic oligonucleotide
uccuaagggauaugguucu

SEQ ID NO: 124010 - RNA, 19 nt, Artificial Sequence
  Description of Artificial Sequence: Synthetic oligonucleotide
ugcuugcuuaugcucaugu

SEQ ID NO: 124011 - RNA, 19 nt, Artificial Sequence
  Description of Artificial Sequence: Synthetic oligonucleotide
cuucacuagugcguuaggg

SEQ ID NO: 124012 - RNA, 19 nt, Artificial Sequence
  Description of Artificial Sequence: Synthetic oligonucleotide
cuacuuaggagguaucaca

SEQ ID NO: 124013 - RNA, 19 nt, Artificial Sequence
  Description of Artificial Sequence: Synthetic oligonucleotide
aggacgaugggcgaggucu

SEQ ID NO: 124014 - RNA, 19 nt, Artificial Sequence
  Description of Artificial Sequence: Synthetic oligonucleotide
uuaugcucauguacuuaug

SEQ ID NO: 124015 - RNA, 19 nt, Artificial Sequence
  Description of Artificial Sequence: Synthetic oligonucleotide
ucuuuagcacccacugacu

SEQ ID NO: 124016 - RNA, 19 nt, Artificial Sequence
  Description of Artificial Sequence: Synthetic oligonucleotide
ucuacuuaggagguaucac

SEQ ID NO: 124017 - RNA, 19 nt, Artificial Sequence
  Description of Artificial Sequence: Synthetic oligonucleotide
uucuacuuaggagguauca

SEQ ID NO: 124018 - RNA, 19 nt, Artificial Sequence
  Description of Artificial Sequence: Synthetic oligonucleotide
cuguacucuucacaaguag

SEQ ID NO: 124019 - RNA, 19 nt, Artificial Sequence
  Description of Artificial Sequence: Synthetic oligonucleotide
agaccuuagagaaaccuca

SEQ ID NO: 124020 - RNA, 19 nt, Artificial Sequence
  Description of Artificial Sequence: Synthetic oligonucleotide
  modified_base (9)..(9): a, c, u, g, unknown or other
gucuucaunucuucuugug

SEQ ID NO: 124021 - RNA, 19 nt, Artificial Sequence
  Description of Artificial Sequence: Synthetic oligonucleotide
gagcugacuuugaaaauag

SEQ ID NO: 124022 - RNA, 19 nt, Artificial Sequence
  Description of Artificial Sequence: Synthetic oligonucleotide
gugguaaaacuuugguccc

SEQ ID NO: 124023 - RNA, 19 nt, Artificial Sequence
  Description of Artificial Sequence: Synthetic oligonucleotide
gcuggagacacacacacac

SEQ ID NO: 124024 - RNA, 19 nt, Artificial Sequence
  Description of Artificial Sequence: Synthetic oligonucleotide
uuaaggcauugucuauagc

SEQ ID NO: 124025 - RNA, 19 nt, Artificial Sequence
  Description of Artificial Sequence: Synthetic oligonucleotide
auggcuuuuacucucccuu

SEQ ID NO: 124026 - RNA, 19 nt, Artificial Sequence
  Description of Artificial Sequence: Synthetic oligonucleotide
augauugacauuggcuauc

SEQ ID NO: 124027 - RNA, 19 nt, Artificial Sequence
  Description of Artificial Sequence: Synthetic oligonucleotide
uccaaaauuaugggaugug

SEQ ID NO: 124028 - RNA, 19 nt, Artificial Sequence
  Description of Artificial Sequence: Synthetic oligonucleotide
ugucucaauggcauguguu

SEQ ID NO: 124029 - RNA, 19 nt, Artificial Sequence
  Description of Artificial Sequence: Synthetic oligonucleotide
aguggugcuauaaaaugca

SEQ ID NO: 124030 - RNA, 19 nt, Artificial Sequence
  Description of Artificial Sequence: Synthetic oligonucleotide
agaauaccuggcuucucug

SEQ ID NO: 124031 - RNA, 19 nt, Artificial Sequence
  Description of Artificial Sequence: Synthetic oligonucleotide
agaggacauguacacauaa

SEQ ID NO: 124032 - RNA, 19 nt, Artificial Sequence
  Description of Artificial Sequence: Synthetic oligonucleotide
acacccaaaaggugcagca

SEQ ID NO: 124033 - RNA, 19 nt, Artificial Sequence
  Description of Artificial Sequence: Synthetic oligonucleotide
aagccuguccacgguaggg

SEQ ID NO: 124034 - RNA, 19 nt, Artificial Sequence
  Description of Artificial Sequence: Synthetic oligonucleotide
cacucgggcuucuaauugg

SEQ ID NO: 124035 - RNA, 19 nt, Artificial Sequence
  Description of Artificial Sequence: Synthetic oligonucleotide
uuaauccacucugcagacg

SEQ ID NO: 124036 - RNA, 19 nt, Artificial Sequence
  Description of Artificial Sequence: Synthetic oligonucleotide
acgguagggcaaaagcugc

SEQ ID NO: 124037 - RNA, 19 nt, Artificial Sequence
  Description of Artificial Sequence: Synthetic oligonucleotide
gcgccuaagaaccaggagc

SEQ ID NO: 124038 - RNA, 19 nt, Artificial Sequence
  Description of Artificial Sequence: Synthetic oligonucleotide
gcuugacaugcccaggucg

SEQ ID NO: 124039 - RNA, 19 nt, Artificial Sequence
  Description of Artificial Sequence: Synthetic oligonucleotide
ugauaggccaguagcugaa

SEQ ID NO: 124040 - RNA, 19 nt, Artificial Sequence
  Description of Artificial Sequence: Synthetic oligonucleotide
cacacacacacacaccuuc

SEQ ID NO: 124041 - RNA, 19 nt, Artificial Sequence
  Description of Artificial Sequence: Synthetic oligonucleotide
agggagguauuccaaaauu

SEQ ID NO: 124042 - RNA, 19 nt, Artificial Sequence
  Description of Artificial Sequence: Synthetic oligonucleotide
cuacuugcaugguaaucac

SEQ ID NO: 124043 - RNA, 19 nt, Artificial Sequence
  Description of Artificial Sequence: Synthetic oligonucleotide
gucagcugcaaaauauggc

SEQ ID NO: 124044 - RNA, 19 nt, Artificial Sequence
  Description of Artificial Sequence: Synthetic oligonucleotide
aggcucuaaaaugcccucc

SEQ ID NO: 124045 - RNA, 19 nt, Artificial Sequence
  Description of Artificial Sequence: Synthetic oligonucleotide
gugacauaaaugcugcucu

SEQ ID NO: 124046 - RNA, 19 nt, Artificial Sequence
  Description of Artificial Sequence: Synthetic oligonucleotide
acggagaaccuggagaucu

SEQ ID NO: 124047 - RNA, 19 nt, Artificial Sequence
  Description of Artificial Sequence: Synthetic oligonucleotide
gcuaagaugcuggagacac

SEQ ID NO: 124048 - RNA, 19 nt, Artificial Sequence
  Description of Artificial Sequence: Synthetic oligonucleotide
aggggcuuuuccuaaggga

SEQ ID NO: 124049 - RNA, 19 nt, Artificial Sequence
  Description of Artificial Sequence: Synthetic oligonucleotide
uggggccaaugcaagggag

SEQ ID NO: 124050 - RNA, 19 nt, Artificial Sequence
  Description of Artificial Sequence: Synthetic oligonucleotide
accuacgaaguguaacacu

SEQ ID NO: 124051 - RNA, 19 nt, Artificial Sequence
  Description of Artificial Sequence: Synthetic oligonucleotide
aggccaguagcugaaaaga

SEQ ID NO: 124052 - RNA, 19 nt, Artificial Sequence
  Description of Artificial Sequence: Synthetic oligonucleotide
agaaggggcuuuuccuaag

SEQ ID NO: 124053 - RNA, 19 nt, Artificial Sequence
  Description of Artificial Sequence: Synthetic oligonucleotide
gguaucacaaccagaggug

SEQ ID NO: 124054 - RNA, 19 nt, Artificial Sequence
  Description of Artificial Sequence: Synthetic oligonucleotide
guauaccaauaaauaaaac

SEQ ID NO: 124055 - RNA, 19 nt, Artificial Sequence
  Description of Artificial Sequence: Synthetic oligonucleotide
  modified_base (16)..(16): a, c, u, g, unknown or other
gacgccagucuucaunucu

SEQ ID NO: 124056 - RNA, 19 nt, Artificial Sequence
  Description of Artificial Sequence: Synthetic oligonucleotide
ggucagcugcaaaauaugg

SEQ ID NO: 124057 - RNA, 19 nt, Artificial Sequence
  Description of Artificial Sequence: Synthetic oligonucleotide
auucuugugagaaguggca

SEQ ID NO: 124058 - RNA, 19 nt, Artificial Sequence
  Description of Artificial Sequence: Synthetic oligonucleotide
ggugaacucaaucuuucca

SEQ ID NO: 124059 - RNA, 19 nt, Artificial Sequence
  Description of Artificial Sequence: Synthetic oligonucleotide
acacacacacacacacacc

SEQ ID NO: 124060 - RNA, 19 nt, Artificial Sequence
  Description of Artificial Sequence: Synthetic oligonucleotide
ggcgaggucuccucgaugc

SEQ ID NO: 124061 - RNA, 19 nt, Artificial Sequence
  Description of Artificial Sequence: Synthetic oligonucleotide
  modified_base (5)..(5): a, c, u, g, unknown or other
ucaunucuucuuguggcau

SEQ ID NO: 124062 - RNA, 19 nt, Artificial Sequence
  Description of Artificial Sequence: Synthetic oligonucleotide
auguucucgcgcccggauc

SEQ ID NO: 124063 - RNA, 19 nt, Artificial Sequence
  Description of Artificial Sequence: Synthetic oligonucleotide
gggaaaucagcuguccagg

SEQ ID NO: 124064 - RNA, 19 nt, Artificial Sequence
  Description of Artificial Sequence: Synthetic oligonucleotide
gcuacuugcaugguaauca

SEQ ID NO: 124065 - RNA, 19 nt, Artificial Sequence
  Description of Artificial Sequence: Synthetic oligonucleotide
agcgccuaagaaccaggag

SEQ ID NO: 124066 - RNA, 19 nt, Artificial Sequence
  Description of Artificial Sequence: Synthetic oligonucleotide
cuaagggauaugguucuac

SEQ ID NO: 124067 - RNA, 19 nt, Artificial Sequence
  Description of Artificial Sequence: Synthetic oligonucleotide
cucauguacuuaugagcug

SEQ ID NO: 124068 - RNA, 19 nt, Artificial Sequence
  Description of Artificial Sequence: Synthetic oligonucleotide
gauaugguucuaccaccca

SEQ ID NO: 124069 - RNA, 19 nt, Artificial Sequence
  Description of Artificial Sequence: Synthetic oligonucleotide
acugauccuggugacauaa

SEQ ID NO: 124070 - RNA, 19 nt, Artificial Sequence
  Description of Artificial Sequence: Synthetic oligonucleotide
gaccuuagagaaaccucag

SEQ ID NO: 124071 - RNA, 19 nt, Artificial Sequence
  Description of Artificial Sequence: Synthetic oligonucleotide
acugaaccauugccuauca

SEQ ID NO: 124072 - RNA, 19 nt, Artificial Sequence
  Description of Artificial Sequence: Synthetic oligonucleotide
gucuccucgaugcgcgugg

SEQ ID NO: 124073 - RNA, 19 nt, Artificial Sequence
  Description of Artificial Sequence: Synthetic oligonucleotide
ggugagauauucuccccug

SEQ ID NO: 124074 - RNA, 19 nt, Artificial Sequence
  Description of Artificial Sequence: Synthetic oligonucleotide
gugcuauaaaaugcaggag

SEQ ID NO: 124075 - RNA, 19 nt, Artificial Sequence
  Description of Artificial Sequence: Synthetic oligonucleotide
uccuacuaggagacaccug

SEQ ID NO: 124076 - RNA, 19 nt, Artificial Sequence
  Description of Artificial Sequence: Synthetic oligonucleotide
agucugcuucuacuuagga

SEQ ID NO: 124077 - RNA, 19 nt, Artificial Sequence
  Description of Artificial Sequence: Synthetic oligonucleotide
agcuauuccuucaaauuaa

SEQ ID NO: 124078 - RNA, 19 nt, Artificial Sequence
  Description of Artificial Sequence: Synthetic oligonucleotide
gucaccuacgaaguguaac

SEQ ID NO: 124079 - RNA, 19 nt, Artificial Sequence
  Description of Artificial Sequence: Synthetic oligonucleotide
cauguacuuaugagcugac

SEQ ID NO: 124080 - RNA, 19 nt, Artificial Sequence
  Description of Artificial Sequence: Synthetic oligonucleotide
agggguagcucaccccauc

SEQ ID NO: 124081 - RNA, 19 nt, Artificial Sequence
  Description of Artificial Sequence: Synthetic oligonucleotide
aucccggucagcugcaaaa

SEQ ID NO: 124082 - RNA, 19 nt, Artificial Sequence
  Description of Artificial Sequence: Synthetic oligonucleotide
acacacacacaccuucaau

SEQ ID NO: 124083 - RNA, 19 nt, Artificial Sequence
  Description of Artificial Sequence: Synthetic oligonucleotide
ucucgcgcccggauccgcg

SEQ ID NO: 124084 - RNA, 19 nt, Artificial Sequence
  Description of Artificial Sequence: Synthetic oligonucleotide
cuuaugagcugacuuugaa

SEQ ID NO: 124085 - RNA, 19 nt, Artificial Sequence
  Description of Artificial Sequence: Synthetic oligonucleotide
auagguaagugugcuugcu

SEQ ID NO: 124086 - RNA, 19 nt, Artificial Sequence
  Description of Artificial Sequence: Synthetic oligonucleotide
cugguugcacgccuggauc

SEQ ID NO: 124087 - RNA, 19 nt, Artificial Sequence
  Description of Artificial Sequence: Synthetic oligonucleotide
cauugccuaucagagagca

SEQ ID NO: 124088 - RNA, 19 nt, Artificial Sequence
  Description of Artificial Sequence: Synthetic oligonucleotide
uccccuguuucccacccaa

SEQ ID NO: 124089 - RNA, 19 nt, Artificial Sequence
  Description of Artificial Sequence: Synthetic oligonucleotide
uggcuuuuacucucccuuc

SEQ ID NO: 124090 - RNA, 19 nt, Artificial Sequence
  Description of Artificial Sequence: Synthetic oligonucleotide
ucacaaccagagguggccc

SEQ ID NO: 124091 - RNA, 19 nt, Artificial Sequence
  Description of Artificial Sequence: Synthetic oligonucleotide
ugcuuaugcucauguacuu

SEQ ID NO: 124092 - RNA, 19 nt, Artificial Sequence
  Description of Artificial Sequence: Synthetic oligonucleotide
auauaccacuuuugcccug

SEQ ID NO: 124093 - RNA, 19 nt, Artificial Sequence
  Description of Artificial Sequence: Synthetic oligonucleotide
cacacacacacacacaccu

SEQ ID NO: 124094 - RNA, 19 nt, Artificial Sequence
  Description of Artificial Sequence: Synthetic oligonucleotide
caaugcaagggagguauuc

SEQ ID NO: 124095 - RNA, 19 nt, Artificial Sequence
  Description of Artificial Sequence: Synthetic oligonucleotide
ucaugcugacggagaaccu

SEQ ID NO: 124096 - RNA, 19 nt, Artificial Sequence
  Description of Artificial Sequence: Synthetic oligonucleotide
cuuaugcucauguacuuau

SEQ ID NO: 124097 - RNA, 19 nt, Artificial Sequence
  Description of Artificial Sequence: Synthetic oligonucleotide
acacaccuucaauggaagu

SEQ ID NO: 124098 - RNA, 19 nt, Artificial Sequence
  Description of Artificial Sequence: Synthetic oligonucleotide
cacaaccagagguggcccc

SEQ ID NO: 124099 - RNA, 19 nt, Artificial Sequence
  Description of Artificial Sequence: Synthetic oligonucleotide
ggcuuuuacucucccuucc

SEQ ID NO: 124100 - RNA, 19 nt, Artificial Sequence
  Description of Artificial Sequence: Synthetic oligonucleotide
caccacgauguucucgcgc

SEQ ID NO: 124101 - RNA, 19 nt, Artificial Sequence
  Description of Artificial Sequence: Synthetic oligonucleotide
gguagcucaccccaucuga

SEQ ID NO: 124102 - RNA, 19 nt, Artificial Sequence
  Description of Artificial Sequence: Synthetic oligonucleotide
caagccuguccacgguagg

SEQ ID NO: 124103 - RNA, 19 nt, Artificial Sequence
  Description of Artificial Sequence: Synthetic oligonucleotide
ugcgugucucaauggcaug

SEQ ID NO: 124104 - RNA, 19 nt, Artificial Sequence
  Description of Artificial Sequence: Synthetic oligonucleotide
uuuugcccuguuggggaag

SEQ ID NO: 124105 - RNA, 19 nt, Artificial Sequence
  Description of Artificial Sequence: Synthetic oligonucleotide
ugcuaagaugcuggagaca

SEQ ID NO: 124106 - RNA, 19 nt, Artificial Sequence
  Description of Artificial Sequence: Synthetic oligonucleotide
cacgauguucucgcgcccg

SEQ ID NO: 124107 - RNA, 19 nt, Artificial Sequence
  Description of Artificial Sequence: Synthetic oligonucleotide
  modified_base (3)..(3): a, c, u, g, unknown or other
aunucuucuuguggcauuu

SEQ ID NO: 124108 - RNA, 19 nt, Artificial Sequence
  Description of Artificial Sequence: Synthetic oligonucleotide
guacuuaugagcugacuuu

SEQ ID NO: 124109 - RNA, 19 nt, Artificial Sequence
  Description of Artificial Sequence: Synthetic oligonucleotide
gcauucaagcuauuccuuc

SEQ ID NO: 124110 - RNA, 19 nt, Artificial Sequence
  Description of Artificial Sequence: Synthetic oligonucleotide
uugcacgccuggauccagc

SEQ ID NO: 124111 - RNA, 19 nt, Artificial Sequence
  Description of Artificial Sequence: Synthetic oligonucleotide
ugacaugcccaggucgcug

SEQ ID NO: 124112 - RNA, 19 nt, Artificial Sequence
  Description of Artificial Sequence: Synthetic oligonucleotide
caccccaucugagucacug

SEQ ID NO: 124113 - RNA, 19 nt, Artificial Sequence
  Description of Artificial Sequence: Synthetic oligonucleotide
ggguaaaaguuaucauuca

SEQ ID NO: 124114 - RNA, 19 nt, Artificial Sequence
  Description of Artificial Sequence: Synthetic oligonucleotide
uaccacccaaggagcagcu

SEQ ID NO: 124115 - RNA, 19 nt, Artificial Sequence
  Description of Artificial Sequence: Synthetic oligonucleotide
ucccguaccagggguagcu

SEQ ID NO: 124116 - RNA, 19 nt, Artificial Sequence
  Description of Artificial Sequence: Synthetic oligonucleotide
  modified_base (17)..(17): a, c, u, g, unknown or other
agacgccagucuucaunuc

SEQ ID NO: 124117 - RNA, 19 nt, Artificial Sequence
  Description of Artificial Sequence: Synthetic oligonucleotide
guagcgcaggacgaugggc

SEQ ID NO: 124118 - RNA, 19 nt, Artificial Sequence
  Description of Artificial Sequence: Synthetic oligonucleotide
cugaaccauugccuaucag

SEQ ID NO: 124119 - RNA, 19 nt, Artificial Sequence
  Description of Artificial Sequence: Synthetic oligonucleotide
acugcgugucucaauggca

SEQ ID NO: 124120 - RNA, 19 nt, Artificial Sequence
  Description of Artificial Sequence: Synthetic oligonucleotide
gauguggauauagguaagu

SEQ ID NO: 124121 - RNA, 19 nt, Artificial Sequence
  Description of Artificial Sequence: Synthetic oligonucleotide
caccuacgaaguguaacac

SEQ ID NO: 124122 - RNA, 19 nt, Artificial Sequence
  Description of Artificial Sequence: Synthetic oligonucleotide
ggcuucacuagugcguuag

SEQ ID NO: 124123 - RNA, 19 nt, Artificial Sequence
  Description of Artificial Sequence: Synthetic oligonucleotide
cgggcuucuaauugguugg

SEQ ID NO: 124124 - RNA, 19 nt, Artificial Sequence
  Description of Artificial Sequence: Synthetic oligonucleotide
guaaggggucuuguagcgc

SEQ ID NO: 124125 - RNA, 19 nt, Artificial Sequence
  Description of Artificial Sequence: Synthetic oligonucleotide
ugucaccuacgaaguguaa

SEQ ID NO: 124126 - RNA, 19 nt, Artificial Sequence
  Description of Artificial Sequence: Synthetic oligonucleotide
ugcugacggagaaccugga

SEQ ID NO: 124127 - RNA, 19 nt, Artificial Sequence
  Description of Artificial Sequence: Synthetic oligonucleotide
caauucuuuagcacccacu

SEQ ID NO: 124128 - RNA, 19 nt, Artificial Sequence
  Description of Artificial Sequence: Synthetic oligonucleotide
guggugguguucauggcca

SEQ ID NO: 124129 - RNA, 19 nt, Artificial Sequence
  Description of Artificial Sequence: Synthetic oligonucleotide
gauauagguaagugugcuu

SEQ ID NO: 124130 - RNA, 19 nt, Artificial Sequence
  Description of Artificial Sequence: Synthetic oligonucleotide
gguaaaugucaccuacgaa

SEQ ID NO: 124131 - RNA, 19 nt, Artificial Sequence
  Description of Artificial Sequence: Synthetic oligonucleotide
gggugaacucaaucuuucc

SEQ ID NO: 124132 - RNA, 19 nt, Artificial Sequence
  Description of Artificial Sequence: Synthetic oligonucleotide
uuuguccuacuaggagaca

SEQ ID NO: 124133 - RNA, 19 nt, Artificial Sequence
  Description of Artificial Sequence: Synthetic oligonucleotide
auguacuuaugagcugacu

SEQ ID NO: 124134 - RNA, 19 nt, Artificial Sequence
  Description of Artificial Sequence: Synthetic oligonucleotide
acuuaugagcugacuuuga

SEQ ID NO: 124135 - RNA, 19 nt, Artificial Sequence
  Description of Artificial Sequence: Synthetic oligonucleotide
ugguggcgcacacaucgua

SEQ ID NO: 124136 - RNA, 19 nt, Artificial Sequence
  Description of Artificial Sequence: Synthetic oligonucleotide
agcucagcgagcgccuaag

SEQ ID NO: 124137 - RNA, 19 nt, Artificial Sequence
  Description of Artificial Sequence: Synthetic oligonucleotide
gcgcguggggcacuggucg

SEQ ID NO: 124138 - RNA, 19 nt, Artificial Sequence
  Description of Artificial Sequence: Synthetic oligonucleotide
guaaucacagcaagucugu

SEQ ID NO: 124139 - RNA, 19 nt, Artificial Sequence
  Description of Artificial Sequence: Synthetic oligonucleotide
cccacugcgugucucaaug

SEQ ID NO: 124140 - RNA, 19 nt, Artificial Sequence
  Description of Artificial Sequence: Synthetic oligonucleotide
aaacucaguuuggcuccug

SEQ ID NO: 124141 - RNA, 19 nt, Artificial Sequence
  Description of Artificial Sequence: Synthetic oligonucleotide
ggauguuuccacucgggcu

SEQ ID NO: 124142 - RNA, 19 nt, Artificial Sequence
  Description of Artificial Sequence: Synthetic oligonucleotide
cuggcaaaccaagaggucu

SEQ ID NO: 124143 - RNA, 19 nt, Artificial Sequence
  Description of Artificial Sequence: Synthetic oligonucleotide
aaguggcacguugcuguca

SEQ ID NO: 124144 - RNA, 19 nt, Artificial Sequence
  Description of Artificial Sequence: Synthetic oligonucleotide
guggcgcacacaucguaca

SEQ ID NO: 124145 - RNA, 19 nt, Artificial Sequence
  Description of Artificial Sequence: Synthetic oligonucleotide
cuggagacacacacacaca

SEQ ID NO: 124146 - RNA, 19 nt, Artificial Sequence
  Description of Artificial Sequence: Synthetic oligonucleotide
ugggcuucacuagugcguu

SEQ ID NO: 124147 - RNA, 19 nt, Artificial Sequence
  Description of Artificial Sequence: Synthetic oligonucleotide
cacgccggcauggcgacgc

SEQ ID NO: 124148 - RNA, 19 nt, Artificial Sequence
  Description of Artificial Sequence: Synthetic oligonucleotide
auugccuaucagagagcag

SEQ ID NO: 124149 - RNA, 19 nt, Artificial Sequence
  Description of Artificial Sequence: Synthetic oligonucleotide
acacacacacacaccuuca

SEQ ID NO: 124150 - RNA, 19 nt, Artificial Sequence
  Description of Artificial Sequence: Synthetic oligonucleotide
gcucagaaacucaguuugg

SEQ ID NO: 124151 - RNA, 19 nt, Artificial Sequence
  Description of Artificial Sequence: Synthetic oligonucleotide
cucagcgagcgccuaagaa

SEQ ID NO: 124152 - RNA, 19 nt, Artificial Sequence
  Description of Artificial Sequence: Synthetic oligonucleotide
augggcgaggucuccucga

SEQ ID NO: 124153 - RNA, 19 nt, Artificial Sequence
  Description of Artificial Sequence: Synthetic oligonucleotide
ggggccaaugcaagggagg

SEQ ID NO: 124154 - RNA, 19 nt, Artificial Sequence
  Description of Artificial Sequence: Synthetic oligonucleotide
ugcgcguggggcacugguc

SEQ ID NO: 124155 - RNA, 19 nt, Artificial Sequence
  Description of Artificial Sequence: Synthetic oligonucleotide
agacacacacacacacaca

SEQ ID NO: 124156 - RNA, 19 nt, Artificial Sequence
  Description of Artificial Sequence: Synthetic oligonucleotide
augcgcguggggcacuggu

SEQ ID NO: 124157 - RNA, 19 nt, Artificial Sequence
  Description of Artificial Sequence: Synthetic oligonucleotide
aggggaugauugacauugg

SEQ ID NO: 124158 - RNA, 19 nt, Artificial Sequence
  Description of Artificial Sequence: Synthetic oligonucleotide
gcgcacacaucguacacca

SEQ ID NO: 124159 - RNA, 19 nt, Artificial Sequence
  Description of Artificial Sequence: Synthetic oligonucleotide
ccuucaaauuaaggcauug

SEQ ID NO: 124160 - RNA, 19 nt, Artificial Sequence
  Description of Artificial Sequence: Synthetic oligonucleotide
ccaagccuguccacgguag

SEQ ID NO: 124161 - RNA, 19 nt, Artificial Sequence
  Description of Artificial Sequence: Synthetic oligonucleotide
gcuucacuagugcguuagg

SEQ ID NO: 124162 - RNA, 19 nt, Artificial Sequence
  Description of Artificial Sequence: Synthetic oligonucleotide
acacacacacacacacaca

SEQ ID NO: 124163 - RNA, 19 nt, Artificial Sequence
  Description of Artificial Sequence: Synthetic oligonucleotide
ggauauagguaagugugcu

SEQ ID NO: 124164 - RNA, 19 nt, Artificial Sequence
  Description of Artificial Sequence: Synthetic oligonucleotide
augucaccuacgaagugua

SEQ ID NO: 124165 - RNA, 19 nt, Artificial Sequence
  Description of Artificial Sequence: Synthetic oligonucleotide
gagaaaccucaggggauga

SEQ ID NO: 124166 - RNA, 19 nt, Artificial Sequence
  Description of Artificial Sequence: Synthetic oligonucleotide
gacgaugggcgaggucucc

SEQ ID NO: 124167 - RNA, 19 nt, Artificial Sequence
  Description of Artificial Sequence: Synthetic oligonucleotide
acgaaguguaacacucaau

SEQ ID NO: 124168 - RNA, 19 nt, Artificial Sequence
  Description of Artificial Sequence: Synthetic oligonucleotide
gagcgccuaagaaccagga

SEQ ID NO: 124169 - RNA, 19 nt, Artificial Sequence
  Description of Artificial Sequence: Synthetic oligonucleotide
cauuggcuauccacauaga

SEQ ID NO: 124170 - RNA, 19 nt, Artificial Sequence
  Description of Artificial Sequence: Synthetic oligonucleotide
gucacgccggcauggcgac

SEQ ID NO: 124171 - RNA, 19 nt, Artificial Sequence
  Description of Artificial Sequence: Synthetic oligonucleotide
gacgcggagcgccggcgug

SEQ ID NO: 124172 - RNA, 19 nt, Artificial Sequence
  Description of Artificial Sequence: Synthetic oligonucleotide
gggagguauuccaaaauua

SEQ ID NO: 124173 - RNA, 19 nt, Artificial Sequence
  Description of Artificial Sequence: Synthetic oligonucleotide
ggagguauuccaaaauuau

SEQ ID NO: 124174 - RNA, 19 nt, Artificial Sequence
  Description of Artificial Sequence: Synthetic oligonucleotide
  modified_base (18)..(18): a, c, u, g, unknown or other
cagacgccagucuucaunu

SEQ ID NO: 124175 - RNA, 19 nt, Artificial Sequence
  Description of Artificial Sequence: Synthetic oligonucleotide
cucaauucuuuagcaccca

SEQ ID NO: 124176 - RNA, 19 nt, Artificial Sequence
  Description of Artificial Sequence: Synthetic oligonucleotide
  modified_base (2)..(2): a, c, u, g, unknown or other
unucuucuuguggcauuua

SEQ ID NO: 124177 - RNA, 19 nt, Artificial Sequence
  Description of Artificial Sequence: Synthetic oligonucleotide
ccacucgggcuucuaauug

SEQ ID NO: 124178 - RNA, 19 nt, Artificial Sequence
  Description of Artificial Sequence: Synthetic oligonucleotide
ggguagcucaccccaucug

SEQ ID NO: 124179 - RNA, 19 nt, Artificial Sequence
  Description of Artificial Sequence: Synthetic oligonucleotide
cacacacacacaccuucaa

SEQ ID NO: 124180 - RNA, 19 nt, Artificial Sequence
  Description of Artificial Sequence: Synthetic oligonucleotide
agaaaccucaggggaugau

SEQ ID NO: 124181 - RNA, 19 nt, Artificial Sequence
  Description of Artificial Sequence: Synthetic oligonucleotide
gggguagaccagauggcug

SEQ ID NO: 124182 - RNA, 19 nt, Artificial Sequence
  Description of Artificial Sequence: Synthetic oligonucleotide
  modified_base (4)..(4): a, c, u, g, unknown or other
caunucuucuuguggcauu

SEQ ID NO: 124183 - RNA, 19 nt, Artificial Sequence
  Description of Artificial Sequence: Synthetic oligonucleotide
uggcaaccccacugcgugu

SEQ ID NO: 124184 - RNA, 19 nt, Artificial Sequence
  Description of Artificial Sequence: Synthetic oligonucleotide
cuccaauuaaaagguaaau

SEQ ID NO: 124185 - RNA, 19 nt, Artificial Sequence
  Description of Artificial Sequence: Synthetic oligonucleotide
cucgcgcccggauccgcgc

SEQ ID NO: 124186 - RNA, 19 nt, Artificial Sequence
  Description of Artificial Sequence: Synthetic oligonucleotide
caaugagguuuaaauuaau

SEQ ID NO: 124187 - RNA, 19 nt, Artificial Sequence
  Description of Artificial Sequence: Synthetic oligonucleotide
ccauugccuaucagagagc

SEQ ID NO: 124188 - RNA, 19 nt, Artificial Sequence
  Description of Artificial Sequence: Synthetic oligonucleotide
guucucgcgcccggauccg

SEQ ID NO: 124189 - RNA, 19 nt, Artificial Sequence
  Description of Artificial Sequence: Synthetic oligonucleotide
cugcuucuacuuaggaggu

SEQ ID NO: 124190 - RNA, 19 nt, Artificial Sequence
  Description of Artificial Sequence: Synthetic oligonucleotide
auacaugcucaugcucuua

SEQ ID NO: 124191 - RNA, 19 nt, Artificial Sequence
  Description of Artificial Sequence: Synthetic oligonucleotide
agcgccggcguggggcagc

SEQ ID NO: 124192 - RNA, 19 nt, Artificial Sequence
  Description of Artificial Sequence: Synthetic oligonucleotide
gaugcgcguggggcacugg

SEQ ID NO: 124193 - RNA, 19 nt, Artificial Sequence
  Description of Artificial Sequence: Synthetic oligonucleotide
ggagacacacacacacaca

SEQ ID NO: 124194 - RNA, 19 nt, Artificial Sequence
  Description of Artificial Sequence: Synthetic oligonucleotide
ggcaaaccaagaggucugc

SEQ ID NO: 124195 - RNA, 19 nt, Artificial Sequence
  Description of Artificial Sequence: Synthetic oligonucleotide
uggguuccauccggcucag

SEQ ID NO: 124196 - RNA, 19 nt, Artificial Sequence
  Description of Artificial Sequence: Synthetic oligonucleotide
cccacccaaaagugugggg

SEQ ID NO: 124197 - RNA, 19 nt, Artificial Sequence
  Description of Artificial Sequence: Synthetic oligonucleotide
ggcacguugcugucacuca

SEQ ID NO: 124198 - RNA, 19 nt, Artificial Sequence
  Description of Artificial Sequence: Synthetic oligonucleotide
ugcuucuacuuaggaggua

SEQ ID NO: 124199 - RNA, 19 nt, Artificial Sequence
  Description of Artificial Sequence: Synthetic oligonucleotide
auuaugggauguggauaua

SEQ ID NO: 124200 - RNA, 19 nt, Artificial Sequence
  Description of Artificial Sequence: Synthetic oligonucleotide
ggcucuaaaaugcccuccu

SEQ ID NO: 124201 - RNA, 19 nt, Artificial Sequence
  Description of Artificial Sequence: Synthetic oligonucleotide
guccuacuaggagacaccu

SEQ ID NO: 124202 - RNA, 19 nt, Artificial Sequence
  Description of Artificial Sequence: Synthetic oligonucleotide
guugggccguguggggucc

SEQ ID NO: 124203 - RNA, 19 nt, Artificial Sequence
  Description of Artificial Sequence: Synthetic oligonucleotide
acgaugggcgaggucuccu

SEQ ID NO: 124204 - RNA, 19 nt, Artificial Sequence
  Description of Artificial Sequence: Synthetic oligonucleotide
acgcggagcgccggcgugg

SEQ ID NO: 124205 - RNA, 19 nt, Artificial Sequence
  Description of Artificial Sequence: Synthetic oligonucleotide
aggucgcuguagguguuga

SEQ ID NO: 124206 - RNA, 19 nt, Artificial Sequence
  Description of Artificial Sequence: Synthetic oligonucleotide
cgagcgccuaagaaccagg

SEQ ID NO: 124207 - RNA, 19 nt, Artificial Sequence
  Description of Artificial Sequence: Synthetic oligonucleotide
gcgggcgcccgucacgccg

SEQ ID NO: 124208 - RNA, 19 nt, Artificial Sequence
  Description of Artificial Sequence: Synthetic oligonucleotide
cggucagcugcaaaauaug

SEQ ID NO: 124209 - RNA, 19 nt, Artificial Sequence
  Description of Artificial Sequence: Synthetic oligonucleotide
cuacuaggagacaccuggu

SEQ ID NO: 124210 - RNA, 19 nt, Artificial Sequence
  Description of Artificial Sequence: Synthetic oligonucleotide
gccaaugcaagggagguau

SEQ ID NO: 124211 - RNA, 19 nt, Artificial Sequence
  Description of Artificial Sequence: Synthetic oligonucleotide
auccgccacaggcacuguu

SEQ ID NO: 124212 - RNA, 19 nt, Artificial Sequence
  Description of Artificial Sequence: Synthetic oligonucleotide
cugcuuuggcucagaaacu

SEQ ID NO: 124213 - RNA, 19 nt, Artificial Sequence
  Description of Artificial Sequence: Synthetic oligonucleotide
uucucgcgcccggauccgc

SEQ ID NO: 124214 - RNA, 19 nt, Artificial Sequence
  Description of Artificial Sequence: Synthetic oligonucleotide
ccgaggcuuugaaguaagg

SEQ ID NO: 124215 - RNA, 19 nt, Artificial Sequence
  Description of Artificial Sequence: Synthetic oligonucleotide
  modified_base (15)..(15): a, c, u, g, unknown or other
acgccagucuucaunucuu

SEQ ID NO: 124216 - RNA, 19 nt, Artificial Sequence
  Description of Artificial Sequence: Synthetic oligonucleotide
ggcgacgcgccucccguug

SEQ ID NO: 124217 - RNA, 19 nt, Artificial Sequence
  Description of Artificial Sequence: Synthetic oligonucleotide
ggcaguggugcuauaaaau

SEQ ID NO: 124218 - RNA, 19 nt, Artificial Sequence
  Description of Artificial Sequence: Synthetic oligonucleotide
cugauccuggugacauaaa

SEQ ID NO: 124219 - RNA, 19 nt, Artificial Sequence
  Description of Artificial Sequence: Synthetic oligonucleotide
ccugaaauuccagcauuca

SEQ ID NO: 124220 - RNA, 19 nt, Artificial Sequence
  Description of Artificial Sequence: Synthetic oligonucleotide
cgcgccuugcaggugaugc

SEQ ID NO: 124221 - RNA, 19 nt, Artificial Sequence
  Description of Artificial Sequence: Synthetic oligonucleotide
acacacacacacacaccuu

SEQ ID NO: 124222 - RNA, 19 nt, Artificial Sequence
  Description of Artificial Sequence: Synthetic oligonucleotide
auaccacuuuugcccuguu

SEQ ID NO: 124223 - RNA, 19 nt, Artificial Sequence
  Description of Artificial Sequence: Synthetic oligonucleotide
ucacgccggcauggcgacg

SEQ ID NO: 124224 - RNA, 19 nt, Artificial Sequence
  Description of Artificial Sequence: Synthetic oligonucleotide
cagccaggugguaaaacuu

SEQ ID NO: 124225 - RNA, 19 nt, Artificial Sequence
  Description of Artificial Sequence: Synthetic oligonucleotide
gcgagcgccuaagaaccag

SEQ ID NO: 124226 - RNA, 19 nt, Artificial Sequence
  Description of Artificial Sequence: Synthetic oligonucleotide
gauccgcgccuugcaggug

SEQ ID NO: 124227 - RNA, 19 nt, Artificial Sequence
  Description of Artificial Sequence: Synthetic oligonucleotide
gggcaugaccacgcgggcc

SEQ ID NO: 124228 - RNA, 19 nt, Artificial Sequence
  Description of Artificial Sequence: Synthetic oligonucleotide
gccggcauggcgacgcgcc

SEQ ID NO: 124229 - RNA, 19 nt, Artificial Sequence
  Description of Artificial Sequence: Synthetic oligonucleotide
caggacgaugggcgagguc

SEQ ID NO: 124230 - RNA, 19 nt, Artificial Sequence
  Description of Artificial Sequence: Synthetic oligonucleotide
ggauccgcgccuugcaggu

SEQ ID NO: 124231 - RNA, 19 nt, Artificial Sequence
  Description of Artificial Sequence: Synthetic oligonucleotide
ggcaaccccacugcguguc

SEQ ID NO: 124232 - RNA, 19 nt, Artificial Sequence
  Description of Artificial Sequence: Synthetic oligonucleotide
ggucuccucgaugcgcgug

SEQ ID NO: 124233 - RNA, 19 nt, Artificial Sequence
  Description of Artificial Sequence: Synthetic oligonucleotide
gcaagaaggcaguggugcu

SEQ ID NO: 124234 - RNA, 19 nt, Artificial Sequence
  Description of Artificial Sequence: Synthetic oligonucleotide
gcgggccgaggcuuugaag

SEQ ID NO: 124235 - RNA, 19 nt, Artificial Sequence
  Description of Artificial Sequence: Synthetic oligonucleotide
cgguagggcaaaagcugcc

SEQ ID NO: 124236 - RNA, 19 nt, Artificial Sequence
  Description of Artificial Sequence: Synthetic oligonucleotide
uccgcgccuugcaggugau

SEQ ID NO: 124237 - RNA, 19 nt, Artificial Sequence
  Description of Artificial Sequence: Synthetic oligonucleotide
uguccacgguagggcaaaa

SEQ ID NO: 124238 - RNA, 19 nt, Artificial Sequence
  Description of Artificial Sequence: Synthetic oligonucleotide
gccaggguugggccgugug

SEQ ID NO: 124239 - RNA, 19 nt, Artificial Sequence
  Description of Artificial Sequence: Synthetic oligonucleotide
cuguccacgguagggcaaa

SEQ ID NO: 124240 - RNA, 19 nt, Artificial Sequence
  Description of Artificial Sequence: Synthetic oligonucleotide
gguagggcaaaagcugccu

SEQ ID NO: 124241 - RNA, 19 nt, Artificial Sequence
  Description of Artificial Sequence: Synthetic oligonucleotide
ucaucccggucagcugcaa

SEQ ID NO: 124242 - RNA, 19 nt, Artificial Sequence
  Description of Artificial Sequence: Synthetic oligonucleotide
agcgagcgccuaagaacca

SEQ ID NO: 124243 - RNA, 19 nt, Artificial Sequence
  Description of Artificial Sequence: Synthetic oligonucleotide
caucccggucagcugcaaa

SEQ ID NO: 124244 - RNA, 19 nt, Artificial Sequence
  Description of Artificial Sequence: Synthetic oligonucleotide
ccacgauguucucgcgccc

SEQ ID NO: 124245 - RNA, 19 nt, Artificial Sequence
  Description of Artificial Sequence: Synthetic oligonucleotide
gcccgucacgccggcaugg

SEQ ID NO: 124246 - RNA, 19 nt, Artificial Sequence
  Description of Artificial Sequence: Synthetic oligonucleotide
ccggucagcugcaaaauau

SEQ ID NO: 124247 - RNA, 19 nt, Artificial Sequence
  Description of Artificial Sequence: Synthetic oligonucleotide
gguugcacgccuggaucca

SEQ ID NO: 124248 - RNA, 19 nt, Artificial Sequence
  Description of Artificial Sequence: Synthetic oligonucleotide
gccgcgggcgcccgucacg

SEQ ID NO: 124249 - RNA, 19 nt, Artificial Sequence
  Description of Artificial Sequence: Synthetic oligonucleotide
ggccguguggggucccuuc

SEQ ID NO: 124250 - RNA, 19 nt, Artificial Sequence
  Description of Artificial Sequence: Synthetic oligonucleotide
gcagaauaccuggcuucuc

SEQ ID NO: 124251 - RNA, 19 nt, Artificial Sequence
  Description of Artificial Sequence: Synthetic oligonucleotide
gccguguggggucccuuca

SEQ ID NO: 124252 - RNA, 19 nt, Artificial Sequence
  Description of Artificial Sequence: Synthetic oligonucleotide
caucguacaccacgauguu

SEQ ID NO: 124253 - RNA, 19 nt, Artificial Sequence
  Description of Artificial Sequence: Synthetic oligonucleotide
uugggccgugugggguccc

SEQ ID NO: 124254 - RNA, 19 nt, Artificial Sequence
  Description of Artificial Sequence: Synthetic oligonucleotide
ugggccguguggggucccu

SEQ ID NO: 124255 - RNA, 19 nt, Artificial Sequence
  Description of Artificial Sequence: Synthetic oligonucleotide
ccguugccgguccagcuca

SEQ ID NO: 124256 - RNA, 19 nt, Artificial Sequence
  Description of Artificial Sequence: Synthetic oligonucleotide
gggccgaggcuuugaagua

SEQ ID NO: 124257 - RNA, 19 nt, Artificial Sequence
  Description of Artificial Sequence: Synthetic oligonucleotide
cgggccgaggcuuugaagu

SEQ ID NO: 124258 - RNA, 19 nt, Artificial Sequence
  Description of Artificial Sequence: Synthetic oligonucleotide
ggucgcuguagguguugaa

SEQ ID NO: 124259 - RNA, 19 nt, Artificial Sequence
  Description of Artificial Sequence: Synthetic oligonucleotide
gcgacgcgccucccguugc

SEQ ID NO: 124260 - RNA, 19 nt, Artificial Sequence
  Description of Artificial Sequence: Synthetic oligonucleotide
gcgugucucaauggcaugu

SEQ ID NO: 124261 - RNA, 19 nt, Artificial Sequence
  Description of Artificial Sequence: Synthetic oligonucleotide
ggacgaugggcgaggucuc

SEQ ID NO: 124262 - RNA, 19 nt, Artificial Sequence
  Description of Artificial Sequence: Synthetic oligonucleotide
ggccgaggcuuugaaguaa

SEQ ID NO: 124263 - RNA, 19 nt, Artificial Sequence
  Description of Artificial Sequence: Synthetic oligonucleotide
gccuaagaaccaggagcca

SEQ ID NO: 124264 - RNA, 19 nt, Artificial Sequence
  Description of Artificial Sequence: Synthetic oligonucleotide
gagcgccggcguggggcag

SEQ ID NO: 124265 - RNA, 19 nt, Artificial Sequence
  Description of Artificial Sequence: Synthetic oligonucleotide
gccgacgcggagcgccggc

SEQ ID NO: 124266 - RNA, 19 nt, Artificial Sequence
  Description of Artificial Sequence: Synthetic oligonucleotide
cucgggcuucuaauugguu

SEQ ID NO: 124267 - RNA, 19 nt, Artificial Sequence
  Description of Artificial Sequence: Synthetic oligonucleotide
acgcgggccgaggcuuuga

SEQ ID NO: 124268 - RNA, 19 nt, Artificial Sequence
  Description of Artificial Sequence: Synthetic oligonucleotide
cagggguagcucaccccau

SEQ ID NO: 124269 - RNA, 19 nt, Artificial Sequence
  Description of Artificial Sequence: Synthetic oligonucleotide
ccgcgggcgcccgucacgc

SEQ ID NO: 124270 - RNA, 19 nt, Artificial Sequence
  Description of Artificial Sequence: Synthetic oligonucleotide
cccggucagcugcaaaaua

SEQ ID NO: 124271 - RNA, 19 nt, Artificial Sequence
  Description of Artificial Sequence: Synthetic oligonucleotide
cccuucaguccaggaugac

SEQ ID NO: 124272 - RNA, 19 nt, Artificial Sequence
  Description of Artificial Sequence: Synthetic oligonucleotide
gggcuucacuagugcguua

SEQ ID NO: 124273 - RNA, 19 nt, Artificial Sequence
  Description of Artificial Sequence: Synthetic oligonucleotide
ggggccaaccagggucaca

SEQ ID NO: 124274 - RNA, 19 nt, Artificial Sequence
  Description of Artificial Sequence: Synthetic oligonucleotide
cccguaccagggguagcuc

SEQ ID NO: 124275 - RNA, 19 nt, Artificial Sequence
  Description of Artificial Sequence: Synthetic oligonucleotide
gcggagcgccggcgugggg

SEQ ID NO: 124276 - RNA, 19 nt, Artificial Sequence
  Description of Artificial Sequence: Synthetic oligonucleotide
gcaaccccacugcgugucu

SEQ ID NO: 124277 - RNA, 19 nt, Artificial Sequence
  Description of Artificial Sequence: Synthetic oligonucleotide
ccuaagggauaugguucua

SEQ ID NO: 124278 - RNA, 19 nt, Artificial Sequence
  Description of Artificial Sequence: Synthetic oligonucleotide
cgcggagcgccggcguggg

SEQ ID NO: 124279 - RNA, 19 nt, Artificial Sequence
  Description of Artificial Sequence: Synthetic oligonucleotide
cgaugcgcguggggcacug

SEQ ID NO: 124280 - RNA, 19 nt, Artificial Sequence
  Description of Artificial Sequence: Synthetic oligonucleotide
gcgccucccguugccgguc

SEQ ID NO: 124281 - RNA, 19 nt, Artificial Sequence
  Description of Artificial Sequence: Synthetic oligonucleotide
cgcccgucacgccggcaug

SEQ ID NO: 124282 - RNA, 19 nt, Artificial Sequence
  Description of Artificial Sequence: Synthetic oligonucleotide
cggcauggcgacgcgccuc

SEQ ID NO: 124283 - RNA, 19 nt, Artificial Sequence
  Description of Artificial Sequence: Synthetic oligonucleotide
cgcguggggcacuggucga

SEQ ID NO: 124284 - RNA, 19 nt, Artificial Sequence
  Description of Artificial Sequence: Synthetic oligonucleotide
ccuuuguggugguguucau

SEQ ID NO: 124285 - RNA, 19 nt, Artificial Sequence
  Description of Artificial Sequence: Synthetic oligonucleotide
cgccggcauggcgacgcgc

SEQ ID NO: 124286 - RNA, 19 nt, Artificial Sequence
  Description of Artificial Sequence: Synthetic oligonucleotide
gcccacgagccgggcccgc

SEQ ID NO: 124287 - RNA, 19 nt, Artificial Sequence
  Description of Artificial Sequence: Synthetic oligonucleotide
ccgcgccuugcaggugaug

SEQ ID NO: 124288 - RNA, 19 nt, Artificial Sequence
  Description of Artificial Sequence: Synthetic oligonucleotide
cgcgggcgcccgucacgcc

SEQ ID NO: 124289 - RNA, 19 nt, Artificial Sequence
  Description of Artificial Sequence: Synthetic oligonucleotide
gcguggggcacuggucgau

SEQ ID NO: 124290 - RNA, 19 nt, Artificial Sequence
  Description of Artificial Sequence: Synthetic oligonucleotide
cgccgacgcggagcgccgg

SEQ ID NO: 124291 - RNA, 19 nt, Artificial Sequence
  Description of Artificial Sequence: Synthetic oligonucleotide
cgcgggccgaggcuuugaa

SEQ ID NO: 124292 - RNA, 19 nt, Artificial Sequence
  Description of Artificial Sequence: Synthetic oligonucleotide
cgcccggauccgcgccuug

SEQ ID NO: 124293 - RNA, 19 nt, Artificial Sequence
  Description of Artificial Sequence: Synthetic oligonucleotide
cgacgcggagcgccggcgu

SEQ ID NO: 124294 - RNA, 19 nt, Artificial Sequence
  Description of Artificial Sequence: Synthetic oligonucleotide
gggccguguggggucccuu

SEQ ID NO: 124295 - RNA, 19 nt, Artificial Sequence
  Description of Artificial Sequence: Synthetic oligonucleotide
ucuauuauaaaacaccacg

SEQ ID NO: 124296 - RNA, 19 nt, Artificial Sequence
  Description of Artificial Sequence: Synthetic oligonucleotide
uguagaauaaccaugaaca

SEQ ID NO: 124297 - RNA, 19 nt, Artificial Sequence
  Description of Artificial Sequence: Synthetic oligonucleotide
uuauaaaacaccacggccg

SEQ ID NO: 124298 - RNA, 19 nt, Artificial Sequence
  Description of Artificial Sequence: Synthetic oligonucleotide
aaaucuaguaucuaugugu

SEQ ID NO: 124299 - RNA, 19 nt, Artificial Sequence
  Description of Artificial Sequence: Synthetic oligonucleotide
cauaauguauaauaggagg

SEQ ID NO: 124300 - RNA, 19 nt, Artificial Sequence
  Description of Artificial Sequence: Synthetic oligonucleotide
aagacccuaacucacauuc

SEQ ID NO: 124301 - RNA, 19 nt, Artificial Sequence
  Description of Artificial Sequence: Synthetic oligonucleotide
agagcuuuaguucauaauc

SEQ ID NO: 124302 - RNA, 19 nt, Artificial Sequence
  Description of Artificial Sequence: Synthetic oligonucleotide
aaaacuacccuucauauua

SEQ ID NO: 124303 - RNA, 19 nt, Artificial Sequence
  Description of Artificial Sequence: Synthetic oligonucleotide
uuugcguuuagcuagaagu

SEQ ID NO: 124304 - RNA, 19 nt, Artificial Sequence
  Description of Artificial Sequence: Synthetic oligonucleotide
ucuauaacuguccaaagac

SEQ ID NO: 124305 - RNA, 19 nt, Artificial Sequence
  Description of Artificial Sequence: Synthetic oligonucleotide
uauaacuguccaaagaccc

SEQ ID NO: 124306 - RNA, 19 nt, Artificial Sequence
  Description of Artificial Sequence: Synthetic oligonucleotide
uguuuuaaugaacaaggcc

SEQ ID NO: 124307 - RNA, 19 nt, Artificial Sequence
  Description of Artificial Sequence: Synthetic oligonucleotide
uauaaaucuaguaucuaug

SEQ ID NO: 124308 - RNA, 19 nt, Artificial Sequence
  Description of Artificial Sequence: Synthetic oligonucleotide
aacucgguaauuguaauac

SEQ ID NO: 124309 - RNA, 19 nt, Artificial Sequence
  Description of Artificial Sequence: Synthetic oligonucleotide
uguaauacgacaucuguac

SEQ ID NO: 124310 - RNA, 19 nt, Artificial Sequence
  Description of Artificial Sequence: Synthetic oligonucleotide
aauagaccgagcuucuuuc

SEQ ID NO: 124311 - RNA, 19 nt, Artificial Sequence
  Description of Artificial Sequence: Synthetic oligonucleotide
uuauacaccucacuaaagc

SEQ ID NO: 124312 - RNA, 19 nt, Artificial Sequence
  Description of Artificial Sequence: Synthetic oligonucleotide
agaaacauucuaugggacc

SEQ ID NO: 124313 - RNA, 19 nt, Artificial Sequence
  Description of Artificial Sequence: Synthetic oligonucleotide
ucauccauaaucuuagaca

SEQ ID NO: 124314 - RNA, 19 nt, Artificial Sequence
  Description of Artificial Sequence: Synthetic oligonucleotide
uguaaagagcccagaaacg

SEQ ID NO: 124315 - RNA, 19 nt, Artificial Sequence
  Description of Artificial Sequence: Synthetic oligonucleotide
aacagcgucuuaugaaggc

SEQ ID NO: 124316 - RNA, 19 nt, Artificial Sequence
  Description of Artificial Sequence: Synthetic oligonucleotide
ucuaguaucuauguguucc

SEQ ID NO: 124317 - RNA, 19 nt, Artificial Sequence
  Description of Artificial Sequence: Synthetic oligonucleotide
uugagauugauugugacca

SEQ ID NO: 124318 - RNA, 19 nt, Artificial Sequence
  Description of Artificial Sequence: Synthetic oligonucleotide
uugauuucuccacaugccg

SEQ ID NO: 124319 - RNA, 19 nt, Artificial Sequence
  Description of Artificial Sequence: Synthetic oligonucleotide
uguaacaugguauuccugu

SEQ ID NO: 124320 - RNA, 19 nt, Artificial Sequence
  Description of Artificial Sequence: Synthetic oligonucleotide
uuaauaucucucuaugaug

SEQ ID NO: 124321 - RNA, 19 nt, Artificial Sequence
  Description of Artificial Sequence: Synthetic oligonucleotide
augaacaauuuauaaaucu

SEQ ID NO: 124322 - RNA, 19 nt, Artificial Sequence
  Description of Artificial Sequence: Synthetic oligonucleotide
auugagauaucguagggca

SEQ ID NO: 124323 - RNA, 19 nt, Artificial Sequence
  Description of Artificial Sequence: Synthetic oligonucleotide
uucguauacucucugcagg

SEQ ID NO: 124324 - RNA, 19 nt, Artificial Sequence
  Description of Artificial Sequence: Synthetic oligonucleotide
gagguuugcguuuagcuag

SEQ ID NO: 124325 - RNA, 19 nt, Artificial Sequence
  Description of Artificial Sequence: Synthetic oligonucleotide
aguuuaacuguacauguug

SEQ ID NO: 124326 - RNA, 19 nt, Artificial Sequence
  Description of Artificial Sequence: Synthetic oligonucleotide
uucauauuagaacucucug

SEQ ID NO: 124327 - RNA, 19 nt, Artificial Sequence
  Description of Artificial Sequence: Synthetic oligonucleotide
aaaauaccguacaagaaug

SEQ ID NO: 124328 - RNA, 19 nt, Artificial Sequence
  Description of Artificial Sequence: Synthetic oligonucleotide
aagaauuggaucuucucau

SEQ ID NO: 124329 - RNA, 19 nt, Artificial Sequence
  Description of Artificial Sequence: Synthetic oligonucleotide
guguuaaagguguaaagag

SEQ ID NO: 124330 - RNA, 19 nt, Artificial Sequence
  Description of Artificial Sequence: Synthetic oligonucleotide
agcauuaugacugugacaa

SEQ ID NO: 124331 - RNA, 19 nt, Artificial Sequence
  Description of Artificial Sequence: Synthetic oligonucleotide
uguguuaaagguguaaaga

SEQ ID NO: 124332 - RNA, 19 nt, Artificial Sequence
  Description of Artificial Sequence: Synthetic oligonucleotide
agaguuuaacuauucuggg

SEQ ID NO: 124333 - RNA, 19 nt, Artificial Sequence
  Description of Artificial Sequence: Synthetic oligonucleotide
agaauuauuagcuguggga

SEQ ID NO: 124334 - RNA, 19 nt, Artificial Sequence
  Description of Artificial Sequence: Synthetic oligonucleotide
ugacuaguuguaaaagugc

SEQ ID NO: 124335 - RNA, 19 nt, Artificial Sequence
  Description of Artificial Sequence: Synthetic oligonucleotide
uauucguauacucucugca

SEQ ID NO: 124336 - RNA, 19 nt, Artificial Sequence
  Description of Artificial Sequence: Synthetic oligonucleotide
uuugagauguccuagucua

SEQ ID NO: 124337 - RNA, 19 nt, Artificial Sequence
  Description of Artificial Sequence: Synthetic oligonucleotide
ucuguauccaaggagaagu

SEQ ID NO: 124338 - RNA, 19 nt, Artificial Sequence
  Description of Artificial Sequence: Synthetic oligonucleotide
uuauccugcauagaacugg

SEQ ID NO: 124339 - RNA, 19 nt, Artificial Sequence
  Description of Artificial Sequence: Synthetic oligonucleotide
guguaaagagcccagaaac

SEQ ID NO: 124340 - RNA, 19 nt, Artificial Sequence
  Description of Artificial Sequence: Synthetic oligonucleotide
agguaugccucuuaacugg

SEQ ID NO: 124341 - RNA, 19 nt, Artificial Sequence
  Description of Artificial Sequence: Synthetic oligonucleotide
aagaaacauucuaugggac

SEQ ID NO: 124342 - RNA, 19 nt, Artificial Sequence
  Description of Artificial Sequence: Synthetic oligonucleotide
auuaaagcgccuucgagaa

SEQ ID NO: 124343 - RNA, 19 nt, Artificial Sequence
  Description of Artificial Sequence: Synthetic oligonucleotide
uuauuaagcugguggaucu

SEQ ID NO: 124344 - RNA, 19 nt, Artificial Sequence
  Description of Artificial Sequence: Synthetic oligonucleotide
cuugauuguuaaugaaugc

SEQ ID NO: 124345 - RNA, 19 nt, Artificial Sequence
  Description of Artificial Sequence: Synthetic oligonucleotide
ucgagguacaacuugguaa

SEQ ID NO: 124346 - RNA, 19 nt, Artificial Sequence
  Description of Artificial Sequence: Synthetic oligonucleotide
auucuaugggaccaucauc

SEQ ID NO: 124347 - RNA, 19 nt, Artificial Sequence
  Description of Artificial Sequence: Synthetic oligonucleotide
agauccauuccgucuacac

SEQ ID NO: 124348 - RNA, 19 nt, Artificial Sequence
  Description of Artificial Sequence: Synthetic oligonucleotide
uuaaagguguaaagagccc

SEQ ID NO: 124349 - RNA, 19 nt, Artificial Sequence
  Description of Artificial Sequence: Synthetic oligonucleotide
ucguaugugaagauuccug

SEQ ID NO: 124350 - RNA, 19 nt, Artificial Sequence
  Description of Artificial Sequence: Synthetic oligonucleotide
acaaucaaauauauuuagg

SEQ ID NO: 124351 - RNA, 19 nt, Artificial Sequence
  Description of Artificial Sequence: Synthetic oligonucleotide
ugcaucacaauagaccgag

SEQ ID NO: 124352 - RNA, 19 nt, Artificial Sequence
  Description of Artificial Sequence: Synthetic oligonucleotide
uaauacgacaucuguacaa

SEQ ID NO: 124353 - RNA, 19 nt, Artificial Sequence
  Description of Artificial Sequence: Synthetic oligonucleotide
auaucucucuaugauguac

SEQ ID NO: 124354 - RNA, 19 nt, Artificial Sequence
  Description of Artificial Sequence: Synthetic oligonucleotide
aacucaauaugcccaacau

SEQ ID NO: 124355 - RNA, 19 nt, Artificial Sequence
  Description of Artificial Sequence: Synthetic oligonucleotide
ugcuaaagaacguucuaga

SEQ ID NO: 124356 - RNA, 19 nt, Artificial Sequence
  Description of Artificial Sequence: Synthetic oligonucleotide
aaggcguucggucgaacag

SEQ ID NO: 124357 - RNA, 19 nt, Artificial Sequence
  Description of Artificial Sequence: Synthetic oligonucleotide
ugaucucauugagauaucg

SEQ ID NO: 124358 - RNA, 19 nt, Artificial Sequence
  Description of Artificial Sequence: Synthetic oligonucleotide
ugauccaccccucacacau

SEQ ID NO: 124359 - RNA, 19 nt, Artificial Sequence
  Description of Artificial Sequence: Synthetic oligonucleotide
uuuuaacacaacuggugac

SEQ ID NO: 124360 - RNA, 19 nt, Artificial Sequence
  Description of Artificial Sequence: Synthetic oligonucleotide
aagaacguucuagaaaugu

SEQ ID NO: 124361 - RNA, 19 nt, Artificial Sequence
  Description of Artificial Sequence: Synthetic oligonucleotide
uucuauuauaaaacaccac

SEQ ID NO: 124362 - RNA, 19 nt, Artificial Sequence
  Description of Artificial Sequence: Synthetic oligonucleotide
auucguauacucucugcag

SEQ ID NO: 124363 - RNA, 19 nt, Artificial Sequence
  Description of Artificial Sequence: Synthetic oligonucleotide
auaauguauaauaggaggu

SEQ ID NO: 124364 - RNA, 19 nt, Artificial Sequence
  Description of Artificial Sequence: Synthetic oligonucleotide
acuaucugcaucacaauag

SEQ ID NO: 124365 - RNA, 19 nt, Artificial Sequence
  Description of Artificial Sequence: Synthetic oligonucleotide
agcguaucuuugcucauac

SEQ ID NO: 124366 - RNA, 19 nt, Artificial Sequence
  Description of Artificial Sequence: Synthetic oligonucleotide
uuuauuaagcugguggauc

SEQ ID NO: 124367 - RNA, 19 nt, Artificial Sequence
  Description of Artificial Sequence: Synthetic oligonucleotide
guucagaauugguagcagg

SEQ ID NO: 124368 - RNA, 19 nt, Artificial Sequence
  Description of Artificial Sequence: Synthetic oligonucleotide
agaauugguagcaggugcc

SEQ ID NO: 124369 - RNA, 19 nt, Artificial Sequence
  Description of Artificial Sequence: Synthetic oligonucleotide
uaaagcgccuucgagaaga

SEQ ID NO: 124370 - RNA, 19 nt, Artificial Sequence
  Description of Artificial Sequence: Synthetic oligonucleotide
uaucguagggcauucacua

SEQ ID NO: 124371 - RNA, 19 nt, Artificial Sequence
  Description of Artificial Sequence: Synthetic oligonucleotide
gauaucguagggcauucac

SEQ ID NO: 124372 - RNA, 19 nt, Artificial Sequence
  Description of Artificial Sequence: Synthetic oligonucleotide
caacuuacauguaagucuc

SEQ ID NO: 124373 - RNA, 19 nt, Artificial Sequence
  Description of Artificial Sequence: Synthetic oligonucleotide
agcaauuaaagcgccuucg

SEQ ID NO: 124374 - RNA, 19 nt, Artificial Sequence
  Description of Artificial Sequence: Synthetic oligonucleotide
ggugacaugugauucgagg

SEQ ID NO: 124375 - RNA, 19 nt, Artificial Sequence
  Description of Artificial Sequence: Synthetic oligonucleotide
cuuacauguaagucucagc

SEQ ID NO: 124376 - RNA, 19 nt, Artificial Sequence
  Description of Artificial Sequence: Synthetic oligonucleotide
auuuagugacuucaacuga

SEQ ID NO: 124377 - RNA, 19 nt, Artificial Sequence
  Description of Artificial Sequence: Synthetic oligonucleotide
cauuccgucuacaccauag

SEQ ID NO: 124378 - RNA, 19 nt, Artificial Sequence
  Description of Artificial Sequence: Synthetic oligonucleotide
uguauaauaggagguuuga

SEQ ID NO: 124379 - RNA, 19 nt, Artificial Sequence
  Description of Artificial Sequence: Synthetic oligonucleotide
acucaauaugcccaacaug

SEQ ID NO: 124380 - RNA, 19 nt, Artificial Sequence
  Description of Artificial Sequence: Synthetic oligonucleotide
cucucguaugugaagauuc

SEQ ID NO: 124381 - RNA, 19 nt, Artificial Sequence
  Description of Artificial Sequence: Synthetic oligonucleotide
uuuagguauuauaaacguu

SEQ ID NO: 124382 - RNA, 19 nt, Artificial Sequence
  Description of Artificial Sequence: Synthetic oligonucleotide
ugauuucuccacaugccgu

SEQ ID NO: 124383 - RNA, 19 nt, Artificial Sequence
  Description of Artificial Sequence: Synthetic oligonucleotide
ucauagaguuuaacuauuc

SEQ ID NO: 124384 - RNA, 19 nt, Artificial Sequence
  Description of Artificial Sequence: Synthetic oligonucleotide
caauuaaagcgccuucgag

SEQ ID NO: 124385 - RNA, 19 nt, Artificial Sequence
  Description of Artificial Sequence: Synthetic oligonucleotide
ucguauacucucugcaggc

SEQ ID NO: 124386 - RNA, 19 nt, Artificial Sequence
  Description of Artificial Sequence: Synthetic oligonucleotide
ucaguaagugaucacgcuu

SEQ ID NO: 124387 - RNA, 19 nt, Artificial Sequence
  Description of Artificial Sequence: Synthetic oligonucleotide
aaacagcgucuuaugaagg

SEQ ID NO: 124388 - RNA, 19 nt, Artificial Sequence
  Description of Artificial Sequence: Synthetic oligonucleotide
agcagcguaucuuugcuca

SEQ ID NO: 124389 - RNA, 19 nt, Artificial Sequence
  Description of Artificial Sequence: Synthetic oligonucleotide
cacaguuuaacuguacaug

SEQ ID NO: 124390 - RNA, 19 nt, Artificial Sequence
  Description of Artificial Sequence: Synthetic oligonucleotide
ugguaaauuuggccuaaca

SEQ ID NO: 124391 - RNA, 19 nt, Artificial Sequence
  Description of Artificial Sequence: Synthetic oligonucleotide
uguugagauugauugugac

SEQ ID NO: 124392 - RNA, 19 nt, Artificial Sequence
  Description of Artificial Sequence: Synthetic oligonucleotide
uugguucagaauugguagc

SEQ ID NO: 124393 - RNA, 19 nt, Artificial Sequence
  Description of Artificial Sequence: Synthetic oligonucleotide
acucgguaauuguaauacg

SEQ ID NO: 124394 - RNA, 19 nt, Artificial Sequence
  Description of Artificial Sequence: Synthetic oligonucleotide
uguuccgugcugcuccagg

SEQ ID NO: 124395 - RNA, 19 nt, Artificial Sequence
  Description of Artificial Sequence: Synthetic oligonucleotide
augcuaaagaacguucuag

SEQ ID NO: 124396 - RNA, 19 nt, Artificial Sequence
  Description of Artificial Sequence: Synthetic oligonucleotide
acagcgucuuaugaaggcc

SEQ ID NO: 124397 - RNA, 19 nt, Artificial Sequence
  Description of Artificial Sequence: Synthetic oligonucleotide
guugauucacccauucuug

SEQ ID NO: 124398 - RNA, 19 nt, Artificial Sequence
  Description of Artificial Sequence: Synthetic oligonucleotide
uuaaugaacaaggccugga

SEQ ID NO: 124399 - RNA, 19 nt, Artificial Sequence
  Description of Artificial Sequence: Synthetic oligonucleotide
uucggucgaacagaugagg

SEQ ID NO: 124400 - RNA, 19 nt, Artificial Sequence
  Description of Artificial Sequence: Synthetic oligonucleotide
cauugagauaucguagggc

SEQ ID NO: 124401 - RNA, 19 nt, Artificial Sequence
  Description of Artificial Sequence: Synthetic oligonucleotide
aaucuaguaucuauguguu

SEQ ID NO: 124402 - RNA, 19 nt, Artificial Sequence
  Description of Artificial Sequence: Synthetic oligonucleotide
aaagugcccaaggcguucg

SEQ ID NO: 124403 - RNA, 19 nt, Artificial Sequence
  Description of Artificial Sequence: Synthetic oligonucleotide
ccaacuacaaagcauucag

SEQ ID NO: 124404 - RNA, 19 nt, Artificial Sequence
  Description of Artificial Sequence: Synthetic oligonucleotide
ucccguguuacaaugucuc

SEQ ID NO: 124405 - RNA, 19 nt, Artificial Sequence
  Description of Artificial Sequence: Synthetic oligonucleotide
ugcccaaggcguucggucg

SEQ ID NO: 124406 - RNA, 19 nt, Artificial Sequence
  Description of Artificial Sequence: Synthetic oligonucleotide
ugacaugugauucgaggua

SEQ ID NO: 124407 - RNA, 19 nt, Artificial Sequence
  Description of Artificial Sequence: Synthetic oligonucleotide
ucggucgaacagaugagga

SEQ ID NO: 124408 - RNA, 19 nt, Artificial Sequence
  Description of Artificial Sequence: Synthetic oligonucleotide
aggcaguuagaaaauguuc

SEQ ID NO: 124409 - RNA, 19 nt, Artificial Sequence
  Description of Artificial Sequence: Synthetic oligonucleotide
gacaugugauucgagguac

SEQ ID NO: 124410 - RNA, 19 nt, Artificial Sequence
  Description of Artificial Sequence: Synthetic oligonucleotide
aggagguaugccucuuaac

SEQ ID NO: 124411 - RNA, 19 nt, Artificial Sequence
  Description of Artificial Sequence: Synthetic oligonucleotide
gagcuuuaguucauaauca

SEQ ID NO: 124412 - RNA, 19 nt, Artificial Sequence
  Description of Artificial Sequence: Synthetic oligonucleotide
aacuacccuucauauuaga

SEQ ID NO: 124413 - RNA, 19 nt, Artificial Sequence
  Description of Artificial Sequence: Synthetic oligonucleotide
aaacuacccuucauauuag

SEQ ID NO: 124414 - RNA, 19 nt, Artificial Sequence
  Description of Artificial Sequence: Synthetic oligonucleotide
uccaacuacaaagcauuca

SEQ ID NO: 124415 - RNA, 19 nt, Artificial Sequence
  Description of Artificial Sequence: Synthetic oligonucleotide
guaugugaagauuccugac

SEQ ID NO: 124416 - RNA, 19 nt, Artificial Sequence
  Description of Artificial Sequence: Synthetic oligonucleotide
agccuuauacaccucacua

SEQ ID NO: 124417 - RNA, 19 nt, Artificial Sequence
  Description of Artificial Sequence: Synthetic oligonucleotide
agcugccgagugcugacgc

SEQ ID NO: 124418 - RNA, 19 nt, Artificial Sequence
  Description of Artificial Sequence: Synthetic oligonucleotide
ugugugugugugugugggg

SEQ ID NO: 124419 - RNA, 19 nt, Artificial Sequence
  Description of Artificial Sequence: Synthetic oligonucleotide
uguccugugugugugugug

SEQ ID NO: 124420 - RNA, 19 nt, Artificial Sequence
  Description of Artificial Sequence: Synthetic oligonucleotide
auguauaauaggagguuug

SEQ ID NO: 124421 - RNA, 19 nt, Artificial Sequence
  Description of Artificial Sequence: Synthetic oligonucleotide
acguucuagaaauguagaa

SEQ ID NO: 124422 - RNA, 19 nt, Artificial Sequence
  Description of Artificial Sequence: Synthetic oligonucleotide
acggcagcucccuuuuaac

SEQ ID NO: 124423 - RNA, 19 nt, Artificial Sequence
  Description of Artificial Sequence: Synthetic oligonucleotide
uacauguaagucucagcau

SEQ ID NO: 124424 - RNA, 19 nt, Artificial Sequence
  Description of Artificial Sequence: Synthetic oligonucleotide
uuaaagcgccuucgagaag

SEQ ID NO: 124425 - RNA, 19 nt, Artificial Sequence
  Description of Artificial Sequence: Synthetic oligonucleotide
ggucgaacagaugaggaag

SEQ ID NO: 124426 - RNA, 19 nt, Artificial Sequence
  Description of Artificial Sequence: Synthetic oligonucleotide
guagaauaaccaugaacaa

SEQ ID NO: 124427 - RNA, 19 nt, Artificial Sequence
  Description of Artificial Sequence: Synthetic oligonucleotide
agaagcgccaugucugacu

SEQ ID NO: 124428 - RNA, 19 nt, Artificial Sequence
  Description of Artificial Sequence: Synthetic oligonucleotide
auucacccauucuuguugu

SEQ ID NO: 124429 - RNA, 19 nt, Artificial Sequence
  Description of Artificial Sequence: Synthetic oligonucleotide
gucgaacagaugaggaagg

SEQ ID NO: 124430 - RNA, 19 nt, Artificial Sequence
  Description of Artificial Sequence: Synthetic oligonucleotide
guuugcguuuagcuagaag

SEQ ID NO: 124431 - RNA, 19 nt, Artificial Sequence
  Description of Artificial Sequence: Synthetic oligonucleotide
uaauaggagguuugaucuc

SEQ ID NO: 124432 - RNA, 19 nt, Artificial Sequence
  Description of Artificial Sequence: Synthetic oligonucleotide
cuggccugcauuugguuac

SEQ ID NO: 124433 - RNA, 19 nt, Artificial Sequence
  Description of Artificial Sequence: Synthetic oligonucleotide
cuguguguguguguguggg

SEQ ID NO: 124434 - RNA, 19 nt, Artificial Sequence
  Description of Artificial Sequence: Synthetic oligonucleotide
gcggagaacggauugcagg

SEQ ID NO: 124435 - RNA, 19 nt, Artificial Sequence
  Description of Artificial Sequence: Synthetic oligonucleotide
agaacucucugguaacaau

SEQ ID NO: 124436 - RNA, 19 nt, Artificial Sequence
  Description of Artificial Sequence: Synthetic oligonucleotide
uguauccaaggagaaguaa

SEQ ID NO: 124437 - RNA, 19 nt, Artificial Sequence
  Description of Artificial Sequence: Synthetic oligonucleotide
cuuaugaaggccuuggcuu

SEQ ID NO: 124438 - RNA, 19 nt, Artificial Sequence
  Description of Artificial Sequence: Synthetic oligonucleotide
guaauacgacaucuguaca

SEQ ID NO: 124439 - RNA, 19 nt, Artificial Sequence
  Description of Artificial Sequence: Synthetic oligonucleotide
uccugugugugugugugug

SEQ ID NO: 124440 - RNA, 19 nt, Artificial Sequence
  Description of Artificial Sequence: Synthetic oligonucleotide
uaaaagugcccaaggcguu

SEQ ID NO: 124441 - RNA, 19 nt, Artificial Sequence
  Description of Artificial Sequence: Synthetic oligonucleotide
uuaacuauucugggugauc

SEQ ID NO: 124442 - RNA, 19 nt, Artificial Sequence
  Description of Artificial Sequence: Synthetic oligonucleotide
gaguuuaacuauucugggu

SEQ ID NO: 124443 - RNA, 19 nt, Artificial Sequence
  Description of Artificial Sequence: Synthetic oligonucleotide
acguaucuguauccaagga

SEQ ID NO: 124444 - RNA, 19 nt, Artificial Sequence
  Description of Artificial Sequence: Synthetic oligonucleotide
cuaccauagagacacugaa

SEQ ID NO: 124445 - RNA, 19 nt, Artificial Sequence
  Description of Artificial Sequence: Synthetic oligonucleotide
agaaacggcagcucccuuu

SEQ ID NO: 124446 - RNA, 19 nt, Artificial Sequence
  Description of Artificial Sequence: Synthetic oligonucleotide
uuccuuguguauucguaua

SEQ ID NO: 124447 - RNA, 19 nt, Artificial Sequence
  Description of Artificial Sequence: Synthetic oligonucleotide
auaucguagggcauucacu

SEQ ID NO: 124448 - RNA, 19 nt, Artificial Sequence
  Description of Artificial Sequence: Synthetic oligonucleotide
ucgguaagccaaacagcgu

SEQ ID NO: 124449 - RNA, 19 nt, Artificial Sequence
  Description of Artificial Sequence: Synthetic oligonucleotide
agcccagacauguguaggu

SEQ ID NO: 124450 - RNA, 19 nt, Artificial Sequence
  Description of Artificial Sequence: Synthetic oligonucleotide
cucucugguaacaaucaaa

SEQ ID NO: 124451 - RNA, 19 nt, Artificial Sequence
  Description of Artificial Sequence: Synthetic oligonucleotide
agccagaagggaauuuauc

SEQ ID NO: 124452 - RNA, 19 nt, Artificial Sequence
  Description of Artificial Sequence: Synthetic oligonucleotide
ugcacgucaaaucgaucuu

SEQ ID NO: 124453 - RNA, 19 nt, Artificial Sequence
  Description of Artificial Sequence: Synthetic oligonucleotide
aguuuugcggagaacggau

SEQ ID NO: 124454 - RNA, 19 nt, Artificial Sequence
  Description of Artificial Sequence: Synthetic oligonucleotide
gacccuaacucacauucua

SEQ ID NO: 124455 - RNA, 19 nt, Artificial Sequence
  Description of Artificial Sequence: Synthetic oligonucleotide
gugugcacugagucaacug

SEQ ID NO: 124456 - RNA, 19 nt, Artificial Sequence
  Description of Artificial Sequence: Synthetic oligonucleotide
caucacaauagaccgagcu

SEQ ID NO: 124457 - RNA, 19 nt, Artificial Sequence
  Description of Artificial Sequence: Synthetic oligonucleotide
aagugcccaaggcguucgg

SEQ ID NO: 124458 - RNA, 19 nt, Artificial Sequence
  Description of Artificial Sequence: Synthetic oligonucleotide
agguauuauaaacguuauu

SEQ ID NO: 124459 - RNA, 19 nt, Artificial Sequence
  Description of Artificial Sequence: Synthetic oligonucleotide
ugcguuuagcuagaaguuu

SEQ ID NO: 124460 - RNA, 19 nt, Artificial Sequence
  Description of Artificial Sequence: Synthetic oligonucleotide
gaguuuugcggagaacgga

SEQ ID NO: 124461 - RNA, 19 nt, Artificial Sequence
  Description of Artificial Sequence: Synthetic oligonucleotide
gguguaaagagcccagaaa

SEQ ID NO: 124462 - RNA, 19 nt, Artificial Sequence
  Description of Artificial Sequence: Synthetic oligonucleotide
gaagcgccaugucugacua

SEQ ID NO: 124463 - RNA, 19 nt, Artificial Sequence
  Description of Artificial Sequence: Synthetic oligonucleotide
agcgccaugucugacuagu

SEQ ID NO: 124464 - RNA, 19 nt, Artificial Sequence
  Description of Artificial Sequence: Synthetic oligonucleotide
gccagaauaggcaaacaac

SEQ ID NO: 124465 - RNA, 19 nt, Artificial Sequence
  Description of Artificial Sequence: Synthetic oligonucleotide
acuacccuucauauuagaa

SEQ ID NO: 124466 - RNA, 19 nt, Artificial Sequence
  Description of Artificial Sequence: Synthetic oligonucleotide
agaacguucuagaaaugua

SEQ ID NO: 124467 - RNA, 19 nt, Artificial Sequence
  Description of Artificial Sequence: Synthetic oligonucleotide
guucggucgaacagaugag

SEQ ID NO: 124468 - RNA, 19 nt, Artificial Sequence
  Description of Artificial Sequence: Synthetic oligonucleotide
acucucugguaacaaucaa

SEQ ID NO: 124469 - RNA, 19 nt, Artificial Sequence
  Description of Artificial Sequence: Synthetic oligonucleotide
gagauaucguagggcauuc

SEQ ID NO: 124470 - RNA, 19 nt, Artificial Sequence
  Description of Artificial Sequence: Synthetic oligonucleotide
caagaaugaaauacagcau

SEQ ID NO: 124471 - RNA, 19 nt, Artificial Sequence
  Description of Artificial Sequence: Synthetic oligonucleotide
aagcgccaugucugacuag

SEQ ID NO: 124472 - RNA, 19 nt, Artificial Sequence
  Description of Artificial Sequence: Synthetic oligonucleotide
agacauguguagguuuccu

SEQ ID NO: 124473 - RNA, 19 nt, Artificial Sequence
  Description of Artificial Sequence: Synthetic oligonucleotide
gagagcuuuaguucauaau

SEQ ID NO: 124474 - RNA, 19 nt, Artificial Sequence
  Description of Artificial Sequence: Synthetic oligonucleotide
ugggagguuugcguuuagc

SEQ ID NO: 124475 - RNA, 19 nt, Artificial Sequence
  Description of Artificial Sequence: Synthetic oligonucleotide
gcaauuaaagcgccuucga

SEQ ID NO: 124476 - RNA, 19 nt, Artificial Sequence
  Description of Artificial Sequence: Synthetic oligonucleotide
agugugcacugagucaacu

SEQ ID NO: 124477 - RNA, 19 nt, Artificial Sequence
  Description of Artificial Sequence: Synthetic oligonucleotide
cauguccugugugugugug

SEQ ID NO: 124478 - RNA, 19 nt, Artificial Sequence
  Description of Artificial Sequence: Synthetic oligonucleotide
ugccccuugggaagucaga

SEQ ID NO: 124479 - RNA, 19 nt, Artificial Sequence
  Description of Artificial Sequence: Synthetic oligonucleotide
gaucucauugagauaucgu

SEQ ID NO: 124480 - RNA, 19 nt, Artificial Sequence
  Description of Artificial Sequence: Synthetic oligonucleotide
caaggcguucggucgaaca

SEQ ID NO: 124481 - RNA, 19 nt, Artificial Sequence
  Description of Artificial Sequence: Synthetic oligonucleotide
gggaauacuauaauuuagu

SEQ ID NO: 124482 - RNA, 19 nt, Artificial Sequence
  Description of Artificial Sequence: Synthetic oligonucleotide
ggagguuugcguuuagcua

SEQ ID NO: 124483 - RNA, 19 nt, Artificial Sequence
  Description of Artificial Sequence: Synthetic oligonucleotide
ugggaccaucaucccaccu

SEQ ID NO: 124484 - RNA, 19 nt, Artificial Sequence
  Description of Artificial Sequence: Synthetic oligonucleotide
ccuucgagaagacuuaaaa

SEQ ID NO: 124485 - RNA, 19 nt, Artificial Sequence
  Description of Artificial Sequence: Synthetic oligonucleotide
cagcauuaugacugugaca

SEQ ID NO: 124486 - RNA, 19 nt, Artificial Sequence
  Description of Artificial Sequence: Synthetic oligonucleotide
agcucucguaugugaagau

SEQ ID NO: 124487 - RNA, 19 nt, Artificial Sequence
  Description of Artificial Sequence: Synthetic oligonucleotide
cauagaacuggccugcauu

SEQ ID NO: 124488 - RNA, 19 nt, Artificial Sequence
  Description of Artificial Sequence: Synthetic oligonucleotide
auguccugugugugugugu

SEQ ID NO: 124489 - RNA, 19 nt, Artificial Sequence
  Description of Artificial Sequence: Synthetic oligonucleotide
gaucacgcuugaagaagga

SEQ ID NO: 124490 - RNA, 19 nt, Artificial Sequence
  Description of Artificial Sequence: Synthetic oligonucleotide
cuuccuauccauguccugu

SEQ ID NO: 124491 - RNA, 19 nt, Artificial Sequence
  Description of Artificial Sequence: Synthetic oligonucleotide
ccuucauauuagaacucuc

SEQ ID NO: 124492 - RNA, 19 nt, Artificial Sequence
  Description of Artificial Sequence: Synthetic oligonucleotide
cugacucuuuccaaacgcu

SEQ ID NO: 124493 - RNA, 19 nt, Artificial Sequence
  Description of Artificial Sequence: Synthetic oligonucleotide
cauucuaugggaccaucau

SEQ ID NO: 124494 - RNA, 19 nt, Artificial Sequence
  Description of Artificial Sequence: Synthetic oligonucleotide
aggcguucggucgaacaga

SEQ ID NO: 124495 - RNA, 19 nt, Artificial Sequence
  Description of Artificial Sequence: Synthetic oligonucleotide
gggagguuugcguuuagcu

SEQ ID NO: 124496 - RNA, 19 nt, Artificial Sequence
  Description of Artificial Sequence: Synthetic oligonucleotide
gaaacggcagcucccuuuu

SEQ ID NO: 124497 - RNA, 19 nt, Artificial Sequence
  Description of Artificial Sequence: Synthetic oligonucleotide
cugucagcccagacaugug

SEQ ID NO: 124498 - RNA, 19 nt, Artificial Sequence
  Description of Artificial Sequence: Synthetic oligonucleotide
cagcacuguacaaaacgua

SEQ ID NO: 124499 - RNA, 19 nt, Artificial Sequence
  Description of Artificial Sequence: Synthetic oligonucleotide
gcguuuagcuagaaguuuc

SEQ ID NO: 124500 - RNA, 19 nt, Artificial Sequence
  Description of Artificial Sequence: Synthetic oligonucleotide
agauaucguagggcauuca

SEQ ID NO: 124501 - RNA, 19 nt, Artificial Sequence
  Description of Artificial Sequence: Synthetic oligonucleotide
caugguauuccuguuccgu

SEQ ID NO: 124502 - RNA, 19 nt, Artificial Sequence
  Description of Artificial Sequence: Synthetic oligonucleotide
caggcaguuagaaaauguu

SEQ ID NO: 124503 - RNA, 19 nt, Artificial Sequence
  Description of Artificial Sequence: Synthetic oligonucleotide
agacccuaacucacauucu

SEQ ID NO: 124504 - RNA, 19 nt, Artificial Sequence
  Description of Artificial Sequence: Synthetic oligonucleotide
acaugugauucgagguaca

SEQ ID NO: 124505 - RNA, 19 nt, Artificial Sequence
  Description of Artificial Sequence: Synthetic oligonucleotide
cuguacauguugggguguc

SEQ ID NO: 124506 - RNA, 19 nt, Artificial Sequence
  Description of Artificial Sequence: Synthetic oligonucleotide
ccugugugugugugugugg

SEQ ID NO: 124507 - RNA, 19 nt, Artificial Sequence
  Description of Artificial Sequence: Synthetic oligonucleotide
cgguaauuguaauacgaca

SEQ ID NO: 124508 - RNA, 19 nt, Artificial Sequence
  Description of Artificial Sequence: Synthetic oligonucleotide
cagagugagcaguuguggu

SEQ ID NO: 124509 - RNA, 19 nt, Artificial Sequence
  Description of Artificial Sequence: Synthetic oligonucleotide
guaugccucuuaacuggac

SEQ ID NO: 124510 - RNA, 19 nt, Artificial Sequence
  Description of Artificial Sequence: Synthetic oligonucleotide
caugugauucgagguacaa

SEQ ID NO: 124511 - RNA, 19 nt, Artificial Sequence
  Description of Artificial Sequence: Synthetic oligonucleotide
uuccuguuccgugcugcuc

SEQ ID NO: 124512 - RNA, 19 nt, Artificial Sequence
  Description of Artificial Sequence: Synthetic oligonucleotide
guaagugaucacgcuugaa

SEQ ID NO: 124513 - RNA, 19 nt, Artificial Sequence
  Description of Artificial Sequence: Synthetic oligonucleotide
acaauagaccgagcuucuu

SEQ ID NO: 124514 - RNA, 19 nt, Artificial Sequence
  Description of Artificial Sequence: Synthetic oligonucleotide
uggccugcauuugguuaca

SEQ ID NO: 124515 - RNA, 19 nt, Artificial Sequence
  Description of Artificial Sequence: Synthetic oligonucleotide
gugguaaauuuggccuaac

SEQ ID NO: 124516 - RNA, 19 nt, Artificial Sequence
  Description of Artificial Sequence: Synthetic oligonucleotide
cucccguguuacaaugucu

SEQ ID NO: 124517 - RNA, 19 nt, Artificial Sequence
  Description of Artificial Sequence: Synthetic oligonucleotide
gguaugccucuuaacugga

SEQ ID NO: 124518 - RNA, 19 nt, Artificial Sequence
  Description of Artificial Sequence: Synthetic oligonucleotide
cacuguagcucccguguua

SEQ ID NO: 124519 - RNA, 19 nt, Artificial Sequence
  Description of Artificial Sequence: Synthetic oligonucleotide
ccucacuaaagccaccucu

SEQ ID NO: 124520 - RNA, 19 nt, Artificial Sequence
  Description of Artificial Sequence: Synthetic oligonucleotide
cuugggaagucagauccau

SEQ ID NO: 124521 - RNA, 19 nt, Artificial Sequence
  Description of Artificial Sequence: Synthetic oligonucleotide
cucguaugugaagauuccu

SEQ ID NO: 124522 - RNA, 19 nt, Artificial Sequence
  Description of Artificial Sequence: Synthetic oligonucleotide
gguaacaaucaaauauauu

SEQ ID NO: 124523 - RNA, 19 nt, Artificial Sequence
  Description of Artificial Sequence: Synthetic oligonucleotide
caccauggacaacuuacau

SEQ ID NO: 124524 - RNA, 19 nt, Artificial Sequence
  Description of Artificial Sequence: Synthetic oligonucleotide
cgccaugucugacuaguug

SEQ ID NO: 124525 - RNA, 19 nt, Artificial Sequence
  Description of Artificial Sequence: Synthetic oligonucleotide
ccagaagggaauuuaucau

SEQ ID NO: 124526 - RNA, 19 nt, Artificial Sequence
  Description of Artificial Sequence: Synthetic oligonucleotide
ccgucuacaccauagcuau

SEQ ID NO: 124527 - RNA, 19 nt, Artificial Sequence
  Description of Artificial Sequence: Synthetic oligonucleotide
ccuuugccguucaauaucu

SEQ ID NO: 124528 - RNA, 19 nt, Artificial Sequence
  Description of Artificial Sequence: Synthetic oligonucleotide
agcgucuuaugaaggccuu

SEQ ID NO: 124529 - RNA, 19 nt, Artificial Sequence
  Description of Artificial Sequence: Synthetic oligonucleotide
cacagcccuagaaccuaaa

SEQ ID NO: 124530 - RNA, 19 nt, Artificial Sequence
  Description of Artificial Sequence: Synthetic oligonucleotide
ggcuuuuaguauuguguuu

SEQ ID NO: 124531 - RNA, 19 nt, Artificial Sequence
  Description of Artificial Sequence: Synthetic oligonucleotide
gcgucuuaugaaggccuug

SEQ ID NO: 124532 - RNA, 19 nt, Artificial Sequence
  Description of Artificial Sequence: Synthetic oligonucleotide
cagauccauuccgucuaca

SEQ ID NO: 124533 - RNA, 19 nt, Artificial Sequence
  Description of Artificial Sequence: Synthetic oligonucleotide
cccguguuacaaugucuca

SEQ ID NO: 124534 - RNA, 19 nt, Artificial Sequence
  Description of Artificial Sequence: Synthetic oligonucleotide
guuuugcggagaacggauu

SEQ ID NO: 124535 - RNA, 19 nt, Artificial Sequence
  Description of Artificial Sequence: Synthetic oligonucleotide
cagcguaucuuugcucaua

SEQ ID NO: 124536 - RNA, 19 nt, Artificial Sequence
  Description of Artificial Sequence: Synthetic oligonucleotide
ccuugaugcuaaagaacgu

SEQ ID NO: 124537 - RNA, 19 nt, Artificial Sequence
  Description of Artificial Sequence: Synthetic oligonucleotide
ccgagugcugacgcuguac

SEQ ID NO: 124538 - RNA, 19 nt, Artificial Sequence
  Description of Artificial Sequence: Synthetic oligonucleotide
guccugugugugugugugu

SEQ ID NO: 124539 - RNA, 19 nt, Artificial Sequence
  Description of Artificial Sequence: Synthetic oligonucleotide
gcccaaggcguucggucga

SEQ ID NO: 124540 - RNA, 19 nt, Artificial Sequence
  Description of Artificial Sequence: Synthetic oligonucleotide
cccuaacucacauucuauu

SEQ ID NO: 124541 - RNA, 19 nt, Artificial Sequence
  Description of Artificial Sequence: Synthetic oligonucleotide
cggucgaacagaugaggaa

SEQ ID NO: 124542 - RNA, 19 nt, Artificial Sequence
  Description of Artificial Sequence: Synthetic oligonucleotide
gguuugcguuuagcuagaa

SEQ ID NO: 124543 - RNA, 19 nt, Artificial Sequence
  Description of Artificial Sequence: Synthetic oligonucleotide
ggcguucggucgaacagau

SEQ ID NO: 124544 - RNA, 19 nt, Artificial Sequence
  Description of Artificial Sequence: Synthetic oligonucleotide
gcucucguaugugaagauu

SEQ ID NO: 124545 - RNA, 19 nt, Artificial Sequence
  Description of Artificial Sequence: Synthetic oligonucleotide
gcguucggucgaacagaug

SEQ ID NO: 124546 - RNA, 19 nt, Artificial Sequence
  Description of Artificial Sequence: Synthetic oligonucleotide
gcagcguaucuuugcucau

SEQ ID NO: 124547 - RNA, 19 nt, Artificial Sequence
  Description of Artificial Sequence: Synthetic oligonucleotide
ccaaggcguucggucgaac

SEQ ID NO: 124548 - RNA, 19 nt, Artificial Sequence
  Description of Artificial Sequence: Synthetic oligonucleotide
ccauuccgucuacaccaua

SEQ ID NO: 124549 - RNA, 19 nt, Artificial Sequence
  Description of Artificial Sequence: Synthetic oligonucleotide
cgccuucgagaagacuuaa

SEQ ID NO: 124550 - RNA, 19 nt, Artificial Sequence
  Description of Artificial Sequence: Synthetic oligonucleotide
cccaaggcguucggucgaa

SEQ ID NO: 124551 - RNA, 19 nt, Artificial Sequence
  Description of Artificial Sequence: Synthetic oligonucleotide
gcgccaugucugacuaguu

SEQ ID NO: 124552 - RNA, 19 nt, Artificial Sequence
  Description of Artificial Sequence: Synthetic oligonucleotide
aagagaucgaauuuaaacc

SEQ ID NO: 124553 - RNA, 19 nt, Artificial Sequence
  Description of Artificial Sequence: Synthetic oligonucleotide
aguuguauggugcaguugc

SEQ ID NO: 124554 - RNA, 19 nt, Artificial Sequence
  Description of Artificial Sequence: Synthetic oligonucleotide
uguugauuacacaagaaca

SEQ ID NO: 124555 - RNA, 19 nt, Artificial Sequence
  Description of Artificial Sequence: Synthetic oligonucleotide
agagaucgaauuuaaaccg

SEQ ID NO: 124556 - RNA, 19 nt, Artificial Sequence
  Description of Artificial Sequence: Synthetic oligonucleotide
auaaaauagccccucaauc

SEQ ID NO: 124557 - RNA, 19 nt, Artificial Sequence
  Description of Artificial Sequence: Synthetic oligonucleotide
aaggauaguauuaaauuac

SEQ ID NO: 124558 - RNA, 19 nt, Artificial Sequence
  Description of Artificial Sequence: Synthetic oligonucleotide
uguacgaguaguuguaugg

SEQ ID NO: 124559 - RNA, 19 nt, Artificial Sequence
  Description of Artificial Sequence: Synthetic oligonucleotide
aacaguuaagaaaaucagc

SEQ ID NO: 124560 - RNA, 19 nt, Artificial Sequence
  Description of Artificial Sequence: Synthetic oligonucleotide
ucaaggaacaauaagccgu

SEQ ID NO: 124561 - RNA, 19 nt, Artificial Sequence
  Description of Artificial Sequence: Synthetic oligonucleotide
auugcuaccuuauaucccg

SEQ ID NO: 124562 - RNA, 19 nt, Artificial Sequence
  Description of Artificial Sequence: Synthetic oligonucleotide
ucuauaaugugcuugggcu

SEQ ID NO: 124563 - RNA, 19 nt, Artificial Sequence
  Description of Artificial Sequence: Synthetic oligonucleotide
uauacuuaaagauguacga

SEQ ID NO: 124564 - RNA, 19 nt, Artificial Sequence
  Description of Artificial Sequence: Synthetic oligonucleotide
uguguuguacaccagacuc

SEQ ID NO: 124565 - RNA, 19 nt, Artificial Sequence
  Description of Artificial Sequence: Synthetic oligonucleotide
uaaauuacuucacuguagu

SEQ ID NO: 124566 - RNA, 19 nt, Artificial Sequence
  Description of Artificial Sequence: Synthetic oligonucleotide
uauuacaguguuuggauug

SEQ ID NO: 124567 - RNA, 19 nt, Artificial Sequence
  Description of Artificial Sequence: Synthetic oligonucleotide
aauuuagaccaacaugaca

SEQ ID NO: 124568 - RNA, 19 nt, Artificial Sequence
  Description of Artificial Sequence: Synthetic oligonucleotide
auauacuuaaagauguacg

SEQ ID NO: 124569 - RNA, 19 nt, Artificial Sequence
  Description of Artificial Sequence: Synthetic oligonucleotide
aagauguacgaguaguugu

SEQ ID NO: 124570 - RNA, 19 nt, Artificial Sequence
  Description of Artificial Sequence: Synthetic oligonucleotide
cuaccuuauaucccgaugg

SEQ ID NO: 124571 - RNA, 19 nt, Artificial Sequence
  Description of Artificial Sequence: Synthetic oligonucleotide
aaucccuuaacagcagacc

SEQ ID NO: 124572 - RNA, 19 nt, Artificial Sequence
  Description of Artificial Sequence: Synthetic oligonucleotide
ugauugcuaccuuauaucc

SEQ ID NO: 124573 - RNA, 19 nt, Artificial Sequence
  Description of Artificial Sequence: Synthetic oligonucleotide
aauauuaaacccagccuuc

SEQ ID NO: 124574 - RNA, 19 nt, Artificial Sequence
  Description of Artificial Sequence: Synthetic oligonucleotide
agcggacugaagcagacgc

SEQ ID NO: 124575 - RNA, 19 nt, Artificial Sequence
  Description of Artificial Sequence: Synthetic oligonucleotide
aaaccguacagugagacga

SEQ ID NO: 124576 - RNA, 19 nt, Artificial Sequence
  Description of Artificial Sequence: Synthetic oligonucleotide
acgccuuccuucuaaaggc

SEQ ID NO: 124577 - RNA, 19 nt, Artificial Sequence
  Description of Artificial Sequence: Synthetic oligonucleotide
accgaauccuauuuucugc

SEQ ID NO: 124578 - RNA, 19 nt, Artificial Sequence
  Description of Artificial Sequence: Synthetic oligonucleotide
ugugaugcaacaguguaag

SEQ ID NO: 124579 - RNA, 19 nt, Artificial Sequence
  Description of Artificial Sequence: Synthetic oligonucleotide
auuauuacaguguuuggau

SEQ ID NO: 124580 - RNA, 19 nt, Artificial Sequence
  Description of Artificial Sequence: Synthetic oligonucleotide
uggacuagaauccacuagu

SEQ ID NO: 124581 - RNA, 19 nt, Artificial Sequence
  Description of Artificial Sequence: Synthetic oligonucleotide
cuaugaacacaaaggauag

SEQ ID NO: 124582 - RNA, 19 nt, Artificial Sequence
  Description of Artificial Sequence: Synthetic oligonucleotide
gacgccuuccuucuaaagg

SEQ ID NO: 124583 - RNA, 19 nt, Artificial Sequence
  Description of Artificial Sequence: Synthetic oligonucleotide
ugugauugcuaccuuauau

SEQ ID NO: 124584 - RNA, 19 nt, Artificial Sequence
  Description of Artificial Sequence: Synthetic oligonucleotide
acagaagauaucaaucuac

SEQ ID NO: 124585 - RNA, 19 nt, Artificial Sequence
  Description of Artificial Sequence: Synthetic oligonucleotide
cacuguaacuaacugagag

SEQ ID NO: 124586 - RNA, 19 nt, Artificial Sequence
  Description of Artificial Sequence: Synthetic oligonucleotide
ugaugcaacaguguaagca

SEQ ID NO: 124587 - RNA, 19 nt, Artificial Sequence
  Description of Artificial Sequence: Synthetic oligonucleotide
aaaaucgagucccgcauca

SEQ ID NO: 124588 - RNA, 19 nt, Artificial Sequence
  Description of Artificial Sequence: Synthetic oligonucleotide
ugcacaauuuaaaaucccu

SEQ ID NO: 124589 - RNA, 19 nt, Artificial Sequence
  Description of Artificial Sequence: Synthetic oligonucleotide
acuagaauccacuaguguu

SEQ ID NO: 124590 - RNA, 19 nt, Artificial Sequence
  Description of Artificial Sequence: Synthetic oligonucleotide
ugagaauuauuacaguguu

SEQ ID NO: 124591 - RNA, 19 nt, Artificial Sequence
  Description of Artificial Sequence: Synthetic oligonucleotide
uuuguguuguacaccagac

SEQ ID NO: 124592 - RNA, 19 nt, Artificial Sequence
  Description of Artificial Sequence: Synthetic oligonucleotide
aguugugucuauuuccuug

SEQ ID NO: 124593 - RNA, 19 nt, Artificial Sequence
  Description of Artificial Sequence: Synthetic oligonucleotide
ucagugcucauuuuaaauc

SEQ ID NO: 124594 - RNA, 19 nt, Artificial Sequence
  Description of Artificial Sequence: Synthetic oligonucleotide
uuuaccaugcaggagagau

SEQ ID NO: 124595 - RNA, 19 nt, Artificial Sequence
  Description of Artificial Sequence: Synthetic oligonucleotide
caauccuaugaacacaaag

SEQ ID NO: 124596 - RNA, 19 nt, Artificial Sequence
  Description of Artificial Sequence: Synthetic oligonucleotide
ucccauauccccaauaaua

SEQ ID NO: 124597 - RNA, 19 nt, Artificial Sequence
  Description of Artificial Sequence: Synthetic oligonucleotide
uguuguacaccagacucgg

SEQ ID NO: 124598 - RNA, 19 nt, Artificial Sequence
  Description of Artificial Sequence: Synthetic oligonucleotide
aucacgaggacaaucaaag

SEQ ID NO: 124599 - RNA, 19 nt, Artificial Sequence
  Description of Artificial Sequence: Synthetic oligonucleotide
aaaaugccaccccuacaag

SEQ ID NO: 124600 - RNA, 19 nt, Artificial Sequence
  Description of Artificial Sequence: Synthetic oligonucleotide
agcuccguguaacagcucg

SEQ ID NO: 124601 - RNA, 19 nt, Artificial Sequence
  Description of Artificial Sequence: Synthetic oligonucleotide
uaccuuauaucccgauggg

SEQ ID NO: 124602 - RNA, 19 nt, Artificial Sequence
  Description of Artificial Sequence: Synthetic oligonucleotide
acgaguaguuguauggugc

SEQ ID NO: 124603 - RNA, 19 nt, Artificial Sequence
  Description of Artificial Sequence: Synthetic oligonucleotide
uuaaaccguacagugagac

SEQ ID NO: 124604 - RNA, 19 nt, Artificial Sequence
  Description of Artificial Sequence: Synthetic oligonucleotide
aucgaauuuaaaccguaca

SEQ ID NO: 124605 - RNA, 19 nt, Artificial Sequence
  Description of Artificial Sequence: Synthetic oligonucleotide
uaaaccguacagugagacg

SEQ ID NO: 124606 - RNA, 19 nt, Artificial Sequence
  Description of Artificial Sequence: Synthetic oligonucleotide
uccagcauuaugccugucc

SEQ ID NO: 124607 - RNA, 19 nt, Artificial Sequence
  Description of Artificial Sequence: Synthetic oligonucleotide
auacuuaaagauguacgag

SEQ ID NO: 124608 - RNA, 19 nt, Artificial Sequence
  Description of Artificial Sequence: Synthetic oligonucleotide
uacaccaugagugcacccg

SEQ ID NO: 124609 - RNA, 19 nt, Artificial Sequence
  Description of Artificial Sequence: Synthetic oligonucleotide
gaugcaacaguguaagcaa

SEQ ID NO: 124610 - RNA, 19 nt, Artificial Sequence
  Description of Artificial Sequence: Synthetic oligonucleotide
guaagucuuuaacagaaga

SEQ ID NO: 124611 - RNA, 19 nt, Artificial Sequence
  Description of Artificial Sequence: Synthetic oligonucleotide
uuuacauuagugucuggua

SEQ ID NO: 124612 - RNA, 19 nt, Artificial Sequence
  Description of Artificial Sequence: Synthetic oligonucleotide
aauugugugaggacaguca

SEQ ID NO: 124613 - RNA, 19 nt, Artificial Sequence
  Description of Artificial Sequence: Synthetic oligonucleotide
auagcagguuagcacauug

SEQ ID NO: 124614 - RNA, 19 nt, Artificial Sequence
  Description of Artificial Sequence: Synthetic oligonucleotide
cuacuugccuuugauaacc

SEQ ID NO: 124615 - RNA, 19 nt, Artificial Sequence
  Description of Artificial Sequence: Synthetic oligonucleotide
auggacuagaauccacuag

SEQ ID NO: 124616 - RNA, 19 nt, Artificial Sequence
  Description of Artificial Sequence: Synthetic oligonucleotide
agggaauuuauccaacaaa

SEQ ID NO: 124617 - RNA, 19 nt, Artificial Sequence
  Description of Artificial Sequence: Synthetic oligonucleotide
guuagcacauuguugauua

SEQ ID NO: 124618 - RNA, 19 nt, Artificial Sequence
  Description of Artificial Sequence: Synthetic oligonucleotide
agguugcagacacucgggc

SEQ ID NO: 124619 - RNA, 19 nt, Artificial Sequence
  Description of Artificial Sequence: Synthetic oligonucleotide
gauuggugagauuccuugc

SEQ ID NO: 124620 - RNA, 19 nt, Artificial Sequence
  Description of Artificial Sequence: Synthetic oligonucleotide
aagauggacuagaauccac

SEQ ID NO: 124621 - RNA, 19 nt, Artificial Sequence
  Description of Artificial Sequence: Synthetic oligonucleotide
accugauuacaucuaguug

SEQ ID NO: 124622 - RNA, 19 nt, Artificial Sequence
  Description of Artificial Sequence: Synthetic oligonucleotide
ugagacgaagccuugccaa

SEQ ID NO: 124623 - RNA, 19 nt, Artificial Sequence
  Description of Artificial Sequence: Synthetic oligonucleotide
uagcaguuuaguauuguua

SEQ ID NO: 124624 - RNA, 19 nt, Artificial Sequence
  Description of Artificial Sequence: Synthetic oligonucleotide
uacgaguaguuguauggug

SEQ ID NO: 124625 - RNA, 19 nt, Artificial Sequence
  Description of Artificial Sequence: Synthetic oligonucleotide
gugacuuacuucaugucag

SEQ ID NO: 124626 - RNA, 19 nt, Artificial Sequence
  Description of Artificial Sequence: Synthetic oligonucleotide
gugauugcuaccuuauauc

SEQ ID NO: 124627 - RNA, 19 nt, Artificial Sequence
  Description of Artificial Sequence: Synthetic oligonucleotide
cuugcacgcacuuccagug

SEQ ID NO: 124628 - RNA, 19 nt, Artificial Sequence
  Description of Artificial Sequence: Synthetic oligonucleotide
aaccaacaaccaugagugg

SEQ ID NO: 124629 - RNA, 19 nt, Artificial Sequence
  Description of Artificial Sequence: Synthetic oligonucleotide
cccacuguaacuaacugag

SEQ ID NO: 124630 - RNA, 19 nt, Artificial Sequence
  Description of Artificial Sequence: Synthetic oligonucleotide
guaaagagggauuuaaaau

SEQ ID NO: 124631 - RNA, 19 nt, Artificial Sequence
  Description of Artificial Sequence: Synthetic oligonucleotide
agacagaugugaaagguca

SEQ ID NO: 124632 - RNA, 19 nt, Artificial Sequence
  Description of Artificial Sequence: Synthetic oligonucleotide
uuuaaaccguacagugaga

SEQ ID NO: 124633 - RNA, 19 nt, Artificial Sequence
  Description of Artificial Sequence: Synthetic oligonucleotide
gauugcuaccuuauauccc

SEQ ID NO: 124634 - RNA, 19 nt, Artificial Sequence
  Description of Artificial Sequence: Synthetic oligonucleotide
ucccuugugaugcaacagu

SEQ ID NO: 124635 - RNA, 19 nt, Artificial Sequence
  Description of Artificial Sequence: Synthetic oligonucleotide
cauuguugauuacacaaga

SEQ ID NO: 124636 - RNA, 19 nt, Artificial Sequence
  Description of Artificial Sequence: Synthetic oligonucleotide
ugguuauauguacuucuuc

SEQ ID NO: 124637 - RNA, 19 nt, Artificial Sequence
  Description of Artificial Sequence: Synthetic oligonucleotide
auaaagguauaaaagcuua

SEQ ID NO: 124638 - RNA, 19 nt, Artificial Sequence
  Description of Artificial Sequence: Synthetic oligonucleotide
acgaagccuugccaaaagg

SEQ ID NO: 124639 - RNA, 19 nt, Artificial Sequence
  Description of Artificial Sequence: Synthetic oligonucleotide
acaaaccuaucacgaggac

SEQ ID NO: 124640 - RNA, 19 nt, Artificial Sequence
  Description of Artificial Sequence: Synthetic oligonucleotide
uuguguuguacaccagacu

SEQ ID NO: 124641 - RNA, 19 nt, Artificial Sequence
  Description of Artificial Sequence: Synthetic oligonucleotide
uggaccuacuacauguuua

SEQ ID NO: 124642 - RNA, 19 nt, Artificial Sequence
  Description of Artificial Sequence: Synthetic oligonucleotide
aguuguuuagcaguuuagu

SEQ ID NO: 124643 - RNA, 19 nt, Artificial Sequence
  Description of Artificial Sequence: Synthetic oligonucleotide
uguaacagcucggaaccgc

SEQ ID NO: 124644 - RNA, 19 nt, Artificial Sequence
  Description of Artificial Sequence: Synthetic oligonucleotide
agagggaauuuauccaaca

SEQ ID NO: 124645 - RNA, 19 nt, Artificial Sequence
  Description of Artificial Sequence: Synthetic oligonucleotide
aagacccacuguaacuaac

SEQ ID NO: 124646 - RNA, 19 nt, Artificial Sequence
  Description of Artificial Sequence: Synthetic oligonucleotide
gauuuaccaugcaggagag

SEQ ID NO: 124647 - RNA, 19 nt, Artificial Sequence
  Description of Artificial Sequence: Synthetic oligonucleotide
ggauuggugagauuccuug

SEQ ID NO: 124648 - RNA, 19 nt, Artificial Sequence
  Description of Artificial Sequence: Synthetic oligonucleotide
uugugaugcaacaguguaa

SEQ ID NO: 124649 - RNA, 19 nt, Artificial Sequence
  Description of Artificial Sequence: Synthetic oligonucleotide
aggguuuguguuguacacc

SEQ ID NO: 124650 - RNA, 19 nt, Artificial Sequence
  Description of Artificial Sequence: Synthetic oligonucleotide
guaguuugugauugcuacc

SEQ ID NO: 124651 - RNA, 19 nt, Artificial Sequence
  Description of Artificial Sequence: Synthetic oligonucleotide
ccuuauaucccgaugggug

SEQ ID NO: 124652 - RNA, 19 nt, Artificial Sequence
  Description of Artificial Sequence: Synthetic oligonucleotide
ugacuuacuucaugucagc

SEQ ID NO: 124653 - RNA, 19 nt, Artificial Sequence
  Description of Artificial Sequence: Synthetic oligonucleotide
uuagcaguuuaguauuguu

SEQ ID NO: 124654 - RNA, 19 nt, Artificial Sequence
  Description of Artificial Sequence: Synthetic oligonucleotide
aagcaaauggaucgaugua

SEQ ID NO: 124655 - RNA, 19 nt, Artificial Sequence
  Description of Artificial Sequence: Synthetic oligonucleotide
gacgaagccuugccaaaag

SEQ ID NO: 124656 - RNA, 19 nt, Artificial Sequence
  Description of Artificial Sequence: Synthetic oligonucleotide
gacaaaccuaucacgagga

SEQ ID NO: 124657 - RNA, 19 nt, Artificial Sequence
  Description of Artificial Sequence: Synthetic oligonucleotide
ucuaccaucggaagucauu

SEQ ID NO: 124658 - RNA, 19 nt, Artificial Sequence
  Description of Artificial Sequence: Synthetic oligonucleotide
auguacgaguaguuguaug

SEQ ID NO: 124659 - RNA, 19 nt, Artificial Sequence
  Description of Artificial Sequence: Synthetic oligonucleotide
uacucuacuugccuuugau

SEQ ID NO: 124660 - RNA, 19 nt, Artificial Sequence
  Description of Artificial Sequence: Synthetic oligonucleotide
acccacuguaacuaacuga

SEQ ID NO: 124661 - RNA, 19 nt, Artificial Sequence
  Description of Artificial Sequence: Synthetic oligonucleotide
guguuguacaccagacucg

SEQ ID NO: 124662 - RNA, 19 nt, Artificial Sequence
  Description of Artificial Sequence: Synthetic oligonucleotide
gacccgucggccgagaccc

SEQ ID NO: 124663 - RNA, 19 nt, Artificial Sequence
  Description of Artificial Sequence: Synthetic oligonucleotide
cuuagcugggagcauuuuc

SEQ ID NO: 124664 - RNA, 19 nt, Artificial Sequence
  Description of Artificial Sequence: Synthetic oligonucleotide
gaucgaauuuaaaccguac

SEQ ID NO: 124665 - RNA, 19 nt, Artificial Sequence
  Description of Artificial Sequence: Synthetic oligonucleotide
accuaucacgaggacaauc

SEQ ID NO: 124666 - RNA, 19 nt, Artificial Sequence
  Description of Artificial Sequence: Synthetic oligonucleotide
agcagguuagcacauuguu

SEQ ID NO: 124667 - RNA, 19 nt, Artificial Sequence
  Description of Artificial Sequence: Synthetic oligonucleotide
ccuaugaacacaaaggaua

SEQ ID NO: 124668 - RNA, 19 nt, Artificial Sequence
  Description of Artificial Sequence: Synthetic oligonucleotide
ggucaaaugagggcaagag

SEQ ID NO: 124669 - RNA, 19 nt, Artificial Sequence
  Description of Artificial Sequence: Synthetic oligonucleotide
cuugugaugcaacagugua

SEQ ID NO: 124670 - RNA, 19 nt, Artificial Sequence
  Description of Artificial Sequence: Synthetic oligonucleotide
ugggugaaucccuugugau

SEQ ID NO: 124671 - RNA, 19 nt, Artificial Sequence
  Description of Artificial Sequence: Synthetic oligonucleotide
acaaauaaaccgaauccua

SEQ ID NO: 124672 - RNA, 19 nt, Artificial Sequence
  Description of Artificial Sequence: Synthetic oligonucleotide
cuguuaaagagaaaagaau

SEQ ID NO: 124673 - RNA, 19 nt, Artificial Sequence
  Description of Artificial Sequence: Synthetic oligonucleotide
guuaguuagguuccuucaa

SEQ ID NO: 124674 - RNA, 19 nt, Artificial Sequence
  Description of Artificial Sequence: Synthetic oligonucleotide
augacauaaaauagccccu

SEQ ID NO: 124675 - RNA, 19 nt, Artificial Sequence
  Description of Artificial Sequence: Synthetic oligonucleotide
uguaagcaaauggaucgau

SEQ ID NO: 124676 - RNA, 19 nt, Artificial Sequence
  Description of Artificial Sequence: Synthetic oligonucleotide
cacugguuagccguccucc

SEQ ID NO: 124677 - RNA, 19 nt, Artificial Sequence
  Description of Artificial Sequence: Synthetic oligonucleotide
agacgccuuccuucuaaag

SEQ ID NO: 124678 - RNA, 19 nt, Artificial Sequence
  Description of Artificial Sequence: Synthetic oligonucleotide
acuaguguuuccgcugaug

SEQ ID NO: 124679 - RNA, 19 nt, Artificial Sequence
  Description of Artificial Sequence: Synthetic oligonucleotide
cagcuuuccggacgggagg

SEQ ID NO: 124680 - RNA, 19 nt, Artificial Sequence
  Description of Artificial Sequence: Synthetic oligonucleotide
caaaccuaucacgaggaca

SEQ ID NO: 124681 - RNA, 19 nt, Artificial Sequence
  Description of Artificial Sequence: Synthetic oligonucleotide
cgaagccuugccaaaaggg

SEQ ID NO: 124682 - RNA, 19 nt, Artificial Sequence
  Description of Artificial Sequence: Synthetic oligonucleotide
uauuguuaguuagguuccu

SEQ ID NO: 124683 - RNA, 19 nt, Artificial Sequence
  Description of Artificial Sequence: Synthetic oligonucleotide
uuagcacauuguugauuac

SEQ ID NO: 124684 - RNA, 19 nt, Artificial Sequence
  Description of Artificial Sequence: Synthetic oligonucleotide
acuuucaacucagcuagaa

SEQ ID NO: 124685 - RNA, 19 nt, Artificial Sequence
  Description of Artificial Sequence: Synthetic oligonucleotide
caauugugugaggacaguc

SEQ ID NO: 124686 - RNA, 19 nt, Artificial Sequence
  Description of Artificial Sequence: Synthetic oligonucleotide
ucaauccuaugaacacaaa

SEQ ID NO: 124687 - RNA, 19 nt, Artificial Sequence
  Description of Artificial Sequence: Synthetic oligonucleotide
agcuuuccggacgggaggg

SEQ ID NO: 124688 - RNA, 19 nt, Artificial Sequence
  Description of Artificial Sequence: Synthetic oligonucleotide
caucggaagucauuucaca

SEQ ID NO: 124689 - RNA, 19 nt, Artificial Sequence
  Description of Artificial Sequence: Synthetic oligonucleotide
uugugauugcuaccuuaua

SEQ ID NO: 124690 - RNA, 19 nt, Artificial Sequence
  Description of Artificial Sequence: Synthetic oligonucleotide
uaguuguauggugcaguug

SEQ ID NO: 124691 - RNA, 19 nt, Artificial Sequence
  Description of Artificial Sequence: Synthetic oligonucleotide
ccuaucacgaggacaauca

SEQ ID NO: 124692 - RNA, 19 nt, Artificial Sequence
  Description of Artificial Sequence: Synthetic oligonucleotide
gcuaccuuauaucccgaug

SEQ ID NO: 124693 - RNA, 19 nt, Artificial Sequence
  Description of Artificial Sequence: Synthetic oligonucleotide
uacucccauauccccaaua

SEQ ID NO: 124694 - RNA, 19 nt, Artificial Sequence
  Description of Artificial Sequence: Synthetic oligonucleotide
ccguguaacagcucggaac

SEQ ID NO: 124695 - RNA, 19 nt, Artificial Sequence
  Description of Artificial Sequence: Synthetic oligonucleotide
agccccucaauccuaugaa

SEQ ID NO: 124696 - RNA, 19 nt, Artificial Sequence
  Description of Artificial Sequence: Synthetic oligonucleotide
acuagcagccacagccuuc

SEQ ID NO: 124697 - RNA, 19 nt, Artificial Sequence
  Description of Artificial Sequence: Synthetic oligonucleotide
accuuauaucccgaugggu

SEQ ID NO: 124698 - RNA, 19 nt, Artificial Sequence
  Description of Artificial Sequence: Synthetic oligonucleotide
agacccacuguaacuaacu

SEQ ID NO: 124699 - RNA, 19 nt, Artificial Sequence
  Description of Artificial Sequence: Synthetic oligonucleotide
caccucaacaagcugaagu

SEQ ID NO: 124700 - RNA, 19 nt, Artificial Sequence
  Description of Artificial Sequence: Synthetic oligonucleotide
ucucuaccaucggaaguca

SEQ ID NO: 124701 - RNA, 19 nt, Artificial Sequence
  Description of Artificial Sequence: Synthetic oligonucleotide
agauguacgaguaguugua

SEQ ID NO: 124702 - RNA, 19 nt, Artificial Sequence
  Description of Artificial Sequence: Synthetic oligonucleotide
uugcuaccuuauaucccga

SEQ ID NO: 124703 - RNA, 19 nt, Artificial Sequence
  Description of Artificial Sequence: Synthetic oligonucleotide
gcuauuaauuaagcacaag

SEQ ID NO: 124704 - RNA, 19 nt, Artificial Sequence
  Description of Artificial Sequence: Synthetic oligonucleotide
gugagacgaagccuugcca

SEQ ID NO: 124705 - RNA, 19 nt, Artificial Sequence
  Description of Artificial Sequence: Synthetic oligonucleotide
cugaggguuuguguuguac

SEQ ID NO: 124706 - RNA, 19 nt, Artificial Sequence
  Description of Artificial Sequence: Synthetic oligonucleotide
aaauagccccucaauccua

SEQ ID NO: 124707 - RNA, 19 nt, Artificial Sequence
  Description of Artificial Sequence: Synthetic oligonucleotide
ugcuaccuuauaucccgau

SEQ ID NO: 124708 - RNA, 19 nt, Artificial Sequence
  Description of Artificial Sequence: Synthetic oligonucleotide
aggaagcggagcgcggacg

SEQ ID NO: 124709 - RNA, 19 nt, Artificial Sequence
  Description of Artificial Sequence: Synthetic oligonucleotide
agaucgaauuuaaaccgua

SEQ ID NO: 124710 - RNA, 19 nt, Artificial Sequence
  Description of Artificial Sequence: Synthetic oligonucleotide
cuauacaguaaggcaagaa

SEQ ID NO: 124711 - RNA, 19 nt, Artificial Sequence
  Description of Artificial Sequence: Synthetic oligonucleotide
aguuugugauugcuaccuu

SEQ ID NO: 124712 - RNA, 19 nt, Artificial Sequence
  Description of Artificial Sequence: Synthetic oligonucleotide
guuagccguccucccugcg

SEQ ID NO: 124713 - RNA, 19 nt, Artificial Sequence
  Description of Artificial Sequence: Synthetic oligonucleotide
gagaucgaauuuaaaccgu

SEQ ID NO: 124714 - RNA, 19 nt, Artificial Sequence
  Description of Artificial Sequence: Synthetic oligonucleotide
ggaagcggagcgcggacgc

SEQ ID NO: 124715 - RNA, 19 nt, Artificial Sequence
  Description of Artificial Sequence: Synthetic oligonucleotide
gaggaagcggagcgcggac

SEQ ID NO: 124716 - RNA, 19 nt, Artificial Sequence
  Description of Artificial Sequence: Synthetic oligonucleotide
aggucaaaugagggcaaga

SEQ ID NO: 124717 - RNA, 19 nt, Artificial Sequence
  Description of Artificial Sequence: Synthetic oligonucleotide
agguuagcacauuguugau

SEQ ID NO: 124718 - RNA, 19 nt, Artificial Sequence
  Description of Artificial Sequence: Synthetic oligonucleotide
cccauauccccaauaauaa

SEQ ID NO: 124719 - RNA, 19 nt, Artificial Sequence
  Description of Artificial Sequence: Synthetic oligonucleotide
guagcuccguguaacagcu

SEQ ID NO: 124720 - RNA, 19 nt, Artificial Sequence
  Description of Artificial Sequence: Synthetic oligonucleotide
gaagcggagcgcggacgcg

SEQ ID NO: 124721 - RNA, 19 nt, Artificial Sequence
  Description of Artificial Sequence: Synthetic oligonucleotide
guuuccgcugaugccagga

SEQ ID NO: 124722 - RNA, 19 nt, Artificial Sequence
  Description of Artificial Sequence: Synthetic oligonucleotide
gaguggagccaguauuacu

SEQ ID NO: 124723 - RNA, 19 nt, Artificial Sequence
  Description of Artificial Sequence: Synthetic oligonucleotide
cagugagacgaagccuugc

SEQ ID NO: 124724 - RNA, 19 nt, Artificial Sequence
  Description of Artificial Sequence: Synthetic oligonucleotide
auagccccucaauccuaug

SEQ ID NO: 124725 - RNA, 19 nt, Artificial Sequence
  Description of Artificial Sequence: Synthetic oligonucleotide
guucacugguuagccgucc

SEQ ID NO: 124726 - RNA, 19 nt, Artificial Sequence
  Description of Artificial Sequence: Synthetic oligonucleotide
guguuuccgcugaugccag

SEQ ID NO: 124727 - RNA, 19 nt, Artificial Sequence
  Description of Artificial Sequence: Synthetic oligonucleotide
agacgaagccuugccaaaa

SEQ ID NO: 124728 - RNA, 19 nt, Artificial Sequence
  Description of Artificial Sequence: Synthetic oligonucleotide
cuaucacgaggacaaucaa

SEQ ID NO: 124729 - RNA, 19 nt, Artificial Sequence
  Description of Artificial Sequence: Synthetic oligonucleotide
auacaaaacucuggaccua

SEQ ID NO: 124730 - RNA, 19 nt, Artificial Sequence
  Description of Artificial Sequence: Synthetic oligonucleotide
aaccguacagugagacgaa

SEQ ID NO: 124731 - RNA, 19 nt, Artificial Sequence
  Description of Artificial Sequence: Synthetic oligonucleotide
ccgaauccuauuuucugca

SEQ ID NO: 124732 - RNA, 19 nt, Artificial Sequence
  Description of Artificial Sequence: Synthetic oligonucleotide
auaucccgaugggugauuu

SEQ ID NO: 124733 - RNA, 19 nt, Artificial Sequence
  Description of Artificial Sequence: Synthetic oligonucleotide
uauaucccgaugggugauu

SEQ ID NO: 124734 - RNA, 19 nt, Artificial Sequence
  Description of Artificial Sequence: Synthetic oligonucleotide
gagaauuauuacaguguuu

SEQ ID NO: 124735 - RNA, 19 nt, Artificial Sequence
  Description of Artificial Sequence: Synthetic oligonucleotide
cugauuacaucuaguuguu

SEQ ID NO: 124736 - RNA, 19 nt, Artificial Sequence
  Description of Artificial Sequence: Synthetic oligonucleotide
cuaccaucggaagucauuu

SEQ ID NO: 124737 - RNA, 19 nt, Artificial Sequence
  Description of Artificial Sequence: Synthetic oligonucleotide
cuccguguaacagcucgga

SEQ ID NO: 124738 - RNA, 19 nt, Artificial Sequence
  Description of Artificial Sequence: Synthetic oligonucleotide
cacuuucaacucagcuaga

SEQ ID NO: 124739 - RNA, 19 nt, Artificial Sequence
  Description of Artificial Sequence: Synthetic oligonucleotide
gcagacgccuuccuucuaa

SEQ ID NO: 124740 - RNA, 19 nt, Artificial Sequence
  Description of Artificial Sequence: Synthetic oligonucleotide
cgaauccuauuuucugcac

SEQ ID NO: 124741 - RNA, 19 nt, Artificial Sequence
  Description of Artificial Sequence: Synthetic oligonucleotide
uagcuccguguaacagcuc

SEQ ID NO: 124742 - RNA, 19 nt, Artificial Sequence
  Description of Artificial Sequence: Synthetic oligonucleotide
gcggacugaagcagacgcc

SEQ ID NO: 124743 - RNA, 19 nt, Artificial Sequence
  Description of Artificial Sequence: Synthetic oligonucleotide
cucccauauccccaauaau

SEQ ID NO: 124744 - RNA, 19 nt, Artificial Sequence
  Description of Artificial Sequence: Synthetic oligonucleotide
ggccacuaacuucaauuau

SEQ ID NO: 124745 - RNA, 19 nt, Artificial Sequence
  Description of Artificial Sequence: Synthetic oligonucleotide
caccccuacaagagggaau

SEQ ID NO: 124746 - RNA, 19 nt, Artificial Sequence
  Description of Artificial Sequence: Synthetic oligonucleotide
gcuuuccggacgggagggg

SEQ ID NO: 124747 - RNA, 19 nt, Artificial Sequence
  Description of Artificial Sequence: Synthetic oligonucleotide
ugcggggcugaggguuugu

SEQ ID NO: 124748 - RNA, 19 nt, Artificial Sequence
  Description of Artificial Sequence: Synthetic oligonucleotide
cacuuagcugggagcauuu

SEQ ID NO: 124749 - RNA, 19 nt, Artificial Sequence
  Description of Artificial Sequence: Synthetic oligonucleotide
cccuacaagagggaauuua

SEQ ID NO: 124750 - RNA, 19 nt, Artificial Sequence
  Description of Artificial Sequence: Synthetic oligonucleotide
cucuaccaucggaagucau

SEQ ID NO: 124751 - RNA, 19 nt, Artificial Sequence
  Description of Artificial Sequence: Synthetic oligonucleotide
acccgucggccgagacccc

SEQ ID NO: 124752 - RNA, 19 nt, Artificial Sequence
  Description of Artificial Sequence: Synthetic oligonucleotide
gggacccgucggccgagac

SEQ ID NO: 124753 - RNA, 19 nt, Artificial Sequence
  Description of Artificial Sequence: Synthetic oligonucleotide
gcggggcugaggguuugug

SEQ ID NO: 124754 - RNA, 19 nt, Artificial Sequence
  Description of Artificial Sequence: Synthetic oligonucleotide
gcacuuagcugggagcauu

SEQ ID NO: 124755 - RNA, 19 nt, Artificial Sequence
  Description of Artificial Sequence: Synthetic oligonucleotide
ccaauugugugaggacagu

SEQ ID NO: 124756 - RNA, 19 nt, Artificial Sequence
  Description of Artificial Sequence: Synthetic oligonucleotide
ccgcugaugccaggagcuc

SEQ ID NO: 124757 - RNA, 19 nt, Artificial Sequence
  Description of Artificial Sequence: Synthetic oligonucleotide
ccucgggcugguccaagau

SEQ ID NO: 124758 - RNA, 19 nt, Artificial Sequence
  Description of Artificial Sequence: Synthetic oligonucleotide
ccgcagccccucuguagua

SEQ ID NO: 124759 - RNA, 19 nt, Artificial Sequence
  Description of Artificial Sequence: Synthetic oligonucleotide
ccccuacaagagggaauuu

SEQ ID NO: 124760 - RNA, 19 nt, Artificial Sequence
  Description of Artificial Sequence: Synthetic oligonucleotide
cgggacccgucggccgaga

SEQ ID NO: 124761 - RNA, 19 nt, Artificial Sequence
  Description of Artificial Sequence: Synthetic oligonucleotide
auauauauaacucgaggcc

SEQ ID NO: 124762 - RNA, 19 nt, Artificial Sequence
  Description of Artificial Sequence: Synthetic oligonucleotide
aguauauauauauaacucg

SEQ ID NO: 124763 - RNA, 19 nt, Artificial Sequence
  Description of Artificial Sequence: Synthetic oligonucleotide
auauuuuagaaccagucgg

SEQ ID NO: 124764 - RNA, 19 nt, Artificial Sequence
  Description of Artificial Sequence: Synthetic oligonucleotide
aaggaaauaacacaguccu

SEQ ID NO: 124765 - RNA, 19 nt, Artificial Sequence
  Description of Artificial Sequence: Synthetic oligonucleotide
aagauguguacuugcaagc

SEQ ID NO: 124766 - RNA, 19 nt, Artificial Sequence
  Description of Artificial Sequence: Synthetic oligonucleotide
aaguauauauauauaacuc

SEQ ID NO: 124767 - RNA, 19 nt, Artificial Sequence
  Description of Artificial Sequence: Synthetic oligonucleotide
uuagcuuccacuacugugg

SEQ ID NO: 124768 - RNA, 19 nt, Artificial Sequence
  Description of Artificial Sequence: Synthetic oligonucleotide
ugagagacgguaauuaucc

SEQ ID NO: 124769 - RNA, 19 nt, Artificial Sequence
  Description of Artificial Sequence: Synthetic oligonucleotide
acuaucauuugcccgaccc

SEQ ID NO: 124770 - RNA, 19 nt, Artificial Sequence
  Description of Artificial Sequence: Synthetic oligonucleotide
uauauauaacucgaggccg

SEQ ID NO: 124771 - RNA, 19 nt, Artificial Sequence
  Description of Artificial Sequence: Synthetic oligonucleotide
uauauauauauaacucgag

SEQ ID NO: 124772 - RNA, 19 nt, Artificial Sequence
  Description of Artificial Sequence: Synthetic oligonucleotide
uaaguguguggauagagag

SEQ ID NO: 124773 - RNA, 19 nt, Artificial Sequence
  Description of Artificial Sequence: Synthetic oligonucleotide
ucgauuacuaucauuugcc

SEQ ID NO: 124774 - RNA, 19 nt, Artificial Sequence
  Description of Artificial Sequence: Synthetic oligonucleotide
uuuagaaccagucgguucu

SEQ ID NO: 124775 - RNA, 19 nt, Artificial Sequence
  Description of Artificial Sequence: Synthetic oligonucleotide
agagacgguaauuauccgc

SEQ ID NO: 124776 - RNA, 19 nt, Artificial Sequence
  Description of Artificial Sequence: Synthetic oligonucleotide
cugauaaaugaaaugaguc

SEQ ID NO: 124777 - RNA, 19 nt, Artificial Sequence
  Description of Artificial Sequence: Synthetic oligonucleotide
uucuacagacaaaugaucu

SEQ ID NO: 124778 - RNA, 19 nt, Artificial Sequence
  Description of Artificial Sequence: Synthetic oligonucleotide
uguacuugcaagcaugccu

SEQ ID NO: 124779 - RNA, 19 nt, Artificial Sequence
  Description of Artificial Sequence: Synthetic oligonucleotide
aauaccuuugcuccgccug

SEQ ID NO: 124780 - RNA, 19 nt, Artificial Sequence
  Description of Artificial Sequence: Synthetic oligonucleotide
uucuuucacuauaagaugu

SEQ ID NO: 124781 - RNA, 19 nt, Artificial Sequence
  Description of Artificial Sequence: Synthetic oligonucleotide
aaauaaagguacugguuga

SEQ ID NO: 124782 - RNA, 19 nt, Artificial Sequence
  Description of Artificial Sequence: Synthetic oligonucleotide
ugaaggaaauaacacaguc

SEQ ID NO: 124783 - RNA, 19 nt, Artificial Sequence
  Description of Artificial Sequence: Synthetic oligonucleotide
uauuguuuauuuucuaagu

SEQ ID NO: 124784 - RNA, 19 nt, Artificial Sequence
  Description of Artificial Sequence: Synthetic oligonucleotide
aauuauccgcacaaggagg

SEQ ID NO: 124785 - RNA, 19 nt, Artificial Sequence
  Description of Artificial Sequence: Synthetic oligonucleotide
cagcaugagauaaucagcg

SEQ ID NO: 124786 - RNA, 19 nt, Artificial Sequence
  Description of Artificial Sequence: Synthetic oligonucleotide
ggauauauggcucuucagg

SEQ ID NO: 124787 - RNA, 19 nt, Artificial Sequence
  Description of Artificial Sequence: Synthetic oligonucleotide
uauauucucgauuacuauc

SEQ ID NO: 124788 - RNA, 19 nt, Artificial Sequence
  Description of Artificial Sequence: Synthetic oligonucleotide
uauaagauguguacuugca

SEQ ID NO: 124789 - RNA, 19 nt, Artificial Sequence
  Description of Artificial Sequence: Synthetic oligonucleotide
aucaacgcguaaaauaacc

SEQ ID NO: 124790 - RNA, 19 nt, Artificial Sequence
  Description of Artificial Sequence: Synthetic oligonucleotide
uauaacucgaggccguuug

SEQ ID NO: 124791 - RNA, 19 nt, Artificial Sequence
  Description of Artificial Sequence: Synthetic oligonucleotide
uugauaucaggcacuaucu

SEQ ID NO: 124792 - RNA, 19 nt, Artificial Sequence
  Description of Artificial Sequence: Synthetic oligonucleotide
ugauguuuacaauauuacu

SEQ ID NO: 124793 - RNA, 19 nt, Artificial Sequence
  Description of Artificial Sequence: Synthetic oligonucleotide
uuugcgaacaaagaauucu

SEQ ID NO: 124794 - RNA, 19 nt, Artificial Sequence
  Description of Artificial Sequence: Synthetic oligonucleotide
aaugcucccucaacaaugc

SEQ ID NO: 124795 - RNA, 19 nt, Artificial Sequence
  Description of Artificial Sequence: Synthetic oligonucleotide
gguaauuauccgcacaagg

SEQ ID NO: 124796 - RNA, 19 nt, Artificial Sequence
  Description of Artificial Sequence: Synthetic oligonucleotide
auacccggcuauuagagag

SEQ ID NO: 124797 - RNA, 19 nt, Artificial Sequence
  Description of Artificial Sequence: Synthetic oligonucleotide
uaaaucgaacuccaccgcc

SEQ ID NO: 124798 - RNA, 19 nt, Artificial Sequence
  Description of Artificial Sequence: Synthetic oligonucleotide
uauuacugaguaaaaccac

SEQ ID NO: 124799 - RNA, 19 nt, Artificial Sequence
  Description of Artificial Sequence: Synthetic oligonucleotide
uuaaguugauuaaaucgaa

SEQ ID NO: 124800 - RNA, 19 nt, Artificial Sequence
  Description of Artificial Sequence: Synthetic oligonucleotide
cuauaagauguguacuugc

SEQ ID NO: 124801 - RNA, 19 nt, Artificial Sequence
  Description of Artificial Sequence: Synthetic oligonucleotide
aagauguguagccucauua

SEQ ID NO: 124802 - RNA, 19 nt, Artificial Sequence
  Description of Artificial Sequence: Synthetic oligonucleotide
gcucuauagaugcagacgg

SEQ ID NO: 124803 - RNA, 19 nt, Artificial Sequence
  Description of Artificial Sequence: Synthetic oligonucleotide
cucgauuacuaucauuugc

SEQ ID NO: 124804 - RNA, 19 nt, Artificial Sequence
  Description of Artificial Sequence: Synthetic oligonucleotide
auuauccgcacaaggaggc

SEQ ID NO: 124805 - RNA, 19 nt, Artificial Sequence
  Description of Artificial Sequence: Synthetic oligonucleotide
uaucugucgagacugccug

SEQ ID NO: 124806 - RNA, 19 nt, Artificial Sequence
  Description of Artificial Sequence: Synthetic oligonucleotide
uuuaaguuuaaagccccag

SEQ ID NO: 124807 - RNA, 19 nt, Artificial Sequence
  Description of Artificial Sequence: Synthetic oligonucleotide
uguggauagagagauucag

SEQ ID NO: 124808 - RNA, 19 nt, Artificial Sequence
  Description of Artificial Sequence: Synthetic oligonucleotide
uucucaaucaccgacccac

SEQ ID NO: 124809 - RNA, 19 nt, Artificial Sequence
  Description of Artificial Sequence: Synthetic oligonucleotide
uccgccugccagaagaagg

SEQ ID NO: 124810 - RNA, 19 nt, Artificial Sequence
  Description of Artificial Sequence: Synthetic oligonucleotide
uaggauuguaagugugugg

SEQ ID NO: 124811 - RNA, 19 nt, Artificial Sequence
  Description of Artificial Sequence: Synthetic oligonucleotide
ugucgagacugccugagug

SEQ ID NO: 124812 - RNA, 19 nt, Artificial Sequence
  Description of Artificial Sequence: Synthetic oligonucleotide
uacugaguaaaaccacugc

SEQ ID NO: 124813 - RNA, 19 nt, Artificial Sequence
  Description of Artificial Sequence: Synthetic oligonucleotide
ggugacaguaaucaacccg

SEQ ID NO: 124814 - RNA, 19 nt, Artificial Sequence
  Description of Artificial Sequence: Synthetic oligonucleotide
guuaguguggauauauggc

SEQ ID NO: 124815 - RNA, 19 nt, Artificial Sequence
  Description of Artificial Sequence: Synthetic oligonucleotide
uuugcuauucgugaccaug

SEQ ID NO: 124816 - RNA, 19 nt, Artificial Sequence
  Description of Artificial Sequence: Synthetic oligonucleotide
ucugccacuaaaaccacaa

SEQ ID NO: 124817 - RNA, 19 nt, Artificial Sequence
  Description of Artificial Sequence: Synthetic oligonucleotide
guauauauauauaacucga

SEQ ID NO: 124818 - RNA, 19 nt, Artificial Sequence
  Description of Artificial Sequence: Synthetic oligonucleotide
aacugcggaggauacccgg

SEQ ID NO: 124819 - RNA, 19 nt, Artificial Sequence
  Description of Artificial Sequence: Synthetic oligonucleotide
uugcuauucgugaccaugc

SEQ ID NO: 124820 - RNA, 19 nt, Artificial Sequence
  Description of Artificial Sequence: Synthetic oligonucleotide
caaguauauauauauaacu

SEQ ID NO: 124821 - RNA, 19 nt, Artificial Sequence
  Description of Artificial Sequence: Synthetic oligonucleotide
uaaucaacccgcucuugag

SEQ ID NO: 124822 - RNA, 19 nt, Artificial Sequence
  Description of Artificial Sequence: Synthetic oligonucleotide
ugucgggucaucccaaaug

SEQ ID NO: 124823 - RNA, 19 nt, Artificial Sequence
  Description of Artificial Sequence: Synthetic oligonucleotide
gagauaaucagcgauauau

SEQ ID NO: 124824 - RNA, 19 nt, Artificial Sequence
  Description of Artificial Sequence: Synthetic oligonucleotide
cugaaugguacacaggcuc

SEQ ID NO: 124825 - RNA, 19 nt, Artificial Sequence
  Description of Artificial Sequence: Synthetic oligonucleotide
auaccuuugcuccgccugc

SEQ ID NO: 124826 - RNA, 19 nt, Artificial Sequence
  Description of Artificial Sequence: Synthetic oligonucleotide
augggcacccuauucuagc

SEQ ID NO: 124827 - RNA, 19 nt, Artificial Sequence
  Description of Artificial Sequence: Synthetic oligonucleotide
uguguagccucauuaaaua

SEQ ID NO: 124828 - RNA, 19 nt, Artificial Sequence
  Description of Artificial Sequence: Synthetic oligonucleotide
auuugcccgacccugauaa

SEQ ID NO: 124829 - RNA, 19 nt, Artificial Sequence
  Description of Artificial Sequence: Synthetic oligonucleotide
uuuuagaaccagucgguuc

SEQ ID NO: 124830 - RNA, 19 nt, Artificial Sequence
  Description of Artificial Sequence: Synthetic oligonucleotide
uuauauucucgauuacuau

SEQ ID NO: 124831 - RNA, 19 nt, Artificial Sequence
  Description of Artificial Sequence: Synthetic oligonucleotide
gaauccagcuucucggggc

SEQ ID NO: 124832 - RNA, 19 nt, Artificial Sequence
  Description of Artificial Sequence: Synthetic oligonucleotide
aggcccagauucuuuauuc

SEQ ID NO: 124833 - RNA, 19 nt, Artificial Sequence
  Description of Artificial Sequence: Synthetic oligonucleotide
caauauuacugaguaaaac

SEQ ID NO: 124834 - RNA, 19 nt, Artificial Sequence
  Description of Artificial Sequence: Synthetic oligonucleotide
auaaucagcgauauauucu

SEQ ID NO: 124835 - RNA, 19 nt, Artificial Sequence
  Description of Artificial Sequence: Synthetic oligonucleotide
ugaaugguacacaggcucu

SEQ ID NO: 124836 - RNA, 19 nt, Artificial Sequence
  Description of Artificial Sequence: Synthetic oligonucleotide
aggauuguaagugugugga

SEQ ID NO: 124837 - RNA, 19 nt, Artificial Sequence
  Description of Artificial Sequence: Synthetic oligonucleotide
uucucggggccgaucaacg

SEQ ID NO: 124838 - RNA, 19 nt, Artificial Sequence
  Description of Artificial Sequence: Synthetic oligonucleotide
ugcgaccccauuuaauuca

SEQ ID NO: 124839 - RNA, 19 nt, Artificial Sequence
  Description of Artificial Sequence: Synthetic oligonucleotide
aacucgaggccguuugaug

SEQ ID NO: 124840 - RNA, 19 nt, Artificial Sequence
  Description of Artificial Sequence: Synthetic oligonucleotide
auuacugacacugguguga

SEQ ID NO: 124841 - RNA, 19 nt, Artificial Sequence
  Description of Artificial Sequence: Synthetic oligonucleotide
ucauucccgacauuacuga

SEQ ID NO: 124842 - RNA, 19 nt, Artificial Sequence
  Description of Artificial Sequence: Synthetic oligonucleotide
caaucaccgacccaccuag

SEQ ID NO: 124843 - RNA, 19 nt, Artificial Sequence
  Description of Artificial Sequence: Synthetic oligonucleotide
ggcaaguauauauauauaa

SEQ ID NO: 124844 - RNA, 19 nt, Artificial Sequence
  Description of Artificial Sequence: Synthetic oligonucleotide
aaugccugacucuugccuu

SEQ ID NO: 124845 - RNA, 19 nt, Artificial Sequence
  Description of Artificial Sequence: Synthetic oligonucleotide
agaugcuuauacucuugag

SEQ ID NO: 124846 - RNA, 19 nt, Artificial Sequence
  Description of Artificial Sequence: Synthetic oligonucleotide
uuggaugcuuauccgcugc

SEQ ID NO: 124847 - RNA, 19 nt, Artificial Sequence
  Description of Artificial Sequence: Synthetic oligonucleotide
acgcguaaaauaaccuucc

SEQ ID NO: 124848 - RNA, 19 nt, Artificial Sequence
  Description of Artificial Sequence: Synthetic oligonucleotide
acucgaggccguuugauga

SEQ ID NO: 124849 - RNA, 19 nt, Artificial Sequence
  Description of Artificial Sequence: Synthetic oligonucleotide
ucugaaugguacacaggcu

SEQ ID NO: 124850 - RNA, 19 nt, Artificial Sequence
  Description of Artificial Sequence: Synthetic oligonucleotide
auaagauguguacuugcaa

SEQ ID NO: 124851 - RNA, 19 nt, Artificial Sequence
  Description of Artificial Sequence: Synthetic oligonucleotide
agguaauaccuuugcuccg

SEQ ID NO: 124852 - RNA, 19 nt, Artificial Sequence
  Description of Artificial Sequence: Synthetic oligonucleotide
acuaucugucgagacugcc

SEQ ID NO: 124853 - RNA, 19 nt, Artificial Sequence
  Description of Artificial Sequence: Synthetic oligonucleotide
ucucgauuacuaucauuug

SEQ ID NO: 124854 - RNA, 19 nt, Artificial Sequence
  Description of Artificial Sequence: Synthetic oligonucleotide
cucggcuucguccacuccg

SEQ ID NO: 124855 - RNA, 19 nt, Artificial Sequence
  Description of Artificial Sequence: Synthetic oligonucleotide
uaaucaggugacaguaauc

SEQ ID NO: 124856 - RNA, 19 nt, Artificial Sequence
  Description of Artificial Sequence: Synthetic oligonucleotide
ugaccagguaauaccuuug

SEQ ID NO: 124857 - RNA, 19 nt, Artificial Sequence
  Description of Artificial Sequence: Synthetic oligonucleotide
ggaacgaugaagcacccac

SEQ ID NO: 124858 - RNA, 19 nt, Artificial Sequence
  Description of Artificial Sequence: Synthetic oligonucleotide
agauguguagccucauuaa

SEQ ID NO: 124859 - RNA, 19 nt, Artificial Sequence
  Description of Artificial Sequence: Synthetic oligonucleotide
gagagacgguaauuauccg

SEQ ID NO: 124860 - RNA, 19 nt, Artificial Sequence
  Description of Artificial Sequence: Synthetic oligonucleotide
gagacgguaauuauccgca

SEQ ID NO: 124861 - RNA, 19 nt, Artificial Sequence
  Description of Artificial Sequence: Synthetic oligonucleotide
gucaagugguuucggaagc

SEQ ID NO: 124862 - RNA, 19 nt, Artificial Sequence
  Description of Artificial Sequence: Synthetic oligonucleotide
gauguguagccucauuaaa

SEQ ID NO: 124863 - RNA, 19 nt, Artificial Sequence
  Description of Artificial Sequence: Synthetic oligonucleotide
cucauugcgcaauggguac

SEQ ID NO: 124864 - RNA, 19 nt, Artificial Sequence
  Description of Artificial Sequence: Synthetic oligonucleotide
uugcgaacaaagaauucuu

SEQ ID NO: 124865 - RNA, 19 nt, Artificial Sequence
  Description of Artificial Sequence: Synthetic oligonucleotide
cugauaugaaaacucugca

SEQ ID NO: 124866 - RNA, 19 nt, Artificial Sequence
  Description of Artificial Sequence: Synthetic oligonucleotide
aaaucgaacuccaccgcca

SEQ ID NO: 124867 - RNA, 19 nt, Artificial Sequence
  Description of Artificial Sequence: Synthetic oligonucleotide
aggcaauuccucugugccg

SEQ ID NO: 124868 - RNA, 19 nt, Artificial Sequence
  Description of Artificial Sequence: Synthetic oligonucleotide
aucugcucguucugggagg

SEQ ID NO: 124869 - RNA, 19 nt, Artificial Sequence
  Description of Artificial Sequence: Synthetic oligonucleotide
aaggcgcuugaauccagcu

SEQ ID NO: 124870 - RNA, 19 nt, Artificial Sequence
  Description of Artificial Sequence: Synthetic oligonucleotide
auuggaugcuuauccgcug

SEQ ID NO: 124871 - RNA, 19 nt, Artificial Sequence
  Description of Artificial Sequence: Synthetic oligonucleotide
ugcgcaauggguaccccac

SEQ ID NO: 124872 - RNA, 19 nt, Artificial Sequence
  Description of Artificial Sequence: Synthetic oligonucleotide
uugaccagguaauaccuuu

SEQ ID NO: 124873 - RNA, 19 nt, Artificial Sequence
  Description of Artificial Sequence: Synthetic oligonucleotide
aaagauguguagccucauu

SEQ ID NO: 124874 - RNA, 19 nt, Artificial Sequence
  Description of Artificial Sequence: Synthetic oligonucleotide
agacgguaauuauccgcac

SEQ ID NO: 124875 - RNA, 19 nt, Artificial Sequence
  Description of Artificial Sequence: Synthetic oligonucleotide
aaggaggcgauuccagcau

SEQ ID NO: 124876 - RNA, 19 nt, Artificial Sequence
  Description of Artificial Sequence: Synthetic oligonucleotide
guaaucaacccgcucuuga

SEQ ID NO: 124877 - RNA, 19 nt, Artificial Sequence
  Description of Artificial Sequence: Synthetic oligonucleotide
aaugggcacccuauucuag

SEQ ID NO: 124878 - RNA, 19 nt, Artificial Sequence
  Description of Artificial Sequence: Synthetic oligonucleotide
ucaaucaccgacccaccua

SEQ ID NO: 124879 - RNA, 19 nt, Artificial Sequence
  Description of Artificial Sequence: Synthetic oligonucleotide
ucugucgagacugccugag

SEQ ID NO: 124880 - RNA, 19 nt, Artificial Sequence
  Description of Artificial Sequence: Synthetic oligonucleotide
gauuguaaguguguggaua

SEQ ID NO: 124881 - RNA, 19 nt, Artificial Sequence
  Description of Artificial Sequence: Synthetic oligonucleotide
aagaaggcgcuugaaucca

SEQ ID NO: 124882 - RNA, 19 nt, Artificial Sequence
  Description of Artificial Sequence: Synthetic oligonucleotide
guggauauauggcucuuca

SEQ ID NO: 124883 - RNA, 19 nt, Artificial Sequence
  Description of Artificial Sequence: Synthetic oligonucleotide
uccaccgccacuguuaaua

SEQ ID NO: 124884 - RNA, 19 nt, Artificial Sequence
  Description of Artificial Sequence: Synthetic oligonucleotide
ggauuggaugcuuauccgc

SEQ ID NO: 124885 - RNA, 19 nt, Artificial Sequence
  Description of Artificial Sequence: Synthetic oligonucleotide
gcaaguauauauauauaac

SEQ ID NO: 124886 - RNA, 19 nt, Artificial Sequence
  Description of Artificial Sequence: Synthetic oligonucleotide
auguguacuugcaagcaug

SEQ ID NO: 124887 - RNA, 19 nt, Artificial Sequence
  Description of Artificial Sequence: Synthetic oligonucleotide
aucgucuguagaugcagga

SEQ ID NO: 124888 - RNA, 19 nt, Artificial Sequence
  Description of Artificial Sequence: Synthetic oligonucleotide
acccggcuauuagagagcc

SEQ ID NO: 124889 - RNA, 19 nt, Artificial Sequence
  Description of Artificial Sequence: Synthetic oligonucleotide
caugcuuaggcuguuaaaa

SEQ ID NO: 124890 - RNA, 19 nt, Artificial Sequence
  Description of Artificial Sequence: Synthetic oligonucleotide
ggaacugcggaggauaccc

SEQ ID NO: 124891 - RNA, 19 nt, Artificial Sequence
  Description of Artificial Sequence: Synthetic oligonucleotide
cucggggccgaucaacgcg

SEQ ID NO: 124892 - RNA, 19 nt, Artificial Sequence
  Description of Artificial Sequence: Synthetic oligonucleotide
agauguguacuugcaagca

SEQ ID NO: 124893 - RNA, 19 nt, Artificial Sequence
  Description of Artificial Sequence: Synthetic oligonucleotide
gggauuggaugcuuauccg

SEQ ID NO: 124894 - RNA, 19 nt, Artificial Sequence
  Description of Artificial Sequence: Synthetic oligonucleotide
gucgagacugccugagugc

SEQ ID NO: 124895 - RNA, 19 nt, Artificial Sequence
  Description of Artificial Sequence: Synthetic oligonucleotide
ugcuuauccgcugcuggag

SEQ ID NO: 124896 - RNA, 19 nt, Artificial Sequence
  Description of Artificial Sequence: Synthetic oligonucleotide
gacgguaauuauccgcaca

SEQ ID NO: 124897 - RNA, 19 nt, Artificial Sequence
  Description of Artificial Sequence: Synthetic oligonucleotide
uggcaaguauauauauaua

SEQ ID NO: 124898 - RNA, 19 nt, Artificial Sequence
  Description of Artificial Sequence: Synthetic oligonucleotide
ucaagugguuucggaagcc

SEQ ID NO: 124899 - RNA, 19 nt, Artificial Sequence
  Description of Artificial Sequence: Synthetic oligonucleotide
ucgagacugccugagugcc

SEQ ID NO: 124900 - RNA, 19 nt, Artificial Sequence
  Description of Artificial Sequence: Synthetic oligonucleotide
aggccguuugaugauguuc

SEQ ID NO: 124901 - RNA, 19 nt, Artificial Sequence
  Description of Artificial Sequence: Synthetic oligonucleotide
ugcuauucgugaccaugcu

SEQ ID NO: 124902 - RNA, 19 nt, Artificial Sequence
  Description of Artificial Sequence: Synthetic oligonucleotide
agcaugagauaaucagcga

SEQ ID NO: 124903 - RNA, 19 nt, Artificial Sequence
  Description of Artificial Sequence: Synthetic oligonucleotide
caccgacccaccuaguuuc

SEQ ID NO: 124904 - RNA, 19 nt, Artificial Sequence
  Description of Artificial Sequence: Synthetic oligonucleotide
gcuaaguacuucucauugc

SEQ ID NO: 124905 - RNA, 19 nt, Artificial Sequence
  Description of Artificial Sequence: Synthetic oligonucleotide
uuauccgcacaaggaggcg

SEQ ID NO: 124906 - RNA, 19 nt, Artificial Sequence
  Description of Artificial Sequence: Synthetic oligonucleotide
gcuucguccacuccgagca

SEQ ID NO: 124907 - RNA, 19 nt, Artificial Sequence
  Description of Artificial Sequence: Synthetic oligonucleotide
uacccggcuauuagagagc

SEQ ID NO: 124908 - RNA, 19 nt, Artificial Sequence
  Description of Artificial Sequence: Synthetic oligonucleotide
gaucaacgcguaaaauaac

SEQ ID NO: 124909 - RNA, 19 nt, Artificial Sequence
  Description of Artificial Sequence: Synthetic oligonucleotide
uaggaacgaugaagcaccc

SEQ ID NO: 124910 - RNA, 19 nt, Artificial Sequence
  Description of Artificial Sequence: Synthetic oligonucleotide
ucaccgacccaccuaguuu

SEQ ID NO: 124911 - RNA, 19 nt, Artificial Sequence
  Description of Artificial Sequence: Synthetic oligonucleotide
gauacccggcuauuagaga

SEQ ID NO: 124912 - RNA, 19 nt, Artificial Sequence
  Description of Artificial Sequence: Synthetic oligonucleotide
uaaugucaaccugaagcuc

SEQ ID NO: 124913 - RNA, 19 nt, Artificial Sequence
  Description of Artificial Sequence: Synthetic oligonucleotide
auguguagccucauuaaau

SEQ ID NO: 124914 - RNA, 19 nt, Artificial Sequence
  Description of Artificial Sequence: Synthetic oligonucleotide
ugagauaaucagcgauaua

SEQ ID NO: 124915 - RNA, 19 nt, Artificial Sequence
  Description of Artificial Sequence: Synthetic oligonucleotide
guaauaccuuugcuccgcc

SEQ ID NO: 124916 - RNA, 19 nt, Artificial Sequence
  Description of Artificial Sequence: Synthetic oligonucleotide
uugcgcaauggguacccca

SEQ ID NO: 124917 - RNA, 19 nt, Artificial Sequence
  Description of Artificial Sequence: Synthetic oligonucleotide
ucauugccgcaagugcuag

SEQ ID NO: 124918 - RNA, 19 nt, Artificial Sequence
  Description of Artificial Sequence: Synthetic oligonucleotide
cccgacauuacugacacug

SEQ ID NO: 124919 - RNA, 19 nt, Artificial Sequence
  Description of Artificial Sequence: Synthetic oligonucleotide
auaacucgaggccguuuga

SEQ ID NO: 124920 - RNA, 19 nt, Artificial Sequence
  Description of Artificial Sequence: Synthetic oligonucleotide
cauugcgcaauggguaccc

SEQ ID NO: 124921 - RNA, 19 nt, Artificial Sequence
  Description of Artificial Sequence: Synthetic oligonucleotide
gguaauaccuuugcuccgc

SEQ ID NO: 124922 - RNA, 19 nt, Artificial Sequence
  Description of Artificial Sequence: Synthetic oligonucleotide
auucucgauuacuaucauu

SEQ ID NO: 124923 - RNA, 19 nt, Artificial Sequence
  Description of Artificial Sequence: Synthetic oligonucleotide
augcuuauccgcugcugga

SEQ ID NO: 124924 - RNA, 19 nt, Artificial Sequence
  Description of Artificial Sequence: Synthetic oligonucleotide
gauuggaugcuuauccgcu

SEQ ID NO: 124925 - RNA, 19 nt, Artificial Sequence
  Description of Artificial Sequence: Synthetic oligonucleotide
aggaacugcggaggauacc

SEQ ID NO: 124926 - RNA, 19 nt, Artificial Sequence
  Description of Artificial Sequence: Synthetic oligonucleotide
acaguccuuuaaaggaguc

SEQ ID NO: 124927 - RNA, 19 nt, Artificial Sequence
  Description of Artificial Sequence: Synthetic oligonucleotide
gacuugggaucaacuagug

SEQ ID NO: 124928 - RNA, 19 nt, Artificial Sequence
  Description of Artificial Sequence: Synthetic oligonucleotide
ucggggccgaucaacgcgu

SEQ ID NO: 124929 - RNA, 19 nt, Artificial Sequence
  Description of Artificial Sequence: Synthetic oligonucleotide
ucauugcgcaauggguacc

SEQ ID NO: 124930 - RNA, 19 nt, Artificial Sequence
  Description of Artificial Sequence: Synthetic oligonucleotide
cuauacacguaaccagcca

SEQ ID NO: 124931 - RNA, 19 nt, Artificial Sequence
  Description of Artificial Sequence: Synthetic oligonucleotide
uuacugacacuggugugaa

SEQ ID NO: 124932 - RNA, 19 nt, Artificial Sequence
  Description of Artificial Sequence: Synthetic oligonucleotide
aguaaucaacccgcucuug

SEQ ID NO: 124933 - RNA, 19 nt, Artificial Sequence
  Description of Artificial Sequence: Synthetic oligonucleotide
gggaucaacuagugucugg

SEQ ID NO: 124934 - RNA, 19 nt, Artificial Sequence
  Description of Artificial Sequence: Synthetic oligonucleotide
cuacaugaggccuguggga

SEQ ID NO: 124935 - RNA, 19 nt, Artificial Sequence
  Description of Artificial Sequence: Synthetic oligonucleotide
ggggauuggacuugggauc

SEQ ID NO: 124936 - RNA, 19 nt, Artificial Sequence
  Description of Artificial Sequence: Synthetic oligonucleotide
gaacugcggaggauacccg

SEQ ID NO: 124937 - RNA, 19 nt, Artificial Sequence
  Description of Artificial Sequence: Synthetic oligonucleotide
aaagcaaugcugggagguu

SEQ ID NO: 124938 - RNA, 19 nt, Artificial Sequence
  Description of Artificial Sequence: Synthetic oligonucleotide
agauaaucagcgauauauu

SEQ ID NO: 124939 - RNA, 19 nt, Artificial Sequence
  Description of Artificial Sequence: Synthetic oligonucleotide
gcuauucgugaccaugcug

SEQ ID NO: 124940 - RNA, 19 nt, Artificial Sequence
  Description of Artificial Sequence: Synthetic oligonucleotide
auugcgcaauggguacccc

SEQ ID NO: 124941 - RNA, 19 nt, Artificial Sequence
  Description of Artificial Sequence: Synthetic oligonucleotide
auugccgcaagugcuaguu

SEQ ID NO: 124942 - RNA, 19 nt, Artificial Sequence
  Description of Artificial Sequence: Synthetic oligonucleotide
ugggaucaacuagugucug

SEQ ID NO: 124943 - RNA, 19 nt, Artificial Sequence
  Description of Artificial Sequence: Synthetic oligonucleotide
uggcacuacuuccccacuc

SEQ ID NO: 124944 - RNA, 19 nt, Artificial Sequence
  Description of Artificial Sequence: Synthetic oligonucleotide
ucucggggccgaucaacgc

SEQ ID NO: 124945 - RNA, 19 nt, Artificial Sequence
  Description of Artificial Sequence: Synthetic oligonucleotide
ccggcuauuagagagccag

SEQ ID NO: 124946 - RNA, 19 nt, Artificial Sequence
  Description of Artificial Sequence: Synthetic oligonucleotide
acucggcuucguccacucc

SEQ ID NO: 124947 - RNA, 19 nt, Artificial Sequence
  Description of Artificial Sequence: Synthetic oligonucleotide
ucacgacucuucuccauuu

SEQ ID NO: 124948 - RNA, 19 nt, Artificial Sequence
  Description of Artificial Sequence: Synthetic oligonucleotide
gagucauucccgacauuac

SEQ ID NO: 124949 - RNA, 19 nt, Artificial Sequence
  Description of Artificial Sequence: Synthetic oligonucleotide
ucgucuguagaugcaggaa

SEQ ID NO: 124950 - RNA, 19 nt, Artificial Sequence
  Description of Artificial Sequence: Synthetic oligonucleotide
aggaggcgauuccagcaug

SEQ ID NO: 124951 - RNA, 19 nt, Artificial Sequence
  Description of Artificial Sequence: Synthetic oligonucleotide
gauguguacuugcaagcau

SEQ ID NO: 124952 - RNA, 19 nt, Artificial Sequence
  Description of Artificial Sequence: Synthetic oligonucleotide
aggcuaaguacuucucauu

SEQ ID NO: 124953 - RNA, 19 nt, Artificial Sequence
  Description of Artificial Sequence: Synthetic oligonucleotide
aucaccgacccaccuaguu

SEQ ID NO: 124954 - RNA, 19 nt, Artificial Sequence
  Description of Artificial Sequence: Synthetic oligonucleotide
cuucuaaguuuaucuagcu

SEQ ID NO: 124955 - RNA, 19 nt, Artificial Sequence
  Description of Artificial Sequence: Synthetic oligonucleotide
ccacaaagauauauccgac

SEQ ID NO: 124956 - RNA, 19 nt, Artificial Sequence
  Description of Artificial Sequence: Synthetic oligonucleotide
uucguccacuccgagcaga

SEQ ID NO: 124957 - RNA, 19 nt, Artificial Sequence
  Description of Artificial Sequence: Synthetic oligonucleotide
gcucccacuacaugaggcc

SEQ ID NO: 124958 - RNA, 19 nt, Artificial Sequence
  Description of Artificial Sequence: Synthetic oligonucleotide
aacccgcucuugagaauuc

SEQ ID NO: 124959 - RNA, 19 nt, Artificial Sequence
  Description of Artificial Sequence: Synthetic oligonucleotide
gggagcauauauccuuuac

SEQ ID NO: 124960 - RNA, 19 nt, Artificial Sequence
  Description of Artificial Sequence: Synthetic oligonucleotide
cagaauacuguguggggua

SEQ ID NO: 124961 - RNA, 19 nt, Artificial Sequence
  Description of Artificial Sequence: Synthetic oligonucleotide
caccucauugccgcaagug

SEQ ID NO: 124962 - RNA, 19 nt, Artificial Sequence
  Description of Artificial Sequence: Synthetic oligonucleotide
uauucgugaccaugcuguu

SEQ ID NO: 124963 - RNA, 19 nt, Artificial Sequence
  Description of Artificial Sequence: Synthetic oligonucleotide
ucgggucaucccaaaugau

SEQ ID NO: 124964 - RNA, 19 nt, Artificial Sequence
  Description of Artificial Sequence: Synthetic oligonucleotide
ccagccacuaaaugcuccc

SEQ ID NO: 124965 - RNA, 19 nt, Artificial Sequence
  Description of Artificial Sequence: Synthetic oligonucleotide
uauauaacucgaggccguu

SEQ ID NO: 124966 - RNA, 19 nt, Artificial Sequence
  Description of Artificial Sequence: Synthetic oligonucleotide
ccaaggaaucucucucugc

SEQ ID NO: 124967 - RNA, 19 nt, Artificial Sequence
  Description of Artificial Sequence: Synthetic oligonucleotide
uacugacacuggugugaag

SEQ ID NO: 124968 - RNA, 19 nt, Artificial Sequence
  Description of Artificial Sequence: Synthetic oligonucleotide
cugguaguuaguguggaua

SEQ ID NO: 124969 - RNA, 19 nt, Artificial Sequence
  Description of Artificial Sequence: Synthetic oligonucleotide
ugcugucgggucaucccaa

SEQ ID NO: 124970 - RNA, 19 nt, Artificial Sequence
  Description of Artificial Sequence: Synthetic oligonucleotide
cuucucggggccgaucaac

SEQ ID NO: 124971 - RNA, 19 nt, Artificial Sequence
  Description of Artificial Sequence: Synthetic oligonucleotide
ugguuucggaagccucuuc

SEQ ID NO: 124972 - RNA, 19 nt, Artificial Sequence
  Description of Artificial Sequence: Synthetic oligonucleotide
cgaucaacgcguaaaauaa

SEQ ID NO: 124973 - RNA, 19 nt, Artificial Sequence
  Description of Artificial Sequence: Synthetic oligonucleotide
agcuaggccacugcaaguu

SEQ ID NO: 124974 - RNA, 19 nt, Artificial Sequence
  Description of Artificial Sequence: Synthetic oligonucleotide
cuaucugucgagacugccu

SEQ ID NO: 124975 - RNA, 19 nt, Artificial Sequence
  Description of Artificial Sequence: Synthetic oligonucleotide
gacucggcuucguccacuc

SEQ ID NO: 124976 - RNA, 19 nt, Artificial Sequence
  Description of Artificial Sequence: Synthetic oligonucleotide
aucugucgagacugccuga

SEQ ID NO: 124977 - RNA, 19 nt, Artificial Sequence
  Description of Artificial Sequence: Synthetic oligonucleotide
ggauuugcgaacaaagaau

SEQ ID NO: 124978 - RNA, 19 nt, Artificial Sequence
  Description of Artificial Sequence: Synthetic oligonucleotide
cagaaacaauaugcacccc

SEQ ID NO: 124979 - RNA, 19 nt, Artificial Sequence
  Description of Artificial Sequence: Synthetic oligonucleotide
acccgagcagcggaaccac

SEQ ID NO: 124980 - RNA, 19 nt, Artificial Sequence
  Description of Artificial Sequence: Synthetic oligonucleotide
auggcacuacuuccccacu

SEQ ID NO: 124981 - RNA, 19 nt, Artificial Sequence
  Description of Artificial Sequence: Synthetic oligonucleotide
ugcggaggauacccggcua

SEQ ID NO: 124982 - RNA, 19 nt, Artificial Sequence
  Description of Artificial Sequence: Synthetic oligonucleotide
cacaaucuuuccagcaugu

SEQ ID NO: 124983 - RNA, 19 nt, Artificial Sequence
  Description of Artificial Sequence: Synthetic oligonucleotide
ggcacuacuuccccacuca

SEQ ID NO: 124984 - RNA, 19 nt, Artificial Sequence
  Description of Artificial Sequence: Synthetic oligonucleotide
gcaugagauaaucagcgau

SEQ ID NO: 124985 - RNA, 19 nt, Artificial Sequence
  Description of Artificial Sequence: Synthetic oligonucleotide
gucgguucuuucacuauaa

SEQ ID NO: 124986 - RNA, 19 nt, Artificial Sequence
  Description of Artificial Sequence: Synthetic oligonucleotide
ccgaucaacgcguaaaaua

SEQ ID NO: 124987 - RNA, 19 nt, Artificial Sequence
  Description of Artificial Sequence: Synthetic oligonucleotide
uuauccgcugcuggaguuu

SEQ ID NO: 124988 - RNA, 19 nt, Artificial Sequence
  Description of Artificial Sequence: Synthetic oligonucleotide
auauaacucgaggccguuu

SEQ ID NO: 124989 - RNA, 19 nt, Artificial Sequence
  Description of Artificial Sequence: Synthetic oligonucleotide
augccugacucuugccuuu

SEQ ID NO: 124990 - RNA, 19 nt, Artificial Sequence
  Description of Artificial Sequence: Synthetic oligonucleotide
guacuugcaagcaugccuu

SEQ ID NO: 124991 - RNA, 19 nt, Artificial Sequence
  Description of Artificial Sequence: Synthetic oligonucleotide
agggagcauauauccuuua

SEQ ID NO: 124992 - RNA, 19 nt, Artificial Sequence
  Description of Artificial Sequence: Synthetic oligonucleotide
acacguaaccagccaugua

SEQ ID NO: 124993 - RNA, 19 nt, Artificial Sequence
  Description of Artificial Sequence: Synthetic oligonucleotide
gggcacccuauucuagcag

SEQ ID NO: 124994 - RNA, 19 nt, Artificial Sequence
  Description of Artificial Sequence: Synthetic oligonucleotide
gggauuggacuugggauca

SEQ ID NO: 124995 - RNA, 19 nt, Artificial Sequence
  Description of Artificial Sequence: Synthetic oligonucleotide
gagccaugaaauagugacu

SEQ ID NO: 124996 - RNA, 19 nt, Artificial Sequence
  Description of Artificial Sequence: Synthetic oligonucleotide
agaugacaucuggaauaca

SEQ ID NO: 124997 - RNA, 19 nt, Artificial Sequence
  Description of Artificial Sequence: Synthetic oligonucleotide
uugccgcaagugcuaguuu

SEQ ID NO: 124998 - RNA, 19 nt, Artificial Sequence
  Description of Artificial Sequence: Synthetic oligonucleotide
auucgugaccaugcuguuu

SEQ ID NO: 124999 - RNA, 19 nt, Artificial Sequence
  Description of Artificial Sequence: Synthetic oligonucleotide
acguaaccagccauguauu

SEQ ID NO: 125000 - RNA, 19 nt, Artificial Sequence
  Description of Artificial Sequence: Synthetic oligonucleotide
cgggucaucccaaaugauc

SEQ ID NO: 125001 - RNA, 19 nt, Artificial Sequence
  Description of Artificial Sequence: Synthetic oligonucleotide
aggaacgaugaagcaccca

SEQ ID NO: 125002 - RNA, 19 nt, Artificial Sequence
  Description of Artificial Sequence: Synthetic oligonucleotide
aaucaccgacccaccuagu

SEQ ID NO: 125003 - RNA, 19 nt, Artificial Sequence
  Description of Artificial Sequence: Synthetic oligonucleotide
gcaccccucuuucuuuugc

SEQ ID NO: 125004 - RNA, 19 nt, Artificial Sequence
  Description of Artificial Sequence: Synthetic oligonucleotide
uuagaaccagucgguucuu

SEQ ID NO: 125005 - RNA, 19 nt, Artificial Sequence
  Description of Artificial Sequence: Synthetic oligonucleotide
aggaaauaacacaguccuu

SEQ ID NO: 125006 - RNA, 19 nt, Artificial Sequence
  Description of Artificial Sequence: Synthetic oligonucleotide
cagcgauauauucuguuuu

SEQ ID NO: 125007 - RNA, 19 nt, Artificial Sequence
  Description of Artificial Sequence: Synthetic oligonucleotide
cccgcucuugagaauucag

SEQ ID NO: 125008 - RNA, 19 nt, Artificial Sequence
  Description of Artificial Sequence: Synthetic oligonucleotide
accccacaaccaugugugu

SEQ ID NO: 125009 - RNA, 19 nt, Artificial Sequence
  Description of Artificial Sequence: Synthetic oligonucleotide
ggcacccuauucuagcagu

SEQ ID NO: 125010 - RNA, 19 nt, Artificial Sequence
  Description of Artificial Sequence: Synthetic oligonucleotide
gguagcuaggccacugcaa

SEQ ID NO: 125011 - RNA, 19 nt, Artificial Sequence
  Description of Artificial Sequence: Synthetic oligonucleotide
ccgacccugauaaaugaaa

SEQ ID NO: 125012 - RNA, 19 nt, Artificial Sequence
  Description of Artificial Sequence: Synthetic oligonucleotide
cucaaucaccgacccaccu

SEQ ID NO: 125013 - RNA, 19 nt, Artificial Sequence
  Description of Artificial Sequence: Synthetic oligonucleotide
aggcugcgaccccauuuaa

SEQ ID NO: 125014 - RNA, 19 nt, Artificial Sequence
  Description of Artificial Sequence: Synthetic oligonucleotide
ucccgacauuacugacacu

SEQ ID NO: 125015 - RNA, 19 nt, Artificial Sequence
  Description of Artificial Sequence: Synthetic oligonucleotide
cuuauccgcugcuggaguu

SEQ ID NO: 125016 - RNA, 19 nt, Artificial Sequence
  Description of Artificial Sequence: Synthetic oligonucleotide
ggaggcgauuccagcauga

SEQ ID NO: 125017 - RNA, 19 nt, Artificial Sequence
  Description of Artificial Sequence: Synthetic oligonucleotide
ccucauugccgcaagugcu

SEQ ID NO: 125018 - RNA, 19 nt, Artificial Sequence
  Description of Artificial Sequence: Synthetic oligonucleotide
ggcccagauucuuuauucu

SEQ ID NO: 125019 - RNA, 19 nt, Artificial Sequence
  Description of Artificial Sequence: Synthetic oligonucleotide
gggccgaucaacgcguaaa

SEQ ID NO: 125020 - RNA, 19 nt, Artificial Sequence
  Description of Artificial Sequence: Synthetic oligonucleotide
ggauuguaaguguguggau

SEQ ID NO: 125021 - RNA, 19 nt, Artificial Sequence
  Description of Artificial Sequence: Synthetic oligonucleotide
gguaguuaguguggauaua

SEQ ID NO: 125022 - RNA, 19 nt, Artificial Sequence
  Description of Artificial Sequence: Synthetic oligonucleotide
gcuuauccgcugcuggagu

SEQ ID NO: 125023 - RNA, 19 nt, Artificial Sequence
  Description of Artificial Sequence: Synthetic oligonucleotide
ggaggauacccggcuauua

SEQ ID NO: 125024 - RNA, 19 nt, Artificial Sequence
  Description of Artificial Sequence: Synthetic oligonucleotide
ccaugcuuaggcuguuaaa

SEQ ID NO: 125025 - RNA, 19 nt, Artificial Sequence
  Description of Artificial Sequence: Synthetic oligonucleotide
cucgaggccguuugaugau

SEQ ID NO: 125026 - RNA, 19 nt, Artificial Sequence
  Description of Artificial Sequence: Synthetic oligonucleotide
cggcuauuagagagccagc

SEQ ID NO: 125027 - RNA, 19 nt, Artificial Sequence
  Description of Artificial Sequence: Synthetic oligonucleotide
uccgcacaaggaggcgauu

SEQ ID NO: 125028 - RNA, 19 nt, Artificial Sequence
  Description of Artificial Sequence: Synthetic oligonucleotide
cauugccgcaagugcuagu

SEQ ID NO: 125029 - RNA, 19 nt, Artificial Sequence
  Description of Artificial Sequence: Synthetic oligonucleotide
caguuggcugguaguuagu

SEQ ID NO: 125030 - RNA, 19 nt, Artificial Sequence
  Description of Artificial Sequence: Synthetic oligonucleotide
ccgcaagugcuaguuucug

SEQ ID NO: 125031 - RNA, 19 nt, Artificial Sequence
  Description of Artificial Sequence: Synthetic oligonucleotide
cagacggcuuuagcuucca

SEQ ID NO: 125032 - RNA, 19 nt, Artificial Sequence
  Description of Artificial Sequence: Synthetic oligonucleotide
cugucgagacugccugagu

SEQ ID NO: 125033 - RNA, 19 nt, Artificial Sequence
  Description of Artificial Sequence: Synthetic oligonucleotide
cacgacucuucuccauuuu

SEQ ID NO: 125034 - RNA, 19 nt, Artificial Sequence
  Description of Artificial Sequence: Synthetic oligonucleotide
ggccugugggaugauuugu

SEQ ID NO: 125035 - RNA, 19 nt, Artificial Sequence
  Description of Artificial Sequence: Synthetic oligonucleotide
gccgcaagugcuaguuucu

SEQ ID NO: 125036 - RNA, 19 nt, Artificial Sequence
  Description of Artificial Sequence: Synthetic oligonucleotide
gcuucucggggccgaucaa

SEQ ID NO: 125037 - RNA, 19 nt, Artificial Sequence
  Description of Artificial Sequence: Synthetic oligonucleotide
cgacccaccuaguuucuua

SEQ ID NO: 125038 - RNA, 19 nt, Artificial Sequence
  Description of Artificial Sequence: Synthetic oligonucleotide
gccgaucaacgcguaaaau

SEQ ID NO: 125039 - RNA, 19 nt, Artificial Sequence
  Description of Artificial Sequence: Synthetic oligonucleotide
ggauuggacuugggaucaa

SEQ ID NO: 125040 - RNA, 19 nt, Artificial Sequence
  Description of Artificial Sequence: Synthetic oligonucleotide
ggcugcgaccccauuuaau

SEQ ID NO: 125041 - RNA, 19 nt, Artificial Sequence
  Description of Artificial Sequence: Synthetic oligonucleotide
ggacucggcuucguccacu

SEQ ID NO: 125042 - RNA, 19 nt, Artificial Sequence
  Description of Artificial Sequence: Synthetic oligonucleotide
cccgagcagcggaaccaca

SEQ ID NO: 125043 - RNA, 19 nt, Artificial Sequence
  Description of Artificial Sequence: Synthetic oligonucleotide
gcgcuugaauccagcuucu

SEQ ID NO: 125044 - RNA, 19 nt, Artificial Sequence
  Description of Artificial Sequence: Synthetic oligonucleotide
gcacccuauucuagcaguu

SEQ ID NO: 125045 - RNA, 19 nt, Artificial Sequence
  Description of Artificial Sequence: Synthetic oligonucleotide
cccauucaauagugcugau

SEQ ID NO: 125046 - RNA, 19 nt, Artificial Sequence
  Description of Artificial Sequence: Synthetic oligonucleotide
cgaccccauuuaauucacu

SEQ ID NO: 125047 - RNA, 19 nt, Artificial Sequence
  Description of Artificial Sequence: Synthetic oligonucleotide
cggggccgaucaacgcgua

SEQ ID NO: 125048 - RNA, 19 nt, Artificial Sequence
  Description of Artificial Sequence: Synthetic oligonucleotide
cggaggauacccggcuauu

SEQ ID NO: 125049 - RNA, 19 nt, Artificial Sequence
  Description of Artificial Sequence: Synthetic oligonucleotide
ugaccaaugagccaaauca

SEQ ID NO: 125050 - RNA, 19 nt, Artificial Sequence
  Description of Artificial Sequence: Synthetic oligonucleotide
aaguaaugcaaaguaaggc

SEQ ID NO: 125051 - RNA, 19 nt, Artificial Sequence
  Description of Artificial Sequence: Synthetic oligonucleotide
aaggcaaccaaauuuaacu

SEQ ID NO: 125052 - RNA, 19 nt, Artificial Sequence
  Description of Artificial Sequence: Synthetic oligonucleotide
aaauuuaacuaauucgggu

SEQ ID NO: 125053 - RNA, 19 nt, Artificial Sequence
  Description of Artificial Sequence: Synthetic oligonucleotide
aaagauauagccauugaug

SEQ ID NO: 125054 - RNA, 19 nt, Artificial Sequence
  Description of Artificial Sequence: Synthetic oligonucleotide
aauaacaccucugaaaaca

SEQ ID NO: 125055 - RNA, 19 nt, Artificial Sequence
  Description of Artificial Sequence: Synthetic oligonucleotide
agauaagacauuuccaauc

SEQ ID NO: 125056 - RNA, 19 nt, Artificial Sequence
  Description of Artificial Sequence: Synthetic oligonucleotide
aaggcgucaauucucuccc

SEQ ID NO: 125057 - RNA, 19 nt, Artificial Sequence
  Description of Artificial Sequence: Synthetic oligonucleotide
aauaauacuucagugcaag

SEQ ID NO: 125058 - RNA, 19 nt, Artificial Sequence
  Description of Artificial Sequence: Synthetic oligonucleotide
agugguuucccacaguuac

SEQ ID NO: 125059 - RNA, 19 nt, Artificial Sequence
  Description of Artificial Sequence: Synthetic oligonucleotide
aaggacgugcaaaacaugc

SEQ ID NO: 125060 - RNA, 19 nt, Artificial Sequence
  Description of Artificial Sequence: Synthetic oligonucleotide
acuaaccauaacucaaggc

SEQ ID NO: 125061 - RNA, 19 nt, Artificial Sequence
  Description of Artificial Sequence: Synthetic oligonucleotide
ugagacaucaacauacagu

SEQ ID NO: 125062 - RNA, 19 nt, Artificial Sequence
  Description of Artificial Sequence: Synthetic oligonucleotide
ucuuauuaagaagugaaga

SEQ ID NO: 125063 - RNA, 19 nt, Artificial Sequence
  Description of Artificial Sequence: Synthetic oligonucleotide
caaauuuaacuaauucggg

SEQ ID NO: 125064 - RNA, 19 nt, Artificial Sequence
  Description of Artificial Sequence: Synthetic oligonucleotide
guagcaaaggaacagggcc

SEQ ID NO: 125065 - RNA, 19 nt, Artificial Sequence
  Description of Artificial Sequence: Synthetic oligonucleotide
uacuccgaaacuuaguuca

SEQ ID NO: 125066 - RNA, 19 nt, Artificial Sequence
  Description of Artificial Sequence: Synthetic oligonucleotide
uuaaaucagaaggggaugg

SEQ ID NO: 125067 - RNA, 19 nt, Artificial Sequence
  Description of Artificial Sequence: Synthetic oligonucleotide
uacgaagcaauucuggugu

SEQ ID NO: 125068 - RNA, 19 nt, Artificial Sequence
  Description of Artificial Sequence: Synthetic oligonucleotide
ucaacgaguuucuuaacag

SEQ ID NO: 125069 - RNA, 19 nt, Artificial Sequence
  Description of Artificial Sequence: Synthetic oligonucleotide
acguuauguauccuuagac

SEQ ID NO: 125070 - RNA, 19 nt, Artificial Sequence
  Description of Artificial Sequence: Synthetic oligonucleotide
uccauaagagacuggaacc

SEQ ID NO: 125071 - RNA, 19 nt, Artificial Sequence
  Description of Artificial Sequence: Synthetic oligonucleotide
uguauuuccaagagucucc

SEQ ID NO: 125072 - RNA, 19 nt, Artificial Sequence
  Description of Artificial Sequence: Synthetic oligonucleotide
aacuaauucggguugcaga

SEQ ID NO: 125073 - RNA, 19 nt, Artificial Sequence
  Description of Artificial Sequence: Synthetic oligonucleotide
caaguaaugcaaaguaagg

SEQ ID NO: 125074 - RNA, 19 nt, Artificial Sequence
  Description of Artificial Sequence: Synthetic oligonucleotide
uguaguaagacucgaccca

SEQ ID NO: 125075 - RNA, 19 nt, Artificial Sequence
  Description of Artificial Sequence: Synthetic oligonucleotide
acucgaucaacccacaucu

SEQ ID NO: 125076 - RNA, 19 nt, Artificial Sequence
  Description of Artificial Sequence: Synthetic oligonucleotide
ugaggaauaguuuucugac

SEQ ID NO: 125077 - RNA, 19 nt, Artificial Sequence
  Description of Artificial Sequence: Synthetic oligonucleotide
auugguuggaccuuguaga

SEQ ID NO: 125078 - RNA, 19 nt, Artificial Sequence
  Description of Artificial Sequence: Synthetic oligonucleotide
gauaacacuauuaucagaa

SEQ ID NO: 125079 - RNA, 19 nt, Artificial Sequence
  Description of Artificial Sequence: Synthetic oligonucleotide
auuuaacuaauucggguug

SEQ ID NO: 125080 - RNA, 19 nt, Artificial Sequence
  Description of Artificial Sequence: Synthetic oligonucleotide
agacuaguuaugucagugc

SEQ ID NO: 125081 - RNA, 19 nt, Artificial Sequence
  Description of Artificial Sequence: Synthetic oligonucleotide
acaguuacauacugucccc

SEQ ID NO: 125082 - RNA, 19 nt, Artificial Sequence
  Description of Artificial Sequence: Synthetic oligonucleotide
aaaugcaccucuaguaaac

SEQ ID NO: 125083 - RNA, 19 nt, Artificial Sequence
  Description of Artificial Sequence: Synthetic oligonucleotide
acauuaugggcuucauagc

SEQ ID NO: 125084 - RNA, 19 nt, Artificial Sequence
  Description of Artificial Sequence: Synthetic oligonucleotide
uuauuaagaagugaagaaa

SEQ ID NO: 125085 - RNA, 19 nt, Artificial Sequence
  Description of Artificial Sequence: Synthetic oligonucleotide
aaacguuauguauccuuag

SEQ ID NO: 125086 - RNA, 19 nt, Artificial Sequence
  Description of Artificial Sequence: Synthetic oligonucleotide
ucuuaacaggaaacaaugc

SEQ ID NO: 125087 - RNA, 19 nt, Artificial Sequence
  Description of Artificial Sequence: Synthetic oligonucleotide
cauacggcagaauugguug

SEQ ID NO: 125088 - RNA, 19 nt, Artificial Sequence
  Description of Artificial Sequence: Synthetic oligonucleotide
uggguaaauacugagcagc

SEQ ID NO: 125089 - RNA, 19 nt, Artificial Sequence
  Description of Artificial Sequence: Synthetic oligonucleotide
aauauacgaagcaauucug

SEQ ID NO: 125090 - RNA, 19 nt, Artificial Sequence
  Description of Artificial Sequence: Synthetic oligonucleotide
cuaguuaugucagugcuag

SEQ ID NO: 125091 - RNA, 19 nt, Artificial Sequence
  Description of Artificial Sequence: Synthetic oligonucleotide
cacguuuagugcaacagag

SEQ ID NO: 125092 - RNA, 19 nt, Artificial Sequence
  Description of Artificial Sequence: Synthetic oligonucleotide
uuguaagauacucugggua

SEQ ID NO: 125093 - RNA, 19 nt, Artificial Sequence
  Description of Artificial Sequence: Synthetic oligonucleotide
uauacgaagcaauucuggu

SEQ ID NO: 125094 - RNA, 19 nt, Artificial Sequence
  Description of Artificial Sequence: Synthetic oligonucleotide
aaucaacgaguuucuuaac

SEQ ID NO: 125095 - RNA, 19 nt, Artificial Sequence
  Description of Artificial Sequence: Synthetic oligonucleotide
cagaauagcacaucgcaac

SEQ ID NO: 125096 - RNA, 19 nt, Artificial Sequence
  Description of Artificial Sequence: Synthetic oligonucleotide
ugcuccuaaucccugaaca

SEQ ID NO: 125097 - RNA, 19 nt, Artificial Sequence
  Description of Artificial Sequence: Synthetic oligonucleotide
guaaguccuuguuucaggg

SEQ ID NO: 125098 - RNA, 19 nt, Artificial Sequence
  Description of Artificial Sequence: Synthetic oligonucleotide
aacguuauguauccuuaga

SEQ ID NO: 125099 - RNA, 19 nt, Artificial Sequence
  Description of Artificial Sequence: Synthetic oligonucleotide
uuaugucagugcuagugcc

SEQ ID NO: 125100 - RNA, 19 nt, Artificial Sequence
  Description of Artificial Sequence: Synthetic oligonucleotide
cuuaguucaagaaguggug

SEQ ID NO: 125101 - RNA, 19 nt, Artificial Sequence
  Description of Artificial Sequence: Synthetic oligonucleotide
agugcacaaacuuaauagu

SEQ ID NO: 125102 - RNA, 19 nt, Artificial Sequence
  Description of Artificial Sequence: Synthetic oligonucleotide
uccuauauccagaaggcua

SEQ ID NO: 125103 - RNA, 19 nt, Artificial Sequence
  Description of Artificial Sequence: Synthetic oligonucleotide
agacucgacccauaacagc

SEQ ID NO: 125104 - RNA, 19 nt, Artificial Sequence
  Description of Artificial Sequence: Synthetic oligonucleotide
acaauguaugcacuacaag

SEQ ID NO: 125105 - RNA, 19 nt, Artificial Sequence
  Description of Artificial Sequence: Synthetic oligonucleotide
auacgaagcaauucuggug

SEQ ID NO: 125106 - RNA, 19 nt, Artificial Sequence
  Description of Artificial Sequence: Synthetic oligonucleotide
acuaauucggguugcagaa

SEQ ID NO: 125107 - RNA, 19 nt, Artificial Sequence
  Description of Artificial Sequence: Synthetic oligonucleotide
cauugguuggaccuuguag

SEQ ID NO: 125108 - RNA, 19 nt, Artificial Sequence
  Description of Artificial Sequence: Synthetic oligonucleotide
accucugaaaacauacggc

SEQ ID NO: 125109 - RNA, 19 nt, Artificial Sequence
  Description of Artificial Sequence: Synthetic oligonucleotide
ugagccaaaucacccugcg

SEQ ID NO: 125110 - RNA, 19 nt, Artificial Sequence
  Description of Artificial Sequence: Synthetic oligonucleotide
acuauuaucagaaggcaga

SEQ ID NO: 125111 - RNA, 19 nt, Artificial Sequence
  Description of Artificial Sequence: Synthetic oligonucleotide
uuaucuuggauaacacuau

SEQ ID NO: 125112 - RNA, 19 nt, Artificial Sequence
  Description of Artificial Sequence: Synthetic oligonucleotide
aaaagcagcuaaucccaca

SEQ ID NO: 125113 - RNA, 19 nt, Artificial Sequence
  Description of Artificial Sequence: Synthetic oligonucleotide
ugagauggguaaauacuga

SEQ ID NO: 125114 - RNA, 19 nt, Artificial Sequence
  Description of Artificial Sequence: Synthetic oligonucleotide
ugguucuuaaaccacugau

SEQ ID NO: 125115 - RNA, 19 nt, Artificial Sequence
  Description of Artificial Sequence: Synthetic oligonucleotide
caacgaguuucuuaacagg

SEQ ID NO: 125116 - RNA, 19 nt, Artificial Sequence
  Description of Artificial Sequence: Synthetic oligonucleotide
cauauggucguaucuguac

SEQ ID NO: 125117 - RNA, 19 nt, Artificial Sequence
  Description of Artificial Sequence: Synthetic oligonucleotide
uauucguggaauauaucua

SEQ ID NO: 125118 - RNA, 19 nt, Artificial Sequence
  Description of Artificial Sequence: Synthetic oligonucleotide
uguccccagauuucuauag

SEQ ID NO: 125119 - RNA, 19 nt, Artificial Sequence
  Description of Artificial Sequence: Synthetic oligonucleotide
uccgaaacuuaguucaaga

SEQ ID NO: 125120 - RNA, 19 nt, Artificial Sequence
  Description of Artificial Sequence: Synthetic oligonucleotide
auaacacuauuaucagaag

SEQ ID NO: 125121 - RNA, 19 nt, Artificial Sequence
  Description of Artificial Sequence: Synthetic oligonucleotide
uaauucggguugcagaaaa

SEQ ID NO: 125122 - RNA, 19 nt, Artificial Sequence
  Description of Artificial Sequence: Synthetic oligonucleotide
ugucagaauagcacaucgc

SEQ ID NO: 125123 - RNA, 19 nt, Artificial Sequence
  Description of Artificial Sequence: Synthetic oligonucleotide
acagauugcuucauacagc

SEQ ID NO: 125124 - RNA, 19 nt, Artificial Sequence
  Description of Artificial Sequence: Synthetic oligonucleotide
ucaauucggaccacuaaau

SEQ ID NO: 125125 - RNA, 19 nt, Artificial Sequence
  Description of Artificial Sequence: Synthetic oligonucleotide
uauguauccuuagacauua

SEQ ID NO: 125126 - RNA, 19 nt, Artificial Sequence
  Description of Artificial Sequence: Synthetic oligonucleotide
ugagacuuacuccgaaacu

SEQ ID NO: 125127 - RNA, 19 nt, Artificial Sequence
  Description of Artificial Sequence: Synthetic oligonucleotide
auucguggaauauaucuau

SEQ ID NO: 125128 - RNA, 19 nt, Artificial Sequence
  Description of Artificial Sequence: Synthetic oligonucleotide
ugucaugccgauucccuag

SEQ ID NO: 125129 - RNA, 19 nt, Artificial Sequence
  Description of Artificial Sequence: Synthetic oligonucleotide
agcacaucgcaacauguug

SEQ ID NO: 125130 - RNA, 19 nt, Artificial Sequence
  Description of Artificial Sequence: Synthetic oligonucleotide
uuuaacuaauucggguugc

SEQ ID NO: 125131 - RNA, 19 nt, Artificial Sequence
  Description of Artificial Sequence: Synthetic oligonucleotide
aaguugguucuuaaaccac

SEQ ID NO: 125132 - RNA, 19 nt, Artificial Sequence
  Description of Artificial Sequence: Synthetic oligonucleotide
ucagcaggcucucacguac

SEQ ID NO: 125133 - RNA, 19 nt, Artificial Sequence
  Description of Artificial Sequence: Synthetic oligonucleotide
uaaguguugucagaauagc

SEQ ID NO: 125134 - RNA, 19 nt, Artificial Sequence
  Description of Artificial Sequence: Synthetic oligonucleotide
ggcucucacguacagaugg

SEQ ID NO: 125135 - RNA, 19 nt, Artificial Sequence
  Description of Artificial Sequence: Synthetic oligonucleotide
uugguuggaccuuguagag

SEQ ID NO: 125136 - RNA, 19 nt, Artificial Sequence
  Description of Artificial Sequence: Synthetic oligonucleotide
ucguggaauauaucuauaa

SEQ ID NO: 125137 - RNA, 19 nt, Artificial Sequence
  Description of Artificial Sequence: Synthetic oligonucleotide
gcaaguaaugcaaaguaag

SEQ ID NO: 125138 - RNA, 19 nt, Artificial Sequence
  Description of Artificial Sequence: Synthetic oligonucleotide
agaauugguugaaacaucu

SEQ ID NO: 125139 - RNA, 19 nt, Artificial Sequence
  Description of Artificial Sequence: Synthetic oligonucleotide
auauggucguaucuguaca

SEQ ID NO: 125140 - RNA, 19 nt, Artificial Sequence
  Description of Artificial Sequence: Synthetic oligonucleotide
uggucguaucuguacauug

SEQ ID NO: 125141 - RNA, 19 nt, Artificial Sequence
  Description of Artificial Sequence: Synthetic oligonucleotide
aguuacauacuguccccag

SEQ ID NO: 125142 - RNA, 19 nt, Artificial Sequence
  Description of Artificial Sequence: Synthetic oligonucleotide
aagacucgacccauaacag

SEQ ID NO: 125143 - RNA, 19 nt, Artificial Sequence
  Description of Artificial Sequence: Synthetic oligonucleotide
aaaacguuauguauccuua

SEQ ID NO: 125144 - RNA, 19 nt, Artificial Sequence
  Description of Artificial Sequence: Synthetic oligonucleotide
cuuacaauguaugcacuac

SEQ ID NO: 125145 - RNA, 19 nt, Artificial Sequence
  Description of Artificial Sequence: Synthetic oligonucleotide
agugccuuuaccaauuccu

SEQ ID NO: 125146 - RNA, 19 nt, Artificial Sequence
  Description of Artificial Sequence: Synthetic oligonucleotide
uaguucaagaaguggugac

SEQ ID NO: 125147 - RNA, 19 nt, Artificial Sequence
  Description of Artificial Sequence: Synthetic oligonucleotide
acauccuacauauggucgu

SEQ ID NO: 125148 - RNA, 19 nt, Artificial Sequence
  Description of Artificial Sequence: Synthetic oligonucleotide
gcuuauaccuauuaugaga

SEQ ID NO: 125149 - RNA, 19 nt, Artificial Sequence
  Description of Artificial Sequence: Synthetic oligonucleotide
aucgcaacauguugugcuc

SEQ ID NO: 125150 - RNA, 19 nt, Artificial Sequence
  Description of Artificial Sequence: Synthetic oligonucleotide
ucuaguaguacuggaguaa

SEQ ID NO: 125151 - RNA, 19 nt, Artificial Sequence
  Description of Artificial Sequence: Synthetic oligonucleotide
gacucgacccauaacagca

SEQ ID NO: 125152 - RNA, 19 nt, Artificial Sequence
  Description of Artificial Sequence: Synthetic oligonucleotide
ugauuauauucguggaaua

SEQ ID NO: 125153 - RNA, 19 nt, Artificial Sequence
  Description of Artificial Sequence: Synthetic oligonucleotide
ucccucacacguuuagugc

SEQ ID NO: 125154 - RNA, 19 nt, Artificial Sequence
  Description of Artificial Sequence: Synthetic oligonucleotide
cucgccuucaauaacaccu

SEQ ID NO: 125155 - RNA, 19 nt, Artificial Sequence
  Description of Artificial Sequence: Synthetic oligonucleotide
cuaguaguacuggaguaag

SEQ ID NO: 125156 - RNA, 19 nt, Artificial Sequence
  Description of Artificial Sequence: Synthetic oligonucleotide
uugguucuuaaaccacuga

SEQ ID NO: 125157 - RNA, 19 nt, Artificial Sequence
  Description of Artificial Sequence: Synthetic oligonucleotide
caugugccaucuuauuaag

SEQ ID NO: 125158 - RNA, 19 nt, Artificial Sequence
  Description of Artificial Sequence: Synthetic oligonucleotide
uucuaguaguacuggagua

SEQ ID NO: 125159 - RNA, 19 nt, Artificial Sequence
  Description of Artificial Sequence: Synthetic oligonucleotide
acacguuuagugcaacaga

SEQ ID NO: 125160 - RNA, 19 nt, Artificial Sequence
  Description of Artificial Sequence: Synthetic oligonucleotide
uaacuaauucggguugcag

SEQ ID NO: 125161 - RNA, 19 nt, Artificial Sequence
  Description of Artificial Sequence: Synthetic oligonucleotide
uuacuccgaaacuuaguuc

SEQ ID NO: 125162 - RNA, 19 nt, Artificial Sequence
  Description of Artificial Sequence: Synthetic oligonucleotide
auagcuuacaaaggguagu

SEQ ID NO: 125163 - RNA, 19 nt, Artificial Sequence
  Description of Artificial Sequence: Synthetic oligonucleotide
cacuacuggauaccucucg

SEQ ID NO: 125164 - RNA, 19 nt, Artificial Sequence
  Description of Artificial Sequence: Synthetic oligonucleotide
gacaucacuacuggauacc

SEQ ID NO: 125165 - RNA, 19 nt, Artificial Sequence
  Description of Artificial Sequence: Synthetic oligonucleotide
aaugcaccucuaguaaaca

SEQ ID NO: 125166 - RNA, 19 nt, Artificial Sequence
  Description of Artificial Sequence: Synthetic oligonucleotide
ugagguaucuuuggaaaau

SEQ ID NO: 125167 - RNA, 19 nt, Artificial Sequence
  Description of Artificial Sequence: Synthetic oligonucleotide
guaguaaucucugguagca

SEQ ID NO: 125168 - RNA, 19 nt, Artificial Sequence
  Description of Artificial Sequence: Synthetic oligonucleotide
aggagaggcaaauauugua

SEQ ID NO: 125169 - RNA, 19 nt, Artificial Sequence
  Description of Artificial Sequence: Synthetic oligonucleotide
aguuuugauuauauucgug

SEQ ID NO: 125170 - RNA, 19 nt, Artificial Sequence
  Description of Artificial Sequence: Synthetic oligonucleotide
uccagaagguagacaugag

SEQ ID NO: 125171 - RNA, 19 nt, Artificial Sequence
  Description of Artificial Sequence: Synthetic oligonucleotide
gacuuacuccgaaacuuag

SEQ ID NO: 125172 - RNA, 19 nt, Artificial Sequence
  Description of Artificial Sequence: Synthetic oligonucleotide
gaaaacguuauguauccuu

SEQ ID NO: 125173 - RNA, 19 nt, Artificial Sequence
  Description of Artificial Sequence: Synthetic oligonucleotide
uuaacuaauucggguugca

SEQ ID NO: 125174 - RNA, 19 nt, Artificial Sequence
  Description of Artificial Sequence: Synthetic oligonucleotide
ucccacuuggcacuacagu

SEQ ID NO: 125175 - RNA, 19 nt, Artificial Sequence
  Description of Artificial Sequence: Synthetic oligonucleotide
caauucggaccacuaaauc

SEQ ID NO: 125176 - RNA, 19 nt, Artificial Sequence
  Description of Artificial Sequence: Synthetic oligonucleotide
ucgacccauaacagcaaga

SEQ ID NO: 125177 - RNA, 19 nt, Artificial Sequence
  Description of Artificial Sequence: Synthetic oligonucleotide
aaaggacgugcaaaacaug

SEQ ID NO: 125178 - RNA, 19 nt, Artificial Sequence
  Description of Artificial Sequence: Synthetic oligonucleotide
ugggccuaacacuggauuc

SEQ ID NO: 125179 - RNA, 19 nt, Artificial Sequence
  Description of Artificial Sequence: Synthetic oligonucleotide
accuauuaugagaaacuug

SEQ ID NO: 125180 - RNA, 19 nt, Artificial Sequence
  Description of Artificial Sequence: Synthetic oligonucleotide
cacaucgcaacauguugug

SEQ ID NO: 125181 - RNA, 19 nt, Artificial Sequence
  Description of Artificial Sequence: Synthetic oligonucleotide
ucuccugauuaaacucaug

SEQ ID NO: 125182 - RNA, 19 nt, Artificial Sequence
  Description of Artificial Sequence: Synthetic oligonucleotide
agcuuacaaaggguagugg

SEQ ID NO: 125183 - RNA, 19 nt, Artificial Sequence
  Description of Artificial Sequence: Synthetic oligonucleotide
ucucaaguguuaagagcuc

SEQ ID NO: 125184 - RNA, 19 nt, Artificial Sequence
  Description of Artificial Sequence: Synthetic oligonucleotide
augagccaaaucacccugc

SEQ ID NO: 125185 - RNA, 19 nt, Artificial Sequence
  Description of Artificial Sequence: Synthetic oligonucleotide
gaugagacaucaacauaca

SEQ ID NO: 125186 - RNA, 19 nt, Artificial Sequence
  Description of Artificial Sequence: Synthetic oligonucleotide
uauauccagaaggcuagaa

SEQ ID NO: 125187 - RNA, 19 nt, Artificial Sequence
  Description of Artificial Sequence: Synthetic oligonucleotide
uaccuauuaugagaaacuu

SEQ ID NO: 125188 - RNA, 19 nt, Artificial Sequence
  Description of Artificial Sequence: Synthetic oligonucleotide
auaggauaaggcaaccaaa

SEQ ID NO: 125189 - RNA, 19 nt, Artificial Sequence
  Description of Artificial Sequence: Synthetic oligonucleotide
ucacacguuuagugcaaca

SEQ ID NO: 125190 - RNA, 19 nt, Artificial Sequence
  Description of Artificial Sequence: Synthetic oligonucleotide
cacucgaucaacccacauc

SEQ ID NO: 125191 - RNA, 19 nt, Artificial Sequence
  Description of Artificial Sequence: Synthetic oligonucleotide
gaaaggacgugcaaaacau

SEQ ID NO: 125192 - RNA, 19 nt, Artificial Sequence
  Description of Artificial Sequence: Synthetic oligonucleotide
acguuuagugcaacagagg

SEQ ID NO: 125193 - RNA, 19 nt, Artificial Sequence
  Description of Artificial Sequence: Synthetic oligonucleotide
ucccacaguuacauacugu

SEQ ID NO: 125194 - RNA, 19 nt, Artificial Sequence
  Description of Artificial Sequence: Synthetic oligonucleotide
uaguaaucucugguagcag

SEQ ID NO: 125195 - RNA, 19 nt, Artificial Sequence
  Description of Artificial Sequence: Synthetic oligonucleotide
ugcacauacuguugauaaa

SEQ ID NO: 125196 - RNA, 19 nt, Artificial Sequence
  Description of Artificial Sequence: Synthetic oligonucleotide
auacggcagaauugguuga

SEQ ID NO: 125197 - RNA, 19 nt, Artificial Sequence
  Description of Artificial Sequence: Synthetic oligonucleotide
aaacaucugugggccuaac

SEQ ID NO: 125198 - RNA, 19 nt, Artificial Sequence
  Description of Artificial Sequence: Synthetic oligonucleotide
guaagacucgacccauaac

SEQ ID NO: 125199 - RNA, 19 nt, Artificial Sequence
  Description of Artificial Sequence: Synthetic oligonucleotide
uuccaaugucacuaaccau

SEQ ID NO: 125200 - RNA, 19 nt, Artificial Sequence
  Description of Artificial Sequence: Synthetic oligonucleotide
cucuuagaauccuugcaaa

SEQ ID NO: 125201 - RNA, 19 nt, Artificial Sequence
  Description of Artificial Sequence: Synthetic oligonucleotide
aaccauaacucaaggccau

SEQ ID NO: 125202 - RNA, 19 nt, Artificial Sequence
  Description of Artificial Sequence: Synthetic oligonucleotide
cucgacccauaacagcaag

SEQ ID NO: 125203 - RNA, 19 nt, Artificial Sequence
  Description of Artificial Sequence: Synthetic oligonucleotide
aguuacagauugcuucaua

SEQ ID NO: 125204 - RNA, 19 nt, Artificial Sequence
  Description of Artificial Sequence: Synthetic oligonucleotide
gacagaaaggaagacuagu

SEQ ID NO: 125205 - RNA, 19 nt, Artificial Sequence
  Description of Artificial Sequence: Synthetic oligonucleotide
gagccaaaucacccugcgc

SEQ ID NO: 125206 - RNA, 19 nt, Artificial Sequence
  Description of Artificial Sequence: Synthetic oligonucleotide
gcaccucuaguaaacacag

SEQ ID NO: 125207 - RNA, 19 nt, Artificial Sequence
  Description of Artificial Sequence: Synthetic oligonucleotide
acaaccuugagcacuugaa

SEQ ID NO: 125208 - RNA, 19 nt, Artificial Sequence
  Description of Artificial Sequence: Synthetic oligonucleotide
ugaaaacguuauguauccu

SEQ ID NO: 125209 - RNA, 19 nt, Artificial Sequence
  Description of Artificial Sequence: Synthetic oligonucleotide
cuuacuccgaaacuuaguu

SEQ ID NO: 125210 - RNA, 19 nt, Artificial Sequence
  Description of Artificial Sequence: Synthetic oligonucleotide
gauuaaacucaugugccau

SEQ ID NO: 125211 - RNA, 19 nt, Artificial Sequence
  Description of Artificial Sequence: Synthetic oligonucleotide
ggauaacacuauuaucaga

SEQ ID NO: 125212 - RNA, 19 nt, Artificial Sequence
  Description of Artificial Sequence: Synthetic oligonucleotide
ggcaaccaaauuuaacuaa

SEQ ID NO: 125213 - RNA, 19 nt, Artificial Sequence
  Description of Artificial Sequence: Synthetic oligonucleotide
guccacucgaucaacccac

SEQ ID NO: 125214 - RNA, 19 nt, Artificial Sequence
  Description of Artificial Sequence: Synthetic oligonucleotide
gccaaaucacccugcgccg

SEQ ID NO: 125215 - RNA, 19 nt, Artificial Sequence
  Description of Artificial Sequence: Synthetic oligonucleotide
acucaugugccaucuuauu

SEQ ID NO: 125216 - RNA, 19 nt, Artificial Sequence
  Description of Artificial Sequence: Synthetic oligonucleotide
aucuuggauaacacuauua

SEQ ID NO: 125217 - RNA, 19 nt, Artificial Sequence
  Description of Artificial Sequence: Synthetic oligonucleotide
cgugcgugcucuuagaauc

SEQ ID NO: 125218 - RNA, 19 nt, Artificial Sequence
  Description of Artificial Sequence: Synthetic oligonucleotide
uccacucgaucaacccaca

SEQ ID NO: 125219 - RNA, 19 nt, Artificial Sequence
  Description of Artificial Sequence: Synthetic oligonucleotide
auucccuagugcacaaacu

SEQ ID NO: 125220 - RNA, 19 nt, Artificial Sequence
  Description of Artificial Sequence: Synthetic oligonucleotide
cuuguaagauacucugggu

SEQ ID NO: 125221 - RNA, 19 nt, Artificial Sequence
  Description of Artificial Sequence: Synthetic oligonucleotide
cuauuaugagaaacuugua

SEQ ID NO: 125222 - RNA, 19 nt, Artificial Sequence
  Description of Artificial Sequence: Synthetic oligonucleotide
auauuguaccaaacauccu

SEQ ID NO: 125223 - RNA, 19 nt, Artificial Sequence
  Description of Artificial Sequence: Synthetic oligonucleotide
gcuuacaaaggguaguggu

SEQ ID NO: 125224 - RNA, 19 nt, Artificial Sequence
  Description of Artificial Sequence: Synthetic oligonucleotide
acauacggcagaauugguu

SEQ ID NO: 125225 - RNA, 19 nt, Artificial Sequence
  Description of Artificial Sequence: Synthetic oligonucleotide
cuggguaguagguaucugu

SEQ ID NO: 125226 - RNA, 19 nt, Artificial Sequence
  Description of Artificial Sequence: Synthetic oligonucleotide
ugcacccauggcacugaga

SEQ ID NO: 125227 - RNA, 19 nt, Artificial Sequence
  Description of Artificial Sequence: Synthetic oligonucleotide
gacccauaacagcaagaua

SEQ ID NO: 125228 - RNA, 19 nt, Artificial Sequence
  Description of Artificial Sequence: Synthetic oligonucleotide
agacuuacuccgaaacuua

SEQ ID NO: 125229 - RNA, 19 nt, Artificial Sequence
  Description of Artificial Sequence: Synthetic oligonucleotide
guuucaauucggaccacua

SEQ ID NO: 125230 - RNA, 19 nt, Artificial Sequence
  Description of Artificial Sequence: Synthetic oligonucleotide
acgaguuucuuaacaggaa

SEQ ID NO: 125231 - RNA, 19 nt, Artificial Sequence
  Description of Artificial Sequence: Synthetic oligonucleotide
guucaagaaguggugacau

SEQ ID NO: 125232 - RNA, 19 nt, Artificial Sequence
  Description of Artificial Sequence: Synthetic oligonucleotide
guggugacauguucugaaa

SEQ ID NO: 125233 - RNA, 19 nt, Artificial Sequence
  Description of Artificial Sequence: Synthetic oligonucleotide
gugcgugcucuuagaaucc

SEQ ID NO: 125234 - RNA, 19 nt, Artificial Sequence
  Description of Artificial Sequence: Synthetic oligonucleotide
cucgaucaacccacaucuc

SEQ ID NO: 125235 - RNA, 19 nt, Artificial Sequence
  Description of Artificial Sequence: Synthetic oligonucleotide
ggcaaguaaugcaaaguaa

SEQ ID NO: 125236 - RNA, 19 nt, Artificial Sequence
  Description of Artificial Sequence: Synthetic oligonucleotide
gugcaacagagggauagga

SEQ ID NO: 125237 - RNA, 19 nt, Artificial Sequence
  Description of Artificial Sequence: Synthetic oligonucleotide
guaaggcgucaauucucuc

SEQ ID NO: 125238 - RNA, 19 nt, Artificial Sequence
  Description of Artificial Sequence: Synthetic oligonucleotide
ggucguaucuguacauuga

SEQ ID NO: 125239 - RNA, 19 nt, Artificial Sequence
  Description of Artificial Sequence: Synthetic oligonucleotide
cucacacguuuagugcaac

SEQ ID NO: 125240 - RNA, 19 nt, Artificial Sequence
  Description of Artificial Sequence: Synthetic oligonucleotide
ccucucgccuucaauaaca

SEQ ID NO: 125241 - RNA, 19 nt, Artificial Sequence
  Description of Artificial Sequence: Synthetic oligonucleotide
cucucacguacagauggca

SEQ ID NO: 125242 - RNA, 19 nt, Artificial Sequence
  Description of Artificial Sequence: Synthetic oligonucleotide
cagcaagauagauggacau

SEQ ID NO: 125243 - RNA, 19 nt, Artificial Sequence
  Description of Artificial Sequence: Synthetic oligonucleotide
gaaccugagauggguaaau

SEQ ID NO: 125244 - RNA, 19 nt, Artificial Sequence
  Description of Artificial Sequence: Synthetic oligonucleotide
caguuacauacugucccca

SEQ ID NO: 125245 - RNA, 19 nt, Artificial Sequence
  Description of Artificial Sequence: Synthetic oligonucleotide
ccgaaacuuaguucaagaa

SEQ ID NO: 125246 - RNA, 19 nt, Artificial Sequence
  Description of Artificial Sequence: Synthetic oligonucleotide
guaguaagacucgacccau

SEQ ID NO: 125247 - RNA, 19 nt, Artificial Sequence
  Description of Artificial Sequence: Synthetic oligonucleotide
gggccccucauaaauauaa

SEQ ID NO: 125248 - RNA, 19 nt, Artificial Sequence
  Description of Artificial Sequence: Synthetic oligonucleotide
gggcuguuuuccaauguca

SEQ ID NO: 125249 - RNA, 19 nt, Artificial Sequence
  Description of Artificial Sequence: Synthetic oligonucleotide
auccuacauauggucguau

SEQ ID NO: 125250 - RNA, 19 nt, Artificial Sequence
  Description of Artificial Sequence: Synthetic oligonucleotide
cagcuaaucccacagcauu

SEQ ID NO: 125251 - RNA, 19 nt, Artificial Sequence
  Description of Artificial Sequence: Synthetic oligonucleotide
cuaauucggguugcagaaa

SEQ ID NO: 125252 - RNA, 19 nt, Artificial Sequence
  Description of Artificial Sequence: Synthetic oligonucleotide
aggcgucaauucucucccu

SEQ ID NO: 125253 - RNA, 19 nt, Artificial Sequence
  Description of Artificial Sequence: Synthetic oligonucleotide
acuccgaaacuuaguucaa

SEQ ID NO: 125254 - RNA, 19 nt, Artificial Sequence
  Description of Artificial Sequence: Synthetic oligonucleotide
ccaaaucacccugcgccgc

SEQ ID NO: 125255 - RNA, 19 nt, Artificial Sequence
  Description of Artificial Sequence: Synthetic oligonucleotide
acucgacccauaacagcaa

SEQ ID NO: 125256 - RNA, 19 nt, Artificial Sequence
  Description of Artificial Sequence: Synthetic oligonucleotide
gccgauucccuagugcaca

SEQ ID NO: 125257 - RNA, 19 nt, Artificial Sequence
  Description of Artificial Sequence: Synthetic oligonucleotide
gucaugccgauucccuagu

SEQ ID NO: 125258 - RNA, 19 nt, Artificial Sequence
  Description of Artificial Sequence: Synthetic oligonucleotide
ccagaaggcuagaaugaaa

SEQ ID NO: 125259 - RNA, 19 nt, Artificial Sequence
  Description of Artificial Sequence: Synthetic oligonucleotide
gguguaacacaugggcugu

SEQ ID NO: 125260 - RNA, 19 nt, Artificial Sequence
  Description of Artificial Sequence: Synthetic oligonucleotide
gcucucacguacagauggc

SEQ ID NO: 125261 - RNA, 19 nt, Artificial Sequence
  Description of Artificial Sequence: Synthetic oligonucleotide
cgccgcaauggcuuauacc

SEQ ID NO: 125262 - RNA, 19 nt, Artificial Sequence
  Description of Artificial Sequence: Synthetic oligonucleotide
cauccuacauauggucgua

SEQ ID NO: 125263 - RNA, 19 nt, Artificial Sequence
  Description of Artificial Sequence: Synthetic oligonucleotide
ccacguggcgcgugcgugc

SEQ ID NO: 125264 - RNA, 19 nt, Artificial Sequence
  Description of Artificial Sequence: Synthetic oligonucleotide
acguggcgcgugcgugcuc

SEQ ID NO: 125265 - RNA, 19 nt, Artificial Sequence
  Description of Artificial Sequence: Synthetic oligonucleotide
auguauccuuagacauuau

SEQ ID NO: 125266 - RNA, 19 nt, Artificial Sequence
  Description of Artificial Sequence: Synthetic oligonucleotide
gguagugguuucccacagu

SEQ ID NO: 125267 - RNA, 19 nt, Artificial Sequence
  Description of Artificial Sequence: Synthetic oligonucleotide
gccacguggcgcgugcgug

SEQ ID NO: 125268 - RNA, 19 nt, Artificial Sequence
  Description of Artificial Sequence: Synthetic oligonucleotide
gcuaaucccacagcauuau

SEQ ID NO: 125269 - RNA, 19 nt, Artificial Sequence
  Description of Artificial Sequence: Synthetic oligonucleotide
ccucacacguuuagugcaa

SEQ ID NO: 125270 - RNA, 19 nt, Artificial Sequence
  Description of Artificial Sequence: Synthetic oligonucleotide
ccuaaucccugaacaagau

SEQ ID NO: 125271 - RNA, 19 nt, Artificial Sequence
  Description of Artificial Sequence: Synthetic oligonucleotide
gcgccgcaauggcuuauac

SEQ ID NO: 125272 - RNA, 19 nt, Artificial Sequence
  Description of Artificial Sequence: Synthetic oligonucleotide
ggauaccucucgccuucaa

SEQ ID NO: 125273 - RNA, 19 nt, Artificial Sequence
  Description of Artificial Sequence: Synthetic oligonucleotide
gcaugggucucaagucaga

SEQ ID NO: 125274 - RNA, 19 nt, Artificial Sequence
  Description of Artificial Sequence: Synthetic oligonucleotide
ggccccucauaaauauaaa

SEQ ID NO: 125275 - RNA, 19 nt, Artificial Sequence
  Description of Artificial Sequence: Synthetic oligonucleotide
gcagcuaaucccacagcau

SEQ ID NO: 125276 - RNA, 19 nt, Artificial Sequence
  Description of Artificial Sequence: Synthetic oligonucleotide
gccuuacaauguaugcacu

SEQ ID NO: 125277 - RNA, 19 nt, Artificial Sequence
  Description of Artificial Sequence: Synthetic oligonucleotide
gcgugcgugcucuuagaau

SEQ ID NO: 125278 - RNA, 19 nt, Artificial Sequence
  Description of Artificial Sequence: Synthetic oligonucleotide
gggcacuuuccacaaccuu

SEQ ID NO: 125279 - RNA, 19 nt, Artificial Sequence
  Description of Artificial Sequence: Synthetic oligonucleotide
ccgauucccuagugcacaa

SEQ ID NO: 125280 - RNA, 19 nt, Artificial Sequence
  Description of Artificial Sequence: Synthetic oligonucleotide
gcgcgugcgugcucuuaga

SEQ ID NO: 125281 - RNA, 19 nt, Artificial Sequence
  Description of Artificial Sequence: Synthetic oligonucleotide
ccgcaauggcuuauaccua

SEQ ID NO: 125282 - RNA, 19 nt, Artificial Sequence
  Description of Artificial Sequence: Synthetic oligonucleotide
cacguggcgcgugcgugcu

SEQ ID NO: 125283 - RNA, 19 nt, Artificial Sequence
  Description of Artificial Sequence: Synthetic oligonucleotide
cccugcgccgcaauggcuu

SEQ ID NO: 125284 - RNA, 19 nt, Artificial Sequence
  Description of Artificial Sequence: Synthetic oligonucleotide
ccugcgccgcaauggcuua

SEQ ID NO: 125285 - RNA, 19 nt, Artificial Sequence
  Description of Artificial Sequence: Synthetic oligonucleotide
ccacucgaucaacccacau

SEQ ID NO: 125286 - RNA, 19 nt, Artificial Sequence
  Description of Artificial Sequence: Synthetic oligonucleotide
gcgugcucuuagaauccuu

SEQ ID NO: 125287 - RNA, 19 nt, Artificial Sequence
  Description of Artificial Sequence: Synthetic oligonucleotide
cguggcgcgugcgugcucu

SEQ ID NO: 125288 - RNA, 19 nt, Artificial Sequence
  Description of Artificial Sequence: Synthetic oligonucleotide
guggcgcgugcgugcucuu

SEQ ID NO: 125289 - RNA, 19 nt, Artificial Sequence
  Description of Artificial Sequence: Synthetic oligonucleotide
aaaauuagaaacuauguau

SEQ ID NO: 125290 - RNA, 19 nt, Artificial Sequence
  Description of Artificial Sequence: Synthetic oligonucleotide
aauacucaaggguuggacc

SEQ ID NO: 125291 - RNA, 19 nt, Artificial Sequence
  Description of Artificial Sequence: Synthetic oligonucleotide
aagaguacagucuggggcc

SEQ ID NO: 125292 - RNA, 19 nt, Artificial Sequence
  Description of Artificial Sequence: Synthetic oligonucleotide
uaaaagaccauccacccag

SEQ ID NO: 125293 - RNA, 19 nt, Artificial Sequence
  Description of Artificial Sequence: Synthetic oligonucleotide
agagagaaacucuugaaac

SEQ ID NO: 125294 - RNA, 19 nt, Artificial Sequence
  Description of Artificial Sequence: Synthetic oligonucleotide
aagaucgaagcuaaaagac

SEQ ID NO: 125295 - RNA, 19 nt, Artificial Sequence
  Description of Artificial Sequence: Synthetic oligonucleotide
ucaugauggacucugggcc

SEQ ID NO: 125296 - RNA, 19 nt, Artificial Sequence
  Description of Artificial Sequence: Synthetic oligonucleotide
aggccaacgaaacaaacac

SEQ ID NO: 125297 - RNA, 19 nt, Artificial Sequence
  Description of Artificial Sequence: Synthetic oligonucleotide
uuuacacacgaauugguca

SEQ ID NO: 125298 - RNA, 19 nt, Artificial Sequence
  Description of Artificial Sequence: Synthetic oligonucleotide
uccagaaauacucaagggu

SEQ ID NO: 125299 - RNA, 19 nt, Artificial Sequence
  Description of Artificial Sequence: Synthetic oligonucleotide
aaauacucaaggguuggac

SEQ ID NO: 125300 - RNA, 19 nt, Artificial Sequence
  Description of Artificial Sequence: Synthetic oligonucleotide
ucuaggaucuuauuaggug

SEQ ID NO: 125301 - RNA, 19 nt, Artificial Sequence
  Description of Artificial Sequence: Synthetic oligonucleotide
ugguagaugcuauuugugg

SEQ ID NO: 125302 - RNA, 19 nt, Artificial Sequence
  Description of Artificial Sequence: Synthetic oligonucleotide
cucuuaucgggucagagcc

SEQ ID NO: 125303 - RNA, 19 nt, Artificial Sequence
  Description of Artificial Sequence: Synthetic oligonucleotide
agcaaguugagcaugcagc

SEQ ID NO: 125304 - RNA, 19 nt, Artificial Sequence
  Description of Artificial Sequence: Synthetic oligonucleotide
uauccgaagggucugggag

SEQ ID NO: 125305 - RNA, 19 nt, Artificial Sequence
  Description of Artificial Sequence: Synthetic oligonucleotide
cugcucgugaacuugacgg

SEQ ID NO: 125306 - RNA, 19 nt, Artificial Sequence
  Description of Artificial Sequence: Synthetic oligonucleotide
uuaaugagagugcccgugg

SEQ ID NO: 125307 - RNA, 19 nt, Artificial Sequence
  Description of Artificial Sequence: Synthetic oligonucleotide
uuacacacgaauuggucag

SEQ ID NO: 125308 - RNA, 19 nt, Artificial Sequence
  Description of Artificial Sequence: Synthetic oligonucleotide
auuuguguagacccuuugg

SEQ ID NO: 125309 - RNA, 19 nt, Artificial Sequence
  Description of Artificial Sequence: Synthetic oligonucleotide
acgguaggggaauacaugg

SEQ ID NO: 125310 - RNA, 19 nt, Artificial Sequence
  Description of Artificial Sequence: Synthetic oligonucleotide
gaugcaaggauuuauagau

SEQ ID NO: 125311 - RNA, 19 nt, Artificial Sequence
  Description of Artificial Sequence: Synthetic oligonucleotide
uauuaggugucugaauccg

SEQ ID NO: 125312 - RNA, 19 nt, Artificial Sequence
  Description of Artificial Sequence: Synthetic oligonucleotide
uaggguagaacucaucagu

SEQ ID NO: 125313 - RNA, 19 nt, Artificial Sequence
  Description of Artificial Sequence: Synthetic oligonucleotide
ucaaggguuggaccaaagg

SEQ ID NO: 125314 - RNA, 19 nt, Artificial Sequence
  Description of Artificial Sequence: Synthetic oligonucleotide
uugggaaugguuaaauuau

SEQ ID NO: 125315 - RNA, 19 nt, Artificial Sequence
  Description of Artificial Sequence: Synthetic oligonucleotide
ucaaaagcuauuucggauc

SEQ ID NO: 125316 - RNA, 19 nt, Artificial Sequence
  Description of Artificial Sequence: Synthetic oligonucleotide
agaccauccacccagugug

SEQ ID NO: 125317 - RNA, 19 nt, Artificial Sequence
  Description of Artificial Sequence: Synthetic oligonucleotide
cuauuuguggacacuauuc

SEQ ID NO: 125318 - RNA, 19 nt, Artificial Sequence
  Description of Artificial Sequence: Synthetic oligonucleotide
aauacccaaaggaauccac

SEQ ID NO: 125319 - RNA, 19 nt, Artificial Sequence
  Description of Artificial Sequence: Synthetic oligonucleotide
agaucgaagcuaaaagacc

SEQ ID NO: 125320 - RNA, 19 nt, Artificial Sequence
  Description of Artificial Sequence: Synthetic oligonucleotide
uuaacaguagcagugacuu

SEQ ID NO: 125321 - RNA, 19 nt, Artificial Sequence
  Description of Artificial Sequence: Synthetic oligonucleotide
acaaaacgcugcuugggac

SEQ ID NO: 125322 - RNA, 19 nt, Artificial Sequence
  Description of Artificial Sequence: Synthetic oligonucleotide
uaucaaaagcuauuucgga

SEQ ID NO: 125323 - RNA, 19 nt, Artificial Sequence
  Description of Artificial Sequence: Synthetic oligonucleotide
gaugccaggccuuuagacc

SEQ ID NO: 125324 - RNA, 19 nt, Artificial Sequence
  Description of Artificial Sequence: Synthetic oligonucleotide
uuuuacacacgaauugguc

SEQ ID NO: 125325 - RNA, 19 nt, Artificial Sequence
  Description of Artificial Sequence: Synthetic oligonucleotide
guuaggguagaacucauca

SEQ ID NO: 125326 - RNA, 19 nt, Artificial Sequence
  Description of Artificial Sequence: Synthetic oligonucleotide
uggcaagcagucuacaccc

SEQ ID NO: 125327 - RNA, 19 nt, Artificial Sequence
  Description of Artificial Sequence: Synthetic oligonucleotide
uuguguagacccuuuggcc

SEQ ID NO: 125328 - RNA, 19 nt, Artificial Sequence
  Description of Artificial Sequence: Synthetic oligonucleotide
uucccuugcacgcaggcug

SEQ ID NO: 125329 - RNA, 19 nt, Artificial Sequence
  Description of Artificial Sequence: Synthetic oligonucleotide
uuuaaugagagugcccgug

SEQ ID NO: 125330 - RNA, 19 nt, Artificial Sequence
  Description of Artificial Sequence: Synthetic oligonucleotide
aaaacgcugcuugggacac

SEQ ID NO: 125331 - RNA, 19 nt, Artificial Sequence
  Description of Artificial Sequence: Synthetic oligonucleotide
agccacuagagcaagcugc

SEQ ID NO: 125332 - RNA, 19 nt, Artificial Sequence
  Description of Artificial Sequence: Synthetic oligonucleotide
ucggaggagaucaggaaug

SEQ ID NO: 125333 - RNA, 19 nt, Artificial Sequence
  Description of Artificial Sequence: Synthetic oligonucleotide
uugguagaugcuauuugug

SEQ ID NO: 125334 - RNA, 19 nt, Artificial Sequence
  Description of Artificial Sequence: Synthetic oligonucleotide
uugacggaaaguuucacuu

SEQ ID NO: 125335 - RNA, 19 nt, Artificial Sequence
  Description of Artificial Sequence: Synthetic oligonucleotide
ggaaugguuaaauuauacc

SEQ ID NO: 125336 - RNA, 19 nt, Artificial Sequence
  Description of Artificial Sequence: Synthetic oligonucleotide
auacucaaggguuggacca

SEQ ID NO: 125337 - RNA, 19 nt, Artificial Sequence
  Description of Artificial Sequence: Synthetic oligonucleotide
caguguuccucuuaucggg

SEQ ID NO: 125338 - RNA, 19 nt, Artificial Sequence
  Description of Artificial Sequence: Synthetic oligonucleotide
ucugcucgugaacuugacg

SEQ ID NO: 125339 - RNA, 19 nt, Artificial Sequence
  Description of Artificial Sequence: Synthetic oligonucleotide
cuuugcagagggaaacccg

SEQ ID NO: 125340 - RNA, 19 nt, Artificial Sequence
  Description of Artificial Sequence: Synthetic oligonucleotide
agaaauacucaaggguugg

SEQ ID NO: 125341 - RNA, 19 nt, Artificial Sequence
  Description of Artificial Sequence: Synthetic oligonucleotide
gcuuuaaugagagugcccg

SEQ ID NO: 125342 - RNA, 19 nt, Artificial Sequence
  Description of Artificial Sequence: Synthetic oligonucleotide
caagaucgaagcuaaaaga

SEQ ID NO: 125343 - RNA, 19 nt, Artificial Sequence
  Description of Artificial Sequence: Synthetic oligonucleotide
acgaugcaaggauuuauag

SEQ ID NO: 125344 - RNA, 19 nt, Artificial Sequence
  Description of Artificial Sequence: Synthetic oligonucleotide
gcaagaucgaagcuaaaag

SEQ ID NO: 125345 - RNA, 19 nt, Artificial Sequence
  Description of Artificial Sequence: Synthetic oligonucleotide
auacccaaaggaauccacc

SEQ ID NO: 125346 - RNA, 19 nt, Artificial Sequence
  Description of Artificial Sequence: Synthetic oligonucleotide
agcuauuucggaucaaaau

SEQ ID NO: 125347 - RNA, 19 nt, Artificial Sequence
  Description of Artificial Sequence: Synthetic oligonucleotide
cucugcuuaaaccccgugg

SEQ ID NO: 125348 - RNA, 19 nt, Artificial Sequence
  Description of Artificial Sequence: Synthetic oligonucleotide
aggauuuauagauuucuuu

SEQ ID NO: 125349 - RNA, 19 nt, Artificial Sequence
  Description of Artificial Sequence: Synthetic oligonucleotide
gaucuuauuaggugucuga

SEQ ID NO: 125350 - RNA, 19 nt, Artificial Sequence
  Description of Artificial Sequence: Synthetic oligonucleotide
agcucacggaaguagagcu

SEQ ID NO: 125351 - RNA, 19 nt, Artificial Sequence
  Description of Artificial Sequence: Synthetic oligonucleotide
uaaaccccguggcugagug

SEQ ID NO: 125352 - RNA, 19 nt, Artificial Sequence
  Description of Artificial Sequence: Synthetic oligonucleotide
ugaguggacgaugacauuc

SEQ ID NO: 125353 - RNA, 19 nt, Artificial Sequence
  Description of Artificial Sequence: Synthetic oligonucleotide
ucauaguaauucugccucc

SEQ ID NO: 125354 - RNA, 19 nt, Artificial Sequence
  Description of Artificial Sequence: Synthetic oligonucleotide
uggaguaugugaccaggca

SEQ ID NO: 125355 - RNA, 19 nt, Artificial Sequence
  Description of Artificial Sequence: Synthetic oligonucleotide
cuugggaaugguuaaauua

SEQ ID NO: 125356 - RNA, 19 nt, Artificial Sequence
  Description of Artificial Sequence: Synthetic oligonucleotide
ugaacuugacggaaaguuu

SEQ ID NO: 125357 - RNA, 19 nt, Artificial Sequence
  Description of Artificial Sequence: Synthetic oligonucleotide
uuguuuccugcccaacacc

SEQ ID NO: 125358 - RNA, 19 nt, Artificial Sequence
  Description of Artificial Sequence: Synthetic oligonucleotide
uaaugagccgacugaugcc

SEQ ID NO: 125359 - RNA, 19 nt, Artificial Sequence
  Description of Artificial Sequence: Synthetic oligonucleotide
gauuuguguagacccuuug

SEQ ID NO: 125360 - RNA, 19 nt, Artificial Sequence
  Description of Artificial Sequence: Synthetic oligonucleotide
ucgcucaucaucaccgaca

SEQ ID NO: 125361 - RNA, 19 nt, Artificial Sequence
  Description of Artificial Sequence: Synthetic oligonucleotide
ugaugccaggccuuuagac

SEQ ID NO: 125362 - RNA, 19 nt, Artificial Sequence
  Description of Artificial Sequence: Synthetic oligonucleotide
augccaggccuuuagaccu

SEQ ID NO: 125363 - RNA, 19 nt, Artificial Sequence
  Description of Artificial Sequence: Synthetic oligonucleotide
uguuccucuuaucggguca

SEQ ID NO: 125364 - RNA, 19 nt, Artificial Sequence
  Description of Artificial Sequence: Synthetic oligonucleotide
ugcuuaaaccccguggcug

SEQ ID NO: 125365 - RNA, 19 nt, Artificial Sequence
  Description of Artificial Sequence: Synthetic oligonucleotide
cuguggaccuccuaaugag

SEQ ID NO: 125366 - RNA, 19 nt, Artificial Sequence
  Description of Artificial Sequence: Synthetic oligonucleotide
acaauguaagguaccuugg

SEQ ID NO: 125367 - RNA, 19 nt, Artificial Sequence
  Description of Artificial Sequence: Synthetic oligonucleotide
uccguugccagucucuguc

SEQ ID NO: 125368 - RNA, 19 nt, Artificial Sequence
  Description of Artificial Sequence: Synthetic oligonucleotide
caacgaaacaaacacugga

SEQ ID NO: 125369 - RNA, 19 nt, Artificial Sequence
  Description of Artificial Sequence: Synthetic oligonucleotide
aaauacccaaaggaaucca

SEQ ID NO: 125370 - RNA, 19 nt, Artificial Sequence
  Description of Artificial Sequence: Synthetic oligonucleotide
cuugcacgcaggcuggcgg

SEQ ID NO: 125371 - RNA, 19 nt, Artificial Sequence
  Description of Artificial Sequence: Synthetic oligonucleotide
acacgaauuggucagcauu

SEQ ID NO: 125372 - RNA, 19 nt, Artificial Sequence
  Description of Artificial Sequence: Synthetic oligonucleotide
agcuuuaaugagagugccc

SEQ ID NO: 125373 - RNA, 19 nt, Artificial Sequence
  Description of Artificial Sequence: Synthetic oligonucleotide
uguagacucgagucuucgc

SEQ ID NO: 125374 - RNA, 19 nt, Artificial Sequence
  Description of Artificial Sequence: Synthetic oligonucleotide
cauuaacaguagcagugac

SEQ ID NO: 125375 - RNA, 19 nt, Artificial Sequence
  Description of Artificial Sequence: Synthetic oligonucleotide
auagucggaggagaucagg

SEQ ID NO: 125376 - RNA, 19 nt, Artificial Sequence
  Description of Artificial Sequence: Synthetic oligonucleotide
gccaacgaaacaaacacug

SEQ ID NO: 125377 - RNA, 19 nt, Artificial Sequence
  Description of Artificial Sequence: Synthetic oligonucleotide
ccggauacucgguagaugc

SEQ ID NO: 125378 - RNA, 19 nt, Artificial Sequence
  Description of Artificial Sequence: Synthetic oligonucleotide
ucucguuggaugucacucu

SEQ ID NO: 125379 - RNA, 19 nt, Artificial Sequence
  Description of Artificial Sequence: Synthetic oligonucleotide
agagcgaugcccucugcga

SEQ ID NO: 125380 - RNA, 19 nt, Artificial Sequence
  Description of Artificial Sequence: Synthetic oligonucleotide
gguagaugcuauuugugga

SEQ ID NO: 125381 - RNA, 19 nt, Artificial Sequence
  Description of Artificial Sequence: Synthetic oligonucleotide
accgacacauccuuauuau

SEQ ID NO: 125382 - RNA, 19 nt, Artificial Sequence
  Description of Artificial Sequence: Synthetic oligonucleotide
aaccccguggcugagugga

SEQ ID NO: 125383 - RNA, 19 nt, Artificial Sequence
  Description of Artificial Sequence: Synthetic oligonucleotide
ugggaaugguuaaauuaua

SEQ ID NO: 125384 - RNA, 19 nt, Artificial Sequence
  Description of Artificial Sequence: Synthetic oligonucleotide
ugcagagggaaacccgagu

SEQ ID NO: 125385 - RNA, 19 nt, Artificial Sequence
  Description of Artificial Sequence: Synthetic oligonucleotide
uagaugcuauuuguggaca

SEQ ID NO: 125386 - RNA, 19 nt, Artificial Sequence
  Description of Artificial Sequence: Synthetic oligonucleotide
ucuuaucgggucagagcca

SEQ ID NO: 125387 - RNA, 19 nt, Artificial Sequence
  Description of Artificial Sequence: Synthetic oligonucleotide
uugcagagggaaacccgag

SEQ ID NO: 125388 - RNA, 19 nt, Artificial Sequence
  Description of Artificial Sequence: Synthetic oligonucleotide
ugacggaaaguuucacuuc

SEQ ID NO: 125389 - RNA, 19 nt, Artificial Sequence
  Description of Artificial Sequence: Synthetic oligonucleotide
gacgcacaauguaagguac

SEQ ID NO: 125390 - RNA, 19 nt, Artificial Sequence
  Description of Artificial Sequence: Synthetic oligonucleotide
acuugacggaaaguuucac

SEQ ID NO: 125391 - RNA, 19 nt, Artificial Sequence
  Description of Artificial Sequence: Synthetic oligonucleotide
gacgguaggggaauacaug

SEQ ID NO: 125392 - RNA, 19 nt, Artificial Sequence
  Description of Artificial Sequence: Synthetic oligonucleotide
uccucuuaucgggucagag

SEQ ID NO: 125393 - RNA, 19 nt, Artificial Sequence
  Description of Artificial Sequence: Synthetic oligonucleotide
ugcagacgcaucuggauuu

SEQ ID NO: 125394 - RNA, 19 nt, Artificial Sequence
  Description of Artificial Sequence: Synthetic oligonucleotide
cacccuuuucaaguggucc

SEQ ID NO: 125395 - RNA, 19 nt, Artificial Sequence
  Description of Artificial Sequence: Synthetic oligonucleotide
ugagccgacugaugccagg

SEQ ID NO: 125396 - RNA, 19 nt, Artificial Sequence
  Description of Artificial Sequence: Synthetic oligonucleotide
ugcucgugaacuugacgga

SEQ ID NO: 125397 - RNA, 19 nt, Artificial Sequence
  Description of Artificial Sequence: Synthetic oligonucleotide
caaaacgcugcuugggaca

SEQ ID NO: 125398 - RNA, 19 nt, Artificial Sequence
  Description of Artificial Sequence: Synthetic oligonucleotide
cauucuguggaccuccuaa

SEQ ID NO: 125399 - RNA, 19 nt, Artificial Sequence
  Description of Artificial Sequence: Synthetic oligonucleotide
uccuaccauggcaagcagu

SEQ ID NO: 125400 - RNA, 19 nt, Artificial Sequence
  Description of Artificial Sequence: Synthetic oligonucleotide
aacgaugcaaggauuuaua

SEQ ID NO: 125401 - RNA, 19 nt, Artificial Sequence
  Description of Artificial Sequence: Synthetic oligonucleotide
aguggacgaugacauucag

SEQ ID NO: 125402 - RNA, 19 nt, Artificial Sequence
  Description of Artificial Sequence: Synthetic oligonucleotide
acccgaguuuucccacucc

SEQ ID NO: 125403 - RNA, 19 nt, Artificial Sequence
  Description of Artificial Sequence: Synthetic oligonucleotide
cuauuucggaucaaaauuu

SEQ ID NO: 125404 - RNA, 19 nt, Artificial Sequence
  Description of Artificial Sequence: Synthetic oligonucleotide
ugcuauuuguggacacuau

SEQ ID NO: 125405 - RNA, 19 nt, Artificial Sequence
  Description of Artificial Sequence: Synthetic oligonucleotide
uugacaccgaagaccccug

SEQ ID NO: 125406 - RNA, 19 nt, Artificial Sequence
  Description of Artificial Sequence: Synthetic oligonucleotide
augucuguggccacuccgg

SEQ ID NO: 125407 - RNA, 19 nt, Artificial Sequence
  Description of Artificial Sequence: Synthetic oligonucleotide
ucgaagcuaaaagaccauc

SEQ ID NO: 125408 - RNA, 19 nt, Artificial Sequence
  Description of Artificial Sequence: Synthetic oligonucleotide
acaccacgcauuuugcuuu

SEQ ID NO: 125409 - RNA, 19 nt, Artificial Sequence
  Description of Artificial Sequence: Synthetic oligonucleotide
acgcacaauguaagguacc

SEQ ID NO: 125410 - RNA, 19 nt, Artificial Sequence
  Description of Artificial Sequence: Synthetic oligonucleotide
aguauccgaagggucuggg

SEQ ID NO: 125411 - RNA, 19 nt, Artificial Sequence
  Description of Artificial Sequence: Synthetic oligonucleotide
gccauugcgacuguguacc

SEQ ID NO: 125412 - RNA, 19 nt, Artificial Sequence
  Description of Artificial Sequence: Synthetic oligonucleotide
guagacucgagucuucgcu

SEQ ID NO: 125413 - RNA, 19 nt, Artificial Sequence
  Description of Artificial Sequence: Synthetic oligonucleotide
cuguagacucgagucuucg

SEQ ID NO: 125414 - RNA, 19 nt, Artificial Sequence
  Description of Artificial Sequence: Synthetic oligonucleotide
caauguaagguaccuugga

SEQ ID NO: 125415 - RNA, 19 nt, Artificial Sequence
  Description of Artificial Sequence: Synthetic oligonucleotide
ccaacgaaacaaacacugg

SEQ ID NO: 125416 - RNA, 19 nt, Artificial Sequence
  Description of Artificial Sequence: Synthetic oligonucleotide
gaacucucugcucgugaac

SEQ ID NO: 125417 - RNA, 19 nt, Artificial Sequence
  Description of Artificial Sequence: Synthetic oligonucleotide
uccuaaugagccgacugau

SEQ ID NO: 125418 - RNA, 19 nt, Artificial Sequence
  Description of Artificial Sequence: Synthetic oligonucleotide
ucccaaaugugggauucca

SEQ ID NO: 125419 - RNA, 19 nt, Artificial Sequence
  Description of Artificial Sequence: Synthetic oligonucleotide
cacuccggauacucgguag

SEQ ID NO: 125420 - RNA, 19 nt, Artificial Sequence
  Description of Artificial Sequence: Synthetic oligonucleotide
aggaauccuaccauggcaa

SEQ ID NO: 125421 - RNA, 19 nt, Artificial Sequence
  Description of Artificial Sequence: Synthetic oligonucleotide
acuccggauacucgguaga

SEQ ID NO: 125422 - RNA, 19 nt, Artificial Sequence
  Description of Artificial Sequence: Synthetic oligonucleotide
uagacucgagucuucgcuu

SEQ ID NO: 125423 - RNA, 19 nt, Artificial Sequence
  Description of Artificial Sequence: Synthetic oligonucleotide
agcguggggccaaagacug

SEQ ID NO: 125424 - RNA, 19 nt, Artificial Sequence
  Description of Artificial Sequence: Synthetic oligonucleotide
acaguauccgaagggucug

SEQ ID NO: 125425 - RNA, 19 nt, Artificial Sequence
  Description of Artificial Sequence: Synthetic oligonucleotide
ucacggaaguagagcuuca

SEQ ID NO: 125426 - RNA, 19 nt, Artificial Sequence
  Description of Artificial Sequence: Synthetic oligonucleotide
ggccacuccggauacucgg

SEQ ID NO: 125427 - RNA, 19 nt, Artificial Sequence
  Description of Artificial Sequence: Synthetic oligonucleotide
aaaagaccauccacccagu

SEQ ID NO: 125428 - RNA, 19 nt, Artificial Sequence
  Description of Artificial Sequence: Synthetic oligonucleotide
gaccccugucuguuuucgg

SEQ ID NO: 125429 - RNA, 19 nt, Artificial Sequence
  Description of Artificial Sequence: Synthetic oligonucleotide
acaagccacuagagcaagc

SEQ ID NO: 125430 - RNA, 19 nt, Artificial Sequence
  Description of Artificial Sequence: Synthetic oligonucleotide
gaaauacucaaggguugga

SEQ ID NO: 125431 - RNA, 19 nt, Artificial Sequence
  Description of Artificial Sequence: Synthetic oligonucleotide
cuccuaaugagccgacuga

SEQ ID NO: 125432 - RNA, 19 nt, Artificial Sequence
  Description of Artificial Sequence: Synthetic oligonucleotide
guaggggaauacauggcuc

SEQ ID NO: 125433 - RNA, 19 nt, Artificial Sequence
  Description of Artificial Sequence: Synthetic oligonucleotide
uacacacgaauuggucagc

SEQ ID NO: 125434 - RNA, 19 nt, Artificial Sequence
  Description of Artificial Sequence: Synthetic oligonucleotide
gccuuuagaccucagugga

SEQ ID NO: 125435 - RNA, 19 nt, Artificial Sequence
  Description of Artificial Sequence: Synthetic oligonucleotide
agccguagagcccgggaga

SEQ ID NO: 125436 - RNA, 19 nt, Artificial Sequence
  Description of Artificial Sequence: Synthetic oligonucleotide
ggaauccuaccauggcaag

SEQ ID NO: 125437 - RNA, 19 nt, Artificial Sequence
  Description of Artificial Sequence: Synthetic oligonucleotide
auacauggcucugccucuc

SEQ ID NO: 125438 - RNA, 19 nt, Artificial Sequence
  Description of Artificial Sequence: Synthetic oligonucleotide
cuccaagccccuuguauca

SEQ ID NO: 125439 - RNA, 19 nt, Artificial Sequence
  Description of Artificial Sequence: Synthetic oligonucleotide
ugggacuugcagacgcauc

SEQ ID NO: 125440 - RNA, 19 nt, Artificial Sequence
  Description of Artificial Sequence: Synthetic oligonucleotide
ccaagguuagaaaguauca

SEQ ID NO: 125441 - RNA, 19 nt, Artificial Sequence
  Description of Artificial Sequence: Synthetic oligonucleotide
guaccuuggaccucucucu

SEQ ID NO: 125442 - RNA, 19 nt, Artificial Sequence
  Description of Artificial Sequence: Synthetic oligonucleotide
aaaagcuauuucggaucaa

SEQ ID NO: 125443 - RNA, 19 nt, Artificial Sequence
  Description of Artificial Sequence: Synthetic oligonucleotide
uggauuuguguagacccuu

SEQ ID NO: 125444 - RNA, 19 nt, Artificial Sequence
  Description of Artificial Sequence: Synthetic oligonucleotide
cuugacggaaaguuucacu

SEQ ID NO: 125445 - RNA, 19 nt, Artificial Sequence
  Description of Artificial Sequence: Synthetic oligonucleotide
ugcccucugcgaaguuagg

SEQ ID NO: 125446 - RNA, 19 nt, Artificial Sequence
  Description of Artificial Sequence: Synthetic oligonucleotide
acgaauuggucagcauuug

SEQ ID NO: 125447 - RNA, 19 nt, Artificial Sequence
  Description of Artificial Sequence: Synthetic oligonucleotide
cauaguaauucugccucca

SEQ ID NO: 125448 - RNA, 19 nt, Artificial Sequence
  Description of Artificial Sequence: Synthetic oligonucleotide
agggucgaagcagcguggg

SEQ ID NO: 125449 - RNA, 19 nt, Artificial Sequence
  Description of Artificial Sequence: Synthetic oligonucleotide
augcuauuuguggacacua

SEQ ID NO: 125450 - RNA, 19 nt, Artificial Sequence
  Description of Artificial Sequence: Synthetic oligonucleotide
uugcacgcaggcuggcgga

SEQ ID NO: 125451 - RNA, 19 nt, Artificial Sequence
  Description of Artificial Sequence: Synthetic oligonucleotide
uguuugucucuuggcagau

SEQ ID NO: 125452 - RNA, 19 nt, Artificial Sequence
  Description of Artificial Sequence: Synthetic oligonucleotide
acacacgaauuggucagca

SEQ ID NO: 125453 - RNA, 19 nt, Artificial Sequence
  Description of Artificial Sequence: Synthetic oligonucleotide
ugacaccgaagaccccugu

SEQ ID NO: 125454 - RNA, 19 nt, Artificial Sequence
  Description of Artificial Sequence: Synthetic oligonucleotide
agugcccgugguccuuccg

SEQ ID NO: 125455 - RNA, 19 nt, Artificial Sequence
  Description of Artificial Sequence: Synthetic oligonucleotide
gggaaacccgaguuuuccc

SEQ ID NO: 125456 - RNA, 19 nt, Artificial Sequence
  Description of Artificial Sequence: Synthetic oligonucleotide
uguguacccugaaggccau

SEQ ID NO: 125457 - RNA, 19 nt, Artificial Sequence
  Description of Artificial Sequence: Synthetic oligonucleotide
ucaccgacacauccuuauu

SEQ ID NO: 125458 - RNA, 19 nt, Artificial Sequence
  Description of Artificial Sequence: Synthetic oligonucleotide
cugcccguccaccacggug

SEQ ID NO: 125459 - RNA, 19 nt, Artificial Sequence
  Description of Artificial Sequence: Synthetic oligonucleotide
ccccaugucuacuccaagc

SEQ ID NO: 125460 - RNA, 19 nt, Artificial Sequence
  Description of Artificial Sequence: Synthetic oligonucleotide
agacgguaggggaauacau

SEQ ID NO: 125461 - RNA, 19 nt, Artificial Sequence
  Description of Artificial Sequence: Synthetic oligonucleotide
guauccgaagggucuggga

SEQ ID NO: 125462 - RNA, 19 nt, Artificial Sequence
  Description of Artificial Sequence: Synthetic oligonucleotide
cgguguacauucuaggauc

SEQ ID NO: 125463 - RNA, 19 nt, Artificial Sequence
  Description of Artificial Sequence: Synthetic oligonucleotide
uugcgacuguguacccuga

SEQ ID NO: 125464 - RNA, 19 nt, Artificial Sequence
  Description of Artificial Sequence: Synthetic oligonucleotide
uuaaaccccguggcugagu

SEQ ID NO: 125465 - RNA, 19 nt, Artificial Sequence
  Description of Artificial Sequence: Synthetic oligonucleotide
gcuuaaaccccguggcuga

SEQ ID NO: 125466 - RNA, 19 nt, Artificial Sequence
  Description of Artificial Sequence: Synthetic oligonucleotide
cacggaaguagagcuucag

SEQ ID NO: 125467 - RNA, 19 nt, Artificial Sequence
  Description of Artificial Sequence: Synthetic oligonucleotide
cagggugcaguacagauuu

SEQ ID NO: 125468 - RNA, 19 nt, Artificial Sequence
  Description of Artificial Sequence: Synthetic oligonucleotide
agguucaagagcagacggu

SEQ ID NO: 125469 - RNA, 19 nt, Artificial Sequence
  Description of Artificial Sequence: Synthetic oligonucleotide
gaugcuauuuguggacacu

SEQ ID NO: 125470 - RNA, 19 nt, Artificial Sequence
  Description of Artificial Sequence: Synthetic oligonucleotide
caaguugagcaugcagcuc

SEQ ID NO: 125471 - RNA, 19 nt, Artificial Sequence
  Description of Artificial Sequence: Synthetic oligonucleotide
ggccugauaagcacuugcc

SEQ ID NO: 125472 - RNA, 19 nt, Artificial Sequence
  Description of Artificial Sequence: Synthetic oligonucleotide
cuuaaaccccguggcugag

SEQ ID NO: 125473 - RNA, 19 nt, Artificial Sequence
  Description of Artificial Sequence: Synthetic oligonucleotide
agagugcccgugguccuuc

SEQ ID NO: 125474 - RNA, 19 nt, Artificial Sequence
  Description of Artificial Sequence: Synthetic oligonucleotide
cuugacaccgaagaccccu

SEQ ID NO: 125475 - RNA, 19 nt, Artificial Sequence
  Description of Artificial Sequence: Synthetic oligonucleotide
caguauccgaagggucugg

SEQ ID NO: 125476 - RNA, 19 nt, Artificial Sequence
  Description of Artificial Sequence: Synthetic oligonucleotide
cacgaauuggucagcauuu

SEQ ID NO: 125477 - RNA, 19 nt, Artificial Sequence
  Description of Artificial Sequence: Synthetic oligonucleotide
gaacgaugcaaggauuuau

SEQ ID NO: 125478 - RNA, 19 nt, Artificial Sequence
  Description of Artificial Sequence: Synthetic oligonucleotide
agucuucgcuuuauucaca

SEQ ID NO: 125479 - RNA, 19 nt, Artificial Sequence
  Description of Artificial Sequence: Synthetic oligonucleotide
gaugcccucugcgaaguua

SEQ ID NO: 125480 - RNA, 19 nt, Artificial Sequence
  Description of Artificial Sequence: Synthetic oligonucleotide
gggacuugcagacgcaucu

SEQ ID NO: 125481 - RNA, 19 nt, Artificial Sequence
  Description of Artificial Sequence: Synthetic oligonucleotide
gucacuagguuggcuucug

SEQ ID NO: 125482 - RNA, 19 nt, Artificial Sequence
  Description of Artificial Sequence: Synthetic oligonucleotide
aucgaagcuaaaagaccau

SEQ ID NO: 125483 - RNA, 19 nt, Artificial Sequence
  Description of Artificial Sequence: Synthetic oligonucleotide
agcgugccagcaauggcgu

SEQ ID NO: 125484 - RNA, 19 nt, Artificial Sequence
  Description of Artificial Sequence: Synthetic oligonucleotide
cuuuaaugagagugcccgu

SEQ ID NO: 125485 - RNA, 19 nt, Artificial Sequence
  Description of Artificial Sequence: Synthetic oligonucleotide
ggagaucaggaauguguaa

SEQ ID NO: 125486 - RNA, 19 nt, Artificial Sequence
  Description of Artificial Sequence: Synthetic oligonucleotide
uuccggcacaggaguagua

SEQ ID NO: 125487 - RNA, 19 nt, Artificial Sequence
  Description of Artificial Sequence: Synthetic oligonucleotide
cagacgguaggggaauaca

SEQ ID NO: 125488 - RNA, 19 nt, Artificial Sequence
  Description of Artificial Sequence: Synthetic oligonucleotide
ggagcggccguggaguaug

SEQ ID NO: 125489 - RNA, 19 nt, Artificial Sequence
  Description of Artificial Sequence: Synthetic oligonucleotide
cugaugccaggccuuuaga

SEQ ID NO: 125490 - RNA, 19 nt, Artificial Sequence
  Description of Artificial Sequence: Synthetic oligonucleotide
cgaugcaaggauuuauaga

SEQ ID NO: 125491 - RNA, 19 nt, Artificial Sequence
  Description of Artificial Sequence: Synthetic oligonucleotide
gggucgaagcagcgugggg

SEQ ID NO: 125492 - RNA, 19 nt, Artificial Sequence
  Description of Artificial Sequence: Synthetic oligonucleotide
ggaccuccuaaugagccga

SEQ ID NO: 125493 - RNA, 19 nt, Artificial Sequence
  Description of Artificial Sequence: Synthetic oligonucleotide
ccacuagguccagaaauac

SEQ ID NO: 125494 - RNA, 19 nt, Artificial Sequence
  Description of Artificial Sequence: Synthetic oligonucleotide
uuccucuuaucgggucaga

SEQ ID NO: 125495 - RNA, 19 nt, Artificial Sequence
  Description of Artificial Sequence: Synthetic oligonucleotide
gagugcccgugguccuucc

SEQ ID NO: 125496 - RNA, 19 nt, Artificial Sequence
  Description of Artificial Sequence: Synthetic oligonucleotide
ccgaguuuucccacuccug

SEQ ID NO: 125497 - RNA, 19 nt, Artificial Sequence
  Description of Artificial Sequence: Synthetic oligonucleotide
gacucgagucuucgcuuua

SEQ ID NO: 125498 - RNA, 19 nt, Artificial Sequence
  Description of Artificial Sequence: Synthetic oligonucleotide
gagcuugggaaugguuaaa

SEQ ID NO: 125499 - RNA, 19 nt, Artificial Sequence
  Description of Artificial Sequence: Synthetic oligonucleotide
uuaucgggucagagccauu

SEQ ID NO: 125500 - RNA, 19 nt, Artificial Sequence
  Description of Artificial Sequence: Synthetic oligonucleotide
uguagacccuuuggccuuu

SEQ ID NO: 125501 - RNA, 19 nt, Artificial Sequence
  Description of Artificial Sequence: Synthetic oligonucleotide
gcuauuuguggacacuauu

SEQ ID NO: 125502 - RNA, 19 nt, Artificial Sequence
  Description of Artificial Sequence: Synthetic oligonucleotide
accuccuaaugagccgacu

SEQ ID NO: 125503 - RNA, 19 nt, Artificial Sequence
  Description of Artificial Sequence: Synthetic oligonucleotide
gaccuccuaaugagccgac

SEQ ID NO: 125504 - RNA, 19 nt, Artificial Sequence
  Description of Artificial Sequence: Synthetic oligonucleotide
cuuaucgggucagagccau

SEQ ID NO: 125505 - RNA, 19 nt, Artificial Sequence
  Description of Artificial Sequence: Synthetic oligonucleotide
ggacuugcagacgcaucug

SEQ ID NO: 125506 - RNA, 19 nt, Artificial Sequence
  Description of Artificial Sequence: Synthetic oligonucleotide
gcacaguauccgaaggguc

SEQ ID NO: 125507 - RNA, 19 nt, Artificial Sequence
  Description of Artificial Sequence: Synthetic oligonucleotide
gguuaccaccacgaagcca

SEQ ID NO: 125508 - RNA, 19 nt, Artificial Sequence
  Description of Artificial Sequence: Synthetic oligonucleotide
gguguacauucuaggaucu

SEQ ID NO: 125509 - RNA, 19 nt, Artificial Sequence
  Description of Artificial Sequence: Synthetic oligonucleotide
cugcuuaaaccccguggcu

SEQ ID NO: 125510 - RNA, 19 nt, Artificial Sequence
  Description of Artificial Sequence: Synthetic oligonucleotide
ggcgcucgaucucuuccac

SEQ ID NO: 125511 - RNA, 19 nt, Artificial Sequence
  Description of Artificial Sequence: Synthetic oligonucleotide
gaugggcagccaagcuaca

SEQ ID NO: 125512 - RNA, 19 nt, Artificial Sequence
  Description of Artificial Sequence: Synthetic oligonucleotide
ccguugccagucucugucc

SEQ ID NO: 125513 - RNA, 19 nt, Artificial Sequence
  Description of Artificial Sequence: Synthetic oligonucleotide
ugauggacucugggccauc

SEQ ID NO: 125514 - RNA, 19 nt, Artificial Sequence
  Description of Artificial Sequence: Synthetic oligonucleotide
caucaccgacacauccuua

SEQ ID NO: 125515 - RNA, 19 nt, Artificial Sequence
  Description of Artificial Sequence: Synthetic oligonucleotide
gcagacgguaggggaauac

SEQ ID NO: 125516 - RNA, 19 nt, Artificial Sequence
  Description of Artificial Sequence: Synthetic oligonucleotide
caguccguugccagucucu

SEQ ID NO: 125517 - RNA, 19 nt, Artificial Sequence
  Description of Artificial Sequence: Synthetic oligonucleotide
ugucuacuccaagccccuu

SEQ ID NO: 125518 - RNA, 19 nt, Artificial Sequence
  Description of Artificial Sequence: Synthetic oligonucleotide
gccguagagcccgggagac

SEQ ID NO: 125519 - RNA, 19 nt, Artificial Sequence
  Description of Artificial Sequence: Synthetic oligonucleotide
ccacccuuuucaagugguc

SEQ ID NO: 125520 - RNA, 19 nt, Artificial Sequence
  Description of Artificial Sequence: Synthetic oligonucleotide
ccuugcacgcaggcuggcg

SEQ ID NO: 125521 - RNA, 19 nt, Artificial Sequence
  Description of Artificial Sequence: Synthetic oligonucleotide
ccuuuagaccucaguggaa

SEQ ID NO: 125522 - RNA, 19 nt, Artificial Sequence
  Description of Artificial Sequence: Synthetic oligonucleotide
gaagcagcguggggccaaa

SEQ ID NO: 125523 - RNA, 19 nt, Artificial Sequence
  Description of Artificial Sequence: Synthetic oligonucleotide
cuacuccaagccccuugua

SEQ ID NO: 125524 - RNA, 19 nt, Artificial Sequence
  Description of Artificial Sequence: Synthetic oligonucleotide
agcggccguggaguaugug

SEQ ID NO: 125525 - RNA, 19 nt, Artificial Sequence
  Description of Artificial Sequence: Synthetic oligonucleotide
gacugaugccaggccuuua

SEQ ID NO: 125526 - RNA, 19 nt, Artificial Sequence
  Description of Artificial Sequence: Synthetic oligonucleotide
guccguugccagucucugu

SEQ ID NO: 125527 - RNA, 19 nt, Artificial Sequence
  Description of Artificial Sequence: Synthetic oligonucleotide
gccacuagagcaagcugcu

SEQ ID NO: 125528 - RNA, 19 nt, Artificial Sequence
  Description of Artificial Sequence: Synthetic oligonucleotide
ggucacuagguuggcuucu

SEQ ID NO: 125529 - RNA, 19 nt, Artificial Sequence
  Description of Artificial Sequence: Synthetic oligonucleotide
gccacccuuuucaaguggu

SEQ ID NO: 125530 - RNA, 19 nt, Artificial Sequence
  Description of Artificial Sequence: Synthetic oligonucleotide
cacucggcccgcucauagu

SEQ ID NO: 125531 - RNA, 19 nt, Artificial Sequence
  Description of Artificial Sequence: Synthetic oligonucleotide
cugggacuugcagacgcau

SEQ ID NO: 125532 - RNA, 19 nt, Artificial Sequence
  Description of Artificial Sequence: Synthetic oligonucleotide
ggccgccuucagugccugg

SEQ ID NO: 125533 - RNA, 19 nt, Artificial Sequence
  Description of Artificial Sequence: Synthetic oligonucleotide
gcacgcaggcuggcggaug

SEQ ID NO: 125534 - RNA, 19 nt, Artificial Sequence
  Description of Artificial Sequence: Synthetic oligonucleotide
gcccgugguccuuccggca

SEQ ID NO: 125535 - RNA, 19 nt, Artificial Sequence
  Description of Artificial Sequence: Synthetic oligonucleotide
ccacuccggauacucggua

SEQ ID NO: 125536 - RNA, 19 nt, Artificial Sequence
  Description of Artificial Sequence: Synthetic oligonucleotide
ccgacacauccuuauuauu

SEQ ID NO: 125537 - RNA, 19 nt, Artificial Sequence
  Description of Artificial Sequence: Synthetic oligonucleotide
gccacuccggauacucggu

SEQ ID NO: 125538 - RNA, 19 nt, Artificial Sequence
  Description of Artificial Sequence: Synthetic oligonucleotide
cccuugcacgcaggcuggc

SEQ ID NO: 125539 - RNA, 19 nt, Artificial Sequence
  Description of Artificial Sequence: Synthetic oligonucleotide
gagcggccguggaguaugu

SEQ ID NO: 125540 - RNA, 19 nt, Artificial Sequence
  Description of Artificial Sequence: Synthetic oligonucleotide
cggcccgcucauagucgga

SEQ ID NO: 125541 - RNA, 19 nt, Artificial Sequence
  Description of Artificial Sequence: Synthetic oligonucleotide
aacaaauacacacacacac

SEQ ID NO: 125542 - RNA, 19 nt, Artificial Sequence
  Description of Artificial Sequence: Synthetic oligonucleotide
aauacacacacacacacac

SEQ ID NO: 125543 - RNA, 19 nt, Artificial Sequence
  Description of Artificial Sequence: Synthetic oligonucleotide
uuaugaauuacauucauag

SEQ ID NO: 125544 - RNA, 19 nt, Artificial Sequence
  Description of Artificial Sequence: Synthetic oligonucleotide
agauuuauucaauaguucc

SEQ ID NO: 125545 - RNA, 19 nt, Artificial Sequence
  Description of Artificial Sequence: Synthetic oligonucleotide
aguauuacaaaccugugac

SEQ ID NO: 125546 - RNA, 19 nt, Artificial Sequence
  Description of Artificial Sequence: Synthetic oligonucleotide
ugucaagacaaauagacgg

SEQ ID NO: 125547 - RNA, 19 nt, Artificial Sequence
  Description of Artificial Sequence: Synthetic oligonucleotide
uuuaacugaauauggaugg

SEQ ID NO: 125548 - RNA, 19 nt, Artificial Sequence
  Description of Artificial Sequence: Synthetic oligonucleotide
aaauagacggauuucauug

SEQ ID NO: 125549 - RNA, 19 nt, Artificial Sequence
  Description of Artificial Sequence: Synthetic oligonucleotide
augauaggaauuuagcucc

SEQ ID NO: 125550 - RNA, 19 nt, Artificial Sequence
  Description of Artificial Sequence: Synthetic oligonucleotide
aacuuaauugcucagaccu

SEQ ID NO: 125551 - RNA, 19 nt, Artificial Sequence
  Description of Artificial Sequence: Synthetic oligonucleotide
uucccaaucaaaauagucg

SEQ ID NO: 125552 - RNA, 19 nt, Artificial Sequence
  Description of Artificial Sequence: Synthetic oligonucleotide
aauacaggccgagagaacc

SEQ ID NO: 125553 - RNA, 19 nt, Artificial Sequence
  Description of Artificial Sequence: Synthetic oligonucleotide
ucuaauuaaagcuaaguaa

SEQ ID NO: 125554 - RNA, 19 nt, Artificial Sequence
  Description of Artificial Sequence: Synthetic oligonucleotide
auugucaagacaaauagac

SEQ ID NO: 125555 - RNA, 19 nt, Artificial Sequence
  Description of Artificial Sequence: Synthetic oligonucleotide
cauauaaucugcuugguag

SEQ ID NO: 125556 - RNA, 19 nt, Artificial Sequence
  Description of Artificial Sequence: Synthetic oligonucleotide
uuagcuauuagucucuuga

SEQ ID NO: 125557 - RNA, 19 nt, Artificial Sequence
  Description of Artificial Sequence: Synthetic oligonucleotide
uccacauaugaucuaaggg

SEQ ID NO: 125558 - RNA, 19 nt, Artificial Sequence
  Description of Artificial Sequence: Synthetic oligonucleotide
aaaauagucguguuuaguu

SEQ ID NO: 125559 - RNA, 19 nt, Artificial Sequence
  Description of Artificial Sequence: Synthetic oligonucleotide
auauaaucugcuugguagc

SEQ ID NO: 125560 - RNA, 19 nt, Artificial Sequence
  Description of Artificial Sequence: Synthetic oligonucleotide
gacaccaucaauuagccca

SEQ ID NO: 125561 - RNA, 19 nt, Artificial Sequence
  Description of Artificial Sequence: Synthetic oligonucleotide
ucacuaaccuguuagacug

SEQ ID NO: 125562 - RNA, 19 nt, Artificial Sequence
  Description of Artificial Sequence: Synthetic oligonucleotide
uggucaagaaucaaccccg

SEQ ID NO: 125563 - RNA, 19 nt, Artificial Sequence
  Description of Artificial Sequence: Synthetic oligonucleotide
uccuauauuaauacaggcc

SEQ ID NO: 125564 - RNA, 19 nt, Artificial Sequence
  Description of Artificial Sequence: Synthetic oligonucleotide
uuuagauuacaacaucaca

SEQ ID NO: 125565 - RNA, 19 nt, Artificial Sequence
  Description of Artificial Sequence: Synthetic oligonucleotide
agugauucacauugcauac

SEQ ID NO: 125566 - RNA, 19 nt, Artificial Sequence
  Description of Artificial Sequence: Synthetic oligonucleotide
uaugaauuacauucauagg

SEQ ID NO: 125567 - RNA, 19 nt, Artificial Sequence
  Description of Artificial Sequence: Synthetic oligonucleotide
cuugcuauuaguuggugcc

SEQ ID NO: 125568 - RNA, 19 nt, Artificial Sequence
  Description of Artificial Sequence: Synthetic oligonucleotide
uuaguggaaauauucacac

SEQ ID NO: 125569 - RNA, 19 nt, Artificial Sequence
  Description of Artificial Sequence: Synthetic oligonucleotide
aguaucacuggauuuuaac

SEQ ID NO: 125570 - RNA, 19 nt, Artificial Sequence
  Description of Artificial Sequence: Synthetic oligonucleotide
ccuauauuaauacaggccg

SEQ ID NO: 125571 - RNA, 19 nt, Artificial Sequence
  Description of Artificial Sequence: Synthetic oligonucleotide
uucaaggugaaaauucaug

SEQ ID NO: 125572 - RNA, 19 nt, Artificial Sequence
  Description of Artificial Sequence: Synthetic oligonucleotide
caugauaggaauuuagcuc

SEQ ID NO: 125573 - RNA, 19 nt, Artificial Sequence
  Description of Artificial Sequence: Synthetic oligonucleotide
uuaucuuugcaucacuaac

SEQ ID NO: 125574 - RNA, 19 nt, Artificial Sequence
  Description of Artificial Sequence: Synthetic oligonucleotide
uuauuguugugcauaauaa

SEQ ID NO: 125575 - RNA, 19 nt, Artificial Sequence
  Description of Artificial Sequence: Synthetic oligonucleotide
aagacaaauagacggauuu

SEQ ID NO: 125576 - RNA, 19 nt, Artificial Sequence
  Description of Artificial Sequence: Synthetic oligonucleotide
agauuguuccaacugguuc

SEQ ID NO: 125577 - RNA, 19 nt, Artificial Sequence
  Description of Artificial Sequence: Synthetic oligonucleotide
agaggguuugucaugaagc

SEQ ID NO: 125578 - RNA, 19 nt, Artificial Sequence
  Description of Artificial Sequence: Synthetic oligonucleotide
uguggaaugcagaucaugu

SEQ ID NO: 125579 - RNA, 19 nt, Artificial Sequence
  Description of Artificial Sequence: Synthetic oligonucleotide
uauugcaucauauuuggua

SEQ ID NO: 125580 - RNA, 19 nt, Artificial Sequence
  Description of Artificial Sequence: Synthetic oligonucleotide
uauuacaaaccugugacac

SEQ ID NO: 125581 - RNA, 19 nt, Artificial Sequence
  Description of Artificial Sequence: Synthetic oligonucleotide
uggaaugcagaucauguac

SEQ ID NO: 125582 - RNA, 19 nt, Artificial Sequence
  Description of Artificial Sequence: Synthetic oligonucleotide
cagacuacgauuaucuuug

SEQ ID NO: 125583 - RNA, 19 nt, Artificial Sequence
  Description of Artificial Sequence: Synthetic oligonucleotide
caaauacacacacacacac

SEQ ID NO: 125584 - RNA, 19 nt, Artificial Sequence
  Description of Artificial Sequence: Synthetic oligonucleotide
uacacacacacacacacac

SEQ ID NO: 125585 - RNA, 19 nt, Artificial Sequence
  Description of Artificial Sequence: Synthetic oligonucleotide
uuaaaaggguugauaacac

SEQ ID NO: 125586 - RNA, 19 nt, Artificial Sequence
  Description of Artificial Sequence: Synthetic oligonucleotide
uaugaucuaagggugaucu

SEQ ID NO: 125587 - RNA, 19 nt, Artificial Sequence
  Description of Artificial Sequence: Synthetic oligonucleotide
uuugacaccagacaaugua

SEQ ID NO: 125588 - RNA, 19 nt, Artificial Sequence
  Description of Artificial Sequence: Synthetic oligonucleotide
uuaucuaacccuguuuucc

SEQ ID NO: 125589 - RNA, 19 nt, Artificial Sequence
  Description of Artificial Sequence: Synthetic oligonucleotide
aacauaaggcacuuguuua

SEQ ID NO: 125590 - RNA, 19 nt, Artificial Sequence
  Description of Artificial Sequence: Synthetic oligonucleotide
aguucuuagcaauaaacau

SEQ ID NO: 125591 - RNA, 19 nt, Artificial Sequence
  Description of Artificial Sequence: Synthetic oligonucleotide
uuuagcguaugaacuaucu

SEQ ID NO: 125592 - RNA, 19 nt, Artificial Sequence
  Description of Artificial Sequence: Synthetic oligonucleotide
ucauauuugguaccuuaug

SEQ ID NO: 125593 - RNA, 19 nt, Artificial Sequence
  Description of Artificial Sequence: Synthetic oligonucleotide
aauagucguguuuaguuuu

SEQ ID NO: 125594 - RNA, 19 nt, Artificial Sequence
  Description of Artificial Sequence: Synthetic oligonucleotide
aacacugaauuaguggcag

SEQ ID NO: 125595 - RNA, 19 nt, Artificial Sequence
  Description of Artificial Sequence: Synthetic oligonucleotide
aaucuugggcccuuuaaaa

SEQ ID NO: 125596 - RNA, 19 nt, Artificial Sequence
  Description of Artificial Sequence: Synthetic oligonucleotide
uuaauacaggccgagagaa

SEQ ID NO: 125597 - RNA, 19 nt, Artificial Sequence
  Description of Artificial Sequence: Synthetic oligonucleotide
aaauagucguguuuaguuu

SEQ ID NO: 125598 - RNA, 19 nt, Artificial Sequence
  Description of Artificial Sequence: Synthetic oligonucleotide
acggauuucauugugauau

SEQ ID NO: 125599 - RNA, 19 nt, Artificial Sequence
  Description of Artificial Sequence: Synthetic oligonucleotide
aacgucaagcgucuguugu

SEQ ID NO: 125600 - RNA, 19 nt, Artificial Sequence
  Description of Artificial Sequence: Synthetic oligonucleotide
uaucuaauuaaagcuaagu

SEQ ID NO: 125601 - RNA, 19 nt, Artificial Sequence
  Description of Artificial Sequence: Synthetic oligonucleotide
acacgcgccuacuauaugg

SEQ ID NO: 125602 - RNA, 19 nt, Artificial Sequence
  Description of Artificial Sequence: Synthetic oligonucleotide
uaaccuguuagacugggau

SEQ ID NO: 125603 - RNA, 19 nt, Artificial Sequence
  Description of Artificial Sequence: Synthetic oligonucleotide
acauaaggcacuuguuuag

SEQ ID NO: 125604 - RNA, 19 nt, Artificial Sequence
  Description of Artificial Sequence: Synthetic oligonucleotide
aauauugagccugaggcua

SEQ ID NO: 125605 - RNA, 19 nt, Artificial Sequence
  Description of Artificial Sequence: Synthetic oligonucleotide
cacacacacacacacacgc

SEQ ID NO: 125606 - RNA, 19 nt, Artificial Sequence
  Description of Artificial Sequence: Synthetic oligonucleotide
aaucagucagaugcuaaag

SEQ ID NO: 125607 - RNA, 19 nt, Artificial Sequence
  Description of Artificial Sequence: Synthetic oligonucleotide
ucuacaacgucaagcgucu

SEQ ID NO: 125608 - RNA, 19 nt, Artificial Sequence
  Description of Artificial Sequence: Synthetic oligonucleotide
aauugcucagaccuugcaa

SEQ ID NO: 125609 - RNA, 19 nt, Artificial Sequence
  Description of Artificial Sequence: Synthetic oligonucleotide
cuauaacuaaaauacuaca

SEQ ID NO: 125610 - RNA, 19 nt, Artificial Sequence
  Description of Artificial Sequence: Synthetic oligonucleotide
augcuaaagccccaacaac

SEQ ID NO: 125611 - RNA, 19 nt, Artificial Sequence
  Description of Artificial Sequence: Synthetic oligonucleotide
ugcauaucgugaacaaggc

SEQ ID NO: 125612 - RNA, 19 nt, Artificial Sequence
  Description of Artificial Sequence: Synthetic oligonucleotide
uacgauuaucuuugcauca

SEQ ID NO: 125613 - RNA, 19 nt, Artificial Sequence
  Description of Artificial Sequence: Synthetic oligonucleotide
caagaaucaaccccguaac

SEQ ID NO: 125614 - RNA, 19 nt, Artificial Sequence
  Description of Artificial Sequence: Synthetic oligonucleotide
cucuacaacgucaagcguc

SEQ ID NO: 125615 - RNA, 19 nt, Artificial Sequence
  Description of Artificial Sequence: Synthetic oligonucleotide
agacagggccuguuaaagc

SEQ ID NO: 125616 - RNA, 19 nt, Artificial Sequence
  Description of Artificial Sequence: Synthetic oligonucleotide
uuagaaaugaagggcuuca

SEQ ID NO: 125617 - RNA, 19 nt, Artificial Sequence
  Description of Artificial Sequence: Synthetic oligonucleotide
aucuaacccuguuuucccc

SEQ ID NO: 125618 - RNA, 19 nt, Artificial Sequence
  Description of Artificial Sequence: Synthetic oligonucleotide
ucggugauuucuauaaaau

SEQ ID NO: 125619 - RNA, 19 nt, Artificial Sequence
  Description of Artificial Sequence: Synthetic oligonucleotide
uaugaaaaucaaacugguc

SEQ ID NO: 125620 - RNA, 19 nt, Artificial Sequence
  Description of Artificial Sequence: Synthetic oligonucleotide
ucagacuacgauuaucuuu

SEQ ID NO: 125621 - RNA, 19 nt, Artificial Sequence
  Description of Artificial Sequence: Synthetic oligonucleotide
auugugauauacaguagag

SEQ ID NO: 125622 - RNA, 19 nt, Artificial Sequence
  Description of Artificial Sequence: Synthetic oligonucleotide
aaccccguaacaaaaucag

SEQ ID NO: 125623 - RNA, 19 nt, Artificial Sequence
  Description of Artificial Sequence: Synthetic oligonucleotide
cauaggaccugccacaauc

SEQ ID NO: 125624 - RNA, 19 nt, Artificial Sequence
  Description of Artificial Sequence: Synthetic oligonucleotide
cacacacacacacacacac

SEQ ID NO: 125625 - RNA, 19 nt, Artificial Sequence
  Description of Artificial Sequence: Synthetic oligonucleotide
uguuaagauguuccugaga

SEQ ID NO: 125626 - RNA, 19 nt, Artificial Sequence
  Description of Artificial Sequence: Synthetic oligonucleotide
cuaagggugaucuuccuca

SEQ ID NO: 125627 - RNA, 19 nt, Artificial Sequence
  Description of Artificial Sequence: Synthetic oligonucleotide
gacaaauagacggauuuca

SEQ ID NO: 125628 - RNA, 19 nt, Artificial Sequence
  Description of Artificial Sequence: Synthetic oligonucleotide
cuacgauuaucuuugcauc

SEQ ID NO: 125629 - RNA, 19 nt, Artificial Sequence
  Description of Artificial Sequence: Synthetic oligonucleotide
agcuuaugacaauuugcuc

SEQ ID NO: 125630 - RNA, 19 nt, Artificial Sequence
  Description of Artificial Sequence: Synthetic oligonucleotide
auuaucuuugcaucacuaa

SEQ ID NO: 125631 - RNA, 19 nt, Artificial Sequence
  Description of Artificial Sequence: Synthetic oligonucleotide
uggguugaaauacaauaua

SEQ ID NO: 125632 - RNA, 19 nt, Artificial Sequence
  Description of Artificial Sequence: Synthetic oligonucleotide
uugugauauacaguagagc

SEQ ID NO: 125633 - RNA, 19 nt, Artificial Sequence
  Description of Artificial Sequence: Synthetic oligonucleotide
auaggaauuuagcuccucu

SEQ ID NO: 125634 - RNA, 19 nt, Artificial Sequence
  Description of Artificial Sequence: Synthetic oligonucleotide
auauuugguaccuuauguu

SEQ ID NO: 125635 - RNA, 19 nt, Artificial Sequence
  Description of Artificial Sequence: Synthetic oligonucleotide
ugaauuaguggcagaggaa

SEQ ID NO: 125636 - RNA, 19 nt, Artificial Sequence
  Description of Artificial Sequence: Synthetic oligonucleotide
cuauuagucucuugaucag

SEQ ID NO: 125637 - RNA, 19 nt, Artificial Sequence
  Description of Artificial Sequence: Synthetic oligonucleotide
uucaaugagaaaugacaau

SEQ ID NO: 125638 - RNA, 19 nt, Artificial Sequence
  Description of Artificial Sequence: Synthetic oligonucleotide
cuugguagcuauguguccc

SEQ ID NO: 125639 - RNA, 19 nt, Artificial Sequence
  Description of Artificial Sequence: Synthetic oligonucleotide
gacagggccuguuaaagca

SEQ ID NO: 125640 - RNA, 19 nt, Artificial Sequence
  Description of Artificial Sequence: Synthetic oligonucleotide
auagacggauuucauugug

SEQ ID NO: 125641 - RNA, 19 nt, Artificial Sequence
  Description of Artificial Sequence: Synthetic oligonucleotide
ucauauaaucugcuuggua

SEQ ID NO: 125642 - RNA, 19 nt, Artificial Sequence
  Description of Artificial Sequence: Synthetic oligonucleotide
acuuguuuaucuaacccug

SEQ ID NO: 125643 - RNA, 19 nt, Artificial Sequence
  Description of Artificial Sequence: Synthetic oligonucleotide
acugaauauggauggggca

SEQ ID NO: 125644 - RNA, 19 nt, Artificial Sequence
  Description of Artificial Sequence: Synthetic oligonucleotide
cacacacacacacacgcgc

SEQ ID NO: 125645 - RNA, 19 nt, Artificial Sequence
  Description of Artificial Sequence: Synthetic oligonucleotide
uagacggauuucauuguga

SEQ ID NO: 125646 - RNA, 19 nt, Artificial Sequence
  Description of Artificial Sequence: Synthetic oligonucleotide
gaacaaaggagcagcauuc

SEQ ID NO: 125647 - RNA, 19 nt, Artificial Sequence
  Description of Artificial Sequence: Synthetic oligonucleotide
uggaguucagacuacgauu

SEQ ID NO: 125648 - RNA, 19 nt, Artificial Sequence
  Description of Artificial Sequence: Synthetic oligonucleotide
aucagucauagaaugguag

SEQ ID NO: 125649 - RNA, 19 nt, Artificial Sequence
  Description of Artificial Sequence: Synthetic oligonucleotide
guaugacucaacuaucuaa

SEQ ID NO: 125650 - RNA, 19 nt, Artificial Sequence
  Description of Artificial Sequence: Synthetic oligonucleotide
auaggaccugccacaaucc

SEQ ID NO: 125651 - RNA, 19 nt, Artificial Sequence
  Description of Artificial Sequence: Synthetic oligonucleotide
aguucagacuacgauuauc

SEQ ID NO: 125652 - RNA, 19 nt, Artificial Sequence
  Description of Artificial Sequence: Synthetic oligonucleotide
auaccuccaugcaaguacc

SEQ ID NO: 125653 - RNA, 19 nt, Artificial Sequence
  Description of Artificial Sequence: Synthetic oligonucleotide
gaaucaaccccguaacaaa

SEQ ID NO: 125654 - RNA, 19 nt, Artificial Sequence
  Description of Artificial Sequence: Synthetic oligonucleotide
uagaucucaauagcaauuc

SEQ ID NO: 125655 - RNA, 19 nt, Artificial Sequence
  Description of Artificial Sequence: Synthetic oligonucleotide
uuuagcuauuagucucuug

SEQ ID NO: 125656 - RNA, 19 nt, Artificial Sequence
  Description of Artificial Sequence: Synthetic oligonucleotide
uguaugacucaacuaucua

SEQ ID NO: 125657 - RNA, 19 nt, Artificial Sequence
  Description of Artificial Sequence: Synthetic oligonucleotide
acugaauuaguggcagagg

SEQ ID NO: 125658 - RNA, 19 nt, Artificial Sequence
  Description of Artificial Sequence: Synthetic oligonucleotide
uuauuacguaguuucuuua

SEQ ID NO: 125659 - RNA, 19 nt, Artificial Sequence
  Description of Artificial Sequence: Synthetic oligonucleotide
uacuauauggcuggugccu

SEQ ID NO: 125660 - RNA, 19 nt, Artificial Sequence
  Description of Artificial Sequence: Synthetic oligonucleotide
acuaucuaauuaaagcuaa

SEQ ID NO: 125661 - RNA, 19 nt, Artificial Sequence
  Description of Artificial Sequence: Synthetic oligonucleotide
aaauacacacacacacaca

SEQ ID NO: 125662 - RNA, 19 nt, Artificial Sequence
  Description of Artificial Sequence: Synthetic oligonucleotide
cacugaauuaguggcagag

SEQ ID NO: 125663 - RNA, 19 nt, Artificial Sequence
  Description of Artificial Sequence: Synthetic oligonucleotide
acuaaccuguuagacuggg

SEQ ID NO: 125664 - RNA, 19 nt, Artificial Sequence
  Description of Artificial Sequence: Synthetic oligonucleotide
uuagcguaugaacuaucua

SEQ ID NO: 125665 - RNA, 19 nt, Artificial Sequence
  Description of Artificial Sequence: Synthetic oligonucleotide
guaucacuggauuuuaacu

SEQ ID NO: 125666 - RNA, 19 nt, Artificial Sequence
  Description of Artificial Sequence: Synthetic oligonucleotide
uuuguuuauuacguaguuu

SEQ ID NO: 125667 - RNA, 19 nt, Artificial Sequence
  Description of Artificial Sequence: Synthetic oligonucleotide
agacuacgauuaucuuugc

SEQ ID NO: 125668 - RNA, 19 nt, Artificial Sequence
  Description of Artificial Sequence: Synthetic oligonucleotide
caacacacguacugaacac

SEQ ID NO: 125669 - RNA, 19 nt, Artificial Sequence
  Description of Artificial Sequence: Synthetic oligonucleotide
gcuuaugacaauuugcucu

SEQ ID NO: 125670 - RNA, 19 nt, Artificial Sequence
  Description of Artificial Sequence: Synthetic oligonucleotide
agaucucaauagcaauucu

SEQ ID NO: 125671 - RNA, 19 nt, Artificial Sequence
  Description of Artificial Sequence: Synthetic oligonucleotide
agaagcccaacucggauua

SEQ ID NO: 125672 - RNA, 19 nt, Artificial Sequence
  Description of Artificial Sequence: Synthetic oligonucleotide
acacacacacacacgcgcc

SEQ ID NO: 125673 - RNA, 19 nt, Artificial Sequence
  Description of Artificial Sequence: Synthetic oligonucleotide
acuauauggcuggugccuc

SEQ ID NO: 125674 - RNA, 19 nt, Artificial Sequence
  Description of Artificial Sequence: Synthetic oligonucleotide
uguuaaaauugagauuguu

SEQ ID NO: 125675 - RNA, 19 nt, Artificial Sequence
  Description of Artificial Sequence: Synthetic oligonucleotide
guauuacaaaccugugaca

SEQ ID NO: 125676 - RNA, 19 nt, Artificial Sequence
  Description of Artificial Sequence: Synthetic oligonucleotide
acaaauacacacacacaca

SEQ ID NO: 125677 - RNA, 19 nt, Artificial Sequence
  Description of Artificial Sequence: Synthetic oligonucleotide
uccaacugguuccuucggu

SEQ ID NO: 125678 - RNA, 19 nt, Artificial Sequence
  Description of Artificial Sequence: Synthetic oligonucleotide
cagugcauuucauugccuc

SEQ ID NO: 125679 - RNA, 19 nt, Artificial Sequence
  Description of Artificial Sequence: Synthetic oligonucleotide
auguaugacucaacuaucu

SEQ ID NO: 125680 - RNA, 19 nt, Artificial Sequence
  Description of Artificial Sequence: Synthetic oligonucleotide
cauugucaagacaaauaga

SEQ ID NO: 125681 - RNA, 19 nt, Artificial Sequence
  Description of Artificial Sequence: Synthetic oligonucleotide
ggguugaaauacaauauac

SEQ ID NO: 125682 - RNA, 19 nt, Artificial Sequence
  Description of Artificial Sequence: Synthetic oligonucleotide
auaugaucuaagggugauc

SEQ ID NO: 125683 - RNA, 19 nt, Artificial Sequence
  Description of Artificial Sequence: Synthetic oligonucleotide
guaagaggguuugucauga

SEQ ID NO: 125684 - RNA, 19 nt, Artificial Sequence
  Description of Artificial Sequence: Synthetic oligonucleotide
cuauauggcuggugccucc

SEQ ID NO: 125685 - RNA, 19 nt, Artificial Sequence
  Description of Artificial Sequence: Synthetic oligonucleotide
agucguguuuaguuuuccu

SEQ ID NO: 125686 - RNA, 19 nt, Artificial Sequence
  Description of Artificial Sequence: Synthetic oligonucleotide
gauggggcaaaugugaaau

SEQ ID NO: 125687 - RNA, 19 nt, Artificial Sequence
  Description of Artificial Sequence: Synthetic oligonucleotide
guucagacuacgauuaucu

SEQ ID NO: 125688 - RNA, 19 nt, Artificial Sequence
  Description of Artificial Sequence: Synthetic oligonucleotide
caaccccguaacaaaauca

SEQ ID NO: 125689 - RNA, 19 nt, Artificial Sequence
  Description of Artificial Sequence: Synthetic oligonucleotide
cuuuagcguaugaacuauc

SEQ ID NO: 125690 - RNA, 19 nt, Artificial Sequence
  Description of Artificial Sequence: Synthetic oligonucleotide
cuccaacacugaauuagug

SEQ ID NO: 125691 - RNA, 19 nt, Artificial Sequence
  Description of Artificial Sequence: Synthetic oligonucleotide
cuguuagacugggaugugg

SEQ ID NO: 125692 - RNA, 19 nt, Artificial Sequence
  Description of Artificial Sequence: Synthetic oligonucleotide
agaaugguagucaggaguu

SEQ ID NO: 125693 - RNA, 19 nt, Artificial Sequence
  Description of Artificial Sequence: Synthetic oligonucleotide
ugaauauggauggggcaaa

SEQ ID NO: 125694 - RNA, 19 nt, Artificial Sequence
  Description of Artificial Sequence: Synthetic oligonucleotide
caguguacagguuugacau

SEQ ID NO: 125695 - RNA, 19 nt, Artificial Sequence
  Description of Artificial Sequence: Synthetic oligonucleotide
gacuacgauuaucuuugca

SEQ ID NO: 125696 - RNA, 19 nt, Artificial Sequence
  Description of Artificial Sequence: Synthetic oligonucleotide
gaaugcagaucauguacua

SEQ ID NO: 125697 - RNA, 19 nt, Artificial Sequence
  Description of Artificial Sequence: Synthetic oligonucleotide
ugcuauuaguuggugccac

SEQ ID NO: 125698 - RNA, 19 nt, Artificial Sequence
  Description of Artificial Sequence: Synthetic oligonucleotide
ccccguaacaaaaucaguc

SEQ ID NO: 125699 - RNA, 19 nt, Artificial Sequence
  Description of Artificial Sequence: Synthetic oligonucleotide
gcucuguacauagugauuc

SEQ ID NO: 125700 - RNA, 19 nt, Artificial Sequence
  Description of Artificial Sequence: Synthetic oligonucleotide
uugcuauuaguuggugcca

SEQ ID NO: 125701 - RNA, 19 nt, Artificial Sequence
  Description of Artificial Sequence: Synthetic oligonucleotide
uaagcuagucagaguuuua

SEQ ID NO: 125702 - RNA, 19 nt, Artificial Sequence
  Description of Artificial Sequence: Synthetic oligonucleotide
gccgaaguacaucuucuag

SEQ ID NO: 125703 - RNA, 19 nt, Artificial Sequence
  Description of Artificial Sequence: Synthetic oligonucleotide
caacacugaauuaguggca

SEQ ID NO: 125704 - RNA, 19 nt, Artificial Sequence
  Description of Artificial Sequence: Synthetic oligonucleotide
augcuauuagagaucauuu

SEQ ID NO: 125705 - RNA, 19 nt, Artificial Sequence
  Description of Artificial Sequence: Synthetic oligonucleotide
acacacguacugaacaccu

SEQ ID NO: 125706 - RNA, 19 nt, Artificial Sequence
  Description of Artificial Sequence: Synthetic oligonucleotide
gcuagucagaguuuuagcu

SEQ ID NO: 125707 - RNA, 19 nt, Artificial Sequence
  Description of Artificial Sequence: Synthetic oligonucleotide
cugaauauggauggggcaa

SEQ ID NO: 125708 - RNA, 19 nt, Artificial Sequence
  Description of Artificial Sequence: Synthetic oligonucleotide
uccauacaauaagagucuc

SEQ ID NO: 125709 - RNA, 19 nt, Artificial Sequence
  Description of Artificial Sequence: Synthetic oligonucleotide
caagcgucuguuguagaug

SEQ ID NO: 125710 - RNA, 19 nt, Artificial Sequence
  Description of Artificial Sequence: Synthetic oligonucleotide
auauugagccugaggcuag

SEQ ID NO: 125711 - RNA, 19 nt, Artificial Sequence
  Description of Artificial Sequence: Synthetic oligonucleotide
acacacacacacacacacg

SEQ ID NO: 125712 - RNA, 19 nt, Artificial Sequence
  Description of Artificial Sequence: Synthetic oligonucleotide
augacucaacuaucuaauu

SEQ ID NO: 125713 - RNA, 19 nt, Artificial Sequence
  Description of Artificial Sequence: Synthetic oligonucleotide
acaaauagacggauuucau

SEQ ID NO: 125714 - RNA, 19 nt, Artificial Sequence
  Description of Artificial Sequence: Synthetic oligonucleotide
acauaugaucuaaggguga

SEQ ID NO: 125715 - RNA, 19 nt, Artificial Sequence
  Description of Artificial Sequence: Synthetic oligonucleotide
ccacauaugaucuaagggu

SEQ ID NO: 125716 - RNA, 19 nt, Artificial Sequence
  Description of Artificial Sequence: Synthetic oligonucleotide
ucagccucguguucuuuau

SEQ ID NO: 125717 - RNA, 19 nt, Artificial Sequence
  Description of Artificial Sequence: Synthetic oligonucleotide
acacacacacacacacgcg

SEQ ID NO: 125718 - RNA, 19 nt, Artificial Sequence
  Description of Artificial Sequence: Synthetic oligonucleotide
uagucguguuuaguuuucc

SEQ ID NO: 125719 - RNA, 19 nt, Artificial Sequence
  Description of Artificial Sequence: Synthetic oligonucleotide
uucagacuacgauuaucuu

SEQ ID NO: 125720 - RNA, 19 nt, Artificial Sequence
  Description of Artificial Sequence: Synthetic oligonucleotide
gcauaucgugaacaaggcc

SEQ ID NO: 125721 - RNA, 19 nt, Artificial Sequence
  Description of Artificial Sequence: Synthetic oligonucleotide
uacuaacucuacagugcau

SEQ ID NO: 125722 - RNA, 19 nt, Artificial Sequence
  Description of Artificial Sequence: Synthetic oligonucleotide
acaacgucaagcgucuguu

SEQ ID NO: 125723 - RNA, 19 nt, Artificial Sequence
  Description of Artificial Sequence: Synthetic oligonucleotide
acccagucaagguccuuug

SEQ ID NO: 125724 - RNA, 19 nt, Artificial Sequence
  Description of Artificial Sequence: Synthetic oligonucleotide
uagaaaugaagggcuucaa

SEQ ID NO: 125725 - RNA, 19 nt, Artificial Sequence
  Description of Artificial Sequence: Synthetic oligonucleotide
aaauucccuuuagcguaug

SEQ ID NO: 125726 - RNA, 19 nt, Artificial Sequence
  Description of Artificial Sequence: Synthetic oligonucleotide
agcguaugaacuaucuaua

SEQ ID NO: 125727 - RNA, 19 nt, Artificial Sequence
  Description of Artificial Sequence: Synthetic oligonucleotide
aggccgagagaaccccuuc

SEQ ID NO: 125728 - RNA, 19 nt, Artificial Sequence
  Description of Artificial Sequence: Synthetic oligonucleotide
gauaggaauuuagcuccuc

SEQ ID NO: 125729 - RNA, 19 nt, Artificial Sequence
  Description of Artificial Sequence: Synthetic oligonucleotide
cuaaguaaacuaagcuagu

SEQ ID NO: 125730 - RNA, 19 nt, Artificial Sequence
  Description of Artificial Sequence: Synthetic oligonucleotide
caacgucaagcgucuguug

SEQ ID NO: 125731 - RNA, 19 nt, Artificial Sequence
  Description of Artificial Sequence: Synthetic oligonucleotide
ggaguucagacuacgauua

SEQ ID NO: 125732 - RNA, 19 nt, Artificial Sequence
  Description of Artificial Sequence: Synthetic oligonucleotide
auacacacacacacacaca

SEQ ID NO: 125733 - RNA, 19 nt, Artificial Sequence
  Description of Artificial Sequence: Synthetic oligonucleotide
caaauagacggauuucauu

SEQ ID NO: 125734 - RNA, 19 nt, Artificial Sequence
  Description of Artificial Sequence: Synthetic oligonucleotide
agcccaacucggauuagug

SEQ ID NO: 125735 - RNA, 19 nt, Artificial Sequence
  Description of Artificial Sequence: Synthetic oligonucleotide
caugcuauuagagaucauu

SEQ ID NO: 125736 - RNA, 19 nt, Artificial Sequence
  Description of Artificial Sequence: Synthetic oligonucleotide
gaagggcuucaaguauuac

SEQ ID NO: 125737 - RNA, 19 nt, Artificial Sequence
  Description of Artificial Sequence: Synthetic oligonucleotide
acuggaguucagacuacga

SEQ ID NO: 125738 - RNA, 19 nt, Artificial Sequence
  Description of Artificial Sequence: Synthetic oligonucleotide
acgucaagcgucuguugua

SEQ ID NO: 125739 - RNA, 19 nt, Artificial Sequence
  Description of Artificial Sequence: Synthetic oligonucleotide
cuuguuuaucuaacccugu

SEQ ID NO: 125740 - RNA, 19 nt, Artificial Sequence
  Description of Artificial Sequence: Synthetic oligonucleotide
augaucuaagggugaucuu

SEQ ID NO: 125741 - RNA, 19 nt, Artificial Sequence
  Description of Artificial Sequence: Synthetic oligonucleotide
caucuguuaagauguuccu

SEQ ID NO: 125742 - RNA, 19 nt, Artificial Sequence
  Description of Artificial Sequence: Synthetic oligonucleotide
ucaugcuauuagagaucau

SEQ ID NO: 125743 - RNA, 19 nt, Artificial Sequence
  Description of Artificial Sequence: Synthetic oligonucleotide
gggccuguuaaagcaaagc

SEQ ID NO: 125744 - RNA, 19 nt, Artificial Sequence
  Description of Artificial Sequence: Synthetic oligonucleotide
acgcgccuacuauauggcu

SEQ ID NO: 125745 - RNA, 19 nt, Artificial Sequence
  Description of Artificial Sequence: Synthetic oligonucleotide
gucguguuuaguuuuccuu

SEQ ID NO: 125746 - RNA, 19 nt, Artificial Sequence
  Description of Artificial Sequence: Synthetic oligonucleotide
uuaugacaauuugcucuau

SEQ ID NO: 125747 - RNA, 19 nt, Artificial Sequence
  Description of Artificial Sequence: Synthetic oligonucleotide
uauugagccugaggcuagu

SEQ ID NO: 125748 - RNA, 19 nt, Artificial Sequence
  Description of Artificial Sequence: Synthetic oligonucleotide
caccuucuagguuucauau

SEQ ID NO: 125749 - RNA, 19 nt, Artificial Sequence
  Description of Artificial Sequence: Synthetic oligonucleotide
gcguaugaacuaucuauaa

SEQ ID NO: 125750 - RNA, 19 nt, Artificial Sequence
  Description of Artificial Sequence: Synthetic oligonucleotide
caacugguuccuucgguua

SEQ ID NO: 125751 - RNA, 19 nt, Artificial Sequence
  Description of Artificial Sequence: Synthetic oligonucleotide
acacacacacacacacaca

SEQ ID NO: 125752 - RNA, 19 nt, Artificial Sequence
  Description of Artificial Sequence: Synthetic oligonucleotide
agcuggucuguuauugaaa

SEQ ID NO: 125753 - RNA, 19 nt, Artificial Sequence
  Description of Artificial Sequence: Synthetic oligonucleotide
acacacgcgccuacuauau

SEQ ID NO: 125754 - RNA, 19 nt, Artificial Sequence
  Description of Artificial Sequence: Synthetic oligonucleotide
ugacauguuuaaggcucau

SEQ ID NO: 125755 - RNA, 19 nt, Artificial Sequence
  Description of Artificial Sequence: Synthetic oligonucleotide
caaucaaaauagucguguu

SEQ ID NO: 125756 - RNA, 19 nt, Artificial Sequence
  Description of Artificial Sequence: Synthetic oligonucleotide
ccauacaauaagagucuca

SEQ ID NO: 125757 - RNA, 19 nt, Artificial Sequence
  Description of Artificial Sequence: Synthetic oligonucleotide
uucuugcauuacaguuuua

SEQ ID NO: 125758 - RNA, 19 nt, Artificial Sequence
  Description of Artificial Sequence: Synthetic oligonucleotide
gucaagcgucuguuguaga

SEQ ID NO: 125759 - RNA, 19 nt, Artificial Sequence
  Description of Artificial Sequence: Synthetic oligonucleotide
gucaagaaucaaccccgua

SEQ ID NO: 125760 - RNA, 19 nt, Artificial Sequence
  Description of Artificial Sequence: Synthetic oligonucleotide
accccguaacaaaaucagu

SEQ ID NO: 125761 - RNA, 19 nt, Artificial Sequence
  Description of Artificial Sequence: Synthetic oligonucleotide
cacacgcgccuacuauaug

SEQ ID NO: 125762 - RNA, 19 nt, Artificial Sequence
  Description of Artificial Sequence: Synthetic oligonucleotide
cuaugugucccagucucua

SEQ ID NO: 125763 - RNA, 19 nt, Artificial Sequence
  Description of Artificial Sequence: Synthetic oligonucleotide
caguaucacuggauuuuaa

SEQ ID NO: 125764 - RNA, 19 nt, Artificial Sequence
  Description of Artificial Sequence: Synthetic oligonucleotide
ccaaucaaaauagucgugu

SEQ ID NO: 125765 - RNA, 19 nt, Artificial Sequence
  Description of Artificial Sequence: Synthetic oligonucleotide
cauaugaucuaagggugau

SEQ ID NO: 125766 - RNA, 19 nt, Artificial Sequence
  Description of Artificial Sequence: Synthetic oligonucleotide
ggauggggcaaaugugaaa

SEQ ID NO: 125767 - RNA, 19 nt, Artificial Sequence
  Description of Artificial Sequence: Synthetic oligonucleotide
ugcugccgaaguacaucuu

SEQ ID NO: 125768 - RNA, 19 nt, Artificial Sequence
  Description of Artificial Sequence: Synthetic oligonucleotide
cgcgccuacuauauggcug

SEQ ID NO: 125769 - RNA, 19 nt, Artificial Sequence
  Description of Artificial Sequence: Synthetic oligonucleotide
ccgaaguacaucuucuagu

SEQ ID NO: 125770 - RNA, 19 nt, Artificial Sequence
  Description of Artificial Sequence: Synthetic oligonucleotide
gcacuuguuuagauuacaa

SEQ ID NO: 125771 - RNA, 19 nt, Artificial Sequence
  Description of Artificial Sequence: Synthetic oligonucleotide
gaauauggauggggcaaau

SEQ ID NO: 125772 - RNA, 19 nt, Artificial Sequence
  Description of Artificial Sequence: Synthetic oligonucleotide
gaguucagacuacgauuau

SEQ ID NO: 125773 - RNA, 19 nt, Artificial Sequence
  Description of Artificial Sequence: Synthetic oligonucleotide
acacacacacacgcgccua

SEQ ID NO: 125774 - RNA, 19 nt, Artificial Sequence
  Description of Artificial Sequence: Synthetic oligonucleotide
cgucaagcgucuguuguag

SEQ ID NO: 125775 - RNA, 19 nt, Artificial Sequence
  Description of Artificial Sequence: Synthetic oligonucleotide
caacucggauuaguggaaa

SEQ ID NO: 125776 - RNA, 19 nt, Artificial Sequence
  Description of Artificial Sequence: Synthetic oligonucleotide
agucuugggcuugccugaa

SEQ ID NO: 125777 - RNA, 19 nt, Artificial Sequence
  Description of Artificial Sequence: Synthetic oligonucleotide
cacacacacacacgcgccu

SEQ ID NO: 125778 - RNA, 19 nt, Artificial Sequence
  Description of Artificial Sequence: Synthetic oligonucleotide
cacaauccuagcccucagu

SEQ ID NO: 125779 - RNA, 19 nt, Artificial Sequence
  Description of Artificial Sequence: Synthetic oligonucleotide
ccaacucggauuaguggaa

SEQ ID NO: 125780 - RNA, 19 nt, Artificial Sequence
  Description of Artificial Sequence: Synthetic oligonucleotide
cgugaacaaggccugcuga

SEQ ID NO: 125781 - RNA, 19 nt, Artificial Sequence
  Description of Artificial Sequence: Synthetic oligonucleotide
auccuagcccucagugaaa

SEQ ID NO: 125782 - RNA, 19 nt, Artificial Sequence
  Description of Artificial Sequence: Synthetic oligonucleotide
gcgucuguuguagauggcu

SEQ ID NO: 125783 - RNA, 19 nt, Artificial Sequence
  Description of Artificial Sequence: Synthetic oligonucleotide
ccuguuagacugggaugug

SEQ ID NO: 125784 - RNA, 19 nt, Artificial Sequence
  Description of Artificial Sequence: Synthetic oligonucleotide
ggucaucggugauuucuau

SEQ ID NO: 125785 - RNA, 19 nt, Artificial Sequence
  Description of Artificial Sequence: Synthetic oligonucleotide
gcauaagggaaaagcuuau

SEQ ID NO: 125786 - RNA, 19 nt, Artificial Sequence
  Description of Artificial Sequence: Synthetic oligonucleotide
ggucaagaaucaaccccgu

SEQ ID NO: 125787 - RNA, 19 nt, Artificial Sequence
  Description of Artificial Sequence: Synthetic oligonucleotide
ccuuuagcguaugaacuau

SEQ ID NO: 125788 - RNA, 19 nt, Artificial Sequence
  Description of Artificial Sequence: Synthetic oligonucleotide
gcuaugugucccagucucu

SEQ ID NO: 125789 - RNA, 19 nt, Artificial Sequence
  Description of Artificial Sequence: Synthetic oligonucleotide
gggccuccgauuuccucau

SEQ ID NO: 125790 - RNA, 19 nt, Artificial Sequence
  Description of Artificial Sequence: Synthetic oligonucleotide
ggccuccgauuuccucauc

SEQ ID NO: 125791 - RNA, 19 nt, Artificial Sequence
  Description of Artificial Sequence: Synthetic oligonucleotide
ugaacauuagcuuaaagca

SEQ ID NO: 125792 - RNA, 19 nt, Artificial Sequence
  Description of Artificial Sequence: Synthetic oligonucleotide
uucacaacgauaaauaugu

SEQ ID NO: 125793 - RNA, 19 nt, Artificial Sequence
  Description of Artificial Sequence: Synthetic oligonucleotide
uacaucaacauccauaggc

SEQ ID NO: 125794 - RNA, 19 nt, Artificial Sequence
  Description of Artificial Sequence: Synthetic oligonucleotide
uuauuauugacguagaaua

SEQ ID NO: 125795 - RNA, 19 nt, Artificial Sequence
  Description of Artificial Sequence: Synthetic oligonucleotide
uuuauaggaguucaguuug

SEQ ID NO: 125796 - RNA, 19 nt, Artificial Sequence
  Description of Artificial Sequence: Synthetic oligonucleotide
aaggguauuauccaggcga

SEQ ID NO: 125797 - RNA, 19 nt, Artificial Sequence
  Description of Artificial Sequence: Synthetic oligonucleotide
agagacuaauuguacaagc

SEQ ID NO: 125798 - RNA, 19 nt, Artificial Sequence
  Description of Artificial Sequence: Synthetic oligonucleotide
aaucucauugaguaagcuc

SEQ ID NO: 125799 - RNA, 19 nt, Artificial Sequence
  Description of Artificial Sequence: Synthetic oligonucleotide
uauaccauuuuauaggagu

SEQ ID NO: 125800 - RNA, 19 nt, Artificial Sequence
  Description of Artificial Sequence: Synthetic oligonucleotide
acuaaauaacaacuuggac

SEQ ID NO: 125801 - RNA, 19 nt, Artificial Sequence
  Description of Artificial Sequence: Synthetic oligonucleotide
ugugcaagcaagcugccgg

SEQ ID NO: 125802 - RNA, 19 nt, Artificial Sequence
  Description of Artificial Sequence: Synthetic oligonucleotide
aacuacaucaagcucaaau

SEQ ID NO: 125803 - RNA, 19 nt, Artificial Sequence
  Description of Artificial Sequence: Synthetic oligonucleotide
agaggcguagucuaucucc

SEQ ID NO: 125804 - RNA, 19 nt, Artificial Sequence
  Description of Artificial Sequence: Synthetic oligonucleotide
agcucuuagaccucaagac

SEQ ID NO: 125805 - RNA, 19 nt, Artificial Sequence
  Description of Artificial Sequence: Synthetic oligonucleotide
uaucagaacucauguaucg

SEQ ID NO: 125806 - RNA, 19 nt, Artificial Sequence
  Description of Artificial Sequence: Synthetic oligonucleotide
aacuaacaaaaguggaauc

SEQ ID NO: 125807 - RNA, 19 nt, Artificial Sequence
  Description of Artificial Sequence: Synthetic oligonucleotide
auccguagcagccucaagc

SEQ ID NO: 125808 - RNA, 19 nt, Artificial Sequence
  Description of Artificial Sequence: Synthetic oligonucleotide
uauuauugacguagaauag

SEQ ID NO: 125809 - RNA, 19 nt, Artificial Sequence
  Description of Artificial Sequence: Synthetic oligonucleotide
auccacaagguaucaaucc

SEQ ID NO: 125810 - RNA, 19 nt, Artificial Sequence
  Description of Artificial Sequence: Synthetic oligonucleotide
uucaguuugaaccuacacu

SEQ ID NO: 125811 - RNA, 19 nt, Artificial Sequence
  Description of Artificial Sequence: Synthetic oligonucleotide
cuacaucaagcucaaaucg

SEQ ID NO: 125812 - RNA, 19 nt, Artificial Sequence
  Description of Artificial Sequence: Synthetic oligonucleotide
uggguaauaaucuucuaca

SEQ ID NO: 125813 - RNA, 19 nt, Artificial Sequence
  Description of Artificial Sequence: Synthetic oligonucleotide
acacgauacuuguuaaugc

SEQ ID NO: 125814 - RNA, 19 nt, Artificial Sequence
  Description of Artificial Sequence: Synthetic oligonucleotide
cuaaauaacaacuuggacu

SEQ ID NO: 125815 - RNA, 19 nt, Artificial Sequence
  Description of Artificial Sequence: Synthetic oligonucleotide
uuauugacguagaauaggu

SEQ ID NO: 125816 - RNA, 19 nt, Artificial Sequence
  Description of Artificial Sequence: Synthetic oligonucleotide
acaacgauaaauauguucu

SEQ ID NO: 125817 - RNA, 19 nt, Artificial Sequence
  Description of Artificial Sequence: Synthetic oligonucleotide
agauauaccaguuauuauu

SEQ ID NO: 125818 - RNA, 19 nt, Artificial Sequence
  Description of Artificial Sequence: Synthetic oligonucleotide
auuauugacguagaauagg

SEQ ID NO: 125819 - RNA, 19 nt, Artificial Sequence
  Description of Artificial Sequence: Synthetic oligonucleotide
aguuuguccauaguaaagg

SEQ ID NO: 125820 - RNA, 19 nt, Artificial Sequence
  Description of Artificial Sequence: Synthetic oligonucleotide
guacagacuccuuauaucc

SEQ ID NO: 125821 - RNA, 19 nt, Artificial Sequence
  Description of Artificial Sequence: Synthetic oligonucleotide
uacacacacacacacacac

SEQ ID NO: 125822 - RNA, 19 nt, Artificial Sequence
  Description of Artificial Sequence: Synthetic oligonucleotide
agaacucauguaucgcucc

SEQ ID NO: 125823 - RNA, 19 nt, Artificial Sequence
  Description of Artificial Sequence: Synthetic oligonucleotide
uuuugucucgcuuuaugcc

SEQ ID NO: 125824 - RNA, 19 nt, Artificial Sequence
  Description of Artificial Sequence: Synthetic oligonucleotide
caugccuacacacacacac

SEQ ID NO: 125825 - RNA, 19 nt, Artificial Sequence
  Description of Artificial Sequence: Synthetic oligonucleotide
uuaguuguucugcuuuccg

SEQ ID NO: 125826 - RNA, 19 nt, Artificial Sequence
  Description of Artificial Sequence: Synthetic oligonucleotide
guaaaggucaguaaccugc

SEQ ID NO: 125827 - RNA, 19 nt, Artificial Sequence
  Description of Artificial Sequence: Synthetic oligonucleotide
aagagagacuaauuguaca

SEQ ID NO: 125828 - RNA, 19 nt, Artificial Sequence
  Description of Artificial Sequence: Synthetic oligonucleotide
uuuuauaggaguucaguuu

SEQ ID NO: 125829 - RNA, 19 nt, Artificial Sequence
  Description of Artificial Sequence: Synthetic oligonucleotide
ucgcauaaagauauaccag

SEQ ID NO: 125830 - RNA, 19 nt, Artificial Sequence
  Description of Artificial Sequence: Synthetic oligonucleotide
ugcagucgcauaaagauau

SEQ ID NO: 125831 - RNA, 19 nt, Artificial Sequence
  Description of Artificial Sequence: Synthetic oligonucleotide
aguacuacaaugguaucuc

SEQ ID NO: 125832 - RNA, 19 nt, Artificial Sequence
  Description of Artificial Sequence: Synthetic oligonucleotide
uacuuguuaaugcuuacaa

SEQ ID NO: 125833 - RNA, 19 nt, Artificial Sequence
  Description of Artificial Sequence: Synthetic oligonucleotide
uccauaggcucuuugagac

SEQ ID NO: 125834 - RNA, 19 nt, Artificial Sequence
  Description of Artificial Sequence: Synthetic oligonucleotide
gagaucaccucucugagca

SEQ ID NO: 125835 - RNA, 19 nt, Artificial Sequence
  Description of Artificial Sequence: Synthetic oligonucleotide
uaguuuguccauaguaaag

SEQ ID NO: 125836 - RNA, 19 nt, Artificial Sequence
  Description of Artificial Sequence: Synthetic oligonucleotide
aacauuagcuuaaagcagu

SEQ ID NO: 125837 - RNA, 19 nt, Artificial Sequence
  Description of Artificial Sequence: Synthetic oligonucleotide
cuugggaacaaauccguag

SEQ ID NO: 125838 - RNA, 19 nt, Artificial Sequence
  Description of Artificial Sequence: Synthetic oligonucleotide
aauauaggcgugaauggug

SEQ ID NO: 125839 - RNA, 19 nt, Artificial Sequence
  Description of Artificial Sequence: Synthetic oligonucleotide
auaccaguuauuauugacg

SEQ ID NO: 125840 - RNA, 19 nt, Artificial Sequence
  Description of Artificial Sequence: Synthetic oligonucleotide
uggaacuaacaaaagugga

SEQ ID NO: 125841 - RNA, 19 nt, Artificial Sequence
  Description of Artificial Sequence: Synthetic oligonucleotide
cacacacacacacagacac

SEQ ID NO: 125842 - RNA, 19 nt, Artificial Sequence
  Description of Artificial Sequence: Synthetic oligonucleotide
acuagggcagaccaguaag

SEQ ID NO: 125843 - RNA, 19 nt, Artificial Sequence
  Description of Artificial Sequence: Synthetic oligonucleotide
agucgcauaaagauauacc

SEQ ID NO: 125844 - RNA, 19 nt, Artificial Sequence
  Description of Artificial Sequence: Synthetic oligonucleotide
caagauuggucucuaaaac

SEQ ID NO: 125845 - RNA, 19 nt, Artificial Sequence
  Description of Artificial Sequence: Synthetic oligonucleotide
auaggaguucaguuugaac

SEQ ID NO: 125846 - RNA, 19 nt, Artificial Sequence
  Description of Artificial Sequence: Synthetic oligonucleotide
uuaguuuguccauaguaaa

SEQ ID NO: 125847 - RNA, 19 nt, Artificial Sequence
  Description of Artificial Sequence: Synthetic oligonucleotide
uguugggcaggcuaguacc

SEQ ID NO: 125848 - RNA, 19 nt, Artificial Sequence
  Description of Artificial Sequence: Synthetic oligonucleotide
aaugaugcaugauuugcuu

SEQ ID NO: 125849 - RNA, 19 nt, Artificial Sequence
  Description of Artificial Sequence: Synthetic oligonucleotide
cguagaauagguuauauac

SEQ ID NO: 125850 - RNA, 19 nt, Artificial Sequence
  Description of Artificial Sequence: Synthetic oligonucleotide
cacaacgauaaauauguuc

SEQ ID NO: 125851 - RNA, 19 nt, Artificial Sequence
  Description of Artificial Sequence: Synthetic oligonucleotide
cacacacacacacacacag

SEQ ID NO: 125852 - RNA, 19 nt, Artificial Sequence
  Description of Artificial Sequence: Synthetic oligonucleotide
uuuggaaagcuuucuagau

SEQ ID NO: 125853 - RNA, 19 nt, Artificial Sequence
  Description of Artificial Sequence: Synthetic oligonucleotide
ucagaacucauguaucgcu

SEQ ID NO: 125854 - RNA, 19 nt, Artificial Sequence
  Description of Artificial Sequence: Synthetic oligonucleotide
gacacgauacuuguuaaug

SEQ ID NO: 125855 - RNA, 19 nt, Artificial Sequence
  Description of Artificial Sequence: Synthetic oligonucleotide
aaguacuacaaugguaucu

SEQ ID NO: 125856 - RNA, 19 nt, Artificial Sequence
  Description of Artificial Sequence: Synthetic oligonucleotide
uacaucucuuuauaaguac

SEQ ID NO: 125857 - RNA, 19 nt, Artificial Sequence
  Description of Artificial Sequence: Synthetic oligonucleotide
ucuaacaggggaucguaga

SEQ ID NO: 125858 - RNA, 19 nt, Artificial Sequence
  Description of Artificial Sequence: Synthetic oligonucleotide
uucuagauguacagacucc

SEQ ID NO: 125859 - RNA, 19 nt, Artificial Sequence
  Description of Artificial Sequence: Synthetic oligonucleotide
cauguaucgcuccacguag

SEQ ID NO: 125860 - RNA, 19 nt, Artificial Sequence
  Description of Artificial Sequence: Synthetic oligonucleotide
gaugacuucugacgugccg

SEQ ID NO: 125861 - RNA, 19 nt, Artificial Sequence
  Description of Artificial Sequence: Synthetic oligonucleotide
auaggcaagcgagaggugg

SEQ ID NO: 125862 - RNA, 19 nt, Artificial Sequence
  Description of Artificial Sequence: Synthetic oligonucleotide
ugaugggaaggaaacccag

SEQ ID NO: 125863 - RNA, 19 nt, Artificial Sequence
  Description of Artificial Sequence: Synthetic oligonucleotide
cacacacacacacacagac

SEQ ID NO: 125864 - RNA, 19 nt, Artificial Sequence
  Description of Artificial Sequence: Synthetic oligonucleotide
aaacucuaacaggggaucg

SEQ ID NO: 125865 - RNA, 19 nt, Artificial Sequence
  Description of Artificial Sequence: Synthetic oligonucleotide
uguacagacuccuuauauc

SEQ ID NO: 125866 - RNA, 19 nt, Artificial Sequence
  Description of Artificial Sequence: Synthetic oligonucleotide
gcugcaacggcucagaaac

SEQ ID NO: 125867 - RNA, 19 nt, Artificial Sequence
  Description of Artificial Sequence: Synthetic oligonucleotide
agagaucaccucucugagc

SEQ ID NO: 125868 - RNA, 19 nt, Artificial Sequence
  Description of Artificial Sequence: Synthetic oligonucleotide
cacacacacacacacacac

SEQ ID NO: 125869 - RNA, 19 nt, Artificial Sequence
  Description of Artificial Sequence: Synthetic oligonucleotide
guaaaggcaauauaggcgu

SEQ ID NO: 125870 - RNA, 19 nt, Artificial Sequence
  Description of Artificial Sequence: Synthetic oligonucleotide
acucauguaucgcuccacg

SEQ ID NO: 125871 - RNA, 19 nt, Artificial Sequence
  Description of Artificial Sequence: Synthetic oligonucleotide
aaacccagguaucauuuaa

SEQ ID NO: 125872 - RNA, 19 nt, Artificial Sequence
  Description of Artificial Sequence: Synthetic oligonucleotide
uugacguagaauagguuau

SEQ ID NO: 125873 - RNA, 19 nt, Artificial Sequence
  Description of Artificial Sequence: Synthetic oligonucleotide
aaugugugugucugugugu

SEQ ID NO: 125874 - RNA, 19 nt, Artificial Sequence
  Description of Artificial Sequence: Synthetic oligonucleotide
uguguaguacacaugccua

SEQ ID NO: 125875 - RNA, 19 nt, Artificial Sequence
  Description of Artificial Sequence: Synthetic oligonucleotide
acaaauccguagcagccuc

SEQ ID NO: 125876 - RNA, 19 nt, Artificial Sequence
  Description of Artificial Sequence: Synthetic oligonucleotide
uaagcucuuagaccucaag

SEQ ID NO: 125877 - RNA, 19 nt, Artificial Sequence
  Description of Artificial Sequence: Synthetic oligonucleotide
aucagaacucauguaucgc

SEQ ID NO: 125878 - RNA, 19 nt, Artificial Sequence
  Description of Artificial Sequence: Synthetic oligonucleotide
gaaaagugccaguuccagc

SEQ ID NO: 125879 - RNA, 19 nt, Artificial Sequence
  Description of Artificial Sequence: Synthetic oligonucleotide
gcaauauaggcgugaaugg

SEQ ID NO: 125880 - RNA, 19 nt, Artificial Sequence
  Description of Artificial Sequence: Synthetic oligonucleotide
ugccuacacacacacacac

SEQ ID NO: 125881 - RNA, 19 nt, Artificial Sequence
  Description of Artificial Sequence: Synthetic oligonucleotide
ugugccguauuugacacga

SEQ ID NO: 125882 - RNA, 19 nt, Artificial Sequence
  Description of Artificial Sequence: Synthetic oligonucleotide
uguagcucguuccuuugga

SEQ ID NO: 125883 - RNA, 19 nt, Artificial Sequence
  Description of Artificial Sequence: Synthetic oligonucleotide
agcuagagcacuuaugcua

SEQ ID NO: 125884 - RNA, 19 nt, Artificial Sequence
  Description of Artificial Sequence: Synthetic oligonucleotide
cacacacacagacacacac

SEQ ID NO: 125885 - RNA, 19 nt, Artificial Sequence
  Description of Artificial Sequence: Synthetic oligonucleotide
uacuaaaucugaagccaca

SEQ ID NO: 125886 - RNA, 19 nt, Artificial Sequence
  Description of Artificial Sequence: Synthetic oligonucleotide
gacuucauucccuguuggg

SEQ ID NO: 125887 - RNA, 19 nt, Artificial Sequence
  Description of Artificial Sequence: Synthetic oligonucleotide
ucggauacgccgcaaauuu

SEQ ID NO: 125888 - RNA, 19 nt, Artificial Sequence
  Description of Artificial Sequence: Synthetic oligonucleotide
ucauguaucgcuccacgua

SEQ ID NO: 125889 - RNA, 19 nt, Artificial Sequence
  Description of Artificial Sequence: Synthetic oligonucleotide
ugccauuucacgaggcaca

SEQ ID NO: 125890 - RNA, 19 nt, Artificial Sequence
  Description of Artificial Sequence: Synthetic oligonucleotide
uaguuguucugcuuuccgc

SEQ ID NO: 125891 - RNA, 19 nt, Artificial Sequence
  Description of Artificial Sequence: Synthetic oligonucleotide
aguaaaggucaguaaccug

SEQ ID NO: 125892 - RNA, 19 nt, Artificial Sequence
  Description of Artificial Sequence: Synthetic oligonucleotide
ugguaucucccuuugguaa

SEQ ID NO: 125893 - RNA, 19 nt, Artificial Sequence
  Description of Artificial Sequence: Synthetic oligonucleotide
uuacaagaggcguagucua

SEQ ID NO: 125894 - RNA, 19 nt, Artificial Sequence
  Description of Artificial Sequence: Synthetic oligonucleotide
aucccucuuaacuuuugag

SEQ ID NO: 125895 - RNA, 19 nt, Artificial Sequence
  Description of Artificial Sequence: Synthetic oligonucleotide
accacgcugacacuuucgg

SEQ ID NO: 125896 - RNA, 19 nt, Artificial Sequence
  Description of Artificial Sequence: Synthetic oligonucleotide
uguauccagaagcucaauu

SEQ ID NO: 125897 - RNA, 19 nt, Artificial Sequence
  Description of Artificial Sequence: Synthetic oligonucleotide
ccaguuauuauugacguag

SEQ ID NO: 125898 - RNA, 19 nt, Artificial Sequence
  Description of Artificial Sequence: Synthetic oligonucleotide
uuuaugccuagcaccuccc

SEQ ID NO: 125899 - RNA, 19 nt, Artificial Sequence
  Description of Artificial Sequence: Synthetic oligonucleotide
ugcuuacacgcucauggga

SEQ ID NO: 125900 - RNA, 19 nt, Artificial Sequence
  Description of Artificial Sequence: Synthetic oligonucleotide
gguagcuagagcccagucg

SEQ ID NO: 125901 - RNA, 19 nt, Artificial Sequence
  Description of Artificial Sequence: Synthetic oligonucleotide
auguacagacuccuuauau

SEQ ID NO: 125902 - RNA, 19 nt, Artificial Sequence
  Description of Artificial Sequence: Synthetic oligonucleotide
uccguagcagccucaagca

SEQ ID NO: 125903 - RNA, 19 nt, Artificial Sequence
  Description of Artificial Sequence: Synthetic oligonucleotide
aagcuagagcacuuaugcu

SEQ ID NO: 125904 - RNA, 19 nt, Artificial Sequence
  Description of Artificial Sequence: Synthetic oligonucleotide
ucugacgaugcucuggauu

SEQ ID NO: 125905 - RNA, 19 nt, Artificial Sequence
  Description of Artificial Sequence: Synthetic oligonucleotide
ugacgugccgccaagggua

SEQ ID NO: 125906 - RNA, 19 nt, Artificial Sequence
  Description of Artificial Sequence: Synthetic oligonucleotide
ucguuuacaagaggcguag

SEQ ID NO: 125907 - RNA, 19 nt, Artificial Sequence
  Description of Artificial Sequence: Synthetic oligonucleotide
ugagucuauguugccgucg

SEQ ID NO: 125908 - RNA, 19 nt, Artificial Sequence
  Description of Artificial Sequence: Synthetic oligonucleotide
ccaaguaaaggucaguaac

SEQ ID NO: 125909 - RNA, 19 nt, Artificial Sequence
  Description of Artificial Sequence: Synthetic oligonucleotide
guuaaggggcuuugaauac

SEQ ID NO: 125910 - RNA, 19 nt, Artificial Sequence
  Description of Artificial Sequence: Synthetic oligonucleotide
uuauaggaguucaguuuga

SEQ ID NO: 125911 - RNA, 19 nt, Artificial Sequence
  Description of Artificial Sequence: Synthetic oligonucleotide
guacauguaguccuccgac

SEQ ID NO: 125912 - RNA, 19 nt, Artificial Sequence
  Description of Artificial Sequence: Synthetic oligonucleotide
acuaauuguacaagcucag

SEQ ID NO: 125913 - RNA, 19 nt, Artificial Sequence
  Description of Artificial Sequence: Synthetic oligonucleotide
caaaaguggaaucuucaga

SEQ ID NO: 125914 - RNA, 19 nt, Artificial Sequence
  Description of Artificial Sequence: Synthetic oligonucleotide
caccauuaugcuucuuagg

SEQ ID NO: 125915 - RNA, 19 nt, Artificial Sequence
  Description of Artificial Sequence: Synthetic oligonucleotide
gagcacuuaugcuagcaca

SEQ ID NO: 125916 - RNA, 19 nt, Artificial Sequence
  Description of Artificial Sequence: Synthetic oligonucleotide
ucaucugacauuaguuguu

SEQ ID NO: 125917 - RNA, 19 nt, Artificial Sequence
  Description of Artificial Sequence: Synthetic oligonucleotide
uggucucuaaaacuacauc

SEQ ID NO: 125918 - RNA, 19 nt, Artificial Sequence
  Description of Artificial Sequence: Synthetic oligonucleotide
ucugagagaucaccucucu

SEQ ID NO: 125919 - RNA, 19 nt, Artificial Sequence
  Description of Artificial Sequence: Synthetic oligonucleotide
cucuuuacacagaggaguc

SEQ ID NO: 125920 - RNA, 19 nt, Artificial Sequence
  Description of Artificial Sequence: Synthetic oligonucleotide
uaugcuucuuaggugcccc

SEQ ID NO: 125921 - RNA, 19 nt, Artificial Sequence
  Description of Artificial Sequence: Synthetic oligonucleotide
ucagcagacaagcgggaaa

SEQ ID NO: 125922 - RNA, 19 nt, Artificial Sequence
  Description of Artificial Sequence: Synthetic oligonucleotide
aucguagaugugcucaagu

SEQ ID NO: 125923 - RNA, 19 nt, Artificial Sequence
  Description of Artificial Sequence: Synthetic oligonucleotide
cacacacacacagacacac

SEQ ID NO: 125924 - RNA, 19 nt, Artificial Sequence
  Description of Artificial Sequence: Synthetic oligonucleotide
ugcuagcacaucaaagcau

SEQ ID NO: 125925 - RNA, 19 nt, Artificial Sequence
  Description of Artificial Sequence: Synthetic oligonucleotide
cucgcuuuaugccuagcac

SEQ ID NO: 125926 - RNA, 19 nt, Artificial Sequence
  Description of Artificial Sequence: Synthetic oligonucleotide
aaucugaugcagucgcaua

SEQ ID NO: 125927 - RNA, 19 nt, Artificial Sequence
  Description of Artificial Sequence: Synthetic oligonucleotide
acacacacagacacacacc

SEQ ID NO: 125928 - RNA, 19 nt, Artificial Sequence
  Description of Artificial Sequence: Synthetic oligonucleotide
gaugagucuauguugccgu

SEQ ID NO: 125929 - RNA, 19 nt, Artificial Sequence
  Description of Artificial Sequence: Synthetic oligonucleotide
uaaaggcaauauaggcgug

SEQ ID NO: 125930 - RNA, 19 nt, Artificial Sequence
  Description of Artificial Sequence: Synthetic oligonucleotide
ugaccaacgcucugcuucc

SEQ ID NO: 125931 - RNA, 19 nt, Artificial Sequence
  Description of Artificial Sequence: Synthetic oligonucleotide
ugcaacggcucagaaacca

SEQ ID NO: 125932 - RNA, 19 nt, Artificial Sequence
  Description of Artificial Sequence: Synthetic oligonucleotide
cagaagcucaauugucagc

SEQ ID NO: 125933 - RNA, 19 nt, Artificial Sequence
  Description of Artificial Sequence: Synthetic oligonucleotide
agucguuuacaagaggcgu

SEQ ID NO: 125934 - RNA, 19 nt, Artificial Sequence
  Description of Artificial Sequence: Synthetic oligonucleotide
agcagagaaucugaugcag

SEQ ID NO: 125935 - RNA, 19 nt, Artificial Sequence
  Description of Artificial Sequence: Synthetic oligonucleotide
cauugaguaagcucuuaga

SEQ ID NO: 125936 - RNA, 19 nt, Artificial Sequence
  Description of Artificial Sequence: Synthetic oligonucleotide
uaacaggggaucguagaug

SEQ ID NO: 125937 - RNA, 19 nt, Artificial Sequence
  Description of Artificial Sequence: Synthetic oligonucleotide
guagcuagagcccagucgu

SEQ ID NO: 125938 - RNA, 19 nt, Artificial Sequence
  Description of Artificial Sequence: Synthetic oligonucleotide
ccuacacacacacacacac

SEQ ID NO: 125939 - RNA, 19 nt, Artificial Sequence
  Description of Artificial Sequence: Synthetic oligonucleotide
gauuggucucuaaaacuac

SEQ ID NO: 125940 - RNA, 19 nt, Artificial Sequence
  Description of Artificial Sequence: Synthetic oligonucleotide
uccgacuugaucacauaua

SEQ ID NO: 125941 - RNA, 19 nt, Artificial Sequence
  Description of Artificial Sequence: Synthetic oligonucleotide
uuucggauacgccgcaaau

SEQ ID NO: 125942 - RNA, 19 nt, Artificial Sequence
  Description of Artificial Sequence: Synthetic oligonucleotide
ugguacguugacuccagaa

SEQ ID NO: 125943 - RNA, 19 nt, Artificial Sequence
  Description of Artificial Sequence: Synthetic oligonucleotide
gaacccggauuguugcaag

SEQ ID NO: 125944 - RNA, 19 nt, Artificial Sequence
  Description of Artificial Sequence: Synthetic oligonucleotide
aauccguagcagccucaag

SEQ ID NO: 125945 - RNA, 19 nt, Artificial Sequence
  Description of Artificial Sequence: Synthetic oligonucleotide
ucuagccccucacccauga

SEQ ID NO: 125946 - RNA, 19 nt, Artificial Sequence
  Description of Artificial Sequence: Synthetic oligonucleotide
agauuggucucuaaaacua

SEQ ID NO: 125947 - RNA, 19 nt, Artificial Sequence
  Description of Artificial Sequence: Synthetic oligonucleotide
acaagaggcguagucuauc

SEQ ID NO: 125948 - RNA, 19 nt, Artificial Sequence
  Description of Artificial Sequence: Synthetic oligonucleotide
cagaacucauguaucgcuc

SEQ ID NO: 125949 - RNA, 19 nt, Artificial Sequence
  Description of Artificial Sequence: Synthetic oligonucleotide
ucguagaugugcucaaguu

SEQ ID NO: 125950 - RNA, 19 nt, Artificial Sequence
  Description of Artificial Sequence: Synthetic oligonucleotide
gacgcuugcuuacacgcuc

SEQ ID NO: 125951 - RNA, 19 nt, Artificial Sequence
  Description of Artificial Sequence: Synthetic oligonucleotide
auacgccgcaaauuucuug

SEQ ID NO: 125952 - RNA, 19 nt, Artificial Sequence
  Description of Artificial Sequence: Synthetic oligonucleotide
auauaggcgugaaugguga

SEQ ID NO: 125953 - RNA, 19 nt, Artificial Sequence
  Description of Artificial Sequence: Synthetic oligonucleotide
aacucuaacaggggaucgu

SEQ ID NO: 125954 - RNA, 19 nt, Artificial Sequence
  Description of Artificial Sequence: Synthetic oligonucleotide
augugugugucugugugug

SEQ ID NO: 125955 - RNA, 19 nt, Artificial Sequence
  Description of Artificial Sequence: Synthetic oligonucleotide
cucuaacaggggaucguag

SEQ ID NO: 125956 - RNA, 19 nt, Artificial Sequence
  Description of Artificial Sequence: Synthetic oligonucleotide
ucugugugugucugugugu

SEQ ID NO: 125957 - RNA, 19 nt, Artificial Sequence
  Description of Artificial Sequence: Synthetic oligonucleotide
gccgcaaauuucuugggag

SEQ ID NO: 125958 - RNA, 19 nt, Artificial Sequence
  Description of Artificial Sequence: Synthetic oligonucleotide
guacuacaaugguaucucc

SEQ ID NO: 125959 - RNA, 19 nt, Artificial Sequence
  Description of Artificial Sequence: Synthetic oligonucleotide
agacaaacucuaacagggg

SEQ ID NO: 125960 - RNA, 19 nt, Artificial Sequence
  Description of Artificial Sequence: Synthetic oligonucleotide
uucuuuccgauggaugacu

SEQ ID NO: 125961 - RNA, 19 nt, Artificial Sequence
  Description of Artificial Sequence: Synthetic oligonucleotide
guagucuaucuccauugca

SEQ ID NO: 125962 - RNA, 19 nt, Artificial Sequence
  Description of Artificial Sequence: Synthetic oligonucleotide
ugugugucugugugugucu

SEQ ID NO: 125963 - RNA, 19 nt, Artificial Sequence
  Description of Artificial Sequence: Synthetic oligonucleotide
cacuuaugcuagcacauca

SEQ ID NO: 125964 - RNA, 19 nt, Artificial Sequence
  Description of Artificial Sequence: Synthetic oligonucleotide
uucccuguugggcaggcua

SEQ ID NO: 125965 - RNA, 19 nt, Artificial Sequence
  Description of Artificial Sequence: Synthetic oligonucleotide
ucgagcagacuccgcacca

SEQ ID NO: 125966 - RNA, 19 nt, Artificial Sequence
  Description of Artificial Sequence: Synthetic oligonucleotide
gagucuauguugccgucga

SEQ ID NO: 125967 - RNA, 19 nt, Artificial Sequence
  Description of Artificial Sequence: Synthetic oligonucleotide
uauaggaguucaguuugaa

SEQ ID NO: 125968 - RNA, 19 nt, Artificial Sequence
  Description of Artificial Sequence: Synthetic oligonucleotide
caggcgaaauuuagcuugc

SEQ ID NO: 125969 - RNA, 19 nt, Artificial Sequence
  Description of Artificial Sequence: Synthetic oligonucleotide
auacugugccguauuugac

SEQ ID NO: 125970 - RNA, 19 nt, Artificial Sequence
  Description of Artificial Sequence: Synthetic oligonucleotide
gugugugucugugugugag

SEQ ID NO: 125971 - RNA, 19 nt, Artificial Sequence
  Description of Artificial Sequence: Synthetic oligonucleotide
ccggauuguugcaagauug

SEQ ID NO: 125972 - RNA, 19 nt, Artificial Sequence
  Description of Artificial Sequence: Synthetic oligonucleotide
cagcagacaagcgggaaag

SEQ ID NO: 125973 - RNA, 19 nt, Artificial Sequence
  Description of Artificial Sequence: Synthetic oligonucleotide
ugagcuaccugugcuggcu

SEQ ID NO: 125974 - RNA, 19 nt, Artificial Sequence
  Description of Artificial Sequence: Synthetic oligonucleotide
gcuagagcacuuaugcuag

SEQ ID NO: 125975 - RNA, 19 nt, Artificial Sequence
  Description of Artificial Sequence: Synthetic oligonucleotide
accaacgcucugcuuccac

SEQ ID NO: 125976 - RNA, 19 nt, Artificial Sequence
  Description of Artificial Sequence: Synthetic oligonucleotide
aacccggauuguugcaaga

SEQ ID NO: 125977 - RNA, 19 nt, Artificial Sequence
  Description of Artificial Sequence: Synthetic oligonucleotide
cugacacuuucggauacgc

SEQ ID NO: 125978 - RNA, 19 nt, Artificial Sequence
  Description of Artificial Sequence: Synthetic oligonucleotide
cagucgcauaaagauauac

SEQ ID NO: 125979 - RNA, 19 nt, Artificial Sequence
  Description of Artificial Sequence: Synthetic oligonucleotide
aauuugccgcucagcuugg

SEQ ID NO: 125980 - RNA, 19 nt, Artificial Sequence
  Description of Artificial Sequence: Synthetic oligonucleotide
acguagaauagguuauaua

SEQ ID NO: 125981 - RNA, 19 nt, Artificial Sequence
  Description of Artificial Sequence: Synthetic oligonucleotide
gagcccagucguuuacaag

SEQ ID NO: 125982 - RNA, 19 nt, Artificial Sequence
  Description of Artificial Sequence: Synthetic oligonucleotide
uccuguacacuugggcugc

SEQ ID NO: 125983 - RNA, 19 nt, Artificial Sequence
  Description of Artificial Sequence: Synthetic oligonucleotide
uccacguagucugaccaac

SEQ ID NO: 125984 - RNA, 19 nt, Artificial Sequence
  Description of Artificial Sequence: Synthetic oligonucleotide
cugugugugucugugugug

SEQ ID NO: 125985 - RNA, 19 nt, Artificial Sequence
  Description of Artificial Sequence: Synthetic oligonucleotide
agggcucgguagcuagagc

SEQ ID NO: 125986 - RNA, 19 nt, Artificial Sequence
  Description of Artificial Sequence: Synthetic oligonucleotide
uccuccgacuugaucacau

SEQ ID NO: 125987 - RNA, 19 nt, Artificial Sequence
  Description of Artificial Sequence: Synthetic oligonucleotide
gcguagucuaucuccauug

SEQ ID NO: 125988 - RNA, 19 nt, Artificial Sequence
  Description of Artificial Sequence: Synthetic oligonucleotide
cugcuguauuacuaaauaa

SEQ ID NO: 125989 - RNA, 19 nt, Artificial Sequence
  Description of Artificial Sequence: Synthetic oligonucleotide
agacggagcuguauggcag

SEQ ID NO: 125990 - RNA, 19 nt, Artificial Sequence
  Description of Artificial Sequence: Synthetic oligonucleotide
uuacacgcucaugggacug

SEQ ID NO: 125991 - RNA, 19 nt, Artificial Sequence
  Description of Artificial Sequence: Synthetic oligonucleotide
aaauccguagcagccucaa

SEQ ID NO: 125992 - RNA, 19 nt, Artificial Sequence
  Description of Artificial Sequence: Synthetic oligonucleotide
ggaacuaacaaaaguggaa

SEQ ID NO: 125993 - RNA, 19 nt, Artificial Sequence
  Description of Artificial Sequence: Synthetic oligonucleotide
ugucucgcuuuaugccuag

SEQ ID NO: 125994 - RNA, 19 nt, Artificial Sequence
  Description of Artificial Sequence: Synthetic oligonucleotide
gucgagcagacuccgcacc

SEQ ID NO: 125995 - RNA, 19 nt, Artificial Sequence
  Description of Artificial Sequence: Synthetic oligonucleotide
ucuuaacuuuugagcugcu

SEQ ID NO: 125996 - RNA, 19 nt, Artificial Sequence
  Description of Artificial Sequence: Synthetic oligonucleotide
aauugacaguauauacauu

SEQ ID NO: 125997 - RNA, 19 nt, Artificial Sequence
  Description of Artificial Sequence: Synthetic oligonucleotide
acgccgcaaauuucuuggg

SEQ ID NO: 125998 - RNA, 19 nt, Artificial Sequence
  Description of Artificial Sequence: Synthetic oligonucleotide
cacacacagacacacaccu

SEQ ID NO: 125999 - RNA, 19 nt, Artificial Sequence
  Description of Artificial Sequence: Synthetic oligonucleotide
aacccagguaucauuuaaa

SEQ ID NO: 126000 - RNA, 19 nt, Artificial Sequence
  Description of Artificial Sequence: Synthetic oligonucleotide
aaauuucuugggagaaaua

SEQ ID NO: 126001 - RNA, 19 nt, Artificial Sequence
  Description of Artificial Sequence: Synthetic oligonucleotide
agcacuuaugcuagcacau

SEQ ID NO: 126002 - RNA, 19 nt, Artificial Sequence
  Description of Artificial Sequence: Synthetic oligonucleotide
cuagagcacuuaugcuagc

SEQ ID NO: 126003 - RNA, 19 nt, Artificial Sequence
  Description of Artificial Sequence: Synthetic oligonucleotide
agacaagcgggaaaguuuu

SEQ ID NO: 126004 - RNA, 19 nt, Artificial Sequence
  Description of Artificial Sequence: Synthetic oligonucleotide
ugugugugucuguguguga

SEQ ID NO: 126005 - RNA, 19 nt, Artificial Sequence
  Description of Artificial Sequence: Synthetic oligonucleotide
gccguauuugacacgauac

SEQ ID NO: 126006 - RNA, 19 nt, Artificial Sequence
  Description of Artificial Sequence: Synthetic oligonucleotide
uucggauacgccgcaaauu

SEQ ID NO: 126007 - RNA, 19 nt, Artificial Sequence
  Description of Artificial Sequence: Synthetic oligonucleotide
uauaggcgugaauggugaa

SEQ ID NO: 126008 - RNA, 19 nt, Artificial Sequence
  Description of Artificial Sequence: Synthetic oligonucleotide
gcuuacacgcucaugggac

SEQ ID NO: 126009 - RNA, 19 nt, Artificial Sequence
  Description of Artificial Sequence: Synthetic oligonucleotide
ugugugugucugugugugu

SEQ ID NO: 126010 - RNA, 19 nt, Artificial Sequence
  Description of Artificial Sequence: Synthetic oligonucleotide
acuuaugcuagcacaucaa

SEQ ID NO: 126011 - RNA, 19 nt, Artificial Sequence
  Description of Artificial Sequence: Synthetic oligonucleotide
agcuguauggcagggcuau

SEQ ID NO: 126012 - RNA, 19 nt, Artificial Sequence
  Description of Artificial Sequence: Synthetic oligonucleotide
cuacacacacacacacaca

SEQ ID NO: 126013 - RNA, 19 nt, Artificial Sequence
  Description of Artificial Sequence: Synthetic oligonucleotide
cacgcugacacuuucggau

SEQ ID NO: 126014 - RNA, 19 nt, Artificial Sequence
  Description of Artificial Sequence: Synthetic oligonucleotide
ucacaacgauaaauauguu

SEQ ID NO: 126015 - RNA, 19 nt, Artificial Sequence
  Description of Artificial Sequence: Synthetic oligonucleotide
gaggcguagucuaucucca

SEQ ID NO: 126016 - RNA, 19 nt, Artificial Sequence
  Description of Artificial Sequence: Synthetic oligonucleotide
cugugccguauuugacacg

SEQ ID NO: 126017 - RNA, 19 nt, Artificial Sequence
  Description of Artificial Sequence: Synthetic oligonucleotide
ugacguagaauagguuaua

SEQ ID NO: 126018 - RNA, 19 nt, Artificial Sequence
  Description of Artificial Sequence: Synthetic oligonucleotide
ggcgaaauuuagcuugcuc

SEQ ID NO: 126019 - RNA, 19 nt, Artificial Sequence
  Description of Artificial Sequence: Synthetic oligonucleotide
gugugugucuguguguguc

SEQ ID NO: 126020 - RNA, 19 nt, Artificial Sequence
  Description of Artificial Sequence: Synthetic oligonucleotide
caaauuucuugggagaaau

SEQ ID NO: 126021 - RNA, 19 nt, Artificial Sequence
  Description of Artificial Sequence: Synthetic oligonucleotide
gcuaucacuuuugucucgc

SEQ ID NO: 126022 - RNA, 19 nt, Artificial Sequence
  Description of Artificial Sequence: Synthetic oligonucleotide
accaguuauuauugacgua

SEQ ID NO: 126023 - RNA, 19 nt, Artificial Sequence
  Description of Artificial Sequence: Synthetic oligonucleotide
cuuagaccucaagaccuuc

SEQ ID NO: 126024 - RNA, 19 nt, Artificial Sequence
  Description of Artificial Sequence: Synthetic oligonucleotide
cucgguagcuagagcccag

SEQ ID NO: 126025 - RNA, 19 nt, Artificial Sequence
  Description of Artificial Sequence: Synthetic oligonucleotide
agaacccggauuguugcaa

SEQ ID NO: 126026 - RNA, 19 nt, Artificial Sequence
  Description of Artificial Sequence: Synthetic oligonucleotide
gugugcaagcaagcugccg

SEQ ID NO: 126027 - RNA, 19 nt, Artificial Sequence
  Description of Artificial Sequence: Synthetic oligonucleotide
agcucaaaucguucaucuu

SEQ ID NO: 126028 - RNA, 19 nt, Artificial Sequence
  Description of Artificial Sequence: Synthetic oligonucleotide
gggaucguagaugugcuca

SEQ ID NO: 126029 - RNA, 19 nt, Artificial Sequence
  Description of Artificial Sequence: Synthetic oligonucleotide
cugcaacggcucagaaacc

SEQ ID NO: 126030 - RNA, 19 nt, Artificial Sequence
  Description of Artificial Sequence: Synthetic oligonucleotide
aagccguucuccgguacau

SEQ ID NO: 126031 - RNA, 19 nt, Artificial Sequence
  Description of Artificial Sequence: Synthetic oligonucleotide
acgauacuuguuaaugcuu

SEQ ID NO: 126032 - RNA, 19 nt, Artificial Sequence
  Description of Artificial Sequence: Synthetic oligonucleotide
agcugcuguauuacuaaau

SEQ ID NO: 126033 - RNA, 19 nt, Artificial Sequence
  Description of Artificial Sequence: Synthetic oligonucleotide
acucuaacaggggaucgua

SEQ ID NO: 126034 - RNA, 19 nt, Artificial Sequence
  Description of Artificial Sequence: Synthetic oligonucleotide
gacauuaguuguucugcuu

SEQ ID NO: 126035 - RNA, 19 nt, Artificial Sequence
  Description of Artificial Sequence: Synthetic oligonucleotide
acacacacacacacagaca

SEQ ID NO: 126036 - RNA, 19 nt, Artificial Sequence
  Description of Artificial Sequence: Synthetic oligonucleotide
gguaucucccuuugguaaa

SEQ ID NO: 126037 - RNA, 19 nt, Artificial Sequence
  Description of Artificial Sequence: Synthetic oligonucleotide
cggauuguugcaagauugg

SEQ ID NO: 126038 - RNA, 19 nt, Artificial Sequence
  Description of Artificial Sequence: Synthetic oligonucleotide
gcuccacguagucugacca

SEQ ID NO: 126039 - RNA, 19 nt, Artificial Sequence
  Description of Artificial Sequence: Synthetic oligonucleotide
cuccuugguccauuuaucu

SEQ ID NO: 126040 - RNA, 19 nt, Artificial Sequence
  Description of Artificial Sequence: Synthetic oligonucleotide
caauauaggcgugaauggu

SEQ ID NO: 126041 - RNA, 19 nt, Artificial Sequence
  Description of Artificial Sequence: Synthetic oligonucleotide
acgcugacacuuucggaua

SEQ ID NO: 126042 - RNA, 19 nt, Artificial Sequence
  Description of Artificial Sequence: Synthetic oligonucleotide
ccacguagucugaccaacg

SEQ ID NO: 126043 - RNA, 19 nt, Artificial Sequence
  Description of Artificial Sequence: Synthetic oligonucleotide
acaagaagcuagagcacuu

SEQ ID NO: 126044 - RNA, 19 nt, Artificial Sequence
  Description of Artificial Sequence: Synthetic oligonucleotide
cguucuccgguacauguag

SEQ ID NO: 126045 - RNA, 19 nt, Artificial Sequence
  Description of Artificial Sequence: Synthetic oligonucleotide
gguauuauccaggcgaaau

SEQ ID NO: 126046 - RNA, 19 nt, Artificial Sequence
  Description of Artificial Sequence: Synthetic oligonucleotide
gacguagaauagguuauau

SEQ ID NO: 126047 - RNA, 19 nt, Artificial Sequence
  Description of Artificial Sequence: Synthetic oligonucleotide
acacacacacacacacaca

SEQ ID NO: 126048 - RNA, 19 nt, Artificial Sequence
  Description of Artificial Sequence: Synthetic oligonucleotide
gagcuaccugugcuggcuc

SEQ ID NO: 126049 - RNA, 19 nt, Artificial Sequence
  Description of Artificial Sequence: Synthetic oligonucleotide
ucgcgguuuucuucuucaa

SEQ ID NO: 126050 - RNA, 19 nt, Artificial Sequence
  Description of Artificial Sequence: Synthetic oligonucleotide
ccguccuguacacuugggc

SEQ ID NO: 126051 - RNA, 19 nt, Artificial Sequence
  Description of Artificial Sequence: Synthetic oligonucleotide
gucguuuacaagaggcgua

SEQ ID NO: 126052 - RNA, 19 nt, Artificial Sequence
  Description of Artificial Sequence: Synthetic oligonucleotide
auuucacgaggcacaugcu

SEQ ID NO: 126053 - RNA, 19 nt, Artificial Sequence
  Description of Artificial Sequence: Synthetic oligonucleotide
augccuacacacacacaca

SEQ ID NO: 126054 - RNA, 19 nt, Artificial Sequence
  Description of Artificial Sequence: Synthetic oligonucleotide
uuccgcugguacguugacu

SEQ ID NO: 126055 - RNA, 19 nt, Artificial Sequence
  Description of Artificial Sequence: Synthetic oligonucleotide
aguccguccuguacacuug

SEQ ID NO: 126056 - RNA, 19 nt, Artificial Sequence
  Description of Artificial Sequence: Synthetic oligonucleotide
ucgguagcuagagcccagu

SEQ ID NO: 126057 - RNA, 19 nt, Artificial Sequence
  Description of Artificial Sequence: Synthetic oligonucleotide
gccaaguaaaggucaguaa

SEQ ID NO: 126058 - RNA, 19 nt, Artificial Sequence
  Description of Artificial Sequence: Synthetic oligonucleotide
acacacacacacacacaga

SEQ ID NO: 126059 - RNA, 19 nt, Artificial Sequence
  Description of Artificial Sequence: Synthetic oligonucleotide
ccgauggaugacuucugac

SEQ ID NO: 126060 - RNA, 19 nt, Artificial Sequence
  Description of Artificial Sequence: Synthetic oligonucleotide
agaucaccucucugagcaa

SEQ ID NO: 126061 - RNA, 19 nt, Artificial Sequence
  Description of Artificial Sequence: Synthetic oligonucleotide
augcagucgcauaaagaua

SEQ ID NO: 126062 - RNA, 19 nt, Artificial Sequence
  Description of Artificial Sequence: Synthetic oligonucleotide
acacacacacacagacaca

SEQ ID NO: 126063 - RNA, 19 nt, Artificial Sequence
  Description of Artificial Sequence: Synthetic oligonucleotide
acccggauuguugcaagau

SEQ ID NO: 126064 - RNA, 19 nt, Artificial Sequence
  Description of Artificial Sequence: Synthetic oligonucleotide
cuuacacgcucaugggacu

SEQ ID NO: 126065 - RNA, 19 nt, Artificial Sequence
  Description of Artificial Sequence: Synthetic oligonucleotide
ggauacgccgcaaauuucu

SEQ ID NO: 126066 - RNA, 19 nt, Artificial Sequence
  Description of Artificial Sequence: Synthetic oligonucleotide
cguagucuaucuccauugc

SEQ ID NO: 126067 - RNA, 19 nt, Artificial Sequence
  Description of Artificial Sequence: Synthetic oligonucleotide
aggcgugaauggugaacau

SEQ ID NO: 126068 - RNA, 19 nt, Artificial Sequence
  Description of Artificial Sequence: Synthetic oligonucleotide
auuugacacgauacuuguu

SEQ ID NO: 126069 - RNA, 19 nt, Artificial Sequence
  Description of Artificial Sequence: Synthetic oligonucleotide
cagcugucugacgaugcuc

SEQ ID NO: 126070 - RNA, 19 nt, Artificial Sequence
  Description of Artificial Sequence: Synthetic oligonucleotide
cacuagggcagaccaguaa

SEQ ID NO: 126071 - RNA, 19 nt, Artificial Sequence
  Description of Artificial Sequence: Synthetic oligonucleotide
uagcuagagcccagucguu

SEQ ID NO: 126072 - RNA, 19 nt, Artificial Sequence
  Description of Artificial Sequence: Synthetic oligonucleotide
gcuuuccgcugguacguug

SEQ ID NO: 126073 - RNA, 19 nt, Artificial Sequence
  Description of Artificial Sequence: Synthetic oligonucleotide
ggcucgguagcuagagccc

SEQ ID NO: 126074 - RNA, 19 nt, Artificial Sequence
  Description of Artificial Sequence: Synthetic oligonucleotide
acacacacacagacacaca

SEQ ID NO: 126075 - RNA, 19 nt, Artificial Sequence
  Description of Artificial Sequence: Synthetic oligonucleotide
ggaucguagaugugcucaa

SEQ ID NO: 126076 - RNA, 19 nt, Artificial Sequence
  Description of Artificial Sequence: Synthetic oligonucleotide
cucuagccccucacccaug

SEQ ID NO: 126077 - RNA, 19 nt, Artificial Sequence
  Description of Artificial Sequence: Synthetic oligonucleotide
aggcguagucuaucuccau

SEQ ID NO: 126078 - RNA, 19 nt, Artificial Sequence
  Description of Artificial Sequence: Synthetic oligonucleotide
ccuuauaucccagaaaguu

SEQ ID NO: 126079 - RNA, 19 nt, Artificial Sequence
  Description of Artificial Sequence: Synthetic oligonucleotide
guacaagcucagcccgaga

SEQ ID NO: 126080 - RNA, 19 nt, Artificial Sequence
  Description of Artificial Sequence: Synthetic oligonucleotide
ggcgugaauggugaacauc

SEQ ID NO: 126081 - RNA, 19 nt, Artificial Sequence
  Description of Artificial Sequence: Synthetic oligonucleotide
caacgauaaauauguucuu

SEQ ID NO: 126082 - RNA, 19 nt, Artificial Sequence
  Description of Artificial Sequence: Synthetic oligonucleotide
cuccacguagucugaccaa

SEQ ID NO: 126083 - RNA, 19 nt, Artificial Sequence
  Description of Artificial Sequence: Synthetic oligonucleotide
cacuuucggauacgccgca

SEQ ID NO: 126084 - RNA, 19 nt, Artificial Sequence
  Description of Artificial Sequence: Synthetic oligonucleotide
aggcgaaauuuagcuugcu

SEQ ID NO: 126085 - RNA, 19 nt, Artificial Sequence
  Description of Artificial Sequence: Synthetic oligonucleotide
ccgcaaauuucuugggaga

SEQ ID NO: 126086 - RNA, 19 nt, Artificial Sequence
  Description of Artificial Sequence: Synthetic oligonucleotide
ggcugcaacggcucagaaa

SEQ ID NO: 126087 - RNA, 19 nt, Artificial Sequence
  Description of Artificial Sequence: Synthetic oligonucleotide
ggauuguugcaagauuggu

SEQ ID NO: 126088 - RNA, 19 nt, Artificial Sequence
  Description of Artificial Sequence: Synthetic oligonucleotide
gugcaagcaagcugccggu

SEQ ID NO: 126089 - RNA, 19 nt, Artificial Sequence
  Description of Artificial Sequence: Synthetic oligonucleotide
gcugucugacgaugcucug

SEQ ID NO: 126090 - RNA, 19 nt, Artificial Sequence
  Description of Artificial Sequence: Synthetic oligonucleotide
auaggcucuuugagacgga

SEQ ID NO: 126091 - RNA, 19 nt, Artificial Sequence
  Description of Artificial Sequence: Synthetic oligonucleotide
ccguagcagccucaagcag

SEQ ID NO: 126092 - RNA, 19 nt, Artificial Sequence
  Description of Artificial Sequence: Synthetic oligonucleotide
gccguucuccgguacaugu

SEQ ID NO: 126093 - RNA, 19 nt, Artificial Sequence
  Description of Artificial Sequence: Synthetic oligonucleotide
gcacuuaugcuagcacauc

SEQ ID NO: 126094 - RNA, 19 nt, Artificial Sequence
  Description of Artificial Sequence: Synthetic oligonucleotide
cuaucacuuuugucucgcu

SEQ ID NO: 126095 - RNA, 19 nt, Artificial Sequence
  Description of Artificial Sequence: Synthetic oligonucleotide
gucucgcuuuaugccuagc

SEQ ID NO: 126096 - RNA, 19 nt, Artificial Sequence
  Description of Artificial Sequence: Synthetic oligonucleotide
ggggaucguagaugugcuc

SEQ ID NO: 126097 - RNA, 19 nt, Artificial Sequence
  Description of Artificial Sequence: Synthetic oligonucleotide
gauacgccgcaaauuucuu

SEQ ID NO: 126098 - RNA, 19 nt, Artificial Sequence
  Description of Artificial Sequence: Synthetic oligonucleotide
ccgccaaggguauuaucca

SEQ ID NO: 126099 - RNA, 19 nt, Artificial Sequence
  Description of Artificial Sequence: Synthetic oligonucleotide
ccgucgagcagacuccgca

SEQ ID NO: 126100 - RNA, 19 nt, Artificial Sequence
  Description of Artificial Sequence: Synthetic oligonucleotide
ccguauuugacacgauacu

SEQ ID NO: 126101 - RNA, 19 nt, Artificial Sequence
  Description of Artificial Sequence: Synthetic oligonucleotide
ccgcugguacguugacucc

SEQ ID NO: 126102 - RNA, 19 nt, Artificial Sequence
  Description of Artificial Sequence: Synthetic oligonucleotide
cguccuguacacuugggcu

SEQ ID NO: 126103 - RNA, 19 nt, Artificial Sequence
  Description of Artificial Sequence: Synthetic oligonucleotide
cgucgagcagacuccgcac

SEQ ID NO: 126104 - RNA, 19 nt, Artificial Sequence
  Description of Artificial Sequence: Synthetic oligonucleotide
cugaugcagacgcuugcuu

SEQ ID NO: 126105 - RNA, 19 nt, Artificial Sequence
  Description of Artificial Sequence: Synthetic oligonucleotide
ggcguagucuaucuccauu

SEQ ID NO: 126106 - RNA, 19 nt, Artificial Sequence
  Description of Artificial Sequence: Synthetic oligonucleotide
guucuccgguacauguagu

SEQ ID NO: 126107 - RNA, 19 nt, Artificial Sequence
  Description of Artificial Sequence: Synthetic oligonucleotide
gccuacacacacacacaca

SEQ ID NO: 126108 - RNA, 19 nt, Artificial Sequence
  Description of Artificial Sequence: Synthetic oligonucleotide
cggauacgccgcaaauuuc

SEQ ID NO: 126109 - RNA, 19 nt, Artificial Sequence
  Description of Artificial Sequence: Synthetic oligonucleotide
guccuccgacuugaucaca

SEQ ID NO: 126110 - RNA, 19 nt, Artificial Sequence
  Description of Artificial Sequence: Synthetic oligonucleotide
ggguauuauccaggcgaaa

SEQ ID NO: 126111 - RNA, 19 nt, Artificial Sequence
  Description of Artificial Sequence: Synthetic oligonucleotide
gucugacgaugcucuggau

SEQ ID NO: 126112 - RNA, 19 nt, Artificial Sequence
  Description of Artificial Sequence: Synthetic oligonucleotide
gacgugccgccaaggguau

SEQ ID NO: 126113 - RNA, 19 nt, Artificial Sequence
  Description of Artificial Sequence: Synthetic oligonucleotide
cgguagcuagagcccaguc

SEQ ID NO: 126114 - RNA, 19 nt, Artificial Sequence
  Description of Artificial Sequence: Synthetic oligonucleotide
ccguucuccgguacaugua

SEQ ID NO: 126115 - RNA, 19 nt, Artificial Sequence
  Description of Artificial Sequence: Synthetic oligonucleotide
gcagucgcauaaagauaua

SEQ ID NO: 126116 - RNA, 19 nt, Artificial Sequence
  Description of Artificial Sequence: Synthetic oligonucleotide
cccggauuguugcaagauu

SEQ ID NO: 126117 - RNA, 19 nt, Artificial Sequence
  Description of Artificial Sequence: Synthetic oligonucleotide
ccccaacaccauuaugcuu

SEQ ID NO: 126118 - RNA, 19 nt, Artificial Sequence
  Description of Artificial Sequence: Synthetic oligonucleotide
gugccguauuugacacgau

SEQ ID NO: 126119 - RNA, 19 nt, Artificial Sequence
  Description of Artificial Sequence: Synthetic oligonucleotide
cguuuacaagaggcguagu

SEQ ID NO: 126120 - RNA, 19 nt, Artificial Sequence
  Description of Artificial Sequence: Synthetic oligonucleotide
gacaugauuaucuaggaag

SEQ ID NO: 126121 - RNA, 19 nt, Artificial Sequence
  Description of Artificial Sequence: Synthetic oligonucleotide
auucauuagauguaggagg

SEQ ID NO: 126122 - RNA, 19 nt, Artificial Sequence
  Description of Artificial Sequence: Synthetic oligonucleotide
uuugacucaacauuaauca

SEQ ID NO: 126123 - RNA, 19 nt, Artificial Sequence
  Description of Artificial Sequence: Synthetic oligonucleotide
ugauacaauggaaucaggg

SEQ ID NO: 126124 - RNA, 19 nt, Artificial Sequence
  Description of Artificial Sequence: Synthetic oligonucleotide
uguggaucgaaccauaaug

SEQ ID NO: 126125 - RNA, 19 nt, Artificial Sequence
  Description of Artificial Sequence: Synthetic oligonucleotide
agugccuaaauauugcagg

SEQ ID NO: 126126 - RNA, 19 nt, Artificial Sequence
  Description of Artificial Sequence: Synthetic oligonucleotide
uauucaauguguugugucg

SEQ ID NO: 126127 - RNA, 19 nt, Artificial Sequence
  Description of Artificial Sequence: Synthetic oligonucleotide
aggauuuauuggcugagcc

SEQ ID NO: 126128 - RNA, 19 nt, Artificial Sequence
  Description of Artificial Sequence: Synthetic oligonucleotide
ugauuaucuaggaagguga

SEQ ID NO: 126129 - RNA, 19 nt, Artificial Sequence
  Description of Artificial Sequence: Synthetic oligonucleotide
ucuccuuaggauuuauugg

SEQ ID NO: 126130 - RNA, 19 nt, Artificial Sequence
  Description of Artificial Sequence: Synthetic oligonucleotide
auaauagaaccacagccuc

SEQ ID NO: 126131 - RNA, 19 nt, Artificial Sequence
  Description of Artificial Sequence: Synthetic oligonucleotide
uggauauauuacaaugagg

SEQ ID NO: 126132 - RNA, 19 nt, Artificial Sequence
  Description of Artificial Sequence: Synthetic oligonucleotide
uguaacacaaacagucugc

SEQ ID NO: 126133 - RNA, 19 nt, Artificial Sequence
  Description of Artificial Sequence: Synthetic oligonucleotide
aauaauagaaccacagccu

SEQ ID NO: 126134 - RNA, 19 nt, Artificial Sequence
  Description of Artificial Sequence: Synthetic oligonucleotide
uccuauauuggugagaaug

SEQ ID NO: 126135 - RNA, 19 nt, Artificial Sequence
  Description of Artificial Sequence: Synthetic oligonucleotide
uucauuagauguaggaggc

SEQ ID NO: 126136 - RNA, 19 nt, Artificial Sequence
  Description of Artificial Sequence: Synthetic oligonucleotide
ugacucaacauuaaucaug

SEQ ID NO: 126137 - RNA, 19 nt, Artificial Sequence
  Description of Artificial Sequence: Synthetic oligonucleotide
caaauaaguguacaggaag

SEQ ID NO: 126138 - RNA, 19 nt, Artificial Sequence
  Description of Artificial Sequence: Synthetic oligonucleotide
uugguaucaaucaugcuac

SEQ ID NO: 126139 - RNA, 19 nt, Artificial Sequence
  Description of Artificial Sequence: Synthetic oligonucleotide
ugaauguaauuuccgcugg

SEQ ID NO: 126140 - RNA, 19 nt, Artificial Sequence
  Description of Artificial Sequence: Synthetic oligonucleotide
aaggauagcauuaaugaca

SEQ ID NO: 126141 - RNA, 19 nt, Artificial Sequence
  Description of Artificial Sequence: Synthetic oligonucleotide
aaacuuucguccgucacac

SEQ ID NO: 126142 - RNA, 19 nt, Artificial Sequence
  Description of Artificial Sequence: Synthetic oligonucleotide
uguagacacuacaugaaug

SEQ ID NO: 126143 - RNA, 19 nt, Artificial Sequence
  Description of Artificial Sequence: Synthetic oligonucleotide
auuaaucaugaauuugaag

SEQ ID NO: 126144 - RNA, 19 nt, Artificial Sequence
  Description of Artificial Sequence: Synthetic oligonucleotide
aaagaguuaacacuacguu

SEQ ID NO: 126145 - RNA, 19 nt, Artificial Sequence
  Description of Artificial Sequence: Synthetic oligonucleotide
uccauaucagcagaggacg

SEQ ID NO: 126146 - RNA, 19 nt, Artificial Sequence
  Description of Artificial Sequence: Synthetic oligonucleotide
uguaaugaggcacaauaaa

SEQ ID NO: 126147 - RNA, 19 nt, Artificial Sequence
  Description of Artificial Sequence: Synthetic oligonucleotide
cuauguaacggacagauga

SEQ ID NO: 126148 - RNA, 19 nt, Artificial Sequence
  Description of Artificial Sequence: Synthetic oligonucleotide
uguccaauuauauuuugac

SEQ ID NO: 126149 - RNA, 19 nt, Artificial Sequence
  Description of Artificial Sequence: Synthetic oligonucleotide
agaaagaguuaacacuacg

SEQ ID NO: 126150 - RNA, 19 nt, Artificial Sequence
  Description of Artificial Sequence: Synthetic oligonucleotide
aauaguguacuucaucauu

SEQ ID NO: 126151 - RNA, 19 nt, Artificial Sequence
  Description of Artificial Sequence: Synthetic oligonucleotide
acguauggcaaacaugagg

SEQ ID NO: 126152 - RNA, 19 nt, Artificial Sequence
  Description of Artificial Sequence: Synthetic oligonucleotide
gaacguauggcaaacauga

SEQ ID NO: 126153 - RNA, 19 nt, Artificial Sequence
  Description of Artificial Sequence: Synthetic oligonucleotide
ucuuguagucucuaguaug

SEQ ID NO: 126154 - RNA, 19 nt, Artificial Sequence
  Description of Artificial Sequence: Synthetic oligonucleotide
uauaggaaauacuucugga

SEQ ID NO: 126155 - RNA, 19 nt, Artificial Sequence
  Description of Artificial Sequence: Synthetic oligonucleotide
aauuugaagguagcacuac

SEQ ID NO: 126156 - RNA, 19 nt, Artificial Sequence
  Description of Artificial Sequence: Synthetic oligonucleotide
uauguaacggacagaugag

SEQ ID NO: 126157 - RNA, 19 nt, Artificial Sequence
  Description of Artificial Sequence: Synthetic oligonucleotide
auuguuugcagguaccgug

SEQ ID NO: 126158 - RNA, 19 nt, Artificial Sequence
  Description of Artificial Sequence: Synthetic oligonucleotide
ucuagcuuuacaaaugcuu

SEQ ID NO: 126159 - RNA, 19 nt, Artificial Sequence
  Description of Artificial Sequence: Synthetic oligonucleotide
aauccccucaaaauacggc

SEQ ID NO: 126160 - RNA, 19 nt, Artificial Sequence
  Description of Artificial Sequence: Synthetic oligonucleotide
ugaccaaacaauaguguac

SEQ ID NO: 126161 - RNA, 19 nt, Artificial Sequence
  Description of Artificial Sequence: Synthetic oligonucleotide
aaauaaguguacaggaaga

SEQ ID NO: 126162 - RNA, 19 nt, Artificial Sequence
  Description of Artificial Sequence: Synthetic oligonucleotide
ucaaauaaguguacaggaa

SEQ ID NO: 126163 - RNA, 19 nt, Artificial Sequence
  Description of Artificial Sequence: Synthetic oligonucleotide
ucccauuacaaaucuguag

SEQ ID NO: 126164 - RNA, 19 nt, Artificial Sequence
  Description of Artificial Sequence: Synthetic oligonucleotide
cuuagacaugauuaucuag

SEQ ID NO: 126165 - RNA, 19 nt, Artificial Sequence
  Description of Artificial Sequence: Synthetic oligonucleotide
uaucaaucaugcuacauuu

SEQ ID NO: 126166 - RNA, 19 nt, Artificial Sequence
  Description of Artificial Sequence: Synthetic oligonucleotide
aaucaugcuacauuuccuu

SEQ ID NO: 126167 - RNA, 19 nt, Artificial Sequence
  Description of Artificial Sequence: Synthetic oligonucleotide
aaaauacggcagcauggag

SEQ ID NO: 126168 - RNA, 19 nt, Artificial Sequence
  Description of Artificial Sequence: Synthetic oligonucleotide
ucguagugccuaaauauug

SEQ ID NO: 126169 - RNA, 19 nt, Artificial Sequence
  Description of Artificial Sequence: Synthetic oligonucleotide
uuuugguacuucagaaagc

SEQ ID NO: 126170 - RNA, 19 nt, Artificial Sequence
  Description of Artificial Sequence: Synthetic oligonucleotide
gucacuauuaagaggaggc

SEQ ID NO: 126171 - RNA, 19 nt, Artificial Sequence
  Description of Artificial Sequence: Synthetic oligonucleotide
uggaucgaaccauaauggg

SEQ ID NO: 126172 - RNA, 19 nt, Artificial Sequence
  Description of Artificial Sequence: Synthetic oligonucleotide
acggcuagcauuuauugcu

SEQ ID NO: 126173 - RNA, 19 nt, Artificial Sequence
  Description of Artificial Sequence: Synthetic oligonucleotide
uggacaauuguuugcaggu

SEQ ID NO: 126174 - RNA, 19 nt, Artificial Sequence
  Description of Artificial Sequence: Synthetic oligonucleotide
ucagggauuucagagcacg

SEQ ID NO: 126175 - RNA, 19 nt, Artificial Sequence
  Description of Artificial Sequence: Synthetic oligonucleotide
uguaagauuuaccucccaa

SEQ ID NO: 126176 - RNA, 19 nt, Artificial Sequence
  Description of Artificial Sequence: Synthetic oligonucleotide
uugaauuauaaaguuguaa

SEQ ID NO: 126177 - RNA, 19 nt, Artificial Sequence
  Description of Artificial Sequence: Synthetic oligonucleotide
uagauuuaacuuagacucc

SEQ ID NO: 126178 - RNA, 19 nt, Artificial Sequence
  Description of Artificial Sequence: Synthetic oligonucleotide
cuaagcauucauuagaugu

SEQ ID NO: 126179 - RNA, 19 nt, Artificial Sequence
  Description of Artificial Sequence: Synthetic oligonucleotide
aguguuuccgucuguaaca

SEQ ID NO: 126180 - RNA, 19 nt, Artificial Sequence
  Description of Artificial Sequence: Synthetic oligonucleotide
acauucaggacucguagug

SEQ ID NO: 126181 - RNA, 19 nt, Artificial Sequence
  Description of Artificial Sequence: Synthetic oligonucleotide
acucguagugccuaaauau

SEQ ID NO: 126182 - RNA, 19 nt, Artificial Sequence
  Description of Artificial Sequence: Synthetic oligonucleotide
aaauacggcagcauggagu

SEQ ID NO: 126183 - RNA, 19 nt, Artificial Sequence
  Description of Artificial Sequence: Synthetic oligonucleotide
gaucgaaccauaaugggca

SEQ ID NO: 126184 - RNA, 19 nt, Artificial Sequence
  Description of Artificial Sequence: Synthetic oligonucleotide
ugaggguacaccuggguca

SEQ ID NO: 126185 - RNA, 19 nt, Artificial Sequence
  Description of Artificial Sequence: Synthetic oligonucleotide
aguuauucaauguguugug

SEQ ID NO: 126186 - RNA, 19 nt, Artificial Sequence
  Description of Artificial Sequence: Synthetic oligonucleotide
aagcauucauuagauguag

SEQ ID NO: 126187 - RNA, 19 nt, Artificial Sequence
  Description of Artificial Sequence: Synthetic oligonucleotide
cauucauuagauguaggag

SEQ ID NO: 126188 - RNA, 19 nt, Artificial Sequence
  Description of Artificial Sequence: Synthetic oligonucleotide
cauccuauguaacggacag

SEQ ID NO: 126189 - RNA, 19 nt, Artificial Sequence
  Description of Artificial Sequence: Synthetic oligonucleotide
guagacacuacaugaauga

SEQ ID NO: 126190 - RNA, 19 nt, Artificial Sequence
  Description of Artificial Sequence: Synthetic oligonucleotide
guggaucgaaccauaaugg

SEQ ID NO: 126191 - RNA, 19 nt, Artificial Sequence
  Description of Artificial Sequence: Synthetic oligonucleotide
uuacuucaacuguagaggu

SEQ ID NO: 126192 - RNA, 19 nt, Artificial Sequence
  Description of Artificial Sequence: Synthetic oligonucleotide
gcuacauuuccuuaggaug

SEQ ID NO: 126193 - RNA, 19 nt, Artificial Sequence
  Description of Artificial Sequence: Synthetic oligonucleotide
uugccuagcaugcugggga

SEQ ID NO: 126194 - RNA, 19 nt, Artificial Sequence
  Description of Artificial Sequence: Synthetic oligonucleotide
ugucacuauuaagaggagg

SEQ ID NO: 126195 - RNA, 19 nt, Artificial Sequence
  Description of Artificial Sequence: Synthetic oligonucleotide
cuaguuauucaauguguug

SEQ ID NO: 126196 - RNA, 19 nt, Artificial Sequence
  Description of Artificial Sequence: Synthetic oligonucleotide
gaauccgaaugacuauccg

SEQ ID NO: 126197 - RNA, 19 nt, Artificial Sequence
  Description of Artificial Sequence: Synthetic oligonucleotide
ugacuauccgagcucauaa

SEQ ID NO: 126198 - RNA, 19 nt, Artificial Sequence
  Description of Artificial Sequence: Synthetic oligonucleotide
cauuacccaagauacuaag

SEQ ID NO: 126199 - RNA, 19 nt, Artificial Sequence
  Description of Artificial Sequence: Synthetic oligonucleotide
caaugucaguuccaaagcc

SEQ ID NO: 126200 - RNA, 19 nt, Artificial Sequence
  Description of Artificial Sequence: Synthetic oligonucleotide
uaaacauucaggacucgua

SEQ ID NO: 126201 - RNA, 19 nt, Artificial Sequence
  Description of Artificial Sequence: Synthetic oligonucleotide
gacauucggcuuuugcuag

SEQ ID NO: 126202 - RNA, 19 nt, Artificial Sequence
  Description of Artificial Sequence: Synthetic oligonucleotide
uuguaaugaggcacaauaa

SEQ ID NO: 126203 - RNA, 19 nt, Artificial Sequence
  Description of Artificial Sequence: Synthetic oligonucleotide
aauaaguguacaggaagaa

SEQ ID NO: 126204 - RNA, 19 nt, Artificial Sequence
  Description of Artificial Sequence: Synthetic oligonucleotide
uucauuacccaagauacua

SEQ ID NO: 126205 - RNA, 19 nt, Artificial Sequence
  Description of Artificial Sequence: Synthetic oligonucleotide
uuacaaaucuguagacacu

SEQ ID NO: 126206 - RNA, 19 nt, Artificial Sequence
  Description of Artificial Sequence: Synthetic oligonucleotide
uaauagaaccacagccuca

SEQ ID NO: 126207 - RNA, 19 nt, Artificial Sequence
  Description of Artificial Sequence: Synthetic oligonucleotide
acuauccgagcucauaaga

SEQ ID NO: 126208 - RNA, 19 nt, Artificial Sequence
  Description of Artificial Sequence: Synthetic oligonucleotide
uagacaugauuaucuagga

SEQ ID NO: 126209 - RNA, 19 nt, Artificial Sequence
  Description of Artificial Sequence: Synthetic oligonucleotide
uccuauguaacggacagau

SEQ ID NO: 126210 - RNA, 19 nt, Artificial Sequence
  Description of Artificial Sequence: Synthetic oligonucleotide
agauuuaccucccaaccaa

SEQ ID NO: 126211 - RNA, 19 nt, Artificial Sequence
  Description of Artificial Sequence: Synthetic oligonucleotide
uucgaagccgcucugcuau

SEQ ID NO: 126212 - RNA, 19 nt, Artificial Sequence
  Description of Artificial Sequence: Synthetic oligonucleotide
auguaacggacagaugagc

SEQ ID NO: 126213 - RNA, 19 nt, Artificial Sequence
  Description of Artificial Sequence: Synthetic oligonucleotide
ucuaguauguucugaccaa

SEQ ID NO: 126214 - RNA, 19 nt, Artificial Sequence
  Description of Artificial Sequence: Synthetic oligonucleotide
cuuucguccgucacacugg

SEQ ID NO: 126215 - RNA, 19 nt, Artificial Sequence
  Description of Artificial Sequence: Synthetic oligonucleotide
cuacguuugugccagggug

SEQ ID NO: 126216 - RNA, 19 nt, Artificial Sequence
  Description of Artificial Sequence: Synthetic oligonucleotide
uugcuuaaggauagcauua

SEQ ID NO: 126217 - RNA, 19 nt, Artificial Sequence
  Description of Artificial Sequence: Synthetic oligonucleotide
ucuaagcauucauuagaug

SEQ ID NO: 126218 - RNA, 19 nt, Artificial Sequence
  Description of Artificial Sequence: Synthetic oligonucleotide
cucggcacugccuugaauc

SEQ ID NO: 126219 - RNA, 19 nt, Artificial Sequence
  Description of Artificial Sequence: Synthetic oligonucleotide
guaacggacagaugagcag

SEQ ID NO: 126220 - RNA, 19 nt, Artificial Sequence
  Description of Artificial Sequence: Synthetic oligonucleotide
guauguucugaccaaacaa

SEQ ID NO: 126221 - RNA, 19 nt, Artificial Sequence
  Description of Artificial Sequence: Synthetic oligonucleotide
uccgucuguaacacaaaca

SEQ ID NO: 126222 - RNA, 19 nt, Artificial Sequence
  Description of Artificial Sequence: Synthetic oligonucleotide
auccgaaugacuauccgag

SEQ ID NO: 126223 - RNA, 19 nt, Artificial Sequence
  Description of Artificial Sequence: Synthetic oligonucleotide
ugggaugcauaccaaccug

SEQ ID NO: 126224 - RNA, 19 nt, Artificial Sequence
  Description of Artificial Sequence: Synthetic oligonucleotide
augcaguugguaucaauca

SEQ ID NO: 126225 - RNA, 19 nt, Artificial Sequence
  Description of Artificial Sequence: Synthetic oligonucleotide
cagagagucaucagaauca

SEQ ID NO: 126226 - RNA, 19 nt, Artificial Sequence
  Description of Artificial Sequence: Synthetic oligonucleotide
ucccuuauuguagaccaag

SEQ ID NO: 126227 - RNA, 19 nt, Artificial Sequence
  Description of Artificial Sequence: Synthetic oligonucleotide
aggacggaaucccaauguc

SEQ ID NO: 126228 - RNA, 19 nt, Artificial Sequence
  Description of Artificial Sequence: Synthetic oligonucleotide
acaugaacguauggcaaac

SEQ ID NO: 126229 - RNA, 19 nt, Artificial Sequence
  Description of Artificial Sequence: Synthetic oligonucleotide
cacuauuaagaggaggcag

SEQ ID NO: 126230 - RNA, 19 nt, Artificial Sequence
  Description of Artificial Sequence: Synthetic oligonucleotide
ucauuacccaagauacuaa

SEQ ID NO: 126231 - RNA, 19 nt, Artificial Sequence
  Description of Artificial Sequence: Synthetic oligonucleotide
ggcauucccacuucgaagc

SEQ ID NO: 126232 - RNA, 19 nt, Artificial Sequence
  Description of Artificial Sequence: Synthetic oligonucleotide
aaacaugaacguauggcaa

SEQ ID NO: 126233 - RNA, 19 nt, Artificial Sequence
  Description of Artificial Sequence: Synthetic oligonucleotide
gguagcacuacuuagacau

SEQ ID NO: 126234 - RNA, 19 nt, Artificial Sequence
  Description of Artificial Sequence: Synthetic oligonucleotide
augaggcacaauaaauaac

SEQ ID NO: 126235 - RNA, 19 nt, Artificial Sequence
  Description of Artificial Sequence: Synthetic oligonucleotide
agaaucagaaggcauucuu

SEQ ID NO: 126236 - RNA, 19 nt, Artificial Sequence
  Description of Artificial Sequence: Synthetic oligonucleotide
aauuguuugcagguaccgu

SEQ ID NO: 126237 - RNA, 19 nt, Artificial Sequence
  Description of Artificial Sequence: Synthetic oligonucleotide
uaguauguucugaccaaac

SEQ ID NO: 126238 - RNA, 19 nt, Artificial Sequence
  Description of Artificial Sequence: Synthetic oligonucleotide
gacuauccgagcucauaag

SEQ ID NO: 126239 - RNA, 19 nt, Artificial Sequence
  Description of Artificial Sequence: Synthetic oligonucleotide
augaacguauggcaaacau

SEQ ID NO: 126240 - RNA, 19 nt, Artificial Sequence
  Description of Artificial Sequence: Synthetic oligonucleotide
ccgucuguaacacaaacag

SEQ ID NO: 126241 - RNA, 19 nt, Artificial Sequence
  Description of Artificial Sequence: Synthetic oligonucleotide
uaguucgaggagacauugg

SEQ ID NO: 126242 - RNA, 19 nt, Artificial Sequence
  Description of Artificial Sequence: Synthetic oligonucleotide
auguauuuacacaugcagu

SEQ ID NO: 126243 - RNA, 19 nt, Artificial Sequence
  Description of Artificial Sequence: Synthetic oligonucleotide
agauacuaagaagcaaucu

SEQ ID NO: 126244 - RNA, 19 nt, Artificial Sequence
  Description of Artificial Sequence: Synthetic oligonucleotide
gaaagaguuaacacuacgu

SEQ ID NO: 126245 - RNA, 19 nt, Artificial Sequence
  Description of Artificial Sequence: Synthetic oligonucleotide
ucugcacacauccuaugua

SEQ ID NO: 126246 - RNA, 19 nt, Artificial Sequence
  Description of Artificial Sequence: Synthetic oligonucleotide
uuagacuccugggucaugu

SEQ ID NO: 126247 - RNA, 19 nt, Artificial Sequence
  Description of Artificial Sequence: Synthetic oligonucleotide
auaccaaccugaccugcag

SEQ ID NO: 126248 - RNA, 19 nt, Artificial Sequence
  Description of Artificial Sequence: Synthetic oligonucleotide
aaauauugcaggagcucgu

SEQ ID NO: 126249 - RNA, 19 nt, Artificial Sequence
  Description of Artificial Sequence: Synthetic oligonucleotide
ucauaagaucacugcuccc

SEQ ID NO: 126250 - RNA, 19 nt, Artificial Sequence
  Description of Artificial Sequence: Synthetic oligonucleotide
caauccauaucagcagagg

SEQ ID NO: 126251 - RNA, 19 nt, Artificial Sequence
  Description of Artificial Sequence: Synthetic oligonucleotide
aacuguagagguagcaaaa

SEQ ID NO: 126252 - RNA, 19 nt, Artificial Sequence
  Description of Artificial Sequence: Synthetic oligonucleotide
ucaauguguugugucguca

SEQ ID NO: 126253 - RNA, 19 nt, Artificial Sequence
  Description of Artificial Sequence: Synthetic oligonucleotide
cacauaauuugagcaaaac

SEQ ID NO: 126254 - RNA, 19 nt, Artificial Sequence
  Description of Artificial Sequence: Synthetic oligonucleotide
cacauccuauguaacggac

SEQ ID NO: 126255 - RNA, 19 nt, Artificial Sequence
  Description of Artificial Sequence: Synthetic oligonucleotide
gaaugacuauccgagcuca

SEQ ID NO: 126256 - RNA, 19 nt, Artificial Sequence
  Description of Artificial Sequence: Synthetic oligonucleotide
uccgcuggaaucugagcug

SEQ ID NO: 126257 - RNA, 19 nt, Artificial Sequence
  Description of Artificial Sequence: Synthetic oligonucleotide
aggaacauuagcacugcug

SEQ ID NO: 126258 - RNA, 19 nt, Artificial Sequence
  Description of Artificial Sequence: Synthetic oligonucleotide
ugcauaccaaccugaccug

SEQ ID NO: 126259 - RNA, 19 nt, Artificial Sequence
  Description of Artificial Sequence: Synthetic oligonucleotide
uuggucagagagucaucag

SEQ ID NO: 126260 - RNA, 19 nt, Artificial Sequence
  Description of Artificial Sequence: Synthetic oligonucleotide
cugaaagaauccgaaugac

SEQ ID NO: 126261 - RNA, 19 nt, Artificial Sequence
  Description of Artificial Sequence: Synthetic oligonucleotide
agacaugauuaucuaggaa

SEQ ID NO: 126262 - RNA, 19 nt, Artificial Sequence
  Description of Artificial Sequence: Synthetic oligonucleotide
acacauccuauguaacgga

SEQ ID NO: 126263 - RNA, 19 nt, Artificial Sequence
  Description of Artificial Sequence: Synthetic oligonucleotide
uccgaaugacuauccgagc

SEQ ID NO: 126264 - RNA, 19 nt, Artificial Sequence
  Description of Artificial Sequence: Synthetic oligonucleotide
auaguguacuucaucauuu

SEQ ID NO: 126265 - RNA, 19 nt, Artificial Sequence
  Description of Artificial Sequence: Synthetic oligonucleotide
uggugagacaauccauauc

SEQ ID NO: 126266 - RNA, 19 nt, Artificial Sequence
  Description of Artificial Sequence: Synthetic oligonucleotide
auaaguguacaggaagaaa

SEQ ID NO: 126267 - RNA, 19 nt, Artificial Sequence
  Description of Artificial Sequence: Synthetic oligonucleotide
cauuaaucaugaauuugaa

SEQ ID NO: 126268 - RNA, 19 nt, Artificial Sequence
  Description of Artificial Sequence: Synthetic oligonucleotide
auucaauguguugugucgu

SEQ ID NO: 126269 - RNA, 19 nt, Artificial Sequence
  Description of Artificial Sequence: Synthetic oligonucleotide
caaacuuucguccgucaca

SEQ ID NO: 126270 - RNA, 19 nt, Artificial Sequence
  Description of Artificial Sequence: Synthetic oligonucleotide
ggaucgaaccauaaugggc

SEQ ID NO: 126271 - RNA, 19 nt, Artificial Sequence
  Description of Artificial Sequence: Synthetic oligonucleotide
gcucuagcuuuacaaaugc

SEQ ID NO: 126272 - RNA, 19 nt, Artificial Sequence
  Description of Artificial Sequence: Synthetic oligonucleotide
cauucaggacucguagugc

SEQ ID NO: 126273 - RNA, 19 nt, Artificial Sequence
  Description of Artificial Sequence: Synthetic oligonucleotide
ugggagcuaagcagaaauc

SEQ ID NO: 126274 - RNA, 19 nt, Artificial Sequence
  Description of Artificial Sequence: Synthetic oligonucleotide
ccuaaguucucugagcagc

SEQ ID NO: 126275 - RNA, 19 nt, Artificial Sequence
  Description of Artificial Sequence: Synthetic oligonucleotide
auccgagcucauaagauca

SEQ ID NO: 126276 - RNA, 19 nt, Artificial Sequence
  Description of Artificial Sequence: Synthetic oligonucleotide
agaugaaagcuccuccguu

SEQ ID NO: 126277 - RNA, 19 nt, Artificial Sequence
  Description of Artificial Sequence: Synthetic oligonucleotide
auuacccaagauacuaaga

SEQ ID NO: 126278 - RNA, 19 nt, Artificial Sequence
  Description of Artificial Sequence: Synthetic oligonucleotide
uguauugcuuaaggauagc

SEQ ID NO: 126279 - RNA, 19 nt, Artificial Sequence
  Description of Artificial Sequence: Synthetic oligonucleotide
cagggauuucagagcacgg

SEQ ID NO: 126280 - RNA, 19 nt, Artificial Sequence
  Description of Artificial Sequence: Synthetic oligonucleotide
acaggacgcaucugguucu

SEQ ID NO: 126281 - RNA, 19 nt, Artificial Sequence
  Description of Artificial Sequence: Synthetic oligonucleotide
guaauuuccgcuggaaucu

SEQ ID NO: 126282 - RNA, 19 nt, Artificial Sequence
  Description of Artificial Sequence: Synthetic oligonucleotide
ggauuuauuggcugagcca

SEQ ID NO: 126283 - RNA, 19 nt, Artificial Sequence
  Description of Artificial Sequence: Synthetic oligonucleotide
ugcuuaaggauagcauuaa

SEQ ID NO: 126284 - RNA, 19 nt, Artificial Sequence
  Description of Artificial Sequence: Synthetic oligonucleotide
agagaaaguccaucuuuua

SEQ ID NO: 126285 - RNA, 19 nt, Artificial Sequence
  Description of Artificial Sequence: Synthetic oligonucleotide
guaucaaucaugcuacauu

SEQ ID NO: 126286 - RNA, 19 nt, Artificial Sequence
  Description of Artificial Sequence: Synthetic oligonucleotide
acauugagggagauuccag

SEQ ID NO: 126287 - RNA, 19 nt, Artificial Sequence
  Description of Artificial Sequence: Synthetic oligonucleotide
guccaauuauauuuugacu

SEQ ID NO: 126288 - RNA, 19 nt, Artificial Sequence
  Description of Artificial Sequence: Synthetic oligonucleotide
uccuuaggauguuaauguu

SEQ ID NO: 126289 - RNA, 19 nt, Artificial Sequence
  Description of Artificial Sequence: Synthetic oligonucleotide
auuuccuaggugucucaau

SEQ ID NO: 126290 - RNA, 19 nt, Artificial Sequence
  Description of Artificial Sequence: Synthetic oligonucleotide
uaauuuccgcuggaaucug

SEQ ID NO: 126291 - RNA, 19 nt, Artificial Sequence
  Description of Artificial Sequence: Synthetic oligonucleotide
auaucagcagaggacggaa

SEQ ID NO: 126292 - RNA, 19 nt, Artificial Sequence
  Description of Artificial Sequence: Synthetic oligonucleotide
agguagcacuacuuagaca

SEQ ID NO: 126293 - RNA, 19 nt, Artificial Sequence
  Description of Artificial Sequence: Synthetic oligonucleotide
ccauuacaaaucuguagac

SEQ ID NO: 126294 - RNA, 19 nt, Artificial Sequence
  Description of Artificial Sequence: Synthetic oligonucleotide
aacggacagaugagcagcu

SEQ ID NO: 126295 - RNA, 19 nt, Artificial Sequence
  Description of Artificial Sequence: Synthetic oligonucleotide
cauaagaucacugcucccu

SEQ ID NO: 126296 - RNA, 19 nt, Artificial Sequence
  Description of Artificial Sequence: Synthetic oligonucleotide
acauccuauguaacggaca

SEQ ID NO: 126297 - RNA, 19 nt, Artificial Sequence
  Description of Artificial Sequence: Synthetic oligonucleotide
acaauggaaucagggauuu

SEQ ID NO: 126298 - RNA, 19 nt, Artificial Sequence
  Description of Artificial Sequence: Synthetic oligonucleotide
auucauuacccaagauacu

SEQ ID NO: 126299 - RNA, 19 nt, Artificial Sequence
  Description of Artificial Sequence: Synthetic oligonucleotide
gagaugaaagcuccuccgu

SEQ ID NO: 126300 - RNA, 19 nt, Artificial Sequence
  Description of Artificial Sequence: Synthetic oligonucleotide
cauaccaaccugaccugca

SEQ ID NO: 126301 - RNA, 19 nt, Artificial Sequence
  Description of Artificial Sequence: Synthetic oligonucleotide
cauucacaauagcaccauc

SEQ ID NO: 126302 - RNA, 19 nt, Artificial Sequence
  Description of Artificial Sequence: Synthetic oligonucleotide
accgacgcagcuucaugga

SEQ ID NO: 126303 - RNA, 19 nt, Artificial Sequence
  Description of Artificial Sequence: Synthetic oligonucleotide
ugcuguggaucgaaccaua

SEQ ID NO: 126304 - RNA, 19 nt, Artificial Sequence
  Description of Artificial Sequence: Synthetic oligonucleotide
aacuuucguccgucacacu

SEQ ID NO: 126305 - RNA, 19 nt, Artificial Sequence
  Description of Artificial Sequence: Synthetic oligonucleotide
gaagugaugguagggugcu

SEQ ID NO: 126306 - RNA, 19 nt, Artificial Sequence
  Description of Artificial Sequence: Synthetic oligonucleotide
cuauccgagcucauaagau

SEQ ID NO: 126307 - RNA, 19 nt, Artificial Sequence
  Description of Artificial Sequence: Synthetic oligonucleotide
caacauuaaucaugaauuu

SEQ ID NO: 126308 - RNA, 19 nt, Artificial Sequence
  Description of Artificial Sequence: Synthetic oligonucleotide
ugggcucguguccucuuau

SEQ ID NO: 126309 - RNA, 19 nt, Artificial Sequence
  Description of Artificial Sequence: Synthetic oligonucleotide
aaugacuauccgagcucau

SEQ ID NO: 126310 - RNA, 19 nt, Artificial Sequence
  Description of Artificial Sequence: Synthetic oligonucleotide
ggacagugugcuugccuag

SEQ ID NO: 126311 - RNA, 19 nt, Artificial Sequence
  Description of Artificial Sequence: Synthetic oligonucleotide
aguuguaaugaggcacaau

SEQ ID NO: 126312 - RNA, 19 nt, Artificial Sequence
  Description of Artificial Sequence: Synthetic oligonucleotide
guagcacuacuuagacaug

SEQ ID NO: 126313 - RNA, 19 nt, Artificial Sequence
  Description of Artificial Sequence: Synthetic oligonucleotide
ugccuagcaugcuggggau

SEQ ID NO: 126314 - RNA, 19 nt, Artificial Sequence
  Description of Artificial Sequence: Synthetic oligonucleotide
augacuauccgagcucaua

SEQ ID NO: 126315 - RNA, 19 nt, Artificial Sequence
  Description of Artificial Sequence: Synthetic oligonucleotide
ggacuacuuccccuucuug

SEQ ID NO: 126316 - RNA, 19 nt, Artificial Sequence
  Description of Artificial Sequence: Synthetic oligonucleotide
ucucggcacugccuugaau

SEQ ID NO: 126317 - RNA, 19 nt, Artificial Sequence
  Description of Artificial Sequence: Synthetic oligonucleotide
gcagguaccgugcucucuc

SEQ ID NO: 126318 - RNA, 19 nt, Artificial Sequence
  Description of Artificial Sequence: Synthetic oligonucleotide
ccuuaggauguuaauguua

SEQ ID NO: 126319 - RNA, 19 nt, Artificial Sequence
  Description of Artificial Sequence: Synthetic oligonucleotide
agcacggcuagcauuuauu

SEQ ID NO: 126320 - RNA, 19 nt, Artificial Sequence
  Description of Artificial Sequence: Synthetic oligonucleotide
caugaacguauggcaaaca

SEQ ID NO: 126321 - RNA, 19 nt, Artificial Sequence
  Description of Artificial Sequence: Synthetic oligonucleotide
uugcuaguucgaggagaca

SEQ ID NO: 126322 - RNA, 19 nt, Artificial Sequence
  Description of Artificial Sequence: Synthetic oligonucleotide
ccuauguaacggacagaug

SEQ ID NO: 126323 - RNA, 19 nt, Artificial Sequence
  Description of Artificial Sequence: Synthetic oligonucleotide
caugauuaucuaggaaggu

SEQ ID NO: 126324 - RNA, 19 nt, Artificial Sequence
  Description of Artificial Sequence: Synthetic oligonucleotide
ccuccuauauuggugagaa

SEQ ID NO: 126325 - RNA, 19 nt, Artificial Sequence
  Description of Artificial Sequence: Synthetic oligonucleotide
gcauaccaaccugaccugc

SEQ ID NO: 126326 - RNA, 19 nt, Artificial Sequence
  Description of Artificial Sequence: Synthetic oligonucleotide
caucaacaggacgcaucug

SEQ ID NO: 126327 - RNA, 19 nt, Artificial Sequence
  Description of Artificial Sequence: Synthetic oligonucleotide
cgaaugacuauccgagcuc

SEQ ID NO: 126328 - RNA, 19 nt, Artificial Sequence
  Description of Artificial Sequence: Synthetic oligonucleotide
cuuagacuccugggucaug

SEQ ID NO: 126329 - RNA, 19 nt, Artificial Sequence
  Description of Artificial Sequence: Synthetic oligonucleotide
cuucgaagccgcucugcua

SEQ ID NO: 126330 - RNA, 19 nt, Artificial Sequence
  Description of Artificial Sequence: Synthetic oligonucleotide
cauuuccuaggugucucaa

SEQ ID NO: 126331 - RNA, 19 nt, Artificial Sequence
  Description of Artificial Sequence: Synthetic oligonucleotide
ggucagccccaucuaccug

SEQ ID NO: 126332 - RNA, 19 nt, Artificial Sequence
  Description of Artificial Sequence: Synthetic oligonucleotide
ggauuucagagcacggcua

SEQ ID NO: 126333 - RNA, 19 nt, Artificial Sequence
  Description of Artificial Sequence: Synthetic oligonucleotide
gguaucaaucaugcuacau

SEQ ID NO: 126334 - RNA, 19 nt, Artificial Sequence
  Description of Artificial Sequence: Synthetic oligonucleotide
ccgaaugacuauccgagcu

SEQ ID NO: 126335 - RNA, 19 nt, Artificial Sequence
  Description of Artificial Sequence: Synthetic oligonucleotide
aggaccgacgcagcuucau

SEQ ID NO: 126336 - RNA, 19 nt, Artificial Sequence
  Description of Artificial Sequence: Synthetic oligonucleotide
ccuaguuauucaauguguu

SEQ ID NO: 126337 - RNA, 19 nt, Artificial Sequence
  Description of Artificial Sequence: Synthetic oligonucleotide
cucccuuauuguagaccaa

SEQ ID NO: 126338 - RNA, 19 nt, Artificial Sequence
  Description of Artificial Sequence: Synthetic oligonucleotide
agggacauugagggagauu

SEQ ID NO: 126339 - RNA, 19 nt, Artificial Sequence
  Description of Artificial Sequence: Synthetic oligonucleotide
cuguggaucgaaccauaau

SEQ ID NO: 126340 - RNA, 19 nt, Artificial Sequence
  Description of Artificial Sequence: Synthetic oligonucleotide
gagcacggcuagcauuuau

SEQ ID NO: 126341 - RNA, 19 nt, Artificial Sequence
  Description of Artificial Sequence: Synthetic oligonucleotide
ggauagcauuaaugacauc

SEQ ID NO: 126342 - RNA, 19 nt, Artificial Sequence
  Description of Artificial Sequence: Synthetic oligonucleotide
ccgacgcagcuucauggac

SEQ ID NO: 126343 - RNA, 19 nt, Artificial Sequence
  Description of Artificial Sequence: Synthetic oligonucleotide
ggacaauuguuugcaggua

SEQ ID NO: 126344 - RNA, 19 nt, Artificial Sequence
  Description of Artificial Sequence: Synthetic oligonucleotide
aguggucaguccagugcuu

SEQ ID NO: 126345 - RNA, 19 nt, Artificial Sequence
  Description of Artificial Sequence: Synthetic oligonucleotide
caucuaccugggcugcugu

SEQ ID NO: 126346 - RNA, 19 nt, Artificial Sequence
  Description of Artificial Sequence: Synthetic oligonucleotide
auacggcagcauggagugu

SEQ ID NO: 126347 - RNA, 19 nt, Artificial Sequence
  Description of Artificial Sequence: Synthetic oligonucleotide
ggacucguagugccuaaau

SEQ ID NO: 126348 - RNA, 19 nt, Artificial Sequence
  Description of Artificial Sequence: Synthetic oligonucleotide
ggcucguguccucuuauuu

SEQ ID NO: 126349 - RNA, 19 nt, Artificial Sequence
  Description of Artificial Sequence: Synthetic oligonucleotide
ugaucacugcugggcuguu

SEQ ID NO: 126350 - RNA, 19 nt, Artificial Sequence
  Description of Artificial Sequence: Synthetic oligonucleotide
gaggaccgacgcagcuuca

SEQ ID NO: 126351 - RNA, 19 nt, Artificial Sequence
  Description of Artificial Sequence: Synthetic oligonucleotide
cauucggcuuuugcuaguu

SEQ ID NO: 126352 - RNA, 19 nt, Artificial Sequence
  Description of Artificial Sequence: Synthetic oligonucleotide
gccuagcaugcuggggaug

SEQ ID NO: 126353 - RNA, 19 nt, Artificial Sequence
  Description of Artificial Sequence: Synthetic oligonucleotide
ccgccagugucacuauuaa

SEQ ID NO: 126354 - RNA, 19 nt, Artificial Sequence
  Description of Artificial Sequence: Synthetic oligonucleotide
gcuaguucgaggagacauu

SEQ ID NO: 126355 - RNA, 19 nt, Artificial Sequence
  Description of Artificial Sequence: Synthetic oligonucleotide
gggcucguguccucuuauu

SEQ ID NO: 126356 - RNA, 19 nt, Artificial Sequence
  Description of Artificial Sequence: Synthetic oligonucleotide
  modified_base (3)..(3): a, c, u, g, unknown or other
aancccuuuaaacaaaucc

SEQ ID NO: 126357 - RNA, 19 nt, Artificial Sequence
  Description of Artificial Sequence: Synthetic oligonucleotide
uuuacaagguccaaucugg

SEQ ID NO: 126358 - RNA, 19 nt, Artificial Sequence
  Description of Artificial Sequence: Synthetic oligonucleotide
aguaaaucuaacuagaaaa

SEQ ID NO: 126359 - RNA, 19 nt, Artificial Sequence
  Description of Artificial Sequence: Synthetic oligonucleotide
acagguuagagucaugugc

SEQ ID NO: 126360 - RNA, 19 nt, Artificial Sequence
  Description of Artificial Sequence: Synthetic oligonucleotide
uucaaguaaaucuaacuag

SEQ ID NO: 126361 - RNA, 19 nt, Artificial Sequence
  Description of Artificial Sequence: Synthetic oligonucleotide
aaaugaucuuguugaacgc

SEQ ID NO: 126362 - RNA, 19 nt, Artificial Sequence
  Description of Artificial Sequence: Synthetic oligonucleotide
aauaauaauguggacgcuc

SEQ ID NO: 126363 - RNA, 19 nt, Artificial Sequence
  Description of Artificial Sequence: Synthetic oligonucleotide
aguuauaaagaacuucuag

SEQ ID NO: 126364 - RNA, 19 nt, Artificial Sequence
  Description of Artificial Sequence: Synthetic oligonucleotide
aaguauguaugugauauuc

SEQ ID NO: 126365 - RNA, 19 nt, Artificial Sequence
  Description of Artificial Sequence: Synthetic oligonucleotide
aaacaaggaucugagaaac

SEQ ID NO: 126366 - RNA, 19 nt, Artificial Sequence
  Description of Artificial Sequence: Synthetic oligonucleotide
aaauucucccaaauggugc

SEQ ID NO: 126367 - RNA, 19 nt, Artificial Sequence
  Description of Artificial Sequence: Synthetic oligonucleotide
uucgcuaccuccuaaaacc

SEQ ID NO: 126368 - RNA, 19 nt, Artificial Sequence
  Description of Artificial Sequence: Synthetic oligonucleotide
aaccauuaggcacauacug

SEQ ID NO: 126369 - RNA, 19 nt, Artificial Sequence
  Description of Artificial Sequence: Synthetic oligonucleotide
uauguaugugauauucacg

SEQ ID NO: 126370 - RNA, 19 nt, Artificial Sequence
  Description of Artificial Sequence: Synthetic oligonucleotide
uuaaugaaucucaagccug

SEQ ID NO: 126371 - RNA, 19 nt, Artificial Sequence
  Description of Artificial Sequence: Synthetic oligonucleotide
aauugggucccauccaggg

SEQ ID NO: 126372 - RNA, 19 nt, Artificial Sequence
  Description of Artificial Sequence: Synthetic oligonucleotide
uuaucaguccaucugagaa

SEQ ID NO: 126373 - RNA, 19 nt, Artificial Sequence
  Description of Artificial Sequence: Synthetic oligonucleotide
ugaguuuguaucaaagacu

SEQ ID NO: 126374 - RNA, 19 nt, Artificial Sequence
  Description of Artificial Sequence: Synthetic oligonucleotide
ucaagagucucuuugcccc

SEQ ID NO: 126375 - RNA, 19 nt, Artificial Sequence
  Description of Artificial Sequence: Synthetic oligonucleotide
aaagguuaccgacguauag

SEQ ID NO: 126376 - RNA, 19 nt, Artificial Sequence
  Description of Artificial Sequence: Synthetic oligonucleotide
uguugcacgggauuuauca

SEQ ID NO: 126377 - RNA, 19 nt, Artificial Sequence
  Description of Artificial Sequence: Synthetic oligonucleotide
cauugugcaauuuucugcc

SEQ ID NO: 126378 - RNA, 19 nt, Artificial Sequence
  Description of Artificial Sequence: Synthetic oligonucleotide
ugcaugacgaugcucauga

SEQ ID NO: 126379 - RNA, 19 nt, Artificial Sequence
  Description of Artificial Sequence: Synthetic oligonucleotide
uguguacucaaaauucuug

SEQ ID NO: 126380 - RNA, 19 nt, Artificial Sequence
  Description of Artificial Sequence: Synthetic oligonucleotide
uugacggcuauuuaaggag

SEQ ID NO: 126381 - RNA, 19 nt, Artificial Sequence
  Description of Artificial Sequence: Synthetic oligonucleotide
accccauuuaucuucgccc

SEQ ID NO: 126382 - RNA, 19 nt, Artificial Sequence
  Description of Artificial Sequence: Synthetic oligonucleotide
aguuguuugguguucaacu

SEQ ID NO: 126383 - RNA, 19 nt, Artificial Sequence
  Description of Artificial Sequence: Synthetic oligonucleotide
guuaccgacguauagaguc

SEQ ID NO: 126384 - RNA, 19 nt, Artificial Sequence
  Description of Artificial Sequence: Synthetic oligonucleotide
uagacggcaaaguuuauca

SEQ ID NO: 126385 - RNA, 19 nt, Artificial Sequence
  Description of Artificial Sequence: Synthetic oligonucleotide
ucuucgcccauucauagca

SEQ ID NO: 126386 - RNA, 19 nt, Artificial Sequence
  Description of Artificial Sequence: Synthetic oligonucleotide
guacuugccaaccauuagg

SEQ ID NO: 126387 - RNA, 19 nt, Artificial Sequence
  Description of Artificial Sequence: Synthetic oligonucleotide
uuucggguugcccaguuag

SEQ ID NO: 126388 - RNA, 19 nt, Artificial Sequence
  Description of Artificial Sequence: Synthetic oligonucleotide
aguaugggucauuuccugc

SEQ ID NO: 126389 - RNA, 19 nt, Artificial Sequence
  Description of Artificial Sequence: Synthetic oligonucleotide
gacguauagagucuugggc

SEQ ID NO: 126390 - RNA, 19 nt, Artificial Sequence
  Description of Artificial Sequence: Synthetic oligonucleotide
ucucaagccugacagagga

SEQ ID NO: 126391 - RNA, 19 nt, Artificial Sequence
  Description of Artificial Sequence: Synthetic oligonucleotide
uguagcgucaagccacugg

SEQ ID NO: 126392 - RNA, 19 nt, Artificial Sequence
  Description of Artificial Sequence: Synthetic oligonucleotide
ugcguuuccauaccacugg

SEQ ID NO: 126393 - RNA, 19 nt, Artificial Sequence
  Description of Artificial Sequence: Synthetic oligonucleotide
auugaaucccugcuggcuc

SEQ ID NO: 126394 - RNA, 19 nt, Artificial Sequence
  Description of Artificial Sequence: Synthetic oligonucleotide
  modified_base (2)..(2): a, c, u, g, unknown or other
ancccuuuaaacaaaucca

SEQ ID NO: 126395 - RNA, 19 nt, Artificial Sequence
  Description of Artificial Sequence: Synthetic oligonucleotide
uuugguguucaacucauau

SEQ ID NO: 126396 - RNA, 19 nt, Artificial Sequence
  Description of Artificial Sequence: Synthetic oligonucleotide
ucuguguacucaaaauucu

SEQ ID NO: 126397 - RNA, 19 nt, Artificial Sequence
  Description of Artificial Sequence: Synthetic oligonucleotide
ugauauucacgugcaaacg

SEQ ID NO: 126398 - RNA, 19 nt, Artificial Sequence
  Description of Artificial Sequence: Synthetic oligonucleotide
acguauagagucuugggca

SEQ ID NO: 126399 - RNA, 19 nt, Artificial Sequence
  Description of Artificial Sequence: Synthetic oligonucleotide
ugacggcuauuuaaggagg

SEQ ID NO: 126400 - RNA, 19 nt, Artificial Sequence
  Description of Artificial Sequence: Synthetic oligonucleotide
auguaaauguagaugcugg

SEQ ID NO: 126401 - RNA, 19 nt, Artificial Sequence
  Description of Artificial Sequence: Synthetic oligonucleotide
ucuaacuagaaaacaucaa

SEQ ID NO: 126402 - RNA, 19 nt, Artificial Sequence
  Description of Artificial Sequence: Synthetic oligonucleotide
caaacguaaauccugucuc

SEQ ID NO: 126403 - RNA, 19 nt, Artificial Sequence
  Description of Artificial Sequence: Synthetic oligonucleotide
uaucuucgcccauucauag

SEQ ID NO: 126404 - RNA, 19 nt, Artificial Sequence
  Description of Artificial Sequence: Synthetic oligonucleotide
uuacaaccucaucauauga

SEQ ID NO: 126405 - RNA, 19 nt, Artificial Sequence
  Description of Artificial Sequence: Synthetic oligonucleotide
ugguggauauccaauuuga

SEQ ID NO: 126406 - RNA, 19 nt, Artificial Sequence
  Description of Artificial Sequence: Synthetic oligonucleotide
agguuaccgacguauagag

SEQ ID NO: 126407 - RNA, 19 nt, Artificial Sequence
  Description of Artificial Sequence: Synthetic oligonucleotide
gugauauucacgugcaaac

SEQ ID NO: 126408 - RNA, 19 nt, Artificial Sequence
  Description of Artificial Sequence: Synthetic oligonucleotide
cugacaacgguuacuacug

SEQ ID NO: 126409 - RNA, 19 nt, Artificial Sequence
  Description of Artificial Sequence: Synthetic oligonucleotide
agucugacgcauuaguugu

SEQ ID NO: 126410 - RNA, 19 nt, Artificial Sequence
  Description of Artificial Sequence: Synthetic oligonucleotide
guacugacggauuugauaa

SEQ ID NO: 126411 - RNA, 19 nt, Artificial Sequence
  Description of Artificial Sequence: Synthetic oligonucleotide
uguacugacggauuugaua

SEQ ID NO: 126412 - RNA, 19 nt, Artificial Sequence
  Description of Artificial Sequence: Synthetic oligonucleotide
aaacaguaugggucauuuc

SEQ ID NO: 126413 - RNA, 19 nt, Artificial Sequence
  Description of Artificial Sequence: Synthetic oligonucleotide
ugguagacggcaaaguuua

SEQ ID NO: 126414 - RNA, 19 nt, Artificial Sequence
  Description of Artificial Sequence: Synthetic oligonucleotide
acugagcacacuucagagg

SEQ ID NO: 126415 - RNA, 19 nt, Artificial Sequence
  Description of Artificial Sequence: Synthetic oligonucleotide
cauaaucaggaaugcaaac

SEQ ID NO: 126416 - RNA, 19 nt, Artificial Sequence
  Description of Artificial Sequence: Synthetic oligonucleotide
  modified_base (4)..(4): a, c, u, g, unknown or other
aaancccuuuaaacaaauc

SEQ ID NO: 126417 - RNA, 19 nt, Artificial Sequence
  Description of Artificial Sequence: Synthetic oligonucleotide
guagcgucaagccacuggc

SEQ ID NO: 126418 - RNA, 19 nt, Artificial Sequence
  Description of Artificial Sequence: Synthetic oligonucleotide
aagacucgaauuuccaaua

SEQ ID NO: 126419 - RNA, 19 nt, Artificial Sequence
  Description of Artificial Sequence: Synthetic oligonucleotide
aaaacaguaugggucauuu

SEQ ID NO: 126420 - RNA, 19 nt, Artificial Sequence
  Description of Artificial Sequence: Synthetic oligonucleotide
ugugauauucacgugcaaa

SEQ ID NO: 126421 - RNA, 19 nt, Artificial Sequence
  Description of Artificial Sequence: Synthetic oligonucleotide
guggaugaaaaguaauuuc

SEQ ID NO: 126422 - RNA, 19 nt, Artificial Sequence
  Description of Artificial Sequence: Synthetic oligonucleotide
aucauaaucaggaaugcaa

SEQ ID NO: 126423 - RNA, 19 nt, Artificial Sequence
  Description of Artificial Sequence: Synthetic oligonucleotide
gacggcaaaguuuaucaca

SEQ ID NO: 126424 - RNA, 19 nt, Artificial Sequence
  Description of Artificial Sequence: Synthetic oligonucleotide
guaugggucauuuccugcc

SEQ ID NO: 126425 - RNA, 19 nt, Artificial Sequence
  Description of Artificial Sequence: Synthetic oligonucleotide
aauauuacuuguggaagua

SEQ ID NO: 126426 - RNA, 19 nt, Artificial Sequence
  Description of Artificial Sequence: Synthetic oligonucleotide
uuccgcaucccauuuguug

SEQ ID NO: 126427 - RNA, 19 nt, Artificial Sequence
  Description of Artificial Sequence: Synthetic oligonucleotide
augccuauguugaggagcc

SEQ ID NO: 126428 - RNA, 19 nt, Artificial Sequence
  Description of Artificial Sequence: Synthetic oligonucleotide
aagguuaccgacguauaga

SEQ ID NO: 126429 - RNA, 19 nt, Artificial Sequence
  Description of Artificial Sequence: Synthetic oligonucleotide
cauguaccuucaaugguag

SEQ ID NO: 126430 - RNA, 19 nt, Artificial Sequence
  Description of Artificial Sequence: Synthetic oligonucleotide
uguaugugauauucacgug

SEQ ID NO: 126431 - RNA, 19 nt, Artificial Sequence
  Description of Artificial Sequence: Synthetic oligonucleotide
ucaaugguaguaccauuaa

SEQ ID NO: 126432 - RNA, 19 nt, Artificial Sequence
  Description of Artificial Sequence: Synthetic oligonucleotide
caugccuauguugaggagc

SEQ ID NO: 126433 - RNA, 19 nt, Artificial Sequence
  Description of Artificial Sequence: Synthetic oligonucleotide
uacaagaggacuggcuuag

SEQ ID NO: 126434 - RNA, 19 nt, Artificial Sequence
  Description of Artificial Sequence: Synthetic oligonucleotide
uaccccauuuaucuucgcc

SEQ ID NO: 126435 - RNA, 19 nt, Artificial Sequence
  Description of Artificial Sequence: Synthetic oligonucleotide
uagacugacuuacaaccuc

SEQ ID NO: 126436 - RNA, 19 nt, Artificial Sequence
  Description of Artificial Sequence: Synthetic oligonucleotide
guaucuuagcaaacaacag

SEQ ID NO: 126437 - RNA, 19 nt, Artificial Sequence
  Description of Artificial Sequence: Synthetic oligonucleotide
agacggcaaaguuuaucac

SEQ ID NO: 126438 - RNA, 19 nt, Artificial Sequence
  Description of Artificial Sequence: Synthetic oligonucleotide
aacgguuacuacugcuugu

SEQ ID NO: 126439 - RNA, 19 nt, Artificial Sequence
  Description of Artificial Sequence: Synthetic oligonucleotide
  modified_base (5)..(5): a, c, u, g, unknown or other
aaaancccuuuaaacaaau

SEQ ID NO: 126440 - RNA, 19 nt, Artificial Sequence
  Description of Artificial Sequence: Synthetic oligonucleotide
uguugugcguuuccauacc

SEQ ID NO: 126441 - RNA, 19 nt, Artificial Sequence
  Description of Artificial Sequence: Synthetic oligonucleotide
ugcacgggauuuaucauau

SEQ ID NO: 126442 - RNA, 19 nt, Artificial Sequence
  Description of Artificial Sequence: Synthetic oligonucleotide
uucaugggaauugaaccga

SEQ ID NO: 126443 - RNA, 19 nt, Artificial Sequence
  Description of Artificial Sequence: Synthetic oligonucleotide
uuaucauaucaagagucuc

SEQ ID NO: 126444 - RNA, 19 nt, Artificial Sequence
  Description of Artificial Sequence: Synthetic oligonucleotide
ucaagcuaucuuccugggc

SEQ ID NO: 126445 - RNA, 19 nt, Artificial Sequence
  Description of Artificial Sequence: Synthetic oligonucleotide
cucgggaaagguuaccgac

SEQ ID NO: 126446 - RNA, 19 nt, Artificial Sequence
  Description of Artificial Sequence: Synthetic oligonucleotide
cuugacggcuauuuaagga

SEQ ID NO: 126447 - RNA, 19 nt, Artificial Sequence
  Description of Artificial Sequence: Synthetic oligonucleotide
aucucgggaaagguuaccg

SEQ ID NO: 126448 - RNA, 19 nt, Artificial Sequence
  Description of Artificial Sequence: Synthetic oligonucleotide
uuaccgacguauagagucu

SEQ ID NO: 126449 - RNA, 19 nt, Artificial Sequence
  Description of Artificial Sequence: Synthetic oligonucleotide
guggaaguaucuuagcaaa

SEQ ID NO: 126450 - RNA, 19 nt, Artificial Sequence
  Description of Artificial Sequence: Synthetic oligonucleotide
caacagauguaaauguaga

SEQ ID NO: 126451 - RNA, 19 nt, Artificial Sequence
  Description of Artificial Sequence: Synthetic oligonucleotide
uuagucacaagcuguuguu

SEQ ID NO: 126452 - RNA, 19 nt, Artificial Sequence
  Description of Artificial Sequence: Synthetic oligonucleotide
agcgucaagccacuggcug

SEQ ID NO: 126453 - RNA, 19 nt, Artificial Sequence
  Description of Artificial Sequence: Synthetic oligonucleotide
cacgggauuuaucauauca

SEQ ID NO: 126454 - RNA, 19 nt, Artificial Sequence
  Description of Artificial Sequence: Synthetic oligonucleotide
uaauaauguggacgcucca

SEQ ID NO: 126455 - RNA, 19 nt, Artificial Sequence
  Description of Artificial Sequence: Synthetic oligonucleotide
uacaagguccaaucuggcu

SEQ ID NO: 126456 - RNA, 19 nt, Artificial Sequence
  Description of Artificial Sequence: Synthetic oligonucleotide
cuuagacuuccccguagcc

SEQ ID NO: 126457 - RNA, 19 nt, Artificial Sequence
  Description of Artificial Sequence: Synthetic oligonucleotide
gacgcuccaagagaucagg

SEQ ID NO: 126458 - RNA, 19 nt, Artificial Sequence
  Description of Artificial Sequence: Synthetic oligonucleotide
cuucgcuaccuccuaaaac

SEQ ID NO: 126459 - RNA, 19 nt, Artificial Sequence
  Description of Artificial Sequence: Synthetic oligonucleotide
cacaggccuaaguaaaaug

SEQ ID NO: 126460 - RNA, 19 nt, Artificial Sequence
  Description of Artificial Sequence: Synthetic oligonucleotide
gaagacucgaauuuccaau

SEQ ID NO: 126461 - RNA, 19 nt, Artificial Sequence
  Description of Artificial Sequence: Synthetic oligonucleotide
agacuaccaaaguauguau

SEQ ID NO: 126462 - RNA, 19 nt, Artificial Sequence
  Description of Artificial Sequence: Synthetic oligonucleotide
uuguuaucuggcauuugua

SEQ ID NO: 126463 - RNA, 19 nt, Artificial Sequence
  Description of Artificial Sequence: Synthetic oligonucleotide
ugccguauccauaaucauu

SEQ ID NO: 126464 - RNA, 19 nt, Artificial Sequence
  Description of Artificial Sequence: Synthetic oligonucleotide
uucauacccugccacucga

SEQ ID NO: 126465 - RNA, 19 nt, Artificial Sequence
  Description of Artificial Sequence: Synthetic oligonucleotide
uuacaagaggacuggcuua

SEQ ID NO: 126466 - RNA, 19 nt, Artificial Sequence
  Description of Artificial Sequence: Synthetic oligonucleotide
auugaaccgaauaaaugaa

SEQ ID NO: 126467 - RNA, 19 nt, Artificial Sequence
  Description of Artificial Sequence: Synthetic oligonucleotide
gucaugccuauguugagga

SEQ ID NO: 126468 - RNA, 19 nt, Artificial Sequence
  Description of Artificial Sequence: Synthetic oligonucleotide
uguugaacgcugugugcug

SEQ ID NO: 126469 - RNA, 19 nt, Artificial Sequence
  Description of Artificial Sequence: Synthetic oligonucleotide
auguacucuuuggagcugg

SEQ ID NO: 126470 - RNA, 19 nt, Artificial Sequence
  Description of Artificial Sequence: Synthetic oligonucleotide
uggggcuagacugacuuac

SEQ ID NO: 126471 - RNA, 19 nt, Artificial Sequence
  Description of Artificial Sequence: Synthetic oligonucleotide
uuaccacacgggcaucuga

SEQ ID NO: 126472 - RNA, 19 nt, Artificial Sequence
  Description of Artificial Sequence: Synthetic oligonucleotide
caacgguuacuacugcuug

SEQ ID NO: 126473 - RNA, 19 nt, Artificial Sequence
  Description of Artificial Sequence: Synthetic oligonucleotide
cuaccuccuaaaaccuccg

SEQ ID NO: 126474 - RNA, 19 nt, Artificial Sequence
  Description of Artificial Sequence: Synthetic oligonucleotide
augcaauuaucaguccauc

SEQ ID NO: 126475 - RNA, 19 nt, Artificial Sequence
  Description of Artificial Sequence: Synthetic oligonucleotide
agguuagagucaugugcuc

SEQ ID NO: 126476 - RNA, 19 nt, Artificial Sequence
  Description of Artificial Sequence: Synthetic oligonucleotide
agucuaagugaacaucauu

SEQ ID NO: 126477 - RNA, 19 nt, Artificial Sequence
  Description of Artificial Sequence: Synthetic oligonucleotide
aggacuggcuuagaaaaca

SEQ ID NO: 126478 - RNA, 19 nt, Artificial Sequence
  Description of Artificial Sequence: Synthetic oligonucleotide
ugacaacgguuacuacugc

SEQ ID NO: 126479 - RNA, 19 nt, Artificial Sequence
  Description of Artificial Sequence: Synthetic oligonucleotide
gaagacugggccugauuga

SEQ ID NO: 126480 - RNA, 19 nt, Artificial Sequence
  Description of Artificial Sequence: Synthetic oligonucleotide
uccugccguauccauaauc

SEQ ID NO: 126481 - RNA, 19 nt, Artificial Sequence
  Description of Artificial Sequence: Synthetic oligonucleotide
ucaugugcuccuaccugga

SEQ ID NO: 126482 - RNA, 19 nt, Artificial Sequence
  Description of Artificial Sequence: Synthetic oligonucleotide
ucuagacuuugcacaaguu

SEQ ID NO: 126483 - RNA, 19 nt, Artificial Sequence
  Description of Artificial Sequence: Synthetic oligonucleotide
gcuaacugcaaaauauuac

SEQ ID NO: 126484 - RNA, 19 nt, Artificial Sequence
  Description of Artificial Sequence: Synthetic oligonucleotide
aagacugggccugauugaa

SEQ ID NO: 126485 - RNA, 19 nt, Artificial Sequence
  Description of Artificial Sequence: Synthetic oligonucleotide
ucgcuaccuccuaaaaccu

SEQ ID NO: 126486 - RNA, 19 nt, Artificial Sequence
  Description of Artificial Sequence: Synthetic oligonucleotide
uacauacaacucuguguac

SEQ ID NO: 126487 - RNA, 19 nt, Artificial Sequence
  Description of Artificial Sequence: Synthetic oligonucleotide
gguuacuacugcuuguauc

SEQ ID NO: 126488 - RNA, 19 nt, Artificial Sequence
  Description of Artificial Sequence: Synthetic oligonucleotide
uccuacccucccuguagcg

SEQ ID NO: 126489 - RNA, 19 nt, Artificial Sequence
  Description of Artificial Sequence: Synthetic oligonucleotide
agacucgaauuuccaauau

SEQ ID NO: 126490 - RNA, 19 nt, Artificial Sequence
  Description of Artificial Sequence: Synthetic oligonucleotide
acugacggauuugauaaau

SEQ ID NO: 126491 - RNA, 19 nt, Artificial Sequence
  Description of Artificial Sequence: Synthetic oligonucleotide
acgggcaucugaaauucuc

SEQ ID NO: 126492 - RNA, 19 nt, Artificial Sequence
  Description of Artificial Sequence: Synthetic oligonucleotide
ucagucccgacgucacacc

SEQ ID NO: 126493 - RNA, 19 nt, Artificial Sequence
  Description of Artificial Sequence: Synthetic oligonucleotide
gguuagagucaugugcucc

SEQ ID NO: 126494 - RNA, 19 nt, Artificial Sequence
  Description of Artificial Sequence: Synthetic oligonucleotide
acaucucgggaaagguuac

SEQ ID NO: 126495 - RNA, 19 nt, Artificial Sequence
  Description of Artificial Sequence: Synthetic oligonucleotide
ugcaaacguaaauccuguc

SEQ ID NO: 126496 - RNA, 19 nt, Artificial Sequence
  Description of Artificial Sequence: Synthetic oligonucleotide
agacugacuuacaaccuca

SEQ ID NO: 126497 - RNA, 19 nt, Artificial Sequence
  Description of Artificial Sequence: Synthetic oligonucleotide
cagguuagagucaugugcu

SEQ ID NO: 126498 - RNA, 19 nt, Artificial Sequence
  Description of Artificial Sequence: Synthetic oligonucleotide
ucaggcuaauuuugguguu

SEQ ID NO: 126499 - RNA, 19 nt, Artificial Sequence
  Description of Artificial Sequence: Synthetic oligonucleotide
ggcuagacugacuuacaac

SEQ ID NO: 126500 - RNA, 19 nt, Artificial Sequence
  Description of Artificial Sequence: Synthetic oligonucleotide
auauucacgugcaaacgua

SEQ ID NO: 126501 - RNA, 19 nt, Artificial Sequence
  Description of Artificial Sequence: Synthetic oligonucleotide
guggauauccaauuugauu

SEQ ID NO: 126502 - RNA, 19 nt, Artificial Sequence
  Description of Artificial Sequence: Synthetic oligonucleotide
caucauaugacaguuguuu

SEQ ID NO: 126503 - RNA, 19 nt, Artificial Sequence
  Description of Artificial Sequence: Synthetic oligonucleotide
gauugaaucccugcuggcu

SEQ ID NO: 126504 - RNA, 19 nt, Artificial Sequence
  Description of Artificial Sequence: Synthetic oligonucleotide
gacgcauuaguuguucugu

SEQ ID NO: 126505 - RNA, 19 nt, Artificial Sequence
  Description of Artificial Sequence: Synthetic oligonucleotide
aggcuaauuuugguguucu

SEQ ID NO: 126506 - RNA, 19 nt, Artificial Sequence
  Description of Artificial Sequence: Synthetic oligonucleotide
aaaaccuccggggcggcua

SEQ ID NO: 126507 - RNA, 19 nt, Artificial Sequence
  Description of Artificial Sequence: Synthetic oligonucleotide
ccuugacggcuauuuaagg

SEQ ID NO: 126508 - RNA, 19 nt, Artificial Sequence
  Description of Artificial Sequence: Synthetic oligonucleotide
acgggauuuaucauaucaa

SEQ ID NO: 126509 - RNA, 19 nt, Artificial Sequence
  Description of Artificial Sequence: Synthetic oligonucleotide
cuccucgcucgacuggagg

SEQ ID NO: 126510 - RNA, 19 nt, Artificial Sequence
  Description of Artificial Sequence: Synthetic oligonucleotide
uugaacgcugugugcugac

SEQ ID NO: 126511 - RNA, 19 nt, Artificial Sequence
  Description of Artificial Sequence: Synthetic oligonucleotide
auuggcagacauccaccau

SEQ ID NO: 126512 - RNA, 19 nt, Artificial Sequence
  Description of Artificial Sequence: Synthetic oligonucleotide
ucgcucgacuggaggauac

SEQ ID NO: 126513 - RNA, 19 nt, Artificial Sequence
  Description of Artificial Sequence: Synthetic oligonucleotide
gcaaacguaaauccugucu

SEQ ID NO: 126514 - RNA, 19 nt, Artificial Sequence
  Description of Artificial Sequence: Synthetic oligonucleotide
gcugacaacgguuacuacu

SEQ ID NO: 126515 - RNA, 19 nt, Artificial Sequence
  Description of Artificial Sequence: Synthetic oligonucleotide
cuucuagacuuugcacaag

SEQ ID NO: 126516 - RNA, 19 nt, Artificial Sequence
  Description of Artificial Sequence: Synthetic oligonucleotide
acgugcaaacguaaauccu

SEQ ID NO: 126517 - RNA, 19 nt, Artificial Sequence
  Description of Artificial Sequence: Synthetic oligonucleotide
caagaggacuggcuuagaa

SEQ ID NO: 126518 - RNA, 19 nt, Artificial Sequence
  Description of Artificial Sequence: Synthetic oligonucleotide
aaaccuccggggcggcuau

SEQ ID NO: 126519 - RNA, 19 nt, Artificial Sequence
  Description of Artificial Sequence: Synthetic oligonucleotide
aggacugagcacacuucag

SEQ ID NO: 126520 - RNA, 19 nt, Artificial Sequence
  Description of Artificial Sequence: Synthetic oligonucleotide
ugcugacaacgguuacuac

SEQ ID NO: 126521 - RNA, 19 nt, Artificial Sequence
  Description of Artificial Sequence: Synthetic oligonucleotide
ugaacgcugugugcugaca

SEQ ID NO: 126522 - RNA, 19 nt, Artificial Sequence
  Description of Artificial Sequence: Synthetic oligonucleotide
gaaagguuaccgacguaua

SEQ ID NO: 126523 - RNA, 19 nt, Artificial Sequence
  Description of Artificial Sequence: Synthetic oligonucleotide
ucggguugcccaguuaguu

SEQ ID NO: 126524 - RNA, 19 nt, Artificial Sequence
  Description of Artificial Sequence: Synthetic oligonucleotide
augugauauucacgugcaa

SEQ ID NO: 126525 - RNA, 19 nt, Artificial Sequence
  Description of Artificial Sequence: Synthetic oligonucleotide
ucccuuagacuuccccgua

SEQ ID NO: 126526 - RNA, 19 nt, Artificial Sequence
  Description of Artificial Sequence: Synthetic oligonucleotide
guugaacgcugugugcuga

SEQ ID NO: 126527 - RNA, 19 nt, Artificial Sequence
  Description of Artificial Sequence: Synthetic oligonucleotide
caucucgggaaagguuacc

SEQ ID NO: 126528 - RNA, 19 nt, Artificial Sequence
  Description of Artificial Sequence: Synthetic oligonucleotide
cgacguauagagucuuggg

SEQ ID NO: 126529 - RNA, 19 nt, Artificial Sequence
  Description of Artificial Sequence: Synthetic oligonucleotide
ggaaagguuaccgacguau

SEQ ID NO: 126530 - RNA, 19 nt, Artificial Sequence
  Description of Artificial Sequence: Synthetic oligonucleotide
agucccgacgucacaccuc

SEQ ID NO: 126531 - RNA, 19 nt, Artificial Sequence
  Description of Artificial Sequence: Synthetic oligonucleotide
ccgacguauagagucuugg

SEQ ID NO: 126532 - RNA, 19 nt, Artificial Sequence
  Description of Artificial Sequence: Synthetic oligonucleotide
ggguuguugcccaauuuca

SEQ ID NO: 126533 - RNA, 19 nt, Artificial Sequence
  Description of Artificial Sequence: Synthetic oligonucleotide
uucugucagucccgacguc

SEQ ID NO: 126534 - RNA, 19 nt, Artificial Sequence
  Description of Artificial Sequence: Synthetic oligonucleotide
cuguugcacgggauuuauc

SEQ ID NO: 126535 - RNA, 19 nt, Artificial Sequence
  Description of Artificial Sequence: Synthetic oligonucleotide
cuaaaaccuccggggcggc

SEQ ID NO: 126536 - RNA, 19 nt, Artificial Sequence
  Description of Artificial Sequence: Synthetic oligonucleotide
gcguuuccauaccacuggc

SEQ ID NO: 126537 - RNA, 19 nt, Artificial Sequence
  Description of Artificial Sequence: Synthetic oligonucleotide
ccacaauucacaggggcuc

SEQ ID NO: 126538 - RNA, 19 nt, Artificial Sequence
  Description of Artificial Sequence: Synthetic oligonucleotide
ccgaccuggccauaugcug

SEQ ID NO: 126539 - RNA, 19 nt, Artificial Sequence
  Description of Artificial Sequence: Synthetic oligonucleotide
gccugacagaggaauauuc

SEQ ID NO: 126540 - RNA, 19 nt, Artificial Sequence
  Description of Artificial Sequence: Synthetic oligonucleotide
cucggaagcaugcugccau

SEQ ID NO: 126541 - RNA, 19 nt, Artificial Sequence
  Description of Artificial Sequence: Synthetic oligonucleotide
gacggcuauuuaaggaggu

SEQ ID NO: 126542 - RNA, 19 nt, Artificial Sequence
  Description of Artificial Sequence: Synthetic oligonucleotide
gugcaaacguaaauccugu

SEQ ID NO: 126543 - RNA, 19 nt, Artificial Sequence
  Description of Artificial Sequence: Synthetic oligonucleotide
uaccgacguauagagucuu

SEQ ID NO: 126544 - RNA, 19 nt, Artificial Sequence
  Description of Artificial Sequence: Synthetic oligonucleotide
ggcauuuguacugacggau

SEQ ID NO: 126545 - RNA, 19 nt, Artificial Sequence
  Description of Artificial Sequence: Synthetic oligonucleotide
ccgaauaaaugaauauccu

SEQ ID NO: 126546 - RNA, 19 nt, Artificial Sequence
  Description of Artificial Sequence: Synthetic oligonucleotide
accgacguauagagucuug

SEQ ID NO: 126547 - RNA, 19 nt, Artificial Sequence
  Description of Artificial Sequence: Synthetic oligonucleotide
gccuauguugaggagccuc

SEQ ID NO: 126548 - RNA, 19 nt, Artificial Sequence
  Description of Artificial Sequence: Synthetic oligonucleotide
cccuuagacuuccccguag

SEQ ID NO: 126549 - RNA, 19 nt, Artificial Sequence
  Description of Artificial Sequence: Synthetic oligonucleotide
gccguauccauaaucauuu

SEQ ID NO: 126550 - RNA, 19 nt, Artificial Sequence
  Description of Artificial Sequence: Synthetic oligonucleotide
acggcuauuuaaggaggua

SEQ ID NO: 126551 - RNA, 19 nt, Artificial Sequence
  Description of Artificial Sequence: Synthetic oligonucleotide
agccugacagaggaauauu

SEQ ID NO: 126552 - RNA, 19 nt, Artificial Sequence
  Description of Artificial Sequence: Synthetic oligonucleotide
aucgcaugugcugcacuuu

SEQ ID NO: 126553 - RNA, 19 nt, Artificial Sequence
  Description of Artificial Sequence: Synthetic oligonucleotide
uuccugccguauccauaau

SEQ ID NO: 126554 - RNA, 19 nt, Artificial Sequence
  Description of Artificial Sequence: Synthetic oligonucleotide
cccgacgucacaccuccac

SEQ ID NO: 126555 - RNA, 19 nt, Artificial Sequence
  Description of Artificial Sequence: Synthetic oligonucleotide
ccccgaccuggccauaugc

SEQ ID NO: 126556 - RNA, 19 nt, Artificial Sequence
  Description of Artificial Sequence: Synthetic oligonucleotide
ggacgcuccaagagaucag

SEQ ID NO: 126557 - RNA, 19 nt, Artificial Sequence
  Description of Artificial Sequence: Synthetic oligonucleotide
cucaagccugacagaggaa

SEQ ID NO: 126558 - RNA, 19 nt, Artificial Sequence
  Description of Artificial Sequence: Synthetic oligonucleotide
cagucuaagugaacaucau

SEQ ID NO: 126559 - RNA, 19 nt, Artificial Sequence
  Description of Artificial Sequence: Synthetic oligonucleotide
ugccuauguugaggagccu

SEQ ID NO: 126560 - RNA, 19 nt, Artificial Sequence
  Description of Artificial Sequence: Synthetic oligonucleotide
ugccaaccauuaggcacau

SEQ ID NO: 126561 - RNA, 19 nt, Artificial Sequence
  Description of Artificial Sequence: Synthetic oligonucleotide
gccauacauuccauaggca

SEQ ID NO: 126562 - RNA, 19 nt, Artificial Sequence
  Description of Artificial Sequence: Synthetic oligonucleotide
ccuauguugaggagccucu

SEQ ID NO: 126563 - RNA, 19 nt, Artificial Sequence
  Description of Artificial Sequence: Synthetic oligonucleotide
uccauaccacuggccccga

SEQ ID NO: 126564 - RNA, 19 nt, Artificial Sequence
  Description of Artificial Sequence: Synthetic oligonucleotide
ucccgacgucacaccucca

SEQ ID NO: 126565 - RNA, 19 nt, Artificial Sequence
  Description of Artificial Sequence: Synthetic oligonucleotide
cuguagcgucaagccacug

SEQ ID NO: 126566 - RNA, 19 nt, Artificial Sequence
  Description of Artificial Sequence: Synthetic oligonucleotide
cuccuaccuggaagauaca

SEQ ID NO: 126567 - RNA, 19 nt, Artificial Sequence
  Description of Artificial Sequence: Synthetic oligonucleotide
aaccuccggggcggcuaug

SEQ ID NO: 126568 - RNA, 19 nt, Artificial Sequence
  Description of Artificial Sequence: Synthetic oligonucleotide
ccguagccaugucuuuuac

SEQ ID NO: 126569 - RNA, 19 nt, Artificial Sequence
  Description of Artificial Sequence: Synthetic oligonucleotide
cagucccgacgucacaccu

SEQ ID NO: 126570 - RNA, 19 nt, Artificial Sequence
  Description of Artificial Sequence: Synthetic oligonucleotide
cuggggcuagacugacuua

SEQ ID NO: 126571 - RNA, 19 nt, Artificial Sequence
  Description of Artificial Sequence: Synthetic oligonucleotide
ccauaugcugguggauauc

SEQ ID NO: 126572 - RNA, 19 nt, Artificial Sequence
  Description of Artificial Sequence: Synthetic oligonucleotide
ccgacgucacaccuccaca

SEQ ID NO: 126573 - RNA, 19 nt, Artificial Sequence
  Description of Artificial Sequence: Synthetic oligonucleotide
caguugcuggggcuagacu

SEQ ID NO: 126574 - RNA, 19 nt, Artificial Sequence
  Description of Artificial Sequence: Synthetic oligonucleotide
cgcuaccuccuaaaaccuc

SEQ ID NO: 126575 - RNA, 19 nt, Artificial Sequence
  Description of Artificial Sequence: Synthetic oligonucleotide
caaaacaguaugggucauu

SEQ ID NO: 126576 - RNA, 19 nt, Artificial Sequence
  Description of Artificial Sequence: Synthetic oligonucleotide
ccuucgcuaccuccuaaaa

SEQ ID NO: 126577 - RNA, 19 nt, Artificial Sequence
  Description of Artificial Sequence: Synthetic oligonucleotide
cucgcucgacuggaggaua

SEQ ID NO: 126578 - RNA, 19 nt, Artificial Sequence
  Description of Artificial Sequence: Synthetic oligonucleotide
gggaaagguuaccgacgua

SEQ ID NO: 126579 - RNA, 19 nt, Artificial Sequence
  Description of Artificial Sequence: Synthetic oligonucleotide
gccccgaccuggccauaug

SEQ ID NO: 126580 - RNA, 19 nt, Artificial Sequence
  Description of Artificial Sequence: Synthetic oligonucleotide
ggccaaucuguugugcguu

SEQ ID NO: 126581 - RNA, 19 nt, Artificial Sequence
  Description of Artificial Sequence: Synthetic oligonucleotide
ccgcaucccauuuguugaa

SEQ ID NO: 126582 - RNA, 19 nt, Artificial Sequence
  Description of Artificial Sequence: Synthetic oligonucleotide
cgggaaagguuaccgacgu

SEQ ID NO: 126583 - RNA, 19 nt, Artificial Sequence
  Description of Artificial Sequence: Synthetic oligonucleotide
gcccuucgcuaccuccuaa

SEQ ID NO: 126584 - RNA, 19 nt, Artificial Sequence
  Description of Artificial Sequence: Synthetic oligonucleotide
cccgaccuggccauaugcu

SEQ ID NO: 126585 - RNA, 19 nt, Artificial Sequence
  Description of Artificial Sequence: Synthetic oligonucleotide
ccuguagcgucaagccacu

SEQ ID NO: 126586 - RNA, 19 nt, Artificial Sequence
  Description of Artificial Sequence: Synthetic oligonucleotide
gcucgacuggaggauacuu

SEQ ID NO: 126587 - RNA, 19 nt, Artificial Sequence
  Description of Artificial Sequence: Synthetic oligonucleotide
gguagacggcaaaguuuau

SEQ ID NO: 126588 - RNA, 19 nt, Artificial Sequence
  Description of Artificial Sequence: Synthetic oligonucleotide
ccguauccauaaucauuuu

SEQ ID NO: 126589 - RNA, 19 nt, Artificial Sequence
  Description of Artificial Sequence: Synthetic oligonucleotide
cgcaucccauuuguugaaa

SEQ ID NO: 126590 - RNA, 19 nt, Artificial Sequence
  Description of Artificial Sequence: Synthetic oligonucleotide
ccucgcucgacuggaggau

SEQ ID NO: 126591 - RNA, 19 nt, Artificial Sequence
  Description of Artificial Sequence: Synthetic oligonucleotide
ggccccgaccuggccauau

SEQ ID NO: 126592 - RNA, 19 nt, Artificial Sequence
  Description of Artificial Sequence: Synthetic oligonucleotide
cgggccuccucgcucgacu

SEQ ID NO: 126593 - RNA, 19 nt, Artificial Sequence
  Description of Artificial Sequence: Synthetic oligonucleotide
cgcucgacuggaggauacu

SEQ ID NO: 126594 - RNA, 19 nt, Artificial Sequence
  Description of Artificial Sequence: Synthetic oligonucleotide
aacucuaaaaugaugaucc

SEQ ID NO: 126595 - RNA, 19 nt, Artificial Sequence
  Description of Artificial Sequence: Synthetic oligonucleotide
ugaguuauggauuuggagg

SEQ ID NO: 126596 - RNA, 19 nt, Artificial Sequence
  Description of Artificial Sequence: Synthetic oligonucleotide
aaaacguugaguuggagca

SEQ ID NO: 126597 - RNA, 19 nt, Artificial Sequence
  Description of Artificial Sequence: Synthetic oligonucleotide
aagcaugccagguacaagc

SEQ ID NO: 126598 - RNA, 19 nt, Artificial Sequence
  Description of Artificial Sequence: Synthetic oligonucleotide
ugaacuauauugauaggcg

SEQ ID NO: 126599 - RNA, 19 nt, Artificial Sequence
  Description of Artificial Sequence: Synthetic oligonucleotide
agagcauuauaauuaagac

SEQ ID NO: 126600 - RNA, 19 nt, Artificial Sequence
  Description of Artificial Sequence: Synthetic oligonucleotide
uuuagagagaaccugauua

SEQ ID NO: 126601 - RNA, 19 nt, Artificial Sequence
  Description of Artificial Sequence: Synthetic oligonucleotide
aaauguuaucauuaaccag

SEQ ID NO: 126602 - RNA, 19 nt, Artificial Sequence
  Description of Artificial Sequence: Synthetic oligonucleotide
uacaggacguuaaacaggg

SEQ ID NO: 126603 - RNA, 19 nt, Artificial Sequence
  Description of Artificial Sequence: Synthetic oligonucleotide
acuaacaggaaccagcuug

SEQ ID NO: 126604 - RNA, 19 nt, Artificial Sequence
  Description of Artificial Sequence: Synthetic oligonucleotide
auaguaaguaacuggacag

SEQ ID NO: 126605 - RNA, 19 nt, Artificial Sequence
  Description of Artificial Sequence: Synthetic oligonucleotide
uuaaaacauaguaaguaac

SEQ ID NO: 126606 - RNA, 19 nt, Artificial Sequence
  Description of Artificial Sequence: Synthetic oligonucleotide
ucuuuauacgccuuccggg

SEQ ID NO: 126607 - RNA, 19 nt, Artificial Sequence
  Description of Artificial Sequence: Synthetic oligonucleotide
ucuacuauugaguuguacu

SEQ ID NO: 126608 - RNA, 19 nt, Artificial Sequence
  Description of Artificial Sequence: Synthetic oligonucleotide
uuaucauuaaccaggguuc

SEQ ID NO: 126609 - RNA, 19 nt, Artificial Sequence
  Description of Artificial Sequence: Synthetic oligonucleotide
uuaaggguauucagcaugg

SEQ ID NO: 126610 - RNA, 19 nt, Artificial Sequence
  Description of Artificial Sequence: Synthetic oligonucleotide
aauucagaagaucucggca

SEQ ID NO: 126611 - RNA, 19 nt, Artificial Sequence
  Description of Artificial Sequence: Synthetic oligonucleotide
uccagagaauuacaggacg

SEQ ID NO: 126612 - RNA, 19 nt, Artificial Sequence
  Description of Artificial Sequence: Synthetic oligonucleotide
ucuuuagugugaaaagcag

SEQ ID NO: 126613 - RNA, 19 nt, Artificial Sequence
  Description of Artificial Sequence: Synthetic oligonucleotide
aaacuuacaagcucuugca

SEQ ID NO: 126614 - RNA, 19 nt, Artificial Sequence
  Description of Artificial Sequence: Synthetic oligonucleotide
ugacuuuugguuaaaggcu

SEQ ID NO: 126615 - RNA, 19 nt, Artificial Sequence
  Description of Artificial Sequence: Synthetic oligonucleotide
gaaaacguugaguuggagc

SEQ ID NO: 126616 - RNA, 19 nt, Artificial Sequence
  Description of Artificial Sequence: Synthetic oligonucleotide
ugauaggcgaguuuucagg

SEQ ID NO: 126617 - RNA, 19 nt, Artificial Sequence
  Description of Artificial Sequence: Synthetic oligonucleotide
uaaaucuagcugcacgggg

SEQ ID NO: 126618 - RNA, 19 nt, Artificial Sequence
  Description of Artificial Sequence: Synthetic oligonucleotide
guuagcagagucuuuagug

SEQ ID NO: 126619 - RNA, 19 nt, Artificial Sequence
  Description of Artificial Sequence: Synthetic oligonucleotide
acugauauggguucaugag

SEQ ID NO: 126620 - RNA, 19 nt, Artificial Sequence
  Description of Artificial Sequence: Synthetic oligonucleotide
uugaaaagccacuaccuca

SEQ ID NO: 126621 - RNA, 19 nt, Artificial Sequence
  Description of Artificial Sequence: Synthetic oligonucleotide
uuagaggaaguaaugucca

SEQ ID NO: 126622 - RNA, 19 nt, Artificial Sequence
  Description of Artificial Sequence: Synthetic oligonucleotide
gaggaaguaauguccagag

SEQ ID NO: 126623 - RNA, 19 nt, Artificial Sequence
  Description of Artificial Sequence: Synthetic oligonucleotide
ugguuaucguugaugaugc

SEQ ID NO: 126624 - RNA, 19 nt, Artificial Sequence
  Description of Artificial Sequence: Synthetic oligonucleotide
aaucuauuaaauaggcucu

SEQ ID NO: 126625 - RNA, 19 nt, Artificial Sequence
  Description of Artificial Sequence: Synthetic oligonucleotide
uccucaaaauauaaagacu

SEQ ID NO: 126626 - RNA, 19 nt, Artificial Sequence
  Description of Artificial Sequence: Synthetic oligonucleotide
gcuaugacguuguagaggg

SEQ ID NO: 126627 - RNA, 19 nt, Artificial Sequence
  Description of Artificial Sequence: Synthetic oligonucleotide
ugaugcauacuuaagggua

SEQ ID NO: 126628 - RNA, 19 nt, Artificial Sequence
  Description of Artificial Sequence: Synthetic oligonucleotide
cuuaaggguauucagcaug

SEQ ID NO: 126629 - RNA, 19 nt, Artificial Sequence
  Description of Artificial Sequence: Synthetic oligonucleotide
aacuuacaagcucuugcag

SEQ ID NO: 126630 - RNA, 19 nt, Artificial Sequence
  Description of Artificial Sequence: Synthetic oligonucleotide
ucugacauuuccaagccau

SEQ ID NO: 126631 - RNA, 19 nt, Artificial Sequence
  Description of Artificial Sequence: Synthetic oligonucleotide
ugaggcaagucauugguga

SEQ ID NO: 126632 - RNA, 19 nt, Artificial Sequence
  Description of Artificial Sequence: Synthetic oligonucleotide
cuuuauacgccuuccgggc

SEQ ID NO: 126633 - RNA, 19 nt, Artificial Sequence
  Description of Artificial Sequence: Synthetic oligonucleotide
uuaucguugaugaugccau

SEQ ID NO: 126634 - RNA, 19 nt, Artificial Sequence
  Description of Artificial Sequence: Synthetic oligonucleotide
ugauauggguucaugagua

SEQ ID NO: 126635 - RNA, 19 nt, Artificial Sequence
  Description of Artificial Sequence: Synthetic oligonucleotide
accgaaauaguugaagauc

SEQ ID NO: 126636 - RNA, 19 nt, Artificial Sequence
  Description of Artificial Sequence: Synthetic oligonucleotide
uccuccgugcccaaaacag

SEQ ID NO: 126637 - RNA, 19 nt, Artificial Sequence
  Description of Artificial Sequence: Synthetic oligonucleotide
acucgauucuacuauugag

SEQ ID NO: 126638 - RNA, 19 nt, Artificial Sequence
  Description of Artificial Sequence: Synthetic oligonucleotide
ugugaugugccaaccaagu

SEQ ID NO: 126639 - RNA, 19 nt, Artificial Sequence
  Description of Artificial Sequence: Synthetic oligonucleotide
ugaugugccaaccaaguuu

SEQ ID NO: 126640 - RNA, 19 nt, Artificial Sequence
  Description of Artificial Sequence: Synthetic oligonucleotide
uuauaaauugaggugguau

SEQ ID NO: 126641 - RNA, 19 nt, Artificial Sequence
  Description of Artificial Sequence: Synthetic oligonucleotide
gguacaagcgugcuggugg

SEQ ID NO: 126642 - RNA, 19 nt, Artificial Sequence
  Description of Artificial Sequence: Synthetic oligonucleotide
ccacuaaucuauuaaauag

SEQ ID NO: 126643 - RNA, 19 nt, Artificial Sequence
  Description of Artificial Sequence: Synthetic oligonucleotide
gaguuauggauuuggagga

SEQ ID NO: 126644 - RNA, 19 nt, Artificial Sequence
  Description of Artificial Sequence: Synthetic oligonucleotide
gcugaugcauacuuaaggg

SEQ ID NO: 126645 - RNA, 19 nt, Artificial Sequence
  Description of Artificial Sequence: Synthetic oligonucleotide
ugugaguuuacugggauuc

SEQ ID NO: 126646 - RNA, 19 nt, Artificial Sequence
  Description of Artificial Sequence: Synthetic oligonucleotide
uccacuaaucuauuaaaua

SEQ ID NO: 126647 - RNA, 19 nt, Artificial Sequence
  Description of Artificial Sequence: Synthetic oligonucleotide
acuuacaagcucuugcaga

SEQ ID NO: 126648 - RNA, 19 nt, Artificial Sequence
  Description of Artificial Sequence: Synthetic oligonucleotide
ucacuuaguucuugaaacc

SEQ ID NO: 126649 - RNA, 19 nt, Artificial Sequence
  Description of Artificial Sequence: Synthetic oligonucleotide
uacgaaagggaucuccugu

SEQ ID NO: 126650 - RNA, 19 nt, Artificial Sequence
  Description of Artificial Sequence: Synthetic oligonucleotide
gaacugacgugguaauggg

SEQ ID NO: 126651 - RNA, 19 nt, Artificial Sequence
  Description of Artificial Sequence: Synthetic oligonucleotide
gauucuacuauugaguugu

SEQ ID NO: 126652 - RNA, 19 nt, Artificial Sequence
  Description of Artificial Sequence: Synthetic oligonucleotide
cauaguaaguaacuggaca

SEQ ID NO: 126653 - RNA, 19 nt, Artificial Sequence
  Description of Artificial Sequence: Synthetic oligonucleotide
aacacuaguuaaaaguuaa

SEQ ID NO: 126654 - RNA, 19 nt, Artificial Sequence
  Description of Artificial Sequence: Synthetic oligonucleotide
uacugauauggguucauga

SEQ ID NO: 126655 - RNA, 19 nt, Artificial Sequence
  Description of Artificial Sequence: Synthetic oligonucleotide
auacuuuuaaggugugaug

SEQ ID NO: 126656 - RNA, 19 nt, Artificial Sequence
  Description of Artificial Sequence: Synthetic oligonucleotide
ucguccuugucacuugcgg

SEQ ID NO: 126657 - RNA, 19 nt, Artificial Sequence
  Description of Artificial Sequence: Synthetic oligonucleotide
ugccaaccaaguuuaaaug

SEQ ID NO: 126658 - RNA, 19 nt, Artificial Sequence
  Description of Artificial Sequence: Synthetic oligonucleotide
agucagacgucccuucuuc

SEQ ID NO: 126659 - RNA, 19 nt, Artificial Sequence
  Description of Artificial Sequence: Synthetic oligonucleotide
cuuccaagggcaaauacga

SEQ ID NO: 126660 - RNA, 19 nt, Artificial Sequence
  Description of Artificial Sequence: Synthetic oligonucleotide
gaacuacugacaucaagca

SEQ ID NO: 126661 - RNA, 19 nt, Artificial Sequence
  Description of Artificial Sequence: Synthetic oligonucleotide
uuaggaacugacgugguaa

SEQ ID NO: 126662 - RNA, 19 nt, Artificial Sequence
  Description of Artificial Sequence: Synthetic oligonucleotide
uguccccuaaaucuagcug

SEQ ID NO: 126663 - RNA, 19 nt, Artificial Sequence
  Description of Artificial Sequence: Synthetic oligonucleotide
ucauacaguauggagaguu

SEQ ID NO: 126664 - RNA, 19 nt, Artificial Sequence
  Description of Artificial Sequence: Synthetic oligonucleotide
uuccucggagccaggaagg

SEQ ID NO: 126665 - RNA, 19 nt, Artificial Sequence
  Description of Artificial Sequence: Synthetic oligonucleotide
uacgcgagcggucuggugu

SEQ ID NO: 126666 - RNA, 19 nt, Artificial Sequence
  Description of Artificial Sequence: Synthetic oligonucleotide
aaauaggcucucagcaccg

SEQ ID NO: 126667 - RNA, 19 nt, Artificial Sequence
  Description of Artificial Sequence: Synthetic oligonucleotide
ucguuuaggaacugacgug

SEQ ID NO: 126668 - RNA, 19 nt, Artificial Sequence
  Description of Artificial Sequence: Synthetic oligonucleotide
ccuaaaucuagcugcacgg

SEQ ID NO: 126669 - RNA, 19 nt, Artificial Sequence
  Description of Artificial Sequence: Synthetic oligonucleotide
auaaagacucaggauuuag

SEQ ID NO: 126670 - RNA, 19 nt, Artificial Sequence
  Description of Artificial Sequence: Synthetic oligonucleotide
ucgauucuacuauugaguu

SEQ ID NO: 126671 - RNA, 19 nt, Artificial Sequence
  Description of Artificial Sequence: Synthetic oligonucleotide
caugaguauaaucuuccuc

SEQ ID NO: 126672 - RNA, 19 nt, Artificial Sequence
  Description of Artificial Sequence: Synthetic oligonucleotide
aaucagagugcucuuuguu

SEQ ID NO: 126673 - RNA, 19 nt, Artificial Sequence
  Description of Artificial Sequence: Synthetic oligonucleotide
uaggcgaguuuucagguaa

SEQ ID NO: 126674 - RNA, 19 nt, Artificial Sequence
  Description of Artificial Sequence: Synthetic oligonucleotide
auauugauaggcgaguuuu

SEQ ID NO: 126675 - RNA, 19 nt, Artificial Sequence
  Description of Artificial Sequence: Synthetic oligonucleotide
gguaaugggaaucggaguc

SEQ ID NO: 126676 - RNA, 19 nt, Artificial Sequence
  Description of Artificial Sequence: Synthetic oligonucleotide
acauuuccaagccaucgga

SEQ ID NO: 126677 - RNA, 19 nt, Artificial Sequence
  Description of Artificial Sequence: Synthetic oligonucleotide
uauauugauaggcgaguuu

SEQ ID NO: 126678 - RNA, 19 nt, Artificial Sequence
  Description of Artificial Sequence: Synthetic oligonucleotide
ucuauuaaauaggcucuca

SEQ ID NO: 126679 - RNA, 19 nt, Artificial Sequence
  Description of Artificial Sequence: Synthetic oligonucleotide
ucauuaaccaggguucagu

SEQ ID NO: 126680 - RNA, 19 nt, Artificial Sequence
  Description of Artificial Sequence: Synthetic oligonucleotide
gcugacuuuugguuaaagg

SEQ ID NO: 126681 - RNA, 19 nt, Artificial Sequence
  Description of Artificial Sequence: Synthetic oligonucleotide
uuuauacgccuuccgggcu

SEQ ID NO: 126682 - RNA, 19 nt, Artificial Sequence
  Description of Artificial Sequence: Synthetic oligonucleotide
cuaaaucuagcugcacggg

SEQ ID NO: 126683 - RNA, 19 nt, Artificial Sequence
  Description of Artificial Sequence: Synthetic oligonucleotide
acauaguaaguaacuggac

SEQ ID NO: 126684 - RNA, 19 nt, Artificial Sequence
  Description of Artificial Sequence: Synthetic oligonucleotide
aggaaguuucuguugaaua

SEQ ID NO: 126685 - RNA, 19 nt, Artificial Sequence
  Description of Artificial Sequence: Synthetic oligonucleotide
aucgcugaugcauacuuaa

SEQ ID NO: 126686 - RNA, 19 nt, Artificial Sequence
  Description of Artificial Sequence: Synthetic oligonucleotide
ugaguauucuugugcugug

SEQ ID NO: 126687 - RNA, 19 nt, Artificial Sequence
  Description of Artificial Sequence: Synthetic oligonucleotide
uauugauaggcgaguuuuc

SEQ ID NO: 126688 - RNA, 19 nt, Artificial Sequence
  Description of Artificial Sequence: Synthetic oligonucleotide
auugauaggcgaguuuuca

SEQ ID NO: 126689 - RNA, 19 nt, Artificial Sequence
  Description of Artificial Sequence: Synthetic oligonucleotide
auacgaaagggaucuccug

SEQ ID NO: 126690 - RNA, 19 nt, Artificial Sequence
  Description of Artificial Sequence: Synthetic oligonucleotide
ucuggcgugcuuucauugc

SEQ ID NO: 126691 - RNA, 19 nt, Artificial Sequence
  Description of Artificial Sequence: Synthetic oligonucleotide
uaucauuaaccaggguuca

SEQ ID NO: 126692 - RNA, 19 nt, Artificial Sequence
  Description of Artificial Sequence: Synthetic oligonucleotide
guuaucguugaugaugcca

SEQ ID NO: 126693 - RNA, 19 nt, Artificial Sequence
  Description of Artificial Sequence: Synthetic oligonucleotide
ugcagcggcgacuggauac

SEQ ID NO: 126694 - RNA, 19 nt, Artificial Sequence
  Description of Artificial Sequence: Synthetic oligonucleotide
uucguccuugucacuugcg

SEQ ID NO: 126695 - RNA, 19 nt, Artificial Sequence
  Description of Artificial Sequence: Synthetic oligonucleotide
agaacuuccuuuugauaaa

SEQ ID NO: 126696 - RNA, 19 nt, Artificial Sequence
  Description of Artificial Sequence: Synthetic oligonucleotide
aucggaaguuuccaccaug

SEQ ID NO: 126697 - RNA, 19 nt, Artificial Sequence
  Description of Artificial Sequence: Synthetic oligonucleotide
ucgcugaugcauacuuaag

SEQ ID NO: 126698 - RNA, 19 nt, Artificial Sequence
  Description of Artificial Sequence: Synthetic oligonucleotide
aucuggcgugcuuucauug

SEQ ID NO: 126699 - RNA, 19 nt, Artificial Sequence
  Description of Artificial Sequence: Synthetic oligonucleotide
agccaucggaaguuuccac

SEQ ID NO: 126700 - RNA, 19 nt, Artificial Sequence
  Description of Artificial Sequence: Synthetic oligonucleotide
agaggaaguaauguccaga

SEQ ID NO: 126701 - RNA, 19 nt, Artificial Sequence
  Description of Artificial Sequence: Synthetic oligonucleotide
uggcuaugacguuguagag

SEQ ID NO: 126702 - RNA, 19 nt, Artificial Sequence
  Description of Artificial Sequence: Synthetic oligonucleotide
aggacguuaaacagggcug

SEQ ID NO: 126703 - RNA, 19 nt, Artificial Sequence
  Description of Artificial Sequence: Synthetic oligonucleotide
gugcucuuuguucacggug

SEQ ID NO: 126704 - RNA, 19 nt, Artificial Sequence
  Description of Artificial Sequence: Synthetic oligonucleotide
gaauggcccauguggugag

SEQ ID NO: 126705 - RNA, 19 nt, Artificial Sequence
  Description of Artificial Sequence: Synthetic oligonucleotide
uaaugggaaucggagucug

SEQ ID NO: 126706 - RNA, 19 nt, Artificial Sequence
  Description of Artificial Sequence: Synthetic oligonucleotide
cauggcuaugacguuguag

SEQ ID NO: 126707 - RNA, 19 nt, Artificial Sequence
  Description of Artificial Sequence: Synthetic oligonucleotide
gauaggcgaguuuucaggu

SEQ ID NO: 126708 - RNA, 19 nt, Artificial Sequence
  Description of Artificial Sequence: Synthetic oligonucleotide
uccuuacucacagggguug

SEQ ID NO: 126709 - RNA, 19 nt, Artificial Sequence
  Description of Artificial Sequence: Synthetic oligonucleotide
cucgauucuacuauugagu

SEQ ID NO: 126710 - RNA, 19 nt, Artificial Sequence
  Description of Artificial Sequence: Synthetic oligonucleotide
ucaagcaugccagguacaa

SEQ ID NO: 126711 - RNA, 19 nt, Artificial Sequence
  Description of Artificial Sequence: Synthetic oligonucleotide
uuugguuaucguugaugau

SEQ ID NO: 126712 - RNA, 19 nt, Artificial Sequence
  Description of Artificial Sequence: Synthetic oligonucleotide
aguuggagcaucagggaca

SEQ ID NO: 126713 - RNA, 19 nt, Artificial Sequence
  Description of Artificial Sequence: Synthetic oligonucleotide
cccuaaaucuagcugcacg

SEQ ID NO: 126714 - RNA, 19 nt, Artificial Sequence
  Description of Artificial Sequence: Synthetic oligonucleotide
ggcuaugacguuguagagg

SEQ ID NO: 126715 - RNA, 19 nt, Artificial Sequence
  Description of Artificial Sequence: Synthetic oligonucleotide
cauugggcugccuaugcca

SEQ ID NO: 126716 - RNA, 19 nt, Artificial Sequence
  Description of Artificial Sequence: Synthetic oligonucleotide
aguuauggauuuggaggag

SEQ ID NO: 126717 - RNA, 19 nt, Artificial Sequence
  Description of Artificial Sequence: Synthetic oligonucleotide
aagccaucggaaguuucca

SEQ ID NO: 126718 - RNA, 19 nt, Artificial Sequence
  Description of Artificial Sequence: Synthetic oligonucleotide
aggucguccggcuucaguu

SEQ ID NO: 126719 - RNA, 19 nt, Artificial Sequence
  Description of Artificial Sequence: Synthetic oligonucleotide
uuauacgccuuccgggcuu

SEQ ID NO: 126720 - RNA, 19 nt, Artificial Sequence
  Description of Artificial Sequence: Synthetic oligonucleotide
ccauauaaagucugugguc

SEQ ID NO: 126721 - RNA, 19 nt, Artificial Sequence
  Description of Artificial Sequence: Synthetic oligonucleotide
aagacaucgcugaugcaua

SEQ ID NO: 126722 - RNA, 19 nt, Artificial Sequence
  Description of Artificial Sequence: Synthetic oligonucleotide
aucauuaaccaggguucag

SEQ ID NO: 126723 - RNA, 19 nt, Artificial Sequence
  Description of Artificial Sequence: Synthetic oligonucleotide
cgcugaugcauacuuaagg

SEQ ID NO: 126724 - RNA, 19 nt, Artificial Sequence
  Description of Artificial Sequence: Synthetic oligonucleotide
gugccaaccaaguuuaaau

SEQ ID NO: 126725 - RNA, 19 nt, Artificial Sequence
  Description of Artificial Sequence: Synthetic oligonucleotide
ggagucugaacuauauuga

SEQ ID NO: 126726 - RNA, 19 nt, Artificial Sequence
  Description of Artificial Sequence: Synthetic oligonucleotide
acgaaagggaucuccuguu

SEQ ID NO: 126727 - RNA, 19 nt, Artificial Sequence
  Description of Artificial Sequence: Synthetic oligonucleotide
uuccgagaauggcccaugu

SEQ ID NO: 126728 - RNA, 19 nt, Artificial Sequence
  Description of Artificial Sequence: Synthetic oligonucleotide
agagggguuccgagaaugg

SEQ ID NO: 126729 - RNA, 19 nt, Artificial Sequence
  Description of Artificial Sequence: Synthetic oligonucleotide
caggacguuaaacagggcu

SEQ ID NO: 126730 - RNA, 19 nt, Artificial Sequence
  Description of Artificial Sequence: Synthetic oligonucleotide
caggauuuaggucacuccu

SEQ ID NO: 126731 - RNA, 19 nt, Artificial Sequence
  Description of Artificial Sequence: Synthetic oligonucleotide
ggccuucgcucucacaggg

SEQ ID NO: 126732 - RNA, 19 nt, Artificial Sequence
  Description of Artificial Sequence: Synthetic oligonucleotide
cugauauggguucaugagu

SEQ ID NO: 126733 - RNA, 19 nt, Artificial Sequence
  Description of Artificial Sequence: Synthetic oligonucleotide
aaacguugaguuggagcau

SEQ ID NO: 126734 - RNA, 19 nt, Artificial Sequence
  Description of Artificial Sequence: Synthetic oligonucleotide
cuacuauugaguuguacuu

SEQ ID NO: 126735 - RNA, 19 nt, Artificial Sequence
  Description of Artificial Sequence: Synthetic oligonucleotide
cagaccugaacacuaguua

SEQ ID NO: 126736 - RNA, 19 nt, Artificial Sequence
  Description of Artificial Sequence: Synthetic oligonucleotide
ugagacccaggacucgauu

SEQ ID NO: 126737 - RNA, 19 nt, Artificial Sequence
  Description of Artificial Sequence: Synthetic oligonucleotide
auauggguucaugaguaua

SEQ ID NO: 126738 - RNA, 19 nt, Artificial Sequence
  Description of Artificial Sequence: Synthetic oligonucleotide
acguuaaacagggcugacu

SEQ ID NO: 126739 - RNA, 19 nt, Artificial Sequence
  Description of Artificial Sequence: Synthetic oligonucleotide
agacgucccuucuucuccu

SEQ ID NO: 126740 - RNA, 19 nt, Artificial Sequence
  Description of Artificial Sequence: Synthetic oligonucleotide
cugaugcauacuuaagggu

SEQ ID NO: 126741 - RNA, 19 nt, Artificial Sequence
  Description of Artificial Sequence: Synthetic oligonucleotide
cacagucagacgucccuuc

SEQ ID NO: 126742 - RNA, 19 nt, Artificial Sequence
  Description of Artificial Sequence: Synthetic oligonucleotide
auaggcgaguuuucaggua

SEQ ID NO: 126743 - RNA, 19 nt, Artificial Sequence
  Description of Artificial Sequence: Synthetic oligonucleotide
aaaggucuguugggaauua

SEQ ID NO: 126744 - RNA, 19 nt, Artificial Sequence
  Description of Artificial Sequence: Synthetic oligonucleotide
uuccgggcuuccucgguga

SEQ ID NO: 126745 - RNA, 19 nt, Artificial Sequence
  Description of Artificial Sequence: Synthetic oligonucleotide
uggauacgcgagcggucug

SEQ ID NO: 126746 - RNA, 19 nt, Artificial Sequence
  Description of Artificial Sequence: Synthetic oligonucleotide
aggaacugacgugguaaug

SEQ ID NO: 126747 - RNA, 19 nt, Artificial Sequence
  Description of Artificial Sequence: Synthetic oligonucleotide
cuuacucacagggguugug

SEQ ID NO: 126748 - RNA, 19 nt, Artificial Sequence
  Description of Artificial Sequence: Synthetic oligonucleotide
gcuccacuaaucuauuaaa

SEQ ID NO: 126749 - RNA, 19 nt, Artificial Sequence
  Description of Artificial Sequence: Synthetic oligonucleotide
gcgacuggauacgcgagcg

SEQ ID NO: 126750 - RNA, 19 nt, Artificial Sequence
  Description of Artificial Sequence: Synthetic oligonucleotide
ggauacgcgagcggucugg

SEQ ID NO: 126751 - RNA, 19 nt, Artificial Sequence
  Description of Artificial Sequence: Synthetic oligonucleotide
cuccaauuaguuucauacu

SEQ ID NO: 126752 - RNA, 19 nt, Artificial Sequence
  Description of Artificial Sequence: Synthetic oligonucleotide
cuccacuaaucuauuaaau

SEQ ID NO: 126753 - RNA, 19 nt, Artificial Sequence
  Description of Artificial Sequence: Synthetic oligonucleotide
gacguuaaacagggcugac

SEQ ID NO: 126754 - RNA, 19 nt, Artificial Sequence
  Description of Artificial Sequence: Synthetic oligonucleotide
gacuggauacgcgagcggu

SEQ ID NO: 126755 - RNA, 19 nt, Artificial Sequence
  Description of Artificial Sequence: Synthetic oligonucleotide
gauauggguucaugaguau

SEQ ID NO: 126756 - RNA, 19 nt, Artificial Sequence
  Description of Artificial Sequence: Synthetic oligonucleotide
agguacaagcgugcuggug

SEQ ID NO: 126757 - RNA, 19 nt, Artificial Sequence
  Description of Artificial Sequence: Synthetic oligonucleotide
uguguccggugugaguuua

SEQ ID NO: 126758 - RNA, 19 nt, Artificial Sequence
  Description of Artificial Sequence: Synthetic oligonucleotide
aggucuguugggaauuaaa

SEQ ID NO: 126759 - RNA, 19 nt, Artificial Sequence
  Description of Artificial Sequence: Synthetic oligonucleotide
uggcgugcuuucauugcuu

SEQ ID NO: 126760 - RNA, 19 nt, Artificial Sequence
  Description of Artificial Sequence: Synthetic oligonucleotide
auacgcgagcggucuggug

SEQ ID NO: 126761 - RNA, 19 nt, Artificial Sequence
  Description of Artificial Sequence: Synthetic oligonucleotide
gaaucggagucugaacuau

SEQ ID NO: 126762 - RNA, 19 nt, Artificial Sequence
  Description of Artificial Sequence: Synthetic oligonucleotide
ggcgacuggauacgcgagc

SEQ ID NO: 126763 - RNA, 19 nt, Artificial Sequence
  Description of Artificial Sequence: Synthetic oligonucleotide
caccgaaauaguugaagau

SEQ ID NO: 126764 - RNA, 19 nt, Artificial Sequence
  Description of Artificial Sequence: Synthetic oligonucleotide
guaaugggaaucggagucu

SEQ ID NO: 126765 - RNA, 19 nt, Artificial Sequence
  Description of Artificial Sequence: Synthetic oligonucleotide
ggacguuaaacagggcuga

SEQ ID NO: 126766 - RNA, 19 nt, Artificial Sequence
  Description of Artificial Sequence: Synthetic oligonucleotide
agcggcgacuggauacgcg

SEQ ID NO: 126767 - RNA, 19 nt, Artificial Sequence
  Description of Artificial Sequence: Synthetic oligonucleotide
ggugaucuggcgugcuuuc

SEQ ID NO: 126768 - RNA, 19 nt, Artificial Sequence
  Description of Artificial Sequence: Synthetic oligonucleotide
gguuaucguugaugaugcc

SEQ ID NO: 126769 - RNA, 19 nt, Artificial Sequence
  Description of Artificial Sequence: Synthetic oligonucleotide
cuccuccgugcccaaaaca

SEQ ID NO: 126770 - RNA, 19 nt, Artificial Sequence
  Description of Artificial Sequence: Synthetic oligonucleotide
cgauucuacuauugaguug

SEQ ID NO: 126771 - RNA, 19 nt, Artificial Sequence
  Description of Artificial Sequence: Synthetic oligonucleotide
gccuucugacaacuacagc

SEQ ID NO: 126772 - RNA, 19 nt, Artificial Sequence
  Description of Artificial Sequence: Synthetic oligonucleotide
ggugagcuccacuaaucua

SEQ ID NO: 126773 - RNA, 19 nt, Artificial Sequence
  Description of Artificial Sequence: Synthetic oligonucleotide
agcguccgagagcuuuccu

SEQ ID NO: 126774 - RNA, 19 nt, Artificial Sequence
  Description of Artificial Sequence: Synthetic oligonucleotide
ccugaguuauggauuugga

SEQ ID NO: 126775 - RNA, 19 nt, Artificial Sequence
  Description of Artificial Sequence: Synthetic oligonucleotide
ccauugggcugccuaugcc

SEQ ID NO: 126776 - RNA, 19 nt, Artificial Sequence
  Description of Artificial Sequence: Synthetic oligonucleotide
guacaagcgugcugguggu

SEQ ID NO: 126777 - RNA, 19 nt, Artificial Sequence
  Description of Artificial Sequence: Synthetic oligonucleotide
gcggcgacuggauacgcga

SEQ ID NO: 126778 - RNA, 19 nt, Artificial Sequence
  Description of Artificial Sequence: Synthetic oligonucleotide
auacgccuuccgggcuucc

SEQ ID NO: 126779 - RNA, 19 nt, Artificial Sequence
  Description of Artificial Sequence: Synthetic oligonucleotide
gcaagggcugcagcuaaug

SEQ ID NO: 126780 - RNA, 19 nt, Artificial Sequence
  Description of Artificial Sequence: Synthetic oligonucleotide
cuugccgagcugaaggguu

SEQ ID NO: 126781 - RNA, 19 nt, Artificial Sequence
  Description of Artificial Sequence: Synthetic oligonucleotide
gaucuggcgugcuuucauu

SEQ ID NO: 126782 - RNA, 19 nt, Artificial Sequence
  Description of Artificial Sequence: Synthetic oligonucleotide
ggucguccggcuucaguuc

SEQ ID NO: 126783 - RNA, 19 nt, Artificial Sequence
  Description of Artificial Sequence: Synthetic oligonucleotide
gcgugcuuucauugcuugc

SEQ ID NO: 126784 - RNA, 19 nt, Artificial Sequence
  Description of Artificial Sequence: Synthetic oligonucleotide
ggauuggaaucagagugcu

SEQ ID NO: 126785 - RNA, 19 nt, Artificial Sequence
  Description of Artificial Sequence: Synthetic oligonucleotide
cagcguccgagagcuuucc

SEQ ID NO: 126786 - RNA, 19 nt, Artificial Sequence
  Description of Artificial Sequence: Synthetic oligonucleotide
uacgccuuccgggcuuccu

SEQ ID NO: 126787 - RNA, 19 nt, Artificial Sequence
  Description of Artificial Sequence: Synthetic oligonucleotide
gcugagaucuuaacaaaau

SEQ ID NO: 126788 - RNA, 19 nt, Artificial Sequence
  Description of Artificial Sequence: Synthetic oligonucleotide
cuggcgugcuuucauugcu

SEQ ID NO: 126789 - RNA, 19 nt, Artificial Sequence
  Description of Artificial Sequence: Synthetic oligonucleotide
uugcgacacaggugucaua

SEQ ID NO: 126790 - RNA, 19 nt, Artificial Sequence
  Description of Artificial Sequence: Synthetic oligonucleotide
acgcgagcggucugguguu

SEQ ID NO: 126791 - RNA, 19 nt, Artificial Sequence
  Description of Artificial Sequence: Synthetic oligonucleotide
cuggauacgcgagcggucu

SEQ ID NO: 126792 - RNA, 19 nt, Artificial Sequence
  Description of Artificial Sequence: Synthetic oligonucleotide
ccagagaauuacaggacgu

SEQ ID NO: 126793 - RNA, 19 nt, Artificial Sequence
  Description of Artificial Sequence: Synthetic oligonucleotide
acucaggauuuaggucacu

SEQ ID NO: 126794 - RNA, 19 nt, Artificial Sequence
  Description of Artificial Sequence: Synthetic oligonucleotide
gugugaguuuacugggauu

SEQ ID NO: 126795 - RNA, 19 nt, Artificial Sequence
  Description of Artificial Sequence: Synthetic oligonucleotide
gccacccuuugacuggauc

SEQ ID NO: 126796 - RNA, 19 nt, Artificial Sequence
  Description of Artificial Sequence: Synthetic oligonucleotide
ccacccuuugacuggaucu

SEQ ID NO: 126797 - RNA, 19 nt, Artificial Sequence
  Description of Artificial Sequence: Synthetic oligonucleotide
gauacgcgagcggucuggu

SEQ ID NO: 126798 - RNA, 19 nt, Artificial Sequence
  Description of Artificial Sequence: Synthetic oligonucleotide
cagagucuuuagugugaaa

SEQ ID NO: 126799 - RNA, 19 nt, Artificial Sequence
  Description of Artificial Sequence: Synthetic oligonucleotide
gugaguuuacugggauucu

SEQ ID NO: 126800 - RNA, 19 nt, Artificial Sequence
  Description of Artificial Sequence: Synthetic oligonucleotide
cuugcgacacaggugucau

SEQ ID NO: 126801 - RNA, 19 nt, Artificial Sequence
  Description of Artificial Sequence: Synthetic oligonucleotide
cucuagaagugaccaguuu

SEQ ID NO: 126802 - RNA, 19 nt, Artificial Sequence
  Description of Artificial Sequence: Synthetic oligonucleotide
cagagaauuacaggacguu

SEQ ID NO: 126803 - RNA, 19 nt, Artificial Sequence
  Description of Artificial Sequence: Synthetic oligonucleotide
cagcggcgacuggauacgc

SEQ ID NO: 126804 - RNA, 19 nt, Artificial Sequence
  Description of Artificial Sequence: Synthetic oligonucleotide
aggcgaguuuucagguaaa

SEQ ID NO: 126805 - RNA, 19 nt, Artificial Sequence
  Description of Artificial Sequence: Synthetic oligonucleotide
cagcaccgaaauaguugaa

SEQ ID NO: 126806 - RNA, 19 nt, Artificial Sequence
  Description of Artificial Sequence: Synthetic oligonucleotide
cgacuggauacgcgagcgg

SEQ ID NO: 126807 - RNA, 19 nt, Artificial Sequence
  Description of Artificial Sequence: Synthetic oligonucleotide
gcgacacaggugucauaca

SEQ ID NO: 126808 - RNA, 19 nt, Artificial Sequence
  Description of Artificial Sequence: Synthetic oligonucleotide
cacagcguccgagagcuuu

SEQ ID NO: 126809 - RNA, 19 nt, Artificial Sequence
  Description of Artificial Sequence: Synthetic oligonucleotide
ggguuccgagaauggccca

SEQ ID NO: 126810 - RNA, 19 nt, Artificial Sequence
  Description of Artificial Sequence: Synthetic oligonucleotide
cggcgacuggauacgcgag

SEQ ID NO: 126811 - RNA, 19 nt, Artificial Sequence
  Description of Artificial Sequence: Synthetic oligonucleotide
gcguccgagagcuuuccuu

SEQ ID NO: 126812 - RNA, 19 nt, Artificial Sequence
  Description of Artificial Sequence: Synthetic oligonucleotide
gccauccaaugagccaguc

SEQ ID NO: 126813 - RNA, 19 nt, Artificial Sequence
  Description of Artificial Sequence: Synthetic oligonucleotide
ccgagagcuuuccuuccaa

SEQ ID NO: 126814 - RNA, 19 nt, Artificial Sequence
  Description of Artificial Sequence: Synthetic oligonucleotide
ccuugccgagcugaagggu

SEQ ID NO: 126815 - RNA, 19 nt, Artificial Sequence
  Description of Artificial Sequence: Synthetic oligonucleotide
ccuuacucacagggguugu

SEQ ID NO: 126816 - RNA, 19 nt, Artificial Sequence
  Description of Artificial Sequence: Synthetic oligonucleotide
ucuaauauagucaugauua

SEQ ID NO: 126817 - RNA, 19 nt, Artificial Sequence
  Description of Artificial Sequence: Synthetic oligonucleotide
aauauugugugcuuuaagu

SEQ ID NO: 126818 - RNA, 19 nt, Artificial Sequence
  Description of Artificial Sequence: Synthetic oligonucleotide
uuuaguaggaauuggacac

SEQ ID NO: 126819 - RNA, 19 nt, Artificial Sequence
  Description of Artificial Sequence: Synthetic oligonucleotide
aauauagucaugauuaugu

SEQ ID NO: 126820 - RNA, 19 nt, Artificial Sequence
  Description of Artificial Sequence: Synthetic oligonucleotide
auaucuuacuuauauacag

SEQ ID NO: 126821 - RNA, 19 nt, Artificial Sequence
  Description of Artificial Sequence: Synthetic oligonucleotide
uuuaucgaucauaaaauca

SEQ ID NO: 126822 - RNA, 19 nt, Artificial Sequence
  Description of Artificial Sequence: Synthetic oligonucleotide
aauuggacacucuaucauc

SEQ ID NO: 126823 - RNA, 19 nt, Artificial Sequence
  Description of Artificial Sequence: Synthetic oligonucleotide
acaauuaaauaucuagcuc

SEQ ID NO: 126824 - RNA, 19 nt, Artificial Sequence
  Description of Artificial Sequence: Synthetic oligonucleotide
uuaauugccagacaccugu

SEQ ID NO: 126825 - RNA, 19 nt, Artificial Sequence
  Description of Artificial Sequence: Synthetic oligonucleotide
aaccuuuaaugguagcuac

SEQ ID NO: 126826 - RNA, 19 nt, Artificial Sequence
  Description of Artificial Sequence: Synthetic oligonucleotide
uuaucgaucauaaaaucaa

SEQ ID NO: 126827 - RNA, 19 nt, Artificial Sequence
  Description of Artificial Sequence: Synthetic oligonucleotide
aguaaugugggacagugug

SEQ ID NO: 126828 - RNA, 19 nt, Artificial Sequence
  Description of Artificial Sequence: Synthetic oligonucleotide
uuuaaugguagcuacuacu

SEQ ID NO: 126829 - RNA, 19 nt, Artificial Sequence
  Description of Artificial Sequence: Synthetic oligonucleotide
cauuuuaauugccagacac

SEQ ID NO: 126830 - RNA, 19 nt, Artificial Sequence
  Description of Artificial Sequence: Synthetic oligonucleotide
aacuguaccaaaaguauuc

SEQ ID NO: 126831 - RNA, 19 nt, Artificial Sequence
  Description of Artificial Sequence: Synthetic oligonucleotide
uguaauuugccauuucgga

SEQ ID NO: 126832 - RNA, 19 nt, Artificial Sequence
  Description of Artificial Sequence: Synthetic oligonucleotide
uccuacuggcaauagagcg

SEQ ID NO: 126833 - RNA, 19 nt, Artificial Sequence
  Description of Artificial Sequence: Synthetic oligonucleotide
uguuuauacaacagcuucc

SEQ ID NO: 126834 - RNA, 19 nt, Artificial Sequence
  Description of Artificial Sequence: Synthetic oligonucleotide
ugcuauaggaauaucaaua

SEQ ID NO: 126835 - RNA, 19 nt, Artificial Sequence
  Description of Artificial Sequence: Synthetic oligonucleotide
aauagagcgaacauuagaa

SEQ ID NO: 126836 - RNA, 19 nt, Artificial Sequence
  Description of Artificial Sequence: Synthetic oligonucleotide
uacaacuaaauguuucugc

SEQ ID NO: 126837 - RNA, 19 nt, Artificial Sequence
  Description of Artificial Sequence: Synthetic oligonucleotide
uauacaugaugauagacuu

SEQ ID NO: 126838 - RNA, 19 nt, Artificial Sequence
  Description of Artificial Sequence: Synthetic oligonucleotide
aggaauaucaauauugugu

SEQ ID NO: 126839 - RNA, 19 nt, Artificial Sequence
  Description of Artificial Sequence: Synthetic oligonucleotide
cauauauagagcgugcugc

SEQ ID NO: 126840 - RNA, 19 nt, Artificial Sequence
  Description of Artificial Sequence: Synthetic oligonucleotide
uucuauaaugauuggcugc

SEQ ID NO: 126841 - RNA, 19 nt, Artificial Sequence
  Description of Artificial Sequence: Synthetic oligonucleotide
uccaaaggguuuaaaaugu

SEQ ID NO: 126842 - RNA, 19 nt, Artificial Sequence
  Description of Artificial Sequence: Synthetic oligonucleotide
auaaauggcaggcuguaug

SEQ ID NO: 126843 - RNA, 19 nt, Artificial Sequence
  Description of Artificial Sequence: Synthetic oligonucleotide
uuuuaccaaagugucauag

SEQ ID NO: 126844 - RNA, 19 nt, Artificial Sequence
  Description of Artificial Sequence: Synthetic oligonucleotide
ucaaacaaguacaccgucc

SEQ ID NO: 126845 - RNA, 19 nt, Artificial Sequence
  Description of Artificial Sequence: Synthetic oligonucleotide
gucaaagagacuucuauac

SEQ ID NO: 126846 - RNA, 19 nt, Artificial Sequence
  Description of Artificial Sequence: Synthetic oligonucleotide
uuucuauaaugauuggcug

SEQ ID NO: 126847 - RNA, 19 nt, Artificial Sequence
  Description of Artificial Sequence: Synthetic oligonucleotide
ugugcuauaggaauaucaa

SEQ ID NO: 126848 - RNA, 19 nt, Artificial Sequence
  Description of Artificial Sequence: Synthetic oligonucleotide
uugugcuauaggaauauca

SEQ ID NO: 126849 - RNA, 19 nt, Artificial Sequence
  Description of Artificial Sequence: Synthetic oligonucleotide
ugugcaagcgcuuccaggc

SEQ ID NO: 126850 - RNA, 19 nt, Artificial Sequence
  Description of Artificial Sequence: Synthetic oligonucleotide
uaauuugccauuucggaaa

SEQ ID NO: 126851 - RNA, 19 nt, Artificial Sequence
  Description of Artificial Sequence: Synthetic oligonucleotide
agugugugauuuuaacaac

SEQ ID NO: 126852 - RNA, 19 nt, Artificial Sequence
  Description of Artificial Sequence: Synthetic oligonucleotide
uagagcgaacauuagaaac

SEQ ID NO: 126853 - RNA, 19 nt, Artificial Sequence
  Description of Artificial Sequence: Synthetic oligonucleotide
ucaucauauauagagcgug

SEQ ID NO: 126854 - RNA, 19 nt, Artificial Sequence
  Description of Artificial Sequence: Synthetic oligonucleotide
agcuuuauucugaaggccc

SEQ ID NO: 126855 - RNA, 19 nt, Artificial Sequence
  Description of Artificial Sequence: Synthetic oligonucleotide
aucaauuuacaaccugauc

SEQ ID NO: 126856 - RNA, 19 nt, Artificial Sequence
  Description of Artificial Sequence: Synthetic oligonucleotide
auauagagcgugcugcauc

SEQ ID NO: 126857 - RNA, 19 nt, Artificial Sequence
  Description of Artificial Sequence: Synthetic oligonucleotide
ucauauauagagcgugcug

SEQ ID NO: 126858 - RNA, 19 nt, Artificial Sequence
  Description of Artificial Sequence: Synthetic oligonucleotide
uccuaacaaacuuuauugc

SEQ ID NO: 126859 - RNA, 19 nt, Artificial Sequence
  Description of Artificial Sequence: Synthetic oligonucleotide
caauuuacaaccugaucac

SEQ ID NO: 126860 - RNA, 19 nt, Artificial Sequence
  Description of Artificial Sequence: Synthetic oligonucleotide
cucuagucaguaauguggg

SEQ ID NO: 126861 - RNA, 19 nt, Artificial Sequence
  Description of Artificial Sequence: Synthetic oligonucleotide
gcauaucuuacuuauauac

SEQ ID NO: 126862 - RNA, 19 nt, Artificial Sequence
  Description of Artificial Sequence: Synthetic oligonucleotide
auuaucugggaauguuaac

SEQ ID NO: 126863 - RNA, 19 nt, Artificial Sequence
  Description of Artificial Sequence: Synthetic oligonucleotide
auagacgaggcucaaagau

SEQ ID NO: 126864 - RNA, 19 nt, Artificial Sequence
  Description of Artificial Sequence: Synthetic oligonucleotide
agaccaaaagucuugcacu

SEQ ID NO: 126865 - RNA, 19 nt, Artificial Sequence
  Description of Artificial Sequence: Synthetic oligonucleotide
agucaauacacuuccgugu

SEQ ID NO: 126866 - RNA, 19 nt, Artificial Sequence
  Description of Artificial Sequence: Synthetic oligonucleotide
gagacguaggucuuugacc

SEQ ID NO: 126867 - RNA, 19 nt, Artificial Sequence
  Description of Artificial Sequence: Synthetic oligonucleotide
uuggaagaguacacgaucu

SEQ ID NO: 126868 - RNA, 19 nt, Artificial Sequence
  Description of Artificial Sequence: Synthetic oligonucleotide
aaauaauggugucuccuaa

SEQ ID NO: 126869 - RNA, 19 nt, Artificial Sequence
  Description of Artificial Sequence: Synthetic oligonucleotide
ucaauuugcgcuagaugug

SEQ ID NO: 126870 - RNA, 19 nt, Artificial Sequence
  Description of Artificial Sequence: Synthetic oligonucleotide
ucaguaaugugggacagug

SEQ ID NO: 126871 - RNA, 19 nt, Artificial Sequence
  Description of Artificial Sequence: Synthetic oligonucleotide
acauguguuuuaucgauca

SEQ ID NO: 126872 - RNA, 19 nt, Artificial Sequence
  Description of Artificial Sequence: Synthetic oligonucleotide
gagucaauacacuuccgug

SEQ ID NO: 126873 - RNA, 19 nt, Artificial Sequence
  Description of Artificial Sequence: Synthetic oligonucleotide
ugccaagagauaaccauug

SEQ ID NO: 126874 - RNA, 19 nt, Artificial Sequence
  Description of Artificial Sequence: Synthetic oligonucleotide
uagacuaucccaucaauuu

SEQ ID NO: 126875 - RNA, 19 nt, Artificial Sequence
  Description of Artificial Sequence: Synthetic oligonucleotide
uagacuuagauaacugguc

SEQ ID NO: 126876 - RNA, 19 nt, Artificial Sequence
  Description of Artificial Sequence: Synthetic oligonucleotide
uuaggcagaacaucaauuu

SEQ ID NO: 126877 - RNA, 19 nt, Artificial Sequence
  Description of Artificial Sequence: Synthetic oligonucleotide
uaauauagucaugauuaug

SEQ ID NO: 126878 - RNA, 19 nt, Artificial Sequence
  Description of Artificial Sequence: Synthetic oligonucleotide
agaccauacacugucuugg

SEQ ID NO: 126879 - RNA, 19 nt, Artificial Sequence
  Description of Artificial Sequence: Synthetic oligonucleotide
ucccacuuuuaccaaagug

SEQ ID NO: 126880 - RNA, 19 nt, Artificial Sequence
  Description of Artificial Sequence: Synthetic oligonucleotide
cuagcuuucccgaugaaga

SEQ ID NO: 126881 - RNA, 19 nt, Artificial Sequence
  Description of Artificial Sequence: Synthetic oligonucleotide
uacuacugugccaaccaag

SEQ ID NO: 126882 - RNA, 19 nt, Artificial Sequence
  Description of Artificial Sequence: Synthetic oligonucleotide
ugagacguaggucuuugac

SEQ ID NO: 126883 - RNA, 19 nt, Artificial Sequence
  Description of Artificial Sequence: Synthetic oligonucleotide
uaaugugggacagugugug

SEQ ID NO: 126884 - RNA, 19 nt, Artificial Sequence
  Description of Artificial Sequence: Synthetic oligonucleotide
uuauuaaccuugcugcaua

SEQ ID NO: 126885 - RNA, 19 nt, Artificial Sequence
  Description of Artificial Sequence: Synthetic oligonucleotide
uucaucauauauagagcgu

SEQ ID NO: 126886 - RNA, 19 nt, Artificial Sequence
  Description of Artificial Sequence: Synthetic oligonucleotide
uuagacuaucccaucaauu

SEQ ID NO: 126887 - RNA, 19 nt, Artificial Sequence
  Description of Artificial Sequence: Synthetic oligonucleotide
uuuaccaaagugucauagu

SEQ ID NO: 126888 - RNA, 19 nt, Artificial Sequence
  Description of Artificial Sequence: Synthetic oligonucleotide
agcgcgauccccgagcucc

SEQ ID NO: 126889 - RNA, 19 nt, Artificial Sequence
  Description of Artificial Sequence: Synthetic oligonucleotide
cuagaugugcgaucuuucc

SEQ ID NO: 126890 - RNA, 19 nt, Artificial Sequence
  Description of Artificial Sequence: Synthetic oligonucleotide
caucauauauagagcgugc

SEQ ID NO: 126891 - RNA, 19 nt, Artificial Sequence
  Description of Artificial Sequence: Synthetic oligonucleotide
uaguuuggaagaguacacg

SEQ ID NO: 126892 - RNA, 19 nt, Artificial Sequence
  Description of Artificial Sequence: Synthetic oligonucleotide
uuuagacuaucccaucaau

SEQ ID NO: 126893 - RNA, 19 nt, Artificial Sequence
  Description of Artificial Sequence: Synthetic oligonucleotide
ccaauugucugacacacgg

SEQ ID NO: 126894 - RNA, 19 nt, Artificial Sequence
  Description of Artificial Sequence: Synthetic oligonucleotide
gacgucaggaaccaacuuc

SEQ ID NO: 126895 - RNA, 19 nt, Artificial Sequence
  Description of Artificial Sequence: Synthetic oligonucleotide
ugguuggacgucaggaacc

SEQ ID NO: 126896 - RNA, 19 nt, Artificial Sequence
  Description of Artificial Sequence: Synthetic oligonucleotide
uacuaucccuuccaggacu

SEQ ID NO: 126897 - RNA, 19 nt, Artificial Sequence
  Description of Artificial Sequence: Synthetic oligonucleotide
ucuuacuuauauacaggau

SEQ ID NO: 126898 - RNA, 19 nt, Artificial Sequence
  Description of Artificial Sequence: Synthetic oligonucleotide
uaucgaucauaaaaucaaa

SEQ ID NO: 126899 - RNA, 19 nt, Artificial Sequence
  Description of Artificial Sequence: Synthetic oligonucleotide
ggauaaaaucuuuagacua

SEQ ID NO: 126900 - RNA, 19 nt, Artificial Sequence
  Description of Artificial Sequence: Synthetic oligonucleotide
uaguuguaauaacaaacuu

SEQ ID NO: 126901 - RNA, 19 nt, Artificial Sequence
  Description of Artificial Sequence: Synthetic oligonucleotide
auauauagagcgugcugca

SEQ ID NO: 126902 - RNA, 19 nt, Artificial Sequence
  Description of Artificial Sequence: Synthetic oligonucleotide
ucccugaaauagaagcagc

SEQ ID NO: 126903 - RNA, 19 nt, Artificial Sequence
  Description of Artificial Sequence: Synthetic oligonucleotide
uucggaaaugagguagagg

SEQ ID NO: 126904 - RNA, 19 nt, Artificial Sequence
  Description of Artificial Sequence: Synthetic oligonucleotide
uaaugguagcuacuacugu

SEQ ID NO: 126905 - RNA, 19 nt, Artificial Sequence
  Description of Artificial Sequence: Synthetic oligonucleotide
auauucauacaucccacuu

SEQ ID NO: 126906 - RNA, 19 nt, Artificial Sequence
  Description of Artificial Sequence: Synthetic oligonucleotide
cuguauggcucuaauguuc

SEQ ID NO: 126907 - RNA, 19 nt, Artificial Sequence
  Description of Artificial Sequence: Synthetic oligonucleotide
aauuuacaaccugaucacu

SEQ ID NO: 126908 - RNA, 19 nt, Artificial Sequence
  Description of Artificial Sequence: Synthetic oligonucleotide
aaaccuuuaaugguagcua

SEQ ID NO: 126909 - RNA, 19 nt, Artificial Sequence
  Description of Artificial Sequence: Synthetic oligonucleotide
ggcgagaaacgcuucaggg

SEQ ID NO: 126910 - RNA, 19 nt, Artificial Sequence
  Description of Artificial Sequence: Synthetic oligonucleotide
aaucgaugcugcugcauau

SEQ ID NO: 126911 - RNA, 19 nt, Artificial Sequence
  Description of Artificial Sequence: Synthetic oligonucleotide
agagcgaacauuagaaaca

SEQ ID NO: 126912 - RNA, 19 nt, Artificial Sequence
  Description of Artificial Sequence: Synthetic oligonucleotide
agcuccgacuccuucccgc

SEQ ID NO: 126913 - RNA, 19 nt, Artificial Sequence
  Description of Artificial Sequence: Synthetic oligonucleotide
ggagcuuuauucugaaggc

SEQ ID NO: 126914 - RNA, 19 nt, Artificial Sequence
  Description of Artificial Sequence: Synthetic oligonucleotide
ugccaauugucugacacac

SEQ ID NO: 126915 - RNA, 19 nt, Artificial Sequence
  Description of Artificial Sequence: Synthetic oligonucleotide
ugauuaccauaauuaucug

SEQ ID NO: 126916 - RNA, 19 nt, Artificial Sequence
  Description of Artificial Sequence: Synthetic oligonucleotide
aagaccauuccccgaaguu

SEQ ID NO: 126917 - RNA, 19 nt, Artificial Sequence
  Description of Artificial Sequence: Synthetic oligonucleotide
uaggaauuggacacucuau

SEQ ID NO: 126918 - RNA, 19 nt, Artificial Sequence
  Description of Artificial Sequence: Synthetic oligonucleotide
aauuugcgcuagaugugcg

SEQ ID NO: 126919 - RNA, 19 nt, Artificial Sequence
  Description of Artificial Sequence: Synthetic oligonucleotide
auaaucagaaaggauuaaa

SEQ ID NO: 126920 - RNA, 19 nt, Artificial Sequence
  Description of Artificial Sequence: Synthetic oligonucleotide
gaugccaagagauaaccau

SEQ ID NO: 126921 - RNA, 19 nt, Artificial Sequence
  Description of Artificial Sequence: Synthetic oligonucleotide
uugguauuggagcuccgaa

SEQ ID NO: 126922 - RNA, 19 nt, Artificial Sequence
  Description of Artificial Sequence: Synthetic oligonucleotide
cacaaugcucaauauuauc

SEQ ID NO: 126923 - RNA, 19 nt, Artificial Sequence
  Description of Artificial Sequence: Synthetic oligonucleotide
agacuucuauacaugauga

SEQ ID NO: 126924 - RNA, 19 nt, Artificial Sequence
  Description of Artificial Sequence: Synthetic oligonucleotide
ugauuaggcagaacaucaa

SEQ ID NO: 126925 - RNA, 19 nt, Artificial Sequence
  Description of Artificial Sequence: Synthetic oligonucleotide
auagagcgaacauuagaaa

SEQ ID NO: 126926 - RNA, 19 nt, Artificial Sequence
  Description of Artificial Sequence: Synthetic oligonucleotide
gagauaaccauugcagcuc

SEQ ID NO: 126927 - RNA, 19 nt, Artificial Sequence
  Description of Artificial Sequence: Synthetic oligonucleotide
gagacgccgacuccgcgcg

SEQ ID NO: 126928 - RNA, 19 nt, Artificial Sequence
  Description of Artificial Sequence: Synthetic oligonucleotide
aacuuuguuaggaauuguu

SEQ ID NO: 126929 - RNA, 19 nt, Artificial Sequence
  Description of Artificial Sequence: Synthetic oligonucleotide
uugauagugacuggucaac

SEQ ID NO: 126930 - RNA, 19 nt, Artificial Sequence
  Description of Artificial Sequence: Synthetic oligonucleotide
gguauuggagcuccgaaga

SEQ ID NO: 126931 - RNA, 19 nt, Artificial Sequence
  Description of Artificial Sequence: Synthetic oligonucleotide
acaaguacaccguccugca

SEQ ID NO: 126932 - RNA, 19 nt, Artificial Sequence
  Description of Artificial Sequence: Synthetic oligonucleotide
caauagagcgaacauuaga

SEQ ID NO: 126933 - RNA, 19 nt, Artificial Sequence
  Description of Artificial Sequence: Synthetic oligonucleotide
ugcauaucuuacuuauaua

SEQ ID NO: 126934 - RNA, 19 nt, Artificial Sequence
  Description of Artificial Sequence: Synthetic oligonucleotide
ugcgcuagaugugcgaucu

SEQ ID NO: 126935 - RNA, 19 nt, Artificial Sequence
  Description of Artificial Sequence: Synthetic oligonucleotide
ucacuagcauaauauucau

SEQ ID NO: 126936 - RNA, 19 nt, Artificial Sequence
  Description of Artificial Sequence: Synthetic oligonucleotide
uuucggaaaugagguagag

SEQ ID NO: 126937 - RNA, 19 nt, Artificial Sequence
  Description of Artificial Sequence: Synthetic oligonucleotide
guaguuuggaagaguacac

SEQ ID NO: 126938 - RNA, 19 nt, Artificial Sequence
  Description of Artificial Sequence: Synthetic oligonucleotide
uauuaaccuugcugcauaa

SEQ ID NO: 126939 - RNA, 19 nt, Artificial Sequence
  Description of Artificial Sequence: Synthetic oligonucleotide
aucauauauagagcgugcu

SEQ ID NO: 126940 - RNA, 19 nt, Artificial Sequence
  Description of Artificial Sequence: Synthetic oligonucleotide
ggugugaagguacugcaac

SEQ ID NO: 126941 - RNA, 19 nt, Artificial Sequence
  Description of Artificial Sequence: Synthetic oligonucleotide
uauguuagcuugaguuaau

SEQ ID NO: 126942 - RNA, 19 nt, Artificial Sequence
  Description of Artificial Sequence: Synthetic oligonucleotide
caaaggguuuaaaauguaa

SEQ ID NO: 126943 - RNA, 19 nt, Artificial Sequence
  Description of Artificial Sequence: Synthetic oligonucleotide
agacuaucccaucaauuua

SEQ ID NO: 126944 - RNA, 19 nt, Artificial Sequence
  Description of Artificial Sequence: Synthetic oligonucleotide
uaauugccagacaccugug

SEQ ID NO: 126945 - RNA, 19 nt, Artificial Sequence
  Description of Artificial Sequence: Synthetic oligonucleotide
uucagacaauacuuauaaa

SEQ ID NO: 126946 - RNA, 19 nt, Artificial Sequence
  Description of Artificial Sequence: Synthetic oligonucleotide
guauagagugacuccaucu

SEQ ID NO: 126947 - RNA, 19 nt, Artificial Sequence
  Description of Artificial Sequence: Synthetic oligonucleotide
agucaguaaugugggacag

SEQ ID NO: 126948 - RNA, 19 nt, Artificial Sequence
  Description of Artificial Sequence: Synthetic oligonucleotide
gaauuggacacucuaucau

SEQ ID NO: 126949 - RNA, 19 nt, Artificial Sequence
  Description of Artificial Sequence: Synthetic oligonucleotide
aguugauagacgaggcuca

SEQ ID NO: 126950 - RNA, 19 nt, Artificial Sequence
  Description of Artificial Sequence: Synthetic oligonucleotide
guagccugcgcgcuccggg

SEQ ID NO: 126951 - RNA, 19 nt, Artificial Sequence
  Description of Artificial Sequence: Synthetic oligonucleotide
cagcuagagcaucacuggg

SEQ ID NO: 126952 - RNA, 19 nt, Artificial Sequence
  Description of Artificial Sequence: Synthetic oligonucleotide
guaggaauuggacacucua

SEQ ID NO: 126953 - RNA, 19 nt, Artificial Sequence
  Description of Artificial Sequence: Synthetic oligonucleotide
guauguuagcuugaguuaa

SEQ ID NO: 126954 - RNA, 19 nt, Artificial Sequence
  Description of Artificial Sequence: Synthetic oligonucleotide
uguccauuggaggagcuuu

SEQ ID NO: 126955 - RNA, 19 nt, Artificial Sequence
  Description of Artificial Sequence: Synthetic oligonucleotide
augccaauugucugacaca

SEQ ID NO: 126956 - RNA, 19 nt, Artificial Sequence
  Description of Artificial Sequence: Synthetic oligonucleotide
ugucugacacacggaggcg

SEQ ID NO: 126957 - RNA, 19 nt, Artificial Sequence
  Description of Artificial Sequence: Synthetic oligonucleotide
cugcagagcgcgauccccg

SEQ ID NO: 126958 - RNA, 19 nt, Artificial Sequence
  Description of Artificial Sequence: Synthetic oligonucleotide
ccagcuagagcaucacugg

SEQ ID NO: 126959 - RNA, 19 nt, Artificial Sequence
  Description of Artificial Sequence: Synthetic oligonucleotide
uuugcgcuagaugugcgau

SEQ ID NO: 126960 - RNA, 19 nt, Artificial Sequence
  Description of Artificial Sequence: Synthetic oligonucleotide
gguaagagugacaugugca

SEQ ID NO: 126961 - RNA, 19 nt, Artificial Sequence
  Description of Artificial Sequence: Synthetic oligonucleotide
guauuggagcuccgaagac

SEQ ID NO: 126962 - RNA, 19 nt, Artificial Sequence
  Description of Artificial Sequence: Synthetic oligonucleotide
gacuuagauaacugguccu

SEQ ID NO: 126963 - RNA, 19 nt, Artificial Sequence
  Description of Artificial Sequence: Synthetic oligonucleotide
gcgagaaacgcuucagggc

SEQ ID NO: 126964 - RNA, 19 nt, Artificial Sequence
  Description of Artificial Sequence: Synthetic oligonucleotide
auaaccauugcagcucgau

SEQ ID NO: 126965 - RNA, 19 nt, Artificial Sequence
  Description of Artificial Sequence: Synthetic oligonucleotide
ggcaauagagcgaacauua

SEQ ID NO: 126966 - RNA, 19 nt, Artificial Sequence
  Description of Artificial Sequence: Synthetic oligonucleotide
aucgaugcugcugcauauc

SEQ ID NO: 126967 - RNA, 19 nt, Artificial Sequence
  Description of Artificial Sequence: Synthetic oligonucleotide
aagguccuacuggcaauag

SEQ ID NO: 126968 - RNA, 19 nt, Artificial Sequence
  Description of Artificial Sequence: Synthetic oligonucleotide
uaguguaguuuggaagagu

SEQ ID NO: 126969 - RNA, 19 nt, Artificial Sequence
  Description of Artificial Sequence: Synthetic oligonucleotide
cagagcgcgauccccgagc

SEQ ID NO: 126970 - RNA, 19 nt, Artificial Sequence
  Description of Artificial Sequence: Synthetic oligonucleotide
caaguucauuccaguauga

SEQ ID NO: 126971 - RNA, 19 nt, Artificial Sequence
  Description of Artificial Sequence: Synthetic oligonucleotide
ggcacaucaccuuucgguc

SEQ ID NO: 126972 - RNA, 19 nt, Artificial Sequence
  Description of Artificial Sequence: Synthetic oligonucleotide
gucuaguggauucucuucu

SEQ ID NO: 126973 - RNA, 19 nt, Artificial Sequence
  Description of Artificial Sequence: Synthetic oligonucleotide
caaccugaucacuguugag

SEQ ID NO: 126974 - RNA, 19 nt, Artificial Sequence
  Description of Artificial Sequence: Synthetic oligonucleotide
ggaggcgcggaacccagcg

SEQ ID NO: 126975 - RNA, 19 nt, Artificial Sequence
  Description of Artificial Sequence: Synthetic oligonucleotide
ggcucaaagauaauaaagu

SEQ ID NO: 126976 - RNA, 19 nt, Artificial Sequence
  Description of Artificial Sequence: Synthetic oligonucleotide
gcgaacauuagaaacagcu

SEQ ID NO: 126977 - RNA, 19 nt, Artificial Sequence
  Description of Artificial Sequence: Synthetic oligonucleotide
agaaacagcugggguagcu

SEQ ID NO: 126978 - RNA, 19 nt, Artificial Sequence
  Description of Artificial Sequence: Synthetic oligonucleotide
caacuucauaggcugauua

SEQ ID NO: 126979 - RNA, 19 nt, Artificial Sequence
  Description of Artificial Sequence: Synthetic oligonucleotide
gauccccgagcuccgacuc

SEQ ID NO: 126980 - RNA, 19 nt, Artificial Sequence
  Description of Artificial Sequence: Synthetic oligonucleotide
cauaccgaguuucugcucu

SEQ ID NO: 126981 - RNA, 19 nt, Artificial Sequence
  Description of Artificial Sequence: Synthetic oligonucleotide
ccacgcuuaguguaguuug

SEQ ID NO: 126982 - RNA, 19 nt, Artificial Sequence
  Description of Artificial Sequence: Synthetic oligonucleotide
guaggccccaacuuuguua

SEQ ID NO: 126983 - RNA, 19 nt, Artificial Sequence
  Description of Artificial Sequence: Synthetic oligonucleotide
agagcgcgauccccgagcu

SEQ ID NO: 126984 - RNA, 19 nt, Artificial Sequence
  Description of Artificial Sequence: Synthetic oligonucleotide
agguccuacuggcaauaga

SEQ ID NO: 126985 - RNA, 19 nt, Artificial Sequence
  Description of Artificial Sequence: Synthetic oligonucleotide
gucauaccgaguuucugcu

SEQ ID NO: 126986 - RNA, 19 nt, Artificial Sequence
  Description of Artificial Sequence: Synthetic oligonucleotide
guccuacuggcaauagagc

SEQ ID NO: 126987 - RNA, 19 nt, Artificial Sequence
  Description of Artificial Sequence: Synthetic oligonucleotide
ccggagaaacagaacauuc

SEQ ID NO: 126988 - RNA, 19 nt, Artificial Sequence
  Description of Artificial Sequence: Synthetic oligonucleotide
uggcgucaaagagacuucu

SEQ ID NO: 126989 - RNA, 19 nt, Artificial Sequence
  Description of Artificial Sequence: Synthetic oligonucleotide
caaguacaccguccugcag

SEQ ID NO: 126990 - RNA, 19 nt, Artificial Sequence
  Description of Artificial Sequence: Synthetic oligonucleotide
gaugugcgaucuuucccaa

SEQ ID NO: 126991 - RNA, 19 nt, Artificial Sequence
  Description of Artificial Sequence: Synthetic oligonucleotide
cuucaaugugagguaucug

SEQ ID NO: 126992 - RNA, 19 nt, Artificial Sequence
  Description of Artificial Sequence: Synthetic oligonucleotide
caauugucugacacacgga

SEQ ID NO: 126993 - RNA, 19 nt, Artificial Sequence
  Description of Artificial Sequence: Synthetic oligonucleotide
cuauagaucuagcaauaau

SEQ ID NO: 126994 - RNA, 19 nt, Artificial Sequence
  Description of Artificial Sequence: Synthetic oligonucleotide
acacacggaggcgcggaac

SEQ ID NO: 126995 - RNA, 19 nt, Artificial Sequence
  Description of Artificial Sequence: Synthetic oligonucleotide
agggcgagaaacgcuucag

SEQ ID NO: 126996 - RNA, 19 nt, Artificial Sequence
  Description of Artificial Sequence: Synthetic oligonucleotide
uaucuagcucuagaacuuu

SEQ ID NO: 126997 - RNA, 19 nt, Artificial Sequence
  Description of Artificial Sequence: Synthetic oligonucleotide
gacgccgacuccgcgcgcg

SEQ ID NO: 126998 - RNA, 19 nt, Artificial Sequence
  Description of Artificial Sequence: Synthetic oligonucleotide
cuacuggcaauagagcgaa

SEQ ID NO: 126999 - RNA, 19 nt, Artificial Sequence
  Description of Artificial Sequence: Synthetic oligonucleotide
accuuuaaugguagcuacu

SEQ ID NO: 127000 - RNA, 19 nt, Artificial Sequence
  Description of Artificial Sequence: Synthetic oligonucleotide
gcuuuauucugaaggcccc

SEQ ID NO: 127001 - RNA, 19 nt, Artificial Sequence
  Description of Artificial Sequence: Synthetic oligonucleotide
aucccacuuuuaccaaagu

SEQ ID NO: 127002 - RNA, 19 nt, Artificial Sequence
  Description of Artificial Sequence: Synthetic oligonucleotide
ugacacacggaggcgcgga

SEQ ID NO: 127003 - RNA, 19 nt, Artificial Sequence
  Description of Artificial Sequence: Synthetic oligonucleotide
ggcucuaauguucuugaua

SEQ ID NO: 127004 - RNA, 19 nt, Artificial Sequence
  Description of Artificial Sequence: Synthetic oligonucleotide
uugcgcuagaugugcgauc

SEQ ID NO: 127005 - RNA, 19 nt, Artificial Sequence
  Description of Artificial Sequence: Synthetic oligonucleotide
aguaggaauuggacacucu

SEQ ID NO: 127006 - RNA, 19 nt, Artificial Sequence
  Description of Artificial Sequence: Synthetic oligonucleotide
cugcauuugguggcggcug

SEQ ID NO: 127007 - RNA, 19 nt, Artificial Sequence
  Description of Artificial Sequence: Synthetic oligonucleotide
cuugguauuggagcuccga

SEQ ID NO: 127008 - RNA, 19 nt, Artificial Sequence
  Description of Artificial Sequence: Synthetic oligonucleotide
ccuagcuuucccgaugaag

SEQ ID NO: 127009 - RNA, 19 nt, Artificial Sequence
  Description of Artificial Sequence: Synthetic oligonucleotide
gacuucuauacaugaugau

SEQ ID NO: 127010 - RNA, 19 nt, Artificial Sequence
  Description of Artificial Sequence: Synthetic oligonucleotide
cuagcucuagaacuuuccu

SEQ ID NO: 127011 - RNA, 19 nt, Artificial Sequence
  Description of Artificial Sequence: Synthetic oligonucleotide
gcaauagagcgaacauuag

SEQ ID NO: 127012 - RNA, 19 nt, Artificial Sequence
  Description of Artificial Sequence: Synthetic oligonucleotide
ggugucuccuaacagcaua

SEQ ID NO: 127013 - RNA, 19 nt, Artificial Sequence
  Description of Artificial Sequence: Synthetic oligonucleotide
cacgcuucccggagacgcc

SEQ ID NO: 127014 - RNA, 19 nt, Artificial Sequence
  Description of Artificial Sequence: Synthetic oligonucleotide
acgcuuaguguaguuugga

SEQ ID NO: 127015 - RNA, 19 nt, Artificial Sequence
  Description of Artificial Sequence: Synthetic oligonucleotide
ggaggucuauuuguuuccc

SEQ ID NO: 127016 - RNA, 19 nt, Artificial Sequence
  Description of Artificial Sequence: Synthetic oligonucleotide
gcuagagcaucacugggua

SEQ ID NO: 127017 - RNA, 19 nt, Artificial Sequence
  Description of Artificial Sequence: Synthetic oligonucleotide
ccuacuggcaauagagcga

SEQ ID NO: 127018 - RNA, 19 nt, Artificial Sequence
  Description of Artificial Sequence: Synthetic oligonucleotide
caguaugauuaccauaauu

SEQ ID NO: 127019 - RNA, 19 nt, Artificial Sequence
  Description of Artificial Sequence: Synthetic oligonucleotide
guauucaguacuaucccuu

SEQ ID NO: 127020 - RNA, 19 nt, Artificial Sequence
  Description of Artificial Sequence: Synthetic oligonucleotide
cacuagcauaauauucaua

SEQ ID NO: 127021 - RNA, 19 nt, Artificial Sequence
  Description of Artificial Sequence: Synthetic oligonucleotide
gagaaacgcuucagggcca

SEQ ID NO: 127022 - RNA, 19 nt, Artificial Sequence
  Description of Artificial Sequence: Synthetic oligonucleotide
accacgcuuaguguaguuu

SEQ ID NO: 127023 - RNA, 19 nt, Artificial Sequence
  Description of Artificial Sequence: Synthetic oligonucleotide
gaccauacacugucuuggu

SEQ ID NO: 127024 - RNA, 19 nt, Artificial Sequence
  Description of Artificial Sequence: Synthetic oligonucleotide
guugugcuauaggaauauc

SEQ ID NO: 127025 - RNA, 19 nt, Artificial Sequence
  Description of Artificial Sequence: Synthetic oligonucleotide
accgaguuucugcucuauu

SEQ ID NO: 127026 - RNA, 19 nt, Artificial Sequence
  Description of Artificial Sequence: Synthetic oligonucleotide
agacgccgacuccgcgcgc

SEQ ID NO: 127027 - RNA, 19 nt, Artificial Sequence
  Description of Artificial Sequence: Synthetic oligonucleotide
uccuagcuuucccgaugaa

SEQ ID NO: 127028 - RNA, 19 nt, Artificial Sequence
  Description of Artificial Sequence: Synthetic oligonucleotide
gauaaccauugcagcucga

SEQ ID NO: 127029 - RNA, 19 nt, Artificial Sequence
  Description of Artificial Sequence: Synthetic oligonucleotide
gcuagaugugcgaucuuuc

SEQ ID NO: 127030 - RNA, 19 nt, Artificial Sequence
  Description of Artificial Sequence: Synthetic oligonucleotide
auaccgaguuucugcucua

SEQ ID NO: 127031 - RNA, 19 nt, Artificial Sequence
  Description of Artificial Sequence: Synthetic oligonucleotide
augugcgaucuuucccaaa

SEQ ID NO: 127032 - RNA, 19 nt, Artificial Sequence
  Description of Artificial Sequence: Synthetic oligonucleotide
guugauagacgaggcucaa

SEQ ID NO: 127033 - RNA, 19 nt, Artificial Sequence
  Description of Artificial Sequence: Synthetic oligonucleotide
uuggagcuccgaagaccau

SEQ ID NO: 127034 - RNA, 19 nt, Artificial Sequence
  Description of Artificial Sequence: Synthetic oligonucleotide
gguagcugguuggacguca

SEQ ID NO: 127035 - RNA, 19 nt, Artificial Sequence
  Description of Artificial Sequence: Synthetic oligonucleotide
gccaauugucugacacacg

SEQ ID NO: 127036 - RNA, 19 nt, Artificial Sequence
  Description of Artificial Sequence: Synthetic oligonucleotide
gcgucaaagagacuucuau

SEQ ID NO: 127037 - RNA, 19 nt, Artificial Sequence
  Description of Artificial Sequence: Synthetic oligonucleotide
ccgaguuucugcucuauua

SEQ ID NO: 127038 - RNA, 19 nt, Artificial Sequence
  Description of Artificial Sequence: Synthetic oligonucleotide
gguuggacgucaggaacca

SEQ ID NO: 127039 - RNA, 19 nt, Artificial Sequence
  Description of Artificial Sequence: Synthetic oligonucleotide
gacacacggaggcgcggaa

SEQ ID NO: 127040 - RNA, 19 nt, Artificial Sequence
  Description of Artificial Sequence: Synthetic oligonucleotide
uucccgcgccggucaaaca

SEQ ID NO: 127041 - RNA, 19 nt, Artificial Sequence
  Description of Artificial Sequence: Synthetic oligonucleotide
ccggucaaacaaguacacc

SEQ ID NO: 127042 - RNA, 19 nt, Artificial Sequence
  Description of Artificial Sequence: Synthetic oligonucleotide
guacaccguccugcagccg

SEQ ID NO: 127043 - RNA, 19 nt, Artificial Sequence
  Description of Artificial Sequence: Synthetic oligonucleotide
caagguccuacuggcaaua

SEQ ID NO: 127044 - RNA, 19 nt, Artificial Sequence
  Description of Artificial Sequence: Synthetic oligonucleotide
caguaaugugggacagugu

SEQ ID NO: 127045 - RNA, 19 nt, Artificial Sequence
  Description of Artificial Sequence: Synthetic oligonucleotide
uccuucccgcgccggucaa

SEQ ID NO: 127046 - RNA, 19 nt, Artificial Sequence
  Description of Artificial Sequence: Synthetic oligonucleotide
gcagagcgcgauccccgag

SEQ ID NO: 127047 - RNA, 19 nt, Artificial Sequence
  Description of Artificial Sequence: Synthetic oligonucleotide
ccgaagaccauuccccgaa

SEQ ID NO: 127048 - RNA, 19 nt, Artificial Sequence
  Description of Artificial Sequence: Synthetic oligonucleotide
cgucaaagagacuucuaua

SEQ ID NO: 127049 - RNA, 19 nt, Artificial Sequence
  Description of Artificial Sequence: Synthetic oligonucleotide
cccgcgccggucaaacaag

SEQ ID NO: 127050 - RNA, 19 nt, Artificial Sequence
  Description of Artificial Sequence: Synthetic oligonucleotide
ugacgaccuugaguuucau

SEQ ID NO: 127051 - RNA, 19 nt, Artificial Sequence
  Description of Artificial Sequence: Synthetic oligonucleotide
ggaccugcagagcgcgauc

SEQ ID NO: 127052 - RNA, 19 nt, Artificial Sequence
  Description of Artificial Sequence: Synthetic oligonucleotide
ggcgcggaacccagcguag

SEQ ID NO: 127053 - RNA, 19 nt, Artificial Sequence
  Description of Artificial Sequence: Synthetic oligonucleotide
ggaacccagcguagccugc

SEQ ID NO: 127054 - RNA, 19 nt, Artificial Sequence
  Description of Artificial Sequence: Synthetic oligonucleotide
ggacagugugugauuuuaa

SEQ ID NO: 127055 - RNA, 19 nt, Artificial Sequence
  Description of Artificial Sequence: Synthetic oligonucleotide
gagcgcgauccccgagcuc

SEQ ID NO: 127056 - RNA, 19 nt, Artificial Sequence
  Description of Artificial Sequence: Synthetic oligonucleotide
cgcggaacccagcguagcc

SEQ ID NO: 127057 - RNA, 19 nt, Artificial Sequence
  Description of Artificial Sequence: Synthetic oligonucleotide
gccgacuccgcgcgcgccc

SEQ ID NO: 127058 - RNA, 19 nt, Artificial Sequence
  Description of Artificial Sequence: Synthetic oligonucleotide
gcgcuuccaggcccacccg

SEQ ID NO: 127059 - RNA, 19 nt, Artificial Sequence
  Description of Artificial Sequence: Synthetic oligonucleotide
cgucgggcacgcuucccgg

SEQ ID NO: 127060 - RNA, 19 nt, Artificial Sequence
  Description of Artificial Sequence: Synthetic oligonucleotide
gccugcgcgcuccgggacc

SEQ ID NO: 127061 - RNA, 19 nt, Artificial Sequence
  Description of Artificial Sequence: Synthetic oligonucleotide
ccaugucacuugccagaug

SEQ ID NO: 127062 - RNA, 19 nt, Artificial Sequence
  Description of Artificial Sequence: Synthetic oligonucleotide
gcgauccccgagcuccgac

SEQ ID NO: 127063 - RNA, 19 nt, Artificial Sequence
  Description of Artificial Sequence: Synthetic oligonucleotide
gcugcauaucuuacuuaua

SEQ ID NO: 127064 - RNA, 19 nt, Artificial Sequence
  Description of Artificial Sequence: Synthetic oligonucleotide
cccgaugaagaguggggua

SEQ ID NO: 127065 - RNA, 19 nt, Artificial Sequence
  Description of Artificial Sequence: Synthetic oligonucleotide
ggcgucaaagagacuucua

SEQ ID NO: 127066 - RNA, 19 nt, Artificial Sequence
  Description of Artificial Sequence: Synthetic oligonucleotide
gcgcggaacccagcguagc

SEQ ID NO: 127067 - RNA, 19 nt, Artificial Sequence
  Description of Artificial Sequence: Synthetic oligonucleotide
gacgaggcucaaagauaau

SEQ ID NO: 127068 - RNA, 19 nt, Artificial Sequence
  Description of Artificial Sequence: Synthetic oligonucleotide
cggagacgccgacuccgcg

SEQ ID NO: 127069 - RNA, 19 nt, Artificial Sequence
  Description of Artificial Sequence: Synthetic oligonucleotide
gcuuccuaacaaacuuuau

SEQ ID NO: 127070 - RNA, 19 nt, Artificial Sequence
  Description of Artificial Sequence: Synthetic oligonucleotide
ggacgucaggaaccaacuu

SEQ ID NO: 127071 - RNA, 19 nt, Artificial Sequence
  Description of Artificial Sequence: Synthetic oligonucleotide
cacuuccguguaggaguca

SEQ ID NO: 127072 - RNA, 19 nt, Artificial Sequence
  Description of Artificial Sequence: Synthetic oligonucleotide
ccgaugaagagugggguau

SEQ ID NO: 127073 - RNA, 19 nt, Artificial Sequence
  Description of Artificial Sequence: Synthetic oligonucleotide
gcggaacccagcguagccu

SEQ ID NO: 127074 - RNA, 19 nt, Artificial Sequence
  Description of Artificial Sequence: Synthetic oligonucleotide
caucaacaagcugcuuguu

SEQ ID NO: 127075 - RNA, 19 nt, Artificial Sequence
  Description of Artificial Sequence: Synthetic oligonucleotide
cuaucccuuccaggacugu

SEQ ID NO: 127076 - RNA, 19 nt, Artificial Sequence
  Description of Artificial Sequence: Synthetic oligonucleotide
ccaguaugauuaccauaau

SEQ ID NO: 127077 - RNA, 19 nt, Artificial Sequence
  Description of Artificial Sequence: Synthetic oligonucleotide
cgauccccgagcuccgacu

SEQ ID NO: 127078 - RNA, 19 nt, Artificial Sequence
  Description of Artificial Sequence: Synthetic oligonucleotide
ccaacuucauaggcugauu

SEQ ID NO: 127079 - RNA, 19 nt, Artificial Sequence
  Description of Artificial Sequence: Synthetic oligonucleotide
cgcuagaugugcgaucuuu

SEQ ID NO: 127080 - RNA, 19 nt, Artificial Sequence
  Description of Artificial Sequence: Synthetic oligonucleotide
ccgcgccggucaaacaagu

SEQ ID NO: 127081 - RNA, 19 nt, Artificial Sequence
  Description of Artificial Sequence: Synthetic oligonucleotide
ccugcgcgcuccgggaccu

SEQ ID NO: 127082 - RNA, 19 nt, Artificial Sequence
  Description of Artificial Sequence: Synthetic oligonucleotide
gcgcuagaugugcgaucuu

SEQ ID NO: 127083 - RNA, 19 nt, Artificial Sequence
  Description of Artificial Sequence: Synthetic oligonucleotide
ccuucccgcgccggucaaa

SEQ ID NO: 127084 - RNA, 19 nt, Artificial Sequence
  Description of Artificial Sequence: Synthetic oligonucleotide
uuaaauacagaacaggcug

SEQ ID NO: 127085 - RNA, 19 nt, Artificial Sequence
  Description of Artificial Sequence: Synthetic oligonucleotide
ucuaauguaguccacauuc

SEQ ID NO: 127086 - RNA, 19 nt, Artificial Sequence
  Description of Artificial Sequence: Synthetic oligonucleotide
aaguugggcacuuaauccc

SEQ ID NO: 127087 - RNA, 19 nt, Artificial Sequence
  Description of Artificial Sequence: Synthetic oligonucleotide
uuuauugggucucaaaagc

SEQ ID NO: 127088 - RNA, 19 nt, Artificial Sequence
  Description of Artificial Sequence: Synthetic oligonucleotide
gauguuaccauuuggauga

SEQ ID NO: 127089 - RNA, 19 nt, Artificial Sequence
  Description of Artificial Sequence: Synthetic oligonucleotide
auucuuaauagcucuggcc

SEQ ID NO: 127090 - RNA, 19 nt, Artificial Sequence
  Description of Artificial Sequence: Synthetic oligonucleotide
auuaacaggcuucuggugg

SEQ ID NO: 127091 - RNA, 19 nt, Artificial Sequence
  Description of Artificial Sequence: Synthetic oligonucleotide
ucuccuuaggcaaauagag

SEQ ID NO: 127092 - RNA, 19 nt, Artificial Sequence
  Description of Artificial Sequence: Synthetic oligonucleotide
ucgaugauagcauuaacag

SEQ ID NO: 127093 - RNA, 19 nt, Artificial Sequence
  Description of Artificial Sequence: Synthetic oligonucleotide
uuuucuaucgugaaacaga

SEQ ID NO: 127094 - RNA, 19 nt, Artificial Sequence
  Description of Artificial Sequence: Synthetic oligonucleotide
ucuaucgugaaacagacuu

SEQ ID NO: 127095 - RNA, 19 nt, Artificial Sequence
  Description of Artificial Sequence: Synthetic oligonucleotide
uuuggaauccgcaaauugc

SEQ ID NO: 127096 - RNA, 19 nt, Artificial Sequence
  Description of Artificial Sequence: Synthetic oligonucleotide
aauugaccaguccacacag

SEQ ID NO: 127097 - RNA, 19 nt, Artificial Sequence
  Description of Artificial Sequence: Synthetic oligonucleotide
ucacauaaucaacacuugg

SEQ ID NO: 127098 - RNA, 19 nt, Artificial Sequence
  Description of Artificial Sequence: Synthetic oligonucleotide
cuuagaaagcgcuugcucc

SEQ ID NO: 127099 - RNA, 19 nt, Artificial Sequence
  Description of Artificial Sequence: Synthetic oligonucleotide
agcauuaacaggcuucugg

SEQ ID NO: 127100 - RNA, 19 nt, Artificial Sequence
  Description of Artificial Sequence: Synthetic oligonucleotide
cagcauaacgguaacaagg

SEQ ID NO: 127101 - RNA, 19 nt, Artificial Sequence
  Description of Artificial Sequence: Synthetic oligonucleotide
uccuuaggcaaauagagcu

SEQ ID NO: 127102 - RNA, 19 nt, Artificial Sequence
  Description of Artificial Sequence: Synthetic oligonucleotide
aaauucccgggccucaaac

SEQ ID NO: 127103 - RNA, 19 nt, Artificial Sequence
  Description of Artificial Sequence: Synthetic oligonucleotide
agacggacagguuagcccc

SEQ ID NO: 127104 - RNA, 19 nt, Artificial Sequence
  Description of Artificial Sequence: Synthetic oligonucleotide
aauugcuuauccuuuuggu

SEQ ID NO: 127105 - RNA, 19 nt, Artificial Sequence
  Description of Artificial Sequence: Synthetic oligonucleotide
ggcaaauagagcuugaggc

SEQ ID NO: 127106 - RNA, 19 nt, Artificial Sequence
  Description of Artificial Sequence: Synthetic oligonucleotide
uuucuaucgugaaacagac

SEQ ID NO: 127107 - RNA, 19 nt, Artificial Sequence
  Description of Artificial Sequence: Synthetic oligonucleotide
gaauccgcaaauugcagag

SEQ ID NO: 127108 - RNA, 19 nt, Artificial Sequence
  Description of Artificial Sequence: Synthetic oligonucleotide
uguuucacuaccaucugcu

SEQ ID NO: 127109 - RNA, 19 nt, Artificial Sequence
  Description of Artificial Sequence: Synthetic oligonucleotide
gaauugcuuauccuuuugg

SEQ ID NO: 127110 - RNA, 19 nt, Artificial Sequence
  Description of Artificial Sequence: Synthetic oligonucleotide
agcguccucaucuuggggc

SEQ ID NO: 127111 - RNA, 19 nt, Artificial Sequence
  Description of Artificial Sequence: Synthetic oligonucleotide
acugaaaaccgccuccugg

SEQ ID NO: 127112 - RNA, 19 nt, Artificial Sequence
  Description of Artificial Sequence: Synthetic oligonucleotide
aaggcgaaggcauacucug

SEQ ID NO: 127113 - RNA, 19 nt, Artificial Sequence
  Description of Artificial Sequence: Synthetic oligonucleotide
ugugcgagcguccucaucu

SEQ ID NO: 127114 - RNA, 19 nt, Artificial Sequence
  Description of Artificial Sequence: Synthetic oligonucleotide
uuggaauccgcaaauugca

SEQ ID NO: 127115 - RNA, 19 nt, Artificial Sequence
  Description of Artificial Sequence: Synthetic oligonucleotide
uguggcuagaccuuugcug

SEQ ID NO: 127116 - RNA, 19 nt, Artificial Sequence
  Description of Artificial Sequence: Synthetic oligonucleotide
ucuauugccguagucaaug

SEQ ID NO: 127117 - RNA, 19 nt, Artificial Sequence
  Description of Artificial Sequence: Synthetic oligonucleotide
cucaaugguauacuugagg

SEQ ID NO: 127118 - RNA, 19 nt, Artificial Sequence
  Description of Artificial Sequence: Synthetic oligonucleotide
aaugucguacaggggacgc

SEQ ID NO: 127119 - RNA, 19 nt, Artificial Sequence
  Description of Artificial Sequence: Synthetic oligonucleotide
uccaaauuagcaguaggag

SEQ ID NO: 127120 - RNA, 19 nt, Artificial Sequence
  Description of Artificial Sequence: Synthetic oligonucleotide
uggcaaaccucucagcugc

SEQ ID NO: 127121 - RNA, 19 nt, Artificial Sequence
  Description of Artificial Sequence: Synthetic oligonucleotide
agugaaguggaccuuagaa

SEQ ID NO: 127122 - RNA, 19 nt, Artificial Sequence
  Description of Artificial Sequence: Synthetic oligonucleotide
aaccuugguggccgaaugc

SEQ ID NO: 127123 - RNA, 19 nt, Artificial Sequence
  Description of Artificial Sequence: Synthetic oligonucleotide
cucuacauugagcagacac

SEQ ID NO: 127124 - RNA, 19 nt, Artificial Sequence
  Description of Artificial Sequence: Synthetic oligonucleotide
agcuggacccaaucuaugc

SEQ ID NO: 127125 - RNA, 19 nt, Artificial Sequence
  Description of Artificial Sequence: Synthetic oligonucleotide
uccaagguagaucauccca

SEQ ID NO: 127126 - RNA, 19 nt, Artificial Sequence
  Description of Artificial Sequence: Synthetic oligonucleotide
aagcgcuugcuccaccagc

SEQ ID NO: 127127 - RNA, 19 nt, Artificial Sequence
  Description of Artificial Sequence: Synthetic oligonucleotide
uugaaugucccgaaccaca

SEQ ID NO: 127128 - RNA, 19 nt, Artificial Sequence
  Description of Artificial Sequence: Synthetic oligonucleotide
agaaccgacaucucagaag

SEQ ID NO: 127129 - RNA, 19 nt, Artificial Sequence
  Description of Artificial Sequence: Synthetic oligonucleotide
agaacgcuccuucuccucc

SEQ ID NO: 127130 - RNA, 19 nt, Artificial Sequence
  Description of Artificial Sequence: Synthetic oligonucleotide
cuucucggcgaaaaguugg

SEQ ID NO: 127131 - RNA, 19 nt, Artificial Sequence
  Description of Artificial Sequence: Synthetic oligonucleotide
aggcaaauagagcuugagg

SEQ ID NO: 127132 - RNA, 19 nt, Artificial Sequence
  Description of Artificial Sequence: Synthetic oligonucleotide
aacucaucggcaucaucag

SEQ ID NO: 127133 - RNA, 19 nt, Artificial Sequence
  Description of Artificial Sequence: Synthetic oligonucleotide
uggaguuugagaaccgaca

SEQ ID NO: 127134 - RNA, 19 nt, Artificial Sequence
  Description of Artificial Sequence: Synthetic oligonucleotide
cauagugugaggaucucug

SEQ ID NO: 127135 - RNA, 19 nt, Artificial Sequence
  Description of Artificial Sequence: Synthetic oligonucleotide
ugaucucagucacaaacac

SEQ ID NO: 127136 - RNA, 19 nt, Artificial Sequence
  Description of Artificial Sequence: Synthetic oligonucleotide
aacgguaacaagguaguga

SEQ ID NO: 127137 - RNA, 19 nt, Artificial Sequence
  Description of Artificial Sequence: Synthetic oligonucleotide
ucgaagaaauucccgggcc

SEQ ID NO: 127138 - RNA, 19 nt, Artificial Sequence
  Description of Artificial Sequence: Synthetic oligonucleotide
ugaucugaacaucucucug

SEQ ID NO: 127139 - RNA, 19 nt, Artificial Sequence
  Description of Artificial Sequence: Synthetic oligonucleotide
ggcacuuaaucccugacag

SEQ ID NO: 127140 - RNA, 19 nt, Artificial Sequence
  Description of Artificial Sequence: Synthetic oligonucleotide
auuaccuuggcaaugaauu

SEQ ID NO: 127141 - RNA, 19 nt, Artificial Sequence
  Description of Artificial Sequence: Synthetic oligonucleotide
ugaauugcuuauccuuuug

SEQ ID NO: 127142 - RNA, 19 nt, Artificial Sequence
  Description of Artificial Sequence: Synthetic oligonucleotide
gcaaauagagcuugaggcg

SEQ ID NO: 127143 - RNA, 19 nt, Artificial Sequence
  Description of Artificial Sequence: Synthetic oligonucleotide
ucugggacacucaaugccu

SEQ ID NO: 127144 - RNA, 19 nt, Artificial Sequence
  Description of Artificial Sequence: Synthetic oligonucleotide
aauggcaucagcguucaaa

SEQ ID NO: 127145 - RNA, 19 nt, Artificial Sequence
  Description of Artificial Sequence: Synthetic oligonucleotide
agcggcuguagccaaacuc

SEQ ID NO: 127146 - RNA, 19 nt, Artificial Sequence
  Description of Artificial Sequence: Synthetic oligonucleotide
ggguuauuggcucucaugc

SEQ ID NO: 127147 - RNA, 19 nt, Artificial Sequence
  Description of Artificial Sequence: Synthetic oligonucleotide
aucccugacagcauaacgg

SEQ ID NO: 127148 - RNA, 19 nt, Artificial Sequence
  Description of Artificial Sequence: Synthetic oligonucleotide
gaugacuguggcuagaccu

SEQ ID NO: 127149 - RNA, 19 nt, Artificial Sequence
  Description of Artificial Sequence: Synthetic oligonucleotide
agugccacuaucauggucu

SEQ ID NO: 127150 - RNA, 19 nt, Artificial Sequence
  Description of Artificial Sequence: Synthetic oligonucleotide
cagguucuauuuuauuggg

SEQ ID NO: 127151 - RNA, 19 nt, Artificial Sequence
  Description of Artificial Sequence: Synthetic oligonucleotide
uuaccuuggcaaugaauug

SEQ ID NO: 127152 - RNA, 19 nt, Artificial Sequence
  Description of Artificial Sequence: Synthetic oligonucleotide
ggcaucagcguucaaaacc

SEQ ID NO: 127153 - RNA, 19 nt, Artificial Sequence
  Description of Artificial Sequence: Synthetic oligonucleotide
uaccaucugcuucucggcg

SEQ ID NO: 127154 - RNA, 19 nt, Artificial Sequence
  Description of Artificial Sequence: Synthetic oligonucleotide
augcucgacagguggaugg

SEQ ID NO: 127155 - RNA, 19 nt, Artificial Sequence
  Description of Artificial Sequence: Synthetic oligonucleotide
acgguaacaagguagugau

SEQ ID NO: 127156 - RNA, 19 nt, Artificial Sequence
  Description of Artificial Sequence: Synthetic oligonucleotide
augggugccagcugaucgc

SEQ ID NO: 127157 - RNA, 19 nt, Artificial Sequence
  Description of Artificial Sequence: Synthetic oligonucleotide
ucggaaaaggcaggcaccg

SEQ ID NO: 127158 - RNA, 19 nt, Artificial Sequence
  Description of Artificial Sequence: Synthetic oligonucleotide
uucucggcgaaaaguuggg

SEQ ID NO: 127159 - RNA, 19 nt, Artificial Sequence
  Description of Artificial Sequence: Synthetic oligonucleotide
ucucuauugccguagucaa

SEQ ID NO: 127160 - RNA, 19 nt, Artificial Sequence
  Description of Artificial Sequence: Synthetic oligonucleotide
acacacgagugcugaaggc

SEQ ID NO: 127161 - RNA, 19 nt, Artificial Sequence
  Description of Artificial Sequence: Synthetic oligonucleotide
auccgcaaauugcagagug

SEQ ID NO: 127162 - RNA, 19 nt, Artificial Sequence
  Description of Artificial Sequence: Synthetic oligonucleotide
aauucccgggccucaaaca

SEQ ID NO: 127163 - RNA, 19 nt, Artificial Sequence
  Description of Artificial Sequence: Synthetic oligonucleotide
ccaaauuagcaguaggagc

SEQ ID NO: 127164 - RNA, 19 nt, Artificial Sequence
  Description of Artificial Sequence: Synthetic oligonucleotide
gaucucagucacaaacacg

SEQ ID NO: 127165 - RNA, 19 nt, Artificial Sequence
  Description of Artificial Sequence: Synthetic oligonucleotide
uuucgugcuccucugggac

SEQ ID NO: 127166 - RNA, 19 nt, Artificial Sequence
  Description of Artificial Sequence: Synthetic oligonucleotide
agauaggaggggcuuguag

SEQ ID NO: 127167 - RNA, 19 nt, Artificial Sequence
  Description of Artificial Sequence: Synthetic oligonucleotide
uggaauccgcaaauugcag

SEQ ID NO: 127168 - RNA, 19 nt, Artificial Sequence
  Description of Artificial Sequence: Synthetic oligonucleotide
uguuuugaaugucccgaac

SEQ ID NO: 127169 - RNA, 19 nt, Artificial Sequence
  Description of Artificial Sequence: Synthetic oligonucleotide
auucagguauucugugauc

SEQ ID NO: 127170 - RNA, 19 nt, Artificial Sequence
  Description of Artificial Sequence: Synthetic oligonucleotide
accgccuccuggcagaggg

SEQ ID NO: 127171 - RNA, 19 nt, Artificial Sequence
  Description of Artificial Sequence: Synthetic oligonucleotide
gaaaaccgccuccuggcag

SEQ ID NO: 127172 - RNA, 19 nt, Artificial Sequence
  Description of Artificial Sequence: Synthetic oligonucleotide
agcaacucgguggaugggc

SEQ ID NO: 127173 - RNA, 19 nt, Artificial Sequence
  Description of Artificial Sequence: Synthetic oligonucleotide
aucagcguucaaaaccugc

SEQ ID NO: 127174 - RNA, 19 nt, Artificial Sequence
  Description of Artificial Sequence: Synthetic oligonucleotide
augugaaccauuccccuca

SEQ ID NO: 127175 - RNA, 19 nt, Artificial Sequence
  Description of Artificial Sequence: Synthetic oligonucleotide
uggguuauuggcucucaug

SEQ ID NO: 127176 - RNA, 19 nt, Artificial Sequence
  Description of Artificial Sequence: Synthetic oligonucleotide
caucccauacucucguccc

SEQ ID NO: 127177 - RNA, 19 nt, Artificial Sequence
  Description of Artificial Sequence: Synthetic oligonucleotide
ucaucauagugugaggauc

SEQ ID NO: 127178 - RNA, 19 nt, Artificial Sequence
  Description of Artificial Sequence: Synthetic oligonucleotide
gguagaucaucccauacuc

SEQ ID NO: 127179 - RNA, 19 nt, Artificial Sequence
  Description of Artificial Sequence: Synthetic oligonucleotide
guuucaguggcugggcugg

SEQ ID NO: 127180 - RNA, 19 nt, Artificial Sequence
  Description of Artificial Sequence: Synthetic oligonucleotide
uuccccauuaguaucuuuu

SEQ ID NO: 127181 - RNA, 19 nt, Artificial Sequence
  Description of Artificial Sequence: Synthetic oligonucleotide
uagaagugcaggucgucug

SEQ ID NO: 127182 - RNA, 19 nt, Artificial Sequence
  Description of Artificial Sequence: Synthetic oligonucleotide
cuccuuagcggcuguagcc

SEQ ID NO: 127183 - RNA, 19 nt, Artificial Sequence
  Description of Artificial Sequence: Synthetic oligonucleotide
cugaucgcugccuuggaug

SEQ ID NO: 127184 - RNA, 19 nt, Artificial Sequence
  Description of Artificial Sequence: Synthetic oligonucleotide
uggaugucacgauuauccc

SEQ ID NO: 127185 - RNA, 19 nt, Artificial Sequence
  Description of Artificial Sequence: Synthetic oligonucleotide
ucggcgaaaaguugggcac

SEQ ID NO: 127186 - RNA, 19 nt, Artificial Sequence
  Description of Artificial Sequence: Synthetic oligonucleotide
uggaugaaggaugguaccc

SEQ ID NO: 127187 - RNA, 19 nt, Artificial Sequence
  Description of Artificial Sequence: Synthetic oligonucleotide
ugaggcgagagccacugaa

SEQ ID NO: 127188 - RNA, 19 nt, Artificial Sequence
  Description of Artificial Sequence: Synthetic oligonucleotide
uuagccccauccaugugca

SEQ ID NO: 127189 - RNA, 19 nt, Artificial Sequence
  Description of Artificial Sequence: Synthetic oligonucleotide
cuugcgaaccuccaccaug

SEQ ID NO: 127190 - RNA, 19 nt, Artificial Sequence
  Description of Artificial Sequence: Synthetic oligonucleotide
aagccugguagguuucgug

SEQ ID NO: 127191 - RNA, 19 nt, Artificial Sequence
  Description of Artificial Sequence: Synthetic oligonucleotide
gguccaaauuagcaguagg

SEQ ID NO: 127192 - RNA, 19 nt, Artificial Sequence
  Description of Artificial Sequence: Synthetic oligonucleotide
cucggaaaaggcaggcacc

SEQ ID NO: 127193 - RNA, 19 nt, Artificial Sequence
  Description of Artificial Sequence: Synthetic oligonucleotide
auaacgguaacaagguagu

SEQ ID NO: 127194 - RNA, 19 nt, Artificial Sequence
  Description of Artificial Sequence: Synthetic oligonucleotide
ugcaaccagugacucugcg

SEQ ID NO: 127195 - RNA, 19 nt, Artificial Sequence
  Description of Artificial Sequence: Synthetic oligonucleotide
uauuccuccaauggugaca

SEQ ID NO: 127196 - RNA, 19 nt, Artificial Sequence
  Description of Artificial Sequence: Synthetic oligonucleotide
gauaggaggggcuuguagu

SEQ ID NO: 127197 - RNA, 19 nt, Artificial Sequence
  Description of Artificial Sequence: Synthetic oligonucleotide
ugucguacaggggacgcag

SEQ ID NO: 127198 - RNA, 19 nt, Artificial Sequence
  Description of Artificial Sequence: Synthetic oligonucleotide
ugcuucucggcgaaaaguu

SEQ ID NO: 127199 - RNA, 19 nt, Artificial Sequence
  Description of Artificial Sequence: Synthetic oligonucleotide
agcaauguuuauuccucca

SEQ ID NO: 127200 - RNA, 19 nt, Artificial Sequence
  Description of Artificial Sequence: Synthetic oligonucleotide
guggcuagaccuuugcuga

SEQ ID NO: 127201 - RNA, 19 nt, Artificial Sequence
  Description of Artificial Sequence: Synthetic oligonucleotide
gggaaugucguacagggga

SEQ ID NO: 127202 - RNA, 19 nt, Artificial Sequence
  Description of Artificial Sequence: Synthetic oligonucleotide
ucccugacagcauaacggu

SEQ ID NO: 127203 - RNA, 19 nt, Artificial Sequence
  Description of Artificial Sequence: Synthetic oligonucleotide
gaguccacaaagugccuug

SEQ ID NO: 127204 - RNA, 19 nt, Artificial Sequence
  Description of Artificial Sequence: Synthetic oligonucleotide
gaucucucuauugccguag

SEQ ID NO: 127205 - RNA, 19 nt, Artificial Sequence
  Description of Artificial Sequence: Synthetic oligonucleotide
auuuggaugaaggauggua

SEQ ID NO: 127206 - RNA, 19 nt, Artificial Sequence
  Description of Artificial Sequence: Synthetic oligonucleotide
uaugugaaccauuccccuc

SEQ ID NO: 127207 - RNA, 19 nt, Artificial Sequence
  Description of Artificial Sequence: Synthetic oligonucleotide
caacgccuccucuacaggc

SEQ ID NO: 127208 - RNA, 19 nt, Artificial Sequence
  Description of Artificial Sequence: Synthetic oligonucleotide
ugaaaaccgccuccuggca

SEQ ID NO: 127209 - RNA, 19 nt, Artificial Sequence
  Description of Artificial Sequence: Synthetic oligonucleotide
gaccuuagaaagcgcuugc

SEQ ID NO: 127210 - RNA, 19 nt, Artificial Sequence
  Description of Artificial Sequence: Synthetic oligonucleotide
ugaugacuguggcuagacc

SEQ ID NO: 127211 - RNA, 19 nt, Artificial Sequence
  Description of Artificial Sequence: Synthetic oligonucleotide
aaauuagcaguaggagcca

SEQ ID NO: 127212 - RNA, 19 nt, Artificial Sequence
  Description of Artificial Sequence: Synthetic oligonucleotide
uggugugaguccacaaagu

SEQ ID NO: 127213 - RNA, 19 nt, Artificial Sequence
  Description of Artificial Sequence: Synthetic oligonucleotide
agcauaacgguaacaaggu

SEQ ID NO: 127214 - RNA, 19 nt, Artificial Sequence
  Description of Artificial Sequence: Synthetic oligonucleotide
gugaaguggaccuuagaaa

SEQ ID NO: 127215 - RNA, 19 nt, Artificial Sequence
  Description of Artificial Sequence: Synthetic oligonucleotide
ugcgauguuuuccccauua

SEQ ID NO: 127216 - RNA, 19 nt, Artificial Sequence
  Description of Artificial Sequence: Synthetic oligonucleotide
ugcuacccaccacacagga

SEQ ID NO: 127217 - RNA, 19 nt, Artificial Sequence
  Description of Artificial Sequence: Synthetic oligonucleotide
cuaucgugaaacagacuuc

SEQ ID NO: 127218 - RNA, 19 nt, Artificial Sequence
  Description of Artificial Sequence: Synthetic oligonucleotide
gaaugucguacaggggacg

SEQ ID NO: 127219 - RNA, 19 nt, Artificial Sequence
  Description of Artificial Sequence: Synthetic oligonucleotide
cucagaacggccugcccgc

SEQ ID NO: 127220 - RNA, 19 nt, Artificial Sequence
  Description of Artificial Sequence: Synthetic oligonucleotide
cuggaguuugagaaccgac

SEQ ID NO: 127221 - RNA, 19 nt, Artificial Sequence
  Description of Artificial Sequence: Synthetic oligonucleotide
ugcucuaauguaguccaca

SEQ ID NO: 127222 - RNA, 19 nt, Artificial Sequence
  Description of Artificial Sequence: Synthetic oligonucleotide
guuauuggcucucaugccu

SEQ ID NO: 127223 - RNA, 19 nt, Artificial Sequence
  Description of Artificial Sequence: Synthetic oligonucleotide
agaagugcaggucgucugu

SEQ ID NO: 127224 - RNA, 19 nt, Artificial Sequence
  Description of Artificial Sequence: Synthetic oligonucleotide
agcaagacggacagguuag

SEQ ID NO: 127225 - RNA, 19 nt, Artificial Sequence
  Description of Artificial Sequence: Synthetic oligonucleotide
uuccaagguagaucauccc

SEQ ID NO: 127226 - RNA, 19 nt, Artificial Sequence
  Description of Artificial Sequence: Synthetic oligonucleotide
aggugaugaggcaagucuc

SEQ ID NO: 127227 - RNA, 19 nt, Artificial Sequence
  Description of Artificial Sequence: Synthetic oligonucleotide
ugauugugacagcucucca

SEQ ID NO: 127228 - RNA, 19 nt, Artificial Sequence
  Description of Artificial Sequence: Synthetic oligonucleotide
accaacaaaccuccaaaua

SEQ ID NO: 127229 - RNA, 19 nt, Artificial Sequence
  Description of Artificial Sequence: Synthetic oligonucleotide
aucggcaucaucagcucgg

SEQ ID NO: 127230 - RNA, 19 nt, Artificial Sequence
  Description of Artificial Sequence: Synthetic oligonucleotide
cacuaucauggucugcccc

SEQ ID NO: 127231 - RNA, 19 nt, Artificial Sequence
  Description of Artificial Sequence: Synthetic oligonucleotide
accaugacgagucccuccu

SEQ ID NO: 127232 - RNA, 19 nt, Artificial Sequence
  Description of Artificial Sequence: Synthetic oligonucleotide
ugugcaauccuuugccauu

SEQ ID NO: 127233 - RNA, 19 nt, Artificial Sequence
  Description of Artificial Sequence: Synthetic oligonucleotide
ucacgauuauccccuucac

SEQ ID NO: 127234 - RNA, 19 nt, Artificial Sequence
  Description of Artificial Sequence: Synthetic oligonucleotide
cagcaauguuuauuccucc

SEQ ID NO: 127235 - RNA, 19 nt, Artificial Sequence
  Description of Artificial Sequence: Synthetic oligonucleotide
ugccgguaucugaugacug

SEQ ID NO: 127236 - RNA, 19 nt, Artificial Sequence
  Description of Artificial Sequence: Synthetic oligonucleotide
acagguuagccccauccau

SEQ ID NO: 127237 - RNA, 19 nt, Artificial Sequence
  Description of Artificial Sequence: Synthetic oligonucleotide
gguaacaagguagugaucu

SEQ ID NO: 127238 - RNA, 19 nt, Artificial Sequence
  Description of Artificial Sequence: Synthetic oligonucleotide
cuggacccaaucuaugcuc

SEQ ID NO: 127239 - RNA, 19 nt, Artificial Sequence
  Description of Artificial Sequence: Synthetic oligonucleotide
aaugcucgacagguggaug

SEQ ID NO: 127240 - RNA, 19 nt, Artificial Sequence
  Description of Artificial Sequence: Synthetic oligonucleotide
uggguguccccagaaaugu

SEQ ID NO: 127241 - RNA, 19 nt, Artificial Sequence
  Description of Artificial Sequence: Synthetic oligonucleotide
uuauuccuccaauggugac

SEQ ID NO: 127242 - RNA, 19 nt, Artificial Sequence
  Description of Artificial Sequence: Synthetic oligonucleotide
ucauugcgcauguucucca

SEQ ID NO: 127243 - RNA, 19 nt, Artificial Sequence
  Description of Artificial Sequence: Synthetic oligonucleotide
augguauacuugagguccc

SEQ ID NO: 127244 - RNA, 19 nt, Artificial Sequence
  Description of Artificial Sequence: Synthetic oligonucleotide
gguuucgugcuccucuggg

SEQ ID NO: 127245 - RNA, 19 nt, Artificial Sequence
  Description of Artificial Sequence: Synthetic oligonucleotide
guggccgaaugcucgacag

SEQ ID NO: 127246 - RNA, 19 nt, Artificial Sequence
  Description of Artificial Sequence: Synthetic oligonucleotide
agccagccgaugaaguugc

SEQ ID NO: 127247 - RNA, 19 nt, Artificial Sequence
  Description of Artificial Sequence: Synthetic oligonucleotide
cuacaaauuuggcaaugca

SEQ ID NO: 127248 - RNA, 19 nt, Artificial Sequence
  Description of Artificial Sequence: Synthetic oligonucleotide
ugauagcauuaacaggcuu

SEQ ID NO: 127249 - RNA, 19 nt, Artificial Sequence
  Description of Artificial Sequence: Synthetic oligonucleotide
uauugccguagucaaugua

SEQ ID NO: 127250 - RNA, 19 nt, Artificial Sequence
  Description of Artificial Sequence: Synthetic oligonucleotide
guccaaauuagcaguagga

SEQ ID NO: 127251 - RNA, 19 nt, Artificial Sequence
  Description of Artificial Sequence: Synthetic oligonucleotide
uggccgaaugcucgacagg

SEQ ID NO: 127252 - RNA, 19 nt, Artificial Sequence
  Description of Artificial Sequence: Synthetic oligonucleotide
uccccauuaguaucuuuuc

SEQ ID NO: 127253 - RNA, 19 nt, Artificial Sequence
  Description of Artificial Sequence: Synthetic oligonucleotide
caucggcaucaucagcucg

SEQ ID NO: 127254 - RNA, 19 nt, Artificial Sequence
  Description of Artificial Sequence: Synthetic oligonucleotide
ucauagugugaggaucucu

SEQ ID NO: 127255 - RNA, 19 nt, Artificial Sequence
  Description of Artificial Sequence: Synthetic oligonucleotide
caauugaccaguccacaca

SEQ ID NO: 127256 - RNA, 19 nt, Artificial Sequence
  Description of Artificial Sequence: Synthetic oligonucleotide
ugcuuggcggcuuccucag

SEQ ID NO: 127257 - RNA, 19 nt, Artificial Sequence
  Description of Artificial Sequence: Synthetic oligonucleotide
gaagaaauucccgggccuc

SEQ ID NO: 127258 - RNA, 19 nt, Artificial Sequence
  Description of Artificial Sequence: Synthetic oligonucleotide
gcugcucuaauguagucca

SEQ ID NO: 127259 - RNA, 19 nt, Artificial Sequence
  Description of Artificial Sequence: Synthetic oligonucleotide
caugacgagucccuccuuc

SEQ ID NO: 127260 - RNA, 19 nt, Artificial Sequence
  Description of Artificial Sequence: Synthetic oligonucleotide
cucggcgaaaaguugggca

SEQ ID NO: 127261 - RNA, 19 nt, Artificial Sequence
  Description of Artificial Sequence: Synthetic oligonucleotide
aguggaccuuagaaagcgc

SEQ ID NO: 127262 - RNA, 19 nt, Artificial Sequence
  Description of Artificial Sequence: Synthetic oligonucleotide
uucuaucgugaaacagacu

SEQ ID NO: 127263 - RNA, 19 nt, Artificial Sequence
  Description of Artificial Sequence: Synthetic oligonucleotide
cuugaggcgagagccacug

SEQ ID NO: 127264 - RNA, 19 nt, Artificial Sequence
  Description of Artificial Sequence: Synthetic oligonucleotide
auagagcuugaggcgagag

SEQ ID NO: 127265 - RNA, 19 nt, Artificial Sequence
  Description of Artificial Sequence: Synthetic oligonucleotide
gguuauuggcucucaugcc

SEQ ID NO: 127266 - RNA, 19 nt, Artificial Sequence
  Description of Artificial Sequence: Synthetic oligonucleotide
ugguauacuugaggucccg

SEQ ID NO: 127267 - RNA, 19 nt, Artificial Sequence
  Description of Artificial Sequence: Synthetic oligonucleotide
agagggaacgggucuggca

SEQ ID NO: 127268 - RNA, 19 nt, Artificial Sequence
  Description of Artificial Sequence: Synthetic oligonucleotide
gucacauaaucaacacuug

SEQ ID NO: 127269 - RNA, 19 nt, Artificial Sequence
  Description of Artificial Sequence: Synthetic oligonucleotide
ucgguaccauucuccaucu

SEQ ID NO: 127270 - RNA, 19 nt, Artificial Sequence
  Description of Artificial Sequence: Synthetic oligonucleotide
agcagucuugacuccguga

SEQ ID NO: 127271 - RNA, 19 nt, Artificial Sequence
  Description of Artificial Sequence: Synthetic oligonucleotide
gagcucgguaccauucucc

SEQ ID NO: 127272 - RNA, 19 nt, Artificial Sequence
  Description of Artificial Sequence: Synthetic oligonucleotide
ugggcacuuaaucccugac

SEQ ID NO: 127273 - RNA, 19 nt, Artificial Sequence
  Description of Artificial Sequence: Synthetic oligonucleotide
ucucucuauugccguaguc

SEQ ID NO: 127274 - RNA, 19 nt, Artificial Sequence
  Description of Artificial Sequence: Synthetic oligonucleotide
agcgccacagguucagccu

SEQ ID NO: 127275 - RNA, 19 nt, Artificial Sequence
  Description of Artificial Sequence: Synthetic oligonucleotide
augacgagucccuccuuca

SEQ ID NO: 127276 - RNA, 19 nt, Artificial Sequence
  Description of Artificial Sequence: Synthetic oligonucleotide
ccgaaugcucgacaggugg

SEQ ID NO: 127277 - RNA, 19 nt, Artificial Sequence
  Description of Artificial Sequence: Synthetic oligonucleotide
ugggacacucaaugccugc

SEQ ID NO: 127278 - RNA, 19 nt, Artificial Sequence
  Description of Artificial Sequence: Synthetic oligonucleotide
agaacggccugcccgcuga

SEQ ID NO: 127279 - RNA, 19 nt, Artificial Sequence
  Description of Artificial Sequence: Synthetic oligonucleotide
caccaugacgagucccucc

SEQ ID NO: 127280 - RNA, 19 nt, Artificial Sequence
  Description of Artificial Sequence: Synthetic oligonucleotide
aauccgcaaauugcagagu

SEQ ID NO: 127281 - RNA, 19 nt, Artificial Sequence
  Description of Artificial Sequence: Synthetic oligonucleotide
gacacugaguguuuugaau

SEQ ID NO: 127282 - RNA, 19 nt, Artificial Sequence
  Description of Artificial Sequence: Synthetic oligonucleotide
uggaccuuagaaagcgcuu

SEQ ID NO: 127283 - RNA, 19 nt, Artificial Sequence
  Description of Artificial Sequence: Synthetic oligonucleotide
agguuucgugcuccucugg

SEQ ID NO: 127284 - RNA, 19 nt, Artificial Sequence
  Description of Artificial Sequence: Synthetic oligonucleotide
guccgcucggaaaaggcag

SEQ ID NO: 127285 - RNA, 19 nt, Artificial Sequence
  Description of Artificial Sequence: Synthetic oligonucleotide
ggcaacgccuccucuacag

SEQ ID NO: 127286 - RNA, 19 nt, Artificial Sequence
  Description of Artificial Sequence: Synthetic oligonucleotide
gggccucaaacauguaggg

SEQ ID NO: 127287 - RNA, 19 nt, Artificial Sequence
  Description of Artificial Sequence: Synthetic oligonucleotide
aggggacgcaguuucuugu

SEQ ID NO: 127288 - RNA, 19 nt, Artificial Sequence
  Description of Artificial Sequence: Synthetic oligonucleotide
acaagguagugaucuggaa

SEQ ID NO: 127289 - RNA, 19 nt, Artificial Sequence
  Description of Artificial Sequence: Synthetic oligonucleotide
ugugaaccauuccccucac

SEQ ID NO: 127290 - RNA, 19 nt, Artificial Sequence
  Description of Artificial Sequence: Synthetic oligonucleotide
gccguagucaauguagaag

SEQ ID NO: 127291 - RNA, 19 nt, Artificial Sequence
  Description of Artificial Sequence: Synthetic oligonucleotide
uuagcggcuguagccaaac

SEQ ID NO: 127292 - RNA, 19 nt, Artificial Sequence
  Description of Artificial Sequence: Synthetic oligonucleotide
guagguuucgugcuccucu

SEQ ID NO: 127293 - RNA, 19 nt, Artificial Sequence
  Description of Artificial Sequence: Synthetic oligonucleotide
cugcccgcugaagaaaggg

SEQ ID NO: 127294 - RNA, 19 nt, Artificial Sequence
  Description of Artificial Sequence: Synthetic oligonucleotide
cauccaugugcagccagcc

SEQ ID NO: 127295 - RNA, 19 nt, Artificial Sequence
  Description of Artificial Sequence: Synthetic oligonucleotide
ggaauccgcaaauugcaga

SEQ ID NO: 127296 - RNA, 19 nt, Artificial Sequence
  Description of Artificial Sequence: Synthetic oligonucleotide
gagcguccucaucuugggg

SEQ ID NO: 127297 - RNA, 19 nt, Artificial Sequence
  Description of Artificial Sequence: Synthetic oligonucleotide
gacccaaucuaugcucccc

SEQ ID NO: 127298 - RNA, 19 nt, Artificial Sequence
  Description of Artificial Sequence: Synthetic oligonucleotide
ucccggaugguaugugaac

SEQ ID NO: 127299 - RNA, 19 nt, Artificial Sequence
  Description of Artificial Sequence: Synthetic oligonucleotide
gauggcaggaucucucuau

SEQ ID NO: 127300 - RNA, 19 nt, Artificial Sequence
  Description of Artificial Sequence: Synthetic oligonucleotide
gugaucacuuucuggaacu

SEQ ID NO: 127301 - RNA, 19 nt, Artificial Sequence
  Description of Artificial Sequence: Synthetic oligonucleotide
gagaaccgacaucucagaa

SEQ ID NO: 127302 - RNA, 19 nt, Artificial Sequence
  Description of Artificial Sequence: Synthetic oligonucleotide
uaucauggucugccccagc

SEQ ID NO: 127303 - RNA, 19 nt, Artificial Sequence
  Description of Artificial Sequence: Synthetic oligonucleotide
aggagagacuguggauggc

SEQ ID NO: 127304 - RNA, 19 nt, Artificial Sequence
  Description of Artificial Sequence: Synthetic oligonucleotide
ugcgagcguccucaucuug

SEQ ID NO: 127305 - RNA, 19 nt, Artificial Sequence
  Description of Artificial Sequence: Synthetic oligonucleotide
gcaauugaccaguccacac

SEQ ID NO: 127306 - RNA, 19 nt, Artificial Sequence
  Description of Artificial Sequence: Synthetic oligonucleotide
uccacccgagcucgguacc

SEQ ID NO: 127307 - RNA, 19 nt, Artificial Sequence
  Description of Artificial Sequence: Synthetic oligonucleotide
caggcggguagauggcagg

SEQ ID NO: 127308 - RNA, 19 nt, Artificial Sequence
  Description of Artificial Sequence: Synthetic oligonucleotide
agggaacgggucuggcauc

SEQ ID NO: 127309 - RNA, 19 nt, Artificial Sequence
  Description of Artificial Sequence: Synthetic oligonucleotide
caccguuucaguggcuggg

SEQ ID NO: 127310 - RNA, 19 nt, Artificial Sequence
  Description of Artificial Sequence: Synthetic oligonucleotide
cugggacacucaaugccug

SEQ ID NO: 127311 - RNA, 19 nt, Artificial Sequence
  Description of Artificial Sequence: Synthetic oligonucleotide
gcucucaugccuucucucc

SEQ ID NO: 127312 - RNA, 19 nt, Artificial Sequence
  Description of Artificial Sequence: Synthetic oligonucleotide
ugacagcauaacgguaaca

SEQ ID NO: 127313 - RNA, 19 nt, Artificial Sequence
  Description of Artificial Sequence: Synthetic oligonucleotide
ugccguagucaauguagaa

SEQ ID NO: 127314 - RNA, 19 nt, Artificial Sequence
  Description of Artificial Sequence: Synthetic oligonucleotide
aggaugguacccagaaugu

SEQ ID NO: 127315 - RNA, 19 nt, Artificial Sequence
  Description of Artificial Sequence: Synthetic oligonucleotide
ucguacaggggacgcaguu

SEQ ID NO: 127316 - RNA, 19 nt, Artificial Sequence
  Description of Artificial Sequence: Synthetic oligonucleotide
guuucgugcuccucuggga

SEQ ID NO: 127317 - RNA, 19 nt, Artificial Sequence
  Description of Artificial Sequence: Synthetic oligonucleotide
ugcaccccggguguaaacu

SEQ ID NO: 127318 - RNA, 19 nt, Artificial Sequence
  Description of Artificial Sequence: Synthetic oligonucleotide
aguugggcacuuaaucccu

SEQ ID NO: 127319 - RNA, 19 nt, Artificial Sequence
  Description of Artificial Sequence: Synthetic oligonucleotide
gagggaacgggucuggcau

SEQ ID NO: 127320 - RNA, 19 nt, Artificial Sequence
  Description of Artificial Sequence: Synthetic oligonucleotide
gcgaaggcauacucugugg

SEQ ID NO: 127321 - RNA, 19 nt, Artificial Sequence
  Description of Artificial Sequence: Synthetic oligonucleotide
ggaccuuagaaagcgcuug

SEQ ID NO: 127322 - RNA, 19 nt, Artificial Sequence
  Description of Artificial Sequence: Synthetic oligonucleotide
cagcacuaguuccuuggug

SEQ ID NO: 127323 - RNA, 19 nt, Artificial Sequence
  Description of Artificial Sequence: Synthetic oligonucleotide
aucgcugccuuggauguca

SEQ ID NO: 127324 - RNA, 19 nt, Artificial Sequence
  Description of Artificial Sequence: Synthetic oligonucleotide
caggggacgcaguuucuug

SEQ ID NO: 127325 - RNA, 19 nt, Artificial Sequence
  Description of Artificial Sequence: Synthetic oligonucleotide
ggcaagucuccuuaggcaa

SEQ ID NO: 127326 - RNA, 19 nt, Artificial Sequence
  Description of Artificial Sequence: Synthetic oligonucleotide
caccccggguguaaacugc

SEQ ID NO: 127327 - RNA, 19 nt, Artificial Sequence
  Description of Artificial Sequence: Synthetic oligonucleotide
cuuggaugucacgauuauc

SEQ ID NO: 127328 - RNA, 19 nt, Artificial Sequence
  Description of Artificial Sequence: Synthetic oligonucleotide
cuagaccuuugcugacaag

SEQ ID NO: 127329 - RNA, 19 nt, Artificial Sequence
  Description of Artificial Sequence: Synthetic oligonucleotide
cugcaccaagccugguagg

SEQ ID NO: 127330 - RNA, 19 nt, Artificial Sequence
  Description of Artificial Sequence: Synthetic oligonucleotide
cgggccucaaacauguagg

SEQ ID NO: 127331 - RNA, 19 nt, Artificial Sequence
  Description of Artificial Sequence: Synthetic oligonucleotide
gugauguuaccauuuggau

SEQ ID NO: 127332 - RNA, 19 nt, Artificial Sequence
  Description of Artificial Sequence: Synthetic oligonucleotide
ucucggcgaaaaguugggc

SEQ ID NO: 127333 - RNA, 19 nt, Artificial Sequence
  Description of Artificial Sequence: Synthetic oligonucleotide
uaguaggcgcugcgcucgg

SEQ ID NO: 127334 - RNA, 19 nt, Artificial Sequence
  Description of Artificial Sequence: Synthetic oligonucleotide
auagcgccacagguucagc

SEQ ID NO: 127335 - RNA, 19 nt, Artificial Sequence
  Description of Artificial Sequence: Synthetic oligonucleotide
gagcuggcaacacacgagu

SEQ ID NO: 127336 - RNA, 19 nt, Artificial Sequence
  Description of Artificial Sequence: Synthetic oligonucleotide
gcucucgaccucuaccucc

SEQ ID NO: 127337 - RNA, 19 nt, Artificial Sequence
  Description of Artificial Sequence: Synthetic oligonucleotide
aucucucuauugccguagu

SEQ ID NO: 127338 - RNA, 19 nt, Artificial Sequence
  Description of Artificial Sequence: Synthetic oligonucleotide
aagugccuuggguucucaa

SEQ ID NO: 127339 - RNA, 19 nt, Artificial Sequence
  Description of Artificial Sequence: Synthetic oligonucleotide
gcaaauugcagagugacau

SEQ ID NO: 127340 - RNA, 19 nt, Artificial Sequence
  Description of Artificial Sequence: Synthetic oligonucleotide
agccccacgucgccuuugg

SEQ ID NO: 127341 - RNA, 19 nt, Artificial Sequence
  Description of Artificial Sequence: Synthetic oligonucleotide
aaccgacaucucagaaguc

SEQ ID NO: 127342 - RNA, 19 nt, Artificial Sequence
  Description of Artificial Sequence: Synthetic oligonucleotide
guguuuugaaugucccgaa

SEQ ID NO: 127343 - RNA, 19 nt, Artificial Sequence
  Description of Artificial Sequence: Synthetic oligonucleotide
cacacgagugcugaaggca

SEQ ID NO: 127344 - RNA, 19 nt, Artificial Sequence
  Description of Artificial Sequence: Synthetic oligonucleotide
cuugcuccaccagcaagac

SEQ ID NO: 127345 - RNA, 19 nt, Artificial Sequence
  Description of Artificial Sequence: Synthetic oligonucleotide
cacgucgccuuuggaaucc

SEQ ID NO: 127346 - RNA, 19 nt, Artificial Sequence
  Description of Artificial Sequence: Synthetic oligonucleotide
agggaaugucguacagggg

SEQ ID NO: 127347 - RNA, 19 nt, Artificial Sequence
  Description of Artificial Sequence: Synthetic oligonucleotide
accuuagaaagcgcuugcu

SEQ ID NO: 127348 - RNA, 19 nt, Artificial Sequence
  Description of Artificial Sequence: Synthetic oligonucleotide
ccuuagaaagcgcuugcuc

SEQ ID NO: 127349 - RNA, 19 nt, Artificial Sequence
  Description of Artificial Sequence: Synthetic oligonucleotide
caucagcguucaaaaccug

SEQ ID NO: 127350 - RNA, 19 nt, Artificial Sequence
  Description of Artificial Sequence: Synthetic oligonucleotide
aaucaacacuugggaagaa

SEQ ID NO: 127351 - RNA, 19 nt, Artificial Sequence
  Description of Artificial Sequence: Synthetic oligonucleotide
agcgcuugcuccaccagca

SEQ ID NO: 127352 - RNA, 19 nt, Artificial Sequence
  Description of Artificial Sequence: Synthetic oligonucleotide
gaaggcgaaggcauacucu

SEQ ID NO: 127353 - RNA, 19 nt, Artificial Sequence
  Description of Artificial Sequence: Synthetic oligonucleotide
agagcucuccccggcgggg

SEQ ID NO: 127354 - RNA, 19 nt, Artificial Sequence
  Description of Artificial Sequence: Synthetic oligonucleotide
ccugacagcauaacgguaa

SEQ ID NO: 127355 - RNA, 19 nt, Artificial Sequence
  Description of Artificial Sequence: Synthetic oligonucleotide
aaagugccuuggguucuca

SEQ ID NO: 127356 - RNA, 19 nt, Artificial Sequence
  Description of Artificial Sequence: Synthetic oligonucleotide
augaaggcgaaggcauacu

SEQ ID NO: 127357 - RNA, 19 nt, Artificial Sequence
  Description of Artificial Sequence: Synthetic oligonucleotide
gcgauguuuuccccauuag

SEQ ID NO: 127358 - RNA, 19 nt, Artificial Sequence
  Description of Artificial Sequence: Synthetic oligonucleotide
gcacuuaaucccugacagc

SEQ ID NO: 127359 - RNA, 19 nt, Artificial Sequence
  Description of Artificial Sequence: Synthetic oligonucleotide
cacugaaaaccgccuccug

SEQ ID NO: 127360 - RNA, 19 nt, Artificial Sequence
  Description of Artificial Sequence: Synthetic oligonucleotide
guggcuugagcuggcaaca

SEQ ID NO: 127361 - RNA, 19 nt, Artificial Sequence
  Description of Artificial Sequence: Synthetic oligonucleotide
gcgugcaaagccuuccuuc

SEQ ID NO: 127362 - RNA, 19 nt, Artificial Sequence
  Description of Artificial Sequence: Synthetic oligonucleotide
ugcgcucggcagugaagug

SEQ ID NO: 127363 - RNA, 19 nt, Artificial Sequence
  Description of Artificial Sequence: Synthetic oligonucleotide
ggaaugucguacaggggac

SEQ ID NO: 127364 - RNA, 19 nt, Artificial Sequence
  Description of Artificial Sequence: Synthetic oligonucleotide
ugguagguuucgugcuccu

SEQ ID NO: 127365 - RNA, 19 nt, Artificial Sequence
  Description of Artificial Sequence: Synthetic oligonucleotide
gcgagcguccucaucuugg

SEQ ID NO: 127366 - RNA, 19 nt, Artificial Sequence
  Description of Artificial Sequence: Synthetic oligonucleotide
gagacgucauugcgcaugu

SEQ ID NO: 127367 - RNA, 19 nt, Artificial Sequence
  Description of Artificial Sequence: Synthetic oligonucleotide
ucgacagguggauggucuu

SEQ ID NO: 127368 - RNA, 19 nt, Artificial Sequence
  Description of Artificial Sequence: Synthetic oligonucleotide
cccggaugguaugugaacc

SEQ ID NO: 127369 - RNA, 19 nt, Artificial Sequence
  Description of Artificial Sequence: Synthetic oligonucleotide
gcgagagccacugaagaca

SEQ ID NO: 127370 - RNA, 19 nt, Artificial Sequence
  Description of Artificial Sequence: Synthetic oligonucleotide
gcaacgccuccucuacagg

SEQ ID NO: 127371 - RNA, 19 nt, Artificial Sequence
  Description of Artificial Sequence: Synthetic oligonucleotide
gggcacuuaaucccugaca

SEQ ID NO: 127372 - RNA, 19 nt, Artificial Sequence
  Description of Artificial Sequence: Synthetic oligonucleotide
cugcucuaauguaguccac

SEQ ID NO: 127373 - RNA, 19 nt, Artificial Sequence
  Description of Artificial Sequence: Synthetic oligonucleotide
gcggcuguagccaaacuca

SEQ ID NO: 127374 - RNA, 19 nt, Artificial Sequence
  Description of Artificial Sequence: Synthetic oligonucleotide
ugcucgacagguggauggu

SEQ ID NO: 127375 - RNA, 19 nt, Artificial Sequence
  Description of Artificial Sequence: Synthetic oligonucleotide
cucgacagguggauggucu

SEQ ID NO: 127376 - RNA, 19 nt, Artificial Sequence
  Description of Artificial Sequence: Synthetic oligonucleotide
auccugccgguaucugaug

SEQ ID NO: 127377 - RNA, 19 nt, Artificial Sequence
  Description of Artificial Sequence: Synthetic oligonucleotide
ucggcaucaucagcucgga

SEQ ID NO: 127378 - RNA, 19 nt, Artificial Sequence
  Description of Artificial Sequence: Synthetic oligonucleotide
gcaccguuucaguggcugg

SEQ ID NO: 127379 - RNA, 19 nt, Artificial Sequence
  Description of Artificial Sequence: Synthetic oligonucleotide
ggcaacacacgagugcuga

SEQ ID NO: 127380 - RNA, 19 nt, Artificial Sequence
  Description of Artificial Sequence: Synthetic oligonucleotide
uagcggcuguagccaaacu

SEQ ID NO: 127381 - RNA, 19 nt, Artificial Sequence
  Description of Artificial Sequence: Synthetic oligonucleotide
caaugcuacccaccacaca

SEQ ID NO: 127382 - RNA, 19 nt, Artificial Sequence
  Description of Artificial Sequence: Synthetic oligonucleotide
agaaauucccgggccucaa

SEQ ID NO: 127383 - RNA, 19 nt, Artificial Sequence
  Description of Artificial Sequence: Synthetic oligonucleotide
agcugaucgcugccuugga

SEQ ID NO: 127384 - RNA, 19 nt, Artificial Sequence
  Description of Artificial Sequence: Synthetic oligonucleotide
gcgcucggcagugaagugg

SEQ ID NO: 127385 - RNA, 19 nt, Artificial Sequence
  Description of Artificial Sequence: Synthetic oligonucleotide
ggacccaaucuaugcuccc

SEQ ID NO: 127386 - RNA, 19 nt, Artificial Sequence
  Description of Artificial Sequence: Synthetic oligonucleotide
ugccacuaucauggucugc

SEQ ID NO: 127387 - RNA, 19 nt, Artificial Sequence
  Description of Artificial Sequence: Synthetic oligonucleotide
cacgauuauccccuucacu

SEQ ID NO: 127388 - RNA, 19 nt, Artificial Sequence
  Description of Artificial Sequence: Synthetic oligonucleotide
ucugcaccccggguguaaa

SEQ ID NO: 127389 - RNA, 19 nt, Artificial Sequence
  Description of Artificial Sequence: Synthetic oligonucleotide
gcuucucggcgaaaaguug

SEQ ID NO: 127390 - RNA, 19 nt, Artificial Sequence
  Description of Artificial Sequence: Synthetic oligonucleotide
uuucaguggcugggcuggc

SEQ ID NO: 127391 - RNA, 19 nt, Artificial Sequence
  Description of Artificial Sequence: Synthetic oligonucleotide
uuggaugcuuuugcuuguu

SEQ ID NO: 127392 - RNA, 19 nt, Artificial Sequence
  Description of Artificial Sequence: Synthetic oligonucleotide
aggcaacgccuccucuaca

SEQ ID NO: 127393 - RNA, 19 nt, Artificial Sequence
  Description of Artificial Sequence: Synthetic oligonucleotide
augucguacaggggacgca

SEQ ID NO: 127394 - RNA, 19 nt, Artificial Sequence
  Description of Artificial Sequence: Synthetic oligonucleotide
ggcguaggagcccuccaca

SEQ ID NO: 127395 - RNA, 19 nt, Artificial Sequence
  Description of Artificial Sequence: Synthetic oligonucleotide
cucgggcucccauccccag

SEQ ID NO: 127396 - RNA, 19 nt, Artificial Sequence
  Description of Artificial Sequence: Synthetic oligonucleotide
aaccgccuccuggcagagg

SEQ ID NO: 127397 - RNA, 19 nt, Artificial Sequence
  Description of Artificial Sequence: Synthetic oligonucleotide
ggcucucaugccuucucuc

SEQ ID NO: 127398 - RNA, 19 nt, Artificial Sequence
  Description of Artificial Sequence: Synthetic oligonucleotide
uucugcaccccggguguaa

SEQ ID NO: 127399 - RNA, 19 nt, Artificial Sequence
  Description of Artificial Sequence: Synthetic oligonucleotide
gaaugcucgacagguggau

SEQ ID NO: 127400 - RNA, 19 nt, Artificial Sequence
  Description of Artificial Sequence: Synthetic oligonucleotide
cugcaccccggguguaaac

SEQ ID NO: 127401 - RNA, 19 nt, Artificial Sequence
  Description of Artificial Sequence: Synthetic oligonucleotide
ccagauucucagccugcgc

SEQ ID NO: 127402 - RNA, 19 nt, Artificial Sequence
  Description of Artificial Sequence: Synthetic oligonucleotide
ggacgcaguuucuuguucu

SEQ ID NO: 127403 - RNA, 19 nt, Artificial Sequence
  Description of Artificial Sequence: Synthetic oligonucleotide
aggcggguagauggcagga

SEQ ID NO: 127404 - RNA, 19 nt, Artificial Sequence
  Description of Artificial Sequence: Synthetic oligonucleotide
cuuagcggcuguagccaaa

SEQ ID NO: 127405 - RNA, 19 nt, Artificial Sequence
  Description of Artificial Sequence: Synthetic oligonucleotide
ucagaacggccugcccgcu

SEQ ID NO: 127406 - RNA, 19 nt, Artificial Sequence
  Description of Artificial Sequence: Synthetic oligonucleotide
cgagcguccucaucuuggg

SEQ ID NO: 127407 - RNA, 19 nt, Artificial Sequence
  Description of Artificial Sequence: Synthetic oligonucleotide
ucgcugccuuggaugucac

SEQ ID NO: 127408 - RNA, 19 nt, Artificial Sequence
  Description of Artificial Sequence: Synthetic oligonucleotide
cuauugccguagucaaugu

SEQ ID NO: 127409 - RNA, 19 nt, Artificial Sequence
  Description of Artificial Sequence: Synthetic oligonucleotide
caugcucgaugauagcauu

SEQ ID NO: 127410 - RNA, 19 nt, Artificial Sequence
  Description of Artificial Sequence: Synthetic oligonucleotide
acgucgccuuuggaauccg

SEQ ID NO: 127411 - RNA, 19 nt, Artificial Sequence
  Description of Artificial Sequence: Synthetic oligonucleotide
cagaacggccugcccgcug

SEQ ID NO: 127412 - RNA, 19 nt, Artificial Sequence
  Description of Artificial Sequence: Synthetic oligonucleotide
gguggccgaaugcucgaca

SEQ ID NO: 127413 - RNA, 19 nt, Artificial Sequence
  Description of Artificial Sequence: Synthetic oligonucleotide
uggcacagguccgcucgga

SEQ ID NO: 127414 - RNA, 19 nt, Artificial Sequence
  Description of Artificial Sequence: Synthetic oligonucleotide
ccgguaucugaugacugug

SEQ ID NO: 127415 - RNA, 19 nt, Artificial Sequence
  Description of Artificial Sequence: Synthetic oligonucleotide
cugcuucucggcgaaaagu

SEQ ID NO: 127416 - RNA, 19 nt, Artificial Sequence
  Description of Artificial Sequence: Synthetic oligonucleotide
gcguccucaucuuggggca

SEQ ID NO: 127417 - RNA, 19 nt, Artificial Sequence
  Description of Artificial Sequence: Synthetic oligonucleotide
cccgagcucgguaccauuc

SEQ ID NO: 127418 - RNA, 19 nt, Artificial Sequence
  Description of Artificial Sequence: Synthetic oligonucleotide
ccccuucacuaagacaaag

SEQ ID NO: 127419 - RNA, 19 nt, Artificial Sequence
  Description of Artificial Sequence: Synthetic oligonucleotide
accccggguguaaacugca

SEQ ID NO: 127420 - RNA, 19 nt, Artificial Sequence
  Description of Artificial Sequence: Synthetic oligonucleotide
ggucuggcaucagcagugc

SEQ ID NO: 127421 - RNA, 19 nt, Artificial Sequence
  Description of Artificial Sequence: Synthetic oligonucleotide
gcauaacgguaacaaggua

SEQ ID NO: 127422 - RNA, 19 nt, Artificial Sequence
  Description of Artificial Sequence: Synthetic oligonucleotide
caccaagccugguagguuu

SEQ ID NO: 127423 - RNA, 19 nt, Artificial Sequence
  Description of Artificial Sequence: Synthetic oligonucleotide
ccggaugguaugugaacca

SEQ ID NO: 127424 - RNA, 19 nt, Artificial Sequence
  Description of Artificial Sequence: Synthetic oligonucleotide
ggaucucucuauugccgua

SEQ ID NO: 127425 - RNA, 19 nt, Artificial Sequence
  Description of Artificial Sequence: Synthetic oligonucleotide
ccaagccugguagguuucg

SEQ ID NO: 127426 - RNA, 19 nt, Artificial Sequence
  Description of Artificial Sequence: Synthetic oligonucleotide
ggcuuguaguaggcgcugc

SEQ ID NO: 127427 - RNA, 19 nt, Artificial Sequence
  Description of Artificial Sequence: Synthetic oligonucleotide
cugugaucucagucacaaa

SEQ ID NO: 127428 - RNA, 19 nt, Artificial Sequence
  Description of Artificial Sequence: Synthetic oligonucleotide
cuguggcuagaccuuugcu

SEQ ID NO: 127429 - RNA, 19 nt, Artificial Sequence
  Description of Artificial Sequence: Synthetic oligonucleotide
gggaacgggucuggcauca

SEQ ID NO: 127430 - RNA, 19 nt, Artificial Sequence
  Description of Artificial Sequence: Synthetic oligonucleotide
cucuauugccguagucaau

SEQ ID NO: 127431 - RNA, 19 nt, Artificial Sequence
  Description of Artificial Sequence: Synthetic oligonucleotide
gccuuuggaauccgcaaau

SEQ ID NO: 127432 - RNA, 19 nt, Artificial Sequence
  Description of Artificial Sequence: Synthetic oligonucleotide
ccacgucgccuuuggaauc

SEQ ID NO: 127433 - RNA, 19 nt, Artificial Sequence
  Description of Artificial Sequence: Synthetic oligonucleotide
ucucgucccuggggagucu

SEQ ID NO: 127434 - RNA, 19 nt, Artificial Sequence
  Description of Artificial Sequence: Synthetic oligonucleotide
cacuccaaaugccuuucuu

SEQ ID NO: 127435 - RNA, 19 nt, Artificial Sequence
  Description of Artificial Sequence: Synthetic oligonucleotide
gccgguaucugaugacugu

SEQ ID NO: 127436 - RNA, 19 nt, Artificial Sequence
  Description of Artificial Sequence: Synthetic oligonucleotide
ggcgcugcgcucggcagug

SEQ ID NO: 127437 - RNA, 19 nt, Artificial Sequence
  Description of Artificial Sequence: Synthetic oligonucleotide
cccuucacuaagacaaagu

SEQ ID NO: 127438 - RNA, 19 nt, Artificial Sequence
  Description of Artificial Sequence: Synthetic oligonucleotide
cauuccccucacuccaaau

SEQ ID NO: 127439 - RNA, 19 nt, Artificial Sequence
  Description of Artificial Sequence: Synthetic oligonucleotide
cauccccagcuccaaugcu

SEQ ID NO: 127440 - RNA, 19 nt, Artificial Sequence
  Description of Artificial Sequence: Synthetic oligonucleotide
cgaaugcucgacaggugga

SEQ ID NO: 127441 - RNA, 19 nt, Artificial Sequence
  Description of Artificial Sequence: Synthetic oligonucleotide
cucgguggaugggcacuuc

SEQ ID NO: 127442 - RNA, 19 nt, Artificial Sequence
  Description of Artificial Sequence: Synthetic oligonucleotide
ccucaaacauguagggaau

SEQ ID NO: 127443 - RNA, 19 nt, Artificial Sequence
  Description of Artificial Sequence: Synthetic oligonucleotide
ggaacgggucuggcaucag

SEQ ID NO: 127444 - RNA, 19 nt, Artificial Sequence
  Description of Artificial Sequence: Synthetic oligonucleotide
cauuuggaugaaggauggu

SEQ ID NO: 127445 - RNA, 19 nt, Artificial Sequence
  Description of Artificial Sequence: Synthetic oligonucleotide
gcccggaccacacugccau

SEQ ID NO: 127446 - RNA, 19 nt, Artificial Sequence
  Description of Artificial Sequence: Synthetic oligonucleotide
ccgcucggaaaaggcaggc

SEQ ID NO: 127447 - RNA, 19 nt, Artificial Sequence
  Description of Artificial Sequence: Synthetic oligonucleotide
cgagcucgguaccauucuc

SEQ ID NO: 127448 - RNA, 19 nt, Artificial Sequence
  Description of Artificial Sequence: Synthetic oligonucleotide
ccugcgcuccuuggcaaac

SEQ ID NO: 127449 - RNA, 19 nt, Artificial Sequence
  Description of Artificial Sequence: Synthetic oligonucleotide
ggguguccccagaaauguc

SEQ ID NO: 127450 - RNA, 19 nt, Artificial Sequence
  Description of Artificial Sequence: Synthetic oligonucleotide
ccucucgcugcagcacuag

SEQ ID NO: 127451 - RNA, 19 nt, Artificial Sequence
  Description of Artificial Sequence: Synthetic oligonucleotide
gcucgacagguggaugguc

SEQ ID NO: 127452 - RNA, 19 nt, Artificial Sequence
  Description of Artificial Sequence: Synthetic oligonucleotide
gcugaucgcugccuuggau

SEQ ID NO: 127453 - RNA, 19 nt, Artificial Sequence
  Description of Artificial Sequence: Synthetic oligonucleotide
ccuuagcggcuguagccaa

SEQ ID NO: 127454 - RNA, 19 nt, Artificial Sequence
  Description of Artificial Sequence: Synthetic oligonucleotide
ggaugguacccagaauguu

SEQ ID NO: 127455 - RNA, 19 nt, Artificial Sequence
  Description of Artificial Sequence: Synthetic oligonucleotide
cgucgccuuuggaauccgc

SEQ ID NO: 127456 - RNA, 19 nt, Artificial Sequence
  Description of Artificial Sequence: Synthetic oligonucleotide
cagauaggaggggcuugua

SEQ ID NO: 127457 - RNA, 19 nt, Artificial Sequence
  Description of Artificial Sequence: Synthetic oligonucleotide
cccugacagcauaacggua

SEQ ID NO: 127458 - RNA, 19 nt, Artificial Sequence
  Description of Artificial Sequence: Synthetic oligonucleotide
agacgucauugcgcauguu

SEQ ID NO: 127459 - RNA, 19 nt, Artificial Sequence
  Description of Artificial Sequence: Synthetic oligonucleotide
gucguacaggggacgcagu

SEQ ID NO: 127460 - RNA, 19 nt, Artificial Sequence
  Description of Artificial Sequence: Synthetic oligonucleotide
ggggacgcaguuucuuguu

SEQ ID NO: 127461 - RNA, 19 nt, Artificial Sequence
  Description of Artificial Sequence: Synthetic oligonucleotide
ccuuggaugucacgauuau

SEQ ID NO: 127462 - RNA, 19 nt, Artificial Sequence
  Description of Artificial Sequence: Synthetic oligonucleotide
ggccugcccgcugaagaaa

SEQ ID NO: 127463 - RNA, 19 nt, Artificial Sequence
  Description of Artificial Sequence: Synthetic oligonucleotide
gugcgagcguccucaucuu

SEQ ID NO: 127464 - RNA, 19 nt, Artificial Sequence
  Description of Artificial Sequence: Synthetic oligonucleotide
aggcaccguuucaguggcu

SEQ ID NO: 127465 - RNA, 19 nt, Artificial Sequence
  Description of Artificial Sequence: Synthetic oligonucleotide
gcuccaccagcaagacgga

SEQ ID NO: 127466 - RNA, 19 nt, Artificial Sequence
  Description of Artificial Sequence: Synthetic oligonucleotide
ggcgaaaaguugggcacuu

SEQ ID NO: 127467 - RNA, 19 nt, Artificial Sequence
  Description of Artificial Sequence: Synthetic oligonucleotide
ggcuucugguggugugagu

SEQ ID NO: 127468 - RNA, 19 nt, Artificial Sequence
  Description of Artificial Sequence: Synthetic oligonucleotide
gcucuacauugagcagaca

SEQ ID NO: 127469 - RNA, 19 nt, Artificial Sequence
  Description of Artificial Sequence: Synthetic oligonucleotide
ggguacccaggcggguaga

SEQ ID NO: 127470 - RNA, 19 nt, Artificial Sequence
  Description of Artificial Sequence: Synthetic oligonucleotide
ccgagcucgguaccauucu

SEQ ID NO: 127471 - RNA, 19 nt, Artificial Sequence
  Description of Artificial Sequence: Synthetic oligonucleotide
cccucacuccaaaugccuu

SEQ ID NO: 127472 - RNA, 19 nt, Artificial Sequence
  Description of Artificial Sequence: Synthetic oligonucleotide
ccacccgagcucgguacca

SEQ ID NO: 127473 - RNA, 19 nt, Artificial Sequence
  Description of Artificial Sequence: Synthetic oligonucleotide
cccaaccaggucugacacu

SEQ ID NO: 127474 - RNA, 19 nt, Artificial Sequence
  Description of Artificial Sequence: Synthetic oligonucleotide
cucgucccuggggagucuu

SEQ ID NO: 127475 - RNA, 19 nt, Artificial Sequence
  Description of Artificial Sequence: Synthetic oligonucleotide
cggaugguaugugaaccau

SEQ ID NO: 127476 - RNA, 19 nt, Artificial Sequence
  Description of Artificial Sequence: Synthetic oligonucleotide
cgcugcgcucggcagugaa

SEQ ID NO: 127477 - RNA, 19 nt, Artificial Sequence
  Description of Artificial Sequence: Synthetic oligonucleotide
cguacaggggacgcaguuu

SEQ ID NO: 127478 - RNA, 19 nt, Artificial Sequence
  Description of Artificial Sequence: Synthetic oligonucleotide
cggcgaaaaguugggcacu

SEQ ID NO: 127479 - RNA, 19 nt, Artificial Sequence
  Description of Artificial Sequence: Synthetic oligonucleotide
ccaugacgagucccuccuu

SEQ ID NO: 127480 - RNA, 19 nt, Artificial Sequence
  Description of Artificial Sequence: Synthetic oligonucleotide
gcgcugcgcucggcaguga

SEQ ID NO: 127481 - RNA, 19 nt, Artificial Sequence
  Description of Artificial Sequence: Synthetic oligonucleotide
aaauuaguauacuugaagg

SEQ ID NO: 127482 - RNA, 19 nt, Artificial Sequence
  Description of Artificial Sequence: Synthetic oligonucleotide
aauuaguauacuugaaggc

SEQ ID NO: 127483 - RNA, 19 nt, Artificial Sequence
  Description of Artificial Sequence: Synthetic oligonucleotide
acaguaaucaaacaggguc

SEQ ID NO: 127484 - RNA, 19 nt, Artificial Sequence
  Description of Artificial Sequence: Synthetic oligonucleotide
aagacgaaaacccagcaag

SEQ ID NO: 127485 - RNA, 19 nt, Artificial Sequence
  Description of Artificial Sequence: Synthetic oligonucleotide
aaagugauugaaugaagac

SEQ ID NO: 127486 - RNA, 19 nt, Artificial Sequence
  Description of Artificial Sequence: Synthetic oligonucleotide
uugcauuagagccugacag

SEQ ID NO: 127487 - RNA, 19 nt, Artificial Sequence
  Description of Artificial Sequence: Synthetic oligonucleotide
ucuacaauaggucgggaag

SEQ ID NO: 127488 - RNA, 19 nt, Artificial Sequence
  Description of Artificial Sequence: Synthetic oligonucleotide
caauaggucgggaagaugg

SEQ ID NO: 127489 - RNA, 19 nt, Artificial Sequence
  Description of Artificial Sequence: Synthetic oligonucleotide
ugaacuauacaagacauga

SEQ ID NO: 127490 - RNA, 19 nt, Artificial Sequence
  Description of Artificial Sequence: Synthetic oligonucleotide
auugaaugaagacgaaaac

SEQ ID NO: 127491 - RNA, 19 nt, Artificial Sequence
  Description of Artificial Sequence: Synthetic oligonucleotide
aacugauauauguccuucc

SEQ ID NO: 127492 - RNA, 19 nt, Artificial Sequence
  Description of Artificial Sequence: Synthetic oligonucleotide
aaaccauacaaucagcgau

SEQ ID NO: 127493 - RNA, 19 nt, Artificial Sequence
  Description of Artificial Sequence: Synthetic oligonucleotide
ucaaguuucauguuaggac

SEQ ID NO: 127494 - RNA, 19 nt, Artificial Sequence
  Description of Artificial Sequence: Synthetic oligonucleotide
gaaaagauagcugugccag

SEQ ID NO: 127495 - RNA, 19 nt, Artificial Sequence
  Description of Artificial Sequence: Synthetic oligonucleotide
uagacugauacauuccagg

SEQ ID NO: 127496 - RNA, 19 nt, Artificial Sequence
  Description of Artificial Sequence: Synthetic oligonucleotide
gaaaaccauacaaucagcg

SEQ ID NO: 127497 - RNA, 19 nt, Artificial Sequence
  Description of Artificial Sequence: Synthetic oligonucleotide
ugugaaacacauacauacg

SEQ ID NO: 127498 - RNA, 19 nt, Artificial Sequence
  Description of Artificial Sequence: Synthetic oligonucleotide
ucagcgauagauagugugg

SEQ ID NO: 127499 - RNA, 19 nt, Artificial Sequence
  Description of Artificial Sequence: Synthetic oligonucleotide
ucuugaauacccucggucc

SEQ ID NO: 127500 - RNA, 19 nt, Artificial Sequence
  Description of Artificial Sequence: Synthetic oligonucleotide
aaaauggagaauaugugga

SEQ ID NO: 127501 - RNA, 19 nt, Artificial Sequence
  Description of Artificial Sequence: Synthetic oligonucleotide
uucaaagacuuauaucugc

SEQ ID NO: 127502 - RNA, 19 nt, Artificial Sequence
  Description of Artificial Sequence: Synthetic oligonucleotide
gguaccauuagacugauac

SEQ ID NO: 127503 - RNA, 19 nt, Artificial Sequence
  Description of Artificial Sequence: Synthetic oligonucleotide
ucaguuuccaacugcguag

SEQ ID NO: 127504 - RNA, 19 nt, Artificial Sequence
  Description of Artificial Sequence: Synthetic oligonucleotide
aaacuggaccuauugacca

SEQ ID NO: 127505 - RNA, 19 nt, Artificial Sequence
  Description of Artificial Sequence: Synthetic oligonucleotide
ucgaagucuaaucacauua

SEQ ID NO: 127506 - RNA, 19 nt, Artificial Sequence
  Description of Artificial Sequence: Synthetic oligonucleotide
ucgaucaucggccaugggc

SEQ ID NO: 127507 - RNA, 19 nt, Artificial Sequence
  Description of Artificial Sequence: Synthetic oligonucleotide
uuaguggugggcauuuucc

SEQ ID NO: 127508 - RNA, 19 nt, Artificial Sequence
  Description of Artificial Sequence: Synthetic oligonucleotide
aggagcacaaguuaccaag

SEQ ID NO: 127509 - RNA, 19 nt, Artificial Sequence
  Description of Artificial Sequence: Synthetic oligonucleotide
uuuuacgaaguuaggaguc

SEQ ID NO: 127510 - RNA, 19 nt, Artificial Sequence
  Description of Artificial Sequence: Synthetic oligonucleotide
agguugauaagugagagca

SEQ ID NO: 127511 - RNA, 19 nt, Artificial Sequence
  Description of Artificial Sequence: Synthetic oligonucleotide
aaacacauacauacgcgcg

SEQ ID NO: 127512 - RNA, 19 nt, Artificial Sequence
  Description of Artificial Sequence: Synthetic oligonucleotide
aaaagauagcugugccagg

SEQ ID NO: 127513 - RNA, 19 nt, Artificial Sequence
  Description of Artificial Sequence: Synthetic oligonucleotide
aacucuugcggauacugca

SEQ ID NO: 127514 - RNA, 19 nt, Artificial Sequence
  Description of Artificial Sequence: Synthetic oligonucleotide
ucaaagacuuauaucugcu

SEQ ID NO: 127515 - RNA, 19 nt, Artificial Sequence
  Description of Artificial Sequence: Synthetic oligonucleotide
caccagaacgcaaaagucg

SEQ ID NO: 127516 - RNA, 19 nt, Artificial Sequence
  Description of Artificial Sequence: Synthetic oligonucleotide
auagcucgaagucuaauca

SEQ ID NO: 127517 - RNA, 19 nt, Artificial Sequence
  Description of Artificial Sequence: Synthetic oligonucleotide
gacucguccacgaagaagc

SEQ ID NO: 127518 - RNA, 19 nt, Artificial Sequence
  Description of Artificial Sequence: Synthetic oligonucleotide
uguucuacaauaggucggg

SEQ ID NO: 127519 - RNA, 19 nt, Artificial Sequence
  Description of Artificial Sequence: Synthetic oligonucleotide
auaagugagagcauaguug

SEQ ID NO: 127520 - RNA, 19 nt, Artificial Sequence
  Description of Artificial Sequence: Synthetic oligonucleotide
aagacuuauaucugcuuau

SEQ ID NO: 127521 - RNA, 19 nt, Artificial Sequence
  Description of Artificial Sequence: Synthetic oligonucleotide
auaguagcccgugagacuc

SEQ ID NO: 127522 - RNA, 19 nt, Artificial Sequence
  Description of Artificial Sequence: Synthetic oligonucleotide
gagacauagguuccugccg

SEQ ID NO: 127523 - RNA, 19 nt, Artificial Sequence
  Description of Artificial Sequence: Synthetic oligonucleotide
ugauaucaguuccucacca

SEQ ID NO: 127524 - RNA, 19 nt, Artificial Sequence
  Description of Artificial Sequence: Synthetic oligonucleotide
auuagagccugacagcuga

SEQ ID NO: 127525 - RNA, 19 nt, Artificial Sequence
  Description of Artificial Sequence: Synthetic oligonucleotide
guuaccaagcaguguacgg

SEQ ID NO: 127526 - RNA, 19 nt, Artificial Sequence
  Description of Artificial Sequence: Synthetic oligonucleotide
gauagcucgaagucuaauc

SEQ ID NO: 127527 - RNA, 19 nt, Artificial Sequence
  Description of Artificial Sequence: Synthetic oligonucleotide
aauacccucgguccuuaag

SEQ ID NO: 127528 - RNA, 19 nt, Artificial Sequence
  Description of Artificial Sequence: Synthetic oligonucleotide
aauaggucgggaagauggc

SEQ ID NO: 127529 - RNA, 19 nt, Artificial Sequence
  Description of Artificial Sequence: Synthetic oligonucleotide
uccauuggagaaagcagcc

SEQ ID NO: 127530 - RNA, 19 nt, Artificial Sequence
  Description of Artificial Sequence: Synthetic oligonucleotide
ugcguaguaucuuccauca

SEQ ID NO: 127531 - RNA, 19 nt, Artificial Sequence
  Description of Artificial Sequence: Synthetic oligonucleotide
caaucagcgauagauagug

SEQ ID NO: 127532 - RNA, 19 nt, Artificial Sequence
  Description of Artificial Sequence: Synthetic oligonucleotide
uaccauuagacugauacau

SEQ ID NO: 127533 - RNA, 19 nt, Artificial Sequence
  Description of Artificial Sequence: Synthetic oligonucleotide
agcacaaguuaccaagcag

SEQ ID NO: 127534 - RNA, 19 nt, Artificial Sequence
  Description of Artificial Sequence: Synthetic oligonucleotide
agcguuagagggcagguug

SEQ ID NO: 127535 - RNA, 19 nt, Artificial Sequence
  Description of Artificial Sequence: Synthetic oligonucleotide
agaaaagauagcugugcca

SEQ ID NO: 127536 - RNA, 19 nt, Artificial Sequence
  Description of Artificial Sequence: Synthetic oligonucleotide
ugcauacgcccguucaugg

SEQ ID NO: 127537 - RNA, 19 nt, Artificial Sequence
  Description of Artificial Sequence: Synthetic oligonucleotide
gguacggucaauguggcgg

SEQ ID NO: 127538 - RNA, 19 nt, Artificial Sequence
  Description of Artificial Sequence: Synthetic oligonucleotide
aggccaaacaguaagauaa

SEQ ID NO: 127539 - RNA, 19 nt, Artificial Sequence
  Description of Artificial Sequence: Synthetic oligonucleotide
ugcguuuaccuuaaguuuu

SEQ ID NO: 127540 - RNA, 19 nt, Artificial Sequence
  Description of Artificial Sequence: Synthetic oligonucleotide
acugauauauguccuucca

SEQ ID NO: 127541 - RNA, 19 nt, Artificial Sequence
  Description of Artificial Sequence: Synthetic oligonucleotide
uccacaacgucauugcguc

SEQ ID NO: 127542 - RNA, 19 nt, Artificial Sequence
  Description of Artificial Sequence: Synthetic oligonucleotide
gguaaucucucgaucaucg

SEQ ID NO: 127543 - RNA, 19 nt, Artificial Sequence
  Description of Artificial Sequence: Synthetic oligonucleotide
ugcauuagagccugacagc

SEQ ID NO: 127544 - RNA, 19 nt, Artificial Sequence
  Description of Artificial Sequence: Synthetic oligonucleotide
uuuaguggugggcauuuuc

SEQ ID NO: 127545 - RNA, 19 nt, Artificial Sequence
  Description of Artificial Sequence: Synthetic oligonucleotide
ugccggacacuuaucacag

SEQ ID NO: 127546 - RNA, 19 nt, Artificial Sequence
  Description of Artificial Sequence: Synthetic oligonucleotide
agugcauucccggucaguc

SEQ ID NO: 127547 - RNA, 19 nt, Artificial Sequence
  Description of Artificial Sequence: Synthetic oligonucleotide
gucgguagcaguuucagaa

SEQ ID NO: 127548 - RNA, 19 nt, Artificial Sequence
  Description of Artificial Sequence: Synthetic oligonucleotide
accagaacgcaaaagucgg

SEQ ID NO: 127549 - RNA, 19 nt, Artificial Sequence
  Description of Artificial Sequence: Synthetic oligonucleotide
uguugucgggaacuguccc

SEQ ID NO: 127550 - RNA, 19 nt, Artificial Sequence
  Description of Artificial Sequence: Synthetic oligonucleotide
uucaggaugucaauaccau

SEQ ID NO: 127551 - RNA, 19 nt, Artificial Sequence
  Description of Artificial Sequence: Synthetic oligonucleotide
uugcggauacugcacacca

SEQ ID NO: 127552 - RNA, 19 nt, Artificial Sequence
  Description of Artificial Sequence: Synthetic oligonucleotide
auacccucgguccuuaaga

SEQ ID NO: 127553 - RNA, 19 nt, Artificial Sequence
  Description of Artificial Sequence: Synthetic oligonucleotide
uagcccgugagacucggag

SEQ ID NO: 127554 - RNA, 19 nt, Artificial Sequence
  Description of Artificial Sequence: Synthetic oligonucleotide
ugaacuuguguugucggga

SEQ ID NO: 127555 - RNA, 19 nt, Artificial Sequence
  Description of Artificial Sequence: Synthetic oligonucleotide
aggucgauuuccagaaugc

SEQ ID NO: 127556 - RNA, 19 nt, Artificial Sequence
  Description of Artificial Sequence: Synthetic oligonucleotide
auagauaguguggucaagu

SEQ ID NO: 127557 - RNA, 19 nt, Artificial Sequence
  Description of Artificial Sequence: Synthetic oligonucleotide
aaguuaccaagcaguguac

SEQ ID NO: 127558 - RNA, 19 nt, Artificial Sequence
  Description of Artificial Sequence: Synthetic oligonucleotide
aagguaaucucucgaucau

SEQ ID NO: 127559 - RNA, 19 nt, Artificial Sequence
  Description of Artificial Sequence: Synthetic oligonucleotide
agaguccgggaacucuugc

SEQ ID NO: 127560 - RNA, 19 nt, Artificial Sequence
  Description of Artificial Sequence: Synthetic oligonucleotide
uauaguagcccgugagacu

SEQ ID NO: 127561 - RNA, 19 nt, Artificial Sequence
  Description of Artificial Sequence: Synthetic oligonucleotide
ucaaggcagcacaagguaa

SEQ ID NO: 127562 - RNA, 19 nt, Artificial Sequence
  Description of Artificial Sequence: Synthetic oligonucleotide
gagaguggaauucucaagu

SEQ ID NO: 127563 - RNA, 19 nt, Artificial Sequence
  Description of Artificial Sequence: Synthetic oligonucleotide
uccgacucguccacgaaga

SEQ ID NO: 127564 - RNA, 19 nt, Artificial Sequence
  Description of Artificial Sequence: Synthetic oligonucleotide
uggcguugcaaagaaacug

SEQ ID NO: 127565 - RNA, 19 nt, Artificial Sequence
  Description of Artificial Sequence: Synthetic oligonucleotide
guauaguagcccgugagac

SEQ ID NO: 127566 - RNA, 19 nt, Artificial Sequence
  Description of Artificial Sequence: Synthetic oligonucleotide
ucaugggauuccaugugcu

SEQ ID NO: 127567 - RNA, 19 nt, Artificial Sequence
  Description of Artificial Sequence: Synthetic oligonucleotide
gaguccgggaacucuugcg

SEQ ID NO: 127568 - RNA, 19 nt, Artificial Sequence
  Description of Artificial Sequence: Synthetic oligonucleotide
aacugcguaguaucuucca

SEQ ID NO: 127569 - RNA, 19 nt, Artificial Sequence
  Description of Artificial Sequence: Synthetic oligonucleotide
acugcuuacaccgcacauc

SEQ ID NO: 127570 - RNA, 19 nt, Artificial Sequence
  Description of Artificial Sequence: Synthetic oligonucleotide
uacgaaguuaggagucuca

SEQ ID NO: 127571 - RNA, 19 nt, Artificial Sequence
  Description of Artificial Sequence: Synthetic oligonucleotide
ugcauucccggucagucaa

SEQ ID NO: 127572 - RNA, 19 nt, Artificial Sequence
  Description of Artificial Sequence: Synthetic oligonucleotide
gacgaaaacccagcaaggc

SEQ ID NO: 127573 - RNA, 19 nt, Artificial Sequence
  Description of Artificial Sequence: Synthetic oligonucleotide
ugauugaaugaagacgaaa

SEQ ID NO: 127574 - RNA, 19 nt, Artificial Sequence
  Description of Artificial Sequence: Synthetic oligonucleotide
cugauauauguccuuccac

SEQ ID NO: 127575 - RNA, 19 nt, Artificial Sequence
  Description of Artificial Sequence: Synthetic oligonucleotide
ugacguuccaaggugcagc

SEQ ID NO: 127576 - RNA, 19 nt, Artificial Sequence
  Description of Artificial Sequence: Synthetic oligonucleotide
agaacacuuguaaaggcca

SEQ ID NO: 127577 - RNA, 19 nt, Artificial Sequence
  Description of Artificial Sequence: Synthetic oligonucleotide
acgcgcgcacaccagaacg

SEQ ID NO: 127578 - RNA, 19 nt, Artificial Sequence
  Description of Artificial Sequence: Synthetic oligonucleotide
guguucuacaauaggucgg

SEQ ID NO: 127579 - RNA, 19 nt, Artificial Sequence
  Description of Artificial Sequence: Synthetic oligonucleotide
aaacuuuaguggugggcau

SEQ ID NO: 127580 - RNA, 19 nt, Artificial Sequence
  Description of Artificial Sequence: Synthetic oligonucleotide
auaccauggccauugcagu

SEQ ID NO: 127581 - RNA, 19 nt, Artificial Sequence
  Description of Artificial Sequence: Synthetic oligonucleotide
auacauacgcgcgcacacc

SEQ ID NO: 127582 - RNA, 19 nt, Artificial Sequence
  Description of Artificial Sequence: Synthetic oligonucleotide
cauugcgucgguguuggcg

SEQ ID NO: 127583 - RNA, 19 nt, Artificial Sequence
  Description of Artificial Sequence: Synthetic oligonucleotide
aguuucauguuaggacugg

SEQ ID NO: 127584 - RNA, 19 nt, Artificial Sequence
  Description of Artificial Sequence: Synthetic oligonucleotide
uuuacgaaguuaggagucu

SEQ ID NO: 127585 - RNA, 19 nt, Artificial Sequence
  Description of Artificial Sequence: Synthetic oligonucleotide
caaguuucauguuaggacu

SEQ ID NO: 127586 - RNA, 19 nt, Artificial Sequence
  Description of Artificial Sequence: Synthetic oligonucleotide
agcgauagauagugugguc

SEQ ID NO: 127587 - RNA, 19 nt, Artificial Sequence
  Description of Artificial Sequence: Synthetic oligonucleotide
ucggccguguauccauugg

SEQ ID NO: 127588 - RNA, 19 nt, Artificial Sequence
  Description of Artificial Sequence: Synthetic oligonucleotide
ggagacauagguuccugcc

SEQ ID NO: 127589 - RNA, 19 nt, Artificial Sequence
  Description of Artificial Sequence: Synthetic oligonucleotide
gauaagugagagcauaguu

SEQ ID NO: 127590 - RNA, 19 nt, Artificial Sequence
  Description of Artificial Sequence: Synthetic oligonucleotide
gucauugcgucgguguugg

SEQ ID NO: 127591 - RNA, 19 nt, Artificial Sequence
  Description of Artificial Sequence: Synthetic oligonucleotide
cacgaagaagcccuuguuc

SEQ ID NO: 127592 - RNA, 19 nt, Artificial Sequence
  Description of Artificial Sequence: Synthetic oligonucleotide
acaagaguucuuacagccg

SEQ ID NO: 127593 - RNA, 19 nt, Artificial Sequence
  Description of Artificial Sequence: Synthetic oligonucleotide
agucgcagcgcagaagggg

SEQ ID NO: 127594 - RNA, 19 nt, Artificial Sequence
  Description of Artificial Sequence: Synthetic oligonucleotide
ucucgaucaucggccaugg

SEQ ID NO: 127595 - RNA, 19 nt, Artificial Sequence
  Description of Artificial Sequence: Synthetic oligonucleotide
acauagacucugugaaaca

SEQ ID NO: 127596 - RNA, 19 nt, Artificial Sequence
  Description of Artificial Sequence: Synthetic oligonucleotide
gauagauaguguggucaag

SEQ ID NO: 127597 - RNA, 19 nt, Artificial Sequence
  Description of Artificial Sequence: Synthetic oligonucleotide
uagcucgaagucuaaucac

SEQ ID NO: 127598 - RNA, 19 nt, Artificial Sequence
  Description of Artificial Sequence: Synthetic oligonucleotide
gaagacgaaaacccagcaa

SEQ ID NO: 127599 - RNA, 19 nt, Artificial Sequence
  Description of Artificial Sequence: Synthetic oligonucleotide
uaguggugggcauuuucca

SEQ ID NO: 127600 - RNA, 19 nt, Artificial Sequence
  Description of Artificial Sequence: Synthetic oligonucleotide
caccuaauauuuauuaaua

SEQ ID NO: 127601 - RNA, 19 nt, Artificial Sequence
  Description of Artificial Sequence: Synthetic oligonucleotide
uaaucacauuacaguaauc

SEQ ID NO: 127602 - RNA, 19 nt, Artificial Sequence
  Description of Artificial Sequence: Synthetic oligonucleotide
ugaguuggagucgaggauu

SEQ ID NO: 127603 - RNA, 19 nt, Artificial Sequence
  Description of Artificial Sequence: Synthetic oligonucleotide
cagguugauaagugagagc

SEQ ID NO: 127604 - RNA, 19 nt, Artificial Sequence
  Description of Artificial Sequence: Synthetic oligonucleotide
cugcaagucacaggggucc

SEQ ID NO: 127605 - RNA, 19 nt, Artificial Sequence
  Description of Artificial Sequence: Synthetic oligonucleotide
ccauuagacugauacauuc

SEQ ID NO: 127606 - RNA, 19 nt, Artificial Sequence
  Description of Artificial Sequence: Synthetic oligonucleotide
guuucauguuaggacuggg

SEQ ID NO: 127607 - RNA, 19 nt, Artificial Sequence
  Description of Artificial Sequence: Synthetic oligonucleotide
acgaaguuaggagucucag

SEQ ID NO: 127608 - RNA, 19 nt, Artificial Sequence
  Description of Artificial Sequence: Synthetic oligonucleotide
uaggugcggguguucaaag

SEQ ID NO: 127609 - RNA, 19 nt, Artificial Sequence
  Description of Artificial Sequence: Synthetic oligonucleotide
ucauggcaucucucuaugc

SEQ ID NO: 127610 - RNA, 19 nt, Artificial Sequence
  Description of Artificial Sequence: Synthetic oligonucleotide
uuccaacugcguaguaucu

SEQ ID NO: 127611 - RNA, 19 nt, Artificial Sequence
  Description of Artificial Sequence: Synthetic oligonucleotide
caacugcguaguaucuucc

SEQ ID NO: 127612 - RNA, 19 nt, Artificial Sequence
  Description of Artificial Sequence: Synthetic oligonucleotide
uagauaguguggucaaguu

SEQ ID NO: 127613 - RNA, 19 nt, Artificial Sequence
  Description of Artificial Sequence: Synthetic oligonucleotide
aaccauacaaucagcgaua

SEQ ID NO: 127614 - RNA, 19 nt, Artificial Sequence
  Description of Artificial Sequence: Synthetic oligonucleotide
acucuugcggauacugcac

SEQ ID NO: 127615 - RNA, 19 nt, Artificial Sequence
  Description of Artificial Sequence: Synthetic oligonucleotide
agaacgcaaaagucggaaa

SEQ ID NO: 127616 - RNA, 19 nt, Artificial Sequence
  Description of Artificial Sequence: Synthetic oligonucleotide
aacuggaccuauugaccau

SEQ ID NO: 127617 - RNA, 19 nt, Artificial Sequence
  Description of Artificial Sequence: Synthetic oligonucleotide
uggucuaacagaggcagua

SEQ ID NO: 127618 - RNA, 19 nt, Artificial Sequence
  Description of Artificial Sequence: Synthetic oligonucleotide
cucaugccugguaaaggug

SEQ ID NO: 127619 - RNA, 19 nt, Artificial Sequence
  Description of Artificial Sequence: Synthetic oligonucleotide
agguaaucucucgaucauc

SEQ ID NO: 127620 - RNA, 19 nt, Artificial Sequence
  Description of Artificial Sequence: Synthetic oligonucleotide
acaaucauccaagguaaau

SEQ ID NO: 127621 - RNA, 19 nt, Artificial Sequence
  Description of Artificial Sequence: Synthetic oligonucleotide
uugagccccgccuuuucca

SEQ ID NO: 127622 - RNA, 19 nt, Artificial Sequence
  Description of Artificial Sequence: Synthetic oligonucleotide
gaacuuguguugucgggaa

SEQ ID NO: 127623 - RNA, 19 nt, Artificial Sequence
  Description of Artificial Sequence: Synthetic oligonucleotide
aaacacgcaggcucauguu

SEQ ID NO: 127624 - RNA, 19 nt, Artificial Sequence
  Description of Artificial Sequence: Synthetic oligonucleotide
guaacuuguggugggcuug

SEQ ID NO: 127625 - RNA, 19 nt, Artificial Sequence
  Description of Artificial Sequence: Synthetic oligonucleotide
ggugcggguguucaaagac

SEQ ID NO: 127626 - RNA, 19 nt, Artificial Sequence
  Description of Artificial Sequence: Synthetic oligonucleotide
cuugagccccgccuuuucc

SEQ ID NO: 127627 - RNA, 19 nt, Artificial Sequence
  Description of Artificial Sequence: Synthetic oligonucleotide
uugagaguccgggaacucu

SEQ ID NO: 127628 - RNA, 19 nt, Artificial Sequence
  Description of Artificial Sequence: Synthetic oligonucleotide
agguaccccgagcacacug

SEQ ID NO: 127629 - RNA, 19 nt, Artificial Sequence
  Description of Artificial Sequence: Synthetic oligonucleotide
cauuagagccugacagcug

SEQ ID NO: 127630 - RNA, 19 nt, Artificial Sequence
  Description of Artificial Sequence: Synthetic oligonucleotide
cuugcggauacugcacacc

SEQ ID NO: 127631 - RNA, 19 nt, Artificial Sequence
  Description of Artificial Sequence: Synthetic oligonucleotide
ugguaauaaaggacccguu

SEQ ID NO: 127632 - RNA, 19 nt, Artificial Sequence
  Description of Artificial Sequence: Synthetic oligonucleotide
cagagaagguaccccgagc

SEQ ID NO: 127633 - RNA, 19 nt, Artificial Sequence
  Description of Artificial Sequence: Synthetic oligonucleotide
gacguuccaaggugcagca

SEQ ID NO: 127634 - RNA, 19 nt, Artificial Sequence
  Description of Artificial Sequence: Synthetic oligonucleotide
caguaggucgauuuccaga

SEQ ID NO: 127635 - RNA, 19 nt, Artificial Sequence
  Description of Artificial Sequence: Synthetic oligonucleotide
ucauggucggccguguauc

SEQ ID NO: 127636 - RNA, 19 nt, Artificial Sequence
  Description of Artificial Sequence: Synthetic oligonucleotide
ugguacggucaauguggcg

SEQ ID NO: 127637 - RNA, 19 nt, Artificial Sequence
  Description of Artificial Sequence: Synthetic oligonucleotide
agcucgaagucuaaucaca

SEQ ID NO: 127638 - RNA, 19 nt, Artificial Sequence
  Description of Artificial Sequence: Synthetic oligonucleotide
uggaccuauugaccaugug

SEQ ID NO: 127639 - RNA, 19 nt, Artificial Sequence
  Description of Artificial Sequence: Synthetic oligonucleotide
ucgguagcaguuucagaau

SEQ ID NO: 127640 - RNA, 19 nt, Artificial Sequence
  Description of Artificial Sequence: Synthetic oligonucleotide
uugguacagugcucggaga

SEQ ID NO: 127641 - RNA, 19 nt, Artificial Sequence
  Description of Artificial Sequence: Synthetic oligonucleotide
cauggucggccguguaucc

SEQ ID NO: 127642 - RNA, 19 nt, Artificial Sequence
  Description of Artificial Sequence: Synthetic oligonucleotide
ugagcguuagagggcaggu

SEQ ID NO: 127643 - RNA, 19 nt, Artificial Sequence
  Description of Artificial Sequence: Synthetic oligonucleotide
gguauaguagcccgugaga

SEQ ID NO: 127644 - RNA, 19 nt, Artificial Sequence
  Description of Artificial Sequence: Synthetic oligonucleotide
cacugauuagcugggcgag

SEQ ID NO: 127645 - RNA, 19 nt, Artificial Sequence
  Description of Artificial Sequence: Synthetic oligonucleotide
acuggaccuauugaccaug

SEQ ID NO: 127646 - RNA, 19 nt, Artificial Sequence
  Description of Artificial Sequence: Synthetic oligonucleotide
auacgcccguucauggucg

SEQ ID NO: 127647 - RNA, 19 nt, Artificial Sequence
  Description of Artificial Sequence: Synthetic oligonucleotide
uacccucgguccuuaagaa

SEQ ID NO: 127648 - RNA, 19 nt, Artificial Sequence
  Description of Artificial Sequence: Synthetic oligonucleotide
cauucccggucagucaagg

SEQ ID NO: 127649 - RNA, 19 nt, Artificial Sequence
  Description of Artificial Sequence: Synthetic oligonucleotide
cuacaauaggucgggaaga

SEQ ID NO: 127650 - RNA, 19 nt, Artificial Sequence
  Description of Artificial Sequence: Synthetic oligonucleotide
uuacgaaguuaggagucuc

SEQ ID NO: 127651 - RNA, 19 nt, Artificial Sequence
  Description of Artificial Sequence: Synthetic oligonucleotide
accuauugaccauguguaa

SEQ ID NO: 127652 - RNA, 19 nt, Artificial Sequence
  Description of Artificial Sequence: Synthetic oligonucleotide
cugagcguuagagggcagg

SEQ ID NO: 127653 - RNA, 19 nt, Artificial Sequence
  Description of Artificial Sequence: Synthetic oligonucleotide
acaaucagcgauagauagu

SEQ ID NO: 127654 - RNA, 19 nt, Artificial Sequence
  Description of Artificial Sequence: Synthetic oligonucleotide
gggcuaagaggacuggggc

SEQ ID NO: 127655 - RNA, 19 nt, Artificial Sequence
  Description of Artificial Sequence: Synthetic oligonucleotide
acggggcacacuguguggg

SEQ ID NO: 127656 - RNA, 19 nt, Artificial Sequence
  Description of Artificial Sequence: Synthetic oligonucleotide
ggacacuuaucacagguua

SEQ ID NO: 127657 - RNA, 19 nt, Artificial Sequence
  Description of Artificial Sequence: Synthetic oligonucleotide
cuuguguugucgggaacug

SEQ ID NO: 127658 - RNA, 19 nt, Artificial Sequence
  Description of Artificial Sequence: Synthetic oligonucleotide
agcugagcguuagagggca

SEQ ID NO: 127659 - RNA, 19 nt, Artificial Sequence
  Description of Artificial Sequence: Synthetic oligonucleotide
cucucgaucaucggccaug

SEQ ID NO: 127660 - RNA, 19 nt, Artificial Sequence
  Description of Artificial Sequence: Synthetic oligonucleotide
agcccacgaaucuucucca

SEQ ID NO: 127661 - RNA, 19 nt, Artificial Sequence
  Description of Artificial Sequence: Synthetic oligonucleotide
auacaaucagcgauagaua

SEQ ID NO: 127662 - RNA, 19 nt, Artificial Sequence
  Description of Artificial Sequence: Synthetic oligonucleotide
cauagguuccugccggaca

SEQ ID NO: 127663 - RNA, 19 nt, Artificial Sequence
  Description of Artificial Sequence: Synthetic oligonucleotide
gaugucgguagcaguuuca

SEQ ID NO: 127664 - RNA, 19 nt, Artificial Sequence
  Description of Artificial Sequence: Synthetic oligonucleotide
acgcaaaagucggaaacaa

SEQ ID NO: 127665 - RNA, 19 nt, Artificial Sequence
  Description of Artificial Sequence: Synthetic oligonucleotide
ugguaccuuuggucuaaca

SEQ ID NO: 127666 - RNA, 19 nt, Artificial Sequence
  Description of Artificial Sequence: Synthetic oligonucleotide
cacccugucaguaggucga

SEQ ID NO: 127667 - RNA, 19 nt, Artificial Sequence
  Description of Artificial Sequence: Synthetic oligonucleotide
gaggcaguagaguuggauu

SEQ ID NO: 127668 - RNA, 19 nt, Artificial Sequence
  Description of Artificial Sequence: Synthetic oligonucleotide
aguguacgguguccagaug

SEQ ID NO: 127669 - RNA, 19 nt, Artificial Sequence
  Description of Artificial Sequence: Synthetic oligonucleotide
gugcacagaacaguuuuga

SEQ ID NO: 127670 - RNA, 19 nt, Artificial Sequence
  Description of Artificial Sequence: Synthetic oligonucleotide
ggcaaacuggaccuauuga

SEQ ID NO: 127671 - RNA, 19 nt, Artificial Sequence
  Description of Artificial Sequence: Synthetic oligonucleotide
cuauugaccauguguaauu

SEQ ID NO: 127672 - RNA, 19 nt, Artificial Sequence
  Description of Artificial Sequence: Synthetic oligonucleotide
cugcauacgcccguucaug

SEQ ID NO: 127673 - RNA, 19 nt, Artificial Sequence
  Description of Artificial Sequence: Synthetic oligonucleotide
uacgcgcgcacaccagaac

SEQ ID NO: 127674 - RNA, 19 nt, Artificial Sequence
  Description of Artificial Sequence: Synthetic oligonucleotide
agacuuauaucugcuuaua

SEQ ID NO: 127675 - RNA, 19 nt, Artificial Sequence
  Description of Artificial Sequence: Synthetic oligonucleotide
gcgauagauagugugguca

SEQ ID NO: 127676 - RNA, 19 nt, Artificial Sequence
  Description of Artificial Sequence: Synthetic oligonucleotide
uggucggccguguauccau

SEQ ID NO: 127677 - RNA, 19 nt, Artificial Sequence
  Description of Artificial Sequence: Synthetic oligonucleotide
caaacacgcaggcucaugu

SEQ ID NO: 127678 - RNA, 19 nt, Artificial Sequence
  Description of Artificial Sequence: Synthetic oligonucleotide
agcccgugagacucggagu

SEQ ID NO: 127679 - RNA, 19 nt, Artificial Sequence
  Description of Artificial Sequence: Synthetic oligonucleotide
ggagcacaaguuaccaagc

SEQ ID NO: 127680 - RNA, 19 nt, Artificial Sequence
  Description of Artificial Sequence: Synthetic oligonucleotide
gaguggaauucucaaguuu

SEQ ID NO: 127681 - RNA, 19 nt, Artificial Sequence
  Description of Artificial Sequence: Synthetic oligonucleotide
ucuugaccccaaugauuuc

SEQ ID NO: 127682 - RNA, 19 nt, Artificial Sequence
  Description of Artificial Sequence: Synthetic oligonucleotide
auaccaccuuugcauuaga

SEQ ID NO: 127683 - RNA, 19 nt, Artificial Sequence
  Description of Artificial Sequence: Synthetic oligonucleotide
uacgcccguucauggucgg

SEQ ID NO: 127684 - RNA, 19 nt, Artificial Sequence
  Description of Artificial Sequence: Synthetic oligonucleotide
gcaagugcauucccgguca

SEQ ID NO: 127685 - RNA, 19 nt, Artificial Sequence
  Description of Artificial Sequence: Synthetic oligonucleotide
gcacugauuagcugggcga

SEQ ID NO: 127686 - RNA, 19 nt, Artificial Sequence
  Description of Artificial Sequence: Synthetic oligonucleotide
cccuguguucuacaauagg

SEQ ID NO: 127687 - RNA, 19 nt, Artificial Sequence
  Description of Artificial Sequence: Synthetic oligonucleotide
ggucuaacagaggcaguag

SEQ ID NO: 127688 - RNA, 19 nt, Artificial Sequence
  Description of Artificial Sequence: Synthetic oligonucleotide
gcuaagaggacuggggcuc

SEQ ID NO: 127689 - RNA, 19 nt, Artificial Sequence
  Description of Artificial Sequence: Synthetic oligonucleotide
agauagcucgaagucuaau

SEQ ID NO: 127690 - RNA, 19 nt, Artificial Sequence
  Description of Artificial Sequence: Synthetic oligonucleotide
cauacgcgcgcacaccaga

SEQ ID NO: 127691 - RNA, 19 nt, Artificial Sequence
  Description of Artificial Sequence: Synthetic oligonucleotide
aguuggagucgaggauuuc

SEQ ID NO: 127692 - RNA, 19 nt, Artificial Sequence
  Description of Artificial Sequence: Synthetic oligonucleotide
cagaacgcaaaagucggaa

SEQ ID NO: 127693 - RNA, 19 nt, Artificial Sequence
  Description of Artificial Sequence: Synthetic oligonucleotide
uggcgguauaguagcccgu

SEQ ID NO: 127694 - RNA, 19 nt, Artificial Sequence
  Description of Artificial Sequence: Synthetic oligonucleotide
gugguacggucaauguggc

SEQ ID NO: 127695 - RNA, 19 nt, Artificial Sequence
  Description of Artificial Sequence: Synthetic oligonucleotide
ucucucgaucaucggccau

SEQ ID NO: 127696 - RNA, 19 nt, Artificial Sequence
  Description of Artificial Sequence: Synthetic oligonucleotide
cacacugcguuuaccuuaa

SEQ ID NO: 127697 - RNA, 19 nt, Artificial Sequence
  Description of Artificial Sequence: Synthetic oligonucleotide
ugaauacccucgguccuua

SEQ ID NO: 127698 - RNA, 19 nt, Artificial Sequence
  Description of Artificial Sequence: Synthetic oligonucleotide
acgucauugcgucgguguu

SEQ ID NO: 127699 - RNA, 19 nt, Artificial Sequence
  Description of Artificial Sequence: Synthetic oligonucleotide
gaccugccgcaacacugug

SEQ ID NO: 127700 - RNA, 19 nt, Artificial Sequence
  Description of Artificial Sequence: Synthetic oligonucleotide
caagugcauucccggucag

SEQ ID NO: 127701 - RNA, 19 nt, Artificial Sequence
  Description of Artificial Sequence: Synthetic oligonucleotide
cugcguuuaccuuaaguuu

SEQ ID NO: 127702 - RNA, 19 nt, Artificial Sequence
  Description of Artificial Sequence: Synthetic oligonucleotide
gucggccguguauccauug

SEQ ID NO: 127703 - RNA, 19 nt, Artificial Sequence
  Description of Artificial Sequence: Synthetic oligonucleotide
cacacaaaggcaguccaua

SEQ ID NO: 127704 - RNA, 19 nt, Artificial Sequence
  Description of Artificial Sequence: Synthetic oligonucleotide
cgaucaucggccaugggca

SEQ ID NO: 127705 - RNA, 19 nt, Artificial Sequence
  Description of Artificial Sequence: Synthetic oligonucleotide
accauuagacugauacauu

SEQ ID NO: 127706 - RNA, 19 nt, Artificial Sequence
  Description of Artificial Sequence: Synthetic oligonucleotide
uggaugucgguagcaguuu

SEQ ID NO: 127707 - RNA, 19 nt, Artificial Sequence
  Description of Artificial Sequence: Synthetic oligonucleotide
aaccacccugucaguaggu

SEQ ID NO: 127708 - RNA, 19 nt, Artificial Sequence
  Description of Artificial Sequence: Synthetic oligonucleotide
guaggugcggguguucaaa

SEQ ID NO: 127709 - RNA, 19 nt, Artificial Sequence
  Description of Artificial Sequence: Synthetic oligonucleotide
gcccgugagacucggaguc

SEQ ID NO: 127710 - RNA, 19 nt, Artificial Sequence
  Description of Artificial Sequence: Synthetic oligonucleotide
cgguauaguagcccgugag

SEQ ID NO: 127711 - RNA, 19 nt, Artificial Sequence
  Description of Artificial Sequence: Synthetic oligonucleotide
gccguguauccauuggaga

SEQ ID NO: 127712 - RNA, 19 nt, Artificial Sequence
  Description of Artificial Sequence: Synthetic oligonucleotide
gccccuguguucuacaaua

SEQ ID NO: 127713 - RNA, 19 nt, Artificial Sequence
  Description of Artificial Sequence: Synthetic oligonucleotide
cucgaucaucggccauggg

SEQ ID NO: 127714 - RNA, 19 nt, Artificial Sequence
  Description of Artificial Sequence: Synthetic oligonucleotide
gguaccccgagcacacugc

SEQ ID NO: 127715 - RNA, 19 nt, Artificial Sequence
  Description of Artificial Sequence: Synthetic oligonucleotide
ggacauagacucugugaaa

SEQ ID NO: 127716 - RNA, 19 nt, Artificial Sequence
  Description of Artificial Sequence: Synthetic oligonucleotide
ggcgguauaguagcccgug

SEQ ID NO: 127717 - RNA, 19 nt, Artificial Sequence
  Description of Artificial Sequence: Synthetic oligonucleotide
ccggacauagacucuguga

SEQ ID NO: 127718 - RNA, 19 nt, Artificial Sequence
  Description of Artificial Sequence: Synthetic oligonucleotide
aggcucauguugguacagu

SEQ ID NO: 127719 - RNA, 19 nt, Artificial Sequence
  Description of Artificial Sequence: Synthetic oligonucleotide
cuagaggggagggcuccac

SEQ ID NO: 127720 - RNA, 19 nt, Artificial Sequence
  Description of Artificial Sequence: Synthetic oligonucleotide
caguguacgguguccagau

SEQ ID NO: 127721 - RNA, 19 nt, Artificial Sequence
  Description of Artificial Sequence: Synthetic oligonucleotide
agcgcagaagggguuccga

SEQ ID NO: 127722 - RNA, 19 nt, Artificial Sequence
  Description of Artificial Sequence: Synthetic oligonucleotide
aagguaccccgagcacacu

SEQ ID NO: 127723 - RNA, 19 nt, Artificial Sequence
  Description of Artificial Sequence: Synthetic oligonucleotide
gugauugaaugaagacgaa

SEQ ID NO: 127724 - RNA, 19 nt, Artificial Sequence
  Description of Artificial Sequence: Synthetic oligonucleotide
ggcuaagaggacuggggcu

SEQ ID NO: 127725 - RNA, 19 nt, Artificial Sequence
  Description of Artificial Sequence: Synthetic oligonucleotide
uguuggcgcagggcacuga

SEQ ID NO: 127726 - RNA, 19 nt, Artificial Sequence
  Description of Artificial Sequence: Synthetic oligonucleotide
acgcccguucauggucggc

SEQ ID NO: 127727 - RNA, 19 nt, Artificial Sequence
  Description of Artificial Sequence: Synthetic oligonucleotide
auggucggccguguaucca

SEQ ID NO: 127728 - RNA, 19 nt, Artificial Sequence
  Description of Artificial Sequence: Synthetic oligonucleotide
auacgcgcgcacaccagaa

SEQ ID NO: 127729 - RNA, 19 nt, Artificial Sequence
  Description of Artificial Sequence: Synthetic oligonucleotide
acguuccaaggugcagcag

SEQ ID NO: 127730 - RNA, 19 nt, Artificial Sequence
  Description of Artificial Sequence: Synthetic oligonucleotide
agcaccggacauagacucu

SEQ ID NO: 127731 - RNA, 19 nt, Artificial Sequence
  Description of Artificial Sequence: Synthetic oligonucleotide
guuccgacucguccacgaa

SEQ ID NO: 127732 - RNA, 19 nt, Artificial Sequence
  Description of Artificial Sequence: Synthetic oligonucleotide
cagcgauagauaguguggu

SEQ ID NO: 127733 - RNA, 19 nt, Artificial Sequence
  Description of Artificial Sequence: Synthetic oligonucleotide
ccagaaugcagugccccug

SEQ ID NO: 127734 - RNA, 19 nt, Artificial Sequence
  Description of Artificial Sequence: Synthetic oligonucleotide
gcgcagaagggguuccgac

SEQ ID NO: 127735 - RNA, 19 nt, Artificial Sequence
  Description of Artificial Sequence: Synthetic oligonucleotide
cggagacauagguuccugc

SEQ ID NO: 127736 - RNA, 19 nt, Artificial Sequence
  Description of Artificial Sequence: Synthetic oligonucleotide
cagaaugcagugccccugu

SEQ ID NO: 127737 - RNA, 19 nt, Artificial Sequence
  Description of Artificial Sequence: Synthetic oligonucleotide
ggauacugcacaccacaau

SEQ ID NO: 127738 - RNA, 19 nt, Artificial Sequence
  Description of Artificial Sequence: Synthetic oligonucleotide
guacgguguccagaugaaa

SEQ ID NO: 127739 - RNA, 19 nt, Artificial Sequence
  Description of Artificial Sequence: Synthetic oligonucleotide
cucgaagucuaaucacauu

SEQ ID NO: 127740 - RNA, 19 nt, Artificial Sequence
  Description of Artificial Sequence: Synthetic oligonucleotide
gguaacuuguggugggcuu

SEQ ID NO: 127741 - RNA, 19 nt, Artificial Sequence
  Description of Artificial Sequence: Synthetic oligonucleotide
cugguaccuuuggucuaac

SEQ ID NO: 127742 - RNA, 19 nt, Artificial Sequence
  Description of Artificial Sequence: Synthetic oligonucleotide
cagugccccuguguucuac

SEQ ID NO: 127743 - RNA, 19 nt, Artificial Sequence
  Description of Artificial Sequence: Synthetic oligonucleotide
cgauagauaguguggucaa

SEQ ID NO: 127744 - RNA, 19 nt, Artificial Sequence
  Description of Artificial Sequence: Synthetic oligonucleotide
cgcgcgcacaccagaacgc

SEQ ID NO: 127745 - RNA, 19 nt, Artificial Sequence
  Description of Artificial Sequence: Synthetic oligonucleotide
ccggacacuuaucacaggu

SEQ ID NO: 127746 - RNA, 19 nt, Artificial Sequence
  Description of Artificial Sequence: Synthetic oligonucleotide
cgacucguccacgaagaag

SEQ ID NO: 127747 - RNA, 19 nt, Artificial Sequence
  Description of Artificial Sequence: Synthetic oligonucleotide
gcgguauaguagcccguga

SEQ ID NO: 127748 - RNA, 19 nt, Artificial Sequence
  Description of Artificial Sequence: Synthetic oligonucleotide
ccagaacgcaaaagucgga

SEQ ID NO: 127749 - RNA, 19 nt, Artificial Sequence
  Description of Artificial Sequence: Synthetic oligonucleotide
gcguuagagggcagguuga

SEQ ID NO: 127750 - RNA, 19 nt, Artificial Sequence
  Description of Artificial Sequence: Synthetic oligonucleotide
guaggucgauuuccagaau

SEQ ID NO: 127751 - RNA, 19 nt, Artificial Sequence
  Description of Artificial Sequence: Synthetic oligonucleotide
cauucuccgucccuuucuu

SEQ ID NO: 127752 - RNA, 19 nt, Artificial Sequence
  Description of Artificial Sequence: Synthetic oligonucleotide
gggagcgcagguaccauua

SEQ ID NO: 127753 - RNA, 19 nt, Artificial Sequence
  Description of Artificial Sequence: Synthetic oligonucleotide
gcauucccggucagucaag

SEQ ID NO: 127754 - RNA, 19 nt, Artificial Sequence
  Description of Artificial Sequence: Synthetic oligonucleotide
gcgcagguaccauuagacu

SEQ ID NO: 127755 - RNA, 19 nt, Artificial Sequence
  Description of Artificial Sequence: Synthetic oligonucleotide
ccuauugaccauguguaau

SEQ ID NO: 127756 - RNA, 19 nt, Artificial Sequence
  Description of Artificial Sequence: Synthetic oligonucleotide
cguugcaaagaaacugaua

SEQ ID NO: 127757 - RNA, 19 nt, Artificial Sequence
  Description of Artificial Sequence: Synthetic oligonucleotide
cucggagacauagguuccu

SEQ ID NO: 127758 - RNA, 19 nt, Artificial Sequence
  Description of Artificial Sequence: Synthetic oligonucleotide
agggcugcauacgcccguu

SEQ ID NO: 127759 - RNA, 19 nt, Artificial Sequence
  Description of Artificial Sequence: Synthetic oligonucleotide
ggaauggggcuugggcuaa

SEQ ID NO: 127760 - RNA, 19 nt, Artificial Sequence
  Description of Artificial Sequence: Synthetic oligonucleotide
cgucauugcgucgguguug

SEQ ID NO: 127761 - RNA, 19 nt, Artificial Sequence
  Description of Artificial Sequence: Synthetic oligonucleotide
gcauacgcccguucauggu

SEQ ID NO: 127762 - RNA, 19 nt, Artificial Sequence
  Description of Artificial Sequence: Synthetic oligonucleotide
gcucuugaccccaaugauu

SEQ ID NO: 127763 - RNA, 19 nt, Artificial Sequence
  Description of Artificial Sequence: Synthetic oligonucleotide
ggcaguccauaccaccuuu

SEQ ID NO: 127764 - RNA, 19 nt, Artificial Sequence
  Description of Artificial Sequence: Synthetic oligonucleotide
ccauacaaucagcgauaga

SEQ ID NO: 127765 - RNA, 19 nt, Artificial Sequence
  Description of Artificial Sequence: Synthetic oligonucleotide
gguugauaagugagagcau

SEQ ID NO: 127766 - RNA, 19 nt, Artificial Sequence
  Description of Artificial Sequence: Synthetic oligonucleotide
ggcggaccugccgcaacac

SEQ ID NO: 127767 - RNA, 19 nt, Artificial Sequence
  Description of Artificial Sequence: Synthetic oligonucleotide
gcugagcguuagagggcag

SEQ ID NO: 127768 - RNA, 19 nt, Artificial Sequence
  Description of Artificial Sequence: Synthetic oligonucleotide
gcgcgcacaccagaacgca

SEQ ID NO: 127769 - RNA, 19 nt, Artificial Sequence
  Description of Artificial Sequence: Synthetic oligonucleotide
gggcugcauacgcccguuc

SEQ ID NO: 127770 - RNA, 19 nt, Artificial Sequence
  Description of Artificial Sequence: Synthetic oligonucleotide
cuuuaguggugggcauuuu

SEQ ID NO: 127771 - RNA, 19 nt, Artificial Sequence
  Description of Artificial Sequence: Synthetic oligonucleotide
ccuuugcauuagagccuga

SEQ ID NO: 127772 - RNA, 19 nt, Artificial Sequence
  Description of Artificial Sequence: Synthetic oligonucleotide
ccgcaacacuguguccuuc

SEQ ID NO: 127773 - RNA, 19 nt, Artificial Sequence
  Description of Artificial Sequence: Synthetic oligonucleotide
gcggaccugccgcaacacu

SEQ ID NO: 127774 - RNA, 19 nt, Artificial Sequence
  Description of Artificial Sequence: Synthetic oligonucleotide
gcggguguucaaagacuua

SEQ ID NO: 127775 - RNA, 19 nt, Artificial Sequence
  Description of Artificial Sequence: Synthetic oligonucleotide
ggcaggcgugugccacaga

SEQ ID NO: 127776 - RNA, 19 nt, Artificial Sequence
  Description of Artificial Sequence: Synthetic oligonucleotide
ccgacucguccacgaagaa

SEQ ID NO: 127777 - RNA, 19 nt, Artificial Sequence
  Description of Artificial Sequence: Synthetic oligonucleotide
ggucggccguguauccauu

SEQ ID NO: 127778 - RNA, 19 nt, Artificial Sequence
  Description of Artificial Sequence: Synthetic oligonucleotide
gccugacagcugagcguua

SEQ ID NO: 127779 - RNA, 19 nt, Artificial Sequence
  Description of Artificial Sequence: Synthetic oligonucleotide
cccugucaguaggucgauu

SEQ ID NO: 127780 - RNA, 19 nt, Artificial Sequence
  Description of Artificial Sequence: Synthetic oligonucleotide
aaugcuauaagcuaagcac

SEQ ID NO: 127781 - RNA, 19 nt, Artificial Sequence
  Description of Artificial Sequence: Synthetic oligonucleotide
cauaauacugcucauagcc

SEQ ID NO: 127782 - RNA, 19 nt, Artificial Sequence
  Description of Artificial Sequence: Synthetic oligonucleotide
auugggacaauuuccaugg

SEQ ID NO: 127783 - RNA, 19 nt, Artificial Sequence
  Description of Artificial Sequence: Synthetic oligonucleotide
uucguauaaacaaucauga

SEQ ID NO: 127784 - RNA, 19 nt, Artificial Sequence
  Description of Artificial Sequence: Synthetic oligonucleotide
uccuauuggagacagaggc

SEQ ID NO: 127785 - RNA, 19 nt, Artificial Sequence
  Description of Artificial Sequence: Synthetic oligonucleotide
aauaccgugccuucgaucu

SEQ ID NO: 127786 - RNA, 19 nt, Artificial Sequence
  Description of Artificial Sequence: Synthetic oligonucleotide
auaagcuaagcacaagugg

SEQ ID NO: 127787 - RNA, 19 nt, Artificial Sequence
  Description of Artificial Sequence: Synthetic oligonucleotide
agcgaaguaaacuuugugg

SEQ ID NO: 127788 - RNA, 19 nt, Artificial Sequence
  Description of Artificial Sequence: Synthetic oligonucleotide
aaauuaguguuaaagcuuc

SEQ ID NO: 127789 - RNA, 19 nt, Artificial Sequence
  Description of Artificial Sequence: Synthetic oligonucleotide
ugugaaguaagacacuuac

SEQ ID NO: 127790 - RNA, 19 nt, Artificial Sequence
  Description of Artificial Sequence: Synthetic oligonucleotide
agcuaauuaguacaagaac

SEQ ID NO: 127791 - RNA, 19 nt, Artificial Sequence
  Description of Artificial Sequence: Synthetic oligonucleotide
aaauccgcaagugaacccc

SEQ ID NO: 127792 - RNA, 19 nt, Artificial Sequence
  Description of Artificial Sequence: Synthetic oligonucleotide
accuuagaguauuauaaac

SEQ ID NO: 127793 - RNA, 19 nt, Artificial Sequence
  Description of Artificial Sequence: Synthetic oligonucleotide
aacccuuuacuaaucaggc

SEQ ID NO: 127794 - RNA, 19 nt, Artificial Sequence
  Description of Artificial Sequence: Synthetic oligonucleotide
uucucaaugcaccugggag

SEQ ID NO: 127795 - RNA, 19 nt, Artificial Sequence
  Description of Artificial Sequence: Synthetic oligonucleotide
gacgcauacgcagagaugg

SEQ ID NO: 127796 - RNA, 19 nt, Artificial Sequence
  Description of Artificial Sequence: Synthetic oligonucleotide
uauaagcuaagcacaagug

SEQ ID NO: 127797 - RNA, 19 nt, Artificial Sequence
  Description of Artificial Sequence: Synthetic oligonucleotide
agagcuaggagauagcaga

SEQ ID NO: 127798 - RNA, 19 nt, Artificial Sequence
  Description of Artificial Sequence: Synthetic oligonucleotide
auuaacuauucaaucuucc

SEQ ID NO: 127799 - RNA, 19 nt, Artificial Sequence
  Description of Artificial Sequence: Synthetic oligonucleotide
uaugcuauuaaaagcugac

SEQ ID NO: 127800 - RNA, 19 nt, Artificial Sequence
  Description of Artificial Sequence: Synthetic oligonucleotide
agaugcuaucuuuuaaagg

SEQ ID NO: 127801 - RNA, 19 nt, Artificial Sequence
  Description of Artificial Sequence: Synthetic oligonucleotide
uccagaacaggcccuaagg

SEQ ID NO: 127802 - RNA, 19 nt, Artificial Sequence
  Description of Artificial Sequence: Synthetic oligonucleotide
aucucgugagcauuagugc

SEQ ID NO: 127803 - RNA, 19 nt, Artificial Sequence
  Description of Artificial Sequence: Synthetic oligonucleotide
uauuaucauaaugugaagu

SEQ ID NO: 127804 - RNA, 19 nt, Artificial Sequence
  Description of Artificial Sequence: Synthetic oligonucleotide
gacgggauggucuaguuug

SEQ ID NO: 127805 - RNA, 19 nt, Artificial Sequence
  Description of Artificial Sequence: Synthetic oligonucleotide
uccuacuaaccccacacag

SEQ ID NO: 127806 - RNA, 19 nt, Artificial Sequence
  Description of Artificial Sequence: Synthetic oligonucleotide
aagggaguccgugauagac

SEQ ID NO: 127807 - RNA, 19 nt, Artificial Sequence
  Description of Artificial Sequence: Synthetic oligonucleotide
uuaugucacugacauauga

SEQ ID NO: 127808 - RNA, 19 nt, Artificial Sequence
  Description of Artificial Sequence: Synthetic oligonucleotide
uuuaacucuaaugcaaacu

SEQ ID NO: 127809 - RNA, 19 nt, Artificial Sequence
  Description of Artificial Sequence: Synthetic oligonucleotide
ggaguuuucgaugacaggg

SEQ ID NO: 127810 - RNA, 19 nt, Artificial Sequence
  Description of Artificial Sequence: Synthetic oligonucleotide
ugaaguucacuuugcagug

SEQ ID NO: 127811 - RNA, 19 nt, Artificial Sequence
  Description of Artificial Sequence: Synthetic oligonucleotide
guacuuacaaugcuauaag

SEQ ID NO: 127812 - RNA, 19 nt, Artificial Sequence
  Description of Artificial Sequence: Synthetic oligonucleotide
uccucuaagacucgccucc

SEQ ID NO: 127813 - RNA, 19 nt, Artificial Sequence
  Description of Artificial Sequence: Synthetic oligonucleotide
gaucucgugagcauuagug

SEQ ID NO: 127814 - RNA, 19 nt, Artificial Sequence
  Description of Artificial Sequence: Synthetic oligonucleotide
uagcuaauuaguacaagaa

SEQ ID NO: 127815 - RNA, 19 nt, Artificial Sequence
  Description of Artificial Sequence: Synthetic oligonucleotide
gaugacaauuucaccauag

SEQ ID NO: 127816 - RNA, 19 nt, Artificial Sequence
  Description of Artificial Sequence: Synthetic oligonucleotide
aucaugauaguauuugaaa

SEQ ID NO: 127817 - RNA, 19 nt, Artificial Sequence
  Description of Artificial Sequence: Synthetic oligonucleotide
uacuuacaaugcuauaagc

SEQ ID NO: 127818 - RNA, 19 nt, Artificial Sequence
  Description of Artificial Sequence: Synthetic oligonucleotide
auucuugcuacuugcuagg

SEQ ID NO: 127819 - RNA, 19 nt, Artificial Sequence
  Description of Artificial Sequence: Synthetic oligonucleotide
gcgaaguaaacuuuguggg

SEQ ID NO: 127820 - RNA, 19 nt, Artificial Sequence
  Description of Artificial Sequence: Synthetic oligonucleotide
gaugauugucuauaaggca

SEQ ID NO: 127821 - RNA, 19 nt, Artificial Sequence
  Description of Artificial Sequence: Synthetic oligonucleotide
aaugcuugaugauugucua

SEQ ID NO: 127822 - RNA, 19 nt, Artificial Sequence
  Description of Artificial Sequence: Synthetic oligonucleotide
ucggcuuucauccccggag

SEQ ID NO: 127823 - RNA, 19 nt, Artificial Sequence
  Description of Artificial Sequence: Synthetic oligonucleotide
aagcgaaguaaacuuugug

SEQ ID NO: 127824 - RNA, 19 nt, Artificial Sequence
  Description of Artificial Sequence: Synthetic oligonucleotide
ugaaauccgcaagugaacc

SEQ ID NO: 127825 - RNA, 19 nt, Artificial Sequence
  Description of Artificial Sequence: Synthetic oligonucleotide
ugauuuauuggaaguaguu

SEQ ID NO: 127826 - RNA, 19 nt, Artificial Sequence
  Description of Artificial Sequence: Synthetic oligonucleotide
agagaguagaggaaagaac

SEQ ID NO: 127827 - RNA, 19 nt, Artificial Sequence
  Description of Artificial Sequence: Synthetic oligonucleotide
gaguccgugauagacagcc

SEQ ID NO: 127828 - RNA, 19 nt, Artificial Sequence
  Description of Artificial Sequence: Synthetic oligonucleotide
gaugccguaaccucuaaaa

SEQ ID NO: 127829 - RNA, 19 nt, Artificial Sequence
  Description of Artificial Sequence: Synthetic oligonucleotide
uaaaccgagugucgguggg

SEQ ID NO: 127830 - RNA, 19 nt, Artificial Sequence
  Description of Artificial Sequence: Synthetic oligonucleotide
uuuaugucguuuucccuca

SEQ ID NO: 127831 - RNA, 19 nt, Artificial Sequence
  Description of Artificial Sequence: Synthetic oligonucleotide
ucuagaugcuaucuuuuaa

SEQ ID NO: 127832 - RNA, 19 nt, Artificial Sequence
  Description of Artificial Sequence: Synthetic oligonucleotide
auucguacguuucuccaag

SEQ ID NO: 127833 - RNA, 19 nt, Artificial Sequence
  Description of Artificial Sequence: Synthetic oligonucleotide
gugaacagccuucccaucg

SEQ ID NO: 127834 - RNA, 19 nt, Artificial Sequence
  Description of Artificial Sequence: Synthetic oligonucleotide
cuagcuaauuaguacaaga

SEQ ID NO: 127835 - RNA, 19 nt, Artificial Sequence
  Description of Artificial Sequence: Synthetic oligonucleotide
gguguugggacccugugcg

SEQ ID NO: 127836 - RNA, 19 nt, Artificial Sequence
  Description of Artificial Sequence: Synthetic oligonucleotide
ucucaaugcaccugggaga

SEQ ID NO: 127837 - RNA, 19 nt, Artificial Sequence
  Description of Artificial Sequence: Synthetic oligonucleotide
agaauuaccgagguguucu

SEQ ID NO: 127838 - RNA, 19 nt, Artificial Sequence
  Description of Artificial Sequence: Synthetic oligonucleotide
uggucuaaaccgagugucg

SEQ ID NO: 127839 - RNA, 19 nt, Artificial Sequence
  Description of Artificial Sequence: Synthetic oligonucleotide
uacaagaaccacagcuucc

SEQ ID NO: 127840 - RNA, 19 nt, Artificial Sequence
  Description of Artificial Sequence: Synthetic oligonucleotide
uuuuccucuaagacucgcc

SEQ ID NO: 127841 - RNA, 19 nt, Artificial Sequence
  Description of Artificial Sequence: Synthetic oligonucleotide
ugcacaguaagucuacaua

SEQ ID NO: 127842 - RNA, 19 nt, Artificial Sequence
  Description of Artificial Sequence: Synthetic oligonucleotide
aauuaccgagguguucuac

SEQ ID NO: 127843 - RNA, 19 nt, Artificial Sequence
  Description of Artificial Sequence: Synthetic oligonucleotide
ucauaaugugaaguaagac

SEQ ID NO: 127844 - RNA, 19 nt, Artificial Sequence
  Description of Artificial Sequence: Synthetic oligonucleotide
gccgauaugcuauuaaaag

SEQ ID NO: 127845 - RNA, 19 nt, Artificial Sequence
  Description of Artificial Sequence: Synthetic oligonucleotide
ugauugucuauaaggcaga

SEQ ID NO: 127846 - RNA, 19 nt, Artificial Sequence
  Description of Artificial Sequence: Synthetic oligonucleotide
uuaggauuagaagagugua

SEQ ID NO: 127847 - RNA, 19 nt, Artificial Sequence
  Description of Artificial Sequence: Synthetic oligonucleotide
agaauuguuuugacaacac

SEQ ID NO: 127848 - RNA, 19 nt, Artificial Sequence
  Description of Artificial Sequence: Synthetic oligonucleotide
aaaacucaguuuaugucgu

SEQ ID NO: 127849 - RNA, 19 nt, Artificial Sequence
  Description of Artificial Sequence: Synthetic oligonucleotide
auacccaugguccaucaga

SEQ ID NO: 127850 - RNA, 19 nt, Artificial Sequence
  Description of Artificial Sequence: Synthetic oligonucleotide
cauccuacuaaccccacac

SEQ ID NO: 127851 - RNA, 19 nt, Artificial Sequence
  Description of Artificial Sequence: Synthetic oligonucleotide
ugaccuuaaagcgaaguaa

SEQ ID NO: 127852 - RNA, 19 nt, Artificial Sequence
  Description of Artificial Sequence: Synthetic oligonucleotide
uaguguuaaagcuucuuuu

SEQ ID NO: 127853 - RNA, 19 nt, Artificial Sequence
  Description of Artificial Sequence: Synthetic oligonucleotide
ucuaaaccgagugucggug

SEQ ID NO: 127854 - RNA, 19 nt, Artificial Sequence
  Description of Artificial Sequence: Synthetic oligonucleotide
agaccuuagaguauuauaa

SEQ ID NO: 127855 - RNA, 19 nt, Artificial Sequence
  Description of Artificial Sequence: Synthetic oligonucleotide
ugcuagguaacuguauuga

SEQ ID NO: 127856 - RNA, 19 nt, Artificial Sequence
  Description of Artificial Sequence: Synthetic oligonucleotide
uaugaaucgucaucagaaa

SEQ ID NO: 127857 - RNA, 19 nt, Artificial Sequence
  Description of Artificial Sequence: Synthetic oligonucleotide
auuaccgagguguucuaca

SEQ ID NO: 127858 - RNA, 19 nt, Artificial Sequence
  Description of Artificial Sequence: Synthetic oligonucleotide
aauacccaugguccaucag

SEQ ID NO: 127859 - RNA, 19 nt, Artificial Sequence
  Description of Artificial Sequence: Synthetic oligonucleotide
agauaucccagcuaccaau

SEQ ID NO: 127860 - RNA, 19 nt, Artificial Sequence
  Description of Artificial Sequence: Synthetic oligonucleotide
agguguucuacauucguau

SEQ ID NO: 127861 - RNA, 19 nt, Artificial Sequence
  Description of Artificial Sequence: Synthetic oligonucleotide
uccgugauagacagccugc

SEQ ID NO: 127862 - RNA, 19 nt, Artificial Sequence
  Description of Artificial Sequence: Synthetic oligonucleotide
gauuagaagaguguagucu

SEQ ID NO: 127863 - RNA, 19 nt, Artificial Sequence
  Description of Artificial Sequence: Synthetic oligonucleotide
aucgcggucgaauaccgug

SEQ ID NO: 127864 - RNA, 19 nt, Artificial Sequence
  Description of Artificial Sequence: Synthetic oligonucleotide
cuaaaccgagugucggugg

SEQ ID NO: 127865 - RNA, 19 nt, Artificial Sequence
  Description of Artificial Sequence: Synthetic oligonucleotide
aagagcuaggagauagcag

SEQ ID NO: 127866 - RNA, 19 nt, Artificial Sequence
  Description of Artificial Sequence: Synthetic oligonucleotide
agaccgacgaccugagcag

SEQ ID NO: 127867 - RNA, 19 nt, Artificial Sequence
  Description of Artificial Sequence: Synthetic oligonucleotide
uggauuuaccccagaauuu

SEQ ID NO: 127868 - RNA, 19 nt, Artificial Sequence
  Description of Artificial Sequence: Synthetic oligonucleotide
cagucuacaugaacuaaac

SEQ ID NO: 127869 - RNA, 19 nt, Artificial Sequence
  Description of Artificial Sequence: Synthetic oligonucleotide
agagucacguggguugugc

SEQ ID NO: 127870 - RNA, 19 nt, Artificial Sequence
  Description of Artificial Sequence: Synthetic oligonucleotide
agaccuugacagaggaucc

SEQ ID NO: 127871 - RNA, 19 nt, Artificial Sequence
  Description of Artificial Sequence: Synthetic oligonucleotide
uucggcaugggauuugcuc

SEQ ID NO: 127872 - RNA, 19 nt, Artificial Sequence
  Description of Artificial Sequence: Synthetic oligonucleotide
cacauucguacguuucucc

SEQ ID NO: 127873 - RNA, 19 nt, Artificial Sequence
  Description of Artificial Sequence: Synthetic oligonucleotide
cuagaugcuaucuuuuaaa

SEQ ID NO: 127874 - RNA, 19 nt, Artificial Sequence
  Description of Artificial Sequence: Synthetic oligonucleotide
ccgauaugcuauuaaaagc

SEQ ID NO: 127875 - RNA, 19 nt, Artificial Sequence
  Description of Artificial Sequence: Synthetic oligonucleotide
aacugugugaagccauaau

SEQ ID NO: 127876 - RNA, 19 nt, Artificial Sequence
  Description of Artificial Sequence: Synthetic oligonucleotide
ugucgugcacaguaagucu

SEQ ID NO: 127877 - RNA, 19 nt, Artificial Sequence
  Description of Artificial Sequence: Synthetic oligonucleotide
caagugaaccccuagcuaa

SEQ ID NO: 127878 - RNA, 19 nt, Artificial Sequence
  Description of Artificial Sequence: Synthetic oligonucleotide
agcagacuuguucuguaug

SEQ ID NO: 127879 - RNA, 19 nt, Artificial Sequence
  Description of Artificial Sequence: Synthetic oligonucleotide
uggucuaguuuggaaaagc

SEQ ID NO: 127880 - RNA, 19 nt, Artificial Sequence
  Description of Artificial Sequence: Synthetic oligonucleotide
acauucguacguuucucca

SEQ ID NO: 127881 - RNA, 19 nt, Artificial Sequence
  Description of Artificial Sequence: Synthetic oligonucleotide
gguuaaacggcuugcugcc

SEQ ID NO: 127882 - RNA, 19 nt, Artificial Sequence
  Description of Artificial Sequence: Synthetic oligonucleotide
ucguacguuucuccaagga

SEQ ID NO: 127883 - RNA, 19 nt, Artificial Sequence
  Description of Artificial Sequence: Synthetic oligonucleotide
caaugcuauaagcuaagca

SEQ ID NO: 127884 - RNA, 19 nt, Artificial Sequence
  Description of Artificial Sequence: Synthetic oligonucleotide
ucaccacaagacgggaugg

SEQ ID NO: 127885 - RNA, 19 nt, Artificial Sequence
  Description of Artificial Sequence: Synthetic oligonucleotide
uucguacguuucuccaagg

SEQ ID NO: 127886 - RNA, 19 nt, Artificial Sequence
  Description of Artificial Sequence: Synthetic oligonucleotide
gaguuuucgaugacagggc

SEQ ID NO: 127887 - RNA, 19 nt, Artificial Sequence
  Description of Artificial Sequence: Synthetic oligonucleotide
uccgcaagugaaccccuag

SEQ ID NO: 127888 - RNA, 19 nt, Artificial Sequence
  Description of Artificial Sequence: Synthetic oligonucleotide
accuuaaagcgaaguaaac

SEQ ID NO: 127889 - RNA, 19 nt, Artificial Sequence
  Description of Artificial Sequence: Synthetic oligonucleotide
ugucuauaaggcagauggu

SEQ ID NO: 127890 - RNA, 19 nt, Artificial Sequence
  Description of Artificial Sequence: Synthetic oligonucleotide
gccguaaccucuaaaaugc

SEQ ID NO: 127891 - RNA, 19 nt, Artificial Sequence
  Description of Artificial Sequence: Synthetic oligonucleotide
ucuucgccaagguccagug

SEQ ID NO: 127892 - RNA, 19 nt, Artificial Sequence
  Description of Artificial Sequence: Synthetic oligonucleotide
uucagaccgacgaccugag

SEQ ID NO: 127893 - RNA, 19 nt, Artificial Sequence
  Description of Artificial Sequence: Synthetic oligonucleotide
ggaaucguccgucagguuc

SEQ ID NO: 127894 - RNA, 19 nt, Artificial Sequence
  Description of Artificial Sequence: Synthetic oligonucleotide
ugcuugaugauugucuaua

SEQ ID NO: 127895 - RNA, 19 nt, Artificial Sequence
  Description of Artificial Sequence: Synthetic oligonucleotide
auagccuuucggcauggga

SEQ ID NO: 127896 - RNA, 19 nt, Artificial Sequence
  Description of Artificial Sequence: Synthetic oligonucleotide
ucguauaaacaaucaugau

SEQ ID NO: 127897 - RNA, 19 nt, Artificial Sequence
  Description of Artificial Sequence: Synthetic oligonucleotide
guaaccucuaaaaugcaaa

SEQ ID NO: 127898 - RNA, 19 nt, Artificial Sequence
  Description of Artificial Sequence: Synthetic oligonucleotide
cuauaagcuaagcacaagu

SEQ ID NO: 127899 - RNA, 19 nt, Artificial Sequence
  Description of Artificial Sequence: Synthetic oligonucleotide
guccgugauagacagccug

SEQ ID NO: 127900 - RNA, 19 nt, Artificial Sequence
  Description of Artificial Sequence: Synthetic oligonucleotide
uaauacccaugguccauca

SEQ ID NO: 127901 - RNA, 19 nt, Artificial Sequence
  Description of Artificial Sequence: Synthetic oligonucleotide
cagaccgacgaccugagca

SEQ ID NO: 127902 - RNA, 19 nt, Artificial Sequence
  Description of Artificial Sequence: Synthetic oligonucleotide
  modified_base (17)..(17): a, c, u, g, unknown or other
gucauguccaccuuacnua

SEQ ID NO: 127903 - RNA, 19 nt, Artificial Sequence
  Description of Artificial Sequence: Synthetic oligonucleotide
gggaguccgugauagacag

SEQ ID NO: 127904 - RNA, 19 nt, Artificial Sequence
  Description of Artificial Sequence: Synthetic oligonucleotide
uccugucggacacauucgu

SEQ ID NO: 127905 - RNA, 19 nt, Artificial Sequence
  Description of Artificial Sequence: Synthetic oligonucleotide
ucgcggucgaauaccgugc

SEQ ID NO: 127906 - RNA, 19 nt, Artificial Sequence
  Description of Artificial Sequence: Synthetic oligonucleotide
guacaagaacccuuuacua

SEQ ID NO: 127907 - RNA, 19 nt, Artificial Sequence
  Description of Artificial Sequence: Synthetic oligonucleotide
ccagcuaccaauuaaaccu

SEQ ID NO: 127908 - RNA, 19 nt, Artificial Sequence
  Description of Artificial Sequence: Synthetic oligonucleotide
caagaacccuuuacuaauc

SEQ ID NO: 127909 - RNA, 19 nt, Artificial Sequence
  Description of Artificial Sequence: Synthetic oligonucleotide
uccccggaguuuucgauga

SEQ ID NO: 127910 - RNA, 19 nt, Artificial Sequence
  Description of Artificial Sequence: Synthetic oligonucleotide
gaguagaggaaagaacuaa

SEQ ID NO: 127911 - RNA, 19 nt, Artificial Sequence
  Description of Artificial Sequence: Synthetic oligonucleotide
uuaccgagguguucuacau

SEQ ID NO: 127912 - RNA, 19 nt, Artificial Sequence
  Description of Artificial Sequence: Synthetic oligonucleotide
uucgaucucgugagcauua

SEQ ID NO: 127913 - RNA, 19 nt, Artificial Sequence
  Description of Artificial Sequence: Synthetic oligonucleotide
agcuaggagauagcagaac

SEQ ID NO: 127914 - RNA, 19 nt, Artificial Sequence
  Description of Artificial Sequence: Synthetic oligonucleotide
guugacaaauuaggauuag

SEQ ID NO: 127915 - RNA, 19 nt, Artificial Sequence
  Description of Artificial Sequence: Synthetic oligonucleotide
aucauaaaucuggcaaaug

SEQ ID NO: 127916 - RNA, 19 nt, Artificial Sequence
  Description of Artificial Sequence: Synthetic oligonucleotide
guccacuuaagauguugug

SEQ ID NO: 127917 - RNA, 19 nt, Artificial Sequence
  Description of Artificial Sequence: Synthetic oligonucleotide
auagacagccugcucucgu

SEQ ID NO: 127918 - RNA, 19 nt, Artificial Sequence
  Description of Artificial Sequence: Synthetic oligonucleotide
cagcuaccaauuaaaccug

SEQ ID NO: 127919 - RNA, 19 nt, Artificial Sequence
  Description of Artificial Sequence: Synthetic oligonucleotide
aguagaggaaagaacuaaa

SEQ ID NO: 127920 - RNA, 19 nt, Artificial Sequence
  Description of Artificial Sequence: Synthetic oligonucleotide
caugcuucagaccgacgac

SEQ ID NO: 127921 - RNA, 19 nt, Artificial Sequence
  Description of Artificial Sequence: Synthetic oligonucleotide
aacucaguuuaugucguuu

SEQ ID NO: 127922 - RNA, 19 nt, Artificial Sequence
  Description of Artificial Sequence: Synthetic oligonucleotide
ccaucucacaucuugccag

SEQ ID NO: 127923 - RNA, 19 nt, Artificial Sequence
  Description of Artificial Sequence: Synthetic oligonucleotide
aguggcaggaaucguccgu

SEQ ID NO: 127924 - RNA, 19 nt, Artificial Sequence
  Description of Artificial Sequence: Synthetic oligonucleotide
ucgugagcauuagugcucc

SEQ ID NO: 127925 - RNA, 19 nt, Artificial Sequence
  Description of Artificial Sequence: Synthetic oligonucleotide
ucuugcuacuugcuaggua

SEQ ID NO: 127926 - RNA, 19 nt, Artificial Sequence
  Description of Artificial Sequence: Synthetic oligonucleotide
acgaccugagcagaaggag

SEQ ID NO: 127927 - RNA, 19 nt, Artificial Sequence
  Description of Artificial Sequence: Synthetic oligonucleotide
agagucgucgcuggauuuc

SEQ ID NO: 127928 - RNA, 19 nt, Artificial Sequence
  Description of Artificial Sequence: Synthetic oligonucleotide
ucgugcacaguaagucuac

SEQ ID NO: 127929 - RNA, 19 nt, Artificial Sequence
  Description of Artificial Sequence: Synthetic oligonucleotide
aaccgagugucggugggug

SEQ ID NO: 127930 - RNA, 19 nt, Artificial Sequence
  Description of Artificial Sequence: Synthetic oligonucleotide
uccgccgauaugcuauuaa

SEQ ID NO: 127931 - RNA, 19 nt, Artificial Sequence
  Description of Artificial Sequence: Synthetic oligonucleotide
acguggguugugccgauug

SEQ ID NO: 127932 - RNA, 19 nt, Artificial Sequence
  Description of Artificial Sequence: Synthetic oligonucleotide
aagagucgucgcuggauuu

SEQ ID NO: 127933 - RNA, 19 nt, Artificial Sequence
  Description of Artificial Sequence: Synthetic oligonucleotide
gaccggguuaaacggcuug

SEQ ID NO: 127934 - RNA, 19 nt, Artificial Sequence
  Description of Artificial Sequence: Synthetic oligonucleotide
agguccgccuuuuggaccu

SEQ ID NO: 127935 - RNA, 19 nt, Artificial Sequence
  Description of Artificial Sequence: Synthetic oligonucleotide
ggauggucuaguuuggaaa

SEQ ID NO: 127936 - RNA, 19 nt, Artificial Sequence
  Description of Artificial Sequence: Synthetic oligonucleotide
uuccucuaagacucgccuc

SEQ ID NO: 127937 - RNA, 19 nt, Artificial Sequence
  Description of Artificial Sequence: Synthetic oligonucleotide
acccuuuacuaaucaggcu

SEQ ID NO: 127938 - RNA, 19 nt, Artificial Sequence
  Description of Artificial Sequence: Synthetic oligonucleotide
agcuaccaauuaaaccugg

SEQ ID NO: 127939 - RNA, 19 nt, Artificial Sequence
  Description of Artificial Sequence: Synthetic oligonucleotide
gagucacguggguugugcc

SEQ ID NO: 127940 - RNA, 19 nt, Artificial Sequence
  Description of Artificial Sequence: Synthetic oligonucleotide
cuuucggcaugggauuugc

SEQ ID NO: 127941 - RNA, 19 nt, Artificial Sequence
  Description of Artificial Sequence: Synthetic oligonucleotide
auccuacuaaccccacaca

SEQ ID NO: 127942 - RNA, 19 nt, Artificial Sequence
  Description of Artificial Sequence: Synthetic oligonucleotide
uuaagauguuguggaugca

SEQ ID NO: 127943 - RNA, 19 nt, Artificial Sequence
  Description of Artificial Sequence: Synthetic oligonucleotide
aaacucaguuuaugucguu

SEQ ID NO: 127944 - RNA, 19 nt, Artificial Sequence
  Description of Artificial Sequence: Synthetic oligonucleotide
cuaaugcaaacugugugaa

SEQ ID NO: 127945 - RNA, 19 nt, Artificial Sequence
  Description of Artificial Sequence: Synthetic oligonucleotide
ccacuuaagauguugugga

SEQ ID NO: 127946 - RNA, 19 nt, Artificial Sequence
  Description of Artificial Sequence: Synthetic oligonucleotide
cuguaauacccauggucca

SEQ ID NO: 127947 - RNA, 19 nt, Artificial Sequence
  Description of Artificial Sequence: Synthetic oligonucleotide
cacaaguggucauucuaga

SEQ ID NO: 127948 - RNA, 19 nt, Artificial Sequence
  Description of Artificial Sequence: Synthetic oligonucleotide
aaccccuagcuaauuagua

SEQ ID NO: 127949 - RNA, 19 nt, Artificial Sequence
  Description of Artificial Sequence: Synthetic oligonucleotide
cuacuaaccccacacagau

SEQ ID NO: 127950 - RNA, 19 nt, Artificial Sequence
  Description of Artificial Sequence: Synthetic oligonucleotide
gguugugccgauugggaca

SEQ ID NO: 127951 - RNA, 19 nt, Artificial Sequence
  Description of Artificial Sequence: Synthetic oligonucleotide
gucacuuaugucacugaca

SEQ ID NO: 127952 - RNA, 19 nt, Artificial Sequence
  Description of Artificial Sequence: Synthetic oligonucleotide
cagaccuuagaguauuaua

SEQ ID NO: 127953 - RNA, 19 nt, Artificial Sequence
  Description of Artificial Sequence: Synthetic oligonucleotide
caucagucuacaugaacua

SEQ ID NO: 127954 - RNA, 19 nt, Artificial Sequence
  Description of Artificial Sequence: Synthetic oligonucleotide
ucccaucgcggucgaauac

SEQ ID NO: 127955 - RNA, 19 nt, Artificial Sequence
  Description of Artificial Sequence: Synthetic oligonucleotide
guaaccuuaccucuauuuu

SEQ ID NO: 127956 - RNA, 19 nt, Artificial Sequence
  Description of Artificial Sequence: Synthetic oligonucleotide
gagucgucgcuggauuucc

SEQ ID NO: 127957 - RNA, 19 nt, Artificial Sequence
  Description of Artificial Sequence: Synthetic oligonucleotide
ccauaauacugcucauagc

SEQ ID NO: 127958 - RNA, 19 nt, Artificial Sequence
  Description of Artificial Sequence: Synthetic oligonucleotide
accgagugucggugggugg

SEQ ID NO: 127959 - RNA, 19 nt, Artificial Sequence
  Description of Artificial Sequence: Synthetic oligonucleotide
acagucuguaauacccaug

SEQ ID NO: 127960 - RNA, 19 nt, Artificial Sequence
  Description of Artificial Sequence: Synthetic oligonucleotide
gcuugucgugcacaguaag

SEQ ID NO: 127961 - RNA, 19 nt, Artificial Sequence
  Description of Artificial Sequence: Synthetic oligonucleotide
ucgaucucgugagcauuag

SEQ ID NO: 127962 - RNA, 19 nt, Artificial Sequence
  Description of Artificial Sequence: Synthetic oligonucleotide
guugggacccugugcgggc

SEQ ID NO: 127963 - RNA, 19 nt, Artificial Sequence
  Description of Artificial Sequence: Synthetic oligonucleotide
cccugugcgggcaagcagg

SEQ ID NO: 127964 - RNA, 19 nt, Artificial Sequence
  Description of Artificial Sequence: Synthetic oligonucleotide
aauccgcaagugaaccccu

SEQ ID NO: 127965 - RNA, 19 nt, Artificial Sequence
  Description of Artificial Sequence: Synthetic oligonucleotide
uucccaucgcggucgaaua

SEQ ID NO: 127966 - RNA, 19 nt, Artificial Sequence
  Description of Artificial Sequence: Synthetic oligonucleotide
gacgaccugagcagaagga

SEQ ID NO: 127967 - RNA, 19 nt, Artificial Sequence
  Description of Artificial Sequence: Synthetic oligonucleotide
guccugucggacacauucg

SEQ ID NO: 127968 - RNA, 19 nt, Artificial Sequence
  Description of Artificial Sequence: Synthetic oligonucleotide
cauucguacguuucuccaa

SEQ ID NO: 127969 - RNA, 19 nt, Artificial Sequence
  Description of Artificial Sequence: Synthetic oligonucleotide
guaauacccaugguccauc

SEQ ID NO: 127970 - RNA, 19 nt, Artificial Sequence
  Description of Artificial Sequence: Synthetic oligonucleotide
aaaccgagugucggugggu

SEQ ID NO: 127971 - RNA, 19 nt, Artificial Sequence
  Description of Artificial Sequence: Synthetic oligonucleotide
auacgcagagauggcgaag

SEQ ID NO: 127972 - RNA, 19 nt, Artificial Sequence
  Description of Artificial Sequence: Synthetic oligonucleotide
uuucggcaugggauuugcu

SEQ ID NO: 127973 - RNA, 19 nt, Artificial Sequence
  Description of Artificial Sequence: Synthetic oligonucleotide
gcuaggagauagcagaacu

SEQ ID NO: 127974 - RNA, 19 nt, Artificial Sequence
  Description of Artificial Sequence: Synthetic oligonucleotide
agccuuucggcaugggauu

SEQ ID NO: 127975 - RNA, 19 nt, Artificial Sequence
  Description of Artificial Sequence: Synthetic oligonucleotide
ccgcuguccacuuaagaug

SEQ ID NO: 127976 - RNA, 19 nt, Artificial Sequence
  Description of Artificial Sequence: Synthetic oligonucleotide
ucagaccgacgaccugagc

SEQ ID NO: 127977 - RNA, 19 nt, Artificial Sequence
  Description of Artificial Sequence: Synthetic oligonucleotide
agaugccguaaccucuaaa

SEQ ID NO: 127978 - RNA, 19 nt, Artificial Sequence
  Description of Artificial Sequence: Synthetic oligonucleotide
gacagucuguaauacccau

SEQ ID NO: 127979 - RNA, 19 nt, Artificial Sequence
  Description of Artificial Sequence: Synthetic oligonucleotide
acgcauacgcagagauggc

SEQ ID NO: 127980 - RNA, 19 nt, Artificial Sequence
  Description of Artificial Sequence: Synthetic oligonucleotide
agacgggauggucuaguuu

SEQ ID NO: 127981 - RNA, 19 nt, Artificial Sequence
  Description of Artificial Sequence: Synthetic oligonucleotide
gaaucguccgucagguucu

SEQ ID NO: 127982 - RNA, 19 nt, Artificial Sequence
  Description of Artificial Sequence: Synthetic oligonucleotide
gcuauaagcuaagcacaag

SEQ ID NO: 127983 - RNA, 19 nt, Artificial Sequence
  Description of Artificial Sequence: Synthetic oligonucleotide
uggcaggaaucguccguca

SEQ ID NO: 127984 - RNA, 19 nt, Artificial Sequence
  Description of Artificial Sequence: Synthetic oligonucleotide
cauacgcagagauggcgaa

SEQ ID NO: 127985 - RNA, 19 nt, Artificial Sequence
  Description of Artificial Sequence: Synthetic oligonucleotide
guagcuggacgcauacgca

SEQ ID NO: 127986 - RNA, 19 nt, Artificial Sequence
  Description of Artificial Sequence: Synthetic oligonucleotide
cuugucgugcacaguaagu

SEQ ID NO: 127987 - RNA, 19 nt, Artificial Sequence
  Description of Artificial Sequence: Synthetic oligonucleotide
gagguguucuacauucgua

SEQ ID NO: 127988 - RNA, 19 nt, Artificial Sequence
  Description of Artificial Sequence: Synthetic oligonucleotide
ggugcaugggugagcaacc

SEQ ID NO: 127989 - RNA, 19 nt, Artificial Sequence
  Description of Artificial Sequence: Synthetic oligonucleotide
uaccgagguguucuacauu

SEQ ID NO: 127990 - RNA, 19 nt, Artificial Sequence
  Description of Artificial Sequence: Synthetic oligonucleotide
ccaucgcggucgaauaccg

SEQ ID NO: 127991 - RNA, 19 nt, Artificial Sequence
  Description of Artificial Sequence: Synthetic oligonucleotide
acaagacgggauggucuag

SEQ ID NO: 127992 - RNA, 19 nt, Artificial Sequence
  Description of Artificial Sequence: Synthetic oligonucleotide
aaugcaccugggagauugu

SEQ ID NO: 127993 - RNA, 19 nt, Artificial Sequence
  Description of Artificial Sequence: Synthetic oligonucleotide
gaaccccuagcuaauuagu

SEQ ID NO: 127994 - RNA, 19 nt, Artificial Sequence
  Description of Artificial Sequence: Synthetic oligonucleotide
ccgauugggacaauuucca

SEQ ID NO: 127995 - RNA, 19 nt, Artificial Sequence
  Description of Artificial Sequence: Synthetic oligonucleotide
ccuacuaaccccacacaga

SEQ ID NO: 127996 - RNA, 19 nt, Artificial Sequence
  Description of Artificial Sequence: Synthetic oligonucleotide
ugagcaacccuggguguua

SEQ ID NO: 127997 - RNA, 19 nt, Artificial Sequence
  Description of Artificial Sequence: Synthetic oligonucleotide
ugcucggaaguagcuggac

SEQ ID NO: 127998 - RNA, 19 nt, Artificial Sequence
  Description of Artificial Sequence: Synthetic oligonucleotide
gugaaccccuagcuaauua

SEQ ID NO: 127999 - RNA, 19 nt, Artificial Sequence
  Description of Artificial Sequence: Synthetic oligonucleotide
ucucuccgccgauaugcua

SEQ ID NO: 128000 - RNA, 19 nt, Artificial Sequence
  Description of Artificial Sequence: Synthetic oligonucleotide
gagcuaggagauagcagaa

SEQ ID NO: 128001 - RNA, 19 nt, Artificial Sequence
  Description of Artificial Sequence: Synthetic oligonucleotide
agugucggugggugguaau

SEQ ID NO: 128002 - RNA, 19 nt, Artificial Sequence
  Description of Artificial Sequence: Synthetic oligonucleotide
gucuaaaccgagugucggu

SEQ ID NO: 128003 - RNA, 19 nt, Artificial Sequence
  Description of Artificial Sequence: Synthetic oligonucleotide
gcuugaugauugucuauaa

SEQ ID NO: 128004 - RNA, 19 nt, Artificial Sequence
  Description of Artificial Sequence: Synthetic oligonucleotide
cuaggagauagcagaacuu

SEQ ID NO: 128005 - RNA, 19 nt, Artificial Sequence
  Description of Artificial Sequence: Synthetic oligonucleotide
gugcaugggugagcaaccc

SEQ ID NO: 128006 - RNA, 19 nt, Artificial Sequence
  Description of Artificial Sequence: Synthetic oligonucleotide
gguguucuacauucguaua

SEQ ID NO: 128007 - RNA, 19 nt, Artificial Sequence
  Description of Artificial Sequence: Synthetic oligonucleotide
acagaugccguaaccucua

SEQ ID NO: 128008 - RNA, 19 nt, Artificial Sequence
  Description of Artificial Sequence: Synthetic oligonucleotide
ggucgaauaccgugccuuc

SEQ ID NO: 128009 - RNA, 19 nt, Artificial Sequence
  Description of Artificial Sequence: Synthetic oligonucleotide
caccauagugcucgaucca

SEQ ID NO: 128010 - RNA, 19 nt, Artificial Sequence
  Description of Artificial Sequence: Synthetic oligonucleotide
gaugguccacaagcugaca

SEQ ID NO: 128011 - RNA, 19 nt, Artificial Sequence
  Description of Artificial Sequence: Synthetic oligonucleotide
gauuuaccccagaauuuau

SEQ ID NO: 128012 - RNA, 19 nt, Artificial Sequence
  Description of Artificial Sequence: Synthetic oligonucleotide
augugaaguaagacacuua

SEQ ID NO: 128013 - RNA, 19 nt, Artificial Sequence
  Description of Artificial Sequence: Synthetic oligonucleotide
caucauaaaucuggcaaau

SEQ ID NO: 128014 - RNA, 19 nt, Artificial Sequence
  Description of Artificial Sequence: Synthetic oligonucleotide
cagguaugucccguugcuc

SEQ ID NO: 128015 - RNA, 19 nt, Artificial Sequence
  Description of Artificial Sequence: Synthetic oligonucleotide
ccgagguguucuacauucg

SEQ ID NO: 128016 - RNA, 19 nt, Artificial Sequence
  Description of Artificial Sequence: Synthetic oligonucleotide
agugaaccccuagcuaauu

SEQ ID NO: 128017 - RNA, 19 nt, Artificial Sequence
  Description of Artificial Sequence: Synthetic oligonucleotide
ccgcaagugaaccccuagc

SEQ ID NO: 128018 - RNA, 19 nt, Artificial Sequence
  Description of Artificial Sequence: Synthetic oligonucleotide
ucuccgccgauaugcuauu

SEQ ID NO: 128019 - RNA, 19 nt, Artificial Sequence
  Description of Artificial Sequence: Synthetic oligonucleotide
cccaucgcggucgaauacc

SEQ ID NO: 128020 - RNA, 19 nt, Artificial Sequence
  Description of Artificial Sequence: Synthetic oligonucleotide
cacucgaagugaucuccaa

SEQ ID NO: 128021 - RNA, 19 nt, Artificial Sequence
  Description of Artificial Sequence: Synthetic oligonucleotide
ggacagucuguaauaccca

SEQ ID NO: 128022 - RNA, 19 nt, Artificial Sequence
  Description of Artificial Sequence: Synthetic oligonucleotide
cucaaugcaccugggagau

SEQ ID NO: 128023 - RNA, 19 nt, Artificial Sequence
  Description of Artificial Sequence: Synthetic oligonucleotide
  modified_base (15)..(15): a, c, u, g, unknown or other
cauguccaccuuacnuaaa

SEQ ID NO: 128024 - RNA, 19 nt, Artificial Sequence
  Description of Artificial Sequence: Synthetic oligonucleotide
ucuccagaacaggcccuaa

SEQ ID NO: 128025 - RNA, 19 nt, Artificial Sequence
  Description of Artificial Sequence: Synthetic oligonucleotide
cgcauacgcagagauggcg

SEQ ID NO: 128026 - RNA, 19 nt, Artificial Sequence
  Description of Artificial Sequence: Synthetic oligonucleotide
cggaguuuucgaugacagg

SEQ ID NO: 128027 - RNA, 19 nt, Artificial Sequence
  Description of Artificial Sequence: Synthetic oligonucleotide
ggacgcauacgcagagaug

SEQ ID NO: 128028 - RNA, 19 nt, Artificial Sequence
  Description of Artificial Sequence: Synthetic oligonucleotide
gaccgacgaccugagcaga

SEQ ID NO: 128029 - RNA, 19 nt, Artificial Sequence
  Description of Artificial Sequence: Synthetic oligonucleotide
caagagucgucgcuggauu

SEQ ID NO: 128030 - RNA, 19 nt, Artificial Sequence
  Description of Artificial Sequence: Synthetic oligonucleotide
aggaaucguccgucagguu

SEQ ID NO: 128031 - RNA, 19 nt, Artificial Sequence
  Description of Artificial Sequence: Synthetic oligonucleotide
cguaaccucuaaaaugcaa

SEQ ID NO: 128032 - RNA, 19 nt, Artificial Sequence
  Description of Artificial Sequence: Synthetic oligonucleotide
ccuuaccuuuggaaaauua

SEQ ID NO: 128033 - RNA, 19 nt, Artificial Sequence
  Description of Artificial Sequence: Synthetic oligonucleotide
gugucggugggugguaaua

SEQ ID NO: 128034 - RNA, 19 nt, Artificial Sequence
  Description of Artificial Sequence: Synthetic oligonucleotide
gagugucggugggugguaa

SEQ ID NO: 128035 - RNA, 19 nt, Artificial Sequence
  Description of Artificial Sequence: Synthetic oligonucleotide
cccuggguguuauuucuca

SEQ ID NO: 128036 - RNA, 19 nt, Artificial Sequence
  Description of Artificial Sequence: Synthetic oligonucleotide
accgacgaccugagcagaa

SEQ ID NO: 128037 - RNA, 19 nt, Artificial Sequence
  Description of Artificial Sequence: Synthetic oligonucleotide
ggugagcaacccugggugu

SEQ ID NO: 128038 - RNA, 19 nt, Artificial Sequence
  Description of Artificial Sequence: Synthetic oligonucleotide
cgccgauaugcuauuaaaa

SEQ ID NO: 128039 - RNA, 19 nt, Artificial Sequence
  Description of Artificial Sequence: Synthetic oligonucleotide
agcaacccuggguguuauu

SEQ ID NO: 128040 - RNA, 19 nt, Artificial Sequence
  Description of Artificial Sequence: Synthetic oligonucleotide
ccgccgauaugcuauuaaa

SEQ ID NO: 128041 - RNA, 19 nt, Artificial Sequence
  Description of Artificial Sequence: Synthetic oligonucleotide
ccacucgaagugaucucca

SEQ ID NO: 128042 - RNA, 19 nt, Artificial Sequence
  Description of Artificial Sequence: Synthetic oligonucleotide
cgcggucgaauaccgugcc

SEQ ID NO: 128043 - RNA, 19 nt, Artificial Sequence
  Description of Artificial Sequence: Synthetic oligonucleotide
ggaguccgugauagacagc

SEQ ID NO: 128044 - RNA, 19 nt, Artificial Sequence
  Description of Artificial Sequence: Synthetic oligonucleotide
cagaugccguaaccucuaa

SEQ ID NO: 128045 - RNA, 19 nt, Artificial Sequence
  Description of Artificial Sequence: Synthetic oligonucleotide
ccgacgaccugagcagaag

SEQ ID NO: 128046 - RNA, 19 nt, Artificial Sequence
  Description of Artificial Sequence: Synthetic oligonucleotide
ccuuucggcaugggauuug

SEQ ID NO: 128047 - RNA, 19 nt, Artificial Sequence
  Description of Artificial Sequence: Synthetic oligonucleotide
cuucgccaagguccagugu

SEQ ID NO: 128048 - RNA, 19 nt, Artificial Sequence
  Description of Artificial Sequence: Synthetic oligonucleotide
ccagguaugucccguugcu

SEQ ID NO: 128049 - RNA, 19 nt, Artificial Sequence
  Description of Artificial Sequence: Synthetic oligonucleotide
cugugcgggcaagcagguc

SEQ ID NO: 128050 - RNA, 19 nt, Artificial Sequence
  Description of Artificial Sequence: Synthetic oligonucleotide
cccggaguuuucgaugaca

SEQ ID NO: 128051 - RNA, 19 nt, Artificial Sequence
  Description of Artificial Sequence: Synthetic oligonucleotide
caucgcggucgaauaccgu

SEQ ID NO: 128052 - RNA, 19 nt, Artificial Sequence
  Description of Artificial Sequence: Synthetic oligonucleotide
accgugccuucgaucucgu

SEQ ID NO: 128053 - RNA, 19 nt, Artificial Sequence
  Description of Artificial Sequence: Synthetic oligonucleotide
gugagcaacccuggguguu

SEQ ID NO: 128054 - RNA, 19 nt, Artificial Sequence
  Description of Artificial Sequence: Synthetic oligonucleotide
gcagaccuuagaguauuau

SEQ ID NO: 128055 - RNA, 19 nt, Artificial Sequence
  Description of Artificial Sequence: Synthetic oligonucleotide
gcggagauagguggguggu

SEQ ID NO: 128056 - RNA, 19 nt, Artificial Sequence
  Description of Artificial Sequence: Synthetic oligonucleotide
caccaccgcaguagaugcu

SEQ ID NO: 128057 - RNA, 19 nt, Artificial Sequence
  Description of Artificial Sequence: Synthetic oligonucleotide
ccuucgaucucgugagcau

SEQ ID NO: 128058 - RNA, 19 nt, Artificial Sequence
  Description of Artificial Sequence: Synthetic oligonucleotide
gccuuugaucuggucuaaa

SEQ ID NO: 128059 - RNA, 19 nt, Artificial Sequence
  Description of Artificial Sequence: Synthetic oligonucleotide
uugugccgauugggacaau

SEQ ID NO: 128060 - RNA, 19 nt, Artificial Sequence
  Description of Artificial Sequence: Synthetic oligonucleotide
ccccggaguuuucgaugac

SEQ ID NO: 128061 - RNA, 19 nt, Artificial Sequence
  Description of Artificial Sequence: Synthetic oligonucleotide
ccaagagucgucgcuggau

SEQ ID NO: 128062 - RNA, 19 nt, Artificial Sequence
  Description of Artificial Sequence: Synthetic oligonucleotide
gcggucgaauaccgugccu

SEQ ID NO: 128063 - RNA, 19 nt, Artificial Sequence
  Description of Artificial Sequence: Synthetic oligonucleotide
ccugugcgggcaagcaggu

SEQ ID NO: 128064 - RNA, 19 nt, Artificial Sequence
  Description of Artificial Sequence: Synthetic oligonucleotide
gccuucccaucgcggucga

SEQ ID NO: 128065 - RNA, 19 nt, Artificial Sequence
  Description of Artificial Sequence: Synthetic oligonucleotide
ccaccgcaguagaugcucu

SEQ ID NO: 128066 - RNA, 19 nt, Artificial Sequence
  Description of Artificial Sequence: Synthetic oligonucleotide
ccgagugucgguggguggu

SEQ ID NO: 128067 - RNA, 19 nt, Artificial Sequence
  Description of Artificial Sequence: Synthetic oligonucleotide
cgaucucgugagcauuagu

SEQ ID NO: 128068 - RNA, 19 nt, Artificial Sequence
  Description of Artificial Sequence: Synthetic oligonucleotide
gccuuucggcaugggauuu

SEQ ID NO: 128069 - RNA, 19 nt, Artificial Sequence
  Description of Artificial Sequence: Synthetic oligonucleotide
cggucgaauaccgugccuu

SEQ ID NO: 128070 - RNA, 19 nt, Artificial Sequence
  Description of Artificial Sequence: Synthetic oligonucleotide
cacguggguugugccgauu

SEQ ID NO: 128071 - RNA, 19 nt, Artificial Sequence
  Description of Artificial Sequence: Synthetic oligonucleotide
cccuuaccuuuggaaaauu

SEQ ID NO: 128072 - RNA, 19 nt, Artificial Sequence
  Description of Artificial Sequence: Synthetic oligonucleotide
aacucagaagcuuaacagc

SEQ ID NO: 128073 - RNA, 19 nt, Artificial Sequence
  Description of Artificial Sequence: Synthetic oligonucleotide
aacuuagagcuccugaaac

SEQ ID NO: 128074 - RNA, 19 nt, Artificial Sequence
  Description of Artificial Sequence: Synthetic oligonucleotide
aacuacuacaccaaaauag

SEQ ID NO: 128075 - RNA, 19 nt, Artificial Sequence
  Description of Artificial Sequence: Synthetic oligonucleotide
agaucuaacaagaaggugg

SEQ ID NO: 128076 - RNA, 19 nt, Artificial Sequence
  Description of Artificial Sequence: Synthetic oligonucleotide
guuagauccacacuggucc

SEQ ID NO: 128077 - RNA, 19 nt, Artificial Sequence
  Description of Artificial Sequence: Synthetic oligonucleotide
ugaucuggccaucaaaagg

SEQ ID NO: 128078 - RNA, 19 nt, Artificial Sequence
  Description of Artificial Sequence: Synthetic oligonucleotide
aagcugacgacacacgacg

SEQ ID NO: 128079 - RNA, 19 nt, Artificial Sequence
  Description of Artificial Sequence: Synthetic oligonucleotide
ugugauauccacccacugg

SEQ ID NO: 128080 - RNA, 19 nt, Artificial Sequence
  Description of Artificial Sequence: Synthetic oligonucleotide
acgucugugauauccaccc

SEQ ID NO: 128081 - RNA, 19 nt, Artificial Sequence
  Description of Artificial Sequence: Synthetic oligonucleotide
auaauguugucacuguuug

SEQ ID NO: 128082 - RNA, 19 nt, Artificial Sequence
  Description of Artificial Sequence: Synthetic oligonucleotide
gaagcuuaacagcacagcc

SEQ ID NO: 128083 - RNA, 19 nt, Artificial Sequence
  Description of Artificial Sequence: Synthetic oligonucleotide
acccgaugaauccagaagg

SEQ ID NO: 128084 - RNA, 19 nt, Artificial Sequence
  Description of Artificial Sequence: Synthetic oligonucleotide
gauauaauccccgggaccc

SEQ ID NO: 128085 - RNA, 19 nt, Artificial Sequence
  Description of Artificial Sequence: Synthetic oligonucleotide
ucgggugugaguauaaugu

SEQ ID NO: 128086 - RNA, 19 nt, Artificial Sequence
  Description of Artificial Sequence: Synthetic oligonucleotide
auacuguaaacuaaguggg

SEQ ID NO: 128087 - RNA, 19 nt, Artificial Sequence
  Description of Artificial Sequence: Synthetic oligonucleotide
uccgcauugggucuguagg

SEQ ID NO: 128088 - RNA, 19 nt, Artificial Sequence
  Description of Artificial Sequence: Synthetic oligonucleotide
aagcuuaacagcacagccc

SEQ ID NO: 128089 - RNA, 19 nt, Artificial Sequence
  Description of Artificial Sequence: Synthetic oligonucleotide
cuaacaagaaggugguggg

SEQ ID NO: 128090 - RNA, 19 nt, Artificial Sequence
  Description of Artificial Sequence: Synthetic oligonucleotide
agguggauagguccuaacc

SEQ ID NO: 128091 - RNA, 19 nt, Artificial Sequence
  Description of Artificial Sequence: Synthetic oligonucleotide
gauugagucuccuuaagga

SEQ ID NO: 128092 - RNA, 19 nt, Artificial Sequence
  Description of Artificial Sequence: Synthetic oligonucleotide
acuacuacaccaaaauagg

SEQ ID NO: 128093 - RNA, 19 nt, Artificial Sequence
  Description of Artificial Sequence: Synthetic oligonucleotide
ugaaacugggaacuguaca

SEQ ID NO: 128094 - RNA, 19 nt, Artificial Sequence
  Description of Artificial Sequence: Synthetic oligonucleotide
aacccgaugaauccagaag

SEQ ID NO: 128095 - RNA, 19 nt, Artificial Sequence
  Description of Artificial Sequence: Synthetic oligonucleotide
ggaaacuagaucuaacaag

SEQ ID NO: 128096 - RNA, 19 nt, Artificial Sequence
  Description of Artificial Sequence: Synthetic oligonucleotide
ucacuauugggguagcuug

SEQ ID NO: 128097 - RNA, 19 nt, Artificial Sequence
  Description of Artificial Sequence: Synthetic oligonucleotide
agguccuaacccuuggccc

SEQ ID NO: 128098 - RNA, 19 nt, Artificial Sequence
  Description of Artificial Sequence: Synthetic oligonucleotide
acacgcauaacgccgcugc

SEQ ID NO: 128099 - RNA, 19 nt, Artificial Sequence
  Description of Artificial Sequence: Synthetic oligonucleotide
uucuaauguucuuuggucu

SEQ ID NO: 128100 - RNA, 19 nt, Artificial Sequence
  Description of Artificial Sequence: Synthetic oligonucleotide
gugauauccacccacuggc

SEQ ID NO: 128101 - RNA, 19 nt, Artificial Sequence
  Description of Artificial Sequence: Synthetic oligonucleotide
guaggagucuccuguaugg

SEQ ID NO: 128102 - RNA, 19 nt, Artificial Sequence
  Description of Artificial Sequence: Synthetic oligonucleotide
uacuguaaacuaagugggg

SEQ ID NO: 128103 - RNA, 19 nt, Artificial Sequence
  Description of Artificial Sequence: Synthetic oligonucleotide
ugugaguauaauguuguca

SEQ ID NO: 128104 - RNA, 19 nt, Artificial Sequence
  Description of Artificial Sequence: Synthetic oligonucleotide
aggucuuggccacaguucg

SEQ ID NO: 128105 - RNA, 19 nt, Artificial Sequence
  Description of Artificial Sequence: Synthetic oligonucleotide
uggaaacuagaucuaacaa

SEQ ID NO: 128106 - RNA, 19 nt, Artificial Sequence
  Description of Artificial Sequence: Synthetic oligonucleotide
cuggaagauauaauccccg

SEQ ID NO: 128107 - RNA, 19 nt, Artificial Sequence
  Description of Artificial Sequence: Synthetic oligonucleotide
uugauagcaaaguuggcau

SEQ ID NO: 128108 - RNA, 19 nt, Artificial Sequence
  Description of Artificial Sequence: Synthetic oligonucleotide
ugagcaagucauaaugggu

SEQ ID NO: 128109 - RNA, 19 nt, Artificial Sequence
  Description of Artificial Sequence: Synthetic oligonucleotide
aacacguuccuucucacua

SEQ ID NO: 128110 - RNA, 19 nt, Artificial Sequence
  Description of Artificial Sequence: Synthetic oligonucleotide
agagugguagccacgaugg

SEQ ID NO: 128111 - RNA, 19 nt, Artificial Sequence
  Description of Artificial Sequence: Synthetic oligonucleotide
acccguuagauccacacug

SEQ ID NO: 128112 - RNA, 19 nt, Artificial Sequence
  Description of Artificial Sequence: Synthetic oligonucleotide
aaaucaguccuucccuugu

SEQ ID NO: 128113 - RNA, 19 nt, Artificial Sequence
  Description of Artificial Sequence: Synthetic oligonucleotide
uacgcugucucuuggacca

SEQ ID NO: 128114 - RNA, 19 nt, Artificial Sequence
  Description of Artificial Sequence: Synthetic oligonucleotide
aacccagcaucccgcauac

SEQ ID NO: 128115 - RNA, 19 nt, Artificial Sequence
  Description of Artificial Sequence: Synthetic oligonucleotide
uguaggagucuccuguaug

SEQ ID NO: 128116 - RNA, 19 nt, Artificial Sequence
  Description of Artificial Sequence: Synthetic oligonucleotide
uguaccuggcacuuggcca

SEQ ID NO: 128117 - RNA, 19 nt, Artificial Sequence
  Description of Artificial Sequence: Synthetic oligonucleotide
ucaccaacuugucugccag

SEQ ID NO: 128118 - RNA, 19 nt, Artificial Sequence
  Description of Artificial Sequence: Synthetic oligonucleotide
cauacuugcagcggcagcg

SEQ ID NO: 128119 - RNA, 19 nt, Artificial Sequence
  Description of Artificial Sequence: Synthetic oligonucleotide
caguaauggcuuuagauca

SEQ ID NO: 128120 - RNA, 19 nt, Artificial Sequence
  Description of Artificial Sequence: Synthetic oligonucleotide
aaacuacuacaccaaaaua

SEQ ID NO: 128121 - RNA, 19 nt, Artificial Sequence
  Description of Artificial Sequence: Synthetic oligonucleotide
uguuuaccuaaacuacuac

SEQ ID NO: 128122 - RNA, 19 nt, Artificial Sequence
  Description of Artificial Sequence: Synthetic oligonucleotide
aaugggugaagacuucgau

SEQ ID NO: 128123 - RNA, 19 nt, Artificial Sequence
  Description of Artificial Sequence: Synthetic oligonucleotide
cuacuacaccaaaauaggc

SEQ ID NO: 128124 - RNA, 19 nt, Artificial Sequence
  Description of Artificial Sequence: Synthetic oligonucleotide
uccuguauggcaguugugc

SEQ ID NO: 128125 - RNA, 19 nt, Artificial Sequence
  Description of Artificial Sequence: Synthetic oligonucleotide
ugggcguucaucacaaggu

SEQ ID NO: 128126 - RNA, 19 nt, Artificial Sequence
  Description of Artificial Sequence: Synthetic oligonucleotide
uuagcuucgggugugagua

SEQ ID NO: 128127 - RNA, 19 nt, Artificial Sequence
  Description of Artificial Sequence: Synthetic oligonucleotide
uagguccuaacccuuggcc

SEQ ID NO: 128128 - RNA, 19 nt, Artificial Sequence
  Description of Artificial Sequence: Synthetic oligonucleotide
agaucugugaggagaagcg

SEQ ID NO: 128129 - RNA, 19 nt, Artificial Sequence
  Description of Artificial Sequence: Synthetic oligonucleotide
cacaauacagcaugcugag

SEQ ID NO: 128130 - RNA, 19 nt, Artificial Sequence
  Description of Artificial Sequence: Synthetic oligonucleotide
agcagcgucauuugcaugu

SEQ ID NO: 128131 - RNA, 19 nt, Artificial Sequence
  Description of Artificial Sequence: Synthetic oligonucleotide
cagcgcaacauguuguugg

SEQ ID NO: 128132 - RNA, 19 nt, Artificial Sequence
  Description of Artificial Sequence: Synthetic oligonucleotide
acagucaacccgaugaauc

SEQ ID NO: 128133 - RNA, 19 nt, Artificial Sequence
  Description of Artificial Sequence: Synthetic oligonucleotide
agucacugacaccccaccc

SEQ ID NO: 128134 - RNA, 19 nt, Artificial Sequence
  Description of Artificial Sequence: Synthetic oligonucleotide
agacuguucagccuagacu

SEQ ID NO: 128135 - RNA, 19 nt, Artificial Sequence
  Description of Artificial Sequence: Synthetic oligonucleotide
auaaugggugaagacuucg

SEQ ID NO: 128136 - RNA, 19 nt, Artificial Sequence
  Description of Artificial Sequence: Synthetic oligonucleotide
acccacgucugugauaucc

SEQ ID NO: 128137 - RNA, 19 nt, Artificial Sequence
  Description of Artificial Sequence: Synthetic oligonucleotide
gucacugacaccccacccg

SEQ ID NO: 128138 - RNA, 19 nt, Artificial Sequence
  Description of Artificial Sequence: Synthetic oligonucleotide
cuggcacuuggccaaaugg

SEQ ID NO: 128139 - RNA, 19 nt, Artificial Sequence
  Description of Artificial Sequence: Synthetic oligonucleotide
aacaacgcacauuguccag

SEQ ID NO: 128140 - RNA, 19 nt, Artificial Sequence
  Description of Artificial Sequence: Synthetic oligonucleotide
ucugugauauccacccacu

SEQ ID NO: 128141 - RNA, 19 nt, Artificial Sequence
  Description of Artificial Sequence: Synthetic oligonucleotide
cuugggacggaagucagcc

SEQ ID NO: 128142 - RNA, 19 nt, Artificial Sequence
  Description of Artificial Sequence: Synthetic oligonucleotide
ucagccuagacuugggauc

SEQ ID NO: 128143 - RNA, 19 nt, Artificial Sequence
  Description of Artificial Sequence: Synthetic oligonucleotide
auggguuugagccguaccu

SEQ ID NO: 128144 - RNA, 19 nt, Artificial Sequence
  Description of Artificial Sequence: Synthetic oligonucleotide
aagucauaaugggugaaga

SEQ ID NO: 128145 - RNA, 19 nt, Artificial Sequence
  Description of Artificial Sequence: Synthetic oligonucleotide
ugaggguccgcucguaccc

SEQ ID NO: 128146 - RNA, 19 nt, Artificial Sequence
  Description of Artificial Sequence: Synthetic oligonucleotide
aggugugacuuugacacac

SEQ ID NO: 128147 - RNA, 19 nt, Artificial Sequence
  Description of Artificial Sequence: Synthetic oligonucleotide
uucgggugugaguauaaug

SEQ ID NO: 128148 - RNA, 19 nt, Artificial Sequence
  Description of Artificial Sequence: Synthetic oligonucleotide
cucgugacagaaaacugac

SEQ ID NO: 128149 - RNA, 19 nt, Artificial Sequence
  Description of Artificial Sequence: Synthetic oligonucleotide
gguggauagguccuaaccc

SEQ ID NO: 128150 - RNA, 19 nt, Artificial Sequence
  Description of Artificial Sequence: Synthetic oligonucleotide
acaacgcacauuguccagc

SEQ ID NO: 128151 - RNA, 19 nt, Artificial Sequence
  Description of Artificial Sequence: Synthetic oligonucleotide
cuugauagcaaaguuggca

SEQ ID NO: 128152 - RNA, 19 nt, Artificial Sequence
  Description of Artificial Sequence: Synthetic oligonucleotide
uguacgggacuccuugcgc

SEQ ID NO: 128153 - RNA, 19 nt, Artificial Sequence
  Description of Artificial Sequence: Synthetic oligonucleotide
caguucgucccuaaggaac

SEQ ID NO: 128154 - RNA, 19 nt, Artificial Sequence
  Description of Artificial Sequence: Synthetic oligonucleotide
gagagcuccgcauuggguc

SEQ ID NO: 128155 - RNA, 19 nt, Artificial Sequence
  Description of Artificial Sequence: Synthetic oligonucleotide
cagucaacccgaugaaucc

SEQ ID NO: 128156 - RNA, 19 nt, Artificial Sequence
  Description of Artificial Sequence: Synthetic oligonucleotide
acuggcgguuccuaagcac

SEQ ID NO: 128157 - RNA, 19 nt, Artificial Sequence
  Description of Artificial Sequence: Synthetic oligonucleotide
ugggacggaagucagcccu

SEQ ID NO: 128158 - RNA, 19 nt, Artificial Sequence
  Description of Artificial Sequence: Synthetic oligonucleotide
ucgucccuaaggaacuuag

SEQ ID NO: 128159 - RNA, 19 nt, Artificial Sequence
  Description of Artificial Sequence: Synthetic oligonucleotide
ugugcaguaauggcuuuag

SEQ ID NO: 128160 - RNA, 19 nt, Artificial Sequence
  Description of Artificial Sequence: Synthetic oligonucleotide
gagccauugagcgugagca

SEQ ID NO: 128161 - RNA, 19 nt, Artificial Sequence
  Description of Artificial Sequence: Synthetic oligonucleotide
aagcugucgacaggugacc

SEQ ID NO: 128162 - RNA, 19 nt, Artificial Sequence
  Description of Artificial Sequence: Synthetic oligonucleotide
caagcugucgacaggugac

SEQ ID NO: 128163 - RNA, 19 nt, Artificial Sequence
  Description of Artificial Sequence: Synthetic oligonucleotide
ugucgacaggugaccaugg

SEQ ID NO: 128164 - RNA, 19 nt, Artificial Sequence
  Description of Artificial Sequence: Synthetic oligonucleotide
gaauggagggaauggaaaa

SEQ ID NO: 128165 - RNA, 19 nt, Artificial Sequence
  Description of Artificial Sequence: Synthetic oligonucleotide
uaccguaccuccacggccc

SEQ ID NO: 128166 - RNA, 19 nt, Artificial Sequence
  Description of Artificial Sequence: Synthetic oligonucleotide
uggcauaucccagaccaag

SEQ ID NO: 128167 - RNA, 19 nt, Artificial Sequence
  Description of Artificial Sequence: Synthetic oligonucleotide
gcaguaauggcuuuagauc

SEQ ID NO: 128168 - RNA, 19 nt, Artificial Sequence
  Description of Artificial Sequence: Synthetic oligonucleotide
gauggguuugagccguacc

SEQ ID NO: 128169 - RNA, 19 nt, Artificial Sequence
  Description of Artificial Sequence: Synthetic oligonucleotide
aaacccagcaucccgcaua

SEQ ID NO: 128170 - RNA, 19 nt, Artificial Sequence
  Description of Artificial Sequence: Synthetic oligonucleotide
gcccaaacaacgcacauug

SEQ ID NO: 128171 - RNA, 19 nt, Artificial Sequence
  Description of Artificial Sequence: Synthetic oligonucleotide
uucagccuagacuugggau

SEQ ID NO: 128172 - RNA, 19 nt, Artificial Sequence
  Description of Artificial Sequence: Synthetic oligonucleotide
gacauuuacaaagcaccac

SEQ ID NO: 128173 - RNA, 19 nt, Artificial Sequence
  Description of Artificial Sequence: Synthetic oligonucleotide
augucaugccgguaggugu

SEQ ID NO: 128174 - RNA, 19 nt, Artificial Sequence
  Description of Artificial Sequence: Synthetic oligonucleotide
ucguaccguaccuccacgg

SEQ ID NO: 128175 - RNA, 19 nt, Artificial Sequence
  Description of Artificial Sequence: Synthetic oligonucleotide
auuagcuucgggugugagu

SEQ ID NO: 128176 - RNA, 19 nt, Artificial Sequence
  Description of Artificial Sequence: Synthetic oligonucleotide
ucucacagcagcgucauuu

SEQ ID NO: 128177 - RNA, 19 nt, Artificial Sequence
  Description of Artificial Sequence: Synthetic oligonucleotide
cauugggucuguaggaguc

SEQ ID NO: 128178 - RNA, 19 nt, Artificial Sequence
  Description of Artificial Sequence: Synthetic oligonucleotide
ugcagcggaccucacucag

SEQ ID NO: 128179 - RNA, 19 nt, Artificial Sequence
  Description of Artificial Sequence: Synthetic oligonucleotide
uuagauccacacuggucca

SEQ ID NO: 128180 - RNA, 19 nt, Artificial Sequence
  Description of Artificial Sequence: Synthetic oligonucleotide
acagauugagucuccuuaa

SEQ ID NO: 128181 - RNA, 19 nt, Artificial Sequence
  Description of Artificial Sequence: Synthetic oligonucleotide
cugugggugaaaguggggc

SEQ ID NO: 128182 - RNA, 19 nt, Artificial Sequence
  Description of Artificial Sequence: Synthetic oligonucleotide
uaucuggugugugagcaga

SEQ ID NO: 128183 - RNA, 19 nt, Artificial Sequence
  Description of Artificial Sequence: Synthetic oligonucleotide
aaguacgcugucucuugga

SEQ ID NO: 128184 - RNA, 19 nt, Artificial Sequence
  Description of Artificial Sequence: Synthetic oligonucleotide
agcaccacuuagauggagg

SEQ ID NO: 128185 - RNA, 19 nt, Artificial Sequence
  Description of Artificial Sequence: Synthetic oligonucleotide
ugcgccuggacuuuggcuu

SEQ ID NO: 128186 - RNA, 19 nt, Artificial Sequence
  Description of Artificial Sequence: Synthetic oligonucleotide
gacuccacuucuaauguuc

SEQ ID NO: 128187 - RNA, 19 nt, Artificial Sequence
  Description of Artificial Sequence: Synthetic oligonucleotide
agagaauacuguaaacuaa

SEQ ID NO: 128188 - RNA, 19 nt, Artificial Sequence
  Description of Artificial Sequence: Synthetic oligonucleotide
ucauuugcauguugacaac

SEQ ID NO: 128189 - RNA, 19 nt, Artificial Sequence
  Description of Artificial Sequence: Synthetic oligonucleotide
uccucggugcccaaacaac

SEQ ID NO: 128190 - RNA, 19 nt, Artificial Sequence
  Description of Artificial Sequence: Synthetic oligonucleotide
ugucaugccgguagguguc

SEQ ID NO: 128191 - RNA, 19 nt, Artificial Sequence
  Description of Artificial Sequence: Synthetic oligonucleotide
caagcugacgacacacgac

SEQ ID NO: 128192 - RNA, 19 nt, Artificial Sequence
  Description of Artificial Sequence: Synthetic oligonucleotide
uuggagaccuucucagagu

SEQ ID NO: 128193 - RNA, 19 nt, Artificial Sequence
  Description of Artificial Sequence: Synthetic oligonucleotide
gaacuuagagcuccugaaa

SEQ ID NO: 128194 - RNA, 19 nt, Artificial Sequence
  Description of Artificial Sequence: Synthetic oligonucleotide
caacgcacauuguccagcc

SEQ ID NO: 128195 - RNA, 19 nt, Artificial Sequence
  Description of Artificial Sequence: Synthetic oligonucleotide
guaccguaccuccacggcc

SEQ ID NO: 128196 - RNA, 19 nt, Artificial Sequence
  Description of Artificial Sequence: Synthetic oligonucleotide
ggauccaacaggaaaucag

SEQ ID NO: 128197 - RNA, 19 nt, Artificial Sequence
  Description of Artificial Sequence: Synthetic oligonucleotide
cacaguucgucccuaagga

SEQ ID NO: 128198 - RNA, 19 nt, Artificial Sequence
  Description of Artificial Sequence: Synthetic oligonucleotide
uuuccucaugggcacaaua

SEQ ID NO: 128199 - RNA, 19 nt, Artificial Sequence
  Description of Artificial Sequence: Synthetic oligonucleotide
acgacgcuggcugagauga

SEQ ID NO: 128200 - RNA, 19 nt, Artificial Sequence
  Description of Artificial Sequence: Synthetic oligonucleotide
guaguaguggcuguugaca

SEQ ID NO: 128201 - RNA, 19 nt, Artificial Sequence
  Description of Artificial Sequence: Synthetic oligonucleotide
uuccucggugcccaaacaa

SEQ ID NO: 128202 - RNA, 19 nt, Artificial Sequence
  Description of Artificial Sequence: Synthetic oligonucleotide
cuguacgggacuccuugcg

SEQ ID NO: 128203 - RNA, 19 nt, Artificial Sequence
  Description of Artificial Sequence: Synthetic oligonucleotide
ucggugcccaaacaacgca

SEQ ID NO: 128204 - RNA, 19 nt, Artificial Sequence
  Description of Artificial Sequence: Synthetic oligonucleotide
uguggcguccagccuuggg

SEQ ID NO: 128205 - RNA, 19 nt, Artificial Sequence
  Description of Artificial Sequence: Synthetic oligonucleotide
guacgggacuccuugcgcc

SEQ ID NO: 128206 - RNA, 19 nt, Artificial Sequence
  Description of Artificial Sequence: Synthetic oligonucleotide
cucggugcccaaacaacgc

SEQ ID NO: 128207 - RNA, 19 nt, Artificial Sequence
  Description of Artificial Sequence: Synthetic oligonucleotide
caaguacgcugucucuugg

SEQ ID NO: 128208 - RNA, 19 nt, Artificial Sequence
  Description of Artificial Sequence: Synthetic oligonucleotide
gauguggacagaggggcug

SEQ ID NO: 128209 - RNA, 19 nt, Artificial Sequence
  Description of Artificial Sequence: Synthetic oligonucleotide
ccuggaagauauaaucccc

SEQ ID NO: 128210 - RNA, 19 nt, Artificial Sequence
  Description of Artificial Sequence: Synthetic oligonucleotide
cauaacgccgcugcacucc

SEQ ID NO: 128211 - RNA, 19 nt, Artificial Sequence
  Description of Artificial Sequence: Synthetic oligonucleotide
ucuguacgggacuccuugc

SEQ ID NO: 128212 - RNA, 19 nt, Artificial Sequence
  Description of Artificial Sequence: Synthetic oligonucleotide
uccuguagggcaguuugug

SEQ ID NO: 128213 - RNA, 19 nt, Artificial Sequence
  Description of Artificial Sequence: Synthetic oligonucleotide
cuguaccuggcacuuggcc

SEQ ID NO: 128214 - RNA, 19 nt, Artificial Sequence
  Description of Artificial Sequence: Synthetic oligonucleotide
cauagggccaguccaugug

SEQ ID NO: 128215 - RNA, 19 nt, Artificial Sequence
  Description of Artificial Sequence: Synthetic oligonucleotide
ggacgauccuccaaguacg

SEQ ID NO: 128216 - RNA, 19 nt, Artificial Sequence
  Description of Artificial Sequence: Synthetic oligonucleotide
cagauugagucuccuuaag

SEQ ID NO: 128217 - RNA, 19 nt, Artificial Sequence
  Description of Artificial Sequence: Synthetic oligonucleotide
guacgcugucucuuggacc

SEQ ID NO: 128218 - RNA, 19 nt, Artificial Sequence
  Description of Artificial Sequence: Synthetic oligonucleotide
auacuugcagcggcagcgc

SEQ ID NO: 128219 - RNA, 19 nt, Artificial Sequence
  Description of Artificial Sequence: Synthetic oligonucleotide
cauaaugggugaagacuuc

SEQ ID NO: 128220 - RNA, 19 nt, Artificial Sequence
  Description of Artificial Sequence: Synthetic oligonucleotide
uaaggaacuuagagcuccu

SEQ ID NO: 128221 - RNA, 19 nt, Artificial Sequence
  Description of Artificial Sequence: Synthetic oligonucleotide
uguugacagguaccuggcu

SEQ ID NO: 128222 - RNA, 19 nt, Artificial Sequence
  Description of Artificial Sequence: Synthetic oligonucleotide
ggcaaucgaugucaugccg

SEQ ID NO: 128223 - RNA, 19 nt, Artificial Sequence
  Description of Artificial Sequence: Synthetic oligonucleotide
cuuggacaggcaguuuucc

SEQ ID NO: 128224 - RNA, 19 nt, Artificial Sequence
  Description of Artificial Sequence: Synthetic oligonucleotide
guuuccucggugcccaaac

SEQ ID NO: 128225 - RNA, 19 nt, Artificial Sequence
  Description of Artificial Sequence: Synthetic oligonucleotide
acgcauaacgccgcugcac

SEQ ID NO: 128226 - RNA, 19 nt, Artificial Sequence
  Description of Artificial Sequence: Synthetic oligonucleotide
gucaccacucccaacccag

SEQ ID NO: 128227 - RNA, 19 nt, Artificial Sequence
  Description of Artificial Sequence: Synthetic oligonucleotide
agagcuccgcauugggucu

SEQ ID NO: 128228 - RNA, 19 nt, Artificial Sequence
  Description of Artificial Sequence: Synthetic oligonucleotide
ucaacccgaugaauccaga

SEQ ID NO: 128229 - RNA, 19 nt, Artificial Sequence
  Description of Artificial Sequence: Synthetic oligonucleotide
uucgggguugcgcccacca

SEQ ID NO: 128230 - RNA, 19 nt, Artificial Sequence
  Description of Artificial Sequence: Synthetic oligonucleotide
ugacaaccauucugagacc

SEQ ID NO: 128231 - RNA, 19 nt, Artificial Sequence
  Description of Artificial Sequence: Synthetic oligonucleotide
uccagcugagaagcgcccg

SEQ ID NO: 128232 - RNA, 19 nt, Artificial Sequence
  Description of Artificial Sequence: Synthetic oligonucleotide
cagaacacguuccuucuca

SEQ ID NO: 128233 - RNA, 19 nt, Artificial Sequence
  Description of Artificial Sequence: Synthetic oligonucleotide
agcgucauuugcauguuga

SEQ ID NO: 128234 - RNA, 19 nt, Artificial Sequence
  Description of Artificial Sequence: Synthetic oligonucleotide
ucugugccggagcagcgaa

SEQ ID NO: 128235 - RNA, 19 nt, Artificial Sequence
  Description of Artificial Sequence: Synthetic oligonucleotide
cagccuagacuugggaucc

SEQ ID NO: 128236 - RNA, 19 nt, Artificial Sequence
  Description of Artificial Sequence: Synthetic oligonucleotide
caucccgcauacaacccug

SEQ ID NO: 128237 - RNA, 19 nt, Artificial Sequence
  Description of Artificial Sequence: Synthetic oligonucleotide
aauccccgggacccacguc

SEQ ID NO: 128238 - RNA, 19 nt, Artificial Sequence
  Description of Artificial Sequence: Synthetic oligonucleotide
acggcccucacccaccuga

SEQ ID NO: 128239 - RNA, 19 nt, Artificial Sequence
  Description of Artificial Sequence: Synthetic oligonucleotide
agagcucgugacagaaaac

SEQ ID NO: 128240 - RNA, 19 nt, Artificial Sequence
  Description of Artificial Sequence: Synthetic oligonucleotide
gaucuaacaagaagguggu

SEQ ID NO: 128241 - RNA, 19 nt, Artificial Sequence
  Description of Artificial Sequence: Synthetic oligonucleotide
uggauagguccuaacccuu

SEQ ID NO: 128242 - RNA, 19 nt, Artificial Sequence
  Description of Artificial Sequence: Synthetic oligonucleotide
aagcgcaacaagcgccggu

SEQ ID NO: 128243 - RNA, 19 nt, Artificial Sequence
  Description of Artificial Sequence: Synthetic oligonucleotide
aguucgucccuaaggaacu

SEQ ID NO: 128244 - RNA, 19 nt, Artificial Sequence
  Description of Artificial Sequence: Synthetic oligonucleotide
ggaacuuagagcuccugaa

SEQ ID NO: 128245 - RNA, 19 nt, Artificial Sequence
  Description of Artificial Sequence: Synthetic oligonucleotide
gucaacccgaugaauccag

SEQ ID NO: 128246 - RNA, 19 nt, Artificial Sequence
  Description of Artificial Sequence: Synthetic oligonucleotide
agcgcaacauguuguugga

SEQ ID NO: 128247 - RNA, 19 nt, Artificial Sequence
  Description of Artificial Sequence: Synthetic oligonucleotide
uccaggaauuagagcuggc

SEQ ID NO: 128248 - RNA, 19 nt, Artificial Sequence
  Description of Artificial Sequence: Synthetic oligonucleotide
accccaacaucuucugagu

SEQ ID NO: 128249 - RNA, 19 nt, Artificial Sequence
  Description of Artificial Sequence: Synthetic oligonucleotide
cauacaacccugcuguugu

SEQ ID NO: 128250 - RNA, 19 nt, Artificial Sequence
  Description of Artificial Sequence: Synthetic oligonucleotide
cugacgacacacgacgcug

SEQ ID NO: 128251 - RNA, 19 nt, Artificial Sequence
  Description of Artificial Sequence: Synthetic oligonucleotide
cagagagagcuccgcauug

SEQ ID NO: 128252 - RNA, 19 nt, Artificial Sequence
  Description of Artificial Sequence: Synthetic oligonucleotide
uggcguccagccuugggac

SEQ ID NO: 128253 - RNA, 19 nt, Artificial Sequence
  Description of Artificial Sequence: Synthetic oligonucleotide
ugagcggacgauccuccaa

SEQ ID NO: 128254 - RNA, 19 nt, Artificial Sequence
  Description of Artificial Sequence: Synthetic oligonucleotide
acuauugggguagcuugug

SEQ ID NO: 128255 - RNA, 19 nt, Artificial Sequence
  Description of Artificial Sequence: Synthetic oligonucleotide
uauaauccccgggacccac

SEQ ID NO: 128256 - RNA, 19 nt, Artificial Sequence
  Description of Artificial Sequence: Synthetic oligonucleotide
uccugaaacugggaacugu

SEQ ID NO: 128257 - RNA, 19 nt, Artificial Sequence
  Description of Artificial Sequence: Synthetic oligonucleotide
accacucccucuucggggu

SEQ ID NO: 128258 - RNA, 19 nt, Artificial Sequence
  Description of Artificial Sequence: Synthetic oligonucleotide
cugugauauccacccacug

SEQ ID NO: 128259 - RNA, 19 nt, Artificial Sequence
  Description of Artificial Sequence: Synthetic oligonucleotide
acagcccuuguauaacuuu

SEQ ID NO: 128260 - RNA, 19 nt, Artificial Sequence
  Description of Artificial Sequence: Synthetic oligonucleotide
ggagacuccauucaccucu

SEQ ID NO: 128261 - RNA, 19 nt, Artificial Sequence
  Description of Artificial Sequence: Synthetic oligonucleotide
gaggucuuggccacaguuc

SEQ ID NO: 128262 - RNA, 19 nt, Artificial Sequence
  Description of Artificial Sequence: Synthetic oligonucleotide
ccucggugcccaaacaacg

SEQ ID NO: 128263 - RNA, 19 nt, Artificial Sequence
  Description of Artificial Sequence: Synthetic oligonucleotide
agcugacgacacacgacgc

SEQ ID NO: 128264 - RNA, 19 nt, Artificial Sequence
  Description of Artificial Sequence: Synthetic oligonucleotide
cugucgacaggugaccaug

SEQ ID NO: 128265 - RNA, 19 nt, Artificial Sequence
  Description of Artificial Sequence: Synthetic oligonucleotide
agcgcaacaagcgccggug

SEQ ID NO: 128266 - RNA, 19 nt, Artificial Sequence
  Description of Artificial Sequence: Synthetic oligonucleotide
ugccggagcagcgaacccc

SEQ ID NO: 128267 - RNA, 19 nt, Artificial Sequence
  Description of Artificial Sequence: Synthetic oligonucleotide
aacgcacauuguccagcca

SEQ ID NO: 128268 - RNA, 19 nt, Artificial Sequence
  Description of Artificial Sequence: Synthetic oligonucleotide
uacuugcagcggcagcgca

SEQ ID NO: 128269 - RNA, 19 nt, Artificial Sequence
  Description of Artificial Sequence: Synthetic oligonucleotide
uugggacggaagucagccc

SEQ ID NO: 128270 - RNA, 19 nt, Artificial Sequence
  Description of Artificial Sequence: Synthetic oligonucleotide
gugggugaaaguggggccc

SEQ ID NO: 128271 - RNA, 19 nt, Artificial Sequence
  Description of Artificial Sequence: Synthetic oligonucleotide
gucauacuugcagcggcag

SEQ ID NO: 128272 - RNA, 19 nt, Artificial Sequence
  Description of Artificial Sequence: Synthetic oligonucleotide
auaacgccgcugcacuccu

SEQ ID NO: 128273 - RNA, 19 nt, Artificial Sequence
  Description of Artificial Sequence: Synthetic oligonucleotide
guggguggcacaccacccc

SEQ ID NO: 128274 - RNA, 19 nt, Artificial Sequence
  Description of Artificial Sequence: Synthetic oligonucleotide
agcgaaccccgcucaucac

SEQ ID NO: 128275 - RNA, 19 nt, Artificial Sequence
  Description of Artificial Sequence: Synthetic oligonucleotide
caccuggacaggguggccg

SEQ ID NO: 128276 - RNA, 19 nt, Artificial Sequence
  Description of Artificial Sequence: Synthetic oligonucleotide
ggcauuggagaccuucuca

SEQ ID NO: 128277 - RNA, 19 nt, Artificial Sequence
  Description of Artificial Sequence: Synthetic oligonucleotide
agucaacccgaugaaucca

SEQ ID NO: 128278 - RNA, 19 nt, Artificial Sequence
  Description of Artificial Sequence: Synthetic oligonucleotide
gacucgcugcccgucauac

SEQ ID NO: 128279 - RNA, 19 nt, Artificial Sequence
  Description of Artificial Sequence: Synthetic oligonucleotide
ugagcgugagcaagucaua

SEQ ID NO: 128280 - RNA, 19 nt, Artificial Sequence
  Description of Artificial Sequence: Synthetic oligonucleotide
accguaccuccacggcccc

SEQ ID NO: 128281 - RNA, 19 nt, Artificial Sequence
  Description of Artificial Sequence: Synthetic oligonucleotide
auacagcaugcugagcgga

SEQ ID NO: 128282 - RNA, 19 nt, Artificial Sequence
  Description of Artificial Sequence: Synthetic oligonucleotide
uacgggacuccuugcgccu

SEQ ID NO: 128283 - RNA, 19 nt, Artificial Sequence
  Description of Artificial Sequence: Synthetic oligonucleotide
gacgauccuccaaguacgc

SEQ ID NO: 128284 - RNA, 19 nt, Artificial Sequence
  Description of Artificial Sequence: Synthetic oligonucleotide
ucgggguugcgcccaccag

SEQ ID NO: 128285 - RNA, 19 nt, Artificial Sequence
  Description of Artificial Sequence: Synthetic oligonucleotide
uccucuguacgggacuccu

SEQ ID NO: 128286 - RNA, 19 nt, Artificial Sequence
  Description of Artificial Sequence: Synthetic oligonucleotide
gcccucacccaccugacgc

SEQ ID NO: 128287 - RNA, 19 nt, Artificial Sequence
  Description of Artificial Sequence: Synthetic oligonucleotide
gaagcgcaacaagcgccgg

SEQ ID NO: 128288 - RNA, 19 nt, Artificial Sequence
  Description of Artificial Sequence: Synthetic oligonucleotide
cccuuguuuaccuaaacua

SEQ ID NO: 128289 - RNA, 19 nt, Artificial Sequence
  Description of Artificial Sequence: Synthetic oligonucleotide
cccguuagauccacacugg

SEQ ID NO: 128290 - RNA, 19 nt, Artificial Sequence
  Description of Artificial Sequence: Synthetic oligonucleotide
gccauugagcgugagcaag

SEQ ID NO: 128291 - RNA, 19 nt, Artificial Sequence
  Description of Artificial Sequence: Synthetic oligonucleotide
gguccuaacccuuggccca

SEQ ID NO: 128292 - RNA, 19 nt, Artificial Sequence
  Description of Artificial Sequence: Synthetic oligonucleotide
gacggaagucagcccugcc

SEQ ID NO: 128293 - RNA, 19 nt, Artificial Sequence
  Description of Artificial Sequence: Synthetic oligonucleotide
agguguccuugauagcaaa

SEQ ID NO: 128294 - RNA, 19 nt, Artificial Sequence
  Description of Artificial Sequence: Synthetic oligonucleotide
uggugggucccugcccugg

SEQ ID NO: 128295 - RNA, 19 nt, Artificial Sequence
  Description of Artificial Sequence: Synthetic oligonucleotide
gaccauuagcuucgggugu

SEQ ID NO: 128296 - RNA, 19 nt, Artificial Sequence
  Description of Artificial Sequence: Synthetic oligonucleotide
gggauaagguaagggacug

SEQ ID NO: 128297 - RNA, 19 nt, Artificial Sequence
  Description of Artificial Sequence: Synthetic oligonucleotide
uggcccucguaccguaccu

SEQ ID NO: 128298 - RNA, 19 nt, Artificial Sequence
  Description of Artificial Sequence: Synthetic oligonucleotide
cugagaugagguuccaccu

SEQ ID NO: 128299 - RNA, 19 nt, Artificial Sequence
  Description of Artificial Sequence: Synthetic oligonucleotide
gcccgucauacuugcagcg

SEQ ID NO: 128300 - RNA, 19 nt, Artificial Sequence
  Description of Artificial Sequence: Synthetic oligonucleotide
ugcugagcggacgauccuc

SEQ ID NO: 128301 - RNA, 19 nt, Artificial Sequence
  Description of Artificial Sequence: Synthetic oligonucleotide
cagcgaaccccgcucauca

SEQ ID NO: 128302 - RNA, 19 nt, Artificial Sequence
  Description of Artificial Sequence: Synthetic oligonucleotide
gcaacauguuguuggagaa

SEQ ID NO: 128303 - RNA, 19 nt, Artificial Sequence
  Description of Artificial Sequence: Synthetic oligonucleotide
cauugagcgugagcaaguc

SEQ ID NO: 128304 - RNA, 19 nt, Artificial Sequence
  Description of Artificial Sequence: Synthetic oligonucleotide
auaauccccgggacccacg

SEQ ID NO: 128305 - RNA, 19 nt, Artificial Sequence
  Description of Artificial Sequence: Synthetic oligonucleotide
cauuagcuucgggugugag

SEQ ID NO: 128306 - RNA, 19 nt, Artificial Sequence
  Description of Artificial Sequence: Synthetic oligonucleotide
auccgggguggugaucugg

SEQ ID NO: 128307 - RNA, 19 nt, Artificial Sequence
  Description of Artificial Sequence: Synthetic oligonucleotide
ucagguggauagguccuaa

SEQ ID NO: 128308 - RNA, 19 nt, Artificial Sequence
  Description of Artificial Sequence: Synthetic oligonucleotide
guggcccucguaccguacc

SEQ ID NO: 128309 - RNA, 19 nt, Artificial Sequence
  Description of Artificial Sequence: Synthetic oligonucleotide
cagguggauagguccuaac

SEQ ID NO: 128310 - RNA, 19 nt, Artificial Sequence
  Description of Artificial Sequence: Synthetic oligonucleotide
agcggacgauccuccaagu

SEQ ID NO: 128311 - RNA, 19 nt, Artificial Sequence
  Description of Artificial Sequence: Synthetic oligonucleotide
gcucgugacagaaaacuga

SEQ ID NO: 128312 - RNA, 19 nt, Artificial Sequence
  Description of Artificial Sequence: Synthetic oligonucleotide
ggcauaucccagaccaagc

SEQ ID NO: 128313 - RNA, 19 nt, Artificial Sequence
  Description of Artificial Sequence: Synthetic oligonucleotide
gagcgugagcaagucauaa

SEQ ID NO: 128314 - RNA, 19 nt, Artificial Sequence
  Description of Artificial Sequence: Synthetic oligonucleotide
cacgucauuugugggguuc

SEQ ID NO: 128315 - RNA, 19 nt, Artificial Sequence
  Description of Artificial Sequence: Synthetic oligonucleotide
cagugcucaugcaggcaac

SEQ ID NO: 128316 - RNA, 19 nt, Artificial Sequence
  Description of Artificial Sequence: Synthetic oligonucleotide
aucuaacaagaagguggug

SEQ ID NO: 128317 - RNA, 19 nt, Artificial Sequence
  Description of Artificial Sequence: Synthetic oligonucleotide
agagagcuccgcauugggu

SEQ ID NO: 128318 - RNA, 19 nt, Artificial Sequence
  Description of Artificial Sequence: Synthetic oligonucleotide
auauaauccccgggaccca

SEQ ID NO: 128319 - RNA, 19 nt, Artificial Sequence
  Description of Artificial Sequence: Synthetic oligonucleotide
guugcgcccaccagccaag

SEQ ID NO: 128320 - RNA, 19 nt, Artificial Sequence
  Description of Artificial Sequence: Synthetic oligonucleotide
cacgacgcuggcugagaug

SEQ ID NO: 128321 - RNA, 19 nt, Artificial Sequence
  Description of Artificial Sequence: Synthetic oligonucleotide
auggcgcuguggguggcac

SEQ ID NO: 128322 - RNA, 19 nt, Artificial Sequence
  Description of Artificial Sequence: Synthetic oligonucleotide
caacccgaugaauccagaa

SEQ ID NO: 128323 - RNA, 19 nt, Artificial Sequence
  Description of Artificial Sequence: Synthetic oligonucleotide
gucagacuguucagccuag

SEQ ID NO: 128324 - RNA, 19 nt, Artificial Sequence
  Description of Artificial Sequence: Synthetic oligonucleotide
ccgucauacuugcagcggc

SEQ ID NO: 128325 - RNA, 19 nt, Artificial Sequence
  Description of Artificial Sequence: Synthetic oligonucleotide
cggacgauccuccaaguac

SEQ ID NO: 128326 - RNA, 19 nt, Artificial Sequence
  Description of Artificial Sequence: Synthetic oligonucleotide
ccacccguuagauccacac

SEQ ID NO: 128327 - RNA, 19 nt, Artificial Sequence
  Description of Artificial Sequence: Synthetic oligonucleotide
gagcagcgaaccccgcuca

SEQ ID NO: 128328 - RNA, 19 nt, Artificial Sequence
  Description of Artificial Sequence: Synthetic oligonucleotide
acgucauuugugggguuca

SEQ ID NO: 128329 - RNA, 19 nt, Artificial Sequence
  Description of Artificial Sequence: Synthetic oligonucleotide
agcuugccccuuccuggag

SEQ ID NO: 128330 - RNA, 19 nt, Artificial Sequence
  Description of Artificial Sequence: Synthetic oligonucleotide
ggagcagcgaaccccgcuc

SEQ ID NO: 128331 - RNA, 19 nt, Artificial Sequence
  Description of Artificial Sequence: Synthetic oligonucleotide
gcgaaccccgcucaucacc

SEQ ID NO: 128332 - RNA, 19 nt, Artificial Sequence
  Description of Artificial Sequence: Synthetic oligonucleotide
agccauugagcgugagcaa

SEQ ID NO: 128333 - RNA, 19 nt, Artificial Sequence
  Description of Artificial Sequence: Synthetic oligonucleotide
acacgacgcuggcugagau

SEQ ID NO: 128334 - RNA, 19 nt, Artificial Sequence
  Description of Artificial Sequence: Synthetic oligonucleotide
cuccuguauggcaguugug

SEQ ID NO: 128335 - RNA, 19 nt, Artificial Sequence
  Description of Artificial Sequence: Synthetic oligonucleotide
caggguggccgaagcuugc

SEQ ID NO: 128336 - RNA, 19 nt, Artificial Sequence
  Description of Artificial Sequence: Synthetic oligonucleotide
gcggcagcgcaacauguug

SEQ ID NO: 128337 - RNA, 19 nt, Artificial Sequence
  Description of Artificial Sequence: Synthetic oligonucleotide
uuagagcuggcugcuccua

SEQ ID NO: 128338 - RNA, 19 nt, Artificial Sequence
  Description of Artificial Sequence: Synthetic oligonucleotide
guaccagguguccuugaua

SEQ ID NO: 128339 - RNA, 19 nt, Artificial Sequence
  Description of Artificial Sequence: Synthetic oligonucleotide
cuuuuggcacuggcgagga

SEQ ID NO: 128340 - RNA, 19 nt, Artificial Sequence
  Description of Artificial Sequence: Synthetic oligonucleotide
cccuaguagcugcacauuc

SEQ ID NO: 128341 - RNA, 19 nt, Artificial Sequence
  Description of Artificial Sequence: Synthetic oligonucleotide
caaucgaugucaugccggu

SEQ ID NO: 128342 - RNA, 19 nt, Artificial Sequence
  Description of Artificial Sequence: Synthetic oligonucleotide
gagugugcaguaauggcuu

SEQ ID NO: 128343 - RNA, 19 nt, Artificial Sequence
  Description of Artificial Sequence: Synthetic oligonucleotide
gggcguucaucacaagguc

SEQ ID NO: 128344 - RNA, 19 nt, Artificial Sequence
  Description of Artificial Sequence: Synthetic oligonucleotide
cguuagauccacacugguc

SEQ ID NO: 128345 - RNA, 19 nt, Artificial Sequence
  Description of Artificial Sequence: Synthetic oligonucleotide
ccccaaaguuggcacacgc

SEQ ID NO: 128346 - RNA, 19 nt, Artificial Sequence
  Description of Artificial Sequence: Synthetic oligonucleotide
uccuaccagcugugugaug

SEQ ID NO: 128347 - RNA, 19 nt, Artificial Sequence
  Description of Artificial Sequence: Synthetic oligonucleotide
ggcguccagccuugggacg

SEQ ID NO: 128348 - RNA, 19 nt, Artificial Sequence
  Description of Artificial Sequence: Synthetic oligonucleotide
cucugugaagggcauggcu

SEQ ID NO: 128349 - RNA, 19 nt, Artificial Sequence
  Description of Artificial Sequence: Synthetic oligonucleotide
ccacuggcgguuccuaagc

SEQ ID NO: 128350 - RNA, 19 nt, Artificial Sequence
  Description of Artificial Sequence: Synthetic oligonucleotide
ccagcgggagacuccauuc

SEQ ID NO: 128351 - RNA, 19 nt, Artificial Sequence
  Description of Artificial Sequence: Synthetic oligonucleotide
caccacuuagauggagguc

SEQ ID NO: 128352 - RNA, 19 nt, Artificial Sequence
  Description of Artificial Sequence: Synthetic oligonucleotide
cacagaccauuagcuucgg

SEQ ID NO: 128353 - RNA, 19 nt, Artificial Sequence
  Description of Artificial Sequence: Synthetic oligonucleotide
gcccucguaccguaccucc

SEQ ID NO: 128354 - RNA, 19 nt, Artificial Sequence
  Description of Artificial Sequence: Synthetic oligonucleotide
gccacaguucgucccuaag

SEQ ID NO: 128355 - RNA, 19 nt, Artificial Sequence
  Description of Artificial Sequence: Synthetic oligonucleotide
acaagcgccgguguccaua

SEQ ID NO: 128356 - RNA, 19 nt, Artificial Sequence
  Description of Artificial Sequence: Synthetic oligonucleotide
ugcacuccuguagggcagu

SEQ ID NO: 128357 - RNA, 19 nt, Artificial Sequence
  Description of Artificial Sequence: Synthetic oligonucleotide
gaggguccgcucguacccc

SEQ ID NO: 128358 - RNA, 19 nt, Artificial Sequence
  Description of Artificial Sequence: Synthetic oligonucleotide
acgauccuccaaguacgcu

SEQ ID NO: 128359 - RNA, 19 nt, Artificial Sequence
  Description of Artificial Sequence: Synthetic oligonucleotide
guagccacgauggcgcugu

SEQ ID NO: 128360 - RNA, 19 nt, Artificial Sequence
  Description of Artificial Sequence: Synthetic oligonucleotide
gguugcgcccaccagccaa

SEQ ID NO: 128361 - RNA, 19 nt, Artificial Sequence
  Description of Artificial Sequence: Synthetic oligonucleotide
aacaagcgccgguguccau

SEQ ID NO: 128362 - RNA, 19 nt, Artificial Sequence
  Description of Artificial Sequence: Synthetic oligonucleotide
cacuauugggguagcuugu

SEQ ID NO: 128363 - RNA, 19 nt, Artificial Sequence
  Description of Artificial Sequence: Synthetic oligonucleotide
gccggagcagcgaaccccg

SEQ ID NO: 128364 - RNA, 19 nt, Artificial Sequence
  Description of Artificial Sequence: Synthetic oligonucleotide
gcccaagggcauuggagac

SEQ ID NO: 128365 - RNA, 19 nt, Artificial Sequence
  Description of Artificial Sequence: Synthetic oligonucleotide
gcguccagccuugggacgg

SEQ ID NO: 128366 - RNA, 19 nt, Artificial Sequence
  Description of Artificial Sequence: Synthetic oligonucleotide
cugugccggagcagcgaac

SEQ ID NO: 128367 - RNA, 19 nt, Artificial Sequence
  Description of Artificial Sequence: Synthetic oligonucleotide
gcuggauccaacaggaaau

SEQ ID NO: 128368 - RNA, 19 nt, Artificial Sequence
  Description of Artificial Sequence: Synthetic oligonucleotide
cacacgcauaacgccgcug

SEQ ID NO: 128369 - RNA, 19 nt, Artificial Sequence
  Description of Artificial Sequence: Synthetic oligonucleotide
ccacgucugugauauccac

SEQ ID NO: 128370 - RNA, 19 nt, Artificial Sequence
  Description of Artificial Sequence: Synthetic oligonucleotide
agccagacucgcugcccgu

SEQ ID NO: 128371 - RNA, 19 nt, Artificial Sequence
  Description of Artificial Sequence: Synthetic oligonucleotide
agcuucgggugugaguaua

SEQ ID NO: 128372 - RNA, 19 nt, Artificial Sequence
  Description of Artificial Sequence: Synthetic oligonucleotide
cacuggcgguuccuaagca

SEQ ID NO: 128373 - RNA, 19 nt, Artificial Sequence
  Description of Artificial Sequence: Synthetic oligonucleotide
uccuugcgccuggacuuug

SEQ ID NO: 128374 - RNA, 19 nt, Artificial Sequence
  Description of Artificial Sequence: Synthetic oligonucleotide
cccagcaucccgcauacaa

SEQ ID NO: 128375 - RNA, 19 nt, Artificial Sequence
  Description of Artificial Sequence: Synthetic oligonucleotide
cguaccguaccuccacggc

SEQ ID NO: 128376 - RNA, 19 nt, Artificial Sequence
  Description of Artificial Sequence: Synthetic oligonucleotide
cccgaugaauccagaagga

SEQ ID NO: 128377 - RNA, 19 nt, Artificial Sequence
  Description of Artificial Sequence: Synthetic oligonucleotide
agacuucgaugcuguggua

SEQ ID NO: 128378 - RNA, 19 nt, Artificial Sequence
  Description of Artificial Sequence: Synthetic oligonucleotide
ggacccacgucugugauau

SEQ ID NO: 128379 - RNA, 19 nt, Artificial Sequence
  Description of Artificial Sequence: Synthetic oligonucleotide
gagcuccgcauugggucug

SEQ ID NO: 128380 - RNA, 19 nt, Artificial Sequence
  Description of Artificial Sequence: Synthetic oligonucleotide
gcgggagacuccauucacc

SEQ ID NO: 128381 - RNA, 19 nt, Artificial Sequence
  Description of Artificial Sequence: Synthetic oligonucleotide
caccugcuuuuggaagccc

SEQ ID NO: 128382 - RNA, 19 nt, Artificial Sequence
  Description of Artificial Sequence: Synthetic oligonucleotide
cccgucauacuugcagcgg

SEQ ID NO: 128383 - RNA, 19 nt, Artificial Sequence
  Description of Artificial Sequence: Synthetic oligonucleotide
cacgcauaacgccgcugca

SEQ ID NO: 128384 - RNA, 19 nt, Artificial Sequence
  Description of Artificial Sequence: Synthetic oligonucleotide
ccuaccagcugugugaugu

SEQ ID NO: 128385 - RNA, 19 nt, Artificial Sequence
  Description of Artificial Sequence: Synthetic oligonucleotide
ccuucccuuguuuaccuaa

SEQ ID NO: 128386 - RNA, 19 nt, Artificial Sequence
  Description of Artificial Sequence: Synthetic oligonucleotide
gcaccacuuagauggaggu

SEQ ID NO: 128387 - RNA, 19 nt, Artificial Sequence
  Description of Artificial Sequence: Synthetic oligonucleotide
cugacgccccagagcgcag

SEQ ID NO: 128388 - RNA, 19 nt, Artificial Sequence
  Description of Artificial Sequence: Synthetic oligonucleotide
gcagcggaccucacucagg

SEQ ID NO: 128389 - RNA, 19 nt, Artificial Sequence
  Description of Artificial Sequence: Synthetic oligonucleotide
agacucgcugcccgucaua

SEQ ID NO: 128390 - RNA, 19 nt, Artificial Sequence
  Description of Artificial Sequence: Synthetic oligonucleotide
acgccccagagcgcaggcg

SEQ ID NO: 128391 - RNA, 19 nt, Artificial Sequence
  Description of Artificial Sequence: Synthetic oligonucleotide
gguaccuggcugggaaaac

SEQ ID NO: 128392 - RNA, 19 nt, Artificial Sequence
  Description of Artificial Sequence: Synthetic oligonucleotide
cuggggcccaagggcauug

SEQ ID NO: 128393 - RNA, 19 nt, Artificial Sequence
  Description of Artificial Sequence: Synthetic oligonucleotide
caugggcacaauacagcau

SEQ ID NO: 128394 - RNA, 19 nt, Artificial Sequence
  Description of Artificial Sequence: Synthetic oligonucleotide
cucacuauugggguagcuu

SEQ ID NO: 128395 - RNA, 19 nt, Artificial Sequence
  Description of Artificial Sequence: Synthetic oligonucleotide
ccuggcacuuggccaaaug

SEQ ID NO: 128396 - RNA, 19 nt, Artificial Sequence
  Description of Artificial Sequence: Synthetic oligonucleotide
cugagcggacgauccucca

SEQ ID NO: 128397 - RNA, 19 nt, Artificial Sequence
  Description of Artificial Sequence: Synthetic oligonucleotide
cauccgggguggugaucug

SEQ ID NO: 128398 - RNA, 19 nt, Artificial Sequence
  Description of Artificial Sequence: Synthetic oligonucleotide
agguuguuccugagccgcu

SEQ ID NO: 128399 - RNA, 19 nt, Artificial Sequence
  Description of Artificial Sequence: Synthetic oligonucleotide
ggacggaagucagcccugc

SEQ ID NO: 128400 - RNA, 19 nt, Artificial Sequence
  Description of Artificial Sequence: Synthetic oligonucleotide
ccucacucagguggauagg

SEQ ID NO: 128401 - RNA, 19 nt, Artificial Sequence
  Description of Artificial Sequence: Synthetic oligonucleotide
gcugacgacacacgacgcu

SEQ ID NO: 128402 - RNA, 19 nt, Artificial Sequence
  Description of Artificial Sequence: Synthetic oligonucleotide
cuggcgaggauggguuuga

SEQ ID NO: 128403 - RNA, 19 nt, Artificial Sequence
  Description of Artificial Sequence: Synthetic oligonucleotide
ccgcauugggucuguagga

SEQ ID NO: 128404 - RNA, 19 nt, Artificial Sequence
  Description of Artificial Sequence: Synthetic oligonucleotide
gcaagucauaaugggugaa

SEQ ID NO: 128405 - RNA, 19 nt, Artificial Sequence
  Description of Artificial Sequence: Synthetic oligonucleotide
cucugugccggagcagcga

SEQ ID NO: 128406 - RNA, 19 nt, Artificial Sequence
  Description of Artificial Sequence: Synthetic oligonucleotide
gcgcaacauguuguuggag

SEQ ID NO: 128407 - RNA, 19 nt, Artificial Sequence
  Description of Artificial Sequence: Synthetic oligonucleotide
agcggcagcgcaacauguu

SEQ ID NO: 128408 - RNA, 19 nt, Artificial Sequence
  Description of Artificial Sequence: Synthetic oligonucleotide
cgccccagagcgcaggcgc

SEQ ID NO: 128409 - RNA, 19 nt, Artificial Sequence
  Description of Artificial Sequence: Synthetic oligonucleotide
gcaucccgcauacaacccu

SEQ ID NO: 128410 - RNA, 19 nt, Artificial Sequence
  Description of Artificial Sequence: Synthetic oligonucleotide
cacacgacgcuggcugaga

SEQ ID NO: 128411 - RNA, 19 nt, Artificial Sequence
  Description of Artificial Sequence: Synthetic oligonucleotide
gcuguggcguccagccuug

SEQ ID NO: 128412 - RNA, 19 nt, Artificial Sequence
  Description of Artificial Sequence: Synthetic oligonucleotide
ccugacgccccagagcgca

SEQ ID NO: 128413 - RNA, 19 nt, Artificial Sequence
  Description of Artificial Sequence: Synthetic oligonucleotide
cacaccaccccaacaucuu

SEQ ID NO: 128414 - RNA, 19 nt, Artificial Sequence
  Description of Artificial Sequence: Synthetic oligonucleotide
ccaagcgcaccugcuuuug

SEQ ID NO: 128415 - RNA, 19 nt, Artificial Sequence
  Description of Artificial Sequence: Synthetic oligonucleotide
caccagccaagcgcaccug

SEQ ID NO: 128416 - RNA, 19 nt, Artificial Sequence
  Description of Artificial Sequence: Synthetic oligonucleotide
agccuagacuugggauccu

SEQ ID NO: 128417 - RNA, 19 nt, Artificial Sequence
  Description of Artificial Sequence: Synthetic oligonucleotide
ccgaugaauccagaaggaa

SEQ ID NO: 128418 - RNA, 19 nt, Artificial Sequence
  Description of Artificial Sequence: Synthetic oligonucleotide
cgcaacaagcgccgguguc

SEQ ID NO: 128419 - RNA, 19 nt, Artificial Sequence
  Description of Artificial Sequence: Synthetic oligonucleotide
gacccacgucugugauauc

SEQ ID NO: 128420 - RNA, 19 nt, Artificial Sequence
  Description of Artificial Sequence: Synthetic oligonucleotide
accccacccguuagaucca

SEQ ID NO: 128421 - RNA, 19 nt, Artificial Sequence
  Description of Artificial Sequence: Synthetic oligonucleotide
cacguuccuucucacuauu

SEQ ID NO: 128422 - RNA, 19 nt, Artificial Sequence
  Description of Artificial Sequence: Synthetic oligonucleotide
gcuucgggugugaguauaa

SEQ ID NO: 128423 - RNA, 19 nt, Artificial Sequence
  Description of Artificial Sequence: Synthetic oligonucleotide
gcggacgauccuccaagua

SEQ ID NO: 128424 - RNA, 19 nt, Artificial Sequence
  Description of Artificial Sequence: Synthetic oligonucleotide
gcgcccggggccgugggag

SEQ ID NO: 128425 - RNA, 19 nt, Artificial Sequence
  Description of Artificial Sequence: Synthetic oligonucleotide
ggcagcgcaacauguuguu

SEQ ID NO: 128426 - RNA, 19 nt, Artificial Sequence
  Description of Artificial Sequence: Synthetic oligonucleotide
caguggcccucguaccgua

SEQ ID NO: 128427 - RNA, 19 nt, Artificial Sequence
  Description of Artificial Sequence: Synthetic oligonucleotide
ggccgaagcuugccccuuc

SEQ ID NO: 128428 - RNA, 19 nt, Artificial Sequence
  Description of Artificial Sequence: Synthetic oligonucleotide
gggacccacgucugugaua

SEQ ID NO: 128429 - RNA, 19 nt, Artificial Sequence
  Description of Artificial Sequence: Synthetic oligonucleotide
cuccuaccagcugugugau

SEQ ID NO: 128430 - RNA, 19 nt, Artificial Sequence
  Description of Artificial Sequence: Synthetic oligonucleotide
cuucgggugugaguauaau

SEQ ID NO: 128431 - RNA, 19 nt, Artificial Sequence
  Description of Artificial Sequence: Synthetic oligonucleotide
ccaguaagcugagguaucu

SEQ ID NO: 128432 - RNA, 19 nt, Artificial Sequence
  Description of Artificial Sequence: Synthetic oligonucleotide
guagggcaguuugugucuu

SEQ ID NO: 128433 - RNA, 19 nt, Artificial Sequence
  Description of Artificial Sequence: Synthetic oligonucleotide
gcugucgacaggugaccau

SEQ ID NO: 128434 - RNA, 19 nt, Artificial Sequence
  Description of Artificial Sequence: Synthetic oligonucleotide
ggcccucguaccguaccuc

SEQ ID NO: 128435 - RNA, 19 nt, Artificial Sequence
  Description of Artificial Sequence: Synthetic oligonucleotide
ccacccacuggcaaucgau

SEQ ID NO: 128436 - RNA, 19 nt, Artificial Sequence
  Description of Artificial Sequence: Synthetic oligonucleotide
gccagacucgcugcccguc

SEQ ID NO: 128437 - RNA, 19 nt, Artificial Sequence
  Description of Artificial Sequence: Synthetic oligonucleotide
cgguuccuaagcacuucca

SEQ ID NO: 128438 - RNA, 19 nt, Artificial Sequence
  Description of Artificial Sequence: Synthetic oligonucleotide
cgucauuugugggguucac

SEQ ID NO: 128439 - RNA, 19 nt, Artificial Sequence
  Description of Artificial Sequence: Synthetic oligonucleotide
cagacucgcugcccgucau

SEQ ID NO: 128440 - RNA, 19 nt, Artificial Sequence
  Description of Artificial Sequence: Synthetic oligonucleotide
ggcucuguucccagacagu

SEQ ID NO: 128441 - RNA, 19 nt, Artificial Sequence
  Description of Artificial Sequence: Synthetic oligonucleotide
gcacuggcgaggauggguu

SEQ ID NO: 128442 - RNA, 19 nt, Artificial Sequence
  Description of Artificial Sequence: Synthetic oligonucleotide
aggauggguuugagccgua

SEQ ID NO: 128443 - RNA, 19 nt, Artificial Sequence
  Description of Artificial Sequence: Synthetic oligonucleotide
ccggagcagcgaaccccgc

SEQ ID NO: 128444 - RNA, 19 nt, Artificial Sequence
  Description of Artificial Sequence: Synthetic oligonucleotide
ggguugcgcccaccagcca

SEQ ID NO: 128445 - RNA, 19 nt, Artificial Sequence
  Description of Artificial Sequence: Synthetic oligonucleotide
cacuggcgaggauggguuu

SEQ ID NO: 128446 - RNA, 19 nt, Artificial Sequence
  Description of Artificial Sequence: Synthetic oligonucleotide
gcgcaacaagcgccggugu

SEQ ID NO: 128447 - RNA, 19 nt, Artificial Sequence
  Description of Artificial Sequence: Synthetic oligonucleotide
gcacacgcauaacgccgcu

SEQ ID NO: 128448 - RNA, 19 nt, Artificial Sequence
  Description of Artificial Sequence: Synthetic oligonucleotide
ggcuuuagaucagguuguu

SEQ ID NO: 128449 - RNA, 19 nt, Artificial Sequence
  Description of Artificial Sequence: Synthetic oligonucleotide
cacugacaccccacccguu

SEQ ID NO: 128450 - RNA, 19 nt, Artificial Sequence
  Description of Artificial Sequence: Synthetic oligonucleotide
cccacccguuagauccaca

SEQ ID NO: 128451 - RNA, 19 nt, Artificial Sequence
  Description of Artificial Sequence: Synthetic oligonucleotide
ccccacccguuagauccac

SEQ ID NO: 128452 - RNA, 19 nt, Artificial Sequence
  Description of Artificial Sequence: Synthetic oligonucleotide
cugcuccuaccagcugugu

SEQ ID NO: 128453 - RNA, 19 nt, Artificial Sequence
  Description of Artificial Sequence: Synthetic oligonucleotide
cggcagcgcaacauguugu

SEQ ID NO: 128454 - RNA, 19 nt, Artificial Sequence
  Description of Artificial Sequence: Synthetic oligonucleotide
cgggugugaguauaauguu

SEQ ID NO: 128455 - RNA, 19 nt, Artificial Sequence
  Description of Artificial Sequence: Synthetic oligonucleotide
cggagcagcgaaccccgcu

SEQ ID NO: 128456 - RNA, 19 nt, Artificial Sequence
  Description of Artificial Sequence: Synthetic oligonucleotide
ccucuguacgggacuccuu

SEQ ID NO: 128457 - RNA, 19 nt, Artificial Sequence
  Description of Artificial Sequence: Synthetic oligonucleotide
gccggcccuggggcccaag

SEQ ID NO: 128458 - RNA, 19 nt, Artificial Sequence
  Description of Artificial Sequence: Synthetic oligonucleotide
gcuccgcauugggucugua

SEQ ID NO: 128459 - RNA, 19 nt, Artificial Sequence
  Description of Artificial Sequence: Synthetic oligonucleotide
ccccuaguagcugcacauu

SEQ ID NO: 128460 - RNA, 19 nt, Artificial Sequence
  Description of Artificial Sequence: Synthetic oligonucleotide
ccacgucauuugugggguu

SEQ ID NO: 128461 - RNA, 19 nt, Artificial Sequence
  Description of Artificial Sequence: Synthetic oligonucleotide
cgggacccacgucugugau

SEQ ID NO: 128462 - RNA, 19 nt, Artificial Sequence
  Description of Artificial Sequence: Synthetic oligonucleotide
aaaauuugaagcuauuuac

SEQ ID NO: 128463 - RNA, 19 nt, Artificial Sequence
  Description of Artificial Sequence: Synthetic oligonucleotide
auacauaguagacaaaugc

SEQ ID NO: 128464 - RNA, 19 nt, Artificial Sequence
  Description of Artificial Sequence: Synthetic oligonucleotide
auggauauaacauuuacuc

SEQ ID NO: 128465 - RNA, 19 nt, Artificial Sequence
  Description of Artificial Sequence: Synthetic oligonucleotide
  modified_base (7)..(7): a, c, u, g, unknown or other
guaaaunucagaaagcugc

SEQ ID NO: 128466 - RNA, 19 nt, Artificial Sequence
  Description of Artificial Sequence: Synthetic oligonucleotide
aaccacgugaccuuuaauc

SEQ ID NO: 128467 - RNA, 19 nt, Artificial Sequence
  Description of Artificial Sequence: Synthetic oligonucleotide
aauaugaucagcugaauuu

SEQ ID NO: 128468 - RNA, 19 nt, Artificial Sequence
  Description of Artificial Sequence: Synthetic oligonucleotide
ugaauagucaaagugagug

SEQ ID NO: 128469 - RNA, 19 nt, Artificial Sequence
  Description of Artificial Sequence: Synthetic oligonucleotide
aauuugaagcuauuuacgu

SEQ ID NO: 128470 - RNA, 19 nt, Artificial Sequence
  Description of Artificial Sequence: Synthetic oligonucleotide
uaaacuguauugaucaggc

SEQ ID NO: 128471 - RNA, 19 nt, Artificial Sequence
  Description of Artificial Sequence: Synthetic oligonucleotide
uuucuauaugcacaugagg

SEQ ID NO: 128472 - RNA, 19 nt, Artificial Sequence
  Description of Artificial Sequence: Synthetic oligonucleotide
aacacaaugguuccagcuc

SEQ ID NO: 128473 - RNA, 19 nt, Artificial Sequence
  Description of Artificial Sequence: Synthetic oligonucleotide
gugacaaugugauacauag

SEQ ID NO: 128474 - RNA, 19 nt, Artificial Sequence
  Description of Artificial Sequence: Synthetic oligonucleotide
uacauaguagacaaaugcc

SEQ ID NO: 128475 - RNA, 19 nt, Artificial Sequence
  Description of Artificial Sequence: Synthetic oligonucleotide
ugcaauucgaccuuuaaaa

SEQ ID NO: 128476 - RNA, 19 nt, Artificial Sequence
  Description of Artificial Sequence: Synthetic oligonucleotide
uguuuaaagacauacucuc

SEQ ID NO: 128477 - RNA, 19 nt, Artificial Sequence
  Description of Artificial Sequence: Synthetic oligonucleotide
uuuagauaacaucugugca

SEQ ID NO: 128478 - RNA, 19 nt, Artificial Sequence
  Description of Artificial Sequence: Synthetic oligonucleotide
guuuagauaacaucugugc

SEQ ID NO: 128479 - RNA, 19 nt, Artificial Sequence
  Description of Artificial Sequence: Synthetic oligonucleotide
aaaugcguaagugacaaug

SEQ ID NO: 128480 - RNA, 19 nt, Artificial Sequence
  Description of Artificial Sequence: Synthetic oligonucleotide
accacgugaccuuuaaucc

SEQ ID NO: 128481 - RNA, 19 nt, Artificial Sequence
  Description of Artificial Sequence: Synthetic oligonucleotide
ugucuauuauauuuugugc

SEQ ID NO: 128482 - RNA, 19 nt, Artificial Sequence
  Description of Artificial Sequence: Synthetic oligonucleotide
aauuacaaaugcguaagug

SEQ ID NO: 128483 - RNA, 19 nt, Artificial Sequence
  Description of Artificial Sequence: Synthetic oligonucleotide
uuggaaucuggaaugauac

SEQ ID NO: 128484 - RNA, 19 nt, Artificial Sequence
  Description of Artificial Sequence: Synthetic oligonucleotide
uacguuuaucuacugauca

SEQ ID NO: 128485 - RNA, 19 nt, Artificial Sequence
  Description of Artificial Sequence: Synthetic oligonucleotide
agugagugugcccaaacgg

SEQ ID NO: 128486 - RNA, 19 nt, Artificial Sequence
  Description of Artificial Sequence: Synthetic oligonucleotide
uuuacugcgauguuaucca

SEQ ID NO: 128487 - RNA, 19 nt, Artificial Sequence
  Description of Artificial Sequence: Synthetic oligonucleotide
ucuugaaagagcaguacga

SEQ ID NO: 128488 - RNA, 19 nt, Artificial Sequence
  Description of Artificial Sequence: Synthetic oligonucleotide
aaagugagugugcccaaac

SEQ ID NO: 128489 - RNA, 19 nt, Artificial Sequence
  Description of Artificial Sequence: Synthetic oligonucleotide
uuagauaacaucugugcaa

SEQ ID NO: 128490 - RNA, 19 nt, Artificial Sequence
  Description of Artificial Sequence: Synthetic oligonucleotide
auuuucagucauucuaggg

SEQ ID NO: 128491 - RNA, 19 nt, Artificial Sequence
  Description of Artificial Sequence: Synthetic oligonucleotide
auagccuauauaguaaaac

SEQ ID NO: 128492 - RNA, 19 nt, Artificial Sequence
  Description of Artificial Sequence: Synthetic oligonucleotide
ugcgauguuauccaguuau

SEQ ID NO: 128493 - RNA, 19 nt, Artificial Sequence
  Description of Artificial Sequence: Synthetic oligonucleotide
augggcgcuacacuuaggc

SEQ ID NO: 128494 - RNA, 19 nt, Artificial Sequence
  Description of Artificial Sequence: Synthetic oligonucleotide
uauaacauuuacucucuga

SEQ ID NO: 128495 - RNA, 19 nt, Artificial Sequence
  Description of Artificial Sequence: Synthetic oligonucleotide
  modified_base (9)..(9): a, c, u, g, unknown or other
ugguaaaunucagaaagcu

SEQ ID NO: 128496 - RNA, 19 nt, Artificial Sequence
  Description of Artificial Sequence: Synthetic oligonucleotide
uuguaauugggcaggacac

SEQ ID NO: 128497 - RNA, 19 nt, Artificial Sequence
  Description of Artificial Sequence: Synthetic oligonucleotide
ucuaaaugagaucgagggc

SEQ ID NO: 128498 - RNA, 19 nt, Artificial Sequence
  Description of Artificial Sequence: Synthetic oligonucleotide
auuagaaccucacccacug

SEQ ID NO: 128499 - RNA, 19 nt, Artificial Sequence
  Description of Artificial Sequence: Synthetic oligonucleotide
aauucaagcaguuguucaa

SEQ ID NO: 128500 - RNA, 19 nt, Artificial Sequence
  Description of Artificial Sequence: Synthetic oligonucleotide
aaagcucuaaaacucuaaa

SEQ ID NO: 128501 - RNA, 19 nt, Artificial Sequence
  Description of Artificial Sequence: Synthetic oligonucleotide
aaguaguucaaaggcuagc

SEQ ID NO: 128502 - RNA, 19 nt, Artificial Sequence
  Description of Artificial Sequence: Synthetic oligonucleotide
aauggauauaacauuuacu

SEQ ID NO: 128503 - RNA, 19 nt, Artificial Sequence
  Description of Artificial Sequence: Synthetic oligonucleotide
acugcgaacaccaucacag

SEQ ID NO: 128504 - RNA, 19 nt, Artificial Sequence
  Description of Artificial Sequence: Synthetic oligonucleotide
aaucaccucacgaugaucu

SEQ ID NO: 128505 - RNA, 19 nt, Artificial Sequence
  Description of Artificial Sequence: Synthetic oligonucleotide
cuauaugcacaugaggucc

SEQ ID NO: 128506 - RNA, 19 nt, Artificial Sequence
  Description of Artificial Sequence: Synthetic oligonucleotide
uugugcuaugaucagaaaa

SEQ ID NO: 128507 - RNA, 19 nt, Artificial Sequence
  Description of Artificial Sequence: Synthetic oligonucleotide
guacaaguaguaucaaaag

SEQ ID NO: 128508 - RNA, 19 nt, Artificial Sequence
  Description of Artificial Sequence: Synthetic oligonucleotide
uucucuauaugcagcgucc

SEQ ID NO: 128509 - RNA, 19 nt, Artificial Sequence
  Description of Artificial Sequence: Synthetic oligonucleotide
aguccuauguucuacaauu

SEQ ID NO: 128510 - RNA, 19 nt, Artificial Sequence
  Description of Artificial Sequence: Synthetic oligonucleotide
auaugcagcguccacgaag

SEQ ID NO: 128511 - RNA, 19 nt, Artificial Sequence
  Description of Artificial Sequence: Synthetic oligonucleotide
  modified_base (6)..(6): a, c, u, g, unknown or other
uaaaunucagaaagcugcu

SEQ ID NO: 128512 - RNA, 19 nt, Artificial Sequence
  Description of Artificial Sequence: Synthetic oligonucleotide
cuuucuauaugcacaugag

SEQ ID NO: 128513 - RNA, 19 nt, Artificial Sequence
  Description of Artificial Sequence: Synthetic oligonucleotide
uuaggccuucucuauaugc

SEQ ID NO: 128514 - RNA, 19 nt, Artificial Sequence
  Description of Artificial Sequence: Synthetic oligonucleotide
uuuaucuacugaucaauau

SEQ ID NO: 128515 - RNA, 19 nt, Artificial Sequence
  Description of Artificial Sequence: Synthetic oligonucleotide
aguagccuguggaagaugc

SEQ ID NO: 128516 - RNA, 19 nt, Artificial Sequence
  Description of Artificial Sequence: Synthetic oligonucleotide
auuacuuaauguuuagaua

SEQ ID NO: 128517 - RNA, 19 nt, Artificial Sequence
  Description of Artificial Sequence: Synthetic oligonucleotide
gguuuaagaagccugugcc

SEQ ID NO: 128518 - RNA, 19 nt, Artificial Sequence
  Description of Artificial Sequence: Synthetic oligonucleotide
uacagguacaaguaguauc

SEQ ID NO: 128519 - RNA, 19 nt, Artificial Sequence
  Description of Artificial Sequence: Synthetic oligonucleotide
gaaccguugagaaucacug

SEQ ID NO: 128520 - RNA, 19 nt, Artificial Sequence
  Description of Artificial Sequence: Synthetic oligonucleotide
gacaucgucauguuggcga

SEQ ID NO: 128521 - RNA, 19 nt, Artificial Sequence
  Description of Artificial Sequence: Synthetic oligonucleotide
aucaacugccgucucuggc

SEQ ID NO: 128522 - RNA, 19 nt, Artificial Sequence
  Description of Artificial Sequence: Synthetic oligonucleotide
gcuauuuacguuuaucuac

SEQ ID NO: 128523 - RNA, 19 nt, Artificial Sequence
  Description of Artificial Sequence: Synthetic oligonucleotide
uaaagcacugacauuguuu

SEQ ID NO: 128524 - RNA, 19 nt, Artificial Sequence
  Description of Artificial Sequence: Synthetic oligonucleotide
uguuacuuccacggaaccg

SEQ ID NO: 128525 - RNA, 19 nt, Artificial Sequence
  Description of Artificial Sequence: Synthetic oligonucleotide
uuugugauagagcuagauu

SEQ ID NO: 128526 - RNA, 19 nt, Artificial Sequence
  Description of Artificial Sequence: Synthetic oligonucleotide
ucgaccuuuaaaauuugaa

SEQ ID NO: 128527 - RNA, 19 nt, Artificial Sequence
  Description of Artificial Sequence: Synthetic oligonucleotide
uggugacuaacccaccuug

SEQ ID NO: 128528 - RNA, 19 nt, Artificial Sequence
  Description of Artificial Sequence: Synthetic oligonucleotide
aguaauuggcuaauguuug

SEQ ID NO: 128529 - RNA, 19 nt, Artificial Sequence
  Description of Artificial Sequence: Synthetic oligonucleotide
augacccuaaacuguauug

SEQ ID NO: 128530 - RNA, 19 nt, Artificial Sequence
  Description of Artificial Sequence: Synthetic oligonucleotide
uuuggugacuaacccaccu

SEQ ID NO: 128531 - RNA, 19 nt, Artificial Sequence
  Description of Artificial Sequence: Synthetic oligonucleotide
uccuauguucuacaauuac

SEQ ID NO: 128532 - RNA, 19 nt, Artificial Sequence
  Description of Artificial Sequence: Synthetic oligonucleotide
uguaucuaaccacgugacc

SEQ ID NO: 128533 - RNA, 19 nt, Artificial Sequence
  Description of Artificial Sequence: Synthetic oligonucleotide
auguuuagauaacaucugu

SEQ ID NO: 128534 - RNA, 19 nt, Artificial Sequence
  Description of Artificial Sequence: Synthetic oligonucleotide
uuuaagaagccugugccuc

SEQ ID NO: 128535 - RNA, 19 nt, Artificial Sequence
  Description of Artificial Sequence: Synthetic oligonucleotide
ucaacugccgucucuggca

SEQ ID NO: 128536 - RNA, 19 nt, Artificial Sequence
  Description of Artificial Sequence: Synthetic oligonucleotide
agagcgaacugagauuagc

SEQ ID NO: 128537 - RNA, 19 nt, Artificial Sequence
  Description of Artificial Sequence: Synthetic oligonucleotide
ugcuuuacugcgauguuau

SEQ ID NO: 128538 - RNA, 19 nt, Artificial Sequence
  Description of Artificial Sequence: Synthetic oligonucleotide
acacucgaguccucguucc

SEQ ID NO: 128539 - RNA, 19 nt, Artificial Sequence
  Description of Artificial Sequence: Synthetic oligonucleotide
aaacccaggcuggcaaucc

SEQ ID NO: 128540 - RNA, 19 nt, Artificial Sequence
  Description of Artificial Sequence: Synthetic oligonucleotide
agcaguacgaacagcuggc

SEQ ID NO: 128541 - RNA, 19 nt, Artificial Sequence
  Description of Artificial Sequence: Synthetic oligonucleotide
gaugacaguugcugcggcg

SEQ ID NO: 128542 - RNA, 19 nt, Artificial Sequence
  Description of Artificial Sequence: Synthetic oligonucleotide
acauagaagagaauuauua

SEQ ID NO: 128543 - RNA, 19 nt, Artificial Sequence
  Description of Artificial Sequence: Synthetic oligonucleotide
gugccaauucaacaagggg

SEQ ID NO: 128544 - RNA, 19 nt, Artificial Sequence
  Description of Artificial Sequence: Synthetic oligonucleotide
cucagaaucaacugccguc

SEQ ID NO: 128545 - RNA, 19 nt, Artificial Sequence
  Description of Artificial Sequence: Synthetic oligonucleotide
uggcaauccuacuuaaggu

SEQ ID NO: 128546 - RNA, 19 nt, Artificial Sequence
  Description of Artificial Sequence: Synthetic oligonucleotide
uuacguuuaucuacugauc

SEQ ID NO: 128547 - RNA, 19 nt, Artificial Sequence
  Description of Artificial Sequence: Synthetic oligonucleotide
gauuagcaguccuauguuc

SEQ ID NO: 128548 - RNA, 19 nt, Artificial Sequence
  Description of Artificial Sequence: Synthetic oligonucleotide
gucuauuauauuuugugcu

SEQ ID NO: 128549 - RNA, 19 nt, Artificial Sequence
  Description of Artificial Sequence: Synthetic oligonucleotide
uggaaugauacugugugau

SEQ ID NO: 128550 - RNA, 19 nt, Artificial Sequence
  Description of Artificial Sequence: Synthetic oligonucleotide
ggcauaugacccuaaacug

SEQ ID NO: 128551 - RNA, 19 nt, Artificial Sequence
  Description of Artificial Sequence: Synthetic oligonucleotide
uccuacuuaaggucaaaau

SEQ ID NO: 128552 - RNA, 19 nt, Artificial Sequence
  Description of Artificial Sequence: Synthetic oligonucleotide
cauccauuguaauugggca

SEQ ID NO: 128553 - RNA, 19 nt, Artificial Sequence
  Description of Artificial Sequence: Synthetic oligonucleotide
ggauugaaaucuaagagga

SEQ ID NO: 128554 - RNA, 19 nt, Artificial Sequence
  Description of Artificial Sequence: Synthetic oligonucleotide
acgaacagcuggcauucac

SEQ ID NO: 128555 - RNA, 19 nt, Artificial Sequence
  Description of Artificial Sequence: Synthetic oligonucleotide
guaauuggcuaauguuugc

SEQ ID NO: 128556 - RNA, 19 nt, Artificial Sequence
  Description of Artificial Sequence: Synthetic oligonucleotide
caucucaagcaauaagguc

SEQ ID NO: 128557 - RNA, 19 nt, Artificial Sequence
  Description of Artificial Sequence: Synthetic oligonucleotide
cacggaaccguugagaauc

SEQ ID NO: 128558 - RNA, 19 nt, Artificial Sequence
  Description of Artificial Sequence: Synthetic oligonucleotide
ugauugggcuuguucaaga

SEQ ID NO: 128559 - RNA, 19 nt, Artificial Sequence
  Description of Artificial Sequence: Synthetic oligonucleotide
uggauguuaucaugggaac

SEQ ID NO: 128560 - RNA, 19 nt, Artificial Sequence
  Description of Artificial Sequence: Synthetic oligonucleotide
ugcggccauacccuguccg

SEQ ID NO: 128561 - RNA, 19 nt, Artificial Sequence
  Description of Artificial Sequence: Synthetic oligonucleotide
ugacccuaaacuguauuga

SEQ ID NO: 128562 - RNA, 19 nt, Artificial Sequence
  Description of Artificial Sequence: Synthetic oligonucleotide
agagggaaucaccucacga

SEQ ID NO: 128563 - RNA, 19 nt, Artificial Sequence
  Description of Artificial Sequence: Synthetic oligonucleotide
ugguguaucuaaccacgug

SEQ ID NO: 128564 - RNA, 19 nt, Artificial Sequence
  Description of Artificial Sequence: Synthetic oligonucleotide
ucaagcaguuguucaauau

SEQ ID NO: 128565 - RNA, 19 nt, Artificial Sequence
  Description of Artificial Sequence: Synthetic oligonucleotide
ucaguccuaucuauugggu

SEQ ID NO: 128566 - RNA, 19 nt, Artificial Sequence
  Description of Artificial Sequence: Synthetic oligonucleotide
uaauuggcuaauguuugcu

SEQ ID NO: 128567 - RNA, 19 nt, Artificial Sequence
  Description of Artificial Sequence: Synthetic oligonucleotide
aaacuguauugaucaggcu

SEQ ID NO: 128568 - RNA, 19 nt, Artificial Sequence
  Description of Artificial Sequence: Synthetic oligonucleotide
uggcaauaaugcauauuac

SEQ ID NO: 128569 - RNA, 19 nt, Artificial Sequence
  Description of Artificial Sequence: Synthetic oligonucleotide
uucgaccuuuaaaauuuga

SEQ ID NO: 128570 - RNA, 19 nt, Artificial Sequence
  Description of Artificial Sequence: Synthetic oligonucleotide
uccacggaaccguugagaa

SEQ ID NO: 128571 - RNA, 19 nt, Artificial Sequence
  Description of Artificial Sequence: Synthetic oligonucleotide
acggcaauguuucccagcu

SEQ ID NO: 128572 - RNA, 19 nt, Artificial Sequence
  Description of Artificial Sequence: Synthetic oligonucleotide
ugagauuagcaguccuaug

SEQ ID NO: 128573 - RNA, 19 nt, Artificial Sequence
  Description of Artificial Sequence: Synthetic oligonucleotide
agggguuagccauccauug

SEQ ID NO: 128574 - RNA, 19 nt, Artificial Sequence
  Description of Artificial Sequence: Synthetic oligonucleotide
  modified_base (14)..(14): a, c, u, g, unknown or other
uggccugguaaaunucaga

SEQ ID NO: 128575 - RNA, 19 nt, Artificial Sequence
  Description of Artificial Sequence: Synthetic oligonucleotide
aaaagcucuaaaacucuaa

SEQ ID NO: 128576 - RNA, 19 nt, Artificial Sequence
  Description of Artificial Sequence: Synthetic oligonucleotide
aauaaagcacugacauugu

SEQ ID NO: 128577 - RNA, 19 nt, Artificial Sequence
  Description of Artificial Sequence: Synthetic oligonucleotide
agaugggcgcuacacuuag

SEQ ID NO: 128578 - RNA, 19 nt, Artificial Sequence
  Description of Artificial Sequence: Synthetic oligonucleotide
aaccguugagaaucacuga

SEQ ID NO: 128579 - RNA, 19 nt, Artificial Sequence
  Description of Artificial Sequence: Synthetic oligonucleotide
uaugacccuaaacuguauu

SEQ ID NO: 128580 - RNA, 19 nt, Artificial Sequence
  Description of Artificial Sequence: Synthetic oligonucleotide
cacgaagccacuuacaggu

SEQ ID NO: 128581 - RNA, 19 nt, Artificial Sequence
  Description of Artificial Sequence: Synthetic oligonucleotide
cacgugaccuuuaauccug

SEQ ID NO: 128582 - RNA, 19 nt, Artificial Sequence
  Description of Artificial Sequence: Synthetic oligonucleotide
ugagaucgagggcuagggc

SEQ ID NO: 128583 - RNA, 19 nt, Artificial Sequence
  Description of Artificial Sequence: Synthetic oligonucleotide
auauaacauuuacucucug

SEQ ID NO: 128584 - RNA, 19 nt, Artificial Sequence
  Description of Artificial Sequence: Synthetic oligonucleotide
acuuaggccuucucuauau

SEQ ID NO: 128585 - RNA, 19 nt, Artificial Sequence
  Description of Artificial Sequence: Synthetic oligonucleotide
agcuauuuacguuuaucua

SEQ ID NO: 128586 - RNA, 19 nt, Artificial Sequence
  Description of Artificial Sequence: Synthetic oligonucleotide
cuggguauguuacuuccac

SEQ ID NO: 128587 - RNA, 19 nt, Artificial Sequence
  Description of Artificial Sequence: Synthetic oligonucleotide
acugcgauguuauccaguu

SEQ ID NO: 128588 - RNA, 19 nt, Artificial Sequence
  Description of Artificial Sequence: Synthetic oligonucleotide
guauguuacuuccacggaa

SEQ ID NO: 128589 - RNA, 19 nt, Artificial Sequence
  Description of Artificial Sequence: Synthetic oligonucleotide
uaaaugagaucgagggcua

SEQ ID NO: 128590 - RNA, 19 nt, Artificial Sequence
  Description of Artificial Sequence: Synthetic oligonucleotide
gguacaaguaguaucaaaa

SEQ ID NO: 128591 - RNA, 19 nt, Artificial Sequence
  Description of Artificial Sequence: Synthetic oligonucleotide
agcugcuuuacugcgaugu

SEQ ID NO: 128592 - RNA, 19 nt, Artificial Sequence
  Description of Artificial Sequence: Synthetic oligonucleotide
ucaaucaggguccgccgcu

SEQ ID NO: 128593 - RNA, 19 nt, Artificial Sequence
  Description of Artificial Sequence: Synthetic oligonucleotide
uguaauugggcaggacaca

SEQ ID NO: 128594 - RNA, 19 nt, Artificial Sequence
  Description of Artificial Sequence: Synthetic oligonucleotide
cacugacauuguuugacac

SEQ ID NO: 128595 - RNA, 19 nt, Artificial Sequence
  Description of Artificial Sequence: Synthetic oligonucleotide
guaucuaaccacgugaccu

SEQ ID NO: 128596 - RNA, 19 nt, Artificial Sequence
  Description of Artificial Sequence: Synthetic oligonucleotide
gagaucgagggcuagggcu

SEQ ID NO: 128597 - RNA, 19 nt, Artificial Sequence
  Description of Artificial Sequence: Synthetic oligonucleotide
gcugguguaucuaaccacg

SEQ ID NO: 128598 - RNA, 19 nt, Artificial Sequence
  Description of Artificial Sequence: Synthetic oligonucleotide
uuacugcgauguuauccag

SEQ ID NO: 128599 - RNA, 19 nt, Artificial Sequence
  Description of Artificial Sequence: Synthetic oligonucleotide
cugacaucgucauguuggc

SEQ ID NO: 128600 - RNA, 19 nt, Artificial Sequence
  Description of Artificial Sequence: Synthetic oligonucleotide
agauuagcaguccuauguu

SEQ ID NO: 128601 - RNA, 19 nt, Artificial Sequence
  Description of Artificial Sequence: Synthetic oligonucleotide
acacucccaaauaacacug

SEQ ID NO: 128602 - RNA, 19 nt, Artificial Sequence
  Description of Artificial Sequence: Synthetic oligonucleotide
acagagcgaacugagauua

SEQ ID NO: 128603 - RNA, 19 nt, Artificial Sequence
  Description of Artificial Sequence: Synthetic oligonucleotide
gugagugugcccaaacggc

SEQ ID NO: 128604 - RNA, 19 nt, Artificial Sequence
  Description of Artificial Sequence: Synthetic oligonucleotide
  modified_base (8)..(8): a, c, u, g, unknown or other
gguaaaunucagaaagcug

SEQ ID NO: 128605 - RNA, 19 nt, Artificial Sequence
  Description of Artificial Sequence: Synthetic oligonucleotide
uacugcgauguuauccagu

SEQ ID NO: 128606 - RNA, 19 nt, Artificial Sequence
  Description of Artificial Sequence: Synthetic oligonucleotide
auuugugauagagcuagau

SEQ ID NO: 128607 - RNA, 19 nt, Artificial Sequence
  Description of Artificial Sequence: Synthetic oligonucleotide
gauguuauccaguuauguu

SEQ ID NO: 128608 - RNA, 19 nt, Artificial Sequence
  Description of Artificial Sequence: Synthetic oligonucleotide
uugaagcuauuuacguuua

SEQ ID NO: 128609 - RNA, 19 nt, Artificial Sequence
  Description of Artificial Sequence: Synthetic oligonucleotide
ggcaauccuacuuaagguc

SEQ ID NO: 128610 - RNA, 19 nt, Artificial Sequence
  Description of Artificial Sequence: Synthetic oligonucleotide
acccuaaacuguauugauc

SEQ ID NO: 128611 - RNA, 19 nt, Artificial Sequence
  Description of Artificial Sequence: Synthetic oligonucleotide
  modified_base (18)..(18): a, c, u, g, unknown or other
uccguggccugguaaaunu

SEQ ID NO: 128612 - RNA, 19 nt, Artificial Sequence
  Description of Artificial Sequence: Synthetic oligonucleotide
cuuggaaucuggaaugaua

SEQ ID NO: 128613 - RNA, 19 nt, Artificial Sequence
  Description of Artificial Sequence: Synthetic oligonucleotide
cauaugacccuaaacugua

SEQ ID NO: 128614 - RNA, 19 nt, Artificial Sequence
  Description of Artificial Sequence: Synthetic oligonucleotide
ccccaaguaguucaaaggc

SEQ ID NO: 128615 - RNA, 19 nt, Artificial Sequence
  Description of Artificial Sequence: Synthetic oligonucleotide
ccaugcacaguauuucugc

SEQ ID NO: 128616 - RNA, 19 nt, Artificial Sequence
  Description of Artificial Sequence: Synthetic oligonucleotide
acguuuaucuacugaucaa

SEQ ID NO: 128617 - RNA, 19 nt, Artificial Sequence
  Description of Artificial Sequence: Synthetic oligonucleotide
caugacauagaagagaauu

SEQ ID NO: 128618 - RNA, 19 nt, Artificial Sequence
  Description of Artificial Sequence: Synthetic oligonucleotide
guguaucuaaccacgugac

SEQ ID NO: 128619 - RNA, 19 nt, Artificial Sequence
  Description of Artificial Sequence: Synthetic oligonucleotide
ugaguacuacucggauugg

SEQ ID NO: 128620 - RNA, 19 nt, Artificial Sequence
  Description of Artificial Sequence: Synthetic oligonucleotide
ugacaucgucauguuggcg

SEQ ID NO: 128621 - RNA, 19 nt, Artificial Sequence
  Description of Artificial Sequence: Synthetic oligonucleotide
ucucuauaugcagcgucca

SEQ ID NO: 128622 - RNA, 19 nt, Artificial Sequence
  Description of Artificial Sequence: Synthetic oligonucleotide
cuagggcuggauugaaauc

SEQ ID NO: 128623 - RNA, 19 nt, Artificial Sequence
  Description of Artificial Sequence: Synthetic oligonucleotide
ugggcgcuacacuuaggcc

SEQ ID NO: 128624 - RNA, 19 nt, Artificial Sequence
  Description of Artificial Sequence: Synthetic oligonucleotide
gaagacaucgucacugcua

SEQ ID NO: 128625 - RNA, 19 nt, Artificial Sequence
  Description of Artificial Sequence: Synthetic oligonucleotide
ugaagcuauuuacguuuau

SEQ ID NO: 128626 - RNA, 19 nt, Artificial Sequence
  Description of Artificial Sequence: Synthetic oligonucleotide
ucugcgcuaggagaagaga

SEQ ID NO: 128627 - RNA, 19 nt, Artificial Sequence
  Description of Artificial Sequence: Synthetic oligonucleotide
acacuuaggccuucucuau

SEQ ID NO: 128628 - RNA, 19 nt, Artificial Sequence
  Description of Artificial Sequence: Synthetic oligonucleotide
agcaucgagggaagcacgg

SEQ ID NO: 128629 - RNA, 19 nt, Artificial Sequence
  Description of Artificial Sequence: Synthetic oligonucleotide
caucuggguauguuacuuc

SEQ ID NO: 128630 - RNA, 19 nt, Artificial Sequence
  Description of Artificial Sequence: Synthetic oligonucleotide
auucaacaaggggaggcug

SEQ ID NO: 128631 - RNA, 19 nt, Artificial Sequence
  Description of Artificial Sequence: Synthetic oligonucleotide
gugacuaacccaccuugca

SEQ ID NO: 128632 - RNA, 19 nt, Artificial Sequence
  Description of Artificial Sequence: Synthetic oligonucleotide
caucgagggaagcacgguc

SEQ ID NO: 128633 - RNA, 19 nt, Artificial Sequence
  Description of Artificial Sequence: Synthetic oligonucleotide
gagggaaucaccucacgau

SEQ ID NO: 128634 - RNA, 19 nt, Artificial Sequence
  Description of Artificial Sequence: Synthetic oligonucleotide
ccuacuuaaggucaaaaua

SEQ ID NO: 128635 - RNA, 19 nt, Artificial Sequence
  Description of Artificial Sequence: Synthetic oligonucleotide
cucugcgcuaggagaagag

SEQ ID NO: 128636 - RNA, 19 nt, Artificial Sequence
  Description of Artificial Sequence: Synthetic oligonucleotide
guuuaagaagccugugccu

SEQ ID NO: 128637 - RNA, 19 nt, Artificial Sequence
  Description of Artificial Sequence: Synthetic oligonucleotide
  modified_base (2)..(2): a, c, u, g, unknown or other
unucagaaagcugcugcuu

SEQ ID NO: 128638 - RNA, 19 nt, Artificial Sequence
  Description of Artificial Sequence: Synthetic oligonucleotide
gaugugcgugccaaggcuc

SEQ ID NO: 128639 - RNA, 19 nt, Artificial Sequence
  Description of Artificial Sequence: Synthetic oligonucleotide
cuuaggccuucucuauaug

SEQ ID NO: 128640 - RNA, 19 nt, Artificial Sequence
  Description of Artificial Sequence: Synthetic oligonucleotide
gugauugggcuuguucaag

SEQ ID NO: 128641 - RNA, 19 nt, Artificial Sequence
  Description of Artificial Sequence: Synthetic oligonucleotide
gccccaugcugcuuuaagg

SEQ ID NO: 128642 - RNA, 19 nt, Artificial Sequence
  Description of Artificial Sequence: Synthetic oligonucleotide
ucuaaccacgugaccuuua

SEQ ID NO: 128643 - RNA, 19 nt, Artificial Sequence
  Description of Artificial Sequence: Synthetic oligonucleotide
cagagggaaucaccucacg

SEQ ID NO: 128644 - RNA, 19 nt, Artificial Sequence
  Description of Artificial Sequence: Synthetic oligonucleotide
acaucgucauguuggcgaa

SEQ ID NO: 128645 - RNA, 19 nt, Artificial Sequence
  Description of Artificial Sequence: Synthetic oligonucleotide
auacagguacaaguaguau

SEQ ID NO: 128646 - RNA, 19 nt, Artificial Sequence
  Description of Artificial Sequence: Synthetic oligonucleotide
ucaagaccccaaguaguuc

SEQ ID NO: 128647 - RNA, 19 nt, Artificial Sequence
  Description of Artificial Sequence: Synthetic oligonucleotide
ggcggugccagcaaagccc

SEQ ID NO: 128648 - RNA, 19 nt, Artificial Sequence
  Description of Artificial Sequence: Synthetic oligonucleotide
cagcauccccugaauaguc

SEQ ID NO: 128649 - RNA, 19 nt, Artificial Sequence
  Description of Artificial Sequence: Synthetic oligonucleotide
uaaccacgugaccuuuaau

SEQ ID NO: 128650 - RNA, 19 nt, Artificial Sequence
  Description of Artificial Sequence: Synthetic oligonucleotide
gcaauccuacuuaagguca

SEQ ID NO: 128651 - RNA, 19 nt, Artificial Sequence
  Description of Artificial Sequence: Synthetic oligonucleotide
gguauguuacuuccacgga

SEQ ID NO: 128652 - RNA, 19 nt, Artificial Sequence
  Description of Artificial Sequence: Synthetic oligonucleotide
ugcuaggcgagggucugca

SEQ ID NO: 128653 - RNA, 19 nt, Artificial Sequence
  Description of Artificial Sequence: Synthetic oligonucleotide
agagggucggccucucgau

SEQ ID NO: 128654 - RNA, 19 nt, Artificial Sequence
  Description of Artificial Sequence: Synthetic oligonucleotide
gaaucaccucacgaugauc

SEQ ID NO: 128655 - RNA, 19 nt, Artificial Sequence
  Description of Artificial Sequence: Synthetic oligonucleotide
acucggauuggcagccuuc

SEQ ID NO: 128656 - RNA, 19 nt, Artificial Sequence
  Description of Artificial Sequence: Synthetic oligonucleotide
gagggucggccucucgaug

SEQ ID NO: 128657 - RNA, 19 nt, Artificial Sequence
  Description of Artificial Sequence: Synthetic oligonucleotide
cuuccacggaaccguugag

SEQ ID NO: 128658 - RNA, 19 nt, Artificial Sequence
  Description of Artificial Sequence: Synthetic oligonucleotide
agacucucucuacuuugau

SEQ ID NO: 128659 - RNA, 19 nt, Artificial Sequence
  Description of Artificial Sequence: Synthetic oligonucleotide
gacccuaaacuguauugau

SEQ ID NO: 128660 - RNA, 19 nt, Artificial Sequence
  Description of Artificial Sequence: Synthetic oligonucleotide
cugggauagggcacuucuc

SEQ ID NO: 128661 - RNA, 19 nt, Artificial Sequence
  Description of Artificial Sequence: Synthetic oligonucleotide
aaguguagccagagggaau

SEQ ID NO: 128662 - RNA, 19 nt, Artificial Sequence
  Description of Artificial Sequence: Synthetic oligonucleotide
cauuguaauugggcaggac

SEQ ID NO: 128663 - RNA, 19 nt, Artificial Sequence
  Description of Artificial Sequence: Synthetic oligonucleotide
ccuagguugguuucccaug

SEQ ID NO: 128664 - RNA, 19 nt, Artificial Sequence
  Description of Artificial Sequence: Synthetic oligonucleotide
aggcuggcaauccuacuua

SEQ ID NO: 128665 - RNA, 19 nt, Artificial Sequence
  Description of Artificial Sequence: Synthetic oligonucleotide
acugagauuagcaguccua

SEQ ID NO: 128666 - RNA, 19 nt, Artificial Sequence
  Description of Artificial Sequence: Synthetic oligonucleotide
cuaaccacgugaccuuuaa

SEQ ID NO: 128667 - RNA, 19 nt, Artificial Sequence
  Description of Artificial Sequence: Synthetic oligonucleotide
gaugggcgcuacacuuagg

SEQ ID NO: 128668 - RNA, 19 nt, Artificial Sequence
  Description of Artificial Sequence: Synthetic oligonucleotide
uacucggauuggcagccuu

SEQ ID NO: 128669 - RNA, 19 nt, Artificial Sequence
  Description of Artificial Sequence: Synthetic oligonucleotide
agucauucuaggguucaua

SEQ ID NO: 128670 - RNA, 19 nt, Artificial Sequence
  Description of Artificial Sequence: Synthetic oligonucleotide
uuccuacaucuugugcucu

SEQ ID NO: 128671 - RNA, 19 nt, Artificial Sequence
  Description of Artificial Sequence: Synthetic oligonucleotide
  modified_base (13)..(13): a, c, u, g, unknown or other
ggccugguaaaunucagaa

SEQ ID NO: 128672 - RNA, 19 nt, Artificial Sequence
  Description of Artificial Sequence: Synthetic oligonucleotide
ugacaguugcugcggcgua

SEQ ID NO: 128673 - RNA, 19 nt, Artificial Sequence
  Description of Artificial Sequence: Synthetic oligonucleotide
caucgucacugcuaggucu

SEQ ID NO: 128674 - RNA, 19 nt, Artificial Sequence
  Description of Artificial Sequence: Synthetic oligonucleotide
gacaguugcugcggcguac

SEQ ID NO: 128675 - RNA, 19 nt, Artificial Sequence
  Description of Artificial Sequence: Synthetic oligonucleotide
aucaugggaaccacuugaa

SEQ ID NO: 128676 - RNA, 19 nt, Artificial Sequence
  Description of Artificial Sequence: Synthetic oligonucleotide
ggguuagccauccauugua

SEQ ID NO: 128677 - RNA, 19 nt, Artificial Sequence
  Description of Artificial Sequence: Synthetic oligonucleotide
ggacacacucccaaauaac

SEQ ID NO: 128678 - RNA, 19 nt, Artificial Sequence
  Description of Artificial Sequence: Synthetic oligonucleotide
cacucgaguccucguuccc

SEQ ID NO: 128679 - RNA, 19 nt, Artificial Sequence
  Description of Artificial Sequence: Synthetic oligonucleotide
acaguugcugcggcguaca

SEQ ID NO: 128680 - RNA, 19 nt, Artificial Sequence
  Description of Artificial Sequence: Synthetic oligonucleotide
gggcgcuacacuuaggccu

SEQ ID NO: 128681 - RNA, 19 nt, Artificial Sequence
  Description of Artificial Sequence: Synthetic oligonucleotide
guagccuguggaagaugcc

SEQ ID NO: 128682 - RNA, 19 nt, Artificial Sequence
  Description of Artificial Sequence: Synthetic oligonucleotide
ugcgugccaaggcuccaau

SEQ ID NO: 128683 - RNA, 19 nt, Artificial Sequence
  Description of Artificial Sequence: Synthetic oligonucleotide
aacugccgucucuggcagu

SEQ ID NO: 128684 - RNA, 19 nt, Artificial Sequence
  Description of Artificial Sequence: Synthetic oligonucleotide
uggugcggccauacccugu

SEQ ID NO: 128685 - RNA, 19 nt, Artificial Sequence
  Description of Artificial Sequence: Synthetic oligonucleotide
cucuccguggccugguaaa

SEQ ID NO: 128686 - RNA, 19 nt, Artificial Sequence
  Description of Artificial Sequence: Synthetic oligonucleotide
cacugcgaacaccaucaca

SEQ ID NO: 128687 - RNA, 19 nt, Artificial Sequence
  Description of Artificial Sequence: Synthetic oligonucleotide
gcggccauacccuguccgg

SEQ ID NO: 128688 - RNA, 19 nt, Artificial Sequence
  Description of Artificial Sequence: Synthetic oligonucleotide
agcauccccugaauaguca

SEQ ID NO: 128689 - RNA, 19 nt, Artificial Sequence
  Description of Artificial Sequence: Synthetic oligonucleotide
aggcagucccucacaaugu

SEQ ID NO: 128690 - RNA, 19 nt, Artificial Sequence
  Description of Artificial Sequence: Synthetic oligonucleotide
gcuagggcuggauugaaau

SEQ ID NO: 128691 - RNA, 19 nt, Artificial Sequence
  Description of Artificial Sequence: Synthetic oligonucleotide
acgaagccacuuacagguc

SEQ ID NO: 128692 - RNA, 19 nt, Artificial Sequence
  Description of Artificial Sequence: Synthetic oligonucleotide
auacucucuggugccaauu

SEQ ID NO: 128693 - RNA, 19 nt, Artificial Sequence
  Description of Artificial Sequence: Synthetic oligonucleotide
cugcgcuaggagaagagau

SEQ ID NO: 128694 - RNA, 19 nt, Artificial Sequence
  Description of Artificial Sequence: Synthetic oligonucleotide
gcauaugacccuaaacugu

SEQ ID NO: 128695 - RNA, 19 nt, Artificial Sequence
  Description of Artificial Sequence: Synthetic oligonucleotide
auaugacccuaaacuguau

SEQ ID NO: 128696 - RNA, 19 nt, Artificial Sequence
  Description of Artificial Sequence: Synthetic oligonucleotide
ccauagccuauauaguaaa

SEQ ID NO: 128697 - RNA, 19 nt, Artificial Sequence
  Description of Artificial Sequence: Synthetic oligonucleotide
ggugcggccauacccuguc

SEQ ID NO: 128698 - RNA, 19 nt, Artificial Sequence
  Description of Artificial Sequence: Synthetic oligonucleotide
gugugcccaaacggcaaug

SEQ ID NO: 128699 - RNA, 19 nt, Artificial Sequence
  Description of Artificial Sequence: Synthetic oligonucleotide
ccucacaucugaguacuac

SEQ ID NO: 128700 - RNA, 19 nt, Artificial Sequence
  Description of Artificial Sequence: Synthetic oligonucleotide
aucagagggucggccucuc

SEQ ID NO: 128701 - RNA, 19 nt, Artificial Sequence
  Description of Artificial Sequence: Synthetic oligonucleotide
ccaauucaacaaggggagg

SEQ ID NO: 128702 - RNA, 19 nt, Artificial Sequence
  Description of Artificial Sequence: Synthetic oligonucleotide
ggcacuucucaggcaaggc

SEQ ID NO: 128703 - RNA, 19 nt, Artificial Sequence
  Description of Artificial Sequence: Synthetic oligonucleotide
  modified_base (12)..(12): a, c, u, g, unknown or other
gccugguaaaunucagaaa

SEQ ID NO: 128704 - RNA, 19 nt, Artificial Sequence
  Description of Artificial Sequence: Synthetic oligonucleotide
cugcuuuacugcgauguua

SEQ ID NO: 128705 - RNA, 19 nt, Artificial Sequence
  Description of Artificial Sequence: Synthetic oligonucleotide
cccauaugccugcagcauc

SEQ ID NO: 128706 - RNA, 19 nt, Artificial Sequence
  Description of Artificial Sequence: Synthetic oligonucleotide
gcaucucaagcaauaaggu

SEQ ID NO: 128707 - RNA, 19 nt, Artificial Sequence
  Description of Artificial Sequence: Synthetic oligonucleotide
cccacgaccgcugucagca

SEQ ID NO: 128708 - RNA, 19 nt, Artificial Sequence
  Description of Artificial Sequence: Synthetic oligonucleotide
ggugcuaggcgagggucug

SEQ ID NO: 128709 - RNA, 19 nt, Artificial Sequence
  Description of Artificial Sequence: Synthetic oligonucleotide
gcgauguuauccaguuaug

SEQ ID NO: 128710 - RNA, 19 nt, Artificial Sequence
  Description of Artificial Sequence: Synthetic oligonucleotide
cacuuaggccuucucuaua

SEQ ID NO: 128711 - RNA, 19 nt, Artificial Sequence
  Description of Artificial Sequence: Synthetic oligonucleotide
ggaaccguugagaaucacu

SEQ ID NO: 128712 - RNA, 19 nt, Artificial Sequence
  Description of Artificial Sequence: Synthetic oligonucleotide
uccugccgacaccuagguu

SEQ ID NO: 128713 - RNA, 19 nt, Artificial Sequence
  Description of Artificial Sequence: Synthetic oligonucleotide
gaagccccaugcugcuuua

SEQ ID NO: 128714 - RNA, 19 nt, Artificial Sequence
  Description of Artificial Sequence: Synthetic oligonucleotide
acggaaccguugagaauca

SEQ ID NO: 128715 - RNA, 19 nt, Artificial Sequence
  Description of Artificial Sequence: Synthetic oligonucleotide
gccccucacaucugaguac

SEQ ID NO: 128716 - RNA, 19 nt, Artificial Sequence
  Description of Artificial Sequence: Synthetic oligonucleotide
ggcgucaguggcccgagua

SEQ ID NO: 128717 - RNA, 19 nt, Artificial Sequence
  Description of Artificial Sequence: Synthetic oligonucleotide
cugcagcauccccugaaua

SEQ ID NO: 128718 - RNA, 19 nt, Artificial Sequence
  Description of Artificial Sequence: Synthetic oligonucleotide
cagggguuagccauccauu

SEQ ID NO: 128719 - RNA, 19 nt, Artificial Sequence
  Description of Artificial Sequence: Synthetic oligonucleotide
gguggcucgcucugguuua

SEQ ID NO: 128720 - RNA, 19 nt, Artificial Sequence
  Description of Artificial Sequence: Synthetic oligonucleotide
ccuaucuauuggguccuuc

SEQ ID NO: 128721 - RNA, 19 nt, Artificial Sequence
  Description of Artificial Sequence: Synthetic oligonucleotide
guacaggccucggcuuuca

SEQ ID NO: 128722 - RNA, 19 nt, Artificial Sequence
  Description of Artificial Sequence: Synthetic oligonucleotide
gcagcauccccugaauagu

SEQ ID NO: 128723 - RNA, 19 nt, Artificial Sequence
  Description of Artificial Sequence: Synthetic oligonucleotide
agcguccacgaagccacuu

SEQ ID NO: 128724 - RNA, 19 nt, Artificial Sequence
  Description of Artificial Sequence: Synthetic oligonucleotide
uccuaucuauuggguccuu

SEQ ID NO: 128725 - RNA, 19 nt, Artificial Sequence
  Description of Artificial Sequence: Synthetic oligonucleotide
cgugauugggcuuguucaa

SEQ ID NO: 128726 - RNA, 19 nt, Artificial Sequence
  Description of Artificial Sequence: Synthetic oligonucleotide
cauacccuguccggcauau

SEQ ID NO: 128727 - RNA, 19 nt, Artificial Sequence
  Description of Artificial Sequence: Synthetic oligonucleotide
gccggggcgucaguggccc

SEQ ID NO: 128728 - RNA, 19 nt, Artificial Sequence
  Description of Artificial Sequence: Synthetic oligonucleotide
gccuucacuuuuccggagu

SEQ ID NO: 128729 - RNA, 19 nt, Artificial Sequence
  Description of Artificial Sequence: Synthetic oligonucleotide
gugcccaaacggcaauguu

SEQ ID NO: 128730 - RNA, 19 nt, Artificial Sequence
  Description of Artificial Sequence: Synthetic oligonucleotide
ggacacucgaguccucguu

SEQ ID NO: 128731 - RNA, 19 nt, Artificial Sequence
  Description of Artificial Sequence: Synthetic oligonucleotide
cuccuuuugguggcucgcu

SEQ ID NO: 128732 - RNA, 19 nt, Artificial Sequence
  Description of Artificial Sequence: Synthetic oligonucleotide
guggcccgaguagccugug

SEQ ID NO: 128733 - RNA, 19 nt, Artificial Sequence
  Description of Artificial Sequence: Synthetic oligonucleotide
guccggcauauuugguuuu

SEQ ID NO: 128734 - RNA, 19 nt, Artificial Sequence
  Description of Artificial Sequence: Synthetic oligonucleotide
gggcuggauugaaaucuaa

SEQ ID NO: 128735 - RNA, 19 nt, Artificial Sequence
  Description of Artificial Sequence: Synthetic oligonucleotide
auacccuguccggcauauu

SEQ ID NO: 128736 - RNA, 19 nt, Artificial Sequence
  Description of Artificial Sequence: Synthetic oligonucleotide
guggcucgcucugguuuaa

SEQ ID NO: 128737 - RNA, 19 nt, Artificial Sequence
  Description of Artificial Sequence: Synthetic oligonucleotide
cggccauacccuguccggc

SEQ ID NO: 128738 - RNA, 19 nt, Artificial Sequence
  Description of Artificial Sequence: Synthetic oligonucleotide
ccacgaccgcugucagcag

SEQ ID NO: 128739 - RNA, 19 nt, Artificial Sequence
  Description of Artificial Sequence: Synthetic oligonucleotide
ggcgcuacacuuaggccuu

SEQ ID NO: 128740 - RNA, 19 nt, Artificial Sequence
  Description of Artificial Sequence: Synthetic oligonucleotide
gcggugccagcaaagcccu

SEQ ID NO: 128741 - RNA, 19 nt, Artificial Sequence
  Description of Artificial Sequence: Synthetic oligonucleotide
cuacucggauuggcagccu

SEQ ID NO: 128742 - RNA, 19 nt, Artificial Sequence
  Description of Artificial Sequence: Synthetic oligonucleotide
cggaaccguugagaaucac

SEQ ID NO: 128743 - RNA, 19 nt, Artificial Sequence
  Description of Artificial Sequence: Synthetic oligonucleotide
ccauacccuguccggcaua

SEQ ID NO: 128744 - RNA, 19 nt, Artificial Sequence
  Description of Artificial Sequence: Synthetic oligonucleotide
cagcguccacgaagccacu

SEQ ID NO: 128745 - RNA, 19 nt, Artificial Sequence
  Description of Artificial Sequence: Synthetic oligonucleotide
ccggggcgucaguggcccg

SEQ ID NO: 128746 - RNA, 19 nt, Artificial Sequence
  Description of Artificial Sequence: Synthetic oligonucleotide
cccucacaucugaguacua

SEQ ID NO: 128747 - RNA, 19 nt, Artificial Sequence
  Description of Artificial Sequence: Synthetic oligonucleotide
cggggcgucaguggcccga

SEQ ID NO: 128748 - RNA, 19 nt, Artificial Sequence
  Description of Artificial Sequence: Synthetic oligonucleotide
aaucguuucuccuuggugc

SEQ ID NO: 128749 - RNA, 19 nt, Artificial Sequence
  Description of Artificial Sequence: Synthetic oligonucleotide
aaagugaugaacuuuacca

SEQ ID NO: 128750 - RNA, 19 nt, Artificial Sequence
  Description of Artificial Sequence: Synthetic oligonucleotide
uauucgaauaauaauaaga

SEQ ID NO: 128751 - RNA, 19 nt, Artificial Sequence
  Description of Artificial Sequence: Synthetic oligonucleotide
uguaguuguaagaagcugg

SEQ ID NO: 128752 - RNA, 19 nt, Artificial Sequence
  Description of Artificial Sequence: Synthetic oligonucleotide
cuugaaauagcguuaagcc

SEQ ID NO: 128753 - RNA, 19 nt, Artificial Sequence
  Description of Artificial Sequence: Synthetic oligonucleotide
uuucguacuugaaauagcg

SEQ ID NO: 128754 - RNA, 19 nt, Artificial Sequence
  Description of Artificial Sequence: Synthetic oligonucleotide
uuuuaaagggacauccccg

SEQ ID NO: 128755 - RNA, 19 nt, Artificial Sequence
  Description of Artificial Sequence: Synthetic oligonucleotide
auucgaauaauaauaagac

SEQ ID NO: 128756 - RNA, 19 nt, Artificial Sequence
  Description of Artificial Sequence: Synthetic oligonucleotide
ucuaacugugcauugauug

SEQ ID NO: 128757 - RNA, 19 nt, Artificial Sequence
  Description of Artificial Sequence: Synthetic oligonucleotide
auuuguaguuguaagaagc

SEQ ID NO: 128758 - RNA, 19 nt, Artificial Sequence
  Description of Artificial Sequence: Synthetic oligonucleotide
aacuuaacgucauuuguag

SEQ ID NO: 128759 - RNA, 19 nt, Artificial Sequence
  Description of Artificial Sequence: Synthetic oligonucleotide
aaguauugcaaccugauuu

SEQ ID NO: 128760 - RNA, 19 nt, Artificial Sequence
  Description of Artificial Sequence: Synthetic oligonucleotide
uagucaagcuguuuaaugg

SEQ ID NO: 128761 - RNA, 19 nt, Artificial Sequence
  Description of Artificial Sequence: Synthetic oligonucleotide
aauagcguuaagccauggc

SEQ ID NO: 128762 - RNA, 19 nt, Artificial Sequence
  Description of Artificial Sequence: Synthetic oligonucleotide
ugagguccauacuagaugg

SEQ ID NO: 128763 - RNA, 19 nt, Artificial Sequence
  Description of Artificial Sequence: Synthetic oligonucleotide
ugcaaaucaacuuacugca

SEQ ID NO: 128764 - RNA, 19 nt, Artificial Sequence
  Description of Artificial Sequence: Synthetic oligonucleotide
ugaguaguagauuuaagcu

SEQ ID NO: 128765 - RNA, 19 nt, Artificial Sequence
  Description of Artificial Sequence: Synthetic oligonucleotide
auguaaguacuacagacuc

SEQ ID NO: 128766 - RNA, 19 nt, Artificial Sequence
  Description of Artificial Sequence: Synthetic oligonucleotide
ugaaauagcguuaagccau

SEQ ID NO: 128767 - RNA, 19 nt, Artificial Sequence
  Description of Artificial Sequence: Synthetic oligonucleotide
uuacguuuucagcugaagg

SEQ ID NO: 128768 - RNA, 19 nt, Artificial Sequence
  Description of Artificial Sequence: Synthetic oligonucleotide
auauuaugcacauguacuc

SEQ ID NO: 128769 - RNA, 19 nt, Artificial Sequence
  Description of Artificial Sequence: Synthetic oligonucleotide
aaauaagccaccuaacguu

SEQ ID NO: 128770 - RNA, 19 nt, Artificial Sequence
  Description of Artificial Sequence: Synthetic oligonucleotide
uuuaaagggacauccccgg

SEQ ID NO: 128771 - RNA, 19 nt, Artificial Sequence
  Description of Artificial Sequence: Synthetic oligonucleotide
uccuauucgaauaauaaua

SEQ ID NO: 128772 - RNA, 19 nt, Artificial Sequence
  Description of Artificial Sequence: Synthetic oligonucleotide
auaauaauaagacccugug

SEQ ID NO: 128773 - RNA, 19 nt, Artificial Sequence
  Description of Artificial Sequence: Synthetic oligonucleotide
acguauauuaugcacaugu

SEQ ID NO: 128774 - RNA, 19 nt, Artificial Sequence
  Description of Artificial Sequence: Synthetic oligonucleotide
agaacuugcucacagaagu

SEQ ID NO: 128775 - RNA, 19 nt, Artificial Sequence
  Description of Artificial Sequence: Synthetic oligonucleotide
uuggaauaaacugagcugc

SEQ ID NO: 128776 - RNA, 19 nt, Artificial Sequence
  Description of Artificial Sequence: Synthetic oligonucleotide
uucaauucaaaucucugaa

SEQ ID NO: 128777 - RNA, 19 nt, Artificial Sequence
  Description of Artificial Sequence: Synthetic oligonucleotide
ugcacuauugccuaggcaa

SEQ ID NO: 128778 - RNA, 19 nt, Artificial Sequence
  Description of Artificial Sequence: Synthetic oligonucleotide
uucgaauaauaauaagacc

SEQ ID NO: 128779 - RNA, 19 nt, Artificial Sequence
  Description of Artificial Sequence: Synthetic oligonucleotide
aacauuacguuuucagcug

SEQ ID NO: 128780 - RNA, 19 nt, Artificial Sequence
  Description of Artificial Sequence: Synthetic oligonucleotide
ucuuauaugaaggaggaau

SEQ ID NO: 128781 - RNA, 19 nt, Artificial Sequence
  Description of Artificial Sequence: Synthetic oligonucleotide
uguuuuacccuggagagcc

SEQ ID NO: 128782 - RNA, 19 nt, Artificial Sequence
  Description of Artificial Sequence: Synthetic oligonucleotide
aaugaacucaucucugcca

SEQ ID NO: 128783 - RNA, 19 nt, Artificial Sequence
  Description of Artificial Sequence: Synthetic oligonucleotide
uuuaagagugaucuuuacu

SEQ ID NO: 128784 - RNA, 19 nt, Artificial Sequence
  Description of Artificial Sequence: Synthetic oligonucleotide
acuaggaggauuauaaauc

SEQ ID NO: 128785 - RNA, 19 nt, Artificial Sequence
  Description of Artificial Sequence: Synthetic oligonucleotide
auauugugaaaacaaguca

SEQ ID NO: 128786 - RNA, 19 nt, Artificial Sequence
  Description of Artificial Sequence: Synthetic oligonucleotide
uccuaaauuacccuaucac

SEQ ID NO: 128787 - RNA, 19 nt, Artificial Sequence
  Description of Artificial Sequence: Synthetic oligonucleotide
cuuuuaaagggacaucccc

SEQ ID NO: 128788 - RNA, 19 nt, Artificial Sequence
  Description of Artificial Sequence: Synthetic oligonucleotide
aaugaggauauugugaaaa

SEQ ID NO: 128789 - RNA, 19 nt, Artificial Sequence
  Description of Artificial Sequence: Synthetic oligonucleotide
aaucgaaguugucugauau

SEQ ID NO: 128790 - RNA, 19 nt, Artificial Sequence
  Description of Artificial Sequence: Synthetic oligonucleotide
aauccuaaauuacccuauc

SEQ ID NO: 128791 - RNA, 19 nt, Artificial Sequence
  Description of Artificial Sequence: Synthetic oligonucleotide
uuagagaagagagguacgg

SEQ ID NO: 128792 - RNA, 19 nt, Artificial Sequence
  Description of Artificial Sequence: Synthetic oligonucleotide
ugauaaugaggauauugug

SEQ ID NO: 128793 - RNA, 19 nt, Artificial Sequence
  Description of Artificial Sequence: Synthetic oligonucleotide
auuacuagcguucucucca

SEQ ID NO: 128794 - RNA, 19 nt, Artificial Sequence
  Description of Artificial Sequence: Synthetic oligonucleotide
uugaaauagcguuaagcca

SEQ ID NO: 128795 - RNA, 19 nt, Artificial Sequence
  Description of Artificial Sequence: Synthetic oligonucleotide
guauauuaugcacauguac

SEQ ID NO: 128796 - RNA, 19 nt, Artificial Sequence
  Description of Artificial Sequence: Synthetic oligonucleotide
aguugucugauauagacuu

SEQ ID NO: 128797 - RNA, 19 nt, Artificial Sequence
  Description of Artificial Sequence: Synthetic oligonucleotide
cuuggcgucguauugacac

SEQ ID NO: 128798 - RNA, 19 nt, Artificial Sequence
  Description of Artificial Sequence: Synthetic oligonucleotide
gauauagacuugaaggccc

SEQ ID NO: 128799 - RNA, 19 nt, Artificial Sequence
  Description of Artificial Sequence: Synthetic oligonucleotide
ugaugucgcacucuaguag

SEQ ID NO: 128800 - RNA, 19 nt, Artificial Sequence
  Description of Artificial Sequence: Synthetic oligonucleotide
gauaaugaggauauuguga

SEQ ID NO: 128801 - RNA, 19 nt, Artificial Sequence
  Description of Artificial Sequence: Synthetic oligonucleotide
ugcaaccugauuuugaaau

SEQ ID NO: 128802 - RNA, 19 nt, Artificial Sequence
  Description of Artificial Sequence: Synthetic oligonucleotide
aauaagccaccuaacguuc

SEQ ID NO: 128803 - RNA, 19 nt, Artificial Sequence
  Description of Artificial Sequence: Synthetic oligonucleotide
auaucugcuacucuuggca

SEQ ID NO: 128804 - RNA, 19 nt, Artificial Sequence
  Description of Artificial Sequence: Synthetic oligonucleotide
agaucuggcugauuucacc

SEQ ID NO: 128805 - RNA, 19 nt, Artificial Sequence
  Description of Artificial Sequence: Synthetic oligonucleotide
auagucaagcuguuuaaug

SEQ ID NO: 128806 - RNA, 19 nt, Artificial Sequence
  Description of Artificial Sequence: Synthetic oligonucleotide
ugauauagacuugaaggcc

SEQ ID NO: 128807 - RNA, 19 nt, Artificial Sequence
  Description of Artificial Sequence: Synthetic oligonucleotide
aaauccucccuacuggagu

SEQ ID NO: 128808 - RNA, 19 nt, Artificial Sequence
  Description of Artificial Sequence: Synthetic oligonucleotide
agacucaguucucaauacc

SEQ ID NO: 128809 - RNA, 19 nt, Artificial Sequence
  Description of Artificial Sequence: Synthetic oligonucleotide
uuucacgccauccaguauc

SEQ ID NO: 128810 - RNA, 19 nt, Artificial Sequence
  Description of Artificial Sequence: Synthetic oligonucleotide
cucgacuacgauuuccucg

SEQ ID NO: 128811 - RNA, 19 nt, Artificial Sequence
  Description of Artificial Sequence: Synthetic oligonucleotide
guuacugugcucuuauaug

SEQ ID NO: 128812 - RNA, 19 nt, Artificial Sequence
  Description of Artificial Sequence: Synthetic oligonucleotide
cuucauuagaaauccauga

SEQ ID NO: 128813 - RNA, 19 nt, Artificial Sequence
  Description of Artificial Sequence: Synthetic oligonucleotide
uucauuacuagcguucucu

SEQ ID NO: 128814 - RNA, 19 nt, Artificial Sequence
  Description of Artificial Sequence: Synthetic oligonucleotide
cuaacugugcauugauugc

SEQ ID NO: 128815 - RNA, 19 nt, Artificial Sequence
  Description of Artificial Sequence: Synthetic oligonucleotide
uacccuaucacauccugug

SEQ ID NO: 128816 - RNA, 19 nt, Artificial Sequence
  Description of Artificial Sequence: Synthetic oligonucleotide
aaacaagucaaggcggcag

SEQ ID NO: 128817 - RNA, 19 nt, Artificial Sequence
  Description of Artificial Sequence: Synthetic oligonucleotide
aguucucaacugccaaucc

SEQ ID NO: 128818 - RNA, 19 nt, Artificial Sequence
  Description of Artificial Sequence: Synthetic oligonucleotide
uagcguuaagccauggcug

SEQ ID NO: 128819 - RNA, 19 nt, Artificial Sequence
  Description of Artificial Sequence: Synthetic oligonucleotide
cuauucgaauaauaauaag

SEQ ID NO: 128820 - RNA, 19 nt, Artificial Sequence
  Description of Artificial Sequence: Synthetic oligonucleotide
uauuaugcacauguacucc

SEQ ID NO: 128821 - RNA, 19 nt, Artificial Sequence
  Description of Artificial Sequence: Synthetic oligonucleotide
uguacuccuauucgaauaa

SEQ ID NO: 128822 - RNA, 19 nt, Artificial Sequence
  Description of Artificial Sequence: Synthetic oligonucleotide
auacuagauggucaguucu

SEQ ID NO: 128823 - RNA, 19 nt, Artificial Sequence
  Description of Artificial Sequence: Synthetic oligonucleotide
guugggucaguauaucugc

SEQ ID NO: 128824 - RNA, 19 nt, Artificial Sequence
  Description of Artificial Sequence: Synthetic oligonucleotide
ucaagcuguuuaaugguac

SEQ ID NO: 128825 - RNA, 19 nt, Artificial Sequence
  Description of Artificial Sequence: Synthetic oligonucleotide
cuggagauuucuugggugg

SEQ ID NO: 128826 - RNA, 19 nt, Artificial Sequence
  Description of Artificial Sequence: Synthetic oligonucleotide
acgaggucaaguuauuucu

SEQ ID NO: 128827 - RNA, 19 nt, Artificial Sequence
  Description of Artificial Sequence: Synthetic oligonucleotide
cucguguuccccaaccucg

SEQ ID NO: 128828 - RNA, 19 nt, Artificial Sequence
  Description of Artificial Sequence: Synthetic oligonucleotide
gagauuagggagaacuugc

SEQ ID NO: 128829 - RNA, 19 nt, Artificial Sequence
  Description of Artificial Sequence: Synthetic oligonucleotide
uuuguacguauauuaugca

SEQ ID NO: 128830 - RNA, 19 nt, Artificial Sequence
  Description of Artificial Sequence: Synthetic oligonucleotide
uuaccuuggacacaaccau

SEQ ID NO: 128831 - RNA, 19 nt, Artificial Sequence
  Description of Artificial Sequence: Synthetic oligonucleotide
aguaaguaugaguuccucu

SEQ ID NO: 128832 - RNA, 19 nt, Artificial Sequence
  Description of Artificial Sequence: Synthetic oligonucleotide
uuaguaggaaugcuaccac

SEQ ID NO: 128833 - RNA, 19 nt, Artificial Sequence
  Description of Artificial Sequence: Synthetic oligonucleotide
aaugugaugucgcacucua

SEQ ID NO: 128834 - RNA, 19 nt, Artificial Sequence
  Description of Artificial Sequence: Synthetic oligonucleotide
caauuggugaaaacuguac

SEQ ID NO: 128835 - RNA, 19 nt, Artificial Sequence
  Description of Artificial Sequence: Synthetic oligonucleotide
uuuguuguacacucaaguu

SEQ ID NO: 128836 - RNA, 19 nt, Artificial Sequence
  Description of Artificial Sequence: Synthetic oligonucleotide
aaguugggucaguauaucu

SEQ ID NO: 128837 - RNA, 19 nt, Artificial Sequence
  Description of Artificial Sequence: Synthetic oligonucleotide
ucgacuacgauuuccucgu

SEQ ID NO: 128838 - RNA, 19 nt, Artificial Sequence
  Description of Artificial Sequence: Synthetic oligonucleotide
ugcuaaucguuucuccuug

SEQ ID NO: 128839 - RNA, 19 nt, Artificial Sequence
  Description of Artificial Sequence: Synthetic oligonucleotide
aaugaguaguagauuuaag

SEQ ID NO: 128840 - RNA, 19 nt, Artificial Sequence
  Description of Artificial Sequence: Synthetic oligonucleotide
uaaguaugaguuccucuac

SEQ ID NO: 128841 - RNA, 19 nt, Artificial Sequence
  Description of Artificial Sequence: Synthetic oligonucleotide
aguaacuuaucaaauaguu

SEQ ID NO: 128842 - RNA, 19 nt, Artificial Sequence
  Description of Artificial Sequence: Synthetic oligonucleotide
agauuauugccagcacucc

SEQ ID NO: 128843 - RNA, 19 nt, Artificial Sequence
  Description of Artificial Sequence: Synthetic oligonucleotide
aagucacuuuccuggguag

SEQ ID NO: 128844 - RNA, 19 nt, Artificial Sequence
  Description of Artificial Sequence: Synthetic oligonucleotide
uuagacacgaggucaaguu

SEQ ID NO: 128845 - RNA, 19 nt, Artificial Sequence
  Description of Artificial Sequence: Synthetic oligonucleotide
uuuagagauuauugccagc

SEQ ID NO: 128846 - RNA, 19 nt, Artificial Sequence
  Description of Artificial Sequence: Synthetic oligonucleotide
uauugauuuguuguacacu

SEQ ID NO: 128847 - RNA, 19 nt, Artificial Sequence
  Description of Artificial Sequence: Synthetic oligonucleotide
uuaggguacugagauuagg

SEQ ID NO: 128848 - RNA, 19 nt, Artificial Sequence
  Description of Artificial Sequence: Synthetic oligonucleotide
acucaguaaguaugaguuc

SEQ ID NO: 128849 - RNA, 19 nt, Artificial Sequence
  Description of Artificial Sequence: Synthetic oligonucleotide
gaugucgcacucuaguaga

SEQ ID NO: 128850 - RNA, 19 nt, Artificial Sequence
  Description of Artificial Sequence: Synthetic oligonucleotide
aaaguauugcaaccugauu

SEQ ID NO: 128851 - RNA, 19 nt, Artificial Sequence
  Description of Artificial Sequence: Synthetic oligonucleotide
ugagcugcuaaucguuucu

SEQ ID NO: 128852 - RNA, 19 nt, Artificial Sequence
  Description of Artificial Sequence: Synthetic oligonucleotide
ugcguuagacacgagguca

SEQ ID NO: 128853 - RNA, 19 nt, Artificial Sequence
  Description of Artificial Sequence: Synthetic oligonucleotide
agccaaucgaaguugucug

SEQ ID NO: 128854 - RNA, 19 nt, Artificial Sequence
  Description of Artificial Sequence: Synthetic oligonucleotide
gagauuauugccagcacuc

SEQ ID NO: 128855 - RNA, 19 nt, Artificial Sequence
  Description of Artificial Sequence: Synthetic oligonucleotide
agggagaacuugcucacag

SEQ ID NO: 128856 - RNA, 19 nt, Artificial Sequence
  Description of Artificial Sequence: Synthetic oligonucleotide
uaugugucuuaguaggaau

SEQ ID NO: 128857 - RNA, 19 nt, Artificial Sequence
  Description of Artificial Sequence: Synthetic oligonucleotide
aauaagacccuguguucaa

SEQ ID NO: 128858 - RNA, 19 nt, Artificial Sequence
  Description of Artificial Sequence: Synthetic oligonucleotide
aagagugaucuuuacucuu

SEQ ID NO: 128859 - RNA, 19 nt, Artificial Sequence
  Description of Artificial Sequence: Synthetic oligonucleotide
ugcuacucuuggcagauuc

SEQ ID NO: 128860 - RNA, 19 nt, Artificial Sequence
  Description of Artificial Sequence: Synthetic oligonucleotide
uuuuggacucaguaaguau

SEQ ID NO: 128861 - RNA, 19 nt, Artificial Sequence
  Description of Artificial Sequence: Synthetic oligonucleotide
ugcccaauuggugaaaacu

SEQ ID NO: 128862 - RNA, 19 nt, Artificial Sequence
  Description of Artificial Sequence: Synthetic oligonucleotide
uaggaggauuauaaaucug

SEQ ID NO: 128863 - RNA, 19 nt, Artificial Sequence
  Description of Artificial Sequence: Synthetic oligonucleotide
acagaggucuaacugugca

SEQ ID NO: 128864 - RNA, 19 nt, Artificial Sequence
  Description of Artificial Sequence: Synthetic oligonucleotide
augaauagaacaaauucuu

SEQ ID NO: 128865 - RNA, 19 nt, Artificial Sequence
  Description of Artificial Sequence: Synthetic oligonucleotide
ucugcugaguuuacaaaua

SEQ ID NO: 128866 - RNA, 19 nt, Artificial Sequence
  Description of Artificial Sequence: Synthetic oligonucleotide
aaggccucgccuguuuuac

SEQ ID NO: 128867 - RNA, 19 nt, Artificial Sequence
  Description of Artificial Sequence: Synthetic oligonucleotide
uugauuuguuguacacuca

SEQ ID NO: 128868 - RNA, 19 nt, Artificial Sequence
  Description of Artificial Sequence: Synthetic oligonucleotide
guccauacuagauggucag

SEQ ID NO: 128869 - RNA, 19 nt, Artificial Sequence
  Description of Artificial Sequence: Synthetic oligonucleotide
auauagacuugaaggcccc

SEQ ID NO: 128870 - RNA, 19 nt, Artificial Sequence
  Description of Artificial Sequence: Synthetic oligonucleotide
uccucuacuuccccugaag

SEQ ID NO: 128871 - RNA, 19 nt, Artificial Sequence
  Description of Artificial Sequence: Synthetic oligonucleotide
guucucaacugccaauccc

SEQ ID NO: 128872 - RNA, 19 nt, Artificial Sequence
  Description of Artificial Sequence: Synthetic oligonucleotide
aggaggauuauaaaucugu

SEQ ID NO: 128873 - RNA, 19 nt, Artificial Sequence
  Description of Artificial Sequence: Synthetic oligonucleotide
cuaaauuacccuaucacau

SEQ ID NO: 128874 - RNA, 19 nt, Artificial Sequence
  Description of Artificial Sequence: Synthetic oligonucleotide
cauaauuaaaguugcccaa

SEQ ID NO: 128875 - RNA, 19 nt, Artificial Sequence
  Description of Artificial Sequence: Synthetic oligonucleotide
uguuccuaugucuguucag

SEQ ID NO: 128876 - RNA, 19 nt, Artificial Sequence
  Description of Artificial Sequence: Synthetic oligonucleotide
auuagacucaguucucaau

SEQ ID NO: 128877 - RNA, 19 nt, Artificial Sequence
  Description of Artificial Sequence: Synthetic oligonucleotide
aaaauccucccuacuggag

SEQ ID NO: 128878 - RNA, 19 nt, Artificial Sequence
  Description of Artificial Sequence: Synthetic oligonucleotide
auccuaaauuacccuauca

SEQ ID NO: 128879 - RNA, 19 nt, Artificial Sequence
  Description of Artificial Sequence: Synthetic oligonucleotide
uccucgacuacgauuuccu

SEQ ID NO: 128880 - RNA, 19 nt, Artificial Sequence
  Description of Artificial Sequence: Synthetic oligonucleotide
guaguuaggguacugagau

SEQ ID NO: 128881 - RNA, 19 nt, Artificial Sequence
  Description of Artificial Sequence: Synthetic oligonucleotide
uucguacuugaaauagcgu

SEQ ID NO: 128882 - RNA, 19 nt, Artificial Sequence
  Description of Artificial Sequence: Synthetic oligonucleotide
aaauagcguuaagccaugg

SEQ ID NO: 128883 - RNA, 19 nt, Artificial Sequence
  Description of Artificial Sequence: Synthetic oligonucleotide
acuuccuuaguuaacacuu

SEQ ID NO: 128884 - RNA, 19 nt, Artificial Sequence
  Description of Artificial Sequence: Synthetic oligonucleotide
cauacuagauggucaguuc

SEQ ID NO: 128885 - RNA, 19 nt, Artificial Sequence
  Description of Artificial Sequence: Synthetic oligonucleotide
aaauugaggcagcucuuua

SEQ ID NO: 128886 - RNA, 19 nt, Artificial Sequence
  Description of Artificial Sequence: Synthetic oligonucleotide
aaguugucugauauagacu

SEQ ID NO: 128887 - RNA, 19 nt, Artificial Sequence
  Description of Artificial Sequence: Synthetic oligonucleotide
cacgaggucaaguuauuuc

SEQ ID NO: 128888 - RNA, 19 nt, Artificial Sequence
  Description of Artificial Sequence: Synthetic oligonucleotide
uacuccuauucgaauaaua

SEQ ID NO: 128889 - RNA, 19 nt, Artificial Sequence
  Description of Artificial Sequence: Synthetic oligonucleotide
aguauaucugcuacucuug

SEQ ID NO: 128890 - RNA, 19 nt, Artificial Sequence
  Description of Artificial Sequence: Synthetic oligonucleotide
uaccagaucacgagcuaga

SEQ ID NO: 128891 - RNA, 19 nt, Artificial Sequence
  Description of Artificial Sequence: Synthetic oligonucleotide
uacuagauggucaguucuc

SEQ ID NO: 128892 - RNA, 19 nt, Artificial Sequence
  Description of Artificial Sequence: Synthetic oligonucleotide
auaauuaaaguugcccaaa

SEQ ID NO: 128893 - RNA, 19 nt, Artificial Sequence
  Description of Artificial Sequence: Synthetic oligonucleotide
uuacccuaucacauccugu

SEQ ID NO: 128894 - RNA, 19 nt, Artificial Sequence
  Description of Artificial Sequence: Synthetic oligonucleotide
agguccauacuagaugguc

SEQ ID NO: 128895 - RNA, 19 nt, Artificial Sequence
  Description of Artificial Sequence: Synthetic oligonucleotide
agaggcauauacuccagua

SEQ ID NO: 128896 - RNA, 19 nt, Artificial Sequence
  Description of Artificial Sequence: Synthetic oligonucleotide
agagguacggccugccgug

SEQ ID NO: 128897 - RNA, 19 nt, Artificial Sequence
  Description of Artificial Sequence: Synthetic oligonucleotide
gucuuaguaggaaugcuac

SEQ ID NO: 128898 - RNA, 19 nt, Artificial Sequence
  Description of Artificial Sequence: Synthetic oligonucleotide
gaagagauccuugauuaaa

SEQ ID NO: 128899 - RNA, 19 nt, Artificial Sequence
  Description of Artificial Sequence: Synthetic oligonucleotide
agauuuaagcucauguuua

SEQ ID NO: 128900 - RNA, 19 nt, Artificial Sequence
  Description of Artificial Sequence: Synthetic oligonucleotide
agcguuaagccauggcuga

SEQ ID NO: 128901 - RNA, 19 nt, Artificial Sequence
  Description of Artificial Sequence: Synthetic oligonucleotide
aauccucccuacuggagua

SEQ ID NO: 128902 - RNA, 19 nt, Artificial Sequence
  Description of Artificial Sequence: Synthetic oligonucleotide
uaauaccuccaacuguaua

SEQ ID NO: 128903 - RNA, 19 nt, Artificial Sequence
  Description of Artificial Sequence: Synthetic oligonucleotide
aucccauguuccuaugucu

SEQ ID NO: 128904 - RNA, 19 nt, Artificial Sequence
  Description of Artificial Sequence: Synthetic oligonucleotide
agacugaauuuuccauuag

SEQ ID NO: 128905 - RNA, 19 nt, Artificial Sequence
  Description of Artificial Sequence: Synthetic oligonucleotide
gcacauguacuccuauucg

SEQ ID NO: 128906 - RNA, 19 nt, Artificial Sequence
  Description of Artificial Sequence: Synthetic oligonucleotide
aaaacaagucaaggcggca

SEQ ID NO: 128907 - RNA, 19 nt, Artificial Sequence
  Description of Artificial Sequence: Synthetic oligonucleotide
caccuaacguuccuuuugc

SEQ ID NO: 128908 - RNA, 19 nt, Artificial Sequence
  Description of Artificial Sequence: Synthetic oligonucleotide
auguacuccuauucgaaua

SEQ ID NO: 128909 - RNA, 19 nt, Artificial Sequence
  Description of Artificial Sequence: Synthetic oligonucleotide
acuccuauucgaauaauaa

SEQ ID NO: 128910 - RNA, 19 nt, Artificial Sequence
  Description of Artificial Sequence: Synthetic oligonucleotide
ucauuacuagcguucucuc

SEQ ID NO: 128911 - RNA, 19 nt, Artificial Sequence
  Description of Artificial Sequence: Synthetic oligonucleotide
gacucaguaaguaugaguu

SEQ ID NO: 128912 - RNA, 19 nt, Artificial Sequence
  Description of Artificial Sequence: Synthetic oligonucleotide
acguuuucagcugaaggca

SEQ ID NO: 128913 - RNA, 19 nt, Artificial Sequence
  Description of Artificial Sequence: Synthetic oligonucleotide
agucaguaauggauucagc

SEQ ID NO: 128914 - RNA, 19 nt, Artificial Sequence
  Description of Artificial Sequence: Synthetic oligonucleotide
gucgcacucuaguagaguc

SEQ ID NO: 128915 - RNA, 19 nt, Artificial Sequence
  Description of Artificial Sequence: Synthetic oligonucleotide
uuuugcccaaucucaacuu

SEQ ID NO: 128916 - RNA, 19 nt, Artificial Sequence
  Description of Artificial Sequence: Synthetic oligonucleotide
auugccuaggcaagggaag

SEQ ID NO: 128917 - RNA, 19 nt, Artificial Sequence
  Description of Artificial Sequence: Synthetic oligonucleotide
uaacgucauuuguaguugu

SEQ ID NO: 128918 - RNA, 19 nt, Artificial Sequence
  Description of Artificial Sequence: Synthetic oligonucleotide
uagacacgaggucaaguua

SEQ ID NO: 128919 - RNA, 19 nt, Artificial Sequence
  Description of Artificial Sequence: Synthetic oligonucleotide
guagaaagaacauuacguu

SEQ ID NO: 128920 - RNA, 19 nt, Artificial Sequence
  Description of Artificial Sequence: Synthetic oligonucleotide
gaggcauauacuccaguaa

SEQ ID NO: 128921 - RNA, 19 nt, Artificial Sequence
  Description of Artificial Sequence: Synthetic oligonucleotide
uuaauaccuccaacuguau

SEQ ID NO: 128922 - RNA, 19 nt, Artificial Sequence
  Description of Artificial Sequence: Synthetic oligonucleotide
uccauagcaugcauauaua

SEQ ID NO: 128923 - RNA, 19 nt, Artificial Sequence
  Description of Artificial Sequence: Synthetic oligonucleotide
guagcagucugucuacaca

SEQ ID NO: 128924 - RNA, 19 nt, Artificial Sequence
  Description of Artificial Sequence: Synthetic oligonucleotide
cuaggaggauuauaaaucu

SEQ ID NO: 128925 - RNA, 19 nt, Artificial Sequence
  Description of Artificial Sequence: Synthetic oligonucleotide
gucaugacgaaugcugaug

SEQ ID NO: 128926 - RNA, 19 nt, Artificial Sequence
  Description of Artificial Sequence: Synthetic oligonucleotide
accagaucacgagcuagac

SEQ ID NO: 128927 - RNA, 19 nt, Artificial Sequence
  Description of Artificial Sequence: Synthetic oligonucleotide
acuagcguucucuccauuu

SEQ ID NO: 128928 - RNA, 19 nt, Artificial Sequence
  Description of Artificial Sequence: Synthetic oligonucleotide
uugggucaguauaucugcu

SEQ ID NO: 128929 - RNA, 19 nt, Artificial Sequence
  Description of Artificial Sequence: Synthetic oligonucleotide
aaauuacacuauguucaaa

SEQ ID NO: 128930 - RNA, 19 nt, Artificial Sequence
  Description of Artificial Sequence: Synthetic oligonucleotide
aauuacccuaucacauccu

SEQ ID NO: 128931 - RNA, 19 nt, Artificial Sequence
  Description of Artificial Sequence: Synthetic oligonucleotide
aucaacuuacugcauccua

SEQ ID NO: 128932 - RNA, 19 nt, Artificial Sequence
  Description of Artificial Sequence: Synthetic oligonucleotide
ucgcacucuaguagagucu

SEQ ID NO: 128933 - RNA, 19 nt, Artificial Sequence
  Description of Artificial Sequence: Synthetic oligonucleotide
aaccauggucuguuagaaa

SEQ ID NO: 128934 - RNA, 19 nt, Artificial Sequence
  Description of Artificial Sequence: Synthetic oligonucleotide
ccauagcaugcauauauac

SEQ ID NO: 128935 - RNA, 19 nt, Artificial Sequence
  Description of Artificial Sequence: Synthetic oligonucleotide
uuccucgacuacgauuucc

SEQ ID NO: 128936 - RNA, 19 nt, Artificial Sequence
  Description of Artificial Sequence: Synthetic oligonucleotide
gaaggcuccucucauaauu

SEQ ID NO: 128937 - RNA, 19 nt, Artificial Sequence
  Description of Artificial Sequence: Synthetic oligonucleotide
gggucaguauaucugcuac

SEQ ID NO: 128938 - RNA, 19 nt, Artificial Sequence
  Description of Artificial Sequence: Synthetic oligonucleotide
cacuauugccuaggcaagg

SEQ ID NO: 128939 - RNA, 19 nt, Artificial Sequence
  Description of Artificial Sequence: Synthetic oligonucleotide
agaggucuaacugugcauu

SEQ ID NO: 128940 - RNA, 19 nt, Artificial Sequence
  Description of Artificial Sequence: Synthetic oligonucleotide
caguggcaaauugaggcag

SEQ ID NO: 128941 - RNA, 19 nt, Artificial Sequence
  Description of Artificial Sequence: Synthetic oligonucleotide
aagcuguuuaaugguacua

SEQ ID NO: 128942 - RNA, 19 nt, Artificial Sequence
  Description of Artificial Sequence: Synthetic oligonucleotide
cccuaucacauccuguggg

SEQ ID NO: 128943 - RNA, 19 nt, Artificial Sequence
  Description of Artificial Sequence: Synthetic oligonucleotide
agacacgaggucaaguuau

SEQ ID NO: 128944 - RNA, 19 nt, Artificial Sequence
  Description of Artificial Sequence: Synthetic oligonucleotide
ccuauucgaauaauaauaa

SEQ ID NO: 128945 - RNA, 19 nt, Artificial Sequence
  Description of Artificial Sequence: Synthetic oligonucleotide
cugguuauuaagucuccaa

SEQ ID NO: 128946 - RNA, 19 nt, Artificial Sequence
  Description of Artificial Sequence: Synthetic oligonucleotide
cuacuuccccugaaggcuc

SEQ ID NO: 128947 - RNA, 19 nt, Artificial Sequence
  Description of Artificial Sequence: Synthetic oligonucleotide
uggacacaaccauggucug

SEQ ID NO: 128948 - RNA, 19 nt, Artificial Sequence
  Description of Artificial Sequence: Synthetic oligonucleotide
auagacuugaaggccccgu

SEQ ID NO: 128949 - RNA, 19 nt, Artificial Sequence
  Description of Artificial Sequence: Synthetic oligonucleotide
ugggaaccuguauguacac

SEQ ID NO: 128950 - RNA, 19 nt, Artificial Sequence
  Description of Artificial Sequence: Synthetic oligonucleotide
cucgccuguuuuacccugg

SEQ ID NO: 128951 - RNA, 19 nt, Artificial Sequence
  Description of Artificial Sequence: Synthetic oligonucleotide
uugcuuggcgucguauuga

SEQ ID NO: 128952 - RNA, 19 nt, Artificial Sequence
  Description of Artificial Sequence: Synthetic oligonucleotide
uuacccuggagagccaauc

SEQ ID NO: 128953 - RNA, 19 nt, Artificial Sequence
  Description of Artificial Sequence: Synthetic oligonucleotide
cacuaggaggauuauaaau

SEQ ID NO: 128954 - RNA, 19 nt, Artificial Sequence
  Description of Artificial Sequence: Synthetic oligonucleotide
agauuagggagaacuugcu

SEQ ID NO: 128955 - RNA, 19 nt, Artificial Sequence
  Description of Artificial Sequence: Synthetic oligonucleotide
uuacuagcguucucuccau

SEQ ID NO: 128956 - RNA, 19 nt, Artificial Sequence
  Description of Artificial Sequence: Synthetic oligonucleotide
cuguuuuacccuggagagc

SEQ ID NO: 128957 - RNA, 19 nt, Artificial Sequence
  Description of Artificial Sequence: Synthetic oligonucleotide
acgucauuuguaguuguaa

SEQ ID NO: 128958 - RNA, 19 nt, Artificial Sequence
  Description of Artificial Sequence: Synthetic oligonucleotide
cgucauuuguaguuguaag

SEQ ID NO: 128959 - RNA, 19 nt, Artificial Sequence
  Description of Artificial Sequence: Synthetic oligonucleotide
gcuaaucguuucuccuugg

SEQ ID NO: 128960 - RNA, 19 nt, Artificial Sequence
  Description of Artificial Sequence: Synthetic oligonucleotide
uuuacccuggagagccaau

SEQ ID NO: 128961 - RNA, 19 nt, Artificial Sequence
  Description of Artificial Sequence: Synthetic oligonucleotide
aucgaaguugucugauaua

SEQ ID NO: 128962 - RNA, 19 nt, Artificial Sequence
  Description of Artificial Sequence: Synthetic oligonucleotide
gcuaaauaagccaccuaac

SEQ ID NO: 128963 - RNA, 19 nt, Artificial Sequence
  Description of Artificial Sequence: Synthetic oligonucleotide
gagccaaucgaaguugucu

SEQ ID NO: 128964 - RNA, 19 nt, Artificial Sequence
  Description of Artificial Sequence: Synthetic oligonucleotide
caagucacuuuccugggua

SEQ ID NO: 128965 - RNA, 19 nt, Artificial Sequence
  Description of Artificial Sequence: Synthetic oligonucleotide
uggcuaaauaagccaccua

SEQ ID NO: 128966 - RNA, 19 nt, Artificial Sequence
  Description of Artificial Sequence: Synthetic oligonucleotide
uggagauuucuuggguggu

SEQ ID NO: 128967 - RNA, 19 nt, Artificial Sequence
  Description of Artificial Sequence: Synthetic oligonucleotide
cccacuaggaggauuauaa

SEQ ID NO: 128968 - RNA, 19 nt, Artificial Sequence
  Description of Artificial Sequence: Synthetic oligonucleotide
accuaacguuccuuuugca

SEQ ID NO: 128969 - RNA, 19 nt, Artificial Sequence
  Description of Artificial Sequence: Synthetic oligonucleotide
caguaacuuaucaaauagu

SEQ ID NO: 128970 - RNA, 19 nt, Artificial Sequence
  Description of Artificial Sequence: Synthetic oligonucleotide
cuucauuacuagcguucuc

SEQ ID NO: 128971 - RNA, 19 nt, Artificial Sequence
  Description of Artificial Sequence: Synthetic oligonucleotide
gaaggccccgugcaaagua

SEQ ID NO: 128972 - RNA, 19 nt, Artificial Sequence
  Description of Artificial Sequence: Synthetic oligonucleotide
ugucgcacucuaguagagu

SEQ ID NO: 128973 - RNA, 19 nt, Artificial Sequence
  Description of Artificial Sequence: Synthetic oligonucleotide
ccgugcaaaguauugcaac

SEQ ID NO: 128974 - RNA, 19 nt, Artificial Sequence
  Description of Artificial Sequence: Synthetic oligonucleotide
augcuuauguuuguacgua

SEQ ID NO: 128975 - RNA, 19 nt, Artificial Sequence
  Description of Artificial Sequence: Synthetic oligonucleotide
caguauaucugcuacucuu

SEQ ID NO: 128976 - RNA, 19 nt, Artificial Sequence
  Description of Artificial Sequence: Synthetic oligonucleotide
ucgccuguuuuacccugga

SEQ ID NO: 128977 - RNA, 19 nt, Artificial Sequence
  Description of Artificial Sequence: Synthetic oligonucleotide
ccauggucuguuagaaaag

SEQ ID NO: 128978 - RNA, 19 nt, Artificial Sequence
  Description of Artificial Sequence: Synthetic oligonucleotide
gagugaucuuuacucuucu

SEQ ID NO: 128979 - RNA, 19 nt, Artificial Sequence
  Description of Artificial Sequence: Synthetic oligonucleotide
gugaugucgcacucuagua

SEQ ID NO: 128980 - RNA, 19 nt, Artificial Sequence
  Description of Artificial Sequence: Synthetic oligonucleotide
cuccuauucgaauaauaau

SEQ ID NO: 128981 - RNA, 19 nt, Artificial Sequence
  Description of Artificial Sequence: Synthetic oligonucleotide
uuccacucacugucuguaa

SEQ ID NO: 128982 - RNA, 19 nt, Artificial Sequence
  Description of Artificial Sequence: Synthetic oligonucleotide
gacuacgauuuccucgugu

SEQ ID NO: 128983 - RNA, 19 nt, Artificial Sequence
  Description of Artificial Sequence: Synthetic oligonucleotide
caguaaguaugaguuccuc

SEQ ID NO: 128984 - RNA, 19 nt, Artificial Sequence
  Description of Artificial Sequence: Synthetic oligonucleotide
aacgucauuuguaguugua

SEQ ID NO: 128985 - RNA, 19 nt, Artificial Sequence
  Description of Artificial Sequence: Synthetic oligonucleotide
gguccauacuagaugguca

SEQ ID NO: 128986 - RNA, 19 nt, Artificial Sequence
  Description of Artificial Sequence: Synthetic oligonucleotide
agccaccuaacguuccuuu

SEQ ID NO: 128987 - RNA, 19 nt, Artificial Sequence
  Description of Artificial Sequence: Synthetic oligonucleotide
ccggcaauccaaugaguag

SEQ ID NO: 128988 - RNA, 19 nt, Artificial Sequence
  Description of Artificial Sequence: Synthetic oligonucleotide
uggcgucguauugacacau

SEQ ID NO: 128989 - RNA, 19 nt, Artificial Sequence
  Description of Artificial Sequence: Synthetic oligonucleotide
cuagauggucaguucucaa

SEQ ID NO: 128990 - RNA, 19 nt, Artificial Sequence
  Description of Artificial Sequence: Synthetic oligonucleotide
ccaccuaacguuccuuuug

SEQ ID NO: 128991 - RNA, 19 nt, Artificial Sequence
  Description of Artificial Sequence: Synthetic oligonucleotide
uuaagccauggcugaucua

SEQ ID NO: 128992 - RNA, 19 nt, Artificial Sequence
  Description of Artificial Sequence: Synthetic oligonucleotide
augucgcacucuaguagag

SEQ ID NO: 128993 - RNA, 19 nt, Artificial Sequence
  Description of Artificial Sequence: Synthetic oligonucleotide
ggugccgccuuucacgcca

SEQ ID NO: 128994 - RNA, 19 nt, Artificial Sequence
  Description of Artificial Sequence: Synthetic oligonucleotide
accugauuuugaaaucuuu

SEQ ID NO: 128995 - RNA, 19 nt, Artificial Sequence
  Description of Artificial Sequence: Synthetic oligonucleotide
gaauguggaagagauccuu

SEQ ID NO: 128996 - RNA, 19 nt, Artificial Sequence
  Description of Artificial Sequence: Synthetic oligonucleotide
aaggccccgugcaaaguau

SEQ ID NO: 128997 - RNA, 19 nt, Artificial Sequence
  Description of Artificial Sequence: Synthetic oligonucleotide
gguacggccugccgugugc

SEQ ID NO: 128998 - RNA, 19 nt, Artificial Sequence
  Description of Artificial Sequence: Synthetic oligonucleotide
ugaaggccccgugcaaagu

SEQ ID NO: 128999 - RNA, 19 nt, Artificial Sequence
  Description of Artificial Sequence: Synthetic oligonucleotide
guaucacuugguaggcauc

SEQ ID NO: 129000 - RNA, 19 nt, Artificial Sequence
  Description of Artificial Sequence: Synthetic oligonucleotide
gucaagcuguuuaauggua

SEQ ID NO: 129001 - RNA, 19 nt, Artificial Sequence
  Description of Artificial Sequence: Synthetic oligonucleotide
ccuguauguacaccagauc

SEQ ID NO: 129002 - RNA, 19 nt, Artificial Sequence
  Description of Artificial Sequence: Synthetic oligonucleotide
gccgugugcacuguagcag

SEQ ID NO: 129003 - RNA, 19 nt, Artificial Sequence
  Description of Artificial Sequence: Synthetic oligonucleotide
caaucgaaguugucugaua

SEQ ID NO: 129004 - RNA, 19 nt, Artificial Sequence
  Description of Artificial Sequence: Synthetic oligonucleotide
accaaauuaugaagauguu

SEQ ID NO: 129005 - RNA, 19 nt, Artificial Sequence
  Description of Artificial Sequence: Synthetic oligonucleotide
caugacgaaugcugaugaa

SEQ ID NO: 129006 - RNA, 19 nt, Artificial Sequence
  Description of Artificial Sequence: Synthetic oligonucleotide
cuaaucguuucuccuuggu

SEQ ID NO: 129007 - RNA, 19 nt, Artificial Sequence
  Description of Artificial Sequence: Synthetic oligonucleotide
uacuagcguucucuccauu

SEQ ID NO: 129008 - RNA, 19 nt, Artificial Sequence
  Description of Artificial Sequence: Synthetic oligonucleotide
agaucacgagcuagacuga

SEQ ID NO: 129009 - RNA, 19 nt, Artificial Sequence
  Description of Artificial Sequence: Synthetic oligonucleotide
gcccugguuauuaagucuc

SEQ ID NO: 129010 - RNA, 19 nt, Artificial Sequence
  Description of Artificial Sequence: Synthetic oligonucleotide
cccugguuauuaagucucc

SEQ ID NO: 129011 - RNA, 19 nt, Artificial Sequence
  Description of Artificial Sequence: Synthetic oligonucleotide
uggugccgccuuucacgcc

SEQ ID NO: 129012 - RNA, 19 nt, Artificial Sequence
  Description of Artificial Sequence: Synthetic oligonucleotide
aucacgagcuagacugaau

SEQ ID NO: 129013 - RNA, 19 nt, Artificial Sequence
  Description of Artificial Sequence: Synthetic oligonucleotide
ggucuaacugugcauugau

SEQ ID NO: 129014 - RNA, 19 nt, Artificial Sequence
  Description of Artificial Sequence: Synthetic oligonucleotide
cugcuaaucguuucuccuu

SEQ ID NO: 129015 - RNA, 19 nt, Artificial Sequence
  Description of Artificial Sequence: Synthetic oligonucleotide
uacggccugccgugugcac

SEQ ID NO: 129016 - RNA, 19 nt, Artificial Sequence
  Description of Artificial Sequence: Synthetic oligonucleotide
cucuuauaugaaggaggaa

SEQ ID NO: 129017 - RNA, 19 nt, Artificial Sequence
  Description of Artificial Sequence: Synthetic oligonucleotide
gcgucguauugacacaucu

SEQ ID NO: 129018 - RNA, 19 nt, Artificial Sequence
  Description of Artificial Sequence: Synthetic oligonucleotide
gcuuauguuuguacguaua

SEQ ID NO: 129019 - RNA, 19 nt, Artificial Sequence
  Description of Artificial Sequence: Synthetic oligonucleotide
cuagcguucucuccauuuu

SEQ ID NO: 129020 - RNA, 19 nt, Artificial Sequence
  Description of Artificial Sequence: Synthetic oligonucleotide
ccccgugcaaaguauugca

SEQ ID NO: 129021 - RNA, 19 nt, Artificial Sequence
  Description of Artificial Sequence: Synthetic oligonucleotide
ccucgccuguuuuacccug

SEQ ID NO: 129022 - RNA, 19 nt, Artificial Sequence
  Description of Artificial Sequence: Synthetic oligonucleotide
cccggcaauccaaugagua

SEQ ID NO: 129023 - RNA, 19 nt, Artificial Sequence
  Description of Artificial Sequence: Synthetic oligonucleotide
ggccccgugcaaaguauug

SEQ ID NO: 129024 - RNA, 19 nt, Artificial Sequence
  Description of Artificial Sequence: Synthetic oligonucleotide
ccuaacguuccuuuugcau

SEQ ID NO: 129025 - RNA, 19 nt, Artificial Sequence
  Description of Artificial Sequence: Synthetic oligonucleotide
guacggccugccgugugca

SEQ ID NO: 129026 - RNA, 19 nt, Artificial Sequence
  Description of Artificial Sequence: Synthetic oligonucleotide
ccucgacuacgauuuccuc

SEQ ID NO: 129027 - RNA, 19 nt, Artificial Sequence
  Description of Artificial Sequence: Synthetic oligonucleotide
gacacgaggucaaguuauu

SEQ ID NO: 129028 - RNA, 19 nt, Artificial Sequence
  Description of Artificial Sequence: Synthetic oligonucleotide
cuuucacgccauccaguau

SEQ ID NO: 129029 - RNA, 19 nt, Artificial Sequence
  Description of Artificial Sequence: Synthetic oligonucleotide
cguuaagccauggcugauc

SEQ ID NO: 129030 - RNA, 19 nt, Artificial Sequence
  Description of Artificial Sequence: Synthetic oligonucleotide
cccgugcaaaguauugcaa

SEQ ID NO: 129031 - RNA, 19 nt, Artificial Sequence
  Description of Artificial Sequence: Synthetic oligonucleotide
guacuccuauucgaauaau

SEQ ID NO: 129032 - RNA, 19 nt, Artificial Sequence
  Description of Artificial Sequence: Synthetic oligonucleotide
ugccgccuuucacgccauc

SEQ ID NO: 129033 - RNA, 19 nt, Artificial Sequence
  Description of Artificial Sequence: Synthetic oligonucleotide
ccauacuagauggucaguu

SEQ ID NO: 129034 - RNA, 19 nt, Artificial Sequence
  Description of Artificial Sequence: Synthetic oligonucleotide
ccuagacaccaagucagua

SEQ ID NO: 129035 - RNA, 19 nt, Artificial Sequence
  Description of Artificial Sequence: Synthetic oligonucleotide
ccagaucacgagcuagacu

SEQ ID NO: 129036 - RNA, 19 nt, Artificial Sequence
  Description of Artificial Sequence: Synthetic oligonucleotide
ggcgucguauugacacauc

SEQ ID NO: 129037 - RNA, 19 nt, Artificial Sequence
  Description of Artificial Sequence: Synthetic oligonucleotide
gagguacggccugccgugu

SEQ ID NO: 129038 - RNA, 19 nt, Artificial Sequence
  Description of Artificial Sequence: Synthetic oligonucleotide
gcuuggcgucguauugaca

SEQ ID NO: 129039 - RNA, 19 nt, Artificial Sequence
  Description of Artificial Sequence: Synthetic oligonucleotide
ccaaucgaaguugucugau

SEQ ID NO: 129040 - RNA, 19 nt, Artificial Sequence
  Description of Artificial Sequence: Synthetic oligonucleotide
gccaccuaacguuccuuuu

SEQ ID NO: 129041 - RNA, 19 nt, Artificial Sequence
  Description of Artificial Sequence: Synthetic oligonucleotide
gccucgccuguuuuacccu

SEQ ID NO: 129042 - RNA, 19 nt, Artificial Sequence
  Description of Artificial Sequence: Synthetic oligonucleotide
cgacuacgauuuccucgug

SEQ ID NO: 129043 - RNA, 19 nt, Artificial Sequence
  Description of Artificial Sequence: Synthetic oligonucleotide
gcguuaagccauggcugau

SEQ ID NO: 129044 - RNA, 19 nt, Artificial Sequence
  Description of Artificial Sequence: Synthetic oligonucleotide
uuaauaaugucuuugaagg

SEQ ID NO: 129045 - RNA, 19 nt, Artificial Sequence
  Description of Artificial Sequence: Synthetic oligonucleotide
aagaucuacguguuaaacc

SEQ ID NO: 129046 - RNA, 19 nt, Artificial Sequence
  Description of Artificial Sequence: Synthetic oligonucleotide
uuaucaguuaugcagaggc

SEQ ID NO: 129047 - RNA, 19 nt, Artificial Sequence
  Description of Artificial Sequence: Synthetic oligonucleotide
aguucaaaauuauugcugc

SEQ ID NO: 129048 - RNA, 19 nt, Artificial Sequence
  Description of Artificial Sequence: Synthetic oligonucleotide
aaucucacuguuaauaacc

SEQ ID NO: 129049 - RNA, 19 nt, Artificial Sequence
  Description of Artificial Sequence: Synthetic oligonucleotide
aaugcgaggagucucaaug

SEQ ID NO: 129050 - RNA, 19 nt, Artificial Sequence
  Description of Artificial Sequence: Synthetic oligonucleotide
gauguugaaacguugauuc

SEQ ID NO: 129051 - RNA, 19 nt, Artificial Sequence
  Description of Artificial Sequence: Synthetic oligonucleotide
guaacuucgaauuacacca

SEQ ID NO: 129052 - RNA, 19 nt, Artificial Sequence
  Description of Artificial Sequence: Synthetic oligonucleotide
ugagaaguaauccuuuugc

SEQ ID NO: 129053 - RNA, 19 nt, Artificial Sequence
  Description of Artificial Sequence: Synthetic oligonucleotide
uguaccagagcauacauac

SEQ ID NO: 129054 - RNA, 19 nt, Artificial Sequence
  Description of Artificial Sequence: Synthetic oligonucleotide
ugagaauaaucccugaaga

SEQ ID NO: 129055 - RNA, 19 nt, Artificial Sequence
  Description of Artificial Sequence: Synthetic oligonucleotide
uucauaacgucucauuucc

SEQ ID NO: 129056 - RNA, 19 nt, Artificial Sequence
  Description of Artificial Sequence: Synthetic oligonucleotide
uauaugagacauaagcaug

SEQ ID NO: 129057 - RNA, 19 nt, Artificial Sequence
  Description of Artificial Sequence: Synthetic oligonucleotide
auacguaugauaaucacac

SEQ ID NO: 129058 - RNA, 19 nt, Artificial Sequence
  Description of Artificial Sequence: Synthetic oligonucleotide
auuagcucuagccuggaac

SEQ ID NO: 129059 - RNA, 19 nt, Artificial Sequence
  Description of Artificial Sequence: Synthetic oligonucleotide
aaaggauauuaucuauaac

SEQ ID NO: 129060 - RNA, 19 nt, Artificial Sequence
  Description of Artificial Sequence: Synthetic oligonucleotide
uuagcuuuuauacugcuaa

SEQ ID NO: 129061 - RNA, 19 nt, Artificial Sequence
  Description of Artificial Sequence: Synthetic oligonucleotide
uguaacuucgaauuacacc

SEQ ID NO: 129062 - RNA, 19 nt, Artificial Sequence
  Description of Artificial Sequence: Synthetic oligonucleotide
uugagaauaaucccugaag

SEQ ID NO: 129063 - RNA, 19 nt, Artificial Sequence
  Description of Artificial Sequence: Synthetic oligonucleotide
aauacggcuuaauaauguc

SEQ ID NO: 129064 - RNA, 19 nt, Artificial Sequence
  Description of Artificial Sequence: Synthetic oligonucleotide
uuauuaucaguuaugcaga

SEQ ID NO: 129065 - RNA, 19 nt, Artificial Sequence
  Description of Artificial Sequence: Synthetic oligonucleotide
aacaauagcccacuuauau

SEQ ID NO: 129066 - RNA, 19 nt, Artificial Sequence
  Description of Artificial Sequence: Synthetic oligonucleotide
caucagacgaaucagggcg

SEQ ID NO: 129067 - RNA, 19 nt, Artificial Sequence
  Description of Artificial Sequence: Synthetic oligonucleotide
uagauuaacgaauuugucu

SEQ ID NO: 129068 - RNA, 19 nt, Artificial Sequence
  Description of Artificial Sequence: Synthetic oligonucleotide
aacgaauuugucuuaauua

SEQ ID NO: 129069 - RNA, 19 nt, Artificial Sequence
  Description of Artificial Sequence: Synthetic oligonucleotide
acguaugauaaucacacag

SEQ ID NO: 129070 - RNA, 19 nt, Artificial Sequence
  Description of Artificial Sequence: Synthetic oligonucleotide
cauuacauaacgaucauca

SEQ ID NO: 129071 - RNA, 19 nt, Artificial Sequence
  Description of Artificial Sequence: Synthetic oligonucleotide
agaucuacguguuaaaccu

SEQ ID NO: 129072 - RNA, 19 nt, Artificial Sequence
  Description of Artificial Sequence: Synthetic oligonucleotide
uaugcagaggcuuuaaaac

SEQ ID NO: 129073 - RNA, 19 nt, Artificial Sequence
  Description of Artificial Sequence: Synthetic oligonucleotide
aguaauacuuuaucaaucu

SEQ ID NO: 129074 - RNA, 19 nt, Artificial Sequence
  Description of Artificial Sequence: Synthetic oligonucleotide
aauaaccuauaaaugaucu

SEQ ID NO: 129075 - RNA, 19 nt, Artificial Sequence
  Description of Artificial Sequence: Synthetic oligonucleotide
cuugguuccucuaugaaac

SEQ ID NO: 129076 - RNA, 19 nt, Artificial Sequence
  Description of Artificial Sequence: Synthetic oligonucleotide
ucuuucaccauacccgagg

SEQ ID NO: 129077 - RNA, 19 nt, Artificial Sequence
  Description of Artificial Sequence: Synthetic oligonucleotide
cacgaguucaaaauuauug

SEQ ID NO: 129078 - RNA, 19 nt, Artificial Sequence
  Description of Artificial Sequence: Synthetic oligonucleotide
uacaacuagugucaaagca

SEQ ID NO: 129079 - RNA, 19 nt, Artificial Sequence
  Description of Artificial Sequence: Synthetic oligonucleotide
uauaauaccuaacacugua

SEQ ID NO: 129080 - RNA, 19 nt, Artificial Sequence
  Description of Artificial Sequence: Synthetic oligonucleotide
uaauaccuaacacuguaca

SEQ ID NO: 129081 - RNA, 19 nt, Artificial Sequence
  Description of Artificial Sequence: Synthetic oligonucleotide
uguguuacacuguaagagc

SEQ ID NO: 129082 - RNA, 19 nt, Artificial Sequence
  Description of Artificial Sequence: Synthetic oligonucleotide
ucuauaacacaaaguaacu

SEQ ID NO: 129083 - RNA, 19 nt, Artificial Sequence
  Description of Artificial Sequence: Synthetic oligonucleotide
ucauuugugguaauggauc

SEQ ID NO: 129084 - RNA, 19 nt, Artificial Sequence
  Description of Artificial Sequence: Synthetic oligonucleotide
cacuagauagacaaaugcc

SEQ ID NO: 129085 - RNA, 19 nt, Artificial Sequence
  Description of Artificial Sequence: Synthetic oligonucleotide
auccauauaauaccuaaca

SEQ ID NO: 129086 - RNA, 19 nt, Artificial Sequence
  Description of Artificial Sequence: Synthetic oligonucleotide
uuuauacugcuaaugcaca

SEQ ID NO: 129087 - RNA, 19 nt, Artificial Sequence
  Description of Artificial Sequence: Synthetic oligonucleotide
uauaucacacuagauagac

SEQ ID NO: 129088 - RNA, 19 nt, Artificial Sequence
  Description of Artificial Sequence: Synthetic oligonucleotide
aagggcuaguuauuguuag

SEQ ID NO: 129089 - RNA, 19 nt, Artificial Sequence
  Description of Artificial Sequence: Synthetic oligonucleotide
ugcaauacggcuuaauaau

SEQ ID NO: 129090 - RNA, 19 nt, Artificial Sequence
  Description of Artificial Sequence: Synthetic oligonucleotide
uguuaagaguaauugcaca

SEQ ID NO: 129091 - RNA, 19 nt, Artificial Sequence
  Description of Artificial Sequence: Synthetic oligonucleotide
uauuaagggguaaaggaua

SEQ ID NO: 129092 - RNA, 19 nt, Artificial Sequence
  Description of Artificial Sequence: Synthetic oligonucleotide
agggguaaaggauauuauc

SEQ ID NO: 129093 - RNA, 19 nt, Artificial Sequence
  Description of Artificial Sequence: Synthetic oligonucleotide
agauguaacuucgaauuac

SEQ ID NO: 129094 - RNA, 19 nt, Artificial Sequence
  Description of Artificial Sequence: Synthetic oligonucleotide
aauacguaugauaaucaca

SEQ ID NO: 129095 - RNA, 19 nt, Artificial Sequence
  Description of Artificial Sequence: Synthetic oligonucleotide
aauaccuaacacuguacau

SEQ ID NO: 129096 - RNA, 19 nt, Artificial Sequence
  Description of Artificial Sequence: Synthetic oligonucleotide
uguuguggauguugaaacg

SEQ ID NO: 129097 - RNA, 19 nt, Artificial Sequence
  Description of Artificial Sequence: Synthetic oligonucleotide
aggacuuauaacagcaagc

SEQ ID NO: 129098 - RNA, 19 nt, Artificial Sequence
  Description of Artificial Sequence: Synthetic oligonucleotide
gaaacguugauucauuugu

SEQ ID NO: 129099 - RNA, 19 nt, Artificial Sequence
  Description of Artificial Sequence: Synthetic oligonucleotide
ugacacgaguuuuaaagca

SEQ ID NO: 129100 - RNA, 19 nt, Artificial Sequence
  Description of Artificial Sequence: Synthetic oligonucleotide
aaucagggcgacguaaggg

SEQ ID NO: 129101 - RNA, 19 nt, Artificial Sequence
  Description of Artificial Sequence: Synthetic oligonucleotide
uucgaauuacaccacugcu

SEQ ID NO: 129102 - RNA, 19 nt, Artificial Sequence
  Description of Artificial Sequence: Synthetic oligonucleotide
uuagauuaacgaauuuguc

SEQ ID NO: 129103 - RNA, 19 nt, Artificial Sequence
  Description of Artificial Sequence: Synthetic oligonucleotide
guacauauccucuucauaa

SEQ ID NO: 129104 - RNA, 19 nt, Artificial Sequence
  Description of Artificial Sequence: Synthetic oligonucleotide
cuuagcguggcguagagca

SEQ ID NO: 129105 - RNA, 19 nt, Artificial Sequence
  Description of Artificial Sequence: Synthetic oligonucleotide
uaaaagaccuaaugggccu

SEQ ID NO: 129106 - RNA, 19 nt, Artificial Sequence
  Description of Artificial Sequence: Synthetic oligonucleotide
auaacgucucauuuccauc

SEQ ID NO: 129107 - RNA, 19 nt, Artificial Sequence
  Description of Artificial Sequence: Synthetic oligonucleotide
aaaacguacugcuguaaaa

SEQ ID NO: 129108 - RNA, 19 nt, Artificial Sequence
  Description of Artificial Sequence: Synthetic oligonucleotide
uauuaucaguuaugcagag

SEQ ID NO: 129109 - RNA, 19 nt, Artificial Sequence
  Description of Artificial Sequence: Synthetic oligonucleotide
gaauacguaugauaaucac

SEQ ID NO: 129110 - RNA, 19 nt, Artificial Sequence
  Description of Artificial Sequence: Synthetic oligonucleotide
acgaucaucagacgaauca

SEQ ID NO: 129111 - RNA, 19 nt, Artificial Sequence
  Description of Artificial Sequence: Synthetic oligonucleotide
auauuagcuuuuauacugc

SEQ ID NO: 129112 - RNA, 19 nt, Artificial Sequence
  Description of Artificial Sequence: Synthetic oligonucleotide
uguccaagacguccggugg

SEQ ID NO: 129113 - RNA, 19 nt, Artificial Sequence
  Description of Artificial Sequence: Synthetic oligonucleotide
ucuugcucgaauacugggc

SEQ ID NO: 129114 - RNA, 19 nt, Artificial Sequence
  Description of Artificial Sequence: Synthetic oligonucleotide
uucuugcucgaauacuggg

SEQ ID NO: 129115 - RNA, 19 nt, Artificial Sequence
  Description of Artificial Sequence: Synthetic oligonucleotide
uguaagauggccacaccaa

SEQ ID NO: 129116 - RNA, 19 nt, Artificial Sequence
  Description of Artificial Sequence: Synthetic oligonucleotide
uugauuagauuaacgaauu

SEQ ID NO: 129117 - RNA, 19 nt, Artificial Sequence
  Description of Artificial Sequence: Synthetic oligonucleotide
uguuaguugcacaaugaua

SEQ ID NO: 129118 - RNA, 19 nt, Artificial Sequence
  Description of Artificial Sequence: Synthetic oligonucleotide
guagguuuucugcaauacg

SEQ ID NO: 129119 - RNA, 19 nt, Artificial Sequence
  Description of Artificial Sequence: Synthetic oligonucleotide
accaaguuggaacucguug

SEQ ID NO: 129120 - RNA, 19 nt, Artificial Sequence
  Description of Artificial Sequence: Synthetic oligonucleotide
acugcuaaugcacaacuaa

SEQ ID NO: 129121 - RNA, 19 nt, Artificial Sequence
  Description of Artificial Sequence: Synthetic oligonucleotide
gaauacugggcuuuacuuc

SEQ ID NO: 129122 - RNA, 19 nt, Artificial Sequence
  Description of Artificial Sequence: Synthetic oligonucleotide
cuucgaauuacaccacugc

SEQ ID NO: 129123 - RNA, 19 nt, Artificial Sequence
  Description of Artificial Sequence: Synthetic oligonucleotide
aguaagauguaacuucgaa

SEQ ID NO: 129124 - RNA, 19 nt, Artificial Sequence
  Description of Artificial Sequence: Synthetic oligonucleotide
aaacguacugcuguaaaau

SEQ ID NO: 129125 - RNA, 19 nt, Artificial Sequence
  Description of Artificial Sequence: Synthetic oligonucleotide
auaaccuauaaaugaucug

SEQ ID NO: 129126 - RNA, 19 nt, Artificial Sequence
  Description of Artificial Sequence: Synthetic oligonucleotide
acucaaauggcaggguagc

SEQ ID NO: 129127 - RNA, 19 nt, Artificial Sequence
  Description of Artificial Sequence: Synthetic oligonucleotide
cucgucuccgccaauauuc

SEQ ID NO: 129128 - RNA, 19 nt, Artificial Sequence
  Description of Artificial Sequence: Synthetic oligonucleotide
aaacaagguugacauuucu

SEQ ID NO: 129129 - RNA, 19 nt, Artificial Sequence
  Description of Artificial Sequence: Synthetic oligonucleotide
ugcauguuuugucauuaca

SEQ ID NO: 129130 - RNA, 19 nt, Artificial Sequence
  Description of Artificial Sequence: Synthetic oligonucleotide
caaaauaauggguggagga

SEQ ID NO: 129131 - RNA, 19 nt, Artificial Sequence
  Description of Artificial Sequence: Synthetic oligonucleotide
cugacacgaguuuuaaagc

SEQ ID NO: 129132 - RNA, 19 nt, Artificial Sequence
  Description of Artificial Sequence: Synthetic oligonucleotide
acaauagcccacuuauaug

SEQ ID NO: 129133 - RNA, 19 nt, Artificial Sequence
  Description of Artificial Sequence: Synthetic oligonucleotide
uaauaaugucuuugaaggu

SEQ ID NO: 129134 - RNA, 19 nt, Artificial Sequence
  Description of Artificial Sequence: Synthetic oligonucleotide
gcuaguuauuguuaguugc

SEQ ID NO: 129135 - RNA, 19 nt, Artificial Sequence
  Description of Artificial Sequence: Synthetic oligonucleotide
ucgaauuacaccacugcua

SEQ ID NO: 129136 - RNA, 19 nt, Artificial Sequence
  Description of Artificial Sequence: Synthetic oligonucleotide
agggauccuuuucacaagg

SEQ ID NO: 129137 - RNA, 19 nt, Artificial Sequence
  Description of Artificial Sequence: Synthetic oligonucleotide
uuggguaaaugguugcaug

SEQ ID NO: 129138 - RNA, 19 nt, Artificial Sequence
  Description of Artificial Sequence: Synthetic oligonucleotide
uuacaacuagugucaaagc

SEQ ID NO: 129139 - RNA, 19 nt, Artificial Sequence
  Description of Artificial Sequence: Synthetic oligonucleotide
cauaacgaucaucagacga

SEQ ID NO: 129140 - RNA, 19 nt, Artificial Sequence
  Description of Artificial Sequence: Synthetic oligonucleotide
auaauaccuaacacuguac

SEQ ID NO: 129141 - RNA, 19 nt, Artificial Sequence
  Description of Artificial Sequence: Synthetic oligonucleotide
cuguuaagaguaauugcac

SEQ ID NO: 129142 - RNA, 19 nt, Artificial Sequence
  Description of Artificial Sequence: Synthetic oligonucleotide
aguuauuguuaguugcaca

SEQ ID NO: 129143 - RNA, 19 nt, Artificial Sequence
  Description of Artificial Sequence: Synthetic oligonucleotide
ugguuguacaucacucugc

SEQ ID NO: 129144 - RNA, 19 nt, Artificial Sequence
  Description of Artificial Sequence: Synthetic oligonucleotide
guaauggauccauuccuag

SEQ ID NO: 129145 - RNA, 19 nt, Artificial Sequence
  Description of Artificial Sequence: Synthetic oligonucleotide
cuuuuauacugcuaaugca

SEQ ID NO: 129146 - RNA, 19 nt, Artificial Sequence
  Description of Artificial Sequence: Synthetic oligonucleotide
uuguauuguaauccuucac

SEQ ID NO: 129147 - RNA, 19 nt, Artificial Sequence
  Description of Artificial Sequence: Synthetic oligonucleotide
uacggcuuaauaaugucuu

SEQ ID NO: 129148 - RNA, 19 nt, Artificial Sequence
  Description of Artificial Sequence: Synthetic oligonucleotide
uggguaaaugguugcaugu

SEQ ID NO: 129149 - RNA, 19 nt, Artificial Sequence
  Description of Artificial Sequence: Synthetic oligonucleotide
guuucguaccucuucaaca

SEQ ID NO: 129150 - RNA, 19 nt, Artificial Sequence
  Description of Artificial Sequence: Synthetic oligonucleotide
ucgaauacugggcuuuacu

SEQ ID NO: 129151 - RNA, 19 nt, Artificial Sequence
  Description of Artificial Sequence: Synthetic oligonucleotide
guaauaccccuuuuagagc

SEQ ID NO: 129152 - RNA, 19 nt, Artificial Sequence
  Description of Artificial Sequence: Synthetic oligonucleotide
uuguuaguugcacaaugau

SEQ ID NO: 129153 - RNA, 19 nt, Artificial Sequence
  Description of Artificial Sequence: Synthetic oligonucleotide
ucucaggacuuauaacagc

SEQ ID NO: 129154 - RNA, 19 nt, Artificial Sequence
  Description of Artificial Sequence: Synthetic oligonucleotide
cuaccaguaacuccauagc

SEQ ID NO: 129155 - RNA, 19 nt, Artificial Sequence
  Description of Artificial Sequence: Synthetic oligonucleotide
cuugauuagauuaacgaau

SEQ ID NO: 129156 - RNA, 19 nt, Artificial Sequence
  Description of Artificial Sequence: Synthetic oligonucleotide
agcacguucagugauagaa

SEQ ID NO: 129157 - RNA, 19 nt, Artificial Sequence
  Description of Artificial Sequence: Synthetic oligonucleotide
gaaucagggcgacguaagg

SEQ ID NO: 129158 - RNA, 19 nt, Artificial Sequence
  Description of Artificial Sequence: Synthetic oligonucleotide
uacuccuacucguaauacc

SEQ ID NO: 129159 - RNA, 19 nt, Artificial Sequence
  Description of Artificial Sequence: Synthetic oligonucleotide
uguaucuggcggaaugcga

SEQ ID NO: 129160 - RNA, 19 nt, Artificial Sequence
  Description of Artificial Sequence: Synthetic oligonucleotide
uccgagcacagcaaaacaa

SEQ ID NO: 129161 - RNA, 19 nt, Artificial Sequence
  Description of Artificial Sequence: Synthetic oligonucleotide
accggcaccuauuuuaaca

SEQ ID NO: 129162 - RNA, 19 nt, Artificial Sequence
  Description of Artificial Sequence: Synthetic oligonucleotide
cacuguaagagcuguuaag

SEQ ID NO: 129163 - RNA, 19 nt, Artificial Sequence
  Description of Artificial Sequence: Synthetic oligonucleotide
uguugaaacguugauucau

SEQ ID NO: 129164 - RNA, 19 nt, Artificial Sequence
  Description of Artificial Sequence: Synthetic oligonucleotide
cucaggacuuauaacagca

SEQ ID NO: 129165 - RNA, 19 nt, Artificial Sequence
  Description of Artificial Sequence: Synthetic oligonucleotide
ucguaccucuucaacauaa

SEQ ID NO: 129166 - RNA, 19 nt, Artificial Sequence
  Description of Artificial Sequence: Synthetic oligonucleotide
ccuauaaaugaucuggaug

SEQ ID NO: 129167 - RNA, 19 nt, Artificial Sequence
  Description of Artificial Sequence: Synthetic oligonucleotide
acguugauucauuuguggu

SEQ ID NO: 129168 - RNA, 19 nt, Artificial Sequence
  Description of Artificial Sequence: Synthetic oligonucleotide
ucggagaauacguaugaua

SEQ ID NO: 129169 - RNA, 19 nt, Artificial Sequence
  Description of Artificial Sequence: Synthetic oligonucleotide
cacucaaauggcaggguag

SEQ ID NO: 129170 - RNA, 19 nt, Artificial Sequence
  Description of Artificial Sequence: Synthetic oligonucleotide
uauacugcuaaugcacaac

SEQ ID NO: 129171 - RNA, 19 nt, Artificial Sequence
  Description of Artificial Sequence: Synthetic oligonucleotide
aucagggcgacguaagggu

SEQ ID NO: 129172 - RNA, 19 nt, Artificial Sequence
  Description of Artificial Sequence: Synthetic oligonucleotide
auuaucaguuaugcagagg

SEQ ID NO: 129173 - RNA, 19 nt, Artificial Sequence
  Description of Artificial Sequence: Synthetic oligonucleotide
auaugagacauaagcaugu

SEQ ID NO: 129174 - RNA, 19 nt, Artificial Sequence
  Description of Artificial Sequence: Synthetic oligonucleotide
auauuaagggguaaaggau

SEQ ID NO: 129175 - RNA, 19 nt, Artificial Sequence
  Description of Artificial Sequence: Synthetic oligonucleotide
cacucaaauacucuucuca

SEQ ID NO: 129176 - RNA, 19 nt, Artificial Sequence
  Description of Artificial Sequence: Synthetic oligonucleotide
uuauacugcuaaugcacaa

SEQ ID NO: 129177 - RNA, 19 nt, Artificial Sequence
  Description of Artificial Sequence: Synthetic oligonucleotide
uaucuggcggaaugcgagg

SEQ ID NO: 129178 - RNA, 19 nt, Artificial Sequence
  Description of Artificial Sequence: Synthetic oligonucleotide
uuuccgagcacagcaaaac

SEQ ID NO: 129179 - RNA, 19 nt, Artificial Sequence
  Description of Artificial Sequence: Synthetic oligonucleotide
aaacguugauucauuugug

SEQ ID NO: 129180 - RNA, 19 nt, Artificial Sequence
  Description of Artificial Sequence: Synthetic oligonucleotide
uacccgagguuacaucucc

SEQ ID NO: 129181 - RNA, 19 nt, Artificial Sequence
  Description of Artificial Sequence: Synthetic oligonucleotide
ugcgaggagucucaaugca

SEQ ID NO: 129182 - RNA, 19 nt, Artificial Sequence
  Description of Artificial Sequence: Synthetic oligonucleotide
acacgaguuuuaaagcacg

SEQ ID NO: 129183 - RNA, 19 nt, Artificial Sequence
  Description of Artificial Sequence: Synthetic oligonucleotide
ucaggcauucgucugcgau

SEQ ID NO: 129184 - RNA, 19 nt, Artificial Sequence
  Description of Artificial Sequence: Synthetic oligonucleotide
auagcccacuuauauguga

SEQ ID NO: 129185 - RNA, 19 nt, Artificial Sequence
  Description of Artificial Sequence: Synthetic oligonucleotide
guaucuggcggaaugcgag

SEQ ID NO: 129186 - RNA, 19 nt, Artificial Sequence
  Description of Artificial Sequence: Synthetic oligonucleotide
caauagcccacuuauaugu

SEQ ID NO: 129187 - RNA, 19 nt, Artificial Sequence
  Description of Artificial Sequence: Synthetic oligonucleotide
uuuuccgagcacagcaaaa

SEQ ID NO: 129188 - RNA, 19 nt, Artificial Sequence
  Description of Artificial Sequence: Synthetic oligonucleotide
uugcaagaccauauaguau

SEQ ID NO: 129189 - RNA, 19 nt, Artificial Sequence
  Description of Artificial Sequence: Synthetic oligonucleotide
aaguaauccuuuugccaau

SEQ ID NO: 129190 - RNA, 19 nt, Artificial Sequence
  Description of Artificial Sequence: Synthetic oligonucleotide
aggccauuagcucuagccu

SEQ ID NO: 129191 - RNA, 19 nt, Artificial Sequence
  Description of Artificial Sequence: Synthetic oligonucleotide
acaacuagugucaaagcaa

SEQ ID NO: 129192 - RNA, 19 nt, Artificial Sequence
  Description of Artificial Sequence: Synthetic oligonucleotide
aggguauuagcauuuuaua

SEQ ID NO: 129193 - RNA, 19 nt, Artificial Sequence
  Description of Artificial Sequence: Synthetic oligonucleotide
aaccggcaccuauuuuaac

SEQ ID NO: 129194 - RNA, 19 nt, Artificial Sequence
  Description of Artificial Sequence: Synthetic oligonucleotide
cucugcaaagcagcaagcg

SEQ ID NO: 129195 - RNA, 19 nt, Artificial Sequence
  Description of Artificial Sequence: Synthetic oligonucleotide
gacacgaguuuuaaagcac

SEQ ID NO: 129196 - RNA, 19 nt, Artificial Sequence
  Description of Artificial Sequence: Synthetic oligonucleotide
uaguuauuguuaguugcac

SEQ ID NO: 129197 - RNA, 19 nt, Artificial Sequence
  Description of Artificial Sequence: Synthetic oligonucleotide
aacgaucaucagacgaauc

SEQ ID NO: 129198 - RNA, 19 nt, Artificial Sequence
  Description of Artificial Sequence: Synthetic oligonucleotide
ucuuuaccucacuguagug

SEQ ID NO: 129199 - RNA, 19 nt, Artificial Sequence
  Description of Artificial Sequence: Synthetic oligonucleotide
uucggugucuuuccaucca

SEQ ID NO: 129200 - RNA, 19 nt, Artificial Sequence
  Description of Artificial Sequence: Synthetic oligonucleotide
auaacgaucaucagacgaa

SEQ ID NO: 129201 - RNA, 19 nt, Artificial Sequence
  Description of Artificial Sequence: Synthetic oligonucleotide
gacguaagggugcgggacc

SEQ ID NO: 129202 - RNA, 19 nt, Artificial Sequence
  Description of Artificial Sequence: Synthetic oligonucleotide
cugcaauacggcuuaauaa

SEQ ID NO: 129203 - RNA, 19 nt, Artificial Sequence
  Description of Artificial Sequence: Synthetic oligonucleotide
ucguuuccuguuguugugg

SEQ ID NO: 129204 - RNA, 19 nt, Artificial Sequence
  Description of Artificial Sequence: Synthetic oligonucleotide
uaaagcacguucagugaua

SEQ ID NO: 129205 - RNA, 19 nt, Artificial Sequence
  Description of Artificial Sequence: Synthetic oligonucleotide
ugcuaaggguauuagcauu

SEQ ID NO: 129206 - RNA, 19 nt, Artificial Sequence
  Description of Artificial Sequence: Synthetic oligonucleotide
cuuggguagguuuucugca

SEQ ID NO: 129207 - RNA, 19 nt, Artificial Sequence
  Description of Artificial Sequence: Synthetic oligonucleotide
agcaacugaggcacaaauc

SEQ ID NO: 129208 - RNA, 19 nt, Artificial Sequence
  Description of Artificial Sequence: Synthetic oligonucleotide
augcacuaguuaauaaaag

SEQ ID NO: 129209 - RNA, 19 nt, Artificial Sequence
  Description of Artificial Sequence: Synthetic oligonucleotide
uuacaccacugcuaagggu

SEQ ID NO: 129210 - RNA, 19 nt, Artificial Sequence
  Description of Artificial Sequence: Synthetic oligonucleotide
ucauaacgucucauuucca

SEQ ID NO: 129211 - RNA, 19 nt, Artificial Sequence
  Description of Artificial Sequence: Synthetic oligonucleotide
ucagggcgacguaagggug

SEQ ID NO: 129212 - RNA, 19 nt, Artificial Sequence
  Description of Artificial Sequence: Synthetic oligonucleotide
uuaacgaauuugucuuaau

SEQ ID NO: 129213 - RNA, 19 nt, Artificial Sequence
  Description of Artificial Sequence: Synthetic oligonucleotide
uacguaugauaaucacaca

SEQ ID NO: 129214 - RNA, 19 nt, Artificial Sequence
  Description of Artificial Sequence: Synthetic oligonucleotide
ccuuuauauaucacacuag

SEQ ID NO: 129215 - RNA, 19 nt, Artificial Sequence
  Description of Artificial Sequence: Synthetic oligonucleotide
uugaaacguugauucauuu

SEQ ID NO: 129216 - RNA, 19 nt, Artificial Sequence
  Description of Artificial Sequence: Synthetic oligonucleotide
cuguccaagacguccggug

SEQ ID NO: 129217 - RNA, 19 nt, Artificial Sequence
  Description of Artificial Sequence: Synthetic oligonucleotide
auguugaaacguugauuca

SEQ ID NO: 129218 - RNA, 19 nt, Artificial Sequence
  Description of Artificial Sequence: Synthetic oligonucleotide
aucaguuaugcagaggcuu

SEQ ID NO: 129219 - RNA, 19 nt, Artificial Sequence
  Description of Artificial Sequence: Synthetic oligonucleotide
auacggcuuaauaaugucu

SEQ ID NO: 129220 - RNA, 19 nt, Artificial Sequence
  Description of Artificial Sequence: Synthetic oligonucleotide
acacuguaagagcuguuaa

SEQ ID NO: 129221 - RNA, 19 nt, Artificial Sequence
  Description of Artificial Sequence: Synthetic oligonucleotide
auuaagggguaaaggauau

SEQ ID NO: 129222 - RNA, 19 nt, Artificial Sequence
  Description of Artificial Sequence: Synthetic oligonucleotide
auauaauaccuaacacugu

SEQ ID NO: 129223 - RNA, 19 nt, Artificial Sequence
  Description of Artificial Sequence: Synthetic oligonucleotide
aauacucuucucagggcau

SEQ ID NO: 129224 - RNA, 19 nt, Artificial Sequence
  Description of Artificial Sequence: Synthetic oligonucleotide
auauaucacacuagauaga

SEQ ID NO: 129225 - RNA, 19 nt, Artificial Sequence
  Description of Artificial Sequence: Synthetic oligonucleotide
ggcuuaauaaugucuuuga

SEQ ID NO: 129226 - RNA, 19 nt, Artificial Sequence
  Description of Artificial Sequence: Synthetic oligonucleotide
guccaagacguccgguggg

SEQ ID NO: 129227 - RNA, 19 nt, Artificial Sequence
  Description of Artificial Sequence: Synthetic oligonucleotide
acguaagggugcgggaccc

SEQ ID NO: 129228 - RNA, 19 nt, Artificial Sequence
  Description of Artificial Sequence: Synthetic oligonucleotide
ucgaauaauuggagauguc

SEQ ID NO: 129229 - RNA, 19 nt, Artificial Sequence
  Description of Artificial Sequence: Synthetic oligonucleotide
cuacguguuaaaccuaaaa

SEQ ID NO: 129230 - RNA, 19 nt, Artificial Sequence
  Description of Artificial Sequence: Synthetic oligonucleotide
ucuacguguuaaaccuaaa

SEQ ID NO: 129231 - RNA, 19 nt, Artificial Sequence
  Description of Artificial Sequence: Synthetic oligonucleotide
aaccacuuagcguggcgua

SEQ ID NO: 129232 - RNA, 19 nt, Artificial Sequence
  Description of Artificial Sequence: Synthetic oligonucleotide
uacugcuaaugcacaacua

SEQ ID NO: 129233 - RNA, 19 nt, Artificial Sequence
  Description of Artificial Sequence: Synthetic oligonucleotide
uccauccauauaauaccua

SEQ ID NO: 129234 - RNA, 19 nt, Artificial Sequence
  Description of Artificial Sequence: Synthetic oligonucleotide
guaauccuuuugccaauac

SEQ ID NO: 129235 - RNA, 19 nt, Artificial Sequence
  Description of Artificial Sequence: Synthetic oligonucleotide
ggccauuagcucuagccug

SEQ ID NO: 129236 - RNA, 19 nt, Artificial Sequence
  Description of Artificial Sequence: Synthetic oligonucleotide
aggcgugacugguucugac

SEQ ID NO: 129237 - RNA, 19 nt, Artificial Sequence
  Description of Artificial Sequence: Synthetic oligonucleotide
uaacgaucaucagacgaau

SEQ ID NO: 129238 - RNA, 19 nt, Artificial Sequence
  Description of Artificial Sequence: Synthetic oligonucleotide
ugucuuuaccucccucuuu

SEQ ID NO: 129239 - RNA, 19 nt, Artificial Sequence
  Description of Artificial Sequence: Synthetic oligonucleotide
aagcgaugcaggcgugacu

SEQ ID NO: 129240 - RNA, 19 nt, Artificial Sequence
  Description of Artificial Sequence: Synthetic oligonucleotide
aaaccggcaccuauuuuaa

SEQ ID NO: 129241 - RNA, 19 nt, Artificial Sequence
  Description of Artificial Sequence: Synthetic oligonucleotide
cagggcgacguaagggugc

SEQ ID NO: 129242 - RNA, 19 nt, Artificial Sequence
  Description of Artificial Sequence: Synthetic oligonucleotide
caauacggcuuaauaaugu

SEQ ID NO: 129243 - RNA, 19 nt, Artificial Sequence
  Description of Artificial Sequence: Synthetic oligonucleotide
acguacugcuguaaaauau

SEQ ID NO: 129244 - RNA, 19 nt, Artificial Sequence
  Description of Artificial Sequence: Synthetic oligonucleotide
cuucguccuuuuaagugca

SEQ ID NO: 129245 - RNA, 19 nt, Artificial Sequence
  Description of Artificial Sequence: Synthetic oligonucleotide
ccgagcacagcaaaacaag

SEQ ID NO: 129246 - RNA, 19 nt, Artificial Sequence
  Description of Artificial Sequence: Synthetic oligonucleotide
uucucgucuccgccaauau

SEQ ID NO: 129247 - RNA, 19 nt, Artificial Sequence
  Description of Artificial Sequence: Synthetic oligonucleotide
agggcuaguuauuguuagu

SEQ ID NO: 129248 - RNA, 19 nt, Artificial Sequence
  Description of Artificial Sequence: Synthetic oligonucleotide
ugucugacacgaguuuuaa

SEQ ID NO: 129249 - RNA, 19 nt, Artificial Sequence
  Description of Artificial Sequence: Synthetic oligonucleotide
guggauguugaaacguuga

SEQ ID NO: 129250 - RNA, 19 nt, Artificial Sequence
  Description of Artificial Sequence: Synthetic oligonucleotide
aaacaauagcccacuuaua

SEQ ID NO: 129251 - RNA, 19 nt, Artificial Sequence
  Description of Artificial Sequence: Synthetic oligonucleotide
ucggugucuuuccauccau

SEQ ID NO: 129252 - RNA, 19 nt, Artificial Sequence
  Description of Artificial Sequence: Synthetic oligonucleotide
ggucuuucaccauacccga

SEQ ID NO: 129253 - RNA, 19 nt, Artificial Sequence
  Description of Artificial Sequence: Synthetic oligonucleotide
gcaauacggcuuaauaaug

SEQ ID NO: 129254 - RNA, 19 nt, Artificial Sequence
  Description of Artificial Sequence: Synthetic oligonucleotide
aucuacguguuaaaccuaa

SEQ ID NO: 129255 - RNA, 19 nt, Artificial Sequence
  Description of Artificial Sequence: Synthetic oligonucleotide
cuugcucgaauacugggcu

SEQ ID NO: 129256 - RNA, 19 nt, Artificial Sequence
  Description of Artificial Sequence: Synthetic oligonucleotide
uggcggaaugcgaggaguc

SEQ ID NO: 129257 - RNA, 19 nt, Artificial Sequence
  Description of Artificial Sequence: Synthetic oligonucleotide
auaaaccggcaccuauuuu

SEQ ID NO: 129258 - RNA, 19 nt, Artificial Sequence
  Description of Artificial Sequence: Synthetic oligonucleotide
uggccacaccaaauaauuu

SEQ ID NO: 129259 - RNA, 19 nt, Artificial Sequence
  Description of Artificial Sequence: Synthetic oligonucleotide
uucguaccucuucaacaua

SEQ ID NO: 129260 - RNA, 19 nt, Artificial Sequence
  Description of Artificial Sequence: Synthetic oligonucleotide
cucgaauaauuggagaugu

SEQ ID NO: 129261 - RNA, 19 nt, Artificial Sequence
  Description of Artificial Sequence: Synthetic oligonucleotide
guuguggauguugaaacgu

SEQ ID NO: 129262 - RNA, 19 nt, Artificial Sequence
  Description of Artificial Sequence: Synthetic oligonucleotide
cauaacgucucauuuccau

SEQ ID NO: 129263 - RNA, 19 nt, Artificial Sequence
  Description of Artificial Sequence: Synthetic oligonucleotide
ggacuuauaacagcaagcu

SEQ ID NO: 129264 - RNA, 19 nt, Artificial Sequence
  Description of Artificial Sequence: Synthetic oligonucleotide
ggcgacguaagggugcggg

SEQ ID NO: 129265 - RNA, 19 nt, Artificial Sequence
  Description of Artificial Sequence: Synthetic oligonucleotide
cacuacuaauugcuuucuc

SEQ ID NO: 129266 - RNA, 19 nt, Artificial Sequence
  Description of Artificial Sequence: Synthetic oligonucleotide
auaucacacuagauagaca

SEQ ID NO: 129267 - RNA, 19 nt, Artificial Sequence
  Description of Artificial Sequence: Synthetic oligonucleotide
uuucaccauacccgagguu

SEQ ID NO: 129268 - RNA, 19 nt, Artificial Sequence
  Description of Artificial Sequence: Synthetic oligonucleotide
cacuuagcguggcguagag

SEQ ID NO: 129269 - RNA, 19 nt, Artificial Sequence
  Description of Artificial Sequence: Synthetic oligonucleotide
gucugcgaucaucccaaug

SEQ ID NO: 129270 - RNA, 19 nt, Artificial Sequence
  Description of Artificial Sequence: Synthetic oligonucleotide
ucguuucguaccucuucaa

SEQ ID NO: 129271 - RNA, 19 nt, Artificial Sequence
  Description of Artificial Sequence: Synthetic oligonucleotide
gcgugacugguucugacac

SEQ ID NO: 129272 - RNA, 19 nt, Artificial Sequence
  Description of Artificial Sequence: Synthetic oligonucleotide
auuagcuuuuauacugcua

SEQ ID NO: 129273 - RNA, 19 nt, Artificial Sequence
  Description of Artificial Sequence: Synthetic oligonucleotide
ucagacgaaucagggcgac

SEQ ID NO: 129274 - RNA, 19 nt, Artificial Sequence
  Description of Artificial Sequence: Synthetic oligonucleotide
gccauuagcucuagccugg

SEQ ID NO: 129275 - RNA, 19 nt, Artificial Sequence
  Description of Artificial Sequence: Synthetic oligonucleotide
auaccccuuuuagagcucu

SEQ ID NO: 129276 - RNA, 19 nt, Artificial Sequence
  Description of Artificial Sequence: Synthetic oligonucleotide
uccaagacguccggugggu

SEQ ID NO: 129277 - RNA, 19 nt, Artificial Sequence
  Description of Artificial Sequence: Synthetic oligonucleotide
acgaaucagggcgacguaa

SEQ ID NO: 129278 - RNA, 19 nt, Artificial Sequence
  Description of Artificial Sequence: Synthetic oligonucleotide
aguuaugcagaggcuuuaa

SEQ ID NO: 129279 - RNA, 19 nt, Artificial Sequence
  Description of Artificial Sequence: Synthetic oligonucleotide
agggcgacguaagggugcg

SEQ ID NO: 129280 - RNA, 19 nt, Artificial Sequence
  Description of Artificial Sequence: Synthetic oligonucleotide
ccggcaccuauuuuaacac

SEQ ID NO: 129281 - RNA, 19 nt, Artificial Sequence
  Description of Artificial Sequence: Synthetic oligonucleotide
aguaauccuuuugccaaua

SEQ ID NO: 129282 - RNA, 19 nt, Artificial Sequence
  Description of Artificial Sequence: Synthetic oligonucleotide
aucagacgaaucagggcga

SEQ ID NO: 129283 - RNA, 19 nt, Artificial Sequence
  Description of Artificial Sequence: Synthetic oligonucleotide
aagacguccggugggucuu

SEQ ID NO: 129284 - RNA, 19 nt, Artificial Sequence
  Description of Artificial Sequence: Synthetic oligonucleotide
aagaccuaaugggccugga

SEQ ID NO: 129285 - RNA, 19 nt, Artificial Sequence
  Description of Artificial Sequence: Synthetic oligonucleotide
cucaguuggguaaaugguu

SEQ ID NO: 129286 - RNA, 19 nt, Artificial Sequence
  Description of Artificial Sequence: Synthetic oligonucleotide
aucuggcggaaugcgagga

SEQ ID NO: 129287 - RNA, 19 nt, Artificial Sequence
  Description of Artificial Sequence: Synthetic oligonucleotide
uuaagggguaaaggauauu

SEQ ID NO: 129288 - RNA, 19 nt, Artificial Sequence
  Description of Artificial Sequence: Synthetic oligonucleotide
agcccacuuauaugugaaa

SEQ ID NO: 129289 - RNA, 19 nt, Artificial Sequence
  Description of Artificial Sequence: Synthetic oligonucleotide
cacguuguuggucagucau

SEQ ID NO: 129290 - RNA, 19 nt, Artificial Sequence
  Description of Artificial Sequence: Synthetic oligonucleotide
agaccaaguuggaacucgu

SEQ ID NO: 129291 - RNA, 19 nt, Artificial Sequence
  Description of Artificial Sequence: Synthetic oligonucleotide
uugcucgaauacugggcuu

SEQ ID NO: 129292 - RNA, 19 nt, Artificial Sequence
  Description of Artificial Sequence: Synthetic oligonucleotide
guaggccauuagcucuagc

SEQ ID NO: 129293 - RNA, 19 nt, Artificial Sequence
  Description of Artificial Sequence: Synthetic oligonucleotide
cuuucaccauacccgaggu

SEQ ID NO: 129294 - RNA, 19 nt, Artificial Sequence
  Description of Artificial Sequence: Synthetic oligonucleotide
cagacgaaucagggcgacg

SEQ ID NO: 129295 - RNA, 19 nt, Artificial Sequence
  Description of Artificial Sequence: Synthetic oligonucleotide
cucgaauacugggcuuuac

SEQ ID NO: 129296 - RNA, 19 nt, Artificial Sequence
  Description of Artificial Sequence: Synthetic oligonucleotide
uucguccuuuuaagugcau

SEQ ID NO: 129297 - RNA, 19 nt, Artificial Sequence
  Description of Artificial Sequence: Synthetic oligonucleotide
cgaaucagggcgacguaag

SEQ ID NO: 129298 - RNA, 19 nt, Artificial Sequence
  Description of Artificial Sequence: Synthetic oligonucleotide
auaauggguggaggaguau

SEQ ID NO: 129299 - RNA, 19 nt, Artificial Sequence
  Description of Artificial Sequence: Synthetic oligonucleotide
gaucuacguguuaaaccua

SEQ ID NO: 129300 - RNA, 19 nt, Artificial Sequence
  Description of Artificial Sequence: Synthetic oligonucleotide
gucauuacauaacgaucau

SEQ ID NO: 129301 - RNA, 19 nt, Artificial Sequence
  Description of Artificial Sequence: Synthetic oligonucleotide
caauacuccuacucguaau

SEQ ID NO: 129302 - RNA, 19 nt, Artificial Sequence
  Description of Artificial Sequence: Synthetic oligonucleotide
cagcaagcgaugcaggcgu

SEQ ID NO: 129303 - RNA, 19 nt, Artificial Sequence
  Description of Artificial Sequence: Synthetic oligonucleotide
ggccacaccaaauaauuuu

SEQ ID NO: 129304 - RNA, 19 nt, Artificial Sequence
  Description of Artificial Sequence: Synthetic oligonucleotide
guaccagagcauacauaca

SEQ ID NO: 129305 - RNA, 19 nt, Artificial Sequence
  Description of Artificial Sequence: Synthetic oligonucleotide
cguuguuggucagucauug

SEQ ID NO: 129306 - RNA, 19 nt, Artificial Sequence
  Description of Artificial Sequence: Synthetic oligonucleotide
cacgaguuuuaaagcacgu

SEQ ID NO: 129307 - RNA, 19 nt, Artificial Sequence
  Description of Artificial Sequence: Synthetic oligonucleotide
gccuuugagaauaaucccu

SEQ ID NO: 129308 - RNA, 19 nt, Artificial Sequence
  Description of Artificial Sequence: Synthetic oligonucleotide
gacgaaucagggcgacgua

SEQ ID NO: 129309 - RNA, 19 nt, Artificial Sequence
  Description of Artificial Sequence: Synthetic oligonucleotide
gaggaguaucuacuacuuu

SEQ ID NO: 129310 - RNA, 19 nt, Artificial Sequence
  Description of Artificial Sequence: Synthetic oligonucleotide
ccgagguuacaucuccuuc

SEQ ID NO: 129311 - RNA, 19 nt, Artificial Sequence
  Description of Artificial Sequence: Synthetic oligonucleotide
gcccacuuauaugugaaaa

SEQ ID NO: 129312 - RNA, 19 nt, Artificial Sequence
  Description of Artificial Sequence: Synthetic oligonucleotide
gaaugcgaggagucucaau

SEQ ID NO: 129313 - RNA, 19 nt, Artificial Sequence
  Description of Artificial Sequence: Synthetic oligonucleotide
ccuccauucgucuccagua

SEQ ID NO: 129314 - RNA, 19 nt, Artificial Sequence
  Description of Artificial Sequence: Synthetic oligonucleotide
acguccggugggucuuuca

SEQ ID NO: 129315 - RNA, 19 nt, Artificial Sequence
  Description of Artificial Sequence: Synthetic oligonucleotide
gcacucaaauggcagggua

SEQ ID NO: 129316 - RNA, 19 nt, Artificial Sequence
  Description of Artificial Sequence: Synthetic oligonucleotide
ggucucggagaauacguau

SEQ ID NO: 129317 - RNA, 19 nt, Artificial Sequence
  Description of Artificial Sequence: Synthetic oligonucleotide
cguugauucauuuguggua

SEQ ID NO: 129318 - RNA, 19 nt, Artificial Sequence
  Description of Artificial Sequence: Synthetic oligonucleotide
ggacuccuaaaagaccuaa

SEQ ID NO: 129319 - RNA, 19 nt, Artificial Sequence
  Description of Artificial Sequence: Synthetic oligonucleotide
gggcaaccaguaaauaaaa

SEQ ID NO: 129320 - RNA, 19 nt, Artificial Sequence
  Description of Artificial Sequence: Synthetic oligonucleotide
guguaccagagcauacaua

SEQ ID NO: 129321 - RNA, 19 nt, Artificial Sequence
  Description of Artificial Sequence: Synthetic oligonucleotide
ccucaguuggguaaauggu

SEQ ID NO: 129322 - RNA, 19 nt, Artificial Sequence
  Description of Artificial Sequence: Synthetic oligonucleotide
cccuuuuagagcucugucu

SEQ ID NO: 129323 - RNA, 19 nt, Artificial Sequence
  Description of Artificial Sequence: Synthetic oligonucleotide
ccuuuuagagcucugucuu

SEQ ID NO: 129324 - RNA, 19 nt, Artificial Sequence
  Description of Artificial Sequence: Synthetic oligonucleotide
cuacucguaauaccccuuu

SEQ ID NO: 129325 - RNA, 19 nt, Artificial Sequence
  Description of Artificial Sequence: Synthetic oligonucleotide
acguuguuggucagucauu

SEQ ID NO: 129326 - RNA, 19 nt, Artificial Sequence
  Description of Artificial Sequence: Synthetic oligonucleotide
agcaagcgaugcaggcgug

SEQ ID NO: 129327 - RNA, 19 nt, Artificial Sequence
  Description of Artificial Sequence: Synthetic oligonucleotide
cauucgucuccaguacaua

SEQ ID NO: 129328 - RNA, 19 nt, Artificial Sequence
  Description of Artificial Sequence: Synthetic oligonucleotide
gcggaaugcgaggagucuc

SEQ ID NO: 129329 - RNA, 19 nt, Artificial Sequence
  Description of Artificial Sequence: Synthetic oligonucleotide
ccacaguuucacguuacca

SEQ ID NO: 129330 - RNA, 19 nt, Artificial Sequence
  Description of Artificial Sequence: Synthetic oligonucleotide
ccacugcuaaggguauuag

SEQ ID NO: 129331 - RNA, 19 nt, Artificial Sequence
  Description of Artificial Sequence: Synthetic oligonucleotide
cugcgaucaucccaaugau

SEQ ID NO: 129332 - RNA, 19 nt, Artificial Sequence
  Description of Artificial Sequence: Synthetic oligonucleotide
gggcuaguuauuguuaguu

SEQ ID NO: 129333 - RNA, 19 nt, Artificial Sequence
  Description of Artificial Sequence: Synthetic oligonucleotide
ccuggucggacuccuaaaa

SEQ ID NO: 129334 - RNA, 19 nt, Artificial Sequence
  Description of Artificial Sequence: Synthetic oligonucleotide
cgacguaagggugcgggac

SEQ ID NO: 129335 - RNA, 19 nt, Artificial Sequence
  Description of Artificial Sequence: Synthetic oligonucleotide
gcgacguaagggugcggga

SEQ ID NO: 129336 - RNA, 19 nt, Artificial Sequence
  Description of Artificial Sequence: Synthetic oligonucleotide
gccacaagauaugcagaaa

SEQ ID NO: 129337 - RNA, 19 nt, Artificial Sequence
  Description of Artificial Sequence: Synthetic oligonucleotide
cgaauacugggcuuuacuu

SEQ ID NO: 129338 - RNA, 19 nt, Artificial Sequence
  Description of Artificial Sequence: Synthetic oligonucleotide
ggaaugcgaggagucucaa

SEQ ID NO: 129339 - RNA, 19 nt, Artificial Sequence
  Description of Artificial Sequence: Synthetic oligonucleotide
ccacuuagcguggcguaga

SEQ ID NO: 129340 - RNA, 19 nt, Artificial Sequence
  Description of Artificial Sequence: Synthetic oligonucleotide
ggcggaaugcgaggagucu

SEQ ID NO: 129341 - RNA, 19 nt, Artificial Sequence
  Description of Artificial Sequence: Synthetic oligonucleotide
ccaagacguccgguggguc

SEQ ID NO: 129342 - RNA, 19 nt, Artificial Sequence
  Description of Artificial Sequence: Synthetic oligonucleotide
agacguccggugggucuuu

SEQ ID NO: 129343 - RNA, 19 nt, Artificial Sequence
  Description of Artificial Sequence: Synthetic oligonucleotide
cuccgccaauauucuuccu

SEQ ID NO: 129344 - RNA, 19 nt, Artificial Sequence
  Description of Artificial Sequence: Synthetic oligonucleotide
gggcgacguaagggugcgg

SEQ ID NO: 129345 - RNA, 19 nt, Artificial Sequence
  Description of Artificial Sequence: Synthetic oligonucleotide
ccauuagcucuagccugga

SEQ ID NO: 129346 - RNA, 19 nt, Artificial Sequence
  Description of Artificial Sequence: Synthetic oligonucleotide
cccgagguuacaucuccuu

SEQ ID NO: 129347 - RNA, 19 nt, Artificial Sequence
  Description of Artificial Sequence: Synthetic oligonucleotide
cggcaccuauuuuaacacu

SEQ ID NO: 129348 - RNA, 19 nt, Artificial Sequence
  Description of Artificial Sequence: Synthetic oligonucleotide
gccagagcgucaaggcauu

SEQ ID NO: 129349 - RNA, 19 nt, Artificial Sequence
  Description of Artificial Sequence: Synthetic oligonucleotide
ccagagcgucaaggcauuu

SEQ ID NO: 129350 - RNA, 19 nt, Artificial Sequence
  Description of Artificial Sequence: Synthetic oligonucleotide
aauaguaugcuacuuaagg

SEQ ID NO: 129351 - RNA, 19 nt, Artificial Sequence
  Description of Artificial Sequence: Synthetic oligonucleotide
augccuauaauauugagcc

SEQ ID NO: 129352 - RNA, 19 nt, Artificial Sequence
  Description of Artificial Sequence: Synthetic oligonucleotide
ucugguaacuuauagaugg

SEQ ID NO: 129353 - RNA, 19 nt, Artificial Sequence
  Description of Artificial Sequence: Synthetic oligonucleotide
accuuuaucacauuuaggg

SEQ ID NO: 129354 - RNA, 19 nt, Artificial Sequence
  Description of Artificial Sequence: Synthetic oligonucleotide
ugaugaguaacauuuaccg

SEQ ID NO: 129355 - RNA, 19 nt, Artificial Sequence
  Description of Artificial Sequence: Synthetic oligonucleotide
acuauugcaagauaucccc

SEQ ID NO: 129356 - RNA, 19 nt, Artificial Sequence
  Description of Artificial Sequence: Synthetic oligonucleotide
auaacuacauugcuuaagc

SEQ ID NO: 129357 - RNA, 19 nt, Artificial Sequence
  Description of Artificial Sequence: Synthetic oligonucleotide
aaugccuauaauauugagc

SEQ ID NO: 129358 - RNA, 19 nt, Artificial Sequence
  Description of Artificial Sequence: Synthetic oligonucleotide
acuagcucuauacacagcg

SEQ ID NO: 129359 - RNA, 19 nt, Artificial Sequence
  Description of Artificial Sequence: Synthetic oligonucleotide
uuauagauggguaugcuac

SEQ ID NO: 129360 - RNA, 19 nt, Artificial Sequence
  Description of Artificial Sequence: Synthetic oligonucleotide
caucuauuagaccaaaagg

SEQ ID NO: 129361 - RNA, 19 nt, Artificial Sequence
  Description of Artificial Sequence: Synthetic oligonucleotide
cuaugauggagcauuaucc

SEQ ID NO: 129362 - RNA, 19 nt, Artificial Sequence
  Description of Artificial Sequence: Synthetic oligonucleotide
uuuuccaacguaaaagcug

SEQ ID NO: 129363 - RNA, 19 nt, Artificial Sequence
  Description of Artificial Sequence: Synthetic oligonucleotide
caugacagugauuagagac

SEQ ID NO: 129364 - RNA, 19 nt, Artificial Sequence
  Description of Artificial Sequence: Synthetic oligonucleotide
aucuaggcuaucuugaguc

SEQ ID NO: 129365 - RNA, 19 nt, Artificial Sequence
  Description of Artificial Sequence: Synthetic oligonucleotide
uuuuaaaugcgguucccgg

SEQ ID NO: 129366 - RNA, 19 nt, Artificial Sequence
  Description of Artificial Sequence: Synthetic oligonucleotide
acuuaaggaaacuuacuuc

SEQ ID NO: 129367 - RNA, 19 nt, Artificial Sequence
  Description of Artificial Sequence: Synthetic oligonucleotide
uuuaaaaucccgagggucu

SEQ ID NO: 129368 - RNA, 19 nt, Artificial Sequence
  Description of Artificial Sequence: Synthetic oligonucleotide
ucgaaucgcccauagaugg

SEQ ID NO: 129369 - RNA, 19 nt, Artificial Sequence
  Description of Artificial Sequence: Synthetic oligonucleotide
aacuuauagauggguaugc

SEQ ID NO: 129370 - RNA, 19 nt, Artificial Sequence
  Description of Artificial Sequence: Synthetic oligonucleotide
auacacuuaaaguagacaa

SEQ ID NO: 129371 - RNA, 19 nt, Artificial Sequence
  Description of Artificial Sequence: Synthetic oligonucleotide
uguucuaugcaaaugguau

SEQ ID NO: 129372 - RNA, 19 nt, Artificial Sequence
  Description of Artificial Sequence: Synthetic oligonucleotide
uuuaaaugcgguucccggg

SEQ ID NO: 129373 - RNA, 19 nt, Artificial Sequence
  Description of Artificial Sequence: Synthetic oligonucleotide
aguagucaacaucaagagc

SEQ ID NO: 129374 - RNA, 19 nt, Artificial Sequence
  Description of Artificial Sequence: Synthetic oligonucleotide
uuuccaacguaaaagcuga

SEQ ID NO: 129375 - RNA, 19 nt, Artificial Sequence
  Description of Artificial Sequence: Synthetic oligonucleotide
ucuauuagaccaaaagguc

SEQ ID NO: 129376 - RNA, 19 nt, Artificial Sequence
  Description of Artificial Sequence: Synthetic oligonucleotide
auggguaugcuacugacag

SEQ ID NO: 129377 - RNA, 19 nt, Artificial Sequence
  Description of Artificial Sequence: Synthetic oligonucleotide
uuuagugauggcuacacau

SEQ ID NO: 129378 - RNA, 19 nt, Artificial Sequence
  Description of Artificial Sequence: Synthetic oligonucleotide
aguggcauuauuuagugau

SEQ ID NO: 129379 - RNA, 19 nt, Artificial Sequence
  Description of Artificial Sequence: Synthetic oligonucleotide
uguagccuaccucauauug

SEQ ID NO: 129380 - RNA, 19 nt, Artificial Sequence
  Description of Artificial Sequence: Synthetic oligonucleotide
uuacuuaacacacuccgaa

SEQ ID NO: 129381 - RNA, 19 nt, Artificial Sequence
  Description of Artificial Sequence: Synthetic oligonucleotide
cuaaauguagccuaccuca

SEQ ID NO: 129382 - RNA, 19 nt, Artificial Sequence
  Description of Artificial Sequence: Synthetic oligonucleotide
acauuuaggguuaauuuac

SEQ ID NO: 129383 - RNA, 19 nt, Artificial Sequence
  Description of Artificial Sequence: Synthetic oligonucleotide
uuaaaacccuacaaacuug

SEQ ID NO: 129384 - RNA, 19 nt, Artificial Sequence
  Description of Artificial Sequence: Synthetic oligonucleotide
aucuauuagaccaaaaggu

SEQ ID NO: 129385 - RNA, 19 nt, Artificial Sequence
  Description of Artificial Sequence: Synthetic oligonucleotide
uuaaaugcgguucccgggc

SEQ ID NO: 129386 - RNA, 19 nt, Artificial Sequence
  Description of Artificial Sequence: Synthetic oligonucleotide
uuuugguguaaacugagua

SEQ ID NO: 129387 - RNA, 19 nt, Artificial Sequence
  Description of Artificial Sequence: Synthetic oligonucleotide
uaucacacuagcucuauac

SEQ ID NO: 129388 - RNA, 19 nt, Artificial Sequence
  Description of Artificial Sequence: Synthetic oligonucleotide
agcacguuuauucaagucu

SEQ ID NO: 129389 - RNA, 19 nt, Artificial Sequence
  Description of Artificial Sequence: Synthetic oligonucleotide
aaauagugaaugccuauaa

SEQ ID NO: 129390 - RNA, 19 nt, Artificial Sequence
  Description of Artificial Sequence: Synthetic oligonucleotide
uguacguuaggcauucgga

SEQ ID NO: 129391 - RNA, 19 nt, Artificial Sequence
  Description of Artificial Sequence: Synthetic oligonucleotide
auaguaugcuacuuaagga

SEQ ID NO: 129392 - RNA, 19 nt, Artificial Sequence
  Description of Artificial Sequence: Synthetic oligonucleotide
uguuucuacuguaacacuc

SEQ ID NO: 129393 - RNA, 19 nt, Artificial Sequence
  Description of Artificial Sequence: Synthetic oligonucleotide
agucagaauaguaugcuac

SEQ ID NO: 129394 - RNA, 19 nt, Artificial Sequence
  Description of Artificial Sequence: Synthetic oligonucleotide
uuacauugcaacacucuug

SEQ ID NO: 129395 - RNA, 19 nt, Artificial Sequence
  Description of Artificial Sequence: Synthetic oligonucleotide
uaguaugcuacuuaaggaa

SEQ ID NO: 129396 - RNA, 19 nt, Artificial Sequence
  Description of Artificial Sequence: Synthetic oligonucleotide
auagugaaugccuauaaua

SEQ ID NO: 129397 - RNA, 19 nt, Artificial Sequence
  Description of Artificial Sequence: Synthetic oligonucleotide
augaguaacauuuaccgua

SEQ ID NO: 129398 - RNA, 19 nt, Artificial Sequence
  Description of Artificial Sequence: Synthetic oligonucleotide
gagaaucuaggcuaucuug

SEQ ID NO: 129399 - RNA, 19 nt, Artificial Sequence
  Description of Artificial Sequence: Synthetic oligonucleotide
agucgaaucgcccauagau

SEQ ID NO: 129400 - RNA, 19 nt, Artificial Sequence
  Description of Artificial Sequence: Synthetic oligonucleotide
uacuuaaggaaacuuacuu

SEQ ID NO: 129401 - RNA, 19 nt, Artificial Sequence
  Description of Artificial Sequence: Synthetic oligonucleotide
uaggguuaauuuacuaugc

SEQ ID NO: 129402 - RNA, 19 nt, Artificial Sequence
  Description of Artificial Sequence: Synthetic oligonucleotide
ggaacuaauauuuauuaca

SEQ ID NO: 129403 - RNA, 19 nt, Artificial Sequence
  Description of Artificial Sequence: Synthetic oligonucleotide
uuuaucucuaagcuugaaa

SEQ ID NO: 129404 - RNA, 19 nt, Artificial Sequence
  Description of Artificial Sequence: Synthetic oligonucleotide
ugcaagauauccccaacca

SEQ ID NO: 129405 - RNA, 19 nt, Artificial Sequence
  Description of Artificial Sequence: Synthetic oligonucleotide
uuaccguaaauacacuuaa

SEQ ID NO: 129406 - RNA, 19 nt, Artificial Sequence
  Description of Artificial Sequence: Synthetic oligonucleotide
uuuacuuaacacacuccga

SEQ ID NO: 129407 - RNA, 19 nt, Artificial Sequence
  Description of Artificial Sequence: Synthetic oligonucleotide
agauggguaugcuacugac

SEQ ID NO: 129408 - RNA, 19 nt, Artificial Sequence
  Description of Artificial Sequence: Synthetic oligonucleotide
uggcauuauuuagugaugg

SEQ ID NO: 129409 - RNA, 19 nt, Artificial Sequence
  Description of Artificial Sequence: Synthetic oligonucleotide
uauccuugaaucuggcgcc

SEQ ID NO: 129410 - RNA, 19 nt, Artificial Sequence
  Description of Artificial Sequence: Synthetic oligonucleotide
gugaaugccuauaauauug

SEQ ID NO: 129411 - RNA, 19 nt, Artificial Sequence
  Description of Artificial Sequence: Synthetic oligonucleotide
ugauugaaaggccaggguu

SEQ ID NO: 129412 - RNA, 19 nt, Artificial Sequence
  Description of Artificial Sequence: Synthetic oligonucleotide
auuaaggcuuauucuauga

SEQ ID NO: 129413 - RNA, 19 nt, Artificial Sequence
  Description of Artificial Sequence: Synthetic oligonucleotide
ucucuaagcuugaaaguca

SEQ ID NO: 129414 - RNA, 19 nt, Artificial Sequence
  Description of Artificial Sequence: Synthetic oligonucleotide
ucacauuuaggguuaauuu

SEQ ID NO: 129415 - RNA, 19 nt, Artificial Sequence
  Description of Artificial Sequence: Synthetic oligonucleotide
auaacuauugcaagauauc

SEQ ID NO: 129416 - RNA, 19 nt, Artificial Sequence
  Description of Artificial Sequence: Synthetic oligonucleotide
ugcauguuaaaacccuaca

SEQ ID NO: 129417 - RNA, 19 nt, Artificial Sequence
  Description of Artificial Sequence: Synthetic oligonucleotide
ugcaaugugagguguuugc

SEQ ID NO: 129418 - RNA, 19 nt, Artificial Sequence
  Description of Artificial Sequence: Synthetic oligonucleotide
uuaaauagugaaugccuau

SEQ ID NO: 129419 - RNA, 19 nt, Artificial Sequence
  Description of Artificial Sequence: Synthetic oligonucleotide
uggagcauuauccuugaau

SEQ ID NO: 129420 - RNA, 19 nt, Artificial Sequence
  Description of Artificial Sequence: Synthetic oligonucleotide
ugaggguagucuuuuaaaa

SEQ ID NO: 129421 - RNA, 19 nt, Artificial Sequence
  Description of Artificial Sequence: Synthetic oligonucleotide
uagcucuauacacagcgga

SEQ ID NO: 129422 - RNA, 19 nt, Artificial Sequence
  Description of Artificial Sequence: Synthetic oligonucleotide
guaugcuacugacaggaag

SEQ ID NO: 129423 - RNA, 19 nt, Artificial Sequence
  Description of Artificial Sequence: Synthetic oligonucleotide
ggagcauuauccuugaauc

SEQ ID NO: 129424 - RNA, 19 nt, Artificial Sequence
  Description of Artificial Sequence: Synthetic oligonucleotide
agauuaggaacuaauauuu

SEQ ID NO: 129425 - RNA, 19 nt, Artificial Sequence
  Description of Artificial Sequence: Synthetic oligonucleotide
uauuuagugauggcuacac

SEQ ID NO: 129426 - RNA, 19 nt, Artificial Sequence
  Description of Artificial Sequence: Synthetic oligonucleotide
uucauaacuauugcaagau

SEQ ID NO: 129427 - RNA, 19 nt, Artificial Sequence
  Description of Artificial Sequence: Synthetic oligonucleotide
auauccccaaccauguugg

SEQ ID NO: 129428 - RNA, 19 nt, Artificial Sequence
  Description of Artificial Sequence: Synthetic oligonucleotide
ugcuacuuaaggaaacuua

SEQ ID NO: 129429 - RNA, 19 nt, Artificial Sequence
  Description of Artificial Sequence: Synthetic oligonucleotide
uuaaggcuuauucuaugau

SEQ ID NO: 129430 - RNA, 19 nt, Artificial Sequence
  Description of Artificial Sequence: Synthetic oligonucleotide
uagccuaccucauauugga

SEQ ID NO: 129431 - RNA, 19 nt, Artificial Sequence
  Description of Artificial Sequence: Synthetic oligonucleotide
ucuguucuguacguuaggc

SEQ ID NO: 129432 - RNA, 19 nt, Artificial Sequence
  Description of Artificial Sequence: Synthetic oligonucleotide
uacguuaggcauucggaga

SEQ ID NO: 129433 - RNA, 19 nt, Artificial Sequence
  Description of Artificial Sequence: Synthetic oligonucleotide
uugcauguuaaaacccuac

SEQ ID NO: 129434 - RNA, 19 nt, Artificial Sequence
  Description of Artificial Sequence: Synthetic oligonucleotide
uguuuaaagucaaggcuuu

SEQ ID NO: 129435 - RNA, 19 nt, Artificial Sequence
  Description of Artificial Sequence: Synthetic oligonucleotide
auuuaccguaaauacacuu

SEQ ID NO: 129436 - RNA, 19 nt, Artificial Sequence
  Description of Artificial Sequence: Synthetic oligonucleotide
cucuaagcuugaaagucag

SEQ ID NO: 129437 - RNA, 19 nt, Artificial Sequence
  Description of Artificial Sequence: Synthetic oligonucleotide
ugcuucauugacagugagc

SEQ ID NO: 129438 - RNA, 19 nt, Artificial Sequence
  Description of Artificial Sequence: Synthetic oligonucleotide
agaaugaggcaacacuggu

SEQ ID NO: 129439 - RNA, 19 nt, Artificial Sequence
  Description of Artificial Sequence: Synthetic oligonucleotide
cuuauucuaugauggagca

SEQ ID NO: 129440 - RNA, 19 nt, Artificial Sequence
  Description of Artificial Sequence: Synthetic oligonucleotide
aauuugugugugugugugu

SEQ ID NO: 129441 - RNA, 19 nt, Artificial Sequence
  Description of Artificial Sequence: Synthetic oligonucleotide
acgugaaggggcuugcuug

SEQ ID NO: 129442 - RNA, 19 nt, Artificial Sequence
  Description of Artificial Sequence: Synthetic oligonucleotide
cuguacguuaggcauucgg

SEQ ID NO: 129443 - RNA, 19 nt, Artificial Sequence
  Description of Artificial Sequence: Synthetic oligonucleotide
acacagcggacugugaaac

SEQ ID NO: 129444 - RNA, 19 nt, Artificial Sequence
  Description of Artificial Sequence: Synthetic oligonucleotide
ggcuuuuacacauuagcac

SEQ ID NO: 129445 - RNA, 19 nt, Artificial Sequence
  Description of Artificial Sequence: Synthetic oligonucleotide
auuugugugugugugugug

SEQ ID NO: 129446 - RNA, 19 nt, Artificial Sequence
  Description of Artificial Sequence: Synthetic oligonucleotide
gaaacaguucaugaaagua

SEQ ID NO: 129447 - RNA, 19 nt, Artificial Sequence
  Description of Artificial Sequence: Synthetic oligonucleotide
uguccuaaauguagccuac

SEQ ID NO: 129448 - RNA, 19 nt, Artificial Sequence
  Description of Artificial Sequence: Synthetic oligonucleotide
cuagcucuauacacagcgg

SEQ ID NO: 129449 - RNA, 19 nt, Artificial Sequence
  Description of Artificial Sequence: Synthetic oligonucleotide
gacauuaaccagugcugug

SEQ ID NO: 129450 - RNA, 19 nt, Artificial Sequence
  Description of Artificial Sequence: Synthetic oligonucleotide
guuaaaacccuacaaacuu

SEQ ID NO: 129451 - RNA, 19 nt, Artificial Sequence
  Description of Artificial Sequence: Synthetic oligonucleotide
guagccuaccucauauugg

SEQ ID NO: 129452 - RNA, 19 nt, Artificial Sequence
  Description of Artificial Sequence: Synthetic oligonucleotide
uuagcacguuuauucaagu

SEQ ID NO: 129453 - RNA, 19 nt, Artificial Sequence
  Description of Artificial Sequence: Synthetic oligonucleotide
aacagauuaggaacuaaua

SEQ ID NO: 129454 - RNA, 19 nt, Artificial Sequence
  Description of Artificial Sequence: Synthetic oligonucleotide
ggucuguuugagcagaaug

SEQ ID NO: 129455 - RNA, 19 nt, Artificial Sequence
  Description of Artificial Sequence: Synthetic oligonucleotide
auauucuauacagcugcag

SEQ ID NO: 129456 - RNA, 19 nt, Artificial Sequence
  Description of Artificial Sequence: Synthetic oligonucleotide
auuuaggguuaauuuacua

SEQ ID NO: 129457 - RNA, 19 nt, Artificial Sequence
  Description of Artificial Sequence: Synthetic oligonucleotide
cucuauacacagcggacug

SEQ ID NO: 129458 - RNA, 19 nt, Artificial Sequence
  Description of Artificial Sequence: Synthetic oligonucleotide
gugaacugagagcugcgag

SEQ ID NO: 129459 - RNA, 19 nt, Artificial Sequence
  Description of Artificial Sequence: Synthetic oligonucleotide
cugguaacuuauagauggg

SEQ ID NO: 129460 - RNA, 19 nt, Artificial Sequence
  Description of Artificial Sequence: Synthetic oligonucleotide
cacauuuaggguuaauuua

SEQ ID NO: 129461 - RNA, 19 nt, Artificial Sequence
  Description of Artificial Sequence: Synthetic oligonucleotide
ucauaacuauugcaagaua

SEQ ID NO: 129462 - RNA, 19 nt, Artificial Sequence
  Description of Artificial Sequence: Synthetic oligonucleotide
guccgguagaaacauucag

SEQ ID NO: 129463 - RNA, 19 nt, Artificial Sequence
  Description of Artificial Sequence: Synthetic oligonucleotide
uugugugugugugugugug

SEQ ID NO: 129464 - RNA, 19 nt, Artificial Sequence
  Description of Artificial Sequence: Synthetic oligonucleotide
auacacagcggacugugaa

SEQ ID NO: 129465 - RNA, 19 nt, Artificial Sequence
  Description of Artificial Sequence: Synthetic oligonucleotide
guuaauuuacuaugccuua

SEQ ID NO: 129466 - RNA, 19 nt, Artificial Sequence
  Description of Artificial Sequence: Synthetic oligonucleotide
cuauacacagcggacugug

SEQ ID NO: 129467 - RNA, 19 nt, Artificial Sequence
  Description of Artificial Sequence: Synthetic oligonucleotide
ucuaagcuugaaagucaga

SEQ ID NO: 129468 - RNA, 19 nt, Artificial Sequence
  Description of Artificial Sequence: Synthetic oligonucleotide
agugguagagaaguuuacu

SEQ ID NO: 129469 - RNA, 19 nt, Artificial Sequence
  Description of Artificial Sequence: Synthetic oligonucleotide
acguuaggcauucggagau

SEQ ID NO: 129470 - RNA, 19 nt, Artificial Sequence
  Description of Artificial Sequence: Synthetic oligonucleotide
ucuaggcuaucuugagucu

SEQ ID NO: 129471 - RNA, 19 nt, Artificial Sequence
  Description of Artificial Sequence: Synthetic oligonucleotide
uggguaugcuacugacagg

SEQ ID NO: 129472 - RNA, 19 nt, Artificial Sequence
  Description of Artificial Sequence: Synthetic oligonucleotide
gcauucggagauucaaagg

SEQ ID NO: 129473 - RNA, 19 nt, Artificial Sequence
  Description of Artificial Sequence: Synthetic oligonucleotide
aggcuuuuacacauuagca

SEQ ID NO: 129474 - RNA, 19 nt, Artificial Sequence
  Description of Artificial Sequence: Synthetic oligonucleotide
acccuacaaacuugaacug

SEQ ID NO: 129475 - RNA, 19 nt, Artificial Sequence
  Description of Artificial Sequence: Synthetic oligonucleotide
ugugugugugugugugugc

SEQ ID NO: 129476 - RNA, 19 nt, Artificial Sequence
  Description of Artificial Sequence: Synthetic oligonucleotide
gaugagugggacuucgccu

SEQ ID NO: 129477 - RNA, 19 nt, Artificial Sequence
  Description of Artificial Sequence: Synthetic oligonucleotide
aaucgcccauagauggcac

SEQ ID NO: 129478 - RNA, 19 nt, Artificial Sequence
  Description of Artificial Sequence: Synthetic oligonucleotide
cagcuguccuaaauguagc

SEQ ID NO: 129479 - RNA, 19 nt, Artificial Sequence
  Description of Artificial Sequence: Synthetic oligonucleotide
ugugugugugugcuucuuc

SEQ ID NO: 129480 - RNA, 19 nt, Artificial Sequence
  Description of Artificial Sequence: Synthetic oligonucleotide
uuugugugugugugugugu

SEQ ID NO: 129481 - RNA, 19 nt, Artificial Sequence
  Description of Artificial Sequence: Synthetic oligonucleotide
gcauggauuaaaccaauga

SEQ ID NO: 129482 - RNA, 19 nt, Artificial Sequence
  Description of Artificial Sequence: Synthetic oligonucleotide
cuuauagauggguaugcua

SEQ ID NO: 129483 - RNA, 19 nt, Artificial Sequence
  Description of Artificial Sequence: Synthetic oligonucleotide
uaggcauucggagauucaa

SEQ ID NO: 129484 - RNA, 19 nt, Artificial Sequence
  Description of Artificial Sequence: Synthetic oligonucleotide
uaccguaaauacacuuaaa

SEQ ID NO: 129485 - RNA, 19 nt, Artificial Sequence
  Description of Artificial Sequence: Synthetic oligonucleotide
gaugcagguucuggguccg

SEQ ID NO: 129486 - RNA, 19 nt, Artificial Sequence
  Description of Artificial Sequence: Synthetic oligonucleotide
uuaaaaucccgagggucuc

SEQ ID NO: 129487 - RNA, 19 nt, Artificial Sequence
  Description of Artificial Sequence: Synthetic oligonucleotide
uacuuguagguaacuucuc

SEQ ID NO: 129488 - RNA, 19 nt, Artificial Sequence
  Description of Artificial Sequence: Synthetic oligonucleotide
uagcacguuuauucaaguc

SEQ ID NO: 129489 - RNA, 19 nt, Artificial Sequence
  Description of Artificial Sequence: Synthetic oligonucleotide
ucagaauaguaugcuacuu

SEQ ID NO: 129490 - RNA, 19 nt, Artificial Sequence
  Description of Artificial Sequence: Synthetic oligonucleotide
gcauuauccuugaaucugg

SEQ ID NO: 129491 - RNA, 19 nt, Artificial Sequence
  Description of Artificial Sequence: Synthetic oligonucleotide
ugccaugcccacgagugcc

SEQ ID NO: 129492 - RNA, 19 nt, Artificial Sequence
  Description of Artificial Sequence: Synthetic oligonucleotide
gugaggacaucucaucuaa

SEQ ID NO: 129493 - RNA, 19 nt, Artificial Sequence
  Description of Artificial Sequence: Synthetic oligonucleotide
uccccaucggccacaaaau

SEQ ID NO: 129494 - RNA, 19 nt, Artificial Sequence
  Description of Artificial Sequence: Synthetic oligonucleotide
gaaucgcccauagauggca

SEQ ID NO: 129495 - RNA, 19 nt, Artificial Sequence
  Description of Artificial Sequence: Synthetic oligonucleotide
aagucacuuuugggcagcg

SEQ ID NO: 129496 - RNA, 19 nt, Artificial Sequence
  Description of Artificial Sequence: Synthetic oligonucleotide
ucacuggaguaaagucugc

SEQ ID NO: 129497 - RNA, 19 nt, Artificial Sequence
  Description of Artificial Sequence: Synthetic oligonucleotide
gucgaaucgcccauagaug

SEQ ID NO: 129498 - RNA, 19 nt, Artificial Sequence
  Description of Artificial Sequence: Synthetic oligonucleotide
acuccgaaaucccaauguu

SEQ ID NO: 129499 - RNA, 19 nt, Artificial Sequence
  Description of Artificial Sequence: Synthetic oligonucleotide
ugaggacaucucaucuaac

SEQ ID NO: 129500 - RNA, 19 nt, Artificial Sequence
  Description of Artificial Sequence: Synthetic oligonucleotide
ugccuauaauauugagccu

SEQ ID NO: 129501 - RNA, 19 nt, Artificial Sequence
  Description of Artificial Sequence: Synthetic oligonucleotide
cagauuaggaacuaauauu

SEQ ID NO: 129502 - RNA, 19 nt, Artificial Sequence
  Description of Artificial Sequence: Synthetic oligonucleotide
ucuauacacagcggacugu

SEQ ID NO: 129503 - RNA, 19 nt, Artificial Sequence
  Description of Artificial Sequence: Synthetic oligonucleotide
uuccaacguaaaagcugag

SEQ ID NO: 129504 - RNA, 19 nt, Artificial Sequence
  Description of Artificial Sequence: Synthetic oligonucleotide
uuggagucgaaucgcccau

SEQ ID NO: 129505 - RNA, 19 nt, Artificial Sequence
  Description of Artificial Sequence: Synthetic oligonucleotide
ugugugugugugugugugu

SEQ ID NO: 129506 - RNA, 19 nt, Artificial Sequence
  Description of Artificial Sequence: Synthetic oligonucleotide
gcaaaugguaucacacuag

SEQ ID NO: 129507 - RNA, 19 nt, Artificial Sequence
  Description of Artificial Sequence: Synthetic oligonucleotide
cacgagugccaugauuucc

SEQ ID NO: 129508 - RNA, 19 nt, Artificial Sequence
  Description of Artificial Sequence: Synthetic oligonucleotide
ggcauuauuuagugauggc

SEQ ID NO: 129509 - RNA, 19 nt, Artificial Sequence
  Description of Artificial Sequence: Synthetic oligonucleotide
cauuagcacguuuauucaa

SEQ ID NO: 129510 - RNA, 19 nt, Artificial Sequence
  Description of Artificial Sequence: Synthetic oligonucleotide
gauggguaugcuacugaca

SEQ ID NO: 129511 - RNA, 19 nt, Artificial Sequence
  Description of Artificial Sequence: Synthetic oligonucleotide
cuccccaucggccacaaaa

SEQ ID NO: 129512 - RNA, 19 nt, Artificial Sequence
  Description of Artificial Sequence: Synthetic oligonucleotide
ggguaugcuacugacagga

SEQ ID NO: 129513 - RNA, 19 nt, Artificial Sequence
  Description of Artificial Sequence: Synthetic oligonucleotide
cuauugcaagauaucccca

SEQ ID NO: 129514 - RNA, 19 nt, Artificial Sequence
  Description of Artificial Sequence: Synthetic oligonucleotide
cuuuuacacauuagcacgu

SEQ ID NO: 129515 - RNA, 19 nt, Artificial Sequence
  Description of Artificial Sequence: Synthetic oligonucleotide
cauguuggugaucccucug

SEQ ID NO: 129516 - RNA, 19 nt, Artificial Sequence
  Description of Artificial Sequence: Synthetic oligonucleotide
gugugugugugugugugug

SEQ ID NO: 129517 - RNA, 19 nt, Artificial Sequence
  Description of Artificial Sequence: Synthetic oligonucleotide
aaugcgguucccgggcacu

SEQ ID NO: 129518 - RNA, 19 nt, Artificial Sequence
  Description of Artificial Sequence: Synthetic oligonucleotide
ugugugugugugugcuucu

SEQ ID NO: 129519 - RNA, 19 nt, Artificial Sequence
  Description of Artificial Sequence: Synthetic oligonucleotide
gucagaauaguaugcuacu

SEQ ID NO: 129520 - RNA, 19 nt, Artificial Sequence
  Description of Artificial Sequence: Synthetic oligonucleotide
ccuaaauguagccuaccuc

SEQ ID NO: 129521 - RNA, 19 nt, Artificial Sequence
  Description of Artificial Sequence: Synthetic oligonucleotide
guggcauuauuuagugaug

SEQ ID NO: 129522 - RNA, 19 nt, Artificial Sequence
  Description of Artificial Sequence: Synthetic oligonucleotide
acgagugccaugauuucca

SEQ ID NO: 129523 - RNA, 19 nt, Artificial Sequence
  Description of Artificial Sequence: Synthetic oligonucleotide
ggagucgaaucgcccauag

SEQ ID NO: 129524 - RNA, 19 nt, Artificial Sequence
  Description of Artificial Sequence: Synthetic oligonucleotide
cacagcggacugugaaacc

SEQ ID NO: 129525 - RNA, 19 nt, Artificial Sequence
  Description of Artificial Sequence: Synthetic oligonucleotide
gggcaaacgccaugguccg

SEQ ID NO: 129526 - RNA, 19 nt, Artificial Sequence
  Description of Artificial Sequence: Synthetic oligonucleotide
cuacuuaaggaaacuuacu

SEQ ID NO: 129527 - RNA, 19 nt, Artificial Sequence
  Description of Artificial Sequence: Synthetic oligonucleotide
cuauaauauugagccuuuc

SEQ ID NO: 129528 - RNA, 19 nt, Artificial Sequence
  Description of Artificial Sequence: Synthetic oligonucleotide
ggauuaaaccaaugaaagu

SEQ ID NO: 129529 - RNA, 19 nt, Artificial Sequence
  Description of Artificial Sequence: Synthetic oligonucleotide
gguuaauuuacuaugccuu

SEQ ID NO: 129530 - RNA, 19 nt, Artificial Sequence
  Description of Artificial Sequence: Synthetic oligonucleotide
gugggacuucgccucacug

SEQ ID NO: 129531 - RNA, 19 nt, Artificial Sequence
  Description of Artificial Sequence: Synthetic oligonucleotide
agaaaccugccuggccagg

SEQ ID NO: 129532 - RNA, 19 nt, Artificial Sequence
  Description of Artificial Sequence: Synthetic oligonucleotide
gugugugugugugugcuuc

SEQ ID NO: 129533 - RNA, 19 nt, Artificial Sequence
  Description of Artificial Sequence: Synthetic oligonucleotide
gacuucgccucacuggagu

SEQ ID NO: 129534 - RNA, 19 nt, Artificial Sequence
  Description of Artificial Sequence: Synthetic oligonucleotide
cagcguggaggccauccgc

SEQ ID NO: 129535 - RNA, 19 nt, Artificial Sequence
  Description of Artificial Sequence: Synthetic oligonucleotide
uucgccucacuggaguaaa

SEQ ID NO: 129536 - RNA, 19 nt, Artificial Sequence
  Description of Artificial Sequence: Synthetic oligonucleotide
ucgccucacuggaguaaag

SEQ ID NO: 129537 - RNA, 19 nt, Artificial Sequence
  Description of Artificial Sequence: Synthetic oligonucleotide
gggacuucgccucacugga

SEQ ID NO: 129538 - RNA, 19 nt, Artificial Sequence
  Description of Artificial Sequence: Synthetic oligonucleotide
ggcugauugaaaggccagg

SEQ ID NO: 129539 - RNA, 19 nt, Artificial Sequence
  Description of Artificial Sequence: Synthetic oligonucleotide
cagcggacugugaaaccac

SEQ ID NO: 129540 - RNA, 19 nt, Artificial Sequence
  Description of Artificial Sequence: Synthetic oligonucleotide
ugcccugacccaagcucug

SEQ ID NO: 129541 - RNA, 19 nt, Artificial Sequence
  Description of Artificial Sequence: Synthetic oligonucleotide
uggagacaacucaucucuu

SEQ ID NO: 129542 - RNA, 19 nt, Artificial Sequence
  Description of Artificial Sequence: Synthetic oligonucleotide
acaucaucgccaccuuguu

SEQ ID NO: 129543 - RNA, 19 nt, Artificial Sequence
  Description of Artificial Sequence: Synthetic oligonucleotide
agugggcaaacgccauggu

SEQ ID NO: 129544 - RNA, 19 nt, Artificial Sequence
  Description of Artificial Sequence: Synthetic oligonucleotide
ggggcaagauuacugcauc

SEQ ID NO: 129545 - RNA, 19 nt, Artificial Sequence
  Description of Artificial Sequence: Synthetic oligonucleotide
guggccgcacacuuaggga

SEQ ID NO: 129546 - RNA, 19 nt, Artificial Sequence
  Description of Artificial Sequence: Synthetic oligonucleotide
gccuaccucauauuggaaa

SEQ ID NO: 129547 - RNA, 19 nt, Artificial Sequence
  Description of Artificial Sequence: Synthetic oligonucleotide
gagucgaaucgcccauaga

SEQ ID NO: 129548 - RNA, 19 nt, Artificial Sequence
  Description of Artificial Sequence: Synthetic oligonucleotide
uccgggagugacagacaaa

SEQ ID NO: 129549 - RNA, 19 nt, Artificial Sequence
  Description of Artificial Sequence: Synthetic oligonucleotide
augguguccuugccagagu

SEQ ID NO: 129550 - RNA, 19 nt, Artificial Sequence
  Description of Artificial Sequence: Synthetic oligonucleotide
aggccguccgggcugugcu

SEQ ID NO: 129551 - RNA, 19 nt, Artificial Sequence
  Description of Artificial Sequence: Synthetic oligonucleotide
acuucgccucacuggagua

SEQ ID NO: 129552 - RNA, 19 nt, Artificial Sequence
  Description of Artificial Sequence: Synthetic oligonucleotide
ugugugugugugugugcuu

SEQ ID NO: 129553 - RNA, 19 nt, Artificial Sequence
  Description of Artificial Sequence: Synthetic oligonucleotide
cauuuaccguaaauacacu

SEQ ID NO: 129554 - RNA, 19 nt, Artificial Sequence
  Description of Artificial Sequence: Synthetic oligonucleotide
cuuuucggccugcugugaa

SEQ ID NO: 129555 - RNA, 19 nt, Artificial Sequence
  Description of Artificial Sequence: Synthetic oligonucleotide
cccaucggccacaaaauga

SEQ ID NO: 129556 - RNA, 19 nt, Artificial Sequence
  Description of Artificial Sequence: Synthetic oligonucleotide
ucucgucagcagggcauug

SEQ ID NO: 129557 - RNA, 19 nt, Artificial Sequence
  Description of Artificial Sequence: Synthetic oligonucleotide
aggcauucggagauucaaa

SEQ ID NO: 129558 - RNA, 19 nt, Artificial Sequence
  Description of Artificial Sequence: Synthetic oligonucleotide
uucucgucagcagggcauu

SEQ ID NO: 129559 - RNA, 19 nt, Artificial Sequence
  Description of Artificial Sequence: Synthetic oligonucleotide
gacgugaaggggcuugcuu

SEQ ID NO: 129560 - RNA, 19 nt, Artificial Sequence
  Description of Artificial Sequence: Synthetic oligonucleotide
guaucacacuagcucuaua

SEQ ID NO: 129561 - RNA, 19 nt, Artificial Sequence
  Description of Artificial Sequence: Synthetic oligonucleotide
gugugugugugugugugcu

SEQ ID NO: 129562 - RNA, 19 nt, Artificial Sequence
  Description of Artificial Sequence: Synthetic oligonucleotide
cuccgaaaucccaauguuu

SEQ ID NO: 129563 - RNA, 19 nt, Artificial Sequence
  Description of Artificial Sequence: Synthetic oligonucleotide
cuacuguaacacucuucua

SEQ ID NO: 129564 - RNA, 19 nt, Artificial Sequence
  Description of Artificial Sequence: Synthetic oligonucleotide
cccucugguaacuuauaga

SEQ ID NO: 129565 - RNA, 19 nt, Artificial Sequence
  Description of Artificial Sequence: Synthetic oligonucleotide
gguguuugccauccuuucu

SEQ ID NO: 129566 - RNA, 19 nt, Artificial Sequence
  Description of Artificial Sequence: Synthetic oligonucleotide
ugggagaaucuaggcuauc

SEQ ID NO: 129567 - RNA, 19 nt, Artificial Sequence
  Description of Artificial Sequence: Synthetic oligonucleotide
uggagucgaaucgcccaua

SEQ ID NO: 129568 - RNA, 19 nt, Artificial Sequence
  Description of Artificial Sequence: Synthetic oligonucleotide
cuaccucauauuggaaaua

SEQ ID NO: 129569 - RNA, 19 nt, Artificial Sequence
  Description of Artificial Sequence: Synthetic oligonucleotide
gguccgguagaaacauuca

SEQ ID NO: 129570 - RNA, 19 nt, Artificial Sequence
  Description of Artificial Sequence: Synthetic oligonucleotide
cgaaucgcccauagauggc

SEQ ID NO: 129571 - RNA, 19 nt, Artificial Sequence
  Description of Artificial Sequence: Synthetic oligonucleotide
gggagaaucuaggcuaucu

SEQ ID NO: 129572 - RNA, 19 nt, Artificial Sequence
  Description of Artificial Sequence: Synthetic oligonucleotide
ggagaaucuaggcuaucuu

SEQ ID NO: 129573 - RNA, 19 nt, Artificial Sequence
  Description of Artificial Sequence: Synthetic oligonucleotide
cuuaugcuuuggcuauggu

SEQ ID NO: 129574 - RNA, 19 nt, Artificial Sequence
  Description of Artificial Sequence: Synthetic oligonucleotide
ggaagcuaauggucagugu

SEQ ID NO: 129575 - RNA, 19 nt, Artificial Sequence
  Description of Artificial Sequence: Synthetic oligonucleotide
gagugggacuucgccucac

SEQ ID NO: 129576 - RNA, 19 nt, Artificial Sequence
  Description of Artificial Sequence: Synthetic oligonucleotide
augcgguucccgggcacug

SEQ ID NO: 129577 - RNA, 19 nt, Artificial Sequence
  Description of Artificial Sequence: Synthetic oligonucleotide
ccuaccucauauuggaaau

SEQ ID NO: 129578 - RNA, 19 nt, Artificial Sequence
  Description of Artificial Sequence: Synthetic oligonucleotide
ccccaucggccacaaaaug

SEQ ID NO: 129579 - RNA, 19 nt, Artificial Sequence
  Description of Artificial Sequence: Synthetic oligonucleotide
gccaauaacuacauugcuu

SEQ ID NO: 129580 - RNA, 19 nt, Artificial Sequence
  Description of Artificial Sequence: Synthetic oligonucleotide
cacacuccgaaaucccaau

SEQ ID NO: 129581 - RNA, 19 nt, Artificial Sequence
  Description of Artificial Sequence: Synthetic oligonucleotide
ggcuugcuugccaugccca

SEQ ID NO: 129582 - RNA, 19 nt, Artificial Sequence
  Description of Artificial Sequence: Synthetic oligonucleotide
caggccguccgggcugugc

SEQ ID NO: 129583 - RNA, 19 nt, Artificial Sequence
  Description of Artificial Sequence: Synthetic oligonucleotide
cauccccuuuucggccugc

SEQ ID NO: 129584 - RNA, 19 nt, Artificial Sequence
  Description of Artificial Sequence: Synthetic oligonucleotide
ccaucggccacaaaaugau

SEQ ID NO: 129585 - RNA, 19 nt, Artificial Sequence
  Description of Artificial Sequence: Synthetic oligonucleotide
cugugcucgccagagcucu

SEQ ID NO: 129586 - RNA, 19 nt, Artificial Sequence
  Description of Artificial Sequence: Synthetic oligonucleotide
gggcaagauuacugcaucu

SEQ ID NO: 129587 - RNA, 19 nt, Artificial Sequence
  Description of Artificial Sequence: Synthetic oligonucleotide
acacgccaugucaguucuc

SEQ ID NO: 129588 - RNA, 19 nt, Artificial Sequence
  Description of Artificial Sequence: Synthetic oligonucleotide
acgccaugguccgguagaa

SEQ ID NO: 129589 - RNA, 19 nt, Artificial Sequence
  Description of Artificial Sequence: Synthetic oligonucleotide
ggacuucgccucacuggag

SEQ ID NO: 129590 - RNA, 19 nt, Artificial Sequence
  Description of Artificial Sequence: Synthetic oligonucleotide
agccuaccucauauuggaa

SEQ ID NO: 129591 - RNA, 19 nt, Artificial Sequence
  Description of Artificial Sequence: Synthetic oligonucleotide
gguuuguaacccagucucu

SEQ ID NO: 129592 - RNA, 19 nt, Artificial Sequence
  Description of Artificial Sequence: Synthetic oligonucleotide
caaacgccaugguccggua

SEQ ID NO: 129593 - RNA, 19 nt, Artificial Sequence
  Description of Artificial Sequence: Synthetic oligonucleotide
gguaucacacuagcucuau

SEQ ID NO: 129594 - RNA, 19 nt, Artificial Sequence
  Description of Artificial Sequence: Synthetic oligonucleotide
cucgucagcagggcauugu

SEQ ID NO: 129595 - RNA, 19 nt, Artificial Sequence
  Description of Artificial Sequence: Synthetic oligonucleotide
gcguggaggccauccgcuc

SEQ ID NO: 129596 - RNA, 19 nt, Artificial Sequence
  Description of Artificial Sequence: Synthetic oligonucleotide
gcccugacccaagcucugc

SEQ ID NO: 129597 - RNA, 19 nt, Artificial Sequence
  Description of Artificial Sequence: Synthetic oligonucleotide
gugugugugugugcuucuu

SEQ ID NO: 129598 - RNA, 19 nt, Artificial Sequence
  Description of Artificial Sequence: Synthetic oligonucleotide
ggccguccgggcugugcuc

SEQ ID NO: 129599 - RNA, 19 nt, Artificial Sequence
  Description of Artificial Sequence: Synthetic oligonucleotide
gcgguucccgggcacugcu

SEQ ID NO: 129600 - RNA, 19 nt, Artificial Sequence
  Description of Artificial Sequence: Synthetic oligonucleotide
cgccucacuggaguaaagu

SEQ ID NO: 129601 - RNA, 19 nt, Artificial Sequence
  Description of Artificial Sequence: Synthetic oligonucleotide
cgccaugguccgguagaaa

SEQ ID NO: 129602 - RNA, 19 nt, Artificial Sequence
  Description of Artificial Sequence: Synthetic oligonucleotide
cguuaggcauucggagauu

SEQ ID NO: 129603 - RNA, 19 nt, Artificial Sequence
  Description of Artificial Sequence: Synthetic oligonucleotide
uguaguauaagcaagagaa

SEQ ID NO: 129604 - RNA, 19 nt, Artificial Sequence
  Description of Artificial Sequence: Synthetic oligonucleotide
aaaaugagcgcucuaauuc

SEQ ID NO: 129605 - RNA, 19 nt, Artificial Sequence
  Description of Artificial Sequence: Synthetic oligonucleotide
aaucaagucaaccuuuacc

SEQ ID NO: 129606 - RNA, 19 nt, Artificial Sequence
  Description of Artificial Sequence: Synthetic oligonucleotide
uaaaagaccguacaugacg

SEQ ID NO: 129607 - RNA, 19 nt, Artificial Sequence
  Description of Artificial Sequence: Synthetic oligonucleotide
ucuaucgaguaaaagaccg

SEQ ID NO: 129608 - RNA, 19 nt, Artificial Sequence
  Description of Artificial Sequence: Synthetic oligonucleotide
aagucuaucgaguaaaaga

SEQ ID NO: 129609 - RNA, 19 nt, Artificial Sequence
  Description of Artificial Sequence: Synthetic oligonucleotide
auuagcuagagucaccagc

SEQ ID NO: 129610 - RNA, 19 nt, Artificial Sequence
  Description of Artificial Sequence: Synthetic oligonucleotide
aaccuguagaacuaagugg

SEQ ID NO: 129611 - RNA, 19 nt, Artificial Sequence
  Description of Artificial Sequence: Synthetic oligonucleotide
ucugauucccaaaauaacc

SEQ ID NO: 129612 - RNA, 19 nt, Artificial Sequence
  Description of Artificial Sequence: Synthetic oligonucleotide
aauuaagacauaccuccgg

SEQ ID NO: 129613 - RNA, 19 nt, Artificial Sequence
  Description of Artificial Sequence: Synthetic oligonucleotide
aaaauagcaacaguagguc

SEQ ID NO: 129614 - RNA, 19 nt, Artificial Sequence
  Description of Artificial Sequence: Synthetic oligonucleotide
aaccacauagauuuuaacu

SEQ ID NO: 129615 - RNA, 19 nt, Artificial Sequence
  Description of Artificial Sequence: Synthetic oligonucleotide
uucggaauuagcuagaguc

SEQ ID NO: 129616 - RNA, 19 nt, Artificial Sequence
  Description of Artificial Sequence: Synthetic oligonucleotide
auugaacacaaauacgccg

SEQ ID NO: 129617 - RNA, 19 nt, Artificial Sequence
  Description of Artificial Sequence: Synthetic oligonucleotide
aacuaaguggccguaaugg

SEQ ID NO: 129618 - RNA, 19 nt, Artificial Sequence
  Description of Artificial Sequence: Synthetic oligonucleotide
aaacguuuauacuuuucuc

SEQ ID NO: 129619 - RNA, 19 nt, Artificial Sequence
  Description of Artificial Sequence: Synthetic oligonucleotide
auuaauuagaugcaaaaua

SEQ ID NO: 129620 - RNA, 19 nt, Artificial Sequence
  Description of Artificial Sequence: Synthetic oligonucleotide
aguuaugaacgucucgugc

SEQ ID NO: 129621 - RNA, 19 nt, Artificial Sequence
  Description of Artificial Sequence: Synthetic oligonucleotide
accacauagauuuuaacug

SEQ ID NO: 129622 - RNA, 19 nt, Artificial Sequence
  Description of Artificial Sequence: Synthetic oligonucleotide
aucgguaacaaacaauuag

SEQ ID NO: 129623 - RNA, 19 nt, Artificial Sequence
  Description of Artificial Sequence: Synthetic oligonucleotide
auuuguauaggcucaauga

SEQ ID NO: 129624 - RNA, 19 nt, Artificial Sequence
  Description of Artificial Sequence: Synthetic oligonucleotide
ucgguaacaaacaauuagc

SEQ ID NO: 129625 - RNA, 19 nt, Artificial Sequence
  Description of Artificial Sequence: Synthetic oligonucleotide
aauaucuguaguauaagca

SEQ ID NO: 129626 - RNA, 19 nt, Artificial Sequence
  Description of Artificial Sequence: Synthetic oligonucleotide
agcguuaauacucaucguc

SEQ ID NO: 129627 - RNA, 19 nt, Artificial Sequence
  Description of Artificial Sequence: Synthetic oligonucleotide
uccacuaacaacuuccucu

SEQ ID NO: 129628 - RNA, 19 nt, Artificial Sequence
  Description of Artificial Sequence: Synthetic oligonucleotide
agucuaucgaguaaaagac

SEQ ID NO: 129629 - RNA, 19 nt, Artificial Sequence
  Description of Artificial Sequence: Synthetic oligonucleotide
aguucaaucaagucaaccu

SEQ ID NO: 129630 - RNA, 19 nt, Artificial Sequence
  Description of Artificial Sequence: Synthetic oligonucleotide
ugagacacacuaaagggug

SEQ ID NO: 129631 - RNA, 19 nt, Artificial Sequence
  Description of Artificial Sequence: Synthetic oligonucleotide
aaguucaaucaagucaacc

SEQ ID NO: 129632 - RNA, 19 nt, Artificial Sequence
  Description of Artificial Sequence: Synthetic oligonucleotide
uccgguacaacuaugguuc

SEQ ID NO: 129633 - RNA, 19 nt, Artificial Sequence
  Description of Artificial Sequence: Synthetic oligonucleotide
ugucgaguaacacuguccc

SEQ ID NO: 129634 - RNA, 19 nt, Artificial Sequence
  Description of Artificial Sequence: Synthetic oligonucleotide
acgaacuauuucuuggagc

SEQ ID NO: 129635 - RNA, 19 nt, Artificial Sequence
  Description of Artificial Sequence: Synthetic oligonucleotide
gaaagaacgaacuauuucu

SEQ ID NO: 129636 - RNA, 19 nt, Artificial Sequence
  Description of Artificial Sequence: Synthetic oligonucleotide
uacgccguaacauauguug

SEQ ID NO: 129637 - RNA, 19 nt, Artificial Sequence
  Description of Artificial Sequence: Synthetic oligonucleotide
uuuguauaggcucaaugaa

SEQ ID NO: 129638 - RNA, 19 nt, Artificial Sequence
  Description of Artificial Sequence: Synthetic oligonucleotide
ugaaaucucgguaaguauc

SEQ ID NO: 129639 - RNA, 19 nt, Artificial Sequence
  Description of Artificial Sequence: Synthetic oligonucleotide
aagaccguacaugacgacc

SEQ ID NO: 129640 - RNA, 19 nt, Artificial Sequence
  Description of Artificial Sequence: Synthetic oligonucleotide
aauacgccguaacauaugu

SEQ ID NO: 129641 - RNA, 19 nt, Artificial Sequence
  Description of Artificial Sequence: Synthetic oligonucleotide
cuuucgucgccuuuaauag

SEQ ID NO: 129642 - RNA, 19 nt, Artificial Sequence
  Description of Artificial Sequence: Synthetic oligonucleotide
aaaugagcgcucuaauucu

SEQ ID NO: 129643 - RNA, 19 nt, Artificial Sequence
  Description of Artificial Sequence: Synthetic oligonucleotide
ugaaguuaugaacgucucg

SEQ ID NO: 129644 - RNA, 19 nt, Artificial Sequence
  Description of Artificial Sequence: Synthetic oligonucleotide
gauucgaggagcugaaagc

SEQ ID NO: 129645 - RNA, 19 nt, Artificial Sequence
  Description of Artificial Sequence: Synthetic oligonucleotide
caagaugagugcaaugucc

SEQ ID NO: 129646 - RNA, 19 nt, Artificial Sequence
  Description of Artificial Sequence: Synthetic oligonucleotide
cuccaugagaccacuaucg

SEQ ID NO: 129647 - RNA, 19 nt, Artificial Sequence
  Description of Artificial Sequence: Synthetic oligonucleotide
uugaacacaaauacgccgu

SEQ ID NO: 129648 - RNA, 19 nt, Artificial Sequence
  Description of Artificial Sequence: Synthetic oligonucleotide
agcgcucuaauucugagug

SEQ ID NO: 129649 - RNA, 19 nt, Artificial Sequence
  Description of Artificial Sequence: Synthetic oligonucleotide
ucaaccuuuaccaaaucua

SEQ ID NO: 129650 - RNA, 19 nt, Artificial Sequence
  Description of Artificial Sequence: Synthetic oligonucleotide
uggaguaaaccacauagau

SEQ ID NO: 129651 - RNA, 19 nt, Artificial Sequence
  Description of Artificial Sequence: Synthetic oligonucleotide
uuaagacauaccuccgggg

SEQ ID NO: 129652 - RNA, 19 nt, Artificial Sequence
  Description of Artificial Sequence: Synthetic oligonucleotide
gcagcguuaauacucaucg

SEQ ID NO: 129653 - RNA, 19 nt, Artificial Sequence
  Description of Artificial Sequence: Synthetic oligonucleotide
uaagacauaccuccgggga

SEQ ID NO: 129654 - RNA, 19 nt, Artificial Sequence
  Description of Artificial Sequence: Synthetic oligonucleotide
auaucuguaguauaagcaa

SEQ ID NO: 129655 - RNA, 19 nt, Artificial Sequence
  Description of Artificial Sequence: Synthetic oligonucleotide
aaucccuuaguagucuugg

SEQ ID NO: 129656 - RNA, 19 nt, Artificial Sequence
  Description of Artificial Sequence: Synthetic oligonucleotide
aacgaacuauuucuuggag

SEQ ID NO: 129657 - RNA, 19 nt, Artificial Sequence
  Description of Artificial Sequence: Synthetic oligonucleotide
uguauaggcucaaugaauu

SEQ ID NO: 129658 - RNA, 19 nt, Artificial Sequence
  Description of Artificial Sequence: Synthetic oligonucleotide
cacuggauaacauuguaug

SEQ ID NO: 129659 - RNA, 19 nt, Artificial Sequence
  Description of Artificial Sequence: Synthetic oligonucleotide
ucaaugaauuaagacauac

SEQ ID NO: 129660 - RNA, 19 nt, Artificial Sequence
  Description of Artificial Sequence: Synthetic oligonucleotide
auuaaguuuguuucuggcu

SEQ ID NO: 129661 - RNA, 19 nt, Artificial Sequence
  Description of Artificial Sequence: Synthetic oligonucleotide
aauagucccauuaauuaga

SEQ ID NO: 129662 - RNA, 19 nt, Artificial Sequence
  Description of Artificial Sequence: Synthetic oligonucleotide
gacugugaaaagcaccccg

SEQ ID NO: 129663 - RNA, 19 nt, Artificial Sequence
  Description of Artificial Sequence: Synthetic oligonucleotide
agauucgaggagcugaaag

SEQ ID NO: 129664 - RNA, 19 nt, Artificial Sequence
  Description of Artificial Sequence: Synthetic oligonucleotide
aaacuaugcagagcgcuac

SEQ ID NO: 129665 - RNA, 19 nt, Artificial Sequence
  Description of Artificial Sequence: Synthetic oligonucleotide
uuguuuaagagaacucugu

SEQ ID NO: 129666 - RNA, 19 nt, Artificial Sequence
  Description of Artificial Sequence: Synthetic oligonucleotide
caaccuuuaccaaaucuag

SEQ ID NO: 129667 - RNA, 19 nt, Artificial Sequence
  Description of Artificial Sequence: Synthetic oligonucleotide
cauauguugaaugggcugg

SEQ ID NO: 129668 - RNA, 19 nt, Artificial Sequence
  Description of Artificial Sequence: Synthetic oligonucleotide
uauuccaucuugagggacc

SEQ ID NO: 129669 - RNA, 19 nt, Artificial Sequence
  Description of Artificial Sequence: Synthetic oligonucleotide
ucuuucgucgccuuuaaua

SEQ ID NO: 129670 - RNA, 19 nt, Artificial Sequence
  Description of Artificial Sequence: Synthetic oligonucleotide
guauuaaguuuguuucugg

SEQ ID NO: 129671 - RNA, 19 nt, Artificial Sequence
  Description of Artificial Sequence: Synthetic oligonucleotide
uuccuaaacuguguggugg

SEQ ID NO: 129672 - RNA, 19 nt, Artificial Sequence
  Description of Artificial Sequence: Synthetic oligonucleotide
cuacaaucaaauccaacac

SEQ ID NO: 129673 - RNA, 19 nt, Artificial Sequence
  Description of Artificial Sequence: Synthetic oligonucleotide
aaagucuaucgaguaaaag

SEQ ID NO: 129674 - RNA, 19 nt, Artificial Sequence
  Description of Artificial Sequence: Synthetic oligonucleotide
ugugcgaacacaagucagc

SEQ ID NO: 129675 - RNA, 19 nt, Artificial Sequence
  Description of Artificial Sequence: Synthetic oligonucleotide
uucugauucccaaaauaac

SEQ ID NO: 129676 - RNA, 19 nt, Artificial Sequence
  Description of Artificial Sequence: Synthetic oligonucleotide
uauaagcaagagaaauaca

SEQ ID NO: 129677 - RNA, 19 nt, Artificial Sequence
  Description of Artificial Sequence: Synthetic oligonucleotide
guuaauacucaucguccgg

SEQ ID NO: 129678 - RNA, 19 nt, Artificial Sequence
  Description of Artificial Sequence: Synthetic oligonucleotide
uggauaacauuguaugacu

SEQ ID NO: 129679 - RNA, 19 nt, Artificial Sequence
  Description of Artificial Sequence: Synthetic oligonucleotide
uuaaguggccguuucggug

SEQ ID NO: 129680 - RNA, 19 nt, Artificial Sequence
  Description of Artificial Sequence: Synthetic oligonucleotide
acuagugguaguuguguag

SEQ ID NO: 129681 - RNA, 19 nt, Artificial Sequence
  Description of Artificial Sequence: Synthetic oligonucleotide
aaagaccguacaugacgac

SEQ ID NO: 129682 - RNA, 19 nt, Artificial Sequence
  Description of Artificial Sequence: Synthetic oligonucleotide
aaguuaugaacgucucgug

SEQ ID NO: 129683 - RNA, 19 nt, Artificial Sequence
  Description of Artificial Sequence: Synthetic oligonucleotide
uccacgacuuucauuauaa

SEQ ID NO: 129684 - RNA, 19 nt, Artificial Sequence
  Description of Artificial Sequence: Synthetic oligonucleotide
uuguauaggcucaaugaau

SEQ ID NO: 129685 - RNA, 19 nt, Artificial Sequence
  Description of Artificial Sequence: Synthetic oligonucleotide
uuggcuaguauacuguuuu

SEQ ID NO: 129686 - RNA, 19 nt, Artificial Sequence
  Description of Artificial Sequence: Synthetic oligonucleotide
aaaagaccguacaugacga

SEQ ID NO: 129687 - RNA, 19 nt, Artificial Sequence
  Description of Artificial Sequence: Synthetic oligonucleotide
uucugagcacuccaacuag

SEQ ID NO: 129688 - RNA, 19 nt, Artificial Sequence
  Description of Artificial Sequence: Synthetic oligonucleotide
cauugugcgaacacaaguc

SEQ ID NO: 129689 - RNA, 19 nt, Artificial Sequence
  Description of Artificial Sequence: Synthetic oligonucleotide
acgacuuucauuauaauuu

SEQ ID NO: 129690 - RNA, 19 nt, Artificial Sequence
  Description of Artificial Sequence: Synthetic oligonucleotide
acugcugucgaguaacacu

SEQ ID NO: 129691 - RNA, 19 nt, Artificial Sequence
  Description of Artificial Sequence: Synthetic oligonucleotide
ucgagaggaaaucuucugu

SEQ ID NO: 129692 - RNA, 19 nt, Artificial Sequence
  Description of Artificial Sequence: Synthetic oligonucleotide
ucgaguaacacugucccca

SEQ ID NO: 129693 - RNA, 19 nt, Artificial Sequence
  Description of Artificial Sequence: Synthetic oligonucleotide
caguccuguuauuaaauag

SEQ ID NO: 129694 - RNA, 19 nt, Artificial Sequence
  Description of Artificial Sequence: Synthetic oligonucleotide
ugugccagagaaagaacga

SEQ ID NO: 129695 - RNA, 19 nt, Artificial Sequence
  Description of Artificial Sequence: Synthetic oligonucleotide
uucgucgccuuuaauaguc

SEQ ID NO: 129696 - RNA, 19 nt, Artificial Sequence
  Description of Artificial Sequence: Synthetic oligonucleotide
uccuaaacugugugguggg

SEQ ID NO: 129697 - RNA, 19 nt, Artificial Sequence
  Description of Artificial Sequence: Synthetic oligonucleotide
gaucccgaggacucgggcg

SEQ ID NO: 129698 - RNA, 19 nt, Artificial Sequence
  Description of Artificial Sequence: Synthetic oligonucleotide
auugugcgaacacaaguca

SEQ ID NO: 129699 - RNA, 19 nt, Artificial Sequence
  Description of Artificial Sequence: Synthetic oligonucleotide
auagacgguggccuacucg

SEQ ID NO: 129700 - RNA, 19 nt, Artificial Sequence
  Description of Artificial Sequence: Synthetic oligonucleotide
cuggauaacauuguaugac

SEQ ID NO: 129701 - RNA, 19 nt, Artificial Sequence
  Description of Artificial Sequence: Synthetic oligonucleotide
acuggauaacauuguauga

SEQ ID NO: 129702 - RNA, 19 nt, Artificial Sequence
  Description of Artificial Sequence: Synthetic oligonucleotide
cugcugucgaguaacacug

SEQ ID NO: 129703 - RNA, 19 nt, Artificial Sequence
  Description of Artificial Sequence: Synthetic oligonucleotide
agaagugucugcuuccggu

SEQ ID NO: 129704 - RNA, 19 nt, Artificial Sequence
  Description of Artificial Sequence: Synthetic oligonucleotide
ugaacgugcugaccacucg

SEQ ID NO: 129705 - RNA, 19 nt, Artificial Sequence
  Description of Artificial Sequence: Synthetic oligonucleotide
acaacagcccauugcauca

SEQ ID NO: 129706 - RNA, 19 nt, Artificial Sequence
  Description of Artificial Sequence: Synthetic oligonucleotide
cuaugguuccuaaacugug

SEQ ID NO: 129707 - RNA, 19 nt, Artificial Sequence
  Description of Artificial Sequence: Synthetic oligonucleotide
acacacuaaagggugacag

SEQ ID NO: 129708 - RNA, 19 nt, Artificial Sequence
  Description of Artificial Sequence: Synthetic oligonucleotide
aaaucuagaucuguaucaa

SEQ ID NO: 129709 - RNA, 19 nt, Artificial Sequence
  Description of Artificial Sequence: Synthetic oligonucleotide
acaaauacgccguaacaua

SEQ ID NO: 129710 - RNA, 19 nt, Artificial Sequence
  Description of Artificial Sequence: Synthetic oligonucleotide
gcaagagaaauacauacca

SEQ ID NO: 129711 - RNA, 19 nt, Artificial Sequence
  Description of Artificial Sequence: Synthetic oligonucleotide
ucucgaagcacgaucccga

SEQ ID NO: 129712 - RNA, 19 nt, Artificial Sequence
  Description of Artificial Sequence: Synthetic oligonucleotide
aagaugagugcaauguccu

SEQ ID NO: 129713 - RNA, 19 nt, Artificial Sequence
  Description of Artificial Sequence: Synthetic oligonucleotide
aacauauguugaaugggcu

SEQ ID NO: 129714 - RNA, 19 nt, Artificial Sequence
  Description of Artificial Sequence: Synthetic oligonucleotide
uaccuagaaauuuucuaaa

SEQ ID NO: 129715 - RNA, 19 nt, Artificial Sequence
  Description of Artificial Sequence: Synthetic oligonucleotide
uuuaggcuuuaaauaacua

SEQ ID NO: 129716 - RNA, 19 nt, Artificial Sequence
  Description of Artificial Sequence: Synthetic oligonucleotide
aacgucucgugcuuaugcu

SEQ ID NO: 129717 - RNA, 19 nt, Artificial Sequence
  Description of Artificial Sequence: Synthetic oligonucleotide
ugccauuuguauaggcuca

SEQ ID NO: 129718 - RNA, 19 nt, Artificial Sequence
  Description of Artificial Sequence: Synthetic oligonucleotide
uuuaaguggccguuucggu

SEQ ID NO: 129719 - RNA, 19 nt, Artificial Sequence
  Description of Artificial Sequence: Synthetic oligonucleotide
uaaaagauccuggaauauc

SEQ ID NO: 129720 - RNA, 19 nt, Artificial Sequence
  Description of Artificial Sequence: Synthetic oligonucleotide
uugggguauuccaaagucu

SEQ ID NO: 129721 - RNA, 19 nt, Artificial Sequence
  Description of Artificial Sequence: Synthetic oligonucleotide
acacaaauacgccguaaca

SEQ ID NO: 129722 - RNA, 19 nt, Artificial Sequence
  Description of Artificial Sequence: Synthetic oligonucleotide
gacgcauugagcagugucc

SEQ ID NO: 129723 - RNA, 19 nt, Artificial Sequence
  Description of Artificial Sequence: Synthetic oligonucleotide
gaacuaaguggccguaaug

SEQ ID NO: 129724 - RNA, 19 nt, Artificial Sequence
  Description of Artificial Sequence: Synthetic oligonucleotide
guacaugacgaccucuccc

SEQ ID NO: 129725 - RNA, 19 nt, Artificial Sequence
  Description of Artificial Sequence: Synthetic oligonucleotide
cugucgaguaacacugucc

SEQ ID NO: 129726 - RNA, 19 nt, Artificial Sequence
  Description of Artificial Sequence: Synthetic oligonucleotide
auaggcucaaugaauuaag

SEQ ID NO: 129727 - RNA, 19 nt, Artificial Sequence
  Description of Artificial Sequence: Synthetic oligonucleotide
ugucaaaguuagaaguuuu

SEQ ID NO: 129728 - RNA, 19 nt, Artificial Sequence
  Description of Artificial Sequence: Synthetic oligonucleotide
aguccuguuauuaaauaga

SEQ ID NO: 129729 - RNA, 19 nt, Artificial Sequence
  Description of Artificial Sequence: Synthetic oligonucleotide
acauacaaaguuugguuuu

SEQ ID NO: 129730 - RNA, 19 nt, Artificial Sequence
  Description of Artificial Sequence: Synthetic oligonucleotide
gaaguuaugaacgucucgu

SEQ ID NO: 129731 - RNA, 19 nt, Artificial Sequence
  Description of Artificial Sequence: Synthetic oligonucleotide
gaggaugcaagcucaccug

SEQ ID NO: 129732 - RNA, 19 nt, Artificial Sequence
  Description of Artificial Sequence: Synthetic oligonucleotide
ugacgcauugagcaguguc

SEQ ID NO: 129733 - RNA, 19 nt, Artificial Sequence
  Description of Artificial Sequence: Synthetic oligonucleotide
acaucgguaacaaacaauu

SEQ ID NO: 129734 - RNA, 19 nt, Artificial Sequence
  Description of Artificial Sequence: Synthetic oligonucleotide
gaacgugcugaccacucgc

SEQ ID NO: 129735 - RNA, 19 nt, Artificial Sequence
  Description of Artificial Sequence: Synthetic oligonucleotide
acuaucgucuccacaacag

SEQ ID NO: 129736 - RNA, 19 nt, Artificial Sequence
  Description of Artificial Sequence: Synthetic oligonucleotide
ugcaguccuguuauuaaau

SEQ ID NO: 129737 - RNA, 19 nt, Artificial Sequence
  Description of Artificial Sequence: Synthetic oligonucleotide
ucugagcacuccaacuaga

SEQ ID NO: 129738 - RNA, 19 nt, Artificial Sequence
  Description of Artificial Sequence: Synthetic oligonucleotide
cagaaaguucaaucaaguc

SEQ ID NO: 129739 - RNA, 19 nt, Artificial Sequence
  Description of Artificial Sequence: Synthetic oligonucleotide
uuaacuggucauccaugac

SEQ ID NO: 129740 - RNA, 19 nt, Artificial Sequence
  Description of Artificial Sequence: Synthetic oligonucleotide
uccacgugcauagacggug

SEQ ID NO: 129741 - RNA, 19 nt, Artificial Sequence
  Description of Artificial Sequence: Synthetic oligonucleotide
ucagcaaacuaugcagagc

SEQ ID NO: 129742 - RNA, 19 nt, Artificial Sequence
  Description of Artificial Sequence: Synthetic oligonucleotide
acuacuaauaugagguagu

SEQ ID NO: 129743 - RNA, 19 nt, Artificial Sequence
  Description of Artificial Sequence: Synthetic oligonucleotide
cuaucgucuccacaacagc

SEQ ID NO: 129744 - RNA, 19 nt, Artificial Sequence
  Description of Artificial Sequence: Synthetic oligonucleotide
uuaccaaaucuagaucugu

SEQ ID NO: 129745 - RNA, 19 nt, Artificial Sequence
  Description of Artificial Sequence: Synthetic oligonucleotide
acguuuauacuuuucucua

SEQ ID NO: 129746 - RNA, 19 nt, Artificial Sequence
  Description of Artificial Sequence: Synthetic oligonucleotide
aguagguccaaagcugaag

SEQ ID NO: 129747 - RNA, 19 nt, Artificial Sequence
  Description of Artificial Sequence: Synthetic oligonucleotide
uccaugagaccacuaucgu

SEQ ID NO: 129748 - RNA, 19 nt, Artificial Sequence
  Description of Artificial Sequence: Synthetic oligonucleotide
aaauacgccguaacauaug

SEQ ID NO: 129749 - RNA, 19 nt, Artificial Sequence
  Description of Artificial Sequence: Synthetic oligonucleotide
gagaccguagcaaagcuaa

SEQ ID NO: 129750 - RNA, 19 nt, Artificial Sequence
  Description of Artificial Sequence: Synthetic oligonucleotide
ugacacuuuaaguggccgu

SEQ ID NO: 129751 - RNA, 19 nt, Artificial Sequence
  Description of Artificial Sequence: Synthetic oligonucleotide
guuaugaacgucucgugcu

SEQ ID NO: 129752 - RNA, 19 nt, Artificial Sequence
  Description of Artificial Sequence: Synthetic oligonucleotide
augaggaugcaagcucacc

SEQ ID NO: 129753 - RNA, 19 nt, Artificial Sequence
  Description of Artificial Sequence: Synthetic oligonucleotide
aaugagcgcucuaauucug

SEQ ID NO: 129754 - RNA, 19 nt, Artificial Sequence
  Description of Artificial Sequence: Synthetic oligonucleotide
ucccuuaguagucuugguu

SEQ ID NO: 129755 - RNA, 19 nt, Artificial Sequence
  Description of Artificial Sequence: Synthetic oligonucleotide
gcagucaucaacucuuuac

SEQ ID NO: 129756 - RNA, 19 nt, Artificial Sequence
  Description of Artificial Sequence: Synthetic oligonucleotide
agggacuagugguaguugu

SEQ ID NO: 129757 - RNA, 19 nt, Artificial Sequence
  Description of Artificial Sequence: Synthetic oligonucleotide
agaacuaaguggccguaau

SEQ ID NO: 129758 - RNA, 19 nt, Artificial Sequence
  Description of Artificial Sequence: Synthetic oligonucleotide
cuaacauaaagaagugucu

SEQ ID NO: 129759 - RNA, 19 nt, Artificial Sequence
  Description of Artificial Sequence: Synthetic oligonucleotide
ugcgaacacaagucagcag

SEQ ID NO: 129760 - RNA, 19 nt, Artificial Sequence
  Description of Artificial Sequence: Synthetic oligonucleotide
ugcagcguuaauacucauc

SEQ ID NO: 129761 - RNA, 19 nt, Artificial Sequence
  Description of Artificial Sequence: Synthetic oligonucleotide
uggaauaucucugcauauc

SEQ ID NO: 129762 - RNA, 19 nt, Artificial Sequence
  Description of Artificial Sequence: Synthetic oligonucleotide
agcacgaucccgaggacuc

SEQ ID NO: 129763 - RNA, 19 nt, Artificial Sequence
  Description of Artificial Sequence: Synthetic oligonucleotide
aaccuuuaccaaaucuaga

SEQ ID NO: 129764 - RNA, 19 nt, Artificial Sequence
  Description of Artificial Sequence: Synthetic oligonucleotide
uucccgacgacuguaguuc

SEQ ID NO: 129765 - RNA, 19 nt, Artificial Sequence
  Description of Artificial Sequence: Synthetic oligonucleotide
ugggaauaucuguaguaua

SEQ ID NO: 129766 - RNA, 19 nt, Artificial Sequence
  Description of Artificial Sequence: Synthetic oligonucleotide
acguuuggcaggcucgaug

SEQ ID NO: 129767 - RNA, 19 nt, Artificial Sequence
  Description of Artificial Sequence: Synthetic oligonucleotide
ucgggcgguaaccuguaga

SEQ ID NO: 129768 - RNA, 19 nt, Artificial Sequence
  Description of Artificial Sequence: Synthetic oligonucleotide
uuucgucgccuuuaauagu

SEQ ID NO: 129769 - RNA, 19 nt, Artificial Sequence
  Description of Artificial Sequence: Synthetic oligonucleotide
caucaacucuuuacuuggc

SEQ ID NO: 129770 - RNA, 19 nt, Artificial Sequence
  Description of Artificial Sequence: Synthetic oligonucleotide
acaugacgaccucucccac

SEQ ID NO: 129771 - RNA, 19 nt, Artificial Sequence
  Description of Artificial Sequence: Synthetic oligonucleotide
gugacacuuuaaguggccg

SEQ ID NO: 129772 - RNA, 19 nt, Artificial Sequence
  Description of Artificial Sequence: Synthetic oligonucleotide
agcacacgaacaucgguaa

SEQ ID NO: 129773 - RNA, 19 nt, Artificial Sequence
  Description of Artificial Sequence: Synthetic oligonucleotide
uacuaauaugagguaguuc

SEQ ID NO: 129774 - RNA, 19 nt, Artificial Sequence
  Description of Artificial Sequence: Synthetic oligonucleotide
aggaugcaagcucaccugu

SEQ ID NO: 129775 - RNA, 19 nt, Artificial Sequence
  Description of Artificial Sequence: Synthetic oligonucleotide
guuccuaaacuguguggug

SEQ ID NO: 129776 - RNA, 19 nt, Artificial Sequence
  Description of Artificial Sequence: Synthetic oligonucleotide
cacacugcugucgaguaac

SEQ ID NO: 129777 - RNA, 19 nt, Artificial Sequence
  Description of Artificial Sequence: Synthetic oligonucleotide
gucuaucgaguaaaagacc

SEQ ID NO: 129778 - RNA, 19 nt, Artificial Sequence
  Description of Artificial Sequence: Synthetic oligonucleotide
uaucuuucgucgccuuuaa

SEQ ID NO: 129779 - RNA, 19 nt, Artificial Sequence
  Description of Artificial Sequence: Synthetic oligonucleotide
ggaauaucuguaguauaag

SEQ ID NO: 129780 - RNA, 19 nt, Artificial Sequence
  Description of Artificial Sequence: Synthetic oligonucleotide
aggaguauucugagcacuc

SEQ ID NO: 129781 - RNA, 19 nt, Artificial Sequence
  Description of Artificial Sequence: Synthetic oligonucleotide
aagcaaacguuuauacuuu

SEQ ID NO: 129782 - RNA, 19 nt, Artificial Sequence
  Description of Artificial Sequence: Synthetic oligonucleotide
aaguggccguuucgguggg

SEQ ID NO: 129783 - RNA, 19 nt, Artificial Sequence
  Description of Artificial Sequence: Synthetic oligonucleotide
gaucagaagagcaguugga

SEQ ID NO: 129784 - RNA, 19 nt, Artificial Sequence
  Description of Artificial Sequence: Synthetic oligonucleotide
aggaccccuguuaaaauug

SEQ ID NO: 129785 - RNA, 19 nt, Artificial Sequence
  Description of Artificial Sequence: Synthetic oligonucleotide
agcaaacuaugcagagcgc

SEQ ID NO: 129786 - RNA, 19 nt, Artificial Sequence
  Description of Artificial Sequence: Synthetic oligonucleotide
cuccggggaaauauggcuc

SEQ ID NO: 129787 - RNA, 19 nt, Artificial Sequence
  Description of Artificial Sequence: Synthetic oligonucleotide
guguccuuacugaacgugc

SEQ ID NO: 129788 - RNA, 19 nt, Artificial Sequence
  Description of Artificial Sequence: Synthetic oligonucleotide
cuguuauuaaauagauucu

SEQ ID NO: 129789 - RNA, 19 nt, Artificial Sequence
  Description of Artificial Sequence: Synthetic oligonucleotide
agaagggcucggcaagaug

SEQ ID NO: 129790 - RNA, 19 nt, Artificial Sequence
  Description of Artificial Sequence: Synthetic oligonucleotide
agaccguacaugacgaccu

SEQ ID NO: 129791 - RNA, 19 nt, Artificial Sequence
  Description of Artificial Sequence: Synthetic oligonucleotide
guaaaagaccguacaugac

SEQ ID NO: 129792 - RNA, 19 nt, Artificial Sequence
  Description of Artificial Sequence: Synthetic oligonucleotide
uaaaucccuuaguagucuu

SEQ ID NO: 129793 - RNA, 19 nt, Artificial Sequence
  Description of Artificial Sequence: Synthetic oligonucleotide
cccuuaguagucuugguuc

SEQ ID NO: 129794 - RNA, 19 nt, Artificial Sequence
  Description of Artificial Sequence: Synthetic oligonucleotide
ucgucgccuuuaauagucc

SEQ ID NO: 129795 - RNA, 19 nt, Artificial Sequence
  Description of Artificial Sequence: Synthetic oligonucleotide
gcguuaauacucaucgucc

SEQ ID NO: 129796 - RNA, 19 nt, Artificial Sequence
  Description of Artificial Sequence: Synthetic oligonucleotide
ugguaguuguguagucuuc

SEQ ID NO: 129797 - RNA, 19 nt, Artificial Sequence
  Description of Artificial Sequence: Synthetic oligonucleotide
agaccacuaucgucuccac

SEQ ID NO: 129798 - RNA, 19 nt, Artificial Sequence
  Description of Artificial Sequence: Synthetic oligonucleotide
augcaguccuguuauuaaa

SEQ ID NO: 129799 - RNA, 19 nt, Artificial Sequence
  Description of Artificial Sequence: Synthetic oligonucleotide
guggcacaacaugagcacg

SEQ ID NO: 129800 - RNA, 19 nt, Artificial Sequence
  Description of Artificial Sequence: Synthetic oligonucleotide
gaugcaagcucaccugugu

SEQ ID NO: 129801 - RNA, 19 nt, Artificial Sequence
  Description of Artificial Sequence: Synthetic oligonucleotide
uacugaacgugcugaccac

SEQ ID NO: 129802 - RNA, 19 nt, Artificial Sequence
  Description of Artificial Sequence: Synthetic oligonucleotide
cacuuuaaguggccguuuc

SEQ ID NO: 129803 - RNA, 19 nt, Artificial Sequence
  Description of Artificial Sequence: Synthetic oligonucleotide
gaagugucugcuuccggua

SEQ ID NO: 129804 - RNA, 19 nt, Artificial Sequence
  Description of Artificial Sequence: Synthetic oligonucleotide
uaucauggggccggaugcc

SEQ ID NO: 129805 - RNA, 19 nt, Artificial Sequence
  Description of Artificial Sequence: Synthetic oligonucleotide
gaggacucgggcgguaacc

SEQ ID NO: 129806 - RNA, 19 nt, Artificial Sequence
  Description of Artificial Sequence: Synthetic oligonucleotide
ccguaacauauguugaaug

SEQ ID NO: 129807 - RNA, 19 nt, Artificial Sequence
  Description of Artificial Sequence: Synthetic oligonucleotide
cugugaaaagcaccccguc

SEQ ID NO: 129808 - RNA, 19 nt, Artificial Sequence
  Description of Artificial Sequence: Synthetic oligonucleotide
aacgugcugaccacucgcu

SEQ ID NO: 129809 - RNA, 19 nt, Artificial Sequence
  Description of Artificial Sequence: Synthetic oligonucleotide
gucgaguaacacugucccc

SEQ ID NO: 129810 - RNA, 19 nt, Artificial Sequence
  Description of Artificial Sequence: Synthetic oligonucleotide
gggaauaucuguaguauaa

SEQ ID NO: 129811 - RNA, 19 nt, Artificial Sequence
  Description of Artificial Sequence: Synthetic oligonucleotide
ggcgguaaccuguagaacu

SEQ ID NO: 129812 - RNA, 19 nt, Artificial Sequence
  Description of Artificial Sequence: Synthetic oligonucleotide
cuacucguguucuguuuuc

SEQ ID NO: 129813 - RNA, 19 nt, Artificial Sequence
  Description of Artificial Sequence: Synthetic oligonucleotide
gaacaugaaggugcaugca

SEQ ID NO: 129814 - RNA, 19 nt, Artificial Sequence
  Description of Artificial Sequence: Synthetic oligonucleotide
cuauuggugcuagcccagg

SEQ ID NO: 129815 - RNA, 19 nt, Artificial Sequence
  Description of Artificial Sequence: Synthetic oligonucleotide
agcaaacguuuauacuuuu

SEQ ID NO: 129816 - RNA, 19 nt, Artificial Sequence
  Description of Artificial Sequence: Synthetic oligonucleotide
aucagcuagcacauaugca

SEQ ID NO: 129817 - RNA, 19 nt, Artificial Sequence
  Description of Artificial Sequence: Synthetic oligonucleotide
ucccgacgacuguaguucc

SEQ ID NO: 129818 - RNA, 19 nt, Artificial Sequence
  Description of Artificial Sequence: Synthetic oligonucleotide
cagucaucaacucuuuacu

SEQ ID NO: 129819 - RNA, 19 nt, Artificial Sequence
  Description of Artificial Sequence: Synthetic oligonucleotide
caaauacgccguaacauau

SEQ ID NO: 129820 - RNA, 19 nt, Artificial Sequence
  Description of Artificial Sequence: Synthetic oligonucleotide
auagucccauuaauuagau

SEQ ID NO: 129821 - RNA, 19 nt, Artificial Sequence
  Description of Artificial Sequence: Synthetic oligonucleotide
acgcauugagcagugucca

SEQ ID NO: 129822 - RNA, 19 nt, Artificial Sequence
  Description of Artificial Sequence: Synthetic oligonucleotide
accacucgcuucagcaaac

SEQ ID NO: 129823 - RNA, 19 nt, Artificial Sequence
  Description of Artificial Sequence: Synthetic oligonucleotide
gucucgugcuuaugcuucc

SEQ ID NO: 129824 - RNA, 19 nt, Artificial Sequence
  Description of Artificial Sequence: Synthetic oligonucleotide
caaagucuaucgaguaaaa

SEQ ID NO: 129825 - RNA, 19 nt, Artificial Sequence
  Description of Artificial Sequence: Synthetic oligonucleotide
guauaggcucaaugaauua

SEQ ID NO: 129826 - RNA, 19 nt, Artificial Sequence
  Description of Artificial Sequence: Synthetic oligonucleotide
cagcacacgaacaucggua

SEQ ID NO: 129827 - RNA, 19 nt, Artificial Sequence
  Description of Artificial Sequence: Synthetic oligonucleotide
agggaccacuucuuuacuu

SEQ ID NO: 129828 - RNA, 19 nt, Artificial Sequence
  Description of Artificial Sequence: Synthetic oligonucleotide
cacuaucgucuccacaaca

SEQ ID NO: 129829 - RNA, 19 nt, Artificial Sequence
  Description of Artificial Sequence: Synthetic oligonucleotide
ggaauuagcuagagucacc

SEQ ID NO: 129830 - RNA, 19 nt, Artificial Sequence
  Description of Artificial Sequence: Synthetic oligonucleotide
gaccacuaucgucuccaca

SEQ ID NO: 129831 - RNA, 19 nt, Artificial Sequence
  Description of Artificial Sequence: Synthetic oligonucleotide
agcacuccaacuagagccu

SEQ ID NO: 129832 - RNA, 19 nt, Artificial Sequence
  Description of Artificial Sequence: Synthetic oligonucleotide
gccgcuauuggugcuagcc

SEQ ID NO: 129833 - RNA, 19 nt, Artificial Sequence
  Description of Artificial Sequence: Synthetic oligonucleotide
cacgaucccgaggacucgg

SEQ ID NO: 129834 - RNA, 19 nt, Artificial Sequence
  Description of Artificial Sequence: Synthetic oligonucleotide
uccccaguuuaaaucccuu

SEQ ID NO: 129835 - RNA, 19 nt, Artificial Sequence
  Description of Artificial Sequence: Synthetic oligonucleotide
uggccuacucguguucugu

SEQ ID NO: 129836 - RNA, 19 nt, Artificial Sequence
  Description of Artificial Sequence: Synthetic oligonucleotide
acgucucgugcuuaugcuu

SEQ ID NO: 129837 - RNA, 19 nt, Artificial Sequence
  Description of Artificial Sequence: Synthetic oligonucleotide
ggcucggcaagaugagugc

SEQ ID NO: 129838 - RNA, 19 nt, Artificial Sequence
  Description of Artificial Sequence: Synthetic oligonucleotide
aagcucaccuguguccuua

SEQ ID NO: 129839 - RNA, 19 nt, Artificial Sequence
  Description of Artificial Sequence: Synthetic oligonucleotide
caucgguaacaaacaauua

SEQ ID NO: 129840 - RNA, 19 nt, Artificial Sequence
  Description of Artificial Sequence: Synthetic oligonucleotide
auaccuccggggaaauaug

SEQ ID NO: 129841 - RNA, 19 nt, Artificial Sequence
  Description of Artificial Sequence: Synthetic oligonucleotide
ccaugagaccacuaucguc

SEQ ID NO: 129842 - RNA, 19 nt, Artificial Sequence
  Description of Artificial Sequence: Synthetic oligonucleotide
cuagugguaguuguguagu

SEQ ID NO: 129843 - RNA, 19 nt, Artificial Sequence
  Description of Artificial Sequence: Synthetic oligonucleotide
acgccguaacauauguuga

SEQ ID NO: 129844 - RNA, 19 nt, Artificial Sequence
  Description of Artificial Sequence: Synthetic oligonucleotide
cacgugcauagacgguggc

SEQ ID NO: 129845 - RNA, 19 nt, Artificial Sequence
  Description of Artificial Sequence: Synthetic oligonucleotide
cucaaugaauuaagacaua

SEQ ID NO: 129846 - RNA, 19 nt, Artificial Sequence
  Description of Artificial Sequence: Synthetic oligonucleotide
guacugcuugagaaaccug

SEQ ID NO: 129847 - RNA, 19 nt, Artificial Sequence
  Description of Artificial Sequence: Synthetic oligonucleotide
cgaagcacgaucccgagga

SEQ ID NO: 129848 - RNA, 19 nt, Artificial Sequence
  Description of Artificial Sequence: Synthetic oligonucleotide
cgaacaucgguaacaaaca

SEQ ID NO: 129849 - RNA, 19 nt, Artificial Sequence
  Description of Artificial Sequence: Synthetic oligonucleotide
accguacaugacgaccucu

SEQ ID NO: 129850 - RNA, 19 nt, Artificial Sequence
  Description of Artificial Sequence: Synthetic oligonucleotide
gaccguacaugacgaccuc

SEQ ID NO: 129851 - RNA, 19 nt, Artificial Sequence
  Description of Artificial Sequence: Synthetic oligonucleotide
cguagcaaagcuaaaagau

SEQ ID NO: 129852 - RNA, 19 nt, Artificial Sequence
  Description of Artificial Sequence: Synthetic oligonucleotide
augagcgcucuaauucuga

SEQ ID NO: 129853 - RNA, 19 nt, Artificial Sequence
  Description of Artificial Sequence: Synthetic oligonucleotide
cauagacgguggccuacuc

SEQ ID NO: 129854 - RNA, 19 nt, Artificial Sequence
  Description of Artificial Sequence: Synthetic oligonucleotide
gcuuggaccuaacuguuua

SEQ ID NO: 129855 - RNA, 19 nt, Artificial Sequence
  Description of Artificial Sequence: Synthetic oligonucleotide
gcugucgaguaacacuguc

SEQ ID NO: 129856 - RNA, 19 nt, Artificial Sequence
  Description of Artificial Sequence: Synthetic oligonucleotide
gagcgcucuaauucugagu

SEQ ID NO: 129857 - RNA, 19 nt, Artificial Sequence
  Description of Artificial Sequence: Synthetic oligonucleotide
cgguaacaaacaauuagca

SEQ ID NO: 129858 - RNA, 19 nt, Artificial Sequence
  Description of Artificial Sequence: Synthetic oligonucleotide
gacacuuuaaguggccguu

SEQ ID NO: 129859 - RNA, 19 nt, Artificial Sequence
  Description of Artificial Sequence: Synthetic oligonucleotide
aucuuucgucgccuuuaau

SEQ ID NO: 129860 - RNA, 19 nt, Artificial Sequence
  Description of Artificial Sequence: Synthetic oligonucleotide
cucggcaagaugagugcaa

SEQ ID NO: 129861 - RNA, 19 nt, Artificial Sequence
  Description of Artificial Sequence: Synthetic oligonucleotide
cagggacuagugguaguug

SEQ ID NO: 129862 - RNA, 19 nt, Artificial Sequence
  Description of Artificial Sequence: Synthetic oligonucleotide
guggccuacucguguucug

SEQ ID NO: 129863 - RNA, 19 nt, Artificial Sequence
  Description of Artificial Sequence: Synthetic oligonucleotide
ggaccccuguuaaaauugc

SEQ ID NO: 129864 - RNA, 19 nt, Artificial Sequence
  Description of Artificial Sequence: Synthetic oligonucleotide
ccgcuauuggugcuagccc

SEQ ID NO: 129865 - RNA, 19 nt, Artificial Sequence
  Description of Artificial Sequence: Synthetic oligonucleotide
ggccucucgaagcacgauc

SEQ ID NO: 129866 - RNA, 19 nt, Artificial Sequence
  Description of Artificial Sequence: Synthetic oligonucleotide
acacuuuaaguggccguuu

SEQ ID NO: 129867 - RNA, 19 nt, Artificial Sequence
  Description of Artificial Sequence: Synthetic oligonucleotide
gcaguccuguuauuaaaua

SEQ ID NO: 129868 - RNA, 19 nt, Artificial Sequence
  Description of Artificial Sequence: Synthetic oligonucleotide
ggugacgcauugagcagug

SEQ ID NO: 129869 - RNA, 19 nt, Artificial Sequence
  Description of Artificial Sequence: Synthetic oligonucleotide
acgaucccgaggacucggg

SEQ ID NO: 129870 - RNA, 19 nt, Artificial Sequence
  Description of Artificial Sequence: Synthetic oligonucleotide
acgguggccuacucguguu

SEQ ID NO: 129871 - RNA, 19 nt, Artificial Sequence
  Description of Artificial Sequence: Synthetic oligonucleotide
augcagagcgcuacuguuu

SEQ ID NO: 129872 - RNA, 19 nt, Artificial Sequence
  Description of Artificial Sequence: Synthetic oligonucleotide
acgugcugaccacucgcuu

SEQ ID NO: 129873 - RNA, 19 nt, Artificial Sequence
  Description of Artificial Sequence: Synthetic oligonucleotide
cguacaugacgaccucucc

SEQ ID NO: 129874 - RNA, 19 nt, Artificial Sequence
  Description of Artificial Sequence: Synthetic oligonucleotide
guagaacuaaguggccgua

SEQ ID NO: 129875 - RNA, 19 nt, Artificial Sequence
  Description of Artificial Sequence: Synthetic oligonucleotide
cuccacgacuuucauuaua

SEQ ID NO: 129876 - RNA, 19 nt, Artificial Sequence
  Description of Artificial Sequence: Synthetic oligonucleotide
caaauccgccccggccacg

SEQ ID NO: 129877 - RNA, 19 nt, Artificial Sequence
  Description of Artificial Sequence: Synthetic oligonucleotide
ugccgcuauuggugcuagc

SEQ ID NO: 129878 - RNA, 19 nt, Artificial Sequence
  Description of Artificial Sequence: Synthetic oligonucleotide
cugccgcuauuggugcuag

SEQ ID NO: 129879 - RNA, 19 nt, Artificial Sequence
  Description of Artificial Sequence: Synthetic oligonucleotide
caugacgaccucucccacu

SEQ ID NO: 129880 - RNA, 19 nt, Artificial Sequence
  Description of Artificial Sequence: Synthetic oligonucleotide
agguugugccagagaaaga

SEQ ID NO: 129881 - RNA, 19 nt, Artificial Sequence
  Description of Artificial Sequence: Synthetic oligonucleotide
caguagguccaaagcugaa

SEQ ID NO: 129882 - RNA, 19 nt, Artificial Sequence
  Description of Artificial Sequence: Synthetic oligonucleotide
ccuaaacuguguggugggc

SEQ ID NO: 129883 - RNA, 19 nt, Artificial Sequence
  Description of Artificial Sequence: Synthetic oligonucleotide
ccgguacaacuaugguucc

SEQ ID NO: 129884 - RNA, 19 nt, Artificial Sequence
  Description of Artificial Sequence: Synthetic oligonucleotide
cucgggcgguaaccuguag

SEQ ID NO: 129885 - RNA, 19 nt, Artificial Sequence
  Description of Artificial Sequence: Synthetic oligonucleotide
gcacacgaacaucgguaac

SEQ ID NO: 129886 - RNA, 19 nt, Artificial Sequence
  Description of Artificial Sequence: Synthetic oligonucleotide
cgcuauuggugcuagccca

SEQ ID NO: 129887 - RNA, 19 nt, Artificial Sequence
  Description of Artificial Sequence: Synthetic oligonucleotide
cuucccgacgacuguaguu

SEQ ID NO: 129888 - RNA, 19 nt, Artificial Sequence
  Description of Artificial Sequence: Synthetic oligonucleotide
agacgguggccuacucgug

SEQ ID NO: 129889 - RNA, 19 nt, Artificial Sequence
  Description of Artificial Sequence: Synthetic oligonucleotide
cuacuaauaugagguaguu

SEQ ID NO: 129890 - RNA, 19 nt, Artificial Sequence
  Description of Artificial Sequence: Synthetic oligonucleotide
ccacuaucgucuccacaac

SEQ ID NO: 129891 - RNA, 19 nt, Artificial Sequence
  Description of Artificial Sequence: Synthetic oligonucleotide
aguggccguuucggugggg

SEQ ID NO: 129892 - RNA, 19 nt, Artificial Sequence
  Description of Artificial Sequence: Synthetic oligonucleotide
auacgccguaacauauguu

SEQ ID NO: 129893 - RNA, 19 nt, Artificial Sequence
  Description of Artificial Sequence: Synthetic oligonucleotide
ccucucgaagcacgauccc

SEQ ID NO: 129894 - RNA, 19 nt, Artificial Sequence
  Description of Artificial Sequence: Synthetic oligonucleotide
cguuuauacuuuucucuaa

SEQ ID NO: 129895 - RNA, 19 nt, Artificial Sequence
  Description of Artificial Sequence: Synthetic oligonucleotide
cucuguauuuuaugccauu

SEQ ID NO: 129896 - RNA, 19 nt, Artificial Sequence
  Description of Artificial Sequence: Synthetic oligonucleotide
ggugacaggcuaagaaagu

SEQ ID NO: 129897 - RNA, 19 nt, Artificial Sequence
  Description of Artificial Sequence: Synthetic oligonucleotide
cauaucuuucgucgccuuu

SEQ ID NO: 129898 - RNA, 19 nt, Artificial Sequence
  Description of Artificial Sequence: Synthetic oligonucleotide
cgcucuaauucugagugca

SEQ ID NO: 129899 - RNA, 19 nt, Artificial Sequence
  Description of Artificial Sequence: Synthetic oligonucleotide
cagcguuaauacucaucgu

SEQ ID NO: 129900 - RNA, 19 nt, Artificial Sequence
  Description of Artificial Sequence: Synthetic oligonucleotide
agaccguagcaaagcuaaa

SEQ ID NO: 129901 - RNA, 19 nt, Artificial Sequence
  Description of Artificial Sequence: Synthetic oligonucleotide
ggggccggaugcccugucc

SEQ ID NO: 129902 - RNA, 19 nt, Artificial Sequence
  Description of Artificial Sequence: Synthetic oligonucleotide
uggggccggaugcccuguc

SEQ ID NO: 129903 - RNA, 19 nt, Artificial Sequence
  Description of Artificial Sequence: Synthetic oligonucleotide
ggagaccguagcaaagcua

SEQ ID NO: 129904 - RNA, 19 nt, Artificial Sequence
  Description of Artificial Sequence: Synthetic oligonucleotide
gcacgaucccgaggacucg

SEQ ID NO: 129905 - RNA, 19 nt, Artificial Sequence
  Description of Artificial Sequence: Synthetic oligonucleotide
gcucggcaagaugagugca

SEQ ID NO: 129906 - RNA, 19 nt, Artificial Sequence
  Description of Artificial Sequence: Synthetic oligonucleotide
caccucgagaggaaaucuu

SEQ ID NO: 129907 - RNA, 19 nt, Artificial Sequence
  Description of Artificial Sequence: Synthetic oligonucleotide
ucccgaggacucgggcggu

SEQ ID NO: 129908 - RNA, 19 nt, Artificial Sequence
  Description of Artificial Sequence: Synthetic oligonucleotide
gcgguaaccuguagaacua

SEQ ID NO: 129909 - RNA, 19 nt, Artificial Sequence
  Description of Artificial Sequence: Synthetic oligonucleotide
gccauuuguauaggcucaa

SEQ ID NO: 129910 - RNA, 19 nt, Artificial Sequence
  Description of Artificial Sequence: Synthetic oligonucleotide
cccuuuugaagcaggcggu

SEQ ID NO: 129911 - RNA, 19 nt, Artificial Sequence
  Description of Artificial Sequence: Synthetic oligonucleotide
gggugacgcauugagcagu

SEQ ID NO: 129912 - RNA, 19 nt, Artificial Sequence
  Description of Artificial Sequence: Synthetic oligonucleotide
ccccaguuuaaaucccuua

SEQ ID NO: 129913 - RNA, 19 nt, Artificial Sequence
  Description of Artificial Sequence: Synthetic oligonucleotide
cagaaguauuaaguuuguu

SEQ ID NO: 129914 - RNA, 19 nt, Artificial Sequence
  Description of Artificial Sequence: Synthetic oligonucleotide
gcacguuuggcaggcucga

SEQ ID NO: 129915 - RNA, 19 nt, Artificial Sequence
  Description of Artificial Sequence: Synthetic oligonucleotide
gguggccuacucguguucu

SEQ ID NO: 129916 - RNA, 19 nt, Artificial Sequence
  Description of Artificial Sequence: Synthetic oligonucleotide
acucgggcgguaaccugua

SEQ ID NO: 129917 - RNA, 19 nt, Artificial Sequence
  Description of Artificial Sequence: Synthetic oligonucleotide
gcuagcccaggaaggucca

SEQ ID NO: 129918 - RNA, 19 nt, Artificial Sequence
  Description of Artificial Sequence: Synthetic oligonucleotide
gcacuccaacuagagccuc

SEQ ID NO: 129919 - RNA, 19 nt, Artificial Sequence
  Description of Artificial Sequence: Synthetic oligonucleotide
gggguauuccaaagucuau

SEQ ID NO: 129920 - RNA, 19 nt, Artificial Sequence
  Description of Artificial Sequence: Synthetic oligonucleotide
gcauaucuuucgucgccuu

SEQ ID NO: 129921 - RNA, 19 nt, Artificial Sequence
  Description of Artificial Sequence: Synthetic oligonucleotide
gccuacucguguucuguuu

SEQ ID NO: 129922 - RNA, 19 nt, Artificial Sequence
  Description of Artificial Sequence: Synthetic oligonucleotide
cgaggacucgggcgguaac

SEQ ID NO: 129923 - RNA, 19 nt, Artificial Sequence
  Description of Artificial Sequence: Synthetic oligonucleotide
ggccuacucguguucuguu

SEQ ID NO: 129924 - RNA, 19 nt, Artificial Sequence
  Description of Artificial Sequence: Synthetic oligonucleotide
gugacgcauugagcagugu

SEQ ID NO: 129925 - RNA, 19 nt, Artificial Sequence
  Description of Artificial Sequence: Synthetic oligonucleotide
gcucaccuguguccuuacu

SEQ ID NO: 129926 - RNA, 19 nt, Artificial Sequence
  Description of Artificial Sequence: Synthetic oligonucleotide
ccacgacuuucauuauaau

SEQ ID NO: 129927 - RNA, 19 nt, Artificial Sequence
  Description of Artificial Sequence: Synthetic oligonucleotide
ccagggacuagugguaguu

SEQ ID NO: 129928 - RNA, 19 nt, Artificial Sequence
  Description of Artificial Sequence: Synthetic oligonucleotide
ccuucccgacgacuguagu

SEQ ID NO: 129929 - RNA, 19 nt, Artificial Sequence
  Description of Artificial Sequence: Synthetic oligonucleotide
cacguuuggcaggcucgau

SEQ ID NO: 129930 - RNA, 19 nt, Artificial Sequence
  Description of Artificial Sequence: Synthetic oligonucleotide
cgguaaccuguagaacuaa

SEQ ID NO: 129931 - RNA, 19 nt, Artificial Sequence
  Description of Artificial Sequence: Synthetic oligonucleotide
cccgaggacucgggcggua

SEQ ID NO: 129932 - RNA, 19 nt, Artificial Sequence
  Description of Artificial Sequence: Synthetic oligonucleotide
aauggaauauuauguagcc

SEQ ID NO: 129933 - RNA, 19 nt, Artificial Sequence
  Description of Artificial Sequence: Synthetic oligonucleotide
aauuauaucauaggaaaac

SEQ ID NO: 129934 - RNA, 19 nt, Artificial Sequence
  Description of Artificial Sequence: Synthetic oligonucleotide
aaucuuuaagucuaguuag

SEQ ID NO: 129935 - RNA, 19 nt, Artificial Sequence
  Description of Artificial Sequence: Synthetic oligonucleotide
auaaacuagagcugcaucc

SEQ ID NO: 129936 - RNA, 19 nt, Artificial Sequence
  Description of Artificial Sequence: Synthetic oligonucleotide
aagauuuaagauaguaucc

SEQ ID NO: 129937 - RNA, 19 nt, Artificial Sequence
  Description of Artificial Sequence: Synthetic oligonucleotide
aacuuagucaacaauacag

SEQ ID NO: 129938 - RNA, 19 nt, Artificial Sequence
  Description of Artificial Sequence: Synthetic oligonucleotide
aaaacuuagucaacaauac

SEQ ID NO: 129939 - RNA, 19 nt, Artificial Sequence
  Description of Artificial Sequence: Synthetic oligonucleotide
uuaaggucuaauuaguaug

SEQ ID NO: 129940 - RNA, 19 nt, Artificial Sequence
  Description of Artificial Sequence: Synthetic oligonucleotide
uuuauaacuuggaaaacca

SEQ ID NO: 129941 - RNA, 19 nt, Artificial Sequence
  Description of Artificial Sequence: Synthetic oligonucleotide
aucuuaacgaugcagggac

SEQ ID NO: 129942 - RNA, 19 nt, Artificial Sequence
  Description of Artificial Sequence: Synthetic oligonucleotide
auuauaucauaggaaaacc

SEQ ID NO: 129943 - RNA, 19 nt, Artificial Sequence
  Description of Artificial Sequence: Synthetic oligonucleotide
gauaaacucacauucccag

SEQ ID NO: 129944 - RNA, 19 nt, Artificial Sequence
  Description of Artificial Sequence: Synthetic oligonucleotide
uguaauagcaguaaucuuu

SEQ ID NO: 129945 - RNA, 19 nt, Artificial Sequence
  Description of Artificial Sequence: Synthetic oligonucleotide
gaugugagcauagagaacc

SEQ ID NO: 129946 - RNA, 19 nt, Artificial Sequence
  Description of Artificial Sequence: Synthetic oligonucleotide
uggaauauuauguagccac

SEQ ID NO: 129947 - RNA, 19 nt, Artificial Sequence
  Description of Artificial Sequence: Synthetic oligonucleotide
aaauaggaaaauggaagcg

SEQ ID NO: 129948 - RNA, 19 nt, Artificial Sequence
  Description of Artificial Sequence: Synthetic oligonucleotide
auauuauguagccacuaac

SEQ ID NO: 129949 - RNA, 19 nt, Artificial Sequence
  Description of Artificial Sequence: Synthetic oligonucleotide
  modified_base (10)..(10): a, c, u, g, unknown or other
acacaagcanucuauuggg

SEQ ID NO: 129950 - RNA, 19 nt, Artificial Sequence
  Description of Artificial Sequence: Synthetic oligonucleotide
uaaggucuaauuaguaugc

SEQ ID NO: 129951 - RNA, 19 nt, Artificial Sequence
  Description of Artificial Sequence: Synthetic oligonucleotide
uuggguaucuaacagguac

SEQ ID NO: 129952 - RNA, 19 nt, Artificial Sequence
  Description of Artificial Sequence: Synthetic oligonucleotide
agaguaaccacuguguuuc

SEQ ID NO: 129953 - RNA, 19 nt, Artificial Sequence
  Description of Artificial Sequence: Synthetic oligonucleotide
aacauggguaucuuaacga

SEQ ID NO: 129954 - RNA, 19 nt, Artificial Sequence
  Description of Artificial Sequence: Synthetic oligonucleotide
uuauaucauaggaaaaccu

SEQ ID NO: 129955 - RNA, 19 nt, Artificial Sequence
  Description of Artificial Sequence: Synthetic oligonucleotide
uuguaaagggguaauuuug

SEQ ID NO: 129956 - RNA, 19 nt, Artificial Sequence
  Description of Artificial Sequence: Synthetic oligonucleotide
aaugguuaaauaaacuaga

SEQ ID NO: 129957 - RNA, 19 nt, Artificial Sequence
  Description of Artificial Sequence: Synthetic oligonucleotide
gugaacuccagccagaaug

SEQ ID NO: 129958 - RNA, 19 nt, Artificial Sequence
  Description of Artificial Sequence: Synthetic oligonucleotide
aaucacucuacuuuacagu

SEQ ID NO: 129959 - RNA, 19 nt, Artificial Sequence
  Description of Artificial Sequence: Synthetic oligonucleotide
uauaucauaggaaaaccua

SEQ ID NO: 129960 - RNA, 19 nt, Artificial Sequence
  Description of Artificial Sequence: Synthetic oligonucleotide
uaagauaguauccuuuuau

SEQ ID NO: 129961 - RNA, 19 nt, Artificial Sequence
  Description of Artificial Sequence: Synthetic oligonucleotide
auggguaucuuaacgaugc

SEQ ID NO: 129962 - RNA, 19 nt, Artificial Sequence
  Description of Artificial Sequence: Synthetic oligonucleotide
agagccauuagucacccag

SEQ ID NO: 129963 - RNA, 19 nt, Artificial Sequence
  Description of Artificial Sequence: Synthetic oligonucleotide
aagacuaccgcaugcgucu

SEQ ID NO: 129964 - RNA, 19 nt, Artificial Sequence
  Description of Artificial Sequence: Synthetic oligonucleotide
cacagauacaguuccagcc

SEQ ID NO: 129965 - RNA, 19 nt, Artificial Sequence
  Description of Artificial Sequence: Synthetic oligonucleotide
agauaguauccuuuuaucu

SEQ ID NO: 129966 - RNA, 19 nt, Artificial Sequence
  Description of Artificial Sequence: Synthetic oligonucleotide
gaaacaaugcuuggguugg

SEQ ID NO: 129967 - RNA, 19 nt, Artificial Sequence
  Description of Artificial Sequence: Synthetic oligonucleotide
  modified_base (3)..(3): a, c, u, g, unknown or other
canucuauugggcaauugc

SEQ ID NO: 129968 - RNA, 19 nt, Artificial Sequence
  Description of Artificial Sequence: Synthetic oligonucleotide
cuccgguuauaaaagaagg

SEQ ID NO: 129969 - RNA, 19 nt, Artificial Sequence
  Description of Artificial Sequence: Synthetic oligonucleotide
aguguuuuaaguacgggag

SEQ ID NO: 129970 - RNA, 19 nt, Artificial Sequence
  Description of Artificial Sequence: Synthetic oligonucleotide
uuuaaguacgggagcaucu

SEQ ID NO: 129971 - RNA, 19 nt, Artificial Sequence
  Description of Artificial Sequence: Synthetic oligonucleotide
aaguacgggagcaucuucc

SEQ ID NO: 129972 - RNA, 19 nt, Artificial Sequence
  Description of Artificial Sequence: Synthetic oligonucleotide
ucagucuccgaguauuggg

SEQ ID NO: 129973 - RNA, 19 nt, Artificial Sequence
  Description of Artificial Sequence: Synthetic oligonucleotide
uaacauaccccacccaggc

SEQ ID NO: 129974 - RNA, 19 nt, Artificial Sequence
  Description of Artificial Sequence: Synthetic oligonucleotide
ugcuuucuaaacaaacaca

SEQ ID NO: 129975 - RNA, 19 nt, Artificial Sequence
  Description of Artificial Sequence: Synthetic oligonucleotide
aaggcuacauggucacccc

SEQ ID NO: 129976 - RNA, 19 nt, Artificial Sequence
  Description of Artificial Sequence: Synthetic oligonucleotide
aaggcgauagacucguugu

SEQ ID NO: 129977 - RNA, 19 nt, Artificial Sequence
  Description of Artificial Sequence: Synthetic oligonucleotide
aaacuuagucaacaauaca

SEQ ID NO: 129978 - RNA, 19 nt, Artificial Sequence
  Description of Artificial Sequence: Synthetic oligonucleotide
uuacuagauucuucuaucc

SEQ ID NO: 129979 - RNA, 19 nt, Artificial Sequence
  Description of Artificial Sequence: Synthetic oligonucleotide
auuaaggucuaauuaguau

SEQ ID NO: 129980 - RNA, 19 nt, Artificial Sequence
  Description of Artificial Sequence: Synthetic oligonucleotide
  modified_base (2)..(2): a, c, u, g, unknown or other
anucuauugggcaauugcu

SEQ ID NO: 129981 - RNA, 19 nt, Artificial Sequence
  Description of Artificial Sequence: Synthetic oligonucleotide
guaucuuaacgaugcaggg

SEQ ID NO: 129982 - RNA, 19 nt, Artificial Sequence
  Description of Artificial Sequence: Synthetic oligonucleotide
uuuaagauaguauccuuuu

SEQ ID NO: 129983 - RNA, 19 nt, Artificial Sequence
  Description of Artificial Sequence: Synthetic oligonucleotide
uguauggagcugcauucgg

SEQ ID NO: 129984 - RNA, 19 nt, Artificial Sequence
  Description of Artificial Sequence: Synthetic oligonucleotide
cuuugggugauaaacucac

SEQ ID NO: 129985 - RNA, 19 nt, Artificial Sequence
  Description of Artificial Sequence: Synthetic oligonucleotide
uccgguuauaaaagaaggc

SEQ ID NO: 129986 - RNA, 19 nt, Artificial Sequence
  Description of Artificial Sequence: Synthetic oligonucleotide
ugccgggacauucucauag

SEQ ID NO: 129987 - RNA, 19 nt, Artificial Sequence
  Description of Artificial Sequence: Synthetic oligonucleotide
agauuggcgacagaggccg

SEQ ID NO: 129988 - RNA, 19 nt, Artificial Sequence
  Description of Artificial Sequence: Synthetic oligonucleotide
acuuagucaacaauacagg

SEQ ID NO: 129989 - RNA, 19 nt, Artificial Sequence
  Description of Artificial Sequence: Synthetic oligonucleotide
  modified_base (8)..(8): a, c, u, g, unknown or other
acaagcanucuauugggca

SEQ ID NO: 129990 - RNA, 19 nt, Artificial Sequence
  Description of Artificial Sequence: Synthetic oligonucleotide
ugggucuagggacaaauac

SEQ ID NO: 129991 - RNA, 19 nt, Artificial Sequence
  Description of Artificial Sequence: Synthetic oligonucleotide
guagauugccaccaugacc

SEQ ID NO: 129992 - RNA, 19 nt, Artificial Sequence
  Description of Artificial Sequence: Synthetic oligonucleotide
uggguccagaacuaugccg

SEQ ID NO: 129993 - RNA, 19 nt, Artificial Sequence
  Description of Artificial Sequence: Synthetic oligonucleotide
agauuuaagauaguauccu

SEQ ID NO: 129994 - RNA, 19 nt, Artificial Sequence
  Description of Artificial Sequence: Synthetic oligonucleotide
cuacuaaguacagcaaugg

SEQ ID NO: 129995 - RNA, 19 nt, Artificial Sequence
  Description of Artificial Sequence: Synthetic oligonucleotide
uuagugaaggcuacauggu

SEQ ID NO: 129996 - RNA, 19 nt, Artificial Sequence
  Description of Artificial Sequence: Synthetic oligonucleotide
cuucuaaaccacagagugg

SEQ ID NO: 129997 - RNA, 19 nt, Artificial Sequence
  Description of Artificial Sequence: Synthetic oligonucleotide
ucccauaccugcuucuggg

SEQ ID NO: 129998 - RNA, 19 nt, Artificial Sequence
  Description of Artificial Sequence: Synthetic oligonucleotide
uugggugauaaacucacau

SEQ ID NO: 129999 - RNA, 19 nt, Artificial Sequence
  Description of Artificial Sequence: Synthetic oligonucleotide
gacagugauccccaguccc

SEQ ID NO: 130000 - RNA, 19 nt, Artificial Sequence
  Description of Artificial Sequence: Synthetic oligonucleotide
uuagucacccagacaaugu

SEQ ID NO: 130001 - RNA, 19 nt, Artificial Sequence
  Description of Artificial Sequence: Synthetic oligonucleotide
aacagauuggcgacagagg

SEQ ID NO: 130002 - RNA, 19 nt, Artificial Sequence
  Description of Artificial Sequence: Synthetic oligonucleotide
guuaguguuuuaaguacgg

SEQ ID NO: 130003 - RNA, 19 nt, Artificial Sequence
  Description of Artificial Sequence: Synthetic oligonucleotide
gaaggcgauagacucguug

SEQ ID NO: 130004 - RNA, 19 nt, Artificial Sequence
  Description of Artificial Sequence: Synthetic oligonucleotide
gacaagacuaccgcaugcg

SEQ ID NO: 130005 - RNA, 19 nt, Artificial Sequence
  Description of Artificial Sequence: Synthetic oligonucleotide
ucucaguuagaguaaccac

SEQ ID NO: 130006 - RNA, 19 nt, Artificial Sequence
  Description of Artificial Sequence: Synthetic oligonucleotide
ccuuauagcacaccaauag

SEQ ID NO: 130007 - RNA, 19 nt, Artificial Sequence
  Description of Artificial Sequence: Synthetic oligonucleotide
cuuagucaacaauacagga

SEQ ID NO: 130008 - RNA, 19 nt, Artificial Sequence
  Description of Artificial Sequence: Synthetic oligonucleotide
uccuucaugggaauagguc

SEQ ID NO: 130009 - RNA, 19 nt, Artificial Sequence
  Description of Artificial Sequence: Synthetic oligonucleotide
guaaagaugguuacuucug

SEQ ID NO: 130010 - RNA, 19 nt, Artificial Sequence
  Description of Artificial Sequence: Synthetic oligonucleotide
uuaagauaguauccuuuua

SEQ ID NO: 130011 - RNA, 19 nt, Artificial Sequence
  Description of Artificial Sequence: Synthetic oligonucleotide
augguuaaauaaacuagag

SEQ ID NO: 130012 - RNA, 19 nt, Artificial Sequence
  Description of Artificial Sequence: Synthetic oligonucleotide
ugcuaacuggcucuccacc

SEQ ID NO: 130013 - RNA, 19 nt, Artificial Sequence
  Description of Artificial Sequence: Synthetic oligonucleotide
uggguaucuaacagguaca

SEQ ID NO: 130014 - RNA, 19 nt, Artificial Sequence
  Description of Artificial Sequence: Synthetic oligonucleotide
aggacguugcacugcgggc

SEQ ID NO: 130015 - RNA, 19 nt, Artificial Sequence
  Description of Artificial Sequence: Synthetic oligonucleotide
uccuucuaaaccacagagu

SEQ ID NO: 130016 - RNA, 19 nt, Artificial Sequence
  Description of Artificial Sequence: Synthetic oligonucleotide
ucccacuccgguuauaaaa

SEQ ID NO: 130017 - RNA, 19 nt, Artificial Sequence
  Description of Artificial Sequence: Synthetic oligonucleotide
uauggagcugcauucggaa

SEQ ID NO: 130018 - RNA, 19 nt, Artificial Sequence
  Description of Artificial Sequence: Synthetic oligonucleotide
guaucuaacagguacacuu

SEQ ID NO: 130019 - RNA, 19 nt, Artificial Sequence
  Description of Artificial Sequence: Synthetic oligonucleotide
acuaugccgggacauucuc

SEQ ID NO: 130020 - RNA, 19 nt, Artificial Sequence
  Description of Artificial Sequence: Synthetic oligonucleotide
cuaaguaggagucacuaua

SEQ ID NO: 130021 - RNA, 19 nt, Artificial Sequence
  Description of Artificial Sequence: Synthetic oligonucleotide
gaaaguggcgcucaucucu

SEQ ID NO: 130022 - RNA, 19 nt, Artificial Sequence
  Description of Artificial Sequence: Synthetic oligonucleotide
cauggguaucuuaacgaug

SEQ ID NO: 130023 - RNA, 19 nt, Artificial Sequence
  Description of Artificial Sequence: Synthetic oligonucleotide
aguaggccaauccagcaaa

SEQ ID NO: 130024 - RNA, 19 nt, Artificial Sequence
  Description of Artificial Sequence: Synthetic oligonucleotide
  modified_base (9)..(9): a, c, u, g, unknown or other
cacaagcanucuauugggc

SEQ ID NO: 130025 - RNA, 19 nt, Artificial Sequence
  Description of Artificial Sequence: Synthetic oligonucleotide
acuccgguuauaaaagaag

SEQ ID NO: 130026 - RNA, 19 nt, Artificial Sequence
  Description of Artificial Sequence: Synthetic oligonucleotide
cauucguguauggagcugc

SEQ ID NO: 130027 - RNA, 19 nt, Artificial Sequence
  Description of Artificial Sequence: Synthetic oligonucleotide
ugaaauuacagggcuggaa

SEQ ID NO: 130028 - RNA, 19 nt, Artificial Sequence
  Description of Artificial Sequence: Synthetic oligonucleotide
guugcucauucguguaugg

SEQ ID NO: 130029 - RNA, 19 nt, Artificial Sequence
  Description of Artificial Sequence: Synthetic oligonucleotide
ccgguuauaaaagaaggcg

SEQ ID NO: 130030 - RNA, 19 nt, Artificial Sequence
  Description of Artificial Sequence: Synthetic oligonucleotide
uaugccgggacauucucau

SEQ ID NO: 130031 - RNA, 19 nt, Artificial Sequence
  Description of Artificial Sequence: Synthetic oligonucleotide
agucuccgaguauuggguc

SEQ ID NO: 130032 - RNA, 19 nt, Artificial Sequence
  Description of Artificial Sequence: Synthetic oligonucleotide
aaauggaagcggcgguuga

SEQ ID NO: 130033 - RNA, 19 nt, Artificial Sequence
  Description of Artificial Sequence: Synthetic oligonucleotide
aucuaacagguacacuuca

SEQ ID NO: 130034 - RNA, 19 nt, Artificial Sequence
  Description of Artificial Sequence: Synthetic oligonucleotide
gguuaguguuuuaaguacg

SEQ ID NO: 130035 - RNA, 19 nt, Artificial Sequence
  Description of Artificial Sequence: Synthetic oligonucleotide
caggacguugcacugcggg

SEQ ID NO: 130036 - RNA, 19 nt, Artificial Sequence
  Description of Artificial Sequence: Synthetic oligonucleotide
cuuauagcacaccaauaga

SEQ ID NO: 130037 - RNA, 19 nt, Artificial Sequence
  Description of Artificial Sequence: Synthetic oligonucleotide
aauacugcuguugguuagu

SEQ ID NO: 130038 - RNA, 19 nt, Artificial Sequence
  Description of Artificial Sequence: Synthetic oligonucleotide
cauugggguuuucauugcg

SEQ ID NO: 130039 - RNA, 19 nt, Artificial Sequence
  Description of Artificial Sequence: Synthetic oligonucleotide
ucuaacagguacacuucau

SEQ ID NO: 130040 - RNA, 19 nt, Artificial Sequence
  Description of Artificial Sequence: Synthetic oligonucleotide
uuugucucgguaggaguag

SEQ ID NO: 130041 - RNA, 19 nt, Artificial Sequence
  Description of Artificial Sequence: Synthetic oligonucleotide
agugguaaggauauuguuu

SEQ ID NO: 130042 - RNA, 19 nt, Artificial Sequence
  Description of Artificial Sequence: Synthetic oligonucleotide
caagacuaccgcaugcguc

SEQ ID NO: 130043 - RNA, 19 nt, Artificial Sequence
  Description of Artificial Sequence: Synthetic oligonucleotide
agugaaauugcuaguuaca

SEQ ID NO: 130044 - RNA, 19 nt, Artificial Sequence
  Description of Artificial Sequence: Synthetic oligonucleotide
agcugcauucggaaaacgg

SEQ ID NO: 130045 - RNA, 19 nt, Artificial Sequence
  Description of Artificial Sequence: Synthetic oligonucleotide
agucacccagacaauguac

SEQ ID NO: 130046 - RNA, 19 nt, Artificial Sequence
  Description of Artificial Sequence: Synthetic oligonucleotide
aaaguaggcuaucccuuuu

SEQ ID NO: 130047 - RNA, 19 nt, Artificial Sequence
  Description of Artificial Sequence: Synthetic oligonucleotide
gacguagauugccaccaug

SEQ ID NO: 130048 - RNA, 19 nt, Artificial Sequence
  Description of Artificial Sequence: Synthetic oligonucleotide
cucaguuagaguaaccacu

SEQ ID NO: 130049 - RNA, 19 nt, Artificial Sequence
  Description of Artificial Sequence: Synthetic oligonucleotide
uccuuauagcacaccaaua

SEQ ID NO: 130050 - RNA, 19 nt, Artificial Sequence
  Description of Artificial Sequence: Synthetic oligonucleotide
cauaccugcuucugggcug

SEQ ID NO: 130051 - RNA, 19 nt, Artificial Sequence
  Description of Artificial Sequence: Synthetic oligonucleotide
uagaguaaccacuguguuu

SEQ ID NO: 130052 - RNA, 19 nt, Artificial Sequence
  Description of Artificial Sequence: Synthetic oligonucleotide
acuaaguaggagucacuau

SEQ ID NO: 130053 - RNA, 19 nt, Artificial Sequence
  Description of Artificial Sequence: Synthetic oligonucleotide
uaccgcaugcgucuucucu

SEQ ID NO: 130054 - RNA, 19 nt, Artificial Sequence
  Description of Artificial Sequence: Synthetic oligonucleotide
uuaacgaugcagggacaag

SEQ ID NO: 130055 - RNA, 19 nt, Artificial Sequence
  Description of Artificial Sequence: Synthetic oligonucleotide
aaggcucaucauggugucc

SEQ ID NO: 130056 - RNA, 19 nt, Artificial Sequence
  Description of Artificial Sequence: Synthetic oligonucleotide
uuguaauagcaguaaucuu

SEQ ID NO: 130057 - RNA, 19 nt, Artificial Sequence
  Description of Artificial Sequence: Synthetic oligonucleotide
ucuuaacgaugcagggaca

SEQ ID NO: 130058 - RNA, 19 nt, Artificial Sequence
  Description of Artificial Sequence: Synthetic oligonucleotide
aacauaccccacccaggcu

SEQ ID NO: 130059 - RNA, 19 nt, Artificial Sequence
  Description of Artificial Sequence: Synthetic oligonucleotide
acaagacuaccgcaugcgu

SEQ ID NO: 130060 - RNA, 19 nt, Artificial Sequence
  Description of Artificial Sequence: Synthetic oligonucleotide
gaugcagggacaagacuac

SEQ ID NO: 130061 - RNA, 19 nt, Artificial Sequence
  Description of Artificial Sequence: Synthetic oligonucleotide
auguaccaggcaucucaac

SEQ ID NO: 130062 - RNA, 19 nt, Artificial Sequence
  Description of Artificial Sequence: Synthetic oligonucleotide
uucuagcacugccacucug

SEQ ID NO: 130063 - RNA, 19 nt, Artificial Sequence
  Description of Artificial Sequence: Synthetic oligonucleotide
guuagaguaaccacugugu

SEQ ID NO: 130064 - RNA, 19 nt, Artificial Sequence
  Description of Artificial Sequence: Synthetic oligonucleotide
acacgccuguugcucauuc

SEQ ID NO: 130065 - RNA, 19 nt, Artificial Sequence
  Description of Artificial Sequence: Synthetic oligonucleotide
acguagauugccaccauga

SEQ ID NO: 130066 - RNA, 19 nt, Artificial Sequence
  Description of Artificial Sequence: Synthetic oligonucleotide
gguaaagaugguuacuucu

SEQ ID NO: 130067 - RNA, 19 nt, Artificial Sequence
  Description of Artificial Sequence: Synthetic oligonucleotide
cagaaggcucaucauggug

SEQ ID NO: 130068 - RNA, 19 nt, Artificial Sequence
  Description of Artificial Sequence: Synthetic oligonucleotide
uaguuagugaaggcuacau

SEQ ID NO: 130069 - RNA, 19 nt, Artificial Sequence
  Description of Artificial Sequence: Synthetic oligonucleotide
agguccuaaguaaauaaau

SEQ ID NO: 130070 - RNA, 19 nt, Artificial Sequence
  Description of Artificial Sequence: Synthetic oligonucleotide
gaaggcucaucaugguguc

SEQ ID NO: 130071 - RNA, 19 nt, Artificial Sequence
  Description of Artificial Sequence: Synthetic oligonucleotide
acgccuguugcucauucgu

SEQ ID NO: 130072 - RNA, 19 nt, Artificial Sequence
  Description of Artificial Sequence: Synthetic oligonucleotide
guauuucccacuccgguua

SEQ ID NO: 130073 - RNA, 19 nt, Artificial Sequence
  Description of Artificial Sequence: Synthetic oligonucleotide
caauugcuggagaccacac

SEQ ID NO: 130074 - RNA, 19 nt, Artificial Sequence
  Description of Artificial Sequence: Synthetic oligonucleotide
aauguaccaggcaucucaa

SEQ ID NO: 130075 - RNA, 19 nt, Artificial Sequence
  Description of Artificial Sequence: Synthetic oligonucleotide
auggaauauuauguagcca

SEQ ID NO: 130076 - RNA, 19 nt, Artificial Sequence
  Description of Artificial Sequence: Synthetic oligonucleotide
uucggaaaacggugaugug

SEQ ID NO: 130077 - RNA, 19 nt, Artificial Sequence
  Description of Artificial Sequence: Synthetic oligonucleotide
  modified_base (6)..(6): a, c, u, g, unknown or other
aagcanucuauugggcaau

SEQ ID NO: 130078 - RNA, 19 nt, Artificial Sequence
  Description of Artificial Sequence: Synthetic oligonucleotide
aggcuacauggucaccccg

SEQ ID NO: 130079 - RNA, 19 nt, Artificial Sequence
  Description of Artificial Sequence: Synthetic oligonucleotide
guagaagcacugggguucg

SEQ ID NO: 130080 - RNA, 19 nt, Artificial Sequence
  Description of Artificial Sequence: Synthetic oligonucleotide
uuaaguacgggagcaucuu

SEQ ID NO: 130081 - RNA, 19 nt, Artificial Sequence
  Description of Artificial Sequence: Synthetic oligonucleotide
cuaguuacauuagggcauc

SEQ ID NO: 130082 - RNA, 19 nt, Artificial Sequence
  Description of Artificial Sequence: Synthetic oligonucleotide
cuuugucucgguaggagua

SEQ ID NO: 130083 - RNA, 19 nt, Artificial Sequence
  Description of Artificial Sequence: Synthetic oligonucleotide
caccuuacccuggcaaugg

SEQ ID NO: 130084 - RNA, 19 nt, Artificial Sequence
  Description of Artificial Sequence: Synthetic oligonucleotide
uggguaucuuaacgaugca

SEQ ID NO: 130085 - RNA, 19 nt, Artificial Sequence
  Description of Artificial Sequence: Synthetic oligonucleotide
ucauucguguauggagcug

SEQ ID NO: 130086 - RNA, 19 nt, Artificial Sequence
  Description of Artificial Sequence: Synthetic oligonucleotide
gcucauucguguauggagc

SEQ ID NO: 130087 - RNA, 19 nt, Artificial Sequence
  Description of Artificial Sequence: Synthetic oligonucleotide
cggaaaacggugaugugcc

SEQ ID NO: 130088 - RNA, 19 nt, Artificial Sequence
  Description of Artificial Sequence: Synthetic oligonucleotide
uuggagcaaugaucaauau

SEQ ID NO: 130089 - RNA, 19 nt, Artificial Sequence
  Description of Artificial Sequence: Synthetic oligonucleotide
uugggucuagggacaaaua

SEQ ID NO: 130090 - RNA, 19 nt, Artificial Sequence
  Description of Artificial Sequence: Synthetic oligonucleotide
ugucucgguaggaguagau

SEQ ID NO: 130091 - RNA, 19 nt, Artificial Sequence
  Description of Artificial Sequence: Synthetic oligonucleotide
auuggcgacagaggccguc

SEQ ID NO: 130092 - RNA, 19 nt, Artificial Sequence
  Description of Artificial Sequence: Synthetic oligonucleotide
ggcgauagacucguuguag

SEQ ID NO: 130093 - RNA, 19 nt, Artificial Sequence
  Description of Artificial Sequence: Synthetic oligonucleotide
ucaucauggugucccgauu

SEQ ID NO: 130094 - RNA, 19 nt, Artificial Sequence
  Description of Artificial Sequence: Synthetic oligonucleotide
gucuaguuagugaaggcua

SEQ ID NO: 130095 - RNA, 19 nt, Artificial Sequence
  Description of Artificial Sequence: Synthetic oligonucleotide
aaacggugaugugccucuc

SEQ ID NO: 130096 - RNA, 19 nt, Artificial Sequence
  Description of Artificial Sequence: Synthetic oligonucleotide
uggcggacauagccaaaga

SEQ ID NO: 130097 - RNA, 19 nt, Artificial Sequence
  Description of Artificial Sequence: Synthetic oligonucleotide
cacgccuguugcucauucg

SEQ ID NO: 130098 - RNA, 19 nt, Artificial Sequence
  Description of Artificial Sequence: Synthetic oligonucleotide
acuaccgcaugcgucuucu

SEQ ID NO: 130099 - RNA, 19 nt, Artificial Sequence
  Description of Artificial Sequence: Synthetic oligonucleotide
cuuaacgaugcagggacaa

SEQ ID NO: 130100 - RNA, 19 nt, Artificial Sequence
  Description of Artificial Sequence: Synthetic oligonucleotide
gucucgguaggaguagaug

SEQ ID NO: 130101 - RNA, 19 nt, Artificial Sequence
  Description of Artificial Sequence: Synthetic oligonucleotide
cggcgguugacguagauug

SEQ ID NO: 130102 - RNA, 19 nt, Artificial Sequence
  Description of Artificial Sequence: Synthetic oligonucleotide
gguaaagugguaaggauau

SEQ ID NO: 130103 - RNA, 19 nt, Artificial Sequence
  Description of Artificial Sequence: Synthetic oligonucleotide
cacuccgguuauaaaagaa

SEQ ID NO: 130104 - RNA, 19 nt, Artificial Sequence
  Description of Artificial Sequence: Synthetic oligonucleotide
cacuaacacuguuuuguaa

SEQ ID NO: 130105 - RNA, 19 nt, Artificial Sequence
  Description of Artificial Sequence: Synthetic oligonucleotide
acagucagucuccgaguau

SEQ ID NO: 130106 - RNA, 19 nt, Artificial Sequence
  Description of Artificial Sequence: Synthetic oligonucleotide
uugucucgguaggaguaga

SEQ ID NO: 130107 - RNA, 19 nt, Artificial Sequence
  Description of Artificial Sequence: Synthetic oligonucleotide
cagggacaagacuaccgca

SEQ ID NO: 130108 - RNA, 19 nt, Artificial Sequence
  Description of Artificial Sequence: Synthetic oligonucleotide
gagccauuagucacccaga

SEQ ID NO: 130109 - RNA, 19 nt, Artificial Sequence
  Description of Artificial Sequence: Synthetic oligonucleotide
cugggguucguucauggcu

SEQ ID NO: 130110 - RNA, 19 nt, Artificial Sequence
  Description of Artificial Sequence: Synthetic oligonucleotide
ucuggcggacauagccaaa

SEQ ID NO: 130111 - RNA, 19 nt, Artificial Sequence
  Description of Artificial Sequence: Synthetic oligonucleotide
cgguuauaaaagaaggcga

SEQ ID NO: 130112 - RNA, 19 nt, Artificial Sequence
  Description of Artificial Sequence: Synthetic oligonucleotide
caguuugaaaguaggcuau

SEQ ID NO: 130113 - RNA, 19 nt, Artificial Sequence
  Description of Artificial Sequence: Synthetic oligonucleotide
gcgauagacucguuguaga

SEQ ID NO: 130114 - RNA, 19 nt, Artificial Sequence
  Description of Artificial Sequence: Synthetic oligonucleotide
ggguaucuaacagguacac

SEQ ID NO: 130115 - RNA, 19 nt, Artificial Sequence
  Description of Artificial Sequence: Synthetic oligonucleotide
agaacuaugccgggacauu

SEQ ID NO: 130116 - RNA, 19 nt, Artificial Sequence
  Description of Artificial Sequence: Synthetic oligonucleotide
aggcgauagacucguugua

SEQ ID NO: 130117 - RNA, 19 nt, Artificial Sequence
  Description of Artificial Sequence: Synthetic oligonucleotide
cucauucguguauggagcu

SEQ ID NO: 130118 - RNA, 19 nt, Artificial Sequence
  Description of Artificial Sequence: Synthetic oligonucleotide
gaccaguagguuggccagc

SEQ ID NO: 130119 - RNA, 19 nt, Artificial Sequence
  Description of Artificial Sequence: Synthetic oligonucleotide
cccauggucuaaaugaaua

SEQ ID NO: 130120 - RNA, 19 nt, Artificial Sequence
  Description of Artificial Sequence: Synthetic oligonucleotide
uaguuacauuagggcaucu

SEQ ID NO: 130121 - RNA, 19 nt, Artificial Sequence
  Description of Artificial Sequence: Synthetic oligonucleotide
augugagcauagagaacca

SEQ ID NO: 130122 - RNA, 19 nt, Artificial Sequence
  Description of Artificial Sequence: Synthetic oligonucleotide
uccgaguauuggguccugu

SEQ ID NO: 130123 - RNA, 19 nt, Artificial Sequence
  Description of Artificial Sequence: Synthetic oligonucleotide
  modified_base (4)..(4): a, c, u, g, unknown or other
gcanucuauugggcaauug

SEQ ID NO: 130124 - RNA, 19 nt, Artificial Sequence
  Description of Artificial Sequence: Synthetic oligonucleotide
gacguugcacugcgggcaa

SEQ ID NO: 130125 - RNA, 19 nt, Artificial Sequence
  Description of Artificial Sequence: Synthetic oligonucleotide
gcaugcgucuucucucgug

SEQ ID NO: 130126 - RNA, 19 nt, Artificial Sequence
  Description of Artificial Sequence: Synthetic oligonucleotide
gacuaccgcaugcgucuuc

SEQ ID NO: 130127 - RNA, 19 nt, Artificial Sequence
  Description of Artificial Sequence: Synthetic oligonucleotide
ggacguugcacugcgggca

SEQ ID NO: 130128 - RNA, 19 nt, Artificial Sequence
  Description of Artificial Sequence: Synthetic oligonucleotide
ccgcaugcgucuucucucg

SEQ ID NO: 130129 - RNA, 19 nt, Artificial Sequence
  Description of Artificial Sequence: Synthetic oligonucleotide
gugaaauuacagggcugga

SEQ ID NO: 130130 - RNA, 19 nt, Artificial Sequence
  Description of Artificial Sequence: Synthetic oligonucleotide
auucguguauggagcugca

SEQ ID NO: 130131 - RNA, 19 nt, Artificial Sequence
  Description of Artificial Sequence: Synthetic oligonucleotide
guagccacuaacacuguuu

SEQ ID NO: 130132 - RNA, 19 nt, Artificial Sequence
  Description of Artificial Sequence: Synthetic oligonucleotide
gccauaguccagaugacua

SEQ ID NO: 130133 - RNA, 19 nt, Artificial Sequence
  Description of Artificial Sequence: Synthetic oligonucleotide
  modified_base (5)..(5): a, c, u, g, unknown or other
agcanucuauugggcaauu

SEQ ID NO: 130134 - RNA, 19 nt, Artificial Sequence
  Description of Artificial Sequence: Synthetic oligonucleotide
gauuggccaucaaguaaua

SEQ ID NO: 130135 - RNA, 19 nt, Artificial Sequence
  Description of Artificial Sequence: Synthetic oligonucleotide
cucgguaggaguagaugau

SEQ ID NO: 130136 - RNA, 19 nt, Artificial Sequence
  Description of Artificial Sequence: Synthetic oligonucleotide
agccaacagauuggcgaca

SEQ ID NO: 130137 - RNA, 19 nt, Artificial Sequence
  Description of Artificial Sequence: Synthetic oligonucleotide
ccuaggcaaauuucuagua

SEQ ID NO: 130138 - RNA, 19 nt, Artificial Sequence
  Description of Artificial Sequence: Synthetic oligonucleotide
gguauuucccacuccgguu

SEQ ID NO: 130139 - RNA, 19 nt, Artificial Sequence
  Description of Artificial Sequence: Synthetic oligonucleotide
gccucucaauggcaauagc

SEQ ID NO: 130140 - RNA, 19 nt, Artificial Sequence
  Description of Artificial Sequence: Synthetic oligonucleotide
cuaccgcaugcgucuucuc

SEQ ID NO: 130141 - RNA, 19 nt, Artificial Sequence
  Description of Artificial Sequence: Synthetic oligonucleotide
ggcggacauagccaaagau

SEQ ID NO: 130142 - RNA, 19 nt, Artificial Sequence
  Description of Artificial Sequence: Synthetic oligonucleotide
ggaccauugggguuuucau

SEQ ID NO: 130143 - RNA, 19 nt, Artificial Sequence
  Description of Artificial Sequence: Synthetic oligonucleotide
ggccaucaaguaauaaaua

SEQ ID NO: 130144 - RNA, 19 nt, Artificial Sequence
  Description of Artificial Sequence: Synthetic oligonucleotide
ccaccuuacccuggcaaug

SEQ ID NO: 130145 - RNA, 19 nt, Artificial Sequence
  Description of Artificial Sequence: Synthetic oligonucleotide
cagaacuaugccgggacau

SEQ ID NO: 130146 - RNA, 19 nt, Artificial Sequence
  Description of Artificial Sequence: Synthetic oligonucleotide
gucccgauuccuccugggu

SEQ ID NO: 130147 - RNA, 19 nt, Artificial Sequence
  Description of Artificial Sequence: Synthetic oligonucleotide
augccgggacauucucaua

SEQ ID NO: 130148 - RNA, 19 nt, Artificial Sequence
  Description of Artificial Sequence: Synthetic oligonucleotide
gguaucuaacagguacacu

SEQ ID NO: 130149 - RNA, 19 nt, Artificial Sequence
  Description of Artificial Sequence: Synthetic oligonucleotide
ccacuccgguuauaaaaga

SEQ ID NO: 130150 - RNA, 19 nt, Artificial Sequence
  Description of Artificial Sequence: Synthetic oligonucleotide
cgauagacucguuguagaa

SEQ ID NO: 130151 - RNA, 19 nt, Artificial Sequence
  Description of Artificial Sequence: Synthetic oligonucleotide
ggaaaacggugaugugccu

SEQ ID NO: 130152 - RNA, 19 nt, Artificial Sequence
  Description of Artificial Sequence: Synthetic oligonucleotide
cuccgaguauuggguccug

SEQ ID NO: 130153 - RNA, 19 nt, Artificial Sequence
  Description of Artificial Sequence: Synthetic oligonucleotide
gguuuucauugcgcuggca

SEQ ID NO: 130154 - RNA, 19 nt, Artificial Sequence
  Description of Artificial Sequence: Synthetic oligonucleotide
agacuaccgcaugcgucuu

SEQ ID NO: 130155 - RNA, 19 nt, Artificial Sequence
  Description of Artificial Sequence: Synthetic oligonucleotide
auaccccacccaggcuacu

SEQ ID NO: 130156 - RNA, 19 nt, Artificial Sequence
  Description of Artificial Sequence: Synthetic oligonucleotide
guaaagugguaaggauauu

SEQ ID NO: 130157 - RNA, 19 nt, Artificial Sequence
  Description of Artificial Sequence: Synthetic oligonucleotide
gggguaauuuugaggacuu

SEQ ID NO: 130158 - RNA, 19 nt, Artificial Sequence
  Description of Artificial Sequence: Synthetic oligonucleotide
ugguuacuucuggguugua

SEQ ID NO: 130159 - RNA, 19 nt, Artificial Sequence
  Description of Artificial Sequence: Synthetic oligonucleotide
caccccggagucuguuucu

SEQ ID NO: 130160 - RNA, 19 nt, Artificial Sequence
  Description of Artificial Sequence: Synthetic oligonucleotide
gccgggacauucucauagu

SEQ ID NO: 130161 - RNA, 19 nt, Artificial Sequence
  Description of Artificial Sequence: Synthetic oligonucleotide
agaaggcgauagacucguu

SEQ ID NO: 130162 - RNA, 19 nt, Artificial Sequence
  Description of Artificial Sequence: Synthetic oligonucleotide
ccaacagauuggcgacaga

SEQ ID NO: 130163 - RNA, 19 nt, Artificial Sequence
  Description of Artificial Sequence: Synthetic oligonucleotide
gcggcgguugacguagauu

SEQ ID NO: 130164 - RNA, 19 nt, Artificial Sequence
  Description of Artificial Sequence: Synthetic oligonucleotide
ccaucacaauggccauagu

SEQ ID NO: 130165 - RNA, 19 nt, Artificial Sequence
  Description of Artificial Sequence: Synthetic oligonucleotide
aauuauaacgucuucagca

SEQ ID NO: 130166 - RNA, 19 nt, Artificial Sequence
  Description of Artificial Sequence: Synthetic oligonucleotide
aguacaguaaacuccaccc

SEQ ID NO: 130167 - RNA, 19 nt, Artificial Sequence
  Description of Artificial Sequence: Synthetic oligonucleotide
aaaaguucguuauaaagcu

SEQ ID NO: 130168 - RNA, 19 nt, Artificial Sequence
  Description of Artificial Sequence: Synthetic oligonucleotide
ucucuuuacauuauaacag

SEQ ID NO: 130169 - RNA, 19 nt, Artificial Sequence
  Description of Artificial Sequence: Synthetic oligonucleotide
aaaauaauaggcccuagca

SEQ ID NO: 130170 - RNA, 19 nt, Artificial Sequence
  Description of Artificial Sequence: Synthetic oligonucleotide
uuuuaagugcagcacaggg

SEQ ID NO: 130171 - RNA, 19 nt, Artificial Sequence
  Description of Artificial Sequence: Synthetic oligonucleotide
acugauuugaaagugauag

SEQ ID NO: 130172 - RNA, 19 nt, Artificial Sequence
  Description of Artificial Sequence: Synthetic oligonucleotide
aauaauaggcccuagcaaa

SEQ ID NO: 130173 - RNA, 19 nt, Artificial Sequence
  Description of Artificial Sequence: Synthetic oligonucleotide
cuuuauuugaggaaccacg

SEQ ID NO: 130174 - RNA, 19 nt, Artificial Sequence
  Description of Artificial Sequence: Synthetic oligonucleotide
uggaucauaauuauaacgu

SEQ ID NO: 130175 - RNA, 19 nt, Artificial Sequence
  Description of Artificial Sequence: Synthetic oligonucleotide
ucauuauuuacaaggcugg

SEQ ID NO: 130176 - RNA, 19 nt, Artificial Sequence
  Description of Artificial Sequence: Synthetic oligonucleotide
auaauuauaacgucuucag

SEQ ID NO: 130177 - RNA, 19 nt, Artificial Sequence
  Description of Artificial Sequence: Synthetic oligonucleotide
uuuauugucuccuggaaug

SEQ ID NO: 130178 - RNA, 19 nt, Artificial Sequence
  Description of Artificial Sequence: Synthetic oligonucleotide
aagaaguuuacugaaaacu

SEQ ID NO: 130179 - RNA, 19 nt, Artificial Sequence
  Description of Artificial Sequence: Synthetic oligonucleotide
aaacauccguccuucacac

SEQ ID NO: 130180 - RNA, 19 nt, Artificial Sequence
  Description of Artificial Sequence: Synthetic oligonucleotide
auauacggcaacuugccac

SEQ ID NO: 130181 - RNA, 19 nt, Artificial Sequence
  Description of Artificial Sequence: Synthetic oligonucleotide
cuggaucauaauuauaacg

SEQ ID NO: 130182 - RNA, 19 nt, Artificial Sequence
  Description of Artificial Sequence: Synthetic oligonucleotide
uagaucagaggaaagacga

SEQ ID NO: 130183 - RNA, 19 nt, Artificial Sequence
  Description of Artificial Sequence: Synthetic oligonucleotide
auagucuauuuucuugucc

SEQ ID NO: 130184 - RNA, 19 nt, Artificial Sequence
  Description of Artificial Sequence: Synthetic oligonucleotide
aauacagaugacuuaguaa

SEQ ID NO: 130185 - RNA, 19 nt, Artificial Sequence
  Description of Artificial Sequence: Synthetic oligonucleotide
uuuaccucgaggaggagag

SEQ ID NO: 130186 - RNA, 19 nt, Artificial Sequence
  Description of Artificial Sequence: Synthetic oligonucleotide
agaggaaugacugaacugg

SEQ ID NO: 130187 - RNA, 19 nt, Artificial Sequence
  Description of Artificial Sequence: Synthetic oligonucleotide
agucucucuaguuagauca

SEQ ID NO: 130188 - RNA, 19 nt, Artificial Sequence
  Description of Artificial Sequence: Synthetic oligonucleotide
aaucuuuaccucgaggagg

SEQ ID NO: 130189 - RNA, 19 nt, Artificial Sequence
  Description of Artificial Sequence: Synthetic oligonucleotide
uauuugaggaaccacgaac

SEQ ID NO: 130190 - RNA, 19 nt, Artificial Sequence
  Description of Artificial Sequence: Synthetic oligonucleotide
aaccauuucuuucucaacu

SEQ ID NO: 130191 - RNA, 19 nt, Artificial Sequence
  Description of Artificial Sequence: Synthetic oligonucleotide
uuuauuugaggaaccacga

SEQ ID NO: 130192 - RNA, 19 nt, Artificial Sequence
  Description of Artificial Sequence: Synthetic oligonucleotide
uugucucuucacaugagcg

SEQ ID NO: 130193 - RNA, 19 nt, Artificial Sequence
  Description of Artificial Sequence: Synthetic oligonucleotide
auugguucaucccuaacag

SEQ ID NO: 130194 - RNA, 19 nt, Artificial Sequence
  Description of Artificial Sequence: Synthetic oligonucleotide
auuauaacgucuucagcag

SEQ ID NO: 130195 - RNA, 19 nt, Artificial Sequence
  Description of Artificial Sequence: Synthetic oligonucleotide
ugaggaaccacgaacagau

SEQ ID NO: 130196 - RNA, 19 nt, Artificial Sequence
  Description of Artificial Sequence: Synthetic oligonucleotide
aaauaauaggcccuagcaa

SEQ ID NO: 130197 - RNA, 19 nt, Artificial Sequence
  Description of Artificial Sequence: Synthetic oligonucleotide
uucgcuuggaacuagaaua

SEQ ID NO: 130198 - RNA, 19 nt, Artificial Sequence
  Description of Artificial Sequence: Synthetic oligonucleotide
guggguuagguauauacgg

SEQ ID NO: 130199 - RNA, 19 nt, Artificial Sequence
  Description of Artificial Sequence: Synthetic oligonucleotide
aacaauguaucugucuuag

SEQ ID NO: 130200 - RNA, 19 nt, Artificial Sequence
  Description of Artificial Sequence: Synthetic oligonucleotide
uaaaagucucucuggagag

SEQ ID NO: 130201 - RNA, 19 nt, Artificial Sequence
  Description of Artificial Sequence: Synthetic oligonucleotide
uuauagucugguucaaaag

SEQ ID NO: 130202 - RNA, 19 nt, Artificial Sequence
  Description of Artificial Sequence: Synthetic oligonucleotide
auuaaaacauccguccuuc

SEQ ID NO: 130203 - RNA, 19 nt, Artificial Sequence
  Description of Artificial Sequence: Synthetic oligonucleotide
agucaauuaaaacauccgu

SEQ ID NO: 130204 - RNA, 19 nt, Artificial Sequence
  Description of Artificial Sequence: Synthetic oligonucleotide
agagguaaaagucucucug

SEQ ID NO: 130205 - RNA, 19 nt, Artificial Sequence
  Description of Artificial Sequence: Synthetic oligonucleotide
uaugauacuagaugguuuc

SEQ ID NO: 130206 - RNA, 19 nt, Artificial Sequence
  Description of Artificial Sequence: Synthetic oligonucleotide
aagggugaauuucugauau

SEQ ID NO: 130207 - RNA, 19 nt, Artificial Sequence
  Description of Artificial Sequence: Synthetic oligonucleotide
ugagcguuugguaucguag

SEQ ID NO: 130208 - RNA, 19 nt, Artificial Sequence
  Description of Artificial Sequence: Synthetic oligonucleotide
uucuuacuaacucacuucu

SEQ ID NO: 130209 - RNA, 19 nt, Artificial Sequence
  Description of Artificial Sequence: Synthetic oligonucleotide
uaauuauaacgucuucagc

SEQ ID NO: 130210 - RNA, 19 nt, Artificial Sequence
  Description of Artificial Sequence: Synthetic oligonucleotide
uuauccgaaguccuggucu

SEQ ID NO: 130211 - RNA, 19 nt, Artificial Sequence
  Description of Artificial Sequence: Synthetic oligonucleotide
aguguacuugacuggagcg

SEQ ID NO: 130212 - RNA, 19 nt, Artificial Sequence
  Description of Artificial Sequence: Synthetic oligonucleotide
uuuuaugauacuagauggu

SEQ ID NO: 130213 - RNA, 19 nt, Artificial Sequence
  Description of Artificial Sequence: Synthetic oligonucleotide
ucucauaccacucucggua

SEQ ID NO: 130214 - RNA, 19 nt, Artificial Sequence
  Description of Artificial Sequence: Synthetic oligonucleotide
aggauagucgucucugcgc

SEQ ID NO: 130215 - RNA, 19 nt, Artificial Sequence
  Description of Artificial Sequence: Synthetic oligonucleotide
ucugauauuaagagguaaa

SEQ ID NO: 130216 - RNA, 19 nt, Artificial Sequence
  Description of Artificial Sequence: Synthetic oligonucleotide
uguaguagauccaucacuu

SEQ ID NO: 130217 - RNA, 19 nt, Artificial Sequence
  Description of Artificial Sequence: Synthetic oligonucleotide
ucauguuuauccgaagucc

SEQ ID NO: 130218 - RNA, 19 nt, Artificial Sequence
  Description of Artificial Sequence: Synthetic oligonucleotide
auuaagagguaaaagucuc

SEQ ID NO: 130219 - RNA, 19 nt, Artificial Sequence
  Description of Artificial Sequence: Synthetic oligonucleotide
uuuaugaucaugaggcuuu

SEQ ID NO: 130220 - RNA, 19 nt, Artificial Sequence
  Description of Artificial Sequence: Synthetic oligonucleotide
aaccucucauguuccaugg

SEQ ID NO: 130221 - RNA, 19 nt, Artificial Sequence
  Description of Artificial Sequence: Synthetic oligonucleotide
ucucuaguuagaucagagg

SEQ ID NO: 130222 - RNA, 19 nt, Artificial Sequence
  Description of Artificial Sequence: Synthetic oligonucleotide
agaacaaacaauguaucug

SEQ ID NO: 130223 - RNA, 19 nt, Artificial Sequence
  Description of Artificial Sequence: Synthetic oligonucleotide
ucucguuauagucugguuc

SEQ ID NO: 130224 - RNA, 19 nt, Artificial Sequence
  Description of Artificial Sequence: Synthetic oligonucleotide
aagacgagaggaaugacug

SEQ ID NO: 130225 - RNA, 19 nt, Artificial Sequence
  Description of Artificial Sequence: Synthetic oligonucleotide
uuguaguagauccaucacu

SEQ ID NO: 130226 - RNA, 19 nt, Artificial Sequence
  Description of Artificial Sequence: Synthetic oligonucleotide
gaaucagucuuugucagcc

SEQ ID NO: 130227 - RNA, 19 nt, Artificial Sequence
  Description of Artificial Sequence: Synthetic oligonucleotide
acuacuggacucuuucccg

SEQ ID NO: 130228 - RNA, 19 nt, Artificial Sequence
  Description of Artificial Sequence: Synthetic oligonucleotide
uaauuaauggugguuaaaa

SEQ ID NO: 130229 - RNA, 19 nt, Artificial Sequence
  Description of Artificial Sequence: Synthetic oligonucleotide
aaaagcuuuucuggauagc

SEQ ID NO: 130230 - RNA, 19 nt, Artificial Sequence
  Description of Artificial Sequence: Synthetic oligonucleotide
uucacaguacaguaaacuc

SEQ ID NO: 130231 - RNA, 19 nt, Artificial Sequence
  Description of Artificial Sequence: Synthetic oligonucleotide
ucuuucuucuucuucuucu

SEQ ID NO: 130232 - RNA, 19 nt, Artificial Sequence
  Description of Artificial Sequence: Synthetic oligonucleotide
ugugaaaauuucacaguac

SEQ ID NO: 130233 - RNA, 19 nt, Artificial Sequence
  Description of Artificial Sequence: Synthetic oligonucleotide
uucuucuucuucuucuugc

SEQ ID NO: 130234 - RNA, 19 nt, Artificial Sequence
  Description of Artificial Sequence: Synthetic oligonucleotide
uauacggcaacuugccacc

SEQ ID NO: 130235 - RNA, 19 nt, Artificial Sequence
  Description of Artificial Sequence: Synthetic oligonucleotide
aacuaauuaauggugguua

SEQ ID NO: 130236 - RNA, 19 nt, Artificial Sequence
  Description of Artificial Sequence: Synthetic oligonucleotide
aaagugacauaacggggcu

SEQ ID NO: 130237 - RNA, 19 nt, Artificial Sequence
  Description of Artificial Sequence: Synthetic oligonucleotide
ugugacuaucucuuguuga

SEQ ID NO: 130238 - RNA, 19 nt, Artificial Sequence
  Description of Artificial Sequence: Synthetic oligonucleotide
cucuaguuagaucagagga

SEQ ID NO: 130239 - RNA, 19 nt, Artificial Sequence
  Description of Artificial Sequence: Synthetic oligonucleotide
ugaaagugauagauucugc

SEQ ID NO: 130240 - RNA, 19 nt, Artificial Sequence
  Description of Artificial Sequence: Synthetic oligonucleotide
uuugaggaaccacgaacag

SEQ ID NO: 130241 - RNA, 19 nt, Artificial Sequence
  Description of Artificial Sequence: Synthetic oligonucleotide
aacagcucgggguucagga

SEQ ID NO: 130242 - RNA, 19 nt, Artificial Sequence
  Description of Artificial Sequence: Synthetic oligonucleotide
uuuaggcaaaucucucucc

SEQ ID NO: 130243 - RNA, 19 nt, Artificial Sequence
  Description of Artificial Sequence: Synthetic oligonucleotide
uguagcaucgucucuacuu

SEQ ID NO: 130244 - RNA, 19 nt, Artificial Sequence
  Description of Artificial Sequence: Synthetic oligonucleotide
aguagauccaucacuuuuc

SEQ ID NO: 130245 - RNA, 19 nt, Artificial Sequence
  Description of Artificial Sequence: Synthetic oligonucleotide
uggguuagguauauacggc

SEQ ID NO: 130246 - RNA, 19 nt, Artificial Sequence
  Description of Artificial Sequence: Synthetic oligonucleotide
gagcguuugguaucguagg

SEQ ID NO: 130247 - RNA, 19 nt, Artificial Sequence
  Description of Artificial Sequence: Synthetic oligonucleotide
acacguuacucucacuguc

SEQ ID NO: 130248 - RNA, 19 nt, Artificial Sequence
  Description of Artificial Sequence: Synthetic oligonucleotide
uuaagagguaaaagucucu

SEQ ID NO: 130249 - RNA, 19 nt, Artificial Sequence
  Description of Artificial Sequence: Synthetic oligonucleotide
uggauuuaacaucuucuuc

SEQ ID NO: 130250 - RNA, 19 nt, Artificial Sequence
  Description of Artificial Sequence: Synthetic oligonucleotide
uucuucuucuucuucuucu

SEQ ID NO: 130251 - RNA, 19 nt, Artificial Sequence
  Description of Artificial Sequence: Synthetic oligonucleotide
gacuuaguaauuaagucaa

SEQ ID NO: 130252 - RNA, 19 nt, Artificial Sequence
  Description of Artificial Sequence: Synthetic oligonucleotide
ugguguaauccacaagugu

SEQ ID NO: 130253 - RNA, 19 nt, Artificial Sequence
  Description of Artificial Sequence: Synthetic oligonucleotide
ugggagaacaaacaaugua

SEQ ID NO: 130254 - RNA, 19 nt, Artificial Sequence
  Description of Artificial Sequence: Synthetic oligonucleotide
ucgggguucaggaagcucu

SEQ ID NO: 130255 - RNA, 19 nt, Artificial Sequence
  Description of Artificial Sequence: Synthetic oligonucleotide
uacuagaugguuucccuac

SEQ ID NO: 130256 - RNA, 19 nt, Artificial Sequence
  Description of Artificial Sequence: Synthetic oligonucleotide
acguuacucucacugucgc

SEQ ID NO: 130257 - RNA, 19 nt, Artificial Sequence
  Description of Artificial Sequence: Synthetic oligonucleotide
cuugauggugcucuuauca

SEQ ID NO: 130258 - RNA, 19 nt, Artificial Sequence
  Description of Artificial Sequence: Synthetic oligonucleotide
aaaguucguuauaaagcuc

SEQ ID NO: 130259 - RNA, 19 nt, Artificial Sequence
  Description of Artificial Sequence: Synthetic oligonucleotide
uuagguauauacggcaacu

SEQ ID NO: 130260 - RNA, 19 nt, Artificial Sequence
  Description of Artificial Sequence: Synthetic oligonucleotide
cucucuaguuagaucagag

SEQ ID NO: 130261 - RNA, 19 nt, Artificial Sequence
  Description of Artificial Sequence: Synthetic oligonucleotide
agaggguucuuuuaguaaa

SEQ ID NO: 130262 - RNA, 19 nt, Artificial Sequence
  Description of Artificial Sequence: Synthetic oligonucleotide
ucaucaacaccugaugacu

SEQ ID NO: 130263 - RNA, 19 nt, Artificial Sequence
  Description of Artificial Sequence: Synthetic oligonucleotide
gagaggaaugacugaacug

SEQ ID NO: 130264 - RNA, 19 nt, Artificial Sequence
  Description of Artificial Sequence: Synthetic oligonucleotide
acaauguaucugucuuagc

SEQ ID NO: 130265 - RNA, 19 nt, Artificial Sequence
  Description of Artificial Sequence: Synthetic oligonucleotide
ucuaacaccgagugcuccc

SEQ ID NO: 130266 - RNA, 19 nt, Artificial Sequence
  Description of Artificial Sequence: Synthetic oligonucleotide
aguuagaucagaggaaaga

SEQ ID NO: 130267 - RNA, 19 nt, Artificial Sequence
  Description of Artificial Sequence: Synthetic oligonucleotide
auuugaggaaccacgaaca

SEQ ID NO: 130268 - RNA, 19 nt, Artificial Sequence
  Description of Artificial Sequence: Synthetic oligonucleotide
uccccuuuucacuggaugc

SEQ ID NO: 130269 - RNA, 19 nt, Artificial Sequence
  Description of Artificial Sequence: Synthetic oligonucleotide
guuauagucugguucaaaa

SEQ ID NO: 130270 - RNA, 19 nt, Artificial Sequence
  Description of Artificial Sequence: Synthetic oligonucleotide
augacuguccucuuuguau

SEQ ID NO: 130271 - RNA, 19 nt, Artificial Sequence
  Description of Artificial Sequence: Synthetic oligonucleotide
uacuugggagaacaaacaa

SEQ ID NO: 130272 - RNA, 19 nt, Artificial Sequence
  Description of Artificial Sequence: Synthetic oligonucleotide
uuuuggucgucuuucuccu

SEQ ID NO: 130273 - RNA, 19 nt, Artificial Sequence
  Description of Artificial Sequence: Synthetic oligonucleotide
ugcugcgucauuucguggc

SEQ ID NO: 130274 - RNA, 19 nt, Artificial Sequence
  Description of Artificial Sequence: Synthetic oligonucleotide
ugauacuagaugguuuccc

SEQ ID NO: 130275 - RNA, 19 nt, Artificial Sequence
  Description of Artificial Sequence: Synthetic oligonucleotide
uguucacucagacggucug

SEQ ID NO: 130276 - RNA, 19 nt, Artificial Sequence
  Description of Artificial Sequence: Synthetic oligonucleotide
uaguuagaucagaggaaag

SEQ ID NO: 130277 - RNA, 19 nt, Artificial Sequence
  Description of Artificial Sequence: Synthetic oligonucleotide
uauauacggcaacuugcca

SEQ ID NO: 130278 - RNA, 19 nt, Artificial Sequence
  Description of Artificial Sequence: Synthetic oligonucleotide
ucgcuuggaacuagaauac

SEQ ID NO: 130279 - RNA, 19 nt, Artificial Sequence
  Description of Artificial Sequence: Synthetic oligonucleotide
agcguuugguaucguaggg

SEQ ID NO: 130280 - RNA, 19 nt, Artificial Sequence
  Description of Artificial Sequence: Synthetic oligonucleotide
guauauacggcaacuugcc

SEQ ID NO: 130281 - RNA, 19 nt, Artificial Sequence
  Description of Artificial Sequence: Synthetic oligonucleotide
aguaaacuccaccccaacu

SEQ ID NO: 130282 - RNA, 19 nt, Artificial Sequence
  Description of Artificial Sequence: Synthetic oligonucleotide
gguauauacggcaacuugc

SEQ ID NO: 130283 - RNA, 19 nt, Artificial Sequence
  Description of Artificial Sequence: Synthetic oligonucleotide
guagcaucgucucuacuug

SEQ ID NO: 130284 - RNA, 19 nt, Artificial Sequence
  Description of Artificial Sequence: Synthetic oligonucleotide
cacguuacucucacugucg

SEQ ID NO: 130285 - RNA, 19 nt, Artificial Sequence
  Description of Artificial Sequence: Synthetic oligonucleotide
gaagaaucuuuaccucgag

SEQ ID NO: 130286 - RNA, 19 nt, Artificial Sequence
  Description of Artificial Sequence: Synthetic oligonucleotide
gguguaauccacaagugug

SEQ ID NO: 130287 - RNA, 19 nt, Artificial Sequence
  Description of Artificial Sequence: Synthetic oligonucleotide
ugucucuucacaugagcgu

SEQ ID NO: 130288 - RNA, 19 nt, Artificial Sequence
  Description of Artificial Sequence: Synthetic oligonucleotide
cucuuaucaaucuguccag

SEQ ID NO: 130289 - RNA, 19 nt, Artificial Sequence
  Description of Artificial Sequence: Synthetic oligonucleotide
uuauuugaggaaccacgaa

SEQ ID NO: 130290 - RNA, 19 nt, Artificial Sequence
  Description of Artificial Sequence: Synthetic oligonucleotide
auaacggggcuguaaugag

SEQ ID NO: 130291 - RNA, 19 nt, Artificial Sequence
  Description of Artificial Sequence: Synthetic oligonucleotide
aauaaucaagcagcaaaua

SEQ ID NO: 130292 - RNA, 19 nt, Artificial Sequence
  Description of Artificial Sequence: Synthetic oligonucleotide
aaauuuccuuguucacuca

SEQ ID NO: 130293 - RNA, 19 nt, Artificial Sequence
  Description of Artificial Sequence: Synthetic oligonucleotide
agggucuaggcuguguccc

SEQ ID NO: 130294 - RNA, 19 nt, Artificial Sequence
  Description of Artificial Sequence: Synthetic oligonucleotide
cuggauagcugccaccuag

SEQ ID NO: 130295 - RNA, 19 nt, Artificial Sequence
  Description of Artificial Sequence: Synthetic oligonucleotide
acuugacuggagcggacgg

SEQ ID NO: 130296 - RNA, 19 nt, Artificial Sequence
  Description of Artificial Sequence: Synthetic oligonucleotide
caucgucucuacuugggag

SEQ ID NO: 130297 - RNA, 19 nt, Artificial Sequence
  Description of Artificial Sequence: Synthetic oligonucleotide
uucaacauguaagaaguuu

SEQ ID NO: 130298 - RNA, 19 nt, Artificial Sequence
  Description of Artificial Sequence: Synthetic oligonucleotide
uaagagguaaaagucucuc

SEQ ID NO: 130299 - RNA, 19 nt, Artificial Sequence
  Description of Artificial Sequence: Synthetic oligonucleotide
ucggcuuaccuuucugucc

SEQ ID NO: 130300 - RNA, 19 nt, Artificial Sequence
  Description of Artificial Sequence: Synthetic oligonucleotide
accuggaucauaauuauaa

SEQ ID NO: 130301 - RNA, 19 nt, Artificial Sequence
  Description of Artificial Sequence: Synthetic oligonucleotide
acuaauuaauggugguuaa

SEQ ID NO: 130302 - RNA, 19 nt, Artificial Sequence
  Description of Artificial Sequence: Synthetic oligonucleotide
uuacuaacucacuucucuc

SEQ ID NO: 130303 - RNA, 19 nt, Artificial Sequence
  Description of Artificial Sequence: Synthetic oligonucleotide
uguacuugacuggagcgga

SEQ ID NO: 130304 - RNA, 19 nt, Artificial Sequence
  Description of Artificial Sequence: Synthetic oligonucleotide
ggaggucucuaacagcucg

SEQ ID NO: 130305 - RNA, 19 nt, Artificial Sequence
  Description of Artificial Sequence: Synthetic oligonucleotide
augauacuagaugguuucc

SEQ ID NO: 130306 - RNA, 19 nt, Artificial Sequence
  Description of Artificial Sequence: Synthetic oligonucleotide
guacaguaaacuccacccc

SEQ ID NO: 130307 - RNA, 19 nt, Artificial Sequence
  Description of Artificial Sequence: Synthetic oligonucleotide
aaugacuguccucuuugua

SEQ ID NO: 130308 - RNA, 19 nt, Artificial Sequence
  Description of Artificial Sequence: Synthetic oligonucleotide
caugcugcgucauuucgug

SEQ ID NO: 130309 - RNA, 19 nt, Artificial Sequence
  Description of Artificial Sequence: Synthetic oligonucleotide
caguguacuugacuggagc

SEQ ID NO: 130310 - RNA, 19 nt, Artificial Sequence
  Description of Artificial Sequence: Synthetic oligonucleotide
ucaguguacuugacuggag

SEQ ID NO: 130311 - RNA, 19 nt, Artificial Sequence
  Description of Artificial Sequence: Synthetic oligonucleotide
guuagguauauacggcaac

SEQ ID NO: 130312 - RNA, 19 nt, Artificial Sequence
  Description of Artificial Sequence: Synthetic oligonucleotide
guaaacuccaccccaacua

SEQ ID NO: 130313 - RNA, 19 nt, Artificial Sequence
  Description of Artificial Sequence: Synthetic oligonucleotide
gguuguaguagauccauca

SEQ ID NO: 130314 - RNA, 19 nt, Artificial Sequence
  Description of Artificial Sequence: Synthetic oligonucleotide
uucuaugacuuuguccagc

SEQ ID NO: 130315 - RNA, 19 nt, Artificial Sequence
  Description of Artificial Sequence: Synthetic oligonucleotide
aaguccucucuguuagcug

SEQ ID NO: 130316 - RNA, 19 nt, Artificial Sequence
  Description of Artificial Sequence: Synthetic oligonucleotide
uuagcgucaucaacaccug

SEQ ID NO: 130317 - RNA, 19 nt, Artificial Sequence
  Description of Artificial Sequence: Synthetic oligonucleotide
cccaacuaauuaauggugg

SEQ ID NO: 130318 - RNA, 19 nt, Artificial Sequence
  Description of Artificial Sequence: Synthetic oligonucleotide
agaaguuuacugaaaacuu

SEQ ID NO: 130319 - RNA, 19 nt, Artificial Sequence
  Description of Artificial Sequence: Synthetic oligonucleotide
ugcugcuacguucaagcuc

SEQ ID NO: 130320 - RNA, 19 nt, Artificial Sequence
  Description of Artificial Sequence: Synthetic oligonucleotide
ugucgcucucguuauaguc

SEQ ID NO: 130321 - RNA, 19 nt, Artificial Sequence
  Description of Artificial Sequence: Synthetic oligonucleotide
gaugacucccuggauuucc

SEQ ID NO: 130322 - RNA, 19 nt, Artificial Sequence
  Description of Artificial Sequence: Synthetic oligonucleotide
gaggaaugacugaacuggg

SEQ ID NO: 130323 - RNA, 19 nt, Artificial Sequence
  Description of Artificial Sequence: Synthetic oligonucleotide
uuaugcuuguuuccuuuau

SEQ ID NO: 130324 - RNA, 19 nt, Artificial Sequence
  Description of Artificial Sequence: Synthetic oligonucleotide
uuuauccgaaguccugguc

SEQ ID NO: 130325 - RNA, 19 nt, Artificial Sequence
  Description of Artificial Sequence: Synthetic oligonucleotide
uucugauauuaagagguaa

SEQ ID NO: 130326 - RNA, 19 nt, Artificial Sequence
  Description of Artificial Sequence: Synthetic oligonucleotide
uacuugacuggagcggacg

SEQ ID NO: 130327 - RNA, 19 nt, Artificial Sequence
  Description of Artificial Sequence: Synthetic oligonucleotide
uuucuucuucuucuucuuc

SEQ ID NO: 130328 - RNA, 19 nt, Artificial Sequence
  Description of Artificial Sequence: Synthetic oligonucleotide
uuggacuaauacuggggcu

SEQ ID NO: 130329 - RNA, 19 nt, Artificial Sequence
  Description of Artificial Sequence: Synthetic oligonucleotide
cuagcaaaaccucucaugu

SEQ ID NO: 130330 - RNA, 19 nt, Artificial Sequence
  Description of Artificial Sequence: Synthetic oligonucleotide
aggaaccuggaucauaauu

SEQ ID NO: 130331 - RNA, 19 nt, Artificial Sequence
  Description of Artificial Sequence: Synthetic oligonucleotide
uuucugauauuaagaggua

SEQ ID NO: 130332 - RNA, 19 nt, Artificial Sequence
  Description of Artificial Sequence: Synthetic oligonucleotide
agacuuugucucuucacau

SEQ ID NO: 130333 - RNA, 19 nt, Artificial Sequence
  Description of Artificial Sequence: Synthetic oligonucleotide
uagcaucgucucuacuugg

SEQ ID NO: 130334 - RNA, 19 nt, Artificial Sequence
  Description of Artificial Sequence: Synthetic oligonucleotide
cuuacuaacucacuucucu

SEQ ID NO: 130335 - RNA, 19 nt, Artificial Sequence
  Description of Artificial Sequence: Synthetic oligonucleotide
acuaauacuggggcugcuc

SEQ ID NO: 130336 - RNA, 19 nt, Artificial Sequence
  Description of Artificial Sequence: Synthetic oligonucleotide
ccuaacagguguagcaucg

SEQ ID NO: 130337 - RNA, 19 nt, Artificial Sequence
  Description of Artificial Sequence: Synthetic oligonucleotide
ucgguagcguucuuucuca

SEQ ID NO: 130338 - RNA, 19 nt, Artificial Sequence
  Description of Artificial Sequence: Synthetic oligonucleotide
gauacuagaugguuucccu

SEQ ID NO: 130339 - RNA, 19 nt, Artificial Sequence
  Description of Artificial Sequence: Synthetic oligonucleotide
acaugagcguuugguaucg

SEQ ID NO: 130340 - RNA, 19 nt, Artificial Sequence
  Description of Artificial Sequence: Synthetic oligonucleotide
uuuacaaggcuggaaucuc

SEQ ID NO: 130341 - RNA, 19 nt, Artificial Sequence
  Description of Artificial Sequence: Synthetic oligonucleotide
ugagggucuaggcuguguc

SEQ ID NO: 130342 - RNA, 19 nt, Artificial Sequence
  Description of Artificial Sequence: Synthetic oligonucleotide
gcuuguacugguguaaucc

SEQ ID NO: 130343 - RNA, 19 nt, Artificial Sequence
  Description of Artificial Sequence: Synthetic oligonucleotide
uaugcuuguuuccuuuauu

SEQ ID NO: 130344 - RNA, 19 nt, Artificial Sequence
  Description of Artificial Sequence: Synthetic oligonucleotide
ucgcucucguuauagucug

SEQ ID NO: 130345 - RNA, 19 nt, Artificial Sequence
  Description of Artificial Sequence: Synthetic oligonucleotide
ucuuacuaacucacuucuc

SEQ ID NO: 130346 - RNA, 19 nt, Artificial Sequence
  Description of Artificial Sequence: Synthetic oligonucleotide
cugguguaauccacaagug

SEQ ID NO: 130347 - RNA, 19 nt, Artificial Sequence
  Description of Artificial Sequence: Synthetic oligonucleotide
cuacuugggagaacaaaca

SEQ ID NO: 130348 - RNA, 19 nt, Artificial Sequence
  Description of Artificial Sequence: Synthetic oligonucleotide
uugaggaaccacgaacaga

SEQ ID NO: 130349 - RNA, 19 nt, Artificial Sequence
  Description of Artificial Sequence: Synthetic oligonucleotide
ggauagucgucucugcgcc

SEQ ID NO: 130350 - RNA, 19 nt, Artificial Sequence
  Description of Artificial Sequence: Synthetic oligonucleotide
cauaacggggcuguaauga

SEQ ID NO: 130351 - RNA, 19 nt, Artificial Sequence
  Description of Artificial Sequence: Synthetic oligonucleotide
acugucgcucucguuauag

SEQ ID NO: 130352 - RNA, 19 nt, Artificial Sequence
  Description of Artificial Sequence: Synthetic oligonucleotide
cauagucuauuuucuuguc

SEQ ID NO: 130353 - RNA, 19 nt, Artificial Sequence
  Description of Artificial Sequence: Synthetic oligonucleotide
acauaacggggcuguaaug

SEQ ID NO: 130354 - RNA, 19 nt, Artificial Sequence
  Description of Artificial Sequence: Synthetic oligonucleotide
agucuauuuucuugucccu

SEQ ID NO: 130355 - RNA, 19 nt, Artificial Sequence
  Description of Artificial Sequence: Synthetic oligonucleotide
ccaucuacuuuucuugggg

SEQ ID NO: 130356 - RNA, 19 nt, Artificial Sequence
  Description of Artificial Sequence: Synthetic oligonucleotide
caucaacaccugaugacuc

SEQ ID NO: 130357 - RNA, 19 nt, Artificial Sequence
  Description of Artificial Sequence: Synthetic oligonucleotide
ucuuucccguuucuagccu

SEQ ID NO: 130358 - RNA, 19 nt, Artificial Sequence
  Description of Artificial Sequence: Synthetic oligonucleotide
uucucauaccacucucggu

SEQ ID NO: 130359 - RNA, 19 nt, Artificial Sequence
  Description of Artificial Sequence: Synthetic oligonucleotide
uaccacucucgguauuucc

SEQ ID NO: 130360 - RNA, 19 nt, Artificial Sequence
  Description of Artificial Sequence: Synthetic oligonucleotide
cacaugagcguuugguauc

SEQ ID NO: 130361 - RNA, 19 nt, Artificial Sequence
  Description of Artificial Sequence: Synthetic oligonucleotide
uggaaucucuuuacauuau

SEQ ID NO: 130362 - RNA, 19 nt, Artificial Sequence
  Description of Artificial Sequence: Synthetic oligonucleotide
uugcauccuucugagacga

SEQ ID NO: 130363 - RNA, 19 nt, Artificial Sequence
  Description of Artificial Sequence: Synthetic oligonucleotide
ucuucgcuuggaacuagaa

SEQ ID NO: 130364 - RNA, 19 nt, Artificial Sequence
  Description of Artificial Sequence: Synthetic oligonucleotide
ggagcggacggcuuaguag

SEQ ID NO: 130365 - RNA, 19 nt, Artificial Sequence
  Description of Artificial Sequence: Synthetic oligonucleotide
ugcgucauuucguggcuca

SEQ ID NO: 130366 - RNA, 19 nt, Artificial Sequence
  Description of Artificial Sequence: Synthetic oligonucleotide
acuagaugguuucccuaca

SEQ ID NO: 130367 - RNA, 19 nt, Artificial Sequence
  Description of Artificial Sequence: Synthetic oligonucleotide
uuacagaaucagucuuugu

SEQ ID NO: 130368 - RNA, 19 nt, Artificial Sequence
  Description of Artificial Sequence: Synthetic oligonucleotide
gucuuagcgucaucaacac

SEQ ID NO: 130369 - RNA, 19 nt, Artificial Sequence
  Description of Artificial Sequence: Synthetic oligonucleotide
uacguucaagcucucuuuu

SEQ ID NO: 130370 - RNA, 19 nt, Artificial Sequence
  Description of Artificial Sequence: Synthetic oligonucleotide
uauccgaaguccuggucuc

SEQ ID NO: 130371 - RNA, 19 nt, Artificial Sequence
  Description of Artificial Sequence: Synthetic oligonucleotide
cagcucacaauucuguaca

SEQ ID NO: 130372 - RNA, 19 nt, Artificial Sequence
  Description of Artificial Sequence: Synthetic oligonucleotide
aucuuuaccucgaggagga

SEQ ID NO: 130373 - RNA, 19 nt, Artificial Sequence
  Description of Artificial Sequence: Synthetic oligonucleotide
cuucuucuucuucuucuug

SEQ ID NO: 130374 - RNA, 19 nt, Artificial Sequence
  Description of Artificial Sequence: Synthetic oligonucleotide
acguucaagcucucuuuug

SEQ ID NO: 130375 - RNA, 19 nt, Artificial Sequence
  Description of Artificial Sequence: Synthetic oligonucleotide
agauucauguuuauccgaa

SEQ ID NO: 130376 - RNA, 19 nt, Artificial Sequence
  Description of Artificial Sequence: Synthetic oligonucleotide
auacugauuugaaagugau

SEQ ID NO: 130377 - RNA, 19 nt, Artificial Sequence
  Description of Artificial Sequence: Synthetic oligonucleotide
gcuuuugacuucaugcugc

SEQ ID NO: 130378 - RNA, 19 nt, Artificial Sequence
  Description of Artificial Sequence: Synthetic oligonucleotide
gacgagaggaaugacugaa

SEQ ID NO: 130379 - RNA, 19 nt, Artificial Sequence
  Description of Artificial Sequence: Synthetic oligonucleotide
ucaaucuguccagcaacca

SEQ ID NO: 130380 - RNA, 19 nt, Artificial Sequence
  Description of Artificial Sequence: Synthetic oligonucleotide
ucuucuucuucuucuucuu

SEQ ID NO: 130381 - RNA, 19 nt, Artificial Sequence
  Description of Artificial Sequence: Synthetic oligonucleotide
gauagucgucucugcgccc

SEQ ID NO: 130382 - RNA, 19 nt, Artificial Sequence
  Description of Artificial Sequence: Synthetic oligonucleotide
agcaucgucucuacuuggg

SEQ ID NO: 130383 - RNA, 19 nt, Artificial Sequence
  Description of Artificial Sequence: Synthetic oligonucleotide
aacggggcuguaaugaguu

SEQ ID NO: 130384 - RNA, 19 nt, Artificial Sequence
  Description of Artificial Sequence: Synthetic oligonucleotide
accucgaggaggagagucc

SEQ ID NO: 130385 - RNA, 19 nt, Artificial Sequence
  Description of Artificial Sequence: Synthetic oligonucleotide
auaacgucuucagcaggag

SEQ ID NO: 130386 - RNA, 19 nt, Artificial Sequence
  Description of Artificial Sequence: Synthetic oligonucleotide
cucagacggucugaggugc

SEQ ID NO: 130387 - RNA, 19 nt, Artificial Sequence
  Description of Artificial Sequence: Synthetic oligonucleotide
cagauucauguuuauccga

SEQ ID NO: 130388 - RNA, 19 nt, Artificial Sequence
  Description of Artificial Sequence: Synthetic oligonucleotide
aggagcuguauuaucauua

SEQ ID NO: 130389 - RNA, 19 nt, Artificial Sequence
  Description of Artificial Sequence: Synthetic oligonucleotide
ugcgcccucuugugaaggg

SEQ ID NO: 130390 - RNA, 19 nt, Artificial Sequence
  Description of Artificial Sequence: Synthetic oligonucleotide
ugagacgaugaugaagguu

SEQ ID NO: 130391 - RNA, 19 nt, Artificial Sequence
  Description of Artificial Sequence: Synthetic oligonucleotide
ggaaagacgagaggaauga

SEQ ID NO: 130392 - RNA, 19 nt, Artificial Sequence
  Description of Artificial Sequence: Synthetic oligonucleotide
ucucuaacaccgagugcuc

SEQ ID NO: 130393 - RNA, 19 nt, Artificial Sequence
  Description of Artificial Sequence: Synthetic oligonucleotide
cuguguggauuuaacaucu

SEQ ID NO: 130394 - RNA, 19 nt, Artificial Sequence
  Description of Artificial Sequence: Synthetic oligonucleotide
aggucucuaacagcucggg

SEQ ID NO: 130395 - RNA, 19 nt, Artificial Sequence
  Description of Artificial Sequence: Synthetic oligonucleotide
acgagaggaaugacugaac

SEQ ID NO: 130396 - RNA, 19 nt, Artificial Sequence
  Description of Artificial Sequence: Synthetic oligonucleotide
ucugcgcccucuugugaag

SEQ ID NO: 130397 - RNA, 19 nt, Artificial Sequence
  Description of Artificial Sequence: Synthetic oligonucleotide
cauguuuauccgaaguccu

SEQ ID NO: 130398 - RNA, 19 nt, Artificial Sequence
  Description of Artificial Sequence: Synthetic oligonucleotide
uaacagcucgggguucagg

SEQ ID NO: 130399 - RNA, 19 nt, Artificial Sequence
  Description of Artificial Sequence: Synthetic oligonucleotide
uaccucgaggaggagaguc

SEQ ID NO: 130400 - RNA, 19 nt, Artificial Sequence
  Description of Artificial Sequence: Synthetic oligonucleotide
ugacauaacggggcuguaa

SEQ ID NO: 130401 - RNA, 19 nt, Artificial Sequence
  Description of Artificial Sequence: Synthetic oligonucleotide
ccguccuucacacagugac

SEQ ID NO: 130402 - RNA, 19 nt, Artificial Sequence
  Description of Artificial Sequence: Synthetic oligonucleotide
gagcggacggcuuaguagu

SEQ ID NO: 130403 - RNA, 19 nt, Artificial Sequence
  Description of Artificial Sequence: Synthetic oligonucleotide
cauuucguggcucaccucu

SEQ ID NO: 130404 - RNA, 19 nt, Artificial Sequence
  Description of Artificial Sequence: Synthetic oligonucleotide
ggguuagguauauacggca

SEQ ID NO: 130405 - RNA, 19 nt, Artificial Sequence
  Description of Artificial Sequence: Synthetic oligonucleotide
ggagaacaaacaauguauc

SEQ ID NO: 130406 - RNA, 19 nt, Artificial Sequence
  Description of Artificial Sequence: Synthetic oligonucleotide
ucuaggcuguguccccaca

SEQ ID NO: 130407 - RNA, 19 nt, Artificial Sequence
  Description of Artificial Sequence: Synthetic oligonucleotide
ucucugcgcccucuuguga

SEQ ID NO: 130408 - RNA, 19 nt, Artificial Sequence
  Description of Artificial Sequence: Synthetic oligonucleotide
uccauugguucaucccuaa

SEQ ID NO: 130409 - RNA, 19 nt, Artificial Sequence
  Description of Artificial Sequence: Synthetic oligonucleotide
gaaagacgagaggaaugac

SEQ ID NO: 130410 - RNA, 19 nt, Artificial Sequence
  Description of Artificial Sequence: Synthetic oligonucleotide
agacgagaggaaugacuga

SEQ ID NO: 130411 - RNA, 19 nt, Artificial Sequence
  Description of Artificial Sequence: Synthetic oligonucleotide
cuuucccguuucuagccuc

SEQ ID NO: 130412 - RNA, 19 nt, Artificial Sequence
  Description of Artificial Sequence: Synthetic oligonucleotide
ucgaggaggagaguccuuc

SEQ ID NO: 130413 - RNA, 19 nt, Artificial Sequence
  Description of Artificial Sequence: Synthetic oligonucleotide
gcuacuuuccgcuuggccu

SEQ ID NO: 130414 - RNA, 19 nt, Artificial Sequence
  Description of Artificial Sequence: Synthetic oligonucleotide
aacauccguccuucacaca

SEQ ID NO: 130415 - RNA, 19 nt, Artificial Sequence
  Description of Artificial Sequence: Synthetic oligonucleotide
ugcuagauguugacuccau

SEQ ID NO: 130416 - RNA, 19 nt, Artificial Sequence
  Description of Artificial Sequence: Synthetic oligonucleotide
ucacugucgcucucguuau

SEQ ID NO: 130417 - RNA, 19 nt, Artificial Sequence
  Description of Artificial Sequence: Synthetic oligonucleotide
ugacuaucucuuguugaaa

SEQ ID NO: 130418 - RNA, 19 nt, Artificial Sequence
  Description of Artificial Sequence: Synthetic oligonucleotide
ucccguuucuagccucagc

SEQ ID NO: 130419 - RNA, 19 nt, Artificial Sequence
  Description of Artificial Sequence: Synthetic oligonucleotide
cucuaacaccgagugcucc

SEQ ID NO: 130420 - RNA, 19 nt, Artificial Sequence
  Description of Artificial Sequence: Synthetic oligonucleotide
uuaucccauuuggacugag

SEQ ID NO: 130421 - RNA, 19 nt, Artificial Sequence
  Description of Artificial Sequence: Synthetic oligonucleotide
cuucgggucuggcugccag

SEQ ID NO: 130422 - RNA, 19 nt, Artificial Sequence
  Description of Artificial Sequence: Synthetic oligonucleotide
ggaaugacugaacuggggu

SEQ ID NO: 130423 - RNA, 19 nt, Artificial Sequence
  Description of Artificial Sequence: Synthetic oligonucleotide
cauccauugguucaucccu

SEQ ID NO: 130424 - RNA, 19 nt, Artificial Sequence
  Description of Artificial Sequence: Synthetic oligonucleotide
auagucgucucugcgcccu

SEQ ID NO: 130425 - RNA, 19 nt, Artificial Sequence
  Description of Artificial Sequence: Synthetic oligonucleotide
acggcuuaguaguaacauu

SEQ ID NO: 130426 - RNA, 19 nt, Artificial Sequence
  Description of Artificial Sequence: Synthetic oligonucleotide
ucucuucacaugagcguuu

SEQ ID NO: 130427 - RNA, 19 nt, Artificial Sequence
  Description of Artificial Sequence: Synthetic oligonucleotide
ccccaacuaauuaauggug

SEQ ID NO: 130428 - RNA, 19 nt, Artificial Sequence
  Description of Artificial Sequence: Synthetic oligonucleotide
uaacaccgagugcucccug

SEQ ID NO: 130429 - RNA, 19 nt, Artificial Sequence
  Description of Artificial Sequence: Synthetic oligonucleotide
acgaacagauucauguuua

SEQ ID NO: 130430 - RNA, 19 nt, Artificial Sequence
  Description of Artificial Sequence: Synthetic oligonucleotide
ccuggaucauaauuauaac

SEQ ID NO: 130431 - RNA, 19 nt, Artificial Sequence
  Description of Artificial Sequence: Synthetic oligonucleotide
cguucaagcucucuuuugc

SEQ ID NO: 130432 - RNA, 19 nt, Artificial Sequence
  Description of Artificial Sequence: Synthetic oligonucleotide
aguucguuauaaagcucug

SEQ ID NO: 130433 - RNA, 19 nt, Artificial Sequence
  Description of Artificial Sequence: Synthetic oligonucleotide
caucccuaacagguguagc

SEQ ID NO: 130434 - RNA, 19 nt, Artificial Sequence
  Description of Artificial Sequence: Synthetic oligonucleotide
cuuuaccucgaggaggaga

SEQ ID NO: 130435 - RNA, 19 nt, Artificial Sequence
  Description of Artificial Sequence: Synthetic oligonucleotide
ccauuuggacugaggaacc

SEQ ID NO: 130436 - RNA, 19 nt, Artificial Sequence
  Description of Artificial Sequence: Synthetic oligonucleotide
gucucucuaguuagaucag

SEQ ID NO: 130437 - RNA, 19 nt, Artificial Sequence
  Description of Artificial Sequence: Synthetic oligonucleotide
ucuguuagcugagggucua

SEQ ID NO: 130438 - RNA, 19 nt, Artificial Sequence
  Description of Artificial Sequence: Synthetic oligonucleotide
augagcguuugguaucgua

SEQ ID NO: 130439 - RNA, 19 nt, Artificial Sequence
  Description of Artificial Sequence: Synthetic oligonucleotide
cuuuccgcuuggccuuucc

SEQ ID NO: 130440 - RNA, 19 nt, Artificial Sequence
  Description of Artificial Sequence: Synthetic oligonucleotide
cauuauuuacaaggcugga

SEQ ID NO: 130441 - RNA, 19 nt, Artificial Sequence
  Description of Artificial Sequence: Synthetic oligonucleotide
aaacuccaccccaacuaau

SEQ ID NO: 130442 - RNA, 19 nt, Artificial Sequence
  Description of Artificial Sequence: Synthetic oligonucleotide
uccguccuucacacaguga

SEQ ID NO: 130443 - RNA, 19 nt, Artificial Sequence
  Description of Artificial Sequence: Synthetic oligonucleotide
gcguuugguaucguagggg

SEQ ID NO: 130444 - RNA, 19 nt, Artificial Sequence
  Description of Artificial Sequence: Synthetic oligonucleotide
ucagacggucugaggugcu

SEQ ID NO: 130445 - RNA, 19 nt, Artificial Sequence
  Description of Artificial Sequence: Synthetic oligonucleotide
guucagaccgaggagauuu

SEQ ID NO: 130446 - RNA, 19 nt, Artificial Sequence
  Description of Artificial Sequence: Synthetic oligonucleotide
uggagcggacggcuuagua

SEQ ID NO: 130447 - RNA, 19 nt, Artificial Sequence
  Description of Artificial Sequence: Synthetic oligonucleotide
agcucacaauucuguacaa

SEQ ID NO: 130448 - RNA, 19 nt, Artificial Sequence
  Description of Artificial Sequence: Synthetic oligonucleotide
cuucacaugagcguuuggu

SEQ ID NO: 130449 - RNA, 19 nt, Artificial Sequence
  Description of Artificial Sequence: Synthetic oligonucleotide
cuccaccccaacuaauuaa

SEQ ID NO: 130450 - RNA, 19 nt, Artificial Sequence
  Description of Artificial Sequence: Synthetic oligonucleotide
uuuucacgcuccccaucua

SEQ ID NO: 130451 - RNA, 19 nt, Artificial Sequence
  Description of Artificial Sequence: Synthetic oligonucleotide
ugccaccuagauuucuauu

SEQ ID NO: 130452 - RNA, 19 nt, Artificial Sequence
  Description of Artificial Sequence: Synthetic oligonucleotide
ugcuauggcuucgggucug

SEQ ID NO: 130453 - RNA, 19 nt, Artificial Sequence
  Description of Artificial Sequence: Synthetic oligonucleotide
acggggcuguaaugaguuc

SEQ ID NO: 130454 - RNA, 19 nt, Artificial Sequence
  Description of Artificial Sequence: Synthetic oligonucleotide
gggugaauuucugauauua

SEQ ID NO: 130455 - RNA, 19 nt, Artificial Sequence
  Description of Artificial Sequence: Synthetic oligonucleotide
ucuggauagcugccaccua

SEQ ID NO: 130456 - RNA, 19 nt, Artificial Sequence
  Description of Artificial Sequence: Synthetic oligonucleotide
accgagugcucccugucuu

SEQ ID NO: 130457 - RNA, 19 nt, Artificial Sequence
  Description of Artificial Sequence: Synthetic oligonucleotide
ccagcuacuuuccgcuugg

SEQ ID NO: 130458 - RNA, 19 nt, Artificial Sequence
  Description of Artificial Sequence: Synthetic oligonucleotide
guuuauccgaaguccuggu

SEQ ID NO: 130459 - RNA, 19 nt, Artificial Sequence
  Description of Artificial Sequence: Synthetic oligonucleotide
cccguuucuagccucagca

SEQ ID NO: 130460 - RNA, 19 nt, Artificial Sequence
  Description of Artificial Sequence: Synthetic oligonucleotide
acgcuccccaucuacuuuu

SEQ ID NO: 130461 - RNA, 19 nt, Artificial Sequence
  Description of Artificial Sequence: Synthetic oligonucleotide
gcugcuacguucaagcucu

SEQ ID NO: 130462 - RNA, 19 nt, Artificial Sequence
  Description of Artificial Sequence: Synthetic oligonucleotide
caucuacuuuucuuggggu

SEQ ID NO: 130463 - RNA, 19 nt, Artificial Sequence
  Description of Artificial Sequence: Synthetic oligonucleotide
gacggucugaggugcucuc

SEQ ID NO: 130464 - RNA, 19 nt, Artificial Sequence
  Description of Artificial Sequence: Synthetic oligonucleotide
ugacugaacugggguuuug

SEQ ID NO: 130465 - RNA, 19 nt, Artificial Sequence
  Description of Artificial Sequence: Synthetic oligonucleotide
ggaaucucuuuacauuaua

SEQ ID NO: 130466 - RNA, 19 nt, Artificial Sequence
  Description of Artificial Sequence: Synthetic oligonucleotide
uuaugaucaugaggcuuuu

SEQ ID NO: 130467 - RNA, 19 nt, Artificial Sequence
  Description of Artificial Sequence: Synthetic oligonucleotide
cucuacuugggagaacaaa

SEQ ID NO: 130468 - RNA, 19 nt, Artificial Sequence
  Description of Artificial Sequence: Synthetic oligonucleotide
ccaccuagauuucuauuuc

SEQ ID NO: 130469 - RNA, 19 nt, Artificial Sequence
  Description of Artificial Sequence: Synthetic oligonucleotide
ucuuuaccucgaggaggag

SEQ ID NO: 130470 - RNA, 19 nt, Artificial Sequence
  Description of Artificial Sequence: Synthetic oligonucleotide
ucgggucuggcugccagaa

SEQ ID NO: 130471 - RNA, 19 nt, Artificial Sequence
  Description of Artificial Sequence: Synthetic oligonucleotide
agacggucugaggugcucu

SEQ ID NO: 130472 - RNA, 19 nt, Artificial Sequence
  Description of Artificial Sequence: Synthetic oligonucleotide
ugcuacguucaagcucucu

SEQ ID NO: 130473 - RNA, 19 nt, Artificial Sequence
  Description of Artificial Sequence: Synthetic oligonucleotide
ucguuauagucugguucaa

SEQ ID NO: 130474 - RNA, 19 nt, Artificial Sequence
  Description of Artificial Sequence: Synthetic oligonucleotide
gucgcucucguuauagucu

SEQ ID NO: 130475 - RNA, 19 nt, Artificial Sequence
  Description of Artificial Sequence: Synthetic oligonucleotide
ggacuaauacuggggcugc

SEQ ID NO: 130476 - RNA, 19 nt, Artificial Sequence
  Description of Artificial Sequence: Synthetic oligonucleotide
cugcgcccucuugugaagg

SEQ ID NO: 130477 - RNA, 19 nt, Artificial Sequence
  Description of Artificial Sequence: Synthetic oligonucleotide
ggggcuguaaugaguucag

SEQ ID NO: 130478 - RNA, 19 nt, Artificial Sequence
  Description of Artificial Sequence: Synthetic oligonucleotide
agggugaauuucugauauu

SEQ ID NO: 130479 - RNA, 19 nt, Artificial Sequence
  Description of Artificial Sequence: Synthetic oligonucleotide
gacuuccgcacaggacugc

SEQ ID NO: 130480 - RNA, 19 nt, Artificial Sequence
  Description of Artificial Sequence: Synthetic oligonucleotide
cucugcgcccucuugugaa

SEQ ID NO: 130481 - RNA, 19 nt, Artificial Sequence
  Description of Artificial Sequence: Synthetic oligonucleotide
gguuagguauauacggcaa

SEQ ID NO: 130482 - RNA, 19 nt, Artificial Sequence
  Description of Artificial Sequence: Synthetic oligonucleotide
cucucccauucucgguagc

SEQ ID NO: 130483 - RNA, 19 nt, Artificial Sequence
  Description of Artificial Sequence: Synthetic oligonucleotide
caccuagauuucuauuucu

SEQ ID NO: 130484 - RNA, 19 nt, Artificial Sequence
  Description of Artificial Sequence: Synthetic oligonucleotide
cugaggugcucuccuucuc

SEQ ID NO: 130485 - RNA, 19 nt, Artificial Sequence
  Description of Artificial Sequence: Synthetic oligonucleotide
aggcccuagcaaaaccucu

SEQ ID NO: 130486 - RNA, 19 nt, Artificial Sequence
  Description of Artificial Sequence: Synthetic oligonucleotide
cacgaacagauucauguuu

SEQ ID NO: 130487 - RNA, 19 nt, Artificial Sequence
  Description of Artificial Sequence: Synthetic oligonucleotide
gcaacuugccaccacuacu

SEQ ID NO: 130488 - RNA, 19 nt, Artificial Sequence
  Description of Artificial Sequence: Synthetic oligonucleotide
cucuucgcuuggaacuaga

SEQ ID NO: 130489 - RNA, 19 nt, Artificial Sequence
  Description of Artificial Sequence: Synthetic oligonucleotide
cuucgcuuggaacuagaau

SEQ ID NO: 130490 - RNA, 19 nt, Artificial Sequence
  Description of Artificial Sequence: Synthetic oligonucleotide
ccguuucuagccucagcag

SEQ ID NO: 130491 - RNA, 19 nt, Artificial Sequence
  Description of Artificial Sequence: Synthetic oligonucleotide
cuacguucaagcucucuuu

SEQ ID NO: 130492 - RNA, 19 nt, Artificial Sequence
  Description of Artificial Sequence: Synthetic oligonucleotide
gccaccuagauuucuauuu

SEQ ID NO: 130493 - RNA, 19 nt, Artificial Sequence
  Description of Artificial Sequence: Synthetic oligonucleotide
cuacuggacucuuucccgu

SEQ ID NO: 130494 - RNA, 19 nt, Artificial Sequence
  Description of Artificial Sequence: Synthetic oligonucleotide
gucuaggcuguguccccac

SEQ ID NO: 130495 - RNA, 19 nt, Artificial Sequence
  Description of Artificial Sequence: Synthetic oligonucleotide
gguucaggaagcucucacu

SEQ ID NO: 130496 - RNA, 19 nt, Artificial Sequence
  Description of Artificial Sequence: Synthetic oligonucleotide
guuuuggcuugauggugcu

SEQ ID NO: 130497 - RNA, 19 nt, Artificial Sequence
  Description of Artificial Sequence: Synthetic oligonucleotide
uccgaaguccuggucucuu

SEQ ID NO: 130498 - RNA, 19 nt, Artificial Sequence
  Description of Artificial Sequence: Synthetic oligonucleotide
cuuucuucuucuucuucuu

SEQ ID NO: 130499 - RNA, 19 nt, Artificial Sequence
  Description of Artificial Sequence: Synthetic oligonucleotide
uuccagcuacuuuccgcuu

SEQ ID NO: 130500 - RNA, 19 nt, Artificial Sequence
  Description of Artificial Sequence: Synthetic oligonucleotide
cccuaacagguguagcauc

SEQ ID NO: 130501 - RNA, 19 nt, Artificial Sequence
  Description of Artificial Sequence: Synthetic oligonucleotide
cuagaugguuucccuacau

SEQ ID NO: 130502 - RNA, 19 nt, Artificial Sequence
  Description of Artificial Sequence: Synthetic oligonucleotide
guacuugacuggagcggac

SEQ ID NO: 130503 - RNA, 19 nt, Artificial Sequence
  Description of Artificial Sequence: Synthetic oligonucleotide
gcaucgucucuacuuggga

SEQ ID NO: 130504 - RNA, 19 nt, Artificial Sequence
  Description of Artificial Sequence: Synthetic oligonucleotide
uuaccucgaggaggagagu

SEQ ID NO: 130505 - RNA, 19 nt, Artificial Sequence
  Description of Artificial Sequence: Synthetic oligonucleotide
cucuguuagcugagggucu

SEQ ID NO: 130506 - RNA, 19 nt, Artificial Sequence
  Description of Artificial Sequence: Synthetic oligonucleotide
ccaccccaacuaauuaaug

SEQ ID NO: 130507 - RNA, 19 nt, Artificial Sequence
  Description of Artificial Sequence: Synthetic oligonucleotide
cacuuuuccguuuggucuu

SEQ ID NO: 130508 - RNA, 19 nt, Artificial Sequence
  Description of Artificial Sequence: Synthetic oligonucleotide
auacggcaacuugccacca

SEQ ID NO: 130509 - RNA, 19 nt, Artificial Sequence
  Description of Artificial Sequence: Synthetic oligonucleotide
gcuacguucaagcucucuu

SEQ ID NO: 130510 - RNA, 19 nt, Artificial Sequence
  Description of Artificial Sequence: Synthetic oligonucleotide
gucucuucacaugagcguu

SEQ ID NO: 130511 - RNA, 19 nt, Artificial Sequence
  Description of Artificial Sequence: Synthetic oligonucleotide
ugcauccuucugagacgau

SEQ ID NO: 130512 - RNA, 19 nt, Artificial Sequence
  Description of Artificial Sequence: Synthetic oligonucleotide
caacuaauuaauggugguu

SEQ ID NO: 130513 - RNA, 19 nt, Artificial Sequence
  Description of Artificial Sequence: Synthetic oligonucleotide
ccucucccauucucgguag

SEQ ID NO: 130514 - RNA, 19 nt, Artificial Sequence
  Description of Artificial Sequence: Synthetic oligonucleotide
gcccuagcaaaaccucuca

SEQ ID NO: 130515 - RNA, 19 nt, Artificial Sequence
  Description of Artificial Sequence: Synthetic oligonucleotide
cacucucgguauuuccucu

SEQ ID NO: 130516 - RNA, 19 nt, Artificial Sequence
  Description of Artificial Sequence: Synthetic oligonucleotide
ggcccuagcaaaaccucuc

SEQ ID NO: 130517 - RNA, 19 nt, Artificial Sequence
  Description of Artificial Sequence: Synthetic oligonucleotide
auuucguggcucaccucuu

SEQ ID NO: 130518 - RNA, 19 nt, Artificial Sequence
  Description of Artificial Sequence: Synthetic oligonucleotide
ggcuuaccuuucuguccag

SEQ ID NO: 130519 - RNA, 19 nt, Artificial Sequence
  Description of Artificial Sequence: Synthetic oligonucleotide
cagacggucugaggugcuc

SEQ ID NO: 130520 - RNA, 19 nt, Artificial Sequence
  Description of Artificial Sequence: Synthetic oligonucleotide
gcuauggcuucgggucugg

SEQ ID NO: 130521 - RNA, 19 nt, Artificial Sequence
  Description of Artificial Sequence: Synthetic oligonucleotide
ggacggcuuaguaguaaca

SEQ ID NO: 130522 - RNA, 19 nt, Artificial Sequence
  Description of Artificial Sequence: Synthetic oligonucleotide
cggacggcuuaguaguaac

SEQ ID NO: 130523 - RNA, 19 nt, Artificial Sequence
  Description of Artificial Sequence: Synthetic oligonucleotide
cagcuacuuuccgcuuggc

SEQ ID NO: 130524 - RNA, 19 nt, Artificial Sequence
  Description of Artificial Sequence: Synthetic oligonucleotide
cauaccacucucgguauuu

SEQ ID NO: 130525 - RNA, 19 nt, Artificial Sequence
  Description of Artificial Sequence: Synthetic oligonucleotide
cuaacaccgagugcucccu

SEQ ID NO: 130526 - RNA, 19 nt, Artificial Sequence
  Description of Artificial Sequence: Synthetic oligonucleotide
cugagacgaugaugaaggu

SEQ ID NO: 130527 - RNA, 19 nt, Artificial Sequence
  Description of Artificial Sequence: Synthetic oligonucleotide
cugcuauggcuucgggucu

SEQ ID NO: 130528 - RNA, 19 nt, Artificial Sequence
  Description of Artificial Sequence: Synthetic oligonucleotide
gacuaauacuggggcugcu

SEQ ID NO: 130529 - RNA, 19 nt, Artificial Sequence
  Description of Artificial Sequence: Synthetic oligonucleotide
cgcccucuugugaagggug

SEQ ID NO: 130530 - RNA, 19 nt, Artificial Sequence
  Description of Artificial Sequence: Synthetic oligonucleotide
cugccaccuagauuucuau

SEQ ID NO: 130531 - RNA, 19 nt, Artificial Sequence
  Description of Artificial Sequence: Synthetic oligonucleotide
cuaacagguguagcaucgu

SEQ ID NO: 130532 - RNA, 19 nt, Artificial Sequence
  Description of Artificial Sequence: Synthetic oligonucleotide
cugcugcuacguucaagcu

SEQ ID NO: 130533 - RNA, 19 nt, Artificial Sequence
  Description of Artificial Sequence: Synthetic oligonucleotide
ggucuaggcugugucccca

SEQ ID NO: 130534 - RNA, 19 nt, Artificial Sequence
  Description of Artificial Sequence: Synthetic oligonucleotide
guguagcaucgucucuacu

SEQ ID NO: 130535 - RNA, 19 nt, Artificial Sequence
  Description of Artificial Sequence: Synthetic oligonucleotide
cucucguuauagucugguu

SEQ ID NO: 130536 - RNA, 19 nt, Artificial Sequence
  Description of Artificial Sequence: Synthetic oligonucleotide
gcucucguuauagucuggu

SEQ ID NO: 130537 - RNA, 19 nt, Artificial Sequence
  Description of Artificial Sequence: Synthetic oligonucleotide
ggacugccuccaguugagc

SEQ ID NO: 130538 - RNA, 19 nt, Artificial Sequence
  Description of Artificial Sequence: Synthetic oligonucleotide
gcugcgucauuucguggcu

SEQ ID NO: 130539 - RNA, 19 nt, Artificial Sequence
  Description of Artificial Sequence: Synthetic oligonucleotide
gcgucggccucugcacccg

SEQ ID NO: 130540 - RNA, 19 nt, Artificial Sequence
  Description of Artificial Sequence: Synthetic oligonucleotide
gcccucuugugaaggguga

SEQ ID NO: 130541 - RNA, 19 nt, Artificial Sequence
  Description of Artificial Sequence: Synthetic oligonucleotide
cagacacguuacucucacu

SEQ ID NO: 130542 - RNA, 19 nt, Artificial Sequence
  Description of Artificial Sequence: Synthetic oligonucleotide
cgcucucguuauagucugg

SEQ ID NO: 130543 - RNA, 19 nt, Artificial Sequence
  Description of Artificial Sequence: Synthetic oligonucleotide
agcggacggcuuaguagua

SEQ ID NO: 130544 - RNA, 19 nt, Artificial Sequence
  Description of Artificial Sequence: Synthetic oligonucleotide
cacgcuccccaucuacuuu

SEQ ID NO: 130545 - RNA, 19 nt, Artificial Sequence
  Description of Artificial Sequence: Synthetic oligonucleotide
gucggccucugcacccgca

SEQ ID NO: 130546 - RNA, 19 nt, Artificial Sequence
  Description of Artificial Sequence: Synthetic oligonucleotide
gcgucauuucguggcucac

SEQ ID NO: 130547 - RNA, 19 nt, Artificial Sequence
  Description of Artificial Sequence: Synthetic oligonucleotide
cugagggucuaggcugugu

SEQ ID NO: 130548 - RNA, 19 nt, Artificial Sequence
  Description of Artificial Sequence: Synthetic oligonucleotide
ccuuguucacucagacggu

SEQ ID NO: 130549 - RNA, 19 nt, Artificial Sequence
  Description of Artificial Sequence: Synthetic oligonucleotide
cacugucgcucucguuaua

SEQ ID NO: 130550 - RNA, 19 nt, Artificial Sequence
  Description of Artificial Sequence: Synthetic oligonucleotide
gcggacggcuuaguaguaa

SEQ ID NO: 130551 - RNA, 19 nt, Artificial Sequence
  Description of Artificial Sequence: Synthetic oligonucleotide
gucgucucugcgcccucuu

SEQ ID NO: 130552 - RNA, 19 nt, Artificial Sequence
  Description of Artificial Sequence: Synthetic oligonucleotide
cugguggguuagguauaua

SEQ ID NO: 130553 - RNA, 19 nt, Artificial Sequence
  Description of Artificial Sequence: Synthetic oligonucleotide
ggauuuccuggaggucucu

SEQ ID NO: 130554 - RNA, 19 nt, Artificial Sequence
  Description of Artificial Sequence: Synthetic oligonucleotide
caugagcguuugguaucgu

SEQ ID NO: 130555 - RNA, 19 nt, Artificial Sequence
  Description of Artificial Sequence: Synthetic oligonucleotide
cccuagcaaaaccucucau

SEQ ID NO: 130556 - RNA, 19 nt, Artificial Sequence
  Description of Artificial Sequence: Synthetic oligonucleotide
cgucucuacuugggagaac

SEQ ID NO: 130557 - RNA, 19 nt, Artificial Sequence
  Description of Artificial Sequence: Synthetic oligonucleotide
gguucagaccgaggagauu

SEQ ID NO: 130558 - RNA, 19 nt, Artificial Sequence
  Description of Artificial Sequence: Synthetic oligonucleotide
gcgcccucuugugaagggu

SEQ ID NO: 130559 - RNA, 19 nt, Artificial Sequence
  Description of Artificial Sequence: Synthetic oligonucleotide
cgguagcguucuuucucaa

SEQ ID NO: 130560 - RNA, 19 nt, Artificial Sequence
  Description of Artificial Sequence: Synthetic oligonucleotide
ccgcaugcuucuugugcuu

SEQ ID NO: 130561 - RNA, 19 nt, Artificial Sequence
  Description of Artificial Sequence: Synthetic oligonucleotide
ccguuccuucccagaguuu

SEQ ID NO: 130562 - RNA, 19 nt, Artificial Sequence
  Description of Artificial Sequence: Synthetic oligonucleotide
gauuguaugaccuauagug

SEQ ID NO: 130563 - RNA, 19 nt, Artificial Sequence
  Description of Artificial Sequence: Synthetic oligonucleotide
aaugcagcuagauugcccc

SEQ ID NO: 130564 - RNA, 19 nt, Artificial Sequence
  Description of Artificial Sequence: Synthetic oligonucleotide
gaauuuagccaauauaggg

SEQ ID NO: 130565 - RNA, 19 nt, Artificial Sequence
  Description of Artificial Sequence: Synthetic oligonucleotide
aauuuagccaauauagggc

SEQ ID NO: 130566 - RNA, 19 nt, Artificial Sequence
  Description of Artificial Sequence: Synthetic oligonucleotide
auaaauuuggucccguggc

SEQ ID NO: 130567 - RNA, 19 nt, Artificial Sequence
  Description of Artificial Sequence: Synthetic oligonucleotide
aacuuugcaaaucacagga

SEQ ID NO: 130568 - RNA, 19 nt, Artificial Sequence
  Description of Artificial Sequence: Synthetic oligonucleotide
aacaugaacuaacaugggg

SEQ ID NO: 130569 - RNA, 19 nt, Artificial Sequence
  Description of Artificial Sequence: Synthetic oligonucleotide
acuaauaucucuaauagug

SEQ ID NO: 130570 - RNA, 19 nt, Artificial Sequence
  Description of Artificial Sequence: Synthetic oligonucleotide
aauauagggcagcucaccg

SEQ ID NO: 130571 - RNA, 19 nt, Artificial Sequence
  Description of Artificial Sequence: Synthetic oligonucleotide
cuagaauauauaauacugg

SEQ ID NO: 130572 - RNA, 19 nt, Artificial Sequence
  Description of Artificial Sequence: Synthetic oligonucleotide
gauaaauuuggucccgugg

SEQ ID NO: 130573 - RNA, 19 nt, Artificial Sequence
  Description of Artificial Sequence: Synthetic oligonucleotide
aaauucuaaccuucucccc

SEQ ID NO: 130574 - RNA, 19 nt, Artificial Sequence
  Description of Artificial Sequence: Synthetic oligonucleotide
aaugcauauaagauucccc

SEQ ID NO: 130575 - RNA, 19 nt, Artificial Sequence
  Description of Artificial Sequence: Synthetic oligonucleotide
agcuaaaauuaucuugucc

SEQ ID NO: 130576 - RNA, 19 nt, Artificial Sequence
  Description of Artificial Sequence: Synthetic oligonucleotide
aaagcuagguugaaugugc

SEQ ID NO: 130577 - RNA, 19 nt, Artificial Sequence
  Description of Artificial Sequence: Synthetic oligonucleotide
cauaaaccuaaccugauag

SEQ ID NO: 130578 - RNA, 19 nt, Artificial Sequence
  Description of Artificial Sequence: Synthetic oligonucleotide
ugaacuaacauggggauag

SEQ ID NO: 130579 - RNA, 19 nt, Artificial Sequence
  Description of Artificial Sequence: Synthetic oligonucleotide
uuggcacugaaauagaaca

SEQ ID NO: 130580 - RNA, 19 nt, Artificial Sequence
  Description of Artificial Sequence: Synthetic oligonucleotide
auagaacacagauugagca

SEQ ID NO: 130581 - RNA, 19 nt, Artificial Sequence
  Description of Artificial Sequence: Synthetic oligonucleotide
aucacuagaauauauaaua

SEQ ID NO: 130582 - RNA, 19 nt, Artificial Sequence
  Description of Artificial Sequence: Synthetic oligonucleotide
agucccuaaacacugggac

SEQ ID NO: 130583 - RNA, 19 nt, Artificial Sequence
  Description of Artificial Sequence: Synthetic oligonucleotide
aggacucuauucuagaaag

SEQ ID NO: 130584 - RNA, 19 nt, Artificial Sequence
  Description of Artificial Sequence: Synthetic oligonucleotide
uguuaguuaggcaaaacua

SEQ ID NO: 130585 - RNA, 19 nt, Artificial Sequence
  Description of Artificial Sequence: Synthetic oligonucleotide
auagccuuacccauaaacc

SEQ ID NO: 130586 - RNA, 19 nt, Artificial Sequence
  Description of Artificial Sequence: Synthetic oligonucleotide
aauaucgaguuagauauca

SEQ ID NO: 130587 - RNA, 19 nt, Artificial Sequence
  Description of Artificial Sequence: Synthetic oligonucleotide
cuuguuaauccgaagccgg

SEQ ID NO: 130588 - RNA, 19 nt, Artificial Sequence
  Description of Artificial Sequence: Synthetic oligonucleotide
ucuugagcgaucuugagau

SEQ ID NO: 130589 - RNA, 19 nt, Artificial Sequence
  Description of Artificial Sequence: Synthetic oligonucleotide
aguuaggcaaaacuauagg

SEQ ID NO: 130590 - RNA, 19 nt, Artificial Sequence
  Description of Artificial Sequence: Synthetic oligonucleotide
gauagccuuacccauaaac

SEQ ID NO: 130591 - RNA, 19 nt, Artificial Sequence
  Description of Artificial Sequence: Synthetic oligonucleotide
uuuaggugcaacuggcuag

SEQ ID NO: 130592 - RNA, 19 nt, Artificial Sequence
  Description of Artificial Sequence: Synthetic oligonucleotide
aguuuagaacucuuggcag

SEQ ID NO: 130593 - RNA, 19 nt, Artificial Sequence
  Description of Artificial Sequence: Synthetic oligonucleotide
cauauaagauuccccaagg

SEQ ID NO: 130594 - RNA, 19 nt, Artificial Sequence
  Description of Artificial Sequence: Synthetic oligonucleotide
uauagggcagcucaccgag

SEQ ID NO: 130595 - RNA, 19 nt, Artificial Sequence
  Description of Artificial Sequence: Synthetic oligonucleotide
auuuagccaauauagggca

SEQ ID NO: 130596 - RNA, 19 nt, Artificial Sequence
  Description of Artificial Sequence: Synthetic oligonucleotide
aguucuagggcccuacggg

SEQ ID NO: 130597 - RNA, 19 nt, Artificial Sequence
  Description of Artificial Sequence: Synthetic oligonucleotide
auaucacuagaauauauaa

SEQ ID NO: 130598 - RNA, 19 nt, Artificial Sequence
  Description of Artificial Sequence: Synthetic oligonucleotide
uggauuguaugaccuauag

SEQ ID NO: 130599 - RNA, 19 nt, Artificial Sequence
  Description of Artificial Sequence: Synthetic oligonucleotide
ucacuagaauauauaauac

SEQ ID NO: 130600 - RNA, 19 nt, Artificial Sequence
  Description of Artificial Sequence: Synthetic oligonucleotide
uugcccuuaaugcagcuag

SEQ ID NO: 130601 - RNA, 19 nt, Artificial Sequence
  Description of Artificial Sequence: Synthetic oligonucleotide
ucuuguuaauccgaagccg

SEQ ID NO: 130602 - RNA, 19 nt, Artificial Sequence
  Description of Artificial Sequence: Synthetic oligonucleotide
acaacuagugaugagaccu

SEQ ID NO: 130603 - RNA, 19 nt, Artificial Sequence
  Description of Artificial Sequence: Synthetic oligonucleotide
uauaagauuccccaagguu

SEQ ID NO: 130604 - RNA, 19 nt, Artificial Sequence
  Description of Artificial Sequence: Synthetic oligonucleotide
agugguacgcuccucuucg

SEQ ID NO: 130605 - RNA, 19 nt, Artificial Sequence
  Description of Artificial Sequence: Synthetic oligonucleotide
ucuauucuagaaagcuagg

SEQ ID NO: 130606 - RNA, 19 nt, Artificial Sequence
  Description of Artificial Sequence: Synthetic oligonucleotide
aacugagagauccgugagg

SEQ ID NO: 130607 - RNA, 19 nt, Artificial Sequence
  Description of Artificial Sequence: Synthetic oligonucleotide
uuacucuuacucaucauaa

SEQ ID NO: 130608 - RNA, 19 nt, Artificial Sequence
  Description of Artificial Sequence: Synthetic oligonucleotide
uguauguagcuccaaggga

SEQ ID NO: 130609 - RNA, 19 nt, Artificial Sequence
  Description of Artificial Sequence: Synthetic oligonucleotide
aacuaacauggggauagcc

SEQ ID NO: 130610 - RNA, 19 nt, Artificial Sequence
  Description of Artificial Sequence: Synthetic oligonucleotide
acaugagguguacucaugg

SEQ ID NO: 130611 - RNA, 19 nt, Artificial Sequence
  Description of Artificial Sequence: Synthetic oligonucleotide
augcauauaagauucccca

SEQ ID NO: 130612 - RNA, 19 nt, Artificial Sequence
  Description of Artificial Sequence: Synthetic oligonucleotide
ucgaguuagauaucacuag

SEQ ID NO: 130613 - RNA, 19 nt, Artificial Sequence
  Description of Artificial Sequence: Synthetic oligonucleotide
ucuaauagugcguuagcaa

SEQ ID NO: 130614 - RNA, 19 nt, Artificial Sequence
  Description of Artificial Sequence: Synthetic oligonucleotide
uauucuagaaagcuagguu

SEQ ID NO: 130615 - RNA, 19 nt, Artificial Sequence
  Description of Artificial Sequence: Synthetic oligonucleotide
uaccauuugggccuuuugc

SEQ ID NO: 130616 - RNA, 19 nt, Artificial Sequence
  Description of Artificial Sequence: Synthetic oligonucleotide
uucuagaaagcuagguuga

SEQ ID NO: 130617 - RNA, 19 nt, Artificial Sequence
  Description of Artificial Sequence: Synthetic oligonucleotide
uaucgaguuagauaucacu

SEQ ID NO: 130618 - RNA, 19 nt, Artificial Sequence
  Description of Artificial Sequence: Synthetic oligonucleotide
uuguaugaccuauagugac

SEQ ID NO: 130619 - RNA, 19 nt, Artificial Sequence
  Description of Artificial Sequence: Synthetic oligonucleotide
ucaauaggcuugaugacaa

SEQ ID NO: 130620 - RNA, 19 nt, Artificial Sequence
  Description of Artificial Sequence: Synthetic oligonucleotide
uaucacuagaauauauaau

SEQ ID NO: 130621 - RNA, 19 nt, Artificial Sequence
  Description of Artificial Sequence: Synthetic oligonucleotide
ugaaauguucacaccguac

SEQ ID NO: 130622 - RNA, 19 nt, Artificial Sequence
  Description of Artificial Sequence: Synthetic oligonucleotide
cagguauaagcauuucucc

SEQ ID NO: 130623 - RNA, 19 nt, Artificial Sequence
  Description of Artificial Sequence: Synthetic oligonucleotide
auugagcauaaaccccucc

SEQ ID NO: 130624 - RNA, 19 nt, Artificial Sequence
  Description of Artificial Sequence: Synthetic oligonucleotide
cucuuguuaauccgaagcc

SEQ ID NO: 130625 - RNA, 19 nt, Artificial Sequence
  Description of Artificial Sequence: Synthetic oligonucleotide
guuagauaucacuagaaua

SEQ ID NO: 130626 - RNA, 19 nt, Artificial Sequence
  Description of Artificial Sequence: Synthetic oligonucleotide
uguaugaccuauagugaca

SEQ ID NO: 130627 - RNA, 19 nt, Artificial Sequence
  Description of Artificial Sequence: Synthetic oligonucleotide
uaaaccuaaccugauagaa

SEQ ID NO: 130628 - RNA, 19 nt, Artificial Sequence
  Description of Artificial Sequence: Synthetic oligonucleotide
uuguuaauccgaagccggg

SEQ ID NO: 130629 - RNA, 19 nt, Artificial Sequence
  Description of Artificial Sequence: Synthetic oligonucleotide
cugaauuaguaaugggccc

SEQ ID NO: 130630 - RNA, 19 nt, Artificial Sequence
  Description of Artificial Sequence: Synthetic oligonucleotide
auaguauauauuucccaga

SEQ ID NO: 130631 - RNA, 19 nt, Artificial Sequence
  Description of Artificial Sequence: Synthetic oligonucleotide
uuaguuaggcaaaacuaua

SEQ ID NO: 130632 - RNA, 19 nt, Artificial Sequence
  Description of Artificial Sequence: Synthetic oligonucleotide
guucacaccguacaucucc

SEQ ID NO: 130633 - RNA, 19 nt, Artificial Sequence
  Description of Artificial Sequence: Synthetic oligonucleotide
gugagaguuacucuuacuc

SEQ ID NO: 130634 - RNA, 19 nt, Artificial Sequence
  Description of Artificial Sequence: Synthetic oligonucleotide
aguuagauaucacuagaau

SEQ ID NO: 130635 - RNA, 19 nt, Artificial Sequence
  Description of Artificial Sequence: Synthetic oligonucleotide
ugaauuaguaaugggccca

SEQ ID NO: 130636 - RNA, 19 nt, Artificial Sequence
  Description of Artificial Sequence: Synthetic oligonucleotide
agacggagauuccauucgc

SEQ ID NO: 130637 - RNA, 19 nt, Artificial Sequence
  Description of Artificial Sequence: Synthetic oligonucleotide
uggugucaggcuuacgccg

SEQ ID NO: 130638 - RNA, 19 nt, Artificial Sequence
  Description of Artificial Sequence: Synthetic oligonucleotide
uaaugcagcuagauugccc

SEQ ID NO: 130639 - RNA, 19 nt, Artificial Sequence
  Description of Artificial Sequence: Synthetic oligonucleotide
uacuucugucccuaaacca

SEQ ID NO: 130640 - RNA, 19 nt, Artificial Sequence
  Description of Artificial Sequence: Synthetic oligonucleotide
uaagauuccccaagguuaa

SEQ ID NO: 130641 - RNA, 19 nt, Artificial Sequence
  Description of Artificial Sequence: Synthetic oligonucleotide
uucucuuuacccuccaauc

SEQ ID NO: 130642 - RNA, 19 nt, Artificial Sequence
  Description of Artificial Sequence: Synthetic oligonucleotide
uaauagugcguuagcaaaa

SEQ ID NO: 130643 - RNA, 19 nt, Artificial Sequence
  Description of Artificial Sequence: Synthetic oligonucleotide
uguuaauccgaagccgggg

SEQ ID NO: 130644 - RNA, 19 nt, Artificial Sequence
  Description of Artificial Sequence: Synthetic oligonucleotide
cuuacccauaaaccuaacc

SEQ ID NO: 130645 - RNA, 19 nt, Artificial Sequence
  Description of Artificial Sequence: Synthetic oligonucleotide
ucaccgagugucaauacaa

SEQ ID NO: 130646 - RNA, 19 nt, Artificial Sequence
  Description of Artificial Sequence: Synthetic oligonucleotide
augagguguacucauggca

SEQ ID NO: 130647 - RNA, 19 nt, Artificial Sequence
  Description of Artificial Sequence: Synthetic oligonucleotide
aucucuaauagugcguuag

SEQ ID NO: 130648 - RNA, 19 nt, Artificial Sequence
  Description of Artificial Sequence: Synthetic oligonucleotide
auaagauuccccaagguua

SEQ ID NO: 130649 - RNA, 19 nt, Artificial Sequence
  Description of Artificial Sequence: Synthetic oligonucleotide
uuucggcugaauuaguaau

SEQ ID NO: 130650 - RNA, 19 nt, Artificial Sequence
  Description of Artificial Sequence: Synthetic oligonucleotide
uuaggugcaacuggcuagg

SEQ ID NO: 130651 - RNA, 19 nt, Artificial Sequence
  Description of Artificial Sequence: Synthetic oligonucleotide
uguuagugugcucucucga

SEQ ID NO: 130652 - RNA, 19 nt, Artificial Sequence
  Description of Artificial Sequence: Synthetic oligonucleotide
aaauccuaggucagcugac

SEQ ID NO: 130653 - RNA, 19 nt, Artificial Sequence
  Description of Artificial Sequence: Synthetic oligonucleotide
cuaauagugcguuagcaaa

SEQ ID NO: 130654 - RNA, 19 nt, Artificial Sequence
  Description of Artificial Sequence: Synthetic oligonucleotide
auaaaccuaaccugauaga

SEQ ID NO: 130655 - RNA, 19 nt, Artificial Sequence
  Description of Artificial Sequence: Synthetic oligonucleotide
ucucuaauagugcguuagc

SEQ ID NO: 130656 - RNA, 19 nt, Artificial Sequence
  Description of Artificial Sequence: Synthetic oligonucleotide
ucucuguccuagcuggaag

SEQ ID NO: 130657 - RNA, 19 nt, Artificial Sequence
  Description of Artificial Sequence: Synthetic oligonucleotide
augaccuauagugacaggu

SEQ ID NO: 130658 - RNA, 19 nt, Artificial Sequence
  Description of Artificial Sequence: Synthetic oligonucleotide
uggcuauacugaaugcuug

SEQ ID NO: 130659 - RNA, 19 nt, Artificial Sequence
  Description of Artificial Sequence: Synthetic oligonucleotide
accacacaauaucauaacu

SEQ ID NO: 130660 - RNA, 19 nt, Artificial Sequence
  Description of Artificial Sequence: Synthetic oligonucleotide
caaugcauauaagauuccc

SEQ ID NO: 130661 - RNA, 19 nt, Artificial Sequence
  Description of Artificial Sequence: Synthetic oligonucleotide
guaugaccuauagugacag

SEQ ID NO: 130662 - RNA, 19 nt, Artificial Sequence
  Description of Artificial Sequence: Synthetic oligonucleotide
uauguagcuccaagggaca

SEQ ID NO: 130663 - RNA, 19 nt, Artificial Sequence
  Description of Artificial Sequence: Synthetic oligonucleotide
aagcuagguugaaugugcc

SEQ ID NO: 130664 - RNA, 19 nt, Artificial Sequence
  Description of Artificial Sequence: Synthetic oligonucleotide
gcauauaagauuccccaag

SEQ ID NO: 130665 - RNA, 19 nt, Artificial Sequence
  Description of Artificial Sequence: Synthetic oligonucleotide
gguugaaugugccagagaa

SEQ ID NO: 130666 - RNA, 19 nt, Artificial Sequence
  Description of Artificial Sequence: Synthetic oligonucleotide
uaaaauuaucuugucccaa

SEQ ID NO: 130667 - RNA, 19 nt, Artificial Sequence
  Description of Artificial Sequence: Synthetic oligonucleotide
aauuaguaaugggcccaac

SEQ ID NO: 130668 - RNA, 19 nt, Artificial Sequence
  Description of Artificial Sequence: Synthetic oligonucleotide
ugcucaaguucuagggccc

SEQ ID NO: 130669 - RNA, 19 nt, Artificial Sequence
  Description of Artificial Sequence: Synthetic oligonucleotide
gcuaaacuucucuuuaccc

SEQ ID NO: 130670 - RNA, 19 nt, Artificial Sequence
  Description of Artificial Sequence: Synthetic oligonucleotide
uuagugugcucucucgaau

SEQ ID NO: 130671 - RNA, 19 nt, Artificial Sequence
  Description of Artificial Sequence: Synthetic oligonucleotide
guuacucuuacucaucaua

SEQ ID NO: 130672 - RNA, 19 nt, Artificial Sequence
  Description of Artificial Sequence: Synthetic oligonucleotide
aaagccuaaauaacucuaa

SEQ ID NO: 130673 - RNA, 19 nt, Artificial Sequence
  Description of Artificial Sequence: Synthetic oligonucleotide
gauaucacuagaauauaua

SEQ ID NO: 130674 - RNA, 19 nt, Artificial Sequence
  Description of Artificial Sequence: Synthetic oligonucleotide
ugcauauaagauuccccaa

SEQ ID NO: 130675 - RNA, 19 nt, Artificial Sequence
  Description of Artificial Sequence: Synthetic oligonucleotide
auuguaugaccuauaguga

SEQ ID NO: 130676 - RNA, 19 nt, Artificial Sequence
  Description of Artificial Sequence: Synthetic oligonucleotide
gaacaugaacuaacauggg

SEQ ID NO: 130677 - RNA, 19 nt, Artificial Sequence
  Description of Artificial Sequence: Synthetic oligonucleotide
caugagguguacucauggc

SEQ ID NO: 130678 - RNA, 19 nt, Artificial Sequence
  Description of Artificial Sequence: Synthetic oligonucleotide
aagggccuuaagaugcuuc

SEQ ID NO: 130679 - RNA, 19 nt, Artificial Sequence
  Description of Artificial Sequence: Synthetic oligonucleotide
ccucuuguuaauccgaagc

SEQ ID NO: 130680 - RNA, 19 nt, Artificial Sequence
  Description of Artificial Sequence: Synthetic oligonucleotide
ugaccuauagugacaggua

SEQ ID NO: 130681 - RNA, 19 nt, Artificial Sequence
  Description of Artificial Sequence: Synthetic oligonucleotide
uugagcgaucuugagauau

SEQ ID NO: 130682 - RNA, 19 nt, Artificial Sequence
  Description of Artificial Sequence: Synthetic oligonucleotide
ggagauuccauucgcacca

SEQ ID NO: 130683 - RNA, 19 nt, Artificial Sequence
  Description of Artificial Sequence: Synthetic oligonucleotide
caauauagggcagcucacc

SEQ ID NO: 130684 - RNA, 19 nt, Artificial Sequence
  Description of Artificial Sequence: Synthetic oligonucleotide
ucuugucccaagacuaaua

SEQ ID NO: 130685 - RNA, 19 nt, Artificial Sequence
  Description of Artificial Sequence: Synthetic oligonucleotide
caauaucauaacuuugcaa

SEQ ID NO: 130686 - RNA, 19 nt, Artificial Sequence
  Description of Artificial Sequence: Synthetic oligonucleotide
gaccuauagugacagguaa

SEQ ID NO: 130687 - RNA, 19 nt, Artificial Sequence
  Description of Artificial Sequence: Synthetic oligonucleotide
cacaacuagugaugagacc

SEQ ID NO: 130688 - RNA, 19 nt, Artificial Sequence
  Description of Artificial Sequence: Synthetic oligonucleotide
acaccuuuaggugcaacug

SEQ ID NO: 130689 - RNA, 19 nt, Artificial Sequence
  Description of Artificial Sequence: Synthetic oligonucleotide
auaucgaguuagauaucac

SEQ ID NO: 130690 - RNA, 19 nt, Artificial Sequence
  Description of Artificial Sequence: Synthetic oligonucleotide
gucaauaggcuugaugaca

SEQ ID NO: 130691 - RNA, 19 nt, Artificial Sequence
  Description of Artificial Sequence: Synthetic oligonucleotide
aucgaguuagauaucacua

SEQ ID NO: 130692 - RNA, 19 nt, Artificial Sequence
  Description of Artificial Sequence: Synthetic oligonucleotide
uggcuaaacuucucuuuac

SEQ ID NO: 130693 - RNA, 19 nt, Artificial Sequence
  Description of Artificial Sequence: Synthetic oligonucleotide
ggcuaaacuucucuuuacc

SEQ ID NO: 130694 - RNA, 19 nt, Artificial Sequence
  Description of Artificial Sequence: Synthetic oligonucleotide
aauccgaagccggggagca

SEQ ID NO: 130695 - RNA, 19 nt, Artificial Sequence
  Description of Artificial Sequence: Synthetic oligonucleotide
gacuaauaucucuaauagu

SEQ ID NO: 130696 - RNA, 19 nt, Artificial Sequence
  Description of Artificial Sequence: Synthetic oligonucleotide
ccgagugucaauacaauuc

SEQ ID NO: 130697 - RNA, 19 nt, Artificial Sequence
  Description of Artificial Sequence: Synthetic oligonucleotide
cacuagaauauauaauacu

SEQ ID NO: 130698 - RNA, 19 nt, Artificial Sequence
  Description of Artificial Sequence: Synthetic oligonucleotide
gaagccggggagcauagaa

SEQ ID NO: 130699 - RNA, 19 nt, Artificial Sequence
  Description of Artificial Sequence: Synthetic oligonucleotide
uacucuuacucaucauaau

SEQ ID NO: 130700 - RNA, 19 nt, Artificial Sequence
  Description of Artificial Sequence: Synthetic oligonucleotide
gagaguuacucuuacucau

SEQ ID NO: 130701 - RNA, 19 nt, Artificial Sequence
  Description of Artificial Sequence: Synthetic oligonucleotide
gaguuagauaucacuagaa

SEQ ID NO: 130702 - RNA, 19 nt, Artificial Sequence
  Description of Artificial Sequence: Synthetic oligonucleotide
gaaaggugagaguuacucu

SEQ ID NO: 130703 - RNA, 19 nt, Artificial Sequence
  Description of Artificial Sequence: Synthetic oligonucleotide
gguuagggguacuggauug

SEQ ID NO: 130704 - RNA, 19 nt, Artificial Sequence
  Description of Artificial Sequence: Synthetic oligonucleotide
uggucccguggcuauacug

SEQ ID NO: 130705 - RNA, 19 nt, Artificial Sequence
  Description of Artificial Sequence: Synthetic oligonucleotide
guuaguuaggcaaaacuau

SEQ ID NO: 130706 - RNA, 19 nt, Artificial Sequence
  Description of Artificial Sequence: Synthetic oligonucleotide
auuaagaggccaaauccua

SEQ ID NO: 130707 - RNA, 19 nt, Artificial Sequence
  Description of Artificial Sequence: Synthetic oligonucleotide
ccaaucauuacaaagccua

SEQ ID NO: 130708 - RNA, 19 nt, Artificial Sequence
  Description of Artificial Sequence: Synthetic oligonucleotide
acuagugaugagaccuggg

SEQ ID NO: 130709 - RNA, 19 nt, Artificial Sequence
  Description of Artificial Sequence: Synthetic oligonucleotide
caaguucuagggcccuacg

SEQ ID NO: 130710 - RNA, 19 nt, Artificial Sequence
  Description of Artificial Sequence: Synthetic oligonucleotide
agugggccauuuguuugcc

SEQ ID NO: 130711 - RNA, 19 nt, Artificial Sequence
  Description of Artificial Sequence: Synthetic oligonucleotide
aaggggagauaaauuuggu

SEQ ID NO: 130712 - RNA, 19 nt, Artificial Sequence
  Description of Artificial Sequence: Synthetic oligonucleotide
agaaaucaauaucgaguua

SEQ ID NO: 130713 - RNA, 19 nt, Artificial Sequence
  Description of Artificial Sequence: Synthetic oligonucleotide
ccuaggucagcugacauac

SEQ ID NO: 130714 - RNA, 19 nt, Artificial Sequence
  Description of Artificial Sequence: Synthetic oligonucleotide
gcauaaaccccuccaaaca

SEQ ID NO: 130715 - RNA, 19 nt, Artificial Sequence
  Description of Artificial Sequence: Synthetic oligonucleotide
agaagacggagauuccauu

SEQ ID NO: 130716 - RNA, 19 nt, Artificial Sequence
  Description of Artificial Sequence: Synthetic oligonucleotide
accgagugucaauacaauu

SEQ ID NO: 130717 - RNA, 19 nt, Artificial Sequence
  Description of Artificial Sequence: Synthetic oligonucleotide
cucuaauagugcguuagca

SEQ ID NO: 130718 - RNA, 19 nt, Artificial Sequence
  Description of Artificial Sequence: Synthetic oligonucleotide
ucaggcuuacgccgacgca

SEQ ID NO: 130719 - RNA, 19 nt, Artificial Sequence
  Description of Artificial Sequence: Synthetic oligonucleotide
uggacauuaagaggccaaa

SEQ ID NO: 130720 - RNA, 19 nt, Artificial Sequence
  Description of Artificial Sequence: Synthetic oligonucleotide
uauugcccuuaaugcagcu

SEQ ID NO: 130721 - RNA, 19 nt, Artificial Sequence
  Description of Artificial Sequence: Synthetic oligonucleotide
aguuacucuuacucaucau

SEQ ID NO: 130722 - RNA, 19 nt, Artificial Sequence
  Description of Artificial Sequence: Synthetic oligonucleotide
uuuggucccguggcuauac

SEQ ID NO: 130723 - RNA, 19 nt, Artificial Sequence
  Description of Artificial Sequence: Synthetic oligonucleotide
agucgcauguucucagcau

SEQ ID NO: 130724 - RNA, 19 nt, Artificial Sequence
  Description of Artificial Sequence: Synthetic oligonucleotide
guaccauuugggccuuuug

SEQ ID NO: 130725 - RNA, 19 nt, Artificial Sequence
  Description of Artificial Sequence: Synthetic oligonucleotide
cacuaauacugaagucuuc

SEQ ID NO: 130726 - RNA, 19 nt, Artificial Sequence
  Description of Artificial Sequence: Synthetic oligonucleotide
cacaugagguguacucaug

SEQ ID NO: 130727 - RNA, 19 nt, Artificial Sequence
  Description of Artificial Sequence: Synthetic oligonucleotide
uccuaggucagcugacaua

SEQ ID NO: 130728 - RNA, 19 nt, Artificial Sequence
  Description of Artificial Sequence: Synthetic oligonucleotide
cuuuaggugcaacuggcua

SEQ ID NO: 130729 - RNA, 19 nt, Artificial Sequence
  Description of Artificial Sequence: Synthetic oligonucleotide
caauaucgaguuagauauc

SEQ ID NO: 130730 - RNA, 19 nt, Artificial Sequence
  Description of Artificial Sequence: Synthetic oligonucleotide
gagcgaucuugagauauuc

SEQ ID NO: 130731 - RNA, 19 nt, Artificial Sequence
  Description of Artificial Sequence: Synthetic oligonucleotide
acgcucuuuggccaguuuu

SEQ ID NO: 130732 - RNA, 19 nt, Artificial Sequence
  Description of Artificial Sequence: Synthetic oligonucleotide
cuagguugaaugugccaga

SEQ ID NO: 130733 - RNA, 19 nt, Artificial Sequence
  Description of Artificial Sequence: Synthetic oligonucleotide
gguacuggauugaaggaca

SEQ ID NO: 130734 - RNA, 19 nt, Artificial Sequence
  Description of Artificial Sequence: Synthetic oligonucleotide
ugagcgaucuugagauauu

SEQ ID NO: 130735 - RNA, 19 nt, Artificial Sequence
  Description of Artificial Sequence: Synthetic oligonucleotide
cuggguuagggguacugga

SEQ ID NO: 130736 - RNA, 19 nt, Artificial Sequence
  Description of Artificial Sequence: Synthetic oligonucleotide
cucuguccuagcuggaaga

SEQ ID NO: 130737 - RNA, 19 nt, Artificial Sequence
  Description of Artificial Sequence: Synthetic oligonucleotide
caggacucuauucuagaaa

SEQ ID NO: 130738 - RNA, 19 nt, Artificial Sequence
  Description of Artificial Sequence: Synthetic oligonucleotide
cucaccgagugucaauaca

SEQ ID NO: 130739 - RNA, 19 nt, Artificial Sequence
  Description of Artificial Sequence: Synthetic oligonucleotide
auccuaggucagcugacau

SEQ ID NO: 130740 - RNA, 19 nt, Artificial Sequence
  Description of Artificial Sequence: Synthetic oligonucleotide
gaauuaguaaugggcccaa

SEQ ID NO: 130741 - RNA, 19 nt, Artificial Sequence
  Description of Artificial Sequence: Synthetic oligonucleotide
cccguggcuauacugaaug

SEQ ID NO: 130742 - RNA, 19 nt, Artificial Sequence
  Description of Artificial Sequence: Synthetic oligonucleotide
gauugagcauaaaccccuc

SEQ ID NO: 130743 - RNA, 19 nt, Artificial Sequence
  Description of Artificial Sequence: Synthetic oligonucleotide
caacuggcuagguuuggga

SEQ ID NO: 130744 - RNA, 19 nt, Artificial Sequence
  Description of Artificial Sequence: Synthetic oligonucleotide
cuauucuagaaagcuaggu

SEQ ID NO: 130745 - RNA, 19 nt, Artificial Sequence
  Description of Artificial Sequence: Synthetic oligonucleotide
agagcacacaugugacaaa

SEQ ID NO: 130746 - RNA, 19 nt, Artificial Sequence
  Description of Artificial Sequence: Synthetic oligonucleotide
cuugucccaagacuaauau

SEQ ID NO: 130747 - RNA, 19 nt, Artificial Sequence
  Description of Artificial Sequence: Synthetic oligonucleotide
auggacauuaagaggccaa

SEQ ID NO: 130748 - RNA, 19 nt, Artificial Sequence
  Description of Artificial Sequence: Synthetic oligonucleotide
gacggagauuccauucgca

SEQ ID NO: 130749 - RNA, 19 nt, Artificial Sequence
  Description of Artificial Sequence: Synthetic oligonucleotide
gcacaacuagugaugagac

SEQ ID NO: 130750 - RNA, 19 nt, Artificial Sequence
  Description of Artificial Sequence: Synthetic oligonucleotide
guuagauggggaaggguua

SEQ ID NO: 130751 - RNA, 19 nt, Artificial Sequence
  Description of Artificial Sequence: Synthetic oligonucleotide
ccaacauaggagguagaag

SEQ ID NO: 130752 - RNA, 19 nt, Artificial Sequence
  Description of Artificial Sequence: Synthetic oligonucleotide
guucuagggcccuacgggu

SEQ ID NO: 130753 - RNA, 19 nt, Artificial Sequence
  Description of Artificial Sequence: Synthetic oligonucleotide
cagugguacgcuccucuuc

SEQ ID NO: 130754 - RNA, 19 nt, Artificial Sequence
  Description of Artificial Sequence: Synthetic oligonucleotide
accuauagugacagguaaa

SEQ ID NO: 130755 - RNA, 19 nt, Artificial Sequence
  Description of Artificial Sequence: Synthetic oligonucleotide
agcucaccgagugucaaua

SEQ ID NO: 130756 - RNA, 19 nt, Artificial Sequence
  Description of Artificial Sequence: Synthetic oligonucleotide
agccuuacccauaaaccua

SEQ ID NO: 130757 - RNA, 19 nt, Artificial Sequence
  Description of Artificial Sequence: Synthetic oligonucleotide
cggagauuccauucgcacc

SEQ ID NO: 130758 - RNA, 19 nt, Artificial Sequence
  Description of Artificial Sequence: Synthetic oligonucleotide
uugucucgucccagucgca

SEQ ID NO: 130759 - RNA, 19 nt, Artificial Sequence
  Description of Artificial Sequence: Synthetic oligonucleotide
aggugcaacuggcuagguu

SEQ ID NO: 130760 - RNA, 19 nt, Artificial Sequence
  Description of Artificial Sequence: Synthetic oligonucleotide
ucccguggcuauacugaau

SEQ ID NO: 130761 - RNA, 19 nt, Artificial Sequence
  Description of Artificial Sequence: Synthetic oligonucleotide
uuggucccguggcuauacu

SEQ ID NO: 130762 - RNA, 19 nt, Artificial Sequence
  Description of Artificial Sequence: Synthetic oligonucleotide
cucgaaugcacuguuuccu

SEQ ID NO: 130763 - RNA, 19 nt, Artificial Sequence
  Description of Artificial Sequence: Synthetic oligonucleotide
gagaagacggagauuccau

SEQ ID NO: 130764 - RNA, 19 nt, Artificial Sequence
  Description of Artificial Sequence: Synthetic oligonucleotide
ggucccguggcuauacuga

SEQ ID NO: 130765 - RNA, 19 nt, Artificial Sequence
  Description of Artificial Sequence: Synthetic oligonucleotide
ggauuguaugaccuauagu

SEQ ID NO: 130766 - RNA, 19 nt, Artificial Sequence
  Description of Artificial Sequence: Synthetic oligonucleotide
gguuagauggggaaggguu

SEQ ID NO: 130767 - RNA, 19 nt, Artificial Sequence
  Description of Artificial Sequence: Synthetic oligonucleotide
cucccugagcaugccucgg

SEQ ID NO: 130768 - RNA, 19 nt, Artificial Sequence
  Description of Artificial Sequence: Synthetic oligonucleotide
cgaguuagauaucacuaga

SEQ ID NO: 130769 - RNA, 19 nt, Artificial Sequence
  Description of Artificial Sequence: Synthetic oligonucleotide
auggauuguaugaccuaua

SEQ ID NO: 130770 - RNA, 19 nt, Artificial Sequence
  Description of Artificial Sequence: Synthetic oligonucleotide
gucccguggcuauacugaa

SEQ ID NO: 130771 - RNA, 19 nt, Artificial Sequence
  Description of Artificial Sequence: Synthetic oligonucleotide
guacuggauugaaggacaa

SEQ ID NO: 130772 - RNA, 19 nt, Artificial Sequence
  Description of Artificial Sequence: Synthetic oligonucleotide
gccacaugagguguacuca

SEQ ID NO: 130773 - RNA, 19 nt, Artificial Sequence
  Description of Artificial Sequence: Synthetic oligonucleotide
caaggcuuuucuaguuagu

SEQ ID NO: 130774 - RNA, 19 nt, Artificial Sequence
  Description of Artificial Sequence: Synthetic oligonucleotide
ccaagggacagcacaacua

SEQ ID NO: 130775 - RNA, 19 nt, Artificial Sequence
  Description of Artificial Sequence: Synthetic oligonucleotide
ggaucugaguaaggggaga

SEQ ID NO: 130776 - RNA, 19 nt, Artificial Sequence
  Description of Artificial Sequence: Synthetic oligonucleotide
caggaacaugaacuaacau

SEQ ID NO: 130777 - RNA, 19 nt, Artificial Sequence
  Description of Artificial Sequence: Synthetic oligonucleotide
ggugucaggcuuacgccga

SEQ ID NO: 130778 - RNA, 19 nt, Artificial Sequence
  Description of Artificial Sequence: Synthetic oligonucleotide
gcucaccgagugucaauac

SEQ ID NO: 130779 - RNA, 19 nt, Artificial Sequence
  Description of Artificial Sequence: Synthetic oligonucleotide
ggcuuauuucggcugaauu

SEQ ID NO: 130780 - RNA, 19 nt, Artificial Sequence
  Description of Artificial Sequence: Synthetic oligonucleotide
cuugagcgaucuugagaua

SEQ ID NO: 130781 - RNA, 19 nt, Artificial Sequence
  Description of Artificial Sequence: Synthetic oligonucleotide
gguggguuauugcccuuaa

SEQ ID NO: 130782 - RNA, 19 nt, Artificial Sequence
  Description of Artificial Sequence: Synthetic oligonucleotide
cucucuguccuagcuggaa

SEQ ID NO: 130783 - RNA, 19 nt, Artificial Sequence
  Description of Artificial Sequence: Synthetic oligonucleotide
caggcuuacgccgacgcau

SEQ ID NO: 130784 - RNA, 19 nt, Artificial Sequence
  Description of Artificial Sequence: Synthetic oligonucleotide
guccuagcuggaagagauc

SEQ ID NO: 130785 - RNA, 19 nt, Artificial Sequence
  Description of Artificial Sequence: Synthetic oligonucleotide
caccgagugucaauacaau

SEQ ID NO: 130786 - RNA, 19 nt, Artificial Sequence
  Description of Artificial Sequence: Synthetic oligonucleotide
ggguuagggguacuggauu

SEQ ID NO: 130787 - RNA, 19 nt, Artificial Sequence
  Description of Artificial Sequence: Synthetic oligonucleotide
ggacauuaagaggccaaau

SEQ ID NO: 130788 - RNA, 19 nt, Artificial Sequence
  Description of Artificial Sequence: Synthetic oligonucleotide
guggguuauugcccuuaau

SEQ ID NO: 130789 - RNA, 19 nt, Artificial Sequence
  Description of Artificial Sequence: Synthetic oligonucleotide
gcccacuacauggacucaa

SEQ ID NO: 130790 - RNA, 19 nt, Artificial Sequence
  Description of Artificial Sequence: Synthetic oligonucleotide
ccacaugagguguacucau

SEQ ID NO: 130791 - RNA, 19 nt, Artificial Sequence
  Description of Artificial Sequence: Synthetic oligonucleotide
ggauagccuuacccauaaa

SEQ ID NO: 130792 - RNA, 19 nt, Artificial Sequence
  Description of Artificial Sequence: Synthetic oligonucleotide
gcucucucgaaugcacugu

SEQ ID NO: 130793 - RNA, 19 nt, Artificial Sequence
  Description of Artificial Sequence: Synthetic oligonucleotide
cccauaaaccuaaccugau

SEQ ID NO: 130794 - RNA, 19 nt, Artificial Sequence
  Description of Artificial Sequence: Synthetic oligonucleotide
gcccuuaaugcagcuagau

SEQ ID NO: 130795 - RNA, 19 nt, Artificial Sequence
  Description of Artificial Sequence: Synthetic oligonucleotide
gggcccaacauaggaggua

SEQ ID NO: 130796 - RNA, 19 nt, Artificial Sequence
  Description of Artificial Sequence: Synthetic oligonucleotide
cagcucaccgagugucaau

SEQ ID NO: 130797 - RNA, 19 nt, Artificial Sequence
  Description of Artificial Sequence: Synthetic oligonucleotide
agggcccuacgggucuguu

SEQ ID NO: 130798 - RNA, 19 nt, Artificial Sequence
  Description of Artificial Sequence: Synthetic oligonucleotide
cgucccagucgcauguucu

SEQ ID NO: 130799 - RNA, 19 nt, Artificial Sequence
  Description of Artificial Sequence: Synthetic oligonucleotide
aauaauaaggccgacacac

SEQ ID NO: 130800 - RNA, 19 nt, Artificial Sequence
  Description of Artificial Sequence: Synthetic oligonucleotide
aacguagaagcugacaucg

SEQ ID NO: 130801 - RNA, 19 nt, Artificial Sequence
  Description of Artificial Sequence: Synthetic oligonucleotide
guuaaccaagcuuugaaag

SEQ ID NO: 130802 - RNA, 19 nt, Artificial Sequence
  Description of Artificial Sequence: Synthetic oligonucleotide
acaucuuacaccuaguuaa

SEQ ID NO: 130803 - RNA, 19 nt, Artificial Sequence
  Description of Artificial Sequence: Synthetic oligonucleotide
uguaauggcuguaagggga

SEQ ID NO: 130804 - RNA, 19 nt, Artificial Sequence
  Description of Artificial Sequence: Synthetic oligonucleotide
ugcuauaugaaccgugucc

SEQ ID NO: 130805 - RNA, 19 nt, Artificial Sequence
  Description of Artificial Sequence: Synthetic oligonucleotide
aagacuaccaaaggggagg

SEQ ID NO: 130806 - RNA, 19 nt, Artificial Sequence
  Description of Artificial Sequence: Synthetic oligonucleotide
aacgacuauccacagccac

SEQ ID NO: 130807 - RNA, 19 nt, Artificial Sequence
  Description of Artificial Sequence: Synthetic oligonucleotide
aacucacugcucuucaauc

SEQ ID NO: 130808 - RNA, 19 nt, Artificial Sequence
  Description of Artificial Sequence: Synthetic oligonucleotide
cuagguaccuuccagacac

SEQ ID NO: 130809 - RNA, 19 nt, Artificial Sequence
  Description of Artificial Sequence: Synthetic oligonucleotide
aaagcuauauagauggcga

SEQ ID NO: 130810 - RNA, 19 nt, Artificial Sequence
  Description of Artificial Sequence: Synthetic oligonucleotide
ugugucaugagaguguagc

SEQ ID NO: 130811 - RNA, 19 nt, Artificial Sequence
  Description of Artificial Sequence: Synthetic oligonucleotide
guauuaucgugguugaagc

SEQ ID NO: 130812 - RNA, 19 nt, Artificial Sequence
  Description of Artificial Sequence: Synthetic oligonucleotide
ugcucaacuaccuggcacg

SEQ ID NO: 130813 - RNA, 19 nt, Artificial Sequence
  Description of Artificial Sequence: Synthetic oligonucleotide
gauacuggugcucaacuac

SEQ ID NO: 130814 - RNA, 19 nt, Artificial Sequence
  Description of Artificial Sequence: Synthetic oligonucleotide
auaaggccgacacacauca

SEQ ID NO: 130815 - RNA, 19 nt, Artificial Sequence
  Description of Artificial Sequence: Synthetic oligonucleotide
uaauagaggcgcuggagag

SEQ ID NO: 130816 - RNA, 19 nt, Artificial Sequence
  Description of Artificial Sequence: Synthetic oligonucleotide
agccauacaucuuacaccu

SEQ ID NO: 130817 - RNA, 19 nt, Artificial Sequence
  Description of Artificial Sequence: Synthetic oligonucleotide
cuaagggacacgcaguacc

SEQ ID NO: 130818 - RNA, 19 nt, Artificial Sequence
  Description of Artificial Sequence: Synthetic oligonucleotide
gaacacuccgccgugaggg

SEQ ID NO: 130819 - RNA, 19 nt, Artificial Sequence
  Description of Artificial Sequence: Synthetic oligonucleotide
uauaagaaggauggcaaug

SEQ ID NO: 130820 - RNA, 19 nt, Artificial Sequence
  Description of Artificial Sequence: Synthetic oligonucleotide
ucaacuaccuggcacggga

SEQ ID NO: 130821 - RNA, 19 nt, Artificial Sequence
  Description of Artificial Sequence: Synthetic oligonucleotide
auguagggccccaagaucc

SEQ ID NO: 130822 - RNA, 19 nt, Artificial Sequence
  Description of Artificial Sequence: Synthetic oligonucleotide
ucguguaauggcuguaagg

SEQ ID NO: 130823 - RNA, 19 nt, Artificial Sequence
  Description of Artificial Sequence: Synthetic oligonucleotide
auaauagaggcgcuggaga

SEQ ID NO: 130824 - RNA, 19 nt, Artificial Sequence
  Description of Artificial Sequence: Synthetic oligonucleotide
ggucacaauaauaaggccg

SEQ ID NO: 130825 - RNA, 19 nt, Artificial Sequence
  Description of Artificial Sequence: Synthetic oligonucleotide
acaucgggcauccuguccg

SEQ ID NO: 130826 - RNA, 19 nt, Artificial Sequence
  Description of Artificial Sequence: Synthetic oligonucleotide
ugaaccguguccuccauca

SEQ ID NO: 130827 - RNA, 19 nt, Artificial Sequence
  Description of Artificial Sequence: Synthetic oligonucleotide
gcaacgacuauccacagcc

SEQ ID NO: 130828 - RNA, 19 nt, Artificial Sequence
  Description of Artificial Sequence: Synthetic oligonucleotide
aacuugguaccgccgucgc

SEQ ID NO: 130829 - RNA, 19 nt, Artificial Sequence
  Description of Artificial Sequence: Synthetic oligonucleotide
uuccuaaauggauccacag

SEQ ID NO: 130830 - RNA, 19 nt, Artificial Sequence
  Description of Artificial Sequence: Synthetic oligonucleotide
agugguucagugcuaaagu

SEQ ID NO: 130831 - RNA, 19 nt, Artificial Sequence
  Description of Artificial Sequence: Synthetic oligonucleotide
cuaacagcaagugccagcc

SEQ ID NO: 130832 - RNA, 19 nt, Artificial Sequence
  Description of Artificial Sequence: Synthetic oligonucleotide
gaacccacgacaugccgcg

SEQ ID NO: 130833 - RNA, 19 nt, Artificial Sequence
  Description of Artificial Sequence: Synthetic oligonucleotide
uaauaaucguggcugccga

SEQ ID NO: 130834 - RNA, 19 nt, Artificial Sequence
  Description of Artificial Sequence: Synthetic oligonucleotide
accggauucacugacacug

SEQ ID NO: 130835 - RNA, 19 nt, Artificial Sequence
  Description of Artificial Sequence: Synthetic oligonucleotide
uuaucgugguugaagcaca

SEQ ID NO: 130836 - RNA, 19 nt, Artificial Sequence
  Description of Artificial Sequence: Synthetic oligonucleotide
gagaccguugacucuuugg

SEQ ID NO: 130837 - RNA, 19 nt, Artificial Sequence
  Description of Artificial Sequence: Synthetic oligonucleotide
ucgugguugaagcacacaa

SEQ ID NO: 130838 - RNA, 19 nt, Artificial Sequence
  Description of Artificial Sequence: Synthetic oligonucleotide
auaucaacucuucccaccu

SEQ ID NO: 130839 - RNA, 19 nt, Artificial Sequence
  Description of Artificial Sequence: Synthetic oligonucleotide
cuugguaccgccgucgccg

SEQ ID NO: 130840 - RNA, 19 nt, Artificial Sequence
  Description of Artificial Sequence: Synthetic oligonucleotide
accuaaugagcugaggguc

SEQ ID NO: 130841 - RNA, 19 nt, Artificial Sequence
  Description of Artificial Sequence: Synthetic oligonucleotide
caggguauuaucgugguug

SEQ ID NO: 130842 - RNA, 19 nt, Artificial Sequence
  Description of Artificial Sequence: Synthetic oligonucleotide
aagcaggguauuaucgugg

SEQ ID NO: 130843 - RNA, 19 nt, Artificial Sequence
  Description of Artificial Sequence: Synthetic oligonucleotide
uacaucuuacaccuaguua

SEQ ID NO: 130844 - RNA, 19 nt, Artificial Sequence
  Description of Artificial Sequence: Synthetic oligonucleotide
uauuucuagagaagagcuc

SEQ ID NO: 130845 - RNA, 19 nt, Artificial Sequence
  Description of Artificial Sequence: Synthetic oligonucleotide
guacccgccagucucauug

SEQ ID NO: 130846 - RNA, 19 nt, Artificial Sequence
  Description of Artificial Sequence: Synthetic oligonucleotide
agaccguugacucuuugga

SEQ ID NO: 130847 - RNA, 19 nt, Artificial Sequence
  Description of Artificial Sequence: Synthetic oligonucleotide
cuggcuaagggacacgcag

SEQ ID NO: 130848 - RNA, 19 nt, Artificial Sequence
  Description of Artificial Sequence: Synthetic oligonucleotide
uauuaucgugguugaagca

SEQ ID NO: 130849 - RNA, 19 nt, Artificial Sequence
  Description of Artificial Sequence: Synthetic oligonucleotide
guguaauggcuguaagggg

SEQ ID NO: 130850 - RNA, 19 nt, Artificial Sequence
  Description of Artificial Sequence: Synthetic oligonucleotide
aucuuacaccuaguuaacc

SEQ ID NO: 130851 - RNA, 19 nt, Artificial Sequence
  Description of Artificial Sequence: Synthetic oligonucleotide
cacauaauagaggcgcugg

SEQ ID NO: 130852 - RNA, 19 nt, Artificial Sequence
  Description of Artificial Sequence: Synthetic oligonucleotide
gguauggugugucagaaga

SEQ ID NO: 130853 - RNA, 19 nt, Artificial Sequence
  Description of Artificial Sequence: Synthetic oligonucleotide
auaaucguggcugccgagg

SEQ ID NO: 130854 - RNA, 19 nt, Artificial Sequence
  Description of Artificial Sequence: Synthetic oligonucleotide
aagccgaauucucauuggu

SEQ ID NO: 130855 - RNA, 19 nt, Artificial Sequence
  Description of Artificial Sequence: Synthetic oligonucleotide
ugccuacuuaccuacuccc

SEQ ID NO: 130856 - RNA, 19 nt, Artificial Sequence
  Description of Artificial Sequence: Synthetic oligonucleotide
cacaccauucuugaugccg

SEQ ID NO: 130857 - RNA, 19 nt, Artificial Sequence
  Description of Artificial Sequence: Synthetic oligonucleotide
aacuugggaagggaaaagu

SEQ ID NO: 130858 - RNA, 19 nt, Artificial Sequence
  Description of Artificial Sequence: Synthetic oligonucleotide
agguaccggauucacugac

SEQ ID NO: 130859 - RNA, 19 nt, Artificial Sequence
  Description of Artificial Sequence: Synthetic oligonucleotide
aagaggcggguccauucuc

SEQ ID NO: 130860 - RNA, 19 nt, Artificial Sequence
  Description of Artificial Sequence: Synthetic oligonucleotide
agaauguggaacuguccca

SEQ ID NO: 130861 - RNA, 19 nt, Artificial Sequence
  Description of Artificial Sequence: Synthetic oligonucleotide
aagccaaggaccucgugua

SEQ ID NO: 130862 - RNA, 19 nt, Artificial Sequence
  Description of Artificial Sequence: Synthetic oligonucleotide
ggagccauacaucuuacac

SEQ ID NO: 130863 - RNA, 19 nt, Artificial Sequence
  Description of Artificial Sequence: Synthetic oligonucleotide
acuuaccuacuccccuacc

SEQ ID NO: 130864 - RNA, 19 nt, Artificial Sequence
  Description of Artificial Sequence: Synthetic oligonucleotide
gaacuugguaccgccgucg

SEQ ID NO: 130865 - RNA, 19 nt, Artificial Sequence
  Description of Artificial Sequence: Synthetic oligonucleotide
caacagucucccuauguug

SEQ ID NO: 130866 - RNA, 19 nt, Artificial Sequence
  Description of Artificial Sequence: Synthetic oligonucleotide
cuggcaacgacuauccaca

SEQ ID NO: 130867 - RNA, 19 nt, Artificial Sequence
  Description of Artificial Sequence: Synthetic oligonucleotide
ugauggacaugaaaacgua

SEQ ID NO: 130868 - RNA, 19 nt, Artificial Sequence
  Description of Artificial Sequence: Synthetic oligonucleotide
aggauacuggugcucaacu

SEQ ID NO: 130869 - RNA, 19 nt, Artificial Sequence
  Description of Artificial Sequence: Synthetic oligonucleotide
caagccgaauucucauugg

SEQ ID NO: 130870 - RNA, 19 nt, Artificial Sequence
  Description of Artificial Sequence: Synthetic oligonucleotide
auccgaucugcgcucgcgc

SEQ ID NO: 130871 - RNA, 19 nt, Artificial Sequence
  Description of Artificial Sequence: Synthetic oligonucleotide
auacuggaacacuccgccg

SEQ ID NO: 130872 - RNA, 19 nt, Artificial Sequence
  Description of Artificial Sequence: Synthetic oligonucleotide
gucacaauaauaaggccga

SEQ ID NO: 130873 - RNA, 19 nt, Artificial Sequence
  Description of Artificial Sequence: Synthetic oligonucleotide
cacuacauggagcugccug

SEQ ID NO: 130874 - RNA, 19 nt, Artificial Sequence
  Description of Artificial Sequence: Synthetic oligonucleotide
auacaucuuacaccuaguu

SEQ ID NO: 130875 - RNA, 19 nt, Artificial Sequence
  Description of Artificial Sequence: Synthetic oligonucleotide
cuaagccuaggaagguacc

SEQ ID NO: 130876 - RNA, 19 nt, Artificial Sequence
  Description of Artificial Sequence: Synthetic oligonucleotide
caucuuacaccuaguuaac

SEQ ID NO: 130877 - RNA, 19 nt, Artificial Sequence
  Description of Artificial Sequence: Synthetic oligonucleotide
ccaccuaaugagcugaggg

SEQ ID NO: 130878 - RNA, 19 nt, Artificial Sequence
  Description of Artificial Sequence: Synthetic oligonucleotide
ucacauaauagaggcgcug

SEQ ID NO: 130879 - RNA, 19 nt, Artificial Sequence
  Description of Artificial Sequence: Synthetic oligonucleotide
uggaaccuucccaaaccug

SEQ ID NO: 130880 - RNA, 19 nt, Artificial Sequence
  Description of Artificial Sequence: Synthetic oligonucleotide
uccgaucugcgcucgcgcg

SEQ ID NO: 130881 - RNA, 19 nt, Artificial Sequence
  Description of Artificial Sequence: Synthetic oligonucleotide
acuugguaccgccgucgcc

SEQ ID NO: 130882 - RNA, 19 nt, Artificial Sequence
  Description of Artificial Sequence: Synthetic oligonucleotide
cugccuacuuaccuacucc

SEQ ID NO: 130883 - RNA, 19 nt, Artificial Sequence
  Description of Artificial Sequence: Synthetic oligonucleotide
agguauccgaucugcgcuc

SEQ ID NO: 130884 - RNA, 19 nt, Artificial Sequence
  Description of Artificial Sequence: Synthetic oligonucleotide
uauccgaucugcgcucgcg

SEQ ID NO: 130885 - RNA, 19 nt, Artificial Sequence
  Description of Artificial Sequence: Synthetic oligonucleotide
uuccuucuagacugggcug

SEQ ID NO: 130886 - RNA, 19 nt, Artificial Sequence
  Description of Artificial Sequence: Synthetic oligonucleotide
acauaauagaggcgcugga

SEQ ID NO: 130887 - RNA, 19 nt, Artificial Sequence
  Description of Artificial Sequence: Synthetic oligonucleotide
guucuaccccuucagggug

SEQ ID NO: 130888 - RNA, 19 nt, Artificial Sequence
  Description of Artificial Sequence: Synthetic oligonucleotide
guaccggauucacugacac

SEQ ID NO: 130889 - RNA, 19 nt, Artificial Sequence
  Description of Artificial Sequence: Synthetic oligonucleotide
cacugcuauaugaaccgug

SEQ ID NO: 130890 - RNA, 19 nt, Artificial Sequence
  Description of Artificial Sequence: Synthetic oligonucleotide
agcuauauagauggcgaca

SEQ ID NO: 130891 - RNA, 19 nt, Artificial Sequence
  Description of Artificial Sequence: Synthetic oligonucleotide
aaugagcagcccguucuug

SEQ ID NO: 130892 - RNA, 19 nt, Artificial Sequence
  Description of Artificial Sequence: Synthetic oligonucleotide
cagugguucagugcuaaag

SEQ ID NO: 130893 - RNA, 19 nt, Artificial Sequence
  Description of Artificial Sequence: Synthetic oligonucleotide
uacuuaccuacuccccuac

SEQ ID NO: 130894 - RNA, 19 nt, Artificial Sequence
  Description of Artificial Sequence: Synthetic oligonucleotide
cagguagaaagguuacauc

SEQ ID NO: 130895 - RNA, 19 nt, Artificial Sequence
  Description of Artificial Sequence: Synthetic oligonucleotide
caccuaagcccacagacca

SEQ ID NO: 130896 - RNA, 19 nt, Artificial Sequence
  Description of Artificial Sequence: Synthetic oligonucleotide
agugaccgugccuaagccu

SEQ ID NO: 130897 - RNA, 19 nt, Artificial Sequence
  Description of Artificial Sequence: Synthetic oligonucleotide
uggacccuaccacccagcc

SEQ ID NO: 130898 - RNA, 19 nt, Artificial Sequence
  Description of Artificial Sequence: Synthetic oligonucleotide
cagcacuacauggagcugc

SEQ ID NO: 130899 - RNA, 19 nt, Artificial Sequence
  Description of Artificial Sequence: Synthetic oligonucleotide
cucgccaccccucaaacca

SEQ ID NO: 130900 - RNA, 19 nt, Artificial Sequence
  Description of Artificial Sequence: Synthetic oligonucleotide
cuacccuaggauacuggug

SEQ ID NO: 130901 - RNA, 19 nt, Artificial Sequence
  Description of Artificial Sequence: Synthetic oligonucleotide
uauugcgcuucuguugaug

SEQ ID NO: 130902 - RNA, 19 nt, Artificial Sequence
  Description of Artificial Sequence: Synthetic oligonucleotide
agcacuacauggagcugcc

SEQ ID NO: 130903 - RNA, 19 nt, Artificial Sequence
  Description of Artificial Sequence: Synthetic oligonucleotide
uccaggcuagguaccuucc

SEQ ID NO: 130904 - RNA, 19 nt, Artificial Sequence
  Description of Artificial Sequence: Synthetic oligonucleotide
agacuaccaaaggggaggg

SEQ ID NO: 130905 - RNA, 19 nt, Artificial Sequence
  Description of Artificial Sequence: Synthetic oligonucleotide
caggcuagguaccuuccag

SEQ ID NO: 130906 - RNA, 19 nt, Artificial Sequence
  Description of Artificial Sequence: Synthetic oligonucleotide
ucggcaggggccuuccuga

SEQ ID NO: 130907 - RNA, 19 nt, Artificial Sequence
  Description of Artificial Sequence: Synthetic oligonucleotide
agcaggguauuaucguggu

SEQ ID NO: 130908 - RNA, 19 nt, Artificial Sequence
  Description of Artificial Sequence: Synthetic oligonucleotide
cucguguaauggcuguaag

SEQ ID NO: 130909 - RNA, 19 nt, Artificial Sequence
  Description of Artificial Sequence: Synthetic oligonucleotide
ucuggcuaagggacacgca

SEQ ID NO: 130910 - RNA, 19 nt, Artificial Sequence
  Description of Artificial Sequence: Synthetic oligonucleotide
cgugccuaagccuaggaag

SEQ ID NO: 130911 - RNA, 19 nt, Artificial Sequence
  Description of Artificial Sequence: Synthetic oligonucleotide
guuugccucacauaccugu

SEQ ID NO: 130912 - RNA, 19 nt, Artificial Sequence
  Description of Artificial Sequence: Synthetic oligonucleotide
acuaccuggcacgggacag

SEQ ID NO: 130913 - RNA, 19 nt, Artificial Sequence
  Description of Artificial Sequence: Synthetic oligonucleotide
gugcucaacuaccuggcac

SEQ ID NO: 130914 - RNA, 19 nt, Artificial Sequence
  Description of Artificial Sequence: Synthetic oligonucleotide
agccgaauucucauugguc

SEQ ID NO: 130915 - RNA, 19 nt, Artificial Sequence
  Description of Artificial Sequence: Synthetic oligonucleotide
ugccgaacuugguaccgcc

SEQ ID NO: 130916 - RNA, 19 nt, Artificial Sequence
  Description of Artificial Sequence: Synthetic oligonucleotide
agucucccuauguugcacu

SEQ ID NO: 130917 - RNA, 19 nt, Artificial Sequence
  Description of Artificial Sequence: Synthetic oligonucleotide
agcgguauggugugucaga

SEQ ID NO: 130918 - RNA, 19 nt, Artificial Sequence
  Description of Artificial Sequence: Synthetic oligonucleotide
cuaagagcagucacuaccu

SEQ ID NO: 130919 - RNA, 19 nt, Artificial Sequence
  Description of Artificial Sequence: Synthetic oligonucleotide
cugguagcgguauggugug

SEQ ID NO: 130920 - RNA, 19 nt, Artificial Sequence
  Description of Artificial Sequence: Synthetic oligonucleotide
cucuggcuaagggacacgc

SEQ ID NO: 130921 - RNA, 19 nt, Artificial Sequence
  Description of Artificial Sequence: Synthetic oligonucleotide
ugagaccguugacucuuug

SEQ ID NO: 130922 - RNA, 19 nt, Artificial Sequence
  Description of Artificial Sequence: Synthetic oligonucleotide
cuuacuguacauguggccu

SEQ ID NO: 130923 - RNA, 19 nt, Artificial Sequence
  Description of Artificial Sequence: Synthetic oligonucleotide
uacuccccuacccuaggau

SEQ ID NO: 130924 - RNA, 19 nt, Artificial Sequence
  Description of Artificial Sequence: Synthetic oligonucleotide
ccuaagccuaggaagguac

SEQ ID NO: 130925 - RNA, 19 nt, Artificial Sequence
  Description of Artificial Sequence: Synthetic oligonucleotide
cagugaccgugccuaagcc

SEQ ID NO: 130926 - RNA, 19 nt, Artificial Sequence
  Description of Artificial Sequence: Synthetic oligonucleotide
ggcggguccauucucuugc

SEQ ID NO: 130927 - RNA, 19 nt, Artificial Sequence
  Description of Artificial Sequence: Synthetic oligonucleotide
auaauaaggccgacacaca

SEQ ID NO: 130928 - RNA, 19 nt, Artificial Sequence
  Description of Artificial Sequence: Synthetic oligonucleotide
uggcccgugucucuguguc

SEQ ID NO: 130929 - RNA, 19 nt, Artificial Sequence
  Description of Artificial Sequence: Synthetic oligonucleotide
gcagguauccgaucugcgc

SEQ ID NO: 130930 - RNA, 19 nt, Artificial Sequence
  Description of Artificial Sequence: Synthetic oligonucleotide
cugccuucgaccgcugccg

SEQ ID NO: 130931 - RNA, 19 nt, Artificial Sequence
  Description of Artificial Sequence: Synthetic oligonucleotide
gugucaugagaguguagca

SEQ ID NO: 130932 - RNA, 19 nt, Artificial Sequence
  Description of Artificial Sequence: Synthetic oligonucleotide
uagcgguauggugugucag

SEQ ID NO: 130933 - RNA, 19 nt, Artificial Sequence
  Description of Artificial Sequence: Synthetic oligonucleotide
acagucucccuauguugca

SEQ ID NO: 130934 - RNA, 19 nt, Artificial Sequence
  Description of Artificial Sequence: Synthetic oligonucleotide
cacaauaauaaggccgaca

SEQ ID NO: 130935 - RNA, 19 nt, Artificial Sequence
  Description of Artificial Sequence: Synthetic oligonucleotide
agcagucuaagagcaguca

SEQ ID NO: 130936 - RNA, 19 nt, Artificial Sequence
  Description of Artificial Sequence: Synthetic oligonucleotide
aguagacgauucaggagcu

SEQ ID NO: 130937 - RNA, 19 nt, Artificial Sequence
  Description of Artificial Sequence: Synthetic oligonucleotide
ggcuagguaccuuccagac

SEQ ID NO: 130938 - RNA, 19 nt, Artificial Sequence
  Description of Artificial Sequence: Synthetic oligonucleotide
acgacaugccgcgcccugc

SEQ ID NO: 130939 - RNA, 19 nt, Artificial Sequence
  Description of Artificial Sequence: Synthetic oligonucleotide
guacaacgggaacggggcc

SEQ ID NO: 130940 - RNA, 19 nt, Artificial Sequence
  Description of Artificial Sequence: Synthetic oligonucleotide
ucacuaccuggacccuacc

SEQ ID NO: 130941 - RNA, 19 nt, Artificial Sequence
  Description of Artificial Sequence: Synthetic oligonucleotide
gcguacaacgggaacgggg

SEQ ID NO: 130942 - RNA, 19 nt, Artificial Sequence
  Description of Artificial Sequence: Synthetic oligonucleotide
ucccagccuacagucacca

SEQ ID NO: 130943 - RNA, 19 nt, Artificial Sequence
  Description of Artificial Sequence: Synthetic oligonucleotide
uccaagccgaauucucauu

SEQ ID NO: 130944 - RNA, 19 nt, Artificial Sequence
  Description of Artificial Sequence: Synthetic oligonucleotide
uaccuacuccccuacccua

SEQ ID NO: 130945 - RNA, 19 nt, Artificial Sequence
  Description of Artificial Sequence: Synthetic oligonucleotide
guacgcccaagccaucuuc

SEQ ID NO: 130946 - RNA, 19 nt, Artificial Sequence
  Description of Artificial Sequence: Synthetic oligonucleotide
ucacaauaauaaggccgac

SEQ ID NO: 130947 - RNA, 19 nt, Artificial Sequence
  Description of Artificial Sequence: Synthetic oligonucleotide
aacccacgacaugccgcgc

SEQ ID NO: 130948 - RNA, 19 nt, Artificial Sequence
  Description of Artificial Sequence: Synthetic oligonucleotide
ggaacacuccgccgugagg

SEQ ID NO: 130949 - RNA, 19 nt, Artificial Sequence
  Description of Artificial Sequence: Synthetic oligonucleotide
caacuaccuggcacgggac

SEQ ID NO: 130950 - RNA, 19 nt, Artificial Sequence
  Description of Artificial Sequence: Synthetic oligonucleotide
uaccggauucacugacacu

SEQ ID NO: 130951 - RNA, 19 nt, Artificial Sequence
  Description of Artificial Sequence: Synthetic oligonucleotide
agcccauaguacuguugcu

SEQ ID NO: 130952 - RNA, 19 nt, Artificial Sequence
  Description of Artificial Sequence: Synthetic oligonucleotide
guagcgguaugguguguca

SEQ ID NO: 130953 - RNA, 19 nt, Artificial Sequence
  Description of Artificial Sequence: Synthetic oligonucleotide
ccuggagcgcguacaacgg

SEQ ID NO: 130954 - RNA, 19 nt, Artificial Sequence
  Description of Artificial Sequence: Synthetic oligonucleotide
cugacaucgggcauccugu

SEQ ID NO: 130955 - RNA, 19 nt, Artificial Sequence
  Description of Artificial Sequence: Synthetic oligonucleotide
gaagaggcggguccauucu

SEQ ID NO: 130956 - RNA, 19 nt, Artificial Sequence
  Description of Artificial Sequence: Synthetic oligonucleotide
ccagugaccgugccuaagc

SEQ ID NO: 130957 - RNA, 19 nt, Artificial Sequence
  Description of Artificial Sequence: Synthetic oligonucleotide
cugugucaugagaguguag

SEQ ID NO: 130958 - RNA, 19 nt, Artificial Sequence
  Description of Artificial Sequence: Synthetic oligonucleotide
gcuguaaggggaggagugg

SEQ ID NO: 130959 - RNA, 19 nt, Artificial Sequence
  Description of Artificial Sequence: Synthetic oligonucleotide
gcuauaugaaccguguccu

SEQ ID NO: 130960 - RNA, 19 nt, Artificial Sequence
  Description of Artificial Sequence: Synthetic oligonucleotide
aguagcaagcaggguauua

SEQ ID NO: 130961 - RNA, 19 nt, Artificial Sequence
  Description of Artificial Sequence: Synthetic oligonucleotide
uacccgccagucucauugc

SEQ ID NO: 130962 - RNA, 19 nt, Artificial Sequence
  Description of Artificial Sequence: Synthetic oligonucleotide
cugccagccccgcggaacc

SEQ ID NO: 130963 - RNA, 19 nt, Artificial Sequence
  Description of Artificial Sequence: Synthetic oligonucleotide
agccugauacagcacucuu

SEQ ID NO: 130964 - RNA, 19 nt, Artificial Sequence
  Description of Artificial Sequence: Synthetic oligonucleotide
cagguauccgaucugcgcu

SEQ ID NO: 130965 - RNA, 19 nt, Artificial Sequence
  Description of Artificial Sequence: Synthetic oligonucleotide
acguagaagcugacaucgg

SEQ ID NO: 130966 - RNA, 19 nt, Artificial Sequence
  Description of Artificial Sequence: Synthetic oligonucleotide
ugccuaagccuaggaaggu

SEQ ID NO: 130967 - RNA, 19 nt, Artificial Sequence
  Description of Artificial Sequence: Synthetic oligonucleotide
uccgccgugagggcagcag

SEQ ID NO: 130968 - RNA, 19 nt, Artificial Sequence
  Description of Artificial Sequence: Synthetic oligonucleotide
aacccuucucagguagaaa

SEQ ID NO: 130969 - RNA, 19 nt, Artificial Sequence
  Description of Artificial Sequence: Synthetic oligonucleotide
ucgccaccccucaaaccac

SEQ ID NO: 130970 - RNA, 19 nt, Artificial Sequence
  Description of Artificial Sequence: Synthetic oligonucleotide
cuacuuaccuacuccccua

SEQ ID NO: 130971 - RNA, 19 nt, Artificial Sequence
  Description of Artificial Sequence: Synthetic oligonucleotide
gugaccgugccuaagccua

SEQ ID NO: 130972 - RNA, 19 nt, Artificial Sequence
  Description of Artificial Sequence: Synthetic oligonucleotide
ccgaguagacgauucagga

SEQ ID NO: 130973 - RNA, 19 nt, Artificial Sequence
  Description of Artificial Sequence: Synthetic oligonucleotide
ccguugacucuuuggaaac

SEQ ID NO: 130974 - RNA, 19 nt, Artificial Sequence
  Description of Artificial Sequence: Synthetic oligonucleotide
gguauccgaucugcgcucg

SEQ ID NO: 130975 - RNA, 19 nt, Artificial Sequence
  Description of Artificial Sequence: Synthetic oligonucleotide
agaggcggguccauucucu

SEQ ID NO: 130976 - RNA, 19 nt, Artificial Sequence
  Description of Artificial Sequence: Synthetic oligonucleotide
ugccuucgaccgcugccga

SEQ ID NO: 130977 - RNA, 19 nt, Artificial Sequence
  Description of Artificial Sequence: Synthetic oligonucleotide
acgcccaagccaucuucca

SEQ ID NO: 130978 - RNA, 19 nt, Artificial Sequence
  Description of Artificial Sequence: Synthetic oligonucleotide
uguggaccucagugauucu

SEQ ID NO: 130979 - RNA, 19 nt, Artificial Sequence
  Description of Artificial Sequence: Synthetic oligonucleotide
caacucuggagcccuggga

SEQ ID NO: 130980 - RNA, 19 nt, Artificial Sequence
  Description of Artificial Sequence: Synthetic oligonucleotide
aguacgcccaagccaucuu

SEQ ID NO: 130981 - RNA, 19 nt, Artificial Sequence
  Description of Artificial Sequence: Synthetic oligonucleotide
agccccgcggaacccacga

SEQ ID NO: 130982 - RNA, 19 nt, Artificial Sequence
  Description of Artificial Sequence: Synthetic oligonucleotide
ugucgaggucccugcuccu

SEQ ID NO: 130983 - RNA, 19 nt, Artificial Sequence
  Description of Artificial Sequence: Synthetic oligonucleotide
aacgggaacggggcccggu

SEQ ID NO: 130984 - RNA, 19 nt, Artificial Sequence
  Description of Artificial Sequence: Synthetic oligonucleotide
ccuuuaagucccagccuac

SEQ ID NO: 130985 - RNA, 19 nt, Artificial Sequence
  Description of Artificial Sequence: Synthetic oligonucleotide
aucgugguugaagcacaca

SEQ ID NO: 130986 - RNA, 19 nt, Artificial Sequence
  Description of Artificial Sequence: Synthetic oligonucleotide
cuuugagaccguugacucu

SEQ ID NO: 130987 - RNA, 19 nt, Artificial Sequence
  Description of Artificial Sequence: Synthetic oligonucleotide
gcuagguaccuuccagaca

SEQ ID NO: 130988 - RNA, 19 nt, Artificial Sequence
  Description of Artificial Sequence: Synthetic oligonucleotide
cacgacaugccgcgcccug

SEQ ID NO: 130989 - RNA, 19 nt, Artificial Sequence
  Description of Artificial Sequence: Synthetic oligonucleotide
caagugccagcccagacuu

SEQ ID NO: 130990 - RNA, 19 nt, Artificial Sequence
  Description of Artificial Sequence: Synthetic oligonucleotide
cugccgaacuugguaccgc

SEQ ID NO: 130991 - RNA, 19 nt, Artificial Sequence
  Description of Artificial Sequence: Synthetic oligonucleotide
acgcaguacccgccagucu

SEQ ID NO: 130992 - RNA, 19 nt, Artificial Sequence
  Description of Artificial Sequence: Synthetic oligonucleotide
acaugccgcgcccugccuu

SEQ ID NO: 130993 - RNA, 19 nt, Artificial Sequence
  Description of Artificial Sequence: Synthetic oligonucleotide
guauccgaucugcgcucgc

SEQ ID NO: 130994 - RNA, 19 nt, Artificial Sequence
  Description of Artificial Sequence: Synthetic oligonucleotide
gaccucguguaauggcugu

SEQ ID NO: 130995 - RNA, 19 nt, Artificial Sequence
  Description of Artificial Sequence: Synthetic oligonucleotide
gcucaacuaccuggcacgg

SEQ ID NO: 130996 - RNA, 19 nt, Artificial Sequence
  Description of Artificial Sequence: Synthetic oligonucleotide
accaccgcagguauccgau

SEQ ID NO: 130997 - RNA, 19 nt, Artificial Sequence
  Description of Artificial Sequence: Synthetic oligonucleotide
cuggaaccuucccaaaccu

SEQ ID NO: 130998 - RNA, 19 nt, Artificial Sequence
  Description of Artificial Sequence: Synthetic oligonucleotide
cgcggaacccacgacaugc

SEQ ID NO: 130999 - RNA, 19 nt, Artificial Sequence
  Description of Artificial Sequence: Synthetic oligonucleotide
ggcgacagagccagugacc

SEQ ID NO: 131000 - RNA, 19 nt, Artificial Sequence
  Description of Artificial Sequence: Synthetic oligonucleotide
gguagcgguaugguguguc

SEQ ID NO: 131001 - RNA, 19 nt, Artificial Sequence
  Description of Artificial Sequence: Synthetic oligonucleotide
ggacccuaccacccagccc

SEQ ID NO: 131002 - RNA, 19 nt, Artificial Sequence
  Description of Artificial Sequence: Synthetic oligonucleotide
cacgcgcguucacugccag

SEQ ID NO: 131003 - RNA, 19 nt, Artificial Sequence
  Description of Artificial Sequence: Synthetic oligonucleotide
aucccgcacgcgcguucac

SEQ ID NO: 131004 - RNA, 19 nt, Artificial Sequence
  Description of Artificial Sequence: Synthetic oligonucleotide
ggaccucguguaauggcug

SEQ ID NO: 131005 - RNA, 19 nt, Artificial Sequence
  Description of Artificial Sequence: Synthetic oligonucleotide
gcccgaguagacgauucag

SEQ ID NO: 131006 - RNA, 19 nt, Artificial Sequence
  Description of Artificial Sequence: Synthetic oligonucleotide
gccccuuacugcuggacuc

SEQ ID NO: 131007 - RNA, 19 nt, Artificial Sequence
  Description of Artificial Sequence: Synthetic oligonucleotide
uucgaccgcugccgaacuu

SEQ ID NO: 131008 - RNA, 19 nt, Artificial Sequence
  Description of Artificial Sequence: Synthetic oligonucleotide
gccuacuuaccuacucccc

SEQ ID NO: 131009 - RNA, 19 nt, Artificial Sequence
  Description of Artificial Sequence: Synthetic oligonucleotide
aaaccccgcucaacucacu

SEQ ID NO: 131010 - RNA, 19 nt, Artificial Sequence
  Description of Artificial Sequence: Synthetic oligonucleotide
ggcgcuggagagagaaagc

SEQ ID NO: 131011 - RNA, 19 nt, Artificial Sequence
  Description of Artificial Sequence: Synthetic oligonucleotide
acacuccgccgugagggca

SEQ ID NO: 131012 - RNA, 19 nt, Artificial Sequence
  Description of Artificial Sequence: Synthetic oligonucleotide
cccgccagucucauugcag

SEQ ID NO: 131013 - RNA, 19 nt, Artificial Sequence
  Description of Artificial Sequence: Synthetic oligonucleotide
agucacuaccuggacccua

SEQ ID NO: 131014 - RNA, 19 nt, Artificial Sequence
  Description of Artificial Sequence: Synthetic oligonucleotide
ggcucgccaccccucaaac

SEQ ID NO: 131015 - RNA, 19 nt, Artificial Sequence
  Description of Artificial Sequence: Synthetic oligonucleotide
aggggccuuccugaagacu

SEQ ID NO: 131016 - RNA, 19 nt, Artificial Sequence
  Description of Artificial Sequence: Synthetic oligonucleotide
ucccgcacgcgcguucacu

SEQ ID NO: 131017 - RNA, 19 nt, Artificial Sequence
  Description of Artificial Sequence: Synthetic oligonucleotide
gccgaacuugguaccgccg

SEQ ID NO: 131018 - RNA, 19 nt, Artificial Sequence
  Description of Artificial Sequence: Synthetic oligonucleotide
gcucgccaccccucaaacc

SEQ ID NO: 131019 - RNA, 19 nt, Artificial Sequence
  Description of Artificial Sequence: Synthetic oligonucleotide
ccgaucugcgcucgcgcgg

SEQ ID NO: 131020 - RNA, 19 nt, Artificial Sequence
  Description of Artificial Sequence: Synthetic oligonucleotide
gguaccggauucacugaca

SEQ ID NO: 131021 - RNA, 19 nt, Artificial Sequence
  Description of Artificial Sequence: Synthetic oligonucleotide
cuagggcucugccuacuua

SEQ ID NO: 131022 - RNA, 19 nt, Artificial Sequence
  Description of Artificial Sequence: Synthetic oligonucleotide
gcucaacucacugcucuuc

SEQ ID NO: 131023 - RNA, 19 nt, Artificial Sequence
  Description of Artificial Sequence: Synthetic oligonucleotide
cgcagguauccgaucugcg

SEQ ID NO: 131024 - RNA, 19 nt, Artificial Sequence
  Description of Artificial Sequence: Synthetic oligonucleotide
gggaagccugaggaccccg

SEQ ID NO: 131025 - RNA, 19 nt, Artificial Sequence
  Description of Artificial Sequence: Synthetic oligonucleotide
gggacacgcaguacccgcc

SEQ ID NO: 131026 - RNA, 19 nt, Artificial Sequence
  Description of Artificial Sequence: Synthetic oligonucleotide
cgcgcccugccuucgaccg

SEQ ID NO: 131027 - RNA, 19 nt, Artificial Sequence
  Description of Artificial Sequence: Synthetic oligonucleotide
ggaagccugaggaccccgc

SEQ ID NO: 131028 - RNA, 19 nt, Artificial Sequence
  Description of Artificial Sequence: Synthetic oligonucleotide
uaccgccgucgccgggaag

SEQ ID NO: 131029 - RNA, 19 nt, Artificial Sequence
  Description of Artificial Sequence: Synthetic oligonucleotide
gcucaacagucucccuaug

SEQ ID NO: 131030 - RNA, 19 nt, Artificial Sequence
  Description of Artificial Sequence: Synthetic oligonucleotide
ccuacuuaccuacuccccu

SEQ ID NO: 131031 - RNA, 19 nt, Artificial Sequence
  Description of Artificial Sequence: Synthetic oligonucleotide
guccaccuggagcgcguac

SEQ ID NO: 131032 - RNA, 19 nt, Artificial Sequence
  Description of Artificial Sequence: Synthetic oligonucleotide
ccucaggcccgaguagacg

SEQ ID NO: 131033 - RNA, 19 nt, Artificial Sequence
  Description of Artificial Sequence: Synthetic oligonucleotide
ccgcagguauccgaucugc

SEQ ID NO: 131034 - RNA, 19 nt, Artificial Sequence
  Description of Artificial Sequence: Synthetic oligonucleotide
cccagauggaggccaguuc

SEQ ID NO: 131035 - RNA, 19 nt, Artificial Sequence
  Description of Artificial Sequence: Synthetic oligonucleotide
cccacgacaugccgcgccc

SEQ ID NO: 131036 - RNA, 19 nt, Artificial Sequence
  Description of Artificial Sequence: Synthetic oligonucleotide
cccgcacgcgcguucacug

SEQ ID NO: 131037 - RNA, 19 nt, Artificial Sequence
  Description of Artificial Sequence: Synthetic oligonucleotide
ugguagcgguauggugugu

SEQ ID NO: 131038 - RNA, 19 nt, Artificial Sequence
  Description of Artificial Sequence: Synthetic oligonucleotide
ccgccgugagggcagcagg

SEQ ID NO: 131039 - RNA, 19 nt, Artificial Sequence
  Description of Artificial Sequence: Synthetic oligonucleotide
gccaccccucaaaccaccg

SEQ ID NO: 131040 - RNA, 19 nt, Artificial Sequence
  Description of Artificial Sequence: Synthetic oligonucleotide
ccggaagcacugcuauaug

SEQ ID NO: 131041 - RNA, 19 nt, Artificial Sequence
  Description of Artificial Sequence: Synthetic oligonucleotide
ccuacccuaggauacuggu

SEQ ID NO: 131042 - RNA, 19 nt, Artificial Sequence
  Description of Artificial Sequence: Synthetic oligonucleotide
ggcccgaguagacgauuca

SEQ ID NO: 131043 - RNA, 19 nt, Artificial Sequence
  Description of Artificial Sequence: Synthetic oligonucleotide
gccagugaccgugccuaag

SEQ ID NO: 131044 - RNA, 19 nt, Artificial Sequence
  Description of Artificial Sequence: Synthetic oligonucleotide
gcugacgcaggcgcuugug

SEQ ID NO: 131045 - RNA, 19 nt, Artificial Sequence
  Description of Artificial Sequence: Synthetic oligonucleotide
accucguguaauggcugua

SEQ ID NO: 131046 - RNA, 19 nt, Artificial Sequence
  Description of Artificial Sequence: Synthetic oligonucleotide
gcgguauggugugucagaa

SEQ ID NO: 131047 - RNA, 19 nt, Artificial Sequence
  Description of Artificial Sequence: Synthetic oligonucleotide
cgguauggugugucagaag

SEQ ID NO: 131048 - RNA, 19 nt, Artificial Sequence
  Description of Artificial Sequence: Synthetic oligonucleotide
augccgcgcccugccuucg

SEQ ID NO: 131049 - RNA, 19 nt, Artificial Sequence
  Description of Artificial Sequence: Synthetic oligonucleotide
gcggaacccacgacaugcc

SEQ ID NO: 131050 - RNA, 19 nt, Artificial Sequence
  Description of Artificial Sequence: Synthetic oligonucleotide
ugccggcuuguggccaggu

SEQ ID NO: 131051 - RNA, 19 nt, Artificial Sequence
  Description of Artificial Sequence: Synthetic oligonucleotide
ccucaaaccaccgcaggua

SEQ ID NO: 131052 - RNA, 19 nt, Artificial Sequence
  Description of Artificial Sequence: Synthetic oligonucleotide
cgaacuugguaccgccguc

SEQ ID NO: 131053 - RNA, 19 nt, Artificial Sequence
  Description of Artificial Sequence: Synthetic oligonucleotide
caaugagcagcccguucuu

SEQ ID NO: 131054 - RNA, 19 nt, Artificial Sequence
  Description of Artificial Sequence: Synthetic oligonucleotide
gcaguacccgccagucuca

SEQ ID NO: 131055 - RNA, 19 nt, Artificial Sequence
  Description of Artificial Sequence: Synthetic oligonucleotide
ccggauucacugacacuga

SEQ ID NO: 131056 - RNA, 19 nt, Artificial Sequence
  Description of Artificial Sequence: Synthetic oligonucleotide
ggagcgcguacaacgggaa

SEQ ID NO: 131057 - RNA, 19 nt, Artificial Sequence
  Description of Artificial Sequence: Synthetic oligonucleotide
ggcccgguacagcuccaca

SEQ ID NO: 131058 - RNA, 19 nt, Artificial Sequence
  Description of Artificial Sequence: Synthetic oligonucleotide
ccgcacgcgcguucacugc

SEQ ID NO: 131059 - RNA, 19 nt, Artificial Sequence
  Description of Artificial Sequence: Synthetic oligonucleotide
ccccgcggaacccacgaca

SEQ ID NO: 131060 - RNA, 19 nt, Artificial Sequence
  Description of Artificial Sequence: Synthetic oligonucleotide
ccucguguaauggcuguaa

SEQ ID NO: 131061 - RNA, 19 nt, Artificial Sequence
  Description of Artificial Sequence: Synthetic oligonucleotide
ccgcgcccugccuucgacc

SEQ ID NO: 131062 - RNA, 19 nt, Artificial Sequence
  Description of Artificial Sequence: Synthetic oligonucleotide
gcagugguucagugcuaaa

SEQ ID NO: 131063 - RNA, 19 nt, Artificial Sequence
  Description of Artificial Sequence: Synthetic oligonucleotide
guggcccgugucucugugu

SEQ ID NO: 131064 - RNA, 19 nt, Artificial Sequence
  Description of Artificial Sequence: Synthetic oligonucleotide
gcccauaguacuguugcuu

SEQ ID NO: 131065 - RNA, 19 nt, Artificial Sequence
  Description of Artificial Sequence: Synthetic oligonucleotide
ggguauuaucgugguugaa

SEQ ID NO: 131066 - RNA, 19 nt, Artificial Sequence
  Description of Artificial Sequence: Synthetic oligonucleotide
gcccuagggcucugccuac

SEQ ID NO: 131067 - RNA, 19 nt, Artificial Sequence
  Description of Artificial Sequence: Synthetic oligonucleotide
gccuaagccuaggaaggua

SEQ ID NO: 131068 - RNA, 19 nt, Artificial Sequence
  Description of Artificial Sequence: Synthetic oligonucleotide
ccgaacuugguaccgccgu

SEQ ID NO: 131069 - RNA, 19 nt, Artificial Sequence
  Description of Artificial Sequence: Synthetic oligonucleotide
ccaccgcagguauccgauc

SEQ ID NO: 131070 - RNA, 19 nt, Artificial Sequence
  Description of Artificial Sequence: Synthetic oligonucleotide
ccccuacccuaggauacug

SEQ ID NO: 131071 - RNA, 19 nt, Artificial Sequence
  Description of Artificial Sequence: Synthetic oligonucleotide
ccgcucaacucacugcucu

SEQ ID NO: 131072 - RNA, 19 nt, Artificial Sequence
  Description of Artificial Sequence: Synthetic oligonucleotide
gccccggaagcacugcuau

SEQ ID NO: 131073 - RNA, 19 nt, Artificial Sequence
  Description of Artificial Sequence: Synthetic oligonucleotide
caggugcaacuggcaacga

SEQ ID NO: 131074 - RNA, 19 nt, Artificial Sequence
  Description of Artificial Sequence: Synthetic oligonucleotide
gccgcgcccugccuucgac

SEQ ID NO: 131075 - RNA, 19 nt, Artificial Sequence
  Description of Artificial Sequence: Synthetic oligonucleotide
ggcugccgaggggaagaac

SEQ ID NO: 131076 - RNA, 19 nt, Artificial Sequence
  Description of Artificial Sequence: Synthetic oligonucleotide
gcgcccugccuucgaccgc

SEQ ID NO: 131077 - RNA, 19 nt, Artificial Sequence
  Description of Artificial Sequence: Synthetic oligonucleotide
cgcguacaacgggaacggg

SEQ ID NO: 131078 - RNA, 19 nt, Artificial Sequence
  Description of Artificial Sequence: Synthetic oligonucleotide
cguucacugccagccccgc

SEQ ID NO: 131079 - RNA, 19 nt, Artificial Sequence
  Description of Artificial Sequence: Synthetic oligonucleotide
ccgcggaacccacgacaug

SEQ ID NO: 131080 - RNA, 19 nt, Artificial Sequence
  Description of Artificial Sequence: Synthetic oligonucleotide
gcacugcuauaugaaccgu

SEQ ID NO: 131081 - RNA, 19 nt, Artificial Sequence
  Description of Artificial Sequence: Synthetic oligonucleotide
cagccccgcgggcucgcca

SEQ ID NO: 131082 - RNA, 19 nt, Artificial Sequence
  Description of Artificial Sequence: Synthetic oligonucleotide
ggccugguagcgguauggu

SEQ ID NO: 131083 - RNA, 19 nt, Artificial Sequence
  Description of Artificial Sequence: Synthetic oligonucleotide
gccccgcggaacccacgac

SEQ ID NO: 131084 - RNA, 19 nt, Artificial Sequence
  Description of Artificial Sequence: Synthetic oligonucleotide
cagucacuaccuggacccu

SEQ ID NO: 131085 - RNA, 19 nt, Artificial Sequence
  Description of Artificial Sequence: Synthetic oligonucleotide
cccgcggaacccacgacau

SEQ ID NO: 131086 - RNA, 19 nt, Artificial Sequence
  Description of Artificial Sequence: Synthetic oligonucleotide
ccggucuuggcggcuccuc

SEQ ID NO: 131087 - RNA, 19 nt, Artificial Sequence
  Description of Artificial Sequence: Synthetic oligonucleotide
ggcugacgcaggcgcuugu

SEQ ID NO: 131088 - RNA, 19 nt, Artificial Sequence
  Description of Artificial Sequence: Synthetic oligonucleotide
caguagcaagcaggguauu

SEQ ID NO: 131089 - RNA, 19 nt, Artificial Sequence
  Description of Artificial Sequence: Synthetic oligonucleotide
caguacccgccagucucau

SEQ ID NO: 131090 - RNA, 19 nt, Artificial Sequence
  Description of Artificial Sequence: Synthetic oligonucleotide
ccgcagcaaugagcagccc

SEQ ID NO: 131091 - RNA, 19 nt, Artificial Sequence
  Description of Artificial Sequence: Synthetic oligonucleotide
cgcgggcucgccaccccuc

SEQ ID NO: 131092 - RNA, 19 nt, Artificial Sequence
  Description of Artificial Sequence: Synthetic oligonucleotide
ggguccaccuggagcgcgu

SEQ ID NO: 131093 - RNA, 19 nt, Artificial Sequence
  Description of Artificial Sequence: Synthetic oligonucleotide
gcccaucccgcacgcgcgu

SEQ ID NO: 131094 - RNA, 19 nt, Artificial Sequence
  Description of Artificial Sequence: Synthetic oligonucleotide
gcacuacauggagcugccu

SEQ ID NO: 131095 - RNA, 19 nt, Artificial Sequence
  Description of Artificial Sequence: Synthetic oligonucleotide
ccgucgccgggaagccuga

SEQ ID NO: 131096 - RNA, 19 nt, Artificial Sequence
  Description of Artificial Sequence: Synthetic oligonucleotide
gggauuccuuugagaccgu

SEQ ID NO: 131097 - RNA, 19 nt, Artificial Sequence
  Description of Artificial Sequence: Synthetic oligonucleotide
cggcaggggccuuccugaa

SEQ ID NO: 131098 - RNA, 19 nt, Artificial Sequence
  Description of Artificial Sequence: Synthetic oligonucleotide
uuuauaaagacacagacug

SEQ ID NO: 131099 - RNA, 19 nt, Artificial Sequence
  Description of Artificial Sequence: Synthetic oligonucleotide
aaauauagaccuuagguug

SEQ ID NO: 131100 - RNA, 19 nt, Artificial Sequence
  Description of Artificial Sequence: Synthetic oligonucleotide
aauucuacugcccaugacg

SEQ ID NO: 131101 - RNA, 19 nt, Artificial Sequence
  Description of Artificial Sequence: Synthetic oligonucleotide
uuauauacauuccugauca

SEQ ID NO: 131102 - RNA, 19 nt, Artificial Sequence
  Description of Artificial Sequence: Synthetic oligonucleotide
ucaaguuugauuucgaucu

SEQ ID NO: 131103 - RNA, 19 nt, Artificial Sequence
  Description of Artificial Sequence: Synthetic oligonucleotide
aagaacgcaauuuugaaga

SEQ ID NO: 131104 - RNA, 19 nt, Artificial Sequence
  Description of Artificial Sequence: Synthetic oligonucleotide
auaaaaguuaugaauagcg

SEQ ID NO: 131105 - RNA, 19 nt, Artificial Sequence
  Description of Artificial Sequence: Synthetic oligonucleotide
ugauuuaccaaucuucaca

SEQ ID NO: 131106 - RNA, 19 nt, Artificial Sequence
  Description of Artificial Sequence: Synthetic oligonucleotide
uggacuaaauccuauguag

SEQ ID NO: 131107 - RNA, 19 nt, Artificial Sequence
  Description of Artificial Sequence: Synthetic oligonucleotide
uaugggacaccacacacgg

SEQ ID NO: 131108 - RNA, 19 nt, Artificial Sequence
  Description of Artificial Sequence: Synthetic oligonucleotide
uucacagcggaucaaagcc

SEQ ID NO: 131109 - RNA, 19 nt, Artificial Sequence
  Description of Artificial Sequence: Synthetic oligonucleotide
auuaaacugagauacccag

SEQ ID NO: 131110 - RNA, 19 nt, Artificial Sequence
  Description of Artificial Sequence: Synthetic oligonucleotide
augacgaaauucuacugcc

SEQ ID NO: 131111 - RNA, 19 nt, Artificial Sequence
  Description of Artificial Sequence: Synthetic oligonucleotide
uuucacaugacgaaauucu

SEQ ID NO: 131112 - RNA, 19 nt, Artificial Sequence
  Description of Artificial Sequence: Synthetic oligonucleotide
aauacucggcuuuugggag

SEQ ID NO: 131113 - RNA, 19 nt, Artificial Sequence
  Description of Artificial Sequence: Synthetic oligonucleotide
gauugcgccuccuaaaagg

SEQ ID NO: 131114 - RNA, 19 nt, Artificial Sequence
  Description of Artificial Sequence: Synthetic oligonucleotide
cagaguauuggacaaaggg

SEQ ID NO: 131115 - RNA, 19 nt, Artificial Sequence
  Description of Artificial Sequence: Synthetic oligonucleotide
cuuagguugacuacgggag

SEQ ID NO: 131116 - RNA, 19 nt, Artificial Sequence
  Description of Artificial Sequence: Synthetic oligonucleotide
guuggguugagguaugugg

SEQ ID NO: 131117 - RNA, 19 nt, Artificial Sequence
  Description of Artificial Sequence: Synthetic oligonucleotide
aguuuacccagcuaaauca

SEQ ID NO: 131118 - RNA, 19 nt, Artificial Sequence
  Description of Artificial Sequence: Synthetic oligonucleotide
aaauccaauauugucauaa

SEQ ID NO: 131119 - RNA, 19 nt, Artificial Sequence
  Description of Artificial Sequence: Synthetic oligonucleotide
aauaacuuaucuguuacaa

SEQ ID NO: 131120 - RNA, 19 nt, Artificial Sequence
  Description of Artificial Sequence: Synthetic oligonucleotide
aggaguuguaauguaaggc

SEQ ID NO: 131121 - RNA, 19 nt, Artificial Sequence
  Description of Artificial Sequence: Synthetic oligonucleotide
gaagaacgcaauuuugaag

SEQ ID NO: 131122 - RNA, 19 nt, Artificial Sequence
  Description of Artificial Sequence: Synthetic oligonucleotide
uucgagugaagguauuugg

SEQ ID NO: 131123 - RNA, 19 nt, Artificial Sequence
  Description of Artificial Sequence: Synthetic oligonucleotide
uuaaaaugugguccucggg

SEQ ID NO: 131124 - RNA, 19 nt, Artificial Sequence
  Description of Artificial Sequence: Synthetic oligonucleotide
aauccuauguagcagugaa

SEQ ID NO: 131125 - RNA, 19 nt, Artificial Sequence
  Description of Artificial Sequence: Synthetic oligonucleotide
uguggacugacacucaaca

SEQ ID NO: 131126 - RNA, 19 nt, Artificial Sequence
  Description of Artificial Sequence: Synthetic oligonucleotide
agacugagguauuauuagc

SEQ ID NO: 131127 - RNA, 19 nt, Artificial Sequence
  Description of Artificial Sequence: Synthetic oligonucleotide
uuaguuaacaaaagucuau

SEQ ID NO: 131128 - RNA, 19 nt, Artificial Sequence
  Description of Artificial Sequence: Synthetic oligonucleotide
ucgagugaagguauuuggg

SEQ ID NO: 131129 - RNA, 19 nt, Artificial Sequence
  Description of Artificial Sequence: Synthetic oligonucleotide
uucagcacuucccuuagcc

SEQ ID NO: 131130 - RNA, 19 nt, Artificial Sequence
  Description of Artificial Sequence: Synthetic oligonucleotide
aguucuaugggacaccaca

SEQ ID NO: 131131 - RNA, 19 nt, Artificial Sequence
  Description of Artificial Sequence: Synthetic oligonucleotide
uuagacugagguauuauua

SEQ ID NO: 131132 - RNA, 19 nt, Artificial Sequence
  Description of Artificial Sequence: Synthetic oligonucleotide
cauuggcugaaauauagac

SEQ ID NO: 131133 - RNA, 19 nt, Artificial Sequence
  Description of Artificial Sequence: Synthetic oligonucleotide
gguucauaggauuaaacug

SEQ ID NO: 131134 - RNA, 19 nt, Artificial Sequence
  Description of Artificial Sequence: Synthetic oligonucleotide
  modified_base (4)..(4): a, c, u, g, unknown or other
ucancuuucacaugacgaa

SEQ ID NO: 131135 - RNA, 19 nt, Artificial Sequence
  Description of Artificial Sequence: Synthetic oligonucleotide
uuugggauauggaauuuga

SEQ ID NO: 131136 - RNA, 19 nt, Artificial Sequence
  Description of Artificial Sequence: Synthetic oligonucleotide
ugaccaacgaggaagugcu

SEQ ID NO: 131137 - RNA, 19 nt, Artificial Sequence
  Description of Artificial Sequence: Synthetic oligonucleotide
  modified_base (6)..(6): a, c, u, g, unknown or other
gaucancuuucacaugacg

SEQ ID NO: 131138 - RNA, 19 nt, Artificial Sequence
  Description of Artificial Sequence: Synthetic oligonucleotide
caugacgaaauucuacugc

SEQ ID NO: 131139 - RNA, 19 nt, Artificial Sequence
  Description of Artificial Sequence: Synthetic oligonucleotide
gaguauuggacaaagggac

SEQ ID NO: 131140 - RNA, 19 nt, Artificial Sequence
  Description of Artificial Sequence: Synthetic oligonucleotide
guuaaaaugugguccucgg

SEQ ID NO: 131141 - RNA, 19 nt, Artificial Sequence
  Description of Artificial Sequence: Synthetic oligonucleotide
ugcggauuuguacagacaa

SEQ ID NO: 131142 - RNA, 19 nt, Artificial Sequence
  Description of Artificial Sequence: Synthetic oligonucleotide
ugggguuaaaauguggucc

SEQ ID NO: 131143 - RNA, 19 nt, Artificial Sequence
  Description of Artificial Sequence: Synthetic oligonucleotide
gaugcaucaaauguccgag

SEQ ID NO: 131144 - RNA, 19 nt, Artificial Sequence
  Description of Artificial Sequence: Synthetic oligonucleotide
uuaaacugagauacccagc

SEQ ID NO: 131145 - RNA, 19 nt, Artificial Sequence
  Description of Artificial Sequence: Synthetic oligonucleotide
ggaguuguaauguaaggcc

SEQ ID NO: 131146 - RNA, 19 nt, Artificial Sequence
  Description of Artificial Sequence: Synthetic oligonucleotide
uacagcgugaccuacugac

SEQ ID NO: 131147 - RNA, 19 nt, Artificial Sequence
  Description of Artificial Sequence: Synthetic oligonucleotide
cuaggaguuguaauguaag

SEQ ID NO: 131148 - RNA, 19 nt, Artificial Sequence
  Description of Artificial Sequence: Synthetic oligonucleotide
uucuauuuaaggucuggcu

SEQ ID NO: 131149 - RNA, 19 nt, Artificial Sequence
  Description of Artificial Sequence: Synthetic oligonucleotide
ucuaugggacaccacacac

SEQ ID NO: 131150 - RNA, 19 nt, Artificial Sequence
  Description of Artificial Sequence: Synthetic oligonucleotide
uuauuugugcauaguuuca

SEQ ID NO: 131151 - RNA, 19 nt, Artificial Sequence
  Description of Artificial Sequence: Synthetic oligonucleotide
aguuggcgaacugauaggc

SEQ ID NO: 131152 - RNA, 19 nt, Artificial Sequence
  Description of Artificial Sequence: Synthetic oligonucleotide
uuggguugagguauguggc

SEQ ID NO: 131153 - RNA, 19 nt, Artificial Sequence
  Description of Artificial Sequence: Synthetic oligonucleotide
uuuguacagacaaugcaua

SEQ ID NO: 131154 - RNA, 19 nt, Artificial Sequence
  Description of Artificial Sequence: Synthetic oligonucleotide
caucagaucccauacucag

SEQ ID NO: 131155 - RNA, 19 nt, Artificial Sequence
  Description of Artificial Sequence: Synthetic oligonucleotide
uccccgaugacagagagga

SEQ ID NO: 131156 - RNA, 19 nt, Artificial Sequence
  Description of Artificial Sequence: Synthetic oligonucleotide
uuguaaguucaaagguagg

SEQ ID NO: 131157 - RNA, 19 nt, Artificial Sequence
  Description of Artificial Sequence: Synthetic oligonucleotide
aaugaauuguuggcgguug

SEQ ID NO: 131158 - RNA, 19 nt, Artificial Sequence
  Description of Artificial Sequence: Synthetic oligonucleotide
ucacagcggaucaaagccg

SEQ ID NO: 131159 - RNA, 19 nt, Artificial Sequence
  Description of Artificial Sequence: Synthetic oligonucleotide
acaugagagguuugauggc

SEQ ID NO: 131160 - RNA, 19 nt, Artificial Sequence
  Description of Artificial Sequence: Synthetic oligonucleotide
aacuggacuaaauccuaug

SEQ ID NO: 131161 - RNA, 19 nt, Artificial Sequence
  Description of Artificial Sequence: Synthetic oligonucleotide
aguuauauacauuccugau

SEQ ID NO: 131162 - RNA, 19 nt, Artificial Sequence
  Description of Artificial Sequence: Synthetic oligonucleotide
ucaaagguaggggacacca

SEQ ID NO: 131163 - RNA, 19 nt, Artificial Sequence
  Description of Artificial Sequence: Synthetic oligonucleotide
cugaaauauagaccuuagg

SEQ ID NO: 131164 - RNA, 19 nt, Artificial Sequence
  Description of Artificial Sequence: Synthetic oligonucleotide
uaaauccuauguagcagug

SEQ ID NO: 131165 - RNA, 19 nt, Artificial Sequence
  Description of Artificial Sequence: Synthetic oligonucleotide
aagcagacgugagagaucu

SEQ ID NO: 131166 - RNA, 19 nt, Artificial Sequence
  Description of Artificial Sequence: Synthetic oligonucleotide
ucagaucccauacucaguu

SEQ ID NO: 131167 - RNA, 19 nt, Artificial Sequence
  Description of Artificial Sequence: Synthetic oligonucleotide
ugcccaugacguuagacug

SEQ ID NO: 131168 - RNA, 19 nt, Artificial Sequence
  Description of Artificial Sequence: Synthetic oligonucleotide
aauauagaccuuagguuga

SEQ ID NO: 131169 - RNA, 19 nt, Artificial Sequence
  Description of Artificial Sequence: Synthetic oligonucleotide
cuguugaccaacgaggaag

SEQ ID NO: 131170 - RNA, 19 nt, Artificial Sequence
  Description of Artificial Sequence: Synthetic oligonucleotide
uuaucuuauggcauugcuu

SEQ ID NO: 131171 - RNA, 19 nt, Artificial Sequence
  Description of Artificial Sequence: Synthetic oligonucleotide
  modified_base (8)..(8): a, c, u, g, unknown or other
cagaucancuuucacauga

SEQ ID NO: 131172 - RNA, 19 nt, Artificial Sequence
  Description of Artificial Sequence: Synthetic oligonucleotide
aguuagauuguuuuccauu

SEQ ID NO: 131173 - RNA, 19 nt, Artificial Sequence
  Description of Artificial Sequence: Synthetic oligonucleotide
cuaugggacaccacacacg

SEQ ID NO: 131174 - RNA, 19 nt, Artificial Sequence
  Description of Artificial Sequence: Synthetic oligonucleotide
agagguuugauggcccugc

SEQ ID NO: 131175 - RNA, 19 nt, Artificial Sequence
  Description of Artificial Sequence: Synthetic oligonucleotide
uugaccaacgaggaagugc

SEQ ID NO: 131176 - RNA, 19 nt, Artificial Sequence
  Description of Artificial Sequence: Synthetic oligonucleotide
agaccuuagguugacuacg

SEQ ID NO: 131177 - RNA, 19 nt, Artificial Sequence
  Description of Artificial Sequence: Synthetic oligonucleotide
uuuacccagcuaaaucaca

SEQ ID NO: 131178 - RNA, 19 nt, Artificial Sequence
  Description of Artificial Sequence: Synthetic oligonucleotide
ugcacuagcagagcuugcg

SEQ ID NO: 131179 - RNA, 19 nt, Artificial Sequence
  Description of Artificial Sequence: Synthetic oligonucleotide
aacaaggccuacuuuuaaa

SEQ ID NO: 131180 - RNA, 19 nt, Artificial Sequence
  Description of Artificial Sequence: Synthetic oligonucleotide
agaguauuggacaaaggga

SEQ ID NO: 131181 - RNA, 19 nt, Artificial Sequence
  Description of Artificial Sequence: Synthetic oligonucleotide
  modified_base (5)..(5): a, c, u, g, unknown or other
aucancuuucacaugacga

SEQ ID NO: 131182 - RNA, 19 nt, Artificial Sequence
  Description of Artificial Sequence: Synthetic oligonucleotide
acuuaaagcagacgugaga

SEQ ID NO: 131183 - RNA, 19 nt, Artificial Sequence
  Description of Artificial Sequence: Synthetic oligonucleotide
uugagugaccaccacucga

SEQ ID NO: 131184 - RNA, 19 nt, Artificial Sequence
  Description of Artificial Sequence: Synthetic oligonucleotide
aaugccgaggcaucucaca

SEQ ID NO: 131185 - RNA, 19 nt, Artificial Sequence
  Description of Artificial Sequence: Synthetic oligonucleotide
aacgguaauuuugaaagua

SEQ ID NO: 131186 - RNA, 19 nt, Artificial Sequence
  Description of Artificial Sequence: Synthetic oligonucleotide
agaugcaucaaauguccga

SEQ ID NO: 131187 - RNA, 19 nt, Artificial Sequence
  Description of Artificial Sequence: Synthetic oligonucleotide
ugucugucgagcuguacca

SEQ ID NO: 131188 - RNA, 19 nt, Artificial Sequence
  Description of Artificial Sequence: Synthetic oligonucleotide
aaugagaaccucccaugaa

SEQ ID NO: 131189 - RNA, 19 nt, Artificial Sequence
  Description of Artificial Sequence: Synthetic oligonucleotide
caaagauaguuuacccagc

SEQ ID NO: 131190 - RNA, 19 nt, Artificial Sequence
  Description of Artificial Sequence: Synthetic oligonucleotide
auaggauuaaacugagaua

SEQ ID NO: 131191 - RNA, 19 nt, Artificial Sequence
  Description of Artificial Sequence: Synthetic oligonucleotide
uguugaccaacgaggaagu

SEQ ID NO: 131192 - RNA, 19 nt, Artificial Sequence
  Description of Artificial Sequence: Synthetic oligonucleotide
uuauugggagaaacgguaa

SEQ ID NO: 131193 - RNA, 19 nt, Artificial Sequence
  Description of Artificial Sequence: Synthetic oligonucleotide
gcgccuucgaguuagauug

SEQ ID NO: 131194 - RNA, 19 nt, Artificial Sequence
  Description of Artificial Sequence: Synthetic oligonucleotide
cauaggauuaaacugagau

SEQ ID NO: 131195 - RNA, 19 nt, Artificial Sequence
  Description of Artificial Sequence: Synthetic oligonucleotide
uaguuggcgaacugauagg

SEQ ID NO: 131196 - RNA, 19 nt, Artificial Sequence
  Description of Artificial Sequence: Synthetic oligonucleotide
augacauguuuggucaccc

SEQ ID NO: 131197 - RNA, 19 nt, Artificial Sequence
  Description of Artificial Sequence: Synthetic oligonucleotide
ugacgaaauucuacugccc

SEQ ID NO: 131198 - RNA, 19 nt, Artificial Sequence
  Description of Artificial Sequence: Synthetic oligonucleotide
acaugacgaaauucuacug

SEQ ID NO: 131199 - RNA, 19 nt, Artificial Sequence
  Description of Artificial Sequence: Synthetic oligonucleotide
gguaaguaguccaaggacc

SEQ ID NO: 131200 - RNA, 19 nt, Artificial Sequence
  Description of Artificial Sequence: Synthetic oligonucleotide
aacuuaucuguuacaaaga

SEQ ID NO: 131201 - RNA, 19 nt, Artificial Sequence
  Description of Artificial Sequence: Synthetic oligonucleotide
ucgagcuguaccacuagga

SEQ ID NO: 131202 - RNA, 19 nt, Artificial Sequence
  Description of Artificial Sequence: Synthetic oligonucleotide
ugaaugaauuguuggcggu

SEQ ID NO: 131203 - RNA, 19 nt, Artificial Sequence
  Description of Artificial Sequence: Synthetic oligonucleotide
auagaccuuagguugacua

SEQ ID NO: 131204 - RNA, 19 nt, Artificial Sequence
  Description of Artificial Sequence: Synthetic oligonucleotide
cuuauugggagaaacggua

SEQ ID NO: 131205 - RNA, 19 nt, Artificial Sequence
  Description of Artificial Sequence: Synthetic oligonucleotide
ggauuaaacugagauaccc

SEQ ID NO: 131206 - RNA, 19 nt, Artificial Sequence
  Description of Artificial Sequence: Synthetic oligonucleotide
uuggcgaacugauaggcau

SEQ ID NO: 131207 - RNA, 19 nt, Artificial Sequence
  Description of Artificial Sequence: Synthetic oligonucleotide
auuucuucgagugaaggua

SEQ ID NO: 131208 - RNA, 19 nt, Artificial Sequence
  Description of Artificial Sequence: Synthetic oligonucleotide
ugugcuaaagcagggucug

SEQ ID NO: 131209 - RNA, 19 nt, Artificial Sequence
  Description of Artificial Sequence: Synthetic oligonucleotide
uuagguugacuacgggaga

SEQ ID NO: 131210 - RNA, 19 nt, Artificial Sequence
  Description of Artificial Sequence: Synthetic oligonucleotide
gauuaaacugagauaccca

SEQ ID NO: 131211 - RNA, 19 nt, Artificial Sequence
  Description of Artificial Sequence: Synthetic oligonucleotide
ggcuuauugggagaaacgg

SEQ ID NO: 131212 - RNA, 19 nt, Artificial Sequence
  Description of Artificial Sequence: Synthetic oligonucleotide
uagaccuuagguugacuac

SEQ ID NO: 131213 - RNA, 19 nt, Artificial Sequence
  Description of Artificial Sequence: Synthetic oligonucleotide
gaaauucuacugcccauga

SEQ ID NO: 131214 - RNA, 19 nt, Artificial Sequence
  Description of Artificial Sequence: Synthetic oligonucleotide
cacagcggaucaaagccgg

SEQ ID NO: 131215 - RNA, 19 nt, Artificial Sequence
  Description of Artificial Sequence: Synthetic oligonucleotide
agauacccagccagaaugc

SEQ ID NO: 131216 - RNA, 19 nt, Artificial Sequence
  Description of Artificial Sequence: Synthetic oligonucleotide
uucgaguuagauuguuuuc

SEQ ID NO: 131217 - RNA, 19 nt, Artificial Sequence
  Description of Artificial Sequence: Synthetic oligonucleotide
uguagcagugaaacauuuc

SEQ ID NO: 131218 - RNA, 19 nt, Artificial Sequence
  Description of Artificial Sequence: Synthetic oligonucleotide
ugcgccuccuaaaagggaa

SEQ ID NO: 131219 - RNA, 19 nt, Artificial Sequence
  Description of Artificial Sequence: Synthetic oligonucleotide
ucagugggcuuaaauacuu

SEQ ID NO: 131220 - RNA, 19 nt, Artificial Sequence
  Description of Artificial Sequence: Synthetic oligonucleotide
uugacuacgggagaucauc

SEQ ID NO: 131221 - RNA, 19 nt, Artificial Sequence
  Description of Artificial Sequence: Synthetic oligonucleotide
aguguagguugauugcgca

SEQ ID NO: 131222 - RNA, 19 nt, Artificial Sequence
  Description of Artificial Sequence: Synthetic oligonucleotide
auugcgccuccuaaaaggg

SEQ ID NO: 131223 - RNA, 19 nt, Artificial Sequence
  Description of Artificial Sequence: Synthetic oligonucleotide
guugagugaccaccacucg

SEQ ID NO: 131224 - RNA, 19 nt, Artificial Sequence
  Description of Artificial Sequence: Synthetic oligonucleotide
  modified_base (7)..(7): a, c, u, g, unknown or other
agaucancuuucacaugac

SEQ ID NO: 131225 - RNA, 19 nt, Artificial Sequence
  Description of Artificial Sequence: Synthetic oligonucleotide
  modified_base (2)..(2): a, c, u, g, unknown or other
ancuuucacaugacgaaau

SEQ ID NO: 131226 - RNA, 19 nt, Artificial Sequence
  Description of Artificial Sequence: Synthetic oligonucleotide
ucuacugcccaugacguua

SEQ ID NO: 131227 - RNA, 19 nt, Artificial Sequence
  Description of Artificial Sequence: Synthetic oligonucleotide
ugacuacgggagaucaucu

SEQ ID NO: 131228 - RNA, 19 nt, Artificial Sequence
  Description of Artificial Sequence: Synthetic oligonucleotide
guaauguaaggccuaauau

SEQ ID NO: 131229 - RNA, 19 nt, Artificial Sequence
  Description of Artificial Sequence: Synthetic oligonucleotide
guugauugcgcaugcccug

SEQ ID NO: 131230 - RNA, 19 nt, Artificial Sequence
  Description of Artificial Sequence: Synthetic oligonucleotide
augcaucaaauguccgagg

SEQ ID NO: 131231 - RNA, 19 nt, Artificial Sequence
  Description of Artificial Sequence: Synthetic oligonucleotide
  modified_base (9)..(9): a, c, u, g, unknown or other
ucagaucancuuucacaug

SEQ ID NO: 131232 - RNA, 19 nt, Artificial Sequence
  Description of Artificial Sequence: Synthetic oligonucleotide
auauagaccuuagguugac

SEQ ID NO: 131233 - RNA, 19 nt, Artificial Sequence
  Description of Artificial Sequence: Synthetic oligonucleotide
acccagcuaaaucacaaaa

SEQ ID NO: 131234 - RNA, 19 nt, Artificial Sequence
  Description of Artificial Sequence: Synthetic oligonucleotide
ggaguugucuauuacaacu

SEQ ID NO: 131235 - RNA, 19 nt, Artificial Sequence
  Description of Artificial Sequence: Synthetic oligonucleotide
ucugaggcucaucuguaau

SEQ ID NO: 131236 - RNA, 19 nt, Artificial Sequence
  Description of Artificial Sequence: Synthetic oligonucleotide
uaguuaacaaaagucuauu

SEQ ID NO: 131237 - RNA, 19 nt, Artificial Sequence
  Description of Artificial Sequence: Synthetic oligonucleotide
agcgcugggguuaaaaugu

SEQ ID NO: 131238 - RNA, 19 nt, Artificial Sequence
  Description of Artificial Sequence: Synthetic oligonucleotide
gauaggcauguagacauga

SEQ ID NO: 131239 - RNA, 19 nt, Artificial Sequence
  Description of Artificial Sequence: Synthetic oligonucleotide
gaccuuagguugacuacgg

SEQ ID NO: 131240 - RNA, 19 nt, Artificial Sequence
  Description of Artificial Sequence: Synthetic oligonucleotide
uggaguugucuauuacaac

SEQ ID NO: 131241 - RNA, 19 nt, Artificial Sequence
  Description of Artificial Sequence: Synthetic oligonucleotide
agcggaucaaagccgggug

SEQ ID NO: 131242 - RNA, 19 nt, Artificial Sequence
  Description of Artificial Sequence: Synthetic oligonucleotide
acuugcccggacauauucc

SEQ ID NO: 131243 - RNA, 19 nt, Artificial Sequence
  Description of Artificial Sequence: Synthetic oligonucleotide
uuacugccuaauacucggc

SEQ ID NO: 131244 - RNA, 19 nt, Artificial Sequence
  Description of Artificial Sequence: Synthetic oligonucleotide
ucugucgagcuguaccacu

SEQ ID NO: 131245 - RNA, 19 nt, Artificial Sequence
  Description of Artificial Sequence: Synthetic oligonucleotide
cuugcguguaggcagcauc

SEQ ID NO: 131246 - RNA, 19 nt, Artificial Sequence
  Description of Artificial Sequence: Synthetic oligonucleotide
aacaugauugcgccuccua

SEQ ID NO: 131247 - RNA, 19 nt, Artificial Sequence
  Description of Artificial Sequence: Synthetic oligonucleotide
auucuacugcccaugacgu

SEQ ID NO: 131248 - RNA, 19 nt, Artificial Sequence
  Description of Artificial Sequence: Synthetic oligonucleotide
gugagcuaccagaugaaug

SEQ ID NO: 131249 - RNA, 19 nt, Artificial Sequence
  Description of Artificial Sequence: Synthetic oligonucleotide
gaggggaguuauuugugca

SEQ ID NO: 131250 - RNA, 19 nt, Artificial Sequence
  Description of Artificial Sequence: Synthetic oligonucleotide
uugggagaaacgguaauuu

SEQ ID NO: 131251 - RNA, 19 nt, Artificial Sequence
  Description of Artificial Sequence: Synthetic oligonucleotide
uaaagagaugucugagguu

SEQ ID NO: 131252 - RNA, 19 nt, Artificial Sequence
  Description of Artificial Sequence: Synthetic oligonucleotide
cuauuuaaggucuggcugu

SEQ ID NO: 131253 - RNA, 19 nt, Artificial Sequence
  Description of Artificial Sequence: Synthetic oligonucleotide
ggguaaguaguccaaggac

SEQ ID NO: 131254 - RNA, 19 nt, Artificial Sequence
  Description of Artificial Sequence: Synthetic oligonucleotide
cuaaauccuauguagcagu

SEQ ID NO: 131255 - RNA, 19 nt, Artificial Sequence
  Description of Artificial Sequence: Synthetic oligonucleotide
uucccuuagccccauugua

SEQ ID NO: 131256 - RNA, 19 nt, Artificial Sequence
  Description of Artificial Sequence: Synthetic oligonucleotide
gaaguucuaugggacacca

SEQ ID NO: 131257 - RNA, 19 nt, Artificial Sequence
  Description of Artificial Sequence: Synthetic oligonucleotide
gaacgcaauuuugaagaac

SEQ ID NO: 131258 - RNA, 19 nt, Artificial Sequence
  Description of Artificial Sequence: Synthetic oligonucleotide
uccuaaagaugacuauguu

SEQ ID NO: 131259 - RNA, 19 nt, Artificial Sequence
  Description of Artificial Sequence: Synthetic oligonucleotide
gguuaagcagucaauguca

SEQ ID NO: 131260 - RNA, 19 nt, Artificial Sequence
  Description of Artificial Sequence: Synthetic oligonucleotide
ugauuucauuuaguuauau

SEQ ID NO: 131261 - RNA, 19 nt, Artificial Sequence
  Description of Artificial Sequence: Synthetic oligonucleotide
uuccccgaugacagagagg

SEQ ID NO: 131262 - RNA, 19 nt, Artificial Sequence
  Description of Artificial Sequence: Synthetic oligonucleotide
uggcgaacugauaggcaug

SEQ ID NO: 131263 - RNA, 19 nt, Artificial Sequence
  Description of Artificial Sequence: Synthetic oligonucleotide
accuuagguugacuacggg

SEQ ID NO: 131264 - RNA, 19 nt, Artificial Sequence
  Description of Artificial Sequence: Synthetic oligonucleotide
guaagcacugaauuucaua

SEQ ID NO: 131265 - RNA, 19 nt, Artificial Sequence
  Description of Artificial Sequence: Synthetic oligonucleotide
gaagugcuggcaguucgag

SEQ ID NO: 131266 - RNA, 19 nt, Artificial Sequence
  Description of Artificial Sequence: Synthetic oligonucleotide
cuuagccccauuguaagca

SEQ ID NO: 131267 - RNA, 19 nt, Artificial Sequence
  Description of Artificial Sequence: Synthetic oligonucleotide
uacucaguuuccgugcuuc

SEQ ID NO: 131268 - RNA, 19 nt, Artificial Sequence
  Description of Artificial Sequence: Synthetic oligonucleotide
ucuucggugcuuugauggu

SEQ ID NO: 131269 - RNA, 19 nt, Artificial Sequence
  Description of Artificial Sequence: Synthetic oligonucleotide
aaguucuaugggacaccac

SEQ ID NO: 131270 - RNA, 19 nt, Artificial Sequence
  Description of Artificial Sequence: Synthetic oligonucleotide
augacguuagacugaggua

SEQ ID NO: 131271 - RNA, 19 nt, Artificial Sequence
  Description of Artificial Sequence: Synthetic oligonucleotide
ggcagcuauguaaacagug

SEQ ID NO: 131272 - RNA, 19 nt, Artificial Sequence
  Description of Artificial Sequence: Synthetic oligonucleotide
uguggaguaguuggcgaac

SEQ ID NO: 131273 - RNA, 19 nt, Artificial Sequence
  Description of Artificial Sequence: Synthetic oligonucleotide
gcauuucuucgagugaagg

SEQ ID NO: 131274 - RNA, 19 nt, Artificial Sequence
  Description of Artificial Sequence: Synthetic oligonucleotide
uauauacauuccugaucau

SEQ ID NO: 131275 - RNA, 19 nt, Artificial Sequence
  Description of Artificial Sequence: Synthetic oligonucleotide
uguuggguugagguaugug

SEQ ID NO: 131276 - RNA, 19 nt, Artificial Sequence
  Description of Artificial Sequence: Synthetic oligonucleotide
ugacauguuuggucaccca

SEQ ID NO: 131277 - RNA, 19 nt, Artificial Sequence
  Description of Artificial Sequence: Synthetic oligonucleotide
cacuugcccggacauauuc

SEQ ID NO: 131278 - RNA, 19 nt, Artificial Sequence
  Description of Artificial Sequence: Synthetic oligonucleotide
gguauguggcaaaggauug

SEQ ID NO: 131279 - RNA, 19 nt, Artificial Sequence
  Description of Artificial Sequence: Synthetic oligonucleotide
acauguuuggucacccacu

SEQ ID NO: 131280 - RNA, 19 nt, Artificial Sequence
  Description of Artificial Sequence: Synthetic oligonucleotide
guauuggacaaagggacaa

SEQ ID NO: 131281 - RNA, 19 nt, Artificial Sequence
  Description of Artificial Sequence: Synthetic oligonucleotide
guggacugacacucaacac

SEQ ID NO: 131282 - RNA, 19 nt, Artificial Sequence
  Description of Artificial Sequence: Synthetic oligonucleotide
ccaaugagaaccucccaug

SEQ ID NO: 131283 - RNA, 19 nt, Artificial Sequence
  Description of Artificial Sequence: Synthetic oligonucleotide
caugauugcgccuccuaaa

SEQ ID NO: 131284 - RNA, 19 nt, Artificial Sequence
  Description of Artificial Sequence: Synthetic oligonucleotide
uugcgccuccuaaaaggga

SEQ ID NO: 131285 - RNA, 19 nt, Artificial Sequence
  Description of Artificial Sequence: Synthetic oligonucleotide
ugcauaguuucaucucauu

SEQ ID NO: 131286 - RNA, 19 nt, Artificial Sequence
  Description of Artificial Sequence: Synthetic oligonucleotide
gcugaaauauagaccuuag

SEQ ID NO: 131287 - RNA, 19 nt, Artificial Sequence
  Description of Artificial Sequence: Synthetic oligonucleotide
ucgagguccuguugaaaua

SEQ ID NO: 131288 - RNA, 19 nt, Artificial Sequence
  Description of Artificial Sequence: Synthetic oligonucleotide
ucaaagccgggugauucaa

SEQ ID NO: 131289 - RNA, 19 nt, Artificial Sequence
  Description of Artificial Sequence: Synthetic oligonucleotide
ugcagaguuacugccuaau

SEQ ID NO: 131290 - RNA, 19 nt, Artificial Sequence
  Description of Artificial Sequence: Synthetic oligonucleotide
gcuaaaucacaaaaccauc

SEQ ID NO: 131291 - RNA, 19 nt, Artificial Sequence
  Description of Artificial Sequence: Synthetic oligonucleotide
uauagaccuuagguugacu

SEQ ID NO: 131292 - RNA, 19 nt, Artificial Sequence
  Description of Artificial Sequence: Synthetic oligonucleotide
uagccccauuguaagcacu

SEQ ID NO: 131293 - RNA, 19 nt, Artificial Sequence
  Description of Artificial Sequence: Synthetic oligonucleotide
cuucgaguuagauuguuuu

SEQ ID NO: 131294 - RNA, 19 nt, Artificial Sequence
  Description of Artificial Sequence: Synthetic oligonucleotide
gggcuuauugggagaaacg

SEQ ID NO: 131295 - RNA, 19 nt, Artificial Sequence
  Description of Artificial Sequence: Synthetic oligonucleotide
uggguugagugaccaccac

SEQ ID NO: 131296 - RNA, 19 nt, Artificial Sequence
  Description of Artificial Sequence: Synthetic oligonucleotide
agguugacuacgggagauc

SEQ ID NO: 131297 - RNA, 19 nt, Artificial Sequence
  Description of Artificial Sequence: Synthetic oligonucleotide
cuucggugcuuugauggug

SEQ ID NO: 131298 - RNA, 19 nt, Artificial Sequence
  Description of Artificial Sequence: Synthetic oligonucleotide
ugauugcgcaugcccugcu

SEQ ID NO: 131299 - RNA, 19 nt, Artificial Sequence
  Description of Artificial Sequence: Synthetic oligonucleotide
caguacagcaaccacacuu

SEQ ID NO: 131300 - RNA, 19 nt, Artificial Sequence
  Description of Artificial Sequence: Synthetic oligonucleotide
agaugugguuuuagaggag

SEQ ID NO: 131301 - RNA, 19 nt, Artificial Sequence
  Description of Artificial Sequence: Synthetic oligonucleotide
ugaauagcgcugggguuaa

SEQ ID NO: 131302 - RNA, 19 nt, Artificial Sequence
  Description of Artificial Sequence: Synthetic oligonucleotide
gauucggcuguuggguuga

SEQ ID NO: 131303 - RNA, 19 nt, Artificial Sequence
  Description of Artificial Sequence: Synthetic oligonucleotide
ccuuagguugacuacggga

SEQ ID NO: 131304 - RNA, 19 nt, Artificial Sequence
  Description of Artificial Sequence: Synthetic oligonucleotide
caguuguccuaaagaugac

SEQ ID NO: 131305 - RNA, 19 nt, Artificial Sequence
  Description of Artificial Sequence: Synthetic oligonucleotide
uagguugauugcgcaugcc

SEQ ID NO: 131306 - RNA, 19 nt, Artificial Sequence
  Description of Artificial Sequence: Synthetic oligonucleotide
cccuuagccccauuguaag

SEQ ID NO: 131307 - RNA, 19 nt, Artificial Sequence
  Description of Artificial Sequence: Synthetic oligonucleotide
  modified_base (3)..(3): a, c, u, g, unknown or other
cancuuucacaugacgaaa

SEQ ID NO: 131308 - RNA, 19 nt, Artificial Sequence
  Description of Artificial Sequence: Synthetic oligonucleotide
auauuggcuaugggcagaa

SEQ ID NO: 131309 - RNA, 19 nt, Artificial Sequence
  Description of Artificial Sequence: Synthetic oligonucleotide
uuuccgugcuucacuuauu

SEQ ID NO: 131310 - RNA, 19 nt, Artificial Sequence
  Description of Artificial Sequence: Synthetic oligonucleotide
guugugucugucgagcugu

SEQ ID NO: 131311 - RNA, 19 nt, Artificial Sequence
  Description of Artificial Sequence: Synthetic oligonucleotide
gugaccuacugacaugccu

SEQ ID NO: 131312 - RNA, 19 nt, Artificial Sequence
  Description of Artificial Sequence: Synthetic oligonucleotide
ccacucgaggagauguugc

SEQ ID NO: 131313 - RNA, 19 nt, Artificial Sequence
  Description of Artificial Sequence: Synthetic oligonucleotide
gugucuagugaccugugau

SEQ ID NO: 131314 - RNA, 19 nt, Artificial Sequence
  Description of Artificial Sequence: Synthetic oligonucleotide
gguugacuacgggagauca

SEQ ID NO: 131315 - RNA, 19 nt, Artificial Sequence
  Description of Artificial Sequence: Synthetic oligonucleotide
acaggaccuacaaauccaa

SEQ ID NO: 131316 - RNA, 19 nt, Artificial Sequence
  Description of Artificial Sequence: Synthetic oligonucleotide
cucggcuuuugggagggug

SEQ ID NO: 131317 - RNA, 19 nt, Artificial Sequence
  Description of Artificial Sequence: Synthetic oligonucleotide
cuggcccaacaguacagca

SEQ ID NO: 131318 - RNA, 19 nt, Artificial Sequence
  Description of Artificial Sequence: Synthetic oligonucleotide
guuggcgaacugauaggca

SEQ ID NO: 131319 - RNA, 19 nt, Artificial Sequence
  Description of Artificial Sequence: Synthetic oligonucleotide
uucuacugcccaugacguu

SEQ ID NO: 131320 - RNA, 19 nt, Artificial Sequence
  Description of Artificial Sequence: Synthetic oligonucleotide
ccuuagccccauuguaagc

SEQ ID NO: 131321 - RNA, 19 nt, Artificial Sequence
  Description of Artificial Sequence: Synthetic oligonucleotide
guugaccaacgaggaagug

SEQ ID NO: 131322 - RNA, 19 nt, Artificial Sequence
  Description of Artificial Sequence: Synthetic oligonucleotide
auuuccccgaugacagaga

SEQ ID NO: 131323 - RNA, 19 nt, Artificial Sequence
  Description of Artificial Sequence: Synthetic oligonucleotide
cuagugaccugugauugcu

SEQ ID NO: 131324 - RNA, 19 nt, Artificial Sequence
  Description of Artificial Sequence: Synthetic oligonucleotide
ggugucuagugaccuguga

SEQ ID NO: 131325 - RNA, 19 nt, Artificial Sequence
  Description of Artificial Sequence: Synthetic oligonucleotide
auacucaguuuccgugcuu

SEQ ID NO: 131326 - RNA, 19 nt, Artificial Sequence
  Description of Artificial Sequence: Synthetic oligonucleotide
ggcugaaauauagaccuua

SEQ ID NO: 131327 - RNA, 19 nt, Artificial Sequence
  Description of Artificial Sequence: Synthetic oligonucleotide
gaaugaauuguuggcgguu

SEQ ID NO: 131328 - RNA, 19 nt, Artificial Sequence
  Description of Artificial Sequence: Synthetic oligonucleotide
acagcggaucaaagccggg

SEQ ID NO: 131329 - RNA, 19 nt, Artificial Sequence
  Description of Artificial Sequence: Synthetic oligonucleotide
cugcggauuuguacagaca

SEQ ID NO: 131330 - RNA, 19 nt, Artificial Sequence
  Description of Artificial Sequence: Synthetic oligonucleotide
ucacuugcccggacauauu

SEQ ID NO: 131331 - RNA, 19 nt, Artificial Sequence
  Description of Artificial Sequence: Synthetic oligonucleotide
gcaguucgagguccagaag

SEQ ID NO: 131332 - RNA, 19 nt, Artificial Sequence
  Description of Artificial Sequence: Synthetic oligonucleotide
ggauuggaugcaggguaag

SEQ ID NO: 131333 - RNA, 19 nt, Artificial Sequence
  Description of Artificial Sequence: Synthetic oligonucleotide
cacuaggaguuguaaugua

SEQ ID NO: 131334 - RNA, 19 nt, Artificial Sequence
  Description of Artificial Sequence: Synthetic oligonucleotide
ccuaaagaugacuauguuu

SEQ ID NO: 131335 - RNA, 19 nt, Artificial Sequence
  Description of Artificial Sequence: Synthetic oligonucleotide
cugucgagcuguaccacua

SEQ ID NO: 131336 - RNA, 19 nt, Artificial Sequence
  Description of Artificial Sequence: Synthetic oligonucleotide
gggagaucaucucaucagu

SEQ ID NO: 131337 - RNA, 19 nt, Artificial Sequence
  Description of Artificial Sequence: Synthetic oligonucleotide
cugagauacccagccagaa

SEQ ID NO: 131338 - RNA, 19 nt, Artificial Sequence
  Description of Artificial Sequence: Synthetic oligonucleotide
cccaugacguuagacugag

SEQ ID NO: 131339 - RNA, 19 nt, Artificial Sequence
  Description of Artificial Sequence: Synthetic oligonucleotide
ggucuggugucuagugacc

SEQ ID NO: 131340 - RNA, 19 nt, Artificial Sequence
  Description of Artificial Sequence: Synthetic oligonucleotide
cagacgugagagaucugua

SEQ ID NO: 131341 - RNA, 19 nt, Artificial Sequence
  Description of Artificial Sequence: Synthetic oligonucleotide
uggcgguuguggaguaguu

SEQ ID NO: 131342 - RNA, 19 nt, Artificial Sequence
  Description of Artificial Sequence: Synthetic oligonucleotide
gguugauugcgcaugcccu

SEQ ID NO: 131343 - RNA, 19 nt, Artificial Sequence
  Description of Artificial Sequence: Synthetic oligonucleotide
ugcguguaggcagcaucau

SEQ ID NO: 131344 - RNA, 19 nt, Artificial Sequence
  Description of Artificial Sequence: Synthetic oligonucleotide
auccuauguagcagugaaa

SEQ ID NO: 131345 - RNA, 19 nt, Artificial Sequence
  Description of Artificial Sequence: Synthetic oligonucleotide
cucacuugcccggacauau

SEQ ID NO: 131346 - RNA, 19 nt, Artificial Sequence
  Description of Artificial Sequence: Synthetic oligonucleotide
gucugucgagcuguaccac

SEQ ID NO: 131347 - RNA, 19 nt, Artificial Sequence
  Description of Artificial Sequence: Synthetic oligonucleotide
cuucaggcgccuucgaguu

SEQ ID NO: 131348 - RNA, 19 nt, Artificial Sequence
  Description of Artificial Sequence: Synthetic oligonucleotide
gggguucaaguuugauuuc

SEQ ID NO: 131349 - RNA, 19 nt, Artificial Sequence
  Description of Artificial Sequence: Synthetic oligonucleotide
caaagccgggugauucaaa

SEQ ID NO: 131350 - RNA, 19 nt, Artificial Sequence
  Description of Artificial Sequence: Synthetic oligonucleotide
caacuggacuaaauccuau

SEQ ID NO: 131351 - RNA, 19 nt, Artificial Sequence
  Description of Artificial Sequence: Synthetic oligonucleotide
guguagguugauugcgcau

SEQ ID NO: 131352 - RNA, 19 nt, Artificial Sequence
  Description of Artificial Sequence: Synthetic oligonucleotide
caguuuccgugcuucacuu

SEQ ID NO: 131353 - RNA, 19 nt, Artificial Sequence
  Description of Artificial Sequence: Synthetic oligonucleotide
gccuaauacucggcuuuug

SEQ ID NO: 131354 - RNA, 19 nt, Artificial Sequence
  Description of Artificial Sequence: Synthetic oligonucleotide
cugcuauacuucagcacuu

SEQ ID NO: 131355 - RNA, 19 nt, Artificial Sequence
  Description of Artificial Sequence: Synthetic oligonucleotide
ccaugacguuagacugagg

SEQ ID NO: 131356 - RNA, 19 nt, Artificial Sequence
  Description of Artificial Sequence: Synthetic oligonucleotide
gacguuagacugagguauu

SEQ ID NO: 131357 - RNA, 19 nt, Artificial Sequence
  Description of Artificial Sequence: Synthetic oligonucleotide
ggcgaacugauaggcaugu

SEQ ID NO: 131358 - RNA, 19 nt, Artificial Sequence
  Description of Artificial Sequence: Synthetic oligonucleotide
cuugagucuucggugcuuu

SEQ ID NO: 131359 - RNA, 19 nt, Artificial Sequence
  Description of Artificial Sequence: Synthetic oligonucleotide
ggcgccuucgaguuagauu

SEQ ID NO: 131360 - RNA, 19 nt, Artificial Sequence
  Description of Artificial Sequence: Synthetic oligonucleotide
gcuuugaugguggaccuuu

SEQ ID NO: 131361 - RNA, 19 nt, Artificial Sequence
  Description of Artificial Sequence: Synthetic oligonucleotide
gcacuagcagagcuugcgu

SEQ ID NO: 131362 - RNA, 19 nt, Artificial Sequence
  Description of Artificial Sequence: Synthetic oligonucleotide
guugacuacgggagaucau

SEQ ID NO: 131363 - RNA, 19 nt, Artificial Sequence
  Description of Artificial Sequence: Synthetic oligonucleotide
agcagacgugagagaucug

SEQ ID NO: 131364 - RNA, 19 nt, Artificial Sequence
  Description of Artificial Sequence: Synthetic oligonucleotide
aggcgccuucgaguuagau

SEQ ID NO: 131365 - RNA, 19 nt, Artificial Sequence
  Description of Artificial Sequence: Synthetic oligonucleotide
cagcggaucaaagccgggu

SEQ ID NO: 131366 - RNA, 19 nt, Artificial Sequence
  Description of Artificial Sequence: Synthetic oligonucleotide
cagugggcuuaaauacuuu

SEQ ID NO: 131367 - RNA, 19 nt, Artificial Sequence
  Description of Artificial Sequence: Synthetic oligonucleotide
cagaucccauacucaguuu

SEQ ID NO: 131368 - RNA, 19 nt, Artificial Sequence
  Description of Artificial Sequence: Synthetic oligonucleotide
aaccucccaugaaguucua

SEQ ID NO: 131369 - RNA, 19 nt, Artificial Sequence
  Description of Artificial Sequence: Synthetic oligonucleotide
gccccauuguaagcacuga

SEQ ID NO: 131370 - RNA, 19 nt, Artificial Sequence
  Description of Artificial Sequence: Synthetic oligonucleotide
cuguuggguugagguaugu

SEQ ID NO: 131371 - RNA, 19 nt, Artificial Sequence
  Description of Artificial Sequence: Synthetic oligonucleotide
cgagguccagaagaacgca

SEQ ID NO: 131372 - RNA, 19 nt, Artificial Sequence
  Description of Artificial Sequence: Synthetic oligonucleotide
gcggauuuguacagacaau

SEQ ID NO: 131373 - RNA, 19 nt, Artificial Sequence
  Description of Artificial Sequence: Synthetic oligonucleotide
gcgccuccuaaaagggaaa

SEQ ID NO: 131374 - RNA, 19 nt, Artificial Sequence
  Description of Artificial Sequence: Synthetic oligonucleotide
ggaucaaagccgggugauu

SEQ ID NO: 131375 - RNA, 19 nt, Artificial Sequence
  Description of Artificial Sequence: Synthetic oligonucleotide
cgccuccuaaaagggaaaa

SEQ ID NO: 131376 - RNA, 19 nt, Artificial Sequence
  Description of Artificial Sequence: Synthetic oligonucleotide
acgauuuagacauauaagc

SEQ ID NO: 131377 - RNA, 19 nt, Artificial Sequence
  Description of Artificial Sequence: Synthetic oligonucleotide
aaagugguuacauucaaac

SEQ ID NO: 131378 - RNA, 19 nt, Artificial Sequence
  Description of Artificial Sequence: Synthetic oligonucleotide
ugaagaaucaaaccuauag

SEQ ID NO: 131379 - RNA, 19 nt, Artificial Sequence
  Description of Artificial Sequence: Synthetic oligonucleotide
aauccaacaccuuauaugu

SEQ ID NO: 131380 - RNA, 19 nt, Artificial Sequence
  Description of Artificial Sequence: Synthetic oligonucleotide
aaaucuuauugcuuuacag

SEQ ID NO: 131381 - RNA, 19 nt, Artificial Sequence
  Description of Artificial Sequence: Synthetic oligonucleotide
aagauuaaggacuaaaauu

SEQ ID NO: 131382 - RNA, 19 nt, Artificial Sequence
  Description of Artificial Sequence: Synthetic oligonucleotide
aagaguguucuuuaaagug

SEQ ID NO: 131383 - RNA, 19 nt, Artificial Sequence
  Description of Artificial Sequence: Synthetic oligonucleotide
acuuuuaacaucaucaguc

SEQ ID NO: 131384 - RNA, 19 nt, Artificial Sequence
  Description of Artificial Sequence: Synthetic oligonucleotide
caauuauugagauuguggc

SEQ ID NO: 131385 - RNA, 19 nt, Artificial Sequence
  Description of Artificial Sequence: Synthetic oligonucleotide
agcauguaagguuuguugc

SEQ ID NO: 131386 - RNA, 19 nt, Artificial Sequence
  Description of Artificial Sequence: Synthetic oligonucleotide
aaaauugaggaagacuggg

SEQ ID NO: 131387 - RNA, 19 nt, Artificial Sequence
  Description of Artificial Sequence: Synthetic oligonucleotide
agauuaaggacuaaaauug

SEQ ID NO: 131388 - RNA, 19 nt, Artificial Sequence
  Description of Artificial Sequence: Synthetic oligonucleotide
uuacgauuuagacauauaa

SEQ ID NO: 131389 - RNA, 19 nt, Artificial Sequence
  Description of Artificial Sequence: Synthetic oligonucleotide
uacgauuuagacauauaag

SEQ ID NO: 131390 - RNA, 19 nt, Artificial Sequence
  Description of Artificial Sequence: Synthetic oligonucleotide
uauagacuggcaaaugaag

SEQ ID NO: 131391 - RNA, 19 nt, Artificial Sequence
  Description of Artificial Sequence: Synthetic oligonucleotide
auaccuauaagaaaaugac

SEQ ID NO: 131392 - RNA, 19 nt, Artificial Sequence
  Description of Artificial Sequence: Synthetic oligonucleotide
auuaggaaaucuucaucgc

SEQ ID NO: 131393 - RNA, 19 nt, Artificial Sequence
  Description of Artificial Sequence: Synthetic oligonucleotide
aggaauuaagcauguaagg

SEQ ID NO: 131394 - RNA, 19 nt, Artificial Sequence
  Description of Artificial Sequence: Synthetic oligonucleotide
uguuaaaugacaacugguc

SEQ ID NO: 131395 - RNA, 19 nt, Artificial Sequence
  Description of Artificial Sequence: Synthetic oligonucleotide
cauaauaggaccccuaaac

SEQ ID NO: 131396 - RNA, 19 nt, Artificial Sequence
  Description of Artificial Sequence: Synthetic oligonucleotide
ugguaaacugacuauguag

SEQ ID NO: 131397 - RNA, 19 nt, Artificial Sequence
  Description of Artificial Sequence: Synthetic oligonucleotide
ucacauuagaccaucacaa

SEQ ID NO: 131398 - RNA, 19 nt, Artificial Sequence
  Description of Artificial Sequence: Synthetic oligonucleotide
uguccgaucauguaucuag

SEQ ID NO: 131399 - RNA, 19 nt, Artificial Sequence
  Description of Artificial Sequence: Synthetic oligonucleotide
aauuauugagauuguggcu

SEQ ID NO: 131400 - RNA, 19 nt, Artificial Sequence
  Description of Artificial Sequence: Synthetic oligonucleotide
aagcauguaagguuuguug

SEQ ID NO: 131401 - RNA, 19 nt, Artificial Sequence
  Description of Artificial Sequence: Synthetic oligonucleotide
cagugauuaauugacaugg

SEQ ID NO: 131402 - RNA, 19 nt, Artificial Sequence
  Description of Artificial Sequence: Synthetic oligonucleotide
cugaauaugaaagauuaag

SEQ ID NO: 131403 - RNA, 19 nt, Artificial Sequence
  Description of Artificial Sequence: Synthetic oligonucleotide
aagaaagugaauucacuaa

SEQ ID NO: 131404 - RNA, 19 nt, Artificial Sequence
  Description of Artificial Sequence: Synthetic oligonucleotide
ugagaaucauccuucuuag

SEQ ID NO: 131405 - RNA, 19 nt, Artificial Sequence
  Description of Artificial Sequence: Synthetic oligonucleotide
ucuagacuguuaucaaugg

SEQ ID NO: 131406 - RNA, 19 nt, Artificial Sequence
  Description of Artificial Sequence: Synthetic oligonucleotide
ugauuacuguucaaguugc

SEQ ID NO: 131407 - RNA, 19 nt, Artificial Sequence
  Description of Artificial Sequence: Synthetic oligonucleotide
uuuugauuacuguucaagu

SEQ ID NO: 131408 - RNA, 19 nt, Artificial Sequence
  Description of Artificial Sequence: Synthetic oligonucleotide
auaaacagaaagaagggug

SEQ ID NO: 131409 - RNA, 19 nt, Artificial Sequence
  Description of Artificial Sequence: Synthetic oligonucleotide
agaagggugucauaacaac

SEQ ID NO: 131410 - RNA, 19 nt, Artificial Sequence
  Description of Artificial Sequence: Synthetic oligonucleotide
aaacugugaguaaucaacg

SEQ ID NO: 131411 - RNA, 19 nt, Artificial Sequence
  Description of Artificial Sequence: Synthetic oligonucleotide
cugugaguaaucaacgacc

SEQ ID NO: 131412 - RNA, 19 nt, Artificial Sequence
  Description of Artificial Sequence: Synthetic oligonucleotide
ugauuaauugacauggcuu

SEQ ID NO: 131413 - RNA, 19 nt, Artificial Sequence
  Description of Artificial Sequence: Synthetic oligonucleotide
uaggaaaucuucaucgcug

SEQ ID NO: 131414 - RNA, 19 nt, Artificial Sequence
  Description of Artificial Sequence: Synthetic oligonucleotide
acauguucgcugucgaggc

SEQ ID NO: 131415 - RNA, 19 nt, Artificial Sequence
  Description of Artificial Sequence: Synthetic oligonucleotide
uagccuaccauacaguuaa

SEQ ID NO: 131416 - RNA, 19 nt, Artificial Sequence
  Description of Artificial Sequence: Synthetic oligonucleotide
ugaguaaucaacgaccuuc

SEQ ID NO: 131417 - RNA, 19 nt, Artificial Sequence
  Description of Artificial Sequence: Synthetic oligonucleotide
uggucugucaaacguacag

SEQ ID NO: 131418 - RNA, 19 nt, Artificial Sequence
  Description of Artificial Sequence: Synthetic oligonucleotide
aucacauuagaccaucaca

SEQ ID NO: 131419 - RNA, 19 nt, Artificial Sequence
  Description of Artificial Sequence: Synthetic oligonucleotide
auaauaggaccccuaaacu

SEQ ID NO: 131420 - RNA, 19 nt, Artificial Sequence
  Description of Artificial Sequence: Synthetic oligonucleotide
augaauaccuauaagaaaa

SEQ ID NO: 131421 - RNA, 19 nt, Artificial Sequence
  Description of Artificial Sequence: Synthetic oligonucleotide
uauauuccaucacauaaua

SEQ ID NO: 131422 - RNA, 19 nt, Artificial Sequence
  Description of Artificial Sequence: Synthetic oligonucleotide
aguagcauaauaggacccc

SEQ ID NO: 131423 - RNA, 19 nt, Artificial Sequence
  Description of Artificial Sequence: Synthetic oligonucleotide
uguaucuagccacacugca

SEQ ID NO: 131424 - RNA, 19 nt, Artificial Sequence
  Description of Artificial Sequence: Synthetic oligonucleotide
agguauugcaagaaugccc

SEQ ID NO: 131425 - RNA, 19 nt, Artificial Sequence
  Description of Artificial Sequence: Synthetic oligonucleotide
uaagaguguucuuuaaagu

SEQ ID NO: 131426 - RNA, 19 nt, Artificial Sequence
  Description of Artificial Sequence: Synthetic oligonucleotide
aaccguguccuacauaggu

SEQ ID NO: 131427 - RNA, 19 nt, Artificial Sequence
  Description of Artificial Sequence: Synthetic oligonucleotide
ugaagcuguaggacgaccc

SEQ ID NO: 131428 - RNA, 19 nt, Artificial Sequence
  Description of Artificial Sequence: Synthetic oligonucleotide
uuuagaugcugccugucgu

SEQ ID NO: 131429 - RNA, 19 nt, Artificial Sequence
  Description of Artificial Sequence: Synthetic oligonucleotide
aguuuuaauugccaucaca

SEQ ID NO: 131430 - RNA, 19 nt, Artificial Sequence
  Description of Artificial Sequence: Synthetic oligonucleotide
ugaccgaauuuucuuagca

SEQ ID NO: 131431 - RNA, 19 nt, Artificial Sequence
  Description of Artificial Sequence: Synthetic oligonucleotide
cuaugaauaccuauaagaa

SEQ ID NO: 131432 - RNA, 19 nt, Artificial Sequence
  Description of Artificial Sequence: Synthetic oligonucleotide
ucgucuuccauuaggaaau

SEQ ID NO: 131433 - RNA, 19 nt, Artificial Sequence
  Description of Artificial Sequence: Synthetic oligonucleotide
ggaugaaucaaaccagccg

SEQ ID NO: 131434 - RNA, 19 nt, Artificial Sequence
  Description of Artificial Sequence: Synthetic oligonucleotide
aacaauuauugagauugug

SEQ ID NO: 131435 - RNA, 19 nt, Artificial Sequence
  Description of Artificial Sequence: Synthetic oligonucleotide
uguaagguuuguugcaaca

SEQ ID NO: 131436 - RNA, 19 nt, Artificial Sequence
  Description of Artificial Sequence: Synthetic oligonucleotide
ugucaaacguacaggaaaa

SEQ ID NO: 131437 - RNA, 19 nt, Artificial Sequence
  Description of Artificial Sequence: Synthetic oligonucleotide
cauaggcacccuaaaauac

SEQ ID NO: 131438 - RNA, 19 nt, Artificial Sequence
  Description of Artificial Sequence: Synthetic oligonucleotide
cucgcaggaauuaagcaug

SEQ ID NO: 131439 - RNA, 19 nt, Artificial Sequence
  Description of Artificial Sequence: Synthetic oligonucleotide
uaguagcauaauaggaccc

SEQ ID NO: 131440 - RNA, 19 nt, Artificial Sequence
  Description of Artificial Sequence: Synthetic oligonucleotide
uguccuaugaauaccuaua

SEQ ID NO: 131441 - RNA, 19 nt, Artificial Sequence
  Description of Artificial Sequence: Synthetic oligonucleotide
ucaacccagugauuaauug

SEQ ID NO: 131442 - RNA, 19 nt, Artificial Sequence
  Description of Artificial Sequence: Synthetic oligonucleotide
uuucuuagcaggagggccu

SEQ ID NO: 131443 - RNA, 19 nt, Artificial Sequence
  Description of Artificial Sequence: Synthetic oligonucleotide
uaggcacccuaaaauacag

SEQ ID NO: 131444 - RNA, 19 nt, Artificial Sequence
  Description of Artificial Sequence: Synthetic oligonucleotide
auuccaauccuuuguauau

SEQ ID NO: 131445 - RNA, 19 nt, Artificial Sequence
  Description of Artificial Sequence: Synthetic oligonucleotide
ucaugguaaacugacuaug

SEQ ID NO: 131446 - RNA, 19 nt, Artificial Sequence
  Description of Artificial Sequence: Synthetic oligonucleotide
ucaacgaccuuccuauuuc

SEQ ID NO: 131447 - RNA, 19 nt, Artificial Sequence
  Description of Artificial Sequence: Synthetic oligonucleotide
uaucacauuagaccaucac

SEQ ID NO: 131448 - RNA, 19 nt, Artificial Sequence
  Description of Artificial Sequence: Synthetic oligonucleotide
augaccgaauuuucuuagc

SEQ ID NO: 131449 - RNA, 19 nt, Artificial Sequence
  Description of Artificial Sequence: Synthetic oligonucleotide
gaagcagucaacccaguga

SEQ ID NO: 131450 - RNA, 19 nt, Artificial Sequence
  Description of Artificial Sequence: Synthetic oligonucleotide
uguguauuucagcacugcu

SEQ ID NO: 131451 - RNA, 19 nt, Artificial Sequence
  Description of Artificial Sequence: Synthetic oligonucleotide
uuuggccauauuuaauacu

SEQ ID NO: 131452 - RNA, 19 nt, Artificial Sequence
  Description of Artificial Sequence: Synthetic oligonucleotide
gaccccuaaacuuugcuuc

SEQ ID NO: 131453 - RNA, 19 nt, Artificial Sequence
  Description of Artificial Sequence: Synthetic oligonucleotide
acaacuggucugucaaacg

SEQ ID NO: 131454 - RNA, 19 nt, Artificial Sequence
  Description of Artificial Sequence: Synthetic oligonucleotide
cauacaguuaagcuagcuc

SEQ ID NO: 131455 - RNA, 19 nt, Artificial Sequence
  Description of Artificial Sequence: Synthetic oligonucleotide
auucuaccaaugcauguug

SEQ ID NO: 131456 - RNA, 19 nt, Artificial Sequence
  Description of Artificial Sequence: Synthetic oligonucleotide
agcacugcuaagguauugc

SEQ ID NO: 131457 - RNA, 19 nt, Artificial Sequence
  Description of Artificial Sequence: Synthetic oligonucleotide
agacuguuaucaauggcac

SEQ ID NO: 131458 - RNA, 19 nt, Artificial Sequence
  Description of Artificial Sequence: Synthetic oligonucleotide
augcccaacccucugaugu

SEQ ID NO: 131459 - RNA, 19 nt, Artificial Sequence
  Description of Artificial Sequence: Synthetic oligonucleotide
ccuaugaauaccuauaaga

SEQ ID NO: 131460 - RNA, 19 nt, Artificial Sequence
  Description of Artificial Sequence: Synthetic oligonucleotide
aagauucuaccaaugcaug

SEQ ID NO: 131461 - RNA, 19 nt, Artificial Sequence
  Description of Artificial Sequence: Synthetic oligonucleotide
uggguuaacaacccagaau

SEQ ID NO: 131462 - RNA, 19 nt, Artificial Sequence
  Description of Artificial Sequence: Synthetic oligonucleotide
uccagaucgccucuuauuu

SEQ ID NO: 131463 - RNA, 19 nt, Artificial Sequence
  Description of Artificial Sequence: Synthetic oligonucleotide
cuagacuguuaucaauggc

SEQ ID NO: 131464 - RNA, 19 nt, Artificial Sequence
  Description of Artificial Sequence: Synthetic oligonucleotide
agugauuaauugacauggc

SEQ ID NO: 131465 - RNA, 19 nt, Artificial Sequence
  Description of Artificial Sequence: Synthetic oligonucleotide
gaaagaagggugucauaac

SEQ ID NO: 131466 - RNA, 19 nt, Artificial Sequence
  Description of Artificial Sequence: Synthetic oligonucleotide
uaaagugguuacauucaaa

SEQ ID NO: 131467 - RNA, 19 nt, Artificial Sequence
  Description of Artificial Sequence: Synthetic oligonucleotide
ucauaacaacuaagaagca

SEQ ID NO: 131468 - RNA, 19 nt, Artificial Sequence
  Description of Artificial Sequence: Synthetic oligonucleotide
gucuagacuguuaucaaug

SEQ ID NO: 131469 - RNA, 19 nt, Artificial Sequence
  Description of Artificial Sequence: Synthetic oligonucleotide
agauucuaccaaugcaugu

SEQ ID NO: 131470 - RNA, 19 nt, Artificial Sequence
  Description of Artificial Sequence: Synthetic oligonucleotide
uaggacgacccacuuuucc

SEQ ID NO: 131471 - RNA, 19 nt, Artificial Sequence
  Description of Artificial Sequence: Synthetic oligonucleotide
cuuaguaccaugcugugua

SEQ ID NO: 131472 - RNA, 19 nt, Artificial Sequence
  Description of Artificial Sequence: Synthetic oligonucleotide
acuggucugucaaacguac

SEQ ID NO: 131473 - RNA, 19 nt, Artificial Sequence
  Description of Artificial Sequence: Synthetic oligonucleotide
ugccucgcaggaauuaagc

SEQ ID NO: 131474 - RNA, 19 nt, Artificial Sequence
  Description of Artificial Sequence: Synthetic oligonucleotide
gaauuaagcauguaagguu

SEQ ID NO: 131475 - RNA, 19 nt, Artificial Sequence
  Description of Artificial Sequence: Synthetic oligonucleotide
ccgaaaaugcgccaaagcc

SEQ ID NO: 131476 - RNA, 19 nt, Artificial Sequence
  Description of Artificial Sequence: Synthetic oligonucleotide
gacgaagcagucaacccag

SEQ ID NO: 131477 - RNA, 19 nt, Artificial Sequence
  Description of Artificial Sequence: Synthetic oligonucleotide
acauauaagcucauguuaa

SEQ ID NO: 131478 - RNA, 19 nt, Artificial Sequence
  Description of Artificial Sequence: Synthetic oligonucleotide
uccgaucauguaucuagcc

SEQ ID NO: 131479 - RNA, 19 nt, Artificial Sequence
  Description of Artificial Sequence: Synthetic oligonucleotide
uuagacauauaagcucaug

SEQ ID NO: 131480 - RNA, 19 nt, Artificial Sequence
  Description of Artificial Sequence: Synthetic oligonucleotide
auagacuggcaaaugaaga

SEQ ID NO: 131481 - RNA, 19 nt, Artificial Sequence
  Description of Artificial Sequence: Synthetic oligonucleotide
agccguaggauuccuaacu

SEQ ID NO: 131482 - RNA, 19 nt, Artificial Sequence
  Description of Artificial Sequence: Synthetic oligonucleotide
auguaucuagccacacugc

SEQ ID NO: 131483 - RNA, 19 nt, Artificial Sequence
  Description of Artificial Sequence: Synthetic oligonucleotide
aguaccaugcuguguauuu

SEQ ID NO: 131484 - RNA, 19 nt, Artificial Sequence
  Description of Artificial Sequence: Synthetic oligonucleotide
augcauguugcaucuauaa

SEQ ID NO: 131485 - RNA, 19 nt, Artificial Sequence
  Description of Artificial Sequence: Synthetic oligonucleotide
auaaugugagugcuggguu

SEQ ID NO: 131486 - RNA, 19 nt, Artificial Sequence
  Description of Artificial Sequence: Synthetic oligonucleotide
uucacucauccuguugagg

SEQ ID NO: 131487 - RNA, 19 nt, Artificial Sequence
  Description of Artificial Sequence: Synthetic oligonucleotide
agcauaauaggaccccuaa

SEQ ID NO: 131488 - RNA, 19 nt, Artificial Sequence
  Description of Artificial Sequence: Synthetic oligonucleotide
ugucuagacuguuaucaau

SEQ ID NO: 131489 - RNA, 19 nt, Artificial Sequence
  Description of Artificial Sequence: Synthetic oligonucleotide
cuaccauacaguuaagcua

SEQ ID NO: 131490 - RNA, 19 nt, Artificial Sequence
  Description of Artificial Sequence: Synthetic oligonucleotide
uacaaagacgaagcaguca

SEQ ID NO: 131491 - RNA, 19 nt, Artificial Sequence
  Description of Artificial Sequence: Synthetic oligonucleotide
aggcaaacaauuauugaga

SEQ ID NO: 131492 - RNA, 19 nt, Artificial Sequence
  Description of Artificial Sequence: Synthetic oligonucleotide
uuaacuuccuuaguaccau

SEQ ID NO: 131493 - RNA, 19 nt, Artificial Sequence
  Description of Artificial Sequence: Synthetic oligonucleotide
auguucgcugucgaggcac

SEQ ID NO: 131494 - RNA, 19 nt, Artificial Sequence
  Description of Artificial Sequence: Synthetic oligonucleotide
ugaggcauacacuuaucuu

SEQ ID NO: 131495 - RNA, 19 nt, Artificial Sequence
  Description of Artificial Sequence: Synthetic oligonucleotide
gguaaacugacuauguaga

SEQ ID NO: 131496 - RNA, 19 nt, Artificial Sequence
  Description of Artificial Sequence: Synthetic oligonucleotide
acuuccuuaguaccaugcu

SEQ ID NO: 131497 - RNA, 19 nt, Artificial Sequence
  Description of Artificial Sequence: Synthetic oligonucleotide
ggugucuagacuguuauca

SEQ ID NO: 131498 - RNA, 19 nt, Artificial Sequence
  Description of Artificial Sequence: Synthetic oligonucleotide
ggugucauaacaacuaaga

SEQ ID NO: 131499 - RNA, 19 nt, Artificial Sequence
  Description of Artificial Sequence: Synthetic oligonucleotide
caacuauauauuccaucac

SEQ ID NO: 131500 - RNA, 19 nt, Artificial Sequence
  Description of Artificial Sequence: Synthetic oligonucleotide
auacaaagacgaagcaguc

SEQ ID NO: 131501 - RNA, 19 nt, Artificial Sequence
  Description of Artificial Sequence: Synthetic oligonucleotide
uuaagcauguaagguuugu

SEQ ID NO: 131502 - RNA, 19 nt, Artificial Sequence
  Description of Artificial Sequence: Synthetic oligonucleotide
uauagcucuauguccugau

SEQ ID NO: 131503 - RNA, 19 nt, Artificial Sequence
  Description of Artificial Sequence: Synthetic oligonucleotide
gguauugcaagaaugccca

SEQ ID NO: 131504 - RNA, 19 nt, Artificial Sequence
  Description of Artificial Sequence: Synthetic oligonucleotide
ugcuuuacagccguaggau

SEQ ID NO: 131505 - RNA, 19 nt, Artificial Sequence
  Description of Artificial Sequence: Synthetic oligonucleotide
uguucgcugucgaggcacg

SEQ ID NO: 131506 - RNA, 19 nt, Artificial Sequence
  Description of Artificial Sequence: Synthetic oligonucleotide
ccaucucaaaucuuauugc

SEQ ID NO: 131507 - RNA, 19 nt, Artificial Sequence
  Description of Artificial Sequence: Synthetic oligonucleotide
auagcucuauguccugaug

SEQ ID NO: 131508 - RNA, 19 nt, Artificial Sequence
  Description of Artificial Sequence: Synthetic oligonucleotide
accuauagcucuauguccu

SEQ ID NO: 131509 - RNA, 19 nt, Artificial Sequence
  Description of Artificial Sequence: Synthetic oligonucleotide
auuagaccaucacaagauu

SEQ ID NO: 131510 - RNA, 19 nt, Artificial Sequence
  Description of Artificial Sequence: Synthetic oligonucleotide
ugccuuucacuggacuugg

SEQ ID NO: 131511 - RNA, 19 nt, Artificial Sequence
  Description of Artificial Sequence: Synthetic oligonucleotide
cauuagaccaucacaagau

SEQ ID NO: 131512 - RNA, 19 nt, Artificial Sequence
  Description of Artificial Sequence: Synthetic oligonucleotide
uccuuaguaccaugcugug

SEQ ID NO: 131513 - RNA, 19 nt, Artificial Sequence
  Description of Artificial Sequence: Synthetic oligonucleotide
uggagcaugggaucugaau

SEQ ID NO: 131514 - RNA, 19 nt, Artificial Sequence
  Description of Artificial Sequence: Synthetic oligonucleotide
agaaugcccaacccucuga

SEQ ID NO: 131515 - RNA, 19 nt, Artificial Sequence
  Description of Artificial Sequence: Synthetic oligonucleotide
gaagcuguaggacgaccca

SEQ ID NO: 131516 - RNA, 19 nt, Artificial Sequence
  Description of Artificial Sequence: Synthetic oligonucleotide
gugauuaauugacauggcu

SEQ ID NO: 131517 - RNA, 19 nt, Artificial Sequence
  Description of Artificial Sequence: Synthetic oligonucleotide
uggcaagucaugccucgca

SEQ ID NO: 131518 - RNA, 19 nt, Artificial Sequence
  Description of Artificial Sequence: Synthetic oligonucleotide
ucgaggcacgaccgagucg

SEQ ID NO: 131519 - RNA, 19 nt, Artificial Sequence
  Description of Artificial Sequence: Synthetic oligonucleotide
ugcuuuagaugcugccugu

SEQ ID NO: 131520 - RNA, 19 nt, Artificial Sequence
  Description of Artificial Sequence: Synthetic oligonucleotide
aggugucuagacuguuauc

SEQ ID NO: 131521 - RNA, 19 nt, Artificial Sequence
  Description of Artificial Sequence: Synthetic oligonucleotide
accuuuccuguucugaaua

SEQ ID NO: 131522 - RNA, 19 nt, Artificial Sequence
  Description of Artificial Sequence: Synthetic oligonucleotide
augguaaacugacuaugua

SEQ ID NO: 131523 - RNA, 19 nt, Artificial Sequence
  Description of Artificial Sequence: Synthetic oligonucleotide
ugugaggcauacacuuauc

SEQ ID NO: 131524 - RNA, 19 nt, Artificial Sequence
  Description of Artificial Sequence: Synthetic oligonucleotide
uuagaugcugccugucguu

SEQ ID NO: 131525 - RNA, 19 nt, Artificial Sequence
  Description of Artificial Sequence: Synthetic oligonucleotide
agcccaaaccguguccuac

SEQ ID NO: 131526 - RNA, 19 nt, Artificial Sequence
  Description of Artificial Sequence: Synthetic oligonucleotide
ggcaacuuaaaccuuucaa

SEQ ID NO: 131527 - RNA, 19 nt, Artificial Sequence
  Description of Artificial Sequence: Synthetic oligonucleotide
ggucugucaaacguacagg

SEQ ID NO: 131528 - RNA, 19 nt, Artificial Sequence
  Description of Artificial Sequence: Synthetic oligonucleotide
uugcaacauguucauggua

SEQ ID NO: 131529 - RNA, 19 nt, Artificial Sequence
  Description of Artificial Sequence: Synthetic oligonucleotide
cuuauugcuuuacagccgu

SEQ ID NO: 131530 - RNA, 19 nt, Artificial Sequence
  Description of Artificial Sequence: Synthetic oligonucleotide
ggagcaugggaucugaaua

SEQ ID NO: 131531 - RNA, 19 nt, Artificial Sequence
  Description of Artificial Sequence: Synthetic oligonucleotide
gagucgaggagccgaggac

SEQ ID NO: 131532 - RNA, 19 nt, Artificial Sequence
  Description of Artificial Sequence: Synthetic oligonucleotide
ucgcaggaauuaagcaugu

SEQ ID NO: 131533 - RNA, 19 nt, Artificial Sequence
  Description of Artificial Sequence: Synthetic oligonucleotide
uagcauaauaggaccccua

SEQ ID NO: 131534 - RNA, 19 nt, Artificial Sequence
  Description of Artificial Sequence: Synthetic oligonucleotide
cuguguauuucagcacugc

SEQ ID NO: 131535 - RNA, 19 nt, Artificial Sequence
  Description of Artificial Sequence: Synthetic oligonucleotide
cgaucauguaucuagccac

SEQ ID NO: 131536 - RNA, 19 nt, Artificial Sequence
  Description of Artificial Sequence: Synthetic oligonucleotide
gucaaacguacaggaaaag

SEQ ID NO: 131537 - RNA, 19 nt, Artificial Sequence
  Description of Artificial Sequence: Synthetic oligonucleotide
ggaauuaagcauguaaggu

SEQ ID NO: 131538 - RNA, 19 nt, Artificial Sequence
  Description of Artificial Sequence: Synthetic oligonucleotide
aggcauacacuuaucuugu

SEQ ID NO: 131539 - RNA, 19 nt, Artificial Sequence
  Description of Artificial Sequence: Synthetic oligonucleotide
caugguaaacugacuaugu

SEQ ID NO: 131540 - RNA, 19 nt, Artificial Sequence
  Description of Artificial Sequence: Synthetic oligonucleotide
uuaguaccaugcuguguau

SEQ ID NO: 131541 - RNA, 19 nt, Artificial Sequence
  Description of Artificial Sequence: Synthetic oligonucleotide
ggcaagucaugccucgcag

SEQ ID NO: 131542 - RNA, 19 nt, Artificial Sequence
  Description of Artificial Sequence: Synthetic oligonucleotide
aacuggucugucaaacgua

SEQ ID NO: 131543 - RNA, 19 nt, Artificial Sequence
  Description of Artificial Sequence: Synthetic oligonucleotide
guguccuacauagguuucc

SEQ ID NO: 131544 - RNA, 19 nt, Artificial Sequence
  Description of Artificial Sequence: Synthetic oligonucleotide
gccgaaaaugcgccaaagc

SEQ ID NO: 131545 - RNA, 19 nt, Artificial Sequence
  Description of Artificial Sequence: Synthetic oligonucleotide
gcaagaaugcccaacccuc

SEQ ID NO: 131546 - RNA, 19 nt, Artificial Sequence
  Description of Artificial Sequence: Synthetic oligonucleotide
agccgaaaaugcgccaaag

SEQ ID NO: 131547 - RNA, 19 nt, Artificial Sequence
  Description of Artificial Sequence: Synthetic oligonucleotide
cugcuaagguauugcaaga

SEQ ID NO: 131548 - RNA, 19 nt, Artificial Sequence
  Description of Artificial Sequence: Synthetic oligonucleotide
ccccgucuccucaaaaugg

SEQ ID NO: 131549 - RNA, 19 nt, Artificial Sequence
  Description of Artificial Sequence: Synthetic oligonucleotide
gguuucgggcccuuggauc

SEQ ID NO: 131550 - RNA, 19 nt, Artificial Sequence
  Description of Artificial Sequence: Synthetic oligonucleotide
gugucuagacuguuaucaa

SEQ ID NO: 131551 - RNA, 19 nt, Artificial Sequence
  Description of Artificial Sequence: Synthetic oligonucleotide
cacugcuaagguauugcaa

SEQ ID NO: 131552 - RNA, 19 nt, Artificial Sequence
  Description of Artificial Sequence: Synthetic oligonucleotide
cacgaccgagucgaggagc

SEQ ID NO: 131553 - RNA, 19 nt, Artificial Sequence
  Description of Artificial Sequence: Synthetic oligonucleotide
gggugucauaacaacuaag

SEQ ID NO: 131554 - RNA, 19 nt, Artificial Sequence
  Description of Artificial Sequence: Synthetic oligonucleotide
agccuuuagucuggguuug

SEQ ID NO: 131555 - RNA, 19 nt, Artificial Sequence
  Description of Artificial Sequence: Synthetic oligonucleotide
uuauugcuuuacagccgua

SEQ ID NO: 131556 - RNA, 19 nt, Artificial Sequence
  Description of Artificial Sequence: Synthetic oligonucleotide
uuguugcaacauguucaug

SEQ ID NO: 131557 - RNA, 19 nt, Artificial Sequence
  Description of Artificial Sequence: Synthetic oligonucleotide
gucgaggcacgaccgaguc

SEQ ID NO: 131558 - RNA, 19 nt, Artificial Sequence
  Description of Artificial Sequence: Synthetic oligonucleotide
cagccguaggauuccuaac

SEQ ID NO: 131559 - RNA, 19 nt, Artificial Sequence
  Description of Artificial Sequence: Synthetic oligonucleotide
uucgcugucgaggcacgac

SEQ ID NO: 131560 - RNA, 19 nt, Artificial Sequence
  Description of Artificial Sequence: Synthetic oligonucleotide
uucgggcccuuggaucugg

SEQ ID NO: 131561 - RNA, 19 nt, Artificial Sequence
  Description of Artificial Sequence: Synthetic oligonucleotide
guaucuagccacacugcaa

SEQ ID NO: 131562 - RNA, 19 nt, Artificial Sequence
  Description of Artificial Sequence: Synthetic oligonucleotide
ccuaccauacaguuaagcu

SEQ ID NO: 131563 - RNA, 19 nt, Artificial Sequence
  Description of Artificial Sequence: Synthetic oligonucleotide
augccucgcaggaauuaag

SEQ ID NO: 131564 - RNA, 19 nt, Artificial Sequence
  Description of Artificial Sequence: Synthetic oligonucleotide
guaccaugcuguguauuuc

SEQ ID NO: 131565 - RNA, 19 nt, Artificial Sequence
  Description of Artificial Sequence: Synthetic oligonucleotide
cuggguuaacaacccagaa

SEQ ID NO: 131566 - RNA, 19 nt, Artificial Sequence
  Description of Artificial Sequence: Synthetic oligonucleotide
gaaugcccaacccucugau

SEQ ID NO: 131567 - RNA, 19 nt, Artificial Sequence
  Description of Artificial Sequence: Synthetic oligonucleotide
aggcacgaccgagucgagg

SEQ ID NO: 131568 - RNA, 19 nt, Artificial Sequence
  Description of Artificial Sequence: Synthetic oligonucleotide
gccguaaccuggcaaguca

SEQ ID NO: 131569 - RNA, 19 nt, Artificial Sequence
  Description of Artificial Sequence: Synthetic oligonucleotide
gccuaccauacaguuaagc

SEQ ID NO: 131570 - RNA, 19 nt, Artificial Sequence
  Description of Artificial Sequence: Synthetic oligonucleotide
gccuuugaagcuguaggac

SEQ ID NO: 131571 - RNA, 19 nt, Artificial Sequence
  Description of Artificial Sequence: Synthetic oligonucleotide
ugccguaaccuggcaaguc

SEQ ID NO: 131572 - RNA, 19 nt, Artificial Sequence
  Description of Artificial Sequence: Synthetic oligonucleotide
ccgaucauguaucuagcca

SEQ ID NO: 131573 - RNA, 19 nt, Artificial Sequence
  Description of Artificial Sequence: Synthetic oligonucleotide
caagaaugcccaacccucu

SEQ ID NO: 131574 - RNA, 19 nt, Artificial Sequence
  Description of Artificial Sequence: Synthetic oligonucleotide
gcauaauaggaccccuaaa

SEQ ID NO: 131575 - RNA, 19 nt, Artificial Sequence
  Description of Artificial Sequence: Synthetic oligonucleotide
cgagacauguucgcugucg

SEQ ID NO: 131576 - RNA, 19 nt, Artificial Sequence
  Description of Artificial Sequence: Synthetic oligonucleotide
gcagaucuaagaguguucu

SEQ ID NO: 131577 - RNA, 19 nt, Artificial Sequence
  Description of Artificial Sequence: Synthetic oligonucleotide
guagcauaauaggaccccu

SEQ ID NO: 131578 - RNA, 19 nt, Artificial Sequence
  Description of Artificial Sequence: Synthetic oligonucleotide
gcacauaggcacccuaaaa

SEQ ID NO: 131579 - RNA, 19 nt, Artificial Sequence
  Description of Artificial Sequence: Synthetic oligonucleotide
augaagaaucaaaccuaua

SEQ ID NO: 131580 - RNA, 19 nt, Artificial Sequence
  Description of Artificial Sequence: Synthetic oligonucleotide
cuggucugucaaacguaca

SEQ ID NO: 131581 - RNA, 19 nt, Artificial Sequence
  Description of Artificial Sequence: Synthetic oligonucleotide
guauugcaagaaugcccaa

SEQ ID NO: 131582 - RNA, 19 nt, Artificial Sequence
  Description of Artificial Sequence: Synthetic oligonucleotide
ucgaggagccgaggaccag

SEQ ID NO: 131583 - RNA, 19 nt, Artificial Sequence
  Description of Artificial Sequence: Synthetic oligonucleotide
ccguaggauuccuaacuuc

SEQ ID NO: 131584 - RNA, 19 nt, Artificial Sequence
  Description of Artificial Sequence: Synthetic oligonucleotide
gcuggguuaacaacccaga

SEQ ID NO: 131585 - RNA, 19 nt, Artificial Sequence
  Description of Artificial Sequence: Synthetic oligonucleotide
ucuuagcaggagggccuga

SEQ ID NO: 131586 - RNA, 19 nt, Artificial Sequence
  Description of Artificial Sequence: Synthetic oligonucleotide
ggcacauaggcacccuaaa

SEQ ID NO: 131587 - RNA, 19 nt, Artificial Sequence
  Description of Artificial Sequence: Synthetic oligonucleotide
accguguccuacauagguu

SEQ ID NO: 131588 - RNA, 19 nt, Artificial Sequence
  Description of Artificial Sequence: Synthetic oligonucleotide
gucgaggagccgaggacca

SEQ ID NO: 131589 - RNA, 19 nt, Artificial Sequence
  Description of Artificial Sequence: Synthetic oligonucleotide
aggccgagacauguucgcu

SEQ ID NO: 131590 - RNA, 19 nt, Artificial Sequence
  Description of Artificial Sequence: Synthetic oligonucleotide
ucgggcccuuggaucuggc

SEQ ID NO: 131591 - RNA, 19 nt, Artificial Sequence
  Description of Artificial Sequence: Synthetic oligonucleotide
cauguucgcugucgaggca

SEQ ID NO: 131592 - RNA, 19 nt, Artificial Sequence
  Description of Artificial Sequence: Synthetic oligonucleotide
caugccucgcaggaauuaa

SEQ ID NO: 131593 - RNA, 19 nt, Artificial Sequence
  Description of Artificial Sequence: Synthetic oligonucleotide
ggcauacacuuaucuuguc

SEQ ID NO: 131594 - RNA, 19 nt, Artificial Sequence
  Description of Artificial Sequence: Synthetic oligonucleotide
aggcacccuaaaauacagu

SEQ ID NO: 131595 - RNA, 19 nt, Artificial Sequence
  Description of Artificial Sequence: Synthetic oligonucleotide
uucugccacuagguguuuu

SEQ ID NO: 131596 - RNA, 19 nt, Artificial Sequence
  Description of Artificial Sequence: Synthetic oligonucleotide
gcacgaccgagucgaggag

SEQ ID NO: 131597 - RNA, 19 nt, Artificial Sequence
  Description of Artificial Sequence: Synthetic oligonucleotide
cgaagcagucaacccagug

SEQ ID NO: 131598 - RNA, 19 nt, Artificial Sequence
  Description of Artificial Sequence: Synthetic oligonucleotide
guaggacgacccacuuuuc

SEQ ID NO: 131599 - RNA, 19 nt, Artificial Sequence
  Description of Artificial Sequence: Synthetic oligonucleotide
agccuaccauacaguuaag

SEQ ID NO: 131600 - RNA, 19 nt, Artificial Sequence
  Description of Artificial Sequence: Synthetic oligonucleotide
cgaggcacgaccgagucga

SEQ ID NO: 131601 - RNA, 19 nt, Artificial Sequence
  Description of Artificial Sequence: Synthetic oligonucleotide
aguccgcggcggcugguuu

SEQ ID NO: 131602 - RNA, 19 nt, Artificial Sequence
  Description of Artificial Sequence: Synthetic oligonucleotide
gccgagacauguucgcugu

SEQ ID NO: 131603 - RNA, 19 nt, Artificial Sequence
  Description of Artificial Sequence: Synthetic oligonucleotide
cguguccuacauagguuuc

SEQ ID NO: 131604 - RNA, 19 nt, Artificial Sequence
  Description of Artificial Sequence: Synthetic oligonucleotide
guucgcugucgaggcacga

SEQ ID NO: 131605 - RNA, 19 nt, Artificial Sequence
  Description of Artificial Sequence: Synthetic oligonucleotide
cgagucgaggagccgagga

SEQ ID NO: 131606 - RNA, 19 nt, Artificial Sequence
  Description of Artificial Sequence: Synthetic oligonucleotide
gccguaggauuccuaacuu

SEQ ID NO: 131607 - RNA, 19 nt, Artificial Sequence
  Description of Artificial Sequence: Synthetic oligonucleotide
ccguguccuacauagguuu

SEQ ID NO: 131608 - RNA, 19 nt, Artificial Sequence
  Description of Artificial Sequence: Synthetic oligonucleotide
cacugccgacaucuuccaa

SEQ ID NO: 131609 - RNA, 19 nt, Artificial Sequence
  Description of Artificial Sequence: Synthetic oligonucleotide
ccuaaacuuugcuucuauu

SEQ ID NO: 131610 - RNA, 19 nt, Artificial Sequence
  Description of Artificial Sequence: Synthetic oligonucleotide
cagcccaaaccguguccua

SEQ ID NO: 131611 - RNA, 19 nt, Artificial Sequence
  Description of Artificial Sequence: Synthetic oligonucleotide
ccaacccucugauguccga

SEQ ID NO: 131612 - RNA, 19 nt, Artificial Sequence
  Description of Artificial Sequence: Synthetic oligonucleotide
cugccguaaccuggcaagu

SEQ ID NO: 131613 - RNA, 19 nt, Artificial Sequence
  Description of Artificial Sequence: Synthetic oligonucleotide
gcuguaggacgacccacuu

SEQ ID NO: 131614 - RNA, 19 nt, Artificial Sequence
  Description of Artificial Sequence: Synthetic oligonucleotide
ccuuaguaccaugcugugu

SEQ ID NO: 131615 - RNA, 19 nt, Artificial Sequence
  Description of Artificial Sequence: Synthetic oligonucleotide
ccguaaccuggcaagucau

SEQ ID NO: 131616 - RNA, 19 nt, Artificial Sequence
  Description of Artificial Sequence: Synthetic oligonucleotide
gaguccgcggcggcugguu

SEQ ID NO: 131617 - RNA, 19 nt, Artificial Sequence
  Description of Artificial Sequence: Synthetic oligonucleotide
cccaaaccguguccuacau

SEQ ID NO: 131618 - RNA, 19 nt, Artificial Sequence
  Description of Artificial Sequence: Synthetic oligonucleotide
cgcaggaauuaagcaugua

SEQ ID NO: 131619 - RNA, 19 nt, Artificial Sequence
  Description of Artificial Sequence: Synthetic oligonucleotide
gcggcugguuucgggcccu

SEQ ID NO: 131620 - RNA, 19 nt, Artificial Sequence
  Description of Artificial Sequence: Synthetic oligonucleotide
ccgcggcggcugguuucgg

SEQ ID NO: 131621 - RNA, 19 nt, Artificial Sequence
  Description of Artificial Sequence: Synthetic oligonucleotide
uaaucaacgaccaaaacca

SEQ ID NO: 131622 - RNA, 19 nt, Artificial Sequence
  Description of Artificial Sequence: Synthetic oligonucleotide
uguugagagauaaucaacg

SEQ ID NO: 131623 - RNA, 19 nt, Artificial Sequence
  Description of Artificial Sequence: Synthetic oligonucleotide
acacgguuuaauuaaaggc

SEQ ID NO: 131624 - RNA, 19 nt, Artificial Sequence
  Description of Artificial Sequence: Synthetic oligonucleotide
aacacgguuuaauuaaagg

SEQ ID NO: 131625 - RNA, 19 nt, Artificial Sequence
  Description of Artificial Sequence: Synthetic oligonucleotide
ugaacugagaauuauucgc

SEQ ID NO: 131626 - RNA, 19 nt, Artificial Sequence
  Description of Artificial Sequence: Synthetic oligonucleotide
aaauaaucccuauccuagc

SEQ ID NO: 131627 - RNA, 19 nt, Artificial Sequence
  Description of Artificial Sequence: Synthetic oligonucleotide
uaaggugcaagaaucagug

SEQ ID NO: 131628 - RNA, 19 nt, Artificial Sequence
  Description of Artificial Sequence: Synthetic oligonucleotide
aauaaccacacugaaagca

SEQ ID NO: 131629 - RNA, 19 nt, Artificial Sequence
  Description of Artificial Sequence: Synthetic oligonucleotide
aacacuuacacccucucga

SEQ ID NO: 131630 - RNA, 19 nt, Artificial Sequence
  Description of Artificial Sequence: Synthetic oligonucleotide
aacuggaccagauagacuu

SEQ ID NO: 131631 - RNA, 19 nt, Artificial Sequence
  Description of Artificial Sequence: Synthetic oligonucleotide
aauagguaagaggacaaag

SEQ ID NO: 131632 - RNA, 19 nt, Artificial Sequence
  Description of Artificial Sequence: Synthetic oligonucleotide
aggugcaagaaucagugac

SEQ ID NO: 131633 - RNA, 19 nt, Artificial Sequence
  Description of Artificial Sequence: Synthetic oligonucleotide
aaaucuuacagcagccacc

SEQ ID NO: 131634 - RNA, 19 nt, Artificial Sequence
  Description of Artificial Sequence: Synthetic oligonucleotide
aauagggaugaacugagaa

SEQ ID NO: 131635 - RNA, 19 nt, Artificial Sequence
  Description of Artificial Sequence: Synthetic oligonucleotide
ugaauagggaugaacugag

SEQ ID NO: 131636 - RNA, 19 nt, Artificial Sequence
  Description of Artificial Sequence: Synthetic oligonucleotide
uguguggacacacacacac

SEQ ID NO: 131637 - RNA, 19 nt, Artificial Sequence
  Description of Artificial Sequence: Synthetic oligonucleotide
gaccagauagacuuuaggc

SEQ ID NO: 131638 - RNA, 19 nt, Artificial Sequence
  Description of Artificial Sequence: Synthetic oligonucleotide
aaucagugacauuuccaac

SEQ ID NO: 131639 - RNA, 19 nt, Artificial Sequence
  Description of Artificial Sequence: Synthetic oligonucleotide
uuaacaacugcuccagagc

SEQ ID NO: 131640 - RNA, 19 nt, Artificial Sequence
  Description of Artificial Sequence: Synthetic oligonucleotide
uguggacacacacacacgc

SEQ ID NO: 131641 - RNA, 19 nt, Artificial Sequence
  Description of Artificial Sequence: Synthetic oligonucleotide
augaacugagaauuauucg

SEQ ID NO: 131642 - RNA, 19 nt, Artificial Sequence
  Description of Artificial Sequence: Synthetic oligonucleotide
cuaguuuuccaguucauug

SEQ ID NO: 131643 - RNA, 19 nt, Artificial Sequence
  Description of Artificial Sequence: Synthetic oligonucleotide
aauaaucccuauccuagca

SEQ ID NO: 131644 - RNA, 19 nt, Artificial Sequence
  Description of Artificial Sequence: Synthetic oligonucleotide
agcaauuggacauuuagau

SEQ ID NO: 131645 - RNA, 19 nt, Artificial Sequence
  Description of Artificial Sequence: Synthetic oligonucleotide
agcuuacauacacaaaccg

SEQ ID NO: 131646 - RNA, 19 nt, Artificial Sequence
  Description of Artificial Sequence: Synthetic oligonucleotide
acacauuagggauaaaaca

SEQ ID NO: 131647 - RNA, 19 nt, Artificial Sequence
  Description of Artificial Sequence: Synthetic oligonucleotide
auuuagauuguuuccauaa

SEQ ID NO: 131648 - RNA, 19 nt, Artificial Sequence
  Description of Artificial Sequence: Synthetic oligonucleotide
gaauuauucgcuugacuug

SEQ ID NO: 131649 - RNA, 19 nt, Artificial Sequence
  Description of Artificial Sequence: Synthetic oligonucleotide
uacacaaaccgggugaagg

SEQ ID NO: 131650 - RNA, 19 nt, Artificial Sequence
  Description of Artificial Sequence: Synthetic oligonucleotide
uacgcuacugcaaaagugu

SEQ ID NO: 131651 - RNA, 19 nt, Artificial Sequence
  Description of Artificial Sequence: Synthetic oligonucleotide
auaaucccuauccuagcac

SEQ ID NO: 131652 - RNA, 19 nt, Artificial Sequence
  Description of Artificial Sequence: Synthetic oligonucleotide
gaugaacugagaauuauuc

SEQ ID NO: 131653 - RNA, 19 nt, Artificial Sequence
  Description of Artificial Sequence: Synthetic oligonucleotide
auagguaagaggacaaagg

SEQ ID NO: 131654 - RNA, 19 nt, Artificial Sequence
  Description of Artificial Sequence: Synthetic oligonucleotide
gaaaucuuacagcagccac

SEQ ID NO: 131655 - RNA, 19 nt, Artificial Sequence
  Description of Artificial Sequence: Synthetic oligonucleotide
uggauuccuauuuuauucc

SEQ ID NO: 131656 - RNA, 19 nt, Artificial Sequence
  Description of Artificial Sequence: Synthetic oligonucleotide
uauccuagcacagcaauug

SEQ ID NO: 131657 - RNA, 19 nt, Artificial Sequence
  Description of Artificial Sequence: Synthetic oligonucleotide
ugguaaaccuguuggcugg

SEQ ID NO: 131658 - RNA, 19 nt, Artificial Sequence
  Description of Artificial Sequence: Synthetic oligonucleotide
uuuauggagccuucauucc

SEQ ID NO: 131659 - RNA, 19 nt, Artificial Sequence
  Description of Artificial Sequence: Synthetic oligonucleotide
uuguugagagauaaucaac

SEQ ID NO: 131660 - RNA, 19 nt, Artificial Sequence
  Description of Artificial Sequence: Synthetic oligonucleotide
guuccuauuggcuucuccc

SEQ ID NO: 131661 - RNA, 19 nt, Artificial Sequence
  Description of Artificial Sequence: Synthetic oligonucleotide
ggaacgggaacccuggucg

SEQ ID NO: 131662 - RNA, 19 nt, Artificial Sequence
  Description of Artificial Sequence: Synthetic oligonucleotide
agcuaaguuccacacuaac

SEQ ID NO: 131663 - RNA, 19 nt, Artificial Sequence
  Description of Artificial Sequence: Synthetic oligonucleotide
gagcaauagaguaagucug

SEQ ID NO: 131664 - RNA, 19 nt, Artificial Sequence
  Description of Artificial Sequence: Synthetic oligonucleotide
caauagaguaagucugggg

SEQ ID NO: 131665 - RNA, 19 nt, Artificial Sequence
  Description of Artificial Sequence: Synthetic oligonucleotide
uaaucccuauccuagcaca

SEQ ID NO: 131666 - RNA, 19 nt, Artificial Sequence
  Description of Artificial Sequence: Synthetic oligonucleotide
acuagaaguacaccugugu

SEQ ID NO: 131667 - RNA, 19 nt, Artificial Sequence
  Description of Artificial Sequence: Synthetic oligonucleotide
uguugcacugcgaacauuu

SEQ ID NO: 131668 - RNA, 19 nt, Artificial Sequence
  Description of Artificial Sequence: Synthetic oligonucleotide
accgaccucucacaggagc

SEQ ID NO: 131669 - RNA, 19 nt, Artificial Sequence
  Description of Artificial Sequence: Synthetic oligonucleotide
uuauucgcuugacuuggag

SEQ ID NO: 131670 - RNA, 19 nt, Artificial Sequence
  Description of Artificial Sequence: Synthetic oligonucleotide
gaacacuuacacccucucg

SEQ ID NO: 131671 - RNA, 19 nt, Artificial Sequence
  Description of Artificial Sequence: Synthetic oligonucleotide
ugacuagaaguacaccugu

SEQ ID NO: 131672 - RNA, 19 nt, Artificial Sequence
  Description of Artificial Sequence: Synthetic oligonucleotide
acuaaaagagcaauagagu

SEQ ID NO: 131673 - RNA, 19 nt, Artificial Sequence
  Description of Artificial Sequence: Synthetic oligonucleotide
auagaguaagucuggggcu

SEQ ID NO: 131674 - RNA, 19 nt, Artificial Sequence
  Description of Artificial Sequence: Synthetic oligonucleotide
acacuuacacccucucgac

SEQ ID NO: 131675 - RNA, 19 nt, Artificial Sequence
  Description of Artificial Sequence: Synthetic oligonucleotide
uguuccaaagcggcguucg

SEQ ID NO: 131676 - RNA, 19 nt, Artificial Sequence
  Description of Artificial Sequence: Synthetic oligonucleotide
uauucgcuugacuuggagu

SEQ ID NO: 131677 - RNA, 19 nt, Artificial Sequence
  Description of Artificial Sequence: Synthetic oligonucleotide
uuccgccuguuccaaagcg

SEQ ID NO: 131678 - RNA, 19 nt, Artificial Sequence
  Description of Artificial Sequence: Synthetic oligonucleotide
gaaugugggacuguuuccc

SEQ ID NO: 131679 - RNA, 19 nt, Artificial Sequence
  Description of Artificial Sequence: Synthetic oligonucleotide
uggacacacacacacgcac

SEQ ID NO: 131680 - RNA, 19 nt, Artificial Sequence
  Description of Artificial Sequence: Synthetic oligonucleotide
aaagcacucauaauggauu

SEQ ID NO: 131681 - RNA, 19 nt, Artificial Sequence
  Description of Artificial Sequence: Synthetic oligonucleotide
augaauagggaugaacuga

SEQ ID NO: 131682 - RNA, 19 nt, Artificial Sequence
  Description of Artificial Sequence: Synthetic oligonucleotide
cugagcgagacaaacagca

SEQ ID NO: 131683 - RNA, 19 nt, Artificial Sequence
  Description of Artificial Sequence: Synthetic oligonucleotide
uagaaguacaccuguguau

SEQ ID NO: 131684 - RNA, 19 nt, Artificial Sequence
  Description of Artificial Sequence: Synthetic oligonucleotide
acacacacacaccuacuuc

SEQ ID NO: 131685 - RNA, 19 nt, Artificial Sequence
  Description of Artificial Sequence: Synthetic oligonucleotide
cugacuagaaguacaccug

SEQ ID NO: 131686 - RNA, 19 nt, Artificial Sequence
  Description of Artificial Sequence: Synthetic oligonucleotide
cuacgcuacugcaaaagug

SEQ ID NO: 131687 - RNA, 19 nt, Artificial Sequence
  Description of Artificial Sequence: Synthetic oligonucleotide
gcauccaccuauuaaaaug

SEQ ID NO: 131688 - RNA, 19 nt, Artificial Sequence
  Description of Artificial Sequence: Synthetic oligonucleotide
uuucgugcacacucagcgg

SEQ ID NO: 131689 - RNA, 19 nt, Artificial Sequence
  Description of Artificial Sequence: Synthetic oligonucleotide
gacauuuccaacaucggaa

SEQ ID NO: 131690 - RNA, 19 nt, Artificial Sequence
  Description of Artificial Sequence: Synthetic oligonucleotide
agagaacacgguuuaauua

SEQ ID NO: 131691 - RNA, 19 nt, Artificial Sequence
  Description of Artificial Sequence: Synthetic oligonucleotide
gggauaacauauguuaggg

SEQ ID NO: 131692 - RNA, 19 nt, Artificial Sequence
  Description of Artificial Sequence: Synthetic oligonucleotide
uacaccuguguauggaaga

SEQ ID NO: 131693 - RNA, 19 nt, Artificial Sequence
  Description of Artificial Sequence: Synthetic oligonucleotide
uguaaccugagcccauaga

SEQ ID NO: 131694 - RNA, 19 nt, Artificial Sequence
  Description of Artificial Sequence: Synthetic oligonucleotide
aaucaacgaccaaaaccac

SEQ ID NO: 131695 - RNA, 19 nt, Artificial Sequence
  Description of Artificial Sequence: Synthetic oligonucleotide
uggucuaaggugcaagaau

SEQ ID NO: 131696 - RNA, 19 nt, Artificial Sequence
  Description of Artificial Sequence: Synthetic oligonucleotide
uccgccuguuccaaagcgg

SEQ ID NO: 131697 - RNA, 19 nt, Artificial Sequence
  Description of Artificial Sequence: Synthetic oligonucleotide
cacacacgcacacacacac

SEQ ID NO: 131698 - RNA, 19 nt, Artificial Sequence
  Description of Artificial Sequence: Synthetic oligonucleotide
cugagaguaauaacaauaa

SEQ ID NO: 131699 - RNA, 19 nt, Artificial Sequence
  Description of Artificial Sequence: Synthetic oligonucleotide
cacacacacacgcacacac

SEQ ID NO: 131700 - RNA, 19 nt, Artificial Sequence
  Description of Artificial Sequence: Synthetic oligonucleotide
ugacacccggggcucaugg

SEQ ID NO: 131701 - RNA, 19 nt, Artificial Sequence
  Description of Artificial Sequence: Synthetic oligonucleotide
guaacugagcgagacaaac

SEQ ID NO: 131702 - RNA, 19 nt, Artificial Sequence
  Description of Artificial Sequence: Synthetic oligonucleotide
cacacgcacacacacacac

SEQ ID NO: 131703 - RNA, 19 nt, Artificial Sequence
  Description of Artificial Sequence: Synthetic oligonucleotide
cacgcacacacacacacac

SEQ ID NO: 131704 - RNA, 19 nt, Artificial Sequence
  Description of Artificial Sequence: Synthetic oligonucleotide
cacacacacacacaccuac

SEQ ID NO: 131705 - RNA, 19 nt, Artificial Sequence
  Description of Artificial Sequence: Synthetic oligonucleotide
agcaauaccucaccccucu

SEQ ID NO: 131706 - RNA, 19 nt, Artificial Sequence
  Description of Artificial Sequence: Synthetic oligonucleotide
cacacacacgcacacacac

SEQ ID NO: 131707 - RNA, 19 nt, Artificial Sequence
  Description of Artificial Sequence: Synthetic oligonucleotide
guugagagauaaucaacga

SEQ ID NO: 131708 - RNA, 19 nt, Artificial Sequence
  Description of Artificial Sequence: Synthetic oligonucleotide
acuuuccuaaggugcaucu

SEQ ID NO: 131709 - RNA, 19 nt, Artificial Sequence
  Description of Artificial Sequence: Synthetic oligonucleotide
cugccgagagucauaaaac

SEQ ID NO: 131710 - RNA, 19 nt, Artificial Sequence
  Description of Artificial Sequence: Synthetic oligonucleotide
gacacacacacacgcacac

SEQ ID NO: 131711 - RNA, 19 nt, Artificial Sequence
  Description of Artificial Sequence: Synthetic oligonucleotide
ugcuacgcuacugcaaaag

SEQ ID NO: 131712 - RNA, 19 nt, Artificial Sequence
  Description of Artificial Sequence: Synthetic oligonucleotide
aaucccuauccuagcacag

SEQ ID NO: 131713 - RNA, 19 nt, Artificial Sequence
  Description of Artificial Sequence: Synthetic oligonucleotide
cugguaagcaggaugggga

SEQ ID NO: 131714 - RNA, 19 nt, Artificial Sequence
  Description of Artificial Sequence: Synthetic oligonucleotide
cacugcgaacauuucgugc

SEQ ID NO: 131715 - RNA, 19 nt, Artificial Sequence
  Description of Artificial Sequence: Synthetic oligonucleotide
acugagcgagacaaacagc

SEQ ID NO: 131716 - RNA, 19 nt, Artificial Sequence
  Description of Artificial Sequence: Synthetic oligonucleotide
cuuggcgagauguuguaca

SEQ ID NO: 131717 - RNA, 19 nt, Artificial Sequence
  Description of Artificial Sequence: Synthetic oligonucleotide
aacgggaacccuggucggc

SEQ ID NO: 131718 - RNA, 19 nt, Artificial Sequence
  Description of Artificial Sequence: Synthetic oligonucleotide
uuuauuccccaaagaggaa

SEQ ID NO: 131719 - RNA, 19 nt, Artificial Sequence
  Description of Artificial Sequence: Synthetic oligonucleotide
aaggugcaagaaucaguga

SEQ ID NO: 131720 - RNA, 19 nt, Artificial Sequence
  Description of Artificial Sequence: Synthetic oligonucleotide
guauggaagaauucagugu

SEQ ID NO: 131721 - RNA, 19 nt, Artificial Sequence
  Description of Artificial Sequence: Synthetic oligonucleotide
uggaauagccugccuucug

SEQ ID NO: 131722 - RNA, 19 nt, Artificial Sequence
  Description of Artificial Sequence: Synthetic oligonucleotide
ggaccagauagacuuuagg

SEQ ID NO: 131723 - RNA, 19 nt, Artificial Sequence
  Description of Artificial Sequence: Synthetic oligonucleotide
uuuugcuacugagaguaau

SEQ ID NO: 131724 - RNA, 19 nt, Artificial Sequence
  Description of Artificial Sequence: Synthetic oligonucleotide
acagugugcauuugucccu

SEQ ID NO: 131725 - RNA, 19 nt, Artificial Sequence
  Description of Artificial Sequence: Synthetic oligonucleotide
gucaguaacugagcgagac

SEQ ID NO: 131726 - RNA, 19 nt, Artificial Sequence
  Description of Artificial Sequence: Synthetic oligonucleotide
ugguaagcaggauggggac

SEQ ID NO: 131727 - RNA, 19 nt, Artificial Sequence
  Description of Artificial Sequence: Synthetic oligonucleotide
uuggcgagauguuguacac

SEQ ID NO: 131728 - RNA, 19 nt, Artificial Sequence
  Description of Artificial Sequence: Synthetic oligonucleotide
acaucggaauguugcagcu

SEQ ID NO: 131729 - RNA, 19 nt, Artificial Sequence
  Description of Artificial Sequence: Synthetic oligonucleotide
gaacgggaacccuggucgg

SEQ ID NO: 131730 - RNA, 19 nt, Artificial Sequence
  Description of Artificial Sequence: Synthetic oligonucleotide
ugaauggaauagccugccu

SEQ ID NO: 131731 - RNA, 19 nt, Artificial Sequence
  Description of Artificial Sequence: Synthetic oligonucleotide
uccagcuaaguuccacacu

SEQ ID NO: 131732 - RNA, 19 nt, Artificial Sequence
  Description of Artificial Sequence: Synthetic oligonucleotide
cagacaagagggcugccac

SEQ ID NO: 131733 - RNA, 19 nt, Artificial Sequence
  Description of Artificial Sequence: Synthetic oligonucleotide
aagaugggaaguggguacu

SEQ ID NO: 131734 - RNA, 19 nt, Artificial Sequence
  Description of Artificial Sequence: Synthetic oligonucleotide
gaggcgugcugucaguaac

SEQ ID NO: 131735 - RNA, 19 nt, Artificial Sequence
  Description of Artificial Sequence: Synthetic oligonucleotide
ggauuccuauuuuauuccc

SEQ ID NO: 131736 - RNA, 19 nt, Artificial Sequence
  Description of Artificial Sequence: Synthetic oligonucleotide
agcgagacaaacagcagcu

SEQ ID NO: 131737 - RNA, 19 nt, Artificial Sequence
  Description of Artificial Sequence: Synthetic oligonucleotide
cuugcuacgcuacugcaaa

SEQ ID NO: 131738 - RNA, 19 nt, Artificial Sequence
  Description of Artificial Sequence: Synthetic oligonucleotide
uccuauuggcuucucccau

SEQ ID NO: 131739 - RNA, 19 nt, Artificial Sequence
  Description of Artificial Sequence: Synthetic oligonucleotide
cuucccacguguuggggac

SEQ ID NO: 131740 - RNA, 19 nt, Artificial Sequence
  Description of Artificial Sequence: Synthetic oligonucleotide
guguuggggacaugcgcgg

SEQ ID NO: 131741 - RNA, 19 nt, Artificial Sequence
  Description of Artificial Sequence: Synthetic oligonucleotide
cucccuuauggaacacucc

SEQ ID NO: 131742 - RNA, 19 nt, Artificial Sequence
  Description of Artificial Sequence: Synthetic oligonucleotide
caaaccgggugaagggagc

SEQ ID NO: 131743 - RNA, 19 nt, Artificial Sequence
  Description of Artificial Sequence: Synthetic oligonucleotide
cauccaccuauuaaaaugu

SEQ ID NO: 131744 - RNA, 19 nt, Artificial Sequence
  Description of Artificial Sequence: Synthetic oligonucleotide
cuagaaguacaccugugua

SEQ ID NO: 131745 - RNA, 19 nt, Artificial Sequence
  Description of Artificial Sequence: Synthetic oligonucleotide
ugggucgcuauuguggccu

SEQ ID NO: 131746 - RNA, 19 nt, Artificial Sequence
  Description of Artificial Sequence: Synthetic oligonucleotide
accuacagagugaagggca

SEQ ID NO: 131747 - RNA, 19 nt, Artificial Sequence
  Description of Artificial Sequence: Synthetic oligonucleotide
gaacugagaauuauucgcu

SEQ ID NO: 131748 - RNA, 19 nt, Artificial Sequence
  Description of Artificial Sequence: Synthetic oligonucleotide
caacaucggaauguugcag

SEQ ID NO: 131749 - RNA, 19 nt, Artificial Sequence
  Description of Artificial Sequence: Synthetic oligonucleotide
cacguguuggggacaugcg

SEQ ID NO: 131750 - RNA, 19 nt, Artificial Sequence
  Description of Artificial Sequence: Synthetic oligonucleotide
agagauaaucaacgaccaa

SEQ ID NO: 131751 - RNA, 19 nt, Artificial Sequence
  Description of Artificial Sequence: Synthetic oligonucleotide
guacaccuguguauggaag

SEQ ID NO: 131752 - RNA, 19 nt, Artificial Sequence
  Description of Artificial Sequence: Synthetic oligonucleotide
guacucucccuuauggaac

SEQ ID NO: 131753 - RNA, 19 nt, Artificial Sequence
  Description of Artificial Sequence: Synthetic oligonucleotide
acgaccaaaaccacccaug

SEQ ID NO: 131754 - RNA, 19 nt, Artificial Sequence
  Description of Artificial Sequence: Synthetic oligonucleotide
cucaccccucucauugccg

SEQ ID NO: 131755 - RNA, 19 nt, Artificial Sequence
  Description of Artificial Sequence: Synthetic oligonucleotide
ucaccaccgaccucucaca

SEQ ID NO: 131756 - RNA, 19 nt, Artificial Sequence
  Description of Artificial Sequence: Synthetic oligonucleotide
ucagcgggcugguggaaca

SEQ ID NO: 131757 - RNA, 19 nt, Artificial Sequence
  Description of Artificial Sequence: Synthetic oligonucleotide
uccggaaagccccggggaa

SEQ ID NO: 131758 - RNA, 19 nt, Artificial Sequence
  Description of Artificial Sequence: Synthetic oligonucleotide
caguaacugagcgagacaa

SEQ ID NO: 131759 - RNA, 19 nt, Artificial Sequence
  Description of Artificial Sequence: Synthetic oligonucleotide
aaaccgggugaagggagca

SEQ ID NO: 131760 - RNA, 19 nt, Artificial Sequence
  Description of Artificial Sequence: Synthetic oligonucleotide
cacacacacacacacaccu

SEQ ID NO: 131761 - RNA, 19 nt, Artificial Sequence
  Description of Artificial Sequence: Synthetic oligonucleotide
ccuuauggaacacucccac

SEQ ID NO: 131762 - RNA, 19 nt, Artificial Sequence
  Description of Artificial Sequence: Synthetic oligonucleotide
gcaauagaguaagucuggg

SEQ ID NO: 131763 - RNA, 19 nt, Artificial Sequence
  Description of Artificial Sequence: Synthetic oligonucleotide
guccugcaaacccaacaug

SEQ ID NO: 131764 - RNA, 19 nt, Artificial Sequence
  Description of Artificial Sequence: Synthetic oligonucleotide
gagagaacacgguuuaauu

SEQ ID NO: 131765 - RNA, 19 nt, Artificial Sequence
  Description of Artificial Sequence: Synthetic oligonucleotide
agacugcuugcuacgcuac

SEQ ID NO: 131766 - RNA, 19 nt, Artificial Sequence
  Description of Artificial Sequence: Synthetic oligonucleotide
uuugagugacagguguuuu

SEQ ID NO: 131767 - RNA, 19 nt, Artificial Sequence
  Description of Artificial Sequence: Synthetic oligonucleotide
accuguguauggaagaauu

SEQ ID NO: 131768 - RNA, 19 nt, Artificial Sequence
  Description of Artificial Sequence: Synthetic oligonucleotide
cuguuaacuuuccuaaggu

SEQ ID NO: 131769 - RNA, 19 nt, Artificial Sequence
  Description of Artificial Sequence: Synthetic oligonucleotide
uucuuggcgagauguugua

SEQ ID NO: 131770 - RNA, 19 nt, Artificial Sequence
  Description of Artificial Sequence: Synthetic oligonucleotide
ucuuggcgagauguuguac

SEQ ID NO: 131771 - RNA, 19 nt, Artificial Sequence
  Description of Artificial Sequence: Synthetic oligonucleotide
agaccgucuuuugggcccc

SEQ ID NO: 131772 - RNA, 19 nt, Artificial Sequence
  Description of Artificial Sequence: Synthetic oligonucleotide
caaagcacucauaauggau

SEQ ID NO: 131773 - RNA, 19 nt, Artificial Sequence
  Description of Artificial Sequence: Synthetic oligonucleotide
guguggacacacacacacg

SEQ ID NO: 131774 - RNA, 19 nt, Artificial Sequence
  Description of Artificial Sequence: Synthetic oligonucleotide
cuuuugggccccaagugcu

SEQ ID NO: 131775 - RNA, 19 nt, Artificial Sequence
  Description of Artificial Sequence: Synthetic oligonucleotide
gucaaacuaaaagagcaau

SEQ ID NO: 131776 - RNA, 19 nt, Artificial Sequence
  Description of Artificial Sequence: Synthetic oligonucleotide
aaccgggugaagggagcag

SEQ ID NO: 131777 - RNA, 19 nt, Artificial Sequence
  Description of Artificial Sequence: Synthetic oligonucleotide
auacacaaaccgggugaag

SEQ ID NO: 131778 - RNA, 19 nt, Artificial Sequence
  Description of Artificial Sequence: Synthetic oligonucleotide
ggcaaggugaggaacccug

SEQ ID NO: 131779 - RNA, 19 nt, Artificial Sequence
  Description of Artificial Sequence: Synthetic oligonucleotide
ggugcaagaaucagugaca

SEQ ID NO: 131780 - RNA, 19 nt, Artificial Sequence
  Description of Artificial Sequence: Synthetic oligonucleotide
ugcgaacauuucgugcaca

SEQ ID NO: 131781 - RNA, 19 nt, Artificial Sequence
  Description of Artificial Sequence: Synthetic oligonucleotide
uccucccaauaaauaucaa

SEQ ID NO: 131782 - RNA, 19 nt, Artificial Sequence
  Description of Artificial Sequence: Synthetic oligonucleotide
gucgcuauuguggccucag

SEQ ID NO: 131783 - RNA, 19 nt, Artificial Sequence
  Description of Artificial Sequence: Synthetic oligonucleotide
uguagcgaugcaggcacua

SEQ ID NO: 131784 - RNA, 19 nt, Artificial Sequence
  Description of Artificial Sequence: Synthetic oligonucleotide
gacaagagggcugccaccu

SEQ ID NO: 131785 - RNA, 19 nt, Artificial Sequence
  Description of Artificial Sequence: Synthetic oligonucleotide
augguuuauggagccuuca

SEQ ID NO: 131786 - RNA, 19 nt, Artificial Sequence
  Description of Artificial Sequence: Synthetic oligonucleotide
cuuuccuaaggugcaucuc

SEQ ID NO: 131787 - RNA, 19 nt, Artificial Sequence
  Description of Artificial Sequence: Synthetic oligonucleotide
ccaagcacucuuucugaag

SEQ ID NO: 131788 - RNA, 19 nt, Artificial Sequence
  Description of Artificial Sequence: Synthetic oligonucleotide
gaauagggaugaacugaga

SEQ ID NO: 131789 - RNA, 19 nt, Artificial Sequence
  Description of Artificial Sequence: Synthetic oligonucleotide
aggguuucauuugccauua

SEQ ID NO: 131790 - RNA, 19 nt, Artificial Sequence
  Description of Artificial Sequence: Synthetic oligonucleotide
acccacacugcauccucga

SEQ ID NO: 131791 - RNA, 19 nt, Artificial Sequence
  Description of Artificial Sequence: Synthetic oligonucleotide
cgcacacacacacacacac

SEQ ID NO: 131792 - RNA, 19 nt, Artificial Sequence
  Description of Artificial Sequence: Synthetic oligonucleotide
ccguguugcugcuucuugg

SEQ ID NO: 131793 - RNA, 19 nt, Artificial Sequence
  Description of Artificial Sequence: Synthetic oligonucleotide
gcaaagcacucauaaugga

SEQ ID NO: 131794 - RNA, 19 nt, Artificial Sequence
  Description of Artificial Sequence: Synthetic oligonucleotide
gcgaacauuucgugcacac

SEQ ID NO: 131795 - RNA, 19 nt, Artificial Sequence
  Description of Artificial Sequence: Synthetic oligonucleotide
uuccaaagcggcguucguu

SEQ ID NO: 131796 - RNA, 19 nt, Artificial Sequence
  Description of Artificial Sequence: Synthetic oligonucleotide
auccaccuauuaaaaugug

SEQ ID NO: 131797 - RNA, 19 nt, Artificial Sequence
  Description of Artificial Sequence: Synthetic oligonucleotide
ccugccgagagucauaaaa

SEQ ID NO: 131798 - RNA, 19 nt, Artificial Sequence
  Description of Artificial Sequence: Synthetic oligonucleotide
ggaauagguaagaggacaa

SEQ ID NO: 131799 - RNA, 19 nt, Artificial Sequence
  Description of Artificial Sequence: Synthetic oligonucleotide
guaagaggacaaaggugga

SEQ ID NO: 131800 - RNA, 19 nt, Artificial Sequence
  Description of Artificial Sequence: Synthetic oligonucleotide
ucgcuauuguggccucagu

SEQ ID NO: 131801 - RNA, 19 nt, Artificial Sequence
  Description of Artificial Sequence: Synthetic oligonucleotide
uggcuugguuuaucuaguu

SEQ ID NO: 131802 - RNA, 19 nt, Artificial Sequence
  Description of Artificial Sequence: Synthetic oligonucleotide
ucggaauguugcagcuguc

SEQ ID NO: 131803 - RNA, 19 nt, Artificial Sequence
  Description of Artificial Sequence: Synthetic oligonucleotide
cucucauugccggggcagc

SEQ ID NO: 131804 - RNA, 19 nt, Artificial Sequence
  Description of Artificial Sequence: Synthetic oligonucleotide
uugcuacgcuacugcaaaa

SEQ ID NO: 131805 - RNA, 19 nt, Artificial Sequence
  Description of Artificial Sequence: Synthetic oligonucleotide
guagcgaugcaggcacuac

SEQ ID NO: 131806 - RNA, 19 nt, Artificial Sequence
  Description of Artificial Sequence: Synthetic oligonucleotide
cacuuacacccucucgaca

SEQ ID NO: 131807 - RNA, 19 nt, Artificial Sequence
  Description of Artificial Sequence: Synthetic oligonucleotide
cacaaaccgggugaaggga

SEQ ID NO: 131808 - RNA, 19 nt, Artificial Sequence
  Description of Artificial Sequence: Synthetic oligonucleotide
ggcgagauguuguacacau

SEQ ID NO: 131809 - RNA, 19 nt, Artificial Sequence
  Description of Artificial Sequence: Synthetic oligonucleotide
acacacacacacaccuacu

SEQ ID NO: 131810 - RNA, 19 nt, Artificial Sequence
  Description of Artificial Sequence: Synthetic oligonucleotide
auuauucgcuugacuugga

SEQ ID NO: 131811 - RNA, 19 nt, Artificial Sequence
  Description of Artificial Sequence: Synthetic oligonucleotide
aguaacugagcgagacaaa

SEQ ID NO: 131812 - RNA, 19 nt, Artificial Sequence
  Description of Artificial Sequence: Synthetic oligonucleotide
ugguagccugaugccaacu

SEQ ID NO: 131813 - RNA, 19 nt, Artificial Sequence
  Description of Artificial Sequence: Synthetic oligonucleotide
acccucucgacagcaagaa

SEQ ID NO: 131814 - RNA, 19 nt, Artificial Sequence
  Description of Artificial Sequence: Synthetic oligonucleotide
cuccggaaagccccgggga

SEQ ID NO: 131815 - RNA, 19 nt, Artificial Sequence
  Description of Artificial Sequence: Synthetic oligonucleotide
uucgcuugacuuggaguuu

SEQ ID NO: 131816 - RNA, 19 nt, Artificial Sequence
  Description of Artificial Sequence: Synthetic oligonucleotide
acacacacacacgcacaca

SEQ ID NO: 131817 - RNA, 19 nt, Artificial Sequence
  Description of Artificial Sequence: Synthetic oligonucleotide
acacacacgcacacacaca

SEQ ID NO: 131818 - RNA, 19 nt, Artificial Sequence
  Description of Artificial Sequence: Synthetic oligonucleotide
gacaugcgcgguggagaag

SEQ ID NO: 131819 - RNA, 19 nt, Artificial Sequence
  Description of Artificial Sequence: Synthetic oligonucleotide
gagcaauaccucaccccuc

SEQ ID NO: 131820 - RNA, 19 nt, Artificial Sequence
  Description of Artificial Sequence: Synthetic oligonucleotide
acacacacacgcacacaca

SEQ ID NO: 131821 - RNA, 19 nt, Artificial Sequence
  Description of Artificial Sequence: Synthetic oligonucleotide
cccugucccgucaccaccg

SEQ ID NO: 131822 - RNA, 19 nt, Artificial Sequence
  Description of Artificial Sequence: Synthetic oligonucleotide
guugcacugcgaacauuuc

SEQ ID NO: 131823 - RNA, 19 nt, Artificial Sequence
  Description of Artificial Sequence: Synthetic oligonucleotide
gggaacgggaacccugguc

SEQ ID NO: 131824 - RNA, 19 nt, Artificial Sequence
  Description of Artificial Sequence: Synthetic oligonucleotide
guggacacacacacacgca

SEQ ID NO: 131825 - RNA, 19 nt, Artificial Sequence
  Description of Artificial Sequence: Synthetic oligonucleotide
ggccguugcuggcuguaag

SEQ ID NO: 131826 - RNA, 19 nt, Artificial Sequence
  Description of Artificial Sequence: Synthetic oligonucleotide
agcggcguucguucuguuu

SEQ ID NO: 131827 - RNA, 19 nt, Artificial Sequence
  Description of Artificial Sequence: Synthetic oligonucleotide
agaguuccggauggguuuu

SEQ ID NO: 131828 - RNA, 19 nt, Artificial Sequence
  Description of Artificial Sequence: Synthetic oligonucleotide
ccuccggaaagccccgggg

SEQ ID NO: 131829 - RNA, 19 nt, Artificial Sequence
  Description of Artificial Sequence: Synthetic oligonucleotide
guuugagugacagguguuu

SEQ ID NO: 131830 - RNA, 19 nt, Artificial Sequence
  Description of Artificial Sequence: Synthetic oligonucleotide
aggcgugcugucaguaacu

SEQ ID NO: 131831 - RNA, 19 nt, Artificial Sequence
  Description of Artificial Sequence: Synthetic oligonucleotide
gugcaagaaucagugacau

SEQ ID NO: 131832 - RNA, 19 nt, Artificial Sequence
  Description of Artificial Sequence: Synthetic oligonucleotide
caacgaccaaaaccaccca

SEQ ID NO: 131833 - RNA, 19 nt, Artificial Sequence
  Description of Artificial Sequence: Synthetic oligonucleotide
cauccucgauuggggcucg

SEQ ID NO: 131834 - RNA, 19 nt, Artificial Sequence
  Description of Artificial Sequence: Synthetic oligonucleotide
acacgcacacacacacaca

SEQ ID NO: 131835 - RNA, 19 nt, Artificial Sequence
  Description of Artificial Sequence: Synthetic oligonucleotide
cagaguuccggauggguuu

SEQ ID NO: 131836 - RNA, 19 nt, Artificial Sequence
  Description of Artificial Sequence: Synthetic oligonucleotide
caccuuguccccgcugcug

SEQ ID NO: 131837 - RNA, 19 nt, Artificial Sequence
  Description of Artificial Sequence: Synthetic oligonucleotide
ggacaugcgcgguggagaa

SEQ ID NO: 131838 - RNA, 19 nt, Artificial Sequence
  Description of Artificial Sequence: Synthetic oligonucleotide
cagcuaaguuccacacuaa

SEQ ID NO: 131839 - RNA, 19 nt, Artificial Sequence
  Description of Artificial Sequence: Synthetic oligonucleotide
ucccacguguuggggacau

SEQ ID NO: 131840 - RNA, 19 nt, Artificial Sequence
  Description of Artificial Sequence: Synthetic oligonucleotide
ggacacacacacacgcaca

SEQ ID NO: 131841 - RNA, 19 nt, Artificial Sequence
  Description of Artificial Sequence: Synthetic oligonucleotide
gcacacacacacacacacc

SEQ ID NO: 131842 - RNA, 19 nt, Artificial Sequence
  Description of Artificial Sequence: Synthetic oligonucleotide
cugucccgucaccaccgac

SEQ ID NO: 131843 - RNA, 19 nt, Artificial Sequence
  Description of Artificial Sequence: Synthetic oligonucleotide
acacacgcacacacacaca

SEQ ID NO: 131844 - RNA, 19 nt, Artificial Sequence
  Description of Artificial Sequence: Synthetic oligonucleotide
cacacacacacaccuacuu

SEQ ID NO: 131845 - RNA, 19 nt, Artificial Sequence
  Description of Artificial Sequence: Synthetic oligonucleotide
accuucuaugaggccuugu

SEQ ID NO: 131846 - RNA, 19 nt, Artificial Sequence
  Description of Artificial Sequence: Synthetic oligonucleotide
ggagagaacacgguuuaau

SEQ ID NO: 131847 - RNA, 19 nt, Artificial Sequence
  Description of Artificial Sequence: Synthetic oligonucleotide
guacuacugggagggagcu

SEQ ID NO: 131848 - RNA, 19 nt, Artificial Sequence
  Description of Artificial Sequence: Synthetic oligonucleotide
acgcacacacacacacaca

SEQ ID NO: 131849 - RNA, 19 nt, Artificial Sequence
  Description of Artificial Sequence: Synthetic oligonucleotide
caccgaccucucacaggag

SEQ ID NO: 131850 - RNA, 19 nt, Artificial Sequence
  Description of Artificial Sequence: Synthetic oligonucleotide
acgcuacugcaaaagugua

SEQ ID NO: 131851 - RNA, 19 nt, Artificial Sequence
  Description of Artificial Sequence: Synthetic oligonucleotide
cccuuauggaacacuccca

SEQ ID NO: 131852 - RNA, 19 nt, Artificial Sequence
  Description of Artificial Sequence: Synthetic oligonucleotide
acacacacacacacaccua

SEQ ID NO: 131853 - RNA, 19 nt, Artificial Sequence
  Description of Artificial Sequence: Synthetic oligonucleotide
aggguucauggcaccuugu

SEQ ID NO: 131854 - RNA, 19 nt, Artificial Sequence
  Description of Artificial Sequence: Synthetic oligonucleotide
uggguacuacugggaggga

SEQ ID NO: 131855 - RNA, 19 nt, Artificial Sequence
  Description of Artificial Sequence: Synthetic oligonucleotide
cuggcuuaagaggucaguu

SEQ ID NO: 131856 - RNA, 19 nt, Artificial Sequence
  Description of Artificial Sequence: Synthetic oligonucleotide
cccguguugcugcuucuug

SEQ ID NO: 131857 - RNA, 19 nt, Artificial Sequence
  Description of Artificial Sequence: Synthetic oligonucleotide
gaacccugccgagagucau

SEQ ID NO: 131858 - RNA, 19 nt, Artificial Sequence
  Description of Artificial Sequence: Synthetic oligonucleotide
cgauuggggcucgagcacc

SEQ ID NO: 131859 - RNA, 19 nt, Artificial Sequence
  Description of Artificial Sequence: Synthetic oligonucleotide
gaggaacccugccgagagu

SEQ ID NO: 131860 - RNA, 19 nt, Artificial Sequence
  Description of Artificial Sequence: Synthetic oligonucleotide
cgccuguuccaaagcggcg

SEQ ID NO: 131861 - RNA, 19 nt, Artificial Sequence
  Description of Artificial Sequence: Synthetic oligonucleotide
cucagaugaugauguuguu

SEQ ID NO: 131862 - RNA, 19 nt, Artificial Sequence
  Description of Artificial Sequence: Synthetic oligonucleotide
gcgagacaaacagcagcuc

SEQ ID NO: 131863 - RNA, 19 nt, Artificial Sequence
  Description of Artificial Sequence: Synthetic oligonucleotide
auuggggcucgagcaccua

SEQ ID NO: 131864 - RNA, 19 nt, Artificial Sequence
  Description of Artificial Sequence: Synthetic oligonucleotide
accgucuuuugggccccaa

SEQ ID NO: 131865 - RNA, 19 nt, Artificial Sequence
  Description of Artificial Sequence: Synthetic oligonucleotide
gggucgcuauuguggccuc

SEQ ID NO: 131866 - RNA, 19 nt, Artificial Sequence
  Description of Artificial Sequence: Synthetic oligonucleotide
caccuguguauggaagaau

SEQ ID NO: 131867 - RNA, 19 nt, Artificial Sequence
  Description of Artificial Sequence: Synthetic oligonucleotide
cccaagugcuggccccgug

SEQ ID NO: 131868 - RNA, 19 nt, Artificial Sequence
  Description of Artificial Sequence: Synthetic oligonucleotide
ggucgcuauuguggccuca

SEQ ID NO: 131869 - RNA, 19 nt, Artificial Sequence
  Description of Artificial Sequence: Synthetic oligonucleotide
ccaaagcggcguucguucu

SEQ ID NO: 131870 - RNA, 19 nt, Artificial Sequence
  Description of Artificial Sequence: Synthetic oligonucleotide
cgaacauuucgugcacacu

SEQ ID NO: 131871 - RNA, 19 nt, Artificial Sequence
  Description of Artificial Sequence: Synthetic oligonucleotide
gcgggcugguggaacacuu

SEQ ID NO: 131872 - RNA, 19 nt, Artificial Sequence
  Description of Artificial Sequence: Synthetic oligonucleotide
cccacguguuggggacaug

SEQ ID NO: 131873 - RNA, 19 nt, Artificial Sequence
  Description of Artificial Sequence: Synthetic oligonucleotide
uaugguacgacuaucaaag

SEQ ID NO: 131874 - RNA, 19 nt, Artificial Sequence
  Description of Artificial Sequence: Synthetic oligonucleotide
aagaccauuaacuagguca

SEQ ID NO: 131875 - RNA, 19 nt, Artificial Sequence
  Description of Artificial Sequence: Synthetic oligonucleotide
aauaagaccauuaacuagg

SEQ ID NO: 131876 - RNA, 19 nt, Artificial Sequence
  Description of Artificial Sequence: Synthetic oligonucleotide
auauuuauccccaagacac

SEQ ID NO: 131877 - RNA, 19 nt, Artificial Sequence
  Description of Artificial Sequence: Synthetic oligonucleotide
uuauauucaaaacucgaga

SEQ ID NO: 131878 - RNA, 19 nt, Artificial Sequence
  Description of Artificial Sequence: Synthetic oligonucleotide
uaagugaacgcacugagga

SEQ ID NO: 131879 - RNA, 19 nt, Artificial Sequence
  Description of Artificial Sequence: Synthetic oligonucleotide
aaaagguuagugcauauau

SEQ ID NO: 131880 - RNA, 19 nt, Artificial Sequence
  Description of Artificial Sequence: Synthetic oligonucleotide
aaauuuagccacaaggcuc

SEQ ID NO: 131881 - RNA, 19 nt, Artificial Sequence
  Description of Artificial Sequence: Synthetic oligonucleotide
aagguuagugcauauauaa

SEQ ID NO: 131882 - RNA, 19 nt, Artificial Sequence
  Description of Artificial Sequence: Synthetic oligonucleotide
aaguaacacaaguuuauug

SEQ ID NO: 131883 - RNA, 19 nt, Artificial Sequence
  Description of Artificial Sequence: Synthetic oligonucleotide
uauaacauggaaucacugc

SEQ ID NO: 131884 - RNA, 19 nt, Artificial Sequence
  Description of Artificial Sequence: Synthetic oligonucleotide
aacuaggucaccguguugg

SEQ ID NO: 131885 - RNA, 19 nt, Artificial Sequence
  Description of Artificial Sequence: Synthetic oligonucleotide
aacucgagacuacaaacuc

SEQ ID NO: 131886 - RNA, 19 nt, Artificial Sequence
  Description of Artificial Sequence: Synthetic oligonucleotide
uuugucguauuguaaaagc

SEQ ID NO: 131887 - RNA, 19 nt, Artificial Sequence
  Description of Artificial Sequence: Synthetic oligonucleotide
aacaguuaccuaccuaauc

SEQ ID NO: 131888 - RNA, 19 nt, Artificial Sequence
  Description of Artificial Sequence: Synthetic oligonucleotide
uuaguauuguaauacaaua

SEQ ID NO: 131889 - RNA, 19 nt, Artificial Sequence
  Description of Artificial Sequence: Synthetic oligonucleotide
uguaauuuaaagccuacuu

SEQ ID NO: 131890 - RNA, 19 nt, Artificial Sequence
  Description of Artificial Sequence: Synthetic oligonucleotide
agauguaacucuaagaaug

SEQ ID NO: 131891 - RNA, 19 nt, Artificial Sequence
  Description of Artificial Sequence: Synthetic oligonucleotide
uuuacugcacaaaagugaa

SEQ ID NO: 131892 - RNA, 19 nt, Artificial Sequence
  Description of Artificial Sequence: Synthetic oligonucleotide
augacuugugaguuuaagg

SEQ ID NO: 131893 - RNA, 19 nt, Artificial Sequence
  Description of Artificial Sequence: Synthetic oligonucleotide
acaguuaccuaccuaaucu

SEQ ID NO: 131894 - RNA, 19 nt, Artificial Sequence
  Description of Artificial Sequence: Synthetic oligonucleotide
uguacaucaacauggcaca

SEQ ID NO: 131895 - RNA, 19 nt, Artificial Sequence
  Description of Artificial Sequence: Synthetic oligonucleotide
aauacucuaagugaacgca

SEQ ID NO: 131896 - RNA, 19 nt, Artificial Sequence
  Description of Artificial Sequence: Synthetic oligonucleotide
aaagccuuagucucaucag

SEQ ID NO: 131897 - RNA, 19 nt, Artificial Sequence
  Description of Artificial Sequence: Synthetic oligonucleotide
aagccuuagucucaucagg

SEQ ID NO: 131898 - RNA, 19 nt, Artificial Sequence
  Description of Artificial Sequence: Synthetic oligonucleotide
uucaucguaaucucgaguc

SEQ ID NO: 131899 - RNA, 19 nt, Artificial Sequence
  Description of Artificial Sequence: Synthetic oligonucleotide
uaauuuagacagaagguau

SEQ ID NO: 131900 - RNA, 19 nt, Artificial Sequence
  Description of Artificial Sequence: Synthetic oligonucleotide
gguuagugcauauauaacc

SEQ ID NO: 131901 - RNA, 19 nt, Artificial Sequence
  Description of Artificial Sequence: Synthetic oligonucleotide
cuaaucugcauauaacaug

SEQ ID NO: 131902 - RNA, 19 nt, Artificial Sequence
  Description of Artificial Sequence: Synthetic oligonucleotide
uucaacgugugaauaaaca

SEQ ID NO: 131903 - RNA, 19 nt, Artificial Sequence
  Description of Artificial Sequence: Synthetic oligonucleotide
ucaauagcggcagaaauca

SEQ ID NO: 131904 - RNA, 19 nt, Artificial Sequence
  Description of Artificial Sequence: Synthetic oligonucleotide
ugucguauuguaaaagcac

SEQ ID NO: 131905 - RNA, 19 nt, Artificial Sequence
  Description of Artificial Sequence: Synthetic oligonucleotide
ucaacgguacucauaagcu

SEQ ID NO: 131906 - RNA, 19 nt, Artificial Sequence
  Description of Artificial Sequence: Synthetic oligonucleotide
uaucuaucacaaaugcuug

SEQ ID NO: 131907 - RNA, 19 nt, Artificial Sequence
  Description of Artificial Sequence: Synthetic oligonucleotide
gugaccgccuccuugaucg

SEQ ID NO: 131908 - RNA, 19 nt, Artificial Sequence
  Description of Artificial Sequence: Synthetic oligonucleotide
ucaacgugugaauaaacac

SEQ ID NO: 131909 - RNA, 19 nt, Artificial Sequence
  Description of Artificial Sequence: Synthetic oligonucleotide
aauagagacaaagccuuag

SEQ ID NO: 131910 - RNA, 19 nt, Artificial Sequence
  Description of Artificial Sequence: Synthetic oligonucleotide
aacucuaagaauguuaauu

SEQ ID NO: 131911 - RNA, 19 nt, Artificial Sequence
  Description of Artificial Sequence: Synthetic oligonucleotide
ucgagcgcgaccuugaucu

SEQ ID NO: 131912 - RNA, 19 nt, Artificial Sequence
  Description of Artificial Sequence: Synthetic oligonucleotide
aacgguacucauaagcuuc

SEQ ID NO: 131913 - RNA, 19 nt, Artificial Sequence
  Description of Artificial Sequence: Synthetic oligonucleotide
uguuuuaggggacacugcu

SEQ ID NO: 131914 - RNA, 19 nt, Artificial Sequence
  Description of Artificial Sequence: Synthetic oligonucleotide
guuauauucaaaacucgag

SEQ ID NO: 131915 - RNA, 19 nt, Artificial Sequence
  Description of Artificial Sequence: Synthetic oligonucleotide
ugaagcuuguaacuaagaa

SEQ ID NO: 131916 - RNA, 19 nt, Artificial Sequence
  Description of Artificial Sequence: Synthetic oligonucleotide
uucuguaauuucaaggaaa

SEQ ID NO: 131917 - RNA, 19 nt, Artificial Sequence
  Description of Artificial Sequence: Synthetic oligonucleotide
aaacucuagaaauacucua

SEQ ID NO: 131918 - RNA, 19 nt, Artificial Sequence
  Description of Artificial Sequence: Synthetic oligonucleotide
uugucguauuguaaaagca

SEQ ID NO: 131919 - RNA, 19 nt, Artificial Sequence
  Description of Artificial Sequence: Synthetic oligonucleotide
ucauggaacuuaacaaagc

SEQ ID NO: 131920 - RNA, 19 nt, Artificial Sequence
  Description of Artificial Sequence: Synthetic oligonucleotide
auauucaaaacucgagacu

SEQ ID NO: 131921 - RNA, 19 nt, Artificial Sequence
  Description of Artificial Sequence: Synthetic oligonucleotide
uuuaggagaccuuguacca

SEQ ID NO: 131922 - RNA, 19 nt, Artificial Sequence
  Description of Artificial Sequence: Synthetic oligonucleotide
ucuaccacggcaaggacuc

SEQ ID NO: 131923 - RNA, 19 nt, Artificial Sequence
  Description of Artificial Sequence: Synthetic oligonucleotide
ugaccguucccuuucaucu

SEQ ID NO: 131924 - RNA, 19 nt, Artificial Sequence
  Description of Artificial Sequence: Synthetic oligonucleotide
uaucacaaaugcuuguuuc

SEQ ID NO: 131925 - RNA, 19 nt, Artificial Sequence
  Description of Artificial Sequence: Synthetic oligonucleotide
uuuggacucucgcagguca

SEQ ID NO: 131926 - RNA, 19 nt, Artificial Sequence
  Description of Artificial Sequence: Synthetic oligonucleotide
guaaugugcagcuguauac

SEQ ID NO: 131927 - RNA, 19 nt, Artificial Sequence
  Description of Artificial Sequence: Synthetic oligonucleotide
aauuugggaucaacgguac

SEQ ID NO: 131928 - RNA, 19 nt, Artificial Sequence
  Description of Artificial Sequence: Synthetic oligonucleotide
acucuaagaauguuaauuu

SEQ ID NO: 131929 - RNA, 19 nt, Artificial Sequence
  Description of Artificial Sequence: Synthetic oligonucleotide
auaauuuagacagaaggua

SEQ ID NO: 131930 - RNA, 19 nt, Artificial Sequence
  Description of Artificial Sequence: Synthetic oligonucleotide
aacagcgccaaucugggua

SEQ ID NO: 131931 - RNA, 19 nt, Artificial Sequence
  Description of Artificial Sequence: Synthetic oligonucleotide
uccccguucacuuuggacu

SEQ ID NO: 131932 - RNA, 19 nt, Artificial Sequence
  Description of Artificial Sequence: Synthetic oligonucleotide
ugguacgacuaucaaagcu

SEQ ID NO: 131933 - RNA, 19 nt, Artificial Sequence
  Description of Artificial Sequence: Synthetic oligonucleotide
caugcaaucagugcauucc

SEQ ID NO: 131934 - RNA, 19 nt, Artificial Sequence
  Description of Artificial Sequence: Synthetic oligonucleotide
uucagcauaugguacgacu

SEQ ID NO: 131935 - RNA, 19 nt, Artificial Sequence
  Description of Artificial Sequence: Synthetic oligonucleotide
uuucuguaauuucaaggaa

SEQ ID NO: 131936 - RNA, 19 nt, Artificial Sequence
  Description of Artificial Sequence: Synthetic oligonucleotide
gcgaccuugaucuugaaug

SEQ ID NO: 131937 - RNA, 19 nt, Artificial Sequence
  Description of Artificial Sequence: Synthetic oligonucleotide
aaaggcuuaucuaucacaa

SEQ ID NO: 131938 - RNA, 19 nt, Artificial Sequence
  Description of Artificial Sequence: Synthetic oligonucleotide
agaccauuaacuaggucac

SEQ ID NO: 131939 - RNA, 19 nt, Artificial Sequence
  Description of Artificial Sequence: Synthetic oligonucleotide
gucaugucaacaaauaaga

SEQ ID NO: 131940 - RNA, 19 nt, Artificial Sequence
  Description of Artificial Sequence: Synthetic oligonucleotide
cucuaagaauguuaauuug

SEQ ID NO: 131941 - RNA, 19 nt, Artificial Sequence
  Description of Artificial Sequence: Synthetic oligonucleotide
uacuagaggugucugauuu

SEQ ID NO: 131942 - RNA, 19 nt, Artificial Sequence
  Description of Artificial Sequence: Synthetic oligonucleotide
auuaucaagauuugucgua

SEQ ID NO: 131943 - RNA, 19 nt, Artificial Sequence
  Description of Artificial Sequence: Synthetic oligonucleotide
aagggcgggaucaagagcu

SEQ ID NO: 131944 - RNA, 19 nt, Artificial Sequence
  Description of Artificial Sequence: Synthetic oligonucleotide
aacgugugaauaaacacaa

SEQ ID NO: 131945 - RNA, 19 nt, Artificial Sequence
  Description of Artificial Sequence: Synthetic oligonucleotide
uggacgugcuccuugaccu

SEQ ID NO: 131946 - RNA, 19 nt, Artificial Sequence
  Description of Artificial Sequence: Synthetic oligonucleotide
auaaauuuacuagguaggu

SEQ ID NO: 131947 - RNA, 19 nt, Artificial Sequence
  Description of Artificial Sequence: Synthetic oligonucleotide
uaccuaaucugcauauaac

SEQ ID NO: 131948 - RNA, 19 nt, Artificial Sequence
  Description of Artificial Sequence: Synthetic oligonucleotide
cuacauggcucuaccacgg

SEQ ID NO: 131949 - RNA, 19 nt, Artificial Sequence
  Description of Artificial Sequence: Synthetic oligonucleotide
auuuacuagguagguauag

SEQ ID NO: 131950 - RNA, 19 nt, Artificial Sequence
  Description of Artificial Sequence: Synthetic oligonucleotide
auuugucguauuguaaaag

SEQ ID NO: 131951 - RNA, 19 nt, Artificial Sequence
  Description of Artificial Sequence: Synthetic oligonucleotide
gcuuaucuaucacaaaugc

SEQ ID NO: 131952 - RNA, 19 nt, Artificial Sequence
  Description of Artificial Sequence: Synthetic oligonucleotide
cauggaaucacugcauaag

SEQ ID NO: 131953 - RNA, 19 nt, Artificial Sequence
  Description of Artificial Sequence: Synthetic oligonucleotide
gacauuugggguagcaugc

SEQ ID NO: 131954 - RNA, 19 nt, Artificial Sequence
  Description of Artificial Sequence: Synthetic oligonucleotide
aagugaagcuuguaacuaa

SEQ ID NO: 131955 - RNA, 19 nt, Artificial Sequence
  Description of Artificial Sequence: Synthetic oligonucleotide
auggaaucacugcauaaga

SEQ ID NO: 131956 - RNA, 19 nt, Artificial Sequence
  Description of Artificial Sequence: Synthetic oligonucleotide
cauauuuauccccaagaca

SEQ ID NO: 131957 - RNA, 19 nt, Artificial Sequence
  Description of Artificial Sequence: Synthetic oligonucleotide
aaggcgagucauccggcgg

SEQ ID NO: 131958 - RNA, 19 nt, Artificial Sequence
  Description of Artificial Sequence: Synthetic oligonucleotide
aaagugaagcuuguaacua

SEQ ID NO: 131959 - RNA, 19 nt, Artificial Sequence
  Description of Artificial Sequence: Synthetic oligonucleotide
auaugguacgacuaucaaa

SEQ ID NO: 131960 - RNA, 19 nt, Artificial Sequence
  Description of Artificial Sequence: Synthetic oligonucleotide
caacgugugaauaaacaca

SEQ ID NO: 131961 - RNA, 19 nt, Artificial Sequence
  Description of Artificial Sequence: Synthetic oligonucleotide
uuaacuaggucaccguguu

SEQ ID NO: 131962 - RNA, 19 nt, Artificial Sequence
  Description of Artificial Sequence: Synthetic oligonucleotide
acaccuaagugagaugaac

SEQ ID NO: 131963 - RNA, 19 nt, Artificial Sequence
  Description of Artificial Sequence: Synthetic oligonucleotide
acucgagacuacaaacucc

SEQ ID NO: 131964 - RNA, 19 nt, Artificial Sequence
  Description of Artificial Sequence: Synthetic oligonucleotide
ucccgguagcccaagagca

SEQ ID NO: 131965 - RNA, 19 nt, Artificial Sequence
  Description of Artificial Sequence: Synthetic oligonucleotide
uuacuuguugaccguuccc

SEQ ID NO: 131966 - RNA, 19 nt, Artificial Sequence
  Description of Artificial Sequence: Synthetic oligonucleotide
uacucuaagugaacgcacu

SEQ ID NO: 131967 - RNA, 19 nt, Artificial Sequence
  Description of Artificial Sequence: Synthetic oligonucleotide
uucaugacauuugggguag

SEQ ID NO: 131968 - RNA, 19 nt, Artificial Sequence
  Description of Artificial Sequence: Synthetic oligonucleotide
aucugcucggagcuagcgc

SEQ ID NO: 131969 - RNA, 19 nt, Artificial Sequence
  Description of Artificial Sequence: Synthetic oligonucleotide
uagugcauauauaaccuuu

SEQ ID NO: 131970 - RNA, 19 nt, Artificial Sequence
  Description of Artificial Sequence: Synthetic oligonucleotide
cauuaacuaggucaccgug

SEQ ID NO: 131971 - RNA, 19 nt, Artificial Sequence
  Description of Artificial Sequence: Synthetic oligonucleotide
accgaggcccaucugcagc

SEQ ID NO: 131972 - RNA, 19 nt, Artificial Sequence
  Description of Artificial Sequence: Synthetic oligonucleotide
aacauggaaucacugcaua

SEQ ID NO: 131973 - RNA, 19 nt, Artificial Sequence
  Description of Artificial Sequence: Synthetic oligonucleotide
augguacgacuaucaaagc

SEQ ID NO: 131974 - RNA, 19 nt, Artificial Sequence
  Description of Artificial Sequence: Synthetic oligonucleotide
ggugccaauagagacaaag

SEQ ID NO: 131975 - RNA, 19 nt, Artificial Sequence
  Description of Artificial Sequence: Synthetic oligonucleotide
uggaaucacugcauaagau

SEQ ID NO: 131976 - RNA, 19 nt, Artificial Sequence
  Description of Artificial Sequence: Synthetic oligonucleotide
ucaucguaaucucgaguca

SEQ ID NO: 131977 - RNA, 19 nt, Artificial Sequence
  Description of Artificial Sequence: Synthetic oligonucleotide
gcaaaggcgagucauccgg

SEQ ID NO: 131978 - RNA, 19 nt, Artificial Sequence
  Description of Artificial Sequence: Synthetic oligonucleotide
ucguauuguaaaagcacau

SEQ ID NO: 131979 - RNA, 19 nt, Artificial Sequence
  Description of Artificial Sequence: Synthetic oligonucleotide
gacugagaguucaaguuug

SEQ ID NO: 131980 - RNA, 19 nt, Artificial Sequence
  Description of Artificial Sequence: Synthetic oligonucleotide
acuagaggugucugauuuc

SEQ ID NO: 131981 - RNA, 19 nt, Artificial Sequence
  Description of Artificial Sequence: Synthetic oligonucleotide
uuaucaagauuugucguau

SEQ ID NO: 131982 - RNA, 19 nt, Artificial Sequence
  Description of Artificial Sequence: Synthetic oligonucleotide
auacucuaagugaacgcac

SEQ ID NO: 131983 - RNA, 19 nt, Artificial Sequence
  Description of Artificial Sequence: Synthetic oligonucleotide
ucuggaucauggaacuuaa

SEQ ID NO: 131984 - RNA, 19 nt, Artificial Sequence
  Description of Artificial Sequence: Synthetic oligonucleotide
guaacucuaagaauguuaa

SEQ ID NO: 131985 - RNA, 19 nt, Artificial Sequence
  Description of Artificial Sequence: Synthetic oligonucleotide
uccuacauccaaagcacaa

SEQ ID NO: 131986 - RNA, 19 nt, Artificial Sequence
  Description of Artificial Sequence: Synthetic oligonucleotide
guaaucucgagucaccugu

SEQ ID NO: 131987 - RNA, 19 nt, Artificial Sequence
  Description of Artificial Sequence: Synthetic oligonucleotide
agguuagugcauauauaac

SEQ ID NO: 131988 - RNA, 19 nt, Artificial Sequence
  Description of Artificial Sequence: Synthetic oligonucleotide
auauaacauggaaucacug

SEQ ID NO: 131989 - RNA, 19 nt, Artificial Sequence
  Description of Artificial Sequence: Synthetic oligonucleotide
cuucaacgugugaauaaac

SEQ ID NO: 131990 - RNA, 19 nt, Artificial Sequence
  Description of Artificial Sequence: Synthetic oligonucleotide
acucuaagugaacgcacug

SEQ ID NO: 131991 - RNA, 19 nt, Artificial Sequence
  Description of Artificial Sequence: Synthetic oligonucleotide
acgacuaucaaagcucugu

SEQ ID NO: 131992 - RNA, 19 nt, Artificial Sequence
  Description of Artificial Sequence: Synthetic oligonucleotide
acauggcacagacggucgc

SEQ ID NO: 131993 - RNA, 19 nt, Artificial Sequence
  Description of Artificial Sequence: Synthetic oligonucleotide
uguuggaggguuucaugac

SEQ ID NO: 131994 - RNA, 19 nt, Artificial Sequence
  Description of Artificial Sequence: Synthetic oligonucleotide
auuaacuaggucaccgugu

SEQ ID NO: 131995 - RNA, 19 nt, Artificial Sequence
  Description of Artificial Sequence: Synthetic oligonucleotide
aagauuugucguauuguaa

SEQ ID NO: 131996 - RNA, 19 nt, Artificial Sequence
  Description of Artificial Sequence: Synthetic oligonucleotide
uuaccuaccuaaucugcau

SEQ ID NO: 131997 - RNA, 19 nt, Artificial Sequence
  Description of Artificial Sequence: Synthetic oligonucleotide
agugaagcuuguaacuaag

SEQ ID NO: 131998 - RNA, 19 nt, Artificial Sequence
  Description of Artificial Sequence: Synthetic oligonucleotide
agugcauauauaaccuuug

SEQ ID NO: 131999 - RNA, 19 nt, Artificial Sequence
  Description of Artificial Sequence: Synthetic oligonucleotide
ggaucaacgguacucauaa

SEQ ID NO: 132000 - RNA, 19 nt, Artificial Sequence
  Description of Artificial Sequence: Synthetic oligonucleotide
acuuacguguuuaguauug

SEQ ID NO: 132001 - RNA, 19 nt, Artificial Sequence
  Description of Artificial Sequence: Synthetic oligonucleotide
uuagugcauauauaaccuu

SEQ ID NO: 132002 - RNA, 19 nt, Artificial Sequence
  Description of Artificial Sequence: Synthetic oligonucleotide
caguuaccuaccuaaucug

SEQ ID NO: 132003 - RNA, 19 nt, Artificial Sequence
  Description of Artificial Sequence: Synthetic oligonucleotide
aagaccugccacugcauua

SEQ ID NO: 132004 - RNA, 19 nt, Artificial Sequence
  Description of Artificial Sequence: Synthetic oligonucleotide
uuguugaccguucccuuuc

SEQ ID NO: 132005 - RNA, 19 nt, Artificial Sequence
  Description of Artificial Sequence: Synthetic oligonucleotide
ucuaucacaaaugcuuguu

SEQ ID NO: 132006 - RNA, 19 nt, Artificial Sequence
  Description of Artificial Sequence: Synthetic oligonucleotide
aagugaacgcacugaggau

SEQ ID NO: 132007 - RNA, 19 nt, Artificial Sequence
  Description of Artificial Sequence: Synthetic oligonucleotide
gacacgagaggagacuggc

SEQ ID NO: 132008 - RNA, 19 nt, Artificial Sequence
  Description of Artificial Sequence: Synthetic oligonucleotide
agagcgucuggcuguacug

SEQ ID NO: 132009 - RNA, 19 nt, Artificial Sequence
  Description of Artificial Sequence: Synthetic oligonucleotide
ucucaaucucccucucagc

SEQ ID NO: 132010 - RNA, 19 nt, Artificial Sequence
  Description of Artificial Sequence: Synthetic oligonucleotide
aggcgagucauccggcggg

SEQ ID NO: 132011 - RNA, 19 nt, Artificial Sequence
  Description of Artificial Sequence: Synthetic oligonucleotide
ccuacauggcucuaccacg

SEQ ID NO: 132012 - RNA, 19 nt, Artificial Sequence
  Description of Artificial Sequence: Synthetic oligonucleotide
guggugaucauccccguuc

SEQ ID NO: 132013 - RNA, 19 nt, Artificial Sequence
  Description of Artificial Sequence: Synthetic oligonucleotide
ugagguuauuucuccuagu

SEQ ID NO: 132014 - RNA, 19 nt, Artificial Sequence
  Description of Artificial Sequence: Synthetic oligonucleotide
ucauccccguucacuuugg

SEQ ID NO: 132015 - RNA, 19 nt, Artificial Sequence
  Description of Artificial Sequence: Synthetic oligonucleotide
caugacuugugaguuuaag

SEQ ID NO: 132016 - RNA, 19 nt, Artificial Sequence
  Description of Artificial Sequence: Synthetic oligonucleotide
cuaccuaaucugcauauaa

SEQ ID NO: 132017 - RNA, 19 nt, Artificial Sequence
  Description of Artificial Sequence: Synthetic oligonucleotide
aaagguuagugcauauaua

SEQ ID NO: 132018 - RNA, 19 nt, Artificial Sequence
  Description of Artificial Sequence: Synthetic oligonucleotide
uugaccguucccuuucauc

SEQ ID NO: 132019 - RNA, 19 nt, Artificial Sequence
  Description of Artificial Sequence: Synthetic oligonucleotide
uuuaugucuccguggggau

SEQ ID NO: 132020 - RNA, 19 nt, Artificial Sequence
  Description of Artificial Sequence: Synthetic oligonucleotide
caccuaagugagaugaaca

SEQ ID NO: 132021 - RNA, 19 nt, Artificial Sequence
  Description of Artificial Sequence: Synthetic oligonucleotide
accuaccuaaucugcauau

SEQ ID NO: 132022 - RNA, 19 nt, Artificial Sequence
  Description of Artificial Sequence: Synthetic oligonucleotide
acggucgccuacuuuuguc

SEQ ID NO: 132023 - RNA, 19 nt, Artificial Sequence
  Description of Artificial Sequence: Synthetic oligonucleotide
gagugugaccgccuccuug

SEQ ID NO: 132024 - RNA, 19 nt, Artificial Sequence
  Description of Artificial Sequence: Synthetic oligonucleotide
gcuggagauagaugcaugc

SEQ ID NO: 132025 - RNA, 19 nt, Artificial Sequence
  Description of Artificial Sequence: Synthetic oligonucleotide
gcauauaacauggaaucac

SEQ ID NO: 132026 - RNA, 19 nt, Artificial Sequence
  Description of Artificial Sequence: Synthetic oligonucleotide
agcuuguaacuaagaaaac

SEQ ID NO: 132027 - RNA, 19 nt, Artificial Sequence
  Description of Artificial Sequence: Synthetic oligonucleotide
uucucgcugucauaucccu

SEQ ID NO: 132028 - RNA, 19 nt, Artificial Sequence
  Description of Artificial Sequence: Synthetic oligonucleotide
augacaccgaggcccaucu

SEQ ID NO: 132029 - RNA, 19 nt, Artificial Sequence
  Description of Artificial Sequence: Synthetic oligonucleotide
gaaugagaucgucuccguc

SEQ ID NO: 132030 - RNA, 19 nt, Artificial Sequence
  Description of Artificial Sequence: Synthetic oligonucleotide
caaaggcgagucauccggc

SEQ ID NO: 132031 - RNA, 19 nt, Artificial Sequence
  Description of Artificial Sequence: Synthetic oligonucleotide
gaucaacgguacucauaag

SEQ ID NO: 132032 - RNA, 19 nt, Artificial Sequence
  Description of Artificial Sequence: Synthetic oligonucleotide
acuucaacgugugaauaaa

SEQ ID NO: 132033 - RNA, 19 nt, Artificial Sequence
  Description of Artificial Sequence: Synthetic oligonucleotide
ucguaaucucgagucaccu

SEQ ID NO: 132034 - RNA, 19 nt, Artificial Sequence
  Description of Artificial Sequence: Synthetic oligonucleotide
agcgggacagcuuucuuuu

SEQ ID NO: 132035 - RNA, 19 nt, Artificial Sequence
  Description of Artificial Sequence: Synthetic oligonucleotide
uaccuaccuaaucugcaua

SEQ ID NO: 132036 - RNA, 19 nt, Artificial Sequence
  Description of Artificial Sequence: Synthetic oligonucleotide
guuaccuaccuaaucugca

SEQ ID NO: 132037 - RNA, 19 nt, Artificial Sequence
  Description of Artificial Sequence: Synthetic oligonucleotide
cauaagauacuacugcaau

SEQ ID NO: 132038 - RNA, 19 nt, Artificial Sequence
  Description of Artificial Sequence: Synthetic oligonucleotide
gugcauauauaaccuuuga

SEQ ID NO: 132039 - RNA, 19 nt, Artificial Sequence
  Description of Artificial Sequence: Synthetic oligonucleotide
acuggcaaaggcgagucau

SEQ ID NO: 132040 - RNA, 19 nt, Artificial Sequence
  Description of Artificial Sequence: Synthetic oligonucleotide
uguugacaauucugccggc

SEQ ID NO: 132041 - RNA, 19 nt, Artificial Sequence
  Description of Artificial Sequence: Synthetic oligonucleotide
ugcaaccauugguaaugug

SEQ ID NO: 132042 - RNA, 19 nt, Artificial Sequence
  Description of Artificial Sequence: Synthetic oligonucleotide
acaggcgcaugacuuguga

SEQ ID NO: 132043 - RNA, 19 nt, Artificial Sequence
  Description of Artificial Sequence: Synthetic oligonucleotide
uacgacuaucaaagcucug

SEQ ID NO: 132044 - RNA, 19 nt, Artificial Sequence
  Description of Artificial Sequence: Synthetic oligonucleotide
cagagacaacccaugccug

SEQ ID NO: 132045 - RNA, 19 nt, Artificial Sequence
  Description of Artificial Sequence: Synthetic oligonucleotide
cuucgugaccgccuguguc

SEQ ID NO: 132046 - RNA, 19 nt, Artificial Sequence
  Description of Artificial Sequence: Synthetic oligonucleotide
gguacucauaagcuucaac

SEQ ID NO: 132047 - RNA, 19 nt, Artificial Sequence
  Description of Artificial Sequence: Synthetic oligonucleotide
acagcgccaaucuggguaa

SEQ ID NO: 132048 - RNA, 19 nt, Artificial Sequence
  Description of Artificial Sequence: Synthetic oligonucleotide
guauacaccuaagugagau

SEQ ID NO: 132049 - RNA, 19 nt, Artificial Sequence
  Description of Artificial Sequence: Synthetic oligonucleotide
auaagaccauuaacuaggu

SEQ ID NO: 132050 - RNA, 19 nt, Artificial Sequence
  Description of Artificial Sequence: Synthetic oligonucleotide
agcgcucggggacacguug

SEQ ID NO: 132051 - RNA, 19 nt, Artificial Sequence
  Description of Artificial Sequence: Synthetic oligonucleotide
caggcgcaugacuugugag

SEQ ID NO: 132052 - RNA, 19 nt, Artificial Sequence
  Description of Artificial Sequence: Synthetic oligonucleotide
gcaagggcgggaucaagag

SEQ ID NO: 132053 - RNA, 19 nt, Artificial Sequence
  Description of Artificial Sequence: Synthetic oligonucleotide
caauagcggcagaaaucag

SEQ ID NO: 132054 - RNA, 19 nt, Artificial Sequence
  Description of Artificial Sequence: Synthetic oligonucleotide
uuacuagaggugucugauu

SEQ ID NO: 132055 - RNA, 19 nt, Artificial Sequence
  Description of Artificial Sequence: Synthetic oligonucleotide
cauccggcgggaagaggcg

SEQ ID NO: 132056 - RNA, 19 nt, Artificial Sequence
  Description of Artificial Sequence: Synthetic oligonucleotide
gaugcaugcagcucuucau

SEQ ID NO: 132057 - RNA, 19 nt, Artificial Sequence
  Description of Artificial Sequence: Synthetic oligonucleotide
uuuaggagaccugggcuuu

SEQ ID NO: 132058 - RNA, 19 nt, Artificial Sequence
  Description of Artificial Sequence: Synthetic oligonucleotide
agccuuagucucaucagga

SEQ ID NO: 132059 - RNA, 19 nt, Artificial Sequence
  Description of Artificial Sequence: Synthetic oligonucleotide
uaucaagauuugucguauu

SEQ ID NO: 132060 - RNA, 19 nt, Artificial Sequence
  Description of Artificial Sequence: Synthetic oligonucleotide
uacaggcgcaugacuugug

SEQ ID NO: 132061 - RNA, 19 nt, Artificial Sequence
  Description of Artificial Sequence: Synthetic oligonucleotide
ugcucggagcuagcgcucg

SEQ ID NO: 132062 - RNA, 19 nt, Artificial Sequence
  Description of Artificial Sequence: Synthetic oligonucleotide
uaaucucgagucaccuguu

SEQ ID NO: 132063 - RNA, 19 nt, Artificial Sequence
  Description of Artificial Sequence: Synthetic oligonucleotide
acuaggucaccguguugga

SEQ ID NO: 132064 - RNA, 19 nt, Artificial Sequence
  Description of Artificial Sequence: Synthetic oligonucleotide
cuaggucaccguguuggag

SEQ ID NO: 132065 - RNA, 19 nt, Artificial Sequence
  Description of Artificial Sequence: Synthetic oligonucleotide
uggaucaccucggugccuc

SEQ ID NO: 132066 - RNA, 19 nt, Artificial Sequence
  Description of Artificial Sequence: Synthetic oligonucleotide
cucuaagugaacgcacuga

SEQ ID NO: 132067 - RNA, 19 nt, Artificial Sequence
  Description of Artificial Sequence: Synthetic oligonucleotide
gccacuuacguguuuagua

SEQ ID NO: 132068 - RNA, 19 nt, Artificial Sequence
  Description of Artificial Sequence: Synthetic oligonucleotide
guugacaauucugccggca

SEQ ID NO: 132069 - RNA, 19 nt, Artificial Sequence
  Description of Artificial Sequence: Synthetic oligonucleotide
acgagaggagacuggcaaa

SEQ ID NO: 132070 - RNA, 19 nt, Artificial Sequence
  Description of Artificial Sequence: Synthetic oligonucleotide
gugaacgcacugaggauca

SEQ ID NO: 132071 - RNA, 19 nt, Artificial Sequence
  Description of Artificial Sequence: Synthetic oligonucleotide
cuggugccaauagagacaa

SEQ ID NO: 132072 - RNA, 19 nt, Artificial Sequence
  Description of Artificial Sequence: Synthetic oligonucleotide
gcuuuggacgugcuccuug

SEQ ID NO: 132073 - RNA, 19 nt, Artificial Sequence
  Description of Artificial Sequence: Synthetic oligonucleotide
acucucggacuuccuuucu

SEQ ID NO: 132074 - RNA, 19 nt, Artificial Sequence
  Description of Artificial Sequence: Synthetic oligonucleotide
ugguaaugugcagcuguau

SEQ ID NO: 132075 - RNA, 19 nt, Artificial Sequence
  Description of Artificial Sequence: Synthetic oligonucleotide
cuggagauagaugcaugca

SEQ ID NO: 132076 - RNA, 19 nt, Artificial Sequence
  Description of Artificial Sequence: Synthetic oligonucleotide
ggaguuuuggaucguuucu

SEQ ID NO: 132077 - RNA, 19 nt, Artificial Sequence
  Description of Artificial Sequence: Synthetic oligonucleotide
cucggagcuagcgcucggg

SEQ ID NO: 132078 - RNA, 19 nt, Artificial Sequence
  Description of Artificial Sequence: Synthetic oligonucleotide
gagagcgucuggcuguacu

SEQ ID NO: 132079 - RNA, 19 nt, Artificial Sequence
  Description of Artificial Sequence: Synthetic oligonucleotide
uaccacggcaaggacucaa

SEQ ID NO: 132080 - RNA, 19 nt, Artificial Sequence
  Description of Artificial Sequence: Synthetic oligonucleotide
acgcacugaggaucauaca

SEQ ID NO: 132081 - RNA, 19 nt, Artificial Sequence
  Description of Artificial Sequence: Synthetic oligonucleotide
auguaacucuaagaauguu

SEQ ID NO: 132082 - RNA, 19 nt, Artificial Sequence
  Description of Artificial Sequence: Synthetic oligonucleotide
agccacuuacguguuuagu

SEQ ID NO: 132083 - RNA, 19 nt, Artificial Sequence
  Description of Artificial Sequence: Synthetic oligonucleotide
acgguacucauaagcuuca

SEQ ID NO: 132084 - RNA, 19 nt, Artificial Sequence
  Description of Artificial Sequence: Synthetic oligonucleotide
cuucaucguaaucucgagu

SEQ ID NO: 132085 - RNA, 19 nt, Artificial Sequence
  Description of Artificial Sequence: Synthetic oligonucleotide
guacgacuaucaaagcucu

SEQ ID NO: 132086 - RNA, 19 nt, Artificial Sequence
  Description of Artificial Sequence: Synthetic oligonucleotide
ucguggugaucauccccgu

SEQ ID NO: 132087 - RNA, 19 nt, Artificial Sequence
  Description of Artificial Sequence: Synthetic oligonucleotide
cuguugcaugaccccaguc

SEQ ID NO: 132088 - RNA, 19 nt, Artificial Sequence
  Description of Artificial Sequence: Synthetic oligonucleotide
cagacggucgccuacuuuu

SEQ ID NO: 132089 - RNA, 19 nt, Artificial Sequence
  Description of Artificial Sequence: Synthetic oligonucleotide
gugaucauccccguucacu

SEQ ID NO: 132090 - RNA, 19 nt, Artificial Sequence
  Description of Artificial Sequence: Synthetic oligonucleotide
cuacuucaacgugugaaua

SEQ ID NO: 132091 - RNA, 19 nt, Artificial Sequence
  Description of Artificial Sequence: Synthetic oligonucleotide
ugcuucgacgccgccgccu

SEQ ID NO: 132092 - RNA, 19 nt, Artificial Sequence
  Description of Artificial Sequence: Synthetic oligonucleotide
gcaugcaaucagugcauuc

SEQ ID NO: 132093 - RNA, 19 nt, Artificial Sequence
  Description of Artificial Sequence: Synthetic oligonucleotide
agacggucgccuacuuuug

SEQ ID NO: 132094 - RNA, 19 nt, Artificial Sequence
  Description of Artificial Sequence: Synthetic oligonucleotide
ucaugacauuugggguagc

SEQ ID NO: 132095 - RNA, 19 nt, Artificial Sequence
  Description of Artificial Sequence: Synthetic oligonucleotide
agcuagcgcucggggacac

SEQ ID NO: 132096 - RNA, 19 nt, Artificial Sequence
  Description of Artificial Sequence: Synthetic oligonucleotide
ccuaaucugcauauaacau

SEQ ID NO: 132097 - RNA, 19 nt, Artificial Sequence
  Description of Artificial Sequence: Synthetic oligonucleotide
gaacgcacugaggaucaua

SEQ ID NO: 132098 - RNA, 19 nt, Artificial Sequence
  Description of Artificial Sequence: Synthetic oligonucleotide
gcucaauagcggcagaaau

SEQ ID NO: 132099 - RNA, 19 nt, Artificial Sequence
  Description of Artificial Sequence: Synthetic oligonucleotide
cgcacugaggaucauacaa

SEQ ID NO: 132100 - RNA, 19 nt, Artificial Sequence
  Description of Artificial Sequence: Synthetic oligonucleotide
cuuacguguuuaguauugu

SEQ ID NO: 132101 - RNA, 19 nt, Artificial Sequence
  Description of Artificial Sequence: Synthetic oligonucleotide
gcauuaggugucaccagga

SEQ ID NO: 132102 - RNA, 19 nt, Artificial Sequence
  Description of Artificial Sequence: Synthetic oligonucleotide
cccgaaagaaguuucuccu

SEQ ID NO: 132103 - RNA, 19 nt, Artificial Sequence
  Description of Artificial Sequence: Synthetic oligonucleotide
cgggacagcuuucuuuuag

SEQ ID NO: 132104 - RNA, 19 nt, Artificial Sequence
  Description of Artificial Sequence: Synthetic oligonucleotide
agcgccaaucuggguaagu

SEQ ID NO: 132105 - RNA, 19 nt, Artificial Sequence
  Description of Artificial Sequence: Synthetic oligonucleotide
ugccggcaucuacuucaac

SEQ ID NO: 132106 - RNA, 19 nt, Artificial Sequence
  Description of Artificial Sequence: Synthetic oligonucleotide
caacgguacucauaagcuu

SEQ ID NO: 132107 - RNA, 19 nt, Artificial Sequence
  Description of Artificial Sequence: Synthetic oligonucleotide
ccccguucacuuuggacuc

SEQ ID NO: 132108 - RNA, 19 nt, Artificial Sequence
  Description of Artificial Sequence: Synthetic oligonucleotide
acgugugaauaaacacaau

SEQ ID NO: 132109 - RNA, 19 nt, Artificial Sequence
  Description of Artificial Sequence: Synthetic oligonucleotide
cacuuacguguuuaguauu

SEQ ID NO: 132110 - RNA, 19 nt, Artificial Sequence
  Description of Artificial Sequence: Synthetic oligonucleotide
gagcuagcgcucggggaca

SEQ ID NO: 132111 - RNA, 19 nt, Artificial Sequence
  Description of Artificial Sequence: Synthetic oligonucleotide
gcgucuggcuguacuguag

SEQ ID NO: 132112 - RNA, 19 nt, Artificial Sequence
  Description of Artificial Sequence: Synthetic oligonucleotide
ggaaugagaucgucuccgu

SEQ ID NO: 132113 - RNA, 19 nt, Artificial Sequence
  Description of Artificial Sequence: Synthetic oligonucleotide
ccacuuacguguuuaguau

SEQ ID NO: 132114 - RNA, 19 nt, Artificial Sequence
  Description of Artificial Sequence: Synthetic oligonucleotide
ugaacgcacugaggaucau

SEQ ID NO: 132115 - RNA, 19 nt, Artificial Sequence
  Description of Artificial Sequence: Synthetic oligonucleotide
cgagucaccuguuugacau

SEQ ID NO: 132116 - RNA, 19 nt, Artificial Sequence
  Description of Artificial Sequence: Synthetic oligonucleotide
cugucauaucccugcuccu

SEQ ID NO: 132117 - RNA, 19 nt, Artificial Sequence
  Description of Artificial Sequence: Synthetic oligonucleotide
ggcucaauagcggcagaaa

SEQ ID NO: 132118 - RNA, 19 nt, Artificial Sequence
  Description of Artificial Sequence: Synthetic oligonucleotide
ccgucuuggacuuuuggau

SEQ ID NO: 132119 - RNA, 19 nt, Artificial Sequence
  Description of Artificial Sequence: Synthetic oligonucleotide
uagcgcucggggacacguu

SEQ ID NO: 132120 - RNA, 19 nt, Artificial Sequence
  Description of Artificial Sequence: Synthetic oligonucleotide
cuagcgcucggggacacgu

SEQ ID NO: 132121 - RNA, 19 nt, Artificial Sequence
  Description of Artificial Sequence: Synthetic oligonucleotide
ggaucaccucggugccucc

SEQ ID NO: 132122 - RNA, 19 nt, Artificial Sequence
  Description of Artificial Sequence: Synthetic oligonucleotide
gcuucgacgccgccgccuc

SEQ ID NO: 132123 - RNA, 19 nt, Artificial Sequence
  Description of Artificial Sequence: Synthetic oligonucleotide
gucaccguguuggaggguu

SEQ ID NO: 132124 - RNA, 19 nt, Artificial Sequence
  Description of Artificial Sequence: Synthetic oligonucleotide
gggaucaacgguacucaua

SEQ ID NO: 132125 - RNA, 19 nt, Artificial Sequence
  Description of Artificial Sequence: Synthetic oligonucleotide
cauccccguucacuuugga

SEQ ID NO: 132126 - RNA, 19 nt, Artificial Sequence
  Description of Artificial Sequence: Synthetic oligonucleotide
gcgcucggggacacguugg

SEQ ID NO: 132127 - RNA, 19 nt, Artificial Sequence
  Description of Artificial Sequence: Synthetic oligonucleotide
auggugagcgggacagcuu

SEQ ID NO: 132128 - RNA, 19 nt, Artificial Sequence
  Description of Artificial Sequence: Synthetic oligonucleotide
guugaccguucccuuucau

SEQ ID NO: 132129 - RNA, 19 nt, Artificial Sequence
  Description of Artificial Sequence: Synthetic oligonucleotide
ccauuaacuaggucaccgu

SEQ ID NO: 132130 - RNA, 19 nt, Artificial Sequence
  Description of Artificial Sequence: Synthetic oligonucleotide
gccaaaagagcguccgcau

SEQ ID NO: 132131 - RNA, 19 nt, Artificial Sequence
  Description of Artificial Sequence: Synthetic oligonucleotide
gcauuagcuggugccaaua

SEQ ID NO: 132132 - RNA, 19 nt, Artificial Sequence
  Description of Artificial Sequence: Synthetic oligonucleotide
cugccggcaucuacuucaa

SEQ ID NO: 132133 - RNA, 19 nt, Artificial Sequence
  Description of Artificial Sequence: Synthetic oligonucleotide
gucaacgaacacaguguuu

SEQ ID NO: 132134 - RNA, 19 nt, Artificial Sequence
  Description of Artificial Sequence: Synthetic oligonucleotide
ggcgcaugacuugugaguu

SEQ ID NO: 132135 - RNA, 19 nt, Artificial Sequence
  Description of Artificial Sequence: Synthetic oligonucleotide
cagcgccaaucuggguaag

SEQ ID NO: 132136 - RNA, 19 nt, Artificial Sequence
  Description of Artificial Sequence: Synthetic oligonucleotide
ggggaccacggccgugcug

SEQ ID NO: 132137 - RNA, 19 nt, Artificial Sequence
  Description of Artificial Sequence: Synthetic oligonucleotide
gcucauggcgcgggcugcc

SEQ ID NO: 132138 - RNA, 19 nt, Artificial Sequence
  Description of Artificial Sequence: Synthetic oligonucleotide
ggugagcgggacagcuuuc

SEQ ID NO: 132139 - RNA, 19 nt, Artificial Sequence
  Description of Artificial Sequence: Synthetic oligonucleotide
gcuagcgcucggggacacg

SEQ ID NO: 132140 - RNA, 19 nt, Artificial Sequence
  Description of Artificial Sequence: Synthetic oligonucleotide
ccucccgaaagaaguuucu

SEQ ID NO: 132141 - RNA, 19 nt, Artificial Sequence
  Description of Artificial Sequence: Synthetic oligonucleotide
cgugaccgccugugucugg

SEQ ID NO: 132142 - RNA, 19 nt, Artificial Sequence
  Description of Artificial Sequence: Synthetic oligonucleotide
cauucccuacauggcucua

SEQ ID NO: 132143 - RNA, 19 nt, Artificial Sequence
  Description of Artificial Sequence: Synthetic oligonucleotide
cgcaugacuugugaguuua

SEQ ID NO: 132144 - RNA, 19 nt, Artificial Sequence
  Description of Artificial Sequence: Synthetic oligonucleotide
cacggccgugcugcucaug

SEQ ID NO: 132145 - RNA, 19 nt, Artificial Sequence
  Description of Artificial Sequence: Synthetic oligonucleotide
gcucggggacacguugguc

SEQ ID NO: 132146 - RNA, 19 nt, Artificial Sequence
  Description of Artificial Sequence: Synthetic oligonucleotide
gugugaccgccuccuugau

SEQ ID NO: 132147 - RNA, 19 nt, Artificial Sequence
  Description of Artificial Sequence: Synthetic oligonucleotide
cggucgccuacuuuugucu

SEQ ID NO: 132148 - RNA, 19 nt, Artificial Sequence
  Description of Artificial Sequence: Synthetic oligonucleotide
gcgggacagcuuucuuuua

SEQ ID NO: 132149 - RNA, 19 nt, Artificial Sequence
  Description of Artificial Sequence: Synthetic oligonucleotide
cuucgacgccgccgccucu

SEQ ID NO: 132150 - RNA, 19 nt, Artificial Sequence
  Description of Artificial Sequence: Synthetic oligonucleotide
ggacgugcuccuugaccuu

SEQ ID NO: 132151 - RNA, 19 nt, Artificial Sequence
  Description of Artificial Sequence: Synthetic oligonucleotide
gcgcaugacuugugaguuu

SEQ ID NO: 132152 - RNA, 19 nt, Artificial Sequence
  Description of Artificial Sequence: Synthetic oligonucleotide
ccguguuggaggguuucau

SEQ ID NO: 132153 - RNA, 19 nt, Artificial Sequence
  Description of Artificial Sequence: Synthetic oligonucleotide
cgcgaccuugaucuugaau

SEQ ID NO: 132154 - RNA, 19 nt, Artificial Sequence
  Description of Artificial Sequence: Synthetic oligonucleotide
ggucaccguguuggagggu

SEQ ID NO: 132155 - RNA, 19 nt, Artificial Sequence
  Description of Artificial Sequence: Synthetic oligonucleotide
cgagagcgucuggcuguac

SEQ ID NO: 132156 - RNA, 19 nt, Artificial Sequence
  Description of Artificial Sequence: Synthetic oligonucleotide
aaauaugucagccaucggc

SEQ ID NO: 132157 - RNA, 19 nt, Artificial Sequence
  Description of Artificial Sequence: Synthetic oligonucleotide
uuagcaaccgaacaguucg

SEQ ID NO: 132158 - RNA, 19 nt, Artificial Sequence
  Description of Artificial Sequence: Synthetic oligonucleotide
ugaaauaugucagccaucg

SEQ ID NO: 132159 - RNA, 19 nt, Artificial Sequence
  Description of Artificial Sequence: Synthetic oligonucleotide
uguacauaggguaagcggc

SEQ ID NO: 132160 - RNA, 19 nt, Artificial Sequence
  Description of Artificial Sequence: Synthetic oligonucleotide
ucuaucuugcgaaggaugg

SEQ ID NO: 132161 - RNA, 19 nt, Artificial Sequence
  Description of Artificial Sequence: Synthetic oligonucleotide
aaaguaucgggagaagcgc

SEQ ID NO: 132162 - RNA, 19 nt, Artificial Sequence
  Description of Artificial Sequence: Synthetic oligonucleotide
augucguuaauugugaugg

SEQ ID NO: 132163 - RNA, 19 nt, Artificial Sequence
  Description of Artificial Sequence: Synthetic oligonucleotide
ucguuaauugugauggagg

SEQ ID NO: 132164 - RNA, 19 nt, Artificial Sequence
  Description of Artificial Sequence: Synthetic oligonucleotide
cuaccguuggacuugacgg

SEQ ID NO: 132165 - RNA, 19 nt, Artificial Sequence
  Description of Artificial Sequence: Synthetic oligonucleotide
caaaguaucgggagaagcg

SEQ ID NO: 132166 - RNA, 19 nt, Artificial Sequence
  Description of Artificial Sequence: Synthetic oligonucleotide
aaugucguuaauugugaug

SEQ ID NO: 132167 - RNA, 19 nt, Artificial Sequence
  Description of Artificial Sequence: Synthetic oligonucleotide
gaaucucgaacaaagacgc

SEQ ID NO: 132168 - RNA, 19 nt, Artificial Sequence
  Description of Artificial Sequence: Synthetic oligonucleotide
ugauuucuugccaaccagg

SEQ ID NO: 132169 - RNA, 19 nt, Artificial Sequence
  Description of Artificial Sequence: Synthetic oligonucleotide
uguacauagccccagcgga

SEQ ID NO: 132170 - RNA, 19 nt, Artificial Sequence
  Description of Artificial Sequence: Synthetic oligonucleotide
uccuugacgggauacauga

SEQ ID NO: 132171 - RNA, 19 nt, Artificial Sequence
  Description of Artificial Sequence: Synthetic oligonucleotide
uuccaaacgcaccuggaag

SEQ ID NO: 132172 - RNA, 19 nt, Artificial Sequence
  Description of Artificial Sequence: Synthetic oligonucleotide
auacguguggucuucccac

SEQ ID NO: 132173 - RNA, 19 nt, Artificial Sequence
  Description of Artificial Sequence: Synthetic oligonucleotide
aauaugucagccaucggcu

SEQ ID NO: 132174 - RNA, 19 nt, Artificial Sequence
  Description of Artificial Sequence: Synthetic oligonucleotide
aaggccaaauggucacugc

SEQ ID NO: 132175 - RNA, 19 nt, Artificial Sequence
  Description of Artificial Sequence: Synthetic oligonucleotide
ucgcgaaucaccuucuagc

SEQ ID NO: 132176 - RNA, 19 nt, Artificial Sequence
  Description of Artificial Sequence: Synthetic oligonucleotide
guagccucccuguuaaugg

SEQ ID NO: 132177 - RNA, 19 nt, Artificial Sequence
  Description of Artificial Sequence: Synthetic oligonucleotide
ucgaacaaagacgcuaccg

SEQ ID NO: 132178 - RNA, 19 nt, Artificial Sequence
  Description of Artificial Sequence: Synthetic oligonucleotide
aucaucacguauguggacg

SEQ ID NO: 132179 - RNA, 19 nt, Artificial Sequence
  Description of Artificial Sequence: Synthetic oligonucleotide
guuucuugcaagccaaggc

SEQ ID NO: 132180 - RNA, 19 nt, Artificial Sequence
  Description of Artificial Sequence: Synthetic oligonucleotide
uugacggccaugaaauaug

SEQ ID NO: 132181 - RNA, 19 nt, Artificial Sequence
  Description of Artificial Sequence: Synthetic oligonucleotide
aucauggggauauuggagu

SEQ ID NO: 132182 - RNA, 19 nt, Artificial Sequence
  Description of Artificial Sequence: Synthetic oligonucleotide
gauucggcgagguugugug

SEQ ID NO: 132183 - RNA, 19 nt, Artificial Sequence
  Description of Artificial Sequence: Synthetic oligonucleotide
aggaaagcuucauaaauau

SEQ ID NO: 132184 - RNA, 19 nt, Artificial Sequence
  Description of Artificial Sequence: Synthetic oligonucleotide
acgcacgaaggccaaaugg

SEQ ID NO: 132185 - RNA, 19 nt, Artificial Sequence
  Description of Artificial Sequence: Synthetic oligonucleotide
ucucgaacaaagacgcuac

SEQ ID NO: 132186 - RNA, 19 nt, Artificial Sequence
  Description of Artificial Sequence: Synthetic oligonucleotide
acgaaggccaaauggucac

SEQ ID NO: 132187 - RNA, 19 nt, Artificial Sequence
  Description of Artificial Sequence: Synthetic oligonucleotide
aacaaagacgcuaccguug

SEQ ID NO: 132188 - RNA, 19 nt, Artificial Sequence
  Description of Artificial Sequence: Synthetic oligonucleotide
uguagcacucaugagcacc

SEQ ID NO: 132189 - RNA, 19 nt, Artificial Sequence
  Description of Artificial Sequence: Synthetic oligonucleotide
caucauggggauauuggag

SEQ ID NO: 132190 - RNA, 19 nt, Artificial Sequence
  Description of Artificial Sequence: Synthetic oligonucleotide
aucacguauguggacgucc

SEQ ID NO: 132191 - RNA, 19 nt, Artificial Sequence
  Description of Artificial Sequence: Synthetic oligonucleotide
uucgcgaaucaccuucuag

SEQ ID NO: 132192 - RNA, 19 nt, Artificial Sequence
  Description of Artificial Sequence: Synthetic oligonucleotide
aauauggccuucugaucca

SEQ ID NO: 132193 - RNA, 19 nt, Artificial Sequence
  Description of Artificial Sequence: Synthetic oligonucleotide
uccaccauucggccuaggg

SEQ ID NO: 132194 - RNA, 19 nt, Artificial Sequence
  Description of Artificial Sequence: Synthetic oligonucleotide
aacaguucgcgaaucaccu

SEQ ID NO: 132195 - RNA, 19 nt, Artificial Sequence
  Description of Artificial Sequence: Synthetic oligonucleotide
gcucuagacacccacacag

SEQ ID NO: 132196 - RNA, 19 nt, Artificial Sequence
  Description of Artificial Sequence: Synthetic oligonucleotide
ugagauucggcgagguugu

SEQ ID NO: 132197 - RNA, 19 nt, Artificial Sequence
  Description of Artificial Sequence: Synthetic oligonucleotide
cugagauucggcgagguug

SEQ ID NO: 132198 - RNA, 19 nt, Artificial Sequence
  Description of Artificial Sequence: Synthetic oligonucleotide
gaacaguucgcgaaucacc

SEQ ID NO: 132199 - RNA, 19 nt, Artificial Sequence
  Description of Artificial Sequence: Synthetic oligonucleotide
cuguacauagccccagcgg

SEQ ID NO: 132200 - RNA, 19 nt, Artificial Sequence
  Description of Artificial Sequence: Synthetic oligonucleotide
uuugcucuagacacccaca

SEQ ID NO: 132201 - RNA, 19 nt, Artificial Sequence
  Description of Artificial Sequence: Synthetic oligonucleotide
ugacgggauacaugaagcc

SEQ ID NO: 132202 - RNA, 19 nt, Artificial Sequence
  Description of Artificial Sequence: Synthetic oligonucleotide
cucuaucuugcgaaggaug

SEQ ID NO: 132203 - RNA, 19 nt, Artificial Sequence
  Description of Artificial Sequence: Synthetic oligonucleotide
gguaggcaaacccugacug

SEQ ID NO: 132204 - RNA, 19 nt, Artificial Sequence
  Description of Artificial Sequence: Synthetic oligonucleotide
gaaauaugucagccaucgg

SEQ ID NO: 132205 - RNA, 19 nt, Artificial Sequence
  Description of Artificial Sequence: Synthetic oligonucleotide
cuggaugguacauggccgg

SEQ ID NO: 132206 - RNA, 19 nt, Artificial Sequence
  Description of Artificial Sequence: Synthetic oligonucleotide
uucgguccugccaacgcag

SEQ ID NO: 132207 - RNA, 19 nt, Artificial Sequence
  Description of Artificial Sequence: Synthetic oligonucleotide
cacauuccggcgcaaagag

SEQ ID NO: 132208 - RNA, 19 nt, Artificial Sequence
  Description of Artificial Sequence: Synthetic oligonucleotide
uagcguuccuccuugugca

SEQ ID NO: 132209 - RNA, 19 nt, Artificial Sequence
  Description of Artificial Sequence: Synthetic oligonucleotide
uaggcaaacccugacuggc

SEQ ID NO: 132210 - RNA, 19 nt, Artificial Sequence
  Description of Artificial Sequence: Synthetic oligonucleotide
uccaacaguagcugaggga

SEQ ID NO: 132211 - RNA, 19 nt, Artificial Sequence
  Description of Artificial Sequence: Synthetic oligonucleotide
acucaugagcaccagccga

SEQ ID NO: 132212 - RNA, 19 nt, Artificial Sequence
  Description of Artificial Sequence: Synthetic oligonucleotide
uccguaaccggguagccuc

SEQ ID NO: 132213 - RNA, 19 nt, Artificial Sequence
  Description of Artificial Sequence: Synthetic oligonucleotide
gaugggcucgggcaccugg

SEQ ID NO: 132214 - RNA, 19 nt, Artificial Sequence
  Description of Artificial Sequence: Synthetic oligonucleotide
ucaucagcugucuugcgua

SEQ ID NO: 132215 - RNA, 19 nt, Artificial Sequence
  Description of Artificial Sequence: Synthetic oligonucleotide
uuuggcaacaaaggucaug

SEQ ID NO: 132216 - RNA, 19 nt, Artificial Sequence
  Description of Artificial Sequence: Synthetic oligonucleotide
gucguuaauugugauggag

SEQ ID NO: 132217 - RNA, 19 nt, Artificial Sequence
  Description of Artificial Sequence: Synthetic oligonucleotide
caaagaggggcccaguuca

SEQ ID NO: 132218 - RNA, 19 nt, Artificial Sequence
  Description of Artificial Sequence: Synthetic oligonucleotide
ucgagagauggucccuccg

SEQ ID NO: 132219 - RNA, 19 nt, Artificial Sequence
  Description of Artificial Sequence: Synthetic oligonucleotide
uuccccacgggcaucgaug

SEQ ID NO: 132220 - RNA, 19 nt, Artificial Sequence
  Description of Artificial Sequence: Synthetic oligonucleotide
cuuagcaaccgaacaguuc

SEQ ID NO: 132221 - RNA, 19 nt, Artificial Sequence
  Description of Artificial Sequence: Synthetic oligonucleotide
cuugccuaagggcaagaug

SEQ ID NO: 132222 - RNA, 19 nt, Artificial Sequence
  Description of Artificial Sequence: Synthetic oligonucleotide
ucagacguaccuccuccgc

SEQ ID NO: 132223 - RNA, 19 nt, Artificial Sequence
  Description of Artificial Sequence: Synthetic oligonucleotide
acguauguggacguccccg

SEQ ID NO: 132224 - RNA, 19 nt, Artificial Sequence
  Description of Artificial Sequence: Synthetic oligonucleotide
ugcacacuaaguggaagug

SEQ ID NO: 132225 - RNA, 19 nt, Artificial Sequence
  Description of Artificial Sequence: Synthetic oligonucleotide
gaugaagcgcaagcugggg

SEQ ID NO: 132226 - RNA, 19 nt, Artificial Sequence
  Description of Artificial Sequence: Synthetic oligonucleotide
gcuaccguuggacuugacg

SEQ ID NO: 132227 - RNA, 19 nt, Artificial Sequence
  Description of Artificial Sequence: Synthetic oligonucleotide
guccccgucuguuaggagc

SEQ ID NO: 132228 - RNA, 19 nt, Artificial Sequence
  Description of Artificial Sequence: Synthetic oligonucleotide
uacacuacaagggcccuga

SEQ ID NO: 132229 - RNA, 19 nt, Artificial Sequence
  Description of Artificial Sequence: Synthetic oligonucleotide
uaccguuggacuugacggc

SEQ ID NO: 132230 - RNA, 19 nt, Artificial Sequence
  Description of Artificial Sequence: Synthetic oligonucleotide
acgacaugcacaaugucgu

SEQ ID NO: 132231 - RNA, 19 nt, Artificial Sequence
  Description of Artificial Sequence: Synthetic oligonucleotide
gauauuggagugcacuggu

SEQ ID NO: 132232 - RNA, 19 nt, Artificial Sequence
  Description of Artificial Sequence: Synthetic oligonucleotide
ugacggccaugaaauaugu

SEQ ID NO: 132233 - RNA, 19 nt, Artificial Sequence
  Description of Artificial Sequence: Synthetic oligonucleotide
gauggucccuccgaggggc

SEQ ID NO: 132234 - RNA, 19 nt, Artificial Sequence
  Description of Artificial Sequence: Synthetic oligonucleotide
ucaucacguauguggacgu

SEQ ID NO: 132235 - RNA, 19 nt, Artificial Sequence
  Description of Artificial Sequence: Synthetic oligonucleotide
gguaguguuccuugacggg

SEQ ID NO: 132236 - RNA, 19 nt, Artificial Sequence
  Description of Artificial Sequence: Synthetic oligonucleotide
guggggaaguuuugcauug

SEQ ID NO: 132237 - RNA, 19 nt, Artificial Sequence
  Description of Artificial Sequence: Synthetic oligonucleotide
ucggcgcccaucaucacgu

SEQ ID NO: 132238 - RNA, 19 nt, Artificial Sequence
  Description of Artificial Sequence: Synthetic oligonucleotide
uucucgagaggugugcgca

SEQ ID NO: 132239 - RNA, 19 nt, Artificial Sequence
  Description of Artificial Sequence: Synthetic oligonucleotide
uguugccagauuugguccu

SEQ ID NO: 132240 - RNA, 19 nt, Artificial Sequence
  Description of Artificial Sequence: Synthetic oligonucleotide
uccuguaagugacacuguu

SEQ ID NO: 132241 - RNA, 19 nt, Artificial Sequence
  Description of Artificial Sequence: Synthetic oligonucleotide
caguucgcgaaucaccuuc

SEQ ID NO: 132242 - RNA, 19 nt, Artificial Sequence
  Description of Artificial Sequence: Synthetic oligonucleotide
cuuugcggcgcccuuuggc

SEQ ID NO: 132243 - RNA, 19 nt, Artificial Sequence
  Description of Artificial Sequence: Synthetic oligonucleotide
uaaccggguagccucccug

SEQ ID NO: 132244 - RNA, 19 nt, Artificial Sequence
  Description of Artificial Sequence: Synthetic oligonucleotide
uccccgucuguuaggagca

SEQ ID NO: 132245 - RNA, 19 nt, Artificial Sequence
  Description of Artificial Sequence: Synthetic oligonucleotide
ugagcccguggaugaagcg

SEQ ID NO: 132246 - RNA, 19 nt, Artificial Sequence
  Description of Artificial Sequence: Synthetic oligonucleotide
ggauauuggagugcacugg

SEQ ID NO: 132247 - RNA, 19 nt, Artificial Sequence
  Description of Artificial Sequence: Synthetic oligonucleotide
uuaccuugccucaccugga

SEQ ID NO: 132248 - RNA, 19 nt, Artificial Sequence
  Description of Artificial Sequence: Synthetic oligonucleotide
ugcucuagacacccacaca

SEQ ID NO: 132249 - RNA, 19 nt, Artificial Sequence
  Description of Artificial Sequence: Synthetic oligonucleotide
aaccgaacaguucgcgaau

SEQ ID NO: 132250 - RNA, 19 nt, Artificial Sequence
  Description of Artificial Sequence: Synthetic oligonucleotide
uucggccuagggcucgccg

SEQ ID NO: 132251 - RNA, 19 nt, Artificial Sequence
  Description of Artificial Sequence: Synthetic oligonucleotide
gcaccuggaugguacaugg

SEQ ID NO: 132252 - RNA, 19 nt, Artificial Sequence
  Description of Artificial Sequence: Synthetic oligonucleotide
cacaucccgcucauggacc

SEQ ID NO: 132253 - RNA, 19 nt, Artificial Sequence
  Description of Artificial Sequence: Synthetic oligonucleotide
augaaauaugucagccauc

SEQ ID NO: 132254 - RNA, 19 nt, Artificial Sequence
  Description of Artificial Sequence: Synthetic oligonucleotide
aaccggguagccucccugu

SEQ ID NO: 132255 - RNA, 19 nt, Artificial Sequence
  Description of Artificial Sequence: Synthetic oligonucleotide
agauggucccuccgagggg

SEQ ID NO: 132256 - RNA, 19 nt, Artificial Sequence
  Description of Artificial Sequence: Synthetic oligonucleotide
aaguaucgggagaagcgcu

SEQ ID NO: 132257 - RNA, 19 nt, Artificial Sequence
  Description of Artificial Sequence: Synthetic oligonucleotide
aucuuccgcaccccaagug

SEQ ID NO: 132258 - RNA, 19 nt, Artificial Sequence
  Description of Artificial Sequence: Synthetic oligonucleotide
ugcccgguucugcaaacug

SEQ ID NO: 132259 - RNA, 19 nt, Artificial Sequence
  Description of Artificial Sequence: Synthetic oligonucleotide
agcaaccgaacaguucgcg

SEQ ID NO: 132260 - RNA, 19 nt, Artificial Sequence
  Description of Artificial Sequence: Synthetic oligonucleotide
cuguuaggagcaacacagc

SEQ ID NO: 132261 - RNA, 19 nt, Artificial Sequence
  Description of Artificial Sequence: Synthetic oligonucleotide
gggauauuggagugcacug

SEQ ID NO: 132262 - RNA, 19 nt, Artificial Sequence
  Description of Artificial Sequence: Synthetic oligonucleotide
cuggguccgaucuuuucug

SEQ ID NO: 132263 - RNA, 19 nt, Artificial Sequence
  Description of Artificial Sequence: Synthetic oligonucleotide
uguuccuugacgggauaca

SEQ ID NO: 132264 - RNA, 19 nt, Artificial Sequence
  Description of Artificial Sequence: Synthetic oligonucleotide
uccggcgcaaagaggggcc

SEQ ID NO: 132265 - RNA, 19 nt, Artificial Sequence
  Description of Artificial Sequence: Synthetic oligonucleotide
gacgggauacaugaagcca

SEQ ID NO: 132266 - RNA, 19 nt, Artificial Sequence
  Description of Artificial Sequence: Synthetic oligonucleotide
aucucgaacaaagacgcua

SEQ ID NO: 132267 - RNA, 19 nt, Artificial Sequence
  Description of Artificial Sequence: Synthetic oligonucleotide
aguaucgggagaagcgcuc

SEQ ID NO: 132268 - RNA, 19 nt, Artificial Sequence
  Description of Artificial Sequence: Synthetic oligonucleotide
gacgcuaccguuggacuug

SEQ ID NO: 132269 - RNA, 19 nt, Artificial Sequence
  Description of Artificial Sequence: Synthetic oligonucleotide
agguuguacauaggguaag

SEQ ID NO: 132270 - RNA, 19 nt, Artificial Sequence
  Description of Artificial Sequence: Synthetic oligonucleotide
ugucguuaauugugaugga

SEQ ID NO: 132271 - RNA, 19 nt, Artificial Sequence
  Description of Artificial Sequence: Synthetic oligonucleotide
uuccgcaccccaaguggag

SEQ ID NO: 132272 - RNA, 19 nt, Artificial Sequence
  Description of Artificial Sequence: Synthetic oligonucleotide
acauaggguaagcggcuca

SEQ ID NO: 132273 - RNA, 19 nt, Artificial Sequence
  Description of Artificial Sequence: Synthetic oligonucleotide
uagcaaccgaacaguucgc

SEQ ID NO: 132274 - RNA, 19 nt, Artificial Sequence
  Description of Artificial Sequence: Synthetic oligonucleotide
ucucgagaggugugcgcag

SEQ ID NO: 132275 - RNA, 19 nt, Artificial Sequence
  Description of Artificial Sequence: Synthetic oligonucleotide
auugcagcgggcaccucgg

SEQ ID NO: 132276 - RNA, 19 nt, Artificial Sequence
  Description of Artificial Sequence: Synthetic oligonucleotide
auggggauauuggagugca

SEQ ID NO: 132277 - RNA, 19 nt, Artificial Sequence
  Description of Artificial Sequence: Synthetic oligonucleotide
caaccgaacaguucgcgaa

SEQ ID NO: 132278 - RNA, 19 nt, Artificial Sequence
  Description of Artificial Sequence: Synthetic oligonucleotide
ggagaagcgcucauuauca

SEQ ID NO: 132279 - RNA, 19 nt, Artificial Sequence
  Description of Artificial Sequence: Synthetic oligonucleotide
uagugucccgaugaggguc

SEQ ID NO: 132280 - RNA, 19 nt, Artificial Sequence
  Description of Artificial Sequence: Synthetic oligonucleotide
guucucgagaggugugcgc

SEQ ID NO: 132281 - RNA, 19 nt, Artificial Sequence
  Description of Artificial Sequence: Synthetic oligonucleotide
caccauucggccuagggcu

SEQ ID NO: 132282 - RNA, 19 nt, Artificial Sequence
  Description of Artificial Sequence: Synthetic oligonucleotide
gcgaaucaccuucuagccg

SEQ ID NO: 132283 - RNA, 19 nt, Artificial Sequence
  Description of Artificial Sequence: Synthetic oligonucleotide
cucgagagauggucccucc

SEQ ID NO: 132284 - RNA, 19 nt, Artificial Sequence
  Description of Artificial Sequence: Synthetic oligonucleotide
agggauacguguggucuuc

SEQ ID NO: 132285 - RNA, 19 nt, Artificial Sequence
  Description of Artificial Sequence: Synthetic oligonucleotide
cuugaacuuccccugccga

SEQ ID NO: 132286 - RNA, 19 nt, Artificial Sequence
  Description of Artificial Sequence: Synthetic oligonucleotide
uagccucccuguuaauggu

SEQ ID NO: 132287 - RNA, 19 nt, Artificial Sequence
  Description of Artificial Sequence: Synthetic oligonucleotide
agcuuugcggcgcccuuug

SEQ ID NO: 132288 - RNA, 19 nt, Artificial Sequence
  Description of Artificial Sequence: Synthetic oligonucleotide
accgaacaguucgcgaauc

SEQ ID NO: 132289 - RNA, 19 nt, Artificial Sequence
  Description of Artificial Sequence: Synthetic oligonucleotide
uggguccgaucuuuucuga

SEQ ID NO: 132290 - RNA, 19 nt, Artificial Sequence
  Description of Artificial Sequence: Synthetic oligonucleotide
uuccggcgcaaagaggggc

SEQ ID NO: 132291 - RNA, 19 nt, Artificial Sequence
  Description of Artificial Sequence: Synthetic oligonucleotide
ggcaaacccugacuggcag

SEQ ID NO: 132292 - RNA, 19 nt, Artificial Sequence
  Description of Artificial Sequence: Synthetic oligonucleotide
uugccucaccuggaugagg

SEQ ID NO: 132293 - RNA, 19 nt, Artificial Sequence
  Description of Artificial Sequence: Synthetic oligonucleotide
caagugguaggcaaacccu

SEQ ID NO: 132294 - RNA, 19 nt, Artificial Sequence
  Description of Artificial Sequence: Synthetic oligonucleotide
agacguaccuccuccgcuu

SEQ ID NO: 132295 - RNA, 19 nt, Artificial Sequence
  Description of Artificial Sequence: Synthetic oligonucleotide
agcggcucauuguuccugu

SEQ ID NO: 132296 - RNA, 19 nt, Artificial Sequence
  Description of Artificial Sequence: Synthetic oligonucleotide
gggucgguagagauguggg

SEQ ID NO: 132297 - RNA, 19 nt, Artificial Sequence
  Description of Artificial Sequence: Synthetic oligonucleotide
gguagccucccuguuaaug

SEQ ID NO: 132298 - RNA, 19 nt, Artificial Sequence
  Description of Artificial Sequence: Synthetic oligonucleotide
caccuuaccuugccucacc

SEQ ID NO: 132299 - RNA, 19 nt, Artificial Sequence
  Description of Artificial Sequence: Synthetic oligonucleotide
aacaaaggucauggcucga

SEQ ID NO: 132300 - RNA, 19 nt, Artificial Sequence
  Description of Artificial Sequence: Synthetic oligonucleotide
gugccgaugccgguguggg

SEQ ID NO: 132301 - RNA, 19 nt, Artificial Sequence
  Description of Artificial Sequence: Synthetic oligonucleotide
cagccaucggcuccguaac

SEQ ID NO: 132302 - RNA, 19 nt, Artificial Sequence
  Description of Artificial Sequence: Synthetic oligonucleotide
uacauaggguaagcggcuc

SEQ ID NO: 132303 - RNA, 19 nt, Artificial Sequence
  Description of Artificial Sequence: Synthetic oligonucleotide
guucgguccugccaacgca

SEQ ID NO: 132304 - RNA, 19 nt, Artificial Sequence
  Description of Artificial Sequence: Synthetic oligonucleotide
cacagcuagugggugcacc

SEQ ID NO: 132305 - RNA, 19 nt, Artificial Sequence
  Description of Artificial Sequence: Synthetic oligonucleotide
cagguucucgagaggugug

SEQ ID NO: 132306 - RNA, 19 nt, Artificial Sequence
  Description of Artificial Sequence: Synthetic oligonucleotide
gagacguugcugcacuccu

SEQ ID NO: 132307 - RNA, 19 nt, Artificial Sequence
  Description of Artificial Sequence: Synthetic oligonucleotide
caccuguagcacucaugag

SEQ ID NO: 132308 - RNA, 19 nt, Artificial Sequence
  Description of Artificial Sequence: Synthetic oligonucleotide
gguucgguccugccaacgc

SEQ ID NO: 132309 - RNA, 19 nt, Artificial Sequence
  Description of Artificial Sequence: Synthetic oligonucleotide
ggggucgguagagaugugg

SEQ ID NO: 132310 - RNA, 19 nt, Artificial Sequence
  Description of Artificial Sequence: Synthetic oligonucleotide
ucauagcguuccuccuugu

SEQ ID NO: 132311 - RNA, 19 nt, Artificial Sequence
  Description of Artificial Sequence: Synthetic oligonucleotide
agguucgguccugccaacg

SEQ ID NO: 132312 - RNA, 19 nt, Artificial Sequence
  Description of Artificial Sequence: Synthetic oligonucleotide
cgcgaaucaccuucuagcc

SEQ ID NO: 132313 - RNA, 19 nt, Artificial Sequence
  Description of Artificial Sequence: Synthetic oligonucleotide
cacguauguggacgucccc

SEQ ID NO: 132314 - RNA, 19 nt, Artificial Sequence
  Description of Artificial Sequence: Synthetic oligonucleotide
cuggguugagccgcugaag

SEQ ID NO: 132315 - RNA, 19 nt, Artificial Sequence
  Description of Artificial Sequence: Synthetic oligonucleotide
ucggcgagguugugugaug

SEQ ID NO: 132316 - RNA, 19 nt, Artificial Sequence
  Description of Artificial Sequence: Synthetic oligonucleotide
ggauacguguggucuuccc

SEQ ID NO: 132317 - RNA, 19 nt, Artificial Sequence
  Description of Artificial Sequence: Synthetic oligonucleotide
cacuucggaggcuccguuc

SEQ ID NO: 132318 - RNA, 19 nt, Artificial Sequence
  Description of Artificial Sequence: Synthetic oligonucleotide
acucacgcaaggaggccag

SEQ ID NO: 132319 - RNA, 19 nt, Artificial Sequence
  Description of Artificial Sequence: Synthetic oligonucleotide
uggacguccccgucuguua

SEQ ID NO: 132320 - RNA, 19 nt, Artificial Sequence
  Description of Artificial Sequence: Synthetic oligonucleotide
gcacacuaaguggaagugc

SEQ ID NO: 132321 - RNA, 19 nt, Artificial Sequence
  Description of Artificial Sequence: Synthetic oligonucleotide
uggggauauuggagugcac

SEQ ID NO: 132322 - RNA, 19 nt, Artificial Sequence
  Description of Artificial Sequence: Synthetic oligonucleotide
ucacuucggaggcuccguu

SEQ ID NO: 132323 - RNA, 19 nt, Artificial Sequence
  Description of Artificial Sequence: Synthetic oligonucleotide
auuccggcgcaaagagggg

SEQ ID NO: 132324 - RNA, 19 nt, Artificial Sequence
  Description of Artificial Sequence: Synthetic oligonucleotide
ccguggaugaagcgcaagc

SEQ ID NO: 132325 - RNA, 19 nt, Artificial Sequence
  Description of Artificial Sequence: Synthetic oligonucleotide
guugccagauuugguccug

SEQ ID NO: 132326 - RNA, 19 nt, Artificial Sequence
  Description of Artificial Sequence: Synthetic oligonucleotide
ggcuccguuccaccauucg

SEQ ID NO: 132327 - RNA, 19 nt, Artificial Sequence
  Description of Artificial Sequence: Synthetic oligonucleotide
aguucgcgaaucaccuucu

SEQ ID NO: 132328 - RNA, 19 nt, Artificial Sequence
  Description of Artificial Sequence: Synthetic oligonucleotide
ugcggcgcccuuuggcaac

SEQ ID NO: 132329 - RNA, 19 nt, Artificial Sequence
  Description of Artificial Sequence: Synthetic oligonucleotide
acuugacggccaugaaaua

SEQ ID NO: 132330 - RNA, 19 nt, Artificial Sequence
  Description of Artificial Sequence: Synthetic oligonucleotide
guacacuacaagggcccug

SEQ ID NO: 132331 - RNA, 19 nt, Artificial Sequence
  Description of Artificial Sequence: Synthetic oligonucleotide
cacugccuugauauuugga

SEQ ID NO: 132332 - RNA, 19 nt, Artificial Sequence
  Description of Artificial Sequence: Synthetic oligonucleotide
guacugguguuugccuagc

SEQ ID NO: 132333 - RNA, 19 nt, Artificial Sequence
  Description of Artificial Sequence: Synthetic oligonucleotide
cuauggccuuggccagucg

SEQ ID NO: 132334 - RNA, 19 nt, Artificial Sequence
  Description of Artificial Sequence: Synthetic oligonucleotide
ugccgguguggguacuggu

SEQ ID NO: 132335 - RNA, 19 nt, Artificial Sequence
  Description of Artificial Sequence: Synthetic oligonucleotide
gcauugacgcugccugugc

SEQ ID NO: 132336 - RNA, 19 nt, Artificial Sequence
  Description of Artificial Sequence: Synthetic oligonucleotide
uugcugcacuccuuugauu

SEQ ID NO: 132337 - RNA, 19 nt, Artificial Sequence
  Description of Artificial Sequence: Synthetic oligonucleotide
ccgaucuuuucugaaugag

SEQ ID NO: 132338 - RNA, 19 nt, Artificial Sequence
  Description of Artificial Sequence: Synthetic oligonucleotide
acaguucgcgaaucaccuu

SEQ ID NO: 132339 - RNA, 19 nt, Artificial Sequence
  Description of Artificial Sequence: Synthetic oligonucleotide
guaucgggagaagcgcuca

SEQ ID NO: 132340 - RNA, 19 nt, Artificial Sequence
  Description of Artificial Sequence: Synthetic oligonucleotide
cuugacggccaugaaauau

SEQ ID NO: 132341 - RNA, 19 nt, Artificial Sequence
  Description of Artificial Sequence: Synthetic oligonucleotide
gauuggcccucgccuccgc

SEQ ID NO: 132342 - RNA, 19 nt, Artificial Sequence
  Description of Artificial Sequence: Synthetic oligonucleotide
gcgcccaucaucacguaug

SEQ ID NO: 132343 - RNA, 19 nt, Artificial Sequence
  Description of Artificial Sequence: Synthetic oligonucleotide
ggcuccguaaccggguagc

SEQ ID NO: 132344 - RNA, 19 nt, Artificial Sequence
  Description of Artificial Sequence: Synthetic oligonucleotide
gcaaccgaacaguucgcga

SEQ ID NO: 132345 - RNA, 19 nt, Artificial Sequence
  Description of Artificial Sequence: Synthetic oligonucleotide
guacauagccccagcggaa

SEQ ID NO: 132346 - RNA, 19 nt, Artificial Sequence
  Description of Artificial Sequence: Synthetic oligonucleotide
agcucccuuagcaaccgaa

SEQ ID NO: 132347 - RNA, 19 nt, Artificial Sequence
  Description of Artificial Sequence: Synthetic oligonucleotide
ccgccaacagugcaagcag

SEQ ID NO: 132348 - RNA, 19 nt, Artificial Sequence
  Description of Artificial Sequence: Synthetic oligonucleotide
cccggguaaggcaggaaac

SEQ ID NO: 132349 - RNA, 19 nt, Artificial Sequence
  Description of Artificial Sequence: Synthetic oligonucleotide
ccagguaguguuccuugac

SEQ ID NO: 132350 - RNA, 19 nt, Artificial Sequence
  Description of Artificial Sequence: Synthetic oligonucleotide
gagaugugggcuaggcgcu

SEQ ID NO: 132351 - RNA, 19 nt, Artificial Sequence
  Description of Artificial Sequence: Synthetic oligonucleotide
cacugugcggagggcagug

SEQ ID NO: 132352 - RNA, 19 nt, Artificial Sequence
  Description of Artificial Sequence: Synthetic oligonucleotide
gacggccaugaaauauguc

SEQ ID NO: 132353 - RNA, 19 nt, Artificial Sequence
  Description of Artificial Sequence: Synthetic oligonucleotide
cauuugcucuagacaccca

SEQ ID NO: 132354 - RNA, 19 nt, Artificial Sequence
  Description of Artificial Sequence: Synthetic oligonucleotide
agaugugggcuaggcgcug

SEQ ID NO: 132355 - RNA, 19 nt, Artificial Sequence
  Description of Artificial Sequence: Synthetic oligonucleotide
ggggauauuggagugcacu

SEQ ID NO: 132356 - RNA, 19 nt, Artificial Sequence
  Description of Artificial Sequence: Synthetic oligonucleotide
ggaagucgggguggggaag

SEQ ID NO: 132357 - RNA, 19 nt, Artificial Sequence
  Description of Artificial Sequence: Synthetic oligonucleotide
gcucacuucggaggcuccg

SEQ ID NO: 132358 - RNA, 19 nt, Artificial Sequence
  Description of Artificial Sequence: Synthetic oligonucleotide
gcacgaaggccaaaugguc

SEQ ID NO: 132359 - RNA, 19 nt, Artificial Sequence
  Description of Artificial Sequence: Synthetic oligonucleotide
caucacguauguggacguc

SEQ ID NO: 132360 - RNA, 19 nt, Artificial Sequence
  Description of Artificial Sequence: Synthetic oligonucleotide
caucgaugugcagaaccaa

SEQ ID NO: 132361 - RNA, 19 nt, Artificial Sequence
  Description of Artificial Sequence: Synthetic oligonucleotide
uggugccgaugccggugug

SEQ ID NO: 132362 - RNA, 19 nt, Artificial Sequence
  Description of Artificial Sequence: Synthetic oligonucleotide
cucacgcaaggaggccagg

SEQ ID NO: 132363 - RNA, 19 nt, Artificial Sequence
  Description of Artificial Sequence: Synthetic oligonucleotide
cagccggaguucuggagaa

SEQ ID NO: 132364 - RNA, 19 nt, Artificial Sequence
  Description of Artificial Sequence: Synthetic oligonucleotide
cagcuagugggugcaccug

SEQ ID NO: 132365 - RNA, 19 nt, Artificial Sequence
  Description of Artificial Sequence: Synthetic oligonucleotide
caaugucguuaauugugau

SEQ ID NO: 132366 - RNA, 19 nt, Artificial Sequence
  Description of Artificial Sequence: Synthetic oligonucleotide
gagauucggcgagguugug

SEQ ID NO: 132367 - RNA, 19 nt, Artificial Sequence
  Description of Artificial Sequence: Synthetic oligonucleotide
gagggauacguguggucuu

SEQ ID NO: 132368 - RNA, 19 nt, Artificial Sequence
  Description of Artificial Sequence: Synthetic oligonucleotide
ggguacugguguuugccua

SEQ ID NO: 132369 - RNA, 19 nt, Artificial Sequence
  Description of Artificial Sequence: Synthetic oligonucleotide
ccgagucaccuuaccuugc

SEQ ID NO: 132370 - RNA, 19 nt, Artificial Sequence
  Description of Artificial Sequence: Synthetic oligonucleotide
ccucgggaacaagugguag

SEQ ID NO: 132371 - RNA, 19 nt, Artificial Sequence
  Description of Artificial Sequence: Synthetic oligonucleotide
cuagggcucgccgcagcuc

SEQ ID NO: 132372 - RNA, 19 nt, Artificial Sequence
  Description of Artificial Sequence: Synthetic oligonucleotide
gggucucacccaacucacg

SEQ ID NO: 132373 - RNA, 19 nt, Artificial Sequence
  Description of Artificial Sequence: Synthetic oligonucleotide
gccgguguggguacuggug

SEQ ID NO: 132374 - RNA, 19 nt, Artificial Sequence
  Description of Artificial Sequence: Synthetic oligonucleotide
aggcuccguuccaccauuc

SEQ ID NO: 132375 - RNA, 19 nt, Artificial Sequence
  Description of Artificial Sequence: Synthetic oligonucleotide
cgaacaguucgcgaaucac

SEQ ID NO: 132376 - RNA, 19 nt, Artificial Sequence
  Description of Artificial Sequence: Synthetic oligonucleotide
cugccgagucaccuuaccu

SEQ ID NO: 132377 - RNA, 19 nt, Artificial Sequence
  Description of Artificial Sequence: Synthetic oligonucleotide
cccguguccccagagauga

SEQ ID NO: 132378 - RNA, 19 nt, Artificial Sequence
  Description of Artificial Sequence: Synthetic oligonucleotide
gcacugguaagaugaggua

SEQ ID NO: 132379 - RNA, 19 nt, Artificial Sequence
  Description of Artificial Sequence: Synthetic oligonucleotide
gcuuugcggcgcccuuugg

SEQ ID NO: 132380 - RNA, 19 nt, Artificial Sequence
  Description of Artificial Sequence: Synthetic oligonucleotide
ccggaguucuggagaaauc

SEQ ID NO: 132381 - RNA, 19 nt, Artificial Sequence
  Description of Artificial Sequence: Synthetic oligonucleotide
gggauacguguggucuucc

SEQ ID NO: 132382 - RNA, 19 nt, Artificial Sequence
  Description of Artificial Sequence: Synthetic oligonucleotide
ugucuacgacaugcacaau

SEQ ID NO: 132383 - RNA, 19 nt, Artificial Sequence
  Description of Artificial Sequence: Synthetic oligonucleotide
agucgggguggggaaguuu

SEQ ID NO: 132384 - RNA, 19 nt, Artificial Sequence
  Description of Artificial Sequence: Synthetic oligonucleotide
acgcuaccguuggacuuga

SEQ ID NO: 132385 - RNA, 19 nt, Artificial Sequence
  Description of Artificial Sequence: Synthetic oligonucleotide
guaaccggguagccucccu

SEQ ID NO: 132386 - RNA, 19 nt, Artificial Sequence
  Description of Artificial Sequence: Synthetic oligonucleotide
cacaggaucccaccugguu

SEQ ID NO: 132387 - RNA, 19 nt, Artificial Sequence
  Description of Artificial Sequence: Synthetic oligonucleotide
ccgaacaguucgcgaauca

SEQ ID NO: 132388 - RNA, 19 nt, Artificial Sequence
  Description of Artificial Sequence: Synthetic oligonucleotide
cuuuggcaacaaaggucau

SEQ ID NO: 132389 - RNA, 19 nt, Artificial Sequence
  Description of Artificial Sequence: Synthetic oligonucleotide
cguuccaccauucggccua

SEQ ID NO: 132390 - RNA, 19 nt, Artificial Sequence
  Description of Artificial Sequence: Synthetic oligonucleotide
agcacgcacgaaggccaaa

SEQ ID NO: 132391 - RNA, 19 nt, Artificial Sequence
  Description of Artificial Sequence: Synthetic oligonucleotide
gcucuggcucagacguacc

SEQ ID NO: 132392 - RNA, 19 nt, Artificial Sequence
  Description of Artificial Sequence: Synthetic oligonucleotide
cagcacgcacgaaggccaa

SEQ ID NO: 132393 - RNA, 19 nt, Artificial Sequence
  Description of Artificial Sequence: Synthetic oligonucleotide
cccuuagcaaccgaacagu

SEQ ID NO: 132394 - RNA, 19 nt, Artificial Sequence
  Description of Artificial Sequence: Synthetic oligonucleotide
cacagcccguguccccaga

SEQ ID NO: 132395 - RNA, 19 nt, Artificial Sequence
  Description of Artificial Sequence: Synthetic oligonucleotide
guggacguccccgucuguu

SEQ ID NO: 132396 - RNA, 19 nt, Artificial Sequence
  Description of Artificial Sequence: Synthetic oligonucleotide
cagcucccuuagcaaccga

SEQ ID NO: 132397 - RNA, 19 nt, Artificial Sequence
  Description of Artificial Sequence: Synthetic oligonucleotide
ccgguguggguacuggugu

SEQ ID NO: 132398 - RNA, 19 nt, Artificial Sequence
  Description of Artificial Sequence: Synthetic oligonucleotide
gcggcucauuguuccuguc

SEQ ID NO: 132399 - RNA, 19 nt, Artificial Sequence
  Description of Artificial Sequence: Synthetic oligonucleotide
ccuuagcaaccgaacaguu

SEQ ID NO: 132400 - RNA, 19 nt, Artificial Sequence
  Description of Artificial Sequence: Synthetic oligonucleotide
ccuugacgggauacaugaa

SEQ ID NO: 132401 - RNA, 19 nt, Artificial Sequence
  Description of Artificial Sequence: Synthetic oligonucleotide
gccuugauauuuggacugu

SEQ ID NO: 132402 - RNA, 19 nt, Artificial Sequence
  Description of Artificial Sequence: Synthetic oligonucleotide
ccggcgcaaagaggggccc

SEQ ID NO: 132403 - RNA, 19 nt, Artificial Sequence
  Description of Artificial Sequence: Synthetic oligonucleotide
ggggcguacagaagguuuu

SEQ ID NO: 132404 - RNA, 19 nt, Artificial Sequence
  Description of Artificial Sequence: Synthetic oligonucleotide
cguaaccggguagccuccc

SEQ ID NO: 132405 - RNA, 19 nt, Artificial Sequence
  Description of Artificial Sequence: Synthetic oligonucleotide
ggccgcugucuacgacaug

SEQ ID NO: 132406 - RNA, 19 nt, Artificial Sequence
  Description of Artificial Sequence: Synthetic oligonucleotide
ggcgcccaucaucacguau

SEQ ID NO: 132407 - RNA, 19 nt, Artificial Sequence
  Description of Artificial Sequence: Synthetic oligonucleotide
gucccggguaaggcaggaa

SEQ ID NO: 132408 - RNA, 19 nt, Artificial Sequence
  Description of Artificial Sequence: Synthetic oligonucleotide
gcacgcacgaaggccaaau

SEQ ID NO: 132409 - RNA, 19 nt, Artificial Sequence
  Description of Artificial Sequence: Synthetic oligonucleotide
ggcgagguugugugaugau

SEQ ID NO: 132410 - RNA, 19 nt, Artificial Sequence
  Description of Artificial Sequence: Synthetic oligonucleotide
cguccccgucuguuaggag

SEQ ID NO: 132411 - RNA, 19 nt, Artificial Sequence
  Description of Artificial Sequence: Synthetic oligonucleotide
ccggcgcuggaucacauuu

SEQ ID NO: 132412 - RNA, 19 nt, Artificial Sequence
  Description of Artificial Sequence: Synthetic oligonucleotide
cggcuccguaaccggguag

SEQ ID NO: 132413 - RNA, 19 nt, Artificial Sequence
  Description of Artificial Sequence: Synthetic oligonucleotide
ccggguagccucccuguua

SEQ ID NO: 132414 - RNA, 19 nt, Artificial Sequence
  Description of Artificial Sequence: Synthetic oligonucleotide
cugcccgguucugcaaacu

SEQ ID NO: 132415 - RNA, 19 nt, Artificial Sequence
  Description of Artificial Sequence: Synthetic oligonucleotide
ccauuuucuccagccggcu

SEQ ID NO: 132416 - RNA, 19 nt, Artificial Sequence
  Description of Artificial Sequence: Synthetic oligonucleotide
cggcgagguugugugauga

SEQ ID NO: 132417 - RNA, 19 nt, Artificial Sequence
  Description of Artificial Sequence: Synthetic oligonucleotide
gcccacauuccggcgcaaa

SEQ ID NO: 132418 - RNA, 19 nt, Artificial Sequence
  Description of Artificial Sequence: Synthetic oligonucleotide
gcggcgcccuuuggcaaca

SEQ ID NO: 132419 - RNA, 19 nt, Artificial Sequence
  Description of Artificial Sequence: Synthetic oligonucleotide
gcgcuggaucacauuugcu

SEQ ID NO: 132420 - RNA, 19 nt, Artificial Sequence
  Description of Artificial Sequence: Synthetic oligonucleotide
cgcuaccguuggacuugac

SEQ ID NO: 132421 - RNA, 19 nt, Artificial Sequence
  Description of Artificial Sequence: Synthetic oligonucleotide
ccgcuucugacaggggcau

SEQ ID NO: 132422 - RNA, 19 nt, Artificial Sequence
  Description of Artificial Sequence: Synthetic oligonucleotide
ccccgucuguuaggagcaa

SEQ ID NO: 132423 - RNA, 19 nt, Artificial Sequence
  Description of Artificial Sequence: Synthetic oligonucleotide
cccggcgcuggaucacauu

SEQ ID NO: 132424 - RNA, 19 nt, Artificial Sequence
  Description of Artificial Sequence: Synthetic oligonucleotide
ccccggcgcuggaucacau

SEQ ID NO: 132425 - RNA, 19 nt, Artificial Sequence
  Description of Artificial Sequence: Synthetic oligonucleotide
aauaauaaagaguuuugcc

SEQ ID NO: 132426 - RNA, 19 nt, Artificial Sequence
  Description of Artificial Sequence: Synthetic oligonucleotide
aaagcgauaugccaugugg

SEQ ID NO: 132427 - RNA, 19 nt, Artificial Sequence
  Description of Artificial Sequence: Synthetic oligonucleotide
aauaguuuucaucguugcc

SEQ ID NO: 132428 - RNA, 19 nt, Artificial Sequence
  Description of Artificial Sequence: Synthetic oligonucleotide
uaaaagacccuaaacaucu

SEQ ID NO: 132429 - RNA, 19 nt, Artificial Sequence
  Description of Artificial Sequence: Synthetic oligonucleotide
aaaaggacaaacuccccgg

SEQ ID NO: 132430 - RNA, 19 nt, Artificial Sequence
  Description of Artificial Sequence: Synthetic oligonucleotide
uauagauauagauaacuca

SEQ ID NO: 132431 - RNA, 19 nt, Artificial Sequence
  Description of Artificial Sequence: Synthetic oligonucleotide
guuagagucauaaacagag

SEQ ID NO: 132432 - RNA, 19 nt, Artificial Sequence
  Description of Artificial Sequence: Synthetic oligonucleotide
gaaaaggacaaacuccccg

SEQ ID NO: 132433 - RNA, 19 nt, Artificial Sequence
  Description of Artificial Sequence: Synthetic oligonucleotide
uauucagcgaacauaagaa

SEQ ID NO: 132434 - RNA, 19 nt, Artificial Sequence
  Description of Artificial Sequence: Synthetic oligonucleotide
aaacagugccacuuauccc

SEQ ID NO: 132435 - RNA, 19 nt, Artificial Sequence
  Description of Artificial Sequence: Synthetic oligonucleotide
aauaucucuagguaaccga

SEQ ID NO: 132436 - RNA, 19 nt, Artificial Sequence
  Description of Artificial Sequence: Synthetic oligonucleotide
auggcugacaugccgaugc

SEQ ID NO: 132437 - RNA, 19 nt, Artificial Sequence
  Description of Artificial Sequence: Synthetic oligonucleotide
uaagacugaucauaggacc

SEQ ID NO: 132438 - RNA, 19 nt, Artificial Sequence
  Description of Artificial Sequence: Synthetic oligonucleotide
uguggaaucuaucuccaag

SEQ ID NO: 132439 - RNA, 19 nt, Artificial Sequence
  Description of Artificial Sequence: Synthetic oligonucleotide
aaccgacaaaccaaaaccc

SEQ ID NO: 132440 - RNA, 19 nt, Artificial Sequence
  Description of Artificial Sequence: Synthetic oligonucleotide
uucuacaauauucagcgaa

SEQ ID NO: 132441 - RNA, 19 nt, Artificial Sequence
  Description of Artificial Sequence: Synthetic oligonucleotide
auauucagcgaacauaaga

SEQ ID NO: 132442 - RNA, 19 nt, Artificial Sequence
  Description of Artificial Sequence: Synthetic oligonucleotide
uccuagaacauaaagugaa

SEQ ID NO: 132443 - RNA, 19 nt, Artificial Sequence
  Description of Artificial Sequence: Synthetic oligonucleotide
ugcuaaaucagaagcauuc

SEQ ID NO: 132444 - RNA, 19 nt, Artificial Sequence
  Description of Artificial Sequence: Synthetic oligonucleotide
uugggaagcacuaauuaac

SEQ ID NO: 132445 - RNA, 19 nt, Artificial Sequence
  Description of Artificial Sequence: Synthetic oligonucleotide
gacccuaaacaucucaugc

SEQ ID NO: 132446 - RNA, 19 nt, Artificial Sequence
  Description of Artificial Sequence: Synthetic oligonucleotide
caaaugaucagcuuugcca

SEQ ID NO: 132447 - RNA, 19 nt, Artificial Sequence
  Description of Artificial Sequence: Synthetic oligonucleotide
uucagcgaacauaagaaaa

SEQ ID NO: 132448 - RNA, 19 nt, Artificial Sequence
  Description of Artificial Sequence: Synthetic oligonucleotide
ucuacaauauucagcgaac

SEQ ID NO: 132449 - RNA, 19 nt, Artificial Sequence
  Description of Artificial Sequence: Synthetic oligonucleotide
aaagacccuaaacaucuca

SEQ ID NO: 132450 - RNA, 19 nt, Artificial Sequence
  Description of Artificial Sequence: Synthetic oligonucleotide
ugaagcuugaaaucuauuu

SEQ ID NO: 132451 - RNA, 19 nt, Artificial Sequence
  Description of Artificial Sequence: Synthetic oligonucleotide
aaaacaaaccccguuugga

SEQ ID NO: 132452 - RNA, 19 nt, Artificial Sequence
  Description of Artificial Sequence: Synthetic oligonucleotide
auaguuuucaucguugccu

SEQ ID NO: 132453 - RNA, 19 nt, Artificial Sequence
  Description of Artificial Sequence: Synthetic oligonucleotide
guacugguaagacugauca

SEQ ID NO: 132454 - RNA, 19 nt, Artificial Sequence
  Description of Artificial Sequence: Synthetic oligonucleotide
uguuagagucauaaacaga

SEQ ID NO: 132455 - RNA, 19 nt, Artificial Sequence
  Description of Artificial Sequence: Synthetic oligonucleotide
auaaaaggaguuuaaugua

SEQ ID NO: 132456 - RNA, 19 nt, Artificial Sequence
  Description of Artificial Sequence: Synthetic oligonucleotide
accgacaaaccugaggucg

SEQ ID NO: 132457 - RNA, 19 nt, Artificial Sequence
  Description of Artificial Sequence: Synthetic oligonucleotide
ugcugcauuagcuaccaac

SEQ ID NO: 132458 - RNA, 19 nt, Artificial Sequence
  Description of Artificial Sequence: Synthetic oligonucleotide
guaaccgacaaaccaaaac

SEQ ID NO: 132459 - RNA, 19 nt, Artificial Sequence
  Description of Artificial Sequence: Synthetic oligonucleotide
acaauaucucuagguaacc

SEQ ID NO: 132460 - RNA, 19 nt, Artificial Sequence
  Description of Artificial Sequence: Synthetic oligonucleotide
cuuaccugaagacgguggg

SEQ ID NO: 132461 - RNA, 19 nt, Artificial Sequence
  Description of Artificial Sequence: Synthetic oligonucleotide
gguaagacugaucauagga

SEQ ID NO: 132462 - RNA, 19 nt, Artificial Sequence
  Description of Artificial Sequence: Synthetic oligonucleotide
accacuccgaccgacaaac

SEQ ID NO: 132463 - RNA, 19 nt, Artificial Sequence
  Description of Artificial Sequence: Synthetic oligonucleotide
gccucuaccacuccgaccg

SEQ ID NO: 132464 - RNA, 19 nt, Artificial Sequence
  Description of Artificial Sequence: Synthetic oligonucleotide
aucguugccugccaucacg

SEQ ID NO: 132465 - RNA, 19 nt, Artificial Sequence
  Description of Artificial Sequence: Synthetic oligonucleotide
guucaaggaggcccgaggg

SEQ ID NO: 132466 - RNA, 19 nt, Artificial Sequence
  Description of Artificial Sequence: Synthetic oligonucleotide
aaacuccccggcuuggucu

SEQ ID NO: 132467 - RNA, 19 nt, Artificial Sequence
  Description of Artificial Sequence: Synthetic oligonucleotide
acgugaaggcaaugaauac

SEQ ID NO: 132468 - RNA, 19 nt, Artificial Sequence
  Description of Artificial Sequence: Synthetic oligonucleotide
uagguaaccgagcaaucac

SEQ ID NO: 132469 - RNA, 19 nt, Artificial Sequence
  Description of Artificial Sequence: Synthetic oligonucleotide
aauauccgauaguucauuu

SEQ ID NO: 132470 - RNA, 19 nt, Artificial Sequence
  Description of Artificial Sequence: Synthetic oligonucleotide
auauccgauaguucauuug

SEQ ID NO: 132471 - RNA, 19 nt, Artificial Sequence
  Description of Artificial Sequence: Synthetic oligonucleotide
ucccagaauuggcuggugg

SEQ ID NO: 132472 - RNA, 19 nt, Artificial Sequence
  Description of Artificial Sequence: Synthetic oligonucleotide
uaucucuagguaaccgagc

SEQ ID NO: 132473 - RNA, 19 nt, Artificial Sequence
  Description of Artificial Sequence: Synthetic oligonucleotide
uauaaggcccuccguugag

SEQ ID NO: 132474 - RNA, 19 nt, Artificial Sequence
  Description of Artificial Sequence: Synthetic oligonucleotide
caauaucucuagguaaccg

SEQ ID NO: 132475 - RNA, 19 nt, Artificial Sequence
  Description of Artificial Sequence: Synthetic oligonucleotide
auaucucuagguaaccgag

SEQ ID NO: 132476 - RNA, 19 nt, Artificial Sequence
  Description of Artificial Sequence: Synthetic oligonucleotide
guaagacugaucauaggac

SEQ ID NO: 132477 - RNA, 19 nt, Artificial Sequence
  Description of Artificial Sequence: Synthetic oligonucleotide
ugguaagacugaucauagg

SEQ ID NO: 132478 - RNA, 19 nt, Artificial Sequence
  Description of Artificial Sequence: Synthetic oligonucleotide
ugauaaggguuugggaagc

SEQ ID NO: 132479 - RNA, 19 nt, Artificial Sequence
  Description of Artificial Sequence: Synthetic oligonucleotide
agagucaccuugaugcacg

SEQ ID NO: 132480 - RNA, 19 nt, Artificial Sequence
  Description of Artificial Sequence: Synthetic oligonucleotide
guggaaucuaucuccaaga

SEQ ID NO: 132481 - RNA, 19 nt, Artificial Sequence
  Description of Artificial Sequence: Synthetic oligonucleotide
caaguaaccgacaaaccaa

SEQ ID NO: 132482 - RNA, 19 nt, Artificial Sequence
  Description of Artificial Sequence: Synthetic oligonucleotide
agacccuaaacaucucaug

SEQ ID NO: 132483 - RNA, 19 nt, Artificial Sequence
  Description of Artificial Sequence: Synthetic oligonucleotide
ugcugauaaggguuuggga

SEQ ID NO: 132484 - RNA, 19 nt, Artificial Sequence
  Description of Artificial Sequence: Synthetic oligonucleotide
aauauucagcgaacauaag

SEQ ID NO: 132485 - RNA, 19 nt, Artificial Sequence
  Description of Artificial Sequence: Synthetic oligonucleotide
ucuaaucugaaugcuuaaa

SEQ ID NO: 132486 - RNA, 19 nt, Artificial Sequence
  Description of Artificial Sequence: Synthetic oligonucleotide
caucacggugaccaaagug

SEQ ID NO: 132487 - RNA, 19 nt, Artificial Sequence
  Description of Artificial Sequence: Synthetic oligonucleotide
uguugaaagucgacuggaa

SEQ ID NO: 132488 - RNA, 19 nt, Artificial Sequence
  Description of Artificial Sequence: Synthetic oligonucleotide
gaucuaaucugaaugcuua

SEQ ID NO: 132489 - RNA, 19 nt, Artificial Sequence
  Description of Artificial Sequence: Synthetic oligonucleotide
aacuccccggcuuggucuc

SEQ ID NO: 132490 - RNA, 19 nt, Artificial Sequence
  Description of Artificial Sequence: Synthetic oligonucleotide
gaaagcgauaugccaugug

SEQ ID NO: 132491 - RNA, 19 nt, Artificial Sequence
  Description of Artificial Sequence: Synthetic oligonucleotide
aaauauccgauaguucauu

SEQ ID NO: 132492 - RNA, 19 nt, Artificial Sequence
  Description of Artificial Sequence: Synthetic oligonucleotide
gggucuuaccugaagacgg

SEQ ID NO: 132493 - RNA, 19 nt, Artificial Sequence
  Description of Artificial Sequence: Synthetic oligonucleotide
agaauuggcuggugggucu

SEQ ID NO: 132494 - RNA, 19 nt, Artificial Sequence
  Description of Artificial Sequence: Synthetic oligonucleotide
guaacagaaauauccgaua

SEQ ID NO: 132495 - RNA, 19 nt, Artificial Sequence
  Description of Artificial Sequence: Synthetic oligonucleotide
accccgacaaguaaccgac

SEQ ID NO: 132496 - RNA, 19 nt, Artificial Sequence
  Description of Artificial Sequence: Synthetic oligonucleotide
uguugcagcgccagugagu

SEQ ID NO: 132497 - RNA, 19 nt, Artificial Sequence
  Description of Artificial Sequence: Synthetic oligonucleotide
agcguggggaacuggcgcg

SEQ ID NO: 132498 - RNA, 19 nt, Artificial Sequence
  Description of Artificial Sequence: Synthetic oligonucleotide
auaaggcccuccguugagc

SEQ ID NO: 132499 - RNA, 19 nt, Artificial Sequence
  Description of Artificial Sequence: Synthetic oligonucleotide
gacugaucauaggaccacg

SEQ ID NO: 132500 - RNA, 19 nt, Artificial Sequence
  Description of Artificial Sequence: Synthetic oligonucleotide
agcgguagcgccucgcuca

SEQ ID NO: 132501 - RNA, 19 nt, Artificial Sequence
  Description of Artificial Sequence: Synthetic oligonucleotide
aaaagacccuaaacaucuc

SEQ ID NO: 132502 - RNA, 19 nt, Artificial Sequence
  Description of Artificial Sequence: Synthetic oligonucleotide
gguauaaggcccuccguug

SEQ ID NO: 132503 - RNA, 19 nt, Artificial Sequence
  Description of Artificial Sequence: Synthetic oligonucleotide
auaaagaguuuugccuguc

SEQ ID NO: 132504 - RNA, 19 nt, Artificial Sequence
  Description of Artificial Sequence: Synthetic oligonucleotide
uggaauaaacaacgugguu

SEQ ID NO: 132505 - RNA, 19 nt, Artificial Sequence
  Description of Artificial Sequence: Synthetic oligonucleotide
guuugggaagcacuaauua

SEQ ID NO: 132506 - RNA, 19 nt, Artificial Sequence
  Description of Artificial Sequence: Synthetic oligonucleotide
aaguaaccgacaaaccaaa

SEQ ID NO: 132507 - RNA, 19 nt, Artificial Sequence
  Description of Artificial Sequence: Synthetic oligonucleotide
uugccaauacugaccuggc

SEQ ID NO: 132508 - RNA, 19 nt, Artificial Sequence
  Description of Artificial Sequence: Synthetic oligonucleotide
agcgauaugccauguggaa

SEQ ID NO: 132509 - RNA, 19 nt, Artificial Sequence
  Description of Artificial Sequence: Synthetic oligonucleotide
ggcuguugaaagucgacug

SEQ ID NO: 132510 - RNA, 19 nt, Artificial Sequence
  Description of Artificial Sequence: Synthetic oligonucleotide
gaagagucaccuugaugca

SEQ ID NO: 132511 - RNA, 19 nt, Artificial Sequence
  Description of Artificial Sequence: Synthetic oligonucleotide
gguucaaggaggcccgagg

SEQ ID NO: 132512 - RNA, 19 nt, Artificial Sequence
  Description of Artificial Sequence: Synthetic oligonucleotide
ugacccucauggccgugcg

SEQ ID NO: 132513 - RNA, 19 nt, Artificial Sequence
  Description of Artificial Sequence: Synthetic oligonucleotide
gaagaaagcgauaugccau

SEQ ID NO: 132514 - RNA, 19 nt, Artificial Sequence
  Description of Artificial Sequence: Synthetic oligonucleotide
agugaauaagaaguagcuu

SEQ ID NO: 132515 - RNA, 19 nt, Artificial Sequence
  Description of Artificial Sequence: Synthetic oligonucleotide
ugaagcggcggcucgugcu

SEQ ID NO: 132516 - RNA, 19 nt, Artificial Sequence
  Description of Artificial Sequence: Synthetic oligonucleotide
caccacgucgcucuggcug

SEQ ID NO: 132517 - RNA, 19 nt, Artificial Sequence
  Description of Artificial Sequence: Synthetic oligonucleotide
agcaaucacauaacccauc

SEQ ID NO: 132518 - RNA, 19 nt, Artificial Sequence
  Description of Artificial Sequence: Synthetic oligonucleotide
aucuaaucugaaugcuuaa

SEQ ID NO: 132519 - RNA, 19 nt, Artificial Sequence
  Description of Artificial Sequence: Synthetic oligonucleotide
aauacugaccuggcagaaa

SEQ ID NO: 132520 - RNA, 19 nt, Artificial Sequence
  Description of Artificial Sequence: Synthetic oligonucleotide
acaauugaguuuauugaua

SEQ ID NO: 132521 - RNA, 19 nt, Artificial Sequence
  Description of Artificial Sequence: Synthetic oligonucleotide
uagcuaccaacuuguuuga

SEQ ID NO: 132522 - RNA, 19 nt, Artificial Sequence
  Description of Artificial Sequence: Synthetic oligonucleotide
uggcgcgggucaccgaagg

SEQ ID NO: 132523 - RNA, 19 nt, Artificial Sequence
  Description of Artificial Sequence: Synthetic oligonucleotide
acuccgaccgacaaaccug

SEQ ID NO: 132524 - RNA, 19 nt, Artificial Sequence
  Description of Artificial Sequence: Synthetic oligonucleotide
cucuaugguagguggcgac

SEQ ID NO: 132525 - RNA, 19 nt, Artificial Sequence
  Description of Artificial Sequence: Synthetic oligonucleotide
cgagcaaucacauaaccca

SEQ ID NO: 132526 - RNA, 19 nt, Artificial Sequence
  Description of Artificial Sequence: Synthetic oligonucleotide
gaagcggcggcucgugcug

SEQ ID NO: 132527 - RNA, 19 nt, Artificial Sequence
  Description of Artificial Sequence: Synthetic oligonucleotide
gaacuggcgcgggucaccg

SEQ ID NO: 132528 - RNA, 19 nt, Artificial Sequence
  Description of Artificial Sequence: Synthetic oligonucleotide
uggcucuaugguagguggc

SEQ ID NO: 132529 - RNA, 19 nt, Artificial Sequence
  Description of Artificial Sequence: Synthetic oligonucleotide
guagugcaugcgcgggucg

SEQ ID NO: 132530 - RNA, 19 nt, Artificial Sequence
  Description of Artificial Sequence: Synthetic oligonucleotide
gaugccgaugcccgacgug

SEQ ID NO: 132531 - RNA, 19 nt, Artificial Sequence
  Description of Artificial Sequence: Synthetic oligonucleotide
ccagguauaaggcccuccg

SEQ ID NO: 132532 - RNA, 19 nt, Artificial Sequence
  Description of Artificial Sequence: Synthetic oligonucleotide
cuacaauauucagcgaaca

SEQ ID NO: 132533 - RNA, 19 nt, Artificial Sequence
  Description of Artificial Sequence: Synthetic oligonucleotide
agauuguugucaaaccauu

SEQ ID NO: 132534 - RNA, 19 nt, Artificial Sequence
  Description of Artificial Sequence: Synthetic oligonucleotide
ucucaggaagaaagcgaua

SEQ ID NO: 132535 - RNA, 19 nt, Artificial Sequence
  Description of Artificial Sequence: Synthetic oligonucleotide
cgacaaguaaccgacaaac

SEQ ID NO: 132536 - RNA, 19 nt, Artificial Sequence
  Description of Artificial Sequence: Synthetic oligonucleotide
ccuagaacauaaagugaac

SEQ ID NO: 132537 - RNA, 19 nt, Artificial Sequence
  Description of Artificial Sequence: Synthetic oligonucleotide
agguaaccgagcaaucaca

SEQ ID NO: 132538 - RNA, 19 nt, Artificial Sequence
  Description of Artificial Sequence: Synthetic oligonucleotide
aggcaccccgacaaguaac

SEQ ID NO: 132539 - RNA, 19 nt, Artificial Sequence
  Description of Artificial Sequence: Synthetic oligonucleotide
augcacgugaaggcaauga

SEQ ID NO: 132540 - RNA, 19 nt, Artificial Sequence
  Description of Artificial Sequence: Synthetic oligonucleotide
ucuucgggguucucucggu

SEQ ID NO: 132541 - RNA, 19 nt, Artificial Sequence
  Description of Artificial Sequence: Synthetic oligonucleotide
gagaggcuugucaucccgc

SEQ ID NO: 132542 - RNA, 19 nt, Artificial Sequence
  Description of Artificial Sequence: Synthetic oligonucleotide
agaaagcgauaugccaugu

SEQ ID NO: 132543 - RNA, 19 nt, Artificial Sequence
  Description of Artificial Sequence: Synthetic oligonucleotide
cagaauuggcugguggguc

SEQ ID NO: 132544 - RNA, 19 nt, Artificial Sequence
  Description of Artificial Sequence: Synthetic oligonucleotide
ucucucgguccguccacug

SEQ ID NO: 132545 - RNA, 19 nt, Artificial Sequence
  Description of Artificial Sequence: Synthetic oligonucleotide
gaugcacgugaaggcaaug

SEQ ID NO: 132546 - RNA, 19 nt, Artificial Sequence
  Description of Artificial Sequence: Synthetic oligonucleotide
ugucaucccgcuggcacgu

SEQ ID NO: 132547 - RNA, 19 nt, Artificial Sequence
  Description of Artificial Sequence: Synthetic oligonucleotide
gaaauauccgauaguucau

SEQ ID NO: 132548 - RNA, 19 nt, Artificial Sequence
  Description of Artificial Sequence: Synthetic oligonucleotide
gucgacuggaaagcucugc

SEQ ID NO: 132549 - RNA, 19 nt, Artificial Sequence
  Description of Artificial Sequence: Synthetic oligonucleotide
ggcgaguaggugaaggcgc

SEQ ID NO: 132550 - RNA, 19 nt, Artificial Sequence
  Description of Artificial Sequence: Synthetic oligonucleotide
ggcucagcgcgguggaagg

SEQ ID NO: 132551 - RNA, 19 nt, Artificial Sequence
  Description of Artificial Sequence: Synthetic oligonucleotide
gguccguccacugugaucu

SEQ ID NO: 132552 - RNA, 19 nt, Artificial Sequence
  Description of Artificial Sequence: Synthetic oligonucleotide
ugauggcucuaugguaggu

SEQ ID NO: 132553 - RNA, 19 nt, Artificial Sequence
  Description of Artificial Sequence: Synthetic oligonucleotide
gguaacagaaauauccgau

SEQ ID NO: 132554 - RNA, 19 nt, Artificial Sequence
  Description of Artificial Sequence: Synthetic oligonucleotide
ggaugcgcggcggcgaucg

SEQ ID NO: 132555 - RNA, 19 nt, Artificial Sequence
  Description of Artificial Sequence: Synthetic oligonucleotide
cuccgaccgacaaaccuga

SEQ ID NO: 132556 - RNA, 19 nt, Artificial Sequence
  Description of Artificial Sequence: Synthetic oligonucleotide
gcacguccuggugaaaugg

SEQ ID NO: 132557 - RNA, 19 nt, Artificial Sequence
  Description of Artificial Sequence: Synthetic oligonucleotide
gggcugacccucauggccg

SEQ ID NO: 132558 - RNA, 19 nt, Artificial Sequence
  Description of Artificial Sequence: Synthetic oligonucleotide
uccguugagccuggcagaa

SEQ ID NO: 132559 - RNA, 19 nt, Artificial Sequence
  Description of Artificial Sequence: Synthetic oligonucleotide
uggacgcguuggugcaggg

SEQ ID NO: 132560 - RNA, 19 nt, Artificial Sequence
  Description of Artificial Sequence: Synthetic oligonucleotide
guagcgagaggccgagcuc

SEQ ID NO: 132561 - RNA, 19 nt, Artificial Sequence
  Description of Artificial Sequence: Synthetic oligonucleotide
cgauaguucauuuggagua

SEQ ID NO: 132562 - RNA, 19 nt, Artificial Sequence
  Description of Artificial Sequence: Synthetic oligonucleotide
cacugagccgcucggaaaa

SEQ ID NO: 132563 - RNA, 19 nt, Artificial Sequence
  Description of Artificial Sequence: Synthetic oligonucleotide
caccccgacaaguaaccga

SEQ ID NO: 132564 - RNA, 19 nt, Artificial Sequence
  Description of Artificial Sequence: Synthetic oligonucleotide
cccguggacgcguuggugc

SEQ ID NO: 132565 - RNA, 19 nt, Artificial Sequence
  Description of Artificial Sequence: Synthetic oligonucleotide
gaucgcucgccgcccacca

SEQ ID NO: 132566 - RNA, 19 nt, Artificial Sequence
  Description of Artificial Sequence: Synthetic oligonucleotide
cugacccucauggccgugc

SEQ ID NO: 132567 - RNA, 19 nt, Artificial Sequence
  Description of Artificial Sequence: Synthetic oligonucleotide
uugccggggcucagcgcgg

SEQ ID NO: 132568 - RNA, 19 nt, Artificial Sequence
  Description of Artificial Sequence: Synthetic oligonucleotide
uccgaccgacaaaccugag

SEQ ID NO: 132569 - RNA, 19 nt, Artificial Sequence
  Description of Artificial Sequence: Synthetic oligonucleotide
gaugcccgacgugaccggc

SEQ ID NO: 132570 - RNA, 19 nt, Artificial Sequence
  Description of Artificial Sequence: Synthetic oligonucleotide
gaaggcggucagguccggg

SEQ ID NO: 132571 - RNA, 19 nt, Artificial Sequence
  Description of Artificial Sequence: Synthetic oligonucleotide
uuggaaccaugcuguuuau

SEQ ID NO: 132572 - RNA, 19 nt, Artificial Sequence
  Description of Artificial Sequence: Synthetic oligonucleotide
ccgaccgacaaaccugagg

SEQ ID NO: 132573 - RNA, 19 nt, Artificial Sequence
  Description of Artificial Sequence: Synthetic oligonucleotide
cagacgcgccguaguacag

SEQ ID NO: 132574 - RNA, 19 nt, Artificial Sequence
  Description of Artificial Sequence: Synthetic oligonucleotide
gaaggcaccccgacaagua

SEQ ID NO: 132575 - RNA, 19 nt, Artificial Sequence
  Description of Artificial Sequence: Synthetic oligonucleotide
gaacugguaggagccggca

SEQ ID NO: 132576 - RNA, 19 nt, Artificial Sequence
  Description of Artificial Sequence: Synthetic oligonucleotide
ggcggcgaguaggugaagg

SEQ ID NO: 132577 - RNA, 19 nt, Artificial Sequence
  Description of Artificial Sequence: Synthetic oligonucleotide
guaaccgagcaaucacaua

SEQ ID NO: 132578 - RNA, 19 nt, Artificial Sequence
  Description of Artificial Sequence: Synthetic oligonucleotide
acugagccgcucggaaaag

SEQ ID NO: 132579 - RNA, 19 nt, Artificial Sequence
  Description of Artificial Sequence: Synthetic oligonucleotide
cacauaacccauccauugu

SEQ ID NO: 132580 - RNA, 19 nt, Artificial Sequence
  Description of Artificial Sequence: Synthetic oligonucleotide
gguagcgagaggccgagcu

SEQ ID NO: 132581 - RNA, 19 nt, Artificial Sequence
  Description of Artificial Sequence: Synthetic oligonucleotide
ggcacguccuggugaaaug

SEQ ID NO: 132582 - RNA, 19 nt, Artificial Sequence
  Description of Artificial Sequence: Synthetic oligonucleotide
agugaaacucuugccucua

SEQ ID NO: 132583 - RNA, 19 nt, Artificial Sequence
  Description of Artificial Sequence: Synthetic oligonucleotide
gcagacgcgccguaguaca

SEQ ID NO: 132584 - RNA, 19 nt, Artificial Sequence
  Description of Artificial Sequence: Synthetic oligonucleotide
cuccguugagccuggcaga

SEQ ID NO: 132585 - RNA, 19 nt, Artificial Sequence
  Description of Artificial Sequence: Synthetic oligonucleotide
agcacggagcagaggaagu

SEQ ID NO: 132586 - RNA, 19 nt, Artificial Sequence
  Description of Artificial Sequence: Synthetic oligonucleotide
cucuaccacuccgaccgac

SEQ ID NO: 132587 - RNA, 19 nt, Artificial Sequence
  Description of Artificial Sequence: Synthetic oligonucleotide
gugaagcggcggcucgugc

SEQ ID NO: 132588 - RNA, 19 nt, Artificial Sequence
  Description of Artificial Sequence: Synthetic oligonucleotide
gggguagugcaugcgcggg

SEQ ID NO: 132589 - RNA, 19 nt, Artificial Sequence
  Description of Artificial Sequence: Synthetic oligonucleotide
cauaacccauccauuguuu

SEQ ID NO: 132590 - RNA, 19 nt, Artificial Sequence
  Description of Artificial Sequence: Synthetic oligonucleotide
uggaaccaugcuguuuauu

SEQ ID NO: 132591 - RNA, 19 nt, Artificial Sequence
  Description of Artificial Sequence: Synthetic oligonucleotide
gguuaguaaagacggugau

SEQ ID NO: 132592 - RNA, 19 nt, Artificial Sequence
  Description of Artificial Sequence: Synthetic oligonucleotide
cacggaagaggaggugaug

SEQ ID NO: 132593 - RNA, 19 nt, Artificial Sequence
  Description of Artificial Sequence: Synthetic oligonucleotide
gccgggguagugcaugcgc

SEQ ID NO: 132594 - RNA, 19 nt, Artificial Sequence
  Description of Artificial Sequence: Synthetic oligonucleotide
ggguguugcugggugcacg

SEQ ID NO: 132595 - RNA, 19 nt, Artificial Sequence
  Description of Artificial Sequence: Synthetic oligonucleotide
aacuggcgcgggucaccga

SEQ ID NO: 132596 - RNA, 19 nt, Artificial Sequence
  Description of Artificial Sequence: Synthetic oligonucleotide
cacuccgaccgacaaaccu

SEQ ID NO: 132597 - RNA, 19 nt, Artificial Sequence
  Description of Artificial Sequence: Synthetic oligonucleotide
gcuaccaacuuguuugaau

SEQ ID NO: 132598 - RNA, 19 nt, Artificial Sequence
  Description of Artificial Sequence: Synthetic oligonucleotide
agugcaugcgcgggucgga

SEQ ID NO: 132599 - RNA, 19 nt, Artificial Sequence
  Description of Artificial Sequence: Synthetic oligonucleotide
aauuggcuggugggucuua

SEQ ID NO: 132600 - RNA, 19 nt, Artificial Sequence
  Description of Artificial Sequence: Synthetic oligonucleotide
cuggcgcgggucaccgaag

SEQ ID NO: 132601 - RNA, 19 nt, Artificial Sequence
  Description of Artificial Sequence: Synthetic oligonucleotide
gguagugcaugcgcggguc

SEQ ID NO: 132602 - RNA, 19 nt, Artificial Sequence
  Description of Artificial Sequence: Synthetic oligonucleotide
gcggcgaucgcucgccgcc

SEQ ID NO: 132603 - RNA, 19 nt, Artificial Sequence
  Description of Artificial Sequence: Synthetic oligonucleotide
cucgguccguccacuguga

SEQ ID NO: 132604 - RNA, 19 nt, Artificial Sequence
  Description of Artificial Sequence: Synthetic oligonucleotide
aucccgcuggcacguccug

SEQ ID NO: 132605 - RNA, 19 nt, Artificial Sequence
  Description of Artificial Sequence: Synthetic oligonucleotide
cauggccgugcgccgcagc

SEQ ID NO: 132606 - RNA, 19 nt, Artificial Sequence
  Description of Artificial Sequence: Synthetic oligonucleotide
cucugccgaauaguuuuca

SEQ ID NO: 132607 - RNA, 19 nt, Artificial Sequence
  Description of Artificial Sequence: Synthetic oligonucleotide
gcgagcuggucuggaaggg

SEQ ID NO: 132608 - RNA, 19 nt, Artificial Sequence
  Description of Artificial Sequence: Synthetic oligonucleotide
ccguuuggaggagagagga

SEQ ID NO: 132609 - RNA, 19 nt, Artificial Sequence
  Description of Artificial Sequence: Synthetic oligonucleotide
ccgauaguucauuuggagu

SEQ ID NO: 132610 - RNA, 19 nt, Artificial Sequence
  Description of Artificial Sequence: Synthetic oligonucleotide
ggaacuggcgcgggucacc

SEQ ID NO: 132611 - RNA, 19 nt, Artificial Sequence
  Description of Artificial Sequence: Synthetic oligonucleotide
agcuaccaacuuguuugaa

SEQ ID NO: 132612 - RNA, 19 nt, Artificial Sequence
  Description of Artificial Sequence: Synthetic oligonucleotide
cgcucggaaaaggacaaac

SEQ ID NO: 132613 - RNA, 19 nt, Artificial Sequence
  Description of Artificial Sequence: Synthetic oligonucleotide
gcgcuaccaccuugaaagc

SEQ ID NO: 132614 - RNA, 19 nt, Artificial Sequence
  Description of Artificial Sequence: Synthetic oligonucleotide
gguaaccgagcaaucacau

SEQ ID NO: 132615 - RNA, 19 nt, Artificial Sequence
  Description of Artificial Sequence: Synthetic oligonucleotide
ggcagacgcgccguaguac

SEQ ID NO: 132616 - RNA, 19 nt, Artificial Sequence
  Description of Artificial Sequence: Synthetic oligonucleotide
gaugcgcggcggcgaucgc

SEQ ID NO: 132617 - RNA, 19 nt, Artificial Sequence
  Description of Artificial Sequence: Synthetic oligonucleotide
augcgcggcggcgaucgcu

SEQ ID NO: 132618 - RNA, 19 nt, Artificial Sequence
  Description of Artificial Sequence: Synthetic oligonucleotide
cggcgaguaggugaaggcg

SEQ ID NO: 132619 - RNA, 19 nt, Artificial Sequence
  Description of Artificial Sequence: Synthetic oligonucleotide
cccgacaaguaaccgacaa

SEQ ID NO: 132620 - RNA, 19 nt, Artificial Sequence
  Description of Artificial Sequence: Synthetic oligonucleotide
ggucggagauggagggcag

SEQ ID NO: 132621 - RNA, 19 nt, Artificial Sequence
  Description of Artificial Sequence: Synthetic oligonucleotide
ggcgccgggguagugcaug

SEQ ID NO: 132622 - RNA, 19 nt, Artificial Sequence
  Description of Artificial Sequence: Synthetic oligonucleotide
ggcgcgggucaccgaaggc

SEQ ID NO: 132623 - RNA, 19 nt, Artificial Sequence
  Description of Artificial Sequence: Synthetic oligonucleotide
gcgcccguggacgcguugg

SEQ ID NO: 132624 - RNA, 19 nt, Artificial Sequence
  Description of Artificial Sequence: Synthetic oligonucleotide
ggacgcguuggugcagggc

SEQ ID NO: 132625 - RNA, 19 nt, Artificial Sequence
  Description of Artificial Sequence: Synthetic oligonucleotide
gccgaauaguuuucaucgu

SEQ ID NO: 132626 - RNA, 19 nt, Artificial Sequence
  Description of Artificial Sequence: Synthetic oligonucleotide
ggcggcgaucgcucgccgc

SEQ ID NO: 132627 - RNA, 19 nt, Artificial Sequence
  Description of Artificial Sequence: Synthetic oligonucleotide
ggaaugccugacucaaguu

SEQ ID NO: 132628 - RNA, 19 nt, Artificial Sequence
  Description of Artificial Sequence: Synthetic oligonucleotide
caucccgcuggcacguccu

SEQ ID NO: 132629 - RNA, 19 nt, Artificial Sequence
  Description of Artificial Sequence: Synthetic oligonucleotide
cuaugguagguggcgacuu

SEQ ID NO: 132630 - RNA, 19 nt, Artificial Sequence
  Description of Artificial Sequence: Synthetic oligonucleotide
ccacuccgaccgacaaacc

SEQ ID NO: 132631 - RNA, 19 nt, Artificial Sequence
  Description of Artificial Sequence: Synthetic oligonucleotide
ccgacaaguaaccgacaaa

SEQ ID NO: 132632 - RNA, 19 nt, Artificial Sequence
  Description of Artificial Sequence: Synthetic oligonucleotide
gccuggguagggcggcggc

SEQ ID NO: 132633 - RNA, 19 nt, Artificial Sequence
  Description of Artificial Sequence: Synthetic oligonucleotide
acgguggggacggcuggau

SEQ ID NO: 132634 - RNA, 19 nt, Artificial Sequence
  Description of Artificial Sequence: Synthetic oligonucleotide
cucucgguccguccacugu

SEQ ID NO: 132635 - RNA, 19 nt, Artificial Sequence
  Description of Artificial Sequence: Synthetic oligonucleotide
ggcggcucgugcuggcauc

SEQ ID NO: 132636 - RNA, 19 nt, Artificial Sequence
  Description of Artificial Sequence: Synthetic oligonucleotide
cugcagccaaagaucuaau

SEQ ID NO: 132637 - RNA, 19 nt, Artificial Sequence
  Description of Artificial Sequence: Synthetic oligonucleotide
gcucugccgaauaguuuuc

SEQ ID NO: 132638 - RNA, 19 nt, Artificial Sequence
  Description of Artificial Sequence: Synthetic oligonucleotide
ggucuuaccugaagacggu

SEQ ID NO: 132639 - RNA, 19 nt, Artificial Sequence
  Description of Artificial Sequence: Synthetic oligonucleotide
gcaugcgcgggucggagau

SEQ ID NO: 132640 - RNA, 19 nt, Artificial Sequence
  Description of Artificial Sequence: Synthetic oligonucleotide
ccgaauaguuuucaucguu

SEQ ID NO: 132641 - RNA, 19 nt, Artificial Sequence
  Description of Artificial Sequence: Synthetic oligonucleotide
gaccacgguggggacggcu

SEQ ID NO: 132642 - RNA, 19 nt, Artificial Sequence
  Description of Artificial Sequence: Synthetic oligonucleotide
gcaggaugcgcggcggcga

SEQ ID NO: 132643 - RNA, 19 nt, Artificial Sequence
  Description of Artificial Sequence: Synthetic oligonucleotide
aggauguguuagagucaua

SEQ ID NO: 132644 - RNA, 19 nt, Artificial Sequence
  Description of Artificial Sequence: Synthetic oligonucleotide
gcgcgcggguggcauguug

SEQ ID NO: 132645 - RNA, 19 nt, Artificial Sequence
  Description of Artificial Sequence: Synthetic oligonucleotide
ggcgaucgcucgccgccca

SEQ ID NO: 132646 - RNA, 19 nt, Artificial Sequence
  Description of Artificial Sequence: Synthetic oligonucleotide
gagccggcagacgcgccgu

SEQ ID NO: 132647 - RNA, 19 nt, Artificial Sequence
  Description of Artificial Sequence: Synthetic oligonucleotide
gcgcggcggcgaucgcucg

SEQ ID NO: 132648 - RNA, 19 nt, Artificial Sequence
  Description of Artificial Sequence: Synthetic oligonucleotide
ggcggucagguccggggcu

SEQ ID NO: 132649 - RNA, 19 nt, Artificial Sequence
  Description of Artificial Sequence: Synthetic oligonucleotide
agccggcagacgcgccgua

SEQ ID NO: 132650 - RNA, 19 nt, Artificial Sequence
  Description of Artificial Sequence: Synthetic oligonucleotide
cgugaagcggcggcucgug

SEQ ID NO: 132651 - RNA, 19 nt, Artificial Sequence
  Description of Artificial Sequence: Synthetic oligonucleotide
gcgaucgcucgccgcccac

SEQ ID NO: 132652 - RNA, 19 nt, Artificial Sequence
  Description of Artificial Sequence: Synthetic oligonucleotide
cgaucgcucgccgcccacc

SEQ ID NO: 132653 - RNA, 19 nt, Artificial Sequence
  Description of Artificial Sequence: Synthetic oligonucleotide
cgacgugaccggcggcgag

SEQ ID NO: 132654 - RNA, 19 nt, Artificial Sequence
  Description of Artificial Sequence: Synthetic oligonucleotide
cccuccguugagccuggca

SEQ ID NO: 132655 - RNA, 19 nt, Artificial Sequence
  Description of Artificial Sequence: Synthetic oligonucleotide
gcugacccucauggccgug

SEQ ID NO: 132656 - RNA, 19 nt, Artificial Sequence
  Description of Artificial Sequence: Synthetic oligonucleotide
ccccgacaaguaaccgaca

SEQ ID NO: 132657 - RNA, 19 nt, Artificial Sequence
  Description of Artificial Sequence: Synthetic oligonucleotide
cgcggguggcauguuggug

SEQ ID NO: 132658 - RNA, 19 nt, Artificial Sequence
  Description of Artificial Sequence: Synthetic oligonucleotide
ccuggguagggcggcggca

SEQ ID NO: 132659 - RNA, 19 nt, Artificial Sequence
  Description of Artificial Sequence: Synthetic oligonucleotide
cgggucaccgaaggcgguc

SEQ ID NO: 132660 - RNA, 19 nt, Artificial Sequence
  Description of Artificial Sequence: Synthetic oligonucleotide
cgccgggguagugcaugcg

SEQ ID NO: 132661 - RNA, 19 nt, Artificial Sequence
  Description of Artificial Sequence: Synthetic oligonucleotide
ccucuaccacuccgaccga

SEQ ID NO: 132662 - RNA, 19 nt, Artificial Sequence
  Description of Artificial Sequence: Synthetic oligonucleotide
ccggcagacgcgccguagu

SEQ ID NO: 132663 - RNA, 19 nt, Artificial Sequence
  Description of Artificial Sequence: Synthetic oligonucleotide
cggggcgcccagcgguagc

SEQ ID NO: 132664 - RNA, 19 nt, Artificial Sequence
  Description of Artificial Sequence: Synthetic oligonucleotide
gcgguagcgccucgcucau

SEQ ID NO: 132665 - RNA, 19 nt, Artificial Sequence
  Description of Artificial Sequence: Synthetic oligonucleotide
ccggggcgcccagcgguag

SEQ ID NO: 132666 - RNA, 19 nt, Artificial Sequence
  Description of Artificial Sequence: Synthetic oligonucleotide
ccgacgugaccggcggcga

SEQ ID NO: 132667 - RNA, 19 nt, Artificial Sequence
  Description of Artificial Sequence: Synthetic oligonucleotide
gcgccguaguacagguggu

SEQ ID NO: 132668 - RNA, 19 nt, Artificial Sequence
  Description of Artificial Sequence: Synthetic oligonucleotide
cggcggcgaucgcucgccg

SEQ ID NO: 132669 - RNA, 19 nt, Artificial Sequence
  Description of Artificial Sequence: Synthetic oligonucleotide
cggcagacgcgccguagua

SEQ ID NO: 132670 - RNA, 19 nt, Artificial Sequence
  Description of Artificial Sequence: Synthetic oligonucleotide
cuccccggcuuggucucau

SEQ ID NO: 132671 - RNA, 19 nt, Artificial Sequence
  Description of Artificial Sequence: Synthetic oligonucleotide
cgaugccgaugcccgacgu

SEQ ID NO: 132672 - RNA, 19 nt, Artificial Sequence
  Description of Artificial Sequence: Synthetic oligonucleotide
ccgcucggaaaaggacaaa

SEQ ID NO: 132673 - RNA, 19 nt, Artificial Sequence
  Description of Artificial Sequence: Synthetic oligonucleotide
gcgggucaccgaaggcggu

SEQ ID NO: 132674 - RNA, 19 nt, Artificial Sequence
  Description of Artificial Sequence: Synthetic oligonucleotide
cggcggcgaguaggugaag

SEQ ID NO: 132675 - RNA, 19 nt, Artificial Sequence
  Description of Artificial Sequence: Synthetic oligonucleotide
cgguagcgccucgcucauc

SEQ ID NO: 132676 - RNA, 19 nt, Artificial Sequence
  Description of Artificial Sequence: Synthetic oligonucleotide
ggcgcgcggguggcauguu

SEQ ID NO: 132677 - RNA, 19 nt, Artificial Sequence
  Description of Artificial Sequence: Synthetic oligonucleotide
aaggguguuacgccgagcc

SEQ ID NO: 132678 - RNA, 19 nt, Artificial Sequence
  Description of Artificial Sequence: Synthetic oligonucleotide
agaaugacgacgccggucc

SEQ ID NO: 132679 - RNA, 19 nt, Artificial Sequence
  Description of Artificial Sequence: Synthetic oligonucleotide
ucuauaaugagacgaggcc

SEQ ID NO: 132680 - RNA, 19 nt, Artificial Sequence
  Description of Artificial Sequence: Synthetic oligonucleotide
aacuuaauuccaaaggcgg

SEQ ID NO: 132681 - RNA, 19 nt, Artificial Sequence
  Description of Artificial Sequence: Synthetic oligonucleotide
agaaucucgcauuugcagc

SEQ ID NO: 132682 - RNA, 19 nt, Artificial Sequence
  Description of Artificial Sequence: Synthetic oligonucleotide
aagaaucucgcauuugcag

SEQ ID NO: 132683 - RNA, 19 nt, Artificial Sequence
  Description of Artificial Sequence: Synthetic oligonucleotide
aagcccgugaacuucgugg

SEQ ID NO: 132684 - RNA, 19 nt, Artificial Sequence
  Description of Artificial Sequence: Synthetic oligonucleotide
uauaaugagacgaggcccc

SEQ ID NO: 132685 - RNA, 19 nt, Artificial Sequence
  Description of Artificial Sequence: Synthetic oligonucleotide
ucuguucggaacuuugugg

SEQ ID NO: 132686 - RNA, 19 nt, Artificial Sequence
  Description of Artificial Sequence: Synthetic oligonucleotide
auacaugguguuuguaagc

SEQ ID NO: 132687 - RNA, 19 nt, Artificial Sequence
  Description of Artificial Sequence: Synthetic oligonucleotide
agccauaacaacuacacaa

SEQ ID NO: 132688 - RNA, 19 nt, Artificial Sequence
  Description of Artificial Sequence: Synthetic oligonucleotide
uaaagagacaguuccugag

SEQ ID NO: 132689 - RNA, 19 nt, Artificial Sequence
  Description of Artificial Sequence: Synthetic oligonucleotide
cuacgcaccauacuguucg

SEQ ID NO: 132690 - RNA, 19 nt, Artificial Sequence
  Description of Artificial Sequence: Synthetic oligonucleotide
cucuauaaugagacgaggc

SEQ ID NO: 132691 - RNA, 19 nt, Artificial Sequence
  Description of Artificial Sequence: Synthetic oligonucleotide
ugguagacgaacuuguacu

SEQ ID NO: 132692 - RNA, 19 nt, Artificial Sequence
  Description of Artificial Sequence: Synthetic oligonucleotide
uuggugugacgccugaccg

SEQ ID NO: 132693 - RNA, 19 nt, Artificial Sequence
  Description of Artificial Sequence: Synthetic oligonucleotide
uagaucaugagcucagaca

SEQ ID NO: 132694 - RNA, 19 nt, Artificial Sequence
  Description of Artificial Sequence: Synthetic oligonucleotide
gacagaaugacgacgccgg

SEQ ID NO: 132695 - RNA, 19 nt, Artificial Sequence
  Description of Artificial Sequence: Synthetic oligonucleotide
cuauaaugagacgaggccc

SEQ ID NO: 132696 - RNA, 19 nt, Artificial Sequence
  Description of Artificial Sequence: Synthetic oligonucleotide
gaaucucgcauuugcagcc

SEQ ID NO: 132697 - RNA, 19 nt, Artificial Sequence
  Description of Artificial Sequence: Synthetic oligonucleotide
aaggucuccuguccaaauc

SEQ ID NO: 132698 - RNA, 19 nt, Artificial Sequence
  Description of Artificial Sequence: Synthetic oligonucleotide
auaagcuccacccuguuuu

SEQ ID NO: 132699 - RNA, 19 nt, Artificial Sequence
  Description of Artificial Sequence: Synthetic oligonucleotide
aauccuugcacguccucug

SEQ ID NO: 132700 - RNA, 19 nt, Artificial Sequence
  Description of Artificial Sequence: Synthetic oligonucleotide
aaaauccgcuugcacagcu

SEQ ID NO: 132701 - RNA, 19 nt, Artificial Sequence
  Description of Artificial Sequence: Synthetic oligonucleotide
gacgaacuuguacugcgcg

SEQ ID NO: 132702 - RNA, 19 nt, Artificial Sequence
  Description of Artificial Sequence: Synthetic oligonucleotide
guuacgccgagccaugggg

SEQ ID NO: 132703 - RNA, 19 nt, Artificial Sequence
  Description of Artificial Sequence: Synthetic oligonucleotide
uugguagacgaacuuguac

SEQ ID NO: 132704 - RNA, 19 nt, Artificial Sequence
  Description of Artificial Sequence: Synthetic oligonucleotide
uccgggaaaucaaaugagc

SEQ ID NO: 132705 - RNA, 19 nt, Artificial Sequence
  Description of Artificial Sequence: Synthetic oligonucleotide
uacucaggacauuguagcg

SEQ ID NO: 132706 - RNA, 19 nt, Artificial Sequence
  Description of Artificial Sequence: Synthetic oligonucleotide
aaugagacgaggccccacu

SEQ ID NO: 132707 - RNA, 19 nt, Artificial Sequence
  Description of Artificial Sequence: Synthetic oligonucleotide
ucguuagcgagcuugucca

SEQ ID NO: 132708 - RNA, 19 nt, Artificial Sequence
  Description of Artificial Sequence: Synthetic oligonucleotide
augccuacgcaccauacug

SEQ ID NO: 132709 - RNA, 19 nt, Artificial Sequence
  Description of Artificial Sequence: Synthetic oligonucleotide
cugugugcgagacuguggg

SEQ ID NO: 132710 - RNA, 19 nt, Artificial Sequence
  Description of Artificial Sequence: Synthetic oligonucleotide
ucgacuucguugauguaca

SEQ ID NO: 132711 - RNA, 19 nt, Artificial Sequence
  Description of Artificial Sequence: Synthetic oligonucleotide
ggacagaaauccuugcacg

SEQ ID NO: 132712 - RNA, 19 nt, Artificial Sequence
  Description of Artificial Sequence: Synthetic oligonucleotide
aagacugguggaccacggg

SEQ ID NO: 132713 - RNA, 19 nt, Artificial Sequence
  Description of Artificial Sequence: Synthetic oligonucleotide
acauuguagcgccgagucc

SEQ ID NO: 132714 - RNA, 19 nt, Artificial Sequence
  Description of Artificial Sequence: Synthetic oligonucleotide
cuugauuguccuucaccgg

SEQ ID NO: 132715 - RNA, 19 nt, Artificial Sequence
  Description of Artificial Sequence: Synthetic oligonucleotide
  modified_base (5)..(5): a, c, u, g, unknown or other
accgngagcccauucagug

SEQ ID NO: 132716 - RNA, 19 nt, Artificial Sequence
  Description of Artificial Sequence: Synthetic oligonucleotide
ugugacgccugaccgacug

SEQ ID NO: 132717 - RNA, 19 nt, Artificial Sequence
  Description of Artificial Sequence: Synthetic oligonucleotide
cuuguggugauacugggga

SEQ ID NO: 132718 - RNA, 19 nt, Artificial Sequence
  Description of Artificial Sequence: Synthetic oligonucleotide
ugugguugcauagcaacca

SEQ ID NO: 132719 - RNA, 19 nt, Artificial Sequence
  Description of Artificial Sequence: Synthetic oligonucleotide
uggacgaggacuugguaga

SEQ ID NO: 132720 - RNA, 19 nt, Artificial Sequence
  Description of Artificial Sequence: Synthetic oligonucleotide
aguaucgauggcuuuuggu

SEQ ID NO: 132721 - RNA, 19 nt, Artificial Sequence
  Description of Artificial Sequence: Synthetic oligonucleotide
aaauccuugcacguccucu

SEQ ID NO: 132722 - RNA, 19 nt, Artificial Sequence
  Description of Artificial Sequence: Synthetic oligonucleotide
agcgagcuuguccagaugu

SEQ ID NO: 132723 - RNA, 19 nt, Artificial Sequence
  Description of Artificial Sequence: Synthetic oligonucleotide
accuuuaacccugugguug

SEQ ID NO: 132724 - RNA, 19 nt, Artificial Sequence
  Description of Artificial Sequence: Synthetic oligonucleotide
uaacccugugguugcauag

SEQ ID NO: 132725 - RNA, 19 nt, Artificial Sequence
  Description of Artificial Sequence: Synthetic oligonucleotide
gggguuagaauaaagaauc

SEQ ID NO: 132726 - RNA, 19 nt, Artificial Sequence
  Description of Artificial Sequence: Synthetic oligonucleotide
aauccauccaagcgcucga

SEQ ID NO: 132727 - RNA, 19 nt, Artificial Sequence
  Description of Artificial Sequence: Synthetic oligonucleotide
uguagcgccgaguccugcg

SEQ ID NO: 132728 - RNA, 19 nt, Artificial Sequence
  Description of Artificial Sequence: Synthetic oligonucleotide
cauccgggaaaucaaauga

SEQ ID NO: 132729 - RNA, 19 nt, Artificial Sequence
  Description of Artificial Sequence: Synthetic oligonucleotide
ggcguuuucuggcagagug

SEQ ID NO: 132730 - RNA, 19 nt, Artificial Sequence
  Description of Artificial Sequence: Synthetic oligonucleotide
aggacauacucucguagga

SEQ ID NO: 132731 - RNA, 19 nt, Artificial Sequence
  Description of Artificial Sequence: Synthetic oligonucleotide
ucguaggaauucuugggaa

SEQ ID NO: 132732 - RNA, 19 nt, Artificial Sequence
  Description of Artificial Sequence: Synthetic oligonucleotide
gaccauggcgaucacguuc

SEQ ID NO: 132733 - RNA, 19 nt, Artificial Sequence
  Description of Artificial Sequence: Synthetic oligonucleotide
guagaucaugagcucagac

SEQ ID NO: 132734 - RNA, 19 nt, Artificial Sequence
  Description of Artificial Sequence: Synthetic oligonucleotide
guaaccgcccuucaagcac

SEQ ID NO: 132735 - RNA, 19 nt, Artificial Sequence
  Description of Artificial Sequence: Synthetic oligonucleotide
aggcggaaaauaaauuauc

SEQ ID NO: 132736 - RNA, 19 nt, Artificial Sequence
  Description of Artificial Sequence: Synthetic oligonucleotide
ucgcucaccuccuguaaag

SEQ ID NO: 132737 - RNA, 19 nt, Artificial Sequence
  Description of Artificial Sequence: Synthetic oligonucleotide
acgaggccccacuugacag

SEQ ID NO: 132738 - RNA, 19 nt, Artificial Sequence
  Description of Artificial Sequence: Synthetic oligonucleotide
cucucucuauaaugagacg

SEQ ID NO: 132739 - RNA, 19 nt, Artificial Sequence
  Description of Artificial Sequence: Synthetic oligonucleotide
gauccggcugcgcucggcg

SEQ ID NO: 132740 - RNA, 19 nt, Artificial Sequence
  Description of Artificial Sequence: Synthetic oligonucleotide
cacucgaugacauugcugu

SEQ ID NO: 132741 - RNA, 19 nt, Artificial Sequence
  Description of Artificial Sequence: Synthetic oligonucleotide
aaccaaaggccgaaguagu

SEQ ID NO: 132742 - RNA, 19 nt, Artificial Sequence
  Description of Artificial Sequence: Synthetic oligonucleotide
aacaggacauacucucgua

SEQ ID NO: 132743 - RNA, 19 nt, Artificial Sequence
  Description of Artificial Sequence: Synthetic oligonucleotide
uaaccgcccuucaagcaca

SEQ ID NO: 132744 - RNA, 19 nt, Artificial Sequence
  Description of Artificial Sequence: Synthetic oligonucleotide
gguagacgaacuuguacug

SEQ ID NO: 132745 - RNA, 19 nt, Artificial Sequence
  Description of Artificial Sequence: Synthetic oligonucleotide
ugugcgagacuguggguga

SEQ ID NO: 132746 - RNA, 19 nt, Artificial Sequence
  Description of Artificial Sequence: Synthetic oligonucleotide
cuguaaagacugguggacc

SEQ ID NO: 132747 - RNA, 19 nt, Artificial Sequence
  Description of Artificial Sequence: Synthetic oligonucleotide
gacugguggaccacgggag

SEQ ID NO: 132748 - RNA, 19 nt, Artificial Sequence
  Description of Artificial Sequence: Synthetic oligonucleotide
ucucggauccggcugcgcu

SEQ ID NO: 132749 - RNA, 19 nt, Artificial Sequence
  Description of Artificial Sequence: Synthetic oligonucleotide
auagguggcugagcugugc

SEQ ID NO: 132750 - RNA, 19 nt, Artificial Sequence
  Description of Artificial Sequence: Synthetic oligonucleotide
gaacuucguggccaccugc

SEQ ID NO: 132751 - RNA, 19 nt, Artificial Sequence
  Description of Artificial Sequence: Synthetic oligonucleotide
ugcgcucggcguuuucugg

SEQ ID NO: 132752 - RNA, 19 nt, Artificial Sequence
  Description of Artificial Sequence: Synthetic oligonucleotide
ccgggaaaucaaaugagcc

SEQ ID NO: 132753 - RNA, 19 nt, Artificial Sequence
  Description of Artificial Sequence: Synthetic oligonucleotide
cuucguugauguacaugag

SEQ ID NO: 132754 - RNA, 19 nt, Artificial Sequence
  Description of Artificial Sequence: Synthetic oligonucleotide
caaugccccguuuacugac

SEQ ID NO: 132755 - RNA, 19 nt, Artificial Sequence
  Description of Artificial Sequence: Synthetic oligonucleotide
cauacucucguaggaauuc

SEQ ID NO: 132756 - RNA, 19 nt, Artificial Sequence
  Description of Artificial Sequence: Synthetic oligonucleotide
gaccuuccgaguuaccaga

SEQ ID NO: 132757 - RNA, 19 nt, Artificial Sequence
  Description of Artificial Sequence: Synthetic oligonucleotide
agacgaacuuguacugcgc

SEQ ID NO: 132758 - RNA, 19 nt, Artificial Sequence
  Description of Artificial Sequence: Synthetic oligonucleotide
cauccugucgacugucuuc

SEQ ID NO: 132759 - RNA, 19 nt, Artificial Sequence
  Description of Artificial Sequence: Synthetic oligonucleotide
auaggaaacaggacauacu

SEQ ID NO: 132760 - RNA, 19 nt, Artificial Sequence
  Description of Artificial Sequence: Synthetic oligonucleotide
uccuagucaucaucucucu

SEQ ID NO: 132761 - RNA, 19 nt, Artificial Sequence
  Description of Artificial Sequence: Synthetic oligonucleotide
ucccgaaggguguuacgcc

SEQ ID NO: 132762 - RNA, 19 nt, Artificial Sequence
  Description of Artificial Sequence: Synthetic oligonucleotide
ugccuacgcaccauacugu

SEQ ID NO: 132763 - RNA, 19 nt, Artificial Sequence
  Description of Artificial Sequence: Synthetic oligonucleotide
auccgggaaaucaaaugag

SEQ ID NO: 132764 - RNA, 19 nt, Artificial Sequence
  Description of Artificial Sequence: Synthetic oligonucleotide
guagacgaacuuguacugc

SEQ ID NO: 132765 - RNA, 19 nt, Artificial Sequence
  Description of Artificial Sequence: Synthetic oligonucleotide
uuaacccugugguugcaua

SEQ ID NO: 132766 - RNA, 19 nt, Artificial Sequence
  Description of Artificial Sequence: Synthetic oligonucleotide
gacuucguugauguacaug

SEQ ID NO: 132767 - RNA, 19 nt, Artificial Sequence
  Description of Artificial Sequence: Synthetic oligonucleotide
gguuuaauuugcauguaga

SEQ ID NO: 132768 - RNA, 19 nt, Artificial Sequence
  Description of Artificial Sequence: Synthetic oligonucleotide
guuaccagaucagggcugc

SEQ ID NO: 132769 - RNA, 19 nt, Artificial Sequence
  Description of Artificial Sequence: Synthetic oligonucleotide
gacgaggacuugguagacg

SEQ ID NO: 132770 - RNA, 19 nt, Artificial Sequence
  Description of Artificial Sequence: Synthetic oligonucleotide
cauggggauguugagugac

SEQ ID NO: 132771 - RNA, 19 nt, Artificial Sequence
  Description of Artificial Sequence: Synthetic oligonucleotide
acgaacuuguacugcgcga

SEQ ID NO: 132772 - RNA, 19 nt, Artificial Sequence
  Description of Artificial Sequence: Synthetic oligonucleotide
ggugguggccuaaagagac

SEQ ID NO: 132773 - RNA, 19 nt, Artificial Sequence
  Description of Artificial Sequence: Synthetic oligonucleotide
guggcggugcugaagacgc

SEQ ID NO: 132774 - RNA, 19 nt, Artificial Sequence
  Description of Artificial Sequence: Synthetic oligonucleotide
gaguuaccagaucagggcu

SEQ ID NO: 132775 - RNA, 19 nt, Artificial Sequence
  Description of Artificial Sequence: Synthetic oligonucleotide
cucgcauuugcagcccucg

SEQ ID NO: 132776 - RNA, 19 nt, Artificial Sequence
  Description of Artificial Sequence: Synthetic oligonucleotide
ggugauacuggggaagccc

SEQ ID NO: 132777 - RNA, 19 nt, Artificial Sequence
  Description of Artificial Sequence: Synthetic oligonucleotide
uucggaacuuuguggugac

SEQ ID NO: 132778 - RNA, 19 nt, Artificial Sequence
  Description of Artificial Sequence: Synthetic oligonucleotide
gauggcccgugucucagca

SEQ ID NO: 132779 - RNA, 19 nt, Artificial Sequence
  Description of Artificial Sequence: Synthetic oligonucleotide
ugauacuggggaagcccgu

SEQ ID NO: 132780 - RNA, 19 nt, Artificial Sequence
  Description of Artificial Sequence: Synthetic oligonucleotide
ugucgacugucuucccgcc

SEQ ID NO: 132781 - RNA, 19 nt, Artificial Sequence
  Description of Artificial Sequence: Synthetic oligonucleotide
acugugugcgagacugugg

SEQ ID NO: 132782 - RNA, 19 nt, Artificial Sequence
  Description of Artificial Sequence: Synthetic oligonucleotide
uaccagaucagggcugcug

SEQ ID NO: 132783 - RNA, 19 nt, Artificial Sequence
  Description of Artificial Sequence: Synthetic oligonucleotide
uacuguucgccguggugcu

SEQ ID NO: 132784 - RNA, 19 nt, Artificial Sequence
  Description of Artificial Sequence: Synthetic oligonucleotide
aguuaccagaucagggcug

SEQ ID NO: 132785 - RNA, 19 nt, Artificial Sequence
  Description of Artificial Sequence: Synthetic oligonucleotide
ucggcguuuucuggcagag

SEQ ID NO: 132786 - RNA, 19 nt, Artificial Sequence
  Description of Artificial Sequence: Synthetic oligonucleotide
gcagaggcucguuagcgag

SEQ ID NO: 132787 - RNA, 19 nt, Artificial Sequence
  Description of Artificial Sequence: Synthetic oligonucleotide
auccggguaacaaagcaau

SEQ ID NO: 132788 - RNA, 19 nt, Artificial Sequence
  Description of Artificial Sequence: Synthetic oligonucleotide
acgcaccauacuguucgcc

SEQ ID NO: 132789 - RNA, 19 nt, Artificial Sequence
  Description of Artificial Sequence: Synthetic oligonucleotide
uggugugacgccugaccga

SEQ ID NO: 132790 - RNA, 19 nt, Artificial Sequence
  Description of Artificial Sequence: Synthetic oligonucleotide
cuggccggacagcaggugc

SEQ ID NO: 132791 - RNA, 19 nt, Artificial Sequence
  Description of Artificial Sequence: Synthetic oligonucleotide
gacgaggccccacuugaca

SEQ ID NO: 132792 - RNA, 19 nt, Artificial Sequence
  Description of Artificial Sequence: Synthetic oligonucleotide
gauccggguaacaaagcaa

SEQ ID NO: 132793 - RNA, 19 nt, Artificial Sequence
  Description of Artificial Sequence: Synthetic oligonucleotide
aaaggccgaaguagugugu

SEQ ID NO: 132794 - RNA, 19 nt, Artificial Sequence
  Description of Artificial Sequence: Synthetic oligonucleotide
ugacgccugaccgacugga

SEQ ID NO: 132795 - RNA, 19 nt, Artificial Sequence
  Description of Artificial Sequence: Synthetic oligonucleotide
ccuuuaacccugugguugc

SEQ ID NO: 132796 - RNA, 19 nt, Artificial Sequence
  Description of Artificial Sequence: Synthetic oligonucleotide
ugcagguaauacugauauc

SEQ ID NO: 132797 - RNA, 19 nt, Artificial Sequence
  Description of Artificial Sequence: Synthetic oligonucleotide
uuggauggcccgugucuca

SEQ ID NO: 132798 - RNA, 19 nt, Artificial Sequence
  Description of Artificial Sequence: Synthetic oligonucleotide
aagguuuaauuugcaugua

SEQ ID NO: 132799 - RNA, 19 nt, Artificial Sequence
  Description of Artificial Sequence: Synthetic oligonucleotide
agaggcucguuagcgagcu

SEQ ID NO: 132800 - RNA, 19 nt, Artificial Sequence
  Description of Artificial Sequence: Synthetic oligonucleotide
ggccaaauccauaggaaac

SEQ ID NO: 132801 - RNA, 19 nt, Artificial Sequence
  Description of Artificial Sequence: Synthetic oligonucleotide
cucggguggcauccugucg

SEQ ID NO: 132802 - RNA, 19 nt, Artificial Sequence
  Description of Artificial Sequence: Synthetic oligonucleotide
cuguucggaacuuuguggu

SEQ ID NO: 132803 - RNA, 19 nt, Artificial Sequence
  Description of Artificial Sequence: Synthetic oligonucleotide
cagaggcucguuagcgagc

SEQ ID NO: 132804 - RNA, 19 nt, Artificial Sequence
  Description of Artificial Sequence: Synthetic oligonucleotide
uccaugccuacgcaccaua

SEQ ID NO: 132805 - RNA, 19 nt, Artificial Sequence
  Description of Artificial Sequence: Synthetic oligonucleotide
cuuggauggcccgugucuc

SEQ ID NO: 132806 - RNA, 19 nt, Artificial Sequence
  Description of Artificial Sequence: Synthetic oligonucleotide
gaacucggguggcauccug

SEQ ID NO: 132807 - RNA, 19 nt, Artificial Sequence
  Description of Artificial Sequence: Synthetic oligonucleotide
uguucgccguggugcuugg

SEQ ID NO: 132808 - RNA, 19 nt, Artificial Sequence
  Description of Artificial Sequence: Synthetic oligonucleotide
agggugcaccguaaccgcc

SEQ ID NO: 132809 - RNA, 19 nt, Artificial Sequence
  Description of Artificial Sequence: Synthetic oligonucleotide
uacgcaccauacuguucgc

SEQ ID NO: 132810 - RNA, 19 nt, Artificial Sequence
  Description of Artificial Sequence: Synthetic oligonucleotide
agcgccgaguccugcgaag

SEQ ID NO: 132811 - RNA, 19 nt, Artificial Sequence
  Description of Artificial Sequence: Synthetic oligonucleotide
uuuaacccugugguugcau

SEQ ID NO: 132812 - RNA, 19 nt, Artificial Sequence
  Description of Artificial Sequence: Synthetic oligonucleotide
cacgaugggagggugccug

SEQ ID NO: 132813 - RNA, 19 nt, Artificial Sequence
  Description of Artificial Sequence: Synthetic oligonucleotide
uacugcgcgauggucugga

SEQ ID NO: 132814 - RNA, 19 nt, Artificial Sequence
  Description of Artificial Sequence: Synthetic oligonucleotide
uccggguaacaaagcaauu

SEQ ID NO: 132815 - RNA, 19 nt, Artificial Sequence
  Description of Artificial Sequence: Synthetic oligonucleotide
agcccgggaggacacguga

SEQ ID NO: 132816 - RNA, 19 nt, Artificial Sequence
  Description of Artificial Sequence: Synthetic oligonucleotide
uaaugagacgaggccccac

SEQ ID NO: 132817 - RNA, 19 nt, Artificial Sequence
  Description of Artificial Sequence: Synthetic oligonucleotide
gcuuuugguccguccaccc

SEQ ID NO: 132818 - RNA, 19 nt, Artificial Sequence
  Description of Artificial Sequence: Synthetic oligonucleotide
agaaauccuugcacguccu

SEQ ID NO: 132819 - RNA, 19 nt, Artificial Sequence
  Description of Artificial Sequence: Synthetic oligonucleotide
cugaggaaccaaaggccga

SEQ ID NO: 132820 - RNA, 19 nt, Artificial Sequence
  Description of Artificial Sequence: Synthetic oligonucleotide
agggccaaauccauaggaa

SEQ ID NO: 132821 - RNA, 19 nt, Artificial Sequence
  Description of Artificial Sequence: Synthetic oligonucleotide
aucucgcauuugcagcccu

SEQ ID NO: 132822 - RNA, 19 nt, Artificial Sequence
  Description of Artificial Sequence: Synthetic oligonucleotide
gccaugacacauugggcac

SEQ ID NO: 132823 - RNA, 19 nt, Artificial Sequence
  Description of Artificial Sequence: Synthetic oligonucleotide
gggccaaauccauaggaaa

SEQ ID NO: 132824 - RNA, 19 nt, Artificial Sequence
  Description of Artificial Sequence: Synthetic oligonucleotide
aggguguuacgccgagcca

SEQ ID NO: 132825 - RNA, 19 nt, Artificial Sequence
  Description of Artificial Sequence: Synthetic oligonucleotide
gcucaccuccuguaaagac

SEQ ID NO: 132826 - RNA, 19 nt, Artificial Sequence
  Description of Artificial Sequence: Synthetic oligonucleotide
auaaugagacgaggcccca

SEQ ID NO: 132827 - RNA, 19 nt, Artificial Sequence
  Description of Artificial Sequence: Synthetic oligonucleotide
aggcagauguugucuggaa

SEQ ID NO: 132828 - RNA, 19 nt, Artificial Sequence
  Description of Artificial Sequence: Synthetic oligonucleotide
cucggauccggcugcgcuc

SEQ ID NO: 132829 - RNA, 19 nt, Artificial Sequence
  Description of Artificial Sequence: Synthetic oligonucleotide
gacgccgguccuucccacc

SEQ ID NO: 132830 - RNA, 19 nt, Artificial Sequence
  Description of Artificial Sequence: Synthetic oligonucleotide
  modified_base (7)..(7): a, c, u, g, unknown or other
ccaccgngagcccauucag

SEQ ID NO: 132831 - RNA, 19 nt, Artificial Sequence
  Description of Artificial Sequence: Synthetic oligonucleotide
gugcacucgaugacauugc

SEQ ID NO: 132832 - RNA, 19 nt, Artificial Sequence
  Description of Artificial Sequence: Synthetic oligonucleotide
gggaagcccgugaacuucg

SEQ ID NO: 132833 - RNA, 19 nt, Artificial Sequence
  Description of Artificial Sequence: Synthetic oligonucleotide
ucagcccgggaggacacgu

SEQ ID NO: 132834 - RNA, 19 nt, Artificial Sequence
  Description of Artificial Sequence: Synthetic oligonucleotide
cugcgcucggcguuuucug

SEQ ID NO: 132835 - RNA, 19 nt, Artificial Sequence
  Description of Artificial Sequence: Synthetic oligonucleotide
gucgacugucuucccgccc

SEQ ID NO: 132836 - RNA, 19 nt, Artificial Sequence
  Description of Artificial Sequence: Synthetic oligonucleotide
acauacucucguaggaauu

SEQ ID NO: 132837 - RNA, 19 nt, Artificial Sequence
  Description of Artificial Sequence: Synthetic oligonucleotide
gggaacucggguggcaucc

SEQ ID NO: 132838 - RNA, 19 nt, Artificial Sequence
  Description of Artificial Sequence: Synthetic oligonucleotide
gaaggguguuacgccgagc

SEQ ID NO: 132839 - RNA, 19 nt, Artificial Sequence
  Description of Artificial Sequence: Synthetic oligonucleotide
gugacgccugaccgacugg

SEQ ID NO: 132840 - RNA, 19 nt, Artificial Sequence
  Description of Artificial Sequence: Synthetic oligonucleotide
cagaguggcggugcugaag

SEQ ID NO: 132841 - RNA, 19 nt, Artificial Sequence
  Description of Artificial Sequence: Synthetic oligonucleotide
ccguaaccgcccuucaagc

SEQ ID NO: 132842 - RNA, 19 nt, Artificial Sequence
  Description of Artificial Sequence: Synthetic oligonucleotide
ggugugacgccugaccgac

SEQ ID NO: 132843 - RNA, 19 nt, Artificial Sequence
  Description of Artificial Sequence: Synthetic oligonucleotide
cuugguagacgaacuugua

SEQ ID NO: 132844 - RNA, 19 nt, Artificial Sequence
  Description of Artificial Sequence: Synthetic oligonucleotide
aguggcgauguagugccau

SEQ ID NO: 132845 - RNA, 19 nt, Artificial Sequence
  Description of Artificial Sequence: Synthetic oligonucleotide
uggggaagcccgugaacuu

SEQ ID NO: 132846 - RNA, 19 nt, Artificial Sequence
  Description of Artificial Sequence: Synthetic oligonucleotide
cgcaaugccccguuuacug

SEQ ID NO: 132847 - RNA, 19 nt, Artificial Sequence
  Description of Artificial Sequence: Synthetic oligonucleotide
  modified_base (15)..(15): a, c, u, g, unknown or other
gacgcgggccaccgngagc

SEQ ID NO: 132848 - RNA, 19 nt, Artificial Sequence
  Description of Artificial Sequence: Synthetic oligonucleotide
acgccugaccgacuggauu

SEQ ID NO: 132849 - RNA, 19 nt, Artificial Sequence
  Description of Artificial Sequence: Synthetic oligonucleotide
gaccacgaugggagggugc

SEQ ID NO: 132850 - RNA, 19 nt, Artificial Sequence
  Description of Artificial Sequence: Synthetic oligonucleotide
  modified_base (4)..(4): a, c, u, g, unknown or other
ccgngagcccauucagugc

SEQ ID NO: 132851 - RNA, 19 nt, Artificial Sequence
  Description of Artificial Sequence: Synthetic oligonucleotide
gccauaacaacuacacaaa

SEQ ID NO: 132852 - RNA, 19 nt, Artificial Sequence
  Description of Artificial Sequence: Synthetic oligonucleotide
caucuaugggaacucgggu

SEQ ID NO: 132853 - RNA, 19 nt, Artificial Sequence
  Description of Artificial Sequence: Synthetic oligonucleotide
ugcgagacugugggugaca

SEQ ID NO: 132854 - RNA, 19 nt, Artificial Sequence
  Description of Artificial Sequence: Synthetic oligonucleotide
aaggcggauccggguaaca

SEQ ID NO: 132855 - RNA, 19 nt, Artificial Sequence
  Description of Artificial Sequence: Synthetic oligonucleotide
gauaagcuccacccuguuu

SEQ ID NO: 132856 - RNA, 19 nt, Artificial Sequence
  Description of Artificial Sequence: Synthetic oligonucleotide
uccuuuugacuugcaggua

SEQ ID NO: 132857 - RNA, 19 nt, Artificial Sequence
  Description of Artificial Sequence: Synthetic oligonucleotide
gcuggcgaggucuggggug

SEQ ID NO: 132858 - RNA, 19 nt, Artificial Sequence
  Description of Artificial Sequence: Synthetic oligonucleotide
augagacgaggccccacuu

SEQ ID NO: 132859 - RNA, 19 nt, Artificial Sequence
  Description of Artificial Sequence: Synthetic oligonucleotide
aaauccgcuugcacagcua

SEQ ID NO: 132860 - RNA, 19 nt, Artificial Sequence
  Description of Artificial Sequence: Synthetic oligonucleotide
ucggaacuuuguggugacc

SEQ ID NO: 132861 - RNA, 19 nt, Artificial Sequence
  Description of Artificial Sequence: Synthetic oligonucleotide
guagcgccgaguccugcga

SEQ ID NO: 132862 - RNA, 19 nt, Artificial Sequence
  Description of Artificial Sequence: Synthetic oligonucleotide
  modified_base (16)..(16): a, c, u, g, unknown or other
ggacgcgggccaccgngag

SEQ ID NO: 132863 - RNA, 19 nt, Artificial Sequence
  Description of Artificial Sequence: Synthetic oligonucleotide
uagcgccgaguccugcgaa

SEQ ID NO: 132864 - RNA, 19 nt, Artificial Sequence
  Description of Artificial Sequence: Synthetic oligonucleotide
gaaggcggauccggguaac

SEQ ID NO: 132865 - RNA, 19 nt, Artificial Sequence
  Description of Artificial Sequence: Synthetic oligonucleotide
ugaccauggcgaucacguu

SEQ ID NO: 132866 - RNA, 19 nt, Artificial Sequence
  Description of Artificial Sequence: Synthetic oligonucleotide
uuguagcgccgaguccugc

SEQ ID NO: 132867 - RNA, 19 nt, Artificial Sequence
  Description of Artificial Sequence: Synthetic oligonucleotide
ccucgaggcacuccugccc

SEQ ID NO: 132868 - RNA, 19 nt, Artificial Sequence
  Description of Artificial Sequence: Synthetic oligonucleotide
caggacauuguagcgccga

SEQ ID NO: 132869 - RNA, 19 nt, Artificial Sequence
  Description of Artificial Sequence: Synthetic oligonucleotide
uccaagcgcucgacuucgu

SEQ ID NO: 132870 - RNA, 19 nt, Artificial Sequence
  Description of Artificial Sequence: Synthetic oligonucleotide
ccgcuugcacagcuaagcc

SEQ ID NO: 132871 - RNA, 19 nt, Artificial Sequence
  Description of Artificial Sequence: Synthetic oligonucleotide
gguguuacgccgagccaug

SEQ ID NO: 132872 - RNA, 19 nt, Artificial Sequence
  Description of Artificial Sequence: Synthetic oligonucleotide
ugacgacgccgguccuucc

SEQ ID NO: 132873 - RNA, 19 nt, Artificial Sequence
  Description of Artificial Sequence: Synthetic oligonucleotide
cugacauacuuguggcggu

SEQ ID NO: 132874 - RNA, 19 nt, Artificial Sequence
  Description of Artificial Sequence: Synthetic oligonucleotide
  modified_base (8)..(8): a, c, u, g, unknown or other
gccaccgngagcccauuca

SEQ ID NO: 132875 - RNA, 19 nt, Artificial Sequence
  Description of Artificial Sequence: Synthetic oligonucleotide
guacugcgcgauggucugg

SEQ ID NO: 132876 - RNA, 19 nt, Artificial Sequence
  Description of Artificial Sequence: Synthetic oligonucleotide
ggacauacucucguaggaa

SEQ ID NO: 132877 - RNA, 19 nt, Artificial Sequence
  Description of Artificial Sequence: Synthetic oligonucleotide
cauuaugcucuaggcagua

SEQ ID NO: 132878 - RNA, 19 nt, Artificial Sequence
  Description of Artificial Sequence: Synthetic oligonucleotide
aggcggauccggguaacaa

SEQ ID NO: 132879 - RNA, 19 nt, Artificial Sequence
  Description of Artificial Sequence: Synthetic oligonucleotide
gggugcaccguaaccgccc

SEQ ID NO: 132880 - RNA, 19 nt, Artificial Sequence
  Description of Artificial Sequence: Synthetic oligonucleotide
gcgcucggcguuuucuggc

SEQ ID NO: 132881 - RNA, 19 nt, Artificial Sequence
  Description of Artificial Sequence: Synthetic oligonucleotide
ucgauggcuuuugguccgu

SEQ ID NO: 132882 - RNA, 19 nt, Artificial Sequence
  Description of Artificial Sequence: Synthetic oligonucleotide
ccuacgcaccauacuguuc

SEQ ID NO: 132883 - RNA, 19 nt, Artificial Sequence
  Description of Artificial Sequence: Synthetic oligonucleotide
ucgugggcacuuccaccuu

SEQ ID NO: 132884 - RNA, 19 nt, Artificial Sequence
  Description of Artificial Sequence: Synthetic oligonucleotide
guccugccgcaaugccccg

SEQ ID NO: 132885 - RNA, 19 nt, Artificial Sequence
  Description of Artificial Sequence: Synthetic oligonucleotide
cagcccgggaggacacgug

SEQ ID NO: 132886 - RNA, 19 nt, Artificial Sequence
  Description of Artificial Sequence: Synthetic oligonucleotide
ggcgauguagugccauucu

SEQ ID NO: 132887 - RNA, 19 nt, Artificial Sequence
  Description of Artificial Sequence: Synthetic oligonucleotide
ucucgcuugcuggcucuua

SEQ ID NO: 132888 - RNA, 19 nt, Artificial Sequence
  Description of Artificial Sequence: Synthetic oligonucleotide
ggguuagaauaaagaaucu

SEQ ID NO: 132889 - RNA, 19 nt, Artificial Sequence
  Description of Artificial Sequence: Synthetic oligonucleotide
cuucccgcccugggacgcg

SEQ ID NO: 132890 - RNA, 19 nt, Artificial Sequence
  Description of Artificial Sequence: Synthetic oligonucleotide
gugguggccuaaagagaca

SEQ ID NO: 132891 - RNA, 19 nt, Artificial Sequence
  Description of Artificial Sequence: Synthetic oligonucleotide
ggauggcccgugucucagc

SEQ ID NO: 132892 - RNA, 19 nt, Artificial Sequence
  Description of Artificial Sequence: Synthetic oligonucleotide
agcgcucgacuucguugau

SEQ ID NO: 132893 - RNA, 19 nt, Artificial Sequence
  Description of Artificial Sequence: Synthetic oligonucleotide
cacgugaggggccuuggau

SEQ ID NO: 132894 - RNA, 19 nt, Artificial Sequence
  Description of Artificial Sequence: Synthetic oligonucleotide
  modified_base (6)..(6): a, c, u, g, unknown or other
caccgngagcccauucagu

SEQ ID NO: 132895 - RNA, 19 nt, Artificial Sequence
  Description of Artificial Sequence: Synthetic oligonucleotide
ggacgaggacuugguagac

SEQ ID NO: 132896 - RNA, 19 nt, Artificial Sequence
  Description of Artificial Sequence: Synthetic oligonucleotide
ccaucucgcuugcuggcuc

SEQ ID NO: 132897 - RNA, 19 nt, Artificial Sequence
  Description of Artificial Sequence: Synthetic oligonucleotide
gugcgagacugugggugac

SEQ ID NO: 132898 - RNA, 19 nt, Artificial Sequence
  Description of Artificial Sequence: Synthetic oligonucleotide
guauguggcaagggucccu

SEQ ID NO: 132899 - RNA, 19 nt, Artificial Sequence
  Description of Artificial Sequence: Synthetic oligonucleotide
aaccgcccuucaagcacau

SEQ ID NO: 132900 - RNA, 19 nt, Artificial Sequence
  Description of Artificial Sequence: Synthetic oligonucleotide
ccugggacgcgggccaccg

SEQ ID NO: 132901 - RNA, 19 nt, Artificial Sequence
  Description of Artificial Sequence: Synthetic oligonucleotide
ggguguuacgccgagccau

SEQ ID NO: 132902 - RNA, 19 nt, Artificial Sequence
  Description of Artificial Sequence: Synthetic oligonucleotide
gggaaucaaauugguuaua

SEQ ID NO: 132903 - RNA, 19 nt, Artificial Sequence
  Description of Artificial Sequence: Synthetic oligonucleotide
ccugaccgacuggauuucc

SEQ ID NO: 132904 - RNA, 19 nt, Artificial Sequence
  Description of Artificial Sequence: Synthetic oligonucleotide
cguuagcgagcuuguccag

SEQ ID NO: 132905 - RNA, 19 nt, Artificial Sequence
  Description of Artificial Sequence: Synthetic oligonucleotide
ggacuugguagacgaacuu

SEQ ID NO: 132906 - RNA, 19 nt, Artificial Sequence
  Description of Artificial Sequence: Synthetic oligonucleotide
gcgccgaguccugcgaagc

SEQ ID NO: 132907 - RNA, 19 nt, Artificial Sequence
  Description of Artificial Sequence: Synthetic oligonucleotide
aggacggggccgaggguaa

SEQ ID NO: 132908 - RNA, 19 nt, Artificial Sequence
  Description of Artificial Sequence: Synthetic oligonucleotide
gguggaccacgggagagcu

SEQ ID NO: 132909 - RNA, 19 nt, Artificial Sequence
  Description of Artificial Sequence: Synthetic oligonucleotide
cgccucgaggcacuccugc

SEQ ID NO: 132910 - RNA, 19 nt, Artificial Sequence
  Description of Artificial Sequence: Synthetic oligonucleotide
ggguaacaaagcaauucuu

SEQ ID NO: 132911 - RNA, 19 nt, Artificial Sequence
  Description of Artificial Sequence: Synthetic oligonucleotide
gccccguuuacugacacuu

SEQ ID NO: 132912 - RNA, 19 nt, Artificial Sequence
  Description of Artificial Sequence: Synthetic oligonucleotide
gcgcucgacuucguugaug

SEQ ID NO: 132913 - RNA, 19 nt, Artificial Sequence
  Description of Artificial Sequence: Synthetic oligonucleotide
accccaguuugggccagua

SEQ ID NO: 132914 - RNA, 19 nt, Artificial Sequence
  Description of Artificial Sequence: Synthetic oligonucleotide
guggcgauguagugccauu

SEQ ID NO: 132915 - RNA, 19 nt, Artificial Sequence
  Description of Artificial Sequence: Synthetic oligonucleotide
  modified_base (9)..(9): a, c, u, g, unknown or other
ggccaccgngagcccauuc

SEQ ID NO: 132916 - RNA, 19 nt, Artificial Sequence
  Description of Artificial Sequence: Synthetic oligonucleotide
ccucgaaagccaaccacau

SEQ ID NO: 132917 - RNA, 19 nt, Artificial Sequence
  Description of Artificial Sequence: Synthetic oligonucleotide
gcagcccucgaaagccaac

SEQ ID NO: 132918 - RNA, 19 nt, Artificial Sequence
  Description of Artificial Sequence: Synthetic oligonucleotide
ggugcaccguaaccgcccu

SEQ ID NO: 132919 - RNA, 19 nt, Artificial Sequence
  Description of Artificial Sequence: Synthetic oligonucleotide
gccaguaucgauggcuuuu

SEQ ID NO: 132920 - RNA, 19 nt, Artificial Sequence
  Description of Artificial Sequence: Synthetic oligonucleotide
gccuacgcaccauacuguu

SEQ ID NO: 132921 - RNA, 19 nt, Artificial Sequence
  Description of Artificial Sequence: Synthetic oligonucleotide
cguaggaauucuugggaau

SEQ ID NO: 132922 - RNA, 19 nt, Artificial Sequence
  Description of Artificial Sequence: Synthetic oligonucleotide
cccugugguugcauagcaa

SEQ ID NO: 132923 - RNA, 19 nt, Artificial Sequence
  Description of Artificial Sequence: Synthetic oligonucleotide
gacgccugaccgacuggau

SEQ ID NO: 132924 - RNA, 19 nt, Artificial Sequence
  Description of Artificial Sequence: Synthetic oligonucleotide
gccugaccgacuggauuuc

SEQ ID NO: 132925 - RNA, 19 nt, Artificial Sequence
  Description of Artificial Sequence: Synthetic oligonucleotide
ggacggggccgaggguaag

SEQ ID NO: 132926 - RNA, 19 nt, Artificial Sequence
  Description of Artificial Sequence: Synthetic oligonucleotide
ggcucguuagcgagcuugu

SEQ ID NO: 132927 - RNA, 19 nt, Artificial Sequence
  Description of Artificial Sequence: Synthetic oligonucleotide
  modified_base (19)..(19): a, c, u, g, unknown or other
cugggacgcgggccaccgn

SEQ ID NO: 132928 - RNA, 19 nt, Artificial Sequence
  Description of Artificial Sequence: Synthetic oligonucleotide
gguggccuaaagagacagu

SEQ ID NO: 132929 - RNA, 19 nt, Artificial Sequence
  Description of Artificial Sequence: Synthetic oligonucleotide
aggacacgugaggggccuu

SEQ ID NO: 132930 - RNA, 19 nt, Artificial Sequence
  Description of Artificial Sequence: Synthetic oligonucleotide
cggguggcauccugucgac

SEQ ID NO: 132931 - RNA, 19 nt, Artificial Sequence
  Description of Artificial Sequence: Synthetic oligonucleotide
cgcucggcguuuucuggca

SEQ ID NO: 132932 - RNA, 19 nt, Artificial Sequence
  Description of Artificial Sequence: Synthetic oligonucleotide
ggcugcgcucggcguuuuc

SEQ ID NO: 132933 - RNA, 19 nt, Artificial Sequence
  Description of Artificial Sequence: Synthetic oligonucleotide
  modified_base (12)..(12): a, c, u, g, unknown or other
gcgggccaccgngagccca

SEQ ID NO: 132934 - RNA, 19 nt, Artificial Sequence
  Description of Artificial Sequence: Synthetic oligonucleotide
cgccugaccgacuggauuu

SEQ ID NO: 132935 - RNA, 19 nt, Artificial Sequence
  Description of Artificial Sequence: Synthetic oligonucleotide
ggaacucggguggcauccu

SEQ ID NO: 132936 - RNA, 19 nt, Artificial Sequence
  Description of Artificial Sequence: Synthetic oligonucleotide
guggggccagucaguguau

SEQ ID NO: 132937 - RNA, 19 nt, Artificial Sequence
  Description of Artificial Sequence: Synthetic oligonucleotide
gaggcucguuagcgagcuu

SEQ ID NO: 132938 - RNA, 19 nt, Artificial Sequence
  Description of Artificial Sequence: Synthetic oligonucleotide
guucgccguggugcuuggu

SEQ ID NO: 132939 - RNA, 19 nt, Artificial Sequence
  Description of Artificial Sequence: Synthetic oligonucleotide
gcgagcuuguccagauguu

SEQ ID NO: 132940 - RNA, 19 nt, Artificial Sequence
  Description of Artificial Sequence: Synthetic oligonucleotide
ccaagcgcucgacuucguu

SEQ ID NO: 132941 - RNA, 19 nt, Artificial Sequence
  Description of Artificial Sequence: Synthetic oligonucleotide
ccugccgcaaugccccguu

SEQ ID NO: 132942 - RNA, 19 nt, Artificial Sequence
  Description of Artificial Sequence: Synthetic oligonucleotide
ccccaguuugggccaguau

SEQ ID NO: 132943 - RNA, 19 nt, Artificial Sequence
  Description of Artificial Sequence: Synthetic oligonucleotide
cgacuucguugauguacau

SEQ ID NO: 132944 - RNA, 19 nt, Artificial Sequence
  Description of Artificial Sequence: Synthetic oligonucleotide
ccacgaugggagggugccu

SEQ ID NO: 132945 - RNA, 19 nt, Artificial Sequence
  Description of Artificial Sequence: Synthetic oligonucleotide
aagauuguuacucucaggg

SEQ ID NO: 132946 - RNA, 19 nt, Artificial Sequence
  Description of Artificial Sequence: Synthetic oligonucleotide
aauaauaagaacgaaagcu

SEQ ID NO: 132947 - RNA, 19 nt, Artificial Sequence
  Description of Artificial Sequence: Synthetic oligonucleotide
augaugauaagauuguuac

SEQ ID NO: 132948 - RNA, 19 nt, Artificial Sequence
  Description of Artificial Sequence: Synthetic oligonucleotide
ugccuuaagacucucagcg

SEQ ID NO: 132949 - RNA, 19 nt, Artificial Sequence
  Description of Artificial Sequence: Synthetic oligonucleotide
guagacaagagccagaaug

SEQ ID NO: 132950 - RNA, 19 nt, Artificial Sequence
  Description of Artificial Sequence: Synthetic oligonucleotide
agagcuaucggcuuuauca

SEQ ID NO: 132951 - RNA, 19 nt, Artificial Sequence
  Description of Artificial Sequence: Synthetic oligonucleotide
agaaccuacacacugccac

SEQ ID NO: 132952 - RNA, 19 nt, Artificial Sequence
  Description of Artificial Sequence: Synthetic oligonucleotide
gaugauaagauuguuacuc

SEQ ID NO: 132953 - RNA, 19 nt, Artificial Sequence
  Description of Artificial Sequence: Synthetic oligonucleotide
aguagcuuaaccacgagcg

SEQ ID NO: 132954 - RNA, 19 nt, Artificial Sequence
  Description of Artificial Sequence: Synthetic oligonucleotide
ucagcuaucuggcaaaaca

SEQ ID NO: 132955 - RNA, 19 nt, Artificial Sequence
  Description of Artificial Sequence: Synthetic oligonucleotide
uauucucacauuuucgaag

SEQ ID NO: 132956 - RNA, 19 nt, Artificial Sequence
  Description of Artificial Sequence: Synthetic oligonucleotide
aguguauuccccuggauag

SEQ ID NO: 132957 - RNA, 19 nt, Artificial Sequence
  Description of Artificial Sequence: Synthetic oligonucleotide
auagacucguaauagcuuc

SEQ ID NO: 132958 - RNA, 19 nt, Artificial Sequence
  Description of Artificial Sequence: Synthetic oligonucleotide
ucucguuacgcuuguaucg

SEQ ID NO: 132959 - RNA, 19 nt, Artificial Sequence
  Description of Artificial Sequence: Synthetic oligonucleotide
ugauauaggcaucaaacuc

SEQ ID NO: 132960 - RNA, 19 nt, Artificial Sequence
  Description of Artificial Sequence: Synthetic oligonucleotide
uuggacaucagacacaaua

SEQ ID NO: 132961 - RNA, 19 nt, Artificial Sequence
  Description of Artificial Sequence: Synthetic oligonucleotide
cauaaugcaaccagccugg

SEQ ID NO: 132962 - RNA, 19 nt, Artificial Sequence
  Description of Artificial Sequence: Synthetic oligonucleotide
uuauauaucaaggaggguu

SEQ ID NO: 132963 - RNA, 19 nt, Artificial Sequence
  Description of Artificial Sequence: Synthetic oligonucleotide
acaagaucuaguguauucc

SEQ ID NO: 132964 - RNA, 19 nt, Artificial Sequence
  Description of Artificial Sequence: Synthetic oligonucleotide
ucucauaagauagaggggu

SEQ ID NO: 132965 - RNA, 19 nt, Artificial Sequence
  Description of Artificial Sequence: Synthetic oligonucleotide
ucuccuaauaaggagcagg

SEQ ID NO: 132966 - RNA, 19 nt, Artificial Sequence
  Description of Artificial Sequence: Synthetic oligonucleotide
uauauaucaaggaggguuc

SEQ ID NO: 132967 - RNA, 19 nt, Artificial Sequence
  Description of Artificial Sequence: Synthetic oligonucleotide
uaguucgagugucagacag

SEQ ID NO: 132968 - RNA, 19 nt, Artificial Sequence
  Description of Artificial Sequence: Synthetic oligonucleotide
gaaccagucguuccaaagg

SEQ ID NO: 132969 - RNA, 19 nt, Artificial Sequence
  Description of Artificial Sequence: Synthetic oligonucleotide
acccgaaucacagaggccc

SEQ ID NO: 132970 - RNA, 19 nt, Artificial Sequence
  Description of Artificial Sequence: Synthetic oligonucleotide
aaaacuacccauaaugcaa

SEQ ID NO: 132971 - RNA, 19 nt, Artificial Sequence
  Description of Artificial Sequence: Synthetic oligonucleotide
uccgauagauagcacaagc

SEQ ID NO: 132972 - RNA, 19 nt, Artificial Sequence
  Description of Artificial Sequence: Synthetic oligonucleotide
ugugucgaaugccaucugg

SEQ ID NO: 132973 - RNA, 19 nt, Artificial Sequence
  Description of Artificial Sequence: Synthetic oligonucleotide
uuggacaagaucuagugua

SEQ ID NO: 132974 - RNA, 19 nt, Artificial Sequence
  Description of Artificial Sequence: Synthetic oligonucleotide
aacuacccauaaugcaacc

SEQ ID NO: 132975 - RNA, 19 nt, Artificial Sequence
  Description of Artificial Sequence: Synthetic oligonucleotide
aaacuacccauaaugcaac

SEQ ID NO: 132976 - RNA, 19 nt, Artificial Sequence
  Description of Artificial Sequence: Synthetic oligonucleotide
acaccaaucaauacccucc

SEQ ID NO: 132977 - RNA, 19 nt, Artificial Sequence
  Description of Artificial Sequence: Synthetic oligonucleotide
auagauagcacaagcgugg

SEQ ID NO: 132978 - RNA, 19 nt, Artificial Sequence
  Description of Artificial Sequence: Synthetic oligonucleotide
auaagaacgaaagcugagg

SEQ ID NO: 132979 - RNA, 19 nt, Artificial Sequence
  Description of Artificial Sequence: Synthetic oligonucleotide
aaugugccgacgcacuguc

SEQ ID NO: 132980 - RNA, 19 nt, Artificial Sequence
  Description of Artificial Sequence: Synthetic oligonucleotide
uaaacagucugauggguca

SEQ ID NO: 132981 - RNA, 19 nt, Artificial Sequence
  Description of Artificial Sequence: Synthetic oligonucleotide
ucacccgaaucacagaggc

SEQ ID NO: 132982 - RNA, 19 nt, Artificial Sequence
  Description of Artificial Sequence: Synthetic oligonucleotide
agaucgagggcucaauauc

SEQ ID NO: 132983 - RNA, 19 nt, Artificial Sequence
  Description of Artificial Sequence: Synthetic oligonucleotide
guaaacaagcgauucugag

SEQ ID NO: 132984 - RNA, 19 nt, Artificial Sequence
  Description of Artificial Sequence: Synthetic oligonucleotide
caguuucuccgauagauag

SEQ ID NO: 132985 - RNA, 19 nt, Artificial Sequence
  Description of Artificial Sequence: Synthetic oligonucleotide
ucaaaauagacaaguucuc

SEQ ID NO: 132986 - RNA, 19 nt, Artificial Sequence
  Description of Artificial Sequence: Synthetic oligonucleotide
aucauugcagucuuaauua

SEQ ID NO: 132987 - RNA, 19 nt, Artificial Sequence
  Description of Artificial Sequence: Synthetic oligonucleotide
uuuguagccucaguguagg

SEQ ID NO: 132988 - RNA, 19 nt, Artificial Sequence
  Description of Artificial Sequence: Synthetic oligonucleotide
uuaaccacgagcgacugga

SEQ ID NO: 132989 - RNA, 19 nt, Artificial Sequence
  Description of Artificial Sequence: Synthetic oligonucleotide
auaacggguccgaauaucc

SEQ ID NO: 132990 - RNA, 19 nt, Artificial Sequence
  Description of Artificial Sequence: Synthetic oligonucleotide
ucggaagaguuucacagga

SEQ ID NO: 132991 - RNA, 19 nt, Artificial Sequence
  Description of Artificial Sequence: Synthetic oligonucleotide
auaucaaguccuuggccac

SEQ ID NO: 132992 - RNA, 19 nt, Artificial Sequence
  Description of Artificial Sequence: Synthetic oligonucleotide
ucucuuaucugcucguaug

SEQ ID NO: 132993 - RNA, 19 nt, Artificial Sequence
  Description of Artificial Sequence: Synthetic oligonucleotide
uaauagcuuccccacacca

SEQ ID NO: 132994 - RNA, 19 nt, Artificial Sequence
  Description of Artificial Sequence: Synthetic oligonucleotide
aaccagucguuccaaagga

SEQ ID NO: 132995 - RNA, 19 nt, Artificial Sequence
  Description of Artificial Sequence: Synthetic oligonucleotide
acucaugcacaccacaucu

SEQ ID NO: 132996 - RNA, 19 nt, Artificial Sequence
  Description of Artificial Sequence: Synthetic oligonucleotide
cacauuacauucgaggagc

SEQ ID NO: 132997 - RNA, 19 nt, Artificial Sequence
  Description of Artificial Sequence: Synthetic oligonucleotide
cuggauaggguucaucacc

SEQ ID NO: 132998 - RNA, 19 nt, Artificial Sequence
  Description of Artificial Sequence: Synthetic oligonucleotide
uguauuccccuggauaggg

SEQ ID NO: 132999 - RNA, 19 nt, Artificial Sequence
  Description of Artificial Sequence: Synthetic oligonucleotide
acgaaagacacaaugauau

SEQ ID NO: 133000 - RNA, 19 nt, Artificial Sequence
  Description of Artificial Sequence: Synthetic oligonucleotide
ucccagauauguaauuggc

SEQ ID NO: 133001 - RNA, 19 nt, Artificial Sequence
  Description of Artificial Sequence: Synthetic oligonucleotide
gauacaccugaaccaaugc

SEQ ID NO: 133002 - RNA, 19 nt, Artificial Sequence
  Description of Artificial Sequence: Synthetic oligonucleotide
aagugguguaaacaagcga

SEQ ID NO: 133003 - RNA, 19 nt, Artificial Sequence
  Description of Artificial Sequence: Synthetic oligonucleotide
acauucgaggagcagaccu

SEQ ID NO: 133004 - RNA, 19 nt, Artificial Sequence
  Description of Artificial Sequence: Synthetic oligonucleotide
guuacgcuuguaucgaacc

SEQ ID NO: 133005 - RNA, 19 nt, Artificial Sequence
  Description of Artificial Sequence: Synthetic oligonucleotide
aggaguucgguccagcucu

SEQ ID NO: 133006 - RNA, 19 nt, Artificial Sequence
  Description of Artificial Sequence: Synthetic oligonucleotide
aguccaugccuuaagacuc

SEQ ID NO: 133007 - RNA, 19 nt, Artificial Sequence
  Description of Artificial Sequence: Synthetic oligonucleotide
aaugaugauaagauuguua

SEQ ID NO: 133008 - RNA, 19 nt, Artificial Sequence
  Description of Artificial Sequence: Synthetic oligonucleotide
agaaccagucguuccaaag

SEQ ID NO: 133009 - RNA, 19 nt, Artificial Sequence
  Description of Artificial Sequence: Synthetic oligonucleotide
ucggcuuuaucauugcagu

SEQ ID NO: 133010 - RNA, 19 nt, Artificial Sequence
  Description of Artificial Sequence: Synthetic oligonucleotide
agaggcuguaaacagucug

SEQ ID NO: 133011 - RNA, 19 nt, Artificial Sequence
  Description of Artificial Sequence: Synthetic oligonucleotide
aacgggauugguaagagua

SEQ ID NO: 133012 - RNA, 19 nt, Artificial Sequence
  Description of Artificial Sequence: Synthetic oligonucleotide
aguguucgagaaccuacac

SEQ ID NO: 133013 - RNA, 19 nt, Artificial Sequence
  Description of Artificial Sequence: Synthetic oligonucleotide
caucacccgaaucacagag

SEQ ID NO: 133014 - RNA, 19 nt, Artificial Sequence
  Description of Artificial Sequence: Synthetic oligonucleotide
uuacgcuuguaucgaaccc

SEQ ID NO: 133015 - RNA, 19 nt, Artificial Sequence
  Description of Artificial Sequence: Synthetic oligonucleotide
agggugcagagcuaucggc

SEQ ID NO: 133016 - RNA, 19 nt, Artificial Sequence
  Description of Artificial Sequence: Synthetic oligonucleotide
gaguagcuuaaccacgagc

SEQ ID NO: 133017 - RNA, 19 nt, Artificial Sequence
  Description of Artificial Sequence: Synthetic oligonucleotide
augauaagauuguuacucu

SEQ ID NO: 133018 - RNA, 19 nt, Artificial Sequence
  Description of Artificial Sequence: Synthetic oligonucleotide
cuuguaucgaacccagaug

SEQ ID NO: 133019 - RNA, 19 nt, Artificial Sequence
  Description of Artificial Sequence: Synthetic oligonucleotide
agugguguaaacaagcgau

SEQ ID NO: 133020 - RNA, 19 nt, Artificial Sequence
  Description of Artificial Sequence: Synthetic oligonucleotide
ugacgcuccauugagcaag

SEQ ID NO: 133021 - RNA, 19 nt, Artificial Sequence
  Description of Artificial Sequence: Synthetic oligonucleotide
agccaauagagccucucuc

SEQ ID NO: 133022 - RNA, 19 nt, Artificial Sequence
  Description of Artificial Sequence: Synthetic oligonucleotide
acgaaagcugagguggucc

SEQ ID NO: 133023 - RNA, 19 nt, Artificial Sequence
  Description of Artificial Sequence: Synthetic oligonucleotide
ucuaguguauuccccugga

SEQ ID NO: 133024 - RNA, 19 nt, Artificial Sequence
  Description of Artificial Sequence: Synthetic oligonucleotide
agaucauagacucguaaua

SEQ ID NO: 133025 - RNA, 19 nt, Artificial Sequence
  Description of Artificial Sequence: Synthetic oligonucleotide
aucuaguguauuccccugg

SEQ ID NO: 133026 - RNA, 19 nt, Artificial Sequence
  Description of Artificial Sequence: Synthetic oligonucleotide
ugauaagauuguuacucuc

SEQ ID NO: 133027 - RNA, 19 nt, Artificial Sequence
  Description of Artificial Sequence: Synthetic oligonucleotide
uuaagacucucagcgauga

SEQ ID NO: 133028 - RNA, 19 nt, Artificial Sequence
  Description of Artificial Sequence: Synthetic oligonucleotide
auagucaagaaggcuggcg

SEQ ID NO: 133029 - RNA, 19 nt, Artificial Sequence
  Description of Artificial Sequence: Synthetic oligonucleotide
uaucugcucguaugugucg

SEQ ID NO: 133030 - RNA, 19 nt, Artificial Sequence
  Description of Artificial Sequence: Synthetic oligonucleotide
ugccaaacuugucugcccc

SEQ ID NO: 133031 - RNA, 19 nt, Artificial Sequence
  Description of Artificial Sequence: Synthetic oligonucleotide
ugaugauaagauuguuacu

SEQ ID NO: 133032 - RNA, 19 nt, Artificial Sequence
  Description of Artificial Sequence: Synthetic oligonucleotide
ucgagaaccuacacacugc

SEQ ID NO: 133033 - RNA, 19 nt, Artificial Sequence
  Description of Artificial Sequence: Synthetic oligonucleotide
gggugaaugacaaauuucc

SEQ ID NO: 133034 - RNA, 19 nt, Artificial Sequence
  Description of Artificial Sequence: Synthetic oligonucleotide
uuccaaaggaagaguugag

SEQ ID NO: 133035 - RNA, 19 nt, Artificial Sequence
  Description of Artificial Sequence: Synthetic oligonucleotide
uucaaugugccgacgcacu

SEQ ID NO: 133036 - RNA, 19 nt, Artificial Sequence
  Description of Artificial Sequence: Synthetic oligonucleotide
acuaaaggcugccucauuu

SEQ ID NO: 133037 - RNA, 19 nt, Artificial Sequence
  Description of Artificial Sequence: Synthetic oligonucleotide
cagauaccuaguucgagug

SEQ ID NO: 133038 - RNA, 19 nt, Artificial Sequence
  Description of Artificial Sequence: Synthetic oligonucleotide
uggguguguacugcaaugg

SEQ ID NO: 133039 - RNA, 19 nt, Artificial Sequence
  Description of Artificial Sequence: Synthetic oligonucleotide
aagccaauagagccucucu

SEQ ID NO: 133040 - RNA, 19 nt, Artificial Sequence
  Description of Artificial Sequence: Synthetic oligonucleotide
gauaccuaguucgaguguc

SEQ ID NO: 133041 - RNA, 19 nt, Artificial Sequence
  Description of Artificial Sequence: Synthetic oligonucleotide
ucauaagauagagggguga

SEQ ID NO: 133042 - RNA, 19 nt, Artificial Sequence
  Description of Artificial Sequence: Synthetic oligonucleotide
uucucguuacgcuuguauc

SEQ ID NO: 133043 - RNA, 19 nt, Artificial Sequence
  Description of Artificial Sequence: Synthetic oligonucleotide
caaguccaugccuuaagac

SEQ ID NO: 133044 - RNA, 19 nt, Artificial Sequence
  Description of Artificial Sequence: Synthetic oligonucleotide
aaccaaugcaucaucuccu

SEQ ID NO: 133045 - RNA, 19 nt, Artificial Sequence
  Description of Artificial Sequence: Synthetic oligonucleotide
gcgguagugacccaucugg

SEQ ID NO: 133046 - RNA, 19 nt, Artificial Sequence
  Description of Artificial Sequence: Synthetic oligonucleotide
auaaugagcugguucucgu

SEQ ID NO: 133047 - RNA, 19 nt, Artificial Sequence
  Description of Artificial Sequence: Synthetic oligonucleotide
gagggcucaauaucaaguc

SEQ ID NO: 133048 - RNA, 19 nt, Artificial Sequence
  Description of Artificial Sequence: Synthetic oligonucleotide
gaucuaguguauuccccug

SEQ ID NO: 133049 - RNA, 19 nt, Artificial Sequence
  Description of Artificial Sequence: Synthetic oligonucleotide
cauaagauagaggggugag

SEQ ID NO: 133050 - RNA, 19 nt, Artificial Sequence
  Description of Artificial Sequence: Synthetic oligonucleotide
agacucguaauagcuuccc

SEQ ID NO: 133051 - RNA, 19 nt, Artificial Sequence
  Description of Artificial Sequence: Synthetic oligonucleotide
gaaacgggauugguaagag

SEQ ID NO: 133052 - RNA, 19 nt, Artificial Sequence
  Description of Artificial Sequence: Synthetic oligonucleotide
uuacucucagggugaauga

SEQ ID NO: 133053 - RNA, 19 nt, Artificial Sequence
  Description of Artificial Sequence: Synthetic oligonucleotide
gagucucauaagauagagg

SEQ ID NO: 133054 - RNA, 19 nt, Artificial Sequence
  Description of Artificial Sequence: Synthetic oligonucleotide
aaucgagaucgcuguucuc

SEQ ID NO: 133055 - RNA, 19 nt, Artificial Sequence
  Description of Artificial Sequence: Synthetic oligonucleotide
ugcucguaugugucgaaug

SEQ ID NO: 133056 - RNA, 19 nt, Artificial Sequence
  Description of Artificial Sequence: Synthetic oligonucleotide
agggugaaugacaaauuuc

SEQ ID NO: 133057 - RNA, 19 nt, Artificial Sequence
  Description of Artificial Sequence: Synthetic oligonucleotide
agucguuccaaaggaagag

SEQ ID NO: 133058 - RNA, 19 nt, Artificial Sequence
  Description of Artificial Sequence: Synthetic oligonucleotide
cuuaagacucucagcgaug

SEQ ID NO: 133059 - RNA, 19 nt, Artificial Sequence
  Description of Artificial Sequence: Synthetic oligonucleotide
agauuguuacucucagggu

SEQ ID NO: 133060 - RNA, 19 nt, Artificial Sequence
  Description of Artificial Sequence: Synthetic oligonucleotide
cacaagcuuguauguauag

SEQ ID NO: 133061 - RNA, 19 nt, Artificial Sequence
  Description of Artificial Sequence: Synthetic oligonucleotide
uauaucaaggaggguucag

SEQ ID NO: 133062 - RNA, 19 nt, Artificial Sequence
  Description of Artificial Sequence: Synthetic oligonucleotide
gaaggauccaucucaaaau

SEQ ID NO: 133063 - RNA, 19 nt, Artificial Sequence
  Description of Artificial Sequence: Synthetic oligonucleotide
agauauguaauuggcaaua

SEQ ID NO: 133064 - RNA, 19 nt, Artificial Sequence
  Description of Artificial Sequence: Synthetic oligonucleotide
ucucacauuuucgaaguaa

SEQ ID NO: 133065 - RNA, 19 nt, Artificial Sequence
  Description of Artificial Sequence: Synthetic oligonucleotide
uugagcaagccccgguccc

SEQ ID NO: 133066 - RNA, 19 nt, Artificial Sequence
  Description of Artificial Sequence: Synthetic oligonucleotide
ccgaauauccucaagcuuc

SEQ ID NO: 133067 - RNA, 19 nt, Artificial Sequence
  Description of Artificial Sequence: Synthetic oligonucleotide
uacgcuuguaucgaaccca

SEQ ID NO: 133068 - RNA, 19 nt, Artificial Sequence
  Description of Artificial Sequence: Synthetic oligonucleotide
aagcuuguauguauagaca

SEQ ID NO: 133069 - RNA, 19 nt, Artificial Sequence
  Description of Artificial Sequence: Synthetic oligonucleotide
aguaccgucucaccaacau

SEQ ID NO: 133070 - RNA, 19 nt, Artificial Sequence
  Description of Artificial Sequence: Synthetic oligonucleotide
aagcauaacggguccgaau

SEQ ID NO: 133071 - RNA, 19 nt, Artificial Sequence
  Description of Artificial Sequence: Synthetic oligonucleotide
aucgaacccagaugaaacu

SEQ ID NO: 133072 - RNA, 19 nt, Artificial Sequence
  Description of Artificial Sequence: Synthetic oligonucleotide
aaacgggauugguaagagu

SEQ ID NO: 133073 - RNA, 19 nt, Artificial Sequence
  Description of Artificial Sequence: Synthetic oligonucleotide
gguagugacccaucugggg

SEQ ID NO: 133074 - RNA, 19 nt, Artificial Sequence
  Description of Artificial Sequence: Synthetic oligonucleotide
acaagcgauucugagccuc

SEQ ID NO: 133075 - RNA, 19 nt, Artificial Sequence
  Description of Artificial Sequence: Synthetic oligonucleotide
uagcuuaaccacgagcgac

SEQ ID NO: 133076 - RNA, 19 nt, Artificial Sequence
  Description of Artificial Sequence: Synthetic oligonucleotide
cucauaagauagaggggug

SEQ ID NO: 133077 - RNA, 19 nt, Artificial Sequence
  Description of Artificial Sequence: Synthetic oligonucleotide
aacgaaagcugaggugguc

SEQ ID NO: 133078 - RNA, 19 nt, Artificial Sequence
  Description of Artificial Sequence: Synthetic oligonucleotide
gaucgagggcucaauauca

SEQ ID NO: 133079 - RNA, 19 nt, Artificial Sequence
  Description of Artificial Sequence: Synthetic oligonucleotide
ucgagggcucaauaucaag

SEQ ID NO: 133080 - RNA, 19 nt, Artificial Sequence
  Description of Artificial Sequence: Synthetic oligonucleotide
gaugugaaagggacaagga

SEQ ID NO: 133081 - RNA, 19 nt, Artificial Sequence
  Description of Artificial Sequence: Synthetic oligonucleotide
ccauaaugcaaccagccug

SEQ ID NO: 133082 - RNA, 19 nt, Artificial Sequence
  Description of Artificial Sequence: Synthetic oligonucleotide
ugguguaaacaagcgauuc

SEQ ID NO: 133083 - RNA, 19 nt, Artificial Sequence
  Description of Artificial Sequence: Synthetic oligonucleotide
caucaucuccuaauaagga

SEQ ID NO: 133084 - RNA, 19 nt, Artificial Sequence
  Description of Artificial Sequence: Synthetic oligonucleotide
uuaucauugcagucuuaau

SEQ ID NO: 133085 - RNA, 19 nt, Artificial Sequence
  Description of Artificial Sequence: Synthetic oligonucleotide
ucuuaucugcucguaugug

SEQ ID NO: 133086 - RNA, 19 nt, Artificial Sequence
  Description of Artificial Sequence: Synthetic oligonucleotide
uuuauauaucaaggagggu

SEQ ID NO: 133087 - RNA, 19 nt, Artificial Sequence
  Description of Artificial Sequence: Synthetic oligonucleotide
ccuaauaaggagcaggaca

SEQ ID NO: 133088 - RNA, 19 nt, Artificial Sequence
  Description of Artificial Sequence: Synthetic oligonucleotide
uugcauccggacucggaag

SEQ ID NO: 133089 - RNA, 19 nt, Artificial Sequence
  Description of Artificial Sequence: Synthetic oligonucleotide
ccgauagauagcacaagcg

SEQ ID NO: 133090 - RNA, 19 nt, Artificial Sequence
  Description of Artificial Sequence: Synthetic oligonucleotide
acauagagacucaggcugg

SEQ ID NO: 133091 - RNA, 19 nt, Artificial Sequence
  Description of Artificial Sequence: Synthetic oligonucleotide
uggucccgcccacaaagag

SEQ ID NO: 133092 - RNA, 19 nt, Artificial Sequence
  Description of Artificial Sequence: Synthetic oligonucleotide
ucguaauagcuuccccaca

SEQ ID NO: 133093 - RNA, 19 nt, Artificial Sequence
  Description of Artificial Sequence: Synthetic oligonucleotide
agggcgaucaccacuuguc

SEQ ID NO: 133094 - RNA, 19 nt, Artificial Sequence
  Description of Artificial Sequence: Synthetic oligonucleotide
uguaucgaacccagaugaa

SEQ ID NO: 133095 - RNA, 19 nt, Artificial Sequence
  Description of Artificial Sequence: Synthetic oligonucleotide
agagggacucucuggcaag

SEQ ID NO: 133096 - RNA, 19 nt, Artificial Sequence
  Description of Artificial Sequence: Synthetic oligonucleotide
cuaucggcuuuaucauugc

SEQ ID NO: 133097 - RNA, 19 nt, Artificial Sequence
  Description of Artificial Sequence: Synthetic oligonucleotide
agccuuuggagcuccaaaa

SEQ ID NO: 133098 - RNA, 19 nt, Artificial Sequence
  Description of Artificial Sequence: Synthetic oligonucleotide
uauuccccuggauaggguu

SEQ ID NO: 133099 - RNA, 19 nt, Artificial Sequence
  Description of Artificial Sequence: Synthetic oligonucleotide
acuugucgcugguucacug

SEQ ID NO: 133100 - RNA, 19 nt, Artificial Sequence
  Description of Artificial Sequence: Synthetic oligonucleotide
agauaccuaguucgagugu

SEQ ID NO: 133101 - RNA, 19 nt, Artificial Sequence
  Description of Artificial Sequence: Synthetic oligonucleotide
cacacuaaaggcugccuca

SEQ ID NO: 133102 - RNA, 19 nt, Artificial Sequence
  Description of Artificial Sequence: Synthetic oligonucleotide
cuucaaugugccgacgcac

SEQ ID NO: 133103 - RNA, 19 nt, Artificial Sequence
  Description of Artificial Sequence: Synthetic oligonucleotide
cuuaaccacgagcgacugg

SEQ ID NO: 133104 - RNA, 19 nt, Artificial Sequence
  Description of Artificial Sequence: Synthetic oligonucleotide
caagcgauucugagccucc

SEQ ID NO: 133105 - RNA, 19 nt, Artificial Sequence
  Description of Artificial Sequence: Synthetic oligonucleotide
gaccauugccagccuuugg

SEQ ID NO: 133106 - RNA, 19 nt, Artificial Sequence
  Description of Artificial Sequence: Synthetic oligonucleotide
uccuccagauaaaguggug

SEQ ID NO: 133107 - RNA, 19 nt, Artificial Sequence
  Description of Artificial Sequence: Synthetic oligonucleotide
gaaagcauaacggguccga

SEQ ID NO: 133108 - RNA, 19 nt, Artificial Sequence
  Description of Artificial Sequence: Synthetic oligonucleotide
guaaacagucugauggguc

SEQ ID NO: 133109 - RNA, 19 nt, Artificial Sequence
  Description of Artificial Sequence: Synthetic oligonucleotide
gaaucgagaucgcuguucu

SEQ ID NO: 133110 - RNA, 19 nt, Artificial Sequence
  Description of Artificial Sequence: Synthetic oligonucleotide
gcucguaugugucgaaugc

SEQ ID NO: 133111 - RNA, 19 nt, Artificial Sequence
  Description of Artificial Sequence: Synthetic oligonucleotide
auagucuggaucccagaua

SEQ ID NO: 133112 - RNA, 19 nt, Artificial Sequence
  Description of Artificial Sequence: Synthetic oligonucleotide
acagggucuagaacaguuc

SEQ ID NO: 133113 - RNA, 19 nt, Artificial Sequence
  Description of Artificial Sequence: Synthetic oligonucleotide
guguucgagaaccuacaca

SEQ ID NO: 133114 - RNA, 19 nt, Artificial Sequence
  Description of Artificial Sequence: Synthetic oligonucleotide
auaagauagaggggugaga

SEQ ID NO: 133115 - RNA, 19 nt, Artificial Sequence
  Description of Artificial Sequence: Synthetic oligonucleotide
cucagaaagcauaacgggu

SEQ ID NO: 133116 - RNA, 19 nt, Artificial Sequence
  Description of Artificial Sequence: Synthetic oligonucleotide
ucaucacccgaaucacaga

SEQ ID NO: 133117 - RNA, 19 nt, Artificial Sequence
  Description of Artificial Sequence: Synthetic oligonucleotide
ccagucguuccaaaggaag

SEQ ID NO: 133118 - RNA, 19 nt, Artificial Sequence
  Description of Artificial Sequence: Synthetic oligonucleotide
gcuaucggcuuuaucauug

SEQ ID NO: 133119 - RNA, 19 nt, Artificial Sequence
  Description of Artificial Sequence: Synthetic oligonucleotide
guagugacccaucuggggu

SEQ ID NO: 133120 - RNA, 19 nt, Artificial Sequence
  Description of Artificial Sequence: Synthetic oligonucleotide
aaagcauaacggguccgaa

SEQ ID NO: 133121 - RNA, 19 nt, Artificial Sequence
  Description of Artificial Sequence: Synthetic oligonucleotide
acuacccauaaugcaacca

SEQ ID NO: 133122 - RNA, 19 nt, Artificial Sequence
  Description of Artificial Sequence: Synthetic oligonucleotide
cuuaucugcucguaugugu

SEQ ID NO: 133123 - RNA, 19 nt, Artificial Sequence
  Description of Artificial Sequence: Synthetic oligonucleotide
caauaugcuuauucucaca

SEQ ID NO: 133124 - RNA, 19 nt, Artificial Sequence
  Description of Artificial Sequence: Synthetic oligonucleotide
accacuugucgcugguuca

SEQ ID NO: 133125 - RNA, 19 nt, Artificial Sequence
  Description of Artificial Sequence: Synthetic oligonucleotide
aucagcuaucuggcaaaac

SEQ ID NO: 133126 - RNA, 19 nt, Artificial Sequence
  Description of Artificial Sequence: Synthetic oligonucleotide
aguucgagugucagacagg

SEQ ID NO: 133127 - RNA, 19 nt, Artificial Sequence
  Description of Artificial Sequence: Synthetic oligonucleotide
ugaccgggguccucuacca

SEQ ID NO: 133128 - RNA, 19 nt, Artificial Sequence
  Description of Artificial Sequence: Synthetic oligonucleotide
agugccaacucuagggaga

SEQ ID NO: 133129 - RNA, 19 nt, Artificial Sequence
  Description of Artificial Sequence: Synthetic oligonucleotide
auauaucaaggaggguuca

SEQ ID NO: 133130 - RNA, 19 nt, Artificial Sequence
  Description of Artificial Sequence: Synthetic oligonucleotide
ggcuacuugauugaagaca

SEQ ID NO: 133131 - RNA, 19 nt, Artificial Sequence
  Description of Artificial Sequence: Synthetic oligonucleotide
guaccgucucaccaacaug

SEQ ID NO: 133132 - RNA, 19 nt, Artificial Sequence
  Description of Artificial Sequence: Synthetic oligonucleotide
cacgaaagacacaaugaua

SEQ ID NO: 133133 - RNA, 19 nt, Artificial Sequence
  Description of Artificial Sequence: Synthetic oligonucleotide
ccaggaaucgagaucgcug

SEQ ID NO: 133134 - RNA, 19 nt, Artificial Sequence
  Description of Artificial Sequence: Synthetic oligonucleotide
caacucuagggagaaccag

SEQ ID NO: 133135 - RNA, 19 nt, Artificial Sequence
  Description of Artificial Sequence: Synthetic oligonucleotide
cauuacauucgaggagcag

SEQ ID NO: 133136 - RNA, 19 nt, Artificial Sequence
  Description of Artificial Sequence: Synthetic oligonucleotide
agcguggcauucacgaaag

SEQ ID NO: 133137 - RNA, 19 nt, Artificial Sequence
  Description of Artificial Sequence: Synthetic oligonucleotide
guguauuccccuggauagg

SEQ ID NO: 133138 - RNA, 19 nt, Artificial Sequence
  Description of Artificial Sequence: Synthetic oligonucleotide
aucacccgaaucacagagg

SEQ ID NO: 133139 - RNA, 19 nt, Artificial Sequence
  Description of Artificial Sequence: Synthetic oligonucleotide
agggucuagaacaguucuc

SEQ ID NO: 133140 - RNA, 19 nt, Artificial Sequence
  Description of Artificial Sequence: Synthetic oligonucleotide
acgggauugguaagaguag

SEQ ID NO: 133141 - RNA, 19 nt, Artificial Sequence
  Description of Artificial Sequence: Synthetic oligonucleotide
cugcaccuuagcuugccuc

SEQ ID NO: 133142 - RNA, 19 nt, Artificial Sequence
  Description of Artificial Sequence: Synthetic oligonucleotide
guaucgaacccagaugaaa

SEQ ID NO: 133143 - RNA, 19 nt, Artificial Sequence
  Description of Artificial Sequence: Synthetic oligonucleotide
aaacagucugaugggucaa

SEQ ID NO: 133144 - RNA, 19 nt, Artificial Sequence
  Description of Artificial Sequence: Synthetic oligonucleotide
agcuuaaccacgagcgacu

SEQ ID NO: 133145 - RNA, 19 nt, Artificial Sequence
  Description of Artificial Sequence: Synthetic oligonucleotide
guccgaauauccucaagcu

SEQ ID NO: 133146 - RNA, 19 nt, Artificial Sequence
  Description of Artificial Sequence: Synthetic oligonucleotide
uacauucgaggagcagacc

SEQ ID NO: 133147 - RNA, 19 nt, Artificial Sequence
  Description of Artificial Sequence: Synthetic oligonucleotide
uggcgguagugacccaucu

SEQ ID NO: 133148 - RNA, 19 nt, Artificial Sequence
  Description of Artificial Sequence: Synthetic oligonucleotide
uucucacauuuucgaagua

SEQ ID NO: 133149 - RNA, 19 nt, Artificial Sequence
  Description of Artificial Sequence: Synthetic oligonucleotide
cauagucaagaaggcuggc

SEQ ID NO: 133150 - RNA, 19 nt, Artificial Sequence
  Description of Artificial Sequence: Synthetic oligonucleotide
gaugaccgggguccucuac

SEQ ID NO: 133151 - RNA, 19 nt, Artificial Sequence
  Description of Artificial Sequence: Synthetic oligonucleotide
caccugaaccaaugcauca

SEQ ID NO: 133152 - RNA, 19 nt, Artificial Sequence
  Description of Artificial Sequence: Synthetic oligonucleotide
ugguucucguuacgcuugu

SEQ ID NO: 133153 - RNA, 19 nt, Artificial Sequence
  Description of Artificial Sequence: Synthetic oligonucleotide
agugacccaucugggguag

SEQ ID NO: 133154 - RNA, 19 nt, Artificial Sequence
  Description of Artificial Sequence: Synthetic oligonucleotide
acgcuuguaucgaacccag

SEQ ID NO: 133155 - RNA, 19 nt, Artificial Sequence
  Description of Artificial Sequence: Synthetic oligonucleotide
ucagaccgcaggugcauuu

SEQ ID NO: 133156 - RNA, 19 nt, Artificial Sequence
  Description of Artificial Sequence: Synthetic oligonucleotide
cagaucauagacucguaau

SEQ ID NO: 133157 - RNA, 19 nt, Artificial Sequence
  Description of Artificial Sequence: Synthetic oligonucleotide
agcuaucggcuuuaucauu

SEQ ID NO: 133158 - RNA, 19 nt, Artificial Sequence
  Description of Artificial Sequence: Synthetic oligonucleotide
cacccgaaucacagaggcc

SEQ ID NO: 133159 - RNA, 19 nt, Artificial Sequence
  Description of Artificial Sequence: Synthetic oligonucleotide
gagcuaucggcuuuaucau

SEQ ID NO: 133160 - RNA, 19 nt, Artificial Sequence
  Description of Artificial Sequence: Synthetic oligonucleotide
ugagcaagccccgguccca

SEQ ID NO: 133161 - RNA, 19 nt, Artificial Sequence
  Description of Artificial Sequence: Synthetic oligonucleotide
gagggacucucuggcaagc

SEQ ID NO: 133162 - RNA, 19 nt, Artificial Sequence
  Description of Artificial Sequence: Synthetic oligonucleotide
ucugcucguaugugucgaa

SEQ ID NO: 133163 - RNA, 19 nt, Artificial Sequence
  Description of Artificial Sequence: Synthetic oligonucleotide
aucuccuaauaaggagcag

SEQ ID NO: 133164 - RNA, 19 nt, Artificial Sequence
  Description of Artificial Sequence: Synthetic oligonucleotide
guucgagugucagacaggu

SEQ ID NO: 133165 - RNA, 19 nt, Artificial Sequence
  Description of Artificial Sequence: Synthetic oligonucleotide
gguguaaacaagcgauucu

SEQ ID NO: 133166 - RNA, 19 nt, Artificial Sequence
  Description of Artificial Sequence: Synthetic oligonucleotide
cucguuacgcuuguaucga

SEQ ID NO: 133167 - RNA, 19 nt, Artificial Sequence
  Description of Artificial Sequence: Synthetic oligonucleotide
ucguuacgcuuguaucgaa

SEQ ID NO: 133168 - RNA, 19 nt, Artificial Sequence
  Description of Artificial Sequence: Synthetic oligonucleotide
auagcacaagcguggcauu

SEQ ID NO: 133169 - RNA, 19 nt, Artificial Sequence
  Description of Artificial Sequence: Synthetic oligonucleotide
aagcgauucugagccucca

SEQ ID NO: 133170 - RNA, 19 nt, Artificial Sequence
  Description of Artificial Sequence: Synthetic oligonucleotide
uucgagugucagacagguc

SEQ ID NO: 133171 - RNA, 19 nt, Artificial Sequence
  Description of Artificial Sequence: Synthetic oligonucleotide
acauuacauucgaggagca

SEQ ID NO: 133172 - RNA, 19 nt, Artificial Sequence
  Description of Artificial Sequence: Synthetic oligonucleotide
ggaaucgagaucgcuguuc

SEQ ID NO: 133173 - RNA, 19 nt, Artificial Sequence
  Description of Artificial Sequence: Synthetic oligonucleotide
gacgcuccauugagcaagc

SEQ ID NO: 133174 - RNA, 19 nt, Artificial Sequence
  Description of Artificial Sequence: Synthetic oligonucleotide
auaccuaguucgaguguca

SEQ ID NO: 133175 - RNA, 19 nt, Artificial Sequence
  Description of Artificial Sequence: Synthetic oligonucleotide
cgagaaccuacacacugcc

SEQ ID NO: 133176 - RNA, 19 nt, Artificial Sequence
  Description of Artificial Sequence: Synthetic oligonucleotide
cagggucuagaacaguucu

SEQ ID NO: 133177 - RNA, 19 nt, Artificial Sequence
  Description of Artificial Sequence: Synthetic oligonucleotide
cucaucguugguguuaggu

SEQ ID NO: 133178 - RNA, 19 nt, Artificial Sequence
  Description of Artificial Sequence: Synthetic oligonucleotide
gacgcacuguccagacagc

SEQ ID NO: 133179 - RNA, 19 nt, Artificial Sequence
  Description of Artificial Sequence: Synthetic oligonucleotide
acgagcgacuggacauggc

SEQ ID NO: 133180 - RNA, 19 nt, Artificial Sequence
  Description of Artificial Sequence: Synthetic oligonucleotide
caugguccucaugagaugu

SEQ ID NO: 133181 - RNA, 19 nt, Artificial Sequence
  Description of Artificial Sequence: Synthetic oligonucleotide
uccggacucggaagaguuu

SEQ ID NO: 133182 - RNA, 19 nt, Artificial Sequence
  Description of Artificial Sequence: Synthetic oligonucleotide
gugccgacgcacuguccag

SEQ ID NO: 133183 - RNA, 19 nt, Artificial Sequence
  Description of Artificial Sequence: Synthetic oligonucleotide
ggccacacauuacauucga

SEQ ID NO: 133184 - RNA, 19 nt, Artificial Sequence
  Description of Artificial Sequence: Synthetic oligonucleotide
gaucagcuaucuggcaaaa

SEQ ID NO: 133185 - RNA, 19 nt, Artificial Sequence
  Description of Artificial Sequence: Synthetic oligonucleotide
ccacacuaaaggcugccuc

SEQ ID NO: 133186 - RNA, 19 nt, Artificial Sequence
  Description of Artificial Sequence: Synthetic oligonucleotide
aggaaucgagaucgcuguu

SEQ ID NO: 133187 - RNA, 19 nt, Artificial Sequence
  Description of Artificial Sequence: Synthetic oligonucleotide
ugccgacgcacuguccaga

SEQ ID NO: 133188 - RNA, 19 nt, Artificial Sequence
  Description of Artificial Sequence: Synthetic oligonucleotide
ggguguguacugcaaugga

SEQ ID NO: 133189 - RNA, 19 nt, Artificial Sequence
  Description of Artificial Sequence: Synthetic oligonucleotide
agccaggaaucgagaucgc

SEQ ID NO: 133190 - RNA, 19 nt, Artificial Sequence
  Description of Artificial Sequence: Synthetic oligonucleotide
auccggacucggaagaguu

SEQ ID NO: 133191 - RNA, 19 nt, Artificial Sequence
  Description of Artificial Sequence: Synthetic oligonucleotide
cagggugaaugacaaauuu

SEQ ID NO: 133192 - RNA, 19 nt, Artificial Sequence
  Description of Artificial Sequence: Synthetic oligonucleotide
ggcgguagugacccaucug

SEQ ID NO: 133193 - RNA, 19 nt, Artificial Sequence
  Description of Artificial Sequence: Synthetic oligonucleotide
acccugugcccaauagucu

SEQ ID NO: 133194 - RNA, 19 nt, Artificial Sequence
  Description of Artificial Sequence: Synthetic oligonucleotide
cauuggccagaucagcuau

SEQ ID NO: 133195 - RNA, 19 nt, Artificial Sequence
  Description of Artificial Sequence: Synthetic oligonucleotide
aucgagggcucaauaucaa

SEQ ID NO: 133196 - RNA, 19 nt, Artificial Sequence
  Description of Artificial Sequence: Synthetic oligonucleotide
uccaugccuuaagacucuc

SEQ ID NO: 133197 - RNA, 19 nt, Artificial Sequence
  Description of Artificial Sequence: Synthetic oligonucleotide
augguccucaugagaugug

SEQ ID NO: 133198 - RNA, 19 nt, Artificial Sequence
  Description of Artificial Sequence: Synthetic oligonucleotide
cccuccaucucacaaagua

SEQ ID NO: 133199 - RNA, 19 nt, Artificial Sequence
  Description of Artificial Sequence: Synthetic oligonucleotide
cguuacgcuuguaucgaac

SEQ ID NO: 133200 - RNA, 19 nt, Artificial Sequence
  Description of Artificial Sequence: Synthetic oligonucleotide
accagucguuccaaaggaa

SEQ ID NO: 133201 - RNA, 19 nt, Artificial Sequence
  Description of Artificial Sequence: Synthetic oligonucleotide
cagaccgcaggugcauuuc

SEQ ID NO: 133202 - RNA, 19 nt, Artificial Sequence
  Description of Artificial Sequence: Synthetic oligonucleotide
guaguccaauguucaggua

SEQ ID NO: 133203 - RNA, 19 nt, Artificial Sequence
  Description of Artificial Sequence: Synthetic oligonucleotide
gcuuaaccacgagcgacug

SEQ ID NO: 133204 - RNA, 19 nt, Artificial Sequence
  Description of Artificial Sequence: Synthetic oligonucleotide
ccagaucauagacucguaa

SEQ ID NO: 133205 - RNA, 19 nt, Artificial Sequence
  Description of Artificial Sequence: Synthetic oligonucleotide
agcgaugaccgggguccuc

SEQ ID NO: 133206 - RNA, 19 nt, Artificial Sequence
  Description of Artificial Sequence: Synthetic oligonucleotide
ccagauaccuaguucgagu

SEQ ID NO: 133207 - RNA, 19 nt, Artificial Sequence
  Description of Artificial Sequence: Synthetic oligonucleotide
cccagauaccuaguucgag

SEQ ID NO: 133208 - RNA, 19 nt, Artificial Sequence
  Description of Artificial Sequence: Synthetic oligonucleotide
gccacacauuacauucgag

SEQ ID NO: 133209 - RNA, 19 nt, Artificial Sequence
  Description of Artificial Sequence: Synthetic oligonucleotide
ccgcaggugcauuucaaca

SEQ ID NO: 133210 - RNA, 19 nt, Artificial Sequence
  Description of Artificial Sequence: Synthetic oligonucleotide
gugacgcuccauugagcaa

SEQ ID NO: 133211 - RNA, 19 nt, Artificial Sequence
  Description of Artificial Sequence: Synthetic oligonucleotide
ccggacucggaagaguuuc

SEQ ID NO: 133212 - RNA, 19 nt, Artificial Sequence
  Description of Artificial Sequence: Synthetic oligonucleotide
gugccaacucuagggagaa

SEQ ID NO: 133213 - RNA, 19 nt, Artificial Sequence
  Description of Artificial Sequence: Synthetic oligonucleotide
ccuuaagacucucagcgau

SEQ ID NO: 133214 - RNA, 19 nt, Artificial Sequence
  Description of Artificial Sequence: Synthetic oligonucleotide
caguaccgucucaccaaca

SEQ ID NO: 133215 - RNA, 19 nt, Artificial Sequence
  Description of Artificial Sequence: Synthetic oligonucleotide
ggaacaaaagagggacucu

SEQ ID NO: 133216 - RNA, 19 nt, Artificial Sequence
  Description of Artificial Sequence: Synthetic oligonucleotide
cggcacguuggccagacuc

SEQ ID NO: 133217 - RNA, 19 nt, Artificial Sequence
  Description of Artificial Sequence: Synthetic oligonucleotide
gcauccggacucggaagag

SEQ ID NO: 133218 - RNA, 19 nt, Artificial Sequence
  Description of Artificial Sequence: Synthetic oligonucleotide
gccgacgcacuguccagac

SEQ ID NO: 133219 - RNA, 19 nt, Artificial Sequence
  Description of Artificial Sequence: Synthetic oligonucleotide
guucgagaaccuacacacu

SEQ ID NO: 133220 - RNA, 19 nt, Artificial Sequence
  Description of Artificial Sequence: Synthetic oligonucleotide
guggucccgcccacaaaga

SEQ ID NO: 133221 - RNA, 19 nt, Artificial Sequence
  Description of Artificial Sequence: Synthetic oligonucleotide
gcccaauagucuggauccc

SEQ ID NO: 133222 - RNA, 19 nt, Artificial Sequence
  Description of Artificial Sequence: Synthetic oligonucleotide
ccucaagguguugguggag

SEQ ID NO: 133223 - RNA, 19 nt, Artificial Sequence
  Description of Artificial Sequence: Synthetic oligonucleotide
ccuugcauccggacucgga

SEQ ID NO: 133224 - RNA, 19 nt, Artificial Sequence
  Description of Artificial Sequence: Synthetic oligonucleotide
cguugguguuagguggaag

SEQ ID NO: 133225 - RNA, 19 nt, Artificial Sequence
  Description of Artificial Sequence: Synthetic oligonucleotide
ccucaucguugguguuagg

SEQ ID NO: 133226 - RNA, 19 nt, Artificial Sequence
  Description of Artificial Sequence: Synthetic oligonucleotide
cauccggacucggaagagu

SEQ ID NO: 133227 - RNA, 19 nt, Artificial Sequence
  Description of Artificial Sequence: Synthetic oligonucleotide
caccuuagcuugccucccu

SEQ ID NO: 133228 - RNA, 19 nt, Artificial Sequence
  Description of Artificial Sequence: Synthetic oligonucleotide
ggguuaccagggagcucag

SEQ ID NO: 133229 - RNA, 19 nt, Artificial Sequence
  Description of Artificial Sequence: Synthetic oligonucleotide
cacagaucgagggcucaau

SEQ ID NO: 133230 - RNA, 19 nt, Artificial Sequence
  Description of Artificial Sequence: Synthetic oligonucleotide
gccacagaucgagggcuca

SEQ ID NO: 133231 - RNA, 19 nt, Artificial Sequence
  Description of Artificial Sequence: Synthetic oligonucleotide
cacuugucgcugguucacu

SEQ ID NO: 133232 - RNA, 19 nt, Artificial Sequence
  Description of Artificial Sequence: Synthetic oligonucleotide
cugcucguaugugucgaau

SEQ ID NO: 133233 - RNA, 19 nt, Artificial Sequence
  Description of Artificial Sequence: Synthetic oligonucleotide
cacuaaaggcugccucauu

SEQ ID NO: 133234 - RNA, 19 nt, Artificial Sequence
  Description of Artificial Sequence: Synthetic oligonucleotide
gcguggcauucacgaaaga

SEQ ID NO: 133235 - RNA, 19 nt, Artificial Sequence
  Description of Artificial Sequence: Synthetic oligonucleotide
gccacacuaaaggcugccu

SEQ ID NO: 133236 - RNA, 19 nt, Artificial Sequence
  Description of Artificial Sequence: Synthetic oligonucleotide
cguaugugucgaaugccau

SEQ ID NO: 133237 - RNA, 19 nt, Artificial Sequence
  Description of Artificial Sequence: Synthetic oligonucleotide
cacugaccauugccagccu

SEQ ID NO: 133238 - RNA, 19 nt, Artificial Sequence
  Description of Artificial Sequence: Synthetic oligonucleotide
gguucucguuacgcuugua

SEQ ID NO: 133239 - RNA, 19 nt, Artificial Sequence
  Description of Artificial Sequence: Synthetic oligonucleotide
gcucagaccgcaggugcau

SEQ ID NO: 133240 - RNA, 19 nt, Artificial Sequence
  Description of Artificial Sequence: Synthetic oligonucleotide
ccgacgcacuguccagaca

SEQ ID NO: 133241 - RNA, 19 nt, Artificial Sequence
  Description of Artificial Sequence: Synthetic oligonucleotide
cgggguccucuaccacagg

SEQ ID NO: 133242 - RNA, 19 nt, Artificial Sequence
  Description of Artificial Sequence: Synthetic oligonucleotide
ccacagaucgagggcucaa

SEQ ID NO: 133243 - RNA, 19 nt, Artificial Sequence
  Description of Artificial Sequence: Synthetic oligonucleotide
cucagaccgcaggugcauu

SEQ ID NO: 133244 - RNA, 19 nt, Artificial Sequence
  Description of Artificial Sequence: Synthetic oligonucleotide
cgcuuguaucgaacccaga

SEQ ID NO: 133245 - RNA, 19 nt, Artificial Sequence
  Description of Artificial Sequence: Synthetic oligonucleotide
guucuccuggcggcacguu

SEQ ID NO: 133246 - RNA, 19 nt, Artificial Sequence
  Description of Artificial Sequence: Synthetic oligonucleotide
cgaaucacagaggcccacu

SEQ ID NO: 133247 - RNA, 19 nt, Artificial Sequence
  Description of Artificial Sequence: Synthetic oligonucleotide
ggaguucgguccagcucuu

SEQ ID NO: 133248 - RNA, 19 nt, Artificial Sequence
  Description of Artificial Sequence: Synthetic oligonucleotide
auauguaguucuuugaggg

SEQ ID NO: 133249 - RNA, 19 nt, Artificial Sequence
  Description of Artificial Sequence: Synthetic oligonucleotide
aaugaaagucaucugagga

SEQ ID NO: 133250 - RNA, 19 nt, Artificial Sequence
  Description of Artificial Sequence: Synthetic oligonucleotide
  modified_base (3)..(3): a, c, u, g, unknown or other
acnugaaagaaucauuggg

SEQ ID NO: 133251 - RNA, 19 nt, Artificial Sequence
  Description of Artificial Sequence: Synthetic oligonucleotide
ugaauuuguaagagaaucg

SEQ ID NO: 133252 - RNA, 19 nt, Artificial Sequence
  Description of Artificial Sequence: Synthetic oligonucleotide
  modified_base (4)..(4): a, c, u, g, unknown or other
aacnugaaagaaucauugg

SEQ ID NO: 133253 - RNA, 19 nt, Artificial Sequence
  Description of Artificial Sequence: Synthetic oligonucleotide
uucgguauaaaacaggguc

SEQ ID NO: 133254 - RNA, 19 nt, Artificial Sequence
  Description of Artificial Sequence: Synthetic oligonucleotide
acucuuacaggauuuggcc

SEQ ID NO: 133255 - RNA, 19 nt, Artificial Sequence
  Description of Artificial Sequence: Synthetic oligonucleotide
auuacaucgguauuucuuc

SEQ ID NO: 133256 - RNA, 19 nt, Artificial Sequence
  Description of Artificial Sequence: Synthetic oligonucleotide
  modified_base (5)..(5): a, c, u, g, unknown or other
aaacnugaaagaaucauug

SEQ ID NO: 133257 - RNA, 19 nt, Artificial Sequence
  Description of Artificial Sequence: Synthetic oligonucleotide
ugcaguagaaauuucauuc

SEQ ID NO: 133258 - RNA, 19 nt, Artificial Sequence
  Description of Artificial Sequence: Synthetic oligonucleotide
aaaacaggguccaacuucc

SEQ ID NO: 133259 - RNA, 19 nt, Artificial Sequence
  Description of Artificial Sequence: Synthetic oligonucleotide
ucugauauaguugacuugc

SEQ ID NO: 133260 - RNA, 19 nt, Artificial Sequence
  Description of Artificial Sequence: Synthetic oligonucleotide
ucgauaaucuaacaucucc

SEQ ID NO: 133261 - RNA, 19 nt, Artificial Sequence
  Description of Artificial Sequence: Synthetic oligonucleotide
aaucuaucugguugucugc

SEQ ID NO: 133262 - RNA, 19 nt, Artificial Sequence
  Description of Artificial Sequence: Synthetic oligonucleotide
uaauguauuggugacacug

SEQ ID NO: 133263 - RNA, 19 nt, Artificial Sequence
  Description of Artificial Sequence: Synthetic oligonucleotide
aaaucaaucgguaaucacu

SEQ ID NO: 133264 - RNA, 19 nt, Artificial Sequence
  Description of Artificial Sequence: Synthetic oligonucleotide
gaugauagcugucauuuug

SEQ ID NO: 133265 - RNA, 19 nt, Artificial Sequence
  Description of Artificial Sequence: Synthetic oligonucleotide
uauaaaacaggguccaacu

SEQ ID NO: 133266 - RNA, 19 nt, Artificial Sequence
  Description of Artificial Sequence: Synthetic oligonucleotide
acgucgauaaucuaacauc

SEQ ID NO: 133267 - RNA, 19 nt, Artificial Sequence
  Description of Artificial Sequence: Synthetic oligonucleotide
uaucguuucgcacaguggu

SEQ ID NO: 133268 - RNA, 19 nt, Artificial Sequence
  Description of Artificial Sequence: Synthetic oligonucleotide
uguaaccuuuaccaacugg

SEQ ID NO: 133269 - RNA, 19 nt, Artificial Sequence
  Description of Artificial Sequence: Synthetic oligonucleotide
auacaaucugguuccaacg

SEQ ID NO: 133270 - RNA, 19 nt, Artificial Sequence
  Description of Artificial Sequence: Synthetic oligonucleotide
aaucccgagagauaaaaua

SEQ ID NO: 133271 - RNA, 19 nt, Artificial Sequence
  Description of Artificial Sequence: Synthetic oligonucleotide
uagaguaucguuucgcaca

SEQ ID NO: 133272 - RNA, 19 nt, Artificial Sequence
  Description of Artificial Sequence: Synthetic oligonucleotide
aaucaaucgguaaucacug

SEQ ID NO: 133273 - RNA, 19 nt, Artificial Sequence
  Description of Artificial Sequence: Synthetic oligonucleotide
ucgguauaaaacagggucc

SEQ ID NO: 133274 - RNA, 19 nt, Artificial Sequence
  Description of Artificial Sequence: Synthetic oligonucleotide
ucgguaaucacugaagaug

SEQ ID NO: 133275 - RNA, 19 nt, Artificial Sequence
  Description of Artificial Sequence: Synthetic oligonucleotide
uguucuucuguacgguagg

SEQ ID NO: 133276 - RNA, 19 nt, Artificial Sequence
  Description of Artificial Sequence: Synthetic oligonucleotide
  modified_base (7)..(7): a, c, u, g, unknown or other
ucaaacnugaaagaaucau

SEQ ID NO: 133277 - RNA, 19 nt, Artificial Sequence
  Description of Artificial Sequence: Synthetic oligonucleotide
uuuuauguugggacaaagu

SEQ ID NO: 133278 - RNA, 19 nt, Artificial Sequence
  Description of Artificial Sequence: Synthetic oligonucleotide
ucgcuuaucuuccaaggcc

SEQ ID NO: 133279 - RNA, 19 nt, Artificial Sequence
  Description of Artificial Sequence: Synthetic oligonucleotide
ugucuauauaagcaggaaa

SEQ ID NO: 133280 - RNA, 19 nt, Artificial Sequence
  Description of Artificial Sequence: Synthetic oligonucleotide
accuugugaaugugcaucc

SEQ ID NO: 133281 - RNA, 19 nt, Artificial Sequence
  Description of Artificial Sequence: Synthetic oligonucleotide
uuuaacgguaaucuguguu

SEQ ID NO: 133282 - RNA, 19 nt, Artificial Sequence
  Description of Artificial Sequence: Synthetic oligonucleotide
uuaacgguaaucuguguuc

SEQ ID NO: 133283 - RNA, 19 nt, Artificial Sequence
  Description of Artificial Sequence: Synthetic oligonucleotide
aguaucguuucgcacagug

SEQ ID NO: 133284 - RNA, 19 nt, Artificial Sequence
  Description of Artificial Sequence: Synthetic oligonucleotide
cauacgucgauaaucuaac

SEQ ID NO: 133285 - RNA, 19 nt, Artificial Sequence
  Description of Artificial Sequence: Synthetic oligonucleotide
uuauguugggacaaaguuu

SEQ ID NO: 133286 - RNA, 19 nt, Artificial Sequence
  Description of Artificial Sequence: Synthetic oligonucleotide
ucuguauuacagauucaca

SEQ ID NO: 133287 - RNA, 19 nt, Artificial Sequence
  Description of Artificial Sequence: Synthetic oligonucleotide
uucacaaaagcgcucccga

SEQ ID NO: 133288 - RNA, 19 nt, Artificial Sequence
  Description of Artificial Sequence: Synthetic oligonucleotide
aucccgagagauaaaauac

SEQ ID NO: 133289 - RNA, 19 nt, Artificial Sequence
  Description of Artificial Sequence: Synthetic oligonucleotide
uguagaguaucguuucgca

SEQ ID NO: 133290 - RNA, 19 nt, Artificial Sequence
  Description of Artificial Sequence: Synthetic oligonucleotide
ucaaucgguaaucacugaa

SEQ ID NO: 133291 - RNA, 19 nt, Artificial Sequence
  Description of Artificial Sequence: Synthetic oligonucleotide
ucuguauauaaauguucca

SEQ ID NO: 133292 - RNA, 19 nt, Artificial Sequence
  Description of Artificial Sequence: Synthetic oligonucleotide
ucucgugucacacgcuuag

SEQ ID NO: 133293 - RNA, 19 nt, Artificial Sequence
  Description of Artificial Sequence: Synthetic oligonucleotide
auucaguuauguugccucg

SEQ ID NO: 133294 - RNA, 19 nt, Artificial Sequence
  Description of Artificial Sequence: Synthetic oligonucleotide
gaaucagugucugaagcgc

SEQ ID NO: 133295 - RNA, 19 nt, Artificial Sequence
  Description of Artificial Sequence: Synthetic oligonucleotide
uacgucgauaaucuaacau

SEQ ID NO: 133296 - RNA, 19 nt, Artificial Sequence
  Description of Artificial Sequence: Synthetic oligonucleotide
uguacgguaggcaugucua

SEQ ID NO: 133297 - RNA, 19 nt, Artificial Sequence
  Description of Artificial Sequence: Synthetic oligonucleotide
uugguaauguauuggugac

SEQ ID NO: 133298 - RNA, 19 nt, Artificial Sequence
  Description of Artificial Sequence: Synthetic oligonucleotide
ucgcaugaguguauaaucu

SEQ ID NO: 133299 - RNA, 19 nt, Artificial Sequence
  Description of Artificial Sequence: Synthetic oligonucleotide
ucuuacaggauuuggccaa

SEQ ID NO: 133300 - RNA, 19 nt, Artificial Sequence
  Description of Artificial Sequence: Synthetic oligonucleotide
gaucacuacaucaaccuuc

SEQ ID NO: 133301 - RNA, 19 nt, Artificial Sequence
  Description of Artificial Sequence: Synthetic oligonucleotide
agaguaucguuucgcacag

SEQ ID NO: 133302 - RNA, 19 nt, Artificial Sequence
  Description of Artificial Sequence: Synthetic oligonucleotide
gauuuggccaaugaauaac

SEQ ID NO: 133303 - RNA, 19 nt, Artificial Sequence
  Description of Artificial Sequence: Synthetic oligonucleotide
caagcuucauucaaagcuc

SEQ ID NO: 133304 - RNA, 19 nt, Artificial Sequence
  Description of Artificial Sequence: Synthetic oligonucleotide
aagaucagagaagccaucu

SEQ ID NO: 133305 - RNA, 19 nt, Artificial Sequence
  Description of Artificial Sequence: Synthetic oligonucleotide
ucgugucacacgcuuagug

SEQ ID NO: 133306 - RNA, 19 nt, Artificial Sequence
  Description of Artificial Sequence: Synthetic oligonucleotide
uguaguuaaugcuucucua

SEQ ID NO: 133307 - RNA, 19 nt, Artificial Sequence
  Description of Artificial Sequence: Synthetic oligonucleotide
aaaagcgcucccgaucauc

SEQ ID NO: 133308 - RNA, 19 nt, Artificial Sequence
  Description of Artificial Sequence: Synthetic oligonucleotide
agcgcucccgaucaucucg

SEQ ID NO: 133309 - RNA, 19 nt, Artificial Sequence
  Description of Artificial Sequence: Synthetic oligonucleotide
uccugaagcuuaaauacuu

SEQ ID NO: 133310 - RNA, 19 nt, Artificial Sequence
  Description of Artificial Sequence: Synthetic oligonucleotide
cucgcaugaguguauaauc

SEQ ID NO: 133311 - RNA, 19 nt, Artificial Sequence
  Description of Artificial Sequence: Synthetic oligonucleotide
acuuucgguauaaaacagg

SEQ ID NO: 133312 - RNA, 19 nt, Artificial Sequence
  Description of Artificial Sequence: Synthetic oligonucleotide
aauuuguaagagaaucgaa

SEQ ID NO: 133313 - RNA, 19 nt, Artificial Sequence
  Description of Artificial Sequence: Synthetic oligonucleotide
cacuuucgguauaaaacag

SEQ ID NO: 133314 - RNA, 19 nt, Artificial Sequence
  Description of Artificial Sequence: Synthetic oligonucleotide
  modified_base (2)..(2): a, c, u, g, unknown or other
cnugaaagaaucauugggu

SEQ ID NO: 133315 - RNA, 19 nt, Artificial Sequence
  Description of Artificial Sequence: Synthetic oligonucleotide
caaaugccggucuaaauga

SEQ ID NO: 133316 - RNA, 19 nt, Artificial Sequence
  Description of Artificial Sequence: Synthetic oligonucleotide
ugcgguaaucugcuccagg

SEQ ID NO: 133317 - RNA, 19 nt, Artificial Sequence
  Description of Artificial Sequence: Synthetic oligonucleotide
uuuauaguccugggcaaug

SEQ ID NO: 133318 - RNA, 19 nt, Artificial Sequence
  Description of Artificial Sequence: Synthetic oligonucleotide
uuucgguauaaaacagggu

SEQ ID NO: 133319 - RNA, 19 nt, Artificial Sequence
  Description of Artificial Sequence: Synthetic oligonucleotide
gagggugcacuauacagga

SEQ ID NO: 133320 - RNA, 19 nt, Artificial Sequence
  Description of Artificial Sequence: Synthetic oligonucleotide
ucguagaaggacgaaguga

SEQ ID NO: 133321 - RNA, 19 nt, Artificial Sequence
  Description of Artificial Sequence: Synthetic oligonucleotide
acgguaaucuguguucugg

SEQ ID NO: 133322 - RNA, 19 nt, Artificial Sequence
  Description of Artificial Sequence: Synthetic oligonucleotide
ucaguuauguugccucggu

SEQ ID NO: 133323 - RNA, 19 nt, Artificial Sequence
  Description of Artificial Sequence: Synthetic oligonucleotide
uuacaucgguauuucuuca

SEQ ID NO: 133324 - RNA, 19 nt, Artificial Sequence
  Description of Artificial Sequence: Synthetic oligonucleotide
ucggugauccaccaagcaa

SEQ ID NO: 133325 - RNA, 19 nt, Artificial Sequence
  Description of Artificial Sequence: Synthetic oligonucleotide
guauaaaacaggguccaac

SEQ ID NO: 133326 - RNA, 19 nt, Artificial Sequence
  Description of Artificial Sequence: Synthetic oligonucleotide
aucgaaaauccuucaucug

SEQ ID NO: 133327 - RNA, 19 nt, Artificial Sequence
  Description of Artificial Sequence: Synthetic oligonucleotide
uuccaaucccgagagauaa

SEQ ID NO: 133328 - RNA, 19 nt, Artificial Sequence
  Description of Artificial Sequence: Synthetic oligonucleotide
uggguuuaacgguaaucug

SEQ ID NO: 133329 - RNA, 19 nt, Artificial Sequence
  Description of Artificial Sequence: Synthetic oligonucleotide
ugauccguccacacaucag

SEQ ID NO: 133330 - RNA, 19 nt, Artificial Sequence
  Description of Artificial Sequence: Synthetic oligonucleotide
gagauaaaauacugcagcu

SEQ ID NO: 133331 - RNA, 19 nt, Artificial Sequence
  Description of Artificial Sequence: Synthetic oligonucleotide
gagcucucgugucacacgc

SEQ ID NO: 133332 - RNA, 19 nt, Artificial Sequence
  Description of Artificial Sequence: Synthetic oligonucleotide
ugagagggugcacuauaca

SEQ ID NO: 133333 - RNA, 19 nt, Artificial Sequence
  Description of Artificial Sequence: Synthetic oligonucleotide
agcuuguaauuccacacaa

SEQ ID NO: 133334 - RNA, 19 nt, Artificial Sequence
  Description of Artificial Sequence: Synthetic oligonucleotide
agaaucgaaaauccuucau

SEQ ID NO: 133335 - RNA, 19 nt, Artificial Sequence
  Description of Artificial Sequence: Synthetic oligonucleotide
gggugcacuauacaggaag

SEQ ID NO: 133336 - RNA, 19 nt, Artificial Sequence
  Description of Artificial Sequence: Synthetic oligonucleotide
cuugcggcacuucagugac

SEQ ID NO: 133337 - RNA, 19 nt, Artificial Sequence
  Description of Artificial Sequence: Synthetic oligonucleotide
cucgcuuaucuuccaaggc

SEQ ID NO: 133338 - RNA, 19 nt, Artificial Sequence
  Description of Artificial Sequence: Synthetic oligonucleotide
gagaaucgaaaauccuuca

SEQ ID NO: 133339 - RNA, 19 nt, Artificial Sequence
  Description of Artificial Sequence: Synthetic oligonucleotide
uugggaucaguagucaggu

SEQ ID NO: 133340 - RNA, 19 nt, Artificial Sequence
  Description of Artificial Sequence: Synthetic oligonucleotide
ggaggguucgcccuuugcg

SEQ ID NO: 133341 - RNA, 19 nt, Artificial Sequence
  Description of Artificial Sequence: Synthetic oligonucleotide
acuuuauaguccugggcaa

SEQ ID NO: 133342 - RNA, 19 nt, Artificial Sequence
  Description of Artificial Sequence: Synthetic oligonucleotide
ucgguguucacagucuucu

SEQ ID NO: 133343 - RNA, 19 nt, Artificial Sequence
  Description of Artificial Sequence: Synthetic oligonucleotide
guuccaacggauguccucc

SEQ ID NO: 133344 - RNA, 19 nt, Artificial Sequence
  Description of Artificial Sequence: Synthetic oligonucleotide
ucguuucgcacaguggugc

SEQ ID NO: 133345 - RNA, 19 nt, Artificial Sequence
  Description of Artificial Sequence: Synthetic oligonucleotide
gcaacggguacucagcugc

SEQ ID NO: 133346 - RNA, 19 nt, Artificial Sequence
  Description of Artificial Sequence: Synthetic oligonucleotide
aacgguaaucuguguucug

SEQ ID NO: 133347 - RNA, 19 nt, Artificial Sequence
  Description of Artificial Sequence: Synthetic oligonucleotide
cacaaaucaaucgguaauc

SEQ ID NO: 133348 - RNA, 19 nt, Artificial Sequence
  Description of Artificial Sequence: Synthetic oligonucleotide
gucucauuccaaccauggg

SEQ ID NO: 133349 - RNA, 19 nt, Artificial Sequence
  Description of Artificial Sequence: Synthetic oligonucleotide
uucucgggcucccuuacgu

SEQ ID NO: 133350 - RNA, 19 nt, Artificial Sequence
  Description of Artificial Sequence: Synthetic oligonucleotide
guagaguaucguuucgcac

SEQ ID NO: 133351 - RNA, 19 nt, Artificial Sequence
  Description of Artificial Sequence: Synthetic oligonucleotide
ucgagcaccgccagguugu

SEQ ID NO: 133352 - RNA, 19 nt, Artificial Sequence
  Description of Artificial Sequence: Synthetic oligonucleotide
uuugcacuccggcugcaac

SEQ ID NO: 133353 - RNA, 19 nt, Artificial Sequence
  Description of Artificial Sequence: Synthetic oligonucleotide
aaagcgcucccgaucaucu

SEQ ID NO: 133354 - RNA, 19 nt, Artificial Sequence
  Description of Artificial Sequence: Synthetic oligonucleotide
uugcacuccggcugcaacc

SEQ ID NO: 133355 - RNA, 19 nt, Artificial Sequence
  Description of Artificial Sequence: Synthetic oligonucleotide
gcacuuucgguauaaaaca

SEQ ID NO: 133356 - RNA, 19 nt, Artificial Sequence
  Description of Artificial Sequence: Synthetic oligonucleotide
uuucgcacaguggugcuca

SEQ ID NO: 133357 - RNA, 19 nt, Artificial Sequence
  Description of Artificial Sequence: Synthetic oligonucleotide
cacgcuuagugauccgucc

SEQ ID NO: 133358 - RNA, 19 nt, Artificial Sequence
  Description of Artificial Sequence: Synthetic oligonucleotide
ucacuggucucauuccaac

SEQ ID NO: 133359 - RNA, 19 nt, Artificial Sequence
  Description of Artificial Sequence: Synthetic oligonucleotide
uaacgguaaucuguguucu

SEQ ID NO: 133360 - RNA, 19 nt, Artificial Sequence
  Description of Artificial Sequence: Synthetic oligonucleotide
augccggucuaaaugaaag

SEQ ID NO: 133361 - RNA, 19 nt, Artificial Sequence
  Description of Artificial Sequence: Synthetic oligonucleotide
gguaaucugcuccaggguc

SEQ ID NO: 133362 - RNA, 19 nt, Artificial Sequence
  Description of Artificial Sequence: Synthetic oligonucleotide
cuaucugguugucugccac

SEQ ID NO: 133363 - RNA, 19 nt, Artificial Sequence
  Description of Artificial Sequence: Synthetic oligonucleotide
uggcguguaguuaaugcuu

SEQ ID NO: 133364 - RNA, 19 nt, Artificial Sequence
  Description of Artificial Sequence: Synthetic oligonucleotide
aggcaugucuauauaagca

SEQ ID NO: 133365 - RNA, 19 nt, Artificial Sequence
  Description of Artificial Sequence: Synthetic oligonucleotide
aaagcucgaucaaugcggu

SEQ ID NO: 133366 - RNA, 19 nt, Artificial Sequence
  Description of Artificial Sequence: Synthetic oligonucleotide
cagguaguuccuuugguga

SEQ ID NO: 133367 - RNA, 19 nt, Artificial Sequence
  Description of Artificial Sequence: Synthetic oligonucleotide
ugauuuuggucgcuugguu

SEQ ID NO: 133368 - RNA, 19 nt, Artificial Sequence
  Description of Artificial Sequence: Synthetic oligonucleotide
cucaccuugugaaugugca

SEQ ID NO: 133369 - RNA, 19 nt, Artificial Sequence
  Description of Artificial Sequence: Synthetic oligonucleotide
uugcuugcggcacuucagu

SEQ ID NO: 133370 - RNA, 19 nt, Artificial Sequence
  Description of Artificial Sequence: Synthetic oligonucleotide
uacaaaugccggucuaaau

SEQ ID NO: 133371 - RNA, 19 nt, Artificial Sequence
  Description of Artificial Sequence: Synthetic oligonucleotide
accccgaauuacuuucauc

SEQ ID NO: 133372 - RNA, 19 nt, Artificial Sequence
  Description of Artificial Sequence: Synthetic oligonucleotide
aggacgaagugagagggug

SEQ ID NO: 133373 - RNA, 19 nt, Artificial Sequence
  Description of Artificial Sequence: Synthetic oligonucleotide
cuguagaguaucguuucgc

SEQ ID NO: 133374 - RNA, 19 nt, Artificial Sequence
  Description of Artificial Sequence: Synthetic oligonucleotide
guaucguuucgcacagugg

SEQ ID NO: 133375 - RNA, 19 nt, Artificial Sequence
  Description of Artificial Sequence: Synthetic oligonucleotide
uccacauuacaucgguauu

SEQ ID NO: 133376 - RNA, 19 nt, Artificial Sequence
  Description of Artificial Sequence: Synthetic oligonucleotide
ccauguaaccuuuaccaac

SEQ ID NO: 133377 - RNA, 19 nt, Artificial Sequence
  Description of Artificial Sequence: Synthetic oligonucleotide
uuuggucgcuugguuauca

SEQ ID NO: 133378 - RNA, 19 nt, Artificial Sequence
  Description of Artificial Sequence: Synthetic oligonucleotide
cgauaaucuaacaucuccc

SEQ ID NO: 133379 - RNA, 19 nt, Artificial Sequence
  Description of Artificial Sequence: Synthetic oligonucleotide
gguguaggauccuuuguac

SEQ ID NO: 133380 - RNA, 19 nt, Artificial Sequence
  Description of Artificial Sequence: Synthetic oligonucleotide
auauucaguuauguugccu

SEQ ID NO: 133381 - RNA, 19 nt, Artificial Sequence
  Description of Artificial Sequence: Synthetic oligonucleotide
gaggguucgcccuuugcga

SEQ ID NO: 133382 - RNA, 19 nt, Artificial Sequence
  Description of Artificial Sequence: Synthetic oligonucleotide
uuuuggcguguaguuaaug

SEQ ID NO: 133383 - RNA, 19 nt, Artificial Sequence
  Description of Artificial Sequence: Synthetic oligonucleotide
ugcggcacuucagugacac

SEQ ID NO: 133384 - RNA, 19 nt, Artificial Sequence
  Description of Artificial Sequence: Synthetic oligonucleotide
acgguaggcaugucuauau

SEQ ID NO: 133385 - RNA, 19 nt, Artificial Sequence
  Description of Artificial Sequence: Synthetic oligonucleotide
uuccaacggauguccuccg

SEQ ID NO: 133386 - RNA, 19 nt, Artificial Sequence
  Description of Artificial Sequence: Synthetic oligonucleotide
ugccggucuaaaugaaagu

SEQ ID NO: 133387 - RNA, 19 nt, Artificial Sequence
  Description of Artificial Sequence: Synthetic oligonucleotide
cuuacguccugcaagcacu

SEQ ID NO: 133388 - RNA, 19 nt, Artificial Sequence
  Description of Artificial Sequence: Synthetic oligonucleotide
ccgagagauaaaauacugc

SEQ ID NO: 133389 - RNA, 19 nt, Artificial Sequence
  Description of Artificial Sequence: Synthetic oligonucleotide
  modified_base (8)..(8): a, c, u, g, unknown or other
aucaaacnugaaagaauca

SEQ ID NO: 133390 - RNA, 19 nt, Artificial Sequence
  Description of Artificial Sequence: Synthetic oligonucleotide
auacgucgauaaucuaaca

SEQ ID NO: 133391 - RNA, 19 nt, Artificial Sequence
  Description of Artificial Sequence: Synthetic oligonucleotide
caucguggcaaaaguucug

SEQ ID NO: 133392 - RNA, 19 nt, Artificial Sequence
  Description of Artificial Sequence: Synthetic oligonucleotide
aaugccggucuaaaugaaa

SEQ ID NO: 133393 - RNA, 19 nt, Artificial Sequence
  Description of Artificial Sequence: Synthetic oligonucleotide
cagguuguugcuccaggug

SEQ ID NO: 133394 - RNA, 19 nt, Artificial Sequence
  Description of Artificial Sequence: Synthetic oligonucleotide
augagcuuuuggcguguag

SEQ ID NO: 133395 - RNA, 19 nt, Artificial Sequence
  Description of Artificial Sequence: Synthetic oligonucleotide
aacggauguccuccgucau

SEQ ID NO: 133396 - RNA, 19 nt, Artificial Sequence
  Description of Artificial Sequence: Synthetic oligonucleotide
auguaaccuuuaccaacug

SEQ ID NO: 133397 - RNA, 19 nt, Artificial Sequence
  Description of Artificial Sequence: Synthetic oligonucleotide
uuccaucagcauacgucga

SEQ ID NO: 133398 - RNA, 19 nt, Artificial Sequence
  Description of Artificial Sequence: Synthetic oligonucleotide
gacgaagugagagggugca

SEQ ID NO: 133399 - RNA, 19 nt, Artificial Sequence
  Description of Artificial Sequence: Synthetic oligonucleotide
gguaggcaugucuauauaa

SEQ ID NO: 133400 - RNA, 19 nt, Artificial Sequence
  Description of Artificial Sequence: Synthetic oligonucleotide
aucaaucgguaaucacuga

SEQ ID NO: 133401 - RNA, 19 nt, Artificial Sequence
  Description of Artificial Sequence: Synthetic oligonucleotide
aggcugcugcugcugcugc

SEQ ID NO: 133402 - RNA, 19 nt, Artificial Sequence
  Description of Artificial Sequence: Synthetic oligonucleotide
agguaguuccuuuggugau

SEQ ID NO: 133403 - RNA, 19 nt, Artificial Sequence
  Description of Artificial Sequence: Synthetic oligonucleotide
gacacccgguguuccuugg

SEQ ID NO: 133404 - RNA, 19 nt, Artificial Sequence
  Description of Artificial Sequence: Synthetic oligonucleotide
cccgagagauaaaauacug

SEQ ID NO: 133405 - RNA, 19 nt, Artificial Sequence
  Description of Artificial Sequence: Synthetic oligonucleotide
cuuggcugcguaacuccac

SEQ ID NO: 133406 - RNA, 19 nt, Artificial Sequence
  Description of Artificial Sequence: Synthetic oligonucleotide
  modified_base (6)..(6): a, c, u, g, unknown or other
caaacnugaaagaaucauu

SEQ ID NO: 133407 - RNA, 19 nt, Artificial Sequence
  Description of Artificial Sequence: Synthetic oligonucleotide
gccucggugauccaccaag

SEQ ID NO: 133408 - RNA, 19 nt, Artificial Sequence
  Description of Artificial Sequence: Synthetic oligonucleotide
cauuacaucgguauuucuu

SEQ ID NO: 133409 - RNA, 19 nt, Artificial Sequence
  Description of Artificial Sequence: Synthetic oligonucleotide
acacgcugugugaagaacu

SEQ ID NO: 133410 - RNA, 19 nt, Artificial Sequence
  Description of Artificial Sequence: Synthetic oligonucleotide
acacgcuuagugauccguc

SEQ ID NO: 133411 - RNA, 19 nt, Artificial Sequence
  Description of Artificial Sequence: Synthetic oligonucleotide
cucgagcaccgccagguug

SEQ ID NO: 133412 - RNA, 19 nt, Artificial Sequence
  Description of Artificial Sequence: Synthetic oligonucleotide
gcaaugagcuuuuggcgug

SEQ ID NO: 133413 - RNA, 19 nt, Artificial Sequence
  Description of Artificial Sequence: Synthetic oligonucleotide
uguugccucggugauccac

SEQ ID NO: 133414 - RNA, 19 nt, Artificial Sequence
  Description of Artificial Sequence: Synthetic oligonucleotide
uggucgcuugguuaucauc

SEQ ID NO: 133415 - RNA, 19 nt, Artificial Sequence
  Description of Artificial Sequence: Synthetic oligonucleotide
ggcaagcaaaauacaaaug

SEQ ID NO: 133416 - RNA, 19 nt, Artificial Sequence
  Description of Artificial Sequence: Synthetic oligonucleotide
cagcauacgucgauaaucu

SEQ ID NO: 133417 - RNA, 19 nt, Artificial Sequence
  Description of Artificial Sequence: Synthetic oligonucleotide
acgggucacgucuucccug

SEQ ID NO: 133418 - RNA, 19 nt, Artificial Sequence
  Description of Artificial Sequence: Synthetic oligonucleotide
aaaugccggucuaaaugaa

SEQ ID NO: 133419 - RNA, 19 nt, Artificial Sequence
  Description of Artificial Sequence: Synthetic oligonucleotide
guggcaacggguacucagc

SEQ ID NO: 133420 - RNA, 19 nt, Artificial Sequence
  Description of Artificial Sequence: Synthetic oligonucleotide
accaaggcgaauacuucca

SEQ ID NO: 133421 - RNA, 19 nt, Artificial Sequence
  Description of Artificial Sequence: Synthetic oligonucleotide
agugauccguccacacauc

SEQ ID NO: 133422 - RNA, 19 nt, Artificial Sequence
  Description of Artificial Sequence: Synthetic oligonucleotide
acacacgggucacgucuuc

SEQ ID NO: 133423 - RNA, 19 nt, Artificial Sequence
  Description of Artificial Sequence: Synthetic oligonucleotide
uccaaucccgagagauaaa

SEQ ID NO: 133424 - RNA, 19 nt, Artificial Sequence
  Description of Artificial Sequence: Synthetic oligonucleotide
uagcugucauuuugguaau

SEQ ID NO: 133425 - RNA, 19 nt, Artificial Sequence
  Description of Artificial Sequence: Synthetic oligonucleotide
gugagagggugcacuauac

SEQ ID NO: 133426 - RNA, 19 nt, Artificial Sequence
  Description of Artificial Sequence: Synthetic oligonucleotide
ggcauaaguucacuggucu

SEQ ID NO: 133427 - RNA, 19 nt, Artificial Sequence
  Description of Artificial Sequence: Synthetic oligonucleotide
aggguucgcccuuugcgau

SEQ ID NO: 133428 - RNA, 19 nt, Artificial Sequence
  Description of Artificial Sequence: Synthetic oligonucleotide
uacguccugcaagcacucg

SEQ ID NO: 133429 - RNA, 19 nt, Artificial Sequence
  Description of Artificial Sequence: Synthetic oligonucleotide
uacgguaggcaugucuaua

SEQ ID NO: 133430 - RNA, 19 nt, Artificial Sequence
  Description of Artificial Sequence: Synthetic oligonucleotide
ggaucaguagucagguuca

SEQ ID NO: 133431 - RNA, 19 nt, Artificial Sequence
  Description of Artificial Sequence: Synthetic oligonucleotide
ggauuuggccaaugaauaa

SEQ ID NO: 133432 - RNA, 19 nt, Artificial Sequence
  Description of Artificial Sequence: Synthetic oligonucleotide
ugcugcugcugcugcugag

SEQ ID NO: 133433 - RNA, 19 nt, Artificial Sequence
  Description of Artificial Sequence: Synthetic oligonucleotide
guuauguugccucggugau

SEQ ID NO: 133434 - RNA, 19 nt, Artificial Sequence
  Description of Artificial Sequence: Synthetic oligonucleotide
acgaagugagagggugcac

SEQ ID NO: 133435 - RNA, 19 nt, Artificial Sequence
  Description of Artificial Sequence: Synthetic oligonucleotide
gcauacgucgauaaucuaa

SEQ ID NO: 133436 - RNA, 19 nt, Artificial Sequence
  Description of Artificial Sequence: Synthetic oligonucleotide
gccggucuaaaugaaaguc

SEQ ID NO: 133437 - RNA, 19 nt, Artificial Sequence
  Description of Artificial Sequence: Synthetic oligonucleotide
uugccucggugauccacca

SEQ ID NO: 133438 - RNA, 19 nt, Artificial Sequence
  Description of Artificial Sequence: Synthetic oligonucleotide
ugcaggccauuuugaauuu

SEQ ID NO: 133439 - RNA, 19 nt, Artificial Sequence
  Description of Artificial Sequence: Synthetic oligonucleotide
gucgauaaucuaacaucuc

SEQ ID NO: 133440 - RNA, 19 nt, Artificial Sequence
  Description of Artificial Sequence: Synthetic oligonucleotide
gugucacacgcuuagugau

SEQ ID NO: 133441 - RNA, 19 nt, Artificial Sequence
  Description of Artificial Sequence: Synthetic oligonucleotide
cagcucggcauucucguga

SEQ ID NO: 133442 - RNA, 19 nt, Artificial Sequence
  Description of Artificial Sequence: Synthetic oligonucleotide
cacggaguugcuugcggca

SEQ ID NO: 133443 - RNA, 19 nt, Artificial Sequence
  Description of Artificial Sequence: Synthetic oligonucleotide
ggcacgcugguguaggauc

SEQ ID NO: 133444 - RNA, 19 nt, Artificial Sequence
  Description of Artificial Sequence: Synthetic oligonucleotide
ccggucuaaaugaaaguca

SEQ ID NO: 133445 - RNA, 19 nt, Artificial Sequence
  Description of Artificial Sequence: Synthetic oligonucleotide
caucuguaccagcuggaaa

SEQ ID NO: 133446 - RNA, 19 nt, Artificial Sequence
  Description of Artificial Sequence: Synthetic oligonucleotide
aaacaggguccaacuucca

SEQ ID NO: 133447 - RNA, 19 nt, Artificial Sequence
  Description of Artificial Sequence: Synthetic oligonucleotide
gcauaaguucacuggucuc

SEQ ID NO: 133448 - RNA, 19 nt, Artificial Sequence
  Description of Artificial Sequence: Synthetic oligonucleotide
ccuuacguccugcaagcac

SEQ ID NO: 133449 - RNA, 19 nt, Artificial Sequence
  Description of Artificial Sequence: Synthetic oligonucleotide
cacacgggucacgucuucc

SEQ ID NO: 133450 - RNA, 19 nt, Artificial Sequence
  Description of Artificial Sequence: Synthetic oligonucleotide
uuggucgcuugguuaucau

SEQ ID NO: 133451 - RNA, 19 nt, Artificial Sequence
  Description of Artificial Sequence: Synthetic oligonucleotide
cgguaaucacugaagauga

SEQ ID NO: 133452 - RNA, 19 nt, Artificial Sequence
  Description of Artificial Sequence: Synthetic oligonucleotide
agcauacgucgauaaucua

SEQ ID NO: 133453 - RNA, 19 nt, Artificial Sequence
  Description of Artificial Sequence: Synthetic oligonucleotide
ggcgaauacuuccacauuu

SEQ ID NO: 133454 - RNA, 19 nt, Artificial Sequence
  Description of Artificial Sequence: Synthetic oligonucleotide
agcuuuuggcguguaguua

SEQ ID NO: 133455 - RNA, 19 nt, Artificial Sequence
  Description of Artificial Sequence: Synthetic oligonucleotide
cacuccggcugcaaccuca

SEQ ID NO: 133456 - RNA, 19 nt, Artificial Sequence
  Description of Artificial Sequence: Synthetic oligonucleotide
cugcugcugcugcugcugc

SEQ ID NO: 133457 - RNA, 19 nt, Artificial Sequence
  Description of Artificial Sequence: Synthetic oligonucleotide
acuccggcugcaaccucac

SEQ ID NO: 133458 - RNA, 19 nt, Artificial Sequence
  Description of Artificial Sequence: Synthetic oligonucleotide
aagcucgaucaaugcggua

SEQ ID NO: 133459 - RNA, 19 nt, Artificial Sequence
  Description of Artificial Sequence: Synthetic oligonucleotide
gacucgcaugaguguauaa

SEQ ID NO: 133460 - RNA, 19 nt, Artificial Sequence
  Description of Artificial Sequence: Synthetic oligonucleotide
cccuuugcgauguaaucca

SEQ ID NO: 133461 - RNA, 19 nt, Artificial Sequence
  Description of Artificial Sequence: Synthetic oligonucleotide
ugcugcugcugcugcugcu

SEQ ID NO: 133462 - RNA, 19 nt, Artificial Sequence
  Description of Artificial Sequence: Synthetic oligonucleotide
ggcaacggguacucagcug

SEQ ID NO: 133463 - RNA, 19 nt, Artificial Sequence
  Description of Artificial Sequence: Synthetic oligonucleotide
ggacgaagugagagggugc

SEQ ID NO: 133464 - RNA, 19 nt, Artificial Sequence
  Description of Artificial Sequence: Synthetic oligonucleotide
cuguacgguaggcaugucu

SEQ ID NO: 133465 - RNA, 19 nt, Artificial Sequence
  Description of Artificial Sequence: Synthetic oligonucleotide
uugcggcacuucagugaca

SEQ ID NO: 133466 - RNA, 19 nt, Artificial Sequence
  Description of Artificial Sequence: Synthetic oligonucleotide
accucaccuugugaaugug

SEQ ID NO: 133467 - RNA, 19 nt, Artificial Sequence
  Description of Artificial Sequence: Synthetic oligonucleotide
acccgguguuccuuggcuu

SEQ ID NO: 133468 - RNA, 19 nt, Artificial Sequence
  Description of Artificial Sequence: Synthetic oligonucleotide
guaauguauuggugacacu

SEQ ID NO: 133469 - RNA, 19 nt, Artificial Sequence
  Description of Artificial Sequence: Synthetic oligonucleotide
uucugucauugagacgcuu

SEQ ID NO: 133470 - RNA, 19 nt, Artificial Sequence
  Description of Artificial Sequence: Synthetic oligonucleotide
guuucgcacaguggugcuc

SEQ ID NO: 133471 - RNA, 19 nt, Artificial Sequence
  Description of Artificial Sequence: Synthetic oligonucleotide
gcugcguaacuccacauuu

SEQ ID NO: 133472 - RNA, 19 nt, Artificial Sequence
  Description of Artificial Sequence: Synthetic oligonucleotide
cgucgauaaucuaacaucu

SEQ ID NO: 133473 - RNA, 19 nt, Artificial Sequence
  Description of Artificial Sequence: Synthetic oligonucleotide
gcaaaggcgagaagcaucu

SEQ ID NO: 133474 - RNA, 19 nt, Artificial Sequence
  Description of Artificial Sequence: Synthetic oligonucleotide
auucugucauugagacgcu

SEQ ID NO: 133475 - RNA, 19 nt, Artificial Sequence
  Description of Artificial Sequence: Synthetic oligonucleotide
ccaacggauguccuccguc

SEQ ID NO: 133476 - RNA, 19 nt, Artificial Sequence
  Description of Artificial Sequence: Synthetic oligonucleotide
cgugucacacgcuuaguga

SEQ ID NO: 133477 - RNA, 19 nt, Artificial Sequence
  Description of Artificial Sequence: Synthetic oligonucleotide
ugccucggugauccaccaa

SEQ ID NO: 133478 - RNA, 19 nt, Artificial Sequence
  Description of Artificial Sequence: Synthetic oligonucleotide
agacucgcaugaguguaua

SEQ ID NO: 133479 - RNA, 19 nt, Artificial Sequence
  Description of Artificial Sequence: Synthetic oligonucleotide
gucgguguucacagucuuc

SEQ ID NO: 133480 - RNA, 19 nt, Artificial Sequence
  Description of Artificial Sequence: Synthetic oligonucleotide
ggugauccaccaagcaaga

SEQ ID NO: 133481 - RNA, 19 nt, Artificial Sequence
  Description of Artificial Sequence: Synthetic oligonucleotide
ggcaguucauuccaagguu

SEQ ID NO: 133482 - RNA, 19 nt, Artificial Sequence
  Description of Artificial Sequence: Synthetic oligonucleotide
cugcuucuggacagaaccu

SEQ ID NO: 133483 - RNA, 19 nt, Artificial Sequence
  Description of Artificial Sequence: Synthetic oligonucleotide
ggguucgcccuuugcgaug

SEQ ID NO: 133484 - RNA, 19 nt, Artificial Sequence
  Description of Artificial Sequence: Synthetic oligonucleotide
guccuccgucaucucuagc

SEQ ID NO: 133485 - RNA, 19 nt, Artificial Sequence
  Description of Artificial Sequence: Synthetic oligonucleotide
gcaagaucagagaagccau

SEQ ID NO: 133486 - RNA, 19 nt, Artificial Sequence
  Description of Artificial Sequence: Synthetic oligonucleotide
gcugcugcugcugcugcug

SEQ ID NO: 133487 - RNA, 19 nt, Artificial Sequence
  Description of Artificial Sequence: Synthetic oligonucleotide
cuuuauaguccugggcaau

SEQ ID NO: 133488 - RNA, 19 nt, Artificial Sequence
  Description of Artificial Sequence: Synthetic oligonucleotide
ccacaaaucaaucgguaau

SEQ ID NO: 133489 - RNA, 19 nt, Artificial Sequence
  Description of Artificial Sequence: Synthetic oligonucleotide
gcuuagugauccguccaca

SEQ ID NO: 133490 - RNA, 19 nt, Artificial Sequence
  Description of Artificial Sequence: Synthetic oligonucleotide
ggcggauguggccaagucu

SEQ ID NO: 133491 - RNA, 19 nt, Artificial Sequence
  Description of Artificial Sequence: Synthetic oligonucleotide
caccucaccuugugaaugu

SEQ ID NO: 133492 - RNA, 19 nt, Artificial Sequence
  Description of Artificial Sequence: Synthetic oligonucleotide
guacgguaggcaugucuau

SEQ ID NO: 133493 - RNA, 19 nt, Artificial Sequence
  Description of Artificial Sequence: Synthetic oligonucleotide
gccuagcuucccgggaccg

SEQ ID NO: 133494 - RNA, 19 nt, Artificial Sequence
  Description of Artificial Sequence: Synthetic oligonucleotide
acggcggauguggccaagu

SEQ ID NO: 133495 - RNA, 19 nt, Artificial Sequence
  Description of Artificial Sequence: Synthetic oligonucleotide
cguguaguuaaugcuucuc

SEQ ID NO: 133496 - RNA, 19 nt, Artificial Sequence
  Description of Artificial Sequence: Synthetic oligonucleotide
gcgcucccgaucaucucgg

SEQ ID NO: 133497 - RNA, 19 nt, Artificial Sequence
  Description of Artificial Sequence: Synthetic oligonucleotide
cugcugcugcugcugcuga

SEQ ID NO: 133498 - RNA, 19 nt, Artificial Sequence
  Description of Artificial Sequence: Synthetic oligonucleotide
agcucucgugucacacgcu

SEQ ID NO: 133499 - RNA, 19 nt, Artificial Sequence
  Description of Artificial Sequence: Synthetic oligonucleotide
gcacacgcugugugaagaa

SEQ ID NO: 133500 - RNA, 19 nt, Artificial Sequence
  Description of Artificial Sequence: Synthetic oligonucleotide
gcucccuuacguccugcaa

SEQ ID NO: 133501 - RNA, 19 nt, Artificial Sequence
  Description of Artificial Sequence: Synthetic oligonucleotide
agggugcacuauacaggaa

SEQ ID NO: 133502 - RNA, 19 nt, Artificial Sequence
  Description of Artificial Sequence: Synthetic oligonucleotide
acgcugguguaggauccuu

SEQ ID NO: 133503 - RNA, 19 nt, Artificial Sequence
  Description of Artificial Sequence: Synthetic oligonucleotide
cuuacaggauuuggccaau

SEQ ID NO: 133504 - RNA, 19 nt, Artificial Sequence
  Description of Artificial Sequence: Synthetic oligonucleotide
caaugagcuuuuggcgugu

SEQ ID NO: 133505 - RNA, 19 nt, Artificial Sequence
  Description of Artificial Sequence: Synthetic oligonucleotide
gcucuaggagucgguguuc

SEQ ID NO: 133506 - RNA, 19 nt, Artificial Sequence
  Description of Artificial Sequence: Synthetic oligonucleotide
gcuuccuguagaguaucgu

SEQ ID NO: 133507 - RNA, 19 nt, Artificial Sequence
  Description of Artificial Sequence: Synthetic oligonucleotide
gguucgcccuuugcgaugu

SEQ ID NO: 133508 - RNA, 19 nt, Artificial Sequence
  Description of Artificial Sequence: Synthetic oligonucleotide
gcguaacuccacauuucaa

SEQ ID NO: 133509 - RNA, 19 nt, Artificial Sequence
  Description of Artificial Sequence: Synthetic oligonucleotide
gcguguaguuaaugcuucu

SEQ ID NO: 133510 - RNA, 19 nt, Artificial Sequence
  Description of Artificial Sequence: Synthetic oligonucleotide
ggcugcguaacuccacauu

SEQ ID NO: 133511 - RNA, 19 nt, Artificial Sequence
  Description of Artificial Sequence: Synthetic oligonucleotide
ccacacggagaauagcuuu

SEQ ID NO: 133512 - RNA, 19 nt, Artificial Sequence
  Description of Artificial Sequence: Synthetic oligonucleotide
gguguuggugccaccucgu

SEQ ID NO: 133513 - RNA, 19 nt, Artificial Sequence
  Description of Artificial Sequence: Synthetic oligonucleotide
cacacacgggucacgucuu

SEQ ID NO: 133514 - RNA, 19 nt, Artificial Sequence
  Description of Artificial Sequence: Synthetic oligonucleotide
gaguaucguuucgcacagu

SEQ ID NO: 133515 - RNA, 19 nt, Artificial Sequence
  Description of Artificial Sequence: Synthetic oligonucleotide
caccucguagaaggacgaa

SEQ ID NO: 133516 - RNA, 19 nt, Artificial Sequence
  Description of Artificial Sequence: Synthetic oligonucleotide
cugcacagugguguuuaau

SEQ ID NO: 133517 - RNA, 19 nt, Artificial Sequence
  Description of Artificial Sequence: Synthetic oligonucleotide
cucgugucacacgcuuagu

SEQ ID NO: 133518 - RNA, 19 nt, Artificial Sequence
  Description of Artificial Sequence: Synthetic oligonucleotide
ccgggaaagcaggcugcug

SEQ ID NO: 133519 - RNA, 19 nt, Artificial Sequence
  Description of Artificial Sequence: Synthetic oligonucleotide
ggcugcugcugcugcugcu

SEQ ID NO: 133520 - RNA, 19 nt, Artificial Sequence
  Description of Artificial Sequence: Synthetic oligonucleotide
cgcucccgaucaucucggc

SEQ ID NO: 133521 - RNA, 19 nt, Artificial Sequence
  Description of Artificial Sequence: Synthetic oligonucleotide
guucgcccuuugcgaugua

SEQ ID NO: 133522 - RNA, 19 nt, Artificial Sequence
  Description of Artificial Sequence: Synthetic oligonucleotide
cccacugaucacagauaau

SEQ ID NO: 133523 - RNA, 19 nt, Artificial Sequence
  Description of Artificial Sequence: Synthetic oligonucleotide
cgguaggcaugucuauaua

SEQ ID NO: 133524 - RNA, 19 nt, Artificial Sequence
  Description of Artificial Sequence: Synthetic oligonucleotide
cccuuacguccugcaagca

SEQ ID NO: 133525 - RNA, 19 nt, Artificial Sequence
  Description of Artificial Sequence: Synthetic oligonucleotide
cguuucgcacaguggugcu

SEQ ID NO: 133526 - RNA, 19 nt, Artificial Sequence
  Description of Artificial Sequence: Synthetic oligonucleotide
cugcucuacuguggguguu

SEQ ID NO: 133527 - RNA, 19 nt, Artificial Sequence
  Description of Artificial Sequence: Synthetic oligonucleotide
cccgggaccgaggaagguu

SEQ ID NO: 133528 - RNA, 19 nt, Artificial Sequence
  Description of Artificial Sequence: Synthetic oligonucleotide
  modified_base (1)..(1): a, c, u, g, unknown or other
nugaaagaaucauuggguc

SEQ ID NO: 133529 - RNA, 19 nt, Artificial Sequence
  Description of Artificial Sequence: Synthetic oligonucleotide
agaguuuuaauacaaacgc

SEQ ID NO: 133530 - RNA, 19 nt, Artificial Sequence
  Description of Artificial Sequence: Synthetic oligonucleotide
aaugcuaaaacucgaauca

SEQ ID NO: 133531 - RNA, 19 nt, Artificial Sequence
  Description of Artificial Sequence: Synthetic oligonucleotide
uuaaugaacacacugcuug

SEQ ID NO: 133532 - RNA, 19 nt, Artificial Sequence
  Description of Artificial Sequence: Synthetic oligonucleotide
uaaaacucgaaucauaacu

SEQ ID NO: 133533 - RNA, 19 nt, Artificial Sequence
  Description of Artificial Sequence: Synthetic oligonucleotide
auauauauaaacgacgggg

SEQ ID NO: 133534 - RNA, 19 nt, Artificial Sequence
  Description of Artificial Sequence: Synthetic oligonucleotide
aaugaguuugggaugaccc

SEQ ID NO: 133535 - RNA, 19 nt, Artificial Sequence
  Description of Artificial Sequence: Synthetic oligonucleotide
aacgcuuuaaugaacacac

SEQ ID NO: 133536 - RNA, 19 nt, Artificial Sequence
  Description of Artificial Sequence: Synthetic oligonucleotide
aauuacuaagccaggauac

SEQ ID NO: 133537 - RNA, 19 nt, Artificial Sequence
  Description of Artificial Sequence: Synthetic oligonucleotide
uuugaguucccuccuaacg

SEQ ID NO: 133538 - RNA, 19 nt, Artificial Sequence
  Description of Artificial Sequence: Synthetic oligonucleotide
uauacauaaguacaacgca

SEQ ID NO: 133539 - RNA, 19 nt, Artificial Sequence
  Description of Artificial Sequence: Synthetic oligonucleotide
aacuacuauccuuuugugg

SEQ ID NO: 133540 - RNA, 19 nt, Artificial Sequence
  Description of Artificial Sequence: Synthetic oligonucleotide
uauauauaaacgacggggu

SEQ ID NO: 133541 - RNA, 19 nt, Artificial Sequence
  Description of Artificial Sequence: Synthetic oligonucleotide
acuacuauccuuuugugga

SEQ ID NO: 133542 - RNA, 19 nt, Artificial Sequence
  Description of Artificial Sequence: Synthetic oligonucleotide
auuggaaagaggguguucc

SEQ ID NO: 133543 - RNA, 19 nt, Artificial Sequence
  Description of Artificial Sequence: Synthetic oligonucleotide
uaccgcaagguacugaugg

SEQ ID NO: 133544 - RNA, 19 nt, Artificial Sequence
  Description of Artificial Sequence: Synthetic oligonucleotide
uccaucaacgcccuucucg

SEQ ID NO: 133545 - RNA, 19 nt, Artificial Sequence
  Description of Artificial Sequence: Synthetic oligonucleotide
ugcgaugugaccaaauaug

SEQ ID NO: 133546 - RNA, 19 nt, Artificial Sequence
  Description of Artificial Sequence: Synthetic oligonucleotide
aaguaugacacucgaacca

SEQ ID NO: 133547 - RNA, 19 nt, Artificial Sequence
  Description of Artificial Sequence: Synthetic oligonucleotide
uauuagaguuuuaauacaa

SEQ ID NO: 133548 - RNA, 19 nt, Artificial Sequence
  Description of Artificial Sequence: Synthetic oligonucleotide
uuugcacugauucuaauua

SEQ ID NO: 133549 - RNA, 19 nt, Artificial Sequence
  Description of Artificial Sequence: Synthetic oligonucleotide
ucucaucuuaccaugcugc

SEQ ID NO: 133550 - RNA, 19 nt, Artificial Sequence
  Description of Artificial Sequence: Synthetic oligonucleotide
aaacggaccucccaacagg

SEQ ID NO: 133551 - RNA, 19 nt, Artificial Sequence
  Description of Artificial Sequence: Synthetic oligonucleotide
uuauuagaguuuuaauaca

SEQ ID NO: 133552 - RNA, 19 nt, Artificial Sequence
  Description of Artificial Sequence: Synthetic oligonucleotide
uauauaucuccaaguauga

SEQ ID NO: 133553 - RNA, 19 nt, Artificial Sequence
  Description of Artificial Sequence: Synthetic oligonucleotide
aaugaacacacugcuuggc

SEQ ID NO: 133554 - RNA, 19 nt, Artificial Sequence
  Description of Artificial Sequence: Synthetic oligonucleotide
aguacaacgcaaguguggc

SEQ ID NO: 133555 - RNA, 19 nt, Artificial Sequence
  Description of Artificial Sequence: Synthetic oligonucleotide
uucgauacggcacaugggu

SEQ ID NO: 133556 - RNA, 19 nt, Artificial Sequence
  Description of Artificial Sequence: Synthetic oligonucleotide
ucaguucaaaggcacuagg

SEQ ID NO: 133557 - RNA, 19 nt, Artificial Sequence
  Description of Artificial Sequence: Synthetic oligonucleotide
caguuuagaguuucgauac

SEQ ID NO: 133558 - RNA, 19 nt, Artificial Sequence
  Description of Artificial Sequence: Synthetic oligonucleotide
uaaugaacacacugcuugg

SEQ ID NO: 133559 - RNA, 19 nt, Artificial Sequence
  Description of Artificial Sequence: Synthetic oligonucleotide
gaugggacacauucuaacc

SEQ ID NO: 133560 - RNA, 19 nt, Artificial Sequence
  Description of Artificial Sequence: Synthetic oligonucleotide
uuuagaguuucgauacggc

SEQ ID NO: 133561 - RNA, 19 nt, Artificial Sequence
  Description of Artificial Sequence: Synthetic oligonucleotide
gauaguuccccucaucuca

SEQ ID NO: 133562 - RNA, 19 nt, Artificial Sequence
  Description of Artificial Sequence: Synthetic oligonucleotide
uuagaguuucgauacggca

SEQ ID NO: 133563 - RNA, 19 nt, Artificial Sequence
  Description of Artificial Sequence: Synthetic oligonucleotide
aagacgugucaguuuagag

SEQ ID NO: 133564 - RNA, 19 nt, Artificial Sequence
  Description of Artificial Sequence: Synthetic oligonucleotide
aaacuuugcccauuccuca

SEQ ID NO: 133565 - RNA, 19 nt, Artificial Sequence
  Description of Artificial Sequence: Synthetic oligonucleotide
caaguaugacacucgaacc

SEQ ID NO: 133566 - RNA, 19 nt, Artificial Sequence
  Description of Artificial Sequence: Synthetic oligonucleotide
auuuauagcucugucccac

SEQ ID NO: 133567 - RNA, 19 nt, Artificial Sequence
  Description of Artificial Sequence: Synthetic oligonucleotide
ucgaaucauaacuuuaaaa

SEQ ID NO: 133568 - RNA, 19 nt, Artificial Sequence
  Description of Artificial Sequence: Synthetic oligonucleotide
uuggcauaccgcaagguac

SEQ ID NO: 133569 - RNA, 19 nt, Artificial Sequence
  Description of Artificial Sequence: Synthetic oligonucleotide
aguaaugcuucucagguuu

SEQ ID NO: 133570 - RNA, 19 nt, Artificial Sequence
  Description of Artificial Sequence: Synthetic oligonucleotide
guuuagaguuucgauacgg

SEQ ID NO: 133571 - RNA, 19 nt, Artificial Sequence
  Description of Artificial Sequence: Synthetic oligonucleotide
ucuucguuaauucucgcuu

SEQ ID NO: 133572 - RNA, 19 nt, Artificial Sequence
  Description of Artificial Sequence: Synthetic oligonucleotide
uuucgauacggcacauggg

SEQ ID NO: 133573 - RNA, 19 nt, Artificial Sequence
  Description of Artificial Sequence: Synthetic oligonucleotide
agaaucagucuuauggacg

SEQ ID NO: 133574 - RNA, 19 nt, Artificial Sequence
  Description of Artificial Sequence: Synthetic oligonucleotide
agacgugucaguuuagagu

SEQ ID NO: 133575 - RNA, 19 nt, Artificial Sequence
  Description of Artificial Sequence: Synthetic oligonucleotide
caucuuaccaugcugcaug

SEQ ID NO: 133576 - RNA, 19 nt, Artificial Sequence
  Description of Artificial Sequence: Synthetic oligonucleotide
ugcuuuugcgaugugacca

SEQ ID NO: 133577 - RNA, 19 nt, Artificial Sequence
  Description of Artificial Sequence: Synthetic oligonucleotide
cauaaguacaacgcaagug

SEQ ID NO: 133578 - RNA, 19 nt, Artificial Sequence
  Description of Artificial Sequence: Synthetic oligonucleotide
caaugucaugauucuaucc

SEQ ID NO: 133579 - RNA, 19 nt, Artificial Sequence
  Description of Artificial Sequence: Synthetic oligonucleotide
uguauccuggucaguaaca

SEQ ID NO: 133580 - RNA, 19 nt, Artificial Sequence
  Description of Artificial Sequence: Synthetic oligonucleotide
uuauggacggugauaguuc

SEQ ID NO: 133581 - RNA, 19 nt, Artificial Sequence
  Description of Artificial Sequence: Synthetic oligonucleotide
acuaugcucauucauguua

SEQ ID NO: 133582 - RNA, 19 nt, Artificial Sequence
  Description of Artificial Sequence: Synthetic oligonucleotide
ggucaagaauccuauuugg

SEQ ID NO: 133583 - RNA, 19 nt, Artificial Sequence
  Description of Artificial Sequence: Synthetic oligonucleotide
guuaguggcaccaacagaa

SEQ ID NO: 133584 - RNA, 19 nt, Artificial Sequence
  Description of Artificial Sequence: Synthetic oligonucleotide
uauggacggugauaguucc

SEQ ID NO: 133585 - RNA, 19 nt, Artificial Sequence
  Description of Artificial Sequence: Synthetic oligonucleotide
cuaauuagucaaaacugca

SEQ ID NO: 133586 - RNA, 19 nt, Artificial Sequence
  Description of Artificial Sequence: Synthetic oligonucleotide
uagucaaaacugcaggcuc

SEQ ID NO: 133587 - RNA, 19 nt, Artificial Sequence
  Description of Artificial Sequence: Synthetic oligonucleotide
ucucucaucuaauuuucgu

SEQ ID NO: 133588 - RNA, 19 nt, Artificial Sequence
  Description of Artificial Sequence: Synthetic oligonucleotide
aguuuagaguuucgauacg

SEQ ID NO: 133589 - RNA, 19 nt, Artificial Sequence
  Description of Artificial Sequence: Synthetic oligonucleotide
ugacgucagaaccuguaca

SEQ ID NO: 133590 - RNA, 19 nt, Artificial Sequence
  Description of Artificial Sequence: Synthetic oligonucleotide
acagcaaacuuacuauaca

SEQ ID NO: 133591 - RNA, 19 nt, Artificial Sequence
  Description of Artificial Sequence: Synthetic oligonucleotide
uuuaaugaacacacugcuu

SEQ ID NO: 133592 - RNA, 19 nt, Artificial Sequence
  Description of Artificial Sequence: Synthetic oligonucleotide
uuugcgaugugaccaaaua

SEQ ID NO: 133593 - RNA, 19 nt, Artificial Sequence
  Description of Artificial Sequence: Synthetic oligonucleotide
agaucagccaucucugacu

SEQ ID NO: 133594 - RNA, 19 nt, Artificial Sequence
  Description of Artificial Sequence: Synthetic oligonucleotide
uaucccagugaucgugagg

SEQ ID NO: 133595 - RNA, 19 nt, Artificial Sequence
  Description of Artificial Sequence: Synthetic oligonucleotide
cucucaucuaauuuucguc

SEQ ID NO: 133596 - RNA, 19 nt, Artificial Sequence
  Description of Artificial Sequence: Synthetic oligonucleotide
uaaacgacgggguugcaua

SEQ ID NO: 133597 - RNA, 19 nt, Artificial Sequence
  Description of Artificial Sequence: Synthetic oligonucleotide
ccaaguaugacacucgaac

SEQ ID NO: 133598 - RNA, 19 nt, Artificial Sequence
  Description of Artificial Sequence: Synthetic oligonucleotide
ucacuugcaaccucagcac

SEQ ID NO: 133599 - RNA, 19 nt, Artificial Sequence
  Description of Artificial Sequence: Synthetic oligonucleotide
uaggcuacauggaacuaac

SEQ ID NO: 133600 - RNA, 19 nt, Artificial Sequence
  Description of Artificial Sequence: Synthetic oligonucleotide
ugagcuacauacaggguuu

SEQ ID NO: 133601 - RNA, 19 nt, Artificial Sequence
  Description of Artificial Sequence: Synthetic oligonucleotide
uccuaacgaauccugcaga

SEQ ID NO: 133602 - RNA, 19 nt, Artificial Sequence
  Description of Artificial Sequence: Synthetic oligonucleotide
acauaaguacaacgcaagu

SEQ ID NO: 133603 - RNA, 19 nt, Artificial Sequence
  Description of Artificial Sequence: Synthetic oligonucleotide
uugcgaugugaccaaauau

SEQ ID NO: 133604 - RNA, 19 nt, Artificial Sequence
  Description of Artificial Sequence: Synthetic oligonucleotide
ugcuaaaacucgaaucaua

SEQ ID NO: 133605 - RNA, 19 nt, Artificial Sequence
  Description of Artificial Sequence: Synthetic oligonucleotide
gaacuaugcucauucaugu

SEQ ID NO: 133606 - RNA, 19 nt, Artificial Sequence
  Description of Artificial Sequence: Synthetic oligonucleotide
uacaugaggcagcuuauuu

SEQ ID NO: 133607 - RNA, 19 nt, Artificial Sequence
  Description of Artificial Sequence: Synthetic oligonucleotide
gauucuauccaugucgucu

SEQ ID NO: 133608 - RNA, 19 nt, Artificial Sequence
  Description of Artificial Sequence: Synthetic oligonucleotide
uauuugcacacaucauggu

SEQ ID NO: 133609 - RNA, 19 nt, Artificial Sequence
  Description of Artificial Sequence: Synthetic oligonucleotide
cucgcuacauucuauagua

SEQ ID NO: 133610 - RNA, 19 nt, Artificial Sequence
  Description of Artificial Sequence: Synthetic oligonucleotide
cuccuaacgaauccugcag

SEQ ID NO: 133611 - RNA, 19 nt, Artificial Sequence
  Description of Artificial Sequence: Synthetic oligonucleotide
uggacggugauaguucccc

SEQ ID NO: 133612 - RNA, 19 nt, Artificial Sequence
  Description of Artificial Sequence: Synthetic oligonucleotide
uuuguauccuggucaguaa

SEQ ID NO: 133613 - RNA, 19 nt, Artificial Sequence
  Description of Artificial Sequence: Synthetic oligonucleotide
ggaucuucguuaauucucg

SEQ ID NO: 133614 - RNA, 19 nt, Artificial Sequence
  Description of Artificial Sequence: Synthetic oligonucleotide
gacgugucaguuuagaguu

SEQ ID NO: 133615 - RNA, 19 nt, Artificial Sequence
  Description of Artificial Sequence: Synthetic oligonucleotide
aaacauuagucaaguuugu

SEQ ID NO: 133616 - RNA, 19 nt, Artificial Sequence
  Description of Artificial Sequence: Synthetic oligonucleotide
caaacggaccucccaacag

SEQ ID NO: 133617 - RNA, 19 nt, Artificial Sequence
  Description of Artificial Sequence: Synthetic oligonucleotide
agcacggacgccuuccaug

SEQ ID NO: 133618 - RNA, 19 nt, Artificial Sequence
  Description of Artificial Sequence: Synthetic oligonucleotide
aaguagaaaaucaccuuuu

SEQ ID NO: 133619 - RNA, 19 nt, Artificial Sequence
  Description of Artificial Sequence: Synthetic oligonucleotide
uagucaaguuuguucuaca

SEQ ID NO: 133620 - RNA, 19 nt, Artificial Sequence
  Description of Artificial Sequence: Synthetic oligonucleotide
augugaccaaauaugugag

SEQ ID NO: 133621 - RNA, 19 nt, Artificial Sequence
  Description of Artificial Sequence: Synthetic oligonucleotide
ugacggccugucuauagca

SEQ ID NO: 133622 - RNA, 19 nt, Artificial Sequence
  Description of Artificial Sequence: Synthetic oligonucleotide
guaauuguaaagauggcau

SEQ ID NO: 133623 - RNA, 19 nt, Artificial Sequence
  Description of Artificial Sequence: Synthetic oligonucleotide
ugauaguuccccucaucuc

SEQ ID NO: 133624 - RNA, 19 nt, Artificial Sequence
  Description of Artificial Sequence: Synthetic oligonucleotide
uucaaacggaccucccaac

SEQ ID NO: 133625 - RNA, 19 nt, Artificial Sequence
  Description of Artificial Sequence: Synthetic oligonucleotide
ugcuggcccaauauuugca

SEQ ID NO: 133626 - RNA, 19 nt, Artificial Sequence
  Description of Artificial Sequence: Synthetic oligonucleotide
cauuguagccuuccagaac

SEQ ID NO: 133627 - RNA, 19 nt, Artificial Sequence
  Description of Artificial Sequence: Synthetic oligonucleotide
uaggucuugcaguuaaguu

SEQ ID NO: 133628 - RNA, 19 nt, Artificial Sequence
  Description of Artificial Sequence: Synthetic oligonucleotide
uacaacgcaaguguggcuu

SEQ ID NO: 133629 - RNA, 19 nt, Artificial Sequence
  Description of Artificial Sequence: Synthetic oligonucleotide
uuuugcgaugugaccaaau

SEQ ID NO: 133630 - RNA, 19 nt, Artificial Sequence
  Description of Artificial Sequence: Synthetic oligonucleotide
aguggcaccaacagaacga

SEQ ID NO: 133631 - RNA, 19 nt, Artificial Sequence
  Description of Artificial Sequence: Synthetic oligonucleotide
cuacuauccuuuuguggac

SEQ ID NO: 133632 - RNA, 19 nt, Artificial Sequence
  Description of Artificial Sequence: Synthetic oligonucleotide
cuacauggaacuaacucua

SEQ ID NO: 133633 - RNA, 19 nt, Artificial Sequence
  Description of Artificial Sequence: Synthetic oligonucleotide
auuacuaagccaggauacu

SEQ ID NO: 133634 - RNA, 19 nt, Artificial Sequence
  Description of Artificial Sequence: Synthetic oligonucleotide
acaacgcaaguguggcuuc

SEQ ID NO: 133635 - RNA, 19 nt, Artificial Sequence
  Description of Artificial Sequence: Synthetic oligonucleotide
aacuaugcucauucauguu

SEQ ID NO: 133636 - RNA, 19 nt, Artificial Sequence
  Description of Artificial Sequence: Synthetic oligonucleotide
cuuggcgugaugacaucac

SEQ ID NO: 133637 - RNA, 19 nt, Artificial Sequence
  Description of Artificial Sequence: Synthetic oligonucleotide
acaccaccgacaaugaccu

SEQ ID NO: 133638 - RNA, 19 nt, Artificial Sequence
  Description of Artificial Sequence: Synthetic oligonucleotide
aacauuagucaaguuuguu

SEQ ID NO: 133639 - RNA, 19 nt, Artificial Sequence
  Description of Artificial Sequence: Synthetic oligonucleotide
uccaccuuauuagaguuuu

SEQ ID NO: 133640 - RNA, 19 nt, Artificial Sequence
  Description of Artificial Sequence: Synthetic oligonucleotide
uuggcgugaugacaucacu

SEQ ID NO: 133641 - RNA, 19 nt, Artificial Sequence
  Description of Artificial Sequence: Synthetic oligonucleotide
aaacgacgggguugcauaa

SEQ ID NO: 133642 - RNA, 19 nt, Artificial Sequence
  Description of Artificial Sequence: Synthetic oligonucleotide
acuuccaaccgcugagacu

SEQ ID NO: 133643 - RNA, 19 nt, Artificial Sequence
  Description of Artificial Sequence: Synthetic oligonucleotide
uuuccgaaguugccucucu

SEQ ID NO: 133644 - RNA, 19 nt, Artificial Sequence
  Description of Artificial Sequence: Synthetic oligonucleotide
uuacuaagccaggauacuu

SEQ ID NO: 133645 - RNA, 19 nt, Artificial Sequence
  Description of Artificial Sequence: Synthetic oligonucleotide
aguaugacacucgaaccaa

SEQ ID NO: 133646 - RNA, 19 nt, Artificial Sequence
  Description of Artificial Sequence: Synthetic oligonucleotide
uacuauccuuuuguggaca

SEQ ID NO: 133647 - RNA, 19 nt, Artificial Sequence
  Description of Artificial Sequence: Synthetic oligonucleotide
gcauuacgacuuaaaaggg

SEQ ID NO: 133648 - RNA, 19 nt, Artificial Sequence
  Description of Artificial Sequence: Synthetic oligonucleotide
ucuuuccgaaguugccucu

SEQ ID NO: 133649 - RNA, 19 nt, Artificial Sequence
  Description of Artificial Sequence: Synthetic oligonucleotide
ugucgucucaggccuuucu

SEQ ID NO: 133650 - RNA, 19 nt, Artificial Sequence
  Description of Artificial Sequence: Synthetic oligonucleotide
uggcauuauuuuguugcug

SEQ ID NO: 133651 - RNA, 19 nt, Artificial Sequence
  Description of Artificial Sequence: Synthetic oligonucleotide
cccugcgagauccacaagg

SEQ ID NO: 133652 - RNA, 19 nt, Artificial Sequence
  Description of Artificial Sequence: Synthetic oligonucleotide
uggcgugaugacaucacuu

SEQ ID NO: 133653 - RNA, 19 nt, Artificial Sequence
  Description of Artificial Sequence: Synthetic oligonucleotide
gaagcggcuacagcacugc

SEQ ID NO: 133654 - RNA, 19 nt, Artificial Sequence
  Description of Artificial Sequence: Synthetic oligonucleotide
aacggaccucccaacaggu

SEQ ID NO: 133655 - RNA, 19 nt, Artificial Sequence
  Description of Artificial Sequence: Synthetic oligonucleotide
acuauccuuuuguggacaa

SEQ ID NO: 133656 - RNA, 19 nt, Artificial Sequence
  Description of Artificial Sequence: Synthetic oligonucleotide
uaacuuccaaccgcugaga

SEQ ID NO: 133657 - RNA, 19 nt, Artificial Sequence
  Description of Artificial Sequence: Synthetic oligonucleotide
ccaucaacgcccuucucgc

SEQ ID NO: 133658 - RNA, 19 nt, Artificial Sequence
  Description of Artificial Sequence: Synthetic oligonucleotide
gcacggacgccuuccaugg

SEQ ID NO: 133659 - RNA, 19 nt, Artificial Sequence
  Description of Artificial Sequence: Synthetic oligonucleotide
agguuucguuggaagaauc

SEQ ID NO: 133660 - RNA, 19 nt, Artificial Sequence
  Description of Artificial Sequence: Synthetic oligonucleotide
aacgacgggguugcauaag

SEQ ID NO: 133661 - RNA, 19 nt, Artificial Sequence
  Description of Artificial Sequence: Synthetic oligonucleotide
guuggcauaccgcaaggua

SEQ ID NO: 133662 - RNA, 19 nt, Artificial Sequence
  Description of Artificial Sequence: Synthetic oligonucleotide
ggaacuaacucuauuucaa

SEQ ID NO: 133663 - RNA, 19 nt, Artificial Sequence
  Description of Artificial Sequence: Synthetic oligonucleotide
acuauacaguuuguauccu

SEQ ID NO: 133664 - RNA, 19 nt, Artificial Sequence
  Description of Artificial Sequence: Synthetic oligonucleotide
auaaucugcuggcccaaua

SEQ ID NO: 133665 - RNA, 19 nt, Artificial Sequence
  Description of Artificial Sequence: Synthetic oligonucleotide
ucguuaauucucgcuuugu

SEQ ID NO: 133666 - RNA, 19 nt, Artificial Sequence
  Description of Artificial Sequence: Synthetic oligonucleotide
aucaacgcccuucucgcua

SEQ ID NO: 133667 - RNA, 19 nt, Artificial Sequence
  Description of Artificial Sequence: Synthetic oligonucleotide
uccucaauucacagcucua

SEQ ID NO: 133668 - RNA, 19 nt, Artificial Sequence
  Description of Artificial Sequence: Synthetic oligonucleotide
ucgcuacauucuauaguaa

SEQ ID NO: 133669 - RNA, 19 nt, Artificial Sequence
  Description of Artificial Sequence: Synthetic oligonucleotide
auaaacgacgggguugcau

SEQ ID NO: 133670 - RNA, 19 nt, Artificial Sequence
  Description of Artificial Sequence: Synthetic oligonucleotide
uuucugacccugcgagauc

SEQ ID NO: 133671 - RNA, 19 nt, Artificial Sequence
  Description of Artificial Sequence: Synthetic oligonucleotide
ucgucucaggccuuucuuu

SEQ ID NO: 133672 - RNA, 19 nt, Artificial Sequence
  Description of Artificial Sequence: Synthetic oligonucleotide
cucaucuuaccaugcugca

SEQ ID NO: 133673 - RNA, 19 nt, Artificial Sequence
  Description of Artificial Sequence: Synthetic oligonucleotide
auggacggugauaguuccc

SEQ ID NO: 133674 - RNA, 19 nt, Artificial Sequence
  Description of Artificial Sequence: Synthetic oligonucleotide
cuugcagacugguauauuu

SEQ ID NO: 133675 - RNA, 19 nt, Artificial Sequence
  Description of Artificial Sequence: Synthetic oligonucleotide
aggauacuuagagaauuuu

SEQ ID NO: 133676 - RNA, 19 nt, Artificial Sequence
  Description of Artificial Sequence: Synthetic oligonucleotide
agucuuauggacggugaua

SEQ ID NO: 133677 - RNA, 19 nt, Artificial Sequence
  Description of Artificial Sequence: Synthetic oligonucleotide
cugaagccgaaagcucgcg

SEQ ID NO: 133678 - RNA, 19 nt, Artificial Sequence
  Description of Artificial Sequence: Synthetic oligonucleotide
augcuaaaacucgaaucau

SEQ ID NO: 133679 - RNA, 19 nt, Artificial Sequence
  Description of Artificial Sequence: Synthetic oligonucleotide
aagcggcuacagcacugcu

SEQ ID NO: 133680 - RNA, 19 nt, Artificial Sequence
  Description of Artificial Sequence: Synthetic oligonucleotide
cugagcuacauacaggguu

SEQ ID NO: 133681 - RNA, 19 nt, Artificial Sequence
  Description of Artificial Sequence: Synthetic oligonucleotide
aguuucgauacggcacaug

SEQ ID NO: 133682 - RNA, 19 nt, Artificial Sequence
  Description of Artificial Sequence: Synthetic oligonucleotide
cuaggcuacauggaacuaa

SEQ ID NO: 133683 - RNA, 19 nt, Artificial Sequence
  Description of Artificial Sequence: Synthetic oligonucleotide
gcgugaugacaucacuugc

SEQ ID NO: 133684 - RNA, 19 nt, Artificial Sequence
  Description of Artificial Sequence: Synthetic oligonucleotide
ggaugucccaccaucuuca

SEQ ID NO: 133685 - RNA, 19 nt, Artificial Sequence
  Description of Artificial Sequence: Synthetic oligonucleotide
gagcuacauacaggguuug

SEQ ID NO: 133686 - RNA, 19 nt, Artificial Sequence
  Description of Artificial Sequence: Synthetic oligonucleotide
gcuggcccaauauuugcac

SEQ ID NO: 133687 - RNA, 19 nt, Artificial Sequence
  Description of Artificial Sequence: Synthetic oligonucleotide
gcacugauucuaauuaguc

SEQ ID NO: 133688 - RNA, 19 nt, Artificial Sequence
  Description of Artificial Sequence: Synthetic oligonucleotide
gguuucguuggaagaauca

SEQ ID NO: 133689 - RNA, 19 nt, Artificial Sequence
  Description of Artificial Sequence: Synthetic oligonucleotide
acgucagaaccuguacacu

SEQ ID NO: 133690 - RNA, 19 nt, Artificial Sequence
  Description of Artificial Sequence: Synthetic oligonucleotide
acaggucaagaauccuauu

SEQ ID NO: 133691 - RNA, 19 nt, Artificial Sequence
  Description of Artificial Sequence: Synthetic oligonucleotide
caggucaagaauccuauuu

SEQ ID NO: 133692 - RNA, 19 nt, Artificial Sequence
  Description of Artificial Sequence: Synthetic oligonucleotide
cuuuccgaaguugccucuc

SEQ ID NO: 133693 - RNA, 19 nt, Artificial Sequence
  Description of Artificial Sequence: Synthetic oligonucleotide
auaguuccccucaucucau

SEQ ID NO: 133694 - RNA, 19 nt, Artificial Sequence
  Description of Artificial Sequence: Synthetic oligonucleotide
gcaagguacugaugguuuc

SEQ ID NO: 133695 - RNA, 19 nt, Artificial Sequence
  Description of Artificial Sequence: Synthetic oligonucleotide
acgggguugcauaaguguu

SEQ ID NO: 133696 - RNA, 19 nt, Artificial Sequence
  Description of Artificial Sequence: Synthetic oligonucleotide
uauaaacgacgggguugca

SEQ ID NO: 133697 - RNA, 19 nt, Artificial Sequence
  Description of Artificial Sequence: Synthetic oligonucleotide
cucgcggcugagccugccg

SEQ ID NO: 133698 - RNA, 19 nt, Artificial Sequence
  Description of Artificial Sequence: Synthetic oligonucleotide
acgcugacggccugucuau

SEQ ID NO: 133699 - RNA, 19 nt, Artificial Sequence
  Description of Artificial Sequence: Synthetic oligonucleotide
ucuugcagacugguauauu

SEQ ID NO: 133700 - RNA, 19 nt, Artificial Sequence
  Description of Artificial Sequence: Synthetic oligonucleotide
gaucuugaacuaugcucau

SEQ ID NO: 133701 - RNA, 19 nt, Artificial Sequence
  Description of Artificial Sequence: Synthetic oligonucleotide
cuuucugacccugcgagau

SEQ ID NO: 133702 - RNA, 19 nt, Artificial Sequence
  Description of Artificial Sequence: Synthetic oligonucleotide
uuccaaccgcugagacuga

SEQ ID NO: 133703 - RNA, 19 nt, Artificial Sequence
  Description of Artificial Sequence: Synthetic oligonucleotide
aacugacggagcagagcau

SEQ ID NO: 133704 - RNA, 19 nt, Artificial Sequence
  Description of Artificial Sequence: Synthetic oligonucleotide
uccuugcauuacgacuuaa

SEQ ID NO: 133705 - RNA, 19 nt, Artificial Sequence
  Description of Artificial Sequence: Synthetic oligonucleotide
ugcuuggcgugaugacauc

SEQ ID NO: 133706 - RNA, 19 nt, Artificial Sequence
  Description of Artificial Sequence: Synthetic oligonucleotide
ggcaccaacagaacgauuu

SEQ ID NO: 133707 - RNA, 19 nt, Artificial Sequence
  Description of Artificial Sequence: Synthetic oligonucleotide
aacgcccuucucgcuacau

SEQ ID NO: 133708 - RNA, 19 nt, Artificial Sequence
  Description of Artificial Sequence: Synthetic oligonucleotide
auaccgcaagguacugaug

SEQ ID NO: 133709 - RNA, 19 nt, Artificial Sequence
  Description of Artificial Sequence: Synthetic oligonucleotide
ccuccuaacgaauccugca

SEQ ID NO: 133710 - RNA, 19 nt, Artificial Sequence
  Description of Artificial Sequence: Synthetic oligonucleotide
ccuaacgaauccugcagaa

SEQ ID NO: 133711 - RNA, 19 nt, Artificial Sequence
  Description of Artificial Sequence: Synthetic oligonucleotide
ucuuaccaugcugcaugua

SEQ ID NO: 133712 - RNA, 19 nt, Artificial Sequence
  Description of Artificial Sequence: Synthetic oligonucleotide
cagugaucgugagguggag

SEQ ID NO: 133713 - RNA, 19 nt, Artificial Sequence
  Description of Artificial Sequence: Synthetic oligonucleotide
augucgucucaggccuuuc

SEQ ID NO: 133714 - RNA, 19 nt, Artificial Sequence
  Description of Artificial Sequence: Synthetic oligonucleotide
acggaccucccaacagguc

SEQ ID NO: 133715 - RNA, 19 nt, Artificial Sequence
  Description of Artificial Sequence: Synthetic oligonucleotide
cacuaggaagaacuguuuu

SEQ ID NO: 133716 - RNA, 19 nt, Artificial Sequence
  Description of Artificial Sequence: Synthetic oligonucleotide
acgcuuuaaugaacacacu

SEQ ID NO: 133717 - RNA, 19 nt, Artificial Sequence
  Description of Artificial Sequence: Synthetic oligonucleotide
gcgaugugaccaaauaugu

SEQ ID NO: 133718 - RNA, 19 nt, Artificial Sequence
  Description of Artificial Sequence: Synthetic oligonucleotide
aggcuacauggaacuaacu

SEQ ID NO: 133719 - RNA, 19 nt, Artificial Sequence
  Description of Artificial Sequence: Synthetic oligonucleotide
accucccaacaggucaaga

SEQ ID NO: 133720 - RNA, 19 nt, Artificial Sequence
  Description of Artificial Sequence: Synthetic oligonucleotide
gcuuggcgugaugacauca

SEQ ID NO: 133721 - RNA, 19 nt, Artificial Sequence
  Description of Artificial Sequence: Synthetic oligonucleotide
acggagcagagcauccuua

SEQ ID NO: 133722 - RNA, 19 nt, Artificial Sequence
  Description of Artificial Sequence: Synthetic oligonucleotide
ccuugauauucuggcugcc

SEQ ID NO: 133723 - RNA, 19 nt, Artificial Sequence
  Description of Artificial Sequence: Synthetic oligonucleotide
gcauccuuaggaucuucgu

SEQ ID NO: 133724 - RNA, 19 nt, Artificial Sequence
  Description of Artificial Sequence: Synthetic oligonucleotide
cuuuugcgaugugaccaaa

SEQ ID NO: 133725 - RNA, 19 nt, Artificial Sequence
  Description of Artificial Sequence: Synthetic oligonucleotide
gucgucucaggccuuucuu

SEQ ID NO: 133726 - RNA, 19 nt, Artificial Sequence
  Description of Artificial Sequence: Synthetic oligonucleotide
ggcauaccgcaagguacug

SEQ ID NO: 133727 - RNA, 19 nt, Artificial Sequence
  Description of Artificial Sequence: Synthetic oligonucleotide
caguaaugcuucucagguu

SEQ ID NO: 133728 - RNA, 19 nt, Artificial Sequence
  Description of Artificial Sequence: Synthetic oligonucleotide
guggcaccaacagaacgau

SEQ ID NO: 133729 - RNA, 19 nt, Artificial Sequence
  Description of Artificial Sequence: Synthetic oligonucleotide
cagucuuauggacggugau

SEQ ID NO: 133730 - RNA, 19 nt, Artificial Sequence
  Description of Artificial Sequence: Synthetic oligonucleotide
cuauuggaaagaggguguu

SEQ ID NO: 133731 - RNA, 19 nt, Artificial Sequence
  Description of Artificial Sequence: Synthetic oligonucleotide
gcuaacacagagagauccu

SEQ ID NO: 133732 - RNA, 19 nt, Artificial Sequence
  Description of Artificial Sequence: Synthetic oligonucleotide
agcucgcggcugagccugc

SEQ ID NO: 133733 - RNA, 19 nt, Artificial Sequence
  Description of Artificial Sequence: Synthetic oligonucleotide
gcauaccgcaagguacuga

SEQ ID NO: 133734 - RNA, 19 nt, Artificial Sequence
  Description of Artificial Sequence: Synthetic oligonucleotide
cucuugcagacugguauau

SEQ ID NO: 133735 - RNA, 19 nt, Artificial Sequence
  Description of Artificial Sequence: Synthetic oligonucleotide
caucaacgcccuucucgcu

SEQ ID NO: 133736 - RNA, 19 nt, Artificial Sequence
  Description of Artificial Sequence: Synthetic oligonucleotide
acgugucaguuuagaguuu

SEQ ID NO: 133737 - RNA, 19 nt, Artificial Sequence
  Description of Artificial Sequence: Synthetic oligonucleotide
gggguugcauaaguguuau

SEQ ID NO: 133738 - RNA, 19 nt, Artificial Sequence
  Description of Artificial Sequence: Synthetic oligonucleotide
cgcuacauucuauaguaau

SEQ ID NO: 133739 - RNA, 19 nt, Artificial Sequence
  Description of Artificial Sequence: Synthetic oligonucleotide
gguuggcauaccgcaaggu

SEQ ID NO: 133740 - RNA, 19 nt, Artificial Sequence
  Description of Artificial Sequence: Synthetic oligonucleotide
gaguuucgauacggcacau

SEQ ID NO: 133741 - RNA, 19 nt, Artificial Sequence
  Description of Artificial Sequence: Synthetic oligonucleotide
ccuucucgcuacauucuau

SEQ ID NO: 133742 - RNA, 19 nt, Artificial Sequence
  Description of Artificial Sequence: Synthetic oligonucleotide
gcacuaggaagaacuguuu

SEQ ID NO: 133743 - RNA, 19 nt, Artificial Sequence
  Description of Artificial Sequence: Synthetic oligonucleotide
ccuaggcuacauggaacua

SEQ ID NO: 133744 - RNA, 19 nt, Artificial Sequence
  Description of Artificial Sequence: Synthetic oligonucleotide
ccgcaagguacugaugguu

SEQ ID NO: 133745 - RNA, 19 nt, Artificial Sequence
  Description of Artificial Sequence: Synthetic oligonucleotide
caccaccgacaaugaccuu

SEQ ID NO: 133746 - RNA, 19 nt, Artificial Sequence
  Description of Artificial Sequence: Synthetic oligonucleotide
aaauuuaagagguuccucg

SEQ ID NO: 133747 - RNA, 19 nt, Artificial Sequence
  Description of Artificial Sequence: Synthetic oligonucleotide
uucuauaccaaauacgacg

SEQ ID NO: 133748 - RNA, 19 nt, Artificial Sequence
  Description of Artificial Sequence: Synthetic oligonucleotide
uuuaacuaguacaucaggg

SEQ ID NO: 133749 - RNA, 19 nt, Artificial Sequence
  Description of Artificial Sequence: Synthetic oligonucleotide
caaaauuagggcuacaugc

SEQ ID NO: 133750 - RNA, 19 nt, Artificial Sequence
  Description of Artificial Sequence: Synthetic oligonucleotide
aacuaaucuuaccagcugc

SEQ ID NO: 133751 - RNA, 19 nt, Artificial Sequence
  Description of Artificial Sequence: Synthetic oligonucleotide
uuauagaaagauaauuccc

SEQ ID NO: 133752 - RNA, 19 nt, Artificial Sequence
  Description of Artificial Sequence: Synthetic oligonucleotide
aacucauucacugaccggc

SEQ ID NO: 133753 - RNA, 19 nt, Artificial Sequence
  Description of Artificial Sequence: Synthetic oligonucleotide
aauaggacaaaccuaacua

SEQ ID NO: 133754 - RNA, 19 nt, Artificial Sequence
  Description of Artificial Sequence: Synthetic oligonucleotide
ucaaucagccaccagaagc

SEQ ID NO: 133755 - RNA, 19 nt, Artificial Sequence
  Description of Artificial Sequence: Synthetic oligonucleotide
uaugcaauaaaacuagcaa

SEQ ID NO: 133756 - RNA, 19 nt, Artificial Sequence
  Description of Artificial Sequence: Synthetic oligonucleotide
aagggugaguuucauuugc

SEQ ID NO: 133757 - RNA, 19 nt, Artificial Sequence
  Description of Artificial Sequence: Synthetic oligonucleotide
ucuauaccaaauacgacgc

SEQ ID NO: 133758 - RNA, 19 nt, Artificial Sequence
  Description of Artificial Sequence: Synthetic oligonucleotide
aaauaggacaaaccuaacu

SEQ ID NO: 133759 - RNA, 19 nt, Artificial Sequence
  Description of Artificial Sequence: Synthetic oligonucleotide
cuuaauagggucgagauuc

SEQ ID NO: 133760 - RNA, 19 nt, Artificial Sequence
  Description of Artificial Sequence: Synthetic oligonucleotide
aagaagacgggugaauagc

SEQ ID NO: 133761 - RNA, 19 nt, Artificial Sequence
  Description of Artificial Sequence: Synthetic oligonucleotide
gaaggaaccccugaaaugg

SEQ ID NO: 133762 - RNA, 19 nt, Artificial Sequence
  Description of Artificial Sequence: Synthetic oligonucleotide
acaaaccuaacuaaacucc

SEQ ID NO: 133763 - RNA, 19 nt, Artificial Sequence
  Description of Artificial Sequence: Synthetic oligonucleotide
agagacauaaugguuuucc

SEQ ID NO: 133764 - RNA, 19 nt, Artificial Sequence
  Description of Artificial Sequence: Synthetic oligonucleotide
aguucaaucagccaccaga

SEQ ID NO: 133765 - RNA, 19 nt, Artificial Sequence
  Description of Artificial Sequence: Synthetic oligonucleotide
uuaacuaguacaucagggu

SEQ ID NO: 133766 - RNA, 19 nt, Artificial Sequence
  Description of Artificial Sequence: Synthetic oligonucleotide
aaaccgccagcccagcugc

SEQ ID NO: 133767 - RNA, 19 nt, Artificial Sequence
  Description of Artificial Sequence: Synthetic oligonucleotide
uccuuaaauaaguugccag

SEQ ID NO: 133768 - RNA, 19 nt, Artificial Sequence
  Description of Artificial Sequence: Synthetic oligonucleotide
ucuauggguaucuggagag

SEQ ID NO: 133769 - RNA, 19 nt, Artificial Sequence
  Description of Artificial Sequence: Synthetic oligonucleotide
aauaaguugccaguuauau

SEQ ID NO: 133770 - RNA, 19 nt, Artificial Sequence
  Description of Artificial Sequence: Synthetic oligonucleotide
uuuagguuuggcuucuccc

SEQ ID NO: 133771 - RNA, 19 nt, Artificial Sequence
  Description of Artificial Sequence: Synthetic oligonucleotide
uccacuaucccgaguaucc

SEQ ID NO: 133772 - RNA, 19 nt, Artificial Sequence
  Description of Artificial Sequence: Synthetic oligonucleotide
agauccagacccuacguuc

SEQ ID NO: 133773 - RNA, 19 nt, Artificial Sequence
  Description of Artificial Sequence: Synthetic oligonucleotide
ucgacagaaacucauucac

SEQ ID NO: 133774 - RNA, 19 nt, Artificial Sequence
  Description of Artificial Sequence: Synthetic oligonucleotide
gacaaaccuaacuaaacuc

SEQ ID NO: 133775 - RNA, 19 nt, Artificial Sequence
  Description of Artificial Sequence: Synthetic oligonucleotide
uucguuuucggcccagccg

SEQ ID NO: 133776 - RNA, 19 nt, Artificial Sequence
  Description of Artificial Sequence: Synthetic oligonucleotide
uaagaagacgggugaauag

SEQ ID NO: 133777 - RNA, 19 nt, Artificial Sequence
  Description of Artificial Sequence: Synthetic oligonucleotide
guacuguugggcuuggagg

SEQ ID NO: 133778 - RNA, 19 nt, Artificial Sequence
  Description of Artificial Sequence: Synthetic oligonucleotide
caaucagccaccagaagcc

SEQ ID NO: 133779 - RNA, 19 nt, Artificial Sequence
  Description of Artificial Sequence: Synthetic oligonucleotide
acuagauccagacccuacg

SEQ ID NO: 133780 - RNA, 19 nt, Artificial Sequence
  Description of Artificial Sequence: Synthetic oligonucleotide
ugcaacaacaagccugaag

SEQ ID NO: 133781 - RNA, 19 nt, Artificial Sequence
  Description of Artificial Sequence: Synthetic oligonucleotide
aaccccucuaugcuucccc

SEQ ID NO: 133782 - RNA, 19 nt, Artificial Sequence
  Description of Artificial Sequence: Synthetic oligonucleotide
aaguuagaugagguuaagg

SEQ ID NO: 133783 - RNA, 19 nt, Artificial Sequence
  Description of Artificial Sequence: Synthetic oligonucleotide
uauaccaaauacgacgcug

SEQ ID NO: 133784 - RNA, 19 nt, Artificial Sequence
  Description of Artificial Sequence: Synthetic oligonucleotide
cugaacuaaucuuaccagc

SEQ ID NO: 133785 - RNA, 19 nt, Artificial Sequence
  Description of Artificial Sequence: Synthetic oligonucleotide
acucgaaagagguucaggu

SEQ ID NO: 133786 - RNA, 19 nt, Artificial Sequence
  Description of Artificial Sequence: Synthetic oligonucleotide
ugcuuauuaguccucggcu

SEQ ID NO: 133787 - RNA, 19 nt, Artificial Sequence
  Description of Artificial Sequence: Synthetic oligonucleotide
ucugcguccacuaucccga

SEQ ID NO: 133788 - RNA, 19 nt, Artificial Sequence
  Description of Artificial Sequence: Synthetic oligonucleotide
gaaaaugggguuccugagc

SEQ ID NO: 133789 - RNA, 19 nt, Artificial Sequence
  Description of Artificial Sequence: Synthetic oligonucleotide
auaccaaauacgacgcugc

SEQ ID NO: 133790 - RNA, 19 nt, Artificial Sequence
  Description of Artificial Sequence: Synthetic oligonucleotide
acuugaaagauccggcuca

SEQ ID NO: 133791 - RNA, 19 nt, Artificial Sequence
  Description of Artificial Sequence: Synthetic oligonucleotide
ugacauagcuccuccacgc

SEQ ID NO: 133792 - RNA, 19 nt, Artificial Sequence
  Description of Artificial Sequence: Synthetic oligonucleotide
ugacauugauuugaggaag

SEQ ID NO: 133793 - RNA, 19 nt, Artificial Sequence
  Description of Artificial Sequence: Synthetic oligonucleotide
uugcuuauuaguccucggc

SEQ ID NO: 133794 - RNA, 19 nt, Artificial Sequence
  Description of Artificial Sequence: Synthetic oligonucleotide
uucccauuggacaucugcc

SEQ ID NO: 133795 - RNA, 19 nt, Artificial Sequence
  Description of Artificial Sequence: Synthetic oligonucleotide
cauucguuucaucucauac

SEQ ID NO: 133796 - RNA, 19 nt, Artificial Sequence
  Description of Artificial Sequence: Synthetic oligonucleotide
auccuugcaacaacaagcc

SEQ ID NO: 133797 - RNA, 19 nt, Artificial Sequence
  Description of Artificial Sequence: Synthetic oligonucleotide
agcaacggugcacagcugg

SEQ ID NO: 133798 - RNA, 19 nt, Artificial Sequence
  Description of Artificial Sequence: Synthetic oligonucleotide
uuaucaggaugaaccauca

SEQ ID NO: 133799 - RNA, 19 nt, Artificial Sequence
  Description of Artificial Sequence: Synthetic oligonucleotide
uuucaaaccuccuaugcuu

SEQ ID NO: 133800 - RNA, 19 nt, Artificial Sequence
  Description of Artificial Sequence: Synthetic oligonucleotide
cacuagccuaagaagacgg

SEQ ID NO: 133801 - RNA, 19 nt, Artificial Sequence
  Description of Artificial Sequence: Synthetic oligonucleotide
agaaguuggaaaauggggu

SEQ ID NO: 133802 - RNA, 19 nt, Artificial Sequence
  Description of Artificial Sequence: Synthetic oligonucleotide
uagccuaagaagacgggug

SEQ ID NO: 133803 - RNA, 19 nt, Artificial Sequence
  Description of Artificial Sequence: Synthetic oligonucleotide
agaagacgggugaauagcc

SEQ ID NO: 133804 - RNA, 19 nt, Artificial Sequence
  Description of Artificial Sequence: Synthetic oligonucleotide
auagggucgagauucucug

SEQ ID NO: 133805 - RNA, 19 nt, Artificial Sequence
  Description of Artificial Sequence: Synthetic oligonucleotide
agcuucuauaccaaauacg

SEQ ID NO: 133806 - RNA, 19 nt, Artificial Sequence
  Description of Artificial Sequence: Synthetic oligonucleotide
aucuggcacucuuagguuc

SEQ ID NO: 133807 - RNA, 19 nt, Artificial Sequence
  Description of Artificial Sequence: Synthetic oligonucleotide
gaacuaaucuuaccagcug

SEQ ID NO: 133808 - RNA, 19 nt, Artificial Sequence
  Description of Artificial Sequence: Synthetic oligonucleotide
gacauugauuugaggaagg

SEQ ID NO: 133809 - RNA, 19 nt, Artificial Sequence
  Description of Artificial Sequence: Synthetic oligonucleotide
guacccgagaaccaaauga

SEQ ID NO: 133810 - RNA, 19 nt, Artificial Sequence
  Description of Artificial Sequence: Synthetic oligonucleotide
gacgcugcgcauuucauca

SEQ ID NO: 133811 - RNA, 19 nt, Artificial Sequence
  Description of Artificial Sequence: Synthetic oligonucleotide
uggccugcuaucucgaagc

SEQ ID NO: 133812 - RNA, 19 nt, Artificial Sequence
  Description of Artificial Sequence: Synthetic oligonucleotide
aaucacugggaaauuuaag

SEQ ID NO: 133813 - RNA, 19 nt, Artificial Sequence
  Description of Artificial Sequence: Synthetic oligonucleotide
guaggugaucuugagaccc

SEQ ID NO: 133814 - RNA, 19 nt, Artificial Sequence
  Description of Artificial Sequence: Synthetic oligonucleotide
uaccaaauacgacgcugcg

SEQ ID NO: 133815 - RNA, 19 nt, Artificial Sequence
  Description of Artificial Sequence: Synthetic oligonucleotide
cuuauuaguccucggcuug

SEQ ID NO: 133816 - RNA, 19 nt, Artificial Sequence
  Description of Artificial Sequence: Synthetic oligonucleotide
uuguagcuucgacagaaac

SEQ ID NO: 133817 - RNA, 19 nt, Artificial Sequence
  Description of Artificial Sequence: Synthetic oligonucleotide
uccggcucaagaaauccug

SEQ ID NO: 133818 - RNA, 19 nt, Artificial Sequence
  Description of Artificial Sequence: Synthetic oligonucleotide
gagcccagccuuaauaggg

SEQ ID NO: 133819 - RNA, 19 nt, Artificial Sequence
  Description of Artificial Sequence: Synthetic oligonucleotide
auaaugguuuucccuucuc

SEQ ID NO: 133820 - RNA, 19 nt, Artificial Sequence
  Description of Artificial Sequence: Synthetic oligonucleotide
uacuugaaagauccggcuc

SEQ ID NO: 133821 - RNA, 19 nt, Artificial Sequence
  Description of Artificial Sequence: Synthetic oligonucleotide
aggugcauuaccuugcuua

SEQ ID NO: 133822 - RNA, 19 nt, Artificial Sequence
  Description of Artificial Sequence: Synthetic oligonucleotide
aauacgacgcugcgcauuu

SEQ ID NO: 133823 - RNA, 19 nt, Artificial Sequence
  Description of Artificial Sequence: Synthetic oligonucleotide
gcuaucucgaagcagaguc

SEQ ID NO: 133824 - RNA, 19 nt, Artificial Sequence
  Description of Artificial Sequence: Synthetic oligonucleotide
accaaauacgacgcugcgc

SEQ ID NO: 133825 - RNA, 19 nt, Artificial Sequence
  Description of Artificial Sequence: Synthetic oligonucleotide
cugacauagcuccuccacg

SEQ ID NO: 133826 - RNA, 19 nt, Artificial Sequence
  Description of Artificial Sequence: Synthetic oligonucleotide
ucccgguccauuucaaacc

SEQ ID NO: 133827 - RNA, 19 nt, Artificial Sequence
  Description of Artificial Sequence: Synthetic oligonucleotide
uauggaaggucaaccuugu

SEQ ID NO: 133828 - RNA, 19 nt, Artificial Sequence
  Description of Artificial Sequence: Synthetic oligonucleotide
cuucuauaccaaauacgac

SEQ ID NO: 133829 - RNA, 19 nt, Artificial Sequence
  Description of Artificial Sequence: Synthetic oligonucleotide
cucccuagcuaccugcugg

SEQ ID NO: 133830 - RNA, 19 nt, Artificial Sequence
  Description of Artificial Sequence: Synthetic oligonucleotide
gggaguauaggucauggac

SEQ ID NO: 133831 - RNA, 19 nt, Artificial Sequence
  Description of Artificial Sequence: Synthetic oligonucleotide
guaucuggcacucuuaggu

SEQ ID NO: 133832 - RNA, 19 nt, Artificial Sequence
  Description of Artificial Sequence: Synthetic oligonucleotide
uccucuaaguacugaguga

SEQ ID NO: 133833 - RNA, 19 nt, Artificial Sequence
  Description of Artificial Sequence: Synthetic oligonucleotide
ucccacccaaacucgaaag

SEQ ID NO: 133834 - RNA, 19 nt, Artificial Sequence
  Description of Artificial Sequence: Synthetic oligonucleotide
cucugcguccacuaucccg

SEQ ID NO: 133835 - RNA, 19 nt, Artificial Sequence
  Description of Artificial Sequence: Synthetic oligonucleotide
aguuccuagguguugggaa

SEQ ID NO: 133836 - RNA, 19 nt, Artificial Sequence
  Description of Artificial Sequence: Synthetic oligonucleotide
guacaucaggguaaagggg

SEQ ID NO: 133837 - RNA, 19 nt, Artificial Sequence
  Description of Artificial Sequence: Synthetic oligonucleotide
guuccuagguguugggaag

SEQ ID NO: 133838 - RNA, 19 nt, Artificial Sequence
  Description of Artificial Sequence: Synthetic oligonucleotide
ccuugcaacaacaagccug

SEQ ID NO: 133839 - RNA, 19 nt, Artificial Sequence
  Description of Artificial Sequence: Synthetic oligonucleotide
ugcccaaaagucucccucc

SEQ ID NO: 133840 - RNA, 19 nt, Artificial Sequence
  Description of Artificial Sequence: Synthetic oligonucleotide
acucuauggguaucuggag

SEQ ID NO: 133841 - RNA, 19 nt, Artificial Sequence
  Description of Artificial Sequence: Synthetic oligonucleotide
uccgcugaacuaaucuuac

SEQ ID NO: 133842 - RNA, 19 nt, Artificial Sequence
  Description of Artificial Sequence: Synthetic oligonucleotide
gcauaaaugagauggccac

SEQ ID NO: 133843 - RNA, 19 nt, Artificial Sequence
  Description of Artificial Sequence: Synthetic oligonucleotide
gaaacuccagccaguuccg

SEQ ID NO: 133844 - RNA, 19 nt, Artificial Sequence
  Description of Artificial Sequence: Synthetic oligonucleotide
uucccuggcuuuaaauaga

SEQ ID NO: 133845 - RNA, 19 nt, Artificial Sequence
  Description of Artificial Sequence: Synthetic oligonucleotide
uuccgcugaacuaaucuua

SEQ ID NO: 133846 - RNA, 19 nt, Artificial Sequence
  Description of Artificial Sequence: Synthetic oligonucleotide
uuucuuccgccguuuaggu

SEQ ID NO: 133847 - RNA, 19 nt, Artificial Sequence
  Description of Artificial Sequence: Synthetic oligonucleotide
agccuaaccugucacccag

SEQ ID NO: 133848 - RNA, 19 nt, Artificial Sequence
  Description of Artificial Sequence: Synthetic oligonucleotide
gcuucuauaccaaauacga

SEQ ID NO: 133849 - RNA, 19 nt, Artificial Sequence
  Description of Artificial Sequence: Synthetic oligonucleotide
cagagucaagcaacggugc

SEQ ID NO: 133850 - RNA, 19 nt, Artificial Sequence
  Description of Artificial Sequence: Synthetic oligonucleotide
gagaagggugucaacguug

SEQ ID NO: 133851 - RNA, 19 nt, Artificial Sequence
  Description of Artificial Sequence: Synthetic oligonucleotide
gauccggcucaagaaaucc

SEQ ID NO: 133852 - RNA, 19 nt, Artificial Sequence
  Description of Artificial Sequence: Synthetic oligonucleotide
uacgacgcugcgcauuuca

SEQ ID NO: 133853 - RNA, 19 nt, Artificial Sequence
  Description of Artificial Sequence: Synthetic oligonucleotide
uaauucccuggcuuuaaau

SEQ ID NO: 133854 - RNA, 19 nt, Artificial Sequence
  Description of Artificial Sequence: Synthetic oligonucleotide
guuuagguuuggcuucucc

SEQ ID NO: 133855 - RNA, 19 nt, Artificial Sequence
  Description of Artificial Sequence: Synthetic oligonucleotide
gacccuacguucuuugcuc

SEQ ID NO: 133856 - RNA, 19 nt, Artificial Sequence
  Description of Artificial Sequence: Synthetic oligonucleotide
ugucaacguuggaagggcc

SEQ ID NO: 133857 - RNA, 19 nt, Artificial Sequence
  Description of Artificial Sequence: Synthetic oligonucleotide
gaauagcccugcugcacag

SEQ ID NO: 133858 - RNA, 19 nt, Artificial Sequence
  Description of Artificial Sequence: Synthetic oligonucleotide
ucccgaguauccuccuugg

SEQ ID NO: 133859 - RNA, 19 nt, Artificial Sequence
  Description of Artificial Sequence: Synthetic oligonucleotide
agacccuacguucuuugcu

SEQ ID NO: 133860 - RNA, 19 nt, Artificial Sequence
  Description of Artificial Sequence: Synthetic oligonucleotide
aauuagggcuacaugcuuu

SEQ ID NO: 133861 - RNA, 19 nt, Artificial Sequence
  Description of Artificial Sequence: Synthetic oligonucleotide
ugguccuaucccuccagcc

SEQ ID NO: 133862 - RNA, 19 nt, Artificial Sequence
  Description of Artificial Sequence: Synthetic oligonucleotide
agccuaagaagacggguga

SEQ ID NO: 133863 - RNA, 19 nt, Artificial Sequence
  Description of Artificial Sequence: Synthetic oligonucleotide
cucgaaagagguucagguc

SEQ ID NO: 133864 - RNA, 19 nt, Artificial Sequence
  Description of Artificial Sequence: Synthetic oligonucleotide
aaacucgaaagagguucag

SEQ ID NO: 133865 - RNA, 19 nt, Artificial Sequence
  Description of Artificial Sequence: Synthetic oligonucleotide
auaaguugccaguuauaua

SEQ ID NO: 133866 - RNA, 19 nt, Artificial Sequence
  Description of Artificial Sequence: Synthetic oligonucleotide
cuaaccugucacccagucc

SEQ ID NO: 133867 - RNA, 19 nt, Artificial Sequence
  Description of Artificial Sequence: Synthetic oligonucleotide
uaucucgaagcagagucaa

SEQ ID NO: 133868 - RNA, 19 nt, Artificial Sequence
  Description of Artificial Sequence: Synthetic oligonucleotide
aaggaaccccugaaauggg

SEQ ID NO: 133869 - RNA, 19 nt, Artificial Sequence
  Description of Artificial Sequence: Synthetic oligonucleotide
ggugucaacguuggaaggg

SEQ ID NO: 133870 - RNA, 19 nt, Artificial Sequence
  Description of Artificial Sequence: Synthetic oligonucleotide
acuagugcccgguacccga

SEQ ID NO: 133871 - RNA, 19 nt, Artificial Sequence
  Description of Artificial Sequence: Synthetic oligonucleotide
aaggcauacagaacccaga

SEQ ID NO: 133872 - RNA, 19 nt, Artificial Sequence
  Description of Artificial Sequence: Synthetic oligonucleotide
gucaacguuggaagggccg

SEQ ID NO: 133873 - RNA, 19 nt, Artificial Sequence
  Description of Artificial Sequence: Synthetic oligonucleotide
gaagacgggugaauagccc

SEQ ID NO: 133874 - RNA, 19 nt, Artificial Sequence
  Description of Artificial Sequence: Synthetic oligonucleotide
gacauagcuccuccacgcc

SEQ ID NO: 133875 - RNA, 19 nt, Artificial Sequence
  Description of Artificial Sequence: Synthetic oligonucleotide
ugccaguuauauauuuaua

SEQ ID NO: 133876 - RNA, 19 nt, Artificial Sequence
  Description of Artificial Sequence: Synthetic oligonucleotide
ggacaauaugcaauaaaac

SEQ ID NO: 133877 - RNA, 19 nt, Artificial Sequence
  Description of Artificial Sequence: Synthetic oligonucleotide
cuaagcugccccaauucca

SEQ ID NO: 133878 - RNA, 19 nt, Artificial Sequence
  Description of Artificial Sequence: Synthetic oligonucleotide
uuauuaguccucggcuuga

SEQ ID NO: 133879 - RNA, 19 nt, Artificial Sequence
  Description of Artificial Sequence: Synthetic oligonucleotide
aacggugccucugccuccg

SEQ ID NO: 133880 - RNA, 19 nt, Artificial Sequence
  Description of Artificial Sequence: Synthetic oligonucleotide
ccaaauacgacgcugcgca

SEQ ID NO: 133881 - RNA, 19 nt, Artificial Sequence
  Description of Artificial Sequence: Synthetic oligonucleotide
ccaaacucgaaagagguuc

SEQ ID NO: 133882 - RNA, 19 nt, Artificial Sequence
  Description of Artificial Sequence: Synthetic oligonucleotide
ccugaaauggguuaagaaa

SEQ ID NO: 133883 - RNA, 19 nt, Artificial Sequence
  Description of Artificial Sequence: Synthetic oligonucleotide
caacaacaagccugaaguc

SEQ ID NO: 133884 - RNA, 19 nt, Artificial Sequence
  Description of Artificial Sequence: Synthetic oligonucleotide
acguuucuacauacucucc

SEQ ID NO: 133885 - RNA, 19 nt, Artificial Sequence
  Description of Artificial Sequence: Synthetic oligonucleotide
uagauccagacccuacguu

SEQ ID NO: 133886 - RNA, 19 nt, Artificial Sequence
  Description of Artificial Sequence: Synthetic oligonucleotide
cuaaucuuaccagcugcug

SEQ ID NO: 133887 - RNA, 19 nt, Artificial Sequence
  Description of Artificial Sequence: Synthetic oligonucleotide
ucccuggcuuuaaauagau

SEQ ID NO: 133888 - RNA, 19 nt, Artificial Sequence
  Description of Artificial Sequence: Synthetic oligonucleotide
ccauaucugaugcuguggc

SEQ ID NO: 133889 - RNA, 19 nt, Artificial Sequence
  Description of Artificial Sequence: Synthetic oligonucleotide
agggucgagauucucugaa

SEQ ID NO: 133890 - RNA, 19 nt, Artificial Sequence
  Description of Artificial Sequence: Synthetic oligonucleotide
cucuauggguaucuggaga

SEQ ID NO: 133891 - RNA, 19 nt, Artificial Sequence
  Description of Artificial Sequence: Synthetic oligonucleotide
aggaaaagcucuggcuuag

SEQ ID NO: 133892 - RNA, 19 nt, Artificial Sequence
  Description of Artificial Sequence: Synthetic oligonucleotide
cucggcuugacccaaggaa

SEQ ID NO: 133893 - RNA, 19 nt, Artificial Sequence
  Description of Artificial Sequence: Synthetic oligonucleotide
gcagagucaagcaacggug

SEQ ID NO: 133894 - RNA, 19 nt, Artificial Sequence
  Description of Artificial Sequence: Synthetic oligonucleotide
gaaguuggaaaaugggguu

SEQ ID NO: 133895 - RNA, 19 nt, Artificial Sequence
  Description of Artificial Sequence: Synthetic oligonucleotide
acuagccuaagaagacggg

SEQ ID NO: 133896 - RNA, 19 nt, Artificial Sequence
  Description of Artificial Sequence: Synthetic oligonucleotide
cccauuaaagugaaaguca

SEQ ID NO: 133897 - RNA, 19 nt, Artificial Sequence
  Description of Artificial Sequence: Synthetic oligonucleotide
uccuugcaacaacaagccu

SEQ ID NO: 133898 - RNA, 19 nt, Artificial Sequence
  Description of Artificial Sequence: Synthetic oligonucleotide
ucccuagcuaccugcuggc

SEQ ID NO: 133899 - RNA, 19 nt, Artificial Sequence
  Description of Artificial Sequence: Synthetic oligonucleotide
cuccuuccgccuuucuggg

SEQ ID NO: 133900 - RNA, 19 nt, Artificial Sequence
  Description of Artificial Sequence: Synthetic oligonucleotide
cucgaagcagagucaagca

SEQ ID NO: 133901 - RNA, 19 nt, Artificial Sequence
  Description of Artificial Sequence: Synthetic oligonucleotide
ggucgagauucucugaauc

SEQ ID NO: 133902 - RNA, 19 nt, Artificial Sequence
  Description of Artificial Sequence: Synthetic oligonucleotide
gugucaacguuggaagggc

SEQ ID NO: 133903 - RNA, 19 nt, Artificial Sequence
  Description of Artificial Sequence: Synthetic oligonucleotide
cacucuuagguucccgguc

SEQ ID NO: 133904 - RNA, 19 nt, Artificial Sequence
  Description of Artificial Sequence: Synthetic oligonucleotide
gaccacuagugcccgguac

SEQ ID NO: 133905 - RNA, 19 nt, Artificial Sequence
  Description of Artificial Sequence: Synthetic oligonucleotide
gaguauaggucauggacuu

SEQ ID NO: 133906 - RNA, 19 nt, Artificial Sequence
  Description of Artificial Sequence: Synthetic oligonucleotide
cuacagcaagaagccaucc

SEQ ID NO: 133907 - RNA, 19 nt, Artificial Sequence
  Description of Artificial Sequence: Synthetic oligonucleotide
ggugaguuucauuugcucu

SEQ ID NO: 133908 - RNA, 19 nt, Artificial Sequence
  Description of Artificial Sequence: Synthetic oligonucleotide
gaaccccugaaauggguua

SEQ ID NO: 133909 - RNA, 19 nt, Artificial Sequence
  Description of Artificial Sequence: Synthetic oligonucleotide
agguucccgguccauuuca

SEQ ID NO: 133910 - RNA, 19 nt, Artificial Sequence
  Description of Artificial Sequence: Synthetic oligonucleotide
cccgcaaaacuuugaaggc

SEQ ID NO: 133911 - RNA, 19 nt, Artificial Sequence
  Description of Artificial Sequence: Synthetic oligonucleotide
uagggucgagauucucuga

SEQ ID NO: 133912 - RNA, 19 nt, Artificial Sequence
  Description of Artificial Sequence: Synthetic oligonucleotide
cagacccuacguucuuugc

SEQ ID NO: 133913 - RNA, 19 nt, Artificial Sequence
  Description of Artificial Sequence: Synthetic oligonucleotide
ucagcguacugcugccuaa

SEQ ID NO: 133914 - RNA, 19 nt, Artificial Sequence
  Description of Artificial Sequence: Synthetic oligonucleotide
agccuuaauagggucgaga

SEQ ID NO: 133915 - RNA, 19 nt, Artificial Sequence
  Description of Artificial Sequence: Synthetic oligonucleotide
gggugucaacguuggaagg

SEQ ID NO: 133916 - RNA, 19 nt, Artificial Sequence
  Description of Artificial Sequence: Synthetic oligonucleotide
caggaaaguuagaugaggu

SEQ ID NO: 133917 - RNA, 19 nt, Artificial Sequence
  Description of Artificial Sequence: Synthetic oligonucleotide
gguaaggaacucuaugggu

SEQ ID NO: 133918 - RNA, 19 nt, Artificial Sequence
  Description of Artificial Sequence: Synthetic oligonucleotide
ccgagaaccaaaugagaug

SEQ ID NO: 133919 - RNA, 19 nt, Artificial Sequence
  Description of Artificial Sequence: Synthetic oligonucleotide
ccgaugacgaccuggggac

SEQ ID NO: 133920 - RNA, 19 nt, Artificial Sequence
  Description of Artificial Sequence: Synthetic oligonucleotide
uauuaguccucggcuugac

SEQ ID NO: 133921 - RNA, 19 nt, Artificial Sequence
  Description of Artificial Sequence: Synthetic oligonucleotide
cucuacagcaagaagccau

SEQ ID NO: 133922 - RNA, 19 nt, Artificial Sequence
  Description of Artificial Sequence: Synthetic oligonucleotide
ugccuaagcugccccaauu

SEQ ID NO: 133923 - RNA, 19 nt, Artificial Sequence
  Description of Artificial Sequence: Synthetic oligonucleotide
gacgggugaauagcccugc

SEQ ID NO: 133924 - RNA, 19 nt, Artificial Sequence
  Description of Artificial Sequence: Synthetic oligonucleotide
cuccagccuaaccugucac

SEQ ID NO: 133925 - RNA, 19 nt, Artificial Sequence
  Description of Artificial Sequence: Synthetic oligonucleotide
ccccagcacaugaaaaggg

SEQ ID NO: 133926 - RNA, 19 nt, Artificial Sequence
  Description of Artificial Sequence: Synthetic oligonucleotide
cuagugcccgguacccgag

SEQ ID NO: 133927 - RNA, 19 nt, Artificial Sequence
  Description of Artificial Sequence: Synthetic oligonucleotide
acguuggaagggccgccuc

SEQ ID NO: 133928 - RNA, 19 nt, Artificial Sequence
  Description of Artificial Sequence: Synthetic oligonucleotide
gcauuaccuugcuuauuag

SEQ ID NO: 133929 - RNA, 19 nt, Artificial Sequence
  Description of Artificial Sequence: Synthetic oligonucleotide
uaauagggucgagauucuc

SEQ ID NO: 133930 - RNA, 19 nt, Artificial Sequence
  Description of Artificial Sequence: Synthetic oligonucleotide
acccuacguucuuugcucu

SEQ ID NO: 133931 - RNA, 19 nt, Artificial Sequence
  Description of Artificial Sequence: Synthetic oligonucleotide
cacugaccggcucagcuca

SEQ ID NO: 133932 - RNA, 19 nt, Artificial Sequence
  Description of Artificial Sequence: Synthetic oligonucleotide
ccuugcuuauuaguccucg

SEQ ID NO: 133933 - RNA, 19 nt, Artificial Sequence
  Description of Artificial Sequence: Synthetic oligonucleotide
agucgggccacuucuucuu

SEQ ID NO: 133934 - RNA, 19 nt, Artificial Sequence
  Description of Artificial Sequence: Synthetic oligonucleotide
ggaguauaggucauggacu

SEQ ID NO: 133935 - RNA, 19 nt, Artificial Sequence
  Description of Artificial Sequence: Synthetic oligonucleotide
cccacuagccuaagaagac

SEQ ID NO: 133936 - RNA, 19 nt, Artificial Sequence
  Description of Artificial Sequence: Synthetic oligonucleotide
ccgaguauccuccuugguc

SEQ ID NO: 133937 - RNA, 19 nt, Artificial Sequence
  Description of Artificial Sequence: Synthetic oligonucleotide
ucucgccaccuccuauuuc

SEQ ID NO: 133938 - RNA, 19 nt, Artificial Sequence
  Description of Artificial Sequence: Synthetic oligonucleotide
gccguuuagguuuggcuuc

SEQ ID NO: 133939 - RNA, 19 nt, Artificial Sequence
  Description of Artificial Sequence: Synthetic oligonucleotide
ugccgaccacuagugcccg

SEQ ID NO: 133940 - RNA, 19 nt, Artificial Sequence
  Description of Artificial Sequence: Synthetic oligonucleotide
ccgcaaaacuuugaaggcc

SEQ ID NO: 133941 - RNA, 19 nt, Artificial Sequence
  Description of Artificial Sequence: Synthetic oligonucleotide
gguccgucucuuuggaauc

SEQ ID NO: 133942 - RNA, 19 nt, Artificial Sequence
  Description of Artificial Sequence: Synthetic oligonucleotide
ugcguccacuaucccgagu

SEQ ID NO: 133943 - RNA, 19 nt, Artificial Sequence
  Description of Artificial Sequence: Synthetic oligonucleotide
ccacuagccuaagaagacg

SEQ ID NO: 133944 - RNA, 19 nt, Artificial Sequence
  Description of Artificial Sequence: Synthetic oligonucleotide
cuagccuaagaagacgggu

SEQ ID NO: 133945 - RNA, 19 nt, Artificial Sequence
  Description of Artificial Sequence: Synthetic oligonucleotide
ccggcucaagaaauccugc

SEQ ID NO: 133946 - RNA, 19 nt, Artificial Sequence
  Description of Artificial Sequence: Synthetic oligonucleotide
aaauggguugagagcucuu

SEQ ID NO: 133947 - RNA, 19 nt, Artificial Sequence
  Description of Artificial Sequence: Synthetic oligonucleotide
gcgcuuaucugucugauuu

SEQ ID NO: 133948 - RNA, 19 nt, Artificial Sequence
  Description of Artificial Sequence: Synthetic oligonucleotide
acgggugaauagcccugcu

SEQ ID NO: 133949 - RNA, 19 nt, Artificial Sequence
  Description of Artificial Sequence: Synthetic oligonucleotide
uccuuccgccuuucugggu

SEQ ID NO: 133950 - RNA, 19 nt, Artificial Sequence
  Description of Artificial Sequence: Synthetic oligonucleotide
gaugacgaccuggggaccu

SEQ ID NO: 133951 - RNA, 19 nt, Artificial Sequence
  Description of Artificial Sequence: Synthetic oligonucleotide
gguuaaggggccacaccac

SEQ ID NO: 133952 - RNA, 19 nt, Artificial Sequence
  Description of Artificial Sequence: Synthetic oligonucleotide
caguuccgcugaacuaauc

SEQ ID NO: 133953 - RNA, 19 nt, Artificial Sequence
  Description of Artificial Sequence: Synthetic oligonucleotide
gcguccacuaucccgagua

SEQ ID NO: 133954 - RNA, 19 nt, Artificial Sequence
  Description of Artificial Sequence: Synthetic oligonucleotide
ccuaaccugucacccaguc

SEQ ID NO: 133955 - RNA, 19 nt, Artificial Sequence
  Description of Artificial Sequence: Synthetic oligonucleotide
cuugaaagauccggcucaa

SEQ ID NO: 133956 - RNA, 19 nt, Artificial Sequence
  Description of Artificial Sequence: Synthetic oligonucleotide
gccaguuccgcugaacuaa

SEQ ID NO: 133957 - RNA, 19 nt, Artificial Sequence
  Description of Artificial Sequence: Synthetic oligonucleotide
gguauggaaggucaaccuu

SEQ ID NO: 133958 - RNA, 19 nt, Artificial Sequence
  Description of Artificial Sequence: Synthetic oligonucleotide
aagcaacggugcacagcug

SEQ ID NO: 133959 - RNA, 19 nt, Artificial Sequence
  Description of Artificial Sequence: Synthetic oligonucleotide
ggugcauuaccuugcuuau

SEQ ID NO: 133960 - RNA, 19 nt, Artificial Sequence
  Description of Artificial Sequence: Synthetic oligonucleotide
cuauaccaaauacgacgcu

SEQ ID NO: 133961 - RNA, 19 nt, Artificial Sequence
  Description of Artificial Sequence: Synthetic oligonucleotide
cugcguccacuaucccgag

SEQ ID NO: 133962 - RNA, 19 nt, Artificial Sequence
  Description of Artificial Sequence: Synthetic oligonucleotide
gcuuauuaguccucggcuu

SEQ ID NO: 133963 - RNA, 19 nt, Artificial Sequence
  Description of Artificial Sequence: Synthetic oligonucleotide
auacgacgcugcgcauuuc

SEQ ID NO: 133964 - RNA, 19 nt, Artificial Sequence
  Description of Artificial Sequence: Synthetic oligonucleotide
ggcgcccacuagcugcagg

SEQ ID NO: 133965 - RNA, 19 nt, Artificial Sequence
  Description of Artificial Sequence: Synthetic oligonucleotide
ccgcugaacuaaucuuacc

SEQ ID NO: 133966 - RNA, 19 nt, Artificial Sequence
  Description of Artificial Sequence: Synthetic oligonucleotide
gugcccgguacccgagaac

SEQ ID NO: 133967 - RNA, 19 nt, Artificial Sequence
  Description of Artificial Sequence: Synthetic oligonucleotide
ggguccgucucuuuggaau

SEQ ID NO: 133968 - RNA, 19 nt, Artificial Sequence
  Description of Artificial Sequence: Synthetic oligonucleotide
caguuccuagguguuggga

SEQ ID NO: 133969 - RNA, 19 nt, Artificial Sequence
  Description of Artificial Sequence: Synthetic oligonucleotide
gccugcuaucucgaagcag

SEQ ID NO: 133970 - RNA, 19 nt, Artificial Sequence
  Description of Artificial Sequence: Synthetic oligonucleotide
acgcugcgcauuucaucau

SEQ ID NO: 133971 - RNA, 19 nt, Artificial Sequence
  Description of Artificial Sequence: Synthetic oligonucleotide
cccgagaaccaaaugagau

SEQ ID NO: 133972 - RNA, 19 nt, Artificial Sequence
  Description of Artificial Sequence: Synthetic oligonucleotide
cagccuuaauagggucgag

SEQ ID NO: 133973 - RNA, 19 nt, Artificial Sequence
  Description of Artificial Sequence: Synthetic oligonucleotide
aguccucggcuugacccaa

SEQ ID NO: 133974 - RNA, 19 nt, Artificial Sequence
  Description of Artificial Sequence: Synthetic oligonucleotide
caauuccaugggguccguc

SEQ ID NO: 133975 - RNA, 19 nt, Artificial Sequence
  Description of Artificial Sequence: Synthetic oligonucleotide
uccgccuuucuggguugcu

SEQ ID NO: 133976 - RNA, 19 nt, Artificial Sequence
  Description of Artificial Sequence: Synthetic oligonucleotide
uugcaacaacaagccugaa

SEQ ID NO: 133977 - RNA, 19 nt, Artificial Sequence
  Description of Artificial Sequence: Synthetic oligonucleotide
cagcccacucugugauauc

SEQ ID NO: 133978 - RNA, 19 nt, Artificial Sequence
  Description of Artificial Sequence: Synthetic oligonucleotide
ggaucccacccaaacucga

SEQ ID NO: 133979 - RNA, 19 nt, Artificial Sequence
  Description of Artificial Sequence: Synthetic oligonucleotide
acgacgcugcgcauuucau

SEQ ID NO: 133980 - RNA, 19 nt, Artificial Sequence
  Description of Artificial Sequence: Synthetic oligonucleotide
cgcuuaucugucugauuuc

SEQ ID NO: 133981 - RNA, 19 nt, Artificial Sequence
  Description of Artificial Sequence: Synthetic oligonucleotide
cuaucccgaguauccuccu

SEQ ID NO: 133982 - RNA, 19 nt, Artificial Sequence
  Description of Artificial Sequence: Synthetic oligonucleotide
gcacucuuagguucccggu

SEQ ID NO: 133983 - RNA, 19 nt, Artificial Sequence
  Description of Artificial Sequence: Synthetic oligonucleotide
cgacgcugcgcauuucauc

SEQ ID NO: 133984 - RNA, 19 nt, Artificial Sequence
  Description of Artificial Sequence: Synthetic oligonucleotide
cccuacguucuuugcucuc

SEQ ID NO: 133985 - RNA, 19 nt, Artificial Sequence
  Description of Artificial Sequence: Synthetic oligonucleotide
caaauacgacgcugcgcau

SEQ ID NO: 133986 - RNA, 19 nt, Artificial Sequence
  Description of Artificial Sequence: Synthetic oligonucleotide
gcugcccgcaaaacuuuga

SEQ ID NO: 133987 - RNA, 19 nt, Artificial Sequence
  Description of Artificial Sequence: Synthetic oligonucleotide
gccgaccacuagugcccgg

SEQ ID NO: 133988 - RNA, 19 nt, Artificial Sequence
  Description of Artificial Sequence: Synthetic oligonucleotide
ggacuagauccagacccua

SEQ ID NO: 133989 - RNA, 19 nt, Artificial Sequence
  Description of Artificial Sequence: Synthetic oligonucleotide
gggucgagauucucugaau

SEQ ID NO: 133990 - RNA, 19 nt, Artificial Sequence
  Description of Artificial Sequence: Synthetic oligonucleotide
cccuagcuaccugcuggcc

SEQ ID NO: 133991 - RNA, 19 nt, Artificial Sequence
  Description of Artificial Sequence: Synthetic oligonucleotide
gcaguggcgcccacuagcu

SEQ ID NO: 133992 - RNA, 19 nt, Artificial Sequence
  Description of Artificial Sequence: Synthetic oligonucleotide
acugaccggcucagcucau

SEQ ID NO: 133993 - RNA, 19 nt, Artificial Sequence
  Description of Artificial Sequence: Synthetic oligonucleotide
ccucggcuugacccaagga

SEQ ID NO: 133994 - RNA, 19 nt, Artificial Sequence
  Description of Artificial Sequence: Synthetic oligonucleotide
ccgccguuuagguuuggcu

SEQ ID NO: 133995 - RNA, 19 nt, Artificial Sequence
  Description of Artificial Sequence: Synthetic oligonucleotide
cugccuaagcugccccaau

SEQ ID NO: 133996 - RNA, 19 nt, Artificial Sequence
  Description of Artificial Sequence: Synthetic oligonucleotide
gaccccggccauggucaaa

SEQ ID NO: 133997 - RNA, 19 nt, Artificial Sequence
  Description of Artificial Sequence: Synthetic oligonucleotide
ccccggccauggucaaaag

SEQ ID NO: 133998 - RNA, 19 nt, Artificial Sequence
  Description of Artificial Sequence: Synthetic oligonucleotide
ccaguuccgcugaacuaau

SEQ ID NO: 133999 - RNA, 19 nt, Artificial Sequence
  Description of Artificial Sequence: Synthetic oligonucleotide
ccaagggcacagggcauaa

SEQ ID NO: 134000 - RNA, 19 nt, Artificial Sequence
  Description of Artificial Sequence: Synthetic oligonucleotide
ccgaccacuagugcccggu

SEQ ID NO: 134001 - RNA, 19 nt, Artificial Sequence
  Description of Artificial Sequence: Synthetic oligonucleotide
gccuaaccugucacccagu

SEQ ID NO: 134002 - RNA, 19 nt, Artificial Sequence
  Description of Artificial Sequence: Synthetic oligonucleotide
cguccacuaucccgaguau

SEQ ID NO: 134003 - RNA, 19 nt, Artificial Sequence
  Description of Artificial Sequence: Synthetic oligonucleotide
uuaggauugagauagagac

SEQ ID NO: 134004 - RNA, 19 nt, Artificial Sequence
  Description of Artificial Sequence: Synthetic oligonucleotide
aacuagccguuauaaaagc

SEQ ID NO: 134005 - RNA, 19 nt, Artificial Sequence
  Description of Artificial Sequence: Synthetic oligonucleotide
ucuaaagcugggaaaaggc

SEQ ID NO: 134006 - RNA, 19 nt, Artificial Sequence
  Description of Artificial Sequence: Synthetic oligonucleotide
cuuucuauaggcauggauc

SEQ ID NO: 134007 - RNA, 19 nt, Artificial Sequence
  Description of Artificial Sequence: Synthetic oligonucleotide
agcgauaugucaucaaggg

SEQ ID NO: 134008 - RNA, 19 nt, Artificial Sequence
  Description of Artificial Sequence: Synthetic oligonucleotide
uuuaccguaaccaccaauc

SEQ ID NO: 134009 - RNA, 19 nt, Artificial Sequence
  Description of Artificial Sequence: Synthetic oligonucleotide
accguaaccaccaaucucc

SEQ ID NO: 134010 - RNA, 19 nt, Artificial Sequence
  Description of Artificial Sequence: Synthetic oligonucleotide
auaagcgcaaggccaaggc

SEQ ID NO: 134011 - RNA, 19 nt, Artificial Sequence
  Description of Artificial Sequence: Synthetic oligonucleotide
gaagcgauaugucaucaag

SEQ ID NO: 134012 - RNA, 19 nt, Artificial Sequence
  Description of Artificial Sequence: Synthetic oligonucleotide
cuagccguuauaaaagcag

SEQ ID NO: 134013 - RNA, 19 nt, Artificial Sequence
  Description of Artificial Sequence: Synthetic oligonucleotide
ucguccucaaccaugguca

SEQ ID NO: 134014 - RNA, 19 nt, Artificial Sequence
  Description of Artificial Sequence: Synthetic oligonucleotide
aguaucccgcucucgagcc

SEQ ID NO: 134015 - RNA, 19 nt, Artificial Sequence
  Description of Artificial Sequence: Synthetic oligonucleotide
aguguuuaccguaaccacc

SEQ ID NO: 134016 - RNA, 19 nt, Artificial Sequence
  Description of Artificial Sequence: Synthetic oligonucleotide
acugcgguagcuucgagug

SEQ ID NO: 134017 - RNA, 19 nt, Artificial Sequence
  Description of Artificial Sequence: Synthetic oligonucleotide
gagucgagggucuugcggg

SEQ ID NO: 134018 - RNA, 19 nt, Artificial Sequence
  Description of Artificial Sequence: Synthetic oligonucleotide
ucuauaggcauggaucucc

SEQ ID NO: 134019 - RNA, 19 nt, Artificial Sequence
  Description of Artificial Sequence: Synthetic oligonucleotide
aaacucacgcugcuucccg

SEQ ID NO: 134020 - RNA, 19 nt, Artificial Sequence
  Description of Artificial Sequence: Synthetic oligonucleotide
gaaguugcuucuuagccuc

SEQ ID NO: 134021 - RNA, 19 nt, Artificial Sequence
  Description of Artificial Sequence: Synthetic oligonucleotide
cagacggucauugagcucc

SEQ ID NO: 134022 - RNA, 19 nt, Artificial Sequence
  Description of Artificial Sequence: Synthetic oligonucleotide
gguauuucgagccuucagc

SEQ ID NO: 134023 - RNA, 19 nt, Artificial Sequence
  Description of Artificial Sequence: Synthetic oligonucleotide
ucuagugugcgcuucucac

SEQ ID NO: 134024 - RNA, 19 nt, Artificial Sequence
  Description of Artificial Sequence: Synthetic oligonucleotide
ugaucugccaguuucccau

SEQ ID NO: 134025 - RNA, 19 nt, Artificial Sequence
  Description of Artificial Sequence: Synthetic oligonucleotide
uguacgaaggcuguuccca

SEQ ID NO: 134026 - RNA, 19 nt, Artificial Sequence
  Description of Artificial Sequence: Synthetic oligonucleotide
caaggggucaucaccauuc

SEQ ID NO: 134027 - RNA, 19 nt, Artificial Sequence
  Description of Artificial Sequence: Synthetic oligonucleotide
aagaggugcggccacggcu

SEQ ID NO: 134028 - RNA, 19 nt, Artificial Sequence
  Description of Artificial Sequence: Synthetic oligonucleotide
uaguaucccgcucucgagc

SEQ ID NO: 134029 - RNA, 19 nt, Artificial Sequence
  Description of Artificial Sequence: Synthetic oligonucleotide
aggauugagauagagacuu

SEQ ID NO: 134030 - RNA, 19 nt, Artificial Sequence
  Description of Artificial Sequence: Synthetic oligonucleotide
uuaccguaaccaccaaucu

SEQ ID NO: 134031 - RNA, 19 nt, Artificial Sequence
  Description of Artificial Sequence: Synthetic oligonucleotide
cagaucgucaccaccugcc

SEQ ID NO: 134032 - RNA, 19 nt, Artificial Sequence
  Description of Artificial Sequence: Synthetic oligonucleotide
ugggacggggucuccaugg

SEQ ID NO: 134033 - RNA, 19 nt, Artificial Sequence
  Description of Artificial Sequence: Synthetic oligonucleotide
uagccguuauaaaagcagu

SEQ ID NO: 134034 - RNA, 19 nt, Artificial Sequence
  Description of Artificial Sequence: Synthetic oligonucleotide
cccguuaucaaucuccacg

SEQ ID NO: 134035 - RNA, 19 nt, Artificial Sequence
  Description of Artificial Sequence: Synthetic oligonucleotide
gacagcggaguagagcugg

SEQ ID NO: 134036 - RNA, 19 nt, Artificial Sequence
  Description of Artificial Sequence: Synthetic oligonucleotide
acuuaggauugagauagag

SEQ ID NO: 134037 - RNA, 19 nt, Artificial Sequence
  Description of Artificial Sequence: Synthetic oligonucleotide
uaagcgcaaggccaaggca

SEQ ID NO: 134038 - RNA, 19 nt, Artificial Sequence
  Description of Artificial Sequence: Synthetic oligonucleotide
gauaagcgcaaggccaagg

SEQ ID NO: 134039 - RNA, 19 nt, Artificial Sequence
  Description of Artificial Sequence: Synthetic oligonucleotide
uuggacuuguugcgcagcc

SEQ ID NO: 134040 - RNA, 19 nt, Artificial Sequence
  Description of Artificial Sequence: Synthetic oligonucleotide
gaugccggacaccucucgg

SEQ ID NO: 134041 - RNA, 19 nt, Artificial Sequence
  Description of Artificial Sequence: Synthetic oligonucleotide
gagagcuguacgaaggcug

SEQ ID NO: 134042 - RNA, 19 nt, Artificial Sequence
  Description of Artificial Sequence: Synthetic oligonucleotide
caauguacaccgccagacg

SEQ ID NO: 134043 - RNA, 19 nt, Artificial Sequence
  Description of Artificial Sequence: Synthetic oligonucleotide
aaggcaucggccagccggc

SEQ ID NO: 134044 - RNA, 19 nt, Artificial Sequence
  Description of Artificial Sequence: Synthetic oligonucleotide
ugucgaugcggauucggga

SEQ ID NO: 134045 - RNA, 19 nt, Artificial Sequence
  Description of Artificial Sequence: Synthetic oligonucleotide
ugaugccggacaccucucg

SEQ ID NO: 134046 - RNA, 19 nt, Artificial Sequence
  Description of Artificial Sequence: Synthetic oligonucleotide
cuuagccucaccuagggcu

SEQ ID NO: 134047 - RNA, 19 nt, Artificial Sequence
  Description of Artificial Sequence: Synthetic oligonucleotide
uggccugcgccccacugcg

SEQ ID NO: 134048 - RNA, 19 nt, Artificial Sequence
  Description of Artificial Sequence: Synthetic oligonucleotide
agacugccuggcauuaucc

SEQ ID NO: 134049 - RNA, 19 nt, Artificial Sequence
  Description of Artificial Sequence: Synthetic oligonucleotide
uccucacuauagauguucu

SEQ ID NO: 134050 - RNA, 19 nt, Artificial Sequence
  Description of Artificial Sequence: Synthetic oligonucleotide
guaugggaaggacuuagga

SEQ ID NO: 134051 - RNA, 19 nt, Artificial Sequence
  Description of Artificial Sequence: Synthetic oligonucleotide
ucccagauuacaugaugcu

SEQ ID NO: 134052 - RNA, 19 nt, Artificial Sequence
  Description of Artificial Sequence: Synthetic oligonucleotide
cugucgaugcggauucggg

SEQ ID NO: 134053 - RNA, 19 nt, Artificial Sequence
  Description of Artificial Sequence: Synthetic oligonucleotide
ccgaagaucauggagcucg

SEQ ID NO: 134054 - RNA, 19 nt, Artificial Sequence
  Description of Artificial Sequence: Synthetic oligonucleotide
cuaguaucccgcucucgag

SEQ ID NO: 134055 - RNA, 19 nt, Artificial Sequence
  Description of Artificial Sequence: Synthetic oligonucleotide
uggagcucgcccucuagug

SEQ ID NO: 134056 - RNA, 19 nt, Artificial Sequence
  Description of Artificial Sequence: Synthetic oligonucleotide
auuaggugcagagcaggag

SEQ ID NO: 134057 - RNA, 19 nt, Artificial Sequence
  Description of Artificial Sequence: Synthetic oligonucleotide
gucgaugcggauucgggac

SEQ ID NO: 134058 - RNA, 19 nt, Artificial Sequence
  Description of Artificial Sequence: Synthetic oligonucleotide
gucccagauuacaugaugc

SEQ ID NO: 134059 - RNA, 19 nt, Artificial Sequence
  Description of Artificial Sequence: Synthetic oligonucleotide
gauaugucaucaagggguc

SEQ ID NO: 134060 - RNA, 19 nt, Artificial Sequence
  Description of Artificial Sequence: Synthetic oligonucleotide
ucuuagccucaccuagggc

SEQ ID NO: 134061 - RNA, 19 nt, Artificial Sequence
  Description of Artificial Sequence: Synthetic oligonucleotide
acggagucgagggucuugc

SEQ ID NO: 134062 - RNA, 19 nt, Artificial Sequence
  Description of Artificial Sequence: Synthetic oligonucleotide
uguauugauuuuggaggga

SEQ ID NO: 134063 - RNA, 19 nt, Artificial Sequence
  Description of Artificial Sequence: Synthetic oligonucleotide
gaugcgaaggcgcagcccu

SEQ ID NO: 134064 - RNA, 19 nt, Artificial Sequence
  Description of Artificial Sequence: Synthetic oligonucleotide
agugaacuuuggugggaag

SEQ ID NO: 134065 - RNA, 19 nt, Artificial Sequence
  Description of Artificial Sequence: Synthetic oligonucleotide
ccugcgauugggaugagug

SEQ ID NO: 134066 - RNA, 19 nt, Artificial Sequence
  Description of Artificial Sequence: Synthetic oligonucleotide
ugcgguagcuucgagugac

SEQ ID NO: 134067 - RNA, 19 nt, Artificial Sequence
  Description of Artificial Sequence: Synthetic oligonucleotide
agccguuauaaaagcaguc

SEQ ID NO: 134068 - RNA, 19 nt, Artificial Sequence
  Description of Artificial Sequence: Synthetic oligonucleotide
aguaugggaaggacuuagg

SEQ ID NO: 134069 - RNA, 19 nt, Artificial Sequence
  Description of Artificial Sequence: Synthetic oligonucleotide
ggagucgagggucuugcgg

SEQ ID NO: 134070 - RNA, 19 nt, Artificial Sequence
  Description of Artificial Sequence: Synthetic oligonucleotide
ucguuggacuuguugcgca

SEQ ID NO: 134071 - RNA, 19 nt, Artificial Sequence
  Description of Artificial Sequence: Synthetic oligonucleotide
gcgauaugucaucaagggg

SEQ ID NO: 134072 - RNA, 19 nt, Artificial Sequence
  Description of Artificial Sequence: Synthetic oligonucleotide
guauuucgagccuucagcu

SEQ ID NO: 134073 - RNA, 19 nt, Artificial Sequence
  Description of Artificial Sequence: Synthetic oligonucleotide
cacgagccgggucucaugc

SEQ ID NO: 134074 - RNA, 19 nt, Artificial Sequence
  Description of Artificial Sequence: Synthetic oligonucleotide
agagaacuccacgccugcc

SEQ ID NO: 134075 - RNA, 19 nt, Artificial Sequence
  Description of Artificial Sequence: Synthetic oligonucleotide
gccguuauaaaagcagucc

SEQ ID NO: 134076 - RNA, 19 nt, Artificial Sequence
  Description of Artificial Sequence: Synthetic oligonucleotide
ugggaagcgauaugucauc

SEQ ID NO: 134077 - RNA, 19 nt, Artificial Sequence
  Description of Artificial Sequence: Synthetic oligonucleotide
uacaccgccagacggucau

SEQ ID NO: 134078 - RNA, 19 nt, Artificial Sequence
  Description of Artificial Sequence: Synthetic oligonucleotide
gcgggacuuggacagaagg

SEQ ID NO: 134079 - RNA, 19 nt, Artificial Sequence
  Description of Artificial Sequence: Synthetic oligonucleotide
gagugagaagaggugcggc

SEQ ID NO: 134080 - RNA, 19 nt, Artificial Sequence
  Description of Artificial Sequence: Synthetic oligonucleotide
cuguacgaaggcuguuccc

SEQ ID NO: 134081 - RNA, 19 nt, Artificial Sequence
  Description of Artificial Sequence: Synthetic oligonucleotide
ugauccgagugggcgacag

SEQ ID NO: 134082 - RNA, 19 nt, Artificial Sequence
  Description of Artificial Sequence: Synthetic oligonucleotide
ggagcgggugacuaggcug

SEQ ID NO: 134083 - RNA, 19 nt, Artificial Sequence
  Description of Artificial Sequence: Synthetic oligonucleotide
cuccaguggaguugaugag

SEQ ID NO: 134084 - RNA, 19 nt, Artificial Sequence
  Description of Artificial Sequence: Synthetic oligonucleotide
gucgggugauccgaguggg

SEQ ID NO: 134085 - RNA, 19 nt, Artificial Sequence
  Description of Artificial Sequence: Synthetic oligonucleotide
uccacucgccgaagcaucu

SEQ ID NO: 134086 - RNA, 19 nt, Artificial Sequence
  Description of Artificial Sequence: Synthetic oligonucleotide
acuagccguuauaaaagca

SEQ ID NO: 134087 - RNA, 19 nt, Artificial Sequence
  Description of Artificial Sequence: Synthetic oligonucleotide
aaaguaugggaaggacuua

SEQ ID NO: 134088 - RNA, 19 nt, Artificial Sequence
  Description of Artificial Sequence: Synthetic oligonucleotide
gcgcagguuguacucagcg

SEQ ID NO: 134089 - RNA, 19 nt, Artificial Sequence
  Description of Artificial Sequence: Synthetic oligonucleotide
cagauuacaugaugcugca

SEQ ID NO: 134090 - RNA, 19 nt, Artificial Sequence
  Description of Artificial Sequence: Synthetic oligonucleotide
auggagcucgcccucuagu

SEQ ID NO: 134091 - RNA, 19 nt, Artificial Sequence
  Description of Artificial Sequence: Synthetic oligonucleotide
guugcgcagccgcacaaac

SEQ ID NO: 134092 - RNA, 19 nt, Artificial Sequence
  Description of Artificial Sequence: Synthetic oligonucleotide
gaucgucaccaccugccca

SEQ ID NO: 134093 - RNA, 19 nt, Artificial Sequence
  Description of Artificial Sequence: Synthetic oligonucleotide
ucaaggggucaucaccauu

SEQ ID NO: 134094 - RNA, 19 nt, Artificial Sequence
  Description of Artificial Sequence: Synthetic oligonucleotide
cuccucacgcacuuugcuc

SEQ ID NO: 134095 - RNA, 19 nt, Artificial Sequence
  Description of Artificial Sequence: Synthetic oligonucleotide
cauccucgcccgcaucucg

SEQ ID NO: 134096 - RNA, 19 nt, Artificial Sequence
  Description of Artificial Sequence: Synthetic oligonucleotide
ugagcgcaccagcuugcgc

SEQ ID NO: 134097 - RNA, 19 nt, Artificial Sequence
  Description of Artificial Sequence: Synthetic oligonucleotide
cucguuggacuuguugcgc

SEQ ID NO: 134098 - RNA, 19 nt, Artificial Sequence
  Description of Artificial Sequence: Synthetic oligonucleotide
uguacaccgccagacgguc

SEQ ID NO: 134099 - RNA, 19 nt, Artificial Sequence
  Description of Artificial Sequence: Synthetic oligonucleotide
gagaagaggugcggccacg

SEQ ID NO: 134100 - RNA, 19 nt, Artificial Sequence
  Description of Artificial Sequence: Synthetic oligonucleotide
auccacucgccgaagcauc

SEQ ID NO: 134101 - RNA, 19 nt, Artificial Sequence
  Description of Artificial Sequence: Synthetic oligonucleotide
ccucguuggacuuguugcg

SEQ ID NO: 134102 - RNA, 19 nt, Artificial Sequence
  Description of Artificial Sequence: Synthetic oligonucleotide
ccggcucucaaacucacgc

SEQ ID NO: 134103 - RNA, 19 nt, Artificial Sequence
  Description of Artificial Sequence: Synthetic oligonucleotide
cacgaucaauguacaccgc

SEQ ID NO: 134104 - RNA, 19 nt, Artificial Sequence
  Description of Artificial Sequence: Synthetic oligonucleotide
agauuacaugaugcugcag

SEQ ID NO: 134105 - RNA, 19 nt, Artificial Sequence
  Description of Artificial Sequence: Synthetic oligonucleotide
guacgaaggcuguucccac

SEQ ID NO: 134106 - RNA, 19 nt, Artificial Sequence
  Description of Artificial Sequence: Synthetic oligonucleotide
cagacugccuggcauuauc

SEQ ID NO: 134107 - RNA, 19 nt, Artificial Sequence
  Description of Artificial Sequence: Synthetic oligonucleotide
caugccggcgcuuggucuc

SEQ ID NO: 134108 - RNA, 19 nt, Artificial Sequence
  Description of Artificial Sequence: Synthetic oligonucleotide
agagcuguacgaaggcugu

SEQ ID NO: 134109 - RNA, 19 nt, Artificial Sequence
  Description of Artificial Sequence: Synthetic oligonucleotide
uguuuaccguaaccaccaa

SEQ ID NO: 134110 - RNA, 19 nt, Artificial Sequence
  Description of Artificial Sequence: Synthetic oligonucleotide
ugaugcgaaggcgcagccc

SEQ ID NO: 134111 - RNA, 19 nt, Artificial Sequence
  Description of Artificial Sequence: Synthetic oligonucleotide
cagggagcgcacacgauca

SEQ ID NO: 134112 - RNA, 19 nt, Artificial Sequence
  Description of Artificial Sequence: Synthetic oligonucleotide
cacagcacggugcgugagc

SEQ ID NO: 134113 - RNA, 19 nt, Artificial Sequence
  Description of Artificial Sequence: Synthetic oligonucleotide
cgauaugucaucaaggggu

SEQ ID NO: 134114 - RNA, 19 nt, Artificial Sequence
  Description of Artificial Sequence: Synthetic oligonucleotide
gccuuuagagugaacuuug

SEQ ID NO: 134115 - RNA, 19 nt, Artificial Sequence
  Description of Artificial Sequence: Synthetic oligonucleotide
gauugagauagagacuuuu

SEQ ID NO: 134116 - RNA, 19 nt, Artificial Sequence
  Description of Artificial Sequence: Synthetic oligonucleotide
cauggagcucgcccucuag

SEQ ID NO: 134117 - RNA, 19 nt, Artificial Sequence
  Description of Artificial Sequence: Synthetic oligonucleotide
ccauuaggugcagagcagg

SEQ ID NO: 134118 - RNA, 19 nt, Artificial Sequence
  Description of Artificial Sequence: Synthetic oligonucleotide
aggagcgggugacuaggcu

SEQ ID NO: 134119 - RNA, 19 nt, Artificial Sequence
  Description of Artificial Sequence: Synthetic oligonucleotide
uagcuucgagugacuguga

SEQ ID NO: 134120 - RNA, 19 nt, Artificial Sequence
  Description of Artificial Sequence: Synthetic oligonucleotide
gcccauugauuuuaaggca

SEQ ID NO: 134121 - RNA, 19 nt, Artificial Sequence
  Description of Artificial Sequence: Synthetic oligonucleotide
cucgccgaagcaucucauc

SEQ ID NO: 134122 - RNA, 19 nt, Artificial Sequence
  Description of Artificial Sequence: Synthetic oligonucleotide
ucgggugauccgagugggc

SEQ ID NO: 134123 - RNA, 19 nt, Artificial Sequence
  Description of Artificial Sequence: Synthetic oligonucleotide
aucaaggggucaucaccau

SEQ ID NO: 134124 - RNA, 19 nt, Artificial Sequence
  Description of Artificial Sequence: Synthetic oligonucleotide
cacccugcgauugggauga

SEQ ID NO: 134125 - RNA, 19 nt, Artificial Sequence
  Description of Artificial Sequence: Synthetic oligonucleotide
cugaagucgggugauccga

SEQ ID NO: 134126 - RNA, 19 nt, Artificial Sequence
  Description of Artificial Sequence: Synthetic oligonucleotide
gcgacagcggaguagagcu

SEQ ID NO: 134127 - RNA, 19 nt, Artificial Sequence
  Description of Artificial Sequence: Synthetic oligonucleotide
ccguuaucaaucuccacga

SEQ ID NO: 134128 - RNA, 19 nt, Artificial Sequence
  Description of Artificial Sequence: Synthetic oligonucleotide
ggcucuaaagcugggaaaa

SEQ ID NO: 134129 - RNA, 19 nt, Artificial Sequence
  Description of Artificial Sequence: Synthetic oligonucleotide
cugcgauugggaugaguga

SEQ ID NO: 134130 - RNA, 19 nt, Artificial Sequence
  Description of Artificial Sequence: Synthetic oligonucleotide
ggauucgggacugcuggag

SEQ ID NO: 134131 - RNA, 19 nt, Artificial Sequence
  Description of Artificial Sequence: Synthetic oligonucleotide
ugacuggacagggcccacc

SEQ ID NO: 134132 - RNA, 19 nt, Artificial Sequence
  Description of Artificial Sequence: Synthetic oligonucleotide
aggccugcucccauuaggu

SEQ ID NO: 134133 - RNA, 19 nt, Artificial Sequence
  Description of Artificial Sequence: Synthetic oligonucleotide
ccacccgcccgcuagugcg

SEQ ID NO: 134134 - RNA, 19 nt, Artificial Sequence
  Description of Artificial Sequence: Synthetic oligonucleotide
gaaggcgcagcccugcguu

SEQ ID NO: 134135 - RNA, 19 nt, Artificial Sequence
  Description of Artificial Sequence: Synthetic oligonucleotide
agccggcucucaaacucac

SEQ ID NO: 134136 - RNA, 19 nt, Artificial Sequence
  Description of Artificial Sequence: Synthetic oligonucleotide
cugagcgcaccagcuugcg

SEQ ID NO: 134137 - RNA, 19 nt, Artificial Sequence
  Description of Artificial Sequence: Synthetic oligonucleotide
guuuaccguaaccaccaau

SEQ ID NO: 134138 - RNA, 19 nt, Artificial Sequence
  Description of Artificial Sequence: Synthetic oligonucleotide
cuugaccucucucagccau

SEQ ID NO: 134139 - RNA, 19 nt, Artificial Sequence
  Description of Artificial Sequence: Synthetic oligonucleotide
gguuguacucagcgggguc

SEQ ID NO: 134140 - RNA, 19 nt, Artificial Sequence
  Description of Artificial Sequence: Synthetic oligonucleotide
cacucgccgaagcaucuca

SEQ ID NO: 134141 - RNA, 19 nt, Artificial Sequence
  Description of Artificial Sequence: Synthetic oligonucleotide
cugugaugcgaaggcgcag

SEQ ID NO: 134142 - RNA, 19 nt, Artificial Sequence
  Description of Artificial Sequence: Synthetic oligonucleotide
accgccagacggucauuga

SEQ ID NO: 134143 - RNA, 19 nt, Artificial Sequence
  Description of Artificial Sequence: Synthetic oligonucleotide
acacugcgguagcuucgag

SEQ ID NO: 134144 - RNA, 19 nt, Artificial Sequence
  Description of Artificial Sequence: Synthetic oligonucleotide
cgagcgugcugugagaagc

SEQ ID NO: 134145 - RNA, 19 nt, Artificial Sequence
  Description of Artificial Sequence: Synthetic oligonucleotide
ggacuuggacagaaggaca

SEQ ID NO: 134146 - RNA, 19 nt, Artificial Sequence
  Description of Artificial Sequence: Synthetic oligonucleotide
uagugcgagcgugcuguga

SEQ ID NO: 134147 - RNA, 19 nt, Artificial Sequence
  Description of Artificial Sequence: Synthetic oligonucleotide
gcuucgagugacugugaca

SEQ ID NO: 134148 - RNA, 19 nt, Artificial Sequence
  Description of Artificial Sequence: Synthetic oligonucleotide
cucgcccucuagugugcgc

SEQ ID NO: 134149 - RNA, 19 nt, Artificial Sequence
  Description of Artificial Sequence: Synthetic oligonucleotide
cuagugcgagcgugcugug

SEQ ID NO: 134150 - RNA, 19 nt, Artificial Sequence
  Description of Artificial Sequence: Synthetic oligonucleotide
cagcccugcguucuccguc

SEQ ID NO: 134151 - RNA, 19 nt, Artificial Sequence
  Description of Artificial Sequence: Synthetic oligonucleotide
gcuagugcgagcgugcugu

SEQ ID NO: 134152 - RNA, 19 nt, Artificial Sequence
  Description of Artificial Sequence: Synthetic oligonucleotide
cgccagacggucauugagc

SEQ ID NO: 134153 - RNA, 19 nt, Artificial Sequence
  Description of Artificial Sequence: Synthetic oligonucleotide
cugggacggggucuccaug

SEQ ID NO: 134154 - RNA, 19 nt, Artificial Sequence
  Description of Artificial Sequence: Synthetic oligonucleotide
gccgccggcuaguaucccg

SEQ ID NO: 134155 - RNA, 19 nt, Artificial Sequence
  Description of Artificial Sequence: Synthetic oligonucleotide
ggaagcgauaugucaucaa

SEQ ID NO: 134156 - RNA, 19 nt, Artificial Sequence
  Description of Artificial Sequence: Synthetic oligonucleotide
ggugauccgagugggcgac

SEQ ID NO: 134157 - RNA, 19 nt, Artificial Sequence
  Description of Artificial Sequence: Synthetic oligonucleotide
acuuuggugggaagcgaua

SEQ ID NO: 134158 - RNA, 19 nt, Artificial Sequence
  Description of Artificial Sequence: Synthetic oligonucleotide
auccgcccaccugggcucc

SEQ ID NO: 134159 - RNA, 19 nt, Artificial Sequence
  Description of Artificial Sequence: Synthetic oligonucleotide
agguaggagcgggugacua

SEQ ID NO: 134160 - RNA, 19 nt, Artificial Sequence
  Description of Artificial Sequence: Synthetic oligonucleotide
ccguaaccaccaaucuccc

SEQ ID NO: 134161 - RNA, 19 nt, Artificial Sequence
  Description of Artificial Sequence: Synthetic oligonucleotide
ccgccagacggucauugag

SEQ ID NO: 134162 - RNA, 19 nt, Artificial Sequence
  Description of Artificial Sequence: Synthetic oligonucleotide
cucacgcacuuugcucagc

SEQ ID NO: 134163 - RNA, 19 nt, Artificial Sequence
  Description of Artificial Sequence: Synthetic oligonucleotide
gacuuaggauugagauaga

SEQ ID NO: 134164 - RNA, 19 nt, Artificial Sequence
  Description of Artificial Sequence: Synthetic oligonucleotide
ugaacuccucacgcacuuu

SEQ ID NO: 134165 - RNA, 19 nt, Artificial Sequence
  Description of Artificial Sequence: Synthetic oligonucleotide
ccacccugcgauugggaug

SEQ ID NO: 134166 - RNA, 19 nt, Artificial Sequence
  Description of Artificial Sequence: Synthetic oligonucleotide
uccacgagccgggucucau

SEQ ID NO: 134167 - RNA, 19 nt, Artificial Sequence
  Description of Artificial Sequence: Synthetic oligonucleotide
cacggagucgagggucuug

SEQ ID NO: 134168 - RNA, 19 nt, Artificial Sequence
  Description of Artificial Sequence: Synthetic oligonucleotide
cagcacggugcgugagcgc

SEQ ID NO: 134169 - RNA, 19 nt, Artificial Sequence
  Description of Artificial Sequence: Synthetic oligonucleotide
ccguuauaaaagcaguccu

SEQ ID NO: 134170 - RNA, 19 nt, Artificial Sequence
  Description of Artificial Sequence: Synthetic oligonucleotide
cccgcuagugcgagcgugc

SEQ ID NO: 134171 - RNA, 19 nt, Artificial Sequence
  Description of Artificial Sequence: Synthetic oligonucleotide
cacgcagcuccucacuaua

SEQ ID NO: 134172 - RNA, 19 nt, Artificial Sequence
  Description of Artificial Sequence: Synthetic oligonucleotide
cgggugauccgagugggcg

SEQ ID NO: 134173 - RNA, 19 nt, Artificial Sequence
  Description of Artificial Sequence: Synthetic oligonucleotide
cacugcgguagcuucgagu

SEQ ID NO: 134174 - RNA, 19 nt, Artificial Sequence
  Description of Artificial Sequence: Synthetic oligonucleotide
gggugacuaggcugucccc

SEQ ID NO: 134175 - RNA, 19 nt, Artificial Sequence
  Description of Artificial Sequence: Synthetic oligonucleotide
ugcgugagcgcagguugua

SEQ ID NO: 134176 - RNA, 19 nt, Artificial Sequence
  Description of Artificial Sequence: Synthetic oligonucleotide
gggugauccgagugggcga

SEQ ID NO: 134177 - RNA, 19 nt, Artificial Sequence
  Description of Artificial Sequence: Synthetic oligonucleotide
cacacugcgguagcuucga

SEQ ID NO: 134178 - RNA, 19 nt, Artificial Sequence
  Description of Artificial Sequence: Synthetic oligonucleotide
gggauaagcgcaaggccaa

SEQ ID NO: 134179 - RNA, 19 nt, Artificial Sequence
  Description of Artificial Sequence: Synthetic oligonucleotide
agggagcgcacacgaucaa

SEQ ID NO: 134180 - RNA, 19 nt, Artificial Sequence
  Description of Artificial Sequence: Synthetic oligonucleotide
gccagacggucauugagcu

SEQ ID NO: 134181 - RNA, 19 nt, Artificial Sequence
  Description of Artificial Sequence: Synthetic oligonucleotide
agcuuucuauaggcaugga

SEQ ID NO: 134182 - RNA, 19 nt, Artificial Sequence
  Description of Artificial Sequence: Synthetic oligonucleotide
gacgcuugaucugccaguu

SEQ ID NO: 134183 - RNA, 19 nt, Artificial Sequence
  Description of Artificial Sequence: Synthetic oligonucleotide
agccgccggcuaguauccc

SEQ ID NO: 134184 - RNA, 19 nt, Artificial Sequence
  Description of Artificial Sequence: Synthetic oligonucleotide
gugcugggauaagcgcaag

SEQ ID NO: 134185 - RNA, 19 nt, Artificial Sequence
  Description of Artificial Sequence: Synthetic oligonucleotide
ccgccggcuaguaucccgc

SEQ ID NO: 134186 - RNA, 19 nt, Artificial Sequence
  Description of Artificial Sequence: Synthetic oligonucleotide
acgcuugaucugccaguuu

SEQ ID NO: 134187 - RNA, 19 nt, Artificial Sequence
  Description of Artificial Sequence: Synthetic oligonucleotide
cugcgccccacugcgggug

SEQ ID NO: 134188 - RNA, 19 nt, Artificial Sequence
  Description of Artificial Sequence: Synthetic oligonucleotide
ccgcccgcuagugcgagcg

SEQ ID NO: 134189 - RNA, 19 nt, Artificial Sequence
  Description of Artificial Sequence: Synthetic oligonucleotide
ggagcucgcccucuagugu

SEQ ID NO: 134190 - RNA, 19 nt, Artificial Sequence
  Description of Artificial Sequence: Synthetic oligonucleotide
gcgauugggaugagugaga

SEQ ID NO: 134191 - RNA, 19 nt, Artificial Sequence
  Description of Artificial Sequence: Synthetic oligonucleotide
gagcgugcugugagaagcu

SEQ ID NO: 134192 - RNA, 19 nt, Artificial Sequence
  Description of Artificial Sequence: Synthetic oligonucleotide
augcgaaggcgcagcccug

SEQ ID NO: 134193 - RNA, 19 nt, Artificial Sequence
  Description of Artificial Sequence: Synthetic oligonucleotide
ugcggguggcgcgccgcug

SEQ ID NO: 134194 - RNA, 19 nt, Artificial Sequence
  Description of Artificial Sequence: Synthetic oligonucleotide
agacggucauugagcuccu

SEQ ID NO: 134195 - RNA, 19 nt, Artificial Sequence
  Description of Artificial Sequence: Synthetic oligonucleotide
guacaccgccagacgguca

SEQ ID NO: 134196 - RNA, 19 nt, Artificial Sequence
  Description of Artificial Sequence: Synthetic oligonucleotide
acggcugcgcugcgaggua

SEQ ID NO: 134197 - RNA, 19 nt, Artificial Sequence
  Description of Artificial Sequence: Synthetic oligonucleotide
gccggcucucaaacucacg

SEQ ID NO: 134198 - RNA, 19 nt, Artificial Sequence
  Description of Artificial Sequence: Synthetic oligonucleotide
gcccagaucgucaccaccu

SEQ ID NO: 134199 - RNA, 19 nt, Artificial Sequence
  Description of Artificial Sequence: Synthetic oligonucleotide
ccgagugggcgacagcgga

SEQ ID NO: 134200 - RNA, 19 nt, Artificial Sequence
  Description of Artificial Sequence: Synthetic oligonucleotide
cguuauaaaagcaguccuu

SEQ ID NO: 134201 - RNA, 19 nt, Artificial Sequence
  Description of Artificial Sequence: Synthetic oligonucleotide
gcccgcuagugcgagcgug

SEQ ID NO: 134202 - RNA, 19 nt, Artificial Sequence
  Description of Artificial Sequence: Synthetic oligonucleotide
ccggcuaguaucccgcucu

SEQ ID NO: 134203 - RNA, 19 nt, Artificial Sequence
  Description of Artificial Sequence: Synthetic oligonucleotide
ccacgagccgggucucaug

SEQ ID NO: 134204 - RNA, 19 nt, Artificial Sequence
  Description of Artificial Sequence: Synthetic oligonucleotide
gccggcuaguaucccgcuc

SEQ ID NO: 134205 - RNA, 19 nt, Artificial Sequence
  Description of Artificial Sequence: Synthetic oligonucleotide
gcgugagcgcagguuguac

SEQ ID NO: 134206 - RNA, 19 nt, Artificial Sequence
  Description of Artificial Sequence: Synthetic oligonucleotide
cacccgcccgcuagugcga

SEQ ID NO: 134207 - RNA, 19 nt, Artificial Sequence
  Description of Artificial Sequence: Synthetic oligonucleotide
ggaguugaugagagcugua

SEQ ID NO: 134208 - RNA, 19 nt, Artificial Sequence
  Description of Artificial Sequence: Synthetic oligonucleotide
guccucaaccauggucacu

SEQ ID NO: 134209 - RNA, 19 nt, Artificial Sequence
  Description of Artificial Sequence: Synthetic oligonucleotide
cgguagcuucgagugacug

SEQ ID NO: 134210 - RNA, 19 nt, Artificial Sequence
  Description of Artificial Sequence: Synthetic oligonucleotide
gugauccgagugggcgaca

SEQ ID NO: 134211 - RNA, 19 nt, Artificial Sequence
  Description of Artificial Sequence: Synthetic oligonucleotide
gugcgugagcgcagguugu

SEQ ID NO: 134212 - RNA, 19 nt, Artificial Sequence
  Description of Artificial Sequence: Synthetic oligonucleotide
cgacagcggaguagagcug

SEQ ID NO: 134213 - RNA, 19 nt, Artificial Sequence
  Description of Artificial Sequence: Synthetic oligonucleotide
caucggccagccggcucuc

SEQ ID NO: 134214 - RNA, 19 nt, Artificial Sequence
  Description of Artificial Sequence: Synthetic oligonucleotide
cgcgggacuuggacagaag

SEQ ID NO: 134215 - RNA, 19 nt, Artificial Sequence
  Description of Artificial Sequence: Synthetic oligonucleotide
gggcgacagcggaguagag

SEQ ID NO: 134216 - RNA, 19 nt, Artificial Sequence
  Description of Artificial Sequence: Synthetic oligonucleotide
gcugggacggggucuccau

SEQ ID NO: 134217 - RNA, 19 nt, Artificial Sequence
  Description of Artificial Sequence: Synthetic oligonucleotide
ccacucgccgaagcaucuc

SEQ ID NO: 134218 - RNA, 19 nt, Artificial Sequence
  Description of Artificial Sequence: Synthetic oligonucleotide
gcgcgggacuuggacagaa

SEQ ID NO: 134219 - RNA, 19 nt, Artificial Sequence
  Description of Artificial Sequence: Synthetic oligonucleotide
ccucacuauagauguucuu

SEQ ID NO: 134220 - RNA, 19 nt, Artificial Sequence
  Description of Artificial Sequence: Synthetic oligonucleotide
ccccacccugcgauuggga

SEQ ID NO: 134221 - RNA, 19 nt, Artificial Sequence
  Description of Artificial Sequence: Synthetic oligonucleotide
cggcugcgcugcgagguag

SEQ ID NO: 134222 - RNA, 19 nt, Artificial Sequence
  Description of Artificial Sequence: Synthetic oligonucleotide
cagccacccgcccgcuagu

SEQ ID NO: 134223 - RNA, 19 nt, Artificial Sequence
  Description of Artificial Sequence: Synthetic oligonucleotide
ggcgcgggacuuggacaga

SEQ ID NO: 134224 - RNA, 19 nt, Artificial Sequence
  Description of Artificial Sequence: Synthetic oligonucleotide
gcgguagcuucgagugacu

SEQ ID NO: 134225 - RNA, 19 nt, Artificial Sequence
  Description of Artificial Sequence: Synthetic oligonucleotide
ccgcuagugcgagcgugcu

SEQ ID NO: 134226 - RNA, 19 nt, Artificial Sequence
  Description of Artificial Sequence: Synthetic oligonucleotide
gggucucaugccggcgcuu

SEQ ID NO: 134227 - RNA, 19 nt, Artificial Sequence
  Description of Artificial Sequence: Synthetic oligonucleotide
cgccggcuaguaucccgcu

SEQ ID NO: 134228 - RNA, 19 nt, Artificial Sequence
  Description of Artificial Sequence: Synthetic oligonucleotide
cgcgcuccuuggccacgga

SEQ ID NO: 134229 - RNA, 19 nt, Artificial Sequence
  Description of Artificial Sequence: Synthetic oligonucleotide
cgcccucuagugugcgcuu

SEQ ID NO: 134230 - RNA, 19 nt, Artificial Sequence
  Description of Artificial Sequence: Synthetic oligonucleotide
ccacggagucgagggucuu

SEQ ID NO: 134231 - RNA, 19 nt, Artificial Sequence
  Description of Artificial Sequence: Synthetic oligonucleotide
cggccucguaggccgccuu

SEQ ID NO: 134232 - RNA, 19 nt, Artificial Sequence
  Description of Artificial Sequence: Synthetic oligonucleotide
uacaauaccguccagaugc

SEQ ID NO: 134233 - RNA, 19 nt, Artificial Sequence
  Description of Artificial Sequence: Synthetic oligonucleotide
gauuguaccacucguaggg

SEQ ID NO: 134234 - RNA, 19 nt, Artificial Sequence
  Description of Artificial Sequence: Synthetic oligonucleotide
agcgcuaaccaccacaugc

SEQ ID NO: 134235 - RNA, 19 nt, Artificial Sequence
  Description of Artificial Sequence: Synthetic oligonucleotide
aagacggcaaugaugaggc

SEQ ID NO: 134236 - RNA, 19 nt, Artificial Sequence
  Description of Artificial Sequence: Synthetic oligonucleotide
aaaacgcugaggucauucc

SEQ ID NO: 134237 - RNA, 19 nt, Artificial Sequence
  Description of Artificial Sequence: Synthetic oligonucleotide
aaagagagagaagagaaga

SEQ ID NO: 134238 - RNA, 19 nt, Artificial Sequence
  Description of Artificial Sequence: Synthetic oligonucleotide
uuuccgguuaaugagcucg

SEQ ID NO: 134239 - RNA, 19 nt, Artificial Sequence
  Description of Artificial Sequence: Synthetic oligonucleotide
uuguaaaacgcugagguca

SEQ ID NO: 134240 - RNA, 19 nt, Artificial Sequence
  Description of Artificial Sequence: Synthetic oligonucleotide
aaaaucgcggcuuccuguc

SEQ ID NO: 134241 - RNA, 19 nt, Artificial Sequence
  Description of Artificial Sequence: Synthetic oligonucleotide
gagagagaagagaagagag

SEQ ID NO: 134242 - RNA, 19 nt, Artificial Sequence
  Description of Artificial Sequence: Synthetic oligonucleotide
ucgaacagcgcuaaccacc

SEQ ID NO: 134243 - RNA, 19 nt, Artificial Sequence
  Description of Artificial Sequence: Synthetic oligonucleotide
gauagugccguacucgaug

SEQ ID NO: 134244 - RNA, 19 nt, Artificial Sequence
  Description of Artificial Sequence: Synthetic oligonucleotide
gaugaucaaagugaaggcc

SEQ ID NO: 134245 - RNA, 19 nt, Artificial Sequence
  Description of Artificial Sequence: Synthetic oligonucleotide
acagcgucaaacaucaggg

SEQ ID NO: 134246 - RNA, 19 nt, Artificial Sequence
  Description of Artificial Sequence: Synthetic oligonucleotide
gucucauagaaauucugag

SEQ ID NO: 134247 - RNA, 19 nt, Artificial Sequence
  Description of Artificial Sequence: Synthetic oligonucleotide
cuuacggaggacgaggugg

SEQ ID NO: 134248 - RNA, 19 nt, Artificial Sequence
  Description of Artificial Sequence: Synthetic oligonucleotide
ucucgaacagcgcuaacca

SEQ ID NO: 134249 - RNA, 19 nt, Artificial Sequence
  Description of Artificial Sequence: Synthetic oligonucleotide
uccaggauagucgugacca

SEQ ID NO: 134250 - RNA, 19 nt, Artificial Sequence
  Description of Artificial Sequence: Synthetic oligonucleotide
ucauacucuaccaugcgua

SEQ ID NO: 134251 - RNA, 19 nt, Artificial Sequence
  Description of Artificial Sequence: Synthetic oligonucleotide
aacagcgcuaaccaccaca

SEQ ID NO: 134252 - RNA, 19 nt, Artificial Sequence
  Description of Artificial Sequence: Synthetic oligonucleotide
uacucuaccaugcguaggu

SEQ ID NO: 134253 - RNA, 19 nt, Artificial Sequence
  Description of Artificial Sequence: Synthetic oligonucleotide
aaucgcggcuuccuguccg

SEQ ID NO: 134254 - RNA, 19 nt, Artificial Sequence
  Description of Artificial Sequence: Synthetic oligonucleotide
uguuggccgaaguacaggc

SEQ ID NO: 134255 - RNA, 19 nt, Artificial Sequence
  Description of Artificial Sequence: Synthetic oligonucleotide
uccagaugcaggaugggga

SEQ ID NO: 134256 - RNA, 19 nt, Artificial Sequence
  Description of Artificial Sequence: Synthetic oligonucleotide
cuagcauccucacggauag

SEQ ID NO: 134257 - RNA, 19 nt, Artificial Sequence
  Description of Artificial Sequence: Synthetic oligonucleotide
caaauguuggccgaaguac

SEQ ID NO: 134258 - RNA, 19 nt, Artificial Sequence
  Description of Artificial Sequence: Synthetic oligonucleotide
aaaucgcggcuuccugucc

SEQ ID NO: 134259 - RNA, 19 nt, Artificial Sequence
  Description of Artificial Sequence: Synthetic oligonucleotide
aagagagagaagagaagag

SEQ ID NO: 134260 - RNA, 19 nt, Artificial Sequence
  Description of Artificial Sequence: Synthetic oligonucleotide
uguaguugguccucugccc

SEQ ID NO: 134261 - RNA, 19 nt, Artificial Sequence
  Description of Artificial Sequence: Synthetic oligonucleotide
uuacggaggacgagguggg

SEQ ID NO: 134262 - RNA, 19 nt, Artificial Sequence
  Description of Artificial Sequence: Synthetic oligonucleotide
ucgauguuggucugauccg

SEQ ID NO: 134263 - RNA, 19 nt, Artificial Sequence
  Description of Artificial Sequence: Synthetic oligonucleotide
acacgcaguguguaguugg

SEQ ID NO: 134264 - RNA, 19 nt, Artificial Sequence
  Description of Artificial Sequence: Synthetic oligonucleotide
cuugacgaacacacuaggc

SEQ ID NO: 134265 - RNA, 19 nt, Artificial Sequence
  Description of Artificial Sequence: Synthetic oligonucleotide
guuggcuagagucugugac

SEQ ID NO: 134266 - RNA, 19 nt, Artificial Sequence
  Description of Artificial Sequence: Synthetic oligonucleotide
agcgucaaacaucagggcu

SEQ ID NO: 134267 - RNA, 19 nt, Artificial Sequence
  Description of Artificial Sequence: Synthetic oligonucleotide
uccuccgugcucuugacga

SEQ ID NO: 134268 - RNA, 19 nt, Artificial Sequence
  Description of Artificial Sequence: Synthetic oligonucleotide
auucaccggcaacugaagg

SEQ ID NO: 134269 - RNA, 19 nt, Artificial Sequence
  Description of Artificial Sequence: Synthetic oligonucleotide
cucuugacgaacacacuag

SEQ ID NO: 134270 - RNA, 19 nt, Artificial Sequence
  Description of Artificial Sequence: Synthetic oligonucleotide
agguauagaggcccaacug

SEQ ID NO: 134271 - RNA, 19 nt, Artificial Sequence
  Description of Artificial Sequence: Synthetic oligonucleotide
agagagaagagaagagagg

SEQ ID NO: 134272 - RNA, 19 nt, Artificial Sequence
  Description of Artificial Sequence: Synthetic oligonucleotide
guacuuguaaaacgcugag

SEQ ID NO: 134273 - RNA, 19 nt, Artificial Sequence
  Description of Artificial Sequence: Synthetic oligonucleotide
auagucgugaccaccagug

SEQ ID NO: 134274 - RNA, 19 nt, Artificial Sequence
  Description of Artificial Sequence: Synthetic oligonucleotide
uugaguagcgguguggggu

SEQ ID NO: 134275 - RNA, 19 nt, Artificial Sequence
  Description of Artificial Sequence: Synthetic oligonucleotide
uggaguaccacaccccuau

SEQ ID NO: 134276 - RNA, 19 nt, Artificial Sequence
  Description of Artificial Sequence: Synthetic oligonucleotide
guagcgggaguugaggacg

SEQ ID NO: 134277 - RNA, 19 nt, Artificial Sequence
  Description of Artificial Sequence: Synthetic oligonucleotide
agagagagaagagaagaga

SEQ ID NO: 134278 - RNA, 19 nt, Artificial Sequence
  Description of Artificial Sequence: Synthetic oligonucleotide
cauacucuaccaugcguag

SEQ ID NO: 134279 - RNA, 19 nt, Artificial Sequence
  Description of Artificial Sequence: Synthetic oligonucleotide
acucaacccguccagucag

SEQ ID NO: 134280 - RNA, 19 nt, Artificial Sequence
  Description of Artificial Sequence: Synthetic oligonucleotide
uguaaaacgcugaggucau

SEQ ID NO: 134281 - RNA, 19 nt, Artificial Sequence
  Description of Artificial Sequence: Synthetic oligonucleotide
uggauagugccguacucga

SEQ ID NO: 134282 - RNA, 19 nt, Artificial Sequence
  Description of Artificial Sequence: Synthetic oligonucleotide
cugagcgcgggauggaacg

SEQ ID NO: 134283 - RNA, 19 nt, Artificial Sequence
  Description of Artificial Sequence: Synthetic oligonucleotide
uucguucccugacaaggcc

SEQ ID NO: 134284 - RNA, 19 nt, Artificial Sequence
  Description of Artificial Sequence: Synthetic oligonucleotide
cuugccguugcugagucgc

SEQ ID NO: 134285 - RNA, 19 nt, Artificial Sequence
  Description of Artificial Sequence: Synthetic oligonucleotide
ugauccgccaggucgucag

SEQ ID NO: 134286 - RNA, 19 nt, Artificial Sequence
  Description of Artificial Sequence: Synthetic oligonucleotide
ugcggauuguaccacucgu

SEQ ID NO: 134287 - RNA, 19 nt, Artificial Sequence
  Description of Artificial Sequence: Synthetic oligonucleotide
uaaaacgcugaggucauuc

SEQ ID NO: 134288 - RNA, 19 nt, Artificial Sequence
  Description of Artificial Sequence: Synthetic oligonucleotide
guggauagugccguacucg

SEQ ID NO: 134289 - RNA, 19 nt, Artificial Sequence
  Description of Artificial Sequence: Synthetic oligonucleotide
auaccguccagaugcagga

SEQ ID NO: 134290 - RNA, 19 nt, Artificial Sequence
  Description of Artificial Sequence: Synthetic oligonucleotide
acgccaaucuccuggcuuc

SEQ ID NO: 134291 - RNA, 19 nt, Artificial Sequence
  Description of Artificial Sequence: Synthetic oligonucleotide
uguagaggauacugauccc

SEQ ID NO: 134292 - RNA, 19 nt, Artificial Sequence
  Description of Artificial Sequence: Synthetic oligonucleotide
caggcgauaccgaaagcgc

SEQ ID NO: 134293 - RNA, 19 nt, Artificial Sequence
  Description of Artificial Sequence: Synthetic oligonucleotide
ugaaggcccaccagacucc

SEQ ID NO: 134294 - RNA, 19 nt, Artificial Sequence
  Description of Artificial Sequence: Synthetic oligonucleotide
cuuguaaaacgcugagguc

SEQ ID NO: 134295 - RNA, 19 nt, Artificial Sequence
  Description of Artificial Sequence: Synthetic oligonucleotide
aacgcggguguccacgaca

SEQ ID NO: 134296 - RNA, 19 nt, Artificial Sequence
  Description of Artificial Sequence: Synthetic oligonucleotide
aauucaccggcaacugaag

SEQ ID NO: 134297 - RNA, 19 nt, Artificial Sequence
  Description of Artificial Sequence: Synthetic oligonucleotide
guaccucgaguucuggaag

SEQ ID NO: 134298 - RNA, 19 nt, Artificial Sequence
  Description of Artificial Sequence: Synthetic oligonucleotide
gguauagaggcccaacuga

SEQ ID NO: 134299 - RNA, 19 nt, Artificial Sequence
  Description of Artificial Sequence: Synthetic oligonucleotide
gaacggggagcccagcggc

SEQ ID NO: 134300 - RNA, 19 nt, Artificial Sequence
  Description of Artificial Sequence: Synthetic oligonucleotide
uccacguggggucauucgu

SEQ ID NO: 134301 - RNA, 19 nt, Artificial Sequence
  Description of Artificial Sequence: Synthetic oligonucleotide
aguccgucuucuaccagcc

SEQ ID NO: 134302 - RNA, 19 nt, Artificial Sequence
  Description of Artificial Sequence: Synthetic oligonucleotide
agccgugucaagucucggg

SEQ ID NO: 134303 - RNA, 19 nt, Artificial Sequence
  Description of Artificial Sequence: Synthetic oligonucleotide
aacgcugaggucauuccca

SEQ ID NO: 134304 - RNA, 19 nt, Artificial Sequence
  Description of Artificial Sequence: Synthetic oligonucleotide
agucgcaucucgcggacug

SEQ ID NO: 134305 - RNA, 19 nt, Artificial Sequence
  Description of Artificial Sequence: Synthetic oligonucleotide
aacgcgaggucuugcggca

SEQ ID NO: 134306 - RNA, 19 nt, Artificial Sequence
  Description of Artificial Sequence: Synthetic oligonucleotide
acggcaaugaugaggccac

SEQ ID NO: 134307 - RNA, 19 nt, Artificial Sequence
  Description of Artificial Sequence: Synthetic oligonucleotide
cugcaugaagccacccacg

SEQ ID NO: 134308 - RNA, 19 nt, Artificial Sequence
  Description of Artificial Sequence: Synthetic oligonucleotide
cacgcagaagcccucgaag

SEQ ID NO: 134309 - RNA, 19 nt, Artificial Sequence
  Description of Artificial Sequence: Synthetic oligonucleotide
uggaacgcggguguccacg

SEQ ID NO: 134310 - RNA, 19 nt, Artificial Sequence
  Description of Artificial Sequence: Synthetic oligonucleotide
agugccguacucgauguug

SEQ ID NO: 134311 - RNA, 19 nt, Artificial Sequence
  Description of Artificial Sequence: Synthetic oligonucleotide
ucauagaaauucugagguu

SEQ ID NO: 134312 - RNA, 19 nt, Artificial Sequence
  Description of Artificial Sequence: Synthetic oligonucleotide
gcaggcgauaccgaaagcg

SEQ ID NO: 134313 - RNA, 19 nt, Artificial Sequence
  Description of Artificial Sequence: Synthetic oligonucleotide
guauagaggcccaacugac

SEQ ID NO: 134314 - RNA, 19 nt, Artificial Sequence
  Description of Artificial Sequence: Synthetic oligonucleotide
guuaaugagcucgccgacc

SEQ ID NO: 134315 - RNA, 19 nt, Artificial Sequence
  Description of Artificial Sequence: Synthetic oligonucleotide
ucggacucugcugaccucc

SEQ ID NO: 134316 - RNA, 19 nt, Artificial Sequence
  Description of Artificial Sequence: Synthetic oligonucleotide
ugcccuuuugacuguuuga

SEQ ID NO: 134317 - RNA, 19 nt, Artificial Sequence
  Description of Artificial Sequence: Synthetic oligonucleotide
uacgucugguaccucgagu

SEQ ID NO: 134318 - RNA, 19 nt, Artificial Sequence
  Description of Artificial Sequence: Synthetic oligonucleotide
cacggcguggcgcagcucc

SEQ ID NO: 134319 - RNA, 19 nt, Artificial Sequence
  Description of Artificial Sequence: Synthetic oligonucleotide
accaugcguagguaguuca

SEQ ID NO: 134320 - RNA, 19 nt, Artificial Sequence
  Description of Artificial Sequence: Synthetic oligonucleotide
aggacauguugagacugcg

SEQ ID NO: 134321 - RNA, 19 nt, Artificial Sequence
  Description of Artificial Sequence: Synthetic oligonucleotide
auacucuaccaugcguagg

SEQ ID NO: 134322 - RNA, 19 nt, Artificial Sequence
  Description of Artificial Sequence: Synthetic oligonucleotide
uaucucacgguggcccugg

SEQ ID NO: 134323 - RNA, 19 nt, Artificial Sequence
  Description of Artificial Sequence: Synthetic oligonucleotide
agcccaucauacucuacca

SEQ ID NO: 134324 - RNA, 19 nt, Artificial Sequence
  Description of Artificial Sequence: Synthetic oligonucleotide
agcuccgaagccuuacgga

SEQ ID NO: 134325 - RNA, 19 nt, Artificial Sequence
  Description of Artificial Sequence: Synthetic oligonucleotide
uccaggacauguugagacu

SEQ ID NO: 134326 - RNA, 19 nt, Artificial Sequence
  Description of Artificial Sequence: Synthetic oligonucleotide
ggauaugcgggcgugcccg

SEQ ID NO: 134327 - RNA, 19 nt, Artificial Sequence
  Description of Artificial Sequence: Synthetic oligonucleotide
uggagagccgugucaaguc

SEQ ID NO: 134328 - RNA, 19 nt, Artificial Sequence
  Description of Artificial Sequence: Synthetic oligonucleotide
gauguuggucugauccgcc

SEQ ID NO: 134329 - RNA, 19 nt, Artificial Sequence
  Description of Artificial Sequence: Synthetic oligonucleotide
gcuccgaagccuuacggag

SEQ ID NO: 134330 - RNA, 19 nt, Artificial Sequence
  Description of Artificial Sequence: Synthetic oligonucleotide
cuacaauaccguccagaug

SEQ ID NO: 134331 - RNA, 19 nt, Artificial Sequence
  Description of Artificial Sequence: Synthetic oligonucleotide
uaugcgggcgugcccggag

SEQ ID NO: 134332 - RNA, 19 nt, Artificial Sequence
  Description of Artificial Sequence: Synthetic oligonucleotide
uguuggcuagagucuguga

SEQ ID NO: 134333 - RNA, 19 nt, Artificial Sequence
  Description of Artificial Sequence: Synthetic oligonucleotide
uccgcugacacagcgcgug

SEQ ID NO: 134334 - RNA, 19 nt, Artificial Sequence
  Description of Artificial Sequence: Synthetic oligonucleotide
gccgugucaagucucgggg

SEQ ID NO: 134335 - RNA, 19 nt, Artificial Sequence
  Description of Artificial Sequence: Synthetic oligonucleotide
gacgcgggcgauuccuucc

SEQ ID NO: 134336 - RNA, 19 nt, Artificial Sequence
  Description of Artificial Sequence: Synthetic oligonucleotide
uccgugcucuugacgaaca

SEQ ID NO: 134337 - RNA, 19 nt, Artificial Sequence
  Description of Artificial Sequence: Synthetic oligonucleotide
auguuggccgaaguacagg

SEQ ID NO: 134338 - RNA, 19 nt, Artificial Sequence
  Description of Artificial Sequence: Synthetic oligonucleotide
agcgcguccccgcagucag

SEQ ID NO: 134339 - RNA, 19 nt, Artificial Sequence
  Description of Artificial Sequence: Synthetic oligonucleotide
agccggcguggauagugcc

SEQ ID NO: 134340 - RNA, 19 nt, Artificial Sequence
  Description of Artificial Sequence: Synthetic oligonucleotide
uugcugagucgcaucucgc

SEQ ID NO: 134341 - RNA, 19 nt, Artificial Sequence
  Description of Artificial Sequence: Synthetic oligonucleotide
gcugagucgcaucucgcgg

SEQ ID NO: 134342 - RNA, 19 nt, Artificial Sequence
  Description of Artificial Sequence: Synthetic oligonucleotide
gauaugcgggcgugcccgg

SEQ ID NO: 134343 - RNA, 19 nt, Artificial Sequence
  Description of Artificial Sequence: Synthetic oligonucleotide
gcaguugaggcgccggugg

SEQ ID NO: 134344 - RNA, 19 nt, Artificial Sequence
  Description of Artificial Sequence: Synthetic oligonucleotide
cagcuccgaagccuuacgg

SEQ ID NO: 134345 - RNA, 19 nt, Artificial Sequence
  Description of Artificial Sequence: Synthetic oligonucleotide
ucgcggacugcgcgcagcg

SEQ ID NO: 134346 - RNA, 19 nt, Artificial Sequence
  Description of Artificial Sequence: Synthetic oligonucleotide
caccagacuccgcugacac

SEQ ID NO: 134347 - RNA, 19 nt, Artificial Sequence
  Description of Artificial Sequence: Synthetic oligonucleotide
ucauaaggcuggucccaug

SEQ ID NO: 134348 - RNA, 19 nt, Artificial Sequence
  Description of Artificial Sequence: Synthetic oligonucleotide
ucgcaucucgcggacugcg

SEQ ID NO: 134349 - RNA, 19 nt, Artificial Sequence
  Description of Artificial Sequence: Synthetic oligonucleotide
aaggcguagcgggaguuga

SEQ ID NO: 134350 - RNA, 19 nt, Artificial Sequence
  Description of Artificial Sequence: Synthetic oligonucleotide
auacggguucuccaggaua

SEQ ID NO: 134351 - RNA, 19 nt, Artificial Sequence
  Description of Artificial Sequence: Synthetic oligonucleotide
ugguaccucgaguucugga

SEQ ID NO: 134352 - RNA, 19 nt, Artificial Sequence
  Description of Artificial Sequence: Synthetic oligonucleotide
cccgcagucaguuggggcg

SEQ ID NO: 134353 - RNA, 19 nt, Artificial Sequence
  Description of Artificial Sequence: Synthetic oligonucleotide
aggauagucgugaccacca

SEQ ID NO: 134354 - RNA, 19 nt, Artificial Sequence
  Description of Artificial Sequence: Synthetic oligonucleotide
cacccucccaccacuugcg

SEQ ID NO: 134355 - RNA, 19 nt, Artificial Sequence
  Description of Artificial Sequence: Synthetic oligonucleotide
gaagccuuacggaggacga

SEQ ID NO: 134356 - RNA, 19 nt, Artificial Sequence
  Description of Artificial Sequence: Synthetic oligonucleotide
gaaguugggccugcgcaug

SEQ ID NO: 134357 - RNA, 19 nt, Artificial Sequence
  Description of Artificial Sequence: Synthetic oligonucleotide
cucgaacagcgcuaaccac

SEQ ID NO: 134358 - RNA, 19 nt, Artificial Sequence
  Description of Artificial Sequence: Synthetic oligonucleotide
gauggaacgcgggugucca

SEQ ID NO: 134359 - RNA, 19 nt, Artificial Sequence
  Description of Artificial Sequence: Synthetic oligonucleotide
ggaacggggagcccagcgg

SEQ ID NO: 134360 - RNA, 19 nt, Artificial Sequence
  Description of Artificial Sequence: Synthetic oligonucleotide
gaaggcccaccagacuccg

SEQ ID NO: 134361 - RNA, 19 nt, Artificial Sequence
  Description of Artificial Sequence: Synthetic oligonucleotide
agcguucguucccugacaa

SEQ ID NO: 134362 - RNA, 19 nt, Artificial Sequence
  Description of Artificial Sequence: Synthetic oligonucleotide
guucguucccugacaaggc

SEQ ID NO: 134363 - RNA, 19 nt, Artificial Sequence
  Description of Artificial Sequence: Synthetic oligonucleotide
uccaggauaugcgggcgug

SEQ ID NO: 134364 - RNA, 19 nt, Artificial Sequence
  Description of Artificial Sequence: Synthetic oligonucleotide
gucauucgugcucggucag

SEQ ID NO: 134365 - RNA, 19 nt, Artificial Sequence
  Description of Artificial Sequence: Synthetic oligonucleotide
ggaacgcgaggucuugcgg

SEQ ID NO: 134366 - RNA, 19 nt, Artificial Sequence
  Description of Artificial Sequence: Synthetic oligonucleotide
caggacacgcaguguguag

SEQ ID NO: 134367 - RNA, 19 nt, Artificial Sequence
  Description of Artificial Sequence: Synthetic oligonucleotide
cugcgcaugacauacgggu

SEQ ID NO: 134368 - RNA, 19 nt, Artificial Sequence
  Description of Artificial Sequence: Synthetic oligonucleotide
caucucgcggacugcgcgc

SEQ ID NO: 134369 - RNA, 19 nt, Artificial Sequence
  Description of Artificial Sequence: Synthetic oligonucleotide
guaguggcguucauggcca

SEQ ID NO: 134370 - RNA, 19 nt, Artificial Sequence
  Description of Artificial Sequence: Synthetic oligonucleotide
gggaacgcgaggucuugcg

SEQ ID NO: 134371 - RNA, 19 nt, Artificial Sequence
  Description of Artificial Sequence: Synthetic oligonucleotide
aagcccucgaagcguucgu

SEQ ID NO: 134372 - RNA, 19 nt, Artificial Sequence
  Description of Artificial Sequence: Synthetic oligonucleotide
gguaccucgaguucuggaa

SEQ ID NO: 134373 - RNA, 19 nt, Artificial Sequence
  Description of Artificial Sequence: Synthetic oligonucleotide
ggucauucgugcucgguca

SEQ ID NO: 134374 - RNA, 19 nt, Artificial Sequence
  Description of Artificial Sequence: Synthetic oligonucleotide
caggauaugcgggcgugcc

SEQ ID NO: 134375 - RNA, 19 nt, Artificial Sequence
  Description of Artificial Sequence: Synthetic oligonucleotide
cguucguucccugacaagg

SEQ ID NO: 134376 - RNA, 19 nt, Artificial Sequence
  Description of Artificial Sequence: Synthetic oligonucleotide
caucccggaacggggagcc

SEQ ID NO: 134377 - RNA, 19 nt, Artificial Sequence
  Description of Artificial Sequence: Synthetic oligonucleotide
gccugcgcaugacauacgg

SEQ ID NO: 134378 - RNA, 19 nt, Artificial Sequence
  Description of Artificial Sequence: Synthetic oligonucleotide
gaggcacgggugcggauug

SEQ ID NO: 134379 - RNA, 19 nt, Artificial Sequence
  Description of Artificial Sequence: Synthetic oligonucleotide
guacgucugguaccucgag

SEQ ID NO: 134380 - RNA, 19 nt, Artificial Sequence
  Description of Artificial Sequence: Synthetic oligonucleotide
uugucgucucggaucuccu

SEQ ID NO: 134381 - RNA, 19 nt, Artificial Sequence
  Description of Artificial Sequence: Synthetic oligonucleotide
gcaucucgcggacugcgcg

SEQ ID NO: 134382 - RNA, 19 nt, Artificial Sequence
  Description of Artificial Sequence: Synthetic oligonucleotide
agcucgcgcgguccggugg

SEQ ID NO: 134383 - RNA, 19 nt, Artificial Sequence
  Description of Artificial Sequence: Synthetic oligonucleotide
aggacacgcaguguguagu

SEQ ID NO: 134384 - RNA, 19 nt, Artificial Sequence
  Description of Artificial Sequence: Synthetic oligonucleotide
gguuaaugagcucgccgac

SEQ ID NO: 134385 - RNA, 19 nt, Artificial Sequence
  Description of Artificial Sequence: Synthetic oligonucleotide
gaaggcguagcgggaguug

SEQ ID NO: 134386 - RNA, 19 nt, Artificial Sequence
  Description of Artificial Sequence: Synthetic oligonucleotide
caccacuugcgcuucagaa

SEQ ID NO: 134387 - RNA, 19 nt, Artificial Sequence
  Description of Artificial Sequence: Synthetic oligonucleotide
ccgguuaaugagcucgccg

SEQ ID NO: 134388 - RNA, 19 nt, Artificial Sequence
  Description of Artificial Sequence: Synthetic oligonucleotide
acaguccgucuucuaccag

SEQ ID NO: 134389 - RNA, 19 nt, Artificial Sequence
  Description of Artificial Sequence: Synthetic oligonucleotide
accagccgcaggcgauacc

SEQ ID NO: 134390 - RNA, 19 nt, Artificial Sequence
  Description of Artificial Sequence: Synthetic oligonucleotide
acgcggguguccacgacac

SEQ ID NO: 134391 - RNA, 19 nt, Artificial Sequence
  Description of Artificial Sequence: Synthetic oligonucleotide
acccacggggaaccagagg

SEQ ID NO: 134392 - RNA, 19 nt, Artificial Sequence
  Description of Artificial Sequence: Synthetic oligonucleotide
cugagucgcaucucgcgga

SEQ ID NO: 134393 - RNA, 19 nt, Artificial Sequence
  Description of Artificial Sequence: Synthetic oligonucleotide
uacucgauguuggucugau

SEQ ID NO: 134394 - RNA, 19 nt, Artificial Sequence
  Description of Artificial Sequence: Synthetic oligonucleotide
gcucuugacgaacacacua

SEQ ID NO: 134395 - RNA, 19 nt, Artificial Sequence
  Description of Artificial Sequence: Synthetic oligonucleotide
acagcgcuaaccaccacau

SEQ ID NO: 134396 - RNA, 19 nt, Artificial Sequence
  Description of Artificial Sequence: Synthetic oligonucleotide
ucacggauagugucuccuu

SEQ ID NO: 134397 - RNA, 19 nt, Artificial Sequence
  Description of Artificial Sequence: Synthetic oligonucleotide
caaaaucgcggcuuccugu

SEQ ID NO: 134398 - RNA, 19 nt, Artificial Sequence
  Description of Artificial Sequence: Synthetic oligonucleotide
agacugcgcacaaacucug

SEQ ID NO: 134399 - RNA, 19 nt, Artificial Sequence
  Description of Artificial Sequence: Synthetic oligonucleotide
ggcgauaccgaaagcgcag

SEQ ID NO: 134400 - RNA, 19 nt, Artificial Sequence
  Description of Artificial Sequence: Synthetic oligonucleotide
ccgaaguacaggccagugg

SEQ ID NO: 134401 - RNA, 19 nt, Artificial Sequence
  Description of Artificial Sequence: Synthetic oligonucleotide
uccucacggauagugucuc

SEQ ID NO: 134402 - RNA, 19 nt, Artificial Sequence
  Description of Artificial Sequence: Synthetic oligonucleotide
cuuuccgguuaaugagcuc

SEQ ID NO: 134403 - RNA, 19 nt, Artificial Sequence
  Description of Artificial Sequence: Synthetic oligonucleotide
uaccaugcguagguaguuc

SEQ ID NO: 134404 - RNA, 19 nt, Artificial Sequence
  Description of Artificial Sequence: Synthetic oligonucleotide
aucucacgguggcccuggc

SEQ ID NO: 134405 - RNA, 19 nt, Artificial Sequence
  Description of Artificial Sequence: Synthetic oligonucleotide
uccuggcagacgcgcacgu

SEQ ID NO: 134406 - RNA, 19 nt, Artificial Sequence
  Description of Artificial Sequence: Synthetic oligonucleotide
gggugccccguacaguccg

SEQ ID NO: 134407 - RNA, 19 nt, Artificial Sequence
  Description of Artificial Sequence: Synthetic oligonucleotide
aggcgauaccgaaagcgca

SEQ ID NO: 134408 - RNA, 19 nt, Artificial Sequence
  Description of Artificial Sequence: Synthetic oligonucleotide
ggucuugcggcaagacacg

SEQ ID NO: 134409 - RNA, 19 nt, Artificial Sequence
  Description of Artificial Sequence: Synthetic oligonucleotide
caauaccguccagaugcag

SEQ ID NO: 134410 - RNA, 19 nt, Artificial Sequence
  Description of Artificial Sequence: Synthetic oligonucleotide
gggucauucgugcucgguc

SEQ ID NO: 134411 - RNA, 19 nt, Artificial Sequence
  Description of Artificial Sequence: Synthetic oligonucleotide
gaguccucuacaauaccgu

SEQ ID NO: 134412 - RNA, 19 nt, Artificial Sequence
  Description of Artificial Sequence: Synthetic oligonucleotide
ggaauucaccggcaacuga

SEQ ID NO: 134413 - RNA, 19 nt, Artificial Sequence
  Description of Artificial Sequence: Synthetic oligonucleotide
ggcguagcgggaguugagg

SEQ ID NO: 134414 - RNA, 19 nt, Artificial Sequence
  Description of Artificial Sequence: Synthetic oligonucleotide
ggacugagauguggcaggg

SEQ ID NO: 134415 - RNA, 19 nt, Artificial Sequence
  Description of Artificial Sequence: Synthetic oligonucleotide
cccuaucucacgguggccc

SEQ ID NO: 134416 - RNA, 19 nt, Artificial Sequence
  Description of Artificial Sequence: Synthetic oligonucleotide
cacccacggggaaccagag

SEQ ID NO: 134417 - RNA, 19 nt, Artificial Sequence
  Description of Artificial Sequence: Synthetic oligonucleotide
gagccgugucaagucucgg

SEQ ID NO: 134418 - RNA, 19 nt, Artificial Sequence
  Description of Artificial Sequence: Synthetic oligonucleotide
gucaguuggggcgcacggc

SEQ ID NO: 134419 - RNA, 19 nt, Artificial Sequence
  Description of Artificial Sequence: Synthetic oligonucleotide
ugucgucucggaucuccuu

SEQ ID NO: 134420 - RNA, 19 nt, Artificial Sequence
  Description of Artificial Sequence: Synthetic oligonucleotide
gugugcucccgcguccccg

SEQ ID NO: 134421 - RNA, 19 nt, Artificial Sequence
  Description of Artificial Sequence: Synthetic oligonucleotide
cuccgugcucuugacgaac

SEQ ID NO: 134422 - RNA, 19 nt, Artificial Sequence
  Description of Artificial Sequence: Synthetic oligonucleotide
ccgcaggcgauaccgaaag

SEQ ID NO: 134423 - RNA, 19 nt, Artificial Sequence
  Description of Artificial Sequence: Synthetic oligonucleotide
gagccggcguggauagugc

SEQ ID NO: 134424 - RNA, 19 nt, Artificial Sequence
  Description of Artificial Sequence: Synthetic oligonucleotide
ccgaccaugccuguccagg

SEQ ID NO: 134425 - RNA, 19 nt, Artificial Sequence
  Description of Artificial Sequence: Synthetic oligonucleotide
cacgacacccuggcuuggg

SEQ ID NO: 134426 - RNA, 19 nt, Artificial Sequence
  Description of Artificial Sequence: Synthetic oligonucleotide
cggggcaugaucuccgagc

SEQ ID NO: 134427 - RNA, 19 nt, Artificial Sequence
  Description of Artificial Sequence: Synthetic oligonucleotide
cgcacgugcgugcagggcg

SEQ ID NO: 134428 - RNA, 19 nt, Artificial Sequence
  Description of Artificial Sequence: Synthetic oligonucleotide
accgccacgaagacggcaa

SEQ ID NO: 134429 - RNA, 19 nt, Artificial Sequence
  Description of Artificial Sequence: Synthetic oligonucleotide
cccgaucugggugagguug

SEQ ID NO: 134430 - RNA, 19 nt, Artificial Sequence
  Description of Artificial Sequence: Synthetic oligonucleotide
acgcgggcgauuccuuccu

SEQ ID NO: 134431 - RNA, 19 nt, Artificial Sequence
  Description of Artificial Sequence: Synthetic oligonucleotide
ggucagcucgcgcgguccg

SEQ ID NO: 134432 - RNA, 19 nt, Artificial Sequence
  Description of Artificial Sequence: Synthetic oligonucleotide
gaacgcggguguccacgac

SEQ ID NO: 134433 - RNA, 19 nt, Artificial Sequence
  Description of Artificial Sequence: Synthetic oligonucleotide
ucggucagcucgcgcgguc

SEQ ID NO: 134434 - RNA, 19 nt, Artificial Sequence
  Description of Artificial Sequence: Synthetic oligonucleotide
cguccccgcagucaguugg

SEQ ID NO: 134435 - RNA, 19 nt, Artificial Sequence
  Description of Artificial Sequence: Synthetic oligonucleotide
ugggccugcgcaugacaua

SEQ ID NO: 134436 - RNA, 19 nt, Artificial Sequence
  Description of Artificial Sequence: Synthetic oligonucleotide
guccacgacacccuggcuu

SEQ ID NO: 134437 - RNA, 19 nt, Artificial Sequence
  Description of Artificial Sequence: Synthetic oligonucleotide
uaccacucguaggggcuca

SEQ ID NO: 134438 - RNA, 19 nt, Artificial Sequence
  Description of Artificial Sequence: Synthetic oligonucleotide
gaacagcgcuaaccaccac

SEQ ID NO: 134439 - RNA, 19 nt, Artificial Sequence
  Description of Artificial Sequence: Synthetic oligonucleotide
ugaccgccacgaagacggc

SEQ ID NO: 134440 - RNA, 19 nt, Artificial Sequence
  Description of Artificial Sequence: Synthetic oligonucleotide
gccgaguagagcuugccgu

SEQ ID NO: 134441 - RNA, 19 nt, Artificial Sequence
  Description of Artificial Sequence: Synthetic oligonucleotide
cgguuaaugagcucgccga

SEQ ID NO: 134442 - RNA, 19 nt, Artificial Sequence
  Description of Artificial Sequence: Synthetic oligonucleotide
ccagcuccgaagccuuacg

SEQ ID NO: 134443 - RNA, 19 nt, Artificial Sequence
  Description of Artificial Sequence: Synthetic oligonucleotide
caugcguagguaguucaua

SEQ ID NO: 134444 - RNA, 19 nt, Artificial Sequence
  Description of Artificial Sequence: Synthetic oligonucleotide
gcuaaccaccacaugcaca

SEQ ID NO: 134445 - RNA, 19 nt, Artificial Sequence
  Description of Artificial Sequence: Synthetic oligonucleotide
gucagcccaucauacucua

SEQ ID NO: 134446 - RNA, 19 nt, Artificial Sequence
  Description of Artificial Sequence: Synthetic oligonucleotide
ccucgaagcguucguuccc

SEQ ID NO: 134447 - RNA, 19 nt, Artificial Sequence
  Description of Artificial Sequence: Synthetic oligonucleotide
cucggucucugcgcgcccc

SEQ ID NO: 134448 - RNA, 19 nt, Artificial Sequence
  Description of Artificial Sequence: Synthetic oligonucleotide
ggagauggacgcguuggca

SEQ ID NO: 134449 - RNA, 19 nt, Artificial Sequence
  Description of Artificial Sequence: Synthetic oligonucleotide
gcgggcgauuccuuccucc

SEQ ID NO: 134450 - RNA, 19 nt, Artificial Sequence
  Description of Artificial Sequence: Synthetic oligonucleotide
gcggacugcgcgcagcgac

SEQ ID NO: 134451 - RNA, 19 nt, Artificial Sequence
  Description of Artificial Sequence: Synthetic oligonucleotide
aucucgcggacugcgcgca

SEQ ID NO: 134452 - RNA, 19 nt, Artificial Sequence
  Description of Artificial Sequence: Synthetic oligonucleotide
uggcucgggugccccguac

SEQ ID NO: 134453 - RNA, 19 nt, Artificial Sequence
  Description of Artificial Sequence: Synthetic oligonucleotide
uguccggccggggcgcagc

SEQ ID NO: 134454 - RNA, 19 nt, Artificial Sequence
  Description of Artificial Sequence: Synthetic oligonucleotide
ucugauccgccaggucguc

SEQ ID NO: 134455 - RNA, 19 nt, Artificial Sequence
  Description of Artificial Sequence: Synthetic oligonucleotide
ggccaaauguuggccgaag

SEQ ID NO: 134456 - RNA, 19 nt, Artificial Sequence
  Description of Artificial Sequence: Synthetic oligonucleotide
uagugccguacucgauguu

SEQ ID NO: 134457 - RNA, 19 nt, Artificial Sequence
  Description of Artificial Sequence: Synthetic oligonucleotide
ggggccaaauguuggccga

SEQ ID NO: 134458 - RNA, 19 nt, Artificial Sequence
  Description of Artificial Sequence: Synthetic oligonucleotide
uggacgcguuggcaucgau

SEQ ID NO: 134459 - RNA, 19 nt, Artificial Sequence
  Description of Artificial Sequence: Synthetic oligonucleotide
gcucgcgcgguccgguggg

SEQ ID NO: 134460 - RNA, 19 nt, Artificial Sequence
  Description of Artificial Sequence: Synthetic oligonucleotide
uugaggcgccggugguacu

SEQ ID NO: 134461 - RNA, 19 nt, Artificial Sequence
  Description of Artificial Sequence: Synthetic oligonucleotide
cagugucaugaagggcuug

SEQ ID NO: 134462 - RNA, 19 nt, Artificial Sequence
  Description of Artificial Sequence: Synthetic oligonucleotide
ggcaugccgaugccauagc

SEQ ID NO: 134463 - RNA, 19 nt, Artificial Sequence
  Description of Artificial Sequence: Synthetic oligonucleotide
gcguagcgggaguugagga

SEQ ID NO: 134464 - RNA, 19 nt, Artificial Sequence
  Description of Artificial Sequence: Synthetic oligonucleotide
ccgcugguacgucugguac

SEQ ID NO: 134465 - RNA, 19 nt, Artificial Sequence
  Description of Artificial Sequence: Synthetic oligonucleotide
gguacgucugguaccucga

SEQ ID NO: 134466 - RNA, 19 nt, Artificial Sequence
  Description of Artificial Sequence: Synthetic oligonucleotide
gcagacgcgcacgugcgug

SEQ ID NO: 134467 - RNA, 19 nt, Artificial Sequence
  Description of Artificial Sequence: Synthetic oligonucleotide
gaccgccacgaagacggca

SEQ ID NO: 134468 - RNA, 19 nt, Artificial Sequence
  Description of Artificial Sequence: Synthetic oligonucleotide
ccgcggaccgcuuuccaac

SEQ ID NO: 134469 - RNA, 19 nt, Artificial Sequence
  Description of Artificial Sequence: Synthetic oligonucleotide
gucgcaucucgcggacugc

SEQ ID NO: 134470 - RNA, 19 nt, Artificial Sequence
  Description of Artificial Sequence: Synthetic oligonucleotide
gcgauaccgaaagcgcagc

SEQ ID NO: 134471 - RNA, 19 nt, Artificial Sequence
  Description of Artificial Sequence: Synthetic oligonucleotide
gccggcguggauagugccg

SEQ ID NO: 134472 - RNA, 19 nt, Artificial Sequence
  Description of Artificial Sequence: Synthetic oligonucleotide
gcguucguucccugacaag

SEQ ID NO: 134473 - RNA, 19 nt, Artificial Sequence
  Description of Artificial Sequence: Synthetic oligonucleotide
gcuugccguugcugagucg

SEQ ID NO: 134474 - RNA, 19 nt, Artificial Sequence
  Description of Artificial Sequence: Synthetic oligonucleotide
ggauacugauccccagugu

SEQ ID NO: 134475 - RNA, 19 nt, Artificial Sequence
  Description of Artificial Sequence: Synthetic oligonucleotide
ggaacgcggguguccacga

SEQ ID NO: 134476 - RNA, 19 nt, Artificial Sequence
  Description of Artificial Sequence: Synthetic oligonucleotide
cacgguccccggcccuugg

SEQ ID NO: 134477 - RNA, 19 nt, Artificial Sequence
  Description of Artificial Sequence: Synthetic oligonucleotide
cguucccugacaaggccug

SEQ ID NO: 134478 - RNA, 19 nt, Artificial Sequence
  Description of Artificial Sequence: Synthetic oligonucleotide
uccccgcggaccgcuuucc

SEQ ID NO: 134479 - RNA, 19 nt, Artificial Sequence
  Description of Artificial Sequence: Synthetic oligonucleotide
cgcugguacgucugguacc

SEQ ID NO: 134480 - RNA, 19 nt, Artificial Sequence
  Description of Artificial Sequence: Synthetic oligonucleotide
gaagcccgcagcgccugga

SEQ ID NO: 134481 - RNA, 19 nt, Artificial Sequence
  Description of Artificial Sequence: Synthetic oligonucleotide
gcgggacuucuccaggaca

SEQ ID NO: 134482 - RNA, 19 nt, Artificial Sequence
  Description of Artificial Sequence: Synthetic oligonucleotide
cagcucucgaacagcgcua

SEQ ID NO: 134483 - RNA, 19 nt, Artificial Sequence
  Description of Artificial Sequence: Synthetic oligonucleotide
caguggcuugacgccaauc

SEQ ID NO: 134484 - RNA, 19 nt, Artificial Sequence
  Description of Artificial Sequence: Synthetic oligonucleotide
acggggaaccagaggcugu

SEQ ID NO: 134485 - RNA, 19 nt, Artificial Sequence
  Description of Artificial Sequence: Synthetic oligonucleotide
acgaacacacuaggcuguu

SEQ ID NO: 134486 - RNA, 19 nt, Artificial Sequence
  Description of Artificial Sequence: Synthetic oligonucleotide
ggacugcgcgcagcgacag

SEQ ID NO: 134487 - RNA, 19 nt, Artificial Sequence
  Description of Artificial Sequence: Synthetic oligonucleotide
acgcguuggcaucgaugau

SEQ ID NO: 134488 - RNA, 19 nt, Artificial Sequence
  Description of Artificial Sequence: Synthetic oligonucleotide
ggcguggauagugccguac

SEQ ID NO: 134489 - RNA, 19 nt, Artificial Sequence
  Description of Artificial Sequence: Synthetic oligonucleotide
accggcaacugaaggcaaa

SEQ ID NO: 134490 - RNA, 19 nt, Artificial Sequence
  Description of Artificial Sequence: Synthetic oligonucleotide
cuccccgcggaccgcuuuc

SEQ ID NO: 134491 - RNA, 19 nt, Artificial Sequence
  Description of Artificial Sequence: Synthetic oligonucleotide
auaugcgggcgugcccgga

SEQ ID NO: 134492 - RNA, 19 nt, Artificial Sequence
  Description of Artificial Sequence: Synthetic oligonucleotide
ccucacggauagugucucc

SEQ ID NO: 134493 - RNA, 19 nt, Artificial Sequence
  Description of Artificial Sequence: Synthetic oligonucleotide
gccguacucgauguugguc

SEQ ID NO: 134494 - RNA, 19 nt, Artificial Sequence
  Description of Artificial Sequence: Synthetic oligonucleotide
ggaguaccacaccccuauc

SEQ ID NO: 134495 - RNA, 19 nt, Artificial Sequence
  Description of Artificial Sequence: Synthetic oligonucleotide
caguguguacuggguucuc

SEQ ID NO: 134496 - RNA, 19 nt, Artificial Sequence
  Description of Artificial Sequence: Synthetic oligonucleotide
gccaaauguuggccgaagu

SEQ ID NO: 134497 - RNA, 19 nt, Artificial Sequence
  Description of Artificial Sequence: Synthetic oligonucleotide
ggacgcgggcgauuccuuc

SEQ ID NO: 134498 - RNA, 19 nt, Artificial Sequence
  Description of Artificial Sequence: Synthetic oligonucleotide
gcuuuccgguuaaugagcu

SEQ ID NO: 134499 - RNA, 19 nt, Artificial Sequence
  Description of Artificial Sequence: Synthetic oligonucleotide
gcgccggccgaguagagcu

SEQ ID NO: 134500 - RNA, 19 nt, Artificial Sequence
  Description of Artificial Sequence: Synthetic oligonucleotide
cauacggguucuccaggau

SEQ ID NO: 134501 - RNA, 19 nt, Artificial Sequence
  Description of Artificial Sequence: Synthetic oligonucleotide
cagcucgcgcgguccggug

SEQ ID NO: 134502 - RNA, 19 nt, Artificial Sequence
  Description of Artificial Sequence: Synthetic oligonucleotide
cucgaagcguucguucccu

SEQ ID NO: 134503 - RNA, 19 nt, Artificial Sequence
  Description of Artificial Sequence: Synthetic oligonucleotide
caccggcaacugaaggcaa

SEQ ID NO: 134504 - RNA, 19 nt, Artificial Sequence
  Description of Artificial Sequence: Synthetic oligonucleotide
cggcaugccgaugccauag

SEQ ID NO: 134505 - RNA, 19 nt, Artificial Sequence
  Description of Artificial Sequence: Synthetic oligonucleotide
gguaguucauaaggcuggu

SEQ ID NO: 134506 - RNA, 19 nt, Artificial Sequence
  Description of Artificial Sequence: Synthetic oligonucleotide
cccgugugcucccgcgucc

SEQ ID NO: 134507 - RNA, 19 nt, Artificial Sequence
  Description of Artificial Sequence: Synthetic oligonucleotide
gccgggcucggaauucacc

SEQ ID NO: 134508 - RNA, 19 nt, Artificial Sequence
  Description of Artificial Sequence: Synthetic oligonucleotide
gcacgggugcggauuguac

SEQ ID NO: 134509 - RNA, 19 nt, Artificial Sequence
  Description of Artificial Sequence: Synthetic oligonucleotide
cagaagcccucgaagcguu

SEQ ID NO: 134510 - RNA, 19 nt, Artificial Sequence
  Description of Artificial Sequence: Synthetic oligonucleotide
caccaggggacacccacau

SEQ ID NO: 134511 - RNA, 19 nt, Artificial Sequence
  Description of Artificial Sequence: Synthetic oligonucleotide
cccggaacggggagcccag

SEQ ID NO: 134512 - RNA, 19 nt, Artificial Sequence
  Description of Artificial Sequence: Synthetic oligonucleotide
gcguggauagugccguacu

SEQ ID NO: 134513 - RNA, 19 nt, Artificial Sequence
  Description of Artificial Sequence: Synthetic oligonucleotide
cucgcgcgguccggugggg

SEQ ID NO: 134514 - RNA, 19 nt, Artificial Sequence
  Description of Artificial Sequence: Synthetic oligonucleotide
ggccugcgcaugacauacg

SEQ ID NO: 134515 - RNA, 19 nt, Artificial Sequence
  Description of Artificial Sequence: Synthetic oligonucleotide
gcuucggccggggugccca

SEQ ID NO: 134516 - RNA, 19 nt, Artificial Sequence
  Description of Artificial Sequence: Synthetic oligonucleotide
ccgugcucuugacgaacac

SEQ ID NO: 134517 - RNA, 19 nt, Artificial Sequence
  Description of Artificial Sequence: Synthetic oligonucleotide
caguugaggcgccgguggu

SEQ ID NO: 134518 - RNA, 19 nt, Artificial Sequence
  Description of Artificial Sequence: Synthetic oligonucleotide
gcucucgaacagcgcuaac

SEQ ID NO: 134519 - RNA, 19 nt, Artificial Sequence
  Description of Artificial Sequence: Synthetic oligonucleotide
ggacacgcaguguguaguu

SEQ ID NO: 134520 - RNA, 19 nt, Artificial Sequence
  Description of Artificial Sequence: Synthetic oligonucleotide
cacgugcgugcagggcgug

SEQ ID NO: 134521 - RNA, 19 nt, Artificial Sequence
  Description of Artificial Sequence: Synthetic oligonucleotide
cgugcucuugacgaacaca

SEQ ID NO: 134522 - RNA, 19 nt, Artificial Sequence
  Description of Artificial Sequence: Synthetic oligonucleotide
gcggaccgcuuuccaacuc

SEQ ID NO: 134523 - RNA, 19 nt, Artificial Sequence
  Description of Artificial Sequence: Synthetic oligonucleotide
gcgggaacgcgaggucuug

SEQ ID NO: 134524 - RNA, 19 nt, Artificial Sequence
  Description of Artificial Sequence: Synthetic oligonucleotide
acgcgaggucuugcggcaa

SEQ ID NO: 134525 - RNA, 19 nt, Artificial Sequence
  Description of Artificial Sequence: Synthetic oligonucleotide
ggcagccaaguuggccgug

SEQ ID NO: 134526 - RNA, 19 nt, Artificial Sequence
  Description of Artificial Sequence: Synthetic oligonucleotide
cgaggucuugcggcaagac

SEQ ID NO: 134527 - RNA, 19 nt, Artificial Sequence
  Description of Artificial Sequence: Synthetic oligonucleotide
acggcguggcgcagcuccu

SEQ ID NO: 134528 - RNA, 19 nt, Artificial Sequence
  Description of Artificial Sequence: Synthetic oligonucleotide
cgauaccgaaagcgcagca

SEQ ID NO: 134529 - RNA, 19 nt, Artificial Sequence
  Description of Artificial Sequence: Synthetic oligonucleotide
gagucgcaucucgcggacu

SEQ ID NO: 134530 - RNA, 19 nt, Artificial Sequence
  Description of Artificial Sequence: Synthetic oligonucleotide
ccgugugcucccgcguccc

SEQ ID NO: 134531 - RNA, 19 nt, Artificial Sequence
  Description of Artificial Sequence: Synthetic oligonucleotide
ccccgugugcucccgcguc

SEQ ID NO: 134532 - RNA, 19 nt, Artificial Sequence
  Description of Artificial Sequence: Synthetic oligonucleotide
ccguccagucagcccauca

SEQ ID NO: 134533 - RNA, 19 nt, Artificial Sequence
  Description of Artificial Sequence: Synthetic oligonucleotide
ccacgcagaagcccucgaa

SEQ ID NO: 134534 - RNA, 19 nt, Artificial Sequence
  Description of Artificial Sequence: Synthetic oligonucleotide
cgcaggcgauaccgaaagc

SEQ ID NO: 134535 - RNA, 19 nt, Artificial Sequence
  Description of Artificial Sequence: Synthetic oligonucleotide
ccuaucucacgguggcccu

SEQ ID NO: 134536 - RNA, 19 nt, Artificial Sequence
  Description of Artificial Sequence: Synthetic oligonucleotide
gggcgauuccuuccuccgu

SEQ ID NO: 134537 - RNA, 19 nt, Artificial Sequence
  Description of Artificial Sequence: Synthetic oligonucleotide
gccgcaggcgauaccgaaa

SEQ ID NO: 134538 - RNA, 19 nt, Artificial Sequence
  Description of Artificial Sequence: Synthetic oligonucleotide
ccccuaucucacgguggcc

SEQ ID NO: 134539 - RNA, 19 nt, Artificial Sequence
  Description of Artificial Sequence: Synthetic oligonucleotide
ccggcaacugaaggcaaaa

SEQ ID NO: 134540 - RNA, 19 nt, Artificial Sequence
  Description of Artificial Sequence: Synthetic oligonucleotide
cucgggugccccguacagu

SEQ ID NO: 134541 - RNA, 19 nt, Artificial Sequence
  Description of Artificial Sequence: Synthetic oligonucleotide
ggcacgggugcggauugua

SEQ ID NO: 134542 - RNA, 19 nt, Artificial Sequence
  Description of Artificial Sequence: Synthetic oligonucleotide
ggauagugccguacucgau

SEQ ID NO: 134543 - RNA, 19 nt, Artificial Sequence
  Description of Artificial Sequence: Synthetic oligonucleotide
cgugcucggucagcucgcg

SEQ ID NO: 134544 - RNA, 19 nt, Artificial Sequence
  Description of Artificial Sequence: Synthetic oligonucleotide
cuccgcugacacagcgcgu

SEQ ID NO: 134545 - RNA, 19 nt, Artificial Sequence
  Description of Artificial Sequence: Synthetic oligonucleotide
cggucagcucgcgcggucc

SEQ ID NO: 134546 - RNA, 19 nt, Artificial Sequence
  Description of Artificial Sequence: Synthetic oligonucleotide
acccguccagucagcccau

SEQ ID NO: 134547 - RNA, 19 nt, Artificial Sequence
  Description of Artificial Sequence: Synthetic oligonucleotide
guaaaacgcugaggucauu

SEQ ID NO: 134548 - RNA, 19 nt, Artificial Sequence
  Description of Artificial Sequence: Synthetic oligonucleotide
ccuccgugcucuugacgaa

SEQ ID NO: 134549 - RNA, 19 nt, Artificial Sequence
  Description of Artificial Sequence: Synthetic oligonucleotide
ccgugucaagucucggggu

SEQ ID NO: 134550 - RNA, 19 nt, Artificial Sequence
  Description of Artificial Sequence: Synthetic oligonucleotide
ccgaguagagcuugccguu

SEQ ID NO: 134551 - RNA, 19 nt, Artificial Sequence
  Description of Artificial Sequence: Synthetic oligonucleotide
cgggaacgcgaggucuugc

SEQ ID NO: 134552 - RNA, 19 nt, Artificial Sequence
  Description of Artificial Sequence: Synthetic oligonucleotide
ccaugcguagguaguucau

SEQ ID NO: 134553 - RNA, 19 nt, Artificial Sequence
  Description of Artificial Sequence: Synthetic oligonucleotide
cggacugcgcgcagcgaca

SEQ ID NO: 134554 - RNA, 19 nt, Artificial Sequence
  Description of Artificial Sequence: Synthetic oligonucleotide
ggggucauucgugcucggu

SEQ ID NO: 134555 - RNA, 19 nt, Artificial Sequence
  Description of Artificial Sequence: Synthetic oligonucleotide
cgggugcggauuguaccac

SEQ ID NO: 134556 - RNA, 19 nt, Artificial Sequence
  Description of Artificial Sequence: Synthetic oligonucleotide
cgcgccggccgaguagagc

SEQ ID NO: 134557 - RNA, 19 nt, Artificial Sequence
  Description of Artificial Sequence: Synthetic oligonucleotide
gcacgugcgugcagggcgu

SEQ ID NO: 134558 - RNA, 19 nt, Artificial Sequence
  Description of Artificial Sequence: Synthetic oligonucleotide
cccgcgccggccgaguaga

SEQ ID NO: 134559 - RNA, 19 nt, Artificial Sequence
  Description of Artificial Sequence: Synthetic oligonucleotide
ccggaacggggagcccagc

SEQ ID NO: 134560 - RNA, 19 nt, Artificial Sequence
  Description of Artificial Sequence: Synthetic oligonucleotide
gccacacggcaggggagaa

SEQ ID NO: 134561 - RNA, 19 nt, Artificial Sequence
  Description of Artificial Sequence: Synthetic oligonucleotide
gcgugcccggaggcacggg

SEQ ID NO: 134562 - RNA, 19 nt, Artificial Sequence
  Description of Artificial Sequence: Synthetic oligonucleotide
ggcgggaacgcgaggucuu

SEQ ID NO: 134563 - RNA, 19 nt, Artificial Sequence
  Description of Artificial Sequence: Synthetic oligonucleotide
ccggcccuugggaguccuc

SEQ ID NO: 134564 - RNA, 19 nt, Artificial Sequence
  Description of Artificial Sequence: Synthetic oligonucleotide
ggugccccguacaguccgu

SEQ ID NO: 134565 - RNA, 19 nt, Artificial Sequence
  Description of Artificial Sequence: Synthetic oligonucleotide
cgccgaccaugccugucca

SEQ ID NO: 134566 - RNA, 19 nt, Artificial Sequence
  Description of Artificial Sequence: Synthetic oligonucleotide
cccguacaguccgucuucu

SEQ ID NO: 134567 - RNA, 19 nt, Artificial Sequence
  Description of Artificial Sequence: Synthetic oligonucleotide
cgcgguccgguggggcccg

SEQ ID NO: 134568 - RNA, 19 nt, Artificial Sequence
  Description of Artificial Sequence: Synthetic oligonucleotide
gcccagcggcaugccgaug

SEQ ID NO: 134569 - RNA, 19 nt, Artificial Sequence
  Description of Artificial Sequence: Synthetic oligonucleotide
cgcgggcgauuccuuccuc

SEQ ID NO: 134570 - RNA, 19 nt, Artificial Sequence
  Description of Artificial Sequence: Synthetic oligonucleotide
cgcggaccgcuuuccaacu

SEQ ID NO: 134571 - RNA, 19 nt, Artificial Sequence
  Description of Artificial Sequence: Synthetic oligonucleotide
ccccgcggaccgcuuucca

SEQ ID NO: 134572 - RNA, 19 nt, Artificial Sequence
  Description of Artificial Sequence: Synthetic oligonucleotide
gccaggucgucagccgauu

SEQ ID NO: 134573 - RNA, 19 nt, Artificial Sequence
  Description of Artificial Sequence: Synthetic oligonucleotide
gcgguccgguggggcccgg

SEQ ID NO: 134574 - RNA, 19 nt, Artificial Sequence
  Description of Artificial Sequence: Synthetic oligonucleotide
ccccggcccuugggagucc

SEQ ID NO: 134575 - RNA, 19 nt, Artificial Sequence
  Description of Artificial Sequence: Synthetic oligonucleotide
cgccaggucgucagccgau

SEQ ID NO: 134576 - RNA, 19 nt, Artificial Sequence
  Description of Artificial Sequence: Synthetic oligonucleotide
cccaaaccuuuggcccugu

SEQ ID NO: 134577 - RNA, 19 nt, Artificial Sequence
  Description of Artificial Sequence: Synthetic oligonucleotide
cgcguccccgcagucaguu

SEQ ID NO: 134578 - RNA, 19 nt, Artificial Sequence
  Description of Artificial Sequence: Synthetic oligonucleotide
cgccggccgaguagagcuu

SEQ ID NO: 134579 - RNA, 19 nt, Artificial Sequence
  Description of Artificial Sequence: Synthetic oligonucleotide
aacaguaagauacccuacc

SEQ ID NO: 134580 - RNA, 19 nt, Artificial Sequence
  Description of Artificial Sequence: Synthetic oligonucleotide
uuauuuagcugucagaacu

SEQ ID NO: 134581 - RNA, 19 nt, Artificial Sequence
  Description of Artificial Sequence: Synthetic oligonucleotide
cauauauguaacaaugggg

SEQ ID NO: 134582 - RNA, 19 nt, Artificial Sequence
  Description of Artificial Sequence: Synthetic oligonucleotide
uuacaauugauuuccauac

SEQ ID NO: 134583 - RNA, 19 nt, Artificial Sequence
  Description of Artificial Sequence: Synthetic oligonucleotide
uacuaauuuaugaacuucc

SEQ ID NO: 134584 - RNA, 19 nt, Artificial Sequence
  Description of Artificial Sequence: Synthetic oligonucleotide
cacacuaggacuuuggagc

SEQ ID NO: 134585 - RNA, 19 nt, Artificial Sequence
  Description of Artificial Sequence: Synthetic oligonucleotide
ugaauguugaaggaaagcc

SEQ ID NO: 134586 - RNA, 19 nt, Artificial Sequence
  Description of Artificial Sequence: Synthetic oligonucleotide
cuggauauugcucuaauag

SEQ ID NO: 134587 - RNA, 19 nt, Artificial Sequence
  Description of Artificial Sequence: Synthetic oligonucleotide
ugacauauucuaaccaccg

SEQ ID NO: 134588 - RNA, 19 nt, Artificial Sequence
  Description of Artificial Sequence: Synthetic oligonucleotide
ucaucaguuguauuuaggc

SEQ ID NO: 134589 - RNA, 19 nt, Artificial Sequence
  Description of Artificial Sequence: Synthetic oligonucleotide
uaauuuaugaacuucccua

SEQ ID NO: 134590 - RNA, 19 nt, Artificial Sequence
  Description of Artificial Sequence: Synthetic oligonucleotide
acauauucuaaccaccgag

SEQ ID NO: 134591 - RNA, 19 nt, Artificial Sequence
  Description of Artificial Sequence: Synthetic oligonucleotide
gauaaccuuuaacagguag

SEQ ID NO: 134592 - RNA, 19 nt, Artificial Sequence
  Description of Artificial Sequence: Synthetic oligonucleotide
aauuuaugaacuucccuau

SEQ ID NO: 134593 - RNA, 19 nt, Artificial Sequence
  Description of Artificial Sequence: Synthetic oligonucleotide
uaggguuagcacuagaaug

SEQ ID NO: 134594 - RNA, 19 nt, Artificial Sequence
  Description of Artificial Sequence: Synthetic oligonucleotide
agauacccuaccuuuaggg

SEQ ID NO: 134595 - RNA, 19 nt, Artificial Sequence
  Description of Artificial Sequence: Synthetic oligonucleotide
uuagcaaugagcucugaac

SEQ ID NO: 134596 - RNA, 19 nt, Artificial Sequence
  Description of Artificial Sequence: Synthetic oligonucleotide
ugagguuacugcuacagca

SEQ ID NO: 134597 - RNA, 19 nt, Artificial Sequence
  Description of Artificial Sequence: Synthetic oligonucleotide
ugaaauccgguaauugucc

SEQ ID NO: 134598 - RNA, 19 nt, Artificial Sequence
  Description of Artificial Sequence: Synthetic oligonucleotide
aaaugggaaaugaagagga

SEQ ID NO: 134599 - RNA, 19 nt, Artificial Sequence
  Description of Artificial Sequence: Synthetic oligonucleotide
aauacuaauuuaugaacuu

SEQ ID NO: 134600 - RNA, 19 nt, Artificial Sequence
  Description of Artificial Sequence: Synthetic oligonucleotide
aauaguaccugaccuuucu

SEQ ID NO: 134601 - RNA, 19 nt, Artificial Sequence
  Description of Artificial Sequence: Synthetic oligonucleotide
uuauaguaguggcacagca

SEQ ID NO: 134602 - RNA, 19 nt, Artificial Sequence
  Description of Artificial Sequence: Synthetic oligonucleotide
gaaggugccgaacagugag

SEQ ID NO: 134603 - RNA, 19 nt, Artificial Sequence
  Description of Artificial Sequence: Synthetic oligonucleotide
aaaggagacucuuucucug

SEQ ID NO: 134604 - RNA, 19 nt, Artificial Sequence
  Description of Artificial Sequence: Synthetic oligonucleotide
ugguauccuaccauaaccc

SEQ ID NO: 134605 - RNA, 19 nt, Artificial Sequence
  Description of Artificial Sequence: Synthetic oligonucleotide
agugucaucagccuaugca

SEQ ID NO: 134606 - RNA, 19 nt, Artificial Sequence
  Description of Artificial Sequence: Synthetic oligonucleotide
ugaccuuucuguaaguuaa

SEQ ID NO: 134607 - RNA, 19 nt, Artificial Sequence
  Description of Artificial Sequence: Synthetic oligonucleotide
ucuuaggaguccuuuaaga

SEQ ID NO: 134608 - RNA, 19 nt, Artificial Sequence
  Description of Artificial Sequence: Synthetic oligonucleotide
aggagagaaacucuggugu

SEQ ID NO: 134609 - RNA, 19 nt, Artificial Sequence
  Description of Artificial Sequence: Synthetic oligonucleotide
aggguagaggacaaaaccc

SEQ ID NO: 134610 - RNA, 19 nt, Artificial Sequence
  Description of Artificial Sequence: Synthetic oligonucleotide
agcacuagaauguccagug

SEQ ID NO: 134611 - RNA, 19 nt, Artificial Sequence
  Description of Artificial Sequence: Synthetic oligonucleotide
aagauacccuaccuuuagg

SEQ ID NO: 134612 - RNA, 19 nt, Artificial Sequence
  Description of Artificial Sequence: Synthetic oligonucleotide
gaaauguggauccaucauc

SEQ ID NO: 134613 - RNA, 19 nt, Artificial Sequence
  Description of Artificial Sequence: Synthetic oligonucleotide
acagguaguaggaaaauag

SEQ ID NO: 134614 - RNA, 19 nt, Artificial Sequence
  Description of Artificial Sequence: Synthetic oligonucleotide
aauguggauccaucaucac

SEQ ID NO: 134615 - RNA, 19 nt, Artificial Sequence
  Description of Artificial Sequence: Synthetic oligonucleotide
auuuauaguaguggcacag

SEQ ID NO: 134616 - RNA, 19 nt, Artificial Sequence
  Description of Artificial Sequence: Synthetic oligonucleotide
uuacuaucaggcuccagug

SEQ ID NO: 134617 - RNA, 19 nt, Artificial Sequence
  Description of Artificial Sequence: Synthetic oligonucleotide
cuucuagagggucacuucg

SEQ ID NO: 134618 - RNA, 19 nt, Artificial Sequence
  Description of Artificial Sequence: Synthetic oligonucleotide
aaguaugucucagagaauu

SEQ ID NO: 134619 - RNA, 19 nt, Artificial Sequence
  Description of Artificial Sequence: Synthetic oligonucleotide
caugcuuaccucuucugcc

SEQ ID NO: 134620 - RNA, 19 nt, Artificial Sequence
  Description of Artificial Sequence: Synthetic oligonucleotide
cuuuggagcuguuuuacac

SEQ ID NO: 134621 - RNA, 19 nt, Artificial Sequence
  Description of Artificial Sequence: Synthetic oligonucleotide
aacccagcggaaauaacac

SEQ ID NO: 134622 - RNA, 19 nt, Artificial Sequence
  Description of Artificial Sequence: Synthetic oligonucleotide
aucugacuaucagauaacc

SEQ ID NO: 134623 - RNA, 19 nt, Artificial Sequence
  Description of Artificial Sequence: Synthetic oligonucleotide
aaucugacuaucagauaac

SEQ ID NO: 134624 - RNA, 19 nt, Artificial Sequence
  Description of Artificial Sequence: Synthetic oligonucleotide
uuuaaguacuugagguuac

SEQ ID NO: 134625 - RNA, 19 nt, Artificial Sequence
  Description of Artificial Sequence: Synthetic oligonucleotide
cuagaacaauuuauaguag

SEQ ID NO: 134626 - RNA, 19 nt, Artificial Sequence
  Description of Artificial Sequence: Synthetic oligonucleotide
ucucaguagauaaccauau

SEQ ID NO: 134627 - RNA, 19 nt, Artificial Sequence
  Description of Artificial Sequence: Synthetic oligonucleotide
cuaaccaccgaguacuuuc

SEQ ID NO: 134628 - RNA, 19 nt, Artificial Sequence
  Description of Artificial Sequence: Synthetic oligonucleotide
aaauggcaauaauugggga

SEQ ID NO: 134629 - RNA, 19 nt, Artificial Sequence
  Description of Artificial Sequence: Synthetic oligonucleotide
uauugcucuaauagcugcc

SEQ ID NO: 134630 - RNA, 19 nt, Artificial Sequence
  Description of Artificial Sequence: Synthetic oligonucleotide
ugaucauauauguaacaau

SEQ ID NO: 134631 - RNA, 19 nt, Artificial Sequence
  Description of Artificial Sequence: Synthetic oligonucleotide
gugccgaacagugagaucc

SEQ ID NO: 134632 - RNA, 19 nt, Artificial Sequence
  Description of Artificial Sequence: Synthetic oligonucleotide
ucuagccuaugucagcaug

SEQ ID NO: 134633 - RNA, 19 nt, Artificial Sequence
  Description of Artificial Sequence: Synthetic oligonucleotide
uaccugaccuuucuguaag

SEQ ID NO: 134634 - RNA, 19 nt, Artificial Sequence
  Description of Artificial Sequence: Synthetic oligonucleotide
aaauccgguaauuguccug

SEQ ID NO: 134635 - RNA, 19 nt, Artificial Sequence
  Description of Artificial Sequence: Synthetic oligonucleotide
aauccgguaauuguccuga

SEQ ID NO: 134636 - RNA, 19 nt, Artificial Sequence
  Description of Artificial Sequence: Synthetic oligonucleotide
auggcaauaauuggggaag

SEQ ID NO: 134637 - RNA, 19 nt, Artificial Sequence
  Description of Artificial Sequence: Synthetic oligonucleotide
uauauguaacaauggggaa

SEQ ID NO: 134638 - RNA, 19 nt, Artificial Sequence
  Description of Artificial Sequence: Synthetic oligonucleotide
ugacuaucagauaaccuuu

SEQ ID NO: 134639 - RNA, 19 nt, Artificial Sequence
  Description of Artificial Sequence: Synthetic oligonucleotide
uugcuagagucucaguaga

SEQ ID NO: 134640 - RNA, 19 nt, Artificial Sequence
  Description of Artificial Sequence: Synthetic oligonucleotide
gcaagaauaaaggagacuc

SEQ ID NO: 134641 - RNA, 19 nt, Artificial Sequence
  Description of Artificial Sequence: Synthetic oligonucleotide
cuaccuuuaggguuagcac

SEQ ID NO: 134642 - RNA, 19 nt, Artificial Sequence
  Description of Artificial Sequence: Synthetic oligonucleotide
gguaguaggaaaauagaug

SEQ ID NO: 134643 - RNA, 19 nt, Artificial Sequence
  Description of Artificial Sequence: Synthetic oligonucleotide
aaccgaggggaauuucaag

SEQ ID NO: 134644 - RNA, 19 nt, Artificial Sequence
  Description of Artificial Sequence: Synthetic oligonucleotide
ucuauaggugacagauggc

SEQ ID NO: 134645 - RNA, 19 nt, Artificial Sequence
  Description of Artificial Sequence: Synthetic oligonucleotide
ugcuaacagagguaccaag

SEQ ID NO: 134646 - RNA, 19 nt, Artificial Sequence
  Description of Artificial Sequence: Synthetic oligonucleotide
aacaacaguaagauacccu

SEQ ID NO: 134647 - RNA, 19 nt, Artificial Sequence
  Description of Artificial Sequence: Synthetic oligonucleotide
uuaauaguaccugaccuuu

SEQ ID NO: 134648 - RNA, 19 nt, Artificial Sequence
  Description of Artificial Sequence: Synthetic oligonucleotide
ggaauuacuaucaggcucc

SEQ ID NO: 134649 - RNA, 19 nt, Artificial Sequence
  Description of Artificial Sequence: Synthetic oligonucleotide
guuccuaaaaugcuucguc

SEQ ID NO: 134650 - RNA, 19 nt, Artificial Sequence
  Description of Artificial Sequence: Synthetic oligonucleotide
uggcugucuaguauguaca

SEQ ID NO: 134651 - RNA, 19 nt, Artificial Sequence
  Description of Artificial Sequence: Synthetic oligonucleotide
uuuauaguaguggcacagc

SEQ ID NO: 134652 - RNA, 19 nt, Artificial Sequence
  Description of Artificial Sequence: Synthetic oligonucleotide
uagcaagaauaaaggagac

SEQ ID NO: 134653 - RNA, 19 nt, Artificial Sequence
  Description of Artificial Sequence: Synthetic oligonucleotide
caguauccagucaaccugc

SEQ ID NO: 134654 - RNA, 19 nt, Artificial Sequence
  Description of Artificial Sequence: Synthetic oligonucleotide
ggguaugcagcacauauac

SEQ ID NO: 134655 - RNA, 19 nt, Artificial Sequence
  Description of Artificial Sequence: Synthetic oligonucleotide
aaggaggaguucuagccua

SEQ ID NO: 134656 - RNA, 19 nt, Artificial Sequence
  Description of Artificial Sequence: Synthetic oligonucleotide
cacuagaauguccaguguc

SEQ ID NO: 134657 - RNA, 19 nt, Artificial Sequence
  Description of Artificial Sequence: Synthetic oligonucleotide
cuagagucucaguagauaa

SEQ ID NO: 134658 - RNA, 19 nt, Artificial Sequence
  Description of Artificial Sequence: Synthetic oligonucleotide
ccuuagguuagcaaugagc

SEQ ID NO: 134659 - RNA, 19 nt, Artificial Sequence
  Description of Artificial Sequence: Synthetic oligonucleotide
auaaccuuuaacagguagu

SEQ ID NO: 134660 - RNA, 19 nt, Artificial Sequence
  Description of Artificial Sequence: Synthetic oligonucleotide
aggguuagcacuagaaugu

SEQ ID NO: 134661 - RNA, 19 nt, Artificial Sequence
  Description of Artificial Sequence: Synthetic oligonucleotide
caucugaugccuagagagc

SEQ ID NO: 134662 - RNA, 19 nt, Artificial Sequence
  Description of Artificial Sequence: Synthetic oligonucleotide
agguuacugcuacagcaag

SEQ ID NO: 134663 - RNA, 19 nt, Artificial Sequence
  Description of Artificial Sequence: Synthetic oligonucleotide
gagaaaccucacuacugug

SEQ ID NO: 134664 - RNA, 19 nt, Artificial Sequence
  Description of Artificial Sequence: Synthetic oligonucleotide
aacaucuguucuguuaaau

SEQ ID NO: 134665 - RNA, 19 nt, Artificial Sequence
  Description of Artificial Sequence: Synthetic oligonucleotide
auacccuaccuuuaggguu

SEQ ID NO: 134666 - RNA, 19 nt, Artificial Sequence
  Description of Artificial Sequence: Synthetic oligonucleotide
uaaaggaguugaaguaaau

SEQ ID NO: 134667 - RNA, 19 nt, Artificial Sequence
  Description of Artificial Sequence: Synthetic oligonucleotide
cuaacagagguaccaagca

SEQ ID NO: 134668 - RNA, 19 nt, Artificial Sequence
  Description of Artificial Sequence: Synthetic oligonucleotide
uggguuguaaucugacuau

SEQ ID NO: 134669 - RNA, 19 nt, Artificial Sequence
  Description of Artificial Sequence: Synthetic oligonucleotide
gggaauuacuaucaggcuc

SEQ ID NO: 134670 - RNA, 19 nt, Artificial Sequence
  Description of Artificial Sequence: Synthetic oligonucleotide
ucuaggaacugguauccua

SEQ ID NO: 134671 - RNA, 19 nt, Artificial Sequence
  Description of Artificial Sequence: Synthetic oligonucleotide
uucuagagggucacuucga

SEQ ID NO: 134672 - RNA, 19 nt, Artificial Sequence
  Description of Artificial Sequence: Synthetic oligonucleotide
caucaguuguauuuaggca

SEQ ID NO: 134673 - RNA, 19 nt, Artificial Sequence
  Description of Artificial Sequence: Synthetic oligonucleotide
gaauugguucccaucauaa

SEQ ID NO: 134674 - RNA, 19 nt, Artificial Sequence
  Description of Artificial Sequence: Synthetic oligonucleotide
aaccauauuuuggccccac

SEQ ID NO: 134675 - RNA, 19 nt, Artificial Sequence
  Description of Artificial Sequence: Synthetic oligonucleotide
gcaauaauuggggaagucc

SEQ ID NO: 134676 - RNA, 19 nt, Artificial Sequence
  Description of Artificial Sequence: Synthetic oligonucleotide
ucuagagggucacuucgau

SEQ ID NO: 134677 - RNA, 19 nt, Artificial Sequence
  Description of Artificial Sequence: Synthetic oligonucleotide
uccugaaaaugacccaaau

SEQ ID NO: 134678 - RNA, 19 nt, Artificial Sequence
  Description of Artificial Sequence: Synthetic oligonucleotide
gacauauucuaaccaccga

SEQ ID NO: 134679 - RNA, 19 nt, Artificial Sequence
  Description of Artificial Sequence: Synthetic oligonucleotide
agaaaccucacuacuguga

SEQ ID NO: 134680 - RNA, 19 nt, Artificial Sequence
  Description of Artificial Sequence: Synthetic oligonucleotide
cucauccuacuuuagcuca

SEQ ID NO: 134681 - RNA, 19 nt, Artificial Sequence
  Description of Artificial Sequence: Synthetic oligonucleotide
aaugcaagguggugauuua

SEQ ID NO: 134682 - RNA, 19 nt, Artificial Sequence
  Description of Artificial Sequence: Synthetic oligonucleotide
agaauugguucccaucaua

SEQ ID NO: 134683 - RNA, 19 nt, Artificial Sequence
  Description of Artificial Sequence: Synthetic oligonucleotide
uacccuaccuuuaggguua

SEQ ID NO: 134684 - RNA, 19 nt, Artificial Sequence
  Description of Artificial Sequence: Synthetic oligonucleotide
acgguuucaauggaaauuu

SEQ ID NO: 134685 - RNA, 19 nt, Artificial Sequence
  Description of Artificial Sequence: Synthetic oligonucleotide
auacaacaaccacccagug

SEQ ID NO: 134686 - RNA, 19 nt, Artificial Sequence
  Description of Artificial Sequence: Synthetic oligonucleotide
cugacuaucagauaaccuu

SEQ ID NO: 134687 - RNA, 19 nt, Artificial Sequence
  Description of Artificial Sequence: Synthetic oligonucleotide
cacgugguauccaagaaua

SEQ ID NO: 134688 - RNA, 19 nt, Artificial Sequence
  Description of Artificial Sequence: Synthetic oligonucleotide
aauuacuaucaggcuccag

SEQ ID NO: 134689 - RNA, 19 nt, Artificial Sequence
  Description of Artificial Sequence: Synthetic oligonucleotide
gauacccuaccuuuagggu

SEQ ID NO: 134690 - RNA, 19 nt, Artificial Sequence
  Description of Artificial Sequence: Synthetic oligonucleotide
aggguaccggguccuuugc

SEQ ID NO: 134691 - RNA, 19 nt, Artificial Sequence
  Description of Artificial Sequence: Synthetic oligonucleotide
caguuauuucuaaggagga

SEQ ID NO: 134692 - RNA, 19 nt, Artificial Sequence
  Description of Artificial Sequence: Synthetic oligonucleotide
uagaauugguucccaucau

SEQ ID NO: 134693 - RNA, 19 nt, Artificial Sequence
  Description of Artificial Sequence: Synthetic oligonucleotide
agcacuugggagcuucgga

SEQ ID NO: 134694 - RNA, 19 nt, Artificial Sequence
  Description of Artificial Sequence: Synthetic oligonucleotide
guauccuaccauaacccac

SEQ ID NO: 134695 - RNA, 19 nt, Artificial Sequence
  Description of Artificial Sequence: Synthetic oligonucleotide
gaacugguauccuaccaua

SEQ ID NO: 134696 - RNA, 19 nt, Artificial Sequence
  Description of Artificial Sequence: Synthetic oligonucleotide
uagcacuagaauguccagu

SEQ ID NO: 134697 - RNA, 19 nt, Artificial Sequence
  Description of Artificial Sequence: Synthetic oligonucleotide
agcugaccagguuuagugu

SEQ ID NO: 134698 - RNA, 19 nt, Artificial Sequence
  Description of Artificial Sequence: Synthetic oligonucleotide
uaaagcugaccagguuuag

SEQ ID NO: 134699 - RNA, 19 nt, Artificial Sequence
  Description of Artificial Sequence: Synthetic oligonucleotide
cauucugcacacaaggcgu

SEQ ID NO: 134700 - RNA, 19 nt, Artificial Sequence
  Description of Artificial Sequence: Synthetic oligonucleotide
cacuuuugcuaacagaggu

SEQ ID NO: 134701 - RNA, 19 nt, Artificial Sequence
  Description of Artificial Sequence: Synthetic oligonucleotide
uccgguaauuguccugaaa

SEQ ID NO: 134702 - RNA, 19 nt, Artificial Sequence
  Description of Artificial Sequence: Synthetic oligonucleotide
ugcuagagucucaguagau

SEQ ID NO: 134703 - RNA, 19 nt, Artificial Sequence
  Description of Artificial Sequence: Synthetic oligonucleotide
gaaaccucacuacugugau

SEQ ID NO: 134704 - RNA, 19 nt, Artificial Sequence
  Description of Artificial Sequence: Synthetic oligonucleotide
uggguaugcagcacauaua

SEQ ID NO: 134705 - RNA, 19 nt, Artificial Sequence
  Description of Artificial Sequence: Synthetic oligonucleotide
ucgucugcacagauucccu

SEQ ID NO: 134706 - RNA, 19 nt, Artificial Sequence
  Description of Artificial Sequence: Synthetic oligonucleotide
aaucagcacuuuacuauaa

SEQ ID NO: 134707 - RNA, 19 nt, Artificial Sequence
  Description of Artificial Sequence: Synthetic oligonucleotide
aacugguauccuaccauaa

SEQ ID NO: 134708 - RNA, 19 nt, Artificial Sequence
  Description of Artificial Sequence: Synthetic oligonucleotide
ugcuuaccucuucugccac

SEQ ID NO: 134709 - RNA, 19 nt, Artificial Sequence
  Description of Artificial Sequence: Synthetic oligonucleotide
ucauccuacuuuagcucau

SEQ ID NO: 134710 - RNA, 19 nt, Artificial Sequence
  Description of Artificial Sequence: Synthetic oligonucleotide
cuauaggugacagauggcu

SEQ ID NO: 134711 - RNA, 19 nt, Artificial Sequence
  Description of Artificial Sequence: Synthetic oligonucleotide
ggaaaugcuuuaaauacua

SEQ ID NO: 134712 - RNA, 19 nt, Artificial Sequence
  Description of Artificial Sequence: Synthetic oligonucleotide
gaaauccgguaauuguccu

SEQ ID NO: 134713 - RNA, 19 nt, Artificial Sequence
  Description of Artificial Sequence: Synthetic oligonucleotide
cacccgcugaugaggagag

SEQ ID NO: 134714 - RNA, 19 nt, Artificial Sequence
  Description of Artificial Sequence: Synthetic oligonucleotide
agcuggauauugcucuaau

SEQ ID NO: 134715 - RNA, 19 nt, Artificial Sequence
  Description of Artificial Sequence: Synthetic oligonucleotide
gugacuacuacaaacgguu

SEQ ID NO: 134716 - RNA, 19 nt, Artificial Sequence
  Description of Artificial Sequence: Synthetic oligonucleotide
acccagcggaaauaacaca

SEQ ID NO: 134717 - RNA, 19 nt, Artificial Sequence
  Description of Artificial Sequence: Synthetic oligonucleotide
uggccuuguaaagcugacc

SEQ ID NO: 134718 - RNA, 19 nt, Artificial Sequence
  Description of Artificial Sequence: Synthetic oligonucleotide
gcucaucaguuguauuuag

SEQ ID NO: 134719 - RNA, 19 nt, Artificial Sequence
  Description of Artificial Sequence: Synthetic oligonucleotide
gagucucaguagauaacca

SEQ ID NO: 134720 - RNA, 19 nt, Artificial Sequence
  Description of Artificial Sequence: Synthetic oligonucleotide
guaaagcugaccagguuua

SEQ ID NO: 134721 - RNA, 19 nt, Artificial Sequence
  Description of Artificial Sequence: Synthetic oligonucleotide
auuguccccuaggaaauau

SEQ ID NO: 134722 - RNA, 19 nt, Artificial Sequence
  Description of Artificial Sequence: Synthetic oligonucleotide
gucucaguagauaaccaua

SEQ ID NO: 134723 - RNA, 19 nt, Artificial Sequence
  Description of Artificial Sequence: Synthetic oligonucleotide
uaauagcugccacguggua

SEQ ID NO: 134724 - RNA, 19 nt, Artificial Sequence
  Description of Artificial Sequence: Synthetic oligonucleotide
uccugaaauguggauccau

SEQ ID NO: 134725 - RNA, 19 nt, Artificial Sequence
  Description of Artificial Sequence: Synthetic oligonucleotide
uuggaacaagggcuucaua

SEQ ID NO: 134726 - RNA, 19 nt, Artificial Sequence
  Description of Artificial Sequence: Synthetic oligonucleotide
ccuuagaauauguucuaga

SEQ ID NO: 134727 - RNA, 19 nt, Artificial Sequence
  Description of Artificial Sequence: Synthetic oligonucleotide
uggcaauaauuggggaagu

SEQ ID NO: 134728 - RNA, 19 nt, Artificial Sequence
  Description of Artificial Sequence: Synthetic oligonucleotide
cagccuaugcaugggcacc

SEQ ID NO: 134729 - RNA, 19 nt, Artificial Sequence
  Description of Artificial Sequence: Synthetic oligonucleotide
cuacuuuagcucaucaguu

SEQ ID NO: 134730 - RNA, 19 nt, Artificial Sequence
  Description of Artificial Sequence: Synthetic oligonucleotide
guguccugaaaaugaccca

SEQ ID NO: 134731 - RNA, 19 nt, Artificial Sequence
  Description of Artificial Sequence: Synthetic oligonucleotide
gguuagcacuagaaugucc

SEQ ID NO: 134732 - RNA, 19 nt, Artificial Sequence
  Description of Artificial Sequence: Synthetic oligonucleotide
aauggguaugcagcacaua

SEQ ID NO: 134733 - RNA, 19 nt, Artificial Sequence
  Description of Artificial Sequence: Synthetic oligonucleotide
uaaccauauuuuggcccca

SEQ ID NO: 134734 - RNA, 19 nt, Artificial Sequence
  Description of Artificial Sequence: Synthetic oligonucleotide
guaugcugcaugcagccau

SEQ ID NO: 134735 - RNA, 19 nt, Artificial Sequence
  Description of Artificial Sequence: Synthetic oligonucleotide
guaagauacccuaccuuua

SEQ ID NO: 134736 - RNA, 19 nt, Artificial Sequence
  Description of Artificial Sequence: Synthetic oligonucleotide
ccgaacagugagauccggg

SEQ ID NO: 134737 - RNA, 19 nt, Artificial Sequence
  Description of Artificial Sequence: Synthetic oligonucleotide
cuuuaggguuagcacuaga

SEQ ID NO: 134738 - RNA, 19 nt, Artificial Sequence
  Description of Artificial Sequence: Synthetic oligonucleotide
ggcugucuaguauguacac

SEQ ID NO: 134739 - RNA, 19 nt, Artificial Sequence
  Description of Artificial Sequence: Synthetic oligonucleotide
cgugguauccaagaauagc

SEQ ID NO: 134740 - RNA, 19 nt, Artificial Sequence
  Description of Artificial Sequence: Synthetic oligonucleotide
cacccaguggaaauauaaa

SEQ ID NO: 134741 - RNA, 19 nt, Artificial Sequence
  Description of Artificial Sequence: Synthetic oligonucleotide
ugaugccaacugaggccug

SEQ ID NO: 134742 - RNA, 19 nt, Artificial Sequence
  Description of Artificial Sequence: Synthetic oligonucleotide
uucuagccuaugucagcau

SEQ ID NO: 134743 - RNA, 19 nt, Artificial Sequence
  Description of Artificial Sequence: Synthetic oligonucleotide
aguuguauuuaggcacaaa

SEQ ID NO: 134744 - RNA, 19 nt, Artificial Sequence
  Description of Artificial Sequence: Synthetic oligonucleotide
ccuaccuuuaggguuagca

SEQ ID NO: 134745 - RNA, 19 nt, Artificial Sequence
  Description of Artificial Sequence: Synthetic oligonucleotide
gaauuacuaucaggcucca

SEQ ID NO: 134746 - RNA, 19 nt, Artificial Sequence
  Description of Artificial Sequence: Synthetic oligonucleotide
ucuaaccaccgaguacuuu

SEQ ID NO: 134747 - RNA, 19 nt, Artificial Sequence
  Description of Artificial Sequence: Synthetic oligonucleotide
cccagcggaaauaacacaa

SEQ ID NO: 134748 - RNA, 19 nt, Artificial Sequence
  Description of Artificial Sequence: Synthetic oligonucleotide
cagugucacuuuugcuaac

SEQ ID NO: 134749 - RNA, 19 nt, Artificial Sequence
  Description of Artificial Sequence: Synthetic oligonucleotide
augcaagguggugauuuaa

SEQ ID NO: 134750 - RNA, 19 nt, Artificial Sequence
  Description of Artificial Sequence: Synthetic oligonucleotide
ggaagccuuagguuagcaa

SEQ ID NO: 134751 - RNA, 19 nt, Artificial Sequence
  Description of Artificial Sequence: Synthetic oligonucleotide
ggaacugguauccuaccau

SEQ ID NO: 134752 - RNA, 19 nt, Artificial Sequence
  Description of Artificial Sequence: Synthetic oligonucleotide
gucguguggaccuguggcu

SEQ ID NO: 134753 - RNA, 19 nt, Artificial Sequence
  Description of Artificial Sequence: Synthetic oligonucleotide
gccuuagguuagcaaugag

SEQ ID NO: 134754 - RNA, 19 nt, Artificial Sequence
  Description of Artificial Sequence: Synthetic oligonucleotide
gcuuaccucuucugccacc

SEQ ID NO: 134755 - RNA, 19 nt, Artificial Sequence
  Description of Artificial Sequence: Synthetic oligonucleotide
guaccggguccuuugcugu

SEQ ID NO: 134756 - RNA, 19 nt, Artificial Sequence
  Description of Artificial Sequence: Synthetic oligonucleotide
ccacaguuugaugugccug

SEQ ID NO: 134757 - RNA, 19 nt, Artificial Sequence
  Description of Artificial Sequence: Synthetic oligonucleotide
agacgcuggcugucuagua

SEQ ID NO: 134758 - RNA, 19 nt, Artificial Sequence
  Description of Artificial Sequence: Synthetic oligonucleotide
ggaagcuaccagacaacuc

SEQ ID NO: 134759 - RNA, 19 nt, Artificial Sequence
  Description of Artificial Sequence: Synthetic oligonucleotide
ggugacuacuacaaacggu

SEQ ID NO: 134760 - RNA, 19 nt, Artificial Sequence
  Description of Artificial Sequence: Synthetic oligonucleotide
gcuggauauugcucuaaua

SEQ ID NO: 134761 - RNA, 19 nt, Artificial Sequence
  Description of Artificial Sequence: Synthetic oligonucleotide
ggguuguaaucugacuauc

SEQ ID NO: 134762 - RNA, 19 nt, Artificial Sequence
  Description of Artificial Sequence: Synthetic oligonucleotide
ggggaauuacuaucaggcu

SEQ ID NO: 134763 - RNA, 19 nt, Artificial Sequence
  Description of Artificial Sequence: Synthetic oligonucleotide
ccgguaauuguccugaaau

SEQ ID NO: 134764 - RNA, 19 nt, Artificial Sequence
  Description of Artificial Sequence: Synthetic oligonucleotide
ccgaguacuuuccagugaa

SEQ ID NO: 134765 - RNA, 19 nt, Artificial Sequence
  Description of Artificial Sequence: Synthetic oligonucleotide
gcugucuaguauguacaca

SEQ ID NO: 134766 - RNA, 19 nt, Artificial Sequence
  Description of Artificial Sequence: Synthetic oligonucleotide
cuagaauguccagugucau

SEQ ID NO: 134767 - RNA, 19 nt, Artificial Sequence
  Description of Artificial Sequence: Synthetic oligonucleotide
ggguuagcacuagaauguc

SEQ ID NO: 134768 - RNA, 19 nt, Artificial Sequence
  Description of Artificial Sequence: Synthetic oligonucleotide
ggggcauuucuguguauua

SEQ ID NO: 134769 - RNA, 19 nt, Artificial Sequence
  Description of Artificial Sequence: Synthetic oligonucleotide
ccuaugcaugggcaccaac

SEQ ID NO: 134770 - RNA, 19 nt, Artificial Sequence
  Description of Artificial Sequence: Synthetic oligonucleotide
gcccuuagaauauguucua

SEQ ID NO: 134771 - RNA, 19 nt, Artificial Sequence
  Description of Artificial Sequence: Synthetic oligonucleotide
ggaaggugccgaacaguga

SEQ ID NO: 134772 - RNA, 19 nt, Artificial Sequence
  Description of Artificial Sequence: Synthetic oligonucleotide
aggggaauuucaagcccuu

SEQ ID NO: 134773 - RNA, 19 nt, Artificial Sequence
  Description of Artificial Sequence: Synthetic oligonucleotide
gggaagcuaccagacaacu

SEQ ID NO: 134774 - RNA, 19 nt, Artificial Sequence
  Description of Artificial Sequence: Synthetic oligonucleotide
acccuaccuuuaggguuag

SEQ ID NO: 134775 - RNA, 19 nt, Artificial Sequence
  Description of Artificial Sequence: Synthetic oligonucleotide
cucaguagauaaccauauu

SEQ ID NO: 134776 - RNA, 19 nt, Artificial Sequence
  Description of Artificial Sequence: Synthetic oligonucleotide
caaccacccaguggaaaua

SEQ ID NO: 134777 - RNA, 19 nt, Artificial Sequence
  Description of Artificial Sequence: Synthetic oligonucleotide
gguaugcugcaugcagcca

SEQ ID NO: 134778 - RNA, 19 nt, Artificial Sequence
  Description of Artificial Sequence: Synthetic oligonucleotide
agcccaccaguuauuucua

SEQ ID NO: 134779 - RNA, 19 nt, Artificial Sequence
  Description of Artificial Sequence: Synthetic oligonucleotide
ggucacuucgaugcugccu

SEQ ID NO: 134780 - RNA, 19 nt, Artificial Sequence
  Description of Artificial Sequence: Synthetic oligonucleotide
gaaaugcaagguggugauu

SEQ ID NO: 134781 - RNA, 19 nt, Artificial Sequence
  Description of Artificial Sequence: Synthetic oligonucleotide
ccauauuuuggccccacuu

SEQ ID NO: 134782 - RNA, 19 nt, Artificial Sequence
  Description of Artificial Sequence: Synthetic oligonucleotide
gcacuagaauguccagugu

SEQ ID NO: 134783 - RNA, 19 nt, Artificial Sequence
  Description of Artificial Sequence: Synthetic oligonucleotide
gaggccuguugggaguuuu

SEQ ID NO: 134784 - RNA, 19 nt, Artificial Sequence
  Description of Artificial Sequence: Synthetic oligonucleotide
ccacgugguauccaagaau

SEQ ID NO: 134785 - RNA, 19 nt, Artificial Sequence
  Description of Artificial Sequence: Synthetic oligonucleotide
gcccaccaguuauuucuaa

SEQ ID NO: 134786 - RNA, 19 nt, Artificial Sequence
  Description of Artificial Sequence: Synthetic oligonucleotide
ccuaggaaauauccaccuu

SEQ ID NO: 134787 - RNA, 19 nt, Artificial Sequence
  Description of Artificial Sequence: Synthetic oligonucleotide
cccgcugaugaggagaguu

SEQ ID NO: 134788 - RNA, 19 nt, Artificial Sequence
  Description of Artificial Sequence: Synthetic oligonucleotide
ggggaauuucaagcccuuu

SEQ ID NO: 134789 - RNA, 19 nt, Artificial Sequence
  Description of Artificial Sequence: Synthetic oligonucleotide
gccuaugcaugggcaccaa

SEQ ID NO: 134790 - RNA, 19 nt, Artificial Sequence
  Description of Artificial Sequence: Synthetic oligonucleotide
gcgugcuccugccgaugua

SEQ ID NO: 134791 - RNA, 19 nt, Artificial Sequence
  Description of Artificial Sequence: Synthetic oligonucleotide
gggugucguguggaccugu

SEQ ID NO: 134792 - RNA, 19 nt, Artificial Sequence
  Description of Artificial Sequence: Synthetic oligonucleotide
uggaguauguuuuaguagg

SEQ ID NO: 134793 - RNA, 19 nt, Artificial Sequence
  Description of Artificial Sequence: Synthetic oligonucleotide
uuaucuaugccucucgccc

SEQ ID NO: 134794 - RNA, 19 nt, Artificial Sequence
  Description of Artificial Sequence: Synthetic oligonucleotide
ucucauagaagaugcaucc

SEQ ID NO: 134795 - RNA, 19 nt, Artificial Sequence
  Description of Artificial Sequence: Synthetic oligonucleotide
cauacagcgauuacggugc

SEQ ID NO: 134796 - RNA, 19 nt, Artificial Sequence
  Description of Artificial Sequence: Synthetic oligonucleotide
uuuaguagggauugacuug

SEQ ID NO: 134797 - RNA, 19 nt, Artificial Sequence
  Description of Artificial Sequence: Synthetic oligonucleotide
uuuuaguagggauugacuu

SEQ ID NO: 134798 - RNA, 19 nt, Artificial Sequence
  Description of Artificial Sequence: Synthetic oligonucleotide
aucaagucgaggugcaugg

SEQ ID NO: 134799 - RNA, 19 nt, Artificial Sequence
  Description of Artificial Sequence: Synthetic oligonucleotide
aauccggguguucacggcg

SEQ ID NO: 134800 - RNA, 19 nt, Artificial Sequence
  Description of Artificial Sequence: Synthetic oligonucleotide
aaggccuagccuuagugug

SEQ ID NO: 134801 - RNA, 19 nt, Artificial Sequence
  Description of Artificial Sequence: Synthetic oligonucleotide
agaauggauguuucauggc

SEQ ID NO: 134802 - RNA, 19 nt, Artificial Sequence
  Description of Artificial Sequence: Synthetic oligonucleotide
ugucaauuuggguagagua

SEQ ID NO: 134803 - RNA, 19 nt, Artificial Sequence
  Description of Artificial Sequence: Synthetic oligonucleotide
auaacauugccacagucau

SEQ ID NO: 134804 - RNA, 19 nt, Artificial Sequence
  Description of Artificial Sequence: Synthetic oligonucleotide
agagauccgauugcgaccc

SEQ ID NO: 134805 - RNA, 19 nt, Artificial Sequence
  Description of Artificial Sequence: Synthetic oligonucleotide
agaagaccgaauauuggcc

SEQ ID NO: 134806 - RNA, 19 nt, Artificial Sequence
  Description of Artificial Sequence: Synthetic oligonucleotide
ucauguagugugacgaugu

SEQ ID NO: 134807 - RNA, 19 nt, Artificial Sequence
  Description of Artificial Sequence: Synthetic oligonucleotide
uucuagucaaggucaauca

SEQ ID NO: 134808 - RNA, 19 nt, Artificial Sequence
  Description of Artificial Sequence: Synthetic oligonucleotide
ugccguuugaucuucuuca

SEQ ID NO: 134809 - RNA, 19 nt, Artificial Sequence
  Description of Artificial Sequence: Synthetic oligonucleotide
aguuggaguucccaaaaug

SEQ ID NO: 134810 - RNA, 19 nt, Artificial Sequence
  Description of Artificial Sequence: Synthetic oligonucleotide
caagguagcccucaggcag

SEQ ID NO: 134811 - RNA, 19 nt, Artificial Sequence
  Description of Artificial Sequence: Synthetic oligonucleotide
aaauauggaaguaguguca

SEQ ID NO: 134812 - RNA, 19 nt, Artificial Sequence
  Description of Artificial Sequence: Synthetic oligonucleotide
guagggauugacuuggcac

SEQ ID NO: 134813 - RNA, 19 nt, Artificial Sequence
  Description of Artificial Sequence: Synthetic oligonucleotide
gauaacauugccacaguca

SEQ ID NO: 134814 - RNA, 19 nt, Artificial Sequence
  Description of Artificial Sequence: Synthetic oligonucleotide
gauuacggugcauucagga

SEQ ID NO: 134815 - RNA, 19 nt, Artificial Sequence
  Description of Artificial Sequence: Synthetic oligonucleotide
ucauuggauaggaugccug

SEQ ID NO: 134816 - RNA, 19 nt, Artificial Sequence
  Description of Artificial Sequence: Synthetic oligonucleotide
guggaccccguccagaucg

SEQ ID NO: 134817 - RNA, 19 nt, Artificial Sequence
  Description of Artificial Sequence: Synthetic oligonucleotide
cuuaggguggaagaagggg

SEQ ID NO: 134818 - RNA, 19 nt, Artificial Sequence
  Description of Artificial Sequence: Synthetic oligonucleotide
ucuuaucuaugccucucgc

SEQ ID NO: 134819 - RNA, 19 nt, Artificial Sequence
  Description of Artificial Sequence: Synthetic oligonucleotide
cauuggauaggaugccugg

SEQ ID NO: 134820 - RNA, 19 nt, Artificial Sequence
  Description of Artificial Sequence: Synthetic oligonucleotide
acuucauuggaguauguuu

SEQ ID NO: 134821 - RNA, 19 nt, Artificial Sequence
  Description of Artificial Sequence: Synthetic oligonucleotide
  modified_base (2)..(2): a, c, u, g, unknown or other
cncgcgaguaaccucagag

SEQ ID NO: 134822 - RNA, 19 nt, Artificial Sequence
  Description of Artificial Sequence: Synthetic oligonucleotide
auagaagaagaccgaauau

SEQ ID NO: 134823 - RNA, 19 nt, Artificial Sequence
  Description of Artificial Sequence: Synthetic oligonucleotide
aacucgguauccaccacac

SEQ ID NO: 134824 - RNA, 19 nt, Artificial Sequence
  Description of Artificial Sequence: Synthetic oligonucleotide
uuuggguagaguagucugu

SEQ ID NO: 134825 - RNA, 19 nt, Artificial Sequence
  Description of Artificial Sequence: Synthetic oligonucleotide
uguuuuaguagggauugac

SEQ ID NO: 134826 - RNA, 19 nt, Artificial Sequence
  Description of Artificial Sequence: Synthetic oligonucleotide
cuuuugccuuuguagacag

SEQ ID NO: 134827 - RNA, 19 nt, Artificial Sequence
  Description of Artificial Sequence: Synthetic oligonucleotide
auuggauaggaugccuggc

SEQ ID NO: 134828 - RNA, 19 nt, Artificial Sequence
  Description of Artificial Sequence: Synthetic oligonucleotide
ccggcaacuaccaagacag

SEQ ID NO: 134829 - RNA, 19 nt, Artificial Sequence
  Description of Artificial Sequence: Synthetic oligonucleotide
guaggggccaaccagucug

SEQ ID NO: 134830 - RNA, 19 nt, Artificial Sequence
  Description of Artificial Sequence: Synthetic oligonucleotide
uggagaucuugcguggugg

SEQ ID NO: 134831 - RNA, 19 nt, Artificial Sequence
  Description of Artificial Sequence: Synthetic oligonucleotide
guagcuguaccuccuuuag

SEQ ID NO: 134832 - RNA, 19 nt, Artificial Sequence
  Description of Artificial Sequence: Synthetic oligonucleotide
uccgccggcaacuaccaag

SEQ ID NO: 134833 - RNA, 19 nt, Artificial Sequence
  Description of Artificial Sequence: Synthetic oligonucleotide
guagcccucaggcagccgg

SEQ ID NO: 134834 - RNA, 19 nt, Artificial Sequence
  Description of Artificial Sequence: Synthetic oligonucleotide
uaucaagucgaggugcaug

SEQ ID NO: 134835 - RNA, 19 nt, Artificial Sequence
  Description of Artificial Sequence: Synthetic oligonucleotide
cacuuucuagucaagguca

SEQ ID NO: 134836 - RNA, 19 nt, Artificial Sequence
  Description of Artificial Sequence: Synthetic oligonucleotide
uuguccgccggcaacuacc

SEQ ID NO: 134837 - RNA, 19 nt, Artificial Sequence
  Description of Artificial Sequence: Synthetic oligonucleotide
guaaccucagagccgcggg

SEQ ID NO: 134838 - RNA, 19 nt, Artificial Sequence
  Description of Artificial Sequence: Synthetic oligonucleotide
uaucuaugccucucgcccc

SEQ ID NO: 134839 - RNA, 19 nt, Artificial Sequence
  Description of Artificial Sequence: Synthetic oligonucleotide
caaugguuggguugacagg

SEQ ID NO: 134840 - RNA, 19 nt, Artificial Sequence
  Description of Artificial Sequence: Synthetic oligonucleotide
ucgguauccaccacacgga

SEQ ID NO: 134841 - RNA, 19 nt, Artificial Sequence
  Description of Artificial Sequence: Synthetic oligonucleotide
gucgcuaucaagucgaggu

SEQ ID NO: 134842 - RNA, 19 nt, Artificial Sequence
  Description of Artificial Sequence: Synthetic oligonucleotide
agaccgaauauuggccucc

SEQ ID NO: 134843 - RNA, 19 nt, Artificial Sequence
  Description of Artificial Sequence: Synthetic oligonucleotide
cagagauccgauugcgacc

SEQ ID NO: 134844 - RNA, 19 nt, Artificial Sequence
  Description of Artificial Sequence: Synthetic oligonucleotide
gauggggcuauugaggguc

SEQ ID NO: 134845 - RNA, 19 nt, Artificial Sequence
  Description of Artificial Sequence: Synthetic oligonucleotide
aauggauguuucauggcau

SEQ ID NO: 134846 - RNA, 19 nt, Artificial Sequence
  Description of Artificial Sequence: Synthetic oligonucleotide
gaucgaagcuccccaggag

SEQ ID NO: 134847 - RNA, 19 nt, Artificial Sequence
  Description of Artificial Sequence: Synthetic oligonucleotide
agaucgaagcuccccagga

SEQ ID NO: 134848 - RNA, 19 nt, Artificial Sequence
  Description of Artificial Sequence: Synthetic oligonucleotide
auuacggugcauucaggaa

SEQ ID NO: 134849 - RNA, 19 nt, Artificial Sequence
  Description of Artificial Sequence: Synthetic oligonucleotide
uggucaauuccuggcagag

SEQ ID NO: 134850 - RNA, 19 nt, Artificial Sequence
  Description of Artificial Sequence: Synthetic oligonucleotide
uguaccuccuuuagugcaa

SEQ ID NO: 134851 - RNA, 19 nt, Artificial Sequence
  Description of Artificial Sequence: Synthetic oligonucleotide
agaguagucuguggauccc

SEQ ID NO: 134852 - RNA, 19 nt, Artificial Sequence
  Description of Artificial Sequence: Synthetic oligonucleotide
auggccauuuuguccgccg

SEQ ID NO: 134853 - RNA, 19 nt, Artificial Sequence
  Description of Artificial Sequence: Synthetic oligonucleotide
uggccauuuuguccgccgg

SEQ ID NO: 134854 - RNA, 19 nt, Artificial Sequence
  Description of Artificial Sequence: Synthetic oligonucleotide
ucgcuaucaagucgaggug

SEQ ID NO: 134855 - RNA, 19 nt, Artificial Sequence
  Description of Artificial Sequence: Synthetic oligonucleotide
gacacuucccggauagcag

SEQ ID NO: 134856 - RNA, 19 nt, Artificial Sequence
  Description of Artificial Sequence: Synthetic oligonucleotide
aaauacuguaggagggcca

SEQ ID NO: 134857 - RNA, 19 nt, Artificial Sequence
  Description of Artificial Sequence: Synthetic oligonucleotide
cuccguguggauaauguca

SEQ ID NO: 134858 - RNA, 19 nt, Artificial Sequence
  Description of Artificial Sequence: Synthetic oligonucleotide
aguaaccucagagccgcgg

SEQ ID NO: 134859 - RNA, 19 nt, Artificial Sequence
  Description of Artificial Sequence: Synthetic oligonucleotide
aguagggauugacuuggca

SEQ ID NO: 134860 - RNA, 19 nt, Artificial Sequence
  Description of Artificial Sequence: Synthetic oligonucleotide
uccgauccauggcaaccgg

SEQ ID NO: 134861 - RNA, 19 nt, Artificial Sequence
  Description of Artificial Sequence: Synthetic oligonucleotide
aguugguaggaaagugugg

SEQ ID NO: 134862 - RNA, 19 nt, Artificial Sequence
  Description of Artificial Sequence: Synthetic oligonucleotide
gaagaccgaauauuggccu

SEQ ID NO: 134863 - RNA, 19 nt, Artificial Sequence
  Description of Artificial Sequence: Synthetic oligonucleotide
acacuucccggauagcagu

SEQ ID NO: 134864 - RNA, 19 nt, Artificial Sequence
  Description of Artificial Sequence: Synthetic oligonucleotide
gaacucgguauccaccaca

SEQ ID NO: 134865 - RNA, 19 nt, Artificial Sequence
  Description of Artificial Sequence: Synthetic oligonucleotide
cauuuuguccgccggcaac

SEQ ID NO: 134866 - RNA, 19 nt, Artificial Sequence
  Description of Artificial Sequence: Synthetic oligonucleotide
uucauuggauaggaugccu

SEQ ID NO: 134867 - RNA, 19 nt, Artificial Sequence
  Description of Artificial Sequence: Synthetic oligonucleotide
guucacggcggcucgagac

SEQ ID NO: 134868 - RNA, 19 nt, Artificial Sequence
  Description of Artificial Sequence: Synthetic oligonucleotide
gauaggaugccuggccaug

SEQ ID NO: 134869 - RNA, 19 nt, Artificial Sequence
  Description of Artificial Sequence: Synthetic oligonucleotide
caugucuccucaguuggag

SEQ ID NO: 134870 - RNA, 19 nt, Artificial Sequence
  Description of Artificial Sequence: Synthetic oligonucleotide
gcgauuacggugcauucag

SEQ ID NO: 134871 - RNA, 19 nt, Artificial Sequence
  Description of Artificial Sequence: Synthetic oligonucleotide
auuuuguccgccggcaacu

SEQ ID NO: 134872 - RNA, 19 nt, Artificial Sequence
  Description of Artificial Sequence: Synthetic oligonucleotide
uuuguggauccgcuccccu

SEQ ID NO: 134873 - RNA, 19 nt, Artificial Sequence
  Description of Artificial Sequence: Synthetic oligonucleotide
ccgauugcgacccucaaac

SEQ ID NO: 134874 - RNA, 19 nt, Artificial Sequence
  Description of Artificial Sequence: Synthetic oligonucleotide
cagaucgaagcuccccagg

SEQ ID NO: 134875 - RNA, 19 nt, Artificial Sequence
  Description of Artificial Sequence: Synthetic oligonucleotide
caccacuuucuagucaagg

SEQ ID NO: 134876 - RNA, 19 nt, Artificial Sequence
  Description of Artificial Sequence: Synthetic oligonucleotide
cauugugcauguugauaac

SEQ ID NO: 134877 - RNA, 19 nt, Artificial Sequence
  Description of Artificial Sequence: Synthetic oligonucleotide
ggcggcucgagacucaaag

SEQ ID NO: 134878 - RNA, 19 nt, Artificial Sequence
  Description of Artificial Sequence: Synthetic oligonucleotide
uccccuaggcugaggaaga

SEQ ID NO: 134879 - RNA, 19 nt, Artificial Sequence
  Description of Artificial Sequence: Synthetic oligonucleotide
ccucuugcuggccauaggg

SEQ ID NO: 134880 - RNA, 19 nt, Artificial Sequence
  Description of Artificial Sequence: Synthetic oligonucleotide
acuucccggauagcagugc

SEQ ID NO: 134881 - RNA, 19 nt, Artificial Sequence
  Description of Artificial Sequence: Synthetic oligonucleotide
gaauccggguguucacggc

SEQ ID NO: 134882 - RNA, 19 nt, Artificial Sequence
  Description of Artificial Sequence: Synthetic oligonucleotide
auggaaguagugucaggaa

SEQ ID NO: 134883 - RNA, 19 nt, Artificial Sequence
  Description of Artificial Sequence: Synthetic oligonucleotide
agcgccgucgcuaucaagu

SEQ ID NO: 134884 - RNA, 19 nt, Artificial Sequence
  Description of Artificial Sequence: Synthetic oligonucleotide
cuagccuuagugugggaga

SEQ ID NO: 134885 - RNA, 19 nt, Artificial Sequence
  Description of Artificial Sequence: Synthetic oligonucleotide
ggagagcgcgaugaaaagg

SEQ ID NO: 134886 - RNA, 19 nt, Artificial Sequence
  Description of Artificial Sequence: Synthetic oligonucleotide
uguccgccggcaacuacca

SEQ ID NO: 134887 - RNA, 19 nt, Artificial Sequence
  Description of Artificial Sequence: Synthetic oligonucleotide
agggucuagugauggucag

SEQ ID NO: 134888 - RNA, 19 nt, Artificial Sequence
  Description of Artificial Sequence: Synthetic oligonucleotide
uggucuuaucuaugccucu

SEQ ID NO: 134889 - RNA, 19 nt, Artificial Sequence
  Description of Artificial Sequence: Synthetic oligonucleotide
gcagccggaugucagcugg

SEQ ID NO: 134890 - RNA, 19 nt, Artificial Sequence
  Description of Artificial Sequence: Synthetic oligonucleotide
uuuguccgccggcaacuac

SEQ ID NO: 134891 - RNA, 19 nt, Artificial Sequence
  Description of Artificial Sequence: Synthetic oligonucleotide
ucauugacagcugccguuu

SEQ ID NO: 134892 - RNA, 19 nt, Artificial Sequence
  Description of Artificial Sequence: Synthetic oligonucleotide
gagcaacacgggaaggggc

SEQ ID NO: 134893 - RNA, 19 nt, Artificial Sequence
  Description of Artificial Sequence: Synthetic oligonucleotide
ggauugacuuggcacgagc

SEQ ID NO: 134894 - RNA, 19 nt, Artificial Sequence
  Description of Artificial Sequence: Synthetic oligonucleotide
cgcgaguaaccucagagcc

SEQ ID NO: 134895 - RNA, 19 nt, Artificial Sequence
  Description of Artificial Sequence: Synthetic oligonucleotide
cauagguacccucacccaa

SEQ ID NO: 134896 - RNA, 19 nt, Artificial Sequence
  Description of Artificial Sequence: Synthetic oligonucleotide
cagggucuagugaugguca

SEQ ID NO: 134897 - RNA, 19 nt, Artificial Sequence
  Description of Artificial Sequence: Synthetic oligonucleotide
ggccauaggguaguggucc

SEQ ID NO: 134898 - RNA, 19 nt, Artificial Sequence
  Description of Artificial Sequence: Synthetic oligonucleotide
ccccaaaauguccaucucc

SEQ ID NO: 134899 - RNA, 19 nt, Artificial Sequence
  Description of Artificial Sequence: Synthetic oligonucleotide
guagugugacgauguuggc

SEQ ID NO: 134900 - RNA, 19 nt, Artificial Sequence
  Description of Artificial Sequence: Synthetic oligonucleotide
agcgauuacggugcauuca

SEQ ID NO: 134901 - RNA, 19 nt, Artificial Sequence
  Description of Artificial Sequence: Synthetic oligonucleotide
agcgcgaugaaaaggggaa

SEQ ID NO: 134902 - RNA, 19 nt, Artificial Sequence
  Description of Artificial Sequence: Synthetic oligonucleotide
agcucgguauuugggguag

SEQ ID NO: 134903 - RNA, 19 nt, Artificial Sequence
  Description of Artificial Sequence: Synthetic oligonucleotide
aucaagcaaaguaguggug

SEQ ID NO: 134904 - RNA, 19 nt, Artificial Sequence
  Description of Artificial Sequence: Synthetic oligonucleotide
gguacccucacccaacuua

SEQ ID NO: 134905 - RNA, 19 nt, Artificial Sequence
  Description of Artificial Sequence: Synthetic oligonucleotide
ugaguggaccccguccaga

SEQ ID NO: 134906 - RNA, 19 nt, Artificial Sequence
  Description of Artificial Sequence: Synthetic oligonucleotide
gcaugcguacucucacugg

SEQ ID NO: 134907 - RNA, 19 nt, Artificial Sequence
  Description of Artificial Sequence: Synthetic oligonucleotide
uguucacggcggcucgaga

SEQ ID NO: 134908 - RNA, 19 nt, Artificial Sequence
  Description of Artificial Sequence: Synthetic oligonucleotide
ggucuagugauggucagga

SEQ ID NO: 134909 - RNA, 19 nt, Artificial Sequence
  Description of Artificial Sequence: Synthetic oligonucleotide
caccgagugggacagggca

SEQ ID NO: 134910 - RNA, 19 nt, Artificial Sequence
  Description of Artificial Sequence: Synthetic oligonucleotide
uggccauaggguagugguc

SEQ ID NO: 134911 - RNA, 19 nt, Artificial Sequence
  Description of Artificial Sequence: Synthetic oligonucleotide
ucaagucgaggugcauggc

SEQ ID NO: 134912 - RNA, 19 nt, Artificial Sequence
  Description of Artificial Sequence: Synthetic oligonucleotide
gagcgcgaugaaaagggga

SEQ ID NO: 134913 - RNA, 19 nt, Artificial Sequence
  Description of Artificial Sequence: Synthetic oligonucleotide
ccguccagaucgaagcucc

SEQ ID NO: 134914 - RNA, 19 nt, Artificial Sequence
  Description of Artificial Sequence: Synthetic oligonucleotide
gccucagcucgguauuugg

SEQ ID NO: 134915 - RNA, 19 nt, Artificial Sequence
  Description of Artificial Sequence: Synthetic oligonucleotide
ccccuacucaacagcaccg

SEQ ID NO: 134916 - RNA, 19 nt, Artificial Sequence
  Description of Artificial Sequence: Synthetic oligonucleotide
caguuugagcucuccccuc

SEQ ID NO: 134917 - RNA, 19 nt, Artificial Sequence
  Description of Artificial Sequence: Synthetic oligonucleotide
cacgggaaggggccucucc

SEQ ID NO: 134918 - RNA, 19 nt, Artificial Sequence
  Description of Artificial Sequence: Synthetic oligonucleotide
cuggucaauuccuggcaga

SEQ ID NO: 134919 - RNA, 19 nt, Artificial Sequence
  Description of Artificial Sequence: Synthetic oligonucleotide
gcgaguaaccucagagccg

SEQ ID NO: 134920 - RNA, 19 nt, Artificial Sequence
  Description of Artificial Sequence: Synthetic oligonucleotide
cgauccauggcaaccggag

SEQ ID NO: 134921 - RNA, 19 nt, Artificial Sequence
  Description of Artificial Sequence: Synthetic oligonucleotide
uguuagcacccagcagaca

SEQ ID NO: 134922 - RNA, 19 nt, Artificial Sequence
  Description of Artificial Sequence: Synthetic oligonucleotide
cgaguaaccucagagccgc

SEQ ID NO: 134923 - RNA, 19 nt, Artificial Sequence
  Description of Artificial Sequence: Synthetic oligonucleotide
accgagugggacagggcag

SEQ ID NO: 134924 - RNA, 19 nt, Artificial Sequence
  Description of Artificial Sequence: Synthetic oligonucleotide
gagggguguagcaucccuc

SEQ ID NO: 134925 - RNA, 19 nt, Artificial Sequence
  Description of Artificial Sequence: Synthetic oligonucleotide
cuucccggauagcagugca

SEQ ID NO: 134926 - RNA, 19 nt, Artificial Sequence
  Description of Artificial Sequence: Synthetic oligonucleotide
agccccuacucaacagcac

SEQ ID NO: 134927 - RNA, 19 nt, Artificial Sequence
  Description of Artificial Sequence: Synthetic oligonucleotide
gcucgcaagcgcccgcugg

SEQ ID NO: 134928 - RNA, 19 nt, Artificial Sequence
  Description of Artificial Sequence: Synthetic oligonucleotide
auacagcgauuacggugca

SEQ ID NO: 134929 - RNA, 19 nt, Artificial Sequence
  Description of Artificial Sequence: Synthetic oligonucleotide
agcagagauccgauugcga

SEQ ID NO: 134930 - RNA, 19 nt, Artificial Sequence
  Description of Artificial Sequence: Synthetic oligonucleotide
gcguacucucacuggagac

SEQ ID NO: 134931 - RNA, 19 nt, Artificial Sequence
  Description of Artificial Sequence: Synthetic oligonucleotide
agggccucagcucgguauu

SEQ ID NO: 134932 - RNA, 19 nt, Artificial Sequence
  Description of Artificial Sequence: Synthetic oligonucleotide
caccccauuuaaggguccc

SEQ ID NO: 134933 - RNA, 19 nt, Artificial Sequence
  Description of Artificial Sequence: Synthetic oligonucleotide
caagucgaggugcauggcu

SEQ ID NO: 134934 - RNA, 19 nt, Artificial Sequence
  Description of Artificial Sequence: Synthetic oligonucleotide
ugcucgcaagcgcccgcug

SEQ ID NO: 134935 - RNA, 19 nt, Artificial Sequence
  Description of Artificial Sequence: Synthetic oligonucleotide
ggccaaccagucuguauac

SEQ ID NO: 134936 - RNA, 19 nt, Artificial Sequence
  Description of Artificial Sequence: Synthetic oligonucleotide
gaggcggcggcggcggcgg

SEQ ID NO: 134937 - RNA, 19 nt, Artificial Sequence
  Description of Artificial Sequence: Synthetic oligonucleotide
aagcgcccgcuggaauccg

SEQ ID NO: 134938 - RNA, 19 nt, Artificial Sequence
  Description of Artificial Sequence: Synthetic oligonucleotide
guguucacggcggcucgag

SEQ ID NO: 134939 - RNA, 19 nt, Artificial Sequence
  Description of Artificial Sequence: Synthetic oligonucleotide
uggaccccguccagaucga

SEQ ID NO: 134940 - RNA, 19 nt, Artificial Sequence
  Description of Artificial Sequence: Synthetic oligonucleotide
ggucuuaucuaugccucuc

SEQ ID NO: 134941 - RNA, 19 nt, Artificial Sequence
  Description of Artificial Sequence: Synthetic oligonucleotide
gucauugacagcugccguu

SEQ ID NO: 134942 - RNA, 19 nt, Artificial Sequence
  Description of Artificial Sequence: Synthetic oligonucleotide
uuuuguccgccggcaacua

SEQ ID NO: 134943 - RNA, 19 nt, Artificial Sequence
  Description of Artificial Sequence: Synthetic oligonucleotide
uggggcuauugagggucag

SEQ ID NO: 134944 - RNA, 19 nt, Artificial Sequence
  Description of Artificial Sequence: Synthetic oligonucleotide
auccgauugcgacccucaa

SEQ ID NO: 134945 - RNA, 19 nt, Artificial Sequence
  Description of Artificial Sequence: Synthetic oligonucleotide
gcggcucgagacucaaagc

SEQ ID NO: 134946 - RNA, 19 nt, Artificial Sequence
  Description of Artificial Sequence: Synthetic oligonucleotide
cucgcaagcgcccgcugga

SEQ ID NO: 134947 - RNA, 19 nt, Artificial Sequence
  Description of Artificial Sequence: Synthetic oligonucleotide
gcauagguacccucaccca

SEQ ID NO: 134948 - RNA, 19 nt, Artificial Sequence
  Description of Artificial Sequence: Synthetic oligonucleotide
cccggauagcagugcaggg

SEQ ID NO: 134949 - RNA, 19 nt, Artificial Sequence
  Description of Artificial Sequence: Synthetic oligonucleotide
cgcuaucaagucgaggugc

SEQ ID NO: 134950 - RNA, 19 nt, Artificial Sequence
  Description of Artificial Sequence: Synthetic oligonucleotide
  modified_base (5)..(5): a, c, u, g, unknown or other
gggcncgcgaguaaccuca

SEQ ID NO: 134951 - RNA, 19 nt, Artificial Sequence
  Description of Artificial Sequence: Synthetic oligonucleotide
gaguggaccccguccagau

SEQ ID NO: 134952 - RNA, 19 nt, Artificial Sequence
  Description of Artificial Sequence: Synthetic oligonucleotide
gccgucgcuaucaagucga

SEQ ID NO: 134953 - RNA, 19 nt, Artificial Sequence
  Description of Artificial Sequence: Synthetic oligonucleotide
ccagggucuagugaugguc

SEQ ID NO: 134954 - RNA, 19 nt, Artificial Sequence
  Description of Artificial Sequence: Synthetic oligonucleotide
accccauuuaaggguccca

SEQ ID NO: 134955 - RNA, 19 nt, Artificial Sequence
  Description of Artificial Sequence: Synthetic oligonucleotide
cgauuacggugcauucagg

SEQ ID NO: 134956 - RNA, 19 nt, Artificial Sequence
  Description of Artificial Sequence: Synthetic oligonucleotide
agagcugaguggaccccgu

SEQ ID NO: 134957 - RNA, 19 nt, Artificial Sequence
  Description of Artificial Sequence: Synthetic oligonucleotide
guacccucacccaacuuau

SEQ ID NO: 134958 - RNA, 19 nt, Artificial Sequence
  Description of Artificial Sequence: Synthetic oligonucleotide
cgcaugcguacucucacug

SEQ ID NO: 134959 - RNA, 19 nt, Artificial Sequence
  Description of Artificial Sequence: Synthetic oligonucleotide
ucccuacucucugguaguu

SEQ ID NO: 134960 - RNA, 19 nt, Artificial Sequence
  Description of Artificial Sequence: Synthetic oligonucleotide
gggauugacuuggcacgag

SEQ ID NO: 134961 - RNA, 19 nt, Artificial Sequence
  Description of Artificial Sequence: Synthetic oligonucleotide
ggggcuauugagggucagc

SEQ ID NO: 134962 - RNA, 19 nt, Artificial Sequence
  Description of Artificial Sequence: Synthetic oligonucleotide
gggcuauugagggucagcu

SEQ ID NO: 134963 - RNA, 19 nt, Artificial Sequence
  Description of Artificial Sequence: Synthetic oligonucleotide
uccgcuccccuaggcugag

SEQ ID NO: 134964 - RNA, 19 nt, Artificial Sequence
  Description of Artificial Sequence: Synthetic oligonucleotide
gcgcgaugaaaaggggaag

SEQ ID NO: 134965 - RNA, 19 nt, Artificial Sequence
  Description of Artificial Sequence: Synthetic oligonucleotide
guagcgacaggcguuuguu

SEQ ID NO: 134966 - RNA, 19 nt, Artificial Sequence
  Description of Artificial Sequence: Synthetic oligonucleotide
ccaggccuaucuguucagg

SEQ ID NO: 134967 - RNA, 19 nt, Artificial Sequence
  Description of Artificial Sequence: Synthetic oligonucleotide
acacgggaaggggccucuc

SEQ ID NO: 134968 - RNA, 19 nt, Artificial Sequence
  Description of Artificial Sequence: Synthetic oligonucleotide
guaccuccuuuagugcaaa

SEQ ID NO: 134969 - RNA, 19 nt, Artificial Sequence
  Description of Artificial Sequence: Synthetic oligonucleotide
agcgcccgcuggaauccgg

SEQ ID NO: 134970 - RNA, 19 nt, Artificial Sequence
  Description of Artificial Sequence: Synthetic oligonucleotide
auggggcuauugaggguca

SEQ ID NO: 134971 - RNA, 19 nt, Artificial Sequence
  Description of Artificial Sequence: Synthetic oligonucleotide
gguagcgacaggcguuugu

SEQ ID NO: 134972 - RNA, 19 nt, Artificial Sequence
  Description of Artificial Sequence: Synthetic oligonucleotide
  modified_base (6)..(6): a, c, u, g, unknown or other
ggggcncgcgaguaaccuc

SEQ ID NO: 134973 - RNA, 19 nt, Artificial Sequence
  Description of Artificial Sequence: Synthetic oligonucleotide
gcccauacagaggcaggug

SEQ ID NO: 134974 - RNA, 19 nt, Artificial Sequence
  Description of Artificial Sequence: Synthetic oligonucleotide
gggguaguuguauguucua

SEQ ID NO: 134975 - RNA, 19 nt, Artificial Sequence
  Description of Artificial Sequence: Synthetic oligonucleotide
cccucuugcuggccauagg

SEQ ID NO: 134976 - RNA, 19 nt, Artificial Sequence
  Description of Artificial Sequence: Synthetic oligonucleotide
caaaccccaugagaagggu

SEQ ID NO: 134977 - RNA, 19 nt, Artificial Sequence
  Description of Artificial Sequence: Synthetic oligonucleotide
cgccgucgcuaucaagucg

SEQ ID NO: 134978 - RNA, 19 nt, Artificial Sequence
  Description of Artificial Sequence: Synthetic oligonucleotide
ccgccggcaacuaccaaga

SEQ ID NO: 134979 - RNA, 19 nt, Artificial Sequence
  Description of Artificial Sequence: Synthetic oligonucleotide
gaccgaauauuggccuccu

SEQ ID NO: 134980 - RNA, 19 nt, Artificial Sequence
  Description of Artificial Sequence: Synthetic oligonucleotide
agccggaugucagcuggua

SEQ ID NO: 134981 - RNA, 19 nt, Artificial Sequence
  Description of Artificial Sequence: Synthetic oligonucleotide
accugcuugugcacauaua

SEQ ID NO: 134982 - RNA, 19 nt, Artificial Sequence
  Description of Artificial Sequence: Synthetic oligonucleotide
cauguagugugacgauguu

SEQ ID NO: 134983 - RNA, 19 nt, Artificial Sequence
  Description of Artificial Sequence: Synthetic oligonucleotide
ggcugagagugggacuuca

SEQ ID NO: 134984 - RNA, 19 nt, Artificial Sequence
  Description of Artificial Sequence: Synthetic oligonucleotide
  modified_base (4)..(4): a, c, u, g, unknown or other
ggcncgcgaguaaccucag

SEQ ID NO: 134985 - RNA, 19 nt, Artificial Sequence
  Description of Artificial Sequence: Synthetic oligonucleotide
gcgccgucgcuaucaaguc

SEQ ID NO: 134986 - RNA, 19 nt, Artificial Sequence
  Description of Artificial Sequence: Synthetic oligonucleotide
gucuagugauggucaggau

SEQ ID NO: 134987 - RNA, 19 nt, Artificial Sequence
  Description of Artificial Sequence: Synthetic oligonucleotide
ccguguggauaaugucaug

SEQ ID NO: 134988 - RNA, 19 nt, Artificial Sequence
  Description of Artificial Sequence: Synthetic oligonucleotide
gguagcccucaggcagccg

SEQ ID NO: 134989 - RNA, 19 nt, Artificial Sequence
  Description of Artificial Sequence: Synthetic oligonucleotide
cgucgcuaucaagucgagg

SEQ ID NO: 134990 - RNA, 19 nt, Artificial Sequence
  Description of Artificial Sequence: Synthetic oligonucleotide
cauccauccaggggacugu

SEQ ID NO: 134991 - RNA, 19 nt, Artificial Sequence
  Description of Artificial Sequence: Synthetic oligonucleotide
acggcggcucgagacucaa

SEQ ID NO: 134992 - RNA, 19 nt, Artificial Sequence
  Description of Artificial Sequence: Synthetic oligonucleotide
cagggacacuucccggaua

SEQ ID NO: 134993 - RNA, 19 nt, Artificial Sequence
  Description of Artificial Sequence: Synthetic oligonucleotide
aggcggcggcggcggcggc

SEQ ID NO: 134994 - RNA, 19 nt, Artificial Sequence
  Description of Artificial Sequence: Synthetic oligonucleotide
ccgucgcuaucaagucgag

SEQ ID NO: 134995 - RNA, 19 nt, Artificial Sequence
  Description of Artificial Sequence: Synthetic oligonucleotide
gguguucacggcggcucga

SEQ ID NO: 134996 - RNA, 19 nt, Artificial Sequence
  Description of Artificial Sequence: Synthetic oligonucleotide
  modified_base (3)..(3): a, c, u, g, unknown or other
gcncgcgaguaaccucaga

SEQ ID NO: 134997 - RNA, 19 nt, Artificial Sequence
  Description of Artificial Sequence: Synthetic oligonucleotide
cugguagcgacaggcguuu

SEQ ID NO: 134998 - RNA, 19 nt, Artificial Sequence
  Description of Artificial Sequence: Synthetic oligonucleotide
cuaucaagucgaggugcau

SEQ ID NO: 134999 - RNA, 19 nt, Artificial Sequence
  Description of Artificial Sequence: Synthetic oligonucleotide
ggggccaaccagucuguau

SEQ ID NO: 135000 - RNA, 19 nt, Artificial Sequence
  Description of Artificial Sequence: Synthetic oligonucleotide
gccauaggguagugguccu

SEQ ID NO: 135001 - RNA, 19 nt, Artificial Sequence
  Description of Artificial Sequence: Synthetic oligonucleotide
aggggccaaccagucugua

SEQ ID NO: 135002 - RNA, 19 nt, Artificial Sequence
  Description of Artificial Sequence: Synthetic oligonucleotide
gcggcggcggcggcggcgg

SEQ ID NO: 135003 - RNA, 19 nt, Artificial Sequence
  Description of Artificial Sequence: Synthetic oligonucleotide
cccagggauugggauauaa

SEQ ID NO: 135004 - RNA, 19 nt, Artificial Sequence
  Description of Artificial Sequence: Synthetic oligonucleotide
ggcggcggcggcggcggcg

SEQ ID NO: 135005 - RNA, 19 nt, Artificial Sequence
  Description of Artificial Sequence: Synthetic oligonucleotide
gcgcaugcguacucucacu

SEQ ID NO: 135006 - RNA, 19 nt, Artificial Sequence
  Description of Artificial Sequence: Synthetic oligonucleotide
gugcucgcaagcgcccgcu

SEQ ID NO: 135007 - RNA, 19 nt, Artificial Sequence
  Description of Artificial Sequence: Synthetic oligonucleotide
gccagugguuggguguuua

SEQ ID NO: 135008 - RNA, 19 nt, Artificial Sequence
  Description of Artificial Sequence: Synthetic oligonucleotide
gcaacacgggaaggggccu

SEQ ID NO: 135009 - RNA, 19 nt, Artificial Sequence
  Description of Artificial Sequence: Synthetic oligonucleotide
gccuagccuuaguguggga

SEQ ID NO: 135010 - RNA, 19 nt, Artificial Sequence
  Description of Artificial Sequence: Synthetic oligonucleotide
ccgcucagccggccaugag

SEQ ID NO: 135011 - RNA, 19 nt, Artificial Sequence
  Description of Artificial Sequence: Synthetic oligonucleotide
gcggaggcgccggcuaaga

SEQ ID NO: 135012 - RNA, 19 nt, Artificial Sequence
  Description of Artificial Sequence: Synthetic oligonucleotide
gcggcggcggcggcggcug

SEQ ID NO: 135013 - RNA, 19 nt, Artificial Sequence
  Description of Artificial Sequence: Synthetic oligonucleotide
ccccucggagugucauuga

SEQ ID NO: 135014 - RNA, 19 nt, Artificial Sequence
  Description of Artificial Sequence: Synthetic oligonucleotide
ccacuucauuggaguaugu

SEQ ID NO: 135015 - RNA, 19 nt, Artificial Sequence
  Description of Artificial Sequence: Synthetic oligonucleotide
cgauugcgacccucaaacu

SEQ ID NO: 135016 - RNA, 19 nt, Artificial Sequence
  Description of Artificial Sequence: Synthetic oligonucleotide
aggcgccggcuaagaggcu

SEQ ID NO: 135017 - RNA, 19 nt, Artificial Sequence
  Description of Artificial Sequence: Synthetic oligonucleotide
ggaccccguccagaucgaa

SEQ ID NO: 135018 - RNA, 19 nt, Artificial Sequence
  Description of Artificial Sequence: Synthetic oligonucleotide
cgccggcaacuaccaagac

SEQ ID NO: 135019 - RNA, 19 nt, Artificial Sequence
  Description of Artificial Sequence: Synthetic oligonucleotide
cugcccugugaggggugua

SEQ ID NO: 135020 - RNA, 19 nt, Artificial Sequence
  Description of Artificial Sequence: Synthetic oligonucleotide
cggcaacuaccaagacaga

SEQ ID NO: 135021 - RNA, 19 nt, Artificial Sequence
  Description of Artificial Sequence: Synthetic oligonucleotide
ggcggcggcggcggcggcu

SEQ ID NO: 135022 - RNA, 19 nt, Artificial Sequence
  Description of Artificial Sequence: Synthetic oligonucleotide
cggcggcggcggcggcggc

SEQ ID NO: 135023 - RNA, 19 nt, Artificial Sequence
  Description of Artificial Sequence: Synthetic oligonucleotide
  modified_base (1)..(1): a, c, u, g, unknown or other
ncgcgaguaaccucagagc

SEQ ID NO: 135024 - RNA, 19 nt, Artificial Sequence
  Description of Artificial Sequence: Synthetic oligonucleotide
aauucuuagacguuaacuc

SEQ ID NO: 135025 - RNA, 19 nt, Artificial Sequence
  Description of Artificial Sequence: Synthetic oligonucleotide
aauugcauggcuuugagug

SEQ ID NO: 135026 - RNA, 19 nt, Artificial Sequence
  Description of Artificial Sequence: Synthetic oligonucleotide
uuuaaggugccuauguugg

SEQ ID NO: 135027 - RNA, 19 nt, Artificial Sequence
  Description of Artificial Sequence: Synthetic oligonucleotide
uauaaguuauuucugaggu

SEQ ID NO: 135028 - RNA, 19 nt, Artificial Sequence
  Description of Artificial Sequence: Synthetic oligonucleotide
aguaaggagcauuagaauc

SEQ ID NO: 135029 - RNA, 19 nt, Artificial Sequence
  Description of Artificial Sequence: Synthetic oligonucleotide
aauaguaaggagcauuaga

SEQ ID NO: 135030 - RNA, 19 nt, Artificial Sequence
  Description of Artificial Sequence: Synthetic oligonucleotide
acaacaugcuaguagggcc

SEQ ID NO: 135031 - RNA, 19 nt, Artificial Sequence
  Description of Artificial Sequence: Synthetic oligonucleotide
ucuaaugcggaauucuuag

SEQ ID NO: 135032 - RNA, 19 nt, Artificial Sequence
  Description of Artificial Sequence: Synthetic oligonucleotide
agcauuagaauccuauagg

SEQ ID NO: 135033 - RNA, 19 nt, Artificial Sequence
  Description of Artificial Sequence: Synthetic oligonucleotide
ucuaucauuagcugcugcg

SEQ ID NO: 135034 - RNA, 19 nt, Artificial Sequence
  Description of Artificial Sequence: Synthetic oligonucleotide
uggaauauccaagauaaag

SEQ ID NO: 135035 - RNA, 19 nt, Artificial Sequence
  Description of Artificial Sequence: Synthetic oligonucleotide
uugcauaucauucauggaa

SEQ ID NO: 135036 - RNA, 19 nt, Artificial Sequence
  Description of Artificial Sequence: Synthetic oligonucleotide
uaguuacacauccaagacg

SEQ ID NO: 135037 - RNA, 19 nt, Artificial Sequence
  Description of Artificial Sequence: Synthetic oligonucleotide
ugaagaaacguacgccugg

SEQ ID NO: 135038 - RNA, 19 nt, Artificial Sequence
  Description of Artificial Sequence: Synthetic oligonucleotide
aauaaugugucagucacaa

SEQ ID NO: 135039 - RNA, 19 nt, Artificial Sequence
  Description of Artificial Sequence: Synthetic oligonucleotide
aaacauuaucugcacuuag

SEQ ID NO: 135040 - RNA, 19 nt, Artificial Sequence
  Description of Artificial Sequence: Synthetic oligonucleotide
ucguuguucaagaauauaa

SEQ ID NO: 135041 - RNA, 19 nt, Artificial Sequence
  Description of Artificial Sequence: Synthetic oligonucleotide
uaaugcggaauucuuagac

SEQ ID NO: 135042 - RNA, 19 nt, Artificial Sequence
  Description of Artificial Sequence: Synthetic oligonucleotide
agaaacguacgccuggauc

SEQ ID NO: 135043 - RNA, 19 nt, Artificial Sequence
  Description of Artificial Sequence: Synthetic oligonucleotide
gaaacguacgccuggauca

SEQ ID NO: 135044 - RNA, 19 nt, Artificial Sequence
  Description of Artificial Sequence: Synthetic oligonucleotide
ugggaugccguguaugucg

SEQ ID NO: 135045 - RNA, 19 nt, Artificial Sequence
  Description of Artificial Sequence: Synthetic oligonucleotide
uuugcaagaucaugucugg

SEQ ID NO: 135046 - RNA, 19 nt, Artificial Sequence
  Description of Artificial Sequence: Synthetic oligonucleotide
caguugauauucuaaugcg

SEQ ID NO: 135047 - RNA, 19 nt, Artificial Sequence
  Description of Artificial Sequence: Synthetic oligonucleotide
ucaaugguacuucaggaaa

SEQ ID NO: 135048 - RNA, 19 nt, Artificial Sequence
  Description of Artificial Sequence: Synthetic oligonucleotide
ucuagugauccucucauaa

SEQ ID NO: 135049 - RNA, 19 nt, Artificial Sequence
  Description of Artificial Sequence: Synthetic oligonucleotide
ucguguaaaacccaugcuc

SEQ ID NO: 135050 - RNA, 19 nt, Artificial Sequence
  Description of Artificial Sequence: Synthetic oligonucleotide
ucggcaucaaucccgaagc

SEQ ID NO: 135051 - RNA, 19 nt, Artificial Sequence
  Description of Artificial Sequence: Synthetic oligonucleotide
auuuauucaagaucucaca

SEQ ID NO: 135052 - RNA, 19 nt, Artificial Sequence
  Description of Artificial Sequence: Synthetic oligonucleotide
cuucguguaaaacccaugc

SEQ ID NO: 135053 - RNA, 19 nt, Artificial Sequence
  Description of Artificial Sequence: Synthetic oligonucleotide
uccucuaaggaugagacgu

SEQ ID NO: 135054 - RNA, 19 nt, Artificial Sequence
  Description of Artificial Sequence: Synthetic oligonucleotide
ugcuugccaggucagaggg

SEQ ID NO: 135055 - RNA, 19 nt, Artificial Sequence
  Description of Artificial Sequence: Synthetic oligonucleotide
gaauccuauaggcuguugc

SEQ ID NO: 135056 - RNA, 19 nt, Artificial Sequence
  Description of Artificial Sequence: Synthetic oligonucleotide
gagaacuugaaaucgaucu

SEQ ID NO: 135057 - RNA, 19 nt, Artificial Sequence
  Description of Artificial Sequence: Synthetic oligonucleotide
ugucgcuucugacagagcu

SEQ ID NO: 135058 - RNA, 19 nt, Artificial Sequence
  Description of Artificial Sequence: Synthetic oligonucleotide
auuguaguuacacauccaa

SEQ ID NO: 135059 - RNA, 19 nt, Artificial Sequence
  Description of Artificial Sequence: Synthetic oligonucleotide
uaaagauuacacugcagaa

SEQ ID NO: 135060 - RNA, 19 nt, Artificial Sequence
  Description of Artificial Sequence: Synthetic oligonucleotide
ucggauuugcugaauguug

SEQ ID NO: 135061 - RNA, 19 nt, Artificial Sequence
  Description of Artificial Sequence: Synthetic oligonucleotide
agcucaccgacguuguugc

SEQ ID NO: 135062 - RNA, 19 nt, Artificial Sequence
  Description of Artificial Sequence: Synthetic oligonucleotide
aggucagugggaucaaugg

SEQ ID NO: 135063 - RNA, 19 nt, Artificial Sequence
  Description of Artificial Sequence: Synthetic oligonucleotide
uauacucaaggugagacuc

SEQ ID NO: 135064 - RNA, 19 nt, Artificial Sequence
  Description of Artificial Sequence: Synthetic oligonucleotide
gcuaguagggccucgaagg

SEQ ID NO: 135065 - RNA, 19 nt, Artificial Sequence
  Description of Artificial Sequence: Synthetic oligonucleotide
aaagauuacacugcagaaa

SEQ ID NO: 135066 - RNA, 19 nt, Artificial Sequence
  Description of Artificial Sequence: Synthetic oligonucleotide
uuuacugguaaauucucua

SEQ ID NO: 135067 - RNA, 19 nt, Artificial Sequence
  Description of Artificial Sequence: Synthetic oligonucleotide
aauugacuggagcuuagau

SEQ ID NO: 135068 - RNA, 19 nt, Artificial Sequence
  Description of Artificial Sequence: Synthetic oligonucleotide
caggcuacuuuucagagug

SEQ ID NO: 135069 - RNA, 19 nt, Artificial Sequence
  Description of Artificial Sequence: Synthetic oligonucleotide
ggaucaaugguacuucagg

SEQ ID NO: 135070 - RNA, 19 nt, Artificial Sequence
  Description of Artificial Sequence: Synthetic oligonucleotide
ugcauaucauucauggaau

SEQ ID NO: 135071 - RNA, 19 nt, Artificial Sequence
  Description of Artificial Sequence: Synthetic oligonucleotide
guauuuuauagugggcugg

SEQ ID NO: 135072 - RNA, 19 nt, Artificial Sequence
  Description of Artificial Sequence: Synthetic oligonucleotide
aguugauauucuaaugcgg

SEQ ID NO: 135073 - RNA, 19 nt, Artificial Sequence
  Description of Artificial Sequence: Synthetic oligonucleotide
agcuaauuguuaccauucg

SEQ ID NO: 135074 - RNA, 19 nt, Artificial Sequence
  Description of Artificial Sequence: Synthetic oligonucleotide
uuuugaguaaaggaauuuc

SEQ ID NO: 135075 - RNA, 19 nt, Artificial Sequence
  Description of Artificial Sequence: Synthetic oligonucleotide
agaaccggacugcaugggc

SEQ ID NO: 135076 - RNA, 19 nt, Artificial Sequence
  Description of Artificial Sequence: Synthetic oligonucleotide
aggguuagcugguuuagag

SEQ ID NO: 135077 - RNA, 19 nt, Artificial Sequence
  Description of Artificial Sequence: Synthetic oligonucleotide
guaguuacacauccaagac

SEQ ID NO: 135078 - RNA, 19 nt, Artificial Sequence
  Description of Artificial Sequence: Synthetic oligonucleotide
uuagacguuaacucuuuaa

SEQ ID NO: 135079 - RNA, 19 nt, Artificial Sequence
  Description of Artificial Sequence: Synthetic oligonucleotide
auugccgagaucguuguuc

SEQ ID NO: 135080 - RNA, 19 nt, Artificial Sequence
  Description of Artificial Sequence: Synthetic oligonucleotide
uugaaaucgaucugaccac

SEQ ID NO: 135081 - RNA, 19 nt, Artificial Sequence
  Description of Artificial Sequence: Synthetic oligonucleotide
cuaggcuugcgcuggaggg

SEQ ID NO: 135082 - RNA, 19 nt, Artificial Sequence
  Description of Artificial Sequence: Synthetic oligonucleotide
agguauuuuauagugggcu

SEQ ID NO: 135083 - RNA, 19 nt, Artificial Sequence
  Description of Artificial Sequence: Synthetic oligonucleotide
augcggaauucuuagacgu

SEQ ID NO: 135084 - RNA, 19 nt, Artificial Sequence
  Description of Artificial Sequence: Synthetic oligonucleotide
ucuauuggcuccagcacgu

SEQ ID NO: 135085 - RNA, 19 nt, Artificial Sequence
  Description of Artificial Sequence: Synthetic oligonucleotide
auucgugcaauucuucccu

SEQ ID NO: 135086 - RNA, 19 nt, Artificial Sequence
  Description of Artificial Sequence: Synthetic oligonucleotide
cuuaucaguaaacacagcu

SEQ ID NO: 135087 - RNA, 19 nt, Artificial Sequence
  Description of Artificial Sequence: Synthetic oligonucleotide
ucauugugccuaucugagg

SEQ ID NO: 135088 - RNA, 19 nt, Artificial Sequence
  Description of Artificial Sequence: Synthetic oligonucleotide
ucuuucgaauaacuucaga

SEQ ID NO: 135089 - RNA, 19 nt, Artificial Sequence
  Description of Artificial Sequence: Synthetic oligonucleotide
uugagaacuugaaaucgau

SEQ ID NO: 135090 - RNA, 19 nt, Artificial Sequence
  Description of Artificial Sequence: Synthetic oligonucleotide
ugagaacuugaaaucgauc

SEQ ID NO: 135091 - RNA, 19 nt, Artificial Sequence
  Description of Artificial Sequence: Synthetic oligonucleotide
agggucaucaggucugaag

SEQ ID NO: 135092 - RNA, 19 nt, Artificial Sequence
  Description of Artificial Sequence: Synthetic oligonucleotide
ucccuuucagcucaccgac

SEQ ID NO: 135093 - RNA, 19 nt, Artificial Sequence
  Description of Artificial Sequence: Synthetic oligonucleotide
gucgauggcgcucagccgc

SEQ ID NO: 135094 - RNA, 19 nt, Artificial Sequence
  Description of Artificial Sequence: Synthetic oligonucleotide
uucccuuucagcucaccga

SEQ ID NO: 135095 - RNA, 19 nt, Artificial Sequence
  Description of Artificial Sequence: Synthetic oligonucleotide
aggaugagacgucccaguc

SEQ ID NO: 135096 - RNA, 19 nt, Artificial Sequence
  Description of Artificial Sequence: Synthetic oligonucleotide
uucguccuuagccccuucg

SEQ ID NO: 135097 - RNA, 19 nt, Artificial Sequence
  Description of Artificial Sequence: Synthetic oligonucleotide
uugccaugggccuagcuaa

SEQ ID NO: 135098 - RNA, 19 nt, Artificial Sequence
  Description of Artificial Sequence: Synthetic oligonucleotide
gaaccggacugcaugggcg

SEQ ID NO: 135099 - RNA, 19 nt, Artificial Sequence
  Description of Artificial Sequence: Synthetic oligonucleotide
uaguaaggagcauuagaau

SEQ ID NO: 135100 - RNA, 19 nt, Artificial Sequence
  Description of Artificial Sequence: Synthetic oligonucleotide
uguuaccauucgaacgggc

SEQ ID NO: 135101 - RNA, 19 nt, Artificial Sequence
  Description of Artificial Sequence: Synthetic oligonucleotide
auugugccuaucugagguc

SEQ ID NO: 135102 - RNA, 19 nt, Artificial Sequence
  Description of Artificial Sequence: Synthetic oligonucleotide
agaucguuguucaagaaua

SEQ ID NO: 135103 - RNA, 19 nt, Artificial Sequence
  Description of Artificial Sequence: Synthetic oligonucleotide
uuuacacggcugcaggguc

SEQ ID NO: 135104 - RNA, 19 nt, Artificial Sequence
  Description of Artificial Sequence: Synthetic oligonucleotide
uuagccccuucgaggaggg

SEQ ID NO: 135105 - RNA, 19 nt, Artificial Sequence
  Description of Artificial Sequence: Synthetic oligonucleotide
guauuauacucaaggugag

SEQ ID NO: 135106 - RNA, 19 nt, Artificial Sequence
  Description of Artificial Sequence: Synthetic oligonucleotide
cacaacaugcuaguagggc

SEQ ID NO: 135107 - RNA, 19 nt, Artificial Sequence
  Description of Artificial Sequence: Synthetic oligonucleotide
ucucggauuugcugaaugu

SEQ ID NO: 135108 - RNA, 19 nt, Artificial Sequence
  Description of Artificial Sequence: Synthetic oligonucleotide
agucuacccggcccgggcc

SEQ ID NO: 135109 - RNA, 19 nt, Artificial Sequence
  Description of Artificial Sequence: Synthetic oligonucleotide
cagggauaccuucuccucg

SEQ ID NO: 135110 - RNA, 19 nt, Artificial Sequence
  Description of Artificial Sequence: Synthetic oligonucleotide
ucaccgacguuguugcaug

SEQ ID NO: 135111 - RNA, 19 nt, Artificial Sequence
  Description of Artificial Sequence: Synthetic oligonucleotide
guguagucuacccggcccg

SEQ ID NO: 135112 - RNA, 19 nt, Artificial Sequence
  Description of Artificial Sequence: Synthetic oligonucleotide
ugaccacuugcuugccugg

SEQ ID NO: 135113 - RNA, 19 nt, Artificial Sequence
  Description of Artificial Sequence: Synthetic oligonucleotide
aaauaaugugucagucaca

SEQ ID NO: 135114 - RNA, 19 nt, Artificial Sequence
  Description of Artificial Sequence: Synthetic oligonucleotide
uugcaugguuuacugguaa

SEQ ID NO: 135115 - RNA, 19 nt, Artificial Sequence
  Description of Artificial Sequence: Synthetic oligonucleotide
uaaggugccuauguuggac

SEQ ID NO: 135116 - RNA, 19 nt, Artificial Sequence
  Description of Artificial Sequence: Synthetic oligonucleotide
cauuaucuacuucugcaca

SEQ ID NO: 135117 - RNA, 19 nt, Artificial Sequence
  Description of Artificial Sequence: Synthetic oligonucleotide
aucuuaauggagguuccug

SEQ ID NO: 135118 - RNA, 19 nt, Artificial Sequence
  Description of Artificial Sequence: Synthetic oligonucleotide
auauuggacuucuguauuu

SEQ ID NO: 135119 - RNA, 19 nt, Artificial Sequence
  Description of Artificial Sequence: Synthetic oligonucleotide
ugaaaucgaucugaccacu

SEQ ID NO: 135120 - RNA, 19 nt, Artificial Sequence
  Description of Artificial Sequence: Synthetic oligonucleotide
aggucugaagaaacguacg

SEQ ID NO: 135121 - RNA, 19 nt, Artificial Sequence
  Description of Artificial Sequence: Synthetic oligonucleotide
uguuaagguggagaauagu

SEQ ID NO: 135122 - RNA, 19 nt, Artificial Sequence
  Description of Artificial Sequence: Synthetic oligonucleotide
aacaugcuaguagggccuc

SEQ ID NO: 135123 - RNA, 19 nt, Artificial Sequence
  Description of Artificial Sequence: Synthetic oligonucleotide
ucugcacacuugaauucgu

SEQ ID NO: 135124 - RNA, 19 nt, Artificial Sequence
  Description of Artificial Sequence: Synthetic oligonucleotide
uuaaggugccuauguugga

SEQ ID NO: 135125 - RNA, 19 nt, Artificial Sequence
  Description of Artificial Sequence: Synthetic oligonucleotide
acacacacgugugacucgg

SEQ ID NO: 135126 - RNA, 19 nt, Artificial Sequence
  Description of Artificial Sequence: Synthetic oligonucleotide
gugacuagguuacucccac

SEQ ID NO: 135127 - RNA, 19 nt, Artificial Sequence
  Description of Artificial Sequence: Synthetic oligonucleotide
uugugccuaucugagguca

SEQ ID NO: 135128 - RNA, 19 nt, Artificial Sequence
  Description of Artificial Sequence: Synthetic oligonucleotide
guaucuuaauggagguucc

SEQ ID NO: 135129 - RNA, 19 nt, Artificial Sequence
  Description of Artificial Sequence: Synthetic oligonucleotide
auccaagauaaagauuaca

SEQ ID NO: 135130 - RNA, 19 nt, Artificial Sequence
  Description of Artificial Sequence: Synthetic oligonucleotide
ugcgacgagaaccccugcu

SEQ ID NO: 135131 - RNA, 19 nt, Artificial Sequence
  Description of Artificial Sequence: Synthetic oligonucleotide
ggacuugaucugcauauug

SEQ ID NO: 135132 - RNA, 19 nt, Artificial Sequence
  Description of Artificial Sequence: Synthetic oligonucleotide
uagaguccauugcuugcca

SEQ ID NO: 135133 - RNA, 19 nt, Artificial Sequence
  Description of Artificial Sequence: Synthetic oligonucleotide
cauugugccuaucugaggu

SEQ ID NO: 135134 - RNA, 19 nt, Artificial Sequence
  Description of Artificial Sequence: Synthetic oligonucleotide
uuccuucguguaaaaccca

SEQ ID NO: 135135 - RNA, 19 nt, Artificial Sequence
  Description of Artificial Sequence: Synthetic oligonucleotide
uagucuacccggcccgggc

SEQ ID NO: 135136 - RNA, 19 nt, Artificial Sequence
  Description of Artificial Sequence: Synthetic oligonucleotide
cauuagaauccuauaggcu

SEQ ID NO: 135137 - RNA, 19 nt, Artificial Sequence
  Description of Artificial Sequence: Synthetic oligonucleotide
gacguuguugcaugguuua

SEQ ID NO: 135138 - RNA, 19 nt, Artificial Sequence
  Description of Artificial Sequence: Synthetic oligonucleotide
guugcauaucauucaugga

SEQ ID NO: 135139 - RNA, 19 nt, Artificial Sequence
  Description of Artificial Sequence: Synthetic oligonucleotide
gaugccguguaugucggca

SEQ ID NO: 135140 - RNA, 19 nt, Artificial Sequence
  Description of Artificial Sequence: Synthetic oligonucleotide
ugguaauagcuggcuuugg

SEQ ID NO: 135141 - RNA, 19 nt, Artificial Sequence
  Description of Artificial Sequence: Synthetic oligonucleotide
aacgggcuuccuuguuaag

SEQ ID NO: 135142 - RNA, 19 nt, Artificial Sequence
  Description of Artificial Sequence: Synthetic oligonucleotide
uaccauucgaacgggcuuc

SEQ ID NO: 135143 - RNA, 19 nt, Artificial Sequence
  Description of Artificial Sequence: Synthetic oligonucleotide
gauucucggauuugcugaa

SEQ ID NO: 135144 - RNA, 19 nt, Artificial Sequence
  Description of Artificial Sequence: Synthetic oligonucleotide
gagaucguuguucaagaau

SEQ ID NO: 135145 - RNA, 19 nt, Artificial Sequence
  Description of Artificial Sequence: Synthetic oligonucleotide
uccagcacgugcgacgaga

SEQ ID NO: 135146 - RNA, 19 nt, Artificial Sequence
  Description of Artificial Sequence: Synthetic oligonucleotide
gaagaaacguacgccugga

SEQ ID NO: 135147 - RNA, 19 nt, Artificial Sequence
  Description of Artificial Sequence: Synthetic oligonucleotide
aguccauugcuugccaggu

SEQ ID NO: 135148 - RNA, 19 nt, Artificial Sequence
  Description of Artificial Sequence: Synthetic oligonucleotide
agugugggucacuucucgu

SEQ ID NO: 135149 - RNA, 19 nt, Artificial Sequence
  Description of Artificial Sequence: Synthetic oligonucleotide
uucgaacgggcuuccuugu

SEQ ID NO: 135150 - RNA, 19 nt, Artificial Sequence
  Description of Artificial Sequence: Synthetic oligonucleotide
agggcaugcuugcaagcca

SEQ ID NO: 135151 - RNA, 19 nt, Artificial Sequence
  Description of Artificial Sequence: Synthetic oligonucleotide
cauuguaguuacacaucca

SEQ ID NO: 135152 - RNA, 19 nt, Artificial Sequence
  Description of Artificial Sequence: Synthetic oligonucleotide
cuaaugcggaauucuuaga

SEQ ID NO: 135153 - RNA, 19 nt, Artificial Sequence
  Description of Artificial Sequence: Synthetic oligonucleotide
ugagaccuggugagcugca

SEQ ID NO: 135154 - RNA, 19 nt, Artificial Sequence
  Description of Artificial Sequence: Synthetic oligonucleotide
acguuguugcaugguuuac

SEQ ID NO: 135155 - RNA, 19 nt, Artificial Sequence
  Description of Artificial Sequence: Synthetic oligonucleotide
cacgugugacucgggaacg

SEQ ID NO: 135156 - RNA, 19 nt, Artificial Sequence
  Description of Artificial Sequence: Synthetic oligonucleotide
aucuuucgaauaacuucag

SEQ ID NO: 135157 - RNA, 19 nt, Artificial Sequence
  Description of Artificial Sequence: Synthetic oligonucleotide
augguacuucaggaaaugu

SEQ ID NO: 135158 - RNA, 19 nt, Artificial Sequence
  Description of Artificial Sequence: Synthetic oligonucleotide
guccgugucgcuucugaca

SEQ ID NO: 135159 - RNA, 19 nt, Artificial Sequence
  Description of Artificial Sequence: Synthetic oligonucleotide
acucgggaacggcuggucu

SEQ ID NO: 135160 - RNA, 19 nt, Artificial Sequence
  Description of Artificial Sequence: Synthetic oligonucleotide
augggaugccguguauguc

SEQ ID NO: 135161 - RNA, 19 nt, Artificial Sequence
  Description of Artificial Sequence: Synthetic oligonucleotide
uuggagaaccggacugcau

SEQ ID NO: 135162 - RNA, 19 nt, Artificial Sequence
  Description of Artificial Sequence: Synthetic oligonucleotide
ucgcggccugaacuggaag

SEQ ID NO: 135163 - RNA, 19 nt, Artificial Sequence
  Description of Artificial Sequence: Synthetic oligonucleotide
ugcggaauucuuagacguu

SEQ ID NO: 135164 - RNA, 19 nt, Artificial Sequence
  Description of Artificial Sequence: Synthetic oligonucleotide
ugacuagguuacucccacu

SEQ ID NO: 135165 - RNA, 19 nt, Artificial Sequence
  Description of Artificial Sequence: Synthetic oligonucleotide
cuagcuaauuguuaccauu

SEQ ID NO: 135166 - RNA, 19 nt, Artificial Sequence
  Description of Artificial Sequence: Synthetic oligonucleotide
gcugcguggacagccaccg

SEQ ID NO: 135167 - RNA, 19 nt, Artificial Sequence
  Description of Artificial Sequence: Synthetic oligonucleotide
uucgugcaauucuucccuc

SEQ ID NO: 135168 - RNA, 19 nt, Artificial Sequence
  Description of Artificial Sequence: Synthetic oligonucleotide
gccgagaucguuguucaag

SEQ ID NO: 135169 - RNA, 19 nt, Artificial Sequence
  Description of Artificial Sequence: Synthetic oligonucleotide
gguacuucaggaaauguau

SEQ ID NO: 135170 - RNA, 19 nt, Artificial Sequence
  Description of Artificial Sequence: Synthetic oligonucleotide
caacaugcuaguagggccu

SEQ ID NO: 135171 - RNA, 19 nt, Artificial Sequence
  Description of Artificial Sequence: Synthetic oligonucleotide
acgugugacucgggaacgg

SEQ ID NO: 135172 - RNA, 19 nt, Artificial Sequence
  Description of Artificial Sequence: Synthetic oligonucleotide
aucguuguucaagaauaua

SEQ ID NO: 135173 - RNA, 19 nt, Artificial Sequence
  Description of Artificial Sequence: Synthetic oligonucleotide
ggaugagacgucccaguca

SEQ ID NO: 135174 - RNA, 19 nt, Artificial Sequence
  Description of Artificial Sequence: Synthetic oligonucleotide
augggcguacugggcagac

SEQ ID NO: 135175 - RNA, 19 nt, Artificial Sequence
  Description of Artificial Sequence: Synthetic oligonucleotide
acgagaaccccugcucaug

SEQ ID NO: 135176 - RNA, 19 nt, Artificial Sequence
  Description of Artificial Sequence: Synthetic oligonucleotide
gcauauuggacuucuguau

SEQ ID NO: 135177 - RNA, 19 nt, Artificial Sequence
  Description of Artificial Sequence: Synthetic oligonucleotide
acaugcuaguagggccucg

SEQ ID NO: 135178 - RNA, 19 nt, Artificial Sequence
  Description of Artificial Sequence: Synthetic oligonucleotide
gggaucaaugguacuucag

SEQ ID NO: 135179 - RNA, 19 nt, Artificial Sequence
  Description of Artificial Sequence: Synthetic oligonucleotide
caccgacguuguugcaugg

SEQ ID NO: 135180 - RNA, 19 nt, Artificial Sequence
  Description of Artificial Sequence: Synthetic oligonucleotide
guagucuacccggcccggg

SEQ ID NO: 135181 - RNA, 19 nt, Artificial Sequence
  Description of Artificial Sequence: Synthetic oligonucleotide
cuucggagcuucucuaugu

SEQ ID NO: 135182 - RNA, 19 nt, Artificial Sequence
  Description of Artificial Sequence: Synthetic oligonucleotide
gacguuggauguggcuuug

SEQ ID NO: 135183 - RNA, 19 nt, Artificial Sequence
  Description of Artificial Sequence: Synthetic oligonucleotide
augccguguaugucggcau

SEQ ID NO: 135184 - RNA, 19 nt, Artificial Sequence
  Description of Artificial Sequence: Synthetic oligonucleotide
cuaucauuagcugcugcgu

SEQ ID NO: 135185 - RNA, 19 nt, Artificial Sequence
  Description of Artificial Sequence: Synthetic oligonucleotide
cacaccccucgugagccgg

SEQ ID NO: 135186 - RNA, 19 nt, Artificial Sequence
  Description of Artificial Sequence: Synthetic oligonucleotide
ccucgugagccggugaagg

SEQ ID NO: 135187 - RNA, 19 nt, Artificial Sequence
  Description of Artificial Sequence: Synthetic oligonucleotide
gggaugccguguaugucgg

SEQ ID NO: 135188 - RNA, 19 nt, Artificial Sequence
  Description of Artificial Sequence: Synthetic oligonucleotide
ucgaacgggcuuccuuguu

SEQ ID NO: 135189 - RNA, 19 nt, Artificial Sequence
  Description of Artificial Sequence: Synthetic oligonucleotide
ccuucguguaaaacccaug

SEQ ID NO: 135190 - RNA, 19 nt, Artificial Sequence
  Description of Artificial Sequence: Synthetic oligonucleotide
ugccaugggccuagcuaau

SEQ ID NO: 135191 - RNA, 19 nt, Artificial Sequence
  Description of Artificial Sequence: Synthetic oligonucleotide
cuugcgcuggaggggcggg

SEQ ID NO: 135192 - RNA, 19 nt, Artificial Sequence
  Description of Artificial Sequence: Synthetic oligonucleotide
ccagucgcggccugaacug

SEQ ID NO: 135193 - RNA, 19 nt, Artificial Sequence
  Description of Artificial Sequence: Synthetic oligonucleotide
ucuccagucgcggccugaa

SEQ ID NO: 135194 - RNA, 19 nt, Artificial Sequence
  Description of Artificial Sequence: Synthetic oligonucleotide
gcuugcaagccaguccgcc

SEQ ID NO: 135195 - RNA, 19 nt, Artificial Sequence
  Description of Artificial Sequence: Synthetic oligonucleotide
gcacgugcgacgagaaccc

SEQ ID NO: 135196 - RNA, 19 nt, Artificial Sequence
  Description of Artificial Sequence: Synthetic oligonucleotide
cagucgcggccugaacugg

SEQ ID NO: 135197 - RNA, 19 nt, Artificial Sequence
  Description of Artificial Sequence: Synthetic oligonucleotide
caugcuaguagggccucga

SEQ ID NO: 135198 - RNA, 19 nt, Artificial Sequence
  Description of Artificial Sequence: Synthetic oligonucleotide
gcgacgagaaccccugcuc

SEQ ID NO: 135199 - RNA, 19 nt, Artificial Sequence
  Description of Artificial Sequence: Synthetic oligonucleotide
cuuagacguuaacucuuua

SEQ ID NO: 135200 - RNA, 19 nt, Artificial Sequence
  Description of Artificial Sequence: Synthetic oligonucleotide
cuaguagggccucgaaggu

SEQ ID NO: 135201 - RNA, 19 nt, Artificial Sequence
  Description of Artificial Sequence: Synthetic oligonucleotide
ccgagaucguuguucaaga

SEQ ID NO: 135202 - RNA, 19 nt, Artificial Sequence
  Description of Artificial Sequence: Synthetic oligonucleotide
ucgggaacggcuggucuuu

SEQ ID NO: 135203 - RNA, 19 nt, Artificial Sequence
  Description of Artificial Sequence: Synthetic oligonucleotide
gacgagaaccccugcucau

SEQ ID NO: 135204 - RNA, 19 nt, Artificial Sequence
  Description of Artificial Sequence: Synthetic oligonucleotide
acgugcgacgagaaccccu

SEQ ID NO: 135205 - RNA, 19 nt, Artificial Sequence
  Description of Artificial Sequence: Synthetic oligonucleotide
ggggaaacauccgaguccu

SEQ ID NO: 135206 - RNA, 19 nt, Artificial Sequence
  Description of Artificial Sequence: Synthetic oligonucleotide
cagcugguguucaagggau

SEQ ID NO: 135207 - RNA, 19 nt, Artificial Sequence
  Description of Artificial Sequence: Synthetic oligonucleotide
cugucggucugagccuuug

SEQ ID NO: 135208 - RNA, 19 nt, Artificial Sequence
  Description of Artificial Sequence: Synthetic oligonucleotide
gggagggucauugugccua

SEQ ID NO: 135209 - RNA, 19 nt, Artificial Sequence
  Description of Artificial Sequence: Synthetic oligonucleotide
cgugcgacgagaaccccug

SEQ ID NO: 135210 - RNA, 19 nt, Artificial Sequence
  Description of Artificial Sequence: Synthetic oligonucleotide
gccgccacaccccucguga

SEQ ID NO: 135211 - RNA, 19 nt, Artificial Sequence
  Description of Artificial Sequence: Synthetic oligonucleotide
gccgccuaggcuugcgcug

SEQ ID NO: 135212 - RNA, 19 nt, Artificial Sequence
  Description of Artificial Sequence: Synthetic oligonucleotide
caguccgccgccuaggcuu

SEQ ID NO: 135213 - RNA, 19 nt, Artificial Sequence
  Description of Artificial Sequence: Synthetic oligonucleotide
gcggaauucuuagacguua

SEQ ID NO: 135214 - RNA, 19 nt, Artificial Sequence
  Description of Artificial Sequence: Synthetic oligonucleotide
gugcgacgagaaccccugc

SEQ ID NO: 135215 - RNA, 19 nt, Artificial Sequence
  Description of Artificial Sequence: Synthetic oligonucleotide
cuccagucgcggccugaac

SEQ ID NO: 135216 - RNA, 19 nt, Artificial Sequence
  Description of Artificial Sequence: Synthetic oligonucleotide
accccucgugagccgguga

SEQ ID NO: 135217 - RNA, 19 nt, Artificial Sequence
  Description of Artificial Sequence: Synthetic oligonucleotide
cacgugcgacgagaacccc

SEQ ID NO: 135218 - RNA, 19 nt, Artificial Sequence
  Description of Artificial Sequence: Synthetic oligonucleotide
ugggcguacugggcagacu

SEQ ID NO: 135219 - RNA, 19 nt, Artificial Sequence
  Description of Artificial Sequence: Synthetic oligonucleotide
caucaaucccgaagcuccu

SEQ ID NO: 135220 - RNA, 19 nt, Artificial Sequence
  Description of Artificial Sequence: Synthetic oligonucleotide
ggcguacugggcagacucc

SEQ ID NO: 135221 - RNA, 19 nt, Artificial Sequence
  Description of Artificial Sequence: Synthetic oligonucleotide
ccucguugagaacuugaaa

SEQ ID NO: 135222 - RNA, 19 nt, Artificial Sequence
  Description of Artificial Sequence: Synthetic oligonucleotide
guucguuuucucguccuuu

SEQ ID NO: 135223 - RNA, 19 nt, Artificial Sequence
  Description of Artificial Sequence: Synthetic oligonucleotide
ggaugccguguaugucggc

SEQ ID NO: 135224 - RNA, 19 nt, Artificial Sequence
  Description of Artificial Sequence: Synthetic oligonucleotide
gcauugccgagaucguugu

SEQ ID NO: 135225 - RNA, 19 nt, Artificial Sequence
  Description of Artificial Sequence: Synthetic oligonucleotide
cucaccgacguuguugcau

SEQ ID NO: 135226 - RNA, 19 nt, Artificial Sequence
  Description of Artificial Sequence: Synthetic oligonucleotide
cgucgauggcgcucagccg

SEQ ID NO: 135227 - RNA, 19 nt, Artificial Sequence
  Description of Artificial Sequence: Synthetic oligonucleotide
ccgccuaggcuugcgcugg

SEQ ID NO: 135228 - RNA, 19 nt, Artificial Sequence
  Description of Artificial Sequence: Synthetic oligonucleotide
gagcauugccgagaucguu

SEQ ID NO: 135229 - RNA, 19 nt, Artificial Sequence
  Description of Artificial Sequence: Synthetic oligonucleotide
cucgggaacggcuggucuu

SEQ ID NO: 135230 - RNA, 19 nt, Artificial Sequence
  Description of Artificial Sequence: Synthetic oligonucleotide
cagccgccuccaguccacg

SEQ ID NO: 135231 - RNA, 19 nt, Artificial Sequence
  Description of Artificial Sequence: Synthetic oligonucleotide
ccacgcucuccagucgcgg

SEQ ID NO: 135232 - RNA, 19 nt, Artificial Sequence
  Description of Artificial Sequence: Synthetic oligonucleotide
agcugguguucaagggauu

SEQ ID NO: 135233 - RNA, 19 nt, Artificial Sequence
  Description of Artificial Sequence: Synthetic oligonucleotide
cgacgagaaccccugcuca

SEQ ID NO: 135234 - RNA, 19 nt, Artificial Sequence
  Description of Artificial Sequence: Synthetic oligonucleotide
ggcgacguuggauguggcu

SEQ ID NO: 135235 - RNA, 19 nt, Artificial Sequence
  Description of Artificial Sequence: Synthetic oligonucleotide
caccccucgugagccggug

SEQ ID NO: 135236 - RNA, 19 nt, Artificial Sequence
  Description of Artificial Sequence: Synthetic oligonucleotide
cgcggccugaacuggaaga

SEQ ID NO: 135237 - RNA, 19 nt, Artificial Sequence
  Description of Artificial Sequence: Synthetic oligonucleotide
ccacaccccucgugagccg

SEQ ID NO: 135238 - RNA, 19 nt, Artificial Sequence
  Description of Artificial Sequence: Synthetic oligonucleotide
cggaauucuuagacguuaa

SEQ ID NO: 135239 - RNA, 19 nt, Artificial Sequence
  Description of Artificial Sequence: Synthetic oligonucleotide
ccuagcuaauuguuaccau

SEQ ID NO: 135240 - RNA, 19 nt, Artificial Sequence
  Description of Artificial Sequence: Synthetic oligonucleotide
ccgccuccaguccacgcuc

SEQ ID NO: 135241 - RNA, 19 nt, Artificial Sequence
  Description of Artificial Sequence: Synthetic oligonucleotide
ggauaccuucuccucgauu

SEQ ID NO: 135242 - RNA, 19 nt, Artificial Sequence
  Description of Artificial Sequence: Synthetic oligonucleotide
cccuucgaggagggguugc

SEQ ID NO: 135243 - RNA, 19 nt, Artificial Sequence
  Description of Artificial Sequence: Synthetic oligonucleotide
ccagcacgugcgacgagaa

SEQ ID NO: 135244 - RNA, 19 nt, Artificial Sequence
  Description of Artificial Sequence: Synthetic oligonucleotide
acaccccucgugagccggu

SEQ ID NO: 135245 - RNA, 19 nt, Artificial Sequence
  Description of Artificial Sequence: Synthetic oligonucleotide
ggcuugcgcuggaggggcg

SEQ ID NO: 135246 - RNA, 19 nt, Artificial Sequence
  Description of Artificial Sequence: Synthetic oligonucleotide
cacaugggaugccguguau

SEQ ID NO: 135247 - RNA, 19 nt, Artificial Sequence
  Description of Artificial Sequence: Synthetic oligonucleotide
ccggacugcaugggcguac

SEQ ID NO: 135248 - RNA, 19 nt, Artificial Sequence
  Description of Artificial Sequence: Synthetic oligonucleotide
cacagugaccaggcuacuu

SEQ ID NO: 135249 - RNA, 19 nt, Artificial Sequence
  Description of Artificial Sequence: Synthetic oligonucleotide
gcucaccgacguuguugca

SEQ ID NO: 135250 - RNA, 19 nt, Artificial Sequence
  Description of Artificial Sequence: Synthetic oligonucleotide
ggagggucauugugccuau

SEQ ID NO: 135251 - RNA, 19 nt, Artificial Sequence
  Description of Artificial Sequence: Synthetic oligonucleotide
gcccgccaccuuguccacg

SEQ ID NO: 135252 - RNA, 19 nt, Artificial Sequence
  Description of Artificial Sequence: Synthetic oligonucleotide
ccgccgccuaggcuugcgc

SEQ ID NO: 135253 - RNA, 19 nt, Artificial Sequence
  Description of Artificial Sequence: Synthetic oligonucleotide
ccccucgugagccggugaa

SEQ ID NO: 135254 - RNA, 19 nt, Artificial Sequence
  Description of Artificial Sequence: Synthetic oligonucleotide
cugcggcggcggcggcggc

SEQ ID NO: 135255 - RNA, 19 nt, Artificial Sequence
  Description of Artificial Sequence: Synthetic oligonucleotide
ccccuucgaggagggguug

SEQ ID NO: 135256 - RNA, 19 nt, Artificial Sequence
  Description of Artificial Sequence: Synthetic oligonucleotide
ccguguaugucggcaucaa

SEQ ID NO: 135257 - RNA, 19 nt, Artificial Sequence
  Description of Artificial Sequence: Synthetic oligonucleotide
ccgugucgcuucugacaga

SEQ ID NO: 135258 - RNA, 19 nt, Artificial Sequence
  Description of Artificial Sequence: Synthetic oligonucleotide
gccccuucgaggagggguu

SEQ ID NO: 135259 - RNA, 19 nt, Artificial Sequence
  Description of Artificial Sequence: Synthetic oligonucleotide
cguccggccccucggggcu

SEQ ID NO: 135260 - RNA, 19 nt, Artificial Sequence
  Description of Artificial Sequence: Synthetic oligonucleotide
ccauucgaacgggcuuccu

SEQ ID NO: 135261 - RNA, 19 nt, Artificial Sequence
  Description of Artificial Sequence: Synthetic oligonucleotide
cggacugcaugggcguacu

SEQ ID NO: 135262 - RNA, 19 nt, Artificial Sequence
  Description of Artificial Sequence: Synthetic oligonucleotide
cgcucuccagucgcggccu

SEQ ID NO: 135263 - RNA, 19 nt, Artificial Sequence
  Description of Artificial Sequence: Synthetic oligonucleotide
aaauggauaaaaucaggcc

SEQ ID NO: 135264 - RNA, 19 nt, Artificial Sequence
  Description of Artificial Sequence: Synthetic oligonucleotide
aauugacucucacagaccc

SEQ ID NO: 135265 - RNA, 19 nt, Artificial Sequence
  Description of Artificial Sequence: Synthetic oligonucleotide
agaauuauuaagcuguagc

SEQ ID NO: 135266 - RNA, 19 nt, Artificial Sequence
  Description of Artificial Sequence: Synthetic oligonucleotide
aaaggcuagguauuuagcc

SEQ ID NO: 135267 - RNA, 19 nt, Artificial Sequence
  Description of Artificial Sequence: Synthetic oligonucleotide
aauucuaauaugcacugac

SEQ ID NO: 135268 - RNA, 19 nt, Artificial Sequence
  Description of Artificial Sequence: Synthetic oligonucleotide
ugaaugauaaauuaacccc

SEQ ID NO: 135269 - RNA, 19 nt, Artificial Sequence
  Description of Artificial Sequence: Synthetic oligonucleotide
aaaauggauaaaaucaggc

SEQ ID NO: 135270 - RNA, 19 nt, Artificial Sequence
  Description of Artificial Sequence: Synthetic oligonucleotide
aauggauaaaaucaggcca

SEQ ID NO: 135271 - RNA, 19 nt, Artificial Sequence
  Description of Artificial Sequence: Synthetic oligonucleotide
gaauuauuaagcuguagcg

SEQ ID NO: 135272 - RNA, 19 nt, Artificial Sequence
  Description of Artificial Sequence: Synthetic oligonucleotide
uuugugauggcuaagaaaa

SEQ ID NO: 135273 - RNA, 19 nt, Artificial Sequence
  Description of Artificial Sequence: Synthetic oligonucleotide
aacgugaagauacaucuac

SEQ ID NO: 135274 - RNA, 19 nt, Artificial Sequence
  Description of Artificial Sequence: Synthetic oligonucleotide
ucuacuuaaaugcagcuca

SEQ ID NO: 135275 - RNA, 19 nt, Artificial Sequence
  Description of Artificial Sequence: Synthetic oligonucleotide
aagauuaucauugaagugu

SEQ ID NO: 135276 - RNA, 19 nt, Artificial Sequence
  Description of Artificial Sequence: Synthetic oligonucleotide
aaguagaugcuccauuagc

SEQ ID NO: 135277 - RNA, 19 nt, Artificial Sequence
  Description of Artificial Sequence: Synthetic oligonucleotide
aguucaaauucuaauaugc

SEQ ID NO: 135278 - RNA, 19 nt, Artificial Sequence
  Description of Artificial Sequence: Synthetic oligonucleotide
ucuuacagggugcaaaugg

SEQ ID NO: 135279 - RNA, 19 nt, Artificial Sequence
  Description of Artificial Sequence: Synthetic oligonucleotide
agaaaucuacauuucaagg

SEQ ID NO: 135280 - RNA, 19 nt, Artificial Sequence
  Description of Artificial Sequence: Synthetic oligonucleotide
cugaaugauaaauuaaccc

SEQ ID NO: 135281 - RNA, 19 nt, Artificial Sequence
  Description of Artificial Sequence: Synthetic oligonucleotide
uggaguacuaaucaaaggu

SEQ ID NO: 135282 - RNA, 19 nt, Artificial Sequence
  Description of Artificial Sequence: Synthetic oligonucleotide
aacagauacaauucacauc

SEQ ID NO: 135283 - RNA, 19 nt, Artificial Sequence
  Description of Artificial Sequence: Synthetic oligonucleotide
ugaauugacucucacagac

SEQ ID NO: 135284 - RNA, 19 nt, Artificial Sequence
  Description of Artificial Sequence: Synthetic oligonucleotide
uguuaaaagcagauggucc

SEQ ID NO: 135285 - RNA, 19 nt, Artificial Sequence
  Description of Artificial Sequence: Synthetic oligonucleotide
aagcuaauuuugcagacag

SEQ ID NO: 135286 - RNA, 19 nt, Artificial Sequence
  Description of Artificial Sequence: Synthetic oligonucleotide
auuauuaagcuguagcgug

SEQ ID NO: 135287 - RNA, 19 nt, Artificial Sequence
  Description of Artificial Sequence: Synthetic oligonucleotide
gacuugaacaguuagcuac

SEQ ID NO: 135288 - RNA, 19 nt, Artificial Sequence
  Description of Artificial Sequence: Synthetic oligonucleotide
aauuacacaaacugagcgu

SEQ ID NO: 135289 - RNA, 19 nt, Artificial Sequence
  Description of Artificial Sequence: Synthetic oligonucleotide
acaacgugaagauacaucu

SEQ ID NO: 135290 - RNA, 19 nt, Artificial Sequence
  Description of Artificial Sequence: Synthetic oligonucleotide
agcuuaacgguccacaguc

SEQ ID NO: 135291 - RNA, 19 nt, Artificial Sequence
  Description of Artificial Sequence: Synthetic oligonucleotide
uguaaucccuaucuuuugg

SEQ ID NO: 135292 - RNA, 19 nt, Artificial Sequence
  Description of Artificial Sequence: Synthetic oligonucleotide
aauaugcacugaccgaagg

SEQ ID NO: 135293 - RNA, 19 nt, Artificial Sequence
  Description of Artificial Sequence: Synthetic oligonucleotide
gacacauaggaucuugggg

SEQ ID NO: 135294 - RNA, 19 nt, Artificial Sequence
  Description of Artificial Sequence: Synthetic oligonucleotide
uucugugcgacaauuguag

SEQ ID NO: 135295 - RNA, 19 nt, Artificial Sequence
  Description of Artificial Sequence: Synthetic oligonucleotide
agguaaaccagguugaaca

SEQ ID NO: 135296 - RNA, 19 nt, Artificial Sequence
  Description of Artificial Sequence: Synthetic oligonucleotide
guuaugacugggcauaucc

SEQ ID NO: 135297 - RNA, 19 nt, Artificial Sequence
  Description of Artificial Sequence: Synthetic oligonucleotide
uuauuaagcuguagcgugg

SEQ ID NO: 135298 - RNA, 19 nt, Artificial Sequence
  Description of Artificial Sequence: Synthetic oligonucleotide
acauacucgaacuaaagau

SEQ ID NO: 135299 - RNA, 19 nt, Artificial Sequence
  Description of Artificial Sequence: Synthetic oligonucleotide
agcuaauaugcucagacca

SEQ ID NO: 135300 - RNA, 19 nt, Artificial Sequence
  Description of Artificial Sequence: Synthetic oligonucleotide
cuuggagacacauaggauc

SEQ ID NO: 135301 - RNA, 19 nt, Artificial Sequence
  Description of Artificial Sequence: Synthetic oligonucleotide
aaacuacuggcaucgcugg

SEQ ID NO: 135302 - RNA, 19 nt, Artificial Sequence
  Description of Artificial Sequence: Synthetic oligonucleotide
uuaauuuguugucucaaaa

SEQ ID NO: 135303 - RNA, 19 nt, Artificial Sequence
  Description of Artificial Sequence: Synthetic oligonucleotide
uagguauuuagccaccuca

SEQ ID NO: 135304 - RNA, 19 nt, Artificial Sequence
  Description of Artificial Sequence: Synthetic oligonucleotide
cuucacgcaaucucgaugc

SEQ ID NO: 135305 - RNA, 19 nt, Artificial Sequence
  Description of Artificial Sequence: Synthetic oligonucleotide
acacauaggaucuugggga

SEQ ID NO: 135306 - RNA, 19 nt, Artificial Sequence
  Description of Artificial Sequence: Synthetic oligonucleotide
ugugcgacaauuguaguag

SEQ ID NO: 135307 - RNA, 19 nt, Artificial Sequence
  Description of Artificial Sequence: Synthetic oligonucleotide
uguagcguggcuuguaaag

SEQ ID NO: 135308 - RNA, 19 nt, Artificial Sequence
  Description of Artificial Sequence: Synthetic oligonucleotide
aaaaggcuagguauuuagc

SEQ ID NO: 135309 - RNA, 19 nt, Artificial Sequence
  Description of Artificial Sequence: Synthetic oligonucleotide
uuauaguagcaauaguuuc

SEQ ID NO: 135310 - RNA, 19 nt, Artificial Sequence
  Description of Artificial Sequence: Synthetic oligonucleotide
aaggaguugugcaagaaug

SEQ ID NO: 135311 - RNA, 19 nt, Artificial Sequence
  Description of Artificial Sequence: Synthetic oligonucleotide
aacacuccccauauuaugg

SEQ ID NO: 135312 - RNA, 19 nt, Artificial Sequence
  Description of Artificial Sequence: Synthetic oligonucleotide
uuaugacugggcauauccg

SEQ ID NO: 135313 - RNA, 19 nt, Artificial Sequence
  Description of Artificial Sequence: Synthetic oligonucleotide
ggaaguaugauuuggacca

SEQ ID NO: 135314 - RNA, 19 nt, Artificial Sequence
  Description of Artificial Sequence: Synthetic oligonucleotide
auauuaugggcuucuucac

SEQ ID NO: 135315 - RNA, 19 nt, Artificial Sequence
  Description of Artificial Sequence: Synthetic oligonucleotide
acauuagaauuauuaagcu

SEQ ID NO: 135316 - RNA, 19 nt, Artificial Sequence
  Description of Artificial Sequence: Synthetic oligonucleotide
aaggcuagguauuuagcca

SEQ ID NO: 135317 - RNA, 19 nt, Artificial Sequence
  Description of Artificial Sequence: Synthetic oligonucleotide
cauuugcccagcuuaacgg

SEQ ID NO: 135318 - RNA, 19 nt, Artificial Sequence
  Description of Artificial Sequence: Synthetic oligonucleotide
uggugaucagauugaagcg

SEQ ID NO: 135319 - RNA, 19 nt, Artificial Sequence
  Description of Artificial Sequence: Synthetic oligonucleotide
ucuaauaugcacugaccga

SEQ ID NO: 135320 - RNA, 19 nt, Artificial Sequence
  Description of Artificial Sequence: Synthetic oligonucleotide
gagaggugauguuaaaagc

SEQ ID NO: 135321 - RNA, 19 nt, Artificial Sequence
  Description of Artificial Sequence: Synthetic oligonucleotide
caagauuucugaaugauaa

SEQ ID NO: 135322 - RNA, 19 nt, Artificial Sequence
  Description of Artificial Sequence: Synthetic oligonucleotide
aggcucgugacccugcugc

SEQ ID NO: 135323 - RNA, 19 nt, Artificial Sequence
  Description of Artificial Sequence: Synthetic oligonucleotide
aguacuaaccuuuggcugu

SEQ ID NO: 135324 - RNA, 19 nt, Artificial Sequence
  Description of Artificial Sequence: Synthetic oligonucleotide
aucugacuagcuuugcuuc

SEQ ID NO: 135325 - RNA, 19 nt, Artificial Sequence
  Description of Artificial Sequence: Synthetic oligonucleotide
gauuuggaccaggugaugg

SEQ ID NO: 135326 - RNA, 19 nt, Artificial Sequence
  Description of Artificial Sequence: Synthetic oligonucleotide
cauacucgaacuaaagauc

SEQ ID NO: 135327 - RNA, 19 nt, Artificial Sequence
  Description of Artificial Sequence: Synthetic oligonucleotide
caaacuacuggcaucgcug

SEQ ID NO: 135328 - RNA, 19 nt, Artificial Sequence
  Description of Artificial Sequence: Synthetic oligonucleotide
uuaguuucggaugucuaag

SEQ ID NO: 135329 - RNA, 19 nt, Artificial Sequence
  Description of Artificial Sequence: Synthetic oligonucleotide
uggguuaugcucaaucacu

SEQ ID NO: 135330 - RNA, 19 nt, Artificial Sequence
  Description of Artificial Sequence: Synthetic oligonucleotide
aggcuagguauuuagccac

SEQ ID NO: 135331 - RNA, 19 nt, Artificial Sequence
  Description of Artificial Sequence: Synthetic oligonucleotide
gaguacuaaccuuuggcug

SEQ ID NO: 135332 - RNA, 19 nt, Artificial Sequence
  Description of Artificial Sequence: Synthetic oligonucleotide
guaaucccuaucuuuuggg

SEQ ID NO: 135333 - RNA, 19 nt, Artificial Sequence
  Description of Artificial Sequence: Synthetic oligonucleotide
auucuaauaugcacugacc

SEQ ID NO: 135334 - RNA, 19 nt, Artificial Sequence
  Description of Artificial Sequence: Synthetic oligonucleotide
uuuacaacgugaagauaca

SEQ ID NO: 135335 - RNA, 19 nt, Artificial Sequence
  Description of Artificial Sequence: Synthetic oligonucleotide
gguaacuccaauuacacaa

SEQ ID NO: 135336 - RNA, 19 nt, Artificial Sequence
  Description of Artificial Sequence: Synthetic oligonucleotide
aguaagaaacuuguggaug

SEQ ID NO: 135337 - RNA, 19 nt, Artificial Sequence
  Description of Artificial Sequence: Synthetic oligonucleotide
acguuagagacauuggaga

SEQ ID NO: 135338 - RNA, 19 nt, Artificial Sequence
  Description of Artificial Sequence: Synthetic oligonucleotide
agacacauaggaucuuggg

SEQ ID NO: 135339 - RNA, 19 nt, Artificial Sequence
  Description of Artificial Sequence: Synthetic oligonucleotide
gacuguguuaguuugaggu

SEQ ID NO: 135340 - RNA, 19 nt, Artificial Sequence
  Description of Artificial Sequence: Synthetic oligonucleotide
ugauauuuauacacugcuc

SEQ ID NO: 135341 - RNA, 19 nt, Artificial Sequence
  Description of Artificial Sequence: Synthetic oligonucleotide
aguagcaauaguuucuuuu

SEQ ID NO: 135342 - RNA, 19 nt, Artificial Sequence
  Description of Artificial Sequence: Synthetic oligonucleotide
uguggguuaugcucaauca

SEQ ID NO: 135343 - RNA, 19 nt, Artificial Sequence
  Description of Artificial Sequence: Synthetic oligonucleotide
gacguuagagacauuggag

SEQ ID NO: 135344 - RNA, 19 nt, Artificial Sequence
  Description of Artificial Sequence: Synthetic oligonucleotide
ugaagcguaaauggacugg

SEQ ID NO: 135345 - RNA, 19 nt, Artificial Sequence
  Description of Artificial Sequence: Synthetic oligonucleotide
gguguuaaugaacacgcag

SEQ ID NO: 135346 - RNA, 19 nt, Artificial Sequence
  Description of Artificial Sequence: Synthetic oligonucleotide
guauuuagccaccucagca

SEQ ID NO: 135347 - RNA, 19 nt, Artificial Sequence
  Description of Artificial Sequence: Synthetic oligonucleotide
guaagaaacuuguggauga

SEQ ID NO: 135348 - RNA, 19 nt, Artificial Sequence
  Description of Artificial Sequence: Synthetic oligonucleotide
ugauaaaguagaugcucca

SEQ ID NO: 135349 - RNA, 19 nt, Artificial Sequence
  Description of Artificial Sequence: Synthetic oligonucleotide
uuugauagggacuguguua

SEQ ID NO: 135350 - RNA, 19 nt, Artificial Sequence
  Description of Artificial Sequence: Synthetic oligonucleotide
aggaauuacuguaauaaga

SEQ ID NO: 135351 - RNA, 19 nt, Artificial Sequence
  Description of Artificial Sequence: Synthetic oligonucleotide
aaacagguggaguacuaau

SEQ ID NO: 135352 - RNA, 19 nt, Artificial Sequence
  Description of Artificial Sequence: Synthetic oligonucleotide
uauccgguaggauaccaug

SEQ ID NO: 135353 - RNA, 19 nt, Artificial Sequence
  Description of Artificial Sequence: Synthetic oligonucleotide
uaauaugcacugaccgaag

SEQ ID NO: 135354 - RNA, 19 nt, Artificial Sequence
  Description of Artificial Sequence: Synthetic oligonucleotide
ucccuuuaaaggaauuacu

SEQ ID NO: 135355 - RNA, 19 nt, Artificial Sequence
  Description of Artificial Sequence: Synthetic oligonucleotide
agacguuagagacauugga

SEQ ID NO: 135356 - RNA, 19 nt, Artificial Sequence
  Description of Artificial Sequence: Synthetic oligonucleotide
guauuggugauuguggaac

SEQ ID NO: 135357 - RNA, 19 nt, Artificial Sequence
  Description of Artificial Sequence: Synthetic oligonucleotide
uacuuaagcgcugaagacu

SEQ ID NO: 135358 - RNA, 19 nt, Artificial Sequence
  Description of Artificial Sequence: Synthetic oligonucleotide
uaaucccuaucuuuuggga

SEQ ID NO: 135359 - RNA, 19 nt, Artificial Sequence
  Description of Artificial Sequence: Synthetic oligonucleotide
aaguaugauuuggaccagg

SEQ ID NO: 135360 - RNA, 19 nt, Artificial Sequence
  Description of Artificial Sequence: Synthetic oligonucleotide
uugaagcguaaauggacug

SEQ ID NO: 135361 - RNA, 19 nt, Artificial Sequence
  Description of Artificial Sequence: Synthetic oligonucleotide
cuacuuaagcgcugaagac

SEQ ID NO: 135362 - RNA, 19 nt, Artificial Sequence
  Description of Artificial Sequence: Synthetic oligonucleotide
gagcuaauaugcucagacc

SEQ ID NO: 135363 - RNA, 19 nt, Artificial Sequence
  Description of Artificial Sequence: Synthetic oligonucleotide
aguagaugcuccauuagca

SEQ ID NO: 135364 - RNA, 19 nt, Artificial Sequence
  Description of Artificial Sequence: Synthetic oligonucleotide
agugacuucgucauucuug

SEQ ID NO: 135365 - RNA, 19 nt, Artificial Sequence
  Description of Artificial Sequence: Synthetic oligonucleotide
agugcggaacaguugucuc

SEQ ID NO: 135366 - RNA, 19 nt, Artificial Sequence
  Description of Artificial Sequence: Synthetic oligonucleotide
auacucgaacuaaagaucu

SEQ ID NO: 135367 - RNA, 19 nt, Artificial Sequence
  Description of Artificial Sequence: Synthetic oligonucleotide
cuggaaguaugauuuggac

SEQ ID NO: 135368 - RNA, 19 nt, Artificial Sequence
  Description of Artificial Sequence: Synthetic oligonucleotide
uuauacaaacauguggguu

SEQ ID NO: 135369 - RNA, 19 nt, Artificial Sequence
  Description of Artificial Sequence: Synthetic oligonucleotide
uguguuaguuugaggugug

SEQ ID NO: 135370 - RNA, 19 nt, Artificial Sequence
  Description of Artificial Sequence: Synthetic oligonucleotide
acacuccccauauuauggg

SEQ ID NO: 135371 - RNA, 19 nt, Artificial Sequence
  Description of Artificial Sequence: Synthetic oligonucleotide
agggaauggaacauacagg

SEQ ID NO: 135372 - RNA, 19 nt, Artificial Sequence
  Description of Artificial Sequence: Synthetic oligonucleotide
acaaccgcguucauugggc

SEQ ID NO: 135373 - RNA, 19 nt, Artificial Sequence
  Description of Artificial Sequence: Synthetic oligonucleotide
ugguccuugcuuaacuacu

SEQ ID NO: 135374 - RNA, 19 nt, Artificial Sequence
  Description of Artificial Sequence: Synthetic oligonucleotide
cuagcguagguguuaauga

SEQ ID NO: 135375 - RNA, 19 nt, Artificial Sequence
  Description of Artificial Sequence: Synthetic oligonucleotide
uccgguaggauaccaugug

SEQ ID NO: 135376 - RNA, 19 nt, Artificial Sequence
  Description of Artificial Sequence: Synthetic oligonucleotide
auugaagcguaaauggacu

SEQ ID NO: 135377 - RNA, 19 nt, Artificial Sequence
  Description of Artificial Sequence: Synthetic oligonucleotide
ugcauuacuacuggaagua

SEQ ID NO: 135378 - RNA, 19 nt, Artificial Sequence
  Description of Artificial Sequence: Synthetic oligonucleotide
cuuuccccugaauugacuc

SEQ ID NO: 135379 - RNA, 19 nt, Artificial Sequence
  Description of Artificial Sequence: Synthetic oligonucleotide
auaugcacugaccgaagga

SEQ ID NO: 135380 - RNA, 19 nt, Artificial Sequence
  Description of Artificial Sequence: Synthetic oligonucleotide
cagacguuagagacauugg

SEQ ID NO: 135381 - RNA, 19 nt, Artificial Sequence
  Description of Artificial Sequence: Synthetic oligonucleotide
aacugagcguuuugugaug

SEQ ID NO: 135382 - RNA, 19 nt, Artificial Sequence
  Description of Artificial Sequence: Synthetic oligonucleotide
gcucaaaauguuaugacug

SEQ ID NO: 135383 - RNA, 19 nt, Artificial Sequence
  Description of Artificial Sequence: Synthetic oligonucleotide
aguacuaaucaaagguuug

SEQ ID NO: 135384 - RNA, 19 nt, Artificial Sequence
  Description of Artificial Sequence: Synthetic oligonucleotide
uaguuucggaugucuaagc

SEQ ID NO: 135385 - RNA, 19 nt, Artificial Sequence
  Description of Artificial Sequence: Synthetic oligonucleotide
agauuaucauugaagugug

SEQ ID NO: 135386 - RNA, 19 nt, Artificial Sequence
  Description of Artificial Sequence: Synthetic oligonucleotide
cacgcaaucucgaugccug

SEQ ID NO: 135387 - RNA, 19 nt, Artificial Sequence
  Description of Artificial Sequence: Synthetic oligonucleotide
acaguuagcuacaacacaa

SEQ ID NO: 135388 - RNA, 19 nt, Artificial Sequence
  Description of Artificial Sequence: Synthetic oligonucleotide
ugugacacugguccuugcu

SEQ ID NO: 135389 - RNA, 19 nt, Artificial Sequence
  Description of Artificial Sequence: Synthetic oligonucleotide
ugcucaaucacugcaacuu

SEQ ID NO: 135390 - RNA, 19 nt, Artificial Sequence
  Description of Artificial Sequence: Synthetic oligonucleotide
uguugcauuugaugcauua

SEQ ID NO: 135391 - RNA, 19 nt, Artificial Sequence
  Description of Artificial Sequence: Synthetic oligonucleotide
ucgaacuaaagaucucaaa

SEQ ID NO: 135392 - RNA, 19 nt, Artificial Sequence
  Description of Artificial Sequence: Synthetic oligonucleotide
agcaguacuuuuaagucca

SEQ ID NO: 135393 - RNA, 19 nt, Artificial Sequence
  Description of Artificial Sequence: Synthetic oligonucleotide
gcccuaagaaaggagaugg

SEQ ID NO: 135394 - RNA, 19 nt, Artificial Sequence
  Description of Artificial Sequence: Synthetic oligonucleotide
acugagcguuuugugaugg

SEQ ID NO: 135395 - RNA, 19 nt, Artificial Sequence
  Description of Artificial Sequence: Synthetic oligonucleotide
aagugcggaacaguugucu

SEQ ID NO: 135396 - RNA, 19 nt, Artificial Sequence
  Description of Artificial Sequence: Synthetic oligonucleotide
cuuaaaugcagcucaaaau

SEQ ID NO: 135397 - RNA, 19 nt, Artificial Sequence
  Description of Artificial Sequence: Synthetic oligonucleotide
uagcguggcuuguaaagca

SEQ ID NO: 135398 - RNA, 19 nt, Artificial Sequence
  Description of Artificial Sequence: Synthetic oligonucleotide
aaugcagcucaaaauguua

SEQ ID NO: 135399 - RNA, 19 nt, Artificial Sequence
  Description of Artificial Sequence: Synthetic oligonucleotide
gagacugauuagauggcug

SEQ ID NO: 135400 - RNA, 19 nt, Artificial Sequence
  Description of Artificial Sequence: Synthetic oligonucleotide
aguugugcaagaaugugau

SEQ ID NO: 135401 - RNA, 19 nt, Artificial Sequence
  Description of Artificial Sequence: Synthetic oligonucleotide
gaauugacucucacagacc

SEQ ID NO: 135402 - RNA, 19 nt, Artificial Sequence
  Description of Artificial Sequence: Synthetic oligonucleotide
cuaauaugcacugaccgaa

SEQ ID NO: 135403 - RNA, 19 nt, Artificial Sequence
  Description of Artificial Sequence: Synthetic oligonucleotide
ucgcaaaguugcuugaauu

SEQ ID NO: 135404 - RNA, 19 nt, Artificial Sequence
  Description of Artificial Sequence: Synthetic oligonucleotide
ugagcguuuugugauggcu

SEQ ID NO: 135405 - RNA, 19 nt, Artificial Sequence
  Description of Artificial Sequence: Synthetic oligonucleotide
cacaaccgcguucauuggg

SEQ ID NO: 135406 - RNA, 19 nt, Artificial Sequence
  Description of Artificial Sequence: Synthetic oligonucleotide
gaguugugcaagaauguga

SEQ ID NO: 135407 - RNA, 19 nt, Artificial Sequence
  Description of Artificial Sequence: Synthetic oligonucleotide
augugaacacuccccauau

SEQ ID NO: 135408 - RNA, 19 nt, Artificial Sequence
  Description of Artificial Sequence: Synthetic oligonucleotide
ugcuuaguuugagacaaaa

SEQ ID NO: 135409 - RNA, 19 nt, Artificial Sequence
  Description of Artificial Sequence: Synthetic oligonucleotide
agauugaagcguaaaugga

SEQ ID NO: 135410 - RNA, 19 nt, Artificial Sequence
  Description of Artificial Sequence: Synthetic oligonucleotide
cuguaaucccuaucuuuug

SEQ ID NO: 135411 - RNA, 19 nt, Artificial Sequence
  Description of Artificial Sequence: Synthetic oligonucleotide
ugacaccacuugaaaguga

SEQ ID NO: 135412 - RNA, 19 nt, Artificial Sequence
  Description of Artificial Sequence: Synthetic oligonucleotide
cccacaaccgcguucauug

SEQ ID NO: 135413 - RNA, 19 nt, Artificial Sequence
  Description of Artificial Sequence: Synthetic oligonucleotide
acugggcauauccgguagg

SEQ ID NO: 135414 - RNA, 19 nt, Artificial Sequence
  Description of Artificial Sequence: Synthetic oligonucleotide
uugaggugugcuuauucuu

SEQ ID NO: 135415 - RNA, 19 nt, Artificial Sequence
  Description of Artificial Sequence: Synthetic oligonucleotide
uaacgguccacagucuacu

SEQ ID NO: 135416 - RNA, 19 nt, Artificial Sequence
  Description of Artificial Sequence: Synthetic oligonucleotide
aguaugauuuggaccaggu

SEQ ID NO: 135417 - RNA, 19 nt, Artificial Sequence
  Description of Artificial Sequence: Synthetic oligonucleotide
uccuuaagacacagaucga

SEQ ID NO: 135418 - RNA, 19 nt, Artificial Sequence
  Description of Artificial Sequence: Synthetic oligonucleotide
aucgacuggcgcuugcacu

SEQ ID NO: 135419 - RNA, 19 nt, Artificial Sequence
  Description of Artificial Sequence: Synthetic oligonucleotide
auuggugauuguggaacag

SEQ ID NO: 135420 - RNA, 19 nt, Artificial Sequence
  Description of Artificial Sequence: Synthetic oligonucleotide
ugcgacaauuguaguagua

SEQ ID NO: 135421 - RNA, 19 nt, Artificial Sequence
  Description of Artificial Sequence: Synthetic oligonucleotide
uuaugggcuucuucacgca

SEQ ID NO: 135422 - RNA, 19 nt, Artificial Sequence
  Description of Artificial Sequence: Synthetic oligonucleotide
uccauucuuacagggugca

SEQ ID NO: 135423 - RNA, 19 nt, Artificial Sequence
  Description of Artificial Sequence: Synthetic oligonucleotide
ugcccuaagaaaggagaug

SEQ ID NO: 135424 - RNA, 19 nt, Artificial Sequence
  Description of Artificial Sequence: Synthetic oligonucleotide
ucugugcgacaauuguagu

SEQ ID NO: 135425 - RNA, 19 nt, Artificial Sequence
  Description of Artificial Sequence: Synthetic oligonucleotide
uccccuugucauuucauuu

SEQ ID NO: 135426 - RNA, 19 nt, Artificial Sequence
  Description of Artificial Sequence: Synthetic oligonucleotide
auaguagcaauaguuucuu

SEQ ID NO: 135427 - RNA, 19 nt, Artificial Sequence
  Description of Artificial Sequence: Synthetic oligonucleotide
aaccgcguucauugggcca

SEQ ID NO: 135428 - RNA, 19 nt, Artificial Sequence
  Description of Artificial Sequence: Synthetic oligonucleotide
guagcgguuggaugaacca

SEQ ID NO: 135429 - RNA, 19 nt, Artificial Sequence
  Description of Artificial Sequence: Synthetic oligonucleotide
ggcauauccgguaggauac

SEQ ID NO: 135430 - RNA, 19 nt, Artificial Sequence
  Description of Artificial Sequence: Synthetic oligonucleotide
cguucauugggccacuucc

SEQ ID NO: 135431 - RNA, 19 nt, Artificial Sequence
  Description of Artificial Sequence: Synthetic oligonucleotide
uuacaggcugcgguguggc

SEQ ID NO: 135432 - RNA, 19 nt, Artificial Sequence
  Description of Artificial Sequence: Synthetic oligonucleotide
gaucgacuggcgcuugcac

SEQ ID NO: 135433 - RNA, 19 nt, Artificial Sequence
  Description of Artificial Sequence: Synthetic oligonucleotide
uucacgcaaucucgaugcc

SEQ ID NO: 135434 - RNA, 19 nt, Artificial Sequence
  Description of Artificial Sequence: Synthetic oligonucleotide
gcuagcguagguguuaaug

SEQ ID NO: 135435 - RNA, 19 nt, Artificial Sequence
  Description of Artificial Sequence: Synthetic oligonucleotide
uaaauaucuuuugcacaau

SEQ ID NO: 135436 - RNA, 19 nt, Artificial Sequence
  Description of Artificial Sequence: Synthetic oligonucleotide
gcucucgcaaaguugcuug

SEQ ID NO: 135437 - RNA, 19 nt, Artificial Sequence
  Description of Artificial Sequence: Synthetic oligonucleotide
aagagcuaauaugcucaga

SEQ ID NO: 135438 - RNA, 19 nt, Artificial Sequence
  Description of Artificial Sequence: Synthetic oligonucleotide
gucuacuuaaaugcagcuc

SEQ ID NO: 135439 - RNA, 19 nt, Artificial Sequence
  Description of Artificial Sequence: Synthetic oligonucleotide
gcaacagugcccuaagaaa

SEQ ID NO: 135440 - RNA, 19 nt, Artificial Sequence
  Description of Artificial Sequence: Synthetic oligonucleotide
cuagguauuuagccaccuc

SEQ ID NO: 135441 - RNA, 19 nt, Artificial Sequence
  Description of Artificial Sequence: Synthetic oligonucleotide
gguacaacuguugcauuug

SEQ ID NO: 135442 - RNA, 19 nt, Artificial Sequence
  Description of Artificial Sequence: Synthetic oligonucleotide
agacuugaacaguuagcua

SEQ ID NO: 135443 - RNA, 19 nt, Artificial Sequence
  Description of Artificial Sequence: Synthetic oligonucleotide
acuaaccuuuggcugugau

SEQ ID NO: 135444 - RNA, 19 nt, Artificial Sequence
  Description of Artificial Sequence: Synthetic oligonucleotide
ucacgcaaucucgaugccu

SEQ ID NO: 135445 - RNA, 19 nt, Artificial Sequence
  Description of Artificial Sequence: Synthetic oligonucleotide
gaucagauugaagcguaaa

SEQ ID NO: 135446 - RNA, 19 nt, Artificial Sequence
  Description of Artificial Sequence: Synthetic oligonucleotide
caaccgcguucauugggcc

SEQ ID NO: 135447 - RNA, 19 nt, Artificial Sequence
  Description of Artificial Sequence: Synthetic oligonucleotide
ggaguugugcaagaaugug

SEQ ID NO: 135448 - RNA, 19 nt, Artificial Sequence
  Description of Artificial Sequence: Synthetic oligonucleotide
ugcggaacaguugucucau

SEQ ID NO: 135449 - RNA, 19 nt, Artificial Sequence
  Description of Artificial Sequence: Synthetic oligonucleotide
gaaacagguggaguacuaa

SEQ ID NO: 135450 - RNA, 19 nt, Artificial Sequence
  Description of Artificial Sequence: Synthetic oligonucleotide
caaagguuugauagggacu

SEQ ID NO: 135451 - RNA, 19 nt, Artificial Sequence
  Description of Artificial Sequence: Synthetic oligonucleotide
auguaaaaggcuagguauu

SEQ ID NO: 135452 - RNA, 19 nt, Artificial Sequence
  Description of Artificial Sequence: Synthetic oligonucleotide
caugugaacacuccccaua

SEQ ID NO: 135453 - RNA, 19 nt, Artificial Sequence
  Description of Artificial Sequence: Synthetic oligonucleotide
gauuaguuucggaugucua

SEQ ID NO: 135454 - RNA, 19 nt, Artificial Sequence
  Description of Artificial Sequence: Synthetic oligonucleotide
uuacuacuggaaguaugau

SEQ ID NO: 135455 - RNA, 19 nt, Artificial Sequence
  Description of Artificial Sequence: Synthetic oligonucleotide
agcgguuggaugaaccacu

SEQ ID NO: 135456 - RNA, 19 nt, Artificial Sequence
  Description of Artificial Sequence: Synthetic oligonucleotide
uucggaugucuaagcucug

SEQ ID NO: 135457 - RNA, 19 nt, Artificial Sequence
  Description of Artificial Sequence: Synthetic oligonucleotide
acaugugaacacuccccau

SEQ ID NO: 135458 - RNA, 19 nt, Artificial Sequence
  Description of Artificial Sequence: Synthetic oligonucleotide
guguggccgauugugacac

SEQ ID NO: 135459 - RNA, 19 nt, Artificial Sequence
  Description of Artificial Sequence: Synthetic oligonucleotide
agguggaguacuaaucaaa

SEQ ID NO: 135460 - RNA, 19 nt, Artificial Sequence
  Description of Artificial Sequence: Synthetic oligonucleotide
cucgaacuaaagaucucaa

SEQ ID NO: 135461 - RNA, 19 nt, Artificial Sequence
  Description of Artificial Sequence: Synthetic oligonucleotide
cagguaaaccagguugaac

SEQ ID NO: 135462 - RNA, 19 nt, Artificial Sequence
  Description of Artificial Sequence: Synthetic oligonucleotide
gaguacuaaucaaagguuu

SEQ ID NO: 135463 - RNA, 19 nt, Artificial Sequence
  Description of Artificial Sequence: Synthetic oligonucleotide
cuuaacgguccacagucua

SEQ ID NO: 135464 - RNA, 19 nt, Artificial Sequence
  Description of Artificial Sequence: Synthetic oligonucleotide
cguagagcuacugugaguc

SEQ ID NO: 135465 - RNA, 19 nt, Artificial Sequence
  Description of Artificial Sequence: Synthetic oligonucleotide
aacgguccacagucuacuu

SEQ ID NO: 135466 - RNA, 19 nt, Artificial Sequence
  Description of Artificial Sequence: Synthetic oligonucleotide
uugauuaguuucggauguc

SEQ ID NO: 135467 - RNA, 19 nt, Artificial Sequence
  Description of Artificial Sequence: Synthetic oligonucleotide
acgugaagauacaucuaca

SEQ ID NO: 135468 - RNA, 19 nt, Artificial Sequence
  Description of Artificial Sequence: Synthetic oligonucleotide
cugugcgacaauuguagua

SEQ ID NO: 135469 - RNA, 19 nt, Artificial Sequence
  Description of Artificial Sequence: Synthetic oligonucleotide
cugagcguuuugugauggc

SEQ ID NO: 135470 - RNA, 19 nt, Artificial Sequence
  Description of Artificial Sequence: Synthetic oligonucleotide
gacacugguccuugcuuaa

SEQ ID NO: 135471 - RNA, 19 nt, Artificial Sequence
  Description of Artificial Sequence: Synthetic oligonucleotide
auccgguaggauaccaugu

SEQ ID NO: 135472 - RNA, 19 nt, Artificial Sequence
  Description of Artificial Sequence: Synthetic oligonucleotide
guacuaaccuuuggcugug

SEQ ID NO: 135473 - RNA, 19 nt, Artificial Sequence
  Description of Artificial Sequence: Synthetic oligonucleotide
ccagcuuaacgguccacag

SEQ ID NO: 135474 - RNA, 19 nt, Artificial Sequence
  Description of Artificial Sequence: Synthetic oligonucleotide
uguuaugacugggcauauc

SEQ ID NO: 135475 - RNA, 19 nt, Artificial Sequence
  Description of Artificial Sequence: Synthetic oligonucleotide
caagugcggaacaguuguc

SEQ ID NO: 135476 - RNA, 19 nt, Artificial Sequence
  Description of Artificial Sequence: Synthetic oligonucleotide
ccauauuaugggcuucuuc

SEQ ID NO: 135477 - RNA, 19 nt, Artificial Sequence
  Description of Artificial Sequence: Synthetic oligonucleotide
gggcauauccgguaggaua

SEQ ID NO: 135478 - RNA, 19 nt, Artificial Sequence
  Description of Artificial Sequence: Synthetic oligonucleotide
agggugcaaauggauuuca

SEQ ID NO: 135479 - RNA, 19 nt, Artificial Sequence
  Description of Artificial Sequence: Synthetic oligonucleotide
cccuaagaaaggagauggg

SEQ ID NO: 135480 - RNA, 19 nt, Artificial Sequence
  Description of Artificial Sequence: Synthetic oligonucleotide
agaucgacuggcgcuugca

SEQ ID NO: 135481 - RNA, 19 nt, Artificial Sequence
  Description of Artificial Sequence: Synthetic oligonucleotide
caucagacguuagagacau

SEQ ID NO: 135482 - RNA, 19 nt, Artificial Sequence
  Description of Artificial Sequence: Synthetic oligonucleotide
gugaucagauugaagcgua

SEQ ID NO: 135483 - RNA, 19 nt, Artificial Sequence
  Description of Artificial Sequence: Synthetic oligonucleotide
caguaagaaacuuguggau

SEQ ID NO: 135484 - RNA, 19 nt, Artificial Sequence
  Description of Artificial Sequence: Synthetic oligonucleotide
ccgguaggauaccaugugc

SEQ ID NO: 135485 - RNA, 19 nt, Artificial Sequence
  Description of Artificial Sequence: Synthetic oligonucleotide
cagggugcaaauggauuuc

SEQ ID NO: 135486 - RNA, 19 nt, Artificial Sequence
  Description of Artificial Sequence: Synthetic oligonucleotide
ccagcaguaagaaacuugu

SEQ ID NO: 135487 - RNA, 19 nt, Artificial Sequence
  Description of Artificial Sequence: Synthetic oligonucleotide
cagguggaguacuaaucaa

SEQ ID NO: 135488 - RNA, 19 nt, Artificial Sequence
  Description of Artificial Sequence: Synthetic oligonucleotide
guaaaaggcuagguauuua

SEQ ID NO: 135489 - RNA, 19 nt, Artificial Sequence
  Description of Artificial Sequence: Synthetic oligonucleotide
cauauccgguaggauacca

SEQ ID NO: 135490 - RNA, 19 nt, Artificial Sequence
  Description of Artificial Sequence: Synthetic oligonucleotide
gguguggccgauugugaca

SEQ ID NO: 135491 - RNA, 19 nt, Artificial Sequence
  Description of Artificial Sequence: Synthetic oligonucleotide
cagaucgacuggcgcuugc

SEQ ID NO: 135492 - RNA, 19 nt, Artificial Sequence
  Description of Artificial Sequence: Synthetic oligonucleotide
agguguuaaugaacacgca

SEQ ID NO: 135493 - RNA, 19 nt, Artificial Sequence
  Description of Artificial Sequence: Synthetic oligonucleotide
cgaacuaaagaucucaaau

SEQ ID NO: 135494 - RNA, 19 nt, Artificial Sequence
  Description of Artificial Sequence: Synthetic oligonucleotide
ucccacuggugaacccacu

SEQ ID NO: 135495 - RNA, 19 nt, Artificial Sequence
  Description of Artificial Sequence: Synthetic oligonucleotide
cuguugcuugcaucaccuc

SEQ ID NO: 135496 - RNA, 19 nt, Artificial Sequence
  Description of Artificial Sequence: Synthetic oligonucleotide
acgcaaucucgaugccugu

SEQ ID NO: 135497 - RNA, 19 nt, Artificial Sequence
  Description of Artificial Sequence: Synthetic oligonucleotide
agcaacugucuaagaagau

SEQ ID NO: 135498 - RNA, 19 nt, Artificial Sequence
  Description of Artificial Sequence: Synthetic oligonucleotide
auguuaugacugggcauau

SEQ ID NO: 135499 - RNA, 19 nt, Artificial Sequence
  Description of Artificial Sequence: Synthetic oligonucleotide
uccccauauuaugggcuuc

SEQ ID NO: 135500 - RNA, 19 nt, Artificial Sequence
  Description of Artificial Sequence: Synthetic oligonucleotide
uacuaaccuuuggcuguga

SEQ ID NO: 135501 - RNA, 19 nt, Artificial Sequence
  Description of Artificial Sequence: Synthetic oligonucleotide
acagaucgacuggcgcuug

SEQ ID NO: 135502 - RNA, 19 nt, Artificial Sequence
  Description of Artificial Sequence: Synthetic oligonucleotide
ggaguacuaaucaaagguu

SEQ ID NO: 135503 - RNA, 19 nt, Artificial Sequence
  Description of Artificial Sequence: Synthetic oligonucleotide
cacauaggaucuuggggau

SEQ ID NO: 135504 - RNA, 19 nt, Artificial Sequence
  Description of Artificial Sequence: Synthetic oligonucleotide
cuguagcguggcuuguaaa

SEQ ID NO: 135505 - RNA, 19 nt, Artificial Sequence
  Description of Artificial Sequence: Synthetic oligonucleotide
gcaaacuacuggcaucgcu

SEQ ID NO: 135506 - RNA, 19 nt, Artificial Sequence
  Description of Artificial Sequence: Synthetic oligonucleotide
ucccacaaccgcguucauu

SEQ ID NO: 135507 - RNA, 19 nt, Artificial Sequence
  Description of Artificial Sequence: Synthetic oligonucleotide
ccugaaguaauggagguau

SEQ ID NO: 135508 - RNA, 19 nt, Artificial Sequence
  Description of Artificial Sequence: Synthetic oligonucleotide
cucgcaaaguugcuugaau

SEQ ID NO: 135509 - RNA, 19 nt, Artificial Sequence
  Description of Artificial Sequence: Synthetic oligonucleotide
gguuugauagggacugugu

SEQ ID NO: 135510 - RNA, 19 nt, Artificial Sequence
  Description of Artificial Sequence: Synthetic oligonucleotide
ccacaaccgcguucauugg

SEQ ID NO: 135511 - RNA, 19 nt, Artificial Sequence
  Description of Artificial Sequence: Synthetic oligonucleotide
cgguaggauaccaugugca

SEQ ID NO: 135512 - RNA, 19 nt, Artificial Sequence
  Description of Artificial Sequence: Synthetic oligonucleotide
ugcuagcguagguguuaau

SEQ ID NO: 135513 - RNA, 19 nt, Artificial Sequence
  Description of Artificial Sequence: Synthetic oligonucleotide
cagcuuaacgguccacagu

SEQ ID NO: 135514 - RNA, 19 nt, Artificial Sequence
  Description of Artificial Sequence: Synthetic oligonucleotide
cagcaacagugcccuaaga

SEQ ID NO: 135515 - RNA, 19 nt, Artificial Sequence
  Description of Artificial Sequence: Synthetic oligonucleotide
gcgacaauuguaguaguau

SEQ ID NO: 135516 - RNA, 19 nt, Artificial Sequence
  Description of Artificial Sequence: Synthetic oligonucleotide
gugcgacaauuguaguagu

SEQ ID NO: 135517 - RNA, 19 nt, Artificial Sequence
  Description of Artificial Sequence: Synthetic oligonucleotide
gcauauccgguaggauacc

SEQ ID NO: 135518 - RNA, 19 nt, Artificial Sequence
  Description of Artificial Sequence: Synthetic oligonucleotide
cugacuagcuuugcuuccu

SEQ ID NO: 135519 - RNA, 19 nt, Artificial Sequence
  Description of Artificial Sequence: Synthetic oligonucleotide
agcuguagcguggcuugua

SEQ ID NO: 135520 - RNA, 19 nt, Artificial Sequence
  Description of Artificial Sequence: Synthetic oligonucleotide
gcguucauugggccacuuc

SEQ ID NO: 135521 - RNA, 19 nt, Artificial Sequence
  Description of Artificial Sequence: Synthetic oligonucleotide
cuccccauauuaugggcuu

SEQ ID NO: 135522 - RNA, 19 nt, Artificial Sequence
  Description of Artificial Sequence: Synthetic oligonucleotide
cugcuuaguuugagacaaa

SEQ ID NO: 135523 - RNA, 19 nt, Artificial Sequence
  Description of Artificial Sequence: Synthetic oligonucleotide
cuguacuggcguagagcua

SEQ ID NO: 135524 - RNA, 19 nt, Artificial Sequence
  Description of Artificial Sequence: Synthetic oligonucleotide
gcugcuagcguagguguua

SEQ ID NO: 135525 - RNA, 19 nt, Artificial Sequence
  Description of Artificial Sequence: Synthetic oligonucleotide
gcguagagcuacugugagu

SEQ ID NO: 135526 - RNA, 19 nt, Artificial Sequence
  Description of Artificial Sequence: Synthetic oligonucleotide
cgacaauuguaguaguauu

SEQ ID NO: 135527 - RNA, 19 nt, Artificial Sequence
  Description of Artificial Sequence: Synthetic oligonucleotide
gcgguguggccgauuguga

SEQ ID NO: 135528 - RNA, 19 nt, Artificial Sequence
  Description of Artificial Sequence: Synthetic oligonucleotide
ggccgagcagauguauucu

SEQ ID NO: 135529 - RNA, 19 nt, Artificial Sequence
  Description of Artificial Sequence: Synthetic oligonucleotide
gccaauuuauuugcuucuu

SEQ ID NO: 135530 - RNA, 19 nt, Artificial Sequence
  Description of Artificial Sequence: Synthetic oligonucleotide
gcuuaacgguccacagucu

SEQ ID NO: 135531 - RNA, 19 nt, Artificial Sequence
  Description of Artificial Sequence: Synthetic oligonucleotide
guacuggcguagagcuacu

SEQ ID NO: 135532 - RNA, 19 nt, Artificial Sequence
  Description of Artificial Sequence: Synthetic oligonucleotide
aucagacguuagagacauu

SEQ ID NO: 135533 - RNA, 19 nt, Artificial Sequence
  Description of Artificial Sequence: Synthetic oligonucleotide
ccccauauuaugggcuucu

SEQ ID NO: 135534 - RNA, 19 nt, Artificial Sequence
  Description of Artificial Sequence: Synthetic oligonucleotide
ccauucuuacagggugcaa

SEQ ID NO: 135535 - RNA, 19 nt, Artificial Sequence
  Description of Artificial Sequence: Synthetic oligonucleotide
cccauauuaugggcuucuu

SEQ ID NO: 135536 - RNA, 19 nt, Artificial Sequence
  Description of Artificial Sequence: Synthetic oligonucleotide
ggcugcgguguggccgauu

SEQ ID NO: 135537 - RNA, 19 nt, Artificial Sequence
  Description of Artificial Sequence: Synthetic oligonucleotide
ccgcguucauugggccacu

SEQ ID NO: 135538 - RNA, 19 nt, Artificial Sequence
  Description of Artificial Sequence: Synthetic oligonucleotide
cgcguucauugggccacuu

SEQ ID NO: 135539 - RNA, 19 nt, Artificial Sequence
  Description of Artificial Sequence: Synthetic oligonucleotide
aauauuagguuauacaaag

SEQ ID NO: 135540 - RNA, 19 nt, Artificial Sequence
  Description of Artificial Sequence: Synthetic oligonucleotide
aagucacccaauuaaaacc

SEQ ID NO: 135541 - RNA, 19 nt, Artificial Sequence
  Description of Artificial Sequence: Synthetic oligonucleotide
uuagguuauacaaaguuag

SEQ ID NO: 135542 - RNA, 19 nt, Artificial Sequence
  Description of Artificial Sequence: Synthetic oligonucleotide
auuaauugcacgcaggaag

SEQ ID NO: 135543 - RNA, 19 nt, Artificial Sequence
  Description of Artificial Sequence: Synthetic oligonucleotide
uuaaauuaugccaagggaa

SEQ ID NO: 135544 - RNA, 19 nt, Artificial Sequence
  Description of Artificial Sequence: Synthetic oligonucleotide
gucgagaauauucaaaucg

SEQ ID NO: 135545 - RNA, 19 nt, Artificial Sequence
  Description of Artificial Sequence: Synthetic oligonucleotide
auacugauuaauugcacgc

SEQ ID NO: 135546 - RNA, 19 nt, Artificial Sequence
  Description of Artificial Sequence: Synthetic oligonucleotide
ucagauuuccauaaucugc

SEQ ID NO: 135547 - RNA, 19 nt, Artificial Sequence
  Description of Artificial Sequence: Synthetic oligonucleotide
aaaguuaccgaugaguucu

SEQ ID NO: 135548 - RNA, 19 nt, Artificial Sequence
  Description of Artificial Sequence: Synthetic oligonucleotide
ugaagugaaacucaccaca

SEQ ID NO: 135549 - RNA, 19 nt, Artificial Sequence
  Description of Artificial Sequence: Synthetic oligonucleotide
auuaguaucucuuuaguaa

SEQ ID NO: 135550 - RNA, 19 nt, Artificial Sequence
  Description of Artificial Sequence: Synthetic oligonucleotide
aaacuuaggaggcaagucu

SEQ ID NO: 135551 - RNA, 19 nt, Artificial Sequence
  Description of Artificial Sequence: Synthetic oligonucleotide
uaucucuuuaguaaccgag

SEQ ID NO: 135552 - RNA, 19 nt, Artificial Sequence
  Description of Artificial Sequence: Synthetic oligonucleotide
ucuuuaguaaccgagagau

SEQ ID NO: 135553 - RNA, 19 nt, Artificial Sequence
  Description of Artificial Sequence: Synthetic oligonucleotide
ugacguuggagacacagag

SEQ ID NO: 135554 - RNA, 19 nt, Artificial Sequence
  Description of Artificial Sequence: Synthetic oligonucleotide
guaaacaagggucacagac

SEQ ID NO: 135555 - RNA, 19 nt, Artificial Sequence
  Description of Artificial Sequence: Synthetic oligonucleotide
aggugaaaauaguuguucc

SEQ ID NO: 135556 - RNA, 19 nt, Artificial Sequence
  Description of Artificial Sequence: Synthetic oligonucleotide
uccagaguauguaugacug

SEQ ID NO: 135557 - RNA, 19 nt, Artificial Sequence
  Description of Artificial Sequence: Synthetic oligonucleotide
aauauucaaaucgcuggac

SEQ ID NO: 135558 - RNA, 19 nt, Artificial Sequence
  Description of Artificial Sequence: Synthetic oligonucleotide
auuaucacccagucaaagg

SEQ ID NO: 135559 - RNA, 19 nt, Artificial Sequence
  Description of Artificial Sequence: Synthetic oligonucleotide
ucgagaauauucaaaucgc

SEQ ID NO: 135560 - RNA, 19 nt, Artificial Sequence
  Description of Artificial Sequence: Synthetic oligonucleotide
uuaauaucauccccgggug

SEQ ID NO: 135561 - RNA, 19 nt, Artificial Sequence
  Description of Artificial Sequence: Synthetic oligonucleotide
auuccuggcaacuuauagg

SEQ ID NO: 135562 - RNA, 19 nt, Artificial Sequence
  Description of Artificial Sequence: Synthetic oligonucleotide
ucugaaucccgccccaugg

SEQ ID NO: 135563 - RNA, 19 nt, Artificial Sequence
  Description of Artificial Sequence: Synthetic oligonucleotide
gacggcaggaucuacaaug

SEQ ID NO: 135564 - RNA, 19 nt, Artificial Sequence
  Description of Artificial Sequence: Synthetic oligonucleotide
aauaucauccccggguggg

SEQ ID NO: 135565 - RNA, 19 nt, Artificial Sequence
  Description of Artificial Sequence: Synthetic oligonucleotide
uuaauugcacgcaggaaga

SEQ ID NO: 135566 - RNA, 19 nt, Artificial Sequence
  Description of Artificial Sequence: Synthetic oligonucleotide
uccuagaacaaacaguauc

SEQ ID NO: 135567 - RNA, 19 nt, Artificial Sequence
  Description of Artificial Sequence: Synthetic oligonucleotide
auuaaaaccaccucugguu

SEQ ID NO: 135568 - RNA, 19 nt, Artificial Sequence
  Description of Artificial Sequence: Synthetic oligonucleotide
aguaucaugaucauaguga

SEQ ID NO: 135569 - RNA, 19 nt, Artificial Sequence
  Description of Artificial Sequence: Synthetic oligonucleotide
ugcaugguguucauuauca

SEQ ID NO: 135570 - RNA, 19 nt, Artificial Sequence
  Description of Artificial Sequence: Synthetic oligonucleotide
ucucgauccacauauucgc

SEQ ID NO: 135571 - RNA, 19 nt, Artificial Sequence
  Description of Artificial Sequence: Synthetic oligonucleotide
accgaugaguucugaaucc

SEQ ID NO: 135572 - RNA, 19 nt, Artificial Sequence
  Description of Artificial Sequence: Synthetic oligonucleotide
ucagugauuaacuuugaau

SEQ ID NO: 135573 - RNA, 19 nt, Artificial Sequence
  Description of Artificial Sequence: Synthetic oligonucleotide
acauugaucaccuggcucu

SEQ ID NO: 135574 - RNA, 19 nt, Artificial Sequence
  Description of Artificial Sequence: Synthetic oligonucleotide
auuuccauaaucugccaug

SEQ ID NO: 135575 - RNA, 19 nt, Artificial Sequence
  Description of Artificial Sequence: Synthetic oligonucleotide
uuucgggucgucuucggcg

SEQ ID NO: 135576 - RNA, 19 nt, Artificial Sequence
  Description of Artificial Sequence: Synthetic oligonucleotide
gaguauguaugacugggcc

SEQ ID NO: 135577 - RNA, 19 nt, Artificial Sequence
  Description of Artificial Sequence: Synthetic oligonucleotide
ucagaaaggaucacagccu

SEQ ID NO: 135578 - RNA, 19 nt, Artificial Sequence
  Description of Artificial Sequence: Synthetic oligonucleotide
gaauacaagucauuuggca

SEQ ID NO: 135579 - RNA, 19 nt, Artificial Sequence
  Description of Artificial Sequence: Synthetic oligonucleotide
aguuucaccacagaugcag

SEQ ID NO: 135580 - RNA, 19 nt, Artificial Sequence
  Description of Artificial Sequence: Synthetic oligonucleotide
acugauuaauugcacgcag

SEQ ID NO: 135581 - RNA, 19 nt, Artificial Sequence
  Description of Artificial Sequence: Synthetic oligonucleotide
gaacucuuaauaucauccc

SEQ ID NO: 135582 - RNA, 19 nt, Artificial Sequence
  Description of Artificial Sequence: Synthetic oligonucleotide
uuggcuaagccacaucagc

SEQ ID NO: 135583 - RNA, 19 nt, Artificial Sequence
  Description of Artificial Sequence: Synthetic oligonucleotide
ucuuaauaucauccccggg

SEQ ID NO: 135584 - RNA, 19 nt, Artificial Sequence
  Description of Artificial Sequence: Synthetic oligonucleotide
aucaugaucauagugaaua

SEQ ID NO: 135585 - RNA, 19 nt, Artificial Sequence
  Description of Artificial Sequence: Synthetic oligonucleotide
aguaucucuuuaguaaccg

SEQ ID NO: 135586 - RNA, 19 nt, Artificial Sequence
  Description of Artificial Sequence: Synthetic oligonucleotide
aguuaaacaugaagaagac

SEQ ID NO: 135587 - RNA, 19 nt, Artificial Sequence
  Description of Artificial Sequence: Synthetic oligonucleotide
ucuagcgcaaauccaucag

SEQ ID NO: 135588 - RNA, 19 nt, Artificial Sequence
  Description of Artificial Sequence: Synthetic oligonucleotide
gaggcucuagcgcaaaucc

SEQ ID NO: 135589 - RNA, 19 nt, Artificial Sequence
  Description of Artificial Sequence: Synthetic oligonucleotide
uaauaucauccccgggugg

SEQ ID NO: 135590 - RNA, 19 nt, Artificial Sequence
  Description of Artificial Sequence: Synthetic oligonucleotide
uguaaguuuacugcauagc

SEQ ID NO: 135591 - RNA, 19 nt, Artificial Sequence
  Description of Artificial Sequence: Synthetic oligonucleotide
ugagcuuggcucuuggugu

SEQ ID NO: 135592 - RNA, 19 nt, Artificial Sequence
  Description of Artificial Sequence: Synthetic oligonucleotide
ugaaacucaccacaccagu

SEQ ID NO: 135593 - RNA, 19 nt, Artificial Sequence
  Description of Artificial Sequence: Synthetic oligonucleotide
cugauuaauugcacgcagg

SEQ ID NO: 135594 - RNA, 19 nt, Artificial Sequence
  Description of Artificial Sequence: Synthetic oligonucleotide
ucuacuccauauauuagua

SEQ ID NO: 135595 - RNA, 19 nt, Artificial Sequence
  Description of Artificial Sequence: Synthetic oligonucleotide
gaaaggaucacagccucag

SEQ ID NO: 135596 - RNA, 19 nt, Artificial Sequence
  Description of Artificial Sequence: Synthetic oligonucleotide
ucuaccaugaagacguauu

SEQ ID NO: 135597 - RNA, 19 nt, Artificial Sequence
  Description of Artificial Sequence: Synthetic oligonucleotide
cuuaauggugucucuacuc

SEQ ID NO: 135598 - RNA, 19 nt, Artificial Sequence
  Description of Artificial Sequence: Synthetic oligonucleotide
uccuuguaaguuuacugca

SEQ ID NO: 135599 - RNA, 19 nt, Artificial Sequence
  Description of Artificial Sequence: Synthetic oligonucleotide
cuugagugaggaaagccac

SEQ ID NO: 135600 - RNA, 19 nt, Artificial Sequence
  Description of Artificial Sequence: Synthetic oligonucleotide
uaguaucucuuuaguaacc

SEQ ID NO: 135601 - RNA, 19 nt, Artificial Sequence
  Description of Artificial Sequence: Synthetic oligonucleotide
cucuuaauaucauccccgg

SEQ ID NO: 135602 - RNA, 19 nt, Artificial Sequence
  Description of Artificial Sequence: Synthetic oligonucleotide
uuugucagugauuaacuuu

SEQ ID NO: 135603 - RNA, 19 nt, Artificial Sequence
  Description of Artificial Sequence: Synthetic oligonucleotide
cauaucugcauacugauua

SEQ ID NO: 135604 - RNA, 19 nt, Artificial Sequence
  Description of Artificial Sequence: Synthetic oligonucleotide
aggaucuacaaugccauuc

SEQ ID NO: 135605 - RNA, 19 nt, Artificial Sequence
  Description of Artificial Sequence: Synthetic oligonucleotide
cagcaguuaaacaugaaga

SEQ ID NO: 135606 - RNA, 19 nt, Artificial Sequence
  Description of Artificial Sequence: Synthetic oligonucleotide
aggguagcuuucucaaccc

SEQ ID NO: 135607 - RNA, 19 nt, Artificial Sequence
  Description of Artificial Sequence: Synthetic oligonucleotide
cagaguauguaugacuggg

SEQ ID NO: 135608 - RNA, 19 nt, Artificial Sequence
  Description of Artificial Sequence: Synthetic oligonucleotide
uuaggaggcaagucuagcu

SEQ ID NO: 135609 - RNA, 19 nt, Artificial Sequence
  Description of Artificial Sequence: Synthetic oligonucleotide
acguuggagacacagagaa

SEQ ID NO: 135610 - RNA, 19 nt, Artificial Sequence
  Description of Artificial Sequence: Synthetic oligonucleotide
ggcuuaucguuucagaaag

SEQ ID NO: 135611 - RNA, 19 nt, Artificial Sequence
  Description of Artificial Sequence: Synthetic oligonucleotide
gggugagccaaucaaaucc

SEQ ID NO: 135612 - RNA, 19 nt, Artificial Sequence
  Description of Artificial Sequence: Synthetic oligonucleotide
auauauuaguaucucuuua

SEQ ID NO: 135613 - RNA, 19 nt, Artificial Sequence
  Description of Artificial Sequence: Synthetic oligonucleotide
uaaucggcaggcacaguag

SEQ ID NO: 135614 - RNA, 19 nt, Artificial Sequence
  Description of Artificial Sequence: Synthetic oligonucleotide
ugauuaacuuugaauucuc

SEQ ID NO: 135615 - RNA, 19 nt, Artificial Sequence
  Description of Artificial Sequence: Synthetic oligonucleotide
uuuaaugugugggauuuaa

SEQ ID NO: 135616 - RNA, 19 nt, Artificial Sequence
  Description of Artificial Sequence: Synthetic oligonucleotide
uaaucugccauguugccuu

SEQ ID NO: 135617 - RNA, 19 nt, Artificial Sequence
  Description of Artificial Sequence: Synthetic oligonucleotide
aucgcuggaccucauucac

SEQ ID NO: 135618 - RNA, 19 nt, Artificial Sequence
  Description of Artificial Sequence: Synthetic oligonucleotide
uucuuaauggugucucuac

SEQ ID NO: 135619 - RNA, 19 nt, Artificial Sequence
  Description of Artificial Sequence: Synthetic oligonucleotide
ucguggaauggccucagug

SEQ ID NO: 135620 - RNA, 19 nt, Artificial Sequence
  Description of Artificial Sequence: Synthetic oligonucleotide
aggacggugacguuggaga

SEQ ID NO: 135621 - RNA, 19 nt, Artificial Sequence
  Description of Artificial Sequence: Synthetic oligonucleotide
uuaccgaugaguucugaau

SEQ ID NO: 135622 - RNA, 19 nt, Artificial Sequence
  Description of Artificial Sequence: Synthetic oligonucleotide
ucugagaaccaccguauau

SEQ ID NO: 135623 - RNA, 19 nt, Artificial Sequence
  Description of Artificial Sequence: Synthetic oligonucleotide
aaaugguucucucgaucca

SEQ ID NO: 135624 - RNA, 19 nt, Artificial Sequence
  Description of Artificial Sequence: Synthetic oligonucleotide
aggaccgcaccauggagcg

SEQ ID NO: 135625 - RNA, 19 nt, Artificial Sequence
  Description of Artificial Sequence: Synthetic oligonucleotide
uuucucgaucugcccaugg

SEQ ID NO: 135626 - RNA, 19 nt, Artificial Sequence
  Description of Artificial Sequence: Synthetic oligonucleotide
cuuaauaucauccccgggu

SEQ ID NO: 135627 - RNA, 19 nt, Artificial Sequence
  Description of Artificial Sequence: Synthetic oligonucleotide
augaucauagugaauaaaa

SEQ ID NO: 135628 - RNA, 19 nt, Artificial Sequence
  Description of Artificial Sequence: Synthetic oligonucleotide
cauaauuggcaaagccacc

SEQ ID NO: 135629 - RNA, 19 nt, Artificial Sequence
  Description of Artificial Sequence: Synthetic oligonucleotide
acuuauaggccguagugua

SEQ ID NO: 135630 - RNA, 19 nt, Artificial Sequence
  Description of Artificial Sequence: Synthetic oligonucleotide
gcgcaaauccaucagagcc

SEQ ID NO: 135631 - RNA, 19 nt, Artificial Sequence
  Description of Artificial Sequence: Synthetic oligonucleotide
cucgaucugcccaugggcc

SEQ ID NO: 135632 - RNA, 19 nt, Artificial Sequence
  Description of Artificial Sequence: Synthetic oligonucleotide
gaugaguucugaaucccgc

SEQ ID NO: 135633 - RNA, 19 nt, Artificial Sequence
  Description of Artificial Sequence: Synthetic oligonucleotide
guaaguuuacugcauagcu

SEQ ID NO: 135634 - RNA, 19 nt, Artificial Sequence
  Description of Artificial Sequence: Synthetic oligonucleotide
caguaucaugaucauagug

SEQ ID NO: 135635 - RNA, 19 nt, Artificial Sequence
  Description of Artificial Sequence: Synthetic oligonucleotide
uagguuauacaaaguuagu

SEQ ID NO: 135636 - RNA, 19 nt, Artificial Sequence
  Description of Artificial Sequence: Synthetic oligonucleotide
gacuuuguucugcauggug

SEQ ID NO: 135637 - RNA, 19 nt, Artificial Sequence
  Description of Artificial Sequence: Synthetic oligonucleotide
auucgcaaauucauuguuc

SEQ ID NO: 135638 - RNA, 19 nt, Artificial Sequence
  Description of Artificial Sequence: Synthetic oligonucleotide
uaggugaaaauaguuguuc

SEQ ID NO: 135639 - RNA, 19 nt, Artificial Sequence
  Description of Artificial Sequence: Synthetic oligonucleotide
aaucggcaggcacaguaga

SEQ ID NO: 135640 - RNA, 19 nt, Artificial Sequence
  Description of Artificial Sequence: Synthetic oligonucleotide
ugaaacuuaggaggcaagu

SEQ ID NO: 135641 - RNA, 19 nt, Artificial Sequence
  Description of Artificial Sequence: Synthetic oligonucleotide
cuaaggugaggcaucccag

SEQ ID NO: 135642 - RNA, 19 nt, Artificial Sequence
  Description of Artificial Sequence: Synthetic oligonucleotide
uaguaaccgagagaugucc

SEQ ID NO: 135643 - RNA, 19 nt, Artificial Sequence
  Description of Artificial Sequence: Synthetic oligonucleotide
caacccaguguauucacug

SEQ ID NO: 135644 - RNA, 19 nt, Artificial Sequence
  Description of Artificial Sequence: Synthetic oligonucleotide
caccguauauacaaacuuc

SEQ ID NO: 135645 - RNA, 19 nt, Artificial Sequence
  Description of Artificial Sequence: Synthetic oligonucleotide
guggaauggccucagugcc

SEQ ID NO: 135646 - RNA, 19 nt, Artificial Sequence
  Description of Artificial Sequence: Synthetic oligonucleotide
acuuagggucucugguccc

SEQ ID NO: 135647 - RNA, 19 nt, Artificial Sequence
  Description of Artificial Sequence: Synthetic oligonucleotide
acgcaggaagacuuuguuc

SEQ ID NO: 135648 - RNA, 19 nt, Artificial Sequence
  Description of Artificial Sequence: Synthetic oligonucleotide
aagaaagccuucucauaau

SEQ ID NO: 135649 - RNA, 19 nt, Artificial Sequence
  Description of Artificial Sequence: Synthetic oligonucleotide
gucucuacuccauauauua

SEQ ID NO: 135650 - RNA, 19 nt, Artificial Sequence
  Description of Artificial Sequence: Synthetic oligonucleotide
gagugcaucuucuucggca

SEQ ID NO: 135651 - RNA, 19 nt, Artificial Sequence
  Description of Artificial Sequence: Synthetic oligonucleotide
aauugcacgcaggaagacu

SEQ ID NO: 135652 - RNA, 19 nt, Artificial Sequence
  Description of Artificial Sequence: Synthetic oligonucleotide
ccuggcaacuuauaggccg

SEQ ID NO: 135653 - RNA, 19 nt, Artificial Sequence
  Description of Artificial Sequence: Synthetic oligonucleotide
ugugaaacuuaggaggcaa

SEQ ID NO: 135654 - RNA, 19 nt, Artificial Sequence
  Description of Artificial Sequence: Synthetic oligonucleotide
cugagcuuggcucuuggug

SEQ ID NO: 135655 - RNA, 19 nt, Artificial Sequence
  Description of Artificial Sequence: Synthetic oligonucleotide
aucguuucagaaaggauca

SEQ ID NO: 135656 - RNA, 19 nt, Artificial Sequence
  Description of Artificial Sequence: Synthetic oligonucleotide
acggugacguuggagacac

SEQ ID NO: 135657 - RNA, 19 nt, Artificial Sequence
  Description of Artificial Sequence: Synthetic oligonucleotide
ugggucgagaauauucaaa

SEQ ID NO: 135658 - RNA, 19 nt, Artificial Sequence
  Description of Artificial Sequence: Synthetic oligonucleotide
guaaaugguucucucgauc

SEQ ID NO: 135659 - RNA, 19 nt, Artificial Sequence
  Description of Artificial Sequence: Synthetic oligonucleotide
acacuaaggugaggcaucc

SEQ ID NO: 135660 - RNA, 19 nt, Artificial Sequence
  Description of Artificial Sequence: Synthetic oligonucleotide
caggagcauggacagaggg

SEQ ID NO: 135661 - RNA, 19 nt, Artificial Sequence
  Description of Artificial Sequence: Synthetic oligonucleotide
gaugggucgagaauauuca

SEQ ID NO: 135662 - RNA, 19 nt, Artificial Sequence
  Description of Artificial Sequence: Synthetic oligonucleotide
uacugauuaauugcacgca

SEQ ID NO: 135663 - RNA, 19 nt, Artificial Sequence
  Description of Artificial Sequence: Synthetic oligonucleotide
ucaugaucauagugaauaa

SEQ ID NO: 135664 - RNA, 19 nt, Artificial Sequence
  Description of Artificial Sequence: Synthetic oligonucleotide
gaaggaccgcaccauggag

SEQ ID NO: 135665 - RNA, 19 nt, Artificial Sequence
  Description of Artificial Sequence: Synthetic oligonucleotide
cauuaucacccagucaaag

SEQ ID NO: 135666 - RNA, 19 nt, Artificial Sequence
  Description of Artificial Sequence: Synthetic oligonucleotide
uucucaacccaguguauuc

SEQ ID NO: 135667 - RNA, 19 nt, Artificial Sequence
  Description of Artificial Sequence: Synthetic oligonucleotide
accguauauacaaacuucu

SEQ ID NO: 135668 - RNA, 19 nt, Artificial Sequence
  Description of Artificial Sequence: Synthetic oligonucleotide
uguaaaugguucucucgau

SEQ ID NO: 135669 - RNA, 19 nt, Artificial Sequence
  Description of Artificial Sequence: Synthetic oligonucleotide
acgacaucuguccucauuu

SEQ ID NO: 135670 - RNA, 19 nt, Artificial Sequence
  Description of Artificial Sequence: Synthetic oligonucleotide
agacggaagccacggacag

SEQ ID NO: 135671 - RNA, 19 nt, Artificial Sequence
  Description of Artificial Sequence: Synthetic oligonucleotide
agaugucccuacuuuaaau

SEQ ID NO: 135672 - RNA, 19 nt, Artificial Sequence
  Description of Artificial Sequence: Synthetic oligonucleotide
cuuaucguuucagaaagga

SEQ ID NO: 135673 - RNA, 19 nt, Artificial Sequence
  Description of Artificial Sequence: Synthetic oligonucleotide
uucaaaucgcuggaccuca

SEQ ID NO: 135674 - RNA, 19 nt, Artificial Sequence
  Description of Artificial Sequence: Synthetic oligonucleotide
agucacccaauuaaaacca

SEQ ID NO: 135675 - RNA, 19 nt, Artificial Sequence
  Description of Artificial Sequence: Synthetic oligonucleotide
ugagcuagagucugggcuu

SEQ ID NO: 135676 - RNA, 19 nt, Artificial Sequence
  Description of Artificial Sequence: Synthetic oligonucleotide
aguauucuuaauggugucu

SEQ ID NO: 135677 - RNA, 19 nt, Artificial Sequence
  Description of Artificial Sequence: Synthetic oligonucleotide
uuauaggccguaguguaaa

SEQ ID NO: 135678 - RNA, 19 nt, Artificial Sequence
  Description of Artificial Sequence: Synthetic oligonucleotide
uuaaaauuccuggcaacuu

SEQ ID NO: 135679 - RNA, 19 nt, Artificial Sequence
  Description of Artificial Sequence: Synthetic oligonucleotide
caucagauuuccauaaucu

SEQ ID NO: 135680 - RNA, 19 nt, Artificial Sequence
  Description of Artificial Sequence: Synthetic oligonucleotide
agguuauacaaaguuaguu

SEQ ID NO: 135681 - RNA, 19 nt, Artificial Sequence
  Description of Artificial Sequence: Synthetic oligonucleotide
ugacuucaaaccaccuuaa

SEQ ID NO: 135682 - RNA, 19 nt, Artificial Sequence
  Description of Artificial Sequence: Synthetic oligonucleotide
aucagaaaauccacgacau

SEQ ID NO: 135683 - RNA, 19 nt, Artificial Sequence
  Description of Artificial Sequence: Synthetic oligonucleotide
acugcacgaucccggaguc

SEQ ID NO: 135684 - RNA, 19 nt, Artificial Sequence
  Description of Artificial Sequence: Synthetic oligonucleotide
acggcaggaucuacaaugc

SEQ ID NO: 135685 - RNA, 19 nt, Artificial Sequence
  Description of Artificial Sequence: Synthetic oligonucleotide
ucgauccacauauucgcaa

SEQ ID NO: 135686 - RNA, 19 nt, Artificial Sequence
  Description of Artificial Sequence: Synthetic oligonucleotide
gauggguaggcccggguca

SEQ ID NO: 135687 - RNA, 19 nt, Artificial Sequence
  Description of Artificial Sequence: Synthetic oligonucleotide
uucugaaucccgccccaug

SEQ ID NO: 135688 - RNA, 19 nt, Artificial Sequence
  Description of Artificial Sequence: Synthetic oligonucleotide
ucaacccaguguauucacu

SEQ ID NO: 135689 - RNA, 19 nt, Artificial Sequence
  Description of Artificial Sequence: Synthetic oligonucleotide
guaaucggcaggcacagua

SEQ ID NO: 135690 - RNA, 19 nt, Artificial Sequence
  Description of Artificial Sequence: Synthetic oligonucleotide
ucucaacccaguguauuca

SEQ ID NO: 135691 - RNA, 19 nt, Artificial Sequence
  Description of Artificial Sequence: Synthetic oligonucleotide
guacacuuguugcuugaug

SEQ ID NO: 135692 - RNA, 19 nt, Artificial Sequence
  Description of Artificial Sequence: Synthetic oligonucleotide
aguguauucacugcacgau

SEQ ID NO: 135693 - RNA, 19 nt, Artificial Sequence
  Description of Artificial Sequence: Synthetic oligonucleotide
aucaggugggcguaauggu

SEQ ID NO: 135694 - RNA, 19 nt, Artificial Sequence
  Description of Artificial Sequence: Synthetic oligonucleotide
ugaucaggugggcguaaug

SEQ ID NO: 135695 - RNA, 19 nt, Artificial Sequence
  Description of Artificial Sequence: Synthetic oligonucleotide
ugaaucccgccccauggaa

SEQ ID NO: 135696 - RNA, 19 nt, Artificial Sequence
  Description of Artificial Sequence: Synthetic oligonucleotide
gugaaggaccgcaccaugg

SEQ ID NO: 135697 - RNA, 19 nt, Artificial Sequence
  Description of Artificial Sequence: Synthetic oligonucleotide
auaucugcauacugauuaa

SEQ ID NO: 135698 - RNA, 19 nt, Artificial Sequence
  Description of Artificial Sequence: Synthetic oligonucleotide
augugggugagccaaucaa

SEQ ID NO: 135699 - RNA, 19 nt, Artificial Sequence
  Description of Artificial Sequence: Synthetic oligonucleotide
uugucuccaugaauccuga

SEQ ID NO: 135700 - RNA, 19 nt, Artificial Sequence
  Description of Artificial Sequence: Synthetic oligonucleotide
cuggaccucauucacccug

SEQ ID NO: 135701 - RNA, 19 nt, Artificial Sequence
  Description of Artificial Sequence: Synthetic oligonucleotide
auaaucugccauguugccu

SEQ ID NO: 135702 - RNA, 19 nt, Artificial Sequence
  Description of Artificial Sequence: Synthetic oligonucleotide
agagaagcgccuuucgcuu

SEQ ID NO: 135703 - RNA, 19 nt, Artificial Sequence
  Description of Artificial Sequence: Synthetic oligonucleotide
aucacacuaaggugaggca

SEQ ID NO: 135704 - RNA, 19 nt, Artificial Sequence
  Description of Artificial Sequence: Synthetic oligonucleotide
aauggugucucuacuccau

SEQ ID NO: 135705 - RNA, 19 nt, Artificial Sequence
  Description of Artificial Sequence: Synthetic oligonucleotide
agacguauuugacuucaaa

SEQ ID NO: 135706 - RNA, 19 nt, Artificial Sequence
  Description of Artificial Sequence: Synthetic oligonucleotide
cuuaggaggcaagucuagc

SEQ ID NO: 135707 - RNA, 19 nt, Artificial Sequence
  Description of Artificial Sequence: Synthetic oligonucleotide
ucuauuugucagugauuaa

SEQ ID NO: 135708 - RNA, 19 nt, Artificial Sequence
  Description of Artificial Sequence: Synthetic oligonucleotide
agggaggguagcuuucuca

SEQ ID NO: 135709 - RNA, 19 nt, Artificial Sequence
  Description of Artificial Sequence: Synthetic oligonucleotide
gugaaacucaccacaccag

SEQ ID NO: 135710 - RNA, 19 nt, Artificial Sequence
  Description of Artificial Sequence: Synthetic oligonucleotide
ccaucugccguaaaauggc

SEQ ID NO: 135711 - RNA, 19 nt, Artificial Sequence
  Description of Artificial Sequence: Synthetic oligonucleotide
uggauguacuggccaggag

SEQ ID NO: 135712 - RNA, 19 nt, Artificial Sequence
  Description of Artificial Sequence: Synthetic oligonucleotide
uuuccggaugggucgagaa

SEQ ID NO: 135713 - RNA, 19 nt, Artificial Sequence
  Description of Artificial Sequence: Synthetic oligonucleotide
uccauccccgucaugccgu

SEQ ID NO: 135714 - RNA, 19 nt, Artificial Sequence
  Description of Artificial Sequence: Synthetic oligonucleotide
gguuauacaaaguuaguuu

SEQ ID NO: 135715 - RNA, 19 nt, Artificial Sequence
  Description of Artificial Sequence: Synthetic oligonucleotide
ucagcgggcuugaauuccu

SEQ ID NO: 135716 - RNA, 19 nt, Artificial Sequence
  Description of Artificial Sequence: Synthetic oligonucleotide
cucaacccaguguauucac

SEQ ID NO: 135717 - RNA, 19 nt, Artificial Sequence
  Description of Artificial Sequence: Synthetic oligonucleotide
augacggcaggaucuacaa

SEQ ID NO: 135718 - RNA, 19 nt, Artificial Sequence
  Description of Artificial Sequence: Synthetic oligonucleotide
aucucuuuaguaaccgaga

SEQ ID NO: 135719 - RNA, 19 nt, Artificial Sequence
  Description of Artificial Sequence: Synthetic oligonucleotide
cucuacuccauauauuagu

SEQ ID NO: 135720 - RNA, 19 nt, Artificial Sequence
  Description of Artificial Sequence: Synthetic oligonucleotide
uccgugaagaaagccuucu

SEQ ID NO: 135721 - RNA, 19 nt, Artificial Sequence
  Description of Artificial Sequence: Synthetic oligonucleotide
uggaucguccuuguccagc

SEQ ID NO: 135722 - RNA, 19 nt, Artificial Sequence
  Description of Artificial Sequence: Synthetic oligonucleotide
ugccguaaaauggcuguca

SEQ ID NO: 135723 - RNA, 19 nt, Artificial Sequence
  Description of Artificial Sequence: Synthetic oligonucleotide
ggcguaaugguagucuucc

SEQ ID NO: 135724 - RNA, 19 nt, Artificial Sequence
  Description of Artificial Sequence: Synthetic oligonucleotide
auugcacgcaggaagacuu

SEQ ID NO: 135725 - RNA, 19 nt, Artificial Sequence
  Description of Artificial Sequence: Synthetic oligonucleotide
cacauauucgcaaauucau

SEQ ID NO: 135726 - RNA, 19 nt, Artificial Sequence
  Description of Artificial Sequence: Synthetic oligonucleotide
auaggccguaguguaaaug

SEQ ID NO: 135727 - RNA, 19 nt, Artificial Sequence
  Description of Artificial Sequence: Synthetic oligonucleotide
gguugaaugcugaagcuga

SEQ ID NO: 135728 - RNA, 19 nt, Artificial Sequence
  Description of Artificial Sequence: Synthetic oligonucleotide
ucgcuggaccucauucacc

SEQ ID NO: 135729 - RNA, 19 nt, Artificial Sequence
  Description of Artificial Sequence: Synthetic oligonucleotide
caguguauucacugcacga

SEQ ID NO: 135730 - RNA, 19 nt, Artificial Sequence
  Description of Artificial Sequence: Synthetic oligonucleotide
ugcgcucguggaauggccu

SEQ ID NO: 135731 - RNA, 19 nt, Artificial Sequence
  Description of Artificial Sequence: Synthetic oligonucleotide
cucuuuaguaaccgagaga

SEQ ID NO: 135732 - RNA, 19 nt, Artificial Sequence
  Description of Artificial Sequence: Synthetic oligonucleotide
ucgaucugcccaugggccu

SEQ ID NO: 135733 - RNA, 19 nt, Artificial Sequence
  Description of Artificial Sequence: Synthetic oligonucleotide
cuagcgcaaauccaucaga

SEQ ID NO: 135734 - RNA, 19 nt, Artificial Sequence
  Description of Artificial Sequence: Synthetic oligonucleotide
caugacggcaggaucuaca

SEQ ID NO: 135735 - RNA, 19 nt, Artificial Sequence
  Description of Artificial Sequence: Synthetic oligonucleotide
acuuaggaggcaagucuag

SEQ ID NO: 135736 - RNA, 19 nt, Artificial Sequence
  Description of Artificial Sequence: Synthetic oligonucleotide
cuuucgggucgucuucggc

SEQ ID NO: 135737 - RNA, 19 nt, Artificial Sequence
  Description of Artificial Sequence: Synthetic oligonucleotide
auaucauccccgggugggg

SEQ ID NO: 135738 - RNA, 19 nt, Artificial Sequence
  Description of Artificial Sequence: Synthetic oligonucleotide
uccgguucaccguccugag

SEQ ID NO: 135739 - RNA, 19 nt, Artificial Sequence
  Description of Artificial Sequence: Synthetic oligonucleotide
ggaugggucgagaauauuc

SEQ ID NO: 135740 - RNA, 19 nt, Artificial Sequence
  Description of Artificial Sequence: Synthetic oligonucleotide
cucuagcgcaaauccauca

SEQ ID NO: 135741 - RNA, 19 nt, Artificial Sequence
  Description of Artificial Sequence: Synthetic oligonucleotide
guugaaugcugaagcugag

SEQ ID NO: 135742 - RNA, 19 nt, Artificial Sequence
  Description of Artificial Sequence: Synthetic oligonucleotide
cagguaucgguccgugaag

SEQ ID NO: 135743 - RNA, 19 nt, Artificial Sequence
  Description of Artificial Sequence: Synthetic oligonucleotide
gacuguccgguucaccguc

SEQ ID NO: 135744 - RNA, 19 nt, Artificial Sequence
  Description of Artificial Sequence: Synthetic oligonucleotide
uaauugcacgcaggaagac

SEQ ID NO: 135745 - RNA, 19 nt, Artificial Sequence
  Description of Artificial Sequence: Synthetic oligonucleotide
agagaugucccuacuuuaa

SEQ ID NO: 135746 - RNA, 19 nt, Artificial Sequence
  Description of Artificial Sequence: Synthetic oligonucleotide
gagacggaagccacggaca

SEQ ID NO: 135747 - RNA, 19 nt, Artificial Sequence
  Description of Artificial Sequence: Synthetic oligonucleotide
ccaguguauucacugcacg

SEQ ID NO: 135748 - RNA, 19 nt, Artificial Sequence
  Description of Artificial Sequence: Synthetic oligonucleotide
guaggcccgggucauccag

SEQ ID NO: 135749 - RNA, 19 nt, Artificial Sequence
  Description of Artificial Sequence: Synthetic oligonucleotide
auggagcguggacggcugc

SEQ ID NO: 135750 - RNA, 19 nt, Artificial Sequence
  Description of Artificial Sequence: Synthetic oligonucleotide
gugaaacuuaggaggcaag

SEQ ID NO: 135751 - RNA, 19 nt, Artificial Sequence
  Description of Artificial Sequence: Synthetic oligonucleotide
cacaaaguuaccgaugagu

SEQ ID NO: 135752 - RNA, 19 nt, Artificial Sequence
  Description of Artificial Sequence: Synthetic oligonucleotide
uccaugcgcucguggaaug

SEQ ID NO: 135753 - RNA, 19 nt, Artificial Sequence
  Description of Artificial Sequence: Synthetic oligonucleotide
agcuaagcucucugcaaau

SEQ ID NO: 135754 - RNA, 19 nt, Artificial Sequence
  Description of Artificial Sequence: Synthetic oligonucleotide
aucgguccgugaagaaagc

SEQ ID NO: 135755 - RNA, 19 nt, Artificial Sequence
  Description of Artificial Sequence: Synthetic oligonucleotide
augcgcucguggaauggcc

SEQ ID NO: 135756 - RNA, 19 nt, Artificial Sequence
  Description of Artificial Sequence: Synthetic oligonucleotide
ucgguccgugaagaaagcc

SEQ ID NO: 135757 - RNA, 19 nt, Artificial Sequence
  Description of Artificial Sequence: Synthetic oligonucleotide
acccaugacggcaggaucu

SEQ ID NO: 135758 - RNA, 19 nt, Artificial Sequence
  Description of Artificial Sequence: Synthetic oligonucleotide
ccaucagauuuccauaauc

SEQ ID NO: 135759 - RNA, 19 nt, Artificial Sequence
  Description of Artificial Sequence: Synthetic oligonucleotide
uuccggaugggucgagaau

SEQ ID NO: 135760 - RNA, 19 nt, Artificial Sequence
  Description of Artificial Sequence: Synthetic oligonucleotide
cuuauaggccguaguguaa

SEQ ID NO: 135761 - RNA, 19 nt, Artificial Sequence
  Description of Artificial Sequence: Synthetic oligonucleotide
uauaggccguaguguaaau

SEQ ID NO: 135762 - RNA, 19 nt, Artificial Sequence
  Description of Artificial Sequence: Synthetic oligonucleotide
agguaucgguccgugaaga

SEQ ID NO: 135763 - RNA, 19 nt, Artificial Sequence
  Description of Artificial Sequence: Synthetic oligonucleotide
ugggcguaaugguagucuu

SEQ ID NO: 135764 - RNA, 19 nt, Artificial Sequence
  Description of Artificial Sequence: Synthetic oligonucleotide
ugaucuggacaugccucug

SEQ ID NO: 135765 - RNA, 19 nt, Artificial Sequence
  Description of Artificial Sequence: Synthetic oligonucleotide
ggucgagaauauucaaauc

SEQ ID NO: 135766 - RNA, 19 nt, Artificial Sequence
  Description of Artificial Sequence: Synthetic oligonucleotide
ccagaguauguaugacugg

SEQ ID NO: 135767 - RNA, 19 nt, Artificial Sequence
  Description of Artificial Sequence: Synthetic oligonucleotide
uuccaugcgcucguggaau

SEQ ID NO: 135768 - RNA, 19 nt, Artificial Sequence
  Description of Artificial Sequence: Synthetic oligonucleotide
ugaucccuucagccaagaa

SEQ ID NO: 135769 - RNA, 19 nt, Artificial Sequence
  Description of Artificial Sequence: Synthetic oligonucleotide
caugaucauagugaauaaa

SEQ ID NO: 135770 - RNA, 19 nt, Artificial Sequence
  Description of Artificial Sequence: Synthetic oligonucleotide
gucuugaucaggugggcgu

SEQ ID NO: 135771 - RNA, 19 nt, Artificial Sequence
  Description of Artificial Sequence: Synthetic oligonucleotide
caugcgcucguggaauggc

SEQ ID NO: 135772 - RNA, 19 nt, Artificial Sequence
  Description of Artificial Sequence: Synthetic oligonucleotide
uaaccgagagaugucccua

SEQ ID NO: 135773 - RNA, 19 nt, Artificial Sequence
  Description of Artificial Sequence: Synthetic oligonucleotide
cccauggaaaugacugucc

SEQ ID NO: 135774 - RNA, 19 nt, Artificial Sequence
  Description of Artificial Sequence: Synthetic oligonucleotide
cagagaagcgccuuucgcu

SEQ ID NO: 135775 - RNA, 19 nt, Artificial Sequence
  Description of Artificial Sequence: Synthetic oligonucleotide
ucuugaucaggugggcgua

SEQ ID NO: 135776 - RNA, 19 nt, Artificial Sequence
  Description of Artificial Sequence: Synthetic oligonucleotide
aaguuaccgaugaguucug

SEQ ID NO: 135777 - RNA, 19 nt, Artificial Sequence
  Description of Artificial Sequence: Synthetic oligonucleotide
gucagcgggcuugaauucc

SEQ ID NO: 135778 - RNA, 19 nt, Artificial Sequence
  Description of Artificial Sequence: Synthetic oligonucleotide
aggauccuuguaaguuuac

SEQ ID NO: 135779 - RNA, 19 nt, Artificial Sequence
  Description of Artificial Sequence: Synthetic oligonucleotide
gagaagcgccuuucgcuuc

SEQ ID NO: 135780 - RNA, 19 nt, Artificial Sequence
  Description of Artificial Sequence: Synthetic oligonucleotide
uaucauccccgggugggga

SEQ ID NO: 135781 - RNA, 19 nt, Artificial Sequence
  Description of Artificial Sequence: Synthetic oligonucleotide
cucgauccacauauucgca

SEQ ID NO: 135782 - RNA, 19 nt, Artificial Sequence
  Description of Artificial Sequence: Synthetic oligonucleotide
acgaucccggaguccacug

SEQ ID NO: 135783 - RNA, 19 nt, Artificial Sequence
  Description of Artificial Sequence: Synthetic oligonucleotide
gacguuggagacacagaga

SEQ ID NO: 135784 - RNA, 19 nt, Artificial Sequence
  Description of Artificial Sequence: Synthetic oligonucleotide
ggagaugugggugagccaa

SEQ ID NO: 135785 - RNA, 19 nt, Artificial Sequence
  Description of Artificial Sequence: Synthetic oligonucleotide
uguccgguucaccguccug

SEQ ID NO: 135786 - RNA, 19 nt, Artificial Sequence
  Description of Artificial Sequence: Synthetic oligonucleotide
uuucgcuuccaaugacauu

SEQ ID NO: 135787 - RNA, 19 nt, Artificial Sequence
  Description of Artificial Sequence: Synthetic oligonucleotide
agcgccuuucgcuuccaau

SEQ ID NO: 135788 - RNA, 19 nt, Artificial Sequence
  Description of Artificial Sequence: Synthetic oligonucleotide
ccaucagaaaauccacgac

SEQ ID NO: 135789 - RNA, 19 nt, Artificial Sequence
  Description of Artificial Sequence: Synthetic oligonucleotide
aucugccguaaaauggcug

SEQ ID NO: 135790 - RNA, 19 nt, Artificial Sequence
  Description of Artificial Sequence: Synthetic oligonucleotide
guaguguaaaugguucucu

SEQ ID NO: 135791 - RNA, 19 nt, Artificial Sequence
  Description of Artificial Sequence: Synthetic oligonucleotide
ucccgccccauggaaauga

SEQ ID NO: 135792 - RNA, 19 nt, Artificial Sequence
  Description of Artificial Sequence: Synthetic oligonucleotide
guaaccgagagaugucccu

SEQ ID NO: 135793 - RNA, 19 nt, Artificial Sequence
  Description of Artificial Sequence: Synthetic oligonucleotide
ccguauauacaaacuucug

SEQ ID NO: 135794 - RNA, 19 nt, Artificial Sequence
  Description of Artificial Sequence: Synthetic oligonucleotide
ugacggcaggaucuacaau

SEQ ID NO: 135795 - RNA, 19 nt, Artificial Sequence
  Description of Artificial Sequence: Synthetic oligonucleotide
gggucgagaauauucaaau

SEQ ID NO: 135796 - RNA, 19 nt, Artificial Sequence
  Description of Artificial Sequence: Synthetic oligonucleotide
guaucgguccgugaagaaa

SEQ ID NO: 135797 - RNA, 19 nt, Artificial Sequence
  Description of Artificial Sequence: Synthetic oligonucleotide
gcagguaucgguccgugaa

SEQ ID NO: 135798 - RNA, 19 nt, Artificial Sequence
  Description of Artificial Sequence: Synthetic oligonucleotide
ggugagcuagagucugggc

SEQ ID NO: 135799 - RNA, 19 nt, Artificial Sequence
  Description of Artificial Sequence: Synthetic oligonucleotide
caccguccugagaaguuuc

SEQ ID NO: 135800 - RNA, 19 nt, Artificial Sequence
  Description of Artificial Sequence: Synthetic oligonucleotide
cgcuggaccucauucaccc

SEQ ID NO: 135801 - RNA, 19 nt, Artificial Sequence
  Description of Artificial Sequence: Synthetic oligonucleotide
agccacagcuaggugaaaa

SEQ ID NO: 135802 - RNA, 19 nt, Artificial Sequence
  Description of Artificial Sequence: Synthetic oligonucleotide
cagcuaagcucucugcaaa

SEQ ID NO: 135803 - RNA, 19 nt, Artificial Sequence
  Description of Artificial Sequence: Synthetic oligonucleotide
uguugccuuugaggggcag

SEQ ID NO: 135804 - RNA, 19 nt, Artificial Sequence
  Description of Artificial Sequence: Synthetic oligonucleotide
guccgguucaccguccuga

SEQ ID NO: 135805 - RNA, 19 nt, Artificial Sequence
  Description of Artificial Sequence: Synthetic oligonucleotide
gcuuaucguuucagaaagg

SEQ ID NO: 135806 - RNA, 19 nt, Artificial Sequence
  Description of Artificial Sequence: Synthetic oligonucleotide
ucguuucagaaaggaucac

SEQ ID NO: 135807 - RNA, 19 nt, Artificial Sequence
  Description of Artificial Sequence: Synthetic oligonucleotide
gguucaccguccugagaag

SEQ ID NO: 135808 - RNA, 19 nt, Artificial Sequence
  Description of Artificial Sequence: Synthetic oligonucleotide
gcuaagccacaucagcuaa

SEQ ID NO: 135809 - RNA, 19 nt, Artificial Sequence
  Description of Artificial Sequence: Synthetic oligonucleotide
gacggugacguuggagaca

SEQ ID NO: 135810 - RNA, 19 nt, Artificial Sequence
  Description of Artificial Sequence: Synthetic oligonucleotide
gccguaguguaaaugguuc

SEQ ID NO: 135811 - RNA, 19 nt, Artificial Sequence
  Description of Artificial Sequence: Synthetic oligonucleotide
auggccucagugccucagu

SEQ ID NO: 135812 - RNA, 19 nt, Artificial Sequence
  Description of Artificial Sequence: Synthetic oligonucleotide
gggaggguagcuuucucaa

SEQ ID NO: 135813 - RNA, 19 nt, Artificial Sequence
  Description of Artificial Sequence: Synthetic oligonucleotide
gacuggguugaaugcugaa

SEQ ID NO: 135814 - RNA, 19 nt, Artificial Sequence
  Description of Artificial Sequence: Synthetic oligonucleotide
ccguucaacuccagacugg

SEQ ID NO: 135815 - RNA, 19 nt, Artificial Sequence
  Description of Artificial Sequence: Synthetic oligonucleotide
gacagaggguugaugggua

SEQ ID NO: 135816 - RNA, 19 nt, Artificial Sequence
  Description of Artificial Sequence: Synthetic oligonucleotide
cuaggugaaaauaguuguu

SEQ ID NO: 135817 - RNA, 19 nt, Artificial Sequence
  Description of Artificial Sequence: Synthetic oligonucleotide
auggugucucuacuccaua

SEQ ID NO: 135818 - RNA, 19 nt, Artificial Sequence
  Description of Artificial Sequence: Synthetic oligonucleotide
ggcaacuuauaggccguag

SEQ ID NO: 135819 - RNA, 19 nt, Artificial Sequence
  Description of Artificial Sequence: Synthetic oligonucleotide
ggcuuccaugcgcucgugg

SEQ ID NO: 135820 - RNA, 19 nt, Artificial Sequence
  Description of Artificial Sequence: Synthetic oligonucleotide
acucaccacaccaguuuca

SEQ ID NO: 135821 - RNA, 19 nt, Artificial Sequence
  Description of Artificial Sequence: Synthetic oligonucleotide
cuggaucguccuuguccag

SEQ ID NO: 135822 - RNA, 19 nt, Artificial Sequence
  Description of Artificial Sequence: Synthetic oligonucleotide
cguucaacuccagacuggg

SEQ ID NO: 135823 - RNA, 19 nt, Artificial Sequence
  Description of Artificial Sequence: Synthetic oligonucleotide
uggacggcugccucuccua

SEQ ID NO: 135824 - RNA, 19 nt, Artificial Sequence
  Description of Artificial Sequence: Synthetic oligonucleotide
cccaguguauucacugcac

SEQ ID NO: 135825 - RNA, 19 nt, Artificial Sequence
  Description of Artificial Sequence: Synthetic oligonucleotide
agacuuuguucugcauggu

SEQ ID NO: 135826 - RNA, 19 nt, Artificial Sequence
  Description of Artificial Sequence: Synthetic oligonucleotide
agcgggcuugaauuccuua

SEQ ID NO: 135827 - RNA, 19 nt, Artificial Sequence
  Description of Artificial Sequence: Synthetic oligonucleotide
cugaaucccgccccaugga

SEQ ID NO: 135828 - RNA, 19 nt, Artificial Sequence
  Description of Artificial Sequence: Synthetic oligonucleotide
uugcacgcaggaagacuuu

SEQ ID NO: 135829 - RNA, 19 nt, Artificial Sequence
  Description of Artificial Sequence: Synthetic oligonucleotide
cuuccaugcgcucguggaa

SEQ ID NO: 135830 - RNA, 19 nt, Artificial Sequence
  Description of Artificial Sequence: Synthetic oligonucleotide
uugaucaggugggcguaau

SEQ ID NO: 135831 - RNA, 19 nt, Artificial Sequence
  Description of Artificial Sequence: Synthetic oligonucleotide
ggcauggugaaggaccgca

SEQ ID NO: 135832 - RNA, 19 nt, Artificial Sequence
  Description of Artificial Sequence: Synthetic oligonucleotide
gaaccaccguauauacaaa

SEQ ID NO: 135833 - RNA, 19 nt, Artificial Sequence
  Description of Artificial Sequence: Synthetic oligonucleotide
aggccguaguguaaauggu

SEQ ID NO: 135834 - RNA, 19 nt, Artificial Sequence
  Description of Artificial Sequence: Synthetic oligonucleotide
caugaggaggauccuugua

SEQ ID NO: 135835 - RNA, 19 nt, Artificial Sequence
  Description of Artificial Sequence: Synthetic oligonucleotide
cacugcacgaucccggagu

SEQ ID NO: 135836 - RNA, 19 nt, Artificial Sequence
  Description of Artificial Sequence: Synthetic oligonucleotide
gcaacuuauaggccguagu

SEQ ID NO: 135837 - RNA, 19 nt, Artificial Sequence
  Description of Artificial Sequence: Synthetic oligonucleotide
ccguaaaauggcugucaug

SEQ ID NO: 135838 - RNA, 19 nt, Artificial Sequence
  Description of Artificial Sequence: Synthetic oligonucleotide
cuuagggucucugguccca

SEQ ID NO: 135839 - RNA, 19 nt, Artificial Sequence
  Description of Artificial Sequence: Synthetic oligonucleotide
aggcucuagcgcaaaucca

SEQ ID NO: 135840 - RNA, 19 nt, Artificial Sequence
  Description of Artificial Sequence: Synthetic oligonucleotide
ccgaugaguucugaauccc

SEQ ID NO: 135841 - RNA, 19 nt, Artificial Sequence
  Description of Artificial Sequence: Synthetic oligonucleotide
cacuaaggugaggcauccc

SEQ ID NO: 135842 - RNA, 19 nt, Artificial Sequence
  Description of Artificial Sequence: Synthetic oligonucleotide
aagcgccuuucgcuuccaa

SEQ ID NO: 135843 - RNA, 19 nt, Artificial Sequence
  Description of Artificial Sequence: Synthetic oligonucleotide
cuuugucuccaugaauccu

SEQ ID NO: 135844 - RNA, 19 nt, Artificial Sequence
  Description of Artificial Sequence: Synthetic oligonucleotide
gagcguggacggcugccuc

SEQ ID NO: 135845 - RNA, 19 nt, Artificial Sequence
  Description of Artificial Sequence: Synthetic oligonucleotide
aucggcaggcacaguagau

SEQ ID NO: 135846 - RNA, 19 nt, Artificial Sequence
  Description of Artificial Sequence: Synthetic oligonucleotide
accguccugagaaguuucu

SEQ ID NO: 135847 - RNA, 19 nt, Artificial Sequence
  Description of Artificial Sequence: Synthetic oligonucleotide
gugggcguaaugguagucu

SEQ ID NO: 135848 - RNA, 19 nt, Artificial Sequence
  Description of Artificial Sequence: Synthetic oligonucleotide
cuggcaacuuauaggccgu

SEQ ID NO: 135849 - RNA, 19 nt, Artificial Sequence
  Description of Artificial Sequence: Synthetic oligonucleotide
gugggugagccaaucaaau

SEQ ID NO: 135850 - RNA, 19 nt, Artificial Sequence
  Description of Artificial Sequence: Synthetic oligonucleotide
ggugagccaaucaaauccu

SEQ ID NO: 135851 - RNA, 19 nt, Artificial Sequence
  Description of Artificial Sequence: Synthetic oligonucleotide
caucugccguaaaauggcu

SEQ ID NO: 135852 - RNA, 19 nt, Artificial Sequence
  Description of Artificial Sequence: Synthetic oligonucleotide
gugccucagugacuuuguc

SEQ ID NO: 135853 - RNA, 19 nt, Artificial Sequence
  Description of Artificial Sequence: Synthetic oligonucleotide
gguaucgguccgugaagaa

SEQ ID NO: 135854 - RNA, 19 nt, Artificial Sequence
  Description of Artificial Sequence: Synthetic oligonucleotide
caacuccagacuggguuga

SEQ ID NO: 135855 - RNA, 19 nt, Artificial Sequence
  Description of Artificial Sequence: Synthetic oligonucleotide
guucaccguccugagaagu

SEQ ID NO: 135856 - RNA, 19 nt, Artificial Sequence
  Description of Artificial Sequence: Synthetic oligonucleotide
uccccgucaugccguucaa

SEQ ID NO: 135857 - RNA, 19 nt, Artificial Sequence
  Description of Artificial Sequence: Synthetic oligonucleotide
gacggaagccacggacaga

SEQ ID NO: 135858 - RNA, 19 nt, Artificial Sequence
  Description of Artificial Sequence: Synthetic oligonucleotide
gggacaucggccacaucca

SEQ ID NO: 135859 - RNA, 19 nt, Artificial Sequence
  Description of Artificial Sequence: Synthetic oligonucleotide
cucugagaaccaccguaua

SEQ ID NO: 135860 - RNA, 19 nt, Artificial Sequence
  Description of Artificial Sequence: Synthetic oligonucleotide
ccgucaugccguucaacuc

SEQ ID NO: 135861 - RNA, 19 nt, Artificial Sequence
  Description of Artificial Sequence: Synthetic oligonucleotide
cugcacgaucccggagucc

SEQ ID NO: 135862 - RNA, 19 nt, Artificial Sequence
  Description of Artificial Sequence: Synthetic oligonucleotide
ggucucuggucccauggcu

SEQ ID NO: 135863 - RNA, 19 nt, Artificial Sequence
  Description of Artificial Sequence: Synthetic oligonucleotide
gccaucugaaaagcugaca

SEQ ID NO: 135864 - RNA, 19 nt, Artificial Sequence
  Description of Artificial Sequence: Synthetic oligonucleotide
gaccuggagugcaucuucu

SEQ ID NO: 135865 - RNA, 19 nt, Artificial Sequence
  Description of Artificial Sequence: Synthetic oligonucleotide
ggauccuuguaaguuuacu

SEQ ID NO: 135866 - RNA, 19 nt, Artificial Sequence
  Description of Artificial Sequence: Synthetic oligonucleotide
cauuggucagcugcauugu

SEQ ID NO: 135867 - RNA, 19 nt, Artificial Sequence
  Description of Artificial Sequence: Synthetic oligonucleotide
gcugucggaggagagggaa

SEQ ID NO: 135868 - RNA, 19 nt, Artificial Sequence
  Description of Artificial Sequence: Synthetic oligonucleotide
gcguuuugcugggcagugg

SEQ ID NO: 135869 - RNA, 19 nt, Artificial Sequence
  Description of Artificial Sequence: Synthetic oligonucleotide
ggcucuagcgcaaauccau

SEQ ID NO: 135870 - RNA, 19 nt, Artificial Sequence
  Description of Artificial Sequence: Synthetic oligonucleotide
cuugaucaggugggcguaa

SEQ ID NO: 135871 - RNA, 19 nt, Artificial Sequence
  Description of Artificial Sequence: Synthetic oligonucleotide
ccaugcgcucguggaaugg

SEQ ID NO: 135872 - RNA, 19 nt, Artificial Sequence
  Description of Artificial Sequence: Synthetic oligonucleotide
ccgugaagaaagccuucuc

SEQ ID NO: 135873 - RNA, 19 nt, Artificial Sequence
  Description of Artificial Sequence: Synthetic oligonucleotide
cccgucaugccguucaacu

SEQ ID NO: 135874 - RNA, 19 nt, Artificial Sequence
  Description of Artificial Sequence: Synthetic oligonucleotide
gcucuagcgcaaauccauc

SEQ ID NO: 135875 - RNA, 19 nt, Artificial Sequence
  Description of Artificial Sequence: Synthetic oligonucleotide
ccggaguccacugaggucu

SEQ ID NO: 135876 - RNA, 19 nt, Artificial Sequence
  Description of Artificial Sequence: Synthetic oligonucleotide
caugggccucaggaugcuc

SEQ ID NO: 135877 - RNA, 19 nt, Artificial Sequence
  Description of Artificial Sequence: Synthetic oligonucleotide
cgggcuugaauuccuuauc

SEQ ID NO: 135878 - RNA, 19 nt, Artificial Sequence
  Description of Artificial Sequence: Synthetic oligonucleotide
gcucguggaauggccucag

SEQ ID NO: 135879 - RNA, 19 nt, Artificial Sequence
  Description of Artificial Sequence: Synthetic oligonucleotide
gaagcgccuuucgcuucca

SEQ ID NO: 135880 - RNA, 19 nt, Artificial Sequence
  Description of Artificial Sequence: Synthetic oligonucleotide
guggacggcugccucuccu

SEQ ID NO: 135881 - RNA, 19 nt, Artificial Sequence
  Description of Artificial Sequence: Synthetic oligonucleotide
cgauccacauauucgcaaa

SEQ ID NO: 135882 - RNA, 19 nt, Artificial Sequence
  Description of Artificial Sequence: Synthetic oligonucleotide
caucuagaccugagggcau

SEQ ID NO: 135883 - RNA, 19 nt, Artificial Sequence
  Description of Artificial Sequence: Synthetic oligonucleotide
ccaucacacuaaggugagg

SEQ ID NO: 135884 - RNA, 19 nt, Artificial Sequence
  Description of Artificial Sequence: Synthetic oligonucleotide
gggcguaaugguagucuuc

SEQ ID NO: 135885 - RNA, 19 nt, Artificial Sequence
  Description of Artificial Sequence: Synthetic oligonucleotide
ggugggcguaaugguaguc

SEQ ID NO: 135886 - RNA, 19 nt, Artificial Sequence
  Description of Artificial Sequence: Synthetic oligonucleotide
gccguaaaauggcugucau

SEQ ID NO: 135887 - RNA, 19 nt, Artificial Sequence
  Description of Artificial Sequence: Synthetic oligonucleotide
gguaggcccgggucaucca

SEQ ID NO: 135888 - RNA, 19 nt, Artificial Sequence
  Description of Artificial Sequence: Synthetic oligonucleotide
gcgcucguggaauggccuc

SEQ ID NO: 135889 - RNA, 19 nt, Artificial Sequence
  Description of Artificial Sequence: Synthetic oligonucleotide
gucugcuuucgggucgucu

SEQ ID NO: 135890 - RNA, 19 nt, Artificial Sequence
  Description of Artificial Sequence: Synthetic oligonucleotide
gggaugucgucuucauuuu

SEQ ID NO: 135891 - RNA, 19 nt, Artificial Sequence
  Description of Artificial Sequence: Synthetic oligonucleotide
ggcugaucucuaccaugaa

SEQ ID NO: 135892 - RNA, 19 nt, Artificial Sequence
  Description of Artificial Sequence: Synthetic oligonucleotide
ccguaguguaaaugguucu

SEQ ID NO: 135893 - RNA, 19 nt, Artificial Sequence
  Description of Artificial Sequence: Synthetic oligonucleotide
ggccaggagaacucuuaau

SEQ ID NO: 135894 - RNA, 19 nt, Artificial Sequence
  Description of Artificial Sequence: Synthetic oligonucleotide
gagaugugggugagccaau

SEQ ID NO: 135895 - RNA, 19 nt, Artificial Sequence
  Description of Artificial Sequence: Synthetic oligonucleotide
ccaggcuaucagguccuug

SEQ ID NO: 135896 - RNA, 19 nt, Artificial Sequence
  Description of Artificial Sequence: Synthetic oligonucleotide
cgccuuucgcuuccaauga

SEQ ID NO: 135897 - RNA, 19 nt, Artificial Sequence
  Description of Artificial Sequence: Synthetic oligonucleotide
ccacaucagcuaagcucuc

SEQ ID NO: 135898 - RNA, 19 nt, Artificial Sequence
  Description of Artificial Sequence: Synthetic oligonucleotide
cagaagggguacacuuguu

SEQ ID NO: 135899 - RNA, 19 nt, Artificial Sequence
  Description of Artificial Sequence: Synthetic oligonucleotide
cacgaucccggaguccacu

SEQ ID NO: 135900 - RNA, 19 nt, Artificial Sequence
  Description of Artificial Sequence: Synthetic oligonucleotide
cauccccgucaugccguuc

SEQ ID NO: 135901 - RNA, 19 nt, Artificial Sequence
  Description of Artificial Sequence: Synthetic oligonucleotide
ggccguaguguaaaugguu

SEQ ID NO: 135902 - RNA, 19 nt, Artificial Sequence
  Description of Artificial Sequence: Synthetic oligonucleotide
cccgccccauggaaaugac

SEQ ID NO: 135903 - RNA, 19 nt, Artificial Sequence
  Description of Artificial Sequence: Synthetic oligonucleotide
gguacacuuguugcuugau

SEQ ID NO: 135904 - RNA, 19 nt, Artificial Sequence
  Description of Artificial Sequence: Synthetic oligonucleotide
cuguccgguucaccguccu

SEQ ID NO: 135905 - RNA, 19 nt, Artificial Sequence
  Description of Artificial Sequence: Synthetic oligonucleotide
ggacaucggccacauccau

SEQ ID NO: 135906 - RNA, 19 nt, Artificial Sequence
  Description of Artificial Sequence: Synthetic oligonucleotide
caggaucuacaaugccauu

SEQ ID NO: 135907 - RNA, 19 nt, Artificial Sequence
  Description of Artificial Sequence: Synthetic oligonucleotide
guucugaaucccgccccau

SEQ ID NO: 135908 - RNA, 19 nt, Artificial Sequence
  Description of Artificial Sequence: Synthetic oligonucleotide
gccgggaggaugauggcau

SEQ ID NO: 135909 - RNA, 19 nt, Artificial Sequence
  Description of Artificial Sequence: Synthetic oligonucleotide
gugggacaucggccacauc

SEQ ID NO: 135910 - RNA, 19 nt, Artificial Sequence
  Description of Artificial Sequence: Synthetic oligonucleotide
ccuuuuccggaugggucga

SEQ ID NO: 135911 - RNA, 19 nt, Artificial Sequence
  Description of Artificial Sequence: Synthetic oligonucleotide
gcguggacggcugccucuc

SEQ ID NO: 135912 - RNA, 19 nt, Artificial Sequence
  Description of Artificial Sequence: Synthetic oligonucleotide
cucguggaauggccucagu

SEQ ID NO: 135913 - RNA, 19 nt, Artificial Sequence
  Description of Artificial Sequence: Synthetic oligonucleotide
gcuggaccucauucacccu

SEQ ID NO: 135914 - RNA, 19 nt, Artificial Sequence
  Description of Artificial Sequence: Synthetic oligonucleotide
cgggucgucuucggcgggg

SEQ ID NO: 135915 - RNA, 19 nt, Artificial Sequence
  Description of Artificial Sequence: Synthetic oligonucleotide
ccccgucaugccguucaac

SEQ ID NO: 135916 - RNA, 19 nt, Artificial Sequence
  Description of Artificial Sequence: Synthetic oligonucleotide
cauccccggguggggaugu

SEQ ID NO: 135917 - RNA, 19 nt, Artificial Sequence
  Description of Artificial Sequence: Synthetic oligonucleotide
cguggacggcugccucucc

SEQ ID NO: 135918 - RNA, 19 nt, Artificial Sequence
  Description of Artificial Sequence: Synthetic oligonucleotide
gguaaucggcaggcacagu

SEQ ID NO: 135919 - RNA, 19 nt, Artificial Sequence
  Description of Artificial Sequence: Synthetic oligonucleotide
ccuuaucuggaucguccuu

SEQ ID NO: 135920 - RNA, 19 nt, Artificial Sequence
  Description of Artificial Sequence: Synthetic oligonucleotide
cagcgggcuugaauuccuu

SEQ ID NO: 135921 - RNA, 19 nt, Artificial Sequence
  Description of Artificial Sequence: Synthetic oligonucleotide
ggcaugguccugacaccau

SEQ ID NO: 135922 - RNA, 19 nt, Artificial Sequence
  Description of Artificial Sequence: Synthetic oligonucleotide
ccgccccauggaaaugacu

SEQ ID NO: 135923 - RNA, 19 nt, Artificial Sequence
  Description of Artificial Sequence: Synthetic oligonucleotide
ccauccccgucaugccguu

SEQ ID NO: 135924 - RNA, 19 nt, Artificial Sequence
  Description of Artificial Sequence: Synthetic oligonucleotide
ccacgacaucuguccucau

SEQ ID NO: 135925 - RNA, 19 nt, Artificial Sequence
  Description of Artificial Sequence: Synthetic oligonucleotide
cggaugggucgagaauauu

SEQ ID NO: 135926 - RNA, 19 nt, Artificial Sequence
  Description of Artificial Sequence: Synthetic oligonucleotide
uuuauuacguguuugaucc

SEQ ID NO: 135927 - RNA, 19 nt, Artificial Sequence
  Description of Artificial Sequence: Synthetic oligonucleotide
aauuaguucggucuggggc

SEQ ID NO: 135928 - RNA, 19 nt, Artificial Sequence
  Description of Artificial Sequence: Synthetic oligonucleotide
gaugagaacgggaagaugg

SEQ ID NO: 135929 - RNA, 19 nt, Artificial Sequence
  Description of Artificial Sequence: Synthetic oligonucleotide
uccgauagggcgaagaggg

SEQ ID NO: 135930 - RNA, 19 nt, Artificial Sequence
  Description of Artificial Sequence: Synthetic oligonucleotide
acuacuguuggucagauca

SEQ ID NO: 135931 - RNA, 19 nt, Artificial Sequence
  Description of Artificial Sequence: Synthetic oligonucleotide
aacggaauacgguauuuuc

SEQ ID NO: 135932 - RNA, 19 nt, Artificial Sequence
  Description of Artificial Sequence: Synthetic oligonucleotide
uuugguuuaggcgaaauac

SEQ ID NO: 135933 - RNA, 19 nt, Artificial Sequence
  Description of Artificial Sequence: Synthetic oligonucleotide
ugagagacaaccgaggcag

SEQ ID NO: 135934 - RNA, 19 nt, Artificial Sequence
  Description of Artificial Sequence: Synthetic oligonucleotide
ucgaacaccauugagagac

SEQ ID NO: 135935 - RNA, 19 nt, Artificial Sequence
  Description of Artificial Sequence: Synthetic oligonucleotide
aauacgguauuuuccccuc

SEQ ID NO: 135936 - RNA, 19 nt, Artificial Sequence
  Description of Artificial Sequence: Synthetic oligonucleotide
aaaucgaacaccauugaga

SEQ ID NO: 135937 - RNA, 19 nt, Artificial Sequence
  Description of Artificial Sequence: Synthetic oligonucleotide
ugugcaguaccccaccggg

SEQ ID NO: 135938 - RNA, 19 nt, Artificial Sequence
  Description of Artificial Sequence: Synthetic oligonucleotide
uuugcugggagccaagcca

SEQ ID NO: 135939 - RNA, 19 nt, Artificial Sequence
  Description of Artificial Sequence: Synthetic oligonucleotide
uaccauucuggauagagga

SEQ ID NO: 135940 - RNA, 19 nt, Artificial Sequence
  Description of Artificial Sequence: Synthetic oligonucleotide
ucguuggcuauuuuggagg

SEQ ID NO: 135941 - RNA, 19 nt, Artificial Sequence
  Description of Artificial Sequence: Synthetic oligonucleotide
augugagggaagaagaacc

SEQ ID NO: 135942 - RNA, 19 nt, Artificial Sequence
  Description of Artificial Sequence: Synthetic oligonucleotide
uuaccauucuggauagagg

SEQ ID NO: 135943 - RNA, 19 nt, Artificial Sequence
  Description of Artificial Sequence: Synthetic oligonucleotide
cuuagaguaggaauuugag

SEQ ID NO: 135944 - RNA, 19 nt, Artificial Sequence
  Description of Artificial Sequence: Synthetic oligonucleotide
uucguuguaccucuguccc

SEQ ID NO: 135945 - RNA, 19 nt, Artificial Sequence
  Description of Artificial Sequence: Synthetic oligonucleotide
ugagagaugagaacgggaa

SEQ ID NO: 135946 - RNA, 19 nt, Artificial Sequence
  Description of Artificial Sequence: Synthetic oligonucleotide
aauuugaggugggaauggc

SEQ ID NO: 135947 - RNA, 19 nt, Artificial Sequence
  Description of Artificial Sequence: Synthetic oligonucleotide
aguacaacucaggugaggg

SEQ ID NO: 135948 - RNA, 19 nt, Artificial Sequence
  Description of Artificial Sequence: Synthetic oligonucleotide
cagccaagcgccuagagcc

SEQ ID NO: 135949 - RNA, 19 nt, Artificial Sequence
  Description of Artificial Sequence: Synthetic oligonucleotide
  modified_base (15)..(15): a, c, u, g, unknown or other
aaauaaaacccaucncaaa

SEQ ID NO: 135950 - RNA, 19 nt, Artificial Sequence
  Description of Artificial Sequence: Synthetic oligonucleotide
gaaacuaagugcaggguag

SEQ ID NO: 135951 - RNA, 19 nt, Artificial Sequence
  Description of Artificial Sequence: Synthetic oligonucleotide
aagaaccauuuccuauccc

SEQ ID NO: 135952 - RNA, 19 nt, Artificial Sequence
  Description of Artificial Sequence: Synthetic oligonucleotide
uuaggguuggcagagacac

SEQ ID NO: 135953 - RNA, 19 nt, Artificial Sequence
  Description of Artificial Sequence: Synthetic oligonucleotide
ucguguguaacccauucga

SEQ ID NO: 135954 - RNA, 19 nt, Artificial Sequence
  Description of Artificial Sequence: Synthetic oligonucleotide
cucuacgccaggcagaggg

SEQ ID NO: 135955 - RNA, 19 nt, Artificial Sequence
  Description of Artificial Sequence: Synthetic oligonucleotide
uuaggcgaaauacucugug

SEQ ID NO: 135956 - RNA, 19 nt, Artificial Sequence
  Description of Artificial Sequence: Synthetic oligonucleotide
uuaaaucgaacaccauuga

SEQ ID NO: 135957 - RNA, 19 nt, Artificial Sequence
  Description of Artificial Sequence: Synthetic oligonucleotide
guuuaggcgaaauacucug

SEQ ID NO: 135958 - RNA, 19 nt, Artificial Sequence
  Description of Artificial Sequence: Synthetic oligonucleotide
cuuuauuacguguuugauc

SEQ ID NO: 135959 - RNA, 19 nt, Artificial Sequence
  Description of Artificial Sequence: Synthetic oligonucleotide
cuaaagguggagucaauug

SEQ ID NO: 135960 - RNA, 19 nt, Artificial Sequence
  Description of Artificial Sequence: Synthetic oligonucleotide
uccgccaguguauagagga

SEQ ID NO: 135961 - RNA, 19 nt, Artificial Sequence
  Description of Artificial Sequence: Synthetic oligonucleotide
aaggucccuuccuggaacc

SEQ ID NO: 135962 - RNA, 19 nt, Artificial Sequence
  Description of Artificial Sequence: Synthetic oligonucleotide
auccgcuuaaaucgaacac

SEQ ID NO: 135963 - RNA, 19 nt, Artificial Sequence
  Description of Artificial Sequence: Synthetic oligonucleotide
cuugacugucccaaugggg

SEQ ID NO: 135964 - RNA, 19 nt, Artificial Sequence
  Description of Artificial Sequence: Synthetic oligonucleotide
gaaaugcccagcucugggg

SEQ ID NO: 135965 - RNA, 19 nt, Artificial Sequence
  Description of Artificial Sequence: Synthetic oligonucleotide
uacguguuugauccagagg

SEQ ID NO: 135966 - RNA, 19 nt, Artificial Sequence
  Description of Artificial Sequence: Synthetic oligonucleotide
ugaggaggggaacaaauau

SEQ ID NO: 135967 - RNA, 19 nt, Artificial Sequence
  Description of Artificial Sequence: Synthetic oligonucleotide
uugguuuaggcgaaauacu

SEQ ID NO: 135968 - RNA, 19 nt, Artificial Sequence
  Description of Artificial Sequence: Synthetic oligonucleotide
auugaaggaaaugcccagc

SEQ ID NO: 135969 - RNA, 19 nt, Artificial Sequence
  Description of Artificial Sequence: Synthetic oligonucleotide
acggaauacgguauuuucc

SEQ ID NO: 135970 - RNA, 19 nt, Artificial Sequence
  Description of Artificial Sequence: Synthetic oligonucleotide
auagaggacuggccaaggc

SEQ ID NO: 135971 - RNA, 19 nt, Artificial Sequence
  Description of Artificial Sequence: Synthetic oligonucleotide
ugguuuaggcgaaauacuc

SEQ ID NO: 135972 - RNA, 19 nt, Artificial Sequence
  Description of Artificial Sequence: Synthetic oligonucleotide
aaccgaggcaguuugcaca

SEQ ID NO: 135973 - RNA, 19 nt, Artificial Sequence
  Description of Artificial Sequence: Synthetic oligonucleotide
uauuacguguuugauccag

SEQ ID NO: 135974 - RNA, 19 nt, Artificial Sequence
  Description of Artificial Sequence: Synthetic oligonucleotide
gaaauuaguucggucuggg

SEQ ID NO: 135975 - RNA, 19 nt, Artificial Sequence
  Description of Artificial Sequence: Synthetic oligonucleotide
uuacguguuugauccagag

SEQ ID NO: 135976 - RNA, 19 nt, Artificial Sequence
  Description of Artificial Sequence: Synthetic oligonucleotide
uccgcuuaaaucgaacacc

SEQ ID NO: 135977 - RNA, 19 nt, Artificial Sequence
  Description of Artificial Sequence: Synthetic oligonucleotide
uauccgcuuaaaucgaaca

SEQ ID NO: 135978 - RNA, 19 nt, Artificial Sequence
  Description of Artificial Sequence: Synthetic oligonucleotide
acuucguuguaccucuguc

SEQ ID NO: 135979 - RNA, 19 nt, Artificial Sequence
  Description of Artificial Sequence: Synthetic oligonucleotide
agaggauaugguauggagg

SEQ ID NO: 135980 - RNA, 19 nt, Artificial Sequence
  Description of Artificial Sequence: Synthetic oligonucleotide
uagccuagaagcagauagg

SEQ ID NO: 135981 - RNA, 19 nt, Artificial Sequence
  Description of Artificial Sequence: Synthetic oligonucleotide
cuucguuguaccucugucc

SEQ ID NO: 135982 - RNA, 19 nt, Artificial Sequence
  Description of Artificial Sequence: Synthetic oligonucleotide
aagaagucgggagagggga

SEQ ID NO: 135983 - RNA, 19 nt, Artificial Sequence
  Description of Artificial Sequence: Synthetic oligonucleotide
agaaacuaagugcagggua

SEQ ID NO: 135984 - RNA, 19 nt, Artificial Sequence
  Description of Artificial Sequence: Synthetic oligonucleotide
aaacuaagugcaggguagg

SEQ ID NO: 135985 - RNA, 19 nt, Artificial Sequence
  Description of Artificial Sequence: Synthetic oligonucleotide
uugagagacaaccgaggca

SEQ ID NO: 135986 - RNA, 19 nt, Artificial Sequence
  Description of Artificial Sequence: Synthetic oligonucleotide
cauugaaggaaaugcccag

SEQ ID NO: 135987 - RNA, 19 nt, Artificial Sequence
  Description of Artificial Sequence: Synthetic oligonucleotide
cuucgguuugugcuggugg

SEQ ID NO: 135988 - RNA, 19 nt, Artificial Sequence
  Description of Artificial Sequence: Synthetic oligonucleotide
gauccgccaguguauagag

SEQ ID NO: 135989 - RNA, 19 nt, Artificial Sequence
  Description of Artificial Sequence: Synthetic oligonucleotide
acuaagugcaggguagggg

SEQ ID NO: 135990 - RNA, 19 nt, Artificial Sequence
  Description of Artificial Sequence: Synthetic oligonucleotide
aggcgaaauacucugugca

SEQ ID NO: 135991 - RNA, 19 nt, Artificial Sequence
  Description of Artificial Sequence: Synthetic oligonucleotide
ucaaaaggcagggauccgc

SEQ ID NO: 135992 - RNA, 19 nt, Artificial Sequence
  Description of Artificial Sequence: Synthetic oligonucleotide
agagaugagaacgggaaga

SEQ ID NO: 135993 - RNA, 19 nt, Artificial Sequence
  Description of Artificial Sequence: Synthetic oligonucleotide
aacuaagugcaggguaggg

SEQ ID NO: 135994 - RNA, 19 nt, Artificial Sequence
  Description of Artificial Sequence: Synthetic oligonucleotide
uacgguauuuuccccucag

SEQ ID NO: 135995 - RNA, 19 nt, Artificial Sequence
  Description of Artificial Sequence: Synthetic oligonucleotide
agcgggagucacuuugccc

SEQ ID NO: 135996 - RNA, 19 nt, Artificial Sequence
  Description of Artificial Sequence: Synthetic oligonucleotide
ugaaccuugugggauggag

SEQ ID NO: 135997 - RNA, 19 nt, Artificial Sequence
  Description of Artificial Sequence: Synthetic oligonucleotide
gucccaauggggcagggag

SEQ ID NO: 135998 - RNA, 19 nt, Artificial Sequence
  Description of Artificial Sequence: Synthetic oligonucleotide
cuggacagucuccugagag

SEQ ID NO: 135999 - RNA, 19 nt, Artificial Sequence
  Description of Artificial Sequence: Synthetic oligonucleotide
uaggcgaaauacucugugc

SEQ ID NO: 136000 - RNA, 19 nt, Artificial Sequence
  Description of Artificial Sequence: Synthetic oligonucleotide
uuuaggcgaaauacucugu

SEQ ID NO: 136001 - RNA, 19 nt, Artificial Sequence
  Description of Artificial Sequence: Synthetic oligonucleotide
caaaaggcagggauccgcc

SEQ ID NO: 136002 - RNA, 19 nt, Artificial Sequence
  Description of Artificial Sequence: Synthetic oligonucleotide
agucaauuguaaaauacaa

SEQ ID NO: 136003 - RNA, 19 nt, Artificial Sequence
  Description of Artificial Sequence: Synthetic oligonucleotide
aaagugauggugucaccuu

SEQ ID NO: 136004 - RNA, 19 nt, Artificial Sequence
  Description of Artificial Sequence: Synthetic oligonucleotide
agugauggugucaccuucc

SEQ ID NO: 136005 - RNA, 19 nt, Artificial Sequence
  Description of Artificial Sequence: Synthetic oligonucleotide
gauguugugggcggagggg

SEQ ID NO: 136006 - RNA, 19 nt, Artificial Sequence
  Description of Artificial Sequence: Synthetic oligonucleotide
uguuaaagcuucagcucgu

SEQ ID NO: 136007 - RNA, 19 nt, Artificial Sequence
  Description of Artificial Sequence: Synthetic oligonucleotide
ggcgcaagaagccaagucc

SEQ ID NO: 136008 - RNA, 19 nt, Artificial Sequence
  Description of Artificial Sequence: Synthetic oligonucleotide
gucagaucagcugaaggcc

SEQ ID NO: 136009 - RNA, 19 nt, Artificial Sequence
  Description of Artificial Sequence: Synthetic oligonucleotide
agacaaccgaggcaguuug

SEQ ID NO: 136010 - RNA, 19 nt, Artificial Sequence
  Description of Artificial Sequence: Synthetic oligonucleotide
acaaaguucucguggccug

SEQ ID NO: 136011 - RNA, 19 nt, Artificial Sequence
  Description of Artificial Sequence: Synthetic oligonucleotide
ucaguacccgcucccguag

SEQ ID NO: 136012 - RNA, 19 nt, Artificial Sequence
  Description of Artificial Sequence: Synthetic oligonucleotide
cauucgacaccaucaacuc

SEQ ID NO: 136013 - RNA, 19 nt, Artificial Sequence
  Description of Artificial Sequence: Synthetic oligonucleotide
uuuccgccccgucucaucc

SEQ ID NO: 136014 - RNA, 19 nt, Artificial Sequence
  Description of Artificial Sequence: Synthetic oligonucleotide
cuauggaggacagaggcuc

SEQ ID NO: 136015 - RNA, 19 nt, Artificial Sequence
  Description of Artificial Sequence: Synthetic oligonucleotide
uuccgauagggcgaagagg

SEQ ID NO: 136016 - RNA, 19 nt, Artificial Sequence
  Description of Artificial Sequence: Synthetic oligonucleotide
ugugcaaccgcaguaccga

SEQ ID NO: 136017 - RNA, 19 nt, Artificial Sequence
  Description of Artificial Sequence: Synthetic oligonucleotide
agggaagaagaaccauuuc

SEQ ID NO: 136018 - RNA, 19 nt, Artificial Sequence
  Description of Artificial Sequence: Synthetic oligonucleotide
acauucucuuuauuacgug

SEQ ID NO: 136019 - RNA, 19 nt, Artificial Sequence
  Description of Artificial Sequence: Synthetic oligonucleotide
cacccuauggaggacagag

SEQ ID NO: 136020 - RNA, 19 nt, Artificial Sequence
  Description of Artificial Sequence: Synthetic oligonucleotide
ucccaauggggcagggagg

SEQ ID NO: 136021 - RNA, 19 nt, Artificial Sequence
  Description of Artificial Sequence: Synthetic oligonucleotide
cagggaacgaggcuuggcc

SEQ ID NO: 136022 - RNA, 19 nt, Artificial Sequence
  Description of Artificial Sequence: Synthetic oligonucleotide
acuuugccccacccuaugg

SEQ ID NO: 136023 - RNA, 19 nt, Artificial Sequence
  Description of Artificial Sequence: Synthetic oligonucleotide
aaguucucguggccugggg

SEQ ID NO: 136024 - RNA, 19 nt, Artificial Sequence
  Description of Artificial Sequence: Synthetic oligonucleotide
guuccgauagggcgaagag

SEQ ID NO: 136025 - RNA, 19 nt, Artificial Sequence
  Description of Artificial Sequence: Synthetic oligonucleotide
gauagaggacuggccaagg

SEQ ID NO: 136026 - RNA, 19 nt, Artificial Sequence
  Description of Artificial Sequence: Synthetic oligonucleotide
cugugcaaccgcaguaccg

SEQ ID NO: 136027 - RNA, 19 nt, Artificial Sequence
  Description of Artificial Sequence: Synthetic oligonucleotide
gauaugguauggagggagc

SEQ ID NO: 136028 - RNA, 19 nt, Artificial Sequence
  Description of Artificial Sequence: Synthetic oligonucleotide
uggagguuagcaagcggga

SEQ ID NO: 136029 - RNA, 19 nt, Artificial Sequence
  Description of Artificial Sequence: Synthetic oligonucleotide
auauccgcuuaaaucgaac

SEQ ID NO: 136030 - RNA, 19 nt, Artificial Sequence
  Description of Artificial Sequence: Synthetic oligonucleotide
gcaaccgcaguaccgaggg

SEQ ID NO: 136031 - RNA, 19 nt, Artificial Sequence
  Description of Artificial Sequence: Synthetic oligonucleotide
ucgacuggacacaccccgg

SEQ ID NO: 136032 - RNA, 19 nt, Artificial Sequence
  Description of Artificial Sequence: Synthetic oligonucleotide
cucguguguaacccauucg

SEQ ID NO: 136033 - RNA, 19 nt, Artificial Sequence
  Description of Artificial Sequence: Synthetic oligonucleotide
guuccugcggacaaacuug

SEQ ID NO: 136034 - RNA, 19 nt, Artificial Sequence
  Description of Artificial Sequence: Synthetic oligonucleotide
ugucuuuaccauucuggau

SEQ ID NO: 136035 - RNA, 19 nt, Artificial Sequence
  Description of Artificial Sequence: Synthetic oligonucleotide
uacucugugcaaccgcagu

SEQ ID NO: 136036 - RNA, 19 nt, Artificial Sequence
  Description of Artificial Sequence: Synthetic oligonucleotide
uuagcaagcgggagucacu

SEQ ID NO: 136037 - RNA, 19 nt, Artificial Sequence
  Description of Artificial Sequence: Synthetic oligonucleotide
ggaaaugcccagcucuggg

SEQ ID NO: 136038 - RNA, 19 nt, Artificial Sequence
  Description of Artificial Sequence: Synthetic oligonucleotide
accgggccccaguaaaggc

SEQ ID NO: 136039 - RNA, 19 nt, Artificial Sequence
  Description of Artificial Sequence: Synthetic oligonucleotide
acggccuggucgcuggagc

SEQ ID NO: 136040 - RNA, 19 nt, Artificial Sequence
  Description of Artificial Sequence: Synthetic oligonucleotide
gaauacgguauuuuccccu

SEQ ID NO: 136041 - RNA, 19 nt, Artificial Sequence
  Description of Artificial Sequence: Synthetic oligonucleotide
uggagucaauuguaaaaua

SEQ ID NO: 136042 - RNA, 19 nt, Artificial Sequence
  Description of Artificial Sequence: Synthetic oligonucleotide
gaaggggacaagugccagc

SEQ ID NO: 136043 - RNA, 19 nt, Artificial Sequence
  Description of Artificial Sequence: Synthetic oligonucleotide
uguuccgauagggcgaaga

SEQ ID NO: 136044 - RNA, 19 nt, Artificial Sequence
  Description of Artificial Sequence: Synthetic oligonucleotide
ucuucucguguguaaccca

SEQ ID NO: 136045 - RNA, 19 nt, Artificial Sequence
  Description of Artificial Sequence: Synthetic oligonucleotide
cucuucucguguguaaccc

SEQ ID NO: 136046 - RNA, 19 nt, Artificial Sequence
  Description of Artificial Sequence: Synthetic oligonucleotide
cagcauguaucgcucgugc

SEQ ID NO: 136047 - RNA, 19 nt, Artificial Sequence
  Description of Artificial Sequence: Synthetic oligonucleotide
gggaaauuaguucggucug

SEQ ID NO: 136048 - RNA, 19 nt, Artificial Sequence
  Description of Artificial Sequence: Synthetic oligonucleotide
auucgacaccaucaacucu

SEQ ID NO: 136049 - RNA, 19 nt, Artificial Sequence
  Description of Artificial Sequence: Synthetic oligonucleotide
uggggcuaaagguggaguc

SEQ ID NO: 136050 - RNA, 19 nt, Artificial Sequence
  Description of Artificial Sequence: Synthetic oligonucleotide
uggauagaggacuggccaa

SEQ ID NO: 136051 - RNA, 19 nt, Artificial Sequence
  Description of Artificial Sequence: Synthetic oligonucleotide
ggaagugcccgauauccgc

SEQ ID NO: 136052 - RNA, 19 nt, Artificial Sequence
  Description of Artificial Sequence: Synthetic oligonucleotide
uuuccccucaguacccgcu

SEQ ID NO: 136053 - RNA, 19 nt, Artificial Sequence
  Description of Artificial Sequence: Synthetic oligonucleotide
acccauucauacacuggcc

SEQ ID NO: 136054 - RNA, 19 nt, Artificial Sequence
  Description of Artificial Sequence: Synthetic oligonucleotide
uuauuacguguuugaucca

SEQ ID NO: 136055 - RNA, 19 nt, Artificial Sequence
  Description of Artificial Sequence: Synthetic oligonucleotide
agccuagaagcagauaggu

SEQ ID NO: 136056 - RNA, 19 nt, Artificial Sequence
  Description of Artificial Sequence: Synthetic oligonucleotide
uagaacggaauacgguauu

SEQ ID NO: 136057 - RNA, 19 nt, Artificial Sequence
  Description of Artificial Sequence: Synthetic oligonucleotide
ugacugucccaauggggca

SEQ ID NO: 136058 - RNA, 19 nt, Artificial Sequence
  Description of Artificial Sequence: Synthetic oligonucleotide
gacaagugccagcaaggga

SEQ ID NO: 136059 - RNA, 19 nt, Artificial Sequence
  Description of Artificial Sequence: Synthetic oligonucleotide
accauucuggauagaggac

SEQ ID NO: 136060 - RNA, 19 nt, Artificial Sequence
  Description of Artificial Sequence: Synthetic oligonucleotide
ggagcgucgcugcuuaggg

SEQ ID NO: 136061 - RNA, 19 nt, Artificial Sequence
  Description of Artificial Sequence: Synthetic oligonucleotide
ggaaauuaguucggucugg

SEQ ID NO: 136062 - RNA, 19 nt, Artificial Sequence
  Description of Artificial Sequence: Synthetic oligonucleotide
uggagcgucgcugcuuagg

SEQ ID NO: 136063 - RNA, 19 nt, Artificial Sequence
  Description of Artificial Sequence: Synthetic oligonucleotide
uucggucuggggcuccacc

SEQ ID NO: 136064 - RNA, 19 nt, Artificial Sequence
  Description of Artificial Sequence: Synthetic oligonucleotide
gucugagcgucuccacucg

SEQ ID NO: 136065 - RNA, 19 nt, Artificial Sequence
  Description of Artificial Sequence: Synthetic oligonucleotide
uuuuccccucaguacccgc

SEQ ID NO: 136066 - RNA, 19 nt, Artificial Sequence
  Description of Artificial Sequence: Synthetic oligonucleotide
cggaauacgguauuuuccc

SEQ ID NO: 136067 - RNA, 19 nt, Artificial Sequence
  Description of Artificial Sequence: Synthetic oligonucleotide
aacgaggcuuggccucccg

SEQ ID NO: 136068 - RNA, 19 nt, Artificial Sequence
  Description of Artificial Sequence: Synthetic oligonucleotide
guuagcaagcgggagucac

SEQ ID NO: 136069 - RNA, 19 nt, Artificial Sequence
  Description of Artificial Sequence: Synthetic oligonucleotide
cugugcaguaccccaccgg

SEQ ID NO: 136070 - RNA, 19 nt, Artificial Sequence
  Description of Artificial Sequence: Synthetic oligonucleotide
ccuguuaaagcuucagcuc

SEQ ID NO: 136071 - RNA, 19 nt, Artificial Sequence
  Description of Artificial Sequence: Synthetic oligonucleotide
ucggucuggggcuccacca

SEQ ID NO: 136072 - RNA, 19 nt, Artificial Sequence
  Description of Artificial Sequence: Synthetic oligonucleotide
agcauguaucgcucgugca

SEQ ID NO: 136073 - RNA, 19 nt, Artificial Sequence
  Description of Artificial Sequence: Synthetic oligonucleotide
auuuuccccucaguacccg

SEQ ID NO: 136074 - RNA, 19 nt, Artificial Sequence
  Description of Artificial Sequence: Synthetic oligonucleotide
gcaagcgggagucacuuug

SEQ ID NO: 136075 - RNA, 19 nt, Artificial Sequence
  Description of Artificial Sequence: Synthetic oligonucleotide
acccgggcuguuccgauag

SEQ ID NO: 136076 - RNA, 19 nt, Artificial Sequence
  Description of Artificial Sequence: Synthetic oligonucleotide
ggggaaauuaguucggucu

SEQ ID NO: 136077 - RNA, 19 nt, Artificial Sequence
  Description of Artificial Sequence: Synthetic oligonucleotide
cuucgacuggacacacccc

SEQ ID NO: 136078 - RNA, 19 nt, Artificial Sequence
  Description of Artificial Sequence: Synthetic oligonucleotide
acaaccgaggcaguuugca

SEQ ID NO: 136079 - RNA, 19 nt, Artificial Sequence
  Description of Artificial Sequence: Synthetic oligonucleotide
cucucuacgccaggcagag

SEQ ID NO: 136080 - RNA, 19 nt, Artificial Sequence
  Description of Artificial Sequence: Synthetic oligonucleotide
uggggcacuacuguugguc

SEQ ID NO: 136081 - RNA, 19 nt, Artificial Sequence
  Description of Artificial Sequence: Synthetic oligonucleotide
gucacuuugccccacccua

SEQ ID NO: 136082 - RNA, 19 nt, Artificial Sequence
  Description of Artificial Sequence: Synthetic oligonucleotide
ggcacuuuggcggugcugc

SEQ ID NO: 136083 - RNA, 19 nt, Artificial Sequence
  Description of Artificial Sequence: Synthetic oligonucleotide
gcucauugaaggaaaugcc

SEQ ID NO: 136084 - RNA, 19 nt, Artificial Sequence
  Description of Artificial Sequence: Synthetic oligonucleotide
uuguagccuagaagcagau

SEQ ID NO: 136085 - RNA, 19 nt, Artificial Sequence
  Description of Artificial Sequence: Synthetic oligonucleotide
aucaaaaggcagggauccg

SEQ ID NO: 136086 - RNA, 19 nt, Artificial Sequence
  Description of Artificial Sequence: Synthetic oligonucleotide
cauagccaguggagcacgg

SEQ ID NO: 136087 - RNA, 19 nt, Artificial Sequence
  Description of Artificial Sequence: Synthetic oligonucleotide
gacgcuguuuguggagggg

SEQ ID NO: 136088 - RNA, 19 nt, Artificial Sequence
  Description of Artificial Sequence: Synthetic oligonucleotide
gaaccuugugggauggaga

SEQ ID NO: 136089 - RNA, 19 nt, Artificial Sequence
  Description of Artificial Sequence: Synthetic oligonucleotide
cuggggucacaccguaggg

SEQ ID NO: 136090 - RNA, 19 nt, Artificial Sequence
  Description of Artificial Sequence: Synthetic oligonucleotide
ucacuuugccccacccuau

SEQ ID NO: 136091 - RNA, 19 nt, Artificial Sequence
  Description of Artificial Sequence: Synthetic oligonucleotide
gucgcuggagcgucgcugc

SEQ ID NO: 136092 - RNA, 19 nt, Artificial Sequence
  Description of Artificial Sequence: Synthetic oligonucleotide
aggccggggcuucaaagug

SEQ ID NO: 136093 - RNA, 19 nt, Artificial Sequence
  Description of Artificial Sequence: Synthetic oligonucleotide
aagcgcagggaacgaggcu

SEQ ID NO: 136094 - RNA, 19 nt, Artificial Sequence
  Description of Artificial Sequence: Synthetic oligonucleotide
cauucagguuccugcggac

SEQ ID NO: 136095 - RNA, 19 nt, Artificial Sequence
  Description of Artificial Sequence: Synthetic oligonucleotide
cugcuuaggguuggcagag

SEQ ID NO: 136096 - RNA, 19 nt, Artificial Sequence
  Description of Artificial Sequence: Synthetic oligonucleotide
caaccgaggcaguuugcac

SEQ ID NO: 136097 - RNA, 19 nt, Artificial Sequence
  Description of Artificial Sequence: Synthetic oligonucleotide
ccugcggacaaacuuggag

SEQ ID NO: 136098 - RNA, 19 nt, Artificial Sequence
  Description of Artificial Sequence: Synthetic oligonucleotide
cuuaggguuggcagagaca

SEQ ID NO: 136099 - RNA, 19 nt, Artificial Sequence
  Description of Artificial Sequence: Synthetic oligonucleotide
caccaauucauccugcagu

SEQ ID NO: 136100 - RNA, 19 nt, Artificial Sequence
  Description of Artificial Sequence: Synthetic oligonucleotide
gagguuagcaagcgggagu

SEQ ID NO: 136101 - RNA, 19 nt, Artificial Sequence
  Description of Artificial Sequence: Synthetic oligonucleotide
uaucgcucgugcagcucgc

SEQ ID NO: 136102 - RNA, 19 nt, Artificial Sequence
  Description of Artificial Sequence: Synthetic oligonucleotide
cggggcuucaaagugaugg

SEQ ID NO: 136103 - RNA, 19 nt, Artificial Sequence
  Description of Artificial Sequence: Synthetic oligonucleotide
acccauucgacaccaucaa

SEQ ID NO: 136104 - RNA, 19 nt, Artificial Sequence
  Description of Artificial Sequence: Synthetic oligonucleotide
gcuagcccuguccaaagug

SEQ ID NO: 136105 - RNA, 19 nt, Artificial Sequence
  Description of Artificial Sequence: Synthetic oligonucleotide
guuugcacaccuccaucuc

SEQ ID NO: 136106 - RNA, 19 nt, Artificial Sequence
  Description of Artificial Sequence: Synthetic oligonucleotide
auaguacaacucaggugag

SEQ ID NO: 136107 - RNA, 19 nt, Artificial Sequence
  Description of Artificial Sequence: Synthetic oligonucleotide
acgguauuuuccccucagu

SEQ ID NO: 136108 - RNA, 19 nt, Artificial Sequence
  Description of Artificial Sequence: Synthetic oligonucleotide
auacgguauuuuccccuca

SEQ ID NO: 136109 - RNA, 19 nt, Artificial Sequence
  Description of Artificial Sequence: Synthetic oligonucleotide
acucggucuuugcuuucag

SEQ ID NO: 136110 - RNA, 19 nt, Artificial Sequence
  Description of Artificial Sequence: Synthetic oligonucleotide
ucguuguaccucuguccca

SEQ ID NO: 136111 - RNA, 19 nt, Artificial Sequence
  Description of Artificial Sequence: Synthetic oligonucleotide
accguagggcagguucugc

SEQ ID NO: 136112 - RNA, 19 nt, Artificial Sequence
  Description of Artificial Sequence: Synthetic oligonucleotide
ucugggcaggggugaaugu

SEQ ID NO: 136113 - RNA, 19 nt, Artificial Sequence
  Description of Artificial Sequence: Synthetic oligonucleotide
auguaucgcucgugcagcu

SEQ ID NO: 136114 - RNA, 19 nt, Artificial Sequence
  Description of Artificial Sequence: Synthetic oligonucleotide
ggcugagagaugagaacgg

SEQ ID NO: 136115 - RNA, 19 nt, Artificial Sequence
  Description of Artificial Sequence: Synthetic oligonucleotide
accucuggugggucgcuug

SEQ ID NO: 136116 - RNA, 19 nt, Artificial Sequence
  Description of Artificial Sequence: Synthetic oligonucleotide
ggaaagaagucgggagagg

SEQ ID NO: 136117 - RNA, 19 nt, Artificial Sequence
  Description of Artificial Sequence: Synthetic oligonucleotide
gauauccgcuuaaaucgaa

SEQ ID NO: 136118 - RNA, 19 nt, Artificial Sequence
  Description of Artificial Sequence: Synthetic oligonucleotide
aggacucaacauguagcug

SEQ ID NO: 136119 - RNA, 19 nt, Artificial Sequence
  Description of Artificial Sequence: Synthetic oligonucleotide
aagugcccgauauccgcuu

SEQ ID NO: 136120 - RNA, 19 nt, Artificial Sequence
  Description of Artificial Sequence: Synthetic oligonucleotide
auuacguguuugauccaga

SEQ ID NO: 136121 - RNA, 19 nt, Artificial Sequence
  Description of Artificial Sequence: Synthetic oligonucleotide
ggauagaggacuggccaag

SEQ ID NO: 136122 - RNA, 19 nt, Artificial Sequence
  Description of Artificial Sequence: Synthetic oligonucleotide
cacgugaggucugagcguc

SEQ ID NO: 136123 - RNA, 19 nt, Artificial Sequence
  Description of Artificial Sequence: Synthetic oligonucleotide
ucgcuuggaggggaaagaa

SEQ ID NO: 136124 - RNA, 19 nt, Artificial Sequence
  Description of Artificial Sequence: Synthetic oligonucleotide
ggucugagcgucuccacuc

SEQ ID NO: 136125 - RNA, 19 nt, Artificial Sequence
  Description of Artificial Sequence: Synthetic oligonucleotide
cugagaguguuccagcccu

SEQ ID NO: 136126 - RNA, 19 nt, Artificial Sequence
  Description of Artificial Sequence: Synthetic oligonucleotide
agaacggaauacgguauuu

SEQ ID NO: 136127 - RNA, 19 nt, Artificial Sequence
  Description of Artificial Sequence: Synthetic oligonucleotide
gcuuaaaucgaacaccauu

SEQ ID NO: 136128 - RNA, 19 nt, Artificial Sequence
  Description of Artificial Sequence: Synthetic oligonucleotide
uuccccucaguacccgcuc

SEQ ID NO: 136129 - RNA, 19 nt, Artificial Sequence
  Description of Artificial Sequence: Synthetic oligonucleotide
ccgcuuauuuucugcauug

SEQ ID NO: 136130 - RNA, 19 nt, Artificial Sequence
  Description of Artificial Sequence: Synthetic oligonucleotide
ucacuucguuguaccucug

SEQ ID NO: 136131 - RNA, 19 nt, Artificial Sequence
  Description of Artificial Sequence: Synthetic oligonucleotide
gaagguggccgcuggcaaa

SEQ ID NO: 136132 - RNA, 19 nt, Artificial Sequence
  Description of Artificial Sequence: Synthetic oligonucleotide
ggagcacccgggcuguucc

SEQ ID NO: 136133 - RNA, 19 nt, Artificial Sequence
  Description of Artificial Sequence: Synthetic oligonucleotide
gcagggaggggccaccuug

SEQ ID NO: 136134 - RNA, 19 nt, Artificial Sequence
  Description of Artificial Sequence: Synthetic oligonucleotide
ggacgcuguuuguggaggg

SEQ ID NO: 136135 - RNA, 19 nt, Artificial Sequence
  Description of Artificial Sequence: Synthetic oligonucleotide
cuggucccgcaccugccgg

SEQ ID NO: 136136 - RNA, 19 nt, Artificial Sequence
  Description of Artificial Sequence: Synthetic oligonucleotide
ggucacaccguagggcagg

SEQ ID NO: 136137 - RNA, 19 nt, Artificial Sequence
  Description of Artificial Sequence: Synthetic oligonucleotide
uauccccacagcagcucau

SEQ ID NO: 136138 - RNA, 19 nt, Artificial Sequence
  Description of Artificial Sequence: Synthetic oligonucleotide
aagucgggagaggggagaa

SEQ ID NO: 136139 - RNA, 19 nt, Artificial Sequence
  Description of Artificial Sequence: Synthetic oligonucleotide
agguucauucagguuccug

SEQ ID NO: 136140 - RNA, 19 nt, Artificial Sequence
  Description of Artificial Sequence: Synthetic oligonucleotide
cugaggaggggaacaaaua

SEQ ID NO: 136141 - RNA, 19 nt, Artificial Sequence
  Description of Artificial Sequence: Synthetic oligonucleotide
gacaaccgaggcaguuugc

SEQ ID NO: 136142 - RNA, 19 nt, Artificial Sequence
  Description of Artificial Sequence: Synthetic oligonucleotide
caccgggccccaguaaagg

SEQ ID NO: 136143 - RNA, 19 nt, Artificial Sequence
  Description of Artificial Sequence: Synthetic oligonucleotide
aggcgacagggacacgcug

SEQ ID NO: 136144 - RNA, 19 nt, Artificial Sequence
  Description of Artificial Sequence: Synthetic oligonucleotide
ccauucgacaccaucaacu

SEQ ID NO: 136145 - RNA, 19 nt, Artificial Sequence
  Description of Artificial Sequence: Synthetic oligonucleotide
uucugaggaggggaacaaa

SEQ ID NO: 136146 - RNA, 19 nt, Artificial Sequence
  Description of Artificial Sequence: Synthetic oligonucleotide
gagcacccgggcuguuccg

SEQ ID NO: 136147 - RNA, 19 nt, Artificial Sequence
  Description of Artificial Sequence: Synthetic oligonucleotide
gagacacugcgcugaaccu

SEQ ID NO: 136148 - RNA, 19 nt, Artificial Sequence
  Description of Artificial Sequence: Synthetic oligonucleotide
agccacccucccaggaacc

SEQ ID NO: 136149 - RNA, 19 nt, Artificial Sequence
  Description of Artificial Sequence: Synthetic oligonucleotide
gauggagauggggcacuac

SEQ ID NO: 136150 - RNA, 19 nt, Artificial Sequence
  Description of Artificial Sequence: Synthetic oligonucleotide
gcugaaccuugugggaugg

SEQ ID NO: 136151 - RNA, 19 nt, Artificial Sequence
  Description of Artificial Sequence: Synthetic oligonucleotide
guaggaauuugagguggga

SEQ ID NO: 136152 - RNA, 19 nt, Artificial Sequence
  Description of Artificial Sequence: Synthetic oligonucleotide
uguagccuagaagcagaua

SEQ ID NO: 136153 - RNA, 19 nt, Artificial Sequence
  Description of Artificial Sequence: Synthetic oligonucleotide
gcauggaaggugcuucgac

SEQ ID NO: 136154 - RNA, 19 nt, Artificial Sequence
  Description of Artificial Sequence: Synthetic oligonucleotide
cuuuccgccccgucucauc

SEQ ID NO: 136155 - RNA, 19 nt, Artificial Sequence
  Description of Artificial Sequence: Synthetic oligonucleotide
ccgcuuaaaucgaacacca

SEQ ID NO: 136156 - RNA, 19 nt, Artificial Sequence
  Description of Artificial Sequence: Synthetic oligonucleotide
ggcgaaauacucugugcaa

SEQ ID NO: 136157 - RNA, 19 nt, Artificial Sequence
  Description of Artificial Sequence: Synthetic oligonucleotide
ugucccaauggggcaggga

SEQ ID NO: 136158 - RNA, 19 nt, Artificial Sequence
  Description of Artificial Sequence: Synthetic oligonucleotide
acaccguagggcagguucu

SEQ ID NO: 136159 - RNA, 19 nt, Artificial Sequence
  Description of Artificial Sequence: Synthetic oligonucleotide
cguuggcuauuuuggaggc

SEQ ID NO: 136160 - RNA, 19 nt, Artificial Sequence
  Description of Artificial Sequence: Synthetic oligonucleotide
ggugcuucgacuggacaca

SEQ ID NO: 136161 - RNA, 19 nt, Artificial Sequence
  Description of Artificial Sequence: Synthetic oligonucleotide
ucagcucguuggcuauuuu

SEQ ID NO: 136162 - RNA, 19 nt, Artificial Sequence
  Description of Artificial Sequence: Synthetic oligonucleotide
uagagcucguggucuucau

SEQ ID NO: 136163 - RNA, 19 nt, Artificial Sequence
  Description of Artificial Sequence: Synthetic oligonucleotide
gggacggccuggucgcugg

SEQ ID NO: 136164 - RNA, 19 nt, Artificial Sequence
  Description of Artificial Sequence: Synthetic oligonucleotide
guagaacggaauacgguau

SEQ ID NO: 136165 - RNA, 19 nt, Artificial Sequence
  Description of Artificial Sequence: Synthetic oligonucleotide
accgcucacccucgccaag

SEQ ID NO: 136166 - RNA, 19 nt, Artificial Sequence
  Description of Artificial Sequence: Synthetic oligonucleotide
gugaguccuggaucucuuc

SEQ ID NO: 136167 - RNA, 19 nt, Artificial Sequence
  Description of Artificial Sequence: Synthetic oligonucleotide
gucgcuuggaggggaaaga

SEQ ID NO: 136168 - RNA, 19 nt, Artificial Sequence
  Description of Artificial Sequence: Synthetic oligonucleotide
ucgccaaggcugugcagua

SEQ ID NO: 136169 - RNA, 19 nt, Artificial Sequence
  Description of Artificial Sequence: Synthetic oligonucleotide
ggagaagcccaaagugggc

SEQ ID NO: 136170 - RNA, 19 nt, Artificial Sequence
  Description of Artificial Sequence: Synthetic oligonucleotide
cguguguaacccauucgac

SEQ ID NO: 136171 - RNA, 19 nt, Artificial Sequence
  Description of Artificial Sequence: Synthetic oligonucleotide
ggugggucucugcucgccc

SEQ ID NO: 136172 - RNA, 19 nt, Artificial Sequence
  Description of Artificial Sequence: Synthetic oligonucleotide
cugagaggaggggcggcag

SEQ ID NO: 136173 - RNA, 19 nt, Artificial Sequence
  Description of Artificial Sequence: Synthetic oligonucleotide
caaccgcaguaccgagggg

SEQ ID NO: 136174 - RNA, 19 nt, Artificial Sequence
  Description of Artificial Sequence: Synthetic oligonucleotide
gaagugcccgauauccgcu

SEQ ID NO: 136175 - RNA, 19 nt, Artificial Sequence
  Description of Artificial Sequence: Synthetic oligonucleotide
ugcccgauauccgcuuaaa

SEQ ID NO: 136176 - RNA, 19 nt, Artificial Sequence
  Description of Artificial Sequence: Synthetic oligonucleotide
caguacccgcucccguagc

SEQ ID NO: 136177 - RNA, 19 nt, Artificial Sequence
  Description of Artificial Sequence: Synthetic oligonucleotide
cacuacuguuggucagauc

SEQ ID NO: 136178 - RNA, 19 nt, Artificial Sequence
  Description of Artificial Sequence: Synthetic oligonucleotide
accuugugggauggagaug

SEQ ID NO: 136179 - RNA, 19 nt, Artificial Sequence
  Description of Artificial Sequence: Synthetic oligonucleotide
ccccaauuucucaagaacu

SEQ ID NO: 136180 - RNA, 19 nt, Artificial Sequence
  Description of Artificial Sequence: Synthetic oligonucleotide
cuucucguguguaacccau

SEQ ID NO: 136181 - RNA, 19 nt, Artificial Sequence
  Description of Artificial Sequence: Synthetic oligonucleotide
agugcccgauauccgcuua

SEQ ID NO: 136182 - RNA, 19 nt, Artificial Sequence
  Description of Artificial Sequence: Synthetic oligonucleotide
gguuuaggcgaaauacucu

SEQ ID NO: 136183 - RNA, 19 nt, Artificial Sequence
  Description of Artificial Sequence: Synthetic oligonucleotide
gccuagaagcagauaggug

SEQ ID NO: 136184 - RNA, 19 nt, Artificial Sequence
  Description of Artificial Sequence: Synthetic oligonucleotide
gcgcaagaagccaagucca

SEQ ID NO: 136185 - RNA, 19 nt, Artificial Sequence
  Description of Artificial Sequence: Synthetic oligonucleotide
gguuccugcggacaaacuu

SEQ ID NO: 136186 - RNA, 19 nt, Artificial Sequence
  Description of Artificial Sequence: Synthetic oligonucleotide
uacacuggccuuggagguu

SEQ ID NO: 136187 - RNA, 19 nt, Artificial Sequence
  Description of Artificial Sequence: Synthetic oligonucleotide
gaacggaauacgguauuuu

SEQ ID NO: 136188 - RNA, 19 nt, Artificial Sequence
  Description of Artificial Sequence: Synthetic oligonucleotide
ggggaggcgacagggacac

SEQ ID NO: 136189 - RNA, 19 nt, Artificial Sequence
  Description of Artificial Sequence: Synthetic oligonucleotide
gccuuggagguuagcaagc

SEQ ID NO: 136190 - RNA, 19 nt, Artificial Sequence
  Description of Artificial Sequence: Synthetic oligonucleotide
ccucuggugggucgcuugg

SEQ ID NO: 136191 - RNA, 19 nt, Artificial Sequence
  Description of Artificial Sequence: Synthetic oligonucleotide
gggauccgccaguguauag

SEQ ID NO: 136192 - RNA, 19 nt, Artificial Sequence
  Description of Artificial Sequence: Synthetic oligonucleotide
cucgccaaggcugugcagu

SEQ ID NO: 136193 - RNA, 19 nt, Artificial Sequence
  Description of Artificial Sequence: Synthetic oligonucleotide
uggucgcuggagcgucgcu

SEQ ID NO: 136194 - RNA, 19 nt, Artificial Sequence
  Description of Artificial Sequence: Synthetic oligonucleotide
cugaaacagcagagaaaua

SEQ ID NO: 136195 - RNA, 19 nt, Artificial Sequence
  Description of Artificial Sequence: Synthetic oligonucleotide
uuccgccccgucucauccu

SEQ ID NO: 136196 - RNA, 19 nt, Artificial Sequence
  Description of Artificial Sequence: Synthetic oligonucleotide
gaacgaggcuuggccuccc

SEQ ID NO: 136197 - RNA, 19 nt, Artificial Sequence
  Description of Artificial Sequence: Synthetic oligonucleotide
ccacugccgaccacgugag

SEQ ID NO: 136198 - RNA, 19 nt, Artificial Sequence
  Description of Artificial Sequence: Synthetic oligonucleotide
agcccuguccaaaguggga

SEQ ID NO: 136199 - RNA, 19 nt, Artificial Sequence
  Description of Artificial Sequence: Synthetic oligonucleotide
cucgugcagcucgcuuugg

SEQ ID NO: 136200 - RNA, 19 nt, Artificial Sequence
  Description of Artificial Sequence: Synthetic oligonucleotide
cguuguaccucugucccac

SEQ ID NO: 136201 - RNA, 19 nt, Artificial Sequence
  Description of Artificial Sequence: Synthetic oligonucleotide
ccgauagggcgaagagggg

SEQ ID NO: 136202 - RNA, 19 nt, Artificial Sequence
  Description of Artificial Sequence: Synthetic oligonucleotide
gugcuucgacuggacacac

SEQ ID NO: 136203 - RNA, 19 nt, Artificial Sequence
  Description of Artificial Sequence: Synthetic oligonucleotide
cccauucgacaccaucaac

SEQ ID NO: 136204 - RNA, 19 nt, Artificial Sequence
  Description of Artificial Sequence: Synthetic oligonucleotide
ccccaguaaaggccuguag

SEQ ID NO: 136205 - RNA, 19 nt, Artificial Sequence
  Description of Artificial Sequence: Synthetic oligonucleotide
gcaguaccccaccgggccc

SEQ ID NO: 136206 - RNA, 19 nt, Artificial Sequence
  Description of Artificial Sequence: Synthetic oligonucleotide
ggcacuacuguuggucaga

SEQ ID NO: 136207 - RNA, 19 nt, Artificial Sequence
  Description of Artificial Sequence: Synthetic oligonucleotide
agcaagcgggagucacuuu

SEQ ID NO: 136208 - RNA, 19 nt, Artificial Sequence
  Description of Artificial Sequence: Synthetic oligonucleotide
ccuagagccacccauucau

SEQ ID NO: 136209 - RNA, 19 nt, Artificial Sequence
  Description of Artificial Sequence: Synthetic oligonucleotide
caccguagggcagguucug

SEQ ID NO: 136210 - RNA, 19 nt, Artificial Sequence
  Description of Artificial Sequence: Synthetic oligonucleotide
cuggagcgucgcugcuuag

SEQ ID NO: 136211 - RNA, 19 nt, Artificial Sequence
  Description of Artificial Sequence: Synthetic oligonucleotide
cacucggucuuugcuuuca

SEQ ID NO: 136212 - RNA, 19 nt, Artificial Sequence
  Description of Artificial Sequence: Synthetic oligonucleotide
cccacccuauggaggacag

SEQ ID NO: 136213 - RNA, 19 nt, Artificial Sequence
  Description of Artificial Sequence: Synthetic oligonucleotide
agggauccgccaguguaua

SEQ ID NO: 136214 - RNA, 19 nt, Artificial Sequence
  Description of Artificial Sequence: Synthetic oligonucleotide
cucaggccgcuuauuuucu

SEQ ID NO: 136215 - RNA, 19 nt, Artificial Sequence
  Description of Artificial Sequence: Synthetic oligonucleotide
agccaagcgccuagagcca

SEQ ID NO: 136216 - RNA, 19 nt, Artificial Sequence
  Description of Artificial Sequence: Synthetic oligonucleotide
cgacuggacacaccccggg

SEQ ID NO: 136217 - RNA, 19 nt, Artificial Sequence
  Description of Artificial Sequence: Synthetic oligonucleotide
gccuagagccacccauuca

SEQ ID NO: 136218 - RNA, 19 nt, Artificial Sequence
  Description of Artificial Sequence: Synthetic oligonucleotide
ccaccgggccccaguaaag

SEQ ID NO: 136219 - RNA, 19 nt, Artificial Sequence
  Description of Artificial Sequence: Synthetic oligonucleotide
agccacccauucauacacu

SEQ ID NO: 136220 - RNA, 19 nt, Artificial Sequence
  Description of Artificial Sequence: Synthetic oligonucleotide
gguuggcgcaagaagccaa

SEQ ID NO: 136221 - RNA, 19 nt, Artificial Sequence
  Description of Artificial Sequence: Synthetic oligonucleotide
cccauucauacacuggccu

SEQ ID NO: 136222 - RNA, 19 nt, Artificial Sequence
  Description of Artificial Sequence: Synthetic oligonucleotide
cacuucguuguaccucugu

SEQ ID NO: 136223 - RNA, 19 nt, Artificial Sequence
  Description of Artificial Sequence: Synthetic oligonucleotide
aucgcucgugcagcucgcu

SEQ ID NO: 136224 - RNA, 19 nt, Artificial Sequence
  Description of Artificial Sequence: Synthetic oligonucleotide
cccucaguacccgcucccg

SEQ ID NO: 136225 - RNA, 19 nt, Artificial Sequence
  Description of Artificial Sequence: Synthetic oligonucleotide
cauuguuacucugggucuu

SEQ ID NO: 136226 - RNA, 19 nt, Artificial Sequence
  Description of Artificial Sequence: Synthetic oligonucleotide
caccgcucacccucgccaa

SEQ ID NO: 136227 - RNA, 19 nt, Artificial Sequence
  Description of Artificial Sequence: Synthetic oligonucleotide
gaggggcggcagcgccagg

SEQ ID NO: 136228 - RNA, 19 nt, Artificial Sequence
  Description of Artificial Sequence: Synthetic oligonucleotide
cuacgccaggcagagggcu

SEQ ID NO: 136229 - RNA, 19 nt, Artificial Sequence
  Description of Artificial Sequence: Synthetic oligonucleotide
ccaccgcucacccucgcca

SEQ ID NO: 136230 - RNA, 19 nt, Artificial Sequence
  Description of Artificial Sequence: Synthetic oligonucleotide
ccgcucacccucgccaagg

SEQ ID NO: 136231 - RNA, 19 nt, Artificial Sequence
  Description of Artificial Sequence: Synthetic oligonucleotide
gccaccucuggugggucgc

SEQ ID NO: 136232 - RNA, 19 nt, Artificial Sequence
  Description of Artificial Sequence: Synthetic oligonucleotide
ggacaaacuuggaggugaa

SEQ ID NO: 136233 - RNA, 19 nt, Artificial Sequence
  Description of Artificial Sequence: Synthetic oligonucleotide
ggaauggcagggacggccu

SEQ ID NO: 136234 - RNA, 19 nt, Artificial Sequence
  Description of Artificial Sequence: Synthetic oligonucleotide
cucuggugggucgcuugga

SEQ ID NO: 136235 - RNA, 19 nt, Artificial Sequence
  Description of Artificial Sequence: Synthetic oligonucleotide
gccgcuuauuuucugcauu

SEQ ID NO: 136236 - RNA, 19 nt, Artificial Sequence
  Description of Artificial Sequence: Synthetic oligonucleotide
ccauggaagugcccgauau

SEQ ID NO: 136237 - RNA, 19 nt, Artificial Sequence
  Description of Artificial Sequence: Synthetic oligonucleotide
gccacccucccaggaaccc

SEQ ID NO: 136238 - RNA, 19 nt, Artificial Sequence
  Description of Artificial Sequence: Synthetic oligonucleotide
cgccaggaagaaaaggcaa

SEQ ID NO: 136239 - RNA, 19 nt, Artificial Sequence
  Description of Artificial Sequence: Synthetic oligonucleotide
gguuagcaagcgggaguca

SEQ ID NO: 136240 - RNA, 19 nt, Artificial Sequence
  Description of Artificial Sequence: Synthetic oligonucleotide
gcuguuccgauagggcgaa

SEQ ID NO: 136241 - RNA, 19 nt, Artificial Sequence
  Description of Artificial Sequence: Synthetic oligonucleotide
acgugaggucugagcgucu

SEQ ID NO: 136242 - RNA, 19 nt, Artificial Sequence
  Description of Artificial Sequence: Synthetic oligonucleotide
cccaccgcucacccucgcc

SEQ ID NO: 136243 - RNA, 19 nt, Artificial Sequence
  Description of Artificial Sequence: Synthetic oligonucleotide
cugaaccuugugggaugga

SEQ ID NO: 136244 - RNA, 19 nt, Artificial Sequence
  Description of Artificial Sequence: Synthetic oligonucleotide
cuguuccgauagggcgaag

SEQ ID NO: 136245 - RNA, 19 nt, Artificial Sequence
  Description of Artificial Sequence: Synthetic oligonucleotide
ccauucauacacuggccuu

SEQ ID NO: 136246 - RNA, 19 nt, Artificial Sequence
  Description of Artificial Sequence: Synthetic oligonucleotide
cgccuagagccacccauuc

SEQ ID NO: 136247 - RNA, 19 nt, Artificial Sequence
  Description of Artificial Sequence: Synthetic oligonucleotide
cccaccgggccccaguaaa

SEQ ID NO: 136248 - RNA, 19 nt, Artificial Sequence
  Description of Artificial Sequence: Synthetic oligonucleotide
cacggggcuggaggguuga

SEQ ID NO: 136249 - RNA, 19 nt, Artificial Sequence
  Description of Artificial Sequence: Synthetic oligonucleotide
gccauggaagugcccgaua

SEQ ID NO: 136250 - RNA, 19 nt, Artificial Sequence
  Description of Artificial Sequence: Synthetic oligonucleotide
ggccgcuuauuuucugcau

SEQ ID NO: 136251 - RNA, 19 nt, Artificial Sequence
  Description of Artificial Sequence: Synthetic oligonucleotide
gccuggucgcuggagcguc

SEQ ID NO: 136252 - RNA, 19 nt, Artificial Sequence
  Description of Artificial Sequence: Synthetic oligonucleotide
cgucgcugcuuaggguugg

SEQ ID NO: 136253 - RNA, 19 nt, Artificial Sequence
  Description of Artificial Sequence: Synthetic oligonucleotide
gguggccgcuggcaaauuu

SEQ ID NO: 136254 - RNA, 19 nt, Artificial Sequence
  Description of Artificial Sequence: Synthetic oligonucleotide
gcccgauauccgcuuaaau

SEQ ID NO: 136255 - RNA, 19 nt, Artificial Sequence
  Description of Artificial Sequence: Synthetic oligonucleotide
cccgggcuguuccgauagg

SEQ ID NO: 136256 - RNA, 19 nt, Artificial Sequence
  Description of Artificial Sequence: Synthetic oligonucleotide
gccgaccacgugaggucug

SEQ ID NO: 136257 - RNA, 19 nt, Artificial Sequence
  Description of Artificial Sequence: Synthetic oligonucleotide
ggggugacacaaagacacu

SEQ ID NO: 136258 - RNA, 19 nt, Artificial Sequence
  Description of Artificial Sequence: Synthetic oligonucleotide
gcacuacuguuggucagau

SEQ ID NO: 136259 - RNA, 19 nt, Artificial Sequence
  Description of Artificial Sequence: Synthetic oligonucleotide
ccgaggcaguuugcacacc

SEQ ID NO: 136260 - RNA, 19 nt, Artificial Sequence
  Description of Artificial Sequence: Synthetic oligonucleotide
cccuguccaaagugggagu

SEQ ID NO: 136261 - RNA, 19 nt, Artificial Sequence
  Description of Artificial Sequence: Synthetic oligonucleotide
cgggagucacuuugcccca

SEQ ID NO: 136262 - RNA, 19 nt, Artificial Sequence
  Description of Artificial Sequence: Synthetic oligonucleotide
gccccaguaaaggccugua

SEQ ID NO: 136263 - RNA, 19 nt, Artificial Sequence
  Description of Artificial Sequence: Synthetic oligonucleotide
ggacggccuggucgcugga

SEQ ID NO: 136264 - RNA, 19 nt, Artificial Sequence
  Description of Artificial Sequence: Synthetic oligonucleotide
ccucaggaccaucguauuu

SEQ ID NO: 136265 - RNA, 19 nt, Artificial Sequence
  Description of Artificial Sequence: Synthetic oligonucleotide
ccuggcggagggccugcca

SEQ ID NO: 136266 - RNA, 19 nt, Artificial Sequence
  Description of Artificial Sequence: Synthetic oligonucleotide
ccgaccacgugaggucuga

SEQ ID NO: 136267 - RNA, 19 nt, Artificial Sequence
  Description of Artificial Sequence: Synthetic oligonucleotide
ccccauuugcugggagcca

SEQ ID NO: 136268 - RNA, 19 nt, Artificial Sequence
  Description of Artificial Sequence: Synthetic oligonucleotide
gcacccgggcuguuccgau

SEQ ID NO: 136269 - RNA, 19 nt, Artificial Sequence
  Description of Artificial Sequence: Synthetic oligonucleotide
ccacccuauggaggacaga

SEQ ID NO: 136270 - RNA, 19 nt, Artificial Sequence
  Description of Artificial Sequence: Synthetic oligonucleotide
ccgccaguguauagaggau

SEQ ID NO: 136271 - RNA, 19 nt, Artificial Sequence
  Description of Artificial Sequence: Synthetic oligonucleotide
cgcuuaaaucgaacaccau

SEQ ID NO: 136272 - RNA, 19 nt, Artificial Sequence
  Description of Artificial Sequence: Synthetic oligonucleotide
gcgccuagagccacccauu

SEQ ID NO: 136273 - RNA, 19 nt, Artificial Sequence
  Description of Artificial Sequence: Synthetic oligonucleotide
cagggacggccuggucgcu

SEQ ID NO: 136274 - RNA, 19 nt, Artificial Sequence
  Description of Artificial Sequence: Synthetic oligonucleotide
ccaccucuggugggucgcu

SEQ ID NO: 136275 - RNA, 19 nt, Artificial Sequence
  Description of Artificial Sequence: Synthetic oligonucleotide
uuauauaguaucuugcacc

SEQ ID NO: 136276 - RNA, 19 nt, Artificial Sequence
  Description of Artificial Sequence: Synthetic oligonucleotide
agagucuauaaucuggacc

SEQ ID NO: 136277 - RNA, 19 nt, Artificial Sequence
  Description of Artificial Sequence: Synthetic oligonucleotide
aacucauuccauuuggcuc

SEQ ID NO: 136278 - RNA, 19 nt, Artificial Sequence
  Description of Artificial Sequence: Synthetic oligonucleotide
aaugcgauccuucugugag

SEQ ID NO: 136279 - RNA, 19 nt, Artificial Sequence
  Description of Artificial Sequence: Synthetic oligonucleotide
uacauaggcaugcuuaggg

SEQ ID NO: 136280 - RNA, 19 nt, Artificial Sequence
  Description of Artificial Sequence: Synthetic oligonucleotide
cuuaaaagcguacuugcgg

SEQ ID NO: 136281 - RNA, 19 nt, Artificial Sequence
  Description of Artificial Sequence: Synthetic oligonucleotide
uauaguaucuugcaccuuc

SEQ ID NO: 136282 - RNA, 19 nt, Artificial Sequence
  Description of Artificial Sequence: Synthetic oligonucleotide
uauauaguaucuugcaccu

SEQ ID NO: 136283 - RNA, 19 nt, Artificial Sequence
  Description of Artificial Sequence: Synthetic oligonucleotide
uugaauuggaccucuuucc

SEQ ID NO: 136284 - RNA, 19 nt, Artificial Sequence
  Description of Artificial Sequence: Synthetic oligonucleotide
gaacgguauagucugaagc

SEQ ID NO: 136285 - RNA, 19 nt, Artificial Sequence
  Description of Artificial Sequence: Synthetic oligonucleotide
uuaguggucgcucuuggcc

SEQ ID NO: 136286 - RNA, 19 nt, Artificial Sequence
  Description of Artificial Sequence: Synthetic oligonucleotide
auaaucuggaccuccauga

SEQ ID NO: 136287 - RNA, 19 nt, Artificial Sequence
  Description of Artificial Sequence: Synthetic oligonucleotide
uguuucuugggaguguucg

SEQ ID NO: 136288 - RNA, 19 nt, Artificial Sequence
  Description of Artificial Sequence: Synthetic oligonucleotide
uuaaaagcguacuugcggu

SEQ ID NO: 136289 - RNA, 19 nt, Artificial Sequence
  Description of Artificial Sequence: Synthetic oligonucleotide
aggguagcgggccacaacc

SEQ ID NO: 136290 - RNA, 19 nt, Artificial Sequence
  Description of Artificial Sequence: Synthetic oligonucleotide
aguugaggcaccuucagcu

SEQ ID NO: 136291 - RNA, 19 nt, Artificial Sequence
  Description of Artificial Sequence: Synthetic oligonucleotide
ugguuuauauaguaucuug

SEQ ID NO: 136292 - RNA, 19 nt, Artificial Sequence
  Description of Artificial Sequence: Synthetic oligonucleotide
cuuccgaccuauauguucg

SEQ ID NO: 136293 - RNA, 19 nt, Artificial Sequence
  Description of Artificial Sequence: Synthetic oligonucleotide
gauacaauuauccugggau

SEQ ID NO: 136294 - RNA, 19 nt, Artificial Sequence
  Description of Artificial Sequence: Synthetic oligonucleotide
accuuuaacaaccggagcu

SEQ ID NO: 136295 - RNA, 19 nt, Artificial Sequence
  Description of Artificial Sequence: Synthetic oligonucleotide
cuauuguugaggauuccgg

SEQ ID NO: 136296 - RNA, 19 nt, Artificial Sequence
  Description of Artificial Sequence: Synthetic oligonucleotide
uucguucucugaaugacgc

SEQ ID NO: 136297 - RNA, 19 nt, Artificial Sequence
  Description of Artificial Sequence: Synthetic oligonucleotide
ucuaucucuuggcuggccg

SEQ ID NO: 136298 - RNA, 19 nt, Artificial Sequence
  Description of Artificial Sequence: Synthetic oligonucleotide
cauauucucgccaggcucg

SEQ ID NO: 136299 - RNA, 19 nt, Artificial Sequence
  Description of Artificial Sequence: Synthetic oligonucleotide
aaucugcuuaauuuggcau

SEQ ID NO: 136300 - RNA, 19 nt, Artificial Sequence
  Description of Artificial Sequence: Synthetic oligonucleotide
aacuccaacgggaaagugg

SEQ ID NO: 136301 - RNA, 19 nt, Artificial Sequence
  Description of Artificial Sequence: Synthetic oligonucleotide
acacuuccgaccuauaugu

SEQ ID NO: 136302 - RNA, 19 nt, Artificial Sequence
  Description of Artificial Sequence: Synthetic oligonucleotide
aaacuuaugggucguuccu

SEQ ID NO: 136303 - RNA, 19 nt, Artificial Sequence
  Description of Artificial Sequence: Synthetic oligonucleotide
aauuggaccucuuuccaaa

SEQ ID NO: 136304 - RNA, 19 nt, Artificial Sequence
  Description of Artificial Sequence: Synthetic oligonucleotide
ucucugaaugacgcgaucg

SEQ ID NO: 136305 - RNA, 19 nt, Artificial Sequence
  Description of Artificial Sequence: Synthetic oligonucleotide
aacaaccggagcuuccguc

SEQ ID NO: 136306 - RNA, 19 nt, Artificial Sequence
  Description of Artificial Sequence: Synthetic oligonucleotide
uuaacaaccggagcuuccg

SEQ ID NO: 136307 - RNA, 19 nt, Artificial Sequence
  Description of Artificial Sequence: Synthetic oligonucleotide
gaagcuucguuuaucaaac

SEQ ID NO: 136308 - RNA, 19 nt, Artificial Sequence
  Description of Artificial Sequence: Synthetic oligonucleotide
uuaguugaggcaccuucag

SEQ ID NO: 136309 - RNA, 19 nt, Artificial Sequence
  Description of Artificial Sequence: Synthetic oligonucleotide
accuauauguucguugugg

SEQ ID NO: 136310 - RNA, 19 nt, Artificial Sequence
  Description of Artificial Sequence: Synthetic oligonucleotide
caaacuuaugggucguucc

SEQ ID NO: 136311 - RNA, 19 nt, Artificial Sequence
  Description of Artificial Sequence: Synthetic oligonucleotide
gacacuuccgaccuauaug

SEQ ID NO: 136312 - RNA, 19 nt, Artificial Sequence
  Description of Artificial Sequence: Synthetic oligonucleotide
auacaauuauccugggaug

SEQ ID NO: 136313 - RNA, 19 nt, Artificial Sequence
  Description of Artificial Sequence: Synthetic oligonucleotide
ucauauucucgccaggcuc

SEQ ID NO: 136314 - RNA, 19 nt, Artificial Sequence
  Description of Artificial Sequence: Synthetic oligonucleotide
aagauacaauuauccuggg

SEQ ID NO: 136315 - RNA, 19 nt, Artificial Sequence
  Description of Artificial Sequence: Synthetic oligonucleotide
uggcuaucugaaaacuagg

SEQ ID NO: 136316 - RNA, 19 nt, Artificial Sequence
  Description of Artificial Sequence: Synthetic oligonucleotide
uuggccguccuucugaaac

SEQ ID NO: 136317 - RNA, 19 nt, Artificial Sequence
  Description of Artificial Sequence: Synthetic oligonucleotide
gugacuacggccucgccgg

SEQ ID NO: 136318 - RNA, 19 nt, Artificial Sequence
  Description of Artificial Sequence: Synthetic oligonucleotide
cugaaugacgcgaucggcc

SEQ ID NO: 136319 - RNA, 19 nt, Artificial Sequence
  Description of Artificial Sequence: Synthetic oligonucleotide
aaucuggaccuccaugaca

SEQ ID NO: 136320 - RNA, 19 nt, Artificial Sequence
  Description of Artificial Sequence: Synthetic oligonucleotide
aggucagaaagcacaaacc

SEQ ID NO: 136321 - RNA, 19 nt, Artificial Sequence
  Description of Artificial Sequence: Synthetic oligonucleotide
cuauauguucguugugggg

SEQ ID NO: 136322 - RNA, 19 nt, Artificial Sequence
  Description of Artificial Sequence: Synthetic oligonucleotide
ugguugggaauguuauugg

SEQ ID NO: 136323 - RNA, 19 nt, Artificial Sequence
  Description of Artificial Sequence: Synthetic oligonucleotide
aauugaauuggaccucuuu

SEQ ID NO: 136324 - RNA, 19 nt, Artificial Sequence
  Description of Artificial Sequence: Synthetic oligonucleotide
guaaccuucaggguagcgg

SEQ ID NO: 136325 - RNA, 19 nt, Artificial Sequence
  Description of Artificial Sequence: Synthetic oligonucleotide
aagcguguauuucuccuug

SEQ ID NO: 136326 - RNA, 19 nt, Artificial Sequence
  Description of Artificial Sequence: Synthetic oligonucleotide
uugaccgccugucagguac

SEQ ID NO: 136327 - RNA, 19 nt, Artificial Sequence
  Description of Artificial Sequence: Synthetic oligonucleotide
acgaucaagcugcuccugc

SEQ ID NO: 136328 - RNA, 19 nt, Artificial Sequence
  Description of Artificial Sequence: Synthetic oligonucleotide
uugauucucucuaggaauc

SEQ ID NO: 136329 - RNA, 19 nt, Artificial Sequence
  Description of Artificial Sequence: Synthetic oligonucleotide
caugggaugaacgguauag

SEQ ID NO: 136330 - RNA, 19 nt, Artificial Sequence
  Description of Artificial Sequence: Synthetic oligonucleotide
acauugacgggucuguaga

SEQ ID NO: 136331 - RNA, 19 nt, Artificial Sequence
  Description of Artificial Sequence: Synthetic oligonucleotide
ugcacguaacaucuuccag

SEQ ID NO: 136332 - RNA, 19 nt, Artificial Sequence
  Description of Artificial Sequence: Synthetic oligonucleotide
uuaauugaauuggaccucu

SEQ ID NO: 136333 - RNA, 19 nt, Artificial Sequence
  Description of Artificial Sequence: Synthetic oligonucleotide
auggcuaucugaaaacuag

SEQ ID NO: 136334 - RNA, 19 nt, Artificial Sequence
  Description of Artificial Sequence: Synthetic oligonucleotide
guuuccuuaguugaggcac

SEQ ID NO: 136335 - RNA, 19 nt, Artificial Sequence
  Description of Artificial Sequence: Synthetic oligonucleotide
agcaaggccugcucaagcg

SEQ ID NO: 136336 - RNA, 19 nt, Artificial Sequence
  Description of Artificial Sequence: Synthetic oligonucleotide
cauaggcaugcuuagggug

SEQ ID NO: 136337 - RNA, 19 nt, Artificial Sequence
  Description of Artificial Sequence: Synthetic oligonucleotide
cccaagacgaucaagcugc

SEQ ID NO: 136338 - RNA, 19 nt, Artificial Sequence
  Description of Artificial Sequence: Synthetic oligonucleotide
ugcucaagcguguauuucu

SEQ ID NO: 136339 - RNA, 19 nt, Artificial Sequence
  Description of Artificial Sequence: Synthetic oligonucleotide
ucaagcguguauuucuccu

SEQ ID NO: 136340 - RNA, 19 nt, Artificial Sequence
  Description of Artificial Sequence: Synthetic oligonucleotide
acggggacagacuuuucac

SEQ ID NO: 136341 - RNA, 19 nt, Artificial Sequence
  Description of Artificial Sequence: Synthetic oligonucleotide
cacguaacaucuuccagug

SEQ ID NO: 136342 - RNA, 19 nt, Artificial Sequence
  Description of Artificial Sequence: Synthetic oligonucleotide
uuuaauugaauuggaccuc

SEQ ID NO: 136343 - RNA, 19 nt, Artificial Sequence
  Description of Artificial Sequence: Synthetic oligonucleotide
ugaccucguucucagagga

SEQ ID NO: 136344 - RNA, 19 nt, Artificial Sequence
  Description of Artificial Sequence: Synthetic oligonucleotide
auauguucguuguggggag

SEQ ID NO: 136345 - RNA, 19 nt, Artificial Sequence
  Description of Artificial Sequence: Synthetic oligonucleotide
ugaacgguauagucugaag

SEQ ID NO: 136346 - RNA, 19 nt, Artificial Sequence
  Description of Artificial Sequence: Synthetic oligonucleotide
uuguagagucuauaaucug

SEQ ID NO: 136347 - RNA, 19 nt, Artificial Sequence
  Description of Artificial Sequence: Synthetic oligonucleotide
aaaugcgauccuucuguga

SEQ ID NO: 136348 - RNA, 19 nt, Artificial Sequence
  Description of Artificial Sequence: Synthetic oligonucleotide
ugaaugacgcgaucggccu

SEQ ID NO: 136349 - RNA, 19 nt, Artificial Sequence
  Description of Artificial Sequence: Synthetic oligonucleotide
ucuaccgugauaucuccuc

SEQ ID NO: 136350 - RNA, 19 nt, Artificial Sequence
  Description of Artificial Sequence: Synthetic oligonucleotide
auacugucaggucuagucu

SEQ ID NO: 136351 - RNA, 19 nt, Artificial Sequence
  Description of Artificial Sequence: Synthetic oligonucleotide
ugucgucccucauggaccg

SEQ ID NO: 136352 - RNA, 19 nt, Artificial Sequence
  Description of Artificial Sequence: Synthetic oligonucleotide
cuuagggugaugagcccgg

SEQ ID NO: 136353 - RNA, 19 nt, Artificial Sequence
  Description of Artificial Sequence: Synthetic oligonucleotide
ucauugugguuuauauagu

SEQ ID NO: 136354 - RNA, 19 nt, Artificial Sequence
  Description of Artificial Sequence: Synthetic oligonucleotide
ucggugcagaaguaauagg

SEQ ID NO: 136355 - RNA, 19 nt, Artificial Sequence
  Description of Artificial Sequence: Synthetic oligonucleotide
aacucggugguugggaaug

SEQ ID NO: 136356 - RNA, 19 nt, Artificial Sequence
  Description of Artificial Sequence: Synthetic oligonucleotide
cugguuuaaugagaacucg

SEQ ID NO: 136357 - RNA, 19 nt, Artificial Sequence
  Description of Artificial Sequence: Synthetic oligonucleotide
uugugguaaaacuggcgcu

SEQ ID NO: 136358 - RNA, 19 nt, Artificial Sequence
  Description of Artificial Sequence: Synthetic oligonucleotide
ugcuugugguaaaacuggc

SEQ ID NO: 136359 - RNA, 19 nt, Artificial Sequence
  Description of Artificial Sequence: Synthetic oligonucleotide
acucuuguagagucuauaa

SEQ ID NO: 136360 - RNA, 19 nt, Artificial Sequence
  Description of Artificial Sequence: Synthetic oligonucleotide
gacgcgaucggccucugug

SEQ ID NO: 136361 - RNA, 19 nt, Artificial Sequence
  Description of Artificial Sequence: Synthetic oligonucleotide
cucugaaugacgcgaucgg

SEQ ID NO: 136362 - RNA, 19 nt, Artificial Sequence
  Description of Artificial Sequence: Synthetic oligonucleotide
acgugggugacugccaccc

SEQ ID NO: 136363 - RNA, 19 nt, Artificial Sequence
  Description of Artificial Sequence: Synthetic oligonucleotide
acagccgguaaagcuaagc

SEQ ID NO: 136364 - RNA, 19 nt, Artificial Sequence
  Description of Artificial Sequence: Synthetic oligonucleotide
gaaaugcgauccuucugug

SEQ ID NO: 136365 - RNA, 19 nt, Artificial Sequence
  Description of Artificial Sequence: Synthetic oligonucleotide
uuauacagccagccucgcc

SEQ ID NO: 136366 - RNA, 19 nt, Artificial Sequence
  Description of Artificial Sequence: Synthetic oligonucleotide
caguccguuuugcaggucg

SEQ ID NO: 136367 - RNA, 19 nt, Artificial Sequence
  Description of Artificial Sequence: Synthetic oligonucleotide
uaacagccgguaaagcuaa

SEQ ID NO: 136368 - RNA, 19 nt, Artificial Sequence
  Description of Artificial Sequence: Synthetic oligonucleotide
agauacaauuauccuggga

SEQ ID NO: 136369 - RNA, 19 nt, Artificial Sequence
  Description of Artificial Sequence: Synthetic oligonucleotide
uccguucuuagcuccaccu

SEQ ID NO: 136370 - RNA, 19 nt, Artificial Sequence
  Description of Artificial Sequence: Synthetic oligonucleotide
ucauccuagggcgaguacu

SEQ ID NO: 136371 - RNA, 19 nt, Artificial Sequence
  Description of Artificial Sequence: Synthetic oligonucleotide
ugaccacgggugcauuugg

SEQ ID NO: 136372 - RNA, 19 nt, Artificial Sequence
  Description of Artificial Sequence: Synthetic oligonucleotide
cuguggucaacucuggcuc

SEQ ID NO: 136373 - RNA, 19 nt, Artificial Sequence
  Description of Artificial Sequence: Synthetic oligonucleotide
cacgggugcauuuggauuc

SEQ ID NO: 136374 - RNA, 19 nt, Artificial Sequence
  Description of Artificial Sequence: Synthetic oligonucleotide
agccgguaaagcuaagcca

SEQ ID NO: 136375 - RNA, 19 nt, Artificial Sequence
  Description of Artificial Sequence: Synthetic oligonucleotide
augcgauccuucugugagc

SEQ ID NO: 136376 - RNA, 19 nt, Artificial Sequence
  Description of Artificial Sequence: Synthetic oligonucleotide
ugcuuaauuuggcaucaau

SEQ ID NO: 136377 - RNA, 19 nt, Artificial Sequence
  Description of Artificial Sequence: Synthetic oligonucleotide
acauaggcaugcuuagggu

SEQ ID NO: 136378 - RNA, 19 nt, Artificial Sequence
  Description of Artificial Sequence: Synthetic oligonucleotide
uuccacggucauccuaggg

SEQ ID NO: 136379 - RNA, 19 nt, Artificial Sequence
  Description of Artificial Sequence: Synthetic oligonucleotide
acaaccggagcuuccgucu

SEQ ID NO: 136380 - RNA, 19 nt, Artificial Sequence
  Description of Artificial Sequence: Synthetic oligonucleotide
gccuuaaaagcguacuugc

SEQ ID NO: 136381 - RNA, 19 nt, Artificial Sequence
  Description of Artificial Sequence: Synthetic oligonucleotide
aucccgggaauuucuuuuc

SEQ ID NO: 136382 - RNA, 19 nt, Artificial Sequence
  Description of Artificial Sequence: Synthetic oligonucleotide
agcaagaguucccuccucu

SEQ ID NO: 136383 - RNA, 19 nt, Artificial Sequence
  Description of Artificial Sequence: Synthetic oligonucleotide
ucaaacuuaugggucguuc

SEQ ID NO: 136384 - RNA, 19 nt, Artificial Sequence
  Description of Artificial Sequence: Synthetic oligonucleotide
ucguucucugaaugacgcg

SEQ ID NO: 136385 - RNA, 19 nt, Artificial Sequence
  Description of Artificial Sequence: Synthetic oligonucleotide
augccggguaagcagccac

SEQ ID NO: 136386 - RNA, 19 nt, Artificial Sequence
  Description of Artificial Sequence: Synthetic oligonucleotide
cuaacagccgguaaagcua

SEQ ID NO: 136387 - RNA, 19 nt, Artificial Sequence
  Description of Artificial Sequence: Synthetic oligonucleotide
cuuaguugaggcaccuuca

SEQ ID NO: 136388 - RNA, 19 nt, Artificial Sequence
  Description of Artificial Sequence: Synthetic oligonucleotide
cucaagcguguauuucucc

SEQ ID NO: 136389 - RNA, 19 nt, Artificial Sequence
  Description of Artificial Sequence: Synthetic oligonucleotide
uccggcgugggugaccucg

SEQ ID NO: 136390 - RNA, 19 nt, Artificial Sequence
  Description of Artificial Sequence: Synthetic oligonucleotide
cauucauacagcugccaca

SEQ ID NO: 136391 - RNA, 19 nt, Artificial Sequence
  Description of Artificial Sequence: Synthetic oligonucleotide
guaauuggaagcuucguuu

SEQ ID NO: 136392 - RNA, 19 nt, Artificial Sequence
  Description of Artificial Sequence: Synthetic oligonucleotide
caaucugcuuaauuuggca

SEQ ID NO: 136393 - RNA, 19 nt, Artificial Sequence
  Description of Artificial Sequence: Synthetic oligonucleotide
uagagucuauaaucuggac

SEQ ID NO: 136394 - RNA, 19 nt, Artificial Sequence
  Description of Artificial Sequence: Synthetic oligonucleotide
ucuccguuagauucaucaa

SEQ ID NO: 136395 - RNA, 19 nt, Artificial Sequence
  Description of Artificial Sequence: Synthetic oligonucleotide
gucuauaaucuggaccucc

SEQ ID NO: 136396 - RNA, 19 nt, Artificial Sequence
  Description of Artificial Sequence: Synthetic oligonucleotide
cauugacgggucuguagag

SEQ ID NO: 136397 - RNA, 19 nt, Artificial Sequence
  Description of Artificial Sequence: Synthetic oligonucleotide
gacggggacagacuuuuca

SEQ ID NO: 136398 - RNA, 19 nt, Artificial Sequence
  Description of Artificial Sequence: Synthetic oligonucleotide
guucguuguggggagaaug

SEQ ID NO: 136399 - RNA, 19 nt, Artificial Sequence
  Description of Artificial Sequence: Synthetic oligonucleotide
acgcgaucggccucugugg

SEQ ID NO: 136400 - RNA, 19 nt, Artificial Sequence
  Description of Artificial Sequence: Synthetic oligonucleotide
uaugggucguuccuucuuu

SEQ ID NO: 136401 - RNA, 19 nt, Artificial Sequence
  Description of Artificial Sequence: Synthetic oligonucleotide
ccuuaaaagcguacuugcg

SEQ ID NO: 136402 - RNA, 19 nt, Artificial Sequence
  Description of Artificial Sequence: Synthetic oligonucleotide
gcuaucugaaaacuaggca

SEQ ID NO: 136403 - RNA, 19 nt, Artificial Sequence
  Description of Artificial Sequence: Synthetic oligonucleotide
caacgggaaagugggaacc

SEQ ID NO: 136404 - RNA, 19 nt, Artificial Sequence
  Description of Artificial Sequence: Synthetic oligonucleotide
uacugucaggucuagucuu

SEQ ID NO: 136405 - RNA, 19 nt, Artificial Sequence
  Description of Artificial Sequence: Synthetic oligonucleotide
gccgguaaagcuaagccag

SEQ ID NO: 136406 - RNA, 19 nt, Artificial Sequence
  Description of Artificial Sequence: Synthetic oligonucleotide
uuguuaguggucgcucuug

SEQ ID NO: 136407 - RNA, 19 nt, Artificial Sequence
  Description of Artificial Sequence: Synthetic oligonucleotide
ugcgauccuucugugagcu

SEQ ID NO: 136408 - RNA, 19 nt, Artificial Sequence
  Description of Artificial Sequence: Synthetic oligonucleotide
auaggcaugcuuaggguga

SEQ ID NO: 136409 - RNA, 19 nt, Artificial Sequence
  Description of Artificial Sequence: Synthetic oligonucleotide
ccgccugucagguacauag

SEQ ID NO: 136410 - RNA, 19 nt, Artificial Sequence
  Description of Artificial Sequence: Synthetic oligonucleotide
auucucucuaggaaucuca

SEQ ID NO: 136411 - RNA, 19 nt, Artificial Sequence
  Description of Artificial Sequence: Synthetic oligonucleotide
caugccgguacuguccugc

SEQ ID NO: 136412 - RNA, 19 nt, Artificial Sequence
  Description of Artificial Sequence: Synthetic oligonucleotide
agggcucaugggaugaacg

SEQ ID NO: 136413 - RNA, 19 nt, Artificial Sequence
  Description of Artificial Sequence: Synthetic oligonucleotide
uaucaaacuuaugggucgu

SEQ ID NO: 136414 - RNA, 19 nt, Artificial Sequence
  Description of Artificial Sequence: Synthetic oligonucleotide
uuaugggucguuccuucuu

SEQ ID NO: 136415 - RNA, 19 nt, Artificial Sequence
  Description of Artificial Sequence: Synthetic oligonucleotide
guuaguggucgcucuuggc

SEQ ID NO: 136416 - RNA, 19 nt, Artificial Sequence
  Description of Artificial Sequence: Synthetic oligonucleotide
caggaggugacuccaaaga

SEQ ID NO: 136417 - RNA, 19 nt, Artificial Sequence
  Description of Artificial Sequence: Synthetic oligonucleotide
auuccuuggcaauguuuga

SEQ ID NO: 136418 - RNA, 19 nt, Artificial Sequence
  Description of Artificial Sequence: Synthetic oligonucleotide
gcuguaauuggaagcuucg

SEQ ID NO: 136419 - RNA, 19 nt, Artificial Sequence
  Description of Artificial Sequence: Synthetic oligonucleotide
gaccuauauguucguugug

SEQ ID NO: 136420 - RNA, 19 nt, Artificial Sequence
  Description of Artificial Sequence: Synthetic oligonucleotide
uccuagggcgaguacuuuc

SEQ ID NO: 136421 - RNA, 19 nt, Artificial Sequence
  Description of Artificial Sequence: Synthetic oligonucleotide
cguaacaucuuccaguguc

SEQ ID NO: 136422 - RNA, 19 nt, Artificial Sequence
  Description of Artificial Sequence: Synthetic oligonucleotide
ucggugguugggaauguua

SEQ ID NO: 136423 - RNA, 19 nt, Artificial Sequence
  Description of Artificial Sequence: Synthetic oligonucleotide
ggcuaucugaaaacuaggc

SEQ ID NO: 136424 - RNA, 19 nt, Artificial Sequence
  Description of Artificial Sequence: Synthetic oligonucleotide
caggucgucccucugcaac

SEQ ID NO: 136425 - RNA, 19 nt, Artificial Sequence
  Description of Artificial Sequence: Synthetic oligonucleotide
uggccguccuucugaaacc

SEQ ID NO: 136426 - RNA, 19 nt, Artificial Sequence
  Description of Artificial Sequence: Synthetic oligonucleotide
uaacaaccggagcuuccgu

SEQ ID NO: 136427 - RNA, 19 nt, Artificial Sequence
  Description of Artificial Sequence: Synthetic oligonucleotide
gugucgucccucauggacc

SEQ ID NO: 136428 - RNA, 19 nt, Artificial Sequence
  Description of Artificial Sequence: Synthetic oligonucleotide
ugaggauuccggcgugggu

SEQ ID NO: 136429 - RNA, 19 nt, Artificial Sequence
  Description of Artificial Sequence: Synthetic oligonucleotide
cuaagcaguccguuuugca

SEQ ID NO: 136430 - RNA, 19 nt, Artificial Sequence
  Description of Artificial Sequence: Synthetic oligonucleotide
uucucugaaugacgcgauc

SEQ ID NO: 136431 - RNA, 19 nt, Artificial Sequence
  Description of Artificial Sequence: Synthetic oligonucleotide
auuugcucuuccacgguca

SEQ ID NO: 136432 - RNA, 19 nt, Artificial Sequence
  Description of Artificial Sequence: Synthetic oligonucleotide
aacuuaugggucguuccuu

SEQ ID NO: 136433 - RNA, 19 nt, Artificial Sequence
  Description of Artificial Sequence: Synthetic oligonucleotide
agucuauaaucuggaccuc

SEQ ID NO: 136434 - RNA, 19 nt, Artificial Sequence
  Description of Artificial Sequence: Synthetic oligonucleotide
ggugaugcggaggacucgg

SEQ ID NO: 136435 - RNA, 19 nt, Artificial Sequence
  Description of Artificial Sequence: Synthetic oligonucleotide
agcaguccguuuugcaggu

SEQ ID NO: 136436 - RNA, 19 nt, Artificial Sequence
  Description of Artificial Sequence: Synthetic oligonucleotide
uagguccgcauguuugggu

SEQ ID NO: 136437 - RNA, 19 nt, Artificial Sequence
  Description of Artificial Sequence: Synthetic oligonucleotide
cuucguuuaucaaacuuau

SEQ ID NO: 136438 - RNA, 19 nt, Artificial Sequence
  Description of Artificial Sequence: Synthetic oligonucleotide
caugaaaugcgauccuucu

SEQ ID NO: 136439 - RNA, 19 nt, Artificial Sequence
  Description of Artificial Sequence: Synthetic oligonucleotide
uaccgugauaucuccucuc

SEQ ID NO: 136440 - RNA, 19 nt, Artificial Sequence
  Description of Artificial Sequence: Synthetic oligonucleotide
cugccgauucacucuguac

SEQ ID NO: 136441 - RNA, 19 nt, Artificial Sequence
  Description of Artificial Sequence: Synthetic oligonucleotide
aggucgucccucugcaaca

SEQ ID NO: 136442 - RNA, 19 nt, Artificial Sequence
  Description of Artificial Sequence: Synthetic oligonucleotide
aggauuccggcguggguga

SEQ ID NO: 136443 - RNA, 19 nt, Artificial Sequence
  Description of Artificial Sequence: Synthetic oligonucleotide
acgggugcauuuggauucc

SEQ ID NO: 136444 - RNA, 19 nt, Artificial Sequence
  Description of Artificial Sequence: Synthetic oligonucleotide
gggaaccuuuaacaaccgg

SEQ ID NO: 136445 - RNA, 19 nt, Artificial Sequence
  Description of Artificial Sequence: Synthetic oligonucleotide
accacgggugcauuuggau

SEQ ID NO: 136446 - RNA, 19 nt, Artificial Sequence
  Description of Artificial Sequence: Synthetic oligonucleotide
uaauugaauuggaccucuu

SEQ ID NO: 136447 - RNA, 19 nt, Artificial Sequence
  Description of Artificial Sequence: Synthetic oligonucleotide
uagagcacauucggaggug

SEQ ID NO: 136448 - RNA, 19 nt, Artificial Sequence
  Description of Artificial Sequence: Synthetic oligonucleotide
cagucugaucauucacaac

SEQ ID NO: 136449 - RNA, 19 nt, Artificial Sequence
  Description of Artificial Sequence: Synthetic oligonucleotide
aguacaucgucuggucaga

SEQ ID NO: 136450 - RNA, 19 nt, Artificial Sequence
  Description of Artificial Sequence: Synthetic oligonucleotide
ucaugggaugaacgguaua

SEQ ID NO: 136451 - RNA, 19 nt, Artificial Sequence
  Description of Artificial Sequence: Synthetic oligonucleotide
ggucuaccgugauaucucc

SEQ ID NO: 136452 - RNA, 19 nt, Artificial Sequence
  Description of Artificial Sequence: Synthetic oligonucleotide
cucccgacaggugcuaagc

SEQ ID NO: 136453 - RNA, 19 nt, Artificial Sequence
  Description of Artificial Sequence: Synthetic oligonucleotide
gaaugccggguaagcagcc

SEQ ID NO: 136454 - RNA, 19 nt, Artificial Sequence
  Description of Artificial Sequence: Synthetic oligonucleotide
gugcccggugacuacggcc

SEQ ID NO: 136455 - RNA, 19 nt, Artificial Sequence
  Description of Artificial Sequence: Synthetic oligonucleotide
cuuccacggucauccuagg

SEQ ID NO: 136456 - RNA, 19 nt, Artificial Sequence
  Description of Artificial Sequence: Synthetic oligonucleotide
ggucuagucuugcuguuuc

SEQ ID NO: 136457 - RNA, 19 nt, Artificial Sequence
  Description of Artificial Sequence: Synthetic oligonucleotide
aaugccggguaagcagcca

SEQ ID NO: 136458 - RNA, 19 nt, Artificial Sequence
  Description of Artificial Sequence: Synthetic oligonucleotide
cugagacuacacacacaug

SEQ ID NO: 136459 - RNA, 19 nt, Artificial Sequence
  Description of Artificial Sequence: Synthetic oligonucleotide
gugcccgcugaauuccugc

SEQ ID NO: 136460 - RNA, 19 nt, Artificial Sequence
  Description of Artificial Sequence: Synthetic oligonucleotide
cucgccugaccacgggugc

SEQ ID NO: 136461 - RNA, 19 nt, Artificial Sequence
  Description of Artificial Sequence: Synthetic oligonucleotide
ccgaccuauauguucguug

SEQ ID NO: 136462 - RNA, 19 nt, Artificial Sequence
  Description of Artificial Sequence: Synthetic oligonucleotide
ugccggguaagcagccacu

SEQ ID NO: 136463 - RNA, 19 nt, Artificial Sequence
  Description of Artificial Sequence: Synthetic oligonucleotide
augaacgguauagucugaa

SEQ ID NO: 136464 - RNA, 19 nt, Artificial Sequence
  Description of Artificial Sequence: Synthetic oligonucleotide
cuccguucuuagcuccacc

SEQ ID NO: 136465 - RNA, 19 nt, Artificial Sequence
  Description of Artificial Sequence: Synthetic oligonucleotide
cuaucucuuggcuggccga

SEQ ID NO: 136466 - RNA, 19 nt, Artificial Sequence
  Description of Artificial Sequence: Synthetic oligonucleotide
cugaccacgggugcauuug

SEQ ID NO: 136467 - RNA, 19 nt, Artificial Sequence
  Description of Artificial Sequence: Synthetic oligonucleotide
cugacccaugggaagguga

SEQ ID NO: 136468 - RNA, 19 nt, Artificial Sequence
  Description of Artificial Sequence: Synthetic oligonucleotide
gucucuccguucuuagcuc

SEQ ID NO: 136469 - RNA, 19 nt, Artificial Sequence
  Description of Artificial Sequence: Synthetic oligonucleotide
gguagcgggccacaaccug

SEQ ID NO: 136470 - RNA, 19 nt, Artificial Sequence
  Description of Artificial Sequence: Synthetic oligonucleotide
gcuucguuuaucaaacuua

SEQ ID NO: 136471 - RNA, 19 nt, Artificial Sequence
  Description of Artificial Sequence: Synthetic oligonucleotide
gcagaaguaauagguccgc

SEQ ID NO: 136472 - RNA, 19 nt, Artificial Sequence
  Description of Artificial Sequence: Synthetic oligonucleotide
ugccgaggaagggugcucu

SEQ ID NO: 136473 - RNA, 19 nt, Artificial Sequence
  Description of Artificial Sequence: Synthetic oligonucleotide
ggucucuccguucuuagcu

SEQ ID NO: 136474 - RNA, 19 nt, Artificial Sequence
  Description of Artificial Sequence: Synthetic oligonucleotide
uccaucccgggaauuucuu

SEQ ID NO: 136475 - RNA, 19 nt, Artificial Sequence
  Description of Artificial Sequence: Synthetic oligonucleotide
ggugagcauggcuaucuga

SEQ ID NO: 136476 - RNA, 19 nt, Artificial Sequence
  Description of Artificial Sequence: Synthetic oligonucleotide
cugucaggucuagucuugc

SEQ ID NO: 136477 - RNA, 19 nt, Artificial Sequence
  Description of Artificial Sequence: Synthetic oligonucleotide
guacaucgucuggucagag

SEQ ID NO: 136478 - RNA, 19 nt, Artificial Sequence
  Description of Artificial Sequence: Synthetic oligonucleotide
acguaacaucuuccagugu

SEQ ID NO: 136479 - RNA, 19 nt, Artificial Sequence
  Description of Artificial Sequence: Synthetic oligonucleotide
gccaagcugacguucccug

SEQ ID NO: 136480 - RNA, 19 nt, Artificial Sequence
  Description of Artificial Sequence: Synthetic oligonucleotide
ugccaagcugacguucccu

SEQ ID NO: 136481 - RNA, 19 nt, Artificial Sequence
  Description of Artificial Sequence: Synthetic oligonucleotide
gucauauucucgccaggcu

SEQ ID NO: 136482 - RNA, 19 nt, Artificial Sequence
  Description of Artificial Sequence: Synthetic oligonucleotide
gaugaacgguauagucuga

SEQ ID NO: 136483 - RNA, 19 nt, Artificial Sequence
  Description of Artificial Sequence: Synthetic oligonucleotide
uuccgaccuauauguucgu

SEQ ID NO: 136484 - RNA, 19 nt, Artificial Sequence
  Description of Artificial Sequence: Synthetic oligonucleotide
gguaaccuucaggguagcg

SEQ ID NO: 136485 - RNA, 19 nt, Artificial Sequence
  Description of Artificial Sequence: Synthetic oligonucleotide
gagugugccguucugccuu

SEQ ID NO: 136486 - RNA, 19 nt, Artificial Sequence
  Description of Artificial Sequence: Synthetic oligonucleotide
ggcaugcuuagggugauga

SEQ ID NO: 136487 - RNA, 19 nt, Artificial Sequence
  Description of Artificial Sequence: Synthetic oligonucleotide
guaauagguccgcauguuu

SEQ ID NO: 136488 - RNA, 19 nt, Artificial Sequence
  Description of Artificial Sequence: Synthetic oligonucleotide
auguucguuguggggagaa

SEQ ID NO: 136489 - RNA, 19 nt, Artificial Sequence
  Description of Artificial Sequence: Synthetic oligonucleotide
gucauccuagggcgaguac

SEQ ID NO: 136490 - RNA, 19 nt, Artificial Sequence
  Description of Artificial Sequence: Synthetic oligonucleotide
cugcucaagcguguauuuc

SEQ ID NO: 136491 - RNA, 19 nt, Artificial Sequence
  Description of Artificial Sequence: Synthetic oligonucleotide
aacagccgguaaagcuaag

SEQ ID NO: 136492 - RNA, 19 nt, Artificial Sequence
  Description of Artificial Sequence: Synthetic oligonucleotide
auauucucgccaggcucgu

SEQ ID NO: 136493 - RNA, 19 nt, Artificial Sequence
  Description of Artificial Sequence: Synthetic oligonucleotide
ugaccgggugcagccaggu

SEQ ID NO: 136494 - RNA, 19 nt, Artificial Sequence
  Description of Artificial Sequence: Synthetic oligonucleotide
gcccgcugaauuccugccg

SEQ ID NO: 136495 - RNA, 19 nt, Artificial Sequence
  Description of Artificial Sequence: Synthetic oligonucleotide
uguucguuguggggagaau

SEQ ID NO: 136496 - RNA, 19 nt, Artificial Sequence
  Description of Artificial Sequence: Synthetic oligonucleotide
agcugacguucccuguuuu

SEQ ID NO: 136497 - RNA, 19 nt, Artificial Sequence
  Description of Artificial Sequence: Synthetic oligonucleotide
cagaaguaauagguccgca

SEQ ID NO: 136498 - RNA, 19 nt, Artificial Sequence
  Description of Artificial Sequence: Synthetic oligonucleotide
auauaguaucuugcaccuu

SEQ ID NO: 136499 - RNA, 19 nt, Artificial Sequence
  Description of Artificial Sequence: Synthetic oligonucleotide
gucuguauuuguagagugu

SEQ ID NO: 136500 - RNA, 19 nt, Artificial Sequence
  Description of Artificial Sequence: Synthetic oligonucleotide
aguccguuuugcaggucgu

SEQ ID NO: 136501 - RNA, 19 nt, Artificial Sequence
  Description of Artificial Sequence: Synthetic oligonucleotide
ucugccgccggugcccggu

SEQ ID NO: 136502 - RNA, 19 nt, Artificial Sequence
  Description of Artificial Sequence: Synthetic oligonucleotide
cugaggacuaacagccggu

SEQ ID NO: 136503 - RNA, 19 nt, Artificial Sequence
  Description of Artificial Sequence: Synthetic oligonucleotide
uggugucgucccucaugga

SEQ ID NO: 136504 - RNA, 19 nt, Artificial Sequence
  Description of Artificial Sequence: Synthetic oligonucleotide
caauuauccugggauggcu

SEQ ID NO: 136505 - RNA, 19 nt, Artificial Sequence
  Description of Artificial Sequence: Synthetic oligonucleotide
gaaucugugcccgcugaau

SEQ ID NO: 136506 - RNA, 19 nt, Artificial Sequence
  Description of Artificial Sequence: Synthetic oligonucleotide
gggugaggacacuuccgac

SEQ ID NO: 136507 - RNA, 19 nt, Artificial Sequence
  Description of Artificial Sequence: Synthetic oligonucleotide
cuuaugggucguuccuucu

SEQ ID NO: 136508 - RNA, 19 nt, Artificial Sequence
  Description of Artificial Sequence: Synthetic oligonucleotide
gagacggggacagacuuuu

SEQ ID NO: 136509 - RNA, 19 nt, Artificial Sequence
  Description of Artificial Sequence: Synthetic oligonucleotide
uccugccgauucacucugu

SEQ ID NO: 136510 - RNA, 19 nt, Artificial Sequence
  Description of Artificial Sequence: Synthetic oligonucleotide
caucccgggaauuucuuuu

SEQ ID NO: 136511 - RNA, 19 nt, Artificial Sequence
  Description of Artificial Sequence: Synthetic oligonucleotide
ugacuacggccucgccggu

SEQ ID NO: 136512 - RNA, 19 nt, Artificial Sequence
  Description of Artificial Sequence: Synthetic oligonucleotide
ccgguaaagcuaagccagc

SEQ ID NO: 136513 - RNA, 19 nt, Artificial Sequence
  Description of Artificial Sequence: Synthetic oligonucleotide
ucgccugaccacgggugca

SEQ ID NO: 136514 - RNA, 19 nt, Artificial Sequence
  Description of Artificial Sequence: Synthetic oligonucleotide
cuaccgugauaucuccucu

SEQ ID NO: 136515 - RNA, 19 nt, Artificial Sequence
  Description of Artificial Sequence: Synthetic oligonucleotide
gcucccgacaggugcuaag

SEQ ID NO: 136516 - RNA, 19 nt, Artificial Sequence
  Description of Artificial Sequence: Synthetic oligonucleotide
ugacgcgaucggccucugu

SEQ ID NO: 136517 - RNA, 19 nt, Artificial Sequence
  Description of Artificial Sequence: Synthetic oligonucleotide
gaccacgggugcauuugga

SEQ ID NO: 136518 - RNA, 19 nt, Artificial Sequence
  Description of Artificial Sequence: Synthetic oligonucleotide
aucaaacuuaugggucguu

SEQ ID NO: 136519 - RNA, 19 nt, Artificial Sequence
  Description of Artificial Sequence: Synthetic oligonucleotide
auugaccgccugucaggua

SEQ ID NO: 136520 - RNA, 19 nt, Artificial Sequence
  Description of Artificial Sequence: Synthetic oligonucleotide
cacucuuguagagucuaua

SEQ ID NO: 136521 - RNA, 19 nt, Artificial Sequence
  Description of Artificial Sequence: Synthetic oligonucleotide
uccgcauguuugggugggc

SEQ ID NO: 136522 - RNA, 19 nt, Artificial Sequence
  Description of Artificial Sequence: Synthetic oligonucleotide
agaagccgguucugacuuu

SEQ ID NO: 136523 - RNA, 19 nt, Artificial Sequence
  Description of Artificial Sequence: Synthetic oligonucleotide
uccgucucagaagccgguu

SEQ ID NO: 136524 - RNA, 19 nt, Artificial Sequence
  Description of Artificial Sequence: Synthetic oligonucleotide
cuauaaucuggaccuccau

SEQ ID NO: 136525 - RNA, 19 nt, Artificial Sequence
  Description of Artificial Sequence: Synthetic oligonucleotide
cugcggucuaccgugauau

SEQ ID NO: 136526 - RNA, 19 nt, Artificial Sequence
  Description of Artificial Sequence: Synthetic oligonucleotide
cauccuagggcgaguacuu

SEQ ID NO: 136527 - RNA, 19 nt, Artificial Sequence
  Description of Artificial Sequence: Synthetic oligonucleotide
ggcgugggugaccucguuc

SEQ ID NO: 136528 - RNA, 19 nt, Artificial Sequence
  Description of Artificial Sequence: Synthetic oligonucleotide
ggugauccucugccugaug

SEQ ID NO: 136529 - RNA, 19 nt, Artificial Sequence
  Description of Artificial Sequence: Synthetic oligonucleotide
cggucuaccgugauaucuc

SEQ ID NO: 136530 - RNA, 19 nt, Artificial Sequence
  Description of Artificial Sequence: Synthetic oligonucleotide
cuguaauuggaagcuucgu

SEQ ID NO: 136531 - RNA, 19 nt, Artificial Sequence
  Description of Artificial Sequence: Synthetic oligonucleotide
cucaugggaugaacgguau

SEQ ID NO: 136532 - RNA, 19 nt, Artificial Sequence
  Description of Artificial Sequence: Synthetic oligonucleotide
gcgugggugaccucguucu

SEQ ID NO: 136533 - RNA, 19 nt, Artificial Sequence
  Description of Artificial Sequence: Synthetic oligonucleotide
ggacacuuccgaccuauau

SEQ ID NO: 136534 - RNA, 19 nt, Artificial Sequence
  Description of Artificial Sequence: Synthetic oligonucleotide
cccgugauguucugcccac

SEQ ID NO: 136535 - RNA, 19 nt, Artificial Sequence
  Description of Artificial Sequence: Synthetic oligonucleotide
cguucucugaaugacgcga

SEQ ID NO: 136536 - RNA, 19 nt, Artificial Sequence
  Description of Artificial Sequence: Synthetic oligonucleotide
ggugcccggugacuacggc

SEQ ID NO: 136537 - RNA, 19 nt, Artificial Sequence
  Description of Artificial Sequence: Synthetic oligonucleotide
cauugaccgccugucaggu

SEQ ID NO: 136538 - RNA, 19 nt, Artificial Sequence
  Description of Artificial Sequence: Synthetic oligonucleotide
gggcgaguacuuucagcca

SEQ ID NO: 136539 - RNA, 19 nt, Artificial Sequence
  Description of Artificial Sequence: Synthetic oligonucleotide
caagcguguauuucuccuu

SEQ ID NO: 136540 - RNA, 19 nt, Artificial Sequence
  Description of Artificial Sequence: Synthetic oligonucleotide
ggccccguccuuucuggac

SEQ ID NO: 136541 - RNA, 19 nt, Artificial Sequence
  Description of Artificial Sequence: Synthetic oligonucleotide
ccgugauaucuccucucug

SEQ ID NO: 136542 - RNA, 19 nt, Artificial Sequence
  Description of Artificial Sequence: Synthetic oligonucleotide
guucucugaaugacgcgau

SEQ ID NO: 136543 - RNA, 19 nt, Artificial Sequence
  Description of Artificial Sequence: Synthetic oligonucleotide
gccggguaagcagccacug

SEQ ID NO: 136544 - RNA, 19 nt, Artificial Sequence
  Description of Artificial Sequence: Synthetic oligonucleotide
cgcauguuugggugggcug

SEQ ID NO: 136545 - RNA, 19 nt, Artificial Sequence
  Description of Artificial Sequence: Synthetic oligonucleotide
auccuagggcgaguacuuu

SEQ ID NO: 136546 - RNA, 19 nt, Artificial Sequence
  Description of Artificial Sequence: Synthetic oligonucleotide
gcggucuaccgugauaucu

SEQ ID NO: 136547 - RNA, 19 nt, Artificial Sequence
  Description of Artificial Sequence: Synthetic oligonucleotide
ggucgucccucugcaacac

SEQ ID NO: 136548 - RNA, 19 nt, Artificial Sequence
  Description of Artificial Sequence: Synthetic oligonucleotide
gugugccguucugccuugg

SEQ ID NO: 136549 - RNA, 19 nt, Artificial Sequence
  Description of Artificial Sequence: Synthetic oligonucleotide
ccgauucacucuguacuuc

SEQ ID NO: 136550 - RNA, 19 nt, Artificial Sequence
  Description of Artificial Sequence: Synthetic oligonucleotide
cgaccuauauguucguugu

SEQ ID NO: 136551 - RNA, 19 nt, Artificial Sequence
  Description of Artificial Sequence: Synthetic oligonucleotide
ggcucaugggaugaacggu

SEQ ID NO: 136552 - RNA, 19 nt, Artificial Sequence
  Description of Artificial Sequence: Synthetic oligonucleotide
gccgaggaagggugcucug

SEQ ID NO: 136553 - RNA, 19 nt, Artificial Sequence
  Description of Artificial Sequence: Synthetic oligonucleotide
ccgucugaacuauucacau

SEQ ID NO: 136554 - RNA, 19 nt, Artificial Sequence
  Description of Artificial Sequence: Synthetic oligonucleotide
gucuaccgugauaucuccu

SEQ ID NO: 136555 - RNA, 19 nt, Artificial Sequence
  Description of Artificial Sequence: Synthetic oligonucleotide
augacgcgaucggccucug

SEQ ID NO: 136556 - RNA, 19 nt, Artificial Sequence
  Description of Artificial Sequence: Synthetic oligonucleotide
gcggaggacucgggagacg

SEQ ID NO: 136557 - RNA, 19 nt, Artificial Sequence
  Description of Artificial Sequence: Synthetic oligonucleotide
cuguuggugucuccuuauu

SEQ ID NO: 136558 - RNA, 19 nt, Artificial Sequence
  Description of Artificial Sequence: Synthetic oligonucleotide
cggugccugcggucuaccg

SEQ ID NO: 136559 - RNA, 19 nt, Artificial Sequence
  Description of Artificial Sequence: Synthetic oligonucleotide
gccgccggugcccggugac

SEQ ID NO: 136560 - RNA, 19 nt, Artificial Sequence
  Description of Artificial Sequence: Synthetic oligonucleotide
cacuuccgaccuauauguu

SEQ ID NO: 136561 - RNA, 19 nt, Artificial Sequence
  Description of Artificial Sequence: Synthetic oligonucleotide
ccucuguggcgaggggccc

SEQ ID NO: 136562 - RNA, 19 nt, Artificial Sequence
  Description of Artificial Sequence: Synthetic oligonucleotide
ccugccgauucacucugua

SEQ ID NO: 136563 - RNA, 19 nt, Artificial Sequence
  Description of Artificial Sequence: Synthetic oligonucleotide
cggugguugggaauguuau

SEQ ID NO: 136564 - RNA, 19 nt, Artificial Sequence
  Description of Artificial Sequence: Synthetic oligonucleotide
ccugcggucuaccgugaua

SEQ ID NO: 136565 - RNA, 19 nt, Artificial Sequence
  Description of Artificial Sequence: Synthetic oligonucleotide
gucgcucuuggccguccuu

SEQ ID NO: 136566 - RNA, 19 nt, Artificial Sequence
  Description of Artificial Sequence: Synthetic oligonucleotide
gccucgccugaccacgggu

SEQ ID NO: 136567 - RNA, 19 nt, Artificial Sequence
  Description of Artificial Sequence: Synthetic oligonucleotide
gcgguggcucgggagagcu

SEQ ID NO: 136568 - RNA, 19 nt, Artificial Sequence
  Description of Artificial Sequence: Synthetic oligonucleotide
cccggugccugcggucuac

SEQ ID NO: 136569 - RNA, 19 nt, Artificial Sequence
  Description of Artificial Sequence: Synthetic oligonucleotide
ccggugccugcggucuacc

SEQ ID NO: 136570 - RNA, 19 nt, Artificial Sequence
  Description of Artificial Sequence: Synthetic oligonucleotide
ccgugauguucugcccaca

SEQ ID NO: 136571 - RNA, 19 nt, Artificial Sequence
  Description of Artificial Sequence: Synthetic oligonucleotide
ccgcauguuugggugggcu

SEQ ID NO: 136572 - RNA, 19 nt, Artificial Sequence
  Description of Artificial Sequence: Synthetic oligonucleotide
ccgguacuguccugcuuau

SEQ ID NO: 136573 - RNA, 19 nt, Artificial Sequence
  Description of Artificial Sequence: Synthetic oligonucleotide
ccgcugaauuccugccgau

SEQ ID NO: 136574 - RNA, 19 nt, Artificial Sequence
  Description of Artificial Sequence: Synthetic oligonucleotide
ccggcgugggugaccucgu

SEQ ID NO: 136575 - RNA, 19 nt, Artificial Sequence
  Description of Artificial Sequence: Synthetic oligonucleotide
ccccguccuuucuggacuu

SEQ ID NO: 136576 - RNA, 19 nt, Artificial Sequence
  Description of Artificial Sequence: Synthetic oligonucleotide
ccguucugccuuggaggcu

SEQ ID NO: 136577 - RNA, 19 nt, Artificial Sequence
  Description of Artificial Sequence: Synthetic oligonucleotide
ccgccggugcccggugacu

SEQ ID NO: 136578 - RNA, 19 nt, Artificial Sequence
  Description of Artificial Sequence: Synthetic oligonucleotide
aacuugaucgauuaaaggg

SEQ ID NO: 136579 - RNA, 19 nt, Artificial Sequence
  Description of Artificial Sequence: Synthetic oligonucleotide
uguaguaccaguuuuaucu

SEQ ID NO: 136580 - RNA, 19 nt, Artificial Sequence
  Description of Artificial Sequence: Synthetic oligonucleotide
uacuuaaucaauaagugca

SEQ ID NO: 136581 - RNA, 19 nt, Artificial Sequence
  Description of Artificial Sequence: Synthetic oligonucleotide
uuuauuuacacucuugacu

SEQ ID NO: 136582 - RNA, 19 nt, Artificial Sequence
  Description of Artificial Sequence: Synthetic oligonucleotide
aauaauacuuuagacagag

SEQ ID NO: 136583 - RNA, 19 nt, Artificial Sequence
  Description of Artificial Sequence: Synthetic oligonucleotide
aaucuauuaguaaagauga

SEQ ID NO: 136584 - RNA, 19 nt, Artificial Sequence
  Description of Artificial Sequence: Synthetic oligonucleotide
ugguuuacaauaaacuuag

SEQ ID NO: 136585 - RNA, 19 nt, Artificial Sequence
  Description of Artificial Sequence: Synthetic oligonucleotide
auaaacuuaggaauugucc

SEQ ID NO: 136586 - RNA, 19 nt, Artificial Sequence
  Description of Artificial Sequence: Synthetic oligonucleotide
uuaggaauuguccauagaa

SEQ ID NO: 136587 - RNA, 19 nt, Artificial Sequence
  Description of Artificial Sequence: Synthetic oligonucleotide
aaacgcaaugcuuucuugg

SEQ ID NO: 136588 - RNA, 19 nt, Artificial Sequence
  Description of Artificial Sequence: Synthetic oligonucleotide
gucaucaagauauuggugc

SEQ ID NO: 136589 - RNA, 19 nt, Artificial Sequence
  Description of Artificial Sequence: Synthetic oligonucleotide
aaaccugauacuuuuauuu

SEQ ID NO: 136590 - RNA, 19 nt, Artificial Sequence
  Description of Artificial Sequence: Synthetic oligonucleotide
auuagaguggcaucaagag

SEQ ID NO: 136591 - RNA, 19 nt, Artificial Sequence
  Description of Artificial Sequence: Synthetic oligonucleotide
uugucaaugacucuuugga

SEQ ID NO: 136592 - RNA, 19 nt, Artificial Sequence
  Description of Artificial Sequence: Synthetic oligonucleotide
ugaucuuguucuaacaaca

SEQ ID NO: 136593 - RNA, 19 nt, Artificial Sequence
  Description of Artificial Sequence: Synthetic oligonucleotide
gacaaggagguucaaagcc

SEQ ID NO: 136594 - RNA, 19 nt, Artificial Sequence
  Description of Artificial Sequence: Synthetic oligonucleotide
gaaugaaugaugauacuag

SEQ ID NO: 136595 - RNA, 19 nt, Artificial Sequence
  Description of Artificial Sequence: Synthetic oligonucleotide
ucauuagaccucuugaugu

SEQ ID NO: 136596 - RNA, 19 nt, Artificial Sequence
  Description of Artificial Sequence: Synthetic oligonucleotide
aacgcaaugcuuucuuggg

SEQ ID NO: 136597 - RNA, 19 nt, Artificial Sequence
  Description of Artificial Sequence: Synthetic oligonucleotide
uggauuaugguguacuggc

SEQ ID NO: 136598 - RNA, 19 nt, Artificial Sequence
  Description of Artificial Sequence: Synthetic oligonucleotide
auacuaguccucuaguuag

SEQ ID NO: 136599 - RNA, 19 nt, Artificial Sequence
  Description of Artificial Sequence: Synthetic oligonucleotide
uggacuucaaaccuagugu

SEQ ID NO: 136600 - RNA, 19 nt, Artificial Sequence
  Description of Artificial Sequence: Synthetic oligonucleotide
agagaaggggcauaauuuc

SEQ ID NO: 136601 - RNA, 19 nt, Artificial Sequence
  Description of Artificial Sequence: Synthetic oligonucleotide
acaacaacggccucuugac

SEQ ID NO: 136602 - RNA, 19 nt, Artificial Sequence
  Description of Artificial Sequence: Synthetic oligonucleotide
ucuaguuccguccaauagu

SEQ ID NO: 136603 - RNA, 19 nt, Artificial Sequence
  Description of Artificial Sequence: Synthetic oligonucleotide
auagucuuccaucaaacgu

SEQ ID NO: 136604 - RNA, 19 nt, Artificial Sequence
  Description of Artificial Sequence: Synthetic oligonucleotide
cuaggugucaugaagcaac

SEQ ID NO: 136605 - RNA, 19 nt, Artificial Sequence
  Description of Artificial Sequence: Synthetic oligonucleotide
guuggaagauucuggaccg

SEQ ID NO: 136606 - RNA, 19 nt, Artificial Sequence
  Description of Artificial Sequence: Synthetic oligonucleotide
aauuacgccccuuuccucu

SEQ ID NO: 136607 - RNA, 19 nt, Artificial Sequence
  Description of Artificial Sequence: Synthetic oligonucleotide
aauuuuaaggcguggcaau

SEQ ID NO: 136608 - RNA, 19 nt, Artificial Sequence
  Description of Artificial Sequence: Synthetic oligonucleotide
ucacuaggugucaugaagc

SEQ ID NO: 136609 - RNA, 19 nt, Artificial Sequence
  Description of Artificial Sequence: Synthetic oligonucleotide
uuaucaacagccccacuug

SEQ ID NO: 136610 - RNA, 19 nt, Artificial Sequence
  Description of Artificial Sequence: Synthetic oligonucleotide
ucaguuagcuguauugcca

SEQ ID NO: 136611 - RNA, 19 nt, Artificial Sequence
  Description of Artificial Sequence: Synthetic oligonucleotide
ucauuaacggcacuuuccu

SEQ ID NO: 136612 - RNA, 19 nt, Artificial Sequence
  Description of Artificial Sequence: Synthetic oligonucleotide
agcaaauaugucucugacg

SEQ ID NO: 136613 - RNA, 19 nt, Artificial Sequence
  Description of Artificial Sequence: Synthetic oligonucleotide
ugaucgauuaaagggaggc

SEQ ID NO: 136614 - RNA, 19 nt, Artificial Sequence
  Description of Artificial Sequence: Synthetic oligonucleotide
ugggaauaauacuuuagac

SEQ ID NO: 136615 - RNA, 19 nt, Artificial Sequence
  Description of Artificial Sequence: Synthetic oligonucleotide
gauuggacaagccagccuc

SEQ ID NO: 136616 - RNA, 19 nt, Artificial Sequence
  Description of Artificial Sequence: Synthetic oligonucleotide
aauuagaguggcaucaaga

SEQ ID NO: 136617 - RNA, 19 nt, Artificial Sequence
  Description of Artificial Sequence: Synthetic oligonucleotide
cucauuaacggcacuuucc

SEQ ID NO: 136618 - RNA, 19 nt, Artificial Sequence
  Description of Artificial Sequence: Synthetic oligonucleotide
ucgaaucacucccugagga

SEQ ID NO: 136619 - RNA, 19 nt, Artificial Sequence
  Description of Artificial Sequence: Synthetic oligonucleotide
aagaucaaggguauucgag

SEQ ID NO: 136620 - RNA, 19 nt, Artificial Sequence
  Description of Artificial Sequence: Synthetic oligonucleotide
aaaacgcaaugcuuucuug

SEQ ID NO: 136621 - RNA, 19 nt, Artificial Sequence
  Description of Artificial Sequence: Synthetic oligonucleotide
uuaaggcguggcaauauca

SEQ ID NO: 136622 - RNA, 19 nt, Artificial Sequence
  Description of Artificial Sequence: Synthetic oligonucleotide
cuugaucgauuaaagggag

SEQ ID NO: 136623 - RNA, 19 nt, Artificial Sequence
  Description of Artificial Sequence: Synthetic oligonucleotide
ucaucaagauauuggugcc

SEQ ID NO: 136624 - RNA, 19 nt, Artificial Sequence
  Description of Artificial Sequence: Synthetic oligonucleotide
acucgaaucacucccugag

SEQ ID NO: 136625 - RNA, 19 nt, Artificial Sequence
  Description of Artificial Sequence: Synthetic oligonucleotide
ucaaaccuaguguauggca

SEQ ID NO: 136626 - RNA, 19 nt, Artificial Sequence
  Description of Artificial Sequence: Synthetic oligonucleotide
uaaucaauaagugcaugac

SEQ ID NO: 136627 - RNA, 19 nt, Artificial Sequence
  Description of Artificial Sequence: Synthetic oligonucleotide
ucaaggguauucgaguucc

SEQ ID NO: 136628 - RNA, 19 nt, Artificial Sequence
  Description of Artificial Sequence: Synthetic oligonucleotide
uuggauuaugguguacugg

SEQ ID NO: 136629 - RNA, 19 nt, Artificial Sequence
  Description of Artificial Sequence: Synthetic oligonucleotide
aacaacggccucuugacuu

SEQ ID NO: 136630 - RNA, 19 nt, Artificial Sequence
  Description of Artificial Sequence: Synthetic oligonucleotide
agaucaaggguauucgagu

SEQ ID NO: 136631 - RNA, 19 nt, Artificial Sequence
  Description of Artificial Sequence: Synthetic oligonucleotide
uauccauaccaccuuguac

SEQ ID NO: 136632 - RNA, 19 nt, Artificial Sequence
  Description of Artificial Sequence: Synthetic oligonucleotide
aaaccuaguguauggcaca

SEQ ID NO: 136633 - RNA, 19 nt, Artificial Sequence
  Description of Artificial Sequence: Synthetic oligonucleotide
uuuggcagucugaaacuag

SEQ ID NO: 136634 - RNA, 19 nt, Artificial Sequence
  Description of Artificial Sequence: Synthetic oligonucleotide
caaaccuaguguauggcac

SEQ ID NO: 136635 - RNA, 19 nt, Artificial Sequence
  Description of Artificial Sequence: Synthetic oligonucleotide
aaacuaggcaaugaggcau

SEQ ID NO: 136636 - RNA, 19 nt, Artificial Sequence
  Description of Artificial Sequence: Synthetic oligonucleotide
guuagcuguauugccaugg

SEQ ID NO: 136637 - RNA, 19 nt, Artificial Sequence
  Description of Artificial Sequence: Synthetic oligonucleotide
uuccccuaaagaacuauga

SEQ ID NO: 136638 - RNA, 19 nt, Artificial Sequence
  Description of Artificial Sequence: Synthetic oligonucleotide
uugaucgauuaaagggagg

SEQ ID NO: 136639 - RNA, 19 nt, Artificial Sequence
  Description of Artificial Sequence: Synthetic oligonucleotide
aaggguauucgaguucccg

SEQ ID NO: 136640 - RNA, 19 nt, Artificial Sequence
  Description of Artificial Sequence: Synthetic oligonucleotide
aggaacgucagccucauuu

SEQ ID NO: 136641 - RNA, 19 nt, Artificial Sequence
  Description of Artificial Sequence: Synthetic oligonucleotide
ucuuccaucaaacgucauc

SEQ ID NO: 136642 - RNA, 19 nt, Artificial Sequence
  Description of Artificial Sequence: Synthetic oligonucleotide
uggucugugcaugaaaagc

SEQ ID NO: 136643 - RNA, 19 nt, Artificial Sequence
  Description of Artificial Sequence: Synthetic oligonucleotide
uuaacggcacuuuccuucc

SEQ ID NO: 136644 - RNA, 19 nt, Artificial Sequence
  Description of Artificial Sequence: Synthetic oligonucleotide
acuugaucgauuaaaggga

SEQ ID NO: 136645 - RNA, 19 nt, Artificial Sequence
  Description of Artificial Sequence: Synthetic oligonucleotide
cuugcuccgcaaaugacac

SEQ ID NO: 136646 - RNA, 19 nt, Artificial Sequence
  Description of Artificial Sequence: Synthetic oligonucleotide
gauacuaguccucuaguua

SEQ ID NO: 136647 - RNA, 19 nt, Artificial Sequence
  Description of Artificial Sequence: Synthetic oligonucleotide
ugaccauugcuacauucac

SEQ ID NO: 136648 - RNA, 19 nt, Artificial Sequence
  Description of Artificial Sequence: Synthetic oligonucleotide
cuaguuccguccaauaguc

SEQ ID NO: 136649 - RNA, 19 nt, Artificial Sequence
  Description of Artificial Sequence: Synthetic oligonucleotide
cacaagcuaauuacgcccc

SEQ ID NO: 136650 - RNA, 19 nt, Artificial Sequence
  Description of Artificial Sequence: Synthetic oligonucleotide
aucgauuaaagggaggccu

SEQ ID NO: 136651 - RNA, 19 nt, Artificial Sequence
  Description of Artificial Sequence: Synthetic oligonucleotide
acacucuacccuuauaaaa

SEQ ID NO: 136652 - RNA, 19 nt, Artificial Sequence
  Description of Artificial Sequence: Synthetic oligonucleotide
cugguacuuaaucaauaag

SEQ ID NO: 136653 - RNA, 19 nt, Artificial Sequence
  Description of Artificial Sequence: Synthetic oligonucleotide
agagauucggggccaugac

SEQ ID NO: 136654 - RNA, 19 nt, Artificial Sequence
  Description of Artificial Sequence: Synthetic oligonucleotide
auucguaggaggccuucgg

SEQ ID NO: 136655 - RNA, 19 nt, Artificial Sequence
  Description of Artificial Sequence: Synthetic oligonucleotide
uuuaaggcguggcaauauc

SEQ ID NO: 136656 - RNA, 19 nt, Artificial Sequence
  Description of Artificial Sequence: Synthetic oligonucleotide
uaucaacagccccacuuga

SEQ ID NO: 136657 - RNA, 19 nt, Artificial Sequence
  Description of Artificial Sequence: Synthetic oligonucleotide
cacguugugucacagugug

SEQ ID NO: 136658 - RNA, 19 nt, Artificial Sequence
  Description of Artificial Sequence: Synthetic oligonucleotide
ugcuccgcaaaugacaccu

SEQ ID NO: 136659 - RNA, 19 nt, Artificial Sequence
  Description of Artificial Sequence: Synthetic oligonucleotide
agcuaauuacgccccuuuc

SEQ ID NO: 136660 - RNA, 19 nt, Artificial Sequence
  Description of Artificial Sequence: Synthetic oligonucleotide
aaggcguggcaauaucacu

SEQ ID NO: 136661 - RNA, 19 nt, Artificial Sequence
  Description of Artificial Sequence: Synthetic oligonucleotide
cuuggauuaugguguacug

SEQ ID NO: 136662 - RNA, 19 nt, Artificial Sequence
  Description of Artificial Sequence: Synthetic oligonucleotide
uucugguacuuaaucaaua

SEQ ID NO: 136663 - RNA, 19 nt, Artificial Sequence
  Description of Artificial Sequence: Synthetic oligonucleotide
uuccuaauuagaguggcau

SEQ ID NO: 136664 - RNA, 19 nt, Artificial Sequence
  Description of Artificial Sequence: Synthetic oligonucleotide
ucuauccauaccaccuugu

SEQ ID NO: 136665 - RNA, 19 nt, Artificial Sequence
  Description of Artificial Sequence: Synthetic oligonucleotide
aagagauucggggccauga

SEQ ID NO: 136666 - RNA, 19 nt, Artificial Sequence
  Description of Artificial Sequence: Synthetic oligonucleotide
uuauugagagaagguagcu

SEQ ID NO: 136667 - RNA, 19 nt, Artificial Sequence
  Description of Artificial Sequence: Synthetic oligonucleotide
acgcaaugcuuucuugggg

SEQ ID NO: 136668 - RNA, 19 nt, Artificial Sequence
  Description of Artificial Sequence: Synthetic oligonucleotide
gcuaauuacgccccuuucc

SEQ ID NO: 136669 - RNA, 19 nt, Artificial Sequence
  Description of Artificial Sequence: Synthetic oligonucleotide
guagcuaggaagagguaag

SEQ ID NO: 136670 - RNA, 19 nt, Artificial Sequence
  Description of Artificial Sequence: Synthetic oligonucleotide
ugauacuaguccucuaguu

SEQ ID NO: 136671 - RNA, 19 nt, Artificial Sequence
  Description of Artificial Sequence: Synthetic oligonucleotide
caugaccauugcuacauuc

SEQ ID NO: 136672 - RNA, 19 nt, Artificial Sequence
  Description of Artificial Sequence: Synthetic oligonucleotide
uucaaaccuaguguauggc

SEQ ID NO: 136673 - RNA, 19 nt, Artificial Sequence
  Description of Artificial Sequence: Synthetic oligonucleotide
acauuuugugguaacaaaa

SEQ ID NO: 136674 - RNA, 19 nt, Artificial Sequence
  Description of Artificial Sequence: Synthetic oligonucleotide
uugugucacaguguggucu

SEQ ID NO: 136675 - RNA, 19 nt, Artificial Sequence
  Description of Artificial Sequence: Synthetic oligonucleotide
aacuaggcaaugaggcauc

SEQ ID NO: 136676 - RNA, 19 nt, Artificial Sequence
  Description of Artificial Sequence: Synthetic oligonucleotide
aguuccguccaauagucuu

SEQ ID NO: 136677 - RNA, 19 nt, Artificial Sequence
  Description of Artificial Sequence: Synthetic oligonucleotide
uucuuaagugucugggcaa

SEQ ID NO: 136678 - RNA, 19 nt, Artificial Sequence
  Description of Artificial Sequence: Synthetic oligonucleotide
augauacuaguccucuagu

SEQ ID NO: 136679 - RNA, 19 nt, Artificial Sequence
  Description of Artificial Sequence: Synthetic oligonucleotide
ucuacccguuucugaacgg

SEQ ID NO: 136680 - RNA, 19 nt, Artificial Sequence
  Description of Artificial Sequence: Synthetic oligonucleotide
uauucguaggaggccuucg

SEQ ID NO: 136681 - RNA, 19 nt, Artificial Sequence
  Description of Artificial Sequence: Synthetic oligonucleotide
ucgucaucaaggcagcguu

SEQ ID NO: 136682 - RNA, 19 nt, Artificial Sequence
  Description of Artificial Sequence: Synthetic oligonucleotide
auuaugguguacuggccau

SEQ ID NO: 136683 - RNA, 19 nt, Artificial Sequence
  Description of Artificial Sequence: Synthetic oligonucleotide
ucgauuaaagggaggccuc

SEQ ID NO: 136684 - RNA, 19 nt, Artificial Sequence
  Description of Artificial Sequence: Synthetic oligonucleotide
uaauuucugggacccugac

SEQ ID NO: 136685 - RNA, 19 nt, Artificial Sequence
  Description of Artificial Sequence: Synthetic oligonucleotide
aagcuaauuacgccccuuu

SEQ ID NO: 136686 - RNA, 19 nt, Artificial Sequence
  Description of Artificial Sequence: Synthetic oligonucleotide
aguuagguuugccuucaca

SEQ ID NO: 136687 - RNA, 19 nt, Artificial Sequence
  Description of Artificial Sequence: Synthetic oligonucleotide
uccgcaaaugacaccucca

SEQ ID NO: 136688 - RNA, 19 nt, Artificial Sequence
  Description of Artificial Sequence: Synthetic oligonucleotide
acaucgcuggcuuuuaguu

SEQ ID NO: 136689 - RNA, 19 nt, Artificial Sequence
  Description of Artificial Sequence: Synthetic oligonucleotide
ggagagaacguucuuaaaa

SEQ ID NO: 136690 - RNA, 19 nt, Artificial Sequence
  Description of Artificial Sequence: Synthetic oligonucleotide
uuguucuaacaacaugguu

SEQ ID NO: 136691 - RNA, 19 nt, Artificial Sequence
  Description of Artificial Sequence: Synthetic oligonucleotide
gguguguauaaacagccca

SEQ ID NO: 136692 - RNA, 19 nt, Artificial Sequence
  Description of Artificial Sequence: Synthetic oligonucleotide
uccccaacgaccugguccu

SEQ ID NO: 136693 - RNA, 19 nt, Artificial Sequence
  Description of Artificial Sequence: Synthetic oligonucleotide
uccuaauuagaguggcauc

SEQ ID NO: 136694 - RNA, 19 nt, Artificial Sequence
  Description of Artificial Sequence: Synthetic oligonucleotide
agggcuagaugacaaacuu

SEQ ID NO: 136695 - RNA, 19 nt, Artificial Sequence
  Description of Artificial Sequence: Synthetic oligonucleotide
agguguguauaaacagccc

SEQ ID NO: 136696 - RNA, 19 nt, Artificial Sequence
  Description of Artificial Sequence: Synthetic oligonucleotide
cucccggggaacucgagag

SEQ ID NO: 136697 - RNA, 19 nt, Artificial Sequence
  Description of Artificial Sequence: Synthetic oligonucleotide
uucguaggaggccuucggu

SEQ ID NO: 136698 - RNA, 19 nt, Artificial Sequence
  Description of Artificial Sequence: Synthetic oligonucleotide
agcuguauugccauggaaa

SEQ ID NO: 136699 - RNA, 19 nt, Artificial Sequence
  Description of Artificial Sequence: Synthetic oligonucleotide
uucgguuucuagaccgccu

SEQ ID NO: 136700 - RNA, 19 nt, Artificial Sequence
  Description of Artificial Sequence: Synthetic oligonucleotide
acaacucccggggaacucg

SEQ ID NO: 136701 - RNA, 19 nt, Artificial Sequence
  Description of Artificial Sequence: Synthetic oligonucleotide
gccuucgguuucuagaccg

SEQ ID NO: 136702 - RNA, 19 nt, Artificial Sequence
  Description of Artificial Sequence: Synthetic oligonucleotide
cugggagaccguuucuacc

SEQ ID NO: 136703 - RNA, 19 nt, Artificial Sequence
  Description of Artificial Sequence: Synthetic oligonucleotide
ggcuagaugacaaacuuuc

SEQ ID NO: 136704 - RNA, 19 nt, Artificial Sequence
  Description of Artificial Sequence: Synthetic oligonucleotide
agaaggggcauaauuucug

SEQ ID NO: 136705 - RNA, 19 nt, Artificial Sequence
  Description of Artificial Sequence: Synthetic oligonucleotide
uauugagagaagguagcua

SEQ ID NO: 136706 - RNA, 19 nt, Artificial Sequence
  Description of Artificial Sequence: Synthetic oligonucleotide
gaauguguagcuuccccua

SEQ ID NO: 136707 - RNA, 19 nt, Artificial Sequence
  Description of Artificial Sequence: Synthetic oligonucleotide
gacacucuacccuuauaaa

SEQ ID NO: 136708 - RNA, 19 nt, Artificial Sequence
  Description of Artificial Sequence: Synthetic oligonucleotide
uggcugacggugauucuga

SEQ ID NO: 136709 - RNA, 19 nt, Artificial Sequence
  Description of Artificial Sequence: Synthetic oligonucleotide
uacuaguccucuaguuagu

SEQ ID NO: 136710 - RNA, 19 nt, Artificial Sequence
  Description of Artificial Sequence: Synthetic oligonucleotide
augaccauugcuacauuca

SEQ ID NO: 136711 - RNA, 19 nt, Artificial Sequence
  Description of Artificial Sequence: Synthetic oligonucleotide
acuuaaucaauaagugcau

SEQ ID NO: 136712 - RNA, 19 nt, Artificial Sequence
  Description of Artificial Sequence: Synthetic oligonucleotide
agcaagaaugaaugaugau

SEQ ID NO: 136713 - RNA, 19 nt, Artificial Sequence
  Description of Artificial Sequence: Synthetic oligonucleotide
uacccguuucugaacggcu

SEQ ID NO: 136714 - RNA, 19 nt, Artificial Sequence
  Description of Artificial Sequence: Synthetic oligonucleotide
uaauuacgccccuuuccuc

SEQ ID NO: 136715 - RNA, 19 nt, Artificial Sequence
  Description of Artificial Sequence: Synthetic oligonucleotide
aaguacaucgcuggcuuuu

SEQ ID NO: 136716 - RNA, 19 nt, Artificial Sequence
  Description of Artificial Sequence: Synthetic oligonucleotide
uaucacuaggugucaugaa

SEQ ID NO: 136717 - RNA, 19 nt, Artificial Sequence
  Description of Artificial Sequence: Synthetic oligonucleotide
uuccguccaauagucuucc

SEQ ID NO: 136718 - RNA, 19 nt, Artificial Sequence
  Description of Artificial Sequence: Synthetic oligonucleotide
ccuaaagaacuaugaacac

SEQ ID NO: 136719 - RNA, 19 nt, Artificial Sequence
  Description of Artificial Sequence: Synthetic oligonucleotide
gauggggagcuugcacucg

SEQ ID NO: 136720 - RNA, 19 nt, Artificial Sequence
  Description of Artificial Sequence: Synthetic oligonucleotide
aguuagcuguauugccaug

SEQ ID NO: 136721 - RNA, 19 nt, Artificial Sequence
  Description of Artificial Sequence: Synthetic oligonucleotide
gacggugauucugagccac

SEQ ID NO: 136722 - RNA, 19 nt, Artificial Sequence
  Description of Artificial Sequence: Synthetic oligonucleotide
uuuuggcagucugaaacua

SEQ ID NO: 136723 - RNA, 19 nt, Artificial Sequence
  Description of Artificial Sequence: Synthetic oligonucleotide
gcugaauaauuaagaaacc

SEQ ID NO: 136724 - RNA, 19 nt, Artificial Sequence
  Description of Artificial Sequence: Synthetic oligonucleotide
ucucugacgucaggaaugu

SEQ ID NO: 136725 - RNA, 19 nt, Artificial Sequence
  Description of Artificial Sequence: Synthetic oligonucleotide
cuacccguuucugaacggc

SEQ ID NO: 136726 - RNA, 19 nt, Artificial Sequence
  Description of Artificial Sequence: Synthetic oligonucleotide
guacuggccauaucuggga

SEQ ID NO: 136727 - RNA, 19 nt, Artificial Sequence
  Description of Artificial Sequence: Synthetic oligonucleotide
uucucauuaacggcacuuu

SEQ ID NO: 136728 - RNA, 19 nt, Artificial Sequence
  Description of Artificial Sequence: Synthetic oligonucleotide
acaagcuaauuacgccccu

SEQ ID NO: 136729 - RNA, 19 nt, Artificial Sequence
  Description of Artificial Sequence: Synthetic oligonucleotide
agucugaaacuaggcaaug

SEQ ID NO: 136730 - RNA, 19 nt, Artificial Sequence
  Description of Artificial Sequence: Synthetic oligonucleotide
gacacuucggaggaaugaa

SEQ ID NO: 136731 - RNA, 19 nt, Artificial Sequence
  Description of Artificial Sequence: Synthetic oligonucleotide
cucuaguuagucuucuacu

SEQ ID NO: 136732 - RNA, 19 nt, Artificial Sequence
  Description of Artificial Sequence: Synthetic oligonucleotide
acacuucggaggaaugaag

SEQ ID NO: 136733 - RNA, 19 nt, Artificial Sequence
  Description of Artificial Sequence: Synthetic oligonucleotide
uaguuccguccaauagucu

SEQ ID NO: 136734 - RNA, 19 nt, Artificial Sequence
  Description of Artificial Sequence: Synthetic oligonucleotide
uuccccauaccugcuauua

SEQ ID NO: 136735 - RNA, 19 nt, Artificial Sequence
  Description of Artificial Sequence: Synthetic oligonucleotide
aaccuaguguauggcacau

SEQ ID NO: 136736 - RNA, 19 nt, Artificial Sequence
  Description of Artificial Sequence: Synthetic oligonucleotide
ugcuauuaacugucucuuu

SEQ ID NO: 136737 - RNA, 19 nt, Artificial Sequence
  Description of Artificial Sequence: Synthetic oligonucleotide
uccccauaccugcuauuaa

SEQ ID NO: 136738 - RNA, 19 nt, Artificial Sequence
  Description of Artificial Sequence: Synthetic oligonucleotide
gaucaaggguauucgaguu

SEQ ID NO: 136739 - RNA, 19 nt, Artificial Sequence
  Description of Artificial Sequence: Synthetic oligonucleotide
ggauuuuaugacccacuca

SEQ ID NO: 136740 - RNA, 19 nt, Artificial Sequence
  Description of Artificial Sequence: Synthetic oligonucleotide
ucuagaccgccuucuucaa

SEQ ID NO: 136741 - RNA, 19 nt, Artificial Sequence
  Description of Artificial Sequence: Synthetic oligonucleotide
gguagcuaggaagagguaa

SEQ ID NO: 136742 - RNA, 19 nt, Artificial Sequence
  Description of Artificial Sequence: Synthetic oligonucleotide
ccuaguguauggcacauga

SEQ ID NO: 136743 - RNA, 19 nt, Artificial Sequence
  Description of Artificial Sequence: Synthetic oligonucleotide
cuuaggaauuguccauaga

SEQ ID NO: 136744 - RNA, 19 nt, Artificial Sequence
  Description of Artificial Sequence: Synthetic oligonucleotide
guacaucgcuggcuuuuag

SEQ ID NO: 136745 - RNA, 19 nt, Artificial Sequence
  Description of Artificial Sequence: Synthetic oligonucleotide
auuuuaaggcguggcaaua

SEQ ID NO: 136746 - RNA, 19 nt, Artificial Sequence
  Description of Artificial Sequence: Synthetic oligonucleotide
uaccugcuauuaacugucu

SEQ ID NO: 136747 - RNA, 19 nt, Artificial Sequence
  Description of Artificial Sequence: Synthetic oligonucleotide
uaauuggguacagcugaau

SEQ ID NO: 136748 - RNA, 19 nt, Artificial Sequence
  Description of Artificial Sequence: Synthetic oligonucleotide
uuguaccaaugacacucua

SEQ ID NO: 136749 - RNA, 19 nt, Artificial Sequence
  Description of Artificial Sequence: Synthetic oligonucleotide
agaaaccuggcaaguacau

SEQ ID NO: 136750 - RNA, 19 nt, Artificial Sequence
  Description of Artificial Sequence: Synthetic oligonucleotide
caaggguauucgaguuccc

SEQ ID NO: 136751 - RNA, 19 nt, Artificial Sequence
  Description of Artificial Sequence: Synthetic oligonucleotide
ccauaccugcuauuaacug

SEQ ID NO: 136752 - RNA, 19 nt, Artificial Sequence
  Description of Artificial Sequence: Synthetic oligonucleotide
agauucuggaccgccugga

SEQ ID NO: 136753 - RNA, 19 nt, Artificial Sequence
  Description of Artificial Sequence: Synthetic oligonucleotide
guuccguccaauagucuuc

SEQ ID NO: 136754 - RNA, 19 nt, Artificial Sequence
  Description of Artificial Sequence: Synthetic oligonucleotide
ccccaauccuuguaguacc

SEQ ID NO: 136755 - RNA, 19 nt, Artificial Sequence
  Description of Artificial Sequence: Synthetic oligonucleotide
cacuucggaggaaugaagu

SEQ ID NO: 136756 - RNA, 19 nt, Artificial Sequence
  Description of Artificial Sequence: Synthetic oligonucleotide
uuacgccccuuuccucuca

SEQ ID NO: 136757 - RNA, 19 nt, Artificial Sequence
  Description of Artificial Sequence: Synthetic oligonucleotide
gagaaggggcauaauuucu

SEQ ID NO: 136758 - RNA, 19 nt, Artificial Sequence
  Description of Artificial Sequence: Synthetic oligonucleotide
gguuuacaauaaacuuagg

SEQ ID NO: 136759 - RNA, 19 nt, Artificial Sequence
  Description of Artificial Sequence: Synthetic oligonucleotide
ucuggcugacggugauucu

SEQ ID NO: 136760 - RNA, 19 nt, Artificial Sequence
  Description of Artificial Sequence: Synthetic oligonucleotide
aggcguggcaauaucacuu

SEQ ID NO: 136761 - RNA, 19 nt, Artificial Sequence
  Description of Artificial Sequence: Synthetic oligonucleotide
uccucuaguuagucuucua

SEQ ID NO: 136762 - RNA, 19 nt, Artificial Sequence
  Description of Artificial Sequence: Synthetic oligonucleotide
caucaagauauuggugcca

SEQ ID NO: 136763 - RNA, 19 nt, Artificial Sequence
  Description of Artificial Sequence: Synthetic oligonucleotide
uaacggcacuuuccuuccu

SEQ ID NO: 136764 - RNA, 19 nt, Artificial Sequence
  Description of Artificial Sequence: Synthetic oligonucleotide
agaccguuucuacccguuu

SEQ ID NO: 136765 - RNA, 19 nt, Artificial Sequence
  Description of Artificial Sequence: Synthetic oligonucleotide
cacucgaaucacucccuga

SEQ ID NO: 136766 - RNA, 19 nt, Artificial Sequence
  Description of Artificial Sequence: Synthetic oligonucleotide
acguugugucacagugugg

SEQ ID NO: 136767 - RNA, 19 nt, Artificial Sequence
  Description of Artificial Sequence: Synthetic oligonucleotide
gaguuagguuugccuucac

SEQ ID NO: 136768 - RNA, 19 nt, Artificial Sequence
  Description of Artificial Sequence: Synthetic oligonucleotide
guauucguaggaggccuuc

SEQ ID NO: 136769 - RNA, 19 nt, Artificial Sequence
  Description of Artificial Sequence: Synthetic oligonucleotide
gggugguaagcaguuagca

SEQ ID NO: 136770 - RNA, 19 nt, Artificial Sequence
  Description of Artificial Sequence: Synthetic oligonucleotide
caacgaccugguccuugcc

SEQ ID NO: 136771 - RNA, 19 nt, Artificial Sequence
  Description of Artificial Sequence: Synthetic oligonucleotide
guaguaccaguuuuaucuu

SEQ ID NO: 136772 - RNA, 19 nt, Artificial Sequence
  Description of Artificial Sequence: Synthetic oligonucleotide
acauuucgcuguucucauu

SEQ ID NO: 136773 - RNA, 19 nt, Artificial Sequence
  Description of Artificial Sequence: Synthetic oligonucleotide
aacucccggggaacucgag

SEQ ID NO: 136774 - RNA, 19 nt, Artificial Sequence
  Description of Artificial Sequence: Synthetic oligonucleotide
aguacaucgcuggcuuuua

SEQ ID NO: 136775 - RNA, 19 nt, Artificial Sequence
  Description of Artificial Sequence: Synthetic oligonucleotide
ugccgcuggggugguaagc

SEQ ID NO: 136776 - RNA, 19 nt, Artificial Sequence
  Description of Artificial Sequence: Synthetic oligonucleotide
cccguuucugaacggcugc

SEQ ID NO: 136777 - RNA, 19 nt, Artificial Sequence
  Description of Artificial Sequence: Synthetic oligonucleotide
uccguccaauagucuucca

SEQ ID NO: 136778 - RNA, 19 nt, Artificial Sequence
  Description of Artificial Sequence: Synthetic oligonucleotide
ucggggccaugaccauugc

SEQ ID NO: 136779 - RNA, 19 nt, Artificial Sequence
  Description of Artificial Sequence: Synthetic oligonucleotide
caucaugcuguuugacacu

SEQ ID NO: 136780 - RNA, 19 nt, Artificial Sequence
  Description of Artificial Sequence: Synthetic oligonucleotide
accuaguguauggcacaug

SEQ ID NO: 136781 - RNA, 19 nt, Artificial Sequence
  Description of Artificial Sequence: Synthetic oligonucleotide
uggucgccucccuuugcau

SEQ ID NO: 136782 - RNA, 19 nt, Artificial Sequence
  Description of Artificial Sequence: Synthetic oligonucleotide
cacuaacauuuugugguaa

SEQ ID NO: 136783 - RNA, 19 nt, Artificial Sequence
  Description of Artificial Sequence: Synthetic oligonucleotide
ggaacucgagagccaguuc

SEQ ID NO: 136784 - RNA, 19 nt, Artificial Sequence
  Description of Artificial Sequence: Synthetic oligonucleotide
ggccuucgguuucuagacc

SEQ ID NO: 136785 - RNA, 19 nt, Artificial Sequence
  Description of Artificial Sequence: Synthetic oligonucleotide
cacaacucccggggaacuc

SEQ ID NO: 136786 - RNA, 19 nt, Artificial Sequence
  Description of Artificial Sequence: Synthetic oligonucleotide
cuugccgcuggggugguaa

SEQ ID NO: 136787 - RNA, 19 nt, Artificial Sequence
  Description of Artificial Sequence: Synthetic oligonucleotide
gucugggagaccguuucua

SEQ ID NO: 136788 - RNA, 19 nt, Artificial Sequence
  Description of Artificial Sequence: Synthetic oligonucleotide
gcagcguuccccaauauuu

SEQ ID NO: 136789 - RNA, 19 nt, Artificial Sequence
  Description of Artificial Sequence: Synthetic oligonucleotide
caacucccggggaacucga

SEQ ID NO: 136790 - RNA, 19 nt, Artificial Sequence
  Description of Artificial Sequence: Synthetic oligonucleotide
cugcuauuaacugucucuu

SEQ ID NO: 136791 - RNA, 19 nt, Artificial Sequence
  Description of Artificial Sequence: Synthetic oligonucleotide
ucacucccugaggaacguc

SEQ ID NO: 136792 - RNA, 19 nt, Artificial Sequence
  Description of Artificial Sequence: Synthetic oligonucleotide
cuuccucacuugguuuaca

SEQ ID NO: 136793 - RNA, 19 nt, Artificial Sequence
  Description of Artificial Sequence: Synthetic oligonucleotide
ggcaaguacaucgcuggcu

SEQ ID NO: 136794 - RNA, 19 nt, Artificial Sequence
  Description of Artificial Sequence: Synthetic oligonucleotide
caacaacggccucuugacu

SEQ ID NO: 136795 - RNA, 19 nt, Artificial Sequence
  Description of Artificial Sequence: Synthetic oligonucleotide
cauuaacggcacuuuccuu

SEQ ID NO: 136796 - RNA, 19 nt, Artificial Sequence
  Description of Artificial Sequence: Synthetic oligonucleotide
cucugacgucaggaaugug

SEQ ID NO: 136797 - RNA, 19 nt, Artificial Sequence
  Description of Artificial Sequence: Synthetic oligonucleotide
cggugcuuuccuuugaucu

SEQ ID NO: 136798 - RNA, 19 nt, Artificial Sequence
  Description of Artificial Sequence: Synthetic oligonucleotide
caaugacucuuuggagaaa

SEQ ID NO: 136799 - RNA, 19 nt, Artificial Sequence
  Description of Artificial Sequence: Synthetic oligonucleotide
gccgcuggggugguaagca

SEQ ID NO: 136800 - RNA, 19 nt, Artificial Sequence
  Description of Artificial Sequence: Synthetic oligonucleotide
ccggugcuuuccuuugauc

SEQ ID NO: 136801 - RNA, 19 nt, Artificial Sequence
  Description of Artificial Sequence: Synthetic oligonucleotide
cguugugucacaguguggu

SEQ ID NO: 136802 - RNA, 19 nt, Artificial Sequence
  Description of Artificial Sequence: Synthetic oligonucleotide
agguagcuaggaagaggua

SEQ ID NO: 136803 - RNA, 19 nt, Artificial Sequence
  Description of Artificial Sequence: Synthetic oligonucleotide
gagaccguuucuacccguu

SEQ ID NO: 136804 - RNA, 19 nt, Artificial Sequence
  Description of Artificial Sequence: Synthetic oligonucleotide
cggucauaagccauuuucu

SEQ ID NO: 136805 - RNA, 19 nt, Artificial Sequence
  Description of Artificial Sequence: Synthetic oligonucleotide
agcuuccccuaaagaacua

SEQ ID NO: 136806 - RNA, 19 nt, Artificial Sequence
  Description of Artificial Sequence: Synthetic oligonucleotide
cuagaccgccuucuucaau

SEQ ID NO: 136807 - RNA, 19 nt, Artificial Sequence
  Description of Artificial Sequence: Synthetic oligonucleotide
ggcguggcaauaucacuuu

SEQ ID NO: 136808 - RNA, 19 nt, Artificial Sequence
  Description of Artificial Sequence: Synthetic oligonucleotide
gggaacucgagagccaguu

SEQ ID NO: 136809 - RNA, 19 nt, Artificial Sequence
  Description of Artificial Sequence: Synthetic oligonucleotide
caaguacaucgcuggcuuu

SEQ ID NO: 136810 - RNA, 19 nt, Artificial Sequence
  Description of Artificial Sequence: Synthetic oligonucleotide
caagcuaauuacgccccuu

SEQ ID NO: 136811 - RNA, 19 nt, Artificial Sequence
  Description of Artificial Sequence: Synthetic oligonucleotide
ggcuuggucgccucccuuu

SEQ ID NO: 136812 - RNA, 19 nt, Artificial Sequence
  Description of Artificial Sequence: Synthetic oligonucleotide
ggauaucacuaggugucau

SEQ ID NO: 136813 - RNA, 19 nt, Artificial Sequence
  Description of Artificial Sequence: Synthetic oligonucleotide
ggggagcuugcacucgaau

SEQ ID NO: 136814 - RNA, 19 nt, Artificial Sequence
  Description of Artificial Sequence: Synthetic oligonucleotide
cuaggcaaugaggcaucau

SEQ ID NO: 136815 - RNA, 19 nt, Artificial Sequence
  Description of Artificial Sequence: Synthetic oligonucleotide
ccugacacuucggaggaau

SEQ ID NO: 136816 - RNA, 19 nt, Artificial Sequence
  Description of Artificial Sequence: Synthetic oligonucleotide
ccggggaacucgagagcca

SEQ ID NO: 136817 - RNA, 19 nt, Artificial Sequence
  Description of Artificial Sequence: Synthetic oligonucleotide
gguauucguaggaggccuu

SEQ ID NO: 136818 - RNA, 19 nt, Artificial Sequence
  Description of Artificial Sequence: Synthetic oligonucleotide
gcacaacucccggggaacu

SEQ ID NO: 136819 - RNA, 19 nt, Artificial Sequence
  Description of Artificial Sequence: Synthetic oligonucleotide
ccauaccaccuuguaccaa

SEQ ID NO: 136820 - RNA, 19 nt, Artificial Sequence
  Description of Artificial Sequence: Synthetic oligonucleotide
ggggaacucgagagccagu

SEQ ID NO: 136821 - RNA, 19 nt, Artificial Sequence
  Description of Artificial Sequence: Synthetic oligonucleotide
cggcacuuuccuuccuaau

SEQ ID NO: 136822 - RNA, 19 nt, Artificial Sequence
  Description of Artificial Sequence: Synthetic oligonucleotide
cccugacacuucggaggaa

SEQ ID NO: 136823 - RNA, 19 nt, Artificial Sequence
  Description of Artificial Sequence: Synthetic oligonucleotide
ccgggucaguguggcuaaa

SEQ ID NO: 136824 - RNA, 19 nt, Artificial Sequence
  Description of Artificial Sequence: Synthetic oligonucleotide
ccuugccgcugggguggua

SEQ ID NO: 136825 - RNA, 19 nt, Artificial Sequence
  Description of Artificial Sequence: Synthetic oligonucleotide
ccccaacgaccugguccuu

SEQ ID NO: 136826 - RNA, 19 nt, Artificial Sequence
  Description of Artificial Sequence: Synthetic oligonucleotide
aaaccuaacaccuauauaa

SEQ ID NO: 136827 - RNA, 19 nt, Artificial Sequence
  Description of Artificial Sequence: Synthetic oligonucleotide
acuucuaaggauuugcuac

SEQ ID NO: 136828 - RNA, 19 nt, Artificial Sequence
  Description of Artificial Sequence: Synthetic oligonucleotide
uuagacauaguuaagugcu

SEQ ID NO: 136829 - RNA, 19 nt, Artificial Sequence
  Description of Artificial Sequence: Synthetic oligonucleotide
aauaugagcaggcuuagcu

SEQ ID NO: 136830 - RNA, 19 nt, Artificial Sequence
  Description of Artificial Sequence: Synthetic oligonucleotide
uauuaauaaauucacuagu

SEQ ID NO: 136831 - RNA, 19 nt, Artificial Sequence
  Description of Artificial Sequence: Synthetic oligonucleotide
acaacaacgcuuuuagggc

SEQ ID NO: 136832 - RNA, 19 nt, Artificial Sequence
  Description of Artificial Sequence: Synthetic oligonucleotide
uacagaacaagccuguaag

SEQ ID NO: 136833 - RNA, 19 nt, Artificial Sequence
  Description of Artificial Sequence: Synthetic oligonucleotide
aguaaacuaagcuacuauc

SEQ ID NO: 136834 - RNA, 19 nt, Artificial Sequence
  Description of Artificial Sequence: Synthetic oligonucleotide
cuuccauuauugaagaacg

SEQ ID NO: 136835 - RNA, 19 nt, Artificial Sequence
  Description of Artificial Sequence: Synthetic oligonucleotide
acuaguuggaauaaucucc

SEQ ID NO: 136836 - RNA, 19 nt, Artificial Sequence
  Description of Artificial Sequence: Synthetic oligonucleotide
aaaaugggcaggucuuucc

SEQ ID NO: 136837 - RNA, 19 nt, Artificial Sequence
  Description of Artificial Sequence: Synthetic oligonucleotide
ucggguaucaaaaggaaag

SEQ ID NO: 136838 - RNA, 19 nt, Artificial Sequence
  Description of Artificial Sequence: Synthetic oligonucleotide
uggauuucuaacauggccc

SEQ ID NO: 136839 - RNA, 19 nt, Artificial Sequence
  Description of Artificial Sequence: Synthetic oligonucleotide
uuugucggguaucaaaagg

SEQ ID NO: 136840 - RNA, 19 nt, Artificial Sequence
  Description of Artificial Sequence: Synthetic oligonucleotide
gacugguugauuuucgugg

SEQ ID NO: 136841 - RNA, 19 nt, Artificial Sequence
  Description of Artificial Sequence: Synthetic oligonucleotide
aauaauagucaggagucgg

SEQ ID NO: 136842 - RNA, 19 nt, Artificial Sequence
  Description of Artificial Sequence: Synthetic oligonucleotide
uuuagacauaguuaagugc

SEQ ID NO: 136843 - RNA, 19 nt, Artificial Sequence
  Description of Artificial Sequence: Synthetic oligonucleotide
caaacuacuauguucacac

SEQ ID NO: 136844 - RNA, 19 nt, Artificial Sequence
  Description of Artificial Sequence: Synthetic oligonucleotide
uuaaccuuugcaauaugag

SEQ ID NO: 136845 - RNA, 19 nt, Artificial Sequence
  Description of Artificial Sequence: Synthetic oligonucleotide
uaagauaguucacacaagu

SEQ ID NO: 136846 - RNA, 19 nt, Artificial Sequence
  Description of Artificial Sequence: Synthetic oligonucleotide
aggguaagaaaucaucugg

SEQ ID NO: 136847 - RNA, 19 nt, Artificial Sequence
  Description of Artificial Sequence: Synthetic oligonucleotide
ugggcuaccagucacaaac

SEQ ID NO: 136848 - RNA, 19 nt, Artificial Sequence
  Description of Artificial Sequence: Synthetic oligonucleotide
uaaggauuugcuacugacg

SEQ ID NO: 136849 - RNA, 19 nt, Artificial Sequence
  Description of Artificial Sequence: Synthetic oligonucleotide
auaaucuccuugcacauag

SEQ ID NO: 136850 - RNA, 19 nt, Artificial Sequence
  Description of Artificial Sequence: Synthetic oligonucleotide
cucuaaacgagucaaacug

SEQ ID NO: 136851 - RNA, 19 nt, Artificial Sequence
  Description of Artificial Sequence: Synthetic oligonucleotide
gaucacuugaaguccacgg

SEQ ID NO: 136852 - RNA, 19 nt, Artificial Sequence
  Description of Artificial Sequence: Synthetic oligonucleotide
ugucaugauuacuagagga

SEQ ID NO: 136853 - RNA, 19 nt, Artificial Sequence
  Description of Artificial Sequence: Synthetic oligonucleotide
cuaaauuguggauagugac

SEQ ID NO: 136854 - RNA, 19 nt, Artificial Sequence
  Description of Artificial Sequence: Synthetic oligonucleotide
aaaucaugagaugucagug

SEQ ID NO: 136855 - RNA, 19 nt, Artificial Sequence
  Description of Artificial Sequence: Synthetic oligonucleotide
uugauacagaacaagccug

SEQ ID NO: 136856 - RNA, 19 nt, Artificial Sequence
  Description of Artificial Sequence: Synthetic oligonucleotide
aacucuuaagaggaggauc

SEQ ID NO: 136857 - RNA, 19 nt, Artificial Sequence
  Description of Artificial Sequence: Synthetic oligonucleotide
aaguuacagaacccaacuc

SEQ ID NO: 136858 - RNA, 19 nt, Artificial Sequence
  Description of Artificial Sequence: Synthetic oligonucleotide
uaaauuguggauagugacu

SEQ ID NO: 136859 - RNA, 19 nt, Artificial Sequence
  Description of Artificial Sequence: Synthetic oligonucleotide
ucauacuggauuucuaaca

SEQ ID NO: 136860 - RNA, 19 nt, Artificial Sequence
  Description of Artificial Sequence: Synthetic oligonucleotide
ucuaaacgagucaaacugc

SEQ ID NO: 136861 - RNA, 19 nt, Artificial Sequence
  Description of Artificial Sequence: Synthetic oligonucleotide
ucaacuuaugcaaggaauc

SEQ ID NO: 136862 - RNA, 19 nt, Artificial Sequence
  Description of Artificial Sequence: Synthetic oligonucleotide
uuagguauuccucuaaauu

SEQ ID NO: 136863 - RNA, 19 nt, Artificial Sequence
  Description of Artificial Sequence: Synthetic oligonucleotide
uaaaacuccagcguuggcc

SEQ ID NO: 136864 - RNA, 19 nt, Artificial Sequence
  Description of Artificial Sequence: Synthetic oligonucleotide
aacgagucaaacugccuag

SEQ ID NO: 136865 - RNA, 19 nt, Artificial Sequence
  Description of Artificial Sequence: Synthetic oligonucleotide
cuaacaccuauauaacacc

SEQ ID NO: 136866 - RNA, 19 nt, Artificial Sequence
  Description of Artificial Sequence: Synthetic oligonucleotide
cuaaacgagucaaacugcc

SEQ ID NO: 136867 - RNA, 19 nt, Artificial Sequence
  Description of Artificial Sequence: Synthetic oligonucleotide
cuaucaacaguuugucacg

SEQ ID NO: 136868 - RNA, 19 nt, Artificial Sequence
  Description of Artificial Sequence: Synthetic oligonucleotide
uuaaacuccggaacccucc

SEQ ID NO: 136869 - RNA, 19 nt, Artificial Sequence
  Description of Artificial Sequence: Synthetic oligonucleotide
augauucagaucaaaagag

SEQ ID NO: 136870 - RNA, 19 nt, Artificial Sequence
  Description of Artificial Sequence: Synthetic oligonucleotide
cuggauuucuaacauggcc

SEQ ID NO: 136871 - RNA, 19 nt, Artificial Sequence
  Description of Artificial Sequence: Synthetic oligonucleotide
uugucggguaucaaaagga

SEQ ID NO: 136872 - RNA, 19 nt, Artificial Sequence
  Description of Artificial Sequence: Synthetic oligonucleotide
ucucauuacaacagggaaa

SEQ ID NO: 136873 - RNA, 19 nt, Artificial Sequence
  Description of Artificial Sequence: Synthetic oligonucleotide
aaaagcauuugucggguau

SEQ ID NO: 136874 - RNA, 19 nt, Artificial Sequence
  Description of Artificial Sequence: Synthetic oligonucleotide
ucaaaccuaacaccuauau

SEQ ID NO: 136875 - RNA, 19 nt, Artificial Sequence
  Description of Artificial Sequence: Synthetic oligonucleotide
uccggaacccuccaacugg

SEQ ID NO: 136876 - RNA, 19 nt, Artificial Sequence
  Description of Artificial Sequence: Synthetic oligonucleotide
aaacgagucaaacugccua

SEQ ID NO: 136877 - RNA, 19 nt, Artificial Sequence
  Description of Artificial Sequence: Synthetic oligonucleotide
uucacuaguuggaauaauc

SEQ ID NO: 136878 - RNA, 19 nt, Artificial Sequence
  Description of Artificial Sequence: Synthetic oligonucleotide
cuaaggauuugcuacugac

SEQ ID NO: 136879 - RNA, 19 nt, Artificial Sequence
  Description of Artificial Sequence: Synthetic oligonucleotide
aaccuaacaccuauauaac

SEQ ID NO: 136880 - RNA, 19 nt, Artificial Sequence
  Description of Artificial Sequence: Synthetic oligonucleotide
aauaccaguaucgacugau

SEQ ID NO: 136881 - RNA, 19 nt, Artificial Sequence
  Description of Artificial Sequence: Synthetic oligonucleotide
aaagcauuugucggguauc

SEQ ID NO: 136882 - RNA, 19 nt, Artificial Sequence
  Description of Artificial Sequence: Synthetic oligonucleotide
guugugaucaggaaagaug

SEQ ID NO: 136883 - RNA, 19 nt, Artificial Sequence
  Description of Artificial Sequence: Synthetic oligonucleotide
aucccuuugaaauuucaca

SEQ ID NO: 136884 - RNA, 19 nt, Artificial Sequence
  Description of Artificial Sequence: Synthetic oligonucleotide
uacugagaaucucaaacaa

SEQ ID NO: 136885 - RNA, 19 nt, Artificial Sequence
  Description of Artificial Sequence: Synthetic oligonucleotide
uugaagaacgucaccuuga

SEQ ID NO: 136886 - RNA, 19 nt, Artificial Sequence
  Description of Artificial Sequence: Synthetic oligonucleotide
uucuaggugauauacugau

SEQ ID NO: 136887 - RNA, 19 nt, Artificial Sequence
  Description of Artificial Sequence: Synthetic oligonucleotide
ugccuauucgcuuuugcug

SEQ ID NO: 136888 - RNA, 19 nt, Artificial Sequence
  Description of Artificial Sequence: Synthetic oligonucleotide
ucucuaaacgagucaaacu

SEQ ID NO: 136889 - RNA, 19 nt, Artificial Sequence
  Description of Artificial Sequence: Synthetic oligonucleotide
cuuaugcaaggaaucaaug

SEQ ID NO: 136890 - RNA, 19 nt, Artificial Sequence
  Description of Artificial Sequence: Synthetic oligonucleotide
auuaucucaaugcucgaau

SEQ ID NO: 136891 - RNA, 19 nt, Artificial Sequence
  Description of Artificial Sequence: Synthetic oligonucleotide
ugauacagaacaagccugu

SEQ ID NO: 136892 - RNA, 19 nt, Artificial Sequence
  Description of Artificial Sequence: Synthetic oligonucleotide
aacaccuauauaacaccac

SEQ ID NO: 136893 - RNA, 19 nt, Artificial Sequence
  Description of Artificial Sequence: Synthetic oligonucleotide
gcuaucaacaguuugucac

SEQ ID NO: 136894 - RNA, 19 nt, Artificial Sequence
  Description of Artificial Sequence: Synthetic oligonucleotide
agccuguaagcguuuaagg

SEQ ID NO: 136895 - RNA, 19 nt, Artificial Sequence
  Description of Artificial Sequence: Synthetic oligonucleotide
aguucacacaagucauuac

SEQ ID NO: 136896 - RNA, 19 nt, Artificial Sequence
  Description of Artificial Sequence: Synthetic oligonucleotide
ugaacugggcaaacuacca

SEQ ID NO: 136897 - RNA, 19 nt, Artificial Sequence
  Description of Artificial Sequence: Synthetic oligonucleotide
acaccuauauaacaccacu

SEQ ID NO: 136898 - RNA, 19 nt, Artificial Sequence
  Description of Artificial Sequence: Synthetic oligonucleotide
auacugaucuggcuacaac

SEQ ID NO: 136899 - RNA, 19 nt, Artificial Sequence
  Description of Artificial Sequence: Synthetic oligonucleotide
aaaugggcaggucuuuccu

SEQ ID NO: 136900 - RNA, 19 nt, Artificial Sequence
  Description of Artificial Sequence: Synthetic oligonucleotide
ucuugcauugcccgguccc

SEQ ID NO: 136901 - RNA, 19 nt, Artificial Sequence
  Description of Artificial Sequence: Synthetic oligonucleotide
auacuuggucccuucuugg

SEQ ID NO: 136902 - RNA, 19 nt, Artificial Sequence
  Description of Artificial Sequence: Synthetic oligonucleotide
caguugcuuaucaauuugg

SEQ ID NO: 136903 - RNA, 19 nt, Artificial Sequence
  Description of Artificial Sequence: Synthetic oligonucleotide
ucaacaguuugucacgcau

SEQ ID NO: 136904 - RNA, 19 nt, Artificial Sequence
  Description of Artificial Sequence: Synthetic oligonucleotide
ccgagaacuaccaaggucc

SEQ ID NO: 136905 - RNA, 19 nt, Artificial Sequence
  Description of Artificial Sequence: Synthetic oligonucleotide
cuacugacgggcauacucc

SEQ ID NO: 136906 - RNA, 19 nt, Artificial Sequence
  Description of Artificial Sequence: Synthetic oligonucleotide
ucaauuugguugugagucc

SEQ ID NO: 136907 - RNA, 19 nt, Artificial Sequence
  Description of Artificial Sequence: Synthetic oligonucleotide
acauaguuaagugcuauga

SEQ ID NO: 136908 - RNA, 19 nt, Artificial Sequence
  Description of Artificial Sequence: Synthetic oligonucleotide
ucacaucuaaggauggguc

SEQ ID NO: 136909 - RNA, 19 nt, Artificial Sequence
  Description of Artificial Sequence: Synthetic oligonucleotide
uugugaguccauuuguagu

SEQ ID NO: 136910 - RNA, 19 nt, Artificial Sequence
  Description of Artificial Sequence: Synthetic oligonucleotide
auaaaacuccagcguuggc

SEQ ID NO: 136911 - RNA, 19 nt, Artificial Sequence
  Description of Artificial Sequence: Synthetic oligonucleotide
auuugucggguaucaaaag

SEQ ID NO: 136912 - RNA, 19 nt, Artificial Sequence
  Description of Artificial Sequence: Synthetic oligonucleotide
aucaaugaagccaaaucug

SEQ ID NO: 136913 - RNA, 19 nt, Artificial Sequence
  Description of Artificial Sequence: Synthetic oligonucleotide
cuuaaccuuugcaauauga

SEQ ID NO: 136914 - RNA, 19 nt, Artificial Sequence
  Description of Artificial Sequence: Synthetic oligonucleotide
gugagcagagaccuacugg

SEQ ID NO: 136915 - RNA, 19 nt, Artificial Sequence
  Description of Artificial Sequence: Synthetic oligonucleotide
auaauagucaggagucggg

SEQ ID NO: 136916 - RNA, 19 nt, Artificial Sequence
  Description of Artificial Sequence: Synthetic oligonucleotide
ggauuucuaacauggcccg

SEQ ID NO: 136917 - RNA, 19 nt, Artificial Sequence
  Description of Artificial Sequence: Synthetic oligonucleotide
caacaacgcuuuuagggcc

SEQ ID NO: 136918 - RNA, 19 nt, Artificial Sequence
  Description of Artificial Sequence: Synthetic oligonucleotide
gauugcuaagaguuacuuc

SEQ ID NO: 136919 - RNA, 19 nt, Artificial Sequence
  Description of Artificial Sequence: Synthetic oligonucleotide
uaguccggcaacuuaagau

SEQ ID NO: 136920 - RNA, 19 nt, Artificial Sequence
  Description of Artificial Sequence: Synthetic oligonucleotide
ugaguauacccaugaucag

SEQ ID NO: 136921 - RNA, 19 nt, Artificial Sequence
  Description of Artificial Sequence: Synthetic oligonucleotide
aucgaugcaauuuuacaua

SEQ ID NO: 136922 - RNA, 19 nt, Artificial Sequence
  Description of Artificial Sequence: Synthetic oligonucleotide
ucuaaggauuugcuacuga

SEQ ID NO: 136923 - RNA, 19 nt, Artificial Sequence
  Description of Artificial Sequence: Synthetic oligonucleotide
ugcugcuaucaacaguuug

SEQ ID NO: 136924 - RNA, 19 nt, Artificial Sequence
  Description of Artificial Sequence: Synthetic oligonucleotide
uuuaaacuccggaacccuc

SEQ ID NO: 136925 - RNA, 19 nt, Artificial Sequence
  Description of Artificial Sequence: Synthetic oligonucleotide
ccuaacaccuauauaacac

SEQ ID NO: 136926 - RNA, 19 nt, Artificial Sequence
  Description of Artificial Sequence: Synthetic oligonucleotide
cacuaguuggaauaaucuc

SEQ ID NO: 136927 - RNA, 19 nt, Artificial Sequence
  Description of Artificial Sequence: Synthetic oligonucleotide
ugguauauccuucccuccu

SEQ ID NO: 136928 - RNA, 19 nt, Artificial Sequence
  Description of Artificial Sequence: Synthetic oligonucleotide
cgcauuaucucaaugcucg

SEQ ID NO: 136929 - RNA, 19 nt, Artificial Sequence
  Description of Artificial Sequence: Synthetic oligonucleotide
acucuuaagaggaggauca

SEQ ID NO: 136930 - RNA, 19 nt, Artificial Sequence
  Description of Artificial Sequence: Synthetic oligonucleotide
uuggauugcuaagaguuac

SEQ ID NO: 136931 - RNA, 19 nt, Artificial Sequence
  Description of Artificial Sequence: Synthetic oligonucleotide
uuacagaacccaacucucu

SEQ ID NO: 136932 - RNA, 19 nt, Artificial Sequence
  Description of Artificial Sequence: Synthetic oligonucleotide
accuaacaccuauauaaca

SEQ ID NO: 136933 - RNA, 19 nt, Artificial Sequence
  Description of Artificial Sequence: Synthetic oligonucleotide
uggcguguaaaacucuuaa

SEQ ID NO: 136934 - RNA, 19 nt, Artificial Sequence
  Description of Artificial Sequence: Synthetic oligonucleotide
ugcacauagcauuaucaua

SEQ ID NO: 136935 - RNA, 19 nt, Artificial Sequence
  Description of Artificial Sequence: Synthetic oligonucleotide
ugguauucuguuuggguaa

SEQ ID NO: 136936 - RNA, 19 nt, Artificial Sequence
  Description of Artificial Sequence: Synthetic oligonucleotide
aaucuaggugcgacucugc

SEQ ID NO: 136937 - RNA, 19 nt, Artificial Sequence
  Description of Artificial Sequence: Synthetic oligonucleotide
uaaacgagucaaacugccu

SEQ ID NO: 136938 - RNA, 19 nt, Artificial Sequence
  Description of Artificial Sequence: Synthetic oligonucleotide
ucuaggugcgacucugcug

SEQ ID NO: 136939 - RNA, 19 nt, Artificial Sequence
  Description of Artificial Sequence: Synthetic oligonucleotide
ugaucacuugaaguccacg

SEQ ID NO: 136940 - RNA, 19 nt, Artificial Sequence
  Description of Artificial Sequence: Synthetic oligonucleotide
uuuggauugcuaagaguua

SEQ ID NO: 136941 - RNA, 19 nt, Artificial Sequence
  Description of Artificial Sequence: Synthetic oligonucleotide
ugucggguaucaaaaggaa

SEQ ID NO: 136942 - RNA, 19 nt, Artificial Sequence
  Description of Artificial Sequence: Synthetic oligonucleotide
aguccggcaacuuaagaua

SEQ ID NO: 136943 - RNA, 19 nt, Artificial Sequence
  Description of Artificial Sequence: Synthetic oligonucleotide
gcguguaaaacucuuaaga

SEQ ID NO: 136944 - RNA, 19 nt, Artificial Sequence
  Description of Artificial Sequence: Synthetic oligonucleotide
aaacuucacucaucaaaua

SEQ ID NO: 136945 - RNA, 19 nt, Artificial Sequence
  Description of Artificial Sequence: Synthetic oligonucleotide
ugaagaacgucaccuugau

SEQ ID NO: 136946 - RNA, 19 nt, Artificial Sequence
  Description of Artificial Sequence: Synthetic oligonucleotide
acgacuguuggccuucucu

SEQ ID NO: 136947 - RNA, 19 nt, Artificial Sequence
  Description of Artificial Sequence: Synthetic oligonucleotide
aacuuaugcaaggaaucaa

SEQ ID NO: 136948 - RNA, 19 nt, Artificial Sequence
  Description of Artificial Sequence: Synthetic oligonucleotide
ucuuaaccuuugcaauaug

SEQ ID NO: 136949 - RNA, 19 nt, Artificial Sequence
  Description of Artificial Sequence: Synthetic oligonucleotide
cauuugucggguaucaaaa

SEQ ID NO: 136950 - RNA, 19 nt, Artificial Sequence
  Description of Artificial Sequence: Synthetic oligonucleotide
cguguaaaacucuuaagag

SEQ ID NO: 136951 - RNA, 19 nt, Artificial Sequence
  Description of Artificial Sequence: Synthetic oligonucleotide
cugaucuggcuacaacagg

SEQ ID NO: 136952 - RNA, 19 nt, Artificial Sequence
  Description of Artificial Sequence: Synthetic oligonucleotide
gauauugucaggugauggu

SEQ ID NO: 136953 - RNA, 19 nt, Artificial Sequence
  Description of Artificial Sequence: Synthetic oligonucleotide
uuuucguggguuugguauc

SEQ ID NO: 136954 - RNA, 19 nt, Artificial Sequence
  Description of Artificial Sequence: Synthetic oligonucleotide
ugcuaagaguuacuucuuc

SEQ ID NO: 136955 - RNA, 19 nt, Artificial Sequence
  Description of Artificial Sequence: Synthetic oligonucleotide
ugagugcccagaauaucac

SEQ ID NO: 136956 - RNA, 19 nt, Artificial Sequence
  Description of Artificial Sequence: Synthetic oligonucleotide
aguaucgacugauggcgug

SEQ ID NO: 136957 - RNA, 19 nt, Artificial Sequence
  Description of Artificial Sequence: Synthetic oligonucleotide
auaaucugcaagccguuuu

SEQ ID NO: 136958 - RNA, 19 nt, Artificial Sequence
  Description of Artificial Sequence: Synthetic oligonucleotide
uuugguugugaguccauuu

SEQ ID NO: 136959 - RNA, 19 nt, Artificial Sequence
  Description of Artificial Sequence: Synthetic oligonucleotide
uaaacuccggaacccucca

SEQ ID NO: 136960 - RNA, 19 nt, Artificial Sequence
  Description of Artificial Sequence: Synthetic oligonucleotide
ccaguaucgacugauggcg

SEQ ID NO: 136961 - RNA, 19 nt, Artificial Sequence
  Description of Artificial Sequence: Synthetic oligonucleotide
ggaggaacauguuuccuug

SEQ ID NO: 136962 - RNA, 19 nt, Artificial Sequence
  Description of Artificial Sequence: Synthetic oligonucleotide
agguauuccucuaaauugu

SEQ ID NO: 136963 - RNA, 19 nt, Artificial Sequence
  Description of Artificial Sequence: Synthetic oligonucleotide
uacuuacuguggauaccag

SEQ ID NO: 136964 - RNA, 19 nt, Artificial Sequence
  Description of Artificial Sequence: Synthetic oligonucleotide
uggauugcuaagaguuacu

SEQ ID NO: 136965 - RNA, 19 nt, Artificial Sequence
  Description of Artificial Sequence: Synthetic oligonucleotide
caaucgugggcuaccaguc

SEQ ID NO: 136966 - RNA, 19 nt, Artificial Sequence
  Description of Artificial Sequence: Synthetic oligonucleotide
ucaccuugauacagaacaa

SEQ ID NO: 136967 - RNA, 19 nt, Artificial Sequence
  Description of Artificial Sequence: Synthetic oligonucleotide
auccacuuauaaaagggca

SEQ ID NO: 136968 - RNA, 19 nt, Artificial Sequence
  Description of Artificial Sequence: Synthetic oligonucleotide
caagucauuacagagggua

SEQ ID NO: 136969 - RNA, 19 nt, Artificial Sequence
  Description of Artificial Sequence: Synthetic oligonucleotide
ucauuacagaggguaagaa

SEQ ID NO: 136970 - RNA, 19 nt, Artificial Sequence
  Description of Artificial Sequence: Synthetic oligonucleotide
ugaucaggccuaucccaag

SEQ ID NO: 136971 - RNA, 19 nt, Artificial Sequence
  Description of Artificial Sequence: Synthetic oligonucleotide
uagaaguacugaagaugac

SEQ ID NO: 136972 - RNA, 19 nt, Artificial Sequence
  Description of Artificial Sequence: Synthetic oligonucleotide
gagguaaacuucuaaggau

SEQ ID NO: 136973 - RNA, 19 nt, Artificial Sequence
  Description of Artificial Sequence: Synthetic oligonucleotide
gcagagaccuacuggaccc

SEQ ID NO: 136974 - RNA, 19 nt, Artificial Sequence
  Description of Artificial Sequence: Synthetic oligonucleotide
ugacgggcauacuccauca

SEQ ID NO: 136975 - RNA, 19 nt, Artificial Sequence
  Description of Artificial Sequence: Synthetic oligonucleotide
auauaacaccacuucucaa

SEQ ID NO: 136976 - RNA, 19 nt, Artificial Sequence
  Description of Artificial Sequence: Synthetic oligonucleotide
cauuacagaggguaagaaa

SEQ ID NO: 136977 - RNA, 19 nt, Artificial Sequence
  Description of Artificial Sequence: Synthetic oligonucleotide
acuuaugcaaggaaucaau

SEQ ID NO: 136978 - RNA, 19 nt, Artificial Sequence
  Description of Artificial Sequence: Synthetic oligonucleotide
aaacucuuaagaggaggau

SEQ ID NO: 136979 - RNA, 19 nt, Artificial Sequence
  Description of Artificial Sequence: Synthetic oligonucleotide
uccaaucuaggugcgacuc

SEQ ID NO: 136980 - RNA, 19 nt, Artificial Sequence
  Description of Artificial Sequence: Synthetic oligonucleotide
gucaggagucgggacaucg

SEQ ID NO: 136981 - RNA, 19 nt, Artificial Sequence
  Description of Artificial Sequence: Synthetic oligonucleotide
cauuaguuguucaucugaa

SEQ ID NO: 136982 - RNA, 19 nt, Artificial Sequence
  Description of Artificial Sequence: Synthetic oligonucleotide
accagguuacuuacugugg

SEQ ID NO: 136983 - RNA, 19 nt, Artificial Sequence
  Description of Artificial Sequence: Synthetic oligonucleotide
cauccaaucuaggugcgac

SEQ ID NO: 136984 - RNA, 19 nt, Artificial Sequence
  Description of Artificial Sequence: Synthetic oligonucleotide
ugguaucaaguaucuugca

SEQ ID NO: 136985 - RNA, 19 nt, Artificial Sequence
  Description of Artificial Sequence: Synthetic oligonucleotide
acaauugucagagguggau

SEQ ID NO: 136986 - RNA, 19 nt, Artificial Sequence
  Description of Artificial Sequence: Synthetic oligonucleotide
agcgacauuuauuguucca

SEQ ID NO: 136987 - RNA, 19 nt, Artificial Sequence
  Description of Artificial Sequence: Synthetic oligonucleotide
cugguauucuguuugggua

SEQ ID NO: 136988 - RNA, 19 nt, Artificial Sequence
  Description of Artificial Sequence: Synthetic oligonucleotide
caaucuaggugcgacucug

SEQ ID NO: 136989 - RNA, 19 nt, Artificial Sequence
  Description of Artificial Sequence: Synthetic oligonucleotide
uagacauaguuaagugcua

SEQ ID NO: 136990 - RNA, 19 nt, Artificial Sequence
  Description of Artificial Sequence: Synthetic oligonucleotide
agguaaacuucuaaggauu

SEQ ID NO: 136991 - RNA, 19 nt, Artificial Sequence
  Description of Artificial Sequence: Synthetic oligonucleotide
ucguggguuugguaucaag

SEQ ID NO: 136992 - RNA, 19 nt, Artificial Sequence
  Description of Artificial Sequence: Synthetic oligonucleotide
gucacgcauuaucucaaug

SEQ ID NO: 136993 - RNA, 19 nt, Artificial Sequence
  Description of Artificial Sequence: Synthetic oligonucleotide
acuaagcuacuaucuuccu

SEQ ID NO: 136994 - RNA, 19 nt, Artificial Sequence
  Description of Artificial Sequence: Synthetic oligonucleotide
cuaggugcgacucugcugu

SEQ ID NO: 136995 - RNA, 19 nt, Artificial Sequence
  Description of Artificial Sequence: Synthetic oligonucleotide
aucuaggugcgacucugcu

SEQ ID NO: 136996 - RNA, 19 nt, Artificial Sequence
  Description of Artificial Sequence: Synthetic oligonucleotide
cuguccuaccaaagggaag

SEQ ID NO: 136997 - RNA, 19 nt, Artificial Sequence
  Description of Artificial Sequence: Synthetic oligonucleotide
aacaacgcuuuuagggccu

SEQ ID NO: 136998 - RNA, 19 nt, Artificial Sequence
  Description of Artificial Sequence: Synthetic oligonucleotide
caucgaugcaauuuuacau

SEQ ID NO: 136999 - RNA, 19 nt, Artificial Sequence
  Description of Artificial Sequence: Synthetic oligonucleotide
guaauaggcagacacugau

SEQ ID NO: 137000 - RNA, 19 nt, Artificial Sequence
  Description of Artificial Sequence: Synthetic oligonucleotide
aggcuuagcuguccuacca

SEQ ID NO: 137001 - RNA, 19 nt, Artificial Sequence
  Description of Artificial Sequence: Synthetic oligonucleotide
uuugcuacugacgggcaua

SEQ ID NO: 137002 - RNA, 19 nt, Artificial Sequence
  Description of Artificial Sequence: Synthetic oligonucleotide
aacgacuguuggccuucuc

SEQ ID NO: 137003 - RNA, 19 nt, Artificial Sequence
  Description of Artificial Sequence: Synthetic oligonucleotide
gccguuuuccuacaacaag

SEQ ID NO: 137004 - RNA, 19 nt, Artificial Sequence
  Description of Artificial Sequence: Synthetic oligonucleotide
caaguaauaccaguaucga

SEQ ID NO: 137005 - RNA, 19 nt, Artificial Sequence
  Description of Artificial Sequence: Synthetic oligonucleotide
aucuuagguauuccucuaa

SEQ ID NO: 137006 - RNA, 19 nt, Artificial Sequence
  Description of Artificial Sequence: Synthetic oligonucleotide
gggaagcgcaaacaggccc

SEQ ID NO: 137007 - RNA, 19 nt, Artificial Sequence
  Description of Artificial Sequence: Synthetic oligonucleotide
cuugcauugcccggucccg

SEQ ID NO: 137008 - RNA, 19 nt, Artificial Sequence
  Description of Artificial Sequence: Synthetic oligonucleotide
ugauuuucguggguuuggu

SEQ ID NO: 137009 - RNA, 19 nt, Artificial Sequence
  Description of Artificial Sequence: Synthetic oligonucleotide
cuuuggucugggauuuauc

SEQ ID NO: 137010 - RNA, 19 nt, Artificial Sequence
  Description of Artificial Sequence: Synthetic oligonucleotide
acuccggaacccuccaacu

SEQ ID NO: 137011 - RNA, 19 nt, Artificial Sequence
  Description of Artificial Sequence: Synthetic oligonucleotide
aaugcauacuguagacuuu

SEQ ID NO: 137012 - RNA, 19 nt, Artificial Sequence
  Description of Artificial Sequence: Synthetic oligonucleotide
gaugacugagugggaaaac

SEQ ID NO: 137013 - RNA, 19 nt, Artificial Sequence
  Description of Artificial Sequence: Synthetic oligonucleotide
ccgacugucaugaguauac

SEQ ID NO: 137014 - RNA, 19 nt, Artificial Sequence
  Description of Artificial Sequence: Synthetic oligonucleotide
ucgacugauggcguguaaa

SEQ ID NO: 137015 - RNA, 19 nt, Artificial Sequence
  Description of Artificial Sequence: Synthetic oligonucleotide
agacauaguuaagugcuau

SEQ ID NO: 137016 - RNA, 19 nt, Artificial Sequence
  Description of Artificial Sequence: Synthetic oligonucleotide
agggaagcgcaaacaggcc

SEQ ID NO: 137017 - RNA, 19 nt, Artificial Sequence
  Description of Artificial Sequence: Synthetic oligonucleotide
acauggcccgagaacuacc

SEQ ID NO: 137018 - RNA, 19 nt, Artificial Sequence
  Description of Artificial Sequence: Synthetic oligonucleotide
acuggcaaucgugggcuac

SEQ ID NO: 137019 - RNA, 19 nt, Artificial Sequence
  Description of Artificial Sequence: Synthetic oligonucleotide
uagugacugguauauccuu

SEQ ID NO: 137020 - RNA, 19 nt, Artificial Sequence
  Description of Artificial Sequence: Synthetic oligonucleotide
caacuuaugcaaggaauca

SEQ ID NO: 137021 - RNA, 19 nt, Artificial Sequence
  Description of Artificial Sequence: Synthetic oligonucleotide
auccaaucuaggugcgacu

SEQ ID NO: 137022 - RNA, 19 nt, Artificial Sequence
  Description of Artificial Sequence: Synthetic oligonucleotide
cagcgacauuuauuguucc

SEQ ID NO: 137023 - RNA, 19 nt, Artificial Sequence
  Description of Artificial Sequence: Synthetic oligonucleotide
auuugcuacugacgggcau

SEQ ID NO: 137024 - RNA, 19 nt, Artificial Sequence
  Description of Artificial Sequence: Synthetic oligonucleotide
uugcuaagaguuacuucuu

SEQ ID NO: 137025 - RNA, 19 nt, Artificial Sequence
  Description of Artificial Sequence: Synthetic oligonucleotide
guauacccaugaucaggcc

SEQ ID NO: 137026 - RNA, 19 nt, Artificial Sequence
  Description of Artificial Sequence: Synthetic oligonucleotide
aaacuccagcguuggccca

SEQ ID NO: 137027 - RNA, 19 nt, Artificial Sequence
  Description of Artificial Sequence: Synthetic oligonucleotide
aacgcuuuuagggccugau

SEQ ID NO: 137028 - RNA, 19 nt, Artificial Sequence
  Description of Artificial Sequence: Synthetic oligonucleotide
cugcuaucaacaguuuguc

SEQ ID NO: 137029 - RNA, 19 nt, Artificial Sequence
  Description of Artificial Sequence: Synthetic oligonucleotide
ucauuacaacagggaaagc

SEQ ID NO: 137030 - RNA, 19 nt, Artificial Sequence
  Description of Artificial Sequence: Synthetic oligonucleotide
acaucuaaggaugggucuu

SEQ ID NO: 137031 - RNA, 19 nt, Artificial Sequence
  Description of Artificial Sequence: Synthetic oligonucleotide
aaacuccggaacccuccaa

SEQ ID NO: 137032 - RNA, 19 nt, Artificial Sequence
  Description of Artificial Sequence: Synthetic oligonucleotide
agcuguccuaccaaaggga

SEQ ID NO: 137033 - RNA, 19 nt, Artificial Sequence
  Description of Artificial Sequence: Synthetic oligonucleotide
cuccggaacccuccaacug

SEQ ID NO: 137034 - RNA, 19 nt, Artificial Sequence
  Description of Artificial Sequence: Synthetic oligonucleotide
gauuuucguggguuuggua

SEQ ID NO: 137035 - RNA, 19 nt, Artificial Sequence
  Description of Artificial Sequence: Synthetic oligonucleotide
cuguaagcguuuaaggaau

SEQ ID NO: 137036 - RNA, 19 nt, Artificial Sequence
  Description of Artificial Sequence: Synthetic oligonucleotide
cacgcauuaucucaaugcu

SEQ ID NO: 137037 - RNA, 19 nt, Artificial Sequence
  Description of Artificial Sequence: Synthetic oligonucleotide
caaaccuaacaccuauaua

SEQ ID NO: 137038 - RNA, 19 nt, Artificial Sequence
  Description of Artificial Sequence: Synthetic oligonucleotide
ugcuaugaguugccuggua

SEQ ID NO: 137039 - RNA, 19 nt, Artificial Sequence
  Description of Artificial Sequence: Synthetic oligonucleotide
cauggcccgagaacuacca

SEQ ID NO: 137040 - RNA, 19 nt, Artificial Sequence
  Description of Artificial Sequence: Synthetic oligonucleotide
gcauuugucggguaucaaa

SEQ ID NO: 137041 - RNA, 19 nt, Artificial Sequence
  Description of Artificial Sequence: Synthetic oligonucleotide
ccguuuuccuacaacaaga

SEQ ID NO: 137042 - RNA, 19 nt, Artificial Sequence
  Description of Artificial Sequence: Synthetic oligonucleotide
auaccaguaucgacugaug

SEQ ID NO: 137043 - RNA, 19 nt, Artificial Sequence
  Description of Artificial Sequence: Synthetic oligonucleotide
gucuacauuuuaacagauc

SEQ ID NO: 137044 - RNA, 19 nt, Artificial Sequence
  Description of Artificial Sequence: Synthetic oligonucleotide
cccgaucaaaugcaguuac

SEQ ID NO: 137045 - RNA, 19 nt, Artificial Sequence
  Description of Artificial Sequence: Synthetic oligonucleotide
cuuagguauuccucuaaau

SEQ ID NO: 137046 - RNA, 19 nt, Artificial Sequence
  Description of Artificial Sequence: Synthetic oligonucleotide
guaccaaccucauuuucau

SEQ ID NO: 137047 - RNA, 19 nt, Artificial Sequence
  Description of Artificial Sequence: Synthetic oligonucleotide
uugacucaggugacacaua

SEQ ID NO: 137048 - RNA, 19 nt, Artificial Sequence
  Description of Artificial Sequence: Synthetic oligonucleotide
uggaacgacuguuggccuu

SEQ ID NO: 137049 - RNA, 19 nt, Artificial Sequence
  Description of Artificial Sequence: Synthetic oligonucleotide
auacuccaucaugccauag

SEQ ID NO: 137050 - RNA, 19 nt, Artificial Sequence
  Description of Artificial Sequence: Synthetic oligonucleotide
gauuugcuacugacgggca

SEQ ID NO: 137051 - RNA, 19 nt, Artificial Sequence
  Description of Artificial Sequence: Synthetic oligonucleotide
agcguuuaaggaauuucuu

SEQ ID NO: 137052 - RNA, 19 nt, Artificial Sequence
  Description of Artificial Sequence: Synthetic oligonucleotide
cacagcccgacugucauga

SEQ ID NO: 137053 - RNA, 19 nt, Artificial Sequence
  Description of Artificial Sequence: Synthetic oligonucleotide
agcccgacugucaugagua

SEQ ID NO: 137054 - RNA, 19 nt, Artificial Sequence
  Description of Artificial Sequence: Synthetic oligonucleotide
augagcaggcuuagcuguc

SEQ ID NO: 137055 - RNA, 19 nt, Artificial Sequence
  Description of Artificial Sequence: Synthetic oligonucleotide
ucccgaucaaaugcaguua

SEQ ID NO: 137056 - RNA, 19 nt, Artificial Sequence
  Description of Artificial Sequence: Synthetic oligonucleotide
gauuucuaacauggcccga

SEQ ID NO: 137057 - RNA, 19 nt, Artificial Sequence
  Description of Artificial Sequence: Synthetic oligonucleotide
gaagaacgucaccuugaua

SEQ ID NO: 137058 - RNA, 19 nt, Artificial Sequence
  Description of Artificial Sequence: Synthetic oligonucleotide
auuugguugugaguccauu

SEQ ID NO: 137059 - RNA, 19 nt, Artificial Sequence
  Description of Artificial Sequence: Synthetic oligonucleotide
cacagcgacauuuauuguu

SEQ ID NO: 137060 - RNA, 19 nt, Artificial Sequence
  Description of Artificial Sequence: Synthetic oligonucleotide
aggagucgggacaucgaug

SEQ ID NO: 137061 - RNA, 19 nt, Artificial Sequence
  Description of Artificial Sequence: Synthetic oligonucleotide
auugucagagguggauuua

SEQ ID NO: 137062 - RNA, 19 nt, Artificial Sequence
  Description of Artificial Sequence: Synthetic oligonucleotide
gucccgaucaaaugcaguu

SEQ ID NO: 137063 - RNA, 19 nt, Artificial Sequence
  Description of Artificial Sequence: Synthetic oligonucleotide
acgagucaaacugccuaga

SEQ ID NO: 137064 - RNA, 19 nt, Artificial Sequence
  Description of Artificial Sequence: Synthetic oligonucleotide
gcugcuaucaacaguuugu

SEQ ID NO: 137065 - RNA, 19 nt, Artificial Sequence
  Description of Artificial Sequence: Synthetic oligonucleotide
gucggguaucaaaaggaaa

SEQ ID NO: 137066 - RNA, 19 nt, Artificial Sequence
  Description of Artificial Sequence: Synthetic oligonucleotide
cugccuauucgcuuuugcu

SEQ ID NO: 137067 - RNA, 19 nt, Artificial Sequence
  Description of Artificial Sequence: Synthetic oligonucleotide
uaucgacugauggcgugua

SEQ ID NO: 137068 - RNA, 19 nt, Artificial Sequence
  Description of Artificial Sequence: Synthetic oligonucleotide
cacggggccauuuaugaau

SEQ ID NO: 137069 - RNA, 19 nt, Artificial Sequence
  Description of Artificial Sequence: Synthetic oligonucleotide
uggcaaucgugggcuacca

SEQ ID NO: 137070 - RNA, 19 nt, Artificial Sequence
  Description of Artificial Sequence: Synthetic oligonucleotide
gccuauucgcuuuugcugu

SEQ ID NO: 137071 - RNA, 19 nt, Artificial Sequence
  Description of Artificial Sequence: Synthetic oligonucleotide
gggauuuauccugcuccag

SEQ ID NO: 137072 - RNA, 19 nt, Artificial Sequence
  Description of Artificial Sequence: Synthetic oligonucleotide
acaagucauuacagagggu

SEQ ID NO: 137073 - RNA, 19 nt, Artificial Sequence
  Description of Artificial Sequence: Synthetic oligonucleotide
aucgacugauggcguguaa

SEQ ID NO: 137074 - RNA, 19 nt, Artificial Sequence
  Description of Artificial Sequence: Synthetic oligonucleotide
uccuugcacauagcauuau

SEQ ID NO: 137075 - RNA, 19 nt, Artificial Sequence
  Description of Artificial Sequence: Synthetic oligonucleotide
cuaugaguugccugguauu

SEQ ID NO: 137076 - RNA, 19 nt, Artificial Sequence
  Description of Artificial Sequence: Synthetic oligonucleotide
ggcaaucgugggcuaccag

SEQ ID NO: 137077 - RNA, 19 nt, Artificial Sequence
  Description of Artificial Sequence: Synthetic oligonucleotide
gguuugguaucaaguaucu

SEQ ID NO: 137078 - RNA, 19 nt, Artificial Sequence
  Description of Artificial Sequence: Synthetic oligonucleotide
caagccuguaagcguuuaa

SEQ ID NO: 137079 - RNA, 19 nt, Artificial Sequence
  Description of Artificial Sequence: Synthetic oligonucleotide
gugcgacucugcugucuug

SEQ ID NO: 137080 - RNA, 19 nt, Artificial Sequence
  Description of Artificial Sequence: Synthetic oligonucleotide
gguugugaguccauuugua

SEQ ID NO: 137081 - RNA, 19 nt, Artificial Sequence
  Description of Artificial Sequence: Synthetic oligonucleotide
agagaccuacuggacccaa

SEQ ID NO: 137082 - RNA, 19 nt, Artificial Sequence
  Description of Artificial Sequence: Synthetic oligonucleotide
ggaacgacuguuggccuuc

SEQ ID NO: 137083 - RNA, 19 nt, Artificial Sequence
  Description of Artificial Sequence: Synthetic oligonucleotide
guaucgacugauggcgugu

SEQ ID NO: 137084 - RNA, 19 nt, Artificial Sequence
  Description of Artificial Sequence: Synthetic oligonucleotide
auggcguguaaaacucuua

SEQ ID NO: 137085 - RNA, 19 nt, Artificial Sequence
  Description of Artificial Sequence: Synthetic oligonucleotide
gcuguccuaccaaagggaa

SEQ ID NO: 137086 - RNA, 19 nt, Artificial Sequence
  Description of Artificial Sequence: Synthetic oligonucleotide
ucgggacaucgaugcaauu

SEQ ID NO: 137087 - RNA, 19 nt, Artificial Sequence
  Description of Artificial Sequence: Synthetic oligonucleotide
cagguuacuuacuguggau

SEQ ID NO: 137088 - RNA, 19 nt, Artificial Sequence
  Description of Artificial Sequence: Synthetic oligonucleotide
gggccauuuaugaauuaua

SEQ ID NO: 137089 - RNA, 19 nt, Artificial Sequence
  Description of Artificial Sequence: Synthetic oligonucleotide
ccugguauucuguuugggu

SEQ ID NO: 137090 - RNA, 19 nt, Artificial Sequence
  Description of Artificial Sequence: Synthetic oligonucleotide
auugcccggucccgaucaa

SEQ ID NO: 137091 - RNA, 19 nt, Artificial Sequence
  Description of Artificial Sequence: Synthetic oligonucleotide
guaagcguuuaaggaauuu

SEQ ID NO: 137092 - RNA, 19 nt, Artificial Sequence
  Description of Artificial Sequence: Synthetic oligonucleotide
caguaucgacugauggcgu

SEQ ID NO: 137093 - RNA, 19 nt, Artificial Sequence
  Description of Artificial Sequence: Synthetic oligonucleotide
caggagucgggacaucgau

SEQ ID NO: 137094 - RNA, 19 nt, Artificial Sequence
  Description of Artificial Sequence: Synthetic oligonucleotide
acaaaggggcccagaucuu

SEQ ID NO: 137095 - RNA, 19 nt, Artificial Sequence
  Description of Artificial Sequence: Synthetic oligonucleotide
cggcaacuuaagauaguuc

SEQ ID NO: 137096 - RNA, 19 nt, Artificial Sequence
  Description of Artificial Sequence: Synthetic oligonucleotide
gugggcuaccagucacaaa

SEQ ID NO: 137097 - RNA, 19 nt, Artificial Sequence
  Description of Artificial Sequence: Synthetic oligonucleotide
ccgaucaaaugcaguuaca

SEQ ID NO: 137098 - RNA, 19 nt, Artificial Sequence
  Description of Artificial Sequence: Synthetic oligonucleotide
ccggucccgaucaaaugca

SEQ ID NO: 137099 - RNA, 19 nt, Artificial Sequence
  Description of Artificial Sequence: Synthetic oligonucleotide
ccgcacaauugucagaggu

SEQ ID NO: 137100 - RNA, 19 nt, Artificial Sequence
  Description of Artificial Sequence: Synthetic oligonucleotide
ccccuccaaguaacauugc

SEQ ID NO: 137101 - RNA, 19 nt, Artificial Sequence
  Description of Artificial Sequence: Synthetic oligonucleotide
guuugguaucaaguaucuu

SEQ ID NO: 137102 - RNA, 19 nt, Artificial Sequence
  Description of Artificial Sequence: Synthetic oligonucleotide
cggucccgaucaaaugcag

SEQ ID NO: 137103 - RNA, 19 nt, Artificial Sequence
  Description of Artificial Sequence: Synthetic oligonucleotide
gaacgacuguuggccuucu

SEQ ID NO: 137104 - RNA, 19 nt, Artificial Sequence
  Description of Artificial Sequence: Synthetic oligonucleotide
ccaaucuaggugcgacucu

SEQ ID NO: 137105 - RNA, 19 nt, Artificial Sequence
  Description of Artificial Sequence: Synthetic oligonucleotide
ccacggggccauuuaugaa

SEQ ID NO: 137106 - RNA, 19 nt, Artificial Sequence
  Description of Artificial Sequence: Synthetic oligonucleotide
ccggcaacuuaagauaguu

SEQ ID NO: 137107 - RNA, 19 nt, Artificial Sequence
  Description of Artificial Sequence: Synthetic oligonucleotide
gcguuggcccaagaccugu

SEQ ID NO: 137108 - RNA, 19 nt, Artificial Sequence
  Description of Artificial Sequence: Synthetic oligonucleotide
cgggacaucgaugcaauuu

SEQ ID NO: 137109 - RNA, 19 nt, Artificial Sequence
  Description of Artificial Sequence: Synthetic oligonucleotide
ccuauucgcuuuugcuguu

SEQ ID NO: 137110 - RNA, 19 nt, Artificial Sequence
  Description of Artificial Sequence: Synthetic oligonucleotide
gcccgacugucaugaguau

SEQ ID NO: 137111 - RNA, 19 nt, Artificial Sequence
  Description of Artificial Sequence: Synthetic oligonucleotide
uuugaguugaaucuggucu

SEQ ID NO: 137112 - RNA, 19 nt, Artificial Sequence
  Description of Artificial Sequence: Synthetic oligonucleotide
auucguaaugcauacaagg

SEQ ID NO: 137113 - RNA, 19 nt, Artificial Sequence
  Description of Artificial Sequence: Synthetic oligonucleotide
aauaucgaccaguagagca

SEQ ID NO: 137114 - RNA, 19 nt, Artificial Sequence
  Description of Artificial Sequence: Synthetic oligonucleotide
aauuuagcgauauggaccu

SEQ ID NO: 137115 - RNA, 19 nt, Artificial Sequence
  Description of Artificial Sequence: Synthetic oligonucleotide
aacacguacagccacgcgg

SEQ ID NO: 137116 - RNA, 19 nt, Artificial Sequence
  Description of Artificial Sequence: Synthetic oligonucleotide
agaauuuagcgauauggac

SEQ ID NO: 137117 - RNA, 19 nt, Artificial Sequence
  Description of Artificial Sequence: Synthetic oligonucleotide
uuaugaaacaggugcaggg

SEQ ID NO: 137118 - RNA, 19 nt, Artificial Sequence
  Description of Artificial Sequence: Synthetic oligonucleotide
ucaugaaccguuuuccugg

SEQ ID NO: 137119 - RNA, 19 nt, Artificial Sequence
  Description of Artificial Sequence: Synthetic oligonucleotide
auagacuugugcuaugaac

SEQ ID NO: 137120 - RNA, 19 nt, Artificial Sequence
  Description of Artificial Sequence: Synthetic oligonucleotide
uagacuugugcuaugaaca

SEQ ID NO: 137121 - RNA, 19 nt, Artificial Sequence
  Description of Artificial Sequence: Synthetic oligonucleotide
uuggcuaccuuucaugagg

SEQ ID NO: 137122 - RNA, 19 nt, Artificial Sequence
  Description of Artificial Sequence: Synthetic oligonucleotide
gaauuuagcgauauggacc

SEQ ID NO: 137123 - RNA, 19 nt, Artificial Sequence
  Description of Artificial Sequence: Synthetic oligonucleotide
ugggaaguagucaugacug

SEQ ID NO: 137124 - RNA, 19 nt, Artificial Sequence
  Description of Artificial Sequence: Synthetic oligonucleotide
auagguggagaguaagacc

SEQ ID NO: 137125 - RNA, 19 nt, Artificial Sequence
  Description of Artificial Sequence: Synthetic oligonucleotide
cugaauucaggaaugguag

SEQ ID NO: 137126 - RNA, 19 nt, Artificial Sequence
  Description of Artificial Sequence: Synthetic oligonucleotide
aauucuuagaugguuugag

SEQ ID NO: 137127 - RNA, 19 nt, Artificial Sequence
  Description of Artificial Sequence: Synthetic oligonucleotide
ucagcgaguucacacauag

SEQ ID NO: 137128 - RNA, 19 nt, Artificial Sequence
  Description of Artificial Sequence: Synthetic oligonucleotide
aaacccauuuaucagcccu

SEQ ID NO: 137129 - RNA, 19 nt, Artificial Sequence
  Description of Artificial Sequence: Synthetic oligonucleotide
aacccucgaaaccagugac

SEQ ID NO: 137130 - RNA, 19 nt, Artificial Sequence
  Description of Artificial Sequence: Synthetic oligonucleotide
cucugucuaaaauagaguc

SEQ ID NO: 137131 - RNA, 19 nt, Artificial Sequence
  Description of Artificial Sequence: Synthetic oligonucleotide
uugugcauaaguuaugaaa

SEQ ID NO: 137132 - RNA, 19 nt, Artificial Sequence
  Description of Artificial Sequence: Synthetic oligonucleotide
cucuuagaggaaaagcacg

SEQ ID NO: 137133 - RNA, 19 nt, Artificial Sequence
  Description of Artificial Sequence: Synthetic oligonucleotide
uguuaauggggcaacauuu

SEQ ID NO: 137134 - RNA, 19 nt, Artificial Sequence
  Description of Artificial Sequence: Synthetic oligonucleotide
aaauuguuaauggggcaac

SEQ ID NO: 137135 - RNA, 19 nt, Artificial Sequence
  Description of Artificial Sequence: Synthetic oligonucleotide
guagcuugguacuagggag

SEQ ID NO: 137136 - RNA, 19 nt, Artificial Sequence
  Description of Artificial Sequence: Synthetic oligonucleotide
auuggcgauguucucgggc

SEQ ID NO: 137137 - RNA, 19 nt, Artificial Sequence
  Description of Artificial Sequence: Synthetic oligonucleotide
agcgauauggaccuuccag

SEQ ID NO: 137138 - RNA, 19 nt, Artificial Sequence
  Description of Artificial Sequence: Synthetic oligonucleotide
uccuauuugucuugggugc

SEQ ID NO: 137139 - RNA, 19 nt, Artificial Sequence
  Description of Artificial Sequence: Synthetic oligonucleotide
cugagaagcaacuacccac

SEQ ID NO: 137140 - RNA, 19 nt, Artificial Sequence
  Description of Artificial Sequence: Synthetic oligonucleotide
uugggugcuaauaauuaga

SEQ ID NO: 137141 - RNA, 19 nt, Artificial Sequence
  Description of Artificial Sequence: Synthetic oligonucleotide
ugagaagcaacuacccaca

SEQ ID NO: 137142 - RNA, 19 nt, Artificial Sequence
  Description of Artificial Sequence: Synthetic oligonucleotide
augacugcaugugauauuc

SEQ ID NO: 137143 - RNA, 19 nt, Artificial Sequence
  Description of Artificial Sequence: Synthetic oligonucleotide
aaucaugaaccguuuuccu

SEQ ID NO: 137144 - RNA, 19 nt, Artificial Sequence
  Description of Artificial Sequence: Synthetic oligonucleotide
caccuuaucacuguagggg

SEQ ID NO: 137145 - RNA, 19 nt, Artificial Sequence
  Description of Artificial Sequence: Synthetic oligonucleotide
cuuccuauggagcuaggcc

SEQ ID NO: 137146 - RNA, 19 nt, Artificial Sequence
  Description of Artificial Sequence: Synthetic oligonucleotide
agagacucggggaauaucg

SEQ ID NO: 137147 - RNA, 19 nt, Artificial Sequence
  Description of Artificial Sequence: Synthetic oligonucleotide
uucagagcucaacauagac

SEQ ID NO: 137148 - RNA, 19 nt, Artificial Sequence
  Description of Artificial Sequence: Synthetic oligonucleotide
uuuaagacuaggacucuuc

SEQ ID NO: 137149 - RNA, 19 nt, Artificial Sequence
  Description of Artificial Sequence: Synthetic oligonucleotide
uucugaccugaucagacca

SEQ ID NO: 137150 - RNA, 19 nt, Artificial Sequence
  Description of Artificial Sequence: Synthetic oligonucleotide
agaguaagaccuuguaaug

SEQ ID NO: 137151 - RNA, 19 nt, Artificial Sequence
  Description of Artificial Sequence: Synthetic oligonucleotide
gaaccugacuaccacacac

SEQ ID NO: 137152 - RNA, 19 nt, Artificial Sequence
  Description of Artificial Sequence: Synthetic oligonucleotide
aguugaaucuggucucaac

SEQ ID NO: 137153 - RNA, 19 nt, Artificial Sequence
  Description of Artificial Sequence: Synthetic oligonucleotide
guacuagggagcuaggcug

SEQ ID NO: 137154 - RNA, 19 nt, Artificial Sequence
  Description of Artificial Sequence: Synthetic oligonucleotide
ggcgguaaggaucauaaag

SEQ ID NO: 137155 - RNA, 19 nt, Artificial Sequence
  Description of Artificial Sequence: Synthetic oligonucleotide
gauagguggagaguaagac

SEQ ID NO: 137156 - RNA, 19 nt, Artificial Sequence
  Description of Artificial Sequence: Synthetic oligonucleotide
uaaucugugugcaaacuuu

SEQ ID NO: 137157 - RNA, 19 nt, Artificial Sequence
  Description of Artificial Sequence: Synthetic oligonucleotide
ucacuagacacaacacacc

SEQ ID NO: 137158 - RNA, 19 nt, Artificial Sequence
  Description of Artificial Sequence: Synthetic oligonucleotide
uuaaucugugugcaaacuu

SEQ ID NO: 137159 - RNA, 19 nt, Artificial Sequence
  Description of Artificial Sequence: Synthetic oligonucleotide
ucgggcaacaggaggaugc

SEQ ID NO: 137160 - RNA, 19 nt, Artificial Sequence
  Description of Artificial Sequence: Synthetic oligonucleotide
acuccggccaggcaaaauc

SEQ ID NO: 137161 - RNA, 19 nt, Artificial Sequence
  Description of Artificial Sequence: Synthetic oligonucleotide
cauccaguuauuagguagc

SEQ ID NO: 137162 - RNA, 19 nt, Artificial Sequence
  Description of Artificial Sequence: Synthetic oligonucleotide
uuagcgauauggaccuucc

SEQ ID NO: 137163 - RNA, 19 nt, Artificial Sequence
  Description of Artificial Sequence: Synthetic oligonucleotide
agcguagaaguucuccagg

SEQ ID NO: 137164 - RNA, 19 nt, Artificial Sequence
  Description of Artificial Sequence: Synthetic oligonucleotide
aucaugaaccguuuuccug

SEQ ID NO: 137165 - RNA, 19 nt, Artificial Sequence
  Description of Artificial Sequence: Synthetic oligonucleotide
cuugggugcuaauaauuag

SEQ ID NO: 137166 - RNA, 19 nt, Artificial Sequence
  Description of Artificial Sequence: Synthetic oligonucleotide
acaccuuaucacuguaggg

SEQ ID NO: 137167 - RNA, 19 nt, Artificial Sequence
  Description of Artificial Sequence: Synthetic oligonucleotide
uaauuagauauuucauaau

SEQ ID NO: 137168 - RNA, 19 nt, Artificial Sequence
  Description of Artificial Sequence: Synthetic oligonucleotide
gggaauaucgaccaguaga

SEQ ID NO: 137169 - RNA, 19 nt, Artificial Sequence
  Description of Artificial Sequence: Synthetic oligonucleotide
agacuugugcuaugaacag

SEQ ID NO: 137170 - RNA, 19 nt, Artificial Sequence
  Description of Artificial Sequence: Synthetic oligonucleotide
agacucggggaauaucgac

SEQ ID NO: 137171 - RNA, 19 nt, Artificial Sequence
  Description of Artificial Sequence: Synthetic oligonucleotide
cucuauucguaaugcauac

SEQ ID NO: 137172 - RNA, 19 nt, Artificial Sequence
  Description of Artificial Sequence: Synthetic oligonucleotide
auauggaccuuccaggcau

SEQ ID NO: 137173 - RNA, 19 nt, Artificial Sequence
  Description of Artificial Sequence: Synthetic oligonucleotide
cucagagugacccugccuc

SEQ ID NO: 137174 - RNA, 19 nt, Artificial Sequence
  Description of Artificial Sequence: Synthetic oligonucleotide
uuuccccgaagguacaaca

SEQ ID NO: 137175 - RNA, 19 nt, Artificial Sequence
  Description of Artificial Sequence: Synthetic oligonucleotide
uccuauggagcuaggccag

SEQ ID NO: 137176 - RNA, 19 nt, Artificial Sequence
  Description of Artificial Sequence: Synthetic oligonucleotide
uacagaugaccucugucuc

SEQ ID NO: 137177 - RNA, 19 nt, Artificial Sequence
  Description of Artificial Sequence: Synthetic oligonucleotide
aaguuaugaaacaggugca

SEQ ID NO: 137178 - RNA, 19 nt, Artificial Sequence
  Description of Artificial Sequence: Synthetic oligonucleotide
gcauccaguuauuagguag

SEQ ID NO: 137179 - RNA, 19 nt, Artificial Sequence
  Description of Artificial Sequence: Synthetic oligonucleotide
agaacgagaggccccacca

SEQ ID NO: 137180 - RNA, 19 nt, Artificial Sequence
  Description of Artificial Sequence: Synthetic oligonucleotide
uguggccaucuuccuaugg

SEQ ID NO: 137181 - RNA, 19 nt, Artificial Sequence
  Description of Artificial Sequence: Synthetic oligonucleotide
acagaugcgacaccaugca

SEQ ID NO: 137182 - RNA, 19 nt, Artificial Sequence
  Description of Artificial Sequence: Synthetic oligonucleotide
gguacugguggaauggugg

SEQ ID NO: 137183 - RNA, 19 nt, Artificial Sequence
  Description of Artificial Sequence: Synthetic oligonucleotide
acacguacagccacgcggc

SEQ ID NO: 137184 - RNA, 19 nt, Artificial Sequence
  Description of Artificial Sequence: Synthetic oligonucleotide
gauaccaucaggugaggua

SEQ ID NO: 137185 - RNA, 19 nt, Artificial Sequence
  Description of Artificial Sequence: Synthetic oligonucleotide
uuccccgaagguacaacag

SEQ ID NO: 137186 - RNA, 19 nt, Artificial Sequence
  Description of Artificial Sequence: Synthetic oligonucleotide
gaccuuguaauguucccca

SEQ ID NO: 137187 - RNA, 19 nt, Artificial Sequence
  Description of Artificial Sequence: Synthetic oligonucleotide
gauauucccuuuaugaggu

SEQ ID NO: 137188 - RNA, 19 nt, Artificial Sequence
  Description of Artificial Sequence: Synthetic oligonucleotide
auaucgaccaguagagcag

SEQ ID NO: 137189 - RNA, 19 nt, Artificial Sequence
  Description of Artificial Sequence: Synthetic oligonucleotide
aaccguuuuccuggagggc

SEQ ID NO: 137190 - RNA, 19 nt, Artificial Sequence
  Description of Artificial Sequence: Synthetic oligonucleotide
aauuguuaauggggcaaca

SEQ ID NO: 137191 - RNA, 19 nt, Artificial Sequence
  Description of Artificial Sequence: Synthetic oligonucleotide
agugugggccuccuucaac

SEQ ID NO: 137192 - RNA, 19 nt, Artificial Sequence
  Description of Artificial Sequence: Synthetic oligonucleotide
guagucaugacugcaugug

SEQ ID NO: 137193 - RNA, 19 nt, Artificial Sequence
  Description of Artificial Sequence: Synthetic oligonucleotide
uaagacuaggacucuucaa

SEQ ID NO: 137194 - RNA, 19 nt, Artificial Sequence
  Description of Artificial Sequence: Synthetic oligonucleotide
acauacaaauuuuccccga

SEQ ID NO: 137195 - RNA, 19 nt, Artificial Sequence
  Description of Artificial Sequence: Synthetic oligonucleotide
uuuaugaggucugguuuug

SEQ ID NO: 137196 - RNA, 19 nt, Artificial Sequence
  Description of Artificial Sequence: Synthetic oligonucleotide
acucggggaauaucgacca

SEQ ID NO: 137197 - RNA, 19 nt, Artificial Sequence
  Description of Artificial Sequence: Synthetic oligonucleotide
acagguuccgcguccccac

SEQ ID NO: 137198 - RNA, 19 nt, Artificial Sequence
  Description of Artificial Sequence: Synthetic oligonucleotide
gcuacauggacuucaugcc

SEQ ID NO: 137199 - RNA, 19 nt, Artificial Sequence
  Description of Artificial Sequence: Synthetic oligonucleotide
uuuagcgauauggaccuuc

SEQ ID NO: 137200 - RNA, 19 nt, Artificial Sequence
  Description of Artificial Sequence: Synthetic oligonucleotide
guguguaauggucaugaga

SEQ ID NO: 137201 - RNA, 19 nt, Artificial Sequence
  Description of Artificial Sequence: Synthetic oligonucleotide
gacucggggaauaucgacc

SEQ ID NO: 137202 - RNA, 19 nt, Artificial Sequence
  Description of Artificial Sequence: Synthetic oligonucleotide
aaagcacgcaugguggggu

SEQ ID NO: 137203 - RNA, 19 nt, Artificial Sequence
  Description of Artificial Sequence: Synthetic oligonucleotide
uuugugcauaaguuaugaa

SEQ ID NO: 137204 - RNA, 19 nt, Artificial Sequence
  Description of Artificial Sequence: Synthetic oligonucleotide
gacucuucaagcagaacga

SEQ ID NO: 137205 - RNA, 19 nt, Artificial Sequence
  Description of Artificial Sequence: Synthetic oligonucleotide
uaugaggucugguuuugau

SEQ ID NO: 137206 - RNA, 19 nt, Artificial Sequence
  Description of Artificial Sequence: Synthetic oligonucleotide
ucacacauagaaccacgau

SEQ ID NO: 137207 - RNA, 19 nt, Artificial Sequence
  Description of Artificial Sequence: Synthetic oligonucleotide
gauauggaccuuccaggca

SEQ ID NO: 137208 - RNA, 19 nt, Artificial Sequence
  Description of Artificial Sequence: Synthetic oligonucleotide
ugggugauuauagucuuaa

SEQ ID NO: 137209 - RNA, 19 nt, Artificial Sequence
  Description of Artificial Sequence: Synthetic oligonucleotide
ucuuccuauggagcuaggc

SEQ ID NO: 137210 - RNA, 19 nt, Artificial Sequence
  Description of Artificial Sequence: Synthetic oligonucleotide
cacuagacacaacacacca

SEQ ID NO: 137211 - RNA, 19 nt, Artificial Sequence
  Description of Artificial Sequence: Synthetic oligonucleotide
aggcacaacuguccacggc

SEQ ID NO: 137212 - RNA, 19 nt, Artificial Sequence
  Description of Artificial Sequence: Synthetic oligonucleotide
uacuagggagcuaggcugu

SEQ ID NO: 137213 - RNA, 19 nt, Artificial Sequence
  Description of Artificial Sequence: Synthetic oligonucleotide
ucaacacguacagccacgc

SEQ ID NO: 137214 - RNA, 19 nt, Artificial Sequence
  Description of Artificial Sequence: Synthetic oligonucleotide
ggaccaguaccugagaagc

SEQ ID NO: 137215 - RNA, 19 nt, Artificial Sequence
  Description of Artificial Sequence: Synthetic oligonucleotide
ucgucuacauggaggauuu

SEQ ID NO: 137216 - RNA, 19 nt, Artificial Sequence
  Description of Artificial Sequence: Synthetic oligonucleotide
uggagaguaagaccuugua

SEQ ID NO: 137217 - RNA, 19 nt, Artificial Sequence
  Description of Artificial Sequence: Synthetic oligonucleotide
gaacccucgaaaccaguga

SEQ ID NO: 137218 - RNA, 19 nt, Artificial Sequence
  Description of Artificial Sequence: Synthetic oligonucleotide
ugaucagaccacacagcaa

SEQ ID NO: 137219 - RNA, 19 nt, Artificial Sequence
  Description of Artificial Sequence: Synthetic oligonucleotide
gaagugugggccuccuuca

SEQ ID NO: 137220 - RNA, 19 nt, Artificial Sequence
  Description of Artificial Sequence: Synthetic oligonucleotide
ugucuugggugcuaauaau

SEQ ID NO: 137221 - RNA, 19 nt, Artificial Sequence
  Description of Artificial Sequence: Synthetic oligonucleotide
gaauaucgaccaguagagc

SEQ ID NO: 137222 - RNA, 19 nt, Artificial Sequence
  Description of Artificial Sequence: Synthetic oligonucleotide
ugcaagccggaguaguccu

SEQ ID NO: 137223 - RNA, 19 nt, Artificial Sequence
  Description of Artificial Sequence: Synthetic oligonucleotide
acagccacgcggcucuuag

SEQ ID NO: 137224 - RNA, 19 nt, Artificial Sequence
  Description of Artificial Sequence: Synthetic oligonucleotide
cuacagaugaccucugucu

SEQ ID NO: 137225 - RNA, 19 nt, Artificial Sequence
  Description of Artificial Sequence: Synthetic oligonucleotide
cagcguagaaguucuccag

SEQ ID NO: 137226 - RNA, 19 nt, Artificial Sequence
  Description of Artificial Sequence: Synthetic oligonucleotide
uaucgaccaguagagcagc

SEQ ID NO: 137227 - RNA, 19 nt, Artificial Sequence
  Description of Artificial Sequence: Synthetic oligonucleotide
acaucgugcaagccggagu

SEQ ID NO: 137228 - RNA, 19 nt, Artificial Sequence
  Description of Artificial Sequence: Synthetic oligonucleotide
uccgugaguggagaaggag

SEQ ID NO: 137229 - RNA, 19 nt, Artificial Sequence
  Description of Artificial Sequence: Synthetic oligonucleotide
ucagaccacacagcaagcu

SEQ ID NO: 137230 - RNA, 19 nt, Artificial Sequence
  Description of Artificial Sequence: Synthetic oligonucleotide
auagagucccaagaaugcu

SEQ ID NO: 137231 - RNA, 19 nt, Artificial Sequence
  Description of Artificial Sequence: Synthetic oligonucleotide
ugacugcaugugauauucc

SEQ ID NO: 137232 - RNA, 19 nt, Artificial Sequence
  Description of Artificial Sequence: Synthetic oligonucleotide
cacagucaguccaaagauc

SEQ ID NO: 137233 - RNA, 19 nt, Artificial Sequence
  Description of Artificial Sequence: Synthetic oligonucleotide
aggaugacuccggccaggc

SEQ ID NO: 137234 - RNA, 19 nt, Artificial Sequence
  Description of Artificial Sequence: Synthetic oligonucleotide
ggucucgucuacauggagg

SEQ ID NO: 137235 - RNA, 19 nt, Artificial Sequence
  Description of Artificial Sequence: Synthetic oligonucleotide
gguagcuugguacuaggga

SEQ ID NO: 137236 - RNA, 19 nt, Artificial Sequence
  Description of Artificial Sequence: Synthetic oligonucleotide
ucguggcccaucaugcuuc

SEQ ID NO: 137237 - RNA, 19 nt, Artificial Sequence
  Description of Artificial Sequence: Synthetic oligonucleotide
ucaugccauuggcaguggc

SEQ ID NO: 137238 - RNA, 19 nt, Artificial Sequence
  Description of Artificial Sequence: Synthetic oligonucleotide
ucggggaauaucgaccagu

SEQ ID NO: 137239 - RNA, 19 nt, Artificial Sequence
  Description of Artificial Sequence: Synthetic oligonucleotide
agcucaauaaugggugcug

SEQ ID NO: 137240 - RNA, 19 nt, Artificial Sequence
  Description of Artificial Sequence: Synthetic oligonucleotide
agcucuauucguaaugcau

SEQ ID NO: 137241 - RNA, 19 nt, Artificial Sequence
  Description of Artificial Sequence: Synthetic oligonucleotide
aggagaauuuagcgauaug

SEQ ID NO: 137242 - RNA, 19 nt, Artificial Sequence
  Description of Artificial Sequence: Synthetic oligonucleotide
ggcacaacuguccacggca

SEQ ID NO: 137243 - RNA, 19 nt, Artificial Sequence
  Description of Artificial Sequence: Synthetic oligonucleotide
aauuuuccccgaagguaca

SEQ ID NO: 137244 - RNA, 19 nt, Artificial Sequence
  Description of Artificial Sequence: Synthetic oligonucleotide
ccaguuauuagguagccaa

SEQ ID NO: 137245 - RNA, 19 nt, Artificial Sequence
  Description of Artificial Sequence: Synthetic oligonucleotide
uauuugucuugggugcuaa

SEQ ID NO: 137246 - RNA, 19 nt, Artificial Sequence
  Description of Artificial Sequence: Synthetic oligonucleotide
cugcuggguagccauuagc

SEQ ID NO: 137247 - RNA, 19 nt, Artificial Sequence
  Description of Artificial Sequence: Synthetic oligonucleotide
gagacugagucuggccucc

SEQ ID NO: 137248 - RNA, 19 nt, Artificial Sequence
  Description of Artificial Sequence: Synthetic oligonucleotide
aggucucgucuacauggag

SEQ ID NO: 137249 - RNA, 19 nt, Artificial Sequence
  Description of Artificial Sequence: Synthetic oligonucleotide
agaacaaggaggaggugaa

SEQ ID NO: 137250 - RNA, 19 nt, Artificial Sequence
  Description of Artificial Sequence: Synthetic oligonucleotide
ggagaguaagaccuuguaa

SEQ ID NO: 137251 - RNA, 19 nt, Artificial Sequence
  Description of Artificial Sequence: Synthetic oligonucleotide
cagaacgagaggccccacc

SEQ ID NO: 137252 - RNA, 19 nt, Artificial Sequence
  Description of Artificial Sequence: Synthetic oligonucleotide
uuuuguggccaaacccauu

SEQ ID NO: 137253 - RNA, 19 nt, Artificial Sequence
  Description of Artificial Sequence: Synthetic oligonucleotide
uugcaaagcaaugguggau

SEQ ID NO: 137254 - RNA, 19 nt, Artificial Sequence
  Description of Artificial Sequence: Synthetic oligonucleotide
caccucguggcccaucaug

SEQ ID NO: 137255 - RNA, 19 nt, Artificial Sequence
  Description of Artificial Sequence: Synthetic oligonucleotide
uccuggccuacagaugacc

SEQ ID NO: 137256 - RNA, 19 nt, Artificial Sequence
  Description of Artificial Sequence: Synthetic oligonucleotide
gaacaaggaggaggugaag

SEQ ID NO: 137257 - RNA, 19 nt, Artificial Sequence
  Description of Artificial Sequence: Synthetic oligonucleotide
cacgaagcuugccaccaug

SEQ ID NO: 137258 - RNA, 19 nt, Artificial Sequence
  Description of Artificial Sequence: Synthetic oligonucleotide
uagcgauauggaccuucca

SEQ ID NO: 137259 - RNA, 19 nt, Artificial Sequence
  Description of Artificial Sequence: Synthetic oligonucleotide
caacacguacagccacgcg

SEQ ID NO: 137260 - RNA, 19 nt, Artificial Sequence
  Description of Artificial Sequence: Synthetic oligonucleotide
cgaagguacaacagaugcg

SEQ ID NO: 137261 - RNA, 19 nt, Artificial Sequence
  Description of Artificial Sequence: Synthetic oligonucleotide
gcucuuagaggaaaagcac

SEQ ID NO: 137262 - RNA, 19 nt, Artificial Sequence
  Description of Artificial Sequence: Synthetic oligonucleotide
ggguguguaauggucauga

SEQ ID NO: 137263 - RNA, 19 nt, Artificial Sequence
  Description of Artificial Sequence: Synthetic oligonucleotide
gugcaagccggaguagucc

SEQ ID NO: 137264 - RNA, 19 nt, Artificial Sequence
  Description of Artificial Sequence: Synthetic oligonucleotide
cuacccacaggagcacagg

SEQ ID NO: 137265 - RNA, 19 nt, Artificial Sequence
  Description of Artificial Sequence: Synthetic oligonucleotide
gaaucuggucucaaccucu

SEQ ID NO: 137266 - RNA, 19 nt, Artificial Sequence
  Description of Artificial Sequence: Synthetic oligonucleotide
cauuggcgauguucucggg

SEQ ID NO: 137267 - RNA, 19 nt, Artificial Sequence
  Description of Artificial Sequence: Synthetic oligonucleotide
caucgugcaagccggagua

SEQ ID NO: 137268 - RNA, 19 nt, Artificial Sequence
  Description of Artificial Sequence: Synthetic oligonucleotide
cgauauggaccuuccaggc

SEQ ID NO: 137269 - RNA, 19 nt, Artificial Sequence
  Description of Artificial Sequence: Synthetic oligonucleotide
cacgcagcugugaauggca

SEQ ID NO: 137270 - RNA, 19 nt, Artificial Sequence
  Description of Artificial Sequence: Synthetic oligonucleotide
gguacuagggagcuaggcu

SEQ ID NO: 137271 - RNA, 19 nt, Artificial Sequence
  Description of Artificial Sequence: Synthetic oligonucleotide
caagccggaguaguccuug

SEQ ID NO: 137272 - RNA, 19 nt, Artificial Sequence
  Description of Artificial Sequence: Synthetic oligonucleotide
gacaccaugcagacacgca

SEQ ID NO: 137273 - RNA, 19 nt, Artificial Sequence
  Description of Artificial Sequence: Synthetic oligonucleotide
guggccaaacccauuuauc

SEQ ID NO: 137274 - RNA, 19 nt, Artificial Sequence
  Description of Artificial Sequence: Synthetic oligonucleotide
ggagcguuccucacuagac

SEQ ID NO: 137275 - RNA, 19 nt, Artificial Sequence
  Description of Artificial Sequence: Synthetic oligonucleotide
cauagccacgaagcuugcc

SEQ ID NO: 137276 - RNA, 19 nt, Artificial Sequence
  Description of Artificial Sequence: Synthetic oligonucleotide
uggguguguaauggucaug

SEQ ID NO: 137277 - RNA, 19 nt, Artificial Sequence
  Description of Artificial Sequence: Synthetic oligonucleotide
ccuacagaugaccucuguc

SEQ ID NO: 137278 - RNA, 19 nt, Artificial Sequence
  Description of Artificial Sequence: Synthetic oligonucleotide
cauagacuugugcuaugaa

SEQ ID NO: 137279 - RNA, 19 nt, Artificial Sequence
  Description of Artificial Sequence: Synthetic oligonucleotide
uauggaccuuccaggcauu

SEQ ID NO: 137280 - RNA, 19 nt, Artificial Sequence
  Description of Artificial Sequence: Synthetic oligonucleotide
caugaaccguuuuccugga

SEQ ID NO: 137281 - RNA, 19 nt, Artificial Sequence
  Description of Artificial Sequence: Synthetic oligonucleotide
gagacucggggaauaucga

SEQ ID NO: 137282 - RNA, 19 nt, Artificial Sequence
  Description of Artificial Sequence: Synthetic oligonucleotide
ucgaccaguagagcagcau

SEQ ID NO: 137283 - RNA, 19 nt, Artificial Sequence
  Description of Artificial Sequence: Synthetic oligonucleotide
agagcucaacauagacuug

SEQ ID NO: 137284 - RNA, 19 nt, Artificial Sequence
  Description of Artificial Sequence: Synthetic oligonucleotide
acccauuuaucagcccugu

SEQ ID NO: 137285 - RNA, 19 nt, Artificial Sequence
  Description of Artificial Sequence: Synthetic oligonucleotide
ggaggauuuuauuacucau

SEQ ID NO: 137286 - RNA, 19 nt, Artificial Sequence
  Description of Artificial Sequence: Synthetic oligonucleotide
gguagugaaaugcccuugu

SEQ ID NO: 137287 - RNA, 19 nt, Artificial Sequence
  Description of Artificial Sequence: Synthetic oligonucleotide
cagcucuauucguaaugca

SEQ ID NO: 137288 - RNA, 19 nt, Artificial Sequence
  Description of Artificial Sequence: Synthetic oligonucleotide
cugcaugugauauucccuu

SEQ ID NO: 137289 - RNA, 19 nt, Artificial Sequence
  Description of Artificial Sequence: Synthetic oligonucleotide
agguuccgcguccccacca

SEQ ID NO: 137290 - RNA, 19 nt, Artificial Sequence
  Description of Artificial Sequence: Synthetic oligonucleotide
cucggggaauaucgaccag

SEQ ID NO: 137291 - RNA, 19 nt, Artificial Sequence
  Description of Artificial Sequence: Synthetic oligonucleotide
ccuccgugaaaguucuuuc

SEQ ID NO: 137292 - RNA, 19 nt, Artificial Sequence
  Description of Artificial Sequence: Synthetic oligonucleotide
ggauagguggagaguaaga

SEQ ID NO: 137293 - RNA, 19 nt, Artificial Sequence
  Description of Artificial Sequence: Synthetic oligonucleotide
aucgugcaagccggaguag

SEQ ID NO: 137294 - RNA, 19 nt, Artificial Sequence
  Description of Artificial Sequence: Synthetic oligonucleotide
uugccaccaugguaaucau

SEQ ID NO: 137295 - RNA, 19 nt, Artificial Sequence
  Description of Artificial Sequence: Synthetic oligonucleotide
gcucuauucguaaugcaua

SEQ ID NO: 137296 - RNA, 19 nt, Artificial Sequence
  Description of Artificial Sequence: Synthetic oligonucleotide
guuaauggggcaacauuuu

SEQ ID NO: 137297 - RNA, 19 nt, Artificial Sequence
  Description of Artificial Sequence: Synthetic oligonucleotide
gggagcguuccucacuaga

SEQ ID NO: 137298 - RNA, 19 nt, Artificial Sequence
  Description of Artificial Sequence: Synthetic oligonucleotide
caacauagacuugugcuau

SEQ ID NO: 137299 - RNA, 19 nt, Artificial Sequence
  Description of Artificial Sequence: Synthetic oligonucleotide
uggaccuuccaggcauuau

SEQ ID NO: 137300 - RNA, 19 nt, Artificial Sequence
  Description of Artificial Sequence: Synthetic oligonucleotide
cgaccaguagagcagcaug

SEQ ID NO: 137301 - RNA, 19 nt, Artificial Sequence
  Description of Artificial Sequence: Synthetic oligonucleotide
agucagcguagaaguucuc

SEQ ID NO: 137302 - RNA, 19 nt, Artificial Sequence
  Description of Artificial Sequence: Synthetic oligonucleotide
gugggguugcaaagaggac

SEQ ID NO: 137303 - RNA, 19 nt, Artificial Sequence
  Description of Artificial Sequence: Synthetic oligonucleotide
agcuugccaccaugguaau

SEQ ID NO: 137304 - RNA, 19 nt, Artificial Sequence
  Description of Artificial Sequence: Synthetic oligonucleotide
ugcgcccgaggaaccugac

SEQ ID NO: 137305 - RNA, 19 nt, Artificial Sequence
  Description of Artificial Sequence: Synthetic oligonucleotide
gaauggcaguucagagcuc

SEQ ID NO: 137306 - RNA, 19 nt, Artificial Sequence
  Description of Artificial Sequence: Synthetic oligonucleotide
ggggcucaacacaaaggac

SEQ ID NO: 137307 - RNA, 19 nt, Artificial Sequence
  Description of Artificial Sequence: Synthetic oligonucleotide
cucgggcaacaggaggaug

SEQ ID NO: 137308 - RNA, 19 nt, Artificial Sequence
  Description of Artificial Sequence: Synthetic oligonucleotide
agggauagguggagaguaa

SEQ ID NO: 137309 - RNA, 19 nt, Artificial Sequence
  Description of Artificial Sequence: Synthetic oligonucleotide
agcccugccuuggguguuc

SEQ ID NO: 137310 - RNA, 19 nt, Artificial Sequence
  Description of Artificial Sequence: Synthetic oligonucleotide
cuuguguaguguuccccau

SEQ ID NO: 137311 - RNA, 19 nt, Artificial Sequence
  Description of Artificial Sequence: Synthetic oligonucleotide
aggacgccagugcgaugcu

SEQ ID NO: 137312 - RNA, 19 nt, Artificial Sequence
  Description of Artificial Sequence: Synthetic oligonucleotide
aucgaccaguagagcagca

SEQ ID NO: 137313 - RNA, 19 nt, Artificial Sequence
  Description of Artificial Sequence: Synthetic oligonucleotide
gguuccgcguccccaccac

SEQ ID NO: 137314 - RNA, 19 nt, Artificial Sequence
  Description of Artificial Sequence: Synthetic oligonucleotide
cccgaggaaccugacuacc

SEQ ID NO: 137315 - RNA, 19 nt, Artificial Sequence
  Description of Artificial Sequence: Synthetic oligonucleotide
cagcgaguucacacauaga

SEQ ID NO: 137316 - RNA, 19 nt, Artificial Sequence
  Description of Artificial Sequence: Synthetic oligonucleotide
caugacugcaugugauauu

SEQ ID NO: 137317 - RNA, 19 nt, Artificial Sequence
  Description of Artificial Sequence: Synthetic oligonucleotide
cuauuugucuugggugcua

SEQ ID NO: 137318 - RNA, 19 nt, Artificial Sequence
  Description of Artificial Sequence: Synthetic oligonucleotide
gcccgaggaaccugacuac

SEQ ID NO: 137319 - RNA, 19 nt, Artificial Sequence
  Description of Artificial Sequence: Synthetic oligonucleotide
ccguuuuccuggagggcac

SEQ ID NO: 137320 - RNA, 19 nt, Artificial Sequence
  Description of Artificial Sequence: Synthetic oligonucleotide
guggagaguaagaccuugu

SEQ ID NO: 137321 - RNA, 19 nt, Artificial Sequence
  Description of Artificial Sequence: Synthetic oligonucleotide
cuggucuguuaaucugugu

SEQ ID NO: 137322 - RNA, 19 nt, Artificial Sequence
  Description of Artificial Sequence: Synthetic oligonucleotide
auuagccaucggagagacu

SEQ ID NO: 137323 - RNA, 19 nt, Artificial Sequence
  Description of Artificial Sequence: Synthetic oligonucleotide
gccaucggagagacucggg

SEQ ID NO: 137324 - RNA, 19 nt, Artificial Sequence
  Description of Artificial Sequence: Synthetic oligonucleotide
cgccgaccaacccagucag

SEQ ID NO: 137325 - RNA, 19 nt, Artificial Sequence
  Description of Artificial Sequence: Synthetic oligonucleotide
cgugcaagccggaguaguc

SEQ ID NO: 137326 - RNA, 19 nt, Artificial Sequence
  Description of Artificial Sequence: Synthetic oligonucleotide
acgcggcucuuagaggaaa

SEQ ID NO: 137327 - RNA, 19 nt, Artificial Sequence
  Description of Artificial Sequence: Synthetic oligonucleotide
ccgugaaaguucuuucucu

SEQ ID NO: 137328 - RNA, 19 nt, Artificial Sequence
  Description of Artificial Sequence: Synthetic oligonucleotide
cagcucaauaaugggugcu

SEQ ID NO: 137329 - RNA, 19 nt, Artificial Sequence
  Description of Artificial Sequence: Synthetic oligonucleotide
ugacuccggccaggcaaaa

SEQ ID NO: 137330 - RNA, 19 nt, Artificial Sequence
  Description of Artificial Sequence: Synthetic oligonucleotide
gagcuccgcguuggugagc

SEQ ID NO: 137331 - RNA, 19 nt, Artificial Sequence
  Description of Artificial Sequence: Synthetic oligonucleotide
guagggguccuggccuaca

SEQ ID NO: 137332 - RNA, 19 nt, Artificial Sequence
  Description of Artificial Sequence: Synthetic oligonucleotide
agacugagucuggccucca

SEQ ID NO: 137333 - RNA, 19 nt, Artificial Sequence
  Description of Artificial Sequence: Synthetic oligonucleotide
auuuagcgauauggaccuu

SEQ ID NO: 137334 - RNA, 19 nt, Artificial Sequence
  Description of Artificial Sequence: Synthetic oligonucleotide
cacgcggcucuuagaggaa

SEQ ID NO: 137335 - RNA, 19 nt, Artificial Sequence
  Description of Artificial Sequence: Synthetic oligonucleotide
gcucaauaaugggugcugu

SEQ ID NO: 137336 - RNA, 19 nt, Artificial Sequence
  Description of Artificial Sequence: Synthetic oligonucleotide
gucagcgaguucacacaua

SEQ ID NO: 137337 - RNA, 19 nt, Artificial Sequence
  Description of Artificial Sequence: Synthetic oligonucleotide
gccgccgaccaacccaguc

SEQ ID NO: 137338 - RNA, 19 nt, Artificial Sequence
  Description of Artificial Sequence: Synthetic oligonucleotide
ccgccgaccaacccaguca

SEQ ID NO: 137339 - RNA, 19 nt, Artificial Sequence
  Description of Artificial Sequence: Synthetic oligonucleotide
ggcuccccacugcauggga

SEQ ID NO: 137340 - RNA, 19 nt, Artificial Sequence
  Description of Artificial Sequence: Synthetic oligonucleotide
cagccacgcggcucuuaga

SEQ ID NO: 137341 - RNA, 19 nt, Artificial Sequence
  Description of Artificial Sequence: Synthetic oligonucleotide
ccccaucaacacguacagc

SEQ ID NO: 137342 - RNA, 19 nt, Artificial Sequence
  Description of Artificial Sequence: Synthetic oligonucleotide
gcaggacgccagugcgaug

SEQ ID NO: 137343 - RNA, 19 nt, Artificial Sequence
  Description of Artificial Sequence: Synthetic oligonucleotide
gcuugccaccaugguaauc

SEQ ID NO: 137344 - RNA, 19 nt, Artificial Sequence
  Description of Artificial Sequence: Synthetic oligonucleotide
cguacagccacgcggcucu

SEQ ID NO: 137345 - RNA, 19 nt, Artificial Sequence
  Description of Artificial Sequence: Synthetic oligonucleotide
ccaccaugguaaucaugaa

SEQ ID NO: 137346 - RNA, 19 nt, Artificial Sequence
  Description of Artificial Sequence: Synthetic oligonucleotide
cggggaauaucgaccagua

SEQ ID NO: 137347 - RNA, 19 nt, Artificial Sequence
  Description of Artificial Sequence: Synthetic oligonucleotide
gccuacagaugaccucugu

SEQ ID NO: 137348 - RNA, 19 nt, Artificial Sequence
  Description of Artificial Sequence: Synthetic oligonucleotide
cccggccaugaggaacugg

SEQ ID NO: 137349 - RNA, 19 nt, Artificial Sequence
  Description of Artificial Sequence: Synthetic oligonucleotide
gccuccgugaaaguucuuu

SEQ ID NO: 137350 - RNA, 19 nt, Artificial Sequence
  Description of Artificial Sequence: Synthetic oligonucleotide
cacgcauggugggguugca

SEQ ID NO: 137351 - RNA, 19 nt, Artificial Sequence
  Description of Artificial Sequence: Synthetic oligonucleotide
gccgaccaacccagucagc

SEQ ID NO: 137352 - RNA, 19 nt, Artificial Sequence
  Description of Artificial Sequence: Synthetic oligonucleotide
ccgcguuggugagcagcag

SEQ ID NO: 137353 - RNA, 19 nt, Artificial Sequence
  Description of Artificial Sequence: Synthetic oligonucleotide
cgcguuggugagcagcagu

SEQ ID NO: 137354 - RNA, 19 nt, Artificial Sequence
  Description of Artificial Sequence: Synthetic oligonucleotide
gcaagccggaguaguccuu

SEQ ID NO: 137355 - RNA, 19 nt, Artificial Sequence
  Description of Artificial Sequence: Synthetic oligonucleotide
ccacgaagcuugccaccau

SEQ ID NO: 137356 - RNA, 19 nt, Artificial Sequence
  Description of Artificial Sequence: Synthetic oligonucleotide
ggccuccgugaaaguucuu

SEQ ID NO: 137357 - RNA, 19 nt, Artificial Sequence
  Description of Artificial Sequence: Synthetic oligonucleotide
uaagauaucacucacggcc

SEQ ID NO: 137358 - RNA, 19 nt, Artificial Sequence
  Description of Artificial Sequence: Synthetic oligonucleotide
aauagcgccaaauuuggcc

SEQ ID NO: 137359 - RNA, 19 nt, Artificial Sequence
  Description of Artificial Sequence: Synthetic oligonucleotide
uguauuacacccaagcugg

SEQ ID NO: 137360 - RNA, 19 nt, Artificial Sequence
  Description of Artificial Sequence: Synthetic oligonucleotide
auuggcaugaaugagaccc

SEQ ID NO: 137361 - RNA, 19 nt, Artificial Sequence
  Description of Artificial Sequence: Synthetic oligonucleotide
auaauagucucacauauuc

SEQ ID NO: 137362 - RNA, 19 nt, Artificial Sequence
  Description of Artificial Sequence: Synthetic oligonucleotide
cuaacaauaucauugcugg

SEQ ID NO: 137363 - RNA, 19 nt, Artificial Sequence
  Description of Artificial Sequence: Synthetic oligonucleotide
uuauguauuacacccaagc

SEQ ID NO: 137364 - RNA, 19 nt, Artificial Sequence
  Description of Artificial Sequence: Synthetic oligonucleotide
uauuaguagauccaggcac

SEQ ID NO: 137365 - RNA, 19 nt, Artificial Sequence
  Description of Artificial Sequence: Synthetic oligonucleotide
aguugcaguaaauuuggcc

SEQ ID NO: 137366 - RNA, 19 nt, Artificial Sequence
  Description of Artificial Sequence: Synthetic oligonucleotide
aaccuaacauaaccaaacc

SEQ ID NO: 137367 - RNA, 19 nt, Artificial Sequence
  Description of Artificial Sequence: Synthetic oligonucleotide
aaugagacccaaugcauag

SEQ ID NO: 137368 - RNA, 19 nt, Artificial Sequence
  Description of Artificial Sequence: Synthetic oligonucleotide
ucguauuaagaauuguagg

SEQ ID NO: 137369 - RNA, 19 nt, Artificial Sequence
  Description of Artificial Sequence: Synthetic oligonucleotide
agggguauaagccaaugac

SEQ ID NO: 137370 - RNA, 19 nt, Artificial Sequence
  Description of Artificial Sequence: Synthetic oligonucleotide
aauacuuuagaugccacca

SEQ ID NO: 137371 - RNA, 19 nt, Artificial Sequence
  Description of Artificial Sequence: Synthetic oligonucleotide
uuauccaacagcuggaagu

SEQ ID NO: 137372 - RNA, 19 nt, Artificial Sequence
  Description of Artificial Sequence: Synthetic oligonucleotide
uccuuaucacgacagagag

SEQ ID NO: 137373 - RNA, 19 nt, Artificial Sequence
  Description of Artificial Sequence: Synthetic oligonucleotide
uguaagcuagcauuccugg

SEQ ID NO: 137374 - RNA, 19 nt, Artificial Sequence
  Description of Artificial Sequence: Synthetic oligonucleotide
uauuaagaauuguaggugu

SEQ ID NO: 137375 - RNA, 19 nt, Artificial Sequence
  Description of Artificial Sequence: Synthetic oligonucleotide
ugcuauaauagucucacau

SEQ ID NO: 137376 - RNA, 19 nt, Artificial Sequence
  Description of Artificial Sequence: Synthetic oligonucleotide
aacaugaggguuguaacuc

SEQ ID NO: 137377 - RNA, 19 nt, Artificial Sequence
  Description of Artificial Sequence: Synthetic oligonucleotide
uuuagaugccaccagggcu

SEQ ID NO: 137378 - RNA, 19 nt, Artificial Sequence
  Description of Artificial Sequence: Synthetic oligonucleotide
gauaugcgaauguggaugg

SEQ ID NO: 137379 - RNA, 19 nt, Artificial Sequence
  Description of Artificial Sequence: Synthetic oligonucleotide
aacaguucgaagauucugg

SEQ ID NO: 137380 - RNA, 19 nt, Artificial Sequence
  Description of Artificial Sequence: Synthetic oligonucleotide
uuagaugccaccagggcug

SEQ ID NO: 137381 - RNA, 19 nt, Artificial Sequence
  Description of Artificial Sequence: Synthetic oligonucleotide
auuauuucguauuaagaau

SEQ ID NO: 137382 - RNA, 19 nt, Artificial Sequence
  Description of Artificial Sequence: Synthetic oligonucleotide
aucaucgagacaucgcugg

SEQ ID NO: 137383 - RNA, 19 nt, Artificial Sequence
  Description of Artificial Sequence: Synthetic oligonucleotide
cagaugauaaauacuuuag

SEQ ID NO: 137384 - RNA, 19 nt, Artificial Sequence
  Description of Artificial Sequence: Synthetic oligonucleotide
ugaucaucgagacaucgcu

SEQ ID NO: 137385 - RNA, 19 nt, Artificial Sequence
  Description of Artificial Sequence: Synthetic oligonucleotide
uguggguucccucacagac

SEQ ID NO: 137386 - RNA, 19 nt, Artificial Sequence
  Description of Artificial Sequence: Synthetic oligonucleotide
uccaaguuaucucuaagaa

SEQ ID NO: 137387 - RNA, 19 nt, Artificial Sequence
  Description of Artificial Sequence: Synthetic oligonucleotide
gagcugauuaaggagauag

SEQ ID NO: 137388 - RNA, 19 nt, Artificial Sequence
  Description of Artificial Sequence: Synthetic oligonucleotide
uuucguauuaagaauugua

SEQ ID NO: 137389 - RNA, 19 nt, Artificial Sequence
  Description of Artificial Sequence: Synthetic oligonucleotide
uuaaguccuuauuaaggcc

SEQ ID NO: 137390 - RNA, 19 nt, Artificial Sequence
  Description of Artificial Sequence: Synthetic oligonucleotide
auuacacccaagcuggcag

SEQ ID NO: 137391 - RNA, 19 nt, Artificial Sequence
  Description of Artificial Sequence: Synthetic oligonucleotide
uguagcaggcgucggauag

SEQ ID NO: 137392 - RNA, 19 nt, Artificial Sequence
  Description of Artificial Sequence: Synthetic oligonucleotide
aucuucgaagaauuggguc

SEQ ID NO: 137393 - RNA, 19 nt, Artificial Sequence
  Description of Artificial Sequence: Synthetic oligonucleotide
acuaaugcgaugccaacug

SEQ ID NO: 137394 - RNA, 19 nt, Artificial Sequence
  Description of Artificial Sequence: Synthetic oligonucleotide
ucaauuuucgggccgugug

SEQ ID NO: 137395 - RNA, 19 nt, Artificial Sequence
  Description of Artificial Sequence: Synthetic oligonucleotide
ucaaccaaagacucgggac

SEQ ID NO: 137396 - RNA, 19 nt, Artificial Sequence
  Description of Artificial Sequence: Synthetic oligonucleotide
ugugaaaucccuugguccu

SEQ ID NO: 137397 - RNA, 19 nt, Artificial Sequence
  Description of Artificial Sequence: Synthetic oligonucleotide
aaauuuggcccaguuagug

SEQ ID NO: 137398 - RNA, 19 nt, Artificial Sequence
  Description of Artificial Sequence: Synthetic oligonucleotide
ugguccuuaaucaucaaua

SEQ ID NO: 137399 - RNA, 19 nt, Artificial Sequence
  Description of Artificial Sequence: Synthetic oligonucleotide
ugcuagaccgcgcagaauc

SEQ ID NO: 137400 - RNA, 19 nt, Artificial Sequence
  Description of Artificial Sequence: Synthetic oligonucleotide
ugacauugugaccaccugc

SEQ ID NO: 137401 - RNA, 19 nt, Artificial Sequence
  Description of Artificial Sequence: Synthetic oligonucleotide
uuccaaguuaucucuaaga

SEQ ID NO: 137402 - RNA, 19 nt, Artificial Sequence
  Description of Artificial Sequence: Synthetic oligonucleotide
aucgagacaucgcuggaac

SEQ ID NO: 137403 - RNA, 19 nt, Artificial Sequence
  Description of Artificial Sequence: Synthetic oligonucleotide
uccggugucuuuccuaccg

SEQ ID NO: 137404 - RNA, 19 nt, Artificial Sequence
  Description of Artificial Sequence: Synthetic oligonucleotide
ugugaucaucgagacaucg

SEQ ID NO: 137405 - RNA, 19 nt, Artificial Sequence
  Description of Artificial Sequence: Synthetic oligonucleotide
ucgaguaggucuagugugg

SEQ ID NO: 137406 - RNA, 19 nt, Artificial Sequence
  Description of Artificial Sequence: Synthetic oligonucleotide
ugaucaaugcauuuugcua

SEQ ID NO: 137407 - RNA, 19 nt, Artificial Sequence
  Description of Artificial Sequence: Synthetic oligonucleotide
uccugggacaucauuagac

SEQ ID NO: 137408 - RNA, 19 nt, Artificial Sequence
  Description of Artificial Sequence: Synthetic oligonucleotide
uggagauuuuaacauauuu

SEQ ID NO: 137409 - RNA, 19 nt, Artificial Sequence
  Description of Artificial Sequence: Synthetic oligonucleotide
uacccguauuaguagaucc

SEQ ID NO: 137410 - RNA, 19 nt, Artificial Sequence
  Description of Artificial Sequence: Synthetic oligonucleotide
uagagcaaugccaaucgcu

SEQ ID NO: 137411 - RNA, 19 nt, Artificial Sequence
  Description of Artificial Sequence: Synthetic oligonucleotide
guauaagccaaugacagga

SEQ ID NO: 137412 - RNA, 19 nt, Artificial Sequence
  Description of Artificial Sequence: Synthetic oligonucleotide
ucagaauuaugaugccucc

SEQ ID NO: 137413 - RNA, 19 nt, Artificial Sequence
  Description of Artificial Sequence: Synthetic oligonucleotide
acauuacuaaugcgaugcc

SEQ ID NO: 137414 - RNA, 19 nt, Artificial Sequence
  Description of Artificial Sequence: Synthetic oligonucleotide
auagcgccaaauuuggcca

SEQ ID NO: 137415 - RNA, 19 nt, Artificial Sequence
  Description of Artificial Sequence: Synthetic oligonucleotide
aaagagcacacuaaacagu

SEQ ID NO: 137416 - RNA, 19 nt, Artificial Sequence
  Description of Artificial Sequence: Synthetic oligonucleotide
uuucguacugcauccuuug

SEQ ID NO: 137417 - RNA, 19 nt, Artificial Sequence
  Description of Artificial Sequence: Synthetic oligonucleotide
ugacgugcaguucccauug

SEQ ID NO: 137418 - RNA, 19 nt, Artificial Sequence
  Description of Artificial Sequence: Synthetic oligonucleotide
acaguacccguauuaguag

SEQ ID NO: 137419 - RNA, 19 nt, Artificial Sequence
  Description of Artificial Sequence: Synthetic oligonucleotide
ugcgaaaggggaaaccaga

SEQ ID NO: 137420 - RNA, 19 nt, Artificial Sequence
  Description of Artificial Sequence: Synthetic oligonucleotide
ugucauuggcucuaguaaa

SEQ ID NO: 137421 - RNA, 19 nt, Artificial Sequence
  Description of Artificial Sequence: Synthetic oligonucleotide
acuuguagugccacagugc

SEQ ID NO: 137422 - RNA, 19 nt, Artificial Sequence
  Description of Artificial Sequence: Synthetic oligonucleotide
uaaugcgaugccaacugcu

SEQ ID NO: 137423 - RNA, 19 nt, Artificial Sequence
  Description of Artificial Sequence: Synthetic oligonucleotide
gagaaguauccuugggaag

SEQ ID NO: 137424 - RNA, 19 nt, Artificial Sequence
  Description of Artificial Sequence: Synthetic oligonucleotide
cuuuagaugccaccagggc

SEQ ID NO: 137425 - RNA, 19 nt, Artificial Sequence
  Description of Artificial Sequence: Synthetic oligonucleotide
gauucuacugcugcucucc

SEQ ID NO: 137426 - RNA, 19 nt, Artificial Sequence
  Description of Artificial Sequence: Synthetic oligonucleotide
acauugaagaggucgccug

SEQ ID NO: 137427 - RNA, 19 nt, Artificial Sequence
  Description of Artificial Sequence: Synthetic oligonucleotide
aaugaugcgugcaucgagu

SEQ ID NO: 137428 - RNA, 19 nt, Artificial Sequence
  Description of Artificial Sequence: Synthetic oligonucleotide
auacuuuagaugccaccag

SEQ ID NO: 137429 - RNA, 19 nt, Artificial Sequence
  Description of Artificial Sequence: Synthetic oligonucleotide
ucacguaguucacaggguc

SEQ ID NO: 137430 - RNA, 19 nt, Artificial Sequence
  Description of Artificial Sequence: Synthetic oligonucleotide
auuggguccuuaucacgac

SEQ ID NO: 137431 - RNA, 19 nt, Artificial Sequence
  Description of Artificial Sequence: Synthetic oligonucleotide
guuaagaccuuuagcuggg

SEQ ID NO: 137432 - RNA, 19 nt, Artificial Sequence
  Description of Artificial Sequence: Synthetic oligonucleotide
aucgcuugcuuauacuugu

SEQ ID NO: 137433 - RNA, 19 nt, Artificial Sequence
  Description of Artificial Sequence: Synthetic oligonucleotide
aguaaauuuggcccaguua

SEQ ID NO: 137434 - RNA, 19 nt, Artificial Sequence
  Description of Artificial Sequence: Synthetic oligonucleotide
uuaagaauuguagguguaa

SEQ ID NO: 137435 - RNA, 19 nt, Artificial Sequence
  Description of Artificial Sequence: Synthetic oligonucleotide
ucucaaccaaagacucggg

SEQ ID NO: 137436 - RNA, 19 nt, Artificial Sequence
  Description of Artificial Sequence: Synthetic oligonucleotide
auuacuaaugcgaugccaa

SEQ ID NO: 137437 - RNA, 19 nt, Artificial Sequence
  Description of Artificial Sequence: Synthetic oligonucleotide
aauuuucgggccgugugcu

SEQ ID NO: 137438 - RNA, 19 nt, Artificial Sequence
  Description of Artificial Sequence: Synthetic oligonucleotide
agggcugcaaacugccgac

SEQ ID NO: 137439 - RNA, 19 nt, Artificial Sequence
  Description of Artificial Sequence: Synthetic oligonucleotide
cuuauguauuacacccaag

SEQ ID NO: 137440 - RNA, 19 nt, Artificial Sequence
  Description of Artificial Sequence: Synthetic oligonucleotide
caauuuucgggccgugugc

SEQ ID NO: 137441 - RNA, 19 nt, Artificial Sequence
  Description of Artificial Sequence: Synthetic oligonucleotide
acagacaucgcaguaugug

SEQ ID NO: 137442 - RNA, 19 nt, Artificial Sequence
  Description of Artificial Sequence: Synthetic oligonucleotide
ucgaacaugaggguuguaa

SEQ ID NO: 137443 - RNA, 19 nt, Artificial Sequence
  Description of Artificial Sequence: Synthetic oligonucleotide
ugaugcgugcaucgaguag

SEQ ID NO: 137444 - RNA, 19 nt, Artificial Sequence
  Description of Artificial Sequence: Synthetic oligonucleotide
aguucacagggucauuugu

SEQ ID NO: 137445 - RNA, 19 nt, Artificial Sequence
  Description of Artificial Sequence: Synthetic oligonucleotide
uguuauuauuucguauuaa

SEQ ID NO: 137446 - RNA, 19 nt, Artificial Sequence
  Description of Artificial Sequence: Synthetic oligonucleotide
auauccucaauagccuggg

SEQ ID NO: 137447 - RNA, 19 nt, Artificial Sequence
  Description of Artificial Sequence: Synthetic oligonucleotide
ggauaugcgaauguggaug

SEQ ID NO: 137448 - RNA, 19 nt, Artificial Sequence
  Description of Artificial Sequence: Synthetic oligonucleotide
aagauaucacucacggccu

SEQ ID NO: 137449 - RNA, 19 nt, Artificial Sequence
  Description of Artificial Sequence: Synthetic oligonucleotide
agcauaauucagagacucc

SEQ ID NO: 137450 - RNA, 19 nt, Artificial Sequence
  Description of Artificial Sequence: Synthetic oligonucleotide
cguauuaguagauccaggc

SEQ ID NO: 137451 - RNA, 19 nt, Artificial Sequence
  Description of Artificial Sequence: Synthetic oligonucleotide
uaagaauuguagguguaau

SEQ ID NO: 137452 - RNA, 19 nt, Artificial Sequence
  Description of Artificial Sequence: Synthetic oligonucleotide
caaugaugcgugcaucgag

SEQ ID NO: 137453 - RNA, 19 nt, Artificial Sequence
  Description of Artificial Sequence: Synthetic oligonucleotide
cucuucaauuuucgggccg

SEQ ID NO: 137454 - RNA, 19 nt, Artificial Sequence
  Description of Artificial Sequence: Synthetic oligonucleotide
caggauaugcgaaugugga

SEQ ID NO: 137455 - RNA, 19 nt, Artificial Sequence
  Description of Artificial Sequence: Synthetic oligonucleotide
ccucacguaguucacaggg

SEQ ID NO: 137456 - RNA, 19 nt, Artificial Sequence
  Description of Artificial Sequence: Synthetic oligonucleotide
ucgugcuggauuauccaac

SEQ ID NO: 137457 - RNA, 19 nt, Artificial Sequence
  Description of Artificial Sequence: Synthetic oligonucleotide
guacauuacuaaugcgaug

SEQ ID NO: 137458 - RNA, 19 nt, Artificial Sequence
  Description of Artificial Sequence: Synthetic oligonucleotide
ugagaaugugaaaucccuu

SEQ ID NO: 137459 - RNA, 19 nt, Artificial Sequence
  Description of Artificial Sequence: Synthetic oligonucleotide
uacuaaugcgaugccaacu

SEQ ID NO: 137460 - RNA, 19 nt, Artificial Sequence
  Description of Artificial Sequence: Synthetic oligonucleotide
aacauguagcaggcgucgg

SEQ ID NO: 137461 - RNA, 19 nt, Artificial Sequence
  Description of Artificial Sequence: Synthetic oligonucleotide
cauugugaccaccugcauc

SEQ ID NO: 137462 - RNA, 19 nt, Artificial Sequence
  Description of Artificial Sequence: Synthetic oligonucleotide
cauccggugucuuuccuac

SEQ ID NO: 137463 - RNA, 19 nt, Artificial Sequence
  Description of Artificial Sequence: Synthetic oligonucleotide
caggcauaacucgugcugg

SEQ ID NO: 137464 - RNA, 19 nt, Artificial Sequence
  Description of Artificial Sequence: Synthetic oligonucleotide
ggaaaccagaaccagaacu

SEQ ID NO: 137465 - RNA, 19 nt, Artificial Sequence
  Description of Artificial Sequence: Synthetic oligonucleotide
auuucguauuaagaauugu

SEQ ID NO: 137466 - RNA, 19 nt, Artificial Sequence
  Description of Artificial Sequence: Synthetic oligonucleotide
cacaguacccguauuagua

SEQ ID NO: 137467 - RNA, 19 nt, Artificial Sequence
  Description of Artificial Sequence: Synthetic oligonucleotide
acaaggacgccaaccacag

SEQ ID NO: 137468 - RNA, 19 nt, Artificial Sequence
  Description of Artificial Sequence: Synthetic oligonucleotide
cauaacucgugcuggauua

SEQ ID NO: 137469 - RNA, 19 nt, Artificial Sequence
  Description of Artificial Sequence: Synthetic oligonucleotide
cacuuacagcaacauguag

SEQ ID NO: 137470 - RNA, 19 nt, Artificial Sequence
  Description of Artificial Sequence: Synthetic oligonucleotide
ucgccacuuaaaauuuuaa

SEQ ID NO: 137471 - RNA, 19 nt, Artificial Sequence
  Description of Artificial Sequence: Synthetic oligonucleotide
uggacucacauccgguguc

SEQ ID NO: 137472 - RNA, 19 nt, Artificial Sequence
  Description of Artificial Sequence: Synthetic oligonucleotide
auauacauccugacgugca

SEQ ID NO: 137473 - RNA, 19 nt, Artificial Sequence
  Description of Artificial Sequence: Synthetic oligonucleotide
gauuggcaugaaugagacc

SEQ ID NO: 137474 - RNA, 19 nt, Artificial Sequence
  Description of Artificial Sequence: Synthetic oligonucleotide
ucaucgagacaucgcugga

SEQ ID NO: 137475 - RNA, 19 nt, Artificial Sequence
  Description of Artificial Sequence: Synthetic oligonucleotide
uggcucuaguaaauuaauu

SEQ ID NO: 137476 - RNA, 19 nt, Artificial Sequence
  Description of Artificial Sequence: Synthetic oligonucleotide
uagaccgcgcagaaucuuc

SEQ ID NO: 137477 - RNA, 19 nt, Artificial Sequence
  Description of Artificial Sequence: Synthetic oligonucleotide
acauguagcaggcgucgga

SEQ ID NO: 137478 - RNA, 19 nt, Artificial Sequence
  Description of Artificial Sequence: Synthetic oligonucleotide
gguucuguaggucagcaua

SEQ ID NO: 137479 - RNA, 19 nt, Artificial Sequence
  Description of Artificial Sequence: Synthetic oligonucleotide
uacauccugacgugcaguu

SEQ ID NO: 137480 - RNA, 19 nt, Artificial Sequence
  Description of Artificial Sequence: Synthetic oligonucleotide
aggauaugcgaauguggau

SEQ ID NO: 137481 - RNA, 19 nt, Artificial Sequence
  Description of Artificial Sequence: Synthetic oligonucleotide
aggcuguaagcuagcauuc

SEQ ID NO: 137482 - RNA, 19 nt, Artificial Sequence
  Description of Artificial Sequence: Synthetic oligonucleotide
ucgagacaucgcuggaaca

SEQ ID NO: 137483 - RNA, 19 nt, Artificial Sequence
  Description of Artificial Sequence: Synthetic oligonucleotide
uucaauuuucgggccgugu

SEQ ID NO: 137484 - RNA, 19 nt, Artificial Sequence
  Description of Artificial Sequence: Synthetic oligonucleotide
gcaggcauaacucgugcug

SEQ ID NO: 137485 - RNA, 19 nt, Artificial Sequence
  Description of Artificial Sequence: Synthetic oligonucleotide
guaugacauacagaauuuc

SEQ ID NO: 137486 - RNA, 19 nt, Artificial Sequence
  Description of Artificial Sequence: Synthetic oligonucleotide
gugaucaucgagacaucgc

SEQ ID NO: 137487 - RNA, 19 nt, Artificial Sequence
  Description of Artificial Sequence: Synthetic oligonucleotide
auaucacucacggccugag

SEQ ID NO: 137488 - RNA, 19 nt, Artificial Sequence
  Description of Artificial Sequence: Synthetic oligonucleotide
cuuuccuaccgguguguug

SEQ ID NO: 137489 - RNA, 19 nt, Artificial Sequence
  Description of Artificial Sequence: Synthetic oligonucleotide
gugauuucggucugcugga

SEQ ID NO: 137490 - RNA, 19 nt, Artificial Sequence
  Description of Artificial Sequence: Synthetic oligonucleotide
ggacaagugauuucggucu

SEQ ID NO: 137491 - RNA, 19 nt, Artificial Sequence
  Description of Artificial Sequence: Synthetic oligonucleotide
gaauagcgccaaauuuggc

SEQ ID NO: 137492 - RNA, 19 nt, Artificial Sequence
  Description of Artificial Sequence: Synthetic oligonucleotide
guaggucuaguguggguuc

SEQ ID NO: 137493 - RNA, 19 nt, Artificial Sequence
  Description of Artificial Sequence: Synthetic oligonucleotide
ugauucuacugcugcucuc

SEQ ID NO: 137494 - RNA, 19 nt, Artificial Sequence
  Description of Artificial Sequence: Synthetic oligonucleotide
gcuauaauagucucacaua

SEQ ID NO: 137495 - RNA, 19 nt, Artificial Sequence
  Description of Artificial Sequence: Synthetic oligonucleotide
auuaagaauuguaggugua

SEQ ID NO: 137496 - RNA, 19 nt, Artificial Sequence
  Description of Artificial Sequence: Synthetic oligonucleotide
auuucgccacuuaaaauuu

SEQ ID NO: 137497 - RNA, 19 nt, Artificial Sequence
  Description of Artificial Sequence: Synthetic oligonucleotide
uuucgccacuuaaaauuuu

SEQ ID NO: 137498 - RNA, 19 nt, Artificial Sequence
  Description of Artificial Sequence: Synthetic oligonucleotide
acgugcaguucccauugca

SEQ ID NO: 137499 - RNA, 19 nt, Artificial Sequence
  Description of Artificial Sequence: Synthetic oligonucleotide
ucgcuugcuuauacuugug

SEQ ID NO: 137500 - RNA, 19 nt, Artificial Sequence
  Description of Artificial Sequence: Synthetic oligonucleotide
ugcgaauguggaugguuua

SEQ ID NO: 137501 - RNA, 19 nt, Artificial Sequence
  Description of Artificial Sequence: Synthetic oligonucleotide
cuaguguggguucccucac

SEQ ID NO: 137502 - RNA, 19 nt, Artificial Sequence
  Description of Artificial Sequence: Synthetic oligonucleotide
ccuugggccagaauagcgc

SEQ ID NO: 137503 - RNA, 19 nt, Artificial Sequence
  Description of Artificial Sequence: Synthetic oligonucleotide
guagggguauaagccaaug

SEQ ID NO: 137504 - RNA, 19 nt, Artificial Sequence
  Description of Artificial Sequence: Synthetic oligonucleotide
gaagugcgaaaggggaaac

SEQ ID NO: 137505 - RNA, 19 nt, Artificial Sequence
  Description of Artificial Sequence: Synthetic oligonucleotide
uccucccguacauuacuaa

SEQ ID NO: 137506 - RNA, 19 nt, Artificial Sequence
  Description of Artificial Sequence: Synthetic oligonucleotide
uuaagaccuuuagcugggc

SEQ ID NO: 137507 - RNA, 19 nt, Artificial Sequence
  Description of Artificial Sequence: Synthetic oligonucleotide
aggucuaguguggguuccc

SEQ ID NO: 137508 - RNA, 19 nt, Artificial Sequence
  Description of Artificial Sequence: Synthetic oligonucleotide
gugcgaaaggggaaaccag

SEQ ID NO: 137509 - RNA, 19 nt, Artificial Sequence
  Description of Artificial Sequence: Synthetic oligonucleotide
ggcacaguacccguauuag

SEQ ID NO: 137510 - RNA, 19 nt, Artificial Sequence
  Description of Artificial Sequence: Synthetic oligonucleotide
auuuucgggccgugugcug

SEQ ID NO: 137511 - RNA, 19 nt, Artificial Sequence
  Description of Artificial Sequence: Synthetic oligonucleotide
agcacacuaaacagucaug

SEQ ID NO: 137512 - RNA, 19 nt, Artificial Sequence
  Description of Artificial Sequence: Synthetic oligonucleotide
uggcuagcacuuucauaca

SEQ ID NO: 137513 - RNA, 19 nt, Artificial Sequence
  Description of Artificial Sequence: Synthetic oligonucleotide
acacagguagggguauaag

SEQ ID NO: 137514 - RNA, 19 nt, Artificial Sequence
  Description of Artificial Sequence: Synthetic oligonucleotide
gauaucacucacggccuga

SEQ ID NO: 137515 - RNA, 19 nt, Artificial Sequence
  Description of Artificial Sequence: Synthetic oligonucleotide
uugcagccccauaucgaac

SEQ ID NO: 137516 - RNA, 19 nt, Artificial Sequence
  Description of Artificial Sequence: Synthetic oligonucleotide
aggacucucaauacuuuau

SEQ ID NO: 137517 - RNA, 19 nt, Artificial Sequence
  Description of Artificial Sequence: Synthetic oligonucleotide
cacguaguucacaggguca

SEQ ID NO: 137518 - RNA, 19 nt, Artificial Sequence
  Description of Artificial Sequence: Synthetic oligonucleotide
gggguauaagccaaugaca

SEQ ID NO: 137519 - RNA, 19 nt, Artificial Sequence
  Description of Artificial Sequence: Synthetic oligonucleotide
augaugcgugcaucgagua

SEQ ID NO: 137520 - RNA, 19 nt, Artificial Sequence
  Description of Artificial Sequence: Synthetic oligonucleotide
aggcauaacucgugcugga

SEQ ID NO: 137521 - RNA, 19 nt, Artificial Sequence
  Description of Artificial Sequence: Synthetic oligonucleotide
uagcaggcgucggauagcu

SEQ ID NO: 137522 - RNA, 19 nt, Artificial Sequence
  Description of Artificial Sequence: Synthetic oligonucleotide
auuucguacugcauccuuu

SEQ ID NO: 137523 - RNA, 19 nt, Artificial Sequence
  Description of Artificial Sequence: Synthetic oligonucleotide
caguacccguauuaguaga

SEQ ID NO: 137524 - RNA, 19 nt, Artificial Sequence
  Description of Artificial Sequence: Synthetic oligonucleotide
agaggucgccugcuccaag

SEQ ID NO: 137525 - RNA, 19 nt, Artificial Sequence
  Description of Artificial Sequence: Synthetic oligonucleotide
acauccggugucuuuccua

SEQ ID NO: 137526 - RNA, 19 nt, Artificial Sequence
  Description of Artificial Sequence: Synthetic oligonucleotide
ugucaugguuaagaccuuu

SEQ ID NO: 137527 - RNA, 19 nt, Artificial Sequence
  Description of Artificial Sequence: Synthetic oligonucleotide
uaacucgugcuggauuauc

SEQ ID NO: 137528 - RNA, 19 nt, Artificial Sequence
  Description of Artificial Sequence: Synthetic oligonucleotide
gaccuuuagcugggcaggc

SEQ ID NO: 137529 - RNA, 19 nt, Artificial Sequence
  Description of Artificial Sequence: Synthetic oligonucleotide
acccguauuaguagaucca

SEQ ID NO: 137530 - RNA, 19 nt, Artificial Sequence
  Description of Artificial Sequence: Synthetic oligonucleotide
aauagccauuucgccacuu

SEQ ID NO: 137531 - RNA, 19 nt, Artificial Sequence
  Description of Artificial Sequence: Synthetic oligonucleotide
aguacccguauuaguagau

SEQ ID NO: 137532 - RNA, 19 nt, Artificial Sequence
  Description of Artificial Sequence: Synthetic oligonucleotide
caaaucugauaggccauca

SEQ ID NO: 137533 - RNA, 19 nt, Artificial Sequence
  Description of Artificial Sequence: Synthetic oligonucleotide
agcugauuaaggagauagu

SEQ ID NO: 137534 - RNA, 19 nt, Artificial Sequence
  Description of Artificial Sequence: Synthetic oligonucleotide
cuggaaguuugguucaggu

SEQ ID NO: 137535 - RNA, 19 nt, Artificial Sequence
  Description of Artificial Sequence: Synthetic oligonucleotide
augaggguuguaacucucu

SEQ ID NO: 137536 - RNA, 19 nt, Artificial Sequence
  Description of Artificial Sequence: Synthetic oligonucleotide
cucaugacccuuauguauu

SEQ ID NO: 137537 - RNA, 19 nt, Artificial Sequence
  Description of Artificial Sequence: Synthetic oligonucleotide
cagaauuaugaugccucca

SEQ ID NO: 137538 - RNA, 19 nt, Artificial Sequence
  Description of Artificial Sequence: Synthetic oligonucleotide
ucgaagaauuggguccuua

SEQ ID NO: 137539 - RNA, 19 nt, Artificial Sequence
  Description of Artificial Sequence: Synthetic oligonucleotide
ggacuguaaggagauugug

SEQ ID NO: 137540 - RNA, 19 nt, Artificial Sequence
  Description of Artificial Sequence: Synthetic oligonucleotide
cagcauagcaaugaugcgu

SEQ ID NO: 137541 - RNA, 19 nt, Artificial Sequence
  Description of Artificial Sequence: Synthetic oligonucleotide
gccaaucgcuugcuuauac

SEQ ID NO: 137542 - RNA, 19 nt, Artificial Sequence
  Description of Artificial Sequence: Synthetic oligonucleotide
uuccuaccgguguguugcc

SEQ ID NO: 137543 - RNA, 19 nt, Artificial Sequence
  Description of Artificial Sequence: Synthetic oligonucleotide
guacccguauuaguagauc

SEQ ID NO: 137544 - RNA, 19 nt, Artificial Sequence
  Description of Artificial Sequence: Synthetic oligonucleotide
agccauuucgccacuuaaa

SEQ ID NO: 137545 - RNA, 19 nt, Artificial Sequence
  Description of Artificial Sequence: Synthetic oligonucleotide
guauuacacccaagcuggc

SEQ ID NO: 137546 - RNA, 19 nt, Artificial Sequence
  Description of Artificial Sequence: Synthetic oligonucleotide
gccuugggccagaauagcg

SEQ ID NO: 137547 - RNA, 19 nt, Artificial Sequence
  Description of Artificial Sequence: Synthetic oligonucleotide
gcgugcaucgaguaggucu

SEQ ID NO: 137548 - RNA, 19 nt, Artificial Sequence
  Description of Artificial Sequence: Synthetic oligonucleotide
cagaaucaugaggucugug

SEQ ID NO: 137549 - RNA, 19 nt, Artificial Sequence
  Description of Artificial Sequence: Synthetic oligonucleotide
guagcaggcgucggauagc

SEQ ID NO: 137550 - RNA, 19 nt, Artificial Sequence
  Description of Artificial Sequence: Synthetic oligonucleotide
gguccuuaaucaucaauau

SEQ ID NO: 137551 - RNA, 19 nt, Artificial Sequence
  Description of Artificial Sequence: Synthetic oligonucleotide
aggaagugcgaaaggggaa

SEQ ID NO: 137552 - RNA, 19 nt, Artificial Sequence
  Description of Artificial Sequence: Synthetic oligonucleotide
uuagcugggcaggcauaac

SEQ ID NO: 137553 - RNA, 19 nt, Artificial Sequence
  Description of Artificial Sequence: Synthetic oligonucleotide
aaguauccuugggaaggua

SEQ ID NO: 137554 - RNA, 19 nt, Artificial Sequence
  Description of Artificial Sequence: Synthetic oligonucleotide
gaaguauccuugggaaggu

SEQ ID NO: 137555 - RNA, 19 nt, Artificial Sequence
  Description of Artificial Sequence: Synthetic oligonucleotide
cuucaauuuucgggccgug

SEQ ID NO: 137556 - RNA, 19 nt, Artificial Sequence
  Description of Artificial Sequence: Synthetic oligonucleotide
auaacucgugcuggauuau

SEQ ID NO: 137557 - RNA, 19 nt, Artificial Sequence
  Description of Artificial Sequence: Synthetic oligonucleotide
ggaagugcgaaaggggaaa

SEQ ID NO: 137558 - RNA, 19 nt, Artificial Sequence
  Description of Artificial Sequence: Synthetic oligonucleotide
ccuuuggacaagugauuuc

SEQ ID NO: 137559 - RNA, 19 nt, Artificial Sequence
  Description of Artificial Sequence: Synthetic oligonucleotide
agacaucgcuggaacauuu

SEQ ID NO: 137560 - RNA, 19 nt, Artificial Sequence
  Description of Artificial Sequence: Synthetic oligonucleotide
ggucgccugcuccaagagc

SEQ ID NO: 137561 - RNA, 19 nt, Artificial Sequence
  Description of Artificial Sequence: Synthetic oligonucleotide
auguagcaggcgucggaua

SEQ ID NO: 137562 - RNA, 19 nt, Artificial Sequence
  Description of Artificial Sequence: Synthetic oligonucleotide
agaccgcgcagaaucuucu

SEQ ID NO: 137563 - RNA, 19 nt, Artificial Sequence
  Description of Artificial Sequence: Synthetic oligonucleotide
ggcuguaagcuagcauucc

SEQ ID NO: 137564 - RNA, 19 nt, Artificial Sequence
  Description of Artificial Sequence: Synthetic oligonucleotide
ucgcaguaugugccaggau

SEQ ID NO: 137565 - RNA, 19 nt, Artificial Sequence
  Description of Artificial Sequence: Synthetic oligonucleotide
cauaucgaacaugaggguu

SEQ ID NO: 137566 - RNA, 19 nt, Artificial Sequence
  Description of Artificial Sequence: Synthetic oligonucleotide
ugauuucggucugcuggau

SEQ ID NO: 137567 - RNA, 19 nt, Artificial Sequence
  Description of Artificial Sequence: Synthetic oligonucleotide
auaugcgaauguggauggu

SEQ ID NO: 137568 - RNA, 19 nt, Artificial Sequence
  Description of Artificial Sequence: Synthetic oligonucleotide
cacucacggccugaggauc

SEQ ID NO: 137569 - RNA, 19 nt, Artificial Sequence
  Description of Artificial Sequence: Synthetic oligonucleotide
gcgaauguggaugguuuac

SEQ ID NO: 137570 - RNA, 19 nt, Artificial Sequence
  Description of Artificial Sequence: Synthetic oligonucleotide
ccaacugcuagaccgcgca

SEQ ID NO: 137571 - RNA, 19 nt, Artificial Sequence
  Description of Artificial Sequence: Synthetic oligonucleotide
ggcuaucagggccccuugc

SEQ ID NO: 137572 - RNA, 19 nt, Artificial Sequence
  Description of Artificial Sequence: Synthetic oligonucleotide
cagcaacauguagcaggcg

SEQ ID NO: 137573 - RNA, 19 nt, Artificial Sequence
  Description of Artificial Sequence: Synthetic oligonucleotide
ggguuguaacucucugaca

SEQ ID NO: 137574 - RNA, 19 nt, Artificial Sequence
  Description of Artificial Sequence: Synthetic oligonucleotide
ggggcaggauaugcgaaug

SEQ ID NO: 137575 - RNA, 19 nt, Artificial Sequence
  Description of Artificial Sequence: Synthetic oligonucleotide
cugaggcuaucagggcccc

SEQ ID NO: 137576 - RNA, 19 nt, Artificial Sequence
  Description of Artificial Sequence: Synthetic oligonucleotide
cucacguaguucacagggu

SEQ ID NO: 137577 - RNA, 19 nt, Artificial Sequence
  Description of Artificial Sequence: Synthetic oligonucleotide
cauccucccguacauuacu

SEQ ID NO: 137578 - RNA, 19 nt, Artificial Sequence
  Description of Artificial Sequence: Synthetic oligonucleotide
ggaauacagcugccugaac

SEQ ID NO: 137579 - RNA, 19 nt, Artificial Sequence
  Description of Artificial Sequence: Synthetic oligonucleotide
caucgagacaucgcuggaa

SEQ ID NO: 137580 - RNA, 19 nt, Artificial Sequence
  Description of Artificial Sequence: Synthetic oligonucleotide
cacuguucagggguccuga

SEQ ID NO: 137581 - RNA, 19 nt, Artificial Sequence
  Description of Artificial Sequence: Synthetic oligonucleotide
ccccagaugauaaauacuu

SEQ ID NO: 137582 - RNA, 19 nt, Artificial Sequence
  Description of Artificial Sequence: Synthetic oligonucleotide
uccuaccgguguguugccu

SEQ ID NO: 137583 - RNA, 19 nt, Artificial Sequence
  Description of Artificial Sequence: Synthetic oligonucleotide
cugggcaggcauaacucgu

SEQ ID NO: 137584 - RNA, 19 nt, Artificial Sequence
  Description of Artificial Sequence: Synthetic oligonucleotide
acggccugaggaucaucua

SEQ ID NO: 137585 - RNA, 19 nt, Artificial Sequence
  Description of Artificial Sequence: Synthetic oligonucleotide
ccggugucuuuccuaccgg

SEQ ID NO: 137586 - RNA, 19 nt, Artificial Sequence
  Description of Artificial Sequence: Synthetic oligonucleotide
ugccaaucgcuugcuuaua

SEQ ID NO: 137587 - RNA, 19 nt, Artificial Sequence
  Description of Artificial Sequence: Synthetic oligonucleotide
cacagggucauuugucauu

SEQ ID NO: 137588 - RNA, 19 nt, Artificial Sequence
  Description of Artificial Sequence: Synthetic oligonucleotide
cgucggauagcuuuguugu

SEQ ID NO: 137589 - RNA, 19 nt, Artificial Sequence
  Description of Artificial Sequence: Synthetic oligonucleotide
gcaggcgucggauagcuuu

SEQ ID NO: 137590 - RNA, 19 nt, Artificial Sequence
  Description of Artificial Sequence: Synthetic oligonucleotide
ccagaauagcgccaaauuu

SEQ ID NO: 137591 - RNA, 19 nt, Artificial Sequence
  Description of Artificial Sequence: Synthetic oligonucleotide
cauguagcaggcgucggau

SEQ ID NO: 137592 - RNA, 19 nt, Artificial Sequence
  Description of Artificial Sequence: Synthetic oligonucleotide
ugaggcuaucagggccccu

SEQ ID NO: 137593 - RNA, 19 nt, Artificial Sequence
  Description of Artificial Sequence: Synthetic oligonucleotide
auccucccguacauuacua

SEQ ID NO: 137594 - RNA, 19 nt, Artificial Sequence
  Description of Artificial Sequence: Synthetic oligonucleotide
gagacaucgcuggaacauu

SEQ ID NO: 137595 - RNA, 19 nt, Artificial Sequence
  Description of Artificial Sequence: Synthetic oligonucleotide
cugacgugcaguucccauu

SEQ ID NO: 137596 - RNA, 19 nt, Artificial Sequence
  Description of Artificial Sequence: Synthetic oligonucleotide
gcacaguacccguauuagu

SEQ ID NO: 137597 - RNA, 19 nt, Artificial Sequence
  Description of Artificial Sequence: Synthetic oligonucleotide
gugcaugaaugaguuugcu

SEQ ID NO: 137598 - RNA, 19 nt, Artificial Sequence
  Description of Artificial Sequence: Synthetic oligonucleotide
cuaccgguguguugccugu

SEQ ID NO: 137599 - RNA, 19 nt, Artificial Sequence
  Description of Artificial Sequence: Synthetic oligonucleotide
ccaguaugccuugggccag

SEQ ID NO: 137600 - RNA, 19 nt, Artificial Sequence
  Description of Artificial Sequence: Synthetic oligonucleotide
gcauaacucgugcuggauu

SEQ ID NO: 137601 - RNA, 19 nt, Artificial Sequence
  Description of Artificial Sequence: Synthetic oligonucleotide
ggcccaguuaguggcucug

SEQ ID NO: 137602 - RNA, 19 nt, Artificial Sequence
  Description of Artificial Sequence: Synthetic oligonucleotide
gucggauagcuuuguuguu

SEQ ID NO: 137603 - RNA, 19 nt, Artificial Sequence
  Description of Artificial Sequence: Synthetic oligonucleotide
ccauaucgaacaugagggu

SEQ ID NO: 137604 - RNA, 19 nt, Artificial Sequence
  Description of Artificial Sequence: Synthetic oligonucleotide
ccaaucgcuugcuuauacu

SEQ ID NO: 137605 - RNA, 19 nt, Artificial Sequence
  Description of Artificial Sequence: Synthetic oligonucleotide
caguaugccuugggccaga

SEQ ID NO: 137606 - RNA, 19 nt, Artificial Sequence
  Description of Artificial Sequence: Synthetic oligonucleotide
ccucccguacauuacuaau

SEQ ID NO: 137607 - RNA, 19 nt, Artificial Sequence
  Description of Artificial Sequence: Synthetic oligonucleotide
guaugccuugggccagaau

SEQ ID NO: 137608 - RNA, 19 nt, Artificial Sequence
  Description of Artificial Sequence: Synthetic oligonucleotide
gcuagaccgcgcagaaucu

SEQ ID NO: 137609 - RNA, 19 nt, Artificial Sequence
  Description of Artificial Sequence: Synthetic oligonucleotide
ggucuaguguggguucccu

SEQ ID NO: 137610 - RNA, 19 nt, Artificial Sequence
  Description of Artificial Sequence: Synthetic oligonucleotide
cuagaccgcgcagaaucuu

SEQ ID NO: 137611 - RNA, 19 nt, Artificial Sequence
  Description of Artificial Sequence: Synthetic oligonucleotide
ggcauaacucgugcuggau

SEQ ID NO: 137612 - RNA, 19 nt, Artificial Sequence
  Description of Artificial Sequence: Synthetic oligonucleotide
gguagggguauaagccaau

SEQ ID NO: 137613 - RNA, 19 nt, Artificial Sequence
  Description of Artificial Sequence: Synthetic oligonucleotide
gggccauugcagccccaua

SEQ ID NO: 137614 - RNA, 19 nt, Artificial Sequence
  Description of Artificial Sequence: Synthetic oligonucleotide
agcaggcgucggauagcuu

SEQ ID NO: 137615 - RNA, 19 nt, Artificial Sequence
  Description of Artificial Sequence: Synthetic oligonucleotide
cugcuagaccgcgcagaau

SEQ ID NO: 137616 - RNA, 19 nt, Artificial Sequence
  Description of Artificial Sequence: Synthetic oligonucleotide
cgggccgugugcugccaca

SEQ ID NO: 137617 - RNA, 19 nt, Artificial Sequence
  Description of Artificial Sequence: Synthetic oligonucleotide
ccccuugccucacguaguu

SEQ ID NO: 137618 - RNA, 19 nt, Artificial Sequence
  Description of Artificial Sequence: Synthetic oligonucleotide
ccgucuccauagggucacu

SEQ ID NO: 137619 - RNA, 19 nt, Artificial Sequence
  Description of Artificial Sequence: Synthetic oligonucleotide
ugaucuaucgaaauuauag

SEQ ID NO: 137620 - RNA, 19 nt, Artificial Sequence
  Description of Artificial Sequence: Synthetic oligonucleotide
aauuuauauauauauauaa

SEQ ID NO: 137621 - RNA, 19 nt, Artificial Sequence
  Description of Artificial Sequence: Synthetic oligonucleotide
aauauuauggguuaugaau

SEQ ID NO: 137622 - RNA, 19 nt, Artificial Sequence
  Description of Artificial Sequence: Synthetic oligonucleotide
aauacguuugcacauaaca

SEQ ID NO: 137623 - RNA, 19 nt, Artificial Sequence
  Description of Artificial Sequence: Synthetic oligonucleotide
ugugagaagacucuuaucu

SEQ ID NO: 137624 - RNA, 19 nt, Artificial Sequence
  Description of Artificial Sequence: Synthetic oligonucleotide
aaaucauauauacaguccu

SEQ ID NO: 137625 - RNA, 19 nt, Artificial Sequence
  Description of Artificial Sequence: Synthetic oligonucleotide
uuauauauauauauaauuu

SEQ ID NO: 137626 - RNA, 19 nt, Artificial Sequence
  Description of Artificial Sequence: Synthetic oligonucleotide
cuauccuacaauuucaggg

SEQ ID NO: 137627 - RNA, 19 nt, Artificial Sequence
  Description of Artificial Sequence: Synthetic oligonucleotide
gguauuaaaacauugacac

SEQ ID NO: 137628 - RNA, 19 nt, Artificial Sequence
  Description of Artificial Sequence: Synthetic oligonucleotide
uuuauauauauauauaauu

SEQ ID NO: 137629 - RNA, 19 nt, Artificial Sequence
  Description of Artificial Sequence: Synthetic oligonucleotide
aaacuaaacaaacugcgca

SEQ ID NO: 137630 - RNA, 19 nt, Artificial Sequence
  Description of Artificial Sequence: Synthetic oligonucleotide
ugaguaaaaugaaacugcg

SEQ ID NO: 137631 - RNA, 19 nt, Artificial Sequence
  Description of Artificial Sequence: Synthetic oligonucleotide
auugcaagcauauuaaggu

SEQ ID NO: 137632 - RNA, 19 nt, Artificial Sequence
  Description of Artificial Sequence: Synthetic oligonucleotide
uacaauuaggacaauagaa

SEQ ID NO: 137633 - RNA, 19 nt, Artificial Sequence
  Description of Artificial Sequence: Synthetic oligonucleotide
auaacaguggcacuacugg

SEQ ID NO: 137634 - RNA, 19 nt, Artificial Sequence
  Description of Artificial Sequence: Synthetic oligonucleotide
uuuuaaacgaugucuagcu

SEQ ID NO: 137635 - RNA, 19 nt, Artificial Sequence
  Description of Artificial Sequence: Synthetic oligonucleotide
ugcgcaauuauaaaaucag

SEQ ID NO: 137636 - RNA, 19 nt, Artificial Sequence
  Description of Artificial Sequence: Synthetic oligonucleotide
uauauauauauaauuuuau

SEQ ID NO: 137637 - RNA, 19 nt, Artificial Sequence
  Description of Artificial Sequence: Synthetic oligonucleotide
ucuaucgaaauuauagcca

SEQ ID NO: 137638 - RNA, 19 nt, Artificial Sequence
  Description of Artificial Sequence: Synthetic oligonucleotide
uaugcaauacguuugcaca

SEQ ID NO: 137639 - RNA, 19 nt, Artificial Sequence
  Description of Artificial Sequence: Synthetic oligonucleotide
ugugaguaaaaugaaacug

SEQ ID NO: 137640 - RNA, 19 nt, Artificial Sequence
  Description of Artificial Sequence: Synthetic oligonucleotide
uauauauauauauaauuuu

SEQ ID NO: 137641 - RNA, 19 nt, Artificial Sequence
  Description of Artificial Sequence: Synthetic oligonucleotide
auaugcaauacguuugcac

SEQ ID NO: 137642 - RNA, 19 nt, Artificial Sequence
  Description of Artificial Sequence: Synthetic oligonucleotide
auauauacaguccucucag

SEQ ID NO: 137643 - RNA, 19 nt, Artificial Sequence
  Description of Artificial Sequence: Synthetic oligonucleotide
ugucaaaauggcaaguggc

SEQ ID NO: 137644 - RNA, 19 nt, Artificial Sequence
  Description of Artificial Sequence: Synthetic oligonucleotide
acuaacagcgcauaaauaa

SEQ ID NO: 137645 - RNA, 19 nt, Artificial Sequence
  Description of Artificial Sequence: Synthetic oligonucleotide
aaguuaaagcaaaacgucg

SEQ ID NO: 137646 - RNA, 19 nt, Artificial Sequence
  Description of Artificial Sequence: Synthetic oligonucleotide
uucgguaagacaucagagg

SEQ ID NO: 137647 - RNA, 19 nt, Artificial Sequence
  Description of Artificial Sequence: Synthetic oligonucleotide
uguauugcaagcauauuaa

SEQ ID NO: 137648 - RNA, 19 nt, Artificial Sequence
  Description of Artificial Sequence: Synthetic oligonucleotide
uuaggcuuguaccacgccg

SEQ ID NO: 137649 - RNA, 19 nt, Artificial Sequence
  Description of Artificial Sequence: Synthetic oligonucleotide
uuucgguaagacaucagag

SEQ ID NO: 137650 - RNA, 19 nt, Artificial Sequence
  Description of Artificial Sequence: Synthetic oligonucleotide
gaucuaucgaaauuauagc

SEQ ID NO: 137651 - RNA, 19 nt, Artificial Sequence
  Description of Artificial Sequence: Synthetic oligonucleotide
guuaugaauucuauuaucc

SEQ ID NO: 137652 - RNA, 19 nt, Artificial Sequence
  Description of Artificial Sequence: Synthetic oligonucleotide
agaaagacgguuccucccc

SEQ ID NO: 137653 - RNA, 19 nt, Artificial Sequence
  Description of Artificial Sequence: Synthetic oligonucleotide
uuauuuaguacaaccagua

SEQ ID NO: 137654 - RNA, 19 nt, Artificial Sequence
  Description of Artificial Sequence: Synthetic oligonucleotide
ucgguaagacaucagagga

SEQ ID NO: 137655 - RNA, 19 nt, Artificial Sequence
  Description of Artificial Sequence: Synthetic oligonucleotide
uuguauugcaagcauauua

SEQ ID NO: 137656 - RNA, 19 nt, Artificial Sequence
  Description of Artificial Sequence: Synthetic oligonucleotide
uggguuaugaauucuauua

SEQ ID NO: 137657 - RNA, 19 nt, Artificial Sequence
  Description of Artificial Sequence: Synthetic oligonucleotide
uguacuguaaccuguuaga

SEQ ID NO: 137658 - RNA, 19 nt, Artificial Sequence
  Description of Artificial Sequence: Synthetic oligonucleotide
aucgaaauuauagccauuc

SEQ ID NO: 137659 - RNA, 19 nt, Artificial Sequence
  Description of Artificial Sequence: Synthetic oligonucleotide
uauccuacaauuucagggu

SEQ ID NO: 137660 - RNA, 19 nt, Artificial Sequence
  Description of Artificial Sequence: Synthetic oligonucleotide
cucauuguuucuuugauga

SEQ ID NO: 137661 - RNA, 19 nt, Artificial Sequence
  Description of Artificial Sequence: Synthetic oligonucleotide
uuaggacaauagaaugugg

SEQ ID NO: 137662 - RNA, 19 nt, Artificial Sequence
  Description of Artificial Sequence: Synthetic oligonucleotide
ucuuguauugcaagcauau

SEQ ID NO: 137663 - RNA, 19 nt, Artificial Sequence
  Description of Artificial Sequence: Synthetic oligonucleotide
uacgguugaaccccgacug

SEQ ID NO: 137664 - RNA, 19 nt, Artificial Sequence
  Description of Artificial Sequence: Synthetic oligonucleotide
uaaacgaugucuagcugcc

SEQ ID NO: 137665 - RNA, 19 nt, Artificial Sequence
  Description of Artificial Sequence: Synthetic oligonucleotide
uuuagguucucucaugaua

SEQ ID NO: 137666 - RNA, 19 nt, Artificial Sequence
  Description of Artificial Sequence: Synthetic oligonucleotide
aaacugcgcaauuauaaaa

SEQ ID NO: 137667 - RNA, 19 nt, Artificial Sequence
  Description of Artificial Sequence: Synthetic oligonucleotide
cacuaaauguugaagauga

SEQ ID NO: 137668 - RNA, 19 nt, Artificial Sequence
  Description of Artificial Sequence: Synthetic oligonucleotide
uauuaucccaucuaauuua

SEQ ID NO: 137669 - RNA, 19 nt, Artificial Sequence
  Description of Artificial Sequence: Synthetic oligonucleotide
aaguacucuuuucggagag

SEQ ID NO: 137670 - RNA, 19 nt, Artificial Sequence
  Description of Artificial Sequence: Synthetic oligonucleotide
uguaccacgccgauuauaa

SEQ ID NO: 137671 - RNA, 19 nt, Artificial Sequence
  Description of Artificial Sequence: Synthetic oligonucleotide
ugucggagcaguuuagaag

SEQ ID NO: 137672 - RNA, 19 nt, Artificial Sequence
  Description of Artificial Sequence: Synthetic oligonucleotide
ucauaugggagaagcaugu

SEQ ID NO: 137673 - RNA, 19 nt, Artificial Sequence
  Description of Artificial Sequence: Synthetic oligonucleotide
guugacugauguuuuaagc

SEQ ID NO: 137674 - RNA, 19 nt, Artificial Sequence
  Description of Artificial Sequence: Synthetic oligonucleotide
uacuguaguagauuaaaau

SEQ ID NO: 137675 - RNA, 19 nt, Artificial Sequence
  Description of Artificial Sequence: Synthetic oligonucleotide
ucuauccuacaauuucagg

SEQ ID NO: 137676 - RNA, 19 nt, Artificial Sequence
  Description of Artificial Sequence: Synthetic oligonucleotide
aauaacaguggcacuacug

SEQ ID NO: 137677 - RNA, 19 nt, Artificial Sequence
  Description of Artificial Sequence: Synthetic oligonucleotide
uucuauccuacaauuucag

SEQ ID NO: 137678 - RNA, 19 nt, Artificial Sequence
  Description of Artificial Sequence: Synthetic oligonucleotide
gaauaagggucuuagcaca

SEQ ID NO: 137679 - RNA, 19 nt, Artificial Sequence
  Description of Artificial Sequence: Synthetic oligonucleotide
aaucauauauacaguccuc

SEQ ID NO: 137680 - RNA, 19 nt, Artificial Sequence
  Description of Artificial Sequence: Synthetic oligonucleotide
acuccguacgguugaaccc

SEQ ID NO: 137681 - RNA, 19 nt, Artificial Sequence
  Description of Artificial Sequence: Synthetic oligonucleotide
ucuaccacacuuuauuuua

SEQ ID NO: 137682 - RNA, 19 nt, Artificial Sequence
  Description of Artificial Sequence: Synthetic oligonucleotide
agaaguaucuuuaaccuga

SEQ ID NO: 137683 - RNA, 19 nt, Artificial Sequence
  Description of Artificial Sequence: Synthetic oligonucleotide
uauucuuguauugcaagca

SEQ ID NO: 137684 - RNA, 19 nt, Artificial Sequence
  Description of Artificial Sequence: Synthetic oligonucleotide
uggauuaggcuccuuaaaa

SEQ ID NO: 137685 - RNA, 19 nt, Artificial Sequence
  Description of Artificial Sequence: Synthetic oligonucleotide
uuuaaacgaugucuagcug

SEQ ID NO: 137686 - RNA, 19 nt, Artificial Sequence
  Description of Artificial Sequence: Synthetic oligonucleotide
acugcgcaauuauaaaauc

SEQ ID NO: 137687 - RNA, 19 nt, Artificial Sequence
  Description of Artificial Sequence: Synthetic oligonucleotide
acagguuagaguaauauau

SEQ ID NO: 137688 - RNA, 19 nt, Artificial Sequence
  Description of Artificial Sequence: Synthetic oligonucleotide
uacguuugcacauaacaau

SEQ ID NO: 137689 - RNA, 19 nt, Artificial Sequence
  Description of Artificial Sequence: Synthetic oligonucleotide
auauauauauauaauuuua

SEQ ID NO: 137690 - RNA, 19 nt, Artificial Sequence
  Description of Artificial Sequence: Synthetic oligonucleotide
auaacagggguaugcagug

SEQ ID NO: 137691 - RNA, 19 nt, Artificial Sequence
  Description of Artificial Sequence: Synthetic oligonucleotide
augaaguuuaaagcuuagc

SEQ ID NO: 137692 - RNA, 19 nt, Artificial Sequence
  Description of Artificial Sequence: Synthetic oligonucleotide
guuuuaaacgaugucuagc

SEQ ID NO: 137693 - RNA, 19 nt, Artificial Sequence
  Description of Artificial Sequence: Synthetic oligonucleotide
aauggcaaguggccauuuc

SEQ ID NO: 137694 - RNA, 19 nt, Artificial Sequence
  Description of Artificial Sequence: Synthetic oligonucleotide
aagcauauuaagguuuugu

SEQ ID NO: 137695 - RNA, 19 nt, Artificial Sequence
  Description of Artificial Sequence: Synthetic oligonucleotide
auuuauauauauauauaau

SEQ ID NO: 137696 - RNA, 19 nt, Artificial Sequence
  Description of Artificial Sequence: Synthetic oligonucleotide
aaucagcaccaauuuauau

SEQ ID NO: 137697 - RNA, 19 nt, Artificial Sequence
  Description of Artificial Sequence: Synthetic oligonucleotide
uauuauggguuaugaauuc

SEQ ID NO: 137698 - RNA, 19 nt, Artificial Sequence
  Description of Artificial Sequence: Synthetic oligonucleotide
ucguccacuuagaaaauga

SEQ ID NO: 137699 - RNA, 19 nt, Artificial Sequence
  Description of Artificial Sequence: Synthetic oligonucleotide
agaauauuauggguuauga

SEQ ID NO: 137700 - RNA, 19 nt, Artificial Sequence
  Description of Artificial Sequence: Synthetic oligonucleotide
cuaagccucgcaaaaugag

SEQ ID NO: 137701 - RNA, 19 nt, Artificial Sequence
  Description of Artificial Sequence: Synthetic oligonucleotide
acucuuuucggagagugag

SEQ ID NO: 137702 - RNA, 19 nt, Artificial Sequence
  Description of Artificial Sequence: Synthetic oligonucleotide
uaagccucgcaaaaugagu

SEQ ID NO: 137703 - RNA, 19 nt, Artificial Sequence
  Description of Artificial Sequence: Synthetic oligonucleotide
gagacugguuaccuucugg

SEQ ID NO: 137704 - RNA, 19 nt, Artificial Sequence
  Description of Artificial Sequence: Synthetic oligonucleotide
cuagcaaagaauuucggua

SEQ ID NO: 137705 - RNA, 19 nt, Artificial Sequence
  Description of Artificial Sequence: Synthetic oligonucleotide
ugcuuauaaguuuaacuuu

SEQ ID NO: 137706 - RNA, 19 nt, Artificial Sequence
  Description of Artificial Sequence: Synthetic oligonucleotide
aaccccgacugcucauucc

SEQ ID NO: 137707 - RNA, 19 nt, Artificial Sequence
  Description of Artificial Sequence: Synthetic oligonucleotide
uauucacacaucugaagau

SEQ ID NO: 137708 - RNA, 19 nt, Artificial Sequence
  Description of Artificial Sequence: Synthetic oligonucleotide
uucagcuaaccuaugguuu

SEQ ID NO: 137709 - RNA, 19 nt, Artificial Sequence
  Description of Artificial Sequence: Synthetic oligonucleotide
caucauaacagggguaugc

SEQ ID NO: 137710 - RNA, 19 nt, Artificial Sequence
  Description of Artificial Sequence: Synthetic oligonucleotide
uuucagcuaaccuaugguu

SEQ ID NO: 137711 - RNA, 19 nt, Artificial Sequence
  Description of Artificial Sequence: Synthetic oligonucleotide
uuaggcuccuuaaaagcaa

SEQ ID NO: 137712 - RNA, 19 nt, Artificial Sequence
  Description of Artificial Sequence: Synthetic oligonucleotide
uaccacgccgauuauaauc

SEQ ID NO: 137713 - RNA, 19 nt, Artificial Sequence
  Description of Artificial Sequence: Synthetic oligonucleotide
aaagcaaaacgucgagcaa

SEQ ID NO: 137714 - RNA, 19 nt, Artificial Sequence
  Description of Artificial Sequence: Synthetic oligonucleotide
ggauuaggcuccuuaaaag

SEQ ID NO: 137715 - RNA, 19 nt, Artificial Sequence
  Description of Artificial Sequence: Synthetic oligonucleotide
aacugcgcaauuauaaaau

SEQ ID NO: 137716 - RNA, 19 nt, Artificial Sequence
  Description of Artificial Sequence: Synthetic oligonucleotide
aaguauaucggcagcugug

SEQ ID NO: 137717 - RNA, 19 nt, Artificial Sequence
  Description of Artificial Sequence: Synthetic oligonucleotide
auauuauggguuaugaauu

SEQ ID NO: 137718 - RNA, 19 nt, Artificial Sequence
  Description of Artificial Sequence: Synthetic oligonucleotide
aguuaaagcaaaacgucga

SEQ ID NO: 137719 - RNA, 19 nt, Artificial Sequence
  Description of Artificial Sequence: Synthetic oligonucleotide
aacagcgcauaaauaaacu

SEQ ID NO: 137720 - RNA, 19 nt, Artificial Sequence
  Description of Artificial Sequence: Synthetic oligonucleotide
gaauauuauggguuaugaa

SEQ ID NO: 137721 - RNA, 19 nt, Artificial Sequence
  Description of Artificial Sequence: Synthetic oligonucleotide
caauuuauauauauauaua

SEQ ID NO: 137722 - RNA, 19 nt, Artificial Sequence
  Description of Artificial Sequence: Synthetic oligonucleotide
uaggcuuguaccacgccga

SEQ ID NO: 137723 - RNA, 19 nt, Artificial Sequence
  Description of Artificial Sequence: Synthetic oligonucleotide
gaucccuauucccacacuc

SEQ ID NO: 137724 - RNA, 19 nt, Artificial Sequence
  Description of Artificial Sequence: Synthetic oligonucleotide
aaaagccaacuaacagcgc

SEQ ID NO: 137725 - RNA, 19 nt, Artificial Sequence
  Description of Artificial Sequence: Synthetic oligonucleotide
aacgaugucuagcugccua

SEQ ID NO: 137726 - RNA, 19 nt, Artificial Sequence
  Description of Artificial Sequence: Synthetic oligonucleotide
aaauuguguacugguauua

SEQ ID NO: 137727 - RNA, 19 nt, Artificial Sequence
  Description of Artificial Sequence: Synthetic oligonucleotide
uguaucuaccacacuuuau

SEQ ID NO: 137728 - RNA, 19 nt, Artificial Sequence
  Description of Artificial Sequence: Synthetic oligonucleotide
ucuugucggagcaguuuag

SEQ ID NO: 137729 - RNA, 19 nt, Artificial Sequence
  Description of Artificial Sequence: Synthetic oligonucleotide
cauuaggcuuguaccacgc

SEQ ID NO: 137730 - RNA, 19 nt, Artificial Sequence
  Description of Artificial Sequence: Synthetic oligonucleotide
uucgaugguggcaagucua

SEQ ID NO: 137731 - RNA, 19 nt, Artificial Sequence
  Description of Artificial Sequence: Synthetic oligonucleotide
cucugagaaagacgguucc

SEQ ID NO: 137732 - RNA, 19 nt, Artificial Sequence
  Description of Artificial Sequence: Synthetic oligonucleotide
gguucucucaugauagugg

SEQ ID NO: 137733 - RNA, 19 nt, Artificial Sequence
  Description of Artificial Sequence: Synthetic oligonucleotide
gaaguacucuuuucggaga

SEQ ID NO: 137734 - RNA, 19 nt, Artificial Sequence
  Description of Artificial Sequence: Synthetic oligonucleotide
uggcgucugcaucauaaca

SEQ ID NO: 137735 - RNA, 19 nt, Artificial Sequence
  Description of Artificial Sequence: Synthetic oligonucleotide
aauuguguacugguauuaa

SEQ ID NO: 137736 - RNA, 19 nt, Artificial Sequence
  Description of Artificial Sequence: Synthetic oligonucleotide
caaagaauauuauggguua

SEQ ID NO: 137737 - RNA, 19 nt, Artificial Sequence
  Description of Artificial Sequence: Synthetic oligonucleotide
ucagcuaaccuaugguuuu

SEQ ID NO: 137738 - RNA, 19 nt, Artificial Sequence
  Description of Artificial Sequence: Synthetic oligonucleotide
aauccgcccuucugaggac

SEQ ID NO: 137739 - RNA, 19 nt, Artificial Sequence
  Description of Artificial Sequence: Synthetic oligonucleotide
uagaucccuauucccacac

SEQ ID NO: 137740 - RNA, 19 nt, Artificial Sequence
  Description of Artificial Sequence: Synthetic oligonucleotide
ucaauccgcccuucugagg

SEQ ID NO: 137741 - RNA, 19 nt, Artificial Sequence
  Description of Artificial Sequence: Synthetic oligonucleotide
aacuuuccguuuuccugug

SEQ ID NO: 137742 - RNA, 19 nt, Artificial Sequence
  Description of Artificial Sequence: Synthetic oligonucleotide
augaauucuauuaucccau

SEQ ID NO: 137743 - RNA, 19 nt, Artificial Sequence
  Description of Artificial Sequence: Synthetic oligonucleotide
auuguguacugguauuaaa

SEQ ID NO: 137744 - RNA, 19 nt, Artificial Sequence
  Description of Artificial Sequence: Synthetic oligonucleotide
uuguggauuaggcuccuua

SEQ ID NO: 137745 - RNA, 19 nt, Artificial Sequence
  Description of Artificial Sequence: Synthetic oligonucleotide
uuagaucccuauucccaca

SEQ ID NO: 137746 - RNA, 19 nt, Artificial Sequence
  Description of Artificial Sequence: Synthetic oligonucleotide
auaucggcagcuguguuca

SEQ ID NO: 137747 - RNA, 19 nt, Artificial Sequence
  Description of Artificial Sequence: Synthetic oligonucleotide
guacucuuuucggagagug

SEQ ID NO: 137748 - RNA, 19 nt, Artificial Sequence
  Description of Artificial Sequence: Synthetic oligonucleotide
uguuugagacugguuaccu

SEQ ID NO: 137749 - RNA, 19 nt, Artificial Sequence
  Description of Artificial Sequence: Synthetic oligonucleotide
cucaugauaguggagguga

SEQ ID NO: 137750 - RNA, 19 nt, Artificial Sequence
  Description of Artificial Sequence: Synthetic oligonucleotide
cucaauccgcccuucugag

SEQ ID NO: 137751 - RNA, 19 nt, Artificial Sequence
  Description of Artificial Sequence: Synthetic oligonucleotide
ugaauucuauuaucccauc

SEQ ID NO: 137752 - RNA, 19 nt, Artificial Sequence
  Description of Artificial Sequence: Synthetic oligonucleotide
cugcgcaauuauaaaauca

SEQ ID NO: 137753 - RNA, 19 nt, Artificial Sequence
  Description of Artificial Sequence: Synthetic oligonucleotide
gaaacugcgcuuccucuga

SEQ ID NO: 137754 - RNA, 19 nt, Artificial Sequence
  Description of Artificial Sequence: Synthetic oligonucleotide
aguauaucggcagcugugu

SEQ ID NO: 137755 - RNA, 19 nt, Artificial Sequence
  Description of Artificial Sequence: Synthetic oligonucleotide
cuaacagcgcauaaauaaa

SEQ ID NO: 137756 - RNA, 19 nt, Artificial Sequence
  Description of Artificial Sequence: Synthetic oligonucleotide
aaacugcgcuuccucugag

SEQ ID NO: 137757 - RNA, 19 nt, Artificial Sequence
  Description of Artificial Sequence: Synthetic oligonucleotide
auacguuugcacauaacaa

SEQ ID NO: 137758 - RNA, 19 nt, Artificial Sequence
  Description of Artificial Sequence: Synthetic oligonucleotide
uuuuagguucucucaugau

SEQ ID NO: 137759 - RNA, 19 nt, Artificial Sequence
  Description of Artificial Sequence: Synthetic oligonucleotide
uguuuucaauuggucaagu

SEQ ID NO: 137760 - RNA, 19 nt, Artificial Sequence
  Description of Artificial Sequence: Synthetic oligonucleotide
acgccgauuauaaucaaga

SEQ ID NO: 137761 - RNA, 19 nt, Artificial Sequence
  Description of Artificial Sequence: Synthetic oligonucleotide
ucgagcaaguucuuuuaua

SEQ ID NO: 137762 - RNA, 19 nt, Artificial Sequence
  Description of Artificial Sequence: Synthetic oligonucleotide
caauccgcccuucugagga

SEQ ID NO: 137763 - RNA, 19 nt, Artificial Sequence
  Description of Artificial Sequence: Synthetic oligonucleotide
aucauaacagggguaugca

SEQ ID NO: 137764 - RNA, 19 nt, Artificial Sequence
  Description of Artificial Sequence: Synthetic oligonucleotide
ccaauuuauauauauauau

SEQ ID NO: 137765 - RNA, 19 nt, Artificial Sequence
  Description of Artificial Sequence: Synthetic oligonucleotide
cacgccgauuauaaucaag

SEQ ID NO: 137766 - RNA, 19 nt, Artificial Sequence
  Description of Artificial Sequence: Synthetic oligonucleotide
gaugguggcaagucuauau

SEQ ID NO: 137767 - RNA, 19 nt, Artificial Sequence
  Description of Artificial Sequence: Synthetic oligonucleotide
aagcauguuugagacuggu

SEQ ID NO: 137768 - RNA, 19 nt, Artificial Sequence
  Description of Artificial Sequence: Synthetic oligonucleotide
caauagaauguggaggaca

SEQ ID NO: 137769 - RNA, 19 nt, Artificial Sequence
  Description of Artificial Sequence: Synthetic oligonucleotide
gaaguauaucggcagcugu

SEQ ID NO: 137770 - RNA, 19 nt, Artificial Sequence
  Description of Artificial Sequence: Synthetic oligonucleotide
uccguacgguugaaccccg

SEQ ID NO: 137771 - RNA, 19 nt, Artificial Sequence
  Description of Artificial Sequence: Synthetic oligonucleotide
cuccguacgguugaacccc

SEQ ID NO: 137772 - RNA, 19 nt, Artificial Sequence
  Description of Artificial Sequence: Synthetic oligonucleotide
accaauuuauauauauaua

SEQ ID NO: 137773 - RNA, 19 nt, Artificial Sequence
  Description of Artificial Sequence: Synthetic oligonucleotide
auggguuaugaauucuauu

SEQ ID NO: 137774 - RNA, 19 nt, Artificial Sequence
  Description of Artificial Sequence: Synthetic oligonucleotide
caugauaguggaggugagc

SEQ ID NO: 137775 - RNA, 19 nt, Artificial Sequence
  Description of Artificial Sequence: Synthetic oligonucleotide
caaacugcgcaauuauaaa

SEQ ID NO: 137776 - RNA, 19 nt, Artificial Sequence
  Description of Artificial Sequence: Synthetic oligonucleotide
gacagauagauaaaacaau

SEQ ID NO: 137777 - RNA, 19 nt, Artificial Sequence
  Description of Artificial Sequence: Synthetic oligonucleotide
uucugcuuauaaguuuaac

SEQ ID NO: 137778 - RNA, 19 nt, Artificial Sequence
  Description of Artificial Sequence: Synthetic oligonucleotide
agccucgcaaaaugaguug

SEQ ID NO: 137779 - RNA, 19 nt, Artificial Sequence
  Description of Artificial Sequence: Synthetic oligonucleotide
ucucccgucuauucuucga

SEQ ID NO: 137780 - RNA, 19 nt, Artificial Sequence
  Description of Artificial Sequence: Synthetic oligonucleotide
ucccgucuauucuucgaug

SEQ ID NO: 137781 - RNA, 19 nt, Artificial Sequence
  Description of Artificial Sequence: Synthetic oligonucleotide
cugucugcauuggauagac

SEQ ID NO: 137782 - RNA, 19 nt, Artificial Sequence
  Description of Artificial Sequence: Synthetic oligonucleotide
cucgcaaaaugaguugaug

SEQ ID NO: 137783 - RNA, 19 nt, Artificial Sequence
  Description of Artificial Sequence: Synthetic oligonucleotide
gcgucuacagagcaagcag

SEQ ID NO: 137784 - RNA, 19 nt, Artificial Sequence
  Description of Artificial Sequence: Synthetic oligonucleotide
cccgucuauucuucgaugg

SEQ ID NO: 137785 - RNA, 19 nt, Artificial Sequence
  Description of Artificial Sequence: Synthetic oligonucleotide
cuaucgaaauuauagccau

SEQ ID NO: 137786 - RNA, 19 nt, Artificial Sequence
  Description of Artificial Sequence: Synthetic oligonucleotide
aacuaacagcgcauaaaua

SEQ ID NO: 137787 - RNA, 19 nt, Artificial Sequence
  Description of Artificial Sequence: Synthetic oligonucleotide
accccgacugcucauucca

SEQ ID NO: 137788 - RNA, 19 nt, Artificial Sequence
  Description of Artificial Sequence: Synthetic oligonucleotide
uggaggacaacagguuaga

SEQ ID NO: 137789 - RNA, 19 nt, Artificial Sequence
  Description of Artificial Sequence: Synthetic oligonucleotide
uaucgaaauuauagccauu

SEQ ID NO: 137790 - RNA, 19 nt, Artificial Sequence
  Description of Artificial Sequence: Synthetic oligonucleotide
agcgucuacagagcaagca

SEQ ID NO: 137791 - RNA, 19 nt, Artificial Sequence
  Description of Artificial Sequence: Synthetic oligonucleotide
cauuaaccaugaauuaaua

SEQ ID NO: 137792 - RNA, 19 nt, Artificial Sequence
  Description of Artificial Sequence: Synthetic oligonucleotide
caacuaacagcgcauaaau

SEQ ID NO: 137793 - RNA, 19 nt, Artificial Sequence
  Description of Artificial Sequence: Synthetic oligonucleotide
aaccuguuagaaguaucuu

SEQ ID NO: 137794 - RNA, 19 nt, Artificial Sequence
  Description of Artificial Sequence: Synthetic oligonucleotide
uagguucucucaugauagu

SEQ ID NO: 137795 - RNA, 19 nt, Artificial Sequence
  Description of Artificial Sequence: Synthetic oligonucleotide
cuuucagcuaaccuauggu

SEQ ID NO: 137796 - RNA, 19 nt, Artificial Sequence
  Description of Artificial Sequence: Synthetic oligonucleotide
aacaccccaaugaaauaua

SEQ ID NO: 137797 - RNA, 19 nt, Artificial Sequence
  Description of Artificial Sequence: Synthetic oligonucleotide
aggccgcaaucuuuuaggu

SEQ ID NO: 137798 - RNA, 19 nt, Artificial Sequence
  Description of Artificial Sequence: Synthetic oligonucleotide
uuccuguggaugguuuuga

SEQ ID NO: 137799 - RNA, 19 nt, Artificial Sequence
  Description of Artificial Sequence: Synthetic oligonucleotide
gguuagaguaauauauaaa

SEQ ID NO: 137800 - RNA, 19 nt, Artificial Sequence
  Description of Artificial Sequence: Synthetic oligonucleotide
auucuucgaugguggcaag

SEQ ID NO: 137801 - RNA, 19 nt, Artificial Sequence
  Description of Artificial Sequence: Synthetic oligonucleotide
ucggagcaguuuagaagaa

SEQ ID NO: 137802 - RNA, 19 nt, Artificial Sequence
  Description of Artificial Sequence: Synthetic oligonucleotide
cuagcugccuaagccucgc

SEQ ID NO: 137803 - RNA, 19 nt, Artificial Sequence
  Description of Artificial Sequence: Synthetic oligonucleotide
agaucccuauucccacacu

SEQ ID NO: 137804 - RNA, 19 nt, Artificial Sequence
  Description of Artificial Sequence: Synthetic oligonucleotide
gcuagcaaagaauuucggu

SEQ ID NO: 137805 - RNA, 19 nt, Artificial Sequence
  Description of Artificial Sequence: Synthetic oligonucleotide
gcgcaauuauaaaaucagc

SEQ ID NO: 137806 - RNA, 19 nt, Artificial Sequence
  Description of Artificial Sequence: Synthetic oligonucleotide
ccacuaaauguugaagaug

SEQ ID NO: 137807 - RNA, 19 nt, Artificial Sequence
  Description of Artificial Sequence: Synthetic oligonucleotide
aacgucgagcaaguucuuu

SEQ ID NO: 137808 - RNA, 19 nt, Artificial Sequence
  Description of Artificial Sequence: Synthetic oligonucleotide
uuuacuccguacgguugaa

SEQ ID NO: 137809 - RNA, 19 nt, Artificial Sequence
  Description of Artificial Sequence: Synthetic oligonucleotide
guggcgucugcaucauaac

SEQ ID NO: 137810 - RNA, 19 nt, Artificial Sequence
  Description of Artificial Sequence: Synthetic oligonucleotide
aguacucuuuucggagagu

SEQ ID NO: 137811 - RNA, 19 nt, Artificial Sequence
  Description of Artificial Sequence: Synthetic oligonucleotide
uaacagggguaugcagugu

SEQ ID NO: 137812 - RNA, 19 nt, Artificial Sequence
  Description of Artificial Sequence: Synthetic oligonucleotide
uuguaccacgccgauuaua

SEQ ID NO: 137813 - RNA, 19 nt, Artificial Sequence
  Description of Artificial Sequence: Synthetic oligonucleotide
uuacuccguacgguugaac

SEQ ID NO: 137814 - RNA, 19 nt, Artificial Sequence
  Description of Artificial Sequence: Synthetic oligonucleotide
guacgguugaaccccgacu

SEQ ID NO: 137815 - RNA, 19 nt, Artificial Sequence
  Description of Artificial Sequence: Synthetic oligonucleotide
augaucuaucgaaauuaua

SEQ ID NO: 137816 - RNA, 19 nt, Artificial Sequence
  Description of Artificial Sequence: Synthetic oligonucleotide
ugccuaagccucgcaaaau

SEQ ID NO: 137817 - RNA, 19 nt, Artificial Sequence
  Description of Artificial Sequence: Synthetic oligonucleotide
cuugucggagcaguuuaga

SEQ ID NO: 137818 - RNA, 19 nt, Artificial Sequence
  Description of Artificial Sequence: Synthetic oligonucleotide
ggguuaugaauucuauuau

SEQ ID NO: 137819 - RNA, 19 nt, Artificial Sequence
  Description of Artificial Sequence: Synthetic oligonucleotide
ugaaccccgacugcucauu

SEQ ID NO: 137820 - RNA, 19 nt, Artificial Sequence
  Description of Artificial Sequence: Synthetic oligonucleotide
cuguaaccuguuagaagua

SEQ ID NO: 137821 - RNA, 19 nt, Artificial Sequence
  Description of Artificial Sequence: Synthetic oligonucleotide
cgccgauuauaaucaagag

SEQ ID NO: 137822 - RNA, 19 nt, Artificial Sequence
  Description of Artificial Sequence: Synthetic oligonucleotide
acacucuaauaagcuguau

SEQ ID NO: 137823 - RNA, 19 nt, Artificial Sequence
  Description of Artificial Sequence: Synthetic oligonucleotide
cucuaauaagcuguauaau

SEQ ID NO: 137824 - RNA, 19 nt, Artificial Sequence
  Description of Artificial Sequence: Synthetic oligonucleotide
uucccucauuaagauccuc

SEQ ID NO: 137825 - RNA, 19 nt, Artificial Sequence
  Description of Artificial Sequence: Synthetic oligonucleotide
aggcuuguaccacgccgau

SEQ ID NO: 137826 - RNA, 19 nt, Artificial Sequence
  Description of Artificial Sequence: Synthetic oligonucleotide
cuucgaugguggcaagucu

SEQ ID NO: 137827 - RNA, 19 nt, Artificial Sequence
  Description of Artificial Sequence: Synthetic oligonucleotide
cgucuauucuucgauggug

SEQ ID NO: 137828 - RNA, 19 nt, Artificial Sequence
  Description of Artificial Sequence: Synthetic oligonucleotide
ggaacaccccaaugaaaua

SEQ ID NO: 137829 - RNA, 19 nt, Artificial Sequence
  Description of Artificial Sequence: Synthetic oligonucleotide
agccaacuaacagcgcaua

SEQ ID NO: 137830 - RNA, 19 nt, Artificial Sequence
  Description of Artificial Sequence: Synthetic oligonucleotide
gccucgcaaaaugaguuga

SEQ ID NO: 137831 - RNA, 19 nt, Artificial Sequence
  Description of Artificial Sequence: Synthetic oligonucleotide
guuugagacugguuaccuu

SEQ ID NO: 137832 - RNA, 19 nt, Artificial Sequence
  Description of Artificial Sequence: Synthetic oligonucleotide
ccaacuaacagcgcauaaa

SEQ ID NO: 137833 - RNA, 19 nt, Artificial Sequence
  Description of Artificial Sequence: Synthetic oligonucleotide
aaacgucgagcaaguucuu

SEQ ID NO: 137834 - RNA, 19 nt, Artificial Sequence
  Description of Artificial Sequence: Synthetic oligonucleotide
ggagagcaaguugcaugcc

SEQ ID NO: 137835 - RNA, 19 nt, Artificial Sequence
  Description of Artificial Sequence: Synthetic oligonucleotide
gccaacuaacagcgcauaa

SEQ ID NO: 137836 - RNA, 19 nt, Artificial Sequence
  Description of Artificial Sequence: Synthetic oligonucleotide
ggcucauaugggagaagca

SEQ ID NO: 137837 - RNA, 19 nt, Artificial Sequence
  Description of Artificial Sequence: Synthetic oligonucleotide
cguacgguugaaccccgac

SEQ ID NO: 137838 - RNA, 19 nt, Artificial Sequence
  Description of Artificial Sequence: Synthetic oligonucleotide
cacuaaugacugacauggu

SEQ ID NO: 137839 - RNA, 19 nt, Artificial Sequence
  Description of Artificial Sequence: Synthetic oligonucleotide
gcuuagccacauacuguca

SEQ ID NO: 137840 - RNA, 19 nt, Artificial Sequence
  Description of Artificial Sequence: Synthetic oligonucleotide
guaccacgccgauuauaau

SEQ ID NO: 137841 - RNA, 19 nt, Artificial Sequence
  Description of Artificial Sequence: Synthetic oligonucleotide
cgguaagacaucagaggaa

SEQ ID NO: 137842 - RNA, 19 nt, Artificial Sequence
  Description of Artificial Sequence: Synthetic oligonucleotide
cgaugucuagcugccuaag

SEQ ID NO: 137843 - RNA, 19 nt, Artificial Sequence
  Description of Artificial Sequence: Synthetic oligonucleotide
cauaugggagaagcauguu

SEQ ID NO: 137844 - RNA, 19 nt, Artificial Sequence
  Description of Artificial Sequence: Synthetic oligonucleotide
ggccgcaaucuuuuagguu

SEQ ID NO: 137845 - RNA, 19 nt, Artificial Sequence
  Description of Artificial Sequence: Synthetic oligonucleotide
cccgacugcucauuccacu

SEQ ID NO: 137846 - RNA, 19 nt, Artificial Sequence
  Description of Artificial Sequence: Synthetic oligonucleotide
ccgucuauucuucgauggu

SEQ ID NO: 137847 - RNA, 19 nt, Artificial Sequence
  Description of Artificial Sequence: Synthetic oligonucleotide
ccucgcaaaaugaguugau

SEQ ID NO: 137848 - RNA, 19 nt, Artificial Sequence
  Description of Artificial Sequence: Synthetic oligonucleotide
ccacgccgauuauaaucaa

SEQ ID NO: 137849 - RNA, 19 nt, Artificial Sequence
  Description of Artificial Sequence: Synthetic oligonucleotide
cuuguggauuaggcuccuu

SEQ ID NO: 137850 - RNA, 19 nt, Artificial Sequence
  Description of Artificial Sequence: Synthetic oligonucleotide
ccguacgguugaaccccga

SEQ ID NO: 137851 - RNA, 19 nt, Artificial Sequence
  Description of Artificial Sequence: Synthetic oligonucleotide
ggcuuguaccacgccgauu

SEQ ID NO: 137852 - RNA, 19 nt, Artificial Sequence
  Description of Artificial Sequence: Synthetic oligonucleotide
ccgcccuucugaggacauc

SEQ ID NO: 137853 - RNA, 19 nt, Artificial Sequence
  Description of Artificial Sequence: Synthetic oligonucleotide
aaggauucuucccugaugc

SEQ ID NO: 137854 - RNA, 19 nt, Artificial Sequence
  Description of Artificial Sequence: Synthetic oligonucleotide
uuaacaauugacacgagug

SEQ ID NO: 137855 - RNA, 19 nt, Artificial Sequence
  Description of Artificial Sequence: Synthetic oligonucleotide
auuggaauguuauauuccc

SEQ ID NO: 137856 - RNA, 19 nt, Artificial Sequence
  Description of Artificial Sequence: Synthetic oligonucleotide
uauacuuuugccacggagg

SEQ ID NO: 137857 - RNA, 19 nt, Artificial Sequence
  Description of Artificial Sequence: Synthetic oligonucleotide
aagaauggguuagauaacc

SEQ ID NO: 137858 - RNA, 19 nt, Artificial Sequence
  Description of Artificial Sequence: Synthetic oligonucleotide
agagauuaaaauaaagggg

SEQ ID NO: 137859 - RNA, 19 nt, Artificial Sequence
  Description of Artificial Sequence: Synthetic oligonucleotide
uguuaagggaauaaaagau

SEQ ID NO: 137860 - RNA, 19 nt, Artificial Sequence
  Description of Artificial Sequence: Synthetic oligonucleotide
cuaauaaacccucaauccg

SEQ ID NO: 137861 - RNA, 19 nt, Artificial Sequence
  Description of Artificial Sequence: Synthetic oligonucleotide
ucuacaugaagacgaaucc

SEQ ID NO: 137862 - RNA, 19 nt, Artificial Sequence
  Description of Artificial Sequence: Synthetic oligonucleotide
aaucucaccaaucacuggu

SEQ ID NO: 137863 - RNA, 19 nt, Artificial Sequence
  Description of Artificial Sequence: Synthetic oligonucleotide
acugucgagaaacaauagc

SEQ ID NO: 137864 - RNA, 19 nt, Artificial Sequence
  Description of Artificial Sequence: Synthetic oligonucleotide
aucaauaccauguacaguu

SEQ ID NO: 137865 - RNA, 19 nt, Artificial Sequence
  Description of Artificial Sequence: Synthetic oligonucleotide
uuaacuacaugacaaacuu

SEQ ID NO: 137866 - RNA, 19 nt, Artificial Sequence
  Description of Artificial Sequence: Synthetic oligonucleotide
uaaacccucaauccgagug

SEQ ID NO: 137867 - RNA, 19 nt, Artificial Sequence
  Description of Artificial Sequence: Synthetic oligonucleotide
aacaauugacacgaguggg

SEQ ID NO: 137868 - RNA, 19 nt, Artificial Sequence
  Description of Artificial Sequence: Synthetic oligonucleotide
ugcuaauaaacccucaauc

SEQ ID NO: 137869 - RNA, 19 nt, Artificial Sequence
  Description of Artificial Sequence: Synthetic oligonucleotide
auaaccuuguucuaggagu

SEQ ID NO: 137870 - RNA, 19 nt, Artificial Sequence
  Description of Artificial Sequence: Synthetic oligonucleotide
ugucuacuuaacuacauga

SEQ ID NO: 137871 - RNA, 19 nt, Artificial Sequence
  Description of Artificial Sequence: Synthetic oligonucleotide
uaauaaacccucaauccga

SEQ ID NO: 137872 - RNA, 19 nt, Artificial Sequence
  Description of Artificial Sequence: Synthetic oligonucleotide
uuuaacaauugacacgagu

SEQ ID NO: 137873 - RNA, 19 nt, Artificial Sequence
  Description of Artificial Sequence: Synthetic oligonucleotide
aaagauuccucuguggucu

SEQ ID NO: 137874 - RNA, 19 nt, Artificial Sequence
  Description of Artificial Sequence: Synthetic oligonucleotide
uucuacaugaagacgaauc

SEQ ID NO: 137875 - RNA, 19 nt, Artificial Sequence
  Description of Artificial Sequence: Synthetic oligonucleotide
agugaucaauaccauguac

SEQ ID NO: 137876 - RNA, 19 nt, Artificial Sequence
  Description of Artificial Sequence: Synthetic oligonucleotide
auacuuuugccacggaggg

SEQ ID NO: 137877 - RNA, 19 nt, Artificial Sequence
  Description of Artificial Sequence: Synthetic oligonucleotide
auugacacgagugggauuc

SEQ ID NO: 137878 - RNA, 19 nt, Artificial Sequence
  Description of Artificial Sequence: Synthetic oligonucleotide
aauggguuagauaaccuug

SEQ ID NO: 137879 - RNA, 19 nt, Artificial Sequence
  Description of Artificial Sequence: Synthetic oligonucleotide
gcaaucaucauccaacccg

SEQ ID NO: 137880 - RNA, 19 nt, Artificial Sequence
  Description of Artificial Sequence: Synthetic oligonucleotide
gagauucuaagcaugauca

SEQ ID NO: 137881 - RNA, 19 nt, Artificial Sequence
  Description of Artificial Sequence: Synthetic oligonucleotide
uucuaugaaggcagaagag

SEQ ID NO: 137882 - RNA, 19 nt, Artificial Sequence
  Description of Artificial Sequence: Synthetic oligonucleotide
uuugcuuuacgccgcaucu

SEQ ID NO: 137883 - RNA, 19 nt, Artificial Sequence
  Description of Artificial Sequence: Synthetic oligonucleotide
gauaaccuuguucuaggag

SEQ ID NO: 137884 - RNA, 19 nt, Artificial Sequence
  Description of Artificial Sequence: Synthetic oligonucleotide
caucuuaucaggcaucuug

SEQ ID NO: 137885 - RNA, 19 nt, Artificial Sequence
  Description of Artificial Sequence: Synthetic oligonucleotide
aauuguuaagggaauaaaa

SEQ ID NO: 137886 - RNA, 19 nt, Artificial Sequence
  Description of Artificial Sequence: Synthetic oligonucleotide
gcuaauaaacccucaaucc

SEQ ID NO: 137887 - RNA, 19 nt, Artificial Sequence
  Description of Artificial Sequence: Synthetic oligonucleotide
agcuuucccgcuuucgugc

SEQ ID NO: 137888 - RNA, 19 nt, Artificial Sequence
  Description of Artificial Sequence: Synthetic oligonucleotide
aacuugaacagggaagaag

SEQ ID NO: 137889 - RNA, 19 nt, Artificial Sequence
  Description of Artificial Sequence: Synthetic oligonucleotide
ugacuacccuacuucaugg

SEQ ID NO: 137890 - RNA, 19 nt, Artificial Sequence
  Description of Artificial Sequence: Synthetic oligonucleotide
acuuaacuacaugacaaac

SEQ ID NO: 137891 - RNA, 19 nt, Artificial Sequence
  Description of Artificial Sequence: Synthetic oligonucleotide
ugucgugucgauauucccc

SEQ ID NO: 137892 - RNA, 19 nt, Artificial Sequence
  Description of Artificial Sequence: Synthetic oligonucleotide
cacgcuuuccauauuaaug

SEQ ID NO: 137893 - RNA, 19 nt, Artificial Sequence
  Description of Artificial Sequence: Synthetic oligonucleotide
uuuacgccgcaucucagcc

SEQ ID NO: 137894 - RNA, 19 nt, Artificial Sequence
  Description of Artificial Sequence: Synthetic oligonucleotide
cuaccuuuaacaauugaca

SEQ ID NO: 137895 - RNA, 19 nt, Artificial Sequence
  Description of Artificial Sequence: Synthetic oligonucleotide
ucccugaugcaguuuaggg

SEQ ID NO: 137896 - RNA, 19 nt, Artificial Sequence
  Description of Artificial Sequence: Synthetic oligonucleotide
gauucuaagcaugaucaug

SEQ ID NO: 137897 - RNA, 19 nt, Artificial Sequence
  Description of Artificial Sequence: Synthetic oligonucleotide
aggauuucguauuugucca

SEQ ID NO: 137898 - RNA, 19 nt, Artificial Sequence
  Description of Artificial Sequence: Synthetic oligonucleotide
uugguauuacaggauuucg

SEQ ID NO: 137899 - RNA, 19 nt, Artificial Sequence
  Description of Artificial Sequence: Synthetic oligonucleotide
guauacuuuugccacggag

SEQ ID NO: 137900 - RNA, 19 nt, Artificial Sequence
  Description of Artificial Sequence: Synthetic oligonucleotide
aauaaacccucaauccgag

SEQ ID NO: 137901 - RNA, 19 nt, Artificial Sequence
  Description of Artificial Sequence: Synthetic oligonucleotide
cauauuaauggguggagca

SEQ ID NO: 137902 - RNA, 19 nt, Artificial Sequence
  Description of Artificial Sequence: Synthetic oligonucleotide
uuuauguuagugucauuuc

SEQ ID NO: 137903 - RNA, 19 nt, Artificial Sequence
  Description of Artificial Sequence: Synthetic oligonucleotide
ugguauuacaggauuucgu

SEQ ID NO: 137904 - RNA, 19 nt, Artificial Sequence
  Description of Artificial Sequence: Synthetic oligonucleotide
cuacuuaacuacaugacaa

SEQ ID NO: 137905 - RNA, 19 nt, Artificial Sequence
  Description of Artificial Sequence: Synthetic oligonucleotide
uaaggauucuucccugaug

SEQ ID NO: 137906 - RNA, 19 nt, Artificial Sequence
  Description of Artificial Sequence: Synthetic oligonucleotide
auuaauggguggagcaugc

SEQ ID NO: 137907 - RNA, 19 nt, Artificial Sequence
  Description of Artificial Sequence: Synthetic oligonucleotide
auaauaguuucaccuucag

SEQ ID NO: 137908 - RNA, 19 nt, Artificial Sequence
  Description of Artificial Sequence: Synthetic oligonucleotide
uacguuuccccauauuaga

SEQ ID NO: 137909 - RNA, 19 nt, Artificial Sequence
  Description of Artificial Sequence: Synthetic oligonucleotide
uugucuacuuaacuacaug

SEQ ID NO: 137910 - RNA, 19 nt, Artificial Sequence
  Description of Artificial Sequence: Synthetic oligonucleotide
gucgugucgauauuccccg

SEQ ID NO: 137911 - RNA, 19 nt, Artificial Sequence
  Description of Artificial Sequence: Synthetic oligonucleotide
uggaacaauggauggacac

SEQ ID NO: 137912 - RNA, 19 nt, Artificial Sequence
  Description of Artificial Sequence: Synthetic oligonucleotide
agaggauaagacaaccuuc

SEQ ID NO: 137913 - RNA, 19 nt, Artificial Sequence
  Description of Artificial Sequence: Synthetic oligonucleotide
uuaauaccccuacaucacu

SEQ ID NO: 137914 - RNA, 19 nt, Artificial Sequence
  Description of Artificial Sequence: Synthetic oligonucleotide
uucguuguguacauuggaa

SEQ ID NO: 137915 - RNA, 19 nt, Artificial Sequence
  Description of Artificial Sequence: Synthetic oligonucleotide
uguagcugcaccccuuucu

SEQ ID NO: 137916 - RNA, 19 nt, Artificial Sequence
  Description of Artificial Sequence: Synthetic oligonucleotide
ugaccgaguguacugaaaa

SEQ ID NO: 137917 - RNA, 19 nt, Artificial Sequence
  Description of Artificial Sequence: Synthetic oligonucleotide
agguauuucgccgacuguc

SEQ ID NO: 137918 - RNA, 19 nt, Artificial Sequence
  Description of Artificial Sequence: Synthetic oligonucleotide
uuacgggacauuccauucc

SEQ ID NO: 137919 - RNA, 19 nt, Artificial Sequence
  Description of Artificial Sequence: Synthetic oligonucleotide
cuacaugaagacgaauccg

SEQ ID NO: 137920 - RNA, 19 nt, Artificial Sequence
  Description of Artificial Sequence: Synthetic oligonucleotide
agaaugagagccccgcucu

SEQ ID NO: 137921 - RNA, 19 nt, Artificial Sequence
  Description of Artificial Sequence: Synthetic oligonucleotide
aucuccacaaacugucgag

SEQ ID NO: 137922 - RNA, 19 nt, Artificial Sequence
  Description of Artificial Sequence: Synthetic oligonucleotide
cacuccaagguauuucgcc

SEQ ID NO: 137923 - RNA, 19 nt, Artificial Sequence
  Description of Artificial Sequence: Synthetic oligonucleotide
uauucccuauguauuuuac

SEQ ID NO: 137924 - RNA, 19 nt, Artificial Sequence
  Description of Artificial Sequence: Synthetic oligonucleotide
uccaauggcuuguaaauuu

SEQ ID NO: 137925 - RNA, 19 nt, Artificial Sequence
  Description of Artificial Sequence: Synthetic oligonucleotide
ucugagguacguuucccca

SEQ ID NO: 137926 - RNA, 19 nt, Artificial Sequence
  Description of Artificial Sequence: Synthetic oligonucleotide
ucgaaguacugcuugcaac

SEQ ID NO: 137927 - RNA, 19 nt, Artificial Sequence
  Description of Artificial Sequence: Synthetic oligonucleotide
uacccuacuucauggguag

SEQ ID NO: 137928 - RNA, 19 nt, Artificial Sequence
  Description of Artificial Sequence: Synthetic oligonucleotide
uaauuguuaagggaauaaa

SEQ ID NO: 137929 - RNA, 19 nt, Artificial Sequence
  Description of Artificial Sequence: Synthetic oligonucleotide
caagguauuucgccgacug

SEQ ID NO: 137930 - RNA, 19 nt, Artificial Sequence
  Description of Artificial Sequence: Synthetic oligonucleotide
acacgagugggauucgaag

SEQ ID NO: 137931 - RNA, 19 nt, Artificial Sequence
  Description of Artificial Sequence: Synthetic oligonucleotide
guaagcggagcuccgggcg

SEQ ID NO: 137932 - RNA, 19 nt, Artificial Sequence
  Description of Artificial Sequence: Synthetic oligonucleotide
uccauauuaauggguggag

SEQ ID NO: 137933 - RNA, 19 nt, Artificial Sequence
  Description of Artificial Sequence: Synthetic oligonucleotide
auaugcacgcuuuccauau

SEQ ID NO: 137934 - RNA, 19 nt, Artificial Sequence
  Description of Artificial Sequence: Synthetic oligonucleotide
ugagagacucugcagugaa

SEQ ID NO: 137935 - RNA, 19 nt, Artificial Sequence
  Description of Artificial Sequence: Synthetic oligonucleotide
acaucccuuaagcaguuca

SEQ ID NO: 137936 - RNA, 19 nt, Artificial Sequence
  Description of Artificial Sequence: Synthetic oligonucleotide
gugaucaauaccauguaca

SEQ ID NO: 137937 - RNA, 19 nt, Artificial Sequence
  Description of Artificial Sequence: Synthetic oligonucleotide
aacccucaauccgagugcg

SEQ ID NO: 137938 - RNA, 19 nt, Artificial Sequence
  Description of Artificial Sequence: Synthetic oligonucleotide
uuucguauuuguccacuaa

SEQ ID NO: 137939 - RNA, 19 nt, Artificial Sequence
  Description of Artificial Sequence: Synthetic oligonucleotide
uucugagguacguuucccc

SEQ ID NO: 137940 - RNA, 19 nt, Artificial Sequence
  Description of Artificial Sequence: Synthetic oligonucleotide
ucgauauuccccgucaauc

SEQ ID NO: 137941 - RNA, 19 nt, Artificial Sequence
  Description of Artificial Sequence: Synthetic oligonucleotide
gugacuacccuacuucaug

SEQ ID NO: 137942 - RNA, 19 nt, Artificial Sequence
  Description of Artificial Sequence: Synthetic oligonucleotide
ugaucccagugcgugaccg

SEQ ID NO: 137943 - RNA, 19 nt, Artificial Sequence
  Description of Artificial Sequence: Synthetic oligonucleotide
gacuacccuacuucauggg

SEQ ID NO: 137944 - RNA, 19 nt, Artificial Sequence
  Description of Artificial Sequence: Synthetic oligonucleotide
gauauuccccgucaaucuc

SEQ ID NO: 137945 - RNA, 19 nt, Artificial Sequence
  Description of Artificial Sequence: Synthetic oligonucleotide
cuuuacgccgcaucucagc

SEQ ID NO: 137946 - RNA, 19 nt, Artificial Sequence
  Description of Artificial Sequence: Synthetic oligonucleotide
aagcugcuaauaaacccuc

SEQ ID NO: 137947 - RNA, 19 nt, Artificial Sequence
  Description of Artificial Sequence: Synthetic oligonucleotide
aacccgcccagugcaaugc

SEQ ID NO: 137948 - RNA, 19 nt, Artificial Sequence
  Description of Artificial Sequence: Synthetic oligonucleotide
acuguugacuggaaaugac

SEQ ID NO: 137949 - RNA, 19 nt, Artificial Sequence
  Description of Artificial Sequence: Synthetic oligonucleotide
agguuagugugaucuuuuc

SEQ ID NO: 137950 - RNA, 19 nt, Artificial Sequence
  Description of Artificial Sequence: Synthetic oligonucleotide
uauuaccccaaaaguaauu

SEQ ID NO: 137951 - RNA, 19 nt, Artificial Sequence
  Description of Artificial Sequence: Synthetic oligonucleotide
acuacccuacuucaugggu

SEQ ID NO: 137952 - RNA, 19 nt, Artificial Sequence
  Description of Artificial Sequence: Synthetic oligonucleotide
uucuaagcaugaucaugcc

SEQ ID NO: 137953 - RNA, 19 nt, Artificial Sequence
  Description of Artificial Sequence: Synthetic oligonucleotide
guagugaucaauaccaugu

SEQ ID NO: 137954 - RNA, 19 nt, Artificial Sequence
  Description of Artificial Sequence: Synthetic oligonucleotide
uauuucgccgacugucgug

SEQ ID NO: 137955 - RNA, 19 nt, Artificial Sequence
  Description of Artificial Sequence: Synthetic oligonucleotide
aacugucgagaaacaauag

SEQ ID NO: 137956 - RNA, 19 nt, Artificial Sequence
  Description of Artificial Sequence: Synthetic oligonucleotide
guugguagacauaucuuac

SEQ ID NO: 137957 - RNA, 19 nt, Artificial Sequence
  Description of Artificial Sequence: Synthetic oligonucleotide
uucgccgacugucgugucg

SEQ ID NO: 137958 - RNA, 19 nt, Artificial Sequence
  Description of Artificial Sequence: Synthetic oligonucleotide
gacucaguagccucacuca

SEQ ID NO: 137959 - RNA, 19 nt, Artificial Sequence
  Description of Artificial Sequence: Synthetic oligonucleotide
uaaccuguauguugcagua

SEQ ID NO: 137960 - RNA, 19 nt, Artificial Sequence
  Description of Artificial Sequence: Synthetic oligonucleotide
gauuucuugucuacuuaac

SEQ ID NO: 137961 - RNA, 19 nt, Artificial Sequence
  Description of Artificial Sequence: Synthetic oligonucleotide
caagaauggguuagauaac

SEQ ID NO: 137962 - RNA, 19 nt, Artificial Sequence
  Description of Artificial Sequence: Synthetic oligonucleotide
gaagagguguuuacgggac

SEQ ID NO: 137963 - RNA, 19 nt, Artificial Sequence
  Description of Artificial Sequence: Synthetic oligonucleotide
aagguauuucgccgacugu

SEQ ID NO: 137964 - RNA, 19 nt, Artificial Sequence
  Description of Artificial Sequence: Synthetic oligonucleotide
ugcacuuugguugcuucug

SEQ ID NO: 137965 - RNA, 19 nt, Artificial Sequence
  Description of Artificial Sequence: Synthetic oligonucleotide
uagcuuucccgcuuucgug

SEQ ID NO: 137966 - RNA, 19 nt, Artificial Sequence
  Description of Artificial Sequence: Synthetic oligonucleotide
gcuaccuuuaacaauugac

SEQ ID NO: 137967 - RNA, 19 nt, Artificial Sequence
  Description of Artificial Sequence: Synthetic oligonucleotide
aaugcuugguggguggaaa

SEQ ID NO: 137968 - RNA, 19 nt, Artificial Sequence
  Description of Artificial Sequence: Synthetic oligonucleotide
acaacuggauuaauaagau

SEQ ID NO: 137969 - RNA, 19 nt, Artificial Sequence
  Description of Artificial Sequence: Synthetic oligonucleotide
gucuacuuaacuacaugac

SEQ ID NO: 137970 - RNA, 19 nt, Artificial Sequence
  Description of Artificial Sequence: Synthetic oligonucleotide
cuaaagucaagaauggguu

SEQ ID NO: 137971 - RNA, 19 nt, Artificial Sequence
  Description of Artificial Sequence: Synthetic oligonucleotide
ugguacugucuaaagucaa

SEQ ID NO: 137972 - RNA, 19 nt, Artificial Sequence
  Description of Artificial Sequence: Synthetic oligonucleotide
ugccauguaacuccauauu

SEQ ID NO: 137973 - RNA, 19 nt, Artificial Sequence
  Description of Artificial Sequence: Synthetic oligonucleotide
gcagcaaucaucauccaac

SEQ ID NO: 137974 - RNA, 19 nt, Artificial Sequence
  Description of Artificial Sequence: Synthetic oligonucleotide
gaugaucccagugcgugac

SEQ ID NO: 137975 - RNA, 19 nt, Artificial Sequence
  Description of Artificial Sequence: Synthetic oligonucleotide
cuuugcuuuacgccgcauc

SEQ ID NO: 137976 - RNA, 19 nt, Artificial Sequence
  Description of Artificial Sequence: Synthetic oligonucleotide
aauugacacgagugggauu

SEQ ID NO: 137977 - RNA, 19 nt, Artificial Sequence
  Description of Artificial Sequence: Synthetic oligonucleotide
gguacguuuccccauauua

SEQ ID NO: 137978 - RNA, 19 nt, Artificial Sequence
  Description of Artificial Sequence: Synthetic oligonucleotide
uauuccccgucaaucucac

SEQ ID NO: 137979 - RNA, 19 nt, Artificial Sequence
  Description of Artificial Sequence: Synthetic oligonucleotide
ucagccuuagcuucacguu

SEQ ID NO: 137980 - RNA, 19 nt, Artificial Sequence
  Description of Artificial Sequence: Synthetic oligonucleotide
gguauuucgccgacugucg

SEQ ID NO: 137981 - RNA, 19 nt, Artificial Sequence
  Description of Artificial Sequence: Synthetic oligonucleotide
accaacacccgaugggagu

SEQ ID NO: 137982 - RNA, 19 nt, Artificial Sequence
  Description of Artificial Sequence: Synthetic oligonucleotide
auauuaauggguggagcau

SEQ ID NO: 137983 - RNA, 19 nt, Artificial Sequence
  Description of Artificial Sequence: Synthetic oligonucleotide
cauccaacccgcccagugc

SEQ ID NO: 137984 - RNA, 19 nt, Artificial Sequence
  Description of Artificial Sequence: Synthetic oligonucleotide
acaauugacacgaguggga

SEQ ID NO: 137985 - RNA, 19 nt, Artificial Sequence
  Description of Artificial Sequence: Synthetic oligonucleotide
ugagguacguuuccccaua

SEQ ID NO: 137986 - RNA, 19 nt, Artificial Sequence
  Description of Artificial Sequence: Synthetic oligonucleotide
uguguacauuggaauguua

SEQ ID NO: 137987 - RNA, 19 nt, Artificial Sequence
  Description of Artificial Sequence: Synthetic oligonucleotide
agauucuaagcaugaucau

SEQ ID NO: 137988 - RNA, 19 nt, Artificial Sequence
  Description of Artificial Sequence: Synthetic oligonucleotide
guacugucuaaagucaaga

SEQ ID NO: 137989 - RNA, 19 nt, Artificial Sequence
  Description of Artificial Sequence: Synthetic oligonucleotide
aacacccgaugggaguggg

SEQ ID NO: 137990 - RNA, 19 nt, Artificial Sequence
  Description of Artificial Sequence: Synthetic oligonucleotide
cugucgugucgauauuccc

SEQ ID NO: 137991 - RNA, 19 nt, Artificial Sequence
  Description of Artificial Sequence: Synthetic oligonucleotide
cccuuaagcaguucacugg

SEQ ID NO: 137992 - RNA, 19 nt, Artificial Sequence
  Description of Artificial Sequence: Synthetic oligonucleotide
acgaauccggccaaauuug

SEQ ID NO: 137993 - RNA, 19 nt, Artificial Sequence
  Description of Artificial Sequence: Synthetic oligonucleotide
auuucgccgacugucgugu

SEQ ID NO: 137994 - RNA, 19 nt, Artificial Sequence
  Description of Artificial Sequence: Synthetic oligonucleotide
guaaccuguauguugcagu

SEQ ID NO: 137995 - RNA, 19 nt, Artificial Sequence
  Description of Artificial Sequence: Synthetic oligonucleotide
gguugguagacauaucuua

SEQ ID NO: 137996 - RNA, 19 nt, Artificial Sequence
  Description of Artificial Sequence: Synthetic oligonucleotide
acucaguagccucacucau

SEQ ID NO: 137997 - RNA, 19 nt, Artificial Sequence
  Description of Artificial Sequence: Synthetic oligonucleotide
gccuucguuguguacauug

SEQ ID NO: 137998 - RNA, 19 nt, Artificial Sequence
  Description of Artificial Sequence: Synthetic oligonucleotide
acgcaccacgcucuggcuc

SEQ ID NO: 137999 - RNA, 19 nt, Artificial Sequence
  Description of Artificial Sequence: Synthetic oligonucleotide
gugcaccaacacccgaugg

SEQ ID NO: 138000 - RNA, 19 nt, Artificial Sequence
  Description of Artificial Sequence: Synthetic oligonucleotide
gaauggguuagauaaccuu

SEQ ID NO: 138001 - RNA, 19 nt, Artificial Sequence
  Description of Artificial Sequence: Synthetic oligonucleotide
agaauggguuagauaaccu

SEQ ID NO: 138002 - RNA, 19 nt, Artificial Sequence
  Description of Artificial Sequence: Synthetic oligonucleotide
augcacgcuuuccauauua

SEQ ID NO: 138003 - RNA, 19 nt, Artificial Sequence
  Description of Artificial Sequence: Synthetic oligonucleotide
cuucguuguguacauugga

SEQ ID NO: 138004 - RNA, 19 nt, Artificial Sequence
  Description of Artificial Sequence: Synthetic oligonucleotide
auaaacccucaauccgagu

SEQ ID NO: 138005 - RNA, 19 nt, Artificial Sequence
  Description of Artificial Sequence: Synthetic oligonucleotide
gguacugucuaaagucaag

SEQ ID NO: 138006 - RNA, 19 nt, Artificial Sequence
  Description of Artificial Sequence: Synthetic oligonucleotide
cauagguugguagacauau

SEQ ID NO: 138007 - RNA, 19 nt, Artificial Sequence
  Description of Artificial Sequence: Synthetic oligonucleotide
auuccccgucaaucucacc

SEQ ID NO: 138008 - RNA, 19 nt, Artificial Sequence
  Description of Artificial Sequence: Synthetic oligonucleotide
agccaaugagagacucugc

SEQ ID NO: 138009 - RNA, 19 nt, Artificial Sequence
  Description of Artificial Sequence: Synthetic oligonucleotide
guucagaaugagagccccg

SEQ ID NO: 138010 - RNA, 19 nt, Artificial Sequence
  Description of Artificial Sequence: Synthetic oligonucleotide
aagacgaauccggccaaau

SEQ ID NO: 138011 - RNA, 19 nt, Artificial Sequence
  Description of Artificial Sequence: Synthetic oligonucleotide
gaaaguggucucuguggaa

SEQ ID NO: 138012 - RNA, 19 nt, Artificial Sequence
  Description of Artificial Sequence: Synthetic oligonucleotide
cuucccugaugcaguuuag

SEQ ID NO: 138013 - RNA, 19 nt, Artificial Sequence
  Description of Artificial Sequence: Synthetic oligonucleotide
uuaauggguggagcaugca

SEQ ID NO: 138014 - RNA, 19 nt, Artificial Sequence
  Description of Artificial Sequence: Synthetic oligonucleotide
caccaacacccgaugggag

SEQ ID NO: 138015 - RNA, 19 nt, Artificial Sequence
  Description of Artificial Sequence: Synthetic oligonucleotide
cguuguguacauuggaaug

SEQ ID NO: 138016 - RNA, 19 nt, Artificial Sequence
  Description of Artificial Sequence: Synthetic oligonucleotide
uuucccgcuuucgugcaga

SEQ ID NO: 138017 - RNA, 19 nt, Artificial Sequence
  Description of Artificial Sequence: Synthetic oligonucleotide
uacuuuugccacggagggc

SEQ ID NO: 138018 - RNA, 19 nt, Artificial Sequence
  Description of Artificial Sequence: Synthetic oligonucleotide
uuacgccgcaucucagccu

SEQ ID NO: 138019 - RNA, 19 nt, Artificial Sequence
  Description of Artificial Sequence: Synthetic oligonucleotide
cuacccuacuucaugggua

SEQ ID NO: 138020 - RNA, 19 nt, Artificial Sequence
  Description of Artificial Sequence: Synthetic oligonucleotide
ggacgcaccacgcucuggc

SEQ ID NO: 138021 - RNA, 19 nt, Artificial Sequence
  Description of Artificial Sequence: Synthetic oligonucleotide
cauaugcacgcuuuccaua

SEQ ID NO: 138022 - RNA, 19 nt, Artificial Sequence
  Description of Artificial Sequence: Synthetic oligonucleotide
ccauauuaauggguggagc

SEQ ID NO: 138023 - RNA, 19 nt, Artificial Sequence
  Description of Artificial Sequence: Synthetic oligonucleotide
uugacacgagugggauucg

SEQ ID NO: 138024 - RNA, 19 nt, Artificial Sequence
  Description of Artificial Sequence: Synthetic oligonucleotide
ugguaaccuguauguugca

SEQ ID NO: 138025 - RNA, 19 nt, Artificial Sequence
  Description of Artificial Sequence: Synthetic oligonucleotide
gaaugagagccccgcucuc

SEQ ID NO: 138026 - RNA, 19 nt, Artificial Sequence
  Description of Artificial Sequence: Synthetic oligonucleotide
agugcgugaccgaguguac

SEQ ID NO: 138027 - RNA, 19 nt, Artificial Sequence
  Description of Artificial Sequence: Synthetic oligonucleotide
ggugcaccaacacccgaug

SEQ ID NO: 138028 - RNA, 19 nt, Artificial Sequence
  Description of Artificial Sequence: Synthetic oligonucleotide
cccgaugggagugggaugg

SEQ ID NO: 138029 - RNA, 19 nt, Artificial Sequence
  Description of Artificial Sequence: Synthetic oligonucleotide
uaggagugccaaacacaau

SEQ ID NO: 138030 - RNA, 19 nt, Artificial Sequence
  Description of Artificial Sequence: Synthetic oligonucleotide
ucgccgacugucgugucga

SEQ ID NO: 138031 - RNA, 19 nt, Artificial Sequence
  Description of Artificial Sequence: Synthetic oligonucleotide
cacgagugggauucgaagu

SEQ ID NO: 138032 - RNA, 19 nt, Artificial Sequence
  Description of Artificial Sequence: Synthetic oligonucleotide
aaaccugacggggcuguuu

SEQ ID NO: 138033 - RNA, 19 nt, Artificial Sequence
  Description of Artificial Sequence: Synthetic oligonucleotide
ugcgggucaucuccacaaa

SEQ ID NO: 138034 - RNA, 19 nt, Artificial Sequence
  Description of Artificial Sequence: Synthetic oligonucleotide
cugcggcccaagguaagcg

SEQ ID NO: 138035 - RNA, 19 nt, Artificial Sequence
  Description of Artificial Sequence: Synthetic oligonucleotide
ugacggggcuguuuccauc

SEQ ID NO: 138036 - RNA, 19 nt, Artificial Sequence
  Description of Artificial Sequence: Synthetic oligonucleotide
ggugggacgcaccacgcuc

SEQ ID NO: 138037 - RNA, 19 nt, Artificial Sequence
  Description of Artificial Sequence: Synthetic oligonucleotide
ugacacgagugggauucga

SEQ ID NO: 138038 - RNA, 19 nt, Artificial Sequence
  Description of Artificial Sequence: Synthetic oligonucleotide
uugcuuuacgccgcaucuc

SEQ ID NO: 138039 - RNA, 19 nt, Artificial Sequence
  Description of Artificial Sequence: Synthetic oligonucleotide
uaugcacgcuuuccauauu

SEQ ID NO: 138040 - RNA, 19 nt, Artificial Sequence
  Description of Artificial Sequence: Synthetic oligonucleotide
acguuuccccauauuagaa

SEQ ID NO: 138041 - RNA, 19 nt, Artificial Sequence
  Description of Artificial Sequence: Synthetic oligonucleotide
acccgaugggagugggaug

SEQ ID NO: 138042 - RNA, 19 nt, Artificial Sequence
  Description of Artificial Sequence: Synthetic oligonucleotide
ggauuucguauuuguccac

SEQ ID NO: 138043 - RNA, 19 nt, Artificial Sequence
  Description of Artificial Sequence: Synthetic oligonucleotide
caccacuccaagguauuuc

SEQ ID NO: 138044 - RNA, 19 nt, Artificial Sequence
  Description of Artificial Sequence: Synthetic oligonucleotide
caacccgcccagugcaaug

SEQ ID NO: 138045 - RNA, 19 nt, Artificial Sequence
  Description of Artificial Sequence: Synthetic oligonucleotide
cuacuucauggguaguaua

SEQ ID NO: 138046 - RNA, 19 nt, Artificial Sequence
  Description of Artificial Sequence: Synthetic oligonucleotide
agcagcggacaugauucca

SEQ ID NO: 138047 - RNA, 19 nt, Artificial Sequence
  Description of Artificial Sequence: Synthetic oligonucleotide
gacacgagugggauucgaa

SEQ ID NO: 138048 - RNA, 19 nt, Artificial Sequence
  Description of Artificial Sequence: Synthetic oligonucleotide
uccaacccgcccagugcaa

SEQ ID NO: 138049 - RNA, 19 nt, Artificial Sequence
  Description of Artificial Sequence: Synthetic oligonucleotide
ucgugucgauauuccccgu

SEQ ID NO: 138050 - RNA, 19 nt, Artificial Sequence
  Description of Artificial Sequence: Synthetic oligonucleotide
guauuucgccgacugucgu

SEQ ID NO: 138051 - RNA, 19 nt, Artificial Sequence
  Description of Artificial Sequence: Synthetic oligonucleotide
agguacguuuccccauauu

SEQ ID NO: 138052 - RNA, 19 nt, Artificial Sequence
  Description of Artificial Sequence: Synthetic oligonucleotide
ccacuccaagguauuucgc

SEQ ID NO: 138053 - RNA, 19 nt, Artificial Sequence
  Description of Artificial Sequence: Synthetic oligonucleotide
ccaacacccgaugggagug

SEQ ID NO: 138054 - RNA, 19 nt, Artificial Sequence
  Description of Artificial Sequence: Synthetic oligonucleotide
gcaggucaaccacuuggca

SEQ ID NO: 138055 - RNA, 19 nt, Artificial Sequence
  Description of Artificial Sequence: Synthetic oligonucleotide
caauugacacgagugggau

SEQ ID NO: 138056 - RNA, 19 nt, Artificial Sequence
  Description of Artificial Sequence: Synthetic oligonucleotide
uuucgccgacugucguguc

SEQ ID NO: 138057 - RNA, 19 nt, Artificial Sequence
  Description of Artificial Sequence: Synthetic oligonucleotide
gcuuuccauauuaaugggu

SEQ ID NO: 138058 - RNA, 19 nt, Artificial Sequence
  Description of Artificial Sequence: Synthetic oligonucleotide
gcuuuacgccgcaucucag

SEQ ID NO: 138059 - RNA, 19 nt, Artificial Sequence
  Description of Artificial Sequence: Synthetic oligonucleotide
ucccgcuuucgugcagacu

SEQ ID NO: 138060 - RNA, 19 nt, Artificial Sequence
  Description of Artificial Sequence: Synthetic oligonucleotide
cuggugcaccaacacccga

SEQ ID NO: 138061 - RNA, 19 nt, Artificial Sequence
  Description of Artificial Sequence: Synthetic oligonucleotide
cugcuagugccuacagccu

SEQ ID NO: 138062 - RNA, 19 nt, Artificial Sequence
  Description of Artificial Sequence: Synthetic oligonucleotide
cugagguacguuuccccau

SEQ ID NO: 138063 - RNA, 19 nt, Artificial Sequence
  Description of Artificial Sequence: Synthetic oligonucleotide
gagguacguuuccccauau

SEQ ID NO: 138064 - RNA, 19 nt, Artificial Sequence
  Description of Artificial Sequence: Synthetic oligonucleotide
gcuuucccgcuuucgugca

SEQ ID NO: 138065 - RNA, 19 nt, Artificial Sequence
  Description of Artificial Sequence: Synthetic oligonucleotide
cuuuucggcuuuccucccu

SEQ ID NO: 138066 - RNA, 19 nt, Artificial Sequence
  Description of Artificial Sequence: Synthetic oligonucleotide
ccgacugucgugucgauau

SEQ ID NO: 138067 - RNA, 19 nt, Artificial Sequence
  Description of Artificial Sequence: Synthetic oligonucleotide
gacgcaccacgcucuggcu

SEQ ID NO: 138068 - RNA, 19 nt, Artificial Sequence
  Description of Artificial Sequence: Synthetic oligonucleotide
cacguucuugagucucucu

SEQ ID NO: 138069 - RNA, 19 nt, Artificial Sequence
  Description of Artificial Sequence: Synthetic oligonucleotide
cuguagucuccacuuuaau

SEQ ID NO: 138070 - RNA, 19 nt, Artificial Sequence
  Description of Artificial Sequence: Synthetic oligonucleotide
cacggagggccagcuguuc

SEQ ID NO: 138071 - RNA, 19 nt, Artificial Sequence
  Description of Artificial Sequence: Synthetic oligonucleotide
gugggacgcaccacgcucu

SEQ ID NO: 138072 - RNA, 19 nt, Artificial Sequence
  Description of Artificial Sequence: Synthetic oligonucleotide
cacccgaugggagugggau

SEQ ID NO: 138073 - RNA, 19 nt, Artificial Sequence
  Description of Artificial Sequence: Synthetic oligonucleotide
gguugcuucugagguacgu

SEQ ID NO: 138074 - RNA, 19 nt, Artificial Sequence
  Description of Artificial Sequence: Synthetic oligonucleotide
gugcgugaccgaguguacu

SEQ ID NO: 138075 - RNA, 19 nt, Artificial Sequence
  Description of Artificial Sequence: Synthetic oligonucleotide
acggggcuguuuccaucua

SEQ ID NO: 138076 - RNA, 19 nt, Artificial Sequence
  Description of Artificial Sequence: Synthetic oligonucleotide
gcccaagguaagcggagcu

SEQ ID NO: 138077 - RNA, 19 nt, Artificial Sequence
  Description of Artificial Sequence: Synthetic oligonucleotide
gcgugaccgaguguacuga

SEQ ID NO: 138078 - RNA, 19 nt, Artificial Sequence
  Description of Artificial Sequence: Synthetic oligonucleotide
ugccuucguuguguacauu

SEQ ID NO: 138079 - RNA, 19 nt, Artificial Sequence
  Description of Artificial Sequence: Synthetic oligonucleotide
ccugacggggcuguuucca

SEQ ID NO: 138080 - RNA, 19 nt, Artificial Sequence
  Description of Artificial Sequence: Synthetic oligonucleotide
ccucaauccgagugcgggu

SEQ ID NO: 138081 - RNA, 19 nt, Artificial Sequence
  Description of Artificial Sequence: Synthetic oligonucleotide
ggcaccacuccaagguauu

SEQ ID NO: 138082 - RNA, 19 nt, Artificial Sequence
  Description of Artificial Sequence: Synthetic oligonucleotide
ccgggcgcuccggaccugc

SEQ ID NO: 138083 - RNA, 19 nt, Artificial Sequence
  Description of Artificial Sequence: Synthetic oligonucleotide
gccgacugucgugucgaua

SEQ ID NO: 138084 - RNA, 19 nt, Artificial Sequence
  Description of Artificial Sequence: Synthetic oligonucleotide
gcaugcacuuugguugcuu

SEQ ID NO: 138085 - RNA, 19 nt, Artificial Sequence
  Description of Artificial Sequence: Synthetic oligonucleotide
cacuagcagcggacaugau

SEQ ID NO: 138086 - RNA, 19 nt, Artificial Sequence
  Description of Artificial Sequence: Synthetic oligonucleotide
ccaagguauuucgccgacu

SEQ ID NO: 138087 - RNA, 19 nt, Artificial Sequence
  Description of Artificial Sequence: Synthetic oligonucleotide
acgccgcaucucagccuua

SEQ ID NO: 138088 - RNA, 19 nt, Artificial Sequence
  Description of Artificial Sequence: Synthetic oligonucleotide
ccccgucaaucucaccaau

SEQ ID NO: 138089 - RNA, 19 nt, Artificial Sequence
  Description of Artificial Sequence: Synthetic oligonucleotide
ccaacccgcccagugcaau

SEQ ID NO: 138090 - RNA, 19 nt, Artificial Sequence
  Description of Artificial Sequence: Synthetic oligonucleotide
ccgaugggagugggauggu

SEQ ID NO: 138091 - RNA, 19 nt, Artificial Sequence
  Description of Artificial Sequence: Synthetic oligonucleotide
cgacugucgugucgauauu

SEQ ID NO: 138092 - RNA, 19 nt, Artificial Sequence
  Description of Artificial Sequence: Synthetic oligonucleotide
cgccgacugucgugucgau

SEQ ID NO: 138093 - RNA, 19 nt, Artificial Sequence
  Description of Artificial Sequence: Synthetic oligonucleotide
aaucaauuaagucauacac

SEQ ID NO: 138094 - RNA, 19 nt, Artificial Sequence
  Description of Artificial Sequence: Synthetic oligonucleotide
gaauguaucgaucagaucg

SEQ ID NO: 138095 - RNA, 19 nt, Artificial Sequence
  Description of Artificial Sequence: Synthetic oligonucleotide
auugcuaagaauuuugucc

SEQ ID NO: 138096 - RNA, 19 nt, Artificial Sequence
  Description of Artificial Sequence: Synthetic oligonucleotide
auacauguuguucucagcc

SEQ ID NO: 138097 - RNA, 19 nt, Artificial Sequence
  Description of Artificial Sequence: Synthetic oligonucleotide
acuaccauuaauugggaac

SEQ ID NO: 138098 - RNA, 19 nt, Artificial Sequence
  Description of Artificial Sequence: Synthetic oligonucleotide
aaccgcaacauucucggcc

SEQ ID NO: 138099 - RNA, 19 nt, Artificial Sequence
  Description of Artificial Sequence: Synthetic oligonucleotide
uuuucgauccugcggaugg

SEQ ID NO: 138100 - RNA, 19 nt, Artificial Sequence
  Description of Artificial Sequence: Synthetic oligonucleotide
uauugcuugacucucagau

SEQ ID NO: 138101 - RNA, 19 nt, Artificial Sequence
  Description of Artificial Sequence: Synthetic oligonucleotide
uugacagguccgaagaugg

SEQ ID NO: 138102 - RNA, 19 nt, Artificial Sequence
  Description of Artificial Sequence: Synthetic oligonucleotide
uggaacuaccauuaauugg

SEQ ID NO: 138103 - RNA, 19 nt, Artificial Sequence
  Description of Artificial Sequence: Synthetic oligonucleotide
uguaggucauuccauacug

SEQ ID NO: 138104 - RNA, 19 nt, Artificial Sequence
  Description of Artificial Sequence: Synthetic oligonucleotide
augaugacgguagucaucc

SEQ ID NO: 138105 - RNA, 19 nt, Artificial Sequence
  Description of Artificial Sequence: Synthetic oligonucleotide
agaguuaugugccgcagac

SEQ ID NO: 138106 - RNA, 19 nt, Artificial Sequence
  Description of Artificial Sequence: Synthetic oligonucleotide
ggaacuaccauuaauuggg

SEQ ID NO: 138107 - RNA, 19 nt, Artificial Sequence
  Description of Artificial Sequence: Synthetic oligonucleotide
acggaaacgacuugugccc

SEQ ID NO: 138108 - RNA, 19 nt, Artificial Sequence
  Description of Artificial Sequence: Synthetic oligonucleotide
aggccuuacacuuuuggac

SEQ ID NO: 138109 - RNA, 19 nt, Artificial Sequence
  Description of Artificial Sequence: Synthetic oligonucleotide
aauaggcccagucuucauc

SEQ ID NO: 138110 - RNA, 19 nt, Artificial Sequence
  Description of Artificial Sequence: Synthetic oligonucleotide
aguuaugugccgcagacca

SEQ ID NO: 138111 - RNA, 19 nt, Artificial Sequence
  Description of Artificial Sequence: Synthetic oligonucleotide
uaggaaauucuccagggac

SEQ ID NO: 138112 - RNA, 19 nt, Artificial Sequence
  Description of Artificial Sequence: Synthetic oligonucleotide
auauugggagagcuggacc

SEQ ID NO: 138113 - RNA, 19 nt, Artificial Sequence
  Description of Artificial Sequence: Synthetic oligonucleotide
aaggguaacgcuccuccac

SEQ ID NO: 138114 - RNA, 19 nt, Artificial Sequence
  Description of Artificial Sequence: Synthetic oligonucleotide
aguuauuggucuuaacuca

SEQ ID NO: 138115 - RNA, 19 nt, Artificial Sequence
  Description of Artificial Sequence: Synthetic oligonucleotide
ucgggauuggaauguaucg

SEQ ID NO: 138116 - RNA, 19 nt, Artificial Sequence
  Description of Artificial Sequence: Synthetic oligonucleotide
cuuaugaagacccggcacc

SEQ ID NO: 138117 - RNA, 19 nt, Artificial Sequence
  Description of Artificial Sequence: Synthetic oligonucleotide
uguugccucagauagcgag

SEQ ID NO: 138118 - RNA, 19 nt, Artificial Sequence
  Description of Artificial Sequence: Synthetic oligonucleotide
cucgcaauacacaucgucc

SEQ ID NO: 138119 - RNA, 19 nt, Artificial Sequence
  Description of Artificial Sequence: Synthetic oligonucleotide
gaauguagaguauggagga

SEQ ID NO: 138120 - RNA, 19 nt, Artificial Sequence
  Description of Artificial Sequence: Synthetic oligonucleotide
ucagaucgaacacagacuu

SEQ ID NO: 138121 - RNA, 19 nt, Artificial Sequence
  Description of Artificial Sequence: Synthetic oligonucleotide
uaagucauacacgaugacc

SEQ ID NO: 138122 - RNA, 19 nt, Artificial Sequence
  Description of Artificial Sequence: Synthetic oligonucleotide
cacauucggguucugaugg

SEQ ID NO: 138123 - RNA, 19 nt, Artificial Sequence
  Description of Artificial Sequence: Synthetic oligonucleotide
aacgacuugugcccacagc

SEQ ID NO: 138124 - RNA, 19 nt, Artificial Sequence
  Description of Artificial Sequence: Synthetic oligonucleotide
uuauuggucuuaacucagg

SEQ ID NO: 138125 - RNA, 19 nt, Artificial Sequence
  Description of Artificial Sequence: Synthetic oligonucleotide
aucuuuucgauccugcgga

SEQ ID NO: 138126 - RNA, 19 nt, Artificial Sequence
  Description of Artificial Sequence: Synthetic oligonucleotide
cacggaaacgacuugugcc

SEQ ID NO: 138127 - RNA, 19 nt, Artificial Sequence
  Description of Artificial Sequence: Synthetic oligonucleotide
aaggacgccuccaacuucc

SEQ ID NO: 138128 - RNA, 19 nt, Artificial Sequence
  Description of Artificial Sequence: Synthetic oligonucleotide
augggaauaggguacauau

SEQ ID NO: 138129 - RNA, 19 nt, Artificial Sequence
  Description of Artificial Sequence: Synthetic oligonucleotide
ggaauguagaguauggagg

SEQ ID NO: 138130 - RNA, 19 nt, Artificial Sequence
  Description of Artificial Sequence: Synthetic oligonucleotide
ugaucagcagaagucgucg

SEQ ID NO: 138131 - RNA, 19 nt, Artificial Sequence
  Description of Artificial Sequence: Synthetic oligonucleotide
accgaugagauguuggucu

SEQ ID NO: 138132 - RNA, 19 nt, Artificial Sequence
  Description of Artificial Sequence: Synthetic oligonucleotide
acggaagugccccugacag

SEQ ID NO: 138133 - RNA, 19 nt, Artificial Sequence
  Description of Artificial Sequence: Synthetic oligonucleotide
cagcucgcaauacacaucg

SEQ ID NO: 138134 - RNA, 19 nt, Artificial Sequence
  Description of Artificial Sequence: Synthetic oligonucleotide
auacacgaugaccaucgac

SEQ ID NO: 138135 - RNA, 19 nt, Artificial Sequence
  Description of Artificial Sequence: Synthetic oligonucleotide
gguagaguugcucugaaac

SEQ ID NO: 138136 - RNA, 19 nt, Artificial Sequence
  Description of Artificial Sequence: Synthetic oligonucleotide
ucuuaacucaggucuaacu

SEQ ID NO: 138137 - RNA, 19 nt, Artificial Sequence
  Description of Artificial Sequence: Synthetic oligonucleotide
uauuggucuuaacucaggu

SEQ ID NO: 138138 - RNA, 19 nt, Artificial Sequence
  Description of Artificial Sequence: Synthetic oligonucleotide
uggugaucagcagaagucg

SEQ ID NO: 138139 - RNA, 19 nt, Artificial Sequence
  Description of Artificial Sequence: Synthetic oligonucleotide
aauaggguacauauuucug

SEQ ID NO: 138140 - RNA, 19 nt, Artificial Sequence
  Description of Artificial Sequence: Synthetic oligonucleotide
auagcgagcugaccuagcg

SEQ ID NO: 138141 - RNA, 19 nt, Artificial Sequence
  Description of Artificial Sequence: Synthetic oligonucleotide
aauguagaguauggaggac

SEQ ID NO: 138142 - RNA, 19 nt, Artificial Sequence
  Description of Artificial Sequence: Synthetic oligonucleotide
gaugacgguagucauccug

SEQ ID NO: 138143 - RNA, 19 nt, Artificial Sequence
  Description of Artificial Sequence: Synthetic oligonucleotide
ugagauucggauccacaca

SEQ ID NO: 138144 - RNA, 19 nt, Artificial Sequence
  Description of Artificial Sequence: Synthetic oligonucleotide
ucuuuaguagcaccaugcu

SEQ ID NO: 138145 - RNA, 19 nt, Artificial Sequence
  Description of Artificial Sequence: Synthetic oligonucleotide
aguugcauggaaucaauua

SEQ ID NO: 138146 - RNA, 19 nt, Artificial Sequence
  Description of Artificial Sequence: Synthetic oligonucleotide
aacauucucggccgugcag

SEQ ID NO: 138147 - RNA, 19 nt, Artificial Sequence
  Description of Artificial Sequence: Synthetic oligonucleotide
ggaaccgcaacauucucgg

SEQ ID NO: 138148 - RNA, 19 nt, Artificial Sequence
  Description of Artificial Sequence: Synthetic oligonucleotide
aaacggaagugccccugac

SEQ ID NO: 138149 - RNA, 19 nt, Artificial Sequence
  Description of Artificial Sequence: Synthetic oligonucleotide
guggaacuaccauuaauug

SEQ ID NO: 138150 - RNA, 19 nt, Artificial Sequence
  Description of Artificial Sequence: Synthetic oligonucleotide
cuguuggcgacugagaaug

SEQ ID NO: 138151 - RNA, 19 nt, Artificial Sequence
  Description of Artificial Sequence: Synthetic oligonucleotide
uggacaaaacccuucuguc

SEQ ID NO: 138152 - RNA, 19 nt, Artificial Sequence
  Description of Artificial Sequence: Synthetic oligonucleotide
cuaguuauuggucuuaacu

SEQ ID NO: 138153 - RNA, 19 nt, Artificial Sequence
  Description of Artificial Sequence: Synthetic oligonucleotide
ucacggaaacgacuugugc

SEQ ID NO: 138154 - RNA, 19 nt, Artificial Sequence
  Description of Artificial Sequence: Synthetic oligonucleotide
gaccaucucaugcggagag

SEQ ID NO: 138155 - RNA, 19 nt, Artificial Sequence
  Description of Artificial Sequence: Synthetic oligonucleotide
agagcuccuaguuauuggu

SEQ ID NO: 138156 - RNA, 19 nt, Artificial Sequence
  Description of Artificial Sequence: Synthetic oligonucleotide
ccauaguuggcuuuacugg

SEQ ID NO: 138157 - RNA, 19 nt, Artificial Sequence
  Description of Artificial Sequence: Synthetic oligonucleotide
aagaguuaugugccgcaga

SEQ ID NO: 138158 - RNA, 19 nt, Artificial Sequence
  Description of Artificial Sequence: Synthetic oligonucleotide
agcgagcugaccuagcgcu

SEQ ID NO: 138159 - RNA, 19 nt, Artificial Sequence
  Description of Artificial Sequence: Synthetic oligonucleotide
ucucagauccacauccguc

SEQ ID NO: 138160 - RNA, 19 nt, Artificial Sequence
  Description of Artificial Sequence: Synthetic oligonucleotide
augacccacacccuguucu

SEQ ID NO: 138161 - RNA, 19 nt, Artificial Sequence
  Description of Artificial Sequence: Synthetic oligonucleotide
ucgcaauacacaucguccu

SEQ ID NO: 138162 - RNA, 19 nt, Artificial Sequence
  Description of Artificial Sequence: Synthetic oligonucleotide
aguacucugggcucacuug

SEQ ID NO: 138163 - RNA, 19 nt, Artificial Sequence
  Description of Artificial Sequence: Synthetic oligonucleotide
uuggcgacugagaauggcu

SEQ ID NO: 138164 - RNA, 19 nt, Artificial Sequence
  Description of Artificial Sequence: Synthetic oligonucleotide
uucuguucaguaaggguau

SEQ ID NO: 138165 - RNA, 19 nt, Artificial Sequence
  Description of Artificial Sequence: Synthetic oligonucleotide
aaacgacuugugcccacag

SEQ ID NO: 138166 - RNA, 19 nt, Artificial Sequence
  Description of Artificial Sequence: Synthetic oligonucleotide
aggguacauauuucuguuc

SEQ ID NO: 138167 - RNA, 19 nt, Artificial Sequence
  Description of Artificial Sequence: Synthetic oligonucleotide
uguaucgaucagaucgaac

SEQ ID NO: 138168 - RNA, 19 nt, Artificial Sequence
  Description of Artificial Sequence: Synthetic oligonucleotide
cuugcaaguaaugcccucc

SEQ ID NO: 138169 - RNA, 19 nt, Artificial Sequence
  Description of Artificial Sequence: Synthetic oligonucleotide
ugucgggugagcuaaucuc

SEQ ID NO: 138170 - RNA, 19 nt, Artificial Sequence
  Description of Artificial Sequence: Synthetic oligonucleotide
ugauccuccguaccuugcc

SEQ ID NO: 138171 - RNA, 19 nt, Artificial Sequence
  Description of Artificial Sequence: Synthetic oligonucleotide
auaggaaauucuccaggga

SEQ ID NO: 138172 - RNA, 19 nt, Artificial Sequence
  Description of Artificial Sequence: Synthetic oligonucleotide
gauauugggagagcuggac

SEQ ID NO: 138173 - RNA, 19 nt, Artificial Sequence
  Description of Artificial Sequence: Synthetic oligonucleotide
gaccggauaaggguaacgc

SEQ ID NO: 138174 - RNA, 19 nt, Artificial Sequence
  Description of Artificial Sequence: Synthetic oligonucleotide
aacuaccauuaauugggaa

SEQ ID NO: 138175 - RNA, 19 nt, Artificial Sequence
  Description of Artificial Sequence: Synthetic oligonucleotide
gucguacuuggcuucauac

SEQ ID NO: 138176 - RNA, 19 nt, Artificial Sequence
  Description of Artificial Sequence: Synthetic oligonucleotide
ucaccgaugagauguuggu

SEQ ID NO: 138177 - RNA, 19 nt, Artificial Sequence
  Description of Artificial Sequence: Synthetic oligonucleotide
aacuagaagcauggagaag

SEQ ID NO: 138178 - RNA, 19 nt, Artificial Sequence
  Description of Artificial Sequence: Synthetic oligonucleotide
aguggucaauuuucaaggu

SEQ ID NO: 138179 - RNA, 19 nt, Artificial Sequence
  Description of Artificial Sequence: Synthetic oligonucleotide
acauucggguucugauggc

SEQ ID NO: 138180 - RNA, 19 nt, Artificial Sequence
  Description of Artificial Sequence: Synthetic oligonucleotide
uugccuucgaaagauccca

SEQ ID NO: 138181 - RNA, 19 nt, Artificial Sequence
  Description of Artificial Sequence: Synthetic oligonucleotide
gaagucgucguuugccuuc

SEQ ID NO: 138182 - RNA, 19 nt, Artificial Sequence
  Description of Artificial Sequence: Synthetic oligonucleotide
ugaauaggcccagucuuca

SEQ ID NO: 138183 - RNA, 19 nt, Artificial Sequence
  Description of Artificial Sequence: Synthetic oligonucleotide
aaguacucugggcucacuu

SEQ ID NO: 138184 - RNA, 19 nt, Artificial Sequence
  Description of Artificial Sequence: Synthetic oligonucleotide
auguagaguauggaggacu

SEQ ID NO: 138185 - RNA, 19 nt, Artificial Sequence
  Description of Artificial Sequence: Synthetic oligonucleotide
cacgaucugauggaugugc

SEQ ID NO: 138186 - RNA, 19 nt, Artificial Sequence
  Description of Artificial Sequence: Synthetic oligonucleotide
gagugaucugcuuuggugu

SEQ ID NO: 138187 - RNA, 19 nt, Artificial Sequence
  Description of Artificial Sequence: Synthetic oligonucleotide
gaagaguuaugugccgcag

SEQ ID NO: 138188 - RNA, 19 nt, Artificial Sequence
  Description of Artificial Sequence: Synthetic oligonucleotide
ucgucguuugccuucgaaa

SEQ ID NO: 138189 - RNA, 19 nt, Artificial Sequence
  Description of Artificial Sequence: Synthetic oligonucleotide
guugacagguccgaagaug

SEQ ID NO: 138190 - RNA, 19 nt, Artificial Sequence
  Description of Artificial Sequence: Synthetic oligonucleotide
acacgaugaccaucgacca

SEQ ID NO: 138191 - RNA, 19 nt, Artificial Sequence
  Description of Artificial Sequence: Synthetic oligonucleotide
uaguauugcuugacucuca

SEQ ID NO: 138192 - RNA, 19 nt, Artificial Sequence
  Description of Artificial Sequence: Synthetic oligonucleotide
ugucacggaaacgacuugu

SEQ ID NO: 138193 - RNA, 19 nt, Artificial Sequence
  Description of Artificial Sequence: Synthetic oligonucleotide
agcuaaucucaacacuggu

SEQ ID NO: 138194 - RNA, 19 nt, Artificial Sequence
  Description of Artificial Sequence: Synthetic oligonucleotide
uagcaccaugcuaaacuug

SEQ ID NO: 138195 - RNA, 19 nt, Artificial Sequence
  Description of Artificial Sequence: Synthetic oligonucleotide
aacgcccaaaagcuucaga

SEQ ID NO: 138196 - RNA, 19 nt, Artificial Sequence
  Description of Artificial Sequence: Synthetic oligonucleotide
ggaaucaauuaagucauac

SEQ ID NO: 138197 - RNA, 19 nt, Artificial Sequence
  Description of Artificial Sequence: Synthetic oligonucleotide
cugucuccgaaguugcaug

SEQ ID NO: 138198 - RNA, 19 nt, Artificial Sequence
  Description of Artificial Sequence: Synthetic oligonucleotide
gaggccuuacacuuuugga

SEQ ID NO: 138199 - RNA, 19 nt, Artificial Sequence
  Description of Artificial Sequence: Synthetic oligonucleotide
uguuggcgacugagaaugg

SEQ ID NO: 138200 - RNA, 19 nt, Artificial Sequence
  Description of Artificial Sequence: Synthetic oligonucleotide
accggauaaggguaacgcu

SEQ ID NO: 138201 - RNA, 19 nt, Artificial Sequence
  Description of Artificial Sequence: Synthetic oligonucleotide
cugugguaaccauauccug

SEQ ID NO: 138202 - RNA, 19 nt, Artificial Sequence
  Description of Artificial Sequence: Synthetic oligonucleotide
uccuugcaaguaaugcccu

SEQ ID NO: 138203 - RNA, 19 nt, Artificial Sequence
  Description of Artificial Sequence: Synthetic oligonucleotide
ggcccucuaagccugaggc

SEQ ID NO: 138204 - RNA, 19 nt, Artificial Sequence
  Description of Artificial Sequence: Synthetic oligonucleotide
ucguuugccuucgaaagau

SEQ ID NO: 138205 - RNA, 19 nt, Artificial Sequence
  Description of Artificial Sequence: Synthetic oligonucleotide
cugaccuagcgcugauugg

SEQ ID NO: 138206 - RNA, 19 nt, Artificial Sequence
  Description of Artificial Sequence: Synthetic oligonucleotide
uagcgagcugaccuagcgc

SEQ ID NO: 138207 - RNA, 19 nt, Artificial Sequence
  Description of Artificial Sequence: Synthetic oligonucleotide
uguccgguugucacggaaa

SEQ ID NO: 138208 - RNA, 19 nt, Artificial Sequence
  Description of Artificial Sequence: Synthetic oligonucleotide
ugccuucgaaagaucccag

SEQ ID NO: 138209 - RNA, 19 nt, Artificial Sequence
  Description of Artificial Sequence: Synthetic oligonucleotide
gcagaccaaaauugcaugc

SEQ ID NO: 138210 - RNA, 19 nt, Artificial Sequence
  Description of Artificial Sequence: Synthetic oligonucleotide
guggugaucagcagaaguc

SEQ ID NO: 138211 - RNA, 19 nt, Artificial Sequence
  Description of Artificial Sequence: Synthetic oligonucleotide
gaguaacuugucugguuuc

SEQ ID NO: 138212 - RNA, 19 nt, Artificial Sequence
  Description of Artificial Sequence: Synthetic oligonucleotide
cauaggagaaggauaccaa

SEQ ID NO: 138213 - RNA, 19 nt, Artificial Sequence
  Description of Artificial Sequence: Synthetic oligonucleotide
uggcccucuaagccugagg

SEQ ID NO: 138214 - RNA, 19 nt, Artificial Sequence
  Description of Artificial Sequence: Synthetic oligonucleotide
agauagcgagcugaccuag

SEQ ID NO: 138215 - RNA, 19 nt, Artificial Sequence
  Description of Artificial Sequence: Synthetic oligonucleotide
cuauuggcacuucauagua

SEQ ID NO: 138216 - RNA, 19 nt, Artificial Sequence
  Description of Artificial Sequence: Synthetic oligonucleotide
gugccgcagaccaaaauug

SEQ ID NO: 138217 - RNA, 19 nt, Artificial Sequence
  Description of Artificial Sequence: Synthetic oligonucleotide
cauucggguucugauggcc

SEQ ID NO: 138218 - RNA, 19 nt, Artificial Sequence
  Description of Artificial Sequence: Synthetic oligonucleotide
acauucucggccgugcaga

SEQ ID NO: 138219 - RNA, 19 nt, Artificial Sequence
  Description of Artificial Sequence: Synthetic oligonucleotide
aggaccccucaucucggac

SEQ ID NO: 138220 - RNA, 19 nt, Artificial Sequence
  Description of Artificial Sequence: Synthetic oligonucleotide
gaaacucccauaguuggcu

SEQ ID NO: 138221 - RNA, 19 nt, Artificial Sequence
  Description of Artificial Sequence: Synthetic oligonucleotide
uugccucagauagcgagcu

SEQ ID NO: 138222 - RNA, 19 nt, Artificial Sequence
  Description of Artificial Sequence: Synthetic oligonucleotide
ugacucucagauccacauc

SEQ ID NO: 138223 - RNA, 19 nt, Artificial Sequence
  Description of Artificial Sequence: Synthetic oligonucleotide
caccacaugcauagguuuc

SEQ ID NO: 138224 - RNA, 19 nt, Artificial Sequence
  Description of Artificial Sequence: Synthetic oligonucleotide
gcuuaugaagacccggcac

SEQ ID NO: 138225 - RNA, 19 nt, Artificial Sequence
  Description of Artificial Sequence: Synthetic oligonucleotide
ucccauaguuggcuuuacu

SEQ ID NO: 138226 - RNA, 19 nt, Artificial Sequence
  Description of Artificial Sequence: Synthetic oligonucleotide
ugggaauaggguacauauu

SEQ ID NO: 138227 - RNA, 19 nt, Artificial Sequence
  Description of Artificial Sequence: Synthetic oligonucleotide
guugccucagauagcgagc

SEQ ID NO: 138228 - RNA, 19 nt, Artificial Sequence
  Description of Artificial Sequence: Synthetic oligonucleotide
caucauuaggggcagagau

SEQ ID NO: 138229 - RNA, 19 nt, Artificial Sequence
  Description of Artificial Sequence: Synthetic oligonucleotide
gauguuggucuaccagguc

SEQ ID NO: 138230 - RNA, 19 nt, Artificial Sequence
  Description of Artificial Sequence: Synthetic oligonucleotide
uccaaccugaccggauaag

SEQ ID NO: 138231 - RNA, 19 nt, Artificial Sequence
  Description of Artificial Sequence: Synthetic oligonucleotide
caugcuaaacuugcccuuc

SEQ ID NO: 138232 - RNA, 19 nt, Artificial Sequence
  Description of Artificial Sequence: Synthetic oligonucleotide
agacccggcaccacauucg

SEQ ID NO: 138233 - RNA, 19 nt, Artificial Sequence
  Description of Artificial Sequence: Synthetic oligonucleotide
cuuuaguagcaccaugcua

SEQ ID NO: 138234 - RNA, 19 nt, Artificial Sequence
  Description of Artificial Sequence: Synthetic oligonucleotide
ucgggugagcuaaucucaa

SEQ ID NO: 138235 - RNA, 19 nt, Artificial Sequence
  Description of Artificial Sequence: Synthetic oligonucleotide
ugcuugacucucagaucca

SEQ ID NO: 138236 - RNA, 19 nt, Artificial Sequence
  Description of Artificial Sequence: Synthetic oligonucleotide
ccggauaaggguaacgcuc

SEQ ID NO: 138237 - RNA, 19 nt, Artificial Sequence
  Description of Artificial Sequence: Synthetic oligonucleotide
gggaauaggguacauauuu

SEQ ID NO: 138238 - RNA, 19 nt, Artificial Sequence
  Description of Artificial Sequence: Synthetic oligonucleotide
ugcauagguuucucauuau

SEQ ID NO: 138239 - RNA, 19 nt, Artificial Sequence
  Description of Artificial Sequence: Synthetic oligonucleotide
gggaaccgcaacauucucg

SEQ ID NO: 138240 - RNA, 19 nt, Artificial Sequence
  Description of Artificial Sequence: Synthetic oligonucleotide
uuggugugggcuucugaua

SEQ ID NO: 138241 - RNA, 19 nt, Artificial Sequence
  Description of Artificial Sequence: Synthetic oligonucleotide
gucguuugccuucgaaaga

SEQ ID NO: 138242 - RNA, 19 nt, Artificial Sequence
  Description of Artificial Sequence: Synthetic oligonucleotide
gcagaagucgucguuugcc

SEQ ID NO: 138243 - RNA, 19 nt, Artificial Sequence
  Description of Artificial Sequence: Synthetic oligonucleotide
agggcagggaauguagagu

SEQ ID NO: 138244 - RNA, 19 nt, Artificial Sequence
  Description of Artificial Sequence: Synthetic oligonucleotide
guuggcgacugagaauggc

SEQ ID NO: 138245 - RNA, 19 nt, Artificial Sequence
  Description of Artificial Sequence: Synthetic oligonucleotide
gcgguaguagcccucugag

SEQ ID NO: 138246 - RNA, 19 nt, Artificial Sequence
  Description of Artificial Sequence: Synthetic oligonucleotide
uccuaguuauuggucuuaa

SEQ ID NO: 138247 - RNA, 19 nt, Artificial Sequence
  Description of Artificial Sequence: Synthetic oligonucleotide
cauccugcucugucuuacc

SEQ ID NO: 138248 - RNA, 19 nt, Artificial Sequence
  Description of Artificial Sequence: Synthetic oligonucleotide
acugucgggugagcuaauc

SEQ ID NO: 138249 - RNA, 19 nt, Artificial Sequence
  Description of Artificial Sequence: Synthetic oligonucleotide
gaccuagcgcugauuggag

SEQ ID NO: 138250 - RNA, 19 nt, Artificial Sequence
  Description of Artificial Sequence: Synthetic oligonucleotide
gauagcgagcugaccuagc

SEQ ID NO: 138251 - RNA, 19 nt, Artificial Sequence
  Description of Artificial Sequence: Synthetic oligonucleotide
cuuuucgauccugcggaug

SEQ ID NO: 138252 - RNA, 19 nt, Artificial Sequence
  Description of Artificial Sequence: Synthetic oligonucleotide
gaaccgcaacauucucggc

SEQ ID NO: 138253 - RNA, 19 nt, Artificial Sequence
  Description of Artificial Sequence: Synthetic oligonucleotide
cucagauagcgagcugacc

SEQ ID NO: 138254 - RNA, 19 nt, Artificial Sequence
  Description of Artificial Sequence: Synthetic oligonucleotide
gaacuaccauuaauuggga

SEQ ID NO: 138255 - RNA, 19 nt, Artificial Sequence
  Description of Artificial Sequence: Synthetic oligonucleotide
gucacggaaacgacuugug

SEQ ID NO: 138256 - RNA, 19 nt, Artificial Sequence
  Description of Artificial Sequence: Synthetic oligonucleotide
gcucgcaauacacaucguc

SEQ ID NO: 138257 - RNA, 19 nt, Artificial Sequence
  Description of Artificial Sequence: Synthetic oligonucleotide
gaguauggaggacuucccu

SEQ ID NO: 138258 - RNA, 19 nt, Artificial Sequence
  Description of Artificial Sequence: Synthetic oligonucleotide
gucgggugagcuaaucuca

SEQ ID NO: 138259 - RNA, 19 nt, Artificial Sequence
  Description of Artificial Sequence: Synthetic oligonucleotide
ggugauccuccguaccuug

SEQ ID NO: 138260 - RNA, 19 nt, Artificial Sequence
  Description of Artificial Sequence: Synthetic oligonucleotide
uggggucguacuuggcuuc

SEQ ID NO: 138261 - RNA, 19 nt, Artificial Sequence
  Description of Artificial Sequence: Synthetic oligonucleotide
gaaacgacuugugcccaca

SEQ ID NO: 138262 - RNA, 19 nt, Artificial Sequence
  Description of Artificial Sequence: Synthetic oligonucleotide
accuagcgcugauuggaga

SEQ ID NO: 138263 - RNA, 19 nt, Artificial Sequence
  Description of Artificial Sequence: Synthetic oligonucleotide
gcagggaauguagaguaug

SEQ ID NO: 138264 - RNA, 19 nt, Artificial Sequence
  Description of Artificial Sequence: Synthetic oligonucleotide
cagaucgaacacagacuuc

SEQ ID NO: 138265 - RNA, 19 nt, Artificial Sequence
  Description of Artificial Sequence: Synthetic oligonucleotide
ggggagguuggguaauggc

SEQ ID NO: 138266 - RNA, 19 nt, Artificial Sequence
  Description of Artificial Sequence: Synthetic oligonucleotide
cggauaaggguaacgcucc

SEQ ID NO: 138267 - RNA, 19 nt, Artificial Sequence
  Description of Artificial Sequence: Synthetic oligonucleotide
cagcacgaucugauggaug

SEQ ID NO: 138268 - RNA, 19 nt, Artificial Sequence
  Description of Artificial Sequence: Synthetic oligonucleotide
gucuuuccgccuguguggc

SEQ ID NO: 138269 - RNA, 19 nt, Artificial Sequence
  Description of Artificial Sequence: Synthetic oligonucleotide
cacgaugaccaucgaccac

SEQ ID NO: 138270 - RNA, 19 nt, Artificial Sequence
  Description of Artificial Sequence: Synthetic oligonucleotide
caagugggcugguacaucu

SEQ ID NO: 138271 - RNA, 19 nt, Artificial Sequence
  Description of Artificial Sequence: Synthetic oligonucleotide
caucucaugcggagagcuc

SEQ ID NO: 138272 - RNA, 19 nt, Artificial Sequence
  Description of Artificial Sequence: Synthetic oligonucleotide
caucggaaccuggauagga

SEQ ID NO: 138273 - RNA, 19 nt, Artificial Sequence
  Description of Artificial Sequence: Synthetic oligonucleotide
cagcucaccgaugagaugu

SEQ ID NO: 138274 - RNA, 19 nt, Artificial Sequence
  Description of Artificial Sequence: Synthetic oligonucleotide
gcuauuggcacuucauagu

SEQ ID NO: 138275 - RNA, 19 nt, Artificial Sequence
  Description of Artificial Sequence: Synthetic oligonucleotide
gcucugaaacggaagugcc

SEQ ID NO: 138276 - RNA, 19 nt, Artificial Sequence
  Description of Artificial Sequence: Synthetic oligonucleotide
uguugugaauaggcccagu

SEQ ID NO: 138277 - RNA, 19 nt, Artificial Sequence
  Description of Artificial Sequence: Synthetic oligonucleotide
ggaauguaucgaucagauc

SEQ ID NO: 138278 - RNA, 19 nt, Artificial Sequence
  Description of Artificial Sequence: Synthetic oligonucleotide
ccacauucggguucugaug

SEQ ID NO: 138279 - RNA, 19 nt, Artificial Sequence
  Description of Artificial Sequence: Synthetic oligonucleotide
gucuuaacucaggucuaac

SEQ ID NO: 138280 - RNA, 19 nt, Artificial Sequence
  Description of Artificial Sequence: Synthetic oligonucleotide
guagcccucugaggcaugc

SEQ ID NO: 138281 - RNA, 19 nt, Artificial Sequence
  Description of Artificial Sequence: Synthetic oligonucleotide
ggcuuaugaagacccggca

SEQ ID NO: 138282 - RNA, 19 nt, Artificial Sequence
  Description of Artificial Sequence: Synthetic oligonucleotide
aucggaaccuggauaggaa

SEQ ID NO: 138283 - RNA, 19 nt, Artificial Sequence
  Description of Artificial Sequence: Synthetic oligonucleotide
ugacccacacccuguucuu

SEQ ID NO: 138284 - RNA, 19 nt, Artificial Sequence
  Description of Artificial Sequence: Synthetic oligonucleotide
gcaacauucucggccgugc

SEQ ID NO: 138285 - RNA, 19 nt, Artificial Sequence
  Description of Artificial Sequence: Synthetic oligonucleotide
gacgguagucauccuggua

SEQ ID NO: 138286 - RNA, 19 nt, Artificial Sequence
  Description of Artificial Sequence: Synthetic oligonucleotide
gccuucgaaagaucccagc

SEQ ID NO: 138287 - RNA, 19 nt, Artificial Sequence
  Description of Artificial Sequence: Synthetic oligonucleotide
cuuccuccguuuggggagc

SEQ ID NO: 138288 - RNA, 19 nt, Artificial Sequence
  Description of Artificial Sequence: Synthetic oligonucleotide
ugaugacgguagucauccu

SEQ ID NO: 138289 - RNA, 19 nt, Artificial Sequence
  Description of Artificial Sequence: Synthetic oligonucleotide
caacaguggaacuaccauu

SEQ ID NO: 138290 - RNA, 19 nt, Artificial Sequence
  Description of Artificial Sequence: Synthetic oligonucleotide
caccgaugagauguugguc

SEQ ID NO: 138291 - RNA, 19 nt, Artificial Sequence
  Description of Artificial Sequence: Synthetic oligonucleotide
cgcagaccaaaauugcaug

SEQ ID NO: 138292 - RNA, 19 nt, Artificial Sequence
  Description of Artificial Sequence: Synthetic oligonucleotide
ucuaagccugaggccuuac

SEQ ID NO: 138293 - RNA, 19 nt, Artificial Sequence
  Description of Artificial Sequence: Synthetic oligonucleotide
uagcccucugaggcaugcg

SEQ ID NO: 138294 - RNA, 19 nt, Artificial Sequence
  Description of Artificial Sequence: Synthetic oligonucleotide
caucgaccacauaggagaa

SEQ ID NO: 138295 - RNA, 19 nt, Artificial Sequence
  Description of Artificial Sequence: Synthetic oligonucleotide
uuccgagguagaggguaga

SEQ ID NO: 138296 - RNA, 19 nt, Artificial Sequence
  Description of Artificial Sequence: Synthetic oligonucleotide
cagauagcgagcugaccua

SEQ ID NO: 138297 - RNA, 19 nt, Artificial Sequence
  Description of Artificial Sequence: Synthetic oligonucleotide
auguaucgaucagaucgaa

SEQ ID NO: 138298 - RNA, 19 nt, Artificial Sequence
  Description of Artificial Sequence: Synthetic oligonucleotide
ccuaguuauuggucuuaac

SEQ ID NO: 138299 - RNA, 19 nt, Artificial Sequence
  Description of Artificial Sequence: Synthetic oligonucleotide
gggauuggaauguaucgau

SEQ ID NO: 138300 - RNA, 19 nt, Artificial Sequence
  Description of Artificial Sequence: Synthetic oligonucleotide
ggugugggcuucugauagc

SEQ ID NO: 138301 - RNA, 19 nt, Artificial Sequence
  Description of Artificial Sequence: Synthetic oligonucleotide
agggaacauuguccaccug

SEQ ID NO: 138302 - RNA, 19 nt, Artificial Sequence
  Description of Artificial Sequence: Synthetic oligonucleotide
agauucggauccacacacu

SEQ ID NO: 138303 - RNA, 19 nt, Artificial Sequence
  Description of Artificial Sequence: Synthetic oligonucleotide
accugaccggauaagggua

SEQ ID NO: 138304 - RNA, 19 nt, Artificial Sequence
  Description of Artificial Sequence: Synthetic oligonucleotide
uccgggacguggcccgagu

SEQ ID NO: 138305 - RNA, 19 nt, Artificial Sequence
  Description of Artificial Sequence: Synthetic oligonucleotide
ggaaacgacuugugcccac

SEQ ID NO: 138306 - RNA, 19 nt, Artificial Sequence
  Description of Artificial Sequence: Synthetic oligonucleotide
auucgggauuggaauguau

SEQ ID NO: 138307 - RNA, 19 nt, Artificial Sequence
  Description of Artificial Sequence: Synthetic oligonucleotide
caugcggagagcuccuagu

SEQ ID NO: 138308 - RNA, 19 nt, Artificial Sequence
  Description of Artificial Sequence: Synthetic oligonucleotide
gggacguggcccgaguagc

SEQ ID NO: 138309 - RNA, 19 nt, Artificial Sequence
  Description of Artificial Sequence: Synthetic oligonucleotide
gucgucguuugccuucgaa

SEQ ID NO: 138310 - RNA, 19 nt, Artificial Sequence
  Description of Artificial Sequence: Synthetic oligonucleotide
caacauucucggccgugca

SEQ ID NO: 138311 - RNA, 19 nt, Artificial Sequence
  Description of Artificial Sequence: Synthetic oligonucleotide
ccucagauagcgagcugac

SEQ ID NO: 138312 - RNA, 19 nt, Artificial Sequence
  Description of Artificial Sequence: Synthetic oligonucleotide
cccgaguagcuguugugac

SEQ ID NO: 138313 - RNA, 19 nt, Artificial Sequence
  Description of Artificial Sequence: Synthetic oligonucleotide
cuccaaccugaccggauaa

SEQ ID NO: 138314 - RNA, 19 nt, Artificial Sequence
  Description of Artificial Sequence: Synthetic oligonucleotide
caagcaguggaaugagauu

SEQ ID NO: 138315 - RNA, 19 nt, Artificial Sequence
  Description of Artificial Sequence: Synthetic oligonucleotide
caacgcccaaaagcuucag

SEQ ID NO: 138316 - RNA, 19 nt, Artificial Sequence
  Description of Artificial Sequence: Synthetic oligonucleotide
caggucuaacugggacucc

SEQ ID NO: 138317 - RNA, 19 nt, Artificial Sequence
  Description of Artificial Sequence: Synthetic oligonucleotide
ggcccgaguagcuguugug

SEQ ID NO: 138318 - RNA, 19 nt, Artificial Sequence
  Description of Artificial Sequence: Synthetic oligonucleotide
cugucgggugagcuaaucu

SEQ ID NO: 138319 - RNA, 19 nt, Artificial Sequence
  Description of Artificial Sequence: Synthetic oligonucleotide
guaggucauuccauacugu

SEQ ID NO: 138320 - RNA, 19 nt, Artificial Sequence
  Description of Artificial Sequence: Synthetic oligonucleotide
guuaugugccgcagaccaa

SEQ ID NO: 138321 - RNA, 19 nt, Artificial Sequence
  Description of Artificial Sequence: Synthetic oligonucleotide
gcggagagcuccuaguuau

SEQ ID NO: 138322 - RNA, 19 nt, Artificial Sequence
  Description of Artificial Sequence: Synthetic oligonucleotide
guuggguaauggcugccuu

SEQ ID NO: 138323 - RNA, 19 nt, Artificial Sequence
  Description of Artificial Sequence: Synthetic oligonucleotide
gaggcaugcggggcugaga

SEQ ID NO: 138324 - RNA, 19 nt, Artificial Sequence
  Description of Artificial Sequence: Synthetic oligonucleotide
cgguagucauccugguagc

SEQ ID NO: 138325 - RNA, 19 nt, Artificial Sequence
  Description of Artificial Sequence: Synthetic oligonucleotide
ggucuuaacucaggucuaa

SEQ ID NO: 138326 - RNA, 19 nt, Artificial Sequence
  Description of Artificial Sequence: Synthetic oligonucleotide
cucuugugcugcccuccca

SEQ ID NO: 138327 - RNA, 19 nt, Artificial Sequence
  Description of Artificial Sequence: Synthetic oligonucleotide
cuccuaguuauuggucuua

SEQ ID NO: 138328 - RNA, 19 nt, Artificial Sequence
  Description of Artificial Sequence: Synthetic oligonucleotide
caccacauucggguucuga

SEQ ID NO: 138329 - RNA, 19 nt, Artificial Sequence
  Description of Artificial Sequence: Synthetic oligonucleotide
agucgucguuugccuucga

SEQ ID NO: 138330 - RNA, 19 nt, Artificial Sequence
  Description of Artificial Sequence: Synthetic oligonucleotide
ggucguacuuggcuucaua

SEQ ID NO: 138331 - RNA, 19 nt, Artificial Sequence
  Description of Artificial Sequence: Synthetic oligonucleotide
ccaucggaaccuggauagg

SEQ ID NO: 138332 - RNA, 19 nt, Artificial Sequence
  Description of Artificial Sequence: Synthetic oligonucleotide
gccccugacaguggucacc

SEQ ID NO: 138333 - RNA, 19 nt, Artificial Sequence
  Description of Artificial Sequence: Synthetic oligonucleotide
agcucgcaauacacaucgu

SEQ ID NO: 138334 - RNA, 19 nt, Artificial Sequence
  Description of Artificial Sequence: Synthetic oligonucleotide
gcacgaucugauggaugug

SEQ ID NO: 138335 - RNA, 19 nt, Artificial Sequence
  Description of Artificial Sequence: Synthetic oligonucleotide
ggauaaggguaacgcuccu

SEQ ID NO: 138336 - RNA, 19 nt, Artificial Sequence
  Description of Artificial Sequence: Synthetic oligonucleotide
guguugccucagauagcga

SEQ ID NO: 138337 - RNA, 19 nt, Artificial Sequence
  Description of Artificial Sequence: Synthetic oligonucleotide
cgggauuggaauguaucga

SEQ ID NO: 138338 - RNA, 19 nt, Artificial Sequence
  Description of Artificial Sequence: Synthetic oligonucleotide
uccugcggauggggccuug

SEQ ID NO: 138339 - RNA, 19 nt, Artificial Sequence
  Description of Artificial Sequence: Synthetic oligonucleotide
ccacaugcauagguuucuc

SEQ ID NO: 138340 - RNA, 19 nt, Artificial Sequence
  Description of Artificial Sequence: Synthetic oligonucleotide
ccgcagaccaaaauugcau

SEQ ID NO: 138341 - RNA, 19 nt, Artificial Sequence
  Description of Artificial Sequence: Synthetic oligonucleotide
gcuccuaguuauuggucuu

SEQ ID NO: 138342 - RNA, 19 nt, Artificial Sequence
  Description of Artificial Sequence: Synthetic oligonucleotide
ggggucguacuuggcuuca

SEQ ID NO: 138343 - RNA, 19 nt, Artificial Sequence
  Description of Artificial Sequence: Synthetic oligonucleotide
ccgaugagauguuggucua

SEQ ID NO: 138344 - RNA, 19 nt, Artificial Sequence
  Description of Artificial Sequence: Synthetic oligonucleotide
cugucaccauccgggacgu

SEQ ID NO: 138345 - RNA, 19 nt, Artificial Sequence
  Description of Artificial Sequence: Synthetic oligonucleotide
cuccuccccuugagaggca

SEQ ID NO: 138346 - RNA, 19 nt, Artificial Sequence
  Description of Artificial Sequence: Synthetic oligonucleotide
gggacuccauugauaccua

SEQ ID NO: 138347 - RNA, 19 nt, Artificial Sequence
  Description of Artificial Sequence: Synthetic oligonucleotide
ggcucaucauuaggcggua

SEQ ID NO: 138348 - RNA, 19 nt, Artificial Sequence
  Description of Artificial Sequence: Synthetic oligonucleotide
ccgugcagaggaccccuca

SEQ ID NO: 138349 - RNA, 19 nt, Artificial Sequence
  Description of Artificial Sequence: Synthetic oligonucleotide
cgagcugaccuagcgcuga

SEQ ID NO: 138350 - RNA, 19 nt, Artificial Sequence
  Description of Artificial Sequence: Synthetic oligonucleotide
ggccuccaaccugaccgga

SEQ ID NO: 138351 - RNA, 19 nt, Artificial Sequence
  Description of Artificial Sequence: Synthetic oligonucleotide
ggacguggcccgaguagcu

SEQ ID NO: 138352 - RNA, 19 nt, Artificial Sequence
  Description of Artificial Sequence: Synthetic oligonucleotide
cauccgggacguggcccga

SEQ ID NO: 138353 - RNA, 19 nt, Artificial Sequence
  Description of Artificial Sequence: Synthetic oligonucleotide
auccugcggauggggccuu

SEQ ID NO: 138354 - RNA, 19 nt, Artificial Sequence
  Description of Artificial Sequence: Synthetic oligonucleotide
ccgagguagaggguagagu

SEQ ID NO: 138355 - RNA, 19 nt, Artificial Sequence
  Description of Artificial Sequence: Synthetic oligonucleotide
cggaaacgacuugugccca

SEQ ID NO: 138356 - RNA, 19 nt, Artificial Sequence
  Description of Artificial Sequence: Synthetic oligonucleotide
ccccugacaguggucaccu

SEQ ID NO: 138357 - RNA, 19 nt, Artificial Sequence
  Description of Artificial Sequence: Synthetic oligonucleotide
cgaugaccaucgaccacau

SEQ ID NO: 138358 - RNA, 19 nt, Artificial Sequence
  Description of Artificial Sequence: Synthetic oligonucleotide
ggauggggccuuggucaau

SEQ ID NO: 138359 - RNA, 19 nt, Artificial Sequence
  Description of Artificial Sequence: Synthetic oligonucleotide
gggucguacuuggcuucau

SEQ ID NO: 138360 - RNA, 19 nt, Artificial Sequence
  Description of Artificial Sequence: Synthetic oligonucleotide
ccggcaccacauucggguu

SEQ ID NO: 138361 - RNA, 19 nt, Artificial Sequence
  Description of Artificial Sequence: Synthetic oligonucleotide
ccgcaacauucucggccgu

SEQ ID NO: 138362 - RNA, 19 nt, Artificial Sequence
  Description of Artificial Sequence: Synthetic oligonucleotide
cggagagcuccuaguuauu

SEQ ID NO: 138363 - RNA, 19 nt, Artificial Sequence
  Description of Artificial Sequence: Synthetic oligonucleotide
auaauuauaucccuggagc

SEQ ID NO: 138364 - RNA, 19 nt, Artificial Sequence
  Description of Artificial Sequence: Synthetic oligonucleotide
uauucuacaacaaagauaa

SEQ ID NO: 138365 - RNA, 19 nt, Artificial Sequence
  Description of Artificial Sequence: Synthetic oligonucleotide
aauuuaucuauauaaaaug

SEQ ID NO: 138366 - RNA, 19 nt, Artificial Sequence
  Description of Artificial Sequence: Synthetic oligonucleotide
uuaauauucuacaacaaag

SEQ ID NO: 138367 - RNA, 19 nt, Artificial Sequence
  Description of Artificial Sequence: Synthetic oligonucleotide
aaaauauauauauauauua

SEQ ID NO: 138368 - RNA, 19 nt, Artificial Sequence
  Description of Artificial Sequence: Synthetic oligonucleotide
aacuaguuaaacgacaggc

SEQ ID NO: 138369 - RNA, 19 nt, Artificial Sequence
  Description of Artificial Sequence: Synthetic oligonucleotide
aauauauauauauauuaca

SEQ ID NO: 138370 - RNA, 19 nt, Artificial Sequence
  Description of Artificial Sequence: Synthetic oligonucleotide
aaaauuaccuacuacgucu

SEQ ID NO: 138371 - RNA, 19 nt, Artificial Sequence
  Description of Artificial Sequence: Synthetic oligonucleotide
aaauauauauauauauuac

SEQ ID NO: 138372 - RNA, 19 nt, Artificial Sequence
  Description of Artificial Sequence: Synthetic oligonucleotide
uguuaagugagacuuacag

SEQ ID NO: 138373 - RNA, 19 nt, Artificial Sequence
  Description of Artificial Sequence: Synthetic oligonucleotide
agcaaauauaaacagacag

SEQ ID NO: 138374 - RNA, 19 nt, Artificial Sequence
  Description of Artificial Sequence: Synthetic oligonucleotide
uauaaagaaaguaaggcuc

SEQ ID NO: 138375 - RNA, 19 nt, Artificial Sequence
  Description of Artificial Sequence: Synthetic oligonucleotide
auauauauauauauuacac

SEQ ID NO: 138376 - RNA, 19 nt, Artificial Sequence
  Description of Artificial Sequence: Synthetic oligonucleotide
uguauaaagaaaguaaggc

SEQ ID NO: 138377 - RNA, 19 nt, Artificial Sequence
  Description of Artificial Sequence: Synthetic oligonucleotide
aagcacaagacccuuaguc

SEQ ID NO: 138378 - RNA, 19 nt, Artificial Sequence
  Description of Artificial Sequence: Synthetic oligonucleotide
gaaacuguuguucauacug

SEQ ID NO: 138379 - RNA, 19 nt, Artificial Sequence
  Description of Artificial Sequence: Synthetic oligonucleotide
uauaauuauaucccuggag

SEQ ID NO: 138380 - RNA, 19 nt, Artificial Sequence
  Description of Artificial Sequence: Synthetic oligonucleotide
aaaaggucgggucuggagg

SEQ ID NO: 138381 - RNA, 19 nt, Artificial Sequence
  Description of Artificial Sequence: Synthetic oligonucleotide
uuaagugagacuuacagua

SEQ ID NO: 138382 - RNA, 19 nt, Artificial Sequence
  Description of Artificial Sequence: Synthetic oligonucleotide
agaauuuaugcuuacaggu

SEQ ID NO: 138383 - RNA, 19 nt, Artificial Sequence
  Description of Artificial Sequence: Synthetic oligonucleotide
uggaacaguauauacagag

SEQ ID NO: 138384 - RNA, 19 nt, Artificial Sequence
  Description of Artificial Sequence: Synthetic oligonucleotide
auauguaagcuuuaaacug

SEQ ID NO: 138385 - RNA, 19 nt, Artificial Sequence
  Description of Artificial Sequence: Synthetic oligonucleotide
uaauaauaauaauaaauaa

SEQ ID NO: 138386 - RNA, 19 nt, Artificial Sequence
  Description of Artificial Sequence: Synthetic oligonucleotide
auauauauauauuacacuu

SEQ ID NO: 138387 - RNA, 19 nt, Artificial Sequence
  Description of Artificial Sequence: Synthetic oligonucleotide
uuaaguuuaaggagcuugg

SEQ ID NO: 138388 - RNA, 19 nt, Artificial Sequence
  Description of Artificial Sequence: Synthetic oligonucleotide
aauauuaccguguuggaua

SEQ ID NO: 138389 - RNA, 19 nt, Artificial Sequence
  Description of Artificial Sequence: Synthetic oligonucleotide
uauauauauauauuacacu

SEQ ID NO: 138390 - RNA, 19 nt, Artificial Sequence
  Description of Artificial Sequence: Synthetic oligonucleotide
uauguaagcuuuaaacugc

SEQ ID NO: 138391 - RNA, 19 nt, Artificial Sequence
  Description of Artificial Sequence: Synthetic oligonucleotide
uaaagauggaaugaaauga

SEQ ID NO: 138392 - RNA, 19 nt, Artificial Sequence
  Description of Artificial Sequence: Synthetic oligonucleotide
accaauauuaccguguugg

SEQ ID NO: 138393 - RNA, 19 nt, Artificial Sequence
  Description of Artificial Sequence: Synthetic oligonucleotide
uaggauuacaaacagcugu

SEQ ID NO: 138394 - RNA, 19 nt, Artificial Sequence
  Description of Artificial Sequence: Synthetic oligonucleotide
gagaauuuaugcuuacagg

SEQ ID NO: 138395 - RNA, 19 nt, Artificial Sequence
  Description of Artificial Sequence: Synthetic oligonucleotide
uugagauguauauauaaca

SEQ ID NO: 138396 - RNA, 19 nt, Artificial Sequence
  Description of Artificial Sequence: Synthetic oligonucleotide
acaugcggcuuuuagaggc

SEQ ID NO: 138397 - RNA, 19 nt, Artificial Sequence
  Description of Artificial Sequence: Synthetic oligonucleotide
agcacaagacccuuagucc

SEQ ID NO: 138398 - RNA, 19 nt, Artificial Sequence
  Description of Artificial Sequence: Synthetic oligonucleotide
cuuaguuuguacaugcggc

SEQ ID NO: 138399 - RNA, 19 nt, Artificial Sequence
  Description of Artificial Sequence: Synthetic oligonucleotide
aaaccugugcauuugaaaa

SEQ ID NO: 138400 - RNA, 19 nt, Artificial Sequence
  Description of Artificial Sequence: Synthetic oligonucleotide
uuggcuagacugaaggugg

SEQ ID NO: 138401 - RNA, 19 nt, Artificial Sequence
  Description of Artificial Sequence: Synthetic oligonucleotide
uguggcuaaaaugugacag

SEQ ID NO: 138402 - RNA, 19 nt, Artificial Sequence
  Description of Artificial Sequence: Synthetic oligonucleotide
caggaauagacuuaguuug

SEQ ID NO: 138403 - RNA, 19 nt, Artificial Sequence
  Description of Artificial Sequence: Synthetic oligonucleotide
uaugcaucauuuaugcagc

SEQ ID NO: 138404 - RNA, 19 nt, Artificial Sequence
  Description of Artificial Sequence: Synthetic oligonucleotide
aagcuuuaaacugcgaguc

SEQ ID NO: 138405 - RNA, 19 nt, Artificial Sequence
  Description of Artificial Sequence: Synthetic oligonucleotide
gaguuuuacaaggagaagc

SEQ ID NO: 138406 - RNA, 19 nt, Artificial Sequence
  Description of Artificial Sequence: Synthetic oligonucleotide
uuacgagucaccaggaaca

SEQ ID NO: 138407 - RNA, 19 nt, Artificial Sequence
  Description of Artificial Sequence: Synthetic oligonucleotide
cauagaaacugaauucacg

SEQ ID NO: 138408 - RNA, 19 nt, Artificial Sequence
  Description of Artificial Sequence: Synthetic oligonucleotide
aguaggauuacaaacagcu

SEQ ID NO: 138409 - RNA, 19 nt, Artificial Sequence
  Description of Artificial Sequence: Synthetic oligonucleotide
ugguguauaaagaaaguaa

SEQ ID NO: 138410 - RNA, 19 nt, Artificial Sequence
  Description of Artificial Sequence: Synthetic oligonucleotide
uuaccuacuacgucuacag

SEQ ID NO: 138411 - RNA, 19 nt, Artificial Sequence
  Description of Artificial Sequence: Synthetic oligonucleotide
aauguaaugccuaauuagu

SEQ ID NO: 138412 - RNA, 19 nt, Artificial Sequence
  Description of Artificial Sequence: Synthetic oligonucleotide
guaagcuuuaaacugcgag

SEQ ID NO: 138413 - RNA, 19 nt, Artificial Sequence
  Description of Artificial Sequence: Synthetic oligonucleotide
aagagaaugggcgaacuag

SEQ ID NO: 138414 - RNA, 19 nt, Artificial Sequence
  Description of Artificial Sequence: Synthetic oligonucleotide
gaucagguuuucuagaaac

SEQ ID NO: 138415 - RNA, 19 nt, Artificial Sequence
  Description of Artificial Sequence: Synthetic oligonucleotide
aaacagaccuccccuuccc

SEQ ID NO: 138416 - RNA, 19 nt, Artificial Sequence
  Description of Artificial Sequence: Synthetic oligonucleotide
aaacuguuguucauacugc

SEQ ID NO: 138417 - RNA, 19 nt, Artificial Sequence
  Description of Artificial Sequence: Synthetic oligonucleotide
ugagaaagccaauuaaggu

SEQ ID NO: 138418 - RNA, 19 nt, Artificial Sequence
  Description of Artificial Sequence: Synthetic oligonucleotide
guacaugcggcuuuuagag

SEQ ID NO: 138419 - RNA, 19 nt, Artificial Sequence
  Description of Artificial Sequence: Synthetic oligonucleotide
aaacaagagguaugcauca

SEQ ID NO: 138420 - RNA, 19 nt, Artificial Sequence
  Description of Artificial Sequence: Synthetic oligonucleotide
agauuuugugcauguuucc

SEQ ID NO: 138421 - RNA, 19 nt, Artificial Sequence
  Description of Artificial Sequence: Synthetic oligonucleotide
agcucuuauuuuaaaaggc

SEQ ID NO: 138422 - RNA, 19 nt, Artificial Sequence
  Description of Artificial Sequence: Synthetic oligonucleotide
agucacugauacuacaguc

SEQ ID NO: 138423 - RNA, 19 nt, Artificial Sequence
  Description of Artificial Sequence: Synthetic oligonucleotide
gauucugcuguuaagugag

SEQ ID NO: 138424 - RNA, 19 nt, Artificial Sequence
  Description of Artificial Sequence: Synthetic oligonucleotide
uaagcuuuaaacugcgagu

SEQ ID NO: 138425 - RNA, 19 nt, Artificial Sequence
  Description of Artificial Sequence: Synthetic oligonucleotide
uccaaaauggcucaacaua

SEQ ID NO: 138426 - RNA, 19 nt, Artificial Sequence
  Description of Artificial Sequence: Synthetic oligonucleotide
uuuagaagauuacccaagu

SEQ ID NO: 138427 - RNA, 19 nt, Artificial Sequence
  Description of Artificial Sequence: Synthetic oligonucleotide
ccuagaaacacucuggagg

SEQ ID NO: 138428 - RNA, 19 nt, Artificial Sequence
  Description of Artificial Sequence: Synthetic oligonucleotide
uguuauggcugauucacca

SEQ ID NO: 138429 - RNA, 19 nt, Artificial Sequence
  Description of Artificial Sequence: Synthetic oligonucleotide
ugggcgaacuaguuaaacg

SEQ ID NO: 138430 - RNA, 19 nt, Artificial Sequence
  Description of Artificial Sequence: Synthetic oligonucleotide
gagcgcaugacauggagag

SEQ ID NO: 138431 - RNA, 19 nt, Artificial Sequence
  Description of Artificial Sequence: Synthetic oligonucleotide
uccuguuggaaugaguggg

SEQ ID NO: 138432 - RNA, 19 nt, Artificial Sequence
  Description of Artificial Sequence: Synthetic oligonucleotide
uaguuaaacgacaggcgag

SEQ ID NO: 138433 - RNA, 19 nt, Artificial Sequence
  Description of Artificial Sequence: Synthetic oligonucleotide
agccaauuaagguauauaa

SEQ ID NO: 138434 - RNA, 19 nt, Artificial Sequence
  Description of Artificial Sequence: Synthetic oligonucleotide
aguugauagugguacagug

SEQ ID NO: 138435 - RNA, 19 nt, Artificial Sequence
  Description of Artificial Sequence: Synthetic oligonucleotide
ugagacuuacaguauuuug

SEQ ID NO: 138436 - RNA, 19 nt, Artificial Sequence
  Description of Artificial Sequence: Synthetic oligonucleotide
ucauuuaugcagcuguaaa

SEQ ID NO: 138437 - RNA, 19 nt, Artificial Sequence
  Description of Artificial Sequence: Synthetic oligonucleotide
uuacagguauuucuuuaag

SEQ ID NO: 138438 - RNA, 19 nt, Artificial Sequence
  Description of Artificial Sequence: Synthetic oligonucleotide
uguagugaaacuguuguuc

SEQ ID NO: 138439 - RNA, 19 nt, Artificial Sequence
  Description of Artificial Sequence: Synthetic oligonucleotide
uuaaacugcgaguccaucu

SEQ ID NO: 138440 - RNA, 19 nt, Artificial Sequence
  Description of Artificial Sequence: Synthetic oligonucleotide
aucuaacacacuuaauuga

SEQ ID NO: 138441 - RNA, 19 nt, Artificial Sequence
  Description of Artificial Sequence: Synthetic oligonucleotide
uccgaaggcauguaggccc

SEQ ID NO: 138442 - RNA, 19 nt, Artificial Sequence
  Description of Artificial Sequence: Synthetic oligonucleotide
ugguauaauaguuuccauc

SEQ ID NO: 138443 - RNA, 19 nt, Artificial Sequence
  Description of Artificial Sequence: Synthetic oligonucleotide
uucucgcauggcaugaggg

SEQ ID NO: 138444 - RNA, 19 nt, Artificial Sequence
  Description of Artificial Sequence: Synthetic oligonucleotide
ucuacuguaaaauguucaa

SEQ ID NO: 138445 - RNA, 19 nt, Artificial Sequence
  Description of Artificial Sequence: Synthetic oligonucleotide
uguaaaagucacaccauua

SEQ ID NO: 138446 - RNA, 19 nt, Artificial Sequence
  Description of Artificial Sequence: Synthetic oligonucleotide
ggaauccucucauagaugc

SEQ ID NO: 138447 - RNA, 19 nt, Artificial Sequence
  Description of Artificial Sequence: Synthetic oligonucleotide
ugcauguuauggcugauuc

SEQ ID NO: 138448 - RNA, 19 nt, Artificial Sequence
  Description of Artificial Sequence: Synthetic oligonucleotide
aaugaaaaggucgggucug

SEQ ID NO: 138449 - RNA, 19 nt, Artificial Sequence
  Description of Artificial Sequence: Synthetic oligonucleotide
cauguuauggcugauucac

SEQ ID NO: 138450 - RNA, 19 nt, Artificial Sequence
  Description of Artificial Sequence: Synthetic oligonucleotide
uuaagcauuauguccuccu

SEQ ID NO: 138451 - RNA, 19 nt, Artificial Sequence
  Description of Artificial Sequence: Synthetic oligonucleotide
aggguuaccagagucaaag

SEQ ID NO: 138452 - RNA, 19 nt, Artificial Sequence
  Description of Artificial Sequence: Synthetic oligonucleotide
acaggaauagacuuaguuu

SEQ ID NO: 138453 - RNA, 19 nt, Artificial Sequence
  Description of Artificial Sequence: Synthetic oligonucleotide
gauccgaaggcauguaggc

SEQ ID NO: 138454 - RNA, 19 nt, Artificial Sequence
  Description of Artificial Sequence: Synthetic oligonucleotide
gaaugggcgaacuaguuaa

SEQ ID NO: 138455 - RNA, 19 nt, Artificial Sequence
  Description of Artificial Sequence: Synthetic oligonucleotide
uucuaaugauggaauauau

SEQ ID NO: 138456 - RNA, 19 nt, Artificial Sequence
  Description of Artificial Sequence: Synthetic oligonucleotide
gacagguaccaauauuacc

SEQ ID NO: 138457 - RNA, 19 nt, Artificial Sequence
  Description of Artificial Sequence: Synthetic oligonucleotide
caagugguauaauaguuuc

SEQ ID NO: 138458 - RNA, 19 nt, Artificial Sequence
  Description of Artificial Sequence: Synthetic oligonucleotide
uuaguuuguacaugcggcu

SEQ ID NO: 138459 - RNA, 19 nt, Artificial Sequence
  Description of Artificial Sequence: Synthetic oligonucleotide
aaugacagguaccaauauu

SEQ ID NO: 138460 - RNA, 19 nt, Artificial Sequence
  Description of Artificial Sequence: Synthetic oligonucleotide
uuguacaugcggcuuuuag

SEQ ID NO: 138461 - RNA, 19 nt, Artificial Sequence
  Description of Artificial Sequence: Synthetic oligonucleotide
auagacuuaguuuguacau

SEQ ID NO: 138462 - RNA, 19 nt, Artificial Sequence
  Description of Artificial Sequence: Synthetic oligonucleotide
ucccuuuggacuuacucug

SEQ ID NO: 138463 - RNA, 19 nt, Artificial Sequence
  Description of Artificial Sequence: Synthetic oligonucleotide
gaaaaggucgggucuggag

SEQ ID NO: 138464 - RNA, 19 nt, Artificial Sequence
  Description of Artificial Sequence: Synthetic oligonucleotide
ucuaaugauggaauauaua

SEQ ID NO: 138465 - RNA, 19 nt, Artificial Sequence
  Description of Artificial Sequence: Synthetic oligonucleotide
ugugguguauaaagaaagu

SEQ ID NO: 138466 - RNA, 19 nt, Artificial Sequence
  Description of Artificial Sequence: Synthetic oligonucleotide
acuuaauugagaaagccaa

SEQ ID NO: 138467 - RNA, 19 nt, Artificial Sequence
  Description of Artificial Sequence: Synthetic oligonucleotide
auaccaagugguauaauag

SEQ ID NO: 138468 - RNA, 19 nt, Artificial Sequence
  Description of Artificial Sequence: Synthetic oligonucleotide
guuuaaggagcuuggguug

SEQ ID NO: 138469 - RNA, 19 nt, Artificial Sequence
  Description of Artificial Sequence: Synthetic oligonucleotide
cuuacgagucaccaggaac

SEQ ID NO: 138470 - RNA, 19 nt, Artificial Sequence
  Description of Artificial Sequence: Synthetic oligonucleotide
aauucacguuuacauaaau

SEQ ID NO: 138471 - RNA, 19 nt, Artificial Sequence
  Description of Artificial Sequence: Synthetic oligonucleotide
auuauaucccuggagcaag

SEQ ID NO: 138472 - RNA, 19 nt, Artificial Sequence
  Description of Artificial Sequence: Synthetic oligonucleotide
aaagauggaaugaaaugaa

SEQ ID NO: 138473 - RNA, 19 nt, Artificial Sequence
  Description of Artificial Sequence: Synthetic oligonucleotide
guucuuuugaaaguacuug

SEQ ID NO: 138474 - RNA, 19 nt, Artificial Sequence
  Description of Artificial Sequence: Synthetic oligonucleotide
guauaaagaaaguaaggcu

SEQ ID NO: 138475 - RNA, 19 nt, Artificial Sequence
  Description of Artificial Sequence: Synthetic oligonucleotide
ugaucaucggagcuguagu

SEQ ID NO: 138476 - RNA, 19 nt, Artificial Sequence
  Description of Artificial Sequence: Synthetic oligonucleotide
aacuggaacaguauauaca

SEQ ID NO: 138477 - RNA, 19 nt, Artificial Sequence
  Description of Artificial Sequence: Synthetic oligonucleotide
aaaggucgggucuggagga

SEQ ID NO: 138478 - RNA, 19 nt, Artificial Sequence
  Description of Artificial Sequence: Synthetic oligonucleotide
uuaaacgacaggcgagugu

SEQ ID NO: 138479 - RNA, 19 nt, Artificial Sequence
  Description of Artificial Sequence: Synthetic oligonucleotide
aauucacggcccucauuuc

SEQ ID NO: 138480 - RNA, 19 nt, Artificial Sequence
  Description of Artificial Sequence: Synthetic oligonucleotide
aauuauaucccuggagcaa

SEQ ID NO: 138481 - RNA, 19 nt, Artificial Sequence
  Description of Artificial Sequence: Synthetic oligonucleotide
uaaacgacaggcgaguguc

SEQ ID NO: 138482 - RNA, 19 nt, Artificial Sequence
  Description of Artificial Sequence: Synthetic oligonucleotide
caugacauggagagauccg

SEQ ID NO: 138483 - RNA, 19 nt, Artificial Sequence
  Description of Artificial Sequence: Synthetic oligonucleotide
ugccugauugaauuuagaa

SEQ ID NO: 138484 - RNA, 19 nt, Artificial Sequence
  Description of Artificial Sequence: Synthetic oligonucleotide
cuaguuaaacgacaggcga

SEQ ID NO: 138485 - RNA, 19 nt, Artificial Sequence
  Description of Artificial Sequence: Synthetic oligonucleotide
ucacuaacaagugaguuuu

SEQ ID NO: 138486 - RNA, 19 nt, Artificial Sequence
  Description of Artificial Sequence: Synthetic oligonucleotide
accauagaaacugaauuca

SEQ ID NO: 138487 - RNA, 19 nt, Artificial Sequence
  Description of Artificial Sequence: Synthetic oligonucleotide
acccuugagauguauauau

SEQ ID NO: 138488 - RNA, 19 nt, Artificial Sequence
  Description of Artificial Sequence: Synthetic oligonucleotide
ugcaacuuggcuagacuga

SEQ ID NO: 138489 - RNA, 19 nt, Artificial Sequence
  Description of Artificial Sequence: Synthetic oligonucleotide
uacgucuacaguaaauauu

SEQ ID NO: 138490 - RNA, 19 nt, Artificial Sequence
  Description of Artificial Sequence: Synthetic oligonucleotide
aguaaauauuuuaacugga

SEQ ID NO: 138491 - RNA, 19 nt, Artificial Sequence
  Description of Artificial Sequence: Synthetic oligonucleotide
agacccuuaguccacauuu

SEQ ID NO: 138492 - RNA, 19 nt, Artificial Sequence
  Description of Artificial Sequence: Synthetic oligonucleotide
auaaugguguuagucagcu

SEQ ID NO: 138493 - RNA, 19 nt, Artificial Sequence
  Description of Artificial Sequence: Synthetic oligonucleotide
ugauugguaacugaccauc

SEQ ID NO: 138494 - RNA, 19 nt, Artificial Sequence
  Description of Artificial Sequence: Synthetic oligonucleotide
auucuacagagaugacugg

SEQ ID NO: 138495 - RNA, 19 nt, Artificial Sequence
  Description of Artificial Sequence: Synthetic oligonucleotide
aguaaggcuccuuuuaauu

SEQ ID NO: 138496 - RNA, 19 nt, Artificial Sequence
  Description of Artificial Sequence: Synthetic oligonucleotide
aaauucuguccauguggug

SEQ ID NO: 138497 - RNA, 19 nt, Artificial Sequence
  Description of Artificial Sequence: Synthetic oligonucleotide
ugacagguaccaauauuac

SEQ ID NO: 138498 - RNA, 19 nt, Artificial Sequence
  Description of Artificial Sequence: Synthetic oligonucleotide
gaucaucggagcuguagug

SEQ ID NO: 138499 - RNA, 19 nt, Artificial Sequence
  Description of Artificial Sequence: Synthetic oligonucleotide
ugacccuugagauguauau

SEQ ID NO: 138500 - RNA, 19 nt, Artificial Sequence
  Description of Artificial Sequence: Synthetic oligonucleotide
uucauggggauaaguucag

SEQ ID NO: 138501 - RNA, 19 nt, Artificial Sequence
  Description of Artificial Sequence: Synthetic oligonucleotide
aggauuacaaacagcuguc

SEQ ID NO: 138502 - RNA, 19 nt, Artificial Sequence
  Description of Artificial Sequence: Synthetic oligonucleotide
accuacuacgucuacagua

SEQ ID NO: 138503 - RNA, 19 nt, Artificial Sequence
  Description of Artificial Sequence: Synthetic oligonucleotide
uccuacgcagccuugcaca

SEQ ID NO: 138504 - RNA, 19 nt, Artificial Sequence
  Description of Artificial Sequence: Synthetic oligonucleotide
ugccucacuuuauuaguag

SEQ ID NO: 138505 - RNA, 19 nt, Artificial Sequence
  Description of Artificial Sequence: Synthetic oligonucleotide
guagugaaacuguuguuca

SEQ ID NO: 138506 - RNA, 19 nt, Artificial Sequence
  Description of Artificial Sequence: Synthetic oligonucleotide
uugagaguagcugccagca

SEQ ID NO: 138507 - RNA, 19 nt, Artificial Sequence
  Description of Artificial Sequence: Synthetic oligonucleotide
aagugagacuuacaguauu

SEQ ID NO: 138508 - RNA, 19 nt, Artificial Sequence
  Description of Artificial Sequence: Synthetic oligonucleotide
acauacaaggagagaaggg

SEQ ID NO: 138509 - RNA, 19 nt, Artificial Sequence
  Description of Artificial Sequence: Synthetic oligonucleotide
ucguucaucuucucgcaug

SEQ ID NO: 138510 - RNA, 19 nt, Artificial Sequence
  Description of Artificial Sequence: Synthetic oligonucleotide
ggaguaggauuacaaacag

SEQ ID NO: 138511 - RNA, 19 nt, Artificial Sequence
  Description of Artificial Sequence: Synthetic oligonucleotide
uacaugcggcuuuuagagg

SEQ ID NO: 138512 - RNA, 19 nt, Artificial Sequence
  Description of Artificial Sequence: Synthetic oligonucleotide
gagauccgaaggcauguag

SEQ ID NO: 138513 - RNA, 19 nt, Artificial Sequence
  Description of Artificial Sequence: Synthetic oligonucleotide
caaaggugcaagcacaaga

SEQ ID NO: 138514 - RNA, 19 nt, Artificial Sequence
  Description of Artificial Sequence: Synthetic oligonucleotide
aagucuaccuagaaacacu

SEQ ID NO: 138515 - RNA, 19 nt, Artificial Sequence
  Description of Artificial Sequence: Synthetic oligonucleotide
aaacugaauucacggcccu

SEQ ID NO: 138516 - RNA, 19 nt, Artificial Sequence
  Description of Artificial Sequence: Synthetic oligonucleotide
agucuaccuagaaacacuc

SEQ ID NO: 138517 - RNA, 19 nt, Artificial Sequence
  Description of Artificial Sequence: Synthetic oligonucleotide
agguugacccuugagaugu

SEQ ID NO: 138518 - RNA, 19 nt, Artificial Sequence
  Description of Artificial Sequence: Synthetic oligonucleotide
uuuaaggagcuuggguugc

SEQ ID NO: 138519 - RNA, 19 nt, Artificial Sequence
  Description of Artificial Sequence: Synthetic oligonucleotide
cacuuaauugagaaagcca

SEQ ID NO: 138520 - RNA, 19 nt, Artificial Sequence
  Description of Artificial Sequence: Synthetic oligonucleotide
gaacaguacaaagagguua

SEQ ID NO: 138521 - RNA, 19 nt, Artificial Sequence
  Description of Artificial Sequence: Synthetic oligonucleotide
uaagugagacuuacaguau

SEQ ID NO: 138522 - RNA, 19 nt, Artificial Sequence
  Description of Artificial Sequence: Synthetic oligonucleotide
accuagaaacacucuggag

SEQ ID NO: 138523 - RNA, 19 nt, Artificial Sequence
  Description of Artificial Sequence: Synthetic oligonucleotide
gcuaaaaugugacaggcaa

SEQ ID NO: 138524 - RNA, 19 nt, Artificial Sequence
  Description of Artificial Sequence: Synthetic oligonucleotide
guucauggggauaaguuca

SEQ ID NO: 138525 - RNA, 19 nt, Artificial Sequence
  Description of Artificial Sequence: Synthetic oligonucleotide
acggcccucauuucaacag

SEQ ID NO: 138526 - RNA, 19 nt, Artificial Sequence
  Description of Artificial Sequence: Synthetic oligonucleotide
uuuccccuacccaaaucca

SEQ ID NO: 138527 - RNA, 19 nt, Artificial Sequence
  Description of Artificial Sequence: Synthetic oligonucleotide
uggaauccucucauagaug

SEQ ID NO: 138528 - RNA, 19 nt, Artificial Sequence
  Description of Artificial Sequence: Synthetic oligonucleotide
ucgggucuggaggaaaagg

SEQ ID NO: 138529 - RNA, 19 nt, Artificial Sequence
  Description of Artificial Sequence: Synthetic oligonucleotide
gagacuuacaguauuuugu

SEQ ID NO: 138530 - RNA, 19 nt, Artificial Sequence
  Description of Artificial Sequence: Synthetic oligonucleotide
ucuaucuaacacacuuaau

SEQ ID NO: 138531 - RNA, 19 nt, Artificial Sequence
  Description of Artificial Sequence: Synthetic oligonucleotide
acgucuacaguaaauauuu

SEQ ID NO: 138532 - RNA, 19 nt, Artificial Sequence
  Description of Artificial Sequence: Synthetic oligonucleotide
aguuaaacgacaggcgagu

SEQ ID NO: 138533 - RNA, 19 nt, Artificial Sequence
  Description of Artificial Sequence: Synthetic oligonucleotide
auauuaccguguuggauaa

SEQ ID NO: 138534 - RNA, 19 nt, Artificial Sequence
  Description of Artificial Sequence: Synthetic oligonucleotide
ucgcauggcaugagggucc

SEQ ID NO: 138535 - RNA, 19 nt, Artificial Sequence
  Description of Artificial Sequence: Synthetic oligonucleotide
gaauucacggcccucauuu

SEQ ID NO: 138536 - RNA, 19 nt, Artificial Sequence
  Description of Artificial Sequence: Synthetic oligonucleotide
uguaagcuuuaaacugcga

SEQ ID NO: 138537 - RNA, 19 nt, Artificial Sequence
  Description of Artificial Sequence: Synthetic oligonucleotide
auucacggcccucauuuca

SEQ ID NO: 138538 - RNA, 19 nt, Artificial Sequence
  Description of Artificial Sequence: Synthetic oligonucleotide
uuuggauauuugacugcac

SEQ ID NO: 138539 - RNA, 19 nt, Artificial Sequence
  Description of Artificial Sequence: Synthetic oligonucleotide
aaagccaauuaagguauau

SEQ ID NO: 138540 - RNA, 19 nt, Artificial Sequence
  Description of Artificial Sequence: Synthetic oligonucleotide
acuacgucuacaguaaaua

SEQ ID NO: 138541 - RNA, 19 nt, Artificial Sequence
  Description of Artificial Sequence: Synthetic oligonucleotide
uacuacgucuacaguaaau

SEQ ID NO: 138542 - RNA, 19 nt, Artificial Sequence
  Description of Artificial Sequence: Synthetic oligonucleotide
augcucagaguugauagug

SEQ ID NO: 138543 - RNA, 19 nt, Artificial Sequence
  Description of Artificial Sequence: Synthetic oligonucleotide
guaaugccuaauuaguacu

SEQ ID NO: 138544 - RNA, 19 nt, Artificial Sequence
  Description of Artificial Sequence: Synthetic oligonucleotide
auccgaaggcauguaggcc

SEQ ID NO: 138545 - RNA, 19 nt, Artificial Sequence
  Description of Artificial Sequence: Synthetic oligonucleotide
cugagauucugcuguuaag

SEQ ID NO: 138546 - RNA, 19 nt, Artificial Sequence
  Description of Artificial Sequence: Synthetic oligonucleotide
uagucacacucucuagaga

SEQ ID NO: 138547 - RNA, 19 nt, Artificial Sequence
  Description of Artificial Sequence: Synthetic oligonucleotide
uaccaauauuaccguguug

SEQ ID NO: 138548 - RNA, 19 nt, Artificial Sequence
  Description of Artificial Sequence: Synthetic oligonucleotide
ugcacauaccaagugguau

SEQ ID NO: 138549 - RNA, 19 nt, Artificial Sequence
  Description of Artificial Sequence: Synthetic oligonucleotide
aggagcgcaugacauggag

SEQ ID NO: 138550 - RNA, 19 nt, Artificial Sequence
  Description of Artificial Sequence: Synthetic oligonucleotide
ccauaaugguguuagucag

SEQ ID NO: 138551 - RNA, 19 nt, Artificial Sequence
  Description of Artificial Sequence: Synthetic oligonucleotide
aagauggaaugaaaugaaa

SEQ ID NO: 138552 - RNA, 19 nt, Artificial Sequence
  Description of Artificial Sequence: Synthetic oligonucleotide
ucucgcauggcaugagggu

SEQ ID NO: 138553 - RNA, 19 nt, Artificial Sequence
  Description of Artificial Sequence: Synthetic oligonucleotide
gguucauggggauaaguuc

SEQ ID NO: 138554 - RNA, 19 nt, Artificial Sequence
  Description of Artificial Sequence: Synthetic oligonucleotide
agaaugggcgaacuaguua

SEQ ID NO: 138555 - RNA, 19 nt, Artificial Sequence
  Description of Artificial Sequence: Synthetic oligonucleotide
auguuauggcugauucacc

SEQ ID NO: 138556 - RNA, 19 nt, Artificial Sequence
  Description of Artificial Sequence: Synthetic oligonucleotide
uguuggaaugaguggggaa

SEQ ID NO: 138557 - RNA, 19 nt, Artificial Sequence
  Description of Artificial Sequence: Synthetic oligonucleotide
uccccuaagugccuccugu

SEQ ID NO: 138558 - RNA, 19 nt, Artificial Sequence
  Description of Artificial Sequence: Synthetic oligonucleotide
augggcgaacuaguuaaac

SEQ ID NO: 138559 - RNA, 19 nt, Artificial Sequence
  Description of Artificial Sequence: Synthetic oligonucleotide
caugugguguauaaagaaa

SEQ ID NO: 138560 - RNA, 19 nt, Artificial Sequence
  Description of Artificial Sequence: Synthetic oligonucleotide
aacugaauucacggcccuc

SEQ ID NO: 138561 - RNA, 19 nt, Artificial Sequence
  Description of Artificial Sequence: Synthetic oligonucleotide
aaugccuaauuaguacuuu

SEQ ID NO: 138562 - RNA, 19 nt, Artificial Sequence
  Description of Artificial Sequence: Synthetic oligonucleotide
augacauggagagauccga

SEQ ID NO: 138563 - RNA, 19 nt, Artificial Sequence
  Description of Artificial Sequence: Synthetic oligonucleotide
aggcauguaggccccuccg

SEQ ID NO: 138564 - RNA, 19 nt, Artificial Sequence
  Description of Artificial Sequence: Synthetic oligonucleotide
uugauugguaacugaccau

SEQ ID NO: 138565 - RNA, 19 nt, Artificial Sequence
  Description of Artificial Sequence: Synthetic oligonucleotide
ugaggguuaccagagucaa

SEQ ID NO: 138566 - RNA, 19 nt, Artificial Sequence
  Description of Artificial Sequence: Synthetic oligonucleotide
guuaagugagacuuacagu

SEQ ID NO: 138567 - RNA, 19 nt, Artificial Sequence
  Description of Artificial Sequence: Synthetic oligonucleotide
guaaggcuccuuuuaauua

SEQ ID NO: 138568 - RNA, 19 nt, Artificial Sequence
  Description of Artificial Sequence: Synthetic oligonucleotide
gaguaggauuacaaacagc

SEQ ID NO: 138569 - RNA, 19 nt, Artificial Sequence
  Description of Artificial Sequence: Synthetic oligonucleotide
cagguauuucaaugaaguc

SEQ ID NO: 138570 - RNA, 19 nt, Artificial Sequence
  Description of Artificial Sequence: Synthetic oligonucleotide
gggcgaacuaguuaaacga

SEQ ID NO: 138571 - RNA, 19 nt, Artificial Sequence
  Description of Artificial Sequence: Synthetic oligonucleotide
auuaccguguuggauaauu

SEQ ID NO: 138572 - RNA, 19 nt, Artificial Sequence
  Description of Artificial Sequence: Synthetic oligonucleotide
ccuaagugccuccuguugg

SEQ ID NO: 138573 - RNA, 19 nt, Artificial Sequence
  Description of Artificial Sequence: Synthetic oligonucleotide
agguaccaauauuaccgug

SEQ ID NO: 138574 - RNA, 19 nt, Artificial Sequence
  Description of Artificial Sequence: Synthetic oligonucleotide
aacagaccuccccuucccu

SEQ ID NO: 138575 - RNA, 19 nt, Artificial Sequence
  Description of Artificial Sequence: Synthetic oligonucleotide
uggacuuacucugcaccag

SEQ ID NO: 138576 - RNA, 19 nt, Artificial Sequence
  Description of Artificial Sequence: Synthetic oligonucleotide
ggguccauaaugguguuag

SEQ ID NO: 138577 - RNA, 19 nt, Artificial Sequence
  Description of Artificial Sequence: Synthetic oligonucleotide
gcaagcacaagacccuuag

SEQ ID NO: 138578 - RNA, 19 nt, Artificial Sequence
  Description of Artificial Sequence: Synthetic oligonucleotide
acaagagguaugcaucauu

SEQ ID NO: 138579 - RNA, 19 nt, Artificial Sequence
  Description of Artificial Sequence: Synthetic oligonucleotide
cagaugugcccuacuuugc

SEQ ID NO: 138580 - RNA, 19 nt, Artificial Sequence
  Description of Artificial Sequence: Synthetic oligonucleotide
ucauggggauaaguucagg

SEQ ID NO: 138581 - RNA, 19 nt, Artificial Sequence
  Description of Artificial Sequence: Synthetic oligonucleotide
aaauuaccuacuacgucua

SEQ ID NO: 138582 - RNA, 19 nt, Artificial Sequence
  Description of Artificial Sequence: Synthetic oligonucleotide
gaguucuacuguaaaaugu

SEQ ID NO: 138583 - RNA, 19 nt, Artificial Sequence
  Description of Artificial Sequence: Synthetic oligonucleotide
gagauguauauauaacauu

SEQ ID NO: 138584 - RNA, 19 nt, Artificial Sequence
  Description of Artificial Sequence: Synthetic oligonucleotide
acguuuacauaaauucugu

SEQ ID NO: 138585 - RNA, 19 nt, Artificial Sequence
  Description of Artificial Sequence: Synthetic oligonucleotide
agggaguuuuacaaggaga

SEQ ID NO: 138586 - RNA, 19 nt, Artificial Sequence
  Description of Artificial Sequence: Synthetic oligonucleotide
cccuuuaucuauauauaug

SEQ ID NO: 138587 - RNA, 19 nt, Artificial Sequence
  Description of Artificial Sequence: Synthetic oligonucleotide
ggacuuacucugcaccagg

SEQ ID NO: 138588 - RNA, 19 nt, Artificial Sequence
  Description of Artificial Sequence: Synthetic oligonucleotide
gcuagacugaagguggccg

SEQ ID NO: 138589 - RNA, 19 nt, Artificial Sequence
  Description of Artificial Sequence: Synthetic oligonucleotide
guaggauuacaaacagcug

SEQ ID NO: 138590 - RNA, 19 nt, Artificial Sequence
  Description of Artificial Sequence: Synthetic oligonucleotide
gucgcuuacgagucaccag

SEQ ID NO: 138591 - RNA, 19 nt, Artificial Sequence
  Description of Artificial Sequence: Synthetic oligonucleotide
agauuacccaaguuaucuu

SEQ ID NO: 138592 - RNA, 19 nt, Artificial Sequence
  Description of Artificial Sequence: Synthetic oligonucleotide
caaaccugugcauuugaaa

SEQ ID NO: 138593 - RNA, 19 nt, Artificial Sequence
  Description of Artificial Sequence: Synthetic oligonucleotide
agugaaacuguuguucaua

SEQ ID NO: 138594 - RNA, 19 nt, Artificial Sequence
  Description of Artificial Sequence: Synthetic oligonucleotide
agagaaugggcgaacuagu

SEQ ID NO: 138595 - RNA, 19 nt, Artificial Sequence
  Description of Artificial Sequence: Synthetic oligonucleotide
uacgagucaccaggaacag

SEQ ID NO: 138596 - RNA, 19 nt, Artificial Sequence
  Description of Artificial Sequence: Synthetic oligonucleotide
gaaugaguggggaaaugaa

SEQ ID NO: 138597 - RNA, 19 nt, Artificial Sequence
  Description of Artificial Sequence: Synthetic oligonucleotide
uguuuccccuacccaaauc

SEQ ID NO: 138598 - RNA, 19 nt, Artificial Sequence
  Description of Artificial Sequence: Synthetic oligonucleotide
aucaucggagcuguaguga

SEQ ID NO: 138599 - RNA, 19 nt, Artificial Sequence
  Description of Artificial Sequence: Synthetic oligonucleotide
gagugugcauguuauggcu

SEQ ID NO: 138600 - RNA, 19 nt, Artificial Sequence
  Description of Artificial Sequence: Synthetic oligonucleotide
uacccaaguuaucuugcua

SEQ ID NO: 138601 - RNA, 19 nt, Artificial Sequence
  Description of Artificial Sequence: Synthetic oligonucleotide
augccuaauuaguacuuua

SEQ ID NO: 138602 - RNA, 19 nt, Artificial Sequence
  Description of Artificial Sequence: Synthetic oligonucleotide
aguggagugugcauguuau

SEQ ID NO: 138603 - RNA, 19 nt, Artificial Sequence
  Description of Artificial Sequence: Synthetic oligonucleotide
agucacuaacaagugaguu

SEQ ID NO: 138604 - RNA, 19 nt, Artificial Sequence
  Description of Artificial Sequence: Synthetic oligonucleotide
uugacccuugagauguaua

SEQ ID NO: 138605 - RNA, 19 nt, Artificial Sequence
  Description of Artificial Sequence: Synthetic oligonucleotide
uuccccuacccaaauccau

SEQ ID NO: 138606 - RNA, 19 nt, Artificial Sequence
  Description of Artificial Sequence: Synthetic oligonucleotide
agugugcauguuauggcug

SEQ ID NO: 138607 - RNA, 19 nt, Artificial Sequence
  Description of Artificial Sequence: Synthetic oligonucleotide
acgacaggcgagugucccg

SEQ ID NO: 138608 - RNA, 19 nt, Artificial Sequence
  Description of Artificial Sequence: Synthetic oligonucleotide
cucacuuuauuaguaguaa

SEQ ID NO: 138609 - RNA, 19 nt, Artificial Sequence
  Description of Artificial Sequence: Synthetic oligonucleotide
uaccagagucaaaggugca

SEQ ID NO: 138610 - RNA, 19 nt, Artificial Sequence
  Description of Artificial Sequence: Synthetic oligonucleotide
ugguacaguguggaauucu

SEQ ID NO: 138611 - RNA, 19 nt, Artificial Sequence
  Description of Artificial Sequence: Synthetic oligonucleotide
ggggaaaagauauuacaua

SEQ ID NO: 138612 - RNA, 19 nt, Artificial Sequence
  Description of Artificial Sequence: Synthetic oligonucleotide
gagcggcuagugcacacug

SEQ ID NO: 138613 - RNA, 19 nt, Artificial Sequence
  Description of Artificial Sequence: Synthetic oligonucleotide
uggcuagacugaagguggc

SEQ ID NO: 138614 - RNA, 19 nt, Artificial Sequence
  Description of Artificial Sequence: Synthetic oligonucleotide
uaccuacuacgucuacagu

SEQ ID NO: 138615 - RNA, 19 nt, Artificial Sequence
  Description of Artificial Sequence: Synthetic oligonucleotide
cagguugacccuugagaug

SEQ ID NO: 138616 - RNA, 19 nt, Artificial Sequence
  Description of Artificial Sequence: Synthetic oligonucleotide
ugaauucacggcccucauu

SEQ ID NO: 138617 - RNA, 19 nt, Artificial Sequence
  Description of Artificial Sequence: Synthetic oligonucleotide
aacaagagguaugcaucau

SEQ ID NO: 138618 - RNA, 19 nt, Artificial Sequence
  Description of Artificial Sequence: Synthetic oligonucleotide
cuaagugccuccuguugga

SEQ ID NO: 138619 - RNA, 19 nt, Artificial Sequence
  Description of Artificial Sequence: Synthetic oligonucleotide
guuaaacgacaggcgagug

SEQ ID NO: 138620 - RNA, 19 nt, Artificial Sequence
  Description of Artificial Sequence: Synthetic oligonucleotide
gcacaagacccuuagucca

SEQ ID NO: 138621 - RNA, 19 nt, Artificial Sequence
  Description of Artificial Sequence: Synthetic oligonucleotide
caaaccauagaaacugaau

SEQ ID NO: 138622 - RNA, 19 nt, Artificial Sequence
  Description of Artificial Sequence: Synthetic oligonucleotide
cucugguaucuccaugauc

SEQ ID NO: 138623 - RNA, 19 nt, Artificial Sequence
  Description of Artificial Sequence: Synthetic oligonucleotide
ugacaacauugggagcugc

SEQ ID NO: 138624 - RNA, 19 nt, Artificial Sequence
  Description of Artificial Sequence: Synthetic oligonucleotide
ugcuguuaagugagacuua

SEQ ID NO: 138625 - RNA, 19 nt, Artificial Sequence
  Description of Artificial Sequence: Synthetic oligonucleotide
cuugacccacccuccuccc

SEQ ID NO: 138626 - RNA, 19 nt, Artificial Sequence
  Description of Artificial Sequence: Synthetic oligonucleotide
cauguaggccccuccgguc

SEQ ID NO: 138627 - RNA, 19 nt, Artificial Sequence
  Description of Artificial Sequence: Synthetic oligonucleotide
gggaaaugaaaaggucggg

SEQ ID NO: 138628 - RNA, 19 nt, Artificial Sequence
  Description of Artificial Sequence: Synthetic oligonucleotide
gguuaccagagucaaaggu

SEQ ID NO: 138629 - RNA, 19 nt, Artificial Sequence
  Description of Artificial Sequence: Synthetic oligonucleotide
aacugcgaguccaucucgu

SEQ ID NO: 138630 - RNA, 19 nt, Artificial Sequence
  Description of Artificial Sequence: Synthetic oligonucleotide
ggaaugaguggggaaauga

SEQ ID NO: 138631 - RNA, 19 nt, Artificial Sequence
  Description of Artificial Sequence: Synthetic oligonucleotide
auagugguacaguguggaa

SEQ ID NO: 138632 - RNA, 19 nt, Artificial Sequence
  Description of Artificial Sequence: Synthetic oligonucleotide
cucgcauggcaugaggguc

SEQ ID NO: 138633 - RNA, 19 nt, Artificial Sequence
  Description of Artificial Sequence: Synthetic oligonucleotide
agguuacaaaacaggaaaa

SEQ ID NO: 138634 - RNA, 19 nt, Artificial Sequence
  Description of Artificial Sequence: Synthetic oligonucleotide
ggguuaccagagucaaagg

SEQ ID NO: 138635 - RNA, 19 nt, Artificial Sequence
  Description of Artificial Sequence: Synthetic oligonucleotide
gauguucccagugcuucca

SEQ ID NO: 138636 - RNA, 19 nt, Artificial Sequence
  Description of Artificial Sequence: Synthetic oligonucleotide
gucacuaacaagugaguuu

SEQ ID NO: 138637 - RNA, 19 nt, Artificial Sequence
  Description of Artificial Sequence: Synthetic oligonucleotide
ggauuacaaacagcugucc

SEQ ID NO: 138638 - RNA, 19 nt, Artificial Sequence
  Description of Artificial Sequence: Synthetic oligonucleotide
ggcauguaggccccuccgg

SEQ ID NO: 138639 - RNA, 19 nt, Artificial Sequence
  Description of Artificial Sequence: Synthetic oligonucleotide
ggagagaauuuaugcuuac

SEQ ID NO: 138640 - RNA, 19 nt, Artificial Sequence
  Description of Artificial Sequence: Synthetic oligonucleotide
cauguuuccccuacccaaa

SEQ ID NO: 138641 - RNA, 19 nt, Artificial Sequence
  Description of Artificial Sequence: Synthetic oligonucleotide
uguccaugugguguauaaa

SEQ ID NO: 138642 - RNA, 19 nt, Artificial Sequence
  Description of Artificial Sequence: Synthetic oligonucleotide
uaguuuguacaugcggcuu

SEQ ID NO: 138643 - RNA, 19 nt, Artificial Sequence
  Description of Artificial Sequence: Synthetic oligonucleotide
cuuacucugcaccaggcau

SEQ ID NO: 138644 - RNA, 19 nt, Artificial Sequence
  Description of Artificial Sequence: Synthetic oligonucleotide
cuccggucgcuuacgaguc

SEQ ID NO: 138645 - RNA, 19 nt, Artificial Sequence
  Description of Artificial Sequence: Synthetic oligonucleotide
ugugcccuacuuugcuggu

SEQ ID NO: 138646 - RNA, 19 nt, Artificial Sequence
  Description of Artificial Sequence: Synthetic oligonucleotide
uuccugccucacuuuauua

SEQ ID NO: 138647 - RNA, 19 nt, Artificial Sequence
  Description of Artificial Sequence: Synthetic oligonucleotide
cuugcacaugcucagaguu

SEQ ID NO: 138648 - RNA, 19 nt, Artificial Sequence
  Description of Artificial Sequence: Synthetic oligonucleotide
gagagcggcuagugcacac

SEQ ID NO: 138649 - RNA, 19 nt, Artificial Sequence
  Description of Artificial Sequence: Synthetic oligonucleotide
augacaacauugggagcug

SEQ ID NO: 138650 - RNA, 19 nt, Artificial Sequence
  Description of Artificial Sequence: Synthetic oligonucleotide
auguuuccccuacccaaau

SEQ ID NO: 138651 - RNA, 19 nt, Artificial Sequence
  Description of Artificial Sequence: Synthetic oligonucleotide
augcuuacagguauuucuu

SEQ ID NO: 138652 - RNA, 19 nt, Artificial Sequence
  Description of Artificial Sequence: Synthetic oligonucleotide
aaugggcgaacuaguuaaa

SEQ ID NO: 138653 - RNA, 19 nt, Artificial Sequence
  Description of Artificial Sequence: Synthetic oligonucleotide
acagucacagaggcuugug

SEQ ID NO: 138654 - RNA, 19 nt, Artificial Sequence
  Description of Artificial Sequence: Synthetic oligonucleotide
auuuaugcuuacagguauu

SEQ ID NO: 138655 - RNA, 19 nt, Artificial Sequence
  Description of Artificial Sequence: Synthetic oligonucleotide
cugugacagaggcggcugc

SEQ ID NO: 138656 - RNA, 19 nt, Artificial Sequence
  Description of Artificial Sequence: Synthetic oligonucleotide
guguggcuaaaaugugaca

SEQ ID NO: 138657 - RNA, 19 nt, Artificial Sequence
  Description of Artificial Sequence: Synthetic oligonucleotide
gacccuuaguccacauuuc

SEQ ID NO: 138658 - RNA, 19 nt, Artificial Sequence
  Description of Artificial Sequence: Synthetic oligonucleotide
ucacggcccucauuucaac

SEQ ID NO: 138659 - RNA, 19 nt, Artificial Sequence
  Description of Artificial Sequence: Synthetic oligonucleotide
gguaccaauauuaccgugu

SEQ ID NO: 138660 - RNA, 19 nt, Artificial Sequence
  Description of Artificial Sequence: Synthetic oligonucleotide
ggcgaacuaguuaaacgac

SEQ ID NO: 138661 - RNA, 19 nt, Artificial Sequence
  Description of Artificial Sequence: Synthetic oligonucleotide
guccuacgcagccuugcac

SEQ ID NO: 138662 - RNA, 19 nt, Artificial Sequence
  Description of Artificial Sequence: Synthetic oligonucleotide
gagagauccgaaggcaugu

SEQ ID NO: 138663 - RNA, 19 nt, Artificial Sequence
  Description of Artificial Sequence: Synthetic oligonucleotide
augguguuagucagcugcu

SEQ ID NO: 138664 - RNA, 19 nt, Artificial Sequence
  Description of Artificial Sequence: Synthetic oligonucleotide
cagaguugauagugguaca

SEQ ID NO: 138665 - RNA, 19 nt, Artificial Sequence
  Description of Artificial Sequence: Synthetic oligonucleotide
gucccgaagcccugcggcc

SEQ ID NO: 138666 - RNA, 19 nt, Artificial Sequence
  Description of Artificial Sequence: Synthetic oligonucleotide
gcuggaguaggauuacaaa

SEQ ID NO: 138667 - RNA, 19 nt, Artificial Sequence
  Description of Artificial Sequence: Synthetic oligonucleotide
cuacgucuacaguaaauau

SEQ ID NO: 138668 - RNA, 19 nt, Artificial Sequence
  Description of Artificial Sequence: Synthetic oligonucleotide
cugauacuacagucauuca

SEQ ID NO: 138669 - RNA, 19 nt, Artificial Sequence
  Description of Artificial Sequence: Synthetic oligonucleotide
gcugccugauugaauuuag

SEQ ID NO: 138670 - RNA, 19 nt, Artificial Sequence
  Description of Artificial Sequence: Synthetic oligonucleotide
acaagacccuuaguccaca

SEQ ID NO: 138671 - RNA, 19 nt, Artificial Sequence
  Description of Artificial Sequence: Synthetic oligonucleotide
gaguugauagugguacagu

SEQ ID NO: 138672 - RNA, 19 nt, Artificial Sequence
  Description of Artificial Sequence: Synthetic oligonucleotide
uccggucgcuuacgaguca

SEQ ID NO: 138673 - RNA, 19 nt, Artificial Sequence
  Description of Artificial Sequence: Synthetic oligonucleotide
ggaacuggaacaguauaua

SEQ ID NO: 138674 - RNA, 19 nt, Artificial Sequence
  Description of Artificial Sequence: Synthetic oligonucleotide
agcggcuagugcacacugg

SEQ ID NO: 138675 - RNA, 19 nt, Artificial Sequence
  Description of Artificial Sequence: Synthetic oligonucleotide
gcauguuauggcugauuca

SEQ ID NO: 138676 - RNA, 19 nt, Artificial Sequence
  Description of Artificial Sequence: Synthetic oligonucleotide
agagcggcuagugcacacu

SEQ ID NO: 138677 - RNA, 19 nt, Artificial Sequence
  Description of Artificial Sequence: Synthetic oligonucleotide
guaccaauauuaccguguu

SEQ ID NO: 138678 - RNA, 19 nt, Artificial Sequence
  Description of Artificial Sequence: Synthetic oligonucleotide
cugccugauugaauuuaga

SEQ ID NO: 138679 - RNA, 19 nt, Artificial Sequence
  Description of Artificial Sequence: Synthetic oligonucleotide
cugccucacuuuauuagua

SEQ ID NO: 138680 - RNA, 19 nt, Artificial Sequence
  Description of Artificial Sequence: Synthetic oligonucleotide
agugcugagugggaauauu

SEQ ID NO: 138681 - RNA, 19 nt, Artificial Sequence
  Description of Artificial Sequence: Synthetic oligonucleotide
caugcggcuuuuagaggca

SEQ ID NO: 138682 - RNA, 19 nt, Artificial Sequence
  Description of Artificial Sequence: Synthetic oligonucleotide
ggggauaaguucaggaucu

SEQ ID NO: 138683 - RNA, 19 nt, Artificial Sequence
  Description of Artificial Sequence: Synthetic oligonucleotide
gucgggucuggaggaaaag

SEQ ID NO: 138684 - RNA, 19 nt, Artificial Sequence
  Description of Artificial Sequence: Synthetic oligonucleotide
caugaggguccauaauggu

SEQ ID NO: 138685 - RNA, 19 nt, Artificial Sequence
  Description of Artificial Sequence: Synthetic oligonucleotide
gcggugguggugguggugg

SEQ ID NO: 138686 - RNA, 19 nt, Artificial Sequence
  Description of Artificial Sequence: Synthetic oligonucleotide
gcgaacuaguuaaacgaca

SEQ ID NO: 138687 - RNA, 19 nt, Artificial Sequence
  Description of Artificial Sequence: Synthetic oligonucleotide
gacccuugagauguauaua

SEQ ID NO: 138688 - RNA, 19 nt, Artificial Sequence
  Description of Artificial Sequence: Synthetic oligonucleotide
guauaauaguuuccaucuu

SEQ ID NO: 138689 - RNA, 19 nt, Artificial Sequence
  Description of Artificial Sequence: Synthetic oligonucleotide
ugugcauguuauggcugau

SEQ ID NO: 138690 - RNA, 19 nt, Artificial Sequence
  Description of Artificial Sequence: Synthetic oligonucleotide
cacggcccucauuucaaca

SEQ ID NO: 138691 - RNA, 19 nt, Artificial Sequence
  Description of Artificial Sequence: Synthetic oligonucleotide
gagugucccgaagcccugc

SEQ ID NO: 138692 - RNA, 19 nt, Artificial Sequence
  Description of Artificial Sequence: Synthetic oligonucleotide
caugcucagaguugauagu

SEQ ID NO: 138693 - RNA, 19 nt, Artificial Sequence
  Description of Artificial Sequence: Synthetic oligonucleotide
caauauuaccguguuggau

SEQ ID NO: 138694 - RNA, 19 nt, Artificial Sequence
  Description of Artificial Sequence: Synthetic oligonucleotide
cagguaccaauauuaccgu

SEQ ID NO: 138695 - RNA, 19 nt, Artificial Sequence
  Description of Artificial Sequence: Synthetic oligonucleotide
ccucacuuuauuaguagua

SEQ ID NO: 138696 - RNA, 19 nt, Artificial Sequence
  Description of Artificial Sequence: Synthetic oligonucleotide
gguggugguggugguggcg

SEQ ID NO: 138697 - RNA, 19 nt, Artificial Sequence
  Description of Artificial Sequence: Synthetic oligonucleotide
cccuaagugccuccuguug

SEQ ID NO: 138698 - RNA, 19 nt, Artificial Sequence
  Description of Artificial Sequence: Synthetic oligonucleotide
cuacuacgucuacaguaaa

SEQ ID NO: 138699 - RNA, 19 nt, Artificial Sequence
  Description of Artificial Sequence: Synthetic oligonucleotide
ggucgcuuacgagucacca

SEQ ID NO: 138700 - RNA, 19 nt, Artificial Sequence
  Description of Artificial Sequence: Synthetic oligonucleotide
ccaauauuaccguguugga

SEQ ID NO: 138701 - RNA, 19 nt, Artificial Sequence
  Description of Artificial Sequence: Synthetic oligonucleotide
acauaccaagugguauaau

SEQ ID NO: 138702 - RNA, 19 nt, Artificial Sequence
  Description of Artificial Sequence: Synthetic oligonucleotide
ggaauagacuuaguuugua

SEQ ID NO: 138703 - RNA, 19 nt, Artificial Sequence
  Description of Artificial Sequence: Synthetic oligonucleotide
ccgaaggcauguaggcccc

SEQ ID NO: 138704 - RNA, 19 nt, Artificial Sequence
  Description of Artificial Sequence: Synthetic oligonucleotide
uauuaccguguuggauaau

SEQ ID NO: 138705 - RNA, 19 nt, Artificial Sequence
  Description of Artificial Sequence: Synthetic oligonucleotide
ggcuagacugaagguggcc

SEQ ID NO: 138706 - RNA, 19 nt, Artificial Sequence
  Description of Artificial Sequence: Synthetic oligonucleotide
acgagucaccaggaacagu

SEQ ID NO: 138707 - RNA, 19 nt, Artificial Sequence
  Description of Artificial Sequence: Synthetic oligonucleotide
gagaaugggcgaacuaguu

SEQ ID NO: 138708 - RNA, 19 nt, Artificial Sequence
  Description of Artificial Sequence: Synthetic oligonucleotide
ccagguugacccuugagau

SEQ ID NO: 138709 - RNA, 19 nt, Artificial Sequence
  Description of Artificial Sequence: Synthetic oligonucleotide
agacaggaauagacuuagu

SEQ ID NO: 138710 - RNA, 19 nt, Artificial Sequence
  Description of Artificial Sequence: Synthetic oligonucleotide
ggcgagugucccgaagccc

SEQ ID NO: 138711 - RNA, 19 nt, Artificial Sequence
  Description of Artificial Sequence: Synthetic oligonucleotide
ggagcgcaugacauggaga

SEQ ID NO: 138712 - RNA, 19 nt, Artificial Sequence
  Description of Artificial Sequence: Synthetic oligonucleotide
gguccuacgcagccuugca

SEQ ID NO: 138713 - RNA, 19 nt, Artificial Sequence
  Description of Artificial Sequence: Synthetic oligonucleotide
caccaggcauuuucuaagu

SEQ ID NO: 138714 - RNA, 19 nt, Artificial Sequence
  Description of Artificial Sequence: Synthetic oligonucleotide
gggcucuagucacacucuc

SEQ ID NO: 138715 - RNA, 19 nt, Artificial Sequence
  Description of Artificial Sequence: Synthetic oligonucleotide
ggaaaagggccagguugac

SEQ ID NO: 138716 - RNA, 19 nt, Artificial Sequence
  Description of Artificial Sequence: Synthetic oligonucleotide
cuguagugaaacuguuguu

SEQ ID NO: 138717 - RNA, 19 nt, Artificial Sequence
  Description of Artificial Sequence: Synthetic oligonucleotide
gaggguuaccagagucaaa

SEQ ID NO: 138718 - RNA, 19 nt, Artificial Sequence
  Description of Artificial Sequence: Synthetic oligonucleotide
augcggcuuuuagaggcau

SEQ ID NO: 138719 - RNA, 19 nt, Artificial Sequence
  Description of Artificial Sequence: Synthetic oligonucleotide
gcauguaggccccuccggu

SEQ ID NO: 138720 - RNA, 19 nt, Artificial Sequence
  Description of Artificial Sequence: Synthetic oligonucleotide
acagagaaacuggguccua

SEQ ID NO: 138721 - RNA, 19 nt, Artificial Sequence
  Description of Artificial Sequence: Synthetic oligonucleotide
cggcccucauuucaacagg

SEQ ID NO: 138722 - RNA, 19 nt, Artificial Sequence
  Description of Artificial Sequence: Synthetic oligonucleotide
aggucgggucuggaggaaa

SEQ ID NO: 138723 - RNA, 19 nt, Artificial Sequence
  Description of Artificial Sequence: Synthetic oligonucleotide
ccuccggucgcuuacgagu

SEQ ID NO: 138724 - RNA, 19 nt, Artificial Sequence
  Description of Artificial Sequence: Synthetic oligonucleotide
cccaaguuaucuugcuaaa

SEQ ID NO: 138725 - RNA, 19 nt, Artificial Sequence
  Description of Artificial Sequence: Synthetic oligonucleotide
ccaaguuaucuugcuaaaa

SEQ ID NO: 138726 - RNA, 19 nt, Artificial Sequence
  Description of Artificial Sequence: Synthetic oligonucleotide
caagagguucauuccucuu

SEQ ID NO: 138727 - RNA, 19 nt, Artificial Sequence
  Description of Artificial Sequence: Synthetic oligonucleotide
guuuguacaugcggcuuuu

SEQ ID NO: 138728 - RNA, 19 nt, Artificial Sequence
  Description of Artificial Sequence: Synthetic oligonucleotide
guugacccuugagauguau

SEQ ID NO: 138729 - RNA, 19 nt, Artificial Sequence
  Description of Artificial Sequence: Synthetic oligonucleotide
cccuccggucgcuuacgag

SEQ ID NO: 138730 - RNA, 19 nt, Artificial Sequence
  Description of Artificial Sequence: Synthetic oligonucleotide
gcgagugucccgaagcccu

SEQ ID NO: 138731 - RNA, 19 nt, Artificial Sequence
  Description of Artificial Sequence: Synthetic oligonucleotide
caugaucaucggagcugua

SEQ ID NO: 138732 - RNA, 19 nt, Artificial Sequence
  Description of Artificial Sequence: Synthetic oligonucleotide
cacugugacagaggcggcu

SEQ ID NO: 138733 - RNA, 19 nt, Artificial Sequence
  Description of Artificial Sequence: Synthetic oligonucleotide
cacugauacuacagucauu

SEQ ID NO: 138734 - RNA, 19 nt, Artificial Sequence
  Description of Artificial Sequence: Synthetic oligonucleotide
caagacccuuaguccacau

SEQ ID NO: 138735 - RNA, 19 nt, Artificial Sequence
  Description of Artificial Sequence: Synthetic oligonucleotide
ccggucgcuuacgagucac

SEQ ID NO: 138736 - RNA, 19 nt, Artificial Sequence
  Description of Artificial Sequence: Synthetic oligonucleotide
aggccccuccggucgcuua

SEQ ID NO: 138737 - RNA, 19 nt, Artificial Sequence
  Description of Artificial Sequence: Synthetic oligonucleotide
gugcauguuauggcugauu

SEQ ID NO: 138738 - RNA, 19 nt, Artificial Sequence
  Description of Artificial Sequence: Synthetic oligonucleotide
ccgaugguugagaguagcu

SEQ ID NO: 138739 - RNA, 19 nt, Artificial Sequence
  Description of Artificial Sequence: Synthetic oligonucleotide
cggucgcuuacgagucacc

SEQ ID NO: 138740 - RNA, 19 nt, Artificial Sequence
  Description of Artificial Sequence: Synthetic oligonucleotide
gccccuccggucgcuuacg

SEQ ID NO: 138741 - RNA, 19 nt, Artificial Sequence
  Description of Artificial Sequence: Synthetic oligonucleotide
cgcuuacgagucaccagga

SEQ ID NO: 138742 - RNA, 19 nt, Artificial Sequence
  Description of Artificial Sequence: Synthetic oligonucleotide
uaggccccuccggucgcuu

SEQ ID NO: 138743 - RNA, 19 nt, Artificial Sequence
  Description of Artificial Sequence: Synthetic oligonucleotide
gcccaacaaaccugugcau

SEQ ID NO: 138744 - RNA, 19 nt, Artificial Sequence
  Description of Artificial Sequence: Synthetic oligonucleotide
gcugauguucccagugcuu

SEQ ID NO: 138745 - RNA, 19 nt, Artificial Sequence
  Description of Artificial Sequence: Synthetic oligonucleotide
gcccucauuucaacaggcu

SEQ ID NO: 138746 - RNA, 19 nt, Artificial Sequence
  Description of Artificial Sequence: Synthetic oligonucleotide
cgguggugguggugguggc

SEQ ID NO: 138747 - RNA, 19 nt, Artificial Sequence
  Description of Artificial Sequence: Synthetic oligonucleotide
ccuacgcagccuugcacau

SEQ ID NO: 138748 - RNA, 19 nt, Artificial Sequence
  Description of Artificial Sequence: Synthetic oligonucleotide
gguugacccuugagaugua

SEQ ID NO: 138749 - RNA, 19 nt, Artificial Sequence
  Description of Artificial Sequence: Synthetic oligonucleotide
guaggccccuccggucgcu

SEQ ID NO: 138750 - RNA, 19 nt, Artificial Sequence
  Description of Artificial Sequence: Synthetic oligonucleotide
ccccuccggucgcuuacga

SEQ ID NO: 138751 - RNA, 19 nt, Artificial Sequence
  Description of Artificial Sequence: Synthetic oligonucleotide
cgucuacaguaaauauuuu

SEQ ID NO: 138752 - RNA, 19 nt, Artificial Sequence
  Description of Artificial Sequence: Synthetic oligonucleotide
gcccugcggcccagaugug

SEQ ID NO: 138753 - RNA, 19 nt, Artificial Sequence
  Description of Artificial Sequence: Synthetic oligonucleotide
aauguugcgaaacagucgc

SEQ ID NO: 138754 - RNA, 19 nt, Artificial Sequence
  Description of Artificial Sequence: Synthetic oligonucleotide
uaaacuacggcacagaaac

SEQ ID NO: 138755 - RNA, 19 nt, Artificial Sequence
  Description of Artificial Sequence: Synthetic oligonucleotide
ucauauuuagcacaaaagc

SEQ ID NO: 138756 - RNA, 19 nt, Artificial Sequence
  Description of Artificial Sequence: Synthetic oligonucleotide
aaaggacgcaaguucaucc

SEQ ID NO: 138757 - RNA, 19 nt, Artificial Sequence
  Description of Artificial Sequence: Synthetic oligonucleotide
agccuuaacauucaugucc

SEQ ID NO: 138758 - RNA, 19 nt, Artificial Sequence
  Description of Artificial Sequence: Synthetic oligonucleotide
aguauuaguaaucggugcc

SEQ ID NO: 138759 - RNA, 19 nt, Artificial Sequence
  Description of Artificial Sequence: Synthetic oligonucleotide
uuaagagguagacagauga

SEQ ID NO: 138760 - RNA, 19 nt, Artificial Sequence
  Description of Artificial Sequence: Synthetic oligonucleotide
aaugcuauaauaaauagua

SEQ ID NO: 138761 - RNA, 19 nt, Artificial Sequence
  Description of Artificial Sequence: Synthetic oligonucleotide
gaugaaugcacgaacaagg

SEQ ID NO: 138762 - RNA, 19 nt, Artificial Sequence
  Description of Artificial Sequence: Synthetic oligonucleotide
ucuacauuaggccauguca

SEQ ID NO: 138763 - RNA, 19 nt, Artificial Sequence
  Description of Artificial Sequence: Synthetic oligonucleotide
ucuucuaggaacaggaaug

SEQ ID NO: 138764 - RNA, 19 nt, Artificial Sequence
  Description of Artificial Sequence: Synthetic oligonucleotide
aagagaauuacugcgcggc

SEQ ID NO: 138765 - RNA, 19 nt, Artificial Sequence
  Description of Artificial Sequence: Synthetic oligonucleotide
uuaguaucuacauuaggcc

SEQ ID NO: 138766 - RNA, 19 nt, Artificial Sequence
  Description of Artificial Sequence: Synthetic oligonucleotide
auuucuaugagagacuacg

SEQ ID NO: 138767 - RNA, 19 nt, Artificial Sequence
  Description of Artificial Sequence: Synthetic oligonucleotide
ugagguaucaaaaugcuau

SEQ ID NO: 138768 - RNA, 19 nt, Artificial Sequence
  Description of Artificial Sequence: Synthetic oligonucleotide
cuaauaaccccagaaaugg

SEQ ID NO: 138769 - RNA, 19 nt, Artificial Sequence
  Description of Artificial Sequence: Synthetic oligonucleotide
guaaauuacacuucccucc

SEQ ID NO: 138770 - RNA, 19 nt, Artificial Sequence
  Description of Artificial Sequence: Synthetic oligonucleotide
uagaguauuaguaaucggu

SEQ ID NO: 138771 - RNA, 19 nt, Artificial Sequence
  Description of Artificial Sequence: Synthetic oligonucleotide
aaagguauacccacaaccg

SEQ ID NO: 138772 - RNA, 19 nt, Artificial Sequence
  Description of Artificial Sequence: Synthetic oligonucleotide
aacaagguucccauuaggc

SEQ ID NO: 138773 - RNA, 19 nt, Artificial Sequence
  Description of Artificial Sequence: Synthetic oligonucleotide
gaauuugcuacaucauugg

SEQ ID NO: 138774 - RNA, 19 nt, Artificial Sequence
  Description of Artificial Sequence: Synthetic oligonucleotide
ucaaagauguguaaacgga

SEQ ID NO: 138775 - RNA, 19 nt, Artificial Sequence
  Description of Artificial Sequence: Synthetic oligonucleotide
aauacugaaaccacuggag

SEQ ID NO: 138776 - RNA, 19 nt, Artificial Sequence
  Description of Artificial Sequence: Synthetic oligonucleotide
aacuacggcacagaaaccg

SEQ ID NO: 138777 - RNA, 19 nt, Artificial Sequence
  Description of Artificial Sequence: Synthetic oligonucleotide
aauaaccccagaaaugggg

SEQ ID NO: 138778 - RNA, 19 nt, Artificial Sequence
  Description of Artificial Sequence: Synthetic oligonucleotide
uuuguagacacaucuugag

SEQ ID NO: 138779 - RNA, 19 nt, Artificial Sequence
  Description of Artificial Sequence: Synthetic oligonucleotide
agacauaauaccagaaagc

SEQ ID NO: 138780 - RNA, 19 nt, Artificial Sequence
  Description of Artificial Sequence: Synthetic oligonucleotide
uguuguugcgccucaacgg

SEQ ID NO: 138781 - RNA, 19 nt, Artificial Sequence
  Description of Artificial Sequence: Synthetic oligonucleotide
uauacgcugcguaugggcg

SEQ ID NO: 138782 - RNA, 19 nt, Artificial Sequence
  Description of Artificial Sequence: Synthetic oligonucleotide
uucuaugagagacuacgag

SEQ ID NO: 138783 - RNA, 19 nt, Artificial Sequence
  Description of Artificial Sequence: Synthetic oligonucleotide
aacuuuagaccccuugucu

SEQ ID NO: 138784 - RNA, 19 nt, Artificial Sequence
  Description of Artificial Sequence: Synthetic oligonucleotide
uccauuaaggggcuuucgg

SEQ ID NO: 138785 - RNA, 19 nt, Artificial Sequence
  Description of Artificial Sequence: Synthetic oligonucleotide
ugugauacugauaguggcc

SEQ ID NO: 138786 - RNA, 19 nt, Artificial Sequence
  Description of Artificial Sequence: Synthetic oligonucleotide
gacuagacuuuauuucucg

SEQ ID NO: 138787 - RNA, 19 nt, Artificial Sequence
  Description of Artificial Sequence: Synthetic oligonucleotide
acgaaaagggcacagaaaa

SEQ ID NO: 138788 - RNA, 19 nt, Artificial Sequence
  Description of Artificial Sequence: Synthetic oligonucleotide
uguaaauuacacuucccuc

SEQ ID NO: 138789 - RNA, 19 nt, Artificial Sequence
  Description of Artificial Sequence: Synthetic oligonucleotide
aaugccaagacaaaugcaa

SEQ ID NO: 138790 - RNA, 19 nt, Artificial Sequence
  Description of Artificial Sequence: Synthetic oligonucleotide
  modified_base (2)..(2): a, c, u, g, unknown or other
ancagcucagaccacuuga

SEQ ID NO: 138791 - RNA, 19 nt, Artificial Sequence
  Description of Artificial Sequence: Synthetic oligonucleotide
aaguagagaaauauguaca

SEQ ID NO: 138792 - RNA, 19 nt, Artificial Sequence
  Description of Artificial Sequence: Synthetic oligonucleotide
aaugguugcaccgacaaua

SEQ ID NO: 138793 - RNA, 19 nt, Artificial Sequence
  Description of Artificial Sequence: Synthetic oligonucleotide
aggaaguuugucaaagccc

SEQ ID NO: 138794 - RNA, 19 nt, Artificial Sequence
  Description of Artificial Sequence: Synthetic oligonucleotide
gaguauuaguaaucggugc

SEQ ID NO: 138795 - RNA, 19 nt, Artificial Sequence
  Description of Artificial Sequence: Synthetic oligonucleotide
ugagagacuacgagggaag

SEQ ID NO: 138796 - RNA, 19 nt, Artificial Sequence
  Description of Artificial Sequence: Synthetic oligonucleotide
agaggaaguuugucaaagc

SEQ ID NO: 138797 - RNA, 19 nt, Artificial Sequence
  Description of Artificial Sequence: Synthetic oligonucleotide
ugcuauacgcugcguaugg

SEQ ID NO: 138798 - RNA, 19 nt, Artificial Sequence
  Description of Artificial Sequence: Synthetic oligonucleotide
uggcggauuaaaagaaagg

SEQ ID NO: 138799 - RNA, 19 nt, Artificial Sequence
  Description of Artificial Sequence: Synthetic oligonucleotide
ugaacaagguucccauuag

SEQ ID NO: 138800 - RNA, 19 nt, Artificial Sequence
  Description of Artificial Sequence: Synthetic oligonucleotide
cuuaggaugaaccaaugga

SEQ ID NO: 138801 - RNA, 19 nt, Artificial Sequence
  Description of Artificial Sequence: Synthetic oligonucleotide
uaggcaacugcacugcacc

SEQ ID NO: 138802 - RNA, 19 nt, Artificial Sequence
  Description of Artificial Sequence: Synthetic oligonucleotide
agauucuuggcccucuaag

SEQ ID NO: 138803 - RNA, 19 nt, Artificial Sequence
  Description of Artificial Sequence: Synthetic oligonucleotide
uaagagaauuacugcgcgg

SEQ ID NO: 138804 - RNA, 19 nt, Artificial Sequence
  Description of Artificial Sequence: Synthetic oligonucleotide
agggcuaaaagcacggagc

SEQ ID NO: 138805 - RNA, 19 nt, Artificial Sequence
  Description of Artificial Sequence: Synthetic oligonucleotide
uuauuccaauuguacaggc

SEQ ID NO: 138806 - RNA, 19 nt, Artificial Sequence
  Description of Artificial Sequence: Synthetic oligonucleotide
uacugcgcggcuuucaaag

SEQ ID NO: 138807 - RNA, 19 nt, Artificial Sequence
  Description of Artificial Sequence: Synthetic oligonucleotide
cggauuaaaagaaaggacg

SEQ ID NO: 138808 - RNA, 19 nt, Artificial Sequence
  Description of Artificial Sequence: Synthetic oligonucleotide
aguucaauacugaaaccac

SEQ ID NO: 138809 - RNA, 19 nt, Artificial Sequence
  Description of Artificial Sequence: Synthetic oligonucleotide
auauuuagcacaaaagcaa

SEQ ID NO: 138810 - RNA, 19 nt, Artificial Sequence
  Description of Artificial Sequence: Synthetic oligonucleotide
augauagcagcacuaauaa

SEQ ID NO: 138811 - RNA, 19 nt, Artificial Sequence
  Description of Artificial Sequence: Synthetic oligonucleotide
gguguugcuaucuuuguag

SEQ ID NO: 138812 - RNA, 19 nt, Artificial Sequence
  Description of Artificial Sequence: Synthetic oligonucleotide
guuacugcuauacgcugcg

SEQ ID NO: 138813 - RNA, 19 nt, Artificial Sequence
  Description of Artificial Sequence: Synthetic oligonucleotide
ugguguaacuguccauucg

SEQ ID NO: 138814 - RNA, 19 nt, Artificial Sequence
  Description of Artificial Sequence: Synthetic oligonucleotide
acuuuagaccccuugucug

SEQ ID NO: 138815 - RNA, 19 nt, Artificial Sequence
  Description of Artificial Sequence: Synthetic oligonucleotide
cacggaaugaauccagggg

SEQ ID NO: 138816 - RNA, 19 nt, Artificial Sequence
  Description of Artificial Sequence: Synthetic oligonucleotide
cuagaguauuaguaaucgg

SEQ ID NO: 138817 - RNA, 19 nt, Artificial Sequence
  Description of Artificial Sequence: Synthetic oligonucleotide
agcacuaauaaccccagaa

SEQ ID NO: 138818 - RNA, 19 nt, Artificial Sequence
  Description of Artificial Sequence: Synthetic oligonucleotide
auuaggaacuggaucugcc

SEQ ID NO: 138819 - RNA, 19 nt, Artificial Sequence
  Description of Artificial Sequence: Synthetic oligonucleotide
ugccugauacaaaaguaga

SEQ ID NO: 138820 - RNA, 19 nt, Artificial Sequence
  Description of Artificial Sequence: Synthetic oligonucleotide
uuacggaggaugaaugcac

SEQ ID NO: 138821 - RNA, 19 nt, Artificial Sequence
  Description of Artificial Sequence: Synthetic oligonucleotide
  modified_base (5)..(5): a, c, u, g, unknown or other
uuuancagcucagaccacu

SEQ ID NO: 138822 - RNA, 19 nt, Artificial Sequence
  Description of Artificial Sequence: Synthetic oligonucleotide
uggagggcuaaaagcacgg

SEQ ID NO: 138823 - RNA, 19 nt, Artificial Sequence
  Description of Artificial Sequence: Synthetic oligonucleotide
uacggaggaugaaugcacg

SEQ ID NO: 138824 - RNA, 19 nt, Artificial Sequence
  Description of Artificial Sequence: Synthetic oligonucleotide
uuucuaugagagacuacga

SEQ ID NO: 138825 - RNA, 19 nt, Artificial Sequence
  Description of Artificial Sequence: Synthetic oligonucleotide
cacgcaagccauuaggaac

SEQ ID NO: 138826 - RNA, 19 nt, Artificial Sequence
  Description of Artificial Sequence: Synthetic oligonucleotide
cuguuguugcgccucaacg

SEQ ID NO: 138827 - RNA, 19 nt, Artificial Sequence
  Description of Artificial Sequence: Synthetic oligonucleotide
acugauaguggccacugga

SEQ ID NO: 138828 - RNA, 19 nt, Artificial Sequence
  Description of Artificial Sequence: Synthetic oligonucleotide
cuauacgcugcguaugggc

SEQ ID NO: 138829 - RNA, 19 nt, Artificial Sequence
  Description of Artificial Sequence: Synthetic oligonucleotide
uuagcacaaaagcaauuau

SEQ ID NO: 138830 - RNA, 19 nt, Artificial Sequence
  Description of Artificial Sequence: Synthetic oligonucleotide
uucauccugggacauacaa

SEQ ID NO: 138831 - RNA, 19 nt, Artificial Sequence
  Description of Artificial Sequence: Synthetic oligonucleotide
aaaagggaccuuaggauga

SEQ ID NO: 138832 - RNA, 19 nt, Artificial Sequence
  Description of Artificial Sequence: Synthetic oligonucleotide
ugacaguuugacugaacug

SEQ ID NO: 138833 - RNA, 19 nt, Artificial Sequence
  Description of Artificial Sequence: Synthetic oligonucleotide
ugaccauccauacuuuguc

SEQ ID NO: 138834 - RNA, 19 nt, Artificial Sequence
  Description of Artificial Sequence: Synthetic oligonucleotide
agaguauuaguaaucggug

SEQ ID NO: 138835 - RNA, 19 nt, Artificial Sequence
  Description of Artificial Sequence: Synthetic oligonucleotide
aaccaauggaaaccuggcu

SEQ ID NO: 138836 - RNA, 19 nt, Artificial Sequence
  Description of Artificial Sequence: Synthetic oligonucleotide
uggcccucuaagaaguucc

SEQ ID NO: 138837 - RNA, 19 nt, Artificial Sequence
  Description of Artificial Sequence: Synthetic oligonucleotide
aucuacauuaggccauguc

SEQ ID NO: 138838 - RNA, 19 nt, Artificial Sequence
  Description of Artificial Sequence: Synthetic oligonucleotide
ugauaguggccacuggagu

SEQ ID NO: 138839 - RNA, 19 nt, Artificial Sequence
  Description of Artificial Sequence: Synthetic oligonucleotide
ggaagcuucaguuacaugu

SEQ ID NO: 138840 - RNA, 19 nt, Artificial Sequence
  Description of Artificial Sequence: Synthetic oligonucleotide
aacagucgccagucgacag

SEQ ID NO: 138841 - RNA, 19 nt, Artificial Sequence
  Description of Artificial Sequence: Synthetic oligonucleotide
agggaccuuaggaugaacc

SEQ ID NO: 138842 - RNA, 19 nt, Artificial Sequence
  Description of Artificial Sequence: Synthetic oligonucleotide
guuguugcgccucaacggc

SEQ ID NO: 138843 - RNA, 19 nt, Artificial Sequence
  Description of Artificial Sequence: Synthetic oligonucleotide
acagucgccagucgacagc

SEQ ID NO: 138844 - RNA, 19 nt, Artificial Sequence
  Description of Artificial Sequence: Synthetic oligonucleotide
cugauaguggccacuggag

SEQ ID NO: 138845 - RNA, 19 nt, Artificial Sequence
  Description of Artificial Sequence: Synthetic oligonucleotide
uuauccuggucacaccacu

SEQ ID NO: 138846 - RNA, 19 nt, Artificial Sequence
  Description of Artificial Sequence: Synthetic oligonucleotide
uguucacccucuuuggcac

SEQ ID NO: 138847 - RNA, 19 nt, Artificial Sequence
  Description of Artificial Sequence: Synthetic oligonucleotide
ugaaugcacgaacaaggaa

SEQ ID NO: 138848 - RNA, 19 nt, Artificial Sequence
  Description of Artificial Sequence: Synthetic oligonucleotide
cagugugauacugauagug

SEQ ID NO: 138849 - RNA, 19 nt, Artificial Sequence
  Description of Artificial Sequence: Synthetic oligonucleotide
gaauacugccaugauagca

SEQ ID NO: 138850 - RNA, 19 nt, Artificial Sequence
  Description of Artificial Sequence: Synthetic oligonucleotide
cuguaccaaacgaauuugc

SEQ ID NO: 138851 - RNA, 19 nt, Artificial Sequence
  Description of Artificial Sequence: Synthetic oligonucleotide
cacuugacacccuuuugcc

SEQ ID NO: 138852 - RNA, 19 nt, Artificial Sequence
  Description of Artificial Sequence: Synthetic oligonucleotide
cuggagggcuaaaagcacg

SEQ ID NO: 138853 - RNA, 19 nt, Artificial Sequence
  Description of Artificial Sequence: Synthetic oligonucleotide
ggagcagaauuccauggcg

SEQ ID NO: 138854 - RNA, 19 nt, Artificial Sequence
  Description of Artificial Sequence: Synthetic oligonucleotide
cuggaucugccuuacggag

SEQ ID NO: 138855 - RNA, 19 nt, Artificial Sequence
  Description of Artificial Sequence: Synthetic oligonucleotide
cuaugcagaugccaacacc

SEQ ID NO: 138856 - RNA, 19 nt, Artificial Sequence
  Description of Artificial Sequence: Synthetic oligonucleotide
uucgaauccgcuucuuagu

SEQ ID NO: 138857 - RNA, 19 nt, Artificial Sequence
  Description of Artificial Sequence: Synthetic oligonucleotide
aguuugaaugacacuguuc

SEQ ID NO: 138858 - RNA, 19 nt, Artificial Sequence
  Description of Artificial Sequence: Synthetic oligonucleotide
caauggucccagaaauggg

SEQ ID NO: 138859 - RNA, 19 nt, Artificial Sequence
  Description of Artificial Sequence: Synthetic oligonucleotide
ucauccaccgaugcuagca

SEQ ID NO: 138860 - RNA, 19 nt, Artificial Sequence
  Description of Artificial Sequence: Synthetic oligonucleotide
uacacuucccucccauggc

SEQ ID NO: 138861 - RNA, 19 nt, Artificial Sequence
  Description of Artificial Sequence: Synthetic oligonucleotide
gaaccaauggaaaccuggc

SEQ ID NO: 138862 - RNA, 19 nt, Artificial Sequence
  Description of Artificial Sequence: Synthetic oligonucleotide
aaacuacggcacagaaacc

SEQ ID NO: 138863 - RNA, 19 nt, Artificial Sequence
  Description of Artificial Sequence: Synthetic oligonucleotide
ccuguuacccaucucagcc

SEQ ID NO: 138864 - RNA, 19 nt, Artificial Sequence
  Description of Artificial Sequence: Synthetic oligonucleotide
agcuguaccaaacgaauuu

SEQ ID NO: 138865 - RNA, 19 nt, Artificial Sequence
  Description of Artificial Sequence: Synthetic oligonucleotide
acuggaucugccuuacgga

SEQ ID NO: 138866 - RNA, 19 nt, Artificial Sequence
  Description of Artificial Sequence: Synthetic oligonucleotide
acacggaauucccauucuc

SEQ ID NO: 138867 - RNA, 19 nt, Artificial Sequence
  Description of Artificial Sequence: Synthetic oligonucleotide
uguugcuaucuuuguagac

SEQ ID NO: 138868 - RNA, 19 nt, Artificial Sequence
  Description of Artificial Sequence: Synthetic oligonucleotide
aauuucaaccccagcuuca

SEQ ID NO: 138869 - RNA, 19 nt, Artificial Sequence
  Description of Artificial Sequence: Synthetic oligonucleotide
auuucaaccccagcuucac

SEQ ID NO: 138870 - RNA, 19 nt, Artificial Sequence
  Description of Artificial Sequence: Synthetic oligonucleotide
  modified_base (3)..(3): a, c, u, g, unknown or other
uancagcucagaccacuug

SEQ ID NO: 138871 - RNA, 19 nt, Artificial Sequence
  Description of Artificial Sequence: Synthetic oligonucleotide
uacggcacagaaaccgagc

SEQ ID NO: 138872 - RNA, 19 nt, Artificial Sequence
  Description of Artificial Sequence: Synthetic oligonucleotide
uccaauuguacaggcauaa

SEQ ID NO: 138873 - RNA, 19 nt, Artificial Sequence
  Description of Artificial Sequence: Synthetic oligonucleotide
auggcggauuaaaagaaag

SEQ ID NO: 138874 - RNA, 19 nt, Artificial Sequence
  Description of Artificial Sequence: Synthetic oligonucleotide
acugcuauacgcugcguau

SEQ ID NO: 138875 - RNA, 19 nt, Artificial Sequence
  Description of Artificial Sequence: Synthetic oligonucleotide
ucggugccacuguagaugc

SEQ ID NO: 138876 - RNA, 19 nt, Artificial Sequence
  Description of Artificial Sequence: Synthetic oligonucleotide
acuagacuuuauuucucgu

SEQ ID NO: 138877 - RNA, 19 nt, Artificial Sequence
  Description of Artificial Sequence: Synthetic oligonucleotide
uauuaguaaucggugccac

SEQ ID NO: 138878 - RNA, 19 nt, Artificial Sequence
  Description of Artificial Sequence: Synthetic oligonucleotide
acgaauuugcuacaucauu

SEQ ID NO: 138879 - RNA, 19 nt, Artificial Sequence
  Description of Artificial Sequence: Synthetic oligonucleotide
uggcacggaaugaauccag

SEQ ID NO: 138880 - RNA, 19 nt, Artificial Sequence
  Description of Artificial Sequence: Synthetic oligonucleotide
ugacaaaccaggccauaaa

SEQ ID NO: 138881 - RNA, 19 nt, Artificial Sequence
  Description of Artificial Sequence: Synthetic oligonucleotide
ugccacgaccacaguaagg

SEQ ID NO: 138882 - RNA, 19 nt, Artificial Sequence
  Description of Artificial Sequence: Synthetic oligonucleotide
uuuaguguagugguucuuu

SEQ ID NO: 138883 - RNA, 19 nt, Artificial Sequence
  Description of Artificial Sequence: Synthetic oligonucleotide
cagaaaccgagcugggaag

SEQ ID NO: 138884 - RNA, 19 nt, Artificial Sequence
  Description of Artificial Sequence: Synthetic oligonucleotide
guguaaauuacacuucccu

SEQ ID NO: 138885 - RNA, 19 nt, Artificial Sequence
  Description of Artificial Sequence: Synthetic oligonucleotide
agcagaauuccauggcgga

SEQ ID NO: 138886 - RNA, 19 nt, Artificial Sequence
  Description of Artificial Sequence: Synthetic oligonucleotide
aaccuggcuauuuuacaua

SEQ ID NO: 138887 - RNA, 19 nt, Artificial Sequence
  Description of Artificial Sequence: Synthetic oligonucleotide
gagccauuacuuccuuucc

SEQ ID NO: 138888 - RNA, 19 nt, Artificial Sequence
  Description of Artificial Sequence: Synthetic oligonucleotide
agaauuacugcgcggcuuu

SEQ ID NO: 138889 - RNA, 19 nt, Artificial Sequence
  Description of Artificial Sequence: Synthetic oligonucleotide
uuuauucaguuaagaggua

SEQ ID NO: 138890 - RNA, 19 nt, Artificial Sequence
  Description of Artificial Sequence: Synthetic oligonucleotide
caaagauguguaaacggaa

SEQ ID NO: 138891 - RNA, 19 nt, Artificial Sequence
  Description of Artificial Sequence: Synthetic oligonucleotide
guuguauaaacaagauaca

SEQ ID NO: 138892 - RNA, 19 nt, Artificial Sequence
  Description of Artificial Sequence: Synthetic oligonucleotide
aaucggugccacuguagau

SEQ ID NO: 138893 - RNA, 19 nt, Artificial Sequence
  Description of Artificial Sequence: Synthetic oligonucleotide
aaaaccgguaaagcacgca

SEQ ID NO: 138894 - RNA, 19 nt, Artificial Sequence
  Description of Artificial Sequence: Synthetic oligonucleotide
  modified_base (4)..(4): a, c, u, g, unknown or other
uuancagcucagaccacuu

SEQ ID NO: 138895 - RNA, 19 nt, Artificial Sequence
  Description of Artificial Sequence: Synthetic oligonucleotide
uacugcuauacgcugcgua

SEQ ID NO: 138896 - RNA, 19 nt, Artificial Sequence
  Description of Artificial Sequence: Synthetic oligonucleotide
ugcgcggcuuucaaagaug

SEQ ID NO: 138897 - RNA, 19 nt, Artificial Sequence
  Description of Artificial Sequence: Synthetic oligonucleotide
ggaaguuugucaaagccca

SEQ ID NO: 138898 - RNA, 19 nt, Artificial Sequence
  Description of Artificial Sequence: Synthetic oligonucleotide
uuaguguagugguucuuua

SEQ ID NO: 138899 - RNA, 19 nt, Artificial Sequence
  Description of Artificial Sequence: Synthetic oligonucleotide
guaccaaacgaauuugcua

SEQ ID NO: 138900 - RNA, 19 nt, Artificial Sequence
  Description of Artificial Sequence: Synthetic oligonucleotide
uccccaaguuugaaugaca

SEQ ID NO: 138901 - RNA, 19 nt, Artificial Sequence
  Description of Artificial Sequence: Synthetic oligonucleotide
cgaauuugcuacaucauug

SEQ ID NO: 138902 - RNA, 19 nt, Artificial Sequence
  Description of Artificial Sequence: Synthetic oligonucleotide
aaacagucgccagucgaca

SEQ ID NO: 138903 - RNA, 19 nt, Artificial Sequence
  Description of Artificial Sequence: Synthetic oligonucleotide
aguaucuacauuaggccau

SEQ ID NO: 138904 - RNA, 19 nt, Artificial Sequence
  Description of Artificial Sequence: Synthetic oligonucleotide
  modified_base (6)..(6): a, c, u, g, unknown or other
uuuuancagcucagaccac

SEQ ID NO: 138905 - RNA, 19 nt, Artificial Sequence
  Description of Artificial Sequence: Synthetic oligonucleotide
ggcacaagcuaccucagac

SEQ ID NO: 138906 - RNA, 19 nt, Artificial Sequence
  Description of Artificial Sequence: Synthetic oligonucleotide
aauuacugcgcggcuuuca

SEQ ID NO: 138907 - RNA, 19 nt, Artificial Sequence
  Description of Artificial Sequence: Synthetic oligonucleotide
gcaaucucccacuuuggcc

SEQ ID NO: 138908 - RNA, 19 nt, Artificial Sequence
  Description of Artificial Sequence: Synthetic oligonucleotide
aggaugaaugcacgaacaa

SEQ ID NO: 138909 - RNA, 19 nt, Artificial Sequence
  Description of Artificial Sequence: Synthetic oligonucleotide
agagaauuacugcgcggcu

SEQ ID NO: 138910 - RNA, 19 nt, Artificial Sequence
  Description of Artificial Sequence: Synthetic oligonucleotide
ugcguaugggcgucuguug

SEQ ID NO: 138911 - RNA, 19 nt, Artificial Sequence
  Description of Artificial Sequence: Synthetic oligonucleotide
ugucuucggcaacacugug

SEQ ID NO: 138912 - RNA, 19 nt, Artificial Sequence
  Description of Artificial Sequence: Synthetic oligonucleotide
auacugauaguggccacug

SEQ ID NO: 138913 - RNA, 19 nt, Artificial Sequence
  Description of Artificial Sequence: Synthetic oligonucleotide
ugcgaaacagucgccaguc

SEQ ID NO: 138914 - RNA, 19 nt, Artificial Sequence
  Description of Artificial Sequence: Synthetic oligonucleotide
ggcggauuaaaagaaagga

SEQ ID NO: 138915 - RNA, 19 nt, Artificial Sequence
  Description of Artificial Sequence: Synthetic oligonucleotide
gaaugaauccaggggcaug

SEQ ID NO: 138916 - RNA, 19 nt, Artificial Sequence
  Description of Artificial Sequence: Synthetic oligonucleotide
accauugaugguaccaucu

SEQ ID NO: 138917 - RNA, 19 nt, Artificial Sequence
  Description of Artificial Sequence: Synthetic oligonucleotide
gugauacugauaguggcca

SEQ ID NO: 138918 - RNA, 19 nt, Artificial Sequence
  Description of Artificial Sequence: Synthetic oligonucleotide
uauccuggucacaccacuc

SEQ ID NO: 138919 - RNA, 19 nt, Artificial Sequence
  Description of Artificial Sequence: Synthetic oligonucleotide
cacggaauucccauucuca

SEQ ID NO: 138920 - RNA, 19 nt, Artificial Sequence
  Description of Artificial Sequence: Synthetic oligonucleotide
gcuaaaagcacggagcaga

SEQ ID NO: 138921 - RNA, 19 nt, Artificial Sequence
  Description of Artificial Sequence: Synthetic oligonucleotide
cucccaaacuuuagacccc

SEQ ID NO: 138922 - RNA, 19 nt, Artificial Sequence
  Description of Artificial Sequence: Synthetic oligonucleotide
ccacuugacacccuuuugc

SEQ ID NO: 138923 - RNA, 19 nt, Artificial Sequence
  Description of Artificial Sequence: Synthetic oligonucleotide
guauuaguaaucggugcca

SEQ ID NO: 138924 - RNA, 19 nt, Artificial Sequence
  Description of Artificial Sequence: Synthetic oligonucleotide
gaaaggacgcaaguucauc

SEQ ID NO: 138925 - RNA, 19 nt, Artificial Sequence
  Description of Artificial Sequence: Synthetic oligonucleotide
augccacauauugccaugg

SEQ ID NO: 138926 - RNA, 19 nt, Artificial Sequence
  Description of Artificial Sequence: Synthetic oligonucleotide
ugauacugauaguggccac

SEQ ID NO: 138927 - RNA, 19 nt, Artificial Sequence
  Description of Artificial Sequence: Synthetic oligonucleotide
cuuacggaggaugaaugca

SEQ ID NO: 138928 - RNA, 19 nt, Artificial Sequence
  Description of Artificial Sequence: Synthetic oligonucleotide
gcacggaaugaauccaggg

SEQ ID NO: 138929 - RNA, 19 nt, Artificial Sequence
  Description of Artificial Sequence: Synthetic oligonucleotide
cuguucacccucuuuggca

SEQ ID NO: 138930 - RNA, 19 nt, Artificial Sequence
  Description of Artificial Sequence: Synthetic oligonucleotide
guuaagagguagacagaug

SEQ ID NO: 138931 - RNA, 19 nt, Artificial Sequence
  Description of Artificial Sequence: Synthetic oligonucleotide
guaccaucuaugcuggucu

SEQ ID NO: 138932 - RNA, 19 nt, Artificial Sequence
  Description of Artificial Sequence: Synthetic oligonucleotide
augagagacuacgagggaa

SEQ ID NO: 138933 - RNA, 19 nt, Artificial Sequence
  Description of Artificial Sequence: Synthetic oligonucleotide
uuggcacggaaugaaucca

SEQ ID NO: 138934 - RNA, 19 nt, Artificial Sequence
  Description of Artificial Sequence: Synthetic oligonucleotide
ccuuaggaugaaccaaugg

SEQ ID NO: 138935 - RNA, 19 nt, Artificial Sequence
  Description of Artificial Sequence: Synthetic oligonucleotide
agugguucuuuaauuaaua

SEQ ID NO: 138936 - RNA, 19 nt, Artificial Sequence
  Description of Artificial Sequence: Synthetic oligonucleotide
gaaguuugucaaagcccag

SEQ ID NO: 138937 - RNA, 19 nt, Artificial Sequence
  Description of Artificial Sequence: Synthetic oligonucleotide
uuuccauuaaggggcuuuc

SEQ ID NO: 138938 - RNA, 19 nt, Artificial Sequence
  Description of Artificial Sequence: Synthetic oligonucleotide
acgcaagccauuaggaacu

SEQ ID NO: 138939 - RNA, 19 nt, Artificial Sequence
  Description of Artificial Sequence: Synthetic oligonucleotide
gcucagaccacuugacacc

SEQ ID NO: 138940 - RNA, 19 nt, Artificial Sequence
  Description of Artificial Sequence: Synthetic oligonucleotide
agguaucaaaaugcuauaa

SEQ ID NO: 138941 - RNA, 19 nt, Artificial Sequence
  Description of Artificial Sequence: Synthetic oligonucleotide
agugccgugacuauuucua

SEQ ID NO: 138942 - RNA, 19 nt, Artificial Sequence
  Description of Artificial Sequence: Synthetic oligonucleotide
caaacuuuagaccccuugu

SEQ ID NO: 138943 - RNA, 19 nt, Artificial Sequence
  Description of Artificial Sequence: Synthetic oligonucleotide
cuauuucuaugagagacua

SEQ ID NO: 138944 - RNA, 19 nt, Artificial Sequence
  Description of Artificial Sequence: Synthetic oligonucleotide
uucggagggacuagacuuu

SEQ ID NO: 138945 - RNA, 19 nt, Artificial Sequence
  Description of Artificial Sequence: Synthetic oligonucleotide
gaacuggaucugccuuacg

SEQ ID NO: 138946 - RNA, 19 nt, Artificial Sequence
  Description of Artificial Sequence: Synthetic oligonucleotide
auacgcugcguaugggcgu

SEQ ID NO: 138947 - RNA, 19 nt, Artificial Sequence
  Description of Artificial Sequence: Synthetic oligonucleotide
gcggauuaaaagaaaggac

SEQ ID NO: 138948 - RNA, 19 nt, Artificial Sequence
  Description of Artificial Sequence: Synthetic oligonucleotide
gccgugacuauuucuauga

SEQ ID NO: 138949 - RNA, 19 nt, Artificial Sequence
  Description of Artificial Sequence: Synthetic oligonucleotide
uuagaccccuugucugucu

SEQ ID NO: 138950 - RNA, 19 nt, Artificial Sequence
  Description of Artificial Sequence: Synthetic oligonucleotide
guaucuacauuaggccaug

SEQ ID NO: 138951 - RNA, 19 nt, Artificial Sequence
  Description of Artificial Sequence: Synthetic oligonucleotide
agacuacgagggaagcuuc

SEQ ID NO: 138952 - RNA, 19 nt, Artificial Sequence
  Description of Artificial Sequence: Synthetic oligonucleotide
agaaaccgagcugggaagu

SEQ ID NO: 138953 - RNA, 19 nt, Artificial Sequence
  Description of Artificial Sequence: Synthetic oligonucleotide
uuuagaccccuugucuguc

SEQ ID NO: 138954 - RNA, 19 nt, Artificial Sequence
  Description of Artificial Sequence: Synthetic oligonucleotide
acggaggaugaaugcacga

SEQ ID NO: 138955 - RNA, 19 nt, Artificial Sequence
  Description of Artificial Sequence: Synthetic oligonucleotide
ugguugcaccgacaauaca

SEQ ID NO: 138956 - RNA, 19 nt, Artificial Sequence
  Description of Artificial Sequence: Synthetic oligonucleotide
agcacgcaagccauuagga

SEQ ID NO: 138957 - RNA, 19 nt, Artificial Sequence
  Description of Artificial Sequence: Synthetic oligonucleotide
ugguugcugacaguuugac

SEQ ID NO: 138958 - RNA, 19 nt, Artificial Sequence
  Description of Artificial Sequence: Synthetic oligonucleotide
ccuuacggaggaugaaugc

SEQ ID NO: 138959 - RNA, 19 nt, Artificial Sequence
  Description of Artificial Sequence: Synthetic oligonucleotide
uguugcgccucaacggcuu

SEQ ID NO: 138960 - RNA, 19 nt, Artificial Sequence
  Description of Artificial Sequence: Synthetic oligonucleotide
aagccauauugguguugcu

SEQ ID NO: 138961 - RNA, 19 nt, Artificial Sequence
  Description of Artificial Sequence: Synthetic oligonucleotide
acaucccaccgagaugagg

SEQ ID NO: 138962 - RNA, 19 nt, Artificial Sequence
  Description of Artificial Sequence: Synthetic oligonucleotide
ccaaacuuuagaccccuug

SEQ ID NO: 138963 - RNA, 19 nt, Artificial Sequence
  Description of Artificial Sequence: Synthetic oligonucleotide
aaaccgagcugggaaguua

SEQ ID NO: 138964 - RNA, 19 nt, Artificial Sequence
  Description of Artificial Sequence: Synthetic oligonucleotide
uaugggcgucuguugucug

SEQ ID NO: 138965 - RNA, 19 nt, Artificial Sequence
  Description of Artificial Sequence: Synthetic oligonucleotide
cagucgccagucgacagcc

SEQ ID NO: 138966 - RNA, 19 nt, Artificial Sequence
  Description of Artificial Sequence: Synthetic oligonucleotide
uggaucggagccagccaac

SEQ ID NO: 138967 - RNA, 19 nt, Artificial Sequence
  Description of Artificial Sequence: Synthetic oligonucleotide
gggaccuuaggaugaacca

SEQ ID NO: 138968 - RNA, 19 nt, Artificial Sequence
  Description of Artificial Sequence: Synthetic oligonucleotide
gguaucaaaaugcuauaau

SEQ ID NO: 138969 - RNA, 19 nt, Artificial Sequence
  Description of Artificial Sequence: Synthetic oligonucleotide
gauacugauaguggccacu

SEQ ID NO: 138970 - RNA, 19 nt, Artificial Sequence
  Description of Artificial Sequence: Synthetic oligonucleotide
ggagaaaccaaugguugca

SEQ ID NO: 138971 - RNA, 19 nt, Artificial Sequence
  Description of Artificial Sequence: Synthetic oligonucleotide
agccauauugguguugcua

SEQ ID NO: 138972 - RNA, 19 nt, Artificial Sequence
  Description of Artificial Sequence: Synthetic oligonucleotide
uuacugcgcggcuuucaaa

SEQ ID NO: 138973 - RNA, 19 nt, Artificial Sequence
  Description of Artificial Sequence: Synthetic oligonucleotide
ccccaaguuugaaugacac

SEQ ID NO: 138974 - RNA, 19 nt, Artificial Sequence
  Description of Artificial Sequence: Synthetic oligonucleotide
cauggcggauuaaaagaaa

SEQ ID NO: 138975 - RNA, 19 nt, Artificial Sequence
  Description of Artificial Sequence: Synthetic oligonucleotide
acugcgcggcuuucaaaga

SEQ ID NO: 138976 - RNA, 19 nt, Artificial Sequence
  Description of Artificial Sequence: Synthetic oligonucleotide
uaccaucuaugcuggucuc

SEQ ID NO: 138977 - RNA, 19 nt, Artificial Sequence
  Description of Artificial Sequence: Synthetic oligonucleotide
cugcuauacgcugcguaug

SEQ ID NO: 138978 - RNA, 19 nt, Artificial Sequence
  Description of Artificial Sequence: Synthetic oligonucleotide
gagacuacgagggaagcuu

SEQ ID NO: 138979 - RNA, 19 nt, Artificial Sequence
  Description of Artificial Sequence: Synthetic oligonucleotide
caccgacaauacaaugguc

SEQ ID NO: 138980 - RNA, 19 nt, Artificial Sequence
  Description of Artificial Sequence: Synthetic oligonucleotide
cuagacuuuauuucucguu

SEQ ID NO: 138981 - RNA, 19 nt, Artificial Sequence
  Description of Artificial Sequence: Synthetic oligonucleotide
uaaaagcacggagcagaau

SEQ ID NO: 138982 - RNA, 19 nt, Artificial Sequence
  Description of Artificial Sequence: Synthetic oligonucleotide
gguaccaucuaugcugguc

SEQ ID NO: 138983 - RNA, 19 nt, Artificial Sequence
  Description of Artificial Sequence: Synthetic oligonucleotide
uaucuacauuaggccaugu

SEQ ID NO: 138984 - RNA, 19 nt, Artificial Sequence
  Description of Artificial Sequence: Synthetic oligonucleotide
agaaaggacgcaaguucau

SEQ ID NO: 138985 - RNA, 19 nt, Artificial Sequence
  Description of Artificial Sequence: Synthetic oligonucleotide
ggcacggaaugaauccagg

SEQ ID NO: 138986 - RNA, 19 nt, Artificial Sequence
  Description of Artificial Sequence: Synthetic oligonucleotide
ugugacaaaccaggccaua

SEQ ID NO: 138987 - RNA, 19 nt, Artificial Sequence
  Description of Artificial Sequence: Synthetic oligonucleotide
gugacaaaccaggccauaa

SEQ ID NO: 138988 - RNA, 19 nt, Artificial Sequence
  Description of Artificial Sequence: Synthetic oligonucleotide
cacgaacaaggaagaauaa

SEQ ID NO: 138989 - RNA, 19 nt, Artificial Sequence
  Description of Artificial Sequence: Synthetic oligonucleotide
gacuacgagggaagcuuca

SEQ ID NO: 138990 - RNA, 19 nt, Artificial Sequence
  Description of Artificial Sequence: Synthetic oligonucleotide
gcaacggugcuccaguaua

SEQ ID NO: 138991 - RNA, 19 nt, Artificial Sequence
  Description of Artificial Sequence: Synthetic oligonucleotide
uacgcugcguaugggcguc

SEQ ID NO: 138992 - RNA, 19 nt, Artificial Sequence
  Description of Artificial Sequence: Synthetic oligonucleotide
gcuauacgcugcguauggg

SEQ ID NO: 138993 - RNA, 19 nt, Artificial Sequence
  Description of Artificial Sequence: Synthetic oligonucleotide
gaauuacugcgcggcuuuc

SEQ ID NO: 138994 - RNA, 19 nt, Artificial Sequence
  Description of Artificial Sequence: Synthetic oligonucleotide
gcggcuuucaaagaugugu

SEQ ID NO: 138995 - RNA, 19 nt, Artificial Sequence
  Description of Artificial Sequence: Synthetic oligonucleotide
gcgaaacagucgccagucg

SEQ ID NO: 138996 - RNA, 19 nt, Artificial Sequence
  Description of Artificial Sequence: Synthetic oligonucleotide
aucccaccgagaugaggau

SEQ ID NO: 138997 - RNA, 19 nt, Artificial Sequence
  Description of Artificial Sequence: Synthetic oligonucleotide
ggaacuggaucugccuuac

SEQ ID NO: 138998 - RNA, 19 nt, Artificial Sequence
  Description of Artificial Sequence: Synthetic oligonucleotide
ggacuagacuuuauuucuc

SEQ ID NO: 138999 - RNA, 19 nt, Artificial Sequence
  Description of Artificial Sequence: Synthetic oligonucleotide
gagugccgugacuauuucu

SEQ ID NO: 139000 - RNA, 19 nt, Artificial Sequence
  Description of Artificial Sequence: Synthetic oligonucleotide
ucggagggacuagacuuua

SEQ ID NO: 139001 - RNA, 19 nt, Artificial Sequence
  Description of Artificial Sequence: Synthetic oligonucleotide
ccauggcggauuaaaagaa

SEQ ID NO: 139002 - RNA, 19 nt, Artificial Sequence
  Description of Artificial Sequence: Synthetic oligonucleotide
ggaccuuaggaugaaccaa

SEQ ID NO: 139003 - RNA, 19 nt, Artificial Sequence
  Description of Artificial Sequence: Synthetic oligonucleotide
caugucagcgucuccguuu

SEQ ID NO: 139004 - RNA, 19 nt, Artificial Sequence
  Description of Artificial Sequence: Synthetic oligonucleotide
gagaauuacugcgcggcuu

SEQ ID NO: 139005 - RNA, 19 nt, Artificial Sequence
  Description of Artificial Sequence: Synthetic oligonucleotide
cuguuacccaucucagccu

SEQ ID NO: 139006 - RNA, 19 nt, Artificial Sequence
  Description of Artificial Sequence: Synthetic oligonucleotide
guaugggcgucuguugucu

SEQ ID NO: 139007 - RNA, 19 nt, Artificial Sequence
  Description of Artificial Sequence: Synthetic oligonucleotide
caguagcuagaguauuagu

SEQ ID NO: 139008 - RNA, 19 nt, Artificial Sequence
  Description of Artificial Sequence: Synthetic oligonucleotide
ugguaccaucuaugcuggu

SEQ ID NO: 139009 - RNA, 19 nt, Artificial Sequence
  Description of Artificial Sequence: Synthetic oligonucleotide
ggagaaugccaagacaaau

SEQ ID NO: 139010 - RNA, 19 nt, Artificial Sequence
  Description of Artificial Sequence: Synthetic oligonucleotide
ccaauguuugaugccacga

SEQ ID NO: 139011 - RNA, 19 nt, Artificial Sequence
  Description of Artificial Sequence: Synthetic oligonucleotide
ccgugacuauuucuaugag

SEQ ID NO: 139012 - RNA, 19 nt, Artificial Sequence
  Description of Artificial Sequence: Synthetic oligonucleotide
gcucccacggagaaugcca

SEQ ID NO: 139013 - RNA, 19 nt, Artificial Sequence
  Description of Artificial Sequence: Synthetic oligonucleotide
cuacgagggaagcuucagu

SEQ ID NO: 139014 - RNA, 19 nt, Artificial Sequence
  Description of Artificial Sequence: Synthetic oligonucleotide
ccauuaggaacuggaucug

SEQ ID NO: 139015 - RNA, 19 nt, Artificial Sequence
  Description of Artificial Sequence: Synthetic oligonucleotide
augcacgaacaaggaagaa

SEQ ID NO: 139016 - RNA, 19 nt, Artificial Sequence
  Description of Artificial Sequence: Synthetic oligonucleotide
gguugcugacaguuugacu

SEQ ID NO: 139017 - RNA, 19 nt, Artificial Sequence
  Description of Artificial Sequence: Synthetic oligonucleotide
gggugugauuggugucaag

SEQ ID NO: 139018 - RNA, 19 nt, Artificial Sequence
  Description of Artificial Sequence: Synthetic oligonucleotide
caggaugaccauccauacu

SEQ ID NO: 139019 - RNA, 19 nt, Artificial Sequence
  Description of Artificial Sequence: Synthetic oligonucleotide
aaccgccaggaggcuuugu

SEQ ID NO: 139020 - RNA, 19 nt, Artificial Sequence
  Description of Artificial Sequence: Synthetic oligonucleotide
gcguaugggcgucuguugu

SEQ ID NO: 139021 - RNA, 19 nt, Artificial Sequence
  Description of Artificial Sequence: Synthetic oligonucleotide
accgagcugggaaguuacu

SEQ ID NO: 139022 - RNA, 19 nt, Artificial Sequence
  Description of Artificial Sequence: Synthetic oligonucleotide
cguaugggcgucuguuguc

SEQ ID NO: 139023 - RNA, 19 nt, Artificial Sequence
  Description of Artificial Sequence: Synthetic oligonucleotide
cugcgcggcuuucaaagau

SEQ ID NO: 139024 - RNA, 19 nt, Artificial Sequence
  Description of Artificial Sequence: Synthetic oligonucleotide
ggcgucuguugucuggggu

SEQ ID NO: 139025 - RNA, 19 nt, Artificial Sequence
  Description of Artificial Sequence: Synthetic oligonucleotide
ggagggcuaaaagcacgga

SEQ ID NO: 139026 - RNA, 19 nt, Artificial Sequence
  Description of Artificial Sequence: Synthetic oligonucleotide
ccauuacuuccuuuccugu

SEQ ID NO: 139027 - RNA, 19 nt, Artificial Sequence
  Description of Artificial Sequence: Synthetic oligonucleotide
caaugguugcaccgacaau

SEQ ID NO: 139028 - RNA, 19 nt, Artificial Sequence
  Description of Artificial Sequence: Synthetic oligonucleotide
cagcaacggugcuccagua

SEQ ID NO: 139029 - RNA, 19 nt, Artificial Sequence
  Description of Artificial Sequence: Synthetic oligonucleotide
cugcguaugggcgucuguu

SEQ ID NO: 139030 - RNA, 19 nt, Artificial Sequence
  Description of Artificial Sequence: Synthetic oligonucleotide
ccucaacggcuuaucccca

SEQ ID NO: 139031 - RNA, 19 nt, Artificial Sequence
  Description of Artificial Sequence: Synthetic oligonucleotide
cggagaaugccaagacaaa

SEQ ID NO: 139032 - RNA, 19 nt, Artificial Sequence
  Description of Artificial Sequence: Synthetic oligonucleotide
gcagaauuccauggcggau

SEQ ID NO: 139033 - RNA, 19 nt, Artificial Sequence
  Description of Artificial Sequence: Synthetic oligonucleotide
gcgcggcuuucaaagaugu

SEQ ID NO: 139034 - RNA, 19 nt, Artificial Sequence
  Description of Artificial Sequence: Synthetic oligonucleotide
cgcggcuuucaaagaugug

SEQ ID NO: 139035 - RNA, 19 nt, Artificial Sequence
  Description of Artificial Sequence: Synthetic oligonucleotide
cggaggaugaaugcacgaa

SEQ ID NO: 139036 - RNA, 19 nt, Artificial Sequence
  Description of Artificial Sequence: Synthetic oligonucleotide
acgcugcguaugggcgucu

SEQ ID NO: 139037 - RNA, 19 nt, Artificial Sequence
  Description of Artificial Sequence: Synthetic oligonucleotide
gcugcguaugggcgucugu

SEQ ID NO: 139038 - RNA, 19 nt, Artificial Sequence
  Description of Artificial Sequence: Synthetic oligonucleotide
cauccccaagagacaucuu

SEQ ID NO: 139039 - RNA, 19 nt, Artificial Sequence
  Description of Artificial Sequence: Synthetic oligonucleotide
ccccacagaggaaguuugu

SEQ ID NO: 139040 - RNA, 19 nt, Artificial Sequence
  Description of Artificial Sequence: Synthetic oligonucleotide
cgcugcguaugggcgucug

SEQ ID NO: 139041 - RNA, 19 nt, Artificial Sequence
  Description of Artificial Sequence: Synthetic oligonucleotide
aacgcauugauucauuuac

SEQ ID NO: 139042 - RNA, 19 nt, Artificial Sequence
  Description of Artificial Sequence: Synthetic oligonucleotide
aaaggauucgagcacagac

SEQ ID NO: 139043 - RNA, 19 nt, Artificial Sequence
  Description of Artificial Sequence: Synthetic oligonucleotide
aauaucuaaaaccacauua

SEQ ID NO: 139044 - RNA, 19 nt, Artificial Sequence
  Description of Artificial Sequence: Synthetic oligonucleotide
aaaaucuuaacuuggggca

SEQ ID NO: 139045 - RNA, 19 nt, Artificial Sequence
  Description of Artificial Sequence: Synthetic oligonucleotide
aguacaacaacagagauug

SEQ ID NO: 139046 - RNA, 19 nt, Artificial Sequence
  Description of Artificial Sequence: Synthetic oligonucleotide
aacuagaagacacgugucc

SEQ ID NO: 139047 - RNA, 19 nt, Artificial Sequence
  Description of Artificial Sequence: Synthetic oligonucleotide
acuuauuucaauaagccac

SEQ ID NO: 139048 - RNA, 19 nt, Artificial Sequence
  Description of Artificial Sequence: Synthetic oligonucleotide
aaacguauuacccauuucu

SEQ ID NO: 139049 - RNA, 19 nt, Artificial Sequence
  Description of Artificial Sequence: Synthetic oligonucleotide
uuaaacuaaacuauuugcu

SEQ ID NO: 139050 - RNA, 19 nt, Artificial Sequence
  Description of Artificial Sequence: Synthetic oligonucleotide
ucuaucuuaaacuaaacua

SEQ ID NO: 139051 - RNA, 19 nt, Artificial Sequence
  Description of Artificial Sequence: Synthetic oligonucleotide
aauaagcucuuaucaauuc

SEQ ID NO: 139052 - RNA, 19 nt, Artificial Sequence
  Description of Artificial Sequence: Synthetic oligonucleotide
uucuaagugaagaaaggag

SEQ ID NO: 139053 - RNA, 19 nt, Artificial Sequence
  Description of Artificial Sequence: Synthetic oligonucleotide
uacaauuguguuuagaguc

SEQ ID NO: 139054 - RNA, 19 nt, Artificial Sequence
  Description of Artificial Sequence: Synthetic oligonucleotide
aaucaaaacguauuaccca

SEQ ID NO: 139055 - RNA, 19 nt, Artificial Sequence
  Description of Artificial Sequence: Synthetic oligonucleotide
acaguuuacuggcagaggg

SEQ ID NO: 139056 - RNA, 19 nt, Artificial Sequence
  Description of Artificial Sequence: Synthetic oligonucleotide
agaacuagaagacacgugu

SEQ ID NO: 139057 - RNA, 19 nt, Artificial Sequence
  Description of Artificial Sequence: Synthetic oligonucleotide
uuuaguuggccucucacug

SEQ ID NO: 139058 - RNA, 19 nt, Artificial Sequence
  Description of Artificial Sequence: Synthetic oligonucleotide
aauuuagucagaauugucu

SEQ ID NO: 139059 - RNA, 19 nt, Artificial Sequence
  Description of Artificial Sequence: Synthetic oligonucleotide
aaacgaauagcccuucucu

SEQ ID NO: 139060 - RNA, 19 nt, Artificial Sequence
  Description of Artificial Sequence: Synthetic oligonucleotide
aaagaucagacggacuggc

SEQ ID NO: 139061 - RNA, 19 nt, Artificial Sequence
  Description of Artificial Sequence: Synthetic oligonucleotide
ucuuaggcuaaguggaccg

SEQ ID NO: 139062 - RNA, 19 nt, Artificial Sequence
  Description of Artificial Sequence: Synthetic oligonucleotide
uguuuagagucccagcuca

SEQ ID NO: 139063 - RNA, 19 nt, Artificial Sequence
  Description of Artificial Sequence: Synthetic oligonucleotide
aagcaauauggaucauugc

SEQ ID NO: 139064 - RNA, 19 nt, Artificial Sequence
  Description of Artificial Sequence: Synthetic oligonucleotide
auguuugaguuucauaaag

SEQ ID NO: 139065 - RNA, 19 nt, Artificial Sequence
  Description of Artificial Sequence: Synthetic oligonucleotide
ugaaaaucugacaaacgaa

SEQ ID NO: 139066 - RNA, 19 nt, Artificial Sequence
  Description of Artificial Sequence: Synthetic oligonucleotide
aaaacguauuacccauuuc

SEQ ID NO: 139067 - RNA, 19 nt, Artificial Sequence
  Description of Artificial Sequence: Synthetic oligonucleotide
aaucucaagaaacuaugaa

SEQ ID NO: 139068 - RNA, 19 nt, Artificial Sequence
  Description of Artificial Sequence: Synthetic oligonucleotide
  modified_base (15)..(15): a, c, u, g, unknown or other
ucugcuaucggguuncucu

SEQ ID NO: 139069 - RNA, 19 nt, Artificial Sequence
  Description of Artificial Sequence: Synthetic oligonucleotide
ucuaagaaucaaaacguau

SEQ ID NO: 139070 - RNA, 19 nt, Artificial Sequence
  Description of Artificial Sequence: Synthetic oligonucleotide
aaauccacccauccaagca

SEQ ID NO: 139071 - RNA, 19 nt, Artificial Sequence
  Description of Artificial Sequence: Synthetic oligonucleotide
ucuccuauuauaucaaaau

SEQ ID NO: 139072 - RNA, 19 nt, Artificial Sequence
  Description of Artificial Sequence: Synthetic oligonucleotide
agacuguauccacauagac

SEQ ID NO: 139073 - RNA, 19 nt, Artificial Sequence
  Description of Artificial Sequence: Synthetic oligonucleotide
aacgaauagcccuucucug

SEQ ID NO: 139074 - RNA, 19 nt, Artificial Sequence
  Description of Artificial Sequence: Synthetic oligonucleotide
ugaguuacaauuguguuua

SEQ ID NO: 139075 - RNA, 19 nt, Artificial Sequence
  Description of Artificial Sequence: Synthetic oligonucleotide
uuuagucauaucaggagau

SEQ ID NO: 139076 - RNA, 19 nt, Artificial Sequence
  Description of Artificial Sequence: Synthetic oligonucleotide
uuacaauuguguuuagagu

SEQ ID NO: 139077 - RNA, 19 nt, Artificial Sequence
  Description of Artificial Sequence: Synthetic oligonucleotide
aaggauucgagcacagacg

SEQ ID NO: 139078 - RNA, 19 nt, Artificial Sequence
  Description of Artificial Sequence: Synthetic oligonucleotide
uuuacguguggcccaauug

SEQ ID NO: 139079 - RNA, 19 nt, Artificial Sequence
  Description of Artificial Sequence: Synthetic oligonucleotide
uucgauuguaguaccauuc

SEQ ID NO: 139080 - RNA, 19 nt, Artificial Sequence
  Description of Artificial Sequence: Synthetic oligonucleotide
uguaguaagacagucugaa

SEQ ID NO: 139081 - RNA, 19 nt, Artificial Sequence
  Description of Artificial Sequence: Synthetic oligonucleotide
aacguauuacccauuucuc

SEQ ID NO: 139082 - RNA, 19 nt, Artificial Sequence
  Description of Artificial Sequence: Synthetic oligonucleotide
uggugaguuacaauugugu

SEQ ID NO: 139083 - RNA, 19 nt, Artificial Sequence
  Description of Artificial Sequence: Synthetic oligonucleotide
uguaugcugcaaaacagaa

SEQ ID NO: 139084 - RNA, 19 nt, Artificial Sequence
  Description of Artificial Sequence: Synthetic oligonucleotide
acgaauagcccuucucugg

SEQ ID NO: 139085 - RNA, 19 nt, Artificial Sequence
  Description of Artificial Sequence: Synthetic oligonucleotide
auuugucgaccucccaacc

SEQ ID NO: 139086 - RNA, 19 nt, Artificial Sequence
  Description of Artificial Sequence: Synthetic oligonucleotide
aagacuacagcuagaguug

SEQ ID NO: 139087 - RNA, 19 nt, Artificial Sequence
  Description of Artificial Sequence: Synthetic oligonucleotide
  modified_base (10)..(10): a, c, u, g, unknown or other
uaucggguuncucuguuau

SEQ ID NO: 139088 - RNA, 19 nt, Artificial Sequence
  Description of Artificial Sequence: Synthetic oligonucleotide
auacacuuggcuccacugg

SEQ ID NO: 139089 - RNA, 19 nt, Artificial Sequence
  Description of Artificial Sequence: Synthetic oligonucleotide
aucaaaacguauuacccau

SEQ ID NO: 139090 - RNA, 19 nt, Artificial Sequence
  Description of Artificial Sequence: Synthetic oligonucleotide
uuagcccagaagcaauucc

SEQ ID NO: 139091 - RNA, 19 nt, Artificial Sequence
  Description of Artificial Sequence: Synthetic oligonucleotide
gaacuguugggguuguuug

SEQ ID NO: 139092 - RNA, 19 nt, Artificial Sequence
  Description of Artificial Sequence: Synthetic oligonucleotide
aauagugucuaagaaucaa

SEQ ID NO: 139093 - RNA, 19 nt, Artificial Sequence
  Description of Artificial Sequence: Synthetic oligonucleotide
auagucuagucuuuauuga

SEQ ID NO: 139094 - RNA, 19 nt, Artificial Sequence
  Description of Artificial Sequence: Synthetic oligonucleotide
ugauuugucgaccucccaa

SEQ ID NO: 139095 - RNA, 19 nt, Artificial Sequence
  Description of Artificial Sequence: Synthetic oligonucleotide
caacaacagagauugcuag

SEQ ID NO: 139096 - RNA, 19 nt, Artificial Sequence
  Description of Artificial Sequence: Synthetic oligonucleotide
auaagcucuuaucaauuca

SEQ ID NO: 139097 - RNA, 19 nt, Artificial Sequence
  Description of Artificial Sequence: Synthetic oligonucleotide
guugaaaaucugacaaacg

SEQ ID NO: 139098 - RNA, 19 nt, Artificial Sequence
  Description of Artificial Sequence: Synthetic oligonucleotide
ucgauuguaguaccauuca

SEQ ID NO: 139099 - RNA, 19 nt, Artificial Sequence
  Description of Artificial Sequence: Synthetic oligonucleotide
caaacuccaaucuguguag

SEQ ID NO: 139100 - RNA, 19 nt, Artificial Sequence
  Description of Artificial Sequence: Synthetic oligonucleotide
uaaagaucagacggacugg

SEQ ID NO: 139101 - RNA, 19 nt, Artificial Sequence
  Description of Artificial Sequence: Synthetic oligonucleotide
uggacucaaauccccaaca

SEQ ID NO: 139102 - RNA, 19 nt, Artificial Sequence
  Description of Artificial Sequence: Synthetic oligonucleotide
gauuugucgaccucccaac

SEQ ID NO: 139103 - RNA, 19 nt, Artificial Sequence
  Description of Artificial Sequence: Synthetic oligonucleotide
uguccuucgauuguaguac

SEQ ID NO: 139104 - RNA, 19 nt, Artificial Sequence
  Description of Artificial Sequence: Synthetic oligonucleotide
cuaagugaagaaaggagga

SEQ ID NO: 139105 - RNA, 19 nt, Artificial Sequence
  Description of Artificial Sequence: Synthetic oligonucleotide
ggaauagugucuaagaauc

SEQ ID NO: 139106 - RNA, 19 nt, Artificial Sequence
  Description of Artificial Sequence: Synthetic oligonucleotide
uaucuuuaacuacccgggc

SEQ ID NO: 139107 - RNA, 19 nt, Artificial Sequence
  Description of Artificial Sequence: Synthetic oligonucleotide
cuauggugaguuacaauug

SEQ ID NO: 139108 - RNA, 19 nt, Artificial Sequence
  Description of Artificial Sequence: Synthetic oligonucleotide
uugaucauuguacuuucua

SEQ ID NO: 139109 - RNA, 19 nt, Artificial Sequence
  Description of Artificial Sequence: Synthetic oligonucleotide
uuugucgaccucccaacca

SEQ ID NO: 139110 - RNA, 19 nt, Artificial Sequence
  Description of Artificial Sequence: Synthetic oligonucleotide
aaauaugaggcagacugua

SEQ ID NO: 139111 - RNA, 19 nt, Artificial Sequence
  Description of Artificial Sequence: Synthetic oligonucleotide
aggcuaaguggaccgagac

SEQ ID NO: 139112 - RNA, 19 nt, Artificial Sequence
  Description of Artificial Sequence: Synthetic oligonucleotide
  modified_base (8)..(8): a, c, u, g, unknown or other
ucggguuncucuguuauca

SEQ ID NO: 139113 - RNA, 19 nt, Artificial Sequence
  Description of Artificial Sequence: Synthetic oligonucleotide
ugaaucuccgggcuccggc

SEQ ID NO: 139114 - RNA, 19 nt, Artificial Sequence
  Description of Artificial Sequence: Synthetic oligonucleotide
aggauucuaucuaugucac

SEQ ID NO: 139115 - RNA, 19 nt, Artificial Sequence
  Description of Artificial Sequence: Synthetic oligonucleotide
uucacuuuccgauguuuac

SEQ ID NO: 139116 - RNA, 19 nt, Artificial Sequence
  Description of Artificial Sequence: Synthetic oligonucleotide
aagguuaaugaaaaucuua

SEQ ID NO: 139117 - RNA, 19 nt, Artificial Sequence
  Description of Artificial Sequence: Synthetic oligonucleotide
aacuuggggcagaauauag

SEQ ID NO: 139118 - RNA, 19 nt, Artificial Sequence
  Description of Artificial Sequence: Synthetic oligonucleotide
uggcuauauuucuaaguga

SEQ ID NO: 139119 - RNA, 19 nt, Artificial Sequence
  Description of Artificial Sequence: Synthetic oligonucleotide
gagaagguacugaaccccg

SEQ ID NO: 139120 - RNA, 19 nt, Artificial Sequence
  Description of Artificial Sequence: Synthetic oligonucleotide
uguuuugguacaugucccu

SEQ ID NO: 139121 - RNA, 19 nt, Artificial Sequence
  Description of Artificial Sequence: Synthetic oligonucleotide
uugucgaccucccaaccac

SEQ ID NO: 139122 - RNA, 19 nt, Artificial Sequence
  Description of Artificial Sequence: Synthetic oligonucleotide
agcaauuccuccgcaguac

SEQ ID NO: 139123 - RNA, 19 nt, Artificial Sequence
  Description of Artificial Sequence: Synthetic oligonucleotide
caacagagauugcuagugg

SEQ ID NO: 139124 - RNA, 19 nt, Artificial Sequence
  Description of Artificial Sequence: Synthetic oligonucleotide
caguuuacuggcagagggg

SEQ ID NO: 139125 - RNA, 19 nt, Artificial Sequence
  Description of Artificial Sequence: Synthetic oligonucleotide
uuaggcuaaguggaccgag

SEQ ID NO: 139126 - RNA, 19 nt, Artificial Sequence
  Description of Artificial Sequence: Synthetic oligonucleotide
gauugcuagugguuuaaaa

SEQ ID NO: 139127 - RNA, 19 nt, Artificial Sequence
  Description of Artificial Sequence: Synthetic oligonucleotide
ugacaaacgaauagcccuu

SEQ ID NO: 139128 - RNA, 19 nt, Artificial Sequence
  Description of Artificial Sequence: Synthetic oligonucleotide
aacgcaaacugaaauuuua

SEQ ID NO: 139129 - RNA, 19 nt, Artificial Sequence
  Description of Artificial Sequence: Synthetic oligonucleotide
  modified_base (14)..(14): a, c, u, g, unknown or other
cugcuaucggguuncucug

SEQ ID NO: 139130 - RNA, 19 nt, Artificial Sequence
  Description of Artificial Sequence: Synthetic oligonucleotide
cuuuggacuuuccgguugc

SEQ ID NO: 139131 - RNA, 19 nt, Artificial Sequence
  Description of Artificial Sequence: Synthetic oligonucleotide
caaacgaauagcccuucuc

SEQ ID NO: 139132 - RNA, 19 nt, Artificial Sequence
  Description of Artificial Sequence: Synthetic oligonucleotide
auucgagcacagacgaugg

SEQ ID NO: 139133 - RNA, 19 nt, Artificial Sequence
  Description of Artificial Sequence: Synthetic oligonucleotide
agucauaucaggagauucu

SEQ ID NO: 139134 - RNA, 19 nt, Artificial Sequence
  Description of Artificial Sequence: Synthetic oligonucleotide
auacaccauagggaggcac

SEQ ID NO: 139135 - RNA, 19 nt, Artificial Sequence
  Description of Artificial Sequence: Synthetic oligonucleotide
  modified_base (9)..(9): a, c, u, g, unknown or other
aucggguuncucuguuauc

SEQ ID NO: 139136 - RNA, 19 nt, Artificial Sequence
  Description of Artificial Sequence: Synthetic oligonucleotide
aaucuuaacuuggggcaga

SEQ ID NO: 139137 - RNA, 19 nt, Artificial Sequence
  Description of Artificial Sequence: Synthetic oligonucleotide
cacguguccuucaccaagc

SEQ ID NO: 139138 - RNA, 19 nt, Artificial Sequence
  Description of Artificial Sequence: Synthetic oligonucleotide
aaaaggauucgagcacaga

SEQ ID NO: 139139 - RNA, 19 nt, Artificial Sequence
  Description of Artificial Sequence: Synthetic oligonucleotide
agacuacagcuagaguugg

SEQ ID NO: 139140 - RNA, 19 nt, Artificial Sequence
  Description of Artificial Sequence: Synthetic oligonucleotide
uuuacagcuuuggcuuuag

SEQ ID NO: 139141 - RNA, 19 nt, Artificial Sequence
  Description of Artificial Sequence: Synthetic oligonucleotide
ugugcauacacaggccaac

SEQ ID NO: 139142 - RNA, 19 nt, Artificial Sequence
  Description of Artificial Sequence: Synthetic oligonucleotide
aaucuccgggcuccggcug

SEQ ID NO: 139143 - RNA, 19 nt, Artificial Sequence
  Description of Artificial Sequence: Synthetic oligonucleotide
cacaugcucacuauggcaa

SEQ ID NO: 139144 - RNA, 19 nt, Artificial Sequence
  Description of Artificial Sequence: Synthetic oligonucleotide
uuccgauguuuacuuuuca

SEQ ID NO: 139145 - RNA, 19 nt, Artificial Sequence
  Description of Artificial Sequence: Synthetic oligonucleotide
uaggcuaaguggaccgaga

SEQ ID NO: 139146 - RNA, 19 nt, Artificial Sequence
  Description of Artificial Sequence: Synthetic oligonucleotide
uuuagagucccagcucacu

SEQ ID NO: 139147 - RNA, 19 nt, Artificial Sequence
  Description of Artificial Sequence: Synthetic oligonucleotide
cauccgauauuuuaccaaa

SEQ ID NO: 139148 - RNA, 19 nt, Artificial Sequence
  Description of Artificial Sequence: Synthetic oligonucleotide
gguccgaucugacugaauc

SEQ ID NO: 139149 - RNA, 19 nt, Artificial Sequence
  Description of Artificial Sequence: Synthetic oligonucleotide
aggccguggaagcacaacu

SEQ ID NO: 139150 - RNA, 19 nt, Artificial Sequence
  Description of Artificial Sequence: Synthetic oligonucleotide
agaagguacugaaccccgc

SEQ ID NO: 139151 - RNA, 19 nt, Artificial Sequence
  Description of Artificial Sequence: Synthetic oligonucleotide
uguuagcccagaagcaauu

SEQ ID NO: 139152 - RNA, 19 nt, Artificial Sequence
  Description of Artificial Sequence: Synthetic oligonucleotide
ugccggcagacauaaagau

SEQ ID NO: 139153 - RNA, 19 nt, Artificial Sequence
  Description of Artificial Sequence: Synthetic oligonucleotide
ucaaaacguauuacccauu

SEQ ID NO: 139154 - RNA, 19 nt, Artificial Sequence
  Description of Artificial Sequence: Synthetic oligonucleotide
aaccccgcucuccggcucg

SEQ ID NO: 139155 - RNA, 19 nt, Artificial Sequence
  Description of Artificial Sequence: Synthetic oligonucleotide
ccgauguuuacuuuucaug

SEQ ID NO: 139156 - RNA, 19 nt, Artificial Sequence
  Description of Artificial Sequence: Synthetic oligonucleotide
ggagguauuacaggaggag

SEQ ID NO: 139157 - RNA, 19 nt, Artificial Sequence
  Description of Artificial Sequence: Synthetic oligonucleotide
gaauagugucuaagaauca

SEQ ID NO: 139158 - RNA, 19 nt, Artificial Sequence
  Description of Artificial Sequence: Synthetic oligonucleotide
ucuaugucacauucccauu

SEQ ID NO: 139159 - RNA, 19 nt, Artificial Sequence
  Description of Artificial Sequence: Synthetic oligonucleotide
uguugggaaacuugccauu

SEQ ID NO: 139160 - RNA, 19 nt, Artificial Sequence
  Description of Artificial Sequence: Synthetic oligonucleotide
gaacuagaagacacguguc

SEQ ID NO: 139161 - RNA, 19 nt, Artificial Sequence
  Description of Artificial Sequence: Synthetic oligonucleotide
gaggaaaugcuaguagaaa

SEQ ID NO: 139162 - RNA, 19 nt, Artificial Sequence
  Description of Artificial Sequence: Synthetic oligonucleotide
auauggaucauugcuugua

SEQ ID NO: 139163 - RNA, 19 nt, Artificial Sequence
  Description of Artificial Sequence: Synthetic oligonucleotide
acugaaccccgcucuccgg

SEQ ID NO: 139164 - RNA, 19 nt, Artificial Sequence
  Description of Artificial Sequence: Synthetic oligonucleotide
agcuagaguuggccauuac

SEQ ID NO: 139165 - RNA, 19 nt, Artificial Sequence
  Description of Artificial Sequence: Synthetic oligonucleotide
  modified_base (13)..(13): a, c, u, g, unknown or other
ugcuaucggguuncucugu

SEQ ID NO: 139166 - RNA, 19 nt, Artificial Sequence
  Description of Artificial Sequence: Synthetic oligonucleotide
auggaagugauuggaagua

SEQ ID NO: 139167 - RNA, 19 nt, Artificial Sequence
  Description of Artificial Sequence: Synthetic oligonucleotide
ugcaccuucccaacgcauu

SEQ ID NO: 139168 - RNA, 19 nt, Artificial Sequence
  Description of Artificial Sequence: Synthetic oligonucleotide
ucauugcuuguaugcugca

SEQ ID NO: 139169 - RNA, 19 nt, Artificial Sequence
  Description of Artificial Sequence: Synthetic oligonucleotide
augcuaguagaaaaggauu

SEQ ID NO: 139170 - RNA, 19 nt, Artificial Sequence
  Description of Artificial Sequence: Synthetic oligonucleotide
uguucaggcuugucaccca

SEQ ID NO: 139171 - RNA, 19 nt, Artificial Sequence
  Description of Artificial Sequence: Synthetic oligonucleotide
aguuggccauuacuuauuu

SEQ ID NO: 139172 - RNA, 19 nt, Artificial Sequence
  Description of Artificial Sequence: Synthetic oligonucleotide
uaacuuggggcagaauaua

SEQ ID NO: 139173 - RNA, 19 nt, Artificial Sequence
  Description of Artificial Sequence: Synthetic oligonucleotide
uuagucauaucaggagauu

SEQ ID NO: 139174 - RNA, 19 nt, Artificial Sequence
  Description of Artificial Sequence: Synthetic oligonucleotide
uguaacuagucuggauaau

SEQ ID NO: 139175 - RNA, 19 nt, Artificial Sequence
  Description of Artificial Sequence: Synthetic oligonucleotide
ugucgaccucccaaccacu

SEQ ID NO: 139176 - RNA, 19 nt, Artificial Sequence
  Description of Artificial Sequence: Synthetic oligonucleotide
cagacuguauccacauaga

SEQ ID NO: 139177 - RNA, 19 nt, Artificial Sequence
  Description of Artificial Sequence: Synthetic oligonucleotide
ucacugccggcagacauaa

SEQ ID NO: 139178 - RNA, 19 nt, Artificial Sequence
  Description of Artificial Sequence: Synthetic oligonucleotide
gaguugacccuucugcuau

SEQ ID NO: 139179 - RNA, 19 nt, Artificial Sequence
  Description of Artificial Sequence: Synthetic oligonucleotide
auuaagauuuuggcucaaa

SEQ ID NO: 139180 - RNA, 19 nt, Artificial Sequence
  Description of Artificial Sequence: Synthetic oligonucleotide
ccauaucuuuaacuacccg

SEQ ID NO: 139181 - RNA, 19 nt, Artificial Sequence
  Description of Artificial Sequence: Synthetic oligonucleotide
ugcccauacuguugagggu

SEQ ID NO: 139182 - RNA, 19 nt, Artificial Sequence
  Description of Artificial Sequence: Synthetic oligonucleotide
uugggguuguuugcucuug

SEQ ID NO: 139183 - RNA, 19 nt, Artificial Sequence
  Description of Artificial Sequence: Synthetic oligonucleotide
guucuuaggcuaaguggac

SEQ ID NO: 139184 - RNA, 19 nt, Artificial Sequence
  Description of Artificial Sequence: Synthetic oligonucleotide
caaguacaacaacagagau

SEQ ID NO: 139185 - RNA, 19 nt, Artificial Sequence
  Description of Artificial Sequence: Synthetic oligonucleotide
caugcucacuauggcaaug

SEQ ID NO: 139186 - RNA, 19 nt, Artificial Sequence
  Description of Artificial Sequence: Synthetic oligonucleotide
agaaggugauugaucuacu

SEQ ID NO: 139187 - RNA, 19 nt, Artificial Sequence
  Description of Artificial Sequence: Synthetic oligonucleotide
agacggacuggcaccgagg

SEQ ID NO: 139188 - RNA, 19 nt, Artificial Sequence
  Description of Artificial Sequence: Synthetic oligonucleotide
gcugaauacauuuggcuau

SEQ ID NO: 139189 - RNA, 19 nt, Artificial Sequence
  Description of Artificial Sequence: Synthetic oligonucleotide
acgcaaacugaaauuuuaa

SEQ ID NO: 139190 - RNA, 19 nt, Artificial Sequence
  Description of Artificial Sequence: Synthetic oligonucleotide
  modified_base (16)..(16): a, c, u, g, unknown or other
uucugcuaucggguuncuc

SEQ ID NO: 139191 - RNA, 19 nt, Artificial Sequence
  Description of Artificial Sequence: Synthetic oligonucleotide
guuagcccagaagcaauuc

SEQ ID NO: 139192 - RNA, 19 nt, Artificial Sequence
  Description of Artificial Sequence: Synthetic oligonucleotide
ggaagugauuggaaguauc

SEQ ID NO: 139193 - RNA, 19 nt, Artificial Sequence
  Description of Artificial Sequence: Synthetic oligonucleotide
ggcauccgauauuuuacca

SEQ ID NO: 139194 - RNA, 19 nt, Artificial Sequence
  Description of Artificial Sequence: Synthetic oligonucleotide
gcauccgauauuuuaccaa

SEQ ID NO: 139195 - RNA, 19 nt, Artificial Sequence
  Description of Artificial Sequence: Synthetic oligonucleotide
gcagccuauggugaguuac

SEQ ID NO: 139196 - RNA, 19 nt, Artificial Sequence
  Description of Artificial Sequence: Synthetic oligonucleotide
guuuagagucccagcucac

SEQ ID NO: 139197 - RNA, 19 nt, Artificial Sequence
  Description of Artificial Sequence: Synthetic oligonucleotide
ggaggcugagcaccaaauc

SEQ ID NO: 139198 - RNA, 19 nt, Artificial Sequence
  Description of Artificial Sequence: Synthetic oligonucleotide
gaaucuccgggcuccggcu

SEQ ID NO: 139199 - RNA, 19 nt, Artificial Sequence
  Description of Artificial Sequence: Synthetic oligonucleotide
gcuagaguuggccauuacu

SEQ ID NO: 139200 - RNA, 19 nt, Artificial Sequence
  Description of Artificial Sequence: Synthetic oligonucleotide
ggugaguuacaauuguguu

SEQ ID NO: 139201 - RNA, 19 nt, Artificial Sequence
  Description of Artificial Sequence: Synthetic oligonucleotide
  modified_base (4)..(4): a, c, u, g, unknown or other
guuncucuguuaucauuuu

SEQ ID NO: 139202 - RNA, 19 nt, Artificial Sequence
  Description of Artificial Sequence: Synthetic oligonucleotide
ccgaggaaaugcuaguaga

SEQ ID NO: 139203 - RNA, 19 nt, Artificial Sequence
  Description of Artificial Sequence: Synthetic oligonucleotide
uccgggcuccggcugggac

SEQ ID NO: 139204 - RNA, 19 nt, Artificial Sequence
  Description of Artificial Sequence: Synthetic oligonucleotide
guccgaucugacugaaucu

SEQ ID NO: 139205 - RNA, 19 nt, Artificial Sequence
  Description of Artificial Sequence: Synthetic oligonucleotide
acaggaaacugcagccuau

SEQ ID NO: 139206 - RNA, 19 nt, Artificial Sequence
  Description of Artificial Sequence: Synthetic oligonucleotide
agccuauggugaguuacaa

SEQ ID NO: 139207 - RNA, 19 nt, Artificial Sequence
  Description of Artificial Sequence: Synthetic oligonucleotide
  modified_base (5)..(5): a, c, u, g, unknown or other
gguuncucuguuaucauuu

SEQ ID NO: 139208 - RNA, 19 nt, Artificial Sequence
  Description of Artificial Sequence: Synthetic oligonucleotide
aucuuaacuuggggcagaa

SEQ ID NO: 139209 - RNA, 19 nt, Artificial Sequence
  Description of Artificial Sequence: Synthetic oligonucleotide
ccauacccagcuugguuug

SEQ ID NO: 139210 - RNA, 19 nt, Artificial Sequence
  Description of Artificial Sequence: Synthetic oligonucleotide
cuuaggcuaaguggaccga

SEQ ID NO: 139211 - RNA, 19 nt, Artificial Sequence
  Description of Artificial Sequence: Synthetic oligonucleotide
  modified_base (11)..(11): a, c, u, g, unknown or other
cuaucggguuncucuguua

SEQ ID NO: 139212 - RNA, 19 nt, Artificial Sequence
  Description of Artificial Sequence: Synthetic oligonucleotide
aaaggccguggaagcacaa

SEQ ID NO: 139213 - RNA, 19 nt, Artificial Sequence
  Description of Artificial Sequence: Synthetic oligonucleotide
cuucgauuguaguaccauu

SEQ ID NO: 139214 - RNA, 19 nt, Artificial Sequence
  Description of Artificial Sequence: Synthetic oligonucleotide
gaccgagacggcacaaacu

SEQ ID NO: 139215 - RNA, 19 nt, Artificial Sequence
  Description of Artificial Sequence: Synthetic oligonucleotide
gcaauauggaucauugcuu

SEQ ID NO: 139216 - RNA, 19 nt, Artificial Sequence
  Description of Artificial Sequence: Synthetic oligonucleotide
guuuacguguggcccaauu

SEQ ID NO: 139217 - RNA, 19 nt, Artificial Sequence
  Description of Artificial Sequence: Synthetic oligonucleotide
cuggcaccgaggaaaugcu

SEQ ID NO: 139218 - RNA, 19 nt, Artificial Sequence
  Description of Artificial Sequence: Synthetic oligonucleotide
ucagacggacuggcaccga

SEQ ID NO: 139219 - RNA, 19 nt, Artificial Sequence
  Description of Artificial Sequence: Synthetic oligonucleotide
gccaaagagucucuccgcu

SEQ ID NO: 139220 - RNA, 19 nt, Artificial Sequence
  Description of Artificial Sequence: Synthetic oligonucleotide
cauuaagauuuuggcucaa

SEQ ID NO: 139221 - RNA, 19 nt, Artificial Sequence
  Description of Artificial Sequence: Synthetic oligonucleotide
cccauaugcacaauugcau

SEQ ID NO: 139222 - RNA, 19 nt, Artificial Sequence
  Description of Artificial Sequence: Synthetic oligonucleotide
caguuuacuuugaccuccu

SEQ ID NO: 139223 - RNA, 19 nt, Artificial Sequence
  Description of Artificial Sequence: Synthetic oligonucleotide
ggccauuacuuauuucaau

SEQ ID NO: 139224 - RNA, 19 nt, Artificial Sequence
  Description of Artificial Sequence: Synthetic oligonucleotide
ccgguugccauaucuuuaa

SEQ ID NO: 139225 - RNA, 19 nt, Artificial Sequence
  Description of Artificial Sequence: Synthetic oligonucleotide
uggcuuuaguuggccucuc

SEQ ID NO: 139226 - RNA, 19 nt, Artificial Sequence
  Description of Artificial Sequence: Synthetic oligonucleotide
ccguggaagcacaacugga

SEQ ID NO: 139227 - RNA, 19 nt, Artificial Sequence
  Description of Artificial Sequence: Synthetic oligonucleotide
caccgaggaaaugcuagua

SEQ ID NO: 139228 - RNA, 19 nt, Artificial Sequence
  Description of Artificial Sequence: Synthetic oligonucleotide
accccgcucuccggcucgc

SEQ ID NO: 139229 - RNA, 19 nt, Artificial Sequence
  Description of Artificial Sequence: Synthetic oligonucleotide
aggguccgaucugacugaa

SEQ ID NO: 139230 - RNA, 19 nt, Artificial Sequence
  Description of Artificial Sequence: Synthetic oligonucleotide
ccgggcauccgauauuuua

SEQ ID NO: 139231 - RNA, 19 nt, Artificial Sequence
  Description of Artificial Sequence: Synthetic oligonucleotide
gcaccgaggaaaugcuagu

SEQ ID NO: 139232 - RNA, 19 nt, Artificial Sequence
  Description of Artificial Sequence: Synthetic oligonucleotide
cugcaccuucccaacgcau

SEQ ID NO: 139233 - RNA, 19 nt, Artificial Sequence
  Description of Artificial Sequence: Synthetic oligonucleotide
  modified_base (12)..(12): a, c, u, g, unknown or other
gcuaucggguuncucuguu

SEQ ID NO: 139234 - RNA, 19 nt, Artificial Sequence
  Description of Artificial Sequence: Synthetic oligonucleotide
gccuauggugaguuacaau

SEQ ID NO: 139235 - RNA, 19 nt, Artificial Sequence
  Description of Artificial Sequence: Synthetic oligonucleotide
cacugccggcagacauaaa

SEQ ID NO: 139236 - RNA, 19 nt, Artificial Sequence
  Description of Artificial Sequence: Synthetic oligonucleotide
  modified_base (17)..(17): a, c, u, g, unknown or other
cuucugcuaucggguuncu

SEQ ID NO: 139237 - RNA, 19 nt, Artificial Sequence
  Description of Artificial Sequence: Synthetic oligonucleotide
  modified_base (7)..(7): a, c, u, g, unknown or other
cggguuncucuguuaucau

SEQ ID NO: 139238 - RNA, 19 nt, Artificial Sequence
  Description of Artificial Sequence: Synthetic oligonucleotide
cccaacgcauugauucauu

SEQ ID NO: 139239 - RNA, 19 nt, Artificial Sequence
  Description of Artificial Sequence: Synthetic oligonucleotide
gguuuacguguggcccaau

SEQ ID NO: 139240 - RNA, 19 nt, Artificial Sequence
  Description of Artificial Sequence: Synthetic oligonucleotide
ggguccgaucugacugaau

SEQ ID NO: 139241 - RNA, 19 nt, Artificial Sequence
  Description of Artificial Sequence: Synthetic oligonucleotide
cccgggcauccgauauuuu

SEQ ID NO: 139242 - RNA, 19 nt, Artificial Sequence
  Description of Artificial Sequence: Synthetic oligonucleotide
aaugauuuggaacacggag

SEQ ID NO: 139243 - RNA, 19 nt, Artificial Sequence
  Description of Artificial Sequence: Synthetic oligonucleotide
aacagaaucaaugaugcac

SEQ ID NO: 139244 - RNA, 19 nt, Artificial Sequence
  Description of Artificial Sequence: Synthetic oligonucleotide
aaguuuguucaccagaagg

SEQ ID NO: 139245 - RNA, 19 nt, Artificial Sequence
  Description of Artificial Sequence: Synthetic oligonucleotide
uaaauuagcacaaugcugu

SEQ ID NO: 139246 - RNA, 19 nt, Artificial Sequence
  Description of Artificial Sequence: Synthetic oligonucleotide
augugaaagacacaaagcg

SEQ ID NO: 139247 - RNA, 19 nt, Artificial Sequence
  Description of Artificial Sequence: Synthetic oligonucleotide
aaacaaaacaaaacaaaac

SEQ ID NO: 139248 - RNA, 19 nt, Artificial Sequence
  Description of Artificial Sequence: Synthetic oligonucleotide
aaaacugacccuccaauag

SEQ ID NO: 139249 - RNA, 19 nt, Artificial Sequence
  Description of Artificial Sequence: Synthetic oligonucleotide
aaauacacaaacccaaccu

SEQ ID NO: 139250 - RNA, 19 nt, Artificial Sequence
  Description of Artificial Sequence: Synthetic oligonucleotide
ggaacuacaaaauaggaag

SEQ ID NO: 139251 - RNA, 19 nt, Artificial Sequence
  Description of Artificial Sequence: Synthetic oligonucleotide
ucuaugaggaaauuaaaac

SEQ ID NO: 139252 - RNA, 19 nt, Artificial Sequence
  Description of Artificial Sequence: Synthetic oligonucleotide
uguucgaugaaaucguggg

SEQ ID NO: 139253 - RNA, 19 nt, Artificial Sequence
  Description of Artificial Sequence: Synthetic oligonucleotide
auuaagccaaaauugauca

SEQ ID NO: 139254 - RNA, 19 nt, Artificial Sequence
  Description of Artificial Sequence: Synthetic oligonucleotide
uuugaaucaagggagauca

SEQ ID NO: 139255 - RNA, 19 nt, Artificial Sequence
  Description of Artificial Sequence: Synthetic oligonucleotide
uguggguuuaaccugaugu

SEQ ID NO: 139256 - RNA, 19 nt, Artificial Sequence
  Description of Artificial Sequence: Synthetic oligonucleotide
aaugcuguaauuaacacaa

SEQ ID NO: 139257 - RNA, 19 nt, Artificial Sequence
  Description of Artificial Sequence: Synthetic oligonucleotide
aaacugacccuccaauagc

SEQ ID NO: 139258 - RNA, 19 nt, Artificial Sequence
  Description of Artificial Sequence: Synthetic oligonucleotide
agugcuuugaaauggaaug

SEQ ID NO: 139259 - RNA, 19 nt, Artificial Sequence
  Description of Artificial Sequence: Synthetic oligonucleotide
ugguaugucaaccagaaau

SEQ ID NO: 139260 - RNA, 19 nt, Artificial Sequence
  Description of Artificial Sequence: Synthetic oligonucleotide
ugagguauugugaacagga

SEQ ID NO: 139261 - RNA, 19 nt, Artificial Sequence
  Description of Artificial Sequence: Synthetic oligonucleotide
aaugaugcaccggagacuc

SEQ ID NO: 139262 - RNA, 19 nt, Artificial Sequence
  Description of Artificial Sequence: Synthetic oligonucleotide
agcgaaaacaaugugaaag

SEQ ID NO: 139263 - RNA, 19 nt, Artificial Sequence
  Description of Artificial Sequence: Synthetic oligonucleotide
uaaaagaccaaucucucaa

SEQ ID NO: 139264 - RNA, 19 nt, Artificial Sequence
  Description of Artificial Sequence: Synthetic oligonucleotide
aaaacaaaacaaaacaaaa

SEQ ID NO: 139265 - RNA, 19 nt, Artificial Sequence
  Description of Artificial Sequence: Synthetic oligonucleotide
gugaacaggaaccuggugg

SEQ ID NO: 139266 - RNA, 19 nt, Artificial Sequence
  Description of Artificial Sequence: Synthetic oligonucleotide
uaucuuaucccuucuaucu

SEQ ID NO: 139267 - RNA, 19 nt, Artificial Sequence
  Description of Artificial Sequence: Synthetic oligonucleotide
aauuaccuacuguuguggg

SEQ ID NO: 139268 - RNA, 19 nt, Artificial Sequence
  Description of Artificial Sequence: Synthetic oligonucleotide
uccaauagcagcgaaaaca

SEQ ID NO: 139269 - RNA, 19 nt, Artificial Sequence
  Description of Artificial Sequence: Synthetic oligonucleotide
uuccacuuaaguuuguuca

SEQ ID NO: 139270 - RNA, 19 nt, Artificial Sequence
  Description of Artificial Sequence: Synthetic oligonucleotide
ugugaaagacacaaagcga

SEQ ID NO: 139271 - RNA, 19 nt, Artificial Sequence
  Description of Artificial Sequence: Synthetic oligonucleotide
uugcauugcagccaccacg

SEQ ID NO: 139272 - RNA, 19 nt, Artificial Sequence
  Description of Artificial Sequence: Synthetic oligonucleotide
aagaaagugcguugugcgg

SEQ ID NO: 139273 - RNA, 19 nt, Artificial Sequence
  Description of Artificial Sequence: Synthetic oligonucleotide
gaccauuuugguuuggcag

SEQ ID NO: 139274 - RNA, 19 nt, Artificial Sequence
  Description of Artificial Sequence: Synthetic oligonucleotide
aaaucguggggagucaugg

SEQ ID NO: 139275 - RNA, 19 nt, Artificial Sequence
  Description of Artificial Sequence: Synthetic oligonucleotide
uuuuaggggcuccagagac

SEQ ID NO: 139276 - RNA, 19 nt, Artificial Sequence
  Description of Artificial Sequence: Synthetic oligonucleotide
auagaauauaugaugucac

SEQ ID NO: 139277 - RNA, 19 nt, Artificial Sequence
  Description of Artificial Sequence: Synthetic oligonucleotide
ugaugucacuaucuuaucc

SEQ ID NO: 139278 - RNA, 19 nt, Artificial Sequence
  Description of Artificial Sequence: Synthetic oligonucleotide
ucuucuugacccaacaaaa

SEQ ID NO: 139279 - RNA, 19 nt, Artificial Sequence
  Description of Artificial Sequence: Synthetic oligonucleotide
accaaaggaucccuuaaac

SEQ ID NO: 139280 - RNA, 19 nt, Artificial Sequence
  Description of Artificial Sequence: Synthetic oligonucleotide
uggccuuuuggccagaccc

SEQ ID NO: 139281 - RNA, 19 nt, Artificial Sequence
  Description of Artificial Sequence: Synthetic oligonucleotide
aagccuuucaugucacagg

SEQ ID NO: 139282 - RNA, 19 nt, Artificial Sequence
  Description of Artificial Sequence: Synthetic oligonucleotide
aguguagaugcacaacuuc

SEQ ID NO: 139283 - RNA, 19 nt, Artificial Sequence
  Description of Artificial Sequence: Synthetic oligonucleotide
auggcacuaaaccuucacc

SEQ ID NO: 139284 - RNA, 19 nt, Artificial Sequence
  Description of Artificial Sequence: Synthetic oligonucleotide
aacuucacgucuguggcac

SEQ ID NO: 139285 - RNA, 19 nt, Artificial Sequence
  Description of Artificial Sequence: Synthetic oligonucleotide
ugaacgucugggauguggg

SEQ ID NO: 139286 - RNA, 19 nt, Artificial Sequence
  Description of Artificial Sequence: Synthetic oligonucleotide
uuccaauaaauacucuucu

SEQ ID NO: 139287 - RNA, 19 nt, Artificial Sequence
  Description of Artificial Sequence: Synthetic oligonucleotide
uauacgaauuaccuacugu

SEQ ID NO: 139288 - RNA, 19 nt, Artificial Sequence
  Description of Artificial Sequence: Synthetic oligonucleotide
cauuaagccaaaauugauc

SEQ ID NO: 139289 - RNA, 19 nt, Artificial Sequence
  Description of Artificial Sequence: Synthetic oligonucleotide
uugcuuaagucacauagaa

SEQ ID NO: 139290 - RNA, 19 nt, Artificial Sequence
  Description of Artificial Sequence: Synthetic oligonucleotide
gcgguaaucacauuaagcc

SEQ ID NO: 139291 - RNA, 19 nt, Artificial Sequence
  Description of Artificial Sequence: Synthetic oligonucleotide
uggaauacagcgguaauca

SEQ ID NO: 139292 - RNA, 19 nt, Artificial Sequence
  Description of Artificial Sequence: Synthetic oligonucleotide
aucgguagcagcaggagcc

SEQ ID NO: 139293 - RNA, 19 nt, Artificial Sequence
  Description of Artificial Sequence: Synthetic oligonucleotide
agccuuucaugucacaggg

SEQ ID NO: 139294 - RNA, 19 nt, Artificial Sequence
  Description of Artificial Sequence: Synthetic oligonucleotide
aucuguuccuggcaggcgc

SEQ ID NO: 139295 - RNA, 19 nt, Artificial Sequence
  Description of Artificial Sequence: Synthetic oligonucleotide
uucugguaacaaaaugucc

SEQ ID NO: 139296 - RNA, 19 nt, Artificial Sequence
  Description of Artificial Sequence: Synthetic oligonucleotide
ucuaucucucucucuagag

SEQ ID NO: 139297 - RNA, 19 nt, Artificial Sequence
  Description of Artificial Sequence: Synthetic oligonucleotide
acuccguggacccaccacc

SEQ ID NO: 139298 - RNA, 19 nt, Artificial Sequence
  Description of Artificial Sequence: Synthetic oligonucleotide
aauacagcgguaaucacau

SEQ ID NO: 139299 - RNA, 19 nt, Artificial Sequence
  Description of Artificial Sequence: Synthetic oligonucleotide
uacgaauuaccuacuguug

SEQ ID NO: 139300 - RNA, 19 nt, Artificial Sequence
  Description of Artificial Sequence: Synthetic oligonucleotide
aagguguauguuugaauca

SEQ ID NO: 139301 - RNA, 19 nt, Artificial Sequence
  Description of Artificial Sequence: Synthetic oligonucleotide
auuagcacaaugcuguaau

SEQ ID NO: 139302 - RNA, 19 nt, Artificial Sequence
  Description of Artificial Sequence: Synthetic oligonucleotide
gguauugugaacaggaacc

SEQ ID NO: 139303 - RNA, 19 nt, Artificial Sequence
  Description of Artificial Sequence: Synthetic oligonucleotide
aaucguggggagucauggc

SEQ ID NO: 139304 - RNA, 19 nt, Artificial Sequence
  Description of Artificial Sequence: Synthetic oligonucleotide
aaccuuuccaauaaauacu

SEQ ID NO: 139305 - RNA, 19 nt, Artificial Sequence
  Description of Artificial Sequence: Synthetic oligonucleotide
accgaaagugcuuugaaau

SEQ ID NO: 139306 - RNA, 19 nt, Artificial Sequence
  Description of Artificial Sequence: Synthetic oligonucleotide
agcgguaaucacauuaagc

SEQ ID NO: 139307 - RNA, 19 nt, Artificial Sequence
  Description of Artificial Sequence: Synthetic oligonucleotide
auacgaauuaccuacuguu

SEQ ID NO: 139308 - RNA, 19 nt, Artificial Sequence
  Description of Artificial Sequence: Synthetic oligonucleotide
aucguggggagucauggcg

SEQ ID NO: 139309 - RNA, 19 nt, Artificial Sequence
  Description of Artificial Sequence: Synthetic oligonucleotide
ugcguugugcgguagcagg

SEQ ID NO: 139310 - RNA, 19 nt, Artificial Sequence
  Description of Artificial Sequence: Synthetic oligonucleotide
acaucucguacaucggugg

SEQ ID NO: 139311 - RNA, 19 nt, Artificial Sequence
  Description of Artificial Sequence: Synthetic oligonucleotide
caugcuacuagcccuacug

SEQ ID NO: 139312 - RNA, 19 nt, Artificial Sequence
  Description of Artificial Sequence: Synthetic oligonucleotide
acgauuuuccgcauggacg

SEQ ID NO: 139313 - RNA, 19 nt, Artificial Sequence
  Description of Artificial Sequence: Synthetic oligonucleotide
gugaaagacacaaagcgac

SEQ ID NO: 139314 - RNA, 19 nt, Artificial Sequence
  Description of Artificial Sequence: Synthetic oligonucleotide
caaagcgacacaagucugg

SEQ ID NO: 139315 - RNA, 19 nt, Artificial Sequence
  Description of Artificial Sequence: Synthetic oligonucleotide
acgaauuaccuacuguugu

SEQ ID NO: 139316 - RNA, 19 nt, Artificial Sequence
  Description of Artificial Sequence: Synthetic oligonucleotide
uuggcagcuagcuagggaa

SEQ ID NO: 139317 - RNA, 19 nt, Artificial Sequence
  Description of Artificial Sequence: Synthetic oligonucleotide
caucauuaggagcaccccg

SEQ ID NO: 139318 - RNA, 19 nt, Artificial Sequence
  Description of Artificial Sequence: Synthetic oligonucleotide
auaaaagaccaaucucuca

SEQ ID NO: 139319 - RNA, 19 nt, Artificial Sequence
  Description of Artificial Sequence: Synthetic oligonucleotide
gaucccuuaaacuccucug

SEQ ID NO: 139320 - RNA, 19 nt, Artificial Sequence
  Description of Artificial Sequence: Synthetic oligonucleotide
gaacauggcagucuaugac

SEQ ID NO: 139321 - RNA, 19 nt, Artificial Sequence
  Description of Artificial Sequence: Synthetic oligonucleotide
guguauguuugaaucaagg

SEQ ID NO: 139322 - RNA, 19 nt, Artificial Sequence
  Description of Artificial Sequence: Synthetic oligonucleotide
gauagaguugucaguguag

SEQ ID NO: 139323 - RNA, 19 nt, Artificial Sequence
  Description of Artificial Sequence: Synthetic oligonucleotide
agucucuggaggcagacca

SEQ ID NO: 139324 - RNA, 19 nt, Artificial Sequence
  Description of Artificial Sequence: Synthetic oligonucleotide
ugaaucaagggagaucaca

SEQ ID NO: 139325 - RNA, 19 nt, Artificial Sequence
  Description of Artificial Sequence: Synthetic oligonucleotide
aucuuaucccuucuaucuc

SEQ ID NO: 139326 - RNA, 19 nt, Artificial Sequence
  Description of Artificial Sequence: Synthetic oligonucleotide
uuaaacuccucuguaggac

SEQ ID NO: 139327 - RNA, 19 nt, Artificial Sequence
  Description of Artificial Sequence: Synthetic oligonucleotide
ucauuaggagcaccccggg

SEQ ID NO: 139328 - RNA, 19 nt, Artificial Sequence
  Description of Artificial Sequence: Synthetic oligonucleotide
acuaucuuaucccuucuau

SEQ ID NO: 139329 - RNA, 19 nt, Artificial Sequence
  Description of Artificial Sequence: Synthetic oligonucleotide
aagugcguugugcgguagc

SEQ ID NO: 139330 - RNA, 19 nt, Artificial Sequence
  Description of Artificial Sequence: Synthetic oligonucleotide
guaacgccaccauaguucc

SEQ ID NO: 139331 - RNA, 19 nt, Artificial Sequence
  Description of Artificial Sequence: Synthetic oligonucleotide
ggaaugauuuggaacacgg

SEQ ID NO: 139332 - RNA, 19 nt, Artificial Sequence
  Description of Artificial Sequence: Synthetic oligonucleotide
guucgaugaaaucgugggg

SEQ ID NO: 139333 - RNA, 19 nt, Artificial Sequence
  Description of Artificial Sequence: Synthetic oligonucleotide
ucguggggagucauggcgg

SEQ ID NO: 139334 - RNA, 19 nt, Artificial Sequence
  Description of Artificial Sequence: Synthetic oligonucleotide
caauauugauaauuaacaa

SEQ ID NO: 139335 - RNA, 19 nt, Artificial Sequence
  Description of Artificial Sequence: Synthetic oligonucleotide
uuacccauaaaagaccaau

SEQ ID NO: 139336 - RNA, 19 nt, Artificial Sequence
  Description of Artificial Sequence: Synthetic oligonucleotide
aguuuguucaccagaagga

SEQ ID NO: 139337 - RNA, 19 nt, Artificial Sequence
  Description of Artificial Sequence: Synthetic oligonucleotide
augcuugcggaugaucugc

SEQ ID NO: 139338 - RNA, 19 nt, Artificial Sequence
  Description of Artificial Sequence: Synthetic oligonucleotide
ugcuacuagcccuacugug

SEQ ID NO: 139339 - RNA, 19 nt, Artificial Sequence
  Description of Artificial Sequence: Synthetic oligonucleotide
aaguguucgaugaaaucgu

SEQ ID NO: 139340 - RNA, 19 nt, Artificial Sequence
  Description of Artificial Sequence: Synthetic oligonucleotide
uugugcgguagcaggacag

SEQ ID NO: 139341 - RNA, 19 nt, Artificial Sequence
  Description of Artificial Sequence: Synthetic oligonucleotide
acaucauuaggagcacccc

SEQ ID NO: 139342 - RNA, 19 nt, Artificial Sequence
  Description of Artificial Sequence: Synthetic oligonucleotide
ucgaugaaaucguggggag

SEQ ID NO: 139343 - RNA, 19 nt, Artificial Sequence
  Description of Artificial Sequence: Synthetic oligonucleotide
agcggcaagaaugugccgg

SEQ ID NO: 139344 - RNA, 19 nt, Artificial Sequence
  Description of Artificial Sequence: Synthetic oligonucleotide
cuaucuuaucccuucuauc

SEQ ID NO: 139345 - RNA, 19 nt, Artificial Sequence
  Description of Artificial Sequence: Synthetic oligonucleotide
aucauuaggagcaccccgg

SEQ ID NO: 139346 - RNA, 19 nt, Artificial Sequence
  Description of Artificial Sequence: Synthetic oligonucleotide
ucacgucuguggcacagag

SEQ ID NO: 139347 - RNA, 19 nt, Artificial Sequence
  Description of Artificial Sequence: Synthetic oligonucleotide
aagaaugugccggaaucca

SEQ ID NO: 139348 - RNA, 19 nt, Artificial Sequence
  Description of Artificial Sequence: Synthetic oligonucleotide
auagcagcgaaaacaaugu

SEQ ID NO: 139349 - RNA, 19 nt, Artificial Sequence
  Description of Artificial Sequence: Synthetic oligonucleotide
ccuuaaguauaaauuagac

SEQ ID NO: 139350 - RNA, 19 nt, Artificial Sequence
  Description of Artificial Sequence: Synthetic oligonucleotide
ucggcggucaaaggaaugg

SEQ ID NO: 139351 - RNA, 19 nt, Artificial Sequence
  Description of Artificial Sequence: Synthetic oligonucleotide
cacgaaagaaaagcugugg

SEQ ID NO: 139352 - RNA, 19 nt, Artificial Sequence
  Description of Artificial Sequence: Synthetic oligonucleotide
agcgccaugguaugucaac

SEQ ID NO: 139353 - RNA, 19 nt, Artificial Sequence
  Description of Artificial Sequence: Synthetic oligonucleotide
agagacaggaaacggucca

SEQ ID NO: 139354 - RNA, 19 nt, Artificial Sequence
  Description of Artificial Sequence: Synthetic oligonucleotide
uccacaucucguacaucgg

SEQ ID NO: 139355 - RNA, 19 nt, Artificial Sequence
  Description of Artificial Sequence: Synthetic oligonucleotide
guggguuuaaccugaugug

SEQ ID NO: 139356 - RNA, 19 nt, Artificial Sequence
  Description of Artificial Sequence: Synthetic oligonucleotide
uggguuuaaccugauguga

SEQ ID NO: 139357 - RNA, 19 nt, Artificial Sequence
  Description of Artificial Sequence: Synthetic oligonucleotide
agccuuaaguauaaauuag

SEQ ID NO: 139358 - RNA, 19 nt, Artificial Sequence
  Description of Artificial Sequence: Synthetic oligonucleotide
uaaaaucacacuggccaug

SEQ ID NO: 139359 - RNA, 19 nt, Artificial Sequence
  Description of Artificial Sequence: Synthetic oligonucleotide
cagaaucaaugaugcaccg

SEQ ID NO: 139360 - RNA, 19 nt, Artificial Sequence
  Description of Artificial Sequence: Synthetic oligonucleotide
ucucaaacauggcacuaaa

SEQ ID NO: 139361 - RNA, 19 nt, Artificial Sequence
  Description of Artificial Sequence: Synthetic oligonucleotide
cagaucaaaugaagggccc

SEQ ID NO: 139362 - RNA, 19 nt, Artificial Sequence
  Description of Artificial Sequence: Synthetic oligonucleotide
aggacagguaguuguuggg

SEQ ID NO: 139363 - RNA, 19 nt, Artificial Sequence
  Description of Artificial Sequence: Synthetic oligonucleotide
uuaagccaaaauugaucac

SEQ ID NO: 139364 - RNA, 19 nt, Artificial Sequence
  Description of Artificial Sequence: Synthetic oligonucleotide
guauacgaauuaccuacug

SEQ ID NO: 139365 - RNA, 19 nt, Artificial Sequence
  Description of Artificial Sequence: Synthetic oligonucleotide
aucucuaucucucucucua

SEQ ID NO: 139366 - RNA, 19 nt, Artificial Sequence
  Description of Artificial Sequence: Synthetic oligonucleotide
cgcacuugaaguaagacac

SEQ ID NO: 139367 - RNA, 19 nt, Artificial Sequence
  Description of Artificial Sequence: Synthetic oligonucleotide
ucucuaucucucucucuag

SEQ ID NO: 139368 - RNA, 19 nt, Artificial Sequence
  Description of Artificial Sequence: Synthetic oligonucleotide
acaucggugggugugcagg

SEQ ID NO: 139369 - RNA, 19 nt, Artificial Sequence
  Description of Artificial Sequence: Synthetic oligonucleotide
ccagaucaaaugaagggcc

SEQ ID NO: 139370 - RNA, 19 nt, Artificial Sequence
  Description of Artificial Sequence: Synthetic oligonucleotide
ugauuacucuggaaagaaa

SEQ ID NO: 139371 - RNA, 19 nt, Artificial Sequence
  Description of Artificial Sequence: Synthetic oligonucleotide
uggauauccuccaaccauu

SEQ ID NO: 139372 - RNA, 19 nt, Artificial Sequence
  Description of Artificial Sequence: Synthetic oligonucleotide
agcuagcugaccgaaagug

SEQ ID NO: 139373 - RNA, 19 nt, Artificial Sequence
  Description of Artificial Sequence: Synthetic oligonucleotide
uucucggcggucaaaggaa

SEQ ID NO: 139374 - RNA, 19 nt, Artificial Sequence
  Description of Artificial Sequence: Synthetic oligonucleotide
gauggcucuccaauggggc

SEQ ID NO: 139375 - RNA, 19 nt, Artificial Sequence
  Description of Artificial Sequence: Synthetic oligonucleotide
aaagcgacacaagucuggu

SEQ ID NO: 139376 - RNA, 19 nt, Artificial Sequence
  Description of Artificial Sequence: Synthetic oligonucleotide
auggcuaggugaaacauga

SEQ ID NO: 139377 - RNA, 19 nt, Artificial Sequence
  Description of Artificial Sequence: Synthetic oligonucleotide
cauguggucccuacccucc

SEQ ID NO: 139378 - RNA, 19 nt, Artificial Sequence
  Description of Artificial Sequence: Synthetic oligonucleotide
augaggaaauuaaaacuug

SEQ ID NO: 139379 - RNA, 19 nt, Artificial Sequence
  Description of Artificial Sequence: Synthetic oligonucleotide
uaggugaaacaugagguau

SEQ ID NO: 139380 - RNA, 19 nt, Artificial Sequence
  Description of Artificial Sequence: Synthetic oligonucleotide
caagaaugugccggaaucc

SEQ ID NO: 139381 - RNA, 19 nt, Artificial Sequence
  Description of Artificial Sequence: Synthetic oligonucleotide
aacugacccuccaauagca

SEQ ID NO: 139382 - RNA, 19 nt, Artificial Sequence
  Description of Artificial Sequence: Synthetic oligonucleotide
agcagcgaaaacaauguga

SEQ ID NO: 139383 - RNA, 19 nt, Artificial Sequence
  Description of Artificial Sequence: Synthetic oligonucleotide
gaugaucccaccagaccag

SEQ ID NO: 139384 - RNA, 19 nt, Artificial Sequence
  Description of Artificial Sequence: Synthetic oligonucleotide
ucucguacaucggugggug

SEQ ID NO: 139385 - RNA, 19 nt, Artificial Sequence
  Description of Artificial Sequence: Synthetic oligonucleotide
cacaucucguacaucggug

SEQ ID NO: 139386 - RNA, 19 nt, Artificial Sequence
  Description of Artificial Sequence: Synthetic oligonucleotide
auuacucuggaaagaaagu

SEQ ID NO: 139387 - RNA, 19 nt, Artificial Sequence
  Description of Artificial Sequence: Synthetic oligonucleotide
cacgcuggucacauguccg

SEQ ID NO: 139388 - RNA, 19 nt, Artificial Sequence
  Description of Artificial Sequence: Synthetic oligonucleotide
uauugugaacaggaaccug

SEQ ID NO: 139389 - RNA, 19 nt, Artificial Sequence
  Description of Artificial Sequence: Synthetic oligonucleotide
accuaacagaaucaaugau

SEQ ID NO: 139390 - RNA, 19 nt, Artificial Sequence
  Description of Artificial Sequence: Synthetic oligonucleotide
auccuggcggugcaagaac

SEQ ID NO: 139391 - RNA, 19 nt, Artificial Sequence
  Description of Artificial Sequence: Synthetic oligonucleotide
guguucgaugaaaucgugg

SEQ ID NO: 139392 - RNA, 19 nt, Artificial Sequence
  Description of Artificial Sequence: Synthetic oligonucleotide
guaugucaaccagaaauac

SEQ ID NO: 139393 - RNA, 19 nt, Artificial Sequence
  Description of Artificial Sequence: Synthetic oligonucleotide
uagcagcgaaaacaaugug

SEQ ID NO: 139394 - RNA, 19 nt, Artificial Sequence
  Description of Artificial Sequence: Synthetic oligonucleotide
aggaacuacaaaauaggaa

SEQ ID NO: 139395 - RNA, 19 nt, Artificial Sequence
  Description of Artificial Sequence: Synthetic oligonucleotide
ugcgcaugcuugcggauga

SEQ ID NO: 139396 - RNA, 19 nt, Artificial Sequence
  Description of Artificial Sequence: Synthetic oligonucleotide
cgauuuuccgcauggacgg

SEQ ID NO: 139397 - RNA, 19 nt, Artificial Sequence
  Description of Artificial Sequence: Synthetic oligonucleotide
ucuagagagcuuucaggua

SEQ ID NO: 139398 - RNA, 19 nt, Artificial Sequence
  Description of Artificial Sequence: Synthetic oligonucleotide
gcagccaucugaaugaaug

SEQ ID NO: 139399 - RNA, 19 nt, Artificial Sequence
  Description of Artificial Sequence: Synthetic oligonucleotide
ucaucgguagcagcaggag

SEQ ID NO: 139400 - RNA, 19 nt, Artificial Sequence
  Description of Artificial Sequence: Synthetic oligonucleotide
uccuggcggugcaagaaca

SEQ ID NO: 139401 - RNA, 19 nt, Artificial Sequence
  Description of Artificial Sequence: Synthetic oligonucleotide
gguaacgccaccauaguuc

SEQ ID NO: 139402 - RNA, 19 nt, Artificial Sequence
  Description of Artificial Sequence: Synthetic oligonucleotide
caucgguagcagcaggagc

SEQ ID NO: 139403 - RNA, 19 nt, Artificial Sequence
  Description of Artificial Sequence: Synthetic oligonucleotide
ggcacuaaaccuucaccag

SEQ ID NO: 139404 - RNA, 19 nt, Artificial Sequence
  Description of Artificial Sequence: Synthetic oligonucleotide
uuuuccgcauggacggcac

SEQ ID NO: 139405 - RNA, 19 nt, Artificial Sequence
  Description of Artificial Sequence: Synthetic oligonucleotide
gguaaucacauuaagccaa

SEQ ID NO: 139406 - RNA, 19 nt, Artificial Sequence
  Description of Artificial Sequence: Synthetic oligonucleotide
caucucguacaucgguggg

SEQ ID NO: 139407 - RNA, 19 nt, Artificial Sequence
  Description of Artificial Sequence: Synthetic oligonucleotide
aaccaaaugcccgucuuua

SEQ ID NO: 139408 - RNA, 19 nt, Artificial Sequence
  Description of Artificial Sequence: Synthetic oligonucleotide
gaaagugcuuugaaaugga

SEQ ID NO: 139409 - RNA, 19 nt, Artificial Sequence
  Description of Artificial Sequence: Synthetic oligonucleotide
cuaugacauuaguaaaaca

SEQ ID NO: 139410 - RNA, 19 nt, Artificial Sequence
  Description of Artificial Sequence: Synthetic oligonucleotide
agggaauuuggaggccugc

SEQ ID NO: 139411 - RNA, 19 nt, Artificial Sequence
  Description of Artificial Sequence: Synthetic oligonucleotide
uguuugaaucaagggagau

SEQ ID NO: 139412 - RNA, 19 nt, Artificial Sequence
  Description of Artificial Sequence: Synthetic oligonucleotide
uaucucuaucucucucucu

SEQ ID NO: 139413 - RNA, 19 nt, Artificial Sequence
  Description of Artificial Sequence: Synthetic oligonucleotide
caugcuugcggaugaucug

SEQ ID NO: 139414 - RNA, 19 nt, Artificial Sequence
  Description of Artificial Sequence: Synthetic oligonucleotide
ucguacaucggugggugug

SEQ ID NO: 139415 - RNA, 19 nt, Artificial Sequence
  Description of Artificial Sequence: Synthetic oligonucleotide
uggaggugaccauuuuggu

SEQ ID NO: 139416 - RNA, 19 nt, Artificial Sequence
  Description of Artificial Sequence: Synthetic oligonucleotide
guuugaaucaagggagauc

SEQ ID NO: 139417 - RNA, 19 nt, Artificial Sequence
  Description of Artificial Sequence: Synthetic oligonucleotide
gcgaaaacaaugugaaaga

SEQ ID NO: 139418 - RNA, 19 nt, Artificial Sequence
  Description of Artificial Sequence: Synthetic oligonucleotide
aaggaucccuuaaacuccu

SEQ ID NO: 139419 - RNA, 19 nt, Artificial Sequence
  Description of Artificial Sequence: Synthetic oligonucleotide
acauuaagccaaaauugau

SEQ ID NO: 139420 - RNA, 19 nt, Artificial Sequence
  Description of Artificial Sequence: Synthetic oligonucleotide
cuguaugaaagacuuuaaa

SEQ ID NO: 139421 - RNA, 19 nt, Artificial Sequence
  Description of Artificial Sequence: Synthetic oligonucleotide
ccccuuacccauaaaagac

SEQ ID NO: 139422 - RNA, 19 nt, Artificial Sequence
  Description of Artificial Sequence: Synthetic oligonucleotide
guagccuuaaguauaaauu

SEQ ID NO: 139423 - RNA, 19 nt, Artificial Sequence
  Description of Artificial Sequence: Synthetic oligonucleotide
gguggcacccgccugcccg

SEQ ID NO: 139424 - RNA, 19 nt, Artificial Sequence
  Description of Artificial Sequence: Synthetic oligonucleotide
cauuaggagcaccccgggc

SEQ ID NO: 139425 - RNA, 19 nt, Artificial Sequence
  Description of Artificial Sequence: Synthetic oligonucleotide
gaccgaaagugcuuugaaa

SEQ ID NO: 139426 - RNA, 19 nt, Artificial Sequence
  Description of Artificial Sequence: Synthetic oligonucleotide
gaaugauuuggaacacgga

SEQ ID NO: 139427 - RNA, 19 nt, Artificial Sequence
  Description of Artificial Sequence: Synthetic oligonucleotide
gagacaggaaacgguccag

SEQ ID NO: 139428 - RNA, 19 nt, Artificial Sequence
  Description of Artificial Sequence: Synthetic oligonucleotide
agcuagcuagggaauuugg

SEQ ID NO: 139429 - RNA, 19 nt, Artificial Sequence
  Description of Artificial Sequence: Synthetic oligonucleotide
cuccaaccauuccaucagg

SEQ ID NO: 139430 - RNA, 19 nt, Artificial Sequence
  Description of Artificial Sequence: Synthetic oligonucleotide
agguguauguuugaaucaa

SEQ ID NO: 139431 - RNA, 19 nt, Artificial Sequence
  Description of Artificial Sequence: Synthetic oligonucleotide
ccagaaauacacaaaccca

SEQ ID NO: 139432 - RNA, 19 nt, Artificial Sequence
  Description of Artificial Sequence: Synthetic oligonucleotide
uugaaucaagggagaucac

SEQ ID NO: 139433 - RNA, 19 nt, Artificial Sequence
  Description of Artificial Sequence: Synthetic oligonucleotide
gaaaucguggggagucaug

SEQ ID NO: 139434 - RNA, 19 nt, Artificial Sequence
  Description of Artificial Sequence: Synthetic oligonucleotide
gaaucaagggagaucacau

SEQ ID NO: 139435 - RNA, 19 nt, Artificial Sequence
  Description of Artificial Sequence: Synthetic oligonucleotide
ggugaaacaugagguauug

SEQ ID NO: 139436 - RNA, 19 nt, Artificial Sequence
  Description of Artificial Sequence: Synthetic oligonucleotide
uuagcacaaugcuguaauu

SEQ ID NO: 139437 - RNA, 19 nt, Artificial Sequence
  Description of Artificial Sequence: Synthetic oligonucleotide
acacgaaagaaaagcugug

SEQ ID NO: 139438 - RNA, 19 nt, Artificial Sequence
  Description of Artificial Sequence: Synthetic oligonucleotide
cuagagagcuuucagguau

SEQ ID NO: 139439 - RNA, 19 nt, Artificial Sequence
  Description of Artificial Sequence: Synthetic oligonucleotide
acacaagucugguucugaa

SEQ ID NO: 139440 - RNA, 19 nt, Artificial Sequence
  Description of Artificial Sequence: Synthetic oligonucleotide
augggcaaccuuuccaaua

SEQ ID NO: 139441 - RNA, 19 nt, Artificial Sequence
  Description of Artificial Sequence: Synthetic oligonucleotide
cuaggugaaacaugaggua

SEQ ID NO: 139442 - RNA, 19 nt, Artificial Sequence
  Description of Artificial Sequence: Synthetic oligonucleotide
aaagugcguugugcgguag

SEQ ID NO: 139443 - RNA, 19 nt, Artificial Sequence
  Description of Artificial Sequence: Synthetic oligonucleotide
uaagacacggagggcgcgc

SEQ ID NO: 139444 - RNA, 19 nt, Artificial Sequence
  Description of Artificial Sequence: Synthetic oligonucleotide
agcgucucuuuaaacagga

SEQ ID NO: 139445 - RNA, 19 nt, Artificial Sequence
  Description of Artificial Sequence: Synthetic oligonucleotide
cccuuacccauaaaagacc

SEQ ID NO: 139446 - RNA, 19 nt, Artificial Sequence
  Description of Artificial Sequence: Synthetic oligonucleotide
ggguuuaaccugaugugag

SEQ ID NO: 139447 - RNA, 19 nt, Artificial Sequence
  Description of Artificial Sequence: Synthetic oligonucleotide
gcuacuagcccuacugugc

SEQ ID NO: 139448 - RNA, 19 nt, Artificial Sequence
  Description of Artificial Sequence: Synthetic oligonucleotide
ggccggauagaguugucag

SEQ ID NO: 139449 - RNA, 19 nt, Artificial Sequence
  Description of Artificial Sequence: Synthetic oligonucleotide
cacggagaaggaaaacaca

SEQ ID NO: 139450 - RNA, 19 nt, Artificial Sequence
  Description of Artificial Sequence: Synthetic oligonucleotide
cguccucucuccuaaauag

SEQ ID NO: 139451 - RNA, 19 nt, Artificial Sequence
  Description of Artificial Sequence: Synthetic oligonucleotide
cagcgguaaucacauuaag

SEQ ID NO: 139452 - RNA, 19 nt, Artificial Sequence
  Description of Artificial Sequence: Synthetic oligonucleotide
ccagcuagcugaccgaaag

SEQ ID NO: 139453 - RNA, 19 nt, Artificial Sequence
  Description of Artificial Sequence: Synthetic oligonucleotide
caucggugggugugcaggc

SEQ ID NO: 139454 - RNA, 19 nt, Artificial Sequence
  Description of Artificial Sequence: Synthetic oligonucleotide
agccccuucaaagccuuuc

SEQ ID NO: 139455 - RNA, 19 nt, Artificial Sequence
  Description of Artificial Sequence: Synthetic oligonucleotide
ggugcaagaacagagcucu

SEQ ID NO: 139456 - RNA, 19 nt, Artificial Sequence
  Description of Artificial Sequence: Synthetic oligonucleotide
gacggcacaaucucccucu

SEQ ID NO: 139457 - RNA, 19 nt, Artificial Sequence
  Description of Artificial Sequence: Synthetic oligonucleotide
cacacacgaaagaaaagcu

SEQ ID NO: 139458 - RNA, 19 nt, Artificial Sequence
  Description of Artificial Sequence: Synthetic oligonucleotide
auuuuccgcauggacggca

SEQ ID NO: 139459 - RNA, 19 nt, Artificial Sequence
  Description of Artificial Sequence: Synthetic oligonucleotide
cuccaauggggccguuugg

SEQ ID NO: 139460 - RNA, 19 nt, Artificial Sequence
  Description of Artificial Sequence: Synthetic oligonucleotide
cuacuagcccuacugugca

SEQ ID NO: 139461 - RNA, 19 nt, Artificial Sequence
  Description of Artificial Sequence: Synthetic oligonucleotide
gccaaaauugaucacaauu

SEQ ID NO: 139462 - RNA, 19 nt, Artificial Sequence
  Description of Artificial Sequence: Synthetic oligonucleotide
uacuagcccuacugugcag

SEQ ID NO: 139463 - RNA, 19 nt, Artificial Sequence
  Description of Artificial Sequence: Synthetic oligonucleotide
ugggccucaaggguccugc

SEQ ID NO: 139464 - RNA, 19 nt, Artificial Sequence
  Description of Artificial Sequence: Synthetic oligonucleotide
cacacuugauuacucugga

SEQ ID NO: 139465 - RNA, 19 nt, Artificial Sequence
  Description of Artificial Sequence: Synthetic oligonucleotide
cuucacgucuguggcacag

SEQ ID NO: 139466 - RNA, 19 nt, Artificial Sequence
  Description of Artificial Sequence: Synthetic oligonucleotide
uuggaacacggagaaggaa

SEQ ID NO: 139467 - RNA, 19 nt, Artificial Sequence
  Description of Artificial Sequence: Synthetic oligonucleotide
ugucccgacugcugugaug

SEQ ID NO: 139468 - RNA, 19 nt, Artificial Sequence
  Description of Artificial Sequence: Synthetic oligonucleotide
aguguucgaugaaaucgug

SEQ ID NO: 139469 - RNA, 19 nt, Artificial Sequence
  Description of Artificial Sequence: Synthetic oligonucleotide
agguaacgccaccauaguu

SEQ ID NO: 139470 - RNA, 19 nt, Artificial Sequence
  Description of Artificial Sequence: Synthetic oligonucleotide
gacuccguggacccaccac

SEQ ID NO: 139471 - RNA, 19 nt, Artificial Sequence
  Description of Artificial Sequence: Synthetic oligonucleotide
auguuugaaucaagggaga

SEQ ID NO: 139472 - RNA, 19 nt, Artificial Sequence
  Description of Artificial Sequence: Synthetic oligonucleotide
ggaauccaacucauuuggg

SEQ ID NO: 139473 - RNA, 19 nt, Artificial Sequence
  Description of Artificial Sequence: Synthetic oligonucleotide
gcuaggugaaacaugaggu

SEQ ID NO: 139474 - RNA, 19 nt, Artificial Sequence
  Description of Artificial Sequence: Synthetic oligonucleotide
gcagcggcaagaaugugcc

SEQ ID NO: 139475 - RNA, 19 nt, Artificial Sequence
  Description of Artificial Sequence: Synthetic oligonucleotide
cuacuuccaaacacuagcu

SEQ ID NO: 139476 - RNA, 19 nt, Artificial Sequence
  Description of Artificial Sequence: Synthetic oligonucleotide
gcuggaggugaccauuuug

SEQ ID NO: 139477 - RNA, 19 nt, Artificial Sequence
  Description of Artificial Sequence: Synthetic oligonucleotide
gcagcgaaaacaaugugaa

SEQ ID NO: 139478 - RNA, 19 nt, Artificial Sequence
  Description of Artificial Sequence: Synthetic oligonucleotide
ccgaaagugcuuugaaaug

SEQ ID NO: 139479 - RNA, 19 nt, Artificial Sequence
  Description of Artificial Sequence: Synthetic oligonucleotide
gguguauguuugaaucaag

SEQ ID NO: 139480 - RNA, 19 nt, Artificial Sequence
  Description of Artificial Sequence: Synthetic oligonucleotide
gcaccggagacucagaacu

SEQ ID NO: 139481 - RNA, 19 nt, Artificial Sequence
  Description of Artificial Sequence: Synthetic oligonucleotide
cagguauacgaauuaccua

SEQ ID NO: 139482 - RNA, 19 nt, Artificial Sequence
  Description of Artificial Sequence: Synthetic oligonucleotide
uuguuggaauacagcggua

SEQ ID NO: 139483 - RNA, 19 nt, Artificial Sequence
  Description of Artificial Sequence: Synthetic oligonucleotide
augcaccggagacucagaa

SEQ ID NO: 139484 - RNA, 19 nt, Artificial Sequence
  Description of Artificial Sequence: Synthetic oligonucleotide
gaugcucuaugucccagau

SEQ ID NO: 139485 - RNA, 19 nt, Artificial Sequence
  Description of Artificial Sequence: Synthetic oligonucleotide
gacacaagucugguucuga

SEQ ID NO: 139486 - RNA, 19 nt, Artificial Sequence
  Description of Artificial Sequence: Synthetic oligonucleotide
aucucguacaucggugggu

SEQ ID NO: 139487 - RNA, 19 nt, Artificial Sequence
  Description of Artificial Sequence: Synthetic oligonucleotide
agucugguucugaacgucu

SEQ ID NO: 139488 - RNA, 19 nt, Artificial Sequence
  Description of Artificial Sequence: Synthetic oligonucleotide
acgcuggucacauguccgu

SEQ ID NO: 139489 - RNA, 19 nt, Artificial Sequence
  Description of Artificial Sequence: Synthetic oligonucleotide
uuuccgcauggacggcaca

SEQ ID NO: 139490 - RNA, 19 nt, Artificial Sequence
  Description of Artificial Sequence: Synthetic oligonucleotide
gaaagugcguugugcggua

SEQ ID NO: 139491 - RNA, 19 nt, Artificial Sequence
  Description of Artificial Sequence: Synthetic oligonucleotide
cauguccgugcugggaagc

SEQ ID NO: 139492 - RNA, 19 nt, Artificial Sequence
  Description of Artificial Sequence: Synthetic oligonucleotide
aagcgacacaagucugguu

SEQ ID NO: 139493 - RNA, 19 nt, Artificial Sequence
  Description of Artificial Sequence: Synthetic oligonucleotide
gauuuuccgcauggacggc

SEQ ID NO: 139494 - RNA, 19 nt, Artificial Sequence
  Description of Artificial Sequence: Synthetic oligonucleotide
uaggcccgugcauggcuag

SEQ ID NO: 139495 - RNA, 19 nt, Artificial Sequence
  Description of Artificial Sequence: Synthetic oligonucleotide
ccuuacccauaaaagacca

SEQ ID NO: 139496 - RNA, 19 nt, Artificial Sequence
  Description of Artificial Sequence: Synthetic oligonucleotide
uuccgcauggacggcacaa

SEQ ID NO: 139497 - RNA, 19 nt, Artificial Sequence
  Description of Artificial Sequence: Synthetic oligonucleotide
gguuuggcagcuagcuagg

SEQ ID NO: 139498 - RNA, 19 nt, Artificial Sequence
  Description of Artificial Sequence: Synthetic oligonucleotide
ucccucgcguccucucucc

SEQ ID NO: 139499 - RNA, 19 nt, Artificial Sequence
  Description of Artificial Sequence: Synthetic oligonucleotide
guugugcgguagcaggaca

SEQ ID NO: 139500 - RNA, 19 nt, Artificial Sequence
  Description of Artificial Sequence: Synthetic oligonucleotide
gucugcgcaugcuugcgga

SEQ ID NO: 139501 - RNA, 19 nt, Artificial Sequence
  Description of Artificial Sequence: Synthetic oligonucleotide
uguccgugcugggaagcgc

SEQ ID NO: 139502 - RNA, 19 nt, Artificial Sequence
  Description of Artificial Sequence: Synthetic oligonucleotide
ggauagaguugucagugua

SEQ ID NO: 139503 - RNA, 19 nt, Artificial Sequence
  Description of Artificial Sequence: Synthetic oligonucleotide
gcuagcugaccgaaagugc

SEQ ID NO: 139504 - RNA, 19 nt, Artificial Sequence
  Description of Artificial Sequence: Synthetic oligonucleotide
ucgggccggauagaguugu

SEQ ID NO: 139505 - RNA, 19 nt, Artificial Sequence
  Description of Artificial Sequence: Synthetic oligonucleotide
cucucucuagagagcuuuc

SEQ ID NO: 139506 - RNA, 19 nt, Artificial Sequence
  Description of Artificial Sequence: Synthetic oligonucleotide
guauugugaacaggaaccu

SEQ ID NO: 139507 - RNA, 19 nt, Artificial Sequence
  Description of Artificial Sequence: Synthetic oligonucleotide
caccggagacucagaacug

SEQ ID NO: 139508 - RNA, 19 nt, Artificial Sequence
  Description of Artificial Sequence: Synthetic oligonucleotide
guaaucacauuaagccaaa

SEQ ID NO: 139509 - RNA, 19 nt, Artificial Sequence
  Description of Artificial Sequence: Synthetic oligonucleotide
uucccucgcguccucucuc

SEQ ID NO: 139510 - RNA, 19 nt, Artificial Sequence
  Description of Artificial Sequence: Synthetic oligonucleotide
ggucugcgcaugcuugcgg

SEQ ID NO: 139511 - RNA, 19 nt, Artificial Sequence
  Description of Artificial Sequence: Synthetic oligonucleotide
aucgcggguugccacuccu

SEQ ID NO: 139512 - RNA, 19 nt, Artificial Sequence
  Description of Artificial Sequence: Synthetic oligonucleotide
augaaaucguggggaguca

SEQ ID NO: 139513 - RNA, 19 nt, Artificial Sequence
  Description of Artificial Sequence: Synthetic oligonucleotide
cuuacccauaaaagaccaa

SEQ ID NO: 139514 - RNA, 19 nt, Artificial Sequence
  Description of Artificial Sequence: Synthetic oligonucleotide
ucugcgcaugcuugcggau

SEQ ID NO: 139515 - RNA, 19 nt, Artificial Sequence
  Description of Artificial Sequence: Synthetic oligonucleotide
ugcccgguucagaugccuc

SEQ ID NO: 139516 - RNA, 19 nt, Artificial Sequence
  Description of Artificial Sequence: Synthetic oligonucleotide
agaaugugccggaauccaa

SEQ ID NO: 139517 - RNA, 19 nt, Artificial Sequence
  Description of Artificial Sequence: Synthetic oligonucleotide
aggugaaacaugagguauu

SEQ ID NO: 139518 - RNA, 19 nt, Artificial Sequence
  Description of Artificial Sequence: Synthetic oligonucleotide
gaccaccugccugcuaggc

SEQ ID NO: 139519 - RNA, 19 nt, Artificial Sequence
  Description of Artificial Sequence: Synthetic oligonucleotide
ggguuggaaaugaacuuca

SEQ ID NO: 139520 - RNA, 19 nt, Artificial Sequence
  Description of Artificial Sequence: Synthetic oligonucleotide
gagggcggguuggaaauga

SEQ ID NO: 139521 - RNA, 19 nt, Artificial Sequence
  Description of Artificial Sequence: Synthetic oligonucleotide
uaacgccaccauaguuccu

SEQ ID NO: 139522 - RNA, 19 nt, Artificial Sequence
  Description of Artificial Sequence: Synthetic oligonucleotide
guugucccgacugcuguga

SEQ ID NO: 139523 - RNA, 19 nt, Artificial Sequence
  Description of Artificial Sequence: Synthetic oligonucleotide
cugaccgaaagugcuuuga

SEQ ID NO: 139524 - RNA, 19 nt, Artificial Sequence
  Description of Artificial Sequence: Synthetic oligonucleotide
caccauggagggcggguug

SEQ ID NO: 139525 - RNA, 19 nt, Artificial Sequence
  Description of Artificial Sequence: Synthetic oligonucleotide
agcugaccgaaagugcuuu

SEQ ID NO: 139526 - RNA, 19 nt, Artificial Sequence
  Description of Artificial Sequence: Synthetic oligonucleotide
gcggguugccacuccuugg

SEQ ID NO: 139527 - RNA, 19 nt, Artificial Sequence
  Description of Artificial Sequence: Synthetic oligonucleotide
gcuagcuagggaauuugga

SEQ ID NO: 139528 - RNA, 19 nt, Artificial Sequence
  Description of Artificial Sequence: Synthetic oligonucleotide
gggcagacuccguggaccc

SEQ ID NO: 139529 - RNA, 19 nt, Artificial Sequence
  Description of Artificial Sequence: Synthetic oligonucleotide
ggcggguuggaaaugaacu

SEQ ID NO: 139530 - RNA, 19 nt, Artificial Sequence
  Description of Artificial Sequence: Synthetic oligonucleotide
cugcgcaugcuugcggaug

SEQ ID NO: 139531 - RNA, 19 nt, Artificial Sequence
  Description of Artificial Sequence: Synthetic oligonucleotide
gguuuaaccugaugugagu

SEQ ID NO: 139532 - RNA, 19 nt, Artificial Sequence
  Description of Artificial Sequence: Synthetic oligonucleotide
cucgggccggauagaguug

SEQ ID NO: 139533 - RNA, 19 nt, Artificial Sequence
  Description of Artificial Sequence: Synthetic oligonucleotide
agacuccguggacccacca

SEQ ID NO: 139534 - RNA, 19 nt, Artificial Sequence
  Description of Artificial Sequence: Synthetic oligonucleotide
caaacccaaccuggccacc

SEQ ID NO: 139535 - RNA, 19 nt, Artificial Sequence
  Description of Artificial Sequence: Synthetic oligonucleotide
gugcguugugcgguagcag

SEQ ID NO: 139536 - RNA, 19 nt, Artificial Sequence
  Description of Artificial Sequence: Synthetic oligonucleotide
caguccgggucacacuuga

SEQ ID NO: 139537 - RNA, 19 nt, Artificial Sequence
  Description of Artificial Sequence: Synthetic oligonucleotide
ucaucgcggguugccacuc

SEQ ID NO: 139538 - RNA, 19 nt, Artificial Sequence
  Description of Artificial Sequence: Synthetic oligonucleotide
cuccguggacccaccacca

SEQ ID NO: 139539 - RNA, 19 nt, Artificial Sequence
  Description of Artificial Sequence: Synthetic oligonucleotide
ucccuacccuccacacuuc

SEQ ID NO: 139540 - RNA, 19 nt, Artificial Sequence
  Description of Artificial Sequence: Synthetic oligonucleotide
ccaaaggaucccuuaaacu

SEQ ID NO: 139541 - RNA, 19 nt, Artificial Sequence
  Description of Artificial Sequence: Synthetic oligonucleotide
ggaagcgccaugguauguc

SEQ ID NO: 139542 - RNA, 19 nt, Artificial Sequence
  Description of Artificial Sequence: Synthetic oligonucleotide
gaugcaccggagacucaga

SEQ ID NO: 139543 - RNA, 19 nt, Artificial Sequence
  Description of Artificial Sequence: Synthetic oligonucleotide
cuagggaauuuggaggccu

SEQ ID NO: 139544 - RNA, 19 nt, Artificial Sequence
  Description of Artificial Sequence: Synthetic oligonucleotide
cgguaaucacauuaagcca

SEQ ID NO: 139545 - RNA, 19 nt, Artificial Sequence
  Description of Artificial Sequence: Synthetic oligonucleotide
ugucuggaccacgcugguc

SEQ ID NO: 139546 - RNA, 19 nt, Artificial Sequence
  Description of Artificial Sequence: Synthetic oligonucleotide
cagcgaaaacaaugugaaa

SEQ ID NO: 139547 - RNA, 19 nt, Artificial Sequence
  Description of Artificial Sequence: Synthetic oligonucleotide
ugccggaauccaacucauu

SEQ ID NO: 139548 - RNA, 19 nt, Artificial Sequence
  Description of Artificial Sequence: Synthetic oligonucleotide
gcgccaugguaugucaacc

SEQ ID NO: 139549 - RNA, 19 nt, Artificial Sequence
  Description of Artificial Sequence: Synthetic oligonucleotide
gcugaccgaaagugcuuug

SEQ ID NO: 139550 - RNA, 19 nt, Artificial Sequence
  Description of Artificial Sequence: Synthetic oligonucleotide
ggcgcggaggcaguccggg

SEQ ID NO: 139551 - RNA, 19 nt, Artificial Sequence
  Description of Artificial Sequence: Synthetic oligonucleotide
aggaaacgguccagguagu

SEQ ID NO: 139552 - RNA, 19 nt, Artificial Sequence
  Description of Artificial Sequence: Synthetic oligonucleotide
ccgggucacacuugauuac

SEQ ID NO: 139553 - RNA, 19 nt, Artificial Sequence
  Description of Artificial Sequence: Synthetic oligonucleotide
caaugaugcaccggagacu

SEQ ID NO: 139554 - RNA, 19 nt, Artificial Sequence
  Description of Artificial Sequence: Synthetic oligonucleotide
ugauuccuccgggcccagc

SEQ ID NO: 139555 - RNA, 19 nt, Artificial Sequence
  Description of Artificial Sequence: Synthetic oligonucleotide
aggaucccuuaaacuccuc

SEQ ID NO: 139556 - RNA, 19 nt, Artificial Sequence
  Description of Artificial Sequence: Synthetic oligonucleotide
ccuccuguaugaaagacuu

SEQ ID NO: 139557 - RNA, 19 nt, Artificial Sequence
  Description of Artificial Sequence: Synthetic oligonucleotide
gcggugcaagaacagagcu

SEQ ID NO: 139558 - RNA, 19 nt, Artificial Sequence
  Description of Artificial Sequence: Synthetic oligonucleotide
auacagcgguaaucacauu

SEQ ID NO: 139559 - RNA, 19 nt, Artificial Sequence
  Description of Artificial Sequence: Synthetic oligonucleotide
gguauacgaauuaccuacu

SEQ ID NO: 139560 - RNA, 19 nt, Artificial Sequence
  Description of Artificial Sequence: Synthetic oligonucleotide
ucgcggguugccacuccuu

SEQ ID NO: 139561 - RNA, 19 nt, Artificial Sequence
  Description of Artificial Sequence: Synthetic oligonucleotide
ccucaucgcggguugccac

SEQ ID NO: 139562 - RNA, 19 nt, Artificial Sequence
  Description of Artificial Sequence: Synthetic oligonucleotide
ggcagucuaugacauuagu

SEQ ID NO: 139563 - RNA, 19 nt, Artificial Sequence
  Description of Artificial Sequence: Synthetic oligonucleotide
ucugaacgucugggaugug

SEQ ID NO: 139564 - RNA, 19 nt, Artificial Sequence
  Description of Artificial Sequence: Synthetic oligonucleotide
gggagaucacauugcuuua

SEQ ID NO: 139565 - RNA, 19 nt, Artificial Sequence
  Description of Artificial Sequence: Synthetic oligonucleotide
guacaucggugggugugca

SEQ ID NO: 139566 - RNA, 19 nt, Artificial Sequence
  Description of Artificial Sequence: Synthetic oligonucleotide
cgucaucgguagcagcagg

SEQ ID NO: 139567 - RNA, 19 nt, Artificial Sequence
  Description of Artificial Sequence: Synthetic oligonucleotide
caauggggccguuuggguu

SEQ ID NO: 139568 - RNA, 19 nt, Artificial Sequence
  Description of Artificial Sequence: Synthetic oligonucleotide
gggcggguuggaaaugaac

SEQ ID NO: 139569 - RNA, 19 nt, Artificial Sequence
  Description of Artificial Sequence: Synthetic oligonucleotide
gguaguuguuggggcugcc

SEQ ID NO: 139570 - RNA, 19 nt, Artificial Sequence
  Description of Artificial Sequence: Synthetic oligonucleotide
cguacaucggugggugugc

SEQ ID NO: 139571 - RNA, 19 nt, Artificial Sequence
  Description of Artificial Sequence: Synthetic oligonucleotide
ggcaaccuuuccaauaaau

SEQ ID NO: 139572 - RNA, 19 nt, Artificial Sequence
  Description of Artificial Sequence: Synthetic oligonucleotide
gugaaacaugagguauugu

SEQ ID NO: 139573 - RNA, 19 nt, Artificial Sequence
  Description of Artificial Sequence: Synthetic oligonucleotide
ggggcgucaucgguagcag

SEQ ID NO: 139574 - RNA, 19 nt, Artificial Sequence
  Description of Artificial Sequence: Synthetic oligonucleotide
ccucucuccuaaauagaaa

SEQ ID NO: 139575 - RNA, 19 nt, Artificial Sequence
  Description of Artificial Sequence: Synthetic oligonucleotide
gcccgguucagaugccuca

SEQ ID NO: 139576 - RNA, 19 nt, Artificial Sequence
  Description of Artificial Sequence: Synthetic oligonucleotide
cagguaacgccaccauagu

SEQ ID NO: 139577 - RNA, 19 nt, Artificial Sequence
  Description of Artificial Sequence: Synthetic oligonucleotide
gcggccagguuccacuuaa

SEQ ID NO: 139578 - RNA, 19 nt, Artificial Sequence
  Description of Artificial Sequence: Synthetic oligonucleotide
cccgguggcucucagaugu

SEQ ID NO: 139579 - RNA, 19 nt, Artificial Sequence
  Description of Artificial Sequence: Synthetic oligonucleotide
cuccagcuagcugaccgaa

SEQ ID NO: 139580 - RNA, 19 nt, Artificial Sequence
  Description of Artificial Sequence: Synthetic oligonucleotide
auggggccguuuggguuug

SEQ ID NO: 139581 - RNA, 19 nt, Artificial Sequence
  Description of Artificial Sequence: Synthetic oligonucleotide
cguggggagucauggcggc

SEQ ID NO: 139582 - RNA, 19 nt, Artificial Sequence
  Description of Artificial Sequence: Synthetic oligonucleotide
cccgugcauggcuagguga

SEQ ID NO: 139583 - RNA, 19 nt, Artificial Sequence
  Description of Artificial Sequence: Synthetic oligonucleotide
ucgcguccucucuccuaaa

SEQ ID NO: 139584 - RNA, 19 nt, Artificial Sequence
  Description of Artificial Sequence: Synthetic oligonucleotide
ccgcauggacggcacaauc

SEQ ID NO: 139585 - RNA, 19 nt, Artificial Sequence
  Description of Artificial Sequence: Synthetic oligonucleotide
gggccggauagaguuguca

SEQ ID NO: 139586 - RNA, 19 nt, Artificial Sequence
  Description of Artificial Sequence: Synthetic oligonucleotide
ccgugcauggcuaggugaa

SEQ ID NO: 139587 - RNA, 19 nt, Artificial Sequence
  Description of Artificial Sequence: Synthetic oligonucleotide
cagcuagcugaccgaaagu

SEQ ID NO: 139588 - RNA, 19 nt, Artificial Sequence
  Description of Artificial Sequence: Synthetic oligonucleotide
gcccgugcauggcuaggug

SEQ ID NO: 139589 - RNA, 19 nt, Artificial Sequence
  Description of Artificial Sequence: Synthetic oligonucleotide
ggagaucacauugcuuuau

SEQ ID NO: 139590 - RNA, 19 nt, Artificial Sequence
  Description of Artificial Sequence: Synthetic oligonucleotide
caagcaccccaugcuacua

SEQ ID NO: 139591 - RNA, 19 nt, Artificial Sequence
  Description of Artificial Sequence: Synthetic oligonucleotide
ccauuccaucaggaacucc

SEQ ID NO: 139592 - RNA, 19 nt, Artificial Sequence
  Description of Artificial Sequence: Synthetic oligonucleotide
ggagggcggguuggaaaug

SEQ ID NO: 139593 - RNA, 19 nt, Artificial Sequence
  Description of Artificial Sequence: Synthetic oligonucleotide
gcggguuggaaaugaacuu

SEQ ID NO: 139594 - RNA, 19 nt, Artificial Sequence
  Description of Artificial Sequence: Synthetic oligonucleotide
aggcgcggaggcaguccgg

SEQ ID NO: 139595 - RNA, 19 nt, Artificial Sequence
  Description of Artificial Sequence: Synthetic oligonucleotide
gcguugugcgguagcagga

SEQ ID NO: 139596 - RNA, 19 nt, Artificial Sequence
  Description of Artificial Sequence: Synthetic oligonucleotide
acgcucccggcagccacca

SEQ ID NO: 139597 - RNA, 19 nt, Artificial Sequence
  Description of Artificial Sequence: Synthetic oligonucleotide
agggcggguuggaaaugaa

SEQ ID NO: 139598 - RNA, 19 nt, Artificial Sequence
  Description of Artificial Sequence: Synthetic oligonucleotide
ccgccucuggcauuuugga

SEQ ID NO: 139599 - RNA, 19 nt, Artificial Sequence
  Description of Artificial Sequence: Synthetic oligonucleotide
gccuccuguaugaaagacu

SEQ ID NO: 139600 - RNA, 19 nt, Artificial Sequence
  Description of Artificial Sequence: Synthetic oligonucleotide
uggggccguuuggguuugg

SEQ ID NO: 139601 - RNA, 19 nt, Artificial Sequence
  Description of Artificial Sequence: Synthetic oligonucleotide
cgugcugggaagcgccaug

SEQ ID NO: 139602 - RNA, 19 nt, Artificial Sequence
  Description of Artificial Sequence: Synthetic oligonucleotide
ccacaucucguacaucggu

SEQ ID NO: 139603 - RNA, 19 nt, Artificial Sequence
  Description of Artificial Sequence: Synthetic oligonucleotide
cugcccgguggcucucaga

SEQ ID NO: 139604 - RNA, 19 nt, Artificial Sequence
  Description of Artificial Sequence: Synthetic oligonucleotide
cguugugcgguagcaggac

SEQ ID NO: 139605 - RNA, 19 nt, Artificial Sequence
  Description of Artificial Sequence: Synthetic oligonucleotide
ccucgggccggauagaguu

SEQ ID NO: 139606 - RNA, 19 nt, Artificial Sequence
  Description of Artificial Sequence: Synthetic oligonucleotide
gcaguccgggucacacuug

SEQ ID NO: 139607 - RNA, 19 nt, Artificial Sequence
  Description of Artificial Sequence: Synthetic oligonucleotide
ggucccuacccuccacacu

SEQ ID NO: 139608 - RNA, 19 nt, Artificial Sequence
  Description of Artificial Sequence: Synthetic oligonucleotide
ggaccacgcuggucacaug

SEQ ID NO: 139609 - RNA, 19 nt, Artificial Sequence
  Description of Artificial Sequence: Synthetic oligonucleotide
ccacuccuugguggcaccc

SEQ ID NO: 139610 - RNA, 19 nt, Artificial Sequence
  Description of Artificial Sequence: Synthetic oligonucleotide
cucguacaucggugggugu

SEQ ID NO: 139611 - RNA, 19 nt, Artificial Sequence
  Description of Artificial Sequence: Synthetic oligonucleotide
gcccgguggcucucagaug

SEQ ID NO: 139612 - RNA, 19 nt, Artificial Sequence
  Description of Artificial Sequence: Synthetic oligonucleotide
gcgcaggcuggacuccaga

SEQ ID NO: 139613 - RNA, 19 nt, Artificial Sequence
  Description of Artificial Sequence: Synthetic oligonucleotide
cgacacaagucugguucug

SEQ ID NO: 139614 - RNA, 19 nt, Artificial Sequence
  Description of Artificial Sequence: Synthetic oligonucleotide
uggcacccgccugcccggu

SEQ ID NO: 139615 - RNA, 19 nt, Artificial Sequence
  Description of Artificial Sequence: Synthetic oligonucleotide
cccaugcuacuagcccuac

SEQ ID NO: 139616 - RNA, 19 nt, Artificial Sequence
  Description of Artificial Sequence: Synthetic oligonucleotide
ggggccguuuggguuugga

SEQ ID NO: 139617 - RNA, 19 nt, Artificial Sequence
  Description of Artificial Sequence: Synthetic oligonucleotide
cgcaugcuugcggaugauc

SEQ ID NO: 139618 - RNA, 19 nt, Artificial Sequence
  Description of Artificial Sequence: Synthetic oligonucleotide
cugcccgguucagaugccu

SEQ ID NO: 139619 - RNA, 19 nt, Artificial Sequence
  Description of Artificial Sequence: Synthetic oligonucleotide
cucuccaauggggccguuu

SEQ ID NO: 139620 - RNA, 19 nt, Artificial Sequence
  Description of Artificial Sequence: Synthetic oligonucleotide
gggaagcgccaugguaugu

SEQ ID NO: 139621 - RNA, 19 nt, Artificial Sequence
  Description of Artificial Sequence: Synthetic oligonucleotide
ccggagacucagaacugau

SEQ ID NO: 139622 - RNA, 19 nt, Artificial Sequence
  Description of Artificial Sequence: Synthetic oligonucleotide
cccuacugugcagccaucu

SEQ ID NO: 139623 - RNA, 19 nt, Artificial Sequence
  Description of Artificial Sequence: Synthetic oligonucleotide
ccucgcguccucucuccua

SEQ ID NO: 139624 - RNA, 19 nt, Artificial Sequence
  Description of Artificial Sequence: Synthetic oligonucleotide
ccaugcuacuagcccuacu

SEQ ID NO: 139625 - RNA, 19 nt, Artificial Sequence
  Description of Artificial Sequence: Synthetic oligonucleotide
ccccaagagggacaucauu

SEQ ID NO: 139626 - RNA, 19 nt, Artificial Sequence
  Description of Artificial Sequence: Synthetic oligonucleotide
cgggccggauagaguuguc

SEQ ID NO: 139627 - RNA, 19 nt, Artificial Sequence
  Description of Artificial Sequence: Synthetic oligonucleotide
gcccgucuuuauguaguuu

SEQ ID NO: 139628 - RNA, 19 nt, Artificial Sequence
  Description of Artificial Sequence: Synthetic oligonucleotide
cccucgcguccucucuccu

SEQ ID NO: 139629 - RNA, 19 nt, Artificial Sequence
  Description of Artificial Sequence: Synthetic oligonucleotide
gcgcaugcuugcggaugau

SEQ ID NO: 139630 - RNA, 19 nt, Artificial Sequence
  Description of Artificial Sequence: Synthetic oligonucleotide
aagacuaagaaccaaauga

SEQ ID NO: 139631 - RNA, 19 nt, Artificial Sequence
  Description of Artificial Sequence: Synthetic oligonucleotide
uuugcuaacauucauguac

SEQ ID NO: 139632 - RNA, 19 nt, Artificial Sequence
  Description of Artificial Sequence: Synthetic oligonucleotide
acuauauaggcucucauac

SEQ ID NO: 139633 - RNA, 19 nt, Artificial Sequence
  Description of Artificial Sequence: Synthetic oligonucleotide
aacauucccaagcagacac

SEQ ID NO: 139634 - RNA, 19 nt, Artificial Sequence
  Description of Artificial Sequence: Synthetic oligonucleotide
acugauagugcauaguccc

SEQ ID NO: 139635 - RNA, 19 nt, Artificial Sequence
  Description of Artificial Sequence: Synthetic oligonucleotide
ugaaucaauuauuuuaagg

SEQ ID NO: 139636 - RNA, 19 nt, Artificial Sequence
  Description of Artificial Sequence: Synthetic oligonucleotide
auauaacuaagauugaaag

SEQ ID NO: 139637 - RNA, 19 nt, Artificial Sequence
  Description of Artificial Sequence: Synthetic oligonucleotide
uuaugagacaaauuuaacc

SEQ ID NO: 139638 - RNA, 19 nt, Artificial Sequence
  Description of Artificial Sequence: Synthetic oligonucleotide
uuaacuuuaauacuccaca

SEQ ID NO: 139639 - RNA, 19 nt, Artificial Sequence
  Description of Artificial Sequence: Synthetic oligonucleotide
uuaaaauucaguagggcca

SEQ ID NO: 139640 - RNA, 19 nt, Artificial Sequence
  Description of Artificial Sequence: Synthetic oligonucleotide
aacuauaggacuaaccuuc

SEQ ID NO: 139641 - RNA, 19 nt, Artificial Sequence
  Description of Artificial Sequence: Synthetic oligonucleotide
uagggaauaguccaaauca

SEQ ID NO: 139642 - RNA, 19 nt, Artificial Sequence
  Description of Artificial Sequence: Synthetic oligonucleotide
ugcuauaugccacagauaa

SEQ ID NO: 139643 - RNA, 19 nt, Artificial Sequence
  Description of Artificial Sequence: Synthetic oligonucleotide
uuaaccaguuccaagaaac

SEQ ID NO: 139644 - RNA, 19 nt, Artificial Sequence
  Description of Artificial Sequence: Synthetic oligonucleotide
aaagccuuagagauaaugg

SEQ ID NO: 139645 - RNA, 19 nt, Artificial Sequence
  Description of Artificial Sequence: Synthetic oligonucleotide
uacaauucaggguaguuag

SEQ ID NO: 139646 - RNA, 19 nt, Artificial Sequence
  Description of Artificial Sequence: Synthetic oligonucleotide
aacuaagugacugugaagu

SEQ ID NO: 139647 - RNA, 19 nt, Artificial Sequence
  Description of Artificial Sequence: Synthetic oligonucleotide
aacgguuccgagcaggugg

SEQ ID NO: 139648 - RNA, 19 nt, Artificial Sequence
  Description of Artificial Sequence: Synthetic oligonucleotide
ucauuuguuaucuaacaug

SEQ ID NO: 139649 - RNA, 19 nt, Artificial Sequence
  Description of Artificial Sequence: Synthetic oligonucleotide
ugaauauggguugagauca

SEQ ID NO: 139650 - RNA, 19 nt, Artificial Sequence
  Description of Artificial Sequence: Synthetic oligonucleotide
aaucuugugaguugaggag

SEQ ID NO: 139651 - RNA, 19 nt, Artificial Sequence
  Description of Artificial Sequence: Synthetic oligonucleotide
uguauguccaacuucagaa

SEQ ID NO: 139652 - RNA, 19 nt, Artificial Sequence
  Description of Artificial Sequence: Synthetic oligonucleotide
aaagagcggcuauuggucc

SEQ ID NO: 139653 - RNA, 19 nt, Artificial Sequence
  Description of Artificial Sequence: Synthetic oligonucleotide
uaguauagcaucaauacua

SEQ ID NO: 139654 - RNA, 19 nt, Artificial Sequence
  Description of Artificial Sequence: Synthetic oligonucleotide
uauagcaucaauacuacua

SEQ ID NO: 139655 - RNA, 19 nt, Artificial Sequence
  Description of Artificial Sequence: Synthetic oligonucleotide
uuacuagauuacuagaagc

SEQ ID NO: 139656 - RNA, 19 nt, Artificial Sequence
  Description of Artificial Sequence: Synthetic oligonucleotide
cauccaagguuuaagauag

SEQ ID NO: 139657 - RNA, 19 nt, Artificial Sequence
  Description of Artificial Sequence: Synthetic oligonucleotide
aaugaaaacuugucucuag

SEQ ID NO: 139658 - RNA, 19 nt, Artificial Sequence
  Description of Artificial Sequence: Synthetic oligonucleotide
acauacaauacucugagaa

SEQ ID NO: 139659 - RNA, 19 nt, Artificial Sequence
  Description of Artificial Sequence: Synthetic oligonucleotide
ugaauuguuuuccuagugc

SEQ ID NO: 139660 - RNA, 19 nt, Artificial Sequence
  Description of Artificial Sequence: Synthetic oligonucleotide
agcucuaagauuucccgcc

SEQ ID NO: 139661 - RNA, 19 nt, Artificial Sequence
  Description of Artificial Sequence: Synthetic oligonucleotide
uguuuuaccgacuacaguu

SEQ ID NO: 139662 - RNA, 19 nt, Artificial Sequence
  Description of Artificial Sequence: Synthetic oligonucleotide
uuagucuaggcauuuaugu

SEQ ID NO: 139663 - RNA, 19 nt, Artificial Sequence
  Description of Artificial Sequence: Synthetic oligonucleotide
uauuugaaagccuuagaga

SEQ ID NO: 139664 - RNA, 19 nt, Artificial Sequence
  Description of Artificial Sequence: Synthetic oligonucleotide
uuuacuaguuucagcaggc

SEQ ID NO: 139665 - RNA, 19 nt, Artificial Sequence
  Description of Artificial Sequence: Synthetic oligonucleotide
aauuuaaacaugguugccu

SEQ ID NO: 139666 - RNA, 19 nt, Artificial Sequence
  Description of Artificial Sequence: Synthetic oligonucleotide
auaggacuaaccuuccacg

SEQ ID NO: 139667 - RNA, 19 nt, Artificial Sequence
  Description of Artificial Sequence: Synthetic oligonucleotide
uguccuaucaucguaagac

SEQ ID NO: 139668 - RNA, 19 nt, Artificial Sequence
  Description of Artificial Sequence: Synthetic oligonucleotide
cuaaaauacgugcaugagc

SEQ ID NO: 139669 - RNA, 19 nt, Artificial Sequence
  Description of Artificial Sequence: Synthetic oligonucleotide
aaaagagcggcuauugguc

SEQ ID NO: 139670 - RNA, 19 nt, Artificial Sequence
  Description of Artificial Sequence: Synthetic oligonucleotide
ugaagaaacaagcuuggaa

SEQ ID NO: 139671 - RNA, 19 nt, Artificial Sequence
  Description of Artificial Sequence: Synthetic oligonucleotide
uguuacuagauuacuagaa

SEQ ID NO: 139672 - RNA, 19 nt, Artificial Sequence
  Description of Artificial Sequence: Synthetic oligonucleotide
agacuugcgaacaugauuc

SEQ ID NO: 139673 - RNA, 19 nt, Artificial Sequence
  Description of Artificial Sequence: Synthetic oligonucleotide
auagggaauaguccaaauc

SEQ ID NO: 139674 - RNA, 19 nt, Artificial Sequence
  Description of Artificial Sequence: Synthetic oligonucleotide
uuaacagguaagcaugugu

SEQ ID NO: 139675 - RNA, 19 nt, Artificial Sequence
  Description of Artificial Sequence: Synthetic oligonucleotide
acuuuaauacuccacauua

SEQ ID NO: 139676 - RNA, 19 nt, Artificial Sequence
  Description of Artificial Sequence: Synthetic oligonucleotide
uuacugauagugcauaguc

SEQ ID NO: 139677 - RNA, 19 nt, Artificial Sequence
  Description of Artificial Sequence: Synthetic oligonucleotide
uauaggacuaaccuuccac

SEQ ID NO: 139678 - RNA, 19 nt, Artificial Sequence
  Description of Artificial Sequence: Synthetic oligonucleotide
aucccugcugaccaaaagc

SEQ ID NO: 139679 - RNA, 19 nt, Artificial Sequence
  Description of Artificial Sequence: Synthetic oligonucleotide
aaauagggguacaaaacuc

SEQ ID NO: 139680 - RNA, 19 nt, Artificial Sequence
  Description of Artificial Sequence: Synthetic oligonucleotide
aagccuuagagauaaugga

SEQ ID NO: 139681 - RNA, 19 nt, Artificial Sequence
  Description of Artificial Sequence: Synthetic oligonucleotide
uuaugugcuacaugaaucu

SEQ ID NO: 139682 - RNA, 19 nt, Artificial Sequence
  Description of Artificial Sequence: Synthetic oligonucleotide
uacuaaaauacgugcauga

SEQ ID NO: 139683 - RNA, 19 nt, Artificial Sequence
  Description of Artificial Sequence: Synthetic oligonucleotide
aacaauuaagcaaccucac

SEQ ID NO: 139684 - RNA, 19 nt, Artificial Sequence
  Description of Artificial Sequence: Synthetic oligonucleotide
acuacucuguaucacauga

SEQ ID NO: 139685 - RNA, 19 nt, Artificial Sequence
  Description of Artificial Sequence: Synthetic oligonucleotide
uuuaugagacaaauuuaac

SEQ ID NO: 139686 - RNA, 19 nt, Artificial Sequence
  Description of Artificial Sequence: Synthetic oligonucleotide
aaagacccuuaagacaagc

SEQ ID NO: 139687 - RNA, 19 nt, Artificial Sequence
  Description of Artificial Sequence: Synthetic oligonucleotide
uuuuaaggugaucuguccu

SEQ ID NO: 139688 - RNA, 19 nt, Artificial Sequence
  Description of Artificial Sequence: Synthetic oligonucleotide
ucucauuuguuaucuaaca

SEQ ID NO: 139689 - RNA, 19 nt, Artificial Sequence
  Description of Artificial Sequence: Synthetic oligonucleotide
aaaauuagaaugauugguu

SEQ ID NO: 139690 - RNA, 19 nt, Artificial Sequence
  Description of Artificial Sequence: Synthetic oligonucleotide
aacuuucauaaucagugaa

SEQ ID NO: 139691 - RNA, 19 nt, Artificial Sequence
  Description of Artificial Sequence: Synthetic oligonucleotide
agaaauaaucauacauggc

SEQ ID NO: 139692 - RNA, 19 nt, Artificial Sequence
  Description of Artificial Sequence: Synthetic oligonucleotide
ggaaacuacaaauuuugag

SEQ ID NO: 139693 - RNA, 19 nt, Artificial Sequence
  Description of Artificial Sequence: Synthetic oligonucleotide
ugaucagccuucuccaggg

SEQ ID NO: 139694 - RNA, 19 nt, Artificial Sequence
  Description of Artificial Sequence: Synthetic oligonucleotide
aauaacuauauaggcucuc

SEQ ID NO: 139695 - RNA, 19 nt, Artificial Sequence
  Description of Artificial Sequence: Synthetic oligonucleotide
aacuaagauugaaagcuuc

SEQ ID NO: 139696 - RNA, 19 nt, Artificial Sequence
  Description of Artificial Sequence: Synthetic oligonucleotide
uuguuaucuaacaugccaa

SEQ ID NO: 139697 - RNA, 19 nt, Artificial Sequence
  Description of Artificial Sequence: Synthetic oligonucleotide
aguagaauagcacuaggua

SEQ ID NO: 139698 - RNA, 19 nt, Artificial Sequence
  Description of Artificial Sequence: Synthetic oligonucleotide
acuaauggcagacuugcga

SEQ ID NO: 139699 - RNA, 19 nt, Artificial Sequence
  Description of Artificial Sequence: Synthetic oligonucleotide
uagcacuagguaaggaccg

SEQ ID NO: 139700 - RNA, 19 nt, Artificial Sequence
  Description of Artificial Sequence: Synthetic oligonucleotide
uuuuaccgacuacaguuag

SEQ ID NO: 139701 - RNA, 19 nt, Artificial Sequence
  Description of Artificial Sequence: Synthetic oligonucleotide
auuaagcaaccucacaaga

SEQ ID NO: 139702 - RNA, 19 nt, Artificial Sequence
  Description of Artificial Sequence: Synthetic oligonucleotide
acgugaaucaauuauuuua

SEQ ID NO: 139703 - RNA, 19 nt, Artificial Sequence
  Description of Artificial Sequence: Synthetic oligonucleotide
uuaagcaaccucacaagaa

SEQ ID NO: 139704 - RNA, 19 nt, Artificial Sequence
  Description of Artificial Sequence: Synthetic oligonucleotide
ucuuagaacgguuccgagc

SEQ ID NO: 139705 - RNA, 19 nt, Artificial Sequence
  Description of Artificial Sequence: Synthetic oligonucleotide
uugaauauggguugagauc

SEQ ID NO: 139706 - RNA, 19 nt, Artificial Sequence
  Description of Artificial Sequence: Synthetic oligonucleotide
aauagggguacaaaacuca

SEQ ID NO: 139707 - RNA, 19 nt, Artificial Sequence
  Description of Artificial Sequence: Synthetic oligonucleotide
agacccuuaagacaagcug

SEQ ID NO: 139708 - RNA, 19 nt, Artificial Sequence
  Description of Artificial Sequence: Synthetic oligonucleotide
cugaguaaggcucuucggc

SEQ ID NO: 139709 - RNA, 19 nt, Artificial Sequence
  Description of Artificial Sequence: Synthetic oligonucleotide
ucuagucuuugcuuuaggu

SEQ ID NO: 139710 - RNA, 19 nt, Artificial Sequence
  Description of Artificial Sequence: Synthetic oligonucleotide
cuuagaacgguuccgagca

SEQ ID NO: 139711 - RNA, 19 nt, Artificial Sequence
  Description of Artificial Sequence: Synthetic oligonucleotide
aacuuuaauacuccacauu

SEQ ID NO: 139712 - RNA, 19 nt, Artificial Sequence
  Description of Artificial Sequence: Synthetic oligonucleotide
guagaauagcacuagguaa

SEQ ID NO: 139713 - RNA, 19 nt, Artificial Sequence
  Description of Artificial Sequence: Synthetic oligonucleotide
auagugcauagucccagac

SEQ ID NO: 139714 - RNA, 19 nt, Artificial Sequence
  Description of Artificial Sequence: Synthetic oligonucleotide
uagaggaacuaagugacug

SEQ ID NO: 139715 - RNA, 19 nt, Artificial Sequence
  Description of Artificial Sequence: Synthetic oligonucleotide
gaagacgaaaauuaacaua

SEQ ID NO: 139716 - RNA, 19 nt, Artificial Sequence
  Description of Artificial Sequence: Synthetic oligonucleotide
uauacacauugcaaaacua

SEQ ID NO: 139717 - RNA, 19 nt, Artificial Sequence
  Description of Artificial Sequence: Synthetic oligonucleotide
uagucuaggcauuuaugug

SEQ ID NO: 139718 - RNA, 19 nt, Artificial Sequence
  Description of Artificial Sequence: Synthetic oligonucleotide
uuccacgugaaucaauuau

SEQ ID NO: 139719 - RNA, 19 nt, Artificial Sequence
  Description of Artificial Sequence: Synthetic oligonucleotide
ugaaaacuugucucuaguc

SEQ ID NO: 139720 - RNA, 19 nt, Artificial Sequence
  Description of Artificial Sequence: Synthetic oligonucleotide
ugaguaaggcucuucggcu

SEQ ID NO: 139721 - RNA, 19 nt, Artificial Sequence
  Description of Artificial Sequence: Synthetic oligonucleotide
ugaagguuaggcaauuauu

SEQ ID NO: 139722 - RNA, 19 nt, Artificial Sequence
  Description of Artificial Sequence: Synthetic oligonucleotide
gaaaacuugucucuagucu

SEQ ID NO: 139723 - RNA, 19 nt, Artificial Sequence
  Description of Artificial Sequence: Synthetic oligonucleotide
aauagggaauaguccaaau

SEQ ID NO: 139724 - RNA, 19 nt, Artificial Sequence
  Description of Artificial Sequence: Synthetic oligonucleotide
auacaauacucugagaaaa

SEQ ID NO: 139725 - RNA, 19 nt, Artificial Sequence
  Description of Artificial Sequence: Synthetic oligonucleotide
gaagcucaccuccaaauuc

SEQ ID NO: 139726 - RNA, 19 nt, Artificial Sequence
  Description of Artificial Sequence: Synthetic oligonucleotide
gaaaauucaacaagcuaga

SEQ ID NO: 139727 - RNA, 19 nt, Artificial Sequence
  Description of Artificial Sequence: Synthetic oligonucleotide
uacuguugcacugaagaga

SEQ ID NO: 139728 - RNA, 19 nt, Artificial Sequence
  Description of Artificial Sequence: Synthetic oligonucleotide
cauuuugacugaguaaggc

SEQ ID NO: 139729 - RNA, 19 nt, Artificial Sequence
  Description of Artificial Sequence: Synthetic oligonucleotide
cuaaccuuccacgugaauc

SEQ ID NO: 139730 - RNA, 19 nt, Artificial Sequence
  Description of Artificial Sequence: Synthetic oligonucleotide
aucaucguaagacaauuua

SEQ ID NO: 139731 - RNA, 19 nt, Artificial Sequence
  Description of Artificial Sequence: Synthetic oligonucleotide
gaacuaagugacugugaag

SEQ ID NO: 139732 - RNA, 19 nt, Artificial Sequence
  Description of Artificial Sequence: Synthetic oligonucleotide
agcuagaacuauuuacugu

SEQ ID NO: 139733 - RNA, 19 nt, Artificial Sequence
  Description of Artificial Sequence: Synthetic oligonucleotide
auuaauggcaguugaggua

SEQ ID NO: 139734 - RNA, 19 nt, Artificial Sequence
  Description of Artificial Sequence: Synthetic oligonucleotide
uuagauguccuaucaucgu

SEQ ID NO: 139735 - RNA, 19 nt, Artificial Sequence
  Description of Artificial Sequence: Synthetic oligonucleotide
uccuaucaucguaagacaa

SEQ ID NO: 139736 - RNA, 19 nt, Artificial Sequence
  Description of Artificial Sequence: Synthetic oligonucleotide
caaucuugugaguugagga

SEQ ID NO: 139737 - RNA, 19 nt, Artificial Sequence
  Description of Artificial Sequence: Synthetic oligonucleotide
guuugcgcaguacuguugc

SEQ ID NO: 139738 - RNA, 19 nt, Artificial Sequence
  Description of Artificial Sequence: Synthetic oligonucleotide
caggauauagugaggugag

SEQ ID NO: 139739 - RNA, 19 nt, Artificial Sequence
  Description of Artificial Sequence: Synthetic oligonucleotide
augaaaacuugucucuagu

SEQ ID NO: 139740 - RNA, 19 nt, Artificial Sequence
  Description of Artificial Sequence: Synthetic oligonucleotide
uacuauaaccacuuuuauu

SEQ ID NO: 139741 - RNA, 19 nt, Artificial Sequence
  Description of Artificial Sequence: Synthetic oligonucleotide
cauuucaggagaaaaccca

SEQ ID NO: 139742 - RNA, 19 nt, Artificial Sequence
  Description of Artificial Sequence: Synthetic oligonucleotide
acaauuaagcaaccucaca

SEQ ID NO: 139743 - RNA, 19 nt, Artificial Sequence
  Description of Artificial Sequence: Synthetic oligonucleotide
auguuacuagauuacuaga

SEQ ID NO: 139744 - RNA, 19 nt, Artificial Sequence
  Description of Artificial Sequence: Synthetic oligonucleotide
gcuagaacuauuuacuguc

SEQ ID NO: 139745 - RNA, 19 nt, Artificial Sequence
  Description of Artificial Sequence: Synthetic oligonucleotide
gagaucgcaagcucuaaga

SEQ ID NO: 139746 - RNA, 19 nt, Artificial Sequence
  Description of Artificial Sequence: Synthetic oligonucleotide
gaaugcucggacugcuggg

SEQ ID NO: 139747 - RNA, 19 nt, Artificial Sequence
  Description of Artificial Sequence: Synthetic oligonucleotide
ugguccaauaguauagcau

SEQ ID NO: 139748 - RNA, 19 nt, Artificial Sequence
  Description of Artificial Sequence: Synthetic oligonucleotide
uacucuguaucacaugauu

SEQ ID NO: 139749 - RNA, 19 nt, Artificial Sequence
  Description of Artificial Sequence: Synthetic oligonucleotide
ucaacaagcuagaacuauu

SEQ ID NO: 139750 - RNA, 19 nt, Artificial Sequence
  Description of Artificial Sequence: Synthetic oligonucleotide
uuuacugauagugcauagu

SEQ ID NO: 139751 - RNA, 19 nt, Artificial Sequence
  Description of Artificial Sequence: Synthetic oligonucleotide
gaccggaguuaccucagcg

SEQ ID NO: 139752 - RNA, 19 nt, Artificial Sequence
  Description of Artificial Sequence: Synthetic oligonucleotide
uugcgaacaugauucagaa

SEQ ID NO: 139753 - RNA, 19 nt, Artificial Sequence
  Description of Artificial Sequence: Synthetic oligonucleotide
agagaucgcaagcucuaag

SEQ ID NO: 139754 - RNA, 19 nt, Artificial Sequence
  Description of Artificial Sequence: Synthetic oligonucleotide
agcauuuacuaaauaauau

SEQ ID NO: 139755 - RNA, 19 nt, Artificial Sequence
  Description of Artificial Sequence: Synthetic oligonucleotide
uuaccgacuacaguuagua

SEQ ID NO: 139756 - RNA, 19 nt, Artificial Sequence
  Description of Artificial Sequence: Synthetic oligonucleotide
uguuugcgcaguacuguug

SEQ ID NO: 139757 - RNA, 19 nt, Artificial Sequence
  Description of Artificial Sequence: Synthetic oligonucleotide
uagaacgguuccgagcagg

SEQ ID NO: 139758 - RNA, 19 nt, Artificial Sequence
  Description of Artificial Sequence: Synthetic oligonucleotide
aucgcaagcucuaagauuu

SEQ ID NO: 139759 - RNA, 19 nt, Artificial Sequence
  Description of Artificial Sequence: Synthetic oligonucleotide
guuuaagauagccacuucu

SEQ ID NO: 139760 - RNA, 19 nt, Artificial Sequence
  Description of Artificial Sequence: Synthetic oligonucleotide
aguuucagcaggcuacuau

SEQ ID NO: 139761 - RNA, 19 nt, Artificial Sequence
  Description of Artificial Sequence: Synthetic oligonucleotide
uaggacuaaccuuccacgu

SEQ ID NO: 139762 - RNA, 19 nt, Artificial Sequence
  Description of Artificial Sequence: Synthetic oligonucleotide
agguauggauccuccguuc

SEQ ID NO: 139763 - RNA, 19 nt, Artificial Sequence
  Description of Artificial Sequence: Synthetic oligonucleotide
uuuaccgacuacaguuagu

SEQ ID NO: 139764 - RNA, 19 nt, Artificial Sequence
  Description of Artificial Sequence: Synthetic oligonucleotide
uuaaggugaucuguccuca

SEQ ID NO: 139765 - RNA, 19 nt, Artificial Sequence
  Description of Artificial Sequence: Synthetic oligonucleotide
uagauguccuaucaucgua

SEQ ID NO: 139766 - RNA, 19 nt, Artificial Sequence
  Description of Artificial Sequence: Synthetic oligonucleotide
auuagucuaggcauuuaug

SEQ ID NO: 139767 - RNA, 19 nt, Artificial Sequence
  Description of Artificial Sequence: Synthetic oligonucleotide
auaacuauauaggcucuca

SEQ ID NO: 139768 - RNA, 19 nt, Artificial Sequence
  Description of Artificial Sequence: Synthetic oligonucleotide
agaggaacuaagugacugu

SEQ ID NO: 139769 - RNA, 19 nt, Artificial Sequence
  Description of Artificial Sequence: Synthetic oligonucleotide
uguguugaaggcaguuuau

SEQ ID NO: 139770 - RNA, 19 nt, Artificial Sequence
  Description of Artificial Sequence: Synthetic oligonucleotide
uaggcauuuaugugcuaca

SEQ ID NO: 139771 - RNA, 19 nt, Artificial Sequence
  Description of Artificial Sequence: Synthetic oligonucleotide
aggacuaaccuuccacgug

SEQ ID NO: 139772 - RNA, 19 nt, Artificial Sequence
  Description of Artificial Sequence: Synthetic oligonucleotide
auggcaguugagguaaguc

SEQ ID NO: 139773 - RNA, 19 nt, Artificial Sequence
  Description of Artificial Sequence: Synthetic oligonucleotide
aaaauacgugcaugagcaa

SEQ ID NO: 139774 - RNA, 19 nt, Artificial Sequence
  Description of Artificial Sequence: Synthetic oligonucleotide
gcaauuaacuggaaguagc

SEQ ID NO: 139775 - RNA, 19 nt, Artificial Sequence
  Description of Artificial Sequence: Synthetic oligonucleotide
agaucgcaagcucuaagau

SEQ ID NO: 139776 - RNA, 19 nt, Artificial Sequence
  Description of Artificial Sequence: Synthetic oligonucleotide
cauacaauacucugagaaa

SEQ ID NO: 139777 - RNA, 19 nt, Artificial Sequence
  Description of Artificial Sequence: Synthetic oligonucleotide
uagguauggauccuccguu

SEQ ID NO: 139778 - RNA, 19 nt, Artificial Sequence
  Description of Artificial Sequence: Synthetic oligonucleotide
uccguucuucacaugucga

SEQ ID NO: 139779 - RNA, 19 nt, Artificial Sequence
  Description of Artificial Sequence: Synthetic oligonucleotide
acuaagauugaaagcuucu

SEQ ID NO: 139780 - RNA, 19 nt, Artificial Sequence
  Description of Artificial Sequence: Synthetic oligonucleotide
cuuaacuguuuacauagua

SEQ ID NO: 139781 - RNA, 19 nt, Artificial Sequence
  Description of Artificial Sequence: Synthetic oligonucleotide
cuauuuacugucaggauau

SEQ ID NO: 139782 - RNA, 19 nt, Artificial Sequence
  Description of Artificial Sequence: Synthetic oligonucleotide
ggaaacuauaggacuaacc

SEQ ID NO: 139783 - RNA, 19 nt, Artificial Sequence
  Description of Artificial Sequence: Synthetic oligonucleotide
gagguuccggaagacauac

SEQ ID NO: 139784 - RNA, 19 nt, Artificial Sequence
  Description of Artificial Sequence: Synthetic oligonucleotide
acgugcaugagcaaaagua

SEQ ID NO: 139785 - RNA, 19 nt, Artificial Sequence
  Description of Artificial Sequence: Synthetic oligonucleotide
agguaaggaccggaguuac

SEQ ID NO: 139786 - RNA, 19 nt, Artificial Sequence
  Description of Artificial Sequence: Synthetic oligonucleotide
uaccucagcgaucuuugaa

SEQ ID NO: 139787 - RNA, 19 nt, Artificial Sequence
  Description of Artificial Sequence: Synthetic oligonucleotide
gauuucccgccuuccauuc

SEQ ID NO: 139788 - RNA, 19 nt, Artificial Sequence
  Description of Artificial Sequence: Synthetic oligonucleotide
uaucaucguaagacaauuu

SEQ ID NO: 139789 - RNA, 19 nt, Artificial Sequence
  Description of Artificial Sequence: Synthetic oligonucleotide
uuagaacgguuccgagcag

SEQ ID NO: 139790 - RNA, 19 nt, Artificial Sequence
  Description of Artificial Sequence: Synthetic oligonucleotide
gcggcuauugguccaauag

SEQ ID NO: 139791 - RNA, 19 nt, Artificial Sequence
  Description of Artificial Sequence: Synthetic oligonucleotide
gucucauuuguuaucuaac

SEQ ID NO: 139792 - RNA, 19 nt, Artificial Sequence
  Description of Artificial Sequence: Synthetic oligonucleotide
ggucauaacugccuuguca

SEQ ID NO: 139793 - RNA, 19 nt, Artificial Sequence
  Description of Artificial Sequence: Synthetic oligonucleotide
gauagugcauagucccaga

SEQ ID NO: 139794 - RNA, 19 nt, Artificial Sequence
  Description of Artificial Sequence: Synthetic oligonucleotide
agucuuagaacgguuccga

SEQ ID NO: 139795 - RNA, 19 nt, Artificial Sequence
  Description of Artificial Sequence: Synthetic oligonucleotide
ggaacuaagugacugugaa

SEQ ID NO: 139796 - RNA, 19 nt, Artificial Sequence
  Description of Artificial Sequence: Synthetic oligonucleotide
guaauaaugcauccaacuu

SEQ ID NO: 139797 - RNA, 19 nt, Artificial Sequence
  Description of Artificial Sequence: Synthetic oligonucleotide
ugcuuuaggucaucuuaaa

SEQ ID NO: 139798 - RNA, 19 nt, Artificial Sequence
  Description of Artificial Sequence: Synthetic oligonucleotide
cuagaacuauuuacuguca

SEQ ID NO: 139799 - RNA, 19 nt, Artificial Sequence
  Description of Artificial Sequence: Synthetic oligonucleotide
accggaguuaccucagcga

SEQ ID NO: 139800 - RNA, 19 nt, Artificial Sequence
  Description of Artificial Sequence: Synthetic oligonucleotide
cagucuuagaacgguuccg

SEQ ID NO: 139801 - RNA, 19 nt, Artificial Sequence
  Description of Artificial Sequence: Synthetic oligonucleotide
guuaucuaacaugccaauc

SEQ ID NO: 139802 - RNA, 19 nt, Artificial Sequence
  Description of Artificial Sequence: Synthetic oligonucleotide
gucuuagaacgguuccgag

SEQ ID NO: 139803 - RNA, 19 nt, Artificial Sequence
  Description of Artificial Sequence: Synthetic oligonucleotide
uuggaaacuauaggacuaa

SEQ ID NO: 139804 - RNA, 19 nt, Artificial Sequence
  Description of Artificial Sequence: Synthetic oligonucleotide
ggcaauuaacuggaaguag

SEQ ID NO: 139805 - RNA, 19 nt, Artificial Sequence
  Description of Artificial Sequence: Synthetic oligonucleotide
agguuuaagauagccacuu

SEQ ID NO: 139806 - RNA, 19 nt, Artificial Sequence
  Description of Artificial Sequence: Synthetic oligonucleotide
caugccuuagacagucuca

SEQ ID NO: 139807 - RNA, 19 nt, Artificial Sequence
  Description of Artificial Sequence: Synthetic oligonucleotide
gguuaggcaauuauuucac

SEQ ID NO: 139808 - RNA, 19 nt, Artificial Sequence
  Description of Artificial Sequence: Synthetic oligonucleotide
cacuaauggcagacuugcg

SEQ ID NO: 139809 - RNA, 19 nt, Artificial Sequence
  Description of Artificial Sequence: Synthetic oligonucleotide
uuucccgccuuccauucua

SEQ ID NO: 139810 - RNA, 19 nt, Artificial Sequence
  Description of Artificial Sequence: Synthetic oligonucleotide
agguaagcauguguugaag

SEQ ID NO: 139811 - RNA, 19 nt, Artificial Sequence
  Description of Artificial Sequence: Synthetic oligonucleotide
gaaguagaagcauuacauu

SEQ ID NO: 139812 - RNA, 19 nt, Artificial Sequence
  Description of Artificial Sequence: Synthetic oligonucleotide
gauauagugaggugagguu

SEQ ID NO: 139813 - RNA, 19 nt, Artificial Sequence
  Description of Artificial Sequence: Synthetic oligonucleotide
auguccuaucaucguaaga

SEQ ID NO: 139814 - RNA, 19 nt, Artificial Sequence
  Description of Artificial Sequence: Synthetic oligonucleotide
gguuccggaagacauacaa

SEQ ID NO: 139815 - RNA, 19 nt, Artificial Sequence
  Description of Artificial Sequence: Synthetic oligonucleotide
guccuaucaucguaagaca

SEQ ID NO: 139816 - RNA, 19 nt, Artificial Sequence
  Description of Artificial Sequence: Synthetic oligonucleotide
agccuuagagauaauggau

SEQ ID NO: 139817 - RNA, 19 nt, Artificial Sequence
  Description of Artificial Sequence: Synthetic oligonucleotide
auacgugcaugagcaaaag

SEQ ID NO: 139818 - RNA, 19 nt, Artificial Sequence
  Description of Artificial Sequence: Synthetic oligonucleotide
uugcuauaugccacagaua

SEQ ID NO: 139819 - RNA, 19 nt, Artificial Sequence
  Description of Artificial Sequence: Synthetic oligonucleotide
ugcgaacaugauucagaac

SEQ ID NO: 139820 - RNA, 19 nt, Artificial Sequence
  Description of Artificial Sequence: Synthetic oligonucleotide
agcaacacauucauacuaa

SEQ ID NO: 139821 - RNA, 19 nt, Artificial Sequence
  Description of Artificial Sequence: Synthetic oligonucleotide
ggcauuuaugugcuacaug

SEQ ID NO: 139822 - RNA, 19 nt, Artificial Sequence
  Description of Artificial Sequence: Synthetic oligonucleotide
ggggauguuaaaucuacaa

SEQ ID NO: 139823 - RNA, 19 nt, Artificial Sequence
  Description of Artificial Sequence: Synthetic oligonucleotide
cuuugaauauggguugaga

SEQ ID NO: 139824 - RNA, 19 nt, Artificial Sequence
  Description of Artificial Sequence: Synthetic oligonucleotide
agcgaucuuugaauauggg

SEQ ID NO: 139825 - RNA, 19 nt, Artificial Sequence
  Description of Artificial Sequence: Synthetic oligonucleotide
aguuaccucagcgaucuuu

SEQ ID NO: 139826 - RNA, 19 nt, Artificial Sequence
  Description of Artificial Sequence: Synthetic oligonucleotide
ggaaguagaagcauuacau

SEQ ID NO: 139827 - RNA, 19 nt, Artificial Sequence
  Description of Artificial Sequence: Synthetic oligonucleotide
acucuguaucacaugauuu

SEQ ID NO: 139828 - RNA, 19 nt, Artificial Sequence
  Description of Artificial Sequence: Synthetic oligonucleotide
gcuucuguacacacgauca

SEQ ID NO: 139829 - RNA, 19 nt, Artificial Sequence
  Description of Artificial Sequence: Synthetic oligonucleotide
uggaaacuauaggacuaac

SEQ ID NO: 139830 - RNA, 19 nt, Artificial Sequence
  Description of Artificial Sequence: Synthetic oligonucleotide
agcacuagguaaggaccgg

SEQ ID NO: 139831 - RNA, 19 nt, Artificial Sequence
  Description of Artificial Sequence: Synthetic oligonucleotide
ggggcuguuacuacaaaac

SEQ ID NO: 139832 - RNA, 19 nt, Artificial Sequence
  Description of Artificial Sequence: Synthetic oligonucleotide
uuugcgcaguacuguugca

SEQ ID NO: 139833 - RNA, 19 nt, Artificial Sequence
  Description of Artificial Sequence: Synthetic oligonucleotide
agguggucacuaauggcag

SEQ ID NO: 139834 - RNA, 19 nt, Artificial Sequence
  Description of Artificial Sequence: Synthetic oligonucleotide
ugaugggcauagccuggca

SEQ ID NO: 139835 - RNA, 19 nt, Artificial Sequence
  Description of Artificial Sequence: Synthetic oligonucleotide
caacaaucuugugaguuga

SEQ ID NO: 139836 - RNA, 19 nt, Artificial Sequence
  Description of Artificial Sequence: Synthetic oligonucleotide
gcuaguucucaacccaaac

SEQ ID NO: 139837 - RNA, 19 nt, Artificial Sequence
  Description of Artificial Sequence: Synthetic oligonucleotide
ugggcauagccuggcagca

SEQ ID NO: 139838 - RNA, 19 nt, Artificial Sequence
  Description of Artificial Sequence: Synthetic oligonucleotide
gacuugcgaacaugauuca

SEQ ID NO: 139839 - RNA, 19 nt, Artificial Sequence
  Description of Artificial Sequence: Synthetic oligonucleotide
acaauagggaauaguccaa

SEQ ID NO: 139840 - RNA, 19 nt, Artificial Sequence
  Description of Artificial Sequence: Synthetic oligonucleotide
cugauagugcauaguccca

SEQ ID NO: 139841 - RNA, 19 nt, Artificial Sequence
  Description of Artificial Sequence: Synthetic oligonucleotide
gaucgcaagcucuaagauu

SEQ ID NO: 139842 - RNA, 19 nt, Artificial Sequence
  Description of Artificial Sequence: Synthetic oligonucleotide
gguaagucaaacacagaaa

SEQ ID NO: 139843 - RNA, 19 nt, Artificial Sequence
  Description of Artificial Sequence: Synthetic oligonucleotide
uaccgacuacaguuaguaa

SEQ ID NO: 139844 - RNA, 19 nt, Artificial Sequence
  Description of Artificial Sequence: Synthetic oligonucleotide
ugaucacaauggucauaac

SEQ ID NO: 139845 - RNA, 19 nt, Artificial Sequence
  Description of Artificial Sequence: Synthetic oligonucleotide
ccaagguuuaagauagcca

SEQ ID NO: 139846 - RNA, 19 nt, Artificial Sequence
  Description of Artificial Sequence: Synthetic oligonucleotide
cgugaaucaauuauuuuaa

SEQ ID NO: 139847 - RNA, 19 nt, Artificial Sequence
  Description of Artificial Sequence: Synthetic oligonucleotide
gauccuccguucuucacau

SEQ ID NO: 139848 - RNA, 19 nt, Artificial Sequence
  Description of Artificial Sequence: Synthetic oligonucleotide
uggucauaacugccuuguc

SEQ ID NO: 139849 - RNA, 19 nt, Artificial Sequence
  Description of Artificial Sequence: Synthetic oligonucleotide
ggaagacgaaaauuaacau

SEQ ID NO: 139850 - RNA, 19 nt, Artificial Sequence
  Description of Artificial Sequence: Synthetic oligonucleotide
ugacucgguccagaggggu

SEQ ID NO: 139851 - RNA, 19 nt, Artificial Sequence
  Description of Artificial Sequence: Synthetic oligonucleotide
guuuuaccgacuacaguua

SEQ ID NO: 139852 - RNA, 19 nt, Artificial Sequence
  Description of Artificial Sequence: Synthetic oligonucleotide
ccugaauuggggauguuaa

SEQ ID NO: 139853 - RNA, 19 nt, Artificial Sequence
  Description of Artificial Sequence: Synthetic oligonucleotide
acgguuccgagcagguggg

SEQ ID NO: 139854 - RNA, 19 nt, Artificial Sequence
  Description of Artificial Sequence: Synthetic oligonucleotide
ccguucuucacaugucgag

SEQ ID NO: 139855 - RNA, 19 nt, Artificial Sequence
  Description of Artificial Sequence: Synthetic oligonucleotide
gcaaguggucacuuugaca

SEQ ID NO: 139856 - RNA, 19 nt, Artificial Sequence
  Description of Artificial Sequence: Synthetic oligonucleotide
acuaaccuuccacgugaau

SEQ ID NO: 139857 - RNA, 19 nt, Artificial Sequence
  Description of Artificial Sequence: Synthetic oligonucleotide
uagagaucgcaagcucuaa

SEQ ID NO: 139858 - RNA, 19 nt, Artificial Sequence
  Description of Artificial Sequence: Synthetic oligonucleotide
acaauucaggguaguuagu

SEQ ID NO: 139859 - RNA, 19 nt, Artificial Sequence
  Description of Artificial Sequence: Synthetic oligonucleotide
agaacgguuccgagcaggu

SEQ ID NO: 139860 - RNA, 19 nt, Artificial Sequence
  Description of Artificial Sequence: Synthetic oligonucleotide
ccuuagagauaauggauaa

SEQ ID NO: 139861 - RNA, 19 nt, Artificial Sequence
  Description of Artificial Sequence: Synthetic oligonucleotide
caugaagcucaccuccaaa

SEQ ID NO: 139862 - RNA, 19 nt, Artificial Sequence
  Description of Artificial Sequence: Synthetic oligonucleotide
gucacauacagagcagucu

SEQ ID NO: 139863 - RNA, 19 nt, Artificial Sequence
  Description of Artificial Sequence: Synthetic oligonucleotide
ggaauaguccaaaucacau

SEQ ID NO: 139864 - RNA, 19 nt, Artificial Sequence
  Description of Artificial Sequence: Synthetic oligonucleotide
ggcuauugguccaauagua

SEQ ID NO: 139865 - RNA, 19 nt, Artificial Sequence
  Description of Artificial Sequence: Synthetic oligonucleotide
gaacgguuccgagcaggug

SEQ ID NO: 139866 - RNA, 19 nt, Artificial Sequence
  Description of Artificial Sequence: Synthetic oligonucleotide
caauagggaauaguccaaa

SEQ ID NO: 139867 - RNA, 19 nt, Artificial Sequence
  Description of Artificial Sequence: Synthetic oligonucleotide
gcgaucuuugaauaugggu

SEQ ID NO: 139868 - RNA, 19 nt, Artificial Sequence
  Description of Artificial Sequence: Synthetic oligonucleotide
uaguugcuuagauguccua

SEQ ID NO: 139869 - RNA, 19 nt, Artificial Sequence
  Description of Artificial Sequence: Synthetic oligonucleotide
ugccaacuguauguccaac

SEQ ID NO: 139870 - RNA, 19 nt, Artificial Sequence
  Description of Artificial Sequence: Synthetic oligonucleotide
ucgcaagcucuaagauuuc

SEQ ID NO: 139871 - RNA, 19 nt, Artificial Sequence
  Description of Artificial Sequence: Synthetic oligonucleotide
ucuaggcauuuaugugcua

SEQ ID NO: 139872 - RNA, 19 nt, Artificial Sequence
  Description of Artificial Sequence: Synthetic oligonucleotide
cuaucaucguaagacaauu

SEQ ID NO: 139873 - RNA, 19 nt, Artificial Sequence
  Description of Artificial Sequence: Synthetic oligonucleotide
cuacuauaaccacuuuuau

SEQ ID NO: 139874 - RNA, 19 nt, Artificial Sequence
  Description of Artificial Sequence: Synthetic oligonucleotide
cagacuugcgaacaugauu

SEQ ID NO: 139875 - RNA, 19 nt, Artificial Sequence
  Description of Artificial Sequence: Synthetic oligonucleotide
gaguaaggcucuucggcuu

SEQ ID NO: 139876 - RNA, 19 nt, Artificial Sequence
  Description of Artificial Sequence: Synthetic oligonucleotide
cuagaagcucuucugccau

SEQ ID NO: 139877 - RNA, 19 nt, Artificial Sequence
  Description of Artificial Sequence: Synthetic oligonucleotide
uucccgccuuccauucuau

SEQ ID NO: 139878 - RNA, 19 nt, Artificial Sequence
  Description of Artificial Sequence: Synthetic oligonucleotide
gucugacuuagguauggau

SEQ ID NO: 139879 - RNA, 19 nt, Artificial Sequence
  Description of Artificial Sequence: Synthetic oligonucleotide
cuuccacgugaaucaauua

SEQ ID NO: 139880 - RNA, 19 nt, Artificial Sequence
  Description of Artificial Sequence: Synthetic oligonucleotide
cgugcaugagcaaaaguaa

SEQ ID NO: 139881 - RNA, 19 nt, Artificial Sequence
  Description of Artificial Sequence: Synthetic oligonucleotide
gcucuucggcuuaauuucc

SEQ ID NO: 139882 - RNA, 19 nt, Artificial Sequence
  Description of Artificial Sequence: Synthetic oligonucleotide
agcggcuauugguccaaua

SEQ ID NO: 139883 - RNA, 19 nt, Artificial Sequence
  Description of Artificial Sequence: Synthetic oligonucleotide
gguaaggaccggaguuacc

SEQ ID NO: 139884 - RNA, 19 nt, Artificial Sequence
  Description of Artificial Sequence: Synthetic oligonucleotide
gacuaaccuuccacgugaa

SEQ ID NO: 139885 - RNA, 19 nt, Artificial Sequence
  Description of Artificial Sequence: Synthetic oligonucleotide
agagcggcuauugguccaa

SEQ ID NO: 139886 - RNA, 19 nt, Artificial Sequence
  Description of Artificial Sequence: Synthetic oligonucleotide
gcuuuaggucaucuuaaau

SEQ ID NO: 139887 - RNA, 19 nt, Artificial Sequence
  Description of Artificial Sequence: Synthetic oligonucleotide
ggguaguuaguucuuccau

SEQ ID NO: 139888 - RNA, 19 nt, Artificial Sequence
  Description of Artificial Sequence: Synthetic oligonucleotide
cgccuugaaucccagagga

SEQ ID NO: 139889 - RNA, 19 nt, Artificial Sequence
  Description of Artificial Sequence: Synthetic oligonucleotide
cuacucuguaucacaugau

SEQ ID NO: 139890 - RNA, 19 nt, Artificial Sequence
  Description of Artificial Sequence: Synthetic oligonucleotide
auaaugcauccaacuuaua

SEQ ID NO: 139891 - RNA, 19 nt, Artificial Sequence
  Description of Artificial Sequence: Synthetic oligonucleotide
ccggaagacauacaauacu

SEQ ID NO: 139892 - RNA, 19 nt, Artificial Sequence
  Description of Artificial Sequence: Synthetic oligonucleotide
gcaguacuguugcacugaa

SEQ ID NO: 139893 - RNA, 19 nt, Artificial Sequence
  Description of Artificial Sequence: Synthetic oligonucleotide
gaauauggguugagaucau

SEQ ID NO: 139894 - RNA, 19 nt, Artificial Sequence
  Description of Artificial Sequence: Synthetic oligonucleotide
ccuaucaucguaagacaau

SEQ ID NO: 139895 - RNA, 19 nt, Artificial Sequence
  Description of Artificial Sequence: Synthetic oligonucleotide
caguaagcggccucugcuu

SEQ ID NO: 139896 - RNA, 19 nt, Artificial Sequence
  Description of Artificial Sequence: Synthetic oligonucleotide
gcacuagguaaggaccgga

SEQ ID NO: 139897 - RNA, 19 nt, Artificial Sequence
  Description of Artificial Sequence: Synthetic oligonucleotide
cggaguuaccucagcgauc

SEQ ID NO: 139898 - RNA, 19 nt, Artificial Sequence
  Description of Artificial Sequence: Synthetic oligonucleotide
cccuuaagacaagcuguuc

SEQ ID NO: 139899 - RNA, 19 nt, Artificial Sequence
  Description of Artificial Sequence: Synthetic oligonucleotide
ccggaguuaccucagcgau

SEQ ID NO: 139900 - RNA, 19 nt, Artificial Sequence
  Description of Artificial Sequence: Synthetic oligonucleotide
cucggacugcugggugauc

SEQ ID NO: 139901 - RNA, 19 nt, Artificial Sequence
  Description of Artificial Sequence: Synthetic oligonucleotide
ccgccuuccauucuauuuu

SEQ ID NO: 139902 - RNA, 19 nt, Artificial Sequence
  Description of Artificial Sequence: Synthetic oligonucleotide
cggcuauugguccaauagu

SEQ ID NO: 139903 - RNA, 19 nt, Artificial Sequence
  Description of Artificial Sequence: Synthetic oligonucleotide
gcagacuugcgaacaugau

SEQ ID NO: 139904 - RNA, 19 nt, Artificial Sequence
  Description of Artificial Sequence: Synthetic oligonucleotide
gaguuaccucagcgaucuu

SEQ ID NO: 139905 - RNA, 19 nt, Artificial Sequence
  Description of Artificial Sequence: Synthetic oligonucleotide
acaucuaaggaccacaggc

SEQ ID NO: 139906 - RNA, 19 nt, Artificial Sequence
  Description of Artificial Sequence: Synthetic oligonucleotide
gaucauuuaagcuagacca

SEQ ID NO: 139907 - RNA, 19 nt, Artificial Sequence
  Description of Artificial Sequence: Synthetic oligonucleotide
acuauagacaucuaaggac

SEQ ID NO: 139908 - RNA, 19 nt, Artificial Sequence
  Description of Artificial Sequence: Synthetic oligonucleotide
ucgaguaccauuaugaaca

SEQ ID NO: 139909 - RNA, 19 nt, Artificial Sequence
  Description of Artificial Sequence: Synthetic oligonucleotide
uuuauaaacaugaacacua

SEQ ID NO: 139910 - RNA, 19 nt, Artificial Sequence
  Description of Artificial Sequence: Synthetic oligonucleotide
uuaugaacagcccacauga

SEQ ID NO: 139911 - RNA, 19 nt, Artificial Sequence
  Description of Artificial Sequence: Synthetic oligonucleotide
agacauacuggauuuaagc

SEQ ID NO: 139912 - RNA, 19 nt, Artificial Sequence
  Description of Artificial Sequence: Synthetic oligonucleotide
ucauaaacgaugcucagcc

SEQ ID NO: 139913 - RNA, 19 nt, Artificial Sequence
  Description of Artificial Sequence: Synthetic oligonucleotide
uacuaauauuaaaagacag

SEQ ID NO: 139914 - RNA, 19 nt, Artificial Sequence
  Description of Artificial Sequence: Synthetic oligonucleotide
uuauuauuggucaugugug

SEQ ID NO: 139915 - RNA, 19 nt, Artificial Sequence
  Description of Artificial Sequence: Synthetic oligonucleotide
agcucuaagaagaaaaucc

SEQ ID NO: 139916 - RNA, 19 nt, Artificial Sequence
  Description of Artificial Sequence: Synthetic oligonucleotide
acuacacacacacacacac

SEQ ID NO: 139917 - RNA, 19 nt, Artificial Sequence
  Description of Artificial Sequence: Synthetic oligonucleotide
aagguuagcucccagguag

SEQ ID NO: 139918 - RNA, 19 nt, Artificial Sequence
  Description of Artificial Sequence: Synthetic oligonucleotide
uguuacuauauacuguucc

SEQ ID NO: 139919 - RNA, 19 nt, Artificial Sequence
  Description of Artificial Sequence: Synthetic oligonucleotide
uuaucauaacaaaauucgg

SEQ ID NO: 139920 - RNA, 19 nt, Artificial Sequence
  Description of Artificial Sequence: Synthetic oligonucleotide
uguaguaaggcaaugguuc

SEQ ID NO: 139921 - RNA, 19 nt, Artificial Sequence
  Description of Artificial Sequence: Synthetic oligonucleotide
cuauagacaucuaaggacc

SEQ ID NO: 139922 - RNA, 19 nt, Artificial Sequence
  Description of Artificial Sequence: Synthetic oligonucleotide
auuuaagcaggcuccauac

SEQ ID NO: 139923 - RNA, 19 nt, Artificial Sequence
  Description of Artificial Sequence: Synthetic oligonucleotide
uaucauaacaaaauucggu

SEQ ID NO: 139924 - RNA, 19 nt, Artificial Sequence
  Description of Artificial Sequence: Synthetic oligonucleotide
ugugaauuagagcuuuggg

SEQ ID NO: 139925 - RNA, 19 nt, Artificial Sequence
  Description of Artificial Sequence: Synthetic oligonucleotide
uguaagaaggaucauuuaa

SEQ ID NO: 139926 - RNA, 19 nt, Artificial Sequence
  Description of Artificial Sequence: Synthetic oligonucleotide
uggauugguaucaaaaugu

SEQ ID NO: 139927 - RNA, 19 nt, Artificial Sequence
  Description of Artificial Sequence: Synthetic oligonucleotide
ugaucauucugacacuagg

SEQ ID NO: 139928 - RNA, 19 nt, Artificial Sequence
  Description of Artificial Sequence: Synthetic oligonucleotide
agcaaauagaggcauuugg

SEQ ID NO: 139929 - RNA, 19 nt, Artificial Sequence
  Description of Artificial Sequence: Synthetic oligonucleotide
ucggauacuaauauuaaaa

SEQ ID NO: 139930 - RNA, 19 nt, Artificial Sequence
  Description of Artificial Sequence: Synthetic oligonucleotide
uuggauugguaucaaaaug

SEQ ID NO: 139931 - RNA, 19 nt, Artificial Sequence
  Description of Artificial Sequence: Synthetic oligonucleotide
uucgaaaauccucaggcug

SEQ ID NO: 139932 - RNA, 19 nt, Artificial Sequence
  Description of Artificial Sequence: Synthetic oligonucleotide
auugguaucaaaauguggu

SEQ ID NO: 139933 - RNA, 19 nt, Artificial Sequence
  Description of Artificial Sequence: Synthetic oligonucleotide
gacacauguuacuauauac

SEQ ID NO: 139934 - RNA, 19 nt, Artificial Sequence
  Description of Artificial Sequence: Synthetic oligonucleotide
guuaggaugguucacacga

SEQ ID NO: 139935 - RNA, 19 nt, Artificial Sequence
  Description of Artificial Sequence: Synthetic oligonucleotide
aaacuuauuguuaacaaua

SEQ ID NO: 139936 - RNA, 19 nt, Artificial Sequence
  Description of Artificial Sequence: Synthetic oligonucleotide
uacacacacacacacacac

SEQ ID NO: 139937 - RNA, 19 nt, Artificial Sequence
  Description of Artificial Sequence: Synthetic oligonucleotide
auucauugcucauaaacga

SEQ ID NO: 139938 - RNA, 19 nt, Artificial Sequence
  Description of Artificial Sequence: Synthetic oligonucleotide
cuuagagaaaucaauccuc

SEQ ID NO: 139939 - RNA, 19 nt, Artificial Sequence
  Description of Artificial Sequence: Synthetic oligonucleotide
uggucgaguaccauuauga

SEQ ID NO: 139940 - RNA, 19 nt, Artificial Sequence
  Description of Artificial Sequence: Synthetic oligonucleotide
gaaggaucauuuaagcuag

SEQ ID NO: 139941 - RNA, 19 nt, Artificial Sequence
  Description of Artificial Sequence: Synthetic oligonucleotide
ucauugcucauaaacgaug

SEQ ID NO: 139942 - RNA, 19 nt, Artificial Sequence
  Description of Artificial Sequence: Synthetic oligonucleotide
cacacacacacacacaccg

SEQ ID NO: 139943 - RNA, 19 nt, Artificial Sequence
  Description of Artificial Sequence: Synthetic oligonucleotide
uguaguaacaacgcgauuu

SEQ ID NO: 139944 - RNA, 19 nt, Artificial Sequence
  Description of Artificial Sequence: Synthetic oligonucleotide
agaggaguuacccacguca

SEQ ID NO: 139945 - RNA, 19 nt, Artificial Sequence
  Description of Artificial Sequence: Synthetic oligonucleotide
aguuaucugagccauuugu

SEQ ID NO: 139946 - RNA, 19 nt, Artificial Sequence
  Description of Artificial Sequence: Synthetic oligonucleotide
agcauuuaacaguuuugac

SEQ ID NO: 139947 - RNA, 19 nt, Artificial Sequence
  Description of Artificial Sequence: Synthetic oligonucleotide
auuccaucacaagacauac

SEQ ID NO: 139948 - RNA, 19 nt, Artificial Sequence
  Description of Artificial Sequence: Synthetic oligonucleotide
guaagaaggaucauuuaag

SEQ ID NO: 139949 - RNA, 19 nt, Artificial Sequence
  Description of Artificial Sequence: Synthetic oligonucleotide
aauucgguaauuguuguaa

SEQ ID NO: 139950 - RNA, 19 nt, Artificial Sequence
  Description of Artificial Sequence: Synthetic oligonucleotide
gauugguaucaaaaugugg

SEQ ID NO: 139951 - RNA, 19 nt, Artificial Sequence
  Description of Artificial Sequence: Synthetic oligonucleotide
uacccugucguuauguuga

SEQ ID NO: 139952 - RNA, 19 nt, Artificial Sequence
  Description of Artificial Sequence: Synthetic oligonucleotide
aguguugaaauucucuuaa

SEQ ID NO: 139953 - RNA, 19 nt, Artificial Sequence
  Description of Artificial Sequence: Synthetic oligonucleotide
uuacuauggagaaaaggau

SEQ ID NO: 139954 - RNA, 19 nt, Artificial Sequence
  Description of Artificial Sequence: Synthetic oligonucleotide
cauugcucauaaacgaugc

SEQ ID NO: 139955 - RNA, 19 nt, Artificial Sequence
  Description of Artificial Sequence: Synthetic oligonucleotide
agauucgaaaauccucagg

SEQ ID NO: 139956 - RNA, 19 nt, Artificial Sequence
  Description of Artificial Sequence: Synthetic oligonucleotide
aguguaguaaggcaauggu

SEQ ID NO: 139957 - RNA, 19 nt, Artificial Sequence
  Description of Artificial Sequence: Synthetic oligonucleotide
ucauucugacacuaggacu

SEQ ID NO: 139958 - RNA, 19 nt, Artificial Sequence
  Description of Artificial Sequence: Synthetic oligonucleotide
agugugauaccccaccugu

SEQ ID NO: 139959 - RNA, 19 nt, Artificial Sequence
  Description of Artificial Sequence: Synthetic oligonucleotide
ucgaaaauccucaggcugu

SEQ ID NO: 139960 - RNA, 19 nt, Artificial Sequence
  Description of Artificial Sequence: Synthetic oligonucleotide
acucuaagcguuuaauagu

SEQ ID NO: 139961 - RNA, 19 nt, Artificial Sequence
  Description of Artificial Sequence: Synthetic oligonucleotide
cauuaagcacagcuuaccc

SEQ ID NO: 139962 - RNA, 19 nt, Artificial Sequence
  Description of Artificial Sequence: Synthetic oligonucleotide
auuaagcacagcuuacccu

SEQ ID NO: 139963 - RNA, 19 nt, Artificial Sequence
  Description of Artificial Sequence: Synthetic oligonucleotide
uauguguauacagagggau

SEQ ID NO: 139964 - RNA, 19 nt, Artificial Sequence
  Description of Artificial Sequence: Synthetic oligonucleotide
aacaacgcgauuucaguuu

SEQ ID NO: 139965 - RNA, 19 nt, Artificial Sequence
  Description of Artificial Sequence: Synthetic oligonucleotide
guaguaaacuuauuguuaa

SEQ ID NO: 139966 - RNA, 19 nt, Artificial Sequence
  Description of Artificial Sequence: Synthetic oligonucleotide
caugauucggaaagcuggg

SEQ ID NO: 139967 - RNA, 19 nt, Artificial Sequence
  Description of Artificial Sequence: Synthetic oligonucleotide
uuauguguauacagaggga

SEQ ID NO: 139968 - RNA, 19 nt, Artificial Sequence
  Description of Artificial Sequence: Synthetic oligonucleotide
cuaagcguuuaauaguauc

SEQ ID NO: 139969 - RNA, 19 nt, Artificial Sequence
  Description of Artificial Sequence: Synthetic oligonucleotide
cacacacacacacacacac

SEQ ID NO: 139970 - RNA, 19 nt, Artificial Sequence
  Description of Artificial Sequence: Synthetic oligonucleotide
ucauuuaagcuagaccaug

SEQ ID NO: 139971 - RNA, 19 nt, Artificial Sequence
  Description of Artificial Sequence: Synthetic oligonucleotide
guaaacuuauuguuaacaa

SEQ ID NO: 139972 - RNA, 19 nt, Artificial Sequence
  Description of Artificial Sequence: Synthetic oligonucleotide
caucuaaaacagagcaggg

SEQ ID NO: 139973 - RNA, 19 nt, Artificial Sequence
  Description of Artificial Sequence: Synthetic oligonucleotide
acuaauauuaaaagacaga

SEQ ID NO: 139974 - RNA, 19 nt, Artificial Sequence
  Description of Artificial Sequence: Synthetic oligonucleotide
agauaacugccggagcucc

SEQ ID NO: 139975 - RNA, 19 nt, Artificial Sequence
  Description of Artificial Sequence: Synthetic oligonucleotide
cucaucuaaaacagagcag

SEQ ID NO: 139976 - RNA, 19 nt, Artificial Sequence
  Description of Artificial Sequence: Synthetic oligonucleotide
caaauagaggcauuuggca

SEQ ID NO: 139977 - RNA, 19 nt, Artificial Sequence
  Description of Artificial Sequence: Synthetic oligonucleotide
uauagacaucuaaggacca

SEQ ID NO: 139978 - RNA, 19 nt, Artificial Sequence
  Description of Artificial Sequence: Synthetic oligonucleotide
ucauuaagcacagcuuacc

SEQ ID NO: 139979 - RNA, 19 nt, Artificial Sequence
  Description of Artificial Sequence: Synthetic oligonucleotide
aguaacaacgcgauuucag

SEQ ID NO: 139980 - RNA, 19 nt, Artificial Sequence
  Description of Artificial Sequence: Synthetic oligonucleotide
auaaacgaugcucagccua

SEQ ID NO: 139981 - RNA, 19 nt, Artificial Sequence
  Description of Artificial Sequence: Synthetic oligonucleotide
aaguaccgcaucaagugag

SEQ ID NO: 139982 - RNA, 19 nt, Artificial Sequence
  Description of Artificial Sequence: Synthetic oligonucleotide
cacacacacacacaccggg

SEQ ID NO: 139983 - RNA, 19 nt, Artificial Sequence
  Description of Artificial Sequence: Synthetic oligonucleotide
agcuguaccaaaaucgcag

SEQ ID NO: 139984 - RNA, 19 nt, Artificial Sequence
  Description of Artificial Sequence: Synthetic oligonucleotide
aacggucccagagaaucac

SEQ ID NO: 139985 - RNA, 19 nt, Artificial Sequence
  Description of Artificial Sequence: Synthetic oligonucleotide
agguauugagaaaggacac

SEQ ID NO: 139986 - RNA, 19 nt, Artificial Sequence
  Description of Artificial Sequence: Synthetic oligonucleotide
uuaaaagcaugggaaggca

SEQ ID NO: 139987 - RNA, 19 nt, Artificial Sequence
  Description of Artificial Sequence: Synthetic oligonucleotide
ugugguaacauggacugaa

SEQ ID NO: 139988 - RNA, 19 nt, Artificial Sequence
  Description of Artificial Sequence: Synthetic oligonucleotide
uuccuuaccuuuaugugua

SEQ ID NO: 139989 - RNA, 19 nt, Artificial Sequence
  Description of Artificial Sequence: Synthetic oligonucleotide
gacaucuaaggaccacagg

SEQ ID NO: 139990 - RNA, 19 nt, Artificial Sequence
  Description of Artificial Sequence: Synthetic oligonucleotide
uucauugcucauaaacgau

SEQ ID NO: 139991 - RNA, 19 nt, Artificial Sequence
  Description of Artificial Sequence: Synthetic oligonucleotide
auucgguaauuguuguaag

SEQ ID NO: 139992 - RNA, 19 nt, Artificial Sequence
  Description of Artificial Sequence: Synthetic oligonucleotide
uccuguaccagacgagaug

SEQ ID NO: 139993 - RNA, 19 nt, Artificial Sequence
  Description of Artificial Sequence: Synthetic oligonucleotide
gauggaguuaucugagcca

SEQ ID NO: 139994 - RNA, 19 nt, Artificial Sequence
  Description of Artificial Sequence: Synthetic oligonucleotide
guagaagcgauguccauga

SEQ ID NO: 139995 - RNA, 19 nt, Artificial Sequence
  Description of Artificial Sequence: Synthetic oligonucleotide
caacucauggcaugggcag

SEQ ID NO: 139996 - RNA, 19 nt, Artificial Sequence
  Description of Artificial Sequence: Synthetic oligonucleotide
uuaggaugguucacacgag

SEQ ID NO: 139997 - RNA, 19 nt, Artificial Sequence
  Description of Artificial Sequence: Synthetic oligonucleotide
cucuaagaagaaaauccuc

SEQ ID NO: 139998 - RNA, 19 nt, Artificial Sequence
  Description of Artificial Sequence: Synthetic oligonucleotide
aagacauacuggauuuaag

SEQ ID NO: 139999 - RNA, 19 nt, Artificial Sequence
  Description of Artificial Sequence: Synthetic oligonucleotide
ucagaguacugacaaggau

SEQ ID NO: 140000 - RNA, 19 nt, Artificial Sequence
  Description of Artificial Sequence: Synthetic oligonucleotide
aacgaugcucagccuaaug

SEQ ID NO: 140001 - RNA, 19 nt, Artificial Sequence
  Description of Artificial Sequence: Synthetic oligonucleotide
auucgaaaauccucaggcu

SEQ ID NO: 140002 - RNA, 19 nt, Artificial Sequence
  Description of Artificial Sequence: Synthetic oligonucleotide
guaacagucaagucuugga

SEQ ID NO: 140003 - RNA, 19 nt, Artificial Sequence
  Description of Artificial Sequence: Synthetic oligonucleotide
uugcugguaauaaguagaa

SEQ ID NO: 140004 - RNA, 19 nt, Artificial Sequence
  Description of Artificial Sequence: Synthetic oligonucleotide
ggauggaguuaucugagcc

SEQ ID NO: 140005 - RNA, 19 nt, Artificial Sequence
  Description of Artificial Sequence: Synthetic oligonucleotide
ugacucuaagcguuuaaua

SEQ ID NO: 140006 - RNA, 19 nt, Artificial Sequence
  Description of Artificial Sequence: Synthetic oligonucleotide
aaauagagcuuagggauuu

SEQ ID NO: 140007 - RNA, 19 nt, Artificial Sequence
  Description of Artificial Sequence: Synthetic oligonucleotide
gaaucacugaagugccuug

SEQ ID NO: 140008 - RNA, 19 nt, Artificial Sequence
  Description of Artificial Sequence: Synthetic oligonucleotide
acacauguuacuauauacu

SEQ ID NO: 140009 - RNA, 19 nt, Artificial Sequence
  Description of Artificial Sequence: Synthetic oligonucleotide
aucagugguggucgaguac

SEQ ID NO: 140010 - RNA, 19 nt, Artificial Sequence
  Description of Artificial Sequence: Synthetic oligonucleotide
cacuauagacaucuaagga

SEQ ID NO: 140011 - RNA, 19 nt, Artificial Sequence
  Description of Artificial Sequence: Synthetic oligonucleotide
acaacgcgauuucaguuug

SEQ ID NO: 140012 - RNA, 19 nt, Artificial Sequence
  Description of Artificial Sequence: Synthetic oligonucleotide
uaagccacuccuugggaac

SEQ ID NO: 140013 - RNA, 19 nt, Artificial Sequence
  Description of Artificial Sequence: Synthetic oligonucleotide
cauccuacacaacaggaca

SEQ ID NO: 140014 - RNA, 19 nt, Artificial Sequence
  Description of Artificial Sequence: Synthetic oligonucleotide
uguauacagagggauuugu

SEQ ID NO: 140015 - RNA, 19 nt, Artificial Sequence
  Description of Artificial Sequence: Synthetic oligonucleotide
cccagauucagucuguugc

SEQ ID NO: 140016 - RNA, 19 nt, Artificial Sequence
  Description of Artificial Sequence: Synthetic oligonucleotide
uagacaucuaaggaccaca

SEQ ID NO: 140017 - RNA, 19 nt, Artificial Sequence
  Description of Artificial Sequence: Synthetic oligonucleotide
ucaucagaguacugacaag

SEQ ID NO: 140018 - RNA, 19 nt, Artificial Sequence
  Description of Artificial Sequence: Synthetic oligonucleotide
uuugacucuaagcguuuaa

SEQ ID NO: 140019 - RNA, 19 nt, Artificial Sequence
  Description of Artificial Sequence: Synthetic oligonucleotide
auagacaucuaaggaccac

SEQ ID NO: 140020 - RNA, 19 nt, Artificial Sequence
  Description of Artificial Sequence: Synthetic oligonucleotide
gauuuaagcaggcuccaua

SEQ ID NO: 140021 - RNA, 19 nt, Artificial Sequence
  Description of Artificial Sequence: Synthetic oligonucleotide
ucgcaaugauccuagcuuc

SEQ ID NO: 140022 - RNA, 19 nt, Artificial Sequence
  Description of Artificial Sequence: Synthetic oligonucleotide
gaucauucugacacuagga

SEQ ID NO: 140023 - RNA, 19 nt, Artificial Sequence
  Description of Artificial Sequence: Synthetic oligonucleotide
ucuacgccuugguugcccg

SEQ ID NO: 140024 - RNA, 19 nt, Artificial Sequence
  Description of Artificial Sequence: Synthetic oligonucleotide
guaguaacaacgcgauuuc

SEQ ID NO: 140025 - RNA, 19 nt, Artificial Sequence
  Description of Artificial Sequence: Synthetic oligonucleotide
cucauaaacgaugcucagc

SEQ ID NO: 140026 - RNA, 19 nt, Artificial Sequence
  Description of Artificial Sequence: Synthetic oligonucleotide
aggugcuaucauccuacac

SEQ ID NO: 140027 - RNA, 19 nt, Artificial Sequence
  Description of Artificial Sequence: Synthetic oligonucleotide
caguguaguaaggcaaugg

SEQ ID NO: 140028 - RNA, 19 nt, Artificial Sequence
  Description of Artificial Sequence: Synthetic oligonucleotide
augauucggaaagcugggc

SEQ ID NO: 140029 - RNA, 19 nt, Artificial Sequence
  Description of Artificial Sequence: Synthetic oligonucleotide
ucauaauuguuugucuuuu

SEQ ID NO: 140030 - RNA, 19 nt, Artificial Sequence
  Description of Artificial Sequence: Synthetic oligonucleotide
cacgagauaacugccggag

SEQ ID NO: 140031 - RNA, 19 nt, Artificial Sequence
  Description of Artificial Sequence: Synthetic oligonucleotide
uuuccggcguguuaucacu

SEQ ID NO: 140032 - RNA, 19 nt, Artificial Sequence
  Description of Artificial Sequence: Synthetic oligonucleotide
ugguucacacgagauaacu

SEQ ID NO: 140033 - RNA, 19 nt, Artificial Sequence
  Description of Artificial Sequence: Synthetic oligonucleotide
uuuugcauugcugguaaua

SEQ ID NO: 140034 - RNA, 19 nt, Artificial Sequence
  Description of Artificial Sequence: Synthetic oligonucleotide
aacgcgauuucaguuugca

SEQ ID NO: 140035 - RNA, 19 nt, Artificial Sequence
  Description of Artificial Sequence: Synthetic oligonucleotide
auaagccacuccuugggaa

SEQ ID NO: 140036 - RNA, 19 nt, Artificial Sequence
  Description of Artificial Sequence: Synthetic oligonucleotide
cagaguacugacaaggaua

SEQ ID NO: 140037 - RNA, 19 nt, Artificial Sequence
  Description of Artificial Sequence: Synthetic oligonucleotide
ugguggucgaguaccauua

SEQ ID NO: 140038 - RNA, 19 nt, Artificial Sequence
  Description of Artificial Sequence: Synthetic oligonucleotide
uacugcucaccugaccagg

SEQ ID NO: 140039 - RNA, 19 nt, Artificial Sequence
  Description of Artificial Sequence: Synthetic oligonucleotide
caucuaaggaccacaggca

SEQ ID NO: 140040 - RNA, 19 nt, Artificial Sequence
  Description of Artificial Sequence: Synthetic oligonucleotide
aagcgauguccaugaauga

SEQ ID NO: 140041 - RNA, 19 nt, Artificial Sequence
  Description of Artificial Sequence: Synthetic oligonucleotide
aguaucauuuguggcagga

SEQ ID NO: 140042 - RNA, 19 nt, Artificial Sequence
  Description of Artificial Sequence: Synthetic oligonucleotide
acacacacacaccgggaag

SEQ ID NO: 140043 - RNA, 19 nt, Artificial Sequence
  Description of Artificial Sequence: Synthetic oligonucleotide
uuuagaccaacagcggguc

SEQ ID NO: 140044 - RNA, 19 nt, Artificial Sequence
  Description of Artificial Sequence: Synthetic oligonucleotide
accuccuaguaacagguau

SEQ ID NO: 140045 - RNA, 19 nt, Artificial Sequence
  Description of Artificial Sequence: Synthetic oligonucleotide
cacguucacugcaugugcc

SEQ ID NO: 140046 - RNA, 19 nt, Artificial Sequence
  Description of Artificial Sequence: Synthetic oligonucleotide
acgcgauuucaguuugcac

SEQ ID NO: 140047 - RNA, 19 nt, Artificial Sequence
  Description of Artificial Sequence: Synthetic oligonucleotide
cagucauuccagaucggac

SEQ ID NO: 140048 - RNA, 19 nt, Artificial Sequence
  Description of Artificial Sequence: Synthetic oligonucleotide
agaucggacuuagagaaau

SEQ ID NO: 140049 - RNA, 19 nt, Artificial Sequence
  Description of Artificial Sequence: Synthetic oligonucleotide
aucaagugagucauuauuu

SEQ ID NO: 140050 - RNA, 19 nt, Artificial Sequence
  Description of Artificial Sequence: Synthetic oligonucleotide
acccacgucagcauuuaac

SEQ ID NO: 140051 - RNA, 19 nt, Artificial Sequence
  Description of Artificial Sequence: Synthetic oligonucleotide
cucuaagcguuuaauagua

SEQ ID NO: 140052 - RNA, 19 nt, Artificial Sequence
  Description of Artificial Sequence: Synthetic oligonucleotide
accgaucucaucaaagggu

SEQ ID NO: 140053 - RNA, 19 nt, Artificial Sequence
  Description of Artificial Sequence: Synthetic oligonucleotide
ucuaagcguuuaauaguau

SEQ ID NO: 140054 - RNA, 19 nt, Artificial Sequence
  Description of Artificial Sequence: Synthetic oligonucleotide
gaggucgcuccugagguag

SEQ ID NO: 140055 - RNA, 19 nt, Artificial Sequence
  Description of Artificial Sequence: Synthetic oligonucleotide
ucguuauguugaugcauac

SEQ ID NO: 140056 - RNA, 19 nt, Artificial Sequence
  Description of Artificial Sequence: Synthetic oligonucleotide
cggauacuaauauuaaaag

SEQ ID NO: 140057 - RNA, 19 nt, Artificial Sequence
  Description of Artificial Sequence: Synthetic oligonucleotide
uugacucuaagcguuuaau

SEQ ID NO: 140058 - RNA, 19 nt, Artificial Sequence
  Description of Artificial Sequence: Synthetic oligonucleotide
acacacacacacacacacc

SEQ ID NO: 140059 - RNA, 19 nt, Artificial Sequence
  Description of Artificial Sequence: Synthetic oligonucleotide
ucuuccauugaagggcgcu

SEQ ID NO: 140060 - RNA, 19 nt, Artificial Sequence
  Description of Artificial Sequence: Synthetic oligonucleotide
agacaucuaaggaccacag

SEQ ID NO: 140061 - RNA, 19 nt, Artificial Sequence
  Description of Artificial Sequence: Synthetic oligonucleotide
acacuaggacuggacgacc

SEQ ID NO: 140062 - RNA, 19 nt, Artificial Sequence
  Description of Artificial Sequence: Synthetic oligonucleotide
gaaggaucuuuagaccaac

SEQ ID NO: 140063 - RNA, 19 nt, Artificial Sequence
  Description of Artificial Sequence: Synthetic oligonucleotide
caucagacucucgaugggc

SEQ ID NO: 140064 - RNA, 19 nt, Artificial Sequence
  Description of Artificial Sequence: Synthetic oligonucleotide
cguguuaucacuuucccca

SEQ ID NO: 140065 - RNA, 19 nt, Artificial Sequence
  Description of Artificial Sequence: Synthetic oligonucleotide
uugguugcccguugccugc

SEQ ID NO: 140066 - RNA, 19 nt, Artificial Sequence
  Description of Artificial Sequence: Synthetic oligonucleotide
agaccauguucucucaauu

SEQ ID NO: 140067 - RNA, 19 nt, Artificial Sequence
  Description of Artificial Sequence: Synthetic oligonucleotide
auccuacacaacaggacag

SEQ ID NO: 140068 - RNA, 19 nt, Artificial Sequence
  Description of Artificial Sequence: Synthetic oligonucleotide
agauucagucuguugcuuu

SEQ ID NO: 140069 - RNA, 19 nt, Artificial Sequence
  Description of Artificial Sequence: Synthetic oligonucleotide
cucgaugggcuuagguaag

SEQ ID NO: 140070 - RNA, 19 nt, Artificial Sequence
  Description of Artificial Sequence: Synthetic oligonucleotide
caacagcgggucaucagac

SEQ ID NO: 140071 - RNA, 19 nt, Artificial Sequence
  Description of Artificial Sequence: Synthetic oligonucleotide
guggguuuauuuucacuuc

SEQ ID NO: 140072 - RNA, 19 nt, Artificial Sequence
  Description of Artificial Sequence: Synthetic oligonucleotide
uggauuuaagcaggcucca

SEQ ID NO: 140073 - RNA, 19 nt, Artificial Sequence
  Description of Artificial Sequence: Synthetic oligonucleotide
uuccuguaccagacgagau

SEQ ID NO: 140074 - RNA, 19 nt, Artificial Sequence
  Description of Artificial Sequence: Synthetic oligonucleotide
ccagaucggacuuagagaa

SEQ ID NO: 140075 - RNA, 19 nt, Artificial Sequence
  Description of Artificial Sequence: Synthetic oligonucleotide
guuuccggcguguuaucac

SEQ ID NO: 140076 - RNA, 19 nt, Artificial Sequence
  Description of Artificial Sequence: Synthetic oligonucleotide
uaguaacaacgcgauuuca

SEQ ID NO: 140077 - RNA, 19 nt, Artificial Sequence
  Description of Artificial Sequence: Synthetic oligonucleotide
uuccauugaagggcgcuga

SEQ ID NO: 140078 - RNA, 19 nt, Artificial Sequence
  Description of Artificial Sequence: Synthetic oligonucleotide
uggacgaccuacugcucac

SEQ ID NO: 140079 - RNA, 19 nt, Artificial Sequence
  Description of Artificial Sequence: Synthetic oligonucleotide
ggaguuacccacgucagca

SEQ ID NO: 140080 - RNA, 19 nt, Artificial Sequence
  Description of Artificial Sequence: Synthetic oligonucleotide
cacacaccgggaagguuag

SEQ ID NO: 140081 - RNA, 19 nt, Artificial Sequence
  Description of Artificial Sequence: Synthetic oligonucleotide
auauccagccacguucacu

SEQ ID NO: 140082 - RNA, 19 nt, Artificial Sequence
  Description of Artificial Sequence: Synthetic oligonucleotide
accgggaagguuagcuccc

SEQ ID NO: 140083 - RNA, 19 nt, Artificial Sequence
  Description of Artificial Sequence: Synthetic oligonucleotide
acacgagauaacugccgga

SEQ ID NO: 140084 - RNA, 19 nt, Artificial Sequence
  Description of Artificial Sequence: Synthetic oligonucleotide
aaacucagccgcccagauu

SEQ ID NO: 140085 - RNA, 19 nt, Artificial Sequence
  Description of Artificial Sequence: Synthetic oligonucleotide
gucgcaaugauccuagcuu

SEQ ID NO: 140086 - RNA, 19 nt, Artificial Sequence
  Description of Artificial Sequence: Synthetic oligonucleotide
gugaucauucugacacuag

SEQ ID NO: 140087 - RNA, 19 nt, Artificial Sequence
  Description of Artificial Sequence: Synthetic oligonucleotide
aucauuuaagcuagaccau

SEQ ID NO: 140088 - RNA, 19 nt, Artificial Sequence
  Description of Artificial Sequence: Synthetic oligonucleotide
cucucaauuuucucggaua

SEQ ID NO: 140089 - RNA, 19 nt, Artificial Sequence
  Description of Artificial Sequence: Synthetic oligonucleotide
guuaucugagccauuugua

SEQ ID NO: 140090 - RNA, 19 nt, Artificial Sequence
  Description of Artificial Sequence: Synthetic oligonucleotide
acagcuuacccugucguua

SEQ ID NO: 140091 - RNA, 19 nt, Artificial Sequence
  Description of Artificial Sequence: Synthetic oligonucleotide
aucagaguacugacaagga

SEQ ID NO: 140092 - RNA, 19 nt, Artificial Sequence
  Description of Artificial Sequence: Synthetic oligonucleotide
ugcuaucauccuacacaac

SEQ ID NO: 140093 - RNA, 19 nt, Artificial Sequence
  Description of Artificial Sequence: Synthetic oligonucleotide
acuuuccccaaagggauaa

SEQ ID NO: 140094 - RNA, 19 nt, Artificial Sequence
  Description of Artificial Sequence: Synthetic oligonucleotide
aggguuuccggcguguuau

SEQ ID NO: 140095 - RNA, 19 nt, Artificial Sequence
  Description of Artificial Sequence: Synthetic oligonucleotide
uggauggaucuacgccuug

SEQ ID NO: 140096 - RNA, 19 nt, Artificial Sequence
  Description of Artificial Sequence: Synthetic oligonucleotide
augguucacacgagauaac

SEQ ID NO: 140097 - RNA, 19 nt, Artificial Sequence
  Description of Artificial Sequence: Synthetic oligonucleotide
agguugguaguaaacuuau

SEQ ID NO: 140098 - RNA, 19 nt, Artificial Sequence
  Description of Artificial Sequence: Synthetic oligonucleotide
agccuuauuuaaaggacau

SEQ ID NO: 140099 - RNA, 19 nt, Artificial Sequence
  Description of Artificial Sequence: Synthetic oligonucleotide
acacacacacacacaccgg

SEQ ID NO: 140100 - RNA, 19 nt, Artificial Sequence
  Description of Artificial Sequence: Synthetic oligonucleotide
cuuccauugaagggcgcug

SEQ ID NO: 140101 - RNA, 19 nt, Artificial Sequence
  Description of Artificial Sequence: Synthetic oligonucleotide
ggauggaucuacgccuugg

SEQ ID NO: 140102 - RNA, 19 nt, Artificial Sequence
  Description of Artificial Sequence: Synthetic oligonucleotide
gguucacacgagauaacug

SEQ ID NO: 140103 - RNA, 19 nt, Artificial Sequence
  Description of Artificial Sequence: Synthetic oligonucleotide
uacuggauuuaagcaggcu

SEQ ID NO: 140104 - RNA, 19 nt, Artificial Sequence
  Description of Artificial Sequence: Synthetic oligonucleotide
acucauggcaugggcagca

SEQ ID NO: 140105 - RNA, 19 nt, Artificial Sequence
  Description of Artificial Sequence: Synthetic oligonucleotide
uuuugacucuaagcguuua

SEQ ID NO: 140106 - RNA, 19 nt, Artificial Sequence
  Description of Artificial Sequence: Synthetic oligonucleotide
acgucagcauuuaacaguu

SEQ ID NO: 140107 - RNA, 19 nt, Artificial Sequence
  Description of Artificial Sequence: Synthetic oligonucleotide
gcauacuaucuuuuggaaa

SEQ ID NO: 140108 - RNA, 19 nt, Artificial Sequence
  Description of Artificial Sequence: Synthetic oligonucleotide
cuacacacacacacacaca

SEQ ID NO: 140109 - RNA, 19 nt, Artificial Sequence
  Description of Artificial Sequence: Synthetic oligonucleotide
aucacaagacauacuggau

SEQ ID NO: 140110 - RNA, 19 nt, Artificial Sequence
  Description of Artificial Sequence: Synthetic oligonucleotide
gucguuauguugaugcaua

SEQ ID NO: 140111 - RNA, 19 nt, Artificial Sequence
  Description of Artificial Sequence: Synthetic oligonucleotide
acucaugacuugucauaau

SEQ ID NO: 140112 - RNA, 19 nt, Artificial Sequence
  Description of Artificial Sequence: Synthetic oligonucleotide
caucaagugagucauuauu

SEQ ID NO: 140113 - RNA, 19 nt, Artificial Sequence
  Description of Artificial Sequence: Synthetic oligonucleotide
cuggacgaccuacugcuca

SEQ ID NO: 140114 - RNA, 19 nt, Artificial Sequence
  Description of Artificial Sequence: Synthetic oligonucleotide
ugcugguaauaaguagaaa

SEQ ID NO: 140115 - RNA, 19 nt, Artificial Sequence
  Description of Artificial Sequence: Synthetic oligonucleotide
cgguaauuguuguaagaag

SEQ ID NO: 140116 - RNA, 19 nt, Artificial Sequence
  Description of Artificial Sequence: Synthetic oligonucleotide
caacgcgauuucaguuugc

SEQ ID NO: 140117 - RNA, 19 nt, Artificial Sequence
  Description of Artificial Sequence: Synthetic oligonucleotide
agcaguguaguaaggcaau

SEQ ID NO: 140118 - RNA, 19 nt, Artificial Sequence
  Description of Artificial Sequence: Synthetic oligonucleotide
caguuuugacucuaagcgu

SEQ ID NO: 140119 - RNA, 19 nt, Artificial Sequence
  Description of Artificial Sequence: Synthetic oligonucleotide
cuucucgugcucaucuaaa

SEQ ID NO: 140120 - RNA, 19 nt, Artificial Sequence
  Description of Artificial Sequence: Synthetic oligonucleotide
gcguguuaucacuuucccc

SEQ ID NO: 140121 - RNA, 19 nt, Artificial Sequence
  Description of Artificial Sequence: Synthetic oligonucleotide
gcaugcauauccagccacg

SEQ ID NO: 140122 - RNA, 19 nt, Artificial Sequence
  Description of Artificial Sequence: Synthetic oligonucleotide
gagauguauuuugcugguc

SEQ ID NO: 140123 - RNA, 19 nt, Artificial Sequence
  Description of Artificial Sequence: Synthetic oligonucleotide
aauagagcuuagggauuuu

SEQ ID NO: 140124 - RNA, 19 nt, Artificial Sequence
  Description of Artificial Sequence: Synthetic oligonucleotide
aguaccgcaucaagugagu

SEQ ID NO: 140125 - RNA, 19 nt, Artificial Sequence
  Description of Artificial Sequence: Synthetic oligonucleotide
cacacacacacaccgggaa

SEQ ID NO: 140126 - RNA, 19 nt, Artificial Sequence
  Description of Artificial Sequence: Synthetic oligonucleotide
cugucguuauguugaugca

SEQ ID NO: 140127 - RNA, 19 nt, Artificial Sequence
  Description of Artificial Sequence: Synthetic oligonucleotide
auuugggcauggugcuaga

SEQ ID NO: 140128 - RNA, 19 nt, Artificial Sequence
  Description of Artificial Sequence: Synthetic oligonucleotide
cacucaugacuugucauaa

SEQ ID NO: 140129 - RNA, 19 nt, Artificial Sequence
  Description of Artificial Sequence: Synthetic oligonucleotide
gguccaauucugcaacuaa

SEQ ID NO: 140130 - RNA, 19 nt, Artificial Sequence
  Description of Artificial Sequence: Synthetic oligonucleotide
aggacacauguuacuauau

SEQ ID NO: 140131 - RNA, 19 nt, Artificial Sequence
  Description of Artificial Sequence: Synthetic oligonucleotide
acuaggacuggacgaccua

SEQ ID NO: 140132 - RNA, 19 nt, Artificial Sequence
  Description of Artificial Sequence: Synthetic oligonucleotide
aaacgaugcucagccuaau

SEQ ID NO: 140133 - RNA, 19 nt, Artificial Sequence
  Description of Artificial Sequence: Synthetic oligonucleotide
gucagcuagcucacaccag

SEQ ID NO: 140134 - RNA, 19 nt, Artificial Sequence
  Description of Artificial Sequence: Synthetic oligonucleotide
cauauccagccacguucac

SEQ ID NO: 140135 - RNA, 19 nt, Artificial Sequence
  Description of Artificial Sequence: Synthetic oligonucleotide
uucuccgaggucgcuccug

SEQ ID NO: 140136 - RNA, 19 nt, Artificial Sequence
  Description of Artificial Sequence: Synthetic oligonucleotide
gccgcccagauucagucug

SEQ ID NO: 140137 - RNA, 19 nt, Artificial Sequence
  Description of Artificial Sequence: Synthetic oligonucleotide
uuacccacgucagcauuua

SEQ ID NO: 140138 - RNA, 19 nt, Artificial Sequence
  Description of Artificial Sequence: Synthetic oligonucleotide
ugcggucgcaaugauccua

SEQ ID NO: 140139 - RNA, 19 nt, Artificial Sequence
  Description of Artificial Sequence: Synthetic oligonucleotide
uuccggcguguuaucacuu

SEQ ID NO: 140140 - RNA, 19 nt, Artificial Sequence
  Description of Artificial Sequence: Synthetic oligonucleotide
auaugccaucgggauggag

SEQ ID NO: 140141 - RNA, 19 nt, Artificial Sequence
  Description of Artificial Sequence: Synthetic oligonucleotide
gauaacugccggagcucca

SEQ ID NO: 140142 - RNA, 19 nt, Artificial Sequence
  Description of Artificial Sequence: Synthetic oligonucleotide
acacacacacacacacaca

SEQ ID NO: 140143 - RNA, 19 nt, Artificial Sequence
  Description of Artificial Sequence: Synthetic oligonucleotide
acacacacacacaccggga

SEQ ID NO: 140144 - RNA, 19 nt, Artificial Sequence
  Description of Artificial Sequence: Synthetic oligonucleotide
acagcccacaugauucgga

SEQ ID NO: 140145 - RNA, 19 nt, Artificial Sequence
  Description of Artificial Sequence: Synthetic oligonucleotide
ccaacucauggcaugggca

SEQ ID NO: 140146 - RNA, 19 nt, Artificial Sequence
  Description of Artificial Sequence: Synthetic oligonucleotide
gacgaccuacugcucaccu

SEQ ID NO: 140147 - RNA, 19 nt, Artificial Sequence
  Description of Artificial Sequence: Synthetic oligonucleotide
accuuuuacuauggagaaa

SEQ ID NO: 140148 - RNA, 19 nt, Artificial Sequence
  Description of Artificial Sequence: Synthetic oligonucleotide
acuggacgaccuacugcuc

SEQ ID NO: 140149 - RNA, 19 nt, Artificial Sequence
  Description of Artificial Sequence: Synthetic oligonucleotide
gggcacuauagacaucuaa

SEQ ID NO: 140150 - RNA, 19 nt, Artificial Sequence
  Description of Artificial Sequence: Synthetic oligonucleotide
uccggcguguuaucacuuu

SEQ ID NO: 140151 - RNA, 19 nt, Artificial Sequence
  Description of Artificial Sequence: Synthetic oligonucleotide
gauguccaugaaugagccu

SEQ ID NO: 140152 - RNA, 19 nt, Artificial Sequence
  Description of Artificial Sequence: Synthetic oligonucleotide
ugcuuucauuaagcacagc

SEQ ID NO: 140153 - RNA, 19 nt, Artificial Sequence
  Description of Artificial Sequence: Synthetic oligonucleotide
uacccacgucagcauuuaa

SEQ ID NO: 140154 - RNA, 19 nt, Artificial Sequence
  Description of Artificial Sequence: Synthetic oligonucleotide
guaccgcaucaagugaguc

SEQ ID NO: 140155 - RNA, 19 nt, Artificial Sequence
  Description of Artificial Sequence: Synthetic oligonucleotide
acacaccgggaagguuagc

SEQ ID NO: 140156 - RNA, 19 nt, Artificial Sequence
  Description of Artificial Sequence: Synthetic oligonucleotide
ugaugaccucuaguuguuu

SEQ ID NO: 140157 - RNA, 19 nt, Artificial Sequence
  Description of Artificial Sequence: Synthetic oligonucleotide
cgcgauuucaguuugcacu

SEQ ID NO: 140158 - RNA, 19 nt, Artificial Sequence
  Description of Artificial Sequence: Synthetic oligonucleotide
gcagucauuccagaucgga

SEQ ID NO: 140159 - RNA, 19 nt, Artificial Sequence
  Description of Artificial Sequence: Synthetic oligonucleotide
cauaaacgaugcucagccu

SEQ ID NO: 140160 - RNA, 19 nt, Artificial Sequence
  Description of Artificial Sequence: Synthetic oligonucleotide
caguuugcacuuucaugua

SEQ ID NO: 140161 - RNA, 19 nt, Artificial Sequence
  Description of Artificial Sequence: Synthetic oligonucleotide
gacucucgaugggcuuagg

SEQ ID NO: 140162 - RNA, 19 nt, Artificial Sequence
  Description of Artificial Sequence: Synthetic oligonucleotide
gcaguguaguaaggcaaug

SEQ ID NO: 140163 - RNA, 19 nt, Artificial Sequence
  Description of Artificial Sequence: Synthetic oligonucleotide
gugugauaccccaccuguc

SEQ ID NO: 140164 - RNA, 19 nt, Artificial Sequence
  Description of Artificial Sequence: Synthetic oligonucleotide
gaguuacccacgucagcau

SEQ ID NO: 140165 - RNA, 19 nt, Artificial Sequence
  Description of Artificial Sequence: Synthetic oligonucleotide
cacuaggacuggacgaccu

SEQ ID NO: 140166 - RNA, 19 nt, Artificial Sequence
  Description of Artificial Sequence: Synthetic oligonucleotide
accagacgagauguauuuu

SEQ ID NO: 140167 - RNA, 19 nt, Artificial Sequence
  Description of Artificial Sequence: Synthetic oligonucleotide
cuccgaggucgcuccugag

SEQ ID NO: 140168 - RNA, 19 nt, Artificial Sequence
  Description of Artificial Sequence: Synthetic oligonucleotide
cccacaugauucggaaagc

SEQ ID NO: 140169 - RNA, 19 nt, Artificial Sequence
  Description of Artificial Sequence: Synthetic oligonucleotide
cagugguggucgaguacca

SEQ ID NO: 140170 - RNA, 19 nt, Artificial Sequence
  Description of Artificial Sequence: Synthetic oligonucleotide
cgaccuacugcucaccuga

SEQ ID NO: 140171 - RNA, 19 nt, Artificial Sequence
  Description of Artificial Sequence: Synthetic oligonucleotide
caggugcuaucauccuaca

SEQ ID NO: 140172 - RNA, 19 nt, Artificial Sequence
  Description of Artificial Sequence: Synthetic oligonucleotide
gguuuccggcguguuauca

SEQ ID NO: 140173 - RNA, 19 nt, Artificial Sequence
  Description of Artificial Sequence: Synthetic oligonucleotide
acggucccagagaaucacu

SEQ ID NO: 140174 - RNA, 19 nt, Artificial Sequence
  Description of Artificial Sequence: Synthetic oligonucleotide
gucgcuccugagguaguga

SEQ ID NO: 140175 - RNA, 19 nt, Artificial Sequence
  Description of Artificial Sequence: Synthetic oligonucleotide
gguugcccguugccugcgg

SEQ ID NO: 140176 - RNA, 19 nt, Artificial Sequence
  Description of Artificial Sequence: Synthetic oligonucleotide
gaagugccuugucguuucu

SEQ ID NO: 140177 - RNA, 19 nt, Artificial Sequence
  Description of Artificial Sequence: Synthetic oligonucleotide
ggucgcuccugagguagug

SEQ ID NO: 140178 - RNA, 19 nt, Artificial Sequence
  Description of Artificial Sequence: Synthetic oligonucleotide
gcacccaaacucagccgcc

SEQ ID NO: 140179 - RNA, 19 nt, Artificial Sequence
  Description of Artificial Sequence: Synthetic oligonucleotide
ugccaucgggauggaguua

SEQ ID NO: 140180 - RNA, 19 nt, Artificial Sequence
  Description of Artificial Sequence: Synthetic oligonucleotide
ccggcguguuaucacuuuc

SEQ ID NO: 140181 - RNA, 19 nt, Artificial Sequence
  Description of Artificial Sequence: Synthetic oligonucleotide
guugcccguugccugcggu

SEQ ID NO: 140182 - RNA, 19 nt, Artificial Sequence
  Description of Artificial Sequence: Synthetic oligonucleotide
ccauuuguaucuguggaau

SEQ ID NO: 140183 - RNA, 19 nt, Artificial Sequence
  Description of Artificial Sequence: Synthetic oligonucleotide
ccauauugguaucacuuuu

SEQ ID NO: 140184 - RNA, 19 nt, Artificial Sequence
  Description of Artificial Sequence: Synthetic oligonucleotide
agcucacaccaggggcaug

SEQ ID NO: 140185 - RNA, 19 nt, Artificial Sequence
  Description of Artificial Sequence: Synthetic oligonucleotide
ggguuuccggcguguuauc

SEQ ID NO: 140186 - RNA, 19 nt, Artificial Sequence
  Description of Artificial Sequence: Synthetic oligonucleotide
gacugcgagcuggcuucuc

SEQ ID NO: 140187 - RNA, 19 nt, Artificial Sequence
  Description of Artificial Sequence: Synthetic oligonucleotide
gccaucgggauggaguuau

SEQ ID NO: 140188 - RNA, 19 nt, Artificial Sequence
  Description of Artificial Sequence: Synthetic oligonucleotide
ggccaccgaucucaucaaa

SEQ ID NO: 140189 - RNA, 19 nt, Artificial Sequence
  Description of Artificial Sequence: Synthetic oligonucleotide
gguggucgaguaccauuau

SEQ ID NO: 140190 - RNA, 19 nt, Artificial Sequence
  Description of Artificial Sequence: Synthetic oligonucleotide
cuacgccuugguugcccgu

SEQ ID NO: 140191 - RNA, 19 nt, Artificial Sequence
  Description of Artificial Sequence: Synthetic oligonucleotide
ccuugguugcccguugccu

SEQ ID NO: 140192 - RNA, 19 nt, Artificial Sequence
  Description of Artificial Sequence: Synthetic oligonucleotide
cuucuccgaggucgcuccu

SEQ ID NO: 140193 - RNA, 19 nt, Artificial Sequence
  Description of Artificial Sequence: Synthetic oligonucleotide
ccgcccagauucagucugu

SEQ ID NO: 140194 - RNA, 19 nt, Artificial Sequence
  Description of Artificial Sequence: Synthetic oligonucleotide
cguugccugcggucgcaau

SEQ ID NO: 140195 - RNA, 19 nt, Artificial Sequence
  Description of Artificial Sequence: Synthetic oligonucleotide
ccgcaucaagugagucauu

SEQ ID NO: 140196 - RNA, 19 nt, Artificial Sequence
  Description of Artificial Sequence: Synthetic oligonucleotide
aaaaguuacacacacacac

SEQ ID NO: 140197 - RNA, 19 nt, Artificial Sequence
  Description of Artificial Sequence: Synthetic oligonucleotide
ugaacaauagucauaagcg

SEQ ID NO: 140198 - RNA, 19 nt, Artificial Sequence
  Description of Artificial Sequence: Synthetic oligonucleotide
uuaacugaaaauuuggagc

SEQ ID NO: 140199 - RNA, 19 nt, Artificial Sequence
  Description of Artificial Sequence: Synthetic oligonucleotide
uauauauauauauuuauac

SEQ ID NO: 140200 - RNA, 19 nt, Artificial Sequence
  Description of Artificial Sequence: Synthetic oligonucleotide
aaaaccaagccccucaaac

SEQ ID NO: 140201 - RNA, 19 nt, Artificial Sequence
  Description of Artificial Sequence: Synthetic oligonucleotide
aauaaucuaaaugaggaag

SEQ ID NO: 140202 - RNA, 19 nt, Artificial Sequence
  Description of Artificial Sequence: Synthetic oligonucleotide
aaguuuguaccauuggccc

SEQ ID NO: 140203 - RNA, 19 nt, Artificial Sequence
  Description of Artificial Sequence: Synthetic oligonucleotide
uguauuugaacaauaguca

SEQ ID NO: 140204 - RNA, 19 nt, Artificial Sequence
  Description of Artificial Sequence: Synthetic oligonucleotide
aaaguuuguaccauuggcc

SEQ ID NO: 140205 - RNA, 19 nt, Artificial Sequence
  Description of Artificial Sequence: Synthetic oligonucleotide
aaguuacacacacacacac

SEQ ID NO: 140206 - RNA, 19 nt, Artificial Sequence
  Description of Artificial Sequence: Synthetic oligonucleotide
uuauuuauagagcuaaccu

SEQ ID NO: 140207 - RNA, 19 nt, Artificial Sequence
  Description of Artificial Sequence: Synthetic oligonucleotide
uucucuaaauuauuuauag

SEQ ID NO: 140208 - RNA, 19 nt, Artificial Sequence
  Description of Artificial Sequence: Synthetic oligonucleotide
uucaucauaacuuuguggu

SEQ ID NO: 140209 - RNA, 19 nt, Artificial Sequence
  Description of Artificial Sequence: Synthetic oligonucleotide
accaaaagcuccuugaggg

SEQ ID NO: 140210 - RNA, 19 nt, Artificial Sequence
  Description of Artificial Sequence: Synthetic oligonucleotide
aauuucuaggccauugagc

SEQ ID NO: 140211 - RNA, 19 nt, Artificial Sequence
  Description of Artificial Sequence: Synthetic oligonucleotide
ugaccuaagccacagauca

SEQ ID NO: 140212 - RNA, 19 nt, Artificial Sequence
  Description of Artificial Sequence: Synthetic oligonucleotide
uauauauauauauauuuau

SEQ ID NO: 140213 - RNA, 19 nt, Artificial Sequence
  Description of Artificial Sequence: Synthetic oligonucleotide
ugauucuuaaaacugugca

SEQ ID NO: 140214 - RNA, 19 nt, Artificial Sequence
  Description of Artificial Sequence: Synthetic oligonucleotide
gaauccaucucauagccag

SEQ ID NO: 140215 - RNA, 19 nt, Artificial Sequence
  Description of Artificial Sequence: Synthetic oligonucleotide
auauacaucauguuaguca

SEQ ID NO: 140216 - RNA, 19 nt, Artificial Sequence
  Description of Artificial Sequence: Synthetic oligonucleotide
auauauauauauuuauaca

SEQ ID NO: 140217 - RNA, 19 nt, Artificial Sequence
  Description of Artificial Sequence: Synthetic oligonucleotide
aaauuucuaggccauugag

SEQ ID NO: 140218 - RNA, 19 nt, Artificial Sequence
  Description of Artificial Sequence: Synthetic oligonucleotide
aacguuguaguugagguag

SEQ ID NO: 140219 - RNA, 19 nt, Artificial Sequence
  Description of Artificial Sequence: Synthetic oligonucleotide
uaugucauguggauuauug

SEQ ID NO: 140220 - RNA, 19 nt, Artificial Sequence
  Description of Artificial Sequence: Synthetic oligonucleotide
acuaugggcacgaugaucc

SEQ ID NO: 140221 - RNA, 19 nt, Artificial Sequence
  Description of Artificial Sequence: Synthetic oligonucleotide
caaaauguuugcaaaugcg

SEQ ID NO: 140222 - RNA, 19 nt, Artificial Sequence
  Description of Artificial Sequence: Synthetic oligonucleotide
auaccuuguccucaaauac

SEQ ID NO: 140223 - RNA, 19 nt, Artificial Sequence
  Description of Artificial Sequence: Synthetic oligonucleotide
aaaauauaguguaaggaga

SEQ ID NO: 140224 - RNA, 19 nt, Artificial Sequence
  Description of Artificial Sequence: Synthetic oligonucleotide
ucaauauugucugaaacca

SEQ ID NO: 140225 - RNA, 19 nt, Artificial Sequence
  Description of Artificial Sequence: Synthetic oligonucleotide
aaguguauaaaacauuaua

SEQ ID NO: 140226 - RNA, 19 nt, Artificial Sequence
  Description of Artificial Sequence: Synthetic oligonucleotide
uaacugaaaauuuggagcu

SEQ ID NO: 140227 - RNA, 19 nt, Artificial Sequence
  Description of Artificial Sequence: Synthetic oligonucleotide
ugacacucuaucuucaugc

SEQ ID NO: 140228 - RNA, 19 nt, Artificial Sequence
  Description of Artificial Sequence: Synthetic oligonucleotide
ugagguacgacgugggugg

SEQ ID NO: 140229 - RNA, 19 nt, Artificial Sequence
  Description of Artificial Sequence: Synthetic oligonucleotide
ugauggauagccacaaagc

SEQ ID NO: 140230 - RNA, 19 nt, Artificial Sequence
  Description of Artificial Sequence: Synthetic oligonucleotide
aauacucucacuucucuaa

SEQ ID NO: 140231 - RNA, 19 nt, Artificial Sequence
  Description of Artificial Sequence: Synthetic oligonucleotide
auaguauucaaaugaugag

SEQ ID NO: 140232 - RNA, 19 nt, Artificial Sequence
  Description of Artificial Sequence: Synthetic oligonucleotide
uguacugugacugggauac

SEQ ID NO: 140233 - RNA, 19 nt, Artificial Sequence
  Description of Artificial Sequence: Synthetic oligonucleotide
uuaccuuuccgcaacauaa

SEQ ID NO: 140234 - RNA, 19 nt, Artificial Sequence
  Description of Artificial Sequence: Synthetic oligonucleotide
gaggagaacauaucuaccc

SEQ ID NO: 140235 - RNA, 19 nt, Artificial Sequence
  Description of Artificial Sequence: Synthetic oligonucleotide
aaaacugugcacaugguga

SEQ ID NO: 140236 - RNA, 19 nt, Artificial Sequence
  Description of Artificial Sequence: Synthetic oligonucleotide
uuugugguuaccuuuccgc

SEQ ID NO: 140237 - RNA, 19 nt, Artificial Sequence
  Description of Artificial Sequence: Synthetic oligonucleotide
uagugcauaggacugaacu

SEQ ID NO: 140238 - RNA, 19 nt, Artificial Sequence
  Description of Artificial Sequence: Synthetic oligonucleotide
uauuuauacagguagcuuu

SEQ ID NO: 140239 - RNA, 19 nt, Artificial Sequence
  Description of Artificial Sequence: Synthetic oligonucleotide
ucauguuagucacucagca

SEQ ID NO: 140240 - RNA, 19 nt, Artificial Sequence
  Description of Artificial Sequence: Synthetic oligonucleotide
uguuuugugaaguggugag

SEQ ID NO: 140241 - RNA, 19 nt, Artificial Sequence
  Description of Artificial Sequence: Synthetic oligonucleotide
auaaucuaaaugaggaagg

SEQ ID NO: 140242 - RNA, 19 nt, Artificial Sequence
  Description of Artificial Sequence: Synthetic oligonucleotide
ugaugaguaaaguuuguac

SEQ ID NO: 140243 - RNA, 19 nt, Artificial Sequence
  Description of Artificial Sequence: Synthetic oligonucleotide
auguuagucacucagcagu

SEQ ID NO: 140244 - RNA, 19 nt, Artificial Sequence
  Description of Artificial Sequence: Synthetic oligonucleotide
gugguuuuccuguacaccg

SEQ ID NO: 140245 - RNA, 19 nt, Artificial Sequence
  Description of Artificial Sequence: Synthetic oligonucleotide
acaauagucauaagcgugc

SEQ ID NO: 140246 - RNA, 19 nt, Artificial Sequence
  Description of Artificial Sequence: Synthetic oligonucleotide
uacacacacacacacacac

SEQ ID NO: 140247 - RNA, 19 nt, Artificial Sequence
  Description of Artificial Sequence: Synthetic oligonucleotide
aacaauagucauaagcgug

SEQ ID NO: 140248 - RNA, 19 nt, Artificial Sequence
  Description of Artificial Sequence: Synthetic oligonucleotide
accaguaaagauuagggau

SEQ ID NO: 140249 - RNA, 19 nt, Artificial Sequence
  Description of Artificial Sequence: Synthetic oligonucleotide
auagucauaagcgugccuc

SEQ ID NO: 140250 - RNA, 19 nt, Artificial Sequence
  Description of Artificial Sequence: Synthetic oligonucleotide
guucaucauaacuuugugg

SEQ ID NO: 140251 - RNA, 19 nt, Artificial Sequence
  Description of Artificial Sequence: Synthetic oligonucleotide
ucaaugucgccacaggucu

SEQ ID NO: 140252 - RNA, 19 nt, Artificial Sequence
  Description of Artificial Sequence: Synthetic oligonucleotide
uugagguagacugaggugc

SEQ ID NO: 140253 - RNA, 19 nt, Artificial Sequence
  Description of Artificial Sequence: Synthetic oligonucleotide
cuugacgacaggcagcucg

SEQ ID NO: 140254 - RNA, 19 nt, Artificial Sequence
  Description of Artificial Sequence: Synthetic oligonucleotide
aauaccuuguccucaaaua

SEQ ID NO: 140255 - RNA, 19 nt, Artificial Sequence
  Description of Artificial Sequence: Synthetic oligonucleotide
auauaguguaaggagacuc

SEQ ID NO: 140256 - RNA, 19 nt, Artificial Sequence
  Description of Artificial Sequence: Synthetic oligonucleotide
guuacacacacacacacac

SEQ ID NO: 140257 - RNA, 19 nt, Artificial Sequence
  Description of Artificial Sequence: Synthetic oligonucleotide
cagggcuuaggguagaugg

SEQ ID NO: 140258 - RNA, 19 nt, Artificial Sequence
  Description of Artificial Sequence: Synthetic oligonucleotide
ugagagcacaaaauguuug

SEQ ID NO: 140259 - RNA, 19 nt, Artificial Sequence
  Description of Artificial Sequence: Synthetic oligonucleotide
auugagcccagauuucucg

SEQ ID NO: 140260 - RNA, 19 nt, Artificial Sequence
  Description of Artificial Sequence: Synthetic oligonucleotide
aaaauuccuaaauacccua

SEQ ID NO: 140261 - RNA, 19 nt, Artificial Sequence
  Description of Artificial Sequence: Synthetic oligonucleotide
agugcauaggacugaacuc

SEQ ID NO: 140262 - RNA, 19 nt, Artificial Sequence
  Description of Artificial Sequence: Synthetic oligonucleotide
cuuaaugccacucgcuugc

SEQ ID NO: 140263 - RNA, 19 nt, Artificial Sequence
  Description of Artificial Sequence: Synthetic oligonucleotide
uuguggaccauuuuaaaau

SEQ ID NO: 140264 - RNA, 19 nt, Artificial Sequence
  Description of Artificial Sequence: Synthetic oligonucleotide
uaaucuaaaugaggaaggg

SEQ ID NO: 140265 - RNA, 19 nt, Artificial Sequence
  Description of Artificial Sequence: Synthetic oligonucleotide
agggcuauuaccacuaugg

SEQ ID NO: 140266 - RNA, 19 nt, Artificial Sequence
  Description of Artificial Sequence: Synthetic oligonucleotide
uuuuauacuuauguugaug

SEQ ID NO: 140267 - RNA, 19 nt, Artificial Sequence
  Description of Artificial Sequence: Synthetic oligonucleotide
cauaucuacccuuucugcc

SEQ ID NO: 140268 - RNA, 19 nt, Artificial Sequence
  Description of Artificial Sequence: Synthetic oligonucleotide
aauuugagcaguccucccu

SEQ ID NO: 140269 - RNA, 19 nt, Artificial Sequence
  Description of Artificial Sequence: Synthetic oligonucleotide
uuuugugaaguggugagug

SEQ ID NO: 140270 - RNA, 19 nt, Artificial Sequence
  Description of Artificial Sequence: Synthetic oligonucleotide
ucgaucuuugccuggaacc

SEQ ID NO: 140271 - RNA, 19 nt, Artificial Sequence
  Description of Artificial Sequence: Synthetic oligonucleotide
gauggauagccacaaagca

SEQ ID NO: 140272 - RNA, 19 nt, Artificial Sequence
  Description of Artificial Sequence: Synthetic oligonucleotide
uccuucaccuuuuaaauuc

SEQ ID NO: 140273 - RNA, 19 nt, Artificial Sequence
  Description of Artificial Sequence: Synthetic oligonucleotide
uauaguguaaggagacucu

SEQ ID NO: 140274 - RNA, 19 nt, Artificial Sequence
  Description of Artificial Sequence: Synthetic oligonucleotide
uucacguccugaaaauucc

SEQ ID NO: 140275 - RNA, 19 nt, Artificial Sequence
  Description of Artificial Sequence: Synthetic oligonucleotide
uacuaugucauguggauua

SEQ ID NO: 140276 - RNA, 19 nt, Artificial Sequence
  Description of Artificial Sequence: Synthetic oligonucleotide
aaagaggguucuucgggag

SEQ ID NO: 140277 - RNA, 19 nt, Artificial Sequence
  Description of Artificial Sequence: Synthetic oligonucleotide
cacacacacacucacacag

SEQ ID NO: 140278 - RNA, 19 nt, Artificial Sequence
  Description of Artificial Sequence: Synthetic oligonucleotide
ugaaaccaguguuugccgg

SEQ ID NO: 140279 - RNA, 19 nt, Artificial Sequence
  Description of Artificial Sequence: Synthetic oligonucleotide
auagccacaaagcauaauu

SEQ ID NO: 140280 - RNA, 19 nt, Artificial Sequence
  Description of Artificial Sequence: Synthetic oligonucleotide
ugcgggauagacauggcca

SEQ ID NO: 140281 - RNA, 19 nt, Artificial Sequence
  Description of Artificial Sequence: Synthetic oligonucleotide
guaaagauuagggaugggc

SEQ ID NO: 140282 - RNA, 19 nt, Artificial Sequence
  Description of Artificial Sequence: Synthetic oligonucleotide
auuacuaugucauguggau

SEQ ID NO: 140283 - RNA, 19 nt, Artificial Sequence
  Description of Artificial Sequence: Synthetic oligonucleotide
gaugaucccaaugacagca

SEQ ID NO: 140284 - RNA, 19 nt, Artificial Sequence
  Description of Artificial Sequence: Synthetic oligonucleotide
cucaaauacagcuauccca

SEQ ID NO: 140285 - RNA, 19 nt, Artificial Sequence
  Description of Artificial Sequence: Synthetic oligonucleotide
uauacuuauguugauggau

SEQ ID NO: 140286 - RNA, 19 nt, Artificial Sequence
  Description of Artificial Sequence: Synthetic oligonucleotide
uguugagcccaucuggcug

SEQ ID NO: 140287 - RNA, 19 nt, Artificial Sequence
  Description of Artificial Sequence: Synthetic oligonucleotide
aggacaggcacauguguac

SEQ ID NO: 140288 - RNA, 19 nt, Artificial Sequence
  Description of Artificial Sequence: Synthetic oligonucleotide
uuuauagagcuaaccuuac

SEQ ID NO: 140289 - RNA, 19 nt, Artificial Sequence
  Description of Artificial Sequence: Synthetic oligonucleotide
uuuaguauuuucucugcua

SEQ ID NO: 140290 - RNA, 19 nt, Artificial Sequence
  Description of Artificial Sequence: Synthetic oligonucleotide
gacacuaacugaguuuggg

SEQ ID NO: 140291 - RNA, 19 nt, Artificial Sequence
  Description of Artificial Sequence: Synthetic oligonucleotide
uuccgcaacauaaauuuaa

SEQ ID NO: 140292 - RNA, 19 nt, Artificial Sequence
  Description of Artificial Sequence: Synthetic oligonucleotide
ugugugaagcuuccuuuag

SEQ ID NO: 140293 - RNA, 19 nt, Artificial Sequence
  Description of Artificial Sequence: Synthetic oligonucleotide
ccugaaaauuccuaaauac

SEQ ID NO: 140294 - RNA, 19 nt, Artificial Sequence
  Description of Artificial Sequence: Synthetic oligonucleotide
uuuccuguacaccggguug

SEQ ID NO: 140295 - RNA, 19 nt, Artificial Sequence
  Description of Artificial Sequence: Synthetic oligonucleotide
uggagcuuuaauuuccuuc

SEQ ID NO: 140296 - RNA, 19 nt, Artificial Sequence
  Description of Artificial Sequence: Synthetic oligonucleotide
aguccucccuauaugaagc

SEQ ID NO: 140297 - RNA, 19 nt, Artificial Sequence
  Description of Artificial Sequence: Synthetic oligonucleotide
ucuuccgugguuuuccugu

SEQ ID NO: 140298 - RNA, 19 nt, Artificial Sequence
  Description of Artificial Sequence: Synthetic oligonucleotide
auagcacccaauuguacug

SEQ ID NO: 140299 - RNA, 19 nt, Artificial Sequence
  Description of Artificial Sequence: Synthetic oligonucleotide
aaucuaaaugaggaaggga

SEQ ID NO: 140300 - RNA, 19 nt, Artificial Sequence
  Description of Artificial Sequence: Synthetic oligonucleotide
ugcugcgggauagacaugg

SEQ ID NO: 140301 - RNA, 19 nt, Artificial Sequence
  Description of Artificial Sequence: Synthetic oligonucleotide
uuuauggggaaggaaauua

SEQ ID NO: 140302 - RNA, 19 nt, Artificial Sequence
  Description of Artificial Sequence: Synthetic oligonucleotide
cacacacacacacacacac

SEQ ID NO: 140303 - RNA, 19 nt, Artificial Sequence
  Description of Artificial Sequence: Synthetic oligonucleotide
gcuauuaccacuaugggca

SEQ ID NO: 140304 - RNA, 19 nt, Artificial Sequence
  Description of Artificial Sequence: Synthetic oligonucleotide
acagugggcgaucaaagcu

SEQ ID NO: 140305 - RNA, 19 nt, Artificial Sequence
  Description of Artificial Sequence: Synthetic oligonucleotide
aagcgugccucuucucuac

SEQ ID NO: 140306 - RNA, 19 nt, Artificial Sequence
  Description of Artificial Sequence: Synthetic oligonucleotide
uuauacuuauguugaugga

SEQ ID NO: 140307 - RNA, 19 nt, Artificial Sequence
  Description of Artificial Sequence: Synthetic oligonucleotide
acauugagucaggacaggc

SEQ ID NO: 140308 - RNA, 19 nt, Artificial Sequence
  Description of Artificial Sequence: Synthetic oligonucleotide
auauauauauauauauuua

SEQ ID NO: 140309 - RNA, 19 nt, Artificial Sequence
  Description of Artificial Sequence: Synthetic oligonucleotide
acuuauguugauggauagc

SEQ ID NO: 140310 - RNA, 19 nt, Artificial Sequence
  Description of Artificial Sequence: Synthetic oligonucleotide
caaacgcuggcucagcaag

SEQ ID NO: 140311 - RNA, 19 nt, Artificial Sequence
  Description of Artificial Sequence: Synthetic oligonucleotide
aaugucgccacaggucuuc

SEQ ID NO: 140312 - RNA, 19 nt, Artificial Sequence
  Description of Artificial Sequence: Synthetic oligonucleotide
acuuacugauguuuuguga

SEQ ID NO: 140313 - RNA, 19 nt, Artificial Sequence
  Description of Artificial Sequence: Synthetic oligonucleotide
auaagcgugccucuucucu

SEQ ID NO: 140314 - RNA, 19 nt, Artificial Sequence
  Description of Artificial Sequence: Synthetic oligonucleotide
aauagucauaagcgugccu

SEQ ID NO: 140315 - RNA, 19 nt, Artificial Sequence
  Description of Artificial Sequence: Synthetic oligonucleotide
aucauguuagucacucagc

SEQ ID NO: 140316 - RNA, 19 nt, Artificial Sequence
  Description of Artificial Sequence: Synthetic oligonucleotide
aagauuagggaugggcucu

SEQ ID NO: 140317 - RNA, 19 nt, Artificial Sequence
  Description of Artificial Sequence: Synthetic oligonucleotide
agaggagaacauaucuacc

SEQ ID NO: 140318 - RNA, 19 nt, Artificial Sequence
  Description of Artificial Sequence: Synthetic oligonucleotide
aucaguccagaauaccuug

SEQ ID NO: 140319 - RNA, 19 nt, Artificial Sequence
  Description of Artificial Sequence: Synthetic oligonucleotide
cuucaagacuuaaugccac

SEQ ID NO: 140320 - RNA, 19 nt, Artificial Sequence
  Description of Artificial Sequence: Synthetic oligonucleotide
uuuaguuugagagcacaaa

SEQ ID NO: 140321 - RNA, 19 nt, Artificial Sequence
  Description of Artificial Sequence: Synthetic oligonucleotide
acccuuaagaaacauguuu

SEQ ID NO: 140322 - RNA, 19 nt, Artificial Sequence
  Description of Artificial Sequence: Synthetic oligonucleotide
gucaugacagccauggaug

SEQ ID NO: 140323 - RNA, 19 nt, Artificial Sequence
  Description of Artificial Sequence: Synthetic oligonucleotide
cacacacacacacucacac

SEQ ID NO: 140324 - RNA, 19 nt, Artificial Sequence
  Description of Artificial Sequence: Synthetic oligonucleotide
uguuugcaguucaucauaa

SEQ ID NO: 140325 - RNA, 19 nt, Artificial Sequence
  Description of Artificial Sequence: Synthetic oligonucleotide
uugcaaaugcgguuccugc

SEQ ID NO: 140326 - RNA, 19 nt, Artificial Sequence
  Description of Artificial Sequence: Synthetic oligonucleotide
uguaggauuagaguuguuu

SEQ ID NO: 140327 - RNA, 19 nt, Artificial Sequence
  Description of Artificial Sequence: Synthetic oligonucleotide
cuuguuagcucaccaaguc

SEQ ID NO: 140328 - RNA, 19 nt, Artificial Sequence
  Description of Artificial Sequence: Synthetic oligonucleotide
gauuacuaugucaugugga

SEQ ID NO: 140329 - RNA, 19 nt, Artificial Sequence
  Description of Artificial Sequence: Synthetic oligonucleotide
uaacuuacugauguuuugu

SEQ ID NO: 140330 - RNA, 19 nt, Artificial Sequence
  Description of Artificial Sequence: Synthetic oligonucleotide
cacacacacacacacacuc

SEQ ID NO: 140331 - RNA, 19 nt, Artificial Sequence
  Description of Artificial Sequence: Synthetic oligonucleotide
aucaaugucgccacagguc

SEQ ID NO: 140332 - RNA, 19 nt, Artificial Sequence
  Description of Artificial Sequence: Synthetic oligonucleotide
cuaacugaguuugggacag

SEQ ID NO: 140333 - RNA, 19 nt, Artificial Sequence
  Description of Artificial Sequence: Synthetic oligonucleotide
caauauugucugaaaccag

SEQ ID NO: 140334 - RNA, 19 nt, Artificial Sequence
  Description of Artificial Sequence: Synthetic oligonucleotide
auauauauauauauuuaua

SEQ ID NO: 140335 - RNA, 19 nt, Artificial Sequence
  Description of Artificial Sequence: Synthetic oligonucleotide
aaaguuacacacacacaca

SEQ ID NO: 140336 - RNA, 19 nt, Artificial Sequence
  Description of Artificial Sequence: Synthetic oligonucleotide
gguggucccauccucaggg

SEQ ID NO: 140337 - RNA, 19 nt, Artificial Sequence
  Description of Artificial Sequence: Synthetic oligonucleotide
uuauggggaaggaaauuau

SEQ ID NO: 140338 - RNA, 19 nt, Artificial Sequence
  Description of Artificial Sequence: Synthetic oligonucleotide
auagagcuaaccuuacuuu

SEQ ID NO: 140339 - RNA, 19 nt, Artificial Sequence
  Description of Artificial Sequence: Synthetic oligonucleotide
ggauaguuguuccaguggc

SEQ ID NO: 140340 - RNA, 19 nt, Artificial Sequence
  Description of Artificial Sequence: Synthetic oligonucleotide
uuauagagcuaaccuuacu

SEQ ID NO: 140341 - RNA, 19 nt, Artificial Sequence
  Description of Artificial Sequence: Synthetic oligonucleotide
uugugguuaccuuuccgca

SEQ ID NO: 140342 - RNA, 19 nt, Artificial Sequence
  Description of Artificial Sequence: Synthetic oligonucleotide
uguggaccauuuuaaaaua

SEQ ID NO: 140343 - RNA, 19 nt, Artificial Sequence
  Description of Artificial Sequence: Synthetic oligonucleotide
cagaccaguaaagauuagg

SEQ ID NO: 140344 - RNA, 19 nt, Artificial Sequence
  Description of Artificial Sequence: Synthetic oligonucleotide
uccgcaacauaaauuuaaa

SEQ ID NO: 140345 - RNA, 19 nt, Artificial Sequence
  Description of Artificial Sequence: Synthetic oligonucleotide
uuacacacacacacacaca

SEQ ID NO: 140346 - RNA, 19 nt, Artificial Sequence
  Description of Artificial Sequence: Synthetic oligonucleotide
aguacaaacgcuggcucag

SEQ ID NO: 140347 - RNA, 19 nt, Artificial Sequence
  Description of Artificial Sequence: Synthetic oligonucleotide
ggcuauuaccacuaugggc

SEQ ID NO: 140348 - RNA, 19 nt, Artificial Sequence
  Description of Artificial Sequence: Synthetic oligonucleotide
agccgauuugcacugaaaa

SEQ ID NO: 140349 - RNA, 19 nt, Artificial Sequence
  Description of Artificial Sequence: Synthetic oligonucleotide
uguauugcuguaggauuag

SEQ ID NO: 140350 - RNA, 19 nt, Artificial Sequence
  Description of Artificial Sequence: Synthetic oligonucleotide
aaaccaguguuugccgguc

SEQ ID NO: 140351 - RNA, 19 nt, Artificial Sequence
  Description of Artificial Sequence: Synthetic oligonucleotide
uccauugggccauucaaua

SEQ ID NO: 140352 - RNA, 19 nt, Artificial Sequence
  Description of Artificial Sequence: Synthetic oligonucleotide
aauuguacugugacuggga

SEQ ID NO: 140353 - RNA, 19 nt, Artificial Sequence
  Description of Artificial Sequence: Synthetic oligonucleotide
caauuguacugugacuggg

SEQ ID NO: 140354 - RNA, 19 nt, Artificial Sequence
  Description of Artificial Sequence: Synthetic oligonucleotide
agaucaguccagaauaccu

SEQ ID NO: 140355 - RNA, 19 nt, Artificial Sequence
  Description of Artificial Sequence: Synthetic oligonucleotide
uccuuuggauguuugcagu

SEQ ID NO: 140356 - RNA, 19 nt, Artificial Sequence
  Description of Artificial Sequence: Synthetic oligonucleotide
gaacaauagucauaagcgu

SEQ ID NO: 140357 - RNA, 19 nt, Artificial Sequence
  Description of Artificial Sequence: Synthetic oligonucleotide
aggcuaacguuguaguuga

SEQ ID NO: 140358 - RNA, 19 nt, Artificial Sequence
  Description of Artificial Sequence: Synthetic oligonucleotide
aacgcuggcucagcaaguc

SEQ ID NO: 140359 - RNA, 19 nt, Artificial Sequence
  Description of Artificial Sequence: Synthetic oligonucleotide
ggauguuugcaguucauca

SEQ ID NO: 140360 - RNA, 19 nt, Artificial Sequence
  Description of Artificial Sequence: Synthetic oligonucleotide
uagagcuaaccuuacuuuu

SEQ ID NO: 140361 - RNA, 19 nt, Artificial Sequence
  Description of Artificial Sequence: Synthetic oligonucleotide
auuguacugugacugggau

SEQ ID NO: 140362 - RNA, 19 nt, Artificial Sequence
  Description of Artificial Sequence: Synthetic oligonucleotide
ugaaaauuuggagcuuuaa

SEQ ID NO: 140363 - RNA, 19 nt, Artificial Sequence
  Description of Artificial Sequence: Synthetic oligonucleotide
ugcaaaugcgguuccugcu

SEQ ID NO: 140364 - RNA, 19 nt, Artificial Sequence
  Description of Artificial Sequence: Synthetic oligonucleotide
cagcuaucccaaaagggug

SEQ ID NO: 140365 - RNA, 19 nt, Artificial Sequence
  Description of Artificial Sequence: Synthetic oligonucleotide
agaguagugcauaggacug

SEQ ID NO: 140366 - RNA, 19 nt, Artificial Sequence
  Description of Artificial Sequence: Synthetic oligonucleotide
uguuagucacucagcagua

SEQ ID NO: 140367 - RNA, 19 nt, Artificial Sequence
  Description of Artificial Sequence: Synthetic oligonucleotide
uagggucauggauaguugu

SEQ ID NO: 140368 - RNA, 19 nt, Artificial Sequence
  Description of Artificial Sequence: Synthetic oligonucleotide
uaucuacccuuucugccac

SEQ ID NO: 140369 - RNA, 19 nt, Artificial Sequence
  Description of Artificial Sequence: Synthetic oligonucleotide
cacacacacacacacucac

SEQ ID NO: 140370 - RNA, 19 nt, Artificial Sequence
  Description of Artificial Sequence: Synthetic oligonucleotide
agagugauuggagaucuga

SEQ ID NO: 140371 - RNA, 19 nt, Artificial Sequence
  Description of Artificial Sequence: Synthetic oligonucleotide
uaggccauugagccgauuu

SEQ ID NO: 140372 - RNA, 19 nt, Artificial Sequence
  Description of Artificial Sequence: Synthetic oligonucleotide
cuucauggguagugcaacc

SEQ ID NO: 140373 - RNA, 19 nt, Artificial Sequence
  Description of Artificial Sequence: Synthetic oligonucleotide
uccccggcaagaccaaaag

SEQ ID NO: 140374 - RNA, 19 nt, Artificial Sequence
  Description of Artificial Sequence: Synthetic oligonucleotide
uuccauugggccauucaau

SEQ ID NO: 140375 - RNA, 19 nt, Artificial Sequence
  Description of Artificial Sequence: Synthetic oligonucleotide
ugggccauucaauauuguc

SEQ ID NO: 140376 - RNA, 19 nt, Artificial Sequence
  Description of Artificial Sequence: Synthetic oligonucleotide
auaguguaaggagacucug

SEQ ID NO: 140377 - RNA, 19 nt, Artificial Sequence
  Description of Artificial Sequence: Synthetic oligonucleotide
gaaaauuccuaaauacccu

SEQ ID NO: 140378 - RNA, 19 nt, Artificial Sequence
  Description of Artificial Sequence: Synthetic oligonucleotide
cagugggcgaucaaagcug

SEQ ID NO: 140379 - RNA, 19 nt, Artificial Sequence
  Description of Artificial Sequence: Synthetic oligonucleotide
gucauagcagaggcuaacg

SEQ ID NO: 140380 - RNA, 19 nt, Artificial Sequence
  Description of Artificial Sequence: Synthetic oligonucleotide
cucgcuugcacuugacgac

SEQ ID NO: 140381 - RNA, 19 nt, Artificial Sequence
  Description of Artificial Sequence: Synthetic oligonucleotide
auuaccacuaugggcacga

SEQ ID NO: 140382 - RNA, 19 nt, Artificial Sequence
  Description of Artificial Sequence: Synthetic oligonucleotide
ccucccuauaugaagcucg

SEQ ID NO: 140383 - RNA, 19 nt, Artificial Sequence
  Description of Artificial Sequence: Synthetic oligonucleotide
acccaauagcacccaauug

SEQ ID NO: 140384 - RNA, 19 nt, Artificial Sequence
  Description of Artificial Sequence: Synthetic oligonucleotide
aggcagcucggaaagaggg

SEQ ID NO: 140385 - RNA, 19 nt, Artificial Sequence
  Description of Artificial Sequence: Synthetic oligonucleotide
agagcuaaccuuacuuuug

SEQ ID NO: 140386 - RNA, 19 nt, Artificial Sequence
  Description of Artificial Sequence: Synthetic oligonucleotide
ucggccaagauggaaauuu

SEQ ID NO: 140387 - RNA, 19 nt, Artificial Sequence
  Description of Artificial Sequence: Synthetic oligonucleotide
augagguacgacgugggug

SEQ ID NO: 140388 - RNA, 19 nt, Artificial Sequence
  Description of Artificial Sequence: Synthetic oligonucleotide
uugccggucugcaccauug

SEQ ID NO: 140389 - RNA, 19 nt, Artificial Sequence
  Description of Artificial Sequence: Synthetic oligonucleotide
gagcuaaccuuacuuuuga

SEQ ID NO: 140390 - RNA, 19 nt, Artificial Sequence
  Description of Artificial Sequence: Synthetic oligonucleotide
uggcauucaucauccaguc

SEQ ID NO: 140391 - RNA, 19 nt, Artificial Sequence
  Description of Artificial Sequence: Synthetic oligonucleotide
uucauggguagugcaacca

SEQ ID NO: 140392 - RNA, 19 nt, Artificial Sequence
  Description of Artificial Sequence: Synthetic oligonucleotide
cuuugcaguucuuggucug

SEQ ID NO: 140393 - RNA, 19 nt, Artificial Sequence
  Description of Artificial Sequence: Synthetic oligonucleotide
acguccugaaaauuccuaa

SEQ ID NO: 140394 - RNA, 19 nt, Artificial Sequence
  Description of Artificial Sequence: Synthetic oligonucleotide
ucagaccaguaaagauuag

SEQ ID NO: 140395 - RNA, 19 nt, Artificial Sequence
  Description of Artificial Sequence: Synthetic oligonucleotide
agacccauauauagaaaug

SEQ ID NO: 140396 - RNA, 19 nt, Artificial Sequence
  Description of Artificial Sequence: Synthetic oligonucleotide
gggacacuaacugaguuug

SEQ ID NO: 140397 - RNA, 19 nt, Artificial Sequence
  Description of Artificial Sequence: Synthetic oligonucleotide
gacguggguggucccaucc

SEQ ID NO: 140398 - RNA, 19 nt, Artificial Sequence
  Description of Artificial Sequence: Synthetic oligonucleotide
auagugcugggagugguug

SEQ ID NO: 140399 - RNA, 19 nt, Artificial Sequence
  Description of Artificial Sequence: Synthetic oligonucleotide
uagucauaagcgugccucu

SEQ ID NO: 140400 - RNA, 19 nt, Artificial Sequence
  Description of Artificial Sequence: Synthetic oligonucleotide
aagccaaucuugaggucag

SEQ ID NO: 140401 - RNA, 19 nt, Artificial Sequence
  Description of Artificial Sequence: Synthetic oligonucleotide
uguacuugggagagugauu

SEQ ID NO: 140402 - RNA, 19 nt, Artificial Sequence
  Description of Artificial Sequence: Synthetic oligonucleotide
accuaagccacagaucaga

SEQ ID NO: 140403 - RNA, 19 nt, Artificial Sequence
  Description of Artificial Sequence: Synthetic oligonucleotide
cccaauuguacugugacug

SEQ ID NO: 140404 - RNA, 19 nt, Artificial Sequence
  Description of Artificial Sequence: Synthetic oligonucleotide
gcuaacguuguaguugagg

SEQ ID NO: 140405 - RNA, 19 nt, Artificial Sequence
  Description of Artificial Sequence: Synthetic oligonucleotide
ugcaaacuguggcaucuau

SEQ ID NO: 140406 - RNA, 19 nt, Artificial Sequence
  Description of Artificial Sequence: Synthetic oligonucleotide
gucugcaccauugagccca

SEQ ID NO: 140407 - RNA, 19 nt, Artificial Sequence
  Description of Artificial Sequence: Synthetic oligonucleotide
cugaccuaagccacagauc

SEQ ID NO: 140408 - RNA, 19 nt, Artificial Sequence
  Description of Artificial Sequence: Synthetic oligonucleotide
caauagucauaagcgugcc

SEQ ID NO: 140409 - RNA, 19 nt, Artificial Sequence
  Description of Artificial Sequence: Synthetic oligonucleotide
acuaacuuacugauguuuu

SEQ ID NO: 140410 - RNA, 19 nt, Artificial Sequence
  Description of Artificial Sequence: Synthetic oligonucleotide
cugcgggauagacauggcc

SEQ ID NO: 140411 - RNA, 19 nt, Artificial Sequence
  Description of Artificial Sequence: Synthetic oligonucleotide
gagcaguccucccuauaug

SEQ ID NO: 140412 - RNA, 19 nt, Artificial Sequence
  Description of Artificial Sequence: Synthetic oligonucleotide
uggucccauccucagggca

SEQ ID NO: 140413 - RNA, 19 nt, Artificial Sequence
  Description of Artificial Sequence: Synthetic oligonucleotide
uuagcucaccaaguccuca

SEQ ID NO: 140414 - RNA, 19 nt, Artificial Sequence
  Description of Artificial Sequence: Synthetic oligonucleotide
cuauuaccacuaugggcac

SEQ ID NO: 140415 - RNA, 19 nt, Artificial Sequence
  Description of Artificial Sequence: Synthetic oligonucleotide
aguaaagauuagggauggg

SEQ ID NO: 140416 - RNA, 19 nt, Artificial Sequence
  Description of Artificial Sequence: Synthetic oligonucleotide
gggcuauuaccacuauggg

SEQ ID NO: 140417 - RNA, 19 nt, Artificial Sequence
  Description of Artificial Sequence: Synthetic oligonucleotide
gguagcaucucuucauguc

SEQ ID NO: 140418 - RNA, 19 nt, Artificial Sequence
  Description of Artificial Sequence: Synthetic oligonucleotide
acacacacacacucacaca

SEQ ID NO: 140419 - RNA, 19 nt, Artificial Sequence
  Description of Artificial Sequence: Synthetic oligonucleotide
auacucucacuucucuaaa

SEQ ID NO: 140420 - RNA, 19 nt, Artificial Sequence
  Description of Artificial Sequence: Synthetic oligonucleotide
cauugagccgauuugcacu

SEQ ID NO: 140421 - RNA, 19 nt, Artificial Sequence
  Description of Artificial Sequence: Synthetic oligonucleotide
gcaucuuucuguugccucc

SEQ ID NO: 140422 - RNA, 19 nt, Artificial Sequence
  Description of Artificial Sequence: Synthetic oligonucleotide
uggauguuugcaguucauc

SEQ ID NO: 140423 - RNA, 19 nt, Artificial Sequence
  Description of Artificial Sequence: Synthetic oligonucleotide
acacauaaacacagagucu

SEQ ID NO: 140424 - RNA, 19 nt, Artificial Sequence
  Description of Artificial Sequence: Synthetic oligonucleotide
guaggauuagaguuguuuu

SEQ ID NO: 140425 - RNA, 19 nt, Artificial Sequence
  Description of Artificial Sequence: Synthetic oligonucleotide
aagccuagguggugucaug

SEQ ID NO: 140426 - RNA, 19 nt, Artificial Sequence
  Description of Artificial Sequence: Synthetic oligonucleotide
ugacugggauacccuuaag

SEQ ID NO: 140427 - RNA, 19 nt, Artificial Sequence
  Description of Artificial Sequence: Synthetic oligonucleotide
auaugaagcucgucuucau

SEQ ID NO: 140428 - RNA, 19 nt, Artificial Sequence
  Description of Artificial Sequence: Synthetic oligonucleotide
cugggauacccuuaagaaa

SEQ ID NO: 140429 - RNA, 19 nt, Artificial Sequence
  Description of Artificial Sequence: Synthetic oligonucleotide
acuccaugagguacgacgu

SEQ ID NO: 140430 - RNA, 19 nt, Artificial Sequence
  Description of Artificial Sequence: Synthetic oligonucleotide
guuugcaguucaucauaac

SEQ ID NO: 140431 - RNA, 19 nt, Artificial Sequence
  Description of Artificial Sequence: Synthetic oligonucleotide
ugggccagucauaccaaaa

SEQ ID NO: 140432 - RNA, 19 nt, Artificial Sequence
  Description of Artificial Sequence: Synthetic oligonucleotide
agcuacagcuuugcaguuc

SEQ ID NO: 140433 - RNA, 19 nt, Artificial Sequence
  Description of Artificial Sequence: Synthetic oligonucleotide
ugauugcugcgggauagac

SEQ ID NO: 140434 - RNA, 19 nt, Artificial Sequence
  Description of Artificial Sequence: Synthetic oligonucleotide
gcaaaugcgguuccugcug

SEQ ID NO: 140435 - RNA, 19 nt, Artificial Sequence
  Description of Artificial Sequence: Synthetic oligonucleotide
cuggcugucuucauuccca

SEQ ID NO: 140436 - RNA, 19 nt, Artificial Sequence
  Description of Artificial Sequence: Synthetic oligonucleotide
auuuaguuugagagcacaa

SEQ ID NO: 140437 - RNA, 19 nt, Artificial Sequence
  Description of Artificial Sequence: Synthetic oligonucleotide
gaagggaguugaagugucc

SEQ ID NO: 140438 - RNA, 19 nt, Artificial Sequence
  Description of Artificial Sequence: Synthetic oligonucleotide
acaaacgcuggcucagcaa

SEQ ID NO: 140439 - RNA, 19 nt, Artificial Sequence
  Description of Artificial Sequence: Synthetic oligonucleotide
ccaauuguacugugacugg

SEQ ID NO: 140440 - RNA, 19 nt, Artificial Sequence
  Description of Artificial Sequence: Synthetic oligonucleotide
uuccuguacaccggguugu

SEQ ID NO: 140441 - RNA, 19 nt, Artificial Sequence
  Description of Artificial Sequence: Synthetic oligonucleotide
agacuuaaugccacucgcu

SEQ ID NO: 140442 - RNA, 19 nt, Artificial Sequence
  Description of Artificial Sequence: Synthetic oligonucleotide
cucucacuucucuaaauua

SEQ ID NO: 140443 - RNA, 19 nt, Artificial Sequence
  Description of Artificial Sequence: Synthetic oligonucleotide
uuccccggcaagaccaaaa

SEQ ID NO: 140444 - RNA, 19 nt, Artificial Sequence
  Description of Artificial Sequence: Synthetic oligonucleotide
gucauaagcgugccucuuc

SEQ ID NO: 140445 - RNA, 19 nt, Artificial Sequence
  Description of Artificial Sequence: Synthetic oligonucleotide
gauugcugcgggauagaca

SEQ ID NO: 140446 - RNA, 19 nt, Artificial Sequence
  Description of Artificial Sequence: Synthetic oligonucleotide
aguuacacacacacacaca

SEQ ID NO: 140447 - RNA, 19 nt, Artificial Sequence
  Description of Artificial Sequence: Synthetic oligonucleotide
uggguagugcaaccaguua

SEQ ID NO: 140448 - RNA, 19 nt, Artificial Sequence
  Description of Artificial Sequence: Synthetic oligonucleotide
ccucaaauacagcuauccc

SEQ ID NO: 140449 - RNA, 19 nt, Artificial Sequence
  Description of Artificial Sequence: Synthetic oligonucleotide
guuaccuuuccgcaacaua

SEQ ID NO: 140450 - RNA, 19 nt, Artificial Sequence
  Description of Artificial Sequence: Synthetic oligonucleotide
guagggucauggauaguug

SEQ ID NO: 140451 - RNA, 19 nt, Artificial Sequence
  Description of Artificial Sequence: Synthetic oligonucleotide
ucgcuugcacuugacgaca

SEQ ID NO: 140452 - RNA, 19 nt, Artificial Sequence
  Description of Artificial Sequence: Synthetic oligonucleotide
ugguugcagggcuuagggu

SEQ ID NO: 140453 - RNA, 19 nt, Artificial Sequence
  Description of Artificial Sequence: Synthetic oligonucleotide
cuaugggcacgaugauccc

SEQ ID NO: 140454 - RNA, 19 nt, Artificial Sequence
  Description of Artificial Sequence: Synthetic oligonucleotide
cagcugugaccuugguucc

SEQ ID NO: 140455 - RNA, 19 nt, Artificial Sequence
  Description of Artificial Sequence: Synthetic oligonucleotide
gacuuaaugccacucgcuu

SEQ ID NO: 140456 - RNA, 19 nt, Artificial Sequence
  Description of Artificial Sequence: Synthetic oligonucleotide
accggguugucaaaauuca

SEQ ID NO: 140457 - RNA, 19 nt, Artificial Sequence
  Description of Artificial Sequence: Synthetic oligonucleotide
uugggccauucaauauugu

SEQ ID NO: 140458 - RNA, 19 nt, Artificial Sequence
  Description of Artificial Sequence: Synthetic oligonucleotide
cggucugcaccauugagcc

SEQ ID NO: 140459 - RNA, 19 nt, Artificial Sequence
  Description of Artificial Sequence: Synthetic oligonucleotide
ucauaacuuugugguuacc

SEQ ID NO: 140460 - RNA, 19 nt, Artificial Sequence
  Description of Artificial Sequence: Synthetic oligonucleotide
uacaccggguugucaaaau

SEQ ID NO: 140461 - RNA, 19 nt, Artificial Sequence
  Description of Artificial Sequence: Synthetic oligonucleotide
auggaaauuucuaggccau

SEQ ID NO: 140462 - RNA, 19 nt, Artificial Sequence
  Description of Artificial Sequence: Synthetic oligonucleotide
cagggcuauuaccacuaug

SEQ ID NO: 140463 - RNA, 19 nt, Artificial Sequence
  Description of Artificial Sequence: Synthetic oligonucleotide
ggaguggucuuuguauugc

SEQ ID NO: 140464 - RNA, 19 nt, Artificial Sequence
  Description of Artificial Sequence: Synthetic oligonucleotide
agucaaugcuggauagcug

SEQ ID NO: 140465 - RNA, 19 nt, Artificial Sequence
  Description of Artificial Sequence: Synthetic oligonucleotide
ccggucugcaccauugagc

SEQ ID NO: 140466 - RNA, 19 nt, Artificial Sequence
  Description of Artificial Sequence: Synthetic oligonucleotide
aaacgcuggcucagcaagu

SEQ ID NO: 140467 - RNA, 19 nt, Artificial Sequence
  Description of Artificial Sequence: Synthetic oligonucleotide
caccauugagcccagauuu

SEQ ID NO: 140468 - RNA, 19 nt, Artificial Sequence
  Description of Artificial Sequence: Synthetic oligonucleotide
caugugcacucaaagccaa

SEQ ID NO: 140469 - RNA, 19 nt, Artificial Sequence
  Description of Artificial Sequence: Synthetic oligonucleotide
agcuaaccuuacuuuugaa

SEQ ID NO: 140470 - RNA, 19 nt, Artificial Sequence
  Description of Artificial Sequence: Synthetic oligonucleotide
ccaaaagcuccuugagggc

SEQ ID NO: 140471 - RNA, 19 nt, Artificial Sequence
  Description of Artificial Sequence: Synthetic oligonucleotide
gaacagucugugugaagcu

SEQ ID NO: 140472 - RNA, 19 nt, Artificial Sequence
  Description of Artificial Sequence: Synthetic oligonucleotide
uagcacccaauuguacugu

SEQ ID NO: 140473 - RNA, 19 nt, Artificial Sequence
  Description of Artificial Sequence: Synthetic oligonucleotide
cauaagcgugccucuucuc

SEQ ID NO: 140474 - RNA, 19 nt, Artificial Sequence
  Description of Artificial Sequence: Synthetic oligonucleotide
cacuaugggcacgaugauc

SEQ ID NO: 140475 - RNA, 19 nt, Artificial Sequence
  Description of Artificial Sequence: Synthetic oligonucleotide
cauugaagucaaugcugga

SEQ ID NO: 140476 - RNA, 19 nt, Artificial Sequence
  Description of Artificial Sequence: Synthetic oligonucleotide
caaaugcgguuccugcuga

SEQ ID NO: 140477 - RNA, 19 nt, Artificial Sequence
  Description of Artificial Sequence: Synthetic oligonucleotide
augaucccaaugacagcag

SEQ ID NO: 140478 - RNA, 19 nt, Artificial Sequence
  Description of Artificial Sequence: Synthetic oligonucleotide
agaggguucuucgggaguu

SEQ ID NO: 140479 - RNA, 19 nt, Artificial Sequence
  Description of Artificial Sequence: Synthetic oligonucleotide
ugucgccacaggucuucug

SEQ ID NO: 140480 - RNA, 19 nt, Artificial Sequence
  Description of Artificial Sequence: Synthetic oligonucleotide
cuccaugagguacgacgug

SEQ ID NO: 140481 - RNA, 19 nt, Artificial Sequence
  Description of Artificial Sequence: Synthetic oligonucleotide
ccagaucaguccagaauac

SEQ ID NO: 140482 - RNA, 19 nt, Artificial Sequence
  Description of Artificial Sequence: Synthetic oligonucleotide
agggugacucaggaaguca

SEQ ID NO: 140483 - RNA, 19 nt, Artificial Sequence
  Description of Artificial Sequence: Synthetic oligonucleotide
acacacacacacacacuca

SEQ ID NO: 140484 - RNA, 19 nt, Artificial Sequence
  Description of Artificial Sequence: Synthetic oligonucleotide
uccucccuauaugaagcuc

SEQ ID NO: 140485 - RNA, 19 nt, Artificial Sequence
  Description of Artificial Sequence: Synthetic oligonucleotide
cugaaaauuuggagcuuua

SEQ ID NO: 140486 - RNA, 19 nt, Artificial Sequence
  Description of Artificial Sequence: Synthetic oligonucleotide
uacgacgugggugguccca

SEQ ID NO: 140487 - RNA, 19 nt, Artificial Sequence
  Description of Artificial Sequence: Synthetic oligonucleotide
ggacacugaccuaagccac

SEQ ID NO: 140488 - RNA, 19 nt, Artificial Sequence
  Description of Artificial Sequence: Synthetic oligonucleotide
acuaugucauguggauuau

SEQ ID NO: 140489 - RNA, 19 nt, Artificial Sequence
  Description of Artificial Sequence: Synthetic oligonucleotide
cuucgggaguuggugcagc

SEQ ID NO: 140490 - RNA, 19 nt, Artificial Sequence
  Description of Artificial Sequence: Synthetic oligonucleotide
ggacugaacuccaugaggu

SEQ ID NO: 140491 - RNA, 19 nt, Artificial Sequence
  Description of Artificial Sequence: Synthetic oligonucleotide
ucuccagaucagguaccca

SEQ ID NO: 140492 - RNA, 19 nt, Artificial Sequence
  Description of Artificial Sequence: Synthetic oligonucleotide
caggacaggcacaugugua

SEQ ID NO: 140493 - RNA, 19 nt, Artificial Sequence
  Description of Artificial Sequence: Synthetic oligonucleotide
gggcgaucaaagcugcuga

SEQ ID NO: 140494 - RNA, 19 nt, Artificial Sequence
  Description of Artificial Sequence: Synthetic oligonucleotide
guacaaacgcuggcucagc

SEQ ID NO: 140495 - RNA, 19 nt, Artificial Sequence
  Description of Artificial Sequence: Synthetic oligonucleotide
ccaguacaaacgcuggcuc

SEQ ID NO: 140496 - RNA, 19 nt, Artificial Sequence
  Description of Artificial Sequence: Synthetic oligonucleotide
gaucaguccagaauaccuu

SEQ ID NO: 140497 - RNA, 19 nt, Artificial Sequence
  Description of Artificial Sequence: Synthetic oligonucleotide
acacacacacacacucaca

SEQ ID NO: 140498 - RNA, 19 nt, Artificial Sequence
  Description of Artificial Sequence: Synthetic oligonucleotide
acacacacacacacacaca

SEQ ID NO: 140499 - RNA, 19 nt, Artificial Sequence
  Description of Artificial Sequence: Synthetic oligonucleotide
acacacacacacacacacu

SEQ ID NO: 140500 - RNA, 19 nt, Artificial Sequence
  Description of Artificial Sequence: Synthetic oligonucleotide
cauugggccauucaauauu

SEQ ID NO: 140501 - RNA, 19 nt, Artificial Sequence
  Description of Artificial Sequence: Synthetic oligonucleotide
gagagugauuggagaucug

SEQ ID NO: 140502 - RNA, 19 nt, Artificial Sequence
  Description of Artificial Sequence: Synthetic oligonucleotide
caguucauggaagauuacu

SEQ ID NO: 140503 - RNA, 19 nt, Artificial Sequence
  Description of Artificial Sequence: Synthetic oligonucleotide
cccuauaugaagcucgucu

SEQ ID NO: 140504 - RNA, 19 nt, Artificial Sequence
  Description of Artificial Sequence: Synthetic oligonucleotide
cacguccugaaaauuccua

SEQ ID NO: 140505 - RNA, 19 nt, Artificial Sequence
  Description of Artificial Sequence: Synthetic oligonucleotide
acacacacacucacacaga

SEQ ID NO: 140506 - RNA, 19 nt, Artificial Sequence
  Description of Artificial Sequence: Synthetic oligonucleotide
uugcugcgggauagacaug

SEQ ID NO: 140507 - RNA, 19 nt, Artificial Sequence
  Description of Artificial Sequence: Synthetic oligonucleotide
uaacugaguuugggacagc

SEQ ID NO: 140508 - RNA, 19 nt, Artificial Sequence
  Description of Artificial Sequence: Synthetic oligonucleotide
agguacgacgugggugguc

SEQ ID NO: 140509 - RNA, 19 nt, Artificial Sequence
  Description of Artificial Sequence: Synthetic oligonucleotide
guguacuugggagagugau

SEQ ID NO: 140510 - RNA, 19 nt, Artificial Sequence
  Description of Artificial Sequence: Synthetic oligonucleotide
agcgugccucuucucuaca

SEQ ID NO: 140511 - RNA, 19 nt, Artificial Sequence
  Description of Artificial Sequence: Synthetic oligonucleotide
ggacacuaacugaguuugg

SEQ ID NO: 140512 - RNA, 19 nt, Artificial Sequence
  Description of Artificial Sequence: Synthetic oligonucleotide
gguagggucauggauaguu

SEQ ID NO: 140513 - RNA, 19 nt, Artificial Sequence
  Description of Artificial Sequence: Synthetic oligonucleotide
guagugcauaggacugaac

SEQ ID NO: 140514 - RNA, 19 nt, Artificial Sequence
  Description of Artificial Sequence: Synthetic oligonucleotide
cacacuuaaaguagcccuu

SEQ ID NO: 140515 - RNA, 19 nt, Artificial Sequence
  Description of Artificial Sequence: Synthetic oligonucleotide
gaucagguacccacucaua

SEQ ID NO: 140516 - RNA, 19 nt, Artificial Sequence
  Description of Artificial Sequence: Synthetic oligonucleotide
gcacuugacgacaggcagc

SEQ ID NO: 140517 - RNA, 19 nt, Artificial Sequence
  Description of Artificial Sequence: Synthetic oligonucleotide
agggucauggauaguuguu

SEQ ID NO: 140518 - RNA, 19 nt, Artificial Sequence
  Description of Artificial Sequence: Synthetic oligonucleotide
ucccuauaugaagcucguc

SEQ ID NO: 140519 - RNA, 19 nt, Artificial Sequence
  Description of Artificial Sequence: Synthetic oligonucleotide
ggguggucccauccucagg

SEQ ID NO: 140520 - RNA, 19 nt, Artificial Sequence
  Description of Artificial Sequence: Synthetic oligonucleotide
gggagagugauuggagauc

SEQ ID NO: 140521 - RNA, 19 nt, Artificial Sequence
  Description of Artificial Sequence: Synthetic oligonucleotide
cacuugacgacaggcagcu

SEQ ID NO: 140522 - RNA, 19 nt, Artificial Sequence
  Description of Artificial Sequence: Synthetic oligonucleotide
ccagaucagguacccacuc

SEQ ID NO: 140523 - RNA, 19 nt, Artificial Sequence
  Description of Artificial Sequence: Synthetic oligonucleotide
ccccguuugguuauauaca

SEQ ID NO: 140524 - RNA, 19 nt, Artificial Sequence
  Description of Artificial Sequence: Synthetic oligonucleotide
agcugucccaugaauucuu

SEQ ID NO: 140525 - RNA, 19 nt, Artificial Sequence
  Description of Artificial Sequence: Synthetic oligonucleotide
gcgugccucuucucuacag

SEQ ID NO: 140526 - RNA, 19 nt, Artificial Sequence
  Description of Artificial Sequence: Synthetic oligonucleotide
ccaugaauucuucaugggu

SEQ ID NO: 140527 - RNA, 19 nt, Artificial Sequence
  Description of Artificial Sequence: Synthetic oligonucleotide
caguguuugccggucugca

SEQ ID NO: 140528 - RNA, 19 nt, Artificial Sequence
  Description of Artificial Sequence: Synthetic oligonucleotide
uccuguacaccggguuguc

SEQ ID NO: 140529 - RNA, 19 nt, Artificial Sequence
  Description of Artificial Sequence: Synthetic oligonucleotide
ggcauucaucauccaguca

SEQ ID NO: 140530 - RNA, 19 nt, Artificial Sequence
  Description of Artificial Sequence: Synthetic oligonucleotide
gcgggauagacauggccaa

SEQ ID NO: 140531 - RNA, 19 nt, Artificial Sequence
  Description of Artificial Sequence: Synthetic oligonucleotide
gcuaucccaaaagggugac

SEQ ID NO: 140532 - RNA, 19 nt, Artificial Sequence
  Description of Artificial Sequence: Synthetic oligonucleotide
ccccggcaagaccaaaagc

SEQ ID NO: 140533 - RNA, 19 nt, Artificial Sequence
  Description of Artificial Sequence: Synthetic oligonucleotide
ccguuugguuauauacauc

SEQ ID NO: 140534 - RNA, 19 nt, Artificial Sequence
  Description of Artificial Sequence: Synthetic oligonucleotide
ggucugcaccauugagccc

SEQ ID NO: 140535 - RNA, 19 nt, Artificial Sequence
  Description of Artificial Sequence: Synthetic oligonucleotide
acuugacgacaggcagcuc

SEQ ID NO: 140536 - RNA, 19 nt, Artificial Sequence
  Description of Artificial Sequence: Synthetic oligonucleotide
agauuagggaugggcucuu

SEQ ID NO: 140537 - RNA, 19 nt, Artificial Sequence
  Description of Artificial Sequence: Synthetic oligonucleotide
cagguacuguccuugucau

SEQ ID NO: 140538 - RNA, 19 nt, Artificial Sequence
  Description of Artificial Sequence: Synthetic oligonucleotide
accaagccccucaaacuua

SEQ ID NO: 140539 - RNA, 19 nt, Artificial Sequence
  Description of Artificial Sequence: Synthetic oligonucleotide
cauucccauagugcuggga

SEQ ID NO: 140540 - RNA, 19 nt, Artificial Sequence
  Description of Artificial Sequence: Synthetic oligonucleotide
cucccuauaugaagcucgu

SEQ ID NO: 140541 - RNA, 19 nt, Artificial Sequence
  Description of Artificial Sequence: Synthetic oligonucleotide
ccgcaacauaaauuuaaaa

SEQ ID NO: 140542 - RNA, 19 nt, Artificial Sequence
  Description of Artificial Sequence: Synthetic oligonucleotide
guggauuauugagguucuc

SEQ ID NO: 140543 - RNA, 19 nt, Artificial Sequence
  Description of Artificial Sequence: Synthetic oligonucleotide
gccgauuugcacugaaaau

SEQ ID NO: 140544 - RNA, 19 nt, Artificial Sequence
  Description of Artificial Sequence: Synthetic oligonucleotide
guccucccuauaugaagcu

SEQ ID NO: 140545 - RNA, 19 nt, Artificial Sequence
  Description of Artificial Sequence: Synthetic oligonucleotide
ggcaagaccaaaagcuccu

SEQ ID NO: 140546 - RNA, 19 nt, Artificial Sequence
  Description of Artificial Sequence: Synthetic oligonucleotide
ggauagacauggccaauuu

SEQ ID NO: 140547 - RNA, 19 nt, Artificial Sequence
  Description of Artificial Sequence: Synthetic oligonucleotide
ccuaagccacagaucagaa

SEQ ID NO: 140548 - RNA, 19 nt, Artificial Sequence
  Description of Artificial Sequence: Synthetic oligonucleotide
guacugugacugggauacc

SEQ ID NO: 140549 - RNA, 19 nt, Artificial Sequence
  Description of Artificial Sequence: Synthetic oligonucleotide
uuaccacuaugggcacgau

SEQ ID NO: 140550 - RNA, 19 nt, Artificial Sequence
  Description of Artificial Sequence: Synthetic oligonucleotide
cccauagugcugggagugg

SEQ ID NO: 140551 - RNA, 19 nt, Artificial Sequence
  Description of Artificial Sequence: Synthetic oligonucleotide
cccguuugguuauauacau

SEQ ID NO: 140552 - RNA, 19 nt, Artificial Sequence
  Description of Artificial Sequence: Synthetic oligonucleotide
cugauugcugcgggauaga

SEQ ID NO: 140553 - RNA, 19 nt, Artificial Sequence
  Description of Artificial Sequence: Synthetic oligonucleotide
ggggacacuaacugaguuu

SEQ ID NO: 140554 - RNA, 19 nt, Artificial Sequence
  Description of Artificial Sequence: Synthetic oligonucleotide
cguccugaaaauuccuaaa

SEQ ID NO: 140555 - RNA, 19 nt, Artificial Sequence
  Description of Artificial Sequence: Synthetic oligonucleotide
ggccaagauggaaauuucu

SEQ ID NO: 140556 - RNA, 19 nt, Artificial Sequence
  Description of Artificial Sequence: Synthetic oligonucleotide
cauguggauuauugagguu

SEQ ID NO: 140557 - RNA, 19 nt, Artificial Sequence
  Description of Artificial Sequence: Synthetic oligonucleotide
ccaagccccucaaacuuaa

SEQ ID NO: 140558 - RNA, 19 nt, Artificial Sequence
  Description of Artificial Sequence: Synthetic oligonucleotide
gcaccauugagcccagauu

SEQ ID NO: 140559 - RNA, 19 nt, Artificial Sequence
  Description of Artificial Sequence: Synthetic oligonucleotide
ccuuuccgcaacauaaauu

SEQ ID NO: 140560 - RNA, 19 nt, Artificial Sequence
  Description of Artificial Sequence: Synthetic oligonucleotide
ugccuccauugaagucaau

SEQ ID NO: 140561 - RNA, 19 nt, Artificial Sequence
  Description of Artificial Sequence: Synthetic oligonucleotide
cggccaagauggaaauuuc

SEQ ID NO: 140562 - RNA, 19 nt, Artificial Sequence
  Description of Artificial Sequence: Synthetic oligonucleotide
uuggugcagcugugaccuu

SEQ ID NO: 140563 - RNA, 19 nt, Artificial Sequence
  Description of Artificial Sequence: Synthetic oligonucleotide
ggcuaacguuguaguugag

SEQ ID NO: 140564 - RNA, 19 nt, Artificial Sequence
  Description of Artificial Sequence: Synthetic oligonucleotide
ggcgaucaaagcugcugau

SEQ ID NO: 140565 - RNA, 19 nt, Artificial Sequence
  Description of Artificial Sequence: Synthetic oligonucleotide
ccauugggccauucaauau

SEQ ID NO: 140566 - RNA, 19 nt, Artificial Sequence
  Description of Artificial Sequence: Synthetic oligonucleotide
guuccccggcaagaccaaa

SEQ ID NO: 140567 - RNA, 19 nt, Artificial Sequence
  Description of Artificial Sequence: Synthetic oligonucleotide
cacaggucuucugguccaa

SEQ ID NO: 140568 - RNA, 19 nt, Artificial Sequence
  Description of Artificial Sequence: Synthetic oligonucleotide
caaugucgccacaggucuu

SEQ ID NO: 140569 - RNA, 19 nt, Artificial Sequence
  Description of Artificial Sequence: Synthetic oligonucleotide
ccacaugugugugcaaacu

SEQ ID NO: 140570 - RNA, 19 nt, Artificial Sequence
  Description of Artificial Sequence: Synthetic oligonucleotide
gagguacgacguggguggu

SEQ ID NO: 140571 - RNA, 19 nt, Artificial Sequence
  Description of Artificial Sequence: Synthetic oligonucleotide
gcgaucaaagcugcugauu

SEQ ID NO: 140572 - RNA, 19 nt, Artificial Sequence
  Description of Artificial Sequence: Synthetic oligonucleotide
gguuccccggcaagaccaa

SEQ ID NO: 140573 - RNA, 19 nt, Artificial Sequence
  Description of Artificial Sequence: Synthetic oligonucleotide
ggguucuucgggaguuggu

SEQ ID NO: 140574 - RNA, 19 nt, Artificial Sequence
  Description of Artificial Sequence: Synthetic oligonucleotide
gcagggcuauuaccacuau

SEQ ID NO: 140575 - RNA, 19 nt, Artificial Sequence
  Description of Artificial Sequence: Synthetic oligonucleotide
guuugccggucugcaccau

SEQ ID NO: 140576 - RNA, 19 nt, Artificial Sequence
  Description of Artificial Sequence: Synthetic oligonucleotide
cgacguggguggucccauc

SEQ ID NO: 140577 - RNA, 19 nt, Artificial Sequence
  Description of Artificial Sequence: Synthetic oligonucleotide
cuaggccauugagccgauu

SEQ ID NO: 140578 - RNA, 19 nt, Artificial Sequence
  Description of Artificial Sequence: Synthetic oligonucleotide
caccccucuuguggaccau

SEQ ID NO: 140579 - RNA, 19 nt, Artificial Sequence
  Description of Artificial Sequence: Synthetic oligonucleotide
gauaauuucucuuaggccg

SEQ ID NO: 140580 - RNA, 19 nt, Artificial Sequence
  Description of Artificial Sequence: Synthetic oligonucleotide
aaaguaauacauucuacac

SEQ ID NO: 140581 - RNA, 19 nt, Artificial Sequence
  Description of Artificial Sequence: Synthetic oligonucleotide
acuaggauuaacuaaaaug

SEQ ID NO: 140582 - RNA, 19 nt, Artificial Sequence
  Description of Artificial Sequence: Synthetic oligonucleotide
aauuacuuauaccuuacug

SEQ ID NO: 140583 - RNA, 19 nt, Artificial Sequence
  Description of Artificial Sequence: Synthetic oligonucleotide
uguuuagucaaacucuacg

SEQ ID NO: 140584 - RNA, 19 nt, Artificial Sequence
  Description of Artificial Sequence: Synthetic oligonucleotide
acuuauaccuuacuguagc

SEQ ID NO: 140585 - RNA, 19 nt, Artificial Sequence
  Description of Artificial Sequence: Synthetic oligonucleotide
uuauugaucugauucaaag

SEQ ID NO: 140586 - RNA, 19 nt, Artificial Sequence
  Description of Artificial Sequence: Synthetic oligonucleotide
uuuagucaaacucuacggg

SEQ ID NO: 140587 - RNA, 19 nt, Artificial Sequence
  Description of Artificial Sequence: Synthetic oligonucleotide
acaacuagaagcccaagac

SEQ ID NO: 140588 - RNA, 19 nt, Artificial Sequence
  Description of Artificial Sequence: Synthetic oligonucleotide
acuaaaauguaucccugcc

SEQ ID NO: 140589 - RNA, 19 nt, Artificial Sequence
  Description of Artificial Sequence: Synthetic oligonucleotide
aggauaacgaaaugaagcg

SEQ ID NO: 140590 - RNA, 19 nt, Artificial Sequence
  Description of Artificial Sequence: Synthetic oligonucleotide
auuacuuauaccuuacugu

SEQ ID NO: 140591 - RNA, 19 nt, Artificial Sequence
  Description of Artificial Sequence: Synthetic oligonucleotide
aaaacugguaguccugagg

SEQ ID NO: 140592 - RNA, 19 nt, Artificial Sequence
  Description of Artificial Sequence: Synthetic oligonucleotide
aacgauagacaacacaaca

SEQ ID NO: 140593 - RNA, 19 nt, Artificial Sequence
  Description of Artificial Sequence: Synthetic oligonucleotide
caaacacucuguuagagcc

SEQ ID NO: 140594 - RNA, 19 nt, Artificial Sequence
  Description of Artificial Sequence: Synthetic oligonucleotide
guuuagucaaacucuacgg

SEQ ID NO: 140595 - RNA, 19 nt, Artificial Sequence
  Description of Artificial Sequence: Synthetic oligonucleotide
aaguaauacauucuacacu

SEQ ID NO: 140596 - RNA, 19 nt, Artificial Sequence
  Description of Artificial Sequence: Synthetic oligonucleotide
aacauuuacucaucagauc

SEQ ID NO: 140597 - RNA, 19 nt, Artificial Sequence
  Description of Artificial Sequence: Synthetic oligonucleotide
gaggauaacgaaaugaagc

SEQ ID NO: 140598 - RNA, 19 nt, Artificial Sequence
  Description of Artificial Sequence: Synthetic oligonucleotide
uccuauauuacaucgaguc

SEQ ID NO: 140599 - RNA, 19 nt, Artificial Sequence
  Description of Artificial Sequence: Synthetic oligonucleotide
acaccuaagcaguaguugc

SEQ ID NO: 140600 - RNA, 19 nt, Artificial Sequence
  Description of Artificial Sequence: Synthetic oligonucleotide
cauucuacacuccugaggc

SEQ ID NO: 140601 - RNA, 19 nt, Artificial Sequence
  Description of Artificial Sequence: Synthetic oligonucleotide
aaaacaaaacaaaacaaaa

SEQ ID NO: 140602 - RNA, 19 nt, Artificial Sequence
  Description of Artificial Sequence: Synthetic oligonucleotide
uuuguuacuuuagaaaacc

SEQ ID NO: 140603 - RNA, 19 nt, Artificial Sequence
  Description of Artificial Sequence: Synthetic oligonucleotide
gguacuauaguguucagag

SEQ ID NO: 140604 - RNA, 19 nt, Artificial Sequence
  Description of Artificial Sequence: Synthetic oligonucleotide
aagaauuccccacccuagc

SEQ ID NO: 140605 - RNA, 19 nt, Artificial Sequence
  Description of Artificial Sequence: Synthetic oligonucleotide
ucuccuauauuacaucgag

SEQ ID NO: 140606 - RNA, 19 nt, Artificial Sequence
  Description of Artificial Sequence: Synthetic oligonucleotide
uuacuccgggauaagagcg

SEQ ID NO: 140607 - RNA, 19 nt, Artificial Sequence
  Description of Artificial Sequence: Synthetic oligonucleotide
ucuacgggccauuuaaagg

SEQ ID NO: 140608 - RNA, 19 nt, Artificial Sequence
  Description of Artificial Sequence: Synthetic oligonucleotide
ucaauuaucgaaucuucca

SEQ ID NO: 140609 - RNA, 19 nt, Artificial Sequence
  Description of Artificial Sequence: Synthetic oligonucleotide
uguuuguaaagccuaccag

SEQ ID NO: 140610 - RNA, 19 nt, Artificial Sequence
  Description of Artificial Sequence: Synthetic oligonucleotide
uuccuaagaacaaacacuc

SEQ ID NO: 140611 - RNA, 19 nt, Artificial Sequence
  Description of Artificial Sequence: Synthetic oligonucleotide
uagacuacuuauuaagugu

SEQ ID NO: 140612 - RNA, 19 nt, Artificial Sequence
  Description of Artificial Sequence: Synthetic oligonucleotide
aauacugguucgugcaguc

SEQ ID NO: 140613 - RNA, 19 nt, Artificial Sequence
  Description of Artificial Sequence: Synthetic oligonucleotide
cacccuagcacaaagacug

SEQ ID NO: 140614 - RNA, 19 nt, Artificial Sequence
  Description of Artificial Sequence: Synthetic oligonucleotide
uacuuauuaagugugcuug

SEQ ID NO: 140615 - RNA, 19 nt, Artificial Sequence
  Description of Artificial Sequence: Synthetic oligonucleotide
agauucuaggaguugauga

SEQ ID NO: 140616 - RNA, 19 nt, Artificial Sequence
  Description of Artificial Sequence: Synthetic oligonucleotide
uucagcaauaguaucgcca

SEQ ID NO: 140617 - RNA, 19 nt, Artificial Sequence
  Description of Artificial Sequence: Synthetic oligonucleotide
uucagauugaugaccagac

SEQ ID NO: 140618 - RNA, 19 nt, Artificial Sequence
  Description of Artificial Sequence: Synthetic oligonucleotide
ugaggauaacgaaaugaag

SEQ ID NO: 140619 - RNA, 19 nt, Artificial Sequence
  Description of Artificial Sequence: Synthetic oligonucleotide
uuuacuccgggauaagagc

SEQ ID NO: 140620 - RNA, 19 nt, Artificial Sequence
  Description of Artificial Sequence: Synthetic oligonucleotide
cuaggauuaacuaaaaugu

SEQ ID NO: 140621 - RNA, 19 nt, Artificial Sequence
  Description of Artificial Sequence: Synthetic oligonucleotide
uacaauuuuguugcuagag

SEQ ID NO: 140622 - RNA, 19 nt, Artificial Sequence
  Description of Artificial Sequence: Synthetic oligonucleotide
gcuaaauacuuacugaugc

SEQ ID NO: 140623 - RNA, 19 nt, Artificial Sequence
  Description of Artificial Sequence: Synthetic oligonucleotide
ucuaaucugggccucagaa

SEQ ID NO: 140624 - RNA, 19 nt, Artificial Sequence
  Description of Artificial Sequence: Synthetic oligonucleotide
gaugaccagaccaaaaggc

SEQ ID NO: 140625 - RNA, 19 nt, Artificial Sequence
  Description of Artificial Sequence: Synthetic oligonucleotide
auggcagaacaucuaaaac

SEQ ID NO: 140626 - RNA, 19 nt, Artificial Sequence
  Description of Artificial Sequence: Synthetic oligonucleotide
cuugaacaaaccaugugug

SEQ ID NO: 140627 - RNA, 19 nt, Artificial Sequence
  Description of Artificial Sequence: Synthetic oligonucleotide
aacucuacgggccauuuaa

SEQ ID NO: 140628 - RNA, 19 nt, Artificial Sequence
  Description of Artificial Sequence: Synthetic oligonucleotide
guagacuacuuauuaagug

SEQ ID NO: 140629 - RNA, 19 nt, Artificial Sequence
  Description of Artificial Sequence: Synthetic oligonucleotide
uuacuuauaccuuacugua

SEQ ID NO: 140630 - RNA, 19 nt, Artificial Sequence
  Description of Artificial Sequence: Synthetic oligonucleotide
auuaucgaaucuuccacug

SEQ ID NO: 140631 - RNA, 19 nt, Artificial Sequence
  Description of Artificial Sequence: Synthetic oligonucleotide
uaacuaaaauguaucccug

SEQ ID NO: 140632 - RNA, 19 nt, Artificial Sequence
  Description of Artificial Sequence: Synthetic oligonucleotide
aaaacaggcguggaauuag

SEQ ID NO: 140633 - RNA, 19 nt, Artificial Sequence
  Description of Artificial Sequence: Synthetic oligonucleotide
gugaggaacauacagcgug

SEQ ID NO: 140634 - RNA, 19 nt, Artificial Sequence
  Description of Artificial Sequence: Synthetic oligonucleotide
gauaacgaaaugaagcguc

SEQ ID NO: 140635 - RNA, 19 nt, Artificial Sequence
  Description of Artificial Sequence: Synthetic oligonucleotide
ugcuaaauacuuacugaug

SEQ ID NO: 140636 - RNA, 19 nt, Artificial Sequence
  Description of Artificial Sequence: Synthetic oligonucleotide
uuauuaagugugcuugaac

SEQ ID NO: 140637 - RNA, 19 nt, Artificial Sequence
  Description of Artificial Sequence: Synthetic oligonucleotide
aucaguagaauugucaggu

SEQ ID NO: 140638 - RNA, 19 nt, Artificial Sequence
  Description of Artificial Sequence: Synthetic oligonucleotide
ugcuauaguagacgccugg

SEQ ID NO: 140639 - RNA, 19 nt, Artificial Sequence
  Description of Artificial Sequence: Synthetic oligonucleotide
auacauucuacacuccuga

SEQ ID NO: 140640 - RNA, 19 nt, Artificial Sequence
  Description of Artificial Sequence: Synthetic oligonucleotide
caauuaucgaaucuuccac

SEQ ID NO: 140641 - RNA, 19 nt, Artificial Sequence
  Description of Artificial Sequence: Synthetic oligonucleotide
uacuuauaccuuacuguag

SEQ ID NO: 140642 - RNA, 19 nt, Artificial Sequence
  Description of Artificial Sequence: Synthetic oligonucleotide
uacaguagcuaacaaacuu

SEQ ID NO: 140643 - RNA, 19 nt, Artificial Sequence
  Description of Artificial Sequence: Synthetic oligonucleotide
uuugguaugucucucccua

SEQ ID NO: 140644 - RNA, 19 nt, Artificial Sequence
  Description of Artificial Sequence: Synthetic oligonucleotide
ucgccacagacucugauug

SEQ ID NO: 140645 - RNA, 19 nt, Artificial Sequence
  Description of Artificial Sequence: Synthetic oligonucleotide
auaagcacuuuacaaacau

SEQ ID NO: 140646 - RNA, 19 nt, Artificial Sequence
  Description of Artificial Sequence: Synthetic oligonucleotide
ucgcuuucuagauucuagg

SEQ ID NO: 140647 - RNA, 19 nt, Artificial Sequence
  Description of Artificial Sequence: Synthetic oligonucleotide
ugaguauucuaaaggcgug

SEQ ID NO: 140648 - RNA, 19 nt, Artificial Sequence
  Description of Artificial Sequence: Synthetic oligonucleotide
agauaaaccucguaacccu

SEQ ID NO: 140649 - RNA, 19 nt, Artificial Sequence
  Description of Artificial Sequence: Synthetic oligonucleotide
uguaagugugguuucugca

SEQ ID NO: 140650 - RNA, 19 nt, Artificial Sequence
  Description of Artificial Sequence: Synthetic oligonucleotide
acaacagcccaguuugcac

SEQ ID NO: 140651 - RNA, 19 nt, Artificial Sequence
  Description of Artificial Sequence: Synthetic oligonucleotide
ugguguauaaggcaauuua

SEQ ID NO: 140652 - RNA, 19 nt, Artificial Sequence
  Description of Artificial Sequence: Synthetic oligonucleotide
auaacgaaaugaagcgucc

SEQ ID NO: 140653 - RNA, 19 nt, Artificial Sequence
  Description of Artificial Sequence: Synthetic oligonucleotide
ugguaugucucucccuagg

SEQ ID NO: 140654 - RNA, 19 nt, Artificial Sequence
  Description of Artificial Sequence: Synthetic oligonucleotide
cuucaauuaucgaaucuuc

SEQ ID NO: 140655 - RNA, 19 nt, Artificial Sequence
  Description of Artificial Sequence: Synthetic oligonucleotide
caucaguagaauugucagg

SEQ ID NO: 140656 - RNA, 19 nt, Artificial Sequence
  Description of Artificial Sequence: Synthetic oligonucleotide
uacagcgugacugugugug

SEQ ID NO: 140657 - RNA, 19 nt, Artificial Sequence
  Description of Artificial Sequence: Synthetic oligonucleotide
ggucuccuauauuacaucg

SEQ ID NO: 140658 - RNA, 19 nt, Artificial Sequence
  Description of Artificial Sequence: Synthetic oligonucleotide
uauauuacaucgagucaaa

SEQ ID NO: 140659 - RNA, 19 nt, Artificial Sequence
  Description of Artificial Sequence: Synthetic oligonucleotide
uggggacaagcauuaauug

SEQ ID NO: 140660 - RNA, 19 nt, Artificial Sequence
  Description of Artificial Sequence: Synthetic oligonucleotide
ucuuaggccgauuccuaag

SEQ ID NO: 140661 - RNA, 19 nt, Artificial Sequence
  Description of Artificial Sequence: Synthetic oligonucleotide
uguguguguguguaucuug

SEQ ID NO: 140662 - RNA, 19 nt, Artificial Sequence
  Description of Artificial Sequence: Synthetic oligonucleotide
ugaggaacauacagcguga

SEQ ID NO: 140663 - RNA, 19 nt, Artificial Sequence
  Description of Artificial Sequence: Synthetic oligonucleotide
uacugguucgugcaguccu

SEQ ID NO: 140664 - RNA, 19 nt, Artificial Sequence
  Description of Artificial Sequence: Synthetic oligonucleotide
ugacguacccauuucuacu

SEQ ID NO: 140665 - RNA, 19 nt, Artificial Sequence
  Description of Artificial Sequence: Synthetic oligonucleotide
uugacguacccauuucuac

SEQ ID NO: 140666 - RNA, 19 nt, Artificial Sequence
  Description of Artificial Sequence: Synthetic oligonucleotide
guacuauaguguucagagg

SEQ ID NO: 140667 - RNA, 19 nt, Artificial Sequence
  Description of Artificial Sequence: Synthetic oligonucleotide
acuuacugaugcuauagua

SEQ ID NO: 140668 - RNA, 19 nt, Artificial Sequence
  Description of Artificial Sequence: Synthetic oligonucleotide
agcgauucaacaauaaaau

SEQ ID NO: 140669 - RNA, 19 nt, Artificial Sequence
  Description of Artificial Sequence: Synthetic oligonucleotide
caggauaauuucucuuagg

SEQ ID NO: 140670 - RNA, 19 nt, Artificial Sequence
  Description of Artificial Sequence: Synthetic oligonucleotide
cuauauuacaucgagucaa

SEQ ID NO: 140671 - RNA, 19 nt, Artificial Sequence
  Description of Artificial Sequence: Synthetic oligonucleotide
auaagagcguggcagcugu

SEQ ID NO: 140672 - RNA, 19 nt, Artificial Sequence
  Description of Artificial Sequence: Synthetic oligonucleotide
ucgaguuaucagcuguccc

SEQ ID NO: 140673 - RNA, 19 nt, Artificial Sequence
  Description of Artificial Sequence: Synthetic oligonucleotide
gcuuucuagauucuaggag

SEQ ID NO: 140674 - RNA, 19 nt, Artificial Sequence
  Description of Artificial Sequence: Synthetic oligonucleotide
ugcuaaugacccuccgggg

SEQ ID NO: 140675 - RNA, 19 nt, Artificial Sequence
  Description of Artificial Sequence: Synthetic oligonucleotide
ucugcggugguacuauagu

SEQ ID NO: 140676 - RNA, 19 nt, Artificial Sequence
  Description of Artificial Sequence: Synthetic oligonucleotide
ccaauuaauggucuuguag

SEQ ID NO: 140677 - RNA, 19 nt, Artificial Sequence
  Description of Artificial Sequence: Synthetic oligonucleotide
aguaucgccacagacucug

SEQ ID NO: 140678 - RNA, 19 nt, Artificial Sequence
  Description of Artificial Sequence: Synthetic oligonucleotide
uaaaccucguaacccuuga

SEQ ID NO: 140679 - RNA, 19 nt, Artificial Sequence
  Description of Artificial Sequence: Synthetic oligonucleotide
gggacaagcauuaauugag

SEQ ID NO: 140680 - RNA, 19 nt, Artificial Sequence
  Description of Artificial Sequence: Synthetic oligonucleotide
aaaccaaaugcagugcuuu

SEQ ID NO: 140681 - RNA, 19 nt, Artificial Sequence
  Description of Artificial Sequence: Synthetic oligonucleotide
cagcgauucaacaauaaaa

SEQ ID NO: 140682 - RNA, 19 nt, Artificial Sequence
  Description of Artificial Sequence: Synthetic oligonucleotide
cucuacgggccauuuaaag

SEQ ID NO: 140683 - RNA, 19 nt, Artificial Sequence
  Description of Artificial Sequence: Synthetic oligonucleotide
gaauuccccacccuagcac

SEQ ID NO: 140684 - RNA, 19 nt, Artificial Sequence
  Description of Artificial Sequence: Synthetic oligonucleotide
acaagcauuaauugagcuu

SEQ ID NO: 140685 - RNA, 19 nt, Artificial Sequence
  Description of Artificial Sequence: Synthetic oligonucleotide
cuuucuagauucuaggagu

SEQ ID NO: 140686 - RNA, 19 nt, Artificial Sequence
  Description of Artificial Sequence: Synthetic oligonucleotide
uccuugacuccauugguaa

SEQ ID NO: 140687 - RNA, 19 nt, Artificial Sequence
  Description of Artificial Sequence: Synthetic oligonucleotide
agacucugauugcucaguc

SEQ ID NO: 140688 - RNA, 19 nt, Artificial Sequence
  Description of Artificial Sequence: Synthetic oligonucleotide
acuacuuauuaagugugcu

SEQ ID NO: 140689 - RNA, 19 nt, Artificial Sequence
  Description of Artificial Sequence: Synthetic oligonucleotide
uuucuagauucuaggaguu

SEQ ID NO: 140690 - RNA, 19 nt, Artificial Sequence
  Description of Artificial Sequence: Synthetic oligonucleotide
uaagaucuugagccacugc

SEQ ID NO: 140691 - RNA, 19 nt, Artificial Sequence
  Description of Artificial Sequence: Synthetic oligonucleotide
agacuacuuauuaagugug

SEQ ID NO: 140692 - RNA, 19 nt, Artificial Sequence
  Description of Artificial Sequence: Synthetic oligonucleotide
ucucccuagguuuagcauu

SEQ ID NO: 140693 - RNA, 19 nt, Artificial Sequence
  Description of Artificial Sequence: Synthetic oligonucleotide
accaggauaauuucucuua

SEQ ID NO: 140694 - RNA, 19 nt, Artificial Sequence
  Description of Artificial Sequence: Synthetic oligonucleotide
cugaggauaacgaaaugaa

SEQ ID NO: 140695 - RNA, 19 nt, Artificial Sequence
  Description of Artificial Sequence: Synthetic oligonucleotide
aguagacuacuuauuaagu

SEQ ID NO: 140696 - RNA, 19 nt, Artificial Sequence
  Description of Artificial Sequence: Synthetic oligonucleotide
aaacaggcguggaauuagg

SEQ ID NO: 140697 - RNA, 19 nt, Artificial Sequence
  Description of Artificial Sequence: Synthetic oligonucleotide
aauguaucccugccucuaa

SEQ ID NO: 140698 - RNA, 19 nt, Artificial Sequence
  Description of Artificial Sequence: Synthetic oligonucleotide
cuaagcaguaguugccuuc

SEQ ID NO: 140699 - RNA, 19 nt, Artificial Sequence
  Description of Artificial Sequence: Synthetic oligonucleotide
ugacuugacguacccauuu

SEQ ID NO: 140700 - RNA, 19 nt, Artificial Sequence
  Description of Artificial Sequence: Synthetic oligonucleotide
uguguguguguguguaucu

SEQ ID NO: 140701 - RNA, 19 nt, Artificial Sequence
  Description of Artificial Sequence: Synthetic oligonucleotide
guguguguguguaucuugg

SEQ ID NO: 140702 - RNA, 19 nt, Artificial Sequence
  Description of Artificial Sequence: Synthetic oligonucleotide
caacgauagacaacacaac

SEQ ID NO: 140703 - RNA, 19 nt, Artificial Sequence
  Description of Artificial Sequence: Synthetic oligonucleotide
agaauuccccacccuagca

SEQ ID NO: 140704 - RNA, 19 nt, Artificial Sequence
  Description of Artificial Sequence: Synthetic oligonucleotide
guggaauuaggauuuauau

SEQ ID NO: 140705 - RNA, 19 nt, Artificial Sequence
  Description of Artificial Sequence: Synthetic oligonucleotide
uaagcaguaguugccuucu

SEQ ID NO: 140706 - RNA, 19 nt, Artificial Sequence
  Description of Artificial Sequence: Synthetic oligonucleotide
aggcaauuuacuccgggau

SEQ ID NO: 140707 - RNA, 19 nt, Artificial Sequence
  Description of Artificial Sequence: Synthetic oligonucleotide
caccuaagcaguaguugcc

SEQ ID NO: 140708 - RNA, 19 nt, Artificial Sequence
  Description of Artificial Sequence: Synthetic oligonucleotide
gacuacuuauuaagugugc

SEQ ID NO: 140709 - RNA, 19 nt, Artificial Sequence
  Description of Artificial Sequence: Synthetic oligonucleotide
uguaucccugccucuaaaa

SEQ ID NO: 140710 - RNA, 19 nt, Artificial Sequence
  Description of Artificial Sequence: Synthetic oligonucleotide
aggccgaaacacauuaggg

SEQ ID NO: 140711 - RNA, 19 nt, Artificial Sequence
  Description of Artificial Sequence: Synthetic oligonucleotide
acaggcguggaauuaggau

SEQ ID NO: 140712 - RNA, 19 nt, Artificial Sequence
  Description of Artificial Sequence: Synthetic oligonucleotide
aacauacagcgugacugug

SEQ ID NO: 140713 - RNA, 19 nt, Artificial Sequence
  Description of Artificial Sequence: Synthetic oligonucleotide
gcugaguauucuaaaggcg

SEQ ID NO: 140714 - RNA, 19 nt, Artificial Sequence
  Description of Artificial Sequence: Synthetic oligonucleotide
gacugugugugugugugug

SEQ ID NO: 140715 - RNA, 19 nt, Artificial Sequence
  Description of Artificial Sequence: Synthetic oligonucleotide
aaauguaucccugccucua

SEQ ID NO: 140716 - RNA, 19 nt, Artificial Sequence
  Description of Artificial Sequence: Synthetic oligonucleotide
auuauggaguuaguuucug

SEQ ID NO: 140717 - RNA, 19 nt, Artificial Sequence
  Description of Artificial Sequence: Synthetic oligonucleotide
guaguugccuucuguggug

SEQ ID NO: 140718 - RNA, 19 nt, Artificial Sequence
  Description of Artificial Sequence: Synthetic oligonucleotide
uccgcuagggcugucggug

SEQ ID NO: 140719 - RNA, 19 nt, Artificial Sequence
  Description of Artificial Sequence: Synthetic oligonucleotide
ccugccuuuagaauagaag

SEQ ID NO: 140720 - RNA, 19 nt, Artificial Sequence
  Description of Artificial Sequence: Synthetic oligonucleotide
uccgggauaagagcguggc

SEQ ID NO: 140721 - RNA, 19 nt, Artificial Sequence
  Description of Artificial Sequence: Synthetic oligonucleotide
gaacauuuacucaucagau

SEQ ID NO: 140722 - RNA, 19 nt, Artificial Sequence
  Description of Artificial Sequence: Synthetic oligonucleotide
ugguacuauaguguucaga

SEQ ID NO: 140723 - RNA, 19 nt, Artificial Sequence
  Description of Artificial Sequence: Synthetic oligonucleotide
caauuuuguugcuagagau

SEQ ID NO: 140724 - RNA, 19 nt, Artificial Sequence
  Description of Artificial Sequence: Synthetic oligonucleotide
agucaaacucuacgggcca

SEQ ID NO: 140725 - RNA, 19 nt, Artificial Sequence
  Description of Artificial Sequence: Synthetic oligonucleotide
uccagcgauucaacaauaa

SEQ ID NO: 140726 - RNA, 19 nt, Artificial Sequence
  Description of Artificial Sequence: Synthetic oligonucleotide
acuggggacaagcauuaau

SEQ ID NO: 140727 - RNA, 19 nt, Artificial Sequence
  Description of Artificial Sequence: Synthetic oligonucleotide
agcguuuugcugaguauuc

SEQ ID NO: 140728 - RNA, 19 nt, Artificial Sequence
  Description of Artificial Sequence: Synthetic oligonucleotide
gugacugugugugugugug

SEQ ID NO: 140729 - RNA, 19 nt, Artificial Sequence
  Description of Artificial Sequence: Synthetic oligonucleotide
gccgaaacacauuagggca

SEQ ID NO: 140730 - RNA, 19 nt, Artificial Sequence
  Description of Artificial Sequence: Synthetic oligonucleotide
aguuaucagcugucccuag

SEQ ID NO: 140731 - RNA, 19 nt, Artificial Sequence
  Description of Artificial Sequence: Synthetic oligonucleotide
cacaccuaagcaguaguug

SEQ ID NO: 140732 - RNA, 19 nt, Artificial Sequence
  Description of Artificial Sequence: Synthetic oligonucleotide
cugcggugguacuauagug

SEQ ID NO: 140733 - RNA, 19 nt, Artificial Sequence
  Description of Artificial Sequence: Synthetic oligonucleotide
cuacgggccauuuaaaggu

SEQ ID NO: 140734 - RNA, 19 nt, Artificial Sequence
  Description of Artificial Sequence: Synthetic oligonucleotide
cacaacgauagacaacaca

SEQ ID NO: 140735 - RNA, 19 nt, Artificial Sequence
  Description of Artificial Sequence: Synthetic oligonucleotide
ugaagcguccagcgauuca

SEQ ID NO: 140736 - RNA, 19 nt, Artificial Sequence
  Description of Artificial Sequence: Synthetic oligonucleotide
cugauugcucaguccacac

SEQ ID NO: 140737 - RNA, 19 nt, Artificial Sequence
  Description of Artificial Sequence: Synthetic oligonucleotide
uccaccgcgcguccgcuag

SEQ ID NO: 140738 - RNA, 19 nt, Artificial Sequence
  Description of Artificial Sequence: Synthetic oligonucleotide
auaccuuacuguagcaugu

SEQ ID NO: 140739 - RNA, 19 nt, Artificial Sequence
  Description of Artificial Sequence: Synthetic oligonucleotide
cuuauaccuuacuguagca

SEQ ID NO: 140740 - RNA, 19 nt, Artificial Sequence
  Description of Artificial Sequence: Synthetic oligonucleotide
cucugcggugguacuauag

SEQ ID NO: 140741 - RNA, 19 nt, Artificial Sequence
  Description of Artificial Sequence: Synthetic oligonucleotide
acaguagcuaacaaacuuu

SEQ ID NO: 140742 - RNA, 19 nt, Artificial Sequence
  Description of Artificial Sequence: Synthetic oligonucleotide
aggaacauacagcgugacu

SEQ ID NO: 140743 - RNA, 19 nt, Artificial Sequence
  Description of Artificial Sequence: Synthetic oligonucleotide
cuauaguagacgccuggca

SEQ ID NO: 140744 - RNA, 19 nt, Artificial Sequence
  Description of Artificial Sequence: Synthetic oligonucleotide
acucuguuagagccaacaa

SEQ ID NO: 140745 - RNA, 19 nt, Artificial Sequence
  Description of Artificial Sequence: Synthetic oligonucleotide
aaaccucguaacccuugaa

SEQ ID NO: 140746 - RNA, 19 nt, Artificial Sequence
  Description of Artificial Sequence: Synthetic oligonucleotide
cuuaggccgauuccuaaga

SEQ ID NO: 140747 - RNA, 19 nt, Artificial Sequence
  Description of Artificial Sequence: Synthetic oligonucleotide
uccaucuaacccguccucu

SEQ ID NO: 140748 - RNA, 19 nt, Artificial Sequence
  Description of Artificial Sequence: Synthetic oligonucleotide
cucgaguuaucagcugucc

SEQ ID NO: 140749 - RNA, 19 nt, Artificial Sequence
  Description of Artificial Sequence: Synthetic oligonucleotide
uacuccgggauaagagcgu

SEQ ID NO: 140750 - RNA, 19 nt, Artificial Sequence
  Description of Artificial Sequence: Synthetic oligonucleotide
uacucaaaaguugccuguc

SEQ ID NO: 140751 - RNA, 19 nt, Artificial Sequence
  Description of Artificial Sequence: Synthetic oligonucleotide
uccugccuuuagaauagaa

SEQ ID NO: 140752 - RNA, 19 nt, Artificial Sequence
  Description of Artificial Sequence: Synthetic oligonucleotide
ugugugugugugugugugu

SEQ ID NO: 140753 - RNA, 19 nt, Artificial Sequence
  Description of Artificial Sequence: Synthetic oligonucleotide
gacuugacguacccauuuc

SEQ ID NO: 140754 - RNA, 19 nt, Artificial Sequence
  Description of Artificial Sequence: Synthetic oligonucleotide
gacucgaguuaucagcugu

SEQ ID NO: 140755 - RNA, 19 nt, Artificial Sequence
  Description of Artificial Sequence: Synthetic oligonucleotide
ggaauacucaaaaguugcc

SEQ ID NO: 140756 - RNA, 19 nt, Artificial Sequence
  Description of Artificial Sequence: Synthetic oligonucleotide
agccaccugccuuaaacaa

SEQ ID NO: 140757 - RNA, 19 nt, Artificial Sequence
  Description of Artificial Sequence: Synthetic oligonucleotide
aaacucuacgggccauuua

SEQ ID NO: 140758 - RNA, 19 nt, Artificial Sequence
  Description of Artificial Sequence: Synthetic oligonucleotide
gaacauacagcgugacugu

SEQ ID NO: 140759 - RNA, 19 nt, Artificial Sequence
  Description of Artificial Sequence: Synthetic oligonucleotide
cuaccagguguuuagucaa

SEQ ID NO: 140760 - RNA, 19 nt, Artificial Sequence
  Description of Artificial Sequence: Synthetic oligonucleotide
aucugaacuuuaauacugu

SEQ ID NO: 140761 - RNA, 19 nt, Artificial Sequence
  Description of Artificial Sequence: Synthetic oligonucleotide
acucgaguuaucagcuguc

SEQ ID NO: 140762 - RNA, 19 nt, Artificial Sequence
  Description of Artificial Sequence: Synthetic oligonucleotide
gauaguugugucugcacuu

SEQ ID NO: 140763 - RNA, 19 nt, Artificial Sequence
  Description of Artificial Sequence: Synthetic oligonucleotide
aacaggcguggaauuagga

SEQ ID NO: 140764 - RNA, 19 nt, Artificial Sequence
  Description of Artificial Sequence: Synthetic oligonucleotide
ggggacaagcauuaauuga

SEQ ID NO: 140765 - RNA, 19 nt, Artificial Sequence
  Description of Artificial Sequence: Synthetic oligonucleotide
cugugugugugugugugug

SEQ ID NO: 140766 - RNA, 19 nt, Artificial Sequence
  Description of Artificial Sequence: Synthetic oligonucleotide
gugugugugugugugugug

SEQ ID NO: 140767 - RNA, 19 nt, Artificial Sequence
  Description of Artificial Sequence: Synthetic oligonucleotide
agacucgaguuaucagcug

SEQ ID NO: 140768 - RNA, 19 nt, Artificial Sequence
  Description of Artificial Sequence: Synthetic oligonucleotide
gcgauucaacaauaaaauc

SEQ ID NO: 140769 - RNA, 19 nt, Artificial Sequence
  Description of Artificial Sequence: Synthetic oligonucleotide
cuugacguacccauuucua

SEQ ID NO: 140770 - RNA, 19 nt, Artificial Sequence
  Description of Artificial Sequence: Synthetic oligonucleotide
aucgccacagacucugauu

SEQ ID NO: 140771 - RNA, 19 nt, Artificial Sequence
  Description of Artificial Sequence: Synthetic oligonucleotide
aaugaagcguccagcgauu

SEQ ID NO: 140772 - RNA, 19 nt, Artificial Sequence
  Description of Artificial Sequence: Synthetic oligonucleotide
ucaguagaauugucagguu

SEQ ID NO: 140773 - RNA, 19 nt, Artificial Sequence
  Description of Artificial Sequence: Synthetic oligonucleotide
caaagagccaccugccuua

SEQ ID NO: 140774 - RNA, 19 nt, Artificial Sequence
  Description of Artificial Sequence: Synthetic oligonucleotide
acugugugugugugugugu

SEQ ID NO: 140775 - RNA, 19 nt, Artificial Sequence
  Description of Artificial Sequence: Synthetic oligonucleotide
cuuauuaagugugcuugaa

SEQ ID NO: 140776 - RNA, 19 nt, Artificial Sequence
  Description of Artificial Sequence: Synthetic oligonucleotide
augaagcguccagcgauuc

SEQ ID NO: 140777 - RNA, 19 nt, Artificial Sequence
  Description of Artificial Sequence: Synthetic oligonucleotide
uguguguguguguguguau

SEQ ID NO: 140778 - RNA, 19 nt, Artificial Sequence
  Description of Artificial Sequence: Synthetic oligonucleotide
acaauguuguuugcuggaa

SEQ ID NO: 140779 - RNA, 19 nt, Artificial Sequence
  Description of Artificial Sequence: Synthetic oligonucleotide
guagacgccuggcacuuga

SEQ ID NO: 140780 - RNA, 19 nt, Artificial Sequence
  Description of Artificial Sequence: Synthetic oligonucleotide
gagcugguguauaaggcaa

SEQ ID NO: 140781 - RNA, 19 nt, Artificial Sequence
  Description of Artificial Sequence: Synthetic oligonucleotide
cuccgggauaagagcgugg

SEQ ID NO: 140782 - RNA, 19 nt, Artificial Sequence
  Description of Artificial Sequence: Synthetic oligonucleotide
agccuguagucaagugacc

SEQ ID NO: 140783 - RNA, 19 nt, Artificial Sequence
  Description of Artificial Sequence: Synthetic oligonucleotide
uaguaucgccacagacucu

SEQ ID NO: 140784 - RNA, 19 nt, Artificial Sequence
  Description of Artificial Sequence: Synthetic oligonucleotide
ccgaaacacauuagggcag

SEQ ID NO: 140785 - RNA, 19 nt, Artificial Sequence
  Description of Artificial Sequence: Synthetic oligonucleotide
cuacuuucuguaugggucu

SEQ ID NO: 140786 - RNA, 19 nt, Artificial Sequence
  Description of Artificial Sequence: Synthetic oligonucleotide
cauuauggaguuaguuucu

SEQ ID NO: 140787 - RNA, 19 nt, Artificial Sequence
  Description of Artificial Sequence: Synthetic oligonucleotide
ucuaacccguccucucuuu

SEQ ID NO: 140788 - RNA, 19 nt, Artificial Sequence
  Description of Artificial Sequence: Synthetic oligonucleotide
ugacugugugugugugugu

SEQ ID NO: 140789 - RNA, 19 nt, Artificial Sequence
  Description of Artificial Sequence: Synthetic oligonucleotide
uaccagguguuuagucaaa

SEQ ID NO: 140790 - RNA, 19 nt, Artificial Sequence
  Description of Artificial Sequence: Synthetic oligonucleotide
cauccguuuggauuugaua

SEQ ID NO: 140791 - RNA, 19 nt, Artificial Sequence
  Description of Artificial Sequence: Synthetic oligonucleotide
uacgggccauuuaaagguu

SEQ ID NO: 140792 - RNA, 19 nt, Artificial Sequence
  Description of Artificial Sequence: Synthetic oligonucleotide
gcuauaguagacgccuggc

SEQ ID NO: 140793 - RNA, 19 nt, Artificial Sequence
  Description of Artificial Sequence: Synthetic oligonucleotide
agguuaaucugaacuuuaa

SEQ ID NO: 140794 - RNA, 19 nt, Artificial Sequence
  Description of Artificial Sequence: Synthetic oligonucleotide
auguaucccugccucuaaa

SEQ ID NO: 140795 - RNA, 19 nt, Artificial Sequence
  Description of Artificial Sequence: Synthetic oligonucleotide
guguguguguguguguauc

SEQ ID NO: 140796 - RNA, 19 nt, Artificial Sequence
  Description of Artificial Sequence: Synthetic oligonucleotide
cuaacccguccucucuuuc

SEQ ID NO: 140797 - RNA, 19 nt, Artificial Sequence
  Description of Artificial Sequence: Synthetic oligonucleotide
ccugaggauaacgaaauga

SEQ ID NO: 140798 - RNA, 19 nt, Artificial Sequence
  Description of Artificial Sequence: Synthetic oligonucleotide
aucuaacccguccucucuu

SEQ ID NO: 140799 - RNA, 19 nt, Artificial Sequence
  Description of Artificial Sequence: Synthetic oligonucleotide
gaguuaucagcugucccua

SEQ ID NO: 140800 - RNA, 19 nt, Artificial Sequence
  Description of Artificial Sequence: Synthetic oligonucleotide
acuccgggauaagagcgug

SEQ ID NO: 140801 - RNA, 19 nt, Artificial Sequence
  Description of Artificial Sequence: Synthetic oligonucleotide
accccaaauuuguuacuuu

SEQ ID NO: 140802 - RNA, 19 nt, Artificial Sequence
  Description of Artificial Sequence: Synthetic oligonucleotide
acccuagcacaaagacugc

SEQ ID NO: 140803 - RNA, 19 nt, Artificial Sequence
  Description of Artificial Sequence: Synthetic oligonucleotide
gacguacccauuucuacuu

SEQ ID NO: 140804 - RNA, 19 nt, Artificial Sequence
  Description of Artificial Sequence: Synthetic oligonucleotide
ccuauauuacaucgaguca

SEQ ID NO: 140805 - RNA, 19 nt, Artificial Sequence
  Description of Artificial Sequence: Synthetic oligonucleotide
gaguauucuaaaggcgugu

SEQ ID NO: 140806 - RNA, 19 nt, Artificial Sequence
  Description of Artificial Sequence: Synthetic oligonucleotide
agcuguaagugugguuucu

SEQ ID NO: 140807 - RNA, 19 nt, Artificial Sequence
  Description of Artificial Sequence: Synthetic oligonucleotide
auacagcgugacugugugu

SEQ ID NO: 140808 - RNA, 19 nt, Artificial Sequence
  Description of Artificial Sequence: Synthetic oligonucleotide
gucuccuauauuacaucga

SEQ ID NO: 140809 - RNA, 19 nt, Artificial Sequence
  Description of Artificial Sequence: Synthetic oligonucleotide
caggcguggaauuaggauu

SEQ ID NO: 140810 - RNA, 19 nt, Artificial Sequence
  Description of Artificial Sequence: Synthetic oligonucleotide
ucaaacucuacgggccauu

SEQ ID NO: 140811 - RNA, 19 nt, Artificial Sequence
  Description of Artificial Sequence: Synthetic oligonucleotide
cuacuuauuaagugugcuu

SEQ ID NO: 140812 - RNA, 19 nt, Artificial Sequence
  Description of Artificial Sequence: Synthetic oligonucleotide
ugucucugcggugguacua

SEQ ID NO: 140813 - RNA, 19 nt, Artificial Sequence
  Description of Artificial Sequence: Synthetic oligonucleotide
gguuaaucugaacuuuaau

SEQ ID NO: 140814 - RNA, 19 nt, Artificial Sequence
  Description of Artificial Sequence: Synthetic oligonucleotide
uagacgccuggcacuugaa

SEQ ID NO: 140815 - RNA, 19 nt, Artificial Sequence
  Description of Artificial Sequence: Synthetic oligonucleotide
agggaagcggcaacagcgu

SEQ ID NO: 140816 - RNA, 19 nt, Artificial Sequence
  Description of Artificial Sequence: Synthetic oligonucleotide
cuccuauauuacaucgagu

SEQ ID NO: 140817 - RNA, 19 nt, Artificial Sequence
  Description of Artificial Sequence: Synthetic oligonucleotide
acguacccauuucuacuuu

SEQ ID NO: 140818 - RNA, 19 nt, Artificial Sequence
  Description of Artificial Sequence: Synthetic oligonucleotide
gaguuaguuucugcuaaau

SEQ ID NO: 140819 - RNA, 19 nt, Artificial Sequence
  Description of Artificial Sequence: Synthetic oligonucleotide
uggcagccuguagucaagu

SEQ ID NO: 140820 - RNA, 19 nt, Artificial Sequence
  Description of Artificial Sequence: Synthetic oligonucleotide
guauucuaaaggcguguuu

SEQ ID NO: 140821 - RNA, 19 nt, Artificial Sequence
  Description of Artificial Sequence: Synthetic oligonucleotide
gugugugugugugugugua

SEQ ID NO: 140822 - RNA, 19 nt, Artificial Sequence
  Description of Artificial Sequence: Synthetic oligonucleotide
gaagcggcaacagcguuuu

SEQ ID NO: 140823 - RNA, 19 nt, Artificial Sequence
  Description of Artificial Sequence: Synthetic oligonucleotide
cucuaaucugggccucaga

SEQ ID NO: 140824 - RNA, 19 nt, Artificial Sequence
  Description of Artificial Sequence: Synthetic oligonucleotide
ggauaacgaaaugaagcgu

SEQ ID NO: 140825 - RNA, 19 nt, Artificial Sequence
  Description of Artificial Sequence: Synthetic oligonucleotide
gcguccagcgauucaacaa

SEQ ID NO: 140826 - RNA, 19 nt, Artificial Sequence
  Description of Artificial Sequence: Synthetic oligonucleotide
ucucugcggugguacuaua

SEQ ID NO: 140827 - RNA, 19 nt, Artificial Sequence
  Description of Artificial Sequence: Synthetic oligonucleotide
acucuacgggccauuuaaa

SEQ ID NO: 140828 - RNA, 19 nt, Artificial Sequence
  Description of Artificial Sequence: Synthetic oligonucleotide
ugccauccguuuggauuug

SEQ ID NO: 140829 - RNA, 19 nt, Artificial Sequence
  Description of Artificial Sequence: Synthetic oligonucleotide
caccgcgcguccgcuaggg

SEQ ID NO: 140830 - RNA, 19 nt, Artificial Sequence
  Description of Artificial Sequence: Synthetic oligonucleotide
gccaguuugugccauccgu

SEQ ID NO: 140831 - RNA, 19 nt, Artificial Sequence
  Description of Artificial Sequence: Synthetic oligonucleotide
cccaccgaucucuucugug

SEQ ID NO: 140832 - RNA, 19 nt, Artificial Sequence
  Description of Artificial Sequence: Synthetic oligonucleotide
acauugccguucaaaucuu

SEQ ID NO: 140833 - RNA, 19 nt, Artificial Sequence
  Description of Artificial Sequence: Synthetic oligonucleotide
ccagcgauucaacaauaaa

SEQ ID NO: 140834 - RNA, 19 nt, Artificial Sequence
  Description of Artificial Sequence: Synthetic oligonucleotide
cccuuguuuguaaagccua

SEQ ID NO: 140835 - RNA, 19 nt, Artificial Sequence
  Description of Artificial Sequence: Synthetic oligonucleotide
gcucuaaucugggccucag

SEQ ID NO: 140836 - RNA, 19 nt, Artificial Sequence
  Description of Artificial Sequence: Synthetic oligonucleotide
cucccuagguuuagcauuu

SEQ ID NO: 140837 - RNA, 19 nt, Artificial Sequence
  Description of Artificial Sequence: Synthetic oligonucleotide
ggauccccuuggucuguag

SEQ ID NO: 140838 - RNA, 19 nt, Artificial Sequence
  Description of Artificial Sequence: Synthetic oligonucleotide
ccguucaaaucuuuguagu

SEQ ID NO: 140839 - RNA, 19 nt, Artificial Sequence
  Description of Artificial Sequence: Synthetic oligonucleotide
gcggcaacagcguuuugcu

SEQ ID NO: 140840 - RNA, 19 nt, Artificial Sequence
  Description of Artificial Sequence: Synthetic oligonucleotide
uccggcgguaauggcguua

SEQ ID NO: 140841 - RNA, 19 nt, Artificial Sequence
  Description of Artificial Sequence: Synthetic oligonucleotide
cgaguuaucagcugucccu

SEQ ID NO: 140842 - RNA, 19 nt, Artificial Sequence
  Description of Artificial Sequence: Synthetic oligonucleotide
cagcguuuugcugaguauu

SEQ ID NO: 140843 - RNA, 19 nt, Artificial Sequence
  Description of Artificial Sequence: Synthetic oligonucleotide
gcgugacugugugugugug

SEQ ID NO: 140844 - RNA, 19 nt, Artificial Sequence
  Description of Artificial Sequence: Synthetic oligonucleotide
gcguccgcuagggcugucg

SEQ ID NO: 140845 - RNA, 19 nt, Artificial Sequence
  Description of Artificial Sequence: Synthetic oligonucleotide
gccaccugccuuaaacaaa

SEQ ID NO: 140846 - RNA, 19 nt, Artificial Sequence
  Description of Artificial Sequence: Synthetic oligonucleotide
ccuagcacaaagacugcau

SEQ ID NO: 140847 - RNA, 19 nt, Artificial Sequence
  Description of Artificial Sequence: Synthetic oligonucleotide
ccggggaaggagucucaug

SEQ ID NO: 140848 - RNA, 19 nt, Artificial Sequence
  Description of Artificial Sequence: Synthetic oligonucleotide
guaucgccacagacucuga

SEQ ID NO: 140849 - RNA, 19 nt, Artificial Sequence
  Description of Artificial Sequence: Synthetic oligonucleotide
gucucugcggugguacuau

SEQ ID NO: 140850 - RNA, 19 nt, Artificial Sequence
  Description of Artificial Sequence: Synthetic oligonucleotide
ccggcgguaauggcguuac

SEQ ID NO: 140851 - RNA, 19 nt, Artificial Sequence
  Description of Artificial Sequence: Synthetic oligonucleotide
cgcgcguccgcuagggcug

SEQ ID NO: 140852 - RNA, 19 nt, Artificial Sequence
  Description of Artificial Sequence: Synthetic oligonucleotide
guguguguguguguaucuu

SEQ ID NO: 140853 - RNA, 19 nt, Artificial Sequence
  Description of Artificial Sequence: Synthetic oligonucleotide
cccugccucuaaaauugga

SEQ ID NO: 140854 - RNA, 19 nt, Artificial Sequence
  Description of Artificial Sequence: Synthetic oligonucleotide
cccuagguuuagcauuuaa

SEQ ID NO: 140855 - RNA, 19 nt, Artificial Sequence
  Description of Artificial Sequence: Synthetic oligonucleotide
cggucagcguccaccgcgc

SEQ ID NO: 140856 - RNA, 19 nt, Artificial Sequence
  Description of Artificial Sequence: Synthetic oligonucleotide
caaacucuacgggccauuu

SEQ ID NO: 140857 - RNA, 19 nt, Artificial Sequence
  Description of Artificial Sequence: Synthetic oligonucleotide
gucaaacucuacgggccau

SEQ ID NO: 140858 - RNA, 19 nt, Artificial Sequence
  Description of Artificial Sequence: Synthetic oligonucleotide
ggcucuaaucugggccuca

SEQ ID NO: 140859 - RNA, 19 nt, Artificial Sequence
  Description of Artificial Sequence: Synthetic oligonucleotide
cguucaaaucuuuguaguu

SEQ ID NO: 140860 - RNA, 19 nt, Artificial Sequence
  Description of Artificial Sequence: Synthetic oligonucleotide
ccuguagucaagugaccuu

SEQ ID NO: 140861 - RNA, 19 nt, Artificial Sequence
  Description of Artificial Sequence: Synthetic oligonucleotide
gccggucagcguccaccgc

SEQ ID NO: 140862 - RNA, 19 nt, Artificial Sequence
  Description of Artificial Sequence: Synthetic oligonucleotide
ccguuuggauuugauagau

SEQ ID NO: 140863 - RNA, 19 nt, Artificial Sequence
  Description of Artificial Sequence: Synthetic oligonucleotide
gucgguggcuccggcggua

SEQ ID NO: 140864 - RNA, 19 nt, Artificial Sequence
  Description of Artificial Sequence: Synthetic oligonucleotide
gggaagcggcaacagcguu

SEQ ID NO: 140865 - RNA, 19 nt, Artificial Sequence
  Description of Artificial Sequence: Synthetic oligonucleotide
ccaccgcgcguccgcuagg

SEQ ID NO: 140866 - RNA, 19 nt, Artificial Sequence
  Description of Artificial Sequence: Synthetic oligonucleotide
ccuaagcaguaguugccuu

SEQ ID NO: 140867 - RNA, 19 nt, Artificial Sequence
  Description of Artificial Sequence: Synthetic oligonucleotide
gccauccguuuggauuuga

SEQ ID NO: 140868 - RNA, 19 nt, Artificial Sequence
  Description of Artificial Sequence: Synthetic oligonucleotide
ccgcgcguccgcuagggcu

SEQ ID NO: 140869 - RNA, 19 nt, Artificial Sequence
  Description of Artificial Sequence: Synthetic oligonucleotide
ccauccguuuggauuugau

SEQ ID NO: 140870 - RNA, 19 nt, Artificial Sequence
  Description of Artificial Sequence: Synthetic oligonucleotide
gcguggaauuaggauuuau

SEQ ID NO: 140871 - RNA, 19 nt, Artificial Sequence
  Description of Artificial Sequence: Synthetic oligonucleotide
cgugacugugugugugugu

SEQ ID NO: 140872 - RNA, 19 nt, Artificial Sequence
  Description of Artificial Sequence: Synthetic oligonucleotide
gcgcguccgcuagggcugu

SEQ ID NO: 140873 - RNA, 19 nt, Artificial Sequence
  Description of Artificial Sequence: Synthetic oligonucleotide
cgcguccgcuagggcuguc

SEQ ID NO: 140874 - RNA, 19 nt, Artificial Sequence
  Description of Artificial Sequence: Synthetic oligonucleotide
aauauuuagagguacacuc

SEQ ID NO: 140875 - RNA, 19 nt, Artificial Sequence
  Description of Artificial Sequence: Synthetic oligonucleotide
aguuaagccagcuuuaaac

SEQ ID NO: 140876 - RNA, 19 nt, Artificial Sequence
  Description of Artificial Sequence: Synthetic oligonucleotide
aauaauuuaaguccuuggu

SEQ ID NO: 140877 - RNA, 19 nt, Artificial Sequence
  Description of Artificial Sequence: Synthetic oligonucleotide
uguaucuuaaauucuauga

SEQ ID NO: 140878 - RNA, 19 nt, Artificial Sequence
  Description of Artificial Sequence: Synthetic oligonucleotide
acuguauaggaucauaggg

SEQ ID NO: 140879 - RNA, 19 nt, Artificial Sequence
  Description of Artificial Sequence: Synthetic oligonucleotide
aauaauaccguaacgcccg

SEQ ID NO: 140880 - RNA, 19 nt, Artificial Sequence
  Description of Artificial Sequence: Synthetic oligonucleotide
aauuccauggagcugcauc

SEQ ID NO: 140881 - RNA, 19 nt, Artificial Sequence
  Description of Artificial Sequence: Synthetic oligonucleotide
uuuaucuaaguggagacgg

SEQ ID NO: 140882 - RNA, 19 nt, Artificial Sequence
  Description of Artificial Sequence: Synthetic oligonucleotide
ugaacuuugcaaaucaugu

SEQ ID NO: 140883 - RNA, 19 nt, Artificial Sequence
  Description of Artificial Sequence: Synthetic oligonucleotide
uaaaagacuagcaaacugu

SEQ ID NO: 140884 - RNA, 19 nt, Artificial Sequence
  Description of Artificial Sequence: Synthetic oligonucleotide
ucgaugaccacuucaaccg

SEQ ID NO: 140885 - RNA, 19 nt, Artificial Sequence
  Description of Artificial Sequence: Synthetic oligonucleotide
gacuacauaauucucuucc

SEQ ID NO: 140886 - RNA, 19 nt, Artificial Sequence
  Description of Artificial Sequence: Synthetic oligonucleotide
uccgaagacauuaagucag

SEQ ID NO: 140887 - RNA, 19 nt, Artificial Sequence
  Description of Artificial Sequence: Synthetic oligonucleotide
agaucaagcacacacagca

SEQ ID NO: 140888 - RNA, 19 nt, Artificial Sequence
  Description of Artificial Sequence: Synthetic oligonucleotide
ugcacuacuguuuauaacu

SEQ ID NO: 140889 - RNA, 19 nt, Artificial Sequence
  Description of Artificial Sequence: Synthetic oligonucleotide
ugguauugcauaauaaucu

SEQ ID NO: 140890 - RNA, 19 nt, Artificial Sequence
  Description of Artificial Sequence: Synthetic oligonucleotide
ugugcuaucucaaggauac

SEQ ID NO: 140891 - RNA, 19 nt, Artificial Sequence
  Description of Artificial Sequence: Synthetic oligonucleotide
ucauaauaauaccguaacg

SEQ ID NO: 140892 - RNA, 19 nt, Artificial Sequence
  Description of Artificial Sequence: Synthetic oligonucleotide
uaauaauaccguaacgccc

SEQ ID NO: 140893 - RNA, 19 nt, Artificial Sequence
  Description of Artificial Sequence: Synthetic oligonucleotide
aaaacgacagaacuugcca

SEQ ID NO: 140894 - RNA, 19 nt, Artificial Sequence
  Description of Artificial Sequence: Synthetic oligonucleotide
cuguauaggaucauagggg

SEQ ID NO: 140895 - RNA, 19 nt, Artificial Sequence
  Description of Artificial Sequence: Synthetic oligonucleotide
ucauacucgagcaucacca

SEQ ID NO: 140896 - RNA, 19 nt, Artificial Sequence
  Description of Artificial Sequence: Synthetic oligonucleotide
caauguucagacuucaggc

SEQ ID NO: 140897 - RNA, 19 nt, Artificial Sequence
  Description of Artificial Sequence: Synthetic oligonucleotide
aggucuauaucagucaugc

SEQ ID NO: 140898 - RNA, 19 nt, Artificial Sequence
  Description of Artificial Sequence: Synthetic oligonucleotide
guagagaucaagcacacac

SEQ ID NO: 140899 - RNA, 19 nt, Artificial Sequence
  Description of Artificial Sequence: Synthetic oligonucleotide
aaaguguaugauaaaacug

SEQ ID NO: 140900 - RNA, 19 nt, Artificial Sequence
  Description of Artificial Sequence: Synthetic oligonucleotide
aacuaccccacgaugaacc

SEQ ID NO: 140901 - RNA, 19 nt, Artificial Sequence
  Description of Artificial Sequence: Synthetic oligonucleotide
aauaguugugauaugcuug

SEQ ID NO: 140902 - RNA, 19 nt, Artificial Sequence
  Description of Artificial Sequence: Synthetic oligonucleotide
uguauaggaucauagggga

SEQ ID NO: 140903 - RNA, 19 nt, Artificial Sequence
  Description of Artificial Sequence: Synthetic oligonucleotide
gauccgaagacauuaaguc

SEQ ID NO: 140904 - RNA, 19 nt, Artificial Sequence
  Description of Artificial Sequence: Synthetic oligonucleotide
uaugauaguauaagugucu

SEQ ID NO: 140905 - RNA, 19 nt, Artificial Sequence
  Description of Artificial Sequence: Synthetic oligonucleotide
aauacaauguucagacuuc

SEQ ID NO: 140906 - RNA, 19 nt, Artificial Sequence
  Description of Artificial Sequence: Synthetic oligonucleotide
auuugauaugaacaucuag

SEQ ID NO: 140907 - RNA, 19 nt, Artificial Sequence
  Description of Artificial Sequence: Synthetic oligonucleotide
uuuauagccuuuagauccg

SEQ ID NO: 140908 - RNA, 19 nt, Artificial Sequence
  Description of Artificial Sequence: Synthetic oligonucleotide
uuaugauaguauaaguguc

SEQ ID NO: 140909 - RNA, 19 nt, Artificial Sequence
  Description of Artificial Sequence: Synthetic oligonucleotide
auaaucauacucgagcauc

SEQ ID NO: 140910 - RNA, 19 nt, Artificial Sequence
  Description of Artificial Sequence: Synthetic oligonucleotide
uagggcuagacauuaauac

SEQ ID NO: 140911 - RNA, 19 nt, Artificial Sequence
  Description of Artificial Sequence: Synthetic oligonucleotide
aauucuaugaaaaguguau

SEQ ID NO: 140912 - RNA, 19 nt, Artificial Sequence
  Description of Artificial Sequence: Synthetic oligonucleotide
ugggauaauuugcacaggc

SEQ ID NO: 140913 - RNA, 19 nt, Artificial Sequence
  Description of Artificial Sequence: Synthetic oligonucleotide
ugauuuagcuuaaauucac

SEQ ID NO: 140914 - RNA, 19 nt, Artificial Sequence
  Description of Artificial Sequence: Synthetic oligonucleotide
uccuuguaaauauauaaau

SEQ ID NO: 140915 - RNA, 19 nt, Artificial Sequence
  Description of Artificial Sequence: Synthetic oligonucleotide
aucauaggggauuccaagg

SEQ ID NO: 140916 - RNA, 19 nt, Artificial Sequence
  Description of Artificial Sequence: Synthetic oligonucleotide
uaccuguacacuaagcugu

SEQ ID NO: 140917 - RNA, 19 nt, Artificial Sequence
  Description of Artificial Sequence: Synthetic oligonucleotide
gaucauaggggauuccaag

SEQ ID NO: 140918 - RNA, 19 nt, Artificial Sequence
  Description of Artificial Sequence: Synthetic oligonucleotide
uaauggguugaguuaagcc

SEQ ID NO: 140919 - RNA, 19 nt, Artificial Sequence
  Description of Artificial Sequence: Synthetic oligonucleotide
uuagcaaacuaccccacga

SEQ ID NO: 140920 - RNA, 19 nt, Artificial Sequence
  Description of Artificial Sequence: Synthetic oligonucleotide
aauaccguaacgcccggcu

SEQ ID NO: 140921 - RNA, 19 nt, Artificial Sequence
  Description of Artificial Sequence: Synthetic oligonucleotide
gaucauguagagaucaagc

SEQ ID NO: 140922 - RNA, 19 nt, Artificial Sequence
  Description of Artificial Sequence: Synthetic oligonucleotide
uuugacuguaucuuaaauu

SEQ ID NO: 140923 - RNA, 19 nt, Artificial Sequence
  Description of Artificial Sequence: Synthetic oligonucleotide
ucggaaauaguugugauau

SEQ ID NO: 140924 - RNA, 19 nt, Artificial Sequence
  Description of Artificial Sequence: Synthetic oligonucleotide
uuuagauccgaagacauua

SEQ ID NO: 140925 - RNA, 19 nt, Artificial Sequence
  Description of Artificial Sequence: Synthetic oligonucleotide
ucauaggggauuccaaggc

SEQ ID NO: 140926 - RNA, 19 nt, Artificial Sequence
  Description of Artificial Sequence: Synthetic oligonucleotide
uuuuaucuaaguggagacg

SEQ ID NO: 140927 - RNA, 19 nt, Artificial Sequence
  Description of Artificial Sequence: Synthetic oligonucleotide
cuucauuacccaaaccacc

SEQ ID NO: 140928 - RNA, 19 nt, Artificial Sequence
  Description of Artificial Sequence: Synthetic oligonucleotide
cacauuucaggcaucgcgg

SEQ ID NO: 140929 - RNA, 19 nt, Artificial Sequence
  Description of Artificial Sequence: Synthetic oligonucleotide
uaucucaaggauacacuag

SEQ ID NO: 140930 - RNA, 19 nt, Artificial Sequence
  Description of Artificial Sequence: Synthetic oligonucleotide
auggauugacaccaaaaug

SEQ ID NO: 140931 - RNA, 19 nt, Artificial Sequence
  Description of Artificial Sequence: Synthetic oligonucleotide
gaacaucuagcucugcuug

SEQ ID NO: 140932 - RNA, 19 nt, Artificial Sequence
  Description of Artificial Sequence: Synthetic oligonucleotide
aaaccauuaauaauggguu

SEQ ID NO: 140933 - RNA, 19 nt, Artificial Sequence
  Description of Artificial Sequence: Synthetic oligonucleotide
ucgagcaucaccauuuauc

SEQ ID NO: 140934 - RNA, 19 nt, Artificial Sequence
  Description of Artificial Sequence: Synthetic oligonucleotide
agaaaaccauuaauaaugg

SEQ ID NO: 140935 - RNA, 19 nt, Artificial Sequence
  Description of Artificial Sequence: Synthetic oligonucleotide
aacguuucauuacucuuga

SEQ ID NO: 140936 - RNA, 19 nt, Artificial Sequence
  Description of Artificial Sequence: Synthetic oligonucleotide
accaguuuuagcuuuccug

SEQ ID NO: 140937 - RNA, 19 nt, Artificial Sequence
  Description of Artificial Sequence: Synthetic oligonucleotide
uaaucauacucgagcauca

SEQ ID NO: 140938 - RNA, 19 nt, Artificial Sequence
  Description of Artificial Sequence: Synthetic oligonucleotide
uguacacaaaucucuugcc

SEQ ID NO: 140939 - RNA, 19 nt, Artificial Sequence
  Description of Artificial Sequence: Synthetic oligonucleotide
ugugauaugcuuggugccg

SEQ ID NO: 140940 - RNA, 19 nt, Artificial Sequence
  Description of Artificial Sequence: Synthetic oligonucleotide
uuaagccagcuuuaaaccu

SEQ ID NO: 140941 - RNA, 19 nt, Artificial Sequence
  Description of Artificial Sequence: Synthetic oligonucleotide
uuucgucggaaauaguugu

SEQ ID NO: 140942 - RNA, 19 nt, Artificial Sequence
  Description of Artificial Sequence: Synthetic oligonucleotide
aauuucuccccgagggacc

SEQ ID NO: 140943 - RNA, 19 nt, Artificial Sequence
  Description of Artificial Sequence: Synthetic oligonucleotide
auaauggguugaguuaagc

SEQ ID NO: 140944 - RNA, 19 nt, Artificial Sequence
  Description of Artificial Sequence: Synthetic oligonucleotide
cuucccgauauguugagug

SEQ ID NO: 140945 - RNA, 19 nt, Artificial Sequence
  Description of Artificial Sequence: Synthetic oligonucleotide
ugcuacuauagauuaauuu

SEQ ID NO: 140946 - RNA, 19 nt, Artificial Sequence
  Description of Artificial Sequence: Synthetic oligonucleotide
agagaauuucuccccgagg

SEQ ID NO: 140947 - RNA, 19 nt, Artificial Sequence
  Description of Artificial Sequence: Synthetic oligonucleotide
ucaugagcguccaaagaac

SEQ ID NO: 140948 - RNA, 19 nt, Artificial Sequence
  Description of Artificial Sequence: Synthetic oligonucleotide
ucgccagaacauauuuucg

SEQ ID NO: 140949 - RNA, 19 nt, Artificial Sequence
  Description of Artificial Sequence: Synthetic oligonucleotide
auaggggauuccaaggcgc

SEQ ID NO: 140950 - RNA, 19 nt, Artificial Sequence
  Description of Artificial Sequence: Synthetic oligonucleotide
caaacaagcuucguucugg

SEQ ID NO: 140951 - RNA, 19 nt, Artificial Sequence
  Description of Artificial Sequence: Synthetic oligonucleotide
ucaaacaagcuucguucug

SEQ ID NO: 140952 - RNA, 19 nt, Artificial Sequence
  Description of Artificial Sequence: Synthetic oligonucleotide
cauaggggauuccaaggcg

SEQ ID NO: 140953 - RNA, 19 nt, Artificial Sequence
  Description of Artificial Sequence: Synthetic oligonucleotide
uucaucguaggcuuguuuu

SEQ ID NO: 140954 - RNA, 19 nt, Artificial Sequence
  Description of Artificial Sequence: Synthetic oligonucleotide
aauagcugguucauuagaa

SEQ ID NO: 140955 - RNA, 19 nt, Artificial Sequence
  Description of Artificial Sequence: Synthetic oligonucleotide
uaucuaaguggagacggag

SEQ ID NO: 140956 - RNA, 19 nt, Artificial Sequence
  Description of Artificial Sequence: Synthetic oligonucleotide
gacggagucugaucuaaag

SEQ ID NO: 140957 - RNA, 19 nt, Artificial Sequence
  Description of Artificial Sequence: Synthetic oligonucleotide
cuuugcaaaucaugucucc

SEQ ID NO: 140958 - RNA, 19 nt, Artificial Sequence
  Description of Artificial Sequence: Synthetic oligonucleotide
aacgacagaacuugccaaa

SEQ ID NO: 140959 - RNA, 19 nt, Artificial Sequence
  Description of Artificial Sequence: Synthetic oligonucleotide
gugagacaggcacacaugc

SEQ ID NO: 140960 - RNA, 19 nt, Artificial Sequence
  Description of Artificial Sequence: Synthetic oligonucleotide
caguuaaccucuucuuucc

SEQ ID NO: 140961 - RNA, 19 nt, Artificial Sequence
  Description of Artificial Sequence: Synthetic oligonucleotide
aaucauacucgagcaucac

SEQ ID NO: 140962 - RNA, 19 nt, Artificial Sequence
  Description of Artificial Sequence: Synthetic oligonucleotide
cuguaucuuaaauucuaug

SEQ ID NO: 140963 - RNA, 19 nt, Artificial Sequence
  Description of Artificial Sequence: Synthetic oligonucleotide
agguccuagguuucaauug

SEQ ID NO: 140964 - RNA, 19 nt, Artificial Sequence
  Description of Artificial Sequence: Synthetic oligonucleotide
uuguuugacuguaucuuaa

SEQ ID NO: 140965 - RNA, 19 nt, Artificial Sequence
  Description of Artificial Sequence: Synthetic oligonucleotide
auccgaagacauuaaguca

SEQ ID NO: 140966 - RNA, 19 nt, Artificial Sequence
  Description of Artificial Sequence: Synthetic oligonucleotide
agggcuagacauuaauacu

SEQ ID NO: 140967 - RNA, 19 nt, Artificial Sequence
  Description of Artificial Sequence: Synthetic oligonucleotide
aaacaagcuucguucugga

SEQ ID NO: 140968 - RNA, 19 nt, Artificial Sequence
  Description of Artificial Sequence: Synthetic oligonucleotide
cauaaauggcaaaugcaga

SEQ ID NO: 140969 - RNA, 19 nt, Artificial Sequence
  Description of Artificial Sequence: Synthetic oligonucleotide
uccuugguaagagauuacc

SEQ ID NO: 140970 - RNA, 19 nt, Artificial Sequence
  Description of Artificial Sequence: Synthetic oligonucleotide
ugaacguuucauuacucuu

SEQ ID NO: 140971 - RNA, 19 nt, Artificial Sequence
  Description of Artificial Sequence: Synthetic oligonucleotide
agcaaacuaccccacgaug

SEQ ID NO: 140972 - RNA, 19 nt, Artificial Sequence
  Description of Artificial Sequence: Synthetic oligonucleotide
agaaaacgacagaacuugc

SEQ ID NO: 140973 - RNA, 19 nt, Artificial Sequence
  Description of Artificial Sequence: Synthetic oligonucleotide
uuaucuaaguggagacgga

SEQ ID NO: 140974 - RNA, 19 nt, Artificial Sequence
  Description of Artificial Sequence: Synthetic oligonucleotide
aguguaugauaaaacugag

SEQ ID NO: 140975 - RNA, 19 nt, Artificial Sequence
  Description of Artificial Sequence: Synthetic oligonucleotide
guauugcauaauaaucugc

SEQ ID NO: 140976 - RNA, 19 nt, Artificial Sequence
  Description of Artificial Sequence: Synthetic oligonucleotide
auaaccugauaguucagua

SEQ ID NO: 140977 - RNA, 19 nt, Artificial Sequence
  Description of Artificial Sequence: Synthetic oligonucleotide
uguaaccaguuaauugauc

SEQ ID NO: 140978 - RNA, 19 nt, Artificial Sequence
  Description of Artificial Sequence: Synthetic oligonucleotide
accauuaauaauggguuga

SEQ ID NO: 140979 - RNA, 19 nt, Artificial Sequence
  Description of Artificial Sequence: Synthetic oligonucleotide
gacuagcaaacuguggccc

SEQ ID NO: 140980 - RNA, 19 nt, Artificial Sequence
  Description of Artificial Sequence: Synthetic oligonucleotide
auaggaucauaggggauuc

SEQ ID NO: 140981 - RNA, 19 nt, Artificial Sequence
  Description of Artificial Sequence: Synthetic oligonucleotide
guuucgucggaaauaguug

SEQ ID NO: 140982 - RNA, 19 nt, Artificial Sequence
  Description of Artificial Sequence: Synthetic oligonucleotide
uuagauccgaagacauuaa

SEQ ID NO: 140983 - RNA, 19 nt, Artificial Sequence
  Description of Artificial Sequence: Synthetic oligonucleotide
acggagucugaucuaaagu

SEQ ID NO: 140984 - RNA, 19 nt, Artificial Sequence
  Description of Artificial Sequence: Synthetic oligonucleotide
gauuaccuguacacuaagc

SEQ ID NO: 140985 - RNA, 19 nt, Artificial Sequence
  Description of Artificial Sequence: Synthetic oligonucleotide
uucgucggaaauaguugug

SEQ ID NO: 140986 - RNA, 19 nt, Artificial Sequence
  Description of Artificial Sequence: Synthetic oligonucleotide
aaagcuugcuccaaauauu

SEQ ID NO: 140987 - RNA, 19 nt, Artificial Sequence
  Description of Artificial Sequence: Synthetic oligonucleotide
ugggaauaagugaaauauu

SEQ ID NO: 140988 - RNA, 19 nt, Artificial Sequence
  Description of Artificial Sequence: Synthetic oligonucleotide
aucgcggagauccuuuacu

SEQ ID NO: 140989 - RNA, 19 nt, Artificial Sequence
  Description of Artificial Sequence: Synthetic oligonucleotide
uuugguagggcuagacauu

SEQ ID NO: 140990 - RNA, 19 nt, Artificial Sequence
  Description of Artificial Sequence: Synthetic oligonucleotide
ugccuaacuagcuggacuu

SEQ ID NO: 140991 - RNA, 19 nt, Artificial Sequence
  Description of Artificial Sequence: Synthetic oligonucleotide
auguagagaucaagcacac

SEQ ID NO: 140992 - RNA, 19 nt, Artificial Sequence
  Description of Artificial Sequence: Synthetic oligonucleotide
auaauaccguaacgcccgg

SEQ ID NO: 140993 - RNA, 19 nt, Artificial Sequence
  Description of Artificial Sequence: Synthetic oligonucleotide
agcuuuccugacuguuagc

SEQ ID NO: 140994 - RNA, 19 nt, Artificial Sequence
  Description of Artificial Sequence: Synthetic oligonucleotide
uugcacuacuguuuauaac

SEQ ID NO: 140995 - RNA, 19 nt, Artificial Sequence
  Description of Artificial Sequence: Synthetic oligonucleotide
agugaacguuucauuacuc

SEQ ID NO: 140996 - RNA, 19 nt, Artificial Sequence
  Description of Artificial Sequence: Synthetic oligonucleotide
ucgucggaaauaguuguga

SEQ ID NO: 140997 - RNA, 19 nt, Artificial Sequence
  Description of Artificial Sequence: Synthetic oligonucleotide
cuaucucaaggauacacua

SEQ ID NO: 140998 - RNA, 19 nt, Artificial Sequence
  Description of Artificial Sequence: Synthetic oligonucleotide
uucccgauauguugagugu

SEQ ID NO: 140999 - RNA, 19 nt, Artificial Sequence
  Description of Artificial Sequence: Synthetic oligonucleotide
uauaucagucaugcugaac

SEQ ID NO: 141000 - RNA, 19 nt, Artificial Sequence
  Description of Artificial Sequence: Synthetic oligonucleotide
ucccgauauguugagugug

SEQ ID NO: 141001 - RNA, 19 nt, Artificial Sequence
  Description of Artificial Sequence: Synthetic oligonucleotide
augagcguccaaagaacac

SEQ ID NO: 141002 - RNA, 19 nt, Artificial Sequence
  Description of Artificial Sequence: Synthetic oligonucleotide
aagcuugcuccaaauauuu

SEQ ID NO: 141003 - RNA, 19 nt, Artificial Sequence
  Description of Artificial Sequence: Synthetic oligonucleotide
gacuguaucuuaaauucua

SEQ ID NO: 141004 - RNA, 19 nt, Artificial Sequence
  Description of Artificial Sequence: Synthetic oligonucleotide
ugauaguauaagugucuuu

SEQ ID NO: 141005 - RNA, 19 nt, Artificial Sequence
  Description of Artificial Sequence: Synthetic oligonucleotide
caugagcguccaaagaaca

SEQ ID NO: 141006 - RNA, 19 nt, Artificial Sequence
  Description of Artificial Sequence: Synthetic oligonucleotide
cguuucauuacucuugaac

SEQ ID NO: 141007 - RNA, 19 nt, Artificial Sequence
  Description of Artificial Sequence: Synthetic oligonucleotide
uuggcucgccagaacauau

SEQ ID NO: 141008 - RNA, 19 nt, Artificial Sequence
  Description of Artificial Sequence: Synthetic oligonucleotide
aggaucauaggggauucca

SEQ ID NO: 141009 - RNA, 19 nt, Artificial Sequence
  Description of Artificial Sequence: Synthetic oligonucleotide
cauuucaggcaucgcggag

SEQ ID NO: 141010 - RNA, 19 nt, Artificial Sequence
  Description of Artificial Sequence: Synthetic oligonucleotide
uauagccuuuagauccgaa

SEQ ID NO: 141011 - RNA, 19 nt, Artificial Sequence
  Description of Artificial Sequence: Synthetic oligonucleotide
ucucgucacuugcucugag

SEQ ID NO: 141012 - RNA, 19 nt, Artificial Sequence
  Description of Artificial Sequence: Synthetic oligonucleotide
cacuguauccaauaagagu

SEQ ID NO: 141013 - RNA, 19 nt, Artificial Sequence
  Description of Artificial Sequence: Synthetic oligonucleotide
cacccaaugcaggacuugg

SEQ ID NO: 141014 - RNA, 19 nt, Artificial Sequence
  Description of Artificial Sequence: Synthetic oligonucleotide
ccaguuaaccucuucuuuc

SEQ ID NO: 141015 - RNA, 19 nt, Artificial Sequence
  Description of Artificial Sequence: Synthetic oligonucleotide
cauaaggauaacaaauauu

SEQ ID NO: 141016 - RNA, 19 nt, Artificial Sequence
  Description of Artificial Sequence: Synthetic oligonucleotide
uuuccgcaguuuuaacaau

SEQ ID NO: 141017 - RNA, 19 nt, Artificial Sequence
  Description of Artificial Sequence: Synthetic oligonucleotide
cuuugauaguaguuggcgu

SEQ ID NO: 141018 - RNA, 19 nt, Artificial Sequence
  Description of Artificial Sequence: Synthetic oligonucleotide
ucgcggagauccuuuacua

SEQ ID NO: 141019 - RNA, 19 nt, Artificial Sequence
  Description of Artificial Sequence: Synthetic oligonucleotide
gugccgucaaguguuauca

SEQ ID NO: 141020 - RNA, 19 nt, Artificial Sequence
  Description of Artificial Sequence: Synthetic oligonucleotide
agcguccaaagaacacugc

SEQ ID NO: 141021 - RNA, 19 nt, Artificial Sequence
  Description of Artificial Sequence: Synthetic oligonucleotide
aucuaaguggagacggagu

SEQ ID NO: 141022 - RNA, 19 nt, Artificial Sequence
  Description of Artificial Sequence: Synthetic oligonucleotide
uguauccaauaagagucuu

SEQ ID NO: 141023 - RNA, 19 nt, Artificial Sequence
  Description of Artificial Sequence: Synthetic oligonucleotide
ucugcuugauuaggugaga

SEQ ID NO: 141024 - RNA, 19 nt, Artificial Sequence
  Description of Artificial Sequence: Synthetic oligonucleotide
uuauagccuuuagauccga

SEQ ID NO: 141025 - RNA, 19 nt, Artificial Sequence
  Description of Artificial Sequence: Synthetic oligonucleotide
gaguuaagccagcuuuaaa

SEQ ID NO: 141026 - RNA, 19 nt, Artificial Sequence
  Description of Artificial Sequence: Synthetic oligonucleotide
gaccauuguuuccuguucu

SEQ ID NO: 141027 - RNA, 19 nt, Artificial Sequence
  Description of Artificial Sequence: Synthetic oligonucleotide
gugaacguuucauuacucu

SEQ ID NO: 141028 - RNA, 19 nt, Artificial Sequence
  Description of Artificial Sequence: Synthetic oligonucleotide
cccgauauguugagugugg

SEQ ID NO: 141029 - RNA, 19 nt, Artificial Sequence
  Description of Artificial Sequence: Synthetic oligonucleotide
cauaauaaucugcuacuau

SEQ ID NO: 141030 - RNA, 19 nt, Artificial Sequence
  Description of Artificial Sequence: Synthetic oligonucleotide
guagcagacugcacugaug

SEQ ID NO: 141031 - RNA, 19 nt, Artificial Sequence
  Description of Artificial Sequence: Synthetic oligonucleotide
ugaccacuucaaccguuuc

SEQ ID NO: 141032 - RNA, 19 nt, Artificial Sequence
  Description of Artificial Sequence: Synthetic oligonucleotide
cugggauaauuugcacagg

SEQ ID NO: 141033 - RNA, 19 nt, Artificial Sequence
  Description of Artificial Sequence: Synthetic oligonucleotide
uaauaccguaacgcccggc

SEQ ID NO: 141034 - RNA, 19 nt, Artificial Sequence
  Description of Artificial Sequence: Synthetic oligonucleotide
aguuggcguagcagacugc

SEQ ID NO: 141035 - RNA, 19 nt, Artificial Sequence
  Description of Artificial Sequence: Synthetic oligonucleotide
auguaaccaguuaauugau

SEQ ID NO: 141036 - RNA, 19 nt, Artificial Sequence
  Description of Artificial Sequence: Synthetic oligonucleotide
cacgaugaacccacucuca

SEQ ID NO: 141037 - RNA, 19 nt, Artificial Sequence
  Description of Artificial Sequence: Synthetic oligonucleotide
gcuagacauuaauacugac

SEQ ID NO: 141038 - RNA, 19 nt, Artificial Sequence
  Description of Artificial Sequence: Synthetic oligonucleotide
ccuuggucugacauaauga

SEQ ID NO: 141039 - RNA, 19 nt, Artificial Sequence
  Description of Artificial Sequence: Synthetic oligonucleotide
uaauuugcacaggcugguc

SEQ ID NO: 141040 - RNA, 19 nt, Artificial Sequence
  Description of Artificial Sequence: Synthetic oligonucleotide
guggagacggagucugauc

SEQ ID NO: 141041 - RNA, 19 nt, Artificial Sequence
  Description of Artificial Sequence: Synthetic oligonucleotide
uaggaucauaggggauucc

SEQ ID NO: 141042 - RNA, 19 nt, Artificial Sequence
  Description of Artificial Sequence: Synthetic oligonucleotide
guagggcuagacauuaaua

SEQ ID NO: 141043 - RNA, 19 nt, Artificial Sequence
  Description of Artificial Sequence: Synthetic oligonucleotide
caucgcggagauccuuuac

SEQ ID NO: 141044 - RNA, 19 nt, Artificial Sequence
  Description of Artificial Sequence: Synthetic oligonucleotide
gagguccuagguuucaauu

SEQ ID NO: 141045 - RNA, 19 nt, Artificial Sequence
  Description of Artificial Sequence: Synthetic oligonucleotide
caggcuggucaaugguaac

SEQ ID NO: 141046 - RNA, 19 nt, Artificial Sequence
  Description of Artificial Sequence: Synthetic oligonucleotide
gcguccaaagaacacugca

SEQ ID NO: 141047 - RNA, 19 nt, Artificial Sequence
  Description of Artificial Sequence: Synthetic oligonucleotide
cugauaguucaguaauuau

SEQ ID NO: 141048 - RNA, 19 nt, Artificial Sequence
  Description of Artificial Sequence: Synthetic oligonucleotide
ggugccgucaaguguuauc

SEQ ID NO: 141049 - RNA, 19 nt, Artificial Sequence
  Description of Artificial Sequence: Synthetic oligonucleotide
cccauaaggauaacaaaua

SEQ ID NO: 141050 - RNA, 19 nt, Artificial Sequence
  Description of Artificial Sequence: Synthetic oligonucleotide
uucaaccguuuccgcaguu

SEQ ID NO: 141051 - RNA, 19 nt, Artificial Sequence
  Description of Artificial Sequence: Synthetic oligonucleotide
cggagauccuuuacuauac

SEQ ID NO: 141052 - RNA, 19 nt, Artificial Sequence
  Description of Artificial Sequence: Synthetic oligonucleotide
cuguauccaauaagagucu

SEQ ID NO: 141053 - RNA, 19 nt, Artificial Sequence
  Description of Artificial Sequence: Synthetic oligonucleotide
auuuagagguacacuccuu

SEQ ID NO: 141054 - RNA, 19 nt, Artificial Sequence
  Description of Artificial Sequence: Synthetic oligonucleotide
aaccguuuccgcaguuuua

SEQ ID NO: 141055 - RNA, 19 nt, Artificial Sequence
  Description of Artificial Sequence: Synthetic oligonucleotide
gcaaacuguggccccauaa

SEQ ID NO: 141056 - RNA, 19 nt, Artificial Sequence
  Description of Artificial Sequence: Synthetic oligonucleotide
ggccccauaaggauaacaa

SEQ ID NO: 141057 - RNA, 19 nt, Artificial Sequence
  Description of Artificial Sequence: Synthetic oligonucleotide
uggcucgccagaacauauu

SEQ ID NO: 141058 - RNA, 19 nt, Artificial Sequence
  Description of Artificial Sequence: Synthetic oligonucleotide
gcggagauccuuuacuaua

SEQ ID NO: 141059 - RNA, 19 nt, Artificial Sequence
  Description of Artificial Sequence: Synthetic oligonucleotide
gccuuuagauccgaagaca

SEQ ID NO: 141060 - RNA, 19 nt, Artificial Sequence
  Description of Artificial Sequence: Synthetic oligonucleotide
guacaacuugaguuguuuu

SEQ ID NO: 141061 - RNA, 19 nt, Artificial Sequence
  Description of Artificial Sequence: Synthetic oligonucleotide
gguuucgucggaaauaguu

SEQ ID NO: 141062 - RNA, 19 nt, Artificial Sequence
  Description of Artificial Sequence: Synthetic oligonucleotide
cauuaauaauggguugagu

SEQ ID NO: 141063 - RNA, 19 nt, Artificial Sequence
  Description of Artificial Sequence: Synthetic oligonucleotide
acguuucauuacucuugaa

SEQ ID NO: 141064 - RNA, 19 nt, Artificial Sequence
  Description of Artificial Sequence: Synthetic oligonucleotide
ggagucugaucuaaagucu

SEQ ID NO: 141065 - RNA, 19 nt, Artificial Sequence
  Description of Artificial Sequence: Synthetic oligonucleotide
ccccauaaggauaacaaau

SEQ ID NO: 141066 - RNA, 19 nt, Artificial Sequence
  Description of Artificial Sequence: Synthetic oligonucleotide
uuggugccgucaaguguua

SEQ ID NO: 141067 - RNA, 19 nt, Artificial Sequence
  Description of Artificial Sequence: Synthetic oligonucleotide
gguagggcuagacauuaau

SEQ ID NO: 141068 - RNA, 19 nt, Artificial Sequence
  Description of Artificial Sequence: Synthetic oligonucleotide
cugaccauuguuuccuguu

SEQ ID NO: 141069 - RNA, 19 nt, Artificial Sequence
  Description of Artificial Sequence: Synthetic oligonucleotide
gccccauaaggauaacaaa

SEQ ID NO: 141070 - RNA, 19 nt, Artificial Sequence
  Description of Artificial Sequence: Synthetic oligonucleotide
gcuaucucaaggauacacu

SEQ ID NO: 141071 - RNA, 19 nt, Artificial Sequence
  Description of Artificial Sequence: Synthetic oligonucleotide
ggaucauaggggauuccaa

SEQ ID NO: 141072 - RNA, 19 nt, Artificial Sequence
  Description of Artificial Sequence: Synthetic oligonucleotide
ccauaaggauaacaaauau

SEQ ID NO: 141073 - RNA, 19 nt, Artificial Sequence
  Description of Artificial Sequence: Synthetic oligonucleotide
ccuugguaagagauuaccu

SEQ ID NO: 141074 - RNA, 19 nt, Artificial Sequence
  Description of Artificial Sequence: Synthetic oligonucleotide
gccgucaaguguuaucacu

SEQ ID NO: 141075 - RNA, 19 nt, Artificial Sequence
  Description of Artificial Sequence: Synthetic oligonucleotide
aguucaucguaggcuuguu

SEQ ID NO: 141076 - RNA, 19 nt, Artificial Sequence
  Description of Artificial Sequence: Synthetic oligonucleotide
guaguuggcguagcagacu

SEQ ID NO: 141077 - RNA, 19 nt, Artificial Sequence
  Description of Artificial Sequence: Synthetic oligonucleotide
gaugaccacuucaaccguu

SEQ ID NO: 141078 - RNA, 19 nt, Artificial Sequence
  Description of Artificial Sequence: Synthetic oligonucleotide
cuuggcucgccagaacaua

SEQ ID NO: 141079 - RNA, 19 nt, Artificial Sequence
  Description of Artificial Sequence: Synthetic oligonucleotide
cgccagaacauauuuucga

SEQ ID NO: 141080 - RNA, 19 nt, Artificial Sequence
  Description of Artificial Sequence: Synthetic oligonucleotide
gugauaugcuuggugccgu

SEQ ID NO: 141081 - RNA, 19 nt, Artificial Sequence
  Description of Artificial Sequence: Synthetic oligonucleotide
cauacucgagcaucaccau

SEQ ID NO: 141082 - RNA, 19 nt, Artificial Sequence
  Description of Artificial Sequence: Synthetic oligonucleotide
aagcuucguucuggaucca

SEQ ID NO: 141083 - RNA, 19 nt, Artificial Sequence
  Description of Artificial Sequence: Synthetic oligonucleotide
ggugagagcaaagcuugcu

SEQ ID NO: 141084 - RNA, 19 nt, Artificial Sequence
  Description of Artificial Sequence: Synthetic oligonucleotide
gggauaauuugcacaggcu

SEQ ID NO: 141085 - RNA, 19 nt, Artificial Sequence
  Description of Artificial Sequence: Synthetic oligonucleotide
aacgcccggcucaguuucu

SEQ ID NO: 141086 - RNA, 19 nt, Artificial Sequence
  Description of Artificial Sequence: Synthetic oligonucleotide
caaccguuuccgcaguuuu

SEQ ID NO: 141087 - RNA, 19 nt, Artificial Sequence
  Description of Artificial Sequence: Synthetic oligonucleotide
guaacgcccggcucaguuu

SEQ ID NO: 141088 - RNA, 19 nt, Artificial Sequence
  Description of Artificial Sequence: Synthetic oligonucleotide
agacggagucugaucuaaa

SEQ ID NO: 141089 - RNA, 19 nt, Artificial Sequence
  Description of Artificial Sequence: Synthetic oligonucleotide
gccaguuaaccucuucuuu

SEQ ID NO: 141090 - RNA, 19 nt, Artificial Sequence
  Description of Artificial Sequence: Synthetic oligonucleotide
uggugccgucaaguguuau

SEQ ID NO: 141091 - RNA, 19 nt, Artificial Sequence
  Description of Artificial Sequence: Synthetic oligonucleotide
ccguuuccgcaguuuuaac

SEQ ID NO: 141092 - RNA, 19 nt, Artificial Sequence
  Description of Artificial Sequence: Synthetic oligonucleotide
ccgucaaguguuaucacuu

SEQ ID NO: 141093 - RNA, 19 nt, Artificial Sequence
  Description of Artificial Sequence: Synthetic oligonucleotide
ccgagggacccgcugaaaa

SEQ ID NO: 141094 - RNA, 19 nt, Artificial Sequence
  Description of Artificial Sequence: Synthetic oligonucleotide
ccacccaaugcaggacuug

SEQ ID NO: 141095 - RNA, 19 nt, Artificial Sequence
  Description of Artificial Sequence: Synthetic oligonucleotide
gcguagcagacugcacuga

SEQ ID NO: 141096 - RNA, 19 nt, Artificial Sequence
  Description of Artificial Sequence: Synthetic oligonucleotide
guggccccauaaggauaac

SEQ ID NO: 141097 - RNA, 19 nt, Artificial Sequence
  Description of Artificial Sequence: Synthetic oligonucleotide
cagucaugcugaacuccuu

SEQ ID NO: 141098 - RNA, 19 nt, Artificial Sequence
  Description of Artificial Sequence: Synthetic oligonucleotide
ccgaagacauuaagucagu

SEQ ID NO: 141099 - RNA, 19 nt, Artificial Sequence
  Description of Artificial Sequence: Synthetic oligonucleotide
cgucggaaauaguugugau

SEQ ID NO: 141100 - RNA, 19 nt, Artificial Sequence
  Description of Artificial Sequence: Synthetic oligonucleotide
ccuaacuagcuggacuuuu

SEQ ID NO: 141101 - RNA, 19 nt, Artificial Sequence
  Description of Artificial Sequence: Synthetic oligonucleotide
ccgauauguugaguguggu

SEQ ID NO: 141102 - RNA, 19 nt, Artificial Sequence
  Description of Artificial Sequence: Synthetic oligonucleotide
cgcggagauccuuuacuau

SEQ ID NO: 141103 - RNA, 19 nt, Artificial Sequence
  Description of Artificial Sequence: Synthetic oligonucleotide
gccuaacuagcuggacuuu

SEQ ID NO: 141104 - RNA, 19 nt, Artificial Sequence
  Description of Artificial Sequence: Synthetic oligonucleotide
ggugggcaucuggaucgau

SEQ ID NO: 141105 - RNA, 19 nt, Artificial Sequence
  Description of Artificial Sequence: Synthetic oligonucleotide
ccguaacgcccggcucagu

SEQ ID NO: 141106 - RNA, 19 nt, Artificial Sequence
  Description of Artificial Sequence: Synthetic oligonucleotide
aauuuugacuuccacgggc

SEQ ID NO: 141107 - RNA, 19 nt, Artificial Sequence
  Description of Artificial Sequence: Synthetic oligonucleotide
ugaugcaugaccaggaugg

SEQ ID NO: 141108 - RNA, 19 nt, Artificial Sequence
  Description of Artificial Sequence: Synthetic oligonucleotide
agaaaagacacccugccgc

SEQ ID NO: 141109 - RNA, 19 nt, Artificial Sequence
  Description of Artificial Sequence: Synthetic oligonucleotide
aaugauucggcacaugaag

SEQ ID NO: 141110 - RNA, 19 nt, Artificial Sequence
  Description of Artificial Sequence: Synthetic oligonucleotide
gauguuaugggccaggaag

SEQ ID NO: 141111 - RNA, 19 nt, Artificial Sequence
  Description of Artificial Sequence: Synthetic oligonucleotide
ucaauaacagccacgauca

SEQ ID NO: 141112 - RNA, 19 nt, Artificial Sequence
  Description of Artificial Sequence: Synthetic oligonucleotide
aaaucaggccauuugacag

SEQ ID NO: 141113 - RNA, 19 nt, Artificial Sequence
  Description of Artificial Sequence: Synthetic oligonucleotide
aaaugacucguacagguuc

SEQ ID NO: 141114 - RNA, 19 nt, Artificial Sequence
  Description of Artificial Sequence: Synthetic oligonucleotide
uaaaacucgauuaucuuug

SEQ ID NO: 141115 - RNA, 19 nt, Artificial Sequence
  Description of Artificial Sequence: Synthetic oligonucleotide
acugguugaaaguagcagc

SEQ ID NO: 141116 - RNA, 19 nt, Artificial Sequence
  Description of Artificial Sequence: Synthetic oligonucleotide
uuucguuuucguuuggugg

SEQ ID NO: 141117 - RNA, 19 nt, Artificial Sequence
  Description of Artificial Sequence: Synthetic oligonucleotide
gaaguuaggaaugauucgg

SEQ ID NO: 141118 - RNA, 19 nt, Artificial Sequence
  Description of Artificial Sequence: Synthetic oligonucleotide
aguggauggguguuaagcc

SEQ ID NO: 141119 - RNA, 19 nt, Artificial Sequence
  Description of Artificial Sequence: Synthetic oligonucleotide
ucagguucgugucugagag

SEQ ID NO: 141120 - RNA, 19 nt, Artificial Sequence
  Description of Artificial Sequence: Synthetic oligonucleotide
uuaggaaugauucggcaca

SEQ ID NO: 141121 - RNA, 19 nt, Artificial Sequence
  Description of Artificial Sequence: Synthetic oligonucleotide
gacaaggguaaacaggccg

SEQ ID NO: 141122 - RNA, 19 nt, Artificial Sequence
  Description of Artificial Sequence: Synthetic oligonucleotide
agucauaaaacaaagccag

SEQ ID NO: 141123 - RNA, 19 nt, Artificial Sequence
  Description of Artificial Sequence: Synthetic oligonucleotide
aaacucgauuaucuuugcc

SEQ ID NO: 141124 - RNA, 19 nt, Artificial Sequence
  Description of Artificial Sequence: Synthetic oligonucleotide
ugcauguugucucagugag

SEQ ID NO: 141125 - RNA, 19 nt, Artificial Sequence
  Description of Artificial Sequence: Synthetic oligonucleotide
uucguuuucguuugguggg

SEQ ID NO: 141126 - RNA, 19 nt, Artificial Sequence
  Description of Artificial Sequence: Synthetic oligonucleotide
uuaucuuugccaaaagaaa

SEQ ID NO: 141127 - RNA, 19 nt, Artificial Sequence
  Description of Artificial Sequence: Synthetic oligonucleotide
aggguugucaaauagggga

SEQ ID NO: 141128 - RNA, 19 nt, Artificial Sequence
  Description of Artificial Sequence: Synthetic oligonucleotide
uguugggccaacccaagcg

SEQ ID NO: 141129 - RNA, 19 nt, Artificial Sequence
  Description of Artificial Sequence: Synthetic oligonucleotide
gaggcagcaacguuggacg

SEQ ID NO: 141130 - RNA, 19 nt, Artificial Sequence
  Description of Artificial Sequence: Synthetic oligonucleotide
uuccuuaccagauuccucc

SEQ ID NO: 141131 - RNA, 19 nt, Artificial Sequence
  Description of Artificial Sequence: Synthetic oligonucleotide
cuuaggguugucaaauagg

SEQ ID NO: 141132 - RNA, 19 nt, Artificial Sequence
  Description of Artificial Sequence: Synthetic oligonucleotide
acaauuuuaaaacucgauu

SEQ ID NO: 141133 - RNA, 19 nt, Artificial Sequence
  Description of Artificial Sequence: Synthetic oligonucleotide
aaugaguauguugaggacu

SEQ ID NO: 141134 - RNA, 19 nt, Artificial Sequence
  Description of Artificial Sequence: Synthetic oligonucleotide
ugcaauaaaaggcucucac

SEQ ID NO: 141135 - RNA, 19 nt, Artificial Sequence
  Description of Artificial Sequence: Synthetic oligonucleotide
gucaauaacagccacgauc

SEQ ID NO: 141136 - RNA, 19 nt, Artificial Sequence
  Description of Artificial Sequence: Synthetic oligonucleotide
uccuuucgaaacaugacca

SEQ ID NO: 141137 - RNA, 19 nt, Artificial Sequence
  Description of Artificial Sequence: Synthetic oligonucleotide
ucgaaagugggccuugaag

SEQ ID NO: 141138 - RNA, 19 nt, Artificial Sequence
  Description of Artificial Sequence: Synthetic oligonucleotide
uuagggacucaucuaacug

SEQ ID NO: 141139 - RNA, 19 nt, Artificial Sequence
  Description of Artificial Sequence: Synthetic oligonucleotide
uuaagccuagaaauggaga

SEQ ID NO: 141140 - RNA, 19 nt, Artificial Sequence
  Description of Artificial Sequence: Synthetic oligonucleotide
uuucgaaacaugaccaggu

SEQ ID NO: 141141 - RNA, 19 nt, Artificial Sequence
  Description of Artificial Sequence: Synthetic oligonucleotide
aaagacacccugccgcacg

SEQ ID NO: 141142 - RNA, 19 nt, Artificial Sequence
  Description of Artificial Sequence: Synthetic oligonucleotide
uagguaguagagcagguga

SEQ ID NO: 141143 - RNA, 19 nt, Artificial Sequence
  Description of Artificial Sequence: Synthetic oligonucleotide
auaaaaggcucucacgcug

SEQ ID NO: 141144 - RNA, 19 nt, Artificial Sequence
  Description of Artificial Sequence: Synthetic oligonucleotide
uaagccuagaaauggagaa

SEQ ID NO: 141145 - RNA, 19 nt, Artificial Sequence
  Description of Artificial Sequence: Synthetic oligonucleotide
aaguuaggaaugauucggc

SEQ ID NO: 141146 - RNA, 19 nt, Artificial Sequence
  Description of Artificial Sequence: Synthetic oligonucleotide
ucccaggugcaauaaaagg

SEQ ID NO: 141147 - RNA, 19 nt, Artificial Sequence
  Description of Artificial Sequence: Synthetic oligonucleotide
auacauaggcguugagagc

SEQ ID NO: 141148 - RNA, 19 nt, Artificial Sequence
  Description of Artificial Sequence: Synthetic oligonucleotide
uucacacuggugaauagac

SEQ ID NO: 141149 - RNA, 19 nt, Artificial Sequence
  Description of Artificial Sequence: Synthetic oligonucleotide
acuuaggguugucaaauag

SEQ ID NO: 141150 - RNA, 19 nt, Artificial Sequence
  Description of Artificial Sequence: Synthetic oligonucleotide
auuaucuuugccaaaagaa

SEQ ID NO: 141151 - RNA, 19 nt, Artificial Sequence
  Description of Artificial Sequence: Synthetic oligonucleotide
aauaggggagccaagugug

SEQ ID NO: 141152 - RNA, 19 nt, Artificial Sequence
  Description of Artificial Sequence: Synthetic oligonucleotide
aacugguugaaaguagcag

SEQ ID NO: 141153 - RNA, 19 nt, Artificial Sequence
  Description of Artificial Sequence: Synthetic oligonucleotide
ugaggacugaguccuuucg

SEQ ID NO: 141154 - RNA, 19 nt, Artificial Sequence
  Description of Artificial Sequence: Synthetic oligonucleotide
uguuucauuaucacuuaaa

SEQ ID NO: 141155 - RNA, 19 nt, Artificial Sequence
  Description of Artificial Sequence: Synthetic oligonucleotide
ucuucggagcugaagcagg

SEQ ID NO: 141156 - RNA, 19 nt, Artificial Sequence
  Description of Artificial Sequence: Synthetic oligonucleotide
auuagguagagagguuucc

SEQ ID NO: 141157 - RNA, 19 nt, Artificial Sequence
  Description of Artificial Sequence: Synthetic oligonucleotide
ucuaacugaucgagguagg

SEQ ID NO: 141158 - RNA, 19 nt, Artificial Sequence
  Description of Artificial Sequence: Synthetic oligonucleotide
caucacauggcacaccagc

SEQ ID NO: 141159 - RNA, 19 nt, Artificial Sequence
  Description of Artificial Sequence: Synthetic oligonucleotide
acaguucugaggaacuugc

SEQ ID NO: 141160 - RNA, 19 nt, Artificial Sequence
  Description of Artificial Sequence: Synthetic oligonucleotide
uucgucacagcuugccugg

SEQ ID NO: 141161 - RNA, 19 nt, Artificial Sequence
  Description of Artificial Sequence: Synthetic oligonucleotide
guccuuucgaaacaugacc

SEQ ID NO: 141162 - RNA, 19 nt, Artificial Sequence
  Description of Artificial Sequence: Synthetic oligonucleotide
cuuaucugacagaugguug

SEQ ID NO: 141163 - RNA, 19 nt, Artificial Sequence
  Description of Artificial Sequence: Synthetic oligonucleotide
guuagaggcagcaacguug

SEQ ID NO: 141164 - RNA, 19 nt, Artificial Sequence
  Description of Artificial Sequence: Synthetic oligonucleotide
ugagucuuagauuguccag

SEQ ID NO: 141165 - RNA, 19 nt, Artificial Sequence
  Description of Artificial Sequence: Synthetic oligonucleotide
ucaucgacgucacaauacu

SEQ ID NO: 141166 - RNA, 19 nt, Artificial Sequence
  Description of Artificial Sequence: Synthetic oligonucleotide
gaugcagcagcugcuacgg

SEQ ID NO: 141167 - RNA, 19 nt, Artificial Sequence
  Description of Artificial Sequence: Synthetic oligonucleotide
agggauaauggucuccaag

SEQ ID NO: 141168 - RNA, 19 nt, Artificial Sequence
  Description of Artificial Sequence: Synthetic oligonucleotide
auguucauaaugcuauccu

SEQ ID NO: 141169 - RNA, 19 nt, Artificial Sequence
  Description of Artificial Sequence: Synthetic oligonucleotide
ugugagaaccgccccgggg

SEQ ID NO: 141170 - RNA, 19 nt, Artificial Sequence
  Description of Artificial Sequence: Synthetic oligonucleotide
uuuauccaacuuaggguug

SEQ ID NO: 141171 - RNA, 19 nt, Artificial Sequence
  Description of Artificial Sequence: Synthetic oligonucleotide
uggugaauagaccaccguc

SEQ ID NO: 141172 - RNA, 19 nt, Artificial Sequence
  Description of Artificial Sequence: Synthetic oligonucleotide
guuaggaaugauucggcac

SEQ ID NO: 141173 - RNA, 19 nt, Artificial Sequence
  Description of Artificial Sequence: Synthetic oligonucleotide
gacugaguccuuucgaaac

SEQ ID NO: 141174 - RNA, 19 nt, Artificial Sequence
  Description of Artificial Sequence: Synthetic oligonucleotide
cucaggcuugccaaggacg

SEQ ID NO: 141175 - RNA, 19 nt, Artificial Sequence
  Description of Artificial Sequence: Synthetic oligonucleotide
uccuaaauauuagguagag

SEQ ID NO: 141176 - RNA, 19 nt, Artificial Sequence
  Description of Artificial Sequence: Synthetic oligonucleotide
cuggacaugcugaagcgcc

SEQ ID NO: 141177 - RNA, 19 nt, Artificial Sequence
  Description of Artificial Sequence: Synthetic oligonucleotide
auauuccuccgccagggag

SEQ ID NO: 141178 - RNA, 19 nt, Artificial Sequence
  Description of Artificial Sequence: Synthetic oligonucleotide
acaauacucauacaccuuu

SEQ ID NO: 141179 - RNA, 19 nt, Artificial Sequence
  Description of Artificial Sequence: Synthetic oligonucleotide
ucagcuugaagugccaaug

SEQ ID NO: 141180 - RNA, 19 nt, Artificial Sequence
  Description of Artificial Sequence: Synthetic oligonucleotide
cuuucgaaacaugaccagg

SEQ ID NO: 141181 - RNA, 19 nt, Artificial Sequence
  Description of Artificial Sequence: Synthetic oligonucleotide
ucguacagguucaucuucc

SEQ ID NO: 141182 - RNA, 19 nt, Artificial Sequence
  Description of Artificial Sequence: Synthetic oligonucleotide
cagaugguuguccauuucc

SEQ ID NO: 141183 - RNA, 19 nt, Artificial Sequence
  Description of Artificial Sequence: Synthetic oligonucleotide
uggguguuaagccuagaaa

SEQ ID NO: 141184 - RNA, 19 nt, Artificial Sequence
  Description of Artificial Sequence: Synthetic oligonucleotide
gaacccacagcagaggagc

SEQ ID NO: 141185 - RNA, 19 nt, Artificial Sequence
  Description of Artificial Sequence: Synthetic oligonucleotide
ucaaauaggggagccaagu

SEQ ID NO: 141186 - RNA, 19 nt, Artificial Sequence
  Description of Artificial Sequence: Synthetic oligonucleotide
uagagagguuuccuuacca

SEQ ID NO: 141187 - RNA, 19 nt, Artificial Sequence
  Description of Artificial Sequence: Synthetic oligonucleotide
gcaauaaaaggcucucacg

SEQ ID NO: 141188 - RNA, 19 nt, Artificial Sequence
  Description of Artificial Sequence: Synthetic oligonucleotide
gucacaauacucauacacc

SEQ ID NO: 141189 - RNA, 19 nt, Artificial Sequence
  Description of Artificial Sequence: Synthetic oligonucleotide
aaggggauguuaugggcca

SEQ ID NO: 141190 - RNA, 19 nt, Artificial Sequence
  Description of Artificial Sequence: Synthetic oligonucleotide
agcucuuuauccaacuuag

SEQ ID NO: 141191 - RNA, 19 nt, Artificial Sequence
  Description of Artificial Sequence: Synthetic oligonucleotide
auuuugacuuccacgggcg

SEQ ID NO: 141192 - RNA, 19 nt, Artificial Sequence
  Description of Artificial Sequence: Synthetic oligonucleotide
uaaagaacagccagucaua

SEQ ID NO: 141193 - RNA, 19 nt, Artificial Sequence
  Description of Artificial Sequence: Synthetic oligonucleotide
gaauagaccaccguccaca

SEQ ID NO: 141194 - RNA, 19 nt, Artificial Sequence
  Description of Artificial Sequence: Synthetic oligonucleotide
guuaagccuagaaauggag

SEQ ID NO: 141195 - RNA, 19 nt, Artificial Sequence
  Description of Artificial Sequence: Synthetic oligonucleotide
acagacugcaaauggcucu

SEQ ID NO: 141196 - RNA, 19 nt, Artificial Sequence
  Description of Artificial Sequence: Synthetic oligonucleotide
ugcugugagaaccgccccg

SEQ ID NO: 141197 - RNA, 19 nt, Artificial Sequence
  Description of Artificial Sequence: Synthetic oligonucleotide
aguuaggaaugauucggca

SEQ ID NO: 141198 - RNA, 19 nt, Artificial Sequence
  Description of Artificial Sequence: Synthetic oligonucleotide
uguaacuccauggcugcag

SEQ ID NO: 141199 - RNA, 19 nt, Artificial Sequence
  Description of Artificial Sequence: Synthetic oligonucleotide
ucgauuaucuuugccaaaa

SEQ ID NO: 141200 - RNA, 19 nt, Artificial Sequence
  Description of Artificial Sequence: Synthetic oligonucleotide
ucuucccuuugcuauugag

SEQ ID NO: 141201 - RNA, 19 nt, Artificial Sequence
  Description of Artificial Sequence: Synthetic oligonucleotide
ugaagcgccuggaggauug

SEQ ID NO: 141202 - RNA, 19 nt, Artificial Sequence
  Description of Artificial Sequence: Synthetic oligonucleotide
ugggcaaaugacucguaca

SEQ ID NO: 141203 - RNA, 19 nt, Artificial Sequence
  Description of Artificial Sequence: Synthetic oligonucleotide
agguucaucuucccugcgg

SEQ ID NO: 141204 - RNA, 19 nt, Artificial Sequence
  Description of Artificial Sequence: Synthetic oligonucleotide
ucguuuggugggcuuaggc

SEQ ID NO: 141205 - RNA, 19 nt, Artificial Sequence
  Description of Artificial Sequence: Synthetic oligonucleotide
cuucagguaacaccucccc

SEQ ID NO: 141206 - RNA, 19 nt, Artificial Sequence
  Description of Artificial Sequence: Synthetic oligonucleotide
uugacuuccacgggcgggg

SEQ ID NO: 141207 - RNA, 19 nt, Artificial Sequence
  Description of Artificial Sequence: Synthetic oligonucleotide
uggcguuagaggcagcaac

SEQ ID NO: 141208 - RNA, 19 nt, Artificial Sequence
  Description of Artificial Sequence: Synthetic oligonucleotide
auguugggccaacccaagc

SEQ ID NO: 141209 - RNA, 19 nt, Artificial Sequence
  Description of Artificial Sequence: Synthetic oligonucleotide
caauuuugacuuccacggg

SEQ ID NO: 141210 - RNA, 19 nt, Artificial Sequence
  Description of Artificial Sequence: Synthetic oligonucleotide
aacccaagcgucccaggug

SEQ ID NO: 141211 - RNA, 19 nt, Artificial Sequence
  Description of Artificial Sequence: Synthetic oligonucleotide
cauguugucucagugagga

SEQ ID NO: 141212 - RNA, 19 nt, Artificial Sequence
  Description of Artificial Sequence: Synthetic oligonucleotide
cuucgucacagcuugccug

SEQ ID NO: 141213 - RNA, 19 nt, Artificial Sequence
  Description of Artificial Sequence: Synthetic oligonucleotide
gauggugugagguggcaga

SEQ ID NO: 141214 - RNA, 19 nt, Artificial Sequence
  Description of Artificial Sequence: Synthetic oligonucleotide
aaugacucguacagguuca

SEQ ID NO: 141215 - RNA, 19 nt, Artificial Sequence
  Description of Artificial Sequence: Synthetic oligonucleotide
ucuuucgacuucgagggcu

SEQ ID NO: 141216 - RNA, 19 nt, Artificial Sequence
  Description of Artificial Sequence: Synthetic oligonucleotide
guagcuguaacaccuuguc

SEQ ID NO: 141217 - RNA, 19 nt, Artificial Sequence
  Description of Artificial Sequence: Synthetic oligonucleotide
ugauagccgaucuuggguu

SEQ ID NO: 141218 - RNA, 19 nt, Artificial Sequence
  Description of Artificial Sequence: Synthetic oligonucleotide
gaaaagacacccugccgca

SEQ ID NO: 141219 - RNA, 19 nt, Artificial Sequence
  Description of Artificial Sequence: Synthetic oligonucleotide
agucuuagauuguccaggu

SEQ ID NO: 141220 - RNA, 19 nt, Artificial Sequence
  Description of Artificial Sequence: Synthetic oligonucleotide
guugaaaguagcagccucc

SEQ ID NO: 141221 - RNA, 19 nt, Artificial Sequence
  Description of Artificial Sequence: Synthetic oligonucleotide
ucgucuggaaacucugugu

SEQ ID NO: 141222 - RNA, 19 nt, Artificial Sequence
  Description of Artificial Sequence: Synthetic oligonucleotide
cuugaugggguggaagcgg

SEQ ID NO: 141223 - RNA, 19 nt, Artificial Sequence
  Description of Artificial Sequence: Synthetic oligonucleotide
cucaucgugcuucaugcac

SEQ ID NO: 141224 - RNA, 19 nt, Artificial Sequence
  Description of Artificial Sequence: Synthetic oligonucleotide
uugaaaguagcagccuccc

SEQ ID NO: 141225 - RNA, 19 nt, Artificial Sequence
  Description of Artificial Sequence: Synthetic oligonucleotide
augaguauguugaggacug

SEQ ID NO: 141226 - RNA, 19 nt, Artificial Sequence
  Description of Artificial Sequence: Synthetic oligonucleotide
uuuccuuaccagauuccuc

SEQ ID NO: 141227 - RNA, 19 nt, Artificial Sequence
  Description of Artificial Sequence: Synthetic oligonucleotide
uucagguaacaccuccccu

SEQ ID NO: 141228 - RNA, 19 nt, Artificial Sequence
  Description of Artificial Sequence: Synthetic oligonucleotide
uguuaugggccaggaagag

SEQ ID NO: 141229 - RNA, 19 nt, Artificial Sequence
  Description of Artificial Sequence: Synthetic oligonucleotide
ggugaauagaccaccgucc

SEQ ID NO: 141230 - RNA, 19 nt, Artificial Sequence
  Description of Artificial Sequence: Synthetic oligonucleotide
ugggcaguauucuuucgac

SEQ ID NO: 141231 - RNA, 19 nt, Artificial Sequence
  Description of Artificial Sequence: Synthetic oligonucleotide
aucgacgucacaauacuca

SEQ ID NO: 141232 - RNA, 19 nt, Artificial Sequence
  Description of Artificial Sequence: Synthetic oligonucleotide
auauuagguagagagguuu

SEQ ID NO: 141233 - RNA, 19 nt, Artificial Sequence
  Description of Artificial Sequence: Synthetic oligonucleotide
agguucgugucugagagcu

SEQ ID NO: 141234 - RNA, 19 nt, Artificial Sequence
  Description of Artificial Sequence: Synthetic oligonucleotide
agcccgacucuucuucagc

SEQ ID NO: 141235 - RNA, 19 nt, Artificial Sequence
  Description of Artificial Sequence: Synthetic oligonucleotide
ucgucaggauggcagggcc

SEQ ID NO: 141236 - RNA, 19 nt, Artificial Sequence
  Description of Artificial Sequence: Synthetic oligonucleotide
cagaaaucaggccauuuga

SEQ ID NO: 141237 - RNA, 19 nt, Artificial Sequence
  Description of Artificial Sequence: Synthetic oligonucleotide
gauagccgaucuuggguug

SEQ ID NO: 141238 - RNA, 19 nt, Artificial Sequence
  Description of Artificial Sequence: Synthetic oligonucleotide
caaauaggggagccaagug

SEQ ID NO: 141239 - RNA, 19 nt, Artificial Sequence
  Description of Artificial Sequence: Synthetic oligonucleotide
ggaaugauucggcacauga

SEQ ID NO: 141240 - RNA, 19 nt, Artificial Sequence
  Description of Artificial Sequence: Synthetic oligonucleotide
aaggguaaacaggccgagg

SEQ ID NO: 141241 - RNA, 19 nt, Artificial Sequence
  Description of Artificial Sequence: Synthetic oligonucleotide
ugaauagaccaccguccac

SEQ ID NO: 141242 - RNA, 19 nt, Artificial Sequence
  Description of Artificial Sequence: Synthetic oligonucleotide
uauccuuaggcaggugugc

SEQ ID NO: 141243 - RNA, 19 nt, Artificial Sequence
  Description of Artificial Sequence: Synthetic oligonucleotide
uccuccgccagggagaaga

SEQ ID NO: 141244 - RNA, 19 nt, Artificial Sequence
  Description of Artificial Sequence: Synthetic oligonucleotide
ggugauagccgaucuuggg

SEQ ID NO: 141245 - RNA, 19 nt, Artificial Sequence
  Description of Artificial Sequence: Synthetic oligonucleotide
guugucaaauaggggagcc

SEQ ID NO: 141246 - RNA, 19 nt, Artificial Sequence
  Description of Artificial Sequence: Synthetic oligonucleotide
cuuuauccaacuuaggguu

SEQ ID NO: 141247 - RNA, 19 nt, Artificial Sequence
  Description of Artificial Sequence: Synthetic oligonucleotide
aacucaggcuugccaagga

SEQ ID NO: 141248 - RNA, 19 nt, Artificial Sequence
  Description of Artificial Sequence: Synthetic oligonucleotide
ugagguguugcaggauagg

SEQ ID NO: 141249 - RNA, 19 nt, Artificial Sequence
  Description of Artificial Sequence: Synthetic oligonucleotide
aagacucgcuucuccacaa

SEQ ID NO: 141250 - RNA, 19 nt, Artificial Sequence
  Description of Artificial Sequence: Synthetic oligonucleotide
guagagagguuuccuuacc

SEQ ID NO: 141251 - RNA, 19 nt, Artificial Sequence
  Description of Artificial Sequence: Synthetic oligonucleotide
agccagucauaaaacaaag

SEQ ID NO: 141252 - RNA, 19 nt, Artificial Sequence
  Description of Artificial Sequence: Synthetic oligonucleotide
uuauccaacuuaggguugu

SEQ ID NO: 141253 - RNA, 19 nt, Artificial Sequence
  Description of Artificial Sequence: Synthetic oligonucleotide
ucuccaaggggauguuaug

SEQ ID NO: 141254 - RNA, 19 nt, Artificial Sequence
  Description of Artificial Sequence: Synthetic oligonucleotide
gugaugcaugaccaggaug

SEQ ID NO: 141255 - RNA, 19 nt, Artificial Sequence
  Description of Artificial Sequence: Synthetic oligonucleotide
gguaaacaggccgaggcag

SEQ ID NO: 141256 - RNA, 19 nt, Artificial Sequence
  Description of Artificial Sequence: Synthetic oligonucleotide
uaccagauuccuccaggga

SEQ ID NO: 141257 - RNA, 19 nt, Artificial Sequence
  Description of Artificial Sequence: Synthetic oligonucleotide
auggguguuaagccuagaa

SEQ ID NO: 141258 - RNA, 19 nt, Artificial Sequence
  Description of Artificial Sequence: Synthetic oligonucleotide
acguuggacgugcauguug

SEQ ID NO: 141259 - RNA, 19 nt, Artificial Sequence
  Description of Artificial Sequence: Synthetic oligonucleotide
acacccgucgucaucgacg

SEQ ID NO: 141260 - RNA, 19 nt, Artificial Sequence
  Description of Artificial Sequence: Synthetic oligonucleotide
aauauuagguagagagguu

SEQ ID NO: 141261 - RNA, 19 nt, Artificial Sequence
  Description of Artificial Sequence: Synthetic oligonucleotide
aacuggucgucaggauggc

SEQ ID NO: 141262 - RNA, 19 nt, Artificial Sequence
  Description of Artificial Sequence: Synthetic oligonucleotide
aucguuggcuucucgcuca

SEQ ID NO: 141263 - RNA, 19 nt, Artificial Sequence
  Description of Artificial Sequence: Synthetic oligonucleotide
cgucacaauacucauacac

SEQ ID NO: 141264 - RNA, 19 nt, Artificial Sequence
  Description of Artificial Sequence: Synthetic oligonucleotide
cacaacagucuccuugaug

SEQ ID NO: 141265 - RNA, 19 nt, Artificial Sequence
  Description of Artificial Sequence: Synthetic oligonucleotide
ucgacgucacaauacucau

SEQ ID NO: 141266 - RNA, 19 nt, Artificial Sequence
  Description of Artificial Sequence: Synthetic oligonucleotide
gugaauagaccaccgucca

SEQ ID NO: 141267 - RNA, 19 nt, Artificial Sequence
  Description of Artificial Sequence: Synthetic oligonucleotide
ugucugagagcuguggcau

SEQ ID NO: 141268 - RNA, 19 nt, Artificial Sequence
  Description of Artificial Sequence: Synthetic oligonucleotide
guggcuuaguggaagaguc

SEQ ID NO: 141269 - RNA, 19 nt, Artificial Sequence
  Description of Artificial Sequence: Synthetic oligonucleotide
gggaauuucucucgaagca

SEQ ID NO: 141270 - RNA, 19 nt, Artificial Sequence
  Description of Artificial Sequence: Synthetic oligonucleotide
uucggcacaugaaguccag

SEQ ID NO: 141271 - RNA, 19 nt, Artificial Sequence
  Description of Artificial Sequence: Synthetic oligonucleotide
uccuuaucugacagauggu

SEQ ID NO: 141272 - RNA, 19 nt, Artificial Sequence
  Description of Artificial Sequence: Synthetic oligonucleotide
cuccccucgaaagugggcc

SEQ ID NO: 141273 - RNA, 19 nt, Artificial Sequence
  Description of Artificial Sequence: Synthetic oligonucleotide
guaagaggagggguggagc

SEQ ID NO: 141274 - RNA, 19 nt, Artificial Sequence
  Description of Artificial Sequence: Synthetic oligonucleotide
cuuucgacuucgagggcug

SEQ ID NO: 141275 - RNA, 19 nt, Artificial Sequence
  Description of Artificial Sequence: Synthetic oligonucleotide
cugggcaaaugacucguac

SEQ ID NO: 141276 - RNA, 19 nt, Artificial Sequence
  Description of Artificial Sequence: Synthetic oligonucleotide
uggagcccgacucuucuuc

SEQ ID NO: 141277 - RNA, 19 nt, Artificial Sequence
  Description of Artificial Sequence: Synthetic oligonucleotide
agcuuugcuugcccuuagg

SEQ ID NO: 141278 - RNA, 19 nt, Artificial Sequence
  Description of Artificial Sequence: Synthetic oligonucleotide
auguuaugggccaggaaga

SEQ ID NO: 141279 - RNA, 19 nt, Artificial Sequence
  Description of Artificial Sequence: Synthetic oligonucleotide
ccuuagguaguagagcagg

SEQ ID NO: 141280 - RNA, 19 nt, Artificial Sequence
  Description of Artificial Sequence: Synthetic oligonucleotide
gguugaaaguagcagccuc

SEQ ID NO: 141281 - RNA, 19 nt, Artificial Sequence
  Description of Artificial Sequence: Synthetic oligonucleotide
ggcgcacauauccuuaggc

SEQ ID NO: 141282 - RNA, 19 nt, Artificial Sequence
  Description of Artificial Sequence: Synthetic oligonucleotide
aagaugcucuggcuuguuu

SEQ ID NO: 141283 - RNA, 19 nt, Artificial Sequence
  Description of Artificial Sequence: Synthetic oligonucleotide
acgaucauguucagcagcu

SEQ ID NO: 141284 - RNA, 19 nt, Artificial Sequence
  Description of Artificial Sequence: Synthetic oligonucleotide
ggcguuagaggcagcaacg

SEQ ID NO: 141285 - RNA, 19 nt, Artificial Sequence
  Description of Artificial Sequence: Synthetic oligonucleotide
gcuccuuauauuugaggug

SEQ ID NO: 141286 - RNA, 19 nt, Artificial Sequence
  Description of Artificial Sequence: Synthetic oligonucleotide
uaggggagccaagugugcc

SEQ ID NO: 141287 - RNA, 19 nt, Artificial Sequence
  Description of Artificial Sequence: Synthetic oligonucleotide
agugaccucuucagguaac

SEQ ID NO: 141288 - RNA, 19 nt, Artificial Sequence
  Description of Artificial Sequence: Synthetic oligonucleotide
uucuuucgacuucgagggc

SEQ ID NO: 141289 - RNA, 19 nt, Artificial Sequence
  Description of Artificial Sequence: Synthetic oligonucleotide
uuuucguuuggugggcuua

SEQ ID NO: 141290 - RNA, 19 nt, Artificial Sequence
  Description of Artificial Sequence: Synthetic oligonucleotide
ggguguuaagccuagaaau

SEQ ID NO: 141291 - RNA, 19 nt, Artificial Sequence
  Description of Artificial Sequence: Synthetic oligonucleotide
gcaaaugacucguacaggu

SEQ ID NO: 141292 - RNA, 19 nt, Artificial Sequence
  Description of Artificial Sequence: Synthetic oligonucleotide
cucucacgcugucaucagg

SEQ ID NO: 141293 - RNA, 19 nt, Artificial Sequence
  Description of Artificial Sequence: Synthetic oligonucleotide
acuucgagggcuggacagg

SEQ ID NO: 141294 - RNA, 19 nt, Artificial Sequence
  Description of Artificial Sequence: Synthetic oligonucleotide
agcuugaagugccaauguu

SEQ ID NO: 141295 - RNA, 19 nt, Artificial Sequence
  Description of Artificial Sequence: Synthetic oligonucleotide
cucagagacacccgucguc

SEQ ID NO: 141296 - RNA, 19 nt, Artificial Sequence
  Description of Artificial Sequence: Synthetic oligonucleotide
aggcgcacauauccuuagg

SEQ ID NO: 141297 - RNA, 19 nt, Artificial Sequence
  Description of Artificial Sequence: Synthetic oligonucleotide
ccaagugugccaagacucg

SEQ ID NO: 141298 - RNA, 19 nt, Artificial Sequence
  Description of Artificial Sequence: Synthetic oligonucleotide
guugagagcaucguuggcu

SEQ ID NO: 141299 - RNA, 19 nt, Artificial Sequence
  Description of Artificial Sequence: Synthetic oligonucleotide
cauauccuuaggcaggugu

SEQ ID NO: 141300 - RNA, 19 nt, Artificial Sequence
  Description of Artificial Sequence: Synthetic oligonucleotide
caggugcaauaaaaggcuc

SEQ ID NO: 141301 - RNA, 19 nt, Artificial Sequence
  Description of Artificial Sequence: Synthetic oligonucleotide
caucgacgucacaauacuc

SEQ ID NO: 141302 - RNA, 19 nt, Artificial Sequence
  Description of Artificial Sequence: Synthetic oligonucleotide
cgcacauauccuuaggcag

SEQ ID NO: 141303 - RNA, 19 nt, Artificial Sequence
  Description of Artificial Sequence: Synthetic oligonucleotide
cuugccucugggacucccc

SEQ ID NO: 141304 - RNA, 19 nt, Artificial Sequence
  Description of Artificial Sequence: Synthetic oligonucleotide
uugggccaacccaagcguc

SEQ ID NO: 141305 - RNA, 19 nt, Artificial Sequence
  Description of Artificial Sequence: Synthetic oligonucleotide
gguccuuugcauacauagg

SEQ ID NO: 141306 - RNA, 19 nt, Artificial Sequence
  Description of Artificial Sequence: Synthetic oligonucleotide
aaccucuccucuaacucau

SEQ ID NO: 141307 - RNA, 19 nt, Artificial Sequence
  Description of Artificial Sequence: Synthetic oligonucleotide
cuccuuauauuugaggugu

SEQ ID NO: 141308 - RNA, 19 nt, Artificial Sequence
  Description of Artificial Sequence: Synthetic oligonucleotide
caucguuggcuucucgcuc

SEQ ID NO: 141309 - RNA, 19 nt, Artificial Sequence
  Description of Artificial Sequence: Synthetic oligonucleotide
ucgacuucgagggcuggac

SEQ ID NO: 141310 - RNA, 19 nt, Artificial Sequence
  Description of Artificial Sequence: Synthetic oligonucleotide
ucauagcaacucucauccu

SEQ ID NO: 141311 - RNA, 19 nt, Artificial Sequence
  Description of Artificial Sequence: Synthetic oligonucleotide
aggugcaauaaaaggcucu

SEQ ID NO: 141312 - RNA, 19 nt, Artificial Sequence
  Description of Artificial Sequence: Synthetic oligonucleotide
auagcaacucucauccuua

SEQ ID NO: 141313 - RNA, 19 nt, Artificial Sequence
  Description of Artificial Sequence: Synthetic oligonucleotide
gugauagccgaucuugggu

SEQ ID NO: 141314 - RNA, 19 nt, Artificial Sequence
  Description of Artificial Sequence: Synthetic oligonucleotide
cuuagggacucaucuaacu

SEQ ID NO: 141315 - RNA, 19 nt, Artificial Sequence
  Description of Artificial Sequence: Synthetic oligonucleotide
caggcgcacauauccuuag

SEQ ID NO: 141316 - RNA, 19 nt, Artificial Sequence
  Description of Artificial Sequence: Synthetic oligonucleotide
ggguugucaaauaggggag

SEQ ID NO: 141317 - RNA, 19 nt, Artificial Sequence
  Description of Artificial Sequence: Synthetic oligonucleotide
gucaaauaggggagccaag

SEQ ID NO: 141318 - RNA, 19 nt, Artificial Sequence
  Description of Artificial Sequence: Synthetic oligonucleotide
gagcccgacucuucuucag

SEQ ID NO: 141319 - RNA, 19 nt, Artificial Sequence
  Description of Artificial Sequence: Synthetic oligonucleotide
gccauuugacaguucugag

SEQ ID NO: 141320 - RNA, 19 nt, Artificial Sequence
  Description of Artificial Sequence: Synthetic oligonucleotide
uucguuuggugggcuuagg

SEQ ID NO: 141321 - RNA, 19 nt, Artificial Sequence
  Description of Artificial Sequence: Synthetic oligonucleotide
gcuggcucuauguucauaa

SEQ ID NO: 141322 - RNA, 19 nt, Artificial Sequence
  Description of Artificial Sequence: Synthetic oligonucleotide
uuucgacuucgagggcugg

SEQ ID NO: 141323 - RNA, 19 nt, Artificial Sequence
  Description of Artificial Sequence: Synthetic oligonucleotide
gucaggugcccauuucaca

SEQ ID NO: 141324 - RNA, 19 nt, Artificial Sequence
  Description of Artificial Sequence: Synthetic oligonucleotide
uccacgggcggggagggug

SEQ ID NO: 141325 - RNA, 19 nt, Artificial Sequence
  Description of Artificial Sequence: Synthetic oligonucleotide
ggcuaaagaacagccaguc

SEQ ID NO: 141326 - RNA, 19 nt, Artificial Sequence
  Description of Artificial Sequence: Synthetic oligonucleotide
cauuucacacuggugaaua

SEQ ID NO: 141327 - RNA, 19 nt, Artificial Sequence
  Description of Artificial Sequence: Synthetic oligonucleotide
ucccuuagggacucaucua

SEQ ID NO: 141328 - RNA, 19 nt, Artificial Sequence
  Description of Artificial Sequence: Synthetic oligonucleotide
ccuuucgaaacaugaccag

SEQ ID NO: 141329 - RNA, 19 nt, Artificial Sequence
  Description of Artificial Sequence: Synthetic oligonucleotide
gucucgucuggaaacucug

SEQ ID NO: 141330 - RNA, 19 nt, Artificial Sequence
  Description of Artificial Sequence: Synthetic oligonucleotide
uuagauuguccaggugcuc

SEQ ID NO: 141331 - RNA, 19 nt, Artificial Sequence
  Description of Artificial Sequence: Synthetic oligonucleotide
gcacguggccuuccaaugg

SEQ ID NO: 141332 - RNA, 19 nt, Artificial Sequence
  Description of Artificial Sequence: Synthetic oligonucleotide
cugggcuaaagaacagcca

SEQ ID NO: 141333 - RNA, 19 nt, Artificial Sequence
  Description of Artificial Sequence: Synthetic oligonucleotide
ucguuggcuucucgcucag

SEQ ID NO: 141334 - RNA, 19 nt, Artificial Sequence
  Description of Artificial Sequence: Synthetic oligonucleotide
aagcgucccaggugcaaua

SEQ ID NO: 141335 - RNA, 19 nt, Artificial Sequence
  Description of Artificial Sequence: Synthetic oligonucleotide
cuuugcuauugagauccuc

SEQ ID NO: 141336 - RNA, 19 nt, Artificial Sequence
  Description of Artificial Sequence: Synthetic oligonucleotide
uggccuuccaauggugggu

SEQ ID NO: 141337 - RNA, 19 nt, Artificial Sequence
  Description of Artificial Sequence: Synthetic oligonucleotide
caucagguucgugucugag

SEQ ID NO: 141338 - RNA, 19 nt, Artificial Sequence
  Description of Artificial Sequence: Synthetic oligonucleotide
gguaagaggagggguggag

SEQ ID NO: 141339 - RNA, 19 nt, Artificial Sequence
  Description of Artificial Sequence: Synthetic oligonucleotide
uccuuauauuugagguguu

SEQ ID NO: 141340 - RNA, 19 nt, Artificial Sequence
  Description of Artificial Sequence: Synthetic oligonucleotide
guggauggguguuaagccu

SEQ ID NO: 141341 - RNA, 19 nt, Artificial Sequence
  Description of Artificial Sequence: Synthetic oligonucleotide
caucgugcuucaugcacca

SEQ ID NO: 141342 - RNA, 19 nt, Artificial Sequence
  Description of Artificial Sequence: Synthetic oligonucleotide
agcaacguuggacgugcau

SEQ ID NO: 141343 - RNA, 19 nt, Artificial Sequence
  Description of Artificial Sequence: Synthetic oligonucleotide
acgugcauguugucucagu

SEQ ID NO: 141344 - RNA, 19 nt, Artificial Sequence
  Description of Artificial Sequence: Synthetic oligonucleotide
cugguagugaacuggucgu

SEQ ID NO: 141345 - RNA, 19 nt, Artificial Sequence
  Description of Artificial Sequence: Synthetic oligonucleotide
gguugucaaauaggggagc

SEQ ID NO: 141346 - RNA, 19 nt, Artificial Sequence
  Description of Artificial Sequence: Synthetic oligonucleotide
gcagcaacguuggacgugc

SEQ ID NO: 141347 - RNA, 19 nt, Artificial Sequence
  Description of Artificial Sequence: Synthetic oligonucleotide
gacgugcauguugucucag

SEQ ID NO: 141348 - RNA, 19 nt, Artificial Sequence
  Description of Artificial Sequence: Synthetic oligonucleotide
uagggauaauggucuccaa

SEQ ID NO: 141349 - RNA, 19 nt, Artificial Sequence
  Description of Artificial Sequence: Synthetic oligonucleotide
uucgacuucgagggcugga

SEQ ID NO: 141350 - RNA, 19 nt, Artificial Sequence
  Description of Artificial Sequence: Synthetic oligonucleotide
guaacaccuccccucgaaa

SEQ ID NO: 141351 - RNA, 19 nt, Artificial Sequence
  Description of Artificial Sequence: Synthetic oligonucleotide
aacuugccucugggacucc

SEQ ID NO: 141352 - RNA, 19 nt, Artificial Sequence
  Description of Artificial Sequence: Synthetic oligonucleotide
cacaaaagaugcucuggcu

SEQ ID NO: 141353 - RNA, 19 nt, Artificial Sequence
  Description of Artificial Sequence: Synthetic oligonucleotide
cagguucgugucugagagc

SEQ ID NO: 141354 - RNA, 19 nt, Artificial Sequence
  Description of Artificial Sequence: Synthetic oligonucleotide
gacacccgucgucaucgac

SEQ ID NO: 141355 - RNA, 19 nt, Artificial Sequence
  Description of Artificial Sequence: Synthetic oligonucleotide
gguugagucuuagauuguc

SEQ ID NO: 141356 - RNA, 19 nt, Artificial Sequence
  Description of Artificial Sequence: Synthetic oligonucleotide
gcugugagaaccgccccgg

SEQ ID NO: 141357 - RNA, 19 nt, Artificial Sequence
  Description of Artificial Sequence: Synthetic oligonucleotide
caacguuggacgugcaugu

SEQ ID NO: 141358 - RNA, 19 nt, Artificial Sequence
  Description of Artificial Sequence: Synthetic oligonucleotide
gcgcacauauccuuaggca

SEQ ID NO: 141359 - RNA, 19 nt, Artificial Sequence
  Description of Artificial Sequence: Synthetic oligonucleotide
cuugcggggaaggcuguug

SEQ ID NO: 141360 - RNA, 19 nt, Artificial Sequence
  Description of Artificial Sequence: Synthetic oligonucleotide
uucaucuugugggcuucgu

SEQ ID NO: 141361 - RNA, 19 nt, Artificial Sequence
  Description of Artificial Sequence: Synthetic oligonucleotide
aggcucucacgcugucauc

SEQ ID NO: 141362 - RNA, 19 nt, Artificial Sequence
  Description of Artificial Sequence: Synthetic oligonucleotide
guaaacaggccgaggcaga

SEQ ID NO: 141363 - RNA, 19 nt, Artificial Sequence
  Description of Artificial Sequence: Synthetic oligonucleotide
cugugagaaccgccccggg

SEQ ID NO: 141364 - RNA, 19 nt, Artificial Sequence
  Description of Artificial Sequence: Synthetic oligonucleotide
cuuagguaguagagcaggu

SEQ ID NO: 141365 - RNA, 19 nt, Artificial Sequence
  Description of Artificial Sequence: Synthetic oligonucleotide
gguagccugggcaaaugac

SEQ ID NO: 141366 - RNA, 19 nt, Artificial Sequence
  Description of Artificial Sequence: Synthetic oligonucleotide
ggcaguauucuuucgacuu

SEQ ID NO: 141367 - RNA, 19 nt, Artificial Sequence
  Description of Artificial Sequence: Synthetic oligonucleotide
gguaacaccuccccucgaa

SEQ ID NO: 141368 - RNA, 19 nt, Artificial Sequence
  Description of Artificial Sequence: Synthetic oligonucleotide
ggucaagggaguggauggg

SEQ ID NO: 141369 - RNA, 19 nt, Artificial Sequence
  Description of Artificial Sequence: Synthetic oligonucleotide
auagccgaucuuggguugu

SEQ ID NO: 141370 - RNA, 19 nt, Artificial Sequence
  Description of Artificial Sequence: Synthetic oligonucleotide
gaagcgccuggaggauugg

SEQ ID NO: 141371 - RNA, 19 nt, Artificial Sequence
  Description of Artificial Sequence: Synthetic oligonucleotide
cuucucgcucagagacacc

SEQ ID NO: 141372 - RNA, 19 nt, Artificial Sequence
  Description of Artificial Sequence: Synthetic oligonucleotide
uacgguccccuuucccuuc

SEQ ID NO: 141373 - RNA, 19 nt, Artificial Sequence
  Description of Artificial Sequence: Synthetic oligonucleotide
ccuuauauuugagguguug

SEQ ID NO: 141374 - RNA, 19 nt, Artificial Sequence
  Description of Artificial Sequence: Synthetic oligonucleotide
gugcaauaaaaggcucuca

SEQ ID NO: 141375 - RNA, 19 nt, Artificial Sequence
  Description of Artificial Sequence: Synthetic oligonucleotide
accuccccucgaaaguggg

SEQ ID NO: 141376 - RNA, 19 nt, Artificial Sequence
  Description of Artificial Sequence: Synthetic oligonucleotide
ugacucguacagguucauc

SEQ ID NO: 141377 - RNA, 19 nt, Artificial Sequence
  Description of Artificial Sequence: Synthetic oligonucleotide
gggcuucauggagugaugc

SEQ ID NO: 141378 - RNA, 19 nt, Artificial Sequence
  Description of Artificial Sequence: Synthetic oligonucleotide
caguacugcucaaagguuu

SEQ ID NO: 141379 - RNA, 19 nt, Artificial Sequence
  Description of Artificial Sequence: Synthetic oligonucleotide
cuuugcauacauaggcguu

SEQ ID NO: 141380 - RNA, 19 nt, Artificial Sequence
  Description of Artificial Sequence: Synthetic oligonucleotide
cgcucagagacacccgucg

SEQ ID NO: 141381 - RNA, 19 nt, Artificial Sequence
  Description of Artificial Sequence: Synthetic oligonucleotide
ggaccugguccacaauuuc

SEQ ID NO: 141382 - RNA, 19 nt, Artificial Sequence
  Description of Artificial Sequence: Synthetic oligonucleotide
ggugggcuuaggcuucgug

SEQ ID NO: 141383 - RNA, 19 nt, Artificial Sequence
  Description of Artificial Sequence: Synthetic oligonucleotide
uugucucagugaggacaag

SEQ ID NO: 141384 - RNA, 19 nt, Artificial Sequence
  Description of Artificial Sequence: Synthetic oligonucleotide
ucaggccauuugacaguuc

SEQ ID NO: 141385 - RNA, 19 nt, Artificial Sequence
  Description of Artificial Sequence: Synthetic oligonucleotide
ggggauguuaugggccagg

SEQ ID NO: 141386 - RNA, 19 nt, Artificial Sequence
  Description of Artificial Sequence: Synthetic oligonucleotide
aagcgccuggaggauuggu

SEQ ID NO: 141387 - RNA, 19 nt, Artificial Sequence
  Description of Artificial Sequence: Synthetic oligonucleotide
caagggcuaaggacuucca

SEQ ID NO: 141388 - RNA, 19 nt, Artificial Sequence
  Description of Artificial Sequence: Synthetic oligonucleotide
gaucgcccagcuggguagc

SEQ ID NO: 141389 - RNA, 19 nt, Artificial Sequence
  Description of Artificial Sequence: Synthetic oligonucleotide
agacccggaagaggucaag

SEQ ID NO: 141390 - RNA, 19 nt, Artificial Sequence
  Description of Artificial Sequence: Synthetic oligonucleotide
gcauguugucucagugagg

SEQ ID NO: 141391 - RNA, 19 nt, Artificial Sequence
  Description of Artificial Sequence: Synthetic oligonucleotide
aacguuggacgugcauguu

SEQ ID NO: 141392 - RNA, 19 nt, Artificial Sequence
  Description of Artificial Sequence: Synthetic oligonucleotide
ccuuaccagauuccuccag

SEQ ID NO: 141393 - RNA, 19 nt, Artificial Sequence
  Description of Artificial Sequence: Synthetic oligonucleotide
ggacugaguccuuucgaaa

SEQ ID NO: 141394 - RNA, 19 nt, Artificial Sequence
  Description of Artificial Sequence: Synthetic oligonucleotide
gugaccucuucagguaaca

SEQ ID NO: 141395 - RNA, 19 nt, Artificial Sequence
  Description of Artificial Sequence: Synthetic oligonucleotide
ggucaggugcccauuucac

SEQ ID NO: 141396 - RNA, 19 nt, Artificial Sequence
  Description of Artificial Sequence: Synthetic oligonucleotide
cagugaccucuucagguaa

SEQ ID NO: 141397 - RNA, 19 nt, Artificial Sequence
  Description of Artificial Sequence: Synthetic oligonucleotide
cauaggcguugagagcauc

SEQ ID NO: 141398 - RNA, 19 nt, Artificial Sequence
  Description of Artificial Sequence: Synthetic oligonucleotide
ccccuuucccuucuguaac

SEQ ID NO: 141399 - RNA, 19 nt, Artificial Sequence
  Description of Artificial Sequence: Synthetic oligonucleotide
cccuuagguaguagagcag

SEQ ID NO: 141400 - RNA, 19 nt, Artificial Sequence
  Description of Artificial Sequence: Synthetic oligonucleotide
auuccuccgccagggagaa

SEQ ID NO: 141401 - RNA, 19 nt, Artificial Sequence
  Description of Artificial Sequence: Synthetic oligonucleotide
cucugggugcuccuuauau

SEQ ID NO: 141402 - RNA, 19 nt, Artificial Sequence
  Description of Artificial Sequence: Synthetic oligonucleotide
ggcggggagggugagcugc

SEQ ID NO: 141403 - RNA, 19 nt, Artificial Sequence
  Description of Artificial Sequence: Synthetic oligonucleotide
gauuggugucuggcuaaaa

SEQ ID NO: 141404 - RNA, 19 nt, Artificial Sequence
  Description of Artificial Sequence: Synthetic oligonucleotide
ggcuuaguggaagaguccu

SEQ ID NO: 141405 - RNA, 19 nt, Artificial Sequence
  Description of Artificial Sequence: Synthetic oligonucleotide
agguugagucuuagauugu

SEQ ID NO: 141406 - RNA, 19 nt, Artificial Sequence
  Description of Artificial Sequence: Synthetic oligonucleotide
cacaauacucauacaccuu

SEQ ID NO: 141407 - RNA, 19 nt, Artificial Sequence
  Description of Artificial Sequence: Synthetic oligonucleotide
ggacgugcauguugucuca

SEQ ID NO: 141408 - RNA, 19 nt, Artificial Sequence
  Description of Artificial Sequence: Synthetic oligonucleotide
gcccgacucuucuucagca

SEQ ID NO: 141409 - RNA, 19 nt, Artificial Sequence
  Description of Artificial Sequence: Synthetic oligonucleotide
caggcuugccaaggacgag

SEQ ID NO: 141410 - RNA, 19 nt, Artificial Sequence
  Description of Artificial Sequence: Synthetic oligonucleotide
ggcagcaacguuggacgug

SEQ ID NO: 141411 - RNA, 19 nt, Artificial Sequence
  Description of Artificial Sequence: Synthetic oligonucleotide
gcaucguuggcuucucgcu

SEQ ID NO: 141412 - RNA, 19 nt, Artificial Sequence
  Description of Artificial Sequence: Synthetic oligonucleotide
ggaauuucucucgaagcau

SEQ ID NO: 141413 - RNA, 19 nt, Artificial Sequence
  Description of Artificial Sequence: Synthetic oligonucleotide
ccuaaauauuagguagaga

SEQ ID NO: 141414 - RNA, 19 nt, Artificial Sequence
  Description of Artificial Sequence: Synthetic oligonucleotide
agagcaggugauagccgau

SEQ ID NO: 141415 - RNA, 19 nt, Artificial Sequence
  Description of Artificial Sequence: Synthetic oligonucleotide
ggauguuaugggccaggaa

SEQ ID NO: 141416 - RNA, 19 nt, Artificial Sequence
  Description of Artificial Sequence: Synthetic oligonucleotide
aucgugcuucaugcaccag

SEQ ID NO: 141417 - RNA, 19 nt, Artificial Sequence
  Description of Artificial Sequence: Synthetic oligonucleotide
ggagccuuuucguuuucgu

SEQ ID NO: 141418 - RNA, 19 nt, Artificial Sequence
  Description of Artificial Sequence: Synthetic oligonucleotide
cucgaaagugggccuugaa

SEQ ID NO: 141419 - RNA, 19 nt, Artificial Sequence
  Description of Artificial Sequence: Synthetic oligonucleotide
cagugauggcugggugggg

SEQ ID NO: 141420 - RNA, 19 nt, Artificial Sequence
  Description of Artificial Sequence: Synthetic oligonucleotide
augacucguacagguucau

SEQ ID NO: 141421 - RNA, 19 nt, Artificial Sequence
  Description of Artificial Sequence: Synthetic oligonucleotide
cccgucgucaucgacguca

SEQ ID NO: 141422 - RNA, 19 nt, Artificial Sequence
  Description of Artificial Sequence: Synthetic oligonucleotide
uauccuugucugggcuaaa

SEQ ID NO: 141423 - RNA, 19 nt, Artificial Sequence
  Description of Artificial Sequence: Synthetic oligonucleotide
cacccgucgucaucgacgu

SEQ ID NO: 141424 - RNA, 19 nt, Artificial Sequence
  Description of Artificial Sequence: Synthetic oligonucleotide
ucgucacagcuugccugga

SEQ ID NO: 141425 - RNA, 19 nt, Artificial Sequence
  Description of Artificial Sequence: Synthetic oligonucleotide
gguggcuuaguggaagagu

SEQ ID NO: 141426 - RNA, 19 nt, Artificial Sequence
  Description of Artificial Sequence: Synthetic oligonucleotide
cgcacguggccuuccaaug

SEQ ID NO: 141427 - RNA, 19 nt, Artificial Sequence
  Description of Artificial Sequence: Synthetic oligonucleotide
guuuucguuuggugggcuu

SEQ ID NO: 141428 - RNA, 19 nt, Artificial Sequence
  Description of Artificial Sequence: Synthetic oligonucleotide
acccgucgucaucgacguc

SEQ ID NO: 141429 - RNA, 19 nt, Artificial Sequence
  Description of Artificial Sequence: Synthetic oligonucleotide
ccuccccucgaaagugggc

SEQ ID NO: 141430 - RNA, 19 nt, Artificial Sequence
  Description of Artificial Sequence: Synthetic oligonucleotide
gcucaucgugcuucaugca

SEQ ID NO: 141431 - RNA, 19 nt, Artificial Sequence
  Description of Artificial Sequence: Synthetic oligonucleotide
acauaggcguugagagcau

SEQ ID NO: 141432 - RNA, 19 nt, Artificial Sequence
  Description of Artificial Sequence: Synthetic oligonucleotide
ucuugcggggaaggcuguu

SEQ ID NO: 141433 - RNA, 19 nt, Artificial Sequence
  Description of Artificial Sequence: Synthetic oligonucleotide
gcgccuggaggauuggugu

SEQ ID NO: 141434 - RNA, 19 nt, Artificial Sequence
  Description of Artificial Sequence: Synthetic oligonucleotide
gagacaggacaaggccucu

SEQ ID NO: 141435 - RNA, 19 nt, Artificial Sequence
  Description of Artificial Sequence: Synthetic oligonucleotide
uagccgaucuuggguuguu

SEQ ID NO: 141436 - RNA, 19 nt, Artificial Sequence
  Description of Artificial Sequence: Synthetic oligonucleotide
ggccgaggcagaucuccuc

SEQ ID NO: 141437 - RNA, 19 nt, Artificial Sequence
  Description of Artificial Sequence: Synthetic oligonucleotide
gcuucgucacagcuugccu

SEQ ID NO: 141438 - RNA, 19 nt, Artificial Sequence
  Description of Artificial Sequence: Synthetic oligonucleotide
cuacgguccccuuucccuu

SEQ ID NO: 141439 - RNA, 19 nt, Artificial Sequence
  Description of Artificial Sequence: Synthetic oligonucleotide
gcuggagcccgacucuucu

SEQ ID NO: 141440 - RNA, 19 nt, Artificial Sequence
  Description of Artificial Sequence: Synthetic oligonucleotide
ggucucgucuggaaacucu

SEQ ID NO: 141441 - RNA, 19 nt, Artificial Sequence
  Description of Artificial Sequence: Synthetic oligonucleotide
agccgaucuuggguuguuu

SEQ ID NO: 141442 - RNA, 19 nt, Artificial Sequence
  Description of Artificial Sequence: Synthetic oligonucleotide
acccugccgcacguggccu

SEQ ID NO: 141443 - RNA, 19 nt, Artificial Sequence
  Description of Artificial Sequence: Synthetic oligonucleotide
gguucgugucugagagcug

SEQ ID NO: 141444 - RNA, 19 nt, Artificial Sequence
  Description of Artificial Sequence: Synthetic oligonucleotide
cguuggacgugcauguugu

SEQ ID NO: 141445 - RNA, 19 nt, Artificial Sequence
  Description of Artificial Sequence: Synthetic oligonucleotide
ggauuggugucuggcuaaa

SEQ ID NO: 141446 - RNA, 19 nt, Artificial Sequence
  Description of Artificial Sequence: Synthetic oligonucleotide
gggcuuaggcuucgugucu

SEQ ID NO: 141447 - RNA, 19 nt, Artificial Sequence
  Description of Artificial Sequence: Synthetic oligonucleotide
gcucagagacacccgucgu

SEQ ID NO: 141448 - RNA, 19 nt, Artificial Sequence
  Description of Artificial Sequence: Synthetic oligonucleotide
cauggcccgcagcucuuua

SEQ ID NO: 141449 - RNA, 19 nt, Artificial Sequence
  Description of Artificial Sequence: Synthetic oligonucleotide
ggcauccaaacugguugaa

SEQ ID NO: 141450 - RNA, 19 nt, Artificial Sequence
  Description of Artificial Sequence: Synthetic oligonucleotide
cucacgcugucaucagguu

SEQ ID NO: 141451 - RNA, 19 nt, Artificial Sequence
  Description of Artificial Sequence: Synthetic oligonucleotide
gcaggcgcacauauccuua

SEQ ID NO: 141452 - RNA, 19 nt, Artificial Sequence
  Description of Artificial Sequence: Synthetic oligonucleotide
caagcgucccaggugcaau

SEQ ID NO: 141453 - RNA, 19 nt, Artificial Sequence
  Description of Artificial Sequence: Synthetic oligonucleotide
gccgaucuuggguuguuuu

SEQ ID NO: 141454 - RNA, 19 nt, Artificial Sequence
  Description of Artificial Sequence: Synthetic oligonucleotide
cagcaacguuggacgugca

SEQ ID NO: 141455 - RNA, 19 nt, Artificial Sequence
  Description of Artificial Sequence: Synthetic oligonucleotide
ggccuuccaauggugggua

SEQ ID NO: 141456 - RNA, 19 nt, Artificial Sequence
  Description of Artificial Sequence: Synthetic oligonucleotide
uuccacgggcggggagggu

SEQ ID NO: 141457 - RNA, 19 nt, Artificial Sequence
  Description of Artificial Sequence: Synthetic oligonucleotide
cgccuggaggauugguguc

SEQ ID NO: 141458 - RNA, 19 nt, Artificial Sequence
  Description of Artificial Sequence: Synthetic oligonucleotide
guugcaggauagggauaau

SEQ ID NO: 141459 - RNA, 19 nt, Artificial Sequence
  Description of Artificial Sequence: Synthetic oligonucleotide
cgacuucgagggcuggaca

SEQ ID NO: 141460 - RNA, 19 nt, Artificial Sequence
  Description of Artificial Sequence: Synthetic oligonucleotide
cuggagcccgacucuucuu

SEQ ID NO: 141461 - RNA, 19 nt, Artificial Sequence
  Description of Artificial Sequence: Synthetic oligonucleotide
ggcuuaggcuucgugucuu

SEQ ID NO: 141462 - RNA, 19 nt, Artificial Sequence
  Description of Artificial Sequence: Synthetic oligonucleotide
ccucgaaagugggccuuga

SEQ ID NO: 141463 - RNA, 19 nt, Artificial Sequence
  Description of Artificial Sequence: Synthetic oligonucleotide
cccaagcgucccaggugca

SEQ ID NO: 141464 - RNA, 19 nt, Artificial Sequence
  Description of Artificial Sequence: Synthetic oligonucleotide
ccgcacguggccuuccaau

SEQ ID NO: 141465 - RNA, 19 nt, Artificial Sequence
  Description of Artificial Sequence: Synthetic oligonucleotide
ccaagcgucccaggugcaa

SEQ ID NO: 141466 - RNA, 19 nt, Artificial Sequence
  Description of Artificial Sequence: Synthetic oligonucleotide
ccuuugcuauugagauccu

SEQ ID NO: 141467 - RNA, 19 nt, Artificial Sequence
  Description of Artificial Sequence: Synthetic oligonucleotide
ccggcucuuggguggcuua

SEQ ID NO: 141468 - RNA, 19 nt, Artificial Sequence
  Description of Artificial Sequence: Synthetic oligonucleotide
cguuuucguuuggugggcu

SEQ ID NO: 141469 - RNA, 19 nt, Artificial Sequence
  Description of Artificial Sequence: Synthetic oligonucleotide
cguuggcuucucgcucaga

SEQ ID NO: 141470 - RNA, 19 nt, Artificial Sequence
  Description of Artificial Sequence: Synthetic oligonucleotide
ccgcuccucaaggucucgu

SEQ ID NO: 141471 - RNA, 19 nt, Artificial Sequence
  Description of Artificial Sequence: Synthetic oligonucleotide
cccugccgcacguggccuu

SEQ ID NO: 141472 - RNA, 19 nt, Artificial Sequence
  Description of Artificial Sequence: Synthetic oligonucleotide
aacaguaucaagccaaucg

SEQ ID NO: 141473 - RNA, 19 nt, Artificial Sequence
  Description of Artificial Sequence: Synthetic oligonucleotide
ugagguaggauauuucucg

SEQ ID NO: 141474 - RNA, 19 nt, Artificial Sequence
  Description of Artificial Sequence: Synthetic oligonucleotide
uuauauaguaggcaggugu

SEQ ID NO: 141475 - RNA, 19 nt, Artificial Sequence
  Description of Artificial Sequence: Synthetic oligonucleotide
gaaucgauuggaaagaucc

SEQ ID NO: 141476 - RNA, 19 nt, Artificial Sequence
  Description of Artificial Sequence: Synthetic oligonucleotide
cuaaggauagaguaggcgg

SEQ ID NO: 141477 - RNA, 19 nt, Artificial Sequence
  Description of Artificial Sequence: Synthetic oligonucleotide
agagaguuuaccgagaguc

SEQ ID NO: 141478 - RNA, 19 nt, Artificial Sequence
  Description of Artificial Sequence: Synthetic oligonucleotide
ucuaucuuaaagauaucca

SEQ ID NO: 141479 - RNA, 19 nt, Artificial Sequence
  Description of Artificial Sequence: Synthetic oligonucleotide
ggagcuuugacuuagugcc

SEQ ID NO: 141480 - RNA, 19 nt, Artificial Sequence
  Description of Artificial Sequence: Synthetic oligonucleotide
uccacgucaaagaucaucc

SEQ ID NO: 141481 - RNA, 19 nt, Artificial Sequence
  Description of Artificial Sequence: Synthetic oligonucleotide
auagucgaucuccagaggg

SEQ ID NO: 141482 - RNA, 19 nt, Artificial Sequence
  Description of Artificial Sequence: Synthetic oligonucleotide
guacucguuauauaguagg

SEQ ID NO: 141483 - RNA, 19 nt, Artificial Sequence
  Description of Artificial Sequence: Synthetic oligonucleotide
ucugagagaguuuaccgag

SEQ ID NO: 141484 - RNA, 19 nt, Artificial Sequence
  Description of Artificial Sequence: Synthetic oligonucleotide
guuacugccaaugacagug

SEQ ID NO: 141485 - RNA, 19 nt, Artificial Sequence
  Description of Artificial Sequence: Synthetic oligonucleotide
ucacuaaggauagaguagg

SEQ ID NO: 141486 - RNA, 19 nt, Artificial Sequence
  Description of Artificial Sequence: Synthetic oligonucleotide
cucguuauauaguaggcag

SEQ ID NO: 141487 - RNA, 19 nt, Artificial Sequence
  Description of Artificial Sequence: Synthetic oligonucleotide
cuucauguuagacagcggc

SEQ ID NO: 141488 - RNA, 19 nt, Artificial Sequence
  Description of Artificial Sequence: Synthetic oligonucleotide
aaucucguauuccaccaag

SEQ ID NO: 141489 - RNA, 19 nt, Artificial Sequence
  Description of Artificial Sequence: Synthetic oligonucleotide
uaucuuaaagauauccauc

SEQ ID NO: 141490 - RNA, 19 nt, Artificial Sequence
  Description of Artificial Sequence: Synthetic oligonucleotide
gucauuaacacccgauggg

SEQ ID NO: 141491 - RNA, 19 nt, Artificial Sequence
  Description of Artificial Sequence: Synthetic oligonucleotide
agucuaggcaaacaaaaca

SEQ ID NO: 141492 - RNA, 19 nt, Artificial Sequence
  Description of Artificial Sequence: Synthetic oligonucleotide
ucauuccgaagucaugggg

SEQ ID NO: 141493 - RNA, 19 nt, Artificial Sequence
  Description of Artificial Sequence: Synthetic oligonucleotide
ucguuauauaguaggcagg

SEQ ID NO: 141494 - RNA, 19 nt, Artificial Sequence
  Description of Artificial Sequence: Synthetic oligonucleotide
ugauaugugacgcaugcuu

SEQ ID NO: 141495 - RNA, 19 nt, Artificial Sequence
  Description of Artificial Sequence: Synthetic oligonucleotide
gaccuuuaauuucuugagg

SEQ ID NO: 141496 - RNA, 19 nt, Artificial Sequence
  Description of Artificial Sequence: Synthetic oligonucleotide
uuucucggaauuccuuugg

SEQ ID NO: 141497 - RNA, 19 nt, Artificial Sequence
  Description of Artificial Sequence: Synthetic oligonucleotide
uuuaaccugucuauauaga

SEQ ID NO: 141498 - RNA, 19 nt, Artificial Sequence
  Description of Artificial Sequence: Synthetic oligonucleotide
ucaagacuagucuaggcaa

SEQ ID NO: 141499 - RNA, 19 nt, Artificial Sequence
  Description of Artificial Sequence: Synthetic oligonucleotide
uauauaguaggcagguguc

SEQ ID NO: 141500 - RNA, 19 nt, Artificial Sequence
  Description of Artificial Sequence: Synthetic oligonucleotide
cucacuaaggauagaguag

SEQ ID NO: 141501 - RNA, 19 nt, Artificial Sequence
  Description of Artificial Sequence: Synthetic oligonucleotide
aaucgggucucccugagau

SEQ ID NO: 141502 - RNA, 19 nt, Artificial Sequence
  Description of Artificial Sequence: Synthetic oligonucleotide
acaaggaagccuuguuggc

SEQ ID NO: 141503 - RNA, 19 nt, Artificial Sequence
  Description of Artificial Sequence: Synthetic oligonucleotide
ugacgcaugcuugaguucg

SEQ ID NO: 141504 - RNA, 19 nt, Artificial Sequence
  Description of Artificial Sequence: Synthetic oligonucleotide
ucacgcucuaucuuaaaga

SEQ ID NO: 141505 - RNA, 19 nt, Artificial Sequence
  Description of Artificial Sequence: Synthetic oligonucleotide
cugguugaagauaagcaac

SEQ ID NO: 141506 - RNA, 19 nt, Artificial Sequence
  Description of Artificial Sequence: Synthetic oligonucleotide
uccagaucaggucauucug

SEQ ID NO: 141507 - RNA, 19 nt, Artificial Sequence
  Description of Artificial Sequence: Synthetic oligonucleotide
ucggucaaccaccuuaaug

SEQ ID NO: 141508 - RNA, 19 nt, Artificial Sequence
  Description of Artificial Sequence: Synthetic oligonucleotide
agaguaggcggccuggauc

SEQ ID NO: 141509 - RNA, 19 nt, Artificial Sequence
  Description of Artificial Sequence: Synthetic oligonucleotide
aagacuagucuaggcaaac

SEQ ID NO: 141510 - RNA, 19 nt, Artificial Sequence
  Description of Artificial Sequence: Synthetic oligonucleotide
acggacaagggacuugaac

SEQ ID NO: 141511 - RNA, 19 nt, Artificial Sequence
  Description of Artificial Sequence: Synthetic oligonucleotide
aaaccccuaacaacccucc

SEQ ID NO: 141512 - RNA, 19 nt, Artificial Sequence
  Description of Artificial Sequence: Synthetic oligonucleotide
uaggauauuucucggaauu

SEQ ID NO: 141513 - RNA, 19 nt, Artificial Sequence
  Description of Artificial Sequence: Synthetic oligonucleotide
uucauuccgaagucauggg

SEQ ID NO: 141514 - RNA, 19 nt, Artificial Sequence
  Description of Artificial Sequence: Synthetic oligonucleotide
caguaucaagccaaucggg

SEQ ID NO: 141515 - RNA, 19 nt, Artificial Sequence
  Description of Artificial Sequence: Synthetic oligonucleotide
aguaguaagcaucacucuu

SEQ ID NO: 141516 - RNA, 19 nt, Artificial Sequence
  Description of Artificial Sequence: Synthetic oligonucleotide
uaaggagaucgggugaggg

SEQ ID NO: 141517 - RNA, 19 nt, Artificial Sequence
  Description of Artificial Sequence: Synthetic oligonucleotide
cagaucaggucauucuggg

SEQ ID NO: 141518 - RNA, 19 nt, Artificial Sequence
  Description of Artificial Sequence: Synthetic oligonucleotide
ugugacgcaugcuugaguu

SEQ ID NO: 141519 - RNA, 19 nt, Artificial Sequence
  Description of Artificial Sequence: Synthetic oligonucleotide
gaccucacuaaggauagag

SEQ ID NO: 141520 - RNA, 19 nt, Artificial Sequence
  Description of Artificial Sequence: Synthetic oligonucleotide
ggauaaaaccccuaacaac

SEQ ID NO: 141521 - RNA, 19 nt, Artificial Sequence
  Description of Artificial Sequence: Synthetic oligonucleotide
aggguguagaaucgauugg

SEQ ID NO: 141522 - RNA, 19 nt, Artificial Sequence
  Description of Artificial Sequence: Synthetic oligonucleotide
guaaccuccgauugugcag

SEQ ID NO: 141523 - RNA, 19 nt, Artificial Sequence
  Description of Artificial Sequence: Synthetic oligonucleotide
gggauuaggguguagaauc

SEQ ID NO: 141524 - RNA, 19 nt, Artificial Sequence
  Description of Artificial Sequence: Synthetic oligonucleotide
agaguuuaccgagagucag

SEQ ID NO: 141525 - RNA, 19 nt, Artificial Sequence
  Description of Artificial Sequence: Synthetic oligonucleotide
aaccccuaacaacccuccc

SEQ ID NO: 141526 - RNA, 19 nt, Artificial Sequence
  Description of Artificial Sequence: Synthetic oligonucleotide
aaguuuaccccuaggcuug

SEQ ID NO: 141527 - RNA, 19 nt, Artificial Sequence
  Description of Artificial Sequence: Synthetic oligonucleotide
aguaaccuccgauugugca

SEQ ID NO: 141528 - RNA, 19 nt, Artificial Sequence
  Description of Artificial Sequence: Synthetic oligonucleotide
uugagguaggauauuucuc

SEQ ID NO: 141529 - RNA, 19 nt, Artificial Sequence
  Description of Artificial Sequence: Synthetic oligonucleotide
gauagaguaggcggccugg

SEQ ID NO: 141530 - RNA, 19 nt, Artificial Sequence
  Description of Artificial Sequence: Synthetic oligonucleotide
uucagguggggcuauccgc

SEQ ID NO: 141531 - RNA, 19 nt, Artificial Sequence
  Description of Artificial Sequence: Synthetic oligonucleotide
uuaccccuaggcuugggug

SEQ ID NO: 141532 - RNA, 19 nt, Artificial Sequence
  Description of Artificial Sequence: Synthetic oligonucleotide
ucuucauuccgaagucaug

SEQ ID NO: 141533 - RNA, 19 nt, Artificial Sequence
  Description of Artificial Sequence: Synthetic oligonucleotide
uaacaacccucccaccgag

SEQ ID NO: 141534 - RNA, 19 nt, Artificial Sequence
  Description of Artificial Sequence: Synthetic oligonucleotide
ugaaggucaaucucguauu

SEQ ID NO: 141535 - RNA, 19 nt, Artificial Sequence
  Description of Artificial Sequence: Synthetic oligonucleotide
aaggagaucgggugagggu

SEQ ID NO: 141536 - RNA, 19 nt, Artificial Sequence
  Description of Artificial Sequence: Synthetic oligonucleotide
auguacucguuauauagua

SEQ ID NO: 141537 - RNA, 19 nt, Artificial Sequence
  Description of Artificial Sequence: Synthetic oligonucleotide
aggaagcacauuucccuuc

SEQ ID NO: 141538 - RNA, 19 nt, Artificial Sequence
  Description of Artificial Sequence: Synthetic oligonucleotide
uauccgcagacccugugac

SEQ ID NO: 141539 - RNA, 19 nt, Artificial Sequence
  Description of Artificial Sequence: Synthetic oligonucleotide
cucacgcucuaucuuaaag

SEQ ID NO: 141540 - RNA, 19 nt, Artificial Sequence
  Description of Artificial Sequence: Synthetic oligonucleotide
cucaagacuagucuaggca

SEQ ID NO: 141541 - RNA, 19 nt, Artificial Sequence
  Description of Artificial Sequence: Synthetic oligonucleotide
gaacccuaaggagaucggg

SEQ ID NO: 141542 - RNA, 19 nt, Artificial Sequence
  Description of Artificial Sequence: Synthetic oligonucleotide
ugaguucguacauguuucc

SEQ ID NO: 141543 - RNA, 19 nt, Artificial Sequence
  Description of Artificial Sequence: Synthetic oligonucleotide
aagggcgacuucucccaac

SEQ ID NO: 141544 - RNA, 19 nt, Artificial Sequence
  Description of Artificial Sequence: Synthetic oligonucleotide
gucaaagaucaucccgacg

SEQ ID NO: 141545 - RNA, 19 nt, Artificial Sequence
  Description of Artificial Sequence: Synthetic oligonucleotide
gacuagucuaggcaaacaa

SEQ ID NO: 141546 - RNA, 19 nt, Artificial Sequence
  Description of Artificial Sequence: Synthetic oligonucleotide
uuggagacucuuaguggag

SEQ ID NO: 141547 - RNA, 19 nt, Artificial Sequence
  Description of Artificial Sequence: Synthetic oligonucleotide
uaaccuccgauugugcagc

SEQ ID NO: 141548 - RNA, 19 nt, Artificial Sequence
  Description of Artificial Sequence: Synthetic oligonucleotide
aggauauuucucggaauuc

SEQ ID NO: 141549 - RNA, 19 nt, Artificial Sequence
  Description of Artificial Sequence: Synthetic oligonucleotide
gaaguuuaccccuaggcuu

SEQ ID NO: 141550 - RNA, 19 nt, Artificial Sequence
  Description of Artificial Sequence: Synthetic oligonucleotide
acccuaaggagaucgggug

SEQ ID NO: 141551 - RNA, 19 nt, Artificial Sequence
  Description of Artificial Sequence: Synthetic oligonucleotide
agacucuuaguggaggcag

SEQ ID NO: 141552 - RNA, 19 nt, Artificial Sequence
  Description of Artificial Sequence: Synthetic oligonucleotide
uuaggguguagaaucgauu

SEQ ID NO: 141553 - RNA, 19 nt, Artificial Sequence
  Description of Artificial Sequence: Synthetic oligonucleotide
uaccccuaggcuugggugc

SEQ ID NO: 141554 - RNA, 19 nt, Artificial Sequence
  Description of Artificial Sequence: Synthetic oligonucleotide
uuaggucacugguggaaca

SEQ ID NO: 141555 - RNA, 19 nt, Artificial Sequence
  Description of Artificial Sequence: Synthetic oligonucleotide
gaguuuaccgagagucagg

SEQ ID NO: 141556 - RNA, 19 nt, Artificial Sequence
  Description of Artificial Sequence: Synthetic oligonucleotide
guaucaagccaaucggguc

SEQ ID NO: 141557 - RNA, 19 nt, Artificial Sequence
  Description of Artificial Sequence: Synthetic oligonucleotide
aguuuaccgagagucagga

SEQ ID NO: 141558 - RNA, 19 nt, Artificial Sequence
  Description of Artificial Sequence: Synthetic oligonucleotide
cuggcucucucccucacgc

SEQ ID NO: 141559 - RNA, 19 nt, Artificial Sequence
  Description of Artificial Sequence: Synthetic oligonucleotide
cacucuuaaagaccagcug

SEQ ID NO: 141560 - RNA, 19 nt, Artificial Sequence
  Description of Artificial Sequence: Synthetic oligonucleotide
ggacaagggacuugaaccc

SEQ ID NO: 141561 - RNA, 19 nt, Artificial Sequence
  Description of Artificial Sequence: Synthetic oligonucleotide
aacccuaaggagaucgggu

SEQ ID NO: 141562 - RNA, 19 nt, Artificial Sequence
  Description of Artificial Sequence: Synthetic oligonucleotide
gugucacccauuccuuucg

SEQ ID NO: 141563 - RNA, 19 nt, Artificial Sequence
  Description of Artificial Sequence: Synthetic oligonucleotide
ucgggucucccugagaugu

SEQ ID NO: 141564 - RNA, 19 nt, Artificial Sequence
  Description of Artificial Sequence: Synthetic oligonucleotide
uaugugacgcaugcuugag

SEQ ID NO: 141565 - RNA, 19 nt, Artificial Sequence
  Description of Artificial Sequence: Synthetic oligonucleotide
gggagcuuugacuuagugc

SEQ ID NO: 141566 - RNA, 19 nt, Artificial Sequence
  Description of Artificial Sequence: Synthetic oligonucleotide
gaaggucaaucucguauuc

SEQ ID NO: 141567 - RNA, 19 nt, Artificial Sequence
  Description of Artificial Sequence: Synthetic oligonucleotide
auagacgauguacucguua

SEQ ID NO: 141568 - RNA, 19 nt, Artificial Sequence
  Description of Artificial Sequence: Synthetic oligonucleotide
acucguuauauaguaggca

SEQ ID NO: 141569 - RNA, 19 nt, Artificial Sequence
  Description of Artificial Sequence: Synthetic oligonucleotide
cuugagguaggauauuucu

SEQ ID NO: 141570 - RNA, 19 nt, Artificial Sequence
  Description of Artificial Sequence: Synthetic oligonucleotide
agaucgcagacucuccaga

SEQ ID NO: 141571 - RNA, 19 nt, Artificial Sequence
  Description of Artificial Sequence: Synthetic oligonucleotide
guaucugcucuccuuguca

SEQ ID NO: 141572 - RNA, 19 nt, Artificial Sequence
  Description of Artificial Sequence: Synthetic oligonucleotide
acuuagugccagguuuuac

SEQ ID NO: 141573 - RNA, 19 nt, Artificial Sequence
  Description of Artificial Sequence: Synthetic oligonucleotide
ucauguuagacagcggcuu

SEQ ID NO: 141574 - RNA, 19 nt, Artificial Sequence
  Description of Artificial Sequence: Synthetic oligonucleotide
uaugccugguaggauaaaa

SEQ ID NO: 141575 - RNA, 19 nt, Artificial Sequence
  Description of Artificial Sequence: Synthetic oligonucleotide
ucccaacaguaucaagcca

SEQ ID NO: 141576 - RNA, 19 nt, Artificial Sequence
  Description of Artificial Sequence: Synthetic oligonucleotide
cacuaaggauagaguaggc

SEQ ID NO: 141577 - RNA, 19 nt, Artificial Sequence
  Description of Artificial Sequence: Synthetic oligonucleotide
agcuuugacuuagugccag

SEQ ID NO: 141578 - RNA, 19 nt, Artificial Sequence
  Description of Artificial Sequence: Synthetic oligonucleotide
gcaguaguaagcaucacuc

SEQ ID NO: 141579 - RNA, 19 nt, Artificial Sequence
  Description of Artificial Sequence: Synthetic oligonucleotide
cucugagagaguuuaccga

SEQ ID NO: 141580 - RNA, 19 nt, Artificial Sequence
  Description of Artificial Sequence: Synthetic oligonucleotide
aacacggacaagggacuug

SEQ ID NO: 141581 - RNA, 19 nt, Artificial Sequence
  Description of Artificial Sequence: Synthetic oligonucleotide
auauaguaggcagguguca

SEQ ID NO: 141582 - RNA, 19 nt, Artificial Sequence
  Description of Artificial Sequence: Synthetic oligonucleotide
gguaggauauuucucggaa

SEQ ID NO: 141583 - RNA, 19 nt, Artificial Sequence
  Description of Artificial Sequence: Synthetic oligonucleotide
gguaggauaaaaccccuaa

SEQ ID NO: 141584 - RNA, 19 nt, Artificial Sequence
  Description of Artificial Sequence: Synthetic oligonucleotide
cagggcuaugccugguagg

SEQ ID NO: 141585 - RNA, 19 nt, Artificial Sequence
  Description of Artificial Sequence: Synthetic oligonucleotide
ccagaucaggucauucugg

SEQ ID NO: 141586 - RNA, 19 nt, Artificial Sequence
  Description of Artificial Sequence: Synthetic oligonucleotide
ugccagguuuuaccgucag

SEQ ID NO: 141587 - RNA, 19 nt, Artificial Sequence
  Description of Artificial Sequence: Synthetic oligonucleotide
caggugucauuaacacccg

SEQ ID NO: 141588 - RNA, 19 nt, Artificial Sequence
  Description of Artificial Sequence: Synthetic oligonucleotide
agggaugucuuaaaauuaa

SEQ ID NO: 141589 - RNA, 19 nt, Artificial Sequence
  Description of Artificial Sequence: Synthetic oligonucleotide
gaguaggcggccuggaucu

SEQ ID NO: 141590 - RNA, 19 nt, Artificial Sequence
  Description of Artificial Sequence: Synthetic oligonucleotide
ugugguguggaggcaccag

SEQ ID NO: 141591 - RNA, 19 nt, Artificial Sequence
  Description of Artificial Sequence: Synthetic oligonucleotide
gauauuucucggaauuccu

SEQ ID NO: 141592 - RNA, 19 nt, Artificial Sequence
  Description of Artificial Sequence: Synthetic oligonucleotide
aucccgacgagcuccugca

SEQ ID NO: 141593 - RNA, 19 nt, Artificial Sequence
  Description of Artificial Sequence: Synthetic oligonucleotide
cuugcugauaugugacgca

SEQ ID NO: 141594 - RNA, 19 nt, Artificial Sequence
  Description of Artificial Sequence: Synthetic oligonucleotide
cuuuggugucacccauucc

SEQ ID NO: 141595 - RNA, 19 nt, Artificial Sequence
  Description of Artificial Sequence: Synthetic oligonucleotide
acccgugccacaguaaccu

SEQ ID NO: 141596 - RNA, 19 nt, Artificial Sequence
  Description of Artificial Sequence: Synthetic oligonucleotide
ugucuugaccaugcacuug

SEQ ID NO: 141597 - RNA, 19 nt, Artificial Sequence
  Description of Artificial Sequence: Synthetic oligonucleotide
caucccgacgagcuccugc

SEQ ID NO: 141598 - RNA, 19 nt, Artificial Sequence
  Description of Artificial Sequence: Synthetic oligonucleotide
ucccaccgagugcaacacg

SEQ ID NO: 141599 - RNA, 19 nt, Artificial Sequence
  Description of Artificial Sequence: Synthetic oligonucleotide
cugucuauauagaacccua

SEQ ID NO: 141600 - RNA, 19 nt, Artificial Sequence
  Description of Artificial Sequence: Synthetic oligonucleotide
cugugggaaccaguaaggc

SEQ ID NO: 141601 - RNA, 19 nt, Artificial Sequence
  Description of Artificial Sequence: Synthetic oligonucleotide
aucaagccaaucgggucuc

SEQ ID NO: 141602 - RNA, 19 nt, Artificial Sequence
  Description of Artificial Sequence: Synthetic oligonucleotide
cccaccgagugcaacacgg

SEQ ID NO: 141603 - RNA, 19 nt, Artificial Sequence
  Description of Artificial Sequence: Synthetic oligonucleotide
cugaaggucaaucucguau

SEQ ID NO: 141604 - RNA, 19 nt, Artificial Sequence
  Description of Artificial Sequence: Synthetic oligonucleotide
caguaaccuccgauugugc

SEQ ID NO: 141605 - RNA, 19 nt, Artificial Sequence
  Description of Artificial Sequence: Synthetic oligonucleotide
gccugguaggauaaaaccc

SEQ ID NO: 141606 - RNA, 19 nt, Artificial Sequence
  Description of Artificial Sequence: Synthetic oligonucleotide
gauguacucguuauauagu

SEQ ID NO: 141607 - RNA, 19 nt, Artificial Sequence
  Description of Artificial Sequence: Synthetic oligonucleotide
guaguaagcaucacucuua

SEQ ID NO: 141608 - RNA, 19 nt, Artificial Sequence
  Description of Artificial Sequence: Synthetic oligonucleotide
gagaguuuaccgagaguca

SEQ ID NO: 141609 - RNA, 19 nt, Artificial Sequence
  Description of Artificial Sequence: Synthetic oligonucleotide
acaagggacuugaacccag

SEQ ID NO: 141610 - RNA, 19 nt, Artificial Sequence
  Description of Artificial Sequence: Synthetic oligonucleotide
auuaggguguagaaucgau

SEQ ID NO: 141611 - RNA, 19 nt, Artificial Sequence
  Description of Artificial Sequence: Synthetic oligonucleotide
agaacccuaaggagaucgg

SEQ ID NO: 141612 - RNA, 19 nt, Artificial Sequence
  Description of Artificial Sequence: Synthetic oligonucleotide
augugacgcaugcuugagu

SEQ ID NO: 141613 - RNA, 19 nt, Artificial Sequence
  Description of Artificial Sequence: Synthetic oligonucleotide
acacggacaagggacuuga

SEQ ID NO: 141614 - RNA, 19 nt, Artificial Sequence
  Description of Artificial Sequence: Synthetic oligonucleotide
cuaaggagaucgggugagg

SEQ ID NO: 141615 - RNA, 19 nt, Artificial Sequence
  Description of Artificial Sequence: Synthetic oligonucleotide
uguuagacagcggcuuauc

SEQ ID NO: 141616 - RNA, 19 nt, Artificial Sequence
  Description of Artificial Sequence: Synthetic oligonucleotide
gucacccauuccuuucggc

SEQ ID NO: 141617 - RNA, 19 nt, Artificial Sequence
  Description of Artificial Sequence: Synthetic oligonucleotide
aguggaaccucuacacccu

SEQ ID NO: 141618 - RNA, 19 nt, Artificial Sequence
  Description of Artificial Sequence: Synthetic oligonucleotide
caccgagugcaacacggac

SEQ ID NO: 141619 - RNA, 19 nt, Artificial Sequence
  Description of Artificial Sequence: Synthetic oligonucleotide
cagggaugucuuaaaauua

SEQ ID NO: 141620 - RNA, 19 nt, Artificial Sequence
  Description of Artificial Sequence: Synthetic oligonucleotide
acgauguacucguuauaua

SEQ ID NO: 141621 - RNA, 19 nt, Artificial Sequence
  Description of Artificial Sequence: Synthetic oligonucleotide
cugugacguggcuuuuccc

SEQ ID NO: 141622 - RNA, 19 nt, Artificial Sequence
  Description of Artificial Sequence: Synthetic oligonucleotide
gugcagaguguuccagacc

SEQ ID NO: 141623 - RNA, 19 nt, Artificial Sequence
  Description of Artificial Sequence: Synthetic oligonucleotide
uagaguaggcggccuggau

SEQ ID NO: 141624 - RNA, 19 nt, Artificial Sequence
  Description of Artificial Sequence: Synthetic oligonucleotide
ggcugaucccgucaacuug

SEQ ID NO: 141625 - RNA, 19 nt, Artificial Sequence
  Description of Artificial Sequence: Synthetic oligonucleotide
gcugaucccgucaacuugc

SEQ ID NO: 141626 - RNA, 19 nt, Artificial Sequence
  Description of Artificial Sequence: Synthetic oligonucleotide
agacuagucuaggcaaaca

SEQ ID NO: 141627 - RNA, 19 nt, Artificial Sequence
  Description of Artificial Sequence: Synthetic oligonucleotide
caagacuagucuaggcaaa

SEQ ID NO: 141628 - RNA, 19 nt, Artificial Sequence
  Description of Artificial Sequence: Synthetic oligonucleotide
gaugguacuugcugcuggu

SEQ ID NO: 141629 - RNA, 19 nt, Artificial Sequence
  Description of Artificial Sequence: Synthetic oligonucleotide
cugaucccgucaacuugcc

SEQ ID NO: 141630 - RNA, 19 nt, Artificial Sequence
  Description of Artificial Sequence: Synthetic oligonucleotide
gccauagucgaucuccaga

SEQ ID NO: 141631 - RNA, 19 nt, Artificial Sequence
  Description of Artificial Sequence: Synthetic oligonucleotide
cacgcucuaucuuaaagau

SEQ ID NO: 141632 - RNA, 19 nt, Artificial Sequence
  Description of Artificial Sequence: Synthetic oligonucleotide
caacccucccaccgagugc

SEQ ID NO: 141633 - RNA, 19 nt, Artificial Sequence
  Description of Artificial Sequence: Synthetic oligonucleotide
aguuuaccccuaggcuugg

SEQ ID NO: 141634 - RNA, 19 nt, Artificial Sequence
  Description of Artificial Sequence: Synthetic oligonucleotide
uggcugaucccgucaacuu

SEQ ID NO: 141635 - RNA, 19 nt, Artificial Sequence
  Description of Artificial Sequence: Synthetic oligonucleotide
ccucacuaaggauagagua

SEQ ID NO: 141636 - RNA, 19 nt, Artificial Sequence
  Description of Artificial Sequence: Synthetic oligonucleotide
ggacccgugccacaguaac

SEQ ID NO: 141637 - RNA, 19 nt, Artificial Sequence
  Description of Artificial Sequence: Synthetic oligonucleotide
aucgggucucccugagaug

SEQ ID NO: 141638 - RNA, 19 nt, Artificial Sequence
  Description of Artificial Sequence: Synthetic oligonucleotide
gucgaucuccagaggguag

SEQ ID NO: 141639 - RNA, 19 nt, Artificial Sequence
  Description of Artificial Sequence: Synthetic oligonucleotide
caagccaaucgggucuccc

SEQ ID NO: 141640 - RNA, 19 nt, Artificial Sequence
  Description of Artificial Sequence: Synthetic oligonucleotide
ugcggaggugacagagggu

SEQ ID NO: 141641 - RNA, 19 nt, Artificial Sequence
  Description of Artificial Sequence: Synthetic oligonucleotide
guuuugcccaagccuuuga

SEQ ID NO: 141642 - RNA, 19 nt, Artificial Sequence
  Description of Artificial Sequence: Synthetic oligonucleotide
ucguuuugcccaagccuuu

SEQ ID NO: 141643 - RNA, 19 nt, Artificial Sequence
  Description of Artificial Sequence: Synthetic oligonucleotide
gggucguuuugcccaagcc

SEQ ID NO: 141644 - RNA, 19 nt, Artificial Sequence
  Description of Artificial Sequence: Synthetic oligonucleotide
aguaggcaggugucauuaa

SEQ ID NO: 141645 - RNA, 19 nt, Artificial Sequence
  Description of Artificial Sequence: Synthetic oligonucleotide
cccaacaguaucaagccaa

SEQ ID NO: 141646 - RNA, 19 nt, Artificial Sequence
  Description of Artificial Sequence: Synthetic oligonucleotide
ggaguuggucccuuucaca

SEQ ID NO: 141647 - RNA, 19 nt, Artificial Sequence
  Description of Artificial Sequence: Synthetic oligonucleotide
auagaguaggcggccugga

SEQ ID NO: 141648 - RNA, 19 nt, Artificial Sequence
  Description of Artificial Sequence: Synthetic oligonucleotide
guaggauauuucucggaau

SEQ ID NO: 141649 - RNA, 19 nt, Artificial Sequence
  Description of Artificial Sequence: Synthetic oligonucleotide
auguuagacagcggcuuau

SEQ ID NO: 141650 - RNA, 19 nt, Artificial Sequence
  Description of Artificial Sequence: Synthetic oligonucleotide
auccgcagacccugugaca

SEQ ID NO: 141651 - RNA, 19 nt, Artificial Sequence
  Description of Artificial Sequence: Synthetic oligonucleotide
ccgauugugcagcugcuug

SEQ ID NO: 141652 - RNA, 19 nt, Artificial Sequence
  Description of Artificial Sequence: Synthetic oligonucleotide
ccaagaucgcagacucucc

SEQ ID NO: 141653 - RNA, 19 nt, Artificial Sequence
  Description of Artificial Sequence: Synthetic oligonucleotide
guuggcugaucccgucaac

SEQ ID NO: 141654 - RNA, 19 nt, Artificial Sequence
  Description of Artificial Sequence: Synthetic oligonucleotide
cccaagaggauaagcugug

SEQ ID NO: 141655 - RNA, 19 nt, Artificial Sequence
  Description of Artificial Sequence: Synthetic oligonucleotide
uggacccgugccacaguaa

SEQ ID NO: 141656 - RNA, 19 nt, Artificial Sequence
  Description of Artificial Sequence: Synthetic oligonucleotide
cccgaguuucucaaucgug

SEQ ID NO: 141657 - RNA, 19 nt, Artificial Sequence
  Description of Artificial Sequence: Synthetic oligonucleotide
gagaucgggugagggugcc

SEQ ID NO: 141658 - RNA, 19 nt, Artificial Sequence
  Description of Artificial Sequence: Synthetic oligonucleotide
gagagaguuuaccgagagu

SEQ ID NO: 141659 - RNA, 19 nt, Artificial Sequence
  Description of Artificial Sequence: Synthetic oligonucleotide
cagcaaacucgguccaaga

SEQ ID NO: 141660 - RNA, 19 nt, Artificial Sequence
  Description of Artificial Sequence: Synthetic oligonucleotide
gaggaagcacauuucccuu

SEQ ID NO: 141661 - RNA, 19 nt, Artificial Sequence
  Description of Artificial Sequence: Synthetic oligonucleotide
ggcuaugccugguaggaua

SEQ ID NO: 141662 - RNA, 19 nt, Artificial Sequence
  Description of Artificial Sequence: Synthetic oligonucleotide
gccaccauuaggcagcggu

SEQ ID NO: 141663 - RNA, 19 nt, Artificial Sequence
  Description of Artificial Sequence: Synthetic oligonucleotide
ucgggagcuuugacuuagu

SEQ ID NO: 141664 - RNA, 19 nt, Artificial Sequence
  Description of Artificial Sequence: Synthetic oligonucleotide
caagggacuugaacccaga

SEQ ID NO: 141665 - RNA, 19 nt, Artificial Sequence
  Description of Artificial Sequence: Synthetic oligonucleotide
guuuaccccuaggcuuggg

SEQ ID NO: 141666 - RNA, 19 nt, Artificial Sequence
  Description of Artificial Sequence: Synthetic oligonucleotide
ucaagccaaucgggucucc

SEQ ID NO: 141667 - RNA, 19 nt, Artificial Sequence
  Description of Artificial Sequence: Synthetic oligonucleotide
cucccaccgagugcaacac

SEQ ID NO: 141668 - RNA, 19 nt, Artificial Sequence
  Description of Artificial Sequence: Synthetic oligonucleotide
ccaccauuaggcagcggug

SEQ ID NO: 141669 - RNA, 19 nt, Artificial Sequence
  Description of Artificial Sequence: Synthetic oligonucleotide
ccacgucaaagaucauccc

SEQ ID NO: 141670 - RNA, 19 nt, Artificial Sequence
  Description of Artificial Sequence: Synthetic oligonucleotide
uccgauugugcagcugcuu

SEQ ID NO: 141671 - RNA, 19 nt, Artificial Sequence
  Description of Artificial Sequence: Synthetic oligonucleotide
ucccgacgagcuccugcac

SEQ ID NO: 141672 - RNA, 19 nt, Artificial Sequence
  Description of Artificial Sequence: Synthetic oligonucleotide
gggauacuuugugaaguuc

SEQ ID NO: 141673 - RNA, 19 nt, Artificial Sequence
  Description of Artificial Sequence: Synthetic oligonucleotide
ggggucguuuugcccaagc

SEQ ID NO: 141674 - RNA, 19 nt, Artificial Sequence
  Description of Artificial Sequence: Synthetic oligonucleotide
ccgacgagcuccugcacug

SEQ ID NO: 141675 - RNA, 19 nt, Artificial Sequence
  Description of Artificial Sequence: Synthetic oligonucleotide
gagauguauggcaguaguu

SEQ ID NO: 141676 - RNA, 19 nt, Artificial Sequence
  Description of Artificial Sequence: Synthetic oligonucleotide
ggcgcuggggcacuggucu

SEQ ID NO: 141677 - RNA, 19 nt, Artificial Sequence
  Description of Artificial Sequence: Synthetic oligonucleotide
gguuuguagcgcuggcucu

SEQ ID NO: 141678 - RNA, 19 nt, Artificial Sequence
  Description of Artificial Sequence: Synthetic oligonucleotide
ugagggccuuuuccagcuu

SEQ ID NO: 141679 - RNA, 19 nt, Artificial Sequence
  Description of Artificial Sequence: Synthetic oligonucleotide
ccaaucgggucucccugag

SEQ ID NO: 141680 - RNA, 19 nt, Artificial Sequence
  Description of Artificial Sequence: Synthetic oligonucleotide
acgcucuaucuuaaagaua

SEQ ID NO: 141681 - RNA, 19 nt, Artificial Sequence
  Description of Artificial Sequence: Synthetic oligonucleotide
gugucuugaccaugcacuu

SEQ ID NO: 141682 - RNA, 19 nt, Artificial Sequence
  Description of Artificial Sequence: Synthetic oligonucleotide
ggugucauuaacacccgau

SEQ ID NO: 141683 - RNA, 19 nt, Artificial Sequence
  Description of Artificial Sequence: Synthetic oligonucleotide
caaucgggucucccugaga

SEQ ID NO: 141684 - RNA, 19 nt, Artificial Sequence
  Description of Artificial Sequence: Synthetic oligonucleotide
ggcauugugugugguggca

SEQ ID NO: 141685 - RNA, 19 nt, Artificial Sequence
  Description of Artificial Sequence: Synthetic oligonucleotide
gcuaugccugguaggauaa

SEQ ID NO: 141686 - RNA, 19 nt, Artificial Sequence
  Description of Artificial Sequence: Synthetic oligonucleotide
caccauuaggcagcggugu

SEQ ID NO: 141687 - RNA, 19 nt, Artificial Sequence
  Description of Artificial Sequence: Synthetic oligonucleotide
ggugagggugccaccauua

SEQ ID NO: 141688 - RNA, 19 nt, Artificial Sequence
  Description of Artificial Sequence: Synthetic oligonucleotide
cacccgaugggaucccugu

SEQ ID NO: 141689 - RNA, 19 nt, Artificial Sequence
  Description of Artificial Sequence: Synthetic oligonucleotide
gugcaguaguaagcaucac

SEQ ID NO: 141690 - RNA, 19 nt, Artificial Sequence
  Description of Artificial Sequence: Synthetic oligonucleotide
gaagggucaggggucguuu

SEQ ID NO: 141691 - RNA, 19 nt, Artificial Sequence
  Description of Artificial Sequence: Synthetic oligonucleotide
ggugcuucagguggggcua

SEQ ID NO: 141692 - RNA, 19 nt, Artificial Sequence
  Description of Artificial Sequence: Synthetic oligonucleotide
cacucggccccaggaccgg

SEQ ID NO: 141693 - RNA, 19 nt, Artificial Sequence
  Description of Artificial Sequence: Synthetic oligonucleotide
guuuaccgagagucaggau

SEQ ID NO: 141694 - RNA, 19 nt, Artificial Sequence
  Description of Artificial Sequence: Synthetic oligonucleotide
ggagggaauauccggucuu

SEQ ID NO: 141695 - RNA, 19 nt, Artificial Sequence
  Description of Artificial Sequence: Synthetic oligonucleotide
cguuauauaguaggcaggu

SEQ ID NO: 141696 - RNA, 19 nt, Artificial Sequence
  Description of Artificial Sequence: Synthetic oligonucleotide
gccaaguguggcacugaac

SEQ ID NO: 141697 - RNA, 19 nt, Artificial Sequence
  Description of Artificial Sequence: Synthetic oligonucleotide
uccuuucggcugggagucu

SEQ ID NO: 141698 - RNA, 19 nt, Artificial Sequence
  Description of Artificial Sequence: Synthetic oligonucleotide
acgcaugcuugaguucgua

SEQ ID NO: 141699 - RNA, 19 nt, Artificial Sequence
  Description of Artificial Sequence: Synthetic oligonucleotide
ccugagauguauggcagua

SEQ ID NO: 141700 - RNA, 19 nt, Artificial Sequence
  Description of Artificial Sequence: Synthetic oligonucleotide
cugugguguggaggcacca

SEQ ID NO: 141701 - RNA, 19 nt, Artificial Sequence
  Description of Artificial Sequence: Synthetic oligonucleotide
caggggucguuuugcccaa

SEQ ID NO: 141702 - RNA, 19 nt, Artificial Sequence
  Description of Artificial Sequence: Synthetic oligonucleotide
ccugucuauauagaacccu

SEQ ID NO: 141703 - RNA, 19 nt, Artificial Sequence
  Description of Artificial Sequence: Synthetic oligonucleotide
gcaacacggacaagggacu

SEQ ID NO: 141704 - RNA, 19 nt, Artificial Sequence
  Description of Artificial Sequence: Synthetic oligonucleotide
ccccaaacgccaugccauc

SEQ ID NO: 141705 - RNA, 19 nt, Artificial Sequence
  Description of Artificial Sequence: Synthetic oligonucleotide
gacgcaugcuugaguucgu

SEQ ID NO: 141706 - RNA, 19 nt, Artificial Sequence
  Description of Artificial Sequence: Synthetic oligonucleotide
cuaugccugguaggauaaa

SEQ ID NO: 141707 - RNA, 19 nt, Artificial Sequence
  Description of Artificial Sequence: Synthetic oligonucleotide
cguuuugcccaagccuuug

SEQ ID NO: 141708 - RNA, 19 nt, Artificial Sequence
  Description of Artificial Sequence: Synthetic oligonucleotide
cauagacgauguacucguu

SEQ ID NO: 141709 - RNA, 19 nt, Artificial Sequence
  Description of Artificial Sequence: Synthetic oligonucleotide
gggcggagagcagcucuug

SEQ ID NO: 141710 - RNA, 19 nt, Artificial Sequence
  Description of Artificial Sequence: Synthetic oligonucleotide
gccgugucuaucagggcua

SEQ ID NO: 141711 - RNA, 19 nt, Artificial Sequence
  Description of Artificial Sequence: Synthetic oligonucleotide
gcccuuuaaccugucuaua

SEQ ID NO: 141712 - RNA, 19 nt, Artificial Sequence
  Description of Artificial Sequence: Synthetic oligonucleotide
ggggcuauccgcagacccu

SEQ ID NO: 141713 - RNA, 19 nt, Artificial Sequence
  Description of Artificial Sequence: Synthetic oligonucleotide
cccucacgcucuaucuuaa

SEQ ID NO: 141714 - RNA, 19 nt, Artificial Sequence
  Description of Artificial Sequence: Synthetic oligonucleotide
cccucacguuggcugcuug

SEQ ID NO: 141715 - RNA, 19 nt, Artificial Sequence
  Description of Artificial Sequence: Synthetic oligonucleotide
acccucacguuggcugcuu

SEQ ID NO: 141716 - RNA, 19 nt, Artificial Sequence
  Description of Artificial Sequence: Synthetic oligonucleotide
ggcuauccgcagacccugu

SEQ ID NO: 141717 - RNA, 19 nt, Artificial Sequence
  Description of Artificial Sequence: Synthetic oligonucleotide
ccgugucuaucagggcuau

SEQ ID NO: 141718 - RNA, 19 nt, Artificial Sequence
  Description of Artificial Sequence: Synthetic oligonucleotide
gcgguguggcugagguuuu

SEQ ID NO: 141719 - RNA, 19 nt, Artificial Sequence
  Description of Artificial Sequence: Synthetic oligonucleotide
uacgaaaucagaaggaagg

SEQ ID NO: 141720 - RNA, 19 nt, Artificial Sequence
  Description of Artificial Sequence: Synthetic oligonucleotide
aaugaagugguccuugcuc

SEQ ID NO: 141721 - RNA, 19 nt, Artificial Sequence
  Description of Artificial Sequence: Synthetic oligonucleotide
uguacuacaguaaugcuga

SEQ ID NO: 141722 - RNA, 19 nt, Artificial Sequence
  Description of Artificial Sequence: Synthetic oligonucleotide
uucauuggaaucuuuuggg

SEQ ID NO: 141723 - RNA, 19 nt, Artificial Sequence
  Description of Artificial Sequence: Synthetic oligonucleotide
aauuagaaggcugaaaagu

SEQ ID NO: 141724 - RNA, 19 nt, Artificial Sequence
  Description of Artificial Sequence: Synthetic oligonucleotide
aguucaccaauguacaccg

SEQ ID NO: 141725 - RNA, 19 nt, Artificial Sequence
  Description of Artificial Sequence: Synthetic oligonucleotide
aguaguaucacaaugucug

SEQ ID NO: 141726 - RNA, 19 nt, Artificial Sequence
  Description of Artificial Sequence: Synthetic oligonucleotide
ucuaccuccauuaagguuu

SEQ ID NO: 141727 - RNA, 19 nt, Artificial Sequence
  Description of Artificial Sequence: Synthetic oligonucleotide
aguuaggcuaaauaacuuc

SEQ ID NO: 141728 - RNA, 19 nt, Artificial Sequence
  Description of Artificial Sequence: Synthetic oligonucleotide
cacauacgaaaucagaagg

SEQ ID NO: 141729 - RNA, 19 nt, Artificial Sequence
  Description of Artificial Sequence: Synthetic oligonucleotide
aaaacuuacaagagugggg

SEQ ID NO: 141730 - RNA, 19 nt, Artificial Sequence
  Description of Artificial Sequence: Synthetic oligonucleotide
auagccgacacccugcugg

SEQ ID NO: 141731 - RNA, 19 nt, Artificial Sequence
  Description of Artificial Sequence: Synthetic oligonucleotide
ucugaaugccuuuuaguag

SEQ ID NO: 141732 - RNA, 19 nt, Artificial Sequence
  Description of Artificial Sequence: Synthetic oligonucleotide
ugcuguacaaacucuaaug

SEQ ID NO: 141733 - RNA, 19 nt, Artificial Sequence
  Description of Artificial Sequence: Synthetic oligonucleotide
uucucuuauacuagauggg

SEQ ID NO: 141734 - RNA, 19 nt, Artificial Sequence
  Description of Artificial Sequence: Synthetic oligonucleotide
uuaguacggaggaaguccg

SEQ ID NO: 141735 - RNA, 19 nt, Artificial Sequence
  Description of Artificial Sequence: Synthetic oligonucleotide
ugaaaggcuaagcaaguca

SEQ ID NO: 141736 - RNA, 19 nt, Artificial Sequence
  Description of Artificial Sequence: Synthetic oligonucleotide
aagacggcaauaagggucc

SEQ ID NO: 141737 - RNA, 19 nt, Artificial Sequence
  Description of Artificial Sequence: Synthetic oligonucleotide
aguaucuguaaagagugac

SEQ ID NO: 141738 - RNA, 19 nt, Artificial Sequence
  Description of Artificial Sequence: Synthetic oligonucleotide
aacucuaauguccuggcaa

SEQ ID NO: 141739 - RNA, 19 nt, Artificial Sequence
  Description of Artificial Sequence: Synthetic oligonucleotide
uuaguaguaaacacauagu

SEQ ID NO: 141740 - RNA, 19 nt, Artificial Sequence
  Description of Artificial Sequence: Synthetic oligonucleotide
caggcuauaccacucaucc

SEQ ID NO: 141741 - RNA, 19 nt, Artificial Sequence
  Description of Artificial Sequence: Synthetic oligonucleotide
uauagugcugguacaaaac

SEQ ID NO: 141742 - RNA, 19 nt, Artificial Sequence
  Description of Artificial Sequence: Synthetic oligonucleotide
caaaacuuacaagaguggg

SEQ ID NO: 141743 - RNA, 19 nt, Artificial Sequence
  Description of Artificial Sequence: Synthetic oligonucleotide
augaccuuauuccagcgag

SEQ ID NO: 141744 - RNA, 19 nt, Artificial Sequence
  Description of Artificial Sequence: Synthetic oligonucleotide
agugguugaaucuauuuaa

SEQ ID NO: 141745 - RNA, 19 nt, Artificial Sequence
  Description of Artificial Sequence: Synthetic oligonucleotide
acaagaguggccccuagag

SEQ ID NO: 141746 - RNA, 19 nt, Artificial Sequence
  Description of Artificial Sequence: Synthetic oligonucleotide
auuacagcggggcugagga

SEQ ID NO: 141747 - RNA, 19 nt, Artificial Sequence
  Description of Artificial Sequence: Synthetic oligonucleotide
agggccuggguucacauac

SEQ ID NO: 141748 - RNA, 19 nt, Artificial Sequence
  Description of Artificial Sequence: Synthetic oligonucleotide
aaccaucucaguuaggcua

SEQ ID NO: 141749 - RNA, 19 nt, Artificial Sequence
  Description of Artificial Sequence: Synthetic oligonucleotide
ucccauuggauuccugugg

SEQ ID NO: 141750 - RNA, 19 nt, Artificial Sequence
  Description of Artificial Sequence: Synthetic oligonucleotide
cuguacuacaguaaugcug

SEQ ID NO: 141751 - RNA, 19 nt, Artificial Sequence
  Description of Artificial Sequence: Synthetic oligonucleotide
acaugcauccccgaaauag

SEQ ID NO: 141752 - RNA, 19 nt, Artificial Sequence
  Description of Artificial Sequence: Synthetic oligonucleotide
ucucuuauacuagaugggc

SEQ ID NO: 141753 - RNA, 19 nt, Artificial Sequence
  Description of Artificial Sequence: Synthetic oligonucleotide
uaggcuaaauaacuucaug

SEQ ID NO: 141754 - RNA, 19 nt, Artificial Sequence
  Description of Artificial Sequence: Synthetic oligonucleotide
ggaagcauaucuuacgggc

SEQ ID NO: 141755 - RNA, 19 nt, Artificial Sequence
  Description of Artificial Sequence: Synthetic oligonucleotide
uuugcaguuaaaagguuua

SEQ ID NO: 141756 - RNA, 19 nt, Artificial Sequence
  Description of Artificial Sequence: Synthetic oligonucleotide
guuaguacggaggaagucc

SEQ ID NO: 141757 - RNA, 19 nt, Artificial Sequence
  Description of Artificial Sequence: Synthetic oligonucleotide
agguguaucaacuuuucau

SEQ ID NO: 141758 - RNA, 19 nt, Artificial Sequence
  Description of Artificial Sequence: Synthetic oligonucleotide
agguagaacgaguccacac

SEQ ID NO: 141759 - RNA, 19 nt, Artificial Sequence
  Description of Artificial Sequence: Synthetic oligonucleotide
ugguugaaucuauuuaaca

SEQ ID NO: 141760 - RNA, 19 nt, Artificial Sequence
  Description of Artificial Sequence: Synthetic oligonucleotide
auagcccagacgaagacgg

SEQ ID NO: 141761 - RNA, 19 nt, Artificial Sequence
  Description of Artificial Sequence: Synthetic oligonucleotide
agaauggagacuuccugug

SEQ ID NO: 141762 - RNA, 19 nt, Artificial Sequence
  Description of Artificial Sequence: Synthetic oligonucleotide
acaugaaugaagugguccu

SEQ ID NO: 141763 - RNA, 19 nt, Artificial Sequence
  Description of Artificial Sequence: Synthetic oligonucleotide
cuagaccccaccgagaagc

SEQ ID NO: 141764 - RNA, 19 nt, Artificial Sequence
  Description of Artificial Sequence: Synthetic oligonucleotide
aucucaagaagucccagga

SEQ ID NO: 141765 - RNA, 19 nt, Artificial Sequence
  Description of Artificial Sequence: Synthetic oligonucleotide
gaugcaaccugagaccuag

SEQ ID NO: 141766 - RNA, 19 nt, Artificial Sequence
  Description of Artificial Sequence: Synthetic oligonucleotide
aagucuuaaaucugucuua

SEQ ID NO: 141767 - RNA, 19 nt, Artificial Sequence
  Description of Artificial Sequence: Synthetic oligonucleotide
aucacucaagccgagcuac

SEQ ID NO: 141768 - RNA, 19 nt, Artificial Sequence
  Description of Artificial Sequence: Synthetic oligonucleotide
aagaggacgucugcuuacc

SEQ ID NO: 141769 - RNA, 19 nt, Artificial Sequence
  Description of Artificial Sequence: Synthetic oligonucleotide
ccagugagagucuagaccc

SEQ ID NO: 141770 - RNA, 19 nt, Artificial Sequence
  Description of Artificial Sequence: Synthetic oligonucleotide
uuugccuguacuacaguaa

SEQ ID NO: 141771 - RNA, 19 nt, Artificial Sequence
  Description of Artificial Sequence: Synthetic oligonucleotide
aguaaugcugaggcggccc

SEQ ID NO: 141772 - RNA, 19 nt, Artificial Sequence
  Description of Artificial Sequence: Synthetic oligonucleotide
uacacuaagggaaccacuu

SEQ ID NO: 141773 - RNA, 19 nt, Artificial Sequence
  Description of Artificial Sequence: Synthetic oligonucleotide
uucuccauuuugcaguuaa

SEQ ID NO: 141774 - RNA, 19 nt, Artificial Sequence
  Description of Artificial Sequence: Synthetic oligonucleotide
uggaugaccuuauuccagc

SEQ ID NO: 141775 - RNA, 19 nt, Artificial Sequence
  Description of Artificial Sequence: Synthetic oligonucleotide
aguaucacaaugucugaau

SEQ ID NO: 141776 - RNA, 19 nt, Artificial Sequence
  Description of Artificial Sequence: Synthetic oligonucleotide
aggacgucugcuuaccaag

SEQ ID NO: 141777 - RNA, 19 nt, Artificial Sequence
  Description of Artificial Sequence: Synthetic oligonucleotide
uuacacuaagggaaccacu

SEQ ID NO: 141778 - RNA, 19 nt, Artificial Sequence
  Description of Artificial Sequence: Synthetic oligonucleotide
uguaucaacuuuucaucuc

SEQ ID NO: 141779 - RNA, 19 nt, Artificial Sequence
  Description of Artificial Sequence: Synthetic oligonucleotide
agcaaauggugaugcuccc

SEQ ID NO: 141780 - RNA, 19 nt, Artificial Sequence
  Description of Artificial Sequence: Synthetic oligonucleotide
ugaccuuauuccagcgagg

SEQ ID NO: 141781 - RNA, 19 nt, Artificial Sequence
  Description of Artificial Sequence: Synthetic oligonucleotide
uaucuuacgggcccaggac

SEQ ID NO: 141782 - RNA, 19 nt, Artificial Sequence
  Description of Artificial Sequence: Synthetic oligonucleotide
ggcaauaaggguccauucg

SEQ ID NO: 141783 - RNA, 19 nt, Artificial Sequence
  Description of Artificial Sequence: Synthetic oligonucleotide
aagcaagucaugcucugau

SEQ ID NO: 141784 - RNA, 19 nt, Artificial Sequence
  Description of Artificial Sequence: Synthetic oligonucleotide
aaacuagacaagaggucag

SEQ ID NO: 141785 - RNA, 19 nt, Artificial Sequence
  Description of Artificial Sequence: Synthetic oligonucleotide
acgucugcuuaccaagcac

SEQ ID NO: 141786 - RNA, 19 nt, Artificial Sequence
  Description of Artificial Sequence: Synthetic oligonucleotide
ugagagucuagaccccacc

SEQ ID NO: 141787 - RNA, 19 nt, Artificial Sequence
  Description of Artificial Sequence: Synthetic oligonucleotide
acuagacaagaggucagac

SEQ ID NO: 141788 - RNA, 19 nt, Artificial Sequence
  Description of Artificial Sequence: Synthetic oligonucleotide
acucauccacccuacaaga

SEQ ID NO: 141789 - RNA, 19 nt, Artificial Sequence
  Description of Artificial Sequence: Synthetic oligonucleotide
aaacucuaauguccuggca

SEQ ID NO: 141790 - RNA, 19 nt, Artificial Sequence
  Description of Artificial Sequence: Synthetic oligonucleotide
uuaggcuaaauaacuucau

SEQ ID NO: 141791 - RNA, 19 nt, Artificial Sequence
  Description of Artificial Sequence: Synthetic oligonucleotide
gcauccccgaaauaggugg

SEQ ID NO: 141792 - RNA, 19 nt, Artificial Sequence
  Description of Artificial Sequence: Synthetic oligonucleotide
agagcgaauuacuucccug

SEQ ID NO: 141793 - RNA, 19 nt, Artificial Sequence
  Description of Artificial Sequence: Synthetic oligonucleotide
gguguuaguacggaggaag

SEQ ID NO: 141794 - RNA, 19 nt, Artificial Sequence
  Description of Artificial Sequence: Synthetic oligonucleotide
gcaagucaugcucugaugc

SEQ ID NO: 141795 - RNA, 19 nt, Artificial Sequence
  Description of Artificial Sequence: Synthetic oligonucleotide
agcgaauuacuucccuguc

SEQ ID NO: 141796 - RNA, 19 nt, Artificial Sequence
  Description of Artificial Sequence: Synthetic oligonucleotide
ugccguaauucuuugcuaa

SEQ ID NO: 141797 - RNA, 19 nt, Artificial Sequence
  Description of Artificial Sequence: Synthetic oligonucleotide
ucauucacauggugccacg

SEQ ID NO: 141798 - RNA, 19 nt, Artificial Sequence
  Description of Artificial Sequence: Synthetic oligonucleotide
gguagaacgaguccacacc

SEQ ID NO: 141799 - RNA, 19 nt, Artificial Sequence
  Description of Artificial Sequence: Synthetic oligonucleotide
auacgaaaucagaaggaag

SEQ ID NO: 141800 - RNA, 19 nt, Artificial Sequence
  Description of Artificial Sequence: Synthetic oligonucleotide
ugggcuauacccagaugca

SEQ ID NO: 141801 - RNA, 19 nt, Artificial Sequence
  Description of Artificial Sequence: Synthetic oligonucleotide
ggcuauaccacucauccuc

SEQ ID NO: 141802 - RNA, 19 nt, Artificial Sequence
  Description of Artificial Sequence: Synthetic oligonucleotide
cucccauucaggcuauacc

SEQ ID NO: 141803 - RNA, 19 nt, Artificial Sequence
  Description of Artificial Sequence: Synthetic oligonucleotide
aucucaguuaggcuaaaua

SEQ ID NO: 141804 - RNA, 19 nt, Artificial Sequence
  Description of Artificial Sequence: Synthetic oligonucleotide
uugccuguacuacaguaau

SEQ ID NO: 141805 - RNA, 19 nt, Artificial Sequence
  Description of Artificial Sequence: Synthetic oligonucleotide
aagggguacguggaugguc

SEQ ID NO: 141806 - RNA, 19 nt, Artificial Sequence
  Description of Artificial Sequence: Synthetic oligonucleotide
aacuuugcuaccacucuga

SEQ ID NO: 141807 - RNA, 19 nt, Artificial Sequence
  Description of Artificial Sequence: Synthetic oligonucleotide
aagccgagcuacaguaugg

SEQ ID NO: 141808 - RNA, 19 nt, Artificial Sequence
  Description of Artificial Sequence: Synthetic oligonucleotide
ugcagcagguuacaacuuc

SEQ ID NO: 141809 - RNA, 19 nt, Artificial Sequence
  Description of Artificial Sequence: Synthetic oligonucleotide
gggucuaggacucuucacc

SEQ ID NO: 141810 - RNA, 19 nt, Artificial Sequence
  Description of Artificial Sequence: Synthetic oligonucleotide
cacauagccgacacccugc

SEQ ID NO: 141811 - RNA, 19 nt, Artificial Sequence
  Description of Artificial Sequence: Synthetic oligonucleotide
cuucucucaauuggguagg

SEQ ID NO: 141812 - RNA, 19 nt, Artificial Sequence
  Description of Artificial Sequence: Synthetic oligonucleotide
cuugacucauccacccuac

SEQ ID NO: 141813 - RNA, 19 nt, Artificial Sequence
  Description of Artificial Sequence: Synthetic oligonucleotide
caagguagaacgaguccac

SEQ ID NO: 141814 - RNA, 19 nt, Artificial Sequence
  Description of Artificial Sequence: Synthetic oligonucleotide
aucuuacgggcccaggacu

SEQ ID NO: 141815 - RNA, 19 nt, Artificial Sequence
  Description of Artificial Sequence: Synthetic oligonucleotide
cuaagcaagucaugcucug

SEQ ID NO: 141816 - RNA, 19 nt, Artificial Sequence
  Description of Artificial Sequence: Synthetic oligonucleotide
cacuuaaggagguuccguc

SEQ ID NO: 141817 - RNA, 19 nt, Artificial Sequence
  Description of Artificial Sequence: Synthetic oligonucleotide
acucuaauguccuggcaau

SEQ ID NO: 141818 - RNA, 19 nt, Artificial Sequence
  Description of Artificial Sequence: Synthetic oligonucleotide
ugcuuguuaccaccauccc

SEQ ID NO: 141819 - RNA, 19 nt, Artificial Sequence
  Description of Artificial Sequence: Synthetic oligonucleotide
gaaggcucgcucaucgaag

SEQ ID NO: 141820 - RNA, 19 nt, Artificial Sequence
  Description of Artificial Sequence: Synthetic oligonucleotide
acauacgaaaucagaagga

SEQ ID NO: 141821 - RNA, 19 nt, Artificial Sequence
  Description of Artificial Sequence: Synthetic oligonucleotide
cuuauuaaauuagaaggcu

SEQ ID NO: 141822 - RNA, 19 nt, Artificial Sequence
  Description of Artificial Sequence: Synthetic oligonucleotide
uggguucacauacgaaauc

SEQ ID NO: 141823 - RNA, 19 nt, Artificial Sequence
  Description of Artificial Sequence: Synthetic oligonucleotide
augaaugaagugguccuug

SEQ ID NO: 141824 - RNA, 19 nt, Artificial Sequence
  Description of Artificial Sequence: Synthetic oligonucleotide
acaccaguaucuguaaaga

SEQ ID NO: 141825 - RNA, 19 nt, Artificial Sequence
  Description of Artificial Sequence: Synthetic oligonucleotide
gaugaccuuauuccagcga

SEQ ID NO: 141826 - RNA, 19 nt, Artificial Sequence
  Description of Artificial Sequence: Synthetic oligonucleotide
ugccuguacuacaguaaug

SEQ ID NO: 141827 - RNA, 19 nt, Artificial Sequence
  Description of Artificial Sequence: Synthetic oligonucleotide
agaaggcucgcucaucgaa

SEQ ID NO: 141828 - RNA, 19 nt, Artificial Sequence
  Description of Artificial Sequence: Synthetic oligonucleotide
uuacaacuucagccaacca

SEQ ID NO: 141829 - RNA, 19 nt, Artificial Sequence
  Description of Artificial Sequence: Synthetic oligonucleotide
gccuguacuacaguaaugc

SEQ ID NO: 141830 - RNA, 19 nt, Artificial Sequence
  Description of Artificial Sequence: Synthetic oligonucleotide
ugagaccuagagacaggug

SEQ ID NO: 141831 - RNA, 19 nt, Artificial Sequence
  Description of Artificial Sequence: Synthetic oligonucleotide
uuauacuagaugggcucug

SEQ ID NO: 141832 - RNA, 19 nt, Artificial Sequence
  Description of Artificial Sequence: Synthetic oligonucleotide
ucugcuuaccaagcacaag

SEQ ID NO: 141833 - RNA, 19 nt, Artificial Sequence
  Description of Artificial Sequence: Synthetic oligonucleotide
agucuuaaaucugucuuaa

SEQ ID NO: 141834 - RNA, 19 nt, Artificial Sequence
  Description of Artificial Sequence: Synthetic oligonucleotide
auucgagucaugccguaau

SEQ ID NO: 141835 - RNA, 19 nt, Artificial Sequence
  Description of Artificial Sequence: Synthetic oligonucleotide
guuacacuaagggaaccac

SEQ ID NO: 141836 - RNA, 19 nt, Artificial Sequence
  Description of Artificial Sequence: Synthetic oligonucleotide
acagacgugcagcagguua

SEQ ID NO: 141837 - RNA, 19 nt, Artificial Sequence
  Description of Artificial Sequence: Synthetic oligonucleotide
ucaugccguaauucuuugc

SEQ ID NO: 141838 - RNA, 19 nt, Artificial Sequence
  Description of Artificial Sequence: Synthetic oligonucleotide
uggcagcaaauggugaugc

SEQ ID NO: 141839 - RNA, 19 nt, Artificial Sequence
  Description of Artificial Sequence: Synthetic oligonucleotide
ggucuaggacucuucaccc

SEQ ID NO: 141840 - RNA, 19 nt, Artificial Sequence
  Description of Artificial Sequence: Synthetic oligonucleotide
acagagcgaauuacuuccc

SEQ ID NO: 141841 - RNA, 19 nt, Artificial Sequence
  Description of Artificial Sequence: Synthetic oligonucleotide
ucuuacgggcccaggacua

SEQ ID NO: 141842 - RNA, 19 nt, Artificial Sequence
  Description of Artificial Sequence: Synthetic oligonucleotide
uguuaguacggaggaaguc

SEQ ID NO: 141843 - RNA, 19 nt, Artificial Sequence
  Description of Artificial Sequence: Synthetic oligonucleotide
aauguacaccggccgcgcu

SEQ ID NO: 141844 - RNA, 19 nt, Artificial Sequence
  Description of Artificial Sequence: Synthetic oligonucleotide
cauccccgaaauagguggg

SEQ ID NO: 141845 - RNA, 19 nt, Artificial Sequence
  Description of Artificial Sequence: Synthetic oligonucleotide
acaagaggacgucugcuua

SEQ ID NO: 141846 - RNA, 19 nt, Artificial Sequence
  Description of Artificial Sequence: Synthetic oligonucleotide
ugugcugugggaguuucau

SEQ ID NO: 141847 - RNA, 19 nt, Artificial Sequence
  Description of Artificial Sequence: Synthetic oligonucleotide
aguaacuccuauagugcug

SEQ ID NO: 141848 - RNA, 19 nt, Artificial Sequence
  Description of Artificial Sequence: Synthetic oligonucleotide
uguacaccggccgcgcugc

SEQ ID NO: 141849 - RNA, 19 nt, Artificial Sequence
  Description of Artificial Sequence: Synthetic oligonucleotide
cucaagccgagcuacagua

SEQ ID NO: 141850 - RNA, 19 nt, Artificial Sequence
  Description of Artificial Sequence: Synthetic oligonucleotide
guaguaucacaaugucuga

SEQ ID NO: 141851 - RNA, 19 nt, Artificial Sequence
  Description of Artificial Sequence: Synthetic oligonucleotide
ugcaugcccacccuagauu

SEQ ID NO: 141852 - RNA, 19 nt, Artificial Sequence
  Description of Artificial Sequence: Synthetic oligonucleotide
ggaagagucuguauucagc

SEQ ID NO: 141853 - RNA, 19 nt, Artificial Sequence
  Description of Artificial Sequence: Synthetic oligonucleotide
cauacgaaaucagaaggaa

SEQ ID NO: 141854 - RNA, 19 nt, Artificial Sequence
  Description of Artificial Sequence: Synthetic oligonucleotide
caagcuaugcggucgucca

SEQ ID NO: 141855 - RNA, 19 nt, Artificial Sequence
  Description of Artificial Sequence: Synthetic oligonucleotide
ucgagucaugccguaauuc

SEQ ID NO: 141856 - RNA, 19 nt, Artificial Sequence
  Description of Artificial Sequence: Synthetic oligonucleotide
gacuaggugagggccuggg

SEQ ID NO: 141857 - RNA, 19 nt, Artificial Sequence
  Description of Artificial Sequence: Synthetic oligonucleotide
auguacaccggccgcgcug

SEQ ID NO: 141858 - RNA, 19 nt, Artificial Sequence
  Description of Artificial Sequence: Synthetic oligonucleotide
uuccagcgaggguucuugg

SEQ ID NO: 141859 - RNA, 19 nt, Artificial Sequence
  Description of Artificial Sequence: Synthetic oligonucleotide
cuaauguccuggcaaucca

SEQ ID NO: 141860 - RNA, 19 nt, Artificial Sequence
  Description of Artificial Sequence: Synthetic oligonucleotide
caacccuuaccuccuuaag

SEQ ID NO: 141861 - RNA, 19 nt, Artificial Sequence
  Description of Artificial Sequence: Synthetic oligonucleotide
ugggucuaggacucuucac

SEQ ID NO: 141862 - RNA, 19 nt, Artificial Sequence
  Description of Artificial Sequence: Synthetic oligonucleotide
ucaauuggguaggugucau

SEQ ID NO: 141863 - RNA, 19 nt, Artificial Sequence
  Description of Artificial Sequence: Synthetic oligonucleotide
caugccguaauucuuugcu

SEQ ID NO: 141864 - RNA, 19 nt, Artificial Sequence
  Description of Artificial Sequence: Synthetic oligonucleotide
ugguccuugcucaacccuu

SEQ ID NO: 141865 - RNA, 19 nt, Artificial Sequence
  Description of Artificial Sequence: Synthetic oligonucleotide
gcgaauuacuucccugucc

SEQ ID NO: 141866 - RNA, 19 nt, Artificial Sequence
  Description of Artificial Sequence: Synthetic oligonucleotide
gacgucugcuuaccaagca

SEQ ID NO: 141867 - RNA, 19 nt, Artificial Sequence
  Description of Artificial Sequence: Synthetic oligonucleotide
cauuacagcggggcugagg

SEQ ID NO: 141868 - RNA, 19 nt, Artificial Sequence
  Description of Artificial Sequence: Synthetic oligonucleotide
uucgagucaugccguaauu

SEQ ID NO: 141869 - RNA, 19 nt, Artificial Sequence
  Description of Artificial Sequence: Synthetic oligonucleotide
ugguuacacuaagggaacc

SEQ ID NO: 141870 - RNA, 19 nt, Artificial Sequence
  Description of Artificial Sequence: Synthetic oligonucleotide
cauaucuuacgggcccagg

SEQ ID NO: 141871 - RNA, 19 nt, Artificial Sequence
  Description of Artificial Sequence: Synthetic oligonucleotide
gaugcaugcccacccuaga

SEQ ID NO: 141872 - RNA, 19 nt, Artificial Sequence
  Description of Artificial Sequence: Synthetic oligonucleotide
acccagaugcaugcccacc

SEQ ID NO: 141873 - RNA, 19 nt, Artificial Sequence
  Description of Artificial Sequence: Synthetic oligonucleotide
ucacucaagccgagcuaca

SEQ ID NO: 141874 - RNA, 19 nt, Artificial Sequence
  Description of Artificial Sequence: Synthetic oligonucleotide
cuggauuacagugaguggu

SEQ ID NO: 141875 - RNA, 19 nt, Artificial Sequence
  Description of Artificial Sequence: Synthetic oligonucleotide
uuacgggcccaggacuagg

SEQ ID NO: 141876 - RNA, 19 nt, Artificial Sequence
  Description of Artificial Sequence: Synthetic oligonucleotide
agcuaugcggucguccaug

SEQ ID NO: 141877 - RNA, 19 nt, Artificial Sequence
  Description of Artificial Sequence: Synthetic oligonucleotide
gaggacgucugcuuaccaa

SEQ ID NO: 141878 - RNA, 19 nt, Artificial Sequence
  Description of Artificial Sequence: Synthetic oligonucleotide
cacuuggccuugcuucagg

SEQ ID NO: 141879 - RNA, 19 nt, Artificial Sequence
  Description of Artificial Sequence: Synthetic oligonucleotide
augcaugcccacccuagau

SEQ ID NO: 141880 - RNA, 19 nt, Artificial Sequence
  Description of Artificial Sequence: Synthetic oligonucleotide
cucuuauacuagaugggcu

SEQ ID NO: 141881 - RNA, 19 nt, Artificial Sequence
  Description of Artificial Sequence: Synthetic oligonucleotide
cccgaaauaggugggaaag

SEQ ID NO: 141882 - RNA, 19 nt, Artificial Sequence
  Description of Artificial Sequence: Synthetic oligonucleotide
ggguucacauacgaaauca

SEQ ID NO: 141883 - RNA, 19 nt, Artificial Sequence
  Description of Artificial Sequence: Synthetic oligonucleotide
aaccugcaaguaagugcac

SEQ ID NO: 141884 - RNA, 19 nt, Artificial Sequence
  Description of Artificial Sequence: Synthetic oligonucleotide
acaccggccgcgcugcgug

SEQ ID NO: 141885 - RNA, 19 nt, Artificial Sequence
  Description of Artificial Sequence: Synthetic oligonucleotide
ggcuauacccagaugcaug

SEQ ID NO: 141886 - RNA, 19 nt, Artificial Sequence
  Description of Artificial Sequence: Synthetic oligonucleotide
aagcuaugcggucguccau

SEQ ID NO: 141887 - RNA, 19 nt, Artificial Sequence
  Description of Artificial Sequence: Synthetic oligonucleotide
gcuuguuaccaccauccca

SEQ ID NO: 141888 - RNA, 19 nt, Artificial Sequence
  Description of Artificial Sequence: Synthetic oligonucleotide
caauguacaccggccgcgc

SEQ ID NO: 141889 - RNA, 19 nt, Artificial Sequence
  Description of Artificial Sequence: Synthetic oligonucleotide
ccuggguucacauacgaaa

SEQ ID NO: 141890 - RNA, 19 nt, Artificial Sequence
  Description of Artificial Sequence: Synthetic oligonucleotide
cacucaagccgagcuacag

SEQ ID NO: 141891 - RNA, 19 nt, Artificial Sequence
  Description of Artificial Sequence: Synthetic oligonucleotide
aggcuauaccacucauccu

SEQ ID NO: 141892 - RNA, 19 nt, Artificial Sequence
  Description of Artificial Sequence: Synthetic oligonucleotide
agaggacgucugcuuacca

SEQ ID NO: 141893 - RNA, 19 nt, Artificial Sequence
  Description of Artificial Sequence: Synthetic oligonucleotide
uccugugccuggcuggauu

SEQ ID NO: 141894 - RNA, 19 nt, Artificial Sequence
  Description of Artificial Sequence: Synthetic oligonucleotide
guaaugcugaggcggccca

SEQ ID NO: 141895 - RNA, 19 nt, Artificial Sequence
  Description of Artificial Sequence: Synthetic oligonucleotide
cacgucagaccacagacgu

SEQ ID NO: 141896 - RNA, 19 nt, Artificial Sequence
  Description of Artificial Sequence: Synthetic oligonucleotide
gcacugacaagcaugcuuc

SEQ ID NO: 141897 - RNA, 19 nt, Artificial Sequence
  Description of Artificial Sequence: Synthetic oligonucleotide
cccauuggauuccuguggc

SEQ ID NO: 141898 - RNA, 19 nt, Artificial Sequence
  Description of Artificial Sequence: Synthetic oligonucleotide
augcauccccgaaauaggu

SEQ ID NO: 141899 - RNA, 19 nt, Artificial Sequence
  Description of Artificial Sequence: Synthetic oligonucleotide
cucauuacagcggggcuga

SEQ ID NO: 141900 - RNA, 19 nt, Artificial Sequence
  Description of Artificial Sequence: Synthetic oligonucleotide
ggaguucaccaauguacac

SEQ ID NO: 141901 - RNA, 19 nt, Artificial Sequence
  Description of Artificial Sequence: Synthetic oligonucleotide
caguaguaucacaaugucu

SEQ ID NO: 141902 - RNA, 19 nt, Artificial Sequence
  Description of Artificial Sequence: Synthetic oligonucleotide
aggucagaccugcuggauu

SEQ ID NO: 141903 - RNA, 19 nt, Artificial Sequence
  Description of Artificial Sequence: Synthetic oligonucleotide
ugaugcaaccugagaccua

SEQ ID NO: 141904 - RNA, 19 nt, Artificial Sequence
  Description of Artificial Sequence: Synthetic oligonucleotide
agucuagaauggagacuuc

SEQ ID NO: 141905 - RNA, 19 nt, Artificial Sequence
  Description of Artificial Sequence: Synthetic oligonucleotide
ggggucucaggccuuauaa

SEQ ID NO: 141906 - RNA, 19 nt, Artificial Sequence
  Description of Artificial Sequence: Synthetic oligonucleotide
ggucagaccugcuggauua

SEQ ID NO: 141907 - RNA, 19 nt, Artificial Sequence
  Description of Artificial Sequence: Synthetic oligonucleotide
aggacuaggugagggccug

SEQ ID NO: 141908 - RNA, 19 nt, Artificial Sequence
  Description of Artificial Sequence: Synthetic oligonucleotide
uccccgaaauaggugggaa

SEQ ID NO: 141909 - RNA, 19 nt, Artificial Sequence
  Description of Artificial Sequence: Synthetic oligonucleotide
ccacgucagaccacagacg

SEQ ID NO: 141910 - RNA, 19 nt, Artificial Sequence
  Description of Artificial Sequence: Synthetic oligonucleotide
uagccgacacccugcuggu

SEQ ID NO: 141911 - RNA, 19 nt, Artificial Sequence
  Description of Artificial Sequence: Synthetic oligonucleotide
agcauaucuuacgggccca

SEQ ID NO: 141912 - RNA, 19 nt, Artificial Sequence
  Description of Artificial Sequence: Synthetic oligonucleotide
cuuacgggcccaggacuag

SEQ ID NO: 141913 - RNA, 19 nt, Artificial Sequence
  Description of Artificial Sequence: Synthetic oligonucleotide
uuauuccagcgaggguucu

SEQ ID NO: 141914 - RNA, 19 nt, Artificial Sequence
  Description of Artificial Sequence: Synthetic oligonucleotide
agguaccaugccaggacug

SEQ ID NO: 141915 - RNA, 19 nt, Artificial Sequence
  Description of Artificial Sequence: Synthetic oligonucleotide
agauugggcuugagggcag

SEQ ID NO: 141916 - RNA, 19 nt, Artificial Sequence
  Description of Artificial Sequence: Synthetic oligonucleotide
cuuauacuagaugggcucu

SEQ ID NO: 141917 - RNA, 19 nt, Artificial Sequence
  Description of Artificial Sequence: Synthetic oligonucleotide
agccgagcuacaguaugga

SEQ ID NO: 141918 - RNA, 19 nt, Artificial Sequence
  Description of Artificial Sequence: Synthetic oligonucleotide
uagugccacaccugcccau

SEQ ID NO: 141919 - RNA, 19 nt, Artificial Sequence
  Description of Artificial Sequence: Synthetic oligonucleotide
cacccuacaagaggacguc

SEQ ID NO: 141920 - RNA, 19 nt, Artificial Sequence
  Description of Artificial Sequence: Synthetic oligonucleotide
ccaagcuaugcggucgucc

SEQ ID NO: 141921 - RNA, 19 nt, Artificial Sequence
  Description of Artificial Sequence: Synthetic oligonucleotide
guacguggauggucuuuca

SEQ ID NO: 141922 - RNA, 19 nt, Artificial Sequence
  Description of Artificial Sequence: Synthetic oligonucleotide
cacccauuugcagcaagga

SEQ ID NO: 141923 - RNA, 19 nt, Artificial Sequence
  Description of Artificial Sequence: Synthetic oligonucleotide
agacgugcagcagguuaca

SEQ ID NO: 141924 - RNA, 19 nt, Artificial Sequence
  Description of Artificial Sequence: Synthetic oligonucleotide
auccccgaaauagguggga

SEQ ID NO: 141925 - RNA, 19 nt, Artificial Sequence
  Description of Artificial Sequence: Synthetic oligonucleotide
agucaugcucugaugccua

SEQ ID NO: 141926 - RNA, 19 nt, Artificial Sequence
  Description of Artificial Sequence: Synthetic oligonucleotide
guggccccuagaguaacuc

SEQ ID NO: 141927 - RNA, 19 nt, Artificial Sequence
  Description of Artificial Sequence: Synthetic oligonucleotide
caaagggaagagucuguau

SEQ ID NO: 141928 - RNA, 19 nt, Artificial Sequence
  Description of Artificial Sequence: Synthetic oligonucleotide
gcaaugacacccagugaga

SEQ ID NO: 141929 - RNA, 19 nt, Artificial Sequence
  Description of Artificial Sequence: Synthetic oligonucleotide
guguuaguacggaggaagu

SEQ ID NO: 141930 - RNA, 19 nt, Artificial Sequence
  Description of Artificial Sequence: Synthetic oligonucleotide
gggucucaggccuuauaaa

SEQ ID NO: 141931 - RNA, 19 nt, Artificial Sequence
  Description of Artificial Sequence: Synthetic oligonucleotide
gcuaagcaagucaugcucu

SEQ ID NO: 141932 - RNA, 19 nt, Artificial Sequence
  Description of Artificial Sequence: Synthetic oligonucleotide
acgucagaccacagacgug

SEQ ID NO: 141933 - RNA, 19 nt, Artificial Sequence
  Description of Artificial Sequence: Synthetic oligonucleotide
uacaccggccgcgcugcgu

SEQ ID NO: 141934 - RNA, 19 nt, Artificial Sequence
  Description of Artificial Sequence: Synthetic oligonucleotide
cauucgagucaugccguaa

SEQ ID NO: 141935 - RNA, 19 nt, Artificial Sequence
  Description of Artificial Sequence: Synthetic oligonucleotide
cucgcucaucgaagaucuc

SEQ ID NO: 141936 - RNA, 19 nt, Artificial Sequence
  Description of Artificial Sequence: Synthetic oligonucleotide
aguggccccuagaguaacu

SEQ ID NO: 141937 - RNA, 19 nt, Artificial Sequence
  Description of Artificial Sequence: Synthetic oligonucleotide
gacgugcagcagguuacaa

SEQ ID NO: 141938 - RNA, 19 nt, Artificial Sequence
  Description of Artificial Sequence: Synthetic oligonucleotide
ccacccuagauugggcuug

SEQ ID NO: 141939 - RNA, 19 nt, Artificial Sequence
  Description of Artificial Sequence: Synthetic oligonucleotide
guacaccggccgcgcugcg

SEQ ID NO: 141940 - RNA, 19 nt, Artificial Sequence
  Description of Artificial Sequence: Synthetic oligonucleotide
uccaagcuaugcggucguc

SEQ ID NO: 141941 - RNA, 19 nt, Artificial Sequence
  Description of Artificial Sequence: Synthetic oligonucleotide
cucaacccuuaccuccuua

SEQ ID NO: 141942 - RNA, 19 nt, Artificial Sequence
  Description of Artificial Sequence: Synthetic oligonucleotide
cagaugcaugcccacccua

SEQ ID NO: 141943 - RNA, 19 nt, Artificial Sequence
  Description of Artificial Sequence: Synthetic oligonucleotide
agguuccguccugcuugac

SEQ ID NO: 141944 - RNA, 19 nt, Artificial Sequence
  Description of Artificial Sequence: Synthetic oligonucleotide
cccuuaccuccuuaaggca

SEQ ID NO: 141945 - RNA, 19 nt, Artificial Sequence
  Description of Artificial Sequence: Synthetic oligonucleotide
ggacuaggugagggccugg

SEQ ID NO: 141946 - RNA, 19 nt, Artificial Sequence
  Description of Artificial Sequence: Synthetic oligonucleotide
acccuagauugggcuugag

SEQ ID NO: 141947 - RNA, 19 nt, Artificial Sequence
  Description of Artificial Sequence: Synthetic oligonucleotide
cacugacaagcaugcuucu

SEQ ID NO: 141948 - RNA, 19 nt, Artificial Sequence
  Description of Artificial Sequence: Synthetic oligonucleotide
gacggcaauaaggguccau

SEQ ID NO: 141949 - RNA, 19 nt, Artificial Sequence
  Description of Artificial Sequence: Synthetic oligonucleotide
gcccagacgaagacggcaa

SEQ ID NO: 141950 - RNA, 19 nt, Artificial Sequence
  Description of Artificial Sequence: Synthetic oligonucleotide
agaugggcucugacacaau

SEQ ID NO: 141951 - RNA, 19 nt, Artificial Sequence
  Description of Artificial Sequence: Synthetic oligonucleotide
ccccgaaauaggugggaaa

SEQ ID NO: 141952 - RNA, 19 nt, Artificial Sequence
  Description of Artificial Sequence: Synthetic oligonucleotide
gggcuauacccagaugcau

SEQ ID NO: 141953 - RNA, 19 nt, Artificial Sequence
  Description of Artificial Sequence: Synthetic oligonucleotide
gccuggguucacauacgaa

SEQ ID NO: 141954 - RNA, 19 nt, Artificial Sequence
  Description of Artificial Sequence: Synthetic oligonucleotide
ccagacgaagacggcaaua

SEQ ID NO: 141955 - RNA, 19 nt, Artificial Sequence
  Description of Artificial Sequence: Synthetic oligonucleotide
ccacuuaaggagguuccgu

SEQ ID NO: 141956 - RNA, 19 nt, Artificial Sequence
  Description of Artificial Sequence: Synthetic oligonucleotide
ccauucgagucaugccgua

SEQ ID NO: 141957 - RNA, 19 nt, Artificial Sequence
  Description of Artificial Sequence: Synthetic oligonucleotide
ccguccugcuugacucauc

SEQ ID NO: 141958 - RNA, 19 nt, Artificial Sequence
  Description of Artificial Sequence: Synthetic oligonucleotide
ggguacguggauggucuuu

SEQ ID NO: 141959 - RNA, 19 nt, Artificial Sequence
  Description of Artificial Sequence: Synthetic oligonucleotide
gggguacguggauggucuu

SEQ ID NO: 141960 - RNA, 19 nt, Artificial Sequence
  Description of Artificial Sequence: Synthetic oligonucleotide
ccaucucaguuaggcuaaa

SEQ ID NO: 141961 - RNA, 19 nt, Artificial Sequence
  Description of Artificial Sequence: Synthetic oligonucleotide
uauauauauauuauagugg

SEQ ID NO: 141962 - RNA, 19 nt, Artificial Sequence
  Description of Artificial Sequence: Synthetic oligonucleotide
aauauauauauauauauau

SEQ ID NO: 141963 - RNA, 19 nt, Artificial Sequence
  Description of Artificial Sequence: Synthetic oligonucleotide
auauauauauauuauagug

SEQ ID NO: 141964 - RNA, 19 nt, Artificial Sequence
  Description of Artificial Sequence: Synthetic oligonucleotide
uaauauauauauauaauaa

SEQ ID NO: 141965 - RNA, 19 nt, Artificial Sequence
  Description of Artificial Sequence: Synthetic oligonucleotide
uauauauauaucuauauau

SEQ ID NO: 141966 - RNA, 19 nt, Artificial Sequence
  Description of Artificial Sequence: Synthetic oligonucleotide
uauauauauauauauauua

SEQ ID NO: 141967 - RNA, 19 nt, Artificial Sequence
  Description of Artificial Sequence: Synthetic oligonucleotide
uacauauauauauauaucu

SEQ ID NO: 141968 - RNA, 19 nt, Artificial Sequence
  Description of Artificial Sequence: Synthetic oligonucleotide
aauauauauauauaauaau

SEQ ID NO: 141969 - RNA, 19 nt, Artificial Sequence
  Description of Artificial Sequence: Synthetic oligonucleotide
auuacauauauauauauau

SEQ ID NO: 141970 - RNA, 19 nt, Artificial Sequence
  Description of Artificial Sequence: Synthetic oligonucleotide
ugaauauauauauauauau

SEQ ID NO: 141971 - RNA, 19 nt, Artificial Sequence
  Description of Artificial Sequence: Synthetic oligonucleotide
auauauauauauauuauag

SEQ ID NO: 141972 - RNA, 19 nt, Artificial Sequence
  Description of Artificial Sequence: Synthetic oligonucleotide
uauauauauauaauaauuu

SEQ ID NO: 141973 - RNA, 19 nt, Artificial Sequence
  Description of Artificial Sequence: Synthetic oligonucleotide
ugugaauauauauauauau

SEQ ID NO: 141974 - RNA, 19 nt, Artificial Sequence
  Description of Artificial Sequence: Synthetic oligonucleotide
uaugugaauauauauauau

SEQ ID NO: 141975 - RNA, 19 nt, Artificial Sequence
  Description of Artificial Sequence: Synthetic oligonucleotide
uggaauaaugaaaaggcug

SEQ ID NO: 141976 - RNA, 19 nt, Artificial Sequence
  Description of Artificial Sequence: Synthetic oligonucleotide
aaauuacauauauauauau

SEQ ID NO: 141977 - RNA, 19 nt, Artificial Sequence
  Description of Artificial Sequence: Synthetic oligonucleotide
auauaugucuccuuggaag

SEQ ID NO: 141978 - RNA, 19 nt, Artificial Sequence
  Description of Artificial Sequence: Synthetic oligonucleotide
uauaauauauauauauaau

SEQ ID NO: 141979 - RNA, 19 nt, Artificial Sequence
  Description of Artificial Sequence: Synthetic oligonucleotide
aauaggauucuacgcauuc

SEQ ID NO: 141980 - RNA, 19 nt, Artificial Sequence
  Description of Artificial Sequence: Synthetic oligonucleotide
auaauauauauauauaaua

SEQ ID NO: 141981 - RNA, 19 nt, Artificial Sequence
  Description of Artificial Sequence: Synthetic oligonucleotide
uauauauaucuauauauaa

SEQ ID NO: 141982 - RNA, 19 nt, Artificial Sequence
  Description of Artificial Sequence: Synthetic oligonucleotide
gaugaaaacggcaaugggg

SEQ ID NO: 141983 - RNA, 19 nt, Artificial Sequence
  Description of Artificial Sequence: Synthetic oligonucleotide
uucggagagacccagaccc

SEQ ID NO: 141984 - RNA, 19 nt, Artificial Sequence
  Description of Artificial Sequence: Synthetic oligonucleotide
uccagaaacaucuaagaug

SEQ ID NO: 141985 - RNA, 19 nt, Artificial Sequence
  Description of Artificial Sequence: Synthetic oligonucleotide
uauauauauauauuauagu

SEQ ID NO: 141986 - RNA, 19 nt, Artificial Sequence
  Description of Artificial Sequence: Synthetic oligonucleotide
uauauauuauaguggagug

SEQ ID NO: 141987 - RNA, 19 nt, Artificial Sequence
  Description of Artificial Sequence: Synthetic oligonucleotide
uuugucauagaucuuauuu

SEQ ID NO: 141988 - RNA, 19 nt, Artificial Sequence
  Description of Artificial Sequence: Synthetic oligonucleotide
uauauauauauaucuauau

SEQ ID NO: 141989 - RNA, 19 nt, Artificial Sequence
  Description of Artificial Sequence: Synthetic oligonucleotide
uauaugucuccuuggaagg

SEQ ID NO: 141990 - RNA, 19 nt, Artificial Sequence
  Description of Artificial Sequence: Synthetic oligonucleotide
aucauaaucaaaacagggc

SEQ ID NO: 141991 - RNA, 19 nt, Artificial Sequence
  Description of Artificial Sequence: Synthetic oligonucleotide
acuauuaucaugcuuacuu

SEQ ID NO: 141992 - RNA, 19 nt, Artificial Sequence
  Description of Artificial Sequence: Synthetic oligonucleotide
guauaauauauauauauaa

SEQ ID NO: 141993 - RNA, 19 nt, Artificial Sequence
  Description of Artificial Sequence: Synthetic oligonucleotide
uauauauauauauauuaua

SEQ ID NO: 141994 - RNA, 19 nt, Artificial Sequence
  Description of Artificial Sequence: Synthetic oligonucleotide
aauucuauguucuccccug

SEQ ID NO: 141995 - RNA, 19 nt, Artificial Sequence
  Description of Artificial Sequence: Synthetic oligonucleotide
agaagcguuaaugacgugc

SEQ ID NO: 141996 - RNA, 19 nt, Artificial Sequence
  Description of Artificial Sequence: Synthetic oligonucleotide
agugcuuugguauagcacu

SEQ ID NO: 141997 - RNA, 19 nt, Artificial Sequence
  Description of Artificial Sequence: Synthetic oligonucleotide
uaaguuaccugcuguaucc

SEQ ID NO: 141998 - RNA, 19 nt, Artificial Sequence
  Description of Artificial Sequence: Synthetic oligonucleotide
aaacaucuaagaugcagug

SEQ ID NO: 141999 - RNA, 19 nt, Artificial Sequence
  Description of Artificial Sequence: Synthetic oligonucleotide
aacuaccuggaccagucac

SEQ ID NO: 142000 - RNA, 19 nt, Artificial Sequence
  Description of Artificial Sequence: Synthetic oligonucleotide
uguauaauauauauauaua

SEQ ID NO: 142001 - RNA, 19 nt, Artificial Sequence
  Description of Artificial Sequence: Synthetic oligonucleotide
uuacauauauauauauauc

SEQ ID NO: 142002 - RNA, 19 nt, Artificial Sequence
  Description of Artificial Sequence: Synthetic oligonucleotide
gacucaaucaucccugucc

SEQ ID NO: 142003 - RNA, 19 nt, Artificial Sequence
  Description of Artificial Sequence: Synthetic oligonucleotide
uugauggacagcuccauag

SEQ ID NO: 142004 - RNA, 19 nt, Artificial Sequence
  Description of Artificial Sequence: Synthetic oligonucleotide
agugcuuuaaagugucaac

SEQ ID NO: 142005 - RNA, 19 nt, Artificial Sequence
  Description of Artificial Sequence: Synthetic oligonucleotide
ucagaagcguuaaugacgu

SEQ ID NO: 142006 - RNA, 19 nt, Artificial Sequence
  Description of Artificial Sequence: Synthetic oligonucleotide
gagugaccaaauuugagug

SEQ ID NO: 142007 - RNA, 19 nt, Artificial Sequence
  Description of Artificial Sequence: Synthetic oligonucleotide
cuugcaagccuuuagaaca

SEQ ID NO: 142008 - RNA, 19 nt, Artificial Sequence
  Description of Artificial Sequence: Synthetic oligonucleotide
auauauauauauaauaauu

SEQ ID NO: 142009 - RNA, 19 nt, Artificial Sequence
  Description of Artificial Sequence: Synthetic oligonucleotide
uuuucaaucgagcucgcuc

SEQ ID NO: 142010 - RNA, 19 nt, Artificial Sequence
  Description of Artificial Sequence: Synthetic oligonucleotide
uggaguguauaauauauau

SEQ ID NO: 142011 - RNA, 19 nt, Artificial Sequence
  Description of Artificial Sequence: Synthetic oligonucleotide
agagugaccaaauuugagu

SEQ ID NO: 142012 - RNA, 19 nt, Artificial Sequence
  Description of Artificial Sequence: Synthetic oligonucleotide
ggaaugauugcccugcugg

SEQ ID NO: 142013 - RNA, 19 nt, Artificial Sequence
  Description of Artificial Sequence: Synthetic oligonucleotide
ucgaguccgaucauaauca

SEQ ID NO: 142014 - RNA, 19 nt, Artificial Sequence
  Description of Artificial Sequence: Synthetic oligonucleotide
cauagaucuuauuugcuug

SEQ ID NO: 142015 - RNA, 19 nt, Artificial Sequence
  Description of Artificial Sequence: Synthetic oligonucleotide
cuuacuaccgcugccaacc

SEQ ID NO: 142016 - RNA, 19 nt, Artificial Sequence
  Description of Artificial Sequence: Synthetic oligonucleotide
uauaguggaguguauaaua

SEQ ID NO: 142017 - RNA, 19 nt, Artificial Sequence
  Description of Artificial Sequence: Synthetic oligonucleotide
aauauaugucuccuuggaa

SEQ ID NO: 142018 - RNA, 19 nt, Artificial Sequence
  Description of Artificial Sequence: Synthetic oligonucleotide
uuucaaucgagcucgcucu

SEQ ID NO: 142019 - RNA, 19 nt, Artificial Sequence
  Description of Artificial Sequence: Synthetic oligonucleotide
auauauauauaucuauaua

SEQ ID NO: 142020 - RNA, 19 nt, Artificial Sequence
  Description of Artificial Sequence: Synthetic oligonucleotide
cauuaugcugguaggauac

SEQ ID NO: 142021 - RNA, 19 nt, Artificial Sequence
  Description of Artificial Sequence: Synthetic oligonucleotide
ccgaucauaaucaaaacag

SEQ ID NO: 142022 - RNA, 19 nt, Artificial Sequence
  Description of Artificial Sequence: Synthetic oligonucleotide
uauagcacuuacuaccgcu

SEQ ID NO: 142023 - RNA, 19 nt, Artificial Sequence
  Description of Artificial Sequence: Synthetic oligonucleotide
aggacuagaaaacucaauu

SEQ ID NO: 142024 - RNA, 19 nt, Artificial Sequence
  Description of Artificial Sequence: Synthetic oligonucleotide
uauagcguuuccagaaaca

SEQ ID NO: 142025 - RNA, 19 nt, Artificial Sequence
  Description of Artificial Sequence: Synthetic oligonucleotide
guguauaauauauauauau

SEQ ID NO: 142026 - RNA, 19 nt, Artificial Sequence
  Description of Artificial Sequence: Synthetic oligonucleotide
auagagauuaucccgguua

SEQ ID NO: 142027 - RNA, 19 nt, Artificial Sequence
  Description of Artificial Sequence: Synthetic oligonucleotide
gaaugauugcccugcuggg

SEQ ID NO: 142028 - RNA, 19 nt, Artificial Sequence
  Description of Artificial Sequence: Synthetic oligonucleotide
agaaaugcccgggagcacc

SEQ ID NO: 142029 - RNA, 19 nt, Artificial Sequence
  Description of Artificial Sequence: Synthetic oligonucleotide
cuucgaaggagcacagugg

SEQ ID NO: 142030 - RNA, 19 nt, Artificial Sequence
  Description of Artificial Sequence: Synthetic oligonucleotide
uuauagcguuuccagaaac

SEQ ID NO: 142031 - RNA, 19 nt, Artificial Sequence
  Description of Artificial Sequence: Synthetic oligonucleotide
auauauauauauauauuau

SEQ ID NO: 142032 - RNA, 19 nt, Artificial Sequence
  Description of Artificial Sequence: Synthetic oligonucleotide
ugagauggcaucaucccaa

SEQ ID NO: 142033 - RNA, 19 nt, Artificial Sequence
  Description of Artificial Sequence: Synthetic oligonucleotide
cagcucaccaguaagugag

SEQ ID NO: 142034 - RNA, 19 nt, Artificial Sequence
  Description of Artificial Sequence: Synthetic oligonucleotide
ucauaugucugccuucggu

SEQ ID NO: 142035 - RNA, 19 nt, Artificial Sequence
  Description of Artificial Sequence: Synthetic oligonucleotide
ucacccuguacaauggcug

SEQ ID NO: 142036 - RNA, 19 nt, Artificial Sequence
  Description of Artificial Sequence: Synthetic oligonucleotide
aauuacauauauauauaua

SEQ ID NO: 142037 - RNA, 19 nt, Artificial Sequence
  Description of Artificial Sequence: Synthetic oligonucleotide
ucuaagaugcagugcuugc

SEQ ID NO: 142038 - RNA, 19 nt, Artificial Sequence
  Description of Artificial Sequence: Synthetic oligonucleotide
acacaguagcacaacaugg

SEQ ID NO: 142039 - RNA, 19 nt, Artificial Sequence
  Description of Artificial Sequence: Synthetic oligonucleotide
aggcaauuucauccggagc

SEQ ID NO: 142040 - RNA, 19 nt, Artificial Sequence
  Description of Artificial Sequence: Synthetic oligonucleotide
augaaaacggcaauggggu

SEQ ID NO: 142041 - RNA, 19 nt, Artificial Sequence
  Description of Artificial Sequence: Synthetic oligonucleotide
uagcgcgugggaaaggucc

SEQ ID NO: 142042 - RNA, 19 nt, Artificial Sequence
  Description of Artificial Sequence: Synthetic oligonucleotide
ggcggcauaaaacaauagg

SEQ ID NO: 142043 - RNA, 19 nt, Artificial Sequence
  Description of Artificial Sequence: Synthetic oligonucleotide
auauauaucuauauauaaa

SEQ ID NO: 142044 - RNA, 19 nt, Artificial Sequence
  Description of Artificial Sequence: Synthetic oligonucleotide
aguacaggguagaaaugcc

SEQ ID NO: 142045 - RNA, 19 nt, Artificial Sequence
  Description of Artificial Sequence: Synthetic oligonucleotide
aacaacacugcgucaccug

SEQ ID NO: 142046 - RNA, 19 nt, Artificial Sequence
  Description of Artificial Sequence: Synthetic oligonucleotide
gaauauauauauauauaua

SEQ ID NO: 142047 - RNA, 19 nt, Artificial Sequence
  Description of Artificial Sequence: Synthetic oligonucleotide
uuccagaaacaucuaagau

SEQ ID NO: 142048 - RNA, 19 nt, Artificial Sequence
  Description of Artificial Sequence: Synthetic oligonucleotide
gugucaacaacacugcguc

SEQ ID NO: 142049 - RNA, 19 nt, Artificial Sequence
  Description of Artificial Sequence: Synthetic oligonucleotide
ugagcauuauucagacaug

SEQ ID NO: 142050 - RNA, 19 nt, Artificial Sequence
  Description of Artificial Sequence: Synthetic oligonucleotide
auuacguugcaucguucag

SEQ ID NO: 142051 - RNA, 19 nt, Artificial Sequence
  Description of Artificial Sequence: Synthetic oligonucleotide
cucgaguccgaucauaauc

SEQ ID NO: 142052 - RNA, 19 nt, Artificial Sequence
  Description of Artificial Sequence: Synthetic oligonucleotide
ugguagugcuuuaaagugu

SEQ ID NO: 142053 - RNA, 19 nt, Artificial Sequence
  Description of Artificial Sequence: Synthetic oligonucleotide
acucaauacauggcuggcc

SEQ ID NO: 142054 - RNA, 19 nt, Artificial Sequence
  Description of Artificial Sequence: Synthetic oligonucleotide
uggaacauaagaugucauc

SEQ ID NO: 142055 - RNA, 19 nt, Artificial Sequence
  Description of Artificial Sequence: Synthetic oligonucleotide
ggcaaauaggauucuacgc

SEQ ID NO: 142056 - RNA, 19 nt, Artificial Sequence
  Description of Artificial Sequence: Synthetic oligonucleotide
auauauauaucuauauaua

SEQ ID NO: 142057 - RNA, 19 nt, Artificial Sequence
  Description of Artificial Sequence: Synthetic oligonucleotide
ucuagucccaauguaugug

SEQ ID NO: 142058 - RNA, 19 nt, Artificial Sequence
  Description of Artificial Sequence: Synthetic oligonucleotide
aguccgaucauaaucaaaa

SEQ ID NO: 142059 - RNA, 19 nt, Artificial Sequence
  Description of Artificial Sequence: Synthetic oligonucleotide
auauauauauauauauauu

SEQ ID NO: 142060 - RNA, 19 nt, Artificial Sequence
  Description of Artificial Sequence: Synthetic oligonucleotide
aguggaguguauaauauau

SEQ ID NO: 142061 - RNA, 19 nt, Artificial Sequence
  Description of Artificial Sequence: Synthetic oligonucleotide
gagucccugacuuggcagg

SEQ ID NO: 142062 - RNA, 19 nt, Artificial Sequence
  Description of Artificial Sequence: Synthetic oligonucleotide
auauauauauauaucuaua

SEQ ID NO: 142063 - RNA, 19 nt, Artificial Sequence
  Description of Artificial Sequence: Synthetic oligonucleotide
gucgcuuuaucccucuuug

SEQ ID NO: 142064 - RNA, 19 nt, Artificial Sequence
  Description of Artificial Sequence: Synthetic oligonucleotide
cauauauauauauaucuau

SEQ ID NO: 142065 - RNA, 19 nt, Artificial Sequence
  Description of Artificial Sequence: Synthetic oligonucleotide
uuagcucuacagcucaaau

SEQ ID NO: 142066 - RNA, 19 nt, Artificial Sequence
  Description of Artificial Sequence: Synthetic oligonucleotide
gcaaauaggauucuacgca

SEQ ID NO: 142067 - RNA, 19 nt, Artificial Sequence
  Description of Artificial Sequence: Synthetic oligonucleotide
ucauuaugcugguaggaua

SEQ ID NO: 142068 - RNA, 19 nt, Artificial Sequence
  Description of Artificial Sequence: Synthetic oligonucleotide
ugcaacuaucauuuauuaa

SEQ ID NO: 142069 - RNA, 19 nt, Artificial Sequence
  Description of Artificial Sequence: Synthetic oligonucleotide
aaccuuagcucugaagaga

SEQ ID NO: 142070 - RNA, 19 nt, Artificial Sequence
  Description of Artificial Sequence: Synthetic oligonucleotide
guuucgcucacuucacaag

SEQ ID NO: 142071 - RNA, 19 nt, Artificial Sequence
  Description of Artificial Sequence: Synthetic oligonucleotide
ccauaagagaaacugaguc

SEQ ID NO: 142072 - RNA, 19 nt, Artificial Sequence
  Description of Artificial Sequence: Synthetic oligonucleotide
uucuagucccaauguaugu

SEQ ID NO: 142073 - RNA, 19 nt, Artificial Sequence
  Description of Artificial Sequence: Synthetic oligonucleotide
caucaggcggcauaaaaca

SEQ ID NO: 142074 - RNA, 19 nt, Artificial Sequence
  Description of Artificial Sequence: Synthetic oligonucleotide
aagugagucuuagcucuac

SEQ ID NO: 142075 - RNA, 19 nt, Artificial Sequence
  Description of Artificial Sequence: Synthetic oligonucleotide
acuuacuaccgcugccaac

SEQ ID NO: 142076 - RNA, 19 nt, Artificial Sequence
  Description of Artificial Sequence: Synthetic oligonucleotide
aaacugagucccugacuug

SEQ ID NO: 142077 - RNA, 19 nt, Artificial Sequence
  Description of Artificial Sequence: Synthetic oligonucleotide
ucaggcggcauaaaacaau

SEQ ID NO: 142078 - RNA, 19 nt, Artificial Sequence
  Description of Artificial Sequence: Synthetic oligonucleotide
cugagcauuauucagacau

SEQ ID NO: 142079 - RNA, 19 nt, Artificial Sequence
  Description of Artificial Sequence: Synthetic oligonucleotide
uuacguugcaucguucaga

SEQ ID NO: 142080 - RNA, 19 nt, Artificial Sequence
  Description of Artificial Sequence: Synthetic oligonucleotide
ugugcuagcgcgugggaaa

SEQ ID NO: 142081 - RNA, 19 nt, Artificial Sequence
  Description of Artificial Sequence: Synthetic oligonucleotide
auuaugcugguaggauacc

SEQ ID NO: 142082 - RNA, 19 nt, Artificial Sequence
  Description of Artificial Sequence: Synthetic oligonucleotide
acauauauauauauaucua

SEQ ID NO: 142083 - RNA, 19 nt, Artificial Sequence
  Description of Artificial Sequence: Synthetic oligonucleotide
gguaggauaccugugaaca

SEQ ID NO: 142084 - RNA, 19 nt, Artificial Sequence
  Description of Artificial Sequence: Synthetic oligonucleotide
gaagcguuaaugacgugca

SEQ ID NO: 142085 - RNA, 19 nt, Artificial Sequence
  Description of Artificial Sequence: Synthetic oligonucleotide
cauuacguugcaucguuca

SEQ ID NO: 142086 - RNA, 19 nt, Artificial Sequence
  Description of Artificial Sequence: Synthetic oligonucleotide
agauacuuucuguugccau

SEQ ID NO: 142087 - RNA, 19 nt, Artificial Sequence
  Description of Artificial Sequence: Synthetic oligonucleotide
ugauuggaauaugaaaauu

SEQ ID NO: 142088 - RNA, 19 nt, Artificial Sequence
  Description of Artificial Sequence: Synthetic oligonucleotide
gcuucgaaggagcacagug

SEQ ID NO: 142089 - RNA, 19 nt, Artificial Sequence
  Description of Artificial Sequence: Synthetic oligonucleotide
uucgcucacuucacaagcu

SEQ ID NO: 142090 - RNA, 19 nt, Artificial Sequence
  Description of Artificial Sequence: Synthetic oligonucleotide
ucguucagagcugcaagcc

SEQ ID NO: 142091 - RNA, 19 nt, Artificial Sequence
  Description of Artificial Sequence: Synthetic oligonucleotide
uccuaacccaguugagggc

SEQ ID NO: 142092 - RNA, 19 nt, Artificial Sequence
  Description of Artificial Sequence: Synthetic oligonucleotide
agugagugcuuugguauag

SEQ ID NO: 142093 - RNA, 19 nt, Artificial Sequence
  Description of Artificial Sequence: Synthetic oligonucleotide
aaccaacuauuaucaugcu

SEQ ID NO: 142094 - RNA, 19 nt, Artificial Sequence
  Description of Artificial Sequence: Synthetic oligonucleotide
gugaauauauauauauaua

SEQ ID NO: 142095 - RNA, 19 nt, Artificial Sequence
  Description of Artificial Sequence: Synthetic oligonucleotide
auagcguuuccagaaacau

SEQ ID NO: 142096 - RNA, 19 nt, Artificial Sequence
  Description of Artificial Sequence: Synthetic oligonucleotide
accuuagcucugaagagag

SEQ ID NO: 142097 - RNA, 19 nt, Artificial Sequence
  Description of Artificial Sequence: Synthetic oligonucleotide
ccacaagucacaguuagcc

SEQ ID NO: 142098 - RNA, 19 nt, Artificial Sequence
  Description of Artificial Sequence: Synthetic oligonucleotide
ucuucgcuucugcugggug

SEQ ID NO: 142099 - RNA, 19 nt, Artificial Sequence
  Description of Artificial Sequence: Synthetic oligonucleotide
cuagucccaauguauguga

SEQ ID NO: 142100 - RNA, 19 nt, Artificial Sequence
  Description of Artificial Sequence: Synthetic oligonucleotide
agcguuaaugacgugcaga

SEQ ID NO: 142101 - RNA, 19 nt, Artificial Sequence
  Description of Artificial Sequence: Synthetic oligonucleotide
agacucaaucaucccuguc

SEQ ID NO: 142102 - RNA, 19 nt, Artificial Sequence
  Description of Artificial Sequence: Synthetic oligonucleotide
caaugggguaaaguugugc

SEQ ID NO: 142103 - RNA, 19 nt, Artificial Sequence
  Description of Artificial Sequence: Synthetic oligonucleotide
caauacauggcuggccaag

SEQ ID NO: 142104 - RNA, 19 nt, Artificial Sequence
  Description of Artificial Sequence: Synthetic oligonucleotide
agcauuauucagacauguc

SEQ ID NO: 142105 - RNA, 19 nt, Artificial Sequence
  Description of Artificial Sequence: Synthetic oligonucleotide
uaguggaguguauaauaua

SEQ ID NO: 142106 - RNA, 19 nt, Artificial Sequence
  Description of Artificial Sequence: Synthetic oligonucleotide
accaacuauuaucaugcuu

SEQ ID NO: 142107 - RNA, 19 nt, Artificial Sequence
  Description of Artificial Sequence: Synthetic oligonucleotide
aguuaccugcuguauccca

SEQ ID NO: 142108 - RNA, 19 nt, Artificial Sequence
  Description of Artificial Sequence: Synthetic oligonucleotide
uagcucugaagagagugac

SEQ ID NO: 142109 - RNA, 19 nt, Artificial Sequence
  Description of Artificial Sequence: Synthetic oligonucleotide
agagaaugguuggagggga

SEQ ID NO: 142110 - RNA, 19 nt, Artificial Sequence
  Description of Artificial Sequence: Synthetic oligonucleotide
guaacucugagccccagcu

SEQ ID NO: 142111 - RNA, 19 nt, Artificial Sequence
  Description of Artificial Sequence: Synthetic oligonucleotide
ucgcuuuaucccucuuugc

SEQ ID NO: 142112 - RNA, 19 nt, Artificial Sequence
  Description of Artificial Sequence: Synthetic oligonucleotide
cgaucauaaucaaaacagg

SEQ ID NO: 142113 - RNA, 19 nt, Artificial Sequence
  Description of Artificial Sequence: Synthetic oligonucleotide
ggauuugcaccugugcuag

SEQ ID NO: 142114 - RNA, 19 nt, Artificial Sequence
  Description of Artificial Sequence: Synthetic oligonucleotide
caguguacugcccaagaga

SEQ ID NO: 142115 - RNA, 19 nt, Artificial Sequence
  Description of Artificial Sequence: Synthetic oligonucleotide
gguccuaacccaguugagg

SEQ ID NO: 142116 - RNA, 19 nt, Artificial Sequence
  Description of Artificial Sequence: Synthetic oligonucleotide
acuagggaucacaccaauc

SEQ ID NO: 142117 - RNA, 19 nt, Artificial Sequence
  Description of Artificial Sequence: Synthetic oligonucleotide
cuguugacuggauggccag

SEQ ID NO: 142118 - RNA, 19 nt, Artificial Sequence
  Description of Artificial Sequence: Synthetic oligonucleotide
aggaaugauugcccugcug

SEQ ID NO: 142119 - RNA, 19 nt, Artificial Sequence
  Description of Artificial Sequence: Synthetic oligonucleotide
auagcacuuacuaccgcug

SEQ ID NO: 142120 - RNA, 19 nt, Artificial Sequence
  Description of Artificial Sequence: Synthetic oligonucleotide
accccuagcuaaguccagc

SEQ ID NO: 142121 - RNA, 19 nt, Artificial Sequence
  Description of Artificial Sequence: Synthetic oligonucleotide
auaggauucuacgcauuca

SEQ ID NO: 142122 - RNA, 19 nt, Artificial Sequence
  Description of Artificial Sequence: Synthetic oligonucleotide
uagacucaaucaucccugu

SEQ ID NO: 142123 - RNA, 19 nt, Artificial Sequence
  Description of Artificial Sequence: Synthetic oligonucleotide
ugucgcuuuaucccucuuu

SEQ ID NO: 142124 - RNA, 19 nt, Artificial Sequence
  Description of Artificial Sequence: Synthetic oligonucleotide
ugucaacaacacugcguca

SEQ ID NO: 142125 - RNA, 19 nt, Artificial Sequence
  Description of Artificial Sequence: Synthetic oligonucleotide
ucaauacauggcuggccaa

SEQ ID NO: 142126 - RNA, 19 nt, Artificial Sequence
  Description of Artificial Sequence: Synthetic oligonucleotide
cuaucccugucaguggccc

SEQ ID NO: 142127 - RNA, 19 nt, Artificial Sequence
  Description of Artificial Sequence: Synthetic oligonucleotide
ggaacauaagaugucaucu

SEQ ID NO: 142128 - RNA, 19 nt, Artificial Sequence
  Description of Artificial Sequence: Synthetic oligonucleotide
ugcucgcacugacuggaug

SEQ ID NO: 142129 - RNA, 19 nt, Artificial Sequence
  Description of Artificial Sequence: Synthetic oligonucleotide
aguguauaauauauauaua

SEQ ID NO: 142130 - RNA, 19 nt, Artificial Sequence
  Description of Artificial Sequence: Synthetic oligonucleotide
ucugucgcuuuaucccucu

SEQ ID NO: 142131 - RNA, 19 nt, Artificial Sequence
  Description of Artificial Sequence: Synthetic oligonucleotide
gcaaaccuuagcucugaag

SEQ ID NO: 142132 - RNA, 19 nt, Artificial Sequence
  Description of Artificial Sequence: Synthetic oligonucleotide
aaauaggauucuacgcauu

SEQ ID NO: 142133 - RNA, 19 nt, Artificial Sequence
  Description of Artificial Sequence: Synthetic oligonucleotide
gguuagacucaaucauccc

SEQ ID NO: 142134 - RNA, 19 nt, Artificial Sequence
  Description of Artificial Sequence: Synthetic oligonucleotide
gggacaagaacaguaguca

SEQ ID NO: 142135 - RNA, 19 nt, Artificial Sequence
  Description of Artificial Sequence: Synthetic oligonucleotide
aaccccuucccaaccaggu

SEQ ID NO: 142136 - RNA, 19 nt, Artificial Sequence
  Description of Artificial Sequence: Synthetic oligonucleotide
augugaauauauauauaua

SEQ ID NO: 142137 - RNA, 19 nt, Artificial Sequence
  Description of Artificial Sequence: Synthetic oligonucleotide
ggcccugacauacaaggac

SEQ ID NO: 142138 - RNA, 19 nt, Artificial Sequence
  Description of Artificial Sequence: Synthetic oligonucleotide
auaggcaauuucauccgga

SEQ ID NO: 142139 - RNA, 19 nt, Artificial Sequence
  Description of Artificial Sequence: Synthetic oligonucleotide
gacccaaauguagugccca

SEQ ID NO: 142140 - RNA, 19 nt, Artificial Sequence
  Description of Artificial Sequence: Synthetic oligonucleotide
acuaccgcugccaaccccu

SEQ ID NO: 142141 - RNA, 19 nt, Artificial Sequence
  Description of Artificial Sequence: Synthetic oligonucleotide
ggaaaccucucaugcagac

SEQ ID NO: 142142 - RNA, 19 nt, Artificial Sequence
  Description of Artificial Sequence: Synthetic oligonucleotide
gguagugcuuuaaaguguc

SEQ ID NO: 142143 - RNA, 19 nt, Artificial Sequence
  Description of Artificial Sequence: Synthetic oligonucleotide
cgguuagacucaaucaucc

SEQ ID NO: 142144 - RNA, 19 nt, Artificial Sequence
  Description of Artificial Sequence: Synthetic oligonucleotide
guucucgcaagucauguau

SEQ ID NO: 142145 - RNA, 19 nt, Artificial Sequence
  Description of Artificial Sequence: Synthetic oligonucleotide
acuaccuggaccagucacu

SEQ ID NO: 142146 - RNA, 19 nt, Artificial Sequence
  Description of Artificial Sequence: Synthetic oligonucleotide
ucgucaucagaagcguuaa

SEQ ID NO: 142147 - RNA, 19 nt, Artificial Sequence
  Description of Artificial Sequence: Synthetic oligonucleotide
ggguagaaaugcccgggag

SEQ ID NO: 142148 - RNA, 19 nt, Artificial Sequence
  Description of Artificial Sequence: Synthetic oligonucleotide
cccguuugagagcagcugc

SEQ ID NO: 142149 - RNA, 19 nt, Artificial Sequence
  Description of Artificial Sequence: Synthetic oligonucleotide
ucucgaguccgaucauaau

SEQ ID NO: 142150 - RNA, 19 nt, Artificial Sequence
  Description of Artificial Sequence: Synthetic oligonucleotide
uaaugacgugcagaauguc

SEQ ID NO: 142151 - RNA, 19 nt, Artificial Sequence
  Description of Artificial Sequence: Synthetic oligonucleotide
uucaaucgagcucgcucuu

SEQ ID NO: 142152 - RNA, 19 nt, Artificial Sequence
  Description of Artificial Sequence: Synthetic oligonucleotide
cucaaucaucccuguccug

SEQ ID NO: 142153 - RNA, 19 nt, Artificial Sequence
  Description of Artificial Sequence: Synthetic oligonucleotide
gaaaacuaccuggaccagu

SEQ ID NO: 142154 - RNA, 19 nt, Artificial Sequence
  Description of Artificial Sequence: Synthetic oligonucleotide
aggauucuacgcauucacu

SEQ ID NO: 142155 - RNA, 19 nt, Artificial Sequence
  Description of Artificial Sequence: Synthetic oligonucleotide
auuaucccgguuagacuca

SEQ ID NO: 142156 - RNA, 19 nt, Artificial Sequence
  Description of Artificial Sequence: Synthetic oligonucleotide
cuauuaucaugcuuacuuu

SEQ ID NO: 142157 - RNA, 19 nt, Artificial Sequence
  Description of Artificial Sequence: Synthetic oligonucleotide
cauaugucugccuucgguu

SEQ ID NO: 142158 - RNA, 19 nt, Artificial Sequence
  Description of Artificial Sequence: Synthetic oligonucleotide
caggcggcauaaaacaaua

SEQ ID NO: 142159 - RNA, 19 nt, Artificial Sequence
  Description of Artificial Sequence: Synthetic oligonucleotide
ggauucuacgcauucacuu

SEQ ID NO: 142160 - RNA, 19 nt, Artificial Sequence
  Description of Artificial Sequence: Synthetic oligonucleotide
gggccaagcaauucuaugu

SEQ ID NO: 142161 - RNA, 19 nt, Artificial Sequence
  Description of Artificial Sequence: Synthetic oligonucleotide
ugguucggagagacccaga

SEQ ID NO: 142162 - RNA, 19 nt, Artificial Sequence
  Description of Artificial Sequence: Synthetic oligonucleotide
ugucucgaguccgaucaua

SEQ ID NO: 142163 - RNA, 19 nt, Artificial Sequence
  Description of Artificial Sequence: Synthetic oligonucleotide
aaccccuagcuaaguccag

SEQ ID NO: 142164 - RNA, 19 nt, Artificial Sequence
  Description of Artificial Sequence: Synthetic oligonucleotide
uagaaaugcccgggagcac

SEQ ID NO: 142165 - RNA, 19 nt, Artificial Sequence
  Description of Artificial Sequence: Synthetic oligonucleotide
ugcuagcgcgugggaaagg

SEQ ID NO: 142166 - RNA, 19 nt, Artificial Sequence
  Description of Artificial Sequence: Synthetic oligonucleotide
gucacaugaugagugagau

SEQ ID NO: 142167 - RNA, 19 nt, Artificial Sequence
  Description of Artificial Sequence: Synthetic oligonucleotide
ccgguuagacucaaucauc

SEQ ID NO: 142168 - RNA, 19 nt, Artificial Sequence
  Description of Artificial Sequence: Synthetic oligonucleotide
aggcggcauaaaacaauag

SEQ ID NO: 142169 - RNA, 19 nt, Artificial Sequence
  Description of Artificial Sequence: Synthetic oligonucleotide
gaguccgaucauaaucaaa

SEQ ID NO: 142170 - RNA, 19 nt, Artificial Sequence
  Description of Artificial Sequence: Synthetic oligonucleotide
gugcuagcgcgugggaaag

SEQ ID NO: 142171 - RNA, 19 nt, Artificial Sequence
  Description of Artificial Sequence: Synthetic oligonucleotide
ggcaaugggguaaaguugu

SEQ ID NO: 142172 - RNA, 19 nt, Artificial Sequence
  Description of Artificial Sequence: Synthetic oligonucleotide
aucaggcggcauaaaacaa

SEQ ID NO: 142173 - RNA, 19 nt, Artificial Sequence
  Description of Artificial Sequence: Synthetic oligonucleotide
cacugguaaaccaacuauu

SEQ ID NO: 142174 - RNA, 19 nt, Artificial Sequence
  Description of Artificial Sequence: Synthetic oligonucleotide
cagcccguuugagagcagc

SEQ ID NO: 142175 - RNA, 19 nt, Artificial Sequence
  Description of Artificial Sequence: Synthetic oligonucleotide
gcgggaggaaaacuaccug

SEQ ID NO: 142176 - RNA, 19 nt, Artificial Sequence
  Description of Artificial Sequence: Synthetic oligonucleotide
gucucgaguccgaucauaa

SEQ ID NO: 142177 - RNA, 19 nt, Artificial Sequence
  Description of Artificial Sequence: Synthetic oligonucleotide
cugagucccugacuuggca

SEQ ID NO: 142178 - RNA, 19 nt, Artificial Sequence
  Description of Artificial Sequence: Synthetic oligonucleotide
gcaagccuuuagaacacug

SEQ ID NO: 142179 - RNA, 19 nt, Artificial Sequence
  Description of Artificial Sequence: Synthetic oligonucleotide
ggaaaacuaccuggaccag

SEQ ID NO: 142180 - RNA, 19 nt, Artificial Sequence
  Description of Artificial Sequence: Synthetic oligonucleotide
aaccucucaugcagacaca

SEQ ID NO: 142181 - RNA, 19 nt, Artificial Sequence
  Description of Artificial Sequence: Synthetic oligonucleotide
gagcucgcucuuucuuuuc

SEQ ID NO: 142182 - RNA, 19 nt, Artificial Sequence
  Description of Artificial Sequence: Synthetic oligonucleotide
gggcacagucacaugauga

SEQ ID NO: 142183 - RNA, 19 nt, Artificial Sequence
  Description of Artificial Sequence: Synthetic oligonucleotide
aguugagggccaagcaauu

SEQ ID NO: 142184 - RNA, 19 nt, Artificial Sequence
  Description of Artificial Sequence: Synthetic oligonucleotide
ccuaucccugucaguggcc

SEQ ID NO: 142185 - RNA, 19 nt, Artificial Sequence
  Description of Artificial Sequence: Synthetic oligonucleotide
cagaagcguuaaugacgug

SEQ ID NO: 142186 - RNA, 19 nt, Artificial Sequence
  Description of Artificial Sequence: Synthetic oligonucleotide
agcccguuugagagcagcu

SEQ ID NO: 142187 - RNA, 19 nt, Artificial Sequence
  Description of Artificial Sequence: Synthetic oligonucleotide
cacuuacuaccgcugccaa

SEQ ID NO: 142188 - RNA, 19 nt, Artificial Sequence
  Description of Artificial Sequence: Synthetic oligonucleotide
caggacuagaaaacucaau

SEQ ID NO: 142189 - RNA, 19 nt, Artificial Sequence
  Description of Artificial Sequence: Synthetic oligonucleotide
acacugcgucaccugcaau

SEQ ID NO: 142190 - RNA, 19 nt, Artificial Sequence
  Description of Artificial Sequence: Synthetic oligonucleotide
ggccugacuccuucagaac

SEQ ID NO: 142191 - RNA, 19 nt, Artificial Sequence
  Description of Artificial Sequence: Synthetic oligonucleotide
gaaaugcccgggagcaccu

SEQ ID NO: 142192 - RNA, 19 nt, Artificial Sequence
  Description of Artificial Sequence: Synthetic oligonucleotide
augguaacucugagcccca

SEQ ID NO: 142193 - RNA, 19 nt, Artificial Sequence
  Description of Artificial Sequence: Synthetic oligonucleotide
ccauuacguugcaucguuc

SEQ ID NO: 142194 - RNA, 19 nt, Artificial Sequence
  Description of Artificial Sequence: Synthetic oligonucleotide
agcucaccaguaagugagu

SEQ ID NO: 142195 - RNA, 19 nt, Artificial Sequence
  Description of Artificial Sequence: Synthetic oligonucleotide
gcacguuggcuucgaagga

SEQ ID NO: 142196 - RNA, 19 nt, Artificial Sequence
  Description of Artificial Sequence: Synthetic oligonucleotide
gcugagcauuauucagaca

SEQ ID NO: 142197 - RNA, 19 nt, Artificial Sequence
  Description of Artificial Sequence: Synthetic oligonucleotide
guggaacauaagaugucau

SEQ ID NO: 142198 - RNA, 19 nt, Artificial Sequence
  Description of Artificial Sequence: Synthetic oligonucleotide
gcccguuugagagcagcug

SEQ ID NO: 142199 - RNA, 19 nt, Artificial Sequence
  Description of Artificial Sequence: Synthetic oligonucleotide
caacaacacugcgucaccu

SEQ ID NO: 142200 - RNA, 19 nt, Artificial Sequence
  Description of Artificial Sequence: Synthetic oligonucleotide
ggccaagcaauucuauguu

SEQ ID NO: 142201 - RNA, 19 nt, Artificial Sequence
  Description of Artificial Sequence: Synthetic oligonucleotide
caucuaagaugcagugcuu

SEQ ID NO: 142202 - RNA, 19 nt, Artificial Sequence
  Description of Artificial Sequence: Synthetic oligonucleotide
cggcgggaggaaaacuacc

SEQ ID NO: 142203 - RNA, 19 nt, Artificial Sequence
  Description of Artificial Sequence: Synthetic oligonucleotide
cccaguugagggccaagca

SEQ ID NO: 142204 - RNA, 19 nt, Artificial Sequence
  Description of Artificial Sequence: Synthetic oligonucleotide
ccugacauacaaggaccuc

SEQ ID NO: 142205 - RNA, 19 nt, Artificial Sequence
  Description of Artificial Sequence: Synthetic oligonucleotide
gcggcgggaggaaaacuac

SEQ ID NO: 142206 - RNA, 19 nt, Artificial Sequence
  Description of Artificial Sequence: Synthetic oligonucleotide
cccgguuagacucaaucau

SEQ ID NO: 142207 - RNA, 19 nt, Artificial Sequence
  Description of Artificial Sequence: Synthetic oligonucleotide
gcuagcgcgugggaaaggu

SEQ ID NO: 142208 - RNA, 19 nt, Artificial Sequence
  Description of Artificial Sequence: Synthetic oligonucleotide
ucccugucaguggccccau

SEQ ID NO: 142209 - RNA, 19 nt, Artificial Sequence
  Description of Artificial Sequence: Synthetic oligonucleotide
cccaaauguagugcccaga

SEQ ID NO: 142210 - RNA, 19 nt, Artificial Sequence
  Description of Artificial Sequence: Synthetic oligonucleotide
cgaguccgaucauaaucaa

SEQ ID NO: 142211 - RNA, 19 nt, Artificial Sequence
  Description of Artificial Sequence: Synthetic oligonucleotide
cuaccgcugccaaccccuu

SEQ ID NO: 142212 - RNA, 19 nt, Artificial Sequence
  Description of Artificial Sequence: Synthetic oligonucleotide
ggcuucgaaggagcacagu

SEQ ID NO: 142213 - RNA, 19 nt, Artificial Sequence
  Description of Artificial Sequence: Synthetic oligonucleotide
ccggagcaucauuagccau

SEQ ID NO: 142214 - RNA, 19 nt, Artificial Sequence
  Description of Artificial Sequence: Synthetic oligonucleotide
gcacuggcggcgggaggaa

SEQ ID NO: 142215 - RNA, 19 nt, Artificial Sequence
  Description of Artificial Sequence: Synthetic oligonucleotide
aauaugaguaacuauaaca

SEQ ID NO: 142216 - RNA, 19 nt, Artificial Sequence
  Description of Artificial Sequence: Synthetic oligonucleotide
aaaucaacuaaguauguag

SEQ ID NO: 142217 - RNA, 19 nt, Artificial Sequence
  Description of Artificial Sequence: Synthetic oligonucleotide
aaagaaacacaccaauugg

SEQ ID NO: 142218 - RNA, 19 nt, Artificial Sequence
  Description of Artificial Sequence: Synthetic oligonucleotide
uugauuauguuuaauauga

SEQ ID NO: 142219 - RNA, 19 nt, Artificial Sequence
  Description of Artificial Sequence: Synthetic oligonucleotide
aauguauaaggguuggaac

SEQ ID NO: 142220 - RNA, 19 nt, Artificial Sequence
  Description of Artificial Sequence: Synthetic oligonucleotide
guauauagaacauccaccg

SEQ ID NO: 142221 - RNA, 19 nt, Artificial Sequence
  Description of Artificial Sequence: Synthetic oligonucleotide
aagaggaucuuauaguaag

SEQ ID NO: 142222 - RNA, 19 nt, Artificial Sequence
  Description of Artificial Sequence: Synthetic oligonucleotide
accguaauuggauaaagcg

SEQ ID NO: 142223 - RNA, 19 nt, Artificial Sequence
  Description of Artificial Sequence: Synthetic oligonucleotide
uuccuaauaacauuuagac

SEQ ID NO: 142224 - RNA, 19 nt, Artificial Sequence
  Description of Artificial Sequence: Synthetic oligonucleotide
uuuagugugcaacauccgg

SEQ ID NO: 142225 - RNA, 19 nt, Artificial Sequence
  Description of Artificial Sequence: Synthetic oligonucleotide
uguacuucuaagauuaggu

SEQ ID NO: 142226 - RNA, 19 nt, Artificial Sequence
  Description of Artificial Sequence: Synthetic oligonucleotide
aauggaagaacuucguggu

SEQ ID NO: 142227 - RNA, 19 nt, Artificial Sequence
  Description of Artificial Sequence: Synthetic oligonucleotide
ucacauagcauauuguccc

SEQ ID NO: 142228 - RNA, 19 nt, Artificial Sequence
  Description of Artificial Sequence: Synthetic oligonucleotide
uaauggguaagcaacaagu

SEQ ID NO: 142229 - RNA, 19 nt, Artificial Sequence
  Description of Artificial Sequence: Synthetic oligonucleotide
auaagguuuaguguagucc

SEQ ID NO: 142230 - RNA, 19 nt, Artificial Sequence
  Description of Artificial Sequence: Synthetic oligonucleotide
uuacuuguagaauaguuga

SEQ ID NO: 142231 - RNA, 19 nt, Artificial Sequence
  Description of Artificial Sequence: Synthetic oligonucleotide
gagccugacgcuuaaaugg

SEQ ID NO: 142232 - RNA, 19 nt, Artificial Sequence
  Description of Artificial Sequence: Synthetic oligonucleotide
ucaaccauugcuuguaucc

SEQ ID NO: 142233 - RNA, 19 nt, Artificial Sequence
  Description of Artificial Sequence: Synthetic oligonucleotide
uuuauagcuacuuguacca

SEQ ID NO: 142234 - RNA, 19 nt, Artificial Sequence
  Description of Artificial Sequence: Synthetic oligonucleotide
uuuaguguagucccaacug

SEQ ID NO: 142235 - RNA, 19 nt, Artificial Sequence
  Description of Artificial Sequence: Synthetic oligonucleotide
aauaagguuuaguguaguc

SEQ ID NO: 142236 - RNA, 19 nt, Artificial Sequence
  Description of Artificial Sequence: Synthetic oligonucleotide
uauuaagccuguuagaaau

SEQ ID NO: 142237 - RNA, 19 nt, Artificial Sequence
  Description of Artificial Sequence: Synthetic oligonucleotide
aaccauuacaacggaaccc

SEQ ID NO: 142238 - RNA, 19 nt, Artificial Sequence
  Description of Artificial Sequence: Synthetic oligonucleotide
uggauuauauucuuagaug

SEQ ID NO: 142239 - RNA, 19 nt, Artificial Sequence
  Description of Artificial Sequence: Synthetic oligonucleotide
uuugagcugauguaauccg

SEQ ID NO: 142240 - RNA, 19 nt, Artificial Sequence
  Description of Artificial Sequence: Synthetic oligonucleotide
ucaaucuaucuauuguagg

SEQ ID NO: 142241 - RNA, 19 nt, Artificial Sequence
  Description of Artificial Sequence: Synthetic oligonucleotide
uccuaauaacauuuagacg

SEQ ID NO: 142242 - RNA, 19 nt, Artificial Sequence
  Description of Artificial Sequence: Synthetic oligonucleotide
ccuaauaacauuuagacga

SEQ ID NO: 142243 - RNA, 19 nt, Artificial Sequence
  Description of Artificial Sequence: Synthetic oligonucleotide
uuauuaaggugugugacag

SEQ ID NO: 142244 - RNA, 19 nt, Artificial Sequence
  Description of Artificial Sequence: Synthetic oligonucleotide
ggauuauauucuuagaugc

SEQ ID NO: 142245 - RNA, 19 nt, Artificial Sequence
  Description of Artificial Sequence: Synthetic oligonucleotide
acauuaugguauucuaucg

SEQ ID NO: 142246 - RNA, 19 nt, Artificial Sequence
  Description of Artificial Sequence: Synthetic oligonucleotide
uucaucacccauuucuacg

SEQ ID NO: 142247 - RNA, 19 nt, Artificial Sequence
  Description of Artificial Sequence: Synthetic oligonucleotide
uacuauacaaguguguuug

SEQ ID NO: 142248 - RNA, 19 nt, Artificial Sequence
  Description of Artificial Sequence: Synthetic oligonucleotide
auuacaacggaacccgagg

SEQ ID NO: 142249 - RNA, 19 nt, Artificial Sequence
  Description of Artificial Sequence: Synthetic oligonucleotide
cuaaccauuacaacggaac

SEQ ID NO: 142250 - RNA, 19 nt, Artificial Sequence
  Description of Artificial Sequence: Synthetic oligonucleotide
gaccgugugauccauagcc

SEQ ID NO: 142251 - RNA, 19 nt, Artificial Sequence
  Description of Artificial Sequence: Synthetic oligonucleotide
aaucaaucuaucuauugua

SEQ ID NO: 142252 - RNA, 19 nt, Artificial Sequence
  Description of Artificial Sequence: Synthetic oligonucleotide
aacuucguggucauuacac

SEQ ID NO: 142253 - RNA, 19 nt, Artificial Sequence
  Description of Artificial Sequence: Synthetic oligonucleotide
uauauaucagcuccauuga

SEQ ID NO: 142254 - RNA, 19 nt, Artificial Sequence
  Description of Artificial Sequence: Synthetic oligonucleotide
acauccggcauauauauca

SEQ ID NO: 142255 - RNA, 19 nt, Artificial Sequence
  Description of Artificial Sequence: Synthetic oligonucleotide
uaucguaaggugaaaacaa

SEQ ID NO: 142256 - RNA, 19 nt, Artificial Sequence
  Description of Artificial Sequence: Synthetic oligonucleotide
aacugaauguuguuuagau

SEQ ID NO: 142257 - RNA, 19 nt, Artificial Sequence
  Description of Artificial Sequence: Synthetic oligonucleotide
accaauuggguuugagugc

SEQ ID NO: 142258 - RNA, 19 nt, Artificial Sequence
  Description of Artificial Sequence: Synthetic oligonucleotide
auugagugcaguaagagcu

SEQ ID NO: 142259 - RNA, 19 nt, Artificial Sequence
  Description of Artificial Sequence: Synthetic oligonucleotide
aacaauucauuuugagcug

SEQ ID NO: 142260 - RNA, 19 nt, Artificial Sequence
  Description of Artificial Sequence: Synthetic oligonucleotide
uuagugugcaacauccggc

SEQ ID NO: 142261 - RNA, 19 nt, Artificial Sequence
  Description of Artificial Sequence: Synthetic oligonucleotide
uauucuaucguaaggugaa

SEQ ID NO: 142262 - RNA, 19 nt, Artificial Sequence
  Description of Artificial Sequence: Synthetic oligonucleotide
auaacauuuagacgaguug

SEQ ID NO: 142263 - RNA, 19 nt, Artificial Sequence
  Description of Artificial Sequence: Synthetic oligonucleotide
uguagaauaguugaagaaa

SEQ ID NO: 142264 - RNA, 19 nt, Artificial Sequence
  Description of Artificial Sequence: Synthetic oligonucleotide
uaaccauuacaacggaacc

SEQ ID NO: 142265 - RNA, 19 nt, Artificial Sequence
  Description of Artificial Sequence: Synthetic oligonucleotide
agaguuugacauuauuaag

SEQ ID NO: 142266 - RNA, 19 nt, Artificial Sequence
  Description of Artificial Sequence: Synthetic oligonucleotide
ucuauuaagccuguuagaa

SEQ ID NO: 142267 - RNA, 19 nt, Artificial Sequence
  Description of Artificial Sequence: Synthetic oligonucleotide
aucacauagcauauugucc

SEQ ID NO: 142268 - RNA, 19 nt, Artificial Sequence
  Description of Artificial Sequence: Synthetic oligonucleotide
aagcuuuagcaucgaacac

SEQ ID NO: 142269 - RNA, 19 nt, Artificial Sequence
  Description of Artificial Sequence: Synthetic oligonucleotide
uaauuagcacuaagaaugc

SEQ ID NO: 142270 - RNA, 19 nt, Artificial Sequence
  Description of Artificial Sequence: Synthetic oligonucleotide
caccaauuggguuugagug

SEQ ID NO: 142271 - RNA, 19 nt, Artificial Sequence
  Description of Artificial Sequence: Synthetic oligonucleotide
ucuaagauuaggucacaug

SEQ ID NO: 142272 - RNA, 19 nt, Artificial Sequence
  Description of Artificial Sequence: Synthetic oligonucleotide
augguauucuaucguaagg

SEQ ID NO: 142273 - RNA, 19 nt, Artificial Sequence
  Description of Artificial Sequence: Synthetic oligonucleotide
ucuguaacgacuugguaaa

SEQ ID NO: 142274 - RNA, 19 nt, Artificial Sequence
  Description of Artificial Sequence: Synthetic oligonucleotide
uaauccgcuaaccauuaca

SEQ ID NO: 142275 - RNA, 19 nt, Artificial Sequence
  Description of Artificial Sequence: Synthetic oligonucleotide
uuuuagugugcaacauccg

SEQ ID NO: 142276 - RNA, 19 nt, Artificial Sequence
  Description of Artificial Sequence: Synthetic oligonucleotide
guaacgacuugguaaaggc

SEQ ID NO: 142277 - RNA, 19 nt, Artificial Sequence
  Description of Artificial Sequence: Synthetic oligonucleotide
ugcauacuauacaagugug

SEQ ID NO: 142278 - RNA, 19 nt, Artificial Sequence
  Description of Artificial Sequence: Synthetic oligonucleotide
acgaagaagggugaucucc

SEQ ID NO: 142279 - RNA, 19 nt, Artificial Sequence
  Description of Artificial Sequence: Synthetic oligonucleotide
ucuaucguaaggugaaaac

SEQ ID NO: 142280 - RNA, 19 nt, Artificial Sequence
  Description of Artificial Sequence: Synthetic oligonucleotide
uaauaugaguaacuauaac

SEQ ID NO: 142281 - RNA, 19 nt, Artificial Sequence
  Description of Artificial Sequence: Synthetic oligonucleotide
agaagcuuuagcaucgaac

SEQ ID NO: 142282 - RNA, 19 nt, Artificial Sequence
  Description of Artificial Sequence: Synthetic oligonucleotide
uguaacgacuugguaaagg

SEQ ID NO: 142283 - RNA, 19 nt, Artificial Sequence
  Description of Artificial Sequence: Synthetic oligonucleotide
uaggucacaugcaaaauaa

SEQ ID NO: 142284 - RNA, 19 nt, Artificial Sequence
  Description of Artificial Sequence: Synthetic oligonucleotide
uccggcauauauaucagcu

SEQ ID NO: 142285 - RNA, 19 nt, Artificial Sequence
  Description of Artificial Sequence: Synthetic oligonucleotide
accauuacaacggaacccg

SEQ ID NO: 142286 - RNA, 19 nt, Artificial Sequence
  Description of Artificial Sequence: Synthetic oligonucleotide
auugagugcugcuuuagcu

SEQ ID NO: 142287 - RNA, 19 nt, Artificial Sequence
  Description of Artificial Sequence: Synthetic oligonucleotide
auaugaguaacuauaacau

SEQ ID NO: 142288 - RNA, 19 nt, Artificial Sequence
  Description of Artificial Sequence: Synthetic oligonucleotide
ugaugacuguuuaaaagaa

SEQ ID NO: 142289 - RNA, 19 nt, Artificial Sequence
  Description of Artificial Sequence: Synthetic oligonucleotide
ugggacucguaucugguag

SEQ ID NO: 142290 - RNA, 19 nt, Artificial Sequence
  Description of Artificial Sequence: Synthetic oligonucleotide
gucuaaacgaagaagggug

SEQ ID NO: 142291 - RNA, 19 nt, Artificial Sequence
  Description of Artificial Sequence: Synthetic oligonucleotide
uuauaguaagcaaggcaac

SEQ ID NO: 142292 - RNA, 19 nt, Artificial Sequence
  Description of Artificial Sequence: Synthetic oligonucleotide
ugguguugagacaaauagc

SEQ ID NO: 142293 - RNA, 19 nt, Artificial Sequence
  Description of Artificial Sequence: Synthetic oligonucleotide
ugagugcauacuauacaag

SEQ ID NO: 142294 - RNA, 19 nt, Artificial Sequence
  Description of Artificial Sequence: Synthetic oligonucleotide
uuguagaauaguugaagaa

SEQ ID NO: 142295 - RNA, 19 nt, Artificial Sequence
  Description of Artificial Sequence: Synthetic oligonucleotide
agacaaucuacauuauggu

SEQ ID NO: 142296 - RNA, 19 nt, Artificial Sequence
  Description of Artificial Sequence: Synthetic oligonucleotide
agagcccucgaacaugaac

SEQ ID NO: 142297 - RNA, 19 nt, Artificial Sequence
  Description of Artificial Sequence: Synthetic oligonucleotide
aauaacauuuagacgaguu

SEQ ID NO: 142298 - RNA, 19 nt, Artificial Sequence
  Description of Artificial Sequence: Synthetic oligonucleotide
uguauaaggguuggaacca

SEQ ID NO: 142299 - RNA, 19 nt, Artificial Sequence
  Description of Artificial Sequence: Synthetic oligonucleotide
acauuauaauaaugcagca

SEQ ID NO: 142300 - RNA, 19 nt, Artificial Sequence
  Description of Artificial Sequence: Synthetic oligonucleotide
uugcauuuccacuccaaca

SEQ ID NO: 142301 - RNA, 19 nt, Artificial Sequence
  Description of Artificial Sequence: Synthetic oligonucleotide
uuaugguauucuaucguaa

SEQ ID NO: 142302 - RNA, 19 nt, Artificial Sequence
  Description of Artificial Sequence: Synthetic oligonucleotide
gcggauucugaauagagag

SEQ ID NO: 142303 - RNA, 19 nt, Artificial Sequence
  Description of Artificial Sequence: Synthetic oligonucleotide
ucuacgagugcugugccag

SEQ ID NO: 142304 - RNA, 19 nt, Artificial Sequence
  Description of Artificial Sequence: Synthetic oligonucleotide
agcuacuuguaccauccuc

SEQ ID NO: 142305 - RNA, 19 nt, Artificial Sequence
  Description of Artificial Sequence: Synthetic oligonucleotide
ucguaucugguagugauug

SEQ ID NO: 142306 - RNA, 19 nt, Artificial Sequence
  Description of Artificial Sequence: Synthetic oligonucleotide
caaacucaaccauugcuug

SEQ ID NO: 142307 - RNA, 19 nt, Artificial Sequence
  Description of Artificial Sequence: Synthetic oligonucleotide
auuaugguauucuaucgua

SEQ ID NO: 142308 - RNA, 19 nt, Artificial Sequence
  Description of Artificial Sequence: Synthetic oligonucleotide
auucuaacaugcucuucuc

SEQ ID NO: 142309 - RNA, 19 nt, Artificial Sequence
  Description of Artificial Sequence: Synthetic oligonucleotide
uuacucauugcaaaaucuu

SEQ ID NO: 142310 - RNA, 19 nt, Artificial Sequence
  Description of Artificial Sequence: Synthetic oligonucleotide
ugucuaaacgaagaagggu

SEQ ID NO: 142311 - RNA, 19 nt, Artificial Sequence
  Description of Artificial Sequence: Synthetic oligonucleotide
guaauggguaagcaacaag

SEQ ID NO: 142312 - RNA, 19 nt, Artificial Sequence
  Description of Artificial Sequence: Synthetic oligonucleotide
acaacggaacccgagggac

SEQ ID NO: 142313 - RNA, 19 nt, Artificial Sequence
  Description of Artificial Sequence: Synthetic oligonucleotide
uggauaaagcggauucuga

SEQ ID NO: 142314 - RNA, 19 nt, Artificial Sequence
  Description of Artificial Sequence: Synthetic oligonucleotide
aucaaucuaucuauuguag

SEQ ID NO: 142315 - RNA, 19 nt, Artificial Sequence
  Description of Artificial Sequence: Synthetic oligonucleotide
caucuauggaaccagauua

SEQ ID NO: 142316 - RNA, 19 nt, Artificial Sequence
  Description of Artificial Sequence: Synthetic oligonucleotide
uucuuagaugcuuggccag

SEQ ID NO: 142317 - RNA, 19 nt, Artificial Sequence
  Description of Artificial Sequence: Synthetic oligonucleotide
ggggacauuauaauaaugc

SEQ ID NO: 142318 - RNA, 19 nt, Artificial Sequence
  Description of Artificial Sequence: Synthetic oligonucleotide
ggacauuauaauaaugcag

SEQ ID NO: 142319 - RNA, 19 nt, Artificial Sequence
  Description of Artificial Sequence: Synthetic oligonucleotide
agagccugacgcuuaaaug

SEQ ID NO: 142320 - RNA, 19 nt, Artificial Sequence
  Description of Artificial Sequence: Synthetic oligonucleotide
uaacgacuugguaaaggca

SEQ ID NO: 142321 - RNA, 19 nt, Artificial Sequence
  Description of Artificial Sequence: Synthetic oligonucleotide
aaccauugcuuguauccca

SEQ ID NO: 142322 - RNA, 19 nt, Artificial Sequence
  Description of Artificial Sequence: Synthetic oligonucleotide
ucagaugucgccgaucggu

SEQ ID NO: 142323 - RNA, 19 nt, Artificial Sequence
  Description of Artificial Sequence: Synthetic oligonucleotide
cucggcgcgggucagaccg

SEQ ID NO: 142324 - RNA, 19 nt, Artificial Sequence
  Description of Artificial Sequence: Synthetic oligonucleotide
cauucaaucaaucuaucua

SEQ ID NO: 142325 - RNA, 19 nt, Artificial Sequence
  Description of Artificial Sequence: Synthetic oligonucleotide
uaucugguagugauugagu

SEQ ID NO: 142326 - RNA, 19 nt, Artificial Sequence
  Description of Artificial Sequence: Synthetic oligonucleotide
ucuaucuauuguaggaauu

SEQ ID NO: 142327 - RNA, 19 nt, Artificial Sequence
  Description of Artificial Sequence: Synthetic oligonucleotide
cauuacaacggaacccgag

SEQ ID NO: 142328 - RNA, 19 nt, Artificial Sequence
  Description of Artificial Sequence: Synthetic oligonucleotide
agaugucgccgaucggucc

SEQ ID NO: 142329 - RNA, 19 nt, Artificial Sequence
  Description of Artificial Sequence: Synthetic oligonucleotide
uccuccagcucaaauauuu

SEQ ID NO: 142330 - RNA, 19 nt, Artificial Sequence
  Description of Artificial Sequence: Synthetic oligonucleotide
ucguggucauuacacaacu

SEQ ID NO: 142331 - RNA, 19 nt, Artificial Sequence
  Description of Artificial Sequence: Synthetic oligonucleotide
auccggcauauauaucagc

SEQ ID NO: 142332 - RNA, 19 nt, Artificial Sequence
  Description of Artificial Sequence: Synthetic oligonucleotide
aacauuagaucaaccauuu

SEQ ID NO: 142333 - RNA, 19 nt, Artificial Sequence
  Description of Artificial Sequence: Synthetic oligonucleotide
cauuugcagauaauuagca

SEQ ID NO: 142334 - RNA, 19 nt, Artificial Sequence
  Description of Artificial Sequence: Synthetic oligonucleotide
ucguaaggugaaaacaaua

SEQ ID NO: 142335 - RNA, 19 nt, Artificial Sequence
  Description of Artificial Sequence: Synthetic oligonucleotide
aaauaagguuuaguguagu

SEQ ID NO: 142336 - RNA, 19 nt, Artificial Sequence
  Description of Artificial Sequence: Synthetic oligonucleotide
aacuccacuagagccugac

SEQ ID NO: 142337 - RNA, 19 nt, Artificial Sequence
  Description of Artificial Sequence: Synthetic oligonucleotide
acucguaucugguagugau

SEQ ID NO: 142338 - RNA, 19 nt, Artificial Sequence
  Description of Artificial Sequence: Synthetic oligonucleotide
ugaucucccagaauggcuu

SEQ ID NO: 142339 - RNA, 19 nt, Artificial Sequence
  Description of Artificial Sequence: Synthetic oligonucleotide
ugacgcuuaaauggcauca

SEQ ID NO: 142340 - RNA, 19 nt, Artificial Sequence
  Description of Artificial Sequence: Synthetic oligonucleotide
ccguaauuggauaaagcgg

SEQ ID NO: 142341 - RNA, 19 nt, Artificial Sequence
  Description of Artificial Sequence: Synthetic oligonucleotide
gucauugucauuccuaaua

SEQ ID NO: 142342 - RNA, 19 nt, Artificial Sequence
  Description of Artificial Sequence: Synthetic oligonucleotide
caucaugucuaaacgaaga

SEQ ID NO: 142343 - RNA, 19 nt, Artificial Sequence
  Description of Artificial Sequence: Synthetic oligonucleotide
uguaauccgcuaaccauua

SEQ ID NO: 142344 - RNA, 19 nt, Artificial Sequence
  Description of Artificial Sequence: Synthetic oligonucleotide
augucuaaacgaagaaggg

SEQ ID NO: 142345 - RNA, 19 nt, Artificial Sequence
  Description of Artificial Sequence: Synthetic oligonucleotide
uuuugggaggucugacaag

SEQ ID NO: 142346 - RNA, 19 nt, Artificial Sequence
  Description of Artificial Sequence: Synthetic oligonucleotide
gagugcauacuauacaagu

SEQ ID NO: 142347 - RNA, 19 nt, Artificial Sequence
  Description of Artificial Sequence: Synthetic oligonucleotide
uuucuacgagugcugugcc

SEQ ID NO: 142348 - RNA, 19 nt, Artificial Sequence
  Description of Artificial Sequence: Synthetic oligonucleotide
uaucuauuguaggaauucu

SEQ ID NO: 142349 - RNA, 19 nt, Artificial Sequence
  Description of Artificial Sequence: Synthetic oligonucleotide
aacacaccaauuggguuug

SEQ ID NO: 142350 - RNA, 19 nt, Artificial Sequence
  Description of Artificial Sequence: Synthetic oligonucleotide
acuuguaaagcgauuauuu

SEQ ID NO: 142351 - RNA, 19 nt, Artificial Sequence
  Description of Artificial Sequence: Synthetic oligonucleotide
acuaaguauguaguucuug

SEQ ID NO: 142352 - RNA, 19 nt, Artificial Sequence
  Description of Artificial Sequence: Synthetic oligonucleotide
gauguaauccgcuaaccau

SEQ ID NO: 142353 - RNA, 19 nt, Artificial Sequence
  Description of Artificial Sequence: Synthetic oligonucleotide
uagagccugacgcuuaaau

SEQ ID NO: 142354 - RNA, 19 nt, Artificial Sequence
  Description of Artificial Sequence: Synthetic oligonucleotide
aucaacuaaguauguaguu

SEQ ID NO: 142355 - RNA, 19 nt, Artificial Sequence
  Description of Artificial Sequence: Synthetic oligonucleotide
gaugucgccgaucgguccc

SEQ ID NO: 142356 - RNA, 19 nt, Artificial Sequence
  Description of Artificial Sequence: Synthetic oligonucleotide
guuugugucuauuaagccu

SEQ ID NO: 142357 - RNA, 19 nt, Artificial Sequence
  Description of Artificial Sequence: Synthetic oligonucleotide
gguauucuaucguaaggug

SEQ ID NO: 142358 - RNA, 19 nt, Artificial Sequence
  Description of Artificial Sequence: Synthetic oligonucleotide
gagcccucgaacaugaaca

SEQ ID NO: 142359 - RNA, 19 nt, Artificial Sequence
  Description of Artificial Sequence: Synthetic oligonucleotide
acgcuuaaauggcaucauc

SEQ ID NO: 142360 - RNA, 19 nt, Artificial Sequence
  Description of Artificial Sequence: Synthetic oligonucleotide
uguuuuggcagaagcuuua

SEQ ID NO: 142361 - RNA, 19 nt, Artificial Sequence
  Description of Artificial Sequence: Synthetic oligonucleotide
uuuaucucccagccagccu

SEQ ID NO: 142362 - RNA, 19 nt, Artificial Sequence
  Description of Artificial Sequence: Synthetic oligonucleotide
aggaucuuauaguaagcaa

SEQ ID NO: 142363 - RNA, 19 nt, Artificial Sequence
  Description of Artificial Sequence: Synthetic oligonucleotide
agccaucaugucuaaacga

SEQ ID NO: 142364 - RNA, 19 nt, Artificial Sequence
  Description of Artificial Sequence: Synthetic oligonucleotide
acacgggcucaucugcagc

SEQ ID NO: 142365 - RNA, 19 nt, Artificial Sequence
  Description of Artificial Sequence: Synthetic oligonucleotide
cuaucguaaggugaaaaca

SEQ ID NO: 142366 - RNA, 19 nt, Artificial Sequence
  Description of Artificial Sequence: Synthetic oligonucleotide
ggauucugaauagagagca

SEQ ID NO: 142367 - RNA, 19 nt, Artificial Sequence
  Description of Artificial Sequence: Synthetic oligonucleotide
gacgaguuggccuugcaua

SEQ ID NO: 142368 - RNA, 19 nt, Artificial Sequence
  Description of Artificial Sequence: Synthetic oligonucleotide
aagccuguuagaaauugaa

SEQ ID NO: 142369 - RNA, 19 nt, Artificial Sequence
  Description of Artificial Sequence: Synthetic oligonucleotide
gcuacuuguaccauccucc

SEQ ID NO: 142370 - RNA, 19 nt, Artificial Sequence
  Description of Artificial Sequence: Synthetic oligonucleotide
guauucuaucguaagguga

SEQ ID NO: 142371 - RNA, 19 nt, Artificial Sequence
  Description of Artificial Sequence: Synthetic oligonucleotide
ucuaucucgucuucccaaa

SEQ ID NO: 142372 - RNA, 19 nt, Artificial Sequence
  Description of Artificial Sequence: Synthetic oligonucleotide
uaucucgucuucccaaaua

SEQ ID NO: 142373 - RNA, 19 nt, Artificial Sequence
  Description of Artificial Sequence: Synthetic oligonucleotide
gggacauuauaauaaugca

SEQ ID NO: 142374 - RNA, 19 nt, Artificial Sequence
  Description of Artificial Sequence: Synthetic oligonucleotide
gauaaagcggauucugaau

SEQ ID NO: 142375 - RNA, 19 nt, Artificial Sequence
  Description of Artificial Sequence: Synthetic oligonucleotide
cugauguaauccgcuaacc

SEQ ID NO: 142376 - RNA, 19 nt, Artificial Sequence
  Description of Artificial Sequence: Synthetic oligonucleotide
ucaaccauuuuagauuauu

SEQ ID NO: 142377 - RNA, 19 nt, Artificial Sequence
  Description of Artificial Sequence: Synthetic oligonucleotide
gauggaucaucaguauuuc

SEQ ID NO: 142378 - RNA, 19 nt, Artificial Sequence
  Description of Artificial Sequence: Synthetic oligonucleotide
gugcauacuauacaagugu

SEQ ID NO: 142379 - RNA, 19 nt, Artificial Sequence
  Description of Artificial Sequence: Synthetic oligonucleotide
uagugauugagugcaguaa

SEQ ID NO: 142380 - RNA, 19 nt, Artificial Sequence
  Description of Artificial Sequence: Synthetic oligonucleotide
cauccggcauauauaucag

SEQ ID NO: 142381 - RNA, 19 nt, Artificial Sequence
  Description of Artificial Sequence: Synthetic oligonucleotide
gguguugagacaaauagcu

SEQ ID NO: 142382 - RNA, 19 nt, Artificial Sequence
  Description of Artificial Sequence: Synthetic oligonucleotide
ggucagaccggccccagcg

SEQ ID NO: 142383 - RNA, 19 nt, Artificial Sequence
  Description of Artificial Sequence: Synthetic oligonucleotide
uacacgggcucaucugcag

SEQ ID NO: 142384 - RNA, 19 nt, Artificial Sequence
  Description of Artificial Sequence: Synthetic oligonucleotide
acccauuucuacgagugcu

SEQ ID NO: 142385 - RNA, 19 nt, Artificial Sequence
  Description of Artificial Sequence: Synthetic oligonucleotide
guaucucuagagcccauuc

SEQ ID NO: 142386 - RNA, 19 nt, Artificial Sequence
  Description of Artificial Sequence: Synthetic oligonucleotide
aacauccggcauauauauc

SEQ ID NO: 142387 - RNA, 19 nt, Artificial Sequence
  Description of Artificial Sequence: Synthetic oligonucleotide
ggcaauaauggaccgugug

SEQ ID NO: 142388 - RNA, 19 nt, Artificial Sequence
  Description of Artificial Sequence: Synthetic oligonucleotide
uccgccgaguagacgaucu

SEQ ID NO: 142389 - RNA, 19 nt, Artificial Sequence
  Description of Artificial Sequence: Synthetic oligonucleotide
cguaauuggauaaagcgga

SEQ ID NO: 142390 - RNA, 19 nt, Artificial Sequence
  Description of Artificial Sequence: Synthetic oligonucleotide
cuauuaagccuguuagaaa

SEQ ID NO: 142391 - RNA, 19 nt, Artificial Sequence
  Description of Artificial Sequence: Synthetic oligonucleotide
gcaauaauggaccguguga

SEQ ID NO: 142392 - RNA, 19 nt, Artificial Sequence
  Description of Artificial Sequence: Synthetic oligonucleotide
ccucagaugucgccgaucg

SEQ ID NO: 142393 - RNA, 19 nt, Artificial Sequence
  Description of Artificial Sequence: Synthetic oligonucleotide
acgaguuggccuugcauau

SEQ ID NO: 142394 - RNA, 19 nt, Artificial Sequence
  Description of Artificial Sequence: Synthetic oligonucleotide
gaugacuguuuaaaagaaa

SEQ ID NO: 142395 - RNA, 19 nt, Artificial Sequence
  Description of Artificial Sequence: Synthetic oligonucleotide
guuuaguguagucccaacu

SEQ ID NO: 142396 - RNA, 19 nt, Artificial Sequence
  Description of Artificial Sequence: Synthetic oligonucleotide
cauuuugggaggucugaca

SEQ ID NO: 142397 - RNA, 19 nt, Artificial Sequence
  Description of Artificial Sequence: Synthetic oligonucleotide
uggcucucgaacucgcggu

SEQ ID NO: 142398 - RNA, 19 nt, Artificial Sequence
  Description of Artificial Sequence: Synthetic oligonucleotide
cggcauauauaucagcucc

SEQ ID NO: 142399 - RNA, 19 nt, Artificial Sequence
  Description of Artificial Sequence: Synthetic oligonucleotide
uaauuggauaaagcggauu

SEQ ID NO: 142400 - RNA, 19 nt, Artificial Sequence
  Description of Artificial Sequence: Synthetic oligonucleotide
aggcaacauuagaucaacc

SEQ ID NO: 142401 - RNA, 19 nt, Artificial Sequence
  Description of Artificial Sequence: Synthetic oligonucleotide
acauccaccguaauuggau

SEQ ID NO: 142402 - RNA, 19 nt, Artificial Sequence
  Description of Artificial Sequence: Synthetic oligonucleotide
guagugauugagugcagua

SEQ ID NO: 142403 - RNA, 19 nt, Artificial Sequence
  Description of Artificial Sequence: Synthetic oligonucleotide
ggauaaagcggauucugaa

SEQ ID NO: 142404 - RNA, 19 nt, Artificial Sequence
  Description of Artificial Sequence: Synthetic oligonucleotide
auguaauccgcuaaccauu

SEQ ID NO: 142405 - RNA, 19 nt, Artificial Sequence
  Description of Artificial Sequence: Synthetic oligonucleotide
ggccgugugauucuuuuac

SEQ ID NO: 142406 - RNA, 19 nt, Artificial Sequence
  Description of Artificial Sequence: Synthetic oligonucleotide
ugguagugauugagugcag

SEQ ID NO: 142407 - RNA, 19 nt, Artificial Sequence
  Description of Artificial Sequence: Synthetic oligonucleotide
auccaccguaauuggauaa

SEQ ID NO: 142408 - RNA, 19 nt, Artificial Sequence
  Description of Artificial Sequence: Synthetic oligonucleotide
caacauuagaucaaccauu

SEQ ID NO: 142409 - RNA, 19 nt, Artificial Sequence
  Description of Artificial Sequence: Synthetic oligonucleotide
augcauguaagaggaagaa

SEQ ID NO: 142410 - RNA, 19 nt, Artificial Sequence
  Description of Artificial Sequence: Synthetic oligonucleotide
cugggcacaaaggacugac

SEQ ID NO: 142411 - RNA, 19 nt, Artificial Sequence
  Description of Artificial Sequence: Synthetic oligonucleotide
guaaggugaaaacaauauu

SEQ ID NO: 142412 - RNA, 19 nt, Artificial Sequence
  Description of Artificial Sequence: Synthetic oligonucleotide
ccaucaugucuaaacgaag

SEQ ID NO: 142413 - RNA, 19 nt, Artificial Sequence
  Description of Artificial Sequence: Synthetic oligonucleotide
cuacgagugcugugccagg

SEQ ID NO: 142414 - RNA, 19 nt, Artificial Sequence
  Description of Artificial Sequence: Synthetic oligonucleotide
agcggauucugaauagaga

SEQ ID NO: 142415 - RNA, 19 nt, Artificial Sequence
  Description of Artificial Sequence: Synthetic oligonucleotide
gaacccgagggacuuccuc

SEQ ID NO: 142416 - RNA, 19 nt, Artificial Sequence
  Description of Artificial Sequence: Synthetic oligonucleotide
uuauagcuacuuguaccau

SEQ ID NO: 142417 - RNA, 19 nt, Artificial Sequence
  Description of Artificial Sequence: Synthetic oligonucleotide
cagaugucgccgaucgguc

SEQ ID NO: 142418 - RNA, 19 nt, Artificial Sequence
  Description of Artificial Sequence: Synthetic oligonucleotide
ggccagcacuuguaaagcg

SEQ ID NO: 142419 - RNA, 19 nt, Artificial Sequence
  Description of Artificial Sequence: Synthetic oligonucleotide
uacgagugcugugccagga

SEQ ID NO: 142420 - RNA, 19 nt, Artificial Sequence
  Description of Artificial Sequence: Synthetic oligonucleotide
aucguaaggugaaaacaau

SEQ ID NO: 142421 - RNA, 19 nt, Artificial Sequence
  Description of Artificial Sequence: Synthetic oligonucleotide
gcauccguuuugcauuucc

SEQ ID NO: 142422 - RNA, 19 nt, Artificial Sequence
  Description of Artificial Sequence: Synthetic oligonucleotide
aacuaaguauguaguucuu

SEQ ID NO: 142423 - RNA, 19 nt, Artificial Sequence
  Description of Artificial Sequence: Synthetic oligonucleotide
cgugugauucuuuuacuug

SEQ ID NO: 142424 - RNA, 19 nt, Artificial Sequence
  Description of Artificial Sequence: Synthetic oligonucleotide
cacauagcauauuguccca

SEQ ID NO: 142425 - RNA, 19 nt, Artificial Sequence
  Description of Artificial Sequence: Synthetic oligonucleotide
cuucaucaccgucgucgcc

SEQ ID NO: 142426 - RNA, 19 nt, Artificial Sequence
  Description of Artificial Sequence: Synthetic oligonucleotide
cucagaugucgccgaucgg

SEQ ID NO: 142427 - RNA, 19 nt, Artificial Sequence
  Description of Artificial Sequence: Synthetic oligonucleotide
agcccucgaacaugaacaa

SEQ ID NO: 142428 - RNA, 19 nt, Artificial Sequence
  Description of Artificial Sequence: Synthetic oligonucleotide
ggaaccagauuauuauaua

SEQ ID NO: 142429 - RNA, 19 nt, Artificial Sequence
  Description of Artificial Sequence: Synthetic oligonucleotide
guaauccgcuaaccauuac

SEQ ID NO: 142430 - RNA, 19 nt, Artificial Sequence
  Description of Artificial Sequence: Synthetic oligonucleotide
agccuguuagaaauugaaa

SEQ ID NO: 142431 - RNA, 19 nt, Artificial Sequence
  Description of Artificial Sequence: Synthetic oligonucleotide
cuuagaugcuuggccagca

SEQ ID NO: 142432 - RNA, 19 nt, Artificial Sequence
  Description of Artificial Sequence: Synthetic oligonucleotide
agguuuaguguagucccaa

SEQ ID NO: 142433 - RNA, 19 nt, Artificial Sequence
  Description of Artificial Sequence: Synthetic oligonucleotide
augucgccgaucggucccc

SEQ ID NO: 142434 - RNA, 19 nt, Artificial Sequence
  Description of Artificial Sequence: Synthetic oligonucleotide
gagcugauguaauccgcua

SEQ ID NO: 142435 - RNA, 19 nt, Artificial Sequence
  Description of Artificial Sequence: Synthetic oligonucleotide
uuccuggccgugugauucu

SEQ ID NO: 142436 - RNA, 19 nt, Artificial Sequence
  Description of Artificial Sequence: Synthetic oligonucleotide
gguguaucucuagagccca

SEQ ID NO: 142437 - RNA, 19 nt, Artificial Sequence
  Description of Artificial Sequence: Synthetic oligonucleotide
ccgaguagacgaucucucc

SEQ ID NO: 142438 - RNA, 19 nt, Artificial Sequence
  Description of Artificial Sequence: Synthetic oligonucleotide
accgugugauccauagcca

SEQ ID NO: 142439 - RNA, 19 nt, Artificial Sequence
  Description of Artificial Sequence: Synthetic oligonucleotide
cuguaacgacuugguaaag

SEQ ID NO: 142440 - RNA, 19 nt, Artificial Sequence
  Description of Artificial Sequence: Synthetic oligonucleotide
ugucgacccuuuccucuau

SEQ ID NO: 142441 - RNA, 19 nt, Artificial Sequence
  Description of Artificial Sequence: Synthetic oligonucleotide
gccaucaugucuaaacgaa

SEQ ID NO: 142442 - RNA, 19 nt, Artificial Sequence
  Description of Artificial Sequence: Synthetic oligonucleotide
gacucguaucugguaguga

SEQ ID NO: 142443 - RNA, 19 nt, Artificial Sequence
  Description of Artificial Sequence: Synthetic oligonucleotide
ggcauauauaucagcucca

SEQ ID NO: 142444 - RNA, 19 nt, Artificial Sequence
  Description of Artificial Sequence: Synthetic oligonucleotide
cauccaccguaauuggaua

SEQ ID NO: 142445 - RNA, 19 nt, Artificial Sequence
  Description of Artificial Sequence: Synthetic oligonucleotide
gcagccuucgucgccgccg

SEQ ID NO: 142446 - RNA, 19 nt, Artificial Sequence
  Description of Artificial Sequence: Synthetic oligonucleotide
uggccgugugauucuuuua

SEQ ID NO: 142447 - RNA, 19 nt, Artificial Sequence
  Description of Artificial Sequence: Synthetic oligonucleotide
ccggcauauauaucagcuc

SEQ ID NO: 142448 - RNA, 19 nt, Artificial Sequence
  Description of Artificial Sequence: Synthetic oligonucleotide
ucgcuuuccuccgccgagu

SEQ ID NO: 142449 - RNA, 19 nt, Artificial Sequence
  Description of Artificial Sequence: Synthetic oligonucleotide
ccaccguaauuggauaaag

SEQ ID NO: 142450 - RNA, 19 nt, Artificial Sequence
  Description of Artificial Sequence: Synthetic oligonucleotide
acgacuugguaaaggcaau

SEQ ID NO: 142451 - RNA, 19 nt, Artificial Sequence
  Description of Artificial Sequence: Synthetic oligonucleotide
gaggggacgcuucccuuua

SEQ ID NO: 142452 - RNA, 19 nt, Artificial Sequence
  Description of Artificial Sequence: Synthetic oligonucleotide
ggaccgugugauccauagc

SEQ ID NO: 142453 - RNA, 19 nt, Artificial Sequence
  Description of Artificial Sequence: Synthetic oligonucleotide
gucgccgccgccgccgccg

SEQ ID NO: 142454 - RNA, 19 nt, Artificial Sequence
  Description of Artificial Sequence: Synthetic oligonucleotide
gggacgcuucccuuuaucu

SEQ ID NO: 142455 - RNA, 19 nt, Artificial Sequence
  Description of Artificial Sequence: Synthetic oligonucleotide
ugucgccgaucgguccccg

SEQ ID NO: 142456 - RNA, 19 nt, Artificial Sequence
  Description of Artificial Sequence: Synthetic oligonucleotide
gacgggccucagaugucgc

SEQ ID NO: 142457 - RNA, 19 nt, Artificial Sequence
  Description of Artificial Sequence: Synthetic oligonucleotide
gucgacccuuuccucuauc

SEQ ID NO: 142458 - RNA, 19 nt, Artificial Sequence
  Description of Artificial Sequence: Synthetic oligonucleotide
guaauuggauaaagcggau

SEQ ID NO: 142459 - RNA, 19 nt, Artificial Sequence
  Description of Artificial Sequence: Synthetic oligonucleotide
gacgcuuaaauggcaucau

SEQ ID NO: 142460 - RNA, 19 nt, Artificial Sequence
  Description of Artificial Sequence: Synthetic oligonucleotide
gccgaguagacgaucucuc

SEQ ID NO: 142461 - RNA, 19 nt, Artificial Sequence
  Description of Artificial Sequence: Synthetic oligonucleotide
gcgcgggucagaccggccc

SEQ ID NO: 142462 - RNA, 19 nt, Artificial Sequence
  Description of Artificial Sequence: Synthetic oligonucleotide
cuaaacgaagaagggugau

SEQ ID NO: 142463 - RNA, 19 nt, Artificial Sequence
  Description of Artificial Sequence: Synthetic oligonucleotide
gcauacuauacaagugugu

SEQ ID NO: 142464 - RNA, 19 nt, Artificial Sequence
  Description of Artificial Sequence: Synthetic oligonucleotide
acggaacccgagggacuuc

SEQ ID NO: 142465 - RNA, 19 nt, Artificial Sequence
  Description of Artificial Sequence: Synthetic oligonucleotide
gcuaaccauuacaacggaa

SEQ ID NO: 142466 - RNA, 19 nt, Artificial Sequence
  Description of Artificial Sequence: Synthetic oligonucleotide
cacuuguaaagcgauuauu

SEQ ID NO: 142467 - RNA, 19 nt, Artificial Sequence
  Description of Artificial Sequence: Synthetic oligonucleotide
ggggaaacagaaacuuugu

SEQ ID NO: 142468 - RNA, 19 nt, Artificial Sequence
  Description of Artificial Sequence: Synthetic oligonucleotide
agaccggccccagcguccu

SEQ ID NO: 142469 - RNA, 19 nt, Artificial Sequence
  Description of Artificial Sequence: Synthetic oligonucleotide
cuccccgccugaggcgucg

SEQ ID NO: 142470 - RNA, 19 nt, Artificial Sequence
  Description of Artificial Sequence: Synthetic oligonucleotide
guauaaggguuggaaccau

SEQ ID NO: 142471 - RNA, 19 nt, Artificial Sequence
  Description of Artificial Sequence: Synthetic oligonucleotide
ggaaccauuugggacucgu

SEQ ID NO: 142472 - RNA, 19 nt, Artificial Sequence
  Description of Artificial Sequence: Synthetic oligonucleotide
cuggccgugugauucuuuu

SEQ ID NO: 142473 - RNA, 19 nt, Artificial Sequence
  Description of Artificial Sequence: Synthetic oligonucleotide
cucguaucugguagugauu

SEQ ID NO: 142474 - RNA, 19 nt, Artificial Sequence
  Description of Artificial Sequence: Synthetic oligonucleotide
cuaucucgucuucccaaau

SEQ ID NO: 142475 - RNA, 19 nt, Artificial Sequence
  Description of Artificial Sequence: Synthetic oligonucleotide
gcauauauaucagcuccau

SEQ ID NO: 142476 - RNA, 19 nt, Artificial Sequence
  Description of Artificial Sequence: Synthetic oligonucleotide
ccauuacaacggaacccga

SEQ ID NO: 142477 - RNA, 19 nt, Artificial Sequence
  Description of Artificial Sequence: Synthetic oligonucleotide
ccaucuauggaaccagauu
